(19) United States
(12) Patent Application Publication
(10) Pub. No.: US 2023/0298691 A1
(43) Pub. Date: Sep. 21, 2023

(54) DISTRIBUTED GENETIC TESTING SYSTEMS UTILIZING SECURE GATEWAY SYSTEMS AND NEXT-GENERATION SEQUENCING ASSAYS

(71) Applicant: Aspira Women's Health, Trumbull, CT (US)

(72) Inventors: Lesley Northrup, New York, NY (US); Thomas Greco, Monroe, CT (US); Nitin Bhardwaj, Jersey City, NJ (US); Justin DeGrazia, Norwalk, CT (US); Pierre Davidoff, Brooklyn, NY (US)

(21) Appl. No.: 17/652,581

(22) Filed: Feb. 25, 2022

(51) Int. Cl. G16B 20/20; C12N 15/10; C12Q 1/6883; G16B 40/20

(52) U.S. Cl. CPC G16B 20/20; C12N 15/1065; C12Q 1/6883; G16B 40/20; C12Q 1/6869

(57) ABSTRACT

Various embodiments of the present invention introduce techniques for performing genetic screening using a cloud-based genetic testing framework. In some embodiments, a genetic testing server uses a set of oligonucleotide probes for detecting targeted genes based on sample data objects with an oligonucleotide or primer set. To overcome the challenges associated with variability of output data across client devices (e.g., across laboratories) which is a major roadblock to implementing a cloud-based genetic testing framework, various embodiments introduce techniques for validating assays’ with strong baseline metrics to ensure the identification of “user” error vs “assay performance” error, which increases transferability across clients. Moreover, in embodiments, an assay that combines the reagent components with the patient’s genomic DNA (gDNA) in a single tube process, limiting transfer steps and reducing outside contamination is provided.

### SEQUENCE LISTING

[0001] The instant application contains a Sequence Listing which has been submitted electronically in ASCII format and is hereby incorporated by reference in its entirety. Said ASCII copy, created on Feb. 24, 2022, is named 548932seqlisting.TXT and is 13,479,242 bytes in size.

### BACKGROUND

[0002] Genetics is the make-up of who we are as a human species and affects all individuals, regardless of race or ethnicity. Followed by rapid advancements in technology and mapping of the human genome, genetic testing has come to the forefront of clinical management, allowing for the study of human diseases at a fraction of the cost. A new clinical management paradigm exists today, when identifying risk of disease almost always warrants some type of genetic testing.

[0003] Key statistics highlight the importance of implementing genetic screening/testing across standard healthcare clinical management. Seven percent of the general population has a rare genetic condition, many of which are undiagnosed. It has been reported that in 7.9% of patients studied, a pathogenic or likely pathogenic (P/LP) variant was identified, which would have been missed when following the current National Comprehensive Cancer Network (NCCN) guidelines for breast/ovarian cancer testing. Ninety percent of the general population are carriers of an inherited disease. Sixteen percent of individuals carry a moderate risk variant, which may change clinical care. Studies have shown 80% of individuals have been identified with a genetic variant associated with a known pharmacologic response to a drug dose response.

[0004] However, despite these advances in genetic technology, genetic testing remains largely fragmented and expensive. The market for high throughput germline genetic testing is one of the largest growth sectors of laboratory testing in the healthcare industry. Prenatal tests including non-invasive prenatal testing (NIPT) and carrier screening account for the highest percentage of spend over the last 10 years ranging from 33% to 43% of the genetic testing market, followed by hereditary cancer tests at approximately 30%.

[0005] Currently, supporting the internalization of genetic tests requires high investment both from staffing personnel as well as building a complex infrastructure to analyze genetic data at scale. Current solutions involve multiple workflows that lead to increased time, complexity, and overall significant cost. Thus, many labs cannot implement and support multiple or advanced genetic testing due to the high cost involved in building it. This puts barriers in place, optically viewed as daunting with a big capital investment. Therefore, most clinics and/or clinical labs choose to outsource. There remains a need to democratize genetic testing and allow any healthcare provider the capabilities to offer patients an affordable clinical genetic testing option.

[0006] Through applied effort, ingenuity, and innovation, many of these identified problems have been solved by developing solutions that are included in embodiments of the present subject matter, many examples of which are described in detail herein.

### BRIEF SUMMARY

[0007] An embodiment of the invention is a computer-implemented method for generating a report data structure for a genetic testing request that is received from an integrated client device, the computer-implemented method comprising:
[0008] contacting a sample from a subject with an oligonucleotide or primer set, said set comprising at least one oligonucleotide probe or primer pair, wherein the at least one oligonucleotide probe or primer pair is labelled and configured to bind to at least one nucleic acid sequence in the sample;
[0009] amplifying the at least one nucleic acid sequence in the sample so as to generate at least one amplification product;
[0010] sequencing the at least one amplification product using one or more next generation sequencing operations to generate library preparation product sequencing data;
[0011] transmitting the library preparation product sequencing data from the integrated client device to a genetic testing server;
[0012] identifying, based on the library preparation product sequencing data, a sequence data structure and a client identifier for the integrated client device;
[0013] storing the sequence data structure on an encrypted storage framework and in association with the client identifier;
[0014] extracting, from the sequence data structure, a) a raw sequence data object, and b) a sample data object;
[0015] generating a sample data structure comprising the raw sequence data object, and the sample data object;
[0016] generating the report data structure based on the sample data structure; and
[0017] transmitting the report data structure from the genetic testing server to the integrated client device.

[0018] Another embodiment is a kit, comprising
[0019] i) at least one oligonucleotide probe or primer pair, wherein each oligonucleotide probe or primer pair is labelled and configured to amplify in an amplification reaction at least one nucleic acid sequence in a sample; and
[0020] ii) an apparatus configured to programmatically enable the analysis of amplification product sequencing data, the apparatus comprising at least a processor, and a memory associated with the processor having computer coded instructions therein, with the computer coded instructions configured to, when executed by the processor, cause the apparatus to:
   [0021] a. receive, from an integrated client device, amplification product sequencing data;
   [0022] b. identify, based on the amplification product sequencing data, a sequence data structure and a client identifier for the integrated client device;
   [0023] c. store the sequence data structure on an encrypted storage framework and in association with the client identifier;
   [0024] d. extract, from the sequence data structure, a) a carrier testing raw sequence data object or a cancer testing raw sequence data object, and b) a sample data object;
   [0025] e. generate a sample data structure comprising the carrier testing raw sequence data object or the cancer testing raw sequence data object, and the sample data object;
   [0026] f. generate the report data structure based on the sample data structure; and
   [0027] g. transmit the report data structure to the integrated client device.

[0028] Some embodiments are directed to methods, systems, apparatuses, and computer program products for an apparatus configured to enable the analysis of genetic testing raw sequence data via an electronic platform. The apparatus comprises a processor, and a memory associated with the processor having computer coded instructions therein, with the computer coded instructions configured to, when executed by the processor, cause the apparatus to enable the analysis of genetic testing raw sequence data.

### BRIEF DESCRIPTION OF THE SEVERAL VIEWS OF THE DRAWING(S)

[0029] Having thus described the invention in general terms, reference will now be made to the accompanying drawings, which are not necessarily drawn to scale.

[0030] FIG. 1 illustrates an exemplary architecture for a distributed genetic testing system, according to embodiments of the present disclosure.

[0031] FIG. 2 illustrates an exemplary secure gateway device for use with embodiments disclosed herein.

[0032] FIG. 3 illustrates a flowchart illustrating exemplary operations of a secure gateway device for use with embodiments of the present disclosure.

[0033] FIG. 4 is an exemplary schematic diagram illustrating the encrypted storage framework 113 where each client will have their own dedicated, HIPAA-compliant, encrypted cloud-based file, completely protected from other client/patient data with the ASG portal infrastructure.

[0034] FIG. 5 is an exemplary schematic diagram illustrating that ASG enables the service lab to run the entire test internally and not rely on “outsourced” labs, and therefore incur revenue a reduce financial leakage due to high-fees incurred by outsourcing. Standard ASG framework: Clients have a molecular license and next generation sequencing already in-house with workflows, full time employees (FTEs), space, overhead. Clients have complete control of the entire Laboratory Developed Test (LDT) process from blood draw and wet lab to clinical report.

[0035] FIG. 6 is an exemplary schematic diagram outlining the variant analysis tool. The input for the process is a raw sequencing data file, i.e. FASTQ files. Raw sequencing data files are aligned and then variants are called (secondary analysis) using benchmarked algorithms. The platform provides the tertiary analysis in which variants are automatically being interpreted and characterized based on disease prevalence. The interpreted variants are part of the final clinical report which is generated using the platform. The platform also provides the entire workflow management as quality metrics on the sequencing data to provide to the laboratory as part of the Quality Assurance metrics required by laboratory regulatory agencies CLIA and CAP.

[0036] FIG. 7 is an exemplary schematic diagram showing the process of how a sample is received and integrated into the Bioinformatics pipeline. Once the sample has been collected it is managed in the service labs laboratory information system (LIS) and run using ASG chemistry, then the sample is processed and sequenced. Raw sequencing data automatically uploads to the ASG ‘frontend portal’ in combination with the patient’s medical information as collected from the sample requisition form. The raw sequencing data is analyzed using the bioinformatics pipeline to perform variant calling. Called variants are automatically interpreted using the interpretation engine. A preanalytical assessment of the finalized variant interpretation is reviewed by a clinical board molecular geneticist and finalized into a ‘pre-signed’ patients report. The ‘pre-signed’ patients report is then delivered to the service lab through the frontend portal and pulled back into the service labs LIS. The service lab director confirms the results and signs the clinical patient report.

[0037] FIG. 8 is an exemplary schematic diagram that illustrates the NIPT wet-bench workflow as compared to the ASG chemistry protocol. Each step overlaps, and three different types of assays can be run on the same instrumentation.

### DETAILED DESCRIPTION

[0038] In embodiments, the subject matter described herein is an all-in-one, end-to-end screening system that provides for testing materials, cloud-based analysis, and reporting of genetic variations, at a relatively low cost to the institutions performing the screening. It allows for institutions that may lack the resources traditionally required for genetic testing services to offer these services, using an updateable cloud-based system with relatively little infrastructural investment, with common sequencing equipment that may already be present in their laboratories. The combination of testing materials (such as oligonucleotide probes), cloud-based bioinformatics analysis, and reporting is not currently offered. The systems described herein provide an easy and economical means for patients, health-care providers, and researchers alike to receive vital information regarding genetic variants.

[0039] Provided herein is an assay for genetic screening. In an embodiment, the genetic screening is carrier or hereditary cancer screening. The first potential challenge in developing this technology was around the chemistry design and its ability to achieve the necessary accuracy and precision in a given assay. Currently, there are gene regions that are “low covered” with the existing chemistry, which forces laboratories to use a secondary technology to ensure precision coverage of the genes of interest. Similarly, today due to problematic regions in the genome, e.g., copy number variants (CNVs), pseudogenes, current bioinformatic pipelines are inadequate. Described herein are a set of oligonucleotide probes for detecting variants in such regions of interest. In embodiments, provided herein is a set of oligonucleotide probes for detecting targeted genes comprising at least the genes listed in Table 3.

[0040] Additionally, each laboratory’s test assay performs differently across different end users and there will inevitably be some variability of the output data. Therefore, to ensure that the platform described herein can account for these variables, the assays’ performance was validated with strong baseline metrics to ensure the identification of “user” error vs “assay performance” error, which increases transferability across labs. Furthermore, the overall wet-lab design of the test assay, which involves a simple workflow with less hands-on technologist time, minimizes error rate.

[0041] Described herein are assays that offer carrier or hereditary cancer screening. In embodiments, a Technology Transfer to implement a Laboratory Developed Test (LDT) is provided. In another embodiment, a previously validated, next generation sequencing (NGS) assay is provided. In one embodiment, a wet lab kit for carrier and/or hereditary cancer screening is provided.

[0042] In embodiments, an assay that combines the reagent components with the patient’s genomic DNA (gDNA) in a single tube process, limiting transfer steps and reducing outside contamination is provided. In embodiments, an assay where the entire wet-lab bench work will be reduced to, for example, about 90-min of hands-on time due to the design of the chemistry and would not require multiple purification steps as observed in other chemistries which increases the potential for laboratory error that may lead to inaccurate results. In embodiments, the majority of the assay runtime are hands-off processes. In embodiments, the assay runtime comprises a 4-24-hour hybridization and a 24-hour run processing time on a sequencing instrument. In embodiments, the 24-hour hybridization allows binding of the gDNA to the synthetic oligonucleotides that targets the genomic regions of interest. The simplified chemistry workflow utilized herein allows laboratories that do not have previous experience in molecular biology techniques to implement a workflow seamlessly with little-to-no overhead with a low-learning curve and limited troubleshooting.

[0043] In embodiments, the assay provided herein can be used in conjunction with ASPIRA Synergy Genetics technology transfer (ASG). ASG is a fully automated and customizable genetic testing solution which greatly simplifies workflows by taking well-established high throughput bioinformatics technologies backed by artificial intelligence, thereby simplifying it for clinical laboratories, regardless of operational size and footprint, without compromising on the quality of the test.

[0044] Currently, genetic tests for hereditary cancer and carrier screening are run by large specialty organizations, esoteric laboratories, regional laboratories, and direct to consumer providers. While the market represents an opportunity, there are technical hurdles. Erstwhile, the market has been restricted to few companies that possess the intricate knowledge, technology, and personnel to run such testing as hospital and healthcare organizations. However, operational, clinical, and analytic challenges remain unsolved and preclude launch of a competitive product. The reasons for this are multifaceted, including: complexity, e.g., types of panels, number of genes offered, variants of interest, wet lab, reagents, personnel, curation, keeping up with clinical guidelines, variant reclassification, and workflows, e.g., next generation sequencing for inherited cancer and carrier screening generally requires multiple workflows (up to 6) to capture all of the variants of interest with the highest sensitivity in complex genes and regions, and may require confirmation by a secondary technology method if covered at low sequencing coverage. The methods, kits, and compositions for genetic testing described herein have the potential to substantially increase access to these much needed tests.

[0045] Various embodiments of the inventions now will be described more fully hereinafter, in which some, but not all embodiments of the inventions are shown. Indeed, these inventions may be embodied in many different forms and should not be construed as limited to the embodiments set forth herein; rather, these embodiments are provided so that this disclosure will satisfy applicable legal requirements. The term “or” is used herein in both the alternative and conjunctive sense, unless otherwise indicated. The terms “illustrative” and “exemplary” are used to be examples with no indication of quality level.

### Exemplary Definitions

[0046] The terms “nucleic acid” and “polynucleotide,” used interchangeably herein, refer to polymeric forms of nucleotides of any length, including ribonucleotides, deoxyribonucleotides, or analogs or modified versions thereof. They include single-, double-, and multi-stranded DNA or RNA, genomic DNA, cDNA, DNA-RNA hybrids, and polymers comprising purine bases, pyrimidine bases, or other natural, chemically modified, biochemically modified, non-natural, or derivatized nucleotide bases.

[0047] Nucleic acids are said to have “5′ ends” and “3′ ends” because mononucleotides are reacted to make oligonucleotides in a manner such that the 5′ phosphate of one mononucleotide pentose ring is attached to the 3′ oxygen of its neighbor in one direction via a phosphodiester linkage. An end of an oligonucleotide is referred to as the “5′ end” if its 5′ phosphate is not linked to the 3′ oxygen of a mononucleotide pentose ring. An end of an oligonucleotide is referred to as the “3′ end” if its 3′ oxygen is not linked to a 5′ phosphate of another mononucleotide pentose ring. A nucleic acid sequence, even if internal to a larger oligonucleotide, also may be said to have 5′ and 3′ ends. In either a linear or circular DNA molecule, discrete elements are referred to as being “upstream” or 5′ of the “downstream” or 3′ elements.

[0048] The term “oligonucleotide probe” or “probe” refers to a single-stranded nucleotide sequence that is complementary to a region of interest. In some embodiments, the probe has a dye or other detectable label attached thereto.

[0049] The term “primer” refers to a single-stranded nucleotide sequence that is complementary to a region of interest that is to be amplified.

[0050] The term “bind,” when used in relation to nucleic acid sequences, may refer to any way in which two complementary nucleic acid sequences adhere to each other, including hybridization or annealing.

[0051] The term “variant” refers to an amino acid or nucleic acid sequence (or an organism or tissue) that is different from the majority of the population but is still sufficiently similar to the common mode to be considered to be one of them (e.g., splice variants).

[0052] Compositions or methods “comprising” or “including” one or more recited elements may include other elements not specifically recited. For example, a composition that “comprises” or “includes” a protein may contain the protein alone or in combination with other ingredients.

[0053] Designation of a range of values includes all integers within or defining the range, and all subranges defined by integers within the range.

[0054] Unless otherwise apparent from the context, the term “about” encompasses values within a standard margin of error of measurement (e.g., SEM) of a stated value or variations ± 0.5%, 1%, 5%, or 10% from a specified value.

[0055] The singular forms of the articles “a,” “an,” and “the” include plural references unless the context clearly dictates otherwise. For example, the term “an antigen” or “at least one antigen” can include a plurality of antigens, including mixtures thereof.

[0056] Statistically significant means p ≤0.05.

[0057] The term “sequence data object” may refer to a data construct that is configured to describe a message from an integrated client device comprising raw sequence data. In embodiments, the raw sequence data are FASTQ files. In embodiments, the sequence data object is a raw sequence data object. In embodiments, the raw sequence data object comprises a carrier testing raw sequence data object or a cancer testing raw data object. In embodiments, the sequence data object further comprises a sample data object. In embodiments, the sequence data object is received from an integrated client device such as a next generation sequencing (NGS) device. In embodiments, the NGS device is an Illumina sequencer.

[0058] The term “sample data object” may refer to a data construct that is configured to describe a message from an integrated client device that includes sample identification information or patient information. In embodiments, the sample data object is received from a second integrated client device such as a laboratory information system (LIS). In some embodiments, the sample data object comprises one or more arrays, where each array value describes a genetic feature value associated with the patient.

[0059] “Sequence identity” or “identity” in the context of two polynucleotides or polypeptide sequences refers to to the residues in the two sequences that are the same when aligned for maximum correspondence over a specified comparison window. When percentage of sequence identity is used in reference to proteins it is recognized that residue positions which are not identical often differ by conservative amino acid substitutions, where amino acid residues are substituted for other amino acid residues with similar chemical properties (e.g., charge or hydrophobicity) and therefore do not change the functional properties of the molecule. When sequences differ in conservative substitutions, the percent sequence identity may be adjusted upwards to correct for the conservative nature of the substitution. Sequences that differ by such conservative substitutions are said to have “sequence similarity” or “similarity.” Means for making this adjustment are well known to those of skill in the art. Typically, this involves scoring a conservative substitution as a partial rather than a full mismatch, thereby increasing the percentage sequence identity. Thus, for example, where an identical amino acid is given a score of 1 and a non-conservative substitution is given a score of zero, a conservative substitution is given a score between zero and 1. The scoring of conservative substitutions is calculated, e.g., as implemented in the program PC/GENE (Intelligenetics, Mountain View, California).

[0060] “Percentage of sequence identity” refers to the value determined by comparing two optimally aligned sequences (greatest number of perfectly matched residues) over a comparison window, wherein the portion of the polynucleotide sequence in the comparison window may comprise additions or deletions (i.e., gaps) as compared to the reference sequence (which does not comprise additions or deletions) for optimal alignment of the two sequences. The percentage is calculated by determining the number of positions at which the identical nucleic acid base or amino acid residue occurs in both sequences to yield the number of matched positions, dividing the number of matched positions by the total number of positions in the window of comparison, and multiplying the result by 100 to yield the percentage of sequence identity. Unless otherwise specified (e.g., the shorter sequence includes a linked heterologous sequence), the comparison window is the full length of the shorter of the two sequences being compared.

[0061] Unless otherwise stated, sequence identity/similarity values refer to the value obtained using GAP Version 10 using the following parameters: % identity and % similarity for a nucleotide sequence using GAP Weight of 50 and Length Weight of 3, and the nwsgapdna.cmp scoring matrix; % identity and % similarity for an amino acid sequence using GAP Weight of 8 and Length Weight of 2, and the BLOSUM62 scoring matrix; or any equivalent program thereof. “Equivalent program” includes any sequence comparison program that, for any two sequences in question, generates an alignment having identical nucleotide or amino acid residue matches and an identical percent sequence identity when compared to the corresponding alignment generated by GAP Version 10.

[0062] The term “external resource” may refer to a combination of one or more computing devices that is configured to execute a software program, application, platform, or service that is configured to communicate with the technology transfer system. In some embodiments, the external resource may communicate with the ASG system, and vice versa, through one or more application program interfaces (APIs). In some embodiments, the external resource receives tokens or other authentication credentials that are used to facilitate secure communication between the genetic testing server and the ASG system in view of ASG system network security layers or protocols (e.g., network firewall protocols). In embodiments, the one or more external resources 101 communicate with the secure gateway computing device 103 and vice versa via a communication network 105. In embodiments, the bioinformatics pipeline and interpretations engine are components of computing device 103. In embodiments, the secure gateway computing device 103 comprises the bioinformatics pipeline and interpretations engine.

[0063] The term “library preparation product sequencing data” may refer to the output of performing either ligation-based library preparation operations or tagmentation-based library preparation operations with respect to an amplification product. In some embodiments, performing a library preparation operation comprises fragmenting and end-repairing DNA or RNA samples of the amplification product.

[0064] The term “client identifier” may refer to a data construct that uniquely identifies a client device and/or a client entity. In some embodiments, the client identifier is used to store a sequence data structure associated with the corresponding client device and/or the corresponding client entity.

[0065] The term “sample data structure” may refer to a data construct that comprises a raw sequence data object and a sample data object. In some embodiments, the sample data structure is used to generate a report data structure, and the report data structure may then be transmitted to a client device.

### Exemplary System Architectures

[0066] FIG. 1 is a block diagram of an exemplary architecture for a distributed genetic testing system 100 that can be used to enable access to the genetic testing functionalities and genetic machine learning functionalities described herein by integrated client devices 102. As depicted in FIG. 1, the distributed genetic testing system 100 comprises one or more external resources 101, one or more integrated client devices 102, and a secure gateway device 103 that can communicate with each other via one or more communication networks 105.

[0067] As depicted in FIG. 1, the distributed genetic testing system 100 comprises a set of integrated client devices 102, where each integrated client device 102 may have previously been registered with a secure gateway computing device 103 by associating identifying data associated with the integrated client device 102 with a unique client identifier of a client profile that is associated with the integrated client device 102.

[0068] In some embodiments, an integrated client device 102 may be configured to provide a genetic testing request comprising one or more sequence data structures to a frontend portal 112 (e.g., a gateway device application programming interface (API)) of the secure gateway computing device 103. In response to the genetic testing request, the frontend portal 112 may be configured to store one or more sequence data structures associated with genetic testing request on the encrypted storage framework 113 which is an enhanced security storage framework and as part of a client file repository for the client identifier; and generate a genetic testing workflow for the genetic testing request in the genetic testing workflow queue 114.

[0069] During a defined time window (e.g., periodically), a bioinformatics pipeline 114 of the secure gateway computing device 103 may be configured to call an interpretation engine 115 to perform one or more genetic testing operations and/or one or more genetic machine learning operations using the external resources 101. Via performing the noted operations, the interpretation engine 115 may be configured to generate a clinical report that may then be provided as output data to a requesting integrated client devices 102.

### Exemplary Secure Gateway Devices

[0070] An exemplary architecture for a secure gateway device 103 is depicted in FIG. 2. As illustrated in FIG. 2, the exemplary apparatus 103 may comprise processor 202, memory 201, input-output circuitry 203, communications circuitry 206, client file repository circuitry 204, and client ID circuitry 205. The apparatus 103 may be configured to execute the operations described herein. Although some of these components 201-206 are described with respect to their functional capabilities, it should be understood that the particular implementations necessarily include the use of particular hardware to implement such functional capabilities. It should also be understood that certain of these components 201-206 may include similar or common hardware. For example, two sets of circuitry may both leverage use of the same processor, network interface, storage medium, or the like to perform their associated functions, such that duplicate hardware is not required for each set of circuitry.

[0071] The use of the term “circuitry” as used herein with respect to components of the apparatus 103 therefore includes particular hardware configured to perform the functions associated with respective circuitry described herein. Of course, while the term “circuitry” should be understood broadly to include hardware, in some embodiments, circuitry may also include software for configuring the hardware. For example, in some embodiments, “circuitry” may include processing circuitry, storage media, network interfaces, input-output devices, and other components. In some embodiments, other elements of the apparatus 103 may provide or supplement the functionality of particular circuitry. For example, the processing circuitry 202 may provide processing functionality, memory 201 may provide storage functionality, and communications circuitry 206 may provide network interface functionality, among other features.

[0072] In some embodiments, the processor 202 (and/or co-processor or any other processing circuitry assisting or otherwise associated with the processor) may be in communication with the memory 201 via a bus for passing information among components of the apparatus. The memory 201 may be non-transitory and may include, for example, one or more volatile and/or nonvolatile memories. For example, the memory 201 may be an electronic storage device (e.g., a computer readable storage medium). In another example, the memory 201 may be a non-transitory computer-readable storage medium storing computer-executable program code instructions that, when executed by a computing system, cause the computing system to perform the various operations described herein. The memory 201 may be configured to store information, data, content, signals applications, instructions (e.g., computer-executable program code instructions), or the like, for enabling the apparatus 103 to carry out various functions in accordance with example embodiments of the present disclosure. It will be understood that the memory 201 may be configured to store partially or wholly any electronic information, data, data structures, embodiments, examples, figures, processes, operations, techniques, algorithms, instructions, systems, apparatuses, methods, or computer program products described herein, or any combination thereof.

[0073] The processor 202 may be embodied in a number of different ways and may, for example, include one or more processing devices configured to perform independently. Additionally or alternatively, the processor 202 may include one or more processors configured in tandem via a bus to enable independent execution of instructions, pipelining, multithreading, or a combination thereof. The use of the term “processor” may be understood to include a single core processor, a multi-core processor, multiple processors internal to the apparatus, remote or “cloud” processors, or a combination thereof.

[0074] In an exemplary embodiment, the processor circuitry 202 may be configured to execute instructions stored in the memory 201 or otherwise accessible to the processor 202. Alternatively or additionally, the processor 202 may be configured to execute hard-coded functionality. As such, whether configured by hardware or software methods, or by a combination of hardware with software, the processor 202 may represent an entity (e.g., physically embodied in circuitry) capable of performing operations according to an embodiment of the present disclosure while configured accordingly. As another example, when the processor 202 is embodied as an executor of program code instructions, the instructions may specifically configure the processor to perform the operations described herein when the instructions are executed.

[0075] In some embodiments, the apparatus 103 may include input-output circuitry 203 that may, in turn, be in communication with processor 202 to provide output to the user and, in some embodiments, to receive input such as a command provided by the user. The input-output circuitry 203 may comprise a user interface, such as a graphical user interface (GUI), and may include a display that may include a web user interface, a GUI application, a mobile application, an integrated client device, or any other suitable hardware or software. In some embodiments, the input-output circuitry 203 may also include a keyboard, a mouse, a joystick, a display device, a display screen, a touch screen, touch areas, soft keys, a microphone, a speaker, or other input-output mechanisms. The processor 202, input-output circuitry 203 (which may utilize the processor 202), or both may be configured to control one or more functions of one or more user interface elements through computer-executable program code instructions (e.g., software, firmware) stored in a non-transitory computer-readable storage medium (e.g., memory 201). Input-output circuitry 203 is optional and, in some embodiments, the apparatus 110 may not include input-output circuitry. For example, where the apparatus 103 does not interact directly with the user, the apparatus 103 may generate user interface data for display by one or more other devices with which one or more users directly interact and transmit the generated user interface data to one or more of those devices.

[0076] The communications circuitry 206 may be any device or circuitry embodied in either hardware or a combination of hardware and software that is configured to receive or transmit data from or to a network or any other device, circuitry, or module in communication with the apparatus 103. In this regard, the communications circuitry 206 may include, for example, a network interface for enabling communications with a wired or wireless communication network. For example, the communications circuitry 206 may include one or more network interface cards, antennae, buses, switches, routers, modems, and supporting hardware and/or software, or any other device suitable for enabling communications via a network. In some embodiments, the communication interface may include the circuitry for interacting with the antenna(s) to cause transmission of signals via the antenna(s) or to handle receipt of signals received via the antenna(s). These signals may be transmitted or received by the apparatus 103 using any of a number of Internet, Ethernet, cellular, satellite, or wireless technologies, such as IEEE 802.11, Code Division Multiple Access (CDMA), Global System for Mobiles (GSM), Universal Mobile Telecommunications System (UMTS), Long-Term Evolution (LTE), Bluetooth® v1.0 through v5.0, Bluetooth Low Energy (BLE), infrared wireless (e.g., IrDA), ultra-wideband (UWB), induction wireless transmission, Wi-Fi, near field communications (NFC), Worldwide Interoperability for Microwave Access (WiMAX), radio frequency (RF), RFID, or any other suitable technologies.

[0077] The client file repository circuitry 204 includes hardware components designed or configured to receive, process, generate, and transmit data, such as the sample data structure, raw sequence data object, and report data structure. In some embodiments, the client file repository circuitry 204 may be in communication with the communications circuitry 206 and thus configured to receive data from the communications circuitry 206. As described above and as will be appreciated based on this disclosure, embodiments of the present disclosure may be configured as systems, apparatuses, methods, mobile devices, backend network devices, computer program products, other suitable devices, and combinations thereof. Accordingly, embodiments may comprise various means including entirely of hardware or any combination of software with hardware. Furthermore, embodiments may take the form of a computer program product on at least one non-transitory computer-readable storage medium having computer-readable program instructions (e.g., computer software) embodied in the storage medium. Any suitable computer-readable storage medium may be utilized including non-transitory hard disks, CD-ROMs, flash memory, optical storage devices, or magnetic storage devices. As will be appreciated, any computer program instructions and/or other type of code described herein may be loaded onto a computer, processor or other programmable apparatus’s circuitry to produce a machine, such that the computer, processor, or other programmable circuitry that executes the code on the machine creates the means for implementing various functions, including those described herein.

[0078] The client ID circuitry 205 includes hardware components designed or configured to receive, process, generate, and transmit data, such as the sample data structure, raw sequence data object, and report data structure. In some embodiments, the client ID circuitry 205 may be in communication with the communications circuitry 206 and thus configured to receive data from the communications circuitry 206. As described above and as will be appreciated based on this disclosure, embodiments of the present disclosure may be configured as systems, apparatuses, methods, mobile devices, backend network devices, computer program products, other suitable devices, and combinations thereof. Accordingly, embodiments may comprise various means including entirely of hardware or any combination of software with hardware. Furthermore, embodiments may take the form of a computer program product on at least one non-transitory computer-readable storage medium having computer-readable program instructions (e.g., computer software) embodied in the storage medium. Any suitable computer-readable storage medium may be utilized including non-transitory hard disks, CD-ROMs, flash memory, optical storage devices, or magnetic storage devices. As will be appreciated, any computer program instructions and/or other type of code described herein may be loaded onto a computer, processor or other programmable apparatus’s circuitry to produce a machine, such that the computer, processor, or other programmable circuitry that executes the code on the machine creates the means for implementing various functions, including those described herein.

### Exemplary Distributed Genetic Testing Techniques

[0079] Referring to FIG. 3, an example data flow 300 attributable to enabling the analysis of genetic testing raw sequence data is provided. The operations described in connection with FIG. 3 may, for example, be performed by one or more components described with reference to apparatus 103 shown in FIG. 2 (e.g., by or through the use of one or more of processor 202, memory 201, input-output circuitry 203, communications circuitry 206, client file repository circuitry 204, client ID circuitry 205, any other suitable circuitry, and any combination thereof); by any other component described herein; or by any combination thereof. Various operations of the data flow 300 may in some embodiments be performed by the bioinformatics pipeline 114 and the interpretation engine 115.

[0080] In exemplary data flow 300, secure gateway computing device 103 receives at block 301 from one or more integrated client devices 102 via a communications network 105, one or more sequence data structures. In embodiments, the one or more sequence data structures are associated with a client identifier. In embodiments, associating the client identifier with the same data structure results in the storage of the sample data structure in the encrypted storage framework 113. In embodiments, each client identifier corresponds to a compartmentalized storage area with the encrypted storage framework 113.

[0081] In embodiments, at block 302, secure gateway computing device 103 extracts from the sequence data structures a raw sequence data object and a sample data object.

[0082] In embodiments, at block 303, secure gateway computing device 103 creates a sample data structure comprising the raw sequence data object and the sample data object. In embodiments, each data object is associated with data and metadata. In embodiments, the metadata comprises a sample ID. In embodiments, the metadata comprises a sample ID associated with a client identifier. In embodiments, the metadata comprises a sample ID and client identifier. In embodiments, each data object has a plurality of records. In embodiments, the plurality of records comprises data and metadata associated with the data object. In embodiments, the sample data structure comprises structured data. In embodiments, the sample data structure comprises both structured and unstructured data. In embodiments, the sample data structure comprises unstructured data.

[0083] In embodiments, at block 304A, secure gateway computing device 103 associates a client identifier with the sample data structure. At block 304B, secure gateway computing device 103 transmits the sample data structure to a bioinformatics and informatics module for machine learning-based analysis of a selected external resource 101. At block 304C, the bioinformatics and informatics module perform the bioinformatics analysis operations and interpretation operations based on the sample data structure to generate a report data structure.

[0084] In embodiments, at block 305, secure gateway computing device 103 receives the report data structure from the bioinformatics and interpretation module of the selected external resource 101. In embodiments, the report data structure is based on at least the raw sequence data object in the sample data structure.

[0085] In embodiments, at block 306, secure gateway computing device 103 associates the client identifier with the report data structure.

[0086] In embodiments, at block 307, secure gateway computing device 103 transmits, to the one or more integrated client devices 102 via the communications network 105, the report data structure.

[0087] In embodiments, the processing time of a sample is to be < 4 hours following the uploading of the data. In embodiments, any number of samples can be uploaded simultaneously.

[0088] To keep up with the demands of providing a virtual “decentralized” product, it was imperative we built a high-throughput cloud-based solution. ASG is designed as a virtual, cloud-based platform that can be implemented in any clinical laboratory with a molecular license and NGS capabilities.

[0089] As the technology in laboratories are becoming more advanced, especially in molecular techniques, third-party vendors are building their instrumentation to be fully automated using end-to-end information solutions and can easily integrate virtually for in/out data pulling. With the advancements in Amazon’s HIPAA-compliant cloud-storage services (AWS) in combination with numerous software advancements primarily used in the ‘smart technology’ industry, we have decided to utilize those same capabilities to build our end-product and allow seamless workflow for the service laboratories. Our market analysis showed that the vast majority of the labs are open to using cloud computing, and are already using it today or are transitioning their entire operation over to an electronic medical data transfer solution.

[0090] Allowing a cloud-based infrastructure to connect in/out of the client’s laboratory information system also reduces workflow and connection points. The integration system for the cloud-based portal has various monitoring, notification, alerting and audit trails mechanisms. In embodiments, the cloud-based portal utilizes AWS tools such as cloudwatch, cloudtrail, SNS, and SES for notifications and alerts.

### Exemplary Compositions

[0091] In embodiments, a technology transfer solution to implement a Laboratory Developed Test (LDT) is provided. In another embodiment, a previously validated, next generation sequencing (NGS) assay is provided. In another embodiment, the NGS assay is provided for a Laboratory Developed Test (LDT) implementation by laboratories. In one embodiment, a wet lab kit for carrier and hereditary cancer screening is provided. In order to provide an assay with high accuracy and precision at a reduced cost, a dedicated capture kit is designed to facilitate the targeted sequencing. In one embodiment, the assay provided herein is run on an Illumina sequencer (e.g., Illumina NextSeq, Illumina HiSeq, or Illumina NovaSeq) or Thermo Fisher sequencer (e.g., ION Torrent).

[0092] In embodiments, a screening assay is provided. In an embodiment, the assay is a cancer or carrier screening assay. In embodiments, each sample is analyzed using a library preparation chemistry kit. In embodiments, provided is a novel targeted capture kit dedicated for the sequencing of the genes of interest. In embodiment, the genes of interest are carrier and/or hereditary cancer genes. In embodiments, the chemistry kit does not require extensive equipment and reagent use. In embodiments, the main instrumentation required is a sequencer, such as an Illumina sequencer.

[0093] The simplified assay workflow allows laboratories that do not have previous experience in molecular biology techniques to implement a workflow seamlessly with little-to-no overhead with a low-learning curve and limited troubleshooting. In embodiments, the chemistry is performed with limited steps compared to conventional hereditary cancer or carrier panels. In embodiments, the chemistry is performed in less time than many other standard NGS workflows.

[0094] In embodiments, the sequencing kit comprises designed probes for optimal capture of the gene, and regions of interest. In embodiments, the probes are comprised in molecular inversion probes or padlock probes. In embodiments, the probe set screens for at least one of single nucleotide variants (SNV), small insertions / deletions (Indels), copy number variations (CNVs), homologous regions, and pseudogenes. In one embodiment, the probe set screens for 85 hereditary cancer genes. In one embodiment, the probe set screens for 155 carrier genes.

[0095] In embodiments, the oligonucleotide probes described herein are comprised in padlock probes (PLPs) or molecular inversion probes (MIPs). Padlock probes (PLPs) are long oligonucleotides, whose ends are complementary to adjacent target sequences. In embodiments, each padlock probe comprises two oligonucleotide sequences connected by a linker sequence. Following hybridization of PLPs/MIPs to the target, gap-filling and ligation result in circularized DNA molecules containing the sequence of the target together for downstream analyses. In embodiments, the oligonucleotide probes have a label attached thereto.

[0096] In embodiments, the assay combines the reagent components with the patient’s genomic DNA (gDNA) in a single tube process, limiting transfer steps and reducing outside contamination. In embodiments, the entire wet-lab bench work is significantly reduced compared to other library preparation methods, to about 90-min of hands-on time due to the design of the chemistry. Furthermore, the provided reagents do not require multiple purification steps as observed in other chemistries that increase laboratory complexity. In embodiments, the majority of the assay runtime comprises hands-off processes that include 4-24-hour hybridization, i.e., the binding of the gDNA to the synthetic oligonucleotides that targets the genomic regions of interest, and a 24-hour run processing time on the sequencing instrument.

[0097] All of the systems include multiple quality control metrics to ensure that the system is transferable. Advantageously, each laboratory’s test assay performs differently across different end users and there will be some variability of the output data. To ensure that the platform can account for these variables, the assay performance has been validated with strong baseline metrics based on industry standards to ensure “user” error vs “assay performance” error is identified. The overall wet-lab design of the test assay, stratifying into a simple workflow with less hands-on technologist time, minimizes error rate.

[0098] In embodiments, the method utilizes a set of oligonucleotides for screening for carrier or hereditary cancer gene variants, comprising at least one pair of oligonucleotides selected from Table 1 or Table 2. In embodiments, the pair of oligonucleotides comprises a forward primer and a reverse primer. In another embodiment, the method utilizes a set of oligonucleotides configured to amplify in an amplification reaction a nucleic acid sequence in a sample to generate an amplification product that can be sequenced utilizing next generation sequencing. In embodiments, the oligonucleotide is labelled. In embodiments, the oligonucleotide is fluorescently labelled. In embodiments, the oligonucleotide comprises a sequence tag. In embodiments, the method utilizes a tagged oligonucleotide probe comprising a sequence having at least 70%, 80%, 85%, 90%, 95%, 96%, 97%, 98%, or 99% sequence identity to a sequence selected from SEQ ID NOs: 1-87670 and a label. In embodiments, the method utilizes a tagged oligonucleotide probe comprising a sequence selected from SEQ ID NOs: 1-87670 and a label.

[0099] In embodiments, the set of oligonucleotides comprises about 10%, about 15%, about 20%, about 25%, about 30%, about 35%, about 40%, about 45%, about 50%, about 55%, about 60%, about 65%, about 70%, about 75%, about 80%, about 85%, about 90%, about 95%, about 96%, about 97%, about 98%, or about 99% of the oligonucleotide pairs in Table 1 or Table 2. In embodiments, the set of oligonucleotides comprises all of the oligonucleotide pairs in Table 1 or Table 2.

[0100] In embodiments, the set of oligonucleotides comprises about 10%, about 15%, about 20%, about 25%, about 30%, about 35%, about 40%, about 45%, about 50%, about 55%, about 60%, about 65%, about 70%, about 75%, about 80%, about 85%, about 90%, about 95%, about 96%, about 97%, about 98%, or about 99% of the oligonucleotide pairs in Table 1. In embodiments, the set of oligonucleotides comprises all of the oligonucleotide pairs in Table 1. In embodiments, the set of oligonucleotides comprises SEQ ID NOs: 1-59438. In embodiments, the oligonucleotides pairs provided herein can be used to decipher variants, known and de novo. In embodiments, the oligonucleotide pairs provided herein can detect wild-type and mutated variants.

[0101] In embodiments, the set of oligonucleotides comprises about 10%, about 15%, about 20%, about 25%, about 30%, about 35%, about 40%, about 45%, about 50%, about 55%, about 60%, about 65%, about 70%, about 75%, about 80%, about 85%, about 90%, about 95%, about 96%, about 97%, about 98%, or about 99% of the oligonucleotide pairs in Table 2. In embodiments, the set of oligonucleotides comprises all of the oligonucleotide pairs in Table 2. In embodiments, the set of oligonucleotides comprises SEQ ID NOs: 59439-87670.

[0102] In embodiments, the panel includes autosomal and X-linked recessive carrier genes. In embodiments, the panel includes about 50 to about 200 autosomal and X-linked recessive carrier genes. In embodiments, the panel includes about 75 to about 100 autosomal and X-linked recessive carrier genes. In embodiments, the panel includes about 75 to about 150 autosomal and X-linked recessive carrier genes. In embodiments, the panel includes about 75 to about 200 autosomal and X-linked recessive carrier genes. In embodiments, the panel includes about 100 to about 200 autosomal and X-linked recessive genes. In embodiments, the panel includes 155 autosomal and X-linked recessive carrier genes.

[0103] In embodiments, the panel includes autosomal dominant oncology genes. In embodiments, the panel includes about 50 to about 200 autosomal dominant oncology genes. In embodiments, the panel includes about 75 to about 100 autosomal dominant oncology genes. In embodiments, the panel includes about 75 to about 150 autosomal dominant oncology genes. In embodiments, the panel includes about 75 to about 200 autosomal dominant oncology genes. In embodiments, the panel includes about 100 to about 200 autosomal dominant oncology genes. In embodiments, the panel includes 85 autosomal dominant oncology genes. In embodiments, the panel includes 85 autosomal dominant oncology genes.

[0104] In embodiments, the panel includes about 25, about 50, about 75, about 80, about 90, about 100, about 125, about 150, about 175, about 200, or about 300 autosomal and X-linked recessive carrier genes. In embodiments, the panel includes about 25, about 50, about 75, about 80, about 90, about 100, about 125, about 150, about 175, about 200, or about 300 autosomal dominant oncology genes.

[0105] In embodiments, the set of oligonucleotides comprises oligonucleotide probes directed toward at least 5%, at least 10%, at least 15%, at least 20%, at least 25%, at least 30%, at least 35%, at least 40%, at least 45%, at least 50%, at least 55%, at least 60%, at least 65%, at least 70%, at least 75%, at least 80%, at least 85%, at least 90%, at least 95%, or all of the carrier genes identified in Table 3. In embodiments, the set of oligonucleotides comprises oligonucleotide probes directed toward at least 5%, at least 10%, at least 15%, at least 20%, at least 25%, at least 30%, at least 35%, at least 40%, at least 45%, at least 50%, at least 55%, at least 60%, at least 65%, at least 70%, at least 75%, at least 80%, at least 85%, at least 90%, at least 95%, or all of the hereditary cancer genes identified in Table 3.

### Exemplary Cancer Screening Techniques And/or Genetic Testing Machine Learning Techniques

[0106] Provided here are non-limiting examples of methods for detecting carrier or cancer gene variants in a subject (which may, in some embodiments, be performed by the secure gateway computing device 103), the method comprising: performing a nucleic acid amplification assay on a sample from the subject using a set of oligonucleotides, comprising at least one oligonucleotide probe pair selected from Table 1 or Table 2, wherein the oligonucleotide probe pair is configured to amplify in an amplification reaction a gene region of interest; sequencing the amplified gene region of interest using next generation sequencing; and optionally generating an output corresponding to the sequenced gene region of interest. In embodiments, the output is raw sequencing data. In embodiments, the raw sequencing data is provided to a bioinformatics pipeline for analysis. The probe pairs in each of Tables 1 and 2 consist of a “forward” and “reverse” sequence listed, in each of the right column and the left column, respectively. For example, pair 1 of Table 1 consists of SEQ ID NO: 1 and SEQ ID NO: 29720. Pair 14861 of Table 1 consists of SEQ ID NO: 14861 and SEQ ID NO: 44580.

[0107] Padlock probes have been used to genotype a number of single nucleotide polymorphisms (SNPs). In embodiments, provided herein is a method of using padlock probes for full exon sequencing. In embodiments, provided herein are padlock probes that comprise a sequence selected from SEQ ID NOs: 1-59438. In embodiments, provided herein are padlock probes that comprise a sequence selected from SEQ ID NOs: 59439-87670. In embodiments, provided herein are padlock probes that comprise a probe pair selected from Table 1 or Table 2.

[0108] In embodiments, described herein is a method of performing a nucleic acid amplification assay comprising: extracting gDNA from a sample from a subject using an extraction kit; combining the gDNA with a plurality of oligonucleotide probe pairs in Tables 1 and 2; allowing time for hybridization; and loading the sample onto a NGS sequencer. In embodiments, the method further comprises: providing the raw sequencing data produced by the NGS sequencer to a bioinformatics pipeline for analysis. In embodiments, the hybridization time is about 24 hours. In embodiments, the NGS sequencer runtime is about 24 hours. In embodiments, the oligonucleotide probe pairs can be used with PCR-based amplification assays.

### Kit

[0109] In embodiments, described herein is a kit for screening for carrier or hereditary cancer gene variants, the kit comprising a plurality of oligonucleotide probe, along with the apparatus for analyzing data obtained from amplification of target sequences. In embodiments, the kit further comprises instructions for performing a method provided herein.

[0110] In embodiments, the kit may also include additional reagents necessary for performing the amplification and/or sequencing reactions, including polymerase enzymes, dNTPs, ddNTPs, and appropriate buffers. These additional reagents may be packaged separately or in combination.

### ASPIRA Synergy Genetics (ASG)

[0111] ASG is the first AI-based solution in characterizing variant-disease association that is fully automated for hereditary diseases. The solution can reduce analysis time significantly allowing customers to implement and run genetic tests at scale at a reduced cost, time and labor.

[0112] ASG is the first all-in-one genetic testing technology transfer solution from sample collection to customized genetic reporting of hereditary diseases. This would provide laboratories with the ability to internalize this testing modality, for the first time, as a fully encompassed technology transfer. Using ASG, the service labs would be able to offer new tests (products) to their customers with minimal investment and minimal risk, as a “plug-and-play” solution.

[0113] The offering includes front-end wet lab components and processes developed by ASPIRA which are customized to the cloud-based, end-to-end pipeline. Once specifically customized for the ASPIRA front-end, the pipeline will be powered by novel AI, and the entire analysis and interpretation process is fully automated, thereby reducing analysis time and labor.

[0114] Due to the sophistication of state-of-the-art technology and overhead costs, many clinical practices cannot implement genetic testing internally. As such, high complexity genetic tests, including carrier screen and hereditary cancer testing, have been outsourced by hospitals and small/medium regional laboratories to large commercial labs. There are several problems with this. The first is the cost; outsourcing the tests incurs higher costs. The second is that the hospitals and small/medium regional laboratories loses precious data which it can use and leverage internally, as the large commercial labs do not share the raw data, only the final report. In addition, the hospitals and small/medium regional laboratories are limited to the scope of the provided tests, and lack the ability to influence it. Moreover, the hospitals and small/medium regional laboratories cannot build their own expertise in these tests and leverage their existing human capital.

[0115] In order for a lab to offer a test similar to the larger established genetic testing laboratories, it would require a significant investment of hiring a large staff of full-time employees with specific training and expertise in several specialties, including; bioinformatics, data science, CLIA laboratory testing, and molecular genetics, as well as being clinically boarded by ACMG to support such a platform. The main requirements are:

[0116] Sequencing platform - selecting the most appropriate targeting chemistry platform along with the exact design and workflow which should be used to detect all required variants. This requires well-trained assay development PhDs who can design the in-silico genomic targets to ensure proper coverage in the region of interest.

[0117] Data Analysis platform - while some sequencing platforms today provide means for analyzing the raw data, they are not enough to meet the analysis requirements for achieving the test analytical requirements and so an analytics platform is needed with personnel that are trained to analyze large datasets from sequencing files.

[0118] Clinical Data Curation - curating the exact scope of genes and diseases which should be performed as part of the test, as well as curating known/prevalent variants. In addition, for each disease, clinical information should be curated, including disease information, prevalence, detection rate etc. which are needed for generating the final report for the patient. This would require MD/PhD trained, and clinical board-certified molecular geneticists by the American Board of Medical Genetics (ABMG), as well as certified genetic counselors to review and manage the curation process.

[0119] Reporting and workflow system - in order to support test scale, a software solution would be needed to manage the test workflow and to provide the final report which should be provided to the end-user (referring physician / patient). An automated reporting platformwould need to be designed with a software engineer or raw data would need to be instituted into an already existing medical record platform.

[0120] Validations - once all the above is in place, validation should be carried out. This would include purchasing positive control samples, design validation experiments and actually sequencing and validating the assay and workflow. In order to properly validate a molecular genetic test, personnel with training in molecular genetics and CLIA/LDT validation experience are required.

[0121] Creating such a complex system and workflow supported by a large staff, requires significant time, money, and additional resources, making the barrier entry too high for most of the labs today. Due to that, only large commercial labs that can manage the complexities of establishing a genetics lab and maintaining dynamic interpretation of the results offer these kinds of tests.

[0122] The complexities around maintaining an enriched database of known variants and keeping up with daily published findings on changes to gene/variant interpretation can be unattainable to manage at a small scale. In combination with complex technology and progressing to consistently optimize the genetic test offering, institutions cannot internalize a genetic testing offering

[0123] The subject matter described herein addresses these issues and more. The compositions, kits and methods for genetic testing disclosed herein can provide laboratories with a simple wet lab solution with a limited number of steps that shortens the chemistry and reduces turnaround time which in turn helps laboratories internalize genetic testing. Since genetic testing is dynamic in nature and new variants and genes are constantly being re-characterized and associated with disease, the subject matter provided herein can allow offering a competitive and clinically relevant genetic test to patients without having to manage these changes. This allows the assays to stay clinically relevant without having to build out the infrastructure, while leveraging AI to provide “live” reinterpretation of genetic diseases and consistently develop panels that support clinical management and fit the clinicians needs. The following features make the ASG product unique.

[0124] Simplified and Unified Workflow - A simple wet lab solution with a limited number of steps, shortens the chemistry by a day which allows a reduced turnaround time (TAT). Most importantly the wet lab bench work is “Easy to teach and implement”.

[0125] AI-based interpretation capabilities and full automation - ASG AI-based Interpretation Engine automates the process and allows handling the scale of the test potential findings, thereby reducing the time and labor required for creating the final clinical report.

[0126] Single platform - ASG has a single unified workflow for all genes and diseases compared to multiple different technologies / workflows at most companies, due to the complexity of the human genome. This is accomplished by unique algorithmic capabilities powered by analytical bioinformatics. In addition, both carrier and hereditary cancer in the same technology transfer are provided.

[0127] End-to-end Process - gDNA to a customized clinical report. ASG provides a customized clinical and scientific interpretation of the patients sequencing data into a clinically actionable report, saving time and cost.

### Data Analysis Backend: Variant Calling Pipeline

[0128] The human genome is complex and there is no single method for detecting all variants. Due to these challenges, genetic testing workflows at most labs require several different technologies and workflows. However, ASG has a single workflow which is built using unique algorithms powered by an analytical bioinformatics pipeline. This includes detection of short variants (SNPs/Indels), Copy Number Variants (CNVs), and accurately detecting variants in challenging regions such as genes with known pseudogenes or homologous regions - SMA, GBA, HBA1/HBA2, CYP21A2.

[0129] As part of the development of ASG, the analytical pipeline applies a variety of workflows for detecting all variant types and meet the analytical challenges associated with them.

[0130] For genes with pseudogenes and homologous regions, a dedicated solution is created, built upon established graph-based aligner software and AI callers.

[0131] Structural Variant Classification and Verification:

[0132] CNVs: The ASG bioinformatics platform employs a dedicated algorithm to systematically identify CNVs in whole-exomes with robust analytical performance. The algorithm was developed specifically for whole exome sequencing for hybridization-based capture. It employs a machine-learning based, anomaly detection algorithm, in which variants are determined based on an exon-level coverage.

[0133] As part of ASG, an algorithm would be tailored specifically to the test in order to enable high confidence detection of deletion and duplication more than one exon heterozygote resolution and up to whole gene or large clusters, in order to achieve clinical-grade analytical performance. This is done by algorithms dedicated to the chemistry used in ASG. As part of it, the variant caller has been trained on positive and negative samples which have been confirmed using orthogonal methods. Special attention is given to genes in the panel in which CNVs are a common mechanism for the diseases e.g. in Duchenne (DMD) and Cystic Fibrosis (CFTR). The end goal would be that for genes covered in the test, sensitivity and specificity would be targeted to 100%. This is as opposed to the standard today in which CNV results have low specificity and thus many false positives results.

[0134] Pseudogenes (i.e. SMA): Spinal muscular atrophy (SMA) is an autosomal recessive disease in which the most common pathogenic variant is a deletion of exon 7 in the SMN1 gene. SMN1 and SMN2 genes are highly homologous and differ only by five nucleotides. The SMN1 gene is the only functional gene and mutations within this gene cause SMA, whereas the SMN2 is the ‘false gene’ or better known as the pseudogene due to the >95% nucleotide sequence homology. It is important to ensure that the test is able to decipher the ‘true’ gene, SMN1, from the pseudogene, SMN2, and subsequently is being deciphered by the bioinformatic pipeline to properly call a disease-causing deletion. Common methods for performing carrier detection are mostly being done using dedicated assays such as Multiple Ligation Probe Amplification (MLPA) or quantitative PCR (qPCR) that is readily able to decipher a large genomic loss known as a copy number (CN) change. Primarily, these methods are used alone or in addition to sequencing-based carrier tests, making it both tedious and more expensive due to the use of multiple assays.

[0135] In order to accurately detect carriers of SMA, a novel machine learning (ML) based algorithm is used for detection of carriers. The algorithm is based on several key technological developments, including ASG’s aligner and its AI-based variant caller. The combination of these technologies enables using the short-read NGS sequencing data for detecting variants in regions which tradtionally require additional assays.

[0136] As part of it, the ML model has been trained on positive and negative samples that were obtained from biobanks and existing in-house samples with known CN changes. The methods were thoroughly validated using orthogonal methods. Detecting SMA carriers by a single testing paradigm significantly reduces the test cost and complexities of running multiple orthogonal workflows in the laboratory.

### Data Analysis Backend: Interpretation Engine

[0137] Today, in the era of whole genome sequencing, genetic tests encompass almost all of the potential variants in a gene, thereby increasing the detection rate of disease and providing a more comprehensive report. This is distinct from previous methods, which primarily focused on a specific concise list of known variants. With that, the process of variant interpretation has become a time consuming and error prone process creating a significant bottleneck whereby interpreting case variants can take hours. In addition, it requires a massive in-house knowledgebase of evidence which requires manual curation by an experienced team.

[0138] ASG uses an AI-based interpretation engine. The engine dynamically assimilates evidence from hundreds of sources and databases to create a consolidated evidence-graph which allows automating the interpretation process and scaling it.

[0139] The AI-based interpretation engine is optimized and trained to support the ability to test - Expanded Carrier and Hereditary Cancer associated genes. The pipeline’s AI has been trained on known variants to accurately classify novel variants and to reduce the need for ad-hoc interpretation that can create reporting bottlenecks. While the final clinical report would be signed and reviewed by the service lab director, the AI-based genomic interpretation reduces the interpretation time to a minimum and removes analytical workflow from the customer as it is automatically built into the ASG pipeline.

[0140] Aspects of the disclosed subject matter are further described in the following nonlimiting Examples. It should be understood that these examples are given by way of illustration only.

### Example 1: Designing and Synthesis of the Oligonucleotide Probes for Carrier or Hereditary Cancer Screening

[0141] The most relevant genes/diseases to be included on the panels which are clinically actionable and have a carrier frequency higher than 1 in 500 across multiple ethnicities (i.e. Pan-ethnic panel) were identified. The testing panels have been designed considering well-established clinical guidelines from ACMG, newborn screening guidelines from American College of Obstetrics and Gynecology, ACOG expanded carrier testing and the genomic content assessed routinely in persons of Ashkenazi Jewish descent because of the increased carrier frequency in this population. Additionally, the genes of interest were mapped against ClinVar to ensure all clinically relevant variants with a minimum of 2 stars were included in the panel to increase disease detection rate. Using this exercise, we constructed clinically actionable and-disease relevant germline testing panels. One panel includes autosomal and X-linked recessive carrier genes. Another panel includes autosomal dominant oncology genes. An exemplary list of the genes and diseases covered are shown in Table 3 below. In embodiments, de novo gene variants can be deciphered using the panel.

[0142] In-silico genomic targets were identified to ensure proper coverage in the region of interest and to detect all required variants. A set of oligonucleotide probes were designed targeting a genomic region(s) and assigned efficiency scores consisting of, but not limited to: (1) presence of a guanine or cytosine as the 5′-most base of the ligation arm, (2) The number of dbSNP entries intersecting targeting arm sites, and (3) root squared deviation of the arms predicted melting temperatures from optimal values derived from empirical studies of capture efficiency. Using these efficiency metrics allowed for probe performance ranking and allowed ‘tiling’ across the region of interest (ROI) so that every genomic position is properly captured by multiple probes. Each probe is specifically designed for the selected list of targeted genes, i.e., Table 3, in order to properly sequence the required genes and variants of interest. The oligonucleotide probes were subsequently optimized for efficiency based on the ranking metrics listed above. Oligonucleotide probes were synthesized by standard methods.

[0143] The oligonucleotide pairs provided herein can be used to amplify the entire gene sequence including exonic, promoter, and splice-site regions. A reference sequence from the NIST GIAB (Genome in the Bottle) NA12878 is used to ensure target capture efficiency. The regions comprise an exon, a splice-site, and/or a promoter. Each oligonucleotide pair comprises a forward and reverse primer. The oligonucleotide pairs for SEQ ID NOs: 1-59438 (Carrier probes) and SEQ ID NOs: 54439-87670 (Cancer probes) can be found in Tables 1 and 2, respectively.

TABLE 3

| | | |
|---|---|---|
| Gene Target | Panel Type | Genetic Disorder |
| ABCCA8 | Carrier | Familial Hyperinsulinism ABCCA8- related (Diabetes mellitus, 3 types in neonate) |
| ABCD1 | Carrier | Adrenoleukodystrophy, X-L |
| ACAD9 | Carrier | Acyl-CoA dehydrongenase-9 (ACAD9) Deficiency |
| ACADM | Carrier | Medium-chain acyl-CoA dehydrogenase (MCAD) deficiency |
| ACADVL | Carrier | VCAD |
| ADA | Carrier | Adenosine deaminase def/SCIDS |
| ADAMTS2 | Carrier | Ehlers-Danlos Syndrome, Dermatospoaraxis TVIIC |
| AGL | Carrier | GSDTIII |
| AGXT | Carrier | Primary HyperoxaluriaT1 |
| ALPL | Carrier | Hypophosphatasia |
| AMT | Carrier | Glycine Encephalopathy |
| ARG1 | Carrier | Arginase Def |
| ARSA | Carrier | metachromatic leukodystrophy |
| ASL | Carrier | Argininosuccinate Lyase Deficiency |
| ASPA | Carrier | Canavan Disease |
| ASS1 | Carrier | Citrullinemia |
| ATP7B | Carrier | Wilson Disease |
| BBS2 | Carrier | Bardet-Biedel Syndrome |
| BCKDHA | Carrier | MSUD1A |
| BCKDHB | Carrier | MSUD1B |
| BTD | Carrier | Biotinidase Def |
| CBS | Carrier | Homocystinuria CBST def |
| CDH23 | Carrier | Usher Type 1D (USH1D) |
| CEP290 | Carrier | BBS, Joubert (Japanese, LCA, MS, SLS) |
| CERKL | Carrier | RP 26 |
| CFTR | Carrier | cystic fibrosis |
| CLN3 | Carrier | Neuronal ceriod lipofuscinosis, CLN3-related |
| CLN5 | Carrier | Neuronal ceriod lipofuscinosis, CLN5-related |
| CLN8 | Carrier | Neuronal ceriod lipofuscinosis, CLN8-related |
| CLRN1 | Carrier | Usher Syndrome Type 3A |
| CNGB3 | Carrier | Achromatopsia |
| COL27A1 | Carrier | Dystrophic epidermolysis bullosa |
| COL4A3 | Carrier | Alport Syndrome; Metachromatic leukodystrophy |
| COL4A4 | Carrier | Alport Syndrome; Metachromatic leukodystrophy |
| COL7A1 | Carrier | Dystrophic epidermolysis bullosa |
| CPT1A | Carrier | CPT IA |
| CPT2 | Carrier | Carnitine Palmitoyltransferase II Deficiency |
| CRB1 | Carrier | LCA |
| CTNS | Carrier | Cystinosis |
| CYP11B1 | Carrier | Congenital adrenal hyperplasia due to 12-hydroxlase deficiency |
| CYP1B1 | Carrier | CAH |
| CYP21A2 | Carrier | Congenital adrenal hyperplasia due to 12-hydroxlase deficiency |
| CYP27A1 | Carrier | Cerebrotendinous Xanthomatosis |
| DHCR7 | Carrier | SLOS |
| DHDDS | Carrier | Retinitis pigmentosa, nonsyndromic |
| DLD | Carrier | Maple Syrup Disease, Dihydrolipamide dehydrogenase deficiency |
| DMD | Carrier | Duchenne Muscular Dystrophy |
| DNAI2 | Carrier | Primary ciliary dyskinesia |
| ELP1 (IKBKAP) | Carrier | Familial dysautonomia |
| ETFDH | Carrier | Glutaric Aciduria II |
| ETHE1 | Carrier | Ethylmalonic encelophathy/ Leigh Syndrome (80% ntDNA) |
| EYS | Carrier | Retinitis Pigmentosa 25 |
| F11 | Carrier | Factor XI deficiency |
| FAH | Carrier | Tyrosinemia T1 |
| FANCA | Carrier | Fanconi Anemia |
| FANCG | Carrier | Fanconi Anemia |
| FH | Carrier | Fumarase deficiency |
| FKRP | Carrier | FKRP-related disorders (including Walker-Warburg) |
| FKTN | Carrier | FKTN-related Disorders |
| G6PC | Carrier | Glycogen storage disease Ia |
| GAA | Carrier | Pompe Disease |
| GALC | Carrier | Krabbe Disease |
| GALK1 | Carrier | Galactokinase deficiency with cataracts |
| GALNS | Carrier | Mucopolysaccharidosis IVA |
| GALT | Carrier | Galactosemia |
| GAMT | Carrier | Cerebral creatine deficiency syndrome 2 |
| GBA | Carrier | Gaucher disease, type I |
| GBE1 | Carrier | Glycogen Storage Disease IV |
| GCDH | Carrier | Glutaricaciduria, type I |
| GJB1 | Carrier | Charcot-Marie-Tooth neuropathy, X-linked dominant, 1 |
| GJB2 | Carrier | Non-syndromic hearing loss, GJB2-disease |
| GLB1 | Carrier | GM1-gangliosidosis, type I |
| GLDC | Carrier | Glycine encephalopathy |
| GNPTAB | Carrier | Mucolipidosis II alpha/beta |
| GNPTG | Carrier | Mucolipidosis III gamma |
| GNS | Carrier | Mucopolysaccharidosis type IIID |
| GUSB | Carrier | Mucopolysaccharidosis VII |
| HADHA | Carrier | Fatty liver, acute, of pregnancy, HELLP syndrome, maternal, of pregnancy, LCHAD deficiency |
| HAX1 | Carrier | Neutropenia, severe congenital 3, autosomal recessive |
| HBA1 | Carrier | alpha Thalassemia |
| HBA2 | Carrier | Thalassemia, alpha- |
| HBB | Carrier | beta Thalassemia |
| HEXA | Carrier | Tay-Sachs disease |
| HLCS | Carrier | Holocarboxylase synthetase deficiency |
| HMGCL | Carrier | HMG-CoA lyase deficiency |
| HOGA1 | Carrier | Primary hyperoxaluria type 3 |
| HPS1 | Carrier | Hermansky-Pudlak syndrome 1 |
| HPS3 | Carrier | Hermansky-Pudlak syndrome |
| HSD17B4 | Carrier | D-bifunctional protein deficiency |
| IDUA | Carrier | Muccopolysaccharidos, type I (Hurler) |
| IVD | Carrier | Isovaleric acidemia |
| KCNJ11 | Carrier | Congenital hyperinsulinism; Permanent neonatal diabetes mellitus |
| LAMA2 | Carrier | Muscular dystrophy, congenital, merosin deficient or partially deficient |
| LAMB3 | Carrier | Familial hypercholesterolemia |
| LHX3 | Carrier | Pituitary hormone deficiency, combined, 3 |
| LIFR | Carrier | Stuve-Wiedemann syndrome/Schwartz-Jampel type 2 syndrome |
| LIPA | Carrier | Lysosomal acid lipase deficiency |
| LOXHD1 | Carrier | Nonsyndromic hearing loss |
| LRPPRC | Carrier | Leigh syndrome with Complex IV deficiency |
| LYST | Carrier | Chediak-Higashi syndrome |
| MAN2B1 | Carrier | Alpha-mannosidosis |
| MCCC1 | Carrier | 3-Methylcrotonyl-CoA carboxylase 1 deficiency (3-MCC deficiency) |
| MCCC2 | Carrier | 3-Methylcrotonyl-CoA carboxylase 2 deficiency (3-MCC deficiency) |
| MCOLN1 | Carrier | Mucolipidosis type IV i |
| MED17 | Carrier | Postnatal Progressive Microencephaly with Seizures and Brain Atrophy |
| MEFV | Carrier | Familial Mediterranean fever* |
| MESP2 | Carrier | Spondylocostal dysostosis |
| MFSD8 | Carrier | Neuronal Ceroid-Lipofuscinosis, MFSD8-Related |
| MKS1 | Carrier | Joubert syndrome 28; Meckel syndrome 1; Bar- det-Biedl syndrome 13 |
| MLC1 | Carrier | Megalencephalic leukoencephalopathy with subcortical cysts |
| MMAA | Carrier | Methylmalonic aciduria, cblA type |
| MMAB | Carrier | Methylmalonic aciduria, cblB type |
| MMACHC | Carrier | Mehylmalonic acidemia and homocystinuria, cbID type |
| MPL | Carrier | Congenital amegakaryocytic thrombocytopenia |
| MPV17 | Carrier | Hepatocerebral mitochondrial DNA depletion syndrome, MPV17-related |
| MTTP | Carrier | Abetalipoproteinemia |
| MUT | Carrier | Methylmalonic acidemia, MUT-related |
| MYO7A | Carrier | Usher T1B (USH1B) |
| NAGLU | Carrier | Mucopolysaccharidosis type IIIB (Sanfilippo syndrome B) |
| NDRG1 | Carrier | Charcot-Marie-Tooth disease, type 4D |
| NDUFAF5 | Carrier | Mitochondrial complex I deficiency (Leigh Syndrome) |
| NDUFS6 | Carrier | Mitochondrial complex I deficiency (Leigh Syndrome) |
| NEB | Carrier | Nemaline myopathy |
| NPC1 | Carrier | Niemann-Pick disease, type C1 |
| NPC2 | Carrier | Niemann-pick disease, type C2 |
| NPHS1 | Carrier | Congenital nephrotic syndrome, type 1 |
| NPHS2 | Carrier | Congenital nephrotic syndrome, type 2 |
| NR2E3 | Carrier | Enhanced S-cone syndrome; Retinitis pigmentosa 37 |
| NTRK1 | Carrier | Congenital insensitivity to pain with anhidrosis |
| PAH | Carrier | Phenylalanine hydroxylase deficiency (Pheylketonuria) |
| PCCA | Carrier | Propionicacidemia |
| PCCB | Carrier | Propionicacidemia |
| PCDH15 | Carrier | Non-syndromic hearing loss, PCDH15-related: Usher Syndrome, type 1F |
| PEX1 | Carrier | Zwelleger Disease |
| PEX2 | Carrier | Zwelleger Disease |
| PEX6 | Carrier | Zwelleger Disease |
| PEX7 | Carrier | Rhizomelic chondrodysplasia punctata, type 1 |
| PHGDH | Carrier | 3-phosphoglycerate dehydrogenase deficiency |
| PKHD1 | Carrier | Polycystic kidney disease 4, with or without hepatic disease |
| PMM2 | Carrier | Congenital disorder of glycosylation, type Ia |
| RPGRIP1L | Carrier | COACH syndrome; Joubert syndrome 7; Meckel syndrome 5 |
| RTEL1 | Carrier | Dyskeratosis congenital type 5 |
| SLC22A5 | Carrier | Carnitine deficiency, systemic primary |
| SLC25A15 | Carrier | Hyperornithinemia-hyperammonemia-homocitrullinemia syndrome |
| SLC35A3 | Carrier | Arthrogryposis, MR and seizures |
| SMN1 | Carrier | Spinal muscular atrophy |
| SMPD1 | Carrier | Niemann Pick Type A/B |
| TMEM216 | Carrier | Joubert Syndrome |
| USH1C | Carrier | Usher type 1C related disorders (USH1C) |
| USH2A | Carrier | Ushers Syndrome |
| ATM | Carrier/Hereditary Cancer | Ataxia Telangiectasia, BC 17-52% risk, OC increased risk |
| BLM | Carrier/Hereditary Cancer | Bloom |
| FANCC | Carrier/Hereditary Cancer | Fanconi anemia, complementation group C; BC |
| NBN | Carrier/Hereditary Cancer | Nijmegen breakage syndrome |
| RAD51C | Carrier/Hereditary Cancer | Fanconi anemia, BC, Ovarian up to 10% |
| WT1 | Hereditary Cancer | Wilms Tumor Syndrome |
| AIP | Hereditary Cancer | of familial isolated pituitary adenoma (FIPA) |
| ALK | Hereditary Cancer | familial neuroblastoma, and confer a small increased risk (low penetrance) for this type of cancer. |
| APC | Hereditary Cancer | CRC |
| AXIN2 | Hereditary Cancer | CRC |
| BAP1 | Hereditary Cancer | Renal/Urinary/ BAP1 tumor predisposition syndrome (BAP1-TPDS). |
| BARD1 | Hereditary Cancer | HBOC |
| BMPR1A | Hereditary Cancer | Juvenile Polyposis syndrome, hereditary; CRC, Gastric |
| BRCA1 | Hereditary Cancer | HBOC |
| BRCA2 | Hereditary Cancer | HBOC |
| BRIP1 | Hereditary Cancer | HBOC |
| CASR | Hereditary Cancer | Pancreatic Cancer; AD hypocalcemia, familial hypocalciuric hypercalcemia, neonatal severe hyperparathyroidism |
| CDC73 | Hereditary Cancer | Hyperparathyroidism-jaw tumor syndrome, which increases the risk for renal tumors (hamartomas, Wilms tumor), parathyroid tumors, and ossifying fibromas of the maxilla or mandible. |
| CDH1 | Hereditary Cancer | HBOC |
| CDK4 | Hereditary Cancer | melanoma and possibly for pancreatic cancer |
| CDKN1B | Hereditary Cancer | MEN4 |
| CDKN1C | Hereditary Cancer | maternally inherited, pathogenic variants in the CDKN1C gene are one cause of Beckwith-Wiedemann syndrome, which is associated with an increased risk for embryonal tumors, including Wilms tumor, hepatoblastoma, neuroblastoma, and rhabdomyosarcoma, as well as other clinical conditions. |
| CDKN2A | Hereditary Cancer | HBOC |
| CEBPA | Hereditary Cancer | Myeloid malignancies |
| CHEK2 | Hereditary Cancer | Li-Frauemeni, HBOC |
| CTNNA1 | Hereditary Cancer | MEN4 |
| EGFR | Hereditary Cancer | Lung Cancer |
| EPCAM | Hereditary Cancer | Uterine, CRC (70%), Gastric, Pancreatic, Prostate |
| FH | Hereditary Cancer | Hereditary Leiomyomatosis and Renal Cell Cancer (HLRCC). The evidence for an association between HLRCC and paragangliomas or pheochromocytomas is contradictory, additional research is needed |
| FLCN | Hereditary Cancer | Birt-Hogg-Dube syndrome which is characterized by cutaneous manifestations, spontaneous pneumothorax and renal tumors, including renal cell carcinoma |
| GATA2 | Hereditary Cancer | GATA2 deficiency and Emberger syndromes, both of which increase an individual’s risk for myelodysplasia and acute myeloid leukemia. |
| GPC3 | Hereditary Cancer | X-linked loss of function pathogenic variants in the GPC3 gene have been associated with type 1 Simpson-Golabi-Behmel syndrome which is an overgrowth syndrome that may include multiple congenital anomalies including intellectual disability, distinctive craniofacial features, organomegaly, and an increased risk of embryonal tumors, including Wilms tumor, hepaoblastoma and hepatocellular carcinoma, among others. |
| GREM1 | Hereditary Cancer | CRC |
| HOXB13 | Hereditary Cancer | Prostate Cancer 60% |
| HRAS | Hereditary Cancer | Costello syndrome. Individuals with Costello syndrome have a 15% lifetime risk for developing a malignant tumor, with rhabdomyosarcomas occurring most frequently. |
| KIT | Hereditary Cancer | Gastric Cancer |
| MAX | Hereditary Cancer | Associated with susceptibility to pheochromocytoma and paraganglioma. Risk for the development of a pheochromocytoma in individuals with germline MAX pathogenic variants is much higher if the variant was paternally inherited. |
| MEN1 | Hereditary Cancer | Multiple Endocrine Neoplasia, Pancreatic Cancer |
| MET | Hereditary Cancer | Rare cases of familial papillary renal cell carcinoma, although additional studies are needed given the small number of reported families. |
| MITF | Hereditary Cancer | Associated with an increased risk for renal cell carcinoma. However, additional studies are needed. |
| MLH1 | Hereditary Cancer | Lynch syndrome |
| MRE11A | Hereditary Cancer | Predisposition to breast cancer. Biallelic mutations in the MRE11A gene are associated with MRE11 deficiency, an ataxia telangiectasia-like disorder. |
| MSH2 | Hereditary Cancer | Lynch syndrome |
| MSH3 | Hereditary Cancer | autosomal recessive MSH3-associated polyposis; CRC |
| MSH6 | Hereditary Cancer | Lynch syndrome |
| MUTYH | Hereditary Cancer | MYH-assoc polyposis |
| NF1 | Hereditary Cancer | Neurofibromatosis, BC |
| NF2 | Hereditary Cancer | Neurofibromatosis, BC |
| NTHL1 | Hereditary Cancer | Familial adenomatous polyposis-3 (FAP3) which is also referred to as NTHL1-associated polyposis (NAP). |
| PALB2 | Hereditary Cancer | HBOC |
| PDGFRA | Hereditary Cancer | Polyps, multiple and recurrent inflammatory fibroid, gastrointestinal |
| PHOX2B | Hereditary Cancer | familial neuroblastoma |
| PMS2 | Hereditary Cancer | HNPCC |
| POLD1 | Hereditary Cancer | Colorectal cancer and other adenomas including endometrial and breast. |
| POLE | Hereditary Cancer | Early onset colorectal cancer (CRC) and polyposis, also known as Polymerase Proofreading-associated Syndrome (PPAS). Further studies are needed to determine which cancers are directly related to POLE gene variants and the levels of associated risks. Based on the information available today, the risk for colorectal cancer appears to be significantly elevated, and the risk for brain tumors may also be increased . |
| POT1 | Hereditary Cancer | Increased risk for melanoma and gliomas |
| PRKAR1A | Hereditary Cancer | Carney Complex. Individuals with this condition are at approximately a 10% risk to develop a schwannoma, in addition to other clinical findings. |
| PTCH1 | Hereditary Cancer | Nevoid Basal Cell Carcinoma syndrome (NBCSS), which increases the risk for medulloblastoma. For individuals with NBCSS caused by PTCH1 variants, this risk, though, is less than 2%. |
| PTEN | Hereditary Cancer | PTEN hamartoma tumor syndrome |
| RAD50 | Hereditary Cancer | HBOC - early evidence |
| RAD51D | Hereditary Cancer | BC, Ovarian up to 19% |
| RB1 | Hereditary Cancer | Increased risk for retinoblastoma, melanoma, and osteo-and soft tissue sarcomas. Individuals with biallelic variants are more severely affected than those who are heterozygous. |
| RECQL4 | Hereditary Cancer | Rothmund-Thomson syndrome (RTS), Baller-Gerold syndrome (BGS), and RAPADILINO syndrome. Individuals with these conditions are at an increased risk for various cancers, including osteosarcoma, basal cell carcinoma, squamous cell carcinoma, and lymphoma. |
| RET | Hereditary Cancer | Multiple endocrine neoplasia type 2 (MEN 2), which is associated with medullary thyroid carcinoma, pheochromocytoma, and other clinical findings. |
| RUNX1 | Hereditary Cancer | Familial platelet disorder and an increased risk for myeloid malignancies. |
| SCG5 | Hereditary Cancer | CRC |
| SDHA | Hereditary Cancer | One genetic cause of Hereditary Paragangliomas-Pheochromocytoma Syndromes (HPPS), and are responsible for approximately .6-3% of cases |
| SDHAF2 | Hereditary Cancer | Susceptibility to paragangliomas. Risk for developing a paraganglioma in individuals with germline SDHAF2 pathogenic variants is much higher if the variant was paternally inherited, and they most frequently occur in the skull base and neck. |
| SDHB | Hereditary Cancer | Cowden/CRCHereditary Paraganglioma-Pheochromocytoma syndrome (HPPS) and are responsible for approximately 22-38% of cases. They are also associated with Carney-Stratakis syndrome, which is characterized by the presence of paragangliomas and gastrointestinal stromal tumors. SDHB-related HPPS has the highest risk for malignancy in comparison to the different genetic causes of the condition. |
| SDHC | Hereditary Cancer | 4 and 8% of cases of Hereditary Parganglioma-Pheochromocytoma syndrome (HPPS). |
| SDHD | Hereditary Cancer | Pheochromocytoma-paraganglioma syndrome, CRC |
| SMAD4 | Hereditary Cancer | CRC 38-65%, 21% risk Gastric |
| SMARCA4 | Hereditary Cancer | Rhabdoid tumor predisposition syndrome 2; elevated ovarian/endometrial |
| SMARCB1 | Hereditary Cancer | Rhabdoid tumor predisposition syndrome 1 (RTPS1), schwannomatosis, and Coffin-Siris syndrome |
| SMARCE1 | Hereditary Cancer | Familial meningioma, Coffin-Siris syndrome |
| STK11 | Hereditary Cancer | Peutz-Jeghers Syndrome, 45-50% BC, 18-21% OC, 9% Uterine, 39% CRC, 29% Gastric, 11-36% Pancreatic |
| SUFU | Hereditary Cancer | Nevoid basal cell Carcinoma syndrome (NBCCS; also called Gorlin syndrome). While a few cases of rhabdomyosarcoma have been reported in individuals with NBCCS, additional research is needed to confirm |
| | | this association given the small number of reported cases. |
| TERC | Hereditary Cancer | Dyskeratosis congenita, which is associated with an increased risk for bone marrow failure, myelodysplastic syndrome, and leukemia. |
| TERT | Hereditary Cancer | Dyskeratosis congenita, which is associated with bone marrow failure, myelodysplastic syndrome, and leukemia. Patients with autosomal dominant (heterozygous) TERT pathogenic variants tend to have milder disease than those with the autosomal recessive (biallelic) form. |
| TMEM127 | Hereditary Cancer | Pheochromocytomas. |
| TP53 | Hereditary Cancer | Li-Frauemeni, BC up to 79% risk |
| TSC1 | Hereditary Cancer | Renal/Urinary Cancer |
| TSC2 | Hereditary Cancer | Renal/Urinary Cancer |
| VHL | Hereditary Cancer | Von-Hippel Lindau Syndrome/ Cerebellar hemangioblastoma, Pancreatic cysts, Spinal hemangioblastoma, Retinal capillary hemangioma |
| WRN | Hereditary Cancer | Werner syndrome, which is characterized by features of premature aging that includes an increased risk for many types of cancer. At this time, heterozygous carriers of a pathogenic variant in WRN have not been shown to have an increased risk of cancer. |

### Example 2: Validation of the Assays

[0144] Validation and verification of the assays were performed on an Illumina sequencing instrumentation (NextSeq 550 and HiSeq2500).

[0145] The analytical pipeline was customized to accurately perform alignment and variant calling using targeted sequencing data generated from the dedicated capture kit. This included: customization of the alignment process, customization of the short variant calling, both SNPs and indels, customization and development of the copy number variant caller.

[0146] Homologous genes pipeline development: Expanded carrier testing includes several genes with homologous regions, either other genes or pseudogenes (SMA, GBA and others). In order to properly call variants in these genes, a dedicated pipeline was developed based on dedicated algorithms.

[0147] An analytical verification for carrier screening genes was performed for the carrier assay in order to make sure it met the quality requirements, and final adjustments in chemistry and the analytical pipeline were made. The assay was verified using positive control samples which were detected using orthogonal methods (e.g., data from Coriell biobank). This ensured that positive results were accurately called and that there were no false positive results. As part of this step 3 sequencing runs were performed in order to detect probe design issues, remove possible “batch” effects, and determine baseline metrics of assay performance.

[0148] A formal blinded analytical validation for carrier screening was performed. This was achieved by doing three separate experiments in a blinded protocol. First, a round of blinded validation runs of unique samples to meet the NGS test standards was performed to determine the analytical validity of the assay, negative and positive predictive values, performance and accuracy of the assay and a final validation was performed to meet the NGS test standards. Sample replicates were run within and across experiments to determine inter-run and intra-run reproducibility.

[0149] Similarly, analytical verification for a hereditary cancer gene assay was also performed. The assay was verified using positive control samples which were detected using orthogonal methods (e.g., data from Coriell biobank) was performed. This verified that positive results were accurately called and that there were no false positive results. Multiple sequencing runs, i.e., at least 3 were performed in order to detect and address issues in the design of the probes, and to be able to remove “batch” effects and determine baseline metrics of assay performance.

[0150] Likewise, a formal blinded analytical validation of the assay was performed for hereditary cancer genes. Three experiments in a blinded protocol were performed. First, a blinded validation run of unique samples to meet the NGS test standards and determine the analytical validity of the assay, negative and positive predictive values, performance and accuracy of the assay and a final validation was performed to meet the NGS test standards. Sample replicates were run within and across experiments to determine inter-run and intra-run reproducability.

### Example 3: Running the Assays

[0151] Genomic DNA (gDNA) is extracted from a sample from a subject using an extraction kit. The gDNA is combined with the oligonucleotide probe pairs in Table 1 or 2 and allowed to hybridize for 16-24 hours.

[0152] Amplification reagents are added and the final targeted library is pooled and loaded onto a NGS sequencing instrument.

[0153] The resulting sequence data from the NGS sequencer is provided to the bioinformatics platform for variant calling. The bioinformatics platform detects and reports SNVs, indels, CNVs, homologous regions, and pseudogenes of carrier and hereditary cancer genes including, for example, the genes listed in Table 3.

### Reporting Service

[0154] Once the service lab’s patient(s) data is analyzed, the ASG platform creates a final clinical report, along with the main findings. The ASG platform provides the full set of tools supporting the lab workflow for reviewing the results, confirming and storing them for backup and regulatory requirements.

[0155] Similar to the analysis process, the reporting process is fully automated in order to support large scale testing. In an embodiment, a genetic scientist reviews the report content prior to delivering to the service lab as a recommended, “pre-signed” clinical report. Once the report is received by the service lab, their lab director reviews the content as incorporated in the report and finalizes all content with their signature, to generate a “Final-signed” clinical report.

### HIPAA and Privacy Laws

[0156] In order to address HIPAA and privacy laws, the ASG platform has a number of features. In embodiments, to ensure that the ASG portal protects personal history information (PHI) strict components have been built into the domain. In embodiments, all communication between any of the components (frontend, API, backend services) is done using HTTPS using TLS 1.2 protocol to encrypt data. In embodiments, the entire ASG platform is segmented into several independent private networks with access-control list (ACL) and routing filtering. In embodiments, the data stored in the DB is encrypted at rest and in flight. In embodiments, all incoming traffic is going through various port security groups as well as a Web Application Firewall to actively filter incoming traffic

[0157] Furthermore, in embodiments, to ensure that each client’s PHI and sequencing data is protected within their own cloud-based domain, secure measures are in place to keep each client separate within their own portal stack domain (FIG. 4: The ASG Portal Infrastructure).

[0158] In embodiments, each customer portal is running on a totally unique and independent set of resources (Stack, DB, storage bucket). In embodiments, genetic and clinical files are stored in S3 bucket unique to each customer. In embodiments, the storage for each customer is encrypted with a unique set of keys. In embodiments, a unique combination of access ID / User / encryption key is created for every customer.

[0159] In embodiments, the cloud-based HIPAA compliant environment comprises software as a service (SaaS). In embodiments, the SaaS is Amazon’s HIPAA compliant cloud-storage services.

### Market Need For Genetic Testing Solution

[0160] ASG will serve in a new distribution market that is rapidly expanding as a “send-out” vertical (physicians send directly to laboratories where the test is run, and results are provided directly back to the physician). To date, there is no full, end-to-end solution that allows for initiation of a genetics program in a lab, quickly and efficiently, and at an affordable cost. ASG will offer a new solution to this need that has existed since genetic testing was launched mainstream in the early 2000′s. As indicated above, ASG offers a bioinformatics analysis pipeline for organizations that can complete a laboratory’s wet lab workflow; while formulating the entire solution to provide the ability to offer genetic testing. The partnership creates a synergistic opportunity to offer a complete technology transfer with limited overhead and risk.

[0161] The market for high throughput germline genetic testing is one of the largest growth sectors of laboratory testing in the healthcare industry. Prenatal tests including non-invasive prenatal testing (NIPT) and carrier screening account for the highest percentage of spend over the last 10 years ranging from 33 percent to 43 percent of the genetic testing market, followed by hereditary cancer tests at approximately 30 percent.

### Market Segments

[0162] Currently, genetic tests for hereditary cancer and carrier screening are run by large specialty organizations, esoteric laboratories, regional laboratories, and direct to consumer.

[0163] Additionally, laboratories that can or will internalize Next Generation Sequencing for genetic testing present an additional potential opportunity.

[0164] While the market represents a massive opportunity - it has been restricted to few companies that possess the intricate knowledge, technology, and personnel to run such testing as hospital and healthcare organizations face operational, clinical, and analytic challenges that, in most cases, cannot be overcome to launch a competitive product.

[0165] The reason for this is multifaceted, including: complexity, e.g., types of panels, number of genes offered, variants of interest, wet lab, reagents, personnel, curation, keeping up with clinical guidelines, variant reclassification, and workflows, e.g., next generation sequencing for inherited cancer and carrier screening generally requires multiple workflows (up to 6) to capture all of the variants of interest with the highest sensitivity in complex genes and regions, and may require confirmation by a secondary technology method if covered at low sequencing coverage.

[0166] The ASG assay is the only seamless technology transfer that offers carrier screening and hereditary cancer in the same product, with validation by geneticists and a full suite technology transfer.

[0167] To date, the market is dominated by large incumbent organizations which offer genetic testing as a “send-out” test directly to physicians, hospitals and large healthcare organizations. The market is divided into two segments:

[0168] Specialty laboratories: This type of laboratory offers specialized genetics testing with a focus on specific tests such as non-invasive prenatal testing (NIPT), genetic carrier screening, inherited cancer screening, exome and genome testing for rare diseases, cardiology, amongst others. Each lab specializes in a core competency and controls a large share of the US and global market. Examples include:

[0169] Large esoteric laboratories: Some larger organizations offer healthcare providers access to esoteric testing via patient service centers throughout the USA and abroad. As the market grows - these companies have begun to offer larger genetic panels to meet the needs of physicians and compete with the specialty organizations and have unparalleled access to patients and blood stations to capitalize on the market.

[0170] Direct to Consumer Genetic Testing: While this paradigm has gained a great deal of momentum in recent years, the offerings do not offer truly clinical grade testing, rather more informational.

[0171] Greater than 90% of all specialty genetic testing, which is the core product of ASG, has been offered by one of the two pathways mentioned above. While some small niche genetic tests are offered (by large sequencing companies such as Illumina and Thermo Fisher Scientific) to be internalized the platforms are not competitive and offer either only a few select genes or dated technologies. Due to the barriers of entry and complexity of development, few companies offer the assistance to healthcare organizations, regional laboratories and hospitals with the internalization of a competitive product. ASG solves this problem.

[0172] A. Vertical One: Laboratories and health systems that already have NGS Equipment:

[0173] One of the most valuable assets that ASG provides is the fact that the pipeline can be customized to suit the requirements of the end user, regardless of geography, size of lab, expertise, FTE’s, to list a few. The pipeline can also be customized (verification and validation) on a number of different sequencing machines.

[0174] i. Illumina Installed Base Opportunity:

[0175] ASG ran initial verification and validation on Illumina sequencing instruments. The reason for this being quite simple, this is our target market and these potential customers already own/lease this equipment. Additionally, they have already built out their molecular labs containing personnel and expertise to adopt ASG in a seamless manner. In embodiments, the Illumina sequencing instrument comprises Illumina NextSeq, Illumina HiSeq, or Illumina NovaSeq. The install base will already have 80%-90% of the equipment listed below in the lab with unused time and supplies that can be allocated to ASG. Every moment that an NGS sequencer is not running, it is losing money; ASG is a seamless solution to maximize already established equipment without requiring that existing labs obtain additional sequencing technology, other than the reagents and probes necessary for the reactions performed during amplificant and assaying.

[0176] ii. The non-invasive prenatal test (NIPT) opportunity:

[0177] NIPT represents the largest revenue and volume opportunity that currently exists in the genetics women’s health space. Now, with major clinical society committees (ACOG, ACMG) changing their guidelines to include all pregnancies, the standard of care for determination of fetal aneuploidy, the technology is also widely used to determine gender at as early as 9 weeks of pregnancy. Because of the lucrative nature of the test, and potential to retain patients at local and regional institutions, NIPT has been widely adopted as an LDT by multiple healthcare systems and regional laboratories, most run on the Illumina NextSeq platform. Due to the capacity to run tens of thousands of tests per month on the NextSeq, the equipment is often left idle, as it was internalized solely for this purpose. ASG presents a seamless solution to offer 2 additional lines of testing on the same equipment with a very similar workflow and requiring virtually no upfront costs of development beyond validation of the LDT.

[0178] Under this model, the Illumina NextSeq can be run 2-times per week for NIPT and 2-times per week for ASG (carrier or cancer); thus, increasing the overall output and revenue by greater than 100%. A key component of this opportunity is the volume attributed to these laboratories. All labs running NIPT internally must have a volume of at least 3,000-5,000 units per year. Most do not make the NGS leap until there are >5,000 annual units. There is a direct relationship between NIPT and carrier screening related to the patient profile, because the standard of clinical prenatal care is to prescreen for genetic carrier disease and then test for potential abnormal pregnancies.

[0179] B. Vertical Two: Laboratories with Molecular Laboratory Footprint, Medium Build-Out:

[0180] An already established molecular lab, not yet running genetics and may require limited additional capital equipment, perhaps only a sequencer.

[0181] The second vertical that ASG can penetrate has fractionally more start up requirements (i.e. limited equipment) than vertical one, however still limited barrier to entry:

[0182] Knowledge barrier: laboratories in vertical two have already committed to a molecular offering. The departments have invested in licensing, personnel, space, FTE’s, and most importantly, are already running a number of assays in with parallel start-up to ASG.

[0183] C. Vertical Three: No Established Molecular Division with a CLIA Laboratory

[0184] Laboratories and health systems that do not have an established molecular division; but have a women’s health testing laboratory that would like to penetrate the genetics market:

[0185] As discussed, the largest barrier to entry that laboratories have faced since the launch of genetics (ASG: hereditary cancer and carrier screening) has been the requirement to run multiple workflows, technologies and chemistries ensuring capture of all the necessary genes/variants of interest in a large panel.

[0186] Cost: multiple workflows require numerous capital equipment expenditures and full-time employees. This, alone, drives the price of the assay up to a point where it is not economically feasible to run the test, as each sample would lose money for the institution.

[0187] Complexity: While NGS has been around for years as a genetic testing technology, there are limited individuals that can create an assay to perform to the level of a send-out alternative.

[0188] ASG has solved the workflow challenge, eliminating the barriers to entry, allowing the entry into the market of laboratories that do not currently own an NGS sequencer, but plan to enter the space, with supporting patient volumes.

[0189] Example Case Study, Vertical Three: Over the last 5-10 years, the landscape in women’s health has changed in the USA. No longer do we see the majority of OBGYN practices independently owned. Due to overhead, liability/malpractice, and demand to see more patients as a result of declining reimbursement, practices are electing to merge or be purchased by larger organizations. Specifically, in the USA there are a number of massive “super groups” that employ thousands of OBGYNs and are responsible for millions of patients’ lives. In many circumstances, equity firms and other private investors have an ownership or equity stake -converting what was once a bottom line of clinical care to economic viability.

[0190] As a result, these groups have turned to raising laboratories to ensure that all testing remains within the four walls of the entity. As women’s health is the primary focus, there is a substantial opportunity to drive revenue through genetic testing as a revenue stream.

### Laboratory Developed Test (LDT)

[0191] Due to fact that ACMG and ACOG primarily recommend testing for 6 genes (CFTR, FMR1, HBA1, HBA2, HBB and SMN) and 5 common diseases (Cystic Fibrosis, Fragile-X Syndrome, Hemoglobinopathies, Sickle Cell and Spinal Muscular Atrophy), the larger expanded panels may not be covered by insurance in the United States and the patient must pay out-of-pocket. In lieu of these constraints, the ASG testing panels have been designed using these well-established clinical guidelines from ACMG, newborn screening guidelines from American College of Obstetrics and Gynecology, ACOG expanded carrier testing and the genomic content assessed routinely in persons of Ashkenazi Jewish descent because of the increased carrier frequency in this population. The ASG scientific team applied these principles to identify the most relevant genes/diseases to be included on the panels which are clinically actionable and have a carrier frequency higher than 1 in 500 across multiple ethnicities (i.e. Pan-ethnic panel). Additionally, the genes of interest were mapped against ClinVar to ensure all clinically relevant variants with a minimum of 2 stars were included in the panel to increase disease detection rate. Using this exercise, we have constructed a clinically-actionable and-disease relevant germline testing panel of 155 autosomal and X-linked recessive carrier genes and 90 autosomal dominant oncology genes. In embodiments, the hereditary cancer and carrier panel is built to ensure compliance with all major insurance companies.

[0192] In embodiments, the assay is for cancer or carrier screening. In embodiments, each sample is analyzed using an ASG chemistry kit. In embodiments, the sequencing kit is a novel capture kit dedicated for sequencing the genes within the scope of ASG. In embodiments, the ASG chemistry kit does not require extensive equipment and reagent use. In embodiments, the main instrumentation required is an Illumina sequencer.

[0193] The simplified chemistry workflow allows laboratories that do not have previous experience in molecular biology techniques to implement a workflow seamlessly with little-to-no overhead with a low-learning curve and limited troubleshooting. In embodiments, the chemistry is performed with limited steps compared to conventional hereditary cancer and carrier panels. In embodiments, the chemistry is performed in less time than standard NGS workflows.

[0194] In embodiments, the sequencing kit comprises designed probes for optimal capture of the gene, regions of interest. In embodiments, the probes are molecular inversion probes or padlock probes. In embodiments, the probe set screen for at least one of (SNVs), indels, (CNVs), homologous regions, and pseudogenes. In embodiments, the probe set screens for the probes screen for at least one of (SNVs), indels, (CNVs), homologous regions, and pseudogenes. In one embodiments, the probe set screens for 85 hereditary cancer genes and 155 carrier genes.

[0195] In embodiments, the assay combines the reagent components with the patient’s genomic DNA (gDNA) in a single tube process, limiting transfer steps and reducing outside contamination. In embodiments, the entire wet-lab bench work is reduced to 90 minutes of hands-on time due to the design of the chemistry and does not require multiple purification steps as observed in other chemistries to remove impurities that increase laboratory complexity and the potential for sample mixup. In embodiments, the majority of the assay runtime is made up of hands-off processes that include 16-24-hour hybridization, i.e., the binding of the gDNA to the synthetic oligonucleotides that targets the genomic regions of interest, and a ~24-hour run processing time on the sequencing instrument.

[0196] All of the systems that we are implementing as part of our development includes multiple quality control metrics to ensure that the system is transferable. Most importantly, each laboratory’s test assay performs differently across different end users and there will be some variability of the output data. To ensure that our platform can account for these variables, we are validating the assay performance with a strong baseline metrics to ensure we identify “user” error vs “assay performance” error. The overall wet-lab design of the test assay, stratifying into a simple workflow with less hands-on technologist time minimizes error rate.

[0197] Many modifications and other embodiments of the inventions set forth herein will come to mind to one skilled in the art to which the inventions pertain having the benefit of the teachings presented in the foregoing descriptions and the associated drawings. Therefore, it is to be understood that the inventions are not to be limited to the specific embodiments disclosed and that modifications and other embodiments are intended to be included within the scope of the appended claims. Although specific terms are employed herein, they are used in a generic and descriptive sense only and not for purposes of limitation.

The application's sequence listing, which the Patent Office published only in electronic form, follows.

SEQUENCE LISTING (87670 sequences)

SEQ ID NO: 1 - DNA, 24 bp, Homo sapiens
ctctagagctgtgccccacatgcc

SEQ ID NO: 2 - DNA, 17 bp, Homo sapiens
ccccaagcatacctggc

SEQ ID NO: 3 - DNA, 23 bp, Homo sapiens
agttaacatctgaccactgccag

SEQ ID NO: 4 - DNA, 23 bp, Homo sapiens
acatagacactgccctcatcata

SEQ ID NO: 5 - DNA, 20 bp, Homo sapiens
ataaagcaggtcttggggtg

SEQ ID NO: 6 - DNA, 22 bp, Homo sapiens
tcctgctctgaacactgttttc

SEQ ID NO: 7 - DNA, 24 bp, Homo sapiens
cattggcacctgccttactaactc

SEQ ID NO: 8 - DNA, 20 bp, Homo sapiens
tggggtctttctctttctct

SEQ ID NO: 9 - DNA, 23 bp, Homo sapiens
cacagatgtgttgtctgggtggg

SEQ ID NO: 10 - DNA, 20 bp, Homo sapiens
gttgagcttctgaagctcca

SEQ ID NO: 11 - DNA, 22 bp, Homo sapiens
agcaatcagaagtggggggatc

SEQ ID NO: 12 - DNA, 17 bp, Homo sapiens
ctgggcctcaccatctc

SEQ ID NO: 13 - DNA, 24 bp, Homo sapiens
caagtaactgcctctctctgtgtt

SEQ ID NO: 14 - DNA, 19 bp, Homo sapiens
cttcaactcagcctggctc

SEQ ID NO: 15 - DNA, 20 bp, Homo sapiens
caagagacactgaaatatgc

SEQ ID NO: 16 - DNA, 23 bp, Homo sapiens
ctggcccctcatccttttaaaca

SEQ ID NO: 17 - DNA, 22 bp, Homo sapiens
gaatgtcatcatgttcctggga

SEQ ID NO: 18 - DNA, 16 bp, Homo sapiens
tcactgtggagacacc

SEQ ID NO: 19 - DNA, 22 bp, Homo sapiens
actgacatttacagagccatgc

SEQ ID NO: 20 - DNA, 16 bp, Homo sapiens
agcctggtctcctccc

SEQ ID NO: 21 - DNA, 24 bp, Homo sapiens
ctagagagcttctgggtacccaag

SEQ ID NO: 22 - DNA, 24 bp, Homo sapiens
tatacagacctgaactgggcttgg

SEQ ID NO: 23 - DNA, 16 bp, Homo sapiens
tccccactgcagggat

SEQ ID NO: 24 - DNA, 16 bp, Homo sapiens
gacctctggctgctgt

SEQ ID NO: 25 - DNA, 16 bp, Homo sapiens
cacaaccctggggagg

SEQ ID NO: 26 - DNA, 23 bp, Homo sapiens
gaagtcagggcagtggctgctcc

SEQ ID NO: 27 - DNA, 21 bp, Homo sapiens
tgggcattggtgttgtacgtc

SEQ ID NO: 28 - DNA, 18 bp, Homo sapiens
cagtgggcctggtcaagg

SEQ ID NO: 29 - DNA, 16 bp, Homo sapiens
tcattggccttcaccc

SEQ ID NO: 30 - DNA, 24 bp, Homo sapiens
cagtccccatggtgtgagtgtagg

SEQ ID NO: 31 - DNA, 18 bp, Homo sapiens
tcccctgggtggtgttgc

SEQ ID NO: 32 - DNA, 24 bp, Homo sapiens
tgaccctcctctcccacctgcaga

SEQ ID NO: 33 - DNA, 16 bp, Homo sapiens
cactgctcccccgact

SEQ ID NO: 34 - DNA, 17 bp, Homo sapiens
cgcctacctgtgtgggg

SEQ ID NO: 35 - DNA, 24 bp, Homo sapiens
ttttctagccccttcccatgacac

SEQ ID NO: 36 - DNA, 17 bp, Homo sapiens
cactgagcgttcccggt

SEQ ID NO: 37 - DNA, 23 bp, Homo sapiens
cccatggatattacagactccca

SEQ ID NO: 38 - DNA, 23 bp, Homo sapiens
gcatggttcactctcgtggtggt

SEQ ID NO: 39 - DNA, 21 bp, Homo sapiens
gggcaatcctcagaactgaag

SEQ ID NO: 40 - DNA, 20 bp, Homo sapiens
tcgttgtctgagtaccagtc

SEQ ID NO: 41 - DNA, 16 bp, Homo sapiens
ggcctctgggacaccc

SEQ ID NO: 42 - DNA, 24 bp, Homo sapiens
tgatgttatgcatgagctggtagg

SEQ ID NO: 43 - DNA, 24 bp, Homo sapiens
cagggaaatctgtgggcattgtga

SEQ ID NO: 44 - DNA, 17 bp, Homo sapiens
cctcaccccgtccctgc

SEQ ID NO: 45 - DNA, 24 bp, Homo sapiens
gcgccgcctacgcccactcggctg

SEQ ID NO: 46 - DNA, 17 bp, Homo sapiens
aggccaggctgctttct

SEQ ID NO: 47 - DNA, 21 bp, Homo sapiens
cttgagccagggctgtaagga

SEQ ID NO: 48 - DNA, 16 bp, Homo sapiens
gcccaaccgcaaatcc

SEQ ID NO: 49 - DNA, 20 bp, Homo sapiens
tgtatttccggccacccccc

SEQ ID NO: 50 - DNA, 17 bp, Homo sapiens
ctcaccaggctgggaaa

SEQ ID NO: 51 - DNA, 16 bp, Homo sapiens
cccctggctttctcgt

SEQ ID NO: 52 - DNA, 18 bp, Homo sapiens
gttccaagccgaggtcac

SEQ ID NO: 53 - DNA, 18 bp, Homo sapiens
tgtatctcggtttgaagc

SEQ ID NO: 54 - DNA, 21 bp, Homo sapiens
ctcctgtctcttttaggtgat

SEQ ID NO: 55 - DNA, 16 bp, Homo sapiens
tcacacagcctctccc

SEQ ID NO: 56 - DNA, 24 bp, Homo sapiens
ctgatgtggagtatgagagtgacg

SEQ ID NO: 57 - DNA, 21 bp, Homo sapiens
cccatggaggaaagatttccg

SEQ ID NO: 58 - DNA, 20 bp, Homo sapiens
ttgacacctggaagagcttc

SEQ ID NO: 59 - DNA, 22 bp, Homo sapiens
gttccagatgaagtgggagtgc

SEQ ID NO: 60 - DNA, 24 bp, Homo sapiens
tcttgaggtcagggatggtgggtc

SEQ ID NO: 61 - DNA, 22 bp, Homo sapiens
cctccacttacccaataggtag

SEQ ID NO: 62 - DNA, 20 bp, Homo sapiens
cagactctgatagctgctgg

SEQ ID NO: 63 - DNA, 16 bp, Homo sapiens
acgcagctccggccac

SEQ ID NO: 64 - DNA, 22 bp, Homo sapiens
atgtgctgacacagcccttcct

SEQ ID NO: 65 - DNA, 16 bp, Homo sapiens
caagagcagaggcccc

SEQ ID NO: 66 - DNA, 24 bp, Homo sapiens
acccttgacccccacaatgtggac

SEQ ID NO: 67 - DNA, 17 bp, Homo sapiens
ggctcgaagagacctga

SEQ ID NO: 68 - DNA, 23 bp, Homo sapiens
cccagataaggatcctcccagcc

SEQ ID NO: 69 - DNA, 16 bp, Homo sapiens
tctcggagagtgacgg

SEQ ID NO: 70 - DNA, 23 bp, Homo sapiens
attccctgagacaccccagcttc

SEQ ID NO: 71 - DNA, 24 bp, Homo sapiens
gggtccctaccttccaccagcaag

SEQ ID NO: 72 - DNA, 16 bp, Homo sapiens
cctcctggcgtcctcc

SEQ ID NO: 73 - DNA, 24 bp, Homo sapiens
tggacttctccatcctgacaccag

SEQ ID NO: 74 - DNA, 23 bp, Homo sapiens
gaacaggaacaacgtgacggacc

SEQ ID NO: 75 - DNA, 19 bp, Homo sapiens
tctcctaaagggacctctc

SEQ ID NO: 76 - DNA, 22 bp, Homo sapiens
cctgcggaagaaccccaaaggc

SEQ ID NO: 77 - DNA, 17 bp, Homo sapiens
cgtggtcaattctgcct

SEQ ID NO: 78 - DNA, 24 bp, Homo sapiens
tgtggtgctagctcagagtggtgc

SEQ ID NO: 79 - DNA, 18 bp, Homo sapiens
gatggcccggtccatctc

SEQ ID NO: 80 - DNA, 17 bp, Homo sapiens
cagcagtgttgtggggc

SEQ ID NO: 81 - DNA, 18 bp, Homo sapiens
cgcagtgaccacggtcag

SEQ ID NO: 82 - DNA, 18 bp, Homo sapiens
gcctttgccttggtgtcc

SEQ ID NO: 83 - DNA, 21 bp, Homo sapiens
acctaccaaagatagagttgc

SEQ ID NO: 84 - DNA, 17 bp, Homo sapiens
gcaggccctgcatgagg

SEQ ID NO: 85 - DNA, 18 bp, Homo sapiens
ctgctcccaggtgggtag

SEQ ID NO: 86 - DNA, 24 bp, Homo sapiens
agcttgacctcctcggaagacact

SEQ ID NO: 87 - DNA, 17 bp, Homo sapiens
cctccccacccagttgt

SEQ ID NO: 88 - DNA, 22 bp, Homo sapiens
atttggtggatacaccccccgt

SEQ ID NO: 89 - DNA, 24 bp, Homo sapiens
taataaggtttagaaggtggcttc

SEQ ID NO: 90 - DNA, 18 bp, Homo sapiens
gcccattgccatacagga

SEQ ID NO: 91 - DNA, 20 bp, Homo sapiens
ttaccaagccaccaaggagc

SEQ ID NO: 92 - DNA, 17 bp, Homo sapiens
gtctcaccatagtccac

SEQ ID NO: 93 - DNA, 20 bp, Homo sapiens
cagcatgacccctgaacacc

SEQ ID NO: 94 - DNA, 17 bp, Homo sapiens
attcccaagcccatccc

SEQ ID NO: 95 - DNA, 24 bp, Homo sapiens
cacagacaagaagcccttcactgc

SEQ ID NO: 96 - DNA, 24 bp, Homo sapiens
caacaatcaaactgggactcaagc

SEQ ID NO: 97 - DNA, 18 bp, Homo sapiens
gaacgagagaatgtctcc

SEQ ID NO: 98 - DNA, 21 bp, Homo sapiens
gcaaaatgactttcccacatt

SEQ ID NO: 99 - DNA, 16 bp, Homo sapiens
gccacgtcctccccgc

SEQ ID NO: 100 - DNA, 19 bp, Homo sapiens
cagcctggaagggagatgg

SEQ ID NO: 101 - DNA, 19 bp, Homo sapiens
gtagttctgctcgtggacg

SEQ ID NO: 102 - DNA, 17 bp, Homo sapiens
ctcagcaggtgtttccc

SEQ ID NO: 103 - DNA, 18 bp, Homo sapiens
tggcaggagcacagtggc

SEQ ID NO: 104 - DNA, 16 bp, Homo sapiens
cctgcgccacgagacc

SEQ ID NO: 105 - DNA, 17 bp, Homo sapiens
ggtagagggccagcgcg

SEQ ID NO: 106 - DNA, 16 bp, Homo sapiens
acctgctgcacggcgt

SEQ ID NO: 107 - DNA, 18 bp, Homo sapiens
gttggcatctgtcacggg

SEQ ID NO: 108 - DNA, 18 bp, Homo sapiens
ctgcatcggggccaacct

SEQ ID NO: 109 - DNA, 20 bp, Homo sapiens
gttgcagaggctgaggaggc

SEQ ID NO: 110 - DNA, 16 bp, Homo sapiens
caggccccctgctgct

SEQ ID NO: 111 - DNA, 16 bp, Homo sapiens
aggggagcgaggtggg

SEQ ID NO: 112 - DNA, 22 bp, Homo sapiens
ctttctgccaggagagacctct

SEQ ID NO: 113 - DNA, 23 bp, Homo sapiens
gaaactttatctgtcaagccctg

SEQ ID NO: 114 - DNA, 22 bp, Homo sapiens
cctattctcatttccatgtccc

SEQ ID NO: 115 - DNA, 19 bp, Homo sapiens
accgcatcctctaacttgt

SEQ ID NO: 116 - DNA, 16 bp, Homo sapiens
ccagggcttcaggtgg

SEQ ID NO: 117 - DNA, 23 bp, Homo sapiens
cttttcagtatcacagttgtctg

SEQ ID NO: 118 - DNA, 22 bp, Homo sapiens
tggagctagtttttctgttcag

SEQ ID NO: 119 - DNA, 17 bp, Homo sapiens
caggcagctggtgcccc

SEQ ID NO: 120 - DNA, 24 bp, Homo sapiens
tacatgctagagggcttgggcatt

SEQ ID NO: 121 - DNA, 21 bp, Homo sapiens
gcctggctaaccctttccctc

SEQ ID NO: 122 - DNA, 22 bp, Homo sapiens
gacttggaggctgtccctacgc

SEQ ID NO: 123 - DNA, 24 bp, Homo sapiens
ccccatccacttttgttctcagct

SEQ ID NO: 124 - DNA, 20 bp, Homo sapiens
gtgtttcaccatccttatgt

SEQ ID NO: 125 - DNA, 22 bp, Homo sapiens
ggtgggcttaccgtgtgaatgc

SEQ ID NO: 126 - DNA, 24 bp, Homo sapiens
cagacgattgggaggtttgcaagg

SEQ ID NO: 127 - DNA, 19 bp, Homo sapiens
tttcctgatgccccctgtg

SEQ ID NO: 128 - DNA, 22 bp, Homo sapiens
attgtcatgtcaacagaatcat

SEQ ID NO: 129 - DNA, 18 bp, Homo sapiens
cacgacactcactcccat

SEQ ID NO: 130 - DNA, 22 bp, Homo sapiens
cctggccaacaccttgatggcc

SEQ ID NO: 131 - DNA, 24 bp, Homo sapiens
caccatgactgtgtccaccattgc

SEQ ID NO: 132 - DNA, 19 bp, Homo sapiens
catgcaggaagtgcctctg

SEQ ID NO: 133 - DNA, 26 bp, Homo sapiens
ctgaaagaataaatgataacaagctg

SEQ ID NO: 134 - DNA, 24 bp, Homo sapiens
atctccctgggggacaccattggt

SEQ ID NO: 135 - DNA, 23 bp, Homo sapiens
gcatatgcttttgattacctgca

SEQ ID NO: 136 - DNA, 18 bp, Homo sapiens
ctgcttgcttccttaggt

SEQ ID NO: 137 - DNA, 23 bp, Homo sapiens
gtcatggcagtggacagccaggg

SEQ ID NO: 138 - DNA, 17 bp, Homo sapiens
ccccctcttctgagtgc

SEQ ID NO: 139 - DNA, 24 bp, Homo sapiens
tgtctttcatgatccctggggtgc

SEQ ID NO: 140 - DNA, 24 bp, Homo sapiens
ggagtggtgaggagcatgtaatcc

SEQ ID NO: 141 - DNA, 22 bp, Homo sapiens
ttgagtagaacttcttggtgac

SEQ ID NO: 142 - DNA, 24 bp, Homo sapiens
tgtgctcacagcaggagcttaatg

SEQ ID NO: 143 - DNA, 21 bp, Homo sapiens
tcttcccacaggtacgtctcc

SEQ ID NO: 144 - DNA, 17 bp, Homo sapiens
tggggagaggaacctat

SEQ ID NO: 145 - DNA, 18 bp, Homo sapiens
tgcctcagttctgctagc

SEQ ID NO: 146 - DNA, 17 bp, Homo sapiens
gccctgacacatgcaca

SEQ ID NO: 147 - DNA, 17 bp, Homo sapiens
cttactccgcccagctg

SEQ ID NO: 148 - DNA, 24 bp, Homo sapiens
ccttcataagggcagccaagagca

SEQ ID NO: 149 - DNA, 22 bp, Homo sapiens
gcagtcagccaatatttctgtg

SEQ ID NO: 150 - DNA, 24 bp, Homo sapiens
ttgggaaaagatgtctaggtgtgg

SEQ ID NO: 151 - DNA, 23 bp, Homo sapiens
acatcaattgttccatagaggag

SEQ ID NO: 152 - DNA, 24 bp, Homo sapiens
caggaggaccacttgagtcagagt

SEQ ID NO: 153 - DNA, 21 bp, Homo sapiens
tgctggagccaaggaagtagt

SEQ ID NO: 154 - DNA, 19 bp, Homo sapiens
atgtgctctgactcacccc

SEQ ID NO: 155 - DNA, 24 bp, Homo sapiens
actccatctcaaacaaaaaaagag

SEQ ID NO: 156 - DNA, 24 bp, Homo sapiens
gattgcgtcaaacctctgaaaact

SEQ ID NO: 157 - DNA, 23 bp, Homo sapiens
cagtgagtggcagggccaggttt

SEQ ID NO: 158 - DNA, 20 bp, Homo sapiens
attcagaagtttcctggcat

SEQ ID NO: 159 - DNA, 19 bp, Homo sapiens
caggacaggggactgaggc

SEQ ID NO: 160 - DNA, 17 bp, Homo sapiens
tgacttggcaatgtctc

SEQ ID NO: 161 - DNA, 23 bp, Homo sapiens
tttcaggagcccccaccaacaag

SEQ ID NO: 162 - DNA, 22 bp, Homo sapiens
ggagaacagaggttttgtgatg

SEQ ID NO: 163 - DNA, 21 bp, Homo sapiens
ggggtcaggactgggtagttg

SEQ ID NO: 164 - DNA, 23 bp, Homo sapiens
aacagtaaaagtattggagagac

SEQ ID NO: 165 - DNA, 20 bp, Homo sapiens
ctttgtgtctcctaagtggg

SEQ ID NO: 166 - DNA, 20 bp, Homo sapiens
tgctatgaatcacctgagac

SEQ ID NO: 167 - DNA, 22 bp, Homo sapiens
agtgaaaatcaagctgatagac

SEQ ID NO: 168 - DNA, 18 bp, Homo sapiens
tgcttcaaaggcaaatgc

SEQ ID NO: 169 - DNA, 24 bp, Homo sapiens
ctgttttgttactaactttgctgc

SEQ ID NO: 170 - DNA, 20 bp, Homo sapiens
ctagggctcacctggggaac

SEQ ID NO: 171 - DNA, 23 bp, Homo sapiens
gcatccactgcaaaaaattatct

SEQ ID NO: 172 - DNA, 21 bp, Homo sapiens
gagagtcctgcttcagaaagc

SEQ ID NO: 173 - DNA, 21 bp, Homo sapiens
cctgcatggcagaataatgtt

SEQ ID NO: 174 - DNA, 24 bp, Homo sapiens
cgagatggactacaaaatgaaaag

SEQ ID NO: 175 - DNA, 22 bp, Homo sapiens
ctgtttggcctcctctactctc

SEQ ID NO: 176 - DNA, 21 bp, Homo sapiens
acctcatctatgggcacttta

SEQ ID NO: 177 - DNA, 21 bp, Homo sapiens
tcaactgccattgcacctatc

SEQ ID NO: 178 - DNA, 20 bp, Homo sapiens
ggaattgtggcaatctcttc

SEQ ID NO: 179 - DNA, 21 bp, Homo sapiens
tggctcatttccaactttacc

SEQ ID NO: 180 - DNA, 24 bp, Homo sapiens
tgagaaatatttcttcttgtctca

SEQ ID NO: 181 - DNA, 18 bp, Homo sapiens
cacccgctttggtaaagt

SEQ ID NO: 182 - DNA, 24 bp, Homo sapiens
aagtgaaatattctttttgttctt

SEQ ID NO: 183 - DNA, 16 bp, Homo sapiens
gactggtgggcttggc

SEQ ID NO: 184 - DNA, 21 bp, Homo sapiens
tcccgactctggcctgagagc

SEQ ID NO: 185 - DNA, 16 bp, Homo sapiens
ctggactgccgcgggg

SEQ ID NO: 186 - DNA, 24 bp, Homo sapiens
acgggccaagcccccaaccctgac

SEQ ID NO: 187 - DNA, 16 bp, Homo sapiens
ggaggggcgggggcgg

SEQ ID NO: 188 - DNA, 20 bp, Homo sapiens
gcacttacagcccggaggga

SEQ ID NO: 189 - DNA, 18 bp, Homo sapiens
ggaagaggcgctcggaat

SEQ ID NO: 190 - DNA, 21 bp, Homo sapiens
ccttgatccatgacatagttc

SEQ ID NO: 191 - DNA, 22 bp, Homo sapiens
ctgctctccatagtccatctga

SEQ ID NO: 192 - DNA, 20 bp, Homo sapiens
ggccattgctcacctttatg

SEQ ID NO: 193 - DNA, 24 bp, Homo sapiens
ccttggtgacttcttattttcttt

SEQ ID NO: 194 - DNA, 24 bp, Homo sapiens
tcaactttaataacaggtttttat

SEQ ID NO: 195 - DNA, 21 bp, Homo sapiens
ctggagtgatcttctgactgg

SEQ ID NO: 196 - DNA, 20 bp, Homo sapiens
tggtttccttgctaaattcc

SEQ ID NO: 197 - DNA, 23 bp, Homo sapiens
tgggagcggttctgtgccaacat

SEQ ID NO: 198 - DNA, 17 bp, Homo sapiens
gcattgggcctgcctgt

SEQ ID NO: 199 - DNA, 23 bp, Homo sapiens
actgagttaaaagcacaaagtac

SEQ ID NO: 200 - DNA, 18 bp, Homo sapiens
ccgctccacctggcactt

SEQ ID NO: 201 - DNA, 23 bp, Homo sapiens
aaacatatcaccttggggtgtag

SEQ ID NO: 202 - DNA, 17 bp, Homo sapiens
tgccatacacacccacc

SEQ ID NO: 203 - DNA, 19 bp, Homo sapiens
gtcttcctattccacaggc

SEQ ID NO: 204 - DNA, 20 bp, Homo sapiens
caaactcagagcctggtttt

SEQ ID NO: 205 - DNA, 20 bp, Homo sapiens
ggaaccgtcgctatgccaag

SEQ ID NO: 206 - DNA, 22 bp, Homo sapiens
ctatagctagcaagcaaacaat

SEQ ID NO: 207 - DNA, 22 bp, Homo sapiens
ggcttcaacaagctagctgagg

SEQ ID NO: 208 - DNA, 19 bp, Homo sapiens
cctctaggatgcccaggtt

SEQ ID NO: 209 - DNA, 22 bp, Homo sapiens
ccagctttggggaggagaaaag

SEQ ID NO: 210 - DNA, 20 bp, Homo sapiens
ataagcccgtctacctcact

SEQ ID NO: 211 - DNA, 24 bp, Homo sapiens
aaaaagtatctcttatttcccctt

SEQ ID NO: 212 - DNA, 24 bp, Homo sapiens
ccctctgatagcatcttacttttc

SEQ ID NO: 213 - DNA, 22 bp, Homo sapiens
gactctgcggtggtgtttgaac

SEQ ID NO: 214 - DNA, 21 bp, Homo sapiens
aacagaatttcaagggttagg

SEQ ID NO: 215 - DNA, 23 bp, Homo sapiens
tcagcattgagaacttcaaacgc

SEQ ID NO: 216 - DNA, 23 bp, Homo sapiens
gccacccaagatatctaactaac

SEQ ID NO: 217 - DNA, 18 bp, Homo sapiens
cagccgcttgatggaaga

SEQ ID NO: 218 - DNA, 18 bp, Homo sapiens
gcttctgcagtttctccc

SEQ ID NO: 219 - DNA, 23 bp, Homo sapiens
atgaaataatgcatgtagaacag

SEQ ID NO: 220 - DNA, 17 bp, Homo sapiens
tcagctcctggagatcc

SEQ ID NO: 221 - DNA, 21 bp, Homo sapiens
ggtcagttattacctgagcac

SEQ ID NO: 222 - DNA, 22 bp, Homo sapiens
ccctatagggaaatctgagaac

SEQ ID NO: 223 - DNA, 20 bp, Homo sapiens
ctgcctcttttccctgatca

SEQ ID NO: 224 - DNA, 16 bp, Homo sapiens
aagcccaggacgtctc

SEQ ID NO: 225 - DNA, 16 bp, Homo sapiens
gatctgcacttgttgc

SEQ ID NO: 226 - DNA, 20 bp, Homo sapiens
ggagaaagtctctaagctgc

SEQ ID NO: 227 - DNA, 21 bp, Homo sapiens
cacgaagaactacaacaagta

SEQ ID NO: 228 - DNA, 20 bp, Homo sapiens
agacattcaggaaacacctg

SEQ ID NO: 229 - DNA, 24 bp, Homo sapiens
atttcacctttcagaggtatccac

SEQ ID NO: 230 - DNA, 16 bp, Homo sapiens
ccccaggccatctctc

SEQ ID NO: 231 - DNA, 23 bp, Homo sapiens
tggaagggcttctctgtaatcag

SEQ ID NO: 232 - DNA, 24 bp, Homo sapiens
cctgttttccttaacaattaccat

SEQ ID NO: 233 - DNA, 24 bp, Homo sapiens
taaattattctcttcttccctcct

SEQ ID NO: 234 - DNA, 18 bp, Homo sapiens
ctcggcctcctaatgtgc

SEQ ID NO: 235 - DNA, 24 bp, Homo sapiens
tgagatcagcaatgctgtgagaga

SEQ ID NO: 236 - DNA, 17 bp, Homo sapiens
gttttgccatgttggcc

SEQ ID NO: 237 - DNA, 19 bp, Homo sapiens
cacttatcaagcagagact

SEQ ID NO: 238 - DNA, 24 bp, Homo sapiens
tagtattggctagtgtatttgatg

SEQ ID NO: 239 - DNA, 19 bp, Homo sapiens
cgcacttctccagaagtcc

SEQ ID NO: 240 - DNA, 24 bp, Homo sapiens
caccatgagaacactacagaaaga

SEQ ID NO: 241 - DNA, 23 bp, Homo sapiens
ccccatgacacaaacataatagt

SEQ ID NO: 242 - DNA, 21 bp, Homo sapiens
ttagtgatatctctgagtctc

SEQ ID NO: 243 - DNA, 18 bp, Homo sapiens
tgtttgggagtggggatg

SEQ ID NO: 244 - DNA, 24 bp, Homo sapiens
ctcatcctgacatcttgatacgga

SEQ ID NO: 245 - DNA, 21 bp, Homo sapiens
agacacagcctagagatgctt

SEQ ID NO: 246 - DNA, 17 bp, Homo sapiens
ttggaacaccaggcagg

SEQ ID NO: 247 - DNA, 20 bp, Homo sapiens
tcaggatgcctgtaacattg

SEQ ID NO: 248 - DNA, 17 bp, Homo sapiens
ctggaactgcaggatgg

SEQ ID NO: 249 - DNA, 21 bp, Homo sapiens
ctggaggactgaccagggatg

SEQ ID NO: 250 - DNA, 16 bp, Homo sapiens
cccatcccatctggcc

SEQ ID NO: 251 - DNA, 22 bp, Homo sapiens
ctacctttcccagacctctcac

SEQ ID NO: 252 - DNA, 17 bp, Homo sapiens
attaggaagtgcctggt

SEQ ID NO: 253 - DNA, 22 bp, Homo sapiens
acattttggaacctcttcgagg

SEQ ID NO: 254 - DNA, 18 bp, Homo sapiens
gtgcctgacaagtagtag

SEQ ID NO: 255 - DNA, 19 bp, Homo sapiens
tacatgtctcgggccttct

SEQ ID NO: 256 - DNA, 23 bp, Homo sapiens
cccaagccttttcaaatctggta

SEQ ID NO: 257 - DNA, 22 bp, Homo sapiens
gctgctctgtcactgtagcctg

SEQ ID NO: 258 - DNA, 18 bp, Homo sapiens
cccaccccctacctcctc

SEQ ID NO: 259 - DNA, 19 bp, Homo sapiens
caagcgtgtccttcggagc

SEQ ID NO: 260 - DNA, 17 bp, Homo sapiens
ccaatccccacttttct

SEQ ID NO: 261 - DNA, 23 bp, Homo sapiens
ctcgcttgagttccaaggcctgc

SEQ ID NO: 262 - DNA, 17 bp, Homo sapiens
ctggagagggaccaggc

SEQ ID NO: 263 - DNA, 16 bp, Homo sapiens
ggccagcctcattcag

SEQ ID NO: 264 - DNA, 17 bp, Homo sapiens
agtggggacgcccagct

SEQ ID NO: 265 - DNA, 21 bp, Homo sapiens
tgcctttcaccaagaaaagga

SEQ ID NO: 266 - DNA, 21 bp, Homo sapiens
ggaagagcgagtccaaggctt

SEQ ID NO: 267 - DNA, 17 bp, Homo sapiens
ctggcctggggggctcc

SEQ ID NO: 268 - DNA, 22 bp, Homo sapiens
cccgtctgggcactgcatcagc

SEQ ID NO: 269 - DNA, 19 bp, Homo sapiens
aggtgaccatgaagagggc

SEQ ID NO: 270 - DNA, 17 bp, Homo sapiens
aggggcagggacaggga

SEQ ID NO: 271 - DNA, 19 bp, Homo sapiens
tgcacctcaccttggctgc

SEQ ID NO: 272 - DNA, 16 bp, Homo sapiens
gggaggggattggggc

SEQ ID NO: 273 - DNA, 16 bp, Homo sapiens
gccctgcatcacctcc

SEQ ID NO: 274 - DNA, 20 bp, Homo sapiens
gagaagatgccctcctgggc

SEQ ID NO: 275 - DNA, 17 bp, Homo sapiens
ttatgtggaaggggagg

SEQ ID NO: 276 - DNA, 18 bp, Homo sapiens
tcaaaacctggcccaagt

SEQ ID NO: 277 - DNA, 17 bp, Homo sapiens
gccagcaaggagacatc

SEQ ID NO: 278 - DNA, 16 bp, Homo sapiens
caggaagagggagccc

SEQ ID NO: 279 - DNA, 19 bp, Homo sapiens
ccagaagcaagtgaggtcc

SEQ ID NO: 280 - DNA, 18 bp, Homo sapiens
ctctcctgctggtcccct

SEQ ID NO: 281 - DNA, 17 bp, Homo sapiens
cacctaccgcgggtagg

SEQ ID NO: 282 - DNA, 24 bp, Homo sapiens
aactcaccagctgttccttagatg

SEQ ID NO: 283 - DNA, 19 bp, Homo sapiens
ggagtgggactcagctaag

SEQ ID NO: 284 - DNA, 23 bp, Homo sapiens
gtttctcccgaacatttgaggac

SEQ ID NO: 285 - DNA, 23 bp, Homo sapiens
acatctgttcaaaaagtaggtac

SEQ ID NO: 286 - DNA, 22 bp, Homo sapiens
agtgggacataccagctgctgt

SEQ ID NO: 287 - DNA, 16 bp, Homo sapiens
ccagctccagccctac

SEQ ID NO: 288 - DNA, 17 bp, Homo sapiens
tccaaagtggggcatgc

SEQ ID NO: 289 - DNA, 24 bp, Homo sapiens
aagaaaaatggcagtactagagac

SEQ ID NO: 290 - DNA, 23 bp, Homo sapiens
cccagaggtgcagcggaaagaag

SEQ ID NO: 291 - DNA, 20 bp, Homo sapiens
catggtggctgtgtaggagg

SEQ ID NO: 292 - DNA, 23 bp, Homo sapiens
tacactgtccacaaagaggactc

SEQ ID NO: 293 - DNA, 17 bp, Homo sapiens
ctgagttcccagagcat

SEQ ID NO: 294 - DNA, 16 bp, Homo sapiens
ggagctggactggggg

SEQ ID NO: 295 - DNA, 24 bp, Homo sapiens
agaccaggaggaagtgcgtctctt

SEQ ID NO: 296 - DNA, 22 bp, Homo sapiens
ggggtctggtaataggggtatc

SEQ ID NO: 297 - DNA, 24 bp, Homo sapiens
tcctaaaccagactcggactcagc

SEQ ID NO: 298 - DNA, 24 bp, Homo sapiens
atgagagaagaacagaatcaggag

SEQ ID NO: 299 - DNA, 18 bp, Homo sapiens
ctggctcccacccatggc

SEQ ID NO: 300 - DNA, 23 bp, Homo sapiens
caatttttgaatccagaagctgc

SEQ ID NO: 301 - DNA, 23 bp, Homo sapiens
tacctcaggaaatcactgatttc

SEQ ID NO: 302 - DNA, 24 bp, Homo sapiens
gctgagccatagactgtggtactc

SEQ ID NO: 303 - DNA, 16 bp, Homo sapiens
tgtatgaccgtgggac

SEQ ID NO: 304 - DNA, 18 bp, Homo sapiens
gctccccccagtatcatc

SEQ ID NO: 305 - DNA, 17 bp, Homo sapiens
gcagaggctgagtgagg

SEQ ID NO: 306 - DNA, 19 bp, Homo sapiens
aggagccagctccagaaat

SEQ ID NO: 307 - DNA, 16 bp, Homo sapiens
ggaggtctgctttggt

SEQ ID NO: 308 - DNA, 23 bp, Homo sapiens
ccagagatcccaagaactccact

SEQ ID NO: 309 - DNA, 23 bp, Homo sapiens
gcaagattgaaggtaggagataa

SEQ ID NO: 310 - DNA, 18 bp, Homo sapiens
gccctgctctgcagaggc

SEQ ID NO: 311 - DNA, 21 bp, Homo sapiens
actaactctccaaggacgaac

SEQ ID NO: 312 - DNA, 17 bp, Homo sapiens
caatgccctggcaagat

SEQ ID NO: 313 - DNA, 18 bp, Homo sapiens
tgacccaaagtaggaagc

SEQ ID NO: 314 - DNA, 17 bp, Homo sapiens
ctgtcagagctgaagcc

SEQ ID NO: 315 - DNA, 17 bp, Homo sapiens
aacttagcccctggtct

SEQ ID NO: 316 - DNA, 16 bp, Homo sapiens
ccagtaggagttgcca

SEQ ID NO: 317 - DNA, 24 bp, Homo sapiens
agagatgctgtgcaaatataaggg

SEQ ID NO: 318 - DNA, 16 bp, Homo sapiens
gagggaccaggatccc

SEQ ID NO: 319 - DNA, 22 bp, Homo sapiens
gattgtgaagctgggattttcc

SEQ ID NO: 320 - DNA, 19 bp, Homo sapiens
cctccccatctccctattc

SEQ ID NO: 321 - DNA, 21 bp, Homo sapiens
cctcatctcaggactccagcc

SEQ ID NO: 322 - DNA, 17 bp, Homo sapiens
accatggttcccagagc

SEQ ID NO: 323 - DNA, 17 bp, Homo sapiens
tctccctcggtggctcc

SEQ ID NO: 324 - DNA, 21 bp, Homo sapiens
tctctcttctttccctgaaca

SEQ ID NO: 325 - DNA, 24 bp, Homo sapiens
tcgaacttgccactggacaggaac

SEQ ID NO: 326 - DNA, 16 bp, Homo sapiens
ggtcctgttgctgcca

SEQ ID NO: 327 - DNA, 23 bp, Homo sapiens
tctaagttatatgtgtagaaatt

SEQ ID NO: 328 - DNA, 24 bp, Homo sapiens
ttcagctctcacctgtctctgggg

SEQ ID NO: 329 - DNA, 23 bp, Homo sapiens
gggccctgatgggacttacttct

SEQ ID NO: 330 - DNA, 21 bp, Homo sapiens
ttttttctgcaagattgtggc

SEQ ID NO: 331 - DNA, 23 bp, Homo sapiens
tggacctgaagaatgttacctgt

SEQ ID NO: 332 - DNA, 24 bp, Homo sapiens
ttgaaagctgtatggtttggagac

SEQ ID NO: 333 - DNA, 20 bp, Homo sapiens
tctaccacagcagggcacgg

SEQ ID NO: 334 - DNA, 24 bp, Homo sapiens
catggcataaagacagagggaaag

SEQ ID NO: 335 - DNA, 22 bp, Homo sapiens
agagaactgtggggtctgtagt

SEQ ID NO: 336 - DNA, 22 bp, Homo sapiens
aatccctgcaggccatcgttct

SEQ ID NO: 337 - DNA, 18 bp, Homo sapiens
gtggtcacctccacaagg

SEQ ID NO: 338 - DNA, 23 bp, Homo sapiens
gcctgattcaatgactctgtggg

SEQ ID NO: 339 - DNA, 19 bp, Homo sapiens
ttaccagcctggtggatcc

SEQ ID NO: 340 - DNA, 23 bp, Homo sapiens
agaggaagagaaaacaaatccag

SEQ ID NO: 341 - DNA, 17 bp, Homo sapiens
agggtcagattcagtgg

SEQ ID NO: 342 - DNA, 23 bp, Homo sapiens
gtcacgaaatgacagcattattc

SEQ ID NO: 343 - DNA, 18 bp, Homo sapiens
gtgcacaaggcattgtgc

SEQ ID NO: 344 - DNA, 23 bp, Homo sapiens
cacagctacctgggctccccttt

SEQ ID NO: 345 - DNA, 18 bp, Homo sapiens
caagtttggggtggggag

SEQ ID NO: 346 - DNA, 21 bp, Homo sapiens
cttcccacatagttcccaccc

SEQ ID NO: 347 - DNA, 16 bp, Homo sapiens
gatgggtgctgccact

SEQ ID NO: 348 - DNA, 19 bp, Homo sapiens
ccttctgaccgatggctct

SEQ ID NO: 349 - DNA, 20 bp, Homo sapiens
cttccagtcctgatggcctt

SEQ ID NO: 350 - DNA, 19 bp, Homo sapiens
ctgctgacatccctgtagt

SEQ ID NO: 351 - DNA, 16 bp, Homo sapiens
ccaaccccagggatcc

SEQ ID NO: 352 - DNA, 20 bp, Homo sapiens
ggcatctggaattggagtgg

SEQ ID NO: 353 - DNA, 24 bp, Homo sapiens
aaacatagatatactagcagagac

SEQ ID NO: 354 - DNA, 20 bp, Homo sapiens
tcaactccgatacacaggag

SEQ ID NO: 355 - DNA, 16 bp, Homo sapiens
gtccctcctcgggccc

SEQ ID NO: 356 - DNA, 19 bp, Homo sapiens
ggtggggctctttgtggga

SEQ ID NO: 357 - DNA, 16 bp, Homo sapiens
ttgagcctggcgcgca

SEQ ID NO: 358 - DNA, 23 bp, Homo sapiens
atttgggtcaaacagacgctggg

SEQ ID NO: 359 - DNA, 20 bp, Homo sapiens
ggtggcggtctccaccctag

SEQ ID NO: 360 - DNA, 16 bp, Homo sapiens
tgctggagccgcctct

SEQ ID NO: 361 - DNA, 16 bp, Homo sapiens
ccctggcgcaggcgct

SEQ ID NO: 362 - DNA, 17 bp, Homo sapiens
tcgctaccgtttacagc

SEQ ID NO: 363 - DNA, 16 bp, Homo sapiens
gcccctctccgcgccc

SEQ ID NO: 364 - DNA, 21 bp, Homo sapiens
agctcgtggtcggacccaact

SEQ ID NO: 365 - DNA, 16 bp, Homo sapiens
cccctgggcactgcgg

SEQ ID NO: 366 - DNA, 19 bp, Homo sapiens
gcactagatgcagagcggt

SEQ ID NO: 367 - DNA, 24 bp, Homo sapiens
gcgggccgacggctgcgcaggtgc

SEQ ID NO: 368 - DNA, 20 bp, Homo sapiens
tgtagtgtgcaggaaactgc

SEQ ID NO: 369 - DNA, 16 bp, Homo sapiens
gatgagggcggggctc

SEQ ID NO: 370 - DNA, 21 bp, Homo sapiens
tttacaggccttcggctccac

SEQ ID NO: 371 - DNA, 24 bp, Homo sapiens
tgtctcctagcctggatctccttg

SEQ ID NO: 372 - DNA, 16 bp, Homo sapiens
gcacgggcggtggacg

SEQ ID NO: 373 - DNA, 18 bp, Homo sapiens
ctgctgctgctgaggtgg

SEQ ID NO: 374 - DNA, 16 bp, Homo sapiens
gggccacagggcatgc

SEQ ID NO: 375 - DNA, 24 bp, Homo sapiens
actttattgccttgaccatgctct

SEQ ID NO: 376 - DNA, 17 bp, Homo sapiens
tcagggctgcagtgtcc

SEQ ID NO: 377 - DNA, 23 bp, Homo sapiens
ctcccccaccccaactgctgtcc

SEQ ID NO: 378 - DNA, 17 bp, Homo sapiens
aggatccagtaccaggc

SEQ ID NO: 379 - DNA, 21 bp, Homo sapiens
cttccttctcccccaggagac

SEQ ID NO: 380 - DNA, 16 bp, Homo sapiens
ctggggatggcacact

SEQ ID NO: 381 - DNA, 24 bp, Homo sapiens
ggtcctaggccagtaccttaggga

SEQ ID NO: 382 - DNA, 23 bp, Homo sapiens
ttcacaggtatctgagactgtgg

SEQ ID NO: 383 - DNA, 23 bp, Homo sapiens
gttcaaggtccttgccctaccag

SEQ ID NO: 384 - DNA, 22 bp, Homo sapiens
aaggagtcctctctgaggactt

SEQ ID NO: 385 - DNA, 24 bp, Homo sapiens
cagcccttctccttcctgtacagt

SEQ ID NO: 386 - DNA, 24 bp, Homo sapiens
cccaggcaagaaggctgcaatctt

SEQ ID NO: 387 - DNA, 17 bp, Homo sapiens
cctcatctctcccagcc

SEQ ID NO: 388 - DNA, 18 bp, Homo sapiens
tacagcaggaccctgact

SEQ ID NO: 389 - DNA, 23 bp, Homo sapiens
acccagcctccttgaaatcctcc

SEQ ID NO: 390 - DNA, 16 bp, Homo sapiens
tcctcaaggctgctgc

SEQ ID NO: 391 - DNA, 21 bp, Homo sapiens
gcccagatggactaccgaaga

SEQ ID NO: 392 - DNA, 24 bp, Homo sapiens
gtagggaagttcacagagaagtct

SEQ ID NO: 393 - DNA, 20 bp, Homo sapiens
gtgcccacccatggctgagt

SEQ ID NO: 394 - DNA, 17 bp, Homo sapiens
cagacagagggggatgg

SEQ ID NO: 395 - DNA, 21 bp, Homo sapiens
acctaccactaagctattggc

SEQ ID NO: 396 - DNA, 20 bp, Homo sapiens
cttcagctctgcgactttcg

SEQ ID NO: 397 - DNA, 22 bp, Homo sapiens
cataggcaatatggtcccgcta

SEQ ID NO: 398 - DNA, 24 bp, Homo sapiens
aaactaacctggaaggggtaaacc

SEQ ID NO: 399 - DNA, 22 bp, Homo sapiens
aagctgactcaaaacgtaacgg

SEQ ID NO: 400 - DNA, 16 bp, Homo sapiens
ccagttgcaacgaagc

SEQ ID NO: 401 - DNA, 17 bp, Homo sapiens
taacgtgcgctatggag

SEQ ID NO: 402 - DNA, 20 bp, Homo sapiens
ccctgttgtcacatggacac

SEQ ID NO: 403 - DNA, 21 bp, Homo sapiens
gctatgtccttttggcttcga

SEQ ID NO: 404 - DNA, 20 bp, Homo sapiens
ggcaagagttcattgtacca

SEQ ID NO: 405 - DNA, 20 bp, Homo sapiens
acatagcgtcagtgaaaatt

SEQ ID NO: 406 - DNA, 18 bp, Homo sapiens
tgctgagtaccaggaagg

SEQ ID NO: 407 - DNA, 19 bp, Homo sapiens
gaaggttaaggtgtgggcc

SEQ ID NO: 408 - DNA, 17 bp, Homo sapiens
cattcggaggtggcagc

SEQ ID NO: 409 - DNA, 19 bp, Homo sapiens
aactttctgtttcaggtgg

SEQ ID NO: 410 - DNA, 24 bp, Homo sapiens
gagccttcctcacctctctaacac

SEQ ID NO: 411 - DNA, 23 bp, Homo sapiens
tgccaggacctaccctggccttc

SEQ ID NO: 412 - DNA, 22 bp, Homo sapiens
cctgcattgagtgtggaggaac

SEQ ID NO: 413 - DNA, 22 bp, Homo sapiens
cctcaagcccttcttgcagagc

SEQ ID NO: 414 - DNA, 24 bp, Homo sapiens
atgtcaagcctggctttagggtat

SEQ ID NO: 415 - DNA, 21 bp, Homo sapiens
gtgtggcctaccatctgggcc

SEQ ID NO: 416 - DNA, 24 bp, Homo sapiens
tcagcaatgatttctatctgcagc

SEQ ID NO: 417 - DNA, 24 bp, Homo sapiens
gttaaggtcatgttttcccttctg

SEQ ID NO: 418 - DNA, 22 bp, Homo sapiens
ccagctacatgggctgctgtct

SEQ ID NO: 419 - DNA, 23 bp, Homo sapiens
actagggctccctcggacaaggt

SEQ ID NO: 420 - DNA, 18 bp, Homo sapiens
ttcccccatgggtcagcc

SEQ ID NO: 421 - DNA, 17 bp, Homo sapiens
gttccagagcctcccag

SEQ ID NO: 422 - DNA, 16 bp, Homo sapiens
gggagaggcctttacc

SEQ ID NO: 423 - DNA, 16 bp, Homo sapiens
gacgccccaagatcct

SEQ ID NO: 424 - DNA, 22 bp, Homo sapiens
gaacaaagctaatttgttctgg

SEQ ID NO: 425 - DNA, 23 bp, Homo sapiens
ctactaccaacgacaagatgtgg

SEQ ID NO: 426 - DNA, 21 bp, Homo sapiens
cttccctgtgctcagaatagt

SEQ ID NO: 427 - DNA, 16 bp, Homo sapiens
ccagcccccaaatcgg

SEQ ID NO: 428 - DNA, 24 bp, Homo sapiens
tttatgtagtcagtgtacactgag

SEQ ID NO: 429 - DNA, 24 bp, Homo sapiens
atgaggttttctgggtggcagatc

SEQ ID NO: 430 - DNA, 23 bp, Homo sapiens
tgacttggtgccaaggggacctc

SEQ ID NO: 431 - DNA, 20 bp, Homo sapiens
agtggaaattgaagccttcg

SEQ ID NO: 432 - DNA, 23 bp, Homo sapiens
atatcaggtgtgtgcatacaccc

SEQ ID NO: 433 - DNA, 18 bp, Homo sapiens
ctgctcttctgagtagcg

SEQ ID NO: 434 - DNA, 21 bp, Homo sapiens
ccagggatagaggtgccagat

SEQ ID NO: 435 - DNA, 24 bp, Homo sapiens
gagggctgagccaagcccaatagg

SEQ ID NO: 436 - DNA, 24 bp, Homo sapiens
caagagctgaccgtatcgccctac

SEQ ID NO: 437 - DNA, 17 bp, Homo sapiens
cttcttgggggcgggtg

SEQ ID NO: 438 - DNA, 17 bp, Homo sapiens
tgctgtgacaccccagg

SEQ ID NO: 439 - DNA, 16 bp, Homo sapiens
tgcaggtggtgagacc

SEQ ID NO: 440 - DNA, 22 bp, Homo sapiens
ctccacctgcccaacgattggc

SEQ ID NO: 441 - DNA, 23 bp, Homo sapiens
gccaattaagtcctagcaagtac

SEQ ID NO: 442 - DNA, 20 bp, Homo sapiens
tccccggaccttccctttac

SEQ ID NO: 443 - DNA, 24 bp, Homo sapiens
aagatctctactatattatcaaaa

SEQ ID NO: 444 - DNA, 17 bp, Homo sapiens
cggagctggctcagccc

SEQ ID NO: 445 - DNA, 23 bp, Homo sapiens
ggttccctggcctttatcttggc

SEQ ID NO: 446 - DNA, 16 bp, Homo sapiens
cggggccaggcgcgca

SEQ ID NO: 447 - DNA, 20 bp, Homo sapiens
cggagaagtgcctcaggagt

SEQ ID NO: 448 - DNA, 16 bp, Homo sapiens
gcccggagccggcgct

SEQ ID NO: 449 - DNA, 23 bp, Homo sapiens
ccttgtgtttagactccagaact

SEQ ID NO: 450 - DNA, 16 bp, Homo sapiens
acctgggcaggctgtc

SEQ ID NO: 451 - DNA, 24 bp, Homo sapiens
cccgggacgatggtgccccgcctg

SEQ ID NO: 452 - DNA, 16 bp, Homo sapiens
gcagtcaggttggggc

SEQ ID NO: 453 - DNA, 16 bp, Homo sapiens
cagtcggcccctcagc

SEQ ID NO: 454 - DNA, 18 bp, Homo sapiens
ctccatggtaggggcttg

SEQ ID NO: 455 - DNA, 22 bp, Homo sapiens
catcgtgcccaccatgcactac

SEQ ID NO: 456 - DNA, 18 bp, Homo sapiens
tgggaataggcagcctgg

SEQ ID NO: 457 - DNA, 22 bp, Homo sapiens
ttgattctgatttgtcagtcgc

SEQ ID NO: 458 - DNA, 18 bp, Homo sapiens
ggccatcattcaagagag

SEQ ID NO: 459 - DNA, 23 bp, Homo sapiens
tagtaatcagttcattagcttgt

SEQ ID NO: 460 - DNA, 17 bp, Homo sapiens
gcctgtcttgaaccacc

SEQ ID NO: 461 - DNA, 21 bp, Homo sapiens
ttacactgaccctgctttctc

SEQ ID NO: 462 - DNA, 17 bp, Homo sapiens
tcctggagacccagcca

SEQ ID NO: 463 - DNA, 20 bp, Homo sapiens
gatacctcagtgcacagaag

SEQ ID NO: 464 - DNA, 22 bp, Homo sapiens
tggtcagtccttcatgaatgaa

SEQ ID NO: 465 - DNA, 20 bp, Homo sapiens
tcctgttctggttagaggta

SEQ ID NO: 466 - DNA, 17 bp, Homo sapiens
agctgctcatgcagttc

SEQ ID NO: 467 - DNA, 22 bp, Homo sapiens
ggacccaaaactctattatgag

SEQ ID NO: 468 - DNA, 16 bp, Homo sapiens
gcccagcctacctacc

SEQ ID NO: 469 - DNA, 24 bp, Homo sapiens
taccatggtttgattttgtctttt

SEQ ID NO: 470 - DNA, 22 bp, Homo sapiens
tgagaccaaaacaggagagaat

SEQ ID NO: 471 - DNA, 24 bp, Homo sapiens
ttgaaaatgggattggaaaagaac

SEQ ID NO: 472 - DNA, 17 bp, Homo sapiens
ctcaggaagggaggatg

SEQ ID NO: 473 - DNA, 24 bp, Homo sapiens
ataaacatacaagctacatttcgg

SEQ ID NO: 474 - DNA, 23 bp, Homo sapiens
attattgcagagcaaaaacattc

SEQ ID NO: 475 - DNA, 21 bp, Homo sapiens
attgaaagccataaatggatt

SEQ ID NO: 476 - DNA, 24 bp, Homo sapiens
atttcctttgtctatgcttgaatt

SEQ ID NO: 477 - DNA, 16 bp, Homo sapiens
atgttggttgcccggg

SEQ ID NO: 478 - DNA, 24 bp, Homo sapiens
aacattttatgttatttttttctt

SEQ ID NO: 479 - DNA, 19 bp, Homo sapiens
gtggaacacttctggctcc

SEQ ID NO: 480 - DNA, 22 bp, Homo sapiens
tcgagactccgttgttctgaac

SEQ ID NO: 481 - DNA, 19 bp, Homo sapiens
ggcacaaagcgtatgagtc

SEQ ID NO: 482 - DNA, 24 bp, Homo sapiens
aatctgagtataatgaccagctca

SEQ ID NO: 483 - DNA, 23 bp, Homo sapiens
atactgggacatatccaggggat

SEQ ID NO: 484 - DNA, 22 bp, Homo sapiens
ctgaagacactccgggctggcc

SEQ ID NO: 485 - DNA, 19 bp, Homo sapiens
gtgaagagttcatcccgac

SEQ ID NO: 486 - DNA, 24 bp, Homo sapiens
agtgacactatcaccttcaagaga

SEQ ID NO: 487 - DNA, 23 bp, Homo sapiens
ttgatccaggacatcaaagatat

SEQ ID NO: 488 - DNA, 21 bp, Homo sapiens
cctacctggtcaatgcgtatc

SEQ ID NO: 489 - DNA, 21 bp, Homo sapiens
gaatgtacttcagatgtgcct

SEQ ID NO: 490 - DNA, 24 bp, Homo sapiens
tcaactcgtttacccaaacccagt

SEQ ID NO: 491 - DNA, 20 bp, Homo sapiens
gatgtctcggttctcactgg

SEQ ID NO: 492 - DNA, 23 bp, Homo sapiens
cctggtcctaaggaaaggaaatt

SEQ ID NO: 493 - DNA, 17 bp, Homo sapiens
caggctctcctcattgc

SEQ ID NO: 494 - DNA, 23 bp, Homo sapiens
ttgtgagcccctcggaaatccag

SEQ ID NO: 495 - DNA, 20 bp, Homo sapiens
gacaaggtccttaatgggga

SEQ ID NO: 496 - DNA, 16 bp, Homo sapiens
gagtttcccctggcat

SEQ ID NO: 497 - DNA, 23 bp, Homo sapiens
ggttaaaggatttatcaaaccag

SEQ ID NO: 498 - DNA, 19 bp, Homo sapiens
cagaagctgatgagtagtg

SEQ ID NO: 499 - DNA, 19 bp, Homo sapiens
caccatcaccccaagagtg

SEQ ID NO: 500 - DNA, 20 bp, Homo sapiens
gtctctgcctagatgacttc

SEQ ID NO: 501 - DNA, 16 bp, Homo sapiens
ggggtctgagtgctgt

SEQ ID NO: 502 - DNA, 18 bp, Homo sapiens
atggcacaaaccgctggt

SEQ ID NO: 503 - DNA, 20 bp, Homo sapiens
cgaagttgagtttctgcacc

SEQ ID NO: 504 - DNA, 23 bp, Homo sapiens
gctctactgccgtccactttgag

SEQ ID NO: 505 - DNA, 24 bp, Homo sapiens
tggtggcatcaaacttttccttag

SEQ ID NO: 506 - DNA, 24 bp, Homo sapiens
ttaatgaagtatttaaagacagca

SEQ ID NO: 507 - DNA, 22 bp, Homo sapiens
tcttcaggaattctttgcctcc

SEQ ID NO: 508 - DNA, 24 bp, Homo sapiens
agctaccactgactctactgtcac

SEQ ID NO: 509 - DNA, 18 bp, Homo sapiens
ggaaggccatctggaatg

SEQ ID NO: 510 - DNA, 24 bp, Homo sapiens
cttaaagactggcatcacagctgc

SEQ ID NO: 511 - DNA, 18 bp, Homo sapiens
gcttgaatgcggcagtgc

SEQ ID NO: 512 - DNA, 24 bp, Homo sapiens
ctattgactgcgtccagtttcaga

SEQ ID NO: 513 - DNA, 19 bp, Homo sapiens
aaaggcctcagagcacctc

SEQ ID NO: 514 - DNA, 16 bp, Homo sapiens
gttgcccagctggcat

SEQ ID NO: 515 - DNA, 17 bp, Homo sapiens
ttggagcactcaaccat

SEQ ID NO: 516 - DNA, 20 bp, Homo sapiens
ctacgagtcctgtagcactg

SEQ ID NO: 517 - DNA, 17 bp, Homo sapiens
catgctccccacccctg

SEQ ID NO: 518 - DNA, 21 bp, Homo sapiens
cctccgtctatacaaagaggt

SEQ ID NO: 519 - DNA, 23 bp, Homo sapiens
gaaatcagatttggagtagaatg

SEQ ID NO: 520 - DNA, 21 bp, Homo sapiens
gtgctggtgagcttcagcaga

SEQ ID NO: 521 - DNA, 24 bp, Homo sapiens
actgctagggtagaaaagaaaaat

SEQ ID NO: 522 - DNA, 16 bp, Homo sapiens
gtgtcggtcaaagccc

SEQ ID NO: 523 - DNA, 23 bp, Homo sapiens
ggtgtgcatagaggtagagcctt

SEQ ID NO: 524 - DNA, 20 bp, Homo sapiens
ccaggtagagctcaggcaag

SEQ ID NO: 525 - DNA, 21 bp, Homo sapiens
tgtggtgagttgggaggtttt

SEQ ID NO: 526 - DNA, 16 bp, Homo sapiens
ggctgctcagtgtgct

SEQ ID NO: 527 - DNA, 23 bp, Homo sapiens
tttccattttgtttctcacaggc

SEQ ID NO: 528 - DNA, 24 bp, Homo sapiens
tgaacagcatacccaacaccaaag

SEQ ID NO: 529 - DNA, 22 bp, Homo sapiens
gcagccaaagggatcatcttgc

SEQ ID NO: 530 - DNA, 17 bp, Homo sapiens
gaaactcccgggcattg

SEQ ID NO: 531 - DNA, 24 bp, Homo sapiens
gataaaccacaatgtcctgtccac

SEQ ID NO: 532 - DNA, 24 bp, Homo sapiens
tttgatggatttgccttctaaggc

SEQ ID NO: 533 - DNA, 20 bp, Homo sapiens
cctgtggtctctgatggctt

SEQ ID NO: 534 - DNA, 20 bp, Homo sapiens
ctcccagttttcatgatgag

SEQ ID NO: 535 - DNA, 19 bp, Homo sapiens
gatccacccgcctcagcct

SEQ ID NO: 536 - DNA, 21 bp, Homo sapiens
agtagagacaaggtttcacca

SEQ ID NO: 537 - DNA, 16 bp, Homo sapiens
cagcccaaccgcctct

SEQ ID NO: 538 - DNA, 19 bp, Homo sapiens
caatacccatgttccagcc

SEQ ID NO: 539 - DNA, 16 bp, Homo sapiens
gggaccagaggagtcc

SEQ ID NO: 540 - DNA, 17 bp, Homo sapiens
ttcccactcctcccggc

SEQ ID NO: 541 - DNA, 17 bp, Homo sapiens
gtggccggaacgggagc

SEQ ID NO: 542 - DNA, 19 bp, Homo sapiens
gtaggaggcgtgaaagcag

SEQ ID NO: 543 - DNA, 21 bp, Homo sapiens
agaaatacttctcaggacctg

SEQ ID NO: 544 - DNA, 22 bp, Homo sapiens
gattgaaggcatttaaatagtg

SEQ ID NO: 545 - DNA, 18 bp, Homo sapiens
cctaatcctggttcacgt

SEQ ID NO: 546 - DNA, 23 bp, Homo sapiens
gctgtactcacttatgattatca

SEQ ID NO: 547 - DNA, 27 bp, Homo sapiens
ataaagcttcatatgtataagtttaaa

SEQ ID NO: 548 - DNA, 28 bp, Homo sapiens
attttaataaaagtgttctttacaggtc

SEQ ID NO: 549 - DNA, 22 bp, Homo sapiens
tggttctactcattgaaagaca

SEQ ID NO: 550 - DNA, 24 bp, Homo sapiens
agatcacagcatacaaaagccaat

SEQ ID NO: 551 - DNA, 18 bp, Homo sapiens
tcaggaagaatggagtgt

SEQ ID NO: 552 - DNA, 22 bp, Homo sapiens
tgaaattctttctgctgttcgg

SEQ ID NO: 553 - DNA, 20 bp, Homo sapiens
aatgcactgtagtctgagtt

SEQ ID NO: 554 - DNA, 18 bp, Homo sapiens
catattctgcagccactg

SEQ ID NO: 555 - DNA, 23 bp, Homo sapiens
tctacatactgacttcataggac

SEQ ID NO: 556 - DNA, 23 bp, Homo sapiens
taatcttgtaaaaaatgtaaaag

SEQ ID NO: 557 - DNA, 20 bp, Homo sapiens
ttttcccttagagttcaccg

SEQ ID NO: 558 - DNA, 24 bp, Homo sapiens
tggatactagaagaaaaagaactg

SEQ ID NO: 559 - DNA, 21 bp, Homo sapiens
ttgccagagaggaaatcatcc

SEQ ID NO: 560 - DNA, 20 bp, Homo sapiens
ctctggaatgtgtgtgttca

SEQ ID NO: 561 - DNA, 22 bp, Homo sapiens
acattttaaagagggaaaaatc

SEQ ID NO: 562 - DNA, 24 bp, Homo sapiens
ttttcttactcatatgcattccag

SEQ ID NO: 563 - DNA, 29 bp, Homo sapiens
actatctggatttcaaaatatattttaac

SEQ ID NO: 564 - DNA, 22 bp, Homo sapiens
aggtagaaagtcatttaatggc

SEQ ID NO: 565 - DNA, 23 bp, Homo sapiens
aattagaagagcctgggaacttg

SEQ ID NO: 566 - DNA, 21 bp, Homo sapiens
gtatagagtgcaagcttccaa

SEQ ID NO: 567 - DNA, 24 bp, Homo sapiens
ctttatatttttaatactggaatg

SEQ ID NO: 568 - DNA, 19 bp, Homo sapiens
accaaggtttaggtgcaag

SEQ ID NO: 569 - DNA, 21 bp, Homo sapiens
ttttttcaaatatttcttgcc

SEQ ID NO: 570 - DNA, 24 bp, Homo sapiens
tcaataaaatgtaatatagaagat

SEQ ID NO: 571 - DNA, 21 bp, Homo sapiens
agactacagtgtttgcccact

SEQ ID NO: 572 - DNA, 20 bp, Homo sapiens
caactctaaaactgggtctg

SEQ ID NO: 573 - DNA, 19 bp, Homo sapiens
aactggttccaaccttaac

SEQ ID NO: 574 - DNA, 24 bp, Homo sapiens
agagctttaagaaagtataatttc

SEQ ID NO: 575 - DNA, 22 bp, Homo sapiens
tcttcactaattaaacaagcat

SEQ ID NO: 576 - DNA, 23 bp, Homo sapiens
ttgcaaatttccttttaaaacaa

SEQ ID NO: 577 - DNA, 21 bp, Homo sapiens
cacttacccccaaagaatttc

SEQ ID NO: 578 - DNA, 26 bp, Homo sapiens
cctttatttctattgtgatgtactac

SEQ ID NO: 579 - DNA, 24 bp, Homo sapiens
aacttcttcaggagtaactatctc

SEQ ID NO: 580 - DNA, 20 bp, Homo sapiens
ggacttggaacttttgatgc

SEQ ID NO: 581 - DNA, 23 bp, Homo sapiens
acccactaaccttacctagtagt

SEQ ID NO: 582 - DNA, 21 bp, Homo sapiens
ggggttcagactgctattgaa

SEQ ID NO: 583 - DNA, 19 bp, Homo sapiens
tgttgatcatttccagcaa

SEQ ID NO: 584 - DNA, 21 bp, Homo sapiens
taggccagttctttggactta

SEQ ID NO: 585 - DNA, 21 bp, Homo sapiens
cagttacacatactcacacac

SEQ ID NO: 586 - DNA, 24 bp, Homo sapiens
agcatctctgaatttacatatcca

SEQ ID NO: 587 - DNA, 22 bp, Homo sapiens
gactgaaaaggagaaatagcac

SEQ ID NO: 588 - DNA, 21 bp, Homo sapiens
tcggtagcaaatgcctattat

SEQ ID NO: 589 - DNA, 21 bp, Homo sapiens
tcattgtaataatatgttgct

SEQ ID NO: 590 - DNA, 21 bp, Homo sapiens
gaatgactgaggagccattga

SEQ ID NO: 591 - DNA, 21 bp, Homo sapiens
ggttctgttacacaataagcc

SEQ ID NO: 592 - DNA, 24 bp, Homo sapiens
agtggtttctttgattttgtaaga

SEQ ID NO: 593 - DNA, 21 bp, Homo sapiens
ctcctttcttttctgctttgg

SEQ ID NO: 594 - DNA, 22 bp, Homo sapiens
aaaaataaaacaatcctgtttc

SEQ ID NO: 595 - DNA, 20 bp, Homo sapiens
ccaattagcttttcctccgt

SEQ ID NO: 596 - DNA, 24 bp, Homo sapiens
ttctcttgtttttatatattcaag

SEQ ID NO: 597 - DNA, 24 bp, Homo sapiens
acagaaagaaagagagatttgaag

SEQ ID NO: 598 - DNA, 20 bp, Homo sapiens
agctggtataaagaccaaag

SEQ ID NO: 599 - DNA, 17 bp, Homo sapiens
ggccttccagttccaca

SEQ ID NO: 600 - DNA, 18 bp, Homo sapiens
tgtggataaccaacggag

SEQ ID NO: 601 - DNA, 21 bp, Homo sapiens
acgtgccaataaaaaatacct

SEQ ID NO: 602 - DNA, 20 bp, Homo sapiens
ggcaagtttttaaacctgat

SEQ ID NO: 603 - DNA, 21 bp, Homo sapiens
cacaatgaatccagtaaaggc

SEQ ID NO: 604 - DNA, 24 bp, Homo sapiens
aattgggattgttaagagaattaa

SEQ ID NO: 605 - DNA, 22 bp, Homo sapiens
ggggccctaatcattaataaat

SEQ ID NO: 606 - DNA, 24 bp, Homo sapiens
ttatccggtatgtgtatctcttag

SEQ ID NO: 607 - DNA, 24 bp, Homo sapiens
aaacaaatgtttttattaaaggaa

SEQ ID NO: 608 - DNA, 19 bp, Homo sapiens
gctcctgctaataaagcct

SEQ ID NO: 609 - DNA, 23 bp, Homo sapiens
agactatttgatctaatatcatc

SEQ ID NO: 610 - DNA, 18 bp, Homo sapiens
tggcccatgtttaattcc

SEQ ID NO: 611 - DNA, 21 bp, Homo sapiens
tctttgcaaaacaggcattgc

SEQ ID NO: 612 - DNA, 24 bp, Homo sapiens
aattaaaacattttctttaggcac

SEQ ID NO: 613 - DNA, 24 bp, Homo sapiens
tgcagaaagtcatgaaacagtgat

SEQ ID NO: 614 - DNA, 22 bp, Homo sapiens
acaggtctggttttatcaaaag

SEQ ID NO: 615 - DNA, 27 bp, Homo sapiens
ttaaaatatatcaattttcttattagg

SEQ ID NO: 616 - DNA, 30 bp, Homo sapiens
taaaaatacttatttaatgtaataaataaa

SEQ ID NO: 617 - DNA, 19 bp, Homo sapiens
ttcgaagatgtgaaagtgc

SEQ ID NO: 618 - DNA, 21 bp, Homo sapiens
tccttaataaaataagcagat

SEQ ID NO: 619 - DNA, 18 bp, Homo sapiens
caaagttgcaatgggagc

SEQ ID NO: 620 - DNA, 20 bp, Homo sapiens
taaacttacgtgcctattcc

SEQ ID NO: 621 - DNA, 17 bp, Homo sapiens
cctttccagggcatact

SEQ ID NO: 622 - DNA, 23 bp, Homo sapiens
cttctctttgtacactccctaac

SEQ ID NO: 623 - DNA, 19 bp, Homo sapiens
tttgaacaaagcaagcagt

SEQ ID NO: 624 - DNA, 28 bp, Homo sapiens
ataacatgaacttttgctttataatatc

SEQ ID NO: 625 - DNA, 23 bp, Homo sapiens
agaaattgattagtttgtggttt

SEQ ID NO: 626 - DNA, 20 bp, Homo sapiens
agagctttggatgaagctac

SEQ ID NO: 627 - DNA, 21 bp, Homo sapiens
aaatgtctttgaaactcatct

SEQ ID NO: 628 - DNA, 23 bp, Homo sapiens
gccagcataaatgatattgcttg

SEQ ID NO: 629 - DNA, 21 bp, Homo sapiens
attgcttgaggccaggagttg

SEQ ID NO: 630 - DNA, 18 bp, Homo sapiens
aacctcccaagctgctct

SEQ ID NO: 631 - DNA, 19 bp, Homo sapiens
aaaagccccaggaaaaaac

SEQ ID NO: 632 - DNA, 17 bp, Homo sapiens
ccagcaaatgcctttgc

SEQ ID NO: 633 - DNA, 23 bp, Homo sapiens
tctttttaattctagcaccaagc

SEQ ID NO: 634 - DNA, 21 bp, Homo sapiens
tctgtattaaatccattgcct

SEQ ID NO: 635 - DNA, 22 bp, Homo sapiens
actagctagaatgagttaccag

SEQ ID NO: 636 - DNA, 20 bp, Homo sapiens
tcatctttaaccttacctga

SEQ ID NO: 637 - DNA, 22 bp, Homo sapiens
tacctattatgcttctattgca

SEQ ID NO: 638 - DNA, 22 bp, Homo sapiens
aataatcagaaatccacgttgt

SEQ ID NO: 639 - DNA, 23 bp, Homo sapiens
ctgatgctgtgcagatacttgga

SEQ ID NO: 640 - DNA, 18 bp, Homo sapiens
actggctcacagccatat

SEQ ID NO: 641 - DNA, 18 bp, Homo sapiens
tgagggatgccaaaatct

SEQ ID NO: 642 - DNA, 21 bp, Homo sapiens
tttgaatttgtgaagtacctt

SEQ ID NO: 643 - DNA, 24 bp, Homo sapiens
aatctgtagaggctacagacccta

SEQ ID NO: 644 - DNA, 28 bp, Homo sapiens
tctacagtaatttttttaatttttgtac

SEQ ID NO: 645 - DNA, 23 bp, Homo sapiens
ttatgctactgtctaaaatgttg

SEQ ID NO: 646 - DNA, 20 bp, Homo sapiens
ccctttcttttttctggagc

SEQ ID NO: 647 - DNA, 22 bp, Homo sapiens
acacttatatttttcttgcaga

SEQ ID NO: 648 - DNA, 20 bp, Homo sapiens
ataagcagttgcttagattt

SEQ ID NO: 649 - DNA, 22 bp, Homo sapiens
ccgtgaacacattgacaagtac

SEQ ID NO: 650 - DNA, 23 bp, Homo sapiens
cgttcagaagtaaaattcgaatc

SEQ ID NO: 651 - DNA, 21 bp, Homo sapiens
tggagagtttaaggcaatagt

SEQ ID NO: 652 - DNA, 21 bp, Homo sapiens
caaaacaacttgctactgacc

SEQ ID NO: 653 - DNA, 24 bp, Homo sapiens
ggggtaactcattcgactgtggag

SEQ ID NO: 654 - DNA, 20 bp, Homo sapiens
aaacatttaacaggactgcc

SEQ ID NO: 655 - DNA, 21 bp, Homo sapiens
tgggacacagtaaacagattc

SEQ ID NO: 656 - DNA, 22 bp, Homo sapiens
accatctttgcacaaatcaagt

SEQ ID NO: 657 - DNA, 20 bp, Homo sapiens
aaagaccctcttcagacttg

SEQ ID NO: 658 - DNA, 20 bp, Homo sapiens
cagaattggggccatgcccg

SEQ ID NO: 659 - DNA, 20 bp, Homo sapiens
tgccccgctaattttttttt

SEQ ID NO: 660 - DNA, 23 bp, Homo sapiens
aaacctagaaaggtagaagaaca

SEQ ID NO: 661 - DNA, 21 bp, Homo sapiens
aggttgatattgaactcctgg

SEQ ID NO: 662 - DNA, 23 bp, Homo sapiens
gccttatatttatttagggcttt

SEQ ID NO: 663 - DNA, 19 bp, Homo sapiens
ttacaagcataagccaccg

SEQ ID NO: 664 - DNA, 16 bp, Homo sapiens
gttgaagccaaggtcc

SEQ ID NO: 665 - DNA, 20 bp, Homo sapiens
tcggaactgtagctcatacc

SEQ ID NO: 666 - DNA, 23 bp, Homo sapiens
gccaaaacagcattaggtttgcg

SEQ ID NO: 667 - DNA, 23 bp, Homo sapiens
ttctccaggaaatgggtaatttg

SEQ ID NO: 668 - DNA, 21 bp, Homo sapiens
actttaaataaaacatctgtt

SEQ ID NO: 669 - DNA, 21 bp, Homo sapiens
ctctttctgttggattttccc

SEQ ID NO: 670 - DNA, 24 bp, Homo sapiens
catgtgctttttatttagggtatg

SEQ ID NO: 671 - DNA, 22 bp, Homo sapiens
ataatactgaaatgaaccagat

SEQ ID NO: 672 - DNA, 24 bp, Homo sapiens
tacagggaaaagcagttaccgtgt

SEQ ID NO: 673 - DNA, 21 bp, Homo sapiens
acagaacaaattaactttttt

SEQ ID NO: 674 - DNA, 19 bp, Homo sapiens
ttccgttctctggattggg

SEQ ID NO: 675 - DNA, 16 bp, Homo sapiens
aattgcactgccatgg

SEQ ID NO: 676 - DNA, 24 bp, Homo sapiens
aatactgtaaacttaatctgcaac

SEQ ID NO: 677 - DNA, 22 bp, Homo sapiens
tgcaatggaccataaaattacc

SEQ ID NO: 678 - DNA, 18 bp, Homo sapiens
tggggtccacaactatgt

SEQ ID NO: 679 - DNA, 22 bp, Homo sapiens
ataaatacattttatttgggac

SEQ ID NO: 680 - DNA, 21 bp, Homo sapiens
aaaatgtctgaagagtaacac

SEQ ID NO: 681 - DNA, 22 bp, Homo sapiens
ggattttttttctatcactgac

SEQ ID NO: 682 - DNA, 21 bp, Homo sapiens
acctgattcttttgcaaccct

SEQ ID NO: 683 - DNA, 24 bp, Homo sapiens
gaaatgagaaaagtggtggaggtt

SEQ ID NO: 684 - DNA, 20 bp, Homo sapiens
tcacagaggataattacatt

SEQ ID NO: 685 - DNA, 20 bp, Homo sapiens
tgctacccttggactgtgtt

SEQ ID NO: 686 - DNA, 21 bp, Homo sapiens
tctcaggtagttctttactgc

SEQ ID NO: 687 - DNA, 21 bp, Homo sapiens
ttttgatgaatgggaaagcag

SEQ ID NO: 688 - DNA, 24 bp, Homo sapiens
ggatttgaacccaagtgtttgacc

SEQ ID NO: 689 - DNA, 23 bp, Homo sapiens
ctgattggcaagggagtagcatg

SEQ ID NO: 690 - DNA, 29 bp, Homo sapiens
ttaagaaagtttaaatttatattttcttc

SEQ ID NO: 691 - DNA, 22 bp, Homo sapiens
gctgtccaacatcattccaggt

SEQ ID NO: 692 - DNA, 24 bp, Homo sapiens
ttacagtggtctttcctttatttg

SEQ ID NO: 693 - DNA, 20 bp, Homo sapiens
ttgtagacaacatcagtaat

SEQ ID NO: 694 - DNA, 22 bp, Homo sapiens
tcttggactatctaggtcatgc

SEQ ID NO: 695 - DNA, 22 bp, Homo sapiens
tgtgtgtgcataaattctcatc

SEQ ID NO: 696 - DNA, 25 bp, Homo sapiens
tgacttttcaagacctaatagaaag

SEQ ID NO: 697 - DNA, 18 bp, Homo sapiens
gttagcccctttcctttc

SEQ ID NO: 698 - DNA, 20 bp, Homo sapiens
aggaatggaatgttatttgt

SEQ ID NO: 699 - DNA, 26 bp, Homo sapiens
aaaggaaaaatattaattttttaaac

SEQ ID NO: 700 - DNA, 19 bp, Homo sapiens
ctggatgttcctggatcca

SEQ ID NO: 701 - DNA, 22 bp, Homo sapiens
ttgatgtccaatatagaaaaaa

SEQ ID NO: 702 - DNA, 18 bp, Homo sapiens
tgtctaagacccaggcag

SEQ ID NO: 703 - DNA, 22 bp, Homo sapiens
aacttaacatagatacagtttc

SEQ ID NO: 704 - DNA, 20 bp, Homo sapiens
caaagcaggtattccctttt

SEQ ID NO: 705 - DNA, 23 bp, Homo sapiens
ccttcagctgctaatagtaaatg

SEQ ID NO: 706 - DNA, 20 bp, Homo sapiens
ttagtgtgatactcctctgt

SEQ ID NO: 707 - DNA, 22 bp, Homo sapiens
aattctccacacttaaaacctg

SEQ ID NO: 708 - DNA, 23 bp, Homo sapiens
aaaatacaggttctaagtaattt

SEQ ID NO: 709 - DNA, 20 bp, Homo sapiens
tgttgcagaagggaaataca

SEQ ID NO: 710 - DNA, 30 bp, Homo sapiens
ttaaaaaatacatatatacatatacttatt

SEQ ID NO: 711 - DNA, 20 bp, Homo sapiens
tggaaaaatatcctcccaaa

SEQ ID NO: 712 - DNA, 23 bp, Homo sapiens
acacattaaatatatggttgaaa

SEQ ID NO: 713 - DNA, 17 bp, Homo sapiens
attgctcaaccgctttg

SEQ ID NO: 714 - DNA, 24 bp, Homo sapiens
cagtatttgcttaactgattttaa

SEQ ID NO: 715 - DNA, 27 bp, Homo sapiens
attacatttcttaaaatcgataggaac

SEQ ID NO: 716 - DNA, 21 bp, Homo sapiens
tcagtccatccgaaaaataat

SEQ ID NO: 717 - DNA, 29 bp, Homo sapiens
tataatacaatgacatatttaataatgac

SEQ ID NO: 718 - DNA, 23 bp, Homo sapiens
tttccaagtagatgtcaacaaag

SEQ ID NO: 719 - DNA, 20 bp, Homo sapiens
tgctaactctcagcttacag

SEQ ID NO: 720 - DNA, 23 bp, Homo sapiens
aggatgagaaggggaggaggtag

SEQ ID NO: 721 - DNA, 20 bp, Homo sapiens
aaccgtctgtattcaggatc

SEQ ID NO: 722 - DNA, 24 bp, Homo sapiens
ttttcagtgaaaaaattataggcc

SEQ ID NO: 723 - DNA, 20 bp, Homo sapiens
actcatgtggtatgaaagtc

SEQ ID NO: 724 - DNA, 21 bp, Homo sapiens
atttgcatttaaggtatcgtc

SEQ ID NO: 725 - DNA, 24 bp, Homo sapiens
atgaaaatcatactagccataaag

SEQ ID NO: 726 - DNA, 23 bp, Homo sapiens
aaaccaacaccttacgattattc

SEQ ID NO: 727 - DNA, 24 bp, Homo sapiens
agtagaattacagtgaattacttt

SEQ ID NO: 728 - DNA, 21 bp, Homo sapiens
tatgaacattgcactaacgac

SEQ ID NO: 729 - DNA, 20 bp, Homo sapiens
cattcttcaattgctgctgg

SEQ ID NO: 730 - DNA, 19 bp, Homo sapiens
tggaaaacatcatcagcca

SEQ ID NO: 731 - DNA, 17 bp, Homo sapiens
gatgcttctctgaattt

SEQ ID NO: 732 - DNA, 24 bp, Homo sapiens
tctgtgacctttgttagaaagttt

SEQ ID NO: 733 - DNA, 19 bp, Homo sapiens
gcaaggaaaagcagcagtt

SEQ ID NO: 734 - DNA, 21 bp, Homo sapiens
ttctccatctgctctagcaag

SEQ ID NO: 735 - DNA, 23 bp, Homo sapiens
tgcctgaaaaacattaaattgtg

SEQ ID NO: 736 - DNA, 24 bp, Homo sapiens
ggtttcataaaagaatggaggaat

SEQ ID NO: 737 - DNA, 18 bp, Homo sapiens
gttttggaccatggccag

SEQ ID NO: 738 - DNA, 24 bp, Homo sapiens
aggaacaggttttacttatttttg

SEQ ID NO: 739 - DNA, 22 bp, Homo sapiens
aaaaacaaaaatgcaacacctg

SEQ ID NO: 740 - DNA, 22 bp, Homo sapiens
gttgtcttgaggatggtgatga

SEQ ID NO: 741 - DNA, 23 bp, Homo sapiens
aacatttaggttaatttcaaaag

SEQ ID NO: 742 - DNA, 22 bp, Homo sapiens
gggaaatgtgttttatgaacga

SEQ ID NO: 743 - DNA, 22 bp, Homo sapiens
gcctatgtccaaatcaaaactt

SEQ ID NO: 744 - DNA, 21 bp, Homo sapiens
gcatcctttagttaccaggtg

SEQ ID NO: 745 - DNA, 21 bp, Homo sapiens
tcttcaaatgggaaagtaaaa

SEQ ID NO: 746 - DNA, 28 bp, Homo sapiens
ttgaagtttttttcctataaatagcatc

SEQ ID NO: 747 - DNA, 22 bp, Homo sapiens
cagaaaacaagctttatttggc

SEQ ID NO: 748 - DNA, 24 bp, Homo sapiens
agtttagttttaatattgcaaatt

SEQ ID NO: 749 - DNA, 19 bp, Homo sapiens
gttcagcaaagtttcgaag

SEQ ID NO: 750 - DNA, 30 bp, Homo sapiens
ttaatatttaattatattttcataggtatt

SEQ ID NO: 751 - DNA, 19 bp, Homo sapiens
ttttgaccttgccatgaac

SEQ ID NO: 752 - DNA, 22 bp, Homo sapiens
agaatctatgattcatctgcca

SEQ ID NO: 753 - DNA, 21 bp, Homo sapiens
tggtgaaatatttaaaaacca

SEQ ID NO: 754 - DNA, 19 bp, Homo sapiens
gggagatgatcctcttcga

SEQ ID NO: 755 - DNA, 23 bp, Homo sapiens
ttctctccttaggtaaacttctg

SEQ ID NO: 756 - DNA, 24 bp, Homo sapiens
acattatctcataccactttagat

SEQ ID NO: 757 - DNA, 21 bp, Homo sapiens
cagtcctctggtttattccca

SEQ ID NO: 758 - DNA, 24 bp, Homo sapiens
aagcaatttaaaaaccagtgtttc

SEQ ID NO: 759 - DNA, 20 bp, Homo sapiens
tccctggaaataagttgcag

SEQ ID NO: 760 - DNA, 22 bp, Homo sapiens
agcaatctcttttctgaacagg

SEQ ID NO: 761 - DNA, 19 bp, Homo sapiens
tctgtacctcagctacgtg

SEQ ID NO: 762 - DNA, 21 bp, Homo sapiens
gggagacagtgttaaattacg

SEQ ID NO: 763 - DNA, 23 bp, Homo sapiens
gtttacttaaggaaagctaggaa

SEQ ID NO: 764 - DNA, 22 bp, Homo sapiens
gggcacacatgaaaaaatacac

SEQ ID NO: 765 - DNA, 20 bp, Homo sapiens
ctaccaccaaatcaatgctt

SEQ ID NO: 766 - DNA, 19 bp, Homo sapiens
tgccactcaacacctcttc

SEQ ID NO: 767 - DNA, 22 bp, Homo sapiens
ctcttgtttctatgtgttttgg

SEQ ID NO: 768 - DNA, 18 bp, Homo sapiens
tcctgtgaacagttcagc

SEQ ID NO: 769 - DNA, 20 bp, Homo sapiens
tcatgcctccttttgtctct

SEQ ID NO: 770 - DNA, 22 bp, Homo sapiens
acaagcctacctcttattaagg

SEQ ID NO: 771 - DNA, 21 bp, Homo sapiens
ttgttacatttgtcactgtgc

SEQ ID NO: 772 - DNA, 24 bp, Homo sapiens
agctattaaatcctttaatctact

SEQ ID NO: 773 - DNA, 25 bp, Homo sapiens
ttgcaacccaatttatatgtagtag

SEQ ID NO: 774 - DNA, 22 bp, Homo sapiens
acaaagtatttagaagaacatt

SEQ ID NO: 775 - DNA, 19 bp, Homo sapiens
actagactgggcattagtt

SEQ ID NO: 776 - DNA, 16 bp, Homo sapiens
cactcattgcctctgc

SEQ ID NO: 777 - DNA, 22 bp, Homo sapiens
ttgtttaaatccttaaagcagt

SEQ ID NO: 778 - DNA, 19 bp, Homo sapiens
gctgaacaaaggatccaac

SEQ ID NO: 779 - DNA, 22 bp, Homo sapiens
aaatcatttatgagaagaaatc

SEQ ID NO: 780 - DNA, 23 bp, Homo sapiens
gtaatatccataaacagggcatg

SEQ ID NO: 781 - DNA, 21 bp, Homo sapiens
attctgtaatgctctgcagag

SEQ ID NO: 782 - DNA, 25 bp, Homo sapiens
ttagcaaaataagtacatgaaaaag

SEQ ID NO: 783 - DNA, 21 bp, Homo sapiens
agtttaccgatatggaggaga

SEQ ID NO: 784 - DNA, 22 bp, Homo sapiens
ttgaagtatatgggtatgattg

SEQ ID NO: 785 - DNA, 17 bp, Homo sapiens
agctattgcacatgccc

SEQ ID NO: 786 - DNA, 23 bp, Homo sapiens
aacaagtaaaacattctgaaaac

SEQ ID NO: 787 - DNA, 24 bp, Homo sapiens
actgatttataatacatagttttc

SEQ ID NO: 788 - DNA, 21 bp, Homo sapiens
cacaacatgccatagaaacaa

SEQ ID NO: 789 - DNA, 24 bp, Homo sapiens
tttaccttatgaatttatttatgt

SEQ ID NO: 790 - DNA, 16 bp, Homo sapiens
acaaacctgatgaggc

SEQ ID NO: 791 - DNA, 22 bp, Homo sapiens
tgcatttgaaagaaagcaaact

SEQ ID NO: 792 - DNA, 30 bp, Homo sapiens
ttacaatgaattttttttaataaaaatgcc

SEQ ID NO: 793 - DNA, 22 bp, Homo sapiens
cgtatgatgctcttccaagtac

SEQ ID NO: 794 - DNA, 19 bp, Homo sapiens
agaaaccactgaaatctgg

SEQ ID NO: 795 - DNA, 22 bp, Homo sapiens
gaggctatgatgaattagtgcc

SEQ ID NO: 796 - DNA, 22 bp, Homo sapiens
ttggaaattaacttcacctgtg

SEQ ID NO: 797 - DNA, 24 bp, Homo sapiens
cctacatggccaacaactttgggc

SEQ ID NO: 798 - DNA, 17 bp, Homo sapiens
gctccaagctcctgatg

SEQ ID NO: 799 - DNA, 23 bp, Homo sapiens
tgctaaattttacctttgtccag

SEQ ID NO: 800 - DNA, 22 bp, Homo sapiens
actctgaaattgaacctgaaga

SEQ ID NO: 801 - DNA, 24 bp, Homo sapiens
taagtggaatcctgaagcattgcc

SEQ ID NO: 802 - DNA, 18 bp, Homo sapiens
cacatacacctgagaagc

SEQ ID NO: 803 - DNA, 18 bp, Homo sapiens
agccaggtgtgctatcag

SEQ ID NO: 804 - DNA, 19 bp, Homo sapiens
ctgatggatgctaggtgag

SEQ ID NO: 805 - DNA, 26 bp, Homo sapiens
attcaggcaagaaataattaaatttg

SEQ ID NO: 806 - DNA, 21 bp, Homo sapiens
gcacttccttgctgtaaaatg

SEQ ID NO: 807 - DNA, 24 bp, Homo sapiens
tgagagctaatctagttgttcttt

SEQ ID NO: 808 - DNA, 30 bp, Homo sapiens
aatataataatataatacaaatacagtaac

SEQ ID NO: 809 - DNA, 19 bp, Homo sapiens
tggcagtaacaagacactc

SEQ ID NO: 810 - DNA, 30 bp, Homo sapiens
ttataatatatatgatatatacatgatata

SEQ ID NO: 811 - DNA, 24 bp, Homo sapiens
tagaactgctttcaggaatcccaa

SEQ ID NO: 812 - DNA, 20 bp, Homo sapiens
gccaagttaccaaaaagttt

SEQ ID NO: 813 - DNA, 24 bp, Homo sapiens
caagaactacttcttcaattttgc

SEQ ID NO: 814 - DNA, 22 bp, Homo sapiens
tctactttcagacttctaaaaa

SEQ ID NO: 815 - DNA, 23 bp, Homo sapiens
attgattgaattctcatccttcc

SEQ ID NO: 816 - DNA, 22 bp, Homo sapiens
atttgaaaccactttagccttc

SEQ ID NO: 817 - DNA, 21 bp, Homo sapiens
tgagagtcccaaatacctgaa

SEQ ID NO: 818 - DNA, 21 bp, Homo sapiens
tgtttttatgtattcctaggc

SEQ ID NO: 819 - DNA, 23 bp, Homo sapiens
acattaaaaaaatccattcaaca

SEQ ID NO: 820 - DNA, 23 bp, Homo sapiens
gaaacacgaaaccttataggaag

SEQ ID NO: 821 - DNA, 16 bp, Homo sapiens
gcaactccagcttgtt

SEQ ID NO: 822 - DNA, 20 bp, Homo sapiens
cacagtagaaattagagaac

SEQ ID NO: 823 - DNA, 20 bp, Homo sapiens
acttcctggagacaagtttt

SEQ ID NO: 824 - DNA, 21 bp, Homo sapiens
gcattttaagaacattagaac

SEQ ID NO: 825 - DNA, 25 bp, Homo sapiens
atatgcaaactattttaaatataag

SEQ ID NO: 826 - DNA, 27 bp, Homo sapiens
ttttcaagcttaatgaaagtaaaattg

SEQ ID NO: 827 - DNA, 24 bp, Homo sapiens
aatgttaattaaaaagtggttaat

SEQ ID NO: 828 - DNA, 22 bp, Homo sapiens
tcaagaaatagaatttgaaaac

SEQ ID NO: 829 - DNA, 18 bp, Homo sapiens
tcgaagaattccaacagc

SEQ ID NO: 830 - DNA, 18 bp, Homo sapiens
tgagctcaaactgttgac

SEQ ID NO: 831 - DNA, 19 bp, Homo sapiens
gatctgcattgtcaacagc

SEQ ID NO: 832 - DNA, 23 bp, Homo sapiens
tgaataaattactcctaaaaatt

SEQ ID NO: 833 - DNA, 18 bp, Homo sapiens
aggtggcaaatctctacc

SEQ ID NO: 834 - DNA, 22 bp, Homo sapiens
tcttgatccacatgcacaagtc

SEQ ID NO: 835 - DNA, 20 bp, Homo sapiens
gcaaggatatagaggaccct

SEQ ID NO: 836 - DNA, 24 bp, Homo sapiens
agtcctcactttaaatctggcagc

SEQ ID NO: 837 - DNA, 24 bp, Homo sapiens
atagggtaaaatgttaacaacagg

SEQ ID NO: 838 - DNA, 20 bp, Homo sapiens
gctcagccaaagttaatctg

SEQ ID NO: 839 - DNA, 18 bp, Homo sapiens
tttgaatgctgagttcct

SEQ ID NO: 840 - DNA, 22 bp, Homo sapiens
caccctccaccatcttcctttt

SEQ ID NO: 841 - DNA, 23 bp, Homo sapiens
ttcagattttcttcttttgtttc

SEQ ID NO: 842 - DNA, 19 bp, Homo sapiens
atttgcttaccttgaagac

SEQ ID NO: 843 - DNA, 20 bp, Homo sapiens
tccaattcttagtcttgcct

SEQ ID NO: 844 - DNA, 21 bp, Homo sapiens
atgtctgtaaagaagacacca

SEQ ID NO: 845 - DNA, 24 bp, Homo sapiens
accgatgtgaatcagaagaaaagg

SEQ ID NO: 846 - DNA, 16 bp, Homo sapiens
gagcagaagcagagcc

SEQ ID NO: 847 - DNA, 21 bp, Homo sapiens
ggtcagcccttaaatatgcag

SEQ ID NO: 848 - DNA, 22 bp, Homo sapiens
tctgccaatacagacattaaac

SEQ ID NO: 849 - DNA, 21 bp, Homo sapiens
ttgtggactgggtagcccttg

SEQ ID NO: 850 - DNA, 24 bp, Homo sapiens
tccaatctccagatctcaaattat

SEQ ID NO: 851 - DNA, 20 bp, Homo sapiens
gagactagcagaatagggac

SEQ ID NO: 852 - DNA, 20 bp, Homo sapiens
tcagcaatagttcctgatcg

SEQ ID NO: 853 - DNA, 23 bp, Homo sapiens
atgacatgtctctgaattttcag

SEQ ID NO: 854 - DNA, 24 bp, Homo sapiens
acatggtaatatttattattatgt

SEQ ID NO: 855 - DNA, 18 bp, Homo sapiens
ttggggcatcctttttgt

SEQ ID NO: 856 - DNA, 23 bp, Homo sapiens
ctgaaagatgatgaaggaaggag

SEQ ID NO: 857 - DNA, 21 bp, Homo sapiens
agtaaccggcttatttcacga

SEQ ID NO: 858 - DNA, 22 bp, Homo sapiens
acattgttttctaacctgaacc

SEQ ID NO: 859 - DNA, 19 bp, Homo sapiens
gggatctgcttcaggtaga

SEQ ID NO: 860 - DNA, 23 bp, Homo sapiens
tggaaatcgggtttatagattac

SEQ ID NO: 861 - DNA, 20 bp, Homo sapiens
tccagaagagtggtatatgc

SEQ ID NO: 862 - DNA, 23 bp, Homo sapiens
acacacctagtctgtacacatac

SEQ ID NO: 863 - DNA, 23 bp, Homo sapiens
aacacagatatgcccatttattc

SEQ ID NO: 864 - DNA, 19 bp, Homo sapiens
tggttgcaggctatgttct

SEQ ID NO: 865 - DNA, 22 bp, Homo sapiens
acaattctttatggtttggttt

SEQ ID NO: 866 - DNA, 22 bp, Homo sapiens
tgatgctatattaattggtgca

SEQ ID NO: 867 - DNA, 20 bp, Homo sapiens
cacagactaaaggatgctaa

SEQ ID NO: 868 - DNA, 22 bp, Homo sapiens
tgaaatctaaccaaagttttaa

SEQ ID NO: 869 - DNA, 21 bp, Homo sapiens
aagggaattttcctactccac

SEQ ID NO: 870 - DNA, 20 bp, Homo sapiens
tcatttgaaggaaagaaacc

SEQ ID NO: 871 - DNA, 26 bp, Homo sapiens
ttttgtgatctcatttaacctataag

SEQ ID NO: 872 - DNA, 24 bp, Homo sapiens
gtaataaattcaatcacttttgtt

SEQ ID NO: 873 - DNA, 21 bp, Homo sapiens
tgtacataattccttacctgc

SEQ ID NO: 874 - DNA, 19 bp, Homo sapiens
tcattgggttcagttcaac

SEQ ID NO: 875 - DNA, 24 bp, Homo sapiens
tttaaaaaataatcattttcctat

SEQ ID NO: 876 - DNA, 22 bp, Homo sapiens
attctttcacctgccctaatgg

SEQ ID NO: 877 - DNA, 21 bp, Homo sapiens
ctatgaaatgtactaagtggt

SEQ ID NO: 878 - DNA, 19 bp, Homo sapiens
tgtgtttctctagctgcag

SEQ ID NO: 879 - DNA, 23 bp, Homo sapiens
aagaaaaatgaggtaagcctaac

SEQ ID NO: 880 - DNA, 23 bp, Homo sapiens
ttttgcaaataattttagagggt

SEQ ID NO: 881 - DNA, 21 bp, Homo sapiens
cagtatacctctaagtgcaat

SEQ ID NO: 882 - DNA, 24 bp, Homo sapiens
agagtaactgttctatagtaatgg

SEQ ID NO: 883 - DNA, 21 bp, Homo sapiens
agtacaacactttagaggctc

SEQ ID NO: 884 - DNA, 21 bp, Homo sapiens
actttgttgtgttttttttgt

SEQ ID NO: 885 - DNA, 21 bp, Homo sapiens
aagaaaagatggacaagaagg

SEQ ID NO: 886 - DNA, 18 bp, Homo sapiens
ctggggaagggatacttt

SEQ ID NO: 887 - DNA, 29 bp, Homo sapiens
tattaagtgaacatacaaaaataaaataa

SEQ ID NO: 888 - DNA, 24 bp, Homo sapiens
cccgcaaatgctaaaataatattc

SEQ ID NO: 889 - DNA, 24 bp, Homo sapiens
tactatgactactttctacatgaa

SEQ ID NO: 890 - DNA, 20 bp, Homo sapiens
gcataaattccttcacccag

SEQ ID NO: 891 - DNA, 24 bp, Homo sapiens
caaaatatagtcaccaaaagtgac

SEQ ID NO: 892 - DNA, 23 bp, Homo sapiens
gaaccattttacagtaatcctgg

SEQ ID NO: 893 - DNA, 21 bp, Homo sapiens
atccacttaattctgttgttt

SEQ ID NO: 894 - DNA, 24 bp, Homo sapiens
atcatctgtaggatacattctgga

SEQ ID NO: 895 - DNA, 24 bp, Homo sapiens
ctgaggcatggtctcattcctaat

SEQ ID NO: 896 - DNA, 27 bp, Homo sapiens
aaacaaaaaaacattttaagaaatatc

SEQ ID NO: 897 - DNA, 18 bp, Homo sapiens
gctgtgtggtggtggctg

SEQ ID NO: 898 - DNA, 30 bp, Homo sapiens
gattcttaattacccttatttttacattag

SEQ ID NO: 899 - DNA, 18 bp, Homo sapiens
ctcaagtgcccagtttcc

SEQ ID NO: 900 - DNA, 18 bp, Homo sapiens
accagcaggtgccaaatc

SEQ ID NO: 901 - DNA, 22 bp, Homo sapiens
aggagctgcttcttccctggcc

SEQ ID NO: 902 - DNA, 20 bp, Homo sapiens
cctttctcggaactgtatgc

SEQ ID NO: 903 - DNA, 22 bp, Homo sapiens
tttcacattacttcagttgtcg

SEQ ID NO: 904 - DNA, 20 bp, Homo sapiens
tttagttaaagttctgtacc

SEQ ID NO: 905 - DNA, 21 bp, Homo sapiens
agaggtaacacccattatgtc

SEQ ID NO: 906 - DNA, 25 bp, Homo sapiens
gcacacaaatatttactaagtgaac

SEQ ID NO: 907 - DNA, 19 bp, Homo sapiens
tgcaaaaacacatgcaggg

SEQ ID NO: 908 - DNA, 19 bp, Homo sapiens
ggtgagatcaggaactatg

SEQ ID NO: 909 - DNA, 20 bp, Homo sapiens
aacatgaaggacgaaggtac

SEQ ID NO: 910 - DNA, 19 bp, Homo sapiens
taataagataccaccaaac

SEQ ID NO: 911 - DNA, 19 bp, Homo sapiens
ccatgtgccacaattgaaa

SEQ ID NO: 912 - DNA, 26 bp, Homo sapiens
atatttaaaattttgtaaatgtttta

SEQ ID NO: 913 - DNA, 17 bp, Homo sapiens
tggctgggattcctctg

SEQ ID NO: 914 - DNA, 30 bp, Homo sapiens
aattttattttatacacattttgtttttta

SEQ ID NO: 915 - DNA, 21 bp, Homo sapiens
tccacaagtaagtgctttctt

SEQ ID NO: 916 - DNA, 23 bp, Homo sapiens
aggatttgtttatggaggaaatc

SEQ ID NO: 917 - DNA, 22 bp, Homo sapiens
cagggaaattttgattgactta

SEQ ID NO: 918 - DNA, 19 bp, Homo sapiens
aagtgacagagctagaaac

SEQ ID NO: 919 - DNA, 18 bp, Homo sapiens
tcaggcccacaatttcca

SEQ ID NO: 920 - DNA, 24 bp, Homo sapiens
tcctatagagtaaggattttttaa

SEQ ID NO: 921 - DNA, 26 bp, Homo sapiens
tgacttcatgataagggaaaatattt

SEQ ID NO: 922 - DNA, 22 bp, Homo sapiens
ccgaatgccctttaaatagtac

SEQ ID NO: 923 - DNA, 20 bp, Homo sapiens
tttgaaggttctttgtaaat

SEQ ID NO: 924 - DNA, 19 bp, Homo sapiens
tttagagatgggtctgctg

SEQ ID NO: 925 - DNA, 22 bp, Homo sapiens
ggttttccgatattagctgata

SEQ ID NO: 926 - DNA, 19 bp, Homo sapiens
gctggttgctggaattatc

SEQ ID NO: 927 - DNA, 19 bp, Homo sapiens
attgttacaattttcacac

SEQ ID NO: 928 - DNA, 22 bp, Homo sapiens
gttccactcatcatatgagacc

SEQ ID NO: 929 - DNA, 25 bp, Homo sapiens
cacattttccaaaagtggataattt

SEQ ID NO: 930 - DNA, 17 bp, Homo sapiens
agggtcttcggaaacat

SEQ ID NO: 931 - DNA, 20 bp, Homo sapiens
tgtctgtaactagatgtgtg

SEQ ID NO: 932 - DNA, 24 bp, Homo sapiens
cttgaagctccataactatctttg

SEQ ID NO: 933 - DNA, 22 bp, Homo sapiens
tgtcatttttcaggaaaggcta

SEQ ID NO: 934 - DNA, 19 bp, Homo sapiens
accacaaccattgctatgg

SEQ ID NO: 935 - DNA, 24 bp, Homo sapiens
acaactttgaaaagctatttcatg

SEQ ID NO: 936 - DNA, 20 bp, Homo sapiens
aactaagcaaactctagcac

SEQ ID NO: 937 - DNA, 19 bp, Homo sapiens
tctggttcacaaacgtggc

SEQ ID NO: 938 - DNA, 23 bp, Homo sapiens
aaactagctagtaagcaatatac

SEQ ID NO: 939 - DNA, 18 bp, Homo sapiens
tcagctcaggcctaattt

SEQ ID NO: 940 - DNA, 16 bp, Homo sapiens
gagctcaggggcctag

SEQ ID NO: 941 - DNA, 22 bp, Homo sapiens
tagatctgtttaggcatctaca

SEQ ID NO: 942 - DNA, 20 bp, Homo sapiens
caaggggaccaagcaatttt

SEQ ID NO: 943 - DNA, 23 bp, Homo sapiens
gcttatgaatagtttctgtgggt

SEQ ID NO: 944 - DNA, 25 bp, Homo sapiens
atttggattaaatatgataacattc

SEQ ID NO: 945 - DNA, 19 bp, Homo sapiens
tttttggcattcactaggc

SEQ ID NO: 946 - DNA, 20 bp, Homo sapiens
tccttttgttgccctggcaa

SEQ ID NO: 947 - DNA, 19 bp, Homo sapiens
aagctttggagattgcaga

SEQ ID NO: 948 - DNA, 23 bp, Homo sapiens
aggtgtacacaatctctcccaac

SEQ ID NO: 949 - DNA, 26 bp, Homo sapiens
attgtctaatgcattgtcataaattc

SEQ ID NO: 950 - DNA, 22 bp, Homo sapiens
tgccgagcttattctgtagaag

SEQ ID NO: 951 - DNA, 19 bp, Homo sapiens
tcttacaggtccttggtga

SEQ ID NO: 952 - DNA, 22 bp, Homo sapiens
tttttctaatgctttttacata

SEQ ID NO: 953 - DNA, 23 bp, Homo sapiens
cataaatacctaaaaattacttg

SEQ ID NO: 954 - DNA, 23 bp, Homo sapiens
ttttgcagtgatatggtttactg

SEQ ID NO: 955 - DNA, 16 bp, Homo sapiens
ccaataggccacagcc

SEQ ID NO: 956 - DNA, 21 bp, Homo sapiens
tacaatcttgctaaaggtttc

SEQ ID NO: 957 - DNA, 19 bp, Homo sapiens
gtctttgcagtagtctccg

SEQ ID NO: 958 - DNA, 24 bp, Homo sapiens
ttcagtttaaattatttttcaagt

SEQ ID NO: 959 - DNA, 19 bp, Homo sapiens
gctcctgatgacttacctc

SEQ ID NO: 960 - DNA, 20 bp, Homo sapiens
tcttttttaggagtggctgt

SEQ ID NO: 961 - DNA, 21 bp, Homo sapiens
actgtaatttacctaatagct

SEQ ID NO: 962 - DNA, 22 bp, Homo sapiens
tttttccagattgatgggcccg

SEQ ID NO: 963 - DNA, 26 bp, Homo sapiens
gttaaagaataaaggcttcacttttc

SEQ ID NO: 964 - DNA, 22 bp, Homo sapiens
aatgttctttcccgacattatg

SEQ ID NO: 965 - DNA, 20 bp, Homo sapiens
tctggaagtcctttccaagg

SEQ ID NO: 966 - DNA, 22 bp, Homo sapiens
tgtctttaggatattgttttat

SEQ ID NO: 967 - DNA, 18 bp, Homo sapiens
tgaccaggcttgtgtttc

SEQ ID NO: 968 - DNA, 21 bp, Homo sapiens
gcaaaaatcaccaggtcttgc

SEQ ID NO: 969 - DNA, 25 bp, Homo sapiens
caagtaattgcatacttaatatctg

SEQ ID NO: 970 - DNA, 21 bp, Homo sapiens
tcttttctttcattcagatcc

SEQ ID NO: 971 - DNA, 20 bp, Homo sapiens
cctgtgcatataaggcattt

SEQ ID NO: 972 - DNA, 18 bp, Homo sapiens
gcccagtactgtcctttc

SEQ ID NO: 973 - DNA, 20 bp, Homo sapiens
acaatcttacctaattgagc

SEQ ID NO: 974 - DNA, 21 bp, Homo sapiens
gagacactttatgatttatag

SEQ ID NO: 975 - DNA, 23 bp, Homo sapiens
cggaatgtactgggtggaggagg

SEQ ID NO: 976 - DNA, 16 bp, Homo sapiens
ttcttgagctccaggt

SEQ ID NO: 977 - DNA, 16 bp, Homo sapiens
gtgtgtgcctcagcgc

SEQ ID NO: 978 - DNA, 20 bp, Homo sapiens
acagtccttgtgttcttact

SEQ ID NO: 979 - DNA, 22 bp, Homo sapiens
ccgtcattccttcagtgaacat

SEQ ID NO: 980 - DNA, 20 bp, Homo sapiens
actataaagcaatgcaccca

SEQ ID NO: 981 - DNA, 16 bp, Homo sapiens
tgcacccgaccagcac

SEQ ID NO: 982 - DNA, 24 bp, Homo sapiens
caaaaacgaaaagacttaattttc

SEQ ID NO: 983 - DNA, 22 bp, Homo sapiens
tggaaaggctgcccttggtaag

SEQ ID NO: 984 - DNA, 22 bp, Homo sapiens
ggttggcgaacattgttttatc

SEQ ID NO: 985 - DNA, 22 bp, Homo sapiens
cttttttctttttggtggcagg

SEQ ID NO: 986 - DNA, 20 bp, Homo sapiens
attgttagaaccaaactggt

SEQ ID NO: 987 - DNA, 25 bp, Homo sapiens
ggtgtttttaaatatactagttttc

SEQ ID NO: 988 - DNA, 20 bp, Homo sapiens
aacaaccactgctgtagaag

SEQ ID NO: 989 - DNA, 22 bp, Homo sapiens
tgtttttcaggcaaatgaagat

SEQ ID NO: 990 - DNA, 19 bp, Homo sapiens
actgctgtctttgtagacc

SEQ ID NO: 991 - DNA, 21 bp, Homo sapiens
ctgggaattttggtctttcag

SEQ ID NO: 992 - DNA, 23 bp, Homo sapiens
agttaccaatatatatatgcaaa

SEQ ID NO: 993 - DNA, 20 bp, Homo sapiens
gaaggacctcgttatctatc

SEQ ID NO: 994 - DNA, 27 bp, Homo sapiens
tttaaaatattgaaatattcttcatac

SEQ ID NO: 995 - DNA, 19 bp, Homo sapiens
tggcctgcattttattggt

SEQ ID NO: 996 - DNA, 20 bp, Homo sapiens
tgtagtactcgattcagtgc

SEQ ID NO: 997 - DNA, 21 bp, Homo sapiens
agtatcttgacatgtagctca

SEQ ID NO: 998 - DNA, 19 bp, Homo sapiens
agatccctgatggaatagc

SEQ ID NO: 999 - DNA, 22 bp, Homo sapiens
agagcagatatgtaacttattc

SEQ ID NO: 1000 - DNA, 19 bp, Homo sapiens
cctgataagtagctgcatc

SEQ ID NO: 1001 - DNA, 22 bp, Homo sapiens
agaatgtagtctaagagcactg

SEQ ID NO: 1002 - DNA, 30 bp, Homo sapiens
taaatatatacaattattatgtataagaaa

SEQ ID NO: 1003 - DNA, 24 bp, Homo sapiens
aaacctatggaaacacttaaactt

SEQ ID NO: 1004 - DNA, 21 bp, Homo sapiens
atttgatcattacacattgga

SEQ ID NO: 1005 - DNA, 21 bp, Homo sapiens
tgtatgtggcactatcaaatc

SEQ ID NO: 1006 - DNA, 17 bp, Homo sapiens
aactgatacgtgacctg

SEQ ID NO: 1007 - DNA, 22 bp, Homo sapiens
tgaagctttagattccagttcc

SEQ ID NO: 1008 - DNA, 21 bp, Homo sapiens
ctggtatacacccaatttttt

SEQ ID NO: 1009 - DNA, 22 bp, Homo sapiens
aatacatttctaatagtactct

SEQ ID NO: 1010 - DNA, 23 bp, Homo sapiens
acttatcttgaatagttacctgt

SEQ ID NO: 1011 - DNA, 20 bp, Homo sapiens
actgttttctttttcaggtc

SEQ ID NO: 1012 - DNA, 23 bp, Homo sapiens
aatagaaccatatttctccacac

SEQ ID NO: 1013 - DNA, 21 bp, Homo sapiens
tttctgtgtctatgcttagta

SEQ ID NO: 1014 - DNA, 24 bp, Homo sapiens
cctcaaaacatatgttagttgtgg

SEQ ID NO: 1015 - DNA, 19 bp, Homo sapiens
tgacaggagttgcttttgt

SEQ ID NO: 1016 - DNA, 19 bp, Homo sapiens
tcaagctgagaatctgagg

SEQ ID NO: 1017 - DNA, 21 bp, Homo sapiens
tgttaaaagctctcctttgca

SEQ ID NO: 1018 - DNA, 19 bp, Homo sapiens
aacatgctgtgagaactgc

SEQ ID NO: 1019 - DNA, 23 bp, Homo sapiens
gtctaagagtgggctctcaatat

SEQ ID NO: 1020 - DNA, 22 bp, Homo sapiens
tccacactgattgttttgtttc

SEQ ID NO: 1021 - DNA, 23 bp, Homo sapiens
tcttcttatttagtggccctcag

SEQ ID NO: 1022 - DNA, 28 bp, Homo sapiens
atataatcatttttaaaataatattaga

SEQ ID NO: 1023 - DNA, 23 bp, Homo sapiens
gttctcaatttgtaggactcatg

SEQ ID NO: 1024 - DNA, 22 bp, Homo sapiens
gcagattttatgcaaggctcat

SEQ ID NO: 1025 - DNA, 21 bp, Homo sapiens
actttgagaaaatcttaaaag

SEQ ID NO: 1026 - DNA, 29 bp, Homo sapiens
taaataaataaataataaaatgttttaaa

SEQ ID NO: 1027 - DNA, 23 bp, Homo sapiens
cccattaatccaaatatacttcc

SEQ ID NO: 1028 - DNA, 24 bp, Homo sapiens
aaaaaaaagaaagtaatctaattt

SEQ ID NO: 1029 - DNA, 23 bp, Homo sapiens
cggttatatccctgaaaaaatcc

SEQ ID NO: 1030 - DNA, 23 bp, Homo sapiens
tttggaatgtcagtggaaaaaat

SEQ ID NO: 1031 - DNA, 22 bp, Homo sapiens
ttattagcattaaatctaagac

SEQ ID NO: 1032 - DNA, 25 bp, Homo sapiens
acttttttttaggtttctttggaag

SEQ ID NO: 1033 - DNA, 18 bp, Homo sapiens
tcacatcagtatatcagg

SEQ ID NO: 1034 - DNA, 20 bp, Homo sapiens
tggagaactggtatcaaaga

SEQ ID NO: 1035 - DNA, 23 bp, Homo sapiens
gatcacttctattttcacttcct

SEQ ID NO: 1036 - DNA, 18 bp, Homo sapiens
ttacaaggcctccaagtg

SEQ ID NO: 1037 - DNA, 25 bp, Homo sapiens
ttaagagatgtttaaaataaatccc

SEQ ID NO: 1038 - DNA, 19 bp, Homo sapiens
ttatcgataaagaggttgc

SEQ ID NO: 1039 - DNA, 26 bp, Homo sapiens
taaagctttattaaatactgaaagtg

SEQ ID NO: 1040 - DNA, 21 bp, Homo sapiens
cattttacctggttggcacaa

SEQ ID NO: 1041 - DNA, 22 bp, Homo sapiens
tttttttaaaacttcaggcact

SEQ ID NO: 1042 - DNA, 23 bp, Homo sapiens
tcagatcaccttacaaagaattc

SEQ ID NO: 1043 - DNA, 24 bp, Homo sapiens
agataatattttaaaaggatttgc

SEQ ID NO: 1044 - DNA, 29 bp, Homo sapiens
ttttaaaacatagttaaataaatttttaa

SEQ ID NO: 1045 - DNA, 19 bp, Homo sapiens
tggcttcaagattttgtgc

SEQ ID NO: 1046 - DNA, 18 bp, Homo sapiens
ggctccaaggaaaaagac

SEQ ID NO: 1047 - DNA, 20 bp, Homo sapiens
agtactcaagatttgttagc

SEQ ID NO: 1048 - DNA, 18 bp, Homo sapiens
ggatttcctgcaggtttg

SEQ ID NO: 1049 - DNA, 21 bp, Homo sapiens
agtaaagaaatagaaggaact

SEQ ID NO: 1050 - DNA, 18 bp, Homo sapiens
cgagattcctagtgcccc

SEQ ID NO: 1051 - DNA, 22 bp, Homo sapiens
tgtcttcatcttattcagtgtc

SEQ ID NO: 1052 - DNA, 22 bp, Homo sapiens
cagattcagcatgatgatatct

SEQ ID NO: 1053 - DNA, 20 bp, Homo sapiens
tggttatgatcccaaacctg

SEQ ID NO: 1054 - DNA, 21 bp, Homo sapiens
gatgcaatgtgttttgttaca

SEQ ID NO: 1055 - DNA, 19 bp, Homo sapiens
gcactttccgcagatttgc

SEQ ID NO: 1056 - DNA, 22 bp, Homo sapiens
ggaggaggaggaggagatgact

SEQ ID NO: 1057 - DNA, 20 bp, Homo sapiens
cacctgcagccctccatctt

SEQ ID NO: 1058 - DNA, 16 bp, Homo sapiens
ccgaaccgcagcttct

SEQ ID NO: 1059 - DNA, 16 bp, Homo sapiens
ttacctgcagctccgc

SEQ ID NO: 1060 - DNA, 23 bp, Homo sapiens
ggccaactccagcaatggctttt

SEQ ID NO: 1061 - DNA, 17 bp, Homo sapiens
gcgcagccagccttttt

SEQ ID NO: 1062 - DNA, 17 bp, Homo sapiens
tgccggaagatcttgca

SEQ ID NO: 1063 - DNA, 24 bp, Homo sapiens
tctaccccccaatctcaggaggcc

SEQ ID NO: 1064 - DNA, 24 bp, Homo sapiens
accttagcaaagaggagctgatag

SEQ ID NO: 1065 - DNA, 18 bp, Homo sapiens
cagagcgaacaataaggc

SEQ ID NO: 1066 - DNA, 24 bp, Homo sapiens
gaactggcagtcatcagtgacttc

SEQ ID NO: 1067 - DNA, 16 bp, Homo sapiens
ccagccctgcccacca

SEQ ID NO: 1068 - DNA, 17 bp, Homo sapiens
cctgcggctttacgagt

SEQ ID NO: 1069 - DNA, 22 bp, Homo sapiens
cttcataaccaagatgcccttc

SEQ ID NO: 1070 - DNA, 21 bp, Homo sapiens
ttctgcttcaggactgtgaag

SEQ ID NO: 1071 - DNA, 17 bp, Homo sapiens
cagtctccgcactcacc

SEQ ID NO: 1072 - DNA, 22 bp, Homo sapiens
catcaacgcagctgagaaactc

SEQ ID NO: 1073 - DNA, 17 bp, Homo sapiens
cctcctggaagcccttc

SEQ ID NO: 1074 - DNA, 17 bp, Homo sapiens
ctggaggccgcaacaag

SEQ ID NO: 1075 - DNA, 18 bp, Homo sapiens
cactgaggctgttcccat

SEQ ID NO: 1076 - DNA, 19 bp, Homo sapiens
gacagtggcgtggtcagtt

SEQ ID NO: 1077 - DNA, 24 bp, Homo sapiens
agctttgctgagaagtcagggact

SEQ ID NO: 1078 - DNA, 19 bp, Homo sapiens
ctcttggggaaggagtggg

SEQ ID NO: 1079 - DNA, 22 bp, Homo sapiens
aagtttttctgggtccatttgc

SEQ ID NO: 1080 - DNA, 22 bp, Homo sapiens
gatctttagcacccccaatggg

SEQ ID NO: 1081 - DNA, 24 bp, Homo sapiens
aaaggttctttgcagtctgcatgt

SEQ ID NO: 1082 - DNA, 22 bp, Homo sapiens
atcatgtgcctggccaggtaag

SEQ ID NO: 1083 - DNA, 19 bp, Homo sapiens
ccttcatcgaagccgtcgc

SEQ ID NO: 1084 - DNA, 20 bp, Homo sapiens
tgaacccccagacccagttc

SEQ ID NO: 1085 - DNA, 16 bp, Homo sapiens
gcccaggtggggcgag

SEQ ID NO: 1086 - DNA, 24 bp, Homo sapiens
ctgatgttgcatctccttcctggg

SEQ ID NO: 1087 - DNA, 24 bp, Homo sapiens
aactgcaaccaaacaggcaaaagg

SEQ ID NO: 1088 - DNA, 24 bp, Homo sapiens
tgtgtctatccttgcaggcagatt

SEQ ID NO: 1089 - DNA, 22 bp, Homo sapiens
aatcctgcccaggccaagaatt

SEQ ID NO: 1090 - DNA, 24 bp, Homo sapiens
aagaaggtgagcagcggccttgac

SEQ ID NO: 1091 - DNA, 20 bp, Homo sapiens
ttccagcaacatcttacctt

SEQ ID NO: 1092 - DNA, 23 bp, Homo sapiens
actcatgttgctgacttcagctt

SEQ ID NO: 1093 - DNA, 16 bp, Homo sapiens
gcccagacatgctgcc

SEQ ID NO: 1094 - DNA, 22 bp, Homo sapiens
gagctgaatggaaagaccctgg

SEQ ID NO: 1095 - DNA, 20 bp, Homo sapiens
acacttatttagatgggggc

SEQ ID NO: 1096 - DNA, 23 bp, Homo sapiens
ggatgcagtcctttgggatgaag

SEQ ID NO: 1097 - DNA, 24 bp, Homo sapiens
cttagtgtatggtaaattaactgg

SEQ ID NO: 1098 - DNA, 16 bp, Homo sapiens
gcagctgctgaacacc

SEQ ID NO: 1099 - DNA, 21 bp, Homo sapiens
tggtaaatgctcaaaaaatgt

SEQ ID NO: 1100 - DNA, 17 bp, Homo sapiens
gtggagggcaggagagg

SEQ ID NO: 1101 - DNA, 22 bp, Homo sapiens
gacacttcctccctctctcttg

SEQ ID NO: 1102 - DNA, 20 bp, Homo sapiens
tttgttaactggtctgtggc

SEQ ID NO: 1103 - DNA, 23 bp, Homo sapiens
cagaggtctcggcctcctttggt

SEQ ID NO: 1104 - DNA, 16 bp, Homo sapiens
gacctctccccacagc

SEQ ID NO: 1105 - DNA, 23 bp, Homo sapiens
ctgtgatttcatcactgtgcaca

SEQ ID NO: 1106 - DNA, 16 bp, Homo sapiens
cctcccctatccaacg

SEQ ID NO: 1107 - DNA, 24 bp, Homo sapiens
gaggaagagatgagagcaaagagg

SEQ ID NO: 1108 - DNA, 21 bp, Homo sapiens
gatccctccacgggcacagtt

SEQ ID NO: 1109 - DNA, 19 bp, Homo sapiens
ctcaaggaaagggaagacc

SEQ ID NO: 1110 - DNA, 16 bp, Homo sapiens
cggcacactggccaga

SEQ ID NO: 1111 - DNA, 24 bp, Homo sapiens
ctgccccagcaggaagatgcttcg

SEQ ID NO: 1112 - DNA, 24 bp, Homo sapiens
tatctctcccgtcctcctgacgct

SEQ ID NO: 1113 - DNA, 24 bp, Homo sapiens
gcccagtgcaagaagggggtgcgt

SEQ ID NO: 1114 - DNA, 23 bp, Homo sapiens
gacaataagctagaggctttctg

SEQ ID NO: 1115 - DNA, 16 bp, Homo sapiens
ctccgggccctgcagt

SEQ ID NO: 1116 - DNA, 21 bp, Homo sapiens
accacaaaggtgtgtttttgg

SEQ ID NO: 1117 - DNA, 16 bp, Homo sapiens
cgtggcggctcctgcc

SEQ ID NO: 1118 - DNA, 23 bp, Homo sapiens
attattgagtccagtgaccaccc

SEQ ID NO: 1119 - DNA, 16 bp, Homo sapiens
ggcacccaggtgggga

SEQ ID NO: 1120 - DNA, 24 bp, Homo sapiens
ccttccctccaactttcctgttgc

SEQ ID NO: 1121 - DNA, 21 bp, Homo sapiens
cccttcaccatgtccacgaac

SEQ ID NO: 1122 - DNA, 24 bp, Homo sapiens
agccaacttagaggtatctctttc

SEQ ID NO: 1123 - DNA, 18 bp, Homo sapiens
cctctgactcctggcccc

SEQ ID NO: 1124 - DNA, 22 bp, Homo sapiens
tgagaatgtcatcagctgtccc

SEQ ID NO: 1125 - DNA, 19 bp, Homo sapiens
tgaatctattcacccacgc

SEQ ID NO: 1126 - DNA, 22 bp, Homo sapiens
gggaggaaattgctgttcagtt

SEQ ID NO: 1127 - DNA, 16 bp, Homo sapiens
cacctgctccggagag

SEQ ID NO: 1128 - DNA, 16 bp, Homo sapiens
ggcctgggcattcacc

SEQ ID NO: 1129 - DNA, 18 bp, Homo sapiens
aagttgtcacccaccagg

SEQ ID NO: 1130 - DNA, 18 bp, Homo sapiens
ccagagcttctgccagac

SEQ ID NO: 1131 - DNA, 17 bp, Homo sapiens
gtcttggcagccagatc

SEQ ID NO: 1132 - DNA, 20 bp, Homo sapiens
agctcaccctgtgttatcac

SEQ ID NO: 1133 - DNA, 19 bp, Homo sapiens
cccgctcctccatcctctg

SEQ ID NO: 1134 - DNA, 16 bp, Homo sapiens
gcagatcccacactcc

SEQ ID NO: 1135 - DNA, 22 bp, Homo sapiens
cacaccaagccttggattggtc

SEQ ID NO: 1136 - DNA, 16 bp, Homo sapiens
agggtccaaggcaccc

SEQ ID NO: 1137 - DNA, 24 bp, Homo sapiens
gctgggtcccccaaagggaccatc

SEQ ID NO: 1138 - DNA, 19 bp, Homo sapiens
gcagttcccagcattcttc

SEQ ID NO: 1139 - DNA, 19 bp, Homo sapiens
caagctgcctttggggtcc

SEQ ID NO: 1140 - DNA, 23 bp, Homo sapiens
cgttcaccaagttcacatccgcc

SEQ ID NO: 1141 - DNA, 17 bp, Homo sapiens
ggcttcctgccccctcc

SEQ ID NO: 1142 - DNA, 16 bp, Homo sapiens
ggggagaggggcgcac

SEQ ID NO: 1143 - DNA, 24 bp, Homo sapiens
gtccccaggaacatccctgaagaa

SEQ ID NO: 1144 - DNA, 17 bp, Homo sapiens
gaacgggctctggaaat

SEQ ID NO: 1145 - DNA, 17 bp, Homo sapiens
ctcctgaaagaggcttc

SEQ ID NO: 1146 - DNA, 20 bp, Homo sapiens
gaaactgcagctacccctca

SEQ ID NO: 1147 - DNA, 23 bp, Homo sapiens
gaaagaggctggcctcaatgtgc

SEQ ID NO: 1148 - DNA, 16 bp, Homo sapiens
cctggtgcagcagggc

SEQ ID NO: 1149 - DNA, 24 bp, Homo sapiens
tcctgaattactgagcacattatc

SEQ ID NO: 1150 - DNA, 17 bp, Homo sapiens
agcctggtaaggggcgc

SEQ ID NO: 1151 - DNA, 24 bp, Homo sapiens
tgatttggccaagagaggagggtg

SEQ ID NO: 1152 - DNA, 22 bp, Homo sapiens
ctgaagacagctccattgagcc

SEQ ID NO: 1153 - DNA, 23 bp, Homo sapiens
cttctccacacaggtcaccacct

SEQ ID NO: 1154 - DNA, 18 bp, Homo sapiens
tcagaggtctgagtccgg

SEQ ID NO: 1155 - DNA, 23 bp, Homo sapiens
ggaatgcctcctggccgtggccc

SEQ ID NO: 1156 - DNA, 16 bp, Homo sapiens
aggacaccagccagcc

SEQ ID NO: 1157 - DNA, 17 bp, Homo sapiens
cctgtactgcaggggct

SEQ ID NO: 1158 - DNA, 18 bp, Homo sapiens
agaggggctaaaggaagg

SEQ ID NO: 1159 - DNA, 19 bp, Homo sapiens
ctgcccctgctcctattcc

SEQ ID NO: 1160 - DNA, 24 bp, Homo sapiens
gttctgaaaactggcatcagaccc

SEQ ID NO: 1161 - DNA, 24 bp, Homo sapiens
gttgctctcccatctcagctcttt

SEQ ID NO: 1162 - DNA, 17 bp, Homo sapiens
gtctccccatctgacac

SEQ ID NO: 1163 - DNA, 24 bp, Homo sapiens
aaagctttgaacttctgattctgc

SEQ ID NO: 1164 - DNA, 24 bp, Homo sapiens
gaaggcttcagtcacatgctgctt

SEQ ID NO: 1165 - DNA, 23 bp, Homo sapiens
ctgtgccaaccaggagtttcttc

SEQ ID NO: 1166 - DNA, 24 bp, Homo sapiens
tcagaaaagccccagaggcaggga

SEQ ID NO: 1167 - DNA, 19 bp, Homo sapiens
tcctaccagacttcactgg

SEQ ID NO: 1168 - DNA, 18 bp, Homo sapiens
cgttcagcccaagaatgt

SEQ ID NO: 1169 - DNA, 16 bp, Homo sapiens
cagcctggaagcgtgg

SEQ ID NO: 1170 - DNA, 18 bp, Homo sapiens
agacggttattgctgtac

SEQ ID NO: 1171 - DNA, 17 bp, Homo sapiens
caaagaggctcattccc

SEQ ID NO: 1172 - DNA, 24 bp, Homo sapiens
cgtcgtttacgacagtgtcaggat

SEQ ID NO: 1173 - DNA, 16 bp, Homo sapiens
gagccggacctactct

SEQ ID NO: 1174 - DNA, 21 bp, Homo sapiens
ctcaatttctcacagggctgc

SEQ ID NO: 1175 - DNA, 24 bp, Homo sapiens
ggacagaggatgtttttccaaaaa

SEQ ID NO: 1176 - DNA, 23 bp, Homo sapiens
ttcaaaggttcgcgtcccagtac

SEQ ID NO: 1177 - DNA, 20 bp, Homo sapiens
gtgagtgttcaatgttgcga

SEQ ID NO: 1178 - DNA, 17 bp, Homo sapiens
tttcctggacctcggag

SEQ ID NO: 1179 - DNA, 24 bp, Homo sapiens
cagccattgtattaatgttttgat

SEQ ID NO: 1180 - DNA, 24 bp, Homo sapiens
cttcttcttcttcctcatcatcat

SEQ ID NO: 1181 - DNA, 18 bp, Homo sapiens
cagaccccttgctcttgt

SEQ ID NO: 1182 - DNA, 19 bp, Homo sapiens
tcctcaggggggtgctgag

SEQ ID NO: 1183 - DNA, 24 bp, Homo sapiens
agtgctgaaatattggtggccaat

SEQ ID NO: 1184 - DNA, 23 bp, Homo sapiens
gaagttatcgtggaaacgtatcc

SEQ ID NO: 1185 - DNA, 24 bp, Homo sapiens
tggagggatgactcgagatgaaga

SEQ ID NO: 1186 - DNA, 16 bp, Homo sapiens
ccaggcccccatatcg

SEQ ID NO: 1187 - DNA, 21 bp, Homo sapiens
tgggaacccaaggttccatag

SEQ ID NO: 1188 - DNA, 24 bp, Homo sapiens
caacccaccagaaaccacaggttg

SEQ ID NO: 1189 - DNA, 23 bp, Homo sapiens
cagcttcagcccaggaggaggga

SEQ ID NO: 1190 - DNA, 19 bp, Homo sapiens
ctcacacttcccatccccc

SEQ ID NO: 1191 - DNA, 22 bp, Homo sapiens
agatttcaatagcatcttcagc

SEQ ID NO: 1192 - DNA, 18 bp, Homo sapiens
aggtgtttgctgggatgg

SEQ ID NO: 1193 - DNA, 20 bp, Homo sapiens
gtgtgtggctttccctaagg

SEQ ID NO: 1194 - DNA, 17 bp, Homo sapiens
agtctctcaccaggtgt

SEQ ID NO: 1195 - DNA, 16 bp, Homo sapiens
gcagggagtagctggg

SEQ ID NO: 1196 - DNA, 17 bp, Homo sapiens
ctgggctggtgactatc

SEQ ID NO: 1197 - DNA, 22 bp, Homo sapiens
ttaatagagcccaagtcctttc

SEQ ID NO: 1198 - DNA, 19 bp, Homo sapiens
agtctggtgctggttgggg

SEQ ID NO: 1199 - DNA, 18 bp, Homo sapiens
gtcctgagtcagagacac

SEQ ID NO: 1200 - DNA, 24 bp, Homo sapiens
ctctcacaagctctcacttcagga

SEQ ID NO: 1201 - DNA, 22 bp, Homo sapiens
gactcaatgcttaagtatccag

SEQ ID NO: 1202 - DNA, 24 bp, Homo sapiens
gagagtgatgcaagaagtgaatcc

SEQ ID NO: 1203 - DNA, 16 bp, Homo sapiens
gctggtctccaactcc

SEQ ID NO: 1204 - DNA, 20 bp, Homo sapiens
ggtccataggccatacatca

SEQ ID NO: 1205 - DNA, 22 bp, Homo sapiens
taaggctattctgaatggaatt

SEQ ID NO: 1206 - DNA, 24 bp, Homo sapiens
caaaaggctggtaaacttcccctt

SEQ ID NO: 1207 - DNA, 23 bp, Homo sapiens
ggagtagtttgaggtctatgacc

SEQ ID NO: 1208 - DNA, 22 bp, Homo sapiens
aaggagacaagtgtacaggaag

SEQ ID NO: 1209 - DNA, 21 bp, Homo sapiens
ggtttcttctgcagtttgatg

SEQ ID NO: 1210 - DNA, 19 bp, Homo sapiens
tctggaagagcagagagat

SEQ ID NO: 1211 - DNA, 23 bp, Homo sapiens
acaatggtaagtctggaggaagg

SEQ ID NO: 1212 - DNA, 20 bp, Homo sapiens
gatttgggctggggctgtag

SEQ ID NO: 1213 - DNA, 23 bp, Homo sapiens
tgtgttctccctccctgaagttt

SEQ ID NO: 1214 - DNA, 20 bp, Homo sapiens
ttctttcaactcaccccatc

SEQ ID NO: 1215 - DNA, 22 bp, Homo sapiens
gactctttctctcctgcttctt

SEQ ID NO: 1216 - DNA, 21 bp, Homo sapiens
cagtttctttacacagatccc

SEQ ID NO: 1217 - DNA, 20 bp, Homo sapiens
ggagggtcttggcccggttc

SEQ ID NO: 1218 - DNA, 19 bp, Homo sapiens
tctacaaagagaagtcccc

SEQ ID NO: 1219 - DNA, 23 bp, Homo sapiens
accaagatcactaaaccagatgg

SEQ ID NO: 1220 - DNA, 20 bp, Homo sapiens
cgtgtcgggttactgtagtc

SEQ ID NO: 1221 - DNA, 18 bp, Homo sapiens
acgaatgccctgaaacag

SEQ ID NO: 1222 - DNA, 19 bp, Homo sapiens
tgagatgaacccctttgtc

SEQ ID NO: 1223 - DNA, 19 bp, Homo sapiens
attcggaatatggtgggga

SEQ ID NO: 1224 - DNA, 21 bp, Homo sapiens
atgaaagagactaggcagaag

SEQ ID NO: 1225 - DNA, 19 bp, Homo sapiens
gtggacagtgagggccgga

SEQ ID NO: 1226 - DNA, 18 bp, Homo sapiens
tcttggtgattctggatc

SEQ ID NO: 1227 - DNA, 23 bp, Homo sapiens
cctaggggtggtaagttaaaaga

SEQ ID NO: 1228 - DNA, 16 bp, Homo sapiens
gaccggaaccaacgtc

SEQ ID NO: 1229 - DNA, 23 bp, Homo sapiens
aaatcttactcttctacccttgt

SEQ ID NO: 1230 - DNA, 17 bp, Homo sapiens
caatgggtgagaggtgg

SEQ ID NO: 1231 - DNA, 24 bp, Homo sapiens
tgtatgactttcttccttagatcc

SEQ ID NO: 1232 - DNA, 21 bp, Homo sapiens
cagttcactattccacatatc

SEQ ID NO: 1233 - DNA, 23 bp, Homo sapiens
cttttccatcctggacttattcc

SEQ ID NO: 1234 - DNA, 24 bp, Homo sapiens
aaaattagcataaataaaggtttt

SEQ ID NO: 1235 - DNA, 19 bp, Homo sapiens
ttaccctcagccctgatct

SEQ ID NO: 1236 - DNA, 17 bp, Homo sapiens
cagctcacacgctgtct

SEQ ID NO: 1237 - DNA, 17 bp, Homo sapiens
taggcctggacccaggc

SEQ ID NO: 1238 - DNA, 18 bp, Homo sapiens
cagatactcaaggaggca

SEQ ID NO: 1239 - DNA, 22 bp, Homo sapiens
catgttcacataagcatggggg

SEQ ID NO: 1240 - DNA, 22 bp, Homo sapiens
aatctcacctggctactccatt

SEQ ID NO: 1241 - DNA, 23 bp, Homo sapiens
ctttttctaggggcctccagccc

SEQ ID NO: 1242 - DNA, 20 bp, Homo sapiens
ctaaggatgtgcctcttacc

SEQ ID NO: 1243 - DNA, 16 bp, Homo sapiens
aaccattgcccctggg

SEQ ID NO: 1244 - DNA, 18 bp, Homo sapiens
ccttggcaggatcacact

SEQ ID NO: 1245 - DNA, 22 bp, Homo sapiens
ctgtgccctctttagtcacaga

SEQ ID NO: 1246 - DNA, 17 bp, Homo sapiens
gtgagggcaatggtgag

SEQ ID NO: 1247 - DNA, 24 bp, Homo sapiens
tttaatgcccaggctgagcccagt

SEQ ID NO: 1248 - DNA, 16 bp, Homo sapiens
tgatgcatcccgatgg

SEQ ID NO: 1249 - DNA, 21 bp, Homo sapiens
gacgccacaggtaggtgtgaa

SEQ ID NO: 1250 - DNA, 16 bp, Homo sapiens
ctcccagagagtgggg

SEQ ID NO: 1251 - DNA, 21 bp, Homo sapiens
cccacagcaggatccttgatg

SEQ ID NO: 1252 - DNA, 20 bp, Homo sapiens
gggactctgaccatctgttc

SEQ ID NO: 1253 - DNA, 21 bp, Homo sapiens
tagggagcagggaggagaagc

SEQ ID NO: 1254 - DNA, 18 bp, Homo sapiens
ccgtgggtgggtgacttc

SEQ ID NO: 1255 - DNA, 24 bp, Homo sapiens
caacgctgtcttcagcccacttcc

SEQ ID NO: 1256 - DNA, 18 bp, Homo sapiens
ggctccaggcctagagag

SEQ ID NO: 1257 - DNA, 19 bp, Homo sapiens
cacaacagcagagccatcg

SEQ ID NO: 1258 - DNA, 20 bp, Homo sapiens
ctgaggctggactgcgatgc

SEQ ID NO: 1259 - DNA, 23 bp, Homo sapiens
tcgttcttctgactggcaaccag

SEQ ID NO: 1260 - DNA, 20 bp, Homo sapiens
cttttgcaccatggaggcag

SEQ ID NO: 1261 - DNA, 24 bp, Homo sapiens
gaatgaacttgctgaatgtgggaa

SEQ ID NO: 1262 - DNA, 16 bp, Homo sapiens
aaggtgttcagggtgg

SEQ ID NO: 1263 - DNA, 24 bp, Homo sapiens
ctcccatgaaaccctcatctaaga

SEQ ID NO: 1264 - DNA, 24 bp, Homo sapiens
taccaggcctatcatctcctacat

SEQ ID NO: 1265 - DNA, 24 bp, Homo sapiens
cataactcctgcagaggctctgcc

SEQ ID NO: 1266 - DNA, 20 bp, Homo sapiens
cttggccacttcaggtgagt

SEQ ID NO: 1267 - DNA, 22 bp, Homo sapiens
cactgaccctgcttttctgcat

SEQ ID NO: 1268 - DNA, 23 bp, Homo sapiens
ttgtagacatcaccaaggacacg

SEQ ID NO: 1269 - DNA, 23 bp, Homo sapiens
ggttttctgttgctacctagtca

SEQ ID NO: 1270 - DNA, 19 bp, Homo sapiens
gaaggaggacccaattggg

SEQ ID NO: 1271 - DNA, 21 bp, Homo sapiens
gtgcctcttccgaggttccac

SEQ ID NO: 1272 - DNA, 22 bp, Homo sapiens
gaacctcctgtaccatgtggtc

SEQ ID NO: 1273 - DNA, 24 bp, Homo sapiens
ctcgtggtgtagagtgatgtaagc

SEQ ID NO: 1274 - DNA, 16 bp, Homo sapiens
gacccccagtgttgcg

SEQ ID NO: 1275 - DNA, 16 bp, Homo sapiens
gtgcccgccctccact

SEQ ID NO: 1276 - DNA, 19 bp, Homo sapiens
tgacctacccacagctgcc

SEQ ID NO: 1277 - DNA, 19 bp, Homo sapiens
ggctgtttgtaaaacgtgt

SEQ ID NO: 1278 - DNA, 18 bp, Homo sapiens
tcacacccccaactcctt

SEQ ID NO: 1279 - DNA, 19 bp, Homo sapiens
gtcgacaaagttacgcacc

SEQ ID NO: 1280 - DNA, 17 bp, Homo sapiens
gcagctgcctcagactt

SEQ ID NO: 1281 - DNA, 18 bp, Homo sapiens
ggttccagtcggtccagc

SEQ ID NO: 1282 - DNA, 21 bp, Homo sapiens
tccttcacaggtctgcacacc

SEQ ID NO: 1283 - DNA, 23 bp, Homo sapiens
ggacaaaggcaaagagacaaagg

SEQ ID NO: 1284 - DNA, 18 bp, Homo sapiens
ctgcccttttgagcaact

SEQ ID NO: 1285 - DNA, 23 bp, Homo sapiens
tgtaggtaagggtcacatgtggg

SEQ ID NO: 1286 - DNA, 23 bp, Homo sapiens
tagtttcaccaaagactgacaga

SEQ ID NO: 1287 - DNA, 24 bp, Homo sapiens
gtgaggggcacattccttagtagc

SEQ ID NO: 1288 - DNA, 17 bp, Homo sapiens
caccccagtctcccttc

SEQ ID NO: 1289 - DNA, 24 bp, Homo sapiens
catctcaaggggagctgagaagtc

SEQ ID NO: 1290 - DNA, 16 bp, Homo sapiens
gctaggctcctgggat

SEQ ID NO: 1291 - DNA, 24 bp, Homo sapiens
agttgcaaaaggggcaatgaggtg

SEQ ID NO: 1292 - DNA, 20 bp, Homo sapiens
ctttgcctcagaggcctgtg

SEQ ID NO: 1293 - DNA, 24 bp, Homo sapiens
gatagggaatcatggttccccaga

SEQ ID NO: 1294 - DNA, 16 bp, Homo sapiens
ccaaagccaccctagg

SEQ ID NO: 1295 - DNA, 24 bp, Homo sapiens
aagctggacaggaagggcttctgt

SEQ ID NO: 1296 - DNA, 18 bp, Homo sapiens
tgttcatggcattgctgt

SEQ ID NO: 1297 - DNA, 23 bp, Homo sapiens
ctgaggtctgctttgcaggaagg

SEQ ID NO: 1298 - DNA, 24 bp, Homo sapiens
aaggtccaggatcagttgctcttc

SEQ ID NO: 1299 - DNA, 19 bp, Homo sapiens
gtggctgtactgcatccct

SEQ ID NO: 1300 - DNA, 24 bp, Homo sapiens
caggattcctacaacaggaactag

SEQ ID NO: 1301 - DNA, 18 bp, Homo sapiens
ccagaacttggagcccac

SEQ ID NO: 1302 - DNA, 22 bp, Homo sapiens
aaaaaatctccccaaacctctc

SEQ ID NO: 1303 - DNA, 22 bp, Homo sapiens
tgttggggaacaggcggtgtgt

SEQ ID NO: 1304 - DNA, 20 bp, Homo sapiens
tgtactccagcccgagtgac

SEQ ID NO: 1305 - DNA, 20 bp, Homo sapiens
tccaggtaccaatgtacagc

SEQ ID NO: 1306 - DNA, 22 bp, Homo sapiens
gggaggatcagttgaccctagg

SEQ ID NO: 1307 - DNA, 24 bp, Homo sapiens
gcttctgggtctgtcagtacctgc

SEQ ID NO: 1308 - DNA, 16 bp, Homo sapiens
ggcacccgtgtagtcc

SEQ ID NO: 1309 - DNA, 21 bp, Homo sapiens
gcacacaggcttctggaactt

SEQ ID NO: 1310 - DNA, 23 bp, Homo sapiens
tatatatacacacacacacatac

SEQ ID NO: 1311 - DNA, 21 bp, Homo sapiens
ggattacagacacccaccatc

SEQ ID NO: 1312 - DNA, 22 bp, Homo sapiens
gactggctcccaaacttagagc

SEQ ID NO: 1313 - DNA, 24 bp, Homo sapiens
ttttagtagacacagggtttcaac

SEQ ID NO: 1314 - DNA, 24 bp, Homo sapiens
gtaaggcctggacctccatggtgc

SEQ ID NO: 1315 - DNA, 18 bp, Homo sapiens
tgacctcaggtgatcacc

SEQ ID NO: 1316 - DNA, 22 bp, Homo sapiens
cctactcatgctggatgaccaa

SEQ ID NO: 1317 - DNA, 20 bp, Homo sapiens
catgagtgagccacctcgcc

SEQ ID NO: 1318 - DNA, 18 bp, Homo sapiens
tgacctaggtcctaccct

SEQ ID NO: 1319 - DNA, 19 bp, Homo sapiens
ccatggcaccctggaggtc

SEQ ID NO: 1320 - DNA, 17 bp, Homo sapiens
agtgcctgggcttcacc

SEQ ID NO: 1321 - DNA, 24 bp, Homo sapiens
tccatagttgggtagagaaatcgc

SEQ ID NO: 1322 - DNA, 18 bp, Homo sapiens
gacagctgaaaatgagcc

SEQ ID NO: 1323 - DNA, 24 bp, Homo sapiens
tggatttgaaggtcactggagcac

SEQ ID NO: 1324 - DNA, 24 bp, Homo sapiens
tttctcttgccaggttcctggatg

SEQ ID NO: 1325 - DNA, 17 bp, Homo sapiens
agtggggcagcagcaag

SEQ ID NO: 1326 - DNA, 19 bp, Homo sapiens
cagctggtctggtccactt

SEQ ID NO: 1327 - DNA, 24 bp, Homo sapiens
gacattgtggtgagtactgttggc

SEQ ID NO: 1328 - DNA, 17 bp, Homo sapiens
cacctgcctcggcttcc

SEQ ID NO: 1329 - DNA, 24 bp, Homo sapiens
gcaatgaagtctcgctgatgttca

SEQ ID NO: 1330 - DNA, 23 bp, Homo sapiens
ttttagtagagacggggtttcgc

SEQ ID NO: 1331 - DNA, 17 bp, Homo sapiens
ccactcaacagcccagc

SEQ ID NO: 1332 - DNA, 18 bp, Homo sapiens
gggattataggcgcctgc

SEQ ID NO: 1333 - DNA, 24 bp, Homo sapiens
agaactgtaacttgtgctcagcat

SEQ ID NO: 1334 - DNA, 18 bp, Homo sapiens
tgcctcctgagttcaagc

SEQ ID NO: 1335 - DNA, 22 bp, Homo sapiens
gtcatgaatgatccggccaaga

SEQ ID NO: 1336 - DNA, 17 bp, Homo sapiens
tgtcacccaggctggag

SEQ ID NO: 1337 - DNA, 22 bp, Homo sapiens
ctcacacctgtaatcccagcac

SEQ ID NO: 1338 - DNA, 24 bp, Homo sapiens
cccactttctttttatttttcttc

SEQ ID NO: 1339 - DNA, 24 bp, Homo sapiens
tgagttcaggagttcgagaacagc

SEQ ID NO: 1340 - DNA, 20 bp, Homo sapiens
ctgtcaatcttgcccactcc

SEQ ID NO: 1341 - DNA, 24 bp, Homo sapiens
aaaatagaaaaatcagctgggcct

SEQ ID NO: 1342 - DNA, 18 bp, Homo sapiens
tctgcctgtcctcagctc

SEQ ID NO: 1343 - DNA, 24 bp, Homo sapiens
cttggaaggctgaggcaggagaat

SEQ ID NO: 1344 - DNA, 19 bp, Homo sapiens
tgctgatctgtgtcccaac

SEQ ID NO: 1345 - DNA, 24 bp, Homo sapiens
cagtgagtgaagatggcgccacag

SEQ ID NO: 1346 - DNA, 23 bp, Homo sapiens
actttgtgaagtaagggatcagc

SEQ ID NO: 1347 - DNA, 23 bp, Homo sapiens
agactccttctcaaaaaaaaaaa

SEQ ID NO: 1348 - DNA, 17 bp, Homo sapiens
gacagcccggagacatc

SEQ ID NO: 1349 - DNA, 23 bp, Homo sapiens
cagaccgagagaacaggaagcct

SEQ ID NO: 1350 - DNA, 23 bp, Homo sapiens
gacatcacccacttggctcaaga

SEQ ID NO: 1351 - DNA, 22 bp, Homo sapiens
gaaaggcccagaaggtagaaag

SEQ ID NO: 1352 - DNA, 16 bp, Homo sapiens
agttggcccagcgtcc

SEQ ID NO: 1353 - DNA, 22 bp, Homo sapiens
aagtggaactaggttgagggtt

SEQ ID NO: 1354 - DNA, 22 bp, Homo sapiens
tgcttctctcttcactaccttt

SEQ ID NO: 1355 - DNA, 19 bp, Homo sapiens
cagtcctgatcccacatcc

SEQ ID NO: 1356 - DNA, 20 bp, Homo sapiens
taatggctgaaccggatgca

SEQ ID NO: 1357 - DNA, 18 bp, Homo sapiens
aggtctggtggtagatgt

SEQ ID NO: 1358 - DNA, 23 bp, Homo sapiens
acagacattttgtcccctgctgt

SEQ ID NO: 1359 - DNA, 24 bp, Homo sapiens
cttcccattcaccgctccattggt

SEQ ID NO: 1360 - DNA, 24 bp, Homo sapiens
ccctgagggccctgatgtctgggg

SEQ ID NO: 1361 - DNA, 18 bp, Homo sapiens
gcaaggagtgaaacggga

SEQ ID NO: 1362 - DNA, 20 bp, Homo sapiens
ccagaggaagataccaagct

SEQ ID NO: 1363 - DNA, 24 bp, Homo sapiens
aatcaggggtatctagagacaaag

SEQ ID NO: 1364 - DNA, 19 bp, Homo sapiens
ctatgcagacacccctgat

SEQ ID NO: 1365 - DNA, 23 bp, Homo sapiens
agttggaacacatactagcccaa

SEQ ID NO: 1366 - DNA, 24 bp, Homo sapiens
tataacatcatccgggtacccatg

SEQ ID NO: 1367 - DNA, 21 bp, Homo sapiens
ctcccacccccaggacaaaac

SEQ ID NO: 1368 - DNA, 23 bp, Homo sapiens
actcggactaccatatcttgatc

SEQ ID NO: 1369 - DNA, 23 bp, Homo sapiens
agcagacctaccctacagtttct

SEQ ID NO: 1370 - DNA, 23 bp, Homo sapiens
acactattaggactggcaagtga

SEQ ID NO: 1371 - DNA, 23 bp, Homo sapiens
cctgaaaaagctagaatgcctac

SEQ ID NO: 1372 - DNA, 18 bp, Homo sapiens
caggttccaacccaggag

SEQ ID NO: 1373 - DNA, 24 bp, Homo sapiens
tgaagttgtgcaactggaaatcat

SEQ ID NO: 1374 - DNA, 23 bp, Homo sapiens
gctaactgctacggactcaggct

SEQ ID NO: 1375 - DNA, 24 bp, Homo sapiens
aggtgcggatggagaagtcacagc

SEQ ID NO: 1376 - DNA, 23 bp, Homo sapiens
cctgttttaatgccctgtgaaat

SEQ ID NO: 1377 - DNA, 24 bp, Homo sapiens
ccgattcctacagaaaaggatgat

SEQ ID NO: 1378 - DNA, 19 bp, Homo sapiens
gccctttctttggaccctg

SEQ ID NO: 1379 - DNA, 20 bp, Homo sapiens
atgggactctgcttatcact

SEQ ID NO: 1380 - DNA, 17 bp, Homo sapiens
tcggcctcccaaagtgc

SEQ ID NO: 1381 - DNA, 29 bp, Homo sapiens
ttttcttttctttttttaaaatttttttg

SEQ ID NO: 1382 - DNA, 21 bp, Homo sapiens
ggagtttaagactagcctggt

SEQ ID NO: 1383 - DNA, 21 bp, Homo sapiens
aggaaggggacaagatgacat

SEQ ID NO: 1384 - DNA, 20 bp, Homo sapiens
acaaaaattagccaggtggt

SEQ ID NO: 1385 - DNA, 20 bp, Homo sapiens
ccctgcccaaaatttgctac

SEQ ID NO: 1386 - DNA, 24 bp, Homo sapiens
actcaggaggctgaggcaggagaa

SEQ ID NO: 1387 - DNA, 23 bp, Homo sapiens
tttggaggggccatgacagatgc

SEQ ID NO: 1388 - DNA, 24 bp, Homo sapiens
gaggttgctgtgaggggagatcac

SEQ ID NO: 1389 - DNA, 18 bp, Homo sapiens
tgctactgaccctgcagc

SEQ ID NO: 1390 - DNA, 24 bp, Homo sapiens
gaatgggcagagtgagattctgcc

SEQ ID NO: 1391 - DNA, 17 bp, Homo sapiens
agtttcccgctgggtac

SEQ ID NO: 1392 - DNA, 20 bp, Homo sapiens
aagtttcaatggctctatgt

SEQ ID NO: 1393 - DNA, 16 bp, Homo sapiens
gccaggctgggtcctc

SEQ ID NO: 1394 - DNA, 23 bp, Homo sapiens
cttcagagaagtacgatttaagt

SEQ ID NO: 1395 - DNA, 17 bp, Homo sapiens
ggctaatcacacgggca

SEQ ID NO: 1396 - DNA, 24 bp, Homo sapiens
caaggatgttgagagcagcagcat

SEQ ID NO: 1397 - DNA, 18 bp, Homo sapiens
gagagtacacgcagtggg

SEQ ID NO: 1398 - DNA, 24 bp, Homo sapiens
cttcactttctggaacttctgttc

SEQ ID NO: 1399 - DNA, 16 bp, Homo sapiens
gactcctttgaccccc

SEQ ID NO: 1400 - DNA, 21 bp, Homo sapiens
ggacatccacagggaataagg

SEQ ID NO: 1401 - DNA, 21 bp, Homo sapiens
catccctaaaagcttcggcta

SEQ ID NO: 1402 - DNA, 22 bp, Homo sapiens
gtgatcactgacaccatttacc

SEQ ID NO: 1403 - DNA, 20 bp, Homo sapiens
ctcactctgcttgtactccc

SEQ ID NO: 1404 - DNA, 23 bp, Homo sapiens
gtgaggggtgtaatggttacctg

SEQ ID NO: 1405 - DNA, 22 bp, Homo sapiens
aaccgtgttcagtctctcctag

SEQ ID NO: 1406 - DNA, 19 bp, Homo sapiens
tactcagctccatccgtcg

SEQ ID NO: 1407 - DNA, 18 bp, Homo sapiens
attacaggtgtgagcccc

SEQ ID NO: 1408 - DNA, 24 bp, Homo sapiens
gaaggtaccaagggcaggaaaggt

SEQ ID NO: 1409 - DNA, 20 bp, Homo sapiens
actcctcacctcaggtgatc

SEQ ID NO: 1410 - DNA, 18 bp, Homo sapiens
gacacacaccaccgagct

SEQ ID NO: 1411 - DNA, 23 bp, Homo sapiens
tgtatttttagtagagacggggt

SEQ ID NO: 1412 - DNA, 23 bp, Homo sapiens
caggggcgggcacctgggaggga

SEQ ID NO: 1413 - DNA, 18 bp, Homo sapiens
ggtagctgggattacagg

SEQ ID NO: 1414 - DNA, 23 bp, Homo sapiens
aagacatggagaatggacacatc

SEQ ID NO: 1415 - DNA, 18 bp, Homo sapiens
attccaacctctgcctcc

SEQ ID NO: 1416 - DNA, 22 bp, Homo sapiens
aaattcctcaccccttggccgg

SEQ ID NO: 1417 - DNA, 19 bp, Homo sapiens
cagagtcttactctgttgc

SEQ ID NO: 1418 - DNA, 18 bp, Homo sapiens
ttaggaggccgaggtggg

SEQ ID NO: 1419 - DNA, 20 bp, Homo sapiens
agtgactgagaccaactttg

SEQ ID NO: 1420 - DNA, 21 bp, Homo sapiens
ctgccttgccagcatggtgaa

SEQ ID NO: 1421 - DNA, 19 bp, Homo sapiens
cagtaagctggtggtagac

SEQ ID NO: 1422 - DNA, 17 bp, Homo sapiens
cgtagtggtggccgcct

SEQ ID NO: 1423 - DNA, 23 bp, Homo sapiens
gcagtggggaggtagcacagagc

SEQ ID NO: 1424 - DNA, 24 bp, Homo sapiens
tgaagcaagagaatcgcttgaatc

SEQ ID NO: 1425 - DNA, 24 bp, Homo sapiens
attgcttctacttcaggcagtgtc

SEQ ID NO: 1426 - DNA, 24 bp, Homo sapiens
aaattgcaccactgcactccagcc

SEQ ID NO: 1427 - DNA, 19 bp, Homo sapiens
gcctttgagtagggtaagc

SEQ ID NO: 1428 - DNA, 22 bp, Homo sapiens
aaaaaaacaaaatcctcacccc

SEQ ID NO: 1429 - DNA, 21 bp, Homo sapiens
agaggggcttgcttttcagtc

SEQ ID NO: 1430 - DNA, 23 bp, Homo sapiens
tttattgagcacctactaaaagt

SEQ ID NO: 1431 - DNA, 16 bp, Homo sapiens
cccaaaggcagctaag

SEQ ID NO: 1432 - DNA, 22 bp, Homo sapiens
ggactatgaggcagaagggagg

SEQ ID NO: 1433 - DNA, 18 bp, Homo sapiens
acccaggtttctgtgggc

SEQ ID NO: 1434 - DNA, 21 bp, Homo sapiens
gactcactcacctgatgccca

SEQ ID NO: 1435 - DNA, 22 bp, Homo sapiens
tgatttggggtgggcagagagt

SEQ ID NO: 1436 - DNA, 19 bp, Homo sapiens
ctgccagccatgatgctta

SEQ ID NO: 1437 - DNA, 20 bp, Homo sapiens
gggaggggtcgaagttgaaa

SEQ ID NO: 1438 - DNA, 24 bp, Homo sapiens
attcctgaggacagaatgaggaat

SEQ ID NO: 1439 - DNA, 23 bp, Homo sapiens
cagactctctttgaatccagggc

SEQ ID NO: 1440 - DNA, 19 bp, Homo sapiens
actactctcctgggcaggg

SEQ ID NO: 1441 - DNA, 23 bp, Homo sapiens
attgtcacagtgcttctggaatc

SEQ ID NO: 1442 - DNA, 22 bp, Homo sapiens
ggtctcccacattcattaggac

SEQ ID NO: 1443 - DNA, 24 bp, Homo sapiens
gggatggagttttcaagtccttcc

SEQ ID NO: 1444 - DNA, 24 bp, Homo sapiens
tctccctgcaacccttctgatgac

SEQ ID NO: 1445 - DNA, 24 bp, Homo sapiens
cttcagagactctggaacccctgt

SEQ ID NO: 1446 - DNA, 22 bp, Homo sapiens
ccaccactcttcccacccattt

SEQ ID NO: 1447 - DNA, 20 bp, Homo sapiens
ggtacctgcatccttgtttt

SEQ ID NO: 1448 - DNA, 23 bp, Homo sapiens
gtgccttgctcaaagagccatga

SEQ ID NO: 1449 - DNA, 17 bp, Homo sapiens
cgggaagccggaattac

SEQ ID NO: 1450 - DNA, 21 bp, Homo sapiens
ttaaattccagtgccaggatt

SEQ ID NO: 1451 - DNA, 19 bp, Homo sapiens
cacttcctgtgtcatgtga

SEQ ID NO: 1452 - DNA, 20 bp, Homo sapiens
gctctctctcttacctctct

SEQ ID NO: 1453 - DNA, 23 bp, Homo sapiens
atctgtaacagatgagaggaagc

SEQ ID NO: 1454 - DNA, 21 bp, Homo sapiens
tcattagatgaagagaagacc

SEQ ID NO: 1455 - DNA, 16 bp, Homo sapiens
gtcacccatacatgcc

SEQ ID NO: 1456 - DNA, 24 bp, Homo sapiens
gaaggatagaggatccactaaaca

SEQ ID NO: 1457 - DNA, 18 bp, Homo sapiens
agtacctccttcatgcgc

SEQ ID NO: 1458 - DNA, 23 bp, Homo sapiens
gtggaatgcactgggcaaatggt

SEQ ID NO: 1459 - DNA, 16 bp, Homo sapiens
caggaatgatccgggt

SEQ ID NO: 1460 - DNA, 17 bp, Homo sapiens
tgcaccctggtcatctg

SEQ ID NO: 1461 - DNA, 16 bp, Homo sapiens
atctctcccaccctcc

SEQ ID NO: 1462 - DNA, 17 bp, Homo sapiens
ggagtgagtgggcaact

SEQ ID NO: 1463 - DNA, 24 bp, Homo sapiens
tacagagggtgccaggcagatgag

SEQ ID NO: 1464 - DNA, 24 bp, Homo sapiens
catccaaacccctctgcccttgga

SEQ ID NO: 1465 - DNA, 17 bp, Homo sapiens
ctagcagcccgcaactg

SEQ ID NO: 1466 - DNA, 22 bp, Homo sapiens
gtctcacaggctgtcaggacca

SEQ ID NO: 1467 - DNA, 24 bp, Homo sapiens
gatccaaatggctggtgagattgc

SEQ ID NO: 1468 - DNA, 24 bp, Homo sapiens
gggagtctctctacttttcaggcc

SEQ ID NO: 1469 - DNA, 22 bp, Homo sapiens
aatcttggctctagaacaaccc

SEQ ID NO: 1470 - DNA, 23 bp, Homo sapiens
tgacggtgaagtcctgggacacc

SEQ ID NO: 1471 - DNA, 16 bp, Homo sapiens
gaggtgggggccagtt

SEQ ID NO: 1472 - DNA, 16 bp, Homo sapiens
cctcgcagcatcgcgg

SEQ ID NO: 1473 - DNA, 16 bp, Homo sapiens
cgggcgggggccgctg

SEQ ID NO: 1474 - DNA, 16 bp, Homo sapiens
aagccagcaggctgcc

SEQ ID NO: 1475 - DNA, 19 bp, Homo sapiens
cgcacatgtcgggggaggc

SEQ ID NO: 1476 - DNA, 16 bp, Homo sapiens
cgtgggggcagcaggc

SEQ ID NO: 1477 - DNA, 17 bp, Homo sapiens
gcctgagcgaggcgggc

SEQ ID NO: 1478 - DNA, 16 bp, Homo sapiens
gggcaggtggtggagg

SEQ ID NO: 1479 - DNA, 16 bp, Homo sapiens
gcacagctgggctgcg

SEQ ID NO: 1480 - DNA, 23 bp, Homo sapiens
atgcctgcctgtccccgcgcccc

SEQ ID NO: 1481 - DNA, 16 bp, Homo sapiens
caccctgccccgatgc

SEQ ID NO: 1482 - DNA, 19 bp, Homo sapiens
gtgctcgtcctgcctgacc

SEQ ID NO: 1483 - DNA, 18 bp, Homo sapiens
gatggggccctggatagc

SEQ ID NO: 1484 - DNA, 16 bp, Homo sapiens
ctgcggaggaacgccc

SEQ ID NO: 1485 - DNA, 19 bp, Homo sapiens
ctgcagatgctgctggttc

SEQ ID NO: 1486 - DNA, 20 bp, Homo sapiens
tatgcaggtctgaacaggtg

SEQ ID NO: 1487 - DNA, 21 bp, Homo sapiens
tttccctcacaggtttctcag

SEQ ID NO: 1488 - DNA, 24 bp, Homo sapiens
attgtgagggagtaagtgggtggg

SEQ ID NO: 1489 - DNA, 19 bp, Homo sapiens
cctccctgaccttctggtc

SEQ ID NO: 1490 - DNA, 24 bp, Homo sapiens
ccgctctccccacagctacatcga

SEQ ID NO: 1491 - DNA, 23 bp, Homo sapiens
acttctcccagtccctcagtgct

SEQ ID NO: 1492 - DNA, 24 bp, Homo sapiens
tctgaggggcctgggggagctgag

SEQ ID NO: 1493 - DNA, 24 bp, Homo sapiens
aggggtctagagtagttgaggaaa

SEQ ID NO: 1494 - DNA, 18 bp, Homo sapiens
cgactgagccgaggagtg

SEQ ID NO: 1495 - DNA, 21 bp, Homo sapiens
ggactgggaggctgggatggg

SEQ ID NO: 1496 - DNA, 20 bp, Homo sapiens
cattagcagcccaagtctgg

SEQ ID NO: 1497 - DNA, 16 bp, Homo sapiens
tgatcctcctgcaccc

SEQ ID NO: 1498 - DNA, 16 bp, Homo sapiens
tgaccaggcttgggcc

SEQ ID NO: 1499 - DNA, 24 bp, Homo sapiens
ggcgccagatgccttccatttcac

SEQ ID NO: 1500 - DNA, 21 bp, Homo sapiens
gagcgttgaaggagagattcc

SEQ ID NO: 1501 - DNA, 22 bp, Homo sapiens
cttccagggctggttctggttg

SEQ ID NO: 1502 - DNA, 17 bp, Homo sapiens
gcccccactcacagttc

SEQ ID NO: 1503 - DNA, 23 bp, Homo sapiens
ctcctcccctccctcattctggt

SEQ ID NO: 1504 - DNA, 18 bp, Homo sapiens
acagacccaagtgcacac

SEQ ID NO: 1505 - DNA, 24 bp, Homo sapiens
gtcttgctgtgtctccacgcccgc

SEQ ID NO: 1506 - DNA, 21 bp, Homo sapiens
gcacatagtccccaaagagac

SEQ ID NO: 1507 - DNA, 20 bp, Homo sapiens
ctgtgcagggcctctcctta

SEQ ID NO: 1508 - DNA, 16 bp, Homo sapiens
ttccccgacaggaccc

SEQ ID NO: 1509 - DNA, 24 bp, Homo sapiens
aacatcctgttactggagtcagag

SEQ ID NO: 1510 - DNA, 17 bp, Homo sapiens
ccagtccctcctcctcc

SEQ ID NO: 1511 - DNA, 19 bp, Homo sapiens
cctgctgcctaactgctcc

SEQ ID NO: 1512 - DNA, 24 bp, Homo sapiens
gctggcattgggcatgtgggccag

SEQ ID NO: 1513 - DNA, 17 bp, Homo sapiens
gttggtgtcccccatgc

SEQ ID NO: 1514 - DNA, 16 bp, Homo sapiens
tctcttccccagcccc

SEQ ID NO: 1515 - DNA, 23 bp, Homo sapiens
tgtgccctgcgctggctacagcg

SEQ ID NO: 1516 - DNA, 19 bp, Homo sapiens
ttgccagtgcccattcccc

SEQ ID NO: 1517 - DNA, 20 bp, Homo sapiens
cagtgtcatgggcaagggcc

SEQ ID NO: 1518 - DNA, 20 bp, Homo sapiens
ctcctcaatgacctggagcc

SEQ ID NO: 1519 - DNA, 18 bp, Homo sapiens
ggcattgggcacctggac

SEQ ID NO: 1520 - DNA, 24 bp, Homo sapiens
aactgcctggggtgacatcgcctg

SEQ ID NO: 1521 - DNA, 16 bp, Homo sapiens
ggccccgcccctccac

SEQ ID NO: 1522 - DNA, 19 bp, Homo sapiens
gtagagttctggggccact

SEQ ID NO: 1523 - DNA, 20 bp, Homo sapiens
aaggtcttctcaccatcacc

SEQ ID NO: 1524 - DNA, 16 bp, Homo sapiens
gtgcccacgctgaagg

SEQ ID NO: 1525 - DNA, 19 bp, Homo sapiens
ctttccccatctttgtccc

SEQ ID NO: 1526 - DNA, 16 bp, Homo sapiens
gtgctgctgcggtgcc

SEQ ID NO: 1527 - DNA, 21 bp, Homo sapiens
atctctgtccgtccctcaacc

SEQ ID NO: 1528 - DNA, 21 bp, Homo sapiens
tcacagagctggagcagtcag

SEQ ID NO: 1529 - DNA, 19 bp, Homo sapiens
ttctctcccacccctctct

SEQ ID NO: 1530 - DNA, 18 bp, Homo sapiens
acgttcttcctgttgagg

SEQ ID NO: 1531 - DNA, 18 bp, Homo sapiens
ggggctctccaaagactt

SEQ ID NO: 1532 - DNA, 22 bp, Homo sapiens
agactcacaggagacgttgacc

SEQ ID NO: 1533 - DNA, 18 bp, Homo sapiens
ccctctctttcctgatct

SEQ ID NO: 1534 - DNA, 21 bp, Homo sapiens
tacatcctcttttgagggaag

SEQ ID NO: 1535 - DNA, 19 bp, Homo sapiens
ccaatgtcaccagtgacct

SEQ ID NO: 1536 - DNA, 16 bp, Homo sapiens
gagcagctgtggagac

SEQ ID NO: 1537 - DNA, 17 bp, Homo sapiens
ggcagaggtctctgttc

SEQ ID NO: 1538 - DNA, 22 bp, Homo sapiens
accgccgtgtgcagctgcacac

SEQ ID NO: 1539 - DNA, 19 bp, Homo sapiens
tgacctgtttctcccaggc

SEQ ID NO: 1540 - DNA, 16 bp, Homo sapiens
gacggtgccggctgcc

SEQ ID NO: 1541 - DNA, 18 bp, Homo sapiens
cgggtgtgtgccaggctc

SEQ ID NO: 1542 - DNA, 23 bp, Homo sapiens
caggaactcagtgaagatgaagc

SEQ ID NO: 1543 - DNA, 23 bp, Homo sapiens
ctctttctggcccacagtcccgg

SEQ ID NO: 1544 - DNA, 16 bp, Homo sapiens
gtgggctggttgaggc

SEQ ID NO: 1545 - DNA, 16 bp, Homo sapiens
cttctctgtggatggg

SEQ ID NO: 1546 - DNA, 16 bp, Homo sapiens
gaggcggaggcctggc

SEQ ID NO: 1547 - DNA, 19 bp, Homo sapiens
ccgtgctcaatgagaccag

SEQ ID NO: 1548 - DNA, 16 bp, Homo sapiens
ccagggatggggtcct

SEQ ID NO: 1549 - DNA, 24 bp, Homo sapiens
atgagaccgtgcggcacgggtgtc

SEQ ID NO: 1550 - DNA, 20 bp, Homo sapiens
aggaagttggctgtaaccca

SEQ ID NO: 1551 - DNA, 16 bp, Homo sapiens
gctgccaaccccttcg

SEQ ID NO: 1552 - DNA, 22 bp, Homo sapiens
ggactccagactcctttctgtc

SEQ ID NO: 1553 - DNA, 24 bp, Homo sapiens
atggacaaccctttcgagttcaac

SEQ ID NO: 1554 - DNA, 24 bp, Homo sapiens
aagggtcacatgcatcttcttcct

SEQ ID NO: 1555 - DNA, 16 bp, Homo sapiens
accaggcagaacctgc

SEQ ID NO: 1556 - DNA, 23 bp, Homo sapiens
gaaggaatgagtcccagagtagg

SEQ ID NO: 1557 - DNA, 16 bp, Homo sapiens
gccccagctggtctct

SEQ ID NO: 1558 - DNA, 24 bp, Homo sapiens
tctcctccctctgactgctttctc

SEQ ID NO: 1559 - DNA, 16 bp, Homo sapiens
ggcaggaggggtgagc

SEQ ID NO: 1560 - DNA, 18 bp, Homo sapiens
gtagcccaaggtggaggg

SEQ ID NO: 1561 - DNA, 23 bp, Homo sapiens
aaaggtgtttcgtccttcttctc

SEQ ID NO: 1562 - DNA, 19 bp, Homo sapiens
gggtacagctgaactgatc

SEQ ID NO: 1563 - DNA, 16 bp, Homo sapiens
tctacccagcctcccg

SEQ ID NO: 1564 - DNA, 22 bp, Homo sapiens
gaggctacagtgtgtgtcaagg

SEQ ID NO: 1565 - DNA, 22 bp, Homo sapiens
cgtcagagctcaggccagatgg

SEQ ID NO: 1566 - DNA, 21 bp, Homo sapiens
agcacatctggagacccggtg

SEQ ID NO: 1567 - DNA, 17 bp, Homo sapiens
agacctgcctcatcctc

SEQ ID NO: 1568 - DNA, 18 bp, Homo sapiens
cccacagccaccgagacc

SEQ ID NO: 1569 - DNA, 16 bp, Homo sapiens
caggggtccccagggg

SEQ ID NO: 1570 - DNA, 22 bp, Homo sapiens
gtccacatttgttgagcacaag

SEQ ID NO: 1571 - DNA, 23 bp, Homo sapiens
gcaggatgaaaaaatggcttact

SEQ ID NO: 1572 - DNA, 24 bp, Homo sapiens
gacagacagacagccctctgcagc

SEQ ID NO: 1573 - DNA, 23 bp, Homo sapiens
ctggatctaactacccctgtccc

SEQ ID NO: 1574 - DNA, 17 bp, Homo sapiens
ccccccagagacagagt

SEQ ID NO: 1575 - DNA, 23 bp, Homo sapiens
ctcttcctttctacgctgctcct

SEQ ID NO: 1576 - DNA, 17 bp, Homo sapiens
acagccaggccttcatt

SEQ ID NO: 1577 - DNA, 17 bp, Homo sapiens
ggtggtgcccccttccc

SEQ ID NO: 1578 - DNA, 20 bp, Homo sapiens
ccaatgtcatgaaatgcagg

SEQ ID NO: 1579 - DNA, 18 bp, Homo sapiens
caagttacaaggtggggg

SEQ ID NO: 1580 - DNA, 17 bp, Homo sapiens
tgatgtggccttggagc

SEQ ID NO: 1581 - DNA, 21 bp, Homo sapiens
tgtgggcaaacccctccatgc

SEQ ID NO: 1582 - DNA, 17 bp, Homo sapiens
cgtccctgcccttgacc

SEQ ID NO: 1583 - DNA, 18 bp, Homo sapiens
atcgttcaggcctagggg

SEQ ID NO: 1584 - DNA, 16 bp, Homo sapiens
gagggcaaaggctctg

SEQ ID NO: 1585 - DNA, 21 bp, Homo sapiens
tgagaagaatatgacagggcc

SEQ ID NO: 1586 - DNA, 16 bp, Homo sapiens
ttgagcacgatgtccc

SEQ ID NO: 1587 - DNA, 21 bp, Homo sapiens
ccatgcagtccctcgtctggg

SEQ ID NO: 1588 - DNA, 16 bp, Homo sapiens
aggaggttgtggcact

SEQ ID NO: 1589 - DNA, 18 bp, Homo sapiens
gctacaaccccagccctc

SEQ ID NO: 1590 - DNA, 16 bp, Homo sapiens
gcagtaccccccgggg

SEQ ID NO: 1591 - DNA, 24 bp, Homo sapiens
ctcaggtgttcaccacatcaagcg

SEQ ID NO: 1592 - DNA, 16 bp, Homo sapiens
tgcatctccccccact

SEQ ID NO: 1593 - DNA, 23 bp, Homo sapiens
gcctttgggaaggtcttccttgc

SEQ ID NO: 1594 - DNA, 18 bp, Homo sapiens
ccctcactgctgttcacc

SEQ ID NO: 1595 - DNA, 16 bp, Homo sapiens
acgcctccttcagtgc

SEQ ID NO: 1596 - DNA, 17 bp, Homo sapiens
ctccatcacatcaggac

SEQ ID NO: 1597 - DNA, 16 bp, Homo sapiens
gtgctggtgctgcagc

SEQ ID NO: 1598 - DNA, 16 bp, Homo sapiens
gggctgccctgggtga

SEQ ID NO: 1599 - DNA, 21 bp, Homo sapiens
atatactcaaagaccatgagc

SEQ ID NO: 1600 - DNA, 24 bp, Homo sapiens
ctgtccctgccgcttccatccagg

SEQ ID NO: 1601 - DNA, 16 bp, Homo sapiens
agcgctgaggccaggt

SEQ ID NO: 1602 - DNA, 18 bp, Homo sapiens
tgaggctgagctgctcac

SEQ ID NO: 1603 - DNA, 19 bp, Homo sapiens
gaaagacaagcagggatgt

SEQ ID NO: 1604 - DNA, 21 bp, Homo sapiens
cgtctgcaccgagggccgccc

SEQ ID NO: 1605 - DNA, 17 bp, Homo sapiens
cagagctccctggggac

SEQ ID NO: 1606 - DNA, 19 bp, Homo sapiens
cagctgcctctactgttct

SEQ ID NO: 1607 - DNA, 16 bp, Homo sapiens
gccccagacccagggg

SEQ ID NO: 1608 - DNA, 24 bp, Homo sapiens
tcccatcacacgcggctgctgggg

SEQ ID NO: 1609 - DNA, 20 bp, Homo sapiens
aatgcagacccgccaggtac

SEQ ID NO: 1610 - DNA, 24 bp, Homo sapiens
ctatcccctctccttttcttgttc

SEQ ID NO: 1611 - DNA, 22 bp, Homo sapiens
atcaccaatcttgaccaccagt

SEQ ID NO: 1612 - DNA, 18 bp, Homo sapiens
tggggaggatgtggctcc

SEQ ID NO: 1613 - DNA, 21 bp, Homo sapiens
aggacccttacacggtaatag

SEQ ID NO: 1614 - DNA, 17 bp, Homo sapiens
tgcggggatggtgtacc

SEQ ID NO: 1615 - DNA, 21 bp, Homo sapiens
gctctcagtggtcttgggatc

SEQ ID NO: 1616 - DNA, 20 bp, Homo sapiens
cacgcaactgtctagtgggc

SEQ ID NO: 1617 - DNA, 19 bp, Homo sapiens
ggttgaaaaccagagccag

SEQ ID NO: 1618 - DNA, 24 bp, Homo sapiens
gagcagggatatctacagcaccga

SEQ ID NO: 1619 - DNA, 23 bp, Homo sapiens
cgtgattgcccacctcggcctcc

SEQ ID NO: 1620 - DNA, 20 bp, Homo sapiens
gtggtgaacttacggtacag

SEQ ID NO: 1621 - DNA, 22 bp, Homo sapiens
tatttttaatgatggggctggg

SEQ ID NO: 1622 - DNA, 20 bp, Homo sapiens
ttgccgtaggtgaagatctc

SEQ ID NO: 1623 - DNA, 24 bp, Homo sapiens
cgcccctggaattgatgcagtgtc

SEQ ID NO: 1624 - DNA, 24 bp, Homo sapiens
ggaggccagcaaggggtgaccatg

SEQ ID NO: 1625 - DNA, 16 bp, Homo sapiens
cgcccgagagcatcct

SEQ ID NO: 1626 - DNA, 19 bp, Homo sapiens
agaaggggaaccgagttcc

SEQ ID NO: 1627 - DNA, 24 bp, Homo sapiens
cttcggcgtggtgctctgggagat

SEQ ID NO: 1628 - DNA, 18 bp, Homo sapiens
ggggacacagtgtgggca

SEQ ID NO: 1629 - DNA, 17 bp, Homo sapiens
cacgtccctgcgtgatg

SEQ ID NO: 1630 - DNA, 20 bp, Homo sapiens
tattagcagctaagaagccc

SEQ ID NO: 1631 - DNA, 16 bp, Homo sapiens
agcagccccgcatgat

SEQ ID NO: 1632 - DNA, 20 bp, Homo sapiens
gactggcctcactctcttgc

SEQ ID NO: 1633 - DNA, 16 bp, Homo sapiens
gccagggcttgcagcc

SEQ ID NO: 1634 - DNA, 17 bp, Homo sapiens
cccaggcaatcgactgc

SEQ ID NO: 1635 - DNA, 16 bp, Homo sapiens
actcccagcccctggg

SEQ ID NO: 1636 - DNA, 20 bp, Homo sapiens
cccaccagaggtctacgcca

SEQ ID NO: 1637 - DNA, 18 bp, Homo sapiens
ggggctgctgggagctat

SEQ ID NO: 1638 - DNA, 18 bp, Homo sapiens
agcatcaaggatgtgcac

SEQ ID NO: 1639 - DNA, 16 bp, Homo sapiens
cccagcccccacctgt

SEQ ID NO: 1640 - DNA, 22 bp, Homo sapiens
gactctcccatgttataggaag

SEQ ID NO: 1641 - DNA, 20 bp, Homo sapiens
tggatggtgcattgtgactt

SEQ ID NO: 1642 - DNA, 20 bp, Homo sapiens
ggaagcctccccttcccaag

SEQ ID NO: 1643 - DNA, 23 bp, Homo sapiens
cagggaatgaggacagagtgtct

SEQ ID NO: 1644 - DNA, 22 bp, Homo sapiens
gttttacctttgccatttgacc

SEQ ID NO: 1645 - DNA, 23 bp, Homo sapiens
cctttacagtcacattatgcccc

SEQ ID NO: 1646 - DNA, 19 bp, Homo sapiens
cttcgatacctccacaccc

SEQ ID NO: 1647 - DNA, 24 bp, Homo sapiens
gtggctcaacaggtttggaaggac

SEQ ID NO: 1648 - DNA, 22 bp, Homo sapiens
gaaaaggctgcttctgagtccc

SEQ ID NO: 1649 - DNA, 22 bp, Homo sapiens
tgggagaagacaggcaattcag

SEQ ID NO: 1650 - DNA, 20 bp, Homo sapiens
aacaatcactttgctttcgt

SEQ ID NO: 1651 - DNA, 22 bp, Homo sapiens
ttctctgtggacagagactgaa

SEQ ID NO: 1652 - DNA, 17 bp, Homo sapiens
gctcagtgcttgtctgc

SEQ ID NO: 1653 - DNA, 23 bp, Homo sapiens
cctgacagaatctcagctgccat

SEQ ID NO: 1654 - DNA, 20 bp, Homo sapiens
caagacccttcagaaagaag

SEQ ID NO: 1655 - DNA, 19 bp, Homo sapiens
aagacaagccaaagtgcgg

SEQ ID NO: 1656 - DNA, 24 bp, Homo sapiens
agagagcaattttaatagagttgt

SEQ ID NO: 1657 - DNA, 23 bp, Homo sapiens
tttcagtaaagatgtgaggttgc

SEQ ID NO: 1658 - DNA, 23 bp, Homo sapiens
agtaaggaagcaaaggggaaatg

SEQ ID NO: 1659 - DNA, 20 bp, Homo sapiens
aagctttggcccctaaatca

SEQ ID NO: 1660 - DNA, 24 bp, Homo sapiens
gtctgggtgggaggatggagtgct

SEQ ID NO: 1661 - DNA, 19 bp, Homo sapiens
tccaaatttgctactcatc

SEQ ID NO: 1662 - DNA, 24 bp, Homo sapiens
cagtgagtgctgaagcccagctgg

SEQ ID NO: 1663 - DNA, 21 bp, Homo sapiens
aagtggagagaatagaaatgt

SEQ ID NO: 1664 - DNA, 23 bp, Homo sapiens
taggtgatttgtttctctttttt

SEQ ID NO: 1665 - DNA, 22 bp, Homo sapiens
ccactgacatctgaattcttct

SEQ ID NO: 1666 - DNA, 24 bp, Homo sapiens
tttttcaaatgaaaaatttaaaat

SEQ ID NO: 1667 - DNA, 16 bp, Homo sapiens
acaatggccaccaggg

SEQ ID NO: 1668 - DNA, 22 bp, Homo sapiens
tgctagttaatttcctacccac

SEQ ID NO: 1669 - DNA, 23 bp, Homo sapiens
ggcactgtgaagttaaatacaac

SEQ ID NO: 1670 - DNA, 21 bp, Homo sapiens
tcactgaatccaaggcaacct

SEQ ID NO: 1671 - DNA, 20 bp, Homo sapiens
ttggcaacctcctaactagc

SEQ ID NO: 1672 - DNA, 24 bp, Homo sapiens
accactatgaagcgtctcctagca

SEQ ID NO: 1673 - DNA, 24 bp, Homo sapiens
actggccatagaagatttaataaa

SEQ ID NO: 1674 - DNA, 19 bp, Homo sapiens
ctcctaagcagtcttgctc

SEQ ID NO: 1675 - DNA, 24 bp, Homo sapiens
agcatattggccattatgtttatc

SEQ ID NO: 1676 - DNA, 24 bp, Homo sapiens
ccaaagacatgtttataatggaga

SEQ ID NO: 1677 - DNA, 21 bp, Homo sapiens
agaagaatttcagtgagggat

SEQ ID NO: 1678 - DNA, 18 bp, Homo sapiens
ggagcccaagaatcaagc

SEQ ID NO: 1679 - DNA, 22 bp, Homo sapiens
gcacagctttagatacatgagc

SEQ ID NO: 1680 - DNA, 20 bp, Homo sapiens
ttttctcttgcggagaaaat

SEQ ID NO: 1681 - DNA, 18 bp, Homo sapiens
tcggtagtagcaaatggc

SEQ ID NO: 1682 - DNA, 27 bp, Homo sapiens
gtatttaataaaaatttcataattttc

SEQ ID NO: 1683 - DNA, 20 bp, Homo sapiens
ttcgtctccaaactctggag

SEQ ID NO: 1684 - DNA, 23 bp, Homo sapiens
gttttaagttatgatgtagtcca

SEQ ID NO: 1685 - DNA, 23 bp, Homo sapiens
cctcctctcttttaggtcttttc

SEQ ID NO: 1686 - DNA, 20 bp, Homo sapiens
tttgtccacggtaggtagac

SEQ ID NO: 1687 - DNA, 19 bp, Homo sapiens
ccccagaaaggtgaaaccc

SEQ ID NO: 1688 - DNA, 21 bp, Homo sapiens
acctcatgaaaaggtatctcc

SEQ ID NO: 1689 - DNA, 16 bp, Homo sapiens
atgggccaatggtctg

SEQ ID NO: 1690 - DNA, 22 bp, Homo sapiens
caggcagggcaaaaaaaagaaa

SEQ ID NO: 1691 - DNA, 19 bp, Homo sapiens
agccaaaggccctggtaaa

SEQ ID NO: 1692 - DNA, 22 bp, Homo sapiens
taacctataagtaacagattgg

SEQ ID NO: 1693 - DNA, 21 bp, Homo sapiens
tttaggttgtacaagagtatg

SEQ ID NO: 1694 - DNA, 21 bp, Homo sapiens
aggtccatattacaaatctgc

SEQ ID NO: 1695 - DNA, 23 bp, Homo sapiens
gccaaggccttttgaagactttt

SEQ ID NO: 1696 - DNA, 22 bp, Homo sapiens
ggtgtttagaaaaaaaagagtg

SEQ ID NO: 1697 - DNA, 21 bp, Homo sapiens
aaattttttcctggttctcaa

SEQ ID NO: 1698 - DNA, 23 bp, Homo sapiens
tcccagtcggaatataattactc

SEQ ID NO: 1699 - DNA, 20 bp, Homo sapiens
tggttctgcgtaaaggtgag

SEQ ID NO: 1700 - DNA, 20 bp, Homo sapiens
gctatcctggaaggtgagtc

SEQ ID NO: 1701 - DNA, 17 bp, Homo sapiens
agtggcttcttgtcctc

SEQ ID NO: 1702 - DNA, 20 bp, Homo sapiens
aaacagaagtgagaatgggc

SEQ ID NO: 1703 - DNA, 24 bp, Homo sapiens
tcaatataattattcttttgcttt

SEQ ID NO: 1704 - DNA, 21 bp, Homo sapiens
gggtccttatggaatctcacc

SEQ ID NO: 1705 - DNA, 22 bp, Homo sapiens
tgccaactccaataccaagaat

SEQ ID NO: 1706 - DNA, 24 bp, Homo sapiens
tcatgatgatgaagagcagggaaa

SEQ ID NO: 1707 - DNA, 20 bp, Homo sapiens
actctgactactctgatttg

SEQ ID NO: 1708 - DNA, 18 bp, Homo sapiens
gttggagagcgagcggcc

SEQ ID NO: 1709 - DNA, 19 bp, Homo sapiens
tcctgggaacctgagcatc

SEQ ID NO: 1710 - DNA, 16 bp, Homo sapiens
gtggacgtggatgagg

SEQ ID NO: 1711 - DNA, 20 bp, Homo sapiens
tttccaccttatctgacgcc

SEQ ID NO: 1712 - DNA, 16 bp, Homo sapiens
ccgagccgtcgggctc

SEQ ID NO: 1713 - DNA, 24 bp, Homo sapiens
gtggtgctgaatccgtaccttcct

SEQ ID NO: 1714 - DNA, 18 bp, Homo sapiens
gaacaagagggcaaaggc

SEQ ID NO: 1715 - DNA, 18 bp, Homo sapiens
ccggagcctcggacctca

SEQ ID NO: 1716 - DNA, 16 bp, Homo sapiens
ggcgcggagctcctcc

SEQ ID NO: 1717 - DNA, 22 bp, Homo sapiens
ggctcccccggggtccccgccc

SEQ ID NO: 1718 - DNA, 17 bp, Homo sapiens
tgcccctagcgctcccg

SEQ ID NO: 1719 - DNA, 16 bp, Homo sapiens
ccgccgctcctctcgg

SEQ ID NO: 1720 - DNA, 17 bp, Homo sapiens
tttagggtcccccgggc

SEQ ID NO: 1721 - DNA, 21 bp, Homo sapiens
ctcgcccgcgggactccctgg

SEQ ID NO: 1722 - DNA, 16 bp, Homo sapiens
cgccccgcccgcggcc

SEQ ID NO: 1723 - DNA, 22 bp, Homo sapiens
tttctgtgaaggagctgtaagt

SEQ ID NO: 1724 - DNA, 23 bp, Homo sapiens
actttttatgtagataagcagtg

SEQ ID NO: 1725 - DNA, 20 bp, Homo sapiens
cacccgctcctctctgagac

SEQ ID NO: 1726 - DNA, 24 bp, Homo sapiens
tgtaagaaatataataagccagaa

SEQ ID NO: 1727 - DNA, 21 bp, Homo sapiens
gcaacacaccagaggatgttc

SEQ ID NO: 1728 - DNA, 21 bp, Homo sapiens
aaaacttccttttttagcatt

SEQ ID NO: 1729 - DNA, 21 bp, Homo sapiens
tcttctacctcagtttctcac

SEQ ID NO: 1730 - DNA, 23 bp, Homo sapiens
tggtgttgtttttattgcaaaag

SEQ ID NO: 1731 - DNA, 22 bp, Homo sapiens
tttcattaggatgaacccaact

SEQ ID NO: 1732 - DNA, 24 bp, Homo sapiens
gaacaatcattgtcttttgaaaaa

SEQ ID NO: 1733 - DNA, 24 bp, Homo sapiens
agcacaaaggtcacaaagaaagat

SEQ ID NO: 1734 - DNA, 19 bp, Homo sapiens
gcaagggtctttcatgttg

SEQ ID NO: 1735 - DNA, 21 bp, Homo sapiens
tttccttgtagattccttttg

SEQ ID NO: 1736 - DNA, 20 bp, Homo sapiens
tttctcctggggtgttcaca

SEQ ID NO: 1737 - DNA, 22 bp, Homo sapiens
cttgccaaaacaattctacatg

SEQ ID NO: 1738 - DNA, 21 bp, Homo sapiens
caggaaccaatggtagtttca

SEQ ID NO: 1739 - DNA, 24 bp, Homo sapiens
gacacagccaataatttggacaaa

SEQ ID NO: 1740 - DNA, 21 bp, Homo sapiens
cagacaggataaatagggtcc

SEQ ID NO: 1741 - DNA, 23 bp, Homo sapiens
ctgtcaaggaagtgccacttgtg

SEQ ID NO: 1742 - DNA, 20 bp, Homo sapiens
cactcatcgtgatctatctc

SEQ ID NO: 1743 - DNA, 19 bp, Homo sapiens
ctgggtacagtgggacaat

SEQ ID NO: 1744 - DNA, 20 bp, Homo sapiens
gcaggagtaaccatcaattc

SEQ ID NO: 1745 - DNA, 24 bp, Homo sapiens
ctcctgccaacatggaggtatttg

SEQ ID NO: 1746 - DNA, 20 bp, Homo sapiens
aagcacattcatccacttcc

SEQ ID NO: 1747 - DNA, 23 bp, Homo sapiens
gctggatatgctggaagattctg

SEQ ID NO: 1748 - DNA, 23 bp, Homo sapiens
ggacagatacaagtatatcttcc

SEQ ID NO: 1749 - DNA, 17 bp, Homo sapiens
ggggccgtgtgccagga

SEQ ID NO: 1750 - DNA, 19 bp, Homo sapiens
agagctaactacaccatct

SEQ ID NO: 1751 - DNA, 24 bp, Homo sapiens
aaggcagacactgcgacttggaag

SEQ ID NO: 1752 - DNA, 22 bp, Homo sapiens
gccattttcataaatgattgtg

SEQ ID NO: 1753 - DNA, 21 bp, Homo sapiens
ggctacatgcctcaatgaaat

SEQ ID NO: 1754 - DNA, 20 bp, Homo sapiens
ggattttcagcagtttaggg

SEQ ID NO: 1755 - DNA, 22 bp, Homo sapiens
tcgtcaatttccaattcacagt

SEQ ID NO: 1756 - DNA, 24 bp, Homo sapiens
caattacaattaagggggaaagtt

SEQ ID NO: 1757 - DNA, 18 bp, Homo sapiens
cccccagagcatcctgac

SEQ ID NO: 1758 - DNA, 24 bp, Homo sapiens
aaagcattgtcaaattgctaaatt

SEQ ID NO: 1759 - DNA, 19 bp, Homo sapiens
cacactcatcagtgttgag

SEQ ID NO: 1760 - DNA, 23 bp, Homo sapiens
tgtgctgacttttttaaaaggtg

SEQ ID NO: 1761 - DNA, 23 bp, Homo sapiens
ccagagaaaatgtacctgttttc

SEQ ID NO: 1762 - DNA, 24 bp, Homo sapiens
gccttgtttaaatggtgcaacttg

SEQ ID NO: 1763 - DNA, 21 bp, Homo sapiens
aacagagtggtaaaatagttc

SEQ ID NO: 1764 - DNA, 19 bp, Homo sapiens
gattcctgggggatcactg

SEQ ID NO: 1765 - DNA, 24 bp, Homo sapiens
tcagttaaagtataaagttacacc

SEQ ID NO: 1766 - DNA, 16 bp, Homo sapiens
catggagggctgtgtg

SEQ ID NO: 1767 - DNA, 22 bp, Homo sapiens
acccgtgcagttacagctatat

SEQ ID NO: 1768 - DNA, 23 bp, Homo sapiens
cagtcctgtatagataattcccc

SEQ ID NO: 1769 - DNA, 17 bp, Homo sapiens
accaacaaagaggcatc

SEQ ID NO: 1770 - DNA, 22 bp, Homo sapiens
tgatagacagttgaagaaacag

SEQ ID NO: 1771 - DNA, 21 bp, Homo sapiens
cagcagtgacaagtgtaattg

SEQ ID NO: 1772 - DNA, 23 bp, Homo sapiens
acatgaaaatttcatttactttc

SEQ ID NO: 1773 - DNA, 23 bp, Homo sapiens
agcgatatgtgtattctaaacaa

SEQ ID NO: 1774 - DNA, 18 bp, Homo sapiens
acacactgtgagaccttg

SEQ ID NO: 1775 - DNA, 23 bp, Homo sapiens
gctagaagaaattgatttaaaac

SEQ ID NO: 1776 - DNA, 18 bp, Homo sapiens
gtgaggacagtgttgaca

SEQ ID NO: 1777 - DNA, 16 bp, Homo sapiens
atctcacactgggcac

SEQ ID NO: 1778 - DNA, 21 bp, Homo sapiens
tccccttaccagctccttgag

SEQ ID NO: 1779 - DNA, 18 bp, Homo sapiens
gctccacacattccccat

SEQ ID NO: 1780 - DNA, 21 bp, Homo sapiens
agtcaacctccttttaggcaa

SEQ ID NO: 1781 - DNA, 20 bp, Homo sapiens
ggcttcatggtagctgaaag

SEQ ID NO: 1782 - DNA, 21 bp, Homo sapiens
ttttcatcatgcaggatacac

SEQ ID NO: 1783 - DNA, 16 bp, Homo sapiens
atctccttggcctcac

SEQ ID NO: 1784 - DNA, 19 bp, Homo sapiens
taacccctgccagtccaat

SEQ ID NO: 1785 - DNA, 20 bp, Homo sapiens
tgctaatacaccatttggtt

SEQ ID NO: 1786 - DNA, 24 bp, Homo sapiens
gacgcatcactggactgccttctt

SEQ ID NO: 1787 - DNA, 16 bp, Homo sapiens
cacaagggggaccctt

SEQ ID NO: 1788 - DNA, 18 bp, Homo sapiens
cagcctggattcacaggt

SEQ ID NO: 1789 - DNA, 22 bp, Homo sapiens
aagaacattcattgacgtcttc

SEQ ID NO: 1790 - DNA, 23 bp, Homo sapiens
acattttactccattacagtcct

SEQ ID NO: 1791 - DNA, 21 bp, Homo sapiens
gcaagtataattcccaggcaa

SEQ ID NO: 1792 - DNA, 21 bp, Homo sapiens
tacgtgaaacttctatttttg

SEQ ID NO: 1793 - DNA, 21 bp, Homo sapiens
ggagaatatcagaacagtccc

SEQ ID NO: 1794 - DNA, 22 bp, Homo sapiens
tatttaacaggaatccactgcg

SEQ ID NO: 1795 - DNA, 19 bp, Homo sapiens
ggaagtgagggatgcatgt

SEQ ID NO: 1796 - DNA, 24 bp, Homo sapiens
caaaatggtggtacttgtgagaac

SEQ ID NO: 1797 - DNA, 17 bp, Homo sapiens
tttcacacagggacccg

SEQ ID NO: 1798 - DNA, 23 bp, Homo sapiens
ctagaactttttatggaggaagg

SEQ ID NO: 1799 - DNA, 20 bp, Homo sapiens
cactgagccacttttgaccc

SEQ ID NO: 1800 - DNA, 22 bp, Homo sapiens
gcaatgtctaaataatggaaca

SEQ ID NO: 1801 - DNA, 21 bp, Homo sapiens
agagccattggctgaacagtc

SEQ ID NO: 1802 - DNA, 16 bp, Homo sapiens
tgtccatctggctaca

SEQ ID NO: 1803 - DNA, 19 bp, Homo sapiens
gtagccacttagcagctcc

SEQ ID NO: 1804 - DNA, 19 bp, Homo sapiens
tgagggcgatggcttcctg

SEQ ID NO: 1805 - DNA, 22 bp, Homo sapiens
tgttgtgggaaatgaacagaag

SEQ ID NO: 1806 - DNA, 24 bp, Homo sapiens
gtttgtaacatagccctcaggttt

SEQ ID NO: 1807 - DNA, 18 bp, Homo sapiens
taagggtcacagcctctg

SEQ ID NO: 1808 - DNA, 24 bp, Homo sapiens
agcaacagggatgtgtttgtgaag

SEQ ID NO: 1809 - DNA, 21 bp, Homo sapiens
actttcaagtggagtaggagc

SEQ ID NO: 1810 - DNA, 19 bp, Homo sapiens
tcagtcaaaggtgcttctg

SEQ ID NO: 1811 - DNA, 19 bp, Homo sapiens
tcattcccactggtaaacc

SEQ ID NO: 1812 - DNA, 23 bp, Homo sapiens
ggcatttcgtggaggtaatattt

SEQ ID NO: 1813 - DNA, 18 bp, Homo sapiens
cctacaaacgaaggtgtg

SEQ ID NO: 1814 - DNA, 16 bp, Homo sapiens
gcatcgcgaaagctcc

SEQ ID NO: 1815 - DNA, 19 bp, Homo sapiens
cagacgagatgttctccag

SEQ ID NO: 1816 - DNA, 24 bp, Homo sapiens
gcttttcagaactcctttttgggt

SEQ ID NO: 1817 - DNA, 18 bp, Homo sapiens
caaggttggctttcacac

SEQ ID NO: 1818 - DNA, 22 bp, Homo sapiens
acttctataatatgccatccac

SEQ ID NO: 1819 - DNA, 16 bp, Homo sapiens
tgtggcagtcacactg

SEQ ID NO: 1820 - DNA, 21 bp, Homo sapiens
ttgattggaatcacattaccc

SEQ ID NO: 1821 - DNA, 18 bp, Homo sapiens
cactcctagccatagcac

SEQ ID NO: 1822 - DNA, 24 bp, Homo sapiens
gcaggctgtgtgagaaaggattgg

SEQ ID NO: 1823 - DNA, 19 bp, Homo sapiens
tttcatagcaggcagaagc

SEQ ID NO: 1824 - DNA, 24 bp, Homo sapiens
tgcatcaacttgtggctgagttac

SEQ ID NO: 1825 - DNA, 23 bp, Homo sapiens
actgccctcttcttttctttctc

SEQ ID NO: 1826 - DNA, 24 bp, Homo sapiens
aaacctgtcctgaactttaaaagc

SEQ ID NO: 1827 - DNA, 21 bp, Homo sapiens
tccatagctctcatcaagagt

SEQ ID NO: 1828 - DNA, 22 bp, Homo sapiens
tgtataattttcgtcttccatc

SEQ ID NO: 1829 - DNA, 22 bp, Homo sapiens
gctagaagtaagcctgatggtt

SEQ ID NO: 1830 - DNA, 20 bp, Homo sapiens
tcctcctcctctattttgac

SEQ ID NO: 1831 - DNA, 16 bp, Homo sapiens
tctgccgcgctctagc

SEQ ID NO: 1832 - DNA, 24 bp, Homo sapiens
caggatgactccactggttatgtc

SEQ ID NO: 1833 - DNA, 22 bp, Homo sapiens
tggacatttccatcattaagaa

SEQ ID NO: 1834 - DNA, 20 bp, Homo sapiens
ctccatgtttgtccgaacgc

SEQ ID NO: 1835 - DNA, 20 bp, Homo sapiens
tgtgaagactgatacagttc

SEQ ID NO: 1836 - DNA, 23 bp, Homo sapiens
ttatcaatatatccgtgtctggc

SEQ ID NO: 1837 - DNA, 20 bp, Homo sapiens
atgtagatgacatctccctt

SEQ ID NO: 1838 - DNA, 24 bp, Homo sapiens
aactctcccaaattagtagtaaaa

SEQ ID NO: 1839 - DNA, 21 bp, Homo sapiens
gatacagcctttgaagaatcc

SEQ ID NO: 1840 - DNA, 23 bp, Homo sapiens
tcaagccatataaaattgaactg

SEQ ID NO: 1841 - DNA, 21 bp, Homo sapiens
tgcattgtttgttggatttgg

SEQ ID NO: 1842 - DNA, 21 bp, Homo sapiens
ctacgtggaaaatcgaaaagg

SEQ ID NO: 1843 - DNA, 16 bp, Homo sapiens
agctgttgtctccagc

SEQ ID NO: 1844 - DNA, 23 bp, Homo sapiens
agcaagagactgaacttaatggt

SEQ ID NO: 1845 - DNA, 28 bp, Homo sapiens
tatctttttaataaagtaaaagtttagc

SEQ ID NO: 1846 - DNA, 22 bp, Homo sapiens
accaaaatctggaattctttcc

SEQ ID NO: 1847 - DNA, 18 bp, Homo sapiens
actggtgggtcagtaaca

SEQ ID NO: 1848 - DNA, 18 bp, Homo sapiens
tgtaacccaaggctgtgc

SEQ ID NO: 1849 - DNA, 23 bp, Homo sapiens
aaggttatgtaactagcctaaat

SEQ ID NO: 1850 - DNA, 21 bp, Homo sapiens
gtgaaacttggtacttaggtc

SEQ ID NO: 1851 - DNA, 23 bp, Homo sapiens
tgctctaataaatttctttttaa

SEQ ID NO: 1852 - DNA, 24 bp, Homo sapiens
ctcctggttttatagatgataaaa

SEQ ID NO: 1853 - DNA, 29 bp, Homo sapiens
tgagaactcaaataataatactatgtctc

SEQ ID NO: 1854 - DNA, 17 bp, Homo sapiens
ggcactttttcacatgc

SEQ ID NO: 1855 - DNA, 23 bp, Homo sapiens
actcactgagttgggatccagag

SEQ ID NO: 1856 - DNA, 17 bp, Homo sapiens
ccatagcacaaggaggg

SEQ ID NO: 1857 - DNA, 23 bp, Homo sapiens
ggatcttgggcaactggaaacac

SEQ ID NO: 1858 - DNA, 23 bp, Homo sapiens
ttctatttagttaacaatggatc

SEQ ID NO: 1859 - DNA, 21 bp, Homo sapiens
tgagggcaggacaggaacagg

SEQ ID NO: 1860 - DNA, 24 bp, Homo sapiens
attttaaaaaaacagatatgtggt

SEQ ID NO: 1861 - DNA, 16 bp, Homo sapiens
ccgtgaggacacgggc

SEQ ID NO: 1862 - DNA, 24 bp, Homo sapiens
gctttttatacctttgatttcttt

SEQ ID NO: 1863 - DNA, 23 bp, Homo sapiens
ggtgagatggtaggtttgaactc

SEQ ID NO: 1864 - DNA, 24 bp, Homo sapiens
cattcccggtgggatgacttctcc

SEQ ID NO: 1865 - DNA, 23 bp, Homo sapiens
tgtctatactctttttctgtgtt

SEQ ID NO: 1866 - DNA, 17 bp, Homo sapiens
agtggtgtggattcagc

SEQ ID NO: 1867 - DNA, 20 bp, Homo sapiens
agtcagtattagcctactcg

SEQ ID NO: 1868 - DNA, 23 bp, Homo sapiens
tgcttcaaggatttgaatgtagg

SEQ ID NO: 1869 - DNA, 21 bp, Homo sapiens
gctttgtccattaaaaacagc

SEQ ID NO: 1870 - DNA, 24 bp, Homo sapiens
ctagcacagtatgtaacatgtatc

SEQ ID NO: 1871 - DNA, 21 bp, Homo sapiens
tgtgatattggtgagttctct

SEQ ID NO: 1872 - DNA, 22 bp, Homo sapiens
ctattaataacggtaattaagc

SEQ ID NO: 1873 - DNA, 18 bp, Homo sapiens
ggctctttttctgcatgc

SEQ ID NO: 1874 - DNA, 22 bp, Homo sapiens
tctctcattaggtattgcaaat

SEQ ID NO: 1875 - DNA, 19 bp, Homo sapiens
tgccactttgcaattgaaa

SEQ ID NO: 1876 - DNA, 22 bp, Homo sapiens
aagcaatgggaatattaccaga

SEQ ID NO: 1877 - DNA, 17 bp, Homo sapiens
tgccatgtgccatcatt

SEQ ID NO: 1878 - DNA, 24 bp, Homo sapiens
ggatgcaaatgtaataatattgca

SEQ ID NO: 1879 - DNA, 19 bp, Homo sapiens
ccacttccatttgccacct

SEQ ID NO: 1880 - DNA, 23 bp, Homo sapiens
gcattcaagattccagattattc

SEQ ID NO: 1881 - DNA, 20 bp, Homo sapiens
atccttcaaaaagttgaggc

SEQ ID NO: 1882 - DNA, 21 bp, Homo sapiens
ctgacaagtttgcagtcagtg

SEQ ID NO: 1883 - DNA, 16 bp, Homo sapiens
gacacccttgcaggcc

SEQ ID NO: 1884 - DNA, 19 bp, Homo sapiens
cccactgtcccagacctcc

SEQ ID NO: 1885 - DNA, 21 bp, Homo sapiens
aatgaaaccatgaacattttc

SEQ ID NO: 1886 - DNA, 23 bp, Homo sapiens
tgaccagcacaattgctactgga

SEQ ID NO: 1887 - DNA, 20 bp, Homo sapiens
ccagtgaccactgaattggt

SEQ ID NO: 1888 - DNA, 21 bp, Homo sapiens
ggagacagagctattgacaat

SEQ ID NO: 1889 - DNA, 18 bp, Homo sapiens
ttcacagtttcctccatg

SEQ ID NO: 1890 - DNA, 23 bp, Homo sapiens
ggcatttatctctcttactttga

SEQ ID NO: 1891 - DNA, 19 bp, Homo sapiens
tgagttcacagtgtttccc

SEQ ID NO: 1892 - DNA, 23 bp, Homo sapiens
gcaatttctcaaaatctctacca

SEQ ID NO: 1893 - DNA, 20 bp, Homo sapiens
ctgcaactctgtcagagcag

SEQ ID NO: 1894 - DNA, 20 bp, Homo sapiens
gcaactccaacccctgtttg

SEQ ID NO: 1895 - DNA, 23 bp, Homo sapiens
agttgtctatatccacttcacag

SEQ ID NO: 1896 - DNA, 24 bp, Homo sapiens
attgctcctgtcccttgggatggt

SEQ ID NO: 1897 - DNA, 24 bp, Homo sapiens
gaggcaagaatagccattagtatg

SEQ ID NO: 1898 - DNA, 19 bp, Homo sapiens
aaacccctgtatccatggc

SEQ ID NO: 1899 - DNA, 21 bp, Homo sapiens
atatggactttatgctcacct

SEQ ID NO: 1900 - DNA, 21 bp, Homo sapiens
gagcctggatacactggtgtg

SEQ ID NO: 1901 - DNA, 22 bp, Homo sapiens
ggagagagctttccaatttgac

SEQ ID NO: 1902 - DNA, 19 bp, Homo sapiens
gcaaatggagccacctgca

SEQ ID NO: 1903 - DNA, 18 bp, Homo sapiens
tgacagaagctaccagtg

SEQ ID NO: 1904 - DNA, 21 bp, Homo sapiens
tacaggaaaattttgcaggtg

SEQ ID NO: 1905 - DNA, 18 bp, Homo sapiens
tgagggtaatctgctctg

SEQ ID NO: 1906 - DNA, 20 bp, Homo sapiens
taagcatttgtagctcctcc

SEQ ID NO: 1907 - DNA, 16 bp, Homo sapiens
ctgtgcagttgcctcc

SEQ ID NO: 1908 - DNA, 24 bp, Homo sapiens
acatgaatttatcagaaaactttt

SEQ ID NO: 1909 - DNA, 21 bp, Homo sapiens
gctctaatgtgactcaccatt

SEQ ID NO: 1910 - DNA, 24 bp, Homo sapiens
tcttgcttttatctctctagacag

SEQ ID NO: 1911 - DNA, 22 bp, Homo sapiens
agaggagaaaatgaactttgag

SEQ ID NO: 1912 - DNA, 21 bp, Homo sapiens
tctcacttgctacaatggagg

SEQ ID NO: 1913 - DNA, 21 bp, Homo sapiens
tgtctgaacctctatttcagc

SEQ ID NO: 1914 - DNA, 16 bp, Homo sapiens
gccggccaggttttac

SEQ ID NO: 1915 - DNA, 21 bp, Homo sapiens
caatgtccttttcacaccttc

SEQ ID NO: 1916 - DNA, 23 bp, Homo sapiens
catctccgacattatcaagtatg

SEQ ID NO: 1917 - DNA, 16 bp, Homo sapiens
agtcctggcacagacc

SEQ ID NO: 1918 - DNA, 24 bp, Homo sapiens
gctgttccagagagataaggcaaa

SEQ ID NO: 1919 - DNA, 16 bp, Homo sapiens
acgtccacctcgcagc

SEQ ID NO: 1920 - DNA, 21 bp, Homo sapiens
acctgggtttctgctgttctg

SEQ ID NO: 1921 - DNA, 24 bp, Homo sapiens
atgaggtaagaaagaagctgaaaa

SEQ ID NO: 1922 - DNA, 24 bp, Homo sapiens
ctctgatccgtgtgtcaatggagg

SEQ ID NO: 1923 - DNA, 18 bp, Homo sapiens
tcttcctgttcaccccac

SEQ ID NO: 1924 - DNA, 21 bp, Homo sapiens
tgtgatgttgcctttgctggc

SEQ ID NO: 1925 - DNA, 20 bp, Homo sapiens
tagtggtgaaaatgtcggag

SEQ ID NO: 1926 - DNA, 24 bp, Homo sapiens
ggtctttttacagtactgagtggt

SEQ ID NO: 1927 - DNA, 22 bp, Homo sapiens
gacaacagaagcaacaatggcc

SEQ ID NO: 1928 - DNA, 24 bp, Homo sapiens
tgtcctgaatatttatttgccttt

SEQ ID NO: 1929 - DNA, 17 bp, Homo sapiens
ttctcctgacggctggg

SEQ ID NO: 1930 - DNA, 22 bp, Homo sapiens
tttccagttggcagatgacttg

SEQ ID NO: 1931 - DNA, 22 bp, Homo sapiens
cctaaatcagtctctccattgc

SEQ ID NO: 1932 - DNA, 24 bp, Homo sapiens
gtcgccttgttactgatcctcttg

SEQ ID NO: 1933 - DNA, 20 bp, Homo sapiens
acctgaagtacagtcatcac

SEQ ID NO: 1934 - DNA, 22 bp, Homo sapiens
ggcaactcagggaacctacagc

SEQ ID NO: 1935 - DNA, 20 bp, Homo sapiens
ctgtagttccagtgtaatcc

SEQ ID NO: 1936 - DNA, 16 bp, Homo sapiens
cttgatgccaccccct

SEQ ID NO: 1937 - DNA, 19 bp, Homo sapiens
gcgtgctctactatgccac

SEQ ID NO: 1938 - DNA, 24 bp, Homo sapiens
gggtggtccaggctgtactttagg

SEQ ID NO: 1939 - DNA, 17 bp, Homo sapiens
cagcggacctgacagga

SEQ ID NO: 1940 - DNA, 17 bp, Homo sapiens
cccaatctgcccccaac

SEQ ID NO: 1941 - DNA, 22 bp, Homo sapiens
ttccatttgcctcagacatgga

SEQ ID NO: 1942 - DNA, 22 bp, Homo sapiens
aagctgtagcatcacttgcagg

SEQ ID NO: 1943 - DNA, 18 bp, Homo sapiens
gaggggaaggaagggttg

SEQ ID NO: 1944 - DNA, 23 bp, Homo sapiens
ggatctgctccacacgcttctcc

SEQ ID NO: 1945 - DNA, 22 bp, Homo sapiens
actgctttagaggccagatttt

SEQ ID NO: 1946 - DNA, 19 bp, Homo sapiens
cagcagctccaactccatg

SEQ ID NO: 1947 - DNA, 18 bp, Homo sapiens
tgtttggggagaccatgg

SEQ ID NO: 1948 - DNA, 22 bp, Homo sapiens
aatctcatttgatctcactccc

SEQ ID NO: 1949 - DNA, 18 bp, Homo sapiens
gttccatgctgggtgagc

SEQ ID NO: 1950 - DNA, 20 bp, Homo sapiens
gggttgggtgggaccagcct

SEQ ID NO: 1951 - DNA, 23 bp, Homo sapiens
cctttttcagggatttgagagaa

SEQ ID NO: 1952 - DNA, 22 bp, Homo sapiens
acctttcatcctgtccatcatc

SEQ ID NO: 1953 - DNA, 20 bp, Homo sapiens
ggccacaggtctttaggacc

SEQ ID NO: 1954 - DNA, 19 bp, Homo sapiens
ttcacactctggatccggg

SEQ ID NO: 1955 - DNA, 18 bp, Homo sapiens
ttgggggctaataggagg

SEQ ID NO: 1956 - DNA, 21 bp, Homo sapiens
tcaactcagcatacttttgtt

SEQ ID NO: 1957 - DNA, 24 bp, Homo sapiens
caggtttgggttgactctcaagcc

SEQ ID NO: 1958 - DNA, 16 bp, Homo sapiens
gggggcagaggcagtc

SEQ ID NO: 1959 - DNA, 24 bp, Homo sapiens
ggtcttataaagtgtgcaaagtcc

SEQ ID NO: 1960 - DNA, 24 bp, Homo sapiens
tgacaagcatgaccaagcagctgg

SEQ ID NO: 1961 - DNA, 24 bp, Homo sapiens
atcattgagctaactccgccttct

SEQ ID NO: 1962 - DNA, 20 bp, Homo sapiens
tccctctttccacaaaggtt

SEQ ID NO: 1963 - DNA, 23 bp, Homo sapiens
accttccgcaagctgctgggcct

SEQ ID NO: 1964 - DNA, 21 bp, Homo sapiens
gatgagttggagaaaaaatgg

SEQ ID NO: 1965 - DNA, 24 bp, Homo sapiens
cctccatccgtgtccagaagtcac

SEQ ID NO: 1966 - DNA, 20 bp, Homo sapiens
gggtgagaggtgggcaattg

SEQ ID NO: 1967 - DNA, 16 bp, Homo sapiens
ggccgcagtacctgct

SEQ ID NO: 1968 - DNA, 24 bp, Homo sapiens
ccacaagaccagaaaatccaaggc

SEQ ID NO: 1969 - DNA, 16 bp, Homo sapiens
ggacaccatgcaaggc

SEQ ID NO: 1970 - DNA, 24 bp, Homo sapiens
ctccacctcaggttttatctagtc

SEQ ID NO: 1971 - DNA, 19 bp, Homo sapiens
ccaggtggaagatgtggtt

SEQ ID NO: 1972 - DNA, 24 bp, Homo sapiens
tttcctgtttatgcccaaatatgg

SEQ ID NO: 1973 - DNA, 21 bp, Homo sapiens
ttctctctctcctctccctgc

SEQ ID NO: 1974 - DNA, 20 bp, Homo sapiens
gataagccgaagggagcggc

SEQ ID NO: 1975 - DNA, 20 bp, Homo sapiens
agggtgttcttttggactgg

SEQ ID NO: 1976 - DNA, 18 bp, Homo sapiens
ctgccgcaggttcccaac

SEQ ID NO: 1977 - DNA, 18 bp, Homo sapiens
gtcctgggacatcaaagc

SEQ ID NO: 1978 - DNA, 24 bp, Homo sapiens
tcatgcaaattaagtttaacctgc

SEQ ID NO: 1979 - DNA, 16 bp, Homo sapiens
ggacattgcgcgtgcc

SEQ ID NO: 1980 - DNA, 23 bp, Homo sapiens
caccccctcctgtctcccagccc

SEQ ID NO: 1981 - DNA, 19 bp, Homo sapiens
atgagatccaggccattgc

SEQ ID NO: 1982 - DNA, 24 bp, Homo sapiens
caaaacgccagcttaatcctgggc

SEQ ID NO: 1983 - DNA, 16 bp, Homo sapiens
cgaggccgtgctggcc

SEQ ID NO: 1984 - DNA, 24 bp, Homo sapiens
cctcagcctgcaaccggcgggcac

SEQ ID NO: 1985 - DNA, 21 bp, Homo sapiens
tacagtcaaatgcgtgttgtc

SEQ ID NO: 1986 - DNA, 24 bp, Homo sapiens
caagtccacgttggggagcctggc

SEQ ID NO: 1987 - DNA, 18 bp, Homo sapiens
tccacaagtgctgctcag

SEQ ID NO: 1988 - DNA, 18 bp, Homo sapiens
tgagtctgtgggcagcca

SEQ ID NO: 1989 - DNA, 24 bp, Homo sapiens
tctggttgaaagggggcagcagct

SEQ ID NO: 1990 - DNA, 21 bp, Homo sapiens
aggtccgggacttcctaacag

SEQ ID NO: 1991 - DNA, 19 bp, Homo sapiens
catggtgccaaggagaagt

SEQ ID NO: 1992 - DNA, 16 bp, Homo sapiens
gccgctcccagatgga

SEQ ID NO: 1993 - DNA, 19 bp, Homo sapiens
ctggctgatgcactgaaca

SEQ ID NO: 1994 - DNA, 24 bp, Homo sapiens
gattagggcagccgaggaatctgc

SEQ ID NO: 1995 - DNA, 17 bp, Homo sapiens
ggtggagactgggctca

SEQ ID NO: 1996 - DNA, 17 bp, Homo sapiens
gaggttcccttggggcc

SEQ ID NO: 1997 - DNA, 19 bp, Homo sapiens
gtctgacatcttcctccat

SEQ ID NO: 1998 - DNA, 20 bp, Homo sapiens
ggttacaaatgcttcctagg

SEQ ID NO: 1999 - DNA, 21 bp, Homo sapiens
gggcactggattgaatctgtg

SEQ ID NO: 2000 - DNA, 21 bp, Homo sapiens
gcaagtgcaagatagtttttt

SEQ ID NO: 2001 - DNA, 24 bp, Homo sapiens
tgtggatgttcagtaaaagagaaa

SEQ ID NO: 2002 - DNA, 16 bp, Homo sapiens
tgagcagctgcggggc

SEQ ID NO: 2003 - DNA, 23 bp, Homo sapiens
acctaaaatctctggactttagt

SEQ ID NO: 2004 - DNA, 16 bp, Homo sapiens
ctgcaggggtgtcctt

SEQ ID NO: 2005 - DNA, 24 bp, Homo sapiens
tctatcctgtctgcctcctcctac

SEQ ID NO: 2006 - DNA, 17 bp, Homo sapiens
gcaccccaatatcatgc

SEQ ID NO: 2007 - DNA, 18 bp, Homo sapiens
ggagctgggcattgaagc

SEQ ID NO: 2008 - DNA, 17 bp, Homo sapiens
tagcctctttaacaccg

SEQ ID NO: 2009 - DNA, 18 bp, Homo sapiens
caccggccctgggaagga

SEQ ID NO: 2010 - DNA, 18 bp, Homo sapiens
gagatgtctggctgttgg

SEQ ID NO: 2011 - DNA, 16 bp, Homo sapiens
gacatagctcaccagg

SEQ ID NO: 2012 - DNA, 20 bp, Homo sapiens
gaaaccagtttctggtcctt

SEQ ID NO: 2013 - DNA, 23 bp, Homo sapiens
ctcacagtgagcagtacaagggt

SEQ ID NO: 2014 - DNA, 16 bp, Homo sapiens
ccccaagcttgtggcc

SEQ ID NO: 2015 - DNA, 22 bp, Homo sapiens
cagatctgccctaataggaagc

SEQ ID NO: 2016 - DNA, 19 bp, Homo sapiens
agccggagagaggcagaga

SEQ ID NO: 2017 - DNA, 23 bp, Homo sapiens
ctccaggaagtgggactccatgc

SEQ ID NO: 2018 - DNA, 24 bp, Homo sapiens
ctacgagcagtcagcccaggctgc

SEQ ID NO: 2019 - DNA, 16 bp, Homo sapiens
agacatctccagcctc

SEQ ID NO: 2020 - DNA, 17 bp, Homo sapiens
attcctcatgcttctcg

SEQ ID NO: 2021 - DNA, 24 bp, Homo sapiens
ctcctcccgcctgccgcaccagcc

SEQ ID NO: 2022 - DNA, 16 bp, Homo sapiens
cgggcatgggcactgc

SEQ ID NO: 2023 - DNA, 17 bp, Homo sapiens
gtcggagacctgctgag

SEQ ID NO: 2024 - DNA, 24 bp, Homo sapiens
gagggagcagtttgaaaaaataag

SEQ ID NO: 2025 - DNA, 16 bp, Homo sapiens
cggaaggctcctgtgg

SEQ ID NO: 2026 - DNA, 24 bp, Homo sapiens
agagacctggagagtcttgacaga

SEQ ID NO: 2027 - DNA, 24 bp, Homo sapiens
gagggggtggcatgcccaccacgg

SEQ ID NO: 2028 - DNA, 17 bp, Homo sapiens
tctccagggcctgcagc

SEQ ID NO: 2029 - DNA, 20 bp, Homo sapiens
ctcctcacctgaaggatcag

SEQ ID NO: 2030 - DNA, 16 bp, Homo sapiens
aggcaaaactccctcc

SEQ ID NO: 2031 - DNA, 24 bp, Homo sapiens
tagtaaggagaccattgaagcttc

SEQ ID NO: 2032 - DNA, 22 bp, Homo sapiens
ttgcccaaggtctctgtttgtt

SEQ ID NO: 2033 - DNA, 22 bp, Homo sapiens
tctcctcctccaggggcagatc

SEQ ID NO: 2034 - DNA, 16 bp, Homo sapiens
agtgccatcctctccc

SEQ ID NO: 2035 - DNA, 24 bp, Homo sapiens
tgtaatggttgaaagagagagcac

SEQ ID NO: 2036 - DNA, 21 bp, Homo sapiens
cagatccgagcagttctcagc

SEQ ID NO: 2037 - DNA, 21 bp, Homo sapiens
atgtaaggaaggaccagcatg

SEQ ID NO: 2038 - DNA, 16 bp, Homo sapiens
gcctgggctggaggac

SEQ ID NO: 2039 - DNA, 23 bp, Homo sapiens
cttggcagggaaagggaattacc

SEQ ID NO: 2040 - DNA, 16 bp, Homo sapiens
gcaggccctgcgcttt

SEQ ID NO: 2041 - DNA, 24 bp, Homo sapiens
tgctctgtgactgcggggctgctg

SEQ ID NO: 2042 - DNA, 16 bp, Homo sapiens
tcgctacccggtgtgc

SEQ ID NO: 2043 - DNA, 24 bp, Homo sapiens
gcatctaggatccgggaggccagg

SEQ ID NO: 2044 - DNA, 16 bp, Homo sapiens
tctgccgccctggctt

SEQ ID NO: 2045 - DNA, 20 bp, Homo sapiens
attgcggagtctaccaaagc

SEQ ID NO: 2046 - DNA, 22 bp, Homo sapiens
cctagcctgtgactgtgatttc

SEQ ID NO: 2047 - DNA, 18 bp, Homo sapiens
gaagcaagggtggcaggc

SEQ ID NO: 2048 - DNA, 16 bp, Homo sapiens
tgacagctgcttctgt

SEQ ID NO: 2049 - DNA, 16 bp, Homo sapiens
cggggcccggtcaagc

SEQ ID NO: 2050 - DNA, 23 bp, Homo sapiens
cgacttctgttattctaagtcat

SEQ ID NO: 2051 - DNA, 16 bp, Homo sapiens
ccgggccctctgttcc

SEQ ID NO: 2052 - DNA, 17 bp, Homo sapiens
accggacctatggagac

SEQ ID NO: 2053 - DNA, 19 bp, Homo sapiens
ggcccacaccacatgcatc

SEQ ID NO: 2054 - DNA, 16 bp, Homo sapiens
ggaaggctttggtggc

SEQ ID NO: 2055 - DNA, 20 bp, Homo sapiens
ccaccatgtgcccacccgcg

SEQ ID NO: 2056 - DNA, 17 bp, Homo sapiens
aggctgtgaggcagggt

SEQ ID NO: 2057 - DNA, 16 bp, Homo sapiens
ctcggcatcctgtggc

SEQ ID NO: 2058 - DNA, 20 bp, Homo sapiens
ctggattctacctgtggacc

SEQ ID NO: 2059 - DNA, 16 bp, Homo sapiens
ctgcacatcaggccac

SEQ ID NO: 2060 - DNA, 18 bp, Homo sapiens
tcatctctgagtgggagc

SEQ ID NO: 2061 - DNA, 24 bp, Homo sapiens
ggagggacatctggtgacttcccc

SEQ ID NO: 2062 - DNA, 16 bp, Homo sapiens
gctgtgaaccgtgtgc

SEQ ID NO: 2063 - DNA, 18 bp, Homo sapiens
gaggcctagaagggcagc

SEQ ID NO: 2064 - DNA, 17 bp, Homo sapiens
gtgggtcccaaatgtga

SEQ ID NO: 2065 - DNA, 16 bp, Homo sapiens
cactgagggggccccc

SEQ ID NO: 2066 - DNA, 16 bp, Homo sapiens
cccggagggacatgcc

SEQ ID NO: 2067 - DNA, 16 bp, Homo sapiens
ggagttgtgcgggtcg

SEQ ID NO: 2068 - DNA, 22 bp, Homo sapiens
agtttttcatggagcgtctgcc

SEQ ID NO: 2069 - DNA, 23 bp, Homo sapiens
cagtggtagggagcacactggtc

SEQ ID NO: 2070 - DNA, 22 bp, Homo sapiens
ctgcccagttcttttcccaggc

SEQ ID NO: 2071 - DNA, 19 bp, Homo sapiens
cccactctcctcgtcacac

SEQ ID NO: 2072 - DNA, 24 bp, Homo sapiens
tggaactggtgggacagcgcaggg

SEQ ID NO: 2073 - DNA, 16 bp, Homo sapiens
gactcctggcaaaggc

SEQ ID NO: 2074 - DNA, 18 bp, Homo sapiens
gctgtgacctatgcaagc

SEQ ID NO: 2075 - DNA, 24 bp, Homo sapiens
gatttcctctgaagagagcacagt

SEQ ID NO: 2076 - DNA, 16 bp, Homo sapiens
ggggctccctgtgacc

SEQ ID NO: 2077 - DNA, 19 bp, Homo sapiens
gtcatgctgggccaagccc

SEQ ID NO: 2078 - DNA, 18 bp, Homo sapiens
tcctactgcggtggctgc

SEQ ID NO: 2079 - DNA, 24 bp, Homo sapiens
gtaggtgagtccagtgaagcccgg

SEQ ID NO: 2080 - DNA, 24 bp, Homo sapiens
gtggaacaaggatttgaaccaggc

SEQ ID NO: 2081 - DNA, 18 bp, Homo sapiens
acacacactgcccggtca

SEQ ID NO: 2082 - DNA, 22 bp, Homo sapiens
aggcacagagggattaagtaac

SEQ ID NO: 2083 - DNA, 17 bp, Homo sapiens
gcccgggagcttccatt

SEQ ID NO: 2084 - DNA, 19 bp, Homo sapiens
cagccaagttttcatgctc

SEQ ID NO: 2085 - DNA, 16 bp, Homo sapiens
ggaccacaccgaaggc

SEQ ID NO: 2086 - DNA, 24 bp, Homo sapiens
tactctattgtacccagaggagat

SEQ ID NO: 2087 - DNA, 16 bp, Homo sapiens
accccgctgtgtttgc

SEQ ID NO: 2088 - DNA, 24 bp, Homo sapiens
gcctctactcacagatgcaggtct

SEQ ID NO: 2089 - DNA, 18 bp, Homo sapiens
ccctgggactctcttttt

SEQ ID NO: 2090 - DNA, 21 bp, Homo sapiens
cagctgacaccgctcacagtt

SEQ ID NO: 2091 - DNA, 23 bp, Homo sapiens
ttacagatgccagtgagcttttg

SEQ ID NO: 2092 - DNA, 18 bp, Homo sapiens
catatgccccctggctgg

SEQ ID NO: 2093 - DNA, 19 bp, Homo sapiens
tcccttgccctcagtttcc

SEQ ID NO: 2094 - DNA, 21 bp, Homo sapiens
ccattgcagtcgcaccctgga

SEQ ID NO: 2095 - DNA, 16 bp, Homo sapiens
ggacgcccatgaatgc

SEQ ID NO: 2096 - DNA, 24 bp, Homo sapiens
gaattgtaatggtgcaattcagtt

SEQ ID NO: 2097 - DNA, 19 bp, Homo sapiens
ccaaattgtgagcgctgtg

SEQ ID NO: 2098 - DNA, 16 bp, Homo sapiens
gagatcatcaaggcct

SEQ ID NO: 2099 - DNA, 16 bp, Homo sapiens
atggctgacggtcccc

SEQ ID NO: 2100 - DNA, 20 bp, Homo sapiens
tgatccaaagctcctacttt

SEQ ID NO: 2101 - DNA, 16 bp, Homo sapiens
gtcagagggcagtggg

SEQ ID NO: 2102 - DNA, 24 bp, Homo sapiens
agggccggttgttgtagaagggtg

SEQ ID NO: 2103 - DNA, 20 bp, Homo sapiens
attcagaggaagcttcctgg

SEQ ID NO: 2104 - DNA, 19 bp, Homo sapiens
gacacagacatcgtggacc

SEQ ID NO: 2105 - DNA, 22 bp, Homo sapiens
aaccacttcgattttttgttgt

SEQ ID NO: 2106 - DNA, 17 bp, Homo sapiens
tctgtcacggccatgct

SEQ ID NO: 2107 - DNA, 22 bp, Homo sapiens
cccttcctgctttacaggagcc

SEQ ID NO: 2108 - DNA, 16 bp, Homo sapiens
accaccctcccagcgc

SEQ ID NO: 2109 - DNA, 18 bp, Homo sapiens
cttcccaccctaggctgt

SEQ ID NO: 2110 - DNA, 18 bp, Homo sapiens
aggtgggggagatcacaa

SEQ ID NO: 2111 - DNA, 20 bp, Homo sapiens
ttgggtgcgcagcgatcagc

SEQ ID NO: 2112 - DNA, 24 bp, Homo sapiens
ctctaacttcctttctttattttc

SEQ ID NO: 2113 - DNA, 21 bp, Homo sapiens
ctgggacacagcatagtaggc

SEQ ID NO: 2114 - DNA, 21 bp, Homo sapiens
gttgaggtctggagaggatgg

SEQ ID NO: 2115 - DNA, 24 bp, Homo sapiens
ggccagcctggtgaaattgactct

SEQ ID NO: 2116 - DNA, 22 bp, Homo sapiens
cacagacaatatccctatgggg

SEQ ID NO: 2117 - DNA, 22 bp, Homo sapiens
tctgtaggtccaacttaacctt

SEQ ID NO: 2118 - DNA, 22 bp, Homo sapiens
aacatgaaagaccaggaaattt

SEQ ID NO: 2119 - DNA, 19 bp, Homo sapiens
cttctgaactcggggcaca

SEQ ID NO: 2120 - DNA, 21 bp, Homo sapiens
ttccatggacaagagaagtaa

SEQ ID NO: 2121 - DNA, 19 bp, Homo sapiens
aggttccaggtaacaagga

SEQ ID NO: 2122 - DNA, 24 bp, Homo sapiens
gttgctggaatcccagacactaaa

SEQ ID NO: 2123 - DNA, 22 bp, Homo sapiens
gcctaaatggggggaaggtagg

SEQ ID NO: 2124 - DNA, 24 bp, Homo sapiens
ttactggtgggaattcaggaaagt

SEQ ID NO: 2125 - DNA, 16 bp, Homo sapiens
cggcctcagagctggc

SEQ ID NO: 2126 - DNA, 24 bp, Homo sapiens
tcccttctcaggagtccgtgtggc

SEQ ID NO: 2127 - DNA, 19 bp, Homo sapiens
gagtgtaccagtacctggc

SEQ ID NO: 2128 - DNA, 24 bp, Homo sapiens
cctacttttcaggattccctctac

SEQ ID NO: 2129 - DNA, 17 bp, Homo sapiens
ccacaggggcccatgcc

SEQ ID NO: 2130 - DNA, 17 bp, Homo sapiens
gactggcaccgaacatc

SEQ ID NO: 2131 - DNA, 18 bp, Homo sapiens
ttgtgtctccacggggca

SEQ ID NO: 2132 - DNA, 16 bp, Homo sapiens
aggtgcagtcggcagc

SEQ ID NO: 2133 - DNA, 18 bp, Homo sapiens
gagcccacttgctcccac

SEQ ID NO: 2134 - DNA, 17 bp, Homo sapiens
ctcaatcagcatgccgg

SEQ ID NO: 2135 - DNA, 20 bp, Homo sapiens
agaagtcatgatggagttcc

SEQ ID NO: 2136 - DNA, 24 bp, Homo sapiens
ctcttctgtcaccatgatataggc

SEQ ID NO: 2137 - DNA, 24 bp, Homo sapiens
ttttttgtccttccagatgtgaac

SEQ ID NO: 2138 - DNA, 23 bp, Homo sapiens
ggacactgtgctcctccatggct

SEQ ID NO: 2139 - DNA, 16 bp, Homo sapiens
ggcttccttcagggct

SEQ ID NO: 2140 - DNA, 16 bp, Homo sapiens
cccaggaggcacacct

SEQ ID NO: 2141 - DNA, 20 bp, Homo sapiens
aagagggagtttggaaaatc

SEQ ID NO: 2142 - DNA, 20 bp, Homo sapiens
gtccagctgcagagagacag

SEQ ID NO: 2143 - DNA, 23 bp, Homo sapiens
ccaacagaccccaaatatgaggc

SEQ ID NO: 2144 - DNA, 19 bp, Homo sapiens
accgagtagagaatgtggc

SEQ ID NO: 2145 - DNA, 24 bp, Homo sapiens
accataagaaatgcctgggaaacc

SEQ ID NO: 2146 - DNA, 20 bp, Homo sapiens
cagtggcagatgaaatgctg

SEQ ID NO: 2147 - DNA, 23 bp, Homo sapiens
tggaggctgtacagtttgagttc

SEQ ID NO: 2148 - DNA, 20 bp, Homo sapiens
gcaagggggaattctatcag

SEQ ID NO: 2149 - DNA, 19 bp, Homo sapiens
catggggccggaggatgaa

SEQ ID NO: 2150 - DNA, 24 bp, Homo sapiens
tgtattaataaaattagtgattcc

SEQ ID NO: 2151 - DNA, 21 bp, Homo sapiens
tgaggctgcctggagtcacac

SEQ ID NO: 2152 - DNA, 24 bp, Homo sapiens
tgagacctactgcacccagtatgg

SEQ ID NO: 2153 - DNA, 24 bp, Homo sapiens
tacttttactgcactccccagtcc

SEQ ID NO: 2154 - DNA, 20 bp, Homo sapiens
acctgcttgttgggaggacc

SEQ ID NO: 2155 - DNA, 24 bp, Homo sapiens
aagtattcagtggacaaatggcag

SEQ ID NO: 2156 - DNA, 17 bp, Homo sapiens
ctgcatgcccaacaagc

SEQ ID NO: 2157 - DNA, 24 bp, Homo sapiens
gaagtagggcctacctcgccatac

SEQ ID NO: 2158 - DNA, 20 bp, Homo sapiens
aggtccctttttttctggac

SEQ ID NO: 2159 - DNA, 22 bp, Homo sapiens
gtagatgaagctcggagaaacc

SEQ ID NO: 2160 - DNA, 23 bp, Homo sapiens
gtgagggaaaggatataatcttg

SEQ ID NO: 2161 - DNA, 17 bp, Homo sapiens
cacgggagcaggcttgt

SEQ ID NO: 2162 - DNA, 24 bp, Homo sapiens
tcaactttcaaaatataacagtat

SEQ ID NO: 2163 - DNA, 23 bp, Homo sapiens
atgagaccattcttcctcttgtg

SEQ ID NO: 2164 - DNA, 20 bp, Homo sapiens
ccccagtagacaagtattcc

SEQ ID NO: 2165 - DNA, 21 bp, Homo sapiens
ctttgctgtgtcctaggaaag

SEQ ID NO: 2166 - DNA, 23 bp, Homo sapiens
cactttggtaaactctccttctc

SEQ ID NO: 2167 - DNA, 21 bp, Homo sapiens
gaaacagaaaagaaaaagggc

SEQ ID NO: 2168 - DNA, 19 bp, Homo sapiens
tgggaaggggtacttacca

SEQ ID NO: 2169 - DNA, 21 bp, Homo sapiens
gctccaagtgtcctagatcag

SEQ ID NO: 2170 - DNA, 18 bp, Homo sapiens
gcaccacattcacagaca

SEQ ID NO: 2171 - DNA, 23 bp, Homo sapiens
tcatttctttaaagaattatagg

SEQ ID NO: 2172 - DNA, 16 bp, Homo sapiens
gtggatgaagaggacc

SEQ ID NO: 2173 - DNA, 21 bp, Homo sapiens
gagtgataacccaggaggaaa

SEQ ID NO: 2174 - DNA, 24 bp, Homo sapiens
taactataaattgatagcaaatac

SEQ ID NO: 2175 - DNA, 19 bp, Homo sapiens
ccatcctttacaggtgggt

SEQ ID NO: 2176 - DNA, 22 bp, Homo sapiens
tgttgagaataaaaaagccttt

SEQ ID NO: 2177 - DNA, 22 bp, Homo sapiens
aatccttgatggcgttcatcag

SEQ ID NO: 2178 - DNA, 18 bp, Homo sapiens
catgggccacaacagtgg

SEQ ID NO: 2179 - DNA, 23 bp, Homo sapiens
accggttgttactacctcactgg

SEQ ID NO: 2180 - DNA, 17 bp, Homo sapiens
gccagctcatggacatt

SEQ ID NO: 2181 - DNA, 24 bp, Homo sapiens
ggtgaagtacaggcagctctgtac

SEQ ID NO: 2182 - DNA, 18 bp, Homo sapiens
cccgagtcaaaaccaaac

SEQ ID NO: 2183 - DNA, 24 bp, Homo sapiens
gtatgaggaaaccaactcaccagt

SEQ ID NO: 2184 - DNA, 23 bp, Homo sapiens
caaaattccccggtctgggacac

SEQ ID NO: 2185 - DNA, 21 bp, Homo sapiens
tccatcaagactttcttgtct

SEQ ID NO: 2186 - DNA, 24 bp, Homo sapiens
caagcccatattctttatatgtga

SEQ ID NO: 2187 - DNA, 21 bp, Homo sapiens
cctgggagtaggttaggctgg

SEQ ID NO: 2188 - DNA, 23 bp, Homo sapiens
tgtcaggagacagtcattccctt

SEQ ID NO: 2189 - DNA, 21 bp, Homo sapiens
cggttgctgcggatactcaca

SEQ ID NO: 2190 - DNA, 19 bp, Homo sapiens
agctgctaaattctgtagg

SEQ ID NO: 2191 - DNA, 18 bp, Homo sapiens
gaatgtttacccaccggg

SEQ ID NO: 2192 - DNA, 22 bp, Homo sapiens
tggtccccacacttagtgaaac

SEQ ID NO: 2193 - DNA, 24 bp, Homo sapiens
caaagagccatatatcagagaaag

SEQ ID NO: 2194 - DNA, 22 bp, Homo sapiens
ttttctcagaaggaaaacaagt

SEQ ID NO: 2195 - DNA, 23 bp, Homo sapiens
gctgggcttgatcttgttggcca

SEQ ID NO: 2196 - DNA, 23 bp, Homo sapiens
caaacataccatatggttttccc

SEQ ID NO: 2197 - DNA, 21 bp, Homo sapiens
atcgcggagcaaaagcacaga

SEQ ID NO: 2198 - DNA, 22 bp, Homo sapiens
gaagaggtaccaagggaggtct

SEQ ID NO: 2199 - DNA, 23 bp, Homo sapiens
cccctttctttctctgggttttg

SEQ ID NO: 2200 - DNA, 20 bp, Homo sapiens
tcagggacagaaaaatggcc

SEQ ID NO: 2201 - DNA, 24 bp, Homo sapiens
tctaatttactatcaaatagcagg

SEQ ID NO: 2202 - DNA, 21 bp, Homo sapiens
gaaccacagctcgctgtagaa

SEQ ID NO: 2203 - DNA, 18 bp, Homo sapiens
acacaagtgcaaacaagc

SEQ ID NO: 2204 - DNA, 24 bp, Homo sapiens
caggagttgttaggaccaagcctg

SEQ ID NO: 2205 - DNA, 20 bp, Homo sapiens
gatacctctactggacttgg

SEQ ID NO: 2206 - DNA, 23 bp, Homo sapiens
aaaaaaaaaaactctgacaacac

SEQ ID NO: 2207 - DNA, 18 bp, Homo sapiens
ggtcatctgcacgactga

SEQ ID NO: 2208 - DNA, 22 bp, Homo sapiens
aggactccaagtatgtataaac

SEQ ID NO: 2209 - DNA, 20 bp, Homo sapiens
aggtgttgaatgaacaagtc

SEQ ID NO: 2210 - DNA, 21 bp, Homo sapiens
tgctacgccaagtataatatg

SEQ ID NO: 2211 - DNA, 24 bp, Homo sapiens
gctttggaatcctatttttcatgc

SEQ ID NO: 2212 - DNA, 19 bp, Homo sapiens
gcgtcttaacacttccttc

SEQ ID NO: 2213 - DNA, 23 bp, Homo sapiens
gctttttttcttaaacattttaa

SEQ ID NO: 2214 - DNA, 23 bp, Homo sapiens
ttatcctgagcagtaactttttc

SEQ ID NO: 2215 - DNA, 20 bp, Homo sapiens
taaccgacggagggcgacgc

SEQ ID NO: 2216 - DNA, 24 bp, Homo sapiens
gcatctgctggtcagctttcagat

SEQ ID NO: 2217 - DNA, 24 bp, Homo sapiens
ctgtggtgtgtgtgaactggagtg

SEQ ID NO: 2218 - DNA, 24 bp, Homo sapiens
cttccacactgagaaacaggagtc

SEQ ID NO: 2219 - DNA, 17 bp, Homo sapiens
ttctccccacagtgcct

SEQ ID NO: 2220 - DNA, 19 bp, Homo sapiens
tgtccaagccgctgtacac

SEQ ID NO: 2221 - DNA, 22 bp, Homo sapiens
tttttttttaaagtgcacacct

SEQ ID NO: 2222 - DNA, 23 bp, Homo sapiens
tggccgttcaggaggaaggtgtc

SEQ ID NO: 2223 - DNA, 24 bp, Homo sapiens
gcaatgttggttttcttttttttt

SEQ ID NO: 2224 - DNA, 21 bp, Homo sapiens
ccgaaaatggggctcggtact

SEQ ID NO: 2225 - DNA, 19 bp, Homo sapiens
tggatcagtttcaccaccc

SEQ ID NO: 2226 - DNA, 23 bp, Homo sapiens
atcaatgcttcagtaacattcag

SEQ ID NO: 2227 - DNA, 19 bp, Homo sapiens
ccctacaccacatacaagc

SEQ ID NO: 2228 - DNA, 24 bp, Homo sapiens
ctccgagtttcagggcaagcttct

SEQ ID NO: 2229 - DNA, 23 bp, Homo sapiens
ccaaatagaaacaaagtacacgg

SEQ ID NO: 2230 - DNA, 24 bp, Homo sapiens
cacttatactcacattctttttgg

SEQ ID NO: 2231 - DNA, 24 bp, Homo sapiens
ctatgaactccaattccacgtggc

SEQ ID NO: 2232 - DNA, 20 bp, Homo sapiens
cacctcgttgtgtgccacca

SEQ ID NO: 2233 - DNA, 23 bp, Homo sapiens
aaagagagagttaaactaattcc

SEQ ID NO: 2234 - DNA, 21 bp, Homo sapiens
aggctggctttctgccccagc

SEQ ID NO: 2235 - DNA, 19 bp, Homo sapiens
gcctgtagctctgtgaaaa

SEQ ID NO: 2236 - DNA, 20 bp, Homo sapiens
ctgagtcaggagggcaagcc

SEQ ID NO: 2237 - DNA, 20 bp, Homo sapiens
cccccatgttccccaatggt

SEQ ID NO: 2238 - DNA, 20 bp, Homo sapiens
aagtcctccctggggagtgc

SEQ ID NO: 2239 - DNA, 20 bp, Homo sapiens
actgtcctctccacaaatcg

SEQ ID NO: 2240 - DNA, 24 bp, Homo sapiens
ggctataccatgagttcatatgtc

SEQ ID NO: 2241 - DNA, 19 bp, Homo sapiens
actgttgcagcaaaggacc

SEQ ID NO: 2242 - DNA, 19 bp, Homo sapiens
cattacctgtgaatgacac

SEQ ID NO: 2243 - DNA, 21 bp, Homo sapiens
tctccatggccttcaagcctt

SEQ ID NO: 2244 - DNA, 17 bp, Homo sapiens
tccttgaggccagcgtc

SEQ ID NO: 2245 - DNA, 21 bp, Homo sapiens
tgcctttatctagccttcctt

SEQ ID NO: 2246 - DNA, 20 bp, Homo sapiens
gttctcagttcagctgtcgg

SEQ ID NO: 2247 - DNA, 17 bp, Homo sapiens
catttgtaggaggtggg

SEQ ID NO: 2248 - DNA, 24 bp, Homo sapiens
tccaatagagtagttagtgaaggc

SEQ ID NO: 2249 - DNA, 21 bp, Homo sapiens
ttttgaggataaatgtcatgc

SEQ ID NO: 2250 - DNA, 22 bp, Homo sapiens
ttctccagcagcgcccatgggg

SEQ ID NO: 2251 - DNA, 24 bp, Homo sapiens
ctactaagttcaccgtagagcaac

SEQ ID NO: 2252 - DNA, 16 bp, Homo sapiens
tcaacatcagtgcccc

SEQ ID NO: 2253 - DNA, 28 bp, Homo sapiens
caaaaacataaaaacaaaggtttcatag

SEQ ID NO: 2254 - DNA, 22 bp, Homo sapiens
agccccaccagaaggtctcaga

SEQ ID NO: 2255 - DNA, 24 bp, Homo sapiens
tttagctctgctgctcaccactgt

SEQ ID NO: 2256 - DNA, 23 bp, Homo sapiens
tggaggtctgggcagtgaattct

SEQ ID NO: 2257 - DNA, 20 bp, Homo sapiens
tgacgatcccgttgggcttc

SEQ ID NO: 2258 - DNA, 19 bp, Homo sapiens
tttcccagccttagggtat

SEQ ID NO: 2259 - DNA, 22 bp, Homo sapiens
agatcacatggaacgtgggggc

SEQ ID NO: 2260 - DNA, 19 bp, Homo sapiens
tcctgttgtgtttagttgc

SEQ ID NO: 2261 - DNA, 22 bp, Homo sapiens
atgtccagctactgggggcttt

SEQ ID NO: 2262 - DNA, 21 bp, Homo sapiens
tcacagagtatgagtatcagg

SEQ ID NO: 2263 - DNA, 25 bp, Homo sapiens
atttaccacttaaaaatttttaagg

SEQ ID NO: 2264 - DNA, 21 bp, Homo sapiens
gtcctaatctataacggaagc

SEQ ID NO: 2265 - DNA, 22 bp, Homo sapiens
gccttttcaaattgtgcaccat

SEQ ID NO: 2266 - DNA, 22 bp, Homo sapiens
tggaaaagttttgtattacgaa

SEQ ID NO: 2267 - DNA, 24 bp, Homo sapiens
ttgtttataatacacatttcttac

SEQ ID NO: 2268 - DNA, 18 bp, Homo sapiens
ggattccagccaactgtt

SEQ ID NO: 2269 - DNA, 23 bp, Homo sapiens
tctataaaagatgttgagcttcc

SEQ ID NO: 2270 - DNA, 19 bp, Homo sapiens
ccctgagattgcacctttg

SEQ ID NO: 2271 - DNA, 23 bp, Homo sapiens
gctgagttgctatttgtcttctg

SEQ ID NO: 2272 - DNA, 21 bp, Homo sapiens
gaaatacgaattcaagcgtgc

SEQ ID NO: 2273 - DNA, 22 bp, Homo sapiens
cctgtccacaaaagagaaacag

SEQ ID NO: 2274 - DNA, 23 bp, Homo sapiens
tcccatgaaaatctattttgctg

SEQ ID NO: 2275 - DNA, 24 bp, Homo sapiens
ctccagatgtggagggggttgcat

SEQ ID NO: 2276 - DNA, 21 bp, Homo sapiens
gctgtgaataagaatacatgt

SEQ ID NO: 2277 - DNA, 17 bp, Homo sapiens
tgcacatcccagggtgg

SEQ ID NO: 2278 - DNA, 18 bp, Homo sapiens
ctgaagccatttcacagg

SEQ ID NO: 2279 - DNA, 22 bp, Homo sapiens
ctatgcacgtttaggtggatgg

SEQ ID NO: 2280 - DNA, 24 bp, Homo sapiens
actaaaatcatacacataaacaca

SEQ ID NO: 2281 - DNA, 16 bp, Homo sapiens
tgaccaagggctcagg

SEQ ID NO: 2282 - DNA, 23 bp, Homo sapiens
gaacaaatggtgatatcatcaat

SEQ ID NO: 2283 - DNA, 23 bp, Homo sapiens
gaaaaccgagacatggctaccta

SEQ ID NO: 2284 - DNA, 16 bp, Homo sapiens
aattgcaggccagggg

SEQ ID NO: 2285 - DNA, 24 bp, Homo sapiens
ctgcataccaaaagaattatgagt

SEQ ID NO: 2286 - DNA, 21 bp, Homo sapiens
ggggtattttgagtcctcttg

SEQ ID NO: 2287 - DNA, 24 bp, Homo sapiens
agttcacggatgaagagggtataa

SEQ ID NO: 2288 - DNA, 22 bp, Homo sapiens
gattttactctcaccccaggtg

SEQ ID NO: 2289 - DNA, 24 bp, Homo sapiens
cagttcactaagatctcctgagga

SEQ ID NO: 2290 - DNA, 21 bp, Homo sapiens
ttatgaacttaggagggatgg

SEQ ID NO: 2291 - DNA, 19 bp, Homo sapiens
gggctggttcgatctttga

SEQ ID NO: 2292 - DNA, 23 bp, Homo sapiens
gctcagaatcaatagaaatcacc

SEQ ID NO: 2293 - DNA, 23 bp, Homo sapiens
ctggcagttactgtgtagctata

SEQ ID NO: 2294 - DNA, 16 bp, Homo sapiens
acaatggaggccctgc

SEQ ID NO: 2295 - DNA, 24 bp, Homo sapiens
tttccaagcctgtatatacaatgg

SEQ ID NO: 2296 - DNA, 18 bp, Homo sapiens
ttctcccttgtagcctgc

SEQ ID NO: 2297 - DNA, 22 bp, Homo sapiens
atttgggtttcttggaggtttc

SEQ ID NO: 2298 - DNA, 16 bp, Homo sapiens
cttgctggccagggcc

SEQ ID NO: 2299 - DNA, 18 bp, Homo sapiens
gagtccatgttctctggc

SEQ ID NO: 2300 - DNA, 16 bp, Homo sapiens
ccacagtgcaaaatgg

SEQ ID NO: 2301 - DNA, 20 bp, Homo sapiens
gctgtgcaacctccattcgt

SEQ ID NO: 2302 - DNA, 18 bp, Homo sapiens
gtcagccctccagatctt

SEQ ID NO: 2303 - DNA, 24 bp, Homo sapiens
ggtgggaaaccagcaggcacaggc

SEQ ID NO: 2304 - DNA, 17 bp, Homo sapiens
gaggatgctccaccagc

SEQ ID NO: 2305 - DNA, 24 bp, Homo sapiens
actaaatatttagtaatctttcca

SEQ ID NO: 2306 - DNA, 19 bp, Homo sapiens
cactgatgaagagcttctt

SEQ ID NO: 2307 - DNA, 19 bp, Homo sapiens
cactgacggcccaaagatc

SEQ ID NO: 2308 - DNA, 22 bp, Homo sapiens
cctataggcttcaaaggaatga

SEQ ID NO: 2309 - DNA, 20 bp, Homo sapiens
gttgtgatgctggtgggttt

SEQ ID NO: 2310 - DNA, 19 bp, Homo sapiens
ccaaaaactgctgatttcc

SEQ ID NO: 2311 - DNA, 20 bp, Homo sapiens
taggtggaaaaaggaagaag

SEQ ID NO: 2312 - DNA, 16 bp, Homo sapiens
ttgcaagcacctccag

SEQ ID NO: 2313 - DNA, 24 bp, Homo sapiens
caaagctaaaaggatagagcattt

SEQ ID NO: 2314 - DNA, 24 bp, Homo sapiens
acgcagtgtgaatataaaatctac

SEQ ID NO: 2315 - DNA, 24 bp, Homo sapiens
ctgttctggtgggatccaggaaat

SEQ ID NO: 2316 - DNA, 20 bp, Homo sapiens
aacactgaaaggaatacatt

SEQ ID NO: 2317 - DNA, 20 bp, Homo sapiens
atcacaggtggagagagacc

SEQ ID NO: 2318 - DNA, 17 bp, Homo sapiens
gcttggggaaatcagac

SEQ ID NO: 2319 - DNA, 23 bp, Homo sapiens
gctacaggtatgcccagctgaat

SEQ ID NO: 2320 - DNA, 18 bp, Homo sapiens
gcctgttaacccaaatgg

SEQ ID NO: 2321 - DNA, 24 bp, Homo sapiens
tggttgcaaacctgtgtcattata

SEQ ID NO: 2322 - DNA, 18 bp, Homo sapiens
cagctggctcctactgtc

SEQ ID NO: 2323 - DNA, 24 bp, Homo sapiens
aacaattttctcgtcggcctggat

SEQ ID NO: 2324 - DNA, 16 bp, Homo sapiens
ttgtgcacactcggcg

SEQ ID NO: 2325 - DNA, 23 bp, Homo sapiens
tcacttcatagcgaattattttt

SEQ ID NO: 2326 - DNA, 24 bp, Homo sapiens
tttctcttccgccgcctggatcct

SEQ ID NO: 2327 - DNA, 20 bp, Homo sapiens
cactggtggacttcacagag

SEQ ID NO: 2328 - DNA, 22 bp, Homo sapiens
ccttctgtagacatacaacatc

SEQ ID NO: 2329 - DNA, 16 bp, Homo sapiens
cagaggctgaggcgcc

SEQ ID NO: 2330 - DNA, 24 bp, Homo sapiens
ggctaagtaactacacaaagaaat

SEQ ID NO: 2331 - DNA, 24 bp, Homo sapiens
cagggtcagtgtgtagagagtgaa

SEQ ID NO: 2332 - DNA, 22 bp, Homo sapiens
atacttcttctaaattagggtc

SEQ ID NO: 2333 - DNA, 18 bp, Homo sapiens
gtactccaggaacccgtc

SEQ ID NO: 2334 - DNA, 22 bp, Homo sapiens
tttctgtgatctatgattaagt

SEQ ID NO: 2335 - DNA, 18 bp, Homo sapiens
gaaagagaatggccgggc

SEQ ID NO: 2336 - DNA, 21 bp, Homo sapiens
agggagttttcccacagtgac

SEQ ID NO: 2337 - DNA, 19 bp, Homo sapiens
ttggactctgattcaaacc

SEQ ID NO: 2338 - DNA, 21 bp, Homo sapiens
acataatttcttatgcagggt

SEQ ID NO: 2339 - DNA, 19 bp, Homo sapiens
acaacatatcgcattggtg

SEQ ID NO: 2340 - DNA, 24 bp, Homo sapiens
ataggttctgaccactgtagtagc

SEQ ID NO: 2341 - DNA, 25 bp, Homo sapiens
ttaacctgttaattttcttacaggg

SEQ ID NO: 2342 - DNA, 21 bp, Homo sapiens
ccacttggggaagattctaag

SEQ ID NO: 2343 - DNA, 22 bp, Homo sapiens
ggttcagagaatgactttccag

SEQ ID NO: 2344 - DNA, 24 bp, Homo sapiens
tcctgcatggtttgcagccacaac

SEQ ID NO: 2345 - DNA, 22 bp, Homo sapiens
atgataattcaaaactctgctg

SEQ ID NO: 2346 - DNA, 19 bp, Homo sapiens
tgggcttgatggcttgttc

SEQ ID NO: 2347 - DNA, 24 bp, Homo sapiens
tatcttatccccgtgactacattg

SEQ ID NO: 2348 - DNA, 18 bp, Homo sapiens
ctaccaggagagacccga

SEQ ID NO: 2349 - DNA, 24 bp, Homo sapiens
gccctaagtgaagaaaaatgagaa

SEQ ID NO: 2350 - DNA, 24 bp, Homo sapiens
gctcattcagttctgttgaattgg

SEQ ID NO: 2351 - DNA, 24 bp, Homo sapiens
ataatctgcatgtctgttactttt

SEQ ID NO: 2352 - DNA, 20 bp, Homo sapiens
ctggaagctccacctcaaga

SEQ ID NO: 2353 - DNA, 22 bp, Homo sapiens
agggctgttaaatgtaggatcg

SEQ ID NO: 2354 - DNA, 18 bp, Homo sapiens
ggtcagagcctgtaactc

SEQ ID NO: 2355 - DNA, 24 bp, Homo sapiens
ataatgccattgggagattctggc

SEQ ID NO: 2356 - DNA, 21 bp, Homo sapiens
tcagaaggagcccttgaattt

SEQ ID NO: 2357 - DNA, 19 bp, Homo sapiens
gcccaaggagctggaaaat

SEQ ID NO: 2358 - DNA, 17 bp, Homo sapiens
cctttcagacgccctgc

SEQ ID NO: 2359 - DNA, 22 bp, Homo sapiens
cagactctccactgaacccttg

SEQ ID NO: 2360 - DNA, 22 bp, Homo sapiens
tgtttttactccatctacaaac

SEQ ID NO: 2361 - DNA, 19 bp, Homo sapiens
tcagggtgtctccttcatc

SEQ ID NO: 2362 - DNA, 19 bp, Homo sapiens
tatgacaccaggaagaaac

SEQ ID NO: 2363 - DNA, 17 bp, Homo sapiens
cttcaatgccagcaggg

SEQ ID NO: 2364 - DNA, 25 bp, Homo sapiens
aaacaaacaaacaaacatacaaaac

SEQ ID NO: 2365 - DNA, 22 bp, Homo sapiens
cagcttgcatagagattaagtg

SEQ ID NO: 2366 - DNA, 23 bp, Homo sapiens
tctcttatggaaatataaaatgc

SEQ ID NO: 2367 - DNA, 17 bp, Homo sapiens
aaacacctgaagcagcc

SEQ ID NO: 2368 - DNA, 22 bp, Homo sapiens
actaaaaataatagtaacagcc

SEQ ID NO: 2369 - DNA, 25 bp, Homo sapiens
taaagacctcaattttttttttttc

SEQ ID NO: 2370 - DNA, 22 bp, Homo sapiens
tccatttggtttttcaggtggc

SEQ ID NO: 2371 - DNA, 24 bp, Homo sapiens
tttcatgatatcattacccttctg

SEQ ID NO: 2372 - DNA, 23 bp, Homo sapiens
aagaacaggagaattaagatcca

SEQ ID NO: 2373 - DNA, 23 bp, Homo sapiens
aaaaatttatttaaaacacatgt

SEQ ID NO: 2374 - DNA, 20 bp, Homo sapiens
ctaactccacaacttccttg

SEQ ID NO: 2375 - DNA, 22 bp, Homo sapiens
gtatgagataaggatacaagca

SEQ ID NO: 2376 - DNA, 22 bp, Homo sapiens
cactacaaataagaagtgaaac

SEQ ID NO: 2377 - DNA, 19 bp, Homo sapiens
tggccttctccgttggtca

SEQ ID NO: 2378 - DNA, 27 bp, Homo sapiens
attcctttttaatgaaattttttaatg

SEQ ID NO: 2379 - DNA, 18 bp, Homo sapiens
cccgaaattcctgtggag

SEQ ID NO: 2380 - DNA, 21 bp, Homo sapiens
actttcaccattttgacatgc

SEQ ID NO: 2381 - DNA, 20 bp, Homo sapiens
atatatatatatgtttttaa

SEQ ID NO: 2382 - DNA, 25 bp, Homo sapiens
atttatttatatatatatgtgtgtc

SEQ ID NO: 2383 - DNA, 22 bp, Homo sapiens
agtaagacattgtactccacag

SEQ ID NO: 2384 - DNA, 18 bp, Homo sapiens
acatttgttgcccattct

SEQ ID NO: 2385 - DNA, 21 bp, Homo sapiens
tgtggtttagatttttctgtt

SEQ ID NO: 2386 - DNA, 23 bp, Homo sapiens
accagaagaaatctatcctccat

SEQ ID NO: 2387 - DNA, 23 bp, Homo sapiens
tgatttactaaattaacagttct

SEQ ID NO: 2388 - DNA, 17 bp, Homo sapiens
ggaggtggcagcagtgc

SEQ ID NO: 2389 - DNA, 22 bp, Homo sapiens
cacacacacacatacttctttt

SEQ ID NO: 2390 - DNA, 21 bp, Homo sapiens
ggccttaccacaattcttctt

SEQ ID NO: 2391 - DNA, 20 bp, Homo sapiens
aggcccaattactgtgatat

SEQ ID NO: 2392 - DNA, 23 bp, Homo sapiens
cacaaatttaggactaagcaatt

SEQ ID NO: 2393 - DNA, 23 bp, Homo sapiens
tgaacaatgtaatcatcactagc

SEQ ID NO: 2394 - DNA, 21 bp, Homo sapiens
gtgcaagaaaaactaccaagt

SEQ ID NO: 2395 - DNA, 21 bp, Homo sapiens
cactgataaaaacctggagcc

SEQ ID NO: 2396 - DNA, 24 bp, Homo sapiens
tcatcagttattgaatggccaatg

SEQ ID NO: 2397 - DNA, 25 bp, Homo sapiens
tctcaatatcaattgagtcgtaatg

SEQ ID NO: 2398 - DNA, 24 bp, Homo sapiens
gtgggacatgcatttcttatcaac

SEQ ID NO: 2399 - DNA, 24 bp, Homo sapiens
tcaattctacaacagtggaattat

SEQ ID NO: 2400 - DNA, 24 bp, Homo sapiens
ttcttttagtttacctgctattgg

SEQ ID NO: 2401 - DNA, 21 bp, Homo sapiens
aacctcattgcgttattcttg

SEQ ID NO: 2402 - DNA, 18 bp, Homo sapiens
ccacccaggaaaagcaag

SEQ ID NO: 2403 - DNA, 16 bp, Homo sapiens
tgggggggatggtgtg

SEQ ID NO: 2404 - DNA, 19 bp, Homo sapiens
tgggcttttctggcagact

SEQ ID NO: 2405 - DNA, 27 bp, Homo sapiens
tttacaccaattatgtatttttgttcc

SEQ ID NO: 2406 - DNA, 16 bp, Homo sapiens
cacccaaactcctggc

SEQ ID NO: 2407 - DNA, 17 bp, Homo sapiens
caggcagctcctgaagg

SEQ ID NO: 2408 - DNA, 24 bp, Homo sapiens
agaatgggaacctagaatgctatt

SEQ ID NO: 2409 - DNA, 21 bp, Homo sapiens
cagcttcactcttacagcttg

SEQ ID NO: 2410 - DNA, 23 bp, Homo sapiens
ttatgaaggagtttacagattcc

SEQ ID NO: 2411 - DNA, 23 bp, Homo sapiens
cctcttaaggtgcactttatttc

SEQ ID NO: 2412 - DNA, 25 bp, Homo sapiens
atggatattgtttcattaccttcag

SEQ ID NO: 2413 - DNA, 23 bp, Homo sapiens
ggctatcatatctacaactctgc

SEQ ID NO: 2414 - DNA, 21 bp, Homo sapiens
tcgcttgaagtgcacccagca

SEQ ID NO: 2415 - DNA, 19 bp, Homo sapiens
tgaggttcagaccttcttt

SEQ ID NO: 2416 - DNA, 19 bp, Homo sapiens
ggagacagcatacggtcac

SEQ ID NO: 2417 - DNA, 24 bp, Homo sapiens
gataagtgggacctgaccatatgt

SEQ ID NO: 2418 - DNA, 22 bp, Homo sapiens
aaagagtaccagatcaggcagg

SEQ ID NO: 2419 - DNA, 24 bp, Homo sapiens
atcaaacacacacccctgggatgc

SEQ ID NO: 2420 - DNA, 18 bp, Homo sapiens
gtgcagtggctctgcatc

SEQ ID NO: 2421 - DNA, 24 bp, Homo sapiens
tttcctttttttttgttttctcac

SEQ ID NO: 2422 - DNA, 20 bp, Homo sapiens
aggtagttgcagctactacc

SEQ ID NO: 2423 - DNA, 21 bp, Homo sapiens
tggatgagacctttcccaacc

SEQ ID NO: 2424 - DNA, 18 bp, Homo sapiens
tcaggatagctagtgcac

SEQ ID NO: 2425 - DNA, 18 bp, Homo sapiens
acactccagctcagatgc

SEQ ID NO: 2426 - DNA, 18 bp, Homo sapiens
ccctgctaatgatatgcc

SEQ ID NO: 2427 - DNA, 19 bp, Homo sapiens
gctctccggaactccttgg

SEQ ID NO: 2428 - DNA, 24 bp, Homo sapiens
attagcactcagttaacgtgacac

SEQ ID NO: 2429 - DNA, 23 bp, Homo sapiens
attcaaccatttcaggaatattc

SEQ ID NO: 2430 - DNA, 23 bp, Homo sapiens
ttcttcaatgaaaaaagcagtca

SEQ ID NO: 2431 - DNA, 22 bp, Homo sapiens
gaaatggaattgaacgttttcg

SEQ ID NO: 2432 - DNA, 20 bp, Homo sapiens
ccttttcccagagtttaggc

SEQ ID NO: 2433 - DNA, 20 bp, Homo sapiens
tcaaatgcagtcatttttct

SEQ ID NO: 2434 - DNA, 19 bp, Homo sapiens
cgtgcaagctttcagctga

SEQ ID NO: 2435 - DNA, 18 bp, Homo sapiens
gcatttcttccgaacact

SEQ ID NO: 2436 - DNA, 17 bp, Homo sapiens
gctcagtgatgttcccc

SEQ ID NO: 2437 - DNA, 17 bp, Homo sapiens
aactgcttgagacagca

SEQ ID NO: 2438 - DNA, 20 bp, Homo sapiens
tcttaaactggagaaaacct

SEQ ID NO: 2439 - DNA, 19 bp, Homo sapiens
ccctttatcggaacatact

SEQ ID NO: 2440 - DNA, 16 bp, Homo sapiens
aaggagtgagtccccc

SEQ ID NO: 2441 - DNA, 24 bp, Homo sapiens
tgtactcatttcaattttcttatg

SEQ ID NO: 2442 - DNA, 17 bp, Homo sapiens
acagctatgggcgagga

SEQ ID NO: 2443 - DNA, 25 bp, Homo sapiens
aaggtatctcaataccatttgattg

SEQ ID NO: 2444 - DNA, 20 bp, Homo sapiens
ttctctttccagatgtgaac

SEQ ID NO: 2445 - DNA, 16 bp, Homo sapiens
ttggtccacgtagggg

SEQ ID NO: 2446 - DNA, 23 bp, Homo sapiens
tgatattcacttttaatatgatg

SEQ ID NO: 2447 - DNA, 18 bp, Homo sapiens
tctcacagctttgctgag

SEQ ID NO: 2448 - DNA, 24 bp, Homo sapiens
gagttttatttatatacaaagcgt

SEQ ID NO: 2449 - DNA, 18 bp, Homo sapiens
gtagggcttgaggttcac

SEQ ID NO: 2450 - DNA, 22 bp, Homo sapiens
acacgtactcttacacaggtaa

SEQ ID NO: 2451 - DNA, 22 bp, Homo sapiens
aattaccttgtaactagctggc

SEQ ID NO: 2452 - DNA, 23 bp, Homo sapiens
gcatcaattgaagaaatgtgttc

SEQ ID NO: 2453 - DNA, 24 bp, Homo sapiens
aggagagttgatgtcagagtgaaa

SEQ ID NO: 2454 - DNA, 16 bp, Homo sapiens
ccagccacatttgcac

SEQ ID NO: 2455 - DNA, 23 bp, Homo sapiens
ccatgggcagacagcttgctttc

SEQ ID NO: 2456 - DNA, 18 bp, Homo sapiens
gatcctctgcccagcatc

SEQ ID NO: 2457 - DNA, 23 bp, Homo sapiens
tgtatgaatggtttcttcggcag

SEQ ID NO: 2458 - DNA, 23 bp, Homo sapiens
tgaaatttttaaatacccctctc

SEQ ID NO: 2459 - DNA, 23 bp, Homo sapiens
ttgtgagaccctcttatcacagt

SEQ ID NO: 2460 - DNA, 22 bp, Homo sapiens
atcaagtaagtggaggaaaaat

SEQ ID NO: 2461 - DNA, 18 bp, Homo sapiens
tgtggcttccatagatgc

SEQ ID NO: 2462 - DNA, 21 bp, Homo sapiens
cctagtatacaaactgccttc

SEQ ID NO: 2463 - DNA, 22 bp, Homo sapiens
acaagatttcaactggaatgat

SEQ ID NO: 2464 - DNA, 26 bp, Homo sapiens
ttcggtattaatatggatgtaatgtg

SEQ ID NO: 2465 - DNA, 20 bp, Homo sapiens
ccagaaatgctgtaatggag

SEQ ID NO: 2466 - DNA, 23 bp, Homo sapiens
agaaaaatagttatgaacaatgt

SEQ ID NO: 2467 - DNA, 24 bp, Homo sapiens
gcacatattaaaaagaatgacccg

SEQ ID NO: 2468 - DNA, 24 bp, Homo sapiens
gcttttctatcaattaccttcatc

SEQ ID NO: 2469 - DNA, 22 bp, Homo sapiens
gggcaggattatgtgaatatgt

SEQ ID NO: 2470 - DNA, 23 bp, Homo sapiens
ttcaaaggattatatccaactcc

SEQ ID NO: 2471 - DNA, 23 bp, Homo sapiens
tccctttttctatttcatattca

SEQ ID NO: 2472 - DNA, 24 bp, Homo sapiens
cagtctcacagcattttactggca

SEQ ID NO: 2473 - DNA, 16 bp, Homo sapiens
actgcctgagcctgac

SEQ ID NO: 2474 - DNA, 24 bp, Homo sapiens
cactggaagctgagcagcatatgg

SEQ ID NO: 2475 - DNA, 21 bp, Homo sapiens
ctgcacatttaaatcaccttg

SEQ ID NO: 2476 - DNA, 20 bp, Homo sapiens
tgtgttaaacaatatgttcc

SEQ ID NO: 2477 - DNA, 19 bp, Homo sapiens
cagacagattgtgagcaac

SEQ ID NO: 2478 - DNA, 24 bp, Homo sapiens
taattacttatttgttttatttct

SEQ ID NO: 2479 - DNA, 18 bp, Homo sapiens
aaaccagatttgctgtgc

SEQ ID NO: 2480 - DNA, 24 bp, Homo sapiens
atcctccatctactgaaaggtaga

SEQ ID NO: 2481 - DNA, 19 bp, Homo sapiens
gggtttctgttggcattgg

SEQ ID NO: 2482 - DNA, 22 bp, Homo sapiens
cttcttctccaccacaacactc

SEQ ID NO: 2483 - DNA, 24 bp, Homo sapiens
ctgatgtaatgattattattgtcc

SEQ ID NO: 2484 - DNA, 19 bp, Homo sapiens
ggccatcatgaagcctccc

SEQ ID NO: 2485 - DNA, 21 bp, Homo sapiens
ggatctgcaagatgattgtga

SEQ ID NO: 2486 - DNA, 19 bp, Homo sapiens
ctgccacagcaggaatcac

SEQ ID NO: 2487 - DNA, 23 bp, Homo sapiens
ggaaattttgcaactccaatatg

SEQ ID NO: 2488 - DNA, 23 bp, Homo sapiens
gggtattacgctagaattctacc

SEQ ID NO: 2489 - DNA, 22 bp, Homo sapiens
atatttagagcaggccattggc

SEQ ID NO: 2490 - DNA, 18 bp, Homo sapiens
tgttgtggtggccgaata

SEQ ID NO: 2491 - DNA, 20 bp, Homo sapiens
agttcactgacatgaaccac

SEQ ID NO: 2492 - DNA, 19 bp, Homo sapiens
gcctggacatcgctgttgt

SEQ ID NO: 2493 - DNA, 24 bp, Homo sapiens
tgagtacacctggaaataaccctc

SEQ ID NO: 2494 - DNA, 23 bp, Homo sapiens
aactgatatttctttaaaactgt

SEQ ID NO: 2495 - DNA, 20 bp, Homo sapiens
tgatttggttgtgcctcctg

SEQ ID NO: 2496 - DNA, 30 bp, Homo sapiens
ctatgccttacaagaaaataattatattac

SEQ ID NO: 2497 - DNA, 22 bp, Homo sapiens
acgggatatacttttcttcaca

SEQ ID NO: 2498 - DNA, 23 bp, Homo sapiens
ctggaaaatacatttttaaacca

SEQ ID NO: 2499 - DNA, 19 bp, Homo sapiens
aagcatcctttcttttccg

SEQ ID NO: 2500 - DNA, 17 bp, Homo sapiens
aaggcagtgaggtgtca

SEQ ID NO: 2501 - DNA, 20 bp, Homo sapiens
tacatcatggtgtgagaagc

SEQ ID NO: 2502 - DNA, 18 bp, Homo sapiens
acatggtatccatgcgct

SEQ ID NO: 2503 - DNA, 24 bp, Homo sapiens
tggttcactgattagttagaaaag

SEQ ID NO: 2504 - DNA, 16 bp, Homo sapiens
ttgggtgtctccacgg

SEQ ID NO: 2505 - DNA, 24 bp, Homo sapiens
gtgtccacagatagattcaggttt

SEQ ID NO: 2506 - DNA, 23 bp, Homo sapiens
agcatcaatgttaaatagtgtct

SEQ ID NO: 2507 - DNA, 22 bp, Homo sapiens
actaacttttgagttttagcgc

SEQ ID NO: 2508 - DNA, 29 bp, Homo sapiens
catatataattatatatatatattagtat

SEQ ID NO: 2509 - DNA, 16 bp, Homo sapiens
gccatttggcttccgt

SEQ ID NO: 2510 - DNA, 22 bp, Homo sapiens
attcttccaaaagctaacataa

SEQ ID NO: 2511 - DNA, 17 bp, Homo sapiens
acccacaattcgtggca

SEQ ID NO: 2512 - DNA, 22 bp, Homo sapiens
aatttgatttacacacatactt

SEQ ID NO: 2513 - DNA, 23 bp, Homo sapiens
aatatatgcctgcgtgaaaagca

SEQ ID NO: 2514 - DNA, 23 bp, Homo sapiens
ggatacctttgatttttattttc

SEQ ID NO: 2515 - DNA, 21 bp, Homo sapiens
ttcaaaaatggttgcatttat

SEQ ID NO: 2516 - DNA, 20 bp, Homo sapiens
tgtaccttgaagtgatgcca

SEQ ID NO: 2517 - DNA, 23 bp, Homo sapiens
gaaatacaagagattcatgtgaa

SEQ ID NO: 2518 - DNA, 23 bp, Homo sapiens
gtcttccacagtggtaatttggg

SEQ ID NO: 2519 - DNA, 22 bp, Homo sapiens
tttggagtcagttaacatcaaa

SEQ ID NO: 2520 - DNA, 22 bp, Homo sapiens
ttcactatctatgacattcagg

SEQ ID NO: 2521 - DNA, 22 bp, Homo sapiens
tctgatcaatttcccttctctc

SEQ ID NO: 2522 - DNA, 18 bp, Homo sapiens
aagctctacaagactgga

SEQ ID NO: 2523 - DNA, 19 bp, Homo sapiens
tccacttgaagacatagcc

SEQ ID NO: 2524 - DNA, 20 bp, Homo sapiens
tctggacatctccttcaaac

SEQ ID NO: 2525 - DNA, 24 bp, Homo sapiens
ccatcaaaaaacaatgttctaacc

SEQ ID NO: 2526 - DNA, 16 bp, Homo sapiens
ggcatgcttcctccag

SEQ ID NO: 2527 - DNA, 18 bp, Homo sapiens
gacccaggcacattcatt

SEQ ID NO: 2528 - DNA, 21 bp, Homo sapiens
aacatgtgctttttcagagac

SEQ ID NO: 2529 - DNA, 20 bp, Homo sapiens
cagtgacaacaccatttggg

SEQ ID NO: 2530 - DNA, 19 bp, Homo sapiens
aaagcagataagcgaggaa

SEQ ID NO: 2531 - DNA, 22 bp, Homo sapiens
actgttgatgatgacaacctct

SEQ ID NO: 2532 - DNA, 16 bp, Homo sapiens
tcatgcaaccacttgc

SEQ ID NO: 2533 - DNA, 23 bp, Homo sapiens
ttaagcattttagcctccacccc

SEQ ID NO: 2534 - DNA, 21 bp, Homo sapiens
ccaaacacagagtattggatc

SEQ ID NO: 2535 - DNA, 24 bp, Homo sapiens
gactgatctcaaccccggcaagaa

SEQ ID NO: 2536 - DNA, 21 bp, Homo sapiens
cgactctctaaaaatcttgcc

SEQ ID NO: 2537 - DNA, 22 bp, Homo sapiens
tttagaatctggactcaccccc

SEQ ID NO: 2538 - DNA, 18 bp, Homo sapiens
agacctacaaggtgaagt

SEQ ID NO: 2539 - DNA, 21 bp, Homo sapiens
gtggactccattgaagacaga

SEQ ID NO: 2540 - DNA, 16 bp, Homo sapiens
cccctgaaagcctcag

SEQ ID NO: 2541 - DNA, 22 bp, Homo sapiens
acatgagagtttacatctggca

SEQ ID NO: 2542 - DNA, 21 bp, Homo sapiens
caaaacaaaggctctctaaac

SEQ ID NO: 2543 - DNA, 22 bp, Homo sapiens
aaagtgtgtaatattcaacttc

SEQ ID NO: 2544 - DNA, 22 bp, Homo sapiens
cagccctgtcaatctgcaattg

SEQ ID NO: 2545 - DNA, 19 bp, Homo sapiens
ccagagagaggagccaatc

SEQ ID NO: 2546 - DNA, 24 bp, Homo sapiens
gatgtgtacatgggggaggttcat

SEQ ID NO: 2547 - DNA, 20 bp, Homo sapiens
tcgtacacaacagtgtgggt

SEQ ID NO: 2548 - DNA, 23 bp, Homo sapiens
acaggtatgagaagcttacttac

SEQ ID NO: 2549 - DNA, 24 bp, Homo sapiens
ttcatatactttttttaacaaaac

SEQ ID NO: 2550 - DNA, 17 bp, Homo sapiens
aggacactcgcagtgag

SEQ ID NO: 2551 - DNA, 22 bp, Homo sapiens
aggaaatcctgtattttgtgaa

SEQ ID NO: 2552 - DNA, 23 bp, Homo sapiens
acagtcacttctcggctcggtgt

SEQ ID NO: 2553 - DNA, 22 bp, Homo sapiens
aaataatgtattttctagggag

SEQ ID NO: 2554 - DNA, 24 bp, Homo sapiens
gtgattaatgccacagataataac

SEQ ID NO: 2555 - DNA, 22 bp, Homo sapiens
aatcccccagaagatttaaatc

SEQ ID NO: 2556 - DNA, 22 bp, Homo sapiens
acacaatgaagacactgagata

SEQ ID NO: 2557 - DNA, 23 bp, Homo sapiens
cttttgctttagatatgagcttc

SEQ ID NO: 2558 - DNA, 28 bp, Homo sapiens
ttgtttttatagtttttgtaatctcacc

SEQ ID NO: 2559 - DNA, 20 bp, Homo sapiens
agcctgagttttggtaatct

SEQ ID NO: 2560 - DNA, 22 bp, Homo sapiens
tcctgaataaatattgtgccac

SEQ ID NO: 2561 - DNA, 22 bp, Homo sapiens
gtaactgtaaacttaagatgtt

SEQ ID NO: 2562 - DNA, 21 bp, Homo sapiens
gctgctggattttacgtctca

SEQ ID NO: 2563 - DNA, 21 bp, Homo sapiens
gccaaatggacctaatttgag

SEQ ID NO: 2564 - DNA, 24 bp, Homo sapiens
tgatagtgtatgaaagttatgagt

SEQ ID NO: 2565 - DNA, 21 bp, Homo sapiens
tgtgattccactaagtgaatc

SEQ ID NO: 2566 - DNA, 20 bp, Homo sapiens
taggaataaaagcctccttc

SEQ ID NO: 2567 - DNA, 23 bp, Homo sapiens
agagtttacctacctatgttacc

SEQ ID NO: 2568 - DNA, 24 bp, Homo sapiens
caacataaaaatcatagtcacctt

SEQ ID NO: 2569 - DNA, 21 bp, Homo sapiens
ttattctgtcaccattgttgc

SEQ ID NO: 2570 - DNA, 21 bp, Homo sapiens
ttgccaagaaatcacaacata

SEQ ID NO: 2571 - DNA, 22 bp, Homo sapiens
accaatgtgacttccgcagtgt

SEQ ID NO: 2572 - DNA, 18 bp, Homo sapiens
gaggtacggtggggtgag

SEQ ID NO: 2573 - DNA, 20 bp, Homo sapiens
tccagaacggagacatactt

SEQ ID NO: 2574 - DNA, 22 bp, Homo sapiens
aggtacccattaccccctgagc

SEQ ID NO: 2575 - DNA, 20 bp, Homo sapiens
cctgtatcgtcacactgatt

SEQ ID NO: 2576 - DNA, 24 bp, Homo sapiens
gagtaactttttgacttaacactg

SEQ ID NO: 2577 - DNA, 22 bp, Homo sapiens
tgacttaactgaaaacaagagc

SEQ ID NO: 2578 - DNA, 24 bp, Homo sapiens
aggcatgtgaatctcatagctaag

SEQ ID NO: 2579 - DNA, 20 bp, Homo sapiens
caaacccttcattactgtct

SEQ ID NO: 2580 - DNA, 17 bp, Homo sapiens
tggaacccgatgcagtc

SEQ ID NO: 2581 - DNA, 19 bp, Homo sapiens
aaaacccagtttctccagt

SEQ ID NO: 2582 - DNA, 22 bp, Homo sapiens
ttgggtagaagttaccacaaga

SEQ ID NO: 2583 - DNA, 24 bp, Homo sapiens
tagatggctctgttcaacacagag

SEQ ID NO: 2584 - DNA, 23 bp, Homo sapiens
tggacaaaatatgaatatcgggt

SEQ ID NO: 2585 - DNA, 20 bp, Homo sapiens
cagtatcttacctggactgc

SEQ ID NO: 2586 - DNA, 18 bp, Homo sapiens
tctcccgaggagtcattc

SEQ ID NO: 2587 - DNA, 22 bp, Homo sapiens
gcaccccagcaggtcgtgaggg

SEQ ID NO: 2588 - DNA, 21 bp, Homo sapiens
gtggagaatttcacaattgag

SEQ ID NO: 2589 - DNA, 17 bp, Homo sapiens
gagtgctcatcagtacc

SEQ ID NO: 2590 - DNA, 21 bp, Homo sapiens
tctgatactccaacatctgtg

SEQ ID NO: 2591 - DNA, 23 bp, Homo sapiens
ttgtcaataaacctcatggaatg

SEQ ID NO: 2592 - DNA, 20 bp, Homo sapiens
agtcccagactgtatggaca

SEQ ID NO: 2593 - DNA, 23 bp, Homo sapiens
cttcctttcctttgactcttctc

SEQ ID NO: 2594 - DNA, 20 bp, Homo sapiens
actgcctataagtttcaggt

SEQ ID NO: 2595 - DNA, 21 bp, Homo sapiens
agggggttgccaagatataat

SEQ ID NO: 2596 - DNA, 23 bp, Homo sapiens
ccgtctatacttgagaactcctg

SEQ ID NO: 2597 - DNA, 16 bp, Homo sapiens
ttccggtgcccctggg

SEQ ID NO: 2598 - DNA, 20 bp, Homo sapiens
cagcatcctagaaaatccaa

SEQ ID NO: 2599 - DNA, 18 bp, Homo sapiens
tgaagtgcaggcttctac

SEQ ID NO: 2600 - DNA, 18 bp, Homo sapiens
cctgtagttcctccgatt

SEQ ID NO: 2601 - DNA, 21 bp, Homo sapiens
gcaattagtgacatttccagg

SEQ ID NO: 2602 - DNA, 17 bp, Homo sapiens
ggtgggacatttccaag

SEQ ID NO: 2603 - DNA, 21 bp, Homo sapiens
aatgggtaataaccccattgg

SEQ ID NO: 2604 - DNA, 21 bp, Homo sapiens
ctttaccaagtgttcattttc

SEQ ID NO: 2605 - DNA, 19 bp, Homo sapiens
tcacatccagaagaatcgg

SEQ ID NO: 2606 - DNA, 19 bp, Homo sapiens
atgagcaaagcaatcacag

SEQ ID NO: 2607 - DNA, 20 bp, Homo sapiens
gattccattcatgaccgcag

SEQ ID NO: 2608 - DNA, 23 bp, Homo sapiens
ctcttgccctagaaaaggttatt

SEQ ID NO: 2609 - DNA, 21 bp, Homo sapiens
acacagagtatatgtttcggt

SEQ ID NO: 2610 - DNA, 24 bp, Homo sapiens
gctttggaaaaaattgaagacatt

SEQ ID NO: 2611 - DNA, 22 bp, Homo sapiens
catacaggttattttccaatcc

SEQ ID NO: 2612 - DNA, 20 bp, Homo sapiens
agaccacttactgtcctctg

SEQ ID NO: 2613 - DNA, 22 bp, Homo sapiens
aagaaatttacttgcttttatt

SEQ ID NO: 2614 - DNA, 19 bp, Homo sapiens
cattggaggcaaccaaccg

SEQ ID NO: 2615 - DNA, 23 bp, Homo sapiens
tgatggcagaaaattacaatact

SEQ ID NO: 2616 - DNA, 19 bp, Homo sapiens
agcttaacgatgcagaagg

SEQ ID NO: 2617 - DNA, 24 bp, Homo sapiens
ttttgcaaagcaaatgattatcct

SEQ ID NO: 2618 - DNA, 18 bp, Homo sapiens
cctggctctcccagatac

SEQ ID NO: 2619 - DNA, 21 bp, Homo sapiens
tttttgcaaatgagaactgac

SEQ ID NO: 2620 - DNA, 18 bp, Homo sapiens
tcatctgccactccaacc

SEQ ID NO: 2621 - DNA, 22 bp, Homo sapiens
ccagctgatagaatggacaaag

SEQ ID NO: 2622 - DNA, 23 bp, Homo sapiens
ccacagttttctctgctctaatt

SEQ ID NO: 2623 - DNA, 19 bp, Homo sapiens
tcatctggagttggtatct

SEQ ID NO: 2624 - DNA, 22 bp, Homo sapiens
ggaacagtttttccagtatatg

SEQ ID NO: 2625 - DNA, 20 bp, Homo sapiens
ccagacaacctgaagactgg

SEQ ID NO: 2626 - DNA, 21 bp, Homo sapiens
gagttcaggaatgaaaatgtt

SEQ ID NO: 2627 - DNA, 20 bp, Homo sapiens
actgatcctataacaattgc

SEQ ID NO: 2628 - DNA, 23 bp, Homo sapiens
agaaccagaaatacaattgagcc

SEQ ID NO: 2629 - DNA, 19 bp, Homo sapiens
gctggttccttttaccaac

SEQ ID NO: 2630 - DNA, 23 bp, Homo sapiens
ttcaatggaaacttaattctagg

SEQ ID NO: 2631 - DNA, 22 bp, Homo sapiens
tctgaatgtcacaaaagtcatg

SEQ ID NO: 2632 - DNA, 22 bp, Homo sapiens
atagacttacctcctggaggca

SEQ ID NO: 2633 - DNA, 29 bp, Homo sapiens
aatatgtatttattttaataattttcttt

SEQ ID NO: 2634 - DNA, 21 bp, Homo sapiens
aaatattcacttgtacagtat

SEQ ID NO: 2635 - DNA, 24 bp, Homo sapiens
tggtacagtatatttagaaactca

SEQ ID NO: 2636 - DNA, 22 bp, Homo sapiens
acccaaaggtttgtctcttctc

SEQ ID NO: 2637 - DNA, 20 bp, Homo sapiens
gtgcattgatagaagcacat

SEQ ID NO: 2638 - DNA, 20 bp, Homo sapiens
ttctatgtagacccaggtaa

SEQ ID NO: 2639 - DNA, 21 bp, Homo sapiens
gtagcttatccgtataggtta

SEQ ID NO: 2640 - DNA, 17 bp, Homo sapiens
agcaccttttcgcccta

SEQ ID NO: 2641 - DNA, 24 bp, Homo sapiens
aagaaagattttagccaaaagaaa

SEQ ID NO: 2642 - DNA, 21 bp, Homo sapiens
tcctcctgaaggaacagtaaa

SEQ ID NO: 2643 - DNA, 24 bp, Homo sapiens
aaagtttagaaaataaaaacaaat

SEQ ID NO: 2644 - DNA, 22 bp, Homo sapiens
atttgcaaacaaaaataaatct

SEQ ID NO: 2645 - DNA, 24 bp, Homo sapiens
ggactgagtgtgttaagagtccat

SEQ ID NO: 2646 - DNA, 21 bp, Homo sapiens
acagcaaaaagagattctttg

SEQ ID NO: 2647 - DNA, 20 bp, Homo sapiens
tccctgtgttttgacaaaca

SEQ ID NO: 2648 - DNA, 18 bp, Homo sapiens
tcctgctgacaaaatgag

SEQ ID NO: 2649 - DNA, 17 bp, Homo sapiens
cggccaaaggttgtgct

SEQ ID NO: 2650 - DNA, 19 bp, Homo sapiens
gaaaaatctcccatcctgc

SEQ ID NO: 2651 - DNA, 17 bp, Homo sapiens
cgtgcttacggatttgc

SEQ ID NO: 2652 - DNA, 26 bp, Homo sapiens
ccacttacttcttccttaatattcag

SEQ ID NO: 2653 - DNA, 21 bp, Homo sapiens
aggtgttatcacgagttatgg

SEQ ID NO: 2654 - DNA, 19 bp, Homo sapiens
atactcaccagtgggccca

SEQ ID NO: 2655 - DNA, 19 bp, Homo sapiens
accttctttgctattgtct

SEQ ID NO: 2656 - DNA, 21 bp, Homo sapiens
ggaatgtaaactccaaggagc

SEQ ID NO: 2657 - DNA, 21 bp, Homo sapiens
accagagtctgtgatttaatg

SEQ ID NO: 2658 - DNA, 26 bp, Homo sapiens
gaattgtggattaatataccatctag

SEQ ID NO: 2659 - DNA, 22 bp, Homo sapiens
agggtaacatctattttatcct

SEQ ID NO: 2660 - DNA, 16 bp, Homo sapiens
tcctggactgagcctg

SEQ ID NO: 2661 - DNA, 23 bp, Homo sapiens
actatcttaggtattttatgtgc

SEQ ID NO: 2662 - DNA, 16 bp, Homo sapiens
atacccgaaggcgtgc

SEQ ID NO: 2663 - DNA, 24 bp, Homo sapiens
agctgccatttagaatattaattt

SEQ ID NO: 2664 - DNA, 19 bp, Homo sapiens
tttaggcttgcacaggtgg

SEQ ID NO: 2665 - DNA, 20 bp, Homo sapiens
accattcggatattcaggct

SEQ ID NO: 2666 - DNA, 23 bp, Homo sapiens
ctttcctcaatgttcatgaaaac

SEQ ID NO: 2667 - DNA, 17 bp, Homo sapiens
tgggctttgggggctgg

SEQ ID NO: 2668 - DNA, 18 bp, Homo sapiens
gggaagtaaaggtagcac

SEQ ID NO: 2669 - DNA, 19 bp, Homo sapiens
cctcactcactgtgcaccc

SEQ ID NO: 2670 - DNA, 21 bp, Homo sapiens
taaatatctcatcaagctggg

SEQ ID NO: 2671 - DNA, 24 bp, Homo sapiens
gggaagagagttttcagtataaac

SEQ ID NO: 2672 - DNA, 23 bp, Homo sapiens
tggagtgtcatctataacagtac

SEQ ID NO: 2673 - DNA, 17 bp, Homo sapiens
aaagatggaccacggga

SEQ ID NO: 2674 - DNA, 24 bp, Homo sapiens
gattctggaacgctatgtattata

SEQ ID NO: 2675 - DNA, 23 bp, Homo sapiens
atggaaataaacttactcccagc

SEQ ID NO: 2676 - DNA, 22 bp, Homo sapiens
acttgaatgaatgataataatg

SEQ ID NO: 2677 - DNA, 23 bp, Homo sapiens
catatgatcctggaaaagttctg

SEQ ID NO: 2678 - DNA, 22 bp, Homo sapiens
gtgtcacaaatccaagttcaaa

SEQ ID NO: 2679 - DNA, 26 bp, Homo sapiens
aaatcatgtgtatggtttgacatata

SEQ ID NO: 2680 - DNA, 22 bp, Homo sapiens
acttcagtgttttattttaaat

SEQ ID NO: 2681 - DNA, 24 bp, Homo sapiens
tgataatcaaaggttcccagatcc

SEQ ID NO: 2682 - DNA, 16 bp, Homo sapiens
cagctgccaccagaac

SEQ ID NO: 2683 - DNA, 23 bp, Homo sapiens
taattttatgtcacaagctcctc

SEQ ID NO: 2684 - DNA, 22 bp, Homo sapiens
accagtttctactaagtgcatg

SEQ ID NO: 2685 - DNA, 22 bp, Homo sapiens
catgtgagagagacaacatttc

SEQ ID NO: 2686 - DNA, 20 bp, Homo sapiens
tgctgagtaaattcttgttt

SEQ ID NO: 2687 - DNA, 19 bp, Homo sapiens
cagaactggggaatccacg

SEQ ID NO: 2688 - DNA, 23 bp, Homo sapiens
acaattctctgagataggactat

SEQ ID NO: 2689 - DNA, 18 bp, Homo sapiens
actgtttgtacagcccac

SEQ ID NO: 2690 - DNA, 23 bp, Homo sapiens
agcatcctatatgttattgctat

SEQ ID NO: 2691 - DNA, 17 bp, Homo sapiens
caggcagtgaggagaac

SEQ ID NO: 2692 - DNA, 22 bp, Homo sapiens
tttttttcacatatttcctaag

SEQ ID NO: 2693 - DNA, 24 bp, Homo sapiens
ccaaaaaggcaaatggtattataa

SEQ ID NO: 2694 - DNA, 24 bp, Homo sapiens
ggatatcgagagccaactatatgt

SEQ ID NO: 2695 - DNA, 21 bp, Homo sapiens
ttcagccaccagtagccaaat

SEQ ID NO: 2696 - DNA, 24 bp, Homo sapiens
gataactctagaggtcttacctgt

SEQ ID NO: 2697 - DNA, 23 bp, Homo sapiens
aaaagtaaactaaaattagactc

SEQ ID NO: 2698 - DNA, 24 bp, Homo sapiens
ccatccatgtataaacagtactga

SEQ ID NO: 2699 - DNA, 22 bp, Homo sapiens
gcatgggatttcaggtttattc

SEQ ID NO: 2700 - DNA, 24 bp, Homo sapiens
ccaggagagcagcaaagaactggg

SEQ ID NO: 2701 - DNA, 21 bp, Homo sapiens
ttaacactgttcctaaagcaa

SEQ ID NO: 2702 - DNA, 24 bp, Homo sapiens
gctcacatgcattgaacatctcta

SEQ ID NO: 2703 - DNA, 20 bp, Homo sapiens
ctggcaatgcactttgtcat

SEQ ID NO: 2704 - DNA, 22 bp, Homo sapiens
ccttcaaaaactatgcagtaac

SEQ ID NO: 2705 - DNA, 24 bp, Homo sapiens
agcatttagctcttctcctatttt

SEQ ID NO: 2706 - DNA, 17 bp, Homo sapiens
aaacacgcaaccctctt

SEQ ID NO: 2707 - DNA, 23 bp, Homo sapiens
tactttaccttcttgtggagtag

SEQ ID NO: 2708 - DNA, 23 bp, Homo sapiens
gtctctctctcttatagacacac

SEQ ID NO: 2709 - DNA, 22 bp, Homo sapiens
agccaaagtgcaagcagttagg

SEQ ID NO: 2710 - DNA, 20 bp, Homo sapiens
ggaaaatgactgaaagagga

SEQ ID NO: 2711 - DNA, 20 bp, Homo sapiens
tacaagcaacctcacaggta

SEQ ID NO: 2712 - DNA, 23 bp, Homo sapiens
ttccactactttagatgggtgtt

SEQ ID NO: 2713 - DNA, 17 bp, Homo sapiens
ggacagcacccgtccac

SEQ ID NO: 2714 - DNA, 21 bp, Homo sapiens
aaaaacatttgcagaagattt

SEQ ID NO: 2715 - DNA, 18 bp, Homo sapiens
acctgggatgaacctgtt

SEQ ID NO: 2716 - DNA, 23 bp, Homo sapiens
ggtctactctgttaaaggattgc

SEQ ID NO: 2717 - DNA, 17 bp, Homo sapiens
acaaagtgtgccaactc

SEQ ID NO: 2718 - DNA, 16 bp, Homo sapiens
gcagagggcatgcggg

SEQ ID NO: 2719 - DNA, 22 bp, Homo sapiens
ataggagcaatagtcttctcag

SEQ ID NO: 2720 - DNA, 24 bp, Homo sapiens
gtacttctcaattacacctctgac

SEQ ID NO: 2721 - DNA, 24 bp, Homo sapiens
actctaataaattgtatttatgct

SEQ ID NO: 2722 - DNA, 18 bp, Homo sapiens
agctgcggactcttgagg

SEQ ID NO: 2723 - DNA, 21 bp, Homo sapiens
gatgtattttcaaaccaaggc

SEQ ID NO: 2724 - DNA, 17 bp, Homo sapiens
cgagtgatagcctcgca

SEQ ID NO: 2725 - DNA, 22 bp, Homo sapiens
agggtaatagtccttcctttta

SEQ ID NO: 2726 - DNA, 24 bp, Homo sapiens
agcccctcattaatctatatgagt

SEQ ID NO: 2727 - DNA, 24 bp, Homo sapiens
gcacatatgcatttgaagataagt

SEQ ID NO: 2728 - DNA, 23 bp, Homo sapiens
ggaggtcctctaaattaaatgtt

SEQ ID NO: 2729 - DNA, 23 bp, Homo sapiens
tatatactgaacctccttcatgc

SEQ ID NO: 2730 - DNA, 18 bp, Homo sapiens
gggaaaagagcagagtgt

SEQ ID NO: 2731 - DNA, 22 bp, Homo sapiens
gatgcagcaagattaaaataat

SEQ ID NO: 2732 - DNA, 18 bp, Homo sapiens
tgcctatcaactgacagt

SEQ ID NO: 2733 - DNA, 24 bp, Homo sapiens
gggaaagggggatgaataagagac

SEQ ID NO: 2734 - DNA, 20 bp, Homo sapiens
gtgctgtcgttaacttggca

SEQ ID NO: 2735 - DNA, 21 bp, Homo sapiens
aaaaggctggagaccaccctc

SEQ ID NO: 2736 - DNA, 24 bp, Homo sapiens
gcgatactaatcccttactatttg

SEQ ID NO: 2737 - DNA, 20 bp, Homo sapiens
tttcccctgcagttaacagc

SEQ ID NO: 2738 - DNA, 17 bp, Homo sapiens
tgtagtgctgcagagga

SEQ ID NO: 2739 - DNA, 16 bp, Homo sapiens
ccgctggacacagatg

SEQ ID NO: 2740 - DNA, 20 bp, Homo sapiens
aaaaggttttccaaggaaga

SEQ ID NO: 2741 - DNA, 21 bp, Homo sapiens
cttcatgcaaccaccgaaacc

SEQ ID NO: 2742 - DNA, 21 bp, Homo sapiens
aggaactgctgaactcttatc

SEQ ID NO: 2743 - DNA, 21 bp, Homo sapiens
aaaagagatgctgttgggtgc

SEQ ID NO: 2744 - DNA, 17 bp, Homo sapiens
gtccggagaccagccac

SEQ ID NO: 2745 - DNA, 22 bp, Homo sapiens
aaccaccaaaaactgttagcac

SEQ ID NO: 2746 - DNA, 22 bp, Homo sapiens
aaaaaggaaggctctttcatat

SEQ ID NO: 2747 - DNA, 23 bp, Homo sapiens
accttgttccaaacacaaatgtt

SEQ ID NO: 2748 - DNA, 18 bp, Homo sapiens
agtggatctattgctggg

SEQ ID NO: 2749 - DNA, 22 bp, Homo sapiens
acataaactggtgaattcacca

SEQ ID NO: 2750 - DNA, 18 bp, Homo sapiens
gatggagctgaaaagtgg

SEQ ID NO: 2751 - DNA, 20 bp, Homo sapiens
catcagtccattcacacttg

SEQ ID NO: 2752 - DNA, 16 bp, Homo sapiens
aactgcccttctgcag

SEQ ID NO: 2753 - DNA, 21 bp, Homo sapiens
ccattacaataggatagcccc

SEQ ID NO: 2754 - DNA, 19 bp, Homo sapiens
ctatagagtgctttcaggg

SEQ ID NO: 2755 - DNA, 22 bp, Homo sapiens
ttaaccggaaggtcaatattcc

SEQ ID NO: 2756 - DNA, 22 bp, Homo sapiens
gacctgattttcttgctgtatg

SEQ ID NO: 2757 - DNA, 21 bp, Homo sapiens
caaaactaaaaatgactggga

SEQ ID NO: 2758 - DNA, 24 bp, Homo sapiens
atttcctttaagttcagaactgac

SEQ ID NO: 2759 - DNA, 17 bp, Homo sapiens
tgtaatgccaacacatg

SEQ ID NO: 2760 - DNA, 20 bp, Homo sapiens
gggttcctggaacttcatcc

SEQ ID NO: 2761 - DNA, 25 bp, Homo sapiens
agtaattttaatcaaattaattcac

SEQ ID NO: 2762 - DNA, 19 bp, Homo sapiens
acaatgctggcaatattgt

SEQ ID NO: 2763 - DNA, 21 bp, Homo sapiens
acgaaaagaagcaatccattt

SEQ ID NO: 2764 - DNA, 23 bp, Homo sapiens
attgatttgcatcttcttttgtg

SEQ ID NO: 2765 - DNA, 23 bp, Homo sapiens
ccaccatgaaacatatatggatg

SEQ ID NO: 2766 - DNA, 21 bp, Homo sapiens
atatttgtgtgcaccattgga

SEQ ID NO: 2767 - DNA, 19 bp, Homo sapiens
aacgtgtataacagctggg

SEQ ID NO: 2768 - DNA, 22 bp, Homo sapiens
tgaggtcaagttaatcaaacag

SEQ ID NO: 2769 - DNA, 21 bp, Homo sapiens
gaagaattacaatccgtcagc

SEQ ID NO: 2770 - DNA, 24 bp, Homo sapiens
tttaagtgaacactcatgtctttt

SEQ ID NO: 2771 - DNA, 23 bp, Homo sapiens
tctataaactcctgcagagataa

SEQ ID NO: 2772 - DNA, 15 bp, Homo sapiens
agcgggacatccctc

SEQ ID NO: 2773 - DNA, 22 bp, Homo sapiens
ggcacataaaattaattgcttg

SEQ ID NO: 2774 - DNA, 21 bp, Homo sapiens
gccaatccagaggttcccaaa

SEQ ID NO: 2775 - DNA, 19 bp, Homo sapiens
tcattaagaggcttgcagt

SEQ ID NO: 2776 - DNA, 18 bp, Homo sapiens
cccacaaaacctttttgg

SEQ ID NO: 2777 - DNA, 20 bp, Homo sapiens
cgcgaagttataccatcctc

SEQ ID NO: 2778 - DNA, 23 bp, Homo sapiens
aggaaatttttggcacattaata

SEQ ID NO: 2779 - DNA, 19 bp, Homo sapiens
tcctgaatggtagtactgt

SEQ ID NO: 2780 - DNA, 26 bp, Homo sapiens
tactttaaaataatgtaaacaggttc

SEQ ID NO: 2781 - DNA, 21 bp, Homo sapiens
actagagtatcctggtgaagg

SEQ ID NO: 2782 - DNA, 19 bp, Homo sapiens
ctcaccaggatccttcctg

SEQ ID NO: 2783 - DNA, 19 bp, Homo sapiens
aaaccaagagagtggtatc

SEQ ID NO: 2784 - DNA, 24 bp, Homo sapiens
agaaagactcctgtgttatctcca

SEQ ID NO: 2785 - DNA, 18 bp, Homo sapiens
atgttgaggaagagccag

SEQ ID NO: 2786 - DNA, 21 bp, Homo sapiens
tggatgggatatatacaggta

SEQ ID NO: 2787 - DNA, 23 bp, Homo sapiens
gagcatcccaaaggcaaattcaa

SEQ ID NO: 2788 - DNA, 19 bp, Homo sapiens
agtgatggaaaatggcatg

SEQ ID NO: 2789 - DNA, 28 bp, Homo sapiens
aataagaatgtaggaatataaacaacag

SEQ ID NO: 2790 - DNA, 18 bp, Homo sapiens
cttaaggggtcaccagtg

SEQ ID NO: 2791 - DNA, 28 bp, Homo sapiens
tttatacatatcaaaaagtacttacctg

SEQ ID NO: 2792 - DNA, 24 bp, Homo sapiens
tggtttataacaaatatgtgtgtg

SEQ ID NO: 2793 - DNA, 19 bp, Homo sapiens
aagcctgatgcctaatagc

SEQ ID NO: 2794 - DNA, 21 bp, Homo sapiens
tctgtttgaaatgtatgcatg

SEQ ID NO: 2795 - DNA, 21 bp, Homo sapiens
agttgtagttacttccactgg

SEQ ID NO: 2796 - DNA, 20 bp, Homo sapiens
agggacgtctttattttctt

SEQ ID NO: 2797 - DNA, 23 bp, Homo sapiens
tggggataataatagtacttacc

SEQ ID NO: 2798 - DNA, 17 bp, Homo sapiens
ctttgcagcatcacctg

SEQ ID NO: 2799 - DNA, 24 bp, Homo sapiens
aaacagaagcatttacctcagtac

SEQ ID NO: 2800 - DNA, 20 bp, Homo sapiens
atcacacttgtcttaccagg

SEQ ID NO: 2801 - DNA, 23 bp, Homo sapiens
tgatttctcatttacctgaggat

SEQ ID NO: 2802 - DNA, 24 bp, Homo sapiens
cataaataataatgaaagtaaatg

SEQ ID NO: 2803 - DNA, 21 bp, Homo sapiens
aatactcttcctgattgccag

SEQ ID NO: 2804 - DNA, 18 bp, Homo sapiens
tgcgagtatattgctgtg

SEQ ID NO: 2805 - DNA, 20 bp, Homo sapiens
gttcgaaagctggccttaat

SEQ ID NO: 2806 - DNA, 20 bp, Homo sapiens
acagacttcactggtaagtg

SEQ ID NO: 2807 - DNA, 19 bp, Homo sapiens
acaatcaggcaaaagctat

SEQ ID NO: 2808 - DNA, 20 bp, Homo sapiens
tccgtttcataggaaatggg

SEQ ID NO: 2809 - DNA, 24 bp, Homo sapiens
aataaaaattcattgtaaagggat

SEQ ID NO: 2810 - DNA, 22 bp, Homo sapiens
tcctatatatcagctggaaagg

SEQ ID NO: 2811 - DNA, 21 bp, Homo sapiens
aaataaagcaatgtcaaacac

SEQ ID NO: 2812 - DNA, 20 bp, Homo sapiens
gcacaacaatccatcttagg

SEQ ID NO: 2813 - DNA, 24 bp, Homo sapiens
agtggagctgggaaatttacaata

SEQ ID NO: 2814 - DNA, 23 bp, Homo sapiens
acaggtgttttctaatatttagc

SEQ ID NO: 2815 - DNA, 21 bp, Homo sapiens
agctggtagagatgactctct

SEQ ID NO: 2816 - DNA, 24 bp, Homo sapiens
acaaatacatatatacgtatatgt

SEQ ID NO: 2817 - DNA, 19 bp, Homo sapiens
ttcttcaggtggaaaccac

SEQ ID NO: 2818 - DNA, 22 bp, Homo sapiens
cctagagccatacagatacttg

SEQ ID NO: 2819 - DNA, 18 bp, Homo sapiens
tggcctcagttgtgctgg

SEQ ID NO: 2820 - DNA, 20 bp, Homo sapiens
cgggagcaggacaaacttta

SEQ ID NO: 2821 - DNA, 22 bp, Homo sapiens
tgaggtaagaagcaatcagagt

SEQ ID NO: 2822 - DNA, 20 bp, Homo sapiens
accttataggatatatgagt

SEQ ID NO: 2823 - DNA, 23 bp, Homo sapiens
agagaaggtgttgaatattataa

SEQ ID NO: 2824 - DNA, 17 bp, Homo sapiens
agctgttgcacactgct

SEQ ID NO: 2825 - DNA, 20 bp, Homo sapiens
tgcttacctgctgctaaagt

SEQ ID NO: 2826 - DNA, 24 bp, Homo sapiens
ggttatattttcacactgattacc

SEQ ID NO: 2827 - DNA, 24 bp, Homo sapiens
caactgaattgcagagagtaatag

SEQ ID NO: 2828 - DNA, 19 bp, Homo sapiens
tcctaatggtggttggcaa

SEQ ID NO: 2829 - DNA, 21 bp, Homo sapiens
agatagttcttgggatttagc

SEQ ID NO: 2830 - DNA, 22 bp, Homo sapiens
cccatggcgttttcacaggtat

SEQ ID NO: 2831 - DNA, 24 bp, Homo sapiens
gggaggcttgtacacataatatta

SEQ ID NO: 2832 - DNA, 20 bp, Homo sapiens
gttgtggggtatgacatcaa

SEQ ID NO: 2833 - DNA, 21 bp, Homo sapiens
ctgtcacagaattctgcaaac

SEQ ID NO: 2834 - DNA, 22 bp, Homo sapiens
ccctctcttcgtactctctcaa

SEQ ID NO: 2835 - DNA, 23 bp, Homo sapiens
ctgaaaggacattagttaaaaat

SEQ ID NO: 2836 - DNA, 22 bp, Homo sapiens
ttgttattgttctcattgatag

SEQ ID NO: 2837 - DNA, 21 bp, Homo sapiens
aggtgattgttcagaaagcat

SEQ ID NO: 2838 - DNA, 20 bp, Homo sapiens
actaaatgaatgtgtgaatt

SEQ ID NO: 2839 - DNA, 18 bp, Homo sapiens
ctgctggcttctcccagg

SEQ ID NO: 2840 - DNA, 23 bp, Homo sapiens
cagcatattcttggactttttca

SEQ ID NO: 2841 - DNA, 22 bp, Homo sapiens
ggagggatcatgaatacaggtg

SEQ ID NO: 2842 - DNA, 19 bp, Homo sapiens
gggtctcagaaagaacggg

SEQ ID NO: 2843 - DNA, 20 bp, Homo sapiens
tttccttggtctatggaagt

SEQ ID NO: 2844 - DNA, 21 bp, Homo sapiens
gccatacaccaagtatgagtt

SEQ ID NO: 2845 - DNA, 23 bp, Homo sapiens
agtactttgactttaatttgagg

SEQ ID NO: 2846 - DNA, 18 bp, Homo sapiens
tcggccaatgaaaatgca

SEQ ID NO: 2847 - DNA, 24 bp, Homo sapiens
attgatctttacctgattctcccg

SEQ ID NO: 2848 - DNA, 19 bp, Homo sapiens
ggaaagtcgagtttttcag

SEQ ID NO: 2849 - DNA, 23 bp, Homo sapiens
tattcacagctaagactctgaac

SEQ ID NO: 2850 - DNA, 23 bp, Homo sapiens
aggaataattataagatatgaac

SEQ ID NO: 2851 - DNA, 22 bp, Homo sapiens
tgtcattgtttgaggaggtttt

SEQ ID NO: 2852 - DNA, 21 bp, Homo sapiens
ccctaaagtaacccctttgtc

SEQ ID NO: 2853 - DNA, 16 bp, Homo sapiens
tgagccaaccactgct

SEQ ID NO: 2854 - DNA, 23 bp, Homo sapiens
gacagtaatctaattagaaagac

SEQ ID NO: 2855 - DNA, 24 bp, Homo sapiens
tctcagtcttctcatgtatagttc

SEQ ID NO: 2856 - DNA, 21 bp, Homo sapiens
tcttatatctttagaaactgt

SEQ ID NO: 2857 - DNA, 22 bp, Homo sapiens
cacctaagatgcagaaaatcag

SEQ ID NO: 2858 - DNA, 21 bp, Homo sapiens
gaatacaactgccaaattcct

SEQ ID NO: 2859 - DNA, 21 bp, Homo sapiens
gggggctgtttacacagcttg

SEQ ID NO: 2860 - DNA, 24 bp, Homo sapiens
aaaggggaatctcagccttggatt

SEQ ID NO: 2861 - DNA, 19 bp, Homo sapiens
ggaatctggttccatttgc

SEQ ID NO: 2862 - DNA, 23 bp, Homo sapiens
acatgaagttctgtagaactgat

SEQ ID NO: 2863 - DNA, 24 bp, Homo sapiens
tcctgtgcccctttggctggtggt

SEQ ID NO: 2864 - DNA, 20 bp, Homo sapiens
ggctgtggtcactgtaatgg

SEQ ID NO: 2865 - DNA, 21 bp, Homo sapiens
acctggacaacactctcaaat

SEQ ID NO: 2866 - DNA, 23 bp, Homo sapiens
tgtacagaaaaatcgtacttggc

SEQ ID NO: 2867 - DNA, 20 bp, Homo sapiens
ccagagggaaacttgacttt

SEQ ID NO: 2868 - DNA, 21 bp, Homo sapiens
atgaccttcgtaggaaacaca

SEQ ID NO: 2869 - DNA, 18 bp, Homo sapiens
aatgtgcatggttcaaca

SEQ ID NO: 2870 - DNA, 21 bp, Homo sapiens
tttctctatgggaccagattg

SEQ ID NO: 2871 - DNA, 22 bp, Homo sapiens
tcaatacttcttagacacagac

SEQ ID NO: 2872 - DNA, 24 bp, Homo sapiens
ctgagccaataggaatgatataac

SEQ ID NO: 2873 - DNA, 21 bp, Homo sapiens
caatgattcttcaccaacttg

SEQ ID NO: 2874 - DNA, 21 bp, Homo sapiens
ttgtaagtgacagctacactc

SEQ ID NO: 2875 - DNA, 24 bp, Homo sapiens
tcaaaagagtagattggtatagtt

SEQ ID NO: 2876 - DNA, 22 bp, Homo sapiens
ttggtatatggtaacaggtctg

SEQ ID NO: 2877 - DNA, 22 bp, Homo sapiens
tacacaacagaggatcaatacc

SEQ ID NO: 2878 - DNA, 20 bp, Homo sapiens
tatctctgtttgaaacactc

SEQ ID NO: 2879 - DNA, 17 bp, Homo sapiens
tctccaaatgcccactg

SEQ ID NO: 2880 - DNA, 22 bp, Homo sapiens
cctcaatgtcaaagaacttaac

SEQ ID NO: 2881 - DNA, 17 bp, Homo sapiens
cctccgcccagaggaca

SEQ ID NO: 2882 - DNA, 21 bp, Homo sapiens
acccttaaactcactgtatgg

SEQ ID NO: 2883 - DNA, 21 bp, Homo sapiens
ctgtttattgattgctttgct

SEQ ID NO: 2884 - DNA, 21 bp, Homo sapiens
aaactgtaagtaagccagtgg

SEQ ID NO: 2885 - DNA, 22 bp, Homo sapiens
tgataaagcaatcctgaatcag

SEQ ID NO: 2886 - DNA, 22 bp, Homo sapiens
tgatagcagaagaactttgaac

SEQ ID NO: 2887 - DNA, 19 bp, Homo sapiens
agagaactcatgaaccctt

SEQ ID NO: 2888 - DNA, 23 bp, Homo sapiens
cagtgtatttttttccatctctt

SEQ ID NO: 2889 - DNA, 19 bp, Homo sapiens
ctggctcaaagtgtgatgc

SEQ ID NO: 2890 - DNA, 23 bp, Homo sapiens
ggttctaaatggagaaagaaaac

SEQ ID NO: 2891 - DNA, 21 bp, Homo sapiens
ccttgaatgaaacctgtcact

SEQ ID NO: 2892 - DNA, 23 bp, Homo sapiens
cacaccagcactgaaccagagtt

SEQ ID NO: 2893 - DNA, 23 bp, Homo sapiens
tctttgatggtttatttgccttg

SEQ ID NO: 2894 - DNA, 15 bp, Homo sapiens
gtggcttgcactggg

SEQ ID NO: 2895 - DNA, 19 bp, Homo sapiens
acaatgctattggtaggtg

SEQ ID NO: 2896 - DNA, 21 bp, Homo sapiens
agaaacactggcctgtgacca

SEQ ID NO: 2897 - DNA, 19 bp, Homo sapiens
ttgtttgtttagctcaagc

SEQ ID NO: 2898 - DNA, 20 bp, Homo sapiens
atcctcagactggaaggtac

SEQ ID NO: 2899 - DNA, 21 bp, Homo sapiens
ctctcaaagtgctgggattac

SEQ ID NO: 2900 - DNA, 16 bp, Homo sapiens
gcttccattgctgggc

SEQ ID NO: 2901 - DNA, 24 bp, Homo sapiens
tttacagaagttattgctttgcaa

SEQ ID NO: 2902 - DNA, 20 bp, Homo sapiens
gccatacaactggtgcagtt

SEQ ID NO: 2903 - DNA, 24 bp, Homo sapiens
tattaaagcttataaagatgtacc

SEQ ID NO: 2904 - DNA, 30 bp, Homo sapiens
ttaatttctttatttctaggtttttatatt

SEQ ID NO: 2905 - DNA, 18 bp, Homo sapiens
ggtcacaacgttgcccag

SEQ ID NO: 2906 - DNA, 24 bp, Homo sapiens
ttctgtgtaatcaattattatgct

SEQ ID NO: 2907 - DNA, 22 bp, Homo sapiens
ggctattacagatgtgattaac

SEQ ID NO: 2908 - DNA, 23 bp, Homo sapiens
gacagatataaccacatttgtat

SEQ ID NO: 2909 - DNA, 22 bp, Homo sapiens
ccagtggcattgcctggagaaa

SEQ ID NO: 2910 - DNA, 25 bp, Homo sapiens
tatatatgtgttggataatgatata

SEQ ID NO: 2911 - DNA, 18 bp, Homo sapiens
gacccaatcagtggccag

SEQ ID NO: 2912 - DNA, 18 bp, Homo sapiens
cacaaaccagaaacaggg

SEQ ID NO: 2913 - DNA, 22 bp, Homo sapiens
cattgacaattttcaacactgc

SEQ ID NO: 2914 - DNA, 24 bp, Homo sapiens
tgaaaatgtaatacatttctttct

SEQ ID NO: 2915 - DNA, 18 bp, Homo sapiens
aggggtaacaggtcttcg

SEQ ID NO: 2916 - DNA, 24 bp, Homo sapiens
cttgacgattaggcacacacaggc

SEQ ID NO: 2917 - DNA, 19 bp, Homo sapiens
acaataaatggctctctgc

SEQ ID NO: 2918 - DNA, 23 bp, Homo sapiens
gtccccaaggaatcacactcaca

SEQ ID NO: 2919 - DNA, 21 bp, Homo sapiens
gggaaacttctacctacggca

SEQ ID NO: 2920 - DNA, 21 bp, Homo sapiens
acctgtgaggctcacactgat

SEQ ID NO: 2921 - DNA, 16 bp, Homo sapiens
agtgcatctgcaagcc

SEQ ID NO: 2922 - DNA, 24 bp, Homo sapiens
tgtcctgttgatttgttacacagc

SEQ ID NO: 2923 - DNA, 18 bp, Homo sapiens
aggcctgtgactgtgaca

SEQ ID NO: 2924 - DNA, 18 bp, Homo sapiens
aggcagacagaggaaaga

SEQ ID NO: 2925 - DNA, 18 bp, Homo sapiens
ggacttcagtgtgacacc

SEQ ID NO: 2926 - DNA, 23 bp, Homo sapiens
attgcactgtctcccttcaacat

SEQ ID NO: 2927 - DNA, 21 bp, Homo sapiens
ccatggctcagtgaacaaatt

SEQ ID NO: 2928 - DNA, 24 bp, Homo sapiens
agacagtcccagggagggatccag

SEQ ID NO: 2929 - DNA, 21 bp, Homo sapiens
ggatttaaatttctccgaagc

SEQ ID NO: 2930 - DNA, 24 bp, Homo sapiens
cataaaagttttctctgcaggtgt

SEQ ID NO: 2931 - DNA, 22 bp, Homo sapiens
ttcccatcctcaccttttaaat

SEQ ID NO: 2932 - DNA, 19 bp, Homo sapiens
cactgcccagagtgaggat

SEQ ID NO: 2933 - DNA, 19 bp, Homo sapiens
atcatctgcagtagcattg

SEQ ID NO: 2934 - DNA, 22 bp, Homo sapiens
tcacatccaacatcattaaagc

SEQ ID NO: 2935 - DNA, 16 bp, Homo sapiens
agtaagattggccccc

SEQ ID NO: 2936 - DNA, 18 bp, Homo sapiens
tgcaagtgcaaagcaaac

SEQ ID NO: 2937 - DNA, 22 bp, Homo sapiens
aatttcatccaaattgtttttt

SEQ ID NO: 2938 - DNA, 16 bp, Homo sapiens
ctctgggacagtggat

SEQ ID NO: 2939 - DNA, 24 bp, Homo sapiens
tttactcttcagttaagaaatcaa

SEQ ID NO: 2940 - DNA, 19 bp, Homo sapiens
gtgccagaatggattctac

SEQ ID NO: 2941 - DNA, 24 bp, Homo sapiens
tgtaaacttttgcgttacacgtac

SEQ ID NO: 2942 - DNA, 23 bp, Homo sapiens
tctagattggaggacagtgtaat

SEQ ID NO: 2943 - DNA, 21 bp, Homo sapiens
acaggtaatatctccatccac

SEQ ID NO: 2944 - DNA, 24 bp, Homo sapiens
cttgtacctaatgagcaaattatc

SEQ ID NO: 2945 - DNA, 23 bp, Homo sapiens
catcaggatccaactcttgtaga

SEQ ID NO: 2946 - DNA, 22 bp, Homo sapiens
atcttattaccttcttgtctgt

SEQ ID NO: 2947 - DNA, 23 bp, Homo sapiens
ctgccagacacgtgtctcttaca

SEQ ID NO: 2948 - DNA, 23 bp, Homo sapiens
gcactagaaatggtagcattctt

SEQ ID NO: 2949 - DNA, 23 bp, Homo sapiens
ctctttgaaatgcaaatgcacat

SEQ ID NO: 2950 - DNA, 17 bp, Homo sapiens
agatccttcggccatag

SEQ ID NO: 2951 - DNA, 23 bp, Homo sapiens
agtggaataacatccaaataagt

SEQ ID NO: 2952 - DNA, 17 bp, Homo sapiens
tccctgatgcaggaagg

SEQ ID NO: 2953 - DNA, 21 bp, Homo sapiens
cagaaaaactcacctgatcac

SEQ ID NO: 2954 - DNA, 24 bp, Homo sapiens
aggaatacagtctttaattttgaa

SEQ ID NO: 2955 - DNA, 19 bp, Homo sapiens
cacagggtttgcaaacatc

SEQ ID NO: 2956 - DNA, 22 bp, Homo sapiens
agagatgaaaggtgcattaaaa

SEQ ID NO: 2957 - DNA, 22 bp, Homo sapiens
taatccttgcacagctcacagt

SEQ ID NO: 2958 - DNA, 21 bp, Homo sapiens
tgtgatgattgtgagcataac

SEQ ID NO: 2959 - DNA, 24 bp, Homo sapiens
gtgaactagctttgattttcaaac

SEQ ID NO: 2960 - DNA, 22 bp, Homo sapiens
attacaacatctctgtagaccc

SEQ ID NO: 2961 - DNA, 25 bp, Homo sapiens
aataacataatttaaaataatatgc

SEQ ID NO: 2962 - DNA, 24 bp, Homo sapiens
caagtttacgctttcaattgtaaa

SEQ ID NO: 2963 - DNA, 24 bp, Homo sapiens
tcaggaatttatttgctacttacc

SEQ ID NO: 2964 - DNA, 19 bp, Homo sapiens
ctagtgtgatcgctgcttg

SEQ ID NO: 2965 - DNA, 21 bp, Homo sapiens
ccctctgaagtgctcaaaagg

SEQ ID NO: 2966 - DNA, 24 bp, Homo sapiens
aggcctaacatatcaataaaatga

SEQ ID NO: 2967 - DNA, 23 bp, Homo sapiens
gaatggctgttgcattgacaagg

SEQ ID NO: 2968 - DNA, 23 bp, Homo sapiens
tttcaaataaaatcattgctgac

SEQ ID NO: 2969 - DNA, 21 bp, Homo sapiens
tgtcattataaagaggcaagc

SEQ ID NO: 2970 - DNA, 24 bp, Homo sapiens
cttaaaaaatctgcaataattgac

SEQ ID NO: 2971 - DNA, 17 bp, Homo sapiens
atgccgataactgcgac

SEQ ID NO: 2972 - DNA, 24 bp, Homo sapiens
atttgttaggccaagattaagttc

SEQ ID NO: 2973 - DNA, 21 bp, Homo sapiens
gagttggtgttccttaggagt

SEQ ID NO: 2974 - DNA, 23 bp, Homo sapiens
tccatgcataaaatagaactcac

SEQ ID NO: 2975 - DNA, 24 bp, Homo sapiens
acaaaaatcttccctgttaaattc

SEQ ID NO: 2976 - DNA, 20 bp, Homo sapiens
tctatatggctggcttgttg

SEQ ID NO: 2977 - DNA, 22 bp, Homo sapiens
tgtatggatatccacacgatta

SEQ ID NO: 2978 - DNA, 20 bp, Homo sapiens
aaatcaccattagtgggagg

SEQ ID NO: 2979 - DNA, 24 bp, Homo sapiens
acatacagatcttcccctaaaatc

SEQ ID NO: 2980 - DNA, 20 bp, Homo sapiens
tgggcagtactatacaactg

SEQ ID NO: 2981 - DNA, 21 bp, Homo sapiens
atctggcttgctctgacatct

SEQ ID NO: 2982 - DNA, 18 bp, Homo sapiens
accccatctcttcaagag

SEQ ID NO: 2983 - DNA, 22 bp, Homo sapiens
aacaaaattcataataatacct

SEQ ID NO: 2984 - DNA, 19 bp, Homo sapiens
tcacatttagcatcctgac

SEQ ID NO: 2985 - DNA, 17 bp, Homo sapiens
aggttaacagcagtctc

SEQ ID NO: 2986 - DNA, 24 bp, Homo sapiens
gtgaatagattttcatgacatcga

SEQ ID NO: 2987 - DNA, 21 bp, Homo sapiens
tatttgcgtggcttttacgaa

SEQ ID NO: 2988 - DNA, 23 bp, Homo sapiens
aagcttttattgatactgtgtag

SEQ ID NO: 2989 - DNA, 17 bp, Homo sapiens
tttggtccaggtgtcag

SEQ ID NO: 2990 - DNA, 24 bp, Homo sapiens
tcctgtattgtttatatatgaaat

SEQ ID NO: 2991 - DNA, 20 bp, Homo sapiens
tttggaaaaacctgattctg

SEQ ID NO: 2992 - DNA, 21 bp, Homo sapiens
atctgcctcaaggaagttggt

SEQ ID NO: 2993 - DNA, 19 bp, Homo sapiens
gaggactggcaatattttg

SEQ ID NO: 2994 - DNA, 22 bp, Homo sapiens
acattattaataaccaatcagt

SEQ ID NO: 2995 - DNA, 21 bp, Homo sapiens
gttctttagtccacaaccaac

SEQ ID NO: 2996 - DNA, 21 bp, Homo sapiens
agctgaagacagttgacagaa

SEQ ID NO: 2997 - DNA, 27 bp, Homo sapiens
gatggttaaacttaaaactttaattac

SEQ ID NO: 2998 - DNA, 18 bp, Homo sapiens
agcaccacaattcctggc

SEQ ID NO: 2999 - DNA, 22 bp, Homo sapiens
agtgagccaatatatttgaatc

SEQ ID NO: 3000 - DNA, 22 bp, Homo sapiens
tttgaatccttatttccgttgg

SEQ ID NO: 3001 - DNA, 20 bp, Homo sapiens
acagggctatgaagtttctg

SEQ ID NO: 3002 - DNA, 20 bp, Homo sapiens
tgatttggaaaatggacagt

SEQ ID NO: 3003 - DNA, 23 bp, Homo sapiens
gccaacatgttgatttcatattt

SEQ ID NO: 3004 - DNA, 20 bp, Homo sapiens
tcatgggtttcaaatgtgtt

SEQ ID NO: 3005 - DNA, 18 bp, Homo sapiens
gacatgaagtttgtgggc

SEQ ID NO: 3006 - DNA, 18 bp, Homo sapiens
ggttgaatcctgaagccc

SEQ ID NO: 3007 - DNA, 23 bp, Homo sapiens
tatcgtttctcattacctgatac

SEQ ID NO: 3008 - DNA, 16 bp, Homo sapiens
ggcacagcggtactgc

SEQ ID NO: 3009 - DNA, 24 bp, Homo sapiens
attaagctgtgtaatgtttgtaaa

SEQ ID NO: 3010 - DNA, 19 bp, Homo sapiens
ctcagattgcatgcccaat

SEQ ID NO: 3011 - DNA, 22 bp, Homo sapiens
tgacaaaagagagaggatgggc

SEQ ID NO: 3012 - DNA, 22 bp, Homo sapiens
ttgtccttacagtctccctctt

SEQ ID NO: 3013 - DNA, 20 bp, Homo sapiens
tcctgcatcattaggaatgc

SEQ ID NO: 3014 - DNA, 22 bp, Homo sapiens
actaaacgagtgacattcattt

SEQ ID NO: 3015 - DNA, 17 bp, Homo sapiens
agggcaacggcaatgtg

SEQ ID NO: 3016 - DNA, 24 bp, Homo sapiens
ccaaaaataagttttattttatgt

SEQ ID NO: 3017 - DNA, 19 bp, Homo sapiens
gattataccaagtggcact

SEQ ID NO: 3018 - DNA, 23 bp, Homo sapiens
acattaattaggtgaagtttgcc

SEQ ID NO: 3019 - DNA, 21 bp, Homo sapiens
cttatattatgcacatgtgtg

SEQ ID NO: 3020 - DNA, 21 bp, Homo sapiens
tcttatttaagtgaattcagc

SEQ ID NO: 3021 - DNA, 21 bp, Homo sapiens
acatcttcaaaggaatatcac

SEQ ID NO: 3022 - DNA, 19 bp, Homo sapiens
ttacctgtttgtaagtgcc

SEQ ID NO: 3023 - DNA, 22 bp, Homo sapiens
caaactagagattgatctgtaa

SEQ ID NO: 3024 - DNA, 19 bp, Homo sapiens
caaactgctctaaacctgc

SEQ ID NO: 3025 - DNA, 20 bp, Homo sapiens
tggtactgtgcaaataggac

SEQ ID NO: 3026 - DNA, 21 bp, Homo sapiens
ggtggtaatttgttcagtagc

SEQ ID NO: 3027 - DNA, 21 bp, Homo sapiens
ggatcatacacctttcaatgc

SEQ ID NO: 3028 - DNA, 20 bp, Homo sapiens
ttatttgtttgatgcatttt

SEQ ID NO: 3029 - DNA, 21 bp, Homo sapiens
gtggtaatttcttacaggtgc

SEQ ID NO: 3030 - DNA, 21 bp, Homo sapiens
aagtcagaaacttaccattta

SEQ ID NO: 3031 - DNA, 20 bp, Homo sapiens
aaaactgctgaaatgtgttt

SEQ ID NO: 3032 - DNA, 19 bp, Homo sapiens
accacttagagttcttgca

SEQ ID NO: 3033 - DNA, 20 bp, Homo sapiens
ataatgttttcagtcttccc

SEQ ID NO: 3034 - DNA, 20 bp, Homo sapiens
aagaagctgatttttgtctg

SEQ ID NO: 3035 - DNA, 19 bp, Homo sapiens
tcatcttagtgtgcaggtg

SEQ ID NO: 3036 - DNA, 21 bp, Homo sapiens
tttcttctttagttgtcattt

SEQ ID NO: 3037 - DNA, 18 bp, Homo sapiens
tggtttgcaacctccaat

SEQ ID NO: 3038 - DNA, 21 bp, Homo sapiens
gcagattttgtgagtagatgc

SEQ ID NO: 3039 - DNA, 23 bp, Homo sapiens
ggcagattgtgttcaaacttaca

SEQ ID NO: 3040 - DNA, 27 bp, Homo sapiens
tgttaaatattttttattttactcacc

SEQ ID NO: 3041 - DNA, 17 bp, Homo sapiens
ctcttttccggttgctt

SEQ ID NO: 3042 - DNA, 21 bp, Homo sapiens
gaattctccccagtgtcatta

SEQ ID NO: 3043 - DNA, 22 bp, Homo sapiens
ggtcattttaacaccactgtaa

SEQ ID NO: 3044 - DNA, 21 bp, Homo sapiens
acatggtctctttctcagata

SEQ ID NO: 3045 - DNA, 18 bp, Homo sapiens
ataatgacattcaggcac

SEQ ID NO: 3046 - DNA, 18 bp, Homo sapiens
tggctgaaacctgagcaa

SEQ ID NO: 3047 - DNA, 21 bp, Homo sapiens
caactggaagagttagtcttc

SEQ ID NO: 3048 - DNA, 19 bp, Homo sapiens
gctgcttttcttctcctcc

SEQ ID NO: 3049 - DNA, 21 bp, Homo sapiens
ggaattcaggctgaaatgatc

SEQ ID NO: 3050 - DNA, 16 bp, Homo sapiens
tctgcatcctaacgcc

SEQ ID NO: 3051 - DNA, 23 bp, Homo sapiens
tacactactacttacattacacc

SEQ ID NO: 3052 - DNA, 16 bp, Homo sapiens
cctacctacactgccc

SEQ ID NO: 3053 - DNA, 23 bp, Homo sapiens
aatgatgccatcagctttggaga

SEQ ID NO: 3054 - DNA, 24 bp, Homo sapiens
gctgaaagtattcagttctgtacc

SEQ ID NO: 3055 - DNA, 16 bp, Homo sapiens
gaattgctatgggcgt

SEQ ID NO: 3056 - DNA, 19 bp, Homo sapiens
ccaagcagtatgtggactc

SEQ ID NO: 3057 - DNA, 23 bp, Homo sapiens
actgaggcctgctgagaaaaggg

SEQ ID NO: 3058 - DNA, 19 bp, Homo sapiens
aggtcttttcccaaggctg

SEQ ID NO: 3059 - DNA, 21 bp, Homo sapiens
gaatacaaaaccgctgggtac

SEQ ID NO: 3060 - DNA, 23 bp, Homo sapiens
tgtttcaggtcattgaaatgttg

SEQ ID NO: 3061 - DNA, 23 bp, Homo sapiens
tgacaaaaagtgcttcggtctgg

SEQ ID NO: 3062 - DNA, 21 bp, Homo sapiens
ggagaatgcttttttgtaaac

SEQ ID NO: 3063 - DNA, 18 bp, Homo sapiens
gctcccacgttctccagc

SEQ ID NO: 3064 - DNA, 19 bp, Homo sapiens
aagtattgctggcaagtgg

SEQ ID NO: 3065 - DNA, 21 bp, Homo sapiens
tgaagcaaaataggcaaagat

SEQ ID NO: 3066 - DNA, 18 bp, Homo sapiens
cgtgtctgcagtttccag

SEQ ID NO: 3067 - DNA, 22 bp, Homo sapiens
tgaaagaactgggcaattcatg

SEQ ID NO: 3068 - DNA, 16 bp, Homo sapiens
cagccgggtgaatgcg

SEQ ID NO: 3069 - DNA, 19 bp, Homo sapiens
tttgtgcagatgaatagac

SEQ ID NO: 3070 - DNA, 17 bp, Homo sapiens
gtcggaaggaccagcag

SEQ ID NO: 3071 - DNA, 24 bp, Homo sapiens
tctttaggttcaacctcctaaaac

SEQ ID NO: 3072 - DNA, 22 bp, Homo sapiens
acattttcttgtgatggccacc

SEQ ID NO: 3073 - DNA, 20 bp, Homo sapiens
gagaacgtgaagttcattcg

SEQ ID NO: 3074 - DNA, 22 bp, Homo sapiens
tgctaatacacttttaagaaat

SEQ ID NO: 3075 - DNA, 22 bp, Homo sapiens
gaacattggctgtttcaagcgc

SEQ ID NO: 3076 - DNA, 24 bp, Homo sapiens
ttagtttatgtctctctgcgccac

SEQ ID NO: 3077 - DNA, 22 bp, Homo sapiens
tcactgtttgctgtgtacaaat

SEQ ID NO: 3078 - DNA, 23 bp, Homo sapiens
cagagtgactatgttagaattac

SEQ ID NO: 3079 - DNA, 20 bp, Homo sapiens
ataagcccatcatcaggtaa

SEQ ID NO: 3080 - DNA, 20 bp, Homo sapiens
acaacccgctgtgtgttaag

SEQ ID NO: 3081 - DNA, 20 bp, Homo sapiens
ctctaggttatggagcacat

SEQ ID NO: 3082 - DNA, 20 bp, Homo sapiens
agtctgtgtgcttaaatacc

SEQ ID NO: 3083 - DNA, 19 bp, Homo sapiens
tagagggctttttagggag

SEQ ID NO: 3084 - DNA, 20 bp, Homo sapiens
gagggggagaagatcttacc

SEQ ID NO: 3085 - DNA, 22 bp, Homo sapiens
gggaactactgttaattgtttg

SEQ ID NO: 3086 - DNA, 24 bp, Homo sapiens
aatttctctcacaggctttaagtc

SEQ ID NO: 3087 - DNA, 25 bp, Homo sapiens
ttagaaaatggaattgtaaggtaag

SEQ ID NO: 3088 - DNA, 21 bp, Homo sapiens
aggaataactaaagaacctac

SEQ ID NO: 3089 - DNA, 17 bp, Homo sapiens
ggctttctccaaccagc

SEQ ID NO: 3090 - DNA, 24 bp, Homo sapiens
tgcctagatattaaaaattaattt

SEQ ID NO: 3091 - DNA, 16 bp, Homo sapiens
ctctggacggtgaacg

SEQ ID NO: 3092 - DNA, 24 bp, Homo sapiens
aaaaaaagagaatccaaattcctc

SEQ ID NO: 3093 - DNA, 19 bp, Homo sapiens
cagccacattctggtaacc

SEQ ID NO: 3094 - DNA, 21 bp, Homo sapiens
gatagatactccctcaggctg

SEQ ID NO: 3095 - DNA, 22 bp, Homo sapiens
tcaataaacaaatgagcttgcc

SEQ ID NO: 3096 - DNA, 23 bp, Homo sapiens
cagtggacatgtccaacgagatc

SEQ ID NO: 3097 - DNA, 23 bp, Homo sapiens
gcaacttgtgtagtaatttcatt

SEQ ID NO: 3098 - DNA, 24 bp, Homo sapiens
tgtatttctatacacatacatgct

SEQ ID NO: 3099 - DNA, 20 bp, Homo sapiens
ggacacaaaagccctgtcac

SEQ ID NO: 3100 - DNA, 21 bp, Homo sapiens
atggctcgacctaggagtaac

SEQ ID NO: 3101 - DNA, 30 bp, Homo sapiens
taattatatttaatgatcatatacaaattc

SEQ ID NO: 3102 - DNA, 18 bp, Homo sapiens
tgggttggagcaagctca

SEQ ID NO: 3103 - DNA, 22 bp, Homo sapiens
tgtacaataggtacatagactg

SEQ ID NO: 3104 - DNA, 18 bp, Homo sapiens
tcactggcagagacagct

SEQ ID NO: 3105 - DNA, 24 bp, Homo sapiens
ggtagtaagattacctattatatt

SEQ ID NO: 3106 - DNA, 22 bp, Homo sapiens
cctatctgattgtatgacttca

SEQ ID NO: 3107 - DNA, 18 bp, Homo sapiens
aagtgtgagcagagacgg

SEQ ID NO: 3108 - DNA, 22 bp, Homo sapiens
tgtgtttcatggttaaaatgat

SEQ ID NO: 3109 - DNA, 21 bp, Homo sapiens
tggtcacacagaagagataac

SEQ ID NO: 3110 - DNA, 24 bp, Homo sapiens
aaatggatatattaaaaatgctat

SEQ ID NO: 3111 - DNA, 23 bp, Homo sapiens
gtttttatctcatacttaatttt

SEQ ID NO: 3112 - DNA, 20 bp, Homo sapiens
cccatatgatgcaggttccg

SEQ ID NO: 3113 - DNA, 20 bp, Homo sapiens
tgagtcactttggttgtttt

SEQ ID NO: 3114 - DNA, 20 bp, Homo sapiens
tgcaaacaaataagctggtt

SEQ ID NO: 3115 - DNA, 20 bp, Homo sapiens
ctttctttgttttactctga

SEQ ID NO: 3116 - DNA, 22 bp, Homo sapiens
ccatttctatttctgatggctg

SEQ ID NO: 3117 - DNA, 20 bp, Homo sapiens
tcatcacagcctacacaaac

SEQ ID NO: 3118 - DNA, 22 bp, Homo sapiens
gggagaagattaaggtataaac

SEQ ID NO: 3119 - DNA, 16 bp, Homo sapiens
gttgtgcttgggtgcc

SEQ ID NO: 3120 - DNA, 19 bp, Homo sapiens
aaggctttcttcccctcat

SEQ ID NO: 3121 - DNA, 24 bp, Homo sapiens
ttttattatactttaagtttcatt

SEQ ID NO: 3122 - DNA, 19 bp, Homo sapiens
cgtgctgcttgtaaatctg

SEQ ID NO: 3123 - DNA, 24 bp, Homo sapiens
tgagagttaaaaaaaatagttgtc

SEQ ID NO: 3124 - DNA, 20 bp, Homo sapiens
aacagctggcaactgtcagg

SEQ ID NO: 3125 - DNA, 21 bp, Homo sapiens
attactatatctgacacgttt

SEQ ID NO: 3126 - DNA, 21 bp, Homo sapiens
ctggggatatgctgataatat

SEQ ID NO: 3127 - DNA, 17 bp, Homo sapiens
ccagcttgggcggcaga

SEQ ID NO: 3128 - DNA, 19 bp, Homo sapiens
ctccttgaggtgtgagaag

SEQ ID NO: 3129 - DNA, 19 bp, Homo sapiens
aagtgtttacctggtactg

SEQ ID NO: 3130 - DNA, 18 bp, Homo sapiens
gccagttttgggctgtca

SEQ ID NO: 3131 - DNA, 22 bp, Homo sapiens
tgtttactcttcaaccttaaaa

SEQ ID NO: 3132 - DNA, 21 bp, Homo sapiens
agagatttaaagatggtcttg

SEQ ID NO: 3133 - DNA, 19 bp, Homo sapiens
atgtccgtactgttcatgc

SEQ ID NO: 3134 - DNA, 23 bp, Homo sapiens
tctgtcttctgatgacatatagc

SEQ ID NO: 3135 - DNA, 24 bp, Homo sapiens
ctactttgcactaaataaccacaa

SEQ ID NO: 3136 - DNA, 17 bp, Homo sapiens
gctctctccaggctctg

SEQ ID NO: 3137 - DNA, 20 bp, Homo sapiens
acagatgagctagaaatact

SEQ ID NO: 3138 - DNA, 18 bp, Homo sapiens
gtgggttcccccagtgct

SEQ ID NO: 3139 - DNA, 19 bp, Homo sapiens
ttttaccttgttccttgct

SEQ ID NO: 3140 - DNA, 29 bp, Homo sapiens
actttttatttttcttcattttagagtcc

SEQ ID NO: 3141 - DNA, 19 bp, Homo sapiens
cacagattgctctggtggg

SEQ ID NO: 3142 - DNA, 24 bp, Homo sapiens
cttactttgtttagagcttaaatt

SEQ ID NO: 3143 - DNA, 17 bp, Homo sapiens
accacaggtactggagc

SEQ ID NO: 3144 - DNA, 22 bp, Homo sapiens
aatgcgtaaaataattattgcc

SEQ ID NO: 3145 - DNA, 24 bp, Homo sapiens
caagccttttatccatgacaaagg

SEQ ID NO: 3146 - DNA, 24 bp, Homo sapiens
ttctgctttcgctgctgcacctgt

SEQ ID NO: 3147 - DNA, 18 bp, Homo sapiens
ctgctgtggggttgctag

SEQ ID NO: 3148 - DNA, 21 bp, Homo sapiens
ccatgctattcatcacctggg

SEQ ID NO: 3149 - DNA, 22 bp, Homo sapiens
cagctgttccacatggcccatg

SEQ ID NO: 3150 - DNA, 24 bp, Homo sapiens
gcactcgattgaaatccaaatgac

SEQ ID NO: 3151 - DNA, 20 bp, Homo sapiens
gatccagttcagagacgagc

SEQ ID NO: 3152 - DNA, 23 bp, Homo sapiens
gtctccctgaaagcaaactgcac

SEQ ID NO: 3153 - DNA, 23 bp, Homo sapiens
tgttcctttactctttcactctg

SEQ ID NO: 3154 - DNA, 19 bp, Homo sapiens
agcttggctccaggtctgc

SEQ ID NO: 3155 - DNA, 20 bp, Homo sapiens
gtgttgtttttccctttggt

SEQ ID NO: 3156 - DNA, 22 bp, Homo sapiens
gtttttatcatggtttctagcg

SEQ ID NO: 3157 - DNA, 19 bp, Homo sapiens
gagaccatgagtgattgtt

SEQ ID NO: 3158 - DNA, 23 bp, Homo sapiens
acatccattccaaaatatgtctg

SEQ ID NO: 3159 - DNA, 22 bp, Homo sapiens
aacctgaaaaatcttaggtgac

SEQ ID NO: 3160 - DNA, 17 bp, Homo sapiens
ttgacttggtgtttggg

SEQ ID NO: 3161 - DNA, 24 bp, Homo sapiens
cttgagtgttttaaaggaatggcc

SEQ ID NO: 3162 - DNA, 16 bp, Homo sapiens
atccatcggcaggctc

SEQ ID NO: 3163 - DNA, 23 bp, Homo sapiens
acagattgttttaaaagagtcac

SEQ ID NO: 3164 - DNA, 22 bp, Homo sapiens
agaatggtgaacgggttaatca

SEQ ID NO: 3165 - DNA, 22 bp, Homo sapiens
acagaagccttccccttttgct

SEQ ID NO: 3166 - DNA, 24 bp, Homo sapiens
gctgtgggggagttaaatattaat

SEQ ID NO: 3167 - DNA, 22 bp, Homo sapiens
gcgacacgtagtcagactctag

SEQ ID NO: 3168 - DNA, 22 bp, Homo sapiens
cacacaaacagctatttttgtg

SEQ ID NO: 3169 - DNA, 23 bp, Homo sapiens
attacgcgcccaagggggaaggt

SEQ ID NO: 3170 - DNA, 22 bp, Homo sapiens
tggtgtttcttattcaaaatgt

SEQ ID NO: 3171 - DNA, 24 bp, Homo sapiens
gagtttttctatcttccagagttc

SEQ ID NO: 3172 - DNA, 20 bp, Homo sapiens
ttctcttatttggggactca

SEQ ID NO: 3173 - DNA, 18 bp, Homo sapiens
acaacttggcgactctca

SEQ ID NO: 3174 - DNA, 22 bp, Homo sapiens
tggaaaattacaaaataaccac

SEQ ID NO: 3175 - DNA, 25 bp, Homo sapiens
atttgtatttttttatagatcaaag

SEQ ID NO: 3176 - DNA, 20 bp, Homo sapiens
ccttcacggttaactaggaa

SEQ ID NO: 3177 - DNA, 28 bp, Homo sapiens
agtggcaaaagtaaattaattatgatag

SEQ ID NO: 3178 - DNA, 25 bp, Homo sapiens
acatcagtcatagattcaaaagatg

SEQ ID NO: 3179 - DNA, 20 bp, Homo sapiens
tcttttaaactatgggcaaa

SEQ ID NO: 3180 - DNA, 21 bp, Homo sapiens
ttctgtctggaatgtcaaaac

SEQ ID NO: 3181 - DNA, 23 bp, Homo sapiens
cctcctttcactaaaatgttttt

SEQ ID NO: 3182 - DNA, 22 bp, Homo sapiens
aattctttttcctgtagtttga

SEQ ID NO: 3183 - DNA, 20 bp, Homo sapiens
ccctatcactatggctccca

SEQ ID NO: 3184 - DNA, 24 bp, Homo sapiens
ctaagttgttgttgttgttgttgt

SEQ ID NO: 3185 - DNA, 20 bp, Homo sapiens
cttggaggaagagtaccgca

SEQ ID NO: 3186 - DNA, 24 bp, Homo sapiens
ttcttaccttgataggctaaaaac

SEQ ID NO: 3187 - DNA, 16 bp, Homo sapiens
agcgttgcctggagcc

SEQ ID NO: 3188 - DNA, 19 bp, Homo sapiens
aagcacagtgccgctattg

SEQ ID NO: 3189 - DNA, 23 bp, Homo sapiens
catggagaatggcctcaaagggg

SEQ ID NO: 3190 - DNA, 24 bp, Homo sapiens
gcatggggtcatcttctctggctc

SEQ ID NO: 3191 - DNA, 23 bp, Homo sapiens
gaagactcccagacactcaagga

SEQ ID NO: 3192 - DNA, 19 bp, Homo sapiens
tggacacatacaaggtagc

SEQ ID NO: 3193 - DNA, 25 bp, Homo sapiens
acataatgatttctagttgtctgtc

SEQ ID NO: 3194 - DNA, 20 bp, Homo sapiens
tgcagaaatctctctaaacc

SEQ ID NO: 3195 - DNA, 27 bp, Homo sapiens
gtataaatttaaaattaggtaaaacac

SEQ ID NO: 3196 - DNA, 20 bp, Homo sapiens
gcagacatctagggagctta

SEQ ID NO: 3197 - DNA, 21 bp, Homo sapiens
agtacgagtaaaaacaaaagc

SEQ ID NO: 3198 - DNA, 18 bp, Homo sapiens
gcagagaaataagggtgg

SEQ ID NO: 3199 - DNA, 20 bp, Homo sapiens
tactgaacagctataggttt

SEQ ID NO: 3200 - DNA, 21 bp, Homo sapiens
tgagacacttgacctcaatga

SEQ ID NO: 3201 - DNA, 24 bp, Homo sapiens
ggtgataggtatgtggggtcttat

SEQ ID NO: 3202 - DNA, 21 bp, Homo sapiens
ccttcaatgatctcatgcagt

SEQ ID NO: 3203 - DNA, 22 bp, Homo sapiens
aactttaataaagaaatacaac

SEQ ID NO: 3204 - DNA, 21 bp, Homo sapiens
ggtatactgggcaaattacta

SEQ ID NO: 3205 - DNA, 23 bp, Homo sapiens
ttaacttacctgtatatcaacag

SEQ ID NO: 3206 - DNA, 18 bp, Homo sapiens
acctccctaatcttctgg

SEQ ID NO: 3207 - DNA, 19 bp, Homo sapiens
aaatgggaacacaggatac

SEQ ID NO: 3208 - DNA, 21 bp, Homo sapiens
gtttttttcttctccttccct

SEQ ID NO: 3209 - DNA, 22 bp, Homo sapiens
gtttaagtgagtcaaatattca

SEQ ID NO: 3210 - DNA, 21 bp, Homo sapiens
tgtctataatgtcatgggttc

SEQ ID NO: 3211 - DNA, 21 bp, Homo sapiens
agcggtgatgttaccatattc

SEQ ID NO: 3212 - DNA, 21 bp, Homo sapiens
ctacccattaatgttactgag

SEQ ID NO: 3213 - DNA, 19 bp, Homo sapiens
gttggcatttgataacacc

SEQ ID NO: 3214 - DNA, 22 bp, Homo sapiens
caaaggcttcactttaatcagg

SEQ ID NO: 3215 - DNA, 18 bp, Homo sapiens
ttggtggcaattgagaga

SEQ ID NO: 3216 - DNA, 19 bp, Homo sapiens
tcagtatgagtatagttac

SEQ ID NO: 3217 - DNA, 18 bp, Homo sapiens
gagttggaaccagcatca

SEQ ID NO: 3218 - DNA, 20 bp, Homo sapiens
aagggtgaatttaccttggt

SEQ ID NO: 3219 - DNA, 23 bp, Homo sapiens
aagtaattatttatatttccggt

SEQ ID NO: 3220 - DNA, 20 bp, Homo sapiens
agatttctacagcattatct

SEQ ID NO: 3221 - DNA, 20 bp, Homo sapiens
tgccacaaaaagattttctg

SEQ ID NO: 3222 - DNA, 23 bp, Homo sapiens
tcatatgtccaggaaaatgatgc

SEQ ID NO: 3223 - DNA, 21 bp, Homo sapiens
ttatcattcattttgaggtgt

SEQ ID NO: 3224 - DNA, 20 bp, Homo sapiens
acagttgaaagttcggtgag

SEQ ID NO: 3225 - DNA, 19 bp, Homo sapiens
ttggaactcagaccaatct

SEQ ID NO: 3226 - DNA, 20 bp, Homo sapiens
atccaattactttctgcagg

SEQ ID NO: 3227 - DNA, 22 bp, Homo sapiens
ccttctctctagttatactgaa

SEQ ID NO: 3228 - DNA, 18 bp, Homo sapiens
gactccagagaccatgca

SEQ ID NO: 3229 - DNA, 21 bp, Homo sapiens
cagacttaagcctctactcac

SEQ ID NO: 3230 - DNA, 18 bp, Homo sapiens
tttattgagtgccaggaa

SEQ ID NO: 3231 - DNA, 22 bp, Homo sapiens
atacattccacatttacctgca

SEQ ID NO: 3232 - DNA, 20 bp, Homo sapiens
gctggtgaattgttactagg

SEQ ID NO: 3233 - DNA, 23 bp, Homo sapiens
taatgttaaggcaaattagccta

SEQ ID NO: 3234 - DNA, 26 bp, Homo sapiens
aattttaaatatgttttgacagagtg

SEQ ID NO: 3235 - DNA, 23 bp, Homo sapiens
tgctgtcaaaaaacactttaaat

SEQ ID NO: 3236 - DNA, 23 bp, Homo sapiens
tcttttactaggtaaaataaagc

SEQ ID NO: 3237 - DNA, 21 bp, Homo sapiens
ttcttcaaaatttgacttacc

SEQ ID NO: 3238 - DNA, 17 bp, Homo sapiens
gacaagatacctcatgc

SEQ ID NO: 3239 - DNA, 20 bp, Homo sapiens
tgcatcttcgattcactctg

SEQ ID NO: 3240 - DNA, 19 bp, Homo sapiens
acaaagctgcaagtgaatc

SEQ ID NO: 3241 - DNA, 20 bp, Homo sapiens
tgtcctcccttgagcctttc

SEQ ID NO: 3242 - DNA, 20 bp, Homo sapiens
ccaccactctcttacctgtt

SEQ ID NO: 3243 - DNA, 22 bp, Homo sapiens
taaatattacataaacactaca

SEQ ID NO: 3244 - DNA, 19 bp, Homo sapiens
agcagagaactatggtcat

SEQ ID NO: 3245 - DNA, 22 bp, Homo sapiens
ttcaaagttaccttatagattc

SEQ ID NO: 3246 - DNA, 20 bp, Homo sapiens
agggatagacagaaatcaga

SEQ ID NO: 3247 - DNA, 22 bp, Homo sapiens
atgagttttgtcttcaaacagg

SEQ ID NO: 3248 - DNA, 18 bp, Homo sapiens
cgagagaggagacgttta

SEQ ID NO: 3249 - DNA, 24 bp, Homo sapiens
aggagaaaagtaaatattatcttt

SEQ ID NO: 3250 - DNA, 19 bp, Homo sapiens
atggtatgaccccatctac

SEQ ID NO: 3251 - DNA, 21 bp, Homo sapiens
caagaagccactattaccttc

SEQ ID NO: 3252 - DNA, 19 bp, Homo sapiens
agctacaagtcctggatgg

SEQ ID NO: 3253 - DNA, 27 bp, Homo sapiens
tagttaaataacatctctgtaaacgtc

SEQ ID NO: 3254 - DNA, 24 bp, Homo sapiens
acatttggagtttttaaattaaca

SEQ ID NO: 3255 - DNA, 22 bp, Homo sapiens
gccatgaggttggatagtagat

SEQ ID NO: 3256 - DNA, 24 bp, Homo sapiens
cacttagattttattacttctact

SEQ ID NO: 3257 - DNA, 18 bp, Homo sapiens
cagcagctgacacatgat

SEQ ID NO: 3258 - DNA, 24 bp, Homo sapiens
aaacatcacaaatgattaaacaaa

SEQ ID NO: 3259 - DNA, 22 bp, Homo sapiens
aaggtgatccagcatattagag

SEQ ID NO: 3260 - DNA, 21 bp, Homo sapiens
ggaatacaaattccgtttaac

SEQ ID NO: 3261 - DNA, 18 bp, Homo sapiens
tgcagatatcacccaggc

SEQ ID NO: 3262 - DNA, 19 bp, Homo sapiens
cctcccgcagcttacctat

SEQ ID NO: 3263 - DNA, 24 bp, Homo sapiens
ggacaatcttattatttgtttagt

SEQ ID NO: 3264 - DNA, 22 bp, Homo sapiens
ggcactcaaatctactttatac

SEQ ID NO: 3265 - DNA, 24 bp, Homo sapiens
cttttagttttaaagtatcatgtt

SEQ ID NO: 3266 - DNA, 19 bp, Homo sapiens
ttccttgggagagagacac

SEQ ID NO: 3267 - DNA, 23 bp, Homo sapiens
aagattttatatgttccaaaggc

SEQ ID NO: 3268 - DNA, 20 bp, Homo sapiens
gaatccagacgctgaaagag

SEQ ID NO: 3269 - DNA, 20 bp, Homo sapiens
atgaaactgaagaaggagtg

SEQ ID NO: 3270 - DNA, 21 bp, Homo sapiens
tggaacgtatttatcagaaca

SEQ ID NO: 3271 - DNA, 29 bp, Homo sapiens
gtgagaaataataaattttatatagtata

SEQ ID NO: 3272 - DNA, 23 bp, Homo sapiens
atggattcctaaaatacatgcct

SEQ ID NO: 3273 - DNA, 19 bp, Homo sapiens
tcctttgttaactgggttt

SEQ ID NO: 3274 - DNA, 22 bp, Homo sapiens
tgttaactgttttctgccaagc

SEQ ID NO: 3275 - DNA, 22 bp, Homo sapiens
acattgtttagatggttcattt

SEQ ID NO: 3276 - DNA, 25 bp, Homo sapiens
gcagaccttattaaaatgatcaaag

SEQ ID NO: 3277 - DNA, 24 bp, Homo sapiens
agcaatatagtatataggaaaaat

SEQ ID NO: 3278 - DNA, 22 bp, Homo sapiens
aatgctttgaagttatgtggtc

SEQ ID NO: 3279 - DNA, 24 bp, Homo sapiens
tagcctgttcttaaaaaagtagtg

SEQ ID NO: 3280 - DNA, 22 bp, Homo sapiens
gagttgatacataatcaccaag

SEQ ID NO: 3281 - DNA, 22 bp, Homo sapiens
tggtttcattgactcacctctt

SEQ ID NO: 3282 - DNA, 24 bp, Homo sapiens
aatgactaaaaaattattactttt

SEQ ID NO: 3283 - DNA, 17 bp, Homo sapiens
ggagggatgcacttgtg

SEQ ID NO: 3284 - DNA, 23 bp, Homo sapiens
agcaatataatttaattactact

SEQ ID NO: 3285 - DNA, 21 bp, Homo sapiens
tgcctagctcttcttcagtca

SEQ ID NO: 3286 - DNA, 22 bp, Homo sapiens
acttatcctcagaatgtctttt

SEQ ID NO: 3287 - DNA, 19 bp, Homo sapiens
actaacttggctccatgct

SEQ ID NO: 3288 - DNA, 17 bp, Homo sapiens
ctcagcccatccctaca

SEQ ID NO: 3289 - DNA, 22 bp, Homo sapiens
ccttaggttaaatttgcttggt

SEQ ID NO: 3290 - DNA, 19 bp, Homo sapiens
tgcacaagagagaaagcaa

SEQ ID NO: 3291 - DNA, 24 bp, Homo sapiens
tcagtttaatttcagttcttgttt

SEQ ID NO: 3292 - DNA, 19 bp, Homo sapiens
ccgaatgcagcttgggaga

SEQ ID NO: 3293 - DNA, 25 bp, Homo sapiens
ctcttatcaaagctgagatacttac

SEQ ID NO: 3294 - DNA, 18 bp, Homo sapiens
aaagccagtggttccaag

SEQ ID NO: 3295 - DNA, 25 bp, Homo sapiens
gatgatttggttcatgaactatttc

SEQ ID NO: 3296 - DNA, 19 bp, Homo sapiens
tggtattgcttaagcagtc

SEQ ID NO: 3297 - DNA, 24 bp, Homo sapiens
tggcgacaaaatatgcactagtag

SEQ ID NO: 3298 - DNA, 20 bp, Homo sapiens
aaccaatctggaataaaacg

SEQ ID NO: 3299 - DNA, 19 bp, Homo sapiens
ttagtccattgctgcttgg

SEQ ID NO: 3300 - DNA, 24 bp, Homo sapiens
tctggtagaaggattcaaagtatc

SEQ ID NO: 3301 - DNA, 20 bp, Homo sapiens
tgtccgagttttaaaaagct

SEQ ID NO: 3302 - DNA, 26 bp, Homo sapiens
gaaaatattcatcatgaacagtcttc

SEQ ID NO: 3303 - DNA, 21 bp, Homo sapiens
aatacagtcaacataaaacct

SEQ ID NO: 3304 - DNA, 19 bp, Homo sapiens
tgagaactccagaaaatgt

SEQ ID NO: 3305 - DNA, 26 bp, Homo sapiens
ttaatttacttacaatagatactttg

SEQ ID NO: 3306 - DNA, 24 bp, Homo sapiens
gactaattttgtattctttttttc

SEQ ID NO: 3307 - DNA, 23 bp, Homo sapiens
tctgaaatggattgaaaacagaa

SEQ ID NO: 3308 - DNA, 26 bp, Homo sapiens
aatacaatattttttaccagtattat

SEQ ID NO: 3309 - DNA, 18 bp, Homo sapiens
tgaggtcttgctttgagt

SEQ ID NO: 3310 - DNA, 20 bp, Homo sapiens
tctattacatctaatacacc

SEQ ID NO: 3311 - DNA, 26 bp, Homo sapiens
tcaacaggattatttatcaaggtaag

SEQ ID NO: 3312 - DNA, 23 bp, Homo sapiens
tccaaataagaaactcttaatac

SEQ ID NO: 3313 - DNA, 18 bp, Homo sapiens
ccaagcaactgaaacgga

SEQ ID NO: 3314 - DNA, 21 bp, Homo sapiens
acatctgaaaaccaaccagtt

SEQ ID NO: 3315 - DNA, 19 bp, Homo sapiens
gtggcaaatgatgagcttc

SEQ ID NO: 3316 - DNA, 23 bp, Homo sapiens
acaaactaatcctatagtcttac

SEQ ID NO: 3317 - DNA, 22 bp, Homo sapiens
acttttaaaggtcctcgaaaat

SEQ ID NO: 3318 - DNA, 20 bp, Homo sapiens
ctgtagtctctgcgcaagtt

SEQ ID NO: 3319 - DNA, 24 bp, Homo sapiens
gcaaaaatagtttccttgatcctt

SEQ ID NO: 3320 - DNA, 19 bp, Homo sapiens
ttctccgttgcatcatcac

SEQ ID NO: 3321 - DNA, 21 bp, Homo sapiens
tctataaattgactttgtagt

SEQ ID NO: 3322 - DNA, 17 bp, Homo sapiens
tcagtttgagcaagggg

SEQ ID NO: 3323 - DNA, 21 bp, Homo sapiens
cagtagttcaaaagcggaaaa

SEQ ID NO: 3324 - DNA, 24 bp, Homo sapiens
atagtttccttcaggaaaaaatct

SEQ ID NO: 3325 - DNA, 23 bp, Homo sapiens
caaatcatgactctgaaaacctc

SEQ ID NO: 3326 - DNA, 22 bp, Homo sapiens
tggcataagaacataggaaagt

SEQ ID NO: 3327 - DNA, 21 bp, Homo sapiens
ggctgttgcactacagcttag

SEQ ID NO: 3328 - DNA, 19 bp, Homo sapiens
caatactcgccagcaatgc

SEQ ID NO: 3329 - DNA, 24 bp, Homo sapiens
cagttcaattaaaaaattagtaac

SEQ ID NO: 3330 - DNA, 19 bp, Homo sapiens
ctggagtgaatctgtgagg

SEQ ID NO: 3331 - DNA, 24 bp, Homo sapiens
cccatgctgatcaaaatttaaaaa

SEQ ID NO: 3332 - DNA, 20 bp, Homo sapiens
ccatagcagcctggagaact

SEQ ID NO: 3333 - DNA, 21 bp, Homo sapiens
tgctttaaaattgcttttaac

SEQ ID NO: 3334 - DNA, 22 bp, Homo sapiens
tcttcaaaatagcaaaaacaag

SEQ ID NO: 3335 - DNA, 28 bp, Homo sapiens
aactgatagatactattacaaaattaat

SEQ ID NO: 3336 - DNA, 18 bp, Homo sapiens
tgcagttcctcaggctca

SEQ ID NO: 3337 - DNA, 21 bp, Homo sapiens
tgctcaaataacaggtttgtc

SEQ ID NO: 3338 - DNA, 24 bp, Homo sapiens
gtgaatataaattgcttgcttgtg

SEQ ID NO: 3339 - DNA, 21 bp, Homo sapiens
tcttactttgtgtcctcttgt

SEQ ID NO: 3340 - DNA, 23 bp, Homo sapiens
tctttttcttataaatgttctgt

SEQ ID NO: 3341 - DNA, 22 bp, Homo sapiens
aggtcttcaataaccctaaaat

SEQ ID NO: 3342 - DNA, 20 bp, Homo sapiens
gtcgaacaggaatttaaacc

SEQ ID NO: 3343 - DNA, 21 bp, Homo sapiens
aactgctatgaaaagttgctg

SEQ ID NO: 3344 - DNA, 29 bp, Homo sapiens
atactacatattacttgccatagaataag

SEQ ID NO: 3345 - DNA, 17 bp, Homo sapiens
gtagcagccctgaatgg

SEQ ID NO: 3346 - DNA, 20 bp, Homo sapiens
ttcagaggtacacagaaagg

SEQ ID NO: 3347 - DNA, 19 bp, Homo sapiens
ttcttgttctaaggtagca

SEQ ID NO: 3348 - DNA, 21 bp, Homo sapiens
aatactaaagttttcctgttc

SEQ ID NO: 3349 - DNA, 24 bp, Homo sapiens
agacctctctatatgacaacatac

SEQ ID NO: 3350 - DNA, 21 bp, Homo sapiens
aacttacttcttttctaatcc

SEQ ID NO: 3351 - DNA, 19 bp, Homo sapiens
tgagaaacatgggattgtt

SEQ ID NO: 3352 - DNA, 20 bp, Homo sapiens
tccagcaacatatctgctac

SEQ ID NO: 3353 - DNA, 22 bp, Homo sapiens
tgtgattgtttctaatgtgctc

SEQ ID NO: 3354 - DNA, 21 bp, Homo sapiens
agagcattatgcaagagtatg

SEQ ID NO: 3355 - DNA, 22 bp, Homo sapiens
ttgtttttatgacttcaaaatc

SEQ ID NO: 3356 - DNA, 23 bp, Homo sapiens
ataggaatgacagaccacttctg

SEQ ID NO: 3357 - DNA, 17 bp, Homo sapiens
ggagggactctgtcatt

SEQ ID NO: 3358 - DNA, 23 bp, Homo sapiens
gaagttgcagtgagccgagattg

SEQ ID NO: 3359 - DNA, 22 bp, Homo sapiens
aggaactcaagaattgttagaa

SEQ ID NO: 3360 - DNA, 24 bp, Homo sapiens
ctccgtctcaaaagaaaagaaaag

SEQ ID NO: 3361 - DNA, 19 bp, Homo sapiens
aaatttctgaagaatcgtg

SEQ ID NO: 3362 - DNA, 23 bp, Homo sapiens
agattcccaattatagtggaggg

SEQ ID NO: 3363 - DNA, 23 bp, Homo sapiens
tgacttaaattttttgtttagct

SEQ ID NO: 3364 - DNA, 22 bp, Homo sapiens
accaaagaacatttcgatgaag

SEQ ID NO: 3365 - DNA, 21 bp, Homo sapiens
agttgtgttacactgatttgt

SEQ ID NO: 3366 - DNA, 18 bp, Homo sapiens
agcaaggaaaatccacga

SEQ ID NO: 3367 - DNA, 20 bp, Homo sapiens
gtggtggtggcattttttta

SEQ ID NO: 3368 - DNA, 22 bp, Homo sapiens
atgctctagcaaaatatgcatc

SEQ ID NO: 3369 - DNA, 20 bp, Homo sapiens
tcaccagctatacaacaagg

SEQ ID NO: 3370 - DNA, 24 bp, Homo sapiens
acaaactatattagttcattattc

SEQ ID NO: 3371 - DNA, 19 bp, Homo sapiens
agatgtgatggacaagctt

SEQ ID NO: 3372 - DNA, 28 bp, Homo sapiens
atatactcaaaattttaaattacatata

SEQ ID NO: 3373 - DNA, 22 bp, Homo sapiens
tgctgtggattatatgaactcc

SEQ ID NO: 3374 - DNA, 21 bp, Homo sapiens
ttgcccttactttaataacac

SEQ ID NO: 3375 - DNA, 24 bp, Homo sapiens
tgttagtaagacttttttggtctc

SEQ ID NO: 3376 - DNA, 21 bp, Homo sapiens
gaccaaaagtgtatctgcttg

SEQ ID NO: 3377 - DNA, 20 bp, Homo sapiens
aaaatgctactacttgtcac

SEQ ID NO: 3378 - DNA, 19 bp, Homo sapiens
aggataagaagaaccccac

SEQ ID NO: 3379 - DNA, 24 bp, Homo sapiens
ttgttaatcacagttaaattagga

SEQ ID NO: 3380 - DNA, 20 bp, Homo sapiens
gagccaaattacaaccgaac

SEQ ID NO: 3381 - DNA, 22 bp, Homo sapiens
aaagaaataaacttttctgttt

SEQ ID NO: 3382 - DNA, 21 bp, Homo sapiens
tggccaagtcttgttgataga

SEQ ID NO: 3383 - DNA, 23 bp, Homo sapiens
agaggggtagagagtctttaaag

SEQ ID NO: 3384 - DNA, 20 bp, Homo sapiens
caagccttgggctagctttt

SEQ ID NO: 3385 - DNA, 24 bp, Homo sapiens
aacacataagtacctgtgagcact

SEQ ID NO: 3386 - DNA, 16 bp, Homo sapiens
cgccgacctgattacc

SEQ ID NO: 3387 - DNA, 24 bp, Homo sapiens
ataggcaaagttttcccaatcatc

SEQ ID NO: 3388 - DNA, 20 bp, Homo sapiens
agatcataaacagttgggag

SEQ ID NO: 3389 - DNA, 24 bp, Homo sapiens
agatccgttctgtgaaggaaaagc

SEQ ID NO: 3390 - DNA, 20 bp, Homo sapiens
caggtctctgtcagtgatgt

SEQ ID NO: 3391 - DNA, 21 bp, Homo sapiens
ctggaaggaggccaatccctt

SEQ ID NO: 3392 - DNA, 20 bp, Homo sapiens
ttcatcagtagctgtgagtc

SEQ ID NO: 3393 - DNA, 22 bp, Homo sapiens
gactgtcatcttctgacctggg

SEQ ID NO: 3394 - DNA, 24 bp, Homo sapiens
gccacccaatcaaagaaacaaaat

SEQ ID NO: 3395 - DNA, 18 bp, Homo sapiens
cccagcactccctttggg

SEQ ID NO: 3396 - DNA, 19 bp, Homo sapiens
tttgggttgtagtatcgac

SEQ ID NO: 3397 - DNA, 22 bp, Homo sapiens
ttcacaaacagtttttgcagac

SEQ ID NO: 3398 - DNA, 17 bp, Homo sapiens
agcctaccagcattccc

SEQ ID NO: 3399 - DNA, 24 bp, Homo sapiens
ttttttcagtgtgtcggaactccc

SEQ ID NO: 3400 - DNA, 20 bp, Homo sapiens
ccaggagagaattcctctaa

SEQ ID NO: 3401 - DNA, 23 bp, Homo sapiens
tctgcaatattttgtaacctgtc

SEQ ID NO: 3402 - DNA, 16 bp, Homo sapiens
agagaggtggttccac

SEQ ID NO: 3403 - DNA, 24 bp, Homo sapiens
tgattgcgttagtagtgaagaagt

SEQ ID NO: 3404 - DNA, 22 bp, Homo sapiens
aacctatatggattttaacagt

SEQ ID NO: 3405 - DNA, 23 bp, Homo sapiens
gccatctgttgtggaataatatt

SEQ ID NO: 3406 - DNA, 19 bp, Homo sapiens
tgcttcaccatatgaaggt

SEQ ID NO: 3407 - DNA, 22 bp, Homo sapiens
gctcttgaggacctgtgctggg

SEQ ID NO: 3408 - DNA, 16 bp, Homo sapiens
gtggaggaaggtccct

SEQ ID NO: 3409 - DNA, 24 bp, Homo sapiens
cttctaaaatatgtacaatttaat

SEQ ID NO: 3410 - DNA, 21 bp, Homo sapiens
tttggattctagatggcaaga

SEQ ID NO: 3411 - DNA, 21 bp, Homo sapiens
tccattattgctatttttacc

SEQ ID NO: 3412 - DNA, 23 bp, Homo sapiens
atctgcttttaaagttatatttt

SEQ ID NO: 3413 - DNA, 18 bp, Homo sapiens
tccagggctcataaggga

SEQ ID NO: 3414 - DNA, 24 bp, Homo sapiens
agtatgctatatatttttctcttt

SEQ ID NO: 3415 - DNA, 22 bp, Homo sapiens
tgattgaccgcactttctcctg

SEQ ID NO: 3416 - DNA, 21 bp, Homo sapiens
acgaacttctacttttctttg

SEQ ID NO: 3417 - DNA, 20 bp, Homo sapiens
tgccctatcccaaccccaat

SEQ ID NO: 3418 - DNA, 20 bp, Homo sapiens
atcttcaatttccttttagc

SEQ ID NO: 3419 - DNA, 20 bp, Homo sapiens
tgtgaatcaagtgggaagaa

SEQ ID NO: 3420 - DNA, 23 bp, Homo sapiens
catttgtgaaaattatagcagaa

SEQ ID NO: 3421 - DNA, 24 bp, Homo sapiens
aaatgattatacctacctatgtgc

SEQ ID NO: 3422 - DNA, 21 bp, Homo sapiens
ttttttcaggaatacaaagag

SEQ ID NO: 3423 - DNA, 19 bp, Homo sapiens
tagtaggagggtgaactgc

SEQ ID NO: 3424 - DNA, 24 bp, Homo sapiens
ttttgcctaaatgaaaaatcttag

SEQ ID NO: 3425 - DNA, 20 bp, Homo sapiens
ggagatccaaggacttctgc

SEQ ID NO: 3426 - DNA, 24 bp, Homo sapiens
tggtaatggtaagtatgatcagac

SEQ ID NO: 3427 - DNA, 18 bp, Homo sapiens
atgggtgtgagttgcccc

SEQ ID NO: 3428 - DNA, 21 bp, Homo sapiens
atcactttctactgacttgtc

SEQ ID NO: 3429 - DNA, 22 bp, Homo sapiens
gagaatctggagagaagatgga

SEQ ID NO: 3430 - DNA, 18 bp, Homo sapiens
cagagcagatcaccacca

SEQ ID NO: 3431 - DNA, 23 bp, Homo sapiens
tgatgttcatagtattattaaac

SEQ ID NO: 3432 - DNA, 21 bp, Homo sapiens
gtgtgtgtttatctcttcagc

SEQ ID NO: 3433 - DNA, 21 bp, Homo sapiens
aaaagtacctgcaaaacctga

SEQ ID NO: 3434 - DNA, 20 bp, Homo sapiens
tgtgtcttccaaaaagcatg

SEQ ID NO: 3435 - DNA, 25 bp, Homo sapiens
ataactgcttaatattaaacatctg

SEQ ID NO: 3436 - DNA, 23 bp, Homo sapiens
gctttttgcagacatgtaatctt

SEQ ID NO: 3437 - DNA, 20 bp, Homo sapiens
gctagcaaagtttcccaaac

SEQ ID NO: 3438 - DNA, 19 bp, Homo sapiens
tggagtaaagcagaggcat

SEQ ID NO: 3439 - DNA, 21 bp, Homo sapiens
tttacagagatggatggtggt

SEQ ID NO: 3440 - DNA, 23 bp, Homo sapiens
agactctaatgctataatccaag

SEQ ID NO: 3441 - DNA, 20 bp, Homo sapiens
actgaaacttaaaaatgctt

SEQ ID NO: 3442 - DNA, 21 bp, Homo sapiens
tgctgtggtgaagatattatt

SEQ ID NO: 3443 - DNA, 21 bp, Homo sapiens
aaaaatggaaaaaaagtacat

SEQ ID NO: 3444 - DNA, 19 bp, Homo sapiens
aaccaattactaatgcatc

SEQ ID NO: 3445 - DNA, 20 bp, Homo sapiens
agttcctctaacagcttaac

SEQ ID NO: 3446 - DNA, 22 bp, Homo sapiens
ttcctttgaatttaatgattgc

SEQ ID NO: 3447 - DNA, 19 bp, Homo sapiens
aactctccattctcattca

SEQ ID NO: 3448 - DNA, 22 bp, Homo sapiens
tgaattgttttacaaaacaagt

SEQ ID NO: 3449 - DNA, 25 bp, Homo sapiens
agaagagtatcttagtttgattaac

SEQ ID NO: 3450 - DNA, 22 bp, Homo sapiens
tgtaatggactttctatgattc

SEQ ID NO: 3451 - DNA, 20 bp, Homo sapiens
tacaaaactattattggaag

SEQ ID NO: 3452 - DNA, 20 bp, Homo sapiens
actgcgagttatactctcat

SEQ ID NO: 3453 - DNA, 29 bp, Homo sapiens
atgaaactataagaataaattttatgaag

SEQ ID NO: 3454 - DNA, 23 bp, Homo sapiens
tccacccatttttttttttaggt

SEQ ID NO: 3455 - DNA, 24 bp, Homo sapiens
tgtttgatcaacacctgatgaatc

SEQ ID NO: 3456 - DNA, 25 bp, Homo sapiens
gttacagaatggaagattatacatg

SEQ ID NO: 3457 - DNA, 21 bp, Homo sapiens
actctttgttggttgtattta

SEQ ID NO: 3458 - DNA, 23 bp, Homo sapiens
ccttacataggtagagtatgagc

SEQ ID NO: 3459 - DNA, 20 bp, Homo sapiens
tcacagctactgagttcaac

SEQ ID NO: 3460 - DNA, 18 bp, Homo sapiens
ttctctttgccagggtaa

SEQ ID NO: 3461 - DNA, 29 bp, Homo sapiens
ataacattttaatatgtaatttttttatg

SEQ ID NO: 3462 - DNA, 24 bp, Homo sapiens
tctccaacctactgaatataaaac

SEQ ID NO: 3463 - DNA, 21 bp, Homo sapiens
tgtggtccaaaagaaatcctt

SEQ ID NO: 3464 - DNA, 21 bp, Homo sapiens
gacccttcagctcaaaagaag

SEQ ID NO: 3465 - DNA, 19 bp, Homo sapiens
taagcagtgattcttaccc

SEQ ID NO: 3466 - DNA, 19 bp, Homo sapiens
accatctatgaaccagtga

SEQ ID NO: 3467 - DNA, 24 bp, Homo sapiens
accaatttcgtgcagaatgccttg

SEQ ID NO: 3468 - DNA, 22 bp, Homo sapiens
tttgtatttcaggaaagtcttt

SEQ ID NO: 3469 - DNA, 20 bp, Homo sapiens
tgaggttctaataagatgct

SEQ ID NO: 3470 - DNA, 21 bp, Homo sapiens
acttacttgctagttcatagc

SEQ ID NO: 3471 - DNA, 22 bp, Homo sapiens
tgggttttcatttgacctttaa

SEQ ID NO: 3472 - DNA, 22 bp, Homo sapiens
ttagtgtagtagctgttgtttt

SEQ ID NO: 3473 - DNA, 22 bp, Homo sapiens
gttgtataaacaactgaaagac

SEQ ID NO: 3474 - DNA, 20 bp, Homo sapiens
agatgtggatattggtctct

SEQ ID NO: 3475 - DNA, 23 bp, Homo sapiens
cataattctaagaaaagaaaatg

SEQ ID NO: 3476 - DNA, 28 bp, Homo sapiens
actccaaatatattaataaagaaatttt

SEQ ID NO: 3477 - DNA, 23 bp, Homo sapiens
aattcataactatacattacaat

SEQ ID NO: 3478 - DNA, 19 bp, Homo sapiens
ggacccaaccatacatctg

SEQ ID NO: 3479 - DNA, 24 bp, Homo sapiens
aattaaaacttacaattaagagac

SEQ ID NO: 3480 - DNA, 20 bp, Homo sapiens
tttctgctattcaggagcta

SEQ ID NO: 3481 - DNA, 20 bp, Homo sapiens
ctctgatttgttcacatcgc

SEQ ID NO: 3482 - DNA, 19 bp, Homo sapiens
aattcctggtttcttgctt

SEQ ID NO: 3483 - DNA, 22 bp, Homo sapiens
ggcttgccatacttacatggca

SEQ ID NO: 3484 - DNA, 24 bp, Homo sapiens
gaggctttatcaattttataaaat

SEQ ID NO: 3485 - DNA, 24 bp, Homo sapiens
aaaaggcctcttgtgaaccaacct

SEQ ID NO: 3486 - DNA, 20 bp, Homo sapiens
gggacctgggaaatttgctt

SEQ ID NO: 3487 - DNA, 24 bp, Homo sapiens
agatggatattttagccaggttaa

SEQ ID NO: 3488 - DNA, 19 bp, Homo sapiens
tttgcatgattggccattg

SEQ ID NO: 3489 - DNA, 21 bp, Homo sapiens
tgtttcaaaggaaaaaaatct

SEQ ID NO: 3490 - DNA, 24 bp, Homo sapiens
ttactttggattttatgcttccaa

SEQ ID NO: 3491 - DNA, 20 bp, Homo sapiens
tcatagctcactcaccgttg

SEQ ID NO: 3492 - DNA, 21 bp, Homo sapiens
acttcctaaagtcattgcttt

SEQ ID NO: 3493 - DNA, 21 bp, Homo sapiens
aactgcaaaaactcttcttgg

SEQ ID NO: 3494 - DNA, 22 bp, Homo sapiens
aaaaaaaaaaaaagaattcccc

SEQ ID NO: 3495 - DNA, 24 bp, Homo sapiens
atcagatgacaaacttgtttttct

SEQ ID NO: 3496 - DNA, 20 bp, Homo sapiens
gagcttgcagtgagctgaga

SEQ ID NO: 3497 - DNA, 20 bp, Homo sapiens
gggtctctggacagaggtag

SEQ ID NO: 3498 - DNA, 24 bp, Homo sapiens
aaaaaaagaaacaacaaaaaatat

SEQ ID NO: 3499 - DNA, 18 bp, Homo sapiens
cacctacttacagcagcc

SEQ ID NO: 3500 - DNA, 24 bp, Homo sapiens
tttctgtattctgtttcagaagct

SEQ ID NO: 3501 - DNA, 18 bp, Homo sapiens
actagcacaggttgaatc

SEQ ID NO: 3502 - DNA, 21 bp, Homo sapiens
gcattttctcaaaatgcttcc

SEQ ID NO: 3503 - DNA, 22 bp, Homo sapiens
gccttttctctttttctgtagt

SEQ ID NO: 3504 - DNA, 19 bp, Homo sapiens
atcctccttttcccttggg

SEQ ID NO: 3505 - DNA, 29 bp, Homo sapiens
tatttagaattatagttactatatgtatg

SEQ ID NO: 3506 - DNA, 21 bp, Homo sapiens
tgggaggaaaatattctcctg

SEQ ID NO: 3507 - DNA, 20 bp, Homo sapiens
actgacttttcaagcacttt

SEQ ID NO: 3508 - DNA, 20 bp, Homo sapiens
atttgaatccatgcacacac

SEQ ID NO: 3509 - DNA, 21 bp, Homo sapiens
caatgccactcttatctttcg

SEQ ID NO: 3510 - DNA, 22 bp, Homo sapiens
agctgttagaatgtatatattt

SEQ ID NO: 3511 - DNA, 21 bp, Homo sapiens
tcatataatttcactgggatc

SEQ ID NO: 3512 - DNA, 23 bp, Homo sapiens
agtagatttcacattaatgtctc

SEQ ID NO: 3513 - DNA, 17 bp, Homo sapiens
gacagaccagaaggtgc

SEQ ID NO: 3514 - DNA, 21 bp, Homo sapiens
aggctgaggataatcaatacc

SEQ ID NO: 3515 - DNA, 19 bp, Homo sapiens
tcagttgttacgaaccatt

SEQ ID NO: 3516 - DNA, 17 bp, Homo sapiens
tcaacgctttggatccc

SEQ ID NO: 3517 - DNA, 22 bp, Homo sapiens
cattctgggtagataacctact

SEQ ID NO: 3518 - DNA, 24 bp, Homo sapiens
atgagtctttcaccaggatttatg

SEQ ID NO: 3519 - DNA, 23 bp, Homo sapiens
ggagttaacatctatactctgaa

SEQ ID NO: 3520 - DNA, 17 bp, Homo sapiens
agtcaggacctaccacc

SEQ ID NO: 3521 - DNA, 23 bp, Homo sapiens
actacagaaaaaggaaagaagat

SEQ ID NO: 3522 - DNA, 21 bp, Homo sapiens
gaacactaccacatttttacg

SEQ ID NO: 3523 - DNA, 20 bp, Homo sapiens
ggtttcagtgtttccctgtg

SEQ ID NO: 3524 - DNA, 23 bp, Homo sapiens
ttgtgtacaaatcagataatcct

SEQ ID NO: 3525 - DNA, 16 bp, Homo sapiens
gcacatagccccagtc

SEQ ID NO: 3526 - DNA, 23 bp, Homo sapiens
aatgatttgtttcttttctttat

SEQ ID NO: 3527 - DNA, 20 bp, Homo sapiens
tcacggagcaagaaagaggc

SEQ ID NO: 3528 - DNA, 22 bp, Homo sapiens
tacactccacattaaaccacag

SEQ ID NO: 3529 - DNA, 20 bp, Homo sapiens
catcacaaaagtatcctggg

SEQ ID NO: 3530 - DNA, 17 bp, Homo sapiens
ttttgccccagcaacgg

SEQ ID NO: 3531 - DNA, 19 bp, Homo sapiens
cacagtatctaaccttccc

SEQ ID NO: 3532 - DNA, 22 bp, Homo sapiens
gatggggaaaactctctctatc

SEQ ID NO: 3533 - DNA, 20 bp, Homo sapiens
agaaaattcttcttctgggt

SEQ ID NO: 3534 - DNA, 18 bp, Homo sapiens
acccatggccttactgtt

SEQ ID NO: 3535 - DNA, 24 bp, Homo sapiens
acctaaatttcaagattattatgt

SEQ ID NO: 3536 - DNA, 18 bp, Homo sapiens
tggagcgtgcagtaaagg

SEQ ID NO: 3537 - DNA, 22 bp, Homo sapiens
ggtatttaaataggaatgctga

SEQ ID NO: 3538 - DNA, 23 bp, Homo sapiens
ctttcaataattttcagaatacc

SEQ ID NO: 3539 - DNA, 25 bp, Homo sapiens
ttgagaatatttctggagaaatctc

SEQ ID NO: 3540 - DNA, 22 bp, Homo sapiens
aaattgcctataccaactgtca

SEQ ID NO: 3541 - DNA, 24 bp, Homo sapiens
ggatcttttggtatctttgatgag

SEQ ID NO: 3542 - DNA, 28 bp, Homo sapiens
aattaaaaatacattctattaaaaattg

SEQ ID NO: 3543 - DNA, 27 bp, Homo sapiens
aattgtgtactagctttaattttttcc

SEQ ID NO: 3544 - DNA, 23 bp, Homo sapiens
gcatatttactgtacaaggagat

SEQ ID NO: 3545 - DNA, 23 bp, Homo sapiens
tccattcaaaaagtgacaatagt

SEQ ID NO: 3546 - DNA, 19 bp, Homo sapiens
acatgttcttgaactcatc

SEQ ID NO: 3547 - DNA, 23 bp, Homo sapiens
agttatattgctatttcttcagc

SEQ ID NO: 3548 - DNA, 24 bp, Homo sapiens
tgagtattttaacacaggatgatt

SEQ ID NO: 3549 - DNA, 21 bp, Homo sapiens
ccgcctgccacctcagcctcc

SEQ ID NO: 3550 - DNA, 24 bp, Homo sapiens
aattttgtattttttttaatcttc

SEQ ID NO: 3551 - DNA, 23 bp, Homo sapiens
tggccagaagccattattatcaa

SEQ ID NO: 3552 - DNA, 28 bp, Homo sapiens
gataccctatcatagaatttattatgac

SEQ ID NO: 3553 - DNA, 24 bp, Homo sapiens
gtttcaacttaccttgaaaatcag

SEQ ID NO: 3554 - DNA, 22 bp, Homo sapiens
atcctacacatagtagtctttt

SEQ ID NO: 3555 - DNA, 17 bp, Homo sapiens
tctgctcatgcaacagg

SEQ ID NO: 3556 - DNA, 17 bp, Homo sapiens
ttcacctgaggtaccag

SEQ ID NO: 3557 - DNA, 19 bp, Homo sapiens
gtgcttgcccatgtatttg

SEQ ID NO: 3558 - DNA, 21 bp, Homo sapiens
aaagctgggttatacataagg

SEQ ID NO: 3559 - DNA, 20 bp, Homo sapiens
atcctgagatttgtatgctg

SEQ ID NO: 3560 - DNA, 24 bp, Homo sapiens
ttaactaaatgaattttttacctg

SEQ ID NO: 3561 - DNA, 18 bp, Homo sapiens
cagtgcatcaagcagtcc

SEQ ID NO: 3562 - DNA, 24 bp, Homo sapiens
aataattttcaaaaaactctcaaa

SEQ ID NO: 3563 - DNA, 22 bp, Homo sapiens
ggaatacaagtaatctttcgct

SEQ ID NO: 3564 - DNA, 23 bp, Homo sapiens
gcagaaagcaaatttaattccag

SEQ ID NO: 3565 - DNA, 19 bp, Homo sapiens
tttttgccactagatcttc

SEQ ID NO: 3566 - DNA, 20 bp, Homo sapiens
tcgagtaagtcatttggact

SEQ ID NO: 3567 - DNA, 23 bp, Homo sapiens
gtcaaaagttgtgttataggaaa

SEQ ID NO: 3568 - DNA, 17 bp, Homo sapiens
ggcgaaacccaggatga

SEQ ID NO: 3569 - DNA, 24 bp, Homo sapiens
ggaagatcaataaaaagattatgc

SEQ ID NO: 3570 - DNA, 24 bp, Homo sapiens
tgtagttttaaacttttagttgaa

SEQ ID NO: 3571 - DNA, 24 bp, Homo sapiens
gtggtattattatgaaccattttg

SEQ ID NO: 3572 - DNA, 16 bp, Homo sapiens
tgtcatcccagcctgg

SEQ ID NO: 3573 - DNA, 24 bp, Homo sapiens
caagcacttcaatgatattttacc

SEQ ID NO: 3574 - DNA, 19 bp, Homo sapiens
acaagcaaatgttacaacc

SEQ ID NO: 3575 - DNA, 21 bp, Homo sapiens
ctgcttcgtaaccttcttctt

SEQ ID NO: 3576 - DNA, 21 bp, Homo sapiens
tcaagaaaatattgaaactgt

SEQ ID NO: 3577 - DNA, 20 bp, Homo sapiens
cttctgaaaaatcaccaggc

SEQ ID NO: 3578 - DNA, 22 bp, Homo sapiens
tgggaaattttgctgagtgaat

SEQ ID NO: 3579 - DNA, 24 bp, Homo sapiens
tcagcagattttgaacataatgat

SEQ ID NO: 3580 - DNA, 24 bp, Homo sapiens
tccactgaactcatctgaccaagt

SEQ ID NO: 3581 - DNA, 22 bp, Homo sapiens
aaacacaactagcaaagccttt

SEQ ID NO: 3582 - DNA, 22 bp, Homo sapiens
ctagtgtcatcccacacttccg

SEQ ID NO: 3583 - DNA, 24 bp, Homo sapiens
tctgtggaaagtatattatttgaa

SEQ ID NO: 3584 - DNA, 22 bp, Homo sapiens
ttcataccttctcagtcatagc

SEQ ID NO: 3585 - DNA, 22 bp, Homo sapiens
tcatttagttttttaaaatggt

SEQ ID NO: 3586 - DNA, 16 bp, Homo sapiens
ctcgaagcagggcatc

SEQ ID NO: 3587 - DNA, 22 bp, Homo sapiens
aactgcaaataaatggattagc

SEQ ID NO: 3588 - DNA, 20 bp, Homo sapiens
ctgggaaagatggtccctca

SEQ ID NO: 3589 - DNA, 21 bp, Homo sapiens
aacaggatgtttgtatagagc

SEQ ID NO: 3590 - DNA, 22 bp, Homo sapiens
agaagatggaattggagttacc

SEQ ID NO: 3591 - DNA, 30 bp, Homo sapiens
tatatgttatatataacacaataatatata

SEQ ID NO: 3592 - DNA, 17 bp, Homo sapiens
acgacttttggaagccc

SEQ ID NO: 3593 - DNA, 23 bp, Homo sapiens
tttatatatatatgtgtgtgtgt

SEQ ID NO: 3594 - DNA, 16 bp, Homo sapiens
aagccgctcccgagga

SEQ ID NO: 3595 - DNA, 23 bp, Homo sapiens
aggacaaggtattacctgattag

SEQ ID NO: 3596 - DNA, 22 bp, Homo sapiens
ttaggtaaattagagttacagc

SEQ ID NO: 3597 - DNA, 20 bp, Homo sapiens
agacaaatggccagaagggc

SEQ ID NO: 3598 - DNA, 20 bp, Homo sapiens
tggctataaaaagtgacccc

SEQ ID NO: 3599 - DNA, 21 bp, Homo sapiens
ttgacttgtaaatagctttgc

SEQ ID NO: 3600 - DNA, 23 bp, Homo sapiens
caggatttaaacagaatttctca

SEQ ID NO: 3601 - DNA, 22 bp, Homo sapiens
cacatttatggaagaaatatgc

SEQ ID NO: 3602 - DNA, 22 bp, Homo sapiens
tgttcagaagtcacaaagagga

SEQ ID NO: 3603 - DNA, 22 bp, Homo sapiens
ctacctagttctgatggtatgg

SEQ ID NO: 3604 - DNA, 17 bp, Homo sapiens
cttggtggtttccgagt

SEQ ID NO: 3605 - DNA, 23 bp, Homo sapiens
tccttcatagttctcttaggttg

SEQ ID NO: 3606 - DNA, 21 bp, Homo sapiens
agcagacatttggtctatgtg

SEQ ID NO: 3607 - DNA, 20 bp, Homo sapiens
tctccctccttttttccttg

SEQ ID NO: 3608 - DNA, 19 bp, Homo sapiens
tgtatatctctcgagagcc

SEQ ID NO: 3609 - DNA, 24 bp, Homo sapiens
aatattaacttatggcatactcgg

SEQ ID NO: 3610 - DNA, 20 bp, Homo sapiens
actcagaagatacttctggc

SEQ ID NO: 3611 - DNA, 24 bp, Homo sapiens
aacactgaactcaacatgtagatc

SEQ ID NO: 3612 - DNA, 20 bp, Homo sapiens
tgtgtggcttttttatgcgt

SEQ ID NO: 3613 - DNA, 19 bp, Homo sapiens
gagaaggcaagacaaggct

SEQ ID NO: 3614 - DNA, 19 bp, Homo sapiens
atccaaagagacggaagac

SEQ ID NO: 3615 - DNA, 20 bp, Homo sapiens
ctcgctggctgtgctgtcat

SEQ ID NO: 3616 - DNA, 20 bp, Homo sapiens
agcttattcagattctcctc

SEQ ID NO: 3617 - DNA, 22 bp, Homo sapiens
agactctgcttctttacttacg

SEQ ID NO: 3618 - DNA, 19 bp, Homo sapiens
acattgaacagaaggagtt

SEQ ID NO: 3619 - DNA, 21 bp, Homo sapiens
tgaacatcttggttaacagtc

SEQ ID NO: 3620 - DNA, 20 bp, Homo sapiens
tctgataatcagcctagggg

SEQ ID NO: 3621 - DNA, 20 bp, Homo sapiens
atttgctgagactctgagga

SEQ ID NO: 3622 - DNA, 24 bp, Homo sapiens
agtcaaataatcgaattaaattgc

SEQ ID NO: 3623 - DNA, 19 bp, Homo sapiens
acccacatgtacagaggac

SEQ ID NO: 3624 - DNA, 22 bp, Homo sapiens
tgctttttttctttcacagggt

SEQ ID NO: 3625 - DNA, 19 bp, Homo sapiens
aggcatctttctgttgctc

SEQ ID NO: 3626 - DNA, 29 bp, Homo sapiens
atagcgatatattaaatattatatgtacc

SEQ ID NO: 3627 - DNA, 25 bp, Homo sapiens
agaatgacttcgaataccatttaag

SEQ ID NO: 3628 - DNA, 24 bp, Homo sapiens
agaactttagcctgataattgatg

SEQ ID NO: 3629 - DNA, 20 bp, Homo sapiens
acaaatctcttattaccctg

SEQ ID NO: 3630 - DNA, 18 bp, Homo sapiens
tacgatcacactgctgcc

SEQ ID NO: 3631 - DNA, 19 bp, Homo sapiens
catcataaccagtgcttgc

SEQ ID NO: 3632 - DNA, 19 bp, Homo sapiens
tcactcacttgaaagcatc

SEQ ID NO: 3633 - DNA, 19 bp, Homo sapiens
gcacatcattgtcaacacc

SEQ ID NO: 3634 - DNA, 16 bp, Homo sapiens
ccgccacccacacaca

SEQ ID NO: 3635 - DNA, 24 bp, Homo sapiens
gcaatatagttgttcagtggaaat

SEQ ID NO: 3636 - DNA, 18 bp, Homo sapiens
tctgaagcacgtcctgag

SEQ ID NO: 3637 - DNA, 23 bp, Homo sapiens
agaagacagattacatagtatac

SEQ ID NO: 3638 - DNA, 19 bp, Homo sapiens
agctgaagtaacgcttagg

SEQ ID NO: 3639 - DNA, 21 bp, Homo sapiens
agatttgttgtggaaatggga

SEQ ID NO: 3640 - DNA, 24 bp, Homo sapiens
ggagcacaggattaaatatgtaat

SEQ ID NO: 3641 - DNA, 19 bp, Homo sapiens
cctcaagtttatccagtcc

SEQ ID NO: 3642 - DNA, 21 bp, Homo sapiens
ttgcaaatgtgatttgcaatc

SEQ ID NO: 3643 - DNA, 22 bp, Homo sapiens
gactctgaccaactagcccaat

SEQ ID NO: 3644 - DNA, 22 bp, Homo sapiens
ctgataagcctttaaagcatcc

SEQ ID NO: 3645 - DNA, 19 bp, Homo sapiens
gaggagcagagatatcacc

SEQ ID NO: 3646 - DNA, 22 bp, Homo sapiens
aggatcccttgaaatctgtaag

SEQ ID NO: 3647 - DNA, 21 bp, Homo sapiens
ctgaaaaattttcagcagcat

SEQ ID NO: 3648 - DNA, 20 bp, Homo sapiens
taagtttccctgcagtgtct

SEQ ID NO: 3649 - DNA, 19 bp, Homo sapiens
gtatggatcccaaatctgt

SEQ ID NO: 3650 - DNA, 21 bp, Homo sapiens
ttacaagctgcttttttaatt

SEQ ID NO: 3651 - DNA, 17 bp, Homo sapiens
gagcagcacttgtgtcc

SEQ ID NO: 3652 - DNA, 24 bp, Homo sapiens
ataagtttgttaaggatattcaat

SEQ ID NO: 3653 - DNA, 17 bp, Homo sapiens
cggtgctgttgcattgc

SEQ ID NO: 3654 - DNA, 22 bp, Homo sapiens
aagcatggagcaaaggaatgat

SEQ ID NO: 3655 - DNA, 18 bp, Homo sapiens
accaggtttccaaaaacc

SEQ ID NO: 3656 - DNA, 22 bp, Homo sapiens
acacccgataggatctggacac

SEQ ID NO: 3657 - DNA, 24 bp, Homo sapiens
gtgaatattctcattttatgcatc

SEQ ID NO: 3658 - DNA, 22 bp, Homo sapiens
gcaagcactgatgggcacacac

SEQ ID NO: 3659 - DNA, 20 bp, Homo sapiens
agtgaaatcagagcaacttc

SEQ ID NO: 3660 - DNA, 19 bp, Homo sapiens
ctgcagtctcttcaaatgg

SEQ ID NO: 3661 - DNA, 17 bp, Homo sapiens
agagcatttgaaagccc

SEQ ID NO: 3662 - DNA, 21 bp, Homo sapiens
tgagagatctcggtgatgatg

SEQ ID NO: 3663 - DNA, 22 bp, Homo sapiens
aatttatttgaaacagcagttc

SEQ ID NO: 3664 - DNA, 22 bp, Homo sapiens
ttcttgtacacatcgaatgatg

SEQ ID NO: 3665 - DNA, 17 bp, Homo sapiens
cttcagtcaagccatgg

SEQ ID NO: 3666 - DNA, 23 bp, Homo sapiens
tcatcacactatttattagggct

SEQ ID NO: 3667 - DNA, 19 bp, Homo sapiens
ggaaggagttcttcagatt

SEQ ID NO: 3668 - DNA, 21 bp, Homo sapiens
ttaaaaccagccattccattt

SEQ ID NO: 3669 - DNA, 21 bp, Homo sapiens
gaggttcaggaagattttgtg

SEQ ID NO: 3670 - DNA, 22 bp, Homo sapiens
aatgaattcttgaaccaaatcc

SEQ ID NO: 3671 - DNA, 19 bp, Homo sapiens
tgcctagaaaagcagcctg

SEQ ID NO: 3672 - DNA, 21 bp, Homo sapiens
tgaagacaacagatcagaatc

SEQ ID NO: 3673 - DNA, 22 bp, Homo sapiens
gatgccagaaaatcttaggaaa

SEQ ID NO: 3674 - DNA, 21 bp, Homo sapiens
gggctctatgacgatactttg

SEQ ID NO: 3675 - DNA, 18 bp, Homo sapiens
tgctctttcgaacagtgt

SEQ ID NO: 3676 - DNA, 24 bp, Homo sapiens
tcttttgtcttggtgcaaaagggt

SEQ ID NO: 3677 - DNA, 20 bp, Homo sapiens
caacttggagagtcgagtag

SEQ ID NO: 3678 - DNA, 24 bp, Homo sapiens
ctgctctaagcaattcagttaaat

SEQ ID NO: 3679 - DNA, 17 bp, Homo sapiens
gtagtgcccacactaac

SEQ ID NO: 3680 - DNA, 21 bp, Homo sapiens
acatctactgacagaagatgc

SEQ ID NO: 3681 - DNA, 23 bp, Homo sapiens
attagaaaaagtttgtaagtttg

SEQ ID NO: 3682 - DNA, 20 bp, Homo sapiens
ttcttcggtccaacctgcag

SEQ ID NO: 3683 - DNA, 23 bp, Homo sapiens
gtctgttatcagtaacatgaaca

SEQ ID NO: 3684 - DNA, 21 bp, Homo sapiens
ccccaaagcctgctaggaatt

SEQ ID NO: 3685 - DNA, 20 bp, Homo sapiens
agagattattccaagacagg

SEQ ID NO: 3686 - DNA, 22 bp, Homo sapiens
tatgattcaaggtaacgtcaaa

SEQ ID NO: 3687 - DNA, 17 bp, Homo sapiens
tgaccgcttagcaacca

SEQ ID NO: 3688 - DNA, 24 bp, Homo sapiens
catgacataagtcaaatggagaat

SEQ ID NO: 3689 - DNA, 19 bp, Homo sapiens
cccatctgctgcatcattt

SEQ ID NO: 3690 - DNA, 21 bp, Homo sapiens
tgtcagtgtttgacccctgtc

SEQ ID NO: 3691 - DNA, 19 bp, Homo sapiens
cacctcagattcagaagcc

SEQ ID NO: 3692 - DNA, 20 bp, Homo sapiens
agcatctggaggagtctgtt

SEQ ID NO: 3693 - DNA, 21 bp, Homo sapiens
gacagcgtaaaattacccatc

SEQ ID NO: 3694 - DNA, 21 bp, Homo sapiens
cttgtttaggaaacgatgtta

SEQ ID NO: 3695 - DNA, 19 bp, Homo sapiens
ggaagtgccctgtctagtc

SEQ ID NO: 3696 - DNA, 21 bp, Homo sapiens
tgcctttttcatctgaattgg

SEQ ID NO: 3697 - DNA, 20 bp, Homo sapiens
cctgaccaaagaaaagaact

SEQ ID NO: 3698 - DNA, 24 bp, Homo sapiens
ttcttgcatctcttacagaatagc

SEQ ID NO: 3699 - DNA, 24 bp, Homo sapiens
ggtattctaagccttcttttttca

SEQ ID NO: 3700 - DNA, 20 bp, Homo sapiens
ttttgcagaaacctgactag

SEQ ID NO: 3701 - DNA, 21 bp, Homo sapiens
gggtttaagataaataagagg

SEQ ID NO: 3702 - DNA, 22 bp, Homo sapiens
ggatctttgtgaacttgagttc

SEQ ID NO: 3703 - DNA, 21 bp, Homo sapiens
atgacataaatgaaggaaatc

SEQ ID NO: 3704 - DNA, 22 bp, Homo sapiens
tgtgtttgcctaaataattttt

SEQ ID NO: 3705 - DNA, 21 bp, Homo sapiens
ctgactcttcttctgtctctc

SEQ ID NO: 3706 - DNA, 22 bp, Homo sapiens
tctgaatcagaatcaaacattc

SEQ ID NO: 3707 - DNA, 19 bp, Homo sapiens
tcgccttagaacatgaagg

SEQ ID NO: 3708 - DNA, 22 bp, Homo sapiens
cacaagtgatatgataaaggga

SEQ ID NO: 3709 - DNA, 21 bp, Homo sapiens
tcaagaaaaaggattttttgg

SEQ ID NO: 3710 - DNA, 20 bp, Homo sapiens
ccataccagtggaaggagag

SEQ ID NO: 3711 - DNA, 22 bp, Homo sapiens
acagctttaactggattgaaga

SEQ ID NO: 3712 - DNA, 26 bp, Homo sapiens
caagctaaattctataattgatcagg

SEQ ID NO: 3713 - DNA, 29 bp, Homo sapiens
ggttataaataggtccactttttttttag

SEQ ID NO: 3714 - DNA, 18 bp, Homo sapiens
cccttggacagtaccttg

SEQ ID NO: 3715 - DNA, 22 bp, Homo sapiens
ggcttcagaaactatgtaatcc

SEQ ID NO: 3716 - DNA, 16 bp, Homo sapiens
gcagtggtccagaggg

SEQ ID NO: 3717 - DNA, 29 bp, Homo sapiens
aagtaagtatttgatataaaaatgttacc

SEQ ID NO: 3718 - DNA, 20 bp, Homo sapiens
cggtcatgagcaccgacagt

SEQ ID NO: 3719 - DNA, 18 bp, Homo sapiens
cgaccatggacaaggtac

SEQ ID NO: 3720 - DNA, 24 bp, Homo sapiens
aaaagtaaatttgtatttgttttc

SEQ ID NO: 3721 - DNA, 21 bp, Homo sapiens
cttcttcctccctggcctcca

SEQ ID NO: 3722 - DNA, 21 bp, Homo sapiens
tccagtaattttaagccaatc

SEQ ID NO: 3723 - DNA, 18 bp, Homo sapiens
aattcacgtgccagtgag

SEQ ID NO: 3724 - DNA, 16 bp, Homo sapiens
ggacatgctgggtcca

SEQ ID NO: 3725 - DNA, 22 bp, Homo sapiens
tatactgatcaaattgctctgc

SEQ ID NO: 3726 - DNA, 20 bp, Homo sapiens
aaggaaactgctatcgaact

SEQ ID NO: 3727 - DNA, 20 bp, Homo sapiens
tccgtttttaagaaatggga

SEQ ID NO: 3728 - DNA, 18 bp, Homo sapiens
cagggtatgacaaggcag

SEQ ID NO: 3729 - DNA, 22 bp, Homo sapiens
tttatgtaaatcactttggacc

SEQ ID NO: 3730 - DNA, 20 bp, Homo sapiens
caccttttgctttaggaaac

SEQ ID NO: 3731 - DNA, 19 bp, Homo sapiens
gctctgctgtgagatagcc

SEQ ID NO: 3732 - DNA, 21 bp, Homo sapiens
acaaaaaatgtcatttaagag

SEQ ID NO: 3733 - DNA, 21 bp, Homo sapiens
ctgtcttagcaatctttgctg

SEQ ID NO: 3734 - DNA, 18 bp, Homo sapiens
gttggtgacagctctcaa

SEQ ID NO: 3735 - DNA, 24 bp, Homo sapiens
tgagattttactaaaaccatattc

SEQ ID NO: 3736 - DNA, 16 bp, Homo sapiens
tggtgggaatccaggc

SEQ ID NO: 3737 - DNA, 22 bp, Homo sapiens
gtctcttaaaaatggtttagct

SEQ ID NO: 3738 - DNA, 19 bp, Homo sapiens
aaaatgtgttacactcagc

SEQ ID NO: 3739 - DNA, 22 bp, Homo sapiens
ttgccttagtaatgtctctctc

SEQ ID NO: 3740 - DNA, 19 bp, Homo sapiens
tcctttctgtattggcctg

SEQ ID NO: 3741 - DNA, 28 bp, Homo sapiens
atgtttattgaattgtatatttactgtc

SEQ ID NO: 3742 - DNA, 16 bp, Homo sapiens
tcccccagcagcctgg

SEQ ID NO: 3743 - DNA, 20 bp, Homo sapiens
tctggtaacttaataaatgc

SEQ ID NO: 3744 - DNA, 18 bp, Homo sapiens
catgttgctgtcactgtc

SEQ ID NO: 3745 - DNA, 24 bp, Homo sapiens
tacccaatgtggaatcactagaag

SEQ ID NO: 3746 - DNA, 18 bp, Homo sapiens
aggcaaggtgaaccctac

SEQ ID NO: 3747 - DNA, 24 bp, Homo sapiens
gtcaaaaaacattaaaaatcagat

SEQ ID NO: 3748 - DNA, 23 bp, Homo sapiens
ctttattctcctgattatttgca

SEQ ID NO: 3749 - DNA, 16 bp, Homo sapiens
ttgctgcctccgacag

SEQ ID NO: 3750 - DNA, 16 bp, Homo sapiens
atggttgggccttgct

SEQ ID NO: 3751 - DNA, 23 bp, Homo sapiens
caaccatggtcattgcttcacac

SEQ ID NO: 3752 - DNA, 23 bp, Homo sapiens
gaaaatgaaccaggaagcagtat

SEQ ID NO: 3753 - DNA, 18 bp, Homo sapiens
ctggaacagtgcgccttg

SEQ ID NO: 3754 - DNA, 23 bp, Homo sapiens
gcaaatgatattcgatttttggg

SEQ ID NO: 3755 - DNA, 24 bp, Homo sapiens
agacatggtccatagctaagaatg

SEQ ID NO: 3756 - DNA, 16 bp, Homo sapiens
ttgagctcagtggagc

SEQ ID NO: 3757 - DNA, 24 bp, Homo sapiens
ctagctatgtgattacctggcatg

SEQ ID NO: 3758 - DNA, 17 bp, Homo sapiens
ggcttgccttttgtcac

SEQ ID NO: 3759 - DNA, 20 bp, Homo sapiens
ccagacctgaccgaggacca

SEQ ID NO: 3760 - DNA, 24 bp, Homo sapiens
tcacttgctaatggtagaaaaatg

SEQ ID NO: 3761 - DNA, 20 bp, Homo sapiens
tgcaggcagtagtgttcatg

SEQ ID NO: 3762 - DNA, 24 bp, Homo sapiens
ttaagtaaacatttttttctgaag

SEQ ID NO: 3763 - DNA, 22 bp, Homo sapiens
agcttcaaatttattcggagca

SEQ ID NO: 3764 - DNA, 18 bp, Homo sapiens
tgctgcaaaagtggctgc

SEQ ID NO: 3765 - DNA, 22 bp, Homo sapiens
acttaaaacacatgtttgatgg

SEQ ID NO: 3766 - DNA, 17 bp, Homo sapiens
gaggcactgctgttggt

SEQ ID NO: 3767 - DNA, 22 bp, Homo sapiens
gacaggaacactcagaaaatgt

SEQ ID NO: 3768 - DNA, 21 bp, Homo sapiens
tcaacaagtaaaatatgcaat

SEQ ID NO: 3769 - DNA, 20 bp, Homo sapiens
tcacgtgatcactaacctgt

SEQ ID NO: 3770 - DNA, 22 bp, Homo sapiens
ttaggaattacttattcttacc

SEQ ID NO: 3771 - DNA, 23 bp, Homo sapiens
attctagtatttaaacctgtacc

SEQ ID NO: 3772 - DNA, 24 bp, Homo sapiens
tctgaaaggtatttttaaaaattt

SEQ ID NO: 3773 - DNA, 19 bp, Homo sapiens
tggcatggcagcttttatt

SEQ ID NO: 3774 - DNA, 21 bp, Homo sapiens
actttgctcatcataagattt

SEQ ID NO: 3775 - DNA, 23 bp, Homo sapiens
tgaaaattactgattggttgaac

SEQ ID NO: 3776 - DNA, 19 bp, Homo sapiens
agagtttgcacagatcatc

SEQ ID NO: 3777 - DNA, 20 bp, Homo sapiens
ttggccttttaagctagtca

SEQ ID NO: 3778 - DNA, 22 bp, Homo sapiens
ttcatgaagtactgttaccagg

SEQ ID NO: 3779 - DNA, 22 bp, Homo sapiens
tgaatcaaattagtcaaactcc

SEQ ID NO: 3780 - DNA, 20 bp, Homo sapiens
caacagagctcaaatgatac

SEQ ID NO: 3781 - DNA, 22 bp, Homo sapiens
agtatgagtacgtccaatcttg

SEQ ID NO: 3782 - DNA, 23 bp, Homo sapiens
gaagtttaattcagaagtttgtt

SEQ ID NO: 3783 - DNA, 20 bp, Homo sapiens
tgtaacttctgtagtcctgg

SEQ ID NO: 3784 - DNA, 19 bp, Homo sapiens
acatgtaactgagctgggt

SEQ ID NO: 3785 - DNA, 21 bp, Homo sapiens
tgtgcattgctgtgggaaaag

SEQ ID NO: 3786 - DNA, 23 bp, Homo sapiens
atcatgttaataaaagccaggtc

SEQ ID NO: 3787 - DNA, 21 bp, Homo sapiens
ttccttcaagaaataagaacc

SEQ ID NO: 3788 - DNA, 22 bp, Homo sapiens
gagcaattgaaatgttaggagg

SEQ ID NO: 3789 - DNA, 20 bp, Homo sapiens
caaaaagtgaatgcttgttt

SEQ ID NO: 3790 - DNA, 18 bp, Homo sapiens
cagactggatcaggaact

SEQ ID NO: 3791 - DNA, 20 bp, Homo sapiens
aaagctcacatactgacctg

SEQ ID NO: 3792 - DNA, 17 bp, Homo sapiens
acattttttctgcaggt

SEQ ID NO: 3793 - DNA, 18 bp, Homo sapiens
cttgctgccaagttcacc

SEQ ID NO: 3794 - DNA, 21 bp, Homo sapiens
tgggtcaactgtattcaaact

SEQ ID NO: 3795 - DNA, 23 bp, Homo sapiens
acattcatatttgtctgagttcc

SEQ ID NO: 3796 - DNA, 22 bp, Homo sapiens
cactttttaaagtatctgtggt

SEQ ID NO: 3797 - DNA, 18 bp, Homo sapiens
tttaccttcagctacctg

SEQ ID NO: 3798 - DNA, 19 bp, Homo sapiens
atgcaataatgaaggcagc

SEQ ID NO: 3799 - DNA, 22 bp, Homo sapiens
gctaccaccctcccctgaaatt

SEQ ID NO: 3800 - DNA, 18 bp, Homo sapiens
catcttgaagcgagcggc

SEQ ID NO: 3801 - DNA, 20 bp, Homo sapiens
gccagagcatatcgtcatcc

SEQ ID NO: 3802 - DNA, 25 bp, Homo sapiens
atgcttaagtaaaattgtaaatttg

SEQ ID NO: 3803 - DNA, 19 bp, Homo sapiens
cacctcctacctcatctgc

SEQ ID NO: 3804 - DNA, 22 bp, Homo sapiens
ttgttattgttttatgtatagc

SEQ ID NO: 3805 - DNA, 17 bp, Homo sapiens
tcctggtttacttcagc

SEQ ID NO: 3806 - DNA, 23 bp, Homo sapiens
tcctgtctataatctttctctat

SEQ ID NO: 3807 - DNA, 17 bp, Homo sapiens
gacagaacgcatgccag

SEQ ID NO: 3808 - DNA, 20 bp, Homo sapiens
acctcttattactcacgaag

SEQ ID NO: 3809 - DNA, 23 bp, Homo sapiens
tgccaaatgataagtattatggc

SEQ ID NO: 3810 - DNA, 30 bp, Homo sapiens
ctctgaaaaatatttataaagtaaagtgac

SEQ ID NO: 3811 - DNA, 18 bp, Homo sapiens
ggcaagccaaaattcctt

SEQ ID NO: 3812 - DNA, 19 bp, Homo sapiens
acaaatgccacttactggc

SEQ ID NO: 3813 - DNA, 20 bp, Homo sapiens
tgcgattacttttgatcctg

SEQ ID NO: 3814 - DNA, 20 bp, Homo sapiens
tcgtagatctcacggtctgg

SEQ ID NO: 3815 - DNA, 24 bp, Homo sapiens
gaatccaaatagtatttttttgtc

SEQ ID NO: 3816 - DNA, 21 bp, Homo sapiens
tcatattctatccggaaggaa

SEQ ID NO: 3817 - DNA, 18 bp, Homo sapiens
tgccctcgttttggcctc

SEQ ID NO: 3818 - DNA, 16 bp, Homo sapiens
cagagtctggcgcggc

SEQ ID NO: 3819 - DNA, 16 bp, Homo sapiens
tcgtgcgggctccagc

SEQ ID NO: 3820 - DNA, 16 bp, Homo sapiens
cggcaggcaggagggc

SEQ ID NO: 3821 - DNA, 24 bp, Homo sapiens
aattctacccaagctccctcagca

SEQ ID NO: 3822 - DNA, 16 bp, Homo sapiens
ctcaccattcgagccg

SEQ ID NO: 3823 - DNA, 17 bp, Homo sapiens
tgggcggaacggtttct

SEQ ID NO: 3824 - DNA, 18 bp, Homo sapiens
ggagccgaagctaaggct

SEQ ID NO: 3825 - DNA, 24 bp, Homo sapiens
attcacgattggtcctgccccacc

SEQ ID NO: 3826 - DNA, 20 bp, Homo sapiens
ccgaagtgctcggtacatgg

SEQ ID NO: 3827 - DNA, 24 bp, Homo sapiens
ggtcttggctgaaggcactttaat

SEQ ID NO: 3828 - DNA, 22 bp, Homo sapiens
atggaaaacagttcaccccatg

SEQ ID NO: 3829 - DNA, 22 bp, Homo sapiens
ataaatctagacaccactctgt

SEQ ID NO: 3830 - DNA, 24 bp, Homo sapiens
tttgtggatctgtatggcgcccag

SEQ ID NO: 3831 - DNA, 19 bp, Homo sapiens
ctgagcgaggcatgaggcc

SEQ ID NO: 3832 - DNA, 17 bp, Homo sapiens
ccgtgttgcgtctcctt

SEQ ID NO: 3833 - DNA, 23 bp, Homo sapiens
tagcatggtcagctagcagctgg

SEQ ID NO: 3834 - DNA, 17 bp, Homo sapiens
ccgccttgtctgggagg

SEQ ID NO: 3835 - DNA, 24 bp, Homo sapiens
tttcttgagccggtccactatctt

SEQ ID NO: 3836 - DNA, 19 bp, Homo sapiens
agaggggatcttggccaca

SEQ ID NO: 3837 - DNA, 23 bp, Homo sapiens
aatagagaaagaggacttcgttg

SEQ ID NO: 3838 - DNA, 24 bp, Homo sapiens
catcagacgaagacatccagttcc

SEQ ID NO: 3839 - DNA, 18 bp, Homo sapiens
ccaacctgcgagaccaac

SEQ ID NO: 3840 - DNA, 19 bp, Homo sapiens
ggctttcctccccttttcc

SEQ ID NO: 3841 - DNA, 24 bp, Homo sapiens
gatgtctccctctgcaggtgtggc

SEQ ID NO: 3842 - DNA, 24 bp, Homo sapiens
caccaaccggcccacagagctccc

SEQ ID NO: 3843 - DNA, 23 bp, Homo sapiens
cattcacaaatcttgtcaccagg

SEQ ID NO: 3844 - DNA, 22 bp, Homo sapiens
cactttttccatgggaaagttt

SEQ ID NO: 3845 - DNA, 16 bp, Homo sapiens
gagtctgaagctgcct

SEQ ID NO: 3846 - DNA, 20 bp, Homo sapiens
cctgcacatgtatcccagga

SEQ ID NO: 3847 - DNA, 21 bp, Homo sapiens
agggcttttacatctatcagg

SEQ ID NO: 3848 - DNA, 20 bp, Homo sapiens
ggctgggaagctttgggctg

SEQ ID NO: 3849 - DNA, 24 bp, Homo sapiens
cctgagaacaaatagtaacactcc

SEQ ID NO: 3850 - DNA, 20 bp, Homo sapiens
acacttcagacttaggaggc

SEQ ID NO: 3851 - DNA, 16 bp, Homo sapiens
cgtgagccaccacgcc

SEQ ID NO: 3852 - DNA, 21 bp, Homo sapiens
tcaaactcctgacctcaaatg

SEQ ID NO: 3853 - DNA, 16 bp, Homo sapiens
gtgtccaagggcttcc

SEQ ID NO: 3854 - DNA, 24 bp, Homo sapiens
tcatttttgaaatcgccagtgata

SEQ ID NO: 3855 - DNA, 19 bp, Homo sapiens
gaagatctgggcaaagtct

SEQ ID NO: 3856 - DNA, 24 bp, Homo sapiens
cttctgtaactctttggtctcagg

SEQ ID NO: 3857 - DNA, 20 bp, Homo sapiens
ctttcctgtgggtgccgcca

SEQ ID NO: 3858 - DNA, 24 bp, Homo sapiens
ccttgaggctactcacctaggaag

SEQ ID NO: 3859 - DNA, 19 bp, Homo sapiens
gttcaggaaggagttgacc

SEQ ID NO: 3860 - DNA, 17 bp, Homo sapiens
cctccaaaccgctcccc

SEQ ID NO: 3861 - DNA, 20 bp, Homo sapiens
agtacagggagccctttggg

SEQ ID NO: 3862 - DNA, 24 bp, Homo sapiens
ctacatccacaccaacttcatcca

SEQ ID NO: 3863 - DNA, 24 bp, Homo sapiens
cagtcctgggcctggtcaggtgac

SEQ ID NO: 3864 - DNA, 21 bp, Homo sapiens
tcagggaatccagcttcttcg

SEQ ID NO: 3865 - DNA, 19 bp, Homo sapiens
gaagtcatccgaatcctcc

SEQ ID NO: 3866 - DNA, 18 bp, Homo sapiens
ccagggaccttcctagac

SEQ ID NO: 3867 - DNA, 16 bp, Homo sapiens
cttggcaggatggacc

SEQ ID NO: 3868 - DNA, 21 bp, Homo sapiens
tatcttgacatcatgagtttt

SEQ ID NO: 3869 - DNA, 24 bp, Homo sapiens
gaccctgggaaaggtagagtgttt

SEQ ID NO: 3870 - DNA, 21 bp, Homo sapiens
ctggagagcaataccaacctg

SEQ ID NO: 3871 - DNA, 23 bp, Homo sapiens
gattctgattgagattttaagtc

SEQ ID NO: 3872 - DNA, 23 bp, Homo sapiens
acctggtagtatagaagccaggt

SEQ ID NO: 3873 - DNA, 16 bp, Homo sapiens
tctcaagcaggggaag

SEQ ID NO: 3874 - DNA, 24 bp, Homo sapiens
acccaggggaaaatcatatcaaag

SEQ ID NO: 3875 - DNA, 19 bp, Homo sapiens
tgctggagattatcacgac

SEQ ID NO: 3876 - DNA, 24 bp, Homo sapiens
tggaggtaaaaggagtcttattag

SEQ ID NO: 3877 - DNA, 24 bp, Homo sapiens
ggcttttggttccccttgccaggt

SEQ ID NO: 3878 - DNA, 24 bp, Homo sapiens
ccttaccttaaccacaatgatgac

SEQ ID NO: 3879 - DNA, 21 bp, Homo sapiens
tttcctagcagagaaggaatg

SEQ ID NO: 3880 - DNA, 23 bp, Homo sapiens
ctggtgtctttggaagttttctc

SEQ ID NO: 3881 - DNA, 19 bp, Homo sapiens
ccaaaccactcagctatgt

SEQ ID NO: 3882 - DNA, 19 bp, Homo sapiens
gagagaagtagtgcatgcc

SEQ ID NO: 3883 - DNA, 17 bp, Homo sapiens
aaatcgctgctgtcagc

SEQ ID NO: 3884 - DNA, 23 bp, Homo sapiens
ttgtgtccagtgtttaggaacca

SEQ ID NO: 3885 - DNA, 20 bp, Homo sapiens
caggtgattccagatcactg

SEQ ID NO: 3886 - DNA, 24 bp, Homo sapiens
gctgtaagcctttatcagtgaatc

SEQ ID NO: 3887 - DNA, 18 bp, Homo sapiens
tgtggcctctaatcatct

SEQ ID NO: 3888 - DNA, 24 bp, Homo sapiens
tgttccgagtttaccttctcaggt

SEQ ID NO: 3889 - DNA, 23 bp, Homo sapiens
tctactgtctgagcagttgtggg

SEQ ID NO: 3890 - DNA, 24 bp, Homo sapiens
gtgttactggcaaagatacagtga

SEQ ID NO: 3891 - DNA, 23 bp, Homo sapiens
taagcacagagtgctaaaggaag

SEQ ID NO: 3892 - DNA, 21 bp, Homo sapiens
agccaccatgcccagcctttg

SEQ ID NO: 3893 - DNA, 21 bp, Homo sapiens
taccaaggttttgaaaaggcc

SEQ ID NO: 3894 - DNA, 23 bp, Homo sapiens
agctcctttaaaaaaaaaatctc

SEQ ID NO: 3895 - DNA, 23 bp, Homo sapiens
agctctaacatcatttgaaaggg

SEQ ID NO: 3896 - DNA, 17 bp, Homo sapiens
tgcttaccgcttctact

SEQ ID NO: 3897 - DNA, 22 bp, Homo sapiens
tcttcccatctaactaggaatg

SEQ ID NO: 3898 - DNA, 20 bp, Homo sapiens
cagcttcaatcaccatgtcg

SEQ ID NO: 3899 - DNA, 20 bp, Homo sapiens
ggtgaaaaacacaggtgtgc

SEQ ID NO: 3900 - DNA, 19 bp, Homo sapiens
ttgctgaagatggaatccc

SEQ ID NO: 3901 - DNA, 22 bp, Homo sapiens
gactaaacaacttgaaagtctc

SEQ ID NO: 3902 - DNA, 24 bp, Homo sapiens
ctacggagtatctagaactcatta

SEQ ID NO: 3903 - DNA, 24 bp, Homo sapiens
gataaggggctaaagactatactt

SEQ ID NO: 3904 - DNA, 24 bp, Homo sapiens
acaaacaaaaaaacccaccaagcc

SEQ ID NO: 3905 - DNA, 18 bp, Homo sapiens
tctggctattcttggtgc

SEQ ID NO: 3906 - DNA, 21 bp, Homo sapiens
cttgcaaagagagagagcagg

SEQ ID NO: 3907 - DNA, 24 bp, Homo sapiens
atcttccactttgactgaaatgat

SEQ ID NO: 3908 - DNA, 19 bp, Homo sapiens
cgcagtgagggtggcatct

SEQ ID NO: 3909 - DNA, 18 bp, Homo sapiens
acaccttatagttgtgcc

SEQ ID NO: 3910 - DNA, 17 bp, Homo sapiens
gctcccatcagccctgc

SEQ ID NO: 3911 - DNA, 20 bp, Homo sapiens
cataagggctcaaatgtgct

SEQ ID NO: 3912 - DNA, 18 bp, Homo sapiens
cttgatgggactctacca

SEQ ID NO: 3913 - DNA, 21 bp, Homo sapiens
gatctagctctgtagatcttc

SEQ ID NO: 3914 - DNA, 22 bp, Homo sapiens
tctaccttttctcattcccctt

SEQ ID NO: 3915 - DNA, 24 bp, Homo sapiens
caagggcttcctacgtagagttta

SEQ ID NO: 3916 - DNA, 24 bp, Homo sapiens
attacctctgctcttcagaggaac

SEQ ID NO: 3917 - DNA, 24 bp, Homo sapiens
ttcttcttgcacaggacctgacca

SEQ ID NO: 3918 - DNA, 18 bp, Homo sapiens
cactgaacccccaaactc

SEQ ID NO: 3919 - DNA, 21 bp, Homo sapiens
acaagctctccaaatttctga

SEQ ID NO: 3920 - DNA, 21 bp, Homo sapiens
ggttatctctgtgaatctcag

SEQ ID NO: 3921 - DNA, 21 bp, Homo sapiens
agagatgataagcactggaag

SEQ ID NO: 3922 - DNA, 22 bp, Homo sapiens
cgctgagcaagtgctttatatg

SEQ ID NO: 3923 - DNA, 23 bp, Homo sapiens
tttcagctttatacagaggattg

SEQ ID NO: 3924 - DNA, 21 bp, Homo sapiens
gactaacaacactggcaattt

SEQ ID NO: 3925 - DNA, 20 bp, Homo sapiens
aggaaataagtttacctgag

SEQ ID NO: 3926 - DNA, 20 bp, Homo sapiens
ctcagtcctcttctctttct

SEQ ID NO: 3927 - DNA, 21 bp, Homo sapiens
cctgcacctctgaaaataatt

SEQ ID NO: 3928 - DNA, 23 bp, Homo sapiens
tttttggtaaatactttaatagc

SEQ ID NO: 3929 - DNA, 21 bp, Homo sapiens
tttgtcaggcaacaggtttac

SEQ ID NO: 3930 - DNA, 20 bp, Homo sapiens
cagaatggcaataaggagga

SEQ ID NO: 3931 - DNA, 29 bp, Homo sapiens
agtaaatatctaaaagcattttattttac

SEQ ID NO: 3932 - DNA, 22 bp, Homo sapiens
tattgggtaagactcacatcaa

SEQ ID NO: 3933 - DNA, 24 bp, Homo sapiens
ttacttcatttttatagagtttag

SEQ ID NO: 3934 - DNA, 23 bp, Homo sapiens
tgctttcgcactttttcttccac

SEQ ID NO: 3935 - DNA, 23 bp, Homo sapiens
aggttgaaatttatattgtgtgt

SEQ ID NO: 3936 - DNA, 20 bp, Homo sapiens
gcatacgctgtcaattctgt

SEQ ID NO: 3937 - DNA, 20 bp, Homo sapiens
gagttgttacatctcctacc

SEQ ID NO: 3938 - DNA, 25 bp, Homo sapiens
ctagaagaagttgcaattacttttg

SEQ ID NO: 3939 - DNA, 23 bp, Homo sapiens
acttcctcattttgaatctacag

SEQ ID NO: 3940 - DNA, 24 bp, Homo sapiens
tgttgcattcatttttataggacc

SEQ ID NO: 3941 - DNA, 23 bp, Homo sapiens
gcctttgttctttaacaatgata

SEQ ID NO: 3942 - DNA, 20 bp, Homo sapiens
tctgggtttttcactacctg

SEQ ID NO: 3943 - DNA, 24 bp, Homo sapiens
gagatcttcttatcagctagtcct

SEQ ID NO: 3944 - DNA, 21 bp, Homo sapiens
gccacctaccagtctccagtc

SEQ ID NO: 3945 - DNA, 22 bp, Homo sapiens
gtccgttcctctggaggtttta

SEQ ID NO: 3946 - DNA, 17 bp, Homo sapiens
ctggttgaccaactggt

SEQ ID NO: 3947 - DNA, 24 bp, Homo sapiens
tcaagtgatcttcccgcctcagcc

SEQ ID NO: 3948 - DNA, 24 bp, Homo sapiens
ggcctaagaggttaactctttaag

SEQ ID NO: 3949 - DNA, 21 bp, Homo sapiens
tcaccctgatttttttccccc

SEQ ID NO: 3950 - DNA, 19 bp, Homo sapiens
acacttacccaggggttcc

SEQ ID NO: 3951 - DNA, 19 bp, Homo sapiens
tggcttgacttttctcatt

SEQ ID NO: 3952 - DNA, 20 bp, Homo sapiens
tctgcacgaatgcttctacc

SEQ ID NO: 3953 - DNA, 24 bp, Homo sapiens
cccaagtgtatatcagtatattaa

SEQ ID NO: 3954 - DNA, 24 bp, Homo sapiens
ataagtaccaggaataaagtctgt

SEQ ID NO: 3955 - DNA, 21 bp, Homo sapiens
cagtattaggtacccctgaag

SEQ ID NO: 3956 - DNA, 22 bp, Homo sapiens
attctacaatgaatgcccatat

SEQ ID NO: 3957 - DNA, 19 bp, Homo sapiens
catttgttcaaaggttgcc

SEQ ID NO: 3958 - DNA, 19 bp, Homo sapiens
acaaaggggatgttagact

SEQ ID NO: 3959 - DNA, 23 bp, Homo sapiens
tagacccttatccatctcaagtt

SEQ ID NO: 3960 - DNA, 24 bp, Homo sapiens
ctggtaaggcccccagcaaaactt

SEQ ID NO: 3961 - DNA, 19 bp, Homo sapiens
gccagcctaaggaatttca

SEQ ID NO: 3962 - DNA, 17 bp, Homo sapiens
tattggcatgaaatggc

SEQ ID NO: 3963 - DNA, 20 bp, Homo sapiens
caatggatcctgcctgggag

SEQ ID NO: 3964 - DNA, 21 bp, Homo sapiens
aacaaaaaacaaagcggattc

SEQ ID NO: 3965 - DNA, 21 bp, Homo sapiens
acaagaagcacagagaatagt

SEQ ID NO: 3966 - DNA, 21 bp, Homo sapiens
taagggtttacagctgatgaa

SEQ ID NO: 3967 - DNA, 20 bp, Homo sapiens
tggataatgcagcatgttag

SEQ ID NO: 3968 - DNA, 20 bp, Homo sapiens
tatacctcaagtcctcctcc

SEQ ID NO: 3969 - DNA, 22 bp, Homo sapiens
agtgaataagtattgaaccaaa

SEQ ID NO: 3970 - DNA, 22 bp, Homo sapiens
ttgtggacttttcaagtttctc

SEQ ID NO: 3971 - DNA, 21 bp, Homo sapiens
ttcttaaccttctatttgaag

SEQ ID NO: 3972 - DNA, 21 bp, Homo sapiens
cttgaagggtcttgcaagcgg

SEQ ID NO: 3973 - DNA, 20 bp, Homo sapiens
aggtgctgatatcaagtaag

SEQ ID NO: 3974 - DNA, 24 bp, Homo sapiens
acacccagcctgatacgtacattt

SEQ ID NO: 3975 - DNA, 20 bp, Homo sapiens
gctagtgatcaaatcagaag

SEQ ID NO: 3976 - DNA, 22 bp, Homo sapiens
actttcttttaaaaggagaaat

SEQ ID NO: 3977 - DNA, 21 bp, Homo sapiens
tggcaggtaaatacactgagt

SEQ ID NO: 3978 - DNA, 25 bp, Homo sapiens
tgacttcaagtttcctaaaacttac

SEQ ID NO: 3979 - DNA, 17 bp, Homo sapiens
acgtacatccagtgctt

SEQ ID NO: 3980 - DNA, 19 bp, Homo sapiens
ttgatgagataaggacggc

SEQ ID NO: 3981 - DNA, 22 bp, Homo sapiens
tcttctaacagtatatttctgc

SEQ ID NO: 3982 - DNA, 21 bp, Homo sapiens
aactctgaatgtagctcttta

SEQ ID NO: 3983 - DNA, 23 bp, Homo sapiens
ctgtcaaagtttaacataactgt

SEQ ID NO: 3984 - DNA, 19 bp, Homo sapiens
agccagaacccatattaac

SEQ ID NO: 3985 - DNA, 22 bp, Homo sapiens
tggtagatttggggaaatatgg

SEQ ID NO: 3986 - DNA, 23 bp, Homo sapiens
attgctttttggatttatgttgc

SEQ ID NO: 3987 - DNA, 23 bp, Homo sapiens
gttagcagaaaaaaactgcaaat

SEQ ID NO: 3988 - DNA, 17 bp, Homo sapiens
ggtcttctgctttgctg

SEQ ID NO: 3989 - DNA, 20 bp, Homo sapiens
actgccacatcccctttgac

SEQ ID NO: 3990 - DNA, 23 bp, Homo sapiens
aattgtttcgcaaattaattttg

SEQ ID NO: 3991 - DNA, 25 bp, Homo sapiens
tatttgtaaacatatttattgcaac

SEQ ID NO: 3992 - DNA, 21 bp, Homo sapiens
tggggtttttgttgttgttat

SEQ ID NO: 3993 - DNA, 23 bp, Homo sapiens
aaaagaaattaaacttactcagc

SEQ ID NO: 3994 - DNA, 22 bp, Homo sapiens
actgaaatggaaaaaatatggc

SEQ ID NO: 3995 - DNA, 20 bp, Homo sapiens
tcagccgcttttctgccttc

SEQ ID NO: 3996 - DNA, 17 bp, Homo sapiens
acagagggctgcgtctc

SEQ ID NO: 3997 - DNA, 18 bp, Homo sapiens
tccactgctgtcctcttc

SEQ ID NO: 3998 - DNA, 16 bp, Homo sapiens
cagtcccggcaggagt

SEQ ID NO: 3999 - DNA, 16 bp, Homo sapiens
tggctgccaggctacg

SEQ ID NO: 4000 - DNA, 19 bp, Homo sapiens
acctcgggagcggaggatc

SEQ ID NO: 4001 - DNA, 16 bp, Homo sapiens
gcagggctaaggggcc

SEQ ID NO: 4002 - DNA, 18 bp, Homo sapiens
ggcacatcggctctaagc

SEQ ID NO: 4003 - DNA, 22 bp, Homo sapiens
ggcattgcagggtgctagtcct

SEQ ID NO: 4004 - DNA, 18 bp, Homo sapiens
ccttaggttggccgttgt

SEQ ID NO: 4005 - DNA, 21 bp, Homo sapiens
cccactttgaggaggttgtct

SEQ ID NO: 4006 - DNA, 17 bp, Homo sapiens
atgctcccatctccagc

SEQ ID NO: 4007 - DNA, 19 bp, Homo sapiens
aacgatggagtgaggcagg

SEQ ID NO: 4008 - DNA, 21 bp, Homo sapiens
tgaaggaaagagacctaaacc

SEQ ID NO: 4009 - DNA, 22 bp, Homo sapiens
agataacagcaacacattggac

SEQ ID NO: 4010 - DNA, 24 bp, Homo sapiens
ttctgaataacacgcttgggaatc

SEQ ID NO: 4011 - DNA, 18 bp, Homo sapiens
ttctcttgcagctatggc

SEQ ID NO: 4012 - DNA, 24 bp, Homo sapiens
ctaaggtagctcaaggttgaaatg

SEQ ID NO: 4013 - DNA, 17 bp, Homo sapiens
agggccaggcaagacag

SEQ ID NO: 4014 - DNA, 21 bp, Homo sapiens
cttccttgatgggtggggtag

SEQ ID NO: 4015 - DNA, 20 bp, Homo sapiens
ggcaccataaatagggaagc

SEQ ID NO: 4016 - DNA, 20 bp, Homo sapiens
ttggctaactgcacagcagg

SEQ ID NO: 4017 - DNA, 23 bp, Homo sapiens
gaaaaaggtgaacagttgggtga

SEQ ID NO: 4018 - DNA, 23 bp, Homo sapiens
taatttgttccttctctgtctcc

SEQ ID NO: 4019 - DNA, 24 bp, Homo sapiens
gaaagagtaatcccaacggaaggg

SEQ ID NO: 4020 - DNA, 20 bp, Homo sapiens
ctgtgtgtgacattcatact

SEQ ID NO: 4021 - DNA, 23 bp, Homo sapiens
ttctagacttaaggaagcaggag

SEQ ID NO: 4022 - DNA, 17 bp, Homo sapiens
catggaggagaggagct

SEQ ID NO: 4023 - DNA, 24 bp, Homo sapiens
tggtgataagggcatcaggataat

SEQ ID NO: 4024 - DNA, 19 bp, Homo sapiens
ccaaactacagcgggtgag

SEQ ID NO: 4025 - DNA, 20 bp, Homo sapiens
ctgcaccataaccctcagct

SEQ ID NO: 4026 - DNA, 22 bp, Homo sapiens
ttttctaggctgctttctccca

SEQ ID NO: 4027 - DNA, 24 bp, Homo sapiens
acccccttttttatccctgtaaaa

SEQ ID NO: 4028 - DNA, 21 bp, Homo sapiens
gggatttcagcactcatagga

SEQ ID NO: 4029 - DNA, 23 bp, Homo sapiens
cagagacattctccacacctgcc

SEQ ID NO: 4030 - DNA, 23 bp, Homo sapiens
ttggatcaggtgagcaggagaac

SEQ ID NO: 4031 - DNA, 24 bp, Homo sapiens
gctgacagtccattaagtgcccct

SEQ ID NO: 4032 - DNA, 19 bp, Homo sapiens
ttttggatcggttcatccc

SEQ ID NO: 4033 - DNA, 24 bp, Homo sapiens
ccccctagggaagagaaattaaag

SEQ ID NO: 4034 - DNA, 19 bp, Homo sapiens
actgcagcctgctgctatc

SEQ ID NO: 4035 - DNA, 24 bp, Homo sapiens
acagctcaccctccccactctgtt

SEQ ID NO: 4036 - DNA, 24 bp, Homo sapiens
cacttcccctattctgatacttgg

SEQ ID NO: 4037 - DNA, 19 bp, Homo sapiens
atccactttggtggtgcca

SEQ ID NO: 4038 - DNA, 22 bp, Homo sapiens
gcttcccttggactctcacacc

SEQ ID NO: 4039 - DNA, 24 bp, Homo sapiens
cctctacctcactaagctccctgc

SEQ ID NO: 4040 - DNA, 22 bp, Homo sapiens
ggaacaccagagaggccggact

SEQ ID NO: 4041 - DNA, 18 bp, Homo sapiens
caggttggcttaggtgtg

SEQ ID NO: 4042 - DNA, 18 bp, Homo sapiens
gtccctgatgggcctggg

SEQ ID NO: 4043 - DNA, 24 bp, Homo sapiens
aagaccactgttgagtccactgaa

SEQ ID NO: 4044 - DNA, 19 bp, Homo sapiens
cttggaatggcagcccatc

SEQ ID NO: 4045 - DNA, 19 bp, Homo sapiens
gacaccatggtcagagtcc

SEQ ID NO: 4046 - DNA, 22 bp, Homo sapiens
atgaagccctggggttcagagt

SEQ ID NO: 4047 - DNA, 23 bp, Homo sapiens
caccagctgctgtgagataatgt

SEQ ID NO: 4048 - DNA, 19 bp, Homo sapiens
aaagtacaggtcctgacag

SEQ ID NO: 4049 - DNA, 18 bp, Homo sapiens
cagtgtaggatgaaagac

SEQ ID NO: 4050 - DNA, 20 bp, Homo sapiens
tgacaggaagcatggcactc

SEQ ID NO: 4051 - DNA, 16 bp, Homo sapiens
gtgcagtggggcaagc

SEQ ID NO: 4052 - DNA, 18 bp, Homo sapiens
gtcaggcggcttcttagt

SEQ ID NO: 4053 - DNA, 22 bp, Homo sapiens
actcaagtcctagagggacact

SEQ ID NO: 4054 - DNA, 20 bp, Homo sapiens
cctctgcccctttaagtcac

SEQ ID NO: 4055 - DNA, 16 bp, Homo sapiens
ccgctggtatgcccgc

SEQ ID NO: 4056 - DNA, 16 bp, Homo sapiens
agccaaggaaacttgc

SEQ ID NO: 4057 - DNA, 22 bp, Homo sapiens
ctgatggacagttgatttatgc

SEQ ID NO: 4058 - DNA, 21 bp, Homo sapiens
taaagtcaatgtcactctcag

SEQ ID NO: 4059 - DNA, 25 bp, Homo sapiens
ggaaaaaaactgaattttactcctc

SEQ ID NO: 4060 - DNA, 19 bp, Homo sapiens
ccaaatgagcctgcgaaaa

SEQ ID NO: 4061 - DNA, 24 bp, Homo sapiens
ttcagcttgcctcttgcttcttat

SEQ ID NO: 4062 - DNA, 21 bp, Homo sapiens
tctaagatgcagctttttctc

SEQ ID NO: 4063 - DNA, 24 bp, Homo sapiens
tatcaaggagctccatggactctc

SEQ ID NO: 4064 - DNA, 20 bp, Homo sapiens
acctgaccagcagagtgatg

SEQ ID NO: 4065 - DNA, 23 bp, Homo sapiens
tggttagaccataactgaaattc

SEQ ID NO: 4066 - DNA, 19 bp, Homo sapiens
ccggagaactttgatccag

SEQ ID NO: 4067 - DNA, 23 bp, Homo sapiens
tgagccaggatggagatgaagag

SEQ ID NO: 4068 - DNA, 24 bp, Homo sapiens
cattcccaaggacactgtggtttt

SEQ ID NO: 4069 - DNA, 22 bp, Homo sapiens
gccttttgcccactgaaaaaat

SEQ ID NO: 4070 - DNA, 19 bp, Homo sapiens
tcactattcctcatgccac

SEQ ID NO: 4071 - DNA, 18 bp, Homo sapiens
tccttgtccaagaatcga

SEQ ID NO: 4072 - DNA, 16 bp, Homo sapiens
aacctgccctatgtcc

SEQ ID NO: 4073 - DNA, 24 bp, Homo sapiens
ggtcatgattcacagaccactggt

SEQ ID NO: 4074 - DNA, 24 bp, Homo sapiens
agtgcaggcagaattggatcaggt

SEQ ID NO: 4075 - DNA, 23 bp, Homo sapiens
caagacagaggtgttggcagtgg

SEQ ID NO: 4076 - DNA, 22 bp, Homo sapiens
ctcacttgcttttctctctcca

SEQ ID NO: 4077 - DNA, 22 bp, Homo sapiens
tggcttcataaaggaaggccag

SEQ ID NO: 4078 - DNA, 24 bp, Homo sapiens
tatttaagaaaaagtggaattaaa

SEQ ID NO: 4079 - DNA, 22 bp, Homo sapiens
gcagacggtccctccccacgac

SEQ ID NO: 4080 - DNA, 22 bp, Homo sapiens
ctgttttagatttttttcccag

SEQ ID NO: 4081 - DNA, 19 bp, Homo sapiens
gctcctcctcttcaccagg

SEQ ID NO: 4082 - DNA, 20 bp, Homo sapiens
atcttggttttgaggggtgg

SEQ ID NO: 4083 - DNA, 20 bp, Homo sapiens
ccactatcactgacatcttc

SEQ ID NO: 4084 - DNA, 23 bp, Homo sapiens
ctgcttgcaaactcagcatattc

SEQ ID NO: 4085 - DNA, 17 bp, Homo sapiens
agaaggcggccggggac

SEQ ID NO: 4086 - DNA, 21 bp, Homo sapiens
cctcccagaggctttacctgg

SEQ ID NO: 4087 - DNA, 24 bp, Homo sapiens
ctgcgaaagccttcggcccggggc

SEQ ID NO: 4088 - DNA, 17 bp, Homo sapiens
ggtgtcctggctggcgc

SEQ ID NO: 4089 - DNA, 23 bp, Homo sapiens
ttcgagcagctcaaccgcaactt

SEQ ID NO: 4090 - DNA, 16 bp, Homo sapiens
ccaccaccgtgcgagt

SEQ ID NO: 4091 - DNA, 16 bp, Homo sapiens
atgccctggctgcagt

SEQ ID NO: 4092 - DNA, 20 bp, Homo sapiens
gtccatcatgtcgcgggggg

SEQ ID NO: 4093 - DNA, 20 bp, Homo sapiens
ttccgtgagctgctcagcca

SEQ ID NO: 4094 - DNA, 24 bp, Homo sapiens
agaacttgtccaggatgaagttgc

SEQ ID NO: 4095 - DNA, 17 bp, Homo sapiens
gccaacgtcatgagtgc

SEQ ID NO: 4096 - DNA, 16 bp, Homo sapiens
gttggggaagtactgc

SEQ ID NO: 4097 - DNA, 24 bp, Homo sapiens
tgctggtgcgcggcagcgcggacg

SEQ ID NO: 4098 - DNA, 16 bp, Homo sapiens
gtgcgcccgaactctt

SEQ ID NO: 4099 - DNA, 17 bp, Homo sapiens
ccaagtcctcgagggcc

SEQ ID NO: 4100 - DNA, 17 bp, Homo sapiens
agcggcagccgaaacac

SEQ ID NO: 4101 - DNA, 19 bp, Homo sapiens
aggtgcagcggcgcgcagc

SEQ ID NO: 4102 - DNA, 18 bp, Homo sapiens
gcctcgggtcgaggaagg

SEQ ID NO: 4103 - DNA, 17 bp, Homo sapiens
tccttccgtgtggtgtc

SEQ ID NO: 4104 - DNA, 24 bp, Homo sapiens
ctcgcgcgcctcgctcagcacgtg

SEQ ID NO: 4105 - DNA, 17 bp, Homo sapiens
atccaccaggccctggt

SEQ ID NO: 4106 - DNA, 24 bp, Homo sapiens
gaagttgcgcatcatgctgtgggc

SEQ ID NO: 4107 - DNA, 21 bp, Homo sapiens
tacggcgacgttttccagatc

SEQ ID NO: 4108 - DNA, 16 bp, Homo sapiens
aagccatgctgcggcc

SEQ ID NO: 4109 - DNA, 24 bp, Homo sapiens
gaaacgcggcggcggtgggccagg

SEQ ID NO: 4110 - DNA, 24 bp, Homo sapiens
ggtcggcgaaggccgagccctgct

SEQ ID NO: 4111 - DNA, 16 bp, Homo sapiens
acggaggcggcagctc

SEQ ID NO: 4112 - DNA, 21 bp, Homo sapiens
ccactatggggcagctgccca

SEQ ID NO: 4113 - DNA, 19 bp, Homo sapiens
acgctcctgctactcctgt

SEQ ID NO: 4114 - DNA, 23 bp, Homo sapiens
cgagcgaacgagaggtgagccgc

SEQ ID NO: 4115 - DNA, 23 bp, Homo sapiens
cagcatgggcaccagcctcagcc

SEQ ID NO: 4116 - DNA, 22 bp, Homo sapiens
gcaaacgggcccgggggcgcgg

SEQ ID NO: 4117 - DNA, 17 bp, Homo sapiens
gctcctgtctctgcacc

SEQ ID NO: 4118 - DNA, 18 bp, Homo sapiens
catgcacagtggccagca

SEQ ID NO: 4119 - DNA, 17 bp, Homo sapiens
cagctccgacctctcca

SEQ ID NO: 4120 - DNA, 18 bp, Homo sapiens
ggtttagcggccaagggt

SEQ ID NO: 4121 - DNA, 22 bp, Homo sapiens
agaaaattgagggaaaactctt

SEQ ID NO: 4122 - DNA, 20 bp, Homo sapiens
tgaacatgcatcacacatac

SEQ ID NO: 4123 - DNA, 19 bp, Homo sapiens
acttccctctttttttctc

SEQ ID NO: 4124 - DNA, 24 bp, Homo sapiens
tttccctcagatatacttcaaaat

SEQ ID NO: 4125 - DNA, 21 bp, Homo sapiens
cttagctaccagttggtagtg

SEQ ID NO: 4126 - DNA, 24 bp, Homo sapiens
aaagtatcgcctggttatttcaag

SEQ ID NO: 4127 - DNA, 21 bp, Homo sapiens
acaaggaaggagtactgaagc

SEQ ID NO: 4128 - DNA, 23 bp, Homo sapiens
gctgctcagtccctcaagccatc

SEQ ID NO: 4129 - DNA, 22 bp, Homo sapiens
tggatgatctgtttctaaagcg

SEQ ID NO: 4130 - DNA, 23 bp, Homo sapiens
gtcttcaacttattttcttacac

SEQ ID NO: 4131 - DNA, 21 bp, Homo sapiens
agatgtcacatctgctaaagc

SEQ ID NO: 4132 - DNA, 28 bp, Homo sapiens
gtattttttccccttaattaagaaatac

SEQ ID NO: 4133 - DNA, 24 bp, Homo sapiens
aaaagagtaagataggttgtcttt

SEQ ID NO: 4134 - DNA, 24 bp, Homo sapiens
tccagcatacttcagcaaagatgc

SEQ ID NO: 4135 - DNA, 17 bp, Homo sapiens
tgccgtgggataaaggg

SEQ ID NO: 4136 - DNA, 21 bp, Homo sapiens
agtcaaatgttcatacagtgc

SEQ ID NO: 4137 - DNA, 19 bp, Homo sapiens
gaagtgagggagatggtag

SEQ ID NO: 4138 - DNA, 23 bp, Homo sapiens
aaaaggaagaagcatacaattcc

SEQ ID NO: 4139 - DNA, 18 bp, Homo sapiens
actgcctttgagctgaag

SEQ ID NO: 4140 - DNA, 24 bp, Homo sapiens
cctttatgtaatttcctaggcatc

SEQ ID NO: 4141 - DNA, 21 bp, Homo sapiens
agtcacttaaataataaagcc

SEQ ID NO: 4142 - DNA, 23 bp, Homo sapiens
atagtgttgatttgtcagtgttc

SEQ ID NO: 4143 - DNA, 21 bp, Homo sapiens
taccatagcttttcatgaggg

SEQ ID NO: 4144 - DNA, 21 bp, Homo sapiens
agtgcattaaatttaataggt

SEQ ID NO: 4145 - DNA, 24 bp, Homo sapiens
tcaattctaacacagatttcacag

SEQ ID NO: 4146 - DNA, 21 bp, Homo sapiens
gttgttgttcctccttaggaa

SEQ ID NO: 4147 - DNA, 24 bp, Homo sapiens
aagcaaagtcttgaatctctatag

SEQ ID NO: 4148 - DNA, 24 bp, Homo sapiens
actgaataatgttttaatttttag

SEQ ID NO: 4149 - DNA, 18 bp, Homo sapiens
tacttctgagcaaggcac

SEQ ID NO: 4150 - DNA, 27 bp, Homo sapiens
tgtgaactttcttaattggaaatattc

SEQ ID NO: 4151 - DNA, 22 bp, Homo sapiens
agtacctttccttgtttcctag

SEQ ID NO: 4152 - DNA, 24 bp, Homo sapiens
gccttaaaaaataatagtcgacta

SEQ ID NO: 4153 - DNA, 19 bp, Homo sapiens
cagcaattgcaccacatct

SEQ ID NO: 4154 - DNA, 16 bp, Homo sapiens
gatgccagagctctcc

SEQ ID NO: 4155 - DNA, 24 bp, Homo sapiens
accgtgattcacactgaatgtaaa

SEQ ID NO: 4156 - DNA, 23 bp, Homo sapiens
tgcaatttataaacctgtcactg

SEQ ID NO: 4157 - DNA, 23 bp, Homo sapiens
caccacacgcctatgtctagtaa

SEQ ID NO: 4158 - DNA, 24 bp, Homo sapiens
aagatttttcttacctgtcatttt

SEQ ID NO: 4159 - DNA, 20 bp, Homo sapiens
ccatgagtggagggtcatta

SEQ ID NO: 4160 - DNA, 20 bp, Homo sapiens
agtgagactagaccaaattt

SEQ ID NO: 4161 - DNA, 22 bp, Homo sapiens
tccacaagttgaaggaaaaaat

SEQ ID NO: 4162 - DNA, 18 bp, Homo sapiens
ccagcagttgaaaagagt

SEQ ID NO: 4163 - DNA, 21 bp, Homo sapiens
tctccgccatgatgcttactg

SEQ ID NO: 4164 - DNA, 18 bp, Homo sapiens
caatacttcggcttggca

SEQ ID NO: 4165 - DNA, 21 bp, Homo sapiens
ggtataactcacctaccaaag

SEQ ID NO: 4166 - DNA, 19 bp, Homo sapiens
aacatagatgccgcaatag

SEQ ID NO: 4167 - DNA, 23 bp, Homo sapiens
gttctttagcacaaacaactaac

SEQ ID NO: 4168 - DNA, 24 bp, Homo sapiens
aactgcctgtaatattaacataaa

SEQ ID NO: 4169 - DNA, 25 bp, Homo sapiens
tacttttctgaataagtatgccaag

SEQ ID NO: 4170 - DNA, 24 bp, Homo sapiens
tcatttttttcctaaagtattagc

SEQ ID NO: 4171 - DNA, 25 bp, Homo sapiens
ctctgaagtaagcatattttcaatg

SEQ ID NO: 4172 - DNA, 19 bp, Homo sapiens
atgtgattcagggtttcag

SEQ ID NO: 4173 - DNA, 18 bp, Homo sapiens
ataacattgctttggctc

SEQ ID NO: 4174 - DNA, 21 bp, Homo sapiens
gcaactagcatcaacatttcc

SEQ ID NO: 4175 - DNA, 24 bp, Homo sapiens
gtagttcagaagatgttaaatgga

SEQ ID NO: 4176 - DNA, 21 bp, Homo sapiens
ttaaaaggtggtatctgaggc

SEQ ID NO: 4177 - DNA, 17 bp, Homo sapiens
cgtgtcatccaggcatt

SEQ ID NO: 4178 - DNA, 23 bp, Homo sapiens
gaaggcttgcaaatactcacttc

SEQ ID NO: 4179 - DNA, 18 bp, Homo sapiens
gaggctgtgacaacactg

SEQ ID NO: 4180 - DNA, 23 bp, Homo sapiens
tttttgaaagtccaatggagtct

SEQ ID NO: 4181 - DNA, 22 bp, Homo sapiens
aatgcattaaagtcagcacagg

SEQ ID NO: 4182 - DNA, 20 bp, Homo sapiens
caacatcacccttcatggcc

SEQ ID NO: 4183 - DNA, 23 bp, Homo sapiens
ttaattattcatagctttttgtt

SEQ ID NO: 4184 - DNA, 19 bp, Homo sapiens
tctgctgctgatccaatac

SEQ ID NO: 4185 - DNA, 21 bp, Homo sapiens
cagtaatttatgtctctcagc

SEQ ID NO: 4186 - DNA, 16 bp, Homo sapiens
actgaacgatgctgcc

SEQ ID NO: 4187 - DNA, 24 bp, Homo sapiens
ttgctaaatggactcctttatcca

SEQ ID NO: 4188 - DNA, 22 bp, Homo sapiens
aagcatgtcagtaattcctttc

SEQ ID NO: 4189 - DNA, 19 bp, Homo sapiens
tgtgacgtaaaggtcaagc

SEQ ID NO: 4190 - DNA, 22 bp, Homo sapiens
acatacgaacagtagtttttat

SEQ ID NO: 4191 - DNA, 18 bp, Homo sapiens
tatgatgaggcggctgtt

SEQ ID NO: 4192 - DNA, 19 bp, Homo sapiens
acaggataacacaaaagct

SEQ ID NO: 4193 - DNA, 19 bp, Homo sapiens
ttacacaagcaatggaagt

SEQ ID NO: 4194 - DNA, 16 bp, Homo sapiens
atgggtagctgaggcc

SEQ ID NO: 4195 - DNA, 22 bp, Homo sapiens
gcaaaacattgtgtttaatgct

SEQ ID NO: 4196 - DNA, 17 bp, Homo sapiens
attggctaatggcagcc

SEQ ID NO: 4197 - DNA, 24 bp, Homo sapiens
tttttgtctgttttctctcatagg

SEQ ID NO: 4198 - DNA, 21 bp, Homo sapiens
acttacaatgctttcacttcc

SEQ ID NO: 4199 - DNA, 22 bp, Homo sapiens
tttgggtttaggtctttgtttc

SEQ ID NO: 4200 - DNA, 19 bp, Homo sapiens
tgagattgctgtaggtttc

SEQ ID NO: 4201 - DNA, 24 bp, Homo sapiens
gtgtgtctctctatagagtggtaa

SEQ ID NO: 4202 - DNA, 23 bp, Homo sapiens
ggaaaatatcatatgcccctatg

SEQ ID NO: 4203 - DNA, 17 bp, Homo sapiens
tgcctgccgattgaacc

SEQ ID NO: 4204 - DNA, 21 bp, Homo sapiens
tggaaggggacaagaaatatg

SEQ ID NO: 4205 - DNA, 21 bp, Homo sapiens
tccctgaattcttcgtcagcc

SEQ ID NO: 4206 - DNA, 21 bp, Homo sapiens
attggttgggcttacacccca

SEQ ID NO: 4207 - DNA, 24 bp, Homo sapiens
ccagtttttatttaacagaataac

SEQ ID NO: 4208 - DNA, 18 bp, Homo sapiens
tccccgtatgtgcttgcc

SEQ ID NO: 4209 - DNA, 24 bp, Homo sapiens
gattttgttgtcagtataattagg

SEQ ID NO: 4210 - DNA, 20 bp, Homo sapiens
aatcaggttctgtggttgag

SEQ ID NO: 4211 - DNA, 17 bp, Homo sapiens
aggaagttccgtttgac

SEQ ID NO: 4212 - DNA, 20 bp, Homo sapiens
accacaactttaaaacaaag

SEQ ID NO: 4213 - DNA, 24 bp, Homo sapiens
tccaagaagaaaatgttattcctc

SEQ ID NO: 4214 - DNA, 21 bp, Homo sapiens
aagtaggctaatctataacct

SEQ ID NO: 4215 - DNA, 21 bp, Homo sapiens
tctacagaaataaacggtgac

SEQ ID NO: 4216 - DNA, 22 bp, Homo sapiens
aaaaacaattacctcaggtacg

SEQ ID NO: 4217 - DNA, 24 bp, Homo sapiens
gttctaaatatttttgtgtattct

SEQ ID NO: 4218 - DNA, 22 bp, Homo sapiens
ataatcttaatgtcttttcacg

SEQ ID NO: 4219 - DNA, 19 bp, Homo sapiens
tcctttccctaaaggcagc

SEQ ID NO: 4220 - DNA, 23 bp, Homo sapiens
agactgcatcagctctttgccag

SEQ ID NO: 4221 - DNA, 20 bp, Homo sapiens
acaatctgctaaaactgtat

SEQ ID NO: 4222 - DNA, 19 bp, Homo sapiens
tagcctctacctgagcctc

SEQ ID NO: 4223 - DNA, 22 bp, Homo sapiens
tggaaaaattagtggagctgac

SEQ ID NO: 4224 - DNA, 20 bp, Homo sapiens
gctccctcaaaaccaaatac

SEQ ID NO: 4225 - DNA, 18 bp, Homo sapiens
acatcctttacacaaggt

SEQ ID NO: 4226 - DNA, 24 bp, Homo sapiens
cgtgaagaatagttaaatcactta

SEQ ID NO: 4227 - DNA, 19 bp, Homo sapiens
actgcccttttggtaaagc

SEQ ID NO: 4228 - DNA, 23 bp, Homo sapiens
attcaaatagcttctgtgtcagc

SEQ ID NO: 4229 - DNA, 21 bp, Homo sapiens
agttcagtggcattaagttca

SEQ ID NO: 4230 - DNA, 23 bp, Homo sapiens
agccattgcttatctggcaaatg

SEQ ID NO: 4231 - DNA, 18 bp, Homo sapiens
agactccagggattagag

SEQ ID NO: 4232 - DNA, 23 bp, Homo sapiens
tcgaagtccccaaatcttcatgt

SEQ ID NO: 4233 - DNA, 24 bp, Homo sapiens
tttgaggaaaaaaataatattcag

SEQ ID NO: 4234 - DNA, 22 bp, Homo sapiens
agacatctgaatcaaatacaaa

SEQ ID NO: 4235 - DNA, 29 bp, Homo sapiens
tatatagtttagtatataagtttagtata

SEQ ID NO: 4236 - DNA, 17 bp, Homo sapiens
agccttgcagatcgagc

SEQ ID NO: 4237 - DNA, 18 bp, Homo sapiens
caaagaggccaagaagat

SEQ ID NO: 4238 - DNA, 23 bp, Homo sapiens
cccaacattactgggattgaatt

SEQ ID NO: 4239 - DNA, 20 bp, Homo sapiens
gaacaaggtgaaatggtgat

SEQ ID NO: 4240 - DNA, 24 bp, Homo sapiens
aggttaaaatttttaaatgtattc

SEQ ID NO: 4241 - DNA, 22 bp, Homo sapiens
tgggtttttttttctcctaata

SEQ ID NO: 4242 - DNA, 19 bp, Homo sapiens
tcacacctcaatgatcttc

SEQ ID NO: 4243 - DNA, 24 bp, Homo sapiens
tgtttttaaaataaatttttcttg

SEQ ID NO: 4244 - DNA, 22 bp, Homo sapiens
aggcaaagaagagatcatagag

SEQ ID NO: 4245 - DNA, 23 bp, Homo sapiens
agctactctgttaggtacttaat

SEQ ID NO: 4246 - DNA, 23 bp, Homo sapiens
tggaaatctacctgatatttttc

SEQ ID NO: 4247 - DNA, 20 bp, Homo sapiens
accaaggattcatgatgtct

SEQ ID NO: 4248 - DNA, 22 bp, Homo sapiens
tgtgctggccttctgctggttt

SEQ ID NO: 4249 - DNA, 20 bp, Homo sapiens
gggcgacctatctactgctc

SEQ ID NO: 4250 - DNA, 28 bp, Homo sapiens
aagggaaaaaaaaactacattaagatac

SEQ ID NO: 4251 - DNA, 21 bp, Homo sapiens
ctaagagactaagctgaattc

SEQ ID NO: 4252 - DNA, 21 bp, Homo sapiens
gcctttctctaccagtttaca

SEQ ID NO: 4253 - DNA, 23 bp, Homo sapiens
ctaccttaagtaaagctcagttg

SEQ ID NO: 4254 - DNA, 21 bp, Homo sapiens
atagcagtcaatggcgacctc

SEQ ID NO: 4255 - DNA, 19 bp, Homo sapiens
aagtttcccattggtcact

SEQ ID NO: 4256 - DNA, 21 bp, Homo sapiens
tcttactctgtggtaaatgac

SEQ ID NO: 4257 - DNA, 22 bp, Homo sapiens
aacagtaaaacagttgcatgaa

SEQ ID NO: 4258 - DNA, 23 bp, Homo sapiens
tccgaaaattattagactcattc

SEQ ID NO: 4259 - DNA, 20 bp, Homo sapiens
caacagccttgtcctttttc

SEQ ID NO: 4260 - DNA, 20 bp, Homo sapiens
ttttccaagtgtacagtgac

SEQ ID NO: 4261 - DNA, 23 bp, Homo sapiens
gttacttcattgtagatgctatt

SEQ ID NO: 4262 - DNA, 23 bp, Homo sapiens
gctaaccctagagtcacgatggc

SEQ ID NO: 4263 - DNA, 22 bp, Homo sapiens
atgctgttttaatagcagtttg

SEQ ID NO: 4264 - DNA, 24 bp, Homo sapiens
taaagctgcgccatttagcatgtg

SEQ ID NO: 4265 - DNA, 19 bp, Homo sapiens
ttaacttgaaatcggcatt

SEQ ID NO: 4266 - DNA, 22 bp, Homo sapiens
ccttctctttcatctccttcag

SEQ ID NO: 4267 - DNA, 20 bp, Homo sapiens
aagagtattggcaaagcatg

SEQ ID NO: 4268 - DNA, 24 bp, Homo sapiens
ggattcacatgcaaatttctatgc

SEQ ID NO: 4269 - DNA, 20 bp, Homo sapiens
tttagtgaccgcttagattc

SEQ ID NO: 4270 - DNA, 20 bp, Homo sapiens
catgttattccagtggcaag

SEQ ID NO: 4271 - DNA, 21 bp, Homo sapiens
ggatgttgctgttcttttagc

SEQ ID NO: 4272 - DNA, 22 bp, Homo sapiens
gcttaccttggagcttgccatg

SEQ ID NO: 4273 - DNA, 18 bp, Homo sapiens
cgtagaggccaacattag

SEQ ID NO: 4274 - DNA, 19 bp, Homo sapiens
gtgtcaaggacagcagatg

SEQ ID NO: 4275 - DNA, 22 bp, Homo sapiens
aaagagccgtataatacgaaat

SEQ ID NO: 4276 - DNA, 25 bp, Homo sapiens
atgcagctttaataaatttatgctg

SEQ ID NO: 4277 - DNA, 24 bp, Homo sapiens
gacattatataagagagtaatatt

SEQ ID NO: 4278 - DNA, 22 bp, Homo sapiens
aatatgcaaaaagcccttgaat

SEQ ID NO: 4279 - DNA, 20 bp, Homo sapiens
tgacaacttgtttcagtgcc

SEQ ID NO: 4280 - DNA, 22 bp, Homo sapiens
aaaatgtgacatttttaccttc

SEQ ID NO: 4281 - DNA, 19 bp, Homo sapiens
actttatcatgtcgacagc

SEQ ID NO: 4282 - DNA, 24 bp, Homo sapiens
tgaaaccatttatttttaaagtac

SEQ ID NO: 4283 - DNA, 23 bp, Homo sapiens
catgtcggattcatattttgctt

SEQ ID NO: 4284 - DNA, 20 bp, Homo sapiens
cccacttcttagaggtgaat

SEQ ID NO: 4285 - DNA, 22 bp, Homo sapiens
caactcatattagtgctttgtt

SEQ ID NO: 4286 - DNA, 19 bp, Homo sapiens
tgcattctttacaagcctg

SEQ ID NO: 4287 - DNA, 19 bp, Homo sapiens
tggagtccacacttgaaac

SEQ ID NO: 4288 - DNA, 22 bp, Homo sapiens
tttggtttttcttattgttacc

SEQ ID NO: 4289 - DNA, 22 bp, Homo sapiens
ttttcaggaaatttttcttttc

SEQ ID NO: 4290 - DNA, 22 bp, Homo sapiens
caaatgttacctcttctgaaca

SEQ ID NO: 4291 - DNA, 21 bp, Homo sapiens
ggaaggtagaaaggaaagtca

SEQ ID NO: 4292 - DNA, 21 bp, Homo sapiens
ggttgattttcagcttttagt

SEQ ID NO: 4293 - DNA, 17 bp, Homo sapiens
ccatccatggattcccc

SEQ ID NO: 4294 - DNA, 23 bp, Homo sapiens
ttgttggttgagagtaagaattt

SEQ ID NO: 4295 - DNA, 25 bp, Homo sapiens
taccaacttcttagaggtatacaag

SEQ ID NO: 4296 - DNA, 22 bp, Homo sapiens
tgtatttttacgtgtgttttct

SEQ ID NO: 4297 - DNA, 24 bp, Homo sapiens
ataagtacacaatccagaatactc

SEQ ID NO: 4298 - DNA, 21 bp, Homo sapiens
ggaaagatgaaaagtagtaat

SEQ ID NO: 4299 - DNA, 24 bp, Homo sapiens
aatcctacttactttttgaaagtc

SEQ ID NO: 4300 - DNA, 22 bp, Homo sapiens
atttataacgttaattacattg

SEQ ID NO: 4301 - DNA, 23 bp, Homo sapiens
atagtatttatgaacaatcaatg

SEQ ID NO: 4302 - DNA, 23 bp, Homo sapiens
tcctgaaaatatctacagaggca

SEQ ID NO: 4303 - DNA, 22 bp, Homo sapiens
tttctgaccaaaagcatcatat

SEQ ID NO: 4304 - DNA, 23 bp, Homo sapiens
ttcagtttggttgtctaaaactc

SEQ ID NO: 4305 - DNA, 22 bp, Homo sapiens
agcattttatccagttgattgc

SEQ ID NO: 4306 - DNA, 19 bp, Homo sapiens
acatgcaagagttggagac

SEQ ID NO: 4307 - DNA, 23 bp, Homo sapiens
tggtagctttccaggagattacg

SEQ ID NO: 4308 - DNA, 29 bp, Homo sapiens
ctgacatgtatctattagatttgaaattg

SEQ ID NO: 4309 - DNA, 22 bp, Homo sapiens
acagaaattatctcagacataa

SEQ ID NO: 4310 - DNA, 20 bp, Homo sapiens
agcatgagtgactcagaggt

SEQ ID NO: 4311 - DNA, 22 bp, Homo sapiens
ggttgtacttaaaagcagcaat

SEQ ID NO: 4312 - DNA, 21 bp, Homo sapiens
gtggaatgctttctcttgttt

SEQ ID NO: 4313 - DNA, 24 bp, Homo sapiens
caggcattatatagcaaaaaacga

SEQ ID NO: 4314 - DNA, 21 bp, Homo sapiens
ctcacaccaaaatgatttctt

SEQ ID NO: 4315 - DNA, 24 bp, Homo sapiens
caaatgctcctccttggcctgtac

SEQ ID NO: 4316 - DNA, 22 bp, Homo sapiens
ctctatgcctcagtgatcattg

SEQ ID NO: 4317 - DNA, 22 bp, Homo sapiens
aaaatagccaacagcttctgtg

SEQ ID NO: 4318 - DNA, 19 bp, Homo sapiens
cgttattgccaggagcctc

SEQ ID NO: 4319 - DNA, 21 bp, Homo sapiens
accaaatgttttcaaattcca

SEQ ID NO: 4320 - DNA, 18 bp, Homo sapiens
cttctcttgctgcaatgc

SEQ ID NO: 4321 - DNA, 23 bp, Homo sapiens
ctcctaacccatcattacacaga

SEQ ID NO: 4322 - DNA, 23 bp, Homo sapiens
cttactggggagaggttttatta

SEQ ID NO: 4323 - DNA, 18 bp, Homo sapiens
cgctacccgtcggtcctc

SEQ ID NO: 4324 - DNA, 18 bp, Homo sapiens
aatctccttggcgggtgg

SEQ ID NO: 4325 - DNA, 18 bp, Homo sapiens
gccctctgcaggtctatg

SEQ ID NO: 4326 - DNA, 22 bp, Homo sapiens
tctgccagcaaaattttagtag

SEQ ID NO: 4327 - DNA, 22 bp, Homo sapiens
tctgtacatattacaagtatgc

SEQ ID NO: 4328 - DNA, 21 bp, Homo sapiens
ctatggtattggcttgtaacg

SEQ ID NO: 4329 - DNA, 20 bp, Homo sapiens
ttcatcctgatacagcaaac

SEQ ID NO: 4330 - DNA, 19 bp, Homo sapiens
tacctcgctccaaagattt

SEQ ID NO: 4331 - DNA, 17 bp, Homo sapiens
tgctaggcttcaggagg

SEQ ID NO: 4332 - DNA, 24 bp, Homo sapiens
attaaacaagcaaaggttatttca

SEQ ID NO: 4333 - DNA, 25 bp, Homo sapiens
tttcttttgcagtgaaatcaaatac

SEQ ID NO: 4334 - DNA, 21 bp, Homo sapiens
tttttcctcatgcaataagtc

SEQ ID NO: 4335 - DNA, 23 bp, Homo sapiens
tcaatttgataatacagggtttt

SEQ ID NO: 4336 - DNA, 25 bp, Homo sapiens
acatttaagttgatcatcttacctc

SEQ ID NO: 4337 - DNA, 26 bp, Homo sapiens
atttttattttttaaatacaatttcc

SEQ ID NO: 4338 - DNA, 19 bp, Homo sapiens
tgcagcgagatgggcaatg

SEQ ID NO: 4339 - DNA, 25 bp, Homo sapiens
atgggaacttagactttgtattatc

SEQ ID NO: 4340 - DNA, 24 bp, Homo sapiens
caactcataaaccgttttatcagt

SEQ ID NO: 4341 - DNA, 25 bp, Homo sapiens
gtctgtctgatagtgatatgttttc

SEQ ID NO: 4342 - DNA, 21 bp, Homo sapiens
tcattgcgtgaaccaccctgc

SEQ ID NO: 4343 - DNA, 20 bp, Homo sapiens
ttgttagctgagatgtattc

SEQ ID NO: 4344 - DNA, 21 bp, Homo sapiens
ccgctaatgttgtatacttac

SEQ ID NO: 4345 - DNA, 23 bp, Homo sapiens
aaaatcagagaatatggtgattc

SEQ ID NO: 4346 - DNA, 20 bp, Homo sapiens
tcacttctcaatccagcttg

SEQ ID NO: 4347 - DNA, 21 bp, Homo sapiens
tgctgaaatgtcatctttaaa

SEQ ID NO: 4348 - DNA, 17 bp, Homo sapiens
gccattttgcaggtgag

SEQ ID NO: 4349 - DNA, 23 bp, Homo sapiens
tctcaaaaaaaagaaaaaaagaa

SEQ ID NO: 4350 - DNA, 20 bp, Homo sapiens
acatcctgatcaggaaacat

SEQ ID NO: 4351 - DNA, 22 bp, Homo sapiens
tgacttttttgtgtgtcaacac

SEQ ID NO: 4352 - DNA, 24 bp, Homo sapiens
tgcttctacattttatttggtagg

SEQ ID NO: 4353 - DNA, 18 bp, Homo sapiens
accacacttgtactcacc

SEQ ID NO: 4354 - DNA, 19 bp, Homo sapiens
tgaactgaacttaccgatc

SEQ ID NO: 4355 - DNA, 23 bp, Homo sapiens
aaagcatggaatcacataatctg

SEQ ID NO: 4356 - DNA, 18 bp, Homo sapiens
ctgccttttagacaaacg

SEQ ID NO: 4357 - DNA, 22 bp, Homo sapiens
gcattcctttgaggatttcaat

SEQ ID NO: 4358 - DNA, 20 bp, Homo sapiens
acgtcggaaggaaaaaaatg

SEQ ID NO: 4359 - DNA, 24 bp, Homo sapiens
ttcatgatgacttaaaacaattcc

SEQ ID NO: 4360 - DNA, 21 bp, Homo sapiens
gctgtgaaggaggaaggtttt

SEQ ID NO: 4361 - DNA, 22 bp, Homo sapiens
agaatccaattagatgtgcgtg

SEQ ID NO: 4362 - DNA, 22 bp, Homo sapiens
ggtagctttgtgatcttttatg

SEQ ID NO: 4363 - DNA, 23 bp, Homo sapiens
tcggtaaaaggcaaaatctaacc

SEQ ID NO: 4364 - DNA, 22 bp, Homo sapiens
gccaataaaactggtactacat

SEQ ID NO: 4365 - DNA, 24 bp, Homo sapiens
atggccagaaatagtgaggtctga

SEQ ID NO: 4366 - DNA, 17 bp, Homo sapiens
ggaagtccagatgcact

SEQ ID NO: 4367 - DNA, 22 bp, Homo sapiens
tgccaaatctgaaagagatatc

SEQ ID NO: 4368 - DNA, 21 bp, Homo sapiens
ctaatgtggtgacttttttcc

SEQ ID NO: 4369 - DNA, 24 bp, Homo sapiens
ccttacttggctttaactttaaga

SEQ ID NO: 4370 - DNA, 20 bp, Homo sapiens
gctcatctcagaagtggtag

SEQ ID NO: 4371 - DNA, 24 bp, Homo sapiens
agggtgaactgcagaggaaaggag

SEQ ID NO: 4372 - DNA, 24 bp, Homo sapiens
catcataacaatgttcttgtgttg

SEQ ID NO: 4373 - DNA, 19 bp, Homo sapiens
agcttctccacaggctgtg

SEQ ID NO: 4374 - DNA, 20 bp, Homo sapiens
ctgtgtgactatgaatacgg

SEQ ID NO: 4375 - DNA, 22 bp, Homo sapiens
tctttctacccaaaaatcttgc

SEQ ID NO: 4376 - DNA, 19 bp, Homo sapiens
gcatgccccgtatcaaagg

SEQ ID NO: 4377 - DNA, 23 bp, Homo sapiens
aatcttataaatgttcctatact

SEQ ID NO: 4378 - DNA, 24 bp, Homo sapiens
gcaatgaacctcattttactttta

SEQ ID NO: 4379 - DNA, 24 bp, Homo sapiens
acaaagtaaaagtggacagaatac

SEQ ID NO: 4380 - DNA, 22 bp, Homo sapiens
tgcagtgtaaaaatattgttca

SEQ ID NO: 4381 - DNA, 19 bp, Homo sapiens
ccaaagacacttgggccat

SEQ ID NO: 4382 - DNA, 20 bp, Homo sapiens
atgcttttgatgtttgcaat

SEQ ID NO: 4383 - DNA, 23 bp, Homo sapiens
catcttccaatttttcagtgact

SEQ ID NO: 4384 - DNA, 20 bp, Homo sapiens
agttaatgaacacatgggga

SEQ ID NO: 4385 - DNA, 24 bp, Homo sapiens
aattttggaaaaagttacatgtga

SEQ ID NO: 4386 - DNA, 21 bp, Homo sapiens
gactttaagagttctatgttc

SEQ ID NO: 4387 - DNA, 22 bp, Homo sapiens
actgcaaattatttttagcttc

SEQ ID NO: 4388 - DNA, 21 bp, Homo sapiens
tccatcatgtaagaatagcaa

SEQ ID NO: 4389 - DNA, 24 bp, Homo sapiens
atttctggaactctctatagactc

SEQ ID NO: 4390 - DNA, 23 bp, Homo sapiens
actacctggaatatatcttcttt

SEQ ID NO: 4391 - DNA, 28 bp, Homo sapiens
atctggatattttatttagctttaatac

SEQ ID NO: 4392 - DNA, 19 bp, Homo sapiens
tacccagctttactgaagc

SEQ ID NO: 4393 - DNA, 23 bp, Homo sapiens
cctgttttttaaaagaagtcgta

SEQ ID NO: 4394 - DNA, 21 bp, Homo sapiens
ggtgaagctcggacttctcca

SEQ ID NO: 4395 - DNA, 16 bp, Homo sapiens
tgagaagggcgacatt

SEQ ID NO: 4396 - DNA, 23 bp, Homo sapiens
atactactttctgcaaggaaaca

SEQ ID NO: 4397 - DNA, 18 bp, Homo sapiens
agtgatgagagatgccgg

SEQ ID NO: 4398 - DNA, 23 bp, Homo sapiens
tcatgtaaaacataacacaaatt

SEQ ID NO: 4399 - DNA, 24 bp, Homo sapiens
aaaagcataataatctgttttttg

SEQ ID NO: 4400 - DNA, 21 bp, Homo sapiens
agtcatacctgcttaacatgg

SEQ ID NO: 4401 - DNA, 24 bp, Homo sapiens
ttagcattttttattttaataagc

SEQ ID NO: 4402 - DNA, 18 bp, Homo sapiens
tgtgtctggaccaggctc

SEQ ID NO: 4403 - DNA, 21 bp, Homo sapiens
tccagtttaatatacattagt

SEQ ID NO: 4404 - DNA, 16 bp, Homo sapiens
ttgtgacagggcatgc

SEQ ID NO: 4405 - DNA, 23 bp, Homo sapiens
aatgtattttaagaactgtctac

SEQ ID NO: 4406 - DNA, 22 bp, Homo sapiens
ctttgcagcaagattcttggat

SEQ ID NO: 4407 - DNA, 22 bp, Homo sapiens
ggagtaaaatgaccactttagc

SEQ ID NO: 4408 - DNA, 23 bp, Homo sapiens
tgtacatgttgtaaagagtgttc

SEQ ID NO: 4409 - DNA, 24 bp, Homo sapiens
cttaggttgaacattacccagctc

SEQ ID NO: 4410 - DNA, 24 bp, Homo sapiens
ggtttctaaaacaaatgtatatta

SEQ ID NO: 4411 - DNA, 19 bp, Homo sapiens
actgggagatccttagttt

SEQ ID NO: 4412 - DNA, 21 bp, Homo sapiens
agtcagattaccagattttct

SEQ ID NO: 4413 - DNA, 19 bp, Homo sapiens
cccatttcattgacaggtg

SEQ ID NO: 4414 - DNA, 24 bp, Homo sapiens
gaagctttaaaacaaagagtgaac

SEQ ID NO: 4415 - DNA, 19 bp, Homo sapiens
tttcacatccaccattttt

SEQ ID NO: 4416 - DNA, 22 bp, Homo sapiens
tcgcttaaacatgttcatacag

SEQ ID NO: 4417 - DNA, 18 bp, Homo sapiens
tggaggaagcaaacattc

SEQ ID NO: 4418 - DNA, 25 bp, Homo sapiens
tacaataagaagcaatcaatctctg

SEQ ID NO: 4419 - DNA, 23 bp, Homo sapiens
tgctttacttaaagtctatcttc

SEQ ID NO: 4420 - DNA, 22 bp, Homo sapiens
acttttttttctgagtaaagaa

SEQ ID NO: 4421 - DNA, 28 bp, Homo sapiens
aatgcttttctaaaaattcattttaaat

SEQ ID NO: 4422 - DNA, 19 bp, Homo sapiens
actcgatttggttgaatgt

SEQ ID NO: 4423 - DNA, 22 bp, Homo sapiens
agttttactctttttgtttgtt

SEQ ID NO: 4424 - DNA, 24 bp, Homo sapiens
tgagaatttatattcattttgaag

SEQ ID NO: 4425 - DNA, 23 bp, Homo sapiens
gacagagtatctgtgtagatagg

SEQ ID NO: 4426 - DNA, 23 bp, Homo sapiens
gtcactatacctcaccaaataaa

SEQ ID NO: 4427 - DNA, 18 bp, Homo sapiens
tgcctgaactaaagcttg

SEQ ID NO: 4428 - DNA, 22 bp, Homo sapiens
aactgaattacagcatttatgt

SEQ ID NO: 4429 - DNA, 17 bp, Homo sapiens
gtggcctaggtggtagt

SEQ ID NO: 4430 - DNA, 26 bp, Homo sapiens
cttttatacacatcatatatttaaac

SEQ ID NO: 4431 - DNA, 24 bp, Homo sapiens
ttaaattttgatatttatctatgt

SEQ ID NO: 4432 - DNA, 22 bp, Homo sapiens
gagcaaattctgttctctcttc

SEQ ID NO: 4433 - DNA, 19 bp, Homo sapiens
ggttactctcagtttgagc

SEQ ID NO: 4434 - DNA, 20 bp, Homo sapiens
agtagaagcaaggcatgact

SEQ ID NO: 4435 - DNA, 18 bp, Homo sapiens
aatggggttttgccatgt

SEQ ID NO: 4436 - DNA, 23 bp, Homo sapiens
tttctgttcgaagaactggccgc

SEQ ID NO: 4437 - DNA, 23 bp, Homo sapiens
agcgatctacctgcctcccaaag

SEQ ID NO: 4438 - DNA, 24 bp, Homo sapiens
aggagtccactttttcttctagga

SEQ ID NO: 4439 - DNA, 21 bp, Homo sapiens
caactttatgaacaggaaatt

SEQ ID NO: 4440 - DNA, 19 bp, Homo sapiens
tactgagcccagccaggct

SEQ ID NO: 4441 - DNA, 19 bp, Homo sapiens
gaagcttctttggaatgcg

SEQ ID NO: 4442 - DNA, 27 bp, Homo sapiens
gttcaaaaaatgacctaaatagatagc

SEQ ID NO: 4443 - DNA, 20 bp, Homo sapiens
gagcccaatcaaactgattg

SEQ ID NO: 4444 - DNA, 24 bp, Homo sapiens
tggtattgtactgtgattttaggt

SEQ ID NO: 4445 - DNA, 18 bp, Homo sapiens
ttctttggcagcaatggc

SEQ ID NO: 4446 - DNA, 21 bp, Homo sapiens
atctaaagtaaaagctaaaac

SEQ ID NO: 4447 - DNA, 24 bp, Homo sapiens
tatctgcccgccgctcgcgccggg

SEQ ID NO: 4448 - DNA, 19 bp, Homo sapiens
cggggaggctaggtcctgg

SEQ ID NO: 4449 - DNA, 17 bp, Homo sapiens
cgctctccctgcgcctc

SEQ ID NO: 4450 - DNA, 16 bp, Homo sapiens
cggcacccacgacccc

SEQ ID NO: 4451 - DNA, 22 bp, Homo sapiens
gttcgagcaatggcagccctgc

SEQ ID NO: 4452 - DNA, 17 bp, Homo sapiens
cactcacccggccacgg

SEQ ID NO: 4453 - DNA, 19 bp, Homo sapiens
ctgcggtcacatgctcctc

SEQ ID NO: 4454 - DNA, 23 bp, Homo sapiens
cagccggcccgggccgccaggga

SEQ ID NO: 4455 - DNA, 18 bp, Homo sapiens
ctccccccacatttggca

SEQ ID NO: 4456 - DNA, 23 bp, Homo sapiens
cagcaaccaacgcgcggatctca

SEQ ID NO: 4457 - DNA, 24 bp, Homo sapiens
aaacccaaaggagaaaggatggta

SEQ ID NO: 4458 - DNA, 16 bp, Homo sapiens
tggcactgtgcagagg

SEQ ID NO: 4459 - DNA, 22 bp, Homo sapiens
gcttgagaacttaggtaacagt

SEQ ID NO: 4460 - DNA, 20 bp, Homo sapiens
atgaggtgtccttcaaggat

SEQ ID NO: 4461 - DNA, 22 bp, Homo sapiens
agtcctgcagacaagtgtgatg

SEQ ID NO: 4462 - DNA, 21 bp, Homo sapiens
cttttccatccccacgaatag

SEQ ID NO: 4463 - DNA, 17 bp, Homo sapiens
gtcctgccagtcctctg

SEQ ID NO: 4464 - DNA, 22 bp, Homo sapiens
gatcttacaaatagatgtgtgt

SEQ ID NO: 4465 - DNA, 24 bp, Homo sapiens
tgcttgaacatttatgatggcatc

SEQ ID NO: 4466 - DNA, 17 bp, Homo sapiens
tgatgcttgcacattct

SEQ ID NO: 4467 - DNA, 18 bp, Homo sapiens
tcatacatggcacggaag

SEQ ID NO: 4468 - DNA, 18 bp, Homo sapiens
ccatcccatctcatccat

SEQ ID NO: 4469 - DNA, 24 bp, Homo sapiens
atgaaacatgtaataaaagagcat

SEQ ID NO: 4470 - DNA, 20 bp, Homo sapiens
cagagctcccacaacaacga

SEQ ID NO: 4471 - DNA, 20 bp, Homo sapiens
acttataatcatgtttgcac

SEQ ID NO: 4472 - DNA, 27 bp, Homo sapiens
atacctagccatttttcttcttataaa

SEQ ID NO: 4473 - DNA, 19 bp, Homo sapiens
attcacttactccagcagt

SEQ ID NO: 4474 - DNA, 24 bp, Homo sapiens
tcattctaagttgggggaaaaaga

SEQ ID NO: 4475 - DNA, 19 bp, Homo sapiens
tgggtagcaactgaagatg

SEQ ID NO: 4476 - DNA, 24 bp, Homo sapiens
ctagaattgtggagggctgcatga

SEQ ID NO: 4477 - DNA, 23 bp, Homo sapiens
tcaaagaaaatgaaacatctaac

SEQ ID NO: 4478 - DNA, 19 bp, Homo sapiens
ccaccacctttcgacttac

SEQ ID NO: 4479 - DNA, 24 bp, Homo sapiens
tcattaaaggaaaggatgaaaaat

SEQ ID NO: 4480 - DNA, 17 bp, Homo sapiens
ctgccagtgcactaagc

SEQ ID NO: 4481 - DNA, 16 bp, Homo sapiens
tcaatgagctggccgg

SEQ ID NO: 4482 - DNA, 18 bp, Homo sapiens
aactgcatctctcccagt

SEQ ID NO: 4483 - DNA, 19 bp, Homo sapiens
agactgcaaagacaccccc

SEQ ID NO: 4484 - DNA, 22 bp, Homo sapiens
ctgagattcaatcactgttagg

SEQ ID NO: 4485 - DNA, 23 bp, Homo sapiens
gaatgctcagacttctcctcacc

SEQ ID NO: 4486 - DNA, 18 bp, Homo sapiens
tgagggtttgacccatgg

SEQ ID NO: 4487 - DNA, 19 bp, Homo sapiens
ctccggcgctgagcttgga

SEQ ID NO: 4488 - DNA, 20 bp, Homo sapiens
tcccgaagcttacacatgat

SEQ ID NO: 4489 - DNA, 20 bp, Homo sapiens
tttttatgccaaatgggcag

SEQ ID NO: 4490 - DNA, 18 bp, Homo sapiens
ctggcgtactaatcctgg

SEQ ID NO: 4491 - DNA, 21 bp, Homo sapiens
gcccaaatgaaagtcattgac

SEQ ID NO: 4492 - DNA, 21 bp, Homo sapiens
ttcaagttattggaaaactcc

SEQ ID NO: 4493 - DNA, 21 bp, Homo sapiens
agctaacacaccattaatcat

SEQ ID NO: 4494 - DNA, 21 bp, Homo sapiens
agctggaataagtgtgattca

SEQ ID NO: 4495 - DNA, 20 bp, Homo sapiens
tcatagtcaaaaaccgaacc

SEQ ID NO: 4496 - DNA, 22 bp, Homo sapiens
caaagctgatttctaccttatc

SEQ ID NO: 4497 - DNA, 20 bp, Homo sapiens
acggaatgaccaagatcagg

SEQ ID NO: 4498 - DNA, 21 bp, Homo sapiens
ggagctttcttgcacctctag

SEQ ID NO: 4499 - DNA, 21 bp, Homo sapiens
caggacttcagtgacattaac

SEQ ID NO: 4500 - DNA, 22 bp, Homo sapiens
tgctacttttgttcttctaccc

SEQ ID NO: 4501 - DNA, 17 bp, Homo sapiens
gggttgcttcacaccag

SEQ ID NO: 4502 - DNA, 22 bp, Homo sapiens
caggctcagttacctgtaatag

SEQ ID NO: 4503 - DNA, 21 bp, Homo sapiens
ttcataaagcaaattcatgac

SEQ ID NO: 4504 - DNA, 22 bp, Homo sapiens
ccactttcctctgaatacctcg

SEQ ID NO: 4505 - DNA, 16 bp, Homo sapiens
aggattggctggctgc

SEQ ID NO: 4506 - DNA, 24 bp, Homo sapiens
tactcgttcagtgataggatctgt

SEQ ID NO: 4507 - DNA, 18 bp, Homo sapiens
cgagatgagacgggtgag

SEQ ID NO: 4508 - DNA, 23 bp, Homo sapiens
tgatatttcacctgaaatgtcat

SEQ ID NO: 4509 - DNA, 24 bp, Homo sapiens
gttctttattctgatagtttccgg

SEQ ID NO: 4510 - DNA, 20 bp, Homo sapiens
tttttacacattctgacagg

SEQ ID NO: 4511 - DNA, 20 bp, Homo sapiens
tgaggtttcagatttaggac

SEQ ID NO: 4512 - DNA, 21 bp, Homo sapiens
cgttgagatgtgccgttgggt

SEQ ID NO: 4513 - DNA, 18 bp, Homo sapiens
ccttcagttgacccaagc

SEQ ID NO: 4514 - DNA, 21 bp, Homo sapiens
ggcagctttgccttgtatttg

SEQ ID NO: 4515 - DNA, 19 bp, Homo sapiens
ggcccttctggtccccaga

SEQ ID NO: 4516 - DNA, 21 bp, Homo sapiens
aaccaagaaaacattagctcg

SEQ ID NO: 4517 - DNA, 24 bp, Homo sapiens
tatggtgttaaaacgttactttcc

SEQ ID NO: 4518 - DNA, 17 bp, Homo sapiens
aagcaactccgacacct

SEQ ID NO: 4519 - DNA, 19 bp, Homo sapiens
tcagttgaatgagaaaggc

SEQ ID NO: 4520 - DNA, 16 bp, Homo sapiens
tctgctgtctgatgcc

SEQ ID NO: 4521 - DNA, 21 bp, Homo sapiens
gcactatttctttttagtcct

SEQ ID NO: 4522 - DNA, 19 bp, Homo sapiens
actgagccataacatgagc

SEQ ID NO: 4523 - DNA, 21 bp, Homo sapiens
tctctccatctctggagtaac

SEQ ID NO: 4524 - DNA, 22 bp, Homo sapiens
ttctttcttaaacttttgcttc

SEQ ID NO: 4525 - DNA, 22 bp, Homo sapiens
aagaaaactttagctcggtatt

SEQ ID NO: 4526 - DNA, 24 bp, Homo sapiens
acctcgtggggttggtttgttgtt

SEQ ID NO: 4527 - DNA, 17 bp, Homo sapiens
gcaacccccacaccctt

SEQ ID NO: 4528 - DNA, 22 bp, Homo sapiens
agttttggaaaaactgtaagat

SEQ ID NO: 4529 - DNA, 18 bp, Homo sapiens
tagtgactttcgggcatg

SEQ ID NO: 4530 - DNA, 22 bp, Homo sapiens
ttaaggatttatttttcctttc

SEQ ID NO: 4531 - DNA, 24 bp, Homo sapiens
cactaatagtaatagattaaacat

SEQ ID NO: 4532 - DNA, 22 bp, Homo sapiens
tttccatctcaggagtaaaggg

SEQ ID NO: 4533 - DNA, 22 bp, Homo sapiens
acatttactgtagccattaact

SEQ ID NO: 4534 - DNA, 22 bp, Homo sapiens
cctgagatgcagagagtcaaac

SEQ ID NO: 4535 - DNA, 24 bp, Homo sapiens
agatgcaaatgtaactggcatttt

SEQ ID NO: 4536 - DNA, 21 bp, Homo sapiens
ggattcccataggttttgtac

SEQ ID NO: 4537 - DNA, 22 bp, Homo sapiens
caaactgcaagagttattttgc

SEQ ID NO: 4538 - DNA, 22 bp, Homo sapiens
tctgtaccatttccttttttgg

SEQ ID NO: 4539 - DNA, 23 bp, Homo sapiens
aatgttttcttgattgcgtttga

SEQ ID NO: 4540 - DNA, 19 bp, Homo sapiens
ccatctaacctaattgccc

SEQ ID NO: 4541 - DNA, 20 bp, Homo sapiens
ggctttccccacattttctt

SEQ ID NO: 4542 - DNA, 23 bp, Homo sapiens
gagtcaaacacaatcaagaaaat

SEQ ID NO: 4543 - DNA, 22 bp, Homo sapiens
gggtaaatttgctaaagaaatt

SEQ ID NO: 4544 - DNA, 23 bp, Homo sapiens
tatacaaagaaaacatgggcaag

SEQ ID NO: 4545 - DNA, 29 bp, Homo sapiens
atatgtattattttaaatcataaaagtag

SEQ ID NO: 4546 - DNA, 20 bp, Homo sapiens
acctctcaacaaatgaaatg

SEQ ID NO: 4547 - DNA, 23 bp, Homo sapiens
cgccaagtaccgagctaatattt

SEQ ID NO: 4548 - DNA, 16 bp, Homo sapiens
ctggctccttggacga

SEQ ID NO: 4549 - DNA, 18 bp, Homo sapiens
taaaggagttcccttgcc

SEQ ID NO: 4550 - DNA, 23 bp, Homo sapiens
aatcaagaaaatattagctcggt

SEQ ID NO: 4551 - DNA, 21 bp, Homo sapiens
tagcccaaaggaaaaaaggat

SEQ ID NO: 4552 - DNA, 16 bp, Homo sapiens
gcaagggaacccctct

SEQ ID NO: 4553 - DNA, 24 bp, Homo sapiens
ttagaaaataggattaatatgtat

SEQ ID NO: 4554 - DNA, 24 bp, Homo sapiens
aaatgttactcatggttgtttttc

SEQ ID NO: 4555 - DNA, 21 bp, Homo sapiens
tttcttttcttgcccaagtac

SEQ ID NO: 4556 - DNA, 21 bp, Homo sapiens
tggacaactgtgttttgtctt

SEQ ID NO: 4557 - DNA, 19 bp, Homo sapiens
tctcaggagtgacaggtag

SEQ ID NO: 4558 - DNA, 22 bp, Homo sapiens
tccactaaagtaaagtagtcgg

SEQ ID NO: 4559 - DNA, 24 bp, Homo sapiens
agtcaaacacaatcaagaaaatat

SEQ ID NO: 4560 - DNA, 24 bp, Homo sapiens
ggaaaaaaggataaatttgctaaa

SEQ ID NO: 4561 - DNA, 17 bp, Homo sapiens
aacatgggcaagggaac

SEQ ID NO: 4562 - DNA, 23 bp, Homo sapiens
aatacgtattattttaaatcatg

SEQ ID NO: 4563 - DNA, 23 bp, Homo sapiens
aaatgaaatgttactcatggttg

SEQ ID NO: 4564 - DNA, 19 bp, Homo sapiens
tcttgccaaagtaccgagc

SEQ ID NO: 4565 - DNA, 22 bp, Homo sapiens
gtcagcatataacttctggctc

SEQ ID NO: 4566 - DNA, 24 bp, Homo sapiens
tctcgggagtgacaggtaaagggg

SEQ ID NO: 4567 - DNA, 19 bp, Homo sapiens
ggtgcagattccctatccc

SEQ ID NO: 4568 - DNA, 23 bp, Homo sapiens
tgaagtaaaaaattgacattaac

SEQ ID NO: 4569 - DNA, 19 bp, Homo sapiens
tcactcctgagatgcagag

SEQ ID NO: 4570 - DNA, 23 bp, Homo sapiens
gatgtattagaagcaaagaaggg

SEQ ID NO: 4571 - DNA, 17 bp, Homo sapiens
ctcatcatacaggtgct

SEQ ID NO: 4572 - DNA, 25 bp, Homo sapiens
tcagtttaattctgaagttaagtgg

SEQ ID NO: 4573 - DNA, 17 bp, Homo sapiens
aactgctccaaagcagg

SEQ ID NO: 4574 - DNA, 23 bp, Homo sapiens
aggttttcttgattgtgtttgac

SEQ ID NO: 4575 - DNA, 21 bp, Homo sapiens
caggttgagtctaaaagcttc

SEQ ID NO: 4576 - DNA, 21 bp, Homo sapiens
gtccccaggttttctttgtat

SEQ ID NO: 4577 - DNA, 22 bp, Homo sapiens
agagtcaaacacaatcaagaaa

SEQ ID NO: 4578 - DNA, 23 bp, Homo sapiens
ggcagcattaagttgggaaaaag

SEQ ID NO: 4579 - DNA, 23 bp, Homo sapiens
acaggtgttgtataaagaaaacg

SEQ ID NO: 4580 - DNA, 22 bp, Homo sapiens
ttttaaaatctagccattaatc

SEQ ID NO: 4581 - DNA, 20 bp, Homo sapiens
gatgaaagggctgttttgac

SEQ ID NO: 4582 - DNA, 22 bp, Homo sapiens
tttttaaataccgaactaaagt

SEQ ID NO: 4583 - DNA, 22 bp, Homo sapiens
ttgaatctgtcttttctgtctg

SEQ ID NO: 4584 - DNA, 24 bp, Homo sapiens
gagtgatggggattggaatccctt

SEQ ID NO: 4585 - DNA, 24 bp, Homo sapiens
tgagtaggagatctggaaaacaga

SEQ ID NO: 4586 - DNA, 18 bp, Homo sapiens
gggactcccctacctgtc

SEQ ID NO: 4587 - DNA, 26 bp, Homo sapiens
tgattattataaagggatgaacagtg

SEQ ID NO: 4588 - DNA, 21 bp, Homo sapiens
tccaggttgatttgtttgttg

SEQ ID NO: 4589 - DNA, 21 bp, Homo sapiens
tggagttaaagagctttctcc

SEQ ID NO: 4590 - DNA, 23 bp, Homo sapiens
aaaaacaacaataaaaatacttc

SEQ ID NO: 4591 - DNA, 21 bp, Homo sapiens
actcgctccatctcaggagtg

SEQ ID NO: 4592 - DNA, 21 bp, Homo sapiens
aggggatctatagttaactct

SEQ ID NO: 4593 - DNA, 23 bp, Homo sapiens
cgcaatcaagagaactttagctc

SEQ ID NO: 4594 - DNA, 21 bp, Homo sapiens
gatttgggttgaaaactgagg

SEQ ID NO: 4595 - DNA, 22 bp, Homo sapiens
agaaaatttggggaaaggaatc

SEQ ID NO: 4596 - DNA, 21 bp, Homo sapiens
aattttacatttgtaaggtgt

SEQ ID NO: 4597 - DNA, 20 bp, Homo sapiens
cttactctctgtgcctgttt

SEQ ID NO: 4598 - DNA, 24 bp, Homo sapiens
ttttttggccccctaagaaatacc

SEQ ID NO: 4599 - DNA, 21 bp, Homo sapiens
acttactaaaaaactgcctcc

SEQ ID NO: 4600 - DNA, 20 bp, Homo sapiens
agtgataggtgttgggattc

SEQ ID NO: 4601 - DNA, 21 bp, Homo sapiens
ttagcattgtagagttcatca

SEQ ID NO: 4602 - DNA, 24 bp, Homo sapiens
ttgtattaacataattttggtcag

SEQ ID NO: 4603 - DNA, 19 bp, Homo sapiens
cattccaaccactgtgact

SEQ ID NO: 4604 - DNA, 22 bp, Homo sapiens
tgctgttaagatgttactttct

SEQ ID NO: 4605 - DNA, 24 bp, Homo sapiens
gtcattttacctttctgggtattc

SEQ ID NO: 4606 - DNA, 25 bp, Homo sapiens
tttatgggaaatagtttcttatatg

SEQ ID NO: 4607 - DNA, 22 bp, Homo sapiens
gtttttatgagtttcccccaaa

SEQ ID NO: 4608 - DNA, 21 bp, Homo sapiens
tttgactctctcaatctctgg

SEQ ID NO: 4609 - DNA, 22 bp, Homo sapiens
aaatattcatggaattttcccc

SEQ ID NO: 4610 - DNA, 21 bp, Homo sapiens
agacgcagaagcacattagct

SEQ ID NO: 4611 - DNA, 24 bp, Homo sapiens
gtagtgaccccatcaagactaagg

SEQ ID NO: 4612 - DNA, 19 bp, Homo sapiens
agcaataggacaaggaact

SEQ ID NO: 4613 - DNA, 22 bp, Homo sapiens
ggaagcagaaagatgagagagc

SEQ ID NO: 4614 - DNA, 24 bp, Homo sapiens
agtccagcatgtaataataccttt

SEQ ID NO: 4615 - DNA, 22 bp, Homo sapiens
atggaagctgagagtatggcca

SEQ ID NO: 4616 - DNA, 24 bp, Homo sapiens
actgttaatttttttaatttgggg

SEQ ID NO: 4617 - DNA, 24 bp, Homo sapiens
gtttcacttcaggcaggtcaggga

SEQ ID NO: 4618 - DNA, 22 bp, Homo sapiens
cttacccagtatcagaatgagg

SEQ ID NO: 4619 - DNA, 20 bp, Homo sapiens
tgagagtgaaacaaacacag

SEQ ID NO: 4620 - DNA, 24 bp, Homo sapiens
aggcacctattttagcaatataag

SEQ ID NO: 4621 - DNA, 22 bp, Homo sapiens
tgcccaggttttatataaagag

SEQ ID NO: 4622 - DNA, 24 bp, Homo sapiens
aggtcattgtaaattatcaaaggg

SEQ ID NO: 4623 - DNA, 18 bp, Homo sapiens
caggaactgctgggtttt

SEQ ID NO: 4624 - DNA, 23 bp, Homo sapiens
gtctttaccgagctaatgtggtc

SEQ ID NO: 4625 - DNA, 17 bp, Homo sapiens
tgcctgggaacatcgtc

SEQ ID NO: 4626 - DNA, 24 bp, Homo sapiens
cgatagccgttcctggtgagacat

SEQ ID NO: 4627 - DNA, 21 bp, Homo sapiens
tggagcaaagtattggggatt

SEQ ID NO: 4628 - DNA, 19 bp, Homo sapiens
ttacagttgttcaagacac

SEQ ID NO: 4629 - DNA, 22 bp, Homo sapiens
ttgtgtgtatcaatataaggct

SEQ ID NO: 4630 - DNA, 22 bp, Homo sapiens
aacaagatgtttactctttctt

SEQ ID NO: 4631 - DNA, 27 bp, Homo sapiens
ctaggttagcattaaatgcaaaataaa

SEQ ID NO: 4632 - DNA, 24 bp, Homo sapiens
ttaattttcttcacataatatagg

SEQ ID NO: 4633 - DNA, 18 bp, Homo sapiens
cgcagtatttctggcgtg

SEQ ID NO: 4634 - DNA, 17 bp, Homo sapiens
ttcccttgggctaccag

SEQ ID NO: 4635 - DNA, 20 bp, Homo sapiens
gtcacactggtattggagct

SEQ ID NO: 4636 - DNA, 18 bp, Homo sapiens
cagagagtccgggagaac

SEQ ID NO: 4637 - DNA, 19 bp, Homo sapiens
ggatgggagttgtggaggg

SEQ ID NO: 4638 - DNA, 24 bp, Homo sapiens
agtacaaggaagatgctgagaagt

SEQ ID NO: 4639 - DNA, 22 bp, Homo sapiens
tccagaggcatcttcctcagca

SEQ ID NO: 4640 - DNA, 19 bp, Homo sapiens
atatccctgtggtgtttac

SEQ ID NO: 4641 - DNA, 20 bp, Homo sapiens
aaggctgaagttcttttggt

SEQ ID NO: 4642 - DNA, 18 bp, Homo sapiens
actttccctctgctgagc

SEQ ID NO: 4643 - DNA, 21 bp, Homo sapiens
gtctcataatacgacatggac

SEQ ID NO: 4644 - DNA, 19 bp, Homo sapiens
tgactgagagggttcttcc

SEQ ID NO: 4645 - DNA, 21 bp, Homo sapiens
cccaacaagtcaagaatcttt

SEQ ID NO: 4646 - DNA, 22 bp, Homo sapiens
cactgcacctggtgaatctctt

SEQ ID NO: 4647 - DNA, 19 bp, Homo sapiens
gcagaaatggagaaagcca

SEQ ID NO: 4648 - DNA, 21 bp, Homo sapiens
ttaatggaaggacttccattc

SEQ ID NO: 4649 - DNA, 21 bp, Homo sapiens
gcacattgcaaacatttaccc

SEQ ID NO: 4650 - DNA, 19 bp, Homo sapiens
tccttacctggcttgaaag

SEQ ID NO: 4651 - DNA, 21 bp, Homo sapiens
gtccctcttggaaaagaaata

SEQ ID NO: 4652 - DNA, 21 bp, Homo sapiens
ccacagaagtgaaattggctt

SEQ ID NO: 4653 - DNA, 24 bp, Homo sapiens
actctttggtataaaactatgaac

SEQ ID NO: 4654 - DNA, 24 bp, Homo sapiens
catcctttcattgggatggcttcc

SEQ ID NO: 4655 - DNA, 18 bp, Homo sapiens
atgccatggccaatgaaa

SEQ ID NO: 4656 - DNA, 23 bp, Homo sapiens
tgtcaccaataaatcagatgaca

SEQ ID NO: 4657 - DNA, 20 bp, Homo sapiens
aatgctactatagaaagaat

SEQ ID NO: 4658 - DNA, 22 bp, Homo sapiens
tcctgaaagattgacatcgaat

SEQ ID NO: 4659 - DNA, 22 bp, Homo sapiens
ggatttacattcaccctgtatg

SEQ ID NO: 4660 - DNA, 24 bp, Homo sapiens
cctggccctcataaaatccggagt

SEQ ID NO: 4661 - DNA, 18 bp, Homo sapiens
aggtgaagagtagcaagc

SEQ ID NO: 4662 - DNA, 23 bp, Homo sapiens
tccagttccaggtctcgcttata

SEQ ID NO: 4663 - DNA, 20 bp, Homo sapiens
aaagaatgccactcaaatcc

SEQ ID NO: 4664 - DNA, 21 bp, Homo sapiens
tggaatctgaaaatgaaaagc

SEQ ID NO: 4665 - DNA, 16 bp, Homo sapiens
catccgtgggaagggc

SEQ ID NO: 4666 - DNA, 23 bp, Homo sapiens
gctttttctggtgtaatttggct

SEQ ID NO: 4667 - DNA, 23 bp, Homo sapiens
ctgggctttcttgtcaatgttgt

SEQ ID NO: 4668 - DNA, 22 bp, Homo sapiens
cagctgtgggcctacctcattg

SEQ ID NO: 4669 - DNA, 23 bp, Homo sapiens
gtgaaccctttaaaaattggaat

SEQ ID NO: 4670 - DNA, 18 bp, Homo sapiens
catttcagtgaggccctt

SEQ ID NO: 4671 - DNA, 19 bp, Homo sapiens
aactgatcatgcttatacc

SEQ ID NO: 4672 - DNA, 24 bp, Homo sapiens
ggtaatagattaggtggtagtacc

SEQ ID NO: 4673 - DNA, 17 bp, Homo sapiens
actggcctggaggtcac

SEQ ID NO: 4674 - DNA, 20 bp, Homo sapiens
atgtaaatggtaggaggaac

SEQ ID NO: 4675 - DNA, 23 bp, Homo sapiens
ccttcctacttacattagaaaga

SEQ ID NO: 4676 - DNA, 21 bp, Homo sapiens
agagggaaagaaaagaccaag

SEQ ID NO: 4677 - DNA, 22 bp, Homo sapiens
tttttcttcctgagatggagag

SEQ ID NO: 4678 - DNA, 22 bp, Homo sapiens
tgacatgtaacaaagctggcgt

SEQ ID NO: 4679 - DNA, 18 bp, Homo sapiens
gtgtgaccattagcagaa

SEQ ID NO: 4680 - DNA, 23 bp, Homo sapiens
cataatctttcctatattctttc

SEQ ID NO: 4681 - DNA, 18 bp, Homo sapiens
gcagatgcagagtggggt

SEQ ID NO: 4682 - DNA, 24 bp, Homo sapiens
tgagatggagaagattttagtgat

SEQ ID NO: 4683 - DNA, 20 bp, Homo sapiens
ggaacgaggaaaacccatgc

SEQ ID NO: 4684 - DNA, 19 bp, Homo sapiens
acaggaaactggccatgtc

SEQ ID NO: 4685 - DNA, 23 bp, Homo sapiens
aggagagatatctaacatggctt

SEQ ID NO: 4686 - DNA, 21 bp, Homo sapiens
ttgtgtggtgtggtttttttg

SEQ ID NO: 4687 - DNA, 22 bp, Homo sapiens
caattgacagaacatatcaatt

SEQ ID NO: 4688 - DNA, 23 bp, Homo sapiens
gtgatgtacgttggtgtttcaaa

SEQ ID NO: 4689 - DNA, 23 bp, Homo sapiens
tgtactggatctgaaacataaca

SEQ ID NO: 4690 - DNA, 19 bp, Homo sapiens
ttcacctaaaagaggccac

SEQ ID NO: 4691 - DNA, 23 bp, Homo sapiens
aaagttaccagattcaaaacccc

SEQ ID NO: 4692 - DNA, 22 bp, Homo sapiens
caagaagaagtatgagaagagt

SEQ ID NO: 4693 - DNA, 24 bp, Homo sapiens
tgaaattttttttcacattgtact

SEQ ID NO: 4694 - DNA, 24 bp, Homo sapiens
ggaatgctgagcagcttctccatc

SEQ ID NO: 4695 - DNA, 26 bp, Homo sapiens
tccacttactatactctgtaattctg

SEQ ID NO: 4696 - DNA, 20 bp, Homo sapiens
tttgatcttgacaatggtgc

SEQ ID NO: 4697 - DNA, 23 bp, Homo sapiens
tatcgggtatggtgtggtagtgg

SEQ ID NO: 4698 - DNA, 21 bp, Homo sapiens
ctgaacttggatcctcatttt

SEQ ID NO: 4699 - DNA, 22 bp, Homo sapiens
ctctgatcatgaatcatgtcct

SEQ ID NO: 4700 - DNA, 24 bp, Homo sapiens
acagttttgtaataaatctagggt

SEQ ID NO: 4701 - DNA, 21 bp, Homo sapiens
gttaaatacaaggctgacctg

SEQ ID NO: 4702 - DNA, 20 bp, Homo sapiens
tagttccaaatgggtaaaac

SEQ ID NO: 4703 - DNA, 18 bp, Homo sapiens
agtgctgttccatttcct

SEQ ID NO: 4704 - DNA, 23 bp, Homo sapiens
gaactggcaagttggcttgtatt

SEQ ID NO: 4705 - DNA, 21 bp, Homo sapiens
tgatttttcatcaccatctcc

SEQ ID NO: 4706 - DNA, 23 bp, Homo sapiens
cagtcacgggtttgtgaagtttc

SEQ ID NO: 4707 - DNA, 21 bp, Homo sapiens
tgctaataatcttgcaagtga

SEQ ID NO: 4708 - DNA, 22 bp, Homo sapiens
ttggtatgaaaacattttggaa

SEQ ID NO: 4709 - DNA, 19 bp, Homo sapiens
aaaagggcaagacaccaaa

SEQ ID NO: 4710 - DNA, 22 bp, Homo sapiens
actgaattgcacacttaaaaac

SEQ ID NO: 4711 - DNA, 22 bp, Homo sapiens
aggaataatttggatgtttgca

SEQ ID NO: 4712 - DNA, 23 bp, Homo sapiens
acaattttagaaacatacctcac

SEQ ID NO: 4713 - DNA, 22 bp, Homo sapiens
acaatgcatattctttggcatt

SEQ ID NO: 4714 - DNA, 19 bp, Homo sapiens
ctggctgtcttttggattg

SEQ ID NO: 4715 - DNA, 22 bp, Homo sapiens
tcttctttactctaaatgtccc

SEQ ID NO: 4716 - DNA, 16 bp, Homo sapiens
agccaagctgagcagc

SEQ ID NO: 4717 - DNA, 23 bp, Homo sapiens
ttttataactcttggaagctttg

SEQ ID NO: 4718 - DNA, 18 bp, Homo sapiens
aggcagccatggcttaag

SEQ ID NO: 4719 - DNA, 23 bp, Homo sapiens
ttcaatctggaaatcacttcttc

SEQ ID NO: 4720 - DNA, 19 bp, Homo sapiens
cctgttgcccattttggtt

SEQ ID NO: 4721 - DNA, 20 bp, Homo sapiens
tgcacccatctgcattacct

SEQ ID NO: 4722 - DNA, 23 bp, Homo sapiens
ggtaagggtgtcatgaaaatgtc

SEQ ID NO: 4723 - DNA, 24 bp, Homo sapiens
tctatgtctgggcgaccgagcatg

SEQ ID NO: 4724 - DNA, 24 bp, Homo sapiens
acagtggctgatcgaccagacatc

SEQ ID NO: 4725 - DNA, 24 bp, Homo sapiens
tactccacctgaatcagagaaaac

SEQ ID NO: 4726 - DNA, 24 bp, Homo sapiens
tttcttccccaataaaggtcgctt

SEQ ID NO: 4727 - DNA, 22 bp, Homo sapiens
cttggcaatggctgttggggac

SEQ ID NO: 4728 - DNA, 22 bp, Homo sapiens
gattccatctcaaaaaaaaaaa

SEQ ID NO: 4729 - DNA, 23 bp, Homo sapiens
gacagaagttgcagtgagctgag

SEQ ID NO: 4730 - DNA, 21 bp, Homo sapiens
tttggcatcttttctgtaagc

SEQ ID NO: 4731 - DNA, 23 bp, Homo sapiens
agcttttttccttaaacccaaac

SEQ ID NO: 4732 - DNA, 19 bp, Homo sapiens
tactccatcatgctggagc

SEQ ID NO: 4733 - DNA, 22 bp, Homo sapiens
ttagagtgaccacacactggaa

SEQ ID NO: 4734 - DNA, 22 bp, Homo sapiens
gtaattctggctctatttagac

SEQ ID NO: 4735 - DNA, 19 bp, Homo sapiens
ccccaagagtgttgagagg

SEQ ID NO: 4736 - DNA, 21 bp, Homo sapiens
agatttcacagttcttcaagt

SEQ ID NO: 4737 - DNA, 24 bp, Homo sapiens
tccatagcatgtttcacctctggt

SEQ ID NO: 4738 - DNA, 21 bp, Homo sapiens
tatgggtcttatctaagtccc

SEQ ID NO: 4739 - DNA, 23 bp, Homo sapiens
caaacttctttttgtaatttgtc

SEQ ID NO: 4740 - DNA, 19 bp, Homo sapiens
ccaagcatgtcagtgatgt

SEQ ID NO: 4741 - DNA, 22 bp, Homo sapiens
tcagagtttaagattcacatgt

SEQ ID NO: 4742 - DNA, 19 bp, Homo sapiens
cagggctcatacacaacac

SEQ ID NO: 4743 - DNA, 21 bp, Homo sapiens
aggcaactgacattatttcac

SEQ ID NO: 4744 - DNA, 19 bp, Homo sapiens
tgagctctctatggattcc

SEQ ID NO: 4745 - DNA, 19 bp, Homo sapiens
ggtggttgatcacttacat

SEQ ID NO: 4746 - DNA, 24 bp, Homo sapiens
gtaacccccagccgcccatgagtt

SEQ ID NO: 4747 - DNA, 19 bp, Homo sapiens
cgggtctctggtagtgttg

SEQ ID NO: 4748 - DNA, 21 bp, Homo sapiens
gtacctgacacgcctcagatc

SEQ ID NO: 4749 - DNA, 24 bp, Homo sapiens
ggtccttgtacttgttctggggga

SEQ ID NO: 4750 - DNA, 20 bp, Homo sapiens
ctgcccctgaagctgaaata

SEQ ID NO: 4751 - DNA, 23 bp, Homo sapiens
ttctcccaagagggaagcagaac

SEQ ID NO: 4752 - DNA, 22 bp, Homo sapiens
ggtttgagggtgtaataaaaat

SEQ ID NO: 4753 - DNA, 23 bp, Homo sapiens
ctgacagtcttcgccagcaggat

SEQ ID NO: 4754 - DNA, 24 bp, Homo sapiens
caaaatttgcaagtatcacatctt

SEQ ID NO: 4755 - DNA, 22 bp, Homo sapiens
tccttgacatgtttctctttgt

SEQ ID NO: 4756 - DNA, 24 bp, Homo sapiens
caggaatactttaatagaaagtga

SEQ ID NO: 4757 - DNA, 17 bp, Homo sapiens
aattcaggacccatacc

SEQ ID NO: 4758 - DNA, 22 bp, Homo sapiens
gagttcctcaagggttgcaagc

SEQ ID NO: 4759 - DNA, 18 bp, Homo sapiens
gtccctggggactgtacc

SEQ ID NO: 4760 - DNA, 18 bp, Homo sapiens
ccttcccttttcttctgc

SEQ ID NO: 4761 - DNA, 24 bp, Homo sapiens
catggaaggaactaggtacttaca

SEQ ID NO: 4762 - DNA, 20 bp, Homo sapiens
ctctccttaagaggactccc

SEQ ID NO: 4763 - DNA, 23 bp, Homo sapiens
tgtttttgtcatcagtgacagaa

SEQ ID NO: 4764 - DNA, 18 bp, Homo sapiens
gtccaaaatgcagtgagg

SEQ ID NO: 4765 - DNA, 23 bp, Homo sapiens
gttctgagctcgcctatcgctcc

SEQ ID NO: 4766 - DNA, 16 bp, Homo sapiens
ggactcctgaccgacc

SEQ ID NO: 4767 - DNA, 23 bp, Homo sapiens
cgagcaagggttaacactcatga

SEQ ID NO: 4768 - DNA, 24 bp, Homo sapiens
attcctttctctcctgttaaaaac

SEQ ID NO: 4769 - DNA, 22 bp, Homo sapiens
tgcagtatgcagttacaatcgt

SEQ ID NO: 4770 - DNA, 20 bp, Homo sapiens
ctctgtgccatgtgtgtgtt

SEQ ID NO: 4771 - DNA, 18 bp, Homo sapiens
ggcagcctggaggaagtc

SEQ ID NO: 4772 - DNA, 23 bp, Homo sapiens
tcaattggggcttcctcttgcat

SEQ ID NO: 4773 - DNA, 22 bp, Homo sapiens
ggcttcgtactgtttcttatag

SEQ ID NO: 4774 - DNA, 24 bp, Homo sapiens
ttagcatcattgttcatgctcctg

SEQ ID NO: 4775 - DNA, 18 bp, Homo sapiens
ccaactgcaccattgagc

SEQ ID NO: 4776 - DNA, 22 bp, Homo sapiens
gcctgaagagatgtaaaaagag

SEQ ID NO: 4777 - DNA, 18 bp, Homo sapiens
tcttgtcactgtgtttcc

SEQ ID NO: 4778 - DNA, 22 bp, Homo sapiens
ccatgcttggggaagtttctgg

SEQ ID NO: 4779 - DNA, 23 bp, Homo sapiens
gtactatagtcatgcatggattt

SEQ ID NO: 4780 - DNA, 23 bp, Homo sapiens
gctttgatatgaacagcatctgg

SEQ ID NO: 4781 - DNA, 18 bp, Homo sapiens
atccttgctccacagcag

SEQ ID NO: 4782 - DNA, 24 bp, Homo sapiens
cgaatcatgagcaaaagagatgac

SEQ ID NO: 4783 - DNA, 19 bp, Homo sapiens
ggctacaccacaatccacg

SEQ ID NO: 4784 - DNA, 17 bp, Homo sapiens
agataactggaccaggg

SEQ ID NO: 4785 - DNA, 21 bp, Homo sapiens
tgatgtctttctgctttttga

SEQ ID NO: 4786 - DNA, 21 bp, Homo sapiens
agagggactgctaaaccattc

SEQ ID NO: 4787 - DNA, 21 bp, Homo sapiens
tcactcaggaaaaaactttgc

SEQ ID NO: 4788 - DNA, 19 bp, Homo sapiens
tgcagcaacatgggtgtgt

SEQ ID NO: 4789 - DNA, 17 bp, Homo sapiens
cagagagcatgaaagca

SEQ ID NO: 4790 - DNA, 22 bp, Homo sapiens
cctgcgtactacaaaagtcaac

SEQ ID NO: 4791 - DNA, 17 bp, Homo sapiens
gcacccctgcctccctc

SEQ ID NO: 4792 - DNA, 24 bp, Homo sapiens
aggaaaaactatgaaaaatcaaag

SEQ ID NO: 4793 - DNA, 20 bp, Homo sapiens
aatgcccctccatgtttgca

SEQ ID NO: 4794 - DNA, 18 bp, Homo sapiens
agcccactctacaacttc

SEQ ID NO: 4795 - DNA, 22 bp, Homo sapiens
ttacatcgctgatttgtttgtt

SEQ ID NO: 4796 - DNA, 22 bp, Homo sapiens
agagaaagctagataccatctc

SEQ ID NO: 4797 - DNA, 23 bp, Homo sapiens
tccacaattgaggtaaatttgtc

SEQ ID NO: 4798 - DNA, 16 bp, Homo sapiens
ttcgcatatgtggagc

SEQ ID NO: 4799 - DNA, 22 bp, Homo sapiens
tgaatatttacatagctttacc

SEQ ID NO: 4800 - DNA, 19 bp, Homo sapiens
gatgtttctgcaacatgga

SEQ ID NO: 4801 - DNA, 22 bp, Homo sapiens
tcaatgaaagcatacaagggaa

SEQ ID NO: 4802 - DNA, 19 bp, Homo sapiens
agtctcttttgtgcttcac

SEQ ID NO: 4803 - DNA, 24 bp, Homo sapiens
tcacatcccatcagacattacctg

SEQ ID NO: 4804 - DNA, 21 bp, Homo sapiens
gcctacatctcttcactcaga

SEQ ID NO: 4805 - DNA, 21 bp, Homo sapiens
acgcagaatttcattacatcc

SEQ ID NO: 4806 - DNA, 24 bp, Homo sapiens
tgcttcacattataatgtatttga

SEQ ID NO: 4807 - DNA, 24 bp, Homo sapiens
gggctttttgggtggctagacaga

SEQ ID NO: 4808 - DNA, 22 bp, Homo sapiens
agataaataccacctggtagtc

SEQ ID NO: 4809 - DNA, 23 bp, Homo sapiens
cagaacctatgacatccttgcag

SEQ ID NO: 4810 - DNA, 20 bp, Homo sapiens
atatgctatgatgtttgagc

SEQ ID NO: 4811 - DNA, 16 bp, Homo sapiens
caccggccagccccat

SEQ ID NO: 4812 - DNA, 21 bp, Homo sapiens
cctctggagtgtttaccttga

SEQ ID NO: 4813 - DNA, 24 bp, Homo sapiens
gtcttagccagcagatgtctaggc

SEQ ID NO: 4814 - DNA, 20 bp, Homo sapiens
tgcttccctgtttttattgt

SEQ ID NO: 4815 - DNA, 23 bp, Homo sapiens
ggtgacattatagagtcttttcc

SEQ ID NO: 4816 - DNA, 22 bp, Homo sapiens
agtcagatttcaagtatgttgc

SEQ ID NO: 4817 - DNA, 20 bp, Homo sapiens
tgtcattctgtgtattgggc

SEQ ID NO: 4818 - DNA, 24 bp, Homo sapiens
caagtaaccatgttctgttttttc

SEQ ID NO: 4819 - DNA, 22 bp, Homo sapiens
attgaataggcttaattggagc

SEQ ID NO: 4820 - DNA, 22 bp, Homo sapiens
attatatcatatgataaacagc

SEQ ID NO: 4821 - DNA, 20 bp, Homo sapiens
gcctattgatcggagagtcg

SEQ ID NO: 4822 - DNA, 20 bp, Homo sapiens
agtgaaaccctgtctcaaaa

SEQ ID NO: 4823 - DNA, 21 bp, Homo sapiens
acaagactctctacagcaagg

SEQ ID NO: 4824 - DNA, 24 bp, Homo sapiens
gtgaacaagtaagtatgtactcag

SEQ ID NO: 4825 - DNA, 19 bp, Homo sapiens
cttaaaggcattggttgct

SEQ ID NO: 4826 - DNA, 19 bp, Homo sapiens
tttctcagtgctaattctc

SEQ ID NO: 4827 - DNA, 21 bp, Homo sapiens
ggcttcttagaactctttgat

SEQ ID NO: 4828 - DNA, 25 bp, Homo sapiens
gccaattctccttgagtatatatac

SEQ ID NO: 4829 - DNA, 18 bp, Homo sapiens
gggtagtgcttctgtttg

SEQ ID NO: 4830 - DNA, 19 bp, Homo sapiens
ggggtatcataggcatagc

SEQ ID NO: 4831 - DNA, 23 bp, Homo sapiens
ggtcagtattactgaaaatgtct

SEQ ID NO: 4832 - DNA, 17 bp, Homo sapiens
cgagcagtcactgacac

SEQ ID NO: 4833 - DNA, 20 bp, Homo sapiens
aaacatccacacacaaaatc

SEQ ID NO: 4834 - DNA, 18 bp, Homo sapiens
ctacatgagccagttggg

SEQ ID NO: 4835 - DNA, 20 bp, Homo sapiens
gccatgtatgatttcagagc

SEQ ID NO: 4836 - DNA, 20 bp, Homo sapiens
ctttgggtaagacttacagc

SEQ ID NO: 4837 - DNA, 24 bp, Homo sapiens
tgtcaacactcacatcactgactg

SEQ ID NO: 4838 - DNA, 22 bp, Homo sapiens
acatatattttttagcaacctc

SEQ ID NO: 4839 - DNA, 23 bp, Homo sapiens
gatcaggaatggacctccagata

SEQ ID NO: 4840 - DNA, 24 bp, Homo sapiens
acatcagtaaagtatgtccctaaa

SEQ ID NO: 4841 - DNA, 20 bp, Homo sapiens
aaacacaaagacagctgtaa

SEQ ID NO: 4842 - DNA, 20 bp, Homo sapiens
gaaataccacacggtgaaag

SEQ ID NO: 4843 - DNA, 22 bp, Homo sapiens
tggagaatttcagaagagggag

SEQ ID NO: 4844 - DNA, 26 bp, Homo sapiens
aattcatgtgttttttctctttctag

SEQ ID NO: 4845 - DNA, 20 bp, Homo sapiens
gtagagcccaacacaagtag

SEQ ID NO: 4846 - DNA, 22 bp, Homo sapiens
agagaagacaagagagttcatg

SEQ ID NO: 4847 - DNA, 20 bp, Homo sapiens
tgcgatgatagacaatgtct

SEQ ID NO: 4848 - DNA, 23 bp, Homo sapiens
agggtctgaaataagcttttaaa

SEQ ID NO: 4849 - DNA, 21 bp, Homo sapiens
atgtttctttgtagcgtagct

SEQ ID NO: 4850 - DNA, 19 bp, Homo sapiens
cagagccaagagggcttac

SEQ ID NO: 4851 - DNA, 24 bp, Homo sapiens
aaaaaatgtgtgtttttttcctag

SEQ ID NO: 4852 - DNA, 22 bp, Homo sapiens
caagattcaatatgaaaagatg

SEQ ID NO: 4853 - DNA, 19 bp, Homo sapiens
taggtacttcaacctcagc

SEQ ID NO: 4854 - DNA, 19 bp, Homo sapiens
ttgggaagacacttaagct

SEQ ID NO: 4855 - DNA, 24 bp, Homo sapiens
gatgcatacatcactggcattcca

SEQ ID NO: 4856 - DNA, 23 bp, Homo sapiens
agctattctcttaaagtgtgtaa

SEQ ID NO: 4857 - DNA, 20 bp, Homo sapiens
accggagtgtacttgtcttt

SEQ ID NO: 4858 - DNA, 21 bp, Homo sapiens
tctgatcagagagctcattac

SEQ ID NO: 4859 - DNA, 23 bp, Homo sapiens
gtcttgtggaggggcacaatgtg

SEQ ID NO: 4860 - DNA, 20 bp, Homo sapiens
gccttgaagcatgctaaaga

SEQ ID NO: 4861 - DNA, 24 bp, Homo sapiens
gtgttttgatgatgctgagcacca

SEQ ID NO: 4862 - DNA, 20 bp, Homo sapiens
tgtatgttgaacttgccacc

SEQ ID NO: 4863 - DNA, 23 bp, Homo sapiens
aggttttaacaaagtatttttct

SEQ ID NO: 4864 - DNA, 24 bp, Homo sapiens
gactgaatgctaaatactaaatgc

SEQ ID NO: 4865 - DNA, 19 bp, Homo sapiens
cactgaccatgtccttcac

SEQ ID NO: 4866 - DNA, 19 bp, Homo sapiens
ggacagtaagcagatacca

SEQ ID NO: 4867 - DNA, 18 bp, Homo sapiens
tggggtctctctttggtg

SEQ ID NO: 4868 - DNA, 24 bp, Homo sapiens
agagaactgcttcttcaagtgcag

SEQ ID NO: 4869 - DNA, 24 bp, Homo sapiens
agaagtcaatctttacttcagttc

SEQ ID NO: 4870 - DNA, 17 bp, Homo sapiens
gagtctgccactggcca

SEQ ID NO: 4871 - DNA, 24 bp, Homo sapiens
atgatggtgataacttggtttatg

SEQ ID NO: 4872 - DNA, 22 bp, Homo sapiens
gcctgagtggcaggcttatgaa

SEQ ID NO: 4873 - DNA, 18 bp, Homo sapiens
taaaagcagtgaaggcat

SEQ ID NO: 4874 - DNA, 22 bp, Homo sapiens
tggctcttaaaagatcaggagt

SEQ ID NO: 4875 - DNA, 21 bp, Homo sapiens
aaaggttggtttattgggaag

SEQ ID NO: 4876 - DNA, 21 bp, Homo sapiens
ctgcagctctgtagaccagct

SEQ ID NO: 4877 - DNA, 21 bp, Homo sapiens
agccattccacagttaagagg

SEQ ID NO: 4878 - DNA, 20 bp, Homo sapiens
acaaatacaaagtggtgctt

SEQ ID NO: 4879 - DNA, 21 bp, Homo sapiens
tcactagaggaactaagagcc

SEQ ID NO: 4880 - DNA, 24 bp, Homo sapiens
tatttctgtttttttttttttttt

SEQ ID NO: 4881 - DNA, 20 bp, Homo sapiens
aatgacaagtaaagcgtcct

SEQ ID NO: 4882 - DNA, 20 bp, Homo sapiens
atgccagacatttgaaagac

SEQ ID NO: 4883 - DNA, 24 bp, Homo sapiens
cacttttctgtattctggagtgtc

SEQ ID NO: 4884 - DNA, 22 bp, Homo sapiens
ttttgctcctgcctgggaagac

SEQ ID NO: 4885 - DNA, 23 bp, Homo sapiens
atcagtgtataggtaattagact

SEQ ID NO: 4886 - DNA, 23 bp, Homo sapiens
cactcctgacatggtccgctccc

SEQ ID NO: 4887 - DNA, 24 bp, Homo sapiens
agttaatgataaatttccccttaa

SEQ ID NO: 4888 - DNA, 24 bp, Homo sapiens
agattaaatacaaagaggacttgc

SEQ ID NO: 4889 - DNA, 19 bp, Homo sapiens
ggctggtgatgggggcatc

SEQ ID NO: 4890 - DNA, 21 bp, Homo sapiens
tgtttcctgacttacatttgc

SEQ ID NO: 4891 - DNA, 22 bp, Homo sapiens
cactcacccagagcttccgcag

SEQ ID NO: 4892 - DNA, 24 bp, Homo sapiens
aaaaaagtagatgaaccaaaatga

SEQ ID NO: 4893 - DNA, 20 bp, Homo sapiens
gcagccaaatcccttcagga

SEQ ID NO: 4894 - DNA, 18 bp, Homo sapiens
gctatgtgggagacatca

SEQ ID NO: 4895 - DNA, 24 bp, Homo sapiens
tgtcttacctccaacttgtactct

SEQ ID NO: 4896 - DNA, 16 bp, Homo sapiens
ttcaagatgcagggcc

SEQ ID NO: 4897 - DNA, 21 bp, Homo sapiens
gttgttttaactgctgaaagc

SEQ ID NO: 4898 - DNA, 25 bp, Homo sapiens
ttcggtctctaatacatatgttttg

SEQ ID NO: 4899 - DNA, 22 bp, Homo sapiens
acgagatgcttacatcactggt

SEQ ID NO: 4900 - DNA, 22 bp, Homo sapiens
gtgggtattttcttaggaaaga

SEQ ID NO: 4901 - DNA, 24 bp, Homo sapiens
ttggggtgtgtatggcagagagat

SEQ ID NO: 4902 - DNA, 18 bp, Homo sapiens
tacaactcccgatacccc

SEQ ID NO: 4903 - DNA, 23 bp, Homo sapiens
actaaagaaaaaaaaatacccca

SEQ ID NO: 4904 - DNA, 20 bp, Homo sapiens
tcctccaacgtagagactgt

SEQ ID NO: 4905 - DNA, 24 bp, Homo sapiens
tcatccctagtctctactccctgt

SEQ ID NO: 4906 - DNA, 24 bp, Homo sapiens
atattttattcttgattagtcagt

SEQ ID NO: 4907 - DNA, 21 bp, Homo sapiens
tgtcttcttgacttggcggat

SEQ ID NO: 4908 - DNA, 22 bp, Homo sapiens
cctaatctcaatcattttctat

SEQ ID NO: 4909 - DNA, 20 bp, Homo sapiens
tggtacaattcccgatacag

SEQ ID NO: 4910 - DNA, 20 bp, Homo sapiens
tccggagagtcaacaatgtt

SEQ ID NO: 4911 - DNA, 23 bp, Homo sapiens
acaataaggacctttttcatttt

SEQ ID NO: 4912 - DNA, 17 bp, Homo sapiens
acaccaaggcatatggg

SEQ ID NO: 4913 - DNA, 22 bp, Homo sapiens
ttaatgcatttcaaacaaagcc

SEQ ID NO: 4914 - DNA, 22 bp, Homo sapiens
ccttgtttacccatcattgatc

SEQ ID NO: 4915 - DNA, 18 bp, Homo sapiens
aggtacctcgctggtaac

SEQ ID NO: 4916 - DNA, 23 bp, Homo sapiens
caatttttcaaataaaggtgaca

SEQ ID NO: 4917 - DNA, 18 bp, Homo sapiens
ggggccaagtgtataccc

SEQ ID NO: 4918 - DNA, 22 bp, Homo sapiens
aaggcctggattaatattgaaa

SEQ ID NO: 4919 - DNA, 21 bp, Homo sapiens
tatgctgtctctcctctccag

SEQ ID NO: 4920 - DNA, 20 bp, Homo sapiens
cccactggatatagacttcc

SEQ ID NO: 4921 - DNA, 24 bp, Homo sapiens
gagactggaggattagaacaggct

SEQ ID NO: 4922 - DNA, 22 bp, Homo sapiens
tgtcatttaacctgctcttcct

SEQ ID NO: 4923 - DNA, 19 bp, Homo sapiens
tctcaatgaggaggagacc

SEQ ID NO: 4924 - DNA, 22 bp, Homo sapiens
actgtaacatgagctatatgtg

SEQ ID NO: 4925 - DNA, 19 bp, Homo sapiens
aagtgaggagtgtcacctg

SEQ ID NO: 4926 - DNA, 24 bp, Homo sapiens
gtatttaattctctcctgaaatca

SEQ ID NO: 4927 - DNA, 19 bp, Homo sapiens
gcccttcatgcatacaagc

SEQ ID NO: 4928 - DNA, 22 bp, Homo sapiens
tgttttttcacctcatgtgaat

SEQ ID NO: 4929 - DNA, 20 bp, Homo sapiens
ctatgtgcacagtgtcagag

SEQ ID NO: 4930 - DNA, 19 bp, Homo sapiens
cagcttgcttccacagagg

SEQ ID NO: 4931 - DNA, 20 bp, Homo sapiens
ggttcccattctctttgctt

SEQ ID NO: 4932 - DNA, 20 bp, Homo sapiens
ctgctcaccgaactctggag

SEQ ID NO: 4933 - DNA, 23 bp, Homo sapiens
atgtgtcagatgagttctccagg

SEQ ID NO: 4934 - DNA, 24 bp, Homo sapiens
ttttggtagttggagccactttgc

SEQ ID NO: 4935 - DNA, 19 bp, Homo sapiens
cagtgtgagtgtccacacg

SEQ ID NO: 4936 - DNA, 23 bp, Homo sapiens
gccagcagcatcttcagtgcttt

SEQ ID NO: 4937 - DNA, 21 bp, Homo sapiens
gaatgactacaagcttgtcac

SEQ ID NO: 4938 - DNA, 21 bp, Homo sapiens
ggcactgcccagtctatggtt

SEQ ID NO: 4939 - DNA, 18 bp, Homo sapiens
tgggcttgttttcttcct

SEQ ID NO: 4940 - DNA, 20 bp, Homo sapiens
gtccacttaacttccccagt

SEQ ID NO: 4941 - DNA, 18 bp, Homo sapiens
aaaagcaaccaaaccctc

SEQ ID NO: 4942 - DNA, 22 bp, Homo sapiens
acgtagactggtgtatctgtga

SEQ ID NO: 4943 - DNA, 22 bp, Homo sapiens
cactgttataaaattcaaatgc

SEQ ID NO: 4944 - DNA, 21 bp, Homo sapiens
gagctttatacttgatctgcc

SEQ ID NO: 4945 - DNA, 21 bp, Homo sapiens
caagcatgcttatgatctacg

SEQ ID NO: 4946 - DNA, 23 bp, Homo sapiens
tgctcctagcaactttctccagc

SEQ ID NO: 4947 - DNA, 24 bp, Homo sapiens
atgacctcaactggctgaaaggca

SEQ ID NO: 4948 - DNA, 21 bp, Homo sapiens
acataacctcctcttaactct

SEQ ID NO: 4949 - DNA, 20 bp, Homo sapiens
caattttttttttctgatcc

SEQ ID NO: 4950 - DNA, 22 bp, Homo sapiens
aggcaaactcacatcatcacgt

SEQ ID NO: 4951 - DNA, 21 bp, Homo sapiens
attccacaaagccttctgagt

SEQ ID NO: 4952 - DNA, 22 bp, Homo sapiens
ggagtgtcccagacgtagcaac

SEQ ID NO: 4953 - DNA, 20 bp, Homo sapiens
tgtgtacacatgtttctgtg

SEQ ID NO: 4954 - DNA, 21 bp, Homo sapiens
agatcagatcagcgatgtaag

SEQ ID NO: 4955 - DNA, 22 bp, Homo sapiens
tgaagtcaagttggacaaatgg

SEQ ID NO: 4956 - DNA, 19 bp, Homo sapiens
tccacgaatggatttgcca

SEQ ID NO: 4957 - DNA, 20 bp, Homo sapiens
gaaatgggtgagtttgctgc

SEQ ID NO: 4958 - DNA, 21 bp, Homo sapiens
atggtagagatggttactgcc

SEQ ID NO: 4959 - DNA, 20 bp, Homo sapiens
gtacttcttaagtcacaggc

SEQ ID NO: 4960 - DNA, 20 bp, Homo sapiens
gcgcctgtacagatcagttt

SEQ ID NO: 4961 - DNA, 20 bp, Homo sapiens
cattgacttgcaagtcgggg

SEQ ID NO: 4962 - DNA, 17 bp, Homo sapiens
ccatgatgccttggcac

SEQ ID NO: 4963 - DNA, 24 bp, Homo sapiens
tcactgactttcttctgggaatcc

SEQ ID NO: 4964 - DNA, 16 bp, Homo sapiens
gtcactgccctgcccc

SEQ ID NO: 4965 - DNA, 27 bp, Homo sapiens
gattttcatcttgttcttttcataaac

SEQ ID NO: 4966 - DNA, 24 bp, Homo sapiens
ctgtacaggtttgtagtctaggag

SEQ ID NO: 4967 - DNA, 20 bp, Homo sapiens
accaagaagtgttgacgatg

SEQ ID NO: 4968 - DNA, 22 bp, Homo sapiens
cactctatgatgttagcacaac

SEQ ID NO: 4969 - DNA, 23 bp, Homo sapiens
tttctacttattctctatagatc

SEQ ID NO: 4970 - DNA, 20 bp, Homo sapiens
tcctagtcattaaggggcgc

SEQ ID NO: 4971 - DNA, 24 bp, Homo sapiens
cccattaagtcttatgctgtttta

SEQ ID NO: 4972 - DNA, 24 bp, Homo sapiens
ggaggcaccgtgctgtgttcggat

SEQ ID NO: 4973 - DNA, 18 bp, Homo sapiens
agagaagtgttgtcccca

SEQ ID NO: 4974 - DNA, 23 bp, Homo sapiens
tgaacttttcatattcttcccga

SEQ ID NO: 4975 - DNA, 17 bp, Homo sapiens
gaagcatctggccagcc

SEQ ID NO: 4976 - DNA, 23 bp, Homo sapiens
ttggaattatttcctggacatgc

SEQ ID NO: 4977 - DNA, 20 bp, Homo sapiens
gtgaaagccaccagctacat

SEQ ID NO: 4978 - DNA, 24 bp, Homo sapiens
cagcctgaaagattcttggagtgg

SEQ ID NO: 4979 - DNA, 24 bp, Homo sapiens
gcattttcccatattcacaagaag

SEQ ID NO: 4980 - DNA, 23 bp, Homo sapiens
tttttgctttacttacatggctg

SEQ ID NO: 4981 - DNA, 21 bp, Homo sapiens
gtgtgtgagaaggacagacac

SEQ ID NO: 4982 - DNA, 21 bp, Homo sapiens
aaggtgctggaaggcaggatg

SEQ ID NO: 4983 - DNA, 21 bp, Homo sapiens
agtaggtacaattaaataagc

SEQ ID NO: 4984 - DNA, 20 bp, Homo sapiens
acagaaccagaaacctgaag

SEQ ID NO: 4985 - DNA, 21 bp, Homo sapiens
ttgaaggtccaggaaaaaacc

SEQ ID NO: 4986 - DNA, 24 bp, Homo sapiens
gaaaattatcatcagattaaggac

SEQ ID NO: 4987 - DNA, 23 bp, Homo sapiens
ttattctcttactgtcccagaag

SEQ ID NO: 4988 - DNA, 22 bp, Homo sapiens
tgtattttctaacaacagaggt

SEQ ID NO: 4989 - DNA, 20 bp, Homo sapiens
actcacactgctgtaaagat

SEQ ID NO: 4990 - DNA, 16 bp, Homo sapiens
ggtgcgtcttcctgta

SEQ ID NO: 4991 - DNA, 23 bp, Homo sapiens
gtttctagaactgttgtgtattt

SEQ ID NO: 4992 - DNA, 20 bp, Homo sapiens
ataatctggtcacagacacg

SEQ ID NO: 4993 - DNA, 23 bp, Homo sapiens
gacaagcaacaataggttattca

SEQ ID NO: 4994 - DNA, 19 bp, Homo sapiens
gacttttgtttttcttcac

SEQ ID NO: 4995 - DNA, 22 bp, Homo sapiens
tagtttgtccctggaagaggag

SEQ ID NO: 4996 - DNA, 19 bp, Homo sapiens
tgtaagttggcacaagcag

SEQ ID NO: 4997 - DNA, 21 bp, Homo sapiens
aacagcagtcacatagagggg

SEQ ID NO: 4998 - DNA, 19 bp, Homo sapiens
ggactctagaatgacagcc

SEQ ID NO: 4999 - DNA, 23 bp, Homo sapiens
ttacctgctgctgtatattgtag

SEQ ID NO: 5000 - DNA, 19 bp, Homo sapiens
atcatacgaccttcagagt

SEQ ID NO: 5001 - DNA, 24 bp, Homo sapiens
gattgggagaggaggggctttggt

SEQ ID NO: 5002 - DNA, 20 bp, Homo sapiens
ttggttgaaaggcattggtt

SEQ ID NO: 5003 - DNA, 19 bp, Homo sapiens
ctgcccatcagcccactga

SEQ ID NO: 5004 - DNA, 23 bp, Homo sapiens
agaataccttccacatttcattg

SEQ ID NO: 5005 - DNA, 18 bp, Homo sapiens
ggaaggtggctcacctga

SEQ ID NO: 5006 - DNA, 18 bp, Homo sapiens
gcaataagcacagccaac

SEQ ID NO: 5007 - DNA, 19 bp, Homo sapiens
ggtgtatcccaaacgtagc

SEQ ID NO: 5008 - DNA, 21 bp, Homo sapiens
gcttctttaggcttgggaatt

SEQ ID NO: 5009 - DNA, 23 bp, Homo sapiens
tggattcttataccaaaaagtgg

SEQ ID NO: 5010 - DNA, 18 bp, Homo sapiens
tctcttctggaagaaccc

SEQ ID NO: 5011 - DNA, 21 bp, Homo sapiens
tacagggacaacgggagcatg

SEQ ID NO: 5012 - DNA, 22 bp, Homo sapiens
gctaaaaggtgccagtacatcc

SEQ ID NO: 5013 - DNA, 20 bp, Homo sapiens
aagctgtagctgagtcaagc

SEQ ID NO: 5014 - DNA, 21 bp, Homo sapiens
acattatgaggataccaaagc

SEQ ID NO: 5015 - DNA, 19 bp, Homo sapiens
tcggacgcgtataacattg

SEQ ID NO: 5016 - DNA, 23 bp, Homo sapiens
aatttacatttaaacccctttct

SEQ ID NO: 5017 - DNA, 18 bp, Homo sapiens
gtcgatactccaggtcac

SEQ ID NO: 5018 - DNA, 23 bp, Homo sapiens
agtttattctagagatactgatc

SEQ ID NO: 5019 - DNA, 21 bp, Homo sapiens
attggggatatgaacatttgc

SEQ ID NO: 5020 - DNA, 30 bp, Homo sapiens
atattaaagtatataaagtatatatatata

SEQ ID NO: 5021 - DNA, 20 bp, Homo sapiens
ttccaaaagatgaggagtgc

SEQ ID NO: 5022 - DNA, 21 bp, Homo sapiens
gtgaggaaaatctcaggaagg

SEQ ID NO: 5023 - DNA, 19 bp, Homo sapiens
cactacctggctggaaaag

SEQ ID NO: 5024 - DNA, 22 bp, Homo sapiens
caaagggcaagttataaacagg

SEQ ID NO: 5025 - DNA, 20 bp, Homo sapiens
ctcaatgtttaacccacttt

SEQ ID NO: 5026 - DNA, 23 bp, Homo sapiens
cgtgttaaagtggacatttactt

SEQ ID NO: 5027 - DNA, 21 bp, Homo sapiens
cctctcctaagtttgagagtc

SEQ ID NO: 5028 - DNA, 23 bp, Homo sapiens
ccacaccagggaattcaccgatc

SEQ ID NO: 5029 - DNA, 18 bp, Homo sapiens
cccattgttggagccaag

SEQ ID NO: 5030 - DNA, 23 bp, Homo sapiens
ctttgtatttaagctgtaaagtg

SEQ ID NO: 5031 - DNA, 24 bp, Homo sapiens
tagatactgtataaaggggcgtgg

SEQ ID NO: 5032 - DNA, 21 bp, Homo sapiens
gccccttgatccccagtaaag

SEQ ID NO: 5033 - DNA, 24 bp, Homo sapiens
gtggtatctgaaagaagttgaaag

SEQ ID NO: 5034 - DNA, 22 bp, Homo sapiens
actgttcaccagatcagcatgc

SEQ ID NO: 5035 - DNA, 20 bp, Homo sapiens
atttcagccttgccttgaac

SEQ ID NO: 5036 - DNA, 24 bp, Homo sapiens
cagggtgtagccataggccttggt

SEQ ID NO: 5037 - DNA, 19 bp, Homo sapiens
tgcaataaaccaaataact

SEQ ID NO: 5038 - DNA, 20 bp, Homo sapiens
agacatgggaaaactctaca

SEQ ID NO: 5039 - DNA, 23 bp, Homo sapiens
gactaagtgcaatgggaaaataa

SEQ ID NO: 5040 - DNA, 21 bp, Homo sapiens
catttaataaagcaaagggca

SEQ ID NO: 5041 - DNA, 20 bp, Homo sapiens
gccaagaatatgaatgcaac

SEQ ID NO: 5042 - DNA, 30 bp, Homo sapiens
aaaaatttaatattcatttatagtaataaa

SEQ ID NO: 5043 - DNA, 20 bp, Homo sapiens
aagagaacttacagtactgt

SEQ ID NO: 5044 - DNA, 24 bp, Homo sapiens
tggttagttttaatctttaaacgt

SEQ ID NO: 5045 - DNA, 22 bp, Homo sapiens
tctggtgaaaacgtatatttgc

SEQ ID NO: 5046 - DNA, 22 bp, Homo sapiens
tatattcctatccaaattattc

SEQ ID NO: 5047 - DNA, 19 bp, Homo sapiens
acaattcaccacctgctag

SEQ ID NO: 5048 - DNA, 20 bp, Homo sapiens
cctccagagattgttttagc

SEQ ID NO: 5049 - DNA, 21 bp, Homo sapiens
cctcccaatttttttacaagc

SEQ ID NO: 5050 - DNA, 24 bp, Homo sapiens
cgtttctttacagatcaaatataa

SEQ ID NO: 5051 - DNA, 20 bp, Homo sapiens
aatttactccccagtctgtg

SEQ ID NO: 5052 - DNA, 19 bp, Homo sapiens
ccatgttggggtagataac

SEQ ID NO: 5053 - DNA, 20 bp, Homo sapiens
ttgacagaattaatcttggc

SEQ ID NO: 5054 - DNA, 17 bp, Homo sapiens
gatgagtcaggtacgca

SEQ ID NO: 5055 - DNA, 21 bp, Homo sapiens
tagttttcaagggcatttttc

SEQ ID NO: 5056 - DNA, 18 bp, Homo sapiens
gcattggctggatcccac

SEQ ID NO: 5057 - DNA, 24 bp, Homo sapiens
attaagacaggtctaccaccacag

SEQ ID NO: 5058 - DNA, 22 bp, Homo sapiens
ttcctccattatatctctcttc

SEQ ID NO: 5059 - DNA, 24 bp, Homo sapiens
ataggttagaaggagaataggctt

SEQ ID NO: 5060 - DNA, 23 bp, Homo sapiens
ttaaaagcttctgaaaaaattgt

SEQ ID NO: 5061 - DNA, 18 bp, Homo sapiens
ggtccacagaatccagtg

SEQ ID NO: 5062 - DNA, 19 bp, Homo sapiens
attgctcaggtgaaatcac

SEQ ID NO: 5063 - DNA, 20 bp, Homo sapiens
caagaaaggcctatgaccta

SEQ ID NO: 5064 - DNA, 22 bp, Homo sapiens
attccctttgggaacaaattaa

SEQ ID NO: 5065 - DNA, 22 bp, Homo sapiens
tgattatcgtaattacttgcac

SEQ ID NO: 5066 - DNA, 24 bp, Homo sapiens
ggatctgggatgttgctcatcatt

SEQ ID NO: 5067 - DNA, 20 bp, Homo sapiens
ctgctgatatggtgtcagtc

SEQ ID NO: 5068 - DNA, 20 bp, Homo sapiens
cttacatcactctgtaggtc

SEQ ID NO: 5069 - DNA, 25 bp, Homo sapiens
ccagattcagaatgagagactatac

SEQ ID NO: 5070 - DNA, 23 bp, Homo sapiens
tggtcaggatgacacatccattg

SEQ ID NO: 5071 - DNA, 21 bp, Homo sapiens
cattatgttggtgtcccgacg

SEQ ID NO: 5072 - DNA, 17 bp, Homo sapiens
cctgcttggcggccaag

SEQ ID NO: 5073 - DNA, 18 bp, Homo sapiens
tcctcttctcgccagctg

SEQ ID NO: 5074 - DNA, 22 bp, Homo sapiens
tgtgatagtcctctttgtatag

SEQ ID NO: 5075 - DNA, 20 bp, Homo sapiens
ccttagtagatgatcaagcc

SEQ ID NO: 5076 - DNA, 24 bp, Homo sapiens
aaaccaaaccagcttaggatcatc

SEQ ID NO: 5077 - DNA, 22 bp, Homo sapiens
ttatttgctctcagagttgggg

SEQ ID NO: 5078 - DNA, 21 bp, Homo sapiens
tgttcagctttgtatttcagc

SEQ ID NO: 5079 - DNA, 21 bp, Homo sapiens
gcaatgacgttcagagtgagg

SEQ ID NO: 5080 - DNA, 18 bp, Homo sapiens
ccaaccatcaccaagcct

SEQ ID NO: 5081 - DNA, 19 bp, Homo sapiens
agccacaggttacattttg

SEQ ID NO: 5082 - DNA, 24 bp, Homo sapiens
tgctatctctgcctttggcataac

SEQ ID NO: 5083 - DNA, 21 bp, Homo sapiens
ttaaccctttatggtggctct

SEQ ID NO: 5084 - DNA, 24 bp, Homo sapiens
tgcactcccatcaggatgtattac

SEQ ID NO: 5085 - DNA, 21 bp, Homo sapiens
ggccttaatggaactgtagga

SEQ ID NO: 5086 - DNA, 19 bp, Homo sapiens
atggcacagcatctggagg

SEQ ID NO: 5087 - DNA, 19 bp, Homo sapiens
gatactggaccaggtatgg

SEQ ID NO: 5088 - DNA, 24 bp, Homo sapiens
tccttgtagagatactgaaagaca

SEQ ID NO: 5089 - DNA, 21 bp, Homo sapiens
accaaatcaaagtacaccctc

SEQ ID NO: 5090 - DNA, 24 bp, Homo sapiens
ggtaagttgtgtgcataattatcc

SEQ ID NO: 5091 - DNA, 20 bp, Homo sapiens
cccccttgcctctcattttt

SEQ ID NO: 5092 - DNA, 21 bp, Homo sapiens
caccaggcatgtgggtgaaac

SEQ ID NO: 5093 - DNA, 23 bp, Homo sapiens
tcattgaaatgatggatgctaac

SEQ ID NO: 5094 - DNA, 19 bp, Homo sapiens
gcaggggggtttctgtgag

SEQ ID NO: 5095 - DNA, 21 bp, Homo sapiens
ccaaagcttttccatctactt

SEQ ID NO: 5096 - DNA, 23 bp, Homo sapiens
aagcatcatgttgtccaagcaat

SEQ ID NO: 5097 - DNA, 18 bp, Homo sapiens
actttacgcctgtggatg

SEQ ID NO: 5098 - DNA, 21 bp, Homo sapiens
cagatgattgcattctgagtg

SEQ ID NO: 5099 - DNA, 27 bp, Homo sapiens
taggaattacaactatctaaaagatgc

SEQ ID NO: 5100 - DNA, 22 bp, Homo sapiens
actgtgagattttaaaacagcc

SEQ ID NO: 5101 - DNA, 21 bp, Homo sapiens
tgtttctagtagagaaggact

SEQ ID NO: 5102 - DNA, 23 bp, Homo sapiens
gtcacataatcaactctgtcatc

SEQ ID NO: 5103 - DNA, 21 bp, Homo sapiens
ctaaaaagaaagccaaattcc

SEQ ID NO: 5104 - DNA, 17 bp, Homo sapiens
cggacatcttcagtgag

SEQ ID NO: 5105 - DNA, 24 bp, Homo sapiens
ttgaaaaatatatatgctcagttt

SEQ ID NO: 5106 - DNA, 16 bp, Homo sapiens
gcgtggaattgggtgg

SEQ ID NO: 5107 - DNA, 21 bp, Homo sapiens
tgactatattttagcttgtgc

SEQ ID NO: 5108 - DNA, 20 bp, Homo sapiens
gggttgctgaactcattctg

SEQ ID NO: 5109 - DNA, 22 bp, Homo sapiens
cagggtaaaatcttggaatacc

SEQ ID NO: 5110 - DNA, 23 bp, Homo sapiens
atagcatttacattgtatttctt

SEQ ID NO: 5111 - DNA, 23 bp, Homo sapiens
acggacacggagtcatttggcat

SEQ ID NO: 5112 - DNA, 22 bp, Homo sapiens
gccgcctaattaattttcttac

SEQ ID NO: 5113 - DNA, 23 bp, Homo sapiens
tttgataccatactataaggtct

SEQ ID NO: 5114 - DNA, 19 bp, Homo sapiens
gcaccagtggacctgcatg

SEQ ID NO: 5115 - DNA, 24 bp, Homo sapiens
tcgtaaaatgatgacagaaggggt

SEQ ID NO: 5116 - DNA, 22 bp, Homo sapiens
ccatcctgcactctaaaaattc

SEQ ID NO: 5117 - DNA, 23 bp, Homo sapiens
gaaaagagttcaaccccaaatgc

SEQ ID NO: 5118 - DNA, 19 bp, Homo sapiens
agtaccggctggactgggc

SEQ ID NO: 5119 - DNA, 23 bp, Homo sapiens
tggcctgaatcacatcgttctgg

SEQ ID NO: 5120 - DNA, 22 bp, Homo sapiens
gggatgacaacaagatccgctg

SEQ ID NO: 5121 - DNA, 18 bp, Homo sapiens
cactgaccagagcctggg

SEQ ID NO: 5122 - DNA, 24 bp, Homo sapiens
tccagtataaatataagcttgacc

SEQ ID NO: 5123 - DNA, 19 bp, Homo sapiens
gctctggatcttggccttc

SEQ ID NO: 5124 - DNA, 18 bp, Homo sapiens
ccctaggtgcatcaagag

SEQ ID NO: 5125 - DNA, 18 bp, Homo sapiens
cagctatgagggcccagc

SEQ ID NO: 5126 - DNA, 16 bp, Homo sapiens
gagattgccagtgacg

SEQ ID NO: 5127 - DNA, 24 bp, Homo sapiens
ccacgtagtgtcccttctgcttct

SEQ ID NO: 5128 - DNA, 16 bp, Homo sapiens
ggctgtgatgtccggc

SEQ ID NO: 5129 - DNA, 24 bp, Homo sapiens
aaagcagatgggtcacagcatgtc

SEQ ID NO: 5130 - DNA, 24 bp, Homo sapiens
ctaggatgataccttatttttctc

SEQ ID NO: 5131 - DNA, 22 bp, Homo sapiens
ctgagaagttaaaaaaggccac

SEQ ID NO: 5132 - DNA, 24 bp, Homo sapiens
aactgtgcccctgtggtattaatt

SEQ ID NO: 5133 - DNA, 17 bp, Homo sapiens
atggggatggcatccag

SEQ ID NO: 5134 - DNA, 23 bp, Homo sapiens
aatggtgcatagaatgattctca

SEQ ID NO: 5135 - DNA, 24 bp, Homo sapiens
caaatgctcttaatgtgagcaatg

SEQ ID NO: 5136 - DNA, 20 bp, Homo sapiens
aaggggtgaccacaaggagt

SEQ ID NO: 5137 - DNA, 23 bp, Homo sapiens
acaaggataaaacttcaatacac

SEQ ID NO: 5138 - DNA, 24 bp, Homo sapiens
tccatcttccctcccttccatgct

SEQ ID NO: 5139 - DNA, 23 bp, Homo sapiens
ttgtgaagtaattttattatttt

SEQ ID NO: 5140 - DNA, 24 bp, Homo sapiens
aaagagagtctgttgtagtactta

SEQ ID NO: 5141 - DNA, 23 bp, Homo sapiens
gttttggatcaaatccaaaagaa

SEQ ID NO: 5142 - DNA, 22 bp, Homo sapiens
tggagtatctggcattatgtgt

SEQ ID NO: 5143 - DNA, 24 bp, Homo sapiens
atatcaaatttgagtaacttacgt

SEQ ID NO: 5144 - DNA, 18 bp, Homo sapiens
ctgaagtggtccttgcta

SEQ ID NO: 5145 - DNA, 30 bp, Homo sapiens
gtattacttaataaaatttttgttattaat

SEQ ID NO: 5146 - DNA, 19 bp, Homo sapiens
gtgacagtgtctatcggac

SEQ ID NO: 5147 - DNA, 21 bp, Homo sapiens
tctttctcatctatttatggc

SEQ ID NO: 5148 - DNA, 17 bp, Homo sapiens
tggctggatgccccaag

SEQ ID NO: 5149 - DNA, 23 bp, Homo sapiens
tactaatattttcagcatttgat

SEQ ID NO: 5150 - DNA, 18 bp, Homo sapiens
tgtgttttctttttcagg

SEQ ID NO: 5151 - DNA, 21 bp, Homo sapiens
tacttaaggttcaccacaggc

SEQ ID NO: 5152 - DNA, 22 bp, Homo sapiens
acacacaacataaaaactgtcc

SEQ ID NO: 5153 - DNA, 20 bp, Homo sapiens
ttgactctcaacacttcagg

SEQ ID NO: 5154 - DNA, 29 bp, Homo sapiens
tatatatatatatatatatatgtatttat

SEQ ID NO: 5155 - DNA, 16 bp, Homo sapiens
agccttgtagagggcc

SEQ ID NO: 5156 - DNA, 19 bp, Homo sapiens
cgacctacagagcgacgta

SEQ ID NO: 5157 - DNA, 22 bp, Homo sapiens
ggctgtaggtaggcaattaata

SEQ ID NO: 5158 - DNA, 16 bp, Homo sapiens
tacctgcaccgctggt

SEQ ID NO: 5159 - DNA, 22 bp, Homo sapiens
gtacagagagttgtgttttcag

SEQ ID NO: 5160 - DNA, 19 bp, Homo sapiens
gtccatcagcgctgccaaa

SEQ ID NO: 5161 - DNA, 17 bp, Homo sapiens
ttcctgggcgacacact

SEQ ID NO: 5162 - DNA, 19 bp, Homo sapiens
caggctgtacaaaaaggcc

SEQ ID NO: 5163 - DNA, 22 bp, Homo sapiens
acatcattctggtcgggaaagc

SEQ ID NO: 5164 - DNA, 17 bp, Homo sapiens
ccaaggaagaccctaaa

SEQ ID NO: 5165 - DNA, 22 bp, Homo sapiens
cacttgccagtgcctgaccttc

SEQ ID NO: 5166 - DNA, 22 bp, Homo sapiens
tctaccagtatctgtacaaaac

SEQ ID NO: 5167 - DNA, 20 bp, Homo sapiens
gctttgtggtcgttgtaggc

SEQ ID NO: 5168 - DNA, 22 bp, Homo sapiens
tgagtaggctctctagaaaaag

SEQ ID NO: 5169 - DNA, 21 bp, Homo sapiens
cacatttgctgcccaaaccag

SEQ ID NO: 5170 - DNA, 24 bp, Homo sapiens
aatttaaataaaaacagtattccc

SEQ ID NO: 5171 - DNA, 23 bp, Homo sapiens
tggcctttctgtttctcataagc

SEQ ID NO: 5172 - DNA, 24 bp, Homo sapiens
cagattgtaagagttgttcttgaa

SEQ ID NO: 5173 - DNA, 22 bp, Homo sapiens
aagatgactggttatgacctgc

SEQ ID NO: 5174 - DNA, 24 bp, Homo sapiens
ccatttaaatataattcaaagggc

SEQ ID NO: 5175 - DNA, 21 bp, Homo sapiens
tggcattgcactctctgtttg

SEQ ID NO: 5176 - DNA, 21 bp, Homo sapiens
gttccggttgggaaggaggag

SEQ ID NO: 5177 - DNA, 29 bp, Homo sapiens
ctgtaaatatctatttttaaatacatcag

SEQ ID NO: 5178 - DNA, 19 bp, Homo sapiens
tgctggatcccaatggcat

SEQ ID NO: 5179 - DNA, 21 bp, Homo sapiens
gctcaatatgaaaccagactc

SEQ ID NO: 5180 - DNA, 18 bp, Homo sapiens
tgctgatagcgtttctgc

SEQ ID NO: 5181 - DNA, 22 bp, Homo sapiens
aaatcaatgccctgcagatcag

SEQ ID NO: 5182 - DNA, 24 bp, Homo sapiens
gctacttatcattaacttaaagac

SEQ ID NO: 5183 - DNA, 21 bp, Homo sapiens
ggagaaagagaaggctaatgt

SEQ ID NO: 5184 - DNA, 24 bp, Homo sapiens
ctctttggggtgtataataaaagg

SEQ ID NO: 5185 - DNA, 23 bp, Homo sapiens
atttactaattgaccattccatc

SEQ ID NO: 5186 - DNA, 20 bp, Homo sapiens
gctgtcttacattgctgatc

SEQ ID NO: 5187 - DNA, 24 bp, Homo sapiens
ttttcatcatccatttattcaagt

SEQ ID NO: 5188 - DNA, 15 bp, Homo sapiens
agctggcacgttcac

SEQ ID NO: 5189 - DNA, 30 bp, Homo sapiens
tacttaaaaattttaatttacttatgttag

SEQ ID NO: 5190 - DNA, 21 bp, Homo sapiens
agactgactacacaaagatcc

SEQ ID NO: 5191 - DNA, 21 bp, Homo sapiens
tcaaattcaccagcattgttg

SEQ ID NO: 5192 - DNA, 22 bp, Homo sapiens
cgctgacatgaagagtctaaag

SEQ ID NO: 5193 - DNA, 20 bp, Homo sapiens
tgagagtgaagaatgcccag

SEQ ID NO: 5194 - DNA, 24 bp, Homo sapiens
catttgtctgaaaacatcatccac

SEQ ID NO: 5195 - DNA, 19 bp, Homo sapiens
agacctggaatggctgaag

SEQ ID NO: 5196 - DNA, 22 bp, Homo sapiens
gcctggattacttccggggtgt

SEQ ID NO: 5197 - DNA, 19 bp, Homo sapiens
gcaactttgactcttcccc

SEQ ID NO: 5198 - DNA, 24 bp, Homo sapiens
acgatacagcctttcattcaagag

SEQ ID NO: 5199 - DNA, 20 bp, Homo sapiens
tgagattagccacctaactg

SEQ ID NO: 5200 - DNA, 19 bp, Homo sapiens
tggcaaccatccaataccc

SEQ ID NO: 5201 - DNA, 18 bp, Homo sapiens
gccagagagataacaccc

SEQ ID NO: 5202 - DNA, 16 bp, Homo sapiens
ctacgacctgcagagc

SEQ ID NO: 5203 - DNA, 20 bp, Homo sapiens
aactctgctaccatgaattg

SEQ ID NO: 5204 - DNA, 19 bp, Homo sapiens
gcaattatctgcaccagtg

SEQ ID NO: 5205 - DNA, 24 bp, Homo sapiens
ttaaattatgcctctggggaatgc

SEQ ID NO: 5206 - DNA, 20 bp, Homo sapiens
tggacatgatgtcaattgtt

SEQ ID NO: 5207 - DNA, 21 bp, Homo sapiens
gcgataatatacgcacatcgc

SEQ ID NO: 5208 - DNA, 22 bp, Homo sapiens
ccagagtgacagagaatataag

SEQ ID NO: 5209 - DNA, 24 bp, Homo sapiens
atcgttctgatctggcagacacgt

SEQ ID NO: 5210 - DNA, 18 bp, Homo sapiens
cgcaccctacaagatgac

SEQ ID NO: 5211 - DNA, 19 bp, Homo sapiens
tggcatttcttggcttgaa

SEQ ID NO: 5212 - DNA, 24 bp, Homo sapiens
tgatttcttactactttagtacaa

SEQ ID NO: 5213 - DNA, 22 bp, Homo sapiens
tttagacttctcataagctttc

SEQ ID NO: 5214 - DNA, 22 bp, Homo sapiens
accatttaaattagaaaacccc

SEQ ID NO: 5215 - DNA, 23 bp, Homo sapiens
gtatagcccatactgacttgggg

SEQ ID NO: 5216 - DNA, 19 bp, Homo sapiens
gtaatgactgccaatgttg

SEQ ID NO: 5217 - DNA, 20 bp, Homo sapiens
gcttacggtaaccttctttg

SEQ ID NO: 5218 - DNA, 20 bp, Homo sapiens
gcctccagagaaattgccag

SEQ ID NO: 5219 - DNA, 23 bp, Homo sapiens
atacagaaagcttctagcagagg

SEQ ID NO: 5220 - DNA, 21 bp, Homo sapiens
acaccaagcagaaaggctatg

SEQ ID NO: 5221 - DNA, 28 bp, Homo sapiens
aaaaacacaaaattcttgaaaaatagtc

SEQ ID NO: 5222 - DNA, 20 bp, Homo sapiens
tccattcttgtaaacaaacc

SEQ ID NO: 5223 - DNA, 20 bp, Homo sapiens
aagagaaggaagcgtacctc

SEQ ID NO: 5224 - DNA, 23 bp, Homo sapiens
ttgactacattaccatattcttt

SEQ ID NO: 5225 - DNA, 19 bp, Homo sapiens
tctgcccttatgtcatagc

SEQ ID NO: 5226 - DNA, 20 bp, Homo sapiens
ggaaatatccaacaacgaaa

SEQ ID NO: 5227 - DNA, 24 bp, Homo sapiens
tcatatcgcattgggactggtagc

SEQ ID NO: 5228 - DNA, 20 bp, Homo sapiens
gcaacatcaccattccttct

SEQ ID NO: 5229 - DNA, 24 bp, Homo sapiens
ttgcaaggtaggtaatttgtcgct

SEQ ID NO: 5230 - DNA, 19 bp, Homo sapiens
attccctatttccctcctc

SEQ ID NO: 5231 - DNA, 21 bp, Homo sapiens
ttacacttcatgttcgtgcca

SEQ ID NO: 5232 - DNA, 23 bp, Homo sapiens
agttagctaaggcttacattagt

SEQ ID NO: 5233 - DNA, 20 bp, Homo sapiens
tgcagcatctccggagtatc

SEQ ID NO: 5234 - DNA, 21 bp, Homo sapiens
gctgacacataaagttaacca

SEQ ID NO: 5235 - DNA, 24 bp, Homo sapiens
aagccaattctctgcaaataagtg

SEQ ID NO: 5236 - DNA, 23 bp, Homo sapiens
gtttgtcagagttctattttcag

SEQ ID NO: 5237 - DNA, 21 bp, Homo sapiens
ccagaagctttgtcattcacc

SEQ ID NO: 5238 - DNA, 22 bp, Homo sapiens
accaaaattctttgaagaagtc

SEQ ID NO: 5239 - DNA, 17 bp, Homo sapiens
cagagtgaaggttgctc

SEQ ID NO: 5240 - DNA, 24 bp, Homo sapiens
ttggaaaagatagtaggatggttc

SEQ ID NO: 5241 - DNA, 17 bp, Homo sapiens
ggcagacctggagtggc

SEQ ID NO: 5242 - DNA, 20 bp, Homo sapiens
ttctggagtgtcgacaatgc

SEQ ID NO: 5243 - DNA, 16 bp, Homo sapiens
gattacaggcatgcgc

SEQ ID NO: 5244 - DNA, 16 bp, Homo sapiens
tgcaagctctgcctcc

SEQ ID NO: 5245 - DNA, 24 bp, Homo sapiens
ctgaagaaacctggctgtaggtag

SEQ ID NO: 5246 - DNA, 17 bp, Homo sapiens
tgcaccactggtcttgc

SEQ ID NO: 5247 - DNA, 24 bp, Homo sapiens
ctacgtacagagagttgtgttttc

SEQ ID NO: 5248 - DNA, 18 bp, Homo sapiens
cagcgctgccaaagaagg

SEQ ID NO: 5249 - DNA, 22 bp, Homo sapiens
ggggacttgtttcctgggggac

SEQ ID NO: 5250 - DNA, 22 bp, Homo sapiens
gtacaaaaaggcctacaacgac

SEQ ID NO: 5251 - DNA, 23 bp, Homo sapiens
ttggatcacatcattctggtcgg

SEQ ID NO: 5252 - DNA, 20 bp, Homo sapiens
aggaagaccctaaactggtt

SEQ ID NO: 5253 - DNA, 22 bp, Homo sapiens
acatcacttgccagtgcctgac

SEQ ID NO: 5254 - DNA, 21 bp, Homo sapiens
ccagtatctgtacaaaactgc

SEQ ID NO: 5255 - DNA, 20 bp, Homo sapiens
ggagatcttggctttgtggt

SEQ ID NO: 5256 - DNA, 22 bp, Homo sapiens
ggctctctagaaaaagtgggtt

SEQ ID NO: 5257 - DNA, 23 bp, Homo sapiens
atcttcaacacatttgctgccca

SEQ ID NO: 5258 - DNA, 17 bp, Homo sapiens
cagtattccccgacccc

SEQ ID NO: 5259 - DNA, 22 bp, Homo sapiens
tggcctttctgtttctcataag

SEQ ID NO: 5260 - DNA, 24 bp, Homo sapiens
cagattgtaagagttgttcttgaa

SEQ ID NO: 5261 - DNA, 22 bp, Homo sapiens
aagatgactggttatgacctgc

SEQ ID NO: 5262 - DNA, 24 bp, Homo sapiens
ccatttaaatataattcaaagggc

SEQ ID NO: 5263 - DNA, 21 bp, Homo sapiens
tggcattgcactctctgtttg

SEQ ID NO: 5264 - DNA, 21 bp, Homo sapiens
gttccggttgggaaggaggag

SEQ ID NO: 5265 - DNA, 29 bp, Homo sapiens
ctgtaaatatctatttttaaatacatcag

SEQ ID NO: 5266 - DNA, 19 bp, Homo sapiens
tgctggatcccaatggcat

SEQ ID NO: 5267 - DNA, 21 bp, Homo sapiens
gctcaatatgaaaccagactc

SEQ ID NO: 5268 - DNA, 18 bp, Homo sapiens
tgctgatagcgtttctgc

SEQ ID NO: 5269 - DNA, 18 bp, Homo sapiens
aatgctctgcagatcagc

SEQ ID NO: 5270 - DNA, 24 bp, Homo sapiens
gctacttatcattaacttaaagac

SEQ ID NO: 5271 - DNA, 22 bp, Homo sapiens
gggagaaagagaaggctaatgt

SEQ ID NO: 5272 - DNA, 24 bp, Homo sapiens
caaactctctttggggtgtataat

SEQ ID NO: 5273 - DNA, 23 bp, Homo sapiens
atttactaattgaccattccatc

SEQ ID NO: 5274 - DNA, 17 bp, Homo sapiens
gcgctgtcttacattgc

SEQ ID NO: 5275 - DNA, 24 bp, Homo sapiens
attcatatccatttattcaagtat

SEQ ID NO: 5276 - DNA, 16 bp, Homo sapiens
gagtgtcagctggcac

SEQ ID NO: 5277 - DNA, 28 bp, Homo sapiens
cttaaaaattttaatttacttatgttag

SEQ ID NO: 5278 - DNA, 21 bp, Homo sapiens
agactgactacacaaagatcc

SEQ ID NO: 5279 - DNA, 21 bp, Homo sapiens
tcaaattcaccagcattgttg

SEQ ID NO: 5280 - DNA, 22 bp, Homo sapiens
cgctgacatgaagagtctaaag

SEQ ID NO: 5281 - DNA, 20 bp, Homo sapiens
tgagagtgaagaatgcccag

SEQ ID NO: 5282 - DNA, 24 bp, Homo sapiens
catttgtctgaaaacatcatccac

SEQ ID NO: 5283 - DNA, 19 bp, Homo sapiens
agacctggaatggctgaag

SEQ ID NO: 5284 - DNA, 22 bp, Homo sapiens
gcctggattacttccggggtgt

SEQ ID NO: 5285 - DNA, 19 bp, Homo sapiens
gcaactttgactcttcccc

SEQ ID NO: 5286 - DNA, 24 bp, Homo sapiens
acgatacagcctttcattcaagag

SEQ ID NO: 5287 - DNA, 20 bp, Homo sapiens
tgagattagccacctaactg

SEQ ID NO: 5288 - DNA, 19 bp, Homo sapiens
tggcaaccatccaataccc

SEQ ID NO: 5289 - DNA, 18 bp, Homo sapiens
gccagagagataacaccc

SEQ ID NO: 5290 - DNA, 16 bp, Homo sapiens
ctacgacctgcagagc

SEQ ID NO: 5291 - DNA, 20 bp, Homo sapiens
aactctgctaccatgaattg

SEQ ID NO: 5292 - DNA, 19 bp, Homo sapiens
gcaattatctgcaccagtg

SEQ ID NO: 5293 - DNA, 24 bp, Homo sapiens
ttaaattatgcctctggggaatgc

SEQ ID NO: 5294 - DNA, 20 bp, Homo sapiens
tggacatgatgtcaattgtt

SEQ ID NO: 5295 - DNA, 21 bp, Homo sapiens
gcgataatatacgcacatcgc

SEQ ID NO: 5296 - DNA, 22 bp, Homo sapiens
ccagagtgacagagaatataag

SEQ ID NO: 5297 - DNA, 24 bp, Homo sapiens
atcgttctgatctggcagacacgt

SEQ ID NO: 5298 - DNA, 18 bp, Homo sapiens
cgcaccctacaagatgac

SEQ ID NO: 5299 - DNA, 19 bp, Homo sapiens
tggcatttcttggcttgaa

SEQ ID NO: 5300 - DNA, 24 bp, Homo sapiens
tgatttcttactactttagtacaa

SEQ ID NO: 5301 - DNA, 22 bp, Homo sapiens
tttagacttctcataagctttc

SEQ ID NO: 5302 - DNA, 22 bp, Homo sapiens
agccatttaaattagaaaaccc

SEQ ID NO: 5303 - DNA, 23 bp, Homo sapiens
gtatagcccatactgacttgggg

SEQ ID NO: 5304 - DNA, 19 bp, Homo sapiens
gtaatgactgccaatgttg

SEQ ID NO: 5305 - DNA, 20 bp, Homo sapiens
gcttacggtaaccttctttg

SEQ ID NO: 5306 - DNA, 20 bp, Homo sapiens
gcctccagagaaattgccag

SEQ ID NO: 5307 - DNA, 23 bp, Homo sapiens
atacagaaagcttctagcagagg

SEQ ID NO: 5308 - DNA, 21 bp, Homo sapiens
acaccaagcagaaaggctatg

SEQ ID NO: 5309 - DNA, 28 bp, Homo sapiens
aaaaacacaaaattcttgaaaaatagtc

SEQ ID NO: 5310 - DNA, 20 bp, Homo sapiens
tccattcttgtaaacaaacc

SEQ ID NO: 5311 - DNA, 20 bp, Homo sapiens
aagagaaggaagcgtacctc

SEQ ID NO: 5312 - DNA, 23 bp, Homo sapiens
ttgactacattaccatattcttt

SEQ ID NO: 5313 - DNA, 19 bp, Homo sapiens
tctgcccttatgtcatagc

SEQ ID NO: 5314 - DNA, 20 bp, Homo sapiens
ggaaatatccaacaacgaaa

SEQ ID NO: 5315 - DNA, 24 bp, Homo sapiens
tcatatcgcattgggactggtagc

SEQ ID NO: 5316 - DNA, 20 bp, Homo sapiens
gcaacatcaccattccttct

SEQ ID NO: 5317 - DNA, 24 bp, Homo sapiens
ttgcaaggtaggtaatttgtcgct

SEQ ID NO: 5318 - DNA, 19 bp, Homo sapiens
attccctatttccctcctc

SEQ ID NO: 5319 - DNA, 21 bp, Homo sapiens
ttacacttcatgttcgtgcca

SEQ ID NO: 5320 - DNA, 23 bp, Homo sapiens
agttagctaaggcttacattagt

SEQ ID NO: 5321 - DNA, 20 bp, Homo sapiens
tgcagcatctccggagtatc

SEQ ID NO: 5322 - DNA, 21 bp, Homo sapiens
gctgacacataaagttaacca

SEQ ID NO: 5323 - DNA, 24 bp, Homo sapiens
aagccaattctctgcaaataagtg

SEQ ID NO: 5324 - DNA, 23 bp, Homo sapiens
gtttgtcagagttctattttcag

SEQ ID NO: 5325 - DNA, 21 bp, Homo sapiens
ccagaagctttgtcattcacc

SEQ ID NO: 5326 - DNA, 22 bp, Homo sapiens
accaaaattctttgaagaagtc

SEQ ID NO: 5327 - DNA, 17 bp, Homo sapiens
cagagtgaaggttgctc

SEQ ID NO: 5328 - DNA, 24 bp, Homo sapiens
ttggaaaagatagtaggatggttc

SEQ ID NO: 5329 - DNA, 17 bp, Homo sapiens
ggcagacctggagtggc

SEQ ID NO: 5330 - DNA, 20 bp, Homo sapiens
ttctggagtgtcgacaatgc

SEQ ID NO: 5331 - DNA, 16 bp, Homo sapiens
gattacaggcatgcgc

SEQ ID NO: 5332 - DNA, 16 bp, Homo sapiens
tgcaagctctgcctcc

SEQ ID NO: 5333 - DNA, 24 bp, Homo sapiens
ctgaagaaacctggctgtaggtag

SEQ ID NO: 5334 - DNA, 17 bp, Homo sapiens
tgcaccactggtcttgc

SEQ ID NO: 5335 - DNA, 24 bp, Homo sapiens
ctacgtacagagagttgtgttttc

SEQ ID NO: 5336 - DNA, 18 bp, Homo sapiens
cagcgctgccaaagaagg

SEQ ID NO: 5337 - DNA, 22 bp, Homo sapiens
ggggacttgtttcctgggggac

SEQ ID NO: 5338 - DNA, 22 bp, Homo sapiens
gtacaaaaaggcctacaacgac

SEQ ID NO: 5339 - DNA, 23 bp, Homo sapiens
ttggatcacatcattctggtcgg

SEQ ID NO: 5340 - DNA, 20 bp, Homo sapiens
aggaagaccctaaactggtt

SEQ ID NO: 5341 - DNA, 22 bp, Homo sapiens
acatcacttgccagtgcctgac

SEQ ID NO: 5342 - DNA, 21 bp, Homo sapiens
ccagtatctgtacaaaactgc

SEQ ID NO: 5343 - DNA, 20 bp, Homo sapiens
ggagatcttggctttgtggt

SEQ ID NO: 5344 - DNA, 22 bp, Homo sapiens
ggctctctagaaaaagtgggtt

SEQ ID NO: 5345 - DNA, 23 bp, Homo sapiens
atcttcaacacatttgctgccca

SEQ ID NO: 5346 - DNA, 17 bp, Homo sapiens
cagtattccccgacccc

SEQ ID NO: 5347 - DNA, 22 bp, Homo sapiens
tggcctttctgtttctcataag

SEQ ID NO: 5348 - DNA, 21 bp, Homo sapiens
ggatattgccagtgacgtaag

SEQ ID NO: 5349 - DNA, 24 bp, Homo sapiens
cagattgtaagagttgttcttgaa

SEQ ID NO: 5350 - DNA, 22 bp, Homo sapiens
aagatgactggttatgacctgc

SEQ ID NO: 5351 - DNA, 24 bp, Homo sapiens
ccatttaaatataattcaaagggc

SEQ ID NO: 5352 - DNA, 21 bp, Homo sapiens
tggcattgcactctctgtttg

SEQ ID NO: 5353 - DNA, 21 bp, Homo sapiens
gttccggttgggaaggaggag

SEQ ID NO: 5354 - DNA, 29 bp, Homo sapiens
ctgtaaatatctatttttaaatacatcag

SEQ ID NO: 5355 - DNA, 19 bp, Homo sapiens
tgctggatcccaatggcat

SEQ ID NO: 5356 - DNA, 21 bp, Homo sapiens
gctcaatatgaaaccagactc

SEQ ID NO: 5357 - DNA, 18 bp, Homo sapiens
tgctgatagcgtttctgc

SEQ ID NO: 5358 - DNA, 19 bp, Homo sapiens
ctgcagatcagcaatgtaa

SEQ ID NO: 5359 - DNA, 24 bp, Homo sapiens
cagctacttatcattaacttaaag

SEQ ID NO: 5360 - DNA, 18 bp, Homo sapiens
aggctaatgtgaacgtgc

SEQ ID NO: 5361 - DNA, 24 bp, Homo sapiens
cttttgacaaactctctttggggt

SEQ ID NO: 5362 - DNA, 20 bp, Homo sapiens
tgaccattccatcgtttttc

SEQ ID NO: 5363 - DNA, 21 bp, Homo sapiens
aagcaaatgatgtgtgctgtc

SEQ ID NO: 5364 - DNA, 30 bp, Homo sapiens
atatccatttattcaagtatatgtttcatg

SEQ ID NO: 5365 - DNA, 17 bp, Homo sapiens
ggggagtgtcagctggc

SEQ ID NO: 5366 - DNA, 24 bp, Homo sapiens
ttttaatttacttatgttagtttt

SEQ ID NO: 5367 - DNA, 21 bp, Homo sapiens
agactgactacacaaagatcc

SEQ ID NO: 5368 - DNA, 21 bp, Homo sapiens
tcaaattcaccagcattgttg

SEQ ID NO: 5369 - DNA, 22 bp, Homo sapiens
cgctgacatgaagagtctaaag

SEQ ID NO: 5370 - DNA, 20 bp, Homo sapiens
tgagagtgaagaatgcccag

SEQ ID NO: 5371 - DNA, 24 bp, Homo sapiens
catttgtctgaaaacatcatccac

SEQ ID NO: 5372 - DNA, 19 bp, Homo sapiens
agacctggaatggctgaag

SEQ ID NO: 5373 - DNA, 22 bp, Homo sapiens
gcctggattacttccggggtgt

SEQ ID NO: 5374 - DNA, 19 bp, Homo sapiens
gcaactttgactcttcccc

SEQ ID NO: 5375 - DNA, 24 bp, Homo sapiens
acgatacagcctttcattcaagag

SEQ ID NO: 5376 - DNA, 20 bp, Homo sapiens
tgagattagccacctaactg

SEQ ID NO: 5377 - DNA, 19 bp, Homo sapiens
tggcagccatccaataccc

SEQ ID NO: 5378 - DNA, 18 bp, Homo sapiens
gccagagagataacaccc

SEQ ID NO: 5379 - DNA, 16 bp, Homo sapiens
tacgacctgcagagcg

SEQ ID NO: 5380 - DNA, 20 bp, Homo sapiens
aactctgctaccatgaattg

SEQ ID NO: 5381 - DNA, 19 bp, Homo sapiens
gcaattatctgcaccagtg

SEQ ID NO: 5382 - DNA, 24 bp, Homo sapiens
tttaaattatgcctctggggaatg

SEQ ID NO: 5383 - DNA, 20 bp, Homo sapiens
tggacatgatgtcaattgtt

SEQ ID NO: 5384 - DNA, 21 bp, Homo sapiens
gcgataatatacgcacatcgc

SEQ ID NO: 5385 - DNA, 22 bp, Homo sapiens
ccagagtgacagagaatataag

SEQ ID NO: 5386 - DNA, 24 bp, Homo sapiens
atcgttctgatctggcagacacgt

SEQ ID NO: 5387 - DNA, 18 bp, Homo sapiens
gcaccctacaagatgacc

SEQ ID NO: 5388 - DNA, 23 bp, Homo sapiens
aaccaggacctggcatttcttgg

SEQ ID NO: 5389 - DNA, 24 bp, Homo sapiens
tgatttcttactactttagtacaa

SEQ ID NO: 5390 - DNA, 22 bp, Homo sapiens
tttagacttctcataagctttc

SEQ ID NO: 5391 - DNA, 22 bp, Homo sapiens
accatttaaattagaaaacccc

SEQ ID NO: 5392 - DNA, 23 bp, Homo sapiens
gtatagcccatactgacttgggg

SEQ ID NO: 5393 - DNA, 19 bp, Homo sapiens
gtaatgactgccaatgttg

SEQ ID NO: 5394 - DNA, 20 bp, Homo sapiens
agttgcttacggtaaccttc

SEQ ID NO: 5395 - DNA, 16 bp, Homo sapiens
ttgccagtgaggtacg

SEQ ID NO: 5396 - DNA, 22 bp, Homo sapiens
ttttcaaatacagaaagcttct

SEQ ID NO: 5397 - DNA, 20 bp, Homo sapiens
ccaagcagaaaggctatgac

SEQ ID NO: 5398 - DNA, 23 bp, Homo sapiens
tttttaaaaacacaaaattcttg

SEQ ID NO: 5399 - DNA, 22 bp, Homo sapiens
gtaaacaaacctttattttccc

SEQ ID NO: 5400 - DNA, 19 bp, Homo sapiens
aaagagaaggaagcgtacc

SEQ ID NO: 5401 - DNA, 24 bp, Homo sapiens
acattaccatattctttatgattt

SEQ ID NO: 5402 - DNA, 20 bp, Homo sapiens
ttgatttcaatggcatctgc

SEQ ID NO: 5403 - DNA, 18 bp, Homo sapiens
caacaacgaaaagaaccc

SEQ ID NO: 5404 - DNA, 21 bp, Homo sapiens
tgccttgcaaatcagcaatgt

SEQ ID NO: 5405 - DNA, 20 bp, Homo sapiens
ttgggactggtagctaaaga

SEQ ID NO: 5406 - DNA, 17 bp, Homo sapiens
agcaacatcaccattcc

SEQ ID NO: 5407 - DNA, 23 bp, Homo sapiens
ggtaggtaatttgtcactataac

SEQ ID NO: 5408 - DNA, 19 bp, Homo sapiens
ttgattccctatttccctc

SEQ ID NO: 5409 - DNA, 21 bp, Homo sapiens
ttacacttcatgttcgtgcca

SEQ ID NO: 5410 - DNA, 23 bp, Homo sapiens
agttagctaaggcttacattagt

SEQ ID NO: 5411 - DNA, 21 bp, Homo sapiens
catctccggagtatcagaagg

SEQ ID NO: 5412 - DNA, 22 bp, Homo sapiens
gccaagctgacacataaagtta

SEQ ID NO: 5413 - DNA, 24 bp, Homo sapiens
gcaaaagccaattctctgcaaata

SEQ ID NO: 5414 - DNA, 24 bp, Homo sapiens
tcagagttctattttcagtgtatc

SEQ ID NO: 5415 - DNA, 21 bp, Homo sapiens
acgtccagaagctttgtcatt

SEQ ID NO: 5416 - DNA, 22 bp, Homo sapiens
ccaaaattctttgaagaagtcc

SEQ ID NO: 5417 - DNA, 20 bp, Homo sapiens
gaaatgaacagagtgaaggt

SEQ ID NO: 5418 - DNA, 24 bp, Homo sapiens
aaaagatagtaggatggttcttac

SEQ ID NO: 5419 - DNA, 18 bp, Homo sapiens
tataaggcagacctggag

SEQ ID NO: 5420 - DNA, 22 bp, Homo sapiens
cttctggagtgtcgacaatgct

SEQ ID NO: 5421 - DNA, 18 bp, Homo sapiens
gggtttcaccatgttggt

SEQ ID NO: 5422 - DNA, 18 bp, Homo sapiens
cctatgacctgcagagtg

SEQ ID NO: 5423 - DNA, 20 bp, Homo sapiens
aatgtgaatggtacccccag

SEQ ID NO: 5424 - DNA, 22 bp, Homo sapiens
caattacctgcatgaatggaca

SEQ ID NO: 5425 - DNA, 23 bp, Homo sapiens
gggactgtcctcagaggcactga

SEQ ID NO: 5426 - DNA, 19 bp, Homo sapiens
tgttaagcatcttgctggc

SEQ ID NO: 5427 - DNA, 21 bp, Homo sapiens
cccaaaattcatgttacgtac

SEQ ID NO: 5428 - DNA, 20 bp, Homo sapiens
aagggagtacaagaaggaat

SEQ ID NO: 5429 - DNA, 22 bp, Homo sapiens
atgtcgttttgatccggcatgc

SEQ ID NO: 5430 - DNA, 20 bp, Homo sapiens
agagcattgaagatgatccc

SEQ ID NO: 5431 - DNA, 24 bp, Homo sapiens
cagtgaccaaagtctgacatttct

SEQ ID NO: 5432 - DNA, 24 bp, Homo sapiens
ttctggcattttagtacaaataca

SEQ ID NO: 5433 - DNA, 23 bp, Homo sapiens
gaacttggttttccacttttgga

SEQ ID NO: 5434 - DNA, 24 bp, Homo sapiens
tgtctgtaattgtcagcacatgag

SEQ ID NO: 5435 - DNA, 21 bp, Homo sapiens
gcatgtatggcacacataatc

SEQ ID NO: 5436 - DNA, 23 bp, Homo sapiens
aaatataatagttcagagatgcc

SEQ ID NO: 5437 - DNA, 22 bp, Homo sapiens
ctttctgtttctcataggcttc

SEQ ID NO: 5438 - DNA, 16 bp, Homo sapiens
caaggcctccagggac

SEQ ID NO: 5439 - DNA, 22 bp, Homo sapiens
ggtcttgagaggtaggaagtag

SEQ ID NO: 5440 - DNA, 21 bp, Homo sapiens
accaagggatgggatgaatca

SEQ ID NO: 5441 - DNA, 22 bp, Homo sapiens
caccagccaccctctgggttgt

SEQ ID NO: 5442 - DNA, 22 bp, Homo sapiens
ctattaccttcctcaaacactc

SEQ ID NO: 5443 - DNA, 21 bp, Homo sapiens
gtactcacgtcactggcgatg

SEQ ID NO: 5444 - DNA, 23 bp, Homo sapiens
aagattaattaaaatgctttttc

SEQ ID NO: 5445 - DNA, 21 bp, Homo sapiens
tgctctcagatcatagtcctt

SEQ ID NO: 5446 - DNA, 23 bp, Homo sapiens
ccaagagtaattctgccaatatc

SEQ ID NO: 5447 - DNA, 23 bp, Homo sapiens
agggaagggataatagacgacag

SEQ ID NO: 5448 - DNA, 19 bp, Homo sapiens
ggatgctgacaaaacctcc

SEQ ID NO: 5449 - DNA, 23 bp, Homo sapiens
cagaaaggaaattgttacggtgg

SEQ ID NO: 5450 - DNA, 20 bp, Homo sapiens
cttatactccctccctctcc

SEQ ID NO: 5451 - DNA, 22 bp, Homo sapiens
caggaaatctcttacttggctg

SEQ ID NO: 5452 - DNA, 24 bp, Homo sapiens
taaatgtgagttaaatttgctaac

SEQ ID NO: 5453 - DNA, 22 bp, Homo sapiens
gtgtctggcatcacgtggatgg

SEQ ID NO: 5454 - DNA, 20 bp, Homo sapiens
tgactcttttgcttccctca

SEQ ID NO: 5455 - DNA, 23 bp, Homo sapiens
cggaaattgtcctagcaaagaat

SEQ ID NO: 5456 - DNA, 18 bp, Homo sapiens
cctgcatgagaatcaggc

SEQ ID NO: 5457 - DNA, 16 bp, Homo sapiens
tcgccagcctgcagac

SEQ ID NO: 5458 - DNA, 22 bp, Homo sapiens
actttatgagccaaatctgtgg

SEQ ID NO: 5459 - DNA, 18 bp, Homo sapiens
attggctctgtagaggtc

SEQ ID NO: 5460 - DNA, 23 bp, Homo sapiens
gactcaccttgctcattgtcagg

SEQ ID NO: 5461 - DNA, 23 bp, Homo sapiens
tgacattatttcattttcaggct

SEQ ID NO: 5462 - DNA, 22 bp, Homo sapiens
atgtgaatttgagctggtctgc

SEQ ID NO: 5463 - DNA, 20 bp, Homo sapiens
atgttaaatcaggatcaggc

SEQ ID NO: 5464 - DNA, 21 bp, Homo sapiens
ccagctctcttcactttctcg

SEQ ID NO: 5465 - DNA, 17 bp, Homo sapiens
aatcctgtgggtcttcc

SEQ ID NO: 5466 - DNA, 22 bp, Homo sapiens
agccactcaagatcagatttgt

SEQ ID NO: 5467 - DNA, 24 bp, Homo sapiens
cttctgaaactaaatacatacttt

SEQ ID NO: 5468 - DNA, 17 bp, Homo sapiens
atggacctgcctgcctg

SEQ ID NO: 5469 - DNA, 22 bp, Homo sapiens
tgtaggtttcaccagactgtgg

SEQ ID NO: 5470 - DNA, 17 bp, Homo sapiens
gctggccaagaagtgtc

SEQ ID NO: 5471 - DNA, 22 bp, Homo sapiens
cattactgaagaatattagagc

SEQ ID NO: 5472 - DNA, 22 bp, Homo sapiens
gtacaagaaggagtttgagaag

SEQ ID NO: 5473 - DNA, 24 bp, Homo sapiens
gagcctgaatgacgtcattctgat

SEQ ID NO: 5474 - DNA, 24 bp, Homo sapiens
ttaaggatgacccgaagatgatgt

SEQ ID NO: 5475 - DNA, 24 bp, Homo sapiens
tagtctatgtcgcttacaaggatc

SEQ ID NO: 5476 - DNA, 24 bp, Homo sapiens
tttttagtacaagtacaaggaagg

SEQ ID NO: 5477 - DNA, 18 bp, Homo sapiens
tgctgaacttggtcttcc

SEQ ID NO: 5478 - DNA, 24 bp, Homo sapiens
tgtgaacctatgaaacatgattat

SEQ ID NO: 5479 - DNA, 19 bp, Homo sapiens
ttggccacatggatggacc

SEQ ID NO: 5480 - DNA, 21 bp, Homo sapiens
tactcacttttctccttcatg

SEQ ID NO: 5481 - DNA, 19 bp, Homo sapiens
atggtggccaagctgtttg

SEQ ID NO: 5482 - DNA, 20 bp, Homo sapiens
gccaaggcttcaagagatat

SEQ ID NO: 5483 - DNA, 22 bp, Homo sapiens
ttgtataggggaaaatcactaa

SEQ ID NO: 5484 - DNA, 20 bp, Homo sapiens
tttggaagagtccaagaagg

SEQ ID NO: 5485 - DNA, 21 bp, Homo sapiens
agcaagaaaaactctaaaagc

SEQ ID NO: 5486 - DNA, 25 bp, Homo sapiens
actttttatggaaggagtaaatgag

SEQ ID NO: 5487 - DNA, 23 bp, Homo sapiens
tttccaaaacatccacttacatc

SEQ ID NO: 5488 - DNA, 24 bp, Homo sapiens
tgtgaattatttctgaagtttaaa

SEQ ID NO: 5489 - DNA, 23 bp, Homo sapiens
tggcatccagacgcaagtcatag

SEQ ID NO: 5490 - DNA, 17 bp, Homo sapiens
agcacccatgaggcaaa

SEQ ID NO: 5491 - DNA, 20 bp, Homo sapiens
tcaaccgaataaactacagt

SEQ ID NO: 5492 - DNA, 23 bp, Homo sapiens
gagaactatctcttctactgaaa

SEQ ID NO: 5493 - DNA, 20 bp, Homo sapiens
tgggacaatgacaagaaaac

SEQ ID NO: 5494 - DNA, 21 bp, Homo sapiens
ccttttcctaaggaaacagct

SEQ ID NO: 5495 - DNA, 22 bp, Homo sapiens
aataatttttctctctctctct

SEQ ID NO: 5496 - DNA, 23 bp, Homo sapiens
tcaacagtttacttacatcactg

SEQ ID NO: 5497 - DNA, 18 bp, Homo sapiens
acaagagagatgactggc

SEQ ID NO: 5498 - DNA, 19 bp, Homo sapiens
gtgtatcaggcatgacatg

SEQ ID NO: 5499 - DNA, 24 bp, Homo sapiens
aagaattttaataagaaacaaagg

SEQ ID NO: 5500 - DNA, 20 bp, Homo sapiens
ctggcaaaaaacaatgcttt

SEQ ID NO: 5501 - DNA, 24 bp, Homo sapiens
tggtattatagtggaaaaatcatt

SEQ ID NO: 5502 - DNA, 17 bp, Homo sapiens
cgtcagcgtccagaaac

SEQ ID NO: 5503 - DNA, 30 bp, Homo sapiens
aaaatgcaataatatatcagaatttttaaa

SEQ ID NO: 5504 - DNA, 19 bp, Homo sapiens
tccttggaagttgttaggg

SEQ ID NO: 5505 - DNA, 24 bp, Homo sapiens
aggattgaagactcaccttattca

SEQ ID NO: 5506 - DNA, 22 bp, Homo sapiens
ctgcagaatttgtataagtcag

SEQ ID NO: 5507 - DNA, 24 bp, Homo sapiens
gtgtccgttatactggtaaatttc

SEQ ID NO: 5508 - DNA, 22 bp, Homo sapiens
acccattttgtaactatgaatc

SEQ ID NO: 5509 - DNA, 19 bp, Homo sapiens
attctccagctctcttggc

SEQ ID NO: 5510 - DNA, 20 bp, Homo sapiens
aatgactatgctaggaacct

SEQ ID NO: 5511 - DNA, 21 bp, Homo sapiens
tgcctttcatccattcaaggt

SEQ ID NO: 5512 - DNA, 18 bp, Homo sapiens
gcctatgacctccagagt

SEQ ID NO: 5513 - DNA, 20 bp, Homo sapiens
gggaaactcctttcagacat

SEQ ID NO: 5514 - DNA, 19 bp, Homo sapiens
aacatcctctgcatgaatg

SEQ ID NO: 5515 - DNA, 24 bp, Homo sapiens
cagttcattggcactagtcagaac

SEQ ID NO: 5516 - DNA, 19 bp, Homo sapiens
atgcttggtatcgttttgg

SEQ ID NO: 5517 - DNA, 24 bp, Homo sapiens
agctaacatcaaggaaacttacgt

SEQ ID NO: 5518 - DNA, 20 bp, Homo sapiens
gagtgaccgtgagtacaaga

SEQ ID NO: 5519 - DNA, 23 bp, Homo sapiens
gtcattctggtcgggcaggcaga

SEQ ID NO: 5520 - DNA, 17 bp, Homo sapiens
agcagtacacgatgacc

SEQ ID NO: 5521 - DNA, 24 bp, Homo sapiens
gaccaaggtctgacacttcttggc

SEQ ID NO: 5522 - DNA, 23 bp, Homo sapiens
attctctctttcagtacaaatac

SEQ ID NO: 5523 - DNA, 22 bp, Homo sapiens
ttgtatttctcaaaatctttct

SEQ ID NO: 5524 - DNA, 20 bp, Homo sapiens
aaagcaccaccacagaaaga

SEQ ID NO: 5525 - DNA, 21 bp, Homo sapiens
agggaccacattatcttgggg

SEQ ID NO: 5526 - DNA, 19 bp, Homo sapiens
cgttacagcagcatgacca

SEQ ID NO: 5527 - DNA, 22 bp, Homo sapiens
aactgtttacgatatgcttctt

SEQ ID NO: 5528 - DNA, 17 bp, Homo sapiens
cgggatattgccagtga

SEQ ID NO: 5529 - DNA, 23 bp, Homo sapiens
gcaagttatctgtatctcaaccc

SEQ ID NO: 5530 - DNA, 20 bp, Homo sapiens
caagaaagaaggctatgact

SEQ ID NO: 5531 - DNA, 24 bp, Homo sapiens
gtggatgatgaccaaagagacatc

SEQ ID NO: 5532 - DNA, 24 bp, Homo sapiens
aattctatatttaaaagctactcc

SEQ ID NO: 5533 - DNA, 22 bp, Homo sapiens
ttaggacttgatcagctcttac

SEQ ID NO: 5534 - DNA, 18 bp, Homo sapiens
tgcatccaaaagtggtct

SEQ ID NO: 5535 - DNA, 20 bp, Homo sapiens
gggaatggcatcacttctca

SEQ ID NO: 5536 - DNA, 24 bp, Homo sapiens
ccaaggataaacagaaagtaaaag

SEQ ID NO: 5537 - DNA, 24 bp, Homo sapiens
tacaataatatgtatattcaaggt

SEQ ID NO: 5538 - DNA, 22 bp, Homo sapiens
ccaagtccatattatgcctgat

SEQ ID NO: 5539 - DNA, 23 bp, Homo sapiens
aactggcttacatgaggattaat

SEQ ID NO: 5540 - DNA, 24 bp, Homo sapiens
ttcattaacctttttatccttcac

SEQ ID NO: 5541 - DNA, 21 bp, Homo sapiens
ggccagaccaaagaaataaaa

SEQ ID NO: 5542 - DNA, 20 bp, Homo sapiens
ctctcaactttgtcatggtg

SEQ ID NO: 5543 - DNA, 22 bp, Homo sapiens
cttgccaacatgatttcaggtg

SEQ ID NO: 5544 - DNA, 22 bp, Homo sapiens
aaatcaaagaggttgaaaagaa

SEQ ID NO: 5545 - DNA, 19 bp, Homo sapiens
aggcttctgtgtataagcg

SEQ ID NO: 5546 - DNA, 17 bp, Homo sapiens
tggccaagaacaatgct

SEQ ID NO: 5547 - DNA, 23 bp, Homo sapiens
tcaactgaatcactatacattgg

SEQ ID NO: 5548 - DNA, 16 bp, Homo sapiens
accgccagcctccgga

SEQ ID NO: 5549 - DNA, 23 bp, Homo sapiens
cttaattaacaataggtatcttg

SEQ ID NO: 5550 - DNA, 19 bp, Homo sapiens
ttgggtctatggatgtggt

SEQ ID NO: 5551 - DNA, 24 bp, Homo sapiens
ggctcaccttgttcatattgagag

SEQ ID NO: 5552 - DNA, 22 bp, Homo sapiens
tctctccagaacatttacaaat

SEQ ID NO: 5553 - DNA, 22 bp, Homo sapiens
agtcacactggtaaatttcagc

SEQ ID NO: 5554 - DNA, 28 bp, Homo sapiens
ctagtgttatttttttatttttgaaatc

SEQ ID NO: 5555 - DNA, 20 bp, Homo sapiens
cagcagctctcttgcacttg

SEQ ID NO: 5556 - DNA, 21 bp, Homo sapiens
ggccttcatatattgaagaac

SEQ ID NO: 5557 - DNA, 22 bp, Homo sapiens
cctctcagccactggagatcag

SEQ ID NO: 5558 - DNA, 24 bp, Homo sapiens
tcaggtattactttctttctctcc

SEQ ID NO: 5559 - DNA, 20 bp, Homo sapiens
accagaatgatgtcatccat

SEQ ID NO: 5560 - DNA, 19 bp, Homo sapiens
aatgtcatcccttctgaag

SEQ ID NO: 5561 - DNA, 19 bp, Homo sapiens
gaccttagtcagcgatgtg

SEQ ID NO: 5562 - DNA, 24 bp, Homo sapiens
tctatgaattactattatgagcac

SEQ ID NO: 5563 - DNA, 17 bp, Homo sapiens
agaccaagttcagcagc

SEQ ID NO: 5564 - DNA, 22 bp, Homo sapiens
tcataggcctgccgagcatgga

SEQ ID NO: 5565 - DNA, 16 bp, Homo sapiens
gtccatgcatgtggcc

SEQ ID NO: 5566 - DNA, 23 bp, Homo sapiens
tcgtgcaggtagttcttgtagtc

SEQ ID NO: 5567 - DNA, 16 bp, Homo sapiens
caagcagctcggccac

SEQ ID NO: 5568 - DNA, 17 bp, Homo sapiens
ccagcatgtccactggg

SEQ ID NO: 5569 - DNA, 24 bp, Homo sapiens
agcctttctattcatttttatttt

SEQ ID NO: 5570 - DNA, 18 bp, Homo sapiens
ctccctgtcactctggat

SEQ ID NO: 5571 - DNA, 21 bp, Homo sapiens
tctgcaagaattagcaatttt

SEQ ID NO: 5572 - DNA, 17 bp, Homo sapiens
tgttccgggctccaatg

SEQ ID NO: 5573 - DNA, 23 bp, Homo sapiens
tgctgtagagtctaataagaatt

SEQ ID NO: 5574 - DNA, 24 bp, Homo sapiens
tgagttttttcaaatgaaaaactt

SEQ ID NO: 5575 - DNA, 19 bp, Homo sapiens
aaggctacgacttgcgaag

SEQ ID NO: 5576 - DNA, 22 bp, Homo sapiens
tgcttaaactggcccccaaatg

SEQ ID NO: 5577 - DNA, 22 bp, Homo sapiens
tttaactctttgcctttctttt

SEQ ID NO: 5578 - DNA, 22 bp, Homo sapiens
taaatatctagggtgttgctac

SEQ ID NO: 5579 - DNA, 22 bp, Homo sapiens
aaattttaggatataagtcact

SEQ ID NO: 5580 - DNA, 19 bp, Homo sapiens
gccacgatggggatggcgt

SEQ ID NO: 5581 - DNA, 19 bp, Homo sapiens
atttgctttccactattgc

SEQ ID NO: 5582 - DNA, 23 bp, Homo sapiens
ggcaagtttgtatagagtctatg

SEQ ID NO: 5583 - DNA, 20 bp, Homo sapiens
atcaactacagtgaggtagg

SEQ ID NO: 5584 - DNA, 21 bp, Homo sapiens
acccagagatgaaaggttgga

SEQ ID NO: 5585 - DNA, 24 bp, Homo sapiens
gacaaagacaagactcaaattcac

SEQ ID NO: 5586 - DNA, 23 bp, Homo sapiens
tgacagctgaggcccaagaatct

SEQ ID NO: 5587 - DNA, 24 bp, Homo sapiens
ttcaaatgatttttaatcagcatc

SEQ ID NO: 5588 - DNA, 21 bp, Homo sapiens
agcaccacagatttttgctcc

SEQ ID NO: 5589 - DNA, 24 bp, Homo sapiens
cttatttttcctaattaggtcagt

SEQ ID NO: 5590 - DNA, 17 bp, Homo sapiens
tctctggtgtatcaggc

SEQ ID NO: 5591 - DNA, 23 bp, Homo sapiens
tcttgataactagtaataagact

SEQ ID NO: 5592 - DNA, 23 bp, Homo sapiens
aatcaaaattatttagaggattt

SEQ ID NO: 5593 - DNA, 21 bp, Homo sapiens
aagctgaaatttaccagtgtg

SEQ ID NO: 5594 - DNA, 24 bp, Homo sapiens
ccacgccttcatagataatttaga

SEQ ID NO: 5595 - DNA, 19 bp, Homo sapiens
tcaagtgcaagagagctac

SEQ ID NO: 5596 - DNA, 22 bp, Homo sapiens
gcatcttggagaagcttaaggc

SEQ ID NO: 5597 - DNA, 18 bp, Homo sapiens
tctccagtggctgagagg

SEQ ID NO: 5598 - DNA, 22 bp, Homo sapiens
ccagcacctgctctagagaatc

SEQ ID NO: 5599 - DNA, 24 bp, Homo sapiens
ccctaaatattgtggtcttgatga

SEQ ID NO: 5600 - DNA, 20 bp, Homo sapiens
ggcggtagatgttatcactc

SEQ ID NO: 5601 - DNA, 21 bp, Homo sapiens
acgaatagaaaacagaattgc

SEQ ID NO: 5602 - DNA, 20 bp, Homo sapiens
caatggggacccagccaatg

SEQ ID NO: 5603 - DNA, 18 bp, Homo sapiens
tgggtcatttttgagcat

SEQ ID NO: 5604 - DNA, 18 bp, Homo sapiens
cctccagagtgacgtgag

SEQ ID NO: 5605 - DNA, 24 bp, Homo sapiens
ttcataataaagcaataaaattgt

SEQ ID NO: 5606 - DNA, 16 bp, Homo sapiens
agtggacatgcctgcc

SEQ ID NO: 5607 - DNA, 23 bp, Homo sapiens
tcttaacttgagtaatggattgt

SEQ ID NO: 5608 - DNA, 17 bp, Homo sapiens
ctggccaagaagtgcca

SEQ ID NO: 5609 - DNA, 23 bp, Homo sapiens
tgcacagctccatttatagatgc

SEQ ID NO: 5610 - DNA, 23 bp, Homo sapiens
agtacaaaaaggactttgagaag

SEQ ID NO: 5611 - DNA, 24 bp, Homo sapiens
gagcatggatgacatcgctctggt

SEQ ID NO: 5612 - DNA, 23 bp, Homo sapiens
ttgaagatgaccccaagatgatg

SEQ ID NO: 5613 - DNA, 20 bp, Homo sapiens
tcactgactaaggtctggca

SEQ ID NO: 5614 - DNA, 24 bp, Homo sapiens
ttttagtacaaatataaagatggt

SEQ ID NO: 5615 - DNA, 22 bp, Homo sapiens
tgggctgctgaacttggtcttc

SEQ ID NO: 5616 - DNA, 17 bp, Homo sapiens
ttgtggcctctaagggg

SEQ ID NO: 5617 - DNA, 20 bp, Homo sapiens
tcttggctacgtgcatggac

SEQ ID NO: 5618 - DNA, 20 bp, Homo sapiens
ggcttgagttagtacttgtt

SEQ ID NO: 5619 - DNA, 24 bp, Homo sapiens
ccaatatggtggccaagttgcttg

SEQ ID NO: 5620 - DNA, 19 bp, Homo sapiens
acatcatcagtgacgtgag

SEQ ID NO: 5621 - DNA, 23 bp, Homo sapiens
cttaaaactgaggttttgaaaaa

SEQ ID NO: 5622 - DNA, 20 bp, Homo sapiens
aaaggctatgacttgcgaag

SEQ ID NO: 5623 - DNA, 21 bp, Homo sapiens
ggtccaggaaaagttcttttc

SEQ ID NO: 5624 - DNA, 21 bp, Homo sapiens
gcatctgattttttttccccc

SEQ ID NO: 5625 - DNA, 22 bp, Homo sapiens
ctcagaatggaattgacaactc

SEQ ID NO: 5626 - DNA, 20 bp, Homo sapiens
tggagaacttagtgaattgt

SEQ ID NO: 5627 - DNA, 17 bp, Homo sapiens
tggggatggcgtcgctt

SEQ ID NO: 5628 - DNA, 18 bp, Homo sapiens
aacaaacatgcagaaggc

SEQ ID NO: 5629 - DNA, 22 bp, Homo sapiens
ggcaagaatgaacaaaatcaac

SEQ ID NO: 5630 - DNA, 24 bp, Homo sapiens
agaaatgcaagagttgttattcac

SEQ ID NO: 5631 - DNA, 21 bp, Homo sapiens
gcctgggacaaagacaagact

SEQ ID NO: 5632 - DNA, 22 bp, Homo sapiens
tcatttggtatcatgtcatcat

SEQ ID NO: 5633 - DNA, 24 bp, Homo sapiens
atacacagaacttttttcctgatg

SEQ ID NO: 5634 - DNA, 20 bp, Homo sapiens
agaatctgctctcacctcac

SEQ ID NO: 5635 - DNA, 22 bp, Homo sapiens
cacataaccttttctttttttt

SEQ ID NO: 5636 - DNA, 19 bp, Homo sapiens
tgtctggcattatgtggat

SEQ ID NO: 5637 - DNA, 23 bp, Homo sapiens
acacattcctttatgaacttatt

SEQ ID NO: 5638 - DNA, 28 bp, Homo sapiens
aaaatatacatgatatatatcagttatt

SEQ ID NO: 5639 - DNA, 18 bp, Homo sapiens
tggaacaagtgttggcca

SEQ ID NO: 5640 - DNA, 20 bp, Homo sapiens
acagatagatagatgccttt

SEQ ID NO: 5641 - DNA, 20 bp, Homo sapiens
gagtgataaaatctatcgcc

SEQ ID NO: 5642 - DNA, 21 bp, Homo sapiens
ttgttgattcagctttaggag

SEQ ID NO: 5643 - DNA, 16 bp, Homo sapiens
tgggtgtccattggct

SEQ ID NO: 5644 - DNA, 21 bp, Homo sapiens
gtgatggcattatttttggcc

SEQ ID NO: 5645 - DNA, 21 bp, Homo sapiens
ttattggctatttgtgtcaac

SEQ ID NO: 5646 - DNA, 20 bp, Homo sapiens
tgaatctgtctggaggctgg

SEQ ID NO: 5647 - DNA, 22 bp, Homo sapiens
tgagagtgcttttacttgatct

SEQ ID NO: 5648 - DNA, 22 bp, Homo sapiens
ttgcatttttccacatccaaag

SEQ ID NO: 5649 - DNA, 20 bp, Homo sapiens
agaccaaagaggaatattgt

SEQ ID NO: 5650 - DNA, 17 bp, Homo sapiens
gcaggcctatgacctcc

SEQ ID NO: 5651 - DNA, 23 bp, Homo sapiens
attcctgtcgataaaggcaatgc

SEQ ID NO: 5652 - DNA, 21 bp, Homo sapiens
gtggactacaagaactacctg

SEQ ID NO: 5653 - DNA, 22 bp, Homo sapiens
tatattgccattttctccaagg

SEQ ID NO: 5654 - DNA, 17 bp, Homo sapiens
ccagtggacatgctggg

SEQ ID NO: 5655 - DNA, 24 bp, Homo sapiens
tctcagtactcacatcgctctgga

SEQ ID NO: 5656 - DNA, 22 bp, Homo sapiens
gatccagagtgacagggagtac

SEQ ID NO: 5657 - DNA, 20 bp, Homo sapiens
gcaggcatgtccactggtgc

SEQ ID NO: 5658 - DNA, 18 bp, Homo sapiens
ttggtgcccgagctatac

SEQ ID NO: 5659 - DNA, 18 bp, Homo sapiens
ttcttggccagcaccacc

SEQ ID NO: 5660 - DNA, 23 bp, Homo sapiens
ctgtctttttcttcttttagttc

SEQ ID NO: 5661 - DNA, 20 bp, Homo sapiens
tccacttctcaaagtccttc

SEQ ID NO: 5662 - DNA, 21 bp, Homo sapiens
aatagagcaagttaggcttag

SEQ ID NO: 5663 - DNA, 20 bp, Homo sapiens
atcatcttggggtcatcacg

SEQ ID NO: 5664 - DNA, 23 bp, Homo sapiens
tctaaattgtttctacatctatc

SEQ ID NO: 5665 - DNA, 19 bp, Homo sapiens
agccttctttgtacttgaa

SEQ ID NO: 5666 - DNA, 21 bp, Homo sapiens
ccagagatattgcaagtgaag

SEQ ID NO: 5667 - DNA, 27 bp, Homo sapiens
attaccattattttaaaccattcatcg

SEQ ID NO: 5668 - DNA, 20 bp, Homo sapiens
gaggaaaggttatgacatgc

SEQ ID NO: 5669 - DNA, 24 bp, Homo sapiens
ctcatggcttacttgtgccactat

SEQ ID NO: 5670 - DNA, 20 bp, Homo sapiens
tccaacttactattaatgtc

SEQ ID NO: 5671 - DNA, 22 bp, Homo sapiens
aaggcaaataactttccaagta

SEQ ID NO: 5672 - DNA, 23 bp, Homo sapiens
acagtgaggtaagtaatatattc

SEQ ID NO: 5673 - DNA, 22 bp, Homo sapiens
ccttgataggaatggcatctac

SEQ ID NO: 5674 - DNA, 18 bp, Homo sapiens
cattatgccagatacccc

SEQ ID NO: 5675 - DNA, 27 bp, Homo sapiens
caagcttatacaatttctaaaatagac

SEQ ID NO: 5676 - DNA, 21 bp, Homo sapiens
tttttctgtttctcttagcgc

SEQ ID NO: 5677 - DNA, 20 bp, Homo sapiens
ggaaaatgtatcacgcacta

SEQ ID NO: 5678 - DNA, 22 bp, Homo sapiens
ttctcattaaaaatcagactgt

SEQ ID NO: 5679 - DNA, 21 bp, Homo sapiens
agctaataaaacttcaggggt

SEQ ID NO: 5680 - DNA, 23 bp, Homo sapiens
tgacacaagacatttagacctga

SEQ ID NO: 5681 - DNA, 20 bp, Homo sapiens
ccaagcttctgtatagaggc

SEQ ID NO: 5682 - DNA, 20 bp, Homo sapiens
accaatggttttggcaaaaa

SEQ ID NO: 5683 - DNA, 20 bp, Homo sapiens
aaaccacattagtaccaagc

SEQ ID NO: 5684 - DNA, 19 bp, Homo sapiens
agtgaccatgtttaccgtc

SEQ ID NO: 5685 - DNA, 24 bp, Homo sapiens
aacagacttcagtgtttccataaa

SEQ ID NO: 5686 - DNA, 22 bp, Homo sapiens
tggatgactagtggttctctcg

SEQ ID NO: 5687 - DNA, 24 bp, Homo sapiens
acttacatgattcatggtaatagc

SEQ ID NO: 5688 - DNA, 20 bp, Homo sapiens
tgtcacttgcactttcagaa

SEQ ID NO: 5689 - DNA, 23 bp, Homo sapiens
tggaaaacttaaattgatctggg

SEQ ID NO: 5690 - DNA, 24 bp, Homo sapiens
gggcaaatgatttaattatgacaa

SEQ ID NO: 5691 - DNA, 22 bp, Homo sapiens
tggctcgtttatttttctcatc

SEQ ID NO: 5692 - DNA, 24 bp, Homo sapiens
gaattttctaataattcaagtatt

SEQ ID NO: 5693 - DNA, 20 bp, Homo sapiens
actgaaggtctgacttgtac

SEQ ID NO: 5694 - DNA, 16 bp, Homo sapiens
gcaggcctatgacctc

SEQ ID NO: 5695 - DNA, 17 bp, Homo sapiens
gactagatgcgcttggg

SEQ ID NO: 5696 - DNA, 20 bp, Homo sapiens
ggactacaagaactacctgc

SEQ ID NO: 5697 - DNA, 22 bp, Homo sapiens
ctcactatgggactctgatact

SEQ ID NO: 5698 - DNA, 18 bp, Homo sapiens
cagtggacatgctggggg

SEQ ID NO: 5699 - DNA, 24 bp, Homo sapiens
atcttagactcacatcgctctgga

SEQ ID NO: 5700 - DNA, 24 bp, Homo sapiens
caagatccagagtgacagggagta

SEQ ID NO: 5701 - DNA, 20 bp, Homo sapiens
gcaggcatgtccactggtgc

SEQ ID NO: 5702 - DNA, 16 bp, Homo sapiens
cattggtgcccggaac

SEQ ID NO: 5703 - DNA, 16 bp, Homo sapiens
ttggccaacaccaccc

SEQ ID NO: 5704 - DNA, 23 bp, Homo sapiens
gacacattttttttctctagtac

SEQ ID NO: 5705 - DNA, 22 bp, Homo sapiens
tctcaaagtccttcttgtactc

SEQ ID NO: 5706 - DNA, 18 bp, Homo sapiens
tgcgctttgtaatttgcc

SEQ ID NO: 5707 - DNA, 22 bp, Homo sapiens
catcatcttggggtcatcttca

SEQ ID NO: 5708 - DNA, 24 bp, Homo sapiens
gcctttaatctttcttatcaaaag

SEQ ID NO: 5709 - DNA, 19 bp, Homo sapiens
gccttccttgtacttgtac

SEQ ID NO: 5710 - DNA, 17 bp, Homo sapiens
aaagcagcaaaagcctc

SEQ ID NO: 5711 - DNA, 24 bp, Homo sapiens
tgggatcattttattccactgtaa

SEQ ID NO: 5712 - DNA, 19 bp, Homo sapiens
ccgaatgggttatgaggag

SEQ ID NO: 5713 - DNA, 22 bp, Homo sapiens
ctgctttgaagtgataaattgc

SEQ ID NO: 5714 - DNA, 23 bp, Homo sapiens
tgctatatttgtctatggggaac

SEQ ID NO: 5715 - DNA, 18 bp, Homo sapiens
tggcaatttcccgggagg

SEQ ID NO: 5716 - DNA, 18 bp, Homo sapiens
ggcacagatgctattctc

SEQ ID NO: 5717 - DNA, 19 bp, Homo sapiens
accttttctcttcagctcc

SEQ ID NO: 5718 - DNA, 21 bp, Homo sapiens
agtttaaaacaggatcattag

SEQ ID NO: 5719 - DNA, 21 bp, Homo sapiens
tctaaaagccactaaataagg

SEQ ID NO: 5720 - DNA, 19 bp, Homo sapiens
acatcatgcctgatacacc

SEQ ID NO: 5721 - DNA, 22 bp, Homo sapiens
attcagggattcagagaacttc

SEQ ID NO: 5722 - DNA, 24 bp, Homo sapiens
acaccactgaaaaattattatttc

SEQ ID NO: 5723 - DNA, 21 bp, Homo sapiens
gctttctgaaaacacatgctg

SEQ ID NO: 5724 - DNA, 22 bp, Homo sapiens
aaattcagcaattctgtttgaa

SEQ ID NO: 5725 - DNA, 18 bp, Homo sapiens
agccagaacaatgtcagg

SEQ ID NO: 5726 - DNA, 22 bp, Homo sapiens
tctattttctgcttatgttgtc

SEQ ID NO: 5727 - DNA, 22 bp, Homo sapiens
ccaagcttctctataaagtctc

SEQ ID NO: 5728 - DNA, 24 bp, Homo sapiens
ttgctaattcaaataaaatgatcc

SEQ ID NO: 5729 - DNA, 18 bp, Homo sapiens
caagttcaccagcattcc

SEQ ID NO: 5730 - DNA, 23 bp, Homo sapiens
tgctttgtggttctactcattta

SEQ ID NO: 5731 - DNA, 16 bp, Homo sapiens
gcgggcttcggaaatc

SEQ ID NO: 5732 - DNA, 22 bp, Homo sapiens
atctatttatttccagagtgct

SEQ ID NO: 5733 - DNA, 18 bp, Homo sapiens
cttgagtggctgagaggc

SEQ ID NO: 5734 - DNA, 22 bp, Homo sapiens
gaactatatccatggcatcagg

SEQ ID NO: 5735 - DNA, 20 bp, Homo sapiens
caggtgagaatgggattttg

SEQ ID NO: 5736 - DNA, 23 bp, Homo sapiens
gacgatatttcttctcactgatg

SEQ ID NO: 5737 - DNA, 23 bp, Homo sapiens
ttaggaattattattgaaaatct

SEQ ID NO: 5738 - DNA, 23 bp, Homo sapiens
aacccaagggactccatcctatg

SEQ ID NO: 5739 - DNA, 30 bp, Homo sapiens
aatagtttatatattaattcatattttata

SEQ ID NO: 5740 - DNA, 24 bp, Homo sapiens
gcaagctaagaaagtttatgaact

SEQ ID NO: 5741 - DNA, 23 bp, Homo sapiens
ttctatgcattacaaacagatgc

SEQ ID NO: 5742 - DNA, 19 bp, Homo sapiens
tgacgtggactacaagaac

SEQ ID NO: 5743 - DNA, 23 bp, Homo sapiens
tctctttgactaaatagctactc

SEQ ID NO: 5744 - DNA, 17 bp, Homo sapiens
gcccagtggacatgttg

SEQ ID NO: 5745 - DNA, 21 bp, Homo sapiens
aactgacctcactttgcagtt

SEQ ID NO: 5746 - DNA, 22 bp, Homo sapiens
gccaaaatgcagagtgaaagag

SEQ ID NO: 5747 - DNA, 23 bp, Homo sapiens
gatcaggcagacatgtccactga

SEQ ID NO: 5748 - DNA, 16 bp, Homo sapiens
ggattccggagtctgc

SEQ ID NO: 5749 - DNA, 24 bp, Homo sapiens
cctgacacttcttggccagtacca

SEQ ID NO: 5750 - DNA, 21 bp, Homo sapiens
tgtgttttctctgatttcagt

SEQ ID NO: 5751 - DNA, 24 bp, Homo sapiens
ttccacttctcaaagtccttcttg

SEQ ID NO: 5752 - DNA, 22 bp, Homo sapiens
aagaaagaaaagaaaaaaaagc

SEQ ID NO: 5753 - DNA, 24 bp, Homo sapiens
gacaacacaagttttgggtcatct

SEQ ID NO: 5754 - DNA, 17 bp, Homo sapiens
gcctgggagttcaagac

SEQ ID NO: 5755 - DNA, 24 bp, Homo sapiens
ttcggtagccttgtttgtatttat

SEQ ID NO: 5756 - DNA, 19 bp, Homo sapiens
agctaaagcttcaagagac

SEQ ID NO: 5757 - DNA, 22 bp, Homo sapiens
agagggtaggagaaaatgaagg

SEQ ID NO: 5758 - DNA, 19 bp, Homo sapiens
tggatgggaagaagctttg

SEQ ID NO: 5759 - DNA, 22 bp, Homo sapiens
tagttaccgacattaagtcacc

SEQ ID NO: 5760 - DNA, 25 bp, Homo sapiens
ctattgatattctttatatagacag

SEQ ID NO: 5761 - DNA, 22 bp, Homo sapiens
tcacatcactagcaatgtctct

SEQ ID NO: 5762 - DNA, 23 bp, Homo sapiens
agggtagatgatgttcgatctga

SEQ ID NO: 5763 - DNA, 19 bp, Homo sapiens
caactgggagatcatagcc

SEQ ID NO: 5764 - DNA, 18 bp, Homo sapiens
tcccctcctttaaacagc

SEQ ID NO: 5765 - DNA, 18 bp, Homo sapiens
agcagaatcaaacactgt

SEQ ID NO: 5766 - DNA, 23 bp, Homo sapiens
acatcctgggctaatcagtgtgt

SEQ ID NO: 5767 - DNA, 21 bp, Homo sapiens
gattggaataaagataagacc

SEQ ID NO: 5768 - DNA, 24 bp, Homo sapiens
actgttacattattttataagttc

SEQ ID NO: 5769 - DNA, 24 bp, Homo sapiens
tgtcccagttattcaaatttcatg

SEQ ID NO: 5770 - DNA, 19 bp, Homo sapiens
tttacctgactatacagtg

SEQ ID NO: 5771 - DNA, 22 bp, Homo sapiens
ctacatcaaattgagtgcattc

SEQ ID NO: 5772 - DNA, 20 bp, Homo sapiens
ggcatcacatgaatcttggt

SEQ ID NO: 5773 - DNA, 20 bp, Homo sapiens
aaatctgagtttgtttttag

SEQ ID NO: 5774 - DNA, 22 bp, Homo sapiens
caagcagaatgcacataccatg

SEQ ID NO: 5775 - DNA, 20 bp, Homo sapiens
atggtgtaggggaatgatct

SEQ ID NO: 5776 - DNA, 21 bp, Homo sapiens
acccgagcaacttccagttta

SEQ ID NO: 5777 - DNA, 21 bp, Homo sapiens
tctccaaacaagaaccagagc

SEQ ID NO: 5778 - DNA, 19 bp, Homo sapiens
tctggaagtggagaaggcc

SEQ ID NO: 5779 - DNA, 20 bp, Homo sapiens
ccactgttctctgtaccttg

SEQ ID NO: 5780 - DNA, 23 bp, Homo sapiens
agaatgaatataagcaagattac

SEQ ID NO: 5781 - DNA, 20 bp, Homo sapiens
ccatggaatcagtcagcttc

SEQ ID NO: 5782 - DNA, 20 bp, Homo sapiens
catggtttgtgtctaaatgg

SEQ ID NO: 5783 - DNA, 23 bp, Homo sapiens
gatcactggcatattcagttgct

SEQ ID NO: 5784 - DNA, 18 bp, Homo sapiens
ttgggtgatggttggaat

SEQ ID NO: 5785 - DNA, 22 bp, Homo sapiens
cagccaagccctttgtaccatt

SEQ ID NO: 5786 - DNA, 20 bp, Homo sapiens
caatgaacattgagctgacc

SEQ ID NO: 5787 - DNA, 23 bp, Homo sapiens
ataagcaaattctactttatctt

SEQ ID NO: 5788 - DNA, 23 bp, Homo sapiens
gccaacatcaccaacactaacta

SEQ ID NO: 5789 - DNA, 20 bp, Homo sapiens
tcccttcccatgctaggatt

SEQ ID NO: 5790 - DNA, 17 bp, Homo sapiens
accagctaccacacccc

SEQ ID NO: 5791 - DNA, 20 bp, Homo sapiens
tgcgattcatattcctggtc

SEQ ID NO: 5792 - DNA, 18 bp, Homo sapiens
tgcaagtggctaagatgc

SEQ ID NO: 5793 - DNA, 23 bp, Homo sapiens
acttgtgaatcaggtgcttgtag

SEQ ID NO: 5794 - DNA, 19 bp, Homo sapiens
ggaaggggaaaatggttgg

SEQ ID NO: 5795 - DNA, 19 bp, Homo sapiens
actgagcatgtcggcaggg

SEQ ID NO: 5796 - DNA, 22 bp, Homo sapiens
gaattgctctgtgtaaaaactc

SEQ ID NO: 5797 - DNA, 19 bp, Homo sapiens
ctcccgatcagattgcatc

SEQ ID NO: 5798 - DNA, 27 bp, Homo sapiens
attatattttataattatacaaaaata

SEQ ID NO: 5799 - DNA, 16 bp, Homo sapiens
actgcggaaaccaacc

SEQ ID NO: 5800 - DNA, 28 bp, Homo sapiens
atcaataaatatgaaaaattagtctgtg

SEQ ID NO: 5801 - DNA, 18 bp, Homo sapiens
ctgccaaggcttccagag

SEQ ID NO: 5802 - DNA, 23 bp, Homo sapiens
agaagcattcacagagagtgaga

SEQ ID NO: 5803 - DNA, 20 bp, Homo sapiens
aaactttccttggaagagtc

SEQ ID NO: 5804 - DNA, 21 bp, Homo sapiens
tcagcccttattatttcggtt

SEQ ID NO: 5805 - DNA, 24 bp, Homo sapiens
ccaggctttcatatttagaagaaa

SEQ ID NO: 5806 - DNA, 22 bp, Homo sapiens
acatcacttgcaatatctctgg

SEQ ID NO: 5807 - DNA, 22 bp, Homo sapiens
aagcattctgctcaaaaacaaa

SEQ ID NO: 5808 - DNA, 23 bp, Homo sapiens
ggtctgagatcatagcctttctt

SEQ ID NO: 5809 - DNA, 21 bp, Homo sapiens
gtttttcaaacacagttatgt

SEQ ID NO: 5810 - DNA, 23 bp, Homo sapiens
gcaaatgcaattaatatgagtga

SEQ ID NO: 5811 - DNA, 24 bp, Homo sapiens
aaattagaaagagtctcatgtgtg

SEQ ID NO: 5812 - DNA, 19 bp, Homo sapiens
gctgacaaaaccaaagtcc

SEQ ID NO: 5813 - DNA, 23 bp, Homo sapiens
cataactgagagagatattaatt

SEQ ID NO: 5814 - DNA, 23 bp, Homo sapiens
agattttaaacactaatttacac

SEQ ID NO: 5815 - DNA, 22 bp, Homo sapiens
atgacaacagggggaactatac

SEQ ID NO: 5816 - DNA, 29 bp, Homo sapiens
aaatacatgaaatattgatatatatgtac

SEQ ID NO: 5817 - DNA, 18 bp, Homo sapiens
tctgggggatatcaggca

SEQ ID NO: 5818 - DNA, 24 bp, Homo sapiens
caagactctgtctcaaaaataata

SEQ ID NO: 5819 - DNA, 24 bp, Homo sapiens
tttttttttttaacgacaagactc

SEQ ID NO: 5820 - DNA, 18 bp, Homo sapiens
ttccacactcatggactc

SEQ ID NO: 5821 - DNA, 23 bp, Homo sapiens
gccctataactgtattagcaaaa

SEQ ID NO: 5822 - DNA, 21 bp, Homo sapiens
agaaaaacaagaaagccatgg

SEQ ID NO: 5823 - DNA, 23 bp, Homo sapiens
atgcatatgaaacactgcattat

SEQ ID NO: 5824 - DNA, 22 bp, Homo sapiens
ctatgctgacttcatgaagggc

SEQ ID NO: 5825 - DNA, 22 bp, Homo sapiens
gccaaaaccatgttcatcgagt

SEQ ID NO: 5826 - DNA, 22 bp, Homo sapiens
gggaagttccagtttcttctca

SEQ ID NO: 5827 - DNA, 23 bp, Homo sapiens
ctggcggtacttcttttcactaa

SEQ ID NO: 5828 - DNA, 21 bp, Homo sapiens
atttacaaatgaaatggaagt

SEQ ID NO: 5829 - DNA, 21 bp, Homo sapiens
cccagagggagccatccaatg

SEQ ID NO: 5830 - DNA, 23 bp, Homo sapiens
caacatgctattggttaaatacc

SEQ ID NO: 5831 - DNA, 20 bp, Homo sapiens
tgatgcagattcaaagtgat

SEQ ID NO: 5832 - DNA, 23 bp, Homo sapiens
tgaattcaatctaaggtaacaaa

SEQ ID NO: 5833 - DNA, 20 bp, Homo sapiens
tccatacctacaacatgctt

SEQ ID NO: 5834 - DNA, 23 bp, Homo sapiens
tcaggattttcaaaacgtcattg

SEQ ID NO: 5835 - DNA, 17 bp, Homo sapiens
tggtggcagccaagaag

SEQ ID NO: 5836 - DNA, 20 bp, Homo sapiens
tctgcaaatgtggttttcac

SEQ ID NO: 5837 - DNA, 23 bp, Homo sapiens
gggaatacaagaagggatatgag

SEQ ID NO: 5838 - DNA, 24 bp, Homo sapiens
ttcaaagctcatggcatcaggaag

SEQ ID NO: 5839 - DNA, 19 bp, Homo sapiens
ctggaagatgaccccaagc

SEQ ID NO: 5840 - DNA, 18 bp, Homo sapiens
tggtggccacttcctgag

SEQ ID NO: 5841 - DNA, 23 bp, Homo sapiens
cacagtacaaatacaagaaagcc

SEQ ID NO: 5842 - DNA, 20 bp, Homo sapiens
ggaaggaggtcttggatttc

SEQ ID NO: 5843 - DNA, 22 bp, Homo sapiens
cctagcaaatggtactttgttc

SEQ ID NO: 5844 - DNA, 20 bp, Homo sapiens
gccacttgcatgaagtgcac

SEQ ID NO: 5845 - DNA, 21 bp, Homo sapiens
ctcccttccaattttagagta

SEQ ID NO: 5846 - DNA, 22 bp, Homo sapiens
tttccctttggcttgttcatag

SEQ ID NO: 5847 - DNA, 20 bp, Homo sapiens
aagagcctctagagacattg

SEQ ID NO: 5848 - DNA, 21 bp, Homo sapiens
tcttgtgtcacatgggatggc

SEQ ID NO: 5849 - DNA, 24 bp, Homo sapiens
ctgggaagaggaaaagaagaaagg

SEQ ID NO: 5850 - DNA, 20 bp, Homo sapiens
catacacacaagcttagcgc

SEQ ID NO: 5851 - DNA, 21 bp, Homo sapiens
caataacaagatgctgttgtt

SEQ ID NO: 5852 - DNA, 24 bp, Homo sapiens
cagtgcaagcacttacatcactgg

SEQ ID NO: 5853 - DNA, 22 bp, Homo sapiens
gatacttatgtctgcattctac

SEQ ID NO: 5854 - DNA, 24 bp, Homo sapiens
atggcatcaggcctcaggtcatat

SEQ ID NO: 5855 - DNA, 24 bp, Homo sapiens
tcaccatgagtgatgtaagtaggt

SEQ ID NO: 5856 - DNA, 29 bp, Homo sapiens
acagtttctaaacaataaaatagaaaaac

SEQ ID NO: 5857 - DNA, 20 bp, Homo sapiens
accaccattcatgtcatgcc

SEQ ID NO: 5858 - DNA, 20 bp, Homo sapiens
acaaagtggttggtatgtag

SEQ ID NO: 5859 - DNA, 21 bp, Homo sapiens
tcatgcacctgactttctcat

SEQ ID NO: 5860 - DNA, 24 bp, Homo sapiens
ttctccccagcttttgctgttgtt

SEQ ID NO: 5861 - DNA, 22 bp, Homo sapiens
ccatggagttgtaaatctcttc

SEQ ID NO: 5862 - DNA, 16 bp, Homo sapiens
atccggtgtgtcaggc

SEQ ID NO: 5863 - DNA, 20 bp, Homo sapiens
cttggcccatctttttgtta

SEQ ID NO: 5864 - DNA, 18 bp, Homo sapiens
tcagtgtagagcctctgc

SEQ ID NO: 5865 - DNA, 21 bp, Homo sapiens
caggcacttaacaagagtaac

SEQ ID NO: 5866 - DNA, 21 bp, Homo sapiens
caccaccggcacgaagacgat

SEQ ID NO: 5867 - DNA, 17 bp, Homo sapiens
tatcgccagcaccccga

SEQ ID NO: 5868 - DNA, 23 bp, Homo sapiens
ccaggctcaatgtcatgaacacc

SEQ ID NO: 5869 - DNA, 18 bp, Homo sapiens
ccatagagtccctggagg

SEQ ID NO: 5870 - DNA, 23 bp, Homo sapiens
ccttaccttgtccatgttcagtt

SEQ ID NO: 5871 - DNA, 24 bp, Homo sapiens
tttttctcattgtaaagaatctgt

SEQ ID NO: 5872 - DNA, 21 bp, Homo sapiens
agtgaacttcagcttctcggg

SEQ ID NO: 5873 - DNA, 21 bp, Homo sapiens
aaatcacatagccaaagaaac

SEQ ID NO: 5874 - DNA, 19 bp, Homo sapiens
tcctgctttctttgccttc

SEQ ID NO: 5875 - DNA, 22 bp, Homo sapiens
gggagtaaaaagcagattattc

SEQ ID NO: 5876 - DNA, 22 bp, Homo sapiens
ctttcatccaattggtgaagtc

SEQ ID NO: 5877 - DNA, 24 bp, Homo sapiens
acaaagccacctatagttcaaatg

SEQ ID NO: 5878 - DNA, 19 bp, Homo sapiens
ctgcccgatgccttgaatg

SEQ ID NO: 5879 - DNA, 23 bp, Homo sapiens
tccttaattacagtgagtgcagc

SEQ ID NO: 5880 - DNA, 21 bp, Homo sapiens
agaaatctcaggaggttgcca

SEQ ID NO: 5881 - DNA, 23 bp, Homo sapiens
cccacccattagaaatggataac

SEQ ID NO: 5882 - DNA, 20 bp, Homo sapiens
gctatgaagccagcaagacc

SEQ ID NO: 5883 - DNA, 18 bp, Homo sapiens
cattcctggagtgctcca

SEQ ID NO: 5884 - DNA, 19 bp, Homo sapiens
actggttcactacatgaat

SEQ ID NO: 5885 - DNA, 22 bp, Homo sapiens
gactgtctgtagttggcgttgg

SEQ ID NO: 5886 - DNA, 23 bp, Homo sapiens
atataaggaggcctacgagaaag

SEQ ID NO: 5887 - DNA, 22 bp, Homo sapiens
tccagaggtgtgtggtacttgg

SEQ ID NO: 5888 - DNA, 20 bp, Homo sapiens
gacttctatgctagccaact

SEQ ID NO: 5889 - DNA, 19 bp, Homo sapiens
actggattttggccacatt

SEQ ID NO: 5890 - DNA, 21 bp, Homo sapiens
tgttacctagattcagactga

SEQ ID NO: 5891 - DNA, 18 bp, Homo sapiens
caacttgcttgcctttgg

SEQ ID NO: 5892 - DNA, 22 bp, Homo sapiens
tgagccattaaaaatattttgc

SEQ ID NO: 5893 - DNA, 20 bp, Homo sapiens
gttgctgcaaaaagttcaag

SEQ ID NO: 5894 - DNA, 24 bp, Homo sapiens
acgccaccacatctggctaatttt

SEQ ID NO: 5895 - DNA, 19 bp, Homo sapiens
ttggaagaaaaccattgcc

SEQ ID NO: 5896 - DNA, 21 bp, Homo sapiens
ttgcccaggctggtcttgaac

SEQ ID NO: 5897 - DNA, 23 bp, Homo sapiens
ttcattcctcttttaatgatgtc

SEQ ID NO: 5898 - DNA, 23 bp, Homo sapiens
agttagacttacatcactagcaa

SEQ ID NO: 5899 - DNA, 21 bp, Homo sapiens
agaaagggatctattacgaca

SEQ ID NO: 5900 - DNA, 17 bp, Homo sapiens
atcatagcccttggcaa

SEQ ID NO: 5901 - DNA, 26 bp, Homo sapiens
ccttttaaataaaatcaattatatac

SEQ ID NO: 5902 - DNA, 19 bp, Homo sapiens
gccctcaacatgagtgatg

SEQ ID NO: 5903 - DNA, 21 bp, Homo sapiens
gcatggttaagggtttaatgt

SEQ ID NO: 5904 - DNA, 21 bp, Homo sapiens
gaaactgaagcacaagtatac

SEQ ID NO: 5905 - DNA, 18 bp, Homo sapiens
tctcagagcaagagttgc

SEQ ID NO: 5906 - DNA, 18 bp, Homo sapiens
tgatatgtgcatgctgtc

SEQ ID NO: 5907 - DNA, 20 bp, Homo sapiens
gggccaaatactcacatcac

SEQ ID NO: 5908 - DNA, 18 bp, Homo sapiens
atgatagccttccgtttt

SEQ ID NO: 5909 - DNA, 21 bp, Homo sapiens
ggcaattcagggtcaatagta

SEQ ID NO: 5910 - DNA, 16 bp, Homo sapiens
ctaccagggcccctcc

SEQ ID NO: 5911 - DNA, 17 bp, Homo sapiens
gcataacacaaagcagc

SEQ ID NO: 5912 - DNA, 23 bp, Homo sapiens
ttctctcatacctatgaaagcag

SEQ ID NO: 5913 - DNA, 18 bp, Homo sapiens
cgacagcacccagatacc

SEQ ID NO: 5914 - DNA, 16 bp, Homo sapiens
gaggagcggctcagac

SEQ ID NO: 5915 - DNA, 17 bp, Homo sapiens
ccctggaggtggagaag

SEQ ID NO: 5916 - DNA, 24 bp, Homo sapiens
aaggaaagcactcacatcacttag

SEQ ID NO: 5917 - DNA, 23 bp, Homo sapiens
acagaatgtgtataaagacgagt

SEQ ID NO: 5918 - DNA, 19 bp, Homo sapiens
ggcacacttgtgaacttga

SEQ ID NO: 5919 - DNA, 23 bp, Homo sapiens
atcccagaaacatcccttgaata

SEQ ID NO: 5920 - DNA, 21 bp, Homo sapiens
atgcatcgcctgctttcttga

SEQ ID NO: 5921 - DNA, 17 bp, Homo sapiens
cagacatgagcatgctg

SEQ ID NO: 5922 - DNA, 23 bp, Homo sapiens
tgcccttcaagaagctgttatac

SEQ ID NO: 5923 - DNA, 23 bp, Homo sapiens
tgtctaccatgcctttggtagtc

SEQ ID NO: 5924 - DNA, 22 bp, Homo sapiens
ccattgcatcattacacatacc

SEQ ID NO: 5925 - DNA, 21 bp, Homo sapiens
gctgactgtagtatgaagtct

SEQ ID NO: 5926 - DNA, 16 bp, Homo sapiens
gctgcaaagatggccc

SEQ ID NO: 5927 - DNA, 23 bp, Homo sapiens
acatctctgggtctgttgttaca

SEQ ID NO: 5928 - DNA, 22 bp, Homo sapiens
tacaagaagaactatgagaaca

SEQ ID NO: 5929 - DNA, 16 bp, Homo sapiens
actcatggcgtcaggt

SEQ ID NO: 5930 - DNA, 17 bp, Homo sapiens
atgatcccaagctggtc

SEQ ID NO: 5931 - DNA, 23 bp, Homo sapiens
gttgacattggtagcgacatcct

SEQ ID NO: 5932 - DNA, 23 bp, Homo sapiens
ccacagtataaatacaaggaagc

SEQ ID NO: 5933 - DNA, 24 bp, Homo sapiens
caggggtatggtagctggttttgg

SEQ ID NO: 5934 - DNA, 20 bp, Homo sapiens
tgtaattgcagcgctaatgc

SEQ ID NO: 5935 - DNA, 21 bp, Homo sapiens
tgccacattcatatagtggac

SEQ ID NO: 5936 - DNA, 22 bp, Homo sapiens
gcattttttgtacactcttgag

SEQ ID NO: 5937 - DNA, 24 bp, Homo sapiens
ccacatgctttccctttgacttct

SEQ ID NO: 5938 - DNA, 19 bp, Homo sapiens
cgagaaacattgccagtga

SEQ ID NO: 5939 - DNA, 24 bp, Homo sapiens
aaagtgacaggtttttccaaacaa

SEQ ID NO: 5940 - DNA, 17 bp, Homo sapiens
agccaagggcaacaatg

SEQ ID NO: 5941 - DNA, 23 bp, Homo sapiens
aataaggtatcaatttaaacaag

SEQ ID NO: 5942 - DNA, 22 bp, Homo sapiens
cagatgctgacattctgtttgc

SEQ ID NO: 5943 - DNA, 24 bp, Homo sapiens
aacttcacctaaaatttgtactca

SEQ ID NO: 5944 - DNA, 22 bp, Homo sapiens
cttcaacttctgtctggaaaag

SEQ ID NO: 5945 - DNA, 21 bp, Homo sapiens
gatgggaatagcatcgcccag

SEQ ID NO: 5946 - DNA, 20 bp, Homo sapiens
cacagtgtgacactttgcca

SEQ ID NO: 5947 - DNA, 24 bp, Homo sapiens
actgaagaggtaaagaaccatcct

SEQ ID NO: 5948 - DNA, 18 bp, Homo sapiens
tacaccatgagtcctgat

SEQ ID NO: 5949 - DNA, 17 bp, Homo sapiens
ttgtcaaggcaccatcc

SEQ ID NO: 5950 - DNA, 19 bp, Homo sapiens
gcactatgtgaaatgcatt

SEQ ID NO: 5951 - DNA, 19 bp, Homo sapiens
cacatcccagcaaagaccc

SEQ ID NO: 5952 - DNA, 20 bp, Homo sapiens
tcatgggtgattgtgctaaa

SEQ ID NO: 5953 - DNA, 20 bp, Homo sapiens
ggagaaactgaggaagatca

SEQ ID NO: 5954 - DNA, 30 bp, Homo sapiens
ataataagatgcttgttttatttaaaaaaa

SEQ ID NO: 5955 - DNA, 19 bp, Homo sapiens
agccttgtataagatctgc

SEQ ID NO: 5956 - DNA, 24 bp, Homo sapiens
cccaaactacacataactgtaatt

SEQ ID NO: 5957 - DNA, 19 bp, Homo sapiens
ttaccagcattgtggactc

SEQ ID NO: 5958 - DNA, 22 bp, Homo sapiens
agatattggcccagaaaaaaaa

SEQ ID NO: 5959 - DNA, 16 bp, Homo sapiens
aaggccggtgatgctc

SEQ ID NO: 5960 - DNA, 24 bp, Homo sapiens
ctccatatcctctgtcctctctat

SEQ ID NO: 5961 - DNA, 19 bp, Homo sapiens
caacaactggatgaaaggc

SEQ ID NO: 5962 - DNA, 23 bp, Homo sapiens
gttttgcctggaccataactggg

SEQ ID NO: 5963 - DNA, 18 bp, Homo sapiens
tcctaggccctcactcct

SEQ ID NO: 5964 - DNA, 24 bp, Homo sapiens
tgttgcctgtacttcttttcattc

SEQ ID NO: 5965 - DNA, 21 bp, Homo sapiens
agtgtcatttacttctcaaga

SEQ ID NO: 5966 - DNA, 19 bp, Homo sapiens
taggaatccagccaatgcc

SEQ ID NO: 5967 - DNA, 16 bp, Homo sapiens
gcctgacgccatggac

SEQ ID NO: 5968 - DNA, 22 bp, Homo sapiens
gttctacagcaatggagaaaag

SEQ ID NO: 5969 - DNA, 16 bp, Homo sapiens
cccaggatgtggtcag

SEQ ID NO: 5970 - DNA, 23 bp, Homo sapiens
ggctctgaacttaataggggggt

SEQ ID NO: 5971 - DNA, 22 bp, Homo sapiens
actatgagaagacaaagtccaa

SEQ ID NO: 5972 - DNA, 23 bp, Homo sapiens
catgttcttagacagctccaggt

SEQ ID NO: 5973 - DNA, 20 bp, Homo sapiens
ggttcattatatgaacgtgg

SEQ ID NO: 5974 - DNA, 21 bp, Homo sapiens
tgcttatagttgacattgctg

SEQ ID NO: 5975 - DNA, 20 bp, Homo sapiens
actatgaaaaggctaaaggg

SEQ ID NO: 5976 - DNA, 20 bp, Homo sapiens
gaacatatcatggggcgtgt

SEQ ID NO: 5977 - DNA, 25 bp, Homo sapiens
taaagccctcaaaactacattttaa

SEQ ID NO: 5978 - DNA, 21 bp, Homo sapiens
tctgattgtatcttggccacg

SEQ ID NO: 5979 - DNA, 22 bp, Homo sapiens
agtacagtaatttttgggaagc

SEQ ID NO: 5980 - DNA, 19 bp, Homo sapiens
ggaagccaaccattttccc

SEQ ID NO: 5981 - DNA, 20 bp, Homo sapiens
taagcaggctacatttcaga

SEQ ID NO: 5982 - DNA, 24 bp, Homo sapiens
agggaactttatttcctaaatagt

SEQ ID NO: 5983 - DNA, 21 bp, Homo sapiens
gcaagaagggatatgacctga

SEQ ID NO: 5984 - DNA, 22 bp, Homo sapiens
tgcatggagacttttgggtcat

SEQ ID NO: 5985 - DNA, 24 bp, Homo sapiens
gttgtacttaaatgacatttttct

SEQ ID NO: 5986 - DNA, 21 bp, Homo sapiens
gcccatgtatgaccacagctg

SEQ ID NO: 5987 - DNA, 16 bp, Homo sapiens
gggtggactcacgggc

SEQ ID NO: 5988 - DNA, 21 bp, Homo sapiens
atgggaatcgcatcagttctc

SEQ ID NO: 5989 - DNA, 16 bp, Homo sapiens
cagacctgccccagtt

SEQ ID NO: 5990 - DNA, 21 bp, Homo sapiens
gctttgtacatattctgaaag

SEQ ID NO: 5991 - DNA, 23 bp, Homo sapiens
catttttttctctttcagatcgc

SEQ ID NO: 5992 - DNA, 19 bp, Homo sapiens
tggacatacgcatcagccc

SEQ ID NO: 5993 - DNA, 24 bp, Homo sapiens
tccattaggaaattattttctggt

SEQ ID NO: 5994 - DNA, 22 bp, Homo sapiens
taactttagcctggatgaactg

SEQ ID NO: 5995 - DNA, 18 bp, Homo sapiens
caaatgcacaaagagtgt

SEQ ID NO: 5996 - DNA, 19 bp, Homo sapiens
tcctctcctttggctttgt

SEQ ID NO: 5997 - DNA, 16 bp, Homo sapiens
tgaacagctggggaat

SEQ ID NO: 5998 - DNA, 19 bp, Homo sapiens
ttacctcgattgaagatgc

SEQ ID NO: 5999 - DNA, 24 bp, Homo sapiens
catattgtataataactagaggtg

SEQ ID NO: 6000 - DNA, 24 bp, Homo sapiens
aacaagattgtttttctctttttg

SEQ ID NO: 6001 - DNA, 22 bp, Homo sapiens
catctattaacatatagatagc

SEQ ID NO: 6002 - DNA, 24 bp, Homo sapiens
cttttcgcttcaaaataaatttca

SEQ ID NO: 6003 - DNA, 22 bp, Homo sapiens
tagactgtactgtaattggagc

SEQ ID NO: 6004 - DNA, 21 bp, Homo sapiens
catcaagccaatcaagaatct

SEQ ID NO: 6005 - DNA, 17 bp, Homo sapiens
aagcgagcttcagacat

SEQ ID NO: 6006 - DNA, 23 bp, Homo sapiens
tgtgcacgtggtaagctcttttc

SEQ ID NO: 6007 - DNA, 21 bp, Homo sapiens
gctgactacaatagctggatg

SEQ ID NO: 6008 - DNA, 22 bp, Homo sapiens
ctgcccatgcttttgagagctt

SEQ ID NO: 6009 - DNA, 24 bp, Homo sapiens
tgaggatgacacagcaaagaaatg

SEQ ID NO: 6010 - DNA, 22 bp, Homo sapiens
gctttacctcattgaggatgtc

SEQ ID NO: 6011 - DNA, 21 bp, Homo sapiens
ctggtcagaaatctcaaaaac

SEQ ID NO: 6012 - DNA, 17 bp, Homo sapiens
cccagccacaacctttc

SEQ ID NO: 6013 - DNA, 24 bp, Homo sapiens
agagctgttactatatctcaccaa

SEQ ID NO: 6014 - DNA, 22 bp, Homo sapiens
cttgccaagaaggcatatgcgc

SEQ ID NO: 6015 - DNA, 23 bp, Homo sapiens
acaagggtcgtttgcttacatac

SEQ ID NO: 6016 - DNA, 22 bp, Homo sapiens
cgacgttgattataagcacatc

SEQ ID NO: 6017 - DNA, 22 bp, Homo sapiens
actcaacttcaaagtccatttc

SEQ ID NO: 6018 - DNA, 20 bp, Homo sapiens
cacctcttgatatgctccaa

SEQ ID NO: 6019 - DNA, 17 bp, Homo sapiens
acatcgctctgcagcgc

SEQ ID NO: 6020 - DNA, 19 bp, Homo sapiens
cctattcacagcgcgaata

SEQ ID NO: 6021 - DNA, 19 bp, Homo sapiens
aggggggtagctgtaactg

SEQ ID NO: 6022 - DNA, 23 bp, Homo sapiens
tgtttatgaaagatctctgtctt

SEQ ID NO: 6023 - DNA, 21 bp, Homo sapiens
ttcttagcttgagtgacttgg

SEQ ID NO: 6024 - DNA, 22 bp, Homo sapiens
catttttgggcaaaataactac

SEQ ID NO: 6025 - DNA, 24 bp, Homo sapiens
ttttgacttttcataatcttttcg

SEQ ID NO: 6026 - DNA, 21 bp, Homo sapiens
ttgaagacagccaaaaaccag

SEQ ID NO: 6027 - DNA, 20 bp, Homo sapiens
acagcagtacttttgtgaat

SEQ ID NO: 6028 - DNA, 21 bp, Homo sapiens
gcaaagggaaaatgattggag

SEQ ID NO: 6029 - DNA, 21 bp, Homo sapiens
tttccacactactacccttgg

SEQ ID NO: 6030 - DNA, 17 bp, Homo sapiens
gggatctggcatgtgtg

SEQ ID NO: 6031 - DNA, 24 bp, Homo sapiens
gattcacaaagacactcacatcac

SEQ ID NO: 6032 - DNA, 20 bp, Homo sapiens
gtgagtgtggcctggggacc

SEQ ID NO: 6033 - DNA, 23 bp, Homo sapiens
tggatcgtcattaatgctgaggg

SEQ ID NO: 6034 - DNA, 22 bp, Homo sapiens
tgacattaaagtggacgccatt

SEQ ID NO: 6035 - DNA, 23 bp, Homo sapiens
tgtacatcacctgcaaagacatc

SEQ ID NO: 6036 - DNA, 24 bp, Homo sapiens
gctgaatttttcttgtccagaatg

SEQ ID NO: 6037 - DNA, 18 bp, Homo sapiens
ccaccctgtccaggtccc

SEQ ID NO: 6038 - DNA, 29 bp, Homo sapiens
ttttcaatatgtttttatttttttactgg

SEQ ID NO: 6039 - DNA, 17 bp, Homo sapiens
gctttggctgccaacag

SEQ ID NO: 6040 - DNA, 23 bp, Homo sapiens
acttatactacaatttgataaat

SEQ ID NO: 6041 - DNA, 18 bp, Homo sapiens
tcttctcccagtcttgct

SEQ ID NO: 6042 - DNA, 19 bp, Homo sapiens
aagtaggagtcttaagagc

SEQ ID NO: 6043 - DNA, 18 bp, Homo sapiens
atgctccacagtttatcc

SEQ ID NO: 6044 - DNA, 23 bp, Homo sapiens
ccatcttaaagttgtttatttgc

SEQ ID NO: 6045 - DNA, 23 bp, Homo sapiens
cctttgtttttcagctgaattac

SEQ ID NO: 6046 - DNA, 23 bp, Homo sapiens
tttctcttttcatgtacaccaaa

SEQ ID NO: 6047 - DNA, 23 bp, Homo sapiens
gccttagctatatatgctgccct

SEQ ID NO: 6048 - DNA, 20 bp, Homo sapiens
aggcattgactctgtgttgg

SEQ ID NO: 6049 - DNA, 21 bp, Homo sapiens
gagactttgactgaattgagt

SEQ ID NO: 6050 - DNA, 19 bp, Homo sapiens
tctcaccttcatgttttgc

SEQ ID NO: 6051 - DNA, 19 bp, Homo sapiens
cgaaacagcttagtgatgt

SEQ ID NO: 6052 - DNA, 24 bp, Homo sapiens
tcatttgtgttttattaaacaaat

SEQ ID NO: 6053 - DNA, 22 bp, Homo sapiens
tcatccagataagaccaaattc

SEQ ID NO: 6054 - DNA, 23 bp, Homo sapiens
agattaagcatgtaaatgcttac

SEQ ID NO: 6055 - DNA, 23 bp, Homo sapiens
aaccaagaatatactgatatttc

SEQ ID NO: 6056 - DNA, 23 bp, Homo sapiens
acgcttgcataaatcaaagcact

SEQ ID NO: 6057 - DNA, 24 bp, Homo sapiens
aggaacaaaataaactctgttttg

SEQ ID NO: 6058 - DNA, 20 bp, Homo sapiens
aggagaatcagtgactgccg

SEQ ID NO: 6059 - DNA, 19 bp, Homo sapiens
gagagagagagagacagac

SEQ ID NO: 6060 - DNA, 19 bp, Homo sapiens
tggaccagtgtaaagatgt

SEQ ID NO: 6061 - DNA, 21 bp, Homo sapiens
ggttccaccccaaaaccaaaa

SEQ ID NO: 6062 - DNA, 25 bp, Homo sapiens
atatgaagaagataaaggaaaatgc

SEQ ID NO: 6063 - DNA, 21 bp, Homo sapiens
gcatgtaaactcctgctaaat

SEQ ID NO: 6064 - DNA, 22 bp, Homo sapiens
acaatcatgatctatttttggt

SEQ ID NO: 6065 - DNA, 19 bp, Homo sapiens
aattcagggcagctaactt

SEQ ID NO: 6066 - DNA, 21 bp, Homo sapiens
agtgatgtaagtttgaagaca

SEQ ID NO: 6067 - DNA, 23 bp, Homo sapiens
attcttgtgttattgtctgaggg

SEQ ID NO: 6068 - DNA, 16 bp, Homo sapiens
gcagcatggaggaccc

SEQ ID NO: 6069 - DNA, 24 bp, Homo sapiens
aacttttctataatgagaaaaacc

SEQ ID NO: 6070 - DNA, 22 bp, Homo sapiens
catttgttttatttttcaggct

SEQ ID NO: 6071 - DNA, 20 bp, Homo sapiens
gtgaggcatgaaccattgtc

SEQ ID NO: 6072 - DNA, 16 bp, Homo sapiens
tcgggtaggagggctt

SEQ ID NO: 6073 - DNA, 21 bp, Homo sapiens
ttcatgcagtgtgtgtgatat

SEQ ID NO: 6074 - DNA, 22 bp, Homo sapiens
ccccaaaatatcaacttgatac

SEQ ID NO: 6075 - DNA, 20 bp, Homo sapiens
ataagtctttatatctagcc

SEQ ID NO: 6076 - DNA, 25 bp, Homo sapiens
ttaacagagattatacaaggaaaac

SEQ ID NO: 6077 - DNA, 19 bp, Homo sapiens
tcaaacagtaggaaagccc

SEQ ID NO: 6078 - DNA, 24 bp, Homo sapiens
tgaatgacttttactttatgagat

SEQ ID NO: 6079 - DNA, 24 bp, Homo sapiens
aacctcactgaagttcttcagctg

SEQ ID NO: 6080 - DNA, 23 bp, Homo sapiens
ggaaaattgatggtgagaaaaca

SEQ ID NO: 6081 - DNA, 22 bp, Homo sapiens
tactctttgcctttgtcttctc

SEQ ID NO: 6082 - DNA, 18 bp, Homo sapiens
ggccaaaaaccagagtga

SEQ ID NO: 6083 - DNA, 24 bp, Homo sapiens
ttcctttagcacctgggtgaagct

SEQ ID NO: 6084 - DNA, 22 bp, Homo sapiens
gggaaaatgattggagtcctca

SEQ ID NO: 6085 - DNA, 21 bp, Homo sapiens
aggctaacgtccatccaaggt

SEQ ID NO: 6086 - DNA, 20 bp, Homo sapiens
tggcatgtgtgatgtctttg

SEQ ID NO: 6087 - DNA, 24 bp, Homo sapiens
taggggtgaattacaaagaaactc

SEQ ID NO: 6088 - DNA, 16 bp, Homo sapiens
agtgtggcctggggac

SEQ ID NO: 6089 - DNA, 24 bp, Homo sapiens
agcatcttgggatcgtcattaatg

SEQ ID NO: 6090 - DNA, 21 bp, Homo sapiens
attaaagtggatgccattccc

SEQ ID NO: 6091 - DNA, 23 bp, Homo sapiens
agtctttcttgtacatcacctgc

SEQ ID NO: 6092 - DNA, 20 bp, Homo sapiens
ttgtccagaatctttataag

SEQ ID NO: 6093 - DNA, 19 bp, Homo sapiens
aagccagcctgtccaggtc

SEQ ID NO: 6094 - DNA, 23 bp, Homo sapiens
tacccactagtctttaaaggtcg

SEQ ID NO: 6095 - DNA, 15 bp, Homo sapiens
tttggctgccagcag

SEQ ID NO: 6096 - DNA, 19 bp, Homo sapiens
tgcatgatttcctagacaa

SEQ ID NO: 6097 - DNA, 18 bp, Homo sapiens
ctcttctcccagtcttgc

SEQ ID NO: 6098 - DNA, 22 bp, Homo sapiens
caatgcctataacttgagtgat

SEQ ID NO: 6099 - DNA, 22 bp, Homo sapiens
cagaggcatagcaacatgatac

SEQ ID NO: 6100 - DNA, 20 bp, Homo sapiens
aagtgaaaagttcaagtgcc

SEQ ID NO: 6101 - DNA, 20 bp, Homo sapiens
ttcattgaattgcaacaaag

SEQ ID NO: 6102 - DNA, 22 bp, Homo sapiens
ttcttctgaactaattggttct

SEQ ID NO: 6103 - DNA, 21 bp, Homo sapiens
cagggcataaggaacttacat

SEQ ID NO: 6104 - DNA, 22 bp, Homo sapiens
ctcaataatgctgtcactaact

SEQ ID NO: 6105 - DNA, 20 bp, Homo sapiens
aaagcaggagtatcaggggg

SEQ ID NO: 6106 - DNA, 19 bp, Homo sapiens
ctgcacacaggatcagtaa

SEQ ID NO: 6107 - DNA, 19 bp, Homo sapiens
gcccaagtcaattccaaac

SEQ ID NO: 6108 - DNA, 24 bp, Homo sapiens
caaatgtatactgtttaaacttgc

SEQ ID NO: 6109 - DNA, 20 bp, Homo sapiens
aaagtccatccagataagac

SEQ ID NO: 6110 - DNA, 24 bp, Homo sapiens
gtcattggattttatgtatagagt

SEQ ID NO: 6111 - DNA, 23 bp, Homo sapiens
accttggatctgacaggtgatac

SEQ ID NO: 6112 - DNA, 24 bp, Homo sapiens
gttagaggaacttacgtcactcag

SEQ ID NO: 6113 - DNA, 21 bp, Homo sapiens
tacaagtttcattgctttgtg

SEQ ID NO: 6114 - DNA, 22 bp, Homo sapiens
tgtaacttgggtgaattttgtc

SEQ ID NO: 6115 - DNA, 21 bp, Homo sapiens
acagatataagagcacctctc

SEQ ID NO: 6116 - DNA, 20 bp, Homo sapiens
gggatgtcaacaagggaaaa

SEQ ID NO: 6117 - DNA, 20 bp, Homo sapiens
tcttccctcagaccataact

SEQ ID NO: 6118 - DNA, 21 bp, Homo sapiens
tgcctggcttacatttatttg

SEQ ID NO: 6119 - DNA, 24 bp, Homo sapiens
cctaatttcttctcctcatagaaa

SEQ ID NO: 6120 - DNA, 22 bp, Homo sapiens
tgctatggaaggcagtcacatt

SEQ ID NO: 6121 - DNA, 24 bp, Homo sapiens
gactttccaaataacatttttctc

SEQ ID NO: 6122 - DNA, 22 bp, Homo sapiens
tcttaattgcttcatattcttg

SEQ ID NO: 6123 - DNA, 18 bp, Homo sapiens
actgcatgaaagtcacag

SEQ ID NO: 6124 - DNA, 24 bp, Homo sapiens
ctgtcttcttcgtattctgctttg

SEQ ID NO: 6125 - DNA, 22 bp, Homo sapiens
agattcctacttaaaagatatt

SEQ ID NO: 6126 - DNA, 22 bp, Homo sapiens
cagccattgtattcatgccctg

SEQ ID NO: 6127 - DNA, 20 bp, Homo sapiens
aaagaacccattatttcacc

SEQ ID NO: 6128 - DNA, 21 bp, Homo sapiens
catcactgttttgagctgtga

SEQ ID NO: 6129 - DNA, 20 bp, Homo sapiens
tgcagaacttcagtagtgat

SEQ ID NO: 6130 - DNA, 23 bp, Homo sapiens
gcctacataatgtcccaaaatat

SEQ ID NO: 6131 - DNA, 21 bp, Homo sapiens
gaaaagacaaaagcaaagagc

SEQ ID NO: 6132 - DNA, 22 bp, Homo sapiens
agacaaaacatacttcatttat

SEQ ID NO: 6133 - DNA, 21 bp, Homo sapiens
tgacaggaatctactttaact

SEQ ID NO: 6134 - DNA, 21 bp, Homo sapiens
agtgacagtaggattgcttac

SEQ ID NO: 6135 - DNA, 24 bp, Homo sapiens
cgatatcttttcttcatcttttgt

SEQ ID NO: 6136 - DNA, 22 bp, Homo sapiens
atttgggggtctcgcagtaatt

SEQ ID NO: 6137 - DNA, 16 bp, Homo sapiens
ccgccgcacctggcct

SEQ ID NO: 6138 - DNA, 24 bp, Homo sapiens
gactcatgcctttctgtggttaca

SEQ ID NO: 6139 - DNA, 19 bp, Homo sapiens
tgcttcctgcttcagagaa

SEQ ID NO: 6140 - DNA, 28 bp, Homo sapiens
gtatttgcaaagttatatattcatttag

SEQ ID NO: 6141 - DNA, 22 bp, Homo sapiens
ttatttcactcctacaggtaaa

SEQ ID NO: 6142 - DNA, 20 bp, Homo sapiens
aggtttaaaaacactttgac

SEQ ID NO: 6143 - DNA, 22 bp, Homo sapiens
tcatattcataatagagacggg

SEQ ID NO: 6144 - DNA, 20 bp, Homo sapiens
tcagctgcctaagctgtggg

SEQ ID NO: 6145 - DNA, 21 bp, Homo sapiens
gtttataaaatgtcaagctgc

SEQ ID NO: 6146 - DNA, 22 bp, Homo sapiens
ttcttttcatagtcttctttgt

SEQ ID NO: 6147 - DNA, 19 bp, Homo sapiens
cctcacatccactggtctc

SEQ ID NO: 6148 - DNA, 20 bp, Homo sapiens
agatctacttcatgcagacc

SEQ ID NO: 6149 - DNA, 20 bp, Homo sapiens
actaattatatacaagagcc

SEQ ID NO: 6150 - DNA, 22 bp, Homo sapiens
gcagttcttcagcttgtctgat

SEQ ID NO: 6151 - DNA, 23 bp, Homo sapiens
ccatcaagataaatgggatgatt

SEQ ID NO: 6152 - DNA, 19 bp, Homo sapiens
tccaaatccctgtgtcttc

SEQ ID NO: 6153 - DNA, 23 bp, Homo sapiens
ttcattttatactctggtgtttc

SEQ ID NO: 6154 - DNA, 21 bp, Homo sapiens
tggtaccacattctctaattg

SEQ ID NO: 6155 - DNA, 22 bp, Homo sapiens
tgaatgctgataacattagcac

SEQ ID NO: 6156 - DNA, 21 bp, Homo sapiens
gaactctgcaccaggtcttgc

SEQ ID NO: 6157 - DNA, 22 bp, Homo sapiens
aaataaaatcaaaggcaaatgg

SEQ ID NO: 6158 - DNA, 21 bp, Homo sapiens
ggtagagcaagtagctagaag

SEQ ID NO: 6159 - DNA, 23 bp, Homo sapiens
tgagttatgcttgtcttattttc

SEQ ID NO: 6160 - DNA, 20 bp, Homo sapiens
gccatcccttcccacttaac

SEQ ID NO: 6161 - DNA, 24 bp, Homo sapiens
gcttgctgaagatatttttaaaag

SEQ ID NO: 6162 - DNA, 18 bp, Homo sapiens
agcaaggtgtctcactcc

SEQ ID NO: 6163 - DNA, 20 bp, Homo sapiens
aattgacagtacattggaag

SEQ ID NO: 6164 - DNA, 22 bp, Homo sapiens
tgccaagaaagtaaccaatcaa

SEQ ID NO: 6165 - DNA, 21 bp, Homo sapiens
agagtctttggggatcatatg

SEQ ID NO: 6166 - DNA, 16 bp, Homo sapiens
cgctgaacagcaagct

SEQ ID NO: 6167 - DNA, 24 bp, Homo sapiens
acctttagtaaccctctctgatgg

SEQ ID NO: 6168 - DNA, 22 bp, Homo sapiens
aatcgtttttaaaatacatccc

SEQ ID NO: 6169 - DNA, 22 bp, Homo sapiens
cagctctatttacttaccttgc

SEQ ID NO: 6170 - DNA, 20 bp, Homo sapiens
aggacaaattataacatgtt

SEQ ID NO: 6171 - DNA, 16 bp, Homo sapiens
gccagaggcgtgaatt

SEQ ID NO: 6172 - DNA, 23 bp, Homo sapiens
gggaagaaaattcagcaaaatag

SEQ ID NO: 6173 - DNA, 18 bp, Homo sapiens
cccagaaagctctcagtg

SEQ ID NO: 6174 - DNA, 24 bp, Homo sapiens
tataacaattctagacatactcct

SEQ ID NO: 6175 - DNA, 23 bp, Homo sapiens
aagcagacaaaagtttgttttac

SEQ ID NO: 6176 - DNA, 21 bp, Homo sapiens
gttgcagtgaccatctggcca

SEQ ID NO: 6177 - DNA, 20 bp, Homo sapiens
ttcctcctaacttttcactc

SEQ ID NO: 6178 - DNA, 19 bp, Homo sapiens
ggtgccacttgcatttcac

SEQ ID NO: 6179 - DNA, 24 bp, Homo sapiens
ggttctttaggttattaatggatg

SEQ ID NO: 6180 - DNA, 23 bp, Homo sapiens
ctcagttccgggctatcattata

SEQ ID NO: 6181 - DNA, 20 bp, Homo sapiens
tggaaagtgggaagttatct

SEQ ID NO: 6182 - DNA, 24 bp, Homo sapiens
ccctatccctgcagtctcacatgt

SEQ ID NO: 6183 - DNA, 21 bp, Homo sapiens
caccaaggataagtacctgct

SEQ ID NO: 6184 - DNA, 24 bp, Homo sapiens
attccagatgatcaagagttcacc

SEQ ID NO: 6185 - DNA, 19 bp, Homo sapiens
gccacagatcctctgctcc

SEQ ID NO: 6186 - DNA, 18 bp, Homo sapiens
gaagtggcaatggagcag

SEQ ID NO: 6187 - DNA, 18 bp, Homo sapiens
gccttcatgagtctccct

SEQ ID NO: 6188 - DNA, 24 bp, Homo sapiens
gacaagttcaggggcatcaggagg

SEQ ID NO: 6189 - DNA, 19 bp, Homo sapiens
ataggatgttggcatggtc

SEQ ID NO: 6190 - DNA, 19 bp, Homo sapiens
agcaagtcagtaaggtaag

SEQ ID NO: 6191 - DNA, 21 bp, Homo sapiens
gcctccttgatgaatacaggt

SEQ ID NO: 6192 - DNA, 22 bp, Homo sapiens
gttgctaagactatatgtcacg

SEQ ID NO: 6193 - DNA, 19 bp, Homo sapiens
aggcctgtccaattttctc

SEQ ID NO: 6194 - DNA, 21 bp, Homo sapiens
catgaactctaactgtgcatt

SEQ ID NO: 6195 - DNA, 21 bp, Homo sapiens
ccagccatccatatcattgcc

SEQ ID NO: 6196 - DNA, 17 bp, Homo sapiens
gggtaatgctctgtggt

SEQ ID NO: 6197 - DNA, 24 bp, Homo sapiens
gttcaatatcctttgctttttcat

SEQ ID NO: 6198 - DNA, 21 bp, Homo sapiens
tgaagatcacatttttccagc

SEQ ID NO: 6199 - DNA, 19 bp, Homo sapiens
caagatcaactcagtgagg

SEQ ID NO: 6200 - DNA, 24 bp, Homo sapiens
ggttcatgcttttctagatttgtg

SEQ ID NO: 6201 - DNA, 19 bp, Homo sapiens
aaaaggacagccatacgcc

SEQ ID NO: 6202 - DNA, 20 bp, Homo sapiens
acagcacatatttagagccc

SEQ ID NO: 6203 - DNA, 22 bp, Homo sapiens
gctgtcttgttaggctaatatc

SEQ ID NO: 6204 - DNA, 19 bp, Homo sapiens
atttcagcaatgcagccca

SEQ ID NO: 6205 - DNA, 22 bp, Homo sapiens
gctataacttgaaggatttttt

SEQ ID NO: 6206 - DNA, 18 bp, Homo sapiens
agtatctgttgtgctggc

SEQ ID NO: 6207 - DNA, 22 bp, Homo sapiens
tttagtttttgctgagagttgg

SEQ ID NO: 6208 - DNA, 22 bp, Homo sapiens
ttcaacagtcacaagagcctat

SEQ ID NO: 6209 - DNA, 21 bp, Homo sapiens
gaaagtggatccttcaaagtt

SEQ ID NO: 6210 - DNA, 24 bp, Homo sapiens
acaaatccagccagcatccaaaac

SEQ ID NO: 6211 - DNA, 19 bp, Homo sapiens
acagccagcactggcacag

SEQ ID NO: 6212 - DNA, 24 bp, Homo sapiens
agccaggttagcagaagttgtttg

SEQ ID NO: 6213 - DNA, 22 bp, Homo sapiens
cgacaacaaggacatctgacta

SEQ ID NO: 6214 - DNA, 20 bp, Homo sapiens
tgcaatgtagggggtcatga

SEQ ID NO: 6215 - DNA, 23 bp, Homo sapiens
ttcacaacaatgttgaactgcat

SEQ ID NO: 6216 - DNA, 23 bp, Homo sapiens
ctcctctccaccggctttgctga

SEQ ID NO: 6217 - DNA, 24 bp, Homo sapiens
gaatgtatatctgacttgaagtta

SEQ ID NO: 6218 - DNA, 21 bp, Homo sapiens
tggaagtttctgattgctcat

SEQ ID NO: 6219 - DNA, 16 bp, Homo sapiens
gtgccatttcctgctt

SEQ ID NO: 6220 - DNA, 17 bp, Homo sapiens
tttacgaagaggtgccg

SEQ ID NO: 6221 - DNA, 19 bp, Homo sapiens
gcacaggtaggtgagtgat

SEQ ID NO: 6222 - DNA, 18 bp, Homo sapiens
ctgctttggttctcttgc

SEQ ID NO: 6223 - DNA, 24 bp, Homo sapiens
ctgggagtctaagaaaggagaaag

SEQ ID NO: 6224 - DNA, 21 bp, Homo sapiens
tcaaccgagctagtgcagtca

SEQ ID NO: 6225 - DNA, 16 bp, Homo sapiens
gctgggccttacctct

SEQ ID NO: 6226 - DNA, 22 bp, Homo sapiens
aagtgaagatgggttccaaaat

SEQ ID NO: 6227 - DNA, 24 bp, Homo sapiens
actgaacataaaatattcctttct

SEQ ID NO: 6228 - DNA, 21 bp, Homo sapiens
aaagtttgtaggtgccactac

SEQ ID NO: 6229 - DNA, 25 bp, Homo sapiens
taatagacaatgtatttttcgaatg

SEQ ID NO: 6230 - DNA, 22 bp, Homo sapiens
ataagataatttctgtgctggg

SEQ ID NO: 6231 - DNA, 21 bp, Homo sapiens
agtttgctgtcagtgtttttt

SEQ ID NO: 6232 - DNA, 23 bp, Homo sapiens
cctgcaacaatatatgaatttgt

SEQ ID NO: 6233 - DNA, 24 bp, Homo sapiens
gtggaacagttcatcctgaaacca

SEQ ID NO: 6234 - DNA, 21 bp, Homo sapiens
tctttacagattgcatccaag

SEQ ID NO: 6235 - DNA, 16 bp, Homo sapiens
aagggtggggaccaca

SEQ ID NO: 6236 - DNA, 23 bp, Homo sapiens
accatacttattaggtgtatgtg

SEQ ID NO: 6237 - DNA, 24 bp, Homo sapiens
attctagtttgtacatttctttta

SEQ ID NO: 6238 - DNA, 19 bp, Homo sapiens
gctctgttgggaatgctgt

SEQ ID NO: 6239 - DNA, 23 bp, Homo sapiens
tgcttcctccataaagactgata

SEQ ID NO: 6240 - DNA, 22 bp, Homo sapiens
agatggtgacttaatggaagtt

SEQ ID NO: 6241 - DNA, 23 bp, Homo sapiens
ccctgatttactgattttttaaa

SEQ ID NO: 6242 - DNA, 16 bp, Homo sapiens
gaggaggaggaggatg

SEQ ID NO: 6243 - DNA, 24 bp, Homo sapiens
agagagctttcgttgtaatattag

SEQ ID NO: 6244 - DNA, 19 bp, Homo sapiens
agacttacactgttgagga

SEQ ID NO: 6245 - DNA, 23 bp, Homo sapiens
ttacctaatatggacctctgatg

SEQ ID NO: 6246 - DNA, 22 bp, Homo sapiens
agtagctagagataaaccaagt

SEQ ID NO: 6247 - DNA, 23 bp, Homo sapiens
ggaaacaattttctgaagcagtt

SEQ ID NO: 6248 - DNA, 21 bp, Homo sapiens
tcagcatacatgctgatattt

SEQ ID NO: 6249 - DNA, 21 bp, Homo sapiens
tggatgaacttttacttcctc

SEQ ID NO: 6250 - DNA, 24 bp, Homo sapiens
agagattccttcttccaaaaaaag

SEQ ID NO: 6251 - DNA, 19 bp, Homo sapiens
gccagtgtaaaaaatcagg

SEQ ID NO: 6252 - DNA, 19 bp, Homo sapiens
gattgggaaaaagaagatt

SEQ ID NO: 6253 - DNA, 20 bp, Homo sapiens
tggctcttataattgcccga

SEQ ID NO: 6254 - DNA, 21 bp, Homo sapiens
attcgatgtcaattcttgcag

SEQ ID NO: 6255 - DNA, 21 bp, Homo sapiens
tctcttagtaaatttcttgat

SEQ ID NO: 6256 - DNA, 26 bp, Homo sapiens
gtaacaaaaagaatttactatacctg

SEQ ID NO: 6257 - DNA, 21 bp, Homo sapiens
ccaatactttcagtaaacagt

SEQ ID NO: 6258 - DNA, 16 bp, Homo sapiens
tctggccgagaagtgt

SEQ ID NO: 6259 - DNA, 21 bp, Homo sapiens
tagcaagatacggtttatgaa

SEQ ID NO: 6260 - DNA, 17 bp, Homo sapiens
gcttggcacctaatacc

SEQ ID NO: 6261 - DNA, 24 bp, Homo sapiens
gatgacaaatcccttagaatctct

SEQ ID NO: 6262 - DNA, 20 bp, Homo sapiens
agggtcagttcttgaatgtc

SEQ ID NO: 6263 - DNA, 21 bp, Homo sapiens
accaacagttaattggatacc

SEQ ID NO: 6264 - DNA, 20 bp, Homo sapiens
tctggtgagggaaaataacc

SEQ ID NO: 6265 - DNA, 23 bp, Homo sapiens
taaaaatgcttactaacctggta

SEQ ID NO: 6266 - DNA, 20 bp, Homo sapiens
agtcgaaaagtatctccttg

SEQ ID NO: 6267 - DNA, 24 bp, Homo sapiens
acaggcaaggaattgccataatgc

SEQ ID NO: 6268 - DNA, 23 bp, Homo sapiens
tctgttttatgtctttgttttgt

SEQ ID NO: 6269 - DNA, 23 bp, Homo sapiens
acagtctaaaggtaatgaaagtg

SEQ ID NO: 6270 - DNA, 23 bp, Homo sapiens
agttctctaattttctcatattt

SEQ ID NO: 6271 - DNA, 18 bp, Homo sapiens
tggcacagttctcaagga

SEQ ID NO: 6272 - DNA, 23 bp, Homo sapiens
caaaattgtacgtttttacttac

SEQ ID NO: 6273 - DNA, 19 bp, Homo sapiens
gatgtgcaagaaaggtagg

SEQ ID NO: 6274 - DNA, 21 bp, Homo sapiens
acctgtaagagtctgtgattc

SEQ ID NO: 6275 - DNA, 19 bp, Homo sapiens
tcattacattttagggcag

SEQ ID NO: 6276 - DNA, 23 bp, Homo sapiens
agatcctaagtctgatcaattgt

SEQ ID NO: 6277 - DNA, 24 bp, Homo sapiens
ttaagtaagtctttttcttaaacc

SEQ ID NO: 6278 - DNA, 23 bp, Homo sapiens
ctgtattacattgagtttttacc

SEQ ID NO: 6279 - DNA, 18 bp, Homo sapiens
ggatgtcccctaaccaac

SEQ ID NO: 6280 - DNA, 22 bp, Homo sapiens
tgatatttcacagtcttctgcc

SEQ ID NO: 6281 - DNA, 19 bp, Homo sapiens
cgctttgggttctcagcca

SEQ ID NO: 6282 - DNA, 24 bp, Homo sapiens
cattgaacctgggatacaattttt

SEQ ID NO: 6283 - DNA, 18 bp, Homo sapiens
agggcatgtacagctggt

SEQ ID NO: 6284 - DNA, 21 bp, Homo sapiens
cagcaaaatctctccgttggt

SEQ ID NO: 6285 - DNA, 20 bp, Homo sapiens
tcttatgtttgctgttttga

SEQ ID NO: 6286 - DNA, 21 bp, Homo sapiens
agttcttccaccaaagccaaa

SEQ ID NO: 6287 - DNA, 19 bp, Homo sapiens
gttcatggtctacagtacc

SEQ ID NO: 6288 - DNA, 23 bp, Homo sapiens
agcggtgctgaaggtgcagacgt

SEQ ID NO: 6289 - DNA, 21 bp, Homo sapiens
atgtgataactgcaacattgc

SEQ ID NO: 6290 - DNA, 22 bp, Homo sapiens
acatttctctactctaagagac

SEQ ID NO: 6291 - DNA, 17 bp, Homo sapiens
attgctttggcaggatc

SEQ ID NO: 6292 - DNA, 23 bp, Homo sapiens
agatggccttccttatataaatc

SEQ ID NO: 6293 - DNA, 26 bp, Homo sapiens
gaatgacatctacataaagtaaaagc

SEQ ID NO: 6294 - DNA, 19 bp, Homo sapiens
acccattataatgtgcaat

SEQ ID NO: 6295 - DNA, 23 bp, Homo sapiens
ttcacattaactttcctgatttt

SEQ ID NO: 6296 - DNA, 20 bp, Homo sapiens
gccaatacattggtagatcc

SEQ ID NO: 6297 - DNA, 17 bp, Homo sapiens
cagcttccacttggctt

SEQ ID NO: 6298 - DNA, 24 bp, Homo sapiens
tttgctagtggggatgccagaagt

SEQ ID NO: 6299 - DNA, 20 bp, Homo sapiens
tgcttctgagagctcagaag

SEQ ID NO: 6300 - DNA, 24 bp, Homo sapiens
gtgctgtctagattagcaagtaag

SEQ ID NO: 6301 - DNA, 22 bp, Homo sapiens
ttctagtgttgtctgtgttggt

SEQ ID NO: 6302 - DNA, 20 bp, Homo sapiens
actcccttgcctgctggtat

SEQ ID NO: 6303 - DNA, 24 bp, Homo sapiens
gtctagatttcatgacttattacc

SEQ ID NO: 6304 - DNA, 20 bp, Homo sapiens
ggtctgtttccatcccagca

SEQ ID NO: 6305 - DNA, 20 bp, Homo sapiens
ggtacatgtgagcagttatg

SEQ ID NO: 6306 - DNA, 21 bp, Homo sapiens
ctagcagatccatctccacca

SEQ ID NO: 6307 - DNA, 20 bp, Homo sapiens
tggcatgcaaacgttagaac

SEQ ID NO: 6308 - DNA, 19 bp, Homo sapiens
ctcaaatatctactcacgt

SEQ ID NO: 6309 - DNA, 18 bp, Homo sapiens
ttcacagtgggcatcgga

SEQ ID NO: 6310 - DNA, 21 bp, Homo sapiens
cacatcagtccaacactttag

SEQ ID NO: 6311 - DNA, 28 bp, Homo sapiens
ttatttccagaaacaataagaaataatt

SEQ ID NO: 6312 - DNA, 20 bp, Homo sapiens
tcacttgccttggttctaac

SEQ ID NO: 6313 - DNA, 20 bp, Homo sapiens
tgtgatagattgagggaaga

SEQ ID NO: 6314 - DNA, 22 bp, Homo sapiens
ctccaatgtattgcgaacaatg

SEQ ID NO: 6315 - DNA, 29 bp, Homo sapiens
catgtcatattatcattaattattattac

SEQ ID NO: 6316 - DNA, 16 bp, Homo sapiens
atgaagggcacgctct

SEQ ID NO: 6317 - DNA, 21 bp, Homo sapiens
tatttttaaatgttaggttcc

SEQ ID NO: 6318 - DNA, 23 bp, Homo sapiens
gttaaaaagtgtgatcattgttt

SEQ ID NO: 6319 - DNA, 28 bp, Homo sapiens
taatacataaatgatataacatatattg

SEQ ID NO: 6320 - DNA, 23 bp, Homo sapiens
aaatgctgttttatgacttgacc

SEQ ID NO: 6321 - DNA, 20 bp, Homo sapiens
ccttaagcagtgacagagcg

SEQ ID NO: 6322 - DNA, 17 bp, Homo sapiens
ggccagtaacacttagt

SEQ ID NO: 6323 - DNA, 21 bp, Homo sapiens
aaaactgatgtaacaagtaag

SEQ ID NO: 6324 - DNA, 24 bp, Homo sapiens
ctcgagctggctgcagtaggttat

SEQ ID NO: 6325 - DNA, 20 bp, Homo sapiens
caaaaaagaagctacccagg

SEQ ID NO: 6326 - DNA, 24 bp, Homo sapiens
tttcccaagtttgcattaaggaca

SEQ ID NO: 6327 - DNA, 19 bp, Homo sapiens
aggctttccaaacagaccg

SEQ ID NO: 6328 - DNA, 28 bp, Homo sapiens
gatggtgaaattatattctgaaaattac

SEQ ID NO: 6329 - DNA, 24 bp, Homo sapiens
tgtcattttaaagggaaagaaaaa

SEQ ID NO: 6330 - DNA, 22 bp, Homo sapiens
aacagaggttcaaccttctcat

SEQ ID NO: 6331 - DNA, 22 bp, Homo sapiens
ttcaaataaaaatagcaaatac

SEQ ID NO: 6332 - DNA, 24 bp, Homo sapiens
agtatttttaatgacttcggtctg

SEQ ID NO: 6333 - DNA, 20 bp, Homo sapiens
cagttcaagaaaatattggc

SEQ ID NO: 6334 - DNA, 22 bp, Homo sapiens
tcaacactttctcacgacaaaa

SEQ ID NO: 6335 - DNA, 25 bp, Homo sapiens
aaactaaagaattctacacttgatc

SEQ ID NO: 6336 - DNA, 21 bp, Homo sapiens
tttactcaaaacatgtctaga

SEQ ID NO: 6337 - DNA, 24 bp, Homo sapiens
cagagaagtggtactttattaggt

SEQ ID NO: 6338 - DNA, 17 bp, Homo sapiens
tcccatgaggagtactt

SEQ ID NO: 6339 - DNA, 20 bp, Homo sapiens
ttgaactcaaagacatattc

SEQ ID NO: 6340 - DNA, 21 bp, Homo sapiens
acagtggtcttcacttaaatt

SEQ ID NO: 6341 - DNA, 20 bp, Homo sapiens
ttatttttttttcaggtgat

SEQ ID NO: 6342 - DNA, 21 bp, Homo sapiens
ttcaagcagatgaagagtgtg

SEQ ID NO: 6343 - DNA, 16 bp, Homo sapiens
ggtaagccccagtgtc

SEQ ID NO: 6344 - DNA, 24 bp, Homo sapiens
aacagaacaacgccgtttcagttt

SEQ ID NO: 6345 - DNA, 20 bp, Homo sapiens
caggtattaagcccagtacc

SEQ ID NO: 6346 - DNA, 26 bp, Homo sapiens
ttctttacatagcaagtcatacttag

SEQ ID NO: 6347 - DNA, 16 bp, Homo sapiens
cgagcgcccggcgggt

SEQ ID NO: 6348 - DNA, 18 bp, Homo sapiens
gtccgggcagtgaggcga

SEQ ID NO: 6349 - DNA, 16 bp, Homo sapiens
gatcgggagggacagt

SEQ ID NO: 6350 - DNA, 24 bp, Homo sapiens
aagctcgtgggtgtaggccttggg

SEQ ID NO: 6351 - DNA, 19 bp, Homo sapiens
ttaacgtccccgcagcaga

SEQ ID NO: 6352 - DNA, 16 bp, Homo sapiens
ttggggccgggcactc

SEQ ID NO: 6353 - DNA, 16 bp, Homo sapiens
gcggccgggaggaaga

SEQ ID NO: 6354 - DNA, 17 bp, Homo sapiens
ctcgctcagcaccacgt

SEQ ID NO: 6355 - DNA, 16 bp, Homo sapiens
agcctgcgactccgcc

SEQ ID NO: 6356 - DNA, 24 bp, Homo sapiens
aatccgctcggccgccgcctccgt

SEQ ID NO: 6357 - DNA, 16 bp, Homo sapiens
ctggggctgccgcgcc

SEQ ID NO: 6358 - DNA, 16 bp, Homo sapiens
cctccgggggcgcctc

SEQ ID NO: 6359 - DNA, 16 bp, Homo sapiens
cctccctcctgggtcc

SEQ ID NO: 6360 - DNA, 16 bp, Homo sapiens
tcctccagggcatggc

SEQ ID NO: 6361 - DNA, 16 bp, Homo sapiens
ctcagcctcgcgcagc

SEQ ID NO: 6362 - DNA, 17 bp, Homo sapiens
gaaggggtctagctggc

SEQ ID NO: 6363 - DNA, 16 bp, Homo sapiens
tcgcggccttggctct

SEQ ID NO: 6364 - DNA, 18 bp, Homo sapiens
ctgctgtctgggcgggtc

SEQ ID NO: 6365 - DNA, 16 bp, Homo sapiens
acaccaggcccggctc

SEQ ID NO: 6366 - DNA, 21 bp, Homo sapiens
gagcacaacccatggctgcgc

SEQ ID NO: 6367 - DNA, 18 bp, Homo sapiens
aagaagaagcgcagctgt

SEQ ID NO: 6368 - DNA, 16 bp, Homo sapiens
ctctgcccccacgggg

SEQ ID NO: 6369 - DNA, 17 bp, Homo sapiens
ccgcgggttacctgtaa

SEQ ID NO: 6370 - DNA, 16 bp, Homo sapiens
caaggccaccggagct

SEQ ID NO: 6371 - DNA, 21 bp, Homo sapiens
gtccaacgtcttctcacctct

SEQ ID NO: 6372 - DNA, 22 bp, Homo sapiens
ttagaggagattccacgtctag

SEQ ID NO: 6373 - DNA, 23 bp, Homo sapiens
ccagtttatgaccatagcctcag

SEQ ID NO: 6374 - DNA, 17 bp, Homo sapiens
ctgcaactgcaccagtt

SEQ ID NO: 6375 - DNA, 23 bp, Homo sapiens
atcatacacaatgcccttttttt

SEQ ID NO: 6376 - DNA, 17 bp, Homo sapiens
caggttcacgtgcatct

SEQ ID NO: 6377 - DNA, 23 bp, Homo sapiens
gtagccatcagacccttcctcac

SEQ ID NO: 6378 - DNA, 18 bp, Homo sapiens
cgttccgtactgggtact

SEQ ID NO: 6379 - DNA, 24 bp, Homo sapiens
cccagttattcagttttgattgaa

SEQ ID NO: 6380 - DNA, 17 bp, Homo sapiens
gtgaacggcccataggt

SEQ ID NO: 6381 - DNA, 24 bp, Homo sapiens
atgtggatgtcctacttagggcct

SEQ ID NO: 6382 - DNA, 16 bp, Homo sapiens
cccactgtctttcgcc

SEQ ID NO: 6383 - DNA, 18 bp, Homo sapiens
cggcaagagggcaagtac

SEQ ID NO: 6384 - DNA, 24 bp, Homo sapiens
ctagaccatcaggctcagaggatg

SEQ ID NO: 6385 - DNA, 18 bp, Homo sapiens
accagcacgacctgacct

SEQ ID NO: 6386 - DNA, 16 bp, Homo sapiens
ctggcgcagctggtac

SEQ ID NO: 6387 - DNA, 24 bp, Homo sapiens
taaattctaggagtatgggatttc

SEQ ID NO: 6388 - DNA, 23 bp, Homo sapiens
aatcacctcattgaaagcatccg

SEQ ID NO: 6389 - DNA, 22 bp, Homo sapiens
aagatctcccttaattgaaccc

SEQ ID NO: 6390 - DNA, 23 bp, Homo sapiens
ctggttccccgaagcactctctg

SEQ ID NO: 6391 - DNA, 17 bp, Homo sapiens
ggaaggacaccactggt

SEQ ID NO: 6392 - DNA, 17 bp, Homo sapiens
caagggtaccttccaag

SEQ ID NO: 6393 - DNA, 18 bp, Homo sapiens
gcggaagcagcgctctat

SEQ ID NO: 6394 - DNA, 17 bp, Homo sapiens
cccttgaggagagggag

SEQ ID NO: 6395 - DNA, 24 bp, Homo sapiens
ttatgactcgactggaccagctgc

SEQ ID NO: 6396 - DNA, 21 bp, Homo sapiens
aatagctgagtagtgcacaga

SEQ ID NO: 6397 - DNA, 23 bp, Homo sapiens
ggctcaactcttctactactttg

SEQ ID NO: 6398 - DNA, 23 bp, Homo sapiens
cggtgtcctcggggatggatcgc

SEQ ID NO: 6399 - DNA, 21 bp, Homo sapiens
gaatgggtcagggagaggttg

SEQ ID NO: 6400 - DNA, 24 bp, Homo sapiens
gaggaaggtggcatagagtgagtt

SEQ ID NO: 6401 - DNA, 17 bp, Homo sapiens
ttctgcctcctgtgatg

SEQ ID NO: 6402 - DNA, 22 bp, Homo sapiens
cattccaaccatccaggtatcg

SEQ ID NO: 6403 - DNA, 19 bp, Homo sapiens
gaaacgcattggctgcctg

SEQ ID NO: 6404 - DNA, 21 bp, Homo sapiens
gagtcacccccatctctcttc

SEQ ID NO: 6405 - DNA, 24 bp, Homo sapiens
atcgggttaatgttccagaactca

SEQ ID NO: 6406 - DNA, 20 bp, Homo sapiens
gacaactggtagcatgaggg

SEQ ID NO: 6407 - DNA, 18 bp, Homo sapiens
tgctgcctttctggaagc

SEQ ID NO: 6408 - DNA, 22 bp, Homo sapiens
gcaacagagaagaggaaaggac

SEQ ID NO: 6409 - DNA, 17 bp, Homo sapiens
actcccagatggggccc

SEQ ID NO: 6410 - DNA, 17 bp, Homo sapiens
cagttgggcctccatat

SEQ ID NO: 6411 - DNA, 21 bp, Homo sapiens
ggtctctcccaggccttttcc

SEQ ID NO: 6412 - DNA, 20 bp, Homo sapiens
gtccactggccagtaagaag

SEQ ID NO: 6413 - DNA, 24 bp, Homo sapiens
cttggagatcatgacttttggctt

SEQ ID NO: 6414 - DNA, 17 bp, Homo sapiens
tccactccagccatgag

SEQ ID NO: 6415 - DNA, 24 bp, Homo sapiens
gctgattgatgagaagctcgaaga

SEQ ID NO: 6416 - DNA, 18 bp, Homo sapiens
ggaactggttcaggttgg

SEQ ID NO: 6417 - DNA, 23 bp, Homo sapiens
tccaggtgtctggctacctgcac

SEQ ID NO: 6418 - DNA, 23 bp, Homo sapiens
tgttacagaaaaagaagcaggtc

SEQ ID NO: 6419 - DNA, 20 bp, Homo sapiens
atgggcagcctgcctgagct

SEQ ID NO: 6420 - DNA, 20 bp, Homo sapiens
gtacagggcccatgtcagcg

SEQ ID NO: 6421 - DNA, 24 bp, Homo sapiens
ctgcatgttttttcctgctaggct

SEQ ID NO: 6422 - DNA, 18 bp, Homo sapiens
ccacacccaccacttcct

SEQ ID NO: 6423 - DNA, 17 bp, Homo sapiens
cctcccattactggcct

SEQ ID NO: 6424 - DNA, 20 bp, Homo sapiens
agcacagctttgagcaacgg

SEQ ID NO: 6425 - DNA, 24 bp, Homo sapiens
ctctatcttctagacatccaacac

SEQ ID NO: 6426 - DNA, 20 bp, Homo sapiens
ccccacaaagagatcctgtg

SEQ ID NO: 6427 - DNA, 23 bp, Homo sapiens
gatccaggaggccttgcacgagg

SEQ ID NO: 6428 - DNA, 18 bp, Homo sapiens
ccttgtcactagccccag

SEQ ID NO: 6429 - DNA, 22 bp, Homo sapiens
gcacaaggactttgcccacatg

SEQ ID NO: 6430 - DNA, 20 bp, Homo sapiens
tctggattcatgggggtaca

SEQ ID NO: 6431 - DNA, 17 bp, Homo sapiens
ggagtttgtggggacca

SEQ ID NO: 6432 - DNA, 21 bp, Homo sapiens
ctgaagtgaagacaggtgggc

SEQ ID NO: 6433 - DNA, 16 bp, Homo sapiens
tagccccactcacgtt

SEQ ID NO: 6434 - DNA, 24 bp, Homo sapiens
gagaaggagtggggcactttgtac

SEQ ID NO: 6435 - DNA, 17 bp, Homo sapiens
gcagcatgaatgcctct

SEQ ID NO: 6436 - DNA, 22 bp, Homo sapiens
ttttccctgcagtctctaccct

SEQ ID NO: 6437 - DNA, 18 bp, Homo sapiens
agaaggcagtggggtccc

SEQ ID NO: 6438 - DNA, 24 bp, Homo sapiens
attgaagttgatggcttcctcttc

SEQ ID NO: 6439 - DNA, 16 bp, Homo sapiens
aggctggctgtttctc

SEQ ID NO: 6440 - DNA, 19 bp, Homo sapiens
ctatgcccccgaagagagg

SEQ ID NO: 6441 - DNA, 16 bp, Homo sapiens
gcccggaccccatagc

SEQ ID NO: 6442 - DNA, 24 bp, Homo sapiens
gtttgtgttctgccactatgtggt

SEQ ID NO: 6443 - DNA, 22 bp, Homo sapiens
actagcctctcccagctcaccc

SEQ ID NO: 6444 - DNA, 23 bp, Homo sapiens
tccagccccaccgctggctgaga

SEQ ID NO: 6445 - DNA, 17 bp, Homo sapiens
ctcccttcctctcctcc

SEQ ID NO: 6446 - DNA, 16 bp, Homo sapiens
gctctgtgccctttgg

SEQ ID NO: 6447 - DNA, 24 bp, Homo sapiens
cacatgtggttgggtggattgtgt

SEQ ID NO: 6448 - DNA, 24 bp, Homo sapiens
agagctggagatgcagctactcct

SEQ ID NO: 6449 - DNA, 19 bp, Homo sapiens
ccgtctccggggccaggac

SEQ ID NO: 6450 - DNA, 19 bp, Homo sapiens
agggaggggtggaggagtc

SEQ ID NO: 6451 - DNA, 18 bp, Homo sapiens
gcaggcccactttcttat

SEQ ID NO: 6452 - DNA, 19 bp, Homo sapiens
ggggagtggatggcaaaca

SEQ ID NO: 6453 - DNA, 17 bp, Homo sapiens
agcctctaggacaagcc

SEQ ID NO: 6454 - DNA, 24 bp, Homo sapiens
ctgatccagaagtacaaggtggtc

SEQ ID NO: 6455 - DNA, 21 bp, Homo sapiens
ctccttctctccctcctcatc

SEQ ID NO: 6456 - DNA, 21 bp, Homo sapiens
attgtcctggttcccaataag

SEQ ID NO: 6457 - DNA, 21 bp, Homo sapiens
atgatagaagtggcaaaagct

SEQ ID NO: 6458 - DNA, 21 bp, Homo sapiens
ccagaggactctgggaataac

SEQ ID NO: 6459 - DNA, 20 bp, Homo sapiens
cttaaaagaaagccaggccc

SEQ ID NO: 6460 - DNA, 24 bp, Homo sapiens
tccaaaatgagcaccatgacatct

SEQ ID NO: 6461 - DNA, 19 bp, Homo sapiens
atagcttctggctcacaac

SEQ ID NO: 6462 - DNA, 24 bp, Homo sapiens
tcttggccacgtgttggtgaattt

SEQ ID NO: 6463 - DNA, 20 bp, Homo sapiens
agcaccattccttgaatgcc

SEQ ID NO: 6464 - DNA, 19 bp, Homo sapiens
tgattttctggcgttgggc

SEQ ID NO: 6465 - DNA, 16 bp, Homo sapiens
caaggaggagggcagg

SEQ ID NO: 6466 - DNA, 24 bp, Homo sapiens
agaggaaaactgcaagtctgcttt

SEQ ID NO: 6467 - DNA, 16 bp, Homo sapiens
tgtgtgtgtctgagcc

SEQ ID NO: 6468 - DNA, 16 bp, Homo sapiens
caagttccctgccggc

SEQ ID NO: 6469 - DNA, 24 bp, Homo sapiens
tctaaggaaaaatgttaagatcag

SEQ ID NO: 6470 - DNA, 19 bp, Homo sapiens
ctgccaggtgacataaggg

SEQ ID NO: 6471 - DNA, 19 bp, Homo sapiens
acttaccatgctgagtacg

SEQ ID NO: 6472 - DNA, 19 bp, Homo sapiens
cctggaggagcctctggat

SEQ ID NO: 6473 - DNA, 22 bp, Homo sapiens
aacagtccccgtaaccttatgt

SEQ ID NO: 6474 - DNA, 16 bp, Homo sapiens
ccaggcggtggcggtg

SEQ ID NO: 6475 - DNA, 22 bp, Homo sapiens
gaaatggcgggagaaggtgtta

SEQ ID NO: 6476 - DNA, 19 bp, Homo sapiens
cactctctgaagaggcgat

SEQ ID NO: 6477 - DNA, 20 bp, Homo sapiens
accatcaggaatgaataccc

SEQ ID NO: 6478 - DNA, 20 bp, Homo sapiens
gccactatgcccagagaaac

SEQ ID NO: 6479 - DNA, 17 bp, Homo sapiens
ggactggtcctggctgt

SEQ ID NO: 6480 - DNA, 22 bp, Homo sapiens
gtcttgccttcccgtatttagc

SEQ ID NO: 6481 - DNA, 20 bp, Homo sapiens
ctgacataggggcggatcgc

SEQ ID NO: 6482 - DNA, 21 bp, Homo sapiens
ctacatggggtgcttggacac

SEQ ID NO: 6483 - DNA, 19 bp, Homo sapiens
ccagccagtaggatctgtc

SEQ ID NO: 6484 - DNA, 23 bp, Homo sapiens
ctccagatttcagaacacgtatc

SEQ ID NO: 6485 - DNA, 24 bp, Homo sapiens
atgttgcagtaggcaaagggcagc

SEQ ID NO: 6486 - DNA, 17 bp, Homo sapiens
caggaccagggaggtgt

SEQ ID NO: 6487 - DNA, 24 bp, Homo sapiens
aaaggattagctgagaatgaccat

SEQ ID NO: 6488 - DNA, 17 bp, Homo sapiens
ccaggctctggactggg

SEQ ID NO: 6489 - DNA, 23 bp, Homo sapiens
taaggttagtgatcatttaaggt

SEQ ID NO: 6490 - DNA, 19 bp, Homo sapiens
cctcctggttctccacagt

SEQ ID NO: 6491 - DNA, 19 bp, Homo sapiens
gcaatggagatgggcgatc

SEQ ID NO: 6492 - DNA, 17 bp, Homo sapiens
ctggtcccattggggat

SEQ ID NO: 6493 - DNA, 19 bp, Homo sapiens
gcccttccaggtataacag

SEQ ID NO: 6494 - DNA, 23 bp, Homo sapiens
aacatatttgttaaaccaaaccc

SEQ ID NO: 6495 - DNA, 17 bp, Homo sapiens
ctggtccgtctgactgt

SEQ ID NO: 6496 - DNA, 18 bp, Homo sapiens
gtcatgctcccctctgct

SEQ ID NO: 6497 - DNA, 24 bp, Homo sapiens
caaaccctttgggcccaggatccc

SEQ ID NO: 6498 - DNA, 23 bp, Homo sapiens
ctcattgtttctgtctctgatac

SEQ ID NO: 6499 - DNA, 16 bp, Homo sapiens
gggtctcctgggcctc

SEQ ID NO: 6500 - DNA, 24 bp, Homo sapiens
agtttggaaagccacttgagagat

SEQ ID NO: 6501 - DNA, 21 bp, Homo sapiens
atcataaacttttgtgcaggg

SEQ ID NO: 6502 - DNA, 24 bp, Homo sapiens
tgtcagagaaaagaggagtgactg

SEQ ID NO: 6503 - DNA, 22 bp, Homo sapiens
tacggtataagcacggtaaatg

SEQ ID NO: 6504 - DNA, 16 bp, Homo sapiens
ctttacgtccgggagg

SEQ ID NO: 6505 - DNA, 22 bp, Homo sapiens
taaatgagctgatgcattcagt

SEQ ID NO: 6506 - DNA, 18 bp, Homo sapiens
catccagcccaggctctc

SEQ ID NO: 6507 - DNA, 16 bp, Homo sapiens
tggaatgagaggcccc

SEQ ID NO: 6508 - DNA, 24 bp, Homo sapiens
aaattgcaaagggaaagacatgct

SEQ ID NO: 6509 - DNA, 17 bp, Homo sapiens
cgaatcccaggccttcc

SEQ ID NO: 6510 - DNA, 24 bp, Homo sapiens
aataaaagatctagaatttcattt

SEQ ID NO: 6511 - DNA, 17 bp, Homo sapiens
acacaagcggtgattcc

SEQ ID NO: 6512 - DNA, 21 bp, Homo sapiens
catacctggtcctgaggggcc

SEQ ID NO: 6513 - DNA, 24 bp, Homo sapiens
tcagaagtccaactttaaccagag

SEQ ID NO: 6514 - DNA, 17 bp, Homo sapiens
cctggcgccccaggaag

SEQ ID NO: 6515 - DNA, 24 bp, Homo sapiens
gaatctttacaaacatttatactg

SEQ ID NO: 6516 - DNA, 19 bp, Homo sapiens
gtggccccggttcacctga

SEQ ID NO: 6517 - DNA, 19 bp, Homo sapiens
tccctctaggtcccagagg

SEQ ID NO: 6518 - DNA, 24 bp, Homo sapiens
caaaacactgcagcttaatatcct

SEQ ID NO: 6519 - DNA, 16 bp, Homo sapiens
aaatctctttccaccc

SEQ ID NO: 6520 - DNA, 22 bp, Homo sapiens
ctcacacatacagaggaaaaag

SEQ ID NO: 6521 - DNA, 21 bp, Homo sapiens
cattgatgctgcctcaaatta

SEQ ID NO: 6522 - DNA, 23 bp, Homo sapiens
attaccaattttatagcaaagct

SEQ ID NO: 6523 - DNA, 16 bp, Homo sapiens
gaaaagggcccactgg

SEQ ID NO: 6524 - DNA, 23 bp, Homo sapiens
actcttaatataagaaaagggct

SEQ ID NO: 6525 - DNA, 17 bp, Homo sapiens
ccgcagggaccacatgg

SEQ ID NO: 6526 - DNA, 20 bp, Homo sapiens
actttctgaacgatgatcat

SEQ ID NO: 6527 - DNA, 20 bp, Homo sapiens
tgtctcattccagtgccctc

SEQ ID NO: 6528 - DNA, 20 bp, Homo sapiens
ggaagctcacccggaagacc

SEQ ID NO: 6529 - DNA, 22 bp, Homo sapiens
attttgttggagtgaatctctg

SEQ ID NO: 6530 - DNA, 24 bp, Homo sapiens
ttctctccaggtggcccaggaaat

SEQ ID NO: 6531 - DNA, 18 bp, Homo sapiens
aagcctcacagaagaagg

SEQ ID NO: 6532 - DNA, 18 bp, Homo sapiens
aaagatggccagaaaggt

SEQ ID NO: 6533 - DNA, 24 bp, Homo sapiens
acttcaggactctttggggaaata

SEQ ID NO: 6534 - DNA, 16 bp, Homo sapiens
aggtccccctggccca

SEQ ID NO: 6535 - DNA, 24 bp, Homo sapiens
gaaatagaaatggcggcacagtac

SEQ ID NO: 6536 - DNA, 18 bp, Homo sapiens
cctgggagtgttgacctt

SEQ ID NO: 6537 - DNA, 24 bp, Homo sapiens
acttaacggaacaacattcatacc

SEQ ID NO: 6538 - DNA, 24 bp, Homo sapiens
acattcgtctttgactaaaagaat

SEQ ID NO: 6539 - DNA, 23 bp, Homo sapiens
aagcctttgtatcctggagggcc

SEQ ID NO: 6540 - DNA, 22 bp, Homo sapiens
ttgcaagtcattgaattgtttt

SEQ ID NO: 6541 - DNA, 18 bp, Homo sapiens
acctggctcccctctcag

SEQ ID NO: 6542 - DNA, 24 bp, Homo sapiens
gattcattctatttcatttctgtt

SEQ ID NO: 6543 - DNA, 19 bp, Homo sapiens
tggagatcagggacctcct

SEQ ID NO: 6544 - DNA, 23 bp, Homo sapiens
ctgccaagctgatggggggctgc

SEQ ID NO: 6545 - DNA, 16 bp, Homo sapiens
tggtcctgcaggtgcc

SEQ ID NO: 6546 - DNA, 22 bp, Homo sapiens
cattcctccagagctggcagca

SEQ ID NO: 6547 - DNA, 21 bp, Homo sapiens
aaaccttccaaatgcaatgag

SEQ ID NO: 6548 - DNA, 20 bp, Homo sapiens
tcatacctcttgggccatca

SEQ ID NO: 6549 - DNA, 16 bp, Homo sapiens
cccccaggtaagctgt

SEQ ID NO: 6550 - DNA, 23 bp, Homo sapiens
ggaatgtccttaggagctcttcc

SEQ ID NO: 6551 - DNA, 16 bp, Homo sapiens
agaccctgggagccca

SEQ ID NO: 6552 - DNA, 21 bp, Homo sapiens
aagaagagacatgttcacatg

SEQ ID NO: 6553 - DNA, 21 bp, Homo sapiens
ttaaggtttgcatgatgtggg

SEQ ID NO: 6554 - DNA, 19 bp, Homo sapiens
gaaagaagggcaaagcatg

SEQ ID NO: 6555 - DNA, 24 bp, Homo sapiens
ttttcaggcactataacagggaca

SEQ ID NO: 6556 - DNA, 24 bp, Homo sapiens
ccacgaggacctggaggagagatt

SEQ ID NO: 6557 - DNA, 18 bp, Homo sapiens
agttgttggtgtctgcag

SEQ ID NO: 6558 - DNA, 23 bp, Homo sapiens
aggtattcccactggaccaggtg

SEQ ID NO: 6559 - DNA, 19 bp, Homo sapiens
agctccaatagtgtgtctc

SEQ ID NO: 6560 - DNA, 23 bp, Homo sapiens
tttcaggtccctccggatcacct

SEQ ID NO: 6561 - DNA, 17 bp, Homo sapiens
agtgcagaaataccagg

SEQ ID NO: 6562 - DNA, 19 bp, Homo sapiens
tagagtgagtaccggtggc

SEQ ID NO: 6563 - DNA, 24 bp, Homo sapiens
cagtctgttacgaatcgattaggt

SEQ ID NO: 6564 - DNA, 19 bp, Homo sapiens
ctcagagctgtttgctggc

SEQ ID NO: 6565 - DNA, 24 bp, Homo sapiens
acctttcaatccatgcaagccgtt

SEQ ID NO: 6566 - DNA, 22 bp, Homo sapiens
tccagggggatccagggatacc

SEQ ID NO: 6567 - DNA, 19 bp, Homo sapiens
cacctacggaaaagagtgg

SEQ ID NO: 6568 - DNA, 16 bp, Homo sapiens
gggctgaggggacagc

SEQ ID NO: 6569 - DNA, 23 bp, Homo sapiens
aaaaacaccatcaatttgccctc

SEQ ID NO: 6570 - DNA, 23 bp, Homo sapiens
atgtaattcatttattatctggc

SEQ ID NO: 6571 - DNA, 22 bp, Homo sapiens
tgacttaccttttattcccgga

SEQ ID NO: 6572 - DNA, 22 bp, Homo sapiens
aagtaattagacagtgttctcc

SEQ ID NO: 6573 - DNA, 18 bp, Homo sapiens
tctcccatttctcctggc

SEQ ID NO: 6574 - DNA, 23 bp, Homo sapiens
tcctcctgaatttaaatgtattt

SEQ ID NO: 6575 - DNA, 19 bp, Homo sapiens
tcctctggaccaccagggt

SEQ ID NO: 6576 - DNA, 22 bp, Homo sapiens
gacctatccaaagtcacaggtc

SEQ ID NO: 6577 - DNA, 17 bp, Homo sapiens
agggcttgcctggtatt

SEQ ID NO: 6578 - DNA, 20 bp, Homo sapiens
agactggtggtttctgaaac

SEQ ID NO: 6579 - DNA, 20 bp, Homo sapiens
acggcaactctgatgtttga

SEQ ID NO: 6580 - DNA, 20 bp, Homo sapiens
tcctttcaaggtacctgggc

SEQ ID NO: 6581 - DNA, 24 bp, Homo sapiens
aaagtaaggatagaaaagaatagg

SEQ ID NO: 6582 - DNA, 17 bp, Homo sapiens
ggtgatcctctgggccc

SEQ ID NO: 6583 - DNA, 22 bp, Homo sapiens
gttatcagtttttccttaacgt

SEQ ID NO: 6584 - DNA, 24 bp, Homo sapiens
aagtgtttatatataacccgtttt

SEQ ID NO: 6585 - DNA, 18 bp, Homo sapiens
ggaaacaaaggtgaccct

SEQ ID NO: 6586 - DNA, 20 bp, Homo sapiens
cgatcattgccagctagaag

SEQ ID NO: 6587 - DNA, 20 bp, Homo sapiens
gtcacctgtatgagaccaaa

SEQ ID NO: 6588 - DNA, 25 bp, Homo sapiens
taagaaaaatatgcagctatacctg

SEQ ID NO: 6589 - DNA, 24 bp, Homo sapiens
ttaaaaacactctcctaaaatatc

SEQ ID NO: 6590 - DNA, 18 bp, Homo sapiens
ggtggaccaaagtgactg

SEQ ID NO: 6591 - DNA, 21 bp, Homo sapiens
cttgagtgtttgactgtctaa

SEQ ID NO: 6592 - DNA, 21 bp, Homo sapiens
gtcagggtgagccaggttctc

SEQ ID NO: 6593 - DNA, 22 bp, Homo sapiens
ttgcttatcatgtaaaaggcac

SEQ ID NO: 6594 - DNA, 19 bp, Homo sapiens
gttgtgcatgtgccatttg

SEQ ID NO: 6595 - DNA, 19 bp, Homo sapiens
agatggcttctgtatctcc

SEQ ID NO: 6596 - DNA, 19 bp, Homo sapiens
cgttaccactgcagattac

SEQ ID NO: 6597 - DNA, 24 bp, Homo sapiens
aattcctgaaaatccagggggacc

SEQ ID NO: 6598 - DNA, 21 bp, Homo sapiens
gggttcattggttttccagga

SEQ ID NO: 6599 - DNA, 24 bp, Homo sapiens
ctacaccttacattctaaaagcca

SEQ ID NO: 6600 - DNA, 22 bp, Homo sapiens
ggtgagaaaggtcagccagggc

SEQ ID NO: 6601 - DNA, 24 bp, Homo sapiens
gctccttacggacatcctaagaac

SEQ ID NO: 6602 - DNA, 22 bp, Homo sapiens
atgcaagggagaagaggagagc

SEQ ID NO: 6603 - DNA, 22 bp, Homo sapiens
cttacctggtcacctggaagtc

SEQ ID NO: 6604 - DNA, 19 bp, Homo sapiens
gcagagacctgtaacactt

SEQ ID NO: 6605 - DNA, 16 bp, Homo sapiens
ctgggggtccaggagg

SEQ ID NO: 6606 - DNA, 23 bp, Homo sapiens
cctttggctttatctcctaaaag

SEQ ID NO: 6607 - DNA, 20 bp, Homo sapiens
aaatccaggtggtccgtatc

SEQ ID NO: 6608 - DNA, 19 bp, Homo sapiens
gccagaaatgatcaggaag

SEQ ID NO: 6609 - DNA, 22 bp, Homo sapiens
aagagcaaaactccatctcaaa

SEQ ID NO: 6610 - DNA, 20 bp, Homo sapiens
ggagatgaaggagaaatggc

SEQ ID NO: 6611 - DNA, 24 bp, Homo sapiens
gggaaagttgcctaacaaatgtga

SEQ ID NO: 6612 - DNA, 22 bp, Homo sapiens
tgtgatgttcctgttcattttg

SEQ ID NO: 6613 - DNA, 20 bp, Homo sapiens
gtttacctctttctcctggg

SEQ ID NO: 6614 - DNA, 20 bp, Homo sapiens
ttaagtgggaatttgcgatt

SEQ ID NO: 6615 - DNA, 23 bp, Homo sapiens
tgttcccttttgtgaaatgatag

SEQ ID NO: 6616 - DNA, 19 bp, Homo sapiens
ctttaggaaatcagccaac

SEQ ID NO: 6617 - DNA, 17 bp, Homo sapiens
ctggagaccggggactg

SEQ ID NO: 6618 - DNA, 23 bp, Homo sapiens
aataccatagaactaaaaggagg

SEQ ID NO: 6619 - DNA, 19 bp, Homo sapiens
ctggtgcagagggatgtcc

SEQ ID NO: 6620 - DNA, 24 bp, Homo sapiens
gagatcacatttctaggtttggat

SEQ ID NO: 6621 - DNA, 16 bp, Homo sapiens
ggaccccgggggctgc

SEQ ID NO: 6622 - DNA, 20 bp, Homo sapiens
ttatttacctttggcccctc

SEQ ID NO: 6623 - DNA, 24 bp, Homo sapiens
ctcccacccctgaaaaaataaata

SEQ ID NO: 6624 - DNA, 24 bp, Homo sapiens
ccttctctccaggttctccctttg

SEQ ID NO: 6625 - DNA, 19 bp, Homo sapiens
atgagccgagatcgtgcca

SEQ ID NO: 6626 - DNA, 24 bp, Homo sapiens
ccgggaaaacctgggaaaccaggc

SEQ ID NO: 6627 - DNA, 24 bp, Homo sapiens
tacagaggacaagagcaagggagg

SEQ ID NO: 6628 - DNA, 17 bp, Homo sapiens
gcctcccaggaatccca

SEQ ID NO: 6629 - DNA, 24 bp, Homo sapiens
ctctttttgtgtggtcatctgtcc

SEQ ID NO: 6630 - DNA, 18 bp, Homo sapiens
ccagctggaatgaaaggc

SEQ ID NO: 6631 - DNA, 24 bp, Homo sapiens
atgggaggacatcatggaaaaagc

SEQ ID NO: 6632 - DNA, 24 bp, Homo sapiens
tcactgtggtttgtcttaggtgct

SEQ ID NO: 6633 - DNA, 24 bp, Homo sapiens
tagcccatcatctccaaagggacc

SEQ ID NO: 6634 - DNA, 24 bp, Homo sapiens
aagctactgtatatttttcctgct

SEQ ID NO: 6635 - DNA, 21 bp, Homo sapiens
tgggagtccggggaggccttt

SEQ ID NO: 6636 - DNA, 24 bp, Homo sapiens
ggaaagttgctactgttattttag

SEQ ID NO: 6637 - DNA, 16 bp, Homo sapiens
tcccacctggagcacc

SEQ ID NO: 6638 - DNA, 16 bp, Homo sapiens
gggactccctgggtat

SEQ ID NO: 6639 - DNA, 23 bp, Homo sapiens
catgagtaacgaagtcctttgtc

SEQ ID NO: 6640 - DNA, 20 bp, Homo sapiens
tttccaggtgtcccaggtcc

SEQ ID NO: 6641 - DNA, 23 bp, Homo sapiens
aaaaggggagcttatttaattgt

SEQ ID NO: 6642 - DNA, 21 bp, Homo sapiens
gcattcctggattcctaggtc

SEQ ID NO: 6643 - DNA, 20 bp, Homo sapiens
tacctgggctacctggatac

SEQ ID NO: 6644 - DNA, 23 bp, Homo sapiens
ccatctgtatagttttttgtcat

SEQ ID NO: 6645 - DNA, 21 bp, Homo sapiens
cacctctttcacaggaatggc

SEQ ID NO: 6646 - DNA, 20 bp, Homo sapiens
ttcaggatgaaaatgttcac

SEQ ID NO: 6647 - DNA, 22 bp, Homo sapiens
ctctctgcctttgggacctttg

SEQ ID NO: 6648 - DNA, 22 bp, Homo sapiens
tcataaggaactcattacatct

SEQ ID NO: 6649 - DNA, 16 bp, Homo sapiens
cccagaggtgatccgg

SEQ ID NO: 6650 - DNA, 24 bp, Homo sapiens
gagggaaaacacttgggtaaactg

SEQ ID NO: 6651 - DNA, 16 bp, Homo sapiens
ggtcacctgggacccc

SEQ ID NO: 6652 - DNA, 19 bp, Homo sapiens
gtgacctgttccaaaactg

SEQ ID NO: 6653 - DNA, 24 bp, Homo sapiens
gttgggcccccaggccctcccggc

SEQ ID NO: 6654 - DNA, 21 bp, Homo sapiens
tcataccttcagcccctggac

SEQ ID NO: 6655 - DNA, 23 bp, Homo sapiens
ttttcgtggtgacatgggagatc

SEQ ID NO: 6656 - DNA, 15 bp, Homo sapiens
tctttcccgggggtc

SEQ ID NO: 6657 - DNA, 24 bp, Homo sapiens
tatgtattggttctatacttgcac

SEQ ID NO: 6658 - DNA, 18 bp, Homo sapiens
gaccattcactcctggtg

SEQ ID NO: 6659 - DNA, 24 bp, Homo sapiens
ttaattttagtaagtacccctgtg

SEQ ID NO: 6660 - DNA, 18 bp, Homo sapiens
ttcacctccaaaacccgg

SEQ ID NO: 6661 - DNA, 20 bp, Homo sapiens
aacagcggaaataccaggtc

SEQ ID NO: 6662 - DNA, 24 bp, Homo sapiens
accatttccctattatctagggat

SEQ ID NO: 6663 - DNA, 16 bp, Homo sapiens
tgcccctgggctgagt

SEQ ID NO: 6664 - DNA, 21 bp, Homo sapiens
ggtagaaatgttaaaaagttc

SEQ ID NO: 6665 - DNA, 25 bp, Homo sapiens
tttgttttattgagtctgtgttttg

SEQ ID NO: 6666 - DNA, 18 bp, Homo sapiens
tcactgaccaggtggacc

SEQ ID NO: 6667 - DNA, 23 bp, Homo sapiens
tctaaaaggacttaacatagact

SEQ ID NO: 6668 - DNA, 21 bp, Homo sapiens
atgcccatctgaaccactcag

SEQ ID NO: 6669 - DNA, 24 bp, Homo sapiens
acttacaatatatttttgtaaatc

SEQ ID NO: 6670 - DNA, 24 bp, Homo sapiens
tacaaatgctgttttcccctatcc

SEQ ID NO: 6671 - DNA, 21 bp, Homo sapiens
gcaggtgacacaatttcttgc

SEQ ID NO: 6672 - DNA, 20 bp, Homo sapiens
ctgaggattcactcttggtt

SEQ ID NO: 6673 - DNA, 19 bp, Homo sapiens
tgagacagactcacattgc

SEQ ID NO: 6674 - DNA, 21 bp, Homo sapiens
aagacagtaacttctcattga

SEQ ID NO: 6675 - DNA, 22 bp, Homo sapiens
ttctttttctttgacttctgca

SEQ ID NO: 6676 - DNA, 20 bp, Homo sapiens
atgcctcccagggtaggtta

SEQ ID NO: 6677 - DNA, 17 bp, Homo sapiens
ggccctgatggcttgaa

SEQ ID NO: 6678 - DNA, 24 bp, Homo sapiens
taaaatgtacactactcgggtgac

SEQ ID NO: 6679 - DNA, 18 bp, Homo sapiens
aggactgggatttcctgg

SEQ ID NO: 6680 - DNA, 24 bp, Homo sapiens
cttccacataagaaaaataaacac

SEQ ID NO: 6681 - DNA, 20 bp, Homo sapiens
ggatttcctggacctctggg

SEQ ID NO: 6682 - DNA, 24 bp, Homo sapiens
aaattacctttctgacccttcaag

SEQ ID NO: 6683 - DNA, 24 bp, Homo sapiens
gttggtaattgactcatgacataa

SEQ ID NO: 6684 - DNA, 17 bp, Homo sapiens
ctgggtggcctcgctct

SEQ ID NO: 6685 - DNA, 18 bp, Homo sapiens
tgcgtgtgtttctgtaac

SEQ ID NO: 6686 - DNA, 17 bp, Homo sapiens
tgctttgcctggggggc

SEQ ID NO: 6687 - DNA, 27 bp, Homo sapiens
tatctaagttatttattttaaacttac

SEQ ID NO: 6688 - DNA, 17 bp, Homo sapiens
aaaaggggatccaggac

SEQ ID NO: 6689 - DNA, 23 bp, Homo sapiens
gtgccaaaagtgactctgattta

SEQ ID NO: 6690 - DNA, 16 bp, Homo sapiens
gggcccccaggatttc

SEQ ID NO: 6691 - DNA, 24 bp, Homo sapiens
agagaaaggggaaatagttgtttg

SEQ ID NO: 6692 - DNA, 20 bp, Homo sapiens
cctctgctgataagagcttg

SEQ ID NO: 6693 - DNA, 23 bp, Homo sapiens
agaattctacatactggaggtcc

SEQ ID NO: 6694 - DNA, 23 bp, Homo sapiens
aaactaccaacccagaatcaagg

SEQ ID NO: 6695 - DNA, 17 bp, Homo sapiens
gatcctggctgccctgg

SEQ ID NO: 6696 - DNA, 18 bp, Homo sapiens
tctcccctctggctttgg

SEQ ID NO: 6697 - DNA, 24 bp, Homo sapiens
ttatgaagggcaggaagtattttt

SEQ ID NO: 6698 - DNA, 19 bp, Homo sapiens
ggaaagcatggtgcctctg

SEQ ID NO: 6699 - DNA, 19 bp, Homo sapiens
tcacaggggaaattactgc

SEQ ID NO: 6700 - DNA, 21 bp, Homo sapiens
tacagatgtaactgttgatcc

SEQ ID NO: 6701 - DNA, 23 bp, Homo sapiens
gggagttaagtgattgattatgc

SEQ ID NO: 6702 - DNA, 19 bp, Homo sapiens
agaatgccaagctagaatc

SEQ ID NO: 6703 - DNA, 24 bp, Homo sapiens
tcgcccctttgttgccaggtggtc

SEQ ID NO: 6704 - DNA, 19 bp, Homo sapiens
ctccagggctaccagtgag

SEQ ID NO: 6705 - DNA, 18 bp, Homo sapiens
ccacccatacagaactgc

SEQ ID NO: 6706 - DNA, 16 bp, Homo sapiens
ggggctccctggctgg

SEQ ID NO: 6707 - DNA, 24 bp, Homo sapiens
gtcttgggtagtatctttatggta

SEQ ID NO: 6708 - DNA, 16 bp, Homo sapiens
ccatgggcccccctgg

SEQ ID NO: 6709 - DNA, 21 bp, Homo sapiens
gatgactggtaagaggtactc

SEQ ID NO: 6710 - DNA, 23 bp, Homo sapiens
caggaaatatgacaaatctgcca

SEQ ID NO: 6711 - DNA, 21 bp, Homo sapiens
tcaccttttgttccaagccag

SEQ ID NO: 6712 - DNA, 24 bp, Homo sapiens
gttcttcatttatgctattggttt

SEQ ID NO: 6713 - DNA, 17 bp, Homo sapiens
caggaagtcctggaggg

SEQ ID NO: 6714 - DNA, 16 bp, Homo sapiens
ccagcccccacagcac

SEQ ID NO: 6715 - DNA, 16 bp, Homo sapiens
cccaggaggaagaggc

SEQ ID NO: 6716 - DNA, 22 bp, Homo sapiens
actctagtgggtgactaaggtg

SEQ ID NO: 6717 - DNA, 23 bp, Homo sapiens
cctccttgacagtgatatactgt

SEQ ID NO: 6718 - DNA, 18 bp, Homo sapiens
cccccgatcatccatgta

SEQ ID NO: 6719 - DNA, 26 bp, Homo sapiens
agtcacttattctatagaagacagtc

SEQ ID NO: 6720 - DNA, 23 bp, Homo sapiens
ctacttgcctttttctccttttg

SEQ ID NO: 6721 - DNA, 24 bp, Homo sapiens
caagggcgcaaagaatggggttgg

SEQ ID NO: 6722 - DNA, 20 bp, Homo sapiens
ttgtggtccggggttcccaa

SEQ ID NO: 6723 - DNA, 17 bp, Homo sapiens
aggcctgcagggcctcc

SEQ ID NO: 6724 - DNA, 20 bp, Homo sapiens
caacttagctcatgaaacat

SEQ ID NO: 6725 - DNA, 18 bp, Homo sapiens
gagacctgattctgctcc

SEQ ID NO: 6726 - DNA, 24 bp, Homo sapiens
gctttcttagtggcactgcaaata

SEQ ID NO: 6727 - DNA, 16 bp, Homo sapiens
tgggccacaaggattt

SEQ ID NO: 6728 - DNA, 20 bp, Homo sapiens
actttaccacttgatcctgg

SEQ ID NO: 6729 - DNA, 22 bp, Homo sapiens
gagacgtttactctgagagtat

SEQ ID NO: 6730 - DNA, 17 bp, Homo sapiens
tggcttccctggttttc

SEQ ID NO: 6731 - DNA, 23 bp, Homo sapiens
tctttccctttaaaaaattcgat

SEQ ID NO: 6732 - DNA, 23 bp, Homo sapiens
aagcccaggaagaccaggaaatc

SEQ ID NO: 6733 - DNA, 19 bp, Homo sapiens
tctttctgtgtctggctta

SEQ ID NO: 6734 - DNA, 16 bp, Homo sapiens
cagaccaggggaagcc

SEQ ID NO: 6735 - DNA, 24 bp, Homo sapiens
cacaggcatcggtattattttaca

SEQ ID NO: 6736 - DNA, 18 bp, Homo sapiens
ttccctggccgctatgga

SEQ ID NO: 6737 - DNA, 24 bp, Homo sapiens
aagctactggtgctgatgatgatg

SEQ ID NO: 6738 - DNA, 23 bp, Homo sapiens
taaaatgcacataccatttgttt

SEQ ID NO: 6739 - DNA, 18 bp, Homo sapiens
catccgtacctgcacagg

SEQ ID NO: 6740 - DNA, 24 bp, Homo sapiens
aaaatgtctcctaattatacttta

SEQ ID NO: 6741 - DNA, 19 bp, Homo sapiens
caacatcccctgtttctcc

SEQ ID NO: 6742 - DNA, 19 bp, Homo sapiens
caaggcggttcacatttaa

SEQ ID NO: 6743 - DNA, 17 bp, Homo sapiens
ggtgactccacctcttc

SEQ ID NO: 6744 - DNA, 19 bp, Homo sapiens
ctacagttcgtgcattcag

SEQ ID NO: 6745 - DNA, 24 bp, Homo sapiens
agtgaatgaatgaatgatttcagg

SEQ ID NO: 6746 - DNA, 18 bp, Homo sapiens
ctgtcctggccactcaac

SEQ ID NO: 6747 - DNA, 22 bp, Homo sapiens
gcacatgatcgttctaatactg

SEQ ID NO: 6748 - DNA, 20 bp, Homo sapiens
ggaacacaaacctttgagtg

SEQ ID NO: 6749 - DNA, 20 bp, Homo sapiens
tggatgcttcatttctctag

SEQ ID NO: 6750 - DNA, 24 bp, Homo sapiens
tgccctcgatttccaggatccccc

SEQ ID NO: 6751 - DNA, 20 bp, Homo sapiens
tggattaattggcccaaagg

SEQ ID NO: 6752 - DNA, 24 bp, Homo sapiens
gtaacaattgaataaaaaattaac

SEQ ID NO: 6753 - DNA, 22 bp, Homo sapiens
tttttttaaggcatgtttgtgc

SEQ ID NO: 6754 - DNA, 24 bp, Homo sapiens
cctggcaatacttctaaaaataaa

SEQ ID NO: 6755 - DNA, 18 bp, Homo sapiens
tgggcaatgtgttgctta

SEQ ID NO: 6756 - DNA, 24 bp, Homo sapiens
tattaaaataggctcactttttac

SEQ ID NO: 6757 - DNA, 22 bp, Homo sapiens
agcacaagattgtctgatgcaa

SEQ ID NO: 6758 - DNA, 24 bp, Homo sapiens
ccaaccagtcctagttctccctac

SEQ ID NO: 6759 - DNA, 19 bp, Homo sapiens
tccaggttttccaggatta

SEQ ID NO: 6760 - DNA, 23 bp, Homo sapiens
cacagctaaatcctgcaatccat

SEQ ID NO: 6761 - DNA, 20 bp, Homo sapiens
tctgtttatcctgatttttg

SEQ ID NO: 6762 - DNA, 23 bp, Homo sapiens
gcacgcaacagtacaacttctga

SEQ ID NO: 6763 - DNA, 23 bp, Homo sapiens
atccatggaacaatttgataagg

SEQ ID NO: 6764 - DNA, 23 bp, Homo sapiens
ctctataatgaggtacatttacc

SEQ ID NO: 6765 - DNA, 24 bp, Homo sapiens
ggaatctattttatatttatttcc

SEQ ID NO: 6766 - DNA, 20 bp, Homo sapiens
atttccagggcctcgggtaa

SEQ ID NO: 6767 - DNA, 23 bp, Homo sapiens
ttccataattctcgtccaaaatg

SEQ ID NO: 6768 - DNA, 22 bp, Homo sapiens
aatgttgtcatctcttaaaggg

SEQ ID NO: 6769 - DNA, 21 bp, Homo sapiens
ttgtgggactactgacctggt

SEQ ID NO: 6770 - DNA, 22 bp, Homo sapiens
ttccctattgctgaaatattgc

SEQ ID NO: 6771 - DNA, 22 bp, Homo sapiens
ttaacagcaaatgatgcttacc

SEQ ID NO: 6772 - DNA, 20 bp, Homo sapiens
agtagttgttttctttaagc

SEQ ID NO: 6773 - DNA, 20 bp, Homo sapiens
tttgccccaataccagattc

SEQ ID NO: 6774 - DNA, 17 bp, Homo sapiens
aggaccaccaggacgca

SEQ ID NO: 6775 - DNA, 28 bp, Homo sapiens
tattatgataagatagtgaaaaattctg

SEQ ID NO: 6776 - DNA, 28 bp, Homo sapiens
ataagaatagaccaaattatattcattg

SEQ ID NO: 6777 - DNA, 21 bp, Homo sapiens
gaccatgagaaataacatttt

SEQ ID NO: 6778 - DNA, 23 bp, Homo sapiens
agattgtaaaaagagatgatttc

SEQ ID NO: 6779 - DNA, 27 bp, Homo sapiens
aaaaaggtacttaaataaactaccttg

SEQ ID NO: 6780 - DNA, 20 bp, Homo sapiens
gctaattagaacaggtgaag

SEQ ID NO: 6781 - DNA, 21 bp, Homo sapiens
cacctgacttttgtctctata

SEQ ID NO: 6782 - DNA, 24 bp, Homo sapiens
caacttattaaagtaggtttgaaa

SEQ ID NO: 6783 - DNA, 24 bp, Homo sapiens
atcttgcttttttttttaagggtg

SEQ ID NO: 6784 - DNA, 18 bp, Homo sapiens
gccacagatccatgtcaa

SEQ ID NO: 6785 - DNA, 17 bp, Homo sapiens
tacatgggtgaaaacct

SEQ ID NO: 6786 - DNA, 21 bp, Homo sapiens
tgggaattaccttttctcctt

SEQ ID NO: 6787 - DNA, 22 bp, Homo sapiens
tctatgatgtacttgccacaac

SEQ ID NO: 6788 - DNA, 17 bp, Homo sapiens
ggagaaccttgctgacc

SEQ ID NO: 6789 - DNA, 19 bp, Homo sapiens
gggagtaaaggggcaaatg

SEQ ID NO: 6790 - DNA, 22 bp, Homo sapiens
gcaaagaaaagttctcagccat

SEQ ID NO: 6791 - DNA, 26 bp, Homo sapiens
cttttttaaaattcaaaagcaattag

SEQ ID NO: 6792 - DNA, 20 bp, Homo sapiens
ataatcagaacagcctccac

SEQ ID NO: 6793 - DNA, 24 bp, Homo sapiens
caaagtattccatgaactgcaata

SEQ ID NO: 6794 - DNA, 21 bp, Homo sapiens
caagagggaattcttaccggg

SEQ ID NO: 6795 - DNA, 22 bp, Homo sapiens
aatggttgaccactgatatttg

SEQ ID NO: 6796 - DNA, 19 bp, Homo sapiens
cgtccaggtttgaaggtag

SEQ ID NO: 6797 - DNA, 24 bp, Homo sapiens
caattaagacttctggctacacaa

SEQ ID NO: 6798 - DNA, 21 bp, Homo sapiens
ctgatgattgatttgtgtttt

SEQ ID NO: 6799 - DNA, 22 bp, Homo sapiens
agaggaaagccatcattctgac

SEQ ID NO: 6800 - DNA, 20 bp, Homo sapiens
gggtttcctaaataggaccc

SEQ ID NO: 6801 - DNA, 22 bp, Homo sapiens
gatgtatcttgctcatgactgc

SEQ ID NO: 6802 - DNA, 18 bp, Homo sapiens
acagaaaacagcccatcc

SEQ ID NO: 6803 - DNA, 19 bp, Homo sapiens
ggcaggtcccacaggatat

SEQ ID NO: 6804 - DNA, 22 bp, Homo sapiens
gattataatctctcaaacggcc

SEQ ID NO: 6805 - DNA, 19 bp, Homo sapiens
ttttgggtaacagatgcac

SEQ ID NO: 6806 - DNA, 23 bp, Homo sapiens
ttattttcatgtagaatctggtt

SEQ ID NO: 6807 - DNA, 24 bp, Homo sapiens
tgatttctttagaggtttttatcc

SEQ ID NO: 6808 - DNA, 24 bp, Homo sapiens
ctaaccctggctctccaggatatc

SEQ ID NO: 6809 - DNA, 24 bp, Homo sapiens
ttttagggctgcatcaaagctgct

SEQ ID NO: 6810 - DNA, 24 bp, Homo sapiens
atgcttaataatttttgaacaggg

SEQ ID NO: 6811 - DNA, 19 bp, Homo sapiens
tgtggacttaaagcaatgc

SEQ ID NO: 6812 - DNA, 18 bp, Homo sapiens
tagctggctttgctggga

SEQ ID NO: 6813 - DNA, 23 bp, Homo sapiens
gcagttagatgagtccagataat

SEQ ID NO: 6814 - DNA, 19 bp, Homo sapiens
agcatagagcctgctcagg

SEQ ID NO: 6815 - DNA, 18 bp, Homo sapiens
gcatatcccttcctcaat

SEQ ID NO: 6816 - DNA, 20 bp, Homo sapiens
atgatgccatccctgagggt

SEQ ID NO: 6817 - DNA, 17 bp, Homo sapiens
tcagggccatcctgggg

SEQ ID NO: 6818 - DNA, 22 bp, Homo sapiens
tgaagaaaaatcctgtctgagt

SEQ ID NO: 6819 - DNA, 23 bp, Homo sapiens
aaagaaaatactgaaatggtaat

SEQ ID NO: 6820 - DNA, 23 bp, Homo sapiens
aaattttttaacccatcatgatc

SEQ ID NO: 6821 - DNA, 21 bp, Homo sapiens
cttgttaatcatgtcaataat

SEQ ID NO: 6822 - DNA, 21 bp, Homo sapiens
tgaacactgaatttccttttt

SEQ ID NO: 6823 - DNA, 17 bp, Homo sapiens
tccttatcccccagcca

SEQ ID NO: 6824 - DNA, 16 bp, Homo sapiens
tggctcaagaggtgac

SEQ ID NO: 6825 - DNA, 24 bp, Homo sapiens
ttaactctgtttcttgaatacatc

SEQ ID NO: 6826 - DNA, 24 bp, Homo sapiens
ttataattttgttttctgcagggg

SEQ ID NO: 6827 - DNA, 21 bp, Homo sapiens
tgttaagatgaactgtgggta

SEQ ID NO: 6828 - DNA, 23 bp, Homo sapiens
gagtattcatattgcataacctt

SEQ ID NO: 6829 - DNA, 22 bp, Homo sapiens
ctcttcctcctggaaaccctgg

SEQ ID NO: 6830 - DNA, 21 bp, Homo sapiens
aagagaaagtttcacaaaact

SEQ ID NO: 6831 - DNA, 19 bp, Homo sapiens
ctctgggtccaggaggccc

SEQ ID NO: 6832 - DNA, 24 bp, Homo sapiens
gtggtatatatagcaaatatttgc

SEQ ID NO: 6833 - DNA, 23 bp, Homo sapiens
atctctttgttttattttctggg

SEQ ID NO: 6834 - DNA, 25 bp, Homo sapiens
atattttatgtatatatacatgtgg

SEQ ID NO: 6835 - DNA, 22 bp, Homo sapiens
aagatgagtaattaattgttac

SEQ ID NO: 6836 - DNA, 21 bp, Homo sapiens
aaagtggagaaaatttaggga

SEQ ID NO: 6837 - DNA, 20 bp, Homo sapiens
ggcttttagactcatcatgt

SEQ ID NO: 6838 - DNA, 23 bp, Homo sapiens
aggaacaccagttggaccctaaa

SEQ ID NO: 6839 - DNA, 17 bp, Homo sapiens
gcaggggacaaaggaga

SEQ ID NO: 6840 - DNA, 24 bp, Homo sapiens
tgcagtgagctgagatcccaccac

SEQ ID NO: 6841 - DNA, 17 bp, Homo sapiens
ggacccattgggctttc

SEQ ID NO: 6842 - DNA, 23 bp, Homo sapiens
aaaaaaacaaaaacaaaaaatgg

SEQ ID NO: 6843 - DNA, 23 bp, Homo sapiens
aatcttccttctcagggtccacc

SEQ ID NO: 6844 - DNA, 23 bp, Homo sapiens
ataagatgtggcttaccttatct

SEQ ID NO: 6845 - DNA, 24 bp, Homo sapiens
agtatatgtttgtgttagaagaca

SEQ ID NO: 6846 - DNA, 24 bp, Homo sapiens
tcccctctcattcctttctctcct

SEQ ID NO: 6847 - DNA, 24 bp, Homo sapiens
atttgtttctattattagagttgt

SEQ ID NO: 6848 - DNA, 16 bp, Homo sapiens
ctgtggccctggtggt

SEQ ID NO: 6849 - DNA, 21 bp, Homo sapiens
tgccactgtgttcctgaaaag

SEQ ID NO: 6850 - DNA, 22 bp, Homo sapiens
gaaaaacttcggctgtgaaata

SEQ ID NO: 6851 - DNA, 21 bp, Homo sapiens
actttccagagtggaaagaaa

SEQ ID NO: 6852 - DNA, 29 bp, Homo sapiens
aatctgggattactttatattaaatattc

SEQ ID NO: 6853 - DNA, 20 bp, Homo sapiens
tgtatgtgttatgcacgtag

SEQ ID NO: 6854 - DNA, 24 bp, Homo sapiens
ttggtctttacatcacttacccga

SEQ ID NO: 6855 - DNA, 22 bp, Homo sapiens
atgtcatgattagtcttttctt

SEQ ID NO: 6856 - DNA, 20 bp, Homo sapiens
ttcctccacaaggaccaatg

SEQ ID NO: 6857 - DNA, 23 bp, Homo sapiens
acaatataaaagaaatcttagag

SEQ ID NO: 6858 - DNA, 20 bp, Homo sapiens
tctgcgtttttgtttttctg

SEQ ID NO: 6859 - DNA, 20 bp, Homo sapiens
cccagagggtgatttctttg

SEQ ID NO: 6860 - DNA, 26 bp, Homo sapiens
tagctttctggaattaattcctttac

SEQ ID NO: 6861 - DNA, 18 bp, Homo sapiens
caacgcaaccagagctag

SEQ ID NO: 6862 - DNA, 18 bp, Homo sapiens
cactgatgacaagtcggc

SEQ ID NO: 6863 - DNA, 22 bp, Homo sapiens
agaatgagtataagtgacctac

SEQ ID NO: 6864 - DNA, 21 bp, Homo sapiens
tccttcagattgaccaagtcc

SEQ ID NO: 6865 - DNA, 20 bp, Homo sapiens
acccttagctttctggaatg

SEQ ID NO: 6866 - DNA, 19 bp, Homo sapiens
aagtactaagacttgcctg

SEQ ID NO: 6867 - DNA, 23 bp, Homo sapiens
acatccatagaacaaacattgag

SEQ ID NO: 6868 - DNA, 18 bp, Homo sapiens
agaacctcacttgtcaac

SEQ ID NO: 6869 - DNA, 22 bp, Homo sapiens
aggatactcaccagggacctgt

SEQ ID NO: 6870 - DNA, 19 bp, Homo sapiens
gcatgctgtgttttaagtg

SEQ ID NO: 6871 - DNA, 17 bp, Homo sapiens
tgtgcagagaccacatc

SEQ ID NO: 6872 - DNA, 16 bp, Homo sapiens
gtccgggcgctcatgg

SEQ ID NO: 6873 - DNA, 23 bp, Homo sapiens
cgaccgagccctacaaaacccgc

SEQ ID NO: 6874 - DNA, 16 bp, Homo sapiens
cgccgccgccaggagc

SEQ ID NO: 6875 - DNA, 16 bp, Homo sapiens
cgcgctgcgcaggaga

SEQ ID NO: 6876 - DNA, 20 bp, Homo sapiens
tggaggagggatggaagtgc

SEQ ID NO: 6877 - DNA, 21 bp, Homo sapiens
ccaggctctgagcgcgcgccc

SEQ ID NO: 6878 - DNA, 24 bp, Homo sapiens
ctagcccggcagccgctccactac

SEQ ID NO: 6879 - DNA, 16 bp, Homo sapiens
ctcctgctggtgctcc

SEQ ID NO: 6880 - DNA, 23 bp, Homo sapiens
ccccgcttgctcccttccgctcg

SEQ ID NO: 6881 - DNA, 20 bp, Homo sapiens
tgtctttacagacacaaccc

SEQ ID NO: 6882 - DNA, 24 bp, Homo sapiens
tttctattgatatattgctacaag

SEQ ID NO: 6883 - DNA, 24 bp, Homo sapiens
attagggtttgtttttaccttctc

SEQ ID NO: 6884 - DNA, 21 bp, Homo sapiens
gaaatgcatttgcttttaccc

SEQ ID NO: 6885 - DNA, 21 bp, Homo sapiens
accgatgaaagaagaaggttg

SEQ ID NO: 6886 - DNA, 23 bp, Homo sapiens
acaaaaccctttctctttccctc

SEQ ID NO: 6887 - DNA, 22 bp, Homo sapiens
tatacaattactttaacattgg

SEQ ID NO: 6888 - DNA, 16 bp, Homo sapiens
gggccaaaggggagaa

SEQ ID NO: 6889 - DNA, 16 bp, Homo sapiens
aaccggggggtccagg

SEQ ID NO: 6890 - DNA, 23 bp, Homo sapiens
ccaaggaaaaaacatgcaaagag

SEQ ID NO: 6891 - DNA, 19 bp, Homo sapiens
accttgggtccctgcggtc

SEQ ID NO: 6892 - DNA, 23 bp, Homo sapiens
ttggtgtgtttattgtgggatag

SEQ ID NO: 6893 - DNA, 16 bp, Homo sapiens
ggtaggcaggaagagg

SEQ ID NO: 6894 - DNA, 23 bp, Homo sapiens
gttttaacagggggagaagggct

SEQ ID NO: 6895 - DNA, 19 bp, Homo sapiens
caggagttcaccatgcacc

SEQ ID NO: 6896 - DNA, 24 bp, Homo sapiens
aggtcctgaaggcttgcctggacc

SEQ ID NO: 6897 - DNA, 18 bp, Homo sapiens
agtcctggaaagccctag

SEQ ID NO: 6898 - DNA, 23 bp, Homo sapiens
tgaaataagcaagcaattgaatc

SEQ ID NO: 6899 - DNA, 18 bp, Homo sapiens
gtggactggttggactac

SEQ ID NO: 6900 - DNA, 22 bp, Homo sapiens
tggcatgtgactgagactgggt

SEQ ID NO: 6901 - DNA, 22 bp, Homo sapiens
atacacagtgtactcctttctg

SEQ ID NO: 6902 - DNA, 22 bp, Homo sapiens
tactttttcttttttcacttga

SEQ ID NO: 6903 - DNA, 22 bp, Homo sapiens
ttgacatctaccattacagatt

SEQ ID NO: 6904 - DNA, 24 bp, Homo sapiens
gggttccaaaggtgtaagggttag

SEQ ID NO: 6905 - DNA, 22 bp, Homo sapiens
tcctggcaatccacttattccc

SEQ ID NO: 6906 - DNA, 23 bp, Homo sapiens
agtatttgttttcccaatcgttt

SEQ ID NO: 6907 - DNA, 21 bp, Homo sapiens
tctagctacggatttttccca

SEQ ID NO: 6908 - DNA, 25 bp, Homo sapiens
tatcgcaatggtaaataaatttatg

SEQ ID NO: 6909 - DNA, 21 bp, Homo sapiens
tcagaacacattttcttgcac

SEQ ID NO: 6910 - DNA, 20 bp, Homo sapiens
cccctcctttttcctatgtc

SEQ ID NO: 6911 - DNA, 24 bp, Homo sapiens
ccacacactagtataatataccat

SEQ ID NO: 6912 - DNA, 16 bp, Homo sapiens
agtccgtaaggcccgg

SEQ ID NO: 6913 - DNA, 23 bp, Homo sapiens
tactacttaaccatttaaacaat

SEQ ID NO: 6914 - DNA, 25 bp, Homo sapiens
gcatttattaatcatcttctgtgtg

SEQ ID NO: 6915 - DNA, 18 bp, Homo sapiens
ttcccttgggttcagtgc

SEQ ID NO: 6916 - DNA, 18 bp, Homo sapiens
tttcaagggaagcctgtc

SEQ ID NO: 6917 - DNA, 24 bp, Homo sapiens
cttccagggcaccccaggcaatac

SEQ ID NO: 6918 - DNA, 16 bp, Homo sapiens
gaagtttcctgcctcc

SEQ ID NO: 6919 - DNA, 18 bp, Homo sapiens
ccctgggagtcctggaaa

SEQ ID NO: 6920 - DNA, 24 bp, Homo sapiens
agtagccataaggaattcgggtta

SEQ ID NO: 6921 - DNA, 21 bp, Homo sapiens
ctttatgtctttgttggggaa

SEQ ID NO: 6922 - DNA, 22 bp, Homo sapiens
ggaaaaatatctgaataggctc

SEQ ID NO: 6923 - DNA, 20 bp, Homo sapiens
acttccctaaagtcatgacg

SEQ ID NO: 6924 - DNA, 24 bp, Homo sapiens
tgtatgtcttttagggtgagcagg

SEQ ID NO: 6925 - DNA, 20 bp, Homo sapiens
tgcatgtattcatccattcc

SEQ ID NO: 6926 - DNA, 21 bp, Homo sapiens
ccaccaatgacttaccttttg

SEQ ID NO: 6927 - DNA, 18 bp, Homo sapiens
gtaaggccgtgggaggtg

SEQ ID NO: 6928 - DNA, 23 bp, Homo sapiens
gtctcattatttaatagacgtcc

SEQ ID NO: 6929 - DNA, 18 bp, Homo sapiens
ccgagtaggagtgtgtgc

SEQ ID NO: 6930 - DNA, 21 bp, Homo sapiens
tgtttctgaatgattaaggtc

SEQ ID NO: 6931 - DNA, 19 bp, Homo sapiens
tagggtgctgctggtttga

SEQ ID NO: 6932 - DNA, 16 bp, Homo sapiens
tagcaggagcaccctt

SEQ ID NO: 6933 - DNA, 23 bp, Homo sapiens
acaaaatcataaatcatttctct

SEQ ID NO: 6934 - DNA, 17 bp, Homo sapiens
ggtcctggagcccctgg

SEQ ID NO: 6935 - DNA, 24 bp, Homo sapiens
tgaagaaatataactttgaataag

SEQ ID NO: 6936 - DNA, 19 bp, Homo sapiens
ggcgaaaagagagagagag

SEQ ID NO: 6937 - DNA, 23 bp, Homo sapiens
atgaacttcttcattttcaaggg

SEQ ID NO: 6938 - DNA, 29 bp, Homo sapiens
tctatttaaaatcttcttaagagagtgag

SEQ ID NO: 6939 - DNA, 16 bp, Homo sapiens
gaccccgggttgccag

SEQ ID NO: 6940 - DNA, 24 bp, Homo sapiens
ttgatgtttgttatcattagctgc

SEQ ID NO: 6941 - DNA, 18 bp, Homo sapiens
acaaagaatcccggagga

SEQ ID NO: 6942 - DNA, 30 bp, Homo sapiens
attttattaaaatattttaatgcatttaat

SEQ ID NO: 6943 - DNA, 28 bp, Homo sapiens
ataactttttaataataaataatgaatc

SEQ ID NO: 6944 - DNA, 28 bp, Homo sapiens
aatttaaacttactcttattcttctctc

SEQ ID NO: 6945 - DNA, 23 bp, Homo sapiens
aaaatccacaaatgaaaatcaca

SEQ ID NO: 6946 - DNA, 18 bp, Homo sapiens
ctgttggcccacctggtc

SEQ ID NO: 6947 - DNA, 21 bp, Homo sapiens
tcatatgaactgtagtctacc

SEQ ID NO: 6948 - DNA, 24 bp, Homo sapiens
tgctacagactctgtcaactaata

SEQ ID NO: 6949 - DNA, 19 bp, Homo sapiens
ccacatgaagaagcagacc

SEQ ID NO: 6950 - DNA, 24 bp, Homo sapiens
tttttctggttggatgcatttcct

SEQ ID NO: 6951 - DNA, 18 bp, Homo sapiens
ctcttccctgctagggat

SEQ ID NO: 6952 - DNA, 23 bp, Homo sapiens
ggagccatgggacctagaggacc

SEQ ID NO: 6953 - DNA, 21 bp, Homo sapiens
tctctaagaaatagctaaaat

SEQ ID NO: 6954 - DNA, 22 bp, Homo sapiens
ctcgcctgctaataaaacatag

SEQ ID NO: 6955 - DNA, 22 bp, Homo sapiens
tgctcccttacaaatattggaa

SEQ ID NO: 6956 - DNA, 17 bp, Homo sapiens
tcagcttggcccgtaag

SEQ ID NO: 6957 - DNA, 20 bp, Homo sapiens
aatttggttttgtgttttct

SEQ ID NO: 6958 - DNA, 18 bp, Homo sapiens
acttttcccctttagtgc

SEQ ID NO: 6959 - DNA, 23 bp, Homo sapiens
cccagagcatatcagcctatacc

SEQ ID NO: 6960 - DNA, 21 bp, Homo sapiens
ataactgttcctggtggtccc

SEQ ID NO: 6961 - DNA, 24 bp, Homo sapiens
tttgttctatcttcccgtataagc

SEQ ID NO: 6962 - DNA, 23 bp, Homo sapiens
ggcacaacactaatcataaaatc

SEQ ID NO: 6963 - DNA, 21 bp, Homo sapiens
ttgaaatgttgatgctgttgt

SEQ ID NO: 6964 - DNA, 21 bp, Homo sapiens
caagagcttgtaaaagaggtg

SEQ ID NO: 6965 - DNA, 23 bp, Homo sapiens
gtgaaagggttaacaggaccccc

SEQ ID NO: 6966 - DNA, 20 bp, Homo sapiens
ggaatcaatcctggaggttc

SEQ ID NO: 6967 - DNA, 18 bp, Homo sapiens
gctcccttgtctcccttt

SEQ ID NO: 6968 - DNA, 23 bp, Homo sapiens
gttaacacgaggcacattcatag

SEQ ID NO: 6969 - DNA, 23 bp, Homo sapiens
atgtgttatggggacaatataac

SEQ ID NO: 6970 - DNA, 22 bp, Homo sapiens
ccactgttgaatcagtgaaatc

SEQ ID NO: 6971 - DNA, 21 bp, Homo sapiens
aaaaaaaacaacttaagacaa

SEQ ID NO: 6972 - DNA, 17 bp, Homo sapiens
cctcaagggggaaaagg

SEQ ID NO: 6973 - DNA, 17 bp, Homo sapiens
gcaatagctgctctgcc

SEQ ID NO: 6974 - DNA, 23 bp, Homo sapiens
cccttttcagatccatatgattc

SEQ ID NO: 6975 - DNA, 23 bp, Homo sapiens
cttagatggctcagcactgaaac

SEQ ID NO: 6976 - DNA, 19 bp, Homo sapiens
tgcacatgacaccgaattt

SEQ ID NO: 6977 - DNA, 24 bp, Homo sapiens
acaaattaataaaaatcaatgtaa

SEQ ID NO: 6978 - DNA, 20 bp, Homo sapiens
gagctagtttgagttgggca

SEQ ID NO: 6979 - DNA, 18 bp, Homo sapiens
agggactgcctggagaat

SEQ ID NO: 6980 - DNA, 21 bp, Homo sapiens
acttgagtaagtaaatcctgc

SEQ ID NO: 6981 - DNA, 17 bp, Homo sapiens
tttccgggttttcccta

SEQ ID NO: 6982 - DNA, 24 bp, Homo sapiens
tttccttctaacacctgggtgaag

SEQ ID NO: 6983 - DNA, 17 bp, Homo sapiens
tactacctccataggcc

SEQ ID NO: 6984 - DNA, 24 bp, Homo sapiens
tgatcatatcacttaagatttccg

SEQ ID NO: 6985 - DNA, 26 bp, Homo sapiens
ttttgtttgtttataactatttagtg

SEQ ID NO: 6986 - DNA, 21 bp, Homo sapiens
tgatttgtttttgctgtaggg

SEQ ID NO: 6987 - DNA, 21 bp, Homo sapiens
cagtggggatgtaaaactatg

SEQ ID NO: 6988 - DNA, 24 bp, Homo sapiens
cttttaaaaactgcatttgggaat

SEQ ID NO: 6989 - DNA, 21 bp, Homo sapiens
agaggattaccttaatgccat

SEQ ID NO: 6990 - DNA, 22 bp, Homo sapiens
agcacattcttttgtttcagag

SEQ ID NO: 6991 - DNA, 20 bp, Homo sapiens
ttggaggtaaaagtaaaagc

SEQ ID NO: 6992 - DNA, 22 bp, Homo sapiens
cctgtgtcttctgacccatttc

SEQ ID NO: 6993 - DNA, 22 bp, Homo sapiens
cagacctagtagggtatttgaa

SEQ ID NO: 6994 - DNA, 22 bp, Homo sapiens
ggtttccctgggttaatgggtg

SEQ ID NO: 6995 - DNA, 16 bp, Homo sapiens
tcccctttctgtccct

SEQ ID NO: 6996 - DNA, 22 bp, Homo sapiens
agtcagtgtctctttaacttta

SEQ ID NO: 6997 - DNA, 21 bp, Homo sapiens
caaacatagcattgatattgt

SEQ ID NO: 6998 - DNA, 23 bp, Homo sapiens
ttcattttaactgtacatcttgc

SEQ ID NO: 6999 - DNA, 22 bp, Homo sapiens
tctcacacagttaatgagagac

SEQ ID NO: 7000 - DNA, 21 bp, Homo sapiens
aaatgtctttcactgtaggga

SEQ ID NO: 7001 - DNA, 20 bp, Homo sapiens
acatagtgaccagctatttt

SEQ ID NO: 7002 - DNA, 25 bp, Homo sapiens
ctggtatgtgtcataatattctgtc

SEQ ID NO: 7003 - DNA, 22 bp, Homo sapiens
tatacctgctaacatgtaaacc

SEQ ID NO: 7004 - DNA, 16 bp, Homo sapiens
ctcctctgggccctgg

SEQ ID NO: 7005 - DNA, 21 bp, Homo sapiens
gccaaaatgaagaaactgaag

SEQ ID NO: 7006 - DNA, 20 bp, Homo sapiens
aagccagaaatatgttcagc

SEQ ID NO: 7007 - DNA, 24 bp, Homo sapiens
ttctctgtatttgtttctttctcc

SEQ ID NO: 7008 - DNA, 18 bp, Homo sapiens
gttccctttcctcaccca

SEQ ID NO: 7009 - DNA, 18 bp, Homo sapiens
tgaaggcactccaggccc

SEQ ID NO: 7010 - DNA, 23 bp, Homo sapiens
ataaaaatatgaagagcaggaga

SEQ ID NO: 7011 - DNA, 16 bp, Homo sapiens
aggaactccgggggga

SEQ ID NO: 7012 - DNA, 22 bp, Homo sapiens
aggtgagagtaggaaaaaagta

SEQ ID NO: 7013 - DNA, 22 bp, Homo sapiens
gaggacagcttattttcctttg

SEQ ID NO: 7014 - DNA, 18 bp, Homo sapiens
aaaagtggatgggacagc

SEQ ID NO: 7015 - DNA, 25 bp, Homo sapiens
acacttctagatcagttaatgaaac

SEQ ID NO: 7016 - DNA, 24 bp, Homo sapiens
ttatatattcccaggtcccagtgg

SEQ ID NO: 7017 - DNA, 18 bp, Homo sapiens
gtctcccaaaatgctggg

SEQ ID NO: 7018 - DNA, 16 bp, Homo sapiens
cctctgaggccaggcc

SEQ ID NO: 7019 - DNA, 20 bp, Homo sapiens
tgtgttatgtacctctccat

SEQ ID NO: 7020 - DNA, 17 bp, Homo sapiens
cccatggcatcctttcc

SEQ ID NO: 7021 - DNA, 24 bp, Homo sapiens
tcttgcaattaaaaaataaattcg

SEQ ID NO: 7022 - DNA, 17 bp, Homo sapiens
cccggtgatcctggaag

SEQ ID NO: 7023 - DNA, 24 bp, Homo sapiens
attttctccaaggatcatcaaggc

SEQ ID NO: 7024 - DNA, 24 bp, Homo sapiens
cacatctgtcatttggcactgtgc

SEQ ID NO: 7025 - DNA, 23 bp, Homo sapiens
gaaaggaagtaaaggggaacgag

SEQ ID NO: 7026 - DNA, 23 bp, Homo sapiens
ataaaaaccacacagactgatgg

SEQ ID NO: 7027 - DNA, 22 bp, Homo sapiens
caggttgtgctggttcaccagg

SEQ ID NO: 7028 - DNA, 23 bp, Homo sapiens
attgcatcagtttctttcacaga

SEQ ID NO: 7029 - DNA, 24 bp, Homo sapiens
tggtcaccatgctttctcagttgc

SEQ ID NO: 7030 - DNA, 18 bp, Homo sapiens
tggagaccctagatagcc

SEQ ID NO: 7031 - DNA, 24 bp, Homo sapiens
tgagagagatgcattttaaataat

SEQ ID NO: 7032 - DNA, 24 bp, Homo sapiens
gaaaaaggcttatcctaatacaac

SEQ ID NO: 7033 - DNA, 19 bp, Homo sapiens
ttgtctttggtgctgtatt

SEQ ID NO: 7034 - DNA, 21 bp, Homo sapiens
tagctatttgggatcattgtt

SEQ ID NO: 7035 - DNA, 16 bp, Homo sapiens
cggactgccaggctat

SEQ ID NO: 7036 - DNA, 22 bp, Homo sapiens
tgatttacagataaatgaatac

SEQ ID NO: 7037 - DNA, 17 bp, Homo sapiens
ggcactgtgtacacagg

SEQ ID NO: 7038 - DNA, 24 bp, Homo sapiens
aacgtcctagataattttcactac

SEQ ID NO: 7039 - DNA, 21 bp, Homo sapiens
tacctgggattccttttacac

SEQ ID NO: 7040 - DNA, 18 bp, Homo sapiens
tttgttctttctgaggac

SEQ ID NO: 7041 - DNA, 22 bp, Homo sapiens
ttccagtgtattgacccttttg

SEQ ID NO: 7042 - DNA, 23 bp, Homo sapiens
ctctcattgcaggagaaccaggc

SEQ ID NO: 7043 - DNA, 20 bp, Homo sapiens
cctccaagttcatctaaacc

SEQ ID NO: 7044 - DNA, 18 bp, Homo sapiens
caggattgccagggttac

SEQ ID NO: 7045 - DNA, 21 bp, Homo sapiens
ccagcttttcttggattttgg

SEQ ID NO: 7046 - DNA, 16 bp, Homo sapiens
cgccttgtcttcctgc

SEQ ID NO: 7047 - DNA, 24 bp, Homo sapiens
ttctcttattgcatttatgtttta

SEQ ID NO: 7048 - DNA, 20 bp, Homo sapiens
cttactggaaatcctggaag

SEQ ID NO: 7049 - DNA, 25 bp, Homo sapiens
tttcttcatacattgtattaccctg

SEQ ID NO: 7050 - DNA, 22 bp, Homo sapiens
caaccatatttctagagtgtgc

SEQ ID NO: 7051 - DNA, 24 bp, Homo sapiens
gttaataattcgttgatttgcagg

SEQ ID NO: 7052 - DNA, 23 bp, Homo sapiens
aatcaacaggtatctattaagtg

SEQ ID NO: 7053 - DNA, 19 bp, Homo sapiens
ccccaggaaatacaggtct

SEQ ID NO: 7054 - DNA, 16 bp, Homo sapiens
cctgggaaaccctagg

SEQ ID NO: 7055 - DNA, 24 bp, Homo sapiens
atgcttgtaataatagttgtggac

SEQ ID NO: 7056 - DNA, 18 bp, Homo sapiens
cttgcccctcaggctgaa

SEQ ID NO: 7057 - DNA, 24 bp, Homo sapiens
aaaagttcttgtccacactgtttt

SEQ ID NO: 7058 - DNA, 18 bp, Homo sapiens
ttccatccaagccctttc

SEQ ID NO: 7059 - DNA, 23 bp, Homo sapiens
acagattcatttgtgtactaccc

SEQ ID NO: 7060 - DNA, 20 bp, Homo sapiens
tgctaaataccaaccagttc

SEQ ID NO: 7061 - DNA, 19 bp, Homo sapiens
aaaggtgaaacacttcagc

SEQ ID NO: 7062 - DNA, 23 bp, Homo sapiens
tggaaaagaaatcactttatctc

SEQ ID NO: 7063 - DNA, 18 bp, Homo sapiens
cagaggccaacctgggag

SEQ ID NO: 7064 - DNA, 21 bp, Homo sapiens
tgaagatgtttcattctgcag

SEQ ID NO: 7065 - DNA, 22 bp, Homo sapiens
ggattaccaggacctaaaggcg

SEQ ID NO: 7066 - DNA, 16 bp, Homo sapiens
accactcagagcctgt

SEQ ID NO: 7067 - DNA, 23 bp, Homo sapiens
agtaataattctcatcaaatgcc

SEQ ID NO: 7068 - DNA, 16 bp, Homo sapiens
gcaggtcctggggacc

SEQ ID NO: 7069 - DNA, 23 bp, Homo sapiens
ggtattcatatttggaggatgat

SEQ ID NO: 7070 - DNA, 19 bp, Homo sapiens
ccttgcgtgccctggagac

SEQ ID NO: 7071 - DNA, 21 bp, Homo sapiens
attcaaacacattcctgttgt

SEQ ID NO: 7072 - DNA, 22 bp, Homo sapiens
aaacaggactggaaagaaaact

SEQ ID NO: 7073 - DNA, 21 bp, Homo sapiens
ggatcctggctcccctgggtc

SEQ ID NO: 7074 - DNA, 22 bp, Homo sapiens
ttttccttagtcttggagaagc

SEQ ID NO: 7075 - DNA, 21 bp, Homo sapiens
ggaccccaaggagaacctggt

SEQ ID NO: 7076 - DNA, 23 bp, Homo sapiens
catattctttcctggtatctgtg

SEQ ID NO: 7077 - DNA, 21 bp, Homo sapiens
gaactggtgttgaaacactga

SEQ ID NO: 7078 - DNA, 24 bp, Homo sapiens
gtgaaaacagaggttattttttat

SEQ ID NO: 7079 - DNA, 16 bp, Homo sapiens
ggtggaccttgggggc

SEQ ID NO: 7080 - DNA, 23 bp, Homo sapiens
ttccgctatcgtctaagacaagc

SEQ ID NO: 7081 - DNA, 23 bp, Homo sapiens
tttccaagagagtcagggtgttg

SEQ ID NO: 7082 - DNA, 23 bp, Homo sapiens
tccttaaggccctaggggagagc

SEQ ID NO: 7083 - DNA, 17 bp, Homo sapiens
gtgctctcttttggagc

SEQ ID NO: 7084 - DNA, 16 bp, Homo sapiens
cccctggccatcctgg

SEQ ID NO: 7085 - DNA, 23 bp, Homo sapiens
cgacagaccgaaactccatcaac

SEQ ID NO: 7086 - DNA, 20 bp, Homo sapiens
cctggaattcctggttcacc

SEQ ID NO: 7087 - DNA, 22 bp, Homo sapiens
cgacacagagaacttagacatt

SEQ ID NO: 7088 - DNA, 23 bp, Homo sapiens
caaactttatgtttgaaaaaatt

SEQ ID NO: 7089 - DNA, 21 bp, Homo sapiens
tgatgtggagatgcatatgtg

SEQ ID NO: 7090 - DNA, 24 bp, Homo sapiens
ttcatattgtattttactcatttt

SEQ ID NO: 7091 - DNA, 15 bp, Homo sapiens
tccagggcctgatgg

SEQ ID NO: 7092 - DNA, 22 bp, Homo sapiens
aaagagtattatggatatttcc

SEQ ID NO: 7093 - DNA, 24 bp, Homo sapiens
gggcctcctggacctaagggtaaa

SEQ ID NO: 7094 - DNA, 18 bp, Homo sapiens
tggaaaaccttggtctcc

SEQ ID NO: 7095 - DNA, 23 bp, Homo sapiens
aaattgctaatttatcagttggt

SEQ ID NO: 7096 - DNA, 19 bp, Homo sapiens
gcctggctttccaggtaac

SEQ ID NO: 7097 - DNA, 23 bp, Homo sapiens
tggttgagagataagagagttac

SEQ ID NO: 7098 - DNA, 19 bp, Homo sapiens
ggtcacccaccctctcttc

SEQ ID NO: 7099 - DNA, 24 bp, Homo sapiens
tgtttattgttttttctctgtagg

SEQ ID NO: 7100 - DNA, 21 bp, Homo sapiens
atttctacatctagagtgctc

SEQ ID NO: 7101 - DNA, 18 bp, Homo sapiens
aaaaatgggagagcctgg

SEQ ID NO: 7102 - DNA, 21 bp, Homo sapiens
gaagatgatccagagaaacat

SEQ ID NO: 7103 - DNA, 17 bp, Homo sapiens
cctccaggcatggctac

SEQ ID NO: 7104 - DNA, 23 bp, Homo sapiens
caaaaaggaaagttgatgacatg

SEQ ID NO: 7105 - DNA, 19 bp, Homo sapiens
gtccaatttctccatgttc

SEQ ID NO: 7106 - DNA, 19 bp, Homo sapiens
acagagagtcaatatcagt

SEQ ID NO: 7107 - DNA, 17 bp, Homo sapiens
cgtggtccatcaagccc

SEQ ID NO: 7108 - DNA, 19 bp, Homo sapiens
ctgtagggagaaccagcag

SEQ ID NO: 7109 - DNA, 20 bp, Homo sapiens
tcagtttgctgcattttagc

SEQ ID NO: 7110 - DNA, 20 bp, Homo sapiens
aaagaggcaattctggggaa

SEQ ID NO: 7111 - DNA, 18 bp, Homo sapiens
agaaaggtagggcaggaa

SEQ ID NO: 7112 - DNA, 22 bp, Homo sapiens
cctggaactccaggaaatgaag

SEQ ID NO: 7113 - DNA, 24 bp, Homo sapiens
tccttccttcttttttaatgagtg

SEQ ID NO: 7114 - DNA, 17 bp, Homo sapiens
tatgcaccttcctgggg

SEQ ID NO: 7115 - DNA, 22 bp, Homo sapiens
tctgatttaggtggaaaaaaag

SEQ ID NO: 7116 - DNA, 22 bp, Homo sapiens
cctcctcctaccttgttgccct

SEQ ID NO: 7117 - DNA, 24 bp, Homo sapiens
cttaagttctagcacctgggtata

SEQ ID NO: 7118 - DNA, 17 bp, Homo sapiens
aagcacagagcaggagt

SEQ ID NO: 7119 - DNA, 21 bp, Homo sapiens
gaccacctggagaacaaggac

SEQ ID NO: 7120 - DNA, 24 bp, Homo sapiens
acttctgaagtatttctcattgaa

SEQ ID NO: 7121 - DNA, 21 bp, Homo sapiens
gacttccaggcttaaatggat

SEQ ID NO: 7122 - DNA, 18 bp, Homo sapiens
gccccgttttacctcttc

SEQ ID NO: 7123 - DNA, 22 bp, Homo sapiens
ccactgcaatccagcctagaag

SEQ ID NO: 7124 - DNA, 18 bp, Homo sapiens
tccagtttctccaggaaa

SEQ ID NO: 7125 - DNA, 29 bp, Homo sapiens
tatatatatatatatatttctgaagttag

SEQ ID NO: 7126 - DNA, 19 bp, Homo sapiens
ctggatatcctctttgacc

SEQ ID NO: 7127 - DNA, 24 bp, Homo sapiens
cattcatttattcgtacacaggca

SEQ ID NO: 7128 - DNA, 24 bp, Homo sapiens
agaaataagaagaaaaatagaaac

SEQ ID NO: 7129 - DNA, 24 bp, Homo sapiens
attccaggcttggatagatcagga

SEQ ID NO: 7130 - DNA, 22 bp, Homo sapiens
gcatagagtaaaaagcgtatgc

SEQ ID NO: 7131 - DNA, 17 bp, Homo sapiens
atgggaccactgggtca

SEQ ID NO: 7132 - DNA, 16 bp, Homo sapiens
tggcccctggtttctt

SEQ ID NO: 7133 - DNA, 17 bp, Homo sapiens
gcccatcatcccaatca

SEQ ID NO: 7134 - DNA, 24 bp, Homo sapiens
gtactatgtacagaggccattttt

SEQ ID NO: 7135 - DNA, 18 bp, Homo sapiens
tacccctctgccctggtg

SEQ ID NO: 7136 - DNA, 22 bp, Homo sapiens
tggaatattttgcttttctcac

SEQ ID NO: 7137 - DNA, 22 bp, Homo sapiens
tgctgcaaaataaatgaacatt

SEQ ID NO: 7138 - DNA, 23 bp, Homo sapiens
tttccataggtgaagatggagtg

SEQ ID NO: 7139 - DNA, 23 bp, Homo sapiens
agcaaaatcaaatactgttgctc

SEQ ID NO: 7140 - DNA, 16 bp, Homo sapiens
cctgggaacccaggca

SEQ ID NO: 7141 - DNA, 23 bp, Homo sapiens
gcctgcctggggaaactatttat

SEQ ID NO: 7142 - DNA, 22 bp, Homo sapiens
ttatctccttgttcccccttgg

SEQ ID NO: 7143 - DNA, 24 bp, Homo sapiens
gatttgttctgttttatagtaagc

SEQ ID NO: 7144 - DNA, 20 bp, Homo sapiens
tgagacctggttctcctttg

SEQ ID NO: 7145 - DNA, 21 bp, Homo sapiens
acctgatgttgttactcctgt

SEQ ID NO: 7146 - DNA, 18 bp, Homo sapiens
attagcctgagaatcagc

SEQ ID NO: 7147 - DNA, 17 bp, Homo sapiens
gagaggaaccccaggag

SEQ ID NO: 7148 - DNA, 16 bp, Homo sapiens
aaacactggccctcac

SEQ ID NO: 7149 - DNA, 24 bp, Homo sapiens
cttcagagatatcccacgtaatag

SEQ ID NO: 7150 - DNA, 21 bp, Homo sapiens
tggaaggtgactcagttctaa

SEQ ID NO: 7151 - DNA, 19 bp, Homo sapiens
tttctcacctggatttcct

SEQ ID NO: 7152 - DNA, 17 bp, Homo sapiens
agctcacttcaacctct

SEQ ID NO: 7153 - DNA, 18 bp, Homo sapiens
ggtagtcctttgaggccc

SEQ ID NO: 7154 - DNA, 24 bp, Homo sapiens
taggaaagtgtaaaatgtgatatt

SEQ ID NO: 7155 - DNA, 19 bp, Homo sapiens
ttctaacttcaggattcgc

SEQ ID NO: 7156 - DNA, 24 bp, Homo sapiens
agaacagaattgatatttaaaccc

SEQ ID NO: 7157 - DNA, 22 bp, Homo sapiens
ttccagggatgccaggtttaaa

SEQ ID NO: 7158 - DNA, 22 bp, Homo sapiens
aactatcaacaccttcttttag

SEQ ID NO: 7159 - DNA, 17 bp, Homo sapiens
ccagtgctgcccaaatc

SEQ ID NO: 7160 - DNA, 22 bp, Homo sapiens
gctagacaagtgcccaaaccag

SEQ ID NO: 7161 - DNA, 16 bp, Homo sapiens
gcatgcccatgttccc

SEQ ID NO: 7162 - DNA, 24 bp, Homo sapiens
gcaacaagtatttattaaacacat

SEQ ID NO: 7163 - DNA, 19 bp, Homo sapiens
aaaatctggagtcctcacc

SEQ ID NO: 7164 - DNA, 17 bp, Homo sapiens
aggccccagaggagatt

SEQ ID NO: 7165 - DNA, 23 bp, Homo sapiens
ccccgcaaatctagttttttaat

SEQ ID NO: 7166 - DNA, 18 bp, Homo sapiens
ggaatcccaaagttcccc

SEQ ID NO: 7167 - DNA, 24 bp, Homo sapiens
tattgtaactacctgatgcagttg

SEQ ID NO: 7168 - DNA, 18 bp, Homo sapiens
atctccctggagaccatg

SEQ ID NO: 7169 - DNA, 23 bp, Homo sapiens
actgaaaagtagaaaacttcaag

SEQ ID NO: 7170 - DNA, 19 bp, Homo sapiens
gtggcctatataccgttgg

SEQ ID NO: 7171 - DNA, 22 bp, Homo sapiens
cccctaatttcaggttctaaag

SEQ ID NO: 7172 - DNA, 22 bp, Homo sapiens
tgggtacttgttgatatttttc

SEQ ID NO: 7173 - DNA, 19 bp, Homo sapiens
ccaggcctcccaggtattc

SEQ ID NO: 7174 - DNA, 24 bp, Homo sapiens
aaaatccaaataactgtctgaaag

SEQ ID NO: 7175 - DNA, 22 bp, Homo sapiens
agaaggtacaaggccaggacca

SEQ ID NO: 7176 - DNA, 22 bp, Homo sapiens
ctttcccatatcacccggcagt

SEQ ID NO: 7177 - DNA, 24 bp, Homo sapiens
cagtgctggcagatagcagatact

SEQ ID NO: 7178 - DNA, 16 bp, Homo sapiens
aggtccagcaggcccc

SEQ ID NO: 7179 - DNA, 24 bp, Homo sapiens
ttatgctgaattcttaccacatat

SEQ ID NO: 7180 - DNA, 24 bp, Homo sapiens
tccagcttttagaattgtaaactc

SEQ ID NO: 7181 - DNA, 20 bp, Homo sapiens
catttaagggggatccagga

SEQ ID NO: 7182 - DNA, 23 bp, Homo sapiens
atagctttctgtttaccacaatg

SEQ ID NO: 7183 - DNA, 22 bp, Homo sapiens
aacctggcccacctggacattt

SEQ ID NO: 7184 - DNA, 22 bp, Homo sapiens
agtgtgttagaatttgaagttc

SEQ ID NO: 7185 - DNA, 22 bp, Homo sapiens
gaagtcctggcctcccaggtaa

SEQ ID NO: 7186 - DNA, 17 bp, Homo sapiens
catgaggacctggcttt

SEQ ID NO: 7187 - DNA, 22 bp, Homo sapiens
tggggtgaccttgcaacaagag

SEQ ID NO: 7188 - DNA, 24 bp, Homo sapiens
gaaacctggagggcctctgattcc

SEQ ID NO: 7189 - DNA, 22 bp, Homo sapiens
acagaccgtttcagtcactgtt

SEQ ID NO: 7190 - DNA, 21 bp, Homo sapiens
tccaaacctcaggagaaaatg

SEQ ID NO: 7191 - DNA, 20 bp, Homo sapiens
tcttcatttccaggaaagcc

SEQ ID NO: 7192 - DNA, 19 bp, Homo sapiens
tgtctggatactgagtaac

SEQ ID NO: 7193 - DNA, 18 bp, Homo sapiens
cctgggccctccaggaat

SEQ ID NO: 7194 - DNA, 21 bp, Homo sapiens
gtccaggagatcctggaaatc

SEQ ID NO: 7195 - DNA, 24 bp, Homo sapiens
agttctgaaaaacagcctgtttaa

SEQ ID NO: 7196 - DNA, 23 bp, Homo sapiens
ccttttctccggctggaccagga

SEQ ID NO: 7197 - DNA, 23 bp, Homo sapiens
ggccactggcaagaaataaatcc

SEQ ID NO: 7198 - DNA, 24 bp, Homo sapiens
ctaatgattctatccaaaataaaa

SEQ ID NO: 7199 - DNA, 22 bp, Homo sapiens
tttttttttcaggtcttccagg

SEQ ID NO: 7200 - DNA, 24 bp, Homo sapiens
agataatcagttctatcagagaaa

SEQ ID NO: 7201 - DNA, 24 bp, Homo sapiens
ggtgaccaaggacgtgatggaatt

SEQ ID NO: 7202 - DNA, 24 bp, Homo sapiens
aattggtcaatttcattacattat

SEQ ID NO: 7203 - DNA, 16 bp, Homo sapiens
cctggaggggccctca

SEQ ID NO: 7204 - DNA, 24 bp, Homo sapiens
taatcctttgctgctctaaagatt

SEQ ID NO: 7205 - DNA, 19 bp, Homo sapiens
tgtgtacattaggacaggg

SEQ ID NO: 7206 - DNA, 24 bp, Homo sapiens
cggtgtgtactaaacttttctcat

SEQ ID NO: 7207 - DNA, 22 bp, Homo sapiens
taattcactaggttaagcttac

SEQ ID NO: 7208 - DNA, 23 bp, Homo sapiens
catgccaagattatctctttcag

SEQ ID NO: 7209 - DNA, 22 bp, Homo sapiens
acattttaaattgaagaccaag

SEQ ID NO: 7210 - DNA, 24 bp, Homo sapiens
gcatttaccagcaatatattataa

SEQ ID NO: 7211 - DNA, 16 bp, Homo sapiens
tctcccatggcccctt

SEQ ID NO: 7212 - DNA, 24 bp, Homo sapiens
cacttttaagcaaagtacctacat

SEQ ID NO: 7213 - DNA, 16 bp, Homo sapiens
ggcagacctggtggcc

SEQ ID NO: 7214 - DNA, 24 bp, Homo sapiens
gggcattaaagaaacttattaagc

SEQ ID NO: 7215 - DNA, 24 bp, Homo sapiens
tttacctgggcttcctcttgagcc

SEQ ID NO: 7216 - DNA, 18 bp, Homo sapiens
ttttcctggcctcccggg

SEQ ID NO: 7217 - DNA, 23 bp, Homo sapiens
gaaaacttttgaggtcaaacatg

SEQ ID NO: 7218 - DNA, 23 bp, Homo sapiens
cccacaggcatagaaggattccc

SEQ ID NO: 7219 - DNA, 21 bp, Homo sapiens
tagtgggggaatggagatgac

SEQ ID NO: 7220 - DNA, 23 bp, Homo sapiens
cagacaggaaatcgtggtccacc

SEQ ID NO: 7221 - DNA, 16 bp, Homo sapiens
ggaggtccagggggac

SEQ ID NO: 7222 - DNA, 18 bp, Homo sapiens
acatgctccaggggaaag

SEQ ID NO: 7223 - DNA, 17 bp, Homo sapiens
tttgggccagggtggcc

SEQ ID NO: 7224 - DNA, 23 bp, Homo sapiens
aacaatcactgataaatagaacc

SEQ ID NO: 7225 - DNA, 24 bp, Homo sapiens
gtcaaaataattatccatactcac

SEQ ID NO: 7226 - DNA, 16 bp, Homo sapiens
aattcaggtgcgcctg

SEQ ID NO: 7227 - DNA, 30 bp, Homo sapiens
aatatatgatataatatacaatataagaat

SEQ ID NO: 7228 - DNA, 16 bp, Homo sapiens
aagggtctatgggcca

SEQ ID NO: 7229 - DNA, 22 bp, Homo sapiens
tcgggtatgtctttattaacat

SEQ ID NO: 7230 - DNA, 17 bp, Homo sapiens
gggaccaccaggtcgtc

SEQ ID NO: 7231 - DNA, 19 bp, Homo sapiens
tggagtacctggtgctccc

SEQ ID NO: 7232 - DNA, 23 bp, Homo sapiens
tgaaagataaaaatgatgtctgc

SEQ ID NO: 7233 - DNA, 20 bp, Homo sapiens
cagtacctttcacgcctgga

SEQ ID NO: 7234 - DNA, 23 bp, Homo sapiens
tgcatttttaaaaaactgctgtg

SEQ ID NO: 7235 - DNA, 22 bp, Homo sapiens
cacttgtgtgccctaaaatatg

SEQ ID NO: 7236 - DNA, 24 bp, Homo sapiens
ccctttatttgaaatatagggagc

SEQ ID NO: 7237 - DNA, 21 bp, Homo sapiens
tcactcgtattgaggtcctat

SEQ ID NO: 7238 - DNA, 21 bp, Homo sapiens
gatcctggattccaggggttt

SEQ ID NO: 7239 - DNA, 24 bp, Homo sapiens
ccaggattacccttttctcctaaa

SEQ ID NO: 7240 - DNA, 21 bp, Homo sapiens
aatgaaattgtagcccttgtg

SEQ ID NO: 7241 - DNA, 17 bp, Homo sapiens
gtccttttggcccaatt

SEQ ID NO: 7242 - DNA, 23 bp, Homo sapiens
agtatttgtccttagagtcaatc

SEQ ID NO: 7243 - DNA, 19 bp, Homo sapiens
cctcacggatgtgttacct

SEQ ID NO: 7244 - DNA, 21 bp, Homo sapiens
cacactgtgtctttgtttgtt

SEQ ID NO: 7245 - DNA, 22 bp, Homo sapiens
agataatcttaagtgtgccagg

SEQ ID NO: 7246 - DNA, 17 bp, Homo sapiens
attggacctccaggacc

SEQ ID NO: 7247 - DNA, 18 bp, Homo sapiens
gcatccctggttctccag

SEQ ID NO: 7248 - DNA, 23 bp, Homo sapiens
tattgctgtcaatgaagaaaggt

SEQ ID NO: 7249 - DNA, 24 bp, Homo sapiens
gtgatccaagtcaatgctgccagt

SEQ ID NO: 7250 - DNA, 23 bp, Homo sapiens
ttatgtcaacaggtgtacgtgga

SEQ ID NO: 7251 - DNA, 22 bp, Homo sapiens
tgaagttgtatcagctgtttcc

SEQ ID NO: 7252 - DNA, 17 bp, Homo sapiens
cacctggcacacctgga

SEQ ID NO: 7253 - DNA, 20 bp, Homo sapiens
gctcaatcctaagactgatt

SEQ ID NO: 7254 - DNA, 21 bp, Homo sapiens
ccacctggaaacctaggtgtg

SEQ ID NO: 7255 - DNA, 24 bp, Homo sapiens
gactaatcatcctagcttgcccag

SEQ ID NO: 7256 - DNA, 24 bp, Homo sapiens
tttttctccagctggtccaggagt

SEQ ID NO: 7257 - DNA, 23 bp, Homo sapiens
tgaaactgagaaagtcctgggtt

SEQ ID NO: 7258 - DNA, 18 bp, Homo sapiens
ttcggtgaggaaacaagc

SEQ ID NO: 7259 - DNA, 21 bp, Homo sapiens
aaatgcaatacaatgttggtt

SEQ ID NO: 7260 - DNA, 21 bp, Homo sapiens
agataactcatatagtcaccc

SEQ ID NO: 7261 - DNA, 20 bp, Homo sapiens
ggatggaaaaccaggaactc

SEQ ID NO: 7262 - DNA, 22 bp, Homo sapiens
tccaaatgaacatttgatcctt

SEQ ID NO: 7263 - DNA, 18 bp, Homo sapiens
acctggcaatccatctga

SEQ ID NO: 7264 - DNA, 23 bp, Homo sapiens
ttataagccactcttctctagga

SEQ ID NO: 7265 - DNA, 20 bp, Homo sapiens
caaagcctctcgttgtccag

SEQ ID NO: 7266 - DNA, 23 bp, Homo sapiens
ttaaattagtactttgaaaaaac

SEQ ID NO: 7267 - DNA, 18 bp, Homo sapiens
gagtggcactgtcccctc

SEQ ID NO: 7268 - DNA, 19 bp, Homo sapiens
ttgaaggaccagctggatc

SEQ ID NO: 7269 - DNA, 16 bp, Homo sapiens
cttgtccgtgggctcg

SEQ ID NO: 7270 - DNA, 24 bp, Homo sapiens
tggagacagtggatcacctgcaac

SEQ ID NO: 7271 - DNA, 23 bp, Homo sapiens
ggctataaagatttacaatctgc

SEQ ID NO: 7272 - DNA, 24 bp, Homo sapiens
aaaccacagcaattccttcatgtc

SEQ ID NO: 7273 - DNA, 19 bp, Homo sapiens
atcaggagacactcaaggt

SEQ ID NO: 7274 - DNA, 22 bp, Homo sapiens
ttgtacaaggaaatcaacgagc

SEQ ID NO: 7275 - DNA, 21 bp, Homo sapiens
cttttcaatactacattttgc

SEQ ID NO: 7276 - DNA, 21 bp, Homo sapiens
tacatacatcattgacattgc

SEQ ID NO: 7277 - DNA, 23 bp, Homo sapiens
ttgctgcaggttacatttaaatt

SEQ ID NO: 7278 - DNA, 17 bp, Homo sapiens
tcagagctggtgttgac

SEQ ID NO: 7279 - DNA, 24 bp, Homo sapiens
acttactgaaagtgatactcagtc

SEQ ID NO: 7280 - DNA, 23 bp, Homo sapiens
attggatttttacctgcttatat

SEQ ID NO: 7281 - DNA, 22 bp, Homo sapiens
accacaatgccattcttattct

SEQ ID NO: 7282 - DNA, 21 bp, Homo sapiens
tgctgcctttcattccattac

SEQ ID NO: 7283 - DNA, 24 bp, Homo sapiens
cgaaatgattattcatactggctg

SEQ ID NO: 7284 - DNA, 22 bp, Homo sapiens
gcatctgtaacatgaaacaaag

SEQ ID NO: 7285 - DNA, 16 bp, Homo sapiens
gcagagcccttgagcc

SEQ ID NO: 7286 - DNA, 19 bp, Homo sapiens
atgtcagtggtttggctgt

SEQ ID NO: 7287 - DNA, 24 bp, Homo sapiens
acaatgggaccaagtgaatcactt

SEQ ID NO: 7288 - DNA, 22 bp, Homo sapiens
tctcctcaccatgatgaatgaa

SEQ ID NO: 7289 - DNA, 24 bp, Homo sapiens
agaaagtggcaatgccgccatagt

SEQ ID NO: 7290 - DNA, 20 bp, Homo sapiens
acccagcacaatgtaacatt

SEQ ID NO: 7291 - DNA, 16 bp, Homo sapiens
atcgccatagccgttc

SEQ ID NO: 7292 - DNA, 22 bp, Homo sapiens
aatgtctatggcatgttgcaca

SEQ ID NO: 7293 - DNA, 20 bp, Homo sapiens
tggatttctctctggaaagg

SEQ ID NO: 7294 - DNA, 16 bp, Homo sapiens
cggtgccctcagaacc

SEQ ID NO: 7295 - DNA, 24 bp, Homo sapiens
tagcatcgctcatgatcattcctc

SEQ ID NO: 7296 - DNA, 21 bp, Homo sapiens
acattctagaaatgggctggc

SEQ ID NO: 7297 - DNA, 26 bp, Homo sapiens
aaagtagagaattgaaaatttgaacc

SEQ ID NO: 7298 - DNA, 21 bp, Homo sapiens
ttaatgaagccagccagaaac

SEQ ID NO: 7299 - DNA, 21 bp, Homo sapiens
ggtagttcacaagtgcaggtt

SEQ ID NO: 7300 - DNA, 23 bp, Homo sapiens
agttctgcaattgagtcatcaga

SEQ ID NO: 7301 - DNA, 23 bp, Homo sapiens
tcctgcctggaagaattccgagc

SEQ ID NO: 7302 - DNA, 23 bp, Homo sapiens
ggcacagtagtacaaaatcatgg

SEQ ID NO: 7303 - DNA, 24 bp, Homo sapiens
tgcaactactattcaaattcctac

SEQ ID NO: 7304 - DNA, 25 bp, Homo sapiens
aattcatatacaaatattaaatgtg

SEQ ID NO: 7305 - DNA, 22 bp, Homo sapiens
cagttgatggaataggctttct

SEQ ID NO: 7306 - DNA, 17 bp, Homo sapiens
ttcttcatgcacacctg

SEQ ID NO: 7307 - DNA, 24 bp, Homo sapiens
attcattaataaaacaaactcagc

SEQ ID NO: 7308 - DNA, 25 bp, Homo sapiens
ttctgtcattactttgttctttagg

SEQ ID NO: 7309 - DNA, 24 bp, Homo sapiens
tggtttgtttttatttcagaaagc

SEQ ID NO: 7310 - DNA, 21 bp, Homo sapiens
agtcatcatggagcaatattg

SEQ ID NO: 7311 - DNA, 20 bp, Homo sapiens
taataagtcgctgtcaggtg

SEQ ID NO: 7312 - DNA, 22 bp, Homo sapiens
cacagaactgacttgaaagaat

SEQ ID NO: 7313 - DNA, 19 bp, Homo sapiens
ccagcagcttgtgagaggc

SEQ ID NO: 7314 - DNA, 22 bp, Homo sapiens
aaggcagggctgccacggaagc

SEQ ID NO: 7315 - DNA, 16 bp, Homo sapiens
ccccagcaggagctgg

SEQ ID NO: 7316 - DNA, 23 bp, Homo sapiens
gtccgccctgctgggaaatattc

SEQ ID NO: 7317 - DNA, 22 bp, Homo sapiens
catggacccgatcatctgcagc

SEQ ID NO: 7318 - DNA, 18 bp, Homo sapiens
ttgggtgcggaccatggc

SEQ ID NO: 7319 - DNA, 16 bp, Homo sapiens
acccaggccccccgag

SEQ ID NO: 7320 - DNA, 16 bp, Homo sapiens
aagcccctctccatcc

SEQ ID NO: 7321 - DNA, 18 bp, Homo sapiens
ccccaagtgaggaggcag

SEQ ID NO: 7322 - DNA, 18 bp, Homo sapiens
ctcgcatcatggcagccg

SEQ ID NO: 7323 - DNA, 23 bp, Homo sapiens
tccttgatctcgtccatgatctg

SEQ ID NO: 7324 - DNA, 18 bp, Homo sapiens
caggtaggagtgggggtc

SEQ ID NO: 7325 - DNA, 16 bp, Homo sapiens
cgagccagagatgacc

SEQ ID NO: 7326 - DNA, 17 bp, Homo sapiens
gagggaagggggtcact

SEQ ID NO: 7327 - DNA, 16 bp, Homo sapiens
aaggagtccccaggct

SEQ ID NO: 7328 - DNA, 21 bp, Homo sapiens
ctcaccctataccacccgcat

SEQ ID NO: 7329 - DNA, 18 bp, Homo sapiens
cccttacctatgcgctcc

SEQ ID NO: 7330 - DNA, 19 bp, Homo sapiens
ccagaccaggaacccactc

SEQ ID NO: 7331 - DNA, 16 bp, Homo sapiens
gggaggccagggaggc

SEQ ID NO: 7332 - DNA, 18 bp, Homo sapiens
ccctggtcaatgtgctgg

SEQ ID NO: 7333 - DNA, 16 bp, Homo sapiens
gggccacaaggtgggt

SEQ ID NO: 7334 - DNA, 24 bp, Homo sapiens
atttgggggcagcgagccgtggac

SEQ ID NO: 7335 - DNA, 24 bp, Homo sapiens
gggtccttggtcatcgggtgcact

SEQ ID NO: 7336 - DNA, 16 bp, Homo sapiens
caggcagccagggtgc

SEQ ID NO: 7337 - DNA, 17 bp, Homo sapiens
ccgggtcccctacctcc

SEQ ID NO: 7338 - DNA, 16 bp, Homo sapiens
ccacgggtgcccaaca

SEQ ID NO: 7339 - DNA, 17 bp, Homo sapiens
caattccaggcagcccc

SEQ ID NO: 7340 - DNA, 20 bp, Homo sapiens
cactctgtcctgcacccagg

SEQ ID NO: 7341 - DNA, 16 bp, Homo sapiens
tgggctgagggtcagc

SEQ ID NO: 7342 - DNA, 17 bp, Homo sapiens
caggaggtggaggaggt

SEQ ID NO: 7343 - DNA, 19 bp, Homo sapiens
ctcctcctcccatgcacac

SEQ ID NO: 7344 - DNA, 17 bp, Homo sapiens
aaggggctgcagcacgc

SEQ ID NO: 7345 - DNA, 16 bp, Homo sapiens
gccacccatggggggt

SEQ ID NO: 7346 - DNA, 17 bp, Homo sapiens
gtgctccagtccaccgc

SEQ ID NO: 7347 - DNA, 16 bp, Homo sapiens
gccgtccctgcttcct

SEQ ID NO: 7348 - DNA, 16 bp, Homo sapiens
agaaggaccagaggga

SEQ ID NO: 7349 - DNA, 24 bp, Homo sapiens
tgttcttaacccacggggagtcgt

SEQ ID NO: 7350 - DNA, 16 bp, Homo sapiens
aggacctgggaggtgc

SEQ ID NO: 7351 - DNA, 24 bp, Homo sapiens
aggagaaggcaactggccaactcc

SEQ ID NO: 7352 - DNA, 17 bp, Homo sapiens
gtccatgtaaagggggg

SEQ ID NO: 7353 - DNA, 19 bp, Homo sapiens
ctcagaaaccccatccagc

SEQ ID NO: 7354 - DNA, 24 bp, Homo sapiens
cttcctgcacgcggagccccaagg

SEQ ID NO: 7355 - DNA, 17 bp, Homo sapiens
cctccattctgtccccc

SEQ ID NO: 7356 - DNA, 17 bp, Homo sapiens
ggagatggggccgaatc

SEQ ID NO: 7357 - DNA, 16 bp, Homo sapiens
atccctgggcgggacc

SEQ ID NO: 7358 - DNA, 16 bp, Homo sapiens
gggccttctgggagcc

SEQ ID NO: 7359 - DNA, 21 bp, Homo sapiens
tatcgtgtacggattcgtggt

SEQ ID NO: 7360 - DNA, 16 bp, Homo sapiens
actcacttggccttgt

SEQ ID NO: 7361 - DNA, 22 bp, Homo sapiens
gcatcccgctggactggcctgc

SEQ ID NO: 7362 - DNA, 16 bp, Homo sapiens
ctcgggccacctgagc

SEQ ID NO: 7363 - DNA, 18 bp, Homo sapiens
gcatcgacatcctgtact

SEQ ID NO: 7364 - DNA, 16 bp, Homo sapiens
agcgccaggtgctgga

SEQ ID NO: 7365 - DNA, 18 bp, Homo sapiens
ctcatctccttcagtgac

SEQ ID NO: 7366 - DNA, 21 bp, Homo sapiens
tgcgggagtacatcttctttc

SEQ ID NO: 7367 - DNA, 20 bp, Homo sapiens
cccctgagcacaaatgcagc

SEQ ID NO: 7368 - DNA, 16 bp, Homo sapiens
agccccagaagttggc

SEQ ID NO: 7369 - DNA, 19 bp, Homo sapiens
gtgaaacaggacagccagc

SEQ ID NO: 7370 - DNA, 16 bp, Homo sapiens
cagcgccctccacctt

SEQ ID NO: 7371 - DNA, 24 bp, Homo sapiens
ggtgctcagcctgcttctttctcc

SEQ ID NO: 7372 - DNA, 16 bp, Homo sapiens
ggggcttggagaatcc

SEQ ID NO: 7373 - DNA, 21 bp, Homo sapiens
tccttctacctggacatcaag

SEQ ID NO: 7374 - DNA, 16 bp, Homo sapiens
gactgcctgatgcagg

SEQ ID NO: 7375 - DNA, 18 bp, Homo sapiens
ggattgtgtgatggtacc

SEQ ID NO: 7376 - DNA, 17 bp, Homo sapiens
ggacaggactcctctgc

SEQ ID NO: 7377 - DNA, 24 bp, Homo sapiens
gagtgcagcccatgcacctgttcc

SEQ ID NO: 7378 - DNA, 17 bp, Homo sapiens
gcagacagagctaatgc

SEQ ID NO: 7379 - DNA, 24 bp, Homo sapiens
gttccttctctgcaggccgcgccc

SEQ ID NO: 7380 - DNA, 17 bp, Homo sapiens
gccccctcgtgtcttcc

SEQ ID NO: 7381 - DNA, 17 bp, Homo sapiens
ccactgagggcctctct

SEQ ID NO: 7382 - DNA, 24 bp, Homo sapiens
cagcctgagagagagcctggccct

SEQ ID NO: 7383 - DNA, 16 bp, Homo sapiens
agctgttctccaggcc

SEQ ID NO: 7384 - DNA, 19 bp, Homo sapiens
aaagtcaaactgggggctc

SEQ ID NO: 7385 - DNA, 19 bp, Homo sapiens
ctgcagccccagtgcctgc

SEQ ID NO: 7386 - DNA, 17 bp, Homo sapiens
tcccgcaccacagaggg

SEQ ID NO: 7387 - DNA, 24 bp, Homo sapiens
tcatccttccccatgggtgcaggg

SEQ ID NO: 7388 - DNA, 16 bp, Homo sapiens
catctcccacacaggg

SEQ ID NO: 7389 - DNA, 18 bp, Homo sapiens
cccctccttctcaggagc

SEQ ID NO: 7390 - DNA, 17 bp, Homo sapiens
gcgtatctgcatgggcg

SEQ ID NO: 7391 - DNA, 17 bp, Homo sapiens
tggctcctgccgagact

SEQ ID NO: 7392 - DNA, 20 bp, Homo sapiens
ggtggggtccctgctctctc

SEQ ID NO: 7393 - DNA, 19 bp, Homo sapiens
gacgtagctgacgatgtct

SEQ ID NO: 7394 - DNA, 17 bp, Homo sapiens
gggcagatggtgcaggc

SEQ ID NO: 7395 - DNA, 16 bp, Homo sapiens
ccttccccgtggaggg

SEQ ID NO: 7396 - DNA, 16 bp, Homo sapiens
ctgagccaggcccctc

SEQ ID NO: 7397 - DNA, 17 bp, Homo sapiens
tcctgctcaaggagggg

SEQ ID NO: 7398 - DNA, 19 bp, Homo sapiens
gtacccgctggctatgact

SEQ ID NO: 7399 - DNA, 18 bp, Homo sapiens
cgctcctgcaatctgggc

SEQ ID NO: 7400 - DNA, 18 bp, Homo sapiens
catgggtggccttgggcc

SEQ ID NO: 7401 - DNA, 16 bp, Homo sapiens
aggccgatccgcagca

SEQ ID NO: 7402 - DNA, 18 bp, Homo sapiens
acagggctgtcaactccc

SEQ ID NO: 7403 - DNA, 20 bp, Homo sapiens
gccgccctcagggcctccgt

SEQ ID NO: 7404 - DNA, 24 bp, Homo sapiens
cccatcctggctctggccagctgt

SEQ ID NO: 7405 - DNA, 17 bp, Homo sapiens
gtgccagctgtgtgcca

SEQ ID NO: 7406 - DNA, 16 bp, Homo sapiens
cctgtgccccccaggt

SEQ ID NO: 7407 - DNA, 16 bp, Homo sapiens
gaggaccttgcagggt

SEQ ID NO: 7408 - DNA, 18 bp, Homo sapiens
agaatgtggaccgcgtga

SEQ ID NO: 7409 - DNA, 18 bp, Homo sapiens
gaggctgcctggttctgc

SEQ ID NO: 7410 - DNA, 18 bp, Homo sapiens
ctccctctggcattctgg

SEQ ID NO: 7411 - DNA, 19 bp, Homo sapiens
ggacaggagggcaaccaac

SEQ ID NO: 7412 - DNA, 17 bp, Homo sapiens
cctcagagttcggcttc

SEQ ID NO: 7413 - DNA, 24 bp, Homo sapiens
attcgtccacttcccgggagaggt

SEQ ID NO: 7414 - DNA, 23 bp, Homo sapiens
tgcgccattctccctttacagcc

SEQ ID NO: 7415 - DNA, 22 bp, Homo sapiens
ctcttctcggctcctccattcg

SEQ ID NO: 7416 - DNA, 17 bp, Homo sapiens
ccccctccgtacctgct

SEQ ID NO: 7417 - DNA, 24 bp, Homo sapiens
agattgctgcctatgcaaagcagg

SEQ ID NO: 7418 - DNA, 16 bp, Homo sapiens
cgcccggggcggggtc

SEQ ID NO: 7419 - DNA, 16 bp, Homo sapiens
cagctggagcgttttc

SEQ ID NO: 7420 - DNA, 19 bp, Homo sapiens
cgacgcgcgccgggcttcc

SEQ ID NO: 7421 - DNA, 18 bp, Homo sapiens
gcggaaggcgcgctaaga

SEQ ID NO: 7422 - DNA, 17 bp, Homo sapiens
tccttcctagccatgct

SEQ ID NO: 7423 - DNA, 27 bp, Homo sapiens
taaagaatgacaagatattttattaaa

SEQ ID NO: 7424 - DNA, 22 bp, Homo sapiens
tttacacacaagggatttttcc

SEQ ID NO: 7425 - DNA, 20 bp, Homo sapiens
aatgtatgtatctgcctctg

SEQ ID NO: 7426 - DNA, 21 bp, Homo sapiens
gtctcaattacatggaaatct

SEQ ID NO: 7427 - DNA, 25 bp, Homo sapiens
tttcagaagacactattgtaatagc

SEQ ID NO: 7428 - DNA, 16 bp, Homo sapiens
cccccaacaccagtcc

SEQ ID NO: 7429 - DNA, 21 bp, Homo sapiens
tgaatcatttagcaaggtggg

SEQ ID NO: 7430 - DNA, 19 bp, Homo sapiens
ctggctccagacataatgc

SEQ ID NO: 7431 - DNA, 24 bp, Homo sapiens
gaaacaaactctttgagccgcagt

SEQ ID NO: 7432 - DNA, 16 bp, Homo sapiens
cccggtgtgggctccc

SEQ ID NO: 7433 - DNA, 20 bp, Homo sapiens
tgcaaacgttaaattcttgg

SEQ ID NO: 7434 - DNA, 19 bp, Homo sapiens
gatgctcatacacggcagc

SEQ ID NO: 7435 - DNA, 24 bp, Homo sapiens
cccattacattccagatttgtggt

SEQ ID NO: 7436 - DNA, 23 bp, Homo sapiens
ggttcatgagctccaaggcctct

SEQ ID NO: 7437 - DNA, 18 bp, Homo sapiens
gctgttacgtggttgccc

SEQ ID NO: 7438 - DNA, 16 bp, Homo sapiens
ccttttgggctgcagt

SEQ ID NO: 7439 - DNA, 22 bp, Homo sapiens
acgaggctgaatattatgtggc

SEQ ID NO: 7440 - DNA, 21 bp, Homo sapiens
ccactgatcaaggggtaaaga

SEQ ID NO: 7441 - DNA, 23 bp, Homo sapiens
gaaccctctggctctcatcagcc

SEQ ID NO: 7442 - DNA, 22 bp, Homo sapiens
aggttaactacctggatgcttt

SEQ ID NO: 7443 - DNA, 22 bp, Homo sapiens
atgaacagcaagtgatgactgc

SEQ ID NO: 7444 - DNA, 20 bp, Homo sapiens
gccatcttctggaaacacta

SEQ ID NO: 7445 - DNA, 20 bp, Homo sapiens
gtgcctctggttcctgctac

SEQ ID NO: 7446 - DNA, 19 bp, Homo sapiens
cggcatgaagtccaaaaat

SEQ ID NO: 7447 - DNA, 23 bp, Homo sapiens
gaagaatgaatgaatgcagcggt

SEQ ID NO: 7448 - DNA, 20 bp, Homo sapiens
cctctgtgtcattgaagcgg

SEQ ID NO: 7449 - DNA, 24 bp, Homo sapiens
ttttcaggatgtacagattatagt

SEQ ID NO: 7450 - DNA, 18 bp, Homo sapiens
ccctgacttagatcacct

SEQ ID NO: 7451 - DNA, 23 bp, Homo sapiens
tttacaagaacatccatttatcc

SEQ ID NO: 7452 - DNA, 19 bp, Homo sapiens
gttggattttggggatgtt

SEQ ID NO: 7453 - DNA, 24 bp, Homo sapiens
tggaacccatgcctggagcctcac

SEQ ID NO: 7454 - DNA, 21 bp, Homo sapiens
ccttgtaacgtcagacattct

SEQ ID NO: 7455 - DNA, 20 bp, Homo sapiens
agtaggctgagggtacacag

SEQ ID NO: 7456 - DNA, 21 bp, Homo sapiens
acattcctgtatttattgtgt

SEQ ID NO: 7457 - DNA, 24 bp, Homo sapiens
gagatggggtttcaccgtgttagc

SEQ ID NO: 7458 - DNA, 20 bp, Homo sapiens
ggtcactgctatgacaaggc

SEQ ID NO: 7459 - DNA, 18 bp, Homo sapiens
tcagcctcccacagtgct

SEQ ID NO: 7460 - DNA, 21 bp, Homo sapiens
agggttccattattgctgaac

SEQ ID NO: 7461 - DNA, 24 bp, Homo sapiens
ttttttcctctaggtgctccagcg

SEQ ID NO: 7462 - DNA, 22 bp, Homo sapiens
agaggaacatcgaatgctgcct

SEQ ID NO: 7463 - DNA, 20 bp, Homo sapiens
gccaatcttgggacaaagga

SEQ ID NO: 7464 - DNA, 18 bp, Homo sapiens
catgtgaagatgccaaac

SEQ ID NO: 7465 - DNA, 23 bp, Homo sapiens
gataccagttcaacacaaatgtc

SEQ ID NO: 7466 - DNA, 24 bp, Homo sapiens
acaacatgcttcaccttgtagtct

SEQ ID NO: 7467 - DNA, 24 bp, Homo sapiens
ctaccgtaaacacaacctctactt

SEQ ID NO: 7468 - DNA, 20 bp, Homo sapiens
gaatctcaattgctgccaag

SEQ ID NO: 7469 - DNA, 24 bp, Homo sapiens
catcacctttgataccccctttgc

SEQ ID NO: 7470 - DNA, 17 bp, Homo sapiens
ggtggacattagctgcc

SEQ ID NO: 7471 - DNA, 23 bp, Homo sapiens
ctttgaccctgccatcagagtcc

SEQ ID NO: 7472 - DNA, 20 bp, Homo sapiens
tcatggtaccaaaaggactc

SEQ ID NO: 7473 - DNA, 20 bp, Homo sapiens
gcctggatgaaccagctccc

SEQ ID NO: 7474 - DNA, 19 bp, Homo sapiens
acccactggatttttggcc

SEQ ID NO: 7475 - DNA, 16 bp, Homo sapiens
tcaacgttctggcagc

SEQ ID NO: 7476 - DNA, 23 bp, Homo sapiens
tgacaaaatttttaaaaacttac

SEQ ID NO: 7477 - DNA, 22 bp, Homo sapiens
tggcatacacacccctctggag

SEQ ID NO: 7478 - DNA, 18 bp, Homo sapiens
ggcctcatcacagtggac

SEQ ID NO: 7479 - DNA, 23 bp, Homo sapiens
gtcaccttataattgcccaggtg

SEQ ID NO: 7480 - DNA, 22 bp, Homo sapiens
ggtgaaattgtcatacatcatc

SEQ ID NO: 7481 - DNA, 19 bp, Homo sapiens
caggtgaaacggacccatc

SEQ ID NO: 7482 - DNA, 19 bp, Homo sapiens
cagcagaggccattggaac

SEQ ID NO: 7483 - DNA, 24 bp, Homo sapiens
tgtgagaaggatgctcaggaagtc

SEQ ID NO: 7484 - DNA, 16 bp, Homo sapiens
gacccccagggcatac

SEQ ID NO: 7485 - DNA, 23 bp, Homo sapiens
cccacatttcactctgagatgat

SEQ ID NO: 7486 - DNA, 18 bp, Homo sapiens
cacacctgaccagggcac

SEQ ID NO: 7487 - DNA, 23 bp, Homo sapiens
aaaggaaggctatctccacgtct

SEQ ID NO: 7488 - DNA, 20 bp, Homo sapiens
aactcaaatatccccgtggc

SEQ ID NO: 7489 - DNA, 21 bp, Homo sapiens
cttatccaaagagctgtatgc

SEQ ID NO: 7490 - DNA, 24 bp, Homo sapiens
tctagggtcatccctgaggtcaga

SEQ ID NO: 7491 - DNA, 24 bp, Homo sapiens
cacttactacatccaagtgtgtgc

SEQ ID NO: 7492 - DNA, 20 bp, Homo sapiens
ttttcctcaggaaatagtgg

SEQ ID NO: 7493 - DNA, 18 bp, Homo sapiens
acaggaaatcacagaggc

SEQ ID NO: 7494 - DNA, 20 bp, Homo sapiens
agtccctctcatacaagcgc

SEQ ID NO: 7495 - DNA, 24 bp, Homo sapiens
ttcagtacttcctatatctttcct

SEQ ID NO: 7496 - DNA, 17 bp, Homo sapiens
tggaagtgcaaggctgt

SEQ ID NO: 7497 - DNA, 24 bp, Homo sapiens
gcttggctgggagaatgaccacta

SEQ ID NO: 7498 - DNA, 16 bp, Homo sapiens
gccacagaagtgggct

SEQ ID NO: 7499 - DNA, 17 bp, Homo sapiens
ggctctctatgggcgct

SEQ ID NO: 7500 - DNA, 17 bp, Homo sapiens
attcatggctggaccat

SEQ ID NO: 7501 - DNA, 18 bp, Homo sapiens
aacctcaggtgaaaatgc

SEQ ID NO: 7502 - DNA, 20 bp, Homo sapiens
atcatccctccaaacctgtt

SEQ ID NO: 7503 - DNA, 20 bp, Homo sapiens
atcagtgaaatgtggcatga

SEQ ID NO: 7504 - DNA, 19 bp, Homo sapiens
actatgtgctgtgacgttc

SEQ ID NO: 7505 - DNA, 24 bp, Homo sapiens
aagacacaggctttcatcatcata

SEQ ID NO: 7506 - DNA, 20 bp, Homo sapiens
cggccccaaacaccatcacc

SEQ ID NO: 7507 - DNA, 22 bp, Homo sapiens
gggggcatgagtcttttttcaa

SEQ ID NO: 7508 - DNA, 18 bp, Homo sapiens
attggccagcccggggcc

SEQ ID NO: 7509 - DNA, 23 bp, Homo sapiens
ataactggcctgtccacgaacgt

SEQ ID NO: 7510 - DNA, 23 bp, Homo sapiens
atggttctctgtctctctctctc

SEQ ID NO: 7511 - DNA, 16 bp, Homo sapiens
cccactccagttccag

SEQ ID NO: 7512 - DNA, 16 bp, Homo sapiens
ctacatcagggccccc

SEQ ID NO: 7513 - DNA, 18 bp, Homo sapiens
gcacaaacaaggtcaact

SEQ ID NO: 7514 - DNA, 16 bp, Homo sapiens
ggcctggctgtcagcc

SEQ ID NO: 7515 - DNA, 23 bp, Homo sapiens
aagccattaatccagacctggcc

SEQ ID NO: 7516 - DNA, 23 bp, Homo sapiens
tatccagtttcctggatggacca

SEQ ID NO: 7517 - DNA, 18 bp, Homo sapiens
gcctcctgaagaatgtcc

SEQ ID NO: 7518 - DNA, 18 bp, Homo sapiens
ggggaacttctccattcc

SEQ ID NO: 7519 - DNA, 24 bp, Homo sapiens
actaacagctctttgtgattcttt

SEQ ID NO: 7520 - DNA, 21 bp, Homo sapiens
gccaccatgatgaagcctggg

SEQ ID NO: 7521 - DNA, 24 bp, Homo sapiens
aaacccttcccatgaagacacgta

SEQ ID NO: 7522 - DNA, 18 bp, Homo sapiens
ttccactggacactgagg

SEQ ID NO: 7523 - DNA, 23 bp, Homo sapiens
caagtctgggatcccactgggaa

SEQ ID NO: 7524 - DNA, 24 bp, Homo sapiens
gctttgcagggtttggtttctaac

SEQ ID NO: 7525 - DNA, 24 bp, Homo sapiens
gcgtgtagttggatgagttgtggg

SEQ ID NO: 7526 - DNA, 20 bp, Homo sapiens
agacatgtgaagcctttttc

SEQ ID NO: 7527 - DNA, 16 bp, Homo sapiens
tggctgcacactgcat

SEQ ID NO: 7528 - DNA, 19 bp, Homo sapiens
ggttcatttcctgttggtg

SEQ ID NO: 7529 - DNA, 23 bp, Homo sapiens
cgtgaggatattggaactgagag

SEQ ID NO: 7530 - DNA, 24 bp, Homo sapiens
tacccaggctggtcttgaactcct

SEQ ID NO: 7531 - DNA, 16 bp, Homo sapiens
agccactctggacctt

SEQ ID NO: 7532 - DNA, 20 bp, Homo sapiens
gagattacaggtgtgagcca

SEQ ID NO: 7533 - DNA, 16 bp, Homo sapiens
gatcccccagggagtc

SEQ ID NO: 7534 - DNA, 20 bp, Homo sapiens
tcttgacagtgtggtttgtc

SEQ ID NO: 7535 - DNA, 20 bp, Homo sapiens
gcctctccttgctgaccttc

SEQ ID NO: 7536 - DNA, 22 bp, Homo sapiens
tcacacgtcccatgttctctac

SEQ ID NO: 7537 - DNA, 18 bp, Homo sapiens
ccaagtctggtgacactt

SEQ ID NO: 7538 - DNA, 22 bp, Homo sapiens
cagagtgatcacattgtttcgc

SEQ ID NO: 7539 - DNA, 23 bp, Homo sapiens
aaaaaaaaaaaaagatgatgggt

SEQ ID NO: 7540 - DNA, 18 bp, Homo sapiens
ctcaagattgcagcaacc

SEQ ID NO: 7541 - DNA, 22 bp, Homo sapiens
caaatgctgtgttaacaagtgc

SEQ ID NO: 7542 - DNA, 24 bp, Homo sapiens
tgatgtatttttcttaaatccttt

SEQ ID NO: 7543 - DNA, 18 bp, Homo sapiens
acgattcttaccccatcc

SEQ ID NO: 7544 - DNA, 19 bp, Homo sapiens
catcgctttcatacatgtc

SEQ ID NO: 7545 - DNA, 20 bp, Homo sapiens
gtgaagagagaggtgctggg

SEQ ID NO: 7546 - DNA, 24 bp, Homo sapiens
ccagtttcctttttcaaatttaat

SEQ ID NO: 7547 - DNA, 23 bp, Homo sapiens
aagagagcctggaaattcatggt

SEQ ID NO: 7548 - DNA, 21 bp, Homo sapiens
tctggacattctgtgtccctc

SEQ ID NO: 7549 - DNA, 20 bp, Homo sapiens
cccctgaattcagaatgggc

SEQ ID NO: 7550 - DNA, 19 bp, Homo sapiens
gggtgcagtgtgtgaatgc

SEQ ID NO: 7551 - DNA, 22 bp, Homo sapiens
aaaaaaggcgaggcattacctt

SEQ ID NO: 7552 - DNA, 21 bp, Homo sapiens
ggtcaaacccactgatgtctt

SEQ ID NO: 7553 - DNA, 19 bp, Homo sapiens
ttttgatgggcccagaggg

SEQ ID NO: 7554 - DNA, 19 bp, Homo sapiens
aggagactgggaagcaata

SEQ ID NO: 7555 - DNA, 22 bp, Homo sapiens
aaagtttgcatatggaaaggtc

SEQ ID NO: 7556 - DNA, 21 bp, Homo sapiens
acaaattcgcagaaaaataac

SEQ ID NO: 7557 - DNA, 22 bp, Homo sapiens
ctctctttttctactctggttt

SEQ ID NO: 7558 - DNA, 19 bp, Homo sapiens
aattccactttctcactcc

SEQ ID NO: 7559 - DNA, 28 bp, Homo sapiens
accttgctttcaaataataaattttatg

SEQ ID NO: 7560 - DNA, 22 bp, Homo sapiens
ttcttaccttttccaaagtgac

SEQ ID NO: 7561 - DNA, 24 bp, Homo sapiens
agtctctagttcctttgattttcc

SEQ ID NO: 7562 - DNA, 24 bp, Homo sapiens
ataggaccttctggtactttttca

SEQ ID NO: 7563 - DNA, 22 bp, Homo sapiens
gcaaacccaagtctagctgatg

SEQ ID NO: 7564 - DNA, 20 bp, Homo sapiens
ctatgatgccccactgagtg

SEQ ID NO: 7565 - DNA, 21 bp, Homo sapiens
ggaagttgtccacagagccac

SEQ ID NO: 7566 - DNA, 19 bp, Homo sapiens
gtggcacatttttgtcttc

SEQ ID NO: 7567 - DNA, 21 bp, Homo sapiens
acagctcatacaaagcaccca

SEQ ID NO: 7568 - DNA, 19 bp, Homo sapiens
agtgctgagctcatggatc

SEQ ID NO: 7569 - DNA, 19 bp, Homo sapiens
gtgaggtccccagcctcac

SEQ ID NO: 7570 - DNA, 17 bp, Homo sapiens
ggtcacgtctgtgtctc

SEQ ID NO: 7571 - DNA, 23 bp, Homo sapiens
ctgcatagggtgagttggcccct

SEQ ID NO: 7572 - DNA, 22 bp, Homo sapiens
accaattttgcctattggaatg

SEQ ID NO: 7573 - DNA, 23 bp, Homo sapiens
aaagaaaaagaaaaaaaaagaaa

SEQ ID NO: 7574 - DNA, 19 bp, Homo sapiens
acagtgaagtaccgtgttc

SEQ ID NO: 7575 - DNA, 24 bp, Homo sapiens
ataaaattgtctgtgggcacaccc

SEQ ID NO: 7576 - DNA, 20 bp, Homo sapiens
cgagtgtgaacttgtgagtg

SEQ ID NO: 7577 - DNA, 25 bp, Homo sapiens
ctacagatattaaagtgctcttacc

SEQ ID NO: 7578 - DNA, 20 bp, Homo sapiens
cctcactccacaatcaagac

SEQ ID NO: 7579 - DNA, 24 bp, Homo sapiens
tgtacctacaaggaaacaaaagaa

SEQ ID NO: 7580 - DNA, 24 bp, Homo sapiens
tctttttttgttttagatcaattc

SEQ ID NO: 7581 - DNA, 22 bp, Homo sapiens
gcaccctcccctcaggcaatga

SEQ ID NO: 7582 - DNA, 16 bp, Homo sapiens
attgcagggaagccct

SEQ ID NO: 7583 - DNA, 23 bp, Homo sapiens
tatcatagagggaggaagccact

SEQ ID NO: 7584 - DNA, 22 bp, Homo sapiens
ctctgggttaagcagtgcatgt

SEQ ID NO: 7585 - DNA, 24 bp, Homo sapiens
tgatctagccagccagtatagaat

SEQ ID NO: 7586 - DNA, 24 bp, Homo sapiens
tgctgtcattcacatgtccagaat

SEQ ID NO: 7587 - DNA, 22 bp, Homo sapiens
aattttcaggcagcaacatcac

SEQ ID NO: 7588 - DNA, 21 bp, Homo sapiens
ccaaaaacatcaagggcctac

SEQ ID NO: 7589 - DNA, 22 bp, Homo sapiens
agggctcttgttatttaacttc

SEQ ID NO: 7590 - DNA, 23 bp, Homo sapiens
gctgcaaacacacacctcaccct

SEQ ID NO: 7591 - DNA, 21 bp, Homo sapiens
aattttggggggatactaaca

SEQ ID NO: 7592 - DNA, 22 bp, Homo sapiens
tctggcttaggaaagcatctgt

SEQ ID NO: 7593 - DNA, 16 bp, Homo sapiens
cctctacaccacggtg

SEQ ID NO: 7594 - DNA, 23 bp, Homo sapiens
cctgttccttgaaaaatgaaaac

SEQ ID NO: 7595 - DNA, 21 bp, Homo sapiens
atgtggttctgtttaccactg

SEQ ID NO: 7596 - DNA, 18 bp, Homo sapiens
cagagcaactgactgagt

SEQ ID NO: 7597 - DNA, 21 bp, Homo sapiens
ttgcctgtgattttgactacc

SEQ ID NO: 7598 - DNA, 19 bp, Homo sapiens
accaacctgttccaaagtc

SEQ ID NO: 7599 - DNA, 22 bp, Homo sapiens
gatctcctcatttttccctgct

SEQ ID NO: 7600 - DNA, 21 bp, Homo sapiens
aggaatgttttatgtgctcca

SEQ ID NO: 7601 - DNA, 20 bp, Homo sapiens
cagatgctcagatattttcc

SEQ ID NO: 7602 - DNA, 23 bp, Homo sapiens
ggcgaaagcgcttctgcaggaag

SEQ ID NO: 7603 - DNA, 21 bp, Homo sapiens
cagttttgaggtctgagtgaa

SEQ ID NO: 7604 - DNA, 19 bp, Homo sapiens
ccagttataacagtgcagg

SEQ ID NO: 7605 - DNA, 24 bp, Homo sapiens
tgaactaaaagcactatctgtggc

SEQ ID NO: 7606 - DNA, 19 bp, Homo sapiens
gacaagtggttgggagtcc

SEQ ID NO: 7607 - DNA, 23 bp, Homo sapiens
atgtctgcatcacttctatcatt

SEQ ID NO: 7608 - DNA, 16 bp, Homo sapiens
ggttggacaagcttgt

SEQ ID NO: 7609 - DNA, 24 bp, Homo sapiens
catccatgctcaactccagggtta

SEQ ID NO: 7610 - DNA, 22 bp, Homo sapiens
aagtttacgaatttgtgttggg

SEQ ID NO: 7611 - DNA, 22 bp, Homo sapiens
gagaggcttcatcttgggcaga

SEQ ID NO: 7612 - DNA, 23 bp, Homo sapiens
agagaaagagtctattcttctcc

SEQ ID NO: 7613 - DNA, 18 bp, Homo sapiens
gaactcccaacctcaggt

SEQ ID NO: 7614 - DNA, 21 bp, Homo sapiens
attataatggcttgttttccc

SEQ ID NO: 7615 - DNA, 18 bp, Homo sapiens
gtgagccaccgcacctag

SEQ ID NO: 7616 - DNA, 27 bp, Homo sapiens
gaagcttttattcttttccataactac

SEQ ID NO: 7617 - DNA, 17 bp, Homo sapiens
caacctacctgggtcgg

SEQ ID NO: 7618 - DNA, 21 bp, Homo sapiens
tttctctgcaagttataaacc

SEQ ID NO: 7619 - DNA, 22 bp, Homo sapiens
tatcctgaggcccgggccctac

SEQ ID NO: 7620 - DNA, 16 bp, Homo sapiens
tcccaggccccatgct

SEQ ID NO: 7621 - DNA, 22 bp, Homo sapiens
ttttctgaggaccatgatgtgg

SEQ ID NO: 7622 - DNA, 16 bp, Homo sapiens
ctgctgcctgccagct

SEQ ID NO: 7623 - DNA, 20 bp, Homo sapiens
tgtgtcttggcaggtatgtg

SEQ ID NO: 7624 - DNA, 24 bp, Homo sapiens
tcaccatttcccactctgcacaga

SEQ ID NO: 7625 - DNA, 20 bp, Homo sapiens
ctttccccacgcttctttct

SEQ ID NO: 7626 - DNA, 21 bp, Homo sapiens
gccagccgaagaaaatattcc

SEQ ID NO: 7627 - DNA, 20 bp, Homo sapiens
ttttctttcaaagcgccttc

SEQ ID NO: 7628 - DNA, 18 bp, Homo sapiens
ctcatgaaagttccaggg

SEQ ID NO: 7629 - DNA, 17 bp, Homo sapiens
gctgaacgccatccaga

SEQ ID NO: 7630 - DNA, 17 bp, Homo sapiens
agcccctcccagaacat

SEQ ID NO: 7631 - DNA, 17 bp, Homo sapiens
actactcccgtgtgccc

SEQ ID NO: 7632 - DNA, 24 bp, Homo sapiens
caccctgagaaatacagttgtatc

SEQ ID NO: 7633 - DNA, 24 bp, Homo sapiens
attgactatagccgggactccttc

SEQ ID NO: 7634 - DNA, 18 bp, Homo sapiens
gccctcctacttacgtct

SEQ ID NO: 7635 - DNA, 19 bp, Homo sapiens
ggaagttctcatgtgaccc

SEQ ID NO: 7636 - DNA, 22 bp, Homo sapiens
agccggtccttccagtagaagc

SEQ ID NO: 7637 - DNA, 17 bp, Homo sapiens
aggcagagagtcacttg

SEQ ID NO: 7638 - DNA, 20 bp, Homo sapiens
aatggctggccatccttgag

SEQ ID NO: 7639 - DNA, 20 bp, Homo sapiens
tggtttgtatgatagctcag

SEQ ID NO: 7640 - DNA, 16 bp, Homo sapiens
agaaggaggcggcagc

SEQ ID NO: 7641 - DNA, 24 bp, Homo sapiens
ctcatgcctgtaatcccagcaatt

SEQ ID NO: 7642 - DNA, 23 bp, Homo sapiens
ctgccgcttcacaaaagaggtac

SEQ ID NO: 7643 - DNA, 24 bp, Homo sapiens
aggagttcaagaccagtctgggga

SEQ ID NO: 7644 - DNA, 17 bp, Homo sapiens
cgattccttccttgggc

SEQ ID NO: 7645 - DNA, 19 bp, Homo sapiens
tgtctccctcacccactgc

SEQ ID NO: 7646 - DNA, 22 bp, Homo sapiens
taaactgcaccacagaaccctc

SEQ ID NO: 7647 - DNA, 18 bp, Homo sapiens
tgctcattcggtgcagtc

SEQ ID NO: 7648 - DNA, 18 bp, Homo sapiens
atcgttcacaacaggctt

SEQ ID NO: 7649 - DNA, 20 bp, Homo sapiens
ttgccgtggcagatgaaaag

SEQ ID NO: 7650 - DNA, 16 bp, Homo sapiens
ctacgcgcggcttgcg

SEQ ID NO: 7651 - DNA, 16 bp, Homo sapiens
cgcgagcctgctgggg

SEQ ID NO: 7652 - DNA, 18 bp, Homo sapiens
gtcatgccggggttcctg

SEQ ID NO: 7653 - DNA, 24 bp, Homo sapiens
gtggctgcgaccccagcccggttc

SEQ ID NO: 7654 - DNA, 20 bp, Homo sapiens
ggtccttagtcaagtgacgc

SEQ ID NO: 7655 - DNA, 18 bp, Homo sapiens
gggtcccgcagacttacg

SEQ ID NO: 7656 - DNA, 16 bp, Homo sapiens
gctgagcaggcgcgag

SEQ ID NO: 7657 - DNA, 19 bp, Homo sapiens
ggaggatgcgaaccaggaa

SEQ ID NO: 7658 - DNA, 17 bp, Homo sapiens
tcctcaccaggtactgc

SEQ ID NO: 7659 - DNA, 22 bp, Homo sapiens
caagtcactgaaataacggacg

SEQ ID NO: 7660 - DNA, 17 bp, Homo sapiens
ctctgcctgagcgtctc

SEQ ID NO: 7661 - DNA, 16 bp, Homo sapiens
ggacagtggggttctg

SEQ ID NO: 7662 - DNA, 16 bp, Homo sapiens
tctgaggtcagagccc

SEQ ID NO: 7663 - DNA, 23 bp, Homo sapiens
gctcattatctgggcctcagtcc

SEQ ID NO: 7664 - DNA, 22 bp, Homo sapiens
ctctttggtctgggcgtctgcc

SEQ ID NO: 7665 - DNA, 19 bp, Homo sapiens
gttttgggacccgtgaggc

SEQ ID NO: 7666 - DNA, 24 bp, Homo sapiens
acctggaaccctggcccaaggact

SEQ ID NO: 7667 - DNA, 20 bp, Homo sapiens
gtgacaggcagcacagaggc

SEQ ID NO: 7668 - DNA, 16 bp, Homo sapiens
ttccccacggtggggg

SEQ ID NO: 7669 - DNA, 17 bp, Homo sapiens
ccactggatgagggctc

SEQ ID NO: 7670 - DNA, 24 bp, Homo sapiens
cggggtgggcagcggcgctcgcag

SEQ ID NO: 7671 - DNA, 22 bp, Homo sapiens
cctttcaaccctctctgattcc

SEQ ID NO: 7672 - DNA, 20 bp, Homo sapiens
tagacaaaagggtgacaggc

SEQ ID NO: 7673 - DNA, 16 bp, Homo sapiens
ggggtctggggagggg

SEQ ID NO: 7674 - DNA, 18 bp, Homo sapiens
gtgtaggcagtgcaggag

SEQ ID NO: 7675 - DNA, 17 bp, Homo sapiens
ggaggagtaccaggacc

SEQ ID NO: 7676 - DNA, 19 bp, Homo sapiens
gtcaagtcagcagggtttg

SEQ ID NO: 7677 - DNA, 23 bp, Homo sapiens
ccctacctgcagagcgggtaccc

SEQ ID NO: 7678 - DNA, 23 bp, Homo sapiens
cagcagggctcagccctgcctgc

SEQ ID NO: 7679 - DNA, 19 bp, Homo sapiens
tcagtgctgcccaccttgc

SEQ ID NO: 7680 - DNA, 24 bp, Homo sapiens
accatcactatcccaaggagcttc

SEQ ID NO: 7681 - DNA, 18 bp, Homo sapiens
caagcacgtagggtctgc

SEQ ID NO: 7682 - DNA, 24 bp, Homo sapiens
attcagagtactcatcatcctcag

SEQ ID NO: 7683 - DNA, 18 bp, Homo sapiens
catgctgtgcctgtgctc

SEQ ID NO: 7684 - DNA, 16 bp, Homo sapiens
cgtgtgccctgcatgc

SEQ ID NO: 7685 - DNA, 16 bp, Homo sapiens
cttggctccaggaccc

SEQ ID NO: 7686 - DNA, 23 bp, Homo sapiens
gacacccatgtgcgtgtctcggc

SEQ ID NO: 7687 - DNA, 16 bp, Homo sapiens
tctcaggggggttggc

SEQ ID NO: 7688 - DNA, 24 bp, Homo sapiens
ccttcctcctctgcatgagagacg

SEQ ID NO: 7689 - DNA, 24 bp, Homo sapiens
tgagtagttttctactcccagaac

SEQ ID NO: 7690 - DNA, 24 bp, Homo sapiens
cagtgtctgcagcataactaggga

SEQ ID NO: 7691 - DNA, 24 bp, Homo sapiens
ttgtctctctatccctctctgccc

SEQ ID NO: 7692 - DNA, 18 bp, Homo sapiens
tcaccatgggcagccatc

SEQ ID NO: 7693 - DNA, 22 bp, Homo sapiens
ctgcctgtgtgtctctgtctgt

SEQ ID NO: 7694 - DNA, 22 bp, Homo sapiens
cagggcctggggtgaagaaagt

SEQ ID NO: 7695 - DNA, 20 bp, Homo sapiens
cctctctcttcctctctctc

SEQ ID NO: 7696 - DNA, 18 bp, Homo sapiens
ggctttgtgcgccaagag

SEQ ID NO: 7697 - DNA, 24 bp, Homo sapiens
tgtccttctgtgtatccatccatc

SEQ ID NO: 7698 - DNA, 21 bp, Homo sapiens
cttcctgtgggccatgggttc

SEQ ID NO: 7699 - DNA, 19 bp, Homo sapiens
ctgcccttgcctagggtgc

SEQ ID NO: 7700 - DNA, 16 bp, Homo sapiens
ggccctggctccatgc

SEQ ID NO: 7701 - DNA, 24 bp, Homo sapiens
actcaccacagtgctgactcatct

SEQ ID NO: 7702 - DNA, 16 bp, Homo sapiens
gagggcctgggtgggc

SEQ ID NO: 7703 - DNA, 18 bp, Homo sapiens
cgaggcgagaagggagaa

SEQ ID NO: 7704 - DNA, 17 bp, Homo sapiens
gactatggtgagactgc

SEQ ID NO: 7705 - DNA, 17 bp, Homo sapiens
aggtcagaggtcacagc

SEQ ID NO: 7706 - DNA, 17 bp, Homo sapiens
gtagggccccagcccac

SEQ ID NO: 7707 - DNA, 20 bp, Homo sapiens
gagcaggtgagtagggattc

SEQ ID NO: 7708 - DNA, 21 bp, Homo sapiens
caccgtcagtgcagcttctcc

SEQ ID NO: 7709 - DNA, 18 bp, Homo sapiens
ccccggagagagagtggt

SEQ ID NO: 7710 - DNA, 21 bp, Homo sapiens
cccctatgtgcaacagatggg

SEQ ID NO: 7711 - DNA, 16 bp, Homo sapiens
cccactgcctctgacc

SEQ ID NO: 7712 - DNA, 16 bp, Homo sapiens
tctctgacccaagcct

SEQ ID NO: 7713 - DNA, 19 bp, Homo sapiens
catcttccagcctgcctgc

SEQ ID NO: 7714 - DNA, 17 bp, Homo sapiens
ccagggaccccaggagc

SEQ ID NO: 7715 - DNA, 16 bp, Homo sapiens
gccccagctctgactc

SEQ ID NO: 7716 - DNA, 17 bp, Homo sapiens
acagggaccaagtgagc

SEQ ID NO: 7717 - DNA, 24 bp, Homo sapiens
cccccagggccacctggcagtgtt

SEQ ID NO: 7718 - DNA, 16 bp, Homo sapiens
gcttcagaggttgggg

SEQ ID NO: 7719 - DNA, 23 bp, Homo sapiens
agggaaccccaggaattgggggc

SEQ ID NO: 7720 - DNA, 21 bp, Homo sapiens
gtagggaaggttcagggatca

SEQ ID NO: 7721 - DNA, 20 bp, Homo sapiens
ctttgggagagggtccatct

SEQ ID NO: 7722 - DNA, 23 bp, Homo sapiens
aagtccttcggggcctctgggac

SEQ ID NO: 7723 - DNA, 17 bp, Homo sapiens
agaaaggggagcgggtg

SEQ ID NO: 7724 - DNA, 18 bp, Homo sapiens
ctggggcctgggaagccc

SEQ ID NO: 7725 - DNA, 24 bp, Homo sapiens
tgcttcttctgttcccagggtgac

SEQ ID NO: 7726 - DNA, 21 bp, Homo sapiens
agtaatcagaggccccagaga

SEQ ID NO: 7727 - DNA, 19 bp, Homo sapiens
tgggagttcagggaggttc

SEQ ID NO: 7728 - DNA, 24 bp, Homo sapiens
accatgaccatggcttcaactcac

SEQ ID NO: 7729 - DNA, 24 bp, Homo sapiens
gatcacatctggttggctcacagg

SEQ ID NO: 7730 - DNA, 21 bp, Homo sapiens
cctggctgcccgtcaaagcct

SEQ ID NO: 7731 - DNA, 23 bp, Homo sapiens
tcctaactccactgtgaccccaa

SEQ ID NO: 7732 - DNA, 16 bp, Homo sapiens
gccagtcgggggcccc

SEQ ID NO: 7733 - DNA, 16 bp, Homo sapiens
cccaaccctctacagc

SEQ ID NO: 7734 - DNA, 16 bp, Homo sapiens
ggggccacgggtggac

SEQ ID NO: 7735 - DNA, 18 bp, Homo sapiens
cccatcctgactccctgt

SEQ ID NO: 7736 - DNA, 17 bp, Homo sapiens
cccgggctggcaggaca

SEQ ID NO: 7737 - DNA, 17 bp, Homo sapiens
ccctccttgccaggggc

SEQ ID NO: 7738 - DNA, 18 bp, Homo sapiens
ggggcctaaggctcaccc

SEQ ID NO: 7739 - DNA, 18 bp, Homo sapiens
aaagacatgaacttggcc

SEQ ID NO: 7740 - DNA, 22 bp, Homo sapiens
gccttgatggagagaagggaga

SEQ ID NO: 7741 - DNA, 24 bp, Homo sapiens
cacactcaccatctctcctttgtg

SEQ ID NO: 7742 - DNA, 18 bp, Homo sapiens
tcacttcttcatctgctt

SEQ ID NO: 7743 - DNA, 17 bp, Homo sapiens
gcatcaggcagtggggt

SEQ ID NO: 7744 - DNA, 17 bp, Homo sapiens
aggcctgtttggagagt

SEQ ID NO: 7745 - DNA, 23 bp, Homo sapiens
cccatcccctctgtaccttgtct

SEQ ID NO: 7746 - DNA, 20 bp, Homo sapiens
aatgttgaagggcgagggac

SEQ ID NO: 7747 - DNA, 16 bp, Homo sapiens
cggggcctcaaggtag

SEQ ID NO: 7748 - DNA, 24 bp, Homo sapiens
ctgtgacccccttcaccctgaaac

SEQ ID NO: 7749 - DNA, 18 bp, Homo sapiens
aaaggatggagtgcctgg

SEQ ID NO: 7750 - DNA, 21 bp, Homo sapiens
ccagtgccctaatatctgacc

SEQ ID NO: 7751 - DNA, 20 bp, Homo sapiens
ctctttggtccctcactgac

SEQ ID NO: 7752 - DNA, 22 bp, Homo sapiens
aaaccaatcttgtttctttcct

SEQ ID NO: 7753 - DNA, 23 bp, Homo sapiens
gtggctctggcctccagaggtga

SEQ ID NO: 7754 - DNA, 24 bp, Homo sapiens
cctttttctcctcggataccaggc

SEQ ID NO: 7755 - DNA, 18 bp, Homo sapiens
gcagggatccctggtgac

SEQ ID NO: 7756 - DNA, 23 bp, Homo sapiens
gaccctgggtgacatgaggacac

SEQ ID NO: 7757 - DNA, 16 bp, Homo sapiens
tgttggggacagtccc

SEQ ID NO: 7758 - DNA, 18 bp, Homo sapiens
cacactggtgggaccacc

SEQ ID NO: 7759 - DNA, 23 bp, Homo sapiens
ctgtgtgtggcctgggccctggc

SEQ ID NO: 7760 - DNA, 18 bp, Homo sapiens
ggcatcttaccgggtcac

SEQ ID NO: 7761 - DNA, 16 bp, Homo sapiens
gggggttctggctccc

SEQ ID NO: 7762 - DNA, 16 bp, Homo sapiens
gccgggttgccaggac

SEQ ID NO: 7763 - DNA, 16 bp, Homo sapiens
ccggcagcaagggagc

SEQ ID NO: 7764 - DNA, 18 bp, Homo sapiens
ctgaatccctctcctggt

SEQ ID NO: 7765 - DNA, 17 bp, Homo sapiens
tgtgtgtgtgatgctgg

SEQ ID NO: 7766 - DNA, 16 bp, Homo sapiens
ctctgccccagctggc

SEQ ID NO: 7767 - DNA, 17 bp, Homo sapiens
ggtcccaggagtccacg

SEQ ID NO: 7768 - DNA, 16 bp, Homo sapiens
cccgctatggcacagg

SEQ ID NO: 7769 - DNA, 17 bp, Homo sapiens
ctccctagagcccctcc

SEQ ID NO: 7770 - DNA, 24 bp, Homo sapiens
ggcttggatggtgacaaaggacct

SEQ ID NO: 7771 - DNA, 17 bp, Homo sapiens
aaccccagaaagcctcc

SEQ ID NO: 7772 - DNA, 18 bp, Homo sapiens
gccccttaccgtgacttc

SEQ ID NO: 7773 - DNA, 21 bp, Homo sapiens
gaaccaccacagccacaggac

SEQ ID NO: 7774 - DNA, 17 bp, Homo sapiens
gtggggctggcccaggg

SEQ ID NO: 7775 - DNA, 19 bp, Homo sapiens
cagggtccccattgtctcc

SEQ ID NO: 7776 - DNA, 16 bp, Homo sapiens
gacatggtgagtgggc

SEQ ID NO: 7777 - DNA, 17 bp, Homo sapiens
ccctgggttggtttggg

SEQ ID NO: 7778 - DNA, 16 bp, Homo sapiens
ccccctcagggagact

SEQ ID NO: 7779 - DNA, 21 bp, Homo sapiens
ggagtttgagctctcagatgc

SEQ ID NO: 7780 - DNA, 16 bp, Homo sapiens
tgggcatggggagggc

SEQ ID NO: 7781 - DNA, 16 bp, Homo sapiens
ccagtccacacgtggg

SEQ ID NO: 7782 - DNA, 18 bp, Homo sapiens
actcacactcttttgccc

SEQ ID NO: 7783 - DNA, 24 bp, Homo sapiens
ctggaggccccaggatcacagctg

SEQ ID NO: 7784 - DNA, 22 bp, Homo sapiens
ggtgagtggatcttgtatgata

SEQ ID NO: 7785 - DNA, 16 bp, Homo sapiens
cccctgccctgccctc

SEQ ID NO: 7786 - DNA, 16 bp, Homo sapiens
aggggagagcgtgggg

SEQ ID NO: 7787 - DNA, 24 bp, Homo sapiens
tgcactcccaacatcaccctattg

SEQ ID NO: 7788 - DNA, 16 bp, Homo sapiens
ctgccctggttcctgt

SEQ ID NO: 7789 - DNA, 23 bp, Homo sapiens
ccccgcacctgaattctaatatc

SEQ ID NO: 7790 - DNA, 19 bp, Homo sapiens
acccctgtcccctttgtct

SEQ ID NO: 7791 - DNA, 23 bp, Homo sapiens
ccttccccacgttcctaccttct

SEQ ID NO: 7792 - DNA, 16 bp, Homo sapiens
gtgccctttgtacccc

SEQ ID NO: 7793 - DNA, 18 bp, Homo sapiens
gagggaaacagtggggac

SEQ ID NO: 7794 - DNA, 21 bp, Homo sapiens
aatgaacctaatgtcaccatc

SEQ ID NO: 7795 - DNA, 18 bp, Homo sapiens
gggaggatggcagagagt

SEQ ID NO: 7796 - DNA, 17 bp, Homo sapiens
tactccacagccgaact

SEQ ID NO: 7797 - DNA, 24 bp, Homo sapiens
agtcacagcactgtcactttcccc

SEQ ID NO: 7798 - DNA, 18 bp, Homo sapiens
gagtagggctgcctgggc

SEQ ID NO: 7799 - DNA, 17 bp, Homo sapiens
ggccatcttcaccctgg

SEQ ID NO: 7800 - DNA, 17 bp, Homo sapiens
tcccccactgattcccc

SEQ ID NO: 7801 - DNA, 21 bp, Homo sapiens
cagaggcaagagctgggatga

SEQ ID NO: 7802 - DNA, 21 bp, Homo sapiens
gactctctcttgtgccctggt

SEQ ID NO: 7803 - DNA, 16 bp, Homo sapiens
ctccccacgctcgcct

SEQ ID NO: 7804 - DNA, 23 bp, Homo sapiens
gacctacagggaccacctggggc

SEQ ID NO: 7805 - DNA, 20 bp, Homo sapiens
ccaacaggacaccggggatc

SEQ ID NO: 7806 - DNA, 16 bp, Homo sapiens
ggggtgttgggggagg

SEQ ID NO: 7807 - DNA, 24 bp, Homo sapiens
gtcagtggaggctgaagggggtga

SEQ ID NO: 7808 - DNA, 23 bp, Homo sapiens
cctaaagccccacgtatttgatt

SEQ ID NO: 7809 - DNA, 24 bp, Homo sapiens
cacctaccttgtctcctttgagtc

SEQ ID NO: 7810 - DNA, 16 bp, Homo sapiens
ggaatcccaggacccc

SEQ ID NO: 7811 - DNA, 21 bp, Homo sapiens
gtcctgtggctctcaaagcgc

SEQ ID NO: 7812 - DNA, 21 bp, Homo sapiens
agtcactctctgcctctcttg

SEQ ID NO: 7813 - DNA, 24 bp, Homo sapiens
taagtcctcacgaggacaggaaat

SEQ ID NO: 7814 - DNA, 17 bp, Homo sapiens
ctgccttgggggttccc

SEQ ID NO: 7815 - DNA, 16 bp, Homo sapiens
ggtggtccaggtggcc

SEQ ID NO: 7816 - DNA, 16 bp, Homo sapiens
aggggctgggaacagc

SEQ ID NO: 7817 - DNA, 23 bp, Homo sapiens
cagaccctaccagaaaaatgggg

SEQ ID NO: 7818 - DNA, 16 bp, Homo sapiens
cccgggtcagacaggc

SEQ ID NO: 7819 - DNA, 24 bp, Homo sapiens
tcctaccctctgccccctcaagac

SEQ ID NO: 7820 - DNA, 24 bp, Homo sapiens
tgctgtttttatttcagggagatc

SEQ ID NO: 7821 - DNA, 24 bp, Homo sapiens
attcaccatgcccctacatgctgt

SEQ ID NO: 7822 - DNA, 21 bp, Homo sapiens
ggaagagggagttctgatgag

SEQ ID NO: 7823 - DNA, 24 bp, Homo sapiens
gctgacccatctctcctcgagggc

SEQ ID NO: 7824 - DNA, 24 bp, Homo sapiens
gtgaaggtaagtcaatgccccatc

SEQ ID NO: 7825 - DNA, 18 bp, Homo sapiens
cagggaggcccagatctc

SEQ ID NO: 7826 - DNA, 16 bp, Homo sapiens
tgacccaggagtcggg

SEQ ID NO: 7827 - DNA, 16 bp, Homo sapiens
cccctcccaggactct

SEQ ID NO: 7828 - DNA, 16 bp, Homo sapiens
ctgctggggtcctggt

SEQ ID NO: 7829 - DNA, 20 bp, Homo sapiens
gctgcccctacaactggtga

SEQ ID NO: 7830 - DNA, 23 bp, Homo sapiens
tttcttagggtcagaaaggggct

SEQ ID NO: 7831 - DNA, 16 bp, Homo sapiens
ggggagcccgggaccc

SEQ ID NO: 7832 - DNA, 18 bp, Homo sapiens
cgtgtctgaactctgtgc

SEQ ID NO: 7833 - DNA, 20 bp, Homo sapiens
atcaagctcagggagtctca

SEQ ID NO: 7834 - DNA, 16 bp, Homo sapiens
cgcatgtctgagttcc

SEQ ID NO: 7835 - DNA, 24 bp, Homo sapiens
cataccttgaaacctttgggtcct

SEQ ID NO: 7836 - DNA, 18 bp, Homo sapiens
tgtgatccagagagcagg

SEQ ID NO: 7837 - DNA, 16 bp, Homo sapiens
gacacccctcacctgc

SEQ ID NO: 7838 - DNA, 23 bp, Homo sapiens
agacatgtgccccggcccaagag

SEQ ID NO: 7839 - DNA, 17 bp, Homo sapiens
aggtgaggtgggttggc

SEQ ID NO: 7840 - DNA, 17 bp, Homo sapiens
cttgcctaggccccgga

SEQ ID NO: 7841 - DNA, 21 bp, Homo sapiens
gtgttgcctcctgacctctgt

SEQ ID NO: 7842 - DNA, 18 bp, Homo sapiens
agcttcaccctgcacaga

SEQ ID NO: 7843 - DNA, 18 bp, Homo sapiens
taagctctggccccatgc

SEQ ID NO: 7844 - DNA, 22 bp, Homo sapiens
gctcagtagtcaggccccaggg

SEQ ID NO: 7845 - DNA, 19 bp, Homo sapiens
ttcgacccatagtttaccc

SEQ ID NO: 7846 - DNA, 16 bp, Homo sapiens
ggtcacctttggctcc

SEQ ID NO: 7847 - DNA, 23 bp, Homo sapiens
acagaaagatgagactccggagg

SEQ ID NO: 7848 - DNA, 19 bp, Homo sapiens
ctcccccttaccagggagc

SEQ ID NO: 7849 - DNA, 24 bp, Homo sapiens
tatgaaagctgagggtcatgaggg

SEQ ID NO: 7850 - DNA, 16 bp, Homo sapiens
gctgccagtgaggggg

SEQ ID NO: 7851 - DNA, 24 bp, Homo sapiens
ggagagacaggacccccagaacat

SEQ ID NO: 7852 - DNA, 16 bp, Homo sapiens
agcattccccacaggc

SEQ ID NO: 7853 - DNA, 17 bp, Homo sapiens
gtctccagcaaggcctc

SEQ ID NO: 7854 - DNA, 19 bp, Homo sapiens
aagcctgtttccaaatgcc

SEQ ID NO: 7855 - DNA, 16 bp, Homo sapiens
ccagttgaccccccct

SEQ ID NO: 7856 - DNA, 23 bp, Homo sapiens
cctggacaggtgatctttgaccc

SEQ ID NO: 7857 - DNA, 16 bp, Homo sapiens
ctccagggagcccgac

SEQ ID NO: 7858 - DNA, 16 bp, Homo sapiens
gtctgcctggccctgt

SEQ ID NO: 7859 - DNA, 17 bp, Homo sapiens
gcccccaccctgccacc

SEQ ID NO: 7860 - DNA, 16 bp, Homo sapiens
caggggtggtggtgga

SEQ ID NO: 7861 - DNA, 24 bp, Homo sapiens
ggagttgctgcagggggtggaagt

SEQ ID NO: 7862 - DNA, 16 bp, Homo sapiens
ggcagctcgctagggt

SEQ ID NO: 7863 - DNA, 20 bp, Homo sapiens
gccaggttctcctttaggtc

SEQ ID NO: 7864 - DNA, 18 bp, Homo sapiens
tcgagatggtgccagtgg

SEQ ID NO: 7865 - DNA, 16 bp, Homo sapiens
gaggaactcagtgcct

SEQ ID NO: 7866 - DNA, 17 bp, Homo sapiens
gccctgacagagctctt

SEQ ID NO: 7867 - DNA, 17 bp, Homo sapiens
ccacagctgggcaccac

SEQ ID NO: 7868 - DNA, 24 bp, Homo sapiens
ggtttgcctggacaagtggtgagt

SEQ ID NO: 7869 - DNA, 24 bp, Homo sapiens
ggctccctctgtctccatcttttc

SEQ ID NO: 7870 - DNA, 19 bp, Homo sapiens
ccattgtcaccctgacatc

SEQ ID NO: 7871 - DNA, 18 bp, Homo sapiens
cccctgagagggaagagc

SEQ ID NO: 7872 - DNA, 20 bp, Homo sapiens
ctgtagggacaccgtgtttt

SEQ ID NO: 7873 - DNA, 18 bp, Homo sapiens
cccttgacccccagaact

SEQ ID NO: 7874 - DNA, 16 bp, Homo sapiens
ggacttcctggacccc

SEQ ID NO: 7875 - DNA, 19 bp, Homo sapiens
accctgacggagaacaagt

SEQ ID NO: 7876 - DNA, 22 bp, Homo sapiens
tggggttggcactgccctgaac

SEQ ID NO: 7877 - DNA, 24 bp, Homo sapiens
gagagaacatgggccccaaggagt

SEQ ID NO: 7878 - DNA, 16 bp, Homo sapiens
ggacctccaggacggg

SEQ ID NO: 7879 - DNA, 16 bp, Homo sapiens
caaggcctgaagggcc

SEQ ID NO: 7880 - DNA, 17 bp, Homo sapiens
cacgtgggctctgctca

SEQ ID NO: 7881 - DNA, 21 bp, Homo sapiens
ccctggaggaagagaaagttc

SEQ ID NO: 7882 - DNA, 17 bp, Homo sapiens
gtagtgtgcgccaacct

SEQ ID NO: 7883 - DNA, 24 bp, Homo sapiens
ccctaacctgtgagctaggccact

SEQ ID NO: 7884 - DNA, 16 bp, Homo sapiens
gagtctaggtgtgtgg

SEQ ID NO: 7885 - DNA, 24 bp, Homo sapiens
caaacaacccagagactgcatgag

SEQ ID NO: 7886 - DNA, 21 bp, Homo sapiens
tgacccttttctctagggtct

SEQ ID NO: 7887 - DNA, 23 bp, Homo sapiens
ctcattgcaggagatgacagccc

SEQ ID NO: 7888 - DNA, 20 bp, Homo sapiens
attggccacagctgatgagc

SEQ ID NO: 7889 - DNA, 23 bp, Homo sapiens
agcttgaaggagcctcctcctcc

SEQ ID NO: 7890 - DNA, 19 bp, Homo sapiens
ggtgagtgaccagggaaca

SEQ ID NO: 7891 - DNA, 17 bp, Homo sapiens
gcagggccagcaagacc

SEQ ID NO: 7892 - DNA, 20 bp, Homo sapiens
catcagactctttttcgcca

SEQ ID NO: 7893 - DNA, 19 bp, Homo sapiens
ggattaacacagagaaggc

SEQ ID NO: 7894 - DNA, 19 bp, Homo sapiens
tgtgccctgccccagtgac

SEQ ID NO: 7895 - DNA, 23 bp, Homo sapiens
cagaccctcaccaggcagtgttc

SEQ ID NO: 7896 - DNA, 16 bp, Homo sapiens
cccctggcccagtggt

SEQ ID NO: 7897 - DNA, 24 bp, Homo sapiens
tctccatgaccaccctgttgtggc

SEQ ID NO: 7898 - DNA, 23 bp, Homo sapiens
caagtgaggcccagattgaggct

SEQ ID NO: 7899 - DNA, 20 bp, Homo sapiens
ccaaggaaactgaggcagta

SEQ ID NO: 7900 - DNA, 24 bp, Homo sapiens
aagggtgaggtatggaaattgacc

SEQ ID NO: 7901 - DNA, 20 bp, Homo sapiens
aggtgaaggttcttgggtac

SEQ ID NO: 7902 - DNA, 16 bp, Homo sapiens
ggcccgtgtgtgctat

SEQ ID NO: 7903 - DNA, 16 bp, Homo sapiens
gtggtatggctgggcc

SEQ ID NO: 7904 - DNA, 21 bp, Homo sapiens
acacagagaggcacacagaca

SEQ ID NO: 7905 - DNA, 20 bp, Homo sapiens
gaagttggaactgggaaact

SEQ ID NO: 7906 - DNA, 23 bp, Homo sapiens
cacacacagcagcagcagcacct

SEQ ID NO: 7907 - DNA, 18 bp, Homo sapiens
ctgtactgcctgggactg

SEQ ID NO: 7908 - DNA, 19 bp, Homo sapiens
caccggcttcccttcaggc

SEQ ID NO: 7909 - DNA, 20 bp, Homo sapiens
acagccacacatgtgcaaga

SEQ ID NO: 7910 - DNA, 24 bp, Homo sapiens
cagagaataggtttaaggccttag

SEQ ID NO: 7911 - DNA, 17 bp, Homo sapiens
accggggagagcctgga

SEQ ID NO: 7912 - DNA, 21 bp, Homo sapiens
ctagacagagtcaggacccag

SEQ ID NO: 7913 - DNA, 17 bp, Homo sapiens
cagggactgggggctca

SEQ ID NO: 7914 - DNA, 24 bp, Homo sapiens
gacaatacatgtgagagccacctt

SEQ ID NO: 7915 - DNA, 20 bp, Homo sapiens
ccatagagtccccctccttt

SEQ ID NO: 7916 - DNA, 16 bp, Homo sapiens
gtcctgacccctcggt

SEQ ID NO: 7917 - DNA, 17 bp, Homo sapiens
cgggcagcaatggtgac

SEQ ID NO: 7918 - DNA, 17 bp, Homo sapiens
aggcagagtgtcgtgcc

SEQ ID NO: 7919 - DNA, 16 bp, Homo sapiens
caccctctgccatggc

SEQ ID NO: 7920 - DNA, 21 bp, Homo sapiens
caccacctctagtgtgccccc

SEQ ID NO: 7921 - DNA, 23 bp, Homo sapiens
ctctctggagaacagggaccccc

SEQ ID NO: 7922 - DNA, 20 bp, Homo sapiens
ctcaccctgtctcctttggg

SEQ ID NO: 7923 - DNA, 17 bp, Homo sapiens
ctcccctgtgaccttgt

SEQ ID NO: 7924 - DNA, 24 bp, Homo sapiens
gagatgtcaagtcagtccctagtg

SEQ ID NO: 7925 - DNA, 18 bp, Homo sapiens
cctataaccctctgtgat

SEQ ID NO: 7926 - DNA, 24 bp, Homo sapiens
cacactgaccttagcacccttgag

SEQ ID NO: 7927 - DNA, 18 bp, Homo sapiens
cccttagcttggtcccca

SEQ ID NO: 7928 - DNA, 20 bp, Homo sapiens
gagtcatcacagatctcagg

SEQ ID NO: 7929 - DNA, 16 bp, Homo sapiens
agggcagagatggccc

SEQ ID NO: 7930 - DNA, 24 bp, Homo sapiens
ttatggcacacactaccatatttc

SEQ ID NO: 7931 - DNA, 21 bp, Homo sapiens
gatgggcttcgtggggcaggc

SEQ ID NO: 7932 - DNA, 16 bp, Homo sapiens
aaggcagggatggggt

SEQ ID NO: 7933 - DNA, 20 bp, Homo sapiens
tttgcatttcagggagaacg

SEQ ID NO: 7934 - DNA, 19 bp, Homo sapiens
gggttccagggagtccagg

SEQ ID NO: 7935 - DNA, 24 bp, Homo sapiens
agagtgagggaagaggggttggga

SEQ ID NO: 7936 - DNA, 18 bp, Homo sapiens
agcacagcctccagacag

SEQ ID NO: 7937 - DNA, 16 bp, Homo sapiens
tgggagaggcaggaag

SEQ ID NO: 7938 - DNA, 20 bp, Homo sapiens
cacgttctcctttctctccc

SEQ ID NO: 7939 - DNA, 16 bp, Homo sapiens
ggccttgccggggagc

SEQ ID NO: 7940 - DNA, 17 bp, Homo sapiens
catggggggtcccaccc

SEQ ID NO: 7941 - DNA, 18 bp, Homo sapiens
gaccctggccctcagggg

SEQ ID NO: 7942 - DNA, 17 bp, Homo sapiens
ctctctcctggccttcc

SEQ ID NO: 7943 - DNA, 17 bp, Homo sapiens
ccactcctgcagggccc

SEQ ID NO: 7944 - DNA, 20 bp, Homo sapiens
gaataccaggctttccaggc

SEQ ID NO: 7945 - DNA, 17 bp, Homo sapiens
ctcagtgggttgtgccc

SEQ ID NO: 7946 - DNA, 16 bp, Homo sapiens
ggccagaccaggtggc

SEQ ID NO: 7947 - DNA, 16 bp, Homo sapiens
gaggccccaaggggga

SEQ ID NO: 7948 - DNA, 23 bp, Homo sapiens
gttctccaggaaagccgatgggg

SEQ ID NO: 7949 - DNA, 19 bp, Homo sapiens
agatcgtggagacctggga

SEQ ID NO: 7950 - DNA, 22 bp, Homo sapiens
ctgtacagctacaccccactcc

SEQ ID NO: 7951 - DNA, 16 bp, Homo sapiens
cgacgcaccccgctcc

SEQ ID NO: 7952 - DNA, 17 bp, Homo sapiens
gccctgttcgcctgagt

SEQ ID NO: 7953 - DNA, 18 bp, Homo sapiens
tgggggtagggacaagtg

SEQ ID NO: 7954 - DNA, 22 bp, Homo sapiens
aagctaccagagctctcatccc

SEQ ID NO: 7955 - DNA, 22 bp, Homo sapiens
ctttgtccccagaatgtggatc

SEQ ID NO: 7956 - DNA, 21 bp, Homo sapiens
gacagcaagaggtcagaggag

SEQ ID NO: 7957 - DNA, 16 bp, Homo sapiens
cgtgcggggcagaagg

SEQ ID NO: 7958 - DNA, 23 bp, Homo sapiens
ccactagccccaagggcccccac

SEQ ID NO: 7959 - DNA, 21 bp, Homo sapiens
caaccaagtgctaaagggtgc

SEQ ID NO: 7960 - DNA, 18 bp, Homo sapiens
agtttccagcaaccgatc

SEQ ID NO: 7961 - DNA, 20 bp, Homo sapiens
gaggagagcctggaagtgtg

SEQ ID NO: 7962 - DNA, 17 bp, Homo sapiens
accccaatggggcaggg

SEQ ID NO: 7963 - DNA, 19 bp, Homo sapiens
ccataggctggttcctagc

SEQ ID NO: 7964 - DNA, 18 bp, Homo sapiens
aaggggatggcaaggtgg

SEQ ID NO: 7965 - DNA, 18 bp, Homo sapiens
ccaccttttccacatgcc

SEQ ID NO: 7966 - DNA, 18 bp, Homo sapiens
ccaagcctggctcaccgg

SEQ ID NO: 7967 - DNA, 24 bp, Homo sapiens
cacctggtcattcttgttttcagg

SEQ ID NO: 7968 - DNA, 20 bp, Homo sapiens
aggccctggagagatgaaga

SEQ ID NO: 7969 - DNA, 16 bp, Homo sapiens
atgttgggtagggggc

SEQ ID NO: 7970 - DNA, 17 bp, Homo sapiens
tgctgtggctacctggg

SEQ ID NO: 7971 - DNA, 20 bp, Homo sapiens
ctgccgtatctcagggtttt

SEQ ID NO: 7972 - DNA, 18 bp, Homo sapiens
agtctccccacggtcacc

SEQ ID NO: 7973 - DNA, 21 bp, Homo sapiens
ccatgatgtttcaatgggcaa

SEQ ID NO: 7974 - DNA, 17 bp, Homo sapiens
cctggtcagccccctca

SEQ ID NO: 7975 - DNA, 16 bp, Homo sapiens
ggccctcctggccagg

SEQ ID NO: 7976 - DNA, 17 bp, Homo sapiens
gggacaccaggaaaacc

SEQ ID NO: 7977 - DNA, 16 bp, Homo sapiens
tgagcgtggagctcct

SEQ ID NO: 7978 - DNA, 18 bp, Homo sapiens
cttcccaggagggttgcc

SEQ ID NO: 7979 - DNA, 24 bp, Homo sapiens
cactcttttctgaggtctcagggt

SEQ ID NO: 7980 - DNA, 24 bp, Homo sapiens
gtcccagaatgacccaggacactc

SEQ ID NO: 7981 - DNA, 20 bp, Homo sapiens
gagttttctgcaacctctga

SEQ ID NO: 7982 - DNA, 16 bp, Homo sapiens
tggggtccaaggatac

SEQ ID NO: 7983 - DNA, 20 bp, Homo sapiens
cttgtcttccttagggagag

SEQ ID NO: 7984 - DNA, 17 bp, Homo sapiens
gatgcagccagcatcag

SEQ ID NO: 7985 - DNA, 17 bp, Homo sapiens
aggtaaagtcccccacc

SEQ ID NO: 7986 - DNA, 16 bp, Homo sapiens
ggtcagggtcaggggt

SEQ ID NO: 7987 - DNA, 16 bp, Homo sapiens
atgtgagtcctctgcc

SEQ ID NO: 7988 - DNA, 19 bp, Homo sapiens
gcgcctgaatctcctttct

SEQ ID NO: 7989 - DNA, 21 bp, Homo sapiens
cacagtcatctgaaatctagc

SEQ ID NO: 7990 - DNA, 22 bp, Homo sapiens
ctccaagcagagaccagagaga

SEQ ID NO: 7991 - DNA, 16 bp, Homo sapiens
ccacaggccatgctcc

SEQ ID NO: 7992 - DNA, 24 bp, Homo sapiens
aaaaaaaaactatgtttctggatg

SEQ ID NO: 7993 - DNA, 17 bp, Homo sapiens
ccagtgatctgttccca

SEQ ID NO: 7994 - DNA, 23 bp, Homo sapiens
cacgtgtgcctcatgtgttgcta

SEQ ID NO: 7995 - DNA, 23 bp, Homo sapiens
gagaccagactttcatgttaccc

SEQ ID NO: 7996 - DNA, 17 bp, Homo sapiens
gtttcgccgcagctgcc

SEQ ID NO: 7997 - DNA, 19 bp, Homo sapiens
aggcctccgtggagaacag

SEQ ID NO: 7998 - DNA, 20 bp, Homo sapiens
catcctcgcctggctttccc

SEQ ID NO: 7999 - DNA, 19 bp, Homo sapiens
ccaagggatatctcagagg

SEQ ID NO: 8000 - DNA, 19 bp, Homo sapiens
gggtagtaagggggaaaag

SEQ ID NO: 8001 - DNA, 19 bp, Homo sapiens
agtcctgggggtctctacc

SEQ ID NO: 8002 - DNA, 17 bp, Homo sapiens
agaggggccagggaggc

SEQ ID NO: 8003 - DNA, 23 bp, Homo sapiens
actaaaacctgtgtgccagggac

SEQ ID NO: 8004 - DNA, 22 bp, Homo sapiens
gaccatgatgaactgactttga

SEQ ID NO: 8005 - DNA, 24 bp, Homo sapiens
accaactctctcggatgctgtgac

SEQ ID NO: 8006 - DNA, 17 bp, Homo sapiens
gtggggcatgttcttgc

SEQ ID NO: 8007 - DNA, 17 bp, Homo sapiens
ctgtcccagcatctccc

SEQ ID NO: 8008 - DNA, 18 bp, Homo sapiens
ccttgacgagctctgggg

SEQ ID NO: 8009 - DNA, 17 bp, Homo sapiens
ggagccgctgggccctc

SEQ ID NO: 8010 - DNA, 21 bp, Homo sapiens
gagaagacacagacaacaggt

SEQ ID NO: 8011 - DNA, 24 bp, Homo sapiens
tctattttccacagggtgaccggg

SEQ ID NO: 8012 - DNA, 20 bp, Homo sapiens
gctggggtctagggtcctca

SEQ ID NO: 8013 - DNA, 17 bp, Homo sapiens
caggacatgagcctggg

SEQ ID NO: 8014 - DNA, 24 bp, Homo sapiens
agactcacattcggcccagagggc

SEQ ID NO: 8015 - DNA, 17 bp, Homo sapiens
agggggacccaggtgtc

SEQ ID NO: 8016 - DNA, 16 bp, Homo sapiens
ccagcccagggggacc

SEQ ID NO: 8017 - DNA, 20 bp, Homo sapiens
tttgccccgtctgccaagtc

SEQ ID NO: 8018 - DNA, 24 bp, Homo sapiens
caaggctgaggtggatctgataac

SEQ ID NO: 8019 - DNA, 21 bp, Homo sapiens
ttcctcccctatcctcagggc

SEQ ID NO: 8020 - DNA, 24 bp, Homo sapiens
tctcaccttttctcctgctgggcc

SEQ ID NO: 8021 - DNA, 24 bp, Homo sapiens
gggaaagggtgagtgtgattggtc

SEQ ID NO: 8022 - DNA, 22 bp, Homo sapiens
gtgagggtaagatggggacttg

SEQ ID NO: 8023 - DNA, 16 bp, Homo sapiens
agggtcctcgagggcc

SEQ ID NO: 8024 - DNA, 17 bp, Homo sapiens
ggtccccgaaacccttc

SEQ ID NO: 8025 - DNA, 17 bp, Homo sapiens
gcttcaaggctgttcct

SEQ ID NO: 8026 - DNA, 16 bp, Homo sapiens
tcccatgcctgcaccc

SEQ ID NO: 8027 - DNA, 19 bp, Homo sapiens
tggagggtaagaaagaccc

SEQ ID NO: 8028 - DNA, 17 bp, Homo sapiens
gccaggatcacccttgg

SEQ ID NO: 8029 - DNA, 17 bp, Homo sapiens
ccccccacaggtagaca

SEQ ID NO: 8030 - DNA, 24 bp, Homo sapiens
tccctgtggcagagataagcttgc

SEQ ID NO: 8031 - DNA, 18 bp, Homo sapiens
acagaccctgtatcccct

SEQ ID NO: 8032 - DNA, 16 bp, Homo sapiens
ctgctgggaggggcac

SEQ ID NO: 8033 - DNA, 18 bp, Homo sapiens
actaactcccacttcccc

SEQ ID NO: 8034 - DNA, 23 bp, Homo sapiens
tctctctggctccaggtcctgtg

SEQ ID NO: 8035 - DNA, 24 bp, Homo sapiens
atcatttcctttcccagggtcccc

SEQ ID NO: 8036 - DNA, 24 bp, Homo sapiens
ccgcggaggtttcagagggacagt

SEQ ID NO: 8037 - DNA, 21 bp, Homo sapiens
gagcctggggcaaaccagagc

SEQ ID NO: 8038 - DNA, 22 bp, Homo sapiens
catgatgtggagccaaaggggc

SEQ ID NO: 8039 - DNA, 16 bp, Homo sapiens
tgcctgctgggggctg

SEQ ID NO: 8040 - DNA, 21 bp, Homo sapiens
cttaccagccgtcccgggggt

SEQ ID NO: 8041 - DNA, 17 bp, Homo sapiens
ccgaagcaccccaatgc

SEQ ID NO: 8042 - DNA, 17 bp, Homo sapiens
gacccctgcctttctgc

SEQ ID NO: 8043 - DNA, 23 bp, Homo sapiens
cctggacctccagaccccttgtg

SEQ ID NO: 8044 - DNA, 20 bp, Homo sapiens
attcccatgagtcctcatgg

SEQ ID NO: 8045 - DNA, 23 bp, Homo sapiens
atcccttctgagcccaggacacc

SEQ ID NO: 8046 - DNA, 20 bp, Homo sapiens
accctcccaatcttcacttc

SEQ ID NO: 8047 - DNA, 23 bp, Homo sapiens
cagatgatccagggctgccctgc

SEQ ID NO: 8048 - DNA, 18 bp, Homo sapiens
agatcctggagaggatgg

SEQ ID NO: 8049 - DNA, 17 bp, Homo sapiens
tgcaggggtcaaaggaa

SEQ ID NO: 8050 - DNA, 17 bp, Homo sapiens
gctcttcttagggggca

SEQ ID NO: 8051 - DNA, 22 bp, Homo sapiens
ggatcaggtattgggaattggc

SEQ ID NO: 8052 - DNA, 22 bp, Homo sapiens
aacctggggcagtgtagcgggt

SEQ ID NO: 8053 - DNA, 20 bp, Homo sapiens
aggctgggactcacatttcg

SEQ ID NO: 8054 - DNA, 19 bp, Homo sapiens
cctgcagggaggcatgggg

SEQ ID NO: 8055 - DNA, 24 bp, Homo sapiens
ccacaggcccccgaactccaggtg

SEQ ID NO: 8056 - DNA, 16 bp, Homo sapiens
aaaagcaggcgagcgt

SEQ ID NO: 8057 - DNA, 23 bp, Homo sapiens
aaatccacatcagaggttcccat

SEQ ID NO: 8058 - DNA, 16 bp, Homo sapiens
cctgactgccctgtgc

SEQ ID NO: 8059 - DNA, 24 bp, Homo sapiens
cttacccccctcagcctttcctat

SEQ ID NO: 8060 - DNA, 16 bp, Homo sapiens
ctgtccagctgctgct

SEQ ID NO: 8061 - DNA, 18 bp, Homo sapiens
caagactcacccgaaggc

SEQ ID NO: 8062 - DNA, 23 bp, Homo sapiens
cctttacccttgaactaggatcc

SEQ ID NO: 8063 - DNA, 21 bp, Homo sapiens
ggagagaaaggtgacgagggt

SEQ ID NO: 8064 - DNA, 16 bp, Homo sapiens
cagagaagggtctgag

SEQ ID NO: 8065 - DNA, 19 bp, Homo sapiens
gccagcatcatgggggttc

SEQ ID NO: 8066 - DNA, 24 bp, Homo sapiens
tgaactggtggagcaccagcctac

SEQ ID NO: 8067 - DNA, 19 bp, Homo sapiens
cgaggacgagatgtaagag

SEQ ID NO: 8068 - DNA, 22 bp, Homo sapiens
ggaaggagtctcaccggaggac

SEQ ID NO: 8069 - DNA, 18 bp, Homo sapiens
ctggagagaagggagacc

SEQ ID NO: 8070 - DNA, 20 bp, Homo sapiens
atgagagtcagccctggttc

SEQ ID NO: 8071 - DNA, 17 bp, Homo sapiens
tgcttcgagcgtcctgc

SEQ ID NO: 8072 - DNA, 16 bp, Homo sapiens
ctcccccgactccagc

SEQ ID NO: 8073 - DNA, 16 bp, Homo sapiens
tacccgttaccctggg

SEQ ID NO: 8074 - DNA, 23 bp, Homo sapiens
tcctggggggccaggccgcccag

SEQ ID NO: 8075 - DNA, 17 bp, Homo sapiens
tcctgccccccttctgt

SEQ ID NO: 8076 - DNA, 16 bp, Homo sapiens
aagagggaggtgatgc

SEQ ID NO: 8077 - DNA, 24 bp, Homo sapiens
gaatcaatgtgggaatggggagtg

SEQ ID NO: 8078 - DNA, 18 bp, Homo sapiens
cagaagccttgaggttgc

SEQ ID NO: 8079 - DNA, 17 bp, Homo sapiens
cacccggcttggttctt

SEQ ID NO: 8080 - DNA, 21 bp, Homo sapiens
taaggccaatgggaccctgaa

SEQ ID NO: 8081 - DNA, 23 bp, Homo sapiens
cgaagtgtttagggggcagttgg

SEQ ID NO: 8082 - DNA, 22 bp, Homo sapiens
ccacctcatctccctctgtcac

SEQ ID NO: 8083 - DNA, 16 bp, Homo sapiens
ctgggcccagaggagc

SEQ ID NO: 8084 - DNA, 17 bp, Homo sapiens
cttggggccagggtctc

SEQ ID NO: 8085 - DNA, 18 bp, Homo sapiens
taactggagcctgggact

SEQ ID NO: 8086 - DNA, 24 bp, Homo sapiens
aggataagaagtcaggaagacaac

SEQ ID NO: 8087 - DNA, 21 bp, Homo sapiens
ttgaggtctaggtcatagggc

SEQ ID NO: 8088 - DNA, 24 bp, Homo sapiens
cccgttccccttggactccggtag

SEQ ID NO: 8089 - DNA, 19 bp, Homo sapiens
gacccaaaggagaaaaggt

SEQ ID NO: 8090 - DNA, 22 bp, Homo sapiens
acaaagaccatcagtgctagtc

SEQ ID NO: 8091 - DNA, 19 bp, Homo sapiens
tacaaccccaaggcagggc

SEQ ID NO: 8092 - DNA, 22 bp, Homo sapiens
ccccccaagtcccatagatagg

SEQ ID NO: 8093 - DNA, 22 bp, Homo sapiens
ctgagctgtatgacttccaatt

SEQ ID NO: 8094 - DNA, 24 bp, Homo sapiens
ccccttgccccataccaggcttac

SEQ ID NO: 8095 - DNA, 21 bp, Homo sapiens
tccattttgtataaccccttc

SEQ ID NO: 8096 - DNA, 16 bp, Homo sapiens
gtcgccctggggaccc

SEQ ID NO: 8097 - DNA, 18 bp, Homo sapiens
aggagagccgcagagctc

SEQ ID NO: 8098 - DNA, 24 bp, Homo sapiens
gattttgggctcctaggtgactcc

SEQ ID NO: 8099 - DNA, 24 bp, Homo sapiens
agcccagatagtgttctataggag

SEQ ID NO: 8100 - DNA, 17 bp, Homo sapiens
gggggtggcactgtctg

SEQ ID NO: 8101 - DNA, 19 bp, Homo sapiens
tcccgtcactcaccaccac

SEQ ID NO: 8102 - DNA, 20 bp, Homo sapiens
ctttctctacattcaggggc

SEQ ID NO: 8103 - DNA, 24 bp, Homo sapiens
gagaggataggagcagggacaggt

SEQ ID NO: 8104 - DNA, 18 bp, Homo sapiens
gaccaggagtgggacttt

SEQ ID NO: 8105 - DNA, 23 bp, Homo sapiens
ccatctgccacatccctagtacc

SEQ ID NO: 8106 - DNA, 18 bp, Homo sapiens
ctgccaggggttgctgga

SEQ ID NO: 8107 - DNA, 22 bp, Homo sapiens
cggccagtgggtcctggtggcc

SEQ ID NO: 8108 - DNA, 17 bp, Homo sapiens
gtccatatcccccgtcc

SEQ ID NO: 8109 - DNA, 24 bp, Homo sapiens
ggggaagggaaaggggagggacac

SEQ ID NO: 8110 - DNA, 22 bp, Homo sapiens
ccaacctaaatcccaatcttcc

SEQ ID NO: 8111 - DNA, 20 bp, Homo sapiens
acttcaggacccttggctcc

SEQ ID NO: 8112 - DNA, 24 bp, Homo sapiens
tgaactgaccttgattttcactga

SEQ ID NO: 8113 - DNA, 16 bp, Homo sapiens
ggtccctggggctgag

SEQ ID NO: 8114 - DNA, 20 bp, Homo sapiens
cctcttcttttccatcaggg

SEQ ID NO: 8115 - DNA, 17 bp, Homo sapiens
gggtgaggagcaggggt

SEQ ID NO: 8116 - DNA, 23 bp, Homo sapiens
gagagaaggtaagtgcaacctgg

SEQ ID NO: 8117 - DNA, 21 bp, Homo sapiens
cagccaggtcagctggtatga

SEQ ID NO: 8118 - DNA, 21 bp, Homo sapiens
tctcaccctctctcttcaggg

SEQ ID NO: 8119 - DNA, 19 bp, Homo sapiens
cctgggggtccacgttcgc

SEQ ID NO: 8120 - DNA, 16 bp, Homo sapiens
ctggggtttgacgttc

SEQ ID NO: 8121 - DNA, 17 bp, Homo sapiens
cctccagggcccttggc

SEQ ID NO: 8122 - DNA, 20 bp, Homo sapiens
gataagagttccctccaggt

SEQ ID NO: 8123 - DNA, 17 bp, Homo sapiens
ctggaaagccccggtca

SEQ ID NO: 8124 - DNA, 16 bp, Homo sapiens
cggggacctcctggag

SEQ ID NO: 8125 - DNA, 19 bp, Homo sapiens
cctccaaaaccacgacctc

SEQ ID NO: 8126 - DNA, 18 bp, Homo sapiens
tcaaccactgctccatcc

SEQ ID NO: 8127 - DNA, 23 bp, Homo sapiens
cctcccctaacaccatggggagc

SEQ ID NO: 8128 - DNA, 19 bp, Homo sapiens
gtggaggggccagggattc

SEQ ID NO: 8129 - DNA, 18 bp, Homo sapiens
ctttggggccaatagctc

SEQ ID NO: 8130 - DNA, 19 bp, Homo sapiens
ctctgaggatggagctcca

SEQ ID NO: 8131 - DNA, 24 bp, Homo sapiens
tttgggggttcagagatttgggtt

SEQ ID NO: 8132 - DNA, 16 bp, Homo sapiens
tgggggcagggcctcc

SEQ ID NO: 8133 - DNA, 19 bp, Homo sapiens
gagctgtgcccaccatatt

SEQ ID NO: 8134 - DNA, 23 bp, Homo sapiens
ggaaagaaaggagaaaaagtagg

SEQ ID NO: 8135 - DNA, 24 bp, Homo sapiens
ggagacccaggttgtcctgggagg

SEQ ID NO: 8136 - DNA, 24 bp, Homo sapiens
actcacttcttcctagggtcttcc

SEQ ID NO: 8137 - DNA, 18 bp, Homo sapiens
gggtgggaagaccgaagg

SEQ ID NO: 8138 - DNA, 24 bp, Homo sapiens
gtctctcctggggcagtggttggg

SEQ ID NO: 8139 - DNA, 20 bp, Homo sapiens
gacatcatcaagtcagcctt

SEQ ID NO: 8140 - DNA, 16 bp, Homo sapiens
ccggtgaggggccttg

SEQ ID NO: 8141 - DNA, 21 bp, Homo sapiens
gccttggggtccagggcttcc

SEQ ID NO: 8142 - DNA, 20 bp, Homo sapiens
ctgttctctcccagggtccc

SEQ ID NO: 8143 - DNA, 22 bp, Homo sapiens
caagaactatgaagcccagcac

SEQ ID NO: 8144 - DNA, 21 bp, Homo sapiens
taagtgagggacaggttgtgc

SEQ ID NO: 8145 - DNA, 16 bp, Homo sapiens
agcagagcctcaaggc

SEQ ID NO: 8146 - DNA, 18 bp, Homo sapiens
catggggtcgtcatctgt

SEQ ID NO: 8147 - DNA, 24 bp, Homo sapiens
caccttcacctggtccagggggac

SEQ ID NO: 8148 - DNA, 16 bp, Homo sapiens
tggaccccatgaccct

SEQ ID NO: 8149 - DNA, 24 bp, Homo sapiens
gggaatcagactccaagccacccc

SEQ ID NO: 8150 - DNA, 18 bp, Homo sapiens
tttgattacccccatcct

SEQ ID NO: 8151 - DNA, 17 bp, Homo sapiens
cccagggcttcctggaa

SEQ ID NO: 8152 - DNA, 20 bp, Homo sapiens
gaactgaggcgtcatggtga

SEQ ID NO: 8153 - DNA, 24 bp, Homo sapiens
ctttgtctcctccatcagggcccc

SEQ ID NO: 8154 - DNA, 18 bp, Homo sapiens
gcaggggttatgtgggtt

SEQ ID NO: 8155 - DNA, 17 bp, Homo sapiens
ggggggaccaacacgag

SEQ ID NO: 8156 - DNA, 22 bp, Homo sapiens
atgaggctgtcaccttcatggc

SEQ ID NO: 8157 - DNA, 16 bp, Homo sapiens
aaaggggaccctggac

SEQ ID NO: 8158 - DNA, 24 bp, Homo sapiens
cagtggtccacgaggtccaggggg

SEQ ID NO: 8159 - DNA, 17 bp, Homo sapiens
ctgtccttacagggggc

SEQ ID NO: 8160 - DNA, 19 bp, Homo sapiens
ccacagacctcactctcgc

SEQ ID NO: 8161 - DNA, 22 bp, Homo sapiens
ggacatgtctaggggcttcttc

SEQ ID NO: 8162 - DNA, 24 bp, Homo sapiens
ctccacataccctgcacttaccga

SEQ ID NO: 8163 - DNA, 16 bp, Homo sapiens
ctgccccacaccagac

SEQ ID NO: 8164 - DNA, 20 bp, Homo sapiens
ttcacctccgatgacttgtc

SEQ ID NO: 8165 - DNA, 17 bp, Homo sapiens
caaagggggagccggta

SEQ ID NO: 8166 - DNA, 24 bp, Homo sapiens
attcaggctatgggggccttgagc

SEQ ID NO: 8167 - DNA, 18 bp, Homo sapiens
ctgagcccaagcaccacc

SEQ ID NO: 8168 - DNA, 18 bp, Homo sapiens
ttaggccctgcacagggt

SEQ ID NO: 8169 - DNA, 19 bp, Homo sapiens
ccagggttcttccacaggg

SEQ ID NO: 8170 - DNA, 22 bp, Homo sapiens
ccgcctcccttcccccttcacc

SEQ ID NO: 8171 - DNA, 23 bp, Homo sapiens
gttgcctggccctcgtggggacc

SEQ ID NO: 8172 - DNA, 24 bp, Homo sapiens
ctctccctgaggacgaaacagagc

SEQ ID NO: 8173 - DNA, 16 bp, Homo sapiens
tggctccgactgttct

SEQ ID NO: 8174 - DNA, 17 bp, Homo sapiens
caccaccaccccaggct

SEQ ID NO: 8175 - DNA, 18 bp, Homo sapiens
ggcctaaaggtgagcaag

SEQ ID NO: 8176 - DNA, 24 bp, Homo sapiens
gagcaaagaagggaaggcacctta

SEQ ID NO: 8177 - DNA, 16 bp, Homo sapiens
ggagcagatgggcgtc

SEQ ID NO: 8178 - DNA, 21 bp, Homo sapiens
ctgcaaatggaggccagaggc

SEQ ID NO: 8179 - DNA, 16 bp, Homo sapiens
ccttgggggagggtcc

SEQ ID NO: 8180 - DNA, 19 bp, Homo sapiens
cctgacctgcaggacaagg

SEQ ID NO: 8181 - DNA, 21 bp, Homo sapiens
ataacacttgggggtcagtgg

SEQ ID NO: 8182 - DNA, 16 bp, Homo sapiens
gcggccagggctgcct

SEQ ID NO: 8183 - DNA, 16 bp, Homo sapiens
tgggctctgtgaagct

SEQ ID NO: 8184 - DNA, 16 bp, Homo sapiens
ctggaagtgccactgc

SEQ ID NO: 8185 - DNA, 23 bp, Homo sapiens
ggtttataacctccagctgggct

SEQ ID NO: 8186 - DNA, 21 bp, Homo sapiens
tatccccacctaactgctatc

SEQ ID NO: 8187 - DNA, 24 bp, Homo sapiens
tctcttgtaaaaaccccgagacag

SEQ ID NO: 8188 - DNA, 16 bp, Homo sapiens
ggcgaccctggcctcc

SEQ ID NO: 8189 - DNA, 19 bp, Homo sapiens
ctcaccctctcgcccttgg

SEQ ID NO: 8190 - DNA, 18 bp, Homo sapiens
tggcagcacaggtctcac

SEQ ID NO: 8191 - DNA, 24 bp, Homo sapiens
ccggtcctgccctgaaagaagata

SEQ ID NO: 8192 - DNA, 16 bp, Homo sapiens
tgagtgcccctgcggg

SEQ ID NO: 8193 - DNA, 23 bp, Homo sapiens
cagggacagatgtgggggacact

SEQ ID NO: 8194 - DNA, 21 bp, Homo sapiens
tctgacccacatctgacatgt

SEQ ID NO: 8195 - DNA, 24 bp, Homo sapiens
caggccctaggaagggtaatcagt

SEQ ID NO: 8196 - DNA, 21 bp, Homo sapiens
tgtccaaaggtaagagtccct

SEQ ID NO: 8197 - DNA, 22 bp, Homo sapiens
cactcaacccattctctattcc

SEQ ID NO: 8198 - DNA, 22 bp, Homo sapiens
aaatgttcaacctcaaagagac

SEQ ID NO: 8199 - DNA, 24 bp, Homo sapiens
ttctggccctggggaaagacatgt

SEQ ID NO: 8200 - DNA, 24 bp, Homo sapiens
gtttggaagaggcctctgggggac

SEQ ID NO: 8201 - DNA, 22 bp, Homo sapiens
cctctgttcacctctcgatgag

SEQ ID NO: 8202 - DNA, 16 bp, Homo sapiens
cagtcagtggtctggc

SEQ ID NO: 8203 - DNA, 18 bp, Homo sapiens
gctgcggacatagggtct

SEQ ID NO: 8204 - DNA, 19 bp, Homo sapiens
gccgggtatggactctgtc

SEQ ID NO: 8205 - DNA, 24 bp, Homo sapiens
gaccccttatattctaccacccag

SEQ ID NO: 8206 - DNA, 24 bp, Homo sapiens
ttagggcttaatgtggtgatgttg

SEQ ID NO: 8207 - DNA, 17 bp, Homo sapiens
ctgacacagggctgtgg

SEQ ID NO: 8208 - DNA, 17 bp, Homo sapiens
ctgggaataggggtggc

SEQ ID NO: 8209 - DNA, 21 bp, Homo sapiens
ggcgaagaaggtctggacaga

SEQ ID NO: 8210 - DNA, 18 bp, Homo sapiens
catattcagccccatccg

SEQ ID NO: 8211 - DNA, 24 bp, Homo sapiens
gtccgctccagccattcccaacat

SEQ ID NO: 8212 - DNA, 16 bp, Homo sapiens
gccgccagcacgtacc

SEQ ID NO: 8213 - DNA, 24 bp, Homo sapiens
ggctgcatgatagccttttcaggg

SEQ ID NO: 8214 - DNA, 19 bp, Homo sapiens
ccttccttccaggcacagc

SEQ ID NO: 8215 - DNA, 20 bp, Homo sapiens
cttaccagaagcctgggcct

SEQ ID NO: 8216 - DNA, 21 bp, Homo sapiens
ggcatggactcctggggctat

SEQ ID NO: 8217 - DNA, 24 bp, Homo sapiens
catccactagcagaaccatcaccc

SEQ ID NO: 8218 - DNA, 23 bp, Homo sapiens
cttgcaaaggatccgtgacatgc

SEQ ID NO: 8219 - DNA, 22 bp, Homo sapiens
aacatgtatctgtgagctgtga

SEQ ID NO: 8220 - DNA, 24 bp, Homo sapiens
acagtcatcggccctccccactgt

SEQ ID NO: 8221 - DNA, 20 bp, Homo sapiens
ccaagctcccagtggatagc

SEQ ID NO: 8222 - DNA, 17 bp, Homo sapiens
gtcatcctcctcaggct

SEQ ID NO: 8223 - DNA, 18 bp, Homo sapiens
gttcccacttgggtccat

SEQ ID NO: 8224 - DNA, 18 bp, Homo sapiens
tggtcacacacaccctga

SEQ ID NO: 8225 - DNA, 17 bp, Homo sapiens
atgggagccattcagtg

SEQ ID NO: 8226 - DNA, 17 bp, Homo sapiens
cagacctcacctactgc

SEQ ID NO: 8227 - DNA, 19 bp, Homo sapiens
tgatggcaggatagggagc

SEQ ID NO: 8228 - DNA, 16 bp, Homo sapiens
gtcctggagcgtctgg

SEQ ID NO: 8229 - DNA, 20 bp, Homo sapiens
agaatgcctgaacctattgg

SEQ ID NO: 8230 - DNA, 19 bp, Homo sapiens
gtggtgttcctaccacatg

SEQ ID NO: 8231 - DNA, 23 bp, Homo sapiens
gggcctcagggagaggtagaatc

SEQ ID NO: 8232 - DNA, 16 bp, Homo sapiens
ctgcccgcttcagtaa

SEQ ID NO: 8233 - DNA, 24 bp, Homo sapiens
cccaagaggcccaagtgccaacac

SEQ ID NO: 8234 - DNA, 18 bp, Homo sapiens
atctgtcacacagacgcc

SEQ ID NO: 8235 - DNA, 21 bp, Homo sapiens
ggtgagcattgtcttgagtgg

SEQ ID NO: 8236 - DNA, 19 bp, Homo sapiens
ggcgtctcttacatcttct

SEQ ID NO: 8237 - DNA, 24 bp, Homo sapiens
cactgtaggaaggggaacaagtta

SEQ ID NO: 8238 - DNA, 17 bp, Homo sapiens
gtccccgcagacacttc

SEQ ID NO: 8239 - DNA, 24 bp, Homo sapiens
ccttcccactacgcccactatacc

SEQ ID NO: 8240 - DNA, 17 bp, Homo sapiens
ttggggctctgtggaga

SEQ ID NO: 8241 - DNA, 21 bp, Homo sapiens
atccaggacaggcgtcaggga

SEQ ID NO: 8242 - DNA, 16 bp, Homo sapiens
cggccactcagaggcc

SEQ ID NO: 8243 - DNA, 23 bp, Homo sapiens
cacccgctgggagcttgagatcc

SEQ ID NO: 8244 - DNA, 19 bp, Homo sapiens
tcgactcggtgactttggc

SEQ ID NO: 8245 - DNA, 24 bp, Homo sapiens
gaacttgattaaaaagctgtctcc

SEQ ID NO: 8246 - DNA, 19 bp, Homo sapiens
tcattcctccttcagagtc

SEQ ID NO: 8247 - DNA, 16 bp, Homo sapiens
tcaccctggccagggc

SEQ ID NO: 8248 - DNA, 19 bp, Homo sapiens
caggatctcagatctctcc

SEQ ID NO: 8249 - DNA, 19 bp, Homo sapiens
ccctggacactggagtcca

SEQ ID NO: 8250 - DNA, 18 bp, Homo sapiens
cctctgaccctgggtgac

SEQ ID NO: 8251 - DNA, 23 bp, Homo sapiens
tagttcaatgcttggaacacgag

SEQ ID NO: 8252 - DNA, 24 bp, Homo sapiens
tattgaagcatcatgggaggtcat

SEQ ID NO: 8253 - DNA, 23 bp, Homo sapiens
agcgacacagtaccgcgtgaggc

SEQ ID NO: 8254 - DNA, 18 bp, Homo sapiens
ggaggagtcactcagagt

SEQ ID NO: 8255 - DNA, 16 bp, Homo sapiens
cccgggtcctggggcc

SEQ ID NO: 8256 - DNA, 24 bp, Homo sapiens
aggagcacgccaaggtgaggcagg

SEQ ID NO: 8257 - DNA, 21 bp, Homo sapiens
tgtcactatcccacatgctct

SEQ ID NO: 8258 - DNA, 18 bp, Homo sapiens
ggccctaggacactcagc

SEQ ID NO: 8259 - DNA, 17 bp, Homo sapiens
gggtgaacccagttaac

SEQ ID NO: 8260 - DNA, 17 bp, Homo sapiens
gtgatagctgctgagct

SEQ ID NO: 8261 - DNA, 18 bp, Homo sapiens
ggtcagtctggcagggtc

SEQ ID NO: 8262 - DNA, 24 bp, Homo sapiens
cccacccacttcattgattgatct

SEQ ID NO: 8263 - DNA, 16 bp, Homo sapiens
aggctgcgctgggagc

SEQ ID NO: 8264 - DNA, 17 bp, Homo sapiens
accatcactgtcctcgc

SEQ ID NO: 8265 - DNA, 22 bp, Homo sapiens
ttctctccagcgcctgaggctc

SEQ ID NO: 8266 - DNA, 20 bp, Homo sapiens
ggtccctaacttcctcctgg

SEQ ID NO: 8267 - DNA, 16 bp, Homo sapiens
ggattggtgcaggggc

SEQ ID NO: 8268 - DNA, 16 bp, Homo sapiens
ctctgggcaccggctc

SEQ ID NO: 8269 - DNA, 18 bp, Homo sapiens
gtctgagaggagggagag

SEQ ID NO: 8270 - DNA, 16 bp, Homo sapiens
gcgtccccagggctgg

SEQ ID NO: 8271 - DNA, 18 bp, Homo sapiens
cagcctctcagacccctc

SEQ ID NO: 8272 - DNA, 16 bp, Homo sapiens
cagtgcgagtgactgc

SEQ ID NO: 8273 - DNA, 24 bp, Homo sapiens
accaatcctggtcctttctccaat

SEQ ID NO: 8274 - DNA, 20 bp, Homo sapiens
tactcccaggaaacacagac

SEQ ID NO: 8275 - DNA, 17 bp, Homo sapiens
agctctccagcgcatgc

SEQ ID NO: 8276 - DNA, 24 bp, Homo sapiens
ggactgctcacccctaaccattgc

SEQ ID NO: 8277 - DNA, 24 bp, Homo sapiens
caggtgtgccctcgcggtccccga

SEQ ID NO: 8278 - DNA, 16 bp, Homo sapiens
ggggccggagtgaagg

SEQ ID NO: 8279 - DNA, 16 bp, Homo sapiens
cggatctctgcagagt

SEQ ID NO: 8280 - DNA, 20 bp, Homo sapiens
cagcgacgttctacggatca

SEQ ID NO: 8281 - DNA, 21 bp, Homo sapiens
cctggccaggtgggcatacag

SEQ ID NO: 8282 - DNA, 17 bp, Homo sapiens
gtccccagcccctgagc

SEQ ID NO: 8283 - DNA, 23 bp, Homo sapiens
gtggcgtcagggagccatacctt

SEQ ID NO: 8284 - DNA, 24 bp, Homo sapiens
gatcacccctgcgtcaaccattcc

SEQ ID NO: 8285 - DNA, 19 bp, Homo sapiens
gacccctacccaggtgatc

SEQ ID NO: 8286 - DNA, 16 bp, Homo sapiens
tcagggctgcctaaag

SEQ ID NO: 8287 - DNA, 19 bp, Homo sapiens
tcgacacacgacccacagg

SEQ ID NO: 8288 - DNA, 18 bp, Homo sapiens
tggcgtggatgggccccc

SEQ ID NO: 8289 - DNA, 16 bp, Homo sapiens
gtgtggacaggacagt

SEQ ID NO: 8290 - DNA, 16 bp, Homo sapiens
ctggatggactggagc

SEQ ID NO: 8291 - DNA, 18 bp, Homo sapiens
gcagggcagggtagctaa

SEQ ID NO: 8292 - DNA, 16 bp, Homo sapiens
tccctgttcccaggcc

SEQ ID NO: 8293 - DNA, 22 bp, Homo sapiens
ccagtcctcacaaccacagagg

SEQ ID NO: 8294 - DNA, 19 bp, Homo sapiens
tgggggtttattgggggtc

SEQ ID NO: 8295 - DNA, 19 bp, Homo sapiens
gtatactcagtatctggct

SEQ ID NO: 8296 - DNA, 16 bp, Homo sapiens
cacggtggggactggg

SEQ ID NO: 8297 - DNA, 23 bp, Homo sapiens
cagaaaccaactgggatttctct

SEQ ID NO: 8298 - DNA, 20 bp, Homo sapiens
ctgtcaccattacctggacc

SEQ ID NO: 8299 - DNA, 24 bp, Homo sapiens
agcaaactctgtgccccagagccc

SEQ ID NO: 8300 - DNA, 16 bp, Homo sapiens
ctagacccactgggcc

SEQ ID NO: 8301 - DNA, 18 bp, Homo sapiens
cctgccccctcccaaacc

SEQ ID NO: 8302 - DNA, 19 bp, Homo sapiens
ttcccctatcagatagccc

SEQ ID NO: 8303 - DNA, 18 bp, Homo sapiens
gcgccaggaaccctggtc

SEQ ID NO: 8304 - DNA, 20 bp, Homo sapiens
ctggacctattcaccatctc

SEQ ID NO: 8305 - DNA, 16 bp, Homo sapiens
ccgtcctcactgggcc

SEQ ID NO: 8306 - DNA, 18 bp, Homo sapiens
ctgaaactgaagaggaag

SEQ ID NO: 8307 - DNA, 16 bp, Homo sapiens
gtcggtactgcgaggc

SEQ ID NO: 8308 - DNA, 21 bp, Homo sapiens
gaggcaggagttctggggaga

SEQ ID NO: 8309 - DNA, 19 bp, Homo sapiens
cagactctactgccacaga

SEQ ID NO: 8310 - DNA, 17 bp, Homo sapiens
caatggaggcagagagc

SEQ ID NO: 8311 - DNA, 18 bp, Homo sapiens
gagccatgccagcatttc

SEQ ID NO: 8312 - DNA, 16 bp, Homo sapiens
agcagggccctcctct

SEQ ID NO: 8313 - DNA, 18 bp, Homo sapiens
ggtgtgtggggggactgc

SEQ ID NO: 8314 - DNA, 17 bp, Homo sapiens
ctgcagccctgtgatgt

SEQ ID NO: 8315 - DNA, 16 bp, Homo sapiens
cgtccctggagccagt

SEQ ID NO: 8316 - DNA, 19 bp, Homo sapiens
tccggacctgaggtcagag

SEQ ID NO: 8317 - DNA, 16 bp, Homo sapiens
tccagggctgcgggtt

SEQ ID NO: 8318 - DNA, 23 bp, Homo sapiens
cataccctcattggtccctttgg

SEQ ID NO: 8319 - DNA, 20 bp, Homo sapiens
actctggtcctggttctgac

SEQ ID NO: 8320 - DNA, 20 bp, Homo sapiens
cagctaatccgaaatccact

SEQ ID NO: 8321 - DNA, 16 bp, Homo sapiens
gtccgccggggtgagt

SEQ ID NO: 8322 - DNA, 21 bp, Homo sapiens
cgttgcatctgacaccacaac

SEQ ID NO: 8323 - DNA, 17 bp, Homo sapiens
ctacactgtgcgggtgt

SEQ ID NO: 8324 - DNA, 24 bp, Homo sapiens
ggagttacagacagaagtcagaag

SEQ ID NO: 8325 - DNA, 16 bp, Homo sapiens
cggaccctggtgcttc

SEQ ID NO: 8326 - DNA, 19 bp, Homo sapiens
ctccacaagcctcctgcag

SEQ ID NO: 8327 - DNA, 23 bp, Homo sapiens
cacatccctgtctctttctgacc

SEQ ID NO: 8328 - DNA, 19 bp, Homo sapiens
gacccactcgagcagacac

SEQ ID NO: 8329 - DNA, 17 bp, Homo sapiens
catccccacccccatgg

SEQ ID NO: 8330 - DNA, 23 bp, Homo sapiens
caagtcgaatgctgtctgactcc

SEQ ID NO: 8331 - DNA, 20 bp, Homo sapiens
tgtccttgtcttgcactcac

SEQ ID NO: 8332 - DNA, 23 bp, Homo sapiens
atcattgtgcgcagcacccaggg

SEQ ID NO: 8333 - DNA, 23 bp, Homo sapiens
ccatcttgggaagcagatggata

SEQ ID NO: 8334 - DNA, 17 bp, Homo sapiens
cagcgggtgcgagtgtc

SEQ ID NO: 8335 - DNA, 21 bp, Homo sapiens
aggagagggctggaggtacac

SEQ ID NO: 8336 - DNA, 18 bp, Homo sapiens
caacaggaccagagctgc

SEQ ID NO: 8337 - DNA, 16 bp, Homo sapiens
ctgcgtccacctcacc

SEQ ID NO: 8338 - DNA, 17 bp, Homo sapiens
gctgggccagtgagtgg

SEQ ID NO: 8339 - DNA, 17 bp, Homo sapiens
gggactgggctccagga

SEQ ID NO: 8340 - DNA, 18 bp, Homo sapiens
tggagggccacgaggtgg

SEQ ID NO: 8341 - DNA, 19 bp, Homo sapiens
ctgttacagggctcacagg

SEQ ID NO: 8342 - DNA, 17 bp, Homo sapiens
ctaccagttggatgggc

SEQ ID NO: 8343 - DNA, 18 bp, Homo sapiens
tccgacacctcccccact

SEQ ID NO: 8344 - DNA, 18 bp, Homo sapiens
ctgaccctgttatcttgc

SEQ ID NO: 8345 - DNA, 16 bp, Homo sapiens
acggttgcaggggtgg

SEQ ID NO: 8346 - DNA, 18 bp, Homo sapiens
gactggtcagtgcggggg

SEQ ID NO: 8347 - DNA, 24 bp, Homo sapiens
ggtactcagtgcccggctgcagcc

SEQ ID NO: 8348 - DNA, 22 bp, Homo sapiens
ctcctttcctggaacttggtgc

SEQ ID NO: 8349 - DNA, 24 bp, Homo sapiens
ccaccttctgcggtggctccaagc

SEQ ID NO: 8350 - DNA, 18 bp, Homo sapiens
gcagacgcttctgttgag

SEQ ID NO: 8351 - DNA, 24 bp, Homo sapiens
gccctgacccttgcctgtccatcc

SEQ ID NO: 8352 - DNA, 21 bp, Homo sapiens
tttcttcaggctgggacgggc

SEQ ID NO: 8353 - DNA, 24 bp, Homo sapiens
caaccggtagccacgggcctcagg

SEQ ID NO: 8354 - DNA, 21 bp, Homo sapiens
gcagtgtggggcccgccactt

SEQ ID NO: 8355 - DNA, 16 bp, Homo sapiens
accgggcgcagggtct

SEQ ID NO: 8356 - DNA, 16 bp, Homo sapiens
ctgcgtgacttggagc

SEQ ID NO: 8357 - DNA, 16 bp, Homo sapiens
gccttgccctgcctgc

SEQ ID NO: 8358 - DNA, 16 bp, Homo sapiens
ccccatgcaggtgggc

SEQ ID NO: 8359 - DNA, 18 bp, Homo sapiens
gagccatcagggaagtgg

SEQ ID NO: 8360 - DNA, 16 bp, Homo sapiens
gcgcctcagacaaggc

SEQ ID NO: 8361 - DNA, 18 bp, Homo sapiens
tcacctcatagtccgtgc

SEQ ID NO: 8362 - DNA, 17 bp, Homo sapiens
gctaccgtgtgacatgg

SEQ ID NO: 8363 - DNA, 16 bp, Homo sapiens
ctgctgctgtgtgggc

SEQ ID NO: 8364 - DNA, 18 bp, Homo sapiens
tccagaataccacagccc

SEQ ID NO: 8365 - DNA, 24 bp, Homo sapiens
ttgcagactcaggactctacagcc

SEQ ID NO: 8366 - DNA, 21 bp, Homo sapiens
cttctgactccatgaatccct

SEQ ID NO: 8367 - DNA, 24 bp, Homo sapiens
catctctcactcaccactgaggac

SEQ ID NO: 8368 - DNA, 21 bp, Homo sapiens
attctgccagcctctgacccc

SEQ ID NO: 8369 - DNA, 22 bp, Homo sapiens
ctccgccaggccaccaggaggc

SEQ ID NO: 8370 - DNA, 16 bp, Homo sapiens
cctctacgccaacagc

SEQ ID NO: 8371 - DNA, 23 bp, Homo sapiens
ttctagggcagctgggggagagt

SEQ ID NO: 8372 - DNA, 21 bp, Homo sapiens
ctggtgagaccagtgtgcggc

SEQ ID NO: 8373 - DNA, 17 bp, Homo sapiens
gggttaggtgaatgggg

SEQ ID NO: 8374 - DNA, 17 bp, Homo sapiens
ggctgggcaagataaag

SEQ ID NO: 8375 - DNA, 16 bp, Homo sapiens
cacagcctccccgatg

SEQ ID NO: 8376 - DNA, 16 bp, Homo sapiens
actgccgagtgagcgg

SEQ ID NO: 8377 - DNA, 17 bp, Homo sapiens
gtcagtggccggagacc

SEQ ID NO: 8378 - DNA, 16 bp, Homo sapiens
ccagtggccctgtgac

SEQ ID NO: 8379 - DNA, 21 bp, Homo sapiens
cagggcaagaggtcactttat

SEQ ID NO: 8380 - DNA, 16 bp, Homo sapiens
gctccacgagacctgg

SEQ ID NO: 8381 - DNA, 24 bp, Homo sapiens
tcactcctgacatcctacctcctg

SEQ ID NO: 8382 - DNA, 18 bp, Homo sapiens
ccaatcctcctgcctgat

SEQ ID NO: 8383 - DNA, 24 bp, Homo sapiens
gaggagtgtactggaccttgtagc

SEQ ID NO: 8384 - DNA, 22 bp, Homo sapiens
cagtgctgattccatcctatgt

SEQ ID NO: 8385 - DNA, 21 bp, Homo sapiens
gattggctgcttggctcagac

SEQ ID NO: 8386 - DNA, 18 bp, Homo sapiens
gagttcctgcccacacgg

SEQ ID NO: 8387 - DNA, 23 bp, Homo sapiens
ctgggaatgcgggatcaggggat

SEQ ID NO: 8388 - DNA, 23 bp, Homo sapiens
acactactgcccctcgtttcccg

SEQ ID NO: 8389 - DNA, 24 bp, Homo sapiens
gagttggggtcggggtcaggagca

SEQ ID NO: 8390 - DNA, 17 bp, Homo sapiens
cagcccaccagtgactt

SEQ ID NO: 8391 - DNA, 16 bp, Homo sapiens
taggtcagggtacacc

SEQ ID NO: 8392 - DNA, 17 bp, Homo sapiens
atgggtcgtcacttcag

SEQ ID NO: 8393 - DNA, 21 bp, Homo sapiens
ccaccagcagtcgtgcacact

SEQ ID NO: 8394 - DNA, 18 bp, Homo sapiens
caggagtgacaggtcagc

SEQ ID NO: 8395 - DNA, 24 bp, Homo sapiens
atgctgaagtcattgacgaagaag

SEQ ID NO: 8396 - DNA, 16 bp, Homo sapiens
ccaaaggctgaagggg

SEQ ID NO: 8397 - DNA, 18 bp, Homo sapiens
gtcagcattcttgatccc

SEQ ID NO: 8398 - DNA, 16 bp, Homo sapiens
gtcccaggtctgcatc

SEQ ID NO: 8399 - DNA, 19 bp, Homo sapiens
ctctctgactgcccccacc

SEQ ID NO: 8400 - DNA, 16 bp, Homo sapiens
gcctcccaagatgacc

SEQ ID NO: 8401 - DNA, 19 bp, Homo sapiens
aaatagcttgaccccctgc

SEQ ID NO: 8402 - DNA, 18 bp, Homo sapiens
accatgtcttcctgcccc

SEQ ID NO: 8403 - DNA, 22 bp, Homo sapiens
ggacttcccgtctgtgatcagg

SEQ ID NO: 8404 - DNA, 21 bp, Homo sapiens
tccgtgagcttagctacaagg

SEQ ID NO: 8405 - DNA, 24 bp, Homo sapiens
ttcccctggacacttcatttgggg

SEQ ID NO: 8406 - DNA, 24 bp, Homo sapiens
cctccaacaggacagagttcggcc

SEQ ID NO: 8407 - DNA, 16 bp, Homo sapiens
caggtcgggccagctg

SEQ ID NO: 8408 - DNA, 17 bp, Homo sapiens
ctcctcaaggccagggc

SEQ ID NO: 8409 - DNA, 17 bp, Homo sapiens
gtgcgagtgttgccccc

SEQ ID NO: 8410 - DNA, 16 bp, Homo sapiens
gaacgaagggacccct

SEQ ID NO: 8411 - DNA, 21 bp, Homo sapiens
cagagccaagtgcatccaggc

SEQ ID NO: 8412 - DNA, 17 bp, Homo sapiens
ctttgccacagtgcagt

SEQ ID NO: 8413 - DNA, 19 bp, Homo sapiens
tctctaggttccccaaaac

SEQ ID NO: 8414 - DNA, 16 bp, Homo sapiens
ctcgaagggctggtgc

SEQ ID NO: 8415 - DNA, 23 bp, Homo sapiens
tcctccctctctggggaaggagt

SEQ ID NO: 8416 - DNA, 19 bp, Homo sapiens
ttgtgttcttactggatgg

SEQ ID NO: 8417 - DNA, 24 bp, Homo sapiens
gggcccctactcaccgtgggtcat

SEQ ID NO: 8418 - DNA, 18 bp, Homo sapiens
gaagaggccctgatctct

SEQ ID NO: 8419 - DNA, 22 bp, Homo sapiens
gctgctccagagaaaggcagca

SEQ ID NO: 8420 - DNA, 17 bp, Homo sapiens
cccaccatcccaagtcc

SEQ ID NO: 8421 - DNA, 18 bp, Homo sapiens
tgcggccaatggatgagg

SEQ ID NO: 8422 - DNA, 16 bp, Homo sapiens
gccctcaggctcaggc

SEQ ID NO: 8423 - DNA, 24 bp, Homo sapiens
gtttagggaacccagcaccgatcg

SEQ ID NO: 8424 - DNA, 17 bp, Homo sapiens
tcctggcagaggcgccc

SEQ ID NO: 8425 - DNA, 24 bp, Homo sapiens
tccgcggggcgtcgtggagttggc

SEQ ID NO: 8426 - DNA, 18 bp, Homo sapiens
ctgacggcttttactgcc

SEQ ID NO: 8427 - DNA, 17 bp, Homo sapiens
gtggcacggtgcagtgc

SEQ ID NO: 8428 - DNA, 17 bp, Homo sapiens
gctcggacctgccaagg

SEQ ID NO: 8429 - DNA, 24 bp, Homo sapiens
ctctccctgtgctgggctcgcact

SEQ ID NO: 8430 - DNA, 16 bp, Homo sapiens
ggcggcgggagcgggc

SEQ ID NO: 8431 - DNA, 24 bp, Homo sapiens
accagaagccgcagcgtcatccta

SEQ ID NO: 8432 - DNA, 20 bp, Homo sapiens
ggaccctgcttctgagtgac

SEQ ID NO: 8433 - DNA, 21 bp, Homo sapiens
acaaaggtgagcctttgctcc

SEQ ID NO: 8434 - DNA, 17 bp, Homo sapiens
ggccacaccacctattc

SEQ ID NO: 8435 - DNA, 23 bp, Homo sapiens
gaaccaaagcttctcattaccct

SEQ ID NO: 8436 - DNA, 18 bp, Homo sapiens
gaggcagaactcactggg

SEQ ID NO: 8437 - DNA, 24 bp, Homo sapiens
actgaaacaagacattgtgtgagc

SEQ ID NO: 8438 - DNA, 19 bp, Homo sapiens
ctcagggtggggctgtccc

SEQ ID NO: 8439 - DNA, 21 bp, Homo sapiens
atggcatgagttaggtggggg

SEQ ID NO: 8440 - DNA, 24 bp, Homo sapiens
cagatggctgtagtcagcaagatg

SEQ ID NO: 8441 - DNA, 23 bp, Homo sapiens
cagcctccaccttaactgcccac

SEQ ID NO: 8442 - DNA, 18 bp, Homo sapiens
cgagtacagtcgtccagg

SEQ ID NO: 8443 - DNA, 19 bp, Homo sapiens
ggcaaaactcctggaaggg

SEQ ID NO: 8444 - DNA, 22 bp, Homo sapiens
ggtactgtgactagtggctgcc

SEQ ID NO: 8445 - DNA, 23 bp, Homo sapiens
tatagtagtttgtgggcacaaag

SEQ ID NO: 8446 - DNA, 16 bp, Homo sapiens
ggtgggggcactggca

SEQ ID NO: 8447 - DNA, 22 bp, Homo sapiens
cacctctaccagcagcattgtc

SEQ ID NO: 8448 - DNA, 24 bp, Homo sapiens
tgaacatggagggtaccaagattg

SEQ ID NO: 8449 - DNA, 20 bp, Homo sapiens
attcttcttcagagaggggg

SEQ ID NO: 8450 - DNA, 17 bp, Homo sapiens
gcgtgtggggttgatgt

SEQ ID NO: 8451 - DNA, 17 bp, Homo sapiens
catcagcaccaccctgc

SEQ ID NO: 8452 - DNA, 23 bp, Homo sapiens
agctgctatggacttccctggag

SEQ ID NO: 8453 - DNA, 19 bp, Homo sapiens
gcttccctggtccacctac

SEQ ID NO: 8454 - DNA, 24 bp, Homo sapiens
gcttctatgggctgtggcttatgt

SEQ ID NO: 8455 - DNA, 17 bp, Homo sapiens
gcatgggggccccctca

SEQ ID NO: 8456 - DNA, 20 bp, Homo sapiens
ggggccttgatgctagatag

SEQ ID NO: 8457 - DNA, 22 bp, Homo sapiens
gctggggaacaatgaccttggc

SEQ ID NO: 8458 - DNA, 16 bp, Homo sapiens
gttggttggctgacgg

SEQ ID NO: 8459 - DNA, 19 bp, Homo sapiens
tacacctgtggagggcagc

SEQ ID NO: 8460 - DNA, 22 bp, Homo sapiens
cttcagggaagggaggctcagg

SEQ ID NO: 8461 - DNA, 17 bp, Homo sapiens
cagcctgcgcctggagg

SEQ ID NO: 8462 - DNA, 24 bp, Homo sapiens
ggctagtcttatcaagggtcaccc

SEQ ID NO: 8463 - DNA, 21 bp, Homo sapiens
gttcacctggcaacagctatt

SEQ ID NO: 8464 - DNA, 19 bp, Homo sapiens
cacccagtgtccaactgag

SEQ ID NO: 8465 - DNA, 16 bp, Homo sapiens
gcttcccatctgccct

SEQ ID NO: 8466 - DNA, 24 bp, Homo sapiens
attcccatacaggcagaggcctgc

SEQ ID NO: 8467 - DNA, 24 bp, Homo sapiens
aagtggtgtgggggcagtacaggg

SEQ ID NO: 8468 - DNA, 24 bp, Homo sapiens
gcttcacctctgggtttttcagaa

SEQ ID NO: 8469 - DNA, 16 bp, Homo sapiens
gccgcgtgacccgctg

SEQ ID NO: 8470 - DNA, 22 bp, Homo sapiens
accgagatctgtatgaaacacc

SEQ ID NO: 8471 - DNA, 20 bp, Homo sapiens
agatgacctgaggaaactgc

SEQ ID NO: 8472 - DNA, 24 bp, Homo sapiens
caacccctcacatgcatcctgtgc

SEQ ID NO: 8473 - DNA, 19 bp, Homo sapiens
gtcactggctccctgggcc

SEQ ID NO: 8474 - DNA, 18 bp, Homo sapiens
tctcctgtgtagccacag

SEQ ID NO: 8475 - DNA, 23 bp, Homo sapiens
ttgttctggtccctgaataaggc

SEQ ID NO: 8476 - DNA, 24 bp, Homo sapiens
tcacagcactggtcatgaagggca

SEQ ID NO: 8477 - DNA, 16 bp, Homo sapiens
ctagggacaagggcat

SEQ ID NO: 8478 - DNA, 24 bp, Homo sapiens
gtagtacctgggctgcagtggggc

SEQ ID NO: 8479 - DNA, 17 bp, Homo sapiens
gctagctctgcaaggtg

SEQ ID NO: 8480 - DNA, 24 bp, Homo sapiens
ggagggcaagatacaaaacttaaa

SEQ ID NO: 8481 - DNA, 22 bp, Homo sapiens
ttaggacaaggtcagggagctt

SEQ ID NO: 8482 - DNA, 22 bp, Homo sapiens
attcttcttggtatggcctctg

SEQ ID NO: 8483 - DNA, 18 bp, Homo sapiens
cccatggtagctgctcag

SEQ ID NO: 8484 - DNA, 16 bp, Homo sapiens
agcccagccctctcac

SEQ ID NO: 8485 - DNA, 21 bp, Homo sapiens
ttttcctccctcctcctcctc

SEQ ID NO: 8486 - DNA, 22 bp, Homo sapiens
ggcccacatctctgccctggtt

SEQ ID NO: 8487 - DNA, 16 bp, Homo sapiens
ctccagagagggcctg

SEQ ID NO: 8488 - DNA, 19 bp, Homo sapiens
ctgtatgtggtgtccaacg

SEQ ID NO: 8489 - DNA, 20 bp, Homo sapiens
ttttccaggtcccttgtctg

SEQ ID NO: 8490 - DNA, 20 bp, Homo sapiens
tttaccaacgaggctggagg

SEQ ID NO: 8491 - DNA, 23 bp, Homo sapiens
ctctatgaacaaggaagacaagg

SEQ ID NO: 8492 - DNA, 17 bp, Homo sapiens
ctcctggacctggaagc

SEQ ID NO: 8493 - DNA, 24 bp, Homo sapiens
caaatctttctcccagcagccagc

SEQ ID NO: 8494 - DNA, 22 bp, Homo sapiens
gggttcataaccttttggtaac

SEQ ID NO: 8495 - DNA, 23 bp, Homo sapiens
tacaatcaagtcatctaagatgc

SEQ ID NO: 8496 - DNA, 21 bp, Homo sapiens
caaagaccttggacttgggcc

SEQ ID NO: 8497 - DNA, 19 bp, Homo sapiens
gcagagctaagaccaaacc

SEQ ID NO: 8498 - DNA, 24 bp, Homo sapiens
tgactcagggattctgtccaagac

SEQ ID NO: 8499 - DNA, 20 bp, Homo sapiens
caagatacttggtagtgacc

SEQ ID NO: 8500 - DNA, 18 bp, Homo sapiens
cctgaggtagggactcag

SEQ ID NO: 8501 - DNA, 20 bp, Homo sapiens
agtagccttttggattgtag

SEQ ID NO: 8502 - DNA, 24 bp, Homo sapiens
tagagcagaaataaaagggcccac

SEQ ID NO: 8503 - DNA, 17 bp, Homo sapiens
agtcactttgggtgggc

SEQ ID NO: 8504 - DNA, 23 bp, Homo sapiens
tagactctccatcagcttcaccc

SEQ ID NO: 8505 - DNA, 22 bp, Homo sapiens
ggccattgacctatccatgaca

SEQ ID NO: 8506 - DNA, 18 bp, Homo sapiens
gtcacactgactcgcacc

SEQ ID NO: 8507 - DNA, 23 bp, Homo sapiens
gaatccagttcacagcaaacaaa

SEQ ID NO: 8508 - DNA, 16 bp, Homo sapiens
acggcgggaaaatggt

SEQ ID NO: 8509 - DNA, 22 bp, Homo sapiens
cctgatcagatggccagtgtgc

SEQ ID NO: 8510 - DNA, 16 bp, Homo sapiens
actaagcccagccgcc

SEQ ID NO: 8511 - DNA, 16 bp, Homo sapiens
gtgctggcgtgtgtgc

SEQ ID NO: 8512 - DNA, 22 bp, Homo sapiens
ggatagagggtgctgatcttgg

SEQ ID NO: 8513 - DNA, 21 bp, Homo sapiens
cagactccaacccgcaaacgc

SEQ ID NO: 8514 - DNA, 16 bp, Homo sapiens
ctgcaggcattccccc

SEQ ID NO: 8515 - DNA, 16 bp, Homo sapiens
tcctgcggagcacctc

SEQ ID NO: 8516 - DNA, 16 bp, Homo sapiens
ctgcactcgttgcagg

SEQ ID NO: 8517 - DNA, 16 bp, Homo sapiens
cgcttccctcccccac

SEQ ID NO: 8518 - DNA, 21 bp, Homo sapiens
agcagaggcctggactacatc

SEQ ID NO: 8519 - DNA, 24 bp, Homo sapiens
gcaactaagtggacgacacaaggc

SEQ ID NO: 8520 - DNA, 16 bp, Homo sapiens
ttggggctgcccacgc

SEQ ID NO: 8521 - DNA, 21 bp, Homo sapiens
cacacttacagccctctgcat

SEQ ID NO: 8522 - DNA, 19 bp, Homo sapiens
atctgccgaattgaagagg

SEQ ID NO: 8523 - DNA, 24 bp, Homo sapiens
gcataaaccaatattgaatttcag

SEQ ID NO: 8524 - DNA, 22 bp, Homo sapiens
cataattgttttgacgtaggtg

SEQ ID NO: 8525 - DNA, 23 bp, Homo sapiens
gcatacatgttataagctgtgtg

SEQ ID NO: 8526 - DNA, 21 bp, Homo sapiens
cgtcatgcctatgtttctttg

SEQ ID NO: 8527 - DNA, 21 bp, Homo sapiens
tctggtggagctgaaatcagg

SEQ ID NO: 8528 - DNA, 21 bp, Homo sapiens
agccttctaagagcttgtaaa

SEQ ID NO: 8529 - DNA, 23 bp, Homo sapiens
gagggccactctgcttggaatgt

SEQ ID NO: 8530 - DNA, 17 bp, Homo sapiens
aacataatgggcgtccc

SEQ ID NO: 8531 - DNA, 23 bp, Homo sapiens
ctccctaacccctttccttcatg

SEQ ID NO: 8532 - DNA, 16 bp, Homo sapiens
gcggaatatggagggc

SEQ ID NO: 8533 - DNA, 22 bp, Homo sapiens
tgaacaaaaacattactataat

SEQ ID NO: 8534 - DNA, 20 bp, Homo sapiens
tcaactcctcaactgttgtg

SEQ ID NO: 8535 - DNA, 21 bp, Homo sapiens
ttaccaaaagagaatagggac

SEQ ID NO: 8536 - DNA, 22 bp, Homo sapiens
acactgctcaaaaactcacttc

SEQ ID NO: 8537 - DNA, 19 bp, Homo sapiens
gctgtggtccagtctctga

SEQ ID NO: 8538 - DNA, 21 bp, Homo sapiens
cccctttcagacataaaacta

SEQ ID NO: 8539 - DNA, 19 bp, Homo sapiens
gactaccgagttggaacag

SEQ ID NO: 8540 - DNA, 24 bp, Homo sapiens
cctcatttttcagatgaggaaaat

SEQ ID NO: 8541 - DNA, 19 bp, Homo sapiens
gcttttgaaagagcaggtc

SEQ ID NO: 8542 - DNA, 22 bp, Homo sapiens
tttttttgtcctataatgtaat

SEQ ID NO: 8543 - DNA, 20 bp, Homo sapiens
acatgtgtgctaattcttgc

SEQ ID NO: 8544 - DNA, 21 bp, Homo sapiens
aggatatttccctggcaatgc

SEQ ID NO: 8545 - DNA, 23 bp, Homo sapiens
accagactattaagaaagacaaa

SEQ ID NO: 8546 - DNA, 24 bp, Homo sapiens
ggaagttgaaaatgaaaagaagac

SEQ ID NO: 8547 - DNA, 23 bp, Homo sapiens
gcaaaattgtaacatgttcaaaa

SEQ ID NO: 8548 - DNA, 24 bp, Homo sapiens
ttcatgtttttcactcacgtaggc

SEQ ID NO: 8549 - DNA, 17 bp, Homo sapiens
tgcagctccacaggtaa

SEQ ID NO: 8550 - DNA, 19 bp, Homo sapiens
gaagtatggtacaggacac

SEQ ID NO: 8551 - DNA, 20 bp, Homo sapiens
ccttcttcgctacaagttcc

SEQ ID NO: 8552 - DNA, 20 bp, Homo sapiens
agagatttaaattggttgcc

SEQ ID NO: 8553 - DNA, 24 bp, Homo sapiens
aaggaaataatgagagttaccatt

SEQ ID NO: 8554 - DNA, 23 bp, Homo sapiens
acacagcatccagagtgaagagc

SEQ ID NO: 8555 - DNA, 22 bp, Homo sapiens
gttttgtaatgcaggtaatgaa

SEQ ID NO: 8556 - DNA, 20 bp, Homo sapiens
ttcatatccctgtcaaaatt

SEQ ID NO: 8557 - DNA, 28 bp, Homo sapiens
atataattattgatttattattagtaag

SEQ ID NO: 8558 - DNA, 16 bp, Homo sapiens
aaactgccgcctggca

SEQ ID NO: 8559 - DNA, 19 bp, Homo sapiens
tcacaggacacaggtctag

SEQ ID NO: 8560 - DNA, 24 bp, Homo sapiens
agtctaaccattcaggatgcccaa

SEQ ID NO: 8561 - DNA, 19 bp, Homo sapiens
gcttggtggagaaggctat

SEQ ID NO: 8562 - DNA, 27 bp, Homo sapiens
cacgacagtatatgaaataaatagttg

SEQ ID NO: 8563 - DNA, 21 bp, Homo sapiens
ctccagttattgatcgtggaa

SEQ ID NO: 8564 - DNA, 23 bp, Homo sapiens
ttctacatgatttatgtcattat

SEQ ID NO: 8565 - DNA, 21 bp, Homo sapiens
tcgctggcattttggttgatg

SEQ ID NO: 8566 - DNA, 24 bp, Homo sapiens
gtttaactcacacttacccatgaa

SEQ ID NO: 8567 - DNA, 24 bp, Homo sapiens
acttttttttttcatttatctcca

SEQ ID NO: 8568 - DNA, 22 bp, Homo sapiens
tcgaatcattttatgaagctgt

SEQ ID NO: 8569 - DNA, 24 bp, Homo sapiens
cgatgtttcctaacatttgtaacc

SEQ ID NO: 8570 - DNA, 22 bp, Homo sapiens
tcatgtttgtatacatttcggc

SEQ ID NO: 8571 - DNA, 19 bp, Homo sapiens
cctagaaaatcaccagtgg

SEQ ID NO: 8572 - DNA, 18 bp, Homo sapiens
ttgcttatgcagagagcc

SEQ ID NO: 8573 - DNA, 24 bp, Homo sapiens
cacacacacatacacacattatag

SEQ ID NO: 8574 - DNA, 19 bp, Homo sapiens
atgaagactggaacatggg

SEQ ID NO: 8575 - DNA, 20 bp, Homo sapiens
attaaggagagggaaggagg

SEQ ID NO: 8576 - DNA, 20 bp, Homo sapiens
tgctttactcagaagcttat

SEQ ID NO: 8577 - DNA, 21 bp, Homo sapiens
atttacctgatcatggctctc

SEQ ID NO: 8578 - DNA, 20 bp, Homo sapiens
agtttgcactgatataatgc

SEQ ID NO: 8579 - DNA, 22 bp, Homo sapiens
cctgtttgtgagcgtgtatact

SEQ ID NO: 8580 - DNA, 28 bp, Homo sapiens
tttcagtaaaagtttaaacagtgataac

SEQ ID NO: 8581 - DNA, 22 bp, Homo sapiens
tccagataagtggattcaggta

SEQ ID NO: 8582 - DNA, 23 bp, Homo sapiens
aaagcataagaatcgacagacta

SEQ ID NO: 8583 - DNA, 18 bp, Homo sapiens
ctccaatttcccagggag

SEQ ID NO: 8584 - DNA, 24 bp, Homo sapiens
ctgtaactaatgattacaactaag

SEQ ID NO: 8585 - DNA, 23 bp, Homo sapiens
aagtttgatcattatgaaccgac

SEQ ID NO: 8586 - DNA, 23 bp, Homo sapiens
acaaaaaatatttacatggactc

SEQ ID NO: 8587 - DNA, 21 bp, Homo sapiens
atattcccctattattgtttt

SEQ ID NO: 8588 - DNA, 22 bp, Homo sapiens
ctagtcgatagtcaaaaccacc

SEQ ID NO: 8589 - DNA, 23 bp, Homo sapiens
gaaatgagatatgctatcacaat

SEQ ID NO: 8590 - DNA, 20 bp, Homo sapiens
gctgtgtcccgattctataa

SEQ ID NO: 8591 - DNA, 21 bp, Homo sapiens
actcagggtagaatttcattt

SEQ ID NO: 8592 - DNA, 22 bp, Homo sapiens
ttcggactacaagtagatgaag

SEQ ID NO: 8593 - DNA, 23 bp, Homo sapiens
actgtatgctgacaaaatactct

SEQ ID NO: 8594 - DNA, 22 bp, Homo sapiens
atccgtattgattttctttttc

SEQ ID NO: 8595 - DNA, 20 bp, Homo sapiens
tggctttacctcagctattg

SEQ ID NO: 8596 - DNA, 21 bp, Homo sapiens
aacaaactaattggtgaatgt

SEQ ID NO: 8597 - DNA, 19 bp, Homo sapiens
acatgaggtaagtcaaggc

SEQ ID NO: 8598 - DNA, 21 bp, Homo sapiens
agtcagtatatttgctgatgc

SEQ ID NO: 8599 - DNA, 20 bp, Homo sapiens
acctgagaaaccttgacctt

SEQ ID NO: 8600 - DNA, 19 bp, Homo sapiens
tggtgttacgtccatgctt

SEQ ID NO: 8601 - DNA, 23 bp, Homo sapiens
tgccaaaatgggataataaatta

SEQ ID NO: 8602 - DNA, 22 bp, Homo sapiens
tctgtcaaacataagatggtgg

SEQ ID NO: 8603 - DNA, 20 bp, Homo sapiens
cagtaatggctattgcagct

SEQ ID NO: 8604 - DNA, 24 bp, Homo sapiens
tcttcacattttgcttaaatacat

SEQ ID NO: 8605 - DNA, 16 bp, Homo sapiens
acccactccatggtga

SEQ ID NO: 8606 - DNA, 24 bp, Homo sapiens
tcttgagatagagccctataattt

SEQ ID NO: 8607 - DNA, 20 bp, Homo sapiens
gcgatattcttccaaccacc

SEQ ID NO: 8608 - DNA, 21 bp, Homo sapiens
ttcttgttagttttgtgactt

SEQ ID NO: 8609 - DNA, 21 bp, Homo sapiens
tgatctttgggatagcagatt

SEQ ID NO: 8610 - DNA, 24 bp, Homo sapiens
acaacaaaaataaatccaattaag

SEQ ID NO: 8611 - DNA, 19 bp, Homo sapiens
tgtttgatgggacagattc

SEQ ID NO: 8612 - DNA, 27 bp, Homo sapiens
aatttagtgaaattcttaaaaattaat

SEQ ID NO: 8613 - DNA, 22 bp, Homo sapiens
tcatagtcctcttagatgtggt

SEQ ID NO: 8614 - DNA, 23 bp, Homo sapiens
tgtatgtacctacctggagtagg

SEQ ID NO: 8615 - DNA, 21 bp, Homo sapiens
ccgttatggaacacctgaaga

SEQ ID NO: 8616 - DNA, 22 bp, Homo sapiens
ggtccagaatgaaaataacagg

SEQ ID NO: 8617 - DNA, 17 bp, Homo sapiens
caatcggctgtttcctc

SEQ ID NO: 8618 - DNA, 24 bp, Homo sapiens
gaattttttgaagcatggctgtgt

SEQ ID NO: 8619 - DNA, 21 bp, Homo sapiens
tgtcacatgctgtttggatat

SEQ ID NO: 8620 - DNA, 20 bp, Homo sapiens
tctaccagttcttgtagctc

SEQ ID NO: 8621 - DNA, 22 bp, Homo sapiens
gagtctatgaccttagtaaaag

SEQ ID NO: 8622 - DNA, 17 bp, Homo sapiens
gcaatcatggagcatgc

SEQ ID NO: 8623 - DNA, 27 bp, Homo sapiens
aaaggttacacgatgttataaaaaatg

SEQ ID NO: 8624 - DNA, 26 bp, Homo sapiens
aatgtggcttttaatttagatttgac

SEQ ID NO: 8625 - DNA, 21 bp, Homo sapiens
aaaatgaacacaatgagtctc

SEQ ID NO: 8626 - DNA, 24 bp, Homo sapiens
tgtaaattttaatgtatttggaat

SEQ ID NO: 8627 - DNA, 24 bp, Homo sapiens
tgatttggtaaccaaagctggcat

SEQ ID NO: 8628 - DNA, 23 bp, Homo sapiens
aaggtcaaacaaaaaaatgttaa

SEQ ID NO: 8629 - DNA, 22 bp, Homo sapiens
tgcaatgtactaccaagaatca

SEQ ID NO: 8630 - DNA, 21 bp, Homo sapiens
gcctaaaataaaatgcctttc

SEQ ID NO: 8631 - DNA, 20 bp, Homo sapiens
tcatgtgggaatttcttccc

SEQ ID NO: 8632 - DNA, 24 bp, Homo sapiens
cacttgtaattagcttttctaata

SEQ ID NO: 8633 - DNA, 23 bp, Homo sapiens
atattctgtagtttaagcattcc

SEQ ID NO: 8634 - DNA, 23 bp, Homo sapiens
acagttattacttaccaaggcct

SEQ ID NO: 8635 - DNA, 19 bp, Homo sapiens
tacttgatcaggtagtgtc

SEQ ID NO: 8636 - DNA, 19 bp, Homo sapiens
gctacttttccttcatggg

SEQ ID NO: 8637 - DNA, 22 bp, Homo sapiens
ggtgccttttatatgtgagaat

SEQ ID NO: 8638 - DNA, 20 bp, Homo sapiens
ctccgtggcttctttggtct

SEQ ID NO: 8639 - DNA, 16 bp, Homo sapiens
acactgggatccagaa

SEQ ID NO: 8640 - DNA, 23 bp, Homo sapiens
tgatgtaaaatacgcaactgtca

SEQ ID NO: 8641 - DNA, 18 bp, Homo sapiens
cgtatttcaccgtgggca

SEQ ID NO: 8642 - DNA, 26 bp, Homo sapiens
ataaaagtaaaaattaactttcctag

SEQ ID NO: 8643 - DNA, 22 bp, Homo sapiens
aaagcaataacatgtcattctc

SEQ ID NO: 8644 - DNA, 21 bp, Homo sapiens
tgttctcacctcatatgagtg

SEQ ID NO: 8645 - DNA, 17 bp, Homo sapiens
acttgtagcagtgctcc

SEQ ID NO: 8646 - DNA, 20 bp, Homo sapiens
cacgaaccacatactttgcc

SEQ ID NO: 8647 - DNA, 21 bp, Homo sapiens
gaattatgttcctgaaggtca

SEQ ID NO: 8648 - DNA, 18 bp, Homo sapiens
gcctcatggatccaaatt

SEQ ID NO: 8649 - DNA, 24 bp, Homo sapiens
ctctatttgtacatttagactgtt

SEQ ID NO: 8650 - DNA, 19 bp, Homo sapiens
actggattatggaaaatgg

SEQ ID NO: 8651 - DNA, 22 bp, Homo sapiens
agtttaaatcaaacttggcaaa

SEQ ID NO: 8652 - DNA, 22 bp, Homo sapiens
atgctgttgttaactgatcttc

SEQ ID NO: 8653 - DNA, 18 bp, Homo sapiens
aggagggaggaaagtacc

SEQ ID NO: 8654 - DNA, 22 bp, Homo sapiens
tgcaagtaaagcagtattttgt

SEQ ID NO: 8655 - DNA, 20 bp, Homo sapiens
tgctttggtgggatatacag

SEQ ID NO: 8656 - DNA, 21 bp, Homo sapiens
accactagtattttgattaac

SEQ ID NO: 8657 - DNA, 24 bp, Homo sapiens
agagcttaataaattctaaggctc

SEQ ID NO: 8658 - DNA, 21 bp, Homo sapiens
tgctgatggtggtttatactg

SEQ ID NO: 8659 - DNA, 25 bp, Homo sapiens
taaagttcatatggttaaatacatg

SEQ ID NO: 8660 - DNA, 22 bp, Homo sapiens
ggagaaaatgaaggtggtattg

SEQ ID NO: 8661 - DNA, 20 bp, Homo sapiens
agttcaatgctttcaagtac

SEQ ID NO: 8662 - DNA, 22 bp, Homo sapiens
tcattttctttcatacttcttc

SEQ ID NO: 8663 - DNA, 18 bp, Homo sapiens
cccggggcccattctttg

SEQ ID NO: 8664 - DNA, 24 bp, Homo sapiens
gaataagactaaagcagttactta

SEQ ID NO: 8665 - DNA, 19 bp, Homo sapiens
ttcatagcctctggaaaac

SEQ ID NO: 8666 - DNA, 29 bp, Homo sapiens
agcctctactaataaatgaaattatttat

SEQ ID NO: 8667 - DNA, 21 bp, Homo sapiens
ttggctaaactgcttatacct

SEQ ID NO: 8668 - DNA, 16 bp, Homo sapiens
cgagtcaccccgagcc

SEQ ID NO: 8669 - DNA, 17 bp, Homo sapiens
cccgaactggccagact

SEQ ID NO: 8670 - DNA, 17 bp, Homo sapiens
gccgaggggcggcccgt

SEQ ID NO: 8671 - DNA, 17 bp, Homo sapiens
gactcccgcggctcggc

SEQ ID NO: 8672 - DNA, 19 bp, Homo sapiens
ctaagtgggggtggtggga

SEQ ID NO: 8673 - DNA, 16 bp, Homo sapiens
actcgacctctcgggc

SEQ ID NO: 8674 - DNA, 24 bp, Homo sapiens
aagtacgggtcgatctccaggagt

SEQ ID NO: 8675 - DNA, 16 bp, Homo sapiens
ctccggctccgcccta

SEQ ID NO: 8676 - DNA, 16 bp, Homo sapiens
ctcgtagtcctcgggc

SEQ ID NO: 8677 - DNA, 23 bp, Homo sapiens
cttccgtcccggctataaagggc

SEQ ID NO: 8678 - DNA, 16 bp, Homo sapiens
tggtgcgcaggaagag

SEQ ID NO: 8679 - DNA, 24 bp, Homo sapiens
ggggaccgcgcaagcgcagtgagt

SEQ ID NO: 8680 - DNA, 16 bp, Homo sapiens
ggtgcgcagtagccgc

SEQ ID NO: 8681 - DNA, 16 bp, Homo sapiens
gtgtgtccctgcggcg

SEQ ID NO: 8682 - DNA, 21 bp, Homo sapiens
cgcgttaccttcttgattttg

SEQ ID NO: 8683 - DNA, 16 bp, Homo sapiens
cggctgcgggctcttc

SEQ ID NO: 8684 - DNA, 18 bp, Homo sapiens
cagtcttgcagctgaggg

SEQ ID NO: 8685 - DNA, 21 bp, Homo sapiens
ctggtggtctctaccgcgaac

SEQ ID NO: 8686 - DNA, 16 bp, Homo sapiens
cggccgcagggtgtat

SEQ ID NO: 8687 - DNA, 24 bp, Homo sapiens
tttcgccaaagagcttttcctagg

SEQ ID NO: 8688 - DNA, 20 bp, Homo sapiens
tctggaaatgggaaaacttc

SEQ ID NO: 8689 - DNA, 23 bp, Homo sapiens
ggtttgctttccagttccttcag

SEQ ID NO: 8690 - DNA, 18 bp, Homo sapiens
ttccacgggtcccaagaa

SEQ ID NO: 8691 - DNA, 22 bp, Homo sapiens
tgtttttccttcccttttaact

SEQ ID NO: 8692 - DNA, 19 bp, Homo sapiens
cttacaatggaaatcggca

SEQ ID NO: 8693 - DNA, 27 bp, Homo sapiens
tttttagaaaatatttactatttttag

SEQ ID NO: 8694 - DNA, 19 bp, Homo sapiens
tccctcaagaagacttctc

SEQ ID NO: 8695 - DNA, 19 bp, Homo sapiens
tgaaatcaatcagttcttg

SEQ ID NO: 8696 - DNA, 25 bp, Homo sapiens
actggatgttttttaattaaatggc

SEQ ID NO: 8697 - DNA, 20 bp, Homo sapiens
cctggtcaatttttcgggag

SEQ ID NO: 8698 - DNA, 23 bp, Homo sapiens
ccatgactacagaatttctagtt

SEQ ID NO: 8699 - DNA, 17 bp, Homo sapiens
cccaaaaagccctaggc

SEQ ID NO: 8700 - DNA, 21 bp, Homo sapiens
taaacactgtcctgtttactt

SEQ ID NO: 8701 - DNA, 22 bp, Homo sapiens
ctttcttaagagctaaactggc

SEQ ID NO: 8702 - DNA, 20 bp, Homo sapiens
attttcctcttggcagtgga

SEQ ID NO: 8703 - DNA, 20 bp, Homo sapiens
acggatggtgtcatctattc

SEQ ID NO: 8704 - DNA, 24 bp, Homo sapiens
tgaaactttggagaaattgaagag

SEQ ID NO: 8705 - DNA, 17 bp, Homo sapiens
gagaacacttcctccct

SEQ ID NO: 8706 - DNA, 17 bp, Homo sapiens
ggagaagcccaggccac

SEQ ID NO: 8707 - DNA, 24 bp, Homo sapiens
cccggcctgtattgtgattttttt

SEQ ID NO: 8708 - DNA, 18 bp, Homo sapiens
gggtcacagtgatggacc

SEQ ID NO: 8709 - DNA, 19 bp, Homo sapiens
aaaaaaaagccaatgaagc

SEQ ID NO: 8710 - DNA, 24 bp, Homo sapiens
tacagagagcaccacacagaatcc

SEQ ID NO: 8711 - DNA, 19 bp, Homo sapiens
ctggtccatctctcctagg

SEQ ID NO: 8712 - DNA, 19 bp, Homo sapiens
ccaattcagagggagcaag

SEQ ID NO: 8713 - DNA, 24 bp, Homo sapiens
ggagatcatcagcatggatgggtc

SEQ ID NO: 8714 - DNA, 16 bp, Homo sapiens
accatgaggtgtggcc

SEQ ID NO: 8715 - DNA, 18 bp, Homo sapiens
ctgggctctgcctgtggc

SEQ ID NO: 8716 - DNA, 20 bp, Homo sapiens
ctccccggacgccagtttag

SEQ ID NO: 8717 - DNA, 24 bp, Homo sapiens
aagtaaatatttgcctcagaaagg

SEQ ID NO: 8718 - DNA, 23 bp, Homo sapiens
ctgctgagggataacgttttgtg

SEQ ID NO: 8719 - DNA, 24 bp, Homo sapiens
cccacagctgacattagtctgtgt

SEQ ID NO: 8720 - DNA, 18 bp, Homo sapiens
ctcaacaaaaccaacagc

SEQ ID NO: 8721 - DNA, 21 bp, Homo sapiens
agcagaaagccaaatacttgc

SEQ ID NO: 8722 - DNA, 21 bp, Homo sapiens
ggaatggcaagaacagttgct

SEQ ID NO: 8723 - DNA, 19 bp, Homo sapiens
acggagccagccaggtctg

SEQ ID NO: 8724 - DNA, 21 bp, Homo sapiens
agcttggaaagctgaatatgt

SEQ ID NO: 8725 - DNA, 19 bp, Homo sapiens
agccattgaggatgtagtg

SEQ ID NO: 8726 - DNA, 24 bp, Homo sapiens
cctcttacaagtactaaaacctcc

SEQ ID NO: 8727 - DNA, 18 bp, Homo sapiens
aggttgtgactgagaccc

SEQ ID NO: 8728 - DNA, 24 bp, Homo sapiens
agtattctcccttgaccacatctt

SEQ ID NO: 8729 - DNA, 16 bp, Homo sapiens
gtgctacagcagcagg

SEQ ID NO: 8730 - DNA, 23 bp, Homo sapiens
agcagagccacactaagtgaaga

SEQ ID NO: 8731 - DNA, 23 bp, Homo sapiens
actccatcgcaaataaaaaaaac

SEQ ID NO: 8732 - DNA, 22 bp, Homo sapiens
ctccattagtaatccagacctg

SEQ ID NO: 8733 - DNA, 20 bp, Homo sapiens
ttggttggcttctgcagagc

SEQ ID NO: 8734 - DNA, 19 bp, Homo sapiens
tccatcagaatcaacgacc

SEQ ID NO: 8735 - DNA, 20 bp, Homo sapiens
agcttgatggacaaagacag

SEQ ID NO: 8736 - DNA, 18 bp, Homo sapiens
ttagtgactccaccaaag

SEQ ID NO: 8737 - DNA, 22 bp, Homo sapiens
aaagtccatctttctgtcctca

SEQ ID NO: 8738 - DNA, 19 bp, Homo sapiens
cgcgcacaggagctactta

SEQ ID NO: 8739 - DNA, 24 bp, Homo sapiens
ttttactgtgtttgcaaagactga

SEQ ID NO: 8740 - DNA, 24 bp, Homo sapiens
acagcattcatagtagaaagagac

SEQ ID NO: 8741 - DNA, 22 bp, Homo sapiens
atcttgctatttggacagagtc

SEQ ID NO: 8742 - DNA, 19 bp, Homo sapiens
cattcggggctccaacagt

SEQ ID NO: 8743 - DNA, 24 bp, Homo sapiens
ggtatcttggtgttttcaaaatgg

SEQ ID NO: 8744 - DNA, 22 bp, Homo sapiens
tgtctttctatactgtcctacc

SEQ ID NO: 8745 - DNA, 16 bp, Homo sapiens
tggctggcaactcacc

SEQ ID NO: 8746 - DNA, 24 bp, Homo sapiens
gaattgcctgcttgcaggtcagat

SEQ ID NO: 8747 - DNA, 18 bp, Homo sapiens
tagggcaaaagctggggg

SEQ ID NO: 8748 - DNA, 24 bp, Homo sapiens
tcatgtgtttcagcttgtgaagtc

SEQ ID NO: 8749 - DNA, 20 bp, Homo sapiens
ttcccaacagataaccatgc

SEQ ID NO: 8750 - DNA, 23 bp, Homo sapiens
agaggtcggagatgggtttaagg

SEQ ID NO: 8751 - DNA, 19 bp, Homo sapiens
gaggatgttcatggccacc

SEQ ID NO: 8752 - DNA, 16 bp, Homo sapiens
caccttgttctgaggc

SEQ ID NO: 8753 - DNA, 23 bp, Homo sapiens
taccaatcaatctcttgagcagc

SEQ ID NO: 8754 - DNA, 24 bp, Homo sapiens
aagctgatccacctggcctggttt

SEQ ID NO: 8755 - DNA, 16 bp, Homo sapiens
agccggggcagcaggg

SEQ ID NO: 8756 - DNA, 16 bp, Homo sapiens
gctctccctgttctcc

SEQ ID NO: 8757 - DNA, 20 bp, Homo sapiens
gctggtagcctggttcagca

SEQ ID NO: 8758 - DNA, 23 bp, Homo sapiens
ttcagcatgggcagcgtcgtggc

SEQ ID NO: 8759 - DNA, 19 bp, Homo sapiens
actgtttccttgtgcaggc

SEQ ID NO: 8760 - DNA, 23 bp, Homo sapiens
gtatttgacctcagcagacacgc

SEQ ID NO: 8761 - DNA, 18 bp, Homo sapiens
cagtactcaaccattggt

SEQ ID NO: 8762 - DNA, 21 bp, Homo sapiens
taggaaatcatgtttgaacca

SEQ ID NO: 8763 - DNA, 20 bp, Homo sapiens
gaagtcaccagtacagagac

SEQ ID NO: 8764 - DNA, 20 bp, Homo sapiens
agaaatgactgctgagtacg

SEQ ID NO: 8765 - DNA, 17 bp, Homo sapiens
cccagtgacccgtgtca

SEQ ID NO: 8766 - DNA, 24 bp, Homo sapiens
cagtgaatttggattgattcaggt

SEQ ID NO: 8767 - DNA, 24 bp, Homo sapiens
agactagttaaggctttatttgac

SEQ ID NO: 8768 - DNA, 19 bp, Homo sapiens
atccctgctgtgaggtagg

SEQ ID NO: 8769 - DNA, 24 bp, Homo sapiens
ttgaggcttctgacttaattactt

SEQ ID NO: 8770 - DNA, 18 bp, Homo sapiens
gccagggttaccttcacc

SEQ ID NO: 8771 - DNA, 24 bp, Homo sapiens
gtttcttgtgttttttctgaacac

SEQ ID NO: 8772 - DNA, 19 bp, Homo sapiens
ttgaaaggtcacagtgagg

SEQ ID NO: 8773 - DNA, 24 bp, Homo sapiens
ggcttacgtcatggagagtatgac

SEQ ID NO: 8774 - DNA, 22 bp, Homo sapiens
aagtgcatcataaatactggat

SEQ ID NO: 8775 - DNA, 19 bp, Homo sapiens
actgctccatcgaggcagc

SEQ ID NO: 8776 - DNA, 24 bp, Homo sapiens
ggaaggcaaaggacttgaccacat

SEQ ID NO: 8777 - DNA, 16 bp, Homo sapiens
caagcccccgaggatc

SEQ ID NO: 8778 - DNA, 16 bp, Homo sapiens
gtgcctcccatgcctc

SEQ ID NO: 8779 - DNA, 21 bp, Homo sapiens
cctcgaagatgaggaggatgc

SEQ ID NO: 8780 - DNA, 24 bp, Homo sapiens
ttttggaaaggattcagtgtgaca

SEQ ID NO: 8781 - DNA, 20 bp, Homo sapiens
atctttaggaccaggcaggg

SEQ ID NO: 8782 - DNA, 16 bp, Homo sapiens
tgaggcgctgcagatc

SEQ ID NO: 8783 - DNA, 18 bp, Homo sapiens
ccctgagagcatgcgacc

SEQ ID NO: 8784 - DNA, 24 bp, Homo sapiens
gtacgagcgcatactgcgtgacac

SEQ ID NO: 8785 - DNA, 23 bp, Homo sapiens
gagaatctcattggttccctgtg

SEQ ID NO: 8786 - DNA, 17 bp, Homo sapiens
gagccctgctcccagct

SEQ ID NO: 8787 - DNA, 16 bp, Homo sapiens
gtcaggatgcggccgg

SEQ ID NO: 8788 - DNA, 17 bp, Homo sapiens
cagtggccggctctacc

SEQ ID NO: 8789 - DNA, 16 bp, Homo sapiens
tgggcaggtatgggac

SEQ ID NO: 8790 - DNA, 22 bp, Homo sapiens
cagcctttgacctctacactac

SEQ ID NO: 8791 - DNA, 16 bp, Homo sapiens
ccccatgcccccactc

SEQ ID NO: 8792 - DNA, 23 bp, Homo sapiens
catcgccctgacgggtctgcagc

SEQ ID NO: 8793 - DNA, 21 bp, Homo sapiens
ttccctgggcagcaagccccc

SEQ ID NO: 8794 - DNA, 17 bp, Homo sapiens
ggggttcaggctgtagc

SEQ ID NO: 8795 - DNA, 16 bp, Homo sapiens
agggagtcccgaagcc

SEQ ID NO: 8796 - DNA, 21 bp, Homo sapiens
gcttctgggtgccgaatgggc

SEQ ID NO: 8797 - DNA, 16 bp, Homo sapiens
ccgcaagactggggtg

SEQ ID NO: 8798 - DNA, 18 bp, Homo sapiens
cacaggaccatggacttt

SEQ ID NO: 8799 - DNA, 21 bp, Homo sapiens
tttctgccacaaggagatctg

SEQ ID NO: 8800 - DNA, 17 bp, Homo sapiens
ataccgttggccggagg

SEQ ID NO: 8801 - DNA, 23 bp, Homo sapiens
gtcatggactagctggtgttccc

SEQ ID NO: 8802 - DNA, 18 bp, Homo sapiens
caaccatggagttgtgca

SEQ ID NO: 8803 - DNA, 23 bp, Homo sapiens
ctgggcttctccaggggaagttg

SEQ ID NO: 8804 - DNA, 16 bp, Homo sapiens
gcagtgtctccacggt

SEQ ID NO: 8805 - DNA, 23 bp, Homo sapiens
tgcttcccccagatggggcatct

SEQ ID NO: 8806 - DNA, 17 bp, Homo sapiens
aggaccgcttgcgaccc

SEQ ID NO: 8807 - DNA, 20 bp, Homo sapiens
tgaggtgctgaactgagtcc

SEQ ID NO: 8808 - DNA, 20 bp, Homo sapiens
ttctaggcctggtcccaaag

SEQ ID NO: 8809 - DNA, 24 bp, Homo sapiens
tttgaggagaacacctactgcttc

SEQ ID NO: 8810 - DNA, 17 bp, Homo sapiens
aggctgacaaagtcagc

SEQ ID NO: 8811 - DNA, 19 bp, Homo sapiens
tcagtaccagctgctcctc

SEQ ID NO: 8812 - DNA, 22 bp, Homo sapiens
agaaaggtgttattgactccac

SEQ ID NO: 8813 - DNA, 16 bp, Homo sapiens
cccgcgacagcacggc

SEQ ID NO: 8814 - DNA, 17 bp, Homo sapiens
agggaccatgtggggga

SEQ ID NO: 8815 - DNA, 16 bp, Homo sapiens
gctgggctgggctcac

SEQ ID NO: 8816 - DNA, 24 bp, Homo sapiens
ctctgtgatcccagaccatcatgg

SEQ ID NO: 8817 - DNA, 23 bp, Homo sapiens
accctcctcaacaatcaacttca

SEQ ID NO: 8818 - DNA, 17 bp, Homo sapiens
ctgtatggcatgacggc

SEQ ID NO: 8819 - DNA, 17 bp, Homo sapiens
gaccctcccacggccac

SEQ ID NO: 8820 - DNA, 18 bp, Homo sapiens
aagcttccacgcagaagg

SEQ ID NO: 8821 - DNA, 17 bp, Homo sapiens
gtgccaggccttgtgac

SEQ ID NO: 8822 - DNA, 17 bp, Homo sapiens
ccccaagacatgccact

SEQ ID NO: 8823 - DNA, 24 bp, Homo sapiens
gctgggtttttgaagctcagaggt

SEQ ID NO: 8824 - DNA, 18 bp, Homo sapiens
gggtccagaaacagctca

SEQ ID NO: 8825 - DNA, 21 bp, Homo sapiens
caggttctcttggccaacacc

SEQ ID NO: 8826 - DNA, 16 bp, Homo sapiens
tacccaggccctcgct

SEQ ID NO: 8827 - DNA, 18 bp, Homo sapiens
ctctctcagctggacaag

SEQ ID NO: 8828 - DNA, 23 bp, Homo sapiens
tcatctaggttttctggagcatc

SEQ ID NO: 8829 - DNA, 23 bp, Homo sapiens
ttgctgggggtctggaggagggg

SEQ ID NO: 8830 - DNA, 19 bp, Homo sapiens
cacagatataggctcgctt

SEQ ID NO: 8831 - DNA, 24 bp, Homo sapiens
gactttgtggaaaaatgcccccac

SEQ ID NO: 8832 - DNA, 16 bp, Homo sapiens
gggcggtagcagggga

SEQ ID NO: 8833 - DNA, 23 bp, Homo sapiens
ccaccatctctccttttccttcc

SEQ ID NO: 8834 - DNA, 21 bp, Homo sapiens
acctgtgataatcccaacacc

SEQ ID NO: 8835 - DNA, 24 bp, Homo sapiens
tgtcccagcagatccttgagaagc

SEQ ID NO: 8836 - DNA, 17 bp, Homo sapiens
tctcccaggccaggcga

SEQ ID NO: 8837 - DNA, 16 bp, Homo sapiens
acgccttactcccaag

SEQ ID NO: 8838 - DNA, 16 bp, Homo sapiens
gcgcggagaccgctcg

SEQ ID NO: 8839 - DNA, 16 bp, Homo sapiens
ccgatgctgcgcaagc

SEQ ID NO: 8840 - DNA, 22 bp, Homo sapiens
gtccggcgcttgttttcgatgc

SEQ ID NO: 8841 - DNA, 20 bp, Homo sapiens
gggacgcgccggcacagcaa

SEQ ID NO: 8842 - DNA, 16 bp, Homo sapiens
gactcactcgcttgtg

SEQ ID NO: 8843 - DNA, 19 bp, Homo sapiens
caaggctcagcgttctggc

SEQ ID NO: 8844 - DNA, 17 bp, Homo sapiens
ccgcaagccgggcacgc

SEQ ID NO: 8845 - DNA, 17 bp, Homo sapiens
acctctgttaacgaacg

SEQ ID NO: 8846 - DNA, 16 bp, Homo sapiens
ccttgctccggcccct

SEQ ID NO: 8847 - DNA, 19 bp, Homo sapiens
caacgccgtattgacgcgc

SEQ ID NO: 8848 - DNA, 17 bp, Homo sapiens
agactgatcctctccct

SEQ ID NO: 8849 - DNA, 21 bp, Homo sapiens
agaatgaaagtacttgcattg

SEQ ID NO: 8850 - DNA, 24 bp, Homo sapiens
gccattccaaaatctgcacatctg

SEQ ID NO: 8851 - DNA, 21 bp, Homo sapiens
acagcccttgctttgcttact

SEQ ID NO: 8852 - DNA, 22 bp, Homo sapiens
cctaaaaagtgttcacaccacc

SEQ ID NO: 8853 - DNA, 17 bp, Homo sapiens
ggaaagctaacagccag

SEQ ID NO: 8854 - DNA, 19 bp, Homo sapiens
ggacttcagataaaagcct

SEQ ID NO: 8855 - DNA, 24 bp, Homo sapiens
ctttgttgagagcgacatgtttgt

SEQ ID NO: 8856 - DNA, 24 bp, Homo sapiens
gaaagcccatctctactaaaaata

SEQ ID NO: 8857 - DNA, 16 bp, Homo sapiens
gtgaccacgctgtctc

SEQ ID NO: 8858 - DNA, 21 bp, Homo sapiens
tgttccttgttcatattgacg

SEQ ID NO: 8859 - DNA, 23 bp, Homo sapiens
agactattggagttatgaaatac

SEQ ID NO: 8860 - DNA, 19 bp, Homo sapiens
catagtggccaaactcatt

SEQ ID NO: 8861 - DNA, 20 bp, Homo sapiens
ccaagattggcttctttcac

SEQ ID NO: 8862 - DNA, 23 bp, Homo sapiens
atttttctggtagtttcctggag

SEQ ID NO: 8863 - DNA, 19 bp, Homo sapiens
actgaaaagcaaagcaaat

SEQ ID NO: 8864 - DNA, 23 bp, Homo sapiens
gattggtttatgtcttcagtcag

SEQ ID NO: 8865 - DNA, 20 bp, Homo sapiens
aagcgggagccactgtgccc

SEQ ID NO: 8866 - DNA, 24 bp, Homo sapiens
aactgtctttttgagggggtttta

SEQ ID NO: 8867 - DNA, 18 bp, Homo sapiens
tcctggcctcaagtgatc

SEQ ID NO: 8868 - DNA, 23 bp, Homo sapiens
acataatgaagatccataagcag

SEQ ID NO: 8869 - DNA, 22 bp, Homo sapiens
ggcccagctaatttttgtattt

SEQ ID NO: 8870 - DNA, 17 bp, Homo sapiens
gtgctcctgacagactg

SEQ ID NO: 8871 - DNA, 19 bp, Homo sapiens
catgagccaccacgcctgg

SEQ ID NO: 8872 - DNA, 20 bp, Homo sapiens
ctgaggaaagcaatggattg

SEQ ID NO: 8873 - DNA, 20 bp, Homo sapiens
tgggttttcatctctagcca

SEQ ID NO: 8874 - DNA, 20 bp, Homo sapiens
ccccaagtacctagctcagt

SEQ ID NO: 8875 - DNA, 23 bp, Homo sapiens
taggattttacagtttttggagg

SEQ ID NO: 8876 - DNA, 19 bp, Homo sapiens
cgaaaattgttatgcaccc

SEQ ID NO: 8877 - DNA, 22 bp, Homo sapiens
caatcgtgatggggagtgaaac

SEQ ID NO: 8878 - DNA, 20 bp, Homo sapiens
ggatccgtgctcccccagag

SEQ ID NO: 8879 - DNA, 23 bp, Homo sapiens
tcagaacgttttccagaaaacac

SEQ ID NO: 8880 - DNA, 21 bp, Homo sapiens
acaggtttctcaccagaaaga

SEQ ID NO: 8881 - DNA, 24 bp, Homo sapiens
tctcaataaaagatttctctgctg

SEQ ID NO: 8882 - DNA, 16 bp, Homo sapiens
gaagctctggccaggc

SEQ ID NO: 8883 - DNA, 24 bp, Homo sapiens
gctccagtgattgggctgaatgac

SEQ ID NO: 8884 - DNA, 18 bp, Homo sapiens
gacacagaaaggacccac

SEQ ID NO: 8885 - DNA, 20 bp, Homo sapiens
tggctatgcagacatctttc

SEQ ID NO: 8886 - DNA, 20 bp, Homo sapiens
agaacttcactgattaggtc

SEQ ID NO: 8887 - DNA, 16 bp, Homo sapiens
acggccccaccagcac

SEQ ID NO: 8888 - DNA, 24 bp, Homo sapiens
gccaaatgttatcttattgttgtc

SEQ ID NO: 8889 - DNA, 19 bp, Homo sapiens
acaggcccttctttcttac

SEQ ID NO: 8890 - DNA, 22 bp, Homo sapiens
tgcttttgcttttctgttttgg

SEQ ID NO: 8891 - DNA, 22 bp, Homo sapiens
atctgggtcaggaattattttt

SEQ ID NO: 8892 - DNA, 21 bp, Homo sapiens
agatttctctgatcatgggcc

SEQ ID NO: 8893 - DNA, 22 bp, Homo sapiens
ccattaacaccttatcatcact

SEQ ID NO: 8894 - DNA, 22 bp, Homo sapiens
tcacgttcatggtaaaggtaag

SEQ ID NO: 8895 - DNA, 19 bp, Homo sapiens
gccagtgatgaacaggtag

SEQ ID NO: 8896 - DNA, 21 bp, Homo sapiens
aagctacatcctatcctcatt

SEQ ID NO: 8897 - DNA, 16 bp, Homo sapiens
caccaccgagctcctc

SEQ ID NO: 8898 - DNA, 24 bp, Homo sapiens
atcttggctgaatcaactctaagg

SEQ ID NO: 8899 - DNA, 21 bp, Homo sapiens
tttgaaaacaacaaggtcatc

SEQ ID NO: 8900 - DNA, 23 bp, Homo sapiens
gaaatcttttatttcaggacacc

SEQ ID NO: 8901 - DNA, 24 bp, Homo sapiens
ggtctgccaattaagtaatatttc

SEQ ID NO: 8902 - DNA, 22 bp, Homo sapiens
ctgtcaccaatgaggatgttac

SEQ ID NO: 8903 - DNA, 23 bp, Homo sapiens
aacaatacactgtagtgtagtac

SEQ ID NO: 8904 - DNA, 23 bp, Homo sapiens
gcatcaacatcattttcaaaagc

SEQ ID NO: 8905 - DNA, 23 bp, Homo sapiens
gagggtgcagagaacagagctat

SEQ ID NO: 8906 - DNA, 17 bp, Homo sapiens
tcctgactgctcagggg

SEQ ID NO: 8907 - DNA, 24 bp, Homo sapiens
caggcatgaagcagcaactttggg

SEQ ID NO: 8908 - DNA, 16 bp, Homo sapiens
gagaaggtgcaccggc

SEQ ID NO: 8909 - DNA, 23 bp, Homo sapiens
ccctgttctcttaggtgtggccc

SEQ ID NO: 8910 - DNA, 16 bp, Homo sapiens
aaggcagaccctgggg

SEQ ID NO: 8911 - DNA, 23 bp, Homo sapiens
cgggatttcttcaactacctgcc

SEQ ID NO: 8912 - DNA, 19 bp, Homo sapiens
ccaaacatgacatcatccc

SEQ ID NO: 8913 - DNA, 19 bp, Homo sapiens
tcaggaaccagacggtcac

SEQ ID NO: 8914 - DNA, 22 bp, Homo sapiens
tctttggtgactgctttgtaag

SEQ ID NO: 8915 - DNA, 21 bp, Homo sapiens
tgatgtccaccatgttgtagg

SEQ ID NO: 8916 - DNA, 23 bp, Homo sapiens
gtgtcaccccatttcctttccca

SEQ ID NO: 8917 - DNA, 21 bp, Homo sapiens
cccatgaatgtggctgactag

SEQ ID NO: 8918 - DNA, 24 bp, Homo sapiens
ttgactatacctgccttttttctg

SEQ ID NO: 8919 - DNA, 18 bp, Homo sapiens
cctgtgctgtctgacatg

SEQ ID NO: 8920 - DNA, 19 bp, Homo sapiens
ctttggaatcaaccaaagc

SEQ ID NO: 8921 - DNA, 20 bp, Homo sapiens
gtctttccagaacacactac

SEQ ID NO: 8922 - DNA, 20 bp, Homo sapiens
gatctcaaaaaattcacgct

SEQ ID NO: 8923 - DNA, 21 bp, Homo sapiens
aacctgtgatagagctggagc

SEQ ID NO: 8924 - DNA, 19 bp, Homo sapiens
acagtcctcccattcattc

SEQ ID NO: 8925 - DNA, 22 bp, Homo sapiens
cattctgtagtgtcattacatc

SEQ ID NO: 8926 - DNA, 20 bp, Homo sapiens
ccaaggcttataagagctcc

SEQ ID NO: 8927 - DNA, 24 bp, Homo sapiens
atttattcctgcaggttgttgatg

SEQ ID NO: 8928 - DNA, 20 bp, Homo sapiens
acaggcaaaagacagaaagg

SEQ ID NO: 8929 - DNA, 23 bp, Homo sapiens
catcattgttggttttgcaagaa

SEQ ID NO: 8930 - DNA, 24 bp, Homo sapiens
aaaaaaattagcttttataacaac

SEQ ID NO: 8931 - DNA, 24 bp, Homo sapiens
cagatgaattaatatccaagcatc

SEQ ID NO: 8932 - DNA, 23 bp, Homo sapiens
gtccttgttaccattctgcaaca

SEQ ID NO: 8933 - DNA, 23 bp, Homo sapiens
caaaagtgatgagtggaatattg

SEQ ID NO: 8934 - DNA, 19 bp, Homo sapiens
ctgctgaggacaaatcccc

SEQ ID NO: 8935 - DNA, 17 bp, Homo sapiens
tcctagcccccactctg

SEQ ID NO: 8936 - DNA, 23 bp, Homo sapiens
tggataatctctctctttctagg

SEQ ID NO: 8937 - DNA, 19 bp, Homo sapiens
cctcggggagttctgcaag

SEQ ID NO: 8938 - DNA, 21 bp, Homo sapiens
tgtcagattctgtgatgcatt

SEQ ID NO: 8939 - DNA, 18 bp, Homo sapiens
ccattccttacacagccc

SEQ ID NO: 8940 - DNA, 20 bp, Homo sapiens
atgatgcccccgtattcctg

SEQ ID NO: 8941 - DNA, 23 bp, Homo sapiens
gtattctgggtgtccagaagata

SEQ ID NO: 8942 - DNA, 20 bp, Homo sapiens
gtgatgactgtgactttggg

SEQ ID NO: 8943 - DNA, 24 bp, Homo sapiens
acctcacagctgagagtggcagga

SEQ ID NO: 8944 - DNA, 18 bp, Homo sapiens
tgtaggaaagtgagcagg

SEQ ID NO: 8945 - DNA, 19 bp, Homo sapiens
ctcatgtctaggcacagca

SEQ ID NO: 8946 - DNA, 18 bp, Homo sapiens
atgagcaaggtgtactcc

SEQ ID NO: 8947 - DNA, 21 bp, Homo sapiens
ctacgcatttgctgaggcaac

SEQ ID NO: 8948 - DNA, 21 bp, Homo sapiens
aaaaagcacagacatttctgc

SEQ ID NO: 8949 - DNA, 20 bp, Homo sapiens
gctcatgacatcataggcac

SEQ ID NO: 8950 - DNA, 16 bp, Homo sapiens
gccttcaggagcccag

SEQ ID NO: 8951 - DNA, 22 bp, Homo sapiens
ccatgactgcaatctctgcggt

SEQ ID NO: 8952 - DNA, 24 bp, Homo sapiens
gtttcctggggtctttcagggaca

SEQ ID NO: 8953 - DNA, 20 bp, Homo sapiens
ggtagagtcgagtccttgga

SEQ ID NO: 8954 - DNA, 24 bp, Homo sapiens
ttggatctgttttaggcctatgga

SEQ ID NO: 8955 - DNA, 17 bp, Homo sapiens
tggctcaacctaggggc

SEQ ID NO: 8956 - DNA, 22 bp, Homo sapiens
taccaactatgcctggcccacc

SEQ ID NO: 8957 - DNA, 20 bp, Homo sapiens
ctatctctggagccccaaga

SEQ ID NO: 8958 - DNA, 20 bp, Homo sapiens
tcatgccctttgaagatgat

SEQ ID NO: 8959 - DNA, 22 bp, Homo sapiens
gagatggcacttcccctcagta

SEQ ID NO: 8960 - DNA, 16 bp, Homo sapiens
cagggaaagggttggc

SEQ ID NO: 8961 - DNA, 23 bp, Homo sapiens
taatgagttgaaggagatctgtc

SEQ ID NO: 8962 - DNA, 21 bp, Homo sapiens
gaaagaatgagcaagttgacc

SEQ ID NO: 8963 - DNA, 20 bp, Homo sapiens
cagggcgctgtggagatcat

SEQ ID NO: 8964 - DNA, 22 bp, Homo sapiens
actagtcaacagattagactgc

SEQ ID NO: 8965 - DNA, 24 bp, Homo sapiens
aggcagagtacatcgagaagtttg

SEQ ID NO: 8966 - DNA, 18 bp, Homo sapiens
gtcccacagtccttagtc

SEQ ID NO: 8967 - DNA, 20 bp, Homo sapiens
acgtgtggaagaaggttgga

SEQ ID NO: 8968 - DNA, 24 bp, Homo sapiens
gtatcaggttgggcactgcttata

SEQ ID NO: 8969 - DNA, 24 bp, Homo sapiens
tttctccaaggacgttgtaccttc

SEQ ID NO: 8970 - DNA, 19 bp, Homo sapiens
aaggttgaggggtggcatc

SEQ ID NO: 8971 - DNA, 22 bp, Homo sapiens
cagtaattcagttcttggtttc

SEQ ID NO: 8972 - DNA, 22 bp, Homo sapiens
tcaccagggtttgtggatgaca

SEQ ID NO: 8973 - DNA, 19 bp, Homo sapiens
ggattcccaggtttcatga

SEQ ID NO: 8974 - DNA, 18 bp, Homo sapiens
tggatgtcttggccagca

SEQ ID NO: 8975 - DNA, 20 bp, Homo sapiens
ggcacaaaagagatctttct

SEQ ID NO: 8976 - DNA, 17 bp, Homo sapiens
gcaggttgtacagctgc

SEQ ID NO: 8977 - DNA, 16 bp, Homo sapiens
ggccggctggcgttca

SEQ ID NO: 8978 - DNA, 16 bp, Homo sapiens
cgccacagaaccggtc

SEQ ID NO: 8979 - DNA, 16 bp, Homo sapiens
cgcggtcagcgcgggg

SEQ ID NO: 8980 - DNA, 16 bp, Homo sapiens
caccgcgaacgcctcc

SEQ ID NO: 8981 - DNA, 17 bp, Homo sapiens
ccgccggacgtcgggat

SEQ ID NO: 8982 - DNA, 16 bp, Homo sapiens
ggcgcaacacccggcc

SEQ ID NO: 8983 - DNA, 17 bp, Homo sapiens
gccctgcaagctggagc

SEQ ID NO: 8984 - DNA, 16 bp, Homo sapiens
caagctggaccccagg

SEQ ID NO: 8985 - DNA, 24 bp, Homo sapiens
tttcgtggcggcgggctgcaaggt

SEQ ID NO: 8986 - DNA, 24 bp, Homo sapiens
aagcaagaagtcccatccctagct

SEQ ID NO: 8987 - DNA, 24 bp, Homo sapiens
gccgcggtgcgccttctccacgct

SEQ ID NO: 8988 - DNA, 19 bp, Homo sapiens
gcgacttcaagcaatcagc

SEQ ID NO: 8989 - DNA, 24 bp, Homo sapiens
tttgtttttctcttcaattgctac

SEQ ID NO: 8990 - DNA, 22 bp, Homo sapiens
tagggttttattctattcagtc

SEQ ID NO: 8991 - DNA, 19 bp, Homo sapiens
acacgagagttttcagtcc

SEQ ID NO: 8992 - DNA, 23 bp, Homo sapiens
gtactcatgtcagcaagggaggt

SEQ ID NO: 8993 - DNA, 20 bp, Homo sapiens
tctggtctctgaaggctttg

SEQ ID NO: 8994 - DNA, 24 bp, Homo sapiens
cttctcaggagattatttggtagc

SEQ ID NO: 8995 - DNA, 20 bp, Homo sapiens
ggcaacaggaaatgcacaag

SEQ ID NO: 8996 - DNA, 22 bp, Homo sapiens
gtgcttatgtgaactggagaaa

SEQ ID NO: 8997 - DNA, 23 bp, Homo sapiens
tgatctggtacttcaaactaaat

SEQ ID NO: 8998 - DNA, 20 bp, Homo sapiens
aatgtggagggaccattcag

SEQ ID NO: 8999 - DNA, 23 bp, Homo sapiens
tctatgtgtataattaaagaacg

SEQ ID NO: 9000 - DNA, 23 bp, Homo sapiens
gaaatgccgctttcggaggcccc

SEQ ID NO: 9001 - DNA, 19 bp, Homo sapiens
tgacatgacagcaacatat

SEQ ID NO: 9002 - DNA, 22 bp, Homo sapiens
ggctgcacaaataaattagtct

SEQ ID NO: 9003 - DNA, 18 bp, Homo sapiens
tggtggtgaactctctct

SEQ ID NO: 9004 - DNA, 20 bp, Homo sapiens
actattggactttgaacgtt

SEQ ID NO: 9005 - DNA, 26 bp, Homo sapiens
gcaagtcaaattcattatttaccttc

SEQ ID NO: 9006 - DNA, 21 bp, Homo sapiens
tgaggtttctttttgtgttgg

SEQ ID NO: 9007 - DNA, 18 bp, Homo sapiens
acagaccttcagactgcc

SEQ ID NO: 9008 - DNA, 23 bp, Homo sapiens
aaactggagtcaggccctaaaaa

SEQ ID NO: 9009 - DNA, 24 bp, Homo sapiens
accaaatcccatgaaataggaata

SEQ ID NO: 9010 - DNA, 22 bp, Homo sapiens
acaatcgaataagacggacaga

SEQ ID NO: 9011 - DNA, 18 bp, Homo sapiens
catctgactcaagctgtg

SEQ ID NO: 9012 - DNA, 24 bp, Homo sapiens
accacagtgccttgtaaatgtgtg

SEQ ID NO: 9013 - DNA, 22 bp, Homo sapiens
acagataatccagactgttcac

SEQ ID NO: 9014 - DNA, 24 bp, Homo sapiens
ttggtgagaggatgttgtaaaatc

SEQ ID NO: 9015 - DNA, 22 bp, Homo sapiens
tgctgaaagtgggaatattttc

SEQ ID NO: 9016 - DNA, 23 bp, Homo sapiens
aggcatcagtaatgaaatttcac

SEQ ID NO: 9017 - DNA, 23 bp, Homo sapiens
gcaggcatatatacataaaatgc

SEQ ID NO: 9018 - DNA, 18 bp, Homo sapiens
ccctggaacttcttggtg

SEQ ID NO: 9019 - DNA, 20 bp, Homo sapiens
cgtctgtgggtttaaaaaga

SEQ ID NO: 9020 - DNA, 22 bp, Homo sapiens
tacgggattagctgatgaaaaa

SEQ ID NO: 9021 - DNA, 20 bp, Homo sapiens
agggaatgtagcttgatgtc

SEQ ID NO: 9022 - DNA, 23 bp, Homo sapiens
gtgctttttttttttttaccagc

SEQ ID NO: 9023 - DNA, 17 bp, Homo sapiens
actgtcgcactcctgca

SEQ ID NO: 9024 - DNA, 24 bp, Homo sapiens
ggaagttatatttttccctttctc

SEQ ID NO: 9025 - DNA, 21 bp, Homo sapiens
accaaacctattacccacatg

SEQ ID NO: 9026 - DNA, 24 bp, Homo sapiens
tttcgtcctatgtcttgtctgatg

SEQ ID NO: 9027 - DNA, 24 bp, Homo sapiens
aaacaaaaaaaaaaactttgttaa

SEQ ID NO: 9028 - DNA, 23 bp, Homo sapiens
tcctgagacaaattttttccatc

SEQ ID NO: 9029 - DNA, 22 bp, Homo sapiens
gagcaacttcccctttgcaact

SEQ ID NO: 9030 - DNA, 19 bp, Homo sapiens
tagagatagcccacatgag

SEQ ID NO: 9031 - DNA, 20 bp, Homo sapiens
tgattatttccccctttatt

SEQ ID NO: 9032 - DNA, 20 bp, Homo sapiens
gcctgctgagacttttcagg

SEQ ID NO: 9033 - DNA, 23 bp, Homo sapiens
ttgcatgcaggttctcttacatc

SEQ ID NO: 9034 - DNA, 19 bp, Homo sapiens
cagcaagtgaccctctaac

SEQ ID NO: 9035 - DNA, 18 bp, Homo sapiens
gctttttctccttacctc

SEQ ID NO: 9036 - DNA, 23 bp, Homo sapiens
cacacaattctcacagatttagg

SEQ ID NO: 9037 - DNA, 23 bp, Homo sapiens
attgatgtcagtctaccagtatc

SEQ ID NO: 9038 - DNA, 22 bp, Homo sapiens
aaaagacagacttacaatgaca

SEQ ID NO: 9039 - DNA, 21 bp, Homo sapiens
tttttgcacgtcattacaagg

SEQ ID NO: 9040 - DNA, 17 bp, Homo sapiens
gcacagtgaaacactgc

SEQ ID NO: 9041 - DNA, 24 bp, Homo sapiens
aacttggcaatatttgacaaatac

SEQ ID NO: 9042 - DNA, 24 bp, Homo sapiens
cataagccagttcttaccttcagg

SEQ ID NO: 9043 - DNA, 20 bp, Homo sapiens
cctccctgctgtgggtatgt

SEQ ID NO: 9044 - DNA, 20 bp, Homo sapiens
atctacgagtattcatgtgc

SEQ ID NO: 9045 - DNA, 24 bp, Homo sapiens
gtcttcctcctcagtaacaacctg

SEQ ID NO: 9046 - DNA, 24 bp, Homo sapiens
ctaattcaatacattagacaacct

SEQ ID NO: 9047 - DNA, 18 bp, Homo sapiens
ggaggacccgtacatgga

SEQ ID NO: 9048 - DNA, 24 bp, Homo sapiens
aagcacagacatccatactgacag

SEQ ID NO: 9049 - DNA, 23 bp, Homo sapiens
ttgttttttggtggtggtgggta

SEQ ID NO: 9050 - DNA, 21 bp, Homo sapiens
tgatgtggtttttaaagtgac

SEQ ID NO: 9051 - DNA, 24 bp, Homo sapiens
actgatttttgaagattgaagtgc

SEQ ID NO: 9052 - DNA, 19 bp, Homo sapiens
agaagcctcttgggtgact

SEQ ID NO: 9053 - DNA, 24 bp, Homo sapiens
ttttcctttactaggcttgcccac

SEQ ID NO: 9054 - DNA, 22 bp, Homo sapiens
aatataccagttacaactcatt

SEQ ID NO: 9055 - DNA, 19 bp, Homo sapiens
cttgaaagccatctgtcac

SEQ ID NO: 9056 - DNA, 21 bp, Homo sapiens
ccataaaaaagccatttgatc

SEQ ID NO: 9057 - DNA, 20 bp, Homo sapiens
gaagccattccagagagaag

SEQ ID NO: 9058 - DNA, 22 bp, Homo sapiens
caggaggtattttgattttaac

SEQ ID NO: 9059 - DNA, 24 bp, Homo sapiens
cagttaatcactgaggaaaatagt

SEQ ID NO: 9060 - DNA, 18 bp, Homo sapiens
tacagctgcactggtgag

SEQ ID NO: 9061 - DNA, 20 bp, Homo sapiens
accatttacaactaccattt

SEQ ID NO: 9062 - DNA, 28 bp, Homo sapiens
aatttcactctaaatatctacaaacaag

SEQ ID NO: 9063 - DNA, 24 bp, Homo sapiens
tgcttttagttcgagaaaagatac

SEQ ID NO: 9064 - DNA, 16 bp, Homo sapiens
tggctgtggcatcctg

SEQ ID NO: 9065 - DNA, 23 bp, Homo sapiens
tgggtggaatttgtatattgtga

SEQ ID NO: 9066 - DNA, 22 bp, Homo sapiens
gatgtcagaagctgtaacaatg

SEQ ID NO: 9067 - DNA, 24 bp, Homo sapiens
cagtcttataggtattgctatagt

SEQ ID NO: 9068 - DNA, 23 bp, Homo sapiens
accattttgtttacttttagggt

SEQ ID NO: 9069 - DNA, 18 bp, Homo sapiens
ggcagctcgcactaacag

SEQ ID NO: 9070 - DNA, 23 bp, Homo sapiens
aaatgtttttaagaactcaggaa

SEQ ID NO: 9071 - DNA, 22 bp, Homo sapiens
ccttaaatgcttccaaaagctc

SEQ ID NO: 9072 - DNA, 24 bp, Homo sapiens
tgtttgtcttttttgtttaggtag

SEQ ID NO: 9073 - DNA, 19 bp, Homo sapiens
ggttccaagaggtgtcacc

SEQ ID NO: 9074 - DNA, 21 bp, Homo sapiens
gcattcaccttctcagtgagg

SEQ ID NO: 9075 - DNA, 24 bp, Homo sapiens
ggtaactaccagagatggaaaagc

SEQ ID NO: 9076 - DNA, 20 bp, Homo sapiens
ctggaacctggagagaaggc

SEQ ID NO: 9077 - DNA, 19 bp, Homo sapiens
tgctcaacaaatgcttgtg

SEQ ID NO: 9078 - DNA, 20 bp, Homo sapiens
tggggactgttacagcaggt

SEQ ID NO: 9079 - DNA, 20 bp, Homo sapiens
gtatggcaaggtgagatgag

SEQ ID NO: 9080 - DNA, 22 bp, Homo sapiens
cactttgggaggctgaggtagg

SEQ ID NO: 9081 - DNA, 20 bp, Homo sapiens
cctctactgtccagtccgtg

SEQ ID NO: 9082 - DNA, 23 bp, Homo sapiens
ggcaacatagtgagaccccgtct

SEQ ID NO: 9083 - DNA, 23 bp, Homo sapiens
tccaggttttcataaagtgaatg

SEQ ID NO: 9084 - DNA, 19 bp, Homo sapiens
cttgactcccagcattctc

SEQ ID NO: 9085 - DNA, 27 bp, Homo sapiens
atgttaaaaatattagatagaaaacag

SEQ ID NO: 9086 - DNA, 17 bp, Homo sapiens
tgaagttctggcccgca

SEQ ID NO: 9087 - DNA, 20 bp, Homo sapiens
atttggaatctgacttctaa

SEQ ID NO: 9088 - DNA, 26 bp, Homo sapiens
aatacgagagaggattaatcttttac

SEQ ID NO: 9089 - DNA, 22 bp, Homo sapiens
cttcattaatgaagaaaaggtc

SEQ ID NO: 9090 - DNA, 26 bp, Homo sapiens
gtctttttaaaattaaaacataatac

SEQ ID NO: 9091 - DNA, 22 bp, Homo sapiens
gaaggactacagagaatatggg

SEQ ID NO: 9092 - DNA, 21 bp, Homo sapiens
tgcacatatgttttgctgatt

SEQ ID NO: 9093 - DNA, 20 bp, Homo sapiens
gaagtatccagcttccttag

SEQ ID NO: 9094 - DNA, 19 bp, Homo sapiens
tttattccttcgtgctcac

SEQ ID NO: 9095 - DNA, 17 bp, Homo sapiens
cccattttcagagccac

SEQ ID NO: 9096 - DNA, 19 bp, Homo sapiens
gctgagccaaagcaagtgc

SEQ ID NO: 9097 - DNA, 16 bp, Homo sapiens
gggcagagctccatac

SEQ ID NO: 9098 - DNA, 23 bp, Homo sapiens
atcctttaactgccatgagctat

SEQ ID NO: 9099 - DNA, 18 bp, Homo sapiens
aagaagccagaagacagc

SEQ ID NO: 9100 - DNA, 20 bp, Homo sapiens
cattgaccaaggcagcagtg

SEQ ID NO: 9101 - DNA, 23 bp, Homo sapiens
cccatttggatcactttgtttct

SEQ ID NO: 9102 - DNA, 23 bp, Homo sapiens
gaaatgaaaagccattcagaggt

SEQ ID NO: 9103 - DNA, 24 bp, Homo sapiens
aagaactagcctttatagtcaaag

SEQ ID NO: 9104 - DNA, 19 bp, Homo sapiens
tcggttggaacaatctgtc

SEQ ID NO: 9105 - DNA, 23 bp, Homo sapiens
cattgtgaatgcactagcatgtt

SEQ ID NO: 9106 - DNA, 17 bp, Homo sapiens
agcccagaactgaagcc

SEQ ID NO: 9107 - DNA, 26 bp, Homo sapiens
gtaccttttgttcctaaatttctttc

SEQ ID NO: 9108 - DNA, 23 bp, Homo sapiens
gtgacaaaccttaaaaaaggaat

SEQ ID NO: 9109 - DNA, 21 bp, Homo sapiens
tcggctgttgattcaacagag

SEQ ID NO: 9110 - DNA, 17 bp, Homo sapiens
tccctccccaccaccaa

SEQ ID NO: 9111 - DNA, 20 bp, Homo sapiens
ggaaactcagcctggattgc

SEQ ID NO: 9112 - DNA, 23 bp, Homo sapiens
tcttataaactgattatgtatgt

SEQ ID NO: 9113 - DNA, 22 bp, Homo sapiens
ttggaattgaagaagcagattc

SEQ ID NO: 9114 - DNA, 20 bp, Homo sapiens
tgtctaaatttgcttttgcc

SEQ ID NO: 9115 - DNA, 19 bp, Homo sapiens
gccactagctgagcttccc

SEQ ID NO: 9116 - DNA, 22 bp, Homo sapiens
gcccatgtgatgctgtgatatt

SEQ ID NO: 9117 - DNA, 22 bp, Homo sapiens
ccagatgtactgtgatgtgagt

SEQ ID NO: 9118 - DNA, 24 bp, Homo sapiens
tctggaatatagaggctcctttta

SEQ ID NO: 9119 - DNA, 16 bp, Homo sapiens
atcctccgatgttcgc

SEQ ID NO: 9120 - DNA, 20 bp, Homo sapiens
agctcttggtagacttttgg

SEQ ID NO: 9121 - DNA, 21 bp, Homo sapiens
ggtatgtttttgtaatgggca

SEQ ID NO: 9122 - DNA, 23 bp, Homo sapiens
ttcaggaactctttttcaaactc

SEQ ID NO: 9123 - DNA, 23 bp, Homo sapiens
cctgcataaataagatacctggt

SEQ ID NO: 9124 - DNA, 18 bp, Homo sapiens
tgacaccacaccattgcg

SEQ ID NO: 9125 - DNA, 20 bp, Homo sapiens
gccataatgactacaggcat

SEQ ID NO: 9126 - DNA, 23 bp, Homo sapiens
ttaaaaactttccttcccattcc

SEQ ID NO: 9127 - DNA, 24 bp, Homo sapiens
ctgtataatttttatcagctaaag

SEQ ID NO: 9128 - DNA, 18 bp, Homo sapiens
tgctttgctctttgtgga

SEQ ID NO: 9129 - DNA, 23 bp, Homo sapiens
tgcaatttcataagaaaaggagg

SEQ ID NO: 9130 - DNA, 26 bp, Homo sapiens
ttatgagaaattcttttatgttttag

SEQ ID NO: 9131 - DNA, 16 bp, Homo sapiens
acaggacacctggggt

SEQ ID NO: 9132 - DNA, 20 bp, Homo sapiens
gtcgtaatatcatctgattc

SEQ ID NO: 9133 - DNA, 19 bp, Homo sapiens
ccaagtctcctgagtatgc

SEQ ID NO: 9134 - DNA, 21 bp, Homo sapiens
ctatgtcaaatgaaggaccac

SEQ ID NO: 9135 - DNA, 21 bp, Homo sapiens
gtgcatgtgctctaatatggc

SEQ ID NO: 9136 - DNA, 17 bp, Homo sapiens
gccggcaatagtgtctt

SEQ ID NO: 9137 - DNA, 24 bp, Homo sapiens
agaaattgaattctgcatgttgtg

SEQ ID NO: 9138 - DNA, 22 bp, Homo sapiens
acagtatgtctatgcactgttc

SEQ ID NO: 9139 - DNA, 23 bp, Homo sapiens
atttcacttttctgttcatagtc

SEQ ID NO: 9140 - DNA, 20 bp, Homo sapiens
ccggttctcttctttcagtt

SEQ ID NO: 9141 - DNA, 19 bp, Homo sapiens
tggagccactttcagaaga

SEQ ID NO: 9142 - DNA, 23 bp, Homo sapiens
ggttatcagatctgattatcact

SEQ ID NO: 9143 - DNA, 22 bp, Homo sapiens
cgtacacgcttgaaagagtatg

SEQ ID NO: 9144 - DNA, 20 bp, Homo sapiens
ccacacagccttatgatgtt

SEQ ID NO: 9145 - DNA, 22 bp, Homo sapiens
gcagtcattccatatgctaatc

SEQ ID NO: 9146 - DNA, 23 bp, Homo sapiens
tggctgctgatataacttatgtt

SEQ ID NO: 9147 - DNA, 22 bp, Homo sapiens
tgatacttctctccaccacatt

SEQ ID NO: 9148 - DNA, 20 bp, Homo sapiens
gctctgtgctttcctgcaca

SEQ ID NO: 9149 - DNA, 29 bp, Homo sapiens
aaacttaagtttataatcaagcaaaaaaa

SEQ ID NO: 9150 - DNA, 24 bp, Homo sapiens
aactaaaatttattcattttttcc

SEQ ID NO: 9151 - DNA, 22 bp, Homo sapiens
tcggtttcacttgagaatcaca

SEQ ID NO: 9152 - DNA, 22 bp, Homo sapiens
ctttgtcagagaataaaatgtg

SEQ ID NO: 9153 - DNA, 18 bp, Homo sapiens
gggagggtacgtgaatgc

SEQ ID NO: 9154 - DNA, 20 bp, Homo sapiens
gcaacaattgacaatgtttc

SEQ ID NO: 9155 - DNA, 20 bp, Homo sapiens
aaaatgttgcagtaccatct

SEQ ID NO: 9156 - DNA, 22 bp, Homo sapiens
tctaattggttggttaagtaag

SEQ ID NO: 9157 - DNA, 22 bp, Homo sapiens
tttcaaatgatacctttaagtc

SEQ ID NO: 9158 - DNA, 24 bp, Homo sapiens
cagatattcttttctacacagaaa

SEQ ID NO: 9159 - DNA, 22 bp, Homo sapiens
acttgtactttggcattcaatt

SEQ ID NO: 9160 - DNA, 21 bp, Homo sapiens
tcatgaatgttctcccagaag

SEQ ID NO: 9161 - DNA, 22 bp, Homo sapiens
tattgcagtcgaaagaaaccat

SEQ ID NO: 9162 - DNA, 19 bp, Homo sapiens
gctgactaaaggccacagc

SEQ ID NO: 9163 - DNA, 22 bp, Homo sapiens
acctattatatgagggctgctg

SEQ ID NO: 9164 - DNA, 22 bp, Homo sapiens
tgtcaccaagcatgacccaggt

SEQ ID NO: 9165 - DNA, 21 bp, Homo sapiens
ctgtcattctctgctttttcc

SEQ ID NO: 9166 - DNA, 24 bp, Homo sapiens
gaaaattatattaaatctgggatt

SEQ ID NO: 9167 - DNA, 19 bp, Homo sapiens
ggaagggtcagttccaggc

SEQ ID NO: 9168 - DNA, 23 bp, Homo sapiens
gcagatctaatgtactgaaaggc

SEQ ID NO: 9169 - DNA, 24 bp, Homo sapiens
atccttagtacgtaatttgtaaac

SEQ ID NO: 9170 - DNA, 19 bp, Homo sapiens
ggatttcagttcccttttg

SEQ ID NO: 9171 - DNA, 23 bp, Homo sapiens
tgcagactaaaaggatatgcaaa

SEQ ID NO: 9172 - DNA, 20 bp, Homo sapiens
ctgggtcattttcttttgct

SEQ ID NO: 9173 - DNA, 22 bp, Homo sapiens
aaaattatagaaaggtttgcct

SEQ ID NO: 9174 - DNA, 24 bp, Homo sapiens
aattgcaaattataaagaagggac

SEQ ID NO: 9175 - DNA, 23 bp, Homo sapiens
gtttctgcgtctttagattttgc

SEQ ID NO: 9176 - DNA, 23 bp, Homo sapiens
ggctgtcttgtcatgatattgtt

SEQ ID NO: 9177 - DNA, 24 bp, Homo sapiens
cccattcagaaaatgaacaaaaaa

SEQ ID NO: 9178 - DNA, 23 bp, Homo sapiens
cccttacaatcaggaaatatttg

SEQ ID NO: 9179 - DNA, 21 bp, Homo sapiens
gcgttttgtagacataagtcc

SEQ ID NO: 9180 - DNA, 22 bp, Homo sapiens
gataatgtcaatggggatgatg

SEQ ID NO: 9181 - DNA, 22 bp, Homo sapiens
gtgatggattttcacttcagag

SEQ ID NO: 9182 - DNA, 18 bp, Homo sapiens
gactgaagaatcaggctc

SEQ ID NO: 9183 - DNA, 16 bp, Homo sapiens
tgccagctaccaggca

SEQ ID NO: 9184 - DNA, 19 bp, Homo sapiens
aggctacactgcaagtgac

SEQ ID NO: 9185 - DNA, 22 bp, Homo sapiens
gcaaacaatgtaatgaaaatct

SEQ ID NO: 9186 - DNA, 22 bp, Homo sapiens
ctatacacgtttgtggttgggg

SEQ ID NO: 9187 - DNA, 22 bp, Homo sapiens
tgggaggcaagtaattttattg

SEQ ID NO: 9188 - DNA, 17 bp, Homo sapiens
taccttgagcctggtgc

SEQ ID NO: 9189 - DNA, 19 bp, Homo sapiens
gacttcaccccattctaac

SEQ ID NO: 9190 - DNA, 21 bp, Homo sapiens
ccttttgagcttcatttcagg

SEQ ID NO: 9191 - DNA, 24 bp, Homo sapiens
tttccacactttttgttattatgt

SEQ ID NO: 9192 - DNA, 22 bp, Homo sapiens
tcttcatgtacaatgcttttgg

SEQ ID NO: 9193 - DNA, 21 bp, Homo sapiens
ctttatatttaggtagacggt

SEQ ID NO: 9194 - DNA, 22 bp, Homo sapiens
gcatccacgtcaatgtcattct

SEQ ID NO: 9195 - DNA, 23 bp, Homo sapiens
agaggtagaattttgtacttacc

SEQ ID NO: 9196 - DNA, 22 bp, Homo sapiens
ctaaccctagttttgtcttatc

SEQ ID NO: 9197 - DNA, 22 bp, Homo sapiens
tgcagagtttcaaaaggttttc

SEQ ID NO: 9198 - DNA, 24 bp, Homo sapiens
ttaaaaaagagagatttgattttt

SEQ ID NO: 9199 - DNA, 20 bp, Homo sapiens
acacaataaggatggcagag

SEQ ID NO: 9200 - DNA, 24 bp, Homo sapiens
cccttataagttagtaagtgagaa

SEQ ID NO: 9201 - DNA, 21 bp, Homo sapiens
tgagcaaatctggaaaaactg

SEQ ID NO: 9202 - DNA, 18 bp, Homo sapiens
cagcagcaaccaggtagg

SEQ ID NO: 9203 - DNA, 17 bp, Homo sapiens
gccctcacaggcagagg

SEQ ID NO: 9204 - DNA, 22 bp, Homo sapiens
gtgaacgagtgcaggaaccagc

SEQ ID NO: 9205 - DNA, 21 bp, Homo sapiens
ctgacaacacactgctgtcca

SEQ ID NO: 9206 - DNA, 21 bp, Homo sapiens
gtaccccatttactcagcctg

SEQ ID NO: 9207 - DNA, 17 bp, Homo sapiens
ctggggttgcaggcacc

SEQ ID NO: 9208 - DNA, 24 bp, Homo sapiens
tatctgaaactatcttgttgttga

SEQ ID NO: 9209 - DNA, 18 bp, Homo sapiens
agcactaaagcagccagc

SEQ ID NO: 9210 - DNA, 21 bp, Homo sapiens
ctcagagatcactcaaaatcc

SEQ ID NO: 9211 - DNA, 24 bp, Homo sapiens
tgcaagaggttgagcagggcaggc

SEQ ID NO: 9212 - DNA, 21 bp, Homo sapiens
atttccttctcaacattcagg

SEQ ID NO: 9213 - DNA, 21 bp, Homo sapiens
ggggtcaagaaaatagcctgc

SEQ ID NO: 9214 - DNA, 17 bp, Homo sapiens
agcaaggccctttcggt

SEQ ID NO: 9215 - DNA, 24 bp, Homo sapiens
tcataggtttttcatatggttcac

SEQ ID NO: 9216 - DNA, 21 bp, Homo sapiens
aagtttatgggtgaaatgcag

SEQ ID NO: 9217 - DNA, 24 bp, Homo sapiens
ttctcaaatataattcctcgcaac

SEQ ID NO: 9218 - DNA, 20 bp, Homo sapiens
caaagccactgtcctctgca

SEQ ID NO: 9219 - DNA, 24 bp, Homo sapiens
tgcaattgctacttacatgagaac

SEQ ID NO: 9220 - DNA, 21 bp, Homo sapiens
agtgttcagttttgcatgtgc

SEQ ID NO: 9221 - DNA, 19 bp, Homo sapiens
tccgtggaaaagcccgtac

SEQ ID NO: 9222 - DNA, 21 bp, Homo sapiens
gaagccgtttctcatcatgcc

SEQ ID NO: 9223 - DNA, 22 bp, Homo sapiens
gaggcattgacgagcagagctc

SEQ ID NO: 9224 - DNA, 16 bp, Homo sapiens
ggcagtcccttcccat

SEQ ID NO: 9225 - DNA, 18 bp, Homo sapiens
ccaaggctgtcacaactc

SEQ ID NO: 9226 - DNA, 21 bp, Homo sapiens
tggtgaagttgccttttcagc

SEQ ID NO: 9227 - DNA, 22 bp, Homo sapiens
aaaatgattttcttctgttggc

SEQ ID NO: 9228 - DNA, 20 bp, Homo sapiens
atcagacaaaagggaatcgg

SEQ ID NO: 9229 - DNA, 23 bp, Homo sapiens
ctccaatatgaaaggtgttcagc

SEQ ID NO: 9230 - DNA, 19 bp, Homo sapiens
agaaggtgctcaggccaac

SEQ ID NO: 9231 - DNA, 19 bp, Homo sapiens
ccccagaaaagctggaggc

SEQ ID NO: 9232 - DNA, 17 bp, Homo sapiens
tgtctctgcagcatacc

SEQ ID NO: 9233 - DNA, 20 bp, Homo sapiens
gccatttccttgctggagtt

SEQ ID NO: 9234 - DNA, 20 bp, Homo sapiens
ccctttcttgacttggtgta

SEQ ID NO: 9235 - DNA, 20 bp, Homo sapiens
cgactaaaggagtgtgtctg

SEQ ID NO: 9236 - DNA, 18 bp, Homo sapiens
aaagcaccgagagatgac

SEQ ID NO: 9237 - DNA, 23 bp, Homo sapiens
actgtgccatcctttggagactt

SEQ ID NO: 9238 - DNA, 21 bp, Homo sapiens
cctcatggttatgatcgccat

SEQ ID NO: 9239 - DNA, 24 bp, Homo sapiens
ttgtttcctacaattaatgcttcg

SEQ ID NO: 9240 - DNA, 21 bp, Homo sapiens
cactgaatctcaaggtgtttg

SEQ ID NO: 9241 - DNA, 21 bp, Homo sapiens
taaggcaaaagaaccattagg

SEQ ID NO: 9242 - DNA, 21 bp, Homo sapiens
ggttactataatgaagcagat

SEQ ID NO: 9243 - DNA, 22 bp, Homo sapiens
tcatgatttccttacctccatc

SEQ ID NO: 9244 - DNA, 21 bp, Homo sapiens
ttgtttatattcatggtttgc

SEQ ID NO: 9245 - DNA, 19 bp, Homo sapiens
gtctccagctttgacaaac

SEQ ID NO: 9246 - DNA, 21 bp, Homo sapiens
cttagctcctatgactggaac

SEQ ID NO: 9247 - DNA, 22 bp, Homo sapiens
tcctcttgtttttgtgaagtgg

SEQ ID NO: 9248 - DNA, 22 bp, Homo sapiens
tgagattgacattccagtcccc

SEQ ID NO: 9249 - DNA, 20 bp, Homo sapiens
gacaagtttaacaaagccac

SEQ ID NO: 9250 - DNA, 21 bp, Homo sapiens
agtgataggatgttgattcgg

SEQ ID NO: 9251 - DNA, 23 bp, Homo sapiens
tgtgattaccttttcaatggttc

SEQ ID NO: 9252 - DNA, 21 bp, Homo sapiens
atatttaacaaattgctggga

SEQ ID NO: 9253 - DNA, 22 bp, Homo sapiens
ttgtgagctcacagaagataag

SEQ ID NO: 9254 - DNA, 21 bp, Homo sapiens
tcctggaaaacactatttacc

SEQ ID NO: 9255 - DNA, 24 bp, Homo sapiens
gggaaactgagggaaaaaggtcac

SEQ ID NO: 9256 - DNA, 18 bp, Homo sapiens
tgcacttacctgaaatgt

SEQ ID NO: 9257 - DNA, 20 bp, Homo sapiens
gtggaatgtctctggtcaaa

SEQ ID NO: 9258 - DNA, 24 bp, Homo sapiens
tttcatttttttcagattgaagat

SEQ ID NO: 9259 - DNA, 23 bp, Homo sapiens
gagacattaccttggaaaatagg

SEQ ID NO: 9260 - DNA, 23 bp, Homo sapiens
agtgaagaattgattctgatctt

SEQ ID NO: 9261 - DNA, 22 bp, Homo sapiens
ctagcaactccattaacagaac

SEQ ID NO: 9262 - DNA, 30 bp, Homo sapiens
tttaaaaaatatatgttatatatgtttaag

SEQ ID NO: 9263 - DNA, 22 bp, Homo sapiens
taccaaggacttggaaagtttt

SEQ ID NO: 9264 - DNA, 18 bp, Homo sapiens
ggtcttatagcatgcagg

SEQ ID NO: 9265 - DNA, 22 bp, Homo sapiens
gggtctgaaatacaagcataag

SEQ ID NO: 9266 - DNA, 25 bp, Homo sapiens
ttttcttcattttttccctttttcc

SEQ ID NO: 9267 - DNA, 20 bp, Homo sapiens
aaaccagagagtgaaagacc

SEQ ID NO: 9268 - DNA, 20 bp, Homo sapiens
ggttgagagtgagattcttt

SEQ ID NO: 9269 - DNA, 19 bp, Homo sapiens
agaacaaaaccagtaaggc

SEQ ID NO: 9270 - DNA, 20 bp, Homo sapiens
actttatttccaagaagttc

SEQ ID NO: 9271 - DNA, 20 bp, Homo sapiens
acagctatggctacatcttt

SEQ ID NO: 9272 - DNA, 21 bp, Homo sapiens
aacatgactcttaaagatggt

SEQ ID NO: 9273 - DNA, 18 bp, Homo sapiens
tccctccaatgtttagcc

SEQ ID NO: 9274 - DNA, 21 bp, Homo sapiens
tcaattctctccattttcgtc

SEQ ID NO: 9275 - DNA, 20 bp, Homo sapiens
gctggaatcctctttttcag

SEQ ID NO: 9276 - DNA, 23 bp, Homo sapiens
aaggtgtaaatttcataggcttg

SEQ ID NO: 9277 - DNA, 24 bp, Homo sapiens
cttttaatgaaacattacttactg

SEQ ID NO: 9278 - DNA, 17 bp, Homo sapiens
catgagccactgtgccc

SEQ ID NO: 9279 - DNA, 24 bp, Homo sapiens
gagctttccttcatactaaaaaac

SEQ ID NO: 9280 - DNA, 16 bp, Homo sapiens
ggcagccctgggtctc

SEQ ID NO: 9281 - DNA, 24 bp, Homo sapiens
aaaagagaggtcagtgtgccatac

SEQ ID NO: 9282 - DNA, 21 bp, Homo sapiens
tcatccctcaacaccacaaac

SEQ ID NO: 9283 - DNA, 24 bp, Homo sapiens
tgacaagcagaggaaagagaaaag

SEQ ID NO: 9284 - DNA, 20 bp, Homo sapiens
tcttactcaacctgtctggc

SEQ ID NO: 9285 - DNA, 23 bp, Homo sapiens
ggctttctccttgaggatgagac

SEQ ID NO: 9286 - DNA, 23 bp, Homo sapiens
ttccccactcagcaggaactggg

SEQ ID NO: 9287 - DNA, 17 bp, Homo sapiens
tccgactgagcaacaac

SEQ ID NO: 9288 - DNA, 24 bp, Homo sapiens
agttgttcacagtagaaaatactt

SEQ ID NO: 9289 - DNA, 18 bp, Homo sapiens
ttcaaactctgggtggcc

SEQ ID NO: 9290 - DNA, 20 bp, Homo sapiens
attgtcctgttgccacatgg

SEQ ID NO: 9291 - DNA, 17 bp, Homo sapiens
ctgaggtacagccttcg

SEQ ID NO: 9292 - DNA, 22 bp, Homo sapiens
gaaactattttgtttgggcaat

SEQ ID NO: 9293 - DNA, 19 bp, Homo sapiens
ccccatgattgcgaagctg

SEQ ID NO: 9294 - DNA, 22 bp, Homo sapiens
ctgccaaagacaaaggctgacc

SEQ ID NO: 9295 - DNA, 22 bp, Homo sapiens
ttttgacttgaagaggttaccg

SEQ ID NO: 9296 - DNA, 23 bp, Homo sapiens
agatcactcacattgtactgacg

SEQ ID NO: 9297 - DNA, 20 bp, Homo sapiens
gaggattaagcgtgaaatgt

SEQ ID NO: 9298 - DNA, 16 bp, Homo sapiens
ctgcccacacgaccag

SEQ ID NO: 9299 - DNA, 16 bp, Homo sapiens
aacctcagggtcctca

SEQ ID NO: 9300 - DNA, 16 bp, Homo sapiens
ctggagtacggcaagg

SEQ ID NO: 9301 - DNA, 24 bp, Homo sapiens
aaaagtaatggttactgagaaatc

SEQ ID NO: 9302 - DNA, 18 bp, Homo sapiens
tgtggcaggcccattagt

SEQ ID NO: 9303 - DNA, 23 bp, Homo sapiens
gactcagggataagaatgtgtcc

SEQ ID NO: 9304 - DNA, 17 bp, Homo sapiens
ggccatgccttcgaagc

SEQ ID NO: 9305 - DNA, 23 bp, Homo sapiens
gagacttttcattttctttcact

SEQ ID NO: 9306 - DNA, 18 bp, Homo sapiens
ctattgccagattgcagc

SEQ ID NO: 9307 - DNA, 21 bp, Homo sapiens
gggtctgctcgaggagtagag

SEQ ID NO: 9308 - DNA, 22 bp, Homo sapiens
aagaccattgatttactaagtc

SEQ ID NO: 9309 - DNA, 24 bp, Homo sapiens
tgctaggatcttctgcatatattc

SEQ ID NO: 9310 - DNA, 20 bp, Homo sapiens
agtttttatttggctgcatt

SEQ ID NO: 9311 - DNA, 21 bp, Homo sapiens
gctcaaaggaatcttctctcc

SEQ ID NO: 9312 - DNA, 20 bp, Homo sapiens
tcacaggaactgacttggtg

SEQ ID NO: 9313 - DNA, 22 bp, Homo sapiens
acataatttctgtttcatggag

SEQ ID NO: 9314 - DNA, 21 bp, Homo sapiens
ctgggactacaggcttgagcc

SEQ ID NO: 9315 - DNA, 19 bp, Homo sapiens
atgaccattgttttttacc

SEQ ID NO: 9316 - DNA, 20 bp, Homo sapiens
tctcactctaagctgccact

SEQ ID NO: 9317 - DNA, 22 bp, Homo sapiens
ggtaaaacttgatgtgatgcat

SEQ ID NO: 9318 - DNA, 19 bp, Homo sapiens
tccacttgcagccttgtat

SEQ ID NO: 9319 - DNA, 19 bp, Homo sapiens
tgcaaatgcgagatgtttt

SEQ ID NO: 9320 - DNA, 22 bp, Homo sapiens
aagctgtaaattatgttggagc

SEQ ID NO: 9321 - DNA, 22 bp, Homo sapiens
ataaaatgtatttcttactgtg

SEQ ID NO: 9322 - DNA, 22 bp, Homo sapiens
agcctggtattaaatctgaagt

SEQ ID NO: 9323 - DNA, 20 bp, Homo sapiens
gttgtgtttctcttgccttc

SEQ ID NO: 9324 - DNA, 22 bp, Homo sapiens
ttaatggaatttctagtaaggc

SEQ ID NO: 9325 - DNA, 24 bp, Homo sapiens
attagaagcaaatcttaacctacc

SEQ ID NO: 9326 - DNA, 23 bp, Homo sapiens
tgtatatgtggtctgttgttgac

SEQ ID NO: 9327 - DNA, 19 bp, Homo sapiens
gcttctcccagcttttttc

SEQ ID NO: 9328 - DNA, 20 bp, Homo sapiens
cagaagatcattgaggaggc

SEQ ID NO: 9329 - DNA, 24 bp, Homo sapiens
tacactgctattaggcaacagttg

SEQ ID NO: 9330 - DNA, 17 bp, Homo sapiens
tcaccatggcaatgctg

SEQ ID NO: 9331 - DNA, 24 bp, Homo sapiens
acagatttctgatgtgaaaatcag

SEQ ID NO: 9332 - DNA, 24 bp, Homo sapiens
ccctaacaaatatattaacataca

SEQ ID NO: 9333 - DNA, 19 bp, Homo sapiens
caaggtccttaccgctggg

SEQ ID NO: 9334 - DNA, 16 bp, Homo sapiens
tcctggtgattgtgcc

SEQ ID NO: 9335 - DNA, 21 bp, Homo sapiens
tctttcaaacaagtacacagc

SEQ ID NO: 9336 - DNA, 22 bp, Homo sapiens
gtccataacctctaatttgagg

SEQ ID NO: 9337 - DNA, 18 bp, Homo sapiens
gctgatcgagaagtttgt

SEQ ID NO: 9338 - DNA, 19 bp, Homo sapiens
acagaactgggaaacttgt

SEQ ID NO: 9339 - DNA, 24 bp, Homo sapiens
aatttcaagaacagttagagtcag

SEQ ID NO: 9340 - DNA, 20 bp, Homo sapiens
atgtgcatgcattattttta

SEQ ID NO: 9341 - DNA, 21 bp, Homo sapiens
tgttgtagtcataatcatctt

SEQ ID NO: 9342 - DNA, 22 bp, Homo sapiens
ggccaacccacctcggtgtgtc

SEQ ID NO: 9343 - DNA, 20 bp, Homo sapiens
agtaagattgtgcatgcttg

SEQ ID NO: 9344 - DNA, 24 bp, Homo sapiens
agacttcttagcttctctccgtgc

SEQ ID NO: 9345 - DNA, 16 bp, Homo sapiens
cgccaggagaattggc

SEQ ID NO: 9346 - DNA, 23 bp, Homo sapiens
acaatcctcattccctaagagag

SEQ ID NO: 9347 - DNA, 18 bp, Homo sapiens
gagtacctgttgtggagg

SEQ ID NO: 9348 - DNA, 21 bp, Homo sapiens
acaagcctgaattggcaaaca

SEQ ID NO: 9349 - DNA, 18 bp, Homo sapiens
ttggggcatgttgttttc

SEQ ID NO: 9350 - DNA, 22 bp, Homo sapiens
gctttaatcatgacaggatagc

SEQ ID NO: 9351 - DNA, 19 bp, Homo sapiens
tgtaatttatagactgggc

SEQ ID NO: 9352 - DNA, 21 bp, Homo sapiens
ttggtcctcaccatgataacc

SEQ ID NO: 9353 - DNA, 23 bp, Homo sapiens
actaatagacatattaaatttgt

SEQ ID NO: 9354 - DNA, 22 bp, Homo sapiens
gacatgggtataaagaggtatg

SEQ ID NO: 9355 - DNA, 24 bp, Homo sapiens
agttgcccaggctggtcttgaatt

SEQ ID NO: 9356 - DNA, 23 bp, Homo sapiens
actttgtaagcaagaaggaatta

SEQ ID NO: 9357 - DNA, 21 bp, Homo sapiens
caaaacactggtattacaggc

SEQ ID NO: 9358 - DNA, 19 bp, Homo sapiens
ttctaggctatccatccag

SEQ ID NO: 9359 - DNA, 28 bp, Homo sapiens
acagttatattttaaaagatataaactc

SEQ ID NO: 9360 - DNA, 18 bp, Homo sapiens
ctgcattaaggtgttgcc

SEQ ID NO: 9361 - DNA, 24 bp, Homo sapiens
cagatggaggagggcctataaaaa

SEQ ID NO: 9362 - DNA, 24 bp, Homo sapiens
ggaaacagagtttaatagagacca

SEQ ID NO: 9363 - DNA, 17 bp, Homo sapiens
aaaccgcatcctggatg

SEQ ID NO: 9364 - DNA, 20 bp, Homo sapiens
agatgggacatgcctagttt

SEQ ID NO: 9365 - DNA, 17 bp, Homo sapiens
tccctcccagcagagct

SEQ ID NO: 9366 - DNA, 25 bp, Homo sapiens
ggaaaggctaaaaatagaaaatttc

SEQ ID NO: 9367 - DNA, 22 bp, Homo sapiens
gccacaaagtcttttaagcatg

SEQ ID NO: 9368 - DNA, 21 bp, Homo sapiens
actgcaaatctcttcacaacc

SEQ ID NO: 9369 - DNA, 22 bp, Homo sapiens
atttacaataataaaatgaccc

SEQ ID NO: 9370 - DNA, 23 bp, Homo sapiens
attttctccatagataggtagct

SEQ ID NO: 9371 - DNA, 23 bp, Homo sapiens
acatacattggtacttcagtttt

SEQ ID NO: 9372 - DNA, 21 bp, Homo sapiens
ggctgacagaaattccatgca

SEQ ID NO: 9373 - DNA, 23 bp, Homo sapiens
aattagcagtgagcagtttgaac

SEQ ID NO: 9374 - DNA, 16 bp, Homo sapiens
gggtgatgcgcacagc

SEQ ID NO: 9375 - DNA, 24 bp, Homo sapiens
tgtcatcataaagaacgaaaatac

SEQ ID NO: 9376 - DNA, 24 bp, Homo sapiens
catggtgttttaaacaggaagaaa

SEQ ID NO: 9377 - DNA, 22 bp, Homo sapiens
ttttaacacataccatatctac

SEQ ID NO: 9378 - DNA, 24 bp, Homo sapiens
aagatcgtattctcattctcattc

SEQ ID NO: 9379 - DNA, 23 bp, Homo sapiens
gccacagtctgtacacccagttt

SEQ ID NO: 9380 - DNA, 21 bp, Homo sapiens
atgctagttttaccaaaaacc

SEQ ID NO: 9381 - DNA, 20 bp, Homo sapiens
tgtttgcaatgaggaccttg

SEQ ID NO: 9382 - DNA, 18 bp, Homo sapiens
tgaagtacacaacagcca

SEQ ID NO: 9383 - DNA, 24 bp, Homo sapiens
cttcctagaaaattatcgtgaaaa

SEQ ID NO: 9384 - DNA, 26 bp, Homo sapiens
ttgcctattctgtttaattgtaattc

SEQ ID NO: 9385 - DNA, 23 bp, Homo sapiens
aagggattaaacatttccctttc

SEQ ID NO: 9386 - DNA, 21 bp, Homo sapiens
tggcttaaggtttcatgtttt

SEQ ID NO: 9387 - DNA, 20 bp, Homo sapiens
aagtctgtcagtacctgtgg

SEQ ID NO: 9388 - DNA, 22 bp, Homo sapiens
actcttgagttctagattagtt

SEQ ID NO: 9389 - DNA, 22 bp, Homo sapiens
cgtgactgccggcagaacccct

SEQ ID NO: 9390 - DNA, 16 bp, Homo sapiens
cggtgctgctggtggc

SEQ ID NO: 9391 - DNA, 24 bp, Homo sapiens
cgaccctgggttccgccgcacctc

SEQ ID NO: 9392 - DNA, 17 bp, Homo sapiens
ctggggagtcacggagt

SEQ ID NO: 9393 - DNA, 16 bp, Homo sapiens
cactgagccatggccc

SEQ ID NO: 9394 - DNA, 17 bp, Homo sapiens
gggtcacgaggcttcgt

SEQ ID NO: 9395 - DNA, 16 bp, Homo sapiens
tgccaccggttcctct

SEQ ID NO: 9396 - DNA, 20 bp, Homo sapiens
agacgccctcacattcttgg

SEQ ID NO: 9397 - DNA, 16 bp, Homo sapiens
gcgcggcgcgggggcg

SEQ ID NO: 9398 - DNA, 24 bp, Homo sapiens
cccacccggccatcgccccctcac

SEQ ID NO: 9399 - DNA, 16 bp, Homo sapiens
gtgcggggcctcggcc

SEQ ID NO: 9400 - DNA, 20 bp, Homo sapiens
cccagactccgacccggagg

SEQ ID NO: 9401 - DNA, 18 bp, Homo sapiens
gctcctccagaagcgccg

SEQ ID NO: 9402 - DNA, 22 bp, Homo sapiens
agcacgcgtggccatgcgtccc

SEQ ID NO: 9403 - DNA, 24 bp, Homo sapiens
ggcgcccgagctctccccgtgcgg

SEQ ID NO: 9404 - DNA, 16 bp, Homo sapiens
cgcgcccccggtggcc

SEQ ID NO: 9405 - DNA, 18 bp, Homo sapiens
ccccagaggagggagctc

SEQ ID NO: 9406 - DNA, 16 bp, Homo sapiens
ctgtggcccctgcggc

SEQ ID NO: 9407 - DNA, 16 bp, Homo sapiens
actcaggtggaggacc

SEQ ID NO: 9408 - DNA, 16 bp, Homo sapiens
gtgtggcagcgggggg

SEQ ID NO: 9409 - DNA, 24 bp, Homo sapiens
cctaagggtcattttattagtcac

SEQ ID NO: 9410 - DNA, 16 bp, Homo sapiens
gcccacataggcgagg

SEQ ID NO: 9411 - DNA, 19 bp, Homo sapiens
ttgaacgtgtgtgtcagcc

SEQ ID NO: 9412 - DNA, 17 bp, Homo sapiens
tggtggtgacaagctcc

SEQ ID NO: 9413 - DNA, 18 bp, Homo sapiens
ctttgttgtccccagccc

SEQ ID NO: 9414 - DNA, 18 bp, Homo sapiens
tcccctcccatctgtgcc

SEQ ID NO: 9415 - DNA, 18 bp, Homo sapiens
accagcagctcaacctcg

SEQ ID NO: 9416 - DNA, 24 bp, Homo sapiens
tccccaacagggtgcttcggcggg

SEQ ID NO: 9417 - DNA, 16 bp, Homo sapiens
tccggacccactggct

SEQ ID NO: 9418 - DNA, 16 bp, Homo sapiens
gttgtagctcaggccc

SEQ ID NO: 9419 - DNA, 17 bp, Homo sapiens
gaagccgggatcggagt

SEQ ID NO: 9420 - DNA, 16 bp, Homo sapiens
ctcacctgggaggagc

SEQ ID NO: 9421 - DNA, 16 bp, Homo sapiens
ggttccagcctggagc

SEQ ID NO: 9422 - DNA, 16 bp, Homo sapiens
tgagggagagggtggg

SEQ ID NO: 9423 - DNA, 22 bp, Homo sapiens
cgtccttctgcagggggtccac

SEQ ID NO: 9424 - DNA, 16 bp, Homo sapiens
ctgtgctccggcacca

SEQ ID NO: 9425 - DNA, 21 bp, Homo sapiens
tggaccttctcagggagaacc

SEQ ID NO: 9426 - DNA, 16 bp, Homo sapiens
ctgcacccccttgccc

SEQ ID NO: 9427 - DNA, 18 bp, Homo sapiens
gctgcttgtcctcaaagt

SEQ ID NO: 9428 - DNA, 24 bp, Homo sapiens
cttggatgtccattcagggctggc

SEQ ID NO: 9429 - DNA, 17 bp, Homo sapiens
tcgcccaccgatgtatc

SEQ ID NO: 9430 - DNA, 24 bp, Homo sapiens
ggtgtggtgtgtggtgggcggtgg

SEQ ID NO: 9431 - DNA, 23 bp, Homo sapiens
gcctgcgtgataggggtgcaacc

SEQ ID NO: 9432 - DNA, 16 bp, Homo sapiens
ggccacttcactgact

SEQ ID NO: 9433 - DNA, 16 bp, Homo sapiens
tccccccacaagggcc

SEQ ID NO: 9434 - DNA, 22 bp, Homo sapiens
ttggtctccagcctggccagga

SEQ ID NO: 9435 - DNA, 18 bp, Homo sapiens
ccagtccgtacctacctg

SEQ ID NO: 9436 - DNA, 16 bp, Homo sapiens
ctgatgtggggcggga

SEQ ID NO: 9437 - DNA, 18 bp, Homo sapiens
gtcaaagtcgtggtggtc

SEQ ID NO: 9438 - DNA, 24 bp, Homo sapiens
ccttcatcaccttgcaccctccct

SEQ ID NO: 9439 - DNA, 18 bp, Homo sapiens
ttcagccgggcaggaccc

SEQ ID NO: 9440 - DNA, 24 bp, Homo sapiens
gtgctggggggacagcaaggctcc

SEQ ID NO: 9441 - DNA, 16 bp, Homo sapiens
tgcgtctacacctgcc

SEQ ID NO: 9442 - DNA, 20 bp, Homo sapiens
agacgtggaatgagccagac

SEQ ID NO: 9443 - DNA, 16 bp, Homo sapiens
gcgcagaccctccgag

SEQ ID NO: 9444 - DNA, 17 bp, Homo sapiens
accgcttcctggggtcc

SEQ ID NO: 9445 - DNA, 16 bp, Homo sapiens
cggtggggtgtggaag

SEQ ID NO: 9446 - DNA, 17 bp, Homo sapiens
gctaagccgctcatccc

SEQ ID NO: 9447 - DNA, 22 bp, Homo sapiens
ctccccagtgaagaagttggta

SEQ ID NO: 9448 - DNA, 22 bp, Homo sapiens
ctgaactactacgatgcctgct

SEQ ID NO: 9449 - DNA, 20 bp, Homo sapiens
acggaggggcagggcgcacc

SEQ ID NO: 9450 - DNA, 24 bp, Homo sapiens
gcggctgggaggccccggcgactc

SEQ ID NO: 9451 - DNA, 18 bp, Homo sapiens
tcagcaccaccagggtca

SEQ ID NO: 9452 - DNA, 24 bp, Homo sapiens
cctcctgcgccactgccacgacgg

SEQ ID NO: 9453 - DNA, 20 bp, Homo sapiens
gaccttctcctgctccagga

SEQ ID NO: 9454 - DNA, 24 bp, Homo sapiens
tacatctccctccacaggaaggtg

SEQ ID NO: 9455 - DNA, 18 bp, Homo sapiens
tgtaaatgggggtgtccg

SEQ ID NO: 9456 - DNA, 24 bp, Homo sapiens
cgccctcagccgctgtgccccggg

SEQ ID NO: 9457 - DNA, 16 bp, Homo sapiens
acgtccgccctccacg

SEQ ID NO: 9458 - DNA, 16 bp, Homo sapiens
cgcgcagctccatctc

SEQ ID NO: 9459 - DNA, 16 bp, Homo sapiens
ggccggggggcgcgca

SEQ ID NO: 9460 - DNA, 16 bp, Homo sapiens
ctcttccccaagttcg

SEQ ID NO: 9461 - DNA, 24 bp, Homo sapiens
acctgcgggtgtccagggcagctg

SEQ ID NO: 9462 - DNA, 18 bp, Homo sapiens
gctggtccctgccacagc

SEQ ID NO: 9463 - DNA, 17 bp, Homo sapiens
gggaaggcggaggtggt

SEQ ID NO: 9464 - DNA, 16 bp, Homo sapiens
cggcccaacgccctgc

SEQ ID NO: 9465 - DNA, 16 bp, Homo sapiens
gaaggggtgcgggtgg

SEQ ID NO: 9466 - DNA, 16 bp, Homo sapiens
cggtggccgcgccacc

SEQ ID NO: 9467 - DNA, 16 bp, Homo sapiens
ctgcacgtgcggcggg

SEQ ID NO: 9468 - DNA, 20 bp, Homo sapiens
catcagaacctgctactggc

SEQ ID NO: 9469 - DNA, 16 bp, Homo sapiens
ccccggctcacccagc

SEQ ID NO: 9470 - DNA, 24 bp, Homo sapiens
acaatgccttcctgagctaccacc

SEQ ID NO: 9471 - DNA, 24 bp, Homo sapiens
gctccccgcagcggggccttcgca

SEQ ID NO: 9472 - DNA, 18 bp, Homo sapiens
caggtcaacaacacccgc

SEQ ID NO: 9473 - DNA, 16 bp, Homo sapiens
cccgccacgcggaggc

SEQ ID NO: 9474 - DNA, 17 bp, Homo sapiens
atggggctgctggcgct

SEQ ID NO: 9475 - DNA, 24 bp, Homo sapiens
ccagccgcgcgcttcccggggtcg

SEQ ID NO: 9476 - DNA, 16 bp, Homo sapiens
acgcccaccgtgtggt

SEQ ID NO: 9477 - DNA, 16 bp, Homo sapiens
gcgagtggtgggaggc

SEQ ID NO: 9478 - DNA, 17 bp, Homo sapiens
gatcagcaccgcggcgc

SEQ ID NO: 9479 - DNA, 18 bp, Homo sapiens
ggcgacggcccccccccg

SEQ ID NO: 9480 - DNA, 16 bp, Homo sapiens
cgcagggtcaccgcga

SEQ ID NO: 9481 - DNA, 18 bp, Homo sapiens
ggaccgtcctggacagca

SEQ ID NO: 9482 - DNA, 16 bp, Homo sapiens
ggggccagagacctcc

SEQ ID NO: 9483 - DNA, 22 bp, Homo sapiens
cagggcccggccgacgcctggc

SEQ ID NO: 9484 - DNA, 16 bp, Homo sapiens
caggcctgcggggcct

SEQ ID NO: 9485 - DNA, 24 bp, Homo sapiens
cacccgcgcccaccccaaccgcag

SEQ ID NO: 9486 - DNA, 17 bp, Homo sapiens
ccgccactcgccgtcgg

SEQ ID NO: 9487 - DNA, 21 bp, Homo sapiens
cccgggtaagccggggttcca

SEQ ID NO: 9488 - DNA, 24 bp, Homo sapiens
gcggcccacctacctcagccgcgc

SEQ ID NO: 9489 - DNA, 24 bp, Homo sapiens
cggcccggggagccgaggcctgag

SEQ ID NO: 9490 - DNA, 16 bp, Homo sapiens
accccacccccccggg

SEQ ID NO: 9491 - DNA, 16 bp, Homo sapiens
aacgggctctgcagcc

SEQ ID NO: 9492 - DNA, 24 bp, Homo sapiens
ccgacctcagggcgaacgcccccg

SEQ ID NO: 9493 - DNA, 24 bp, Homo sapiens
tccccacggcagagcagttccggc

SEQ ID NO: 9494 - DNA, 20 bp, Homo sapiens
gggccgggccggggtcccgg

SEQ ID NO: 9495 - DNA, 16 bp, Homo sapiens
cgcagggtcaggcggc

SEQ ID NO: 9496 - DNA, 18 bp, Homo sapiens
gggaggtggagcggtggg

SEQ ID NO: 9497 - DNA, 16 bp, Homo sapiens
tctcggggcgcgcaca

SEQ ID NO: 9498 - DNA, 16 bp, Homo sapiens
ctggagaaccctgagg

SEQ ID NO: 9499 - DNA, 17 bp, Homo sapiens
ggaaggggagtccgggc

SEQ ID NO: 9500 - DNA, 16 bp, Homo sapiens
gccccttacccgccgg

SEQ ID NO: 9501 - DNA, 16 bp, Homo sapiens
gggtcaggggcagggc

SEQ ID NO: 9502 - DNA, 24 bp, Homo sapiens
gcttttgctggtgcacgtgtgtgc

SEQ ID NO: 9503 - DNA, 19 bp, Homo sapiens
ccccactcacgcacttgga

SEQ ID NO: 9504 - DNA, 23 bp, Homo sapiens
agtcccctaacccgcgccgcggc

SEQ ID NO: 9505 - DNA, 16 bp, Homo sapiens
tgggtgaaggggtcgg

SEQ ID NO: 9506 - DNA, 16 bp, Homo sapiens
ccaggtcacgcggctc

SEQ ID NO: 9507 - DNA, 16 bp, Homo sapiens
ggacgcagggcggcga

SEQ ID NO: 9508 - DNA, 19 bp, Homo sapiens
gtcggatgaacacgtgggc

SEQ ID NO: 9509 - DNA, 17 bp, Homo sapiens
ctccagccctctcctgc

SEQ ID NO: 9510 - DNA, 17 bp, Homo sapiens
tgtacgccttaccgtcc

SEQ ID NO: 9511 - DNA, 18 bp, Homo sapiens
gggcttgagggaatgagg

SEQ ID NO: 9512 - DNA, 19 bp, Homo sapiens
gggcgcacctgggctgaac

SEQ ID NO: 9513 - DNA, 22 bp, Homo sapiens
tttgaggactgtcttgacccca

SEQ ID NO: 9514 - DNA, 16 bp, Homo sapiens
ccccacccagtactgc

SEQ ID NO: 9515 - DNA, 21 bp, Homo sapiens
acatacgagatccagttctct

SEQ ID NO: 9516 - DNA, 16 bp, Homo sapiens
gccaaccggaacctgc

SEQ ID NO: 9517 - DNA, 23 bp, Homo sapiens
cgaccttcaacctctttgtgttc

SEQ ID NO: 9518 - DNA, 24 bp, Homo sapiens
agtagtccagggctcgaactcggt

SEQ ID NO: 9519 - DNA, 16 bp, Homo sapiens
caccccattcttgggc

SEQ ID NO: 9520 - DNA, 17 bp, Homo sapiens
cagggacctccaggtac

SEQ ID NO: 9521 - DNA, 22 bp, Homo sapiens
cagggggctttcgggtgggggc

SEQ ID NO: 9522 - DNA, 17 bp, Homo sapiens
ggtgcaacccactgggg

SEQ ID NO: 9523 - DNA, 16 bp, Homo sapiens
ggtgctgtctctggct

SEQ ID NO: 9524 - DNA, 20 bp, Homo sapiens
aagggggtgatgggagggca

SEQ ID NO: 9525 - DNA, 15 bp, Homo sapiens
tcggaccctgtgccg

SEQ ID NO: 9526 - DNA, 18 bp, Homo sapiens
taaagggggcgttggtac

SEQ ID NO: 9527 - DNA, 23 bp, Homo sapiens
tcagaaagaaagcctttctgggt

SEQ ID NO: 9528 - DNA, 22 bp, Homo sapiens
cactgtaactacctcccactcc

SEQ ID NO: 9529 - DNA, 22 bp, Homo sapiens
caattcccagaggcaggggcgg

SEQ ID NO: 9530 - DNA, 21 bp, Homo sapiens
gaatgaatacacgtctgcagg

SEQ ID NO: 9531 - DNA, 19 bp, Homo sapiens
atcgaactgcggccatttc

SEQ ID NO: 9532 - DNA, 22 bp, Homo sapiens
ttttgcatttttaacagtggga

SEQ ID NO: 9533 - DNA, 20 bp, Homo sapiens
ggggtctggagttagtgttt

SEQ ID NO: 9534 - DNA, 21 bp, Homo sapiens
ggcaagagatgtttttctctc

SEQ ID NO: 9535 - DNA, 22 bp, Homo sapiens
caagaattaagtgtgtacctgc

SEQ ID NO: 9536 - DNA, 20 bp, Homo sapiens
ttccacttgagttatgtaaa

SEQ ID NO: 9537 - DNA, 21 bp, Homo sapiens
tttggagtttggagtctgacc

SEQ ID NO: 9538 - DNA, 23 bp, Homo sapiens
ggcaacacaaacttacctttaac

SEQ ID NO: 9539 - DNA, 19 bp, Homo sapiens
gtcactccctcactggctg

SEQ ID NO: 9540 - DNA, 16 bp, Homo sapiens
cgcacgtatctgcctc

SEQ ID NO: 9541 - DNA, 20 bp, Homo sapiens
tggatgcagttgaggattgc

SEQ ID NO: 9542 - DNA, 23 bp, Homo sapiens
gttacatggttttgaagatagtt

SEQ ID NO: 9543 - DNA, 22 bp, Homo sapiens
tcatttcctcatattcagcttc

SEQ ID NO: 9544 - DNA, 20 bp, Homo sapiens
tgagagaccagttgtgtgac

SEQ ID NO: 9545 - DNA, 24 bp, Homo sapiens
tgatttcagcagatgaagtagcac

SEQ ID NO: 9546 - DNA, 19 bp, Homo sapiens
atcaagaagaacttcagtg

SEQ ID NO: 9547 - DNA, 22 bp, Homo sapiens
cccactgtggtagagagatgca

SEQ ID NO: 9548 - DNA, 17 bp, Homo sapiens
cacatccacgttggagg

SEQ ID NO: 9549 - DNA, 24 bp, Homo sapiens
ctggatatgtgtcattatctttat

SEQ ID NO: 9550 - DNA, 19 bp, Homo sapiens
gcccaccgttatttggatc

SEQ ID NO: 9551 - DNA, 19 bp, Homo sapiens
gtacaagctcacgtactcc

SEQ ID NO: 9552 - DNA, 24 bp, Homo sapiens
caagtgctgtccaatggtacactt

SEQ ID NO: 9553 - DNA, 24 bp, Homo sapiens
aagacagcgtgggctaccgcattt

SEQ ID NO: 9554 - DNA, 23 bp, Homo sapiens
actgcttgttttagtgatagata

SEQ ID NO: 9555 - DNA, 19 bp, Homo sapiens
tggtgatgatgaccagttg

SEQ ID NO: 9556 - DNA, 21 bp, Homo sapiens
gctgattcacattttcaacat

SEQ ID NO: 9557 - DNA, 25 bp, Homo sapiens
ttgaaaaatgacagaagaaattgtg

SEQ ID NO: 9558 - DNA, 20 bp, Homo sapiens
tccaagttttcctttcccat

SEQ ID NO: 9559 - DNA, 23 bp, Homo sapiens
tttcagagatactctgatgaaga

SEQ ID NO: 9560 - DNA, 18 bp, Homo sapiens
acgcccctttacctttcc

SEQ ID NO: 9561 - DNA, 23 bp, Homo sapiens
gttactccagatgaaggatgtaa

SEQ ID NO: 9562 - DNA, 23 bp, Homo sapiens
tcaaaataatatctactgaaggg

SEQ ID NO: 9563 - DNA, 21 bp, Homo sapiens
cttcaaaggaaaaagcccatc

SEQ ID NO: 9564 - DNA, 24 bp, Homo sapiens
acctctgttctttagttcttgaag

SEQ ID NO: 9565 - DNA, 20 bp, Homo sapiens
acctacgctccttcatctaa

SEQ ID NO: 9566 - DNA, 21 bp, Homo sapiens
ggccactgcctcattttgata

SEQ ID NO: 9567 - DNA, 21 bp, Homo sapiens
ttggagtgtcagatctctttc

SEQ ID NO: 9568 - DNA, 21 bp, Homo sapiens
tccagagcttaactgtgtctg

SEQ ID NO: 9569 - DNA, 28 bp, Homo sapiens
cctgacacttatttaaatctgataaatg

SEQ ID NO: 9570 - DNA, 24 bp, Homo sapiens
aaatccttacaaattttattgaga

SEQ ID NO: 9571 - DNA, 19 bp, Homo sapiens
ccaccaggtcaaagagttc

SEQ ID NO: 9572 - DNA, 20 bp, Homo sapiens
tttctgagcattaccttagt

SEQ ID NO: 9573 - DNA, 18 bp, Homo sapiens
ctggctagcctatttcag

SEQ ID NO: 9574 - DNA, 20 bp, Homo sapiens
cattgggataaatggcaatt

SEQ ID NO: 9575 - DNA, 23 bp, Homo sapiens
aaccttgttcttgtctttgtatc

SEQ ID NO: 9576 - DNA, 20 bp, Homo sapiens
aaggccttaattttgatcac

SEQ ID NO: 9577 - DNA, 24 bp, Homo sapiens
ggcctattagagacctcaattttc

SEQ ID NO: 9578 - DNA, 21 bp, Homo sapiens
tctatcatacctgatttgggg

SEQ ID NO: 9579 - DNA, 19 bp, Homo sapiens
caagcattatgcccttgcc

SEQ ID NO: 9580 - DNA, 22 bp, Homo sapiens
ctattacattaaattagtctct

SEQ ID NO: 9581 - DNA, 19 bp, Homo sapiens
ctaccaggctcatcaagac

SEQ ID NO: 9582 - DNA, 21 bp, Homo sapiens
tgtgaatttgtagcctaaact

SEQ ID NO: 9583 - DNA, 19 bp, Homo sapiens
gcgaggtctggatttacga

SEQ ID NO: 9584 - DNA, 19 bp, Homo sapiens
actgacacccaagacctaa

SEQ ID NO: 9585 - DNA, 21 bp, Homo sapiens
tagacccatttcaattgttgt

SEQ ID NO: 9586 - DNA, 20 bp, Homo sapiens
cagctataacaaagctgtct

SEQ ID NO: 9587 - DNA, 21 bp, Homo sapiens
tagactgaaagacagtttgct

SEQ ID NO: 9588 - DNA, 18 bp, Homo sapiens
ttttccccttaatggttt

SEQ ID NO: 9589 - DNA, 27 bp, Homo sapiens
acttgttataaagatggctatttattt

SEQ ID NO: 9590 - DNA, 27 bp, Homo sapiens
tataataatataacaaagaatagcaaa

SEQ ID NO: 9591 - DNA, 23 bp, Homo sapiens
ccacctataagatagaagacagc

SEQ ID NO: 9592 - DNA, 16 bp, Homo sapiens
tacacgcgcacacaca

SEQ ID NO: 9593 - DNA, 22 bp, Homo sapiens
acaattttggactgaatttcct

SEQ ID NO: 9594 - DNA, 20 bp, Homo sapiens
acagtgatgaaattgcctaa

SEQ ID NO: 9595 - DNA, 17 bp, Homo sapiens
tcggttgtcttcagctc

SEQ ID NO: 9596 - DNA, 22 bp, Homo sapiens
tcacagtttgaaagacatggct

SEQ ID NO: 9597 - DNA, 22 bp, Homo sapiens
ccgtgtactttgaatcaactgc

SEQ ID NO: 9598 - DNA, 24 bp, Homo sapiens
aagaatggcaattagtatcttgtt

SEQ ID NO: 9599 - DNA, 23 bp, Homo sapiens
acttacagaaggacatcctttac

SEQ ID NO: 9600 - DNA, 19 bp, Homo sapiens
tgcaggcagaaattagagc

SEQ ID NO: 9601 - DNA, 24 bp, Homo sapiens
cactggagacaaaatgaaaacaga

SEQ ID NO: 9602 - DNA, 20 bp, Homo sapiens
aagcaggctgcagccataat

SEQ ID NO: 9603 - DNA, 17 bp, Homo sapiens
gtggtagctggtagttc

SEQ ID NO: 9604 - DNA, 24 bp, Homo sapiens
attgtggggcaggtcttccagagc

SEQ ID NO: 9605 - DNA, 23 bp, Homo sapiens
gtggaccgccagagctccgagag

SEQ ID NO: 9606 - DNA, 24 bp, Homo sapiens
aactgtcatgtgtattgaggtaag

SEQ ID NO: 9607 - DNA, 20 bp, Homo sapiens
aggaagtttctgacagcctc

SEQ ID NO: 9608 - DNA, 24 bp, Homo sapiens
cattttattcctaggagaacaccc

SEQ ID NO: 9609 - DNA, 25 bp, Homo sapiens
ccatctttagtatttgaaggatctc

SEQ ID NO: 9610 - DNA, 22 bp, Homo sapiens
cctgcagtgtatgttttgcagc

SEQ ID NO: 9611 - DNA, 19 bp, Homo sapiens
tgtttctgacagacaaccc

SEQ ID NO: 9612 - DNA, 21 bp, Homo sapiens
agcctgacaacctttccaagg

SEQ ID NO: 9613 - DNA, 16 bp, Homo sapiens
gtggggcagttggttt

SEQ ID NO: 9614 - DNA, 19 bp, Homo sapiens
aggactgcgaagaaagaag

SEQ ID NO: 9615 - DNA, 18 bp, Homo sapiens
gcactgtggcataacttt

SEQ ID NO: 9616 - DNA, 24 bp, Homo sapiens
tcttaatcattttttcatttgttc

SEQ ID NO: 9617 - DNA, 23 bp, Homo sapiens
cacttttgaaatccaaaaagtcc

SEQ ID NO: 9618 - DNA, 22 bp, Homo sapiens
caatagaaactctgtgaatggt

SEQ ID NO: 9619 - DNA, 19 bp, Homo sapiens
gaagcaaatccacaggcat

SEQ ID NO: 9620 - DNA, 23 bp, Homo sapiens
tccatgattatgcctttttttat

SEQ ID NO: 9621 - DNA, 23 bp, Homo sapiens
agggtctttattttctatttgac

SEQ ID NO: 9622 - DNA, 22 bp, Homo sapiens
cagacctcagactcattagaag

SEQ ID NO: 9623 - DNA, 29 bp, Homo sapiens
cttcattcagatctaagaaacttttaatt

SEQ ID NO: 9624 - DNA, 21 bp, Homo sapiens
tatcctccaggagaggtttct

SEQ ID NO: 9625 - DNA, 21 bp, Homo sapiens
agtggatagaaaataccccaa

SEQ ID NO: 9626 - DNA, 20 bp, Homo sapiens
ctgagagccctcattgtaag

SEQ ID NO: 9627 - DNA, 22 bp, Homo sapiens
gctaccaatagaacctttgaac

SEQ ID NO: 9628 - DNA, 23 bp, Homo sapiens
tgtctcaaaagcaaaattctgag

SEQ ID NO: 9629 - DNA, 19 bp, Homo sapiens
actttctgacaagtgtccc

SEQ ID NO: 9630 - DNA, 21 bp, Homo sapiens
ttttttaactaaaagtgttcc

SEQ ID NO: 9631 - DNA, 25 bp, Homo sapiens
ggtgtagaatgatgtaatacatgag

SEQ ID NO: 9632 - DNA, 20 bp, Homo sapiens
tccctgtttggttaatagag

SEQ ID NO: 9633 - DNA, 19 bp, Homo sapiens
agagaattaggagtgccaa

SEQ ID NO: 9634 - DNA, 18 bp, Homo sapiens
tgatcatcactgggacac

SEQ ID NO: 9635 - DNA, 24 bp, Homo sapiens
tgactgaattttaatatatgttag

SEQ ID NO: 9636 - DNA, 22 bp, Homo sapiens
ttgcttttattccactgtgtgc

SEQ ID NO: 9637 - DNA, 19 bp, Homo sapiens
tggtgtcctcttttttctc

SEQ ID NO: 9638 - DNA, 23 bp, Homo sapiens
taggttgctttcttggacccaag

SEQ ID NO: 9639 - DNA, 18 bp, Homo sapiens
cagaagacttgggatgcc

SEQ ID NO: 9640 - DNA, 24 bp, Homo sapiens
tgcatatatctaaggtatatgatt

SEQ ID NO: 9641 - DNA, 22 bp, Homo sapiens
tcatatctctggagagcagtgg

SEQ ID NO: 9642 - DNA, 20 bp, Homo sapiens
tgggaggacttgaaaaagca

SEQ ID NO: 9643 - DNA, 23 bp, Homo sapiens
tttttttcttctgtaaatgttgc

SEQ ID NO: 9644 - DNA, 22 bp, Homo sapiens
gaatgccctgcttccagaaggc

SEQ ID NO: 9645 - DNA, 23 bp, Homo sapiens
gggaaaatacagagtgacttgag

SEQ ID NO: 9646 - DNA, 23 bp, Homo sapiens
agggcccatcagccacctggcta

SEQ ID NO: 9647 - DNA, 19 bp, Homo sapiens
gccgcaaatgcaatttaag

SEQ ID NO: 9648 - DNA, 21 bp, Homo sapiens
tctgtttaaggtcttcttcac

SEQ ID NO: 9649 - DNA, 20 bp, Homo sapiens
cccaccaaatcacaaaggaa

SEQ ID NO: 9650 - DNA, 16 bp, Homo sapiens
cagctgcagcagtgcg

SEQ ID NO: 9651 - DNA, 21 bp, Homo sapiens
cactattcctgctattcctgc

SEQ ID NO: 9652 - DNA, 22 bp, Homo sapiens
ggggaagctccccaatagacag

SEQ ID NO: 9653 - DNA, 22 bp, Homo sapiens
aacatcttatgaacaggtgaag

SEQ ID NO: 9654 - DNA, 21 bp, Homo sapiens
ggcatttcaaaacgtaggatg

SEQ ID NO: 9655 - DNA, 19 bp, Homo sapiens
atgaaaagactgtgcgcac

SEQ ID NO: 9656 - DNA, 24 bp, Homo sapiens
gaacacacaaataagcttgaatac

SEQ ID NO: 9657 - DNA, 21 bp, Homo sapiens
tcctacatggacgtcaagaac

SEQ ID NO: 9658 - DNA, 18 bp, Homo sapiens
acgtaaccctgcataatg

SEQ ID NO: 9659 - DNA, 22 bp, Homo sapiens
taaatacatgctcgccattgtt

SEQ ID NO: 9660 - DNA, 18 bp, Homo sapiens
ttcatctggccccctaaa

SEQ ID NO: 9661 - DNA, 22 bp, Homo sapiens
catttccttcagaactcgacgg

SEQ ID NO: 9662 - DNA, 21 bp, Homo sapiens
ggctcttggaaaggcatgagg

SEQ ID NO: 9663 - DNA, 22 bp, Homo sapiens
gtagccagtgtaggcagaagaa

SEQ ID NO: 9664 - DNA, 22 bp, Homo sapiens
ttccaaatttgacttgggaaac

SEQ ID NO: 9665 - DNA, 21 bp, Homo sapiens
caatgctaagttgtggggtat

SEQ ID NO: 9666 - DNA, 19 bp, Homo sapiens
tgcagcaaaattgtccgtc

SEQ ID NO: 9667 - DNA, 20 bp, Homo sapiens
agatgccgaacggggactac

SEQ ID NO: 9668 - DNA, 22 bp, Homo sapiens
accgtttctccaggagtggatc

SEQ ID NO: 9669 - DNA, 21 bp, Homo sapiens
atgttcaggttacttctcctt

SEQ ID NO: 9670 - DNA, 24 bp, Homo sapiens
acaccaaaaagaggttctccttcc

SEQ ID NO: 9671 - DNA, 20 bp, Homo sapiens
catgagaagtgagttacctg

SEQ ID NO: 9672 - DNA, 19 bp, Homo sapiens
ttgtgtgtcatcaggtagt

SEQ ID NO: 9673 - DNA, 20 bp, Homo sapiens
acccacagcatatatgtttt

SEQ ID NO: 9674 - DNA, 20 bp, Homo sapiens
cgggttctggcattctaagg

SEQ ID NO: 9675 - DNA, 19 bp, Homo sapiens
aggaaatcatgggcaaaat

SEQ ID NO: 9676 - DNA, 22 bp, Homo sapiens
aaggctggtcttcacggtagcc

SEQ ID NO: 9677 - DNA, 22 bp, Homo sapiens
ttaaggcttccagtccttgggc

SEQ ID NO: 9678 - DNA, 24 bp, Homo sapiens
tagtttttgtttttagctgttgca

SEQ ID NO: 9679 - DNA, 22 bp, Homo sapiens
acataccagcataggagtcaag

SEQ ID NO: 9680 - DNA, 21 bp, Homo sapiens
gctcagaagcttcaccattat

SEQ ID NO: 9681 - DNA, 20 bp, Homo sapiens
tcaaatcactgtatccgttg

SEQ ID NO: 9682 - DNA, 23 bp, Homo sapiens
tgattttatccaggtggttattg

SEQ ID NO: 9683 - DNA, 21 bp, Homo sapiens
gaataagtcctttcaccacac

SEQ ID NO: 9684 - DNA, 20 bp, Homo sapiens
ctgacgagggggaggagaac

SEQ ID NO: 9685 - DNA, 24 bp, Homo sapiens
ggcgtattttagggactcaataaa

SEQ ID NO: 9686 - DNA, 22 bp, Homo sapiens
tgttcagctcagacctgtcacc

SEQ ID NO: 9687 - DNA, 20 bp, Homo sapiens
gatgggcacaattttgtctt

SEQ ID NO: 9688 - DNA, 22 bp, Homo sapiens
gtcagcatctggcgaccctatc

SEQ ID NO: 9689 - DNA, 18 bp, Homo sapiens
aggagaaaggggaccaat

SEQ ID NO: 9690 - DNA, 21 bp, Homo sapiens
ccagattgtaactgaagttcc

SEQ ID NO: 9691 - DNA, 22 bp, Homo sapiens
tttccaagcctagagaaagact

SEQ ID NO: 9692 - DNA, 18 bp, Homo sapiens
actccattgcacctgaaa

SEQ ID NO: 9693 - DNA, 23 bp, Homo sapiens
tcaaatgtgccattggaaagggg

SEQ ID NO: 9694 - DNA, 26 bp, Homo sapiens
aatgcataaacacttacctatttttc

SEQ ID NO: 9695 - DNA, 26 bp, Homo sapiens
ttattatgcttttttcttctaggaac

SEQ ID NO: 9696 - DNA, 21 bp, Homo sapiens
cccaaaacatatttcggaagt

SEQ ID NO: 9697 - DNA, 21 bp, Homo sapiens
aggtccagggtggtctagcta

SEQ ID NO: 9698 - DNA, 23 bp, Homo sapiens
tccaactctatcgttttataatt

SEQ ID NO: 9699 - DNA, 19 bp, Homo sapiens
cgtgagtctaaaacccgag

SEQ ID NO: 9700 - DNA, 20 bp, Homo sapiens
atgtcagtggttattaccac

SEQ ID NO: 9701 - DNA, 22 bp, Homo sapiens
gtcacctctgaatcccttaagt

SEQ ID NO: 9702 - DNA, 21 bp, Homo sapiens
cctgcttctgtttctgtactg

SEQ ID NO: 9703 - DNA, 23 bp, Homo sapiens
tgtaaagttacagctgttagtcc

SEQ ID NO: 9704 - DNA, 18 bp, Homo sapiens
gtccatctgcatgcaaac

SEQ ID NO: 9705 - DNA, 22 bp, Homo sapiens
aaatgtttagggtgactgtggt

SEQ ID NO: 9706 - DNA, 17 bp, Homo sapiens
tcctggaacatgacctg

SEQ ID NO: 9707 - DNA, 24 bp, Homo sapiens
ttttgtgaaagctggcctggaaac

SEQ ID NO: 9708 - DNA, 24 bp, Homo sapiens
ctgttttgttttaattctgaaact

SEQ ID NO: 9709 - DNA, 24 bp, Homo sapiens
cacagtgcagttttctcagtaccc

SEQ ID NO: 9710 - DNA, 24 bp, Homo sapiens
ggccttatcaattattcttctact

SEQ ID NO: 9711 - DNA, 21 bp, Homo sapiens
cagcctttcgtactttttctc

SEQ ID NO: 9712 - DNA, 24 bp, Homo sapiens
attcatggagtagcctttgacact

SEQ ID NO: 9713 - DNA, 22 bp, Homo sapiens
cctgctaatacgctttcttttc

SEQ ID NO: 9714 - DNA, 24 bp, Homo sapiens
caagtacattcagtaacttggctg

SEQ ID NO: 9715 - DNA, 17 bp, Homo sapiens
ggcaaacaccactttgc

SEQ ID NO: 9716 - DNA, 24 bp, Homo sapiens
gttattgttgctgttgttgtacag

SEQ ID NO: 9717 - DNA, 24 bp, Homo sapiens
gggagacaaattcaagtaaaatat

SEQ ID NO: 9718 - DNA, 23 bp, Homo sapiens
agaggttatgtctctcagaaaag

SEQ ID NO: 9719 - DNA, 23 bp, Homo sapiens
acgctgtgctctcagagagcaag

SEQ ID NO: 9720 - DNA, 20 bp, Homo sapiens
aagagaactcagagatgtgc

SEQ ID NO: 9721 - DNA, 20 bp, Homo sapiens
caaactgcagttttttgtag

SEQ ID NO: 9722 - DNA, 23 bp, Homo sapiens
gggaggattcaggaataaactag

SEQ ID NO: 9723 - DNA, 21 bp, Homo sapiens
tctgttattcaacatatgttc

SEQ ID NO: 9724 - DNA, 16 bp, Homo sapiens
ccctcctgggagtggt

SEQ ID NO: 9725 - DNA, 21 bp, Homo sapiens
attcttggagactggctcacc

SEQ ID NO: 9726 - DNA, 16 bp, Homo sapiens
ctggggaccacgatgg

SEQ ID NO: 9727 - DNA, 23 bp, Homo sapiens
acagcaagtagtttccatcacag

SEQ ID NO: 9728 - DNA, 19 bp, Homo sapiens
taacagcatctggaagtgg

SEQ ID NO: 9729 - DNA, 23 bp, Homo sapiens
acagaaagagcaatgagtctttt

SEQ ID NO: 9730 - DNA, 21 bp, Homo sapiens
accccaatatcaatctgcttg

SEQ ID NO: 9731 - DNA, 17 bp, Homo sapiens
acaccaggctgaatgcc

SEQ ID NO: 9732 - DNA, 23 bp, Homo sapiens
gcagaaatgattcttgtaagttt

SEQ ID NO: 9733 - DNA, 16 bp, Homo sapiens
agaatccgggctccac

SEQ ID NO: 9734 - DNA, 28 bp, Homo sapiens
aatattaaatgctatatttataggaggc

SEQ ID NO: 9735 - DNA, 26 bp, Homo sapiens
agaagttgtgggatttttaaaaattt

SEQ ID NO: 9736 - DNA, 23 bp, Homo sapiens
tgtgctaataggattaggctatc

SEQ ID NO: 9737 - DNA, 23 bp, Homo sapiens
tgtgtaaaaatagagaatggcag

SEQ ID NO: 9738 - DNA, 16 bp, Homo sapiens
tgcctctacaccccgg

SEQ ID NO: 9739 - DNA, 24 bp, Homo sapiens
ctataattgcaatgtcagggtacc

SEQ ID NO: 9740 - DNA, 19 bp, Homo sapiens
tggaagtctccaatggaag

SEQ ID NO: 9741 - DNA, 19 bp, Homo sapiens
aggacataagattgcagac

SEQ ID NO: 9742 - DNA, 20 bp, Homo sapiens
acagatttgcacaataattc

SEQ ID NO: 9743 - DNA, 23 bp, Homo sapiens
taaggaactgggccagatgaatc

SEQ ID NO: 9744 - DNA, 22 bp, Homo sapiens
aatgttaacctctgttatttat

SEQ ID NO: 9745 - DNA, 23 bp, Homo sapiens
gttggtctttcattgtcatcttc

SEQ ID NO: 9746 - DNA, 18 bp, Homo sapiens
tggggaaatcaatttccc

SEQ ID NO: 9747 - DNA, 22 bp, Homo sapiens
cccaaatgtggtattagggatt

SEQ ID NO: 9748 - DNA, 19 bp, Homo sapiens
gcgtgctattctactggga

SEQ ID NO: 9749 - DNA, 22 bp, Homo sapiens
tgcattacttgttgattttaga

SEQ ID NO: 9750 - DNA, 25 bp, Homo sapiens
taatgaagctatgttataatgtttc

SEQ ID NO: 9751 - DNA, 20 bp, Homo sapiens
ccttcccactgtattttggg

SEQ ID NO: 9752 - DNA, 21 bp, Homo sapiens
tggatatatcactaaaagtac

SEQ ID NO: 9753 - DNA, 17 bp, Homo sapiens
acaacgatgagtcctcc

SEQ ID NO: 9754 - DNA, 16 bp, Homo sapiens
tcagaggagtcctggt

SEQ ID NO: 9755 - DNA, 24 bp, Homo sapiens
tttcttaggagttaagttgctttc

SEQ ID NO: 9756 - DNA, 23 bp, Homo sapiens
taataaattgtaaatttgtgtgc

SEQ ID NO: 9757 - DNA, 23 bp, Homo sapiens
aacaagctgtgttatataatggc

SEQ ID NO: 9758 - DNA, 22 bp, Homo sapiens
tccatttgcattgttagctctg

SEQ ID NO: 9759 - DNA, 27 bp, Homo sapiens
aagaataattttttttttcttagcatc

SEQ ID NO: 9760 - DNA, 26 bp, Homo sapiens
aaacacttaacttactttttggaaag

SEQ ID NO: 9761 - DNA, 25 bp, Homo sapiens
gtcgttattaaaacttacacttcac

SEQ ID NO: 9762 - DNA, 21 bp, Homo sapiens
agagcagcaagtattatgcca

SEQ ID NO: 9763 - DNA, 20 bp, Homo sapiens
aggtctgttgtcattgctaa

SEQ ID NO: 9764 - DNA, 22 bp, Homo sapiens
acatatccattgttaatggagt

SEQ ID NO: 9765 - DNA, 19 bp, Homo sapiens
tctttgccctttttgaaac

SEQ ID NO: 9766 - DNA, 22 bp, Homo sapiens
acattttttacatcatggtaag

SEQ ID NO: 9767 - DNA, 21 bp, Homo sapiens
ccaaggaaatattgaccaggt

SEQ ID NO: 9768 - DNA, 22 bp, Homo sapiens
ctatatgcctaattaacattgc

SEQ ID NO: 9769 - DNA, 20 bp, Homo sapiens
aggtaatgtaatttttctcc

SEQ ID NO: 9770 - DNA, 23 bp, Homo sapiens
agatggaataaaacttacgtttc

SEQ ID NO: 9771 - DNA, 21 bp, Homo sapiens
aattttgctacaatgtaattt

SEQ ID NO: 9772 - DNA, 17 bp, Homo sapiens
tggccacaacagcaacc

SEQ ID NO: 9773 - DNA, 29 bp, Homo sapiens
aaaaataaacaaattctcttattattaaa

SEQ ID NO: 9774 - DNA, 28 bp, Homo sapiens
agacagtgtaaaagtattaattttgaag

SEQ ID NO: 9775 - DNA, 23 bp, Homo sapiens
tcactttcagctttgaagatctt

SEQ ID NO: 9776 - DNA, 22 bp, Homo sapiens
aggtacaatatttgtgtttttc

SEQ ID NO: 9777 - DNA, 22 bp, Homo sapiens
aagtaaataccaaacaaacaga

SEQ ID NO: 9778 - DNA, 21 bp, Homo sapiens
gtgaaaaaaaatacaatgccg

SEQ ID NO: 9779 - DNA, 21 bp, Homo sapiens
gccaaatgggttaaaagtacc

SEQ ID NO: 9780 - DNA, 22 bp, Homo sapiens
tggttatatctcattggtaaca

SEQ ID NO: 9781 - DNA, 17 bp, Homo sapiens
attctgatccttgccat

SEQ ID NO: 9782 - DNA, 24 bp, Homo sapiens
acctgaccaaaaaatataaacaaa

SEQ ID NO: 9783 - DNA, 22 bp, Homo sapiens
tgattaaactgcagataaacat

SEQ ID NO: 9784 - DNA, 21 bp, Homo sapiens
tccaacaattacaaagctcat

SEQ ID NO: 9785 - DNA, 19 bp, Homo sapiens
agtttttcagacttgtttt

SEQ ID NO: 9786 - DNA, 26 bp, Homo sapiens
ctatctaattaccttagtatggcaag

SEQ ID NO: 9787 - DNA, 29 bp, Homo sapiens
aaatgtctttttcatttttttatcctatg

SEQ ID NO: 9788 - DNA, 21 bp, Homo sapiens
gcgctaagtaaaactggtgtt

SEQ ID NO: 9789 - DNA, 24 bp, Homo sapiens
gagaatgcatgatatagaaggatg

SEQ ID NO: 9790 - DNA, 21 bp, Homo sapiens
acctttttctccaaggaatgt

SEQ ID NO: 9791 - DNA, 23 bp, Homo sapiens
gtgtagcctcattcctggattaa

SEQ ID NO: 9792 - DNA, 19 bp, Homo sapiens
cccttcaggaaagaacaag

SEQ ID NO: 9793 - DNA, 18 bp, Homo sapiens
acttgggttacactgaat

SEQ ID NO: 9794 - DNA, 24 bp, Homo sapiens
tttactttggattattgtgtcttg

SEQ ID NO: 9795 - DNA, 22 bp, Homo sapiens
agtaatgacatgtgaagaacac

SEQ ID NO: 9796 - DNA, 28 bp, Homo sapiens
atttcttcttctgtataaagtcaaattg

SEQ ID NO: 9797 - DNA, 23 bp, Homo sapiens
atgcttatgtttgccatggaact

SEQ ID NO: 9798 - DNA, 21 bp, Homo sapiens
gctttgtgtgatcataaagag

SEQ ID NO: 9799 - DNA, 22 bp, Homo sapiens
tctaacaactgctacatttcct

SEQ ID NO: 9800 - DNA, 17 bp, Homo sapiens
gttgggaattggagcag

SEQ ID NO: 9801 - DNA, 25 bp, Homo sapiens
atatttgtttacaatgagaaacatg

SEQ ID NO: 9802 - DNA, 18 bp, Homo sapiens
atgcatatctccacatcc

SEQ ID NO: 9803 - DNA, 24 bp, Homo sapiens
gggatgagaccagttaaaagtgag

SEQ ID NO: 9804 - DNA, 18 bp, Homo sapiens
gaccaagaaaagagcctc

SEQ ID NO: 9805 - DNA, 20 bp, Homo sapiens
acatacaaccttacctgctc

SEQ ID NO: 9806 - DNA, 19 bp, Homo sapiens
tgcttcatatagtcttggc

SEQ ID NO: 9807 - DNA, 22 bp, Homo sapiens
ttattatgagaagctgggatgt

SEQ ID NO: 9808 - DNA, 20 bp, Homo sapiens
actgtacctttttctgcaga

SEQ ID NO: 9809 - DNA, 22 bp, Homo sapiens
tcaagatggagacaataagagg

SEQ ID NO: 9810 - DNA, 21 bp, Homo sapiens
cttacatggtatgacaaatgt

SEQ ID NO: 9811 - DNA, 19 bp, Homo sapiens
gtgaagctaccatttggcc

SEQ ID NO: 9812 - DNA, 24 bp, Homo sapiens
tcccttactataagtaatagtgtt

SEQ ID NO: 9813 - DNA, 20 bp, Homo sapiens
tgtatcagctgtcggatcaa

SEQ ID NO: 9814 - DNA, 21 bp, Homo sapiens
acttataagcctcttttaagg

SEQ ID NO: 9815 - DNA, 21 bp, Homo sapiens
acctagtttgcttcttcacag

SEQ ID NO: 9816 - DNA, 22 bp, Homo sapiens
gaataccaaagagactctttag

SEQ ID NO: 9817 - DNA, 17 bp, Homo sapiens
tgccacggttcagaaaa

SEQ ID NO: 9818 - DNA, 21 bp, Homo sapiens
ataagggaaaaatagattgaa

SEQ ID NO: 9819 - DNA, 22 bp, Homo sapiens
ctcattgcctcataaattaggc

SEQ ID NO: 9820 - DNA, 19 bp, Homo sapiens
tcactacagaaaaccctgt

SEQ ID NO: 9821 - DNA, 19 bp, Homo sapiens
gtttctcagcagtgtaggt

SEQ ID NO: 9822 - DNA, 19 bp, Homo sapiens
aacacggtaaatttatgtc

SEQ ID NO: 9823 - DNA, 22 bp, Homo sapiens
gacattttagagactgaagagc

SEQ ID NO: 9824 - DNA, 22 bp, Homo sapiens
gaggcaatgaaagtaaatgaag

SEQ ID NO: 9825 - DNA, 23 bp, Homo sapiens
tccacatgtaatgagataaattt

SEQ ID NO: 9826 - DNA, 20 bp, Homo sapiens
tgtatttctaatacttacct

SEQ ID NO: 9827 - DNA, 19 bp, Homo sapiens
acctctatcacatcatttt

SEQ ID NO: 9828 - DNA, 18 bp, Homo sapiens
agatctccatcggctctt

SEQ ID NO: 9829 - DNA, 22 bp, Homo sapiens
tggaaattcaaaaaaataatgc

SEQ ID NO: 9830 - DNA, 21 bp, Homo sapiens
ttaggcgacacacctggaagc

SEQ ID NO: 9831 - DNA, 24 bp, Homo sapiens
cacacaacccagccaccggctccc

SEQ ID NO: 9832 - DNA, 20 bp, Homo sapiens
tgtagggagtgtaactatgg

SEQ ID NO: 9833 - DNA, 16 bp, Homo sapiens
cgggtgacgcccggaa

SEQ ID NO: 9834 - DNA, 16 bp, Homo sapiens
gcttcacgccacccgg

SEQ ID NO: 9835 - DNA, 17 bp, Homo sapiens
caccaggatccgctcac

SEQ ID NO: 9836 - DNA, 16 bp, Homo sapiens
ttccgcctacgtctga

SEQ ID NO: 9837 - DNA, 24 bp, Homo sapiens
ttcactttcgttccgcaggccggc

SEQ ID NO: 9838 - DNA, 24 bp, Homo sapiens
agaatatgggggaaacactaggct

SEQ ID NO: 9839 - DNA, 19 bp, Homo sapiens
tggtaacatcggaaaggtg

SEQ ID NO: 9840 - DNA, 24 bp, Homo sapiens
tggctaacatgtttttctttcttc

SEQ ID NO: 9841 - DNA, 23 bp, Homo sapiens
attaaacggctgagcacatggga

SEQ ID NO: 9842 - DNA, 22 bp, Homo sapiens
tccagtgttttctccagttaca

SEQ ID NO: 9843 - DNA, 20 bp, Homo sapiens
tctttaagccatctgacagc

SEQ ID NO: 9844 - DNA, 21 bp, Homo sapiens
ccagcatttcctaaaaggcct

SEQ ID NO: 9845 - DNA, 23 bp, Homo sapiens
ctttgctctttatcagaaagtcc

SEQ ID NO: 9846 - DNA, 20 bp, Homo sapiens
actcatctcggatcaggaat

SEQ ID NO: 9847 - DNA, 17 bp, Homo sapiens
ctaaacaggccctttgc

SEQ ID NO: 9848 - DNA, 20 bp, Homo sapiens
ttgtacaaagtggatgctgc

SEQ ID NO: 9849 - DNA, 17 bp, Homo sapiens
gcacctgggctaactcc

SEQ ID NO: 9850 - DNA, 21 bp, Homo sapiens
accttaaaggaccacacagaa

SEQ ID NO: 9851 - DNA, 21 bp, Homo sapiens
aaatgctagtggttttccttt

SEQ ID NO: 9852 - DNA, 20 bp, Homo sapiens
tactggtttaatccaagggc

SEQ ID NO: 9853 - DNA, 23 bp, Homo sapiens
atacagagaatttgtaaaaatat

SEQ ID NO: 9854 - DNA, 19 bp, Homo sapiens
tcacagcaggaaaaaggag

SEQ ID NO: 9855 - DNA, 18 bp, Homo sapiens
gaaaaaagtcgccattcg

SEQ ID NO: 9856 - DNA, 21 bp, Homo sapiens
ccacagagaacaagaacaatc

SEQ ID NO: 9857 - DNA, 23 bp, Homo sapiens
ggcaattttttcaacttaacaaa

SEQ ID NO: 9858 - DNA, 17 bp, Homo sapiens
gggcccagacaatccta

SEQ ID NO: 9859 - DNA, 21 bp, Homo sapiens
gccattttaggacatgttgaa

SEQ ID NO: 9860 - DNA, 20 bp, Homo sapiens
taatttgtgccctctctcag

SEQ ID NO: 9861 - DNA, 24 bp, Homo sapiens
aggtagtctaatattttactcagt

SEQ ID NO: 9862 - DNA, 20 bp, Homo sapiens
tcagccatacttaccaccac

SEQ ID NO: 9863 - DNA, 24 bp, Homo sapiens
gaattagaagatctctttccaccg

SEQ ID NO: 9864 - DNA, 21 bp, Homo sapiens
ctgtgccaattcctactaaat

SEQ ID NO: 9865 - DNA, 20 bp, Homo sapiens
agaatattttggaaaaatgc

SEQ ID NO: 9866 - DNA, 18 bp, Homo sapiens
tgcagaactcccttcctt

SEQ ID NO: 9867 - DNA, 23 bp, Homo sapiens
cccttcttcttgtactagtggtg

SEQ ID NO: 9868 - DNA, 21 bp, Homo sapiens
tcgggttttatcacctaagag

SEQ ID NO: 9869 - DNA, 22 bp, Homo sapiens
tggagagaagctcagtaatatg

SEQ ID NO: 9870 - DNA, 18 bp, Homo sapiens
ctagtaggagatggcctg

SEQ ID NO: 9871 - DNA, 16 bp, Homo sapiens
ctctaggaactggctg

SEQ ID NO: 9872 - DNA, 19 bp, Homo sapiens
gctccttcacacaacagaa

SEQ ID NO: 9873 - DNA, 21 bp, Homo sapiens
aactgtatgttttaggatcac

SEQ ID NO: 9874 - DNA, 24 bp, Homo sapiens
aatagtacattgttatgaaataga

SEQ ID NO: 9875 - DNA, 18 bp, Homo sapiens
tgaatgcatacatcaggc

SEQ ID NO: 9876 - DNA, 22 bp, Homo sapiens
gcaaatatctgctgaatgaaca

SEQ ID NO: 9877 - DNA, 21 bp, Homo sapiens
ggaccacaaatgaagctattc

SEQ ID NO: 9878 - DNA, 21 bp, Homo sapiens
acattcatatcttctagggag

SEQ ID NO: 9879 - DNA, 19 bp, Homo sapiens
tgtcagcaacagcaaactc

SEQ ID NO: 9880 - DNA, 22 bp, Homo sapiens
aggagtgaccaggttgactgtg

SEQ ID NO: 9881 - DNA, 17 bp, Homo sapiens
ttacctgcagctcatct

SEQ ID NO: 9882 - DNA, 23 bp, Homo sapiens
aatggtcaatgtagttgagaaag

SEQ ID NO: 9883 - DNA, 27 bp, Homo sapiens
caaaaacacaacattggaaatttttat

SEQ ID NO: 9884 - DNA, 17 bp, Homo sapiens
tcaggtgtgggtcagtc

SEQ ID NO: 9885 - DNA, 21 bp, Homo sapiens
agccaacatgaatgatatttc

SEQ ID NO: 9886 - DNA, 21 bp, Homo sapiens
actactgccaccagcaggagg

SEQ ID NO: 9887 - DNA, 19 bp, Homo sapiens
gccatctcgattatacccc

SEQ ID NO: 9888 - DNA, 20 bp, Homo sapiens
cttggcatccagggcttagg

SEQ ID NO: 9889 - DNA, 19 bp, Homo sapiens
ttgtatccttcgagctggc

SEQ ID NO: 9890 - DNA, 20 bp, Homo sapiens
tctgagcattgactagtttt

SEQ ID NO: 9891 - DNA, 20 bp, Homo sapiens
gcttacctttggtttccaga

SEQ ID NO: 9892 - DNA, 19 bp, Homo sapiens
ttagggtatcaaaaggggt

SEQ ID NO: 9893 - DNA, 20 bp, Homo sapiens
tcctgtcttctaatgtacac

SEQ ID NO: 9894 - DNA, 19 bp, Homo sapiens
ggagacttgattgtgccag

SEQ ID NO: 9895 - DNA, 24 bp, Homo sapiens
gatttttaaaactatcatcttcac

SEQ ID NO: 9896 - DNA, 24 bp, Homo sapiens
cactgaaattactccgcaaacgtt

SEQ ID NO: 9897 - DNA, 18 bp, Homo sapiens
gatcccctctccacttcg

SEQ ID NO: 9898 - DNA, 19 bp, Homo sapiens
tctcactcttgtcaattgc

SEQ ID NO: 9899 - DNA, 17 bp, Homo sapiens
ccccactggcaagcatt

SEQ ID NO: 9900 - DNA, 24 bp, Homo sapiens
gtatcagcgtccctgtaaaaattt

SEQ ID NO: 9901 - DNA, 24 bp, Homo sapiens
gctctaacacactttcctgaatga

SEQ ID NO: 9902 - DNA, 24 bp, Homo sapiens
ttttcgataggtaattcgtatttc

SEQ ID NO: 9903 - DNA, 20 bp, Homo sapiens
tttgttccagaagtggaatc

SEQ ID NO: 9904 - DNA, 24 bp, Homo sapiens
ataaaatgaaagatttccaggacc

SEQ ID NO: 9905 - DNA, 24 bp, Homo sapiens
ctgcttttaaaagcttttaacaag

SEQ ID NO: 9906 - DNA, 21 bp, Homo sapiens
aaagtttggatgtggaatctc

SEQ ID NO: 9907 - DNA, 23 bp, Homo sapiens
aaatactttatgaaatgatatgt

SEQ ID NO: 9908 - DNA, 19 bp, Homo sapiens
caccccacagtccgggaac

SEQ ID NO: 9909 - DNA, 19 bp, Homo sapiens
gacaagagcaccatacaat

SEQ ID NO: 9910 - DNA, 24 bp, Homo sapiens
ctgtccccaggactagcagcagac

SEQ ID NO: 9911 - DNA, 22 bp, Homo sapiens
acttttgccattcatatctaac

SEQ ID NO: 9912 - DNA, 17 bp, Homo sapiens
caggacagcttggctag

SEQ ID NO: 9913 - DNA, 23 bp, Homo sapiens
actgcagcagagttcttgctttc

SEQ ID NO: 9914 - DNA, 16 bp, Homo sapiens
ccttgtcccttttgcc

SEQ ID NO: 9915 - DNA, 17 bp, Homo sapiens
gccgcgagcagcggaca

SEQ ID NO: 9916 - DNA, 21 bp, Homo sapiens
gccctagatagcctgagaaag

SEQ ID NO: 9917 - DNA, 24 bp, Homo sapiens
tgactttgaacatgctggtgccgc

SEQ ID NO: 9918 - DNA, 21 bp, Homo sapiens
ggcatgaaagcactgatatgc

SEQ ID NO: 9919 - DNA, 20 bp, Homo sapiens
agctattcaaagtgttcacc

SEQ ID NO: 9920 - DNA, 22 bp, Homo sapiens
acagtagaagttgaagaccatc

SEQ ID NO: 9921 - DNA, 23 bp, Homo sapiens
ttgagtatagtcattcacttata

SEQ ID NO: 9922 - DNA, 18 bp, Homo sapiens
ctcttgtccttatcccgg

SEQ ID NO: 9923 - DNA, 19 bp, Homo sapiens
ttcgtaatttttgtgcagc

SEQ ID NO: 9924 - DNA, 20 bp, Homo sapiens
tgaaaacaaagtatccagaa

SEQ ID NO: 9925 - DNA, 21 bp, Homo sapiens
aaattatctacctctatgtgc

SEQ ID NO: 9926 - DNA, 23 bp, Homo sapiens
tggtaaagccacaaaatattatt

SEQ ID NO: 9927 - DNA, 21 bp, Homo sapiens
ttatactatttatccccggga

SEQ ID NO: 9928 - DNA, 24 bp, Homo sapiens
ctaatacagtaatatgcttaatat

SEQ ID NO: 9929 - DNA, 16 bp, Homo sapiens
cctgcagggcctgcac

SEQ ID NO: 9930 - DNA, 22 bp, Homo sapiens
tactctaaagcacagtggatat

SEQ ID NO: 9931 - DNA, 18 bp, Homo sapiens
acacacggatgtcctttt

SEQ ID NO: 9932 - DNA, 24 bp, Homo sapiens
gggttatattaatcccagaatttt

SEQ ID NO: 9933 - DNA, 17 bp, Homo sapiens
ggatcaaggcaagcccc

SEQ ID NO: 9934 - DNA, 24 bp, Homo sapiens
agcagatgttgtaatagttggtgc

SEQ ID NO: 9935 - DNA, 23 bp, Homo sapiens
ataaaaaacaatttttcataccc

SEQ ID NO: 9936 - DNA, 19 bp, Homo sapiens
gctgtggcacatgaaaagg

SEQ ID NO: 9937 - DNA, 20 bp, Homo sapiens
tattccagtaatttgggaac

SEQ ID NO: 9938 - DNA, 20 bp, Homo sapiens
agctcatactctctcagggg

SEQ ID NO: 9939 - DNA, 21 bp, Homo sapiens
acaagagtgaaactccatctc

SEQ ID NO: 9940 - DNA, 19 bp, Homo sapiens
agtgttaagtggagcctag

SEQ ID NO: 9941 - DNA, 24 bp, Homo sapiens
gacaagttttataaaggaaatgcc

SEQ ID NO: 9942 - DNA, 18 bp, Homo sapiens
tggcacaggaattctgta

SEQ ID NO: 9943 - DNA, 21 bp, Homo sapiens
cagagtacattttatagtttt

SEQ ID NO: 9944 - DNA, 18 bp, Homo sapiens
agttccttccagctgtgg

SEQ ID NO: 9945 - DNA, 22 bp, Homo sapiens
acatttctttttcttcttttat

SEQ ID NO: 9946 - DNA, 21 bp, Homo sapiens
tccttcaaatatctgggtctc

SEQ ID NO: 9947 - DNA, 24 bp, Homo sapiens
tggaattttaacagagaaatacag

SEQ ID NO: 9948 - DNA, 18 bp, Homo sapiens
actgagttctagtcctgc

SEQ ID NO: 9949 - DNA, 24 bp, Homo sapiens
ttgtaatgtaataaattagaactc

SEQ ID NO: 9950 - DNA, 17 bp, Homo sapiens
tgtcccaagcgtacaat

SEQ ID NO: 9951 - DNA, 23 bp, Homo sapiens
accatcaatgtagcacttatgta

SEQ ID NO: 9952 - DNA, 20 bp, Homo sapiens
aaccagggtatacttcaaca

SEQ ID NO: 9953 - DNA, 20 bp, Homo sapiens
tgtcttatcaataaaaagtc

SEQ ID NO: 9954 - DNA, 28 bp, Homo sapiens
ttaaaaaaagagagttcctataaatatt

SEQ ID NO: 9955 - DNA, 22 bp, Homo sapiens
ggcttccaatgaataatcatgg

SEQ ID NO: 9956 - DNA, 22 bp, Homo sapiens
aaatcccatggcttttaaaaaa

SEQ ID NO: 9957 - DNA, 19 bp, Homo sapiens
gcagaagcccttggtgttg

SEQ ID NO: 9958 - DNA, 22 bp, Homo sapiens
gaattcaagtactctttggatt

SEQ ID NO: 9959 - DNA, 20 bp, Homo sapiens
tgtctctttattacctgaac

SEQ ID NO: 9960 - DNA, 20 bp, Homo sapiens
gtgcaccatccttttgtatc

SEQ ID NO: 9961 - DNA, 20 bp, Homo sapiens
ccttctaagaaacctaaggc

SEQ ID NO: 9962 - DNA, 21 bp, Homo sapiens
agttctttctgttgtttgtcg

SEQ ID NO: 9963 - DNA, 23 bp, Homo sapiens
aggtattaataaatttgtttttt

SEQ ID NO: 9964 - DNA, 22 bp, Homo sapiens
gaagcccagctaattttgtttt

SEQ ID NO: 9965 - DNA, 21 bp, Homo sapiens
aaggaattgccactaacgatg

SEQ ID NO: 9966 - DNA, 16 bp, Homo sapiens
tcctcctgtttcagcc

SEQ ID NO: 9967 - DNA, 28 bp, Homo sapiens
tatatattatatatttactatgtgattc

SEQ ID NO: 9968 - DNA, 18 bp, Homo sapiens
agatgtccatggcaacct

SEQ ID NO: 9969 - DNA, 24 bp, Homo sapiens
tcttctacatctgaatcatagttc

SEQ ID NO: 9970 - DNA, 20 bp, Homo sapiens
aggtttgaggttcacaattt

SEQ ID NO: 9971 - DNA, 22 bp, Homo sapiens
ttgccatttaacatgtttttgc

SEQ ID NO: 9972 - DNA, 20 bp, Homo sapiens
aaattccatctttcaaaatt

SEQ ID NO: 9973 - DNA, 22 bp, Homo sapiens
gctaaagtcacaatttttgcag

SEQ ID NO: 9974 - DNA, 24 bp, Homo sapiens
caatgaaaaaatataactaaaatt

SEQ ID NO: 9975 - DNA, 19 bp, Homo sapiens
agaagtttgatttgagagc

SEQ ID NO: 9976 - DNA, 20 bp, Homo sapiens
cccttgaaaaatatcgcaaa

SEQ ID NO: 9977 - DNA, 23 bp, Homo sapiens
tgaagtaattttgttgtattctt

SEQ ID NO: 9978 - DNA, 17 bp, Homo sapiens
tccaagggccaaccaac

SEQ ID NO: 9979 - DNA, 20 bp, Homo sapiens
aaacctggcaagttttatgc

SEQ ID NO: 9980 - DNA, 20 bp, Homo sapiens
gctactaggggttcaccttc

SEQ ID NO: 9981 - DNA, 21 bp, Homo sapiens
gcaggacttttttgtttgctt

SEQ ID NO: 9982 - DNA, 23 bp, Homo sapiens
tggtaatataactctagcagcag

SEQ ID NO: 9983 - DNA, 20 bp, Homo sapiens
gggagagtagatcacactgt

SEQ ID NO: 9984 - DNA, 24 bp, Homo sapiens
agctttaaataaaaagcattttac

SEQ ID NO: 9985 - DNA, 23 bp, Homo sapiens
cctctatcatttgaatgaaggtg

SEQ ID NO: 9986 - DNA, 20 bp, Homo sapiens
agtagacttaatgacacagc

SEQ ID NO: 9987 - DNA, 19 bp, Homo sapiens
acatttggattactgcaca

SEQ ID NO: 9988 - DNA, 18 bp, Homo sapiens
ggtgtttccacctttgga

SEQ ID NO: 9989 - DNA, 23 bp, Homo sapiens
tttaacctacatgttttctgata

SEQ ID NO: 9990 - DNA, 16 bp, Homo sapiens
gagagctctggctccg

SEQ ID NO: 9991 - DNA, 23 bp, Homo sapiens
aatgtctaattaaatataagtgt

SEQ ID NO: 9992 - DNA, 21 bp, Homo sapiens
atttataatacagaaacaagg

SEQ ID NO: 9993 - DNA, 21 bp, Homo sapiens
tgagtccatttagagagttcc

SEQ ID NO: 9994 - DNA, 24 bp, Homo sapiens
acttttcctattccaatattgttt

SEQ ID NO: 9995 - DNA, 19 bp, Homo sapiens
aggtggaaaaaggattgca

SEQ ID NO: 9996 - DNA, 21 bp, Homo sapiens
aattcatggtgtaattgaagt

SEQ ID NO: 9997 - DNA, 22 bp, Homo sapiens
gttttattcctttgctcaattc

SEQ ID NO: 9998 - DNA, 22 bp, Homo sapiens
cctttgatcttgggaacattca

SEQ ID NO: 9999 - DNA, 23 bp, Homo sapiens
agaatactttaagactgatttgg

SEQ ID NO: 10000 - DNA, 20 bp, Homo sapiens
tgattaaaaatagattctgc

SEQ ID NO: 10001 - DNA, 24 bp, Homo sapiens
tgtattctgaatctttgtttcctc

SEQ ID NO: 10002 - DNA, 22 bp, Homo sapiens
tcttttgtatactttacacagg

SEQ ID NO: 10003 - DNA, 23 bp, Homo sapiens
tactaattggttgtagtcctggt

SEQ ID NO: 10004 - DNA, 21 bp, Homo sapiens
gtgacagatgcaatacaaatc

SEQ ID NO: 10005 - DNA, 20 bp, Homo sapiens
aagtggaattttagcagcag

SEQ ID NO: 10006 - DNA, 20 bp, Homo sapiens
tgagaataagccatgtagtt

SEQ ID NO: 10007 - DNA, 24 bp, Homo sapiens
ctccaatcaaagacaataggtaag

SEQ ID NO: 10008 - DNA, 21 bp, Homo sapiens
agttcttcaaattgtcctcat

SEQ ID NO: 10009 - DNA, 23 bp, Homo sapiens
gtgacagagcaagaccttgtctc

SEQ ID NO: 10010 - DNA, 16 bp, Homo sapiens
ggcaggacggtcttat

SEQ ID NO: 10011 - DNA, 23 bp, Homo sapiens
gcaaaatacttagcgtattttac

SEQ ID NO: 10012 - DNA, 21 bp, Homo sapiens
ccattcctctcaatatccagt

SEQ ID NO: 10013 - DNA, 24 bp, Homo sapiens
tttaataaaaggactccatgtaac

SEQ ID NO: 10014 - DNA, 22 bp, Homo sapiens
aatgatcatgtcactcatactc

SEQ ID NO: 10015 - DNA, 24 bp, Homo sapiens
atggaaagagctatattctgttag

SEQ ID NO: 10016 - DNA, 23 bp, Homo sapiens
gttgaaaacattaaaacaatcac

SEQ ID NO: 10017 - DNA, 22 bp, Homo sapiens
agggatgatttacactggaatc

SEQ ID NO: 10018 - DNA, 22 bp, Homo sapiens
tgactagccctcaagtaataat

SEQ ID NO: 10019 - DNA, 21 bp, Homo sapiens
cgttcaaagtcagaaccttca

SEQ ID NO: 10020 - DNA, 23 bp, Homo sapiens
aaatttagtgtctaagaacagta

SEQ ID NO: 10021 - DNA, 20 bp, Homo sapiens
tctgtccatcgggttttgga

SEQ ID NO: 10022 - DNA, 23 bp, Homo sapiens
tattttgaagtttttatacaaat

SEQ ID NO: 10023 - DNA, 19 bp, Homo sapiens
ccggctggtcatgttcatg

SEQ ID NO: 10024 - DNA, 23 bp, Homo sapiens
agcatttccctcaaaattgttga

SEQ ID NO: 10025 - DNA, 23 bp, Homo sapiens
cccatcatatatcgacagatttc

SEQ ID NO: 10026 - DNA, 24 bp, Homo sapiens
caaggattgcacacctattgagta

SEQ ID NO: 10027 - DNA, 24 bp, Homo sapiens
tgtttaaagcaaatatttaggaat

SEQ ID NO: 10028 - DNA, 19 bp, Homo sapiens
tgtggctctgagtggtact

SEQ ID NO: 10029 - DNA, 22 bp, Homo sapiens
ggaaggagatacagaaatcatt

SEQ ID NO: 10030 - DNA, 25 bp, Homo sapiens
gggatgacagtatacctgtaaatag

SEQ ID NO: 10031 - DNA, 24 bp, Homo sapiens
ccagtagttaaaagtatgtttcct

SEQ ID NO: 10032 - DNA, 20 bp, Homo sapiens
gttccacaggtacaaattca

SEQ ID NO: 10033 - DNA, 20 bp, Homo sapiens
tctctatgggtaagcattca

SEQ ID NO: 10034 - DNA, 21 bp, Homo sapiens
tcacatgttttacaatgtaca

SEQ ID NO: 10035 - DNA, 21 bp, Homo sapiens
tttccttaatttttacttttg

SEQ ID NO: 10036 - DNA, 18 bp, Homo sapiens
ggtcctcctccaccttca

SEQ ID NO: 10037 - DNA, 22 bp, Homo sapiens
acttttcaggagtttatgaatt

SEQ ID NO: 10038 - DNA, 17 bp, Homo sapiens
cgttagcttgccatact

SEQ ID NO: 10039 - DNA, 19 bp, Homo sapiens
aatgctcagaactgtgtac

SEQ ID NO: 10040 - DNA, 23 bp, Homo sapiens
cattttgtgactattctgttcag

SEQ ID NO: 10041 - DNA, 22 bp, Homo sapiens
agaatattaactgggtggtacc

SEQ ID NO: 10042 - DNA, 22 bp, Homo sapiens
cccgtaatttctttatgggaca

SEQ ID NO: 10043 - DNA, 23 bp, Homo sapiens
accacttgatataagaaaatcat

SEQ ID NO: 10044 - DNA, 18 bp, Homo sapiens
tgagaacactgtgaatgc

SEQ ID NO: 10045 - DNA, 22 bp, Homo sapiens
agcccatagttaagataacact

SEQ ID NO: 10046 - DNA, 23 bp, Homo sapiens
ttcttgtaagtcttagtgtcagt

SEQ ID NO: 10047 - DNA, 19 bp, Homo sapiens
aaatggtgtgggattctcc

SEQ ID NO: 10048 - DNA, 22 bp, Homo sapiens
atgcacctttttctcattgtag

SEQ ID NO: 10049 - DNA, 17 bp, Homo sapiens
acctctggagcctcagg

SEQ ID NO: 10050 - DNA, 18 bp, Homo sapiens
tcaacaactgagtcacac

SEQ ID NO: 10051 - DNA, 24 bp, Homo sapiens
aagtgtttattgccttgatttcca

SEQ ID NO: 10052 - DNA, 18 bp, Homo sapiens
agtacttggcgcttggtg

SEQ ID NO: 10053 - DNA, 24 bp, Homo sapiens
ccttgcctttatgagattaccacc

SEQ ID NO: 10054 - DNA, 18 bp, Homo sapiens
gtgattccgccgtgaaag

SEQ ID NO: 10055 - DNA, 24 bp, Homo sapiens
ccatgtactacatcacagaatgtg

SEQ ID NO: 10056 - DNA, 24 bp, Homo sapiens
ctttaaaaatctgtctcctcgatg

SEQ ID NO: 10057 - DNA, 21 bp, Homo sapiens
ggggacattactacggtcttc

SEQ ID NO: 10058 - DNA, 22 bp, Homo sapiens
tccagttgttaatgttaaattt

SEQ ID NO: 10059 - DNA, 21 bp, Homo sapiens
cccaagatgtttactcttcac

SEQ ID NO: 10060 - DNA, 19 bp, Homo sapiens
acaccatcacttctttctg

SEQ ID NO: 10061 - DNA, 21 bp, Homo sapiens
actcagaatcttgctaagaaa

SEQ ID NO: 10062 - DNA, 18 bp, Homo sapiens
cgctgctgtcctattcac

SEQ ID NO: 10063 - DNA, 22 bp, Homo sapiens
ttccttctttttggctttctgt

SEQ ID NO: 10064 - DNA, 26 bp, Homo sapiens
ttgttgattctgagaacatatcttac

SEQ ID NO: 10065 - DNA, 24 bp, Homo sapiens
ttcctattcattaatatgtatttt

SEQ ID NO: 10066 - DNA, 18 bp, Homo sapiens
agccttaaaaccacatcc

SEQ ID NO: 10067 - DNA, 16 bp, Homo sapiens
aaacactgccaagagt

SEQ ID NO: 10068 - DNA, 20 bp, Homo sapiens
actctacactgaaagaactt

SEQ ID NO: 10069 - DNA, 23 bp, Homo sapiens
agcaatgctcacaccaaataagc

SEQ ID NO: 10070 - DNA, 23 bp, Homo sapiens
ccattcaagaataagaattttgc

SEQ ID NO: 10071 - DNA, 23 bp, Homo sapiens
actcttggcaactgagctgttat

SEQ ID NO: 10072 - DNA, 22 bp, Homo sapiens
aaaagttgaaaggatgagtcag

SEQ ID NO: 10073 - DNA, 18 bp, Homo sapiens
gtgaaaaagtggcagtgg

SEQ ID NO: 10074 - DNA, 24 bp, Homo sapiens
tctggaaggtactcatgtcttctg

SEQ ID NO: 10075 - DNA, 19 bp, Homo sapiens
actcgaatgtcctgggact

SEQ ID NO: 10076 - DNA, 21 bp, Homo sapiens
ctagacatgaagggcataaac

SEQ ID NO: 10077 - DNA, 18 bp, Homo sapiens
tggcataaagttgatggc

SEQ ID NO: 10078 - DNA, 22 bp, Homo sapiens
aagaaagatgcacggatgacgt

SEQ ID NO: 10079 - DNA, 24 bp, Homo sapiens
gtatttttcatgaagaaaactagg

SEQ ID NO: 10080 - DNA, 17 bp, Homo sapiens
gaccatgcccagccatt

SEQ ID NO: 10081 - DNA, 22 bp, Homo sapiens
accactttatcgagcttcgtta

SEQ ID NO: 10082 - DNA, 17 bp, Homo sapiens
ctccaaaggggactttc

SEQ ID NO: 10083 - DNA, 21 bp, Homo sapiens
tcaagaagtcgataattaccc

SEQ ID NO: 10084 - DNA, 20 bp, Homo sapiens
agacacttttcctttttctt

SEQ ID NO: 10085 - DNA, 19 bp, Homo sapiens
gctggtatcctgagtgaga

SEQ ID NO: 10086 - DNA, 24 bp, Homo sapiens
aacagggacaccaaccagaataac

SEQ ID NO: 10087 - DNA, 22 bp, Homo sapiens
acatgatgaaatctatcacatg

SEQ ID NO: 10088 - DNA, 21 bp, Homo sapiens
tcctgtgcactttctaatctg

SEQ ID NO: 10089 - DNA, 18 bp, Homo sapiens
tgctgtctgcaaacaccg

SEQ ID NO: 10090 - DNA, 21 bp, Homo sapiens
taaaagatcttgggatacact

SEQ ID NO: 10091 - DNA, 21 bp, Homo sapiens
ccgggatgatgagtgcagatt

SEQ ID NO: 10092 - DNA, 20 bp, Homo sapiens
cggaattttcctgatagctg

SEQ ID NO: 10093 - DNA, 19 bp, Homo sapiens
cctttgagattctttgggc

SEQ ID NO: 10094 - DNA, 22 bp, Homo sapiens
gcttgtattagggacattttcc

SEQ ID NO: 10095 - DNA, 22 bp, Homo sapiens
atgatggattttgatcagctat

SEQ ID NO: 10096 - DNA, 18 bp, Homo sapiens
gatgcttttgtctgtggc

SEQ ID NO: 10097 - DNA, 21 bp, Homo sapiens
attctttgcaacttttatcct

SEQ ID NO: 10098 - DNA, 24 bp, Homo sapiens
ttttaccttcttttcccaggaatg

SEQ ID NO: 10099 - DNA, 25 bp, Homo sapiens
gatgttttaaggagacaaagatttc

SEQ ID NO: 10100 - DNA, 24 bp, Homo sapiens
ctccgtggtttatgaagagtactt

SEQ ID NO: 10101 - DNA, 19 bp, Homo sapiens
accagaaagagctttgctc

SEQ ID NO: 10102 - DNA, 24 bp, Homo sapiens
tgagctgactttactttctctagg

SEQ ID NO: 10103 - DNA, 18 bp, Homo sapiens
agccagaatgcagaactc

SEQ ID NO: 10104 - DNA, 24 bp, Homo sapiens
atttctacttcccttttgtttttg

SEQ ID NO: 10105 - DNA, 18 bp, Homo sapiens
tgtcagagtgagaccctc

SEQ ID NO: 10106 - DNA, 16 bp, Homo sapiens
cgcattaaaaagagca

SEQ ID NO: 10107 - DNA, 20 bp, Homo sapiens
tctcccaagaaatcagtgtc

SEQ ID NO: 10108 - DNA, 22 bp, Homo sapiens
aggcacagcatcccaggtaaac

SEQ ID NO: 10109 - DNA, 18 bp, Homo sapiens
ttggtgcacagtttctgg

SEQ ID NO: 10110 - DNA, 22 bp, Homo sapiens
gctgatacatgctgagggaggg

SEQ ID NO: 10111 - DNA, 20 bp, Homo sapiens
tggcttacttcccttcgttg

SEQ ID NO: 10112 - DNA, 24 bp, Homo sapiens
tgccattcttcattttaccatgac

SEQ ID NO: 10113 - DNA, 19 bp, Homo sapiens
cataatgcacctcacaggc

SEQ ID NO: 10114 - DNA, 18 bp, Homo sapiens
aaaaagtcacgaggcctg

SEQ ID NO: 10115 - DNA, 20 bp, Homo sapiens
agatccgtttgaagaaagct

SEQ ID NO: 10116 - DNA, 23 bp, Homo sapiens
tttacctataccccagcccaagc

SEQ ID NO: 10117 - DNA, 20 bp, Homo sapiens
acacaaccttaatgtgtatc

SEQ ID NO: 10118 - DNA, 20 bp, Homo sapiens
agacacccttgtcccgtctg

SEQ ID NO: 10119 - DNA, 22 bp, Homo sapiens
tgaagcatggaataattccttc

SEQ ID NO: 10120 - DNA, 21 bp, Homo sapiens
actgcaggggcaagtgttact

SEQ ID NO: 10121 - DNA, 19 bp, Homo sapiens
cctgaatgttctcccttct

SEQ ID NO: 10122 - DNA, 17 bp, Homo sapiens
agaggaggcatctctgg

SEQ ID NO: 10123 - DNA, 20 bp, Homo sapiens
aaacatggtcagcttgagtg

SEQ ID NO: 10124 - DNA, 17 bp, Homo sapiens
cctgggcttgattttgg

SEQ ID NO: 10125 - DNA, 24 bp, Homo sapiens
tataaagtctctgtaactcagggt

SEQ ID NO: 10126 - DNA, 17 bp, Homo sapiens
ttgtgtgcagggtcacc

SEQ ID NO: 10127 - DNA, 24 bp, Homo sapiens
ttgttcctgaaggagcataattac

SEQ ID NO: 10128 - DNA, 22 bp, Homo sapiens
gctgttaatatccactggtttc

SEQ ID NO: 10129 - DNA, 22 bp, Homo sapiens
gcttctgttgcagagtgtacca

SEQ ID NO: 10130 - DNA, 22 bp, Homo sapiens
tgtgtgaagaagatgaactaat

SEQ ID NO: 10131 - DNA, 18 bp, Homo sapiens
gagtggccgtggcaggtg

SEQ ID NO: 10132 - DNA, 24 bp, Homo sapiens
tgcaaataagacaatctaattggt

SEQ ID NO: 10133 - DNA, 19 bp, Homo sapiens
ggaggctccatcattggaa

SEQ ID NO: 10134 - DNA, 17 bp, Homo sapiens
agctcttcctttttgcg

SEQ ID NO: 10135 - DNA, 22 bp, Homo sapiens
tttaaaatgccactgtagacac

SEQ ID NO: 10136 - DNA, 21 bp, Homo sapiens
acctaaatgtccatcattggc

SEQ ID NO: 10137 - DNA, 25 bp, Homo sapiens
tcatggattattatttcttgaaccc

SEQ ID NO: 10138 - DNA, 22 bp, Homo sapiens
caatgtctgggaattattttta

SEQ ID NO: 10139 - DNA, 19 bp, Homo sapiens
ccagtttcaacaaggcaat

SEQ ID NO: 10140 - DNA, 23 bp, Homo sapiens
tccttagggtagagtcacctaag

SEQ ID NO: 10141 - DNA, 21 bp, Homo sapiens
agttcaccattggagacaact

SEQ ID NO: 10142 - DNA, 19 bp, Homo sapiens
aggacacatctttctttgg

SEQ ID NO: 10143 - DNA, 17 bp, Homo sapiens
cgcatggagagattggc

SEQ ID NO: 10144 - DNA, 22 bp, Homo sapiens
ggcagaaagcgggtatgatatt

SEQ ID NO: 10145 - DNA, 19 bp, Homo sapiens
cagccttagcagagtgaat

SEQ ID NO: 10146 - DNA, 16 bp, Homo sapiens
tttggaaggcaggcat

SEQ ID NO: 10147 - DNA, 24 bp, Homo sapiens
caaggcaaaaaatgaatatagtaa

SEQ ID NO: 10148 - DNA, 23 bp, Homo sapiens
ttacctcttagttttctgtaccc

SEQ ID NO: 10149 - DNA, 20 bp, Homo sapiens
agtctcttctggaaaagagg

SEQ ID NO: 10150 - DNA, 21 bp, Homo sapiens
ggcagaaaaggttccgctctt

SEQ ID NO: 10151 - DNA, 21 bp, Homo sapiens
aatttagattctcaacgaccc

SEQ ID NO: 10152 - DNA, 22 bp, Homo sapiens
ccgcttcctgcaactgagtagt

SEQ ID NO: 10153 - DNA, 22 bp, Homo sapiens
tgattgctgggtgactggatgg

SEQ ID NO: 10154 - DNA, 24 bp, Homo sapiens
tggagagtattttgtattttgtct

SEQ ID NO: 10155 - DNA, 18 bp, Homo sapiens
tgtatctcttctggcact

SEQ ID NO: 10156 - DNA, 30 bp, Homo sapiens
tatatatatatatatttatatgtatgcata

SEQ ID NO: 10157 - DNA, 16 bp, Homo sapiens
tccttccctccttccc

SEQ ID NO: 10158 - DNA, 22 bp, Homo sapiens
acgaaccaaaaaaatttttttc

SEQ ID NO: 10159 - DNA, 20 bp, Homo sapiens
cccaacgcattaagcattcc

SEQ ID NO: 10160 - DNA, 19 bp, Homo sapiens
gtgaccaacgaagagtgcc

SEQ ID NO: 10161 - DNA, 20 bp, Homo sapiens
acagagcgagactctgtctc

SEQ ID NO: 10162 - DNA, 17 bp, Homo sapiens
gcaggacagagggcctc

SEQ ID NO: 10163 - DNA, 24 bp, Homo sapiens
gcacccaggttctctgcagtatat

SEQ ID NO: 10164 - DNA, 16 bp, Homo sapiens
tgagcacagccttcgc

SEQ ID NO: 10165 - DNA, 20 bp, Homo sapiens
gcaagatgtgctgaagatgg

SEQ ID NO: 10166 - DNA, 22 bp, Homo sapiens
gagttttctccagaatccagtc

SEQ ID NO: 10167 - DNA, 19 bp, Homo sapiens
ctcgttctagggagattcg

SEQ ID NO: 10168 - DNA, 20 bp, Homo sapiens
tcccagcaaatcctgggtcc

SEQ ID NO: 10169 - DNA, 24 bp, Homo sapiens
catctggtaggcatcacgagctgg

SEQ ID NO: 10170 - DNA, 18 bp, Homo sapiens
ttcagcgtgttactgtgg

SEQ ID NO: 10171 - DNA, 18 bp, Homo sapiens
cgtggtcgagtacgtgga

SEQ ID NO: 10172 - DNA, 24 bp, Homo sapiens
gggagttttggacataacaacttg

SEQ ID NO: 10173 - DNA, 24 bp, Homo sapiens
aatcagagagcagctccggcgcac

SEQ ID NO: 10174 - DNA, 23 bp, Homo sapiens
tggcgcccaggggcaggctccgc

SEQ ID NO: 10175 - DNA, 24 bp, Homo sapiens
gaaataaataccgggtgtttggcg

SEQ ID NO: 10176 - DNA, 23 bp, Homo sapiens
ttacctggccagtgtgcgtgacc

SEQ ID NO: 10177 - DNA, 24 bp, Homo sapiens
ggacgttgcgccgggtcaaaggcc

SEQ ID NO: 10178 - DNA, 17 bp, Homo sapiens
agtcgcccgaggtgcgg

SEQ ID NO: 10179 - DNA, 16 bp, Homo sapiens
accggtgtggcgaggc

SEQ ID NO: 10180 - DNA, 18 bp, Homo sapiens
taccacgacctgcgctgc

SEQ ID NO: 10181 - DNA, 24 bp, Homo sapiens
gggtgcgggtctcgccgaccgggg

SEQ ID NO: 10182 - DNA, 23 bp, Homo sapiens
gcccctgattacaccgagtactg

SEQ ID NO: 10183 - DNA, 22 bp, Homo sapiens
agattttttactcacctctttc

SEQ ID NO: 10184 - DNA, 23 bp, Homo sapiens
aagaaaaacactttcctgtaata

SEQ ID NO: 10185 - DNA, 22 bp, Homo sapiens
attaatttttatttcttgttgg

SEQ ID NO: 10186 - DNA, 21 bp, Homo sapiens
aagtcacacatggtctttttg

SEQ ID NO: 10187 - DNA, 18 bp, Homo sapiens
accccatccagaactgtt

SEQ ID NO: 10188 - DNA, 21 bp, Homo sapiens
tttgtaggtcgtcagaaagag

SEQ ID NO: 10189 - DNA, 20 bp, Homo sapiens
caatggcaaagttttcattc

SEQ ID NO: 10190 - DNA, 24 bp, Homo sapiens
aaggtctacaatgataatagttaa

SEQ ID NO: 10191 - DNA, 17 bp, Homo sapiens
catcgcacgctatcacc

SEQ ID NO: 10192 - DNA, 24 bp, Homo sapiens
tgaatttgtgtgtggtgggttaaa

SEQ ID NO: 10193 - DNA, 16 bp, Homo sapiens
gtggccagctacgcac

SEQ ID NO: 10194 - DNA, 24 bp, Homo sapiens
taagtctttcttcttgttccaggt

SEQ ID NO: 10195 - DNA, 19 bp, Homo sapiens
cagaaagaacaggcactgg

SEQ ID NO: 10196 - DNA, 22 bp, Homo sapiens
cgtgagcgaggtggagactcgg

SEQ ID NO: 10197 - DNA, 18 bp, Homo sapiens
tgccagcagtgtgaaccc

SEQ ID NO: 10198 - DNA, 22 bp, Homo sapiens
aaagtgtatataaacttggtgc

SEQ ID NO: 10199 - DNA, 19 bp, Homo sapiens
gacagtctgcattcttact

SEQ ID NO: 10200 - DNA, 16 bp, Homo sapiens
gctctagtggtggtgc

SEQ ID NO: 10201 - DNA, 24 bp, Homo sapiens
gttttatacatacattttcaatgc

SEQ ID NO: 10202 - DNA, 19 bp, Homo sapiens
agcttcacgtgctcagctt

SEQ ID NO: 10203 - DNA, 24 bp, Homo sapiens
tatgacatcattccttttgaattt

SEQ ID NO: 10204 - DNA, 22 bp, Homo sapiens
ccttgacagcaacaccctttat

SEQ ID NO: 10205 - DNA, 20 bp, Homo sapiens
ctgtgggctccagttcagac

SEQ ID NO: 10206 - DNA, 22 bp, Homo sapiens
gaacaaaccaaacgattaacag

SEQ ID NO: 10207 - DNA, 24 bp, Homo sapiens
ttcagtgtaacttaacatgtagtg

SEQ ID NO: 10208 - DNA, 22 bp, Homo sapiens
cctcctaaagatgaagactctc

SEQ ID NO: 10209 - DNA, 19 bp, Homo sapiens
ccaagaatgcccagtgctg

SEQ ID NO: 10210 - DNA, 23 bp, Homo sapiens
gtgagattgtctcatttggaagt

SEQ ID NO: 10211 - DNA, 21 bp, Homo sapiens
gactgaagtgacacggtgaca

SEQ ID NO: 10212 - DNA, 21 bp, Homo sapiens
caggccaatgtaaatacatgg

SEQ ID NO: 10213 - DNA, 24 bp, Homo sapiens
aaaggaccaccctcctccattaga

SEQ ID NO: 10214 - DNA, 21 bp, Homo sapiens
actgtggaagatatagctgca

SEQ ID NO: 10215 - DNA, 24 bp, Homo sapiens
ttgtcgggaattaatggagcatgg

SEQ ID NO: 10216 - DNA, 19 bp, Homo sapiens
aaatgaccctgtaggaggg

SEQ ID NO: 10217 - DNA, 22 bp, Homo sapiens
atctaggagagtctggagacac

SEQ ID NO: 10218 - DNA, 24 bp, Homo sapiens
aggttatttacattgatgttcagt

SEQ ID NO: 10219 - DNA, 24 bp, Homo sapiens
acccgcagttttatctaagtcctc

SEQ ID NO: 10220 - DNA, 23 bp, Homo sapiens
ccatcattgaggaagaaatacca

SEQ ID NO: 10221 - DNA, 24 bp, Homo sapiens
gaggtgcatctgtggcttatagcc

SEQ ID NO: 10222 - DNA, 21 bp, Homo sapiens
tcctgaagatcgctctgatgc

SEQ ID NO: 10223 - DNA, 20 bp, Homo sapiens
tgcttgaggctgatacatcg

SEQ ID NO: 10224 - DNA, 20 bp, Homo sapiens
gaaactcgatcagcatttcc

SEQ ID NO: 10225 - DNA, 22 bp, Homo sapiens
cttcatctgcggctgggtttgg

SEQ ID NO: 10226 - DNA, 21 bp, Homo sapiens
agtgctcttaaaacattggaa

SEQ ID NO: 10227 - DNA, 19 bp, Homo sapiens
tggttttcaggctctgcat

SEQ ID NO: 10228 - DNA, 18 bp, Homo sapiens
gcaatggcatttagtgct

SEQ ID NO: 10229 - DNA, 24 bp, Homo sapiens
tatttctgtatcttctattttagg

SEQ ID NO: 10230 - DNA, 19 bp, Homo sapiens
agagacacctgtttacaag

SEQ ID NO: 10231 - DNA, 22 bp, Homo sapiens
tatttggggtacaaggattcat

SEQ ID NO: 10232 - DNA, 22 bp, Homo sapiens
aacaaggaaaatactgatacgg

SEQ ID NO: 10233 - DNA, 24 bp, Homo sapiens
aaaaagagcactgtataatttaaa

SEQ ID NO: 10234 - DNA, 20 bp, Homo sapiens
tccagaaaactgtaaagcat

SEQ ID NO: 10235 - DNA, 22 bp, Homo sapiens
tataattttcccaatacttttt

SEQ ID NO: 10236 - DNA, 30 bp, Homo sapiens
attaaatttactgtaataattttttattta

SEQ ID NO: 10237 - DNA, 20 bp, Homo sapiens
aaaaaagaagccagcacatc

SEQ ID NO: 10238 - DNA, 23 bp, Homo sapiens
aatacttcaaaataagcctaatg

SEQ ID NO: 10239 - DNA, 21 bp, Homo sapiens
cagacactcttttgaaactgt

SEQ ID NO: 10240 - DNA, 21 bp, Homo sapiens
tgatcacactaaagatcttcc

SEQ ID NO: 10241 - DNA, 21 bp, Homo sapiens
agaaggtttctttaatccttt

SEQ ID NO: 10242 - DNA, 22 bp, Homo sapiens
gtgacaagtatcctttgctatc

SEQ ID NO: 10243 - DNA, 23 bp, Homo sapiens
ttaaaacattttttaactaactt

SEQ ID NO: 10244 - DNA, 23 bp, Homo sapiens
tgtgggattaattattgccattc

SEQ ID NO: 10245 - DNA, 24 bp, Homo sapiens
acataaactaatcttacaaatctt

SEQ ID NO: 10246 - DNA, 23 bp, Homo sapiens
acatctattctgtacttcacact

SEQ ID NO: 10247 - DNA, 22 bp, Homo sapiens
actattaccattctcgtttccg

SEQ ID NO: 10248 - DNA, 24 bp, Homo sapiens
cctgcagcagttaattttgttttt

SEQ ID NO: 10249 - DNA, 19 bp, Homo sapiens
agccactgccactgggatg

SEQ ID NO: 10250 - DNA, 23 bp, Homo sapiens
tggtgacaaaggaaaattgtaag

SEQ ID NO: 10251 - DNA, 22 bp, Homo sapiens
ctttttaacccttccctctacc

SEQ ID NO: 10252 - DNA, 21 bp, Homo sapiens
tggtcttgcgagcctatacag

SEQ ID NO: 10253 - DNA, 17 bp, Homo sapiens
gcggggaggggttccta

SEQ ID NO: 10254 - DNA, 20 bp, Homo sapiens
tgacatatcccagaagacac

SEQ ID NO: 10255 - DNA, 20 bp, Homo sapiens
acctcaacagcaacctgaaa

SEQ ID NO: 10256 - DNA, 21 bp, Homo sapiens
agtgctaacatacttcatttt

SEQ ID NO: 10257 - DNA, 24 bp, Homo sapiens
actcttctccgggcccactccacc

SEQ ID NO: 10258 - DNA, 17 bp, Homo sapiens
gggcagttggtgagaca

SEQ ID NO: 10259 - DNA, 24 bp, Homo sapiens
tttaccttgaagatcagcaattct

SEQ ID NO: 10260 - DNA, 18 bp, Homo sapiens
acaaggtagtggcagctc

SEQ ID NO: 10261 - DNA, 21 bp, Homo sapiens
agggttttagaatcaggtgag

SEQ ID NO: 10262 - DNA, 19 bp, Homo sapiens
actgccttttcatttctct

SEQ ID NO: 10263 - DNA, 22 bp, Homo sapiens
cttagaggctttttaagaggat

SEQ ID NO: 10264 - DNA, 23 bp, Homo sapiens
aactactgagcaggactttcctt

SEQ ID NO: 10265 - DNA, 20 bp, Homo sapiens
tgttgaggatacttctgcag

SEQ ID NO: 10266 - DNA, 23 bp, Homo sapiens
tccttgtgctatcaatttactca

SEQ ID NO: 10267 - DNA, 20 bp, Homo sapiens
cccctttagcaattgacttt

SEQ ID NO: 10268 - DNA, 20 bp, Homo sapiens
ctccttttccaaagtaaaac

SEQ ID NO: 10269 - DNA, 19 bp, Homo sapiens
ttgaggctagaaagctcag

SEQ ID NO: 10270 - DNA, 22 bp, Homo sapiens
caggaatgtcttcccattttac

SEQ ID NO: 10271 - DNA, 21 bp, Homo sapiens
tgtgatcatctctctctgaaa

SEQ ID NO: 10272 - DNA, 22 bp, Homo sapiens
tggatatatagaagaattgggt

SEQ ID NO: 10273 - DNA, 30 bp, Homo sapiens
aagtagtaatcaaatactttttaatttatc

SEQ ID NO: 10274 - DNA, 20 bp, Homo sapiens
attttttcctgtatggatgc

SEQ ID NO: 10275 - DNA, 19 bp, Homo sapiens
tcaatcataccattgttgc

SEQ ID NO: 10276 - DNA, 24 bp, Homo sapiens
agtaatatatttatgaaagtttgc

SEQ ID NO: 10277 - DNA, 21 bp, Homo sapiens
aagtacccatttaacttaccc

SEQ ID NO: 10278 - DNA, 24 bp, Homo sapiens
attagctttggaaattttagagta

SEQ ID NO: 10279 - DNA, 24 bp, Homo sapiens
attgatatccttgatttctgcatc

SEQ ID NO: 10280 - DNA, 29 bp, Homo sapiens
tttgaatatttactagtctttaaaatata

SEQ ID NO: 10281 - DNA, 23 bp, Homo sapiens
gcactgaaactgtaatagaatct

SEQ ID NO: 10282 - DNA, 21 bp, Homo sapiens
ccacaactaccctcccaggaa

SEQ ID NO: 10283 - DNA, 16 bp, Homo sapiens
tcgtctcggtcggaac

SEQ ID NO: 10284 - DNA, 24 bp, Homo sapiens
atcacttcactgcacccagtctta

SEQ ID NO: 10285 - DNA, 17 bp, Homo sapiens
gattctcctcacctggc

SEQ ID NO: 10286 - DNA, 23 bp, Homo sapiens
tgagagacactaattcatcttac

SEQ ID NO: 10287 - DNA, 20 bp, Homo sapiens
ctcctttcttattgaagatg

SEQ ID NO: 10288 - DNA, 19 bp, Homo sapiens
agtccataaggcatggttc

SEQ ID NO: 10289 - DNA, 23 bp, Homo sapiens
tgatttttctaactcatgtccat

SEQ ID NO: 10290 - DNA, 16 bp, Homo sapiens
gttggggtcgtaatgc

SEQ ID NO: 10291 - DNA, 22 bp, Homo sapiens
tgctctaggtttatctagtttg

SEQ ID NO: 10292 - DNA, 24 bp, Homo sapiens
caacttgttctattttgagatcat

SEQ ID NO: 10293 - DNA, 23 bp, Homo sapiens
ccaaaatagcgagtatggaaatt

SEQ ID NO: 10294 - DNA, 24 bp, Homo sapiens
catcaatctgctcattctgccttc

SEQ ID NO: 10295 - DNA, 20 bp, Homo sapiens
agaatgactacatcatcagc

SEQ ID NO: 10296 - DNA, 19 bp, Homo sapiens
agagcaagtaacatcagac

SEQ ID NO: 10297 - DNA, 20 bp, Homo sapiens
agtccctttctgaaatccct

SEQ ID NO: 10298 - DNA, 21 bp, Homo sapiens
tctcaagcactcaccatttgg

SEQ ID NO: 10299 - DNA, 22 bp, Homo sapiens
acccattaatgaagctaatgga

SEQ ID NO: 10300 - DNA, 21 bp, Homo sapiens
tgagcccacagaatttttagc

SEQ ID NO: 10301 - DNA, 17 bp, Homo sapiens
gtcacgttttgcagggt

SEQ ID NO: 10302 - DNA, 20 bp, Homo sapiens
tctgctttgtgctgaggatc

SEQ ID NO: 10303 - DNA, 19 bp, Homo sapiens
ggccaaccttgttattgtt

SEQ ID NO: 10304 - DNA, 21 bp, Homo sapiens
acacgatacattgtaggaaag

SEQ ID NO: 10305 - DNA, 17 bp, Homo sapiens
aagtgatccacctgcct

SEQ ID NO: 10306 - DNA, 24 bp, Homo sapiens
tctgatggaaaaaatttaataatc

SEQ ID NO: 10307 - DNA, 24 bp, Homo sapiens
aggaaccaggttagattctcacca

SEQ ID NO: 10308 - DNA, 21 bp, Homo sapiens
aatctcctttttaggtccttc

SEQ ID NO: 10309 - DNA, 19 bp, Homo sapiens
cccaagtaccatgcgtaag

SEQ ID NO: 10310 - DNA, 18 bp, Homo sapiens
aaaaaaatgccaagcacc

SEQ ID NO: 10311 - DNA, 20 bp, Homo sapiens
ttagatatttaccttccaat

SEQ ID NO: 10312 - DNA, 24 bp, Homo sapiens
ccattgcttcattttctaagtgga

SEQ ID NO: 10313 - DNA, 21 bp, Homo sapiens
tccaagtatcaggcccctttg

SEQ ID NO: 10314 - DNA, 21 bp, Homo sapiens
gtaatctgcccacctcggcct

SEQ ID NO: 10315 - DNA, 19 bp, Homo sapiens
cggattcgttgttctactg

SEQ ID NO: 10316 - DNA, 21 bp, Homo sapiens
ggccaacatcttctttttaaa

SEQ ID NO: 10317 - DNA, 21 bp, Homo sapiens
agaaaattcaagttatcttgt

SEQ ID NO: 10318 - DNA, 21 bp, Homo sapiens
tcacttagttaacttactggc

SEQ ID NO: 10319 - DNA, 29 bp, Homo sapiens
catacacataatatatacatatatatata

SEQ ID NO: 10320 - DNA, 22 bp, Homo sapiens
ctccatttccagaaagtttcag

SEQ ID NO: 10321 - DNA, 20 bp, Homo sapiens
aggctttcttaccaaaaaaa

SEQ ID NO: 10322 - DNA, 22 bp, Homo sapiens
gatttaacttgtccagagcaac

SEQ ID NO: 10323 - DNA, 21 bp, Homo sapiens
tgctttgggtgttacatatac

SEQ ID NO: 10324 - DNA, 23 bp, Homo sapiens
ttgaaattaagaaatctaattca

SEQ ID NO: 10325 - DNA, 24 bp, Homo sapiens
ctttcttggttcttagtaaatctc

SEQ ID NO: 10326 - DNA, 22 bp, Homo sapiens
agctgttaaactttcttggcat

SEQ ID NO: 10327 - DNA, 24 bp, Homo sapiens
atttgcttaattctttttgagaac

SEQ ID NO: 10328 - DNA, 20 bp, Homo sapiens
gcagtttatccccatactcc

SEQ ID NO: 10329 - DNA, 21 bp, Homo sapiens
atcttacctgctcttgtactg

SEQ ID NO: 10330 - DNA, 23 bp, Homo sapiens
tcatttgtcatattagaagatag

SEQ ID NO: 10331 - DNA, 23 bp, Homo sapiens
tctttgcaaagttgcctggtaaa

SEQ ID NO: 10332 - DNA, 18 bp, Homo sapiens
ggatgttgttggtcagca

SEQ ID NO: 10333 - DNA, 23 bp, Homo sapiens
tccttcactttgaatgaagtagg

SEQ ID NO: 10334 - DNA, 29 bp, Homo sapiens
tatacatttaaagtttttataaataaaat

SEQ ID NO: 10335 - DNA, 22 bp, Homo sapiens
ttactttgaatgctcacaatcc

SEQ ID NO: 10336 - DNA, 22 bp, Homo sapiens
gcaaaaagtaatccctataagc

SEQ ID NO: 10337 - DNA, 22 bp, Homo sapiens
gcacctacaaacgaaagctatc

SEQ ID NO: 10338 - DNA, 25 bp, Homo sapiens
tttaagacattagtttatgtacagc

SEQ ID NO: 10339 - DNA, 27 bp, Homo sapiens
tatttttctgttaattaacagtttttc

SEQ ID NO: 10340 - DNA, 18 bp, Homo sapiens
attgtgatcgacccagcg

SEQ ID NO: 10341 - DNA, 18 bp, Homo sapiens
attacgaatttgcccgtt

SEQ ID NO: 10342 - DNA, 26 bp, Homo sapiens
gatttggaagcatttgaaataataat

SEQ ID NO: 10343 - DNA, 24 bp, Homo sapiens
cacatacattttcttctctgagta

SEQ ID NO: 10344 - DNA, 28 bp, Homo sapiens
ttaagtctaacatattttcctgaaaaac

SEQ ID NO: 10345 - DNA, 24 bp, Homo sapiens
gctacactttagttgaaaggtaat

SEQ ID NO: 10346 - DNA, 24 bp, Homo sapiens
ctgaactgcagtgcttataagtgt

SEQ ID NO: 10347 - DNA, 19 bp, Homo sapiens
agttggaatccaggaaggg

SEQ ID NO: 10348 - DNA, 22 bp, Homo sapiens
aaatgatctagtgcagttccct

SEQ ID NO: 10349 - DNA, 20 bp, Homo sapiens
atccaccagatactcctcaa

SEQ ID NO: 10350 - DNA, 22 bp, Homo sapiens
tgccatctgacatcttttccca

SEQ ID NO: 10351 - DNA, 25 bp, Homo sapiens
tttataaaatattatgttttcaggg

SEQ ID NO: 10352 - DNA, 21 bp, Homo sapiens
gtgggcccaccaacgctgtca

SEQ ID NO: 10353 - DNA, 27 bp, Homo sapiens
agtaaaatgtaaatagtaaattatttc

SEQ ID NO: 10354 - DNA, 20 bp, Homo sapiens
ctcacaattcagttgttgag

SEQ ID NO: 10355 - DNA, 23 bp, Homo sapiens
ccgaagataacatatttggaacc

SEQ ID NO: 10356 - DNA, 22 bp, Homo sapiens
aaagaacaaagaaatgagaaag

SEQ ID NO: 10357 - DNA, 24 bp, Homo sapiens
aagattcgtaatatttctgtttct

SEQ ID NO: 10358 - DNA, 21 bp, Homo sapiens
ttaaggctttcaaggaagacc

SEQ ID NO: 10359 - DNA, 19 bp, Homo sapiens
gattggccatacaaactgc

SEQ ID NO: 10360 - DNA, 22 bp, Homo sapiens
acttacatccagcaaaaataac

SEQ ID NO: 10361 - DNA, 23 bp, Homo sapiens
aagtgatacttgtaggctcagac

SEQ ID NO: 10362 - DNA, 19 bp, Homo sapiens
tttgttccactacttgcag

SEQ ID NO: 10363 - DNA, 22 bp, Homo sapiens
attcctctttttctttctaggg

SEQ ID NO: 10364 - DNA, 17 bp, Homo sapiens
gatggatcaaggggcag

SEQ ID NO: 10365 - DNA, 21 bp, Homo sapiens
aaagtcttaaaatgcagaaaa

SEQ ID NO: 10366 - DNA, 20 bp, Homo sapiens
gactcacacaacaaaatgtt

SEQ ID NO: 10367 - DNA, 19 bp, Homo sapiens
gcacctaacagtttgtagt

SEQ ID NO: 10368 - DNA, 22 bp, Homo sapiens
accttagtctgagaatcaggta

SEQ ID NO: 10369 - DNA, 24 bp, Homo sapiens
tcaaaatctccagggatggtgggc

SEQ ID NO: 10370 - DNA, 22 bp, Homo sapiens
tgctacattgacaatcttcatt

SEQ ID NO: 10371 - DNA, 21 bp, Homo sapiens
tatgagaagtgaaagctcaaa

SEQ ID NO: 10372 - DNA, 17 bp, Homo sapiens
tgggcctcagatatgcc

SEQ ID NO: 10373 - DNA, 22 bp, Homo sapiens
tctgaaacaaacattctttaaa

SEQ ID NO: 10374 - DNA, 22 bp, Homo sapiens
tgtttgtgttcatttttaggtg

SEQ ID NO: 10375 - DNA, 21 bp, Homo sapiens
tcactccactcttcgagacca

SEQ ID NO: 10376 - DNA, 23 bp, Homo sapiens
tgtcttttaattctaaaggaaag

SEQ ID NO: 10377 - DNA, 20 bp, Homo sapiens
tggcacattccaagggcata

SEQ ID NO: 10378 - DNA, 22 bp, Homo sapiens
actgagttgtattaaaggacaa

SEQ ID NO: 10379 - DNA, 20 bp, Homo sapiens
gccattcagagttgtgttgt

SEQ ID NO: 10380 - DNA, 25 bp, Homo sapiens
gtatggagctcgtaaaattagtaag

SEQ ID NO: 10381 - DNA, 19 bp, Homo sapiens
tgatgtttttaatgaaccc

SEQ ID NO: 10382 - DNA, 19 bp, Homo sapiens
tttccacaccgctcaaatg

SEQ ID NO: 10383 - DNA, 21 bp, Homo sapiens
aaagttcactgataccacctt

SEQ ID NO: 10384 - DNA, 22 bp, Homo sapiens
tgaatttgtctgctgatttctc

SEQ ID NO: 10385 - DNA, 24 bp, Homo sapiens
gtcataggaagaaaatctatgttc

SEQ ID NO: 10386 - DNA, 23 bp, Homo sapiens
actaagttttctcttttgtttcc

SEQ ID NO: 10387 - DNA, 26 bp, Homo sapiens
cgtagaactttaatttcccagataac

SEQ ID NO: 10388 - DNA, 24 bp, Homo sapiens
aaggaatagagtttataagtagtt

SEQ ID NO: 10389 - DNA, 24 bp, Homo sapiens
tttaggtataatgtagaggttgag

SEQ ID NO: 10390 - DNA, 20 bp, Homo sapiens
actgggttctagagtttcct

SEQ ID NO: 10391 - DNA, 22 bp, Homo sapiens
tcacactaaatgaacaaaacgt

SEQ ID NO: 10392 - DNA, 20 bp, Homo sapiens
tctacaattcatagggaggt

SEQ ID NO: 10393 - DNA, 25 bp, Homo sapiens
tttcacatggtgattatgaaataac

SEQ ID NO: 10394 - DNA, 20 bp, Homo sapiens
aaaaaactagaaagcaccac

SEQ ID NO: 10395 - DNA, 19 bp, Homo sapiens
tcccgttcttgttatcagt

SEQ ID NO: 10396 - DNA, 26 bp, Homo sapiens
agtttgttttcaaatacttacaaacg

SEQ ID NO: 10397 - DNA, 27 bp, Homo sapiens
ttaaccaaatttttatgaaaattatac

SEQ ID NO: 10398 - DNA, 22 bp, Homo sapiens
acttccaaaatcatgtagagaa

SEQ ID NO: 10399 - DNA, 22 bp, Homo sapiens
acctatcatgtttttgcaacaa

SEQ ID NO: 10400 - DNA, 18 bp, Homo sapiens
atactggttttctccaac

SEQ ID NO: 10401 - DNA, 22 bp, Homo sapiens
gaaaaatgaggcagaggtcacg

SEQ ID NO: 10402 - DNA, 18 bp, Homo sapiens
gaactgttcttggaaagc

SEQ ID NO: 10403 - DNA, 20 bp, Homo sapiens
agtttcacaagcaataaggt

SEQ ID NO: 10404 - DNA, 17 bp, Homo sapiens
tgtctcctccaggggct

SEQ ID NO: 10405 - DNA, 24 bp, Homo sapiens
gctcattgtgaattaaagtaaatt

SEQ ID NO: 10406 - DNA, 21 bp, Homo sapiens
agtgcagttgacttattcagc

SEQ ID NO: 10407 - DNA, 21 bp, Homo sapiens
accacggcctgttccagaggg

SEQ ID NO: 10408 - DNA, 17 bp, Homo sapiens
tctgcagacacacatgc

SEQ ID NO: 10409 - DNA, 20 bp, Homo sapiens
ttcaaatcatgaggagcccc

SEQ ID NO: 10410 - DNA, 28 bp, Homo sapiens
gaaactaaaagtacatagaaaaaagatg

SEQ ID NO: 10411 - DNA, 20 bp, Homo sapiens
tcaaatttccagtggctgtt

SEQ ID NO: 10412 - DNA, 18 bp, Homo sapiens
aggggtcaataaagcaac

SEQ ID NO: 10413 - DNA, 20 bp, Homo sapiens
cgtatgtttgaaacgaccat

SEQ ID NO: 10414 - DNA, 23 bp, Homo sapiens
aatctgttcattctctggaaggc

SEQ ID NO: 10415 - DNA, 20 bp, Homo sapiens
ccatctggaattcctctcct

SEQ ID NO: 10416 - DNA, 24 bp, Homo sapiens
cattagatatagaagaataaatgt

SEQ ID NO: 10417 - DNA, 21 bp, Homo sapiens
ctgtcagaatctatttgagtg

SEQ ID NO: 10418 - DNA, 19 bp, Homo sapiens
ttgtccaccatccaggatg

SEQ ID NO: 10419 - DNA, 18 bp, Homo sapiens
gccagggaagcttgagtt

SEQ ID NO: 10420 - DNA, 21 bp, Homo sapiens
gataaccactcgtagaaagcg

SEQ ID NO: 10421 - DNA, 16 bp, Homo sapiens
gccgcgccggaacagc

SEQ ID NO: 10422 - DNA, 17 bp, Homo sapiens
ttccgctcccagaagcc

SEQ ID NO: 10423 - DNA, 19 bp, Homo sapiens
ggaagaagggtgctgagag

SEQ ID NO: 10424 - DNA, 16 bp, Homo sapiens
gcacccgcgggtttgc

SEQ ID NO: 10425 - DNA, 22 bp, Homo sapiens
caactccagtgagcggatcgac

SEQ ID NO: 10426 - DNA, 21 bp, Homo sapiens
cgtcccggagcaggaggattc

SEQ ID NO: 10427 - DNA, 20 bp, Homo sapiens
gctgtatcatcccaaatgtc

SEQ ID NO: 10428 - DNA, 24 bp, Homo sapiens
ggattttaaatactcattttcagt

SEQ ID NO: 10429 - DNA, 21 bp, Homo sapiens
gaaaacgactaagcaagcatt

SEQ ID NO: 10430 - DNA, 24 bp, Homo sapiens
cttggtactaacatacattttctg

SEQ ID NO: 10431 - DNA, 21 bp, Homo sapiens
taacactttatcgtatgttat

SEQ ID NO: 10432 - DNA, 20 bp, Homo sapiens
tccagagcgatgattctgac

SEQ ID NO: 10433 - DNA, 22 bp, Homo sapiens
acctgatttaactaactcatac

SEQ ID NO: 10434 - DNA, 19 bp, Homo sapiens
gctgtggcttcatttaagg

SEQ ID NO: 10435 - DNA, 20 bp, Homo sapiens
gaagtttcacaaatgtcacc

SEQ ID NO: 10436 - DNA, 20 bp, Homo sapiens
aataggtgctttctgaggtg

SEQ ID NO: 10437 - DNA, 20 bp, Homo sapiens
tcttcttttggcttttattc

SEQ ID NO: 10438 - DNA, 24 bp, Homo sapiens
gggttatgtcgtgacttttattct

SEQ ID NO: 10439 - DNA, 24 bp, Homo sapiens
tgagacatcctttgaagttaaatc

SEQ ID NO: 10440 - DNA, 20 bp, Homo sapiens
gcatgctctaaagaatggtg

SEQ ID NO: 10441 - DNA, 20 bp, Homo sapiens
agaaacactgtactaatcac

SEQ ID NO: 10442 - DNA, 23 bp, Homo sapiens
cacctaaaagaaaacctgctaag

SEQ ID NO: 10443 - DNA, 23 bp, Homo sapiens
gcatgttcctaaataacagaaaa

SEQ ID NO: 10444 - DNA, 18 bp, Homo sapiens
tggcagaacatttgtccc

SEQ ID NO: 10445 - DNA, 21 bp, Homo sapiens
tctcattacatcattttgcct

SEQ ID NO: 10446 - DNA, 23 bp, Homo sapiens
cacaggtttctctcttaaaatca

SEQ ID NO: 10447 - DNA, 20 bp, Homo sapiens
aacgagatgatagtttgccc

SEQ ID NO: 10448 - DNA, 17 bp, Homo sapiens
cggacagattttgctcc

SEQ ID NO: 10449 - DNA, 19 bp, Homo sapiens
tgtagtggaaagttgggga

SEQ ID NO: 10450 - DNA, 19 bp, Homo sapiens
gtatccttacctcttgagc

SEQ ID NO: 10451 - DNA, 18 bp, Homo sapiens
acccagctaccattgctt

SEQ ID NO: 10452 - DNA, 24 bp, Homo sapiens
actgtgtatactgtttaacagttt

SEQ ID NO: 10453 - DNA, 24 bp, Homo sapiens
ctggatatggaaatagagaggagc

SEQ ID NO: 10454 - DNA, 23 bp, Homo sapiens
tgttataagggtgtgattaagaa

SEQ ID NO: 10455 - DNA, 26 bp, Homo sapiens
ctgtgaagtagctaataatatagaac

SEQ ID NO: 10456 - DNA, 20 bp, Homo sapiens
tctgttgaaacttggctttc

SEQ ID NO: 10457 - DNA, 24 bp, Homo sapiens
ttcaatttctggaagcagagacta

SEQ ID NO: 10458 - DNA, 18 bp, Homo sapiens
gagcagatttgggcttga

SEQ ID NO: 10459 - DNA, 23 bp, Homo sapiens
ttgatccaccgaggcattaattt

SEQ ID NO: 10460 - DNA, 16 bp, Homo sapiens
ggtcccagtcttggcc

SEQ ID NO: 10461 - DNA, 28 bp, Homo sapiens
tttctttttaaagaatgaaaatgaaagc

SEQ ID NO: 10462 - DNA, 19 bp, Homo sapiens
agaggttaaatgtcccgac

SEQ ID NO: 10463 - DNA, 23 bp, Homo sapiens
ggtctcctggaaataaatcagat

SEQ ID NO: 10464 - DNA, 24 bp, Homo sapiens
tcaaaaaattcttgtgtatttaag

SEQ ID NO: 10465 - DNA, 16 bp, Homo sapiens
accccccatgccaggg

SEQ ID NO: 10466 - DNA, 22 bp, Homo sapiens
gccattgaattttagacctggc

SEQ ID NO: 10467 - DNA, 24 bp, Homo sapiens
gatttggtacatgaaatttcactt

SEQ ID NO: 10468 - DNA, 16 bp, Homo sapiens
gaggcagccagcatga

SEQ ID NO: 10469 - DNA, 19 bp, Homo sapiens
tccttttggttttgagtcc

SEQ ID NO: 10470 - DNA, 24 bp, Homo sapiens
tgtatgtgaaagcaaaatctaacc

SEQ ID NO: 10471 - DNA, 22 bp, Homo sapiens
tcctttgaaatattccttatag

SEQ ID NO: 10472 - DNA, 21 bp, Homo sapiens
cccaagggatgttctacaatg

SEQ ID NO: 10473 - DNA, 19 bp, Homo sapiens
ccaccaccaccaccccact

SEQ ID NO: 10474 - DNA, 22 bp, Homo sapiens
ggcattaaaaacaaacaaaacc

SEQ ID NO: 10475 - DNA, 22 bp, Homo sapiens
cgtctttgtttaggggaaaaaa

SEQ ID NO: 10476 - DNA, 25 bp, Homo sapiens
catgaaattaacatacttcccaaag

SEQ ID NO: 10477 - DNA, 20 bp, Homo sapiens
atttccagcattcactatat

SEQ ID NO: 10478 - DNA, 21 bp, Homo sapiens
agatgctgagtgattacttac

SEQ ID NO: 10479 - DNA, 20 bp, Homo sapiens
acaatatctttttctgtctc

SEQ ID NO: 10480 - DNA, 24 bp, Homo sapiens
gcaagtagtattttataaatttac

SEQ ID NO: 10481 - DNA, 20 bp, Homo sapiens
ttgatgatgctgatgctttg

SEQ ID NO: 10482 - DNA, 22 bp, Homo sapiens
agtaatttaagcctcagacagt

SEQ ID NO: 10483 - DNA, 24 bp, Homo sapiens
ggctatcatactggctattatatg

SEQ ID NO: 10484 - DNA, 17 bp, Homo sapiens
gcctcccaaagttgtgg

SEQ ID NO: 10485 - DNA, 22 bp, Homo sapiens
agatagctatatatagatagct

SEQ ID NO: 10486 - DNA, 23 bp, Homo sapiens
actgcagcctaataattgttttc

SEQ ID NO: 10487 - DNA, 23 bp, Homo sapiens
ctttttgattttgtctgaaaccc

SEQ ID NO: 10488 - DNA, 24 bp, Homo sapiens
acttaatttctgatcatattttgt

SEQ ID NO: 10489 - DNA, 18 bp, Homo sapiens
aatgctggcagacttact

SEQ ID NO: 10490 - DNA, 26 bp, Homo sapiens
aatgctttttaacatccatataaagc

SEQ ID NO: 10491 - DNA, 24 bp, Homo sapiens
tgttcaaaaacatttgttttccac

SEQ ID NO: 10492 - DNA, 21 bp, Homo sapiens
aacttcctttattttccttac

SEQ ID NO: 10493 - DNA, 27 bp, Homo sapiens
aaaattctttaatattgattgttttac

SEQ ID NO: 10494 - DNA, 23 bp, Homo sapiens
tgctcacattccttaaattaagg

SEQ ID NO: 10495 - DNA, 20 bp, Homo sapiens
atgagaattctagtagggat

SEQ ID NO: 10496 - DNA, 21 bp, Homo sapiens
gtaaaactttatggtttgtgg

SEQ ID NO: 10497 - DNA, 20 bp, Homo sapiens
ggcatcatatcctaaagctc

SEQ ID NO: 10498 - DNA, 22 bp, Homo sapiens
agttgaaaggttaatgtaaaac

SEQ ID NO: 10499 - DNA, 21 bp, Homo sapiens
gcctaggttatcccatatcac

SEQ ID NO: 10500 - DNA, 23 bp, Homo sapiens
agataaaaggttaatctacatcc

SEQ ID NO: 10501 - DNA, 20 bp, Homo sapiens
ggacaccagttaaacttgac

SEQ ID NO: 10502 - DNA, 23 bp, Homo sapiens
tgtggaagaaacatactttcaca

SEQ ID NO: 10503 - DNA, 23 bp, Homo sapiens
tcctgcaaatgagaaattagaac

SEQ ID NO: 10504 - DNA, 24 bp, Homo sapiens
tagtaggcagaccagcagactttt

SEQ ID NO: 10505 - DNA, 21 bp, Homo sapiens
agatctgtctgatcgtttctt

SEQ ID NO: 10506 - DNA, 20 bp, Homo sapiens
ctctgacatatgaagtgctc

SEQ ID NO: 10507 - DNA, 24 bp, Homo sapiens
cccaacacttgatattttgaagaa

SEQ ID NO: 10508 - DNA, 21 bp, Homo sapiens
tttaactggaattcgtcaagc

SEQ ID NO: 10509 - DNA, 23 bp, Homo sapiens
tgcatttggttattacataactt

SEQ ID NO: 10510 - DNA, 20 bp, Homo sapiens
gcagcactaaatgacaccac

SEQ ID NO: 10511 - DNA, 21 bp, Homo sapiens
cccagtcttttacagatggtt

SEQ ID NO: 10512 - DNA, 24 bp, Homo sapiens
gttatagaagataactggcctcat

SEQ ID NO: 10513 - DNA, 23 bp, Homo sapiens
tctaatccacattcaaattttct

SEQ ID NO: 10514 - DNA, 21 bp, Homo sapiens
tggaatgggtaactcttcttg

SEQ ID NO: 10515 - DNA, 19 bp, Homo sapiens
acaacacccttctcacagc

SEQ ID NO: 10516 - DNA, 23 bp, Homo sapiens
actggactctattttgaaaaacc

SEQ ID NO: 10517 - DNA, 16 bp, Homo sapiens
taacctcaggacggcc

SEQ ID NO: 10518 - DNA, 23 bp, Homo sapiens
cctgagaatcagagaaaccttct

SEQ ID NO: 10519 - DNA, 16 bp, Homo sapiens
gccaccgagtccccgt

SEQ ID NO: 10520 - DNA, 17 bp, Homo sapiens
ccagggaagcggcaggg

SEQ ID NO: 10521 - DNA, 17 bp, Homo sapiens
cggggcgctcagcctac

SEQ ID NO: 10522 - DNA, 16 bp, Homo sapiens
ccgccatgtgggccgt

SEQ ID NO: 10523 - DNA, 18 bp, Homo sapiens
gcagttgttgaagcgtgc

SEQ ID NO: 10524 - DNA, 16 bp, Homo sapiens
gggccgcgcgcctatc

SEQ ID NO: 10525 - DNA, 24 bp, Homo sapiens
taggcttttcttcttcaaacttca

SEQ ID NO: 10526 - DNA, 20 bp, Homo sapiens
gacttgggctctgccctcta

SEQ ID NO: 10527 - DNA, 24 bp, Homo sapiens
gctttcatctgcttgtagttctcc

SEQ ID NO: 10528 - DNA, 20 bp, Homo sapiens
gctgccacagatggggtggc

SEQ ID NO: 10529 - DNA, 24 bp, Homo sapiens
ataaatgctgtgtttacctagttt

SEQ ID NO: 10530 - DNA, 24 bp, Homo sapiens
ctgttttttttttttttttgacct

SEQ ID NO: 10531 - DNA, 28 bp, Homo sapiens
ttttcctaaaagcaataactattttagg

SEQ ID NO: 10532 - DNA, 22 bp, Homo sapiens
tcccctgtctcctctatttctg

SEQ ID NO: 10533 - DNA, 22 bp, Homo sapiens
agcaagactccatctcaaaaaa

SEQ ID NO: 10534 - DNA, 16 bp, Homo sapiens
agtgctcgggctttct

SEQ ID NO: 10535 - DNA, 21 bp, Homo sapiens
gccttttctcagaggatatgt

SEQ ID NO: 10536 - DNA, 21 bp, Homo sapiens
tacgcaccctgggtctatgag

SEQ ID NO: 10537 - DNA, 22 bp, Homo sapiens
atgtttttctggcattgagacc

SEQ ID NO: 10538 - DNA, 24 bp, Homo sapiens
ttacaagactgtctaataaagtac

SEQ ID NO: 10539 - DNA, 20 bp, Homo sapiens
cataggaggtggtgagaaag

SEQ ID NO: 10540 - DNA, 22 bp, Homo sapiens
gctctcaataaacacatgttcc

SEQ ID NO: 10541 - DNA, 21 bp, Homo sapiens
tgcccagagaaagaattgaca

SEQ ID NO: 10542 - DNA, 30 bp, Homo sapiens
ccattttagatttttaaaaatagattttat

SEQ ID NO: 10543 - DNA, 16 bp, Homo sapiens
acctcctggcacctcc

SEQ ID NO: 10544 - DNA, 22 bp, Homo sapiens
aaatcttttccttttccatgtg

SEQ ID NO: 10545 - DNA, 21 bp, Homo sapiens
ctcaacccacattatgaagca

SEQ ID NO: 10546 - DNA, 22 bp, Homo sapiens
ttcaaacaacatcctttcttcg

SEQ ID NO: 10547 - DNA, 21 bp, Homo sapiens
cgcatgctaatatgcaaagtg

SEQ ID NO: 10548 - DNA, 21 bp, Homo sapiens
agttatatgacaatgaggagg

SEQ ID NO: 10549 - DNA, 24 bp, Homo sapiens
tgcatttatatcctaagactgctg

SEQ ID NO: 10550 - DNA, 18 bp, Homo sapiens
ttcacagtcactgggtag

SEQ ID NO: 10551 - DNA, 24 bp, Homo sapiens
gttgaaggttgtattggggtatct

SEQ ID NO: 10552 - DNA, 20 bp, Homo sapiens
tgacttgcctaagtagatgc

SEQ ID NO: 10553 - DNA, 22 bp, Homo sapiens
tccaatgaaatttctgcctttc

SEQ ID NO: 10554 - DNA, 20 bp, Homo sapiens
agccttccaaactatcttgc

SEQ ID NO: 10555 - DNA, 21 bp, Homo sapiens
caccgtcaaaggaggtgccta

SEQ ID NO: 10556 - DNA, 24 bp, Homo sapiens
gtttcctttataattacaggagaa

SEQ ID NO: 10557 - DNA, 24 bp, Homo sapiens
agaaattgccatgcaaaacaggct

SEQ ID NO: 10558 - DNA, 24 bp, Homo sapiens
gggggtttggagaacgaggctcta

SEQ ID NO: 10559 - DNA, 20 bp, Homo sapiens
tagaatgtacggccaaagtg

SEQ ID NO: 10560 - DNA, 20 bp, Homo sapiens
aagaactgatgctgtcattg

SEQ ID NO: 10561 - DNA, 20 bp, Homo sapiens
tcatgaaaaattacctgtgc

SEQ ID NO: 10562 - DNA, 22 bp, Homo sapiens
agagatgcttatgtttctcatt

SEQ ID NO: 10563 - DNA, 20 bp, Homo sapiens
ccatcccagagtacctaatt

SEQ ID NO: 10564 - DNA, 19 bp, Homo sapiens
caagcagatgtgtttccag

SEQ ID NO: 10565 - DNA, 30 bp, Homo sapiens
taaaacctaaagtataaaaaaaaaaaaaag

SEQ ID NO: 10566 - DNA, 21 bp, Homo sapiens
tgtcttctaaaaatattgcac

SEQ ID NO: 10567 - DNA, 24 bp, Homo sapiens
tttagaggactttgtttttaaaat

SEQ ID NO: 10568 - DNA, 21 bp, Homo sapiens
cttgcgtacaatgatgttttc

SEQ ID NO: 10569 - DNA, 23 bp, Homo sapiens
tgcagtgtttgtgggattctgga

SEQ ID NO: 10570 - DNA, 24 bp, Homo sapiens
cgaccaacgttcttatgttcttac

SEQ ID NO: 10571 - DNA, 19 bp, Homo sapiens
tcgtgtgcttggattccag

SEQ ID NO: 10572 - DNA, 24 bp, Homo sapiens
attttttaaaacatcaaaaaatag

SEQ ID NO: 10573 - DNA, 18 bp, Homo sapiens
cctatgtgcctgccatgg

SEQ ID NO: 10574 - DNA, 23 bp, Homo sapiens
gtactgaaaaacggttacaacag

SEQ ID NO: 10575 - DNA, 22 bp, Homo sapiens
tttcttggcaggaccccccttg

SEQ ID NO: 10576 - DNA, 19 bp, Homo sapiens
agatacttcttccccagtt

SEQ ID NO: 10577 - DNA, 24 bp, Homo sapiens
aaagcacagtgttctttagttcta

SEQ ID NO: 10578 - DNA, 23 bp, Homo sapiens
tcaatcccggaaagaaacaacca

SEQ ID NO: 10579 - DNA, 20 bp, Homo sapiens
gcatgttggggaagcatttt

SEQ ID NO: 10580 - DNA, 23 bp, Homo sapiens
agtttagcactggaaacaaatac

SEQ ID NO: 10581 - DNA, 21 bp, Homo sapiens
cttgttgtaggttaaagcggc

SEQ ID NO: 10582 - DNA, 22 bp, Homo sapiens
aagaattgaacattaaaccagc

SEQ ID NO: 10583 - DNA, 24 bp, Homo sapiens
aagatgacatttattaaagatgac

SEQ ID NO: 10584 - DNA, 20 bp, Homo sapiens
agattcctcacaaccttcct

SEQ ID NO: 10585 - DNA, 20 bp, Homo sapiens
gagagaagatacttgggacc

SEQ ID NO: 10586 - DNA, 28 bp, Homo sapiens
tgcatttcaggaaaataaaagatataag

SEQ ID NO: 10587 - DNA, 23 bp, Homo sapiens
acaagtttagtttgcttattctg

SEQ ID NO: 10588 - DNA, 23 bp, Homo sapiens
agatcatgttaacctgtttaaag

SEQ ID NO: 10589 - DNA, 24 bp, Homo sapiens
tggatgatcatcatgcccttcact

SEQ ID NO: 10590 - DNA, 20 bp, Homo sapiens
ttcatcagcaggaaataaag

SEQ ID NO: 10591 - DNA, 22 bp, Homo sapiens
tggatgtgagtacgatatgttc

SEQ ID NO: 10592 - DNA, 21 bp, Homo sapiens
ccactttcacatacctctcgg

SEQ ID NO: 10593 - DNA, 23 bp, Homo sapiens
ctcactgcaccttgaaatcatgt

SEQ ID NO: 10594 - DNA, 20 bp, Homo sapiens
agctttgcaaatagatacac

SEQ ID NO: 10595 - DNA, 18 bp, Homo sapiens
tgaaccttctgaagagcc

SEQ ID NO: 10596 - DNA, 19 bp, Homo sapiens
actccttactgagatccac

SEQ ID NO: 10597 - DNA, 20 bp, Homo sapiens
taagaggagctttgatgtcc

SEQ ID NO: 10598 - DNA, 22 bp, Homo sapiens
tgtcaaatgaaattctagtgag

SEQ ID NO: 10599 - DNA, 21 bp, Homo sapiens
cctgtaactaatgtgtctcca

SEQ ID NO: 10600 - DNA, 25 bp, Homo sapiens
tcactgtgaattgttttcctataag

SEQ ID NO: 10601 - DNA, 18 bp, Homo sapiens
tcctgattttcaaagcag

SEQ ID NO: 10602 - DNA, 20 bp, Homo sapiens
ggccattgttgtttttcctc

SEQ ID NO: 10603 - DNA, 20 bp, Homo sapiens
acatttgtagtgctctcaac

SEQ ID NO: 10604 - DNA, 22 bp, Homo sapiens
actgagttcaaagccttttatg

SEQ ID NO: 10605 - DNA, 18 bp, Homo sapiens
cctactgggtacccaaat

SEQ ID NO: 10606 - DNA, 22 bp, Homo sapiens
agacaaaatctctttgcatttt

SEQ ID NO: 10607 - DNA, 20 bp, Homo sapiens
tttttaacagtacttgcctt

SEQ ID NO: 10608 - DNA, 19 bp, Homo sapiens
tgtgaattgaagcccttgg

SEQ ID NO: 10609 - DNA, 21 bp, Homo sapiens
ttttaactcattatttgacct

SEQ ID NO: 10610 - DNA, 21 bp, Homo sapiens
aggatttgctcgaatatttgg

SEQ ID NO: 10611 - DNA, 16 bp, Homo sapiens
gcgcacacagtgttct

SEQ ID NO: 10612 - DNA, 21 bp, Homo sapiens
gcataactggacaaagtgagt

SEQ ID NO: 10613 - DNA, 23 bp, Homo sapiens
aaaaaattaataagaagagaaaa

SEQ ID NO: 10614 - DNA, 24 bp, Homo sapiens
ccaaactgattaagctattttctt

SEQ ID NO: 10615 - DNA, 21 bp, Homo sapiens
ttgtggtgtttgtagaatgca

SEQ ID NO: 10616 - DNA, 20 bp, Homo sapiens
tgctgtccaatacatgagcc

SEQ ID NO: 10617 - DNA, 20 bp, Homo sapiens
tttgcttatagggtactcac

SEQ ID NO: 10618 - DNA, 17 bp, Homo sapiens
ccagaaagagcatgtcc

SEQ ID NO: 10619 - DNA, 22 bp, Homo sapiens
tgttccttcaaaacattactgg

SEQ ID NO: 10620 - DNA, 22 bp, Homo sapiens
actctctaccaaccataaatcc

SEQ ID NO: 10621 - DNA, 22 bp, Homo sapiens
acggtatgtttcacatataaac

SEQ ID NO: 10622 - DNA, 16 bp, Homo sapiens
cacaggccacagcggc

SEQ ID NO: 10623 - DNA, 22 bp, Homo sapiens
acaagatgtccttttggtggaa

SEQ ID NO: 10624 - DNA, 19 bp, Homo sapiens
cccatagtttccggctcca

SEQ ID NO: 10625 - DNA, 22 bp, Homo sapiens
ctttctgatctttctctcagga

SEQ ID NO: 10626 - DNA, 22 bp, Homo sapiens
ttgaagcatgtttctttgtttc

SEQ ID NO: 10627 - DNA, 20 bp, Homo sapiens
ttgccaaggatggtgccaag

SEQ ID NO: 10628 - DNA, 21 bp, Homo sapiens
tgggaatggcattctatattt

SEQ ID NO: 10629 - DNA, 16 bp, Homo sapiens
tgggggctcctatgga

SEQ ID NO: 10630 - DNA, 23 bp, Homo sapiens
gcattaaatttcatttcacccct

SEQ ID NO: 10631 - DNA, 23 bp, Homo sapiens
tgtgttccaggcatttgtatatt

SEQ ID NO: 10632 - DNA, 16 bp, Homo sapiens
gctgcctgctctcctc

SEQ ID NO: 10633 - DNA, 23 bp, Homo sapiens
gaaccactaatttaaaaggcaaa

SEQ ID NO: 10634 - DNA, 18 bp, Homo sapiens
cgacaccgacctgctttc

SEQ ID NO: 10635 - DNA, 22 bp, Homo sapiens
tttgtttattcttccttttctt

SEQ ID NO: 10636 - DNA, 20 bp, Homo sapiens
ggcacgctgctccttggctc

SEQ ID NO: 10637 - DNA, 24 bp, Homo sapiens
caaatgctcgtatctcagtgatgg

SEQ ID NO: 10638 - DNA, 21 bp, Homo sapiens
taaatatggccaggcagtgtg

SEQ ID NO: 10639 - DNA, 17 bp, Homo sapiens
gagcccgggaaggaaag

SEQ ID NO: 10640 - DNA, 29 bp, Homo sapiens
ttaatgatcacttgtaatttatacatcac

SEQ ID NO: 10641 - DNA, 22 bp, Homo sapiens
tggaatagtaagggtttccttc

SEQ ID NO: 10642 - DNA, 24 bp, Homo sapiens
tgacatctgttgtttcttttgaat

SEQ ID NO: 10643 - DNA, 16 bp, Homo sapiens
gccatctgcacccatc

SEQ ID NO: 10644 - DNA, 24 bp, Homo sapiens
agctgacttactcatggcctcttt

SEQ ID NO: 10645 - DNA, 20 bp, Homo sapiens
agttcctatgaatgctggac

SEQ ID NO: 10646 - DNA, 22 bp, Homo sapiens
gagcccatcattaagaagtttg

SEQ ID NO: 10647 - DNA, 20 bp, Homo sapiens
gcagtagccattcagattgt

SEQ ID NO: 10648 - DNA, 20 bp, Homo sapiens
gctggatcaatgatcccatc

SEQ ID NO: 10649 - DNA, 24 bp, Homo sapiens
tggtacatggatgctaatcagtag

SEQ ID NO: 10650 - DNA, 21 bp, Homo sapiens
gtcttctctattggtgcgttg

SEQ ID NO: 10651 - DNA, 19 bp, Homo sapiens
tggagagtgtataaatggt

SEQ ID NO: 10652 - DNA, 20 bp, Homo sapiens
acatgtccaacagaaaacat

SEQ ID NO: 10653 - DNA, 22 bp, Homo sapiens
ttcttttgtcagggtatgggat

SEQ ID NO: 10654 - DNA, 18 bp, Homo sapiens
aacagcctcatgttcgag

SEQ ID NO: 10655 - DNA, 22 bp, Homo sapiens
gggtctcagttttagtgcagcc

SEQ ID NO: 10656 - DNA, 22 bp, Homo sapiens
aaatatcctcactgattttttt

SEQ ID NO: 10657 - DNA, 16 bp, Homo sapiens
aacctcagcggtgagc

SEQ ID NO: 10658 - DNA, 22 bp, Homo sapiens
ctcatcttcctaccagaaatcg

SEQ ID NO: 10659 - DNA, 16 bp, Homo sapiens
ggcctccaaccttcgc

SEQ ID NO: 10660 - DNA, 17 bp, Homo sapiens
cgcctcctcctgtcccg

SEQ ID NO: 10661 - DNA, 16 bp, Homo sapiens
ggctgcgcgcgtatgc

SEQ ID NO: 10662 - DNA, 21 bp, Homo sapiens
gttgcaggccttattcatggg

SEQ ID NO: 10663 - DNA, 17 bp, Homo sapiens
aagagatgcggtgcctc

SEQ ID NO: 10664 - DNA, 17 bp, Homo sapiens
ggggcaggtgagcatgc

SEQ ID NO: 10665 - DNA, 17 bp, Homo sapiens
gagaagcgggctgtacc

SEQ ID NO: 10666 - DNA, 19 bp, Homo sapiens
gctgctcttttcgggccgg

SEQ ID NO: 10667 - DNA, 24 bp, Homo sapiens
tttgcaatcagcagcccagcctgg

SEQ ID NO: 10668 - DNA, 21 bp, Homo sapiens
gtggggaggggaatggttatt

SEQ ID NO: 10669 - DNA, 18 bp, Homo sapiens
agagtaacaatcgatgcc

SEQ ID NO: 10670 - DNA, 19 bp, Homo sapiens
aacacctggtctctcaagc

SEQ ID NO: 10671 - DNA, 17 bp, Homo sapiens
tgcaaaagccagggcat

SEQ ID NO: 10672 - DNA, 23 bp, Homo sapiens
ggttgagagtatcattaaaatgt

SEQ ID NO: 10673 - DNA, 25 bp, Homo sapiens
attgtatttcagttatcagctacag

SEQ ID NO: 10674 - DNA, 21 bp, Homo sapiens
gcggaccaaaaaaattatgct

SEQ ID NO: 10675 - DNA, 28 bp, Homo sapiens
ataaaattcaaccttgacaaattatttg

SEQ ID NO: 10676 - DNA, 20 bp, Homo sapiens
attaggattgggccgagcct

SEQ ID NO: 10677 - DNA, 16 bp, Homo sapiens
agacagccttagtcgg

SEQ ID NO: 10678 - DNA, 21 bp, Homo sapiens
ctccatagggttattgcatag

SEQ ID NO: 10679 - DNA, 21 bp, Homo sapiens
accccagttttaaaaagagca

SEQ ID NO: 10680 - DNA, 24 bp, Homo sapiens
acttggaaaaacagaacttaagag

SEQ ID NO: 10681 - DNA, 28 bp, Homo sapiens
ttgtgttaatcataactattacattttc

SEQ ID NO: 10682 - DNA, 22 bp, Homo sapiens
ttacaaaataacatgcaaaaac

SEQ ID NO: 10683 - DNA, 26 bp, Homo sapiens
gtaacttttttattgttacagctttc

SEQ ID NO: 10684 - DNA, 23 bp, Homo sapiens
gccaacataatcaaataagaaca

SEQ ID NO: 10685 - DNA, 23 bp, Homo sapiens
caatgcagattctttgtttcaag

SEQ ID NO: 10686 - DNA, 23 bp, Homo sapiens
cccctcccaaatcattcactgta

SEQ ID NO: 10687 - DNA, 22 bp, Homo sapiens
tgtttagtaagatgggataggg

SEQ ID NO: 10688 - DNA, 24 bp, Homo sapiens
tatttcttcaacaaccttatcagc

SEQ ID NO: 10689 - DNA, 24 bp, Homo sapiens
tgctagtaattagaatttcatttt

SEQ ID NO: 10690 - DNA, 21 bp, Homo sapiens
agtatagttctctcaaatacc

SEQ ID NO: 10691 - DNA, 19 bp, Homo sapiens
tgtttgcttgtttttgcat

SEQ ID NO: 10692 - DNA, 22 bp, Homo sapiens
actgagatatttgctcaaagat

SEQ ID NO: 10693 - DNA, 17 bp, Homo sapiens
ggctccttagctgctga

SEQ ID NO: 10694 - DNA, 21 bp, Homo sapiens
aaaatatgtagtcagaaaact

SEQ ID NO: 10695 - DNA, 18 bp, Homo sapiens
gcagtggccaactatggt

SEQ ID NO: 10696 - DNA, 23 bp, Homo sapiens
agtgagcacatgatataattagt

SEQ ID NO: 10697 - DNA, 20 bp, Homo sapiens
ttcttccaaaagcatccagg

SEQ ID NO: 10698 - DNA, 22 bp, Homo sapiens
ttgggtgaatagtatttgtcgt

SEQ ID NO: 10699 - DNA, 23 bp, Homo sapiens
aatatttcattaggaaggtagaa

SEQ ID NO: 10700 - DNA, 19 bp, Homo sapiens
gggaggttgccgaaatttc

SEQ ID NO: 10701 - DNA, 24 bp, Homo sapiens
caaattttaaaatgtgattatgag

SEQ ID NO: 10702 - DNA, 17 bp, Homo sapiens
ggttgtgaagacagccc

SEQ ID NO: 10703 - DNA, 18 bp, Homo sapiens
actcacccagcattgttg

SEQ ID NO: 10704 - DNA, 22 bp, Homo sapiens
aagcactctttacctattatat

SEQ ID NO: 10705 - DNA, 22 bp, Homo sapiens
agggtaaaaggaggaaagtata

SEQ ID NO: 10706 - DNA, 20 bp, Homo sapiens
tgtgagttgtaagcaaatgc

SEQ ID NO: 10707 - DNA, 22 bp, Homo sapiens
tcatcacttatcctagcaaagg

SEQ ID NO: 10708 - DNA, 19 bp, Homo sapiens
tgtagatgttgtggtcaac

SEQ ID NO: 10709 - DNA, 19 bp, Homo sapiens
aatggataagtatgttccc

SEQ ID NO: 10710 - DNA, 24 bp, Homo sapiens
tgtgtgtataatttttttaaaaag

SEQ ID NO: 10711 - DNA, 21 bp, Homo sapiens
gcaaaagtagatagaagcagg

SEQ ID NO: 10712 - DNA, 25 bp, Homo sapiens
tgattttttagaattctgagggatc

SEQ ID NO: 10713 - DNA, 22 bp, Homo sapiens
aaaagaggctacttctaactat

SEQ ID NO: 10714 - DNA, 21 bp, Homo sapiens
ccgcaaatgaactctgtggat

SEQ ID NO: 10715 - DNA, 24 bp, Homo sapiens
ggggtgtgacagtaggcaatttta

SEQ ID NO: 10716 - DNA, 22 bp, Homo sapiens
aactctaccttccatacttctg

SEQ ID NO: 10717 - DNA, 23 bp, Homo sapiens
acaacattgcttatgttgattct

SEQ ID NO: 10718 - DNA, 18 bp, Homo sapiens
ctgtacacaagaaccccc

SEQ ID NO: 10719 - DNA, 22 bp, Homo sapiens
tattgttttagatataatccac

SEQ ID NO: 10720 - DNA, 19 bp, Homo sapiens
tgtacatattcctcaatgt

SEQ ID NO: 10721 - DNA, 18 bp, Homo sapiens
gcatgggaacacatgaag

SEQ ID NO: 10722 - DNA, 20 bp, Homo sapiens
tgatgaagtcataataatcc

SEQ ID NO: 10723 - DNA, 23 bp, Homo sapiens
tacataaatcatgatcgtaagaa

SEQ ID NO: 10724 - DNA, 19 bp, Homo sapiens
cccaactttgcagcactat

SEQ ID NO: 10725 - DNA, 23 bp, Homo sapiens
ggtgcagtagtaccaaaacagag

SEQ ID NO: 10726 - DNA, 23 bp, Homo sapiens
caatggtgttacaatgaatgttg

SEQ ID NO: 10727 - DNA, 24 bp, Homo sapiens
tgagagattgattttctttttagg

SEQ ID NO: 10728 - DNA, 22 bp, Homo sapiens
gcttacttaccttcaggcataa

SEQ ID NO: 10729 - DNA, 22 bp, Homo sapiens
ggcaactttggccaggccaatt

SEQ ID NO: 10730 - DNA, 20 bp, Homo sapiens
ttttgtaaagctcattccac

SEQ ID NO: 10731 - DNA, 19 bp, Homo sapiens
aattgaaggcaggaaaagc

SEQ ID NO: 10732 - DNA, 22 bp, Homo sapiens
acagataatgctttcgaaattg

SEQ ID NO: 10733 - DNA, 19 bp, Homo sapiens
cacggatgactcagacagt

SEQ ID NO: 10734 - DNA, 18 bp, Homo sapiens
catactctggcttcaggg

SEQ ID NO: 10735 - DNA, 22 bp, Homo sapiens
gttagactagttatatacatac

SEQ ID NO: 10736 - DNA, 19 bp, Homo sapiens
tcaaacaagccaccattct

SEQ ID NO: 10737 - DNA, 29 bp, Homo sapiens
ctataattttataagtaagaaattcttag

SEQ ID NO: 10738 - DNA, 25 bp, Homo sapiens
acagatttttacaaatgtaagcaac

SEQ ID NO: 10739 - DNA, 19 bp, Homo sapiens
tcagatcttgtggaagccc

SEQ ID NO: 10740 - DNA, 24 bp, Homo sapiens
agtcaacacttttaattataacat

SEQ ID NO: 10741 - DNA, 21 bp, Homo sapiens
gtcacgagagttgtgaggaga

SEQ ID NO: 10742 - DNA, 20 bp, Homo sapiens
ggccagtggactcttacaga

SEQ ID NO: 10743 - DNA, 24 bp, Homo sapiens
aagataaggaaataatctatacaa

SEQ ID NO: 10744 - DNA, 21 bp, Homo sapiens
actgctagtagaggagctgac

SEQ ID NO: 10745 - DNA, 20 bp, Homo sapiens
ccaatggttaggcatttgac

SEQ ID NO: 10746 - DNA, 21 bp, Homo sapiens
tggtataatgttttccccctc

SEQ ID NO: 10747 - DNA, 22 bp, Homo sapiens
atgtttaaaaatacctgttgct

SEQ ID NO: 10748 - DNA, 27 bp, Homo sapiens
aattcattttaaggcttatggtaaaac

SEQ ID NO: 10749 - DNA, 18 bp, Homo sapiens
ttgactgcctcaggagtc

SEQ ID NO: 10750 - DNA, 23 bp, Homo sapiens
tctctttaaaaatgaaagggttc

SEQ ID NO: 10751 - DNA, 19 bp, Homo sapiens
ccttggatactctgaggct

SEQ ID NO: 10752 - DNA, 24 bp, Homo sapiens
tgctcagtatgttagttttgtttc

SEQ ID NO: 10753 - DNA, 16 bp, Homo sapiens
aaaatgcttgctgcct

SEQ ID NO: 10754 - DNA, 21 bp, Homo sapiens
aaaagaatcacccaatgactc

SEQ ID NO: 10755 - DNA, 20 bp, Homo sapiens
tgctatagacgattcaagtg

SEQ ID NO: 10756 - DNA, 19 bp, Homo sapiens
gtgactttgagaatgccag

SEQ ID NO: 10757 - DNA, 22 bp, Homo sapiens
tcagaacttcaattatactgcc

SEQ ID NO: 10758 - DNA, 22 bp, Homo sapiens
agttcatgagtggcaatggagg

SEQ ID NO: 10759 - DNA, 19 bp, Homo sapiens
acgttgcacgactagtatg

SEQ ID NO: 10760 - DNA, 22 bp, Homo sapiens
tgtagcatattgtagcttttct

SEQ ID NO: 10761 - DNA, 18 bp, Homo sapiens
tccagagaaggcaaacgc

SEQ ID NO: 10762 - DNA, 21 bp, Homo sapiens
ttcattttagaatcaactggc

SEQ ID NO: 10763 - DNA, 25 bp, Homo sapiens
tccaaaagaaaagagaaagaagtag

SEQ ID NO: 10764 - DNA, 23 bp, Homo sapiens
agaaggaggagtttcagcaaatc

SEQ ID NO: 10765 - DNA, 17 bp, Homo sapiens
tatctctgccactgctt

SEQ ID NO: 10766 - DNA, 16 bp, Homo sapiens
tggccaatagctccag

SEQ ID NO: 10767 - DNA, 21 bp, Homo sapiens
ttgcaataattatgctccatc

SEQ ID NO: 10768 - DNA, 18 bp, Homo sapiens
ccactccaagggcataca

SEQ ID NO: 10769 - DNA, 27 bp, Homo sapiens
caaaaacaaaactaggtatgtaagaag

SEQ ID NO: 10770 - DNA, 21 bp, Homo sapiens
acaggagaaatcagaacttcc

SEQ ID NO: 10771 - DNA, 21 bp, Homo sapiens
aaaactgttcttaggctggag

SEQ ID NO: 10772 - DNA, 19 bp, Homo sapiens
ctaatcctccacccatcat

SEQ ID NO: 10773 - DNA, 20 bp, Homo sapiens
acggaactggaagctattat

SEQ ID NO: 10774 - DNA, 24 bp, Homo sapiens
caaaataaaggttttttattaggc

SEQ ID NO: 10775 - DNA, 29 bp, Homo sapiens
ccaaaagatttgaaatttatttatgaagg

SEQ ID NO: 10776 - DNA, 23 bp, Homo sapiens
acacactacacacacatatatat

SEQ ID NO: 10777 - DNA, 24 bp, Homo sapiens
gttatcataggtcagaaatctatg

SEQ ID NO: 10778 - DNA, 23 bp, Homo sapiens
aagaaaaatcaaaagatatgcta

SEQ ID NO: 10779 - DNA, 19 bp, Homo sapiens
actgctctccatgaagaac

SEQ ID NO: 10780 - DNA, 22 bp, Homo sapiens
gaagccaaacagagatagataa

SEQ ID NO: 10781 - DNA, 24 bp, Homo sapiens
atggtattatggaattagtatatc

SEQ ID NO: 10782 - DNA, 19 bp, Homo sapiens
tgcgagtaacagtatccat

SEQ ID NO: 10783 - DNA, 20 bp, Homo sapiens
ccagtttaacacactgatgt

SEQ ID NO: 10784 - DNA, 24 bp, Homo sapiens
ttttgtttaccctaacataggttc

SEQ ID NO: 10785 - DNA, 19 bp, Homo sapiens
actctaatggctcacatgt

SEQ ID NO: 10786 - DNA, 21 bp, Homo sapiens
accacttcccagagcaggtga

SEQ ID NO: 10787 - DNA, 21 bp, Homo sapiens
aacaactgcttcacattttaa

SEQ ID NO: 10788 - DNA, 22 bp, Homo sapiens
tcaggaacactatttcaaacca

SEQ ID NO: 10789 - DNA, 24 bp, Homo sapiens
agaattgtaaataaattaccatcc

SEQ ID NO: 10790 - DNA, 26 bp, Homo sapiens
ttaaattctttcacatcttattatag

SEQ ID NO: 10791 - DNA, 21 bp, Homo sapiens
tctatggtgaagtattatgtc

SEQ ID NO: 10792 - DNA, 22 bp, Homo sapiens
ttttctttctaggaaaattaaa

SEQ ID NO: 10793 - DNA, 21 bp, Homo sapiens
aaaatgcttatcttgttttct

SEQ ID NO: 10794 - DNA, 21 bp, Homo sapiens
cggtgtagtgattattatgga

SEQ ID NO: 10795 - DNA, 21 bp, Homo sapiens
tggcatataagttccttctca

SEQ ID NO: 10796 - DNA, 22 bp, Homo sapiens
gttagaactctttcagtaattg

SEQ ID NO: 10797 - DNA, 17 bp, Homo sapiens
cgttttccaccaaagcc

SEQ ID NO: 10798 - DNA, 22 bp, Homo sapiens
tgaacctatcttggttaactag

SEQ ID NO: 10799 - DNA, 24 bp, Homo sapiens
ataggtaagaatccttaactacac

SEQ ID NO: 10800 - DNA, 22 bp, Homo sapiens
acttttcagtctattcttattc

SEQ ID NO: 10801 - DNA, 17 bp, Homo sapiens
taagtgggctcatgcag

SEQ ID NO: 10802 - DNA, 24 bp, Homo sapiens
tctctttcttgttggctctggagg

SEQ ID NO: 10803 - DNA, 23 bp, Homo sapiens
aagaggaggaggaagaagaggga

SEQ ID NO: 10804 - DNA, 21 bp, Homo sapiens
attaggtatggctacagctac

SEQ ID NO: 10805 - DNA, 23 bp, Homo sapiens
tgagcatgattttttttaaaccc

SEQ ID NO: 10806 - DNA, 21 bp, Homo sapiens
caaaaatacaatcttacctga

SEQ ID NO: 10807 - DNA, 23 bp, Homo sapiens
tgtatcaaatgtgagtttggtta

SEQ ID NO: 10808 - DNA, 21 bp, Homo sapiens
aatgttataaggtatcagagc

SEQ ID NO: 10809 - DNA, 29 bp, Homo sapiens
ttaacatgtaatgtcttaattttaggtag

SEQ ID NO: 10810 - DNA, 24 bp, Homo sapiens
acatgtctgtatgtttattatgtt

SEQ ID NO: 10811 - DNA, 24 bp, Homo sapiens
tgtacttacagataccacctctct

SEQ ID NO: 10812 - DNA, 17 bp, Homo sapiens
aggcggtacaaagcagc

SEQ ID NO: 10813 - DNA, 30 bp, Homo sapiens
attgttaaaaataattatttttaaaatcag

SEQ ID NO: 10814 - DNA, 20 bp, Homo sapiens
actcacctgctagactagca

SEQ ID NO: 10815 - DNA, 20 bp, Homo sapiens
caataaccagccatgtttcc

SEQ ID NO: 10816 - DNA, 29 bp, Homo sapiens
agtagtgtctttacattatttaattaaat

SEQ ID NO: 10817 - DNA, 20 bp, Homo sapiens
tgtttatgctttctccacag

SEQ ID NO: 10818 - DNA, 30 bp, Homo sapiens
aaatgtaataaataaaataacattttttta

SEQ ID NO: 10819 - DNA, 21 bp, Homo sapiens
cacattgatcctaactttgct

SEQ ID NO: 10820 - DNA, 27 bp, Homo sapiens
ctctttaaaaaatatctactgtgtttc

SEQ ID NO: 10821 - DNA, 17 bp, Homo sapiens
gctgtaacacacgcctg

SEQ ID NO: 10822 - DNA, 22 bp, Homo sapiens
aaggacatttttaaagtcctga

SEQ ID NO: 10823 - DNA, 27 bp, Homo sapiens
caaattacgtagtaatacacatttacc

SEQ ID NO: 10824 - DNA, 22 bp, Homo sapiens
acctgtatctaactcagtgttc

SEQ ID NO: 10825 - DNA, 22 bp, Homo sapiens
tcaattaaatcactaaaacccc

SEQ ID NO: 10826 - DNA, 19 bp, Homo sapiens
ttggattttctgccaggcg

SEQ ID NO: 10827 - DNA, 19 bp, Homo sapiens
gattgccaggtcaatgaaa

SEQ ID NO: 10828 - DNA, 21 bp, Homo sapiens
tcctggatatactggttttgc

SEQ ID NO: 10829 - DNA, 28 bp, Homo sapiens
ttatgaatttaaatatctttaaaccttg

SEQ ID NO: 10830 - DNA, 21 bp, Homo sapiens
accttggtttgaaaatgaatt

SEQ ID NO: 10831 - DNA, 23 bp, Homo sapiens
cctttccaattttttcctcctac

SEQ ID NO: 10832 - DNA, 18 bp, Homo sapiens
aagatggaacacaatgat

SEQ ID NO: 10833 - DNA, 23 bp, Homo sapiens
cacaattcttttttaaaggctcg

SEQ ID NO: 10834 - DNA, 29 bp, Homo sapiens
tcttatttttaattaaaatttaccattac

SEQ ID NO: 10835 - DNA, 24 bp, Homo sapiens
actgagatgtggaaggaaggaaac

SEQ ID NO: 10836 - DNA, 21 bp, Homo sapiens
tgtctccagtttcttggacct

SEQ ID NO: 10837 - DNA, 22 bp, Homo sapiens
agcagccttttattttatctgg

SEQ ID NO: 10838 - DNA, 22 bp, Homo sapiens
tgtcttagctgaagtaccagat

SEQ ID NO: 10839 - DNA, 26 bp, Homo sapiens
ataaattttaaactttgtactgtttc

SEQ ID NO: 10840 - DNA, 19 bp, Homo sapiens
tcctaaatgaggaagtggc

SEQ ID NO: 10841 - DNA, 21 bp, Homo sapiens
ttttttttttcttctcctcct

SEQ ID NO: 10842 - DNA, 23 bp, Homo sapiens
atagtttcatggttgttaatttt

SEQ ID NO: 10843 - DNA, 18 bp, Homo sapiens
tgtggatcttgcaccaac

SEQ ID NO: 10844 - DNA, 21 bp, Homo sapiens
gtattccttctattccaagct

SEQ ID NO: 10845 - DNA, 16 bp, Homo sapiens
tctgaagcttcccgcc

SEQ ID NO: 10846 - DNA, 22 bp, Homo sapiens
tgaaagacacattgtatgaaga

SEQ ID NO: 10847 - DNA, 16 bp, Homo sapiens
tcaccacctcaggccc

SEQ ID NO: 10848 - DNA, 23 bp, Homo sapiens
tgcacatgttttataatcacttt

SEQ ID NO: 10849 - DNA, 18 bp, Homo sapiens
actccacttagccccaat

SEQ ID NO: 10850 - DNA, 17 bp, Homo sapiens
ttgtcgttgttagggcg

SEQ ID NO: 10851 - DNA, 23 bp, Homo sapiens
attgttaaaaagatactttattt

SEQ ID NO: 10852 - DNA, 23 bp, Homo sapiens
gacgccgcctaaaggatattggg

SEQ ID NO: 10853 - DNA, 23 bp, Homo sapiens
cgggaaaagaaaaaaaacttacc

SEQ ID NO: 10854 - DNA, 17 bp, Homo sapiens
aaccaaaggcggaaata

SEQ ID NO: 10855 - DNA, 21 bp, Homo sapiens
cacttttcaggtcaatagctg

SEQ ID NO: 10856 - DNA, 24 bp, Homo sapiens
acagataatgtataattgatagat

SEQ ID NO: 10857 - DNA, 16 bp, Homo sapiens
ttgtatcagcagcacc

SEQ ID NO: 10858 - DNA, 23 bp, Homo sapiens
gaaatgtctgcattttacttggt

SEQ ID NO: 10859 - DNA, 18 bp, Homo sapiens
accttctgagggtcaagc

SEQ ID NO: 10860 - DNA, 25 bp, Homo sapiens
atacacattggtttcttcctatttt

SEQ ID NO: 10861 - DNA, 22 bp, Homo sapiens
aaactgcaattgtcaaaagagg

SEQ ID NO: 10862 - DNA, 20 bp, Homo sapiens
gtaccaaggccctgcaaaag

SEQ ID NO: 10863 - DNA, 21 bp, Homo sapiens
actgtgtcatcttcagagttg

SEQ ID NO: 10864 - DNA, 23 bp, Homo sapiens
atttcatggaggtggtcctgggc

SEQ ID NO: 10865 - DNA, 19 bp, Homo sapiens
gcctgccactaaagaatgc

SEQ ID NO: 10866 - DNA, 22 bp, Homo sapiens
gtcattgctaaataaaggttgc

SEQ ID NO: 10867 - DNA, 22 bp, Homo sapiens
cttggcgtagtctttaagaatc

SEQ ID NO: 10868 - DNA, 24 bp, Homo sapiens
agtctgaataatcttaaaaaaaaa

SEQ ID NO: 10869 - DNA, 23 bp, Homo sapiens
tatttgggtgaagagagtattta

SEQ ID NO: 10870 - DNA, 19 bp, Homo sapiens
ttccctcctctccttgcag

SEQ ID NO: 10871 - DNA, 19 bp, Homo sapiens
caatttcccctgcatctta

SEQ ID NO: 10872 - DNA, 20 bp, Homo sapiens
tgctgagccagaaacttcag

SEQ ID NO: 10873 - DNA, 23 bp, Homo sapiens
aaaataatgatacatgaaaaatt

SEQ ID NO: 10874 - DNA, 20 bp, Homo sapiens
cggtcacctcgtcgtagtcc

SEQ ID NO: 10875 - DNA, 17 bp, Homo sapiens
taccctccgcggacggt

SEQ ID NO: 10876 - DNA, 22 bp, Homo sapiens
gctggcgctgagcaggaagaag

SEQ ID NO: 10877 - DNA, 18 bp, Homo sapiens
ccccgcgcgcacgcgcaa

SEQ ID NO: 10878 - DNA, 18 bp, Homo sapiens
tccggggtcgctatcagg

SEQ ID NO: 10879 - DNA, 24 bp, Homo sapiens
tctgtgggcctctgagggcggcat

SEQ ID NO: 10880 - DNA, 16 bp, Homo sapiens
gacagtgtggttgcgc

SEQ ID NO: 10881 - DNA, 16 bp, Homo sapiens
agcgcctcatcttctt

SEQ ID NO: 10882 - DNA, 16 bp, Homo sapiens
gagccggtagcggcgg

SEQ ID NO: 10883 - DNA, 17 bp, Homo sapiens
cctgtcctccgtgttcc

SEQ ID NO: 10884 - DNA, 17 bp, Homo sapiens
ctgccccaggtccacgt

SEQ ID NO: 10885 - DNA, 16 bp, Homo sapiens
cgaacctgagcagcgc

SEQ ID NO: 10886 - DNA, 17 bp, Homo sapiens
gtggacaggtagacgtc

SEQ ID NO: 10887 - DNA, 24 bp, Homo sapiens
cggccgcgaggtgccccacagctg

SEQ ID NO: 10888 - DNA, 24 bp, Homo sapiens
aaggaccgcgacaggtcctccgag

SEQ ID NO: 10889 - DNA, 17 bp, Homo sapiens
gggctggagccggggcg

SEQ ID NO: 10890 - DNA, 16 bp, Homo sapiens
ggggagtgacagcgtc

SEQ ID NO: 10891 - DNA, 19 bp, Homo sapiens
gggagttcagtcaggacgt

SEQ ID NO: 10892 - DNA, 19 bp, Homo sapiens
gaagcgttcccaagccacc

SEQ ID NO: 10893 - DNA, 21 bp, Homo sapiens
ttttcatagcattgtaggccc

SEQ ID NO: 10894 - DNA, 19 bp, Homo sapiens
ccctgcctcttccacagcc

SEQ ID NO: 10895 - DNA, 18 bp, Homo sapiens
gtcaggtgatggctcacc

SEQ ID NO: 10896 - DNA, 20 bp, Homo sapiens
cttgctttctccagggtcag

SEQ ID NO: 10897 - DNA, 23 bp, Homo sapiens
tcctggaaaatgaagtcagaaca

SEQ ID NO: 10898 - DNA, 20 bp, Homo sapiens
tggaagcaagacagtggggc

SEQ ID NO: 10899 - DNA, 18 bp, Homo sapiens
tgagcaaagggggtgtat

SEQ ID NO: 10900 - DNA, 20 bp, Homo sapiens
cctgctctctgccttcctgc

SEQ ID NO: 10901 - DNA, 22 bp, Homo sapiens
cccacgaagaacaaggagattg

SEQ ID NO: 10902 - DNA, 24 bp, Homo sapiens
gcgtgtggggatggcaggatgttc

SEQ ID NO: 10903 - DNA, 20 bp, Homo sapiens
agacagacaccttacctgtc

SEQ ID NO: 10904 - DNA, 24 bp, Homo sapiens
aaaccttttaaaaagaagtgaatg

SEQ ID NO: 10905 - DNA, 24 bp, Homo sapiens
tgaaatcaagggccaggcacacgc

SEQ ID NO: 10906 - DNA, 23 bp, Homo sapiens
gtgtgaggacgactggaaggccc

SEQ ID NO: 10907 - DNA, 23 bp, Homo sapiens
atcacagacatagcttcctcttc

SEQ ID NO: 10908 - DNA, 24 bp, Homo sapiens
tgggctccttcatttcagggcagc

SEQ ID NO: 10909 - DNA, 22 bp, Homo sapiens
ggcactgtgagaccgagactgt

SEQ ID NO: 10910 - DNA, 21 bp, Homo sapiens
gatctgcaggaagctgaagcc

SEQ ID NO: 10911 - DNA, 22 bp, Homo sapiens
actggatggatcttgagaaagc

SEQ ID NO: 10912 - DNA, 17 bp, Homo sapiens
agatctggcccatgcct

SEQ ID NO: 10913 - DNA, 24 bp, Homo sapiens
ttccagctggttatctgtcactct

SEQ ID NO: 10914 - DNA, 21 bp, Homo sapiens
tcaagtactcaactccaacct

SEQ ID NO: 10915 - DNA, 20 bp, Homo sapiens
tgggcatgcagacaggcttc

SEQ ID NO: 10916 - DNA, 18 bp, Homo sapiens
ccttgagggacatcacag

SEQ ID NO: 10917 - DNA, 20 bp, Homo sapiens
tgtttgtcgtgctgtttgtc

SEQ ID NO: 10918 - DNA, 22 bp, Homo sapiens
tgcctgtaagtaaggttcacca

SEQ ID NO: 10919 - DNA, 19 bp, Homo sapiens
ctgacttgccaagaatttc

SEQ ID NO: 10920 - DNA, 19 bp, Homo sapiens
ccgctccctagcgccatga

SEQ ID NO: 10921 - DNA, 18 bp, Homo sapiens
caccatgtagccaaatgc

SEQ ID NO: 10922 - DNA, 22 bp, Homo sapiens
tcacaaagataccataaaaaat

SEQ ID NO: 10923 - DNA, 16 bp, Homo sapiens
tcgtcagcgccaccag

SEQ ID NO: 10924 - DNA, 24 bp, Homo sapiens
ccttgttttgaacagggacagaaa

SEQ ID NO: 10925 - DNA, 17 bp, Homo sapiens
gccagtgggcacatggg

SEQ ID NO: 10926 - DNA, 24 bp, Homo sapiens
cgttaggagtgtgcatattttatg

SEQ ID NO: 10927 - DNA, 24 bp, Homo sapiens
gacaaaatagggattcatgggttg

SEQ ID NO: 10928 - DNA, 17 bp, Homo sapiens
gactggcggatgctgct

SEQ ID NO: 10929 - DNA, 24 bp, Homo sapiens
tttgagtgtggagaaaacattctg

SEQ ID NO: 10930 - DNA, 17 bp, Homo sapiens
ctcagggatgaacctgg

SEQ ID NO: 10931 - DNA, 24 bp, Homo sapiens
cagctctttgcttctggcttgtga

SEQ ID NO: 10932 - DNA, 18 bp, Homo sapiens
ccttgcggatgatcacct

SEQ ID NO: 10933 - DNA, 22 bp, Homo sapiens
acctatggctgtgctctacctg

SEQ ID NO: 10934 - DNA, 16 bp, Homo sapiens
tgcttacctcactcgg

SEQ ID NO: 10935 - DNA, 24 bp, Homo sapiens
ctgagattggaccttgtactgcca

SEQ ID NO: 10936 - DNA, 16 bp, Homo sapiens
tgggtgctgctgctct

SEQ ID NO: 10937 - DNA, 18 bp, Homo sapiens
atttgaagaggcagaggt

SEQ ID NO: 10938 - DNA, 19 bp, Homo sapiens
gggaatgggcagttggggc

SEQ ID NO: 10939 - DNA, 24 bp, Homo sapiens
gttgtgccttccactatctttgac

SEQ ID NO: 10940 - DNA, 24 bp, Homo sapiens
aaaacacagtcagtatacttactg

SEQ ID NO: 10941 - DNA, 19 bp, Homo sapiens
gatattccaggttcgaagc

SEQ ID NO: 10942 - DNA, 21 bp, Homo sapiens
cagctaagatgccagggattc

SEQ ID NO: 10943 - DNA, 16 bp, Homo sapiens
ctcaggcaggtctctt

SEQ ID NO: 10944 - DNA, 23 bp, Homo sapiens
tcccatacacttatgatgttgtt

SEQ ID NO: 10945 - DNA, 20 bp, Homo sapiens
ttgtctgaggcatgtctgta

SEQ ID NO: 10946 - DNA, 22 bp, Homo sapiens
tcccacaacattctggatctgc

SEQ ID NO: 10947 - DNA, 21 bp, Homo sapiens
cccattttttccatctaacac

SEQ ID NO: 10948 - DNA, 20 bp, Homo sapiens
ccactgatatggtcatcctg

SEQ ID NO: 10949 - DNA, 18 bp, Homo sapiens
gcagggttacagttactg

SEQ ID NO: 10950 - DNA, 19 bp, Homo sapiens
agttcacaaagatgtcccc

SEQ ID NO: 10951 - DNA, 24 bp, Homo sapiens
ctgaaataattgcattgtaaaagt

SEQ ID NO: 10952 - DNA, 16 bp, Homo sapiens
gcagcagcagccaggc

SEQ ID NO: 10953 - DNA, 24 bp, Homo sapiens
ccagctttcttctgcactctgttt

SEQ ID NO: 10954 - DNA, 17 bp, Homo sapiens
agaaggacactgccacc

SEQ ID NO: 10955 - DNA, 23 bp, Homo sapiens
gcttgatactcctaacttgcatg

SEQ ID NO: 10956 - DNA, 21 bp, Homo sapiens
ctcagtgaagaccccaaacca

SEQ ID NO: 10957 - DNA, 23 bp, Homo sapiens
ttgaagtcccagcatatgtgttg

SEQ ID NO: 10958 - DNA, 20 bp, Homo sapiens
gatgggcttgattttattct

SEQ ID NO: 10959 - DNA, 19 bp, Homo sapiens
atggccactgccctcttcc

SEQ ID NO: 10960 - DNA, 19 bp, Homo sapiens
agtctcagaagacactttc

SEQ ID NO: 10961 - DNA, 24 bp, Homo sapiens
tgtagccaaataatacaagtctgg

SEQ ID NO: 10962 - DNA, 22 bp, Homo sapiens
aatcttggctatagccccttcc

SEQ ID NO: 10963 - DNA, 17 bp, Homo sapiens
accatggaaaaggcagc

SEQ ID NO: 10964 - DNA, 24 bp, Homo sapiens
aaatttgggaagaaagtatgtttg

SEQ ID NO: 10965 - DNA, 16 bp, Homo sapiens
agctgactcccacacc

SEQ ID NO: 10966 - DNA, 23 bp, Homo sapiens
ctaccctctttcctttgcttctc

SEQ ID NO: 10967 - DNA, 21 bp, Homo sapiens
tgggacttaccaaggtaaacg

SEQ ID NO: 10968 - DNA, 19 bp, Homo sapiens
agtttggagtcacggctgc

SEQ ID NO: 10969 - DNA, 18 bp, Homo sapiens
gctcacattcaagccagt

SEQ ID NO: 10970 - DNA, 21 bp, Homo sapiens
ccacagtggtgagaaacatgg

SEQ ID NO: 10971 - DNA, 16 bp, Homo sapiens
gtactggatggagccc

SEQ ID NO: 10972 - DNA, 24 bp, Homo sapiens
catcctgtctccctacttcgttta

SEQ ID NO: 10973 - DNA, 17 bp, Homo sapiens
ggtcgtaggcacctatg

SEQ ID NO: 10974 - DNA, 24 bp, Homo sapiens
ttctaatctgactgctcagactgt

SEQ ID NO: 10975 - DNA, 20 bp, Homo sapiens
agaaacaaggtgaggatggc

SEQ ID NO: 10976 - DNA, 18 bp, Homo sapiens
gtcctgggagcataaagg

SEQ ID NO: 10977 - DNA, 23 bp, Homo sapiens
accctttgactcttagcatctgg

SEQ ID NO: 10978 - DNA, 21 bp, Homo sapiens
ctgaggctccgtctgctttgc

SEQ ID NO: 10979 - DNA, 17 bp, Homo sapiens
tgagacctggccagacc

SEQ ID NO: 10980 - DNA, 24 bp, Homo sapiens
tgggaagtctgaccatcctgacag

SEQ ID NO: 10981 - DNA, 24 bp, Homo sapiens
aatggctaaactagtccatggtgt

SEQ ID NO: 10982 - DNA, 20 bp, Homo sapiens
cactcccagacaccattgac

SEQ ID NO: 10983 - DNA, 19 bp, Homo sapiens
catctccatggcagtagcc

SEQ ID NO: 10984 - DNA, 23 bp, Homo sapiens
accatcttttaacatccttgtgt

SEQ ID NO: 10985 - DNA, 22 bp, Homo sapiens
atctgctgcaggattctcttcc

SEQ ID NO: 10986 - DNA, 20 bp, Homo sapiens
cccttactggaagcgatgtt

SEQ ID NO: 10987 - DNA, 22 bp, Homo sapiens
actgggaggcatctttttaaaa

SEQ ID NO: 10988 - DNA, 16 bp, Homo sapiens
cggagtctgcacaagc

SEQ ID NO: 10989 - DNA, 24 bp, Homo sapiens
aaacacagaaaaactccaagtcac

SEQ ID NO: 10990 - DNA, 18 bp, Homo sapiens
caggagcaagtcagacac

SEQ ID NO: 10991 - DNA, 21 bp, Homo sapiens
ttaaaagcacagccttctaac

SEQ ID NO: 10992 - DNA, 22 bp, Homo sapiens
gaaagagatgctcggaaagttc

SEQ ID NO: 10993 - DNA, 20 bp, Homo sapiens
tcattccccctctttgtttt

SEQ ID NO: 10994 - DNA, 19 bp, Homo sapiens
gcccctatgaaaagaccag

SEQ ID NO: 10995 - DNA, 24 bp, Homo sapiens
tctccatgacacaggatttgctat

SEQ ID NO: 10996 - DNA, 22 bp, Homo sapiens
aaccctacaaaatccatggcct

SEQ ID NO: 10997 - DNA, 24 bp, Homo sapiens
gctatctttccattttattagaac

SEQ ID NO: 10998 - DNA, 18 bp, Homo sapiens
caatgcctccagcaccaa

SEQ ID NO: 10999 - DNA, 22 bp, Homo sapiens
aatgagctcttggattctttgg

SEQ ID NO: 11000 - DNA, 16 bp, Homo sapiens
actgtagccatggagg

SEQ ID NO: 11001 - DNA, 18 bp, Homo sapiens
tggctggacttcatcttc

SEQ ID NO: 11002 - DNA, 17 bp, Homo sapiens
gatagagccaccgcctg

SEQ ID NO: 11003 - DNA, 23 bp, Homo sapiens
gtttctgggtgatcctctgtggc

SEQ ID NO: 11004 - DNA, 23 bp, Homo sapiens
ctacaacaagctgtgctgcaagt

SEQ ID NO: 11005 - DNA, 17 bp, Homo sapiens
cttggtgatggccgcac

SEQ ID NO: 11006 - DNA, 19 bp, Homo sapiens
aaggcgacaagtcaatatt

SEQ ID NO: 11007 - DNA, 21 bp, Homo sapiens
aacacgtcaatgtcgttgtgc

SEQ ID NO: 11008 - DNA, 19 bp, Homo sapiens
ccttatcttgtcctttggt

SEQ ID NO: 11009 - DNA, 19 bp, Homo sapiens
gttgttgtacaggttacag

SEQ ID NO: 11010 - DNA, 22 bp, Homo sapiens
gtctctgggctcttccatatgc

SEQ ID NO: 11011 - DNA, 19 bp, Homo sapiens
ggacaagacttccatccta

SEQ ID NO: 11012 - DNA, 18 bp, Homo sapiens
gctttgacactgaaccca

SEQ ID NO: 11013 - DNA, 24 bp, Homo sapiens
atccggaagatctcgtcaagtaac

SEQ ID NO: 11014 - DNA, 16 bp, Homo sapiens
ggagaaaacggtcacc

SEQ ID NO: 11015 - DNA, 24 bp, Homo sapiens
cctccaagaagagctacgtagttc

SEQ ID NO: 11016 - DNA, 22 bp, Homo sapiens
catagacagagaggaggggggc

SEQ ID NO: 11017 - DNA, 18 bp, Homo sapiens
gtgccctgcggccgcagc

SEQ ID NO: 11018 - DNA, 20 bp, Homo sapiens
agaggcagagttataaacgg

SEQ ID NO: 11019 - DNA, 16 bp, Homo sapiens
cgcttccccaggaccc

SEQ ID NO: 11020 - DNA, 16 bp, Homo sapiens
ggcgggacagccactg

SEQ ID NO: 11021 - DNA, 17 bp, Homo sapiens
ggtgggcgtggacttgg

SEQ ID NO: 11022 - DNA, 16 bp, Homo sapiens
gcagtgccccgcttct

SEQ ID NO: 11023 - DNA, 16 bp, Homo sapiens
cagcttcggcatctgc

SEQ ID NO: 11024 - DNA, 21 bp, Homo sapiens
ccagatttgcctgaaccaagc

SEQ ID NO: 11025 - DNA, 16 bp, Homo sapiens
ctcagtaacctgtggc

SEQ ID NO: 11026 - DNA, 24 bp, Homo sapiens
caggggcaggggctgcaggtggct

SEQ ID NO: 11027 - DNA, 19 bp, Homo sapiens
cagctctgccagtgcgggc

SEQ ID NO: 11028 - DNA, 17 bp, Homo sapiens
acgctcctcctggcaga

SEQ ID NO: 11029 - DNA, 17 bp, Homo sapiens
actgtcccacacctcct

SEQ ID NO: 11030 - DNA, 16 bp, Homo sapiens
ctgggtgccgttgcca

SEQ ID NO: 11031 - DNA, 16 bp, Homo sapiens
agccgggccctggtcc

SEQ ID NO: 11032 - DNA, 16 bp, Homo sapiens
tcattgcagtgcttgg

SEQ ID NO: 11033 - DNA, 16 bp, Homo sapiens
acgcccggcccgagag

SEQ ID NO: 11034 - DNA, 24 bp, Homo sapiens
tgaatgcagcgcacggagcgcacc

SEQ ID NO: 11035 - DNA, 17 bp, Homo sapiens
cgtgcgctgcattcagc

SEQ ID NO: 11036 - DNA, 19 bp, Homo sapiens
ggggattgcgtacctggga

SEQ ID NO: 11037 - DNA, 17 bp, Homo sapiens
cacaggcgaatgggagc

SEQ ID NO: 11038 - DNA, 24 bp, Homo sapiens
agctcgcggctgcaggcccggcgg

SEQ ID NO: 11039 - DNA, 20 bp, Homo sapiens
caggcaggttctccaggtgc

SEQ ID NO: 11040 - DNA, 19 bp, Homo sapiens
gggtggtgttgtcgtgtag

SEQ ID NO: 11041 - DNA, 16 bp, Homo sapiens
cctctgtgctcgctgt

SEQ ID NO: 11042 - DNA, 17 bp, Homo sapiens
cccacaggtctggctac

SEQ ID NO: 11043 - DNA, 16 bp, Homo sapiens
caggaatgctcccagc

SEQ ID NO: 11044 - DNA, 24 bp, Homo sapiens
tagattccatgaaatgtggtgaga

SEQ ID NO: 11045 - DNA, 24 bp, Homo sapiens
acaagatggtacaccgtggcttct

SEQ ID NO: 11046 - DNA, 16 bp, Homo sapiens
ctccaagcacgggagc

SEQ ID NO: 11047 - DNA, 24 bp, Homo sapiens
cgagctctctgccttcagggtccc

SEQ ID NO: 11048 - DNA, 19 bp, Homo sapiens
gagctgggggcactcacac

SEQ ID NO: 11049 - DNA, 24 bp, Homo sapiens
tggtgcagcccacccctccttgca

SEQ ID NO: 11050 - DNA, 19 bp, Homo sapiens
gctttgggcttcgagaggg

SEQ ID NO: 11051 - DNA, 21 bp, Homo sapiens
gcccacccttattgtcatcac

SEQ ID NO: 11052 - DNA, 24 bp, Homo sapiens
gcctccggcggcagccatacttgg

SEQ ID NO: 11053 - DNA, 20 bp, Homo sapiens
cattgccgctaagcccttgc

SEQ ID NO: 11054 - DNA, 21 bp, Homo sapiens
gaagaggactctgtggtctac

SEQ ID NO: 11055 - DNA, 16 bp, Homo sapiens
tcacgctggccccacc

SEQ ID NO: 11056 - DNA, 23 bp, Homo sapiens
cactgacgtacaaatacatgatc

SEQ ID NO: 11057 - DNA, 23 bp, Homo sapiens
cccaggtccccagcttcgagacc

SEQ ID NO: 11058 - DNA, 18 bp, Homo sapiens
cacatcaaggctcttggg

SEQ ID NO: 11059 - DNA, 16 bp, Homo sapiens
cttcttcagggcccac

SEQ ID NO: 11060 - DNA, 16 bp, Homo sapiens
agtcggcctcagctgc

SEQ ID NO: 11061 - DNA, 23 bp, Homo sapiens
acattcagtgagtcctcatggat

SEQ ID NO: 11062 - DNA, 24 bp, Homo sapiens
aagaatttggtgctcggggcgact

SEQ ID NO: 11063 - DNA, 24 bp, Homo sapiens
gtcggagccccttggtgccaaagg

SEQ ID NO: 11064 - DNA, 16 bp, Homo sapiens
cagagacgaggacggc

SEQ ID NO: 11065 - DNA, 19 bp, Homo sapiens
gtcaggaggctcagcgtcc

SEQ ID NO: 11066 - DNA, 23 bp, Homo sapiens
tcatcttaaatgaagagaatgac

SEQ ID NO: 11067 - DNA, 16 bp, Homo sapiens
cagccctgcttggact

SEQ ID NO: 11068 - DNA, 22 bp, Homo sapiens
caacgggggacttggtcttgcc

SEQ ID NO: 11069 - DNA, 18 bp, Homo sapiens
gcagcgtctcccggccgt

SEQ ID NO: 11070 - DNA, 16 bp, Homo sapiens
ccactccccgaccagc

SEQ ID NO: 11071 - DNA, 24 bp, Homo sapiens
aatgaaggttttggaactggcatc

SEQ ID NO: 11072 - DNA, 17 bp, Homo sapiens
gcacagaggaaactggc

SEQ ID NO: 11073 - DNA, 22 bp, Homo sapiens
gagggacaggttggggaggggc

SEQ ID NO: 11074 - DNA, 21 bp, Homo sapiens
caagatgtttgagatccctgc

SEQ ID NO: 11075 - DNA, 16 bp, Homo sapiens
acccctgacccctggc

SEQ ID NO: 11076 - DNA, 19 bp, Homo sapiens
aatttgagcggcgccttcc

SEQ ID NO: 11077 - DNA, 18 bp, Homo sapiens
agttgtccggctctgaga

SEQ ID NO: 11078 - DNA, 17 bp, Homo sapiens
gagagcctccggaggag

SEQ ID NO: 11079 - DNA, 22 bp, Homo sapiens
atgagcaggtgtctggctcctg

SEQ ID NO: 11080 - DNA, 17 bp, Homo sapiens
tttcctggtggcccctc

SEQ ID NO: 11081 - DNA, 17 bp, Homo sapiens
tccctccccctcagtgt

SEQ ID NO: 11082 - DNA, 17 bp, Homo sapiens
cggaggggacaacagcc

SEQ ID NO: 11083 - DNA, 18 bp, Homo sapiens
gacagccccaggatgagt

SEQ ID NO: 11084 - DNA, 16 bp, Homo sapiens
ggtgggctgtgacggt

SEQ ID NO: 11085 - DNA, 17 bp, Homo sapiens
agggtggagagcaggga

SEQ ID NO: 11086 - DNA, 23 bp, Homo sapiens
acatagtatgaccctgactctac

SEQ ID NO: 11087 - DNA, 23 bp, Homo sapiens
gcccttgaccactttgcagtggc

SEQ ID NO: 11088 - DNA, 20 bp, Homo sapiens
aatgctttgggaggccaagg

SEQ ID NO: 11089 - DNA, 24 bp, Homo sapiens
cttcctgcttgctggagccgatca

SEQ ID NO: 11090 - DNA, 17 bp, Homo sapiens
ccttcagcctctgtgtg

SEQ ID NO: 11091 - DNA, 24 bp, Homo sapiens
ggtccgggcattgtttctgacact

SEQ ID NO: 11092 - DNA, 19 bp, Homo sapiens
aggtggtgtccatgaagcg

SEQ ID NO: 11093 - DNA, 19 bp, Homo sapiens
ggtcagtacccaggaagct

SEQ ID NO: 11094 - DNA, 16 bp, Homo sapiens
ctgcttcccttccagc

SEQ ID NO: 11095 - DNA, 19 bp, Homo sapiens
gtactcaccctgcagtccc

SEQ ID NO: 11096 - DNA, 19 bp, Homo sapiens
ctgcttggtgcctcctttg

SEQ ID NO: 11097 - DNA, 16 bp, Homo sapiens
catgcaccatgcgctt

SEQ ID NO: 11098 - DNA, 18 bp, Homo sapiens
tttccctctctgtctgcc

SEQ ID NO: 11099 - DNA, 17 bp, Homo sapiens
gtggcatctctccttgg

SEQ ID NO: 11100 - DNA, 16 bp, Homo sapiens
cagcaccactggctgc

SEQ ID NO: 11101 - DNA, 16 bp, Homo sapiens
cagcccagggtcgcgg

SEQ ID NO: 11102 - DNA, 17 bp, Homo sapiens
tgacttccgcgaggagc

SEQ ID NO: 11103 - DNA, 16 bp, Homo sapiens
ctgcccaccctagggc

SEQ ID NO: 11104 - DNA, 16 bp, Homo sapiens
cctgctcgggccttgc

SEQ ID NO: 11105 - DNA, 16 bp, Homo sapiens
cggtgctcgtggggca

SEQ ID NO: 11106 - DNA, 21 bp, Homo sapiens
ctttccaatggcacggagcgg

SEQ ID NO: 11107 - DNA, 16 bp, Homo sapiens
tggcggcactgctcct

SEQ ID NO: 11108 - DNA, 17 bp, Homo sapiens
agacttagggatccccc

SEQ ID NO: 11109 - DNA, 23 bp, Homo sapiens
gcggctgcagagctggaagtcgt

SEQ ID NO: 11110 - DNA, 23 bp, Homo sapiens
cttacagctaggacatggcaggg

SEQ ID NO: 11111 - DNA, 17 bp, Homo sapiens
gaagttcaggacccgcc

SEQ ID NO: 11112 - DNA, 17 bp, Homo sapiens
cctgccctgcacctctc

SEQ ID NO: 11113 - DNA, 18 bp, Homo sapiens
gctggggcgcttggagtc

SEQ ID NO: 11114 - DNA, 20 bp, Homo sapiens
ctggagagggtctcctggac

SEQ ID NO: 11115 - DNA, 23 bp, Homo sapiens
tgtctttcagcattgttttaaag

SEQ ID NO: 11116 - DNA, 24 bp, Homo sapiens
ccaactcactgtgggttgtcacac

SEQ ID NO: 11117 - DNA, 19 bp, Homo sapiens
cagagcgcaggactgtccc

SEQ ID NO: 11118 - DNA, 16 bp, Homo sapiens
ggagccaaacggactc

SEQ ID NO: 11119 - DNA, 16 bp, Homo sapiens
tgagctccccctgtgc

SEQ ID NO: 11120 - DNA, 18 bp, Homo sapiens
tcagccagatgcagtgtc

SEQ ID NO: 11121 - DNA, 23 bp, Homo sapiens
caaggtaggtggatcgcctgagg

SEQ ID NO: 11122 - DNA, 21 bp, Homo sapiens
tgggctcaaacgattttcatg

SEQ ID NO: 11123 - DNA, 21 bp, Homo sapiens
tttacacagttcaggccgggc

SEQ ID NO: 11124 - DNA, 19 bp, Homo sapiens
cgcgcccagctaatttttg

SEQ ID NO: 11125 - DNA, 24 bp, Homo sapiens
tgtttttggtgttcttttttaaac

SEQ ID NO: 11126 - DNA, 22 bp, Homo sapiens
aaccagacttgtcttgaacttc

SEQ ID NO: 11127 - DNA, 17 bp, Homo sapiens
aaattcccaggcccatc

SEQ ID NO: 11128 - DNA, 24 bp, Homo sapiens
gtgctgggataacaggcatgagcc

SEQ ID NO: 11129 - DNA, 16 bp, Homo sapiens
ggtaattagaaggggg

SEQ ID NO: 11130 - DNA, 18 bp, Homo sapiens
gacaacccctacttttgc

SEQ ID NO: 11131 - DNA, 18 bp, Homo sapiens
ccacttcagggcctgtcc

SEQ ID NO: 11132 - DNA, 22 bp, Homo sapiens
gctatggtgctgtcttccagtt

SEQ ID NO: 11133 - DNA, 16 bp, Homo sapiens
agagcccttgatgctg

SEQ ID NO: 11134 - DNA, 17 bp, Homo sapiens
gggggtgggtggcatcc

SEQ ID NO: 11135 - DNA, 16 bp, Homo sapiens
ggggccccttcttggt

SEQ ID NO: 11136 - DNA, 16 bp, Homo sapiens
cacccaccagcctcac

SEQ ID NO: 11137 - DNA, 18 bp, Homo sapiens
cttgcaggggtcaaaggt

SEQ ID NO: 11138 - DNA, 19 bp, Homo sapiens
ctgggctacatgatgtgca

SEQ ID NO: 11139 - DNA, 17 bp, Homo sapiens
caggctgccactctgga

SEQ ID NO: 11140 - DNA, 19 bp, Homo sapiens
cagctcccgggactgcact

SEQ ID NO: 11141 - DNA, 18 bp, Homo sapiens
cgggagctgcccctacac

SEQ ID NO: 11142 - DNA, 18 bp, Homo sapiens
cacagctcctatgactgc

SEQ ID NO: 11143 - DNA, 24 bp, Homo sapiens
tgcagggctgcacactcaccgccg

SEQ ID NO: 11144 - DNA, 16 bp, Homo sapiens
ctgcctccagggctgt

SEQ ID NO: 11145 - DNA, 23 bp, Homo sapiens
attgctcgttcatggagtagtgc

SEQ ID NO: 11146 - DNA, 16 bp, Homo sapiens
agccaggggccgggat

SEQ ID NO: 11147 - DNA, 16 bp, Homo sapiens
gggtcatccagcaggc

SEQ ID NO: 11148 - DNA, 20 bp, Homo sapiens
cttctctcacaggtgtgccc

SEQ ID NO: 11149 - DNA, 16 bp, Homo sapiens
cgccttccaccgcttc

SEQ ID NO: 11150 - DNA, 16 bp, Homo sapiens
ggctctggctctggtg

SEQ ID NO: 11151 - DNA, 16 bp, Homo sapiens
gcaaccgctgtggcga

SEQ ID NO: 11152 - DNA, 16 bp, Homo sapiens
ggtcgcccacggggca

SEQ ID NO: 11153 - DNA, 17 bp, Homo sapiens
tgccagtgggattcagc

SEQ ID NO: 11154 - DNA, 18 bp, Homo sapiens
ctggctgcagcgggacca

SEQ ID NO: 11155 - DNA, 17 bp, Homo sapiens
gggaaagatggggcacc

SEQ ID NO: 11156 - DNA, 24 bp, Homo sapiens
catgatgctgcccagccgcacctc

SEQ ID NO: 11157 - DNA, 23 bp, Homo sapiens
ctttcaaattgcagcaggtagat

SEQ ID NO: 11158 - DNA, 17 bp, Homo sapiens
agcgtttgtggtggccc

SEQ ID NO: 11159 - DNA, 17 bp, Homo sapiens
acaccccaagtggcttt

SEQ ID NO: 11160 - DNA, 16 bp, Homo sapiens
gcatgtgccatccggt

SEQ ID NO: 11161 - DNA, 16 bp, Homo sapiens
gccagggctggggatc

SEQ ID NO: 11162 - DNA, 17 bp, Homo sapiens
ggctatggcagcatctg

SEQ ID NO: 11163 - DNA, 19 bp, Homo sapiens
acttacacgtggccagtct

SEQ ID NO: 11164 - DNA, 16 bp, Homo sapiens
ttggggccttgaggag

SEQ ID NO: 11165 - DNA, 17 bp, Homo sapiens
gttcagggtgcagctgc

SEQ ID NO: 11166 - DNA, 16 bp, Homo sapiens
tctgctgtggtgtctt

SEQ ID NO: 11167 - DNA, 16 bp, Homo sapiens
cggcaggactttgggc

SEQ ID NO: 11168 - DNA, 17 bp, Homo sapiens
ccttccctgccctgaca

SEQ ID NO: 11169 - DNA, 20 bp, Homo sapiens
ggcctacctccagcagaagc

SEQ ID NO: 11170 - DNA, 24 bp, Homo sapiens
cttgcatggccaggggctcatttc

SEQ ID NO: 11171 - DNA, 18 bp, Homo sapiens
atgagcctcatcgagatc

SEQ ID NO: 11172 - DNA, 18 bp, Homo sapiens
cttgcatgccggaaggcc

SEQ ID NO: 11173 - DNA, 20 bp, Homo sapiens
cggccccccactgggccacc

SEQ ID NO: 11174 - DNA, 16 bp, Homo sapiens
gtggcccgtgtctggc

SEQ ID NO: 11175 - DNA, 19 bp, Homo sapiens
gtaccacctggaacagatt

SEQ ID NO: 11176 - DNA, 16 bp, Homo sapiens
gaggggttcccgatct

SEQ ID NO: 11177 - DNA, 20 bp, Homo sapiens
gtcctggtgcggatcatcct

SEQ ID NO: 11178 - DNA, 19 bp, Homo sapiens
ggggagccagggagaggca

SEQ ID NO: 11179 - DNA, 23 bp, Homo sapiens
tgtttctttcaggtcaatgaaat

SEQ ID NO: 11180 - DNA, 18 bp, Homo sapiens
cctcactcccaggcccct

SEQ ID NO: 11181 - DNA, 23 bp, Homo sapiens
catcccattggcagagccagagc

SEQ ID NO: 11182 - DNA, 24 bp, Homo sapiens
cacagtgcactcacctttccatag

SEQ ID NO: 11183 - DNA, 21 bp, Homo sapiens
gctcctagttgatggtgacgc

SEQ ID NO: 11184 - DNA, 23 bp, Homo sapiens
cacccaaggactcgtcatggtag

SEQ ID NO: 11185 - DNA, 23 bp, Homo sapiens
gacccagcaagcctccctgagac

SEQ ID NO: 11186 - DNA, 19 bp, Homo sapiens
actctgtggtgcagttcca

SEQ ID NO: 11187 - DNA, 17 bp, Homo sapiens
gacctggcccagctggg

SEQ ID NO: 11188 - DNA, 16 bp, Homo sapiens
cacgcaggcatgctgc

SEQ ID NO: 11189 - DNA, 23 bp, Homo sapiens
ccgccccaccctgccccctcagc

SEQ ID NO: 11190 - DNA, 16 bp, Homo sapiens
cctggacagcctcagc

SEQ ID NO: 11191 - DNA, 16 bp, Homo sapiens
ctccttcccgtggaac

SEQ ID NO: 11192 - DNA, 16 bp, Homo sapiens
ggtgggtttgccctgc

SEQ ID NO: 11193 - DNA, 24 bp, Homo sapiens
acctcgatgttgtagtcatcgtcc

SEQ ID NO: 11194 - DNA, 23 bp, Homo sapiens
cagggtgctatgagttttaaatg

SEQ ID NO: 11195 - DNA, 18 bp, Homo sapiens
cctctaggacgcccaggg

SEQ ID NO: 11196 - DNA, 23 bp, Homo sapiens
gtctctgccatcttcctctgcac

SEQ ID NO: 11197 - DNA, 16 bp, Homo sapiens
tcggggggccacaggc

SEQ ID NO: 11198 - DNA, 17 bp, Homo sapiens
ctgagaccggggctcag

SEQ ID NO: 11199 - DNA, 17 bp, Homo sapiens
aggaggctgagcaaggc

SEQ ID NO: 11200 - DNA, 17 bp, Homo sapiens
gatgctcccctggggac

SEQ ID NO: 11201 - DNA, 20 bp, Homo sapiens
tggtctgatccggatggagg

SEQ ID NO: 11202 - DNA, 20 bp, Homo sapiens
gcctcacctgtgtccagggc

SEQ ID NO: 11203 - DNA, 24 bp, Homo sapiens
gttccccttccttggtcttttgtg

SEQ ID NO: 11204 - DNA, 23 bp, Homo sapiens
gcgatacaccacatgcacacggc

SEQ ID NO: 11205 - DNA, 17 bp, Homo sapiens
ctgggcagggtcttcag

SEQ ID NO: 11206 - DNA, 24 bp, Homo sapiens
ctccaagggttcgatgaagaactc

SEQ ID NO: 11207 - DNA, 21 bp, Homo sapiens
tctgggaccacatgttcatac

SEQ ID NO: 11208 - DNA, 16 bp, Homo sapiens
cctcctctgtggcgct

SEQ ID NO: 11209 - DNA, 17 bp, Homo sapiens
gaagggcgcggaaagtc

SEQ ID NO: 11210 - DNA, 16 bp, Homo sapiens
gcgtggagcccctgct

SEQ ID NO: 11211 - DNA, 20 bp, Homo sapiens
aacccttttccaaaacccag

SEQ ID NO: 11212 - DNA, 16 bp, Homo sapiens
cccgcctcgtggcgcc

SEQ ID NO: 11213 - DNA, 24 bp, Homo sapiens
tactcaccagcccatcgcagttgc

SEQ ID NO: 11214 - DNA, 18 bp, Homo sapiens
cacctcttctacaatgtc

SEQ ID NO: 11215 - DNA, 24 bp, Homo sapiens
ccacgtctccgacgtagagacagc

SEQ ID NO: 11216 - DNA, 16 bp, Homo sapiens
gccgccccggtccgga

SEQ ID NO: 11217 - DNA, 19 bp, Homo sapiens
tgccactccatagtggccc

SEQ ID NO: 11218 - DNA, 16 bp, Homo sapiens
gggccgcttggtgtcc

SEQ ID NO: 11219 - DNA, 22 bp, Homo sapiens
ggtctcggccaaagaccgtgac

SEQ ID NO: 11220 - DNA, 24 bp, Homo sapiens
ccgttgcaggcgggcccctggggc

SEQ ID NO: 11221 - DNA, 16 bp, Homo sapiens
cggggaagctcggggt

SEQ ID NO: 11222 - DNA, 17 bp, Homo sapiens
cgggtctctgaggcact

SEQ ID NO: 11223 - DNA, 20 bp, Homo sapiens
ggacgtagctgccgacacca

SEQ ID NO: 11224 - DNA, 16 bp, Homo sapiens
gcggaatgccccttcc

SEQ ID NO: 11225 - DNA, 16 bp, Homo sapiens
caggatgcgctccgct

SEQ ID NO: 11226 - DNA, 20 bp, Homo sapiens
gccccgaagttggccaactt

SEQ ID NO: 11227 - DNA, 20 bp, Homo sapiens
tgccgccgccgctcctgccg

SEQ ID NO: 11228 - DNA, 18 bp, Homo sapiens
ctggacgacgcctgggga

SEQ ID NO: 11229 - DNA, 19 bp, Homo sapiens
gggagccgctcgccgcctg

SEQ ID NO: 11230 - DNA, 17 bp, Homo sapiens
ggagtaggggccgggcc

SEQ ID NO: 11231 - DNA, 17 bp, Homo sapiens
tttcgcgccggctgcga

SEQ ID NO: 11232 - DNA, 24 bp, Homo sapiens
gagcctggcgttcgcgggcggcgg

SEQ ID NO: 11233 - DNA, 16 bp, Homo sapiens
ctgcagctgcgggcgg

SEQ ID NO: 11234 - DNA, 19 bp, Homo sapiens
cagcagcgcggggcagagc

SEQ ID NO: 11235 - DNA, 16 bp, Homo sapiens
tccctccgcgctcccc

SEQ ID NO: 11236 - DNA, 16 bp, Homo sapiens
gcagcaggcccaggag

SEQ ID NO: 11237 - DNA, 16 bp, Homo sapiens
gtgggcgggtcggtgg

SEQ ID NO: 11238 - DNA, 16 bp, Homo sapiens
gctccggagcttccac

SEQ ID NO: 11239 - DNA, 24 bp, Homo sapiens
agtctacacagcaggagggatggc

SEQ ID NO: 11240 - DNA, 20 bp, Homo sapiens
gatagatggggaggtcgggc

SEQ ID NO: 11241 - DNA, 20 bp, Homo sapiens
ggcgtctcgccatgctgctc

SEQ ID NO: 11242 - DNA, 20 bp, Homo sapiens
tctcaccttgcagcccaagg

SEQ ID NO: 11243 - DNA, 17 bp, Homo sapiens
cctgctgtggaactggt

SEQ ID NO: 11244 - DNA, 23 bp, Homo sapiens
gagagaggaccctctccgtcacc

SEQ ID NO: 11245 - DNA, 20 bp, Homo sapiens
gggcttcttgcacctgctgc

SEQ ID NO: 11246 - DNA, 24 bp, Homo sapiens
aatggtcctcttggagttcagcac

SEQ ID NO: 11247 - DNA, 23 bp, Homo sapiens
aattcgggcccatctacaggctc

SEQ ID NO: 11248 - DNA, 19 bp, Homo sapiens
gtaagtggctcaggtctgc

SEQ ID NO: 11249 - DNA, 18 bp, Homo sapiens
cataggagggggcggagg

SEQ ID NO: 11250 - DNA, 24 bp, Homo sapiens
gcaagaacccatctcttaaaaaaa

SEQ ID NO: 11251 - DNA, 18 bp, Homo sapiens
ctgtctcccagatgtggt

SEQ ID NO: 11252 - DNA, 22 bp, Homo sapiens
gctgaggtgggaggatcatttg

SEQ ID NO: 11253 - DNA, 24 bp, Homo sapiens
ggtcaaaaagtgggcagactttgc

SEQ ID NO: 11254 - DNA, 18 bp, Homo sapiens
agacaccagcttgtctgc

SEQ ID NO: 11255 - DNA, 18 bp, Homo sapiens
catccccaatccaggtcc

SEQ ID NO: 11256 - DNA, 23 bp, Homo sapiens
gggtgagcttcttgtgggctttc

SEQ ID NO: 11257 - DNA, 19 bp, Homo sapiens
aagcaggggttggggaggc

SEQ ID NO: 11258 - DNA, 18 bp, Homo sapiens
ctccaccactggctccat

SEQ ID NO: 11259 - DNA, 16 bp, Homo sapiens
agcccccacctcctcc

SEQ ID NO: 11260 - DNA, 16 bp, Homo sapiens
gctgacccgaggtggc

SEQ ID NO: 11261 - DNA, 19 bp, Homo sapiens
agactactccctgctctgg

SEQ ID NO: 11262 - DNA, 17 bp, Homo sapiens
agtgtgagttcagcagg

SEQ ID NO: 11263 - DNA, 17 bp, Homo sapiens
tccgtgactccatggag

SEQ ID NO: 11264 - DNA, 22 bp, Homo sapiens
gtgaggagagagaattcctcct

SEQ ID NO: 11265 - DNA, 21 bp, Homo sapiens
gtaaggctgggctcctgaggc

SEQ ID NO: 11266 - DNA, 24 bp, Homo sapiens
ctgaggggctgtgaggcaccttga

SEQ ID NO: 11267 - DNA, 24 bp, Homo sapiens
ccctgcccgctgcacagcggcctg

SEQ ID NO: 11268 - DNA, 20 bp, Homo sapiens
gagtactttcagttcaggac

SEQ ID NO: 11269 - DNA, 16 bp, Homo sapiens
ccggcacccctgtggc

SEQ ID NO: 11270 - DNA, 22 bp, Homo sapiens
ttaacacctcctggatacattt

SEQ ID NO: 11271 - DNA, 23 bp, Homo sapiens
atctgttacctcaccttcggaga

SEQ ID NO: 11272 - DNA, 18 bp, Homo sapiens
gagaaagggaatcacgtc

SEQ ID NO: 11273 - DNA, 18 bp, Homo sapiens
cctgagcctctccttgtc

SEQ ID NO: 11274 - DNA, 16 bp, Homo sapiens
ctccctccaccccagc

SEQ ID NO: 11275 - DNA, 23 bp, Homo sapiens
aggacgacaacttaatgcctgcc

SEQ ID NO: 11276 - DNA, 19 bp, Homo sapiens
cctggattggggaagaact

SEQ ID NO: 11277 - DNA, 21 bp, Homo sapiens
cactggtccatccaaattgtg

SEQ ID NO: 11278 - DNA, 17 bp, Homo sapiens
gcctcagctgcatctcc

SEQ ID NO: 11279 - DNA, 22 bp, Homo sapiens
ccctgggttgtaggggagaggc

SEQ ID NO: 11280 - DNA, 20 bp, Homo sapiens
tagcatcactggctgtgggc

SEQ ID NO: 11281 - DNA, 22 bp, Homo sapiens
ttctcatgcttcctgccgcagt

SEQ ID NO: 11282 - DNA, 17 bp, Homo sapiens
ggcaacaggcccataac

SEQ ID NO: 11283 - DNA, 22 bp, Homo sapiens
atagagaagagggatcacatcg

SEQ ID NO: 11284 - DNA, 19 bp, Homo sapiens
cctgcagagggtgaaagga

SEQ ID NO: 11285 - DNA, 17 bp, Homo sapiens
ggacggcctcccctcgg

SEQ ID NO: 11286 - DNA, 17 bp, Homo sapiens
gcgccaccccttggagc

SEQ ID NO: 11287 - DNA, 24 bp, Homo sapiens
tatgaggcgggttcttttgcatac

SEQ ID NO: 11288 - DNA, 18 bp, Homo sapiens
tccactgcagccatgtgc

SEQ ID NO: 11289 - DNA, 20 bp, Homo sapiens
aggccagccgctcagcccgc

SEQ ID NO: 11290 - DNA, 16 bp, Homo sapiens
ccacggcccaggagag

SEQ ID NO: 11291 - DNA, 21 bp, Homo sapiens
tggagggacatgatggactac

SEQ ID NO: 11292 - DNA, 19 bp, Homo sapiens
ccaggttgctgggaaggag

SEQ ID NO: 11293 - DNA, 17 bp, Homo sapiens
gacagctcctggaaggg

SEQ ID NO: 11294 - DNA, 16 bp, Homo sapiens
caagcacagccccagc

SEQ ID NO: 11295 - DNA, 24 bp, Homo sapiens
actgagaccacagcaaacaccctc

SEQ ID NO: 11296 - DNA, 16 bp, Homo sapiens
cacagctgcccagcct

SEQ ID NO: 11297 - DNA, 17 bp, Homo sapiens
ctcctgcagtcgctgct

SEQ ID NO: 11298 - DNA, 19 bp, Homo sapiens
cactcagctctgagcactg

SEQ ID NO: 11299 - DNA, 21 bp, Homo sapiens
gcacggtccttgtaggggacc

SEQ ID NO: 11300 - DNA, 24 bp, Homo sapiens
ggctcactgggttgctgagggagc

SEQ ID NO: 11301 - DNA, 16 bp, Homo sapiens
acgggccgcaggcgca

SEQ ID NO: 11302 - DNA, 20 bp, Homo sapiens
cgatcattccccagattcag

SEQ ID NO: 11303 - DNA, 19 bp, Homo sapiens
tccccaaccctcgggagtc

SEQ ID NO: 11304 - DNA, 24 bp, Homo sapiens
tgggccctggtgcctccagctccc

SEQ ID NO: 11305 - DNA, 16 bp, Homo sapiens
gggggctggagttaga

SEQ ID NO: 11306 - DNA, 17 bp, Homo sapiens
catcgccgaggtgctgc

SEQ ID NO: 11307 - DNA, 19 bp, Homo sapiens
ggcgccttggaggttcgga

SEQ ID NO: 11308 - DNA, 17 bp, Homo sapiens
gcccagcaggtgactcc

SEQ ID NO: 11309 - DNA, 16 bp, Homo sapiens
cccccacataccaggc

SEQ ID NO: 11310 - DNA, 16 bp, Homo sapiens
gaggtcctggccagcc

SEQ ID NO: 11311 - DNA, 16 bp, Homo sapiens
ggaggcgttcagcggc

SEQ ID NO: 11312 - DNA, 19 bp, Homo sapiens
tgagggcacagtcatcatt

SEQ ID NO: 11313 - DNA, 20 bp, Homo sapiens
cagagctctggagttcttgc

SEQ ID NO: 11314 - DNA, 19 bp, Homo sapiens
gaggccacatgagttctgg

SEQ ID NO: 11315 - DNA, 16 bp, Homo sapiens
cgaagagctccaggcg

SEQ ID NO: 11316 - DNA, 16 bp, Homo sapiens
gaggctggtccccgct

SEQ ID NO: 11317 - DNA, 16 bp, Homo sapiens
agggcgtccccggagg

SEQ ID NO: 11318 - DNA, 16 bp, Homo sapiens
gcttcctggagccagg

SEQ ID NO: 11319 - DNA, 16 bp, Homo sapiens
cacttggaaaggctgc

SEQ ID NO: 11320 - DNA, 24 bp, Homo sapiens
cccgcgtgtgcctgggcgagccgc

SEQ ID NO: 11321 - DNA, 17 bp, Homo sapiens
tcctgccccatcactgg

SEQ ID NO: 11322 - DNA, 16 bp, Homo sapiens
gccttcacgctgctgc

SEQ ID NO: 11323 - DNA, 24 bp, Homo sapiens
tttacaggggggaggggaggggtt

SEQ ID NO: 11324 - DNA, 19 bp, Homo sapiens
gtcatcctcaagatgcagc

SEQ ID NO: 11325 - DNA, 17 bp, Homo sapiens
accacccagccgctgga

SEQ ID NO: 11326 - DNA, 16 bp, Homo sapiens
cccgggccagagccag

SEQ ID NO: 11327 - DNA, 24 bp, Homo sapiens
caagcgcatccagcgcaagtttgc

SEQ ID NO: 11328 - DNA, 18 bp, Homo sapiens
ctggagggaggtggcctc

SEQ ID NO: 11329 - DNA, 20 bp, Homo sapiens
acttgctgcaggctgccgcc

SEQ ID NO: 11330 - DNA, 22 bp, Homo sapiens
ccagatctctctgtgggctatc

SEQ ID NO: 11331 - DNA, 18 bp, Homo sapiens
accttgtcatctccaggg

SEQ ID NO: 11332 - DNA, 16 bp, Homo sapiens
gctcctagcaggcagc

SEQ ID NO: 11333 - DNA, 16 bp, Homo sapiens
aggaagccaccttcgc

SEQ ID NO: 11334 - DNA, 19 bp, Homo sapiens
tcactgactgagggttgca

SEQ ID NO: 11335 - DNA, 24 bp, Homo sapiens
actagtgggagacaaacctagtcc

SEQ ID NO: 11336 - DNA, 18 bp, Homo sapiens
gctgagctacctggctcc

SEQ ID NO: 11337 - DNA, 24 bp, Homo sapiens
aacattttttttagagttggggtc

SEQ ID NO: 11338 - DNA, 24 bp, Homo sapiens
actctctctgctctgatgctatga

SEQ ID NO: 11339 - DNA, 20 bp, Homo sapiens
ctggtaaacgtgctagattg

SEQ ID NO: 11340 - DNA, 23 bp, Homo sapiens
tccccactagctttttggttgac

SEQ ID NO: 11341 - DNA, 18 bp, Homo sapiens
tgatgccaactctgtttc

SEQ ID NO: 11342 - DNA, 16 bp, Homo sapiens
gtttgagggcagctgt

SEQ ID NO: 11343 - DNA, 22 bp, Homo sapiens
ttaggggatgcatgcaacatgc

SEQ ID NO: 11344 - DNA, 16 bp, Homo sapiens
gggagggcagcaatct

SEQ ID NO: 11345 - DNA, 18 bp, Homo sapiens
atcacacgcaagtatgct

SEQ ID NO: 11346 - DNA, 24 bp, Homo sapiens
gaatctgttgtgggatacaggaag

SEQ ID NO: 11347 - DNA, 16 bp, Homo sapiens
ctggtgtttgtggggg

SEQ ID NO: 11348 - DNA, 21 bp, Homo sapiens
cagtgctgaccagctcatcct

SEQ ID NO: 11349 - DNA, 22 bp, Homo sapiens
ttcacccctcatggctgggctc

SEQ ID NO: 11350 - DNA, 22 bp, Homo sapiens
tcgcagtcttcctctaacagag

SEQ ID NO: 11351 - DNA, 23 bp, Homo sapiens
cttctgcggcctggcaggtgggc

SEQ ID NO: 11352 - DNA, 16 bp, Homo sapiens
ggcccggtcctcattt

SEQ ID NO: 11353 - DNA, 22 bp, Homo sapiens
cagcactcaggatgtgtttgtg

SEQ ID NO: 11354 - DNA, 23 bp, Homo sapiens
ggcaggtataagtttcagggagc

SEQ ID NO: 11355 - DNA, 17 bp, Homo sapiens
cttgctcccttctctcc

SEQ ID NO: 11356 - DNA, 22 bp, Homo sapiens
gtggagatgagcagtacaaggg

SEQ ID NO: 11357 - DNA, 19 bp, Homo sapiens
taaagagaggtaccacagg

SEQ ID NO: 11358 - DNA, 20 bp, Homo sapiens
ggtctgttggtggctccaat

SEQ ID NO: 11359 - DNA, 16 bp, Homo sapiens
cctacctggtggggca

SEQ ID NO: 11360 - DNA, 18 bp, Homo sapiens
caaggagctgagacacca

SEQ ID NO: 11361 - DNA, 23 bp, Homo sapiens
gaccctgcccaatttcatggccc

SEQ ID NO: 11362 - DNA, 20 bp, Homo sapiens
tgatgaactggactctttgg

SEQ ID NO: 11363 - DNA, 24 bp, Homo sapiens
agcaggaacttctatctctggact

SEQ ID NO: 11364 - DNA, 18 bp, Homo sapiens
gggcccctctctctcttc

SEQ ID NO: 11365 - DNA, 24 bp, Homo sapiens
gacccctcagctttcattcccact

SEQ ID NO: 11366 - DNA, 20 bp, Homo sapiens
tttccctccctgctctcacc

SEQ ID NO: 11367 - DNA, 23 bp, Homo sapiens
tctccacttcgcccccggcttgg

SEQ ID NO: 11368 - DNA, 18 bp, Homo sapiens
gttcctgcccagctgggt

SEQ ID NO: 11369 - DNA, 16 bp, Homo sapiens
cagccctggccctggc

SEQ ID NO: 11370 - DNA, 23 bp, Homo sapiens
cactggcatcccaggtactagac

SEQ ID NO: 11371 - DNA, 20 bp, Homo sapiens
cagcgtgaaggggccagagc

SEQ ID NO: 11372 - DNA, 23 bp, Homo sapiens
attaggaatgatcatgagtagcc

SEQ ID NO: 11373 - DNA, 19 bp, Homo sapiens
aggtcaattgtgtgtatgt

SEQ ID NO: 11374 - DNA, 24 bp, Homo sapiens
gtttgggaagcatgggacgccctg

SEQ ID NO: 11375 - DNA, 16 bp, Homo sapiens
ggatggtgggtggatc

SEQ ID NO: 11376 - DNA, 24 bp, Homo sapiens
tggcccacatacatgttaatgagc

SEQ ID NO: 11377 - DNA, 20 bp, Homo sapiens
cttctggccaaggcagtagc

SEQ ID NO: 11378 - DNA, 19 bp, Homo sapiens
aggtgagagccgtcagatg

SEQ ID NO: 11379 - DNA, 16 bp, Homo sapiens
cctgagacgctcaggc

SEQ ID NO: 11380 - DNA, 17 bp, Homo sapiens
ctgctgcagcccctgat

SEQ ID NO: 11381 - DNA, 22 bp, Homo sapiens
caggaggtgaagaaggagatcc

SEQ ID NO: 11382 - DNA, 19 bp, Homo sapiens
gtaaggctgcactcagtgg

SEQ ID NO: 11383 - DNA, 21 bp, Homo sapiens
gcactttccatctcctagatc

SEQ ID NO: 11384 - DNA, 17 bp, Homo sapiens
cccatggagcagaaggc

SEQ ID NO: 11385 - DNA, 17 bp, Homo sapiens
aggtggagaccaagtcc

SEQ ID NO: 11386 - DNA, 19 bp, Homo sapiens
agggggagctgaatggtct

SEQ ID NO: 11387 - DNA, 18 bp, Homo sapiens
actttgggcaggcactgg

SEQ ID NO: 11388 - DNA, 18 bp, Homo sapiens
atgccaggacactgaggg

SEQ ID NO: 11389 - DNA, 17 bp, Homo sapiens
gactgaggaggatgagg

SEQ ID NO: 11390 - DNA, 23 bp, Homo sapiens
cttggaggggctcctgtcccacc

SEQ ID NO: 11391 - DNA, 16 bp, Homo sapiens
aatgggacgctgatgg

SEQ ID NO: 11392 - DNA, 22 bp, Homo sapiens
gagtgagctgtctgcagttgct

SEQ ID NO: 11393 - DNA, 17 bp, Homo sapiens
gaaaggcggaaagagga

SEQ ID NO: 11394 - DNA, 17 bp, Homo sapiens
cggcagcacacagctcc

SEQ ID NO: 11395 - DNA, 17 bp, Homo sapiens
cacagcagccgggcagc

SEQ ID NO: 11396 - DNA, 23 bp, Homo sapiens
aagaggaacacagggaagcctcc

SEQ ID NO: 11397 - DNA, 17 bp, Homo sapiens
tgtcctttcctgtggtt

SEQ ID NO: 11398 - DNA, 24 bp, Homo sapiens
ccacccacccatctacatccattt

SEQ ID NO: 11399 - DNA, 22 bp, Homo sapiens
atcaacagagggcctctgctct

SEQ ID NO: 11400 - DNA, 21 bp, Homo sapiens
gttcttgatcctggtgcaggc

SEQ ID NO: 11401 - DNA, 24 bp, Homo sapiens
gcaacaagagcaaaactccgtctc

SEQ ID NO: 11402 - DNA, 16 bp, Homo sapiens
ccgcccacctcggcct

SEQ ID NO: 11403 - DNA, 16 bp, Homo sapiens
caccttcccctgggcc

SEQ ID NO: 11404 - DNA, 22 bp, Homo sapiens
cgctgggttttctactctcact

SEQ ID NO: 11405 - DNA, 22 bp, Homo sapiens
ttcctcatgagctcgaggtgcc

SEQ ID NO: 11406 - DNA, 18 bp, Homo sapiens
ggacctcctagggagggc

SEQ ID NO: 11407 - DNA, 16 bp, Homo sapiens
tgtggccaccacaagc

SEQ ID NO: 11408 - DNA, 23 bp, Homo sapiens
ctagctgtgccaagttcacctcc

SEQ ID NO: 11409 - DNA, 17 bp, Homo sapiens
cagccatgttctcaccc

SEQ ID NO: 11410 - DNA, 16 bp, Homo sapiens
tgcccctctgacagag

SEQ ID NO: 11411 - DNA, 19 bp, Homo sapiens
cccacctcacttccctgcc

SEQ ID NO: 11412 - DNA, 16 bp, Homo sapiens
caggtcctgggcccgg

SEQ ID NO: 11413 - DNA, 19 bp, Homo sapiens
aaacacagttcccccatct

SEQ ID NO: 11414 - DNA, 20 bp, Homo sapiens
gctggtcttgaactcctgat

SEQ ID NO: 11415 - DNA, 16 bp, Homo sapiens
ccgggaccgtgatggg

SEQ ID NO: 11416 - DNA, 23 bp, Homo sapiens
gggattataagtgtgagccaccg

SEQ ID NO: 11417 - DNA, 16 bp, Homo sapiens
catcttctcccgggcc

SEQ ID NO: 11418 - DNA, 22 bp, Homo sapiens
tctgtataagtacctgttgagg

SEQ ID NO: 11419 - DNA, 16 bp, Homo sapiens
ggtgccctgctccagc

SEQ ID NO: 11420 - DNA, 17 bp, Homo sapiens
gggcatcctcacccagc

SEQ ID NO: 11421 - DNA, 20 bp, Homo sapiens
cctgattctcctgcccttgt

SEQ ID NO: 11422 - DNA, 24 bp, Homo sapiens
gagcaacaggactgcaggccggca

SEQ ID NO: 11423 - DNA, 19 bp, Homo sapiens
ttccctgtccctgccctcc

SEQ ID NO: 11424 - DNA, 21 bp, Homo sapiens
acagccccactactttctgca

SEQ ID NO: 11425 - DNA, 20 bp, Homo sapiens
tagttgctgctgcctgtagt

SEQ ID NO: 11426 - DNA, 16 bp, Homo sapiens
gggcctgtgagtagac

SEQ ID NO: 11427 - DNA, 17 bp, Homo sapiens
tgacaggaactagcagt

SEQ ID NO: 11428 - DNA, 18 bp, Homo sapiens
catgagctggggagggga

SEQ ID NO: 11429 - DNA, 22 bp, Homo sapiens
gactctaatgtttgggcaaaat

SEQ ID NO: 11430 - DNA, 20 bp, Homo sapiens
gtaagtggagcccaaggtga

SEQ ID NO: 11431 - DNA, 20 bp, Homo sapiens
tcaaggagagaaaaacaggg

SEQ ID NO: 11432 - DNA, 17 bp, Homo sapiens
ggccccgtagaaggaca

SEQ ID NO: 11433 - DNA, 16 bp, Homo sapiens
gtgggagacacagcct

SEQ ID NO: 11434 - DNA, 23 bp, Homo sapiens
gaagcctcgcctccagccagggt

SEQ ID NO: 11435 - DNA, 23 bp, Homo sapiens
cttgtgtaggacatactggtttg

SEQ ID NO: 11436 - DNA, 17 bp, Homo sapiens
agcagtttgtctcctcc

SEQ ID NO: 11437 - DNA, 21 bp, Homo sapiens
ttaggaactacccatctggct

SEQ ID NO: 11438 - DNA, 21 bp, Homo sapiens
tttcacaggtgggttctaccc

SEQ ID NO: 11439 - DNA, 19 bp, Homo sapiens
gtgatgacctcactcaccc

SEQ ID NO: 11440 - DNA, 16 bp, Homo sapiens
tgtagaccagcgcagg

SEQ ID NO: 11441 - DNA, 24 bp, Homo sapiens
agttcagacaccaaggcctccagg

SEQ ID NO: 11442 - DNA, 17 bp, Homo sapiens
gcctacttggccgacac

SEQ ID NO: 11443 - DNA, 18 bp, Homo sapiens
gagccatggaacagggct

SEQ ID NO: 11444 - DNA, 23 bp, Homo sapiens
gtggcgggaaatgttttttaaag

SEQ ID NO: 11445 - DNA, 24 bp, Homo sapiens
tcgtttctaaaaatcgtttctacc

SEQ ID NO: 11446 - DNA, 20 bp, Homo sapiens
cttgaggaggggggtttttg

SEQ ID NO: 11447 - DNA, 22 bp, Homo sapiens
accatgtacaaggaggtatggg

SEQ ID NO: 11448 - DNA, 16 bp, Homo sapiens
tcgggacacgctcttg

SEQ ID NO: 11449 - DNA, 22 bp, Homo sapiens
cttccccaactgttttcttcac

SEQ ID NO: 11450 - DNA, 21 bp, Homo sapiens
tggaaggaagtccagagaaac

SEQ ID NO: 11451 - DNA, 21 bp, Homo sapiens
cacgcacacacaaaatacatg

SEQ ID NO: 11452 - DNA, 24 bp, Homo sapiens
gctgtgttgcagggtagtccagga

SEQ ID NO: 11453 - DNA, 24 bp, Homo sapiens
agggaggggattgtagaactcatg

SEQ ID NO: 11454 - DNA, 24 bp, Homo sapiens
gacatgtggtaatgaacacatgct

SEQ ID NO: 11455 - DNA, 22 bp, Homo sapiens
gctgcatacctgggcagtttct

SEQ ID NO: 11456 - DNA, 17 bp, Homo sapiens
tgggatctctgggcggg

SEQ ID NO: 11457 - DNA, 22 bp, Homo sapiens
tgttggcacacatagaacatcc

SEQ ID NO: 11458 - DNA, 23 bp, Homo sapiens
gtgctgggattacagacgtgagc

SEQ ID NO: 11459 - DNA, 23 bp, Homo sapiens
attgtgtcttctccccactacag

SEQ ID NO: 11460 - DNA, 19 bp, Homo sapiens
gcctctggggtacttggtt

SEQ ID NO: 11461 - DNA, 17 bp, Homo sapiens
ctgctcattgctgcctg

SEQ ID NO: 11462 - DNA, 23 bp, Homo sapiens
agctatcctccttaaaaggttag

SEQ ID NO: 11463 - DNA, 22 bp, Homo sapiens
aacgtggtggttatttctctaa

SEQ ID NO: 11464 - DNA, 24 bp, Homo sapiens
aaagaacaccgtcataatttccat

SEQ ID NO: 11465 - DNA, 20 bp, Homo sapiens
tagacatgttggctgctgag

SEQ ID NO: 11466 - DNA, 23 bp, Homo sapiens
taactctctggcaaatggaggcc

SEQ ID NO: 11467 - DNA, 16 bp, Homo sapiens
gctacctcaggcccca

SEQ ID NO: 11468 - DNA, 19 bp, Homo sapiens
gagccttccaagtacctct

SEQ ID NO: 11469 - DNA, 17 bp, Homo sapiens
ccctggaaatgggagag

SEQ ID NO: 11470 - DNA, 23 bp, Homo sapiens
gctagaaacattatgttcaaagt

SEQ ID NO: 11471 - DNA, 16 bp, Homo sapiens
cccctcgctgacggac

SEQ ID NO: 11472 - DNA, 24 bp, Homo sapiens
aatttacctaagacagagaagagg

SEQ ID NO: 11473 - DNA, 16 bp, Homo sapiens
tagaacctcgctggga

SEQ ID NO: 11474 - DNA, 24 bp, Homo sapiens
cctttatcctacctgaattctgag

SEQ ID NO: 11475 - DNA, 16 bp, Homo sapiens
gcccaggccagagagt

SEQ ID NO: 11476 - DNA, 21 bp, Homo sapiens
ccaaagtggcagggacaagcg

SEQ ID NO: 11477 - DNA, 17 bp, Homo sapiens
ttcactaggggtgagcc

SEQ ID NO: 11478 - DNA, 22 bp, Homo sapiens
tcccagtctatcagagaggtcc

SEQ ID NO: 11479 - DNA, 19 bp, Homo sapiens
cctcctttgcggtttctgg

SEQ ID NO: 11480 - DNA, 20 bp, Homo sapiens
gtgaagtgttcgatgactct

SEQ ID NO: 11481 - DNA, 17 bp, Homo sapiens
cagactgtgtccagagt

SEQ ID NO: 11482 - DNA, 16 bp, Homo sapiens
ccacggagacagctcc

SEQ ID NO: 11483 - DNA, 16 bp, Homo sapiens
caagggctgctgggcc

SEQ ID NO: 11484 - DNA, 24 bp, Homo sapiens
ccagaactccctggagtcgccgca

SEQ ID NO: 11485 - DNA, 16 bp, Homo sapiens
gaggcgcggagagacc

SEQ ID NO: 11486 - DNA, 16 bp, Homo sapiens
ggccgactgctgtccc

SEQ ID NO: 11487 - DNA, 17 bp, Homo sapiens
tgggcactgcttggcac

SEQ ID NO: 11488 - DNA, 24 bp, Homo sapiens
cagtcacagccagccgagtccctg

SEQ ID NO: 11489 - DNA, 17 bp, Homo sapiens
actgggctccggggcct

SEQ ID NO: 11490 - DNA, 17 bp, Homo sapiens
ggtccgggcactgggag

SEQ ID NO: 11491 - DNA, 19 bp, Homo sapiens
gcaccgaagagcagggtcc

SEQ ID NO: 11492 - DNA, 16 bp, Homo sapiens
gcccaggccccagcga

SEQ ID NO: 11493 - DNA, 16 bp, Homo sapiens
gagagcccggcagggc

SEQ ID NO: 11494 - DNA, 21 bp, Homo sapiens
gcaccgcccgcgcccgcaccc

SEQ ID NO: 11495 - DNA, 16 bp, Homo sapiens
ccacccgggggcccgt

SEQ ID NO: 11496 - DNA, 21 bp, Homo sapiens
ctaaccagtagctgcggcggc

SEQ ID NO: 11497 - DNA, 16 bp, Homo sapiens
ttgcgggtcctggagc

SEQ ID NO: 11498 - DNA, 17 bp, Homo sapiens
gctgccaccagcagcgc

SEQ ID NO: 11499 - DNA, 16 bp, Homo sapiens
ctccggaagctgcgct

SEQ ID NO: 11500 - DNA, 24 bp, Homo sapiens
ccagcaccaggcccagctccgccg

SEQ ID NO: 11501 - DNA, 22 bp, Homo sapiens
ccttttcctctggcctcccctg

SEQ ID NO: 11502 - DNA, 24 bp, Homo sapiens
gtgtctcggtcggaaagggctcca

SEQ ID NO: 11503 - DNA, 16 bp, Homo sapiens
tccgaggcgcagctaa

SEQ ID NO: 11504 - DNA, 18 bp, Homo sapiens
ttggaaaagaagcagcaa

SEQ ID NO: 11505 - DNA, 23 bp, Homo sapiens
attttaaagtaaagctttcaagg

SEQ ID NO: 11506 - DNA, 17 bp, Homo sapiens
tggtcctgggactcgaa

SEQ ID NO: 11507 - DNA, 22 bp, Homo sapiens
catagctttactctcttctttg

SEQ ID NO: 11508 - DNA, 22 bp, Homo sapiens
ttaaacacattctttcaacagg

SEQ ID NO: 11509 - DNA, 23 bp, Homo sapiens
agaggatattatacagattgctg

SEQ ID NO: 11510 - DNA, 22 bp, Homo sapiens
tgacaaagaagaaaggataggg

SEQ ID NO: 11511 - DNA, 21 bp, Homo sapiens
cacctgaacggcagcctttgg

SEQ ID NO: 11512 - DNA, 18 bp, Homo sapiens
ttttttagccccaaatgc

SEQ ID NO: 11513 - DNA, 24 bp, Homo sapiens
aacttcaaacagaaattcataatc

SEQ ID NO: 11514 - DNA, 18 bp, Homo sapiens
ggtgataccacctcaggt

SEQ ID NO: 11515 - DNA, 22 bp, Homo sapiens
tgtccacttttagaccttgtag

SEQ ID NO: 11516 - DNA, 20 bp, Homo sapiens
tcctgaactcatcaaagaac

SEQ ID NO: 11517 - DNA, 22 bp, Homo sapiens
acaagtttatctttagaaccac

SEQ ID NO: 11518 - DNA, 18 bp, Homo sapiens
gatgtgcatgctgtgggc

SEQ ID NO: 11519 - DNA, 24 bp, Homo sapiens
acagtactagaaaaatagagataa

SEQ ID NO: 11520 - DNA, 24 bp, Homo sapiens
tgatttatctttactttctgactg

SEQ ID NO: 11521 - DNA, 17 bp, Homo sapiens
atctggccgtccaaggg

SEQ ID NO: 11522 - DNA, 22 bp, Homo sapiens
tgaatggtattgcctagattgt

SEQ ID NO: 11523 - DNA, 21 bp, Homo sapiens
gaccagcagcgagggtgctta

SEQ ID NO: 11524 - DNA, 24 bp, Homo sapiens
tttttgcttttgttgtaattgctt

SEQ ID NO: 11525 - DNA, 18 bp, Homo sapiens
ccctcttttccaggtact

SEQ ID NO: 11526 - DNA, 21 bp, Homo sapiens
gagaaaggcatttgccaagtc

SEQ ID NO: 11527 - DNA, 21 bp, Homo sapiens
atgacagaggagcaaaagtta

SEQ ID NO: 11528 - DNA, 22 bp, Homo sapiens
gctcaatgtctgtcatcatttt

SEQ ID NO: 11529 - DNA, 18 bp, Homo sapiens
ggaacgtgaaggtcgcag

SEQ ID NO: 11530 - DNA, 21 bp, Homo sapiens
gaaattccccccaacagtttt

SEQ ID NO: 11531 - DNA, 24 bp, Homo sapiens
cctttggaaaattagtatctaact

SEQ ID NO: 11532 - DNA, 21 bp, Homo sapiens
agcaaatcctgtagcaataac

SEQ ID NO: 11533 - DNA, 21 bp, Homo sapiens
aggtgcttttaaataaacttg

SEQ ID NO: 11534 - DNA, 21 bp, Homo sapiens
tttgctacaagaagacgaggt

SEQ ID NO: 11535 - DNA, 27 bp, Homo sapiens
taacccctgaatgtaaaataaaaattg

SEQ ID NO: 11536 - DNA, 21 bp, Homo sapiens
ataacatctgctatcaagagg

SEQ ID NO: 11537 - DNA, 30 bp, Homo sapiens
atataattaatatttaatttactatttatt

SEQ ID NO: 11538 - DNA, 20 bp, Homo sapiens
aatgatcgaatggtgagtgg

SEQ ID NO: 11539 - DNA, 21 bp, Homo sapiens
tgtaaggaaattaagctccca

SEQ ID NO: 11540 - DNA, 20 bp, Homo sapiens
agatgtacagtgggagaaat

SEQ ID NO: 11541 - DNA, 22 bp, Homo sapiens
ttctggcctaagaaaccttaca

SEQ ID NO: 11542 - DNA, 27 bp, Homo sapiens
attatggtaaacagatatctttatcac

SEQ ID NO: 11543 - DNA, 18 bp, Homo sapiens
cgatatgctccactcacc

SEQ ID NO: 11544 - DNA, 23 bp, Homo sapiens
tcttattttacatttttacagtc

SEQ ID NO: 11545 - DNA, 19 bp, Homo sapiens
tcagggcatctgtgatttc

SEQ ID NO: 11546 - DNA, 30 bp, Homo sapiens
gaaattttaaaatgataagaattaaattta

SEQ ID NO: 11547 - DNA, 21 bp, Homo sapiens
actaaccgaatgtgctgctag

SEQ ID NO: 11548 - DNA, 24 bp, Homo sapiens
acaggatcaaccttttatttaagt

SEQ ID NO: 11549 - DNA, 22 bp, Homo sapiens
tccttgactttttccatagatc

SEQ ID NO: 11550 - DNA, 20 bp, Homo sapiens
gtctttggaaacctccaaac

SEQ ID NO: 11551 - DNA, 21 bp, Homo sapiens
agggtctaatctcttgatctc

SEQ ID NO: 11552 - DNA, 16 bp, Homo sapiens
ttccatctccgctagc

SEQ ID NO: 11553 - DNA, 23 bp, Homo sapiens
caattttttcctcttaaatttgg

SEQ ID NO: 11554 - DNA, 19 bp, Homo sapiens
ttgatccctgctggatttg

SEQ ID NO: 11555 - DNA, 21 bp, Homo sapiens
gaaacaggcagattgaaaaac

SEQ ID NO: 11556 - DNA, 29 bp, Homo sapiens
cttacatttgaaatgatggaaattaatac

SEQ ID NO: 11557 - DNA, 20 bp, Homo sapiens
accagttggaaaaagaagac

SEQ ID NO: 11558 - DNA, 20 bp, Homo sapiens
ttaaaagcttagccagagcc

SEQ ID NO: 11559 - DNA, 23 bp, Homo sapiens
tgtgaataaaatttttctttggg

SEQ ID NO: 11560 - DNA, 21 bp, Homo sapiens
gcaagctattaataccttctt

SEQ ID NO: 11561 - DNA, 29 bp, Homo sapiens
ttaaagatattaaatttataaggaaaata

SEQ ID NO: 11562 - DNA, 18 bp, Homo sapiens
ttgccagaacttctacag

SEQ ID NO: 11563 - DNA, 20 bp, Homo sapiens
ctcagattgggatttgctga

SEQ ID NO: 11564 - DNA, 24 bp, Homo sapiens
tatagatagatacaagtatatgag

SEQ ID NO: 11565 - DNA, 20 bp, Homo sapiens
ctgtagctgagggaatacct

SEQ ID NO: 11566 - DNA, 23 bp, Homo sapiens
ttgttttgttaactatacatgtt

SEQ ID NO: 11567 - DNA, 22 bp, Homo sapiens
tttagttttgttaatgtttttc

SEQ ID NO: 11568 - DNA, 26 bp, Homo sapiens
atatatgaactttctcactatcttac

SEQ ID NO: 11569 - DNA, 23 bp, Homo sapiens
agtaattatataacactcataac

SEQ ID NO: 11570 - DNA, 19 bp, Homo sapiens
cttcaattcgaagtttagg

SEQ ID NO: 11571 - DNA, 23 bp, Homo sapiens
tttaattctgttcttatgaaaca

SEQ ID NO: 11572 - DNA, 24 bp, Homo sapiens
atttcttcaatttcattaatgagc

SEQ ID NO: 11573 - DNA, 24 bp, Homo sapiens
ttatgatgctgctttaaaggtaag

SEQ ID NO: 11574 - DNA, 30 bp, Homo sapiens
tttgcaaacatcgtttaaattattatataa

SEQ ID NO: 11575 - DNA, 16 bp, Homo sapiens
ggctgatccttgggga

SEQ ID NO: 11576 - DNA, 20 bp, Homo sapiens
aaatcttgacttgtaagttt

SEQ ID NO: 11577 - DNA, 20 bp, Homo sapiens
tgtgaaaagtgctcgaattg

SEQ ID NO: 11578 - DNA, 21 bp, Homo sapiens
aagttgcaaagtggaaaaact

SEQ ID NO: 11579 - DNA, 18 bp, Homo sapiens
agggactcagtctttgca

SEQ ID NO: 11580 - DNA, 22 bp, Homo sapiens
tccatcatgtaagaacctcccc

SEQ ID NO: 11581 - DNA, 22 bp, Homo sapiens
attttaggatccctacaataat

SEQ ID NO: 11582 - DNA, 19 bp, Homo sapiens
tgatttgtgtgttcctggc

SEQ ID NO: 11583 - DNA, 20 bp, Homo sapiens
tgttgctgtttatagttgca

SEQ ID NO: 11584 - DNA, 24 bp, Homo sapiens
aaagcttcatcaaaagaatttgtg

SEQ ID NO: 11585 - DNA, 23 bp, Homo sapiens
tgctattctgaagcttaatatgg

SEQ ID NO: 11586 - DNA, 22 bp, Homo sapiens
ttctattgcagtacggacaata

SEQ ID NO: 11587 - DNA, 20 bp, Homo sapiens
tcacttactgagcaggtatg

SEQ ID NO: 11588 - DNA, 22 bp, Homo sapiens
acctaagtatacattatgcttc

SEQ ID NO: 11589 - DNA, 23 bp, Homo sapiens
tcagcctaaaaactcaaaatctc

SEQ ID NO: 11590 - DNA, 19 bp, Homo sapiens
ttctatttcctgcttgtgc

SEQ ID NO: 11591 - DNA, 22 bp, Homo sapiens
gaaatagcaaagatgagagctg

SEQ ID NO: 11592 - DNA, 30 bp, Homo sapiens
ttattaaaattctacattttaaattatata

SEQ ID NO: 11593 - DNA, 21 bp, Homo sapiens
aacgttactattttaggttgt

SEQ ID NO: 11594 - DNA, 20 bp, Homo sapiens
tgacagtgtgctcttagaag

SEQ ID NO: 11595 - DNA, 24 bp, Homo sapiens
tctagtgtgtgatacaattagttt

SEQ ID NO: 11596 - DNA, 17 bp, Homo sapiens
agtgagcccagagtctt

SEQ ID NO: 11597 - DNA, 25 bp, Homo sapiens
actgatcttaattcaaattaagttc

SEQ ID NO: 11598 - DNA, 19 bp, Homo sapiens
tccccagaagaaagacaac

SEQ ID NO: 11599 - DNA, 20 bp, Homo sapiens
ggctggcctgacaattgatg

SEQ ID NO: 11600 - DNA, 21 bp, Homo sapiens
tcactcagataaaatataaga

SEQ ID NO: 11601 - DNA, 19 bp, Homo sapiens
ctggagctggcctatactt

SEQ ID NO: 11602 - DNA, 26 bp, Homo sapiens
cattttatcaatatataaaatggtcc

SEQ ID NO: 11603 - DNA, 26 bp, Homo sapiens
cacatgccaaaatttaattcaatttc

SEQ ID NO: 11604 - DNA, 19 bp, Homo sapiens
ctcaccttggtgcaaattc

SEQ ID NO: 11605 - DNA, 23 bp, Homo sapiens
aggaccttttaatatttttactt

SEQ ID NO: 11606 - DNA, 19 bp, Homo sapiens
agtactccaatccatctgc

SEQ ID NO: 11607 - DNA, 23 bp, Homo sapiens
accaagtttatttgaatttaaca

SEQ ID NO: 11608 - DNA, 20 bp, Homo sapiens
ttcctgcatatggtatccac

SEQ ID NO: 11609 - DNA, 24 bp, Homo sapiens
tggaaagcaaattaaatgtaacaa

SEQ ID NO: 11610 - DNA, 18 bp, Homo sapiens
ttgctgacatatttgaat

SEQ ID NO: 11611 - DNA, 21 bp, Homo sapiens
agtaacaataacaaaacattc

SEQ ID NO: 11612 - DNA, 26 bp, Homo sapiens
gatatactaaaggaatttatggttcg

SEQ ID NO: 11613 - DNA, 24 bp, Homo sapiens
cagttatagcatgttgtaaaaatt

SEQ ID NO: 11614 - DNA, 19 bp, Homo sapiens
actggagaagaacaaggtg

SEQ ID NO: 11615 - DNA, 24 bp, Homo sapiens
ccacaaagtatacctttgctgtat

SEQ ID NO: 11616 - DNA, 20 bp, Homo sapiens
aaatgtcagtttccatgact

SEQ ID NO: 11617 - DNA, 25 bp, Homo sapiens
tctggaggaaaaatgtatgtatttc

SEQ ID NO: 11618 - DNA, 21 bp, Homo sapiens
tggctggagttgctattgaca

SEQ ID NO: 11619 - DNA, 19 bp, Homo sapiens
ttctctttaggtacacctt

SEQ ID NO: 11620 - DNA, 19 bp, Homo sapiens
ctggcgacacatcgtggct

SEQ ID NO: 11621 - DNA, 24 bp, Homo sapiens
tggaataactgctccattcatagt

SEQ ID NO: 11622 - DNA, 30 bp, Homo sapiens
tcttgaatcttacattatttttctttatat

SEQ ID NO: 11623 - DNA, 24 bp, Homo sapiens
tcaaaaagaattttggtatcttcc

SEQ ID NO: 11624 - DNA, 24 bp, Homo sapiens
tgaatcaacatttttagtagtgtt

SEQ ID NO: 11625 - DNA, 19 bp, Homo sapiens
tcgagggttgtctgaatca

SEQ ID NO: 11626 - DNA, 20 bp, Homo sapiens
gttttgacatgtatgagcat

SEQ ID NO: 11627 - DNA, 18 bp, Homo sapiens
ccctgctgaccagctaaa

SEQ ID NO: 11628 - DNA, 22 bp, Homo sapiens
tgtggaagaaagcaataagttc

SEQ ID NO: 11629 - DNA, 24 bp, Homo sapiens
agtatagtctttaactacaaaatt

SEQ ID NO: 11630 - DNA, 20 bp, Homo sapiens
ccatgtatacctttaggccc

SEQ ID NO: 11631 - DNA, 21 bp, Homo sapiens
aaataaaaaactaggaggcat

SEQ ID NO: 11632 - DNA, 23 bp, Homo sapiens
gagagatactatggacttacctg

SEQ ID NO: 11633 - DNA, 23 bp, Homo sapiens
aaaatctcacccttaatgttgtc

SEQ ID NO: 11634 - DNA, 18 bp, Homo sapiens
cctaatatggcacacccc

SEQ ID NO: 11635 - DNA, 21 bp, Homo sapiens
gcatactggcggatggtccag

SEQ ID NO: 11636 - DNA, 18 bp, Homo sapiens
ccttcacccagaatgggc

SEQ ID NO: 11637 - DNA, 24 bp, Homo sapiens
tgaatggcttcactcctggaagtt

SEQ ID NO: 11638 - DNA, 21 bp, Homo sapiens
aggcaggtaaaagaatcatca

SEQ ID NO: 11639 - DNA, 22 bp, Homo sapiens
gggttttatagagatcccttcc

SEQ ID NO: 11640 - DNA, 22 bp, Homo sapiens
catgctccaccatgttaagagc

SEQ ID NO: 11641 - DNA, 18 bp, Homo sapiens
ctgctttttagccagggc

SEQ ID NO: 11642 - DNA, 24 bp, Homo sapiens
tctaaatgtttttactctatgttt

SEQ ID NO: 11643 - DNA, 24 bp, Homo sapiens
agtcgttgctgtatgagcctggag

SEQ ID NO: 11644 - DNA, 20 bp, Homo sapiens
tcctctttcttttctgttcc

SEQ ID NO: 11645 - DNA, 19 bp, Homo sapiens
aaaagctgattcttagctc

SEQ ID NO: 11646 - DNA, 20 bp, Homo sapiens
cattcagtacacccggaaac

SEQ ID NO: 11647 - DNA, 24 bp, Homo sapiens
aaagggattcagagtccacattct

SEQ ID NO: 11648 - DNA, 19 bp, Homo sapiens
ttggggctttcccaagaga

SEQ ID NO: 11649 - DNA, 24 bp, Homo sapiens
ccccagcttattatccagaaatac

SEQ ID NO: 11650 - DNA, 19 bp, Homo sapiens
ttcagacaagagaggcagc

SEQ ID NO: 11651 - DNA, 23 bp, Homo sapiens
gatcacagttgctcctgaatagt

SEQ ID NO: 11652 - DNA, 19 bp, Homo sapiens
agcagttgctcagatacca

SEQ ID NO: 11653 - DNA, 24 bp, Homo sapiens
cagtggccccgcaggaggctttct

SEQ ID NO: 11654 - DNA, 16 bp, Homo sapiens
tccaggtgctcctgct

SEQ ID NO: 11655 - DNA, 19 bp, Homo sapiens
actttgccctggcaactgc

SEQ ID NO: 11656 - DNA, 16 bp, Homo sapiens
ctgctgtgcctgctcc

SEQ ID NO: 11657 - DNA, 22 bp, Homo sapiens
ctgattttggcctgccagctgg

SEQ ID NO: 11658 - DNA, 20 bp, Homo sapiens
caccagttgatgaatggagt

SEQ ID NO: 11659 - DNA, 16 bp, Homo sapiens
tcttgcaggtacacct

SEQ ID NO: 11660 - DNA, 24 bp, Homo sapiens
cctatttcttttccccccagatat

SEQ ID NO: 11661 - DNA, 19 bp, Homo sapiens
atgccagtagtaccaggag

SEQ ID NO: 11662 - DNA, 22 bp, Homo sapiens
gaaatgctaagtatgcaaaatg

SEQ ID NO: 11663 - DNA, 19 bp, Homo sapiens
actttccttctggacactc

SEQ ID NO: 11664 - DNA, 20 bp, Homo sapiens
atttggaaatcaaagagctg

SEQ ID NO: 11665 - DNA, 22 bp, Homo sapiens
tgcccagcatgaccttcattct

SEQ ID NO: 11666 - DNA, 23 bp, Homo sapiens
tttctgctggggtataatttctt

SEQ ID NO: 11667 - DNA, 23 bp, Homo sapiens
tcatatccacatctcatccaaac

SEQ ID NO: 11668 - DNA, 20 bp, Homo sapiens
cttcagagacagagctgaag

SEQ ID NO: 11669 - DNA, 23 bp, Homo sapiens
tccattaatacagaaacaaaacc

SEQ ID NO: 11670 - DNA, 18 bp, Homo sapiens
tggggatcatctccaccc

SEQ ID NO: 11671 - DNA, 18 bp, Homo sapiens
cctaaatgctgatggtcc

SEQ ID NO: 11672 - DNA, 24 bp, Homo sapiens
tttttgggcccttgtgattctcgg

SEQ ID NO: 11673 - DNA, 20 bp, Homo sapiens
tgttatatgctttctgttgc

SEQ ID NO: 11674 - DNA, 19 bp, Homo sapiens
gggattcaggaatctcttc

SEQ ID NO: 11675 - DNA, 20 bp, Homo sapiens
tgctgttggcttaaaagaag

SEQ ID NO: 11676 - DNA, 23 bp, Homo sapiens
gtaattttatattttagagaagc

SEQ ID NO: 11677 - DNA, 16 bp, Homo sapiens
tggctgcttccctgtc

SEQ ID NO: 11678 - DNA, 24 bp, Homo sapiens
cattaatatgttatgtatgatgac

SEQ ID NO: 11679 - DNA, 18 bp, Homo sapiens
ttacagctcgatccaagc

SEQ ID NO: 11680 - DNA, 24 bp, Homo sapiens
aaaactacatacttctgcttttgc

SEQ ID NO: 11681 - DNA, 22 bp, Homo sapiens
attagcatcttattaacatatc

SEQ ID NO: 11682 - DNA, 18 bp, Homo sapiens
catgaggccacagaggac

SEQ ID NO: 11683 - DNA, 20 bp, Homo sapiens
acacctactatatcccagat

SEQ ID NO: 11684 - DNA, 18 bp, Homo sapiens
caggcaagacagcaaatg

SEQ ID NO: 11685 - DNA, 22 bp, Homo sapiens
tctctagaaatataaatcttgg

SEQ ID NO: 11686 - DNA, 21 bp, Homo sapiens
tggcactttatttttactgtc

SEQ ID NO: 11687 - DNA, 24 bp, Homo sapiens
tgaatttattttctaaactatgat

SEQ ID NO: 11688 - DNA, 23 bp, Homo sapiens
ctcaagatggttatgttagcttc

SEQ ID NO: 11689 - DNA, 22 bp, Homo sapiens
taagggagaaaggattatcttc

SEQ ID NO: 11690 - DNA, 22 bp, Homo sapiens
tcgagattagataataaacagc

SEQ ID NO: 11691 - DNA, 23 bp, Homo sapiens
gtataaaattacctggaggagaa

SEQ ID NO: 11692 - DNA, 22 bp, Homo sapiens
aaaaaattgtcctttattgtcc

SEQ ID NO: 11693 - DNA, 22 bp, Homo sapiens
aagactgccaagttgtagaagc

SEQ ID NO: 11694 - DNA, 21 bp, Homo sapiens
atttggttctaagtcttgact

SEQ ID NO: 11695 - DNA, 19 bp, Homo sapiens
agactcagtgctaaaaggt

SEQ ID NO: 11696 - DNA, 24 bp, Homo sapiens
cactgtagattagggatgaaggag

SEQ ID NO: 11697 - DNA, 17 bp, Homo sapiens
gagtccctgggacctcc

SEQ ID NO: 11698 - DNA, 25 bp, Homo sapiens
caattttgctatgaattcctaatgg

SEQ ID NO: 11699 - DNA, 22 bp, Homo sapiens
ttctgaatccaactttttcttc

SEQ ID NO: 11700 - DNA, 22 bp, Homo sapiens
tgaaatttacagatactttacc

SEQ ID NO: 11701 - DNA, 24 bp, Homo sapiens
actgaatatatgctttataaaagc

SEQ ID NO: 11702 - DNA, 20 bp, Homo sapiens
agctgaaattgtccatggct

SEQ ID NO: 11703 - DNA, 23 bp, Homo sapiens
tctgatatattcttaacatgaga

SEQ ID NO: 11704 - DNA, 21 bp, Homo sapiens
gccacaattggtatttttgga

SEQ ID NO: 11705 - DNA, 22 bp, Homo sapiens
aagctctaagtgcaacaaattg

SEQ ID NO: 11706 - DNA, 16 bp, Homo sapiens
tccatcctagtccagc

SEQ ID NO: 11707 - DNA, 23 bp, Homo sapiens
cactctaaaagataggctgaatg

SEQ ID NO: 11708 - DNA, 19 bp, Homo sapiens
atctgtcagaaatacaagc

SEQ ID NO: 11709 - DNA, 21 bp, Homo sapiens
acctgtgaaaagttacctgct

SEQ ID NO: 11710 - DNA, 20 bp, Homo sapiens
tggaaaattgctaccatagg

SEQ ID NO: 11711 - DNA, 21 bp, Homo sapiens
cccacttctccatctgaaggc

SEQ ID NO: 11712 - DNA, 24 bp, Homo sapiens
actacacaatgtattattttctag

SEQ ID NO: 11713 - DNA, 22 bp, Homo sapiens
aagttcccagttttaaaactgc

SEQ ID NO: 11714 - DNA, 18 bp, Homo sapiens
ggagtcattggctatggg

SEQ ID NO: 11715 - DNA, 21 bp, Homo sapiens
agtctttaaatgactctttga

SEQ ID NO: 11716 - DNA, 22 bp, Homo sapiens
ggggtactagagaatgttctga

SEQ ID NO: 11717 - DNA, 23 bp, Homo sapiens
agtgtaagtagattgacatttgc

SEQ ID NO: 11718 - DNA, 27 bp, Homo sapiens
tcatccttatcaagtaacaaattacag

SEQ ID NO: 11719 - DNA, 24 bp, Homo sapiens
ccctcatttggatgtgaatataat

SEQ ID NO: 11720 - DNA, 22 bp, Homo sapiens
tgattgtcattgaaattggtga

SEQ ID NO: 11721 - DNA, 20 bp, Homo sapiens
actagtaaggccccgatagt

SEQ ID NO: 11722 - DNA, 21 bp, Homo sapiens
tcatgatggaaatgaactcac

SEQ ID NO: 11723 - DNA, 24 bp, Homo sapiens
agtgatgactcgatgagccaaatt

SEQ ID NO: 11724 - DNA, 20 bp, Homo sapiens
gccctactgtgacttgcact

SEQ ID NO: 11725 - DNA, 22 bp, Homo sapiens
cagtgctccttactgttggcga

SEQ ID NO: 11726 - DNA, 17 bp, Homo sapiens
tggccatgaagagacct

SEQ ID NO: 11727 - DNA, 20 bp, Homo sapiens
cagtcattgggggtgaagcc

SEQ ID NO: 11728 - DNA, 23 bp, Homo sapiens
actcgaaagactaactaacttct

SEQ ID NO: 11729 - DNA, 22 bp, Homo sapiens
actcttctataatgactagtgc

SEQ ID NO: 11730 - DNA, 18 bp, Homo sapiens
ttcacttggccctcactg

SEQ ID NO: 11731 - DNA, 23 bp, Homo sapiens
gctctactgtcagcaatggcctt

SEQ ID NO: 11732 - DNA, 21 bp, Homo sapiens
cctcttgtatgttgtcctaca

SEQ ID NO: 11733 - DNA, 19 bp, Homo sapiens
tttggttttggccaatctg

SEQ ID NO: 11734 - DNA, 19 bp, Homo sapiens
cagtcagcttccttattgc

SEQ ID NO: 11735 - DNA, 22 bp, Homo sapiens
agcctttttctaagactgaaac

SEQ ID NO: 11736 - DNA, 16 bp, Homo sapiens
tgagctccagagcccc

SEQ ID NO: 11737 - DNA, 24 bp, Homo sapiens
gcgtatttcaatgggctcctctcc

SEQ ID NO: 11738 - DNA, 20 bp, Homo sapiens
gcgcttttttctattgggga

SEQ ID NO: 11739 - DNA, 23 bp, Homo sapiens
ttggcaccaatagattcattcag

SEQ ID NO: 11740 - DNA, 22 bp, Homo sapiens
ctattctatcttacccatcagg

SEQ ID NO: 11741 - DNA, 24 bp, Homo sapiens
ggaataaaactttcccctaagaag

SEQ ID NO: 11742 - DNA, 20 bp, Homo sapiens
tctttagcagtgtaaatgcc

SEQ ID NO: 11743 - DNA, 22 bp, Homo sapiens
agagaagcttggaggtactttt

SEQ ID NO: 11744 - DNA, 19 bp, Homo sapiens
tttgggcaattcagaagtt

SEQ ID NO: 11745 - DNA, 21 bp, Homo sapiens
atccatgaagcagactttggt

SEQ ID NO: 11746 - DNA, 19 bp, Homo sapiens
aggattcatctgcaaacag

SEQ ID NO: 11747 - DNA, 19 bp, Homo sapiens
cccagaagtagagcaggga

SEQ ID NO: 11748 - DNA, 23 bp, Homo sapiens
tgcttcttttcttttataggtac

SEQ ID NO: 11749 - DNA, 21 bp, Homo sapiens
accactagtcacagatacaac

SEQ ID NO: 11750 - DNA, 21 bp, Homo sapiens
caagagtgatggattacaaat

SEQ ID NO: 11751 - DNA, 18 bp, Homo sapiens
gaccacttggtcagtctg

SEQ ID NO: 11752 - DNA, 19 bp, Homo sapiens
ctctcagtatctggcacaa

SEQ ID NO: 11753 - DNA, 24 bp, Homo sapiens
gtatgtacatttctgttcttctct

SEQ ID NO: 11754 - DNA, 24 bp, Homo sapiens
ctcctcccagtcctcaatcaattt

SEQ ID NO: 11755 - DNA, 25 bp, Homo sapiens
cttcaatgtctgactaaagtacttc

SEQ ID NO: 11756 - DNA, 20 bp, Homo sapiens
ctttccatttggtccatgct

SEQ ID NO: 11757 - DNA, 24 bp, Homo sapiens
tttggatgcaatgtggaaagcatg

SEQ ID NO: 11758 - DNA, 22 bp, Homo sapiens
atctttcaaagttcagcttcct

SEQ ID NO: 11759 - DNA, 18 bp, Homo sapiens
gcgggcatgagtaaagag

SEQ ID NO: 11760 - DNA, 17 bp, Homo sapiens
ccttcttcaacgcaggt

SEQ ID NO: 11761 - DNA, 24 bp, Homo sapiens
gtgaattggcagcagattagcaca

SEQ ID NO: 11762 - DNA, 16 bp, Homo sapiens
cctgggtctgcctcca

SEQ ID NO: 11763 - DNA, 19 bp, Homo sapiens
gtgagcacagcaaaaccag

SEQ ID NO: 11764 - DNA, 22 bp, Homo sapiens
agtctgtcctgaattagactgt

SEQ ID NO: 11765 - DNA, 20 bp, Homo sapiens
ttcagatatagcttacctgc

SEQ ID NO: 11766 - DNA, 22 bp, Homo sapiens
tgcttatcatgaaatgaaagag

SEQ ID NO: 11767 - DNA, 20 bp, Homo sapiens
aatacagaaactggtggagg

SEQ ID NO: 11768 - DNA, 24 bp, Homo sapiens
aaatctgttgaatttattttaaac

SEQ ID NO: 11769 - DNA, 22 bp, Homo sapiens
agatattttcttggacttgcac

SEQ ID NO: 11770 - DNA, 28 bp, Homo sapiens
gaaataaattatttcataaagagtttta

SEQ ID NO: 11771 - DNA, 20 bp, Homo sapiens
cttcattacaacccaggtat

SEQ ID NO: 11772 - DNA, 26 bp, Homo sapiens
agaattggtcattaagttaatgtacc

SEQ ID NO: 11773 - DNA, 17 bp, Homo sapiens
agcagagaggaccagga

SEQ ID NO: 11774 - DNA, 24 bp, Homo sapiens
tttattcctttcaaaaaacatgtt

SEQ ID NO: 11775 - DNA, 18 bp, Homo sapiens
gctatagcgatgacctgg

SEQ ID NO: 11776 - DNA, 22 bp, Homo sapiens
atggcttattataaatactaaa

SEQ ID NO: 11777 - DNA, 30 bp, Homo sapiens
atattatgatacatatttttaaaatttcag

SEQ ID NO: 11778 - DNA, 22 bp, Homo sapiens
tcttttatctttagcatcctgg

SEQ ID NO: 11779 - DNA, 30 bp, Homo sapiens
ttattataacaatatttagttgtatattcg

SEQ ID NO: 11780 - DNA, 21 bp, Homo sapiens
tctctgcatttggtagaatgc

SEQ ID NO: 11781 - DNA, 20 bp, Homo sapiens
tgtatgtaaactcctaaggc

SEQ ID NO: 11782 - DNA, 18 bp, Homo sapiens
actaccattgtggctatc

SEQ ID NO: 11783 - DNA, 16 bp, Homo sapiens
ctcaggagccatggca

SEQ ID NO: 11784 - DNA, 24 bp, Homo sapiens
acctttttgttgataaaatttcag

SEQ ID NO: 11785 - DNA, 20 bp, Homo sapiens
cctccaatccaagaggaggt

SEQ ID NO: 11786 - DNA, 23 bp, Homo sapiens
gcactgcctagataaaataaaac

SEQ ID NO: 11787 - DNA, 21 bp, Homo sapiens
gactgcattcaggacaaagtg

SEQ ID NO: 11788 - DNA, 24 bp, Homo sapiens
attgaatgatcattcctcactttg

SEQ ID NO: 11789 - DNA, 21 bp, Homo sapiens
aaaagtgcagattgtgcttag

SEQ ID NO: 11790 - DNA, 22 bp, Homo sapiens
tacaggccacagaataccaatt

SEQ ID NO: 11791 - DNA, 22 bp, Homo sapiens
acaatactattggtcttttggc

SEQ ID NO: 11792 - DNA, 20 bp, Homo sapiens
atgtcaagttggctgagtgc

SEQ ID NO: 11793 - DNA, 22 bp, Homo sapiens
actatggtgccatgttacatgt

SEQ ID NO: 11794 - DNA, 24 bp, Homo sapiens
ctggtggccacaatgactgaattc

SEQ ID NO: 11795 - DNA, 18 bp, Homo sapiens
aagtggacttgacaactg

SEQ ID NO: 11796 - DNA, 23 bp, Homo sapiens
cagaaaatacatacactactgcc

SEQ ID NO: 11797 - DNA, 22 bp, Homo sapiens
ttgtgaactgctttggtctgac

SEQ ID NO: 11798 - DNA, 23 bp, Homo sapiens
ctctatctccacgctgttctcta

SEQ ID NO: 11799 - DNA, 17 bp, Homo sapiens
cgttgtggcaggatcag

SEQ ID NO: 11800 - DNA, 22 bp, Homo sapiens
aagaagccagagattctggtac

SEQ ID NO: 11801 - DNA, 19 bp, Homo sapiens
ggtccaccatttgggtggc

SEQ ID NO: 11802 - DNA, 23 bp, Homo sapiens
catgaagacttgaatgcgccaca

SEQ ID NO: 11803 - DNA, 24 bp, Homo sapiens
tagagggtcaggcctatactgtca

SEQ ID NO: 11804 - DNA, 18 bp, Homo sapiens
ggatgtgaaagccaagtc

SEQ ID NO: 11805 - DNA, 23 bp, Homo sapiens
gtcatggagtacttttaaatgac

SEQ ID NO: 11806 - DNA, 24 bp, Homo sapiens
gtcctttacctggttcactttgat

SEQ ID NO: 11807 - DNA, 23 bp, Homo sapiens
tggatcatatcatctactctgca

SEQ ID NO: 11808 - DNA, 23 bp, Homo sapiens
catcagaaccacaaggttattag

SEQ ID NO: 11809 - DNA, 21 bp, Homo sapiens
aattcagaacttcgggtcacc

SEQ ID NO: 11810 - DNA, 22 bp, Homo sapiens
ctgtgccaaacacaatattgtc

SEQ ID NO: 11811 - DNA, 20 bp, Homo sapiens
gtacctgatgacatgcattt

SEQ ID NO: 11812 - DNA, 16 bp, Homo sapiens
gccacagctctggtgc

SEQ ID NO: 11813 - DNA, 23 bp, Homo sapiens
aaaaatgttcatatcttaatgcc

SEQ ID NO: 11814 - DNA, 20 bp, Homo sapiens
tgaattcaacagatgagtac

SEQ ID NO: 11815 - DNA, 21 bp, Homo sapiens
agttgagaatctatggtgtga

SEQ ID NO: 11816 - DNA, 17 bp, Homo sapiens
cttcaggaagtccagcc

SEQ ID NO: 11817 - DNA, 23 bp, Homo sapiens
agcacaaaggaactatctcattt

SEQ ID NO: 11818 - DNA, 22 bp, Homo sapiens
ggactgttgacccgaaatatac

SEQ ID NO: 11819 - DNA, 24 bp, Homo sapiens
ggatttctgggtgtcccagatgaa

SEQ ID NO: 11820 - DNA, 21 bp, Homo sapiens
caggaagtgtacatgtcacgg

SEQ ID NO: 11821 - DNA, 20 bp, Homo sapiens
acctgaaaattcttctcggc

SEQ ID NO: 11822 - DNA, 23 bp, Homo sapiens
ccccagctagtgatttttgaaac

SEQ ID NO: 11823 - DNA, 21 bp, Homo sapiens
tgatacgtcaggctgaatttg

SEQ ID NO: 11824 - DNA, 22 bp, Homo sapiens
accttaatgttggtagaacttc

SEQ ID NO: 11825 - DNA, 24 bp, Homo sapiens
ccaaacgaatgtgtcggccatcct

SEQ ID NO: 11826 - DNA, 16 bp, Homo sapiens
cggctcaaacaccggc

SEQ ID NO: 11827 - DNA, 22 bp, Homo sapiens
tagcatgagtctaggtcaacag

SEQ ID NO: 11828 - DNA, 24 bp, Homo sapiens
ttatgagcctcatgaagcagaggt

SEQ ID NO: 11829 - DNA, 20 bp, Homo sapiens
gaggtccccagctaggttac

SEQ ID NO: 11830 - DNA, 17 bp, Homo sapiens
gatgcagtggattggcg

SEQ ID NO: 11831 - DNA, 21 bp, Homo sapiens
accaaagccttaccaatatgc

SEQ ID NO: 11832 - DNA, 16 bp, Homo sapiens
tgtgctgcactgttag

SEQ ID NO: 11833 - DNA, 24 bp, Homo sapiens
gtggcccttgacttctttcacagt

SEQ ID NO: 11834 - DNA, 18 bp, Homo sapiens
tggtgggatatgttggtc

SEQ ID NO: 11835 - DNA, 20 bp, Homo sapiens
aggactattttgtcatgggg

SEQ ID NO: 11836 - DNA, 19 bp, Homo sapiens
ttggagctgatattgcctc

SEQ ID NO: 11837 - DNA, 23 bp, Homo sapiens
gcttatttttctacttgctcatc

SEQ ID NO: 11838 - DNA, 20 bp, Homo sapiens
aggggtttatgggaaagttc

SEQ ID NO: 11839 - DNA, 18 bp, Homo sapiens
tctcaagcagaagcaacc

SEQ ID NO: 11840 - DNA, 18 bp, Homo sapiens
cctggctttcattcctct

SEQ ID NO: 11841 - DNA, 24 bp, Homo sapiens
ctctcattccttacctctcatttc

SEQ ID NO: 11842 - DNA, 19 bp, Homo sapiens
accttcatatagagattct

SEQ ID NO: 11843 - DNA, 23 bp, Homo sapiens
ggataagcactgtaaagatgaac

SEQ ID NO: 11844 - DNA, 21 bp, Homo sapiens
gaattcatattgacccaggaa

SEQ ID NO: 11845 - DNA, 20 bp, Homo sapiens
tataaattgcctaaaagggt

SEQ ID NO: 11846 - DNA, 22 bp, Homo sapiens
aaggaacaaaagcttctgattc

SEQ ID NO: 11847 - DNA, 20 bp, Homo sapiens
tctctatcagacacaagcac

SEQ ID NO: 11848 - DNA, 23 bp, Homo sapiens
ttgatttgaatgatatacttttc

SEQ ID NO: 11849 - DNA, 21 bp, Homo sapiens
tactcttaccaattgttcctg

SEQ ID NO: 11850 - DNA, 24 bp, Homo sapiens
cacagtatctacattgcattattg

SEQ ID NO: 11851 - DNA, 21 bp, Homo sapiens
agactccctctgaggctctaa

SEQ ID NO: 11852 - DNA, 21 bp, Homo sapiens
tcctactcttatttcatctgc

SEQ ID NO: 11853 - DNA, 17 bp, Homo sapiens
ggggagctgaaagttgg

SEQ ID NO: 11854 - DNA, 24 bp, Homo sapiens
gcaactttactggtgcactcacta

SEQ ID NO: 11855 - DNA, 20 bp, Homo sapiens
ggaccttagacttccctgtg

SEQ ID NO: 11856 - DNA, 22 bp, Homo sapiens
tgataccatctgtttcccagag

SEQ ID NO: 11857 - DNA, 19 bp, Homo sapiens
acagacagaactgtccttg

SEQ ID NO: 11858 - DNA, 20 bp, Homo sapiens
ttgtgcctttactcaccaac

SEQ ID NO: 11859 - DNA, 21 bp, Homo sapiens
ccagaataaacacgtaattct

SEQ ID NO: 11860 - DNA, 24 bp, Homo sapiens
ccacactcagaacattgcttctgt

SEQ ID NO: 11861 - DNA, 21 bp, Homo sapiens
gctatacctgtcctggtttag

SEQ ID NO: 11862 - DNA, 22 bp, Homo sapiens
gaatggaagatctgtatccaca

SEQ ID NO: 11863 - DNA, 21 bp, Homo sapiens
acgttctcattttacccagtg

SEQ ID NO: 11864 - DNA, 20 bp, Homo sapiens
cccccaaaaagaggaagaat

SEQ ID NO: 11865 - DNA, 18 bp, Homo sapiens
aggtgttgaagaaggctg

SEQ ID NO: 11866 - DNA, 23 bp, Homo sapiens
gttgtacaatataaatgaaacat

SEQ ID NO: 11867 - DNA, 21 bp, Homo sapiens
ttttctagcttctacctctgc

SEQ ID NO: 11868 - DNA, 22 bp, Homo sapiens
tctcttgggtagttttactcac

SEQ ID NO: 11869 - DNA, 24 bp, Homo sapiens
gcatcctaaaataaggatagaatt

SEQ ID NO: 11870 - DNA, 23 bp, Homo sapiens
aatggtattgttgtatcctcccc

SEQ ID NO: 11871 - DNA, 24 bp, Homo sapiens
tgtacagaaacttataaaatattg

SEQ ID NO: 11872 - DNA, 18 bp, Homo sapiens
agctgattcaggggcaga

SEQ ID NO: 11873 - DNA, 17 bp, Homo sapiens
ggtatgcccccaactat

SEQ ID NO: 11874 - DNA, 23 bp, Homo sapiens
agagagttatcagacatataagc

SEQ ID NO: 11875 - DNA, 22 bp, Homo sapiens
gcaagttgtggcttttggtatt

SEQ ID NO: 11876 - DNA, 22 bp, Homo sapiens
gacaaggtggaatttgtagaac

SEQ ID NO: 11877 - DNA, 23 bp, Homo sapiens
gcataaattcttcttttctcacg

SEQ ID NO: 11878 - DNA, 22 bp, Homo sapiens
tcgtgtgttaatactcacctga

SEQ ID NO: 11879 - DNA, 24 bp, Homo sapiens
agattaactaacaaggatttcatt

SEQ ID NO: 11880 - DNA, 17 bp, Homo sapiens
tgaacttggccttcacc

SEQ ID NO: 11881 - DNA, 22 bp, Homo sapiens
tcagacttcagggaacattcac

SEQ ID NO: 11882 - DNA, 20 bp, Homo sapiens
cttccatcaccaggtcagaa

SEQ ID NO: 11883 - DNA, 19 bp, Homo sapiens
gcacaaatgtctggaattg

SEQ ID NO: 11884 - DNA, 17 bp, Homo sapiens
gccttaccctgacatcc

SEQ ID NO: 11885 - DNA, 23 bp, Homo sapiens
ctcaaaacattcatccaattgga

SEQ ID NO: 11886 - DNA, 17 bp, Homo sapiens
cagcaacctttgacaac

SEQ ID NO: 11887 - DNA, 19 bp, Homo sapiens
gaaccagtcacagccttgg

SEQ ID NO: 11888 - DNA, 18 bp, Homo sapiens
tggaatgatggggttcct

SEQ ID NO: 11889 - DNA, 22 bp, Homo sapiens
cactcgactcccacatcttagg

SEQ ID NO: 11890 - DNA, 19 bp, Homo sapiens
tctaaactactccatctgc

SEQ ID NO: 11891 - DNA, 22 bp, Homo sapiens
aggtaattaccaggagcaaagt

SEQ ID NO: 11892 - DNA, 19 bp, Homo sapiens
caacagatctctgcaggta

SEQ ID NO: 11893 - DNA, 22 bp, Homo sapiens
agttttctttatctgcatcaga

SEQ ID NO: 11894 - DNA, 17 bp, Homo sapiens
gatggctctgctcttgg

SEQ ID NO: 11895 - DNA, 22 bp, Homo sapiens
tcctctttcaacccattatctc

SEQ ID NO: 11896 - DNA, 21 bp, Homo sapiens
gactgacagcagaaataaaac

SEQ ID NO: 11897 - DNA, 20 bp, Homo sapiens
aatggattccttgggttacc

SEQ ID NO: 11898 - DNA, 22 bp, Homo sapiens
tttttttccttttaaaatcacc

SEQ ID NO: 11899 - DNA, 21 bp, Homo sapiens
gcaatgagtaggtctcttggt

SEQ ID NO: 11900 - DNA, 21 bp, Homo sapiens
gatgaaagaggaatgtattgg

SEQ ID NO: 11901 - DNA, 22 bp, Homo sapiens
acgtacataattgacagtggtt

SEQ ID NO: 11902 - DNA, 19 bp, Homo sapiens
catacaactaaagagggcc

SEQ ID NO: 11903 - DNA, 23 bp, Homo sapiens
taagaaacttcaggagtattcgc

SEQ ID NO: 11904 - DNA, 22 bp, Homo sapiens
catcgtatgtctattggtttgt

SEQ ID NO: 11905 - DNA, 24 bp, Homo sapiens
tcagcagctgtcaaaattattccc

SEQ ID NO: 11906 - DNA, 18 bp, Homo sapiens
gctttggtcgggttgtcc

SEQ ID NO: 11907 - DNA, 22 bp, Homo sapiens
caatttcccttctataagcctc

SEQ ID NO: 11908 - DNA, 22 bp, Homo sapiens
ggaaaaacagaagtcacattct

SEQ ID NO: 11909 - DNA, 24 bp, Homo sapiens
ctaaaaagtatagttaattccact

SEQ ID NO: 11910 - DNA, 21 bp, Homo sapiens
tggcatttccatttcctcatg

SEQ ID NO: 11911 - DNA, 20 bp, Homo sapiens
ctccacaggcactgccatgg

SEQ ID NO: 11912 - DNA, 21 bp, Homo sapiens
ttataggtggatttactgtga

SEQ ID NO: 11913 - DNA, 21 bp, Homo sapiens
tgaaagggtttccatagaagc

SEQ ID NO: 11914 - DNA, 21 bp, Homo sapiens
cactccagtgaatttagttgc

SEQ ID NO: 11915 - DNA, 21 bp, Homo sapiens
atccaagtcttccaaaattgc

SEQ ID NO: 11916 - DNA, 20 bp, Homo sapiens
ttgcatgaataggtgaattg

SEQ ID NO: 11917 - DNA, 24 bp, Homo sapiens
ttgtaaacttcaactggctggtct

SEQ ID NO: 11918 - DNA, 22 bp, Homo sapiens
gccattagaacctgttcagact

SEQ ID NO: 11919 - DNA, 22 bp, Homo sapiens
aacagtttctactgatgcaatc

SEQ ID NO: 11920 - DNA, 18 bp, Homo sapiens
tgggaactgatggtgtct

SEQ ID NO: 11921 - DNA, 22 bp, Homo sapiens
cactatttataatactgacttg

SEQ ID NO: 11922 - DNA, 26 bp, Homo sapiens
atctttttttcttttaaatcacaggg

SEQ ID NO: 11923 - DNA, 20 bp, Homo sapiens
taccttgtccttgggaacag

SEQ ID NO: 11924 - DNA, 24 bp, Homo sapiens
ctttgtttttattcatgcattatg

SEQ ID NO: 11925 - DNA, 19 bp, Homo sapiens
aacaaaggttgtgttagac

SEQ ID NO: 11926 - DNA, 20 bp, Homo sapiens
ttgtcatatgtgtgattggc

SEQ ID NO: 11927 - DNA, 19 bp, Homo sapiens
catacacagacttccctgt

SEQ ID NO: 11928 - DNA, 23 bp, Homo sapiens
aataaaaaggtcttttaactttt

SEQ ID NO: 11929 - DNA, 20 bp, Homo sapiens
ggaattgacgtcttggaaag

SEQ ID NO: 11930 - DNA, 20 bp, Homo sapiens
aaaattgcatatcctggatc

SEQ ID NO: 11931 - DNA, 18 bp, Homo sapiens
gaagtagcaatcttcgcc

SEQ ID NO: 11932 - DNA, 22 bp, Homo sapiens
agcctaaaacaaccacactaag

SEQ ID NO: 11933 - DNA, 17 bp, Homo sapiens
cgcaagaaaaaccaagc

SEQ ID NO: 11934 - DNA, 22 bp, Homo sapiens
gtaactgaagtatttgcatcac

SEQ ID NO: 11935 - DNA, 22 bp, Homo sapiens
aggtgctttaatacaatatagc

SEQ ID NO: 11936 - DNA, 20 bp, Homo sapiens
actttgaagtttttcaggcg

SEQ ID NO: 11937 - DNA, 17 bp, Homo sapiens
gtgctgacctcacagca

SEQ ID NO: 11938 - DNA, 19 bp, Homo sapiens
tttgggaaagtgcaggtgg

SEQ ID NO: 11939 - DNA, 16 bp, Homo sapiens
gcaatgctcccctcaa

SEQ ID NO: 11940 - DNA, 19 bp, Homo sapiens
accctaaatttcagccacc

SEQ ID NO: 11941 - DNA, 21 bp, Homo sapiens
tgctgtgagaaaacaagtgac

SEQ ID NO: 11942 - DNA, 22 bp, Homo sapiens
gttagaaacataaaaattggct

SEQ ID NO: 11943 - DNA, 17 bp, Homo sapiens
aagcttacctgggcacc

SEQ ID NO: 11944 - DNA, 23 bp, Homo sapiens
accttcattctccctaatacatt

SEQ ID NO: 11945 - DNA, 23 bp, Homo sapiens
agagtggtgccagtgacattatc

SEQ ID NO: 11946 - DNA, 16 bp, Homo sapiens
gggctgaggggtaggc

SEQ ID NO: 11947 - DNA, 23 bp, Homo sapiens
tgtcaattatacctcaaaaaagc

SEQ ID NO: 11948 - DNA, 19 bp, Homo sapiens
accaaccaaacatcacaag

SEQ ID NO: 11949 - DNA, 23 bp, Homo sapiens
tccaacaaatgcccaaagtgctc

SEQ ID NO: 11950 - DNA, 21 bp, Homo sapiens
tcttaatttctgtaggggaac

SEQ ID NO: 11951 - DNA, 23 bp, Homo sapiens
gccaaaacatagatgaatttccc

SEQ ID NO: 11952 - DNA, 24 bp, Homo sapiens
agtacaaacaagagtctttctttc

SEQ ID NO: 11953 - DNA, 20 bp, Homo sapiens
ggaaagaagcggagcttgtg

SEQ ID NO: 11954 - DNA, 22 bp, Homo sapiens
gtctataatagagttttaatgt

SEQ ID NO: 11955 - DNA, 20 bp, Homo sapiens
atagccagcaccacacactc

SEQ ID NO: 11956 - DNA, 21 bp, Homo sapiens
agcgttagtgcattttatgtg

SEQ ID NO: 11957 - DNA, 20 bp, Homo sapiens
gagggactctccaatcctga

SEQ ID NO: 11958 - DNA, 17 bp, Homo sapiens
ccagggaagccaaaagg

SEQ ID NO: 11959 - DNA, 20 bp, Homo sapiens
gactggtcaggacatggaaa

SEQ ID NO: 11960 - DNA, 22 bp, Homo sapiens
agttctggtcttcctggtagag

SEQ ID NO: 11961 - DNA, 22 bp, Homo sapiens
gggtgttgagttgagtacattt

SEQ ID NO: 11962 - DNA, 17 bp, Homo sapiens
tgccagatggtgtcaac

SEQ ID NO: 11963 - DNA, 30 bp, Homo sapiens
tatatatatatatatatgaaatgcattatg

SEQ ID NO: 11964 - DNA, 24 bp, Homo sapiens
ggatgatcacgttgtttcttatta

SEQ ID NO: 11965 - DNA, 17 bp, Homo sapiens
ctcctgggaggcaattc

SEQ ID NO: 11966 - DNA, 22 bp, Homo sapiens
tagaaaatatttagtatgcaca

SEQ ID NO: 11967 - DNA, 23 bp, Homo sapiens
tcctaagtgacataaaatatact

SEQ ID NO: 11968 - DNA, 24 bp, Homo sapiens
ttgtctataaaatatatgacaatt

SEQ ID NO: 11969 - DNA, 17 bp, Homo sapiens
tcaaaacaacccacacc

SEQ ID NO: 11970 - DNA, 21 bp, Homo sapiens
tctttccttccatgaattgcc

SEQ ID NO: 11971 - DNA, 24 bp, Homo sapiens
actctagaactgaagagtacataa

SEQ ID NO: 11972 - DNA, 16 bp, Homo sapiens
tgcgctgctagttggt

SEQ ID NO: 11973 - DNA, 20 bp, Homo sapiens
tgttttactgtagcccattt

SEQ ID NO: 11974 - DNA, 17 bp, Homo sapiens
gcatgtgcgggaccttg

SEQ ID NO: 11975 - DNA, 23 bp, Homo sapiens
agaaatttggggagaattcattg

SEQ ID NO: 11976 - DNA, 20 bp, Homo sapiens
actctttcctattcagagtc

SEQ ID NO: 11977 - DNA, 23 bp, Homo sapiens
acaagcttgttttacttaccaac

SEQ ID NO: 11978 - DNA, 20 bp, Homo sapiens
aggttgctctaaatatggtc

SEQ ID NO: 11979 - DNA, 22 bp, Homo sapiens
cattactgtccaccttcaggcc

SEQ ID NO: 11980 - DNA, 23 bp, Homo sapiens
gcttctaacttcttatctcctga

SEQ ID NO: 11981 - DNA, 19 bp, Homo sapiens
cactgtgcagccctgtatg

SEQ ID NO: 11982 - DNA, 18 bp, Homo sapiens
ggtgggagctatgagagg

SEQ ID NO: 11983 - DNA, 22 bp, Homo sapiens
ttgggaaccatagacctagaat

SEQ ID NO: 11984 - DNA, 19 bp, Homo sapiens
gggagtgcagtttcaagtc

SEQ ID NO: 11985 - DNA, 24 bp, Homo sapiens
atctatcattccaccatgcatgta

SEQ ID NO: 11986 - DNA, 23 bp, Homo sapiens
ggatatgggagccagagtgatcg

SEQ ID NO: 11987 - DNA, 22 bp, Homo sapiens
ctaggtccggacccccttacct

SEQ ID NO: 11988 - DNA, 21 bp, Homo sapiens
atttcaggtaatctgcagcac

SEQ ID NO: 11989 - DNA, 24 bp, Homo sapiens
cttatggaaggcttgccccaagac

SEQ ID NO: 11990 - DNA, 20 bp, Homo sapiens
gggagatttgtctggaagca

SEQ ID NO: 11991 - DNA, 21 bp, Homo sapiens
ctcttctgggaaggactgaac

SEQ ID NO: 11992 - DNA, 24 bp, Homo sapiens
ggaaataagattattaaatgaaat

SEQ ID NO: 11993 - DNA, 22 bp, Homo sapiens
cactcatggaatacaaacagtg

SEQ ID NO: 11994 - DNA, 16 bp, Homo sapiens
ttcatgccaggaggcc

SEQ ID NO: 11995 - DNA, 20 bp, Homo sapiens
gggcatccaaagtttaaggg

SEQ ID NO: 11996 - DNA, 21 bp, Homo sapiens
gctctgctcagcaggagtatt

SEQ ID NO: 11997 - DNA, 21 bp, Homo sapiens
catcagacagtaagaatattc

SEQ ID NO: 11998 - DNA, 21 bp, Homo sapiens
tctcacaactttacagagaat

SEQ ID NO: 11999 - DNA, 20 bp, Homo sapiens
taccttctggagcattggcc

SEQ ID NO: 12000 - DNA, 22 bp, Homo sapiens
attcctagtaagatttggagtg

SEQ ID NO: 12001 - DNA, 20 bp, Homo sapiens
agtgagatttccttgtatgg

SEQ ID NO: 12002 - DNA, 24 bp, Homo sapiens
agtttctaaagaaacatgaataga

SEQ ID NO: 12003 - DNA, 17 bp, Homo sapiens
gtgctctccagccaccc

SEQ ID NO: 12004 - DNA, 22 bp, Homo sapiens
tcatgctttttaattttcttgt

SEQ ID NO: 12005 - DNA, 20 bp, Homo sapiens
ccgatggaagagattgtcac

SEQ ID NO: 12006 - DNA, 23 bp, Homo sapiens
tcattgaaagaccccaatacaaa

SEQ ID NO: 12007 - DNA, 16 bp, Homo sapiens
accctggggatgaagt

SEQ ID NO: 12008 - DNA, 24 bp, Homo sapiens
ttcttccatgtcaacttagccaag

SEQ ID NO: 12009 - DNA, 17 bp, Homo sapiens
tcttagagcaactgccc

SEQ ID NO: 12010 - DNA, 23 bp, Homo sapiens
ggtctgtatcctgcacagtttcc

SEQ ID NO: 12011 - DNA, 21 bp, Homo sapiens
aattatctggacaacttttcc

SEQ ID NO: 12012 - DNA, 20 bp, Homo sapiens
gttccactgatgatgacaac

SEQ ID NO: 12013 - DNA, 21 bp, Homo sapiens
ttggctaaataacatcacatt

SEQ ID NO: 12014 - DNA, 20 bp, Homo sapiens
ccagcactgtgtctagggca

SEQ ID NO: 12015 - DNA, 19 bp, Homo sapiens
aaattagtgcttacctatc

SEQ ID NO: 12016 - DNA, 18 bp, Homo sapiens
aagttcctggctgtgagg

SEQ ID NO: 12017 - DNA, 22 bp, Homo sapiens
atagtgccatgctctaactgac

SEQ ID NO: 12018 - DNA, 20 bp, Homo sapiens
agatcacactctacgggagt

SEQ ID NO: 12019 - DNA, 24 bp, Homo sapiens
aaacagttttatcagtttccactg

SEQ ID NO: 12020 - DNA, 19 bp, Homo sapiens
ttctgatggtggagagctc

SEQ ID NO: 12021 - DNA, 17 bp, Homo sapiens
ccgtgcagagaaagagt

SEQ ID NO: 12022 - DNA, 22 bp, Homo sapiens
cattagggggcaagctgatttt

SEQ ID NO: 12023 - DNA, 22 bp, Homo sapiens
aagaagggagttgagtaggaac

SEQ ID NO: 12024 - DNA, 20 bp, Homo sapiens
attgaaactgacaaaacggt

SEQ ID NO: 12025 - DNA, 19 bp, Homo sapiens
tcggatccaatccggagct

SEQ ID NO: 12026 - DNA, 24 bp, Homo sapiens
agagcatgataaaataagtctaca

SEQ ID NO: 12027 - DNA, 21 bp, Homo sapiens
gagctcgatgggtcctggggc

SEQ ID NO: 12028 - DNA, 24 bp, Homo sapiens
cctttacatagtaaaatttcagtt

SEQ ID NO: 12029 - DNA, 16 bp, Homo sapiens
acagtggagaatggcc

SEQ ID NO: 12030 - DNA, 24 bp, Homo sapiens
gaacttatccagaaagtttccctc

SEQ ID NO: 12031 - DNA, 17 bp, Homo sapiens
gagatggtccaggactc

SEQ ID NO: 12032 - DNA, 23 bp, Homo sapiens
tattaccaacctacaaacttcac

SEQ ID NO: 12033 - DNA, 23 bp, Homo sapiens
agccaaccaaccaaccaacccac

SEQ ID NO: 12034 - DNA, 24 bp, Homo sapiens
ttagtgtccagcagaagcaattgg

SEQ ID NO: 12035 - DNA, 24 bp, Homo sapiens
caatgaatgaaccaacaaaccaac

SEQ ID NO: 12036 - DNA, 18 bp, Homo sapiens
ttcaggaaaccagctgtg

SEQ ID NO: 12037 - DNA, 22 bp, Homo sapiens
ttactttctttgagaagtttct

SEQ ID NO: 12038 - DNA, 18 bp, Homo sapiens
ggccagaacactcaggta

SEQ ID NO: 12039 - DNA, 20 bp, Homo sapiens
tgtgcattagaccagcttct

SEQ ID NO: 12040 - DNA, 17 bp, Homo sapiens
gtgagacgcccaatcag

SEQ ID NO: 12041 - DNA, 22 bp, Homo sapiens
tggactaaattgtttttttaat

SEQ ID NO: 12042 - DNA, 22 bp, Homo sapiens
ggaaagagatgaagttctcatc

SEQ ID NO: 12043 - DNA, 24 bp, Homo sapiens
tcagtctgtaaaaaagatttgatt

SEQ ID NO: 12044 - DNA, 22 bp, Homo sapiens
attaagattgatgacaccccat

SEQ ID NO: 12045 - DNA, 18 bp, Homo sapiens
tgacggtaattggctgat

SEQ ID NO: 12046 - DNA, 19 bp, Homo sapiens
tagttgccacaagctaatg

SEQ ID NO: 12047 - DNA, 22 bp, Homo sapiens
gtttccatggtaatgttacagg

SEQ ID NO: 12048 - DNA, 22 bp, Homo sapiens
aaacaataaaagaatggaaaca

SEQ ID NO: 12049 - DNA, 21 bp, Homo sapiens
tttccatcattctcgggcctc

SEQ ID NO: 12050 - DNA, 19 bp, Homo sapiens
cctccaagagagttgtagc

SEQ ID NO: 12051 - DNA, 20 bp, Homo sapiens
ctacatttgcgaggaaagtt

SEQ ID NO: 12052 - DNA, 20 bp, Homo sapiens
tctgatggctccatcggtcc

SEQ ID NO: 12053 - DNA, 18 bp, Homo sapiens
tgtgatttgacagttgcc

SEQ ID NO: 12054 - DNA, 24 bp, Homo sapiens
ggagaaggtaaagttacctgataa

SEQ ID NO: 12055 - DNA, 16 bp, Homo sapiens
ctgtgtggcctgaagc

SEQ ID NO: 12056 - DNA, 21 bp, Homo sapiens
gcacaaagaggcattgggaac

SEQ ID NO: 12057 - DNA, 21 bp, Homo sapiens
cttaggttctctctgtggttc

SEQ ID NO: 12058 - DNA, 17 bp, Homo sapiens
cagttgctctgtcgcca

SEQ ID NO: 12059 - DNA, 24 bp, Homo sapiens
gctaacttcatattcctattggtc

SEQ ID NO: 12060 - DNA, 17 bp, Homo sapiens
tcacagctgtcctcctc

SEQ ID NO: 12061 - DNA, 23 bp, Homo sapiens
gatacttgtatttttctgtgtac

SEQ ID NO: 12062 - DNA, 17 bp, Homo sapiens
ctgcccctggatggtga

SEQ ID NO: 12063 - DNA, 22 bp, Homo sapiens
agatgaggagtagagaaattct

SEQ ID NO: 12064 - DNA, 17 bp, Homo sapiens
gtgtggtgctccctgcc

SEQ ID NO: 12065 - DNA, 23 bp, Homo sapiens
aatcacaaaaatagaattaacca

SEQ ID NO: 12066 - DNA, 17 bp, Homo sapiens
gggtggaaggctggtgc

SEQ ID NO: 12067 - DNA, 23 bp, Homo sapiens
tgtgtgtggcatctttactcacc

SEQ ID NO: 12068 - DNA, 19 bp, Homo sapiens
aagaagggagatttgcctg

SEQ ID NO: 12069 - DNA, 21 bp, Homo sapiens
gtagcattagccaggactcgg

SEQ ID NO: 12070 - DNA, 21 bp, Homo sapiens
ttctgaggatgtgaaaagaag

SEQ ID NO: 12071 - DNA, 24 bp, Homo sapiens
cctggagaaaatcccgctccaaac

SEQ ID NO: 12072 - DNA, 19 bp, Homo sapiens
cagagcctaagtggagagg

SEQ ID NO: 12073 - DNA, 18 bp, Homo sapiens
attacagcagtgacggag

SEQ ID NO: 12074 - DNA, 23 bp, Homo sapiens
ggattgtaagaagccagtgggct

SEQ ID NO: 12075 - DNA, 20 bp, Homo sapiens
gaggctatgactgcatcaga

SEQ ID NO: 12076 - DNA, 24 bp, Homo sapiens
tctactttccagaagtgaaaggag

SEQ ID NO: 12077 - DNA, 19 bp, Homo sapiens
tggtaaccacaccgttctt

SEQ ID NO: 12078 - DNA, 21 bp, Homo sapiens
cttgacttaccgaagttctcc

SEQ ID NO: 12079 - DNA, 18 bp, Homo sapiens
tcaggagctgcaaacatt

SEQ ID NO: 12080 - DNA, 18 bp, Homo sapiens
gcagatgaggcccaccct

SEQ ID NO: 12081 - DNA, 22 bp, Homo sapiens
cctttaccccagaattgatctc

SEQ ID NO: 12082 - DNA, 20 bp, Homo sapiens
ggaagggaagggaccacgca

SEQ ID NO: 12083 - DNA, 22 bp, Homo sapiens
ggaaatagaggtagatggactt

SEQ ID NO: 12084 - DNA, 23 bp, Homo sapiens
ggtgacattcctataaaaatgtc

SEQ ID NO: 12085 - DNA, 16 bp, Homo sapiens
aacatcggtgctgagc

SEQ ID NO: 12086 - DNA, 24 bp, Homo sapiens
ttaagatgtcatcgctctgagaaa

SEQ ID NO: 12087 - DNA, 19 bp, Homo sapiens
cctgagaggacagaacacc

SEQ ID NO: 12088 - DNA, 23 bp, Homo sapiens
gactcctatgtgataccaaagtc

SEQ ID NO: 12089 - DNA, 24 bp, Homo sapiens
caagtgtttcattattttcctaag

SEQ ID NO: 12090 - DNA, 18 bp, Homo sapiens
tgtgggaacaatgcaccg

SEQ ID NO: 12091 - DNA, 23 bp, Homo sapiens
agaaatgggtatgcttgttctgg

SEQ ID NO: 12092 - DNA, 23 bp, Homo sapiens
ctggtcaatatagactgacgtgg

SEQ ID NO: 12093 - DNA, 19 bp, Homo sapiens
ttgtgtgccagacaagaga

SEQ ID NO: 12094 - DNA, 19 bp, Homo sapiens
gaggcttccaccatgtaag

SEQ ID NO: 12095 - DNA, 22 bp, Homo sapiens
gccgatggtatttgtggatgat

SEQ ID NO: 12096 - DNA, 24 bp, Homo sapiens
aatgtagaagtgtctggaaacatt

SEQ ID NO: 12097 - DNA, 19 bp, Homo sapiens
gggtctctgaccactgtgc

SEQ ID NO: 12098 - DNA, 17 bp, Homo sapiens
tagtggggtcctggggc

SEQ ID NO: 12099 - DNA, 24 bp, Homo sapiens
gaattgcactcttttcataaggga

SEQ ID NO: 12100 - DNA, 24 bp, Homo sapiens
aaaaaagttacattgcaaggaagt

SEQ ID NO: 12101 - DNA, 20 bp, Homo sapiens
tctccctgaacgtcacagtc

SEQ ID NO: 12102 - DNA, 21 bp, Homo sapiens
aacctctgacccctaatcagc

SEQ ID NO: 12103 - DNA, 24 bp, Homo sapiens
tgagtttgggagaccacaccattc

SEQ ID NO: 12104 - DNA, 21 bp, Homo sapiens
ggcatccatgacaggacttgc

SEQ ID NO: 12105 - DNA, 20 bp, Homo sapiens
tctagaaggaggtcagttcg

SEQ ID NO: 12106 - DNA, 20 bp, Homo sapiens
ggttagcccattgaccagga

SEQ ID NO: 12107 - DNA, 16 bp, Homo sapiens
agggttcggcatgtgg

SEQ ID NO: 12108 - DNA, 18 bp, Homo sapiens
caggctaacctggcagag

SEQ ID NO: 12109 - DNA, 20 bp, Homo sapiens
gctaatatgtctgtggtgct

SEQ ID NO: 12110 - DNA, 24 bp, Homo sapiens
aagtaaaaggacccgagaggtcaa

SEQ ID NO: 12111 - DNA, 19 bp, Homo sapiens
ttcacagtctggaggctgg

SEQ ID NO: 12112 - DNA, 22 bp, Homo sapiens
cagtaagtatggtcccaccaca

SEQ ID NO: 12113 - DNA, 19 bp, Homo sapiens
tgttgagacacagtccttc

SEQ ID NO: 12114 - DNA, 24 bp, Homo sapiens
tatccgaggcatcactgcaaattg

SEQ ID NO: 12115 - DNA, 20 bp, Homo sapiens
tgcatgtgggaggaagtaac

SEQ ID NO: 12116 - DNA, 22 bp, Homo sapiens
cgtacttggagaggatagatgc

SEQ ID NO: 12117 - DNA, 17 bp, Homo sapiens
gcagcaacaccagtagt

SEQ ID NO: 12118 - DNA, 16 bp, Homo sapiens
cgttgccctggaagga

SEQ ID NO: 12119 - DNA, 19 bp, Homo sapiens
ttcttcgcccgtggtcctt

SEQ ID NO: 12120 - DNA, 21 bp, Homo sapiens
aggatgactgagttggagagg

SEQ ID NO: 12121 - DNA, 17 bp, Homo sapiens
agatacccgatgcgggc

SEQ ID NO: 12122 - DNA, 24 bp, Homo sapiens
atttctccttgcatggcagtgact

SEQ ID NO: 12123 - DNA, 24 bp, Homo sapiens
gtcctgtgacattgtgaacttaac

SEQ ID NO: 12124 - DNA, 24 bp, Homo sapiens
ctttccccaccaagcttggtgaag

SEQ ID NO: 12125 - DNA, 23 bp, Homo sapiens
atctcaggaataggcttcagcag

SEQ ID NO: 12126 - DNA, 20 bp, Homo sapiens
cacggcagctggaacagtgg

SEQ ID NO: 12127 - DNA, 24 bp, Homo sapiens
agaatatcagctataatattttgc

SEQ ID NO: 12128 - DNA, 22 bp, Homo sapiens
tttcacaccagatgctcgcctc

SEQ ID NO: 12129 - DNA, 21 bp, Homo sapiens
cctaccttccacttaattgac

SEQ ID NO: 12130 - DNA, 17 bp, Homo sapiens
aaccaaagctgggtccc

SEQ ID NO: 12131 - DNA, 20 bp, Homo sapiens
tcacaaatttagctttggtg

SEQ ID NO: 12132 - DNA, 24 bp, Homo sapiens
aaaaacacccctcagttcctggag

SEQ ID NO: 12133 - DNA, 19 bp, Homo sapiens
tctgtagggttgatctcca

SEQ ID NO: 12134 - DNA, 22 bp, Homo sapiens
actggcaaattaatccagaaac

SEQ ID NO: 12135 - DNA, 20 bp, Homo sapiens
tcttctggcttactctttct

SEQ ID NO: 12136 - DNA, 21 bp, Homo sapiens
taacagtcacataagagccac

SEQ ID NO: 12137 - DNA, 24 bp, Homo sapiens
ggaacaaatcttagagaacttaca

SEQ ID NO: 12138 - DNA, 19 bp, Homo sapiens
aacttctgtgaggtactgg

SEQ ID NO: 12139 - DNA, 20 bp, Homo sapiens
tccacagaatttccgtctct

SEQ ID NO: 12140 - DNA, 24 bp, Homo sapiens
ttcatgtctttaacctctaacttc

SEQ ID NO: 12141 - DNA, 16 bp, Homo sapiens
acagtcggcttggggc

SEQ ID NO: 12142 - DNA, 24 bp, Homo sapiens
ttacctagctgaatgctagaccat

SEQ ID NO: 12143 - DNA, 22 bp, Homo sapiens
gctgatgaactatacggatttg

SEQ ID NO: 12144 - DNA, 24 bp, Homo sapiens
ccttgtgagtgaatgctgacccca

SEQ ID NO: 12145 - DNA, 22 bp, Homo sapiens
cagaggctattggattcttctc

SEQ ID NO: 12146 - DNA, 17 bp, Homo sapiens
agtgccacctccaggcc

SEQ ID NO: 12147 - DNA, 24 bp, Homo sapiens
gaatttaatccaaaaagacagttt

SEQ ID NO: 12148 - DNA, 23 bp, Homo sapiens
tcctggacgtggacttccacatc

SEQ ID NO: 12149 - DNA, 23 bp, Homo sapiens
tgaaaaatttaggttggtatcgt

SEQ ID NO: 12150 - DNA, 22 bp, Homo sapiens
tgagcagaaacataagcaatat

SEQ ID NO: 12151 - DNA, 23 bp, Homo sapiens
gctaagatgaaaaaagcaatctc

SEQ ID NO: 12152 - DNA, 18 bp, Homo sapiens
ctgcagttcttcccagag

SEQ ID NO: 12153 - DNA, 22 bp, Homo sapiens
aatttcagaggacattgattgc

SEQ ID NO: 12154 - DNA, 16 bp, Homo sapiens
ggggaaagatggacgc

SEQ ID NO: 12155 - DNA, 24 bp, Homo sapiens
ttgcagtatcacatattttacctg

SEQ ID NO: 12156 - DNA, 19 bp, Homo sapiens
tcccttaagtcagtcctac

SEQ ID NO: 12157 - DNA, 24 bp, Homo sapiens
ctggatttaaggaagagacatatg

SEQ ID NO: 12158 - DNA, 20 bp, Homo sapiens
accctttaggaacaactttc

SEQ ID NO: 12159 - DNA, 21 bp, Homo sapiens
tcacagtcacattcacaatgc

SEQ ID NO: 12160 - DNA, 20 bp, Homo sapiens
gcagaattcagtgcaaagtt

SEQ ID NO: 12161 - DNA, 22 bp, Homo sapiens
acaagcatactatcataatgag

SEQ ID NO: 12162 - DNA, 23 bp, Homo sapiens
ggtgttagcctgatattatttgg

SEQ ID NO: 12163 - DNA, 24 bp, Homo sapiens
cactgaaaatgttatattaacagt

SEQ ID NO: 12164 - DNA, 24 bp, Homo sapiens
tgaatatgctgtttttgttacagg

SEQ ID NO: 12165 - DNA, 24 bp, Homo sapiens
gaatccacttaccctgggtggaac

SEQ ID NO: 12166 - DNA, 21 bp, Homo sapiens
ttcattttatccatcttgtgc

SEQ ID NO: 12167 - DNA, 20 bp, Homo sapiens
tggcacacgagtaagatcca

SEQ ID NO: 12168 - DNA, 17 bp, Homo sapiens
tgcagtttgagcattgc

SEQ ID NO: 12169 - DNA, 15 bp, Homo sapiens
atggtggcccagagc

SEQ ID NO: 12170 - DNA, 19 bp, Homo sapiens
gagctgcggatattggtaa

SEQ ID NO: 12171 - DNA, 22 bp, Homo sapiens
ttgctcatttaaatacttatgt

SEQ ID NO: 12172 - DNA, 18 bp, Homo sapiens
cactggagaagacctctt

SEQ ID NO: 12173 - DNA, 23 bp, Homo sapiens
ttcattacacagaaggactagat

SEQ ID NO: 12174 - DNA, 19 bp, Homo sapiens
tttgctacctgttggaatg

SEQ ID NO: 12175 - DNA, 23 bp, Homo sapiens
actgtgagaccctccccagatta

SEQ ID NO: 12176 - DNA, 21 bp, Homo sapiens
caaaacgagttgcaaagttat

SEQ ID NO: 12177 - DNA, 24 bp, Homo sapiens
tccagtctaggtttcacatttagg

SEQ ID NO: 12178 - DNA, 18 bp, Homo sapiens
ttacattaccggaactgg

SEQ ID NO: 12179 - DNA, 20 bp, Homo sapiens
ctcaccaacatcaagatccg

SEQ ID NO: 12180 - DNA, 24 bp, Homo sapiens
cactgagagattattttatttgtt

SEQ ID NO: 12181 - DNA, 21 bp, Homo sapiens
tggtctggtttgagaaaataa

SEQ ID NO: 12182 - DNA, 21 bp, Homo sapiens
ggcagagaaggaacatttgat

SEQ ID NO: 12183 - DNA, 22 bp, Homo sapiens
gaactgggagtcaccagagaaa

SEQ ID NO: 12184 - DNA, 19 bp, Homo sapiens
acaaatacagatggccaat

SEQ ID NO: 12185 - DNA, 21 bp, Homo sapiens
ccctgtgtccattctgtgtgg

SEQ ID NO: 12186 - DNA, 21 bp, Homo sapiens
ctacgtcactcaacctctgcc

SEQ ID NO: 12187 - DNA, 19 bp, Homo sapiens
tgatgtaccagctcattgc

SEQ ID NO: 12188 - DNA, 23 bp, Homo sapiens
tacatggcctctaacaaaatcac

SEQ ID NO: 12189 - DNA, 23 bp, Homo sapiens
cctggtagatatgaaatgcataa

SEQ ID NO: 12190 - DNA, 19 bp, Homo sapiens
taccaatggagtaccacac

SEQ ID NO: 12191 - DNA, 17 bp, Homo sapiens
catgaacacgtgtcagc

SEQ ID NO: 12192 - DNA, 19 bp, Homo sapiens
aaagagcaggaacctgggc

SEQ ID NO: 12193 - DNA, 21 bp, Homo sapiens
agccattcattgcaatttaag

SEQ ID NO: 12194 - DNA, 24 bp, Homo sapiens
ctactgccaaccagcatactcagg

SEQ ID NO: 12195 - DNA, 21 bp, Homo sapiens
aaaggacagccataagtaccc

SEQ ID NO: 12196 - DNA, 22 bp, Homo sapiens
tgtggtatatgatggtggagtt

SEQ ID NO: 12197 - DNA, 23 bp, Homo sapiens
tcaatgagtccatgttacaaatc

SEQ ID NO: 12198 - DNA, 19 bp, Homo sapiens
tgtaaccatctcaggtctc

SEQ ID NO: 12199 - DNA, 21 bp, Homo sapiens
cacttagggtggcccattcac

SEQ ID NO: 12200 - DNA, 24 bp, Homo sapiens
aaactctttattatttgattagac

SEQ ID NO: 12201 - DNA, 19 bp, Homo sapiens
tgggtccaagaaaaactcc

SEQ ID NO: 12202 - DNA, 20 bp, Homo sapiens
tgttactctgctttcacttt

SEQ ID NO: 12203 - DNA, 22 bp, Homo sapiens
tcactccagtaaggttttcatc

SEQ ID NO: 12204 - DNA, 18 bp, Homo sapiens
ttggggatttgcccaatt

SEQ ID NO: 12205 - DNA, 24 bp, Homo sapiens
agaatccctttactcaaatattcc

SEQ ID NO: 12206 - DNA, 21 bp, Homo sapiens
acttcactgtgaaggaggatc

SEQ ID NO: 12207 - DNA, 24 bp, Homo sapiens
ctgatttttttttttgcagaattt

SEQ ID NO: 12208 - DNA, 21 bp, Homo sapiens
ccagctcttacagaataatgc

SEQ ID NO: 12209 - DNA, 23 bp, Homo sapiens
tactatacataccctgataaaat

SEQ ID NO: 12210 - DNA, 22 bp, Homo sapiens
tctgtatcaaaaccttctctca

SEQ ID NO: 12211 - DNA, 21 bp, Homo sapiens
tccacacgtgttcgtagcaag

SEQ ID NO: 12212 - DNA, 21 bp, Homo sapiens
tgtatcgtgttatccttgagg

SEQ ID NO: 12213 - DNA, 19 bp, Homo sapiens
tggatgtgaagtcatcggc

SEQ ID NO: 12214 - DNA, 24 bp, Homo sapiens
ggattctactgaagttctactttg

SEQ ID NO: 12215 - DNA, 18 bp, Homo sapiens
tttcgcatccagcttcct

SEQ ID NO: 12216 - DNA, 24 bp, Homo sapiens
cactggaaaataaataaaatagct

SEQ ID NO: 12217 - DNA, 17 bp, Homo sapiens
tcctggtgacgacacag

SEQ ID NO: 12218 - DNA, 22 bp, Homo sapiens
gatgttgttcccttgggaatgt

SEQ ID NO: 12219 - DNA, 19 bp, Homo sapiens
ctttgtttctgacgtgcca

SEQ ID NO: 12220 - DNA, 24 bp, Homo sapiens
aatcacccctttaccagaaatcac

SEQ ID NO: 12221 - DNA, 20 bp, Homo sapiens
aagcaagacaggacatcctt

SEQ ID NO: 12222 - DNA, 23 bp, Homo sapiens
cttgtccgctgtcgtctctgtgt

SEQ ID NO: 12223 - DNA, 22 bp, Homo sapiens
aaaactcccttactgagtttcc

SEQ ID NO: 12224 - DNA, 16 bp, Homo sapiens
tgtggcacggagctcc

SEQ ID NO: 12225 - DNA, 24 bp, Homo sapiens
aagattgagaacattgctttaagc

SEQ ID NO: 12226 - DNA, 20 bp, Homo sapiens
aatctggtggaatcagtctc

SEQ ID NO: 12227 - DNA, 17 bp, Homo sapiens
caaggccaacaagcatt

SEQ ID NO: 12228 - DNA, 22 bp, Homo sapiens
tggatcactggtctctagtttc

SEQ ID NO: 12229 - DNA, 16 bp, Homo sapiens
cagtgatgagcgggag

SEQ ID NO: 12230 - DNA, 21 bp, Homo sapiens
acatttccaactgggattttc

SEQ ID NO: 12231 - DNA, 21 bp, Homo sapiens
ctgtagaccggaggggatccc

SEQ ID NO: 12232 - DNA, 20 bp, Homo sapiens
tggcagcagataagtaggaa

SEQ ID NO: 12233 - DNA, 19 bp, Homo sapiens
cgttccagaatcagcttga

SEQ ID NO: 12234 - DNA, 19 bp, Homo sapiens
agacacaaacgtaacaggt

SEQ ID NO: 12235 - DNA, 21 bp, Homo sapiens
gccccatctgttttctagagc

SEQ ID NO: 12236 - DNA, 20 bp, Homo sapiens
caaccttctccctctggccc

SEQ ID NO: 12237 - DNA, 24 bp, Homo sapiens
ctcattaaaaaaaacagtaacccc

SEQ ID NO: 12238 - DNA, 19 bp, Homo sapiens
ttgcttcggggatctccag

SEQ ID NO: 12239 - DNA, 23 bp, Homo sapiens
ggagagagaatttgatgattacc

SEQ ID NO: 12240 - DNA, 19 bp, Homo sapiens
ctccatgctgtttttcagc

SEQ ID NO: 12241 - DNA, 19 bp, Homo sapiens
atagaacaggcccgtctcc

SEQ ID NO: 12242 - DNA, 19 bp, Homo sapiens
ccaggttgggaacaagggc

SEQ ID NO: 12243 - DNA, 16 bp, Homo sapiens
agtttgccggaggggg

SEQ ID NO: 12244 - DNA, 16 bp, Homo sapiens
actgcttgggtgcagg

SEQ ID NO: 12245 - DNA, 21 bp, Homo sapiens
cagtgcaatcgaactgccagc

SEQ ID NO: 12246 - DNA, 17 bp, Homo sapiens
tctcacgaggaccagcc

SEQ ID NO: 12247 - DNA, 22 bp, Homo sapiens
caaatccccaaattagtgtatg

SEQ ID NO: 12248 - DNA, 21 bp, Homo sapiens
cctgaagatgattgtgtcctt

SEQ ID NO: 12249 - DNA, 20 bp, Homo sapiens
ggtaactgtccccaaaacag

SEQ ID NO: 12250 - DNA, 21 bp, Homo sapiens
gacttatttggtgtccatagc

SEQ ID NO: 12251 - DNA, 22 bp, Homo sapiens
ccaccgattagctacctctcgg

SEQ ID NO: 12252 - DNA, 18 bp, Homo sapiens
atgtggactcctcactac

SEQ ID NO: 12253 - DNA, 24 bp, Homo sapiens
tctttaccatgttttgaaagccga

SEQ ID NO: 12254 - DNA, 17 bp, Homo sapiens
tctggaagggcaggaac

SEQ ID NO: 12255 - DNA, 22 bp, Homo sapiens
ggcctttgtatgcaagacacag

SEQ ID NO: 12256 - DNA, 22 bp, Homo sapiens
gctagatcagtatacacacgtg

SEQ ID NO: 12257 - DNA, 19 bp, Homo sapiens
gtcgagagacctagaacct

SEQ ID NO: 12258 - DNA, 16 bp, Homo sapiens
cagcctcgacaccttg

SEQ ID NO: 12259 - DNA, 24 bp, Homo sapiens
cctttgtgcttctgagttttcagt

SEQ ID NO: 12260 - DNA, 21 bp, Homo sapiens
agtttccaactctgatgggga

SEQ ID NO: 12261 - DNA, 20 bp, Homo sapiens
aagcacaaagactgctactc

SEQ ID NO: 12262 - DNA, 24 bp, Homo sapiens
agctctgtcttttttaatatctat

SEQ ID NO: 12263 - DNA, 21 bp, Homo sapiens
ccgggggagtaaggacaaggt

SEQ ID NO: 12264 - DNA, 23 bp, Homo sapiens
aacgggggttttcttaagtgaga

SEQ ID NO: 12265 - DNA, 16 bp, Homo sapiens
tcccactggtgaggtc

SEQ ID NO: 12266 - DNA, 24 bp, Homo sapiens
aggaactgaggctcagagaggttg

SEQ ID NO: 12267 - DNA, 20 bp, Homo sapiens
gcttggatttgaacgaggtg

SEQ ID NO: 12268 - DNA, 24 bp, Homo sapiens
cactcagtgtccaaatccaggttt

SEQ ID NO: 12269 - DNA, 20 bp, Homo sapiens
accattgaggagttacttgc

SEQ ID NO: 12270 - DNA, 20 bp, Homo sapiens
agaggaaatggggattgttc

SEQ ID NO: 12271 - DNA, 20 bp, Homo sapiens
gggtggtctttatgctcatg

SEQ ID NO: 12272 - DNA, 24 bp, Homo sapiens
caatcagaatgaagccacggacag

SEQ ID NO: 12273 - DNA, 19 bp, Homo sapiens
tctggtgggagacttcttc

SEQ ID NO: 12274 - DNA, 23 bp, Homo sapiens
caaaggggttccagtttgcattt

SEQ ID NO: 12275 - DNA, 21 bp, Homo sapiens
aacttcttccttacttgggac

SEQ ID NO: 12276 - DNA, 24 bp, Homo sapiens
caaaggaaaaaaatgccaggaatt

SEQ ID NO: 12277 - DNA, 21 bp, Homo sapiens
gcaccatcatttagtcttgtc

SEQ ID NO: 12278 - DNA, 21 bp, Homo sapiens
actcccctccctcattttttg

SEQ ID NO: 12279 - DNA, 22 bp, Homo sapiens
gaaatagcaagttgaggaggaa

SEQ ID NO: 12280 - DNA, 21 bp, Homo sapiens
gctgactagagacattgtccc

SEQ ID NO: 12281 - DNA, 20 bp, Homo sapiens
gtgttcctcagagatttctg

SEQ ID NO: 12282 - DNA, 16 bp, Homo sapiens
gatccgagtccgagcc

SEQ ID NO: 12283 - DNA, 24 bp, Homo sapiens
tatcctatttctttgacagcaagg

SEQ ID NO: 12284 - DNA, 24 bp, Homo sapiens
cagattcacaacacctggctgaat

SEQ ID NO: 12285 - DNA, 24 bp, Homo sapiens
tgctcctgctacatgggactttat

SEQ ID NO: 12286 - DNA, 23 bp, Homo sapiens
tgtactacctggaagcagagcat

SEQ ID NO: 12287 - DNA, 24 bp, Homo sapiens
acacagacctgtacttctggaagc

SEQ ID NO: 12288 - DNA, 22 bp, Homo sapiens
gaatagggatgaagggacctgg

SEQ ID NO: 12289 - DNA, 24 bp, Homo sapiens
gtaagtggtgaccacatcaggatt

SEQ ID NO: 12290 - DNA, 19 bp, Homo sapiens
aagtggcctccatcagcgt

SEQ ID NO: 12291 - DNA, 17 bp, Homo sapiens
cttggggctatcccatg

SEQ ID NO: 12292 - DNA, 22 bp, Homo sapiens
ttgagaaagagatgcctggaag

SEQ ID NO: 12293 - DNA, 24 bp, Homo sapiens
caacagctccaacttgggagtctt

SEQ ID NO: 12294 - DNA, 20 bp, Homo sapiens
gttaaaaaggcagaccagtt

SEQ ID NO: 12295 - DNA, 24 bp, Homo sapiens
ggagtcaaaccagtcagcagtgcc

SEQ ID NO: 12296 - DNA, 21 bp, Homo sapiens
cagttggtcagaggaaccaag

SEQ ID NO: 12297 - DNA, 24 bp, Homo sapiens
tttttcaacaattaaagttcctga

SEQ ID NO: 12298 - DNA, 23 bp, Homo sapiens
gctccagagacaaataattacac

SEQ ID NO: 12299 - DNA, 22 bp, Homo sapiens
agccttaactttgattctttct

SEQ ID NO: 12300 - DNA, 20 bp, Homo sapiens
tgcttgactctatgttctac

SEQ ID NO: 12301 - DNA, 22 bp, Homo sapiens
aatgagaagacagtgaatacct

SEQ ID NO: 12302 - DNA, 19 bp, Homo sapiens
gaagacaaagtacaagggc

SEQ ID NO: 12303 - DNA, 19 bp, Homo sapiens
tctgcctgaatccagaaag

SEQ ID NO: 12304 - DNA, 24 bp, Homo sapiens
ctttctagaatattctggacaatt

SEQ ID NO: 12305 - DNA, 23 bp, Homo sapiens
agaatactgtcaaactctgttgt

SEQ ID NO: 12306 - DNA, 17 bp, Homo sapiens
caggtggcagattgtcc

SEQ ID NO: 12307 - DNA, 23 bp, Homo sapiens
tcttgataccttccttatctgtc

SEQ ID NO: 12308 - DNA, 22 bp, Homo sapiens
gggcttctttttgaagttggag

SEQ ID NO: 12309 - DNA, 21 bp, Homo sapiens
tgtgggctcccacttttccta

SEQ ID NO: 12310 - DNA, 16 bp, Homo sapiens
tttgggaaggtgcgcc

SEQ ID NO: 12311 - DNA, 19 bp, Homo sapiens
gagaactggcattagggac

SEQ ID NO: 12312 - DNA, 23 bp, Homo sapiens
ttacctttacaggtagcatctgg

SEQ ID NO: 12313 - DNA, 23 bp, Homo sapiens
cagttccagtccctcaacagcat

SEQ ID NO: 12314 - DNA, 23 bp, Homo sapiens
catttgtatttcatattaactac

SEQ ID NO: 12315 - DNA, 16 bp, Homo sapiens
ccacccctcagccagg

SEQ ID NO: 12316 - DNA, 21 bp, Homo sapiens
acaatggtatcatggacccag

SEQ ID NO: 12317 - DNA, 18 bp, Homo sapiens
cacgtgtctcccaggaag

SEQ ID NO: 12318 - DNA, 22 bp, Homo sapiens
aacacttttatttctactcgcc

SEQ ID NO: 12319 - DNA, 21 bp, Homo sapiens
tgtatacctacacacacacac

SEQ ID NO: 12320 - DNA, 18 bp, Homo sapiens
ccctggtggcttccttac

SEQ ID NO: 12321 - DNA, 21 bp, Homo sapiens
cctctctctctctctgtctct

SEQ ID NO: 12322 - DNA, 21 bp, Homo sapiens
ggtctcaaccaaacacatgac

SEQ ID NO: 12323 - DNA, 18 bp, Homo sapiens
gagccttgggggaagaac

SEQ ID NO: 12324 - DNA, 20 bp, Homo sapiens
tgcatccctcatgccataca

SEQ ID NO: 12325 - DNA, 21 bp, Homo sapiens
tggaagcttactttttttttt

SEQ ID NO: 12326 - DNA, 23 bp, Homo sapiens
aactattttcagccatttcatca

SEQ ID NO: 12327 - DNA, 23 bp, Homo sapiens
agtaagaaattattaatatctcc

SEQ ID NO: 12328 - DNA, 22 bp, Homo sapiens
tcctgtaattgtgatgtttgtt

SEQ ID NO: 12329 - DNA, 24 bp, Homo sapiens
tgcatttttaaatagttattacta

SEQ ID NO: 12330 - DNA, 24 bp, Homo sapiens
agcaatttaatctcaaccaaaaac

SEQ ID NO: 12331 - DNA, 20 bp, Homo sapiens
atggtccacaagaaggcatg

SEQ ID NO: 12332 - DNA, 21 bp, Homo sapiens
aatggtcatcaagaaatggcc

SEQ ID NO: 12333 - DNA, 18 bp, Homo sapiens
aatgcaatcccagttgat

SEQ ID NO: 12334 - DNA, 23 bp, Homo sapiens
gaaggggtacttggtgaaggggg

SEQ ID NO: 12335 - DNA, 25 bp, Homo sapiens
tgctatttcaactgttctaaagatc

SEQ ID NO: 12336 - DNA, 24 bp, Homo sapiens
agatcctgtttagcactgatcagc

SEQ ID NO: 12337 - DNA, 20 bp, Homo sapiens
tatatgtggtctcattatac

SEQ ID NO: 12338 - DNA, 21 bp, Homo sapiens
gcagattcctgagttaatgtg

SEQ ID NO: 12339 - DNA, 24 bp, Homo sapiens
aaaaagataaagaaagtaagcaag

SEQ ID NO: 12340 - DNA, 20 bp, Homo sapiens
tgatattggagtctttgggc

SEQ ID NO: 12341 - DNA, 24 bp, Homo sapiens
aaatttgcctatttctatacccag

SEQ ID NO: 12342 - DNA, 17 bp, Homo sapiens
tttgtttttgcgggggg

SEQ ID NO: 12343 - DNA, 18 bp, Homo sapiens
gtggaaggcgactacatc

SEQ ID NO: 12344 - DNA, 22 bp, Homo sapiens
attttccagggaattcttaaca

SEQ ID NO: 12345 - DNA, 24 bp, Homo sapiens
attcttacctcagtttgtcttttc

SEQ ID NO: 12346 - DNA, 24 bp, Homo sapiens
accaatcttgcaattgcttttgtc

SEQ ID NO: 12347 - DNA, 24 bp, Homo sapiens
ctttctactttcctggttaaagag

SEQ ID NO: 12348 - DNA, 21 bp, Homo sapiens
acttctctaacagaccgatgt

SEQ ID NO: 12349 - DNA, 23 bp, Homo sapiens
aactcattatactttctctgtct

SEQ ID NO: 12350 - DNA, 22 bp, Homo sapiens
gaccatggtcctcctgaatagg

SEQ ID NO: 12351 - DNA, 23 bp, Homo sapiens
aaggtagtaaatagctatgtgtg

SEQ ID NO: 12352 - DNA, 19 bp, Homo sapiens
gcccagtgatcttggaagc

SEQ ID NO: 12353 - DNA, 21 bp, Homo sapiens
gggagagaaagagagagaatg

SEQ ID NO: 12354 - DNA, 22 bp, Homo sapiens
tgtttattgggagtattgcaca

SEQ ID NO: 12355 - DNA, 23 bp, Homo sapiens
tgtgcattggcaagataataaga

SEQ ID NO: 12356 - DNA, 19 bp, Homo sapiens
aaatccagaggagagtgtt

SEQ ID NO: 12357 - DNA, 24 bp, Homo sapiens
ggagtaacccatttgtctccttga

SEQ ID NO: 12358 - DNA, 22 bp, Homo sapiens
ttgattttgatgctgagtacat

SEQ ID NO: 12359 - DNA, 21 bp, Homo sapiens
gggaccataaactgcaaaaag

SEQ ID NO: 12360 - DNA, 23 bp, Homo sapiens
cttcaaacaggaaaactaataca

SEQ ID NO: 12361 - DNA, 17 bp, Homo sapiens
gggaagctggtcccagg

SEQ ID NO: 12362 - DNA, 27 bp, Homo sapiens
aaaaagaaacatggttttttattatac

SEQ ID NO: 12363 - DNA, 23 bp, Homo sapiens
aaacacacacttacctatcaatg

SEQ ID NO: 12364 - DNA, 19 bp, Homo sapiens
ttaattttctgggccatga

SEQ ID NO: 12365 - DNA, 20 bp, Homo sapiens
tccagccatatacatgtatt

SEQ ID NO: 12366 - DNA, 21 bp, Homo sapiens
tcaccaagtttatccaccaag

SEQ ID NO: 12367 - DNA, 24 bp, Homo sapiens
gttgactcttattttcaaaacagc

SEQ ID NO: 12368 - DNA, 19 bp, Homo sapiens
acatgctcacttgtggtac

SEQ ID NO: 12369 - DNA, 21 bp, Homo sapiens
ctcacctaggtttgcaacaag

SEQ ID NO: 12370 - DNA, 21 bp, Homo sapiens
ttcaagtaatgctgtctgagg

SEQ ID NO: 12371 - DNA, 21 bp, Homo sapiens
tcttacctggaacaccacttg

SEQ ID NO: 12372 - DNA, 22 bp, Homo sapiens
acaaagataaaaagaactagac

SEQ ID NO: 12373 - DNA, 20 bp, Homo sapiens
agctgtactttcaaggtggg

SEQ ID NO: 12374 - DNA, 22 bp, Homo sapiens
aagaaactctgtcattaccatc

SEQ ID NO: 12375 - DNA, 18 bp, Homo sapiens
cctggaagcatacttcgg

SEQ ID NO: 12376 - DNA, 23 bp, Homo sapiens
acgctggctcatttacaatttgc

SEQ ID NO: 12377 - DNA, 24 bp, Homo sapiens
ttcataaggatttccactttctgt

SEQ ID NO: 12378 - DNA, 22 bp, Homo sapiens
ttcctccagccttagaacccac

SEQ ID NO: 12379 - DNA, 20 bp, Homo sapiens
aaggaggaaatttgaagtgg

SEQ ID NO: 12380 - DNA, 20 bp, Homo sapiens
gactgcttaccagctgtccc

SEQ ID NO: 12381 - DNA, 23 bp, Homo sapiens
tggatcaaagaggtgaaaggtga

SEQ ID NO: 12382 - DNA, 18 bp, Homo sapiens
tggatttgcctgtggtga

SEQ ID NO: 12383 - DNA, 24 bp, Homo sapiens
tttttttaacaactatggctggca

SEQ ID NO: 12384 - DNA, 21 bp, Homo sapiens
gtgaacgtgaacatggtggtg

SEQ ID NO: 12385 - DNA, 23 bp, Homo sapiens
caccaaaagatactgagataagc

SEQ ID NO: 12386 - DNA, 22 bp, Homo sapiens
ttaggtttggagttgggtgttc

SEQ ID NO: 12387 - DNA, 18 bp, Homo sapiens
atacctggtccggcatgt

SEQ ID NO: 12388 - DNA, 18 bp, Homo sapiens
ttcacactgtcctgtgtc

SEQ ID NO: 12389 - DNA, 16 bp, Homo sapiens
cgcagtgcgggcacca

SEQ ID NO: 12390 - DNA, 23 bp, Homo sapiens
agtattaatttaatccttgggca

SEQ ID NO: 12391 - DNA, 19 bp, Homo sapiens
ttgttggggtaaagaacac

SEQ ID NO: 12392 - DNA, 22 bp, Homo sapiens
acgtggatcacagtcatttttg

SEQ ID NO: 12393 - DNA, 24 bp, Homo sapiens
aaagacagaagttggtcagtctgt

SEQ ID NO: 12394 - DNA, 23 bp, Homo sapiens
ttacagtacgtcacctgagttta

SEQ ID NO: 12395 - DNA, 21 bp, Homo sapiens
aaaggaagaaaaccaaagact

SEQ ID NO: 12396 - DNA, 21 bp, Homo sapiens
gcagaaggtagtggtttgaat

SEQ ID NO: 12397 - DNA, 21 bp, Homo sapiens
gcacttggtaaaaccccaacc

SEQ ID NO: 12398 - DNA, 19 bp, Homo sapiens
gtgcttaatcaagcctttc

SEQ ID NO: 12399 - DNA, 24 bp, Homo sapiens
caaggctaccttcttcaggttcaa

SEQ ID NO: 12400 - DNA, 19 bp, Homo sapiens
ggctgatctctctgatgag

SEQ ID NO: 12401 - DNA, 23 bp, Homo sapiens
tgattggcaagttaaaaatgcat

SEQ ID NO: 12402 - DNA, 22 bp, Homo sapiens
tgcttttaatgtctgagcaatc

SEQ ID NO: 12403 - DNA, 21 bp, Homo sapiens
agttctcaaggtaacctattg

SEQ ID NO: 12404 - DNA, 23 bp, Homo sapiens
ttttttgctttttttgtttttat

SEQ ID NO: 12405 - DNA, 19 bp, Homo sapiens
actgacctgccaaaagtag

SEQ ID NO: 12406 - DNA, 17 bp, Homo sapiens
cccaggtttcagaacag

SEQ ID NO: 12407 - DNA, 19 bp, Homo sapiens
tgatggagatgaacaaaat

SEQ ID NO: 12408 - DNA, 22 bp, Homo sapiens
ttagcatttagactatttcagg

SEQ ID NO: 12409 - DNA, 24 bp, Homo sapiens
agatgttgtattttttcaggaacc

SEQ ID NO: 12410 - DNA, 23 bp, Homo sapiens
tgtatcaaagaaataactatcaa

SEQ ID NO: 12411 - DNA, 25 bp, Homo sapiens
ggtagaaaggtaaatatcgttactc

SEQ ID NO: 12412 - DNA, 24 bp, Homo sapiens
tctagtgttaacttatgtaacctc

SEQ ID NO: 12413 - DNA, 19 bp, Homo sapiens
aaactttgtggctctaaac

SEQ ID NO: 12414 - DNA, 20 bp, Homo sapiens
agttcaatgttttttggttc

SEQ ID NO: 12415 - DNA, 20 bp, Homo sapiens
agactcttatcaaggcctac

SEQ ID NO: 12416 - DNA, 22 bp, Homo sapiens
tggttttaaaaatctcttgagt

SEQ ID NO: 12417 - DNA, 20 bp, Homo sapiens
gctataacaatggcacattc

SEQ ID NO: 12418 - DNA, 22 bp, Homo sapiens
cccctagataacaaatgccatc

SEQ ID NO: 12419 - DNA, 21 bp, Homo sapiens
ggtctccataatcagaccttg

SEQ ID NO: 12420 - DNA, 27 bp, Homo sapiens
tcggaaagaattagactgttatttatg

SEQ ID NO: 12421 - DNA, 19 bp, Homo sapiens
tgtatggatgggaatagct

SEQ ID NO: 12422 - DNA, 23 bp, Homo sapiens
acaactacatggtgccatttatt

SEQ ID NO: 12423 - DNA, 20 bp, Homo sapiens
gaaacctccagttcactact

SEQ ID NO: 12424 - DNA, 20 bp, Homo sapiens
ctttctcccaagttaactgc

SEQ ID NO: 12425 - DNA, 21 bp, Homo sapiens
tcaactgcaaaatttatgggt

SEQ ID NO: 12426 - DNA, 21 bp, Homo sapiens
tcattttcttcattttgagct

SEQ ID NO: 12427 - DNA, 19 bp, Homo sapiens
acagttgcctgtgtacttt

SEQ ID NO: 12428 - DNA, 28 bp, Homo sapiens
ttagtggtactgaaatttaaggatatag

SEQ ID NO: 12429 - DNA, 22 bp, Homo sapiens
tcctgtttgaataatctttgcc

SEQ ID NO: 12430 - DNA, 22 bp, Homo sapiens
tgtatttaatgtaagaattacc

SEQ ID NO: 12431 - DNA, 19 bp, Homo sapiens
tggcacaactttttcttgc

SEQ ID NO: 12432 - DNA, 23 bp, Homo sapiens
tcacaataccttcccacccaacc

SEQ ID NO: 12433 - DNA, 16 bp, Homo sapiens
gacagcctgtgggtac

SEQ ID NO: 12434 - DNA, 21 bp, Homo sapiens
tacataaagattggtggaggc

SEQ ID NO: 12435 - DNA, 21 bp, Homo sapiens
aatcaagaattacaattaact

SEQ ID NO: 12436 - DNA, 23 bp, Homo sapiens
gtatttccagcccaatctggcaa

SEQ ID NO: 12437 - DNA, 22 bp, Homo sapiens
cccatggcaatagaaaatgaac

SEQ ID NO: 12438 - DNA, 20 bp, Homo sapiens
tttctgcatgtgttgtaccc

SEQ ID NO: 12439 - DNA, 20 bp, Homo sapiens
tggacacaaatacagacttc

SEQ ID NO: 12440 - DNA, 24 bp, Homo sapiens
tgagccaccttttgctccaaattc

SEQ ID NO: 12441 - DNA, 20 bp, Homo sapiens
aggctacctggatctagatg

SEQ ID NO: 12442 - DNA, 23 bp, Homo sapiens
cggatacagccttgaaaacctac

SEQ ID NO: 12443 - DNA, 24 bp, Homo sapiens
ccaaaaagtaactataaacggaag

SEQ ID NO: 12444 - DNA, 21 bp, Homo sapiens
tactcctccaatatagaagtc

SEQ ID NO: 12445 - DNA, 18 bp, Homo sapiens
tccgttcaacttcgctac

SEQ ID NO: 12446 - DNA, 21 bp, Homo sapiens
ttctgttacatttatcccatc

SEQ ID NO: 12447 - DNA, 22 bp, Homo sapiens
gctaatcaaacttactgtttgc

SEQ ID NO: 12448 - DNA, 20 bp, Homo sapiens
attatatgccaagtacttcc

SEQ ID NO: 12449 - DNA, 20 bp, Homo sapiens
aaaacttatccaacttggcc

SEQ ID NO: 12450 - DNA, 22 bp, Homo sapiens
agttctgtcgccaaggttgtag

SEQ ID NO: 12451 - DNA, 20 bp, Homo sapiens
ctgtgagtggaaacaaaact

SEQ ID NO: 12452 - DNA, 22 bp, Homo sapiens
caacacttaaaagcccaatcag

SEQ ID NO: 12453 - DNA, 22 bp, Homo sapiens
atacacttgcagtgacaataga

SEQ ID NO: 12454 - DNA, 23 bp, Homo sapiens
gacacatattcaattgcagtttc

SEQ ID NO: 12455 - DNA, 22 bp, Homo sapiens
tactaggtgacacaaacactat

SEQ ID NO: 12456 - DNA, 24 bp, Homo sapiens
atctttcagaagcaatgagttatc

SEQ ID NO: 12457 - DNA, 21 bp, Homo sapiens
caaacagcctgccaatcttac

SEQ ID NO: 12458 - DNA, 20 bp, Homo sapiens
agataactcccagagttctc

SEQ ID NO: 12459 - DNA, 18 bp, Homo sapiens
ccatctgcagcgagaggc

SEQ ID NO: 12460 - DNA, 23 bp, Homo sapiens
aaatcctgaaattacaaaattac

SEQ ID NO: 12461 - DNA, 24 bp, Homo sapiens
gaaaggaagcaaaagacatccagg

SEQ ID NO: 12462 - DNA, 21 bp, Homo sapiens
tcacaaagttaccaaggtttg

SEQ ID NO: 12463 - DNA, 19 bp, Homo sapiens
cggaaagtgaagaaggagg

SEQ ID NO: 12464 - DNA, 22 bp, Homo sapiens
tgaatcaaactgtcaacatttc

SEQ ID NO: 12465 - DNA, 20 bp, Homo sapiens
ccttctcttgtcttcttagc

SEQ ID NO: 12466 - DNA, 24 bp, Homo sapiens
tgactcaaatttagaaagctgtac

SEQ ID NO: 12467 - DNA, 22 bp, Homo sapiens
gccacgacagaagatattagac

SEQ ID NO: 12468 - DNA, 20 bp, Homo sapiens
tgtttgtactggtccttacc

SEQ ID NO: 12469 - DNA, 18 bp, Homo sapiens
gcaggacagatgtacaag

SEQ ID NO: 12470 - DNA, 23 bp, Homo sapiens
caagatcacaatgaggataagtg

SEQ ID NO: 12471 - DNA, 20 bp, Homo sapiens
cctctaggaaccactggaat

SEQ ID NO: 12472 - DNA, 22 bp, Homo sapiens
agaaaaagaggacagtggattt

SEQ ID NO: 12473 - DNA, 20 bp, Homo sapiens
caccactgtagcagaggagc

SEQ ID NO: 12474 - DNA, 23 bp, Homo sapiens
agaaaactgactttgaagttcct

SEQ ID NO: 12475 - DNA, 23 bp, Homo sapiens
ggaaaggatcattctgcacagag

SEQ ID NO: 12476 - DNA, 23 bp, Homo sapiens
attctgcctcaccttgttcacag

SEQ ID NO: 12477 - DNA, 16 bp, Homo sapiens
gctcaaaccatgcggc

SEQ ID NO: 12478 - DNA, 21 bp, Homo sapiens
aggtaatgaaatgcaggttgc

SEQ ID NO: 12479 - DNA, 24 bp, Homo sapiens
ggaacttcagttaaaattgacaag

SEQ ID NO: 12480 - DNA, 21 bp, Homo sapiens
atcacaggtagaaactgtctc

SEQ ID NO: 12481 - DNA, 24 bp, Homo sapiens
cagttattaactctttcctttgac

SEQ ID NO: 12482 - DNA, 19 bp, Homo sapiens
agagagtggaactagtgtt

SEQ ID NO: 12483 - DNA, 24 bp, Homo sapiens
catgtaacaagtctacataagaac

SEQ ID NO: 12484 - DNA, 17 bp, Homo sapiens
gccagtgtcatgcttct

SEQ ID NO: 12485 - DNA, 24 bp, Homo sapiens
tgtacaagtggaatgacagagtgg

SEQ ID NO: 12486 - DNA, 18 bp, Homo sapiens
gatggccatttcagagga

SEQ ID NO: 12487 - DNA, 22 bp, Homo sapiens
aacgtcatacttactaaacact

SEQ ID NO: 12488 - DNA, 21 bp, Homo sapiens
acacgaagtgtttttgcattt

SEQ ID NO: 12489 - DNA, 19 bp, Homo sapiens
ttaaactgcagggagaagc

SEQ ID NO: 12490 - DNA, 24 bp, Homo sapiens
gaaaaacttctactttaaaaatga

SEQ ID NO: 12491 - DNA, 18 bp, Homo sapiens
cctcaggatttcccagtc

SEQ ID NO: 12492 - DNA, 23 bp, Homo sapiens
gcgcatttctgtattcttatatt

SEQ ID NO: 12493 - DNA, 21 bp, Homo sapiens
tgaatgtttctgattaaaatc

SEQ ID NO: 12494 - DNA, 20 bp, Homo sapiens
agttttatgtaggtggctac

SEQ ID NO: 12495 - DNA, 21 bp, Homo sapiens
ttgggaaatagaagtatactc

SEQ ID NO: 12496 - DNA, 24 bp, Homo sapiens
cataaaaataaatccattatcgcc

SEQ ID NO: 12497 - DNA, 18 bp, Homo sapiens
ataaaaaatgtccatgcc

SEQ ID NO: 12498 - DNA, 19 bp, Homo sapiens
tcaccctggggaattaatt

SEQ ID NO: 12499 - DNA, 21 bp, Homo sapiens
agagatctggagtgtattcac

SEQ ID NO: 12500 - DNA, 23 bp, Homo sapiens
ggtctttgtaaatttttcatgcc

SEQ ID NO: 12501 - DNA, 18 bp, Homo sapiens
ccaaccagtcttcctggg

SEQ ID NO: 12502 - DNA, 20 bp, Homo sapiens
aacagacaccagcagagaag

SEQ ID NO: 12503 - DNA, 22 bp, Homo sapiens
atcatctctctattcccctagt

SEQ ID NO: 12504 - DNA, 19 bp, Homo sapiens
cccctcaatctgagccttg

SEQ ID NO: 12505 - DNA, 24 bp, Homo sapiens
catcatgggctattcacctctgta

SEQ ID NO: 12506 - DNA, 20 bp, Homo sapiens
cctgctcaatggcagtgtgg

SEQ ID NO: 12507 - DNA, 24 bp, Homo sapiens
tttgtggaagtgacgaaggaatga

SEQ ID NO: 12508 - DNA, 20 bp, Homo sapiens
attccccatgtgtcttctca

SEQ ID NO: 12509 - DNA, 20 bp, Homo sapiens
cagatgaacagtgtggactc

SEQ ID NO: 12510 - DNA, 23 bp, Homo sapiens
aattcagaaccagtcagtaaaat

SEQ ID NO: 12511 - DNA, 19 bp, Homo sapiens
ccagaccccaggttataac

SEQ ID NO: 12512 - DNA, 22 bp, Homo sapiens
atatacctaaatgctgactaga

SEQ ID NO: 12513 - DNA, 22 bp, Homo sapiens
aagtcatcgccattcaaccctg

SEQ ID NO: 12514 - DNA, 19 bp, Homo sapiens
ctggacagaaaggccatgg

SEQ ID NO: 12515 - DNA, 23 bp, Homo sapiens
tgctcaaggcagaaaacaggagg

SEQ ID NO: 12516 - DNA, 18 bp, Homo sapiens
cctgaagtttcagctggc

SEQ ID NO: 12517 - DNA, 24 bp, Homo sapiens
cacagccaattagagtgtccctga

SEQ ID NO: 12518 - DNA, 20 bp, Homo sapiens
ggatacacctcattcctggc

SEQ ID NO: 12519 - DNA, 24 bp, Homo sapiens
tcctagagggttcagttaatctta

SEQ ID NO: 12520 - DNA, 20 bp, Homo sapiens
tggtttgggttttttcacag

SEQ ID NO: 12521 - DNA, 19 bp, Homo sapiens
ctgagtggttgtttgccag

SEQ ID NO: 12522 - DNA, 18 bp, Homo sapiens
atcagcaaaacgtaaccc

SEQ ID NO: 12523 - DNA, 19 bp, Homo sapiens
tgagatccgtgaataagcc

SEQ ID NO: 12524 - DNA, 18 bp, Homo sapiens
gctgaagggcactaaagt

SEQ ID NO: 12525 - DNA, 23 bp, Homo sapiens
tgaaccttggctgagtaatatta

SEQ ID NO: 12526 - DNA, 23 bp, Homo sapiens
tcactaatgggtcttgtctcaac

SEQ ID NO: 12527 - DNA, 20 bp, Homo sapiens
gttccaaaatccggaacaga

SEQ ID NO: 12528 - DNA, 23 bp, Homo sapiens
tgatcagtcaagtgctatccttg

SEQ ID NO: 12529 - DNA, 18 bp, Homo sapiens
gctgtgccagtttgcaag

SEQ ID NO: 12530 - DNA, 24 bp, Homo sapiens
ctgtctgtgctccatgtttaataa

SEQ ID NO: 12531 - DNA, 24 bp, Homo sapiens
attttttcccttctcagtgataat

SEQ ID NO: 12532 - DNA, 20 bp, Homo sapiens
ccatatgggcagaggcagac

SEQ ID NO: 12533 - DNA, 24 bp, Homo sapiens
catgcatgtgtatatatgtgtatg

SEQ ID NO: 12534 - DNA, 20 bp, Homo sapiens
tgggttgttttcacaacttg

SEQ ID NO: 12535 - DNA, 22 bp, Homo sapiens
agggagaaaaaagtcacttatt

SEQ ID NO: 12536 - DNA, 22 bp, Homo sapiens
gacactcacaaaacagattttc

SEQ ID NO: 12537 - DNA, 20 bp, Homo sapiens
tcatctgtgccgcaacaatg

SEQ ID NO: 12538 - DNA, 24 bp, Homo sapiens
gatgcatagaaaaacttgagaatt

SEQ ID NO: 12539 - DNA, 19 bp, Homo sapiens
ttcatcatcgatgaagcac

SEQ ID NO: 12540 - DNA, 21 bp, Homo sapiens
tggcttttgttgttttaagaa

SEQ ID NO: 12541 - DNA, 23 bp, Homo sapiens
caggtcctgtttatgggttcagg

SEQ ID NO: 12542 - DNA, 17 bp, Homo sapiens
tgacctgatgcaggtgc

SEQ ID NO: 12543 - DNA, 18 bp, Homo sapiens
gaatcaatgttccttggc

SEQ ID NO: 12544 - DNA, 22 bp, Homo sapiens
tggcagttctcaatattctttc

SEQ ID NO: 12545 - DNA, 20 bp, Homo sapiens
ccacataatctgacaacaac

SEQ ID NO: 12546 - DNA, 21 bp, Homo sapiens
ttgaaggtctagaatgcagcc

SEQ ID NO: 12547 - DNA, 24 bp, Homo sapiens
cctcttttacacagaaaaacacat

SEQ ID NO: 12548 - DNA, 23 bp, Homo sapiens
tgaacatttgcaggaatatggcc

SEQ ID NO: 12549 - DNA, 19 bp, Homo sapiens
acagtctatctccccacct

SEQ ID NO: 12550 - DNA, 21 bp, Homo sapiens
agagatttcccatgcctctca

SEQ ID NO: 12551 - DNA, 22 bp, Homo sapiens
tgaattttctggtgctttgttg

SEQ ID NO: 12552 - DNA, 23 bp, Homo sapiens
gtttgtatgattgaaatgactgc

SEQ ID NO: 12553 - DNA, 23 bp, Homo sapiens
atgattactgcttagtaacataa

SEQ ID NO: 12554 - DNA, 20 bp, Homo sapiens
aatggcctcttctgttttac

SEQ ID NO: 12555 - DNA, 22 bp, Homo sapiens
tggaactggatatttgcatacc

SEQ ID NO: 12556 - DNA, 20 bp, Homo sapiens
tgaagaagtacttactatcc

SEQ ID NO: 12557 - DNA, 20 bp, Homo sapiens
gtactggaggttttccatct

SEQ ID NO: 12558 - DNA, 16 bp, Homo sapiens
acttggctgggtccat

SEQ ID NO: 12559 - DNA, 22 bp, Homo sapiens
acccctatcacaatacggtaag

SEQ ID NO: 12560 - DNA, 18 bp, Homo sapiens
cttgaacccgggaggcgg

SEQ ID NO: 12561 - DNA, 24 bp, Homo sapiens
ggtgtggaaattctcaaaatattt

SEQ ID NO: 12562 - DNA, 20 bp, Homo sapiens
ctgggtgacagagcaagact

SEQ ID NO: 12563 - DNA, 21 bp, Homo sapiens
tgtggaaagcagtttcttcat

SEQ ID NO: 12564 - DNA, 20 bp, Homo sapiens
gaactaccgtggagtacagt

SEQ ID NO: 12565 - DNA, 30 bp, Homo sapiens
ataaaatataaatctacaataattactaat

SEQ ID NO: 12566 - DNA, 24 bp, Homo sapiens
taatgctgtaattagcagaaacag

SEQ ID NO: 12567 - DNA, 24 bp, Homo sapiens
cccctaaatcattagtctttgatg

SEQ ID NO: 12568 - DNA, 19 bp, Homo sapiens
tggccttccttccacaaga

SEQ ID NO: 12569 - DNA, 21 bp, Homo sapiens
tgtacgtttctaatatggtac

SEQ ID NO: 12570 - DNA, 21 bp, Homo sapiens
acaaacagtttaaatggaact

SEQ ID NO: 12571 - DNA, 20 bp, Homo sapiens
tggtaatgcttcatgcactg

SEQ ID NO: 12572 - DNA, 20 bp, Homo sapiens
tgaagtttgtcctggagaag

SEQ ID NO: 12573 - DNA, 22 bp, Homo sapiens
tgattcaatagatcaacgtttg

SEQ ID NO: 12574 - DNA, 26 bp, Homo sapiens
tttcttttttagatgcaggtttattc

SEQ ID NO: 12575 - DNA, 25 bp, Homo sapiens
aatactcactgtaaagaatagttcc

SEQ ID NO: 12576 - DNA, 24 bp, Homo sapiens
taagtttttatctacttgagtagc

SEQ ID NO: 12577 - DNA, 20 bp, Homo sapiens
gttctgttatgttccttctc

SEQ ID NO: 12578 - DNA, 22 bp, Homo sapiens
tggacctaacattttaaatact

SEQ ID NO: 12579 - DNA, 21 bp, Homo sapiens
ggaattcccattgaaagatgg

SEQ ID NO: 12580 - DNA, 16 bp, Homo sapiens
catttcactggccgct

SEQ ID NO: 12581 - DNA, 23 bp, Homo sapiens
aattatacagctgtttcttgttt

SEQ ID NO: 12582 - DNA, 16 bp, Homo sapiens
cacatgccatgccatc

SEQ ID NO: 12583 - DNA, 24 bp, Homo sapiens
atttcaactcctgtccattctctg

SEQ ID NO: 12584 - DNA, 20 bp, Homo sapiens
acttctgtcagcccctctgt

SEQ ID NO: 12585 - DNA, 22 bp, Homo sapiens
gattacctttttcacagaagcg

SEQ ID NO: 12586 - DNA, 18 bp, Homo sapiens
ccaacagcctcctttgtt

SEQ ID NO: 12587 - DNA, 19 bp, Homo sapiens
ccactggagaggaagatgg

SEQ ID NO: 12588 - DNA, 24 bp, Homo sapiens
gcttttacttatattttgttttct

SEQ ID NO: 12589 - DNA, 15 bp, Homo sapiens
gcacacagagggtgc

SEQ ID NO: 12590 - DNA, 23 bp, Homo sapiens
gtattggtttcattttctcttat

SEQ ID NO: 12591 - DNA, 22 bp, Homo sapiens
ttgtgtcacatcagaagcatca

SEQ ID NO: 12592 - DNA, 22 bp, Homo sapiens
tctcataattgtgaaacaaaca

SEQ ID NO: 12593 - DNA, 22 bp, Homo sapiens
ctatcacattaacaattgcagg

SEQ ID NO: 12594 - DNA, 23 bp, Homo sapiens
gagtgaagtagaacgtaggaatg

SEQ ID NO: 12595 - DNA, 23 bp, Homo sapiens
tggctgcatagaagttatagaaa

SEQ ID NO: 12596 - DNA, 22 bp, Homo sapiens
gattatttcaattggaaatgat

SEQ ID NO: 12597 - DNA, 21 bp, Homo sapiens
cactactgctattttacctgc

SEQ ID NO: 12598 - DNA, 16 bp, Homo sapiens
tgaccagtttgaagca

SEQ ID NO: 12599 - DNA, 21 bp, Homo sapiens
tggaatgaaagatctccagtt

SEQ ID NO: 12600 - DNA, 24 bp, Homo sapiens
tgaaaatatttgaattactgtact

SEQ ID NO: 12601 - DNA, 18 bp, Homo sapiens
gactggtacaggcatctg

SEQ ID NO: 12602 - DNA, 22 bp, Homo sapiens
agtcactcaaaaacttttttga

SEQ ID NO: 12603 - DNA, 17 bp, Homo sapiens
tactcggaaaacccctg

SEQ ID NO: 12604 - DNA, 26 bp, Homo sapiens
aaatatttctaaagtttttctttttc

SEQ ID NO: 12605 - DNA, 18 bp, Homo sapiens
atgtaacgctgagctgac

SEQ ID NO: 12606 - DNA, 30 bp, Homo sapiens
ttaatattttaaaacatctatagaaatacc

SEQ ID NO: 12607 - DNA, 24 bp, Homo sapiens
tgtttatatgacttatactaaaac

SEQ ID NO: 12608 - DNA, 20 bp, Homo sapiens
accaatgaagacagatcctg

SEQ ID NO: 12609 - DNA, 26 bp, Homo sapiens
aaataatctatttacttaaattattc

SEQ ID NO: 12610 - DNA, 21 bp, Homo sapiens
tttgtgtattcctccctaaaa

SEQ ID NO: 12611 - DNA, 20 bp, Homo sapiens
agcattaaggattctaattt

SEQ ID NO: 12612 - DNA, 23 bp, Homo sapiens
tatatagaaaagcttgacaaaca

SEQ ID NO: 12613 - DNA, 23 bp, Homo sapiens
cctggtgaagcaaaatttaaaag

SEQ ID NO: 12614 - DNA, 23 bp, Homo sapiens
acctcaattttgaaatgacaagt

SEQ ID NO: 12615 - DNA, 22 bp, Homo sapiens
ctgaaaaactgtttgaggacaa

SEQ ID NO: 12616 - DNA, 23 bp, Homo sapiens
ttaactggaaaagaaataattat

SEQ ID NO: 12617 - DNA, 23 bp, Homo sapiens
caaagtgatgtaaaatatattga

SEQ ID NO: 12618 - DNA, 22 bp, Homo sapiens
ttgtccactctaacagtagtat

SEQ ID NO: 12619 - DNA, 23 bp, Homo sapiens
cagttgtaaaccttcagttatca

SEQ ID NO: 12620 - DNA, 26 bp, Homo sapiens
attataaaagtagaggaagagacatc

SEQ ID NO: 12621 - DNA, 19 bp, Homo sapiens
gctgtatgtcaagcaagac

SEQ ID NO: 12622 - DNA, 24 bp, Homo sapiens
ttaaattttattttgaaaataacc

SEQ ID NO: 12623 - DNA, 18 bp, Homo sapiens
tccacaaaataacatctc

SEQ ID NO: 12624 - DNA, 27 bp, Homo sapiens
tttaaaaaattaaatgaactgaataac

SEQ ID NO: 12625 - DNA, 21 bp, Homo sapiens
ccacagatttcagttgtgttc

SEQ ID NO: 12626 - DNA, 27 bp, Homo sapiens
aaaaaatccatctactaaatttgagtc

SEQ ID NO: 12627 - DNA, 21 bp, Homo sapiens
aatgtgaaacctaggtattga

SEQ ID NO: 12628 - DNA, 19 bp, Homo sapiens
aggtctgaaattctaggga

SEQ ID NO: 12629 - DNA, 23 bp, Homo sapiens
cctgggcttgaaagaggcaggaa

SEQ ID NO: 12630 - DNA, 19 bp, Homo sapiens
aagaatctccataataacg

SEQ ID NO: 12631 - DNA, 19 bp, Homo sapiens
cggctgatgatttctggtg

SEQ ID NO: 12632 - DNA, 22 bp, Homo sapiens
aggtgccttctcaattgaactg

SEQ ID NO: 12633 - DNA, 20 bp, Homo sapiens
gcatcttcccttcactagat

SEQ ID NO: 12634 - DNA, 20 bp, Homo sapiens
gtgaccatgacaggctcttt

SEQ ID NO: 12635 - DNA, 20 bp, Homo sapiens
agaatggtccaaatgggaac

SEQ ID NO: 12636 - DNA, 22 bp, Homo sapiens
aacagaaactgagaaactcacc

SEQ ID NO: 12637 - DNA, 21 bp, Homo sapiens
attggccatattttacagatt

SEQ ID NO: 12638 - DNA, 22 bp, Homo sapiens
agtgaagacaaagtaagagatc

SEQ ID NO: 12639 - DNA, 21 bp, Homo sapiens
tttcagcaactccagcacttt

SEQ ID NO: 12640 - DNA, 23 bp, Homo sapiens
ttcctgatattgcacactaggct

SEQ ID NO: 12641 - DNA, 19 bp, Homo sapiens
cattgacaggctcagtgcc

SEQ ID NO: 12642 - DNA, 22 bp, Homo sapiens
ttaagagaggtcatataatctg

SEQ ID NO: 12643 - DNA, 24 bp, Homo sapiens
atccggatgttactttaaagacat

SEQ ID NO: 12644 - DNA, 20 bp, Homo sapiens
ggaggaagacgtctgtattg

SEQ ID NO: 12645 - DNA, 19 bp, Homo sapiens
caaacttcacccaagtgat

SEQ ID NO: 12646 - DNA, 21 bp, Homo sapiens
gtgacttctgaaaaatcaggc

SEQ ID NO: 12647 - DNA, 22 bp, Homo sapiens
ggtactaaatcaagagagctta

SEQ ID NO: 12648 - DNA, 23 bp, Homo sapiens
gaagtcatttgcatgtgtaattt

SEQ ID NO: 12649 - DNA, 22 bp, Homo sapiens
tcagaaaacattttaaaactat

SEQ ID NO: 12650 - DNA, 19 bp, Homo sapiens
actcaaaatccagagaact

SEQ ID NO: 12651 - DNA, 22 bp, Homo sapiens
tctcttcagacttgatgaattc

SEQ ID NO: 12652 - DNA, 22 bp, Homo sapiens
cctttacttttttccatgtcca

SEQ ID NO: 12653 - DNA, 24 bp, Homo sapiens
gtaatttggatgttaatttatgtt

SEQ ID NO: 12654 - DNA, 20 bp, Homo sapiens
tgccatattgtcttattttc

SEQ ID NO: 12655 - DNA, 21 bp, Homo sapiens
agagtgcaaaaagaacaattt

SEQ ID NO: 12656 - DNA, 21 bp, Homo sapiens
gtagtcatttttgaagtcaaa

SEQ ID NO: 12657 - DNA, 17 bp, Homo sapiens
aacaccatcagtggcat

SEQ ID NO: 12658 - DNA, 22 bp, Homo sapiens
ggacaatggataaacaagtctt

SEQ ID NO: 12659 - DNA, 21 bp, Homo sapiens
cagctggtatgcactaatggg

SEQ ID NO: 12660 - DNA, 24 bp, Homo sapiens
taatggattcttccaaggatgagg

SEQ ID NO: 12661 - DNA, 19 bp, Homo sapiens
agcaaacagtcccactttt

SEQ ID NO: 12662 - DNA, 22 bp, Homo sapiens
aaagatggcacttctgtgaatg

SEQ ID NO: 12663 - DNA, 20 bp, Homo sapiens
caaacatgtgcaacatgttc

SEQ ID NO: 12664 - DNA, 20 bp, Homo sapiens
agaagtgatagtttgagctc

SEQ ID NO: 12665 - DNA, 21 bp, Homo sapiens
agagactcacaaacatcaaat

SEQ ID NO: 12666 - DNA, 24 bp, Homo sapiens
ttcatccagaatgtctcataaaag

SEQ ID NO: 12667 - DNA, 18 bp, Homo sapiens
gtacaaaagccttcaatc

SEQ ID NO: 12668 - DNA, 21 bp, Homo sapiens
ttcacgagaggattttatttc

SEQ ID NO: 12669 - DNA, 22 bp, Homo sapiens
ttcctgctaaggtaattatatc

SEQ ID NO: 12670 - DNA, 24 bp, Homo sapiens
tcttaaagaatcagcagcctgtga

SEQ ID NO: 12671 - DNA, 22 bp, Homo sapiens
tctttaatttcaagaagagagc

SEQ ID NO: 12672 - DNA, 21 bp, Homo sapiens
gcctgatattcactgggattg

SEQ ID NO: 12673 - DNA, 16 bp, Homo sapiens
gtgcaactccagttgt

SEQ ID NO: 12674 - DNA, 24 bp, Homo sapiens
ttaagatggttacctgtttagata

SEQ ID NO: 12675 - DNA, 17 bp, Homo sapiens
gagctaaacaggcagtc

SEQ ID NO: 12676 - DNA, 20 bp, Homo sapiens
gggctgagcaatctccagtg

SEQ ID NO: 12677 - DNA, 21 bp, Homo sapiens
gactgttgctttatctgctac

SEQ ID NO: 12678 - DNA, 16 bp, Homo sapiens
tcctcttgagcccccc

SEQ ID NO: 12679 - DNA, 22 bp, Homo sapiens
tcatgtcttccttaatgtcaga

SEQ ID NO: 12680 - DNA, 24 bp, Homo sapiens
caggaatccacgggagagtaatga

SEQ ID NO: 12681 - DNA, 18 bp, Homo sapiens
cagccacactaggtttct

SEQ ID NO: 12682 - DNA, 21 bp, Homo sapiens
taattactgaagtcgttgggg

SEQ ID NO: 12683 - DNA, 22 bp, Homo sapiens
cgtgacccagcacaaattgtcc

SEQ ID NO: 12684 - DNA, 23 bp, Homo sapiens
agattgtgtaggaaaaataaaat

SEQ ID NO: 12685 - DNA, 20 bp, Homo sapiens
agcaaaacacagtcttcttt

SEQ ID NO: 12686 - DNA, 23 bp, Homo sapiens
ctcctatcaggaaaaaagaaacc

SEQ ID NO: 12687 - DNA, 17 bp, Homo sapiens
acccttggaaagctact

SEQ ID NO: 12688 - DNA, 24 bp, Homo sapiens
tgtgataccgatgttttgtcctgg

SEQ ID NO: 12689 - DNA, 18 bp, Homo sapiens
gacaggcattgtcaagca

SEQ ID NO: 12690 - DNA, 20 bp, Homo sapiens
cgagaagaggaaacatctgc

SEQ ID NO: 12691 - DNA, 21 bp, Homo sapiens
tggttcgtttctgattcattt

SEQ ID NO: 12692 - DNA, 21 bp, Homo sapiens
tcagttcttggagtaagtagc

SEQ ID NO: 12693 - DNA, 23 bp, Homo sapiens
acatataatggatgtaaggtgcc

SEQ ID NO: 12694 - DNA, 19 bp, Homo sapiens
ccagtggttgggagaatgt

SEQ ID NO: 12695 - DNA, 22 bp, Homo sapiens
atcattaaactcctcatgtact

SEQ ID NO: 12696 - DNA, 19 bp, Homo sapiens
tggacacttacccagttga

SEQ ID NO: 12697 - DNA, 18 bp, Homo sapiens
atgcttaattttacaccc

SEQ ID NO: 12698 - DNA, 18 bp, Homo sapiens
agactttggtcagcagct

SEQ ID NO: 12699 - DNA, 30 bp, Homo sapiens
attttaataatgcagaaaatatgcttttac

SEQ ID NO: 12700 - DNA, 21 bp, Homo sapiens
cctgtttaactcccatctttc

SEQ ID NO: 12701 - DNA, 21 bp, Homo sapiens
cccacttctacttaccttgat

SEQ ID NO: 12702 - DNA, 16 bp, Homo sapiens
cagacctgctccattg

SEQ ID NO: 12703 - DNA, 22 bp, Homo sapiens
ctttatagatggaaagctgctg

SEQ ID NO: 12704 - DNA, 24 bp, Homo sapiens
acaaactttacaatttctcttagg

SEQ ID NO: 12705 - DNA, 20 bp, Homo sapiens
tgtgtggaaatgggatctgt

SEQ ID NO: 12706 - DNA, 24 bp, Homo sapiens
tcaagtaaaatattttatttgagc

SEQ ID NO: 12707 - DNA, 20 bp, Homo sapiens
accacaaagaagcccaatgg

SEQ ID NO: 12708 - DNA, 18 bp, Homo sapiens
ttatgcacacctggattt

SEQ ID NO: 12709 - DNA, 23 bp, Homo sapiens
aagtgtagcgtgcacagagaagg

SEQ ID NO: 12710 - DNA, 19 bp, Homo sapiens
gcattcccaactcatgtgt

SEQ ID NO: 12711 - DNA, 23 bp, Homo sapiens
tcaccatataattttctactatt

SEQ ID NO: 12712 - DNA, 23 bp, Homo sapiens
atatctgctttgtaattttgttg

SEQ ID NO: 12713 - DNA, 21 bp, Homo sapiens
caaccaccagtaatctttacc

SEQ ID NO: 12714 - DNA, 24 bp, Homo sapiens
ttcaaatagtaaaagccaataaat

SEQ ID NO: 12715 - DNA, 20 bp, Homo sapiens
tgcagagttcatgaacacat

SEQ ID NO: 12716 - DNA, 19 bp, Homo sapiens
tcatgaagatacactgagg

SEQ ID NO: 12717 - DNA, 20 bp, Homo sapiens
ggtgtccagaccatcctgtt

SEQ ID NO: 12718 - DNA, 20 bp, Homo sapiens
tggatatgtttgcaaatgcc

SEQ ID NO: 12719 - DNA, 22 bp, Homo sapiens
aaacttgattagtagtcaacaa

SEQ ID NO: 12720 - DNA, 27 bp, Homo sapiens
tgaaattaatataaatgaatgctcttc

SEQ ID NO: 12721 - DNA, 20 bp, Homo sapiens
acatgtccatatacatttac

SEQ ID NO: 12722 - DNA, 27 bp, Homo sapiens
atacaaatatcgttttcattttttttc

SEQ ID NO: 12723 - DNA, 22 bp, Homo sapiens
taaaataattacctggttggca

SEQ ID NO: 12724 - DNA, 19 bp, Homo sapiens
tgatggaatcccaagatga

SEQ ID NO: 12725 - DNA, 23 bp, Homo sapiens
cagtctgcaccatgtagacatgg

SEQ ID NO: 12726 - DNA, 16 bp, Homo sapiens
tcaccccaaggaaggc

SEQ ID NO: 12727 - DNA, 24 bp, Homo sapiens
tgaccagaaaatccaggaagacat

SEQ ID NO: 12728 - DNA, 17 bp, Homo sapiens
tgtgttgatgggcctgg

SEQ ID NO: 12729 - DNA, 28 bp, Homo sapiens
tgtgcttatatatatataaggtaaaatc

SEQ ID NO: 12730 - DNA, 21 bp, Homo sapiens
agcattgataattgtgctgag

SEQ ID NO: 12731 - DNA, 23 bp, Homo sapiens
actagtgggatgtttataagctc

SEQ ID NO: 12732 - DNA, 22 bp, Homo sapiens
aagtcagcacatggatttactt

SEQ ID NO: 12733 - DNA, 22 bp, Homo sapiens
tgacctgcagtcaaaagtatgt

SEQ ID NO: 12734 - DNA, 22 bp, Homo sapiens
atttcttaatctaggactgcac

SEQ ID NO: 12735 - DNA, 22 bp, Homo sapiens
gatgactgaattaagttcaggc

SEQ ID NO: 12736 - DNA, 29 bp, Homo sapiens
ttatgtttaaataaaaatataattatatt

SEQ ID NO: 12737 - DNA, 20 bp, Homo sapiens
tgtatccacgtgggcaaatg

SEQ ID NO: 12738 - DNA, 19 bp, Homo sapiens
aacagaggaaggaaatgtc

SEQ ID NO: 12739 - DNA, 22 bp, Homo sapiens
ccttcattcatacaagggattg

SEQ ID NO: 12740 - DNA, 17 bp, Homo sapiens
ggactagcacacaatgt

SEQ ID NO: 12741 - DNA, 25 bp, Homo sapiens
aagatgagagaacagttaaatcatc

SEQ ID NO: 12742 - DNA, 16 bp, Homo sapiens
ctgtgtttcaggtgca

SEQ ID NO: 12743 - DNA, 26 bp, Homo sapiens
gcaagcaatttgatttttcttttaaa

SEQ ID NO: 12744 - DNA, 19 bp, Homo sapiens
tggtgaaactcccttgaag

SEQ ID NO: 12745 - DNA, 23 bp, Homo sapiens
agacttacattaattttgatctt

SEQ ID NO: 12746 - DNA, 18 bp, Homo sapiens
ctctgctttgtattgctc

SEQ ID NO: 12747 - DNA, 21 bp, Homo sapiens
cattaataagttctgtgcacc

SEQ ID NO: 12748 - DNA, 21 bp, Homo sapiens
ttcaaatccttgtctacatgg

SEQ ID NO: 12749 - DNA, 24 bp, Homo sapiens
gtcatcttaaatgtacttagctct

SEQ ID NO: 12750 - DNA, 19 bp, Homo sapiens
tgactgcaagagtgggttt

SEQ ID NO: 12751 - DNA, 23 bp, Homo sapiens
caactttcccttgatgttaagtc

SEQ ID NO: 12752 - DNA, 17 bp, Homo sapiens
tgcctatcagagccctg

SEQ ID NO: 12753 - DNA, 21 bp, Homo sapiens
taaaaaaaatagctaccttcc

SEQ ID NO: 12754 - DNA, 17 bp, Homo sapiens
tttgccttgtctgttcc

SEQ ID NO: 12755 - DNA, 20 bp, Homo sapiens
tttgtttcacagtgtgttcc

SEQ ID NO: 12756 - DNA, 20 bp, Homo sapiens
ttcttggtgatgtttaccat

SEQ ID NO: 12757 - DNA, 22 bp, Homo sapiens
catcgatacaaactccatcatg

SEQ ID NO: 12758 - DNA, 23 bp, Homo sapiens
ccttgaaatatattttcttttgc

SEQ ID NO: 12759 - DNA, 16 bp, Homo sapiens
gcctctgtgcccctgg

SEQ ID NO: 12760 - DNA, 22 bp, Homo sapiens
aagagacaaattatctcttgac

SEQ ID NO: 12761 - DNA, 22 bp, Homo sapiens
tgtaaaatctcaccttgtctag

SEQ ID NO: 12762 - DNA, 23 bp, Homo sapiens
tggagtataaatatgaggtttct

SEQ ID NO: 12763 - DNA, 25 bp, Homo sapiens
tccagatttttttgtaattgtgaac

SEQ ID NO: 12764 - DNA, 22 bp, Homo sapiens
atgggacagatatggatttacc

SEQ ID NO: 12765 - DNA, 27 bp, Homo sapiens
atgaatcatatataataaatgattatc

SEQ ID NO: 12766 - DNA, 24 bp, Homo sapiens
agacacaattttcttcatctagac

SEQ ID NO: 12767 - DNA, 26 bp, Homo sapiens
aatgaaatacatatattatttatttc

SEQ ID NO: 12768 - DNA, 18 bp, Homo sapiens
gggcccatggtactcagg

SEQ ID NO: 12769 - DNA, 20 bp, Homo sapiens
ggatctgacaaacaggtgag

SEQ ID NO: 12770 - DNA, 19 bp, Homo sapiens
tggatgggacaaatgagga

SEQ ID NO: 12771 - DNA, 27 bp, Homo sapiens
tctgtgtgaaattgaaattaatgaatg

SEQ ID NO: 12772 - DNA, 22 bp, Homo sapiens
cagctgccttagttacataatg

SEQ ID NO: 12773 - DNA, 23 bp, Homo sapiens
taatggagttactaaattttttg

SEQ ID NO: 12774 - DNA, 29 bp, Homo sapiens
atcaaataattaatttaataaaaagtagc

SEQ ID NO: 12775 - DNA, 19 bp, Homo sapiens
cttgccatgctacaattag

SEQ ID NO: 12776 - DNA, 20 bp, Homo sapiens
ttgcaaggttcagaggaaca

SEQ ID NO: 12777 - DNA, 21 bp, Homo sapiens
tgtgtctagatgtatacaggt

SEQ ID NO: 12778 - DNA, 19 bp, Homo sapiens
acccaggtctgcaaataca

SEQ ID NO: 12779 - DNA, 19 bp, Homo sapiens
ggtcaacaatttcaggtac

SEQ ID NO: 12780 - DNA, 22 bp, Homo sapiens
gtataaaatcaatgcttcaact

SEQ ID NO: 12781 - DNA, 18 bp, Homo sapiens
attgatgtgaaagactgc

SEQ ID NO: 12782 - DNA, 24 bp, Homo sapiens
tgttgcttaattcaccaattaaaa

SEQ ID NO: 12783 - DNA, 19 bp, Homo sapiens
acaaggattgctcatccat

SEQ ID NO: 12784 - DNA, 22 bp, Homo sapiens
actttttaagttttctgtacct

SEQ ID NO: 12785 - DNA, 21 bp, Homo sapiens
tttaacctccattatgagtgt

SEQ ID NO: 12786 - DNA, 19 bp, Homo sapiens
ggcaggaaaggaagaggca

SEQ ID NO: 12787 - DNA, 21 bp, Homo sapiens
gcacacattatgtgaaatgga

SEQ ID NO: 12788 - DNA, 20 bp, Homo sapiens
gtagacgcaaatcagcattg

SEQ ID NO: 12789 - DNA, 23 bp, Homo sapiens
ttagatagtcccctacccacaat

SEQ ID NO: 12790 - DNA, 19 bp, Homo sapiens
ttgtgacctacttcataac

SEQ ID NO: 12791 - DNA, 22 bp, Homo sapiens
tcccataggcacaataaataca

SEQ ID NO: 12792 - DNA, 22 bp, Homo sapiens
ctggacaatttgtatgtctgtg

SEQ ID NO: 12793 - DNA, 18 bp, Homo sapiens
agctcttaccttctctac

SEQ ID NO: 12794 - DNA, 17 bp, Homo sapiens
gcgactctgatccatgc

SEQ ID NO: 12795 - DNA, 22 bp, Homo sapiens
atgttgagttgtttctgcaagg

SEQ ID NO: 12796 - DNA, 24 bp, Homo sapiens
ttaatattttatttcagatgtgag

SEQ ID NO: 12797 - DNA, 20 bp, Homo sapiens
tgtccagtataaaggggtgg

SEQ ID NO: 12798 - DNA, 23 bp, Homo sapiens
agggagtaattaaaaatacaaaa

SEQ ID NO: 12799 - DNA, 21 bp, Homo sapiens
gacaaagacctccattcatgc

SEQ ID NO: 12800 - DNA, 21 bp, Homo sapiens
tgtattatttattagtcctgt

SEQ ID NO: 12801 - DNA, 20 bp, Homo sapiens
ccagtccatccagatgtaca

SEQ ID NO: 12802 - DNA, 18 bp, Homo sapiens
ccacctgtactgaccttt

SEQ ID NO: 12803 - DNA, 20 bp, Homo sapiens
ggctcttcattgctggatgg

SEQ ID NO: 12804 - DNA, 23 bp, Homo sapiens
ggaaggaaatttttgtgaacaag

SEQ ID NO: 12805 - DNA, 24 bp, Homo sapiens
gtctggatgtatcccaaggacact

SEQ ID NO: 12806 - DNA, 24 bp, Homo sapiens
aatagcctaaaaatatataatttc

SEQ ID NO: 12807 - DNA, 21 bp, Homo sapiens
caccgatagcttttgtaaagg

SEQ ID NO: 12808 - DNA, 21 bp, Homo sapiens
aattgacagagatatcaaaat

SEQ ID NO: 12809 - DNA, 23 bp, Homo sapiens
ttacactcattggattcttgttc

SEQ ID NO: 12810 - DNA, 20 bp, Homo sapiens
gtaaaagtcatttgggggga

SEQ ID NO: 12811 - DNA, 21 bp, Homo sapiens
agttgcttgagtttctgtttt

SEQ ID NO: 12812 - DNA, 19 bp, Homo sapiens
acaggacattgatgactgc

SEQ ID NO: 12813 - DNA, 24 bp, Homo sapiens
taacctaacacacaggcaaaaact

SEQ ID NO: 12814 - DNA, 19 bp, Homo sapiens
ccagtggttgatggctttt

SEQ ID NO: 12815 - DNA, 24 bp, Homo sapiens
acatttaggtatataaaaagccag

SEQ ID NO: 12816 - DNA, 24 bp, Homo sapiens
tttagactaattataattacctgt

SEQ ID NO: 12817 - DNA, 19 bp, Homo sapiens
acaggcattcaggatgcag

SEQ ID NO: 12818 - DNA, 24 bp, Homo sapiens
tcgattaaatataataattcttac

SEQ ID NO: 12819 - DNA, 19 bp, Homo sapiens
cctggattgcataagcagg

SEQ ID NO: 12820 - DNA, 21 bp, Homo sapiens
aggaataattggttggtcact

SEQ ID NO: 12821 - DNA, 19 bp, Homo sapiens
catccctgcaaaaatggag

SEQ ID NO: 12822 - DNA, 21 bp, Homo sapiens
tgttggaagactgaaatgagt

SEQ ID NO: 12823 - DNA, 19 bp, Homo sapiens
ctattttccaaaggtacgc

SEQ ID NO: 12824 - DNA, 20 bp, Homo sapiens
tgcttttccttatcccttgg

SEQ ID NO: 12825 - DNA, 24 bp, Homo sapiens
ggcttgtgcaaatttaagaattac

SEQ ID NO: 12826 - DNA, 21 bp, Homo sapiens
aattaccaggttggtcaatgc

SEQ ID NO: 12827 - DNA, 22 bp, Homo sapiens
atatgtggcattcttatctaat

SEQ ID NO: 12828 - DNA, 19 bp, Homo sapiens
tcaatttcacattgcgtac

SEQ ID NO: 12829 - DNA, 22 bp, Homo sapiens
ccgcaagtgtgtcccaggattt

SEQ ID NO: 12830 - DNA, 20 bp, Homo sapiens
actttgccaaataagaaatg

SEQ ID NO: 12831 - DNA, 20 bp, Homo sapiens
actgcaaatctgcgtcctgc

SEQ ID NO: 12832 - DNA, 30 bp, Homo sapiens
atttgagatatatcaaataaatatattaac

SEQ ID NO: 12833 - DNA, 17 bp, Homo sapiens
tgtagcggtctgcaaag

SEQ ID NO: 12834 - DNA, 24 bp, Homo sapiens
gaaaaaaaaaacttgcctttaaat

SEQ ID NO: 12835 - DNA, 19 bp, Homo sapiens
ttgcttagggaaccacagt

SEQ ID NO: 12836 - DNA, 21 bp, Homo sapiens
tgtgtactagttgttccattt

SEQ ID NO: 12837 - DNA, 17 bp, Homo sapiens
cagatgcagctgttctc

SEQ ID NO: 12838 - DNA, 24 bp, Homo sapiens
acagatgttcctttcatatctttg

SEQ ID NO: 12839 - DNA, 25 bp, Homo sapiens
tgtgatttaaatacttaaatatatc

SEQ ID NO: 12840 - DNA, 16 bp, Homo sapiens
cagaggccatgcactg

SEQ ID NO: 12841 - DNA, 20 bp, Homo sapiens
gcaccccacaactatcttca

SEQ ID NO: 12842 - DNA, 20 bp, Homo sapiens
gccaatgtaactaagagaac

SEQ ID NO: 12843 - DNA, 17 bp, Homo sapiens
agcatgaccaggtggga

SEQ ID NO: 12844 - DNA, 18 bp, Homo sapiens
agtgttgtgagattctgt

SEQ ID NO: 12845 - DNA, 19 bp, Homo sapiens
agaatcctcaacacggtga

SEQ ID NO: 12846 - DNA, 25 bp, Homo sapiens
catgcattttcttctttatttattc

SEQ ID NO: 12847 - DNA, 25 bp, Homo sapiens
aatgcatagacttaaatattaggcc

SEQ ID NO: 12848 - DNA, 24 bp, Homo sapiens
ctaaatcaaacttatattcttacg

SEQ ID NO: 12849 - DNA, 23 bp, Homo sapiens
ccactaagatcaatgaaaatgag

SEQ ID NO: 12850 - DNA, 22 bp, Homo sapiens
tatgttgctgaatttggtgtgg

SEQ ID NO: 12851 - DNA, 18 bp, Homo sapiens
agacccaggtatttatgt

SEQ ID NO: 12852 - DNA, 23 bp, Homo sapiens
actatatatgtatatgtaagtgt

SEQ ID NO: 12853 - DNA, 24 bp, Homo sapiens
atctggaaaatacaactgatgatc

SEQ ID NO: 12854 - DNA, 24 bp, Homo sapiens
caaaaacattgttaccatgaaaca

SEQ ID NO: 12855 - DNA, 21 bp, Homo sapiens
agaagacagtcaggaatatcg

SEQ ID NO: 12856 - DNA, 23 bp, Homo sapiens
tgtgatattatctgctcaaatga

SEQ ID NO: 12857 - DNA, 20 bp, Homo sapiens
tttttacttctttcgttgct

SEQ ID NO: 12858 - DNA, 22 bp, Homo sapiens
acagcttcatgttgacactcat

SEQ ID NO: 12859 - DNA, 16 bp, Homo sapiens
tgatctctcaggtcac

SEQ ID NO: 12860 - DNA, 21 bp, Homo sapiens
gcccatctgagaaaacataga

SEQ ID NO: 12861 - DNA, 22 bp, Homo sapiens
tccaatagttaccttctgtttc

SEQ ID NO: 12862 - DNA, 24 bp, Homo sapiens
actgcatccatttgcacaaatcta

SEQ ID NO: 12863 - DNA, 22 bp, Homo sapiens
tgagaatttgtttacgaagtta

SEQ ID NO: 12864 - DNA, 19 bp, Homo sapiens
tgcaacctatgtgaacgat

SEQ ID NO: 12865 - DNA, 24 bp, Homo sapiens
tctgtaacctaaacatttctaact

SEQ ID NO: 12866 - DNA, 18 bp, Homo sapiens
gaaaagtgccaaggggtt

SEQ ID NO: 12867 - DNA, 27 bp, Homo sapiens
agaaaaatgaaaagcaactacataaaa

SEQ ID NO: 12868 - DNA, 24 bp, Homo sapiens
attctgaattcaagtttgtaagag

SEQ ID NO: 12869 - DNA, 24 bp, Homo sapiens
gaagaattattatcttcaggatcg

SEQ ID NO: 12870 - DNA, 22 bp, Homo sapiens
ggcagatgttgtcaaatttatc

SEQ ID NO: 12871 - DNA, 23 bp, Homo sapiens
cagccagaaagaaataggcatca

SEQ ID NO: 12872 - DNA, 20 bp, Homo sapiens
tgggctttgaggtcttcttc

SEQ ID NO: 12873 - DNA, 16 bp, Homo sapiens
tgtgtggcaattggga

SEQ ID NO: 12874 - DNA, 29 bp, Homo sapiens
ataagagtattaattttatttttagttta

SEQ ID NO: 12875 - DNA, 18 bp, Homo sapiens
acctctgctactgtggag

SEQ ID NO: 12876 - DNA, 21 bp, Homo sapiens
gaaaatgaatacgtgactagc

SEQ ID NO: 12877 - DNA, 19 bp, Homo sapiens
cagggtgcacaaaaaatcc

SEQ ID NO: 12878 - DNA, 22 bp, Homo sapiens
atttgttacctgcaaatcccaa

SEQ ID NO: 12879 - DNA, 27 bp, Homo sapiens
tatatattgaaaaatatatcaaaaaag

SEQ ID NO: 12880 - DNA, 20 bp, Homo sapiens
ttggcaaataccatggaagg

SEQ ID NO: 12881 - DNA, 23 bp, Homo sapiens
aagttttctataatcactgtggt

SEQ ID NO: 12882 - DNA, 20 bp, Homo sapiens
ttcttcaaaaaccaacatgg

SEQ ID NO: 12883 - DNA, 23 bp, Homo sapiens
acagaaagaaaagataaagaaat

SEQ ID NO: 12884 - DNA, 24 bp, Homo sapiens
agaatggtgtttcaatataattgg

SEQ ID NO: 12885 - DNA, 24 bp, Homo sapiens
acataactcacatttaaatataga

SEQ ID NO: 12886 - DNA, 21 bp, Homo sapiens
tgtgagaaagcaattgaccac

SEQ ID NO: 12887 - DNA, 25 bp, Homo sapiens
atttgaaatatagactaactgagtc

SEQ ID NO: 12888 - DNA, 28 bp, Homo sapiens
attataatttttctaatttacactgatg

SEQ ID NO: 12889 - DNA, 21 bp, Homo sapiens
attacttactttgaatcttcc

SEQ ID NO: 12890 - DNA, 22 bp, Homo sapiens
aacaaagccttattccttttgg

SEQ ID NO: 12891 - DNA, 19 bp, Homo sapiens
tgagcagtttacagtggtc

SEQ ID NO: 12892 - DNA, 19 bp, Homo sapiens
ttttggctaagatcacagg

SEQ ID NO: 12893 - DNA, 23 bp, Homo sapiens
taagaaatgtgagaaagattatc

SEQ ID NO: 12894 - DNA, 27 bp, Homo sapiens
ttaacttcaaatagaatattatatacc

SEQ ID NO: 12895 - DNA, 20 bp, Homo sapiens
tttgctttgtaagagcattc

SEQ ID NO: 12896 - DNA, 27 bp, Homo sapiens
attatatttttgttcacatgatttaaa

SEQ ID NO: 12897 - DNA, 20 bp, Homo sapiens
tttttttaatctttcctagg

SEQ ID NO: 12898 - DNA, 26 bp, Homo sapiens
aattaattatacctgcaaggataatc

SEQ ID NO: 12899 - DNA, 20 bp, Homo sapiens
ccttctccaggtaagaaccc

SEQ ID NO: 12900 - DNA, 21 bp, Homo sapiens
aggaaatgactcacatgatgt

SEQ ID NO: 12901 - DNA, 16 bp, Homo sapiens
ctgccacattgctgac

SEQ ID NO: 12902 - DNA, 22 bp, Homo sapiens
tgaacagatgcacataacatcc

SEQ ID NO: 12903 - DNA, 21 bp, Homo sapiens
atgtcagaatggtactgactg

SEQ ID NO: 12904 - DNA, 20 bp, Homo sapiens
tgttcgtctgagtttaacaa

SEQ ID NO: 12905 - DNA, 19 bp, Homo sapiens
aggatcttccagccaaaat

SEQ ID NO: 12906 - DNA, 23 bp, Homo sapiens
tcaaattgcttggtaatagtaaa

SEQ ID NO: 12907 - DNA, 21 bp, Homo sapiens
tctgcttttttggaaaagagg

SEQ ID NO: 12908 - DNA, 23 bp, Homo sapiens
acttacatttgatattttgatgc

SEQ ID NO: 12909 - DNA, 22 bp, Homo sapiens
ttgtgtgtgatttttttaaggt

SEQ ID NO: 12910 - DNA, 22 bp, Homo sapiens
actcactgacatcagtttcacc

SEQ ID NO: 12911 - DNA, 23 bp, Homo sapiens
aatgttttgctacatatctatgc

SEQ ID NO: 12912 - DNA, 20 bp, Homo sapiens
gcagaactgctatttgggca

SEQ ID NO: 12913 - DNA, 19 bp, Homo sapiens
acactgcaatacatttgtt

SEQ ID NO: 12914 - DNA, 18 bp, Homo sapiens
cctcacagaatggacctt

SEQ ID NO: 12915 - DNA, 22 bp, Homo sapiens
gtgaatgtgatgagcaattttc

SEQ ID NO: 12916 - DNA, 21 bp, Homo sapiens
aaagagttcagtatatatacc

SEQ ID NO: 12917 - DNA, 20 bp, Homo sapiens
gtcaaccacatgtctgtttc

SEQ ID NO: 12918 - DNA, 22 bp, Homo sapiens
tcacatttaatttgaaatacat

SEQ ID NO: 12919 - DNA, 21 bp, Homo sapiens
tccaatgtaaaaaaaactttt

SEQ ID NO: 12920 - DNA, 20 bp, Homo sapiens
tgcattttttacctgaaaat

SEQ ID NO: 12921 - DNA, 28 bp, Homo sapiens
agtcagaatttgatattttcattattaa

SEQ ID NO: 12922 - DNA, 19 bp, Homo sapiens
ttgctgcagtttccatgga

SEQ ID NO: 12923 - DNA, 22 bp, Homo sapiens
tttcaatttaaatgcatcatcg

SEQ ID NO: 12924 - DNA, 18 bp, Homo sapiens
atgaatgtgtctgtcacc

SEQ ID NO: 12925 - DNA, 21 bp, Homo sapiens
ccatgtaaaaataatggcagt

SEQ ID NO: 12926 - DNA, 23 bp, Homo sapiens
tctgttaacagtttataaatgca

SEQ ID NO: 12927 - DNA, 17 bp, Homo sapiens
tgccagcctccattttc

SEQ ID NO: 12928 - DNA, 24 bp, Homo sapiens
aaacaatcttacctgtaaatggtg

SEQ ID NO: 12929 - DNA, 18 bp, Homo sapiens
ttttgctctggtcatggt

SEQ ID NO: 12930 - DNA, 24 bp, Homo sapiens
tttctcttttattaatgcaactgc

SEQ ID NO: 12931 - DNA, 20 bp, Homo sapiens
gtccactgggacttcgacta

SEQ ID NO: 12932 - DNA, 24 bp, Homo sapiens
atcaagttcctggcagtattttcc

SEQ ID NO: 12933 - DNA, 22 bp, Homo sapiens
gctgagtgttgggacacattat

SEQ ID NO: 12934 - DNA, 24 bp, Homo sapiens
ccaagcttcactaagacatttacc

SEQ ID NO: 12935 - DNA, 22 bp, Homo sapiens
ggaagatcagttactttttggc

SEQ ID NO: 12936 - DNA, 24 bp, Homo sapiens
ctggcagaactgctgtttcactgt

SEQ ID NO: 12937 - DNA, 24 bp, Homo sapiens
agaaataaatttgatgaatgtttc

SEQ ID NO: 12938 - DNA, 22 bp, Homo sapiens
cacttgccataactgtgataaa

SEQ ID NO: 12939 - DNA, 23 bp, Homo sapiens
tgcaaattcaattaggagatatc

SEQ ID NO: 12940 - DNA, 24 bp, Homo sapiens
agtgtgcattccttttagtctgca

SEQ ID NO: 12941 - DNA, 22 bp, Homo sapiens
tgggtgtaaacactaaaataga

SEQ ID NO: 12942 - DNA, 21 bp, Homo sapiens
acagccaacgaaagatgtttc

SEQ ID NO: 12943 - DNA, 22 bp, Homo sapiens
gtggtaaattggacactaacag

SEQ ID NO: 12944 - DNA, 23 bp, Homo sapiens
gatggttcagaagaaattacaag

SEQ ID NO: 12945 - DNA, 19 bp, Homo sapiens
aaaaacatgtagacggcaa

SEQ ID NO: 12946 - DNA, 24 bp, Homo sapiens
gggaacagcttgattgcctgaagt

SEQ ID NO: 12947 - DNA, 24 bp, Homo sapiens
cgaaaatgactgacaaatcaatcg

SEQ ID NO: 12948 - DNA, 20 bp, Homo sapiens
tgtagaagtccaagcagatg

SEQ ID NO: 12949 - DNA, 24 bp, Homo sapiens
ccggtaatacttaaaacaccattt

SEQ ID NO: 12950 - DNA, 20 bp, Homo sapiens
tgccattcttccaccaattg

SEQ ID NO: 12951 - DNA, 20 bp, Homo sapiens
aggtcaattccaattcccag

SEQ ID NO: 12952 - DNA, 23 bp, Homo sapiens
gaaaaaccatcaggctcagaatg

SEQ ID NO: 12953 - DNA, 16 bp, Homo sapiens
ccgcccctaaatttcc

SEQ ID NO: 12954 - DNA, 24 bp, Homo sapiens
aagccgacgccagtgcccctcagc

SEQ ID NO: 12955 - DNA, 17 bp, Homo sapiens
aatgtggaagcctcctc

SEQ ID NO: 12956 - DNA, 20 bp, Homo sapiens
tcctcgacagtcgcggcggg

SEQ ID NO: 12957 - DNA, 19 bp, Homo sapiens
gagaatcccggtggtgagc

SEQ ID NO: 12958 - DNA, 16 bp, Homo sapiens
ggggctccggatctgg

SEQ ID NO: 12959 - DNA, 17 bp, Homo sapiens
tcaggctcagggcggca

SEQ ID NO: 12960 - DNA, 16 bp, Homo sapiens
ctgcgagcctgggagt

SEQ ID NO: 12961 - DNA, 18 bp, Homo sapiens
cgcggggctttttgcacc

SEQ ID NO: 12962 - DNA, 24 bp, Homo sapiens
tcaggaagttaataagctgggatg

SEQ ID NO: 12963 - DNA, 24 bp, Homo sapiens
caggtggctcattttactttccag

SEQ ID NO: 12964 - DNA, 24 bp, Homo sapiens
aaaaatagagcaagaagtgaacca

SEQ ID NO: 12965 - DNA, 22 bp, Homo sapiens
cacttgttacagactggaaaag

SEQ ID NO: 12966 - DNA, 23 bp, Homo sapiens
cagcaatttgcataatatctttc

SEQ ID NO: 12967 - DNA, 20 bp, Homo sapiens
cacatatcagggttacctgc

SEQ ID NO: 12968 - DNA, 22 bp, Homo sapiens
tgttaagaaactggttgttttt

SEQ ID NO: 12969 - DNA, 25 bp, Homo sapiens
tgagctccacataaatattttaagc

SEQ ID NO: 12970 - DNA, 21 bp, Homo sapiens
cagggcaaactcagaaaatga

SEQ ID NO: 12971 - DNA, 16 bp, Homo sapiens
agccccaatcatacct

SEQ ID NO: 12972 - DNA, 19 bp, Homo sapiens
ggccaaagatcctactgca

SEQ ID NO: 12973 - DNA, 23 bp, Homo sapiens
gcaacatcttcaccaaatattac

SEQ ID NO: 12974 - DNA, 21 bp, Homo sapiens
gtagaagttgagaaaccttga

SEQ ID NO: 12975 - DNA, 20 bp, Homo sapiens
acttaccatatttgtctcgc

SEQ ID NO: 12976 - DNA, 26 bp, Homo sapiens
gtaaacatttaaattacttatttctc

SEQ ID NO: 12977 - DNA, 26 bp, Homo sapiens
atattttgtatttttaagatctttta

SEQ ID NO: 12978 - DNA, 27 bp, Homo sapiens
atgtattatttaaatactgtttttcag

SEQ ID NO: 12979 - DNA, 23 bp, Homo sapiens
tggaaatgaaaaggaattcatcc

SEQ ID NO: 12980 - DNA, 24 bp, Homo sapiens
ggagtctttagatgcactgttggc

SEQ ID NO: 12981 - DNA, 21 bp, Homo sapiens
agccatactctttattttctg

SEQ ID NO: 12982 - DNA, 16 bp, Homo sapiens
tccagtgaccgcaatt

SEQ ID NO: 12983 - DNA, 22 bp, Homo sapiens
agtttactgaatttttaaatgt

SEQ ID NO: 12984 - DNA, 24 bp, Homo sapiens
tcattcacttacctgatcaaatgc

SEQ ID NO: 12985 - DNA, 30 bp, Homo sapiens
tttttcttttctattttaaggaaaagatag

SEQ ID NO: 12986 - DNA, 16 bp, Homo sapiens
gtggaagggtagcggc

SEQ ID NO: 12987 - DNA, 24 bp, Homo sapiens
aggaattgttggatttggaatcgg

SEQ ID NO: 12988 - DNA, 24 bp, Homo sapiens
aacaaaattataattgtaatacat

SEQ ID NO: 12989 - DNA, 22 bp, Homo sapiens
ttgcagattatattttccctgc

SEQ ID NO: 12990 - DNA, 21 bp, Homo sapiens
cagagcgatagcgatacttgg

SEQ ID NO: 12991 - DNA, 22 bp, Homo sapiens
gagggagggaaagactcattgt

SEQ ID NO: 12992 - DNA, 16 bp, Homo sapiens
ccaacacagccccaag

SEQ ID NO: 12993 - DNA, 22 bp, Homo sapiens
gaaggagattggaagggaagga

SEQ ID NO: 12994 - DNA, 24 bp, Homo sapiens
cataccttgattcctgggcaatgg

SEQ ID NO: 12995 - DNA, 22 bp, Homo sapiens
cctcagattgttaatgaagctg

SEQ ID NO: 12996 - DNA, 20 bp, Homo sapiens
tgaatcaaaatggaaacatc

SEQ ID NO: 12997 - DNA, 20 bp, Homo sapiens
gaagcctcactatccggtcc

SEQ ID NO: 12998 - DNA, 21 bp, Homo sapiens
cacataaattccaagaatcct

SEQ ID NO: 12999 - DNA, 23 bp, Homo sapiens
agagtcctgaagcattttttgcc

SEQ ID NO: 13000 - DNA, 20 bp, Homo sapiens
aaagggcttctgggtataac

SEQ ID NO: 13001 - DNA, 23 bp, Homo sapiens
taattaggcttaaaataaatagc

SEQ ID NO: 13002 - DNA, 24 bp, Homo sapiens
tttaggttcaaaaaatatacaagg

SEQ ID NO: 13003 - DNA, 23 bp, Homo sapiens
tttaaatatcagcccttcttagc

SEQ ID NO: 13004 - DNA, 25 bp, Homo sapiens
agatattcacaaatataaaataaag

SEQ ID NO: 13005 - DNA, 20 bp, Homo sapiens
aaatctgtttttgcaggtgg

SEQ ID NO: 13006 - DNA, 24 bp, Homo sapiens
aatcaaccatatagaaaaaaaaga

SEQ ID NO: 13007 - DNA, 19 bp, Homo sapiens
tgtcatgcatagaggataa

SEQ ID NO: 13008 - DNA, 22 bp, Homo sapiens
aaatttacacctgaggacaaac

SEQ ID NO: 13009 - DNA, 21 bp, Homo sapiens
gttgtatggttctatagggac

SEQ ID NO: 13010 - DNA, 24 bp, Homo sapiens
tctgttttaagtaatacagaattt

SEQ ID NO: 13011 - DNA, 22 bp, Homo sapiens
gccccaggcaactagagtaaca

SEQ ID NO: 13012 - DNA, 24 bp, Homo sapiens
cttaaattattttatgcacaagtg

SEQ ID NO: 13013 - DNA, 20 bp, Homo sapiens
gcttccaagcacaacgtagg

SEQ ID NO: 13014 - DNA, 20 bp, Homo sapiens
tcctgttctgtatttagcgg

SEQ ID NO: 13015 - DNA, 24 bp, Homo sapiens
ccagacttaatctgagatataaag

SEQ ID NO: 13016 - DNA, 21 bp, Homo sapiens
cgaagtcatacaggaagggag

SEQ ID NO: 13017 - DNA, 22 bp, Homo sapiens
tcaattacacaccaataaagtt

SEQ ID NO: 13018 - DNA, 18 bp, Homo sapiens
cggatcacatgaacctga

SEQ ID NO: 13019 - DNA, 24 bp, Homo sapiens
ttcaacatatttaaaacaaattta

SEQ ID NO: 13020 - DNA, 21 bp, Homo sapiens
tcagatcaatgacttcacaag

SEQ ID NO: 13021 - DNA, 24 bp, Homo sapiens
tactgtctctaatagtgacatcag

SEQ ID NO: 13022 - DNA, 23 bp, Homo sapiens
tgacattctatcaccattatatt

SEQ ID NO: 13023 - DNA, 24 bp, Homo sapiens
tcattctctgcatatttttctctt

SEQ ID NO: 13024 - DNA, 24 bp, Homo sapiens
cacaatttcaaaagaattatttgc

SEQ ID NO: 13025 - DNA, 20 bp, Homo sapiens
aagaaaagcttggagtgtct

SEQ ID NO: 13026 - DNA, 21 bp, Homo sapiens
actttctttcatgctgcaaat

SEQ ID NO: 13027 - DNA, 21 bp, Homo sapiens
tgtggacacaatttgtaaggt

SEQ ID NO: 13028 - DNA, 19 bp, Homo sapiens
ccctgttttgatcacagac

SEQ ID NO: 13029 - DNA, 24 bp, Homo sapiens
aacttattggcatacaattgaatt

SEQ ID NO: 13030 - DNA, 18 bp, Homo sapiens
agagctgatttccgatgc

SEQ ID NO: 13031 - DNA, 26 bp, Homo sapiens
tttattactgatttaaaactaccatc

SEQ ID NO: 13032 - DNA, 20 bp, Homo sapiens
ggaattggcatgtggaattg

SEQ ID NO: 13033 - DNA, 23 bp, Homo sapiens
tttcttttctctttcagtctgtg

SEQ ID NO: 13034 - DNA, 23 bp, Homo sapiens
gcactacatttccataaagtgta

SEQ ID NO: 13035 - DNA, 18 bp, Homo sapiens
tcccttgacaggcggctt

SEQ ID NO: 13036 - DNA, 23 bp, Homo sapiens
aagtgtggtcagaataaaaaatg

SEQ ID NO: 13037 - DNA, 18 bp, Homo sapiens
ataggagcctctaggttc

SEQ ID NO: 13038 - DNA, 27 bp, Homo sapiens
ttaaatatttttaatgtccttagatgc

SEQ ID NO: 13039 - DNA, 21 bp, Homo sapiens
tttgtctgggatgtagaatgg

SEQ ID NO: 13040 - DNA, 24 bp, Homo sapiens
tgcactatttcatttctgtgagta

SEQ ID NO: 13041 - DNA, 21 bp, Homo sapiens
tgcatacctacctatatggtc

SEQ ID NO: 13042 - DNA, 22 bp, Homo sapiens
tctgcaggaggaatgtttcttg

SEQ ID NO: 13043 - DNA, 23 bp, Homo sapiens
tgattgctgtgtcttggttaaca

SEQ ID NO: 13044 - DNA, 22 bp, Homo sapiens
acaccatttcctcacatttttg

SEQ ID NO: 13045 - DNA, 22 bp, Homo sapiens
gaaagttgccttttaccaactt

SEQ ID NO: 13046 - DNA, 20 bp, Homo sapiens
atgcccttcgaaaaatgatc

SEQ ID NO: 13047 - DNA, 24 bp, Homo sapiens
ctcaggcggcggcccggccaaagc

SEQ ID NO: 13048 - DNA, 16 bp, Homo sapiens
cgcctgtacgcccccg

SEQ ID NO: 13049 - DNA, 18 bp, Homo sapiens
cagctcacaagccaaggc

SEQ ID NO: 13050 - DNA, 20 bp, Homo sapiens
gcccatgcctcgactgtacc

SEQ ID NO: 13051 - DNA, 16 bp, Homo sapiens
gtggatccggtcgcgg

SEQ ID NO: 13052 - DNA, 17 bp, Homo sapiens
aactctcggaagagtgg

SEQ ID NO: 13053 - DNA, 16 bp, Homo sapiens
tctccggaggcctcgg

SEQ ID NO: 13054 - DNA, 17 bp, Homo sapiens
ctcttgccccagagcgc

SEQ ID NO: 13055 - DNA, 24 bp, Homo sapiens
gtcacaggcacatcagcaaagagg

SEQ ID NO: 13056 - DNA, 21 bp, Homo sapiens
gcattagaagcaagattcagg

SEQ ID NO: 13057 - DNA, 23 bp, Homo sapiens
tcattaattatctcatgttgggt

SEQ ID NO: 13058 - DNA, 23 bp, Homo sapiens
tctaccaatttgcagtacatttc

SEQ ID NO: 13059 - DNA, 24 bp, Homo sapiens
tgcttttaaaatgtatcaaaatcc

SEQ ID NO: 13060 - DNA, 21 bp, Homo sapiens
ttttgattgcagattcgacac

SEQ ID NO: 13061 - DNA, 21 bp, Homo sapiens
caggtttattccctgctgtcc

SEQ ID NO: 13062 - DNA, 22 bp, Homo sapiens
tatagatcctacccagcgccac

SEQ ID NO: 13063 - DNA, 23 bp, Homo sapiens
atgcaacatgtggagaaaaagga

SEQ ID NO: 13064 - DNA, 22 bp, Homo sapiens
aattcttagtattacaaaccct

SEQ ID NO: 13065 - DNA, 21 bp, Homo sapiens
cagcctgtgaggaacccgcag

SEQ ID NO: 13066 - DNA, 18 bp, Homo sapiens
gctgaatgacagagaggg

SEQ ID NO: 13067 - DNA, 18 bp, Homo sapiens
agcatttgtaatcgggtg

SEQ ID NO: 13068 - DNA, 24 bp, Homo sapiens
tctccttctgtattattttaatgt

SEQ ID NO: 13069 - DNA, 20 bp, Homo sapiens
aatggtattcgattccattc

SEQ ID NO: 13070 - DNA, 23 bp, Homo sapiens
actttaaagaaaaagctataaac

SEQ ID NO: 13071 - DNA, 21 bp, Homo sapiens
tcaaaagtggaaatgacaaaa

SEQ ID NO: 13072 - DNA, 21 bp, Homo sapiens
tgctgctaactcaatagagag

SEQ ID NO: 13073 - DNA, 20 bp, Homo sapiens
aagagtatcctttcacccac

SEQ ID NO: 13074 - DNA, 21 bp, Homo sapiens
gtggcagagtcccagtattaa

SEQ ID NO: 13075 - DNA, 24 bp, Homo sapiens
ctatatgaataggaccctttgttc

SEQ ID NO: 13076 - DNA, 17 bp, Homo sapiens
acgcgatctggaacacc

SEQ ID NO: 13077 - DNA, 23 bp, Homo sapiens
tagtaaaatcatttcagagaaca

SEQ ID NO: 13078 - DNA, 20 bp, Homo sapiens
caagagagcgttccaaaatc

SEQ ID NO: 13079 - DNA, 24 bp, Homo sapiens
gtagcatttagacttatatttgac

SEQ ID NO: 13080 - DNA, 18 bp, Homo sapiens
aggcactccgtgtctgtc

SEQ ID NO: 13081 - DNA, 21 bp, Homo sapiens
attgttgttgttatacttccc

SEQ ID NO: 13082 - DNA, 21 bp, Homo sapiens
agatgacctcatcatctttgg

SEQ ID NO: 13083 - DNA, 17 bp, Homo sapiens
ccccccggcctggaaac

SEQ ID NO: 13084 - DNA, 21 bp, Homo sapiens
gttttctcatcttacctctcc

SEQ ID NO: 13085 - DNA, 21 bp, Homo sapiens
gccctggcagtatcatgctgt

SEQ ID NO: 13086 - DNA, 23 bp, Homo sapiens
tgatatattcaggtctttctgac

SEQ ID NO: 13087 - DNA, 20 bp, Homo sapiens
cgcactgggccaccgtcata

SEQ ID NO: 13088 - DNA, 22 bp, Homo sapiens
aactcatttaaatgtacttttg

SEQ ID NO: 13089 - DNA, 20 bp, Homo sapiens
acaccccttagaaaatggag

SEQ ID NO: 13090 - DNA, 23 bp, Homo sapiens
ctcccattgattaaagagatgtg

SEQ ID NO: 13091 - DNA, 24 bp, Homo sapiens
atgccagtgcataggcatgtacct

SEQ ID NO: 13092 - DNA, 17 bp, Homo sapiens
cgagcggaggtaaattc

SEQ ID NO: 13093 - DNA, 24 bp, Homo sapiens
tttttccaagaaaaagaaacaaaa

SEQ ID NO: 13094 - DNA, 21 bp, Homo sapiens
ttgtgagcaaacatcatcaag

SEQ ID NO: 13095 - DNA, 22 bp, Homo sapiens
ttttcatattgtgtagattcac

SEQ ID NO: 13096 - DNA, 24 bp, Homo sapiens
aggctctaatatgattcatcataa

SEQ ID NO: 13097 - DNA, 19 bp, Homo sapiens
gatccttctccagaactgc

SEQ ID NO: 13098 - DNA, 23 bp, Homo sapiens
actgaaaacatttttaaagtatt

SEQ ID NO: 13099 - DNA, 19 bp, Homo sapiens
gatccgcacactgaatgct

SEQ ID NO: 13100 - DNA, 28 bp, Homo sapiens
aataataataataatctacaattctaaa

SEQ ID NO: 13101 - DNA, 19 bp, Homo sapiens
ccattgtcaccagaagagt

SEQ ID NO: 13102 - DNA, 22 bp, Homo sapiens
ccaactgaaatatccttgaccg

SEQ ID NO: 13103 - DNA, 22 bp, Homo sapiens
cacttgtcctcaagaaacacaa

SEQ ID NO: 13104 - DNA, 20 bp, Homo sapiens
cgctggatcaagtggacaag

SEQ ID NO: 13105 - DNA, 22 bp, Homo sapiens
tgaatgtccccttttgttactt

SEQ ID NO: 13106 - DNA, 17 bp, Homo sapiens
ttttacagctcagggct

SEQ ID NO: 13107 - DNA, 21 bp, Homo sapiens
tggattgctttttgcagtatt

SEQ ID NO: 13108 - DNA, 16 bp, Homo sapiens
taagtggggacctgac

SEQ ID NO: 13109 - DNA, 23 bp, Homo sapiens
gctatggtcatgccagggcttgt

SEQ ID NO: 13110 - DNA, 23 bp, Homo sapiens
ttcaaagtctatcatcctaactg

SEQ ID NO: 13111 - DNA, 20 bp, Homo sapiens
acatgtgttatgctcacact

SEQ ID NO: 13112 - DNA, 23 bp, Homo sapiens
ggctggctagttttacattttag

SEQ ID NO: 13113 - DNA, 17 bp, Homo sapiens
ccagctctccagggttt

SEQ ID NO: 13114 - DNA, 20 bp, Homo sapiens
agagaggcttcctttatggt

SEQ ID NO: 13115 - DNA, 24 bp, Homo sapiens
ggaaaggaagaatgacatattttg

SEQ ID NO: 13116 - DNA, 21 bp, Homo sapiens
ttgactagaaatctcgctgtg

SEQ ID NO: 13117 - DNA, 18 bp, Homo sapiens
ttgcataaccagccattt

SEQ ID NO: 13118 - DNA, 20 bp, Homo sapiens
tccaggattccatcagaaac

SEQ ID NO: 13119 - DNA, 20 bp, Homo sapiens
gaaaagctagacatatgggt

SEQ ID NO: 13120 - DNA, 20 bp, Homo sapiens
ccctccaatgtactttccac

SEQ ID NO: 13121 - DNA, 21 bp, Homo sapiens
acagaaatgatttttaaatgt

SEQ ID NO: 13122 - DNA, 20 bp, Homo sapiens
tgtctcgcagtttataccag

SEQ ID NO: 13123 - DNA, 23 bp, Homo sapiens
tccttaatgcagcatgcaattgt

SEQ ID NO: 13124 - DNA, 24 bp, Homo sapiens
caaaaaaataactctttatgaaag

SEQ ID NO: 13125 - DNA, 21 bp, Homo sapiens
gccagaagaaatctgagtttg

SEQ ID NO: 13126 - DNA, 23 bp, Homo sapiens
tgtttacagaagctttcaaaatt

SEQ ID NO: 13127 - DNA, 18 bp, Homo sapiens
tacccaaaacactgctgg

SEQ ID NO: 13128 - DNA, 21 bp, Homo sapiens
gtcagtttcaactacgaaatg

SEQ ID NO: 13129 - DNA, 17 bp, Homo sapiens
ggctggcatggccttgg

SEQ ID NO: 13130 - DNA, 24 bp, Homo sapiens
ggtaattcttatagttttctcaat

SEQ ID NO: 13131 - DNA, 20 bp, Homo sapiens
gagcatgtttctcatccttg

SEQ ID NO: 13132 - DNA, 23 bp, Homo sapiens
taaaagtttgctgaagtgaaaaa

SEQ ID NO: 13133 - DNA, 23 bp, Homo sapiens
tggcttttagttgtccttttatc

SEQ ID NO: 13134 - DNA, 27 bp, Homo sapiens
atttttgttaggtatctccaaattatc

SEQ ID NO: 13135 - DNA, 29 bp, Homo sapiens
ttaaagaataaatttattacatgaataac

SEQ ID NO: 13136 - DNA, 22 bp, Homo sapiens
ggttccttaaatgaagtctgtg

SEQ ID NO: 13137 - DNA, 24 bp, Homo sapiens
attattgagatgagtttaaaaact

SEQ ID NO: 13138 - DNA, 23 bp, Homo sapiens
cctctactctttggttttaactt

SEQ ID NO: 13139 - DNA, 17 bp, Homo sapiens
tagcccctggcacaccg

SEQ ID NO: 13140 - DNA, 24 bp, Homo sapiens
tcaaaatagcattttaaaggttac

SEQ ID NO: 13141 - DNA, 20 bp, Homo sapiens
ctcatttttgctccctaacc

SEQ ID NO: 13142 - DNA, 24 bp, Homo sapiens
agaaatgttgatatgtggctcatc

SEQ ID NO: 13143 - DNA, 23 bp, Homo sapiens
agtgggacattactggaataaac

SEQ ID NO: 13144 - DNA, 20 bp, Homo sapiens
actggttttggaggtgtgag

SEQ ID NO: 13145 - DNA, 24 bp, Homo sapiens
taaaattgcttaatgccaaggaaa

SEQ ID NO: 13146 - DNA, 22 bp, Homo sapiens
ggactgcaaagcctgtaactgc

SEQ ID NO: 13147 - DNA, 17 bp, Homo sapiens
ctggtgggtcaccacac

SEQ ID NO: 13148 - DNA, 19 bp, Homo sapiens
tccttcaacattttcctgc

SEQ ID NO: 13149 - DNA, 23 bp, Homo sapiens
agcagatttttaaaaatatcatt

SEQ ID NO: 13150 - DNA, 20 bp, Homo sapiens
gcagcctttccaattatcct

SEQ ID NO: 13151 - DNA, 23 bp, Homo sapiens
agttaatattttccttatacaga

SEQ ID NO: 13152 - DNA, 21 bp, Homo sapiens
ccataggtccagtaggaactc

SEQ ID NO: 13153 - DNA, 22 bp, Homo sapiens
gctgatacatctctttatttgc

SEQ ID NO: 13154 - DNA, 16 bp, Homo sapiens
aagaaggctgctgggg

SEQ ID NO: 13155 - DNA, 18 bp, Homo sapiens
ccggcttcttcaatttgc

SEQ ID NO: 13156 - DNA, 24 bp, Homo sapiens
cctgtaactttatgtagaagttca

SEQ ID NO: 13157 - DNA, 19 bp, Homo sapiens
ggggtttcaaacagatgtc

SEQ ID NO: 13158 - DNA, 20 bp, Homo sapiens
caaaggctttgagcaaaaat

SEQ ID NO: 13159 - DNA, 22 bp, Homo sapiens
tcataatgctcaggtttttttc

SEQ ID NO: 13160 - DNA, 16 bp, Homo sapiens
gctggggagccactcg

SEQ ID NO: 13161 - DNA, 23 bp, Homo sapiens
taatttccaaaagtggacacgac

SEQ ID NO: 13162 - DNA, 16 bp, Homo sapiens
gggcttgccgggcctc

SEQ ID NO: 13163 - DNA, 24 bp, Homo sapiens
aaaattaatgatgactgtgtgttt

SEQ ID NO: 13164 - DNA, 24 bp, Homo sapiens
gaagcaagcgtggacttactttgt

SEQ ID NO: 13165 - DNA, 22 bp, Homo sapiens
gactgaccttcctggccgcatt

SEQ ID NO: 13166 - DNA, 23 bp, Homo sapiens
aaagaattaccaactaaaaccca

SEQ ID NO: 13167 - DNA, 19 bp, Homo sapiens
gcatcagtaacgcggaggc

SEQ ID NO: 13168 - DNA, 21 bp, Homo sapiens
atgtgatttagctggttctgg

SEQ ID NO: 13169 - DNA, 21 bp, Homo sapiens
ccggctccctatctgggaaac

SEQ ID NO: 13170 - DNA, 17 bp, Homo sapiens
tgtcctcctactgctgg

SEQ ID NO: 13171 - DNA, 20 bp, Homo sapiens
gtactccagtgatttctgcg

SEQ ID NO: 13172 - DNA, 21 bp, Homo sapiens
gctggagaacacgttctgtat

SEQ ID NO: 13173 - DNA, 23 bp, Homo sapiens
tcgtatacaacagtaagtaaaat

SEQ ID NO: 13174 - DNA, 16 bp, Homo sapiens
aggaagtaacacgggt

SEQ ID NO: 13175 - DNA, 19 bp, Homo sapiens
tctgtcttgtagctcccag

SEQ ID NO: 13176 - DNA, 20 bp, Homo sapiens
cctgtaagtcagtgtcaaac

SEQ ID NO: 13177 - DNA, 21 bp, Homo sapiens
atgaccttgaagaagaggaag

SEQ ID NO: 13178 - DNA, 21 bp, Homo sapiens
tctcagagtgaaacaaaagag

SEQ ID NO: 13179 - DNA, 17 bp, Homo sapiens
tcttgggctgtgctgat

SEQ ID NO: 13180 - DNA, 24 bp, Homo sapiens
aaaataaacataaatttttaaagt

SEQ ID NO: 13181 - DNA, 28 bp, Homo sapiens
catgtatggtaaatgattcttctttaag

SEQ ID NO: 13182 - DNA, 23 bp, Homo sapiens
tatgtttgacacttttgtaccct

SEQ ID NO: 13183 - DNA, 19 bp, Homo sapiens
ttcaaattcgcaagcactg

SEQ ID NO: 13184 - DNA, 22 bp, Homo sapiens
cctttagggtaatgacttgagc

SEQ ID NO: 13185 - DNA, 17 bp, Homo sapiens
ctgaagatggcatccat

SEQ ID NO: 13186 - DNA, 24 bp, Homo sapiens
tgaagaacatactaatgtattgtt

SEQ ID NO: 13187 - DNA, 16 bp, Homo sapiens
cctgcaccttggcccc

SEQ ID NO: 13188 - DNA, 21 bp, Homo sapiens
tccagtccgtagaaaggaatt

SEQ ID NO: 13189 - DNA, 21 bp, Homo sapiens
tccgttcttatctgctctttg

SEQ ID NO: 13190 - DNA, 21 bp, Homo sapiens
cacatacagctttgggatgga

SEQ ID NO: 13191 - DNA, 16 bp, Homo sapiens
cagcggattcaaggtt

SEQ ID NO: 13192 - DNA, 24 bp, Homo sapiens
tattcatcagcttcctttctcagc

SEQ ID NO: 13193 - DNA, 16 bp, Homo sapiens
ggtgggcactgacaca

SEQ ID NO: 13194 - DNA, 23 bp, Homo sapiens
cgattcctacagctgtataatac

SEQ ID NO: 13195 - DNA, 20 bp, Homo sapiens
tgagggaactttgaaagcac

SEQ ID NO: 13196 - DNA, 19 bp, Homo sapiens
tgccataggttgagctctg

SEQ ID NO: 13197 - DNA, 23 bp, Homo sapiens
gtaattattgatagaaaaaaaac

SEQ ID NO: 13198 - DNA, 19 bp, Homo sapiens
gcagctgtagaagtgtgtc

SEQ ID NO: 13199 - DNA, 19 bp, Homo sapiens
aagccacagcttttggtag

SEQ ID NO: 13200 - DNA, 18 bp, Homo sapiens
gccgttaactcgcctgtg

SEQ ID NO: 13201 - DNA, 24 bp, Homo sapiens
tgctttgacaagcacatttgatga

SEQ ID NO: 13202 - DNA, 18 bp, Homo sapiens
tcatcacaggactccgca

SEQ ID NO: 13203 - DNA, 24 bp, Homo sapiens
acaaacaaacaaaaacaccttttt

SEQ ID NO: 13204 - DNA, 18 bp, Homo sapiens
gccttgtcaatcagcatc

SEQ ID NO: 13205 - DNA, 21 bp, Homo sapiens
tctcagtcttgttggcctagg

SEQ ID NO: 13206 - DNA, 20 bp, Homo sapiens
actcaagtgtttaaggtccc

SEQ ID NO: 13207 - DNA, 18 bp, Homo sapiens
cagtgctttggtcatgcg

SEQ ID NO: 13208 - DNA, 18 bp, Homo sapiens
agagcattctcagttcca

SEQ ID NO: 13209 - DNA, 19 bp, Homo sapiens
ccacctgtgtgatccttac

SEQ ID NO: 13210 - DNA, 20 bp, Homo sapiens
tctgctgtaaaattgaccat

SEQ ID NO: 13211 - DNA, 17 bp, Homo sapiens
cctttagtaggctcgcc

SEQ ID NO: 13212 - DNA, 24 bp, Homo sapiens
cagactaatgacttcgtagaccta

SEQ ID NO: 13213 - DNA, 22 bp, Homo sapiens
tgttacttacttattggatggg

SEQ ID NO: 13214 - DNA, 22 bp, Homo sapiens
aactctgatgctcatttctttc

SEQ ID NO: 13215 - DNA, 24 bp, Homo sapiens
gtatatttgctatgaaaagtgtac

SEQ ID NO: 13216 - DNA, 18 bp, Homo sapiens
cctggtttctatggcgag

SEQ ID NO: 13217 - DNA, 23 bp, Homo sapiens
attttcctgaaaaaattcatgtc

SEQ ID NO: 13218 - DNA, 20 bp, Homo sapiens
tgtgcctgtccactcaatat

SEQ ID NO: 13219 - DNA, 21 bp, Homo sapiens
gcacgttgggctaaagctatg

SEQ ID NO: 13220 - DNA, 19 bp, Homo sapiens
ctaatctctgtctctgggg

SEQ ID NO: 13221 - DNA, 17 bp, Homo sapiens
gtacccgacagggcatc

SEQ ID NO: 13222 - DNA, 22 bp, Homo sapiens
gtagtggagagagagaaatgag

SEQ ID NO: 13223 - DNA, 23 bp, Homo sapiens
tcccaaggtagaaatcattttgc

SEQ ID NO: 13224 - DNA, 23 bp, Homo sapiens
ttgtccctgttttccgcaacaac

SEQ ID NO: 13225 - DNA, 20 bp, Homo sapiens
tggccttttttctccaaagg

SEQ ID NO: 13226 - DNA, 19 bp, Homo sapiens
ttgatctgtgatggatgcc

SEQ ID NO: 13227 - DNA, 23 bp, Homo sapiens
acaaaaatataatgcatttgttt

SEQ ID NO: 13228 - DNA, 21 bp, Homo sapiens
gtccaaaatagccttctgcac

SEQ ID NO: 13229 - DNA, 23 bp, Homo sapiens
ttttaatcacgttgcgtttgaga

SEQ ID NO: 13230 - DNA, 19 bp, Homo sapiens
tggagaagtcaaggttgtc

SEQ ID NO: 13231 - DNA, 24 bp, Homo sapiens
agaaggggagaatgaaaaatatgt

SEQ ID NO: 13232 - DNA, 22 bp, Homo sapiens
gttgtacctggtttacatatca

SEQ ID NO: 13233 - DNA, 24 bp, Homo sapiens
ctgatgaaatttcttgccttaggt

SEQ ID NO: 13234 - DNA, 20 bp, Homo sapiens
cttcgcatcaactgcatctc

SEQ ID NO: 13235 - DNA, 19 bp, Homo sapiens
catgtcagccatgccaatg

SEQ ID NO: 13236 - DNA, 22 bp, Homo sapiens
gctactttgaggtacaatacat

SEQ ID NO: 13237 - DNA, 22 bp, Homo sapiens
gacagcttgtctggctcctgtc

SEQ ID NO: 13238 - DNA, 22 bp, Homo sapiens
accatgtattccacataatttc

SEQ ID NO: 13239 - DNA, 22 bp, Homo sapiens
gctgatggatattttggagatg

SEQ ID NO: 13240 - DNA, 23 bp, Homo sapiens
ttagttagtacaaggaaatgttc

SEQ ID NO: 13241 - DNA, 17 bp, Homo sapiens
agccaccggcattacag

SEQ ID NO: 13242 - DNA, 23 bp, Homo sapiens
aacagggcacttaacaaatcaga

SEQ ID NO: 13243 - DNA, 18 bp, Homo sapiens
acgttggctctgcactca

SEQ ID NO: 13244 - DNA, 26 bp, Homo sapiens
tggggtatattattatttaacaagcc

SEQ ID NO: 13245 - DNA, 25 bp, Homo sapiens
gtaaggagaaagtaatttatgggtc

SEQ ID NO: 13246 - DNA, 23 bp, Homo sapiens
caggtctctcttctctttgcagc

SEQ ID NO: 13247 - DNA, 22 bp, Homo sapiens
ccttccttttaatatacgaagg

SEQ ID NO: 13248 - DNA, 17 bp, Homo sapiens
actggacagtgtgagtg

SEQ ID NO: 13249 - DNA, 24 bp, Homo sapiens
ttgaaaaaaacttttcactgatca

SEQ ID NO: 13250 - DNA, 23 bp, Homo sapiens
tgattgaatgaaaacccaattgt

SEQ ID NO: 13251 - DNA, 21 bp, Homo sapiens
acttagacccaaaagaattgc

SEQ ID NO: 13252 - DNA, 19 bp, Homo sapiens
tgttcccacctgatctttg

SEQ ID NO: 13253 - DNA, 18 bp, Homo sapiens
tcttccctgtgactccag

SEQ ID NO: 13254 - DNA, 24 bp, Homo sapiens
aaatttaatttttctctcctcttc

SEQ ID NO: 13255 - DNA, 18 bp, Homo sapiens
ttacagacctgtgcagcc

SEQ ID NO: 13256 - DNA, 21 bp, Homo sapiens
gggctgtgttccctgcaactg

SEQ ID NO: 13257 - DNA, 20 bp, Homo sapiens
aactgttacagaagtcagac

SEQ ID NO: 13258 - DNA, 23 bp, Homo sapiens
gagtggacaatgttggtgccaac

SEQ ID NO: 13259 - DNA, 24 bp, Homo sapiens
aaaaataagtagacattactcatt

SEQ ID NO: 13260 - DNA, 18 bp, Homo sapiens
aacttccaagaaggaggc

SEQ ID NO: 13261 - DNA, 22 bp, Homo sapiens
aatgaagtaagtttttatttcc

SEQ ID NO: 13262 - DNA, 16 bp, Homo sapiens
tgggagggcaaatgca

SEQ ID NO: 13263 - DNA, 22 bp, Homo sapiens
acaaaccaacacaatataaaac

SEQ ID NO: 13264 - DNA, 16 bp, Homo sapiens
tggtaatgctgtggcc

SEQ ID NO: 13265 - DNA, 22 bp, Homo sapiens
tttgttttccctcttataccgg

SEQ ID NO: 13266 - DNA, 23 bp, Homo sapiens
gagctctacaaaacaaaaatctc

SEQ ID NO: 13267 - DNA, 18 bp, Homo sapiens
caaagactgggcgatgca

SEQ ID NO: 13268 - DNA, 22 bp, Homo sapiens
aatacttctacattattttgtg

SEQ ID NO: 13269 - DNA, 18 bp, Homo sapiens
tgtgcacccaatacctgg

SEQ ID NO: 13270 - DNA, 16 bp, Homo sapiens
cccactgtgctgcagt

SEQ ID NO: 13271 - DNA, 21 bp, Homo sapiens
gaatagtacaaagcctataac

SEQ ID NO: 13272 - DNA, 22 bp, Homo sapiens
attttgcaccagagaattttgg

SEQ ID NO: 13273 - DNA, 24 bp, Homo sapiens
acattagaattaaaattttaagat

SEQ ID NO: 13274 - DNA, 24 bp, Homo sapiens
ggaggaagcagtcacagagattgc

SEQ ID NO: 13275 - DNA, 24 bp, Homo sapiens
ttatctcctctataggcttgtaac

SEQ ID NO: 13276 - DNA, 22 bp, Homo sapiens
actacaggagcattttttagtc

SEQ ID NO: 13277 - DNA, 24 bp, Homo sapiens
gtaaatacaggccaatgcaactgt

SEQ ID NO: 13278 - DNA, 17 bp, Homo sapiens
tttccctagctgcatgt

SEQ ID NO: 13279 - DNA, 22 bp, Homo sapiens
agtcgaggtcactggaactacc

SEQ ID NO: 13280 - DNA, 20 bp, Homo sapiens
gaagcaggtataacaaacac

SEQ ID NO: 13281 - DNA, 22 bp, Homo sapiens
gatgccacaacctgtgattcag

SEQ ID NO: 13282 - DNA, 18 bp, Homo sapiens
gaaaactccatgtctggc

SEQ ID NO: 13283 - DNA, 17 bp, Homo sapiens
tctgtcacagtggatgc

SEQ ID NO: 13284 - DNA, 23 bp, Homo sapiens
aatactcagtgttcttctgtttt

SEQ ID NO: 13285 - DNA, 17 bp, Homo sapiens
atagcagctgctgcagc

SEQ ID NO: 13286 - DNA, 24 bp, Homo sapiens
tgcattctcagggtgatttctccc

SEQ ID NO: 13287 - DNA, 17 bp, Homo sapiens
tccctactcacccacgt

SEQ ID NO: 13288 - DNA, 18 bp, Homo sapiens
tgaatgtggaaggcatcc

SEQ ID NO: 13289 - DNA, 20 bp, Homo sapiens
agtgcctgactaaaagacac

SEQ ID NO: 13290 - DNA, 19 bp, Homo sapiens
tgccaagaatccacttggc

SEQ ID NO: 13291 - DNA, 19 bp, Homo sapiens
tcctaaatgttcacagagg

SEQ ID NO: 13292 - DNA, 22 bp, Homo sapiens
ctctgaagcaaaaggactgatc

SEQ ID NO: 13293 - DNA, 22 bp, Homo sapiens
cttgcccactgcgtgtgagttc

SEQ ID NO: 13294 - DNA, 16 bp, Homo sapiens
ggtggtcgtgtgctgc

SEQ ID NO: 13295 - DNA, 20 bp, Homo sapiens
actgcagatagacatgcagt

SEQ ID NO: 13296 - DNA, 23 bp, Homo sapiens
ccaaatggagatcttctctcatc

SEQ ID NO: 13297 - DNA, 21 bp, Homo sapiens
gccttctgctgtattttgacc

SEQ ID NO: 13298 - DNA, 18 bp, Homo sapiens
tgtgcttaccttctttcc

SEQ ID NO: 13299 - DNA, 21 bp, Homo sapiens
tctacccctggtagatgaggc

SEQ ID NO: 13300 - DNA, 20 bp, Homo sapiens
tctccaaatggtgtgattct

SEQ ID NO: 13301 - DNA, 17 bp, Homo sapiens
tgttgcccacatggacc

SEQ ID NO: 13302 - DNA, 17 bp, Homo sapiens
gcccccataggccatca

SEQ ID NO: 13303 - DNA, 22 bp, Homo sapiens
tggaaacttccagaacaatttg

SEQ ID NO: 13304 - DNA, 22 bp, Homo sapiens
tgaggattatatgtagagaaac

SEQ ID NO: 13305 - DNA, 24 bp, Homo sapiens
agtgagaacaagataaaatctttt

SEQ ID NO: 13306 - DNA, 20 bp, Homo sapiens
agccatatgcctgacgataa

SEQ ID NO: 13307 - DNA, 22 bp, Homo sapiens
tcttctttttattttgtcagtt

SEQ ID NO: 13308 - DNA, 20 bp, Homo sapiens
tgactaactttacctctgtc

SEQ ID NO: 13309 - DNA, 19 bp, Homo sapiens
tcgggaagaaacaggtttc

SEQ ID NO: 13310 - DNA, 23 bp, Homo sapiens
acaagaagagaaatcactatgac

SEQ ID NO: 13311 - DNA, 21 bp, Homo sapiens
ggacacctactcatgctagaa

SEQ ID NO: 13312 - DNA, 18 bp, Homo sapiens
ttctatggactcgaggat

SEQ ID NO: 13313 - DNA, 22 bp, Homo sapiens
gacaaggcatgaaattgaaatg

SEQ ID NO: 13314 - DNA, 22 bp, Homo sapiens
ccataagtagctttgataagaa

SEQ ID NO: 13315 - DNA, 23 bp, Homo sapiens
accaatcaatggttttgcattca

SEQ ID NO: 13316 - DNA, 20 bp, Homo sapiens
taagagcttgaatattttct

SEQ ID NO: 13317 - DNA, 23 bp, Homo sapiens
ggaaatattatggggatgatcct

SEQ ID NO: 13318 - DNA, 23 bp, Homo sapiens
tcactttccaatctttcttatct

SEQ ID NO: 13319 - DNA, 25 bp, Homo sapiens
ttcttggatatactatatgatattc

SEQ ID NO: 13320 - DNA, 17 bp, Homo sapiens
ggtcacagggaagcctc

SEQ ID NO: 13321 - DNA, 21 bp, Homo sapiens
ccattgagatttcagaaatcc

SEQ ID NO: 13322 - DNA, 23 bp, Homo sapiens
ttgtcaattaaaaacaaaaagac

SEQ ID NO: 13323 - DNA, 19 bp, Homo sapiens
caatcaagtcagctggagg

SEQ ID NO: 13324 - DNA, 24 bp, Homo sapiens
tgagaaggatattgctgtaggatt

SEQ ID NO: 13325 - DNA, 20 bp, Homo sapiens
agtaggaggtagcttacctc

SEQ ID NO: 13326 - DNA, 22 bp, Homo sapiens
ctaagtacattctcgctgtttc

SEQ ID NO: 13327 - DNA, 21 bp, Homo sapiens
agtaaaggtacttctgggagt

SEQ ID NO: 13328 - DNA, 19 bp, Homo sapiens
gacgtggaacaacaatgac

SEQ ID NO: 13329 - DNA, 20 bp, Homo sapiens
gccactgtgtctcacactgt

SEQ ID NO: 13330 - DNA, 16 bp, Homo sapiens
ggcctgtcctgtgagg

SEQ ID NO: 13331 - DNA, 23 bp, Homo sapiens
ttaagtatcaaaatcggcacttg

SEQ ID NO: 13332 - DNA, 17 bp, Homo sapiens
ggttggtccaggggtgc

SEQ ID NO: 13333 - DNA, 21 bp, Homo sapiens
aaggccagtctgtctttgcag

SEQ ID NO: 13334 - DNA, 21 bp, Homo sapiens
atatcgatgtttcagggtcac

SEQ ID NO: 13335 - DNA, 24 bp, Homo sapiens
ctaactttgctgtcctaattggct

SEQ ID NO: 13336 - DNA, 21 bp, Homo sapiens
atgtgtaaagaggaatgagca

SEQ ID NO: 13337 - DNA, 20 bp, Homo sapiens
gttctcaaccaggtggccgc

SEQ ID NO: 13338 - DNA, 21 bp, Homo sapiens
tttcacacacacagttgcatt

SEQ ID NO: 13339 - DNA, 19 bp, Homo sapiens
gtaatggacacagcagcct

SEQ ID NO: 13340 - DNA, 22 bp, Homo sapiens
ttttccttactttttaaaatgc

SEQ ID NO: 13341 - DNA, 21 bp, Homo sapiens
agtgtgatgttgacaattctg

SEQ ID NO: 13342 - DNA, 23 bp, Homo sapiens
ctctgtcagtgataaagtgtgtg

SEQ ID NO: 13343 - DNA, 21 bp, Homo sapiens
tggcaatcccttgacaattcc

SEQ ID NO: 13344 - DNA, 23 bp, Homo sapiens
agacacacattcatagctaggga

SEQ ID NO: 13345 - DNA, 24 bp, Homo sapiens
ctcaatcttacttgttactggaag

SEQ ID NO: 13346 - DNA, 21 bp, Homo sapiens
caaacttcttctcccttttcc

SEQ ID NO: 13347 - DNA, 23 bp, Homo sapiens
tcatagacagcccatgtgctaga

SEQ ID NO: 13348 - DNA, 20 bp, Homo sapiens
gtgaacgatgtgctcttgga

SEQ ID NO: 13349 - DNA, 29 bp, Homo sapiens
tatattattaaaaatatctctatcttaaa

SEQ ID NO: 13350 - DNA, 19 bp, Homo sapiens
tgtgcctgccctctgattt

SEQ ID NO: 13351 - DNA, 24 bp, Homo sapiens
acgtcctagccttaaataagaact

SEQ ID NO: 13352 - DNA, 16 bp, Homo sapiens
tccccgtggacaagcc

SEQ ID NO: 13353 - DNA, 23 bp, Homo sapiens
agtatgtcccaataaccttgatc

SEQ ID NO: 13354 - DNA, 25 bp, Homo sapiens
atagtccctacatatcattactctg

SEQ ID NO: 13355 - DNA, 23 bp, Homo sapiens
actttttttgcaatccttttctt

SEQ ID NO: 13356 - DNA, 24 bp, Homo sapiens
gatatgcaaatattgaagttcttc

SEQ ID NO: 13357 - DNA, 17 bp, Homo sapiens
ttgacgactaccgctgc

SEQ ID NO: 13358 - DNA, 20 bp, Homo sapiens
ttctaagatacacaagtggt

SEQ ID NO: 13359 - DNA, 18 bp, Homo sapiens
ctggactgccagtatagc

SEQ ID NO: 13360 - DNA, 24 bp, Homo sapiens
cctttacaggaaaagttaactaat

SEQ ID NO: 13361 - DNA, 16 bp, Homo sapiens
ggcacaggcagtgagc

SEQ ID NO: 13362 - DNA, 22 bp, Homo sapiens
aaagaccacacacaacaatgtg

SEQ ID NO: 13363 - DNA, 17 bp, Homo sapiens
acttccttcccgtggct

SEQ ID NO: 13364 - DNA, 24 bp, Homo sapiens
tttcaattcaggtgtgcccctggc

SEQ ID NO: 13365 - DNA, 24 bp, Homo sapiens
gcaaagttagtatacgtacaaaca

SEQ ID NO: 13366 - DNA, 22 bp, Homo sapiens
gccaagaatgtgagtgtgatcc

SEQ ID NO: 13367 - DNA, 21 bp, Homo sapiens
gagagtcactctttctcattg

SEQ ID NO: 13368 - DNA, 20 bp, Homo sapiens
tgcacgtgccgacctggagc

SEQ ID NO: 13369 - DNA, 20 bp, Homo sapiens
gtgtcagaaagaatgaagag

SEQ ID NO: 13370 - DNA, 22 bp, Homo sapiens
gcgagggctgggagtgtgtttg

SEQ ID NO: 13371 - DNA, 16 bp, Homo sapiens
aagaaggccagtgcac

SEQ ID NO: 13372 - DNA, 24 bp, Homo sapiens
ttctgagatgagtagtttcatctt

SEQ ID NO: 13373 - DNA, 17 bp, Homo sapiens
gcagcggaccagtgagg

SEQ ID NO: 13374 - DNA, 20 bp, Homo sapiens
tctttgaacatctgcctggg

SEQ ID NO: 13375 - DNA, 19 bp, Homo sapiens
gcaccaacctacctttagc

SEQ ID NO: 13376 - DNA, 24 bp, Homo sapiens
ctttcacagtttgtggagatgagt

SEQ ID NO: 13377 - DNA, 24 bp, Homo sapiens
tttaccaattacagccaataccgc

SEQ ID NO: 13378 - DNA, 24 bp, Homo sapiens
gcagatggtcatgagcatcaacct

SEQ ID NO: 13379 - DNA, 20 bp, Homo sapiens
tgaatttccctaacagttgt

SEQ ID NO: 13380 - DNA, 23 bp, Homo sapiens
tggtcttgaaaatatgactcagg

SEQ ID NO: 13381 - DNA, 16 bp, Homo sapiens
ggcccgctgaggtgac

SEQ ID NO: 13382 - DNA, 24 bp, Homo sapiens
agttgaaatagtttccttatcttt

SEQ ID NO: 13383 - DNA, 21 bp, Homo sapiens
ctcgttcatttcggtcacgag

SEQ ID NO: 13384 - DNA, 24 bp, Homo sapiens
acaaaaatgtgttctgtcgaacac

SEQ ID NO: 13385 - DNA, 25 bp, Homo sapiens
tcattgacataatctatctgctttc

SEQ ID NO: 13386 - DNA, 20 bp, Homo sapiens
tctttttcagcacttgctgt

SEQ ID NO: 13387 - DNA, 20 bp, Homo sapiens
ttgggaattaggaagaaggt

SEQ ID NO: 13388 - DNA, 21 bp, Homo sapiens
agggcaatctgaatacactcg

SEQ ID NO: 13389 - DNA, 24 bp, Homo sapiens
gatttctatgatttgatttgaagc

SEQ ID NO: 13390 - DNA, 17 bp, Homo sapiens
atctgctgtcactttgg

SEQ ID NO: 13391 - DNA, 23 bp, Homo sapiens
gcaatacatctgatcaataattc

SEQ ID NO: 13392 - DNA, 19 bp, Homo sapiens
aattctcccagggactttg

SEQ ID NO: 13393 - DNA, 17 bp, Homo sapiens
ccagtgggagcttatct

SEQ ID NO: 13394 - DNA, 25 bp, Homo sapiens
gttgggagaaatgatgattaaaatg

SEQ ID NO: 13395 - DNA, 23 bp, Homo sapiens
ccgaatttggatcattaggctac

SEQ ID NO: 13396 - DNA, 23 bp, Homo sapiens
tcacttataacaagagaaattcc

SEQ ID NO: 13397 - DNA, 20 bp, Homo sapiens
gagaggaccaacacaagagc

SEQ ID NO: 13398 - DNA, 24 bp, Homo sapiens
gcagataatacccttgaatatctt

SEQ ID NO: 13399 - DNA, 23 bp, Homo sapiens
ttatagctttttcatttacagct

SEQ ID NO: 13400 - DNA, 20 bp, Homo sapiens
ctgcctctgtggttcccagc

SEQ ID NO: 13401 - DNA, 20 bp, Homo sapiens
agcccttccaaatttctctc

SEQ ID NO: 13402 - DNA, 18 bp, Homo sapiens
tgcccagcagatgctgaa

SEQ ID NO: 13403 - DNA, 23 bp, Homo sapiens
ccttttgtgtctctagatttttc

SEQ ID NO: 13404 - DNA, 22 bp, Homo sapiens
caaaatttgttttaccccctgc

SEQ ID NO: 13405 - DNA, 25 bp, Homo sapiens
atctcagtttgtcaaaagaaaaaat

SEQ ID NO: 13406 - DNA, 18 bp, Homo sapiens
actcgagacgaggccttt

SEQ ID NO: 13407 - DNA, 24 bp, Homo sapiens
aagcatcttttacttatacgtgtg

SEQ ID NO: 13408 - DNA, 21 bp, Homo sapiens
tgattaaagaactgaggagga

SEQ ID NO: 13409 - DNA, 22 bp, Homo sapiens
gatagatagatagatagatgat

SEQ ID NO: 13410 - DNA, 21 bp, Homo sapiens
tgatttagcacacagtgaatc

SEQ ID NO: 13411 - DNA, 19 bp, Homo sapiens
tcttcattttccccccggg

SEQ ID NO: 13412 - DNA, 24 bp, Homo sapiens
tgttagcatctctttgtaacatgg

SEQ ID NO: 13413 - DNA, 22 bp, Homo sapiens
tcccaagcatcatcaactttgt

SEQ ID NO: 13414 - DNA, 20 bp, Homo sapiens
gtctattattgggctggggg

SEQ ID NO: 13415 - DNA, 20 bp, Homo sapiens
atttactgcaaataggcgat

SEQ ID NO: 13416 - DNA, 24 bp, Homo sapiens
aagtgaagaagctgtttggagagt

SEQ ID NO: 13417 - DNA, 23 bp, Homo sapiens
tccccaaccttctgagattaaga

SEQ ID NO: 13418 - DNA, 20 bp, Homo sapiens
ggctgactacaaaaacaaag

SEQ ID NO: 13419 - DNA, 22 bp, Homo sapiens
gtaaatgtgcatcaacttgaat

SEQ ID NO: 13420 - DNA, 22 bp, Homo sapiens
taaaatcagagaagctaatcgc

SEQ ID NO: 13421 - DNA, 21 bp, Homo sapiens
aagtcatttcttgttctgttt

SEQ ID NO: 13422 - DNA, 17 bp, Homo sapiens
tcaacagcctccttctt

SEQ ID NO: 13423 - DNA, 20 bp, Homo sapiens
tcatctagccacatttcaac

SEQ ID NO: 13424 - DNA, 20 bp, Homo sapiens
ttggcttcatcgagtatgtc

SEQ ID NO: 13425 - DNA, 19 bp, Homo sapiens
aagtcaggaatacaagggg

SEQ ID NO: 13426 - DNA, 23 bp, Homo sapiens
catctctcttttgagttttaccc

SEQ ID NO: 13427 - DNA, 21 bp, Homo sapiens
aatggtctacagaaaaagaag

SEQ ID NO: 13428 - DNA, 22 bp, Homo sapiens
aacaagtactagtatttgcttc

SEQ ID NO: 13429 - DNA, 21 bp, Homo sapiens
gagaacactttaaaagagggc

SEQ ID NO: 13430 - DNA, 17 bp, Homo sapiens
ggcatggtcacagtaga

SEQ ID NO: 13431 - DNA, 22 bp, Homo sapiens
tgcattccagcctgggtgacag

SEQ ID NO: 13432 - DNA, 18 bp, Homo sapiens
gggagaggtcatctattt

SEQ ID NO: 13433 - DNA, 21 bp, Homo sapiens
actaaacgtgtagttatgtct

SEQ ID NO: 13434 - DNA, 16 bp, Homo sapiens
tggctctcagcctggg

SEQ ID NO: 13435 - DNA, 22 bp, Homo sapiens
cttgcttaaaatgccctcttct

SEQ ID NO: 13436 - DNA, 24 bp, Homo sapiens
acacaaacatttccaaaaacaaat

SEQ ID NO: 13437 - DNA, 23 bp, Homo sapiens
cctatgtctgaggagcttaatga

SEQ ID NO: 13438 - DNA, 23 bp, Homo sapiens
ttgaaaatgattctctactattt

SEQ ID NO: 13439 - DNA, 19 bp, Homo sapiens
gcttgctgagaaggtgtcc

SEQ ID NO: 13440 - DNA, 18 bp, Homo sapiens
ctatccacagaaaggcca

SEQ ID NO: 13441 - DNA, 19 bp, Homo sapiens
agtggcattgaaggagatg

SEQ ID NO: 13442 - DNA, 23 bp, Homo sapiens
tattatttggaattgtcatagat

SEQ ID NO: 13443 - DNA, 23 bp, Homo sapiens
ggcaactttctcagcttcatcaa

SEQ ID NO: 13444 - DNA, 22 bp, Homo sapiens
ggacgttcttcatttgagtacc

SEQ ID NO: 13445 - DNA, 21 bp, Homo sapiens
atgtgccatttgtttcttacc

SEQ ID NO: 13446 - DNA, 22 bp, Homo sapiens
ccaccagaatccttgatgaggc

SEQ ID NO: 13447 - DNA, 20 bp, Homo sapiens
tttccagactgacttacatt

SEQ ID NO: 13448 - DNA, 28 bp, Homo sapiens
tacagcaatattaaggactatattgatg

SEQ ID NO: 13449 - DNA, 20 bp, Homo sapiens
aggcaaattttaaaagaggt

SEQ ID NO: 13450 - DNA, 21 bp, Homo sapiens
cttgcacatgaagctacaaaa

SEQ ID NO: 13451 - DNA, 21 bp, Homo sapiens
cctttaataaaccccgaggac

SEQ ID NO: 13452 - DNA, 20 bp, Homo sapiens
acaattctatatctgcagcc

SEQ ID NO: 13453 - DNA, 20 bp, Homo sapiens
tgctaacttcttggcttcgt

SEQ ID NO: 13454 - DNA, 20 bp, Homo sapiens
aactgccttctggatccctc

SEQ ID NO: 13455 - DNA, 21 bp, Homo sapiens
gtaacaacccgattaactgga

SEQ ID NO: 13456 - DNA, 19 bp, Homo sapiens
tgtccacaggcaacaggtc

SEQ ID NO: 13457 - DNA, 23 bp, Homo sapiens
atcatcacaaaaatcatgctaaa

SEQ ID NO: 13458 - DNA, 22 bp, Homo sapiens
aaaagcttcaggattcttaacg

SEQ ID NO: 13459 - DNA, 26 bp, Homo sapiens
gataggtagacaacattttgtaaaac

SEQ ID NO: 13460 - DNA, 20 bp, Homo sapiens
tctatcctggtttttaagcc

SEQ ID NO: 13461 - DNA, 21 bp, Homo sapiens
ttaaatacattttcttgcttt

SEQ ID NO: 13462 - DNA, 23 bp, Homo sapiens
ataactttcccaaagtgtcattc

SEQ ID NO: 13463 - DNA, 21 bp, Homo sapiens
ccaagtataagctcagggatg

SEQ ID NO: 13464 - DNA, 19 bp, Homo sapiens
ttcaggtcaactgacacag

SEQ ID NO: 13465 - DNA, 21 bp, Homo sapiens
tcgcagaaaatgaagaccatc

SEQ ID NO: 13466 - DNA, 22 bp, Homo sapiens
gataatagtaccagaataatct

SEQ ID NO: 13467 - DNA, 19 bp, Homo sapiens
ggggatctcttgagaactt

SEQ ID NO: 13468 - DNA, 22 bp, Homo sapiens
agtttctcattctcacaaagaa

SEQ ID NO: 13469 - DNA, 22 bp, Homo sapiens
tcatttgctacacctgaatgag

SEQ ID NO: 13470 - DNA, 21 bp, Homo sapiens
cagtacatctttagctgtgtc

SEQ ID NO: 13471 - DNA, 19 bp, Homo sapiens
agccacagcctcgctttgt

SEQ ID NO: 13472 - DNA, 24 bp, Homo sapiens
tgctagtttattgtaattcttctt

SEQ ID NO: 13473 - DNA, 24 bp, Homo sapiens
ctttgttttgtttttcataccctc

SEQ ID NO: 13474 - DNA, 21 bp, Homo sapiens
tcttactgttcttggaaggat

SEQ ID NO: 13475 - DNA, 18 bp, Homo sapiens
agccagacaagccaacga

SEQ ID NO: 13476 - DNA, 21 bp, Homo sapiens
ggtctgggatacttttacagt

SEQ ID NO: 13477 - DNA, 21 bp, Homo sapiens
tccaccagaacctcgatggcc

SEQ ID NO: 13478 - DNA, 23 bp, Homo sapiens
caatctatgaaagaaggaaggca

SEQ ID NO: 13479 - DNA, 21 bp, Homo sapiens
atgctgtggttaaagatcctt

SEQ ID NO: 13480 - DNA, 19 bp, Homo sapiens
agttaaaatggggtgcatt

SEQ ID NO: 13481 - DNA, 21 bp, Homo sapiens
gctgaaactttttgcaatagg

SEQ ID NO: 13482 - DNA, 29 bp, Homo sapiens
tttttagtcactactttataatatttata

SEQ ID NO: 13483 - DNA, 19 bp, Homo sapiens
gtggaaagaatagctacgc

SEQ ID NO: 13484 - DNA, 23 bp, Homo sapiens
tgttttgcttccatgtgaaattg

SEQ ID NO: 13485 - DNA, 18 bp, Homo sapiens
gccatcacacattttgct

SEQ ID NO: 13486 - DNA, 23 bp, Homo sapiens
ggtttgagtttatctattagccg

SEQ ID NO: 13487 - DNA, 23 bp, Homo sapiens
aagatgaaattgtttggttaagc

SEQ ID NO: 13488 - DNA, 23 bp, Homo sapiens
tggtttatcaattcctttatctc

SEQ ID NO: 13489 - DNA, 22 bp, Homo sapiens
tgcatatacatgcacactaatt

SEQ ID NO: 13490 - DNA, 21 bp, Homo sapiens
tcagttactgatactgacgat

SEQ ID NO: 13491 - DNA, 18 bp, Homo sapiens
agaacaggaagctgaccg

SEQ ID NO: 13492 - DNA, 16 bp, Homo sapiens
aacggggaatcctggg

SEQ ID NO: 13493 - DNA, 23 bp, Homo sapiens
acctaaagaaaaacatctctgag

SEQ ID NO: 13494 - DNA, 17 bp, Homo sapiens
ccactccaacccctcct

SEQ ID NO: 13495 - DNA, 20 bp, Homo sapiens
cctcctgaagacacagatac

SEQ ID NO: 13496 - DNA, 24 bp, Homo sapiens
tgcatatgggtgtttaatgatagt

SEQ ID NO: 13497 - DNA, 22 bp, Homo sapiens
tgacaacaatattattgtaact

SEQ ID NO: 13498 - DNA, 23 bp, Homo sapiens
atggctttgtggttgtatggaag

SEQ ID NO: 13499 - DNA, 21 bp, Homo sapiens
acaaatttggcacttccaaga

SEQ ID NO: 13500 - DNA, 22 bp, Homo sapiens
cttgttttttttaaagatcaaa

SEQ ID NO: 13501 - DNA, 23 bp, Homo sapiens
tcagattaacctctagctataca

SEQ ID NO: 13502 - DNA, 20 bp, Homo sapiens
aaaccagaaatcaagaaagg

SEQ ID NO: 13503 - DNA, 21 bp, Homo sapiens
tctgaaagcctacgttagacc

SEQ ID NO: 13504 - DNA, 23 bp, Homo sapiens
cagctgttgctgataacctcctc

SEQ ID NO: 13505 - DNA, 28 bp, Homo sapiens
taataaataatattatttgacaagtatt

SEQ ID NO: 13506 - DNA, 20 bp, Homo sapiens
actccagatccaacatccca

SEQ ID NO: 13507 - DNA, 20 bp, Homo sapiens
tggcgcttattgaaaaacac

SEQ ID NO: 13508 - DNA, 19 bp, Homo sapiens
gctacgatacggtaccaat

SEQ ID NO: 13509 - DNA, 24 bp, Homo sapiens
atatctcttgtttttgtatttctc

SEQ ID NO: 13510 - DNA, 21 bp, Homo sapiens
actgggaaactacttcaaaat

SEQ ID NO: 13511 - DNA, 19 bp, Homo sapiens
aagtcagcttcctctggga

SEQ ID NO: 13512 - DNA, 22 bp, Homo sapiens
gtttacatgcatacacagttac

SEQ ID NO: 13513 - DNA, 22 bp, Homo sapiens
gactattgatgactcatattgg

SEQ ID NO: 13514 - DNA, 24 bp, Homo sapiens
ggaatgttagaaactaaacagcca

SEQ ID NO: 13515 - DNA, 17 bp, Homo sapiens
tgctgggcacaatgctg

SEQ ID NO: 13516 - DNA, 23 bp, Homo sapiens
tatcttttaaatctggaattacc

SEQ ID NO: 13517 - DNA, 20 bp, Homo sapiens
aacagcattgcatttgcatc

SEQ ID NO: 13518 - DNA, 21 bp, Homo sapiens
ccccttcacttcaacacgtac

SEQ ID NO: 13519 - DNA, 22 bp, Homo sapiens
atgaaataaacaggaggaggat

SEQ ID NO: 13520 - DNA, 20 bp, Homo sapiens
gccctggatggacccaaagc

SEQ ID NO: 13521 - DNA, 23 bp, Homo sapiens
gttttacagagctttatcatacc

SEQ ID NO: 13522 - DNA, 22 bp, Homo sapiens
cagggtacacgattctagatgt

SEQ ID NO: 13523 - DNA, 24 bp, Homo sapiens
agaagaaaattcttactcaaagta

SEQ ID NO: 13524 - DNA, 20 bp, Homo sapiens
gccagtgaatgtaatcacac

SEQ ID NO: 13525 - DNA, 22 bp, Homo sapiens
gccaaaatatcagaaagaatgg

SEQ ID NO: 13526 - DNA, 20 bp, Homo sapiens
tctcggaaattccacaaacc

SEQ ID NO: 13527 - DNA, 23 bp, Homo sapiens
actctcatggataaaccaagatt

SEQ ID NO: 13528 - DNA, 19 bp, Homo sapiens
ccctgggagagttctcatc

SEQ ID NO: 13529 - DNA, 18 bp, Homo sapiens
tgcagaaggctgatgctg

SEQ ID NO: 13530 - DNA, 23 bp, Homo sapiens
catcatccacatgataatagaat

SEQ ID NO: 13531 - DNA, 24 bp, Homo sapiens
acatactttgacaacaaacctata

SEQ ID NO: 13532 - DNA, 24 bp, Homo sapiens
cttgaagattcattagttttgtgg

SEQ ID NO: 13533 - DNA, 21 bp, Homo sapiens
tcaaattgaatagtcccctca

SEQ ID NO: 13534 - DNA, 21 bp, Homo sapiens
agatgtatttagggtatttcc

SEQ ID NO: 13535 - DNA, 17 bp, Homo sapiens
gatgttggggtaccagc

SEQ ID NO: 13536 - DNA, 22 bp, Homo sapiens
cagtgatgcattgaataatgac

SEQ ID NO: 13537 - DNA, 19 bp, Homo sapiens
tcgtgtggcaagatacatc

SEQ ID NO: 13538 - DNA, 20 bp, Homo sapiens
ctcagtcctcaggtggaaga

SEQ ID NO: 13539 - DNA, 19 bp, Homo sapiens
gcaaacgcattttagtcac

SEQ ID NO: 13540 - DNA, 18 bp, Homo sapiens
gtcagccgtcccattcgc

SEQ ID NO: 13541 - DNA, 24 bp, Homo sapiens
cccaggctttttagaaaataactg

SEQ ID NO: 13542 - DNA, 23 bp, Homo sapiens
ttcagaacattttcttcgagtgc

SEQ ID NO: 13543 - DNA, 23 bp, Homo sapiens
attgaaaatatataagcactatc

SEQ ID NO: 13544 - DNA, 21 bp, Homo sapiens
tccacactcatgaaatctctc

SEQ ID NO: 13545 - DNA, 21 bp, Homo sapiens
attttcaaaatggatttctgc

SEQ ID NO: 13546 - DNA, 18 bp, Homo sapiens
gccattcctgagcccaga

SEQ ID NO: 13547 - DNA, 21 bp, Homo sapiens
agaccctaacataaaccacac

SEQ ID NO: 13548 - DNA, 22 bp, Homo sapiens
tgaattcttgacagagtgaatg

SEQ ID NO: 13549 - DNA, 23 bp, Homo sapiens
accactggggtatgtttactcta

SEQ ID NO: 13550 - DNA, 21 bp, Homo sapiens
tggatttcatgattaaggcct

SEQ ID NO: 13551 - DNA, 23 bp, Homo sapiens
gggcacataaaagtcagttacga

SEQ ID NO: 13552 - DNA, 20 bp, Homo sapiens
actcgtgagtagctaaaatt

SEQ ID NO: 13553 - DNA, 21 bp, Homo sapiens
tgatgggaaatggaaatcatt

SEQ ID NO: 13554 - DNA, 21 bp, Homo sapiens
gtcatgtctaacccaaatcac

SEQ ID NO: 13555 - DNA, 23 bp, Homo sapiens
attagtatctatatctacaattg

SEQ ID NO: 13556 - DNA, 18 bp, Homo sapiens
tagtgcaagtgcttgaga

SEQ ID NO: 13557 - DNA, 21 bp, Homo sapiens
tgctttcaagtcaagaccaaa

SEQ ID NO: 13558 - DNA, 27 bp, Homo sapiens
gaagtattaatgatgatatagatgtgg

SEQ ID NO: 13559 - DNA, 21 bp, Homo sapiens
actaaattacctcaagtttct

SEQ ID NO: 13560 - DNA, 25 bp, Homo sapiens
ctttctcctttacagccaatatatc

SEQ ID NO: 13561 - DNA, 21 bp, Homo sapiens
gaactctagtgagcatagtgg

SEQ ID NO: 13562 - DNA, 18 bp, Homo sapiens
tcgtcttctggaaacaac

SEQ ID NO: 13563 - DNA, 17 bp, Homo sapiens
ttaggcctttctgcaac

SEQ ID NO: 13564 - DNA, 22 bp, Homo sapiens
tattttggtggcctgccaacgc

SEQ ID NO: 13565 - DNA, 22 bp, Homo sapiens
agaaggcatgcataaatttaaa

SEQ ID NO: 13566 - DNA, 22 bp, Homo sapiens
ctttgtagatccctgtgaaatg

SEQ ID NO: 13567 - DNA, 17 bp, Homo sapiens
ctgcttctgcacggctg

SEQ ID NO: 13568 - DNA, 24 bp, Homo sapiens
ctaaatgaaaatgtaattataagt

SEQ ID NO: 13569 - DNA, 16 bp, Homo sapiens
agaatgcacggcttgc

SEQ ID NO: 13570 - DNA, 24 bp, Homo sapiens
cccgttatctagtatgaaagcaag

SEQ ID NO: 13571 - DNA, 24 bp, Homo sapiens
ggcagccggaatatttcttcagat

SEQ ID NO: 13572 - DNA, 19 bp, Homo sapiens
tacacgtgtgcacagtttg

SEQ ID NO: 13573 - DNA, 21 bp, Homo sapiens
tcgggactactgagtatattg

SEQ ID NO: 13574 - DNA, 21 bp, Homo sapiens
tccttcccatagtcagagact

SEQ ID NO: 13575 - DNA, 27 bp, Homo sapiens
aaatgtgtttagagaactatcaaaaac

SEQ ID NO: 13576 - DNA, 22 bp, Homo sapiens
tgactattcaataggccagaag

SEQ ID NO: 13577 - DNA, 19 bp, Homo sapiens
gactgatccttgtaggagc

SEQ ID NO: 13578 - DNA, 19 bp, Homo sapiens
ttcaagaactccgtacaat

SEQ ID NO: 13579 - DNA, 22 bp, Homo sapiens
atgctttaatcttgctttatcg

SEQ ID NO: 13580 - DNA, 20 bp, Homo sapiens
ccaggcttaggaaagctaac

SEQ ID NO: 13581 - DNA, 24 bp, Homo sapiens
gttttcctgctttctaaacctatg

SEQ ID NO: 13582 - DNA, 17 bp, Homo sapiens
tgctgaatgacaggttg

SEQ ID NO: 13583 - DNA, 24 bp, Homo sapiens
gtgagtgagatggagaacttattt

SEQ ID NO: 13584 - DNA, 16 bp, Homo sapiens
gtggtgctggtgtccc

SEQ ID NO: 13585 - DNA, 24 bp, Homo sapiens
tttactcacagaatgtttacacag

SEQ ID NO: 13586 - DNA, 20 bp, Homo sapiens
agggaaaatgcattatcagc

SEQ ID NO: 13587 - DNA, 22 bp, Homo sapiens
gtgccaattgatgtaggaacag

SEQ ID NO: 13588 - DNA, 23 bp, Homo sapiens
tgagagcagaaataaatgatacg

SEQ ID NO: 13589 - DNA, 24 bp, Homo sapiens
ggcatcattcttttgggaagtgga

SEQ ID NO: 13590 - DNA, 16 bp, Homo sapiens
ataggaggccagcatg

SEQ ID NO: 13591 - DNA, 19 bp, Homo sapiens
gcccctgttgaggagtatt

SEQ ID NO: 13592 - DNA, 24 bp, Homo sapiens
gagaaaataaagtcttaatttctc

SEQ ID NO: 13593 - DNA, 21 bp, Homo sapiens
ggtctgatcacaattttcctc

SEQ ID NO: 13594 - DNA, 20 bp, Homo sapiens
tgccagggaatctctaaagc

SEQ ID NO: 13595 - DNA, 20 bp, Homo sapiens
cctctagttcgctctacatg

SEQ ID NO: 13596 - DNA, 22 bp, Homo sapiens
ttgctgttgcaggcctattatg

SEQ ID NO: 13597 - DNA, 19 bp, Homo sapiens
gctagcaaaggaagttcac

SEQ ID NO: 13598 - DNA, 21 bp, Homo sapiens
acaggggcacgaacaatgagg

SEQ ID NO: 13599 - DNA, 21 bp, Homo sapiens
atccttttgcaatgcatagta

SEQ ID NO: 13600 - DNA, 21 bp, Homo sapiens
ggaagagaacattccgttcat

SEQ ID NO: 13601 - DNA, 20 bp, Homo sapiens
gttttcatccacttgaactg

SEQ ID NO: 13602 - DNA, 23 bp, Homo sapiens
attcctaagcatccaattttggc

SEQ ID NO: 13603 - DNA, 22 bp, Homo sapiens
caacgaaaagctttttaacttc

SEQ ID NO: 13604 - DNA, 23 bp, Homo sapiens
ggcaggaaagaatttgatttcca

SEQ ID NO: 13605 - DNA, 20 bp, Homo sapiens
gcagccttcaaaaggaggaa

SEQ ID NO: 13606 - DNA, 23 bp, Homo sapiens
atttttaatattttatcagcatc

SEQ ID NO: 13607 - DNA, 28 bp, Homo sapiens
ataaaaaattagtagtagtaatgaggag

SEQ ID NO: 13608 - DNA, 23 bp, Homo sapiens
gacagttgaacagcctatcgaag

SEQ ID NO: 13609 - DNA, 21 bp, Homo sapiens
catagctgtagacaatgtaga

SEQ ID NO: 13610 - DNA, 23 bp, Homo sapiens
atttcaaccttccccactcagaa

SEQ ID NO: 13611 - DNA, 20 bp, Homo sapiens
tccattagtgtgcttttctc

SEQ ID NO: 13612 - DNA, 21 bp, Homo sapiens
tttgaaggacacaggccttgc

SEQ ID NO: 13613 - DNA, 24 bp, Homo sapiens
aggatcttcaacttagactgagaa

SEQ ID NO: 13614 - DNA, 20 bp, Homo sapiens
ggagctgctccatcttcatc

SEQ ID NO: 13615 - DNA, 22 bp, Homo sapiens
gattgggcttaattgtaaggaa

SEQ ID NO: 13616 - DNA, 18 bp, Homo sapiens
gggcgtaggaaaggctgg

SEQ ID NO: 13617 - DNA, 19 bp, Homo sapiens
ccccatggactttgcaagg

SEQ ID NO: 13618 - DNA, 22 bp, Homo sapiens
tactgggtaaaaattagaaagc

SEQ ID NO: 13619 - DNA, 19 bp, Homo sapiens
gcccatcagaaactccgtg

SEQ ID NO: 13620 - DNA, 24 bp, Homo sapiens
tcaattctaatatcagagtgtact

SEQ ID NO: 13621 - DNA, 17 bp, Homo sapiens
tgagccagttcccaccc

SEQ ID NO: 13622 - DNA, 23 bp, Homo sapiens
aatataggtaagtcattcaatga

SEQ ID NO: 13623 - DNA, 19 bp, Homo sapiens
agagctggttctgattctg

SEQ ID NO: 13624 - DNA, 24 bp, Homo sapiens
agactacagagatgaataatgtag

SEQ ID NO: 13625 - DNA, 21 bp, Homo sapiens
atcaaatgcaattgcaatgtg

SEQ ID NO: 13626 - DNA, 22 bp, Homo sapiens
acaattagacagcatcattacc

SEQ ID NO: 13627 - DNA, 19 bp, Homo sapiens
ggttctttcccagtgtctc

SEQ ID NO: 13628 - DNA, 17 bp, Homo sapiens
acagggtccttgtgctg

SEQ ID NO: 13629 - DNA, 26 bp, Homo sapiens
ctaacttcattaattaataagtgtag

SEQ ID NO: 13630 - DNA, 19 bp, Homo sapiens
tcgggctttcaagaaacag

SEQ ID NO: 13631 - DNA, 23 bp, Homo sapiens
caggctcagacaaataaaattct

SEQ ID NO: 13632 - DNA, 19 bp, Homo sapiens
actcaattgtgagactgtg

SEQ ID NO: 13633 - DNA, 24 bp, Homo sapiens
tttaggaaatcagtagcctgataa

SEQ ID NO: 13634 - DNA, 18 bp, Homo sapiens
gcatgattgatgcgagcc

SEQ ID NO: 13635 - DNA, 23 bp, Homo sapiens
aaaatgcagccacgatctgatac

SEQ ID NO: 13636 - DNA, 22 bp, Homo sapiens
cactccccaagtcatagctgaa

SEQ ID NO: 13637 - DNA, 24 bp, Homo sapiens
gtttgactttgcatgcttttgttt

SEQ ID NO: 13638 - DNA, 16 bp, Homo sapiens
ccttgtgccactggcc

SEQ ID NO: 13639 - DNA, 22 bp, Homo sapiens
tgaatccggcttgcttttttac

SEQ ID NO: 13640 - DNA, 17 bp, Homo sapiens
atgctgatggctgccac

SEQ ID NO: 13641 - DNA, 23 bp, Homo sapiens
agctgagaaatggattgccctac

SEQ ID NO: 13642 - DNA, 24 bp, Homo sapiens
acttattttatttttagcttctgc

SEQ ID NO: 13643 - DNA, 21 bp, Homo sapiens
ccccaccaaaatcaatgatgg

SEQ ID NO: 13644 - DNA, 22 bp, Homo sapiens
acttctcattatcttaatctac

SEQ ID NO: 13645 - DNA, 19 bp, Homo sapiens
taatgggcttagcgcatac

SEQ ID NO: 13646 - DNA, 17 bp, Homo sapiens
gggactgatggttctgt

SEQ ID NO: 13647 - DNA, 24 bp, Homo sapiens
ttggtaacatcgttagagtcctta

SEQ ID NO: 13648 - DNA, 19 bp, Homo sapiens
agttgatgggtaacccacc

SEQ ID NO: 13649 - DNA, 23 bp, Homo sapiens
ggcattaatgactcctttctttt

SEQ ID NO: 13650 - DNA, 24 bp, Homo sapiens
aaatgaatcagccatatatttaag

SEQ ID NO: 13651 - DNA, 17 bp, Homo sapiens
agatggggcttccaaca

SEQ ID NO: 13652 - DNA, 16 bp, Homo sapiens
ttttcatgggcccatg

SEQ ID NO: 13653 - DNA, 20 bp, Homo sapiens
tgggaatgctgtatgttggt

SEQ ID NO: 13654 - DNA, 20 bp, Homo sapiens
aacaaataaacaacaaaccc

SEQ ID NO: 13655 - DNA, 17 bp, Homo sapiens
cgcagccatcaatgcta

SEQ ID NO: 13656 - DNA, 19 bp, Homo sapiens
ttgggggatatcccatcct

SEQ ID NO: 13657 - DNA, 20 bp, Homo sapiens
acatggaagctggaggtggg

SEQ ID NO: 13658 - DNA, 22 bp, Homo sapiens
tgactgtattctacataaaggc

SEQ ID NO: 13659 - DNA, 21 bp, Homo sapiens
tttggcaaaaccggttccgtc

SEQ ID NO: 13660 - DNA, 23 bp, Homo sapiens
tgatctgaatgtttaggtgacct

SEQ ID NO: 13661 - DNA, 23 bp, Homo sapiens
agcaagaagttagtatttgtatc

SEQ ID NO: 13662 - DNA, 19 bp, Homo sapiens
gccgatctggaacaaccca

SEQ ID NO: 13663 - DNA, 23 bp, Homo sapiens
tggcttaaataaaggatactagt

SEQ ID NO: 13664 - DNA, 19 bp, Homo sapiens
gctcagaggggaacatatt

SEQ ID NO: 13665 - DNA, 17 bp, Homo sapiens
tcccactttgaatccac

SEQ ID NO: 13666 - DNA, 20 bp, Homo sapiens
tctgaaacttatagccctca

SEQ ID NO: 13667 - DNA, 20 bp, Homo sapiens
gatccccagaagaactccag

SEQ ID NO: 13668 - DNA, 22 bp, Homo sapiens
agtcatgcattgtacacgtttg

SEQ ID NO: 13669 - DNA, 20 bp, Homo sapiens
gctgacactcaccttttcat

SEQ ID NO: 13670 - DNA, 18 bp, Homo sapiens
tcattttacagttggtgg

SEQ ID NO: 13671 - DNA, 21 bp, Homo sapiens
ccacacatggatgatatctac

SEQ ID NO: 13672 - DNA, 23 bp, Homo sapiens
tgaattccgcacaactacaacga

SEQ ID NO: 13673 - DNA, 22 bp, Homo sapiens
acatacaatttagctttctccc

SEQ ID NO: 13674 - DNA, 23 bp, Homo sapiens
tggaatgggtattgaaatgattg

SEQ ID NO: 13675 - DNA, 20 bp, Homo sapiens
caccattgtccacatgaaac

SEQ ID NO: 13676 - DNA, 21 bp, Homo sapiens
tcaatatgcccagttacatcc

SEQ ID NO: 13677 - DNA, 17 bp, Homo sapiens
ccatcacacaaatgccc

SEQ ID NO: 13678 - DNA, 21 bp, Homo sapiens
catttgtatgtgtgaaccatc

SEQ ID NO: 13679 - DNA, 18 bp, Homo sapiens
cccatcgactgtgagctc

SEQ ID NO: 13680 - DNA, 22 bp, Homo sapiens
ctatttcctactttccagttga

SEQ ID NO: 13681 - DNA, 17 bp, Homo sapiens
gggtcatttgtgtcagc

SEQ ID NO: 13682 - DNA, 24 bp, Homo sapiens
gtctatgatgctggggttccaggg

SEQ ID NO: 13683 - DNA, 19 bp, Homo sapiens
agagcaaagaaattgttgc

SEQ ID NO: 13684 - DNA, 19 bp, Homo sapiens
gatcaaacaccgcattgag

SEQ ID NO: 13685 - DNA, 21 bp, Homo sapiens
cacataagcacacattcttag

SEQ ID NO: 13686 - DNA, 22 bp, Homo sapiens
gcccaaacccagcatctacatc

SEQ ID NO: 13687 - DNA, 22 bp, Homo sapiens
acactggaaattttaggtaagg

SEQ ID NO: 13688 - DNA, 18 bp, Homo sapiens
ggccaaactgcttgaggt

SEQ ID NO: 13689 - DNA, 24 bp, Homo sapiens
tagtaaggctaaaaacaaaaccac

SEQ ID NO: 13690 - DNA, 19 bp, Homo sapiens
tgtgcctttggtgagcttc

SEQ ID NO: 13691 - DNA, 22 bp, Homo sapiens
cagttgactttgaaacatgctc

SEQ ID NO: 13692 - DNA, 16 bp, Homo sapiens
aggttgaacgcccctc

SEQ ID NO: 13693 - DNA, 20 bp, Homo sapiens
tcttgcattgcctttttcag

SEQ ID NO: 13694 - DNA, 20 bp, Homo sapiens
acttgttttgacagactctt

SEQ ID NO: 13695 - DNA, 19 bp, Homo sapiens
ttgcatcagatccctgaag

SEQ ID NO: 13696 - DNA, 24 bp, Homo sapiens
acatgcacaaattagtttaattaa

SEQ ID NO: 13697 - DNA, 19 bp, Homo sapiens
aaggccctggaactgaggg

SEQ ID NO: 13698 - DNA, 19 bp, Homo sapiens
aaattcagtctggagtctg

SEQ ID NO: 13699 - DNA, 22 bp, Homo sapiens
ttctttggtttagtgggtggag

SEQ ID NO: 13700 - DNA, 21 bp, Homo sapiens
acttttttccttacctgtccc

SEQ ID NO: 13701 - DNA, 26 bp, Homo sapiens
aacccaagtataaatggaaaaaaaag

SEQ ID NO: 13702 - DNA, 24 bp, Homo sapiens
ctagacaataacaccttacaaatt

SEQ ID NO: 13703 - DNA, 18 bp, Homo sapiens
gcagcaaagagaagtgtc

SEQ ID NO: 13704 - DNA, 22 bp, Homo sapiens
ggactttaaaatatgcatttcc

SEQ ID NO: 13705 - DNA, 18 bp, Homo sapiens
agctcctttctcaaaggg

SEQ ID NO: 13706 - DNA, 16 bp, Homo sapiens
ggccttcttccacccc

SEQ ID NO: 13707 - DNA, 24 bp, Homo sapiens
tgtaaattcctggctctgtaggag

SEQ ID NO: 13708 - DNA, 23 bp, Homo sapiens
ttttcaacttaaaaattaccttg

SEQ ID NO: 13709 - DNA, 24 bp, Homo sapiens
aatgaaaagggttcctgctgtgag

SEQ ID NO: 13710 - DNA, 19 bp, Homo sapiens
aggttcacaggggcctgct

SEQ ID NO: 13711 - DNA, 19 bp, Homo sapiens
tgttcagccacgaggaggg

SEQ ID NO: 13712 - DNA, 20 bp, Homo sapiens
atgtgtttctcgggttgtaa

SEQ ID NO: 13713 - DNA, 24 bp, Homo sapiens
ggtctgcttgagaaacttaaagaa

SEQ ID NO: 13714 - DNA, 20 bp, Homo sapiens
acgtcaagcaaaagcagaca

SEQ ID NO: 13715 - DNA, 17 bp, Homo sapiens
ggatgtcagcaaagggc

SEQ ID NO: 13716 - DNA, 21 bp, Homo sapiens
ttatacttgtgaatatatgcc

SEQ ID NO: 13717 - DNA, 17 bp, Homo sapiens
gctgctcgcttgctttt

SEQ ID NO: 13718 - DNA, 24 bp, Homo sapiens
acagactgatttataatctacttt

SEQ ID NO: 13719 - DNA, 16 bp, Homo sapiens
tccgcccagcaccagg

SEQ ID NO: 13720 - DNA, 19 bp, Homo sapiens
aaggattatggggacctgc

SEQ ID NO: 13721 - DNA, 19 bp, Homo sapiens
ttggttacttcctttgtgc

SEQ ID NO: 13722 - DNA, 20 bp, Homo sapiens
tgtgaagaatccaaggtctg

SEQ ID NO: 13723 - DNA, 26 bp, Homo sapiens
agaaaatttgatataaaatataggtc

SEQ ID NO: 13724 - DNA, 21 bp, Homo sapiens
agaagtcaagaagaacggaag

SEQ ID NO: 13725 - DNA, 22 bp, Homo sapiens
agcgaagtctgtttctataata

SEQ ID NO: 13726 - DNA, 19 bp, Homo sapiens
atgcttccaattgccaaac

SEQ ID NO: 13727 - DNA, 24 bp, Homo sapiens
aactaattggcatctccaattcag

SEQ ID NO: 13728 - DNA, 18 bp, Homo sapiens
agtgtgagcatccaccca

SEQ ID NO: 13729 - DNA, 24 bp, Homo sapiens
aaccaagtgggagcattgagtgaa

SEQ ID NO: 13730 - DNA, 24 bp, Homo sapiens
ggaggaaagatacaggttgtccat

SEQ ID NO: 13731 - DNA, 22 bp, Homo sapiens
gttcacacaaaattttttcccc

SEQ ID NO: 13732 - DNA, 21 bp, Homo sapiens
agtattctattgcactagagt

SEQ ID NO: 13733 - DNA, 22 bp, Homo sapiens
ccaccctgatcttggagtcatc

SEQ ID NO: 13734 - DNA, 23 bp, Homo sapiens
ccaagaataagataacatggagt

SEQ ID NO: 13735 - DNA, 19 bp, Homo sapiens
accacaagtggaaacttgc

SEQ ID NO: 13736 - DNA, 21 bp, Homo sapiens
gccttttatcaaccaaccctt

SEQ ID NO: 13737 - DNA, 24 bp, Homo sapiens
ttcttaattgtgtattatttttac

SEQ ID NO: 13738 - DNA, 21 bp, Homo sapiens
acgtctctcaagccaatatac

SEQ ID NO: 13739 - DNA, 24 bp, Homo sapiens
tacgcaatccaatatgtgtcttta

SEQ ID NO: 13740 - DNA, 20 bp, Homo sapiens
gggacaaaaatggaggcaaa

SEQ ID NO: 13741 - DNA, 26 bp, Homo sapiens
accaagtgaaaacattgtaattttag

SEQ ID NO: 13742 - DNA, 23 bp, Homo sapiens
gtgtgtcttgatgtttaattttc

SEQ ID NO: 13743 - DNA, 23 bp, Homo sapiens
tccctgtatatctgccaaggata

SEQ ID NO: 13744 - DNA, 22 bp, Homo sapiens
ctcaattgacttgctgttaaaa

SEQ ID NO: 13745 - DNA, 20 bp, Homo sapiens
cctagtctgtccacttcagt

SEQ ID NO: 13746 - DNA, 24 bp, Homo sapiens
agaacctaaatgttttatatattt

SEQ ID NO: 13747 - DNA, 21 bp, Homo sapiens
acaaaagaatcctaccttcct

SEQ ID NO: 13748 - DNA, 24 bp, Homo sapiens
ggcacagtcagccttattaattat

SEQ ID NO: 13749 - DNA, 24 bp, Homo sapiens
ttaataactttggttgtcagtagc

SEQ ID NO: 13750 - DNA, 26 bp, Homo sapiens
aaaactctaggcattaaatacttttc

SEQ ID NO: 13751 - DNA, 23 bp, Homo sapiens
agataataatctgttaacttgtt

SEQ ID NO: 13752 - DNA, 21 bp, Homo sapiens
tggaagaaacactcagctatc

SEQ ID NO: 13753 - DNA, 20 bp, Homo sapiens
tgtgcaacagaaaaggttgc

SEQ ID NO: 13754 - DNA, 19 bp, Homo sapiens
gtgtgaaagatgggtccag

SEQ ID NO: 13755 - DNA, 24 bp, Homo sapiens
aaataatgggttgctactttttat

SEQ ID NO: 13756 - DNA, 21 bp, Homo sapiens
ttctgtgatgtagagaccttc

SEQ ID NO: 13757 - DNA, 23 bp, Homo sapiens
ccatcaaccttaaactgaaatcc

SEQ ID NO: 13758 - DNA, 20 bp, Homo sapiens
agtcaagtgtacacttgctt

SEQ ID NO: 13759 - DNA, 20 bp, Homo sapiens
aagttttgatgttgacggac

SEQ ID NO: 13760 - DNA, 19 bp, Homo sapiens
tggacattctgaaagtgtc

SEQ ID NO: 13761 - DNA, 19 bp, Homo sapiens
gggaggtctgacatacaga

SEQ ID NO: 13762 - DNA, 20 bp, Homo sapiens
cagaaaaaggtagtaaccga

SEQ ID NO: 13763 - DNA, 22 bp, Homo sapiens
ggatgggttcacttccattata

SEQ ID NO: 13764 - DNA, 24 bp, Homo sapiens
atgcaataactaaagtgttttcca

SEQ ID NO: 13765 - DNA, 18 bp, Homo sapiens
gcaactgctgtgttcact

SEQ ID NO: 13766 - DNA, 23 bp, Homo sapiens
gtctgtctgtactactttcaaaa

SEQ ID NO: 13767 - DNA, 21 bp, Homo sapiens
gggttaaggtagtcaataggc

SEQ ID NO: 13768 - DNA, 23 bp, Homo sapiens
tgttgtagggctactctcaggat

SEQ ID NO: 13769 - DNA, 23 bp, Homo sapiens
gctttctaattatgccattaact

SEQ ID NO: 13770 - DNA, 21 bp, Homo sapiens
accagaagaagtaactcgaac

SEQ ID NO: 13771 - DNA, 20 bp, Homo sapiens
ttttctgaaagaacaagtct

SEQ ID NO: 13772 - DNA, 19 bp, Homo sapiens
cgggagggtaatcacaagc

SEQ ID NO: 13773 - DNA, 21 bp, Homo sapiens
ccacatcttgaattttacacc

SEQ ID NO: 13774 - DNA, 16 bp, Homo sapiens
atccgcgccgctccac

SEQ ID NO: 13775 - DNA, 24 bp, Homo sapiens
gaatctcaaacacagggcacgggg

SEQ ID NO: 13776 - DNA, 24 bp, Homo sapiens
caggcggcccggcaggtacgggga

SEQ ID NO: 13777 - DNA, 18 bp, Homo sapiens
ccagtgtgcctccgactc

SEQ ID NO: 13778 - DNA, 23 bp, Homo sapiens
cccggccccagctgcgcggcgcc

SEQ ID NO: 13779 - DNA, 18 bp, Homo sapiens
gcgggatgagtgcggtgt

SEQ ID NO: 13780 - DNA, 20 bp, Homo sapiens
tttccctcgagcgcgaggaa

SEQ ID NO: 13781 - DNA, 17 bp, Homo sapiens
tacgccgccgagttctc

SEQ ID NO: 13782 - DNA, 17 bp, Homo sapiens
cctcttctgccccctgg

SEQ ID NO: 13783 - DNA, 19 bp, Homo sapiens
gcactacggcatcgcgggt

SEQ ID NO: 13784 - DNA, 24 bp, Homo sapiens
acctgaccatttggtattcaaggt

SEQ ID NO: 13785 - DNA, 18 bp, Homo sapiens
ttcagcccccttaccttc

SEQ ID NO: 13786 - DNA, 23 bp, Homo sapiens
ggtatcaattacttgataactcc

SEQ ID NO: 13787 - DNA, 24 bp, Homo sapiens
acattaatcaaagagtcaaaacct

SEQ ID NO: 13788 - DNA, 23 bp, Homo sapiens
agggatgaccttgattttttttc

SEQ ID NO: 13789 - DNA, 19 bp, Homo sapiens
aataagcttcatcctatgc

SEQ ID NO: 13790 - DNA, 24 bp, Homo sapiens
gctgggctaaggctttttagaagg

SEQ ID NO: 13791 - DNA, 22 bp, Homo sapiens
ccatcattccagtcaaagctac

SEQ ID NO: 13792 - DNA, 22 bp, Homo sapiens
taactcccgtagttgtgcagat

SEQ ID NO: 13793 - DNA, 17 bp, Homo sapiens
cgccactacaggtgatg

SEQ ID NO: 13794 - DNA, 24 bp, Homo sapiens
aaaaaaaccataattgttattttt

SEQ ID NO: 13795 - DNA, 19 bp, Homo sapiens
tagacttgcagtggccctg

SEQ ID NO: 13796 - DNA, 22 bp, Homo sapiens
ttttttgttgtttgttttttcc

SEQ ID NO: 13797 - DNA, 24 bp, Homo sapiens
tcgaagaaagaaaaataatcagcc

SEQ ID NO: 13798 - DNA, 24 bp, Homo sapiens
ttggagtgagaacaacgaacatgt

SEQ ID NO: 13799 - DNA, 21 bp, Homo sapiens
cttgtcccctgaagatatttc

SEQ ID NO: 13800 - DNA, 17 bp, Homo sapiens
tgggacactgccaaagc

SEQ ID NO: 13801 - DNA, 27 bp, Homo sapiens
tttatgtttgaataatcaaataataag

SEQ ID NO: 13802 - DNA, 18 bp, Homo sapiens
cctctggtttggctccaa

SEQ ID NO: 13803 - DNA, 24 bp, Homo sapiens
taggaattatttgatgttttgaca

SEQ ID NO: 13804 - DNA, 24 bp, Homo sapiens
tgaatacaataatgctaacatacc

SEQ ID NO: 13805 - DNA, 23 bp, Homo sapiens
agataaaatgcaatgttgaactt

SEQ ID NO: 13806 - DNA, 22 bp, Homo sapiens
tgttggaaaaagagaagaaaat

SEQ ID NO: 13807 - DNA, 21 bp, Homo sapiens
ggtgtatagtgttgattggag

SEQ ID NO: 13808 - DNA, 24 bp, Homo sapiens
aagtgttttaattttttttttaaa

SEQ ID NO: 13809 - DNA, 20 bp, Homo sapiens
gctcatgggatcaaactgtc

SEQ ID NO: 13810 - DNA, 21 bp, Homo sapiens
acagtcttgctttatatcaaa

SEQ ID NO: 13811 - DNA, 21 bp, Homo sapiens
aataatactttcatggcctct

SEQ ID NO: 13812 - DNA, 24 bp, Homo sapiens
tgcatatatataaatgtatatagt

SEQ ID NO: 13813 - DNA, 18 bp, Homo sapiens
tttacctgaggctgaagc

SEQ ID NO: 13814 - DNA, 23 bp, Homo sapiens
atttgaatttatccctcaagtaa

SEQ ID NO: 13815 - DNA, 20 bp, Homo sapiens
cgccacctaatggtaaaaac

SEQ ID NO: 13816 - DNA, 22 bp, Homo sapiens
tggaaagtctctgtgcaccttt

SEQ ID NO: 13817 - DNA, 24 bp, Homo sapiens
gaacacaaaagaatagtaatattc

SEQ ID NO: 13818 - DNA, 19 bp, Homo sapiens
cacatccctggttgttttg

SEQ ID NO: 13819 - DNA, 29 bp, Homo sapiens
ctatacattattatggtttaaaaaataag

SEQ ID NO: 13820 - DNA, 21 bp, Homo sapiens
tgatgtgcaggaatcacgatt

SEQ ID NO: 13821 - DNA, 23 bp, Homo sapiens
gcagtgtatttttacttgactta

SEQ ID NO: 13822 - DNA, 24 bp, Homo sapiens
gcataggatagagccatacactat

SEQ ID NO: 13823 - DNA, 22 bp, Homo sapiens
tgtgatgggaaatgatcaagtc

SEQ ID NO: 13824 - DNA, 22 bp, Homo sapiens
ccacataaacaaagacaaataa

SEQ ID NO: 13825 - DNA, 24 bp, Homo sapiens
gatgtgaaggcagcaggagtaaga

SEQ ID NO: 13826 - DNA, 23 bp, Homo sapiens
cattaattagaaaggaaagggac

SEQ ID NO: 13827 - DNA, 23 bp, Homo sapiens
tgtgactggtgtaaatacaatga

SEQ ID NO: 13828 - DNA, 22 bp, Homo sapiens
ctgtctatacttgttatacaac

SEQ ID NO: 13829 - DNA, 20 bp, Homo sapiens
cactggttgtcgtacattcc

SEQ ID NO: 13830 - DNA, 21 bp, Homo sapiens
tcagaaagcagatgttgtttc

SEQ ID NO: 13831 - DNA, 23 bp, Homo sapiens
aagatgaaaacttactttcaccc

SEQ ID NO: 13832 - DNA, 22 bp, Homo sapiens
tgtcacagtttatgtttctctg

SEQ ID NO: 13833 - DNA, 24 bp, Homo sapiens
cagaacactttttaatatacactt

SEQ ID NO: 13834 - DNA, 22 bp, Homo sapiens
gactgtagtttgagaggctggg

SEQ ID NO: 13835 - DNA, 20 bp, Homo sapiens
aattgggtaacaaaaacaca

SEQ ID NO: 13836 - DNA, 20 bp, Homo sapiens
acctatgctattaggagggt

SEQ ID NO: 13837 - DNA, 18 bp, Homo sapiens
gccagcacagaagcatga

SEQ ID NO: 13838 - DNA, 20 bp, Homo sapiens
attttaagtgacagctctga

SEQ ID NO: 13839 - DNA, 24 bp, Homo sapiens
tacctggtatttcacaatgaaatg

SEQ ID NO: 13840 - DNA, 23 bp, Homo sapiens
tgatcatagaaagcagtgttata

SEQ ID NO: 13841 - DNA, 22 bp, Homo sapiens
tttcatgttagtaagagtaatc

SEQ ID NO: 13842 - DNA, 21 bp, Homo sapiens
ttttgtagttttcaccatttc

SEQ ID NO: 13843 - DNA, 24 bp, Homo sapiens
caggaaaaatataatattaatcct

SEQ ID NO: 13844 - DNA, 20 bp, Homo sapiens
tcaggctttgaaaagttcca

SEQ ID NO: 13845 - DNA, 22 bp, Homo sapiens
gcttaatagtggggttctgtat

SEQ ID NO: 13846 - DNA, 21 bp, Homo sapiens
actgaagtctaaaccacaagt

SEQ ID NO: 13847 - DNA, 24 bp, Homo sapiens
gctatgtcaaatatctattttttc

SEQ ID NO: 13848 - DNA, 19 bp, Homo sapiens
tgaacttgggcagaagaga

SEQ ID NO: 13849 - DNA, 24 bp, Homo sapiens
ccttttatttatcttcacagattc

SEQ ID NO: 13850 - DNA, 21 bp, Homo sapiens
agctaaaatggcaacaatttt

SEQ ID NO: 13851 - DNA, 24 bp, Homo sapiens
aaacagtggagcatcatacagagt

SEQ ID NO: 13852 - DNA, 21 bp, Homo sapiens
gtcaactttcttgatacctct

SEQ ID NO: 13853 - DNA, 19 bp, Homo sapiens
tcatcccaagaacagtcag

SEQ ID NO: 13854 - DNA, 23 bp, Homo sapiens
agccctatgttttccctattcaa

SEQ ID NO: 13855 - DNA, 21 bp, Homo sapiens
tctgaccaaagtagtgtatct

SEQ ID NO: 13856 - DNA, 23 bp, Homo sapiens
atgacttgagtttttgctgtcaa

SEQ ID NO: 13857 - DNA, 29 bp, Homo sapiens
aatgtctatgttttccatagttaatttat

SEQ ID NO: 13858 - DNA, 19 bp, Homo sapiens
tgttttctaggtggctgac

SEQ ID NO: 13859 - DNA, 22 bp, Homo sapiens
gattccagggtaaattggaaag

SEQ ID NO: 13860 - DNA, 23 bp, Homo sapiens
ccctgcttgtcttactattcctg

SEQ ID NO: 13861 - DNA, 20 bp, Homo sapiens
acaatgtttggaaaacagcc

SEQ ID NO: 13862 - DNA, 23 bp, Homo sapiens
gctagaatagatgaccacaaaac

SEQ ID NO: 13863 - DNA, 20 bp, Homo sapiens
agagatactggaagattgcc

SEQ ID NO: 13864 - DNA, 24 bp, Homo sapiens
caggaggcacttgttctgctgctg

SEQ ID NO: 13865 - DNA, 21 bp, Homo sapiens
ataaaaaggggatcttcactc

SEQ ID NO: 13866 - DNA, 24 bp, Homo sapiens
caggtggtatcagtcttgctcaag

SEQ ID NO: 13867 - DNA, 20 bp, Homo sapiens
catctgaatcgctttgtgtc

SEQ ID NO: 13868 - DNA, 22 bp, Homo sapiens
ggggatacctggtttcattggc

SEQ ID NO: 13869 - DNA, 23 bp, Homo sapiens
aaaagacatttctatttagtgcc

SEQ ID NO: 13870 - DNA, 24 bp, Homo sapiens
gcactttttggttgtctctgccga

SEQ ID NO: 13871 - DNA, 24 bp, Homo sapiens
gcagtgagctatgattgtgtcacc

SEQ ID NO: 13872 - DNA, 20 bp, Homo sapiens
tcctagaaaattctcaacgc

SEQ ID NO: 13873 - DNA, 22 bp, Homo sapiens
tggatcaaaaacgcagaaaata

SEQ ID NO: 13874 - DNA, 24 bp, Homo sapiens
tattcttacaattgaaatggccag

SEQ ID NO: 13875 - DNA, 23 bp, Homo sapiens
ggatccacctctgatgttcactg

SEQ ID NO: 13876 - DNA, 22 bp, Homo sapiens
ggtacgttatcccatgagccaa

SEQ ID NO: 13877 - DNA, 22 bp, Homo sapiens
tctaacatttacaattctgcca

SEQ ID NO: 13878 - DNA, 18 bp, Homo sapiens
aatgagctctccaaccac

SEQ ID NO: 13879 - DNA, 19 bp, Homo sapiens
tatagccccctgtgaagac

SEQ ID NO: 13880 - DNA, 24 bp, Homo sapiens
tgctctagcagacttttctggtac

SEQ ID NO: 13881 - DNA, 17 bp, Homo sapiens
ttacatcattccctggc

SEQ ID NO: 13882 - DNA, 20 bp, Homo sapiens
gattgcagggtttcaccagg

SEQ ID NO: 13883 - DNA, 20 bp, Homo sapiens
gggaacgtggacggggccgt

SEQ ID NO: 13884 - DNA, 24 bp, Homo sapiens
cagtttgagaactggtataagaag

SEQ ID NO: 13885 - DNA, 17 bp, Homo sapiens
ggtcaggctggaggagg

SEQ ID NO: 13886 - DNA, 20 bp, Homo sapiens
ctcttggtatcacgactacg

SEQ ID NO: 13887 - DNA, 21 bp, Homo sapiens
cagaaagctcaacactgctta

SEQ ID NO: 13888 - DNA, 16 bp, Homo sapiens
gctctgctgctctggt

SEQ ID NO: 13889 - DNA, 23 bp, Homo sapiens
aataatgggcttctgatacttct

SEQ ID NO: 13890 - DNA, 16 bp, Homo sapiens
ctgccagaggagcccc

SEQ ID NO: 13891 - DNA, 16 bp, Homo sapiens
agccatcctcctgcct

SEQ ID NO: 13892 - DNA, 17 bp, Homo sapiens
atccacatacggagcct

SEQ ID NO: 13893 - DNA, 23 bp, Homo sapiens
tttgtgagcaactctaactatgc

SEQ ID NO: 13894 - DNA, 24 bp, Homo sapiens
taaaaaagaaaatgaaataaaacc

SEQ ID NO: 13895 - DNA, 24 bp, Homo sapiens
cttttgtggacaggatggtgatcg

SEQ ID NO: 13896 - DNA, 23 bp, Homo sapiens
ccatgaccaggcttcaggacaag

SEQ ID NO: 13897 - DNA, 23 bp, Homo sapiens
ggacagagaggatgggagggtgt

SEQ ID NO: 13898 - DNA, 18 bp, Homo sapiens
gctcacccccttgtctgc

SEQ ID NO: 13899 - DNA, 17 bp, Homo sapiens
gtgtgaaccatcgtgcc

SEQ ID NO: 13900 - DNA, 18 bp, Homo sapiens
aggatttggtgtgagcga

SEQ ID NO: 13901 - DNA, 24 bp, Homo sapiens
gtagatatttggtcccctgaacta

SEQ ID NO: 13902 - DNA, 16 bp, Homo sapiens
cggtcgtgatgtggtc

SEQ ID NO: 13903 - DNA, 16 bp, Homo sapiens
cttgaacagcacatgc

SEQ ID NO: 13904 - DNA, 22 bp, Homo sapiens
cgtttctctgcatcaccacatg

SEQ ID NO: 13905 - DNA, 22 bp, Homo sapiens
ctagccgagggcagggagggag

SEQ ID NO: 13906 - DNA, 16 bp, Homo sapiens
caccgtgaccctctgt

SEQ ID NO: 13907 - DNA, 21 bp, Homo sapiens
gcaggctcgttggccacagac

SEQ ID NO: 13908 - DNA, 16 bp, Homo sapiens
gggcctggcgctgccg

SEQ ID NO: 13909 - DNA, 20 bp, Homo sapiens
caccacttcttccatcacct

SEQ ID NO: 13910 - DNA, 24 bp, Homo sapiens
atgcagaggaagtgatgcagatgt

SEQ ID NO: 13911 - DNA, 17 bp, Homo sapiens
ggccaggagggaaggga

SEQ ID NO: 13912 - DNA, 16 bp, Homo sapiens
acttcaacctgcttcg

SEQ ID NO: 13913 - DNA, 21 bp, Homo sapiens
agcaggtgcacagcagagact

SEQ ID NO: 13914 - DNA, 21 bp, Homo sapiens
tggctctgctatctcctagat

SEQ ID NO: 13915 - DNA, 22 bp, Homo sapiens
aatcccatagcggtcacacatc

SEQ ID NO: 13916 - DNA, 16 bp, Homo sapiens
ctctccagggtcctgg

SEQ ID NO: 13917 - DNA, 24 bp, Homo sapiens
gtacggaaagcgttggcaccaagc

SEQ ID NO: 13918 - DNA, 18 bp, Homo sapiens
gttgagggcagctcaggg

SEQ ID NO: 13919 - DNA, 18 bp, Homo sapiens
gaagcccttccctcggat

SEQ ID NO: 13920 - DNA, 18 bp, Homo sapiens
gcacttcctctgagagcc

SEQ ID NO: 13921 - DNA, 24 bp, Homo sapiens
tcaatgggaaacctttctatttcc

SEQ ID NO: 13922 - DNA, 24 bp, Homo sapiens
ctccatttggagccatttgcctca

SEQ ID NO: 13923 - DNA, 24 bp, Homo sapiens
tctacacactccctgtggggatcc

SEQ ID NO: 13924 - DNA, 16 bp, Homo sapiens
ggtgaccagaagcagc

SEQ ID NO: 13925 - DNA, 20 bp, Homo sapiens
ttggctgtcataggtgcagc

SEQ ID NO: 13926 - DNA, 20 bp, Homo sapiens
catcctcatgcttgttgaca

SEQ ID NO: 13927 - DNA, 16 bp, Homo sapiens
cctgctggagggcagg

SEQ ID NO: 13928 - DNA, 18 bp, Homo sapiens
tggtgacagccacagtgc

SEQ ID NO: 13929 - DNA, 20 bp, Homo sapiens
tctgattgctgcatctctgc

SEQ ID NO: 13930 - DNA, 18 bp, Homo sapiens
cagtgacgtctgtgcagt

SEQ ID NO: 13931 - DNA, 16 bp, Homo sapiens
aaaatgggcctcccac

SEQ ID NO: 13932 - DNA, 18 bp, Homo sapiens
ccaggtgtcagcctctgg

SEQ ID NO: 13933 - DNA, 19 bp, Homo sapiens
cccatccacctgtcttggg

SEQ ID NO: 13934 - DNA, 21 bp, Homo sapiens
tttggatgcagaaaacaaagt

SEQ ID NO: 13935 - DNA, 24 bp, Homo sapiens
aaagacctcccttaggcatgtccc

SEQ ID NO: 13936 - DNA, 22 bp, Homo sapiens
ggctggtgaattaccagatctc

SEQ ID NO: 13937 - DNA, 19 bp, Homo sapiens
ttcgtgcatcaggtacggc

SEQ ID NO: 13938 - DNA, 20 bp, Homo sapiens
ctgtttgtgtgactcaggtc

SEQ ID NO: 13939 - DNA, 18 bp, Homo sapiens
gtcccattcgccacgact

SEQ ID NO: 13940 - DNA, 22 bp, Homo sapiens
taaatttaaaaaaagcaacaga

SEQ ID NO: 13941 - DNA, 20 bp, Homo sapiens
acatcaccgtcaccaccagc

SEQ ID NO: 13942 - DNA, 24 bp, Homo sapiens
tcataggtggaagggaatctgtga

SEQ ID NO: 13943 - DNA, 24 bp, Homo sapiens
ttttcaactacgctggactgcagc

SEQ ID NO: 13944 - DNA, 21 bp, Homo sapiens
caaacagggaacaaacagagc

SEQ ID NO: 13945 - DNA, 22 bp, Homo sapiens
cagtcctcccatcctaggtatc

SEQ ID NO: 13946 - DNA, 18 bp, Homo sapiens
ctcaccactgtcttgctc

SEQ ID NO: 13947 - DNA, 18 bp, Homo sapiens
aggcctgtgagctgaggt

SEQ ID NO: 13948 - DNA, 23 bp, Homo sapiens
ggtgtcgtgtacagaagtacaga

SEQ ID NO: 13949 - DNA, 20 bp, Homo sapiens
gtggtcttcctggtagggac

SEQ ID NO: 13950 - DNA, 24 bp, Homo sapiens
atatgtgttctggacaaagtaacc

SEQ ID NO: 13951 - DNA, 20 bp, Homo sapiens
cttgctctgggtcccctgac

SEQ ID NO: 13952 - DNA, 17 bp, Homo sapiens
acacactcacccccacc

SEQ ID NO: 13953 - DNA, 16 bp, Homo sapiens
ccactctgtgaaggcc

SEQ ID NO: 13954 - DNA, 18 bp, Homo sapiens
acatcagcaacctggtcc

SEQ ID NO: 13955 - DNA, 17 bp, Homo sapiens
ggtgtgtgcaatggagg

SEQ ID NO: 13956 - DNA, 17 bp, Homo sapiens
tgaatggggtcgacacg

SEQ ID NO: 13957 - DNA, 16 bp, Homo sapiens
tccctggtggcagggt

SEQ ID NO: 13958 - DNA, 24 bp, Homo sapiens
gatagtagggcgcctcctcatgcc

SEQ ID NO: 13959 - DNA, 16 bp, Homo sapiens
gggagggcaggggccc

SEQ ID NO: 13960 - DNA, 16 bp, Homo sapiens
cgtctggctggaaggc

SEQ ID NO: 13961 - DNA, 19 bp, Homo sapiens
ccctcatgctctagcgtgt

SEQ ID NO: 13962 - DNA, 23 bp, Homo sapiens
atggggtagatcaggctacctat

SEQ ID NO: 13963 - DNA, 20 bp, Homo sapiens
cacaagagtggtgctgagga

SEQ ID NO: 13964 - DNA, 19 bp, Homo sapiens
gaccccccaccatcccacc

SEQ ID NO: 13965 - DNA, 18 bp, Homo sapiens
gctgggtgtggtacgaac

SEQ ID NO: 13966 - DNA, 24 bp, Homo sapiens
atgctgttcagcagccgtgccccc

SEQ ID NO: 13967 - DNA, 16 bp, Homo sapiens
gccagttccctccagc

SEQ ID NO: 13968 - DNA, 24 bp, Homo sapiens
ataggaatgggcactgccaatcct

SEQ ID NO: 13969 - DNA, 18 bp, Homo sapiens
cttttgggggcctaggag

SEQ ID NO: 13970 - DNA, 16 bp, Homo sapiens
cggcaggatcacctcc

SEQ ID NO: 13971 - DNA, 23 bp, Homo sapiens
tatgtgtcagggcttgtgctagg

SEQ ID NO: 13972 - DNA, 20 bp, Homo sapiens
ctggctgatgtcattgaagc

SEQ ID NO: 13973 - DNA, 16 bp, Homo sapiens
gccctggcagttgacc

SEQ ID NO: 13974 - DNA, 16 bp, Homo sapiens
ccgctgtgggaggtgc

SEQ ID NO: 13975 - DNA, 16 bp, Homo sapiens
cgcccccaagcccgtt

SEQ ID NO: 13976 - DNA, 17 bp, Homo sapiens
gcttccgcgccgacttc

SEQ ID NO: 13977 - DNA, 24 bp, Homo sapiens
caggggaagaagtctgcggggggc

SEQ ID NO: 13978 - DNA, 16 bp, Homo sapiens
cgggatgctgtacccc

SEQ ID NO: 13979 - DNA, 17 bp, Homo sapiens
gccctgccccgagatcg

SEQ ID NO: 13980 - DNA, 16 bp, Homo sapiens
tgcctgggcggcgctc

SEQ ID NO: 13981 - DNA, 23 bp, Homo sapiens
tcgaagccccggcgtcggttgtc

SEQ ID NO: 13982 - DNA, 19 bp, Homo sapiens
gcgcttttcttagcgccgc

SEQ ID NO: 13983 - DNA, 24 bp, Homo sapiens
ctccttgcactcccgcgacgggct

SEQ ID NO: 13984 - DNA, 16 bp, Homo sapiens
ggcgcatcacgacacc

SEQ ID NO: 13985 - DNA, 18 bp, Homo sapiens
gccccacaacaacggccc

SEQ ID NO: 13986 - DNA, 24 bp, Homo sapiens
ctaccgggcagcgcccggccccgc

SEQ ID NO: 13987 - DNA, 16 bp, Homo sapiens
gaggtcccactcacct

SEQ ID NO: 13988 - DNA, 16 bp, Homo sapiens
cctcaagcgcagtgcc

SEQ ID NO: 13989 - DNA, 16 bp, Homo sapiens
gaggcaggtctggcgc

SEQ ID NO: 13990 - DNA, 24 bp, Homo sapiens
aggaggtcgtcagtccggtcttgt

SEQ ID NO: 13991 - DNA, 23 bp, Homo sapiens
gtgcaggcttcctaggtaatttt

SEQ ID NO: 13992 - DNA, 17 bp, Homo sapiens
ggaaccgcccaacatgg

SEQ ID NO: 13993 - DNA, 22 bp, Homo sapiens
cacaaaccggccaccccaaagc

SEQ ID NO: 13994 - DNA, 22 bp, Homo sapiens
tgtctgcccagttagaatgatc

SEQ ID NO: 13995 - DNA, 18 bp, Homo sapiens
aaaggtgccggtcgtagg

SEQ ID NO: 13996 - DNA, 22 bp, Homo sapiens
cccaaagactctttgcaagaag

SEQ ID NO: 13997 - DNA, 23 bp, Homo sapiens
gagccctgccttctccaggcccc

SEQ ID NO: 13998 - DNA, 23 bp, Homo sapiens
ctcctggccagagtgggaagctt

SEQ ID NO: 13999 - DNA, 24 bp, Homo sapiens
cttgggccacggcaagtaccttgt

SEQ ID NO: 14000 - DNA, 20 bp, Homo sapiens
atggagaagttcaacgcgtc

SEQ ID NO: 14001 - DNA, 23 bp, Homo sapiens
cactgtttgctcagggatttggt

SEQ ID NO: 14002 - DNA, 17 bp, Homo sapiens
aaagcctacagcagggg

SEQ ID NO: 14003 - DNA, 23 bp, Homo sapiens
aaacagcacttgagtatataatt

SEQ ID NO: 14004 - DNA, 23 bp, Homo sapiens
gatggaccagatactccatggcc

SEQ ID NO: 14005 - DNA, 16 bp, Homo sapiens
ctgagatgccccctcc

SEQ ID NO: 14006 - DNA, 24 bp, Homo sapiens
attggctgtgtggatgtcctcatc

SEQ ID NO: 14007 - DNA, 17 bp, Homo sapiens
gtcaccagggatagggt

SEQ ID NO: 14008 - DNA, 19 bp, Homo sapiens
agaggggaggcaaggaaag

SEQ ID NO: 14009 - DNA, 18 bp, Homo sapiens
tgaccccggcattgctgc

SEQ ID NO: 14010 - DNA, 22 bp, Homo sapiens
gccaatggcgaagtaaacagaa

SEQ ID NO: 14011 - DNA, 20 bp, Homo sapiens
gcaccttcaaactgaactcc

SEQ ID NO: 14012 - DNA, 18 bp, Homo sapiens
ggattataggcatgagcc

SEQ ID NO: 14013 - DNA, 16 bp, Homo sapiens
ttccctgccgttgcac

SEQ ID NO: 14014 - DNA, 16 bp, Homo sapiens
ggggaggacccggagc

SEQ ID NO: 14015 - DNA, 16 bp, Homo sapiens
cggagcagggggtgga

SEQ ID NO: 14016 - DNA, 16 bp, Homo sapiens
cctgcctgggttgact

SEQ ID NO: 14017 - DNA, 17 bp, Homo sapiens
ccctgaggagccaggac

SEQ ID NO: 14018 - DNA, 18 bp, Homo sapiens
tccaggagctcattggtg

SEQ ID NO: 14019 - DNA, 17 bp, Homo sapiens
tctgtgaccacctgtgc

SEQ ID NO: 14020 - DNA, 23 bp, Homo sapiens
gaatgaccaggtgctttagcccc

SEQ ID NO: 14021 - DNA, 19 bp, Homo sapiens
gtcctaatgagctcccaga

SEQ ID NO: 14022 - DNA, 20 bp, Homo sapiens
cagttagagttctgcagcgg

SEQ ID NO: 14023 - DNA, 18 bp, Homo sapiens
tgtctgccccctgggtgt

SEQ ID NO: 14024 - DNA, 22 bp, Homo sapiens
ctgagcaccatctcctccttgc

SEQ ID NO: 14025 - DNA, 17 bp, Homo sapiens
acccccacgctgttcac

SEQ ID NO: 14026 - DNA, 18 bp, Homo sapiens
cacgctctcgggcctcct

SEQ ID NO: 14027 - DNA, 16 bp, Homo sapiens
ctcctggctgctctgc

SEQ ID NO: 14028 - DNA, 22 bp, Homo sapiens
aagagaacatcacgttccctgt

SEQ ID NO: 14029 - DNA, 24 bp, Homo sapiens
gtccctgggagatcaccagatccc

SEQ ID NO: 14030 - DNA, 21 bp, Homo sapiens
tcagaatccagtggctccagc

SEQ ID NO: 14031 - DNA, 24 bp, Homo sapiens
ttttccaggggtgacccaggcctg

SEQ ID NO: 14032 - DNA, 17 bp, Homo sapiens
cagccggggtcctcccc

SEQ ID NO: 14033 - DNA, 17 bp, Homo sapiens
cgagcttctgctcctcc

SEQ ID NO: 14034 - DNA, 17 bp, Homo sapiens
cgctcagagtctcgggt

SEQ ID NO: 14035 - DNA, 19 bp, Homo sapiens
catttgcagagggcccagc

SEQ ID NO: 14036 - DNA, 16 bp, Homo sapiens
cctcacccacctcccc

SEQ ID NO: 14037 - DNA, 24 bp, Homo sapiens
ggtgaggtgcaggggctgtgctag

SEQ ID NO: 14038 - DNA, 24 bp, Homo sapiens
ctgcacttcccagctctgtcaatc

SEQ ID NO: 14039 - DNA, 19 bp, Homo sapiens
cacagccacgccgtggcac

SEQ ID NO: 14040 - DNA, 18 bp, Homo sapiens
gctccatgcagagtcccc

SEQ ID NO: 14041 - DNA, 18 bp, Homo sapiens
ggatcaatgtcctgcccc

SEQ ID NO: 14042 - DNA, 16 bp, Homo sapiens
tcggtccacacccagg

SEQ ID NO: 14043 - DNA, 19 bp, Homo sapiens
cttggttctctgtgtgtgc

SEQ ID NO: 14044 - DNA, 18 bp, Homo sapiens
gtgctgagggtgattctc

SEQ ID NO: 14045 - DNA, 22 bp, Homo sapiens
tgtgtgtgtcagggctgcctgc

SEQ ID NO: 14046 - DNA, 23 bp, Homo sapiens
gaatgaaggtttcaccaggagcc

SEQ ID NO: 14047 - DNA, 24 bp, Homo sapiens
ggccattgcaggcaatcccctggg

SEQ ID NO: 14048 - DNA, 17 bp, Homo sapiens
ctgccatgagtgacccc

SEQ ID NO: 14049 - DNA, 17 bp, Homo sapiens
gctcctgcctccctcct

SEQ ID NO: 14050 - DNA, 17 bp, Homo sapiens
acccacaaagtcccgct

SEQ ID NO: 14051 - DNA, 16 bp, Homo sapiens
aggggagggggctggg

SEQ ID NO: 14052 - DNA, 19 bp, Homo sapiens
gagaagctgggctgaagga

SEQ ID NO: 14053 - DNA, 21 bp, Homo sapiens
agcttagccctgcttcctccc

SEQ ID NO: 14054 - DNA, 23 bp, Homo sapiens
aggtttatacttcagtgtacaat

SEQ ID NO: 14055 - DNA, 23 bp, Homo sapiens
ctcaacagcatggatgccactag

SEQ ID NO: 14056 - DNA, 17 bp, Homo sapiens
tcatgcacagcgaagcc

SEQ ID NO: 14057 - DNA, 21 bp, Homo sapiens
gaccccatctttgcgaaaaat

SEQ ID NO: 14058 - DNA, 23 bp, Homo sapiens
ctgcacgaagctgaattccttgg

SEQ ID NO: 14059 - DNA, 16 bp, Homo sapiens
cccctgtatggtcagg

SEQ ID NO: 14060 - DNA, 16 bp, Homo sapiens
cggcagatggaggtgg

SEQ ID NO: 14061 - DNA, 17 bp, Homo sapiens
ctcccagccgagttcct

SEQ ID NO: 14062 - DNA, 16 bp, Homo sapiens
aggggtgggacgggga

SEQ ID NO: 14063 - DNA, 16 bp, Homo sapiens
cctcatcctctactgc

SEQ ID NO: 14064 - DNA, 16 bp, Homo sapiens
gcgctgaaggggctgg

SEQ ID NO: 14065 - DNA, 19 bp, Homo sapiens
caggtaagccctgaactgc

SEQ ID NO: 14066 - DNA, 21 bp, Homo sapiens
ccaaactgtcggggtttttct

SEQ ID NO: 14067 - DNA, 21 bp, Homo sapiens
cggacgtggctgccttcctcc

SEQ ID NO: 14068 - DNA, 18 bp, Homo sapiens
ctccccctgccttgctca

SEQ ID NO: 14069 - DNA, 18 bp, Homo sapiens
gctggaccagccaagggt

SEQ ID NO: 14070 - DNA, 16 bp, Homo sapiens
ggctggacccgggatc

SEQ ID NO: 14071 - DNA, 16 bp, Homo sapiens
atgccccagaagaaaa

SEQ ID NO: 14072 - DNA, 23 bp, Homo sapiens
ttgttgtaggtgctgggaagtcc

SEQ ID NO: 14073 - DNA, 18 bp, Homo sapiens
gcgtgtgtttgggcgggt

SEQ ID NO: 14074 - DNA, 20 bp, Homo sapiens
gagaactggcacgtactagc

SEQ ID NO: 14075 - DNA, 17 bp, Homo sapiens
ccaggggggcaggatcc

SEQ ID NO: 14076 - DNA, 16 bp, Homo sapiens
tgggaggatgtatggc

SEQ ID NO: 14077 - DNA, 16 bp, Homo sapiens
ggctcctgatgaccct

SEQ ID NO: 14078 - DNA, 21 bp, Homo sapiens
actcaataccccaacaaagga

SEQ ID NO: 14079 - DNA, 17 bp, Homo sapiens
gcccttgaactctctgc

SEQ ID NO: 14080 - DNA, 17 bp, Homo sapiens
agtggccacctggagca

SEQ ID NO: 14081 - DNA, 16 bp, Homo sapiens
gtggggatgcctcagt

SEQ ID NO: 14082 - DNA, 17 bp, Homo sapiens
gcctgggacctagggga

SEQ ID NO: 14083 - DNA, 17 bp, Homo sapiens
taggccctcacctcctg

SEQ ID NO: 14084 - DNA, 17 bp, Homo sapiens
ctccagccccacctcac

SEQ ID NO: 14085 - DNA, 20 bp, Homo sapiens
acactatgagtgccgtgctc

SEQ ID NO: 14086 - DNA, 23 bp, Homo sapiens
tttctgtcctttccctgttcccc

SEQ ID NO: 14087 - DNA, 16 bp, Homo sapiens
gctgagagcctgtccc

SEQ ID NO: 14088 - DNA, 24 bp, Homo sapiens
ccgagtgggtaagagagtatctgc

SEQ ID NO: 14089 - DNA, 18 bp, Homo sapiens
ggctgctacacacttacc

SEQ ID NO: 14090 - DNA, 17 bp, Homo sapiens
gcagcttcagatcccag

SEQ ID NO: 14091 - DNA, 17 bp, Homo sapiens
cccattcctgagctccc

SEQ ID NO: 14092 - DNA, 21 bp, Homo sapiens
attcaccaagagaacatggga

SEQ ID NO: 14093 - DNA, 16 bp, Homo sapiens
gcttcccaaagtgctg

SEQ ID NO: 14094 - DNA, 24 bp, Homo sapiens
gaccttgcctattacctggtccgc

SEQ ID NO: 14095 - DNA, 16 bp, Homo sapiens
tgggcctggcggaatg

SEQ ID NO: 14096 - DNA, 24 bp, Homo sapiens
gcactccagcctgggcaacagagc

SEQ ID NO: 14097 - DNA, 18 bp, Homo sapiens
acagctggttgagggcga

SEQ ID NO: 14098 - DNA, 17 bp, Homo sapiens
ggtgcaggcaatggagg

SEQ ID NO: 14099 - DNA, 21 bp, Homo sapiens
ctcacttcctaggaggcagca

SEQ ID NO: 14100 - DNA, 24 bp, Homo sapiens
tcttcctccctggcacccagatgc

SEQ ID NO: 14101 - DNA, 24 bp, Homo sapiens
ctggggagagaggaagaggtgggc

SEQ ID NO: 14102 - DNA, 16 bp, Homo sapiens
ccgagaccaagggggt

SEQ ID NO: 14103 - DNA, 16 bp, Homo sapiens
acactgtgcccgtagt

SEQ ID NO: 14104 - DNA, 24 bp, Homo sapiens
catcaggtacggcccatccccttc

SEQ ID NO: 14105 - DNA, 16 bp, Homo sapiens
cacctggcggatctgc

SEQ ID NO: 14106 - DNA, 24 bp, Homo sapiens
tggagcccagggtggcctggcgcc

SEQ ID NO: 14107 - DNA, 21 bp, Homo sapiens
cccactttattagggggcagg

SEQ ID NO: 14108 - DNA, 22 bp, Homo sapiens
cgacgtgatctgcgtgtgggac

SEQ ID NO: 14109 - DNA, 17 bp, Homo sapiens
cccagcaacgagggagc

SEQ ID NO: 14110 - DNA, 17 bp, Homo sapiens
gcgctccagcgtcgact

SEQ ID NO: 14111 - DNA, 17 bp, Homo sapiens
ttacaggccaccctgcc

SEQ ID NO: 14112 - DNA, 23 bp, Homo sapiens
cagaaagtaactttagcataaaa

SEQ ID NO: 14113 - DNA, 21 bp, Homo sapiens
tatagcatttaccaatctgtg

SEQ ID NO: 14114 - DNA, 23 bp, Homo sapiens
gaaagctttcaaaatccaaagag

SEQ ID NO: 14115 - DNA, 26 bp, Homo sapiens
agaaattcatagacaccatttttttc

SEQ ID NO: 14116 - DNA, 24 bp, Homo sapiens
gttttgtaatggtagtatttatac

SEQ ID NO: 14117 - DNA, 22 bp, Homo sapiens
cagaaccaaatcaaaaagaagt

SEQ ID NO: 14118 - DNA, 21 bp, Homo sapiens
gtttgttatttcccgttcatt

SEQ ID NO: 14119 - DNA, 23 bp, Homo sapiens
tgttccactttgattttttctcc

SEQ ID NO: 14120 - DNA, 22 bp, Homo sapiens
ggagtgcaactttatttgtaag

SEQ ID NO: 14121 - DNA, 19 bp, Homo sapiens
gaagaattttgctgagctg

SEQ ID NO: 14122 - DNA, 18 bp, Homo sapiens
tgcatagctacgacacat

SEQ ID NO: 14123 - DNA, 21 bp, Homo sapiens
agtcacatttaatgactgcac

SEQ ID NO: 14124 - DNA, 20 bp, Homo sapiens
aaacacgaactttaaaggtt

SEQ ID NO: 14125 - DNA, 20 bp, Homo sapiens
cttaaggaggacgaatccat

SEQ ID NO: 14126 - DNA, 23 bp, Homo sapiens
acttccaaaacagaatctgttac

SEQ ID NO: 14127 - DNA, 20 bp, Homo sapiens
caactggactaccacatttt

SEQ ID NO: 14128 - DNA, 21 bp, Homo sapiens
ggtcttgtgtgaccaagtgca

SEQ ID NO: 14129 - DNA, 23 bp, Homo sapiens
cattatcttataaggaagagaac

SEQ ID NO: 14130 - DNA, 24 bp, Homo sapiens
ctggttttgattggtcctggttgg

SEQ ID NO: 14131 - DNA, 18 bp, Homo sapiens
accggagccaaagtggag

SEQ ID NO: 14132 - DNA, 19 bp, Homo sapiens
gcacataaccatgactgag

SEQ ID NO: 14133 - DNA, 19 bp, Homo sapiens
acacaagaacaaagagatc

SEQ ID NO: 14134 - DNA, 24 bp, Homo sapiens
gctcgtttataagtcaaagaaata

SEQ ID NO: 14135 - DNA, 19 bp, Homo sapiens
ccagttgttttcacagcct

SEQ ID NO: 14136 - DNA, 23 bp, Homo sapiens
attataatgagggggaaaaagcc

SEQ ID NO: 14137 - DNA, 19 bp, Homo sapiens
tcacaatgtctctctgcac

SEQ ID NO: 14138 - DNA, 19 bp, Homo sapiens
tctgccctcagttgatctc

SEQ ID NO: 14139 - DNA, 19 bp, Homo sapiens
ttttttctctccccctctt

SEQ ID NO: 14140 - DNA, 18 bp, Homo sapiens
gtccttaacactggaggc

SEQ ID NO: 14141 - DNA, 24 bp, Homo sapiens
tgtatacttatctatgttaatgtt

SEQ ID NO: 14142 - DNA, 19 bp, Homo sapiens
tcctgagtcatggagcttg

SEQ ID NO: 14143 - DNA, 20 bp, Homo sapiens
tggaacctcttctgatttgg

SEQ ID NO: 14144 - DNA, 20 bp, Homo sapiens
gtgtaagcaagaaacaagac

SEQ ID NO: 14145 - DNA, 18 bp, Homo sapiens
tcaatatgtaccggctct

SEQ ID NO: 14146 - DNA, 24 bp, Homo sapiens
ggggctggttaggagagaaatcac

SEQ ID NO: 14147 - DNA, 20 bp, Homo sapiens
gtggcttagatcagtccctt

SEQ ID NO: 14148 - DNA, 23 bp, Homo sapiens
gaactgtataatgatgactgcac

SEQ ID NO: 14149 - DNA, 21 bp, Homo sapiens
tctgtcttcaatggtctttct

SEQ ID NO: 14150 - DNA, 21 bp, Homo sapiens
taagagcttccaaagtagagc

SEQ ID NO: 14151 - DNA, 21 bp, Homo sapiens
aaactggttgtccttttgtgt

SEQ ID NO: 14152 - DNA, 22 bp, Homo sapiens
cggacatctctaaagaaacaag

SEQ ID NO: 14153 - DNA, 24 bp, Homo sapiens
gctctaatagaatgctatctatgt

SEQ ID NO: 14154 - DNA, 22 bp, Homo sapiens
aatcgtcagagccactgctatg

SEQ ID NO: 14155 - DNA, 23 bp, Homo sapiens
gcctcaaaaccgttagagaatta

SEQ ID NO: 14156 - DNA, 18 bp, Homo sapiens
gagctggaacttccatcc

SEQ ID NO: 14157 - DNA, 22 bp, Homo sapiens
tatggaacattcaactaaaggt

SEQ ID NO: 14158 - DNA, 21 bp, Homo sapiens
gagctgatctgaaagctttac

SEQ ID NO: 14159 - DNA, 22 bp, Homo sapiens
aaaatagcattttttaaggtgg

SEQ ID NO: 14160 - DNA, 20 bp, Homo sapiens
acctctggcagatgatgttg

SEQ ID NO: 14161 - DNA, 22 bp, Homo sapiens
aaatgtcataacaacttcctca

SEQ ID NO: 14162 - DNA, 18 bp, Homo sapiens
tctcctttcaggtgtcac

SEQ ID NO: 14163 - DNA, 15 bp, Homo sapiens
ggcctccaattgggc

SEQ ID NO: 14164 - DNA, 24 bp, Homo sapiens
tgaagaaaatcataagatacacaa

SEQ ID NO: 14165 - DNA, 17 bp, Homo sapiens
tgctacatgctgaaggt

SEQ ID NO: 14166 - DNA, 21 bp, Homo sapiens
tggtacatttctcaacttact

SEQ ID NO: 14167 - DNA, 22 bp, Homo sapiens
taaaatttcaagacgtgacacc

SEQ ID NO: 14168 - DNA, 22 bp, Homo sapiens
aaatgtgtatactgtcctcctc

SEQ ID NO: 14169 - DNA, 22 bp, Homo sapiens
agcaaacagtggctaaagcttt

SEQ ID NO: 14170 - DNA, 18 bp, Homo sapiens
ctagtcgccctgacttga

SEQ ID NO: 14171 - DNA, 20 bp, Homo sapiens
cagaagtaaagctcacaagg

SEQ ID NO: 14172 - DNA, 24 bp, Homo sapiens
gtcatcatgtcatcagattttggt

SEQ ID NO: 14173 - DNA, 20 bp, Homo sapiens
aattgtcacctgatcaggag

SEQ ID NO: 14174 - DNA, 22 bp, Homo sapiens
ggagtagaaggcttacagggta

SEQ ID NO: 14175 - DNA, 23 bp, Homo sapiens
gcctaagcagggcagggtcaatc

SEQ ID NO: 14176 - DNA, 19 bp, Homo sapiens
aatacaggagttacagacc

SEQ ID NO: 14177 - DNA, 24 bp, Homo sapiens
cacctagaggaaaaaagaacattt

SEQ ID NO: 14178 - DNA, 21 bp, Homo sapiens
caaagccctgcattcttttct

SEQ ID NO: 14179 - DNA, 23 bp, Homo sapiens
taacattctatttctgtatttat

SEQ ID NO: 14180 - DNA, 20 bp, Homo sapiens
ccaactatgaagcctgattc

SEQ ID NO: 14181 - DNA, 20 bp, Homo sapiens
agcaactggttaactactcg

SEQ ID NO: 14182 - DNA, 30 bp, Homo sapiens
aagaagtatataaatatatataaatacata

SEQ ID NO: 14183 - DNA, 26 bp, Homo sapiens
atggattcaaattcatcaaagaaaag

SEQ ID NO: 14184 - DNA, 24 bp, Homo sapiens
atttatatgtaattacatacaact

SEQ ID NO: 14185 - DNA, 19 bp, Homo sapiens
gtgaacaagctgttcggga

SEQ ID NO: 14186 - DNA, 23 bp, Homo sapiens
cgtcctctagcttattaataatt

SEQ ID NO: 14187 - DNA, 21 bp, Homo sapiens
tcaactcttattttacccaat

SEQ ID NO: 14188 - DNA, 22 bp, Homo sapiens
aaaacaagaccaaaaaaagcac

SEQ ID NO: 14189 - DNA, 23 bp, Homo sapiens
ccatgattcatttagacttagtc

SEQ ID NO: 14190 - DNA, 27 bp, Homo sapiens
ataggctaccaacctaataaaaatatc

SEQ ID NO: 14191 - DNA, 22 bp, Homo sapiens
tctagcacacattaattttaaa

SEQ ID NO: 14192 - DNA, 19 bp, Homo sapiens
gctgagtaactctggcccc

SEQ ID NO: 14193 - DNA, 24 bp, Homo sapiens
agtagaatgaattttataagtgtc

SEQ ID NO: 14194 - DNA, 20 bp, Homo sapiens
gaaattagagagaggtggtg

SEQ ID NO: 14195 - DNA, 16 bp, Homo sapiens
atggtccgcctggaac

SEQ ID NO: 14196 - DNA, 21 bp, Homo sapiens
ttacactttgaaatggctaac

SEQ ID NO: 14197 - DNA, 23 bp, Homo sapiens
gtttctcagtatccagaattatt

SEQ ID NO: 14198 - DNA, 21 bp, Homo sapiens
aagtagacaacataccttgac

SEQ ID NO: 14199 - DNA, 23 bp, Homo sapiens
tgatctttagctgctacttagtc

SEQ ID NO: 14200 - DNA, 21 bp, Homo sapiens
cagctagtaaggtttttcctg

SEQ ID NO: 14201 - DNA, 23 bp, Homo sapiens
tgctgttactaaagaaagatggt

SEQ ID NO: 14202 - DNA, 20 bp, Homo sapiens
tcgtatgggcaagtttgcaa

SEQ ID NO: 14203 - DNA, 17 bp, Homo sapiens
ccagttacctgccaagg

SEQ ID NO: 14204 - DNA, 24 bp, Homo sapiens
acctaaaatagtgttaagacattt

SEQ ID NO: 14205 - DNA, 19 bp, Homo sapiens
ggttgggacaagattggtg

SEQ ID NO: 14206 - DNA, 23 bp, Homo sapiens
attgggcaagctgacacataaag

SEQ ID NO: 14207 - DNA, 18 bp, Homo sapiens
tccgcggatttcttcctg

SEQ ID NO: 14208 - DNA, 26 bp, Homo sapiens
agtattcactttttctttttttaaac

SEQ ID NO: 14209 - DNA, 22 bp, Homo sapiens
actagtaaaagaagttttgttt

SEQ ID NO: 14210 - DNA, 20 bp, Homo sapiens
cttcatgtaacccaccaatc

SEQ ID NO: 14211 - DNA, 19 bp, Homo sapiens
tgtttccagctaagatgat

SEQ ID NO: 14212 - DNA, 18 bp, Homo sapiens
ttcgcaaagacgcaggaa

SEQ ID NO: 14213 - DNA, 22 bp, Homo sapiens
agacaagaattaaatatattcc

SEQ ID NO: 14214 - DNA, 23 bp, Homo sapiens
caatgttgttaaaactaattctg

SEQ ID NO: 14215 - DNA, 21 bp, Homo sapiens
ttttcaaaatatgccatcatc

SEQ ID NO: 14216 - DNA, 19 bp, Homo sapiens
cgagccatacattctcgac

SEQ ID NO: 14217 - DNA, 23 bp, Homo sapiens
tgcttattcaaatactacaatgg

SEQ ID NO: 14218 - DNA, 20 bp, Homo sapiens
cctgcagcatgtagctaaag

SEQ ID NO: 14219 - DNA, 25 bp, Homo sapiens
tttctccacaatagaaagaagattc

SEQ ID NO: 14220 - DNA, 30 bp, Homo sapiens
gaaattctgtgtaatgtaataaaaaataaa

SEQ ID NO: 14221 - DNA, 21 bp, Homo sapiens
gtggatatactctgacgagag

SEQ ID NO: 14222 - DNA, 23 bp, Homo sapiens
acagttgaatacaattggaaatt

SEQ ID NO: 14223 - DNA, 17 bp, Homo sapiens
agccacaaacccgccag

SEQ ID NO: 14224 - DNA, 23 bp, Homo sapiens
gctttctgtcactatagatttgt

SEQ ID NO: 14225 - DNA, 24 bp, Homo sapiens
acttgtttatatcacagtccaatt

SEQ ID NO: 14226 - DNA, 22 bp, Homo sapiens
tctcctagcccttttactaccc

SEQ ID NO: 14227 - DNA, 18 bp, Homo sapiens
tccaacacattcagcctc

SEQ ID NO: 14228 - DNA, 20 bp, Homo sapiens
gcaccaaatgttgacttaca

SEQ ID NO: 14229 - DNA, 20 bp, Homo sapiens
ctcagcaatctctacatcct

SEQ ID NO: 14230 - DNA, 22 bp, Homo sapiens
aagccacgaattactaataaaa

SEQ ID NO: 14231 - DNA, 18 bp, Homo sapiens
aaagagtttatctccatg

SEQ ID NO: 14232 - DNA, 24 bp, Homo sapiens
tccttacaagtagtgtattacctg

SEQ ID NO: 14233 - DNA, 22 bp, Homo sapiens
tcatgtttacttttcctaagct

SEQ ID NO: 14234 - DNA, 20 bp, Homo sapiens
tgaactccttgagcagaaac

SEQ ID NO: 14235 - DNA, 21 bp, Homo sapiens
gcaccttaaaggtcaacctta

SEQ ID NO: 14236 - DNA, 24 bp, Homo sapiens
ggcaatcagtgcaaccaaacttcc

SEQ ID NO: 14237 - DNA, 28 bp, Homo sapiens
aatagataaatcagggaataactagatg

SEQ ID NO: 14238 - DNA, 16 bp, Homo sapiens
gatgcggtgcagagcc

SEQ ID NO: 14239 - DNA, 22 bp, Homo sapiens
ggcctcaaacacaacacttaac

SEQ ID NO: 14240 - DNA, 17 bp, Homo sapiens
tgtcctgctggatgacc

SEQ ID NO: 14241 - DNA, 24 bp, Homo sapiens
attgttaagactaaaaatgctgac

SEQ ID NO: 14242 - DNA, 23 bp, Homo sapiens
gcttgaaaacatacaaaaaaccc

SEQ ID NO: 14243 - DNA, 19 bp, Homo sapiens
accatgagcaagccgctgg

SEQ ID NO: 14244 - DNA, 24 bp, Homo sapiens
cccagcactgaaatgatactgaaa

SEQ ID NO: 14245 - DNA, 23 bp, Homo sapiens
cagcaggcagtccagcaatgagg

SEQ ID NO: 14246 - DNA, 24 bp, Homo sapiens
tcaaatttttatagttaaatcaat

SEQ ID NO: 14247 - DNA, 17 bp, Homo sapiens
ctgcctctgagaaagcc

SEQ ID NO: 14248 - DNA, 22 bp, Homo sapiens
tgaaccatgttgatgaacaagt

SEQ ID NO: 14249 - DNA, 23 bp, Homo sapiens
gagagttgactgtaaagctttac

SEQ ID NO: 14250 - DNA, 24 bp, Homo sapiens
ccaaagaaattttaatgactaaat

SEQ ID NO: 14251 - DNA, 20 bp, Homo sapiens
tcaactttagccaaagcaat

SEQ ID NO: 14252 - DNA, 18 bp, Homo sapiens
agattgacagcattatgt

SEQ ID NO: 14253 - DNA, 21 bp, Homo sapiens
ttctgtgactgaatatattgg

SEQ ID NO: 14254 - DNA, 23 bp, Homo sapiens
tagagtgttaccatactcatacc

SEQ ID NO: 14255 - DNA, 22 bp, Homo sapiens
agaggttgtataaaattgaggc

SEQ ID NO: 14256 - DNA, 20 bp, Homo sapiens
ccagtttgtcaaatgcttct

SEQ ID NO: 14257 - DNA, 20 bp, Homo sapiens
atctggcctcataaaatgag

SEQ ID NO: 14258 - DNA, 21 bp, Homo sapiens
gtgaataaatgaatgctttcc

SEQ ID NO: 14259 - DNA, 19 bp, Homo sapiens
cctttgtctcggcagctga

SEQ ID NO: 14260 - DNA, 23 bp, Homo sapiens
aacccaccctatataatagatgg

SEQ ID NO: 14261 - DNA, 21 bp, Homo sapiens
agtgaattccttaggcgtatc

SEQ ID NO: 14262 - DNA, 22 bp, Homo sapiens
aaaatgaacacaccttaaccac

SEQ ID NO: 14263 - DNA, 23 bp, Homo sapiens
agctaaattttatcctgcttcag

SEQ ID NO: 14264 - DNA, 21 bp, Homo sapiens
attcctaagtcctgcaacaag

SEQ ID NO: 14265 - DNA, 30 bp, Homo sapiens
aagataaaaaattaaattaaattaattaac

SEQ ID NO: 14266 - DNA, 21 bp, Homo sapiens
tgtgagtgatgtgctccaagg

SEQ ID NO: 14267 - DNA, 22 bp, Homo sapiens
gtgaagatagagacaatccttg

SEQ ID NO: 14268 - DNA, 23 bp, Homo sapiens
tggtaaaagaagaaaacagtgag

SEQ ID NO: 14269 - DNA, 24 bp, Homo sapiens
tgacattaacatctactttaatat

SEQ ID NO: 14270 - DNA, 24 bp, Homo sapiens
atgcaaaagacatactttgaaatg

SEQ ID NO: 14271 - DNA, 24 bp, Homo sapiens
aacatgtctaacatgctagtttgg

SEQ ID NO: 14272 - DNA, 21 bp, Homo sapiens
tctctctggtataacagaatc

SEQ ID NO: 14273 - DNA, 26 bp, Homo sapiens
aaaaaggaagaataaagtcaatttcc

SEQ ID NO: 14274 - DNA, 20 bp, Homo sapiens
ccctggatgggtacattgtt

SEQ ID NO: 14275 - DNA, 19 bp, Homo sapiens
gttgagtcccaatttgctg

SEQ ID NO: 14276 - DNA, 19 bp, Homo sapiens
ttactcttagcaggttttt

SEQ ID NO: 14277 - DNA, 21 bp, Homo sapiens
ctgaaggaattttctctgagt

SEQ ID NO: 14278 - DNA, 28 bp, Homo sapiens
tcatactttattatcaatcatatgtaac

SEQ ID NO: 14279 - DNA, 22 bp, Homo sapiens
taaattatttcatctctgtttc

SEQ ID NO: 14280 - DNA, 22 bp, Homo sapiens
cttgtattgtagtcttctgcag

SEQ ID NO: 14281 - DNA, 21 bp, Homo sapiens
ggggggaaaaaaaaaaaagtc

SEQ ID NO: 14282 - DNA, 24 bp, Homo sapiens
atctttttctttttcccaagaatg

SEQ ID NO: 14283 - DNA, 18 bp, Homo sapiens
ggaggtctgtgttcctgc

SEQ ID NO: 14284 - DNA, 20 bp, Homo sapiens
cccggccaaagatatttttc

SEQ ID NO: 14285 - DNA, 17 bp, Homo sapiens
accatgcttcctttggt

SEQ ID NO: 14286 - DNA, 22 bp, Homo sapiens
tcactattcacatactgttcac

SEQ ID NO: 14287 - DNA, 22 bp, Homo sapiens
cagcctaaagacataagtgaag

SEQ ID NO: 14288 - DNA, 27 bp, Homo sapiens
acaactatttaaatagaaaaaaaagtc

SEQ ID NO: 14289 - DNA, 20 bp, Homo sapiens
agggtgttaaagttaagttc

SEQ ID NO: 14290 - DNA, 19 bp, Homo sapiens
ttcttcctctgatattacc

SEQ ID NO: 14291 - DNA, 18 bp, Homo sapiens
tggatttgtttggtcagg

SEQ ID NO: 14292 - DNA, 21 bp, Homo sapiens
taaaatacagtttttatgtct

SEQ ID NO: 14293 - DNA, 25 bp, Homo sapiens
attccaagatctctaaagttacaac

SEQ ID NO: 14294 - DNA, 21 bp, Homo sapiens
acacaataaaaaaagatttgt

SEQ ID NO: 14295 - DNA, 21 bp, Homo sapiens
aaatatagaaatgcatgccgt

SEQ ID NO: 14296 - DNA, 23 bp, Homo sapiens
gctaaagcaactagaaatcttac

SEQ ID NO: 14297 - DNA, 29 bp, Homo sapiens
ctttgaatatatttatatttttgtttatt

SEQ ID NO: 14298 - DNA, 25 bp, Homo sapiens
cactaaattctctctaggttgtaac

SEQ ID NO: 14299 - DNA, 24 bp, Homo sapiens
cacctaaattcatagaagctaata

SEQ ID NO: 14300 - DNA, 18 bp, Homo sapiens
agttatcctgactacggc

SEQ ID NO: 14301 - DNA, 17 bp, Homo sapiens
agcctgcatggactgag

SEQ ID NO: 14302 - DNA, 22 bp, Homo sapiens
accaaaaatgtagaagttctcc

SEQ ID NO: 14303 - DNA, 20 bp, Homo sapiens
gcctttaggcactgtgtttc

SEQ ID NO: 14304 - DNA, 17 bp, Homo sapiens
ggcctgtgtgctacaag

SEQ ID NO: 14305 - DNA, 20 bp, Homo sapiens
taatttggggatgtttaagc

SEQ ID NO: 14306 - DNA, 19 bp, Homo sapiens
cagatgtcagagccactag

SEQ ID NO: 14307 - DNA, 20 bp, Homo sapiens
cccagactttcccaagatgg

SEQ ID NO: 14308 - DNA, 20 bp, Homo sapiens
ctccaaagcaacagcaaagt

SEQ ID NO: 14309 - DNA, 20 bp, Homo sapiens
tcttcaagtccattccagac

SEQ ID NO: 14310 - DNA, 17 bp, Homo sapiens
gatgtagagcccagctt

SEQ ID NO: 14311 - DNA, 20 bp, Homo sapiens
tctgacctaatttttttttg

SEQ ID NO: 14312 - DNA, 20 bp, Homo sapiens
tcagcaacctctgtttttca

SEQ ID NO: 14313 - DNA, 24 bp, Homo sapiens
caggtgataacacattttgttttg

SEQ ID NO: 14314 - DNA, 22 bp, Homo sapiens
ggttgttcctctagacaatatt

SEQ ID NO: 14315 - DNA, 22 bp, Homo sapiens
actagctttccatatgtcacag

SEQ ID NO: 14316 - DNA, 18 bp, Homo sapiens
caagagacatcttggggt

SEQ ID NO: 14317 - DNA, 20 bp, Homo sapiens
acatgaatggcacagtgttt

SEQ ID NO: 14318 - DNA, 21 bp, Homo sapiens
gtagcaagtttatggactatg

SEQ ID NO: 14319 - DNA, 21 bp, Homo sapiens
aggttgagatttgcatactct

SEQ ID NO: 14320 - DNA, 19 bp, Homo sapiens
ctgtgggaatcactgaatc

SEQ ID NO: 14321 - DNA, 22 bp, Homo sapiens
tttgaatgcattgatttcagtt

SEQ ID NO: 14322 - DNA, 19 bp, Homo sapiens
atggaagagaccagaaagg

SEQ ID NO: 14323 - DNA, 24 bp, Homo sapiens
aggaaaaaatgcttcctatcatag

SEQ ID NO: 14324 - DNA, 20 bp, Homo sapiens
gccgagccaaagagaataca

SEQ ID NO: 14325 - DNA, 22 bp, Homo sapiens
ctgactcgttttcattagattc

SEQ ID NO: 14326 - DNA, 18 bp, Homo sapiens
gctgcctcttatggaagg

SEQ ID NO: 14327 - DNA, 21 bp, Homo sapiens
ggtttgaagttctttcatcat

SEQ ID NO: 14328 - DNA, 24 bp, Homo sapiens
ttgagtccaaagtagaaatgaatg

SEQ ID NO: 14329 - DNA, 20 bp, Homo sapiens
tcagcatcagcttttgaaaa

SEQ ID NO: 14330 - DNA, 18 bp, Homo sapiens
tccaaattggtaggtgct

SEQ ID NO: 14331 - DNA, 23 bp, Homo sapiens
aggagtttggtgtcagtttccag

SEQ ID NO: 14332 - DNA, 21 bp, Homo sapiens
tcgaatagtttttccaaaagc

SEQ ID NO: 14333 - DNA, 19 bp, Homo sapiens
agctcattagtgcacattc

SEQ ID NO: 14334 - DNA, 18 bp, Homo sapiens
ctgttggttctaggagct

SEQ ID NO: 14335 - DNA, 22 bp, Homo sapiens
tgacagcaaatattacaatagc

SEQ ID NO: 14336 - DNA, 21 bp, Homo sapiens
agaattgagattttttttaac

SEQ ID NO: 14337 - DNA, 20 bp, Homo sapiens
aacccaaacaggaaaaatgg

SEQ ID NO: 14338 - DNA, 21 bp, Homo sapiens
tgtagctcataacaccatgtc

SEQ ID NO: 14339 - DNA, 18 bp, Homo sapiens
agggaaacagcatgcagc

SEQ ID NO: 14340 - DNA, 18 bp, Homo sapiens
ctctcagcagatgattgg

SEQ ID NO: 14341 - DNA, 21 bp, Homo sapiens
cctggccccaattcattctta

SEQ ID NO: 14342 - DNA, 22 bp, Homo sapiens
tctaggtatttctcaagccatg

SEQ ID NO: 14343 - DNA, 25 bp, Homo sapiens
agctaaagacattgatattgtgaag

SEQ ID NO: 14344 - DNA, 28 bp, Homo sapiens
acttcttattttctaatatatgacacag

SEQ ID NO: 14345 - DNA, 24 bp, Homo sapiens
tttggttttctttaccagtatctc

SEQ ID NO: 14346 - DNA, 19 bp, Homo sapiens
ccccatccaaaacatacac

SEQ ID NO: 14347 - DNA, 19 bp, Homo sapiens
accacatgggaacatggct

SEQ ID NO: 14348 - DNA, 21 bp, Homo sapiens
tcagcttcaatatcctagact

SEQ ID NO: 14349 - DNA, 20 bp, Homo sapiens
gatcaaggtgaaaatgtggc

SEQ ID NO: 14350 - DNA, 24 bp, Homo sapiens
cctcctttaacaaaaaatctaaac

SEQ ID NO: 14351 - DNA, 18 bp, Homo sapiens
aagtggtctggagtcacc

SEQ ID NO: 14352 - DNA, 18 bp, Homo sapiens
attgccatcacatgtgct

SEQ ID NO: 14353 - DNA, 22 bp, Homo sapiens
cagaaaaatgtatacgaaaacc

SEQ ID NO: 14354 - DNA, 21 bp, Homo sapiens
ttgtctgttaatttcagccac

SEQ ID NO: 14355 - DNA, 21 bp, Homo sapiens
tctatagaactctttttggac

SEQ ID NO: 14356 - DNA, 18 bp, Homo sapiens
ccagctcaagaatgcagg

SEQ ID NO: 14357 - DNA, 19 bp, Homo sapiens
tgggtgttggaaatgatta

SEQ ID NO: 14358 - DNA, 22 bp, Homo sapiens
ccagctgcatctgctgcaggta

SEQ ID NO: 14359 - DNA, 16 bp, Homo sapiens
gccgtcgagggaccct

SEQ ID NO: 14360 - DNA, 24 bp, Homo sapiens
cagtgactgtggccttcaccaacg

SEQ ID NO: 14361 - DNA, 16 bp, Homo sapiens
cgccgcgtccctgaga

SEQ ID NO: 14362 - DNA, 16 bp, Homo sapiens
gggacgatgtggggca

SEQ ID NO: 14363 - DNA, 16 bp, Homo sapiens
ggggccggcaggttac

SEQ ID NO: 14364 - DNA, 16 bp, Homo sapiens
ctcggcctgccgggtc

SEQ ID NO: 14365 - DNA, 20 bp, Homo sapiens
caggtggaggaagcagtcgc

SEQ ID NO: 14366 - DNA, 16 bp, Homo sapiens
gagagggggcggggcc

SEQ ID NO: 14367 - DNA, 19 bp, Homo sapiens
cagcacccgccaggcgatc

SEQ ID NO: 14368 - DNA, 18 bp, Homo sapiens
gtagaaccgcgcgggcca

SEQ ID NO: 14369 - DNA, 17 bp, Homo sapiens
gctcaacacgacctcac

SEQ ID NO: 14370 - DNA, 17 bp, Homo sapiens
gggaggggagaccttgg

SEQ ID NO: 14371 - DNA, 17 bp, Homo sapiens
agcccaacacggttaag

SEQ ID NO: 14372 - DNA, 24 bp, Homo sapiens
gtattggcggaaaggaaaatacag

SEQ ID NO: 14373 - DNA, 17 bp, Homo sapiens
gggctgagccagtgcag

SEQ ID NO: 14374 - DNA, 21 bp, Homo sapiens
cgattgaaatggcctctctag

SEQ ID NO: 14375 - DNA, 22 bp, Homo sapiens
attgatctgtagcttctgtgtg

SEQ ID NO: 14376 - DNA, 19 bp, Homo sapiens
ctgcgtaagttctcagagg

SEQ ID NO: 14377 - DNA, 20 bp, Homo sapiens
cgtttgcccaaaattgttct

SEQ ID NO: 14378 - DNA, 21 bp, Homo sapiens
ggaactgtcagctaatgtgat

SEQ ID NO: 14379 - DNA, 28 bp, Homo sapiens
tcatatcttacataatagggacattttc

SEQ ID NO: 14380 - DNA, 24 bp, Homo sapiens
tgaactataagacacttaacataa

SEQ ID NO: 14381 - DNA, 19 bp, Homo sapiens
gcctacagggactttctgc

SEQ ID NO: 14382 - DNA, 17 bp, Homo sapiens
cctggaacacactagct

SEQ ID NO: 14383 - DNA, 22 bp, Homo sapiens
cctataactgttacatcagcat

SEQ ID NO: 14384 - DNA, 21 bp, Homo sapiens
agtgcagaaactatgtagaaa

SEQ ID NO: 14385 - DNA, 17 bp, Homo sapiens
ttgaagcctaactgggc

SEQ ID NO: 14386 - DNA, 21 bp, Homo sapiens
tttgtttgctcttccaaagag

SEQ ID NO: 14387 - DNA, 17 bp, Homo sapiens
tatgatcaacccttccc

SEQ ID NO: 14388 - DNA, 22 bp, Homo sapiens
caatttgcttttatcgtagttg

SEQ ID NO: 14389 - DNA, 24 bp, Homo sapiens
tctcaggcttacaagtaatttata

SEQ ID NO: 14390 - DNA, 20 bp, Homo sapiens
gctgctattaaagctgccca

SEQ ID NO: 14391 - DNA, 20 bp, Homo sapiens
catgttccaccaagtgtttc

SEQ ID NO: 14392 - DNA, 19 bp, Homo sapiens
tgtgaaaacatagcccgaa

SEQ ID NO: 14393 - DNA, 20 bp, Homo sapiens
ctctgtgctgtacaaaacac

SEQ ID NO: 14394 - DNA, 23 bp, Homo sapiens
ttggaattttagtgatctgaaac

SEQ ID NO: 14395 - DNA, 21 bp, Homo sapiens
gtgtatttgtctaatctagtc

SEQ ID NO: 14396 - DNA, 21 bp, Homo sapiens
ttgtagacagtctgcattgag

SEQ ID NO: 14397 - DNA, 24 bp, Homo sapiens
tttttatcattcttttttttctct

SEQ ID NO: 14398 - DNA, 22 bp, Homo sapiens
agatggcgccattgcactccag

SEQ ID NO: 14399 - DNA, 24 bp, Homo sapiens
acttactttcaattcctctagatg

SEQ ID NO: 14400 - DNA, 25 bp, Homo sapiens
agaaagactatcatttcataagtgc

SEQ ID NO: 14401 - DNA, 18 bp, Homo sapiens
agacagaagagccaagtc

SEQ ID NO: 14402 - DNA, 24 bp, Homo sapiens
tttgataatttgatctttttaatt

SEQ ID NO: 14403 - DNA, 23 bp, Homo sapiens
tagattatttattttactcttcc

SEQ ID NO: 14404 - DNA, 22 bp, Homo sapiens
ggcccatggaaaagattttgca

SEQ ID NO: 14405 - DNA, 24 bp, Homo sapiens
tcaactataattataagttattac

SEQ ID NO: 14406 - DNA, 22 bp, Homo sapiens
ggcaattccacctgttaaagct

SEQ ID NO: 14407 - DNA, 19 bp, Homo sapiens
ttttccagttggtgagtga

SEQ ID NO: 14408 - DNA, 22 bp, Homo sapiens
aagtaaagcagaaatctgaata

SEQ ID NO: 14409 - DNA, 28 bp, Homo sapiens
agaactaaagattaattgaacaaattac

SEQ ID NO: 14410 - DNA, 25 bp, Homo sapiens
aaataaatattcccctgtaaccaag

SEQ ID NO: 14411 - DNA, 18 bp, Homo sapiens
gcagaagagtactgcagt

SEQ ID NO: 14412 - DNA, 22 bp, Homo sapiens
gtgatatatgtcagggaaatct

SEQ ID NO: 14413 - DNA, 22 bp, Homo sapiens
tgccagttatctttccatatcc

SEQ ID NO: 14414 - DNA, 22 bp, Homo sapiens
ccatggtgtagcattactaagt

SEQ ID NO: 14415 - DNA, 20 bp, Homo sapiens
tatcaataacctgagtgccg

SEQ ID NO: 14416 - DNA, 23 bp, Homo sapiens
ttcctttgaatgatttatcaaac

SEQ ID NO: 14417 - DNA, 20 bp, Homo sapiens
taccgtgattccaggaaaag

SEQ ID NO: 14418 - DNA, 18 bp, Homo sapiens
gtaaaggttgttcatgtc

SEQ ID NO: 14419 - DNA, 22 bp, Homo sapiens
agcataaataacttataaaacg

SEQ ID NO: 14420 - DNA, 20 bp, Homo sapiens
ctgctacgaaagctgatggc

SEQ ID NO: 14421 - DNA, 24 bp, Homo sapiens
agctgaatgaccatcaaaatatag

SEQ ID NO: 14422 - DNA, 20 bp, Homo sapiens
cgggttcagaagttactcct

SEQ ID NO: 14423 - DNA, 23 bp, Homo sapiens
tgacactattgtatcttcatcta

SEQ ID NO: 14424 - DNA, 22 bp, Homo sapiens
agtacagatgcaaccatcaatt

SEQ ID NO: 14425 - DNA, 22 bp, Homo sapiens
gcaccaataacaaccatctttt

SEQ ID NO: 14426 - DNA, 20 bp, Homo sapiens
tttggaacccatggatatgg

SEQ ID NO: 14427 - DNA, 20 bp, Homo sapiens
ccaaggaggtaataagaggc

SEQ ID NO: 14428 - DNA, 24 bp, Homo sapiens
gattatatcttttgtttttcttac

SEQ ID NO: 14429 - DNA, 22 bp, Homo sapiens
atgctgatcagcctgtaatgtt

SEQ ID NO: 14430 - DNA, 26 bp, Homo sapiens
aggtgctttatctttaaaaaaagttc

SEQ ID NO: 14431 - DNA, 23 bp, Homo sapiens
ggttgtcttgaaaaaaacaaaag

SEQ ID NO: 14432 - DNA, 22 bp, Homo sapiens
tttaacacagggtcaattttaa

SEQ ID NO: 14433 - DNA, 17 bp, Homo sapiens
actccacctacatgacc

SEQ ID NO: 14434 - DNA, 29 bp, Homo sapiens
cgaaagaagaaaatgttttacaataaatt

SEQ ID NO: 14435 - DNA, 20 bp, Homo sapiens
aaacccctgtttttgaagga

SEQ ID NO: 14436 - DNA, 26 bp, Homo sapiens
aaacttttatgattattgggtttttt

SEQ ID NO: 14437 - DNA, 21 bp, Homo sapiens
acatcaatttttccatctgac

SEQ ID NO: 14438 - DNA, 23 bp, Homo sapiens
tgtgacagcagttgaatttttag

SEQ ID NO: 14439 - DNA, 22 bp, Homo sapiens
gagtgttttgcttaaagagaca

SEQ ID NO: 14440 - DNA, 19 bp, Homo sapiens
aactttcaacgcatccttc

SEQ ID NO: 14441 - DNA, 27 bp, Homo sapiens
ttaagtaataaaatgaccttaagttag

SEQ ID NO: 14442 - DNA, 21 bp, Homo sapiens
aggttactggtgctaccaaga

SEQ ID NO: 14443 - DNA, 16 bp, Homo sapiens
taccaccagaagcagc

SEQ ID NO: 14444 - DNA, 21 bp, Homo sapiens
actctgtctcaaaaacaaaac

SEQ ID NO: 14445 - DNA, 20 bp, Homo sapiens
tcttagtaaagggtcgtcgg

SEQ ID NO: 14446 - DNA, 22 bp, Homo sapiens
tgctggccttaaatttctaagc

SEQ ID NO: 14447 - DNA, 21 bp, Homo sapiens
ggtattgactggaattctacc

SEQ ID NO: 14448 - DNA, 22 bp, Homo sapiens
tgttatctagtattgaagctgc

SEQ ID NO: 14449 - DNA, 21 bp, Homo sapiens
aaaattactgaaaatgcagac

SEQ ID NO: 14450 - DNA, 18 bp, Homo sapiens
ttggtttgcattggccga

SEQ ID NO: 14451 - DNA, 23 bp, Homo sapiens
ccccaaagccaatacatatttta

SEQ ID NO: 14452 - DNA, 20 bp, Homo sapiens
tgaactagatcccagaggta

SEQ ID NO: 14453 - DNA, 25 bp, Homo sapiens
cagcttatctttgagtaaaattcag

SEQ ID NO: 14454 - DNA, 21 bp, Homo sapiens
ggaccagcaactacatcacca

SEQ ID NO: 14455 - DNA, 22 bp, Homo sapiens
tagatttttgaagagctgcatt

SEQ ID NO: 14456 - DNA, 18 bp, Homo sapiens
gccattccttcaacacag

SEQ ID NO: 14457 - DNA, 20 bp, Homo sapiens
accataatgtaactgaaggt

SEQ ID NO: 14458 - DNA, 20 bp, Homo sapiens
gcaacttcagggtgtgtgta

SEQ ID NO: 14459 - DNA, 22 bp, Homo sapiens
tttctgtggtagtatctatgcc

SEQ ID NO: 14460 - DNA, 19 bp, Homo sapiens
ccatgttcagacttacctc

SEQ ID NO: 14461 - DNA, 23 bp, Homo sapiens
aaagcagaggatgaaggcattat

SEQ ID NO: 14462 - DNA, 19 bp, Homo sapiens
aaaatgctgtttctcaacc

SEQ ID NO: 14463 - DNA, 22 bp, Homo sapiens
acaattgtgtgccatcagtgat

SEQ ID NO: 14464 - DNA, 24 bp, Homo sapiens
aatgctaacaagggaaaaatatat

SEQ ID NO: 14465 - DNA, 20 bp, Homo sapiens
agagcagttgaaagaagagg

SEQ ID NO: 14466 - DNA, 22 bp, Homo sapiens
gcagcaaatgggaatttcccaa

SEQ ID NO: 14467 - DNA, 22 bp, Homo sapiens
cttctatgtgctttgcgaacaa

SEQ ID NO: 14468 - DNA, 17 bp, Homo sapiens
gcccaaggatcttcacc

SEQ ID NO: 14469 - DNA, 23 bp, Homo sapiens
tgattttacaaattggaaagaac

SEQ ID NO: 14470 - DNA, 23 bp, Homo sapiens
ctctggttttacaatactcactg

SEQ ID NO: 14471 - DNA, 22 bp, Homo sapiens
ggtattgagtacaaagttggga

SEQ ID NO: 14472 - DNA, 20 bp, Homo sapiens
acaccaggtggtttataatt

SEQ ID NO: 14473 - DNA, 24 bp, Homo sapiens
agacaaatgctgacacagatggca

SEQ ID NO: 14474 - DNA, 16 bp, Homo sapiens
tgatgcacagagagcc

SEQ ID NO: 14475 - DNA, 21 bp, Homo sapiens
tgggagcacatattcttggac

SEQ ID NO: 14476 - DNA, 21 bp, Homo sapiens
tcatttaccatttctccagca

SEQ ID NO: 14477 - DNA, 21 bp, Homo sapiens
ttcctgacttttcttcaactg

SEQ ID NO: 14478 - DNA, 20 bp, Homo sapiens
tgtgcatgacagactctagc

SEQ ID NO: 14479 - DNA, 20 bp, Homo sapiens
tcccctcaacaattgctatc

SEQ ID NO: 14480 - DNA, 23 bp, Homo sapiens
gtgggtcagaagaaaatttaggc

SEQ ID NO: 14481 - DNA, 19 bp, Homo sapiens
ttattttaaagggtgctgg

SEQ ID NO: 14482 - DNA, 23 bp, Homo sapiens
tgcttctctaaaagcttctgata

SEQ ID NO: 14483 - DNA, 22 bp, Homo sapiens
aatatggagcatcctgtgaaga

SEQ ID NO: 14484 - DNA, 23 bp, Homo sapiens
atataatcttctaattcaaaagt

SEQ ID NO: 14485 - DNA, 21 bp, Homo sapiens
atagaattgatggttgcctaa

SEQ ID NO: 14486 - DNA, 19 bp, Homo sapiens
cctgttcaggaatgtgact

SEQ ID NO: 14487 - DNA, 18 bp, Homo sapiens
tttcttcccttgcagacc

SEQ ID NO: 14488 - DNA, 24 bp, Homo sapiens
gtccaaacctattaaataccttcc

SEQ ID NO: 14489 - DNA, 22 bp, Homo sapiens
gtcatttggcaaatcaatcaac

SEQ ID NO: 14490 - DNA, 20 bp, Homo sapiens
tgggtggggggaattggaag

SEQ ID NO: 14491 - DNA, 19 bp, Homo sapiens
cggttggccaccttctcac

SEQ ID NO: 14492 - DNA, 21 bp, Homo sapiens
ggcaggcacccagagtagtag

SEQ ID NO: 14493 - DNA, 17 bp, Homo sapiens
ccaaacccaacccatac

SEQ ID NO: 14494 - DNA, 16 bp, Homo sapiens
cagggaccccagcgcc

SEQ ID NO: 14495 - DNA, 24 bp, Homo sapiens
cccacattttctttcaaaacaatg

SEQ ID NO: 14496 - DNA, 22 bp, Homo sapiens
cgttgtctccaaactttttttc

SEQ ID NO: 14497 - DNA, 23 bp, Homo sapiens
agcctggtatttatagaaattga

SEQ ID NO: 14498 - DNA, 21 bp, Homo sapiens
agaagggatttggtatatgtc

SEQ ID NO: 14499 - DNA, 22 bp, Homo sapiens
tttccatatgccagaaaagttg

SEQ ID NO: 14500 - DNA, 24 bp, Homo sapiens
caactaaacaatgtacatgaacat

SEQ ID NO: 14501 - DNA, 22 bp, Homo sapiens
aagtgaatatctgttcctcctc

SEQ ID NO: 14502 - DNA, 22 bp, Homo sapiens
aatatgtttgctttctcttctc

SEQ ID NO: 14503 - DNA, 17 bp, Homo sapiens
acagcgcctggaattgt

SEQ ID NO: 14504 - DNA, 16 bp, Homo sapiens
aggcattagccaccat

SEQ ID NO: 14505 - DNA, 24 bp, Homo sapiens
tgacaatctatctgaaaaattgga

SEQ ID NO: 14506 - DNA, 17 bp, Homo sapiens
tttctttgaagccagct

SEQ ID NO: 14507 - DNA, 24 bp, Homo sapiens
ttttgtctctataatacttgggtt

SEQ ID NO: 14508 - DNA, 29 bp, Homo sapiens
ataaaaagattccatagaacataaatctc

SEQ ID NO: 14509 - DNA, 24 bp, Homo sapiens
taagggaaataggacaactaaaat

SEQ ID NO: 14510 - DNA, 24 bp, Homo sapiens
acaaaaatgaatatagttatgtga

SEQ ID NO: 14511 - DNA, 20 bp, Homo sapiens
agaatgggatagagagctgg

SEQ ID NO: 14512 - DNA, 21 bp, Homo sapiens
atcctttatatttttacacct

SEQ ID NO: 14513 - DNA, 21 bp, Homo sapiens
ttcggcgatgttttttctgga

SEQ ID NO: 14514 - DNA, 25 bp, Homo sapiens
agttccaaaggatttttacttatcc

SEQ ID NO: 14515 - DNA, 23 bp, Homo sapiens
tgaaaatagtgctaagagtttca

SEQ ID NO: 14516 - DNA, 19 bp, Homo sapiens
tgttatccgggtcatagga

SEQ ID NO: 14517 - DNA, 22 bp, Homo sapiens
tctcctctaaagatgaaaagtc

SEQ ID NO: 14518 - DNA, 21 bp, Homo sapiens
tcctcacaataaagagaaggc

SEQ ID NO: 14519 - DNA, 23 bp, Homo sapiens
atttaatttctctgtttttcccc

SEQ ID NO: 14520 - DNA, 21 bp, Homo sapiens
attctcatctgcattccaatg

SEQ ID NO: 14521 - DNA, 22 bp, Homo sapiens
tactgggaagaatcatagcttc

SEQ ID NO: 14522 - DNA, 18 bp, Homo sapiens
tatgtgccatggggcctg

SEQ ID NO: 14523 - DNA, 18 bp, Homo sapiens
aggcataggcttatgcct

SEQ ID NO: 14524 - DNA, 18 bp, Homo sapiens
cttgtaccagctcactac

SEQ ID NO: 14525 - DNA, 19 bp, Homo sapiens
gccatttttggccttcatc

SEQ ID NO: 14526 - DNA, 20 bp, Homo sapiens
gagcattaattattcctgcc

SEQ ID NO: 14527 - DNA, 20 bp, Homo sapiens
ggcttgacagctttaaagtc

SEQ ID NO: 14528 - DNA, 21 bp, Homo sapiens
gatagtaagctagatgaatag

SEQ ID NO: 14529 - DNA, 18 bp, Homo sapiens
ggttgttggaaaggagac

SEQ ID NO: 14530 - DNA, 28 bp, Homo sapiens
gcataataactgaattagtcatattata

SEQ ID NO: 14531 - DNA, 22 bp, Homo sapiens
tataatttataacaatagtgcc

SEQ ID NO: 14532 - DNA, 24 bp, Homo sapiens
ttgaaattatctaactttccattt

SEQ ID NO: 14533 - DNA, 24 bp, Homo sapiens
gcaagacttaaccactaattacta

SEQ ID NO: 14534 - DNA, 21 bp, Homo sapiens
aagtattggacaacttgttag

SEQ ID NO: 14535 - DNA, 23 bp, Homo sapiens
gctctgctatacaattgaccttt

SEQ ID NO: 14536 - DNA, 24 bp, Homo sapiens
ccatgtaatgattacctagatttt

SEQ ID NO: 14537 - DNA, 19 bp, Homo sapiens
ccagattagccccatgagg

SEQ ID NO: 14538 - DNA, 24 bp, Homo sapiens
gctccttttacttgctttctttca

SEQ ID NO: 14539 - DNA, 22 bp, Homo sapiens
ctgaaaaagggcaaggactatc

SEQ ID NO: 14540 - DNA, 21 bp, Homo sapiens
cacctgtttttgctgtgcttt

SEQ ID NO: 14541 - DNA, 23 bp, Homo sapiens
aactttcaagttatgaaaatagg

SEQ ID NO: 14542 - DNA, 22 bp, Homo sapiens
tcctttgcaagtggcactcctc

SEQ ID NO: 14543 - DNA, 20 bp, Homo sapiens
tgcatagagcagtcctggtt

SEQ ID NO: 14544 - DNA, 19 bp, Homo sapiens
ctgtggacttggtttcctg

SEQ ID NO: 14545 - DNA, 24 bp, Homo sapiens
acagatctagactctgtctcaaaa

SEQ ID NO: 14546 - DNA, 22 bp, Homo sapiens
ggtaatcacaagtctttcactg

SEQ ID NO: 14547 - DNA, 21 bp, Homo sapiens
taaaataatgcccatctgttg

SEQ ID NO: 14548 - DNA, 16 bp, Homo sapiens
tgcttcttcccagcag

SEQ ID NO: 14549 - DNA, 21 bp, Homo sapiens
agataatttgacttgttttta

SEQ ID NO: 14550 - DNA, 29 bp, Homo sapiens
acagaattactaacaatattgaaattatt

SEQ ID NO: 14551 - DNA, 18 bp, Homo sapiens
agagatcagagagctggg

SEQ ID NO: 14552 - DNA, 18 bp, Homo sapiens
tgaggtggaagtctacca

SEQ ID NO: 14553 - DNA, 24 bp, Homo sapiens
tgaaaatatccaatctgttaaggc

SEQ ID NO: 14554 - DNA, 20 bp, Homo sapiens
tgtgcaactaatgcatgaat

SEQ ID NO: 14555 - DNA, 18 bp, Homo sapiens
gccttccgagtcagtttc

SEQ ID NO: 14556 - DNA, 22 bp, Homo sapiens
tatgatgtggagccaggttaaa

SEQ ID NO: 14557 - DNA, 17 bp, Homo sapiens
aacaccacaaagaaccc

SEQ ID NO: 14558 - DNA, 19 bp, Homo sapiens
ccattccaagatccctgat

SEQ ID NO: 14559 - DNA, 21 bp, Homo sapiens
gatggtggtgaatattttccg

SEQ ID NO: 14560 - DNA, 24 bp, Homo sapiens
gttttttatagaacagaactgaaa

SEQ ID NO: 14561 - DNA, 21 bp, Homo sapiens
gtttgtacagcccagggaaat

SEQ ID NO: 14562 - DNA, 21 bp, Homo sapiens
tagctcagccttcttcttctc

SEQ ID NO: 14563 - DNA, 20 bp, Homo sapiens
atgcagcattatggtacatt

SEQ ID NO: 14564 - DNA, 19 bp, Homo sapiens
aaaggaatcatcctccgga

SEQ ID NO: 14565 - DNA, 22 bp, Homo sapiens
gcacatttttgcaaagttcatt

SEQ ID NO: 14566 - DNA, 19 bp, Homo sapiens
tggcggtcactcggcaatt

SEQ ID NO: 14567 - DNA, 20 bp, Homo sapiens
cctagtattagctggcaact

SEQ ID NO: 14568 - DNA, 22 bp, Homo sapiens
gagcaataaacaaaatacaggt

SEQ ID NO: 14569 - DNA, 29 bp, Homo sapiens
tagaacactaataaaattattttattaag

SEQ ID NO: 14570 - DNA, 23 bp, Homo sapiens
tacattctccatcactacttctg

SEQ ID NO: 14571 - DNA, 23 bp, Homo sapiens
taagatgtagcacaatgagagta

SEQ ID NO: 14572 - DNA, 21 bp, Homo sapiens
acagttaggtgtttagagcaa

SEQ ID NO: 14573 - DNA, 20 bp, Homo sapiens
tgtttttgctctcttttata

SEQ ID NO: 14574 - DNA, 20 bp, Homo sapiens
tcattctaattttattcgcc

SEQ ID NO: 14575 - DNA, 24 bp, Homo sapiens
tggaatataacttaacgactacag

SEQ ID NO: 14576 - DNA, 24 bp, Homo sapiens
ggccattcctctacttcttaatct

SEQ ID NO: 14577 - DNA, 27 bp, Homo sapiens
attcagtctttactgaaattaaaaaat

SEQ ID NO: 14578 - DNA, 21 bp, Homo sapiens
cacacacacacatcaaaaata

SEQ ID NO: 14579 - DNA, 21 bp, Homo sapiens
tgtcctctagaaaccgtatgc

SEQ ID NO: 14580 - DNA, 25 bp, Homo sapiens
tgttttgttttgctttctcaaataa

SEQ ID NO: 14581 - DNA, 18 bp, Homo sapiens
tggatcatgggccatgtg

SEQ ID NO: 14582 - DNA, 22 bp, Homo sapiens
agaagtgagaaattactgaaga

SEQ ID NO: 14583 - DNA, 23 bp, Homo sapiens
ttgaaaatatctgacaaactcat

SEQ ID NO: 14584 - DNA, 26 bp, Homo sapiens
aagttcttaatagtgaagaacaaaag

SEQ ID NO: 14585 - DNA, 21 bp, Homo sapiens
acttctaatggtgatgacagc

SEQ ID NO: 14586 - DNA, 23 bp, Homo sapiens
ctccaaaaataccttccagcact

SEQ ID NO: 14587 - DNA, 22 bp, Homo sapiens
cctgaaagatattaatttcaag

SEQ ID NO: 14588 - DNA, 24 bp, Homo sapiens
gtggaacaatttctattatacaag

SEQ ID NO: 14589 - DNA, 21 bp, Homo sapiens
ccagttctcccataatcacca

SEQ ID NO: 14590 - DNA, 22 bp, Homo sapiens
tgaatcaaatgagttaatagaa

SEQ ID NO: 14591 - DNA, 22 bp, Homo sapiens
ccaggaaaactgagaacagaat

SEQ ID NO: 14592 - DNA, 24 bp, Homo sapiens
taggatgataattggaggcaagtg

SEQ ID NO: 14593 - DNA, 23 bp, Homo sapiens
ctatattcatcataggaaacacc

SEQ ID NO: 14594 - DNA, 20 bp, Homo sapiens
tatttccagacttcacttct

SEQ ID NO: 14595 - DNA, 22 bp, Homo sapiens
aagttttcacatagtttcttac

SEQ ID NO: 14596 - DNA, 20 bp, Homo sapiens
ttaagcacagtggaagaatt

SEQ ID NO: 14597 - DNA, 24 bp, Homo sapiens
ccgattgaatatggagccaaatat

SEQ ID NO: 14598 - DNA, 24 bp, Homo sapiens
ggcaccattaaagaaaatatcatc

SEQ ID NO: 14599 - DNA, 19 bp, Homo sapiens
ccattcacagtagcttacc

SEQ ID NO: 14600 - DNA, 21 bp, Homo sapiens
tcaaagcatgccaactagaag

SEQ ID NO: 14601 - DNA, 21 bp, Homo sapiens
atattgtctttctctgcaaac

SEQ ID NO: 14602 - DNA, 23 bp, Homo sapiens
tggagatgcaatgttcaaaattt

SEQ ID NO: 14603 - DNA, 17 bp, Homo sapiens
tcttgctcgttgacctc

SEQ ID NO: 14604 - DNA, 19 bp, Homo sapiens
gaaggaagatgtgcctttc

SEQ ID NO: 14605 - DNA, 19 bp, Homo sapiens
catgaatgacatttacagc

SEQ ID NO: 14606 - DNA, 20 bp, Homo sapiens
tttggtaataggacatctcc

SEQ ID NO: 14607 - DNA, 22 bp, Homo sapiens
aaccccaggattttttcaattc

SEQ ID NO: 14608 - DNA, 23 bp, Homo sapiens
agaaggtggaatcacactgagtg

SEQ ID NO: 14609 - DNA, 24 bp, Homo sapiens
tggatactataccattatttatag

SEQ ID NO: 14610 - DNA, 22 bp, Homo sapiens
ataaatacaaatcagcatcttt

SEQ ID NO: 14611 - DNA, 18 bp, Homo sapiens
tcagtgaatcgatgtggt

SEQ ID NO: 14612 - DNA, 23 bp, Homo sapiens
caaagaacatacctttcaaatat

SEQ ID NO: 14613 - DNA, 19 bp, Homo sapiens
tcatctacactagatgacc

SEQ ID NO: 14614 - DNA, 19 bp, Homo sapiens
tgggacagtctgtctttct

SEQ ID NO: 14615 - DNA, 22 bp, Homo sapiens
ttttctttttagagcagtatac

SEQ ID NO: 14616 - DNA, 18 bp, Homo sapiens
acattctgccataccaac

SEQ ID NO: 14617 - DNA, 27 bp, Homo sapiens
gatacctagatgttttaacagaaaaag

SEQ ID NO: 14618 - DNA, 19 bp, Homo sapiens
gccatcagtttacagacac

SEQ ID NO: 14619 - DNA, 23 bp, Homo sapiens
agaatcatttaaaatataataaa

SEQ ID NO: 14620 - DNA, 17 bp, Homo sapiens
ttttgtcagctttcttt

SEQ ID NO: 14621 - DNA, 24 bp, Homo sapiens
acattaacaaaatgctaaaatacg

SEQ ID NO: 14622 - DNA, 21 bp, Homo sapiens
gctgtagattttggagttctg

SEQ ID NO: 14623 - DNA, 22 bp, Homo sapiens
ttttatatcttaaagctgtgtc

SEQ ID NO: 14624 - DNA, 20 bp, Homo sapiens
tctgcactaaattggtcgaa

SEQ ID NO: 14625 - DNA, 22 bp, Homo sapiens
ggtcacttctaaaatggaacat

SEQ ID NO: 14626 - DNA, 18 bp, Homo sapiens
gacaggagcatctccttc

SEQ ID NO: 14627 - DNA, 21 bp, Homo sapiens
agcagctatttttatgggaca

SEQ ID NO: 14628 - DNA, 17 bp, Homo sapiens
tccccaaactctccagt

SEQ ID NO: 14629 - DNA, 21 bp, Homo sapiens
catgggatgtgattctttcga

SEQ ID NO: 14630 - DNA, 22 bp, Homo sapiens
gtcttttgcacaatggaaaatt

SEQ ID NO: 14631 - DNA, 21 bp, Homo sapiens
actgagaccttacaccgtttc

SEQ ID NO: 14632 - DNA, 18 bp, Homo sapiens
ccttctctctaaaggctc

SEQ ID NO: 14633 - DNA, 23 bp, Homo sapiens
aaacaatcttttaaacagactgg

SEQ ID NO: 14634 - DNA, 17 bp, Homo sapiens
atcacgctgatgcgagg

SEQ ID NO: 14635 - DNA, 23 bp, Homo sapiens
tccaatcaactctatacgaaaat

SEQ ID NO: 14636 - DNA, 20 bp, Homo sapiens
gagtgtgtcatcaggttcag

SEQ ID NO: 14637 - DNA, 22 bp, Homo sapiens
tcgaagaggattctgatgagcc

SEQ ID NO: 14638 - DNA, 24 bp, Homo sapiens
ggccagtgacacttttcgtgtgga

SEQ ID NO: 14639 - DNA, 17 bp, Homo sapiens
gggagaggcgatactgc

SEQ ID NO: 14640 - DNA, 22 bp, Homo sapiens
cagtttcttgagataaccttct

SEQ ID NO: 14641 - DNA, 20 bp, Homo sapiens
acgaaggaggcagtctgtcc

SEQ ID NO: 14642 - DNA, 19 bp, Homo sapiens
caagcgatgtatacctacc

SEQ ID NO: 14643 - DNA, 24 bp, Homo sapiens
cattcaccgaaagacaacagcatc

SEQ ID NO: 14644 - DNA, 23 bp, Homo sapiens
gtaaattttgttacatgctacat

SEQ ID NO: 14645 - DNA, 26 bp, Homo sapiens
ctgaactggatatatattcaagaagg

SEQ ID NO: 14646 - DNA, 22 bp, Homo sapiens
tgaacttcatactttctgagtt

SEQ ID NO: 14647 - DNA, 21 bp, Homo sapiens
ttaacgaagaagacttaaagg

SEQ ID NO: 14648 - DNA, 22 bp, Homo sapiens
tggtatgctctccatatcatca

SEQ ID NO: 14649 - DNA, 28 bp, Homo sapiens
tgatttatatttgttaaaatacacttag

SEQ ID NO: 14650 - DNA, 22 bp, Homo sapiens
gcacaaaaattaagctcttgtg

SEQ ID NO: 14651 - DNA, 16 bp, Homo sapiens
aaaaccacaatggtgg

SEQ ID NO: 14652 - DNA, 21 bp, Homo sapiens
acaatagaacattcttacctc

SEQ ID NO: 14653 - DNA, 21 bp, Homo sapiens
aattcttttattcaggagtgc

SEQ ID NO: 14654 - DNA, 24 bp, Homo sapiens
tgtgcatatatatgtatacatccc

SEQ ID NO: 14655 - DNA, 24 bp, Homo sapiens
atggaacacataccttcgatatat

SEQ ID NO: 14656 - DNA, 21 bp, Homo sapiens
tgtgtgtatatatgcatactt

SEQ ID NO: 14657 - DNA, 23 bp, Homo sapiens
gtaatttttctggcagaggtaag

SEQ ID NO: 14658 - DNA, 17 bp, Homo sapiens
accaaagaagcagccac

SEQ ID NO: 14659 - DNA, 22 bp, Homo sapiens
gaacacaaagcaaaggaagatg

SEQ ID NO: 14660 - DNA, 26 bp, Homo sapiens
caacagaaataaaacacaatctacac

SEQ ID NO: 14661 - DNA, 21 bp, Homo sapiens
tgtgaatttagatgtgggcat

SEQ ID NO: 14662 - DNA, 23 bp, Homo sapiens
gaaatgaaacaaagtggattaca

SEQ ID NO: 14663 - DNA, 20 bp, Homo sapiens
actgtgtcttgttccattcc

SEQ ID NO: 14664 - DNA, 24 bp, Homo sapiens
caactaatggtcatcatttaaaca

SEQ ID NO: 14665 - DNA, 22 bp, Homo sapiens
gcaataatagtatgattttgag

SEQ ID NO: 14666 - DNA, 21 bp, Homo sapiens
tgctggtgataatcactgcat

SEQ ID NO: 14667 - DNA, 20 bp, Homo sapiens
gactcaagtttagttccatt

SEQ ID NO: 14668 - DNA, 16 bp, Homo sapiens
caagcaaagtgtcggc

SEQ ID NO: 14669 - DNA, 23 bp, Homo sapiens
gctgccaaataacgatttcctat

SEQ ID NO: 14670 - DNA, 24 bp, Homo sapiens
attttgtggtgtaaaattttcgac

SEQ ID NO: 14671 - DNA, 22 bp, Homo sapiens
tagtagaaataacagctatgca

SEQ ID NO: 14672 - DNA, 18 bp, Homo sapiens
tttcaacgtgttgagggt

SEQ ID NO: 14673 - DNA, 19 bp, Homo sapiens
acatttacgtgggagtagc

SEQ ID NO: 14674 - DNA, 17 bp, Homo sapiens
acaggccctattgatgg

SEQ ID NO: 14675 - DNA, 23 bp, Homo sapiens
taccactggtgcatactctaatc

SEQ ID NO: 14676 - DNA, 17 bp, Homo sapiens
aacaaagggcacatgcc

SEQ ID NO: 14677 - DNA, 24 bp, Homo sapiens
ctgttcttcaagcacctatgtcaa

SEQ ID NO: 14678 - DNA, 24 bp, Homo sapiens
tccaaaattgctatatctttggag

SEQ ID NO: 14679 - DNA, 21 bp, Homo sapiens
tgctaattcttatttgggttc

SEQ ID NO: 14680 - DNA, 24 bp, Homo sapiens
aacggtacttatttttacatacct

SEQ ID NO: 14681 - DNA, 30 bp, Homo sapiens
tattgaatatattgatatatctttaaaaaa

SEQ ID NO: 14682 - DNA, 21 bp, Homo sapiens
tgaaaacaaaatcacatttgc

SEQ ID NO: 14683 - DNA, 23 bp, Homo sapiens
aggtgggattcttaatagattct

SEQ ID NO: 14684 - DNA, 22 bp, Homo sapiens
ggctttggataattacaaaatt

SEQ ID NO: 14685 - DNA, 24 bp, Homo sapiens
cttaccatatttgacttcatccag

SEQ ID NO: 14686 - DNA, 21 bp, Homo sapiens
aactgctatagctccaatcac

SEQ ID NO: 14687 - DNA, 22 bp, Homo sapiens
taaaaaaaagtttgaggtgttt

SEQ ID NO: 14688 - DNA, 25 bp, Homo sapiens
tctcaacataataaaagccactatc

SEQ ID NO: 14689 - DNA, 21 bp, Homo sapiens
gacacactttgtccactttgc

SEQ ID NO: 14690 - DNA, 23 bp, Homo sapiens
tgtcataccttcagattccagtt

SEQ ID NO: 14691 - DNA, 22 bp, Homo sapiens
tcttacagttgttattaattgt

SEQ ID NO: 14692 - DNA, 24 bp, Homo sapiens
aataaagaatctcaaatagctctt

SEQ ID NO: 14693 - DNA, 19 bp, Homo sapiens
tctttgttgcaacagtgcc

SEQ ID NO: 14694 - DNA, 26 bp, Homo sapiens
tagaaaaaaattattgttatatgatg

SEQ ID NO: 14695 - DNA, 18 bp, Homo sapiens
acctcacagcaactcaaa

SEQ ID NO: 14696 - DNA, 21 bp, Homo sapiens
gatgagtgaaaattggactcc

SEQ ID NO: 14697 - DNA, 22 bp, Homo sapiens
ggcaccagtgtgaaaaaaagct

SEQ ID NO: 14698 - DNA, 16 bp, Homo sapiens
tgccgtccgaaggcac

SEQ ID NO: 14699 - DNA, 22 bp, Homo sapiens
agtctttttcaggtacaagata

SEQ ID NO: 14700 - DNA, 20 bp, Homo sapiens
aggtacaagaaccagttggc

SEQ ID NO: 14701 - DNA, 23 bp, Homo sapiens
tgttttctatggaaatatttcac

SEQ ID NO: 14702 - DNA, 22 bp, Homo sapiens
ggtaacagcaatgaagaagatg

SEQ ID NO: 14703 - DNA, 21 bp, Homo sapiens
aggactatggacacttcgtgc

SEQ ID NO: 14704 - DNA, 22 bp, Homo sapiens
tgcttagctaaagttaatgagt

SEQ ID NO: 14705 - DNA, 21 bp, Homo sapiens
gctctgaatttacatactgcc

SEQ ID NO: 14706 - DNA, 23 bp, Homo sapiens
aaagatatcaaaaattgataacc

SEQ ID NO: 14707 - DNA, 24 bp, Homo sapiens
tggttccaaatgagaatagaaatg

SEQ ID NO: 14708 - DNA, 22 bp, Homo sapiens
ttcaaagaaatcacttgttcaa

SEQ ID NO: 14709 - DNA, 22 bp, Homo sapiens
caggataataccaactcttcct

SEQ ID NO: 14710 - DNA, 24 bp, Homo sapiens
gatttaaaaattgttaaaattagc

SEQ ID NO: 14711 - DNA, 18 bp, Homo sapiens
ctggagtttacagcccac

SEQ ID NO: 14712 - DNA, 22 bp, Homo sapiens
aggagaagtgtgaataaagtcg

SEQ ID NO: 14713 - DNA, 26 bp, Homo sapiens
ctttgttacttgtctgaatttttttc

SEQ ID NO: 14714 - DNA, 21 bp, Homo sapiens
gtgcatctataggagaaggag

SEQ ID NO: 14715 - DNA, 20 bp, Homo sapiens
tcttaagctcaatatacggt

SEQ ID NO: 14716 - DNA, 20 bp, Homo sapiens
catgagtacattgcagtggg

SEQ ID NO: 14717 - DNA, 24 bp, Homo sapiens
gaagagataaggatttaatgacag

SEQ ID NO: 14718 - DNA, 17 bp, Homo sapiens
ggctcacagatcgcatc

SEQ ID NO: 14719 - DNA, 22 bp, Homo sapiens
tgttagttcattgaaaagcccg

SEQ ID NO: 14720 - DNA, 20 bp, Homo sapiens
gtttggttgacttggtaggt

SEQ ID NO: 14721 - DNA, 24 bp, Homo sapiens
ttttacaagttattttttaggaag

SEQ ID NO: 14722 - DNA, 22 bp, Homo sapiens
catctttcttcacgtgtgaatt

SEQ ID NO: 14723 - DNA, 24 bp, Homo sapiens
aaaaacaaaaatgttgttattttt

SEQ ID NO: 14724 - DNA, 21 bp, Homo sapiens
tctgtgtattttgctgtgaga

SEQ ID NO: 14725 - DNA, 19 bp, Homo sapiens
catgccaacagaaggtaaa

SEQ ID NO: 14726 - DNA, 16 bp, Homo sapiens
cctctggccaggactt

SEQ ID NO: 14727 - DNA, 23 bp, Homo sapiens
ctcgaaagttatgattattgaga

SEQ ID NO: 14728 - DNA, 18 bp, Homo sapiens
caggctactgggattcac

SEQ ID NO: 14729 - DNA, 21 bp, Homo sapiens
gggccaaatgactgtcaaaga

SEQ ID NO: 14730 - DNA, 23 bp, Homo sapiens
acatgtgtgtttaatattgattc

SEQ ID NO: 14731 - DNA, 23 bp, Homo sapiens
catttccttctcaataagtcctg

SEQ ID NO: 14732 - DNA, 22 bp, Homo sapiens
ctagctgtaattgcattgtacc

SEQ ID NO: 14733 - DNA, 23 bp, Homo sapiens
ttataatcaccttgtggatctaa

SEQ ID NO: 14734 - DNA, 23 bp, Homo sapiens
tgttggatcaagataaatcaaaa

SEQ ID NO: 14735 - DNA, 24 bp, Homo sapiens
aaggtaatgaaaaataattacaag

SEQ ID NO: 14736 - DNA, 21 bp, Homo sapiens
accctaaatctaagtcagtgt

SEQ ID NO: 14737 - DNA, 16 bp, Homo sapiens
ttcttcccaagaggcc

SEQ ID NO: 14738 - DNA, 25 bp, Homo sapiens
gaatgaataagtgaaaatcttccac

SEQ ID NO: 14739 - DNA, 21 bp, Homo sapiens
tggatttctccttcagtgttc

SEQ ID NO: 14740 - DNA, 23 bp, Homo sapiens
tgaagtacaatactgaattatgt

SEQ ID NO: 14741 - DNA, 17 bp, Homo sapiens
aaggctttcctccactg

SEQ ID NO: 14742 - DNA, 24 bp, Homo sapiens
ccatcacttttaccttataggtgg

SEQ ID NO: 14743 - DNA, 24 bp, Homo sapiens
agtaaaaaatataatttagttgcc

SEQ ID NO: 14744 - DNA, 21 bp, Homo sapiens
cagcttttttgagactactga

SEQ ID NO: 14745 - DNA, 24 bp, Homo sapiens
gcaatgcataacaaatatattttg

SEQ ID NO: 14746 - DNA, 21 bp, Homo sapiens
tgggattcaataactttgcaa

SEQ ID NO: 14747 - DNA, 22 bp, Homo sapiens
tttagagacatcttttctgcct

SEQ ID NO: 14748 - DNA, 25 bp, Homo sapiens
gatccaagttttttctaaatgttcc

SEQ ID NO: 14749 - DNA, 23 bp, Homo sapiens
gatggtaagtacatgggtgtttc

SEQ ID NO: 14750 - DNA, 20 bp, Homo sapiens
tacctcatctgcaactttcc

SEQ ID NO: 14751 - DNA, 21 bp, Homo sapiens
aataagggaaaaataaaaagt

SEQ ID NO: 14752 - DNA, 20 bp, Homo sapiens
cagccatttgtgttggtatg

SEQ ID NO: 14753 - DNA, 23 bp, Homo sapiens
gctatagaaagtatttatttttt

SEQ ID NO: 14754 - DNA, 24 bp, Homo sapiens
ttagggtactccattttaaagttg

SEQ ID NO: 14755 - DNA, 23 bp, Homo sapiens
tgaacagtggagtgatcaagaaa

SEQ ID NO: 14756 - DNA, 21 bp, Homo sapiens
tgttctatcacagatctgagc

SEQ ID NO: 14757 - DNA, 24 bp, Homo sapiens
attcaaatggtggcaggtagtggg

SEQ ID NO: 14758 - DNA, 16 bp, Homo sapiens
gcttaggacacagccc

SEQ ID NO: 14759 - DNA, 24 bp, Homo sapiens
tcctgtgtttatttttagaatgtc

SEQ ID NO: 14760 - DNA, 20 bp, Homo sapiens
gcagcaagatcttcgcctta

SEQ ID NO: 14761 - DNA, 23 bp, Homo sapiens
atcttctctaactgcaggttggg

SEQ ID NO: 14762 - DNA, 24 bp, Homo sapiens
ccactgtgctattaagtaacagaa

SEQ ID NO: 14763 - DNA, 21 bp, Homo sapiens
gactttgtccttgtggatggg

SEQ ID NO: 14764 - DNA, 23 bp, Homo sapiens
atgacagcctaatagaaatatgt

SEQ ID NO: 14765 - DNA, 24 bp, Homo sapiens
ggctagatctgttctcagtaaggc

SEQ ID NO: 14766 - DNA, 20 bp, Homo sapiens
ttatgctcatttccactggg

SEQ ID NO: 14767 - DNA, 21 bp, Homo sapiens
gagttcttctaattatttggt

SEQ ID NO: 14768 - DNA, 22 bp, Homo sapiens
atcaacattatgtgaaaagaac

SEQ ID NO: 14769 - DNA, 20 bp, Homo sapiens
tgcttctatcctgtgttcac

SEQ ID NO: 14770 - DNA, 24 bp, Homo sapiens
agaacaatagacatattatcaagg

SEQ ID NO: 14771 - DNA, 18 bp, Homo sapiens
caagggcaatgagatctt

SEQ ID NO: 14772 - DNA, 26 bp, Homo sapiens
attttctttcttttctagaacatacc

SEQ ID NO: 14773 - DNA, 21 bp, Homo sapiens
aagaacttgtacattgttgca

SEQ ID NO: 14774 - DNA, 21 bp, Homo sapiens
gcacagtaattctctgtgaac

SEQ ID NO: 14775 - DNA, 20 bp, Homo sapiens
cttgtgcagctattttgagt

SEQ ID NO: 14776 - DNA, 24 bp, Homo sapiens
gcactttgttctcttctatgacct

SEQ ID NO: 14777 - DNA, 21 bp, Homo sapiens
atgtgacatacctgattgttc

SEQ ID NO: 14778 - DNA, 21 bp, Homo sapiens
ttgccggaagaggctcctctc

SEQ ID NO: 14779 - DNA, 24 bp, Homo sapiens
ttttattttcctttgagcctgtgc

SEQ ID NO: 14780 - DNA, 23 bp, Homo sapiens
cttagacttgcacttgcttgagt

SEQ ID NO: 14781 - DNA, 22 bp, Homo sapiens
atctcactaacagccatttccc

SEQ ID NO: 14782 - DNA, 21 bp, Homo sapiens
ccttgtatcttgcacctcttc

SEQ ID NO: 14783 - DNA, 22 bp, Homo sapiens
ttccatccagaaactgctgaac

SEQ ID NO: 14784 - DNA, 18 bp, Homo sapiens
agctccaattccatgagc

SEQ ID NO: 14785 - DNA, 22 bp, Homo sapiens
gacagggtgaagctctttcccc

SEQ ID NO: 14786 - DNA, 18 bp, Homo sapiens
gttttctgaggcagaggt

SEQ ID NO: 14787 - DNA, 18 bp, Homo sapiens
aagaggagacagaagaag

SEQ ID NO: 14788 - DNA, 23 bp, Homo sapiens
cccatatcagtgtcctcaattcc

SEQ ID NO: 14789 - DNA, 24 bp, Homo sapiens
tcaacacaaaatgaatgatctttc

SEQ ID NO: 14790 - DNA, 21 bp, Homo sapiens
ggatcccccaggatgcatagt

SEQ ID NO: 14791 - DNA, 23 bp, Homo sapiens
gaccgctgcactgacttcatttc

SEQ ID NO: 14792 - DNA, 18 bp, Homo sapiens
tggcagaccacaaagacg

SEQ ID NO: 14793 - DNA, 24 bp, Homo sapiens
cccaggactcctttggaatatagc

SEQ ID NO: 14794 - DNA, 18 bp, Homo sapiens
cccagaagaccttctctc

SEQ ID NO: 14795 - DNA, 24 bp, Homo sapiens
tcagagagcatttttgacctggac

SEQ ID NO: 14796 - DNA, 16 bp, Homo sapiens
aggcctgcggctgtgc

SEQ ID NO: 14797 - DNA, 24 bp, Homo sapiens
cgctggctttgtcttctacttggg

SEQ ID NO: 14798 - DNA, 17 bp, Homo sapiens
gcaccagttctgctggc

SEQ ID NO: 14799 - DNA, 18 bp, Homo sapiens
ttaccgttctttggtggc

SEQ ID NO: 14800 - DNA, 19 bp, Homo sapiens
aggtggactgcaacatttt

SEQ ID NO: 14801 - DNA, 23 bp, Homo sapiens
cgtgcagtctttggtgttcagag

SEQ ID NO: 14802 - DNA, 19 bp, Homo sapiens
aagaaaggcaaagagatgg

SEQ ID NO: 14803 - DNA, 16 bp, Homo sapiens
cgacaaggcgcgtggc

SEQ ID NO: 14804 - DNA, 20 bp, Homo sapiens
cgtggtcatagctagatagt

SEQ ID NO: 14805 - DNA, 24 bp, Homo sapiens
caacgggattcttttgctttgaaa

SEQ ID NO: 14806 - DNA, 22 bp, Homo sapiens
gcacttacctttaagagcatcc

SEQ ID NO: 14807 - DNA, 23 bp, Homo sapiens
ttgacttgtttctggttatccac

SEQ ID NO: 14808 - DNA, 17 bp, Homo sapiens
tccaggacattgtagcc

SEQ ID NO: 14809 - DNA, 24 bp, Homo sapiens
ttggtcaatctccaagctggccac

SEQ ID NO: 14810 - DNA, 22 bp, Homo sapiens
tgagtttgtaactgaatgtgtg

SEQ ID NO: 14811 - DNA, 19 bp, Homo sapiens
ccctttacctgcgtttcct

SEQ ID NO: 14812 - DNA, 22 bp, Homo sapiens
cccaatgagagcagagccctgg

SEQ ID NO: 14813 - DNA, 19 bp, Homo sapiens
tgcggcagtgaaacatgtg

SEQ ID NO: 14814 - DNA, 22 bp, Homo sapiens
tttggtaagtaaggtagcaaat

SEQ ID NO: 14815 - DNA, 16 bp, Homo sapiens
caggccgtcccagtgc

SEQ ID NO: 14816 - DNA, 22 bp, Homo sapiens
acttgtgcatttgtcttctctc

SEQ ID NO: 14817 - DNA, 24 bp, Homo sapiens
atgattagcgtaagcagagccagt

SEQ ID NO: 14818 - DNA, 23 bp, Homo sapiens
agctcaaccagtggctgatgatt

SEQ ID NO: 14819 - DNA, 16 bp, Homo sapiens
agtccaccggattgag

SEQ ID NO: 14820 - DNA, 24 bp, Homo sapiens
cacatgtggtgggtgtgtttctgg

SEQ ID NO: 14821 - DNA, 16 bp, Homo sapiens
cttccgcagcagctgc

SEQ ID NO: 14822 - DNA, 24 bp, Homo sapiens
atttgacactgttccttgtcggac

SEQ ID NO: 14823 - DNA, 20 bp, Homo sapiens
gaatcggtgtgccagctctg

SEQ ID NO: 14824 - DNA, 19 bp, Homo sapiens
gaagactcagcagcttctc

SEQ ID NO: 14825 - DNA, 24 bp, Homo sapiens
ccttagaagtaaacacaaaacatt

SEQ ID NO: 14826 - DNA, 18 bp, Homo sapiens
agcaggccagaaggcaac

SEQ ID NO: 14827 - DNA, 23 bp, Homo sapiens
taaaaatactttgtagctacttc

SEQ ID NO: 14828 - DNA, 21 bp, Homo sapiens
agatgtcagaagtaaatgctc

SEQ ID NO: 14829 - DNA, 22 bp, Homo sapiens
tcatgcctggaaaggagaagac

SEQ ID NO: 14830 - DNA, 17 bp, Homo sapiens
ttgtcctaagtgtggca

SEQ ID NO: 14831 - DNA, 28 bp, Homo sapiens
aaatggtatacttaggatgactaatatt

SEQ ID NO: 14832 - DNA, 22 bp, Homo sapiens
aggatgtgagcatattttctgt

SEQ ID NO: 14833 - DNA, 23 bp, Homo sapiens
ggaagcaattttagtttctaaag

SEQ ID NO: 14834 - DNA, 17 bp, Homo sapiens
ccagtggcaaagaatgc

SEQ ID NO: 14835 - DNA, 22 bp, Homo sapiens
ggctgcagactgtgtacttctg

SEQ ID NO: 14836 - DNA, 18 bp, Homo sapiens
caagctgtcttcatggtg

SEQ ID NO: 14837 - DNA, 20 bp, Homo sapiens
actactcttagcacagaaat

SEQ ID NO: 14838 - DNA, 20 bp, Homo sapiens
atggttttgctgaatttctg

SEQ ID NO: 14839 - DNA, 20 bp, Homo sapiens
gggccactctccacatagag

SEQ ID NO: 14840 - DNA, 20 bp, Homo sapiens
caagcctcaaaacatatgtg

SEQ ID NO: 14841 - DNA, 22 bp, Homo sapiens
taggtgcaccagtaagaggaat

SEQ ID NO: 14842 - DNA, 19 bp, Homo sapiens
cagaggggaaagtttgcaa

SEQ ID NO: 14843 - DNA, 25 bp, Homo sapiens
tgataagtggtaagagaaaaatcag

SEQ ID NO: 14844 - DNA, 20 bp, Homo sapiens
tgtgaattttgtgattggac

SEQ ID NO: 14845 - DNA, 21 bp, Homo sapiens
tgtattcaaagccaacttcac

SEQ ID NO: 14846 - DNA, 21 bp, Homo sapiens
aacgatgctatgatttgtttc

SEQ ID NO: 14847 - DNA, 24 bp, Homo sapiens
tacctaggagacgttctgtcaaag

SEQ ID NO: 14848 - DNA, 24 bp, Homo sapiens
ccacccagtaaaaatcaaaaaatc

SEQ ID NO: 14849 - DNA, 24 bp, Homo sapiens
aatcagcccacctaatttcaaaag

SEQ ID NO: 14850 - DNA, 22 bp, Homo sapiens
gggacagtcagttttgaatatt

SEQ ID NO: 14851 - DNA, 23 bp, Homo sapiens
aatgatgctaaatgatggtttcg

SEQ ID NO: 14852 - DNA, 20 bp, Homo sapiens
cgtgcttatgggttttcttg

SEQ ID NO: 14853 - DNA, 24 bp, Homo sapiens
caccaattgtacaaacagcatacc

SEQ ID NO: 14854 - DNA, 20 bp, Homo sapiens
ctcagtgctttcatggattt

SEQ ID NO: 14855 - DNA, 24 bp, Homo sapiens
aggggaaaaatcatttttgtactt

SEQ ID NO: 14856 - DNA, 20 bp, Homo sapiens
ccagttggatgcacttgaac

SEQ ID NO: 14857 - DNA, 24 bp, Homo sapiens
ttttggagtagatggtgaatctcc

SEQ ID NO: 14858 - DNA, 19 bp, Homo sapiens
tcagagaagacatggcttc

SEQ ID NO: 14859 - DNA, 16 bp, Homo sapiens
gagctaacagcccagg

SEQ ID NO: 14860 - DNA, 22 bp, Homo sapiens
tgtacaagattgcaactctttg

SEQ ID NO: 14861 - DNA, 23 bp, Homo sapiens
agctgctccagggccttgtttag

SEQ ID NO: 14862 - DNA, 17 bp, Homo sapiens
cgcctatgtgtcctgtg

SEQ ID NO: 14863 - DNA, 19 bp, Homo sapiens
gcattctcttttctggaag

SEQ ID NO: 14864 - DNA, 22 bp, Homo sapiens
tgaagtcaaagaaaaggctaag

SEQ ID NO: 14865 - DNA, 24 bp, Homo sapiens
cctagaaactaagctagggatttg

SEQ ID NO: 14866 - DNA, 21 bp, Homo sapiens
caatcactcattatcagcatg

SEQ ID NO: 14867 - DNA, 24 bp, Homo sapiens
cctcgttaatttaagttacaatcc

SEQ ID NO: 14868 - DNA, 16 bp, Homo sapiens
ggaggaagaaccccac

SEQ ID NO: 14869 - DNA, 21 bp, Homo sapiens
atcaaacatttattgcttagc

SEQ ID NO: 14870 - DNA, 19 bp, Homo sapiens
aggaagagagccagaagag

SEQ ID NO: 14871 - DNA, 18 bp, Homo sapiens
ccctcagcagaaggagcc

SEQ ID NO: 14872 - DNA, 24 bp, Homo sapiens
aacaaaaagaaaatgaagataaac

SEQ ID NO: 14873 - DNA, 18 bp, Homo sapiens
ccttctaactgagtgggg

SEQ ID NO: 14874 - DNA, 23 bp, Homo sapiens
ccttccagaagaaagaaaattct

SEQ ID NO: 14875 - DNA, 21 bp, Homo sapiens
caggtctgtccagtggcttct

SEQ ID NO: 14876 - DNA, 27 bp, Homo sapiens
aaatctaatccaatgtttttaattacg

SEQ ID NO: 14877 - DNA, 24 bp, Homo sapiens
ttcttttcctttatcttcattttc

SEQ ID NO: 14878 - DNA, 23 bp, Homo sapiens
ctggattcacttaattcagacag

SEQ ID NO: 14879 - DNA, 22 bp, Homo sapiens
tttcttttccttcttcctctcc

SEQ ID NO: 14880 - DNA, 18 bp, Homo sapiens
gcaagcagctcaggtaat

SEQ ID NO: 14881 - DNA, 23 bp, Homo sapiens
tgtgctatatataaagcaggaag

SEQ ID NO: 14882 - DNA, 19 bp, Homo sapiens
aaaactctcctaggaggca

SEQ ID NO: 14883 - DNA, 23 bp, Homo sapiens
aaatggaattagagtgggcgttt

SEQ ID NO: 14884 - DNA, 19 bp, Homo sapiens
acccctccaagaaaagatc

SEQ ID NO: 14885 - DNA, 22 bp, Homo sapiens
tccattcactccaccttattac

SEQ ID NO: 14886 - DNA, 22 bp, Homo sapiens
agcttttctctcttacccacag

SEQ ID NO: 14887 - DNA, 22 bp, Homo sapiens
cttgcaagacttgcttttcctg

SEQ ID NO: 14888 - DNA, 24 bp, Homo sapiens
cacaggttaggataaattgcagtt

SEQ ID NO: 14889 - DNA, 23 bp, Homo sapiens
ttctttcggtgggaagaggaggg

SEQ ID NO: 14890 - DNA, 22 bp, Homo sapiens
cagtgagatatgcttaatgaac

SEQ ID NO: 14891 - DNA, 18 bp, Homo sapiens
tcatgaagaaagccaggt

SEQ ID NO: 14892 - DNA, 23 bp, Homo sapiens
tgggtacctacattaatagttgt

SEQ ID NO: 14893 - DNA, 19 bp, Homo sapiens
actctagacaaaaagaccc

SEQ ID NO: 14894 - DNA, 24 bp, Homo sapiens
caatcataatacggttctccctat

SEQ ID NO: 14895 - DNA, 17 bp, Homo sapiens
aggaggaggaaaccgtc

SEQ ID NO: 14896 - DNA, 22 bp, Homo sapiens
atggtgttttaaaggttgtacc

SEQ ID NO: 14897 - DNA, 24 bp, Homo sapiens
atttcagtggaggaaaactgaaac

SEQ ID NO: 14898 - DNA, 21 bp, Homo sapiens
actagaatttcttggagggtc

SEQ ID NO: 14899 - DNA, 24 bp, Homo sapiens
cacctctagggaatgatttctgaa

SEQ ID NO: 14900 - DNA, 22 bp, Homo sapiens
gccaccacattggcagttcgac

SEQ ID NO: 14901 - DNA, 19 bp, Homo sapiens
gccatttctattcccacat

SEQ ID NO: 14902 - DNA, 24 bp, Homo sapiens
agggatgaataaaaatatgaaaat

SEQ ID NO: 14903 - DNA, 17 bp, Homo sapiens
aggccctgatggtacta

SEQ ID NO: 14904 - DNA, 18 bp, Homo sapiens
aaatctgagcgggaactt

SEQ ID NO: 14905 - DNA, 19 bp, Homo sapiens
aatgtagggagaaattggc

SEQ ID NO: 14906 - DNA, 28 bp, Homo sapiens
tgatggacttcaatatttatgaagtatc

SEQ ID NO: 14907 - DNA, 24 bp, Homo sapiens
aatttatatttcttaatttacagc

SEQ ID NO: 14908 - DNA, 24 bp, Homo sapiens
ctttcagagtaaccagaactttag

SEQ ID NO: 14909 - DNA, 21 bp, Homo sapiens
ttttacactaatgttctttgc

SEQ ID NO: 14910 - DNA, 20 bp, Homo sapiens
tgatatacatttccttgcca

SEQ ID NO: 14911 - DNA, 18 bp, Homo sapiens
cctggtgactttgtctgc

SEQ ID NO: 14912 - DNA, 27 bp, Homo sapiens
tacagagctatatatcataattatttc

SEQ ID NO: 14913 - DNA, 22 bp, Homo sapiens
atagggttgtgatacacagatg

SEQ ID NO: 14914 - DNA, 18 bp, Homo sapiens
tgacttatgtccgaaatc

SEQ ID NO: 14915 - DNA, 23 bp, Homo sapiens
ttgagttttgaattcatttggaa

SEQ ID NO: 14916 - DNA, 18 bp, Homo sapiens
gcactcacctttttgcag

SEQ ID NO: 14917 - DNA, 22 bp, Homo sapiens
tggcagttaatatttttatgct

SEQ ID NO: 14918 - DNA, 22 bp, Homo sapiens
tcttagcaacatgtcataaatc

SEQ ID NO: 14919 - DNA, 20 bp, Homo sapiens
agcaaagtcgacttgttcaa

SEQ ID NO: 14920 - DNA, 23 bp, Homo sapiens
attccacataatttctctaggtt

SEQ ID NO: 14921 - DNA, 18 bp, Homo sapiens
agaccctaccaactacgg

SEQ ID NO: 14922 - DNA, 22 bp, Homo sapiens
aaatgctgtataaatcaagagc

SEQ ID NO: 14923 - DNA, 19 bp, Homo sapiens
aattattctgcatcggggt

SEQ ID NO: 14924 - DNA, 19 bp, Homo sapiens
ttgtaaaagcacttgcctt

SEQ ID NO: 14925 - DNA, 22 bp, Homo sapiens
agtgtttgcattttgtttcctt

SEQ ID NO: 14926 - DNA, 18 bp, Homo sapiens
tggcgagggctaactgga

SEQ ID NO: 14927 - DNA, 20 bp, Homo sapiens
tggaggtccaatagaagtaa

SEQ ID NO: 14928 - DNA, 19 bp, Homo sapiens
aaacctgtagcattaaacg

SEQ ID NO: 14929 - DNA, 20 bp, Homo sapiens
cctaaacttgtgcaaaagcg

SEQ ID NO: 14930 - DNA, 22 bp, Homo sapiens
tgttcaaatccaactagtctct

SEQ ID NO: 14931 - DNA, 16 bp, Homo sapiens
ctacttccgcgcctgc

SEQ ID NO: 14932 - DNA, 24 bp, Homo sapiens
ggtttacaggaatttaatcggtaa

SEQ ID NO: 14933 - DNA, 22 bp, Homo sapiens
cgtggagtgaccatatttgtgg

SEQ ID NO: 14934 - DNA, 17 bp, Homo sapiens
accaagtccgaactcgc

SEQ ID NO: 14935 - DNA, 24 bp, Homo sapiens
aaggaagtatatcatgtggaaaac

SEQ ID NO: 14936 - DNA, 21 bp, Homo sapiens
taggcaatggtgtcatccatg

SEQ ID NO: 14937 - DNA, 23 bp, Homo sapiens
tctgggcaagaataaataaaata

SEQ ID NO: 14938 - DNA, 21 bp, Homo sapiens
tctccagtttaattggtcagg

SEQ ID NO: 14939 - DNA, 25 bp, Homo sapiens
atcctccttcaactcattaaaatag

SEQ ID NO: 14940 - DNA, 24 bp, Homo sapiens
agaaccacaaactttatttgaaat

SEQ ID NO: 14941 - DNA, 23 bp, Homo sapiens
tttaatttttcctccataaagtt

SEQ ID NO: 14942 - DNA, 21 bp, Homo sapiens
tctgagatgttattattgggc

SEQ ID NO: 14943 - DNA, 22 bp, Homo sapiens
tatccagtgattcatactcagc

SEQ ID NO: 14944 - DNA, 22 bp, Homo sapiens
agaatagtggtctttcgatgat

SEQ ID NO: 14945 - DNA, 25 bp, Homo sapiens
ctccagaaaaaaaattcaagagttg

SEQ ID NO: 14946 - DNA, 24 bp, Homo sapiens
agaaagaaaatcttgattagtagg

SEQ ID NO: 14947 - DNA, 24 bp, Homo sapiens
ccaccaatggtaattaaagttcga

SEQ ID NO: 14948 - DNA, 23 bp, Homo sapiens
acagcatttattaagaagtttac

SEQ ID NO: 14949 - DNA, 19 bp, Homo sapiens
gggtgtatgatggggaagg

SEQ ID NO: 14950 - DNA, 21 bp, Homo sapiens
ggccaaatagcatttaccagc

SEQ ID NO: 14951 - DNA, 21 bp, Homo sapiens
gcacattaatgcctgtgttta

SEQ ID NO: 14952 - DNA, 23 bp, Homo sapiens
tggctctcataaattcatacaat

SEQ ID NO: 14953 - DNA, 24 bp, Homo sapiens
cttactttgcatctattctctctg

SEQ ID NO: 14954 - DNA, 19 bp, Homo sapiens
tcagaacttactcgtttcc

SEQ ID NO: 14955 - DNA, 22 bp, Homo sapiens
tggtgactttaaggaaaagaaa

SEQ ID NO: 14956 - DNA, 22 bp, Homo sapiens
ttcatagtttgaagcccagtaa

SEQ ID NO: 14957 - DNA, 21 bp, Homo sapiens
caccatcactttgtactgtac

SEQ ID NO: 14958 - DNA, 21 bp, Homo sapiens
agttgttcgaataactctgtc

SEQ ID NO: 14959 - DNA, 20 bp, Homo sapiens
gagtctataatggacaaagc

SEQ ID NO: 14960 - DNA, 19 bp, Homo sapiens
tagccaaagctgaaattat

SEQ ID NO: 14961 - DNA, 23 bp, Homo sapiens
cttttggatttcttttgcttttc

SEQ ID NO: 14962 - DNA, 19 bp, Homo sapiens
ccgtctaaaatgttgtacc

SEQ ID NO: 14963 - DNA, 23 bp, Homo sapiens
ttcagtaataaaatctatttcat

SEQ ID NO: 14964 - DNA, 24 bp, Homo sapiens
tacctgtagatatatgctttgtcc

SEQ ID NO: 14965 - DNA, 22 bp, Homo sapiens
aggaaaatatcactaaacagga

SEQ ID NO: 14966 - DNA, 23 bp, Homo sapiens
ttaatccaatgtttagagcaaat

SEQ ID NO: 14967 - DNA, 21 bp, Homo sapiens
tggagaagagtttgggaaaaa

SEQ ID NO: 14968 - DNA, 18 bp, Homo sapiens
acagttggatgtcgcatc

SEQ ID NO: 14969 - DNA, 20 bp, Homo sapiens
tcaagatttccattataggg

SEQ ID NO: 14970 - DNA, 20 bp, Homo sapiens
ccatccattcccagaaaggc

SEQ ID NO: 14971 - DNA, 18 bp, Homo sapiens
tcttacctttaacatcct

SEQ ID NO: 14972 - DNA, 22 bp, Homo sapiens
agcagttttggattaaacaaca

SEQ ID NO: 14973 - DNA, 20 bp, Homo sapiens
ggtagcaaatatcaaatggt

SEQ ID NO: 14974 - DNA, 21 bp, Homo sapiens
tcaggtaattattgagaggca

SEQ ID NO: 14975 - DNA, 20 bp, Homo sapiens
acaaatatctttcaggtgga

SEQ ID NO: 14976 - DNA, 24 bp, Homo sapiens
cgtatgtacaaactttgtttatag

SEQ ID NO: 14977 - DNA, 26 bp, Homo sapiens
gaaacagttataaatttaaaagtgag

SEQ ID NO: 14978 - DNA, 24 bp, Homo sapiens
agatcacgtgagcaactttgaaat

SEQ ID NO: 14979 - DNA, 20 bp, Homo sapiens
atacctgggaatatggagga

SEQ ID NO: 14980 - DNA, 22 bp, Homo sapiens
tccttagctcatttgaatccac

SEQ ID NO: 14981 - DNA, 20 bp, Homo sapiens
cccagactccagtttgtaag

SEQ ID NO: 14982 - DNA, 21 bp, Homo sapiens
ttcttgcaattatccatgcag

SEQ ID NO: 14983 - DNA, 17 bp, Homo sapiens
actggcttattgcggac

SEQ ID NO: 14984 - DNA, 24 bp, Homo sapiens
tgctgttactttttgtagcccaat

SEQ ID NO: 14985 - DNA, 18 bp, Homo sapiens
tttataccactgcgcctc

SEQ ID NO: 14986 - DNA, 22 bp, Homo sapiens
acttactattatgtctcctcct

SEQ ID NO: 14987 - DNA, 20 bp, Homo sapiens
cagatcgactctatctcctg

SEQ ID NO: 14988 - DNA, 22 bp, Homo sapiens
cataaaggtagatgatatcaca

SEQ ID NO: 14989 - DNA, 20 bp, Homo sapiens
gcaacagaattctttctgtg

SEQ ID NO: 14990 - DNA, 24 bp, Homo sapiens
cggtttgatatgggaagacgaggc

SEQ ID NO: 14991 - DNA, 24 bp, Homo sapiens
aatgtttaatagagcctcctatgg

SEQ ID NO: 14992 - DNA, 24 bp, Homo sapiens
gcaagagtgacaagcaagagccac

SEQ ID NO: 14993 - DNA, 18 bp, Homo sapiens
taaacttccaaacagcat

SEQ ID NO: 14994 - DNA, 21 bp, Homo sapiens
tgcttcctagttagattgaga

SEQ ID NO: 14995 - DNA, 18 bp, Homo sapiens
ctacaggctgttgtggtt

SEQ ID NO: 14996 - DNA, 23 bp, Homo sapiens
actttgagtcacagggtttcttg

SEQ ID NO: 14997 - DNA, 18 bp, Homo sapiens
tatgaagcaaagcccacg

SEQ ID NO: 14998 - DNA, 23 bp, Homo sapiens
tacctgtgtatgaatctatgctg

SEQ ID NO: 14999 - DNA, 26 bp, Homo sapiens
taagaaattcaagtttttaactaaac

SEQ ID NO: 15000 - DNA, 23 bp, Homo sapiens
aaggcatctttttgactttgaac

SEQ ID NO: 15001 - DNA, 23 bp, Homo sapiens
cccatatgttctcattgttcaac

SEQ ID NO: 15002 - DNA, 24 bp, Homo sapiens
tcatcgctttcttttactggtggt

SEQ ID NO: 15003 - DNA, 23 bp, Homo sapiens
ccactcgtaccttcctggattac

SEQ ID NO: 15004 - DNA, 19 bp, Homo sapiens
tcaaagaacagccctctac

SEQ ID NO: 15005 - DNA, 23 bp, Homo sapiens
gtctgcttttgggagatccaaac

SEQ ID NO: 15006 - DNA, 22 bp, Homo sapiens
tcctgttataaatgagtatgcc

SEQ ID NO: 15007 - DNA, 24 bp, Homo sapiens
ctttcttcccagtacttggaggga

SEQ ID NO: 15008 - DNA, 23 bp, Homo sapiens
cttcatgggcccatctctattgc

SEQ ID NO: 15009 - DNA, 23 bp, Homo sapiens
gatctccctctaccaactttttc

SEQ ID NO: 15010 - DNA, 23 bp, Homo sapiens
aatcttgaatatataaggaaggt

SEQ ID NO: 15011 - DNA, 23 bp, Homo sapiens
accaggttgtgtagctgggcatc

SEQ ID NO: 15012 - DNA, 24 bp, Homo sapiens
cagcactatttccattaaacctaa

SEQ ID NO: 15013 - DNA, 19 bp, Homo sapiens
agaaggtccaaacaggtga

SEQ ID NO: 15014 - DNA, 21 bp, Homo sapiens
ttctgacacagtttttttgtg

SEQ ID NO: 15015 - DNA, 20 bp, Homo sapiens
cctcaaaatgcagcagaacc

SEQ ID NO: 15016 - DNA, 22 bp, Homo sapiens
taaaggggagagtggatatttg

SEQ ID NO: 15017 - DNA, 24 bp, Homo sapiens
ttttttttcatagacaaactctcc

SEQ ID NO: 15018 - DNA, 22 bp, Homo sapiens
tgtgttttattaaatgctcacc

SEQ ID NO: 15019 - DNA, 20 bp, Homo sapiens
atgttgccaaatatagctgg

SEQ ID NO: 15020 - DNA, 22 bp, Homo sapiens
ctgctctggcactgttccagtt

SEQ ID NO: 15021 - DNA, 18 bp, Homo sapiens
ccaggggaggtgttcttg

SEQ ID NO: 15022 - DNA, 23 bp, Homo sapiens
ctccagaggaatttttcttggag

SEQ ID NO: 15023 - DNA, 18 bp, Homo sapiens
agagccacacaccaacat

SEQ ID NO: 15024 - DNA, 23 bp, Homo sapiens
ttcagatcttcaaataacctcag

SEQ ID NO: 15025 - DNA, 24 bp, Homo sapiens
ttctcaaaggaagaaaacaaaggt

SEQ ID NO: 15026 - DNA, 19 bp, Homo sapiens
cagacagcacatttcagat

SEQ ID NO: 15027 - DNA, 24 bp, Homo sapiens
tttacattcaacttcatttttatg

SEQ ID NO: 15028 - DNA, 18 bp, Homo sapiens
ctgcattctgaccttgta

SEQ ID NO: 15029 - DNA, 21 bp, Homo sapiens
acatcataaacagtcaatttt

SEQ ID NO: 15030 - DNA, 23 bp, Homo sapiens
ttgacttggttttgagagatttc

SEQ ID NO: 15031 - DNA, 18 bp, Homo sapiens
gcaaaccacagcacaggt

SEQ ID NO: 15032 - DNA, 24 bp, Homo sapiens
aatgaagataagcccgacacagta

SEQ ID NO: 15033 - DNA, 22 bp, Homo sapiens
acaatgagaatgaacaaagttc

SEQ ID NO: 15034 - DNA, 20 bp, Homo sapiens
tcgtagcagtgattaaatgc

SEQ ID NO: 15035 - DNA, 20 bp, Homo sapiens
gaaccacctcagagaagatg

SEQ ID NO: 15036 - DNA, 21 bp, Homo sapiens
ttgcataggaatgtagaggac

SEQ ID NO: 15037 - DNA, 21 bp, Homo sapiens
ggaaaacaaagtacatttctc

SEQ ID NO: 15038 - DNA, 22 bp, Homo sapiens
agccttcttcattccgacgaga

SEQ ID NO: 15039 - DNA, 23 bp, Homo sapiens
aggaattaaccagaacaaaatcc

SEQ ID NO: 15040 - DNA, 24 bp, Homo sapiens
ttcaccttgttgacttttgtcagc

SEQ ID NO: 15041 - DNA, 22 bp, Homo sapiens
tcaaagttttgtgcattttatt

SEQ ID NO: 15042 - DNA, 22 bp, Homo sapiens
cccttatctaaatatcatttaa

SEQ ID NO: 15043 - DNA, 25 bp, Homo sapiens
aatcgcttctatacactatatattc

SEQ ID NO: 15044 - DNA, 18 bp, Homo sapiens
tttgccaaagtgtgacta

SEQ ID NO: 15045 - DNA, 22 bp, Homo sapiens
ccatggcttctttttaaaatcc

SEQ ID NO: 15046 - DNA, 27 bp, Homo sapiens
aaagggatacatgaaaataaaaatgtc

SEQ ID NO: 15047 - DNA, 24 bp, Homo sapiens
caaaagaagagtctcttgctgatg

SEQ ID NO: 15048 - DNA, 20 bp, Homo sapiens
aaacacttgtgttaggtgaa

SEQ ID NO: 15049 - DNA, 20 bp, Homo sapiens
accactgagcaaatgtttga

SEQ ID NO: 15050 - DNA, 21 bp, Homo sapiens
cttaatttctatgaacagaac

SEQ ID NO: 15051 - DNA, 22 bp, Homo sapiens
tggaaatctctaagatgacagt

SEQ ID NO: 15052 - DNA, 23 bp, Homo sapiens
aaggtgaatcaaactttacctaa

SEQ ID NO: 15053 - DNA, 21 bp, Homo sapiens
agaggatcagttgaatgaaat

SEQ ID NO: 15054 - DNA, 17 bp, Homo sapiens
ggcaggaaatggaggtt

SEQ ID NO: 15055 - DNA, 19 bp, Homo sapiens
gctctgtaactcaggaatg

SEQ ID NO: 15056 - DNA, 23 bp, Homo sapiens
attggaggatcagatctaatagc

SEQ ID NO: 15057 - DNA, 22 bp, Homo sapiens
tttggttttaagaagaatttgc

SEQ ID NO: 15058 - DNA, 24 bp, Homo sapiens
actgtactacttttattattcaat

SEQ ID NO: 15059 - DNA, 19 bp, Homo sapiens
ctgggcctcacttcctact

SEQ ID NO: 15060 - DNA, 22 bp, Homo sapiens
accatctttgctttttaatctt

SEQ ID NO: 15061 - DNA, 21 bp, Homo sapiens
attctttcgagcatgatgagc

SEQ ID NO: 15062 - DNA, 22 bp, Homo sapiens
agttactgctctcacttttatt

SEQ ID NO: 15063 - DNA, 19 bp, Homo sapiens
cctgctccaggatatgtga

SEQ ID NO: 15064 - DNA, 21 bp, Homo sapiens
caagaaattcaaaaaggtagg

SEQ ID NO: 15065 - DNA, 22 bp, Homo sapiens
atccttcctagaggaatttttt

SEQ ID NO: 15066 - DNA, 21 bp, Homo sapiens
aaactctacttccagaaatcc

SEQ ID NO: 15067 - DNA, 26 bp, Homo sapiens
ataaactgcttttatctttgtttagc

SEQ ID NO: 15068 - DNA, 21 bp, Homo sapiens
ggatgatagtgagatgcttcc

SEQ ID NO: 15069 - DNA, 24 bp, Homo sapiens
ctcttgtgatacagttgaaatacc

SEQ ID NO: 15070 - DNA, 24 bp, Homo sapiens
tcttctctttcttacctatccatc

SEQ ID NO: 15071 - DNA, 23 bp, Homo sapiens
tgaccataatcatcatttatgcc

SEQ ID NO: 15072 - DNA, 20 bp, Homo sapiens
ttttttcaggtatttgaact

SEQ ID NO: 15073 - DNA, 20 bp, Homo sapiens
gtcaataacagcttttttgg

SEQ ID NO: 15074 - DNA, 22 bp, Homo sapiens
gctacaatttgattccaaatac

SEQ ID NO: 15075 - DNA, 23 bp, Homo sapiens
tcagctaaagaaatatctgtgag

SEQ ID NO: 15076 - DNA, 22 bp, Homo sapiens
ccatgatcaatccatttcaagg

SEQ ID NO: 15077 - DNA, 21 bp, Homo sapiens
gcaagaaaatgaaattgggaa

SEQ ID NO: 15078 - DNA, 20 bp, Homo sapiens
tcctaagaatgtaaaatcac

SEQ ID NO: 15079 - DNA, 23 bp, Homo sapiens
agaagtgatagaaacataccatt

SEQ ID NO: 15080 - DNA, 25 bp, Homo sapiens
aaatctgtataaaaattaataaaac

SEQ ID NO: 15081 - DNA, 24 bp, Homo sapiens
tgaatatctcttaagtttttagaa

SEQ ID NO: 15082 - DNA, 23 bp, Homo sapiens
gtcttccttgagttcacgtttct

SEQ ID NO: 15083 - DNA, 21 bp, Homo sapiens
ccatttaccttatcaaccaac

SEQ ID NO: 15084 - DNA, 20 bp, Homo sapiens
aaaaggccaaggatggatat

SEQ ID NO: 15085 - DNA, 22 bp, Homo sapiens
ggatgctcatactgtcaataca

SEQ ID NO: 15086 - DNA, 22 bp, Homo sapiens
accagagttagaaattgatgtg

SEQ ID NO: 15087 - DNA, 22 bp, Homo sapiens
tgtactatacctctcatttaaa

SEQ ID NO: 15088 - DNA, 19 bp, Homo sapiens
ggaaatggatgatgtggcc

SEQ ID NO: 15089 - DNA, 22 bp, Homo sapiens
cactgaaagtgtcatttgtttc

SEQ ID NO: 15090 - DNA, 23 bp, Homo sapiens
gtgaaaaattctgccagtaaatc

SEQ ID NO: 15091 - DNA, 22 bp, Homo sapiens
ttcctcctgtttttgaactttc

SEQ ID NO: 15092 - DNA, 20 bp, Homo sapiens
cctgtggacacaaactcaga

SEQ ID NO: 15093 - DNA, 23 bp, Homo sapiens
actgttccaatacttcatcttct

SEQ ID NO: 15094 - DNA, 18 bp, Homo sapiens
acaacctgctacaccctc

SEQ ID NO: 15095 - DNA, 22 bp, Homo sapiens
tcttagcttttctgcagcatga

SEQ ID NO: 15096 - DNA, 19 bp, Homo sapiens
tcaagaaatgtcttcatgc

SEQ ID NO: 15097 - DNA, 24 bp, Homo sapiens
tctgtatctgtaaataagttattg

SEQ ID NO: 15098 - DNA, 24 bp, Homo sapiens
tgttcattttcttgttttgttttc

SEQ ID NO: 15099 - DNA, 24 bp, Homo sapiens
gctccttatttttccacaatgagg

SEQ ID NO: 15100 - DNA, 20 bp, Homo sapiens
tgtgaactaaatggagggag

SEQ ID NO: 15101 - DNA, 23 bp, Homo sapiens
acgtttctattcttgctgatttg

SEQ ID NO: 15102 - DNA, 21 bp, Homo sapiens
tctgcactgttttcaaaggtc

SEQ ID NO: 15103 - DNA, 20 bp, Homo sapiens
cagggacatttctgagaggg

SEQ ID NO: 15104 - DNA, 16 bp, Homo sapiens
gcttctcagcagcagc

SEQ ID NO: 15105 - DNA, 20 bp, Homo sapiens
aacagactaaagacaatacc

SEQ ID NO: 15106 - DNA, 23 bp, Homo sapiens
agatgagaatcccaaactatcag

SEQ ID NO: 15107 - DNA, 20 bp, Homo sapiens
ttcagagacatgagagaagt

SEQ ID NO: 15108 - DNA, 17 bp, Homo sapiens
gtcctgcaaaacaagct

SEQ ID NO: 15109 - DNA, 22 bp, Homo sapiens
tctgatggagttggtctgctgc

SEQ ID NO: 15110 - DNA, 23 bp, Homo sapiens
aatcaaagtctccaaaatggaac

SEQ ID NO: 15111 - DNA, 21 bp, Homo sapiens
tggcaatttagttggtgaaag

SEQ ID NO: 15112 - DNA, 22 bp, Homo sapiens
acttgattatttaccttgcatt

SEQ ID NO: 15113 - DNA, 28 bp, Homo sapiens
gataccatactattattattagagcttg

SEQ ID NO: 15114 - DNA, 22 bp, Homo sapiens
aaggttatattacgttagaact

SEQ ID NO: 15115 - DNA, 20 bp, Homo sapiens
gcattctgaatttttgttcc

SEQ ID NO: 15116 - DNA, 19 bp, Homo sapiens
tgctttcttgggatggtaa

SEQ ID NO: 15117 - DNA, 18 bp, Homo sapiens
acacagaatcagagcaag

SEQ ID NO: 15118 - DNA, 23 bp, Homo sapiens
cattttccctggtatcccattct

SEQ ID NO: 15119 - DNA, 18 bp, Homo sapiens
cacaaggcgtgtcagttg

SEQ ID NO: 15120 - DNA, 24 bp, Homo sapiens
ggcattacttcctgaatatactat

SEQ ID NO: 15121 - DNA, 25 bp, Homo sapiens
ttctttctacttgtgtgatttacag

SEQ ID NO: 15122 - DNA, 21 bp, Homo sapiens
gaagctttaccatgtatctgc

SEQ ID NO: 15123 - DNA, 22 bp, Homo sapiens
tagtctaacaattttaagtgac

SEQ ID NO: 15124 - DNA, 21 bp, Homo sapiens
ggggcgcttggcattagtttt

SEQ ID NO: 15125 - DNA, 19 bp, Homo sapiens
ccactcattggagaaaacc

SEQ ID NO: 15126 - DNA, 23 bp, Homo sapiens
ggagttgttgtctttaatcctgt

SEQ ID NO: 15127 - DNA, 16 bp, Homo sapiens
tcctcagggccatccc

SEQ ID NO: 15128 - DNA, 23 bp, Homo sapiens
agtataaatggatgaattttaaa

SEQ ID NO: 15129 - DNA, 18 bp, Homo sapiens
gacctattcctgaagcag

SEQ ID NO: 15130 - DNA, 22 bp, Homo sapiens
gtaacgtatatttagcttatcg

SEQ ID NO: 15131 - DNA, 21 bp, Homo sapiens
aaaagttgctagttttaatat

SEQ ID NO: 15132 - DNA, 21 bp, Homo sapiens
tcaattacctgtactgggatg

SEQ ID NO: 15133 - DNA, 24 bp, Homo sapiens
tataccataaaattatttgggagg

SEQ ID NO: 15134 - DNA, 20 bp, Homo sapiens
tcaccgccaatccaatttct

SEQ ID NO: 15135 - DNA, 16 bp, Homo sapiens
acagtgccccagcgag

SEQ ID NO: 15136 - DNA, 21 bp, Homo sapiens
cagtcaataatggatatgctc

SEQ ID NO: 15137 - DNA, 22 bp, Homo sapiens
ctgggcaacaagagcaagactc

SEQ ID NO: 15138 - DNA, 24 bp, Homo sapiens
tgttgatacaggaataacaaactc

SEQ ID NO: 15139 - DNA, 24 bp, Homo sapiens
attgttaggtgaaaagcaacaaaa

SEQ ID NO: 15140 - DNA, 22 bp, Homo sapiens
ggttgataacagaagagaatga

SEQ ID NO: 15141 - DNA, 24 bp, Homo sapiens
tactaataaagaataattctatac

SEQ ID NO: 15142 - DNA, 26 bp, Homo sapiens
ccttccatttttagcataagaaattg

SEQ ID NO: 15143 - DNA, 21 bp, Homo sapiens
agtcaggaattaaggtctgtg

SEQ ID NO: 15144 - DNA, 24 bp, Homo sapiens
cccaaatcaaattcttatgtgttc

SEQ ID NO: 15145 - DNA, 23 bp, Homo sapiens
ggagccaaaaagaaattatgttc

SEQ ID NO: 15146 - DNA, 21 bp, Homo sapiens
aagctgaaatgacctactcaa

SEQ ID NO: 15147 - DNA, 22 bp, Homo sapiens
acctccaaagacaactgcggaa

SEQ ID NO: 15148 - DNA, 24 bp, Homo sapiens
atcttcaaagggaaaacatttata

SEQ ID NO: 15149 - DNA, 24 bp, Homo sapiens
ttattctacttcacacttttacac

SEQ ID NO: 15150 - DNA, 23 bp, Homo sapiens
cttgatgaaccatctattggaag

SEQ ID NO: 15151 - DNA, 23 bp, Homo sapiens
aagagttaataatgtatcctagt

SEQ ID NO: 15152 - DNA, 24 bp, Homo sapiens
gcaaacatagtagtatataattag

SEQ ID NO: 15153 - DNA, 20 bp, Homo sapiens
acctgtttggcattcaaaaa

SEQ ID NO: 15154 - DNA, 20 bp, Homo sapiens
tatggaaattatgccttttg

SEQ ID NO: 15155 - DNA, 17 bp, Homo sapiens
tgccgtcctgacagatc

SEQ ID NO: 15156 - DNA, 22 bp, Homo sapiens
tgctttttgtcattttgtccca

SEQ ID NO: 15157 - DNA, 19 bp, Homo sapiens
agcctccacaaattgaaag

SEQ ID NO: 15158 - DNA, 22 bp, Homo sapiens
ccttccattaataataccgaac

SEQ ID NO: 15159 - DNA, 20 bp, Homo sapiens
cgtccaattgtaaagccaga

SEQ ID NO: 15160 - DNA, 24 bp, Homo sapiens
acaagcattaaagagggaattaac

SEQ ID NO: 15161 - DNA, 27 bp, Homo sapiens
aatgctagcatgtgaatatatatattc

SEQ ID NO: 15162 - DNA, 27 bp, Homo sapiens
atatttaaaatacataatatacctttc

SEQ ID NO: 15163 - DNA, 18 bp, Homo sapiens
tgtaaacagcctctttgt

SEQ ID NO: 15164 - DNA, 23 bp, Homo sapiens
ggaattcagtaaaatattctggc

SEQ ID NO: 15165 - DNA, 22 bp, Homo sapiens
attttatagattgtggcttctt

SEQ ID NO: 15166 - DNA, 21 bp, Homo sapiens
ggtatcagtgaaagttaccat

SEQ ID NO: 15167 - DNA, 22 bp, Homo sapiens
gggatggagtgggtatatataa

SEQ ID NO: 15168 - DNA, 20 bp, Homo sapiens
ttgcaacttggaggatttac

SEQ ID NO: 15169 - DNA, 22 bp, Homo sapiens
aaatctgtgtatagtgggtaag

SEQ ID NO: 15170 - DNA, 19 bp, Homo sapiens
ctttggttgcatgctcttc

SEQ ID NO: 15171 - DNA, 24 bp, Homo sapiens
aagacattcaacctactttaatgg

SEQ ID NO: 15172 - DNA, 23 bp, Homo sapiens
catctctgcaactctgatactat

SEQ ID NO: 15173 - DNA, 22 bp, Homo sapiens
tcttctgtccaattgtttacag

SEQ ID NO: 15174 - DNA, 26 bp, Homo sapiens
aataaaagttacaataacagtatatg

SEQ ID NO: 15175 - DNA, 23 bp, Homo sapiens
gttttcccagagacatctaaaca

SEQ ID NO: 15176 - DNA, 20 bp, Homo sapiens
agcttaatgatgaggaactg

SEQ ID NO: 15177 - DNA, 20 bp, Homo sapiens
tctcatcaccgtgatgtaca

SEQ ID NO: 15178 - DNA, 19 bp, Homo sapiens
gggggatggtattactttt

SEQ ID NO: 15179 - DNA, 24 bp, Homo sapiens
actgtgctaagcaggaactaaatt

SEQ ID NO: 15180 - DNA, 21 bp, Homo sapiens
attctaagtatggtacctttg

SEQ ID NO: 15181 - DNA, 19 bp, Homo sapiens
ttggctgaaacaaagctgt

SEQ ID NO: 15182 - DNA, 24 bp, Homo sapiens
attatttgctaacttttcagagtc

SEQ ID NO: 15183 - DNA, 21 bp, Homo sapiens
acttccaaacactccaaaagt

SEQ ID NO: 15184 - DNA, 23 bp, Homo sapiens
ttcttttgaaaactttttctctg

SEQ ID NO: 15185 - DNA, 24 bp, Homo sapiens
aaagccattctgcattttttcctc

SEQ ID NO: 15186 - DNA, 17 bp, Homo sapiens
aagcagtaattgttgtc

SEQ ID NO: 15187 - DNA, 23 bp, Homo sapiens
gtcaatacagggatttcatctgt

SEQ ID NO: 15188 - DNA, 21 bp, Homo sapiens
actgctaacttttctgtaacc

SEQ ID NO: 15189 - DNA, 23 bp, Homo sapiens
aacattaaaaaagtctacacagc

SEQ ID NO: 15190 - DNA, 19 bp, Homo sapiens
aggaaaaactgtgccattc

SEQ ID NO: 15191 - DNA, 24 bp, Homo sapiens
tctcacatacaaaccaagagaata

SEQ ID NO: 15192 - DNA, 23 bp, Homo sapiens
aaaatttatctcaggagaaccat

SEQ ID NO: 15193 - DNA, 21 bp, Homo sapiens
ttagtaacataccaggttggt

SEQ ID NO: 15194 - DNA, 23 bp, Homo sapiens
catgtatgtgtgtgttcgtgtac

SEQ ID NO: 15195 - DNA, 21 bp, Homo sapiens
gctgatcgactgatcattttc

SEQ ID NO: 15196 - DNA, 21 bp, Homo sapiens
acatttgaataacaaaggtgt

SEQ ID NO: 15197 - DNA, 21 bp, Homo sapiens
gccagtcaaaagtctgtatgg

SEQ ID NO: 15198 - DNA, 16 bp, Homo sapiens
gggcccggcaggaggt

SEQ ID NO: 15199 - DNA, 20 bp, Homo sapiens
gtactcgccgcttctgcgac

SEQ ID NO: 15200 - DNA, 17 bp, Homo sapiens
gttacgcggttgcacgt

SEQ ID NO: 15201 - DNA, 16 bp, Homo sapiens
gaatcacccgcaggcc

SEQ ID NO: 15202 - DNA, 16 bp, Homo sapiens
gtcccggagcccatgc

SEQ ID NO: 15203 - DNA, 18 bp, Homo sapiens
ccttctgcccttacctcc

SEQ ID NO: 15204 - DNA, 20 bp, Homo sapiens
aagcgcccaagtcgcactcc

SEQ ID NO: 15205 - DNA, 17 bp, Homo sapiens
cccaagtccatggaggt

SEQ ID NO: 15206 - DNA, 23 bp, Homo sapiens
agctcactcttacaaaataagct

SEQ ID NO: 15207 - DNA, 20 bp, Homo sapiens
caccagcgagggggcccacc

SEQ ID NO: 15208 - DNA, 18 bp, Homo sapiens
aaaaggggccggggagga

SEQ ID NO: 15209 - DNA, 16 bp, Homo sapiens
cgagggcacccgaagc

SEQ ID NO: 15210 - DNA, 22 bp, Homo sapiens
caggccgcctagcaggagacct

SEQ ID NO: 15211 - DNA, 16 bp, Homo sapiens
gcacagcctctggttc

SEQ ID NO: 15212 - DNA, 18 bp, Homo sapiens
ccgagttgggggtgatgt

SEQ ID NO: 15213 - DNA, 23 bp, Homo sapiens
ctctaaccggctgtctcttgttc

SEQ ID NO: 15214 - DNA, 24 bp, Homo sapiens
cctcgctggtgtgggagcggcttc

SEQ ID NO: 15215 - DNA, 18 bp, Homo sapiens
gagcatgtggctggtgga

SEQ ID NO: 15216 - DNA, 23 bp, Homo sapiens
atccagagaagtgacgctggaac

SEQ ID NO: 15217 - DNA, 16 bp, Homo sapiens
gggcccagcagctgga

SEQ ID NO: 15218 - DNA, 16 bp, Homo sapiens
agggcatgggatacag

SEQ ID NO: 15219 - DNA, 23 bp, Homo sapiens
cctccacacacctaactgtttcc

SEQ ID NO: 15220 - DNA, 21 bp, Homo sapiens
cattttctctccttgtctctc

SEQ ID NO: 15221 - DNA, 24 bp, Homo sapiens
agaattgctcatccaaacctggct

SEQ ID NO: 15222 - DNA, 17 bp, Homo sapiens
tgaccacaggcacagcc

SEQ ID NO: 15223 - DNA, 23 bp, Homo sapiens
gcacacggggaatgccatactca

SEQ ID NO: 15224 - DNA, 23 bp, Homo sapiens
ttacttttgtgttttgtcctgtc

SEQ ID NO: 15225 - DNA, 16 bp, Homo sapiens
gagcttggccggctgc

SEQ ID NO: 15226 - DNA, 24 bp, Homo sapiens
gtcctcctatatagcaccttttcc

SEQ ID NO: 15227 - DNA, 19 bp, Homo sapiens
gtttggcactaacgagctt

SEQ ID NO: 15228 - DNA, 19 bp, Homo sapiens
aatgagggaacaggtgtca

SEQ ID NO: 15229 - DNA, 16 bp, Homo sapiens
ggcggatgggcatcct

SEQ ID NO: 15230 - DNA, 24 bp, Homo sapiens
gtataatgcaaaagccaacatggc

SEQ ID NO: 15231 - DNA, 19 bp, Homo sapiens
ttccctacccacggtccac

SEQ ID NO: 15232 - DNA, 23 bp, Homo sapiens
aacaaagaccactctcctcaagg

SEQ ID NO: 15233 - DNA, 24 bp, Homo sapiens
tcataaacagatagattaaatcat

SEQ ID NO: 15234 - DNA, 23 bp, Homo sapiens
agaaaattaacagatttcctccc

SEQ ID NO: 15235 - DNA, 23 bp, Homo sapiens
ctttttcaagcctaactcaatgt

SEQ ID NO: 15236 - DNA, 16 bp, Homo sapiens
acggtggcagagtggc

SEQ ID NO: 15237 - DNA, 24 bp, Homo sapiens
acacgaacccccactgttttccct

SEQ ID NO: 15238 - DNA, 19 bp, Homo sapiens
gctgaatcccaataactcc

SEQ ID NO: 15239 - DNA, 16 bp, Homo sapiens
cagtggatgccgtggt

SEQ ID NO: 15240 - DNA, 19 bp, Homo sapiens
aaaggccaatatggcattt

SEQ ID NO: 15241 - DNA, 21 bp, Homo sapiens
tgctaattctctgctctatcc

SEQ ID NO: 15242 - DNA, 20 bp, Homo sapiens
gcaggcagggccacttcaac

SEQ ID NO: 15243 - DNA, 18 bp, Homo sapiens
gtagaatgcaggccccag

SEQ ID NO: 15244 - DNA, 24 bp, Homo sapiens
aatcagctgtgatttctacatacc

SEQ ID NO: 15245 - DNA, 23 bp, Homo sapiens
caaaggagaatgaagtaaaagag

SEQ ID NO: 15246 - DNA, 21 bp, Homo sapiens
ccaacagagcagggcacctgg

SEQ ID NO: 15247 - DNA, 24 bp, Homo sapiens
gattgagcgaccaatgccgggaac

SEQ ID NO: 15248 - DNA, 22 bp, Homo sapiens
gtggaatatatccaggtctcac

SEQ ID NO: 15249 - DNA, 24 bp, Homo sapiens
ggaggggtcctcatgctaatgatg

SEQ ID NO: 15250 - DNA, 24 bp, Homo sapiens
cagcaaggccacctttatagtggg

SEQ ID NO: 15251 - DNA, 20 bp, Homo sapiens
agaatggccactggcaggac

SEQ ID NO: 15252 - DNA, 22 bp, Homo sapiens
cactcactgcagggtgactgtg

SEQ ID NO: 15253 - DNA, 20 bp, Homo sapiens
gtgtggagtcctgaaagcca

SEQ ID NO: 15254 - DNA, 21 bp, Homo sapiens
ggggacacctgtcctattaat

SEQ ID NO: 15255 - DNA, 16 bp, Homo sapiens
taccgccagcacattg

SEQ ID NO: 15256 - DNA, 17 bp, Homo sapiens
ctccctctcatctgtcc

SEQ ID NO: 15257 - DNA, 18 bp, Homo sapiens
accatcttctcacctctc

SEQ ID NO: 15258 - DNA, 18 bp, Homo sapiens
caatgatgtggctgaact

SEQ ID NO: 15259 - DNA, 22 bp, Homo sapiens
ctccaaataacctggagaatgg

SEQ ID NO: 15260 - DNA, 17 bp, Homo sapiens
gccggggttcatgtcat

SEQ ID NO: 15261 - DNA, 23 bp, Homo sapiens
ccaaaggttttttttttaggtcc

SEQ ID NO: 15262 - DNA, 24 bp, Homo sapiens
acgttactctgcatttcttcctgc

SEQ ID NO: 15263 - DNA, 18 bp, Homo sapiens
ggtgtcccacctttttgg

SEQ ID NO: 15264 - DNA, 16 bp, Homo sapiens
agcaccagctcggtgg

SEQ ID NO: 15265 - DNA, 23 bp, Homo sapiens
ttctcatccacccactttactcc

SEQ ID NO: 15266 - DNA, 17 bp, Homo sapiens
ggccctgtgctgagcac

SEQ ID NO: 15267 - DNA, 16 bp, Homo sapiens
cacccagggaagtggg

SEQ ID NO: 15268 - DNA, 23 bp, Homo sapiens
gccagaccacgcaactcaccttc

SEQ ID NO: 15269 - DNA, 22 bp, Homo sapiens
gaactgagtttctatcaagggg

SEQ ID NO: 15270 - DNA, 23 bp, Homo sapiens
gtaaagcagagggaactggagtg

SEQ ID NO: 15271 - DNA, 23 bp, Homo sapiens
tgagatggtggagggccttgtcc

SEQ ID NO: 15272 - DNA, 17 bp, Homo sapiens
tagctccagggatcccc

SEQ ID NO: 15273 - DNA, 20 bp, Homo sapiens
gtttcagattgctgggatgt

SEQ ID NO: 15274 - DNA, 16 bp, Homo sapiens
cctgacaggcccccac

SEQ ID NO: 15275 - DNA, 20 bp, Homo sapiens
gcctttttctgggtacttct

SEQ ID NO: 15276 - DNA, 19 bp, Homo sapiens
cacaagggttcacgttgat

SEQ ID NO: 15277 - DNA, 23 bp, Homo sapiens
ctgtgctggaacctcagttttgc

SEQ ID NO: 15278 - DNA, 18 bp, Homo sapiens
tacccatgcaccacacac

SEQ ID NO: 15279 - DNA, 19 bp, Homo sapiens
tccaggctgaaaagcatta

SEQ ID NO: 15280 - DNA, 23 bp, Homo sapiens
tttttcccttttgggtttttgat

SEQ ID NO: 15281 - DNA, 20 bp, Homo sapiens
ctaagtgggtccttggaggc

SEQ ID NO: 15282 - DNA, 24 bp, Homo sapiens
taaaatgcgattttcaaaaaatgc

SEQ ID NO: 15283 - DNA, 17 bp, Homo sapiens
ttacggcagcatgctcc

SEQ ID NO: 15284 - DNA, 21 bp, Homo sapiens
ctgctcctgttcccatgccaa

SEQ ID NO: 15285 - DNA, 24 bp, Homo sapiens
tgttcacagagtgacgagctaatt

SEQ ID NO: 15286 - DNA, 19 bp, Homo sapiens
atccccaggtacatgtacc

SEQ ID NO: 15287 - DNA, 17 bp, Homo sapiens
cagatcaaagccaaggg

SEQ ID NO: 15288 - DNA, 17 bp, Homo sapiens
tgtccctgtttggatta

SEQ ID NO: 15289 - DNA, 17 bp, Homo sapiens
aggagctgatccttcgc

SEQ ID NO: 15290 - DNA, 17 bp, Homo sapiens
ttgggggtgggggggtc

SEQ ID NO: 15291 - DNA, 24 bp, Homo sapiens
tttcagccagctgatccatggagg

SEQ ID NO: 15292 - DNA, 16 bp, Homo sapiens
ttccccgcagggtgag

SEQ ID NO: 15293 - DNA, 24 bp, Homo sapiens
atcttttcccacaatttaaaaagt

SEQ ID NO: 15294 - DNA, 18 bp, Homo sapiens
gatcacccagcactttgc

SEQ ID NO: 15295 - DNA, 23 bp, Homo sapiens
aaaagtatttaaaagagcaaagc

SEQ ID NO: 15296 - DNA, 22 bp, Homo sapiens
tccctcactgctgttcttcaga

SEQ ID NO: 15297 - DNA, 19 bp, Homo sapiens
gggcaagaggcctctcacc

SEQ ID NO: 15298 - DNA, 18 bp, Homo sapiens
gctttgccaccgagacac

SEQ ID NO: 15299 - DNA, 17 bp, Homo sapiens
ggcgtccacgtggcaga

SEQ ID NO: 15300 - DNA, 23 bp, Homo sapiens
ccaacatctgtgttcttctaagt

SEQ ID NO: 15301 - DNA, 21 bp, Homo sapiens
tgaagagggggttgtagcagg

SEQ ID NO: 15302 - DNA, 23 bp, Homo sapiens
tcatcctcacctaccatgacatc

SEQ ID NO: 15303 - DNA, 24 bp, Homo sapiens
ttcccagaacagccccaggaagtc

SEQ ID NO: 15304 - DNA, 23 bp, Homo sapiens
tttacatggctctgttcacgtca

SEQ ID NO: 15305 - DNA, 19 bp, Homo sapiens
ccttctcggctgccttttt

SEQ ID NO: 15306 - DNA, 16 bp, Homo sapiens
ccccacatgaccagcc

SEQ ID NO: 15307 - DNA, 24 bp, Homo sapiens
agagctcctcagaacttacggttc

SEQ ID NO: 15308 - DNA, 21 bp, Homo sapiens
agcttcctcaaaacacagttg

SEQ ID NO: 15309 - DNA, 24 bp, Homo sapiens
tttcccttgggagtcccacacagc

SEQ ID NO: 15310 - DNA, 19 bp, Homo sapiens
gcttctggccagagagagc

SEQ ID NO: 15311 - DNA, 18 bp, Homo sapiens
agctgagggtgaggacct

SEQ ID NO: 15312 - DNA, 24 bp, Homo sapiens
gaaaacagatgaaattgacaattt

SEQ ID NO: 15313 - DNA, 20 bp, Homo sapiens
gcacaatgatctacttaaac

SEQ ID NO: 15314 - DNA, 22 bp, Homo sapiens
aggtacagattcaggtcataga

SEQ ID NO: 15315 - DNA, 22 bp, Homo sapiens
ggaaggggaaggaaagccacat

SEQ ID NO: 15316 - DNA, 16 bp, Homo sapiens
gaaagcctgcctttgt

SEQ ID NO: 15317 - DNA, 17 bp, Homo sapiens
aggtgaagcctttggtg

SEQ ID NO: 15318 - DNA, 24 bp, Homo sapiens
atgctgtatacatgtgtatttgtg

SEQ ID NO: 15319 - DNA, 23 bp, Homo sapiens
tttgtctccttgcaggcaggtga

SEQ ID NO: 15320 - DNA, 23 bp, Homo sapiens
gtgtgcctgtgtgtgtctatgtg

SEQ ID NO: 15321 - DNA, 18 bp, Homo sapiens
tggtcttggatttgcttc

SEQ ID NO: 15322 - DNA, 24 bp, Homo sapiens
gatctccactcacctcccctttct

SEQ ID NO: 15323 - DNA, 16 bp, Homo sapiens
cacgagggaggtgaag

SEQ ID NO: 15324 - DNA, 23 bp, Homo sapiens
caccttcagagccatcaactaat

SEQ ID NO: 15325 - DNA, 20 bp, Homo sapiens
ctcgggagttccatttgtgc

SEQ ID NO: 15326 - DNA, 22 bp, Homo sapiens
ggacataaagatggtctacagc

SEQ ID NO: 15327 - DNA, 22 bp, Homo sapiens
gtgggagagaagaggggtggcc

SEQ ID NO: 15328 - DNA, 24 bp, Homo sapiens
cagatggaaacccggcttctgtcc

SEQ ID NO: 15329 - DNA, 17 bp, Homo sapiens
ctgggtgcagagacgtg

SEQ ID NO: 15330 - DNA, 18 bp, Homo sapiens
caactttgagggtctgag

SEQ ID NO: 15331 - DNA, 19 bp, Homo sapiens
ctgggcctcaatatgaagc

SEQ ID NO: 15332 - DNA, 21 bp, Homo sapiens
gctggtcaggaatgaaacagg

SEQ ID NO: 15333 - DNA, 16 bp, Homo sapiens
gcagagatgctgctgc

SEQ ID NO: 15334 - DNA, 21 bp, Homo sapiens
gctctgcccagtccaggaaac

SEQ ID NO: 15335 - DNA, 20 bp, Homo sapiens
caggaacttctaccacgtgc

SEQ ID NO: 15336 - DNA, 24 bp, Homo sapiens
acattgctcaagccccgcccatgc

SEQ ID NO: 15337 - DNA, 18 bp, Homo sapiens
gttcccgaggcctgagcg

SEQ ID NO: 15338 - DNA, 20 bp, Homo sapiens
gcctgctcacatggtgcagc

SEQ ID NO: 15339 - DNA, 16 bp, Homo sapiens
gtccgcagacattggt

SEQ ID NO: 15340 - DNA, 17 bp, Homo sapiens
atgccaaagccaaaggg

SEQ ID NO: 15341 - DNA, 16 bp, Homo sapiens
tgagccccacacccct

SEQ ID NO: 15342 - DNA, 22 bp, Homo sapiens
ccagcgctgggggttatagcgc

SEQ ID NO: 15343 - DNA, 22 bp, Homo sapiens
tttctggagcgagtggcgagct

SEQ ID NO: 15344 - DNA, 18 bp, Homo sapiens
gagtagaggaacacgcgc

SEQ ID NO: 15345 - DNA, 17 bp, Homo sapiens
agctgaggaccctttct

SEQ ID NO: 15346 - DNA, 17 bp, Homo sapiens
gagggaggttctcagct

SEQ ID NO: 15347 - DNA, 16 bp, Homo sapiens
ctgggacctctgcggg

SEQ ID NO: 15348 - DNA, 24 bp, Homo sapiens
gtggtagttctgaagcaccaagtc

SEQ ID NO: 15349 - DNA, 17 bp, Homo sapiens
gtttggccgggctcagc

SEQ ID NO: 15350 - DNA, 22 bp, Homo sapiens
aagaagagctccctgtccttga

SEQ ID NO: 15351 - DNA, 20 bp, Homo sapiens
ccagaaggcaaccaccgagc

SEQ ID NO: 15352 - DNA, 19 bp, Homo sapiens
ggtgacgctgtttatcagc

SEQ ID NO: 15353 - DNA, 16 bp, Homo sapiens
agcaggccctgcgcca

SEQ ID NO: 15354 - DNA, 16 bp, Homo sapiens
cagggggccagggcca

SEQ ID NO: 15355 - DNA, 22 bp, Homo sapiens
tctcctgcagacggtgtttccc

SEQ ID NO: 15356 - DNA, 17 bp, Homo sapiens
cgcagcaagggcagctc

SEQ ID NO: 15357 - DNA, 19 bp, Homo sapiens
tgtcctgggaggggtgtcc

SEQ ID NO: 15358 - DNA, 16 bp, Homo sapiens
ggccaggctctcctgg

SEQ ID NO: 15359 - DNA, 22 bp, Homo sapiens
gatttgaagtcttgggctctgt

SEQ ID NO: 15360 - DNA, 22 bp, Homo sapiens
tcaaagagcgtcatcagcaagg

SEQ ID NO: 15361 - DNA, 23 bp, Homo sapiens
cctgcaaacgtgtttatcacatc

SEQ ID NO: 15362 - DNA, 16 bp, Homo sapiens
aactgtcgccagatgc

SEQ ID NO: 15363 - DNA, 24 bp, Homo sapiens
ggacacgtgggcgccgtgtgacat

SEQ ID NO: 15364 - DNA, 16 bp, Homo sapiens
actggccttcagccgc

SEQ ID NO: 15365 - DNA, 22 bp, Homo sapiens
ctctctgggtggggctggttgc

SEQ ID NO: 15366 - DNA, 17 bp, Homo sapiens
aagtctgagggctgcct

SEQ ID NO: 15367 - DNA, 24 bp, Homo sapiens
catagagttggccttgatggcatc

SEQ ID NO: 15368 - DNA, 17 bp, Homo sapiens
cttgggtgtcggggcag

SEQ ID NO: 15369 - DNA, 23 bp, Homo sapiens
cgatgctggtgtactgttgaggg

SEQ ID NO: 15370 - DNA, 21 bp, Homo sapiens
gagattggtgcgaggctgggg

SEQ ID NO: 15371 - DNA, 23 bp, Homo sapiens
caaattctccggatcagcccagc

SEQ ID NO: 15372 - DNA, 23 bp, Homo sapiens
gccccaaggtgtggaaggagcac

SEQ ID NO: 15373 - DNA, 16 bp, Homo sapiens
cgacccctccctgtgg

SEQ ID NO: 15374 - DNA, 24 bp, Homo sapiens
gtcatgttcaaatccaccgtccag

SEQ ID NO: 15375 - DNA, 18 bp, Homo sapiens
tgggcccccatggtgtcc

SEQ ID NO: 15376 - DNA, 16 bp, Homo sapiens
ccacagccccagttct

SEQ ID NO: 15377 - DNA, 16 bp, Homo sapiens
atgcagtcccaggcct

SEQ ID NO: 15378 - DNA, 16 bp, Homo sapiens
gtgcatcctccccgca

SEQ ID NO: 15379 - DNA, 20 bp, Homo sapiens
ctcctgggcatgaacatgag

SEQ ID NO: 15380 - DNA, 19 bp, Homo sapiens
gggatgggggactgaaggg

SEQ ID NO: 15381 - DNA, 22 bp, Homo sapiens
catggaggaagttcaggctggc

SEQ ID NO: 15382 - DNA, 16 bp, Homo sapiens
tagaaggtgtgggcca

SEQ ID NO: 15383 - DNA, 23 bp, Homo sapiens
ccaaaaagagccaagttgctggc

SEQ ID NO: 15384 - DNA, 16 bp, Homo sapiens
cagaacgcccggggga

SEQ ID NO: 15385 - DNA, 16 bp, Homo sapiens
tgcctccccacactcc

SEQ ID NO: 15386 - DNA, 17 bp, Homo sapiens
ctcccgatggtggatgc

SEQ ID NO: 15387 - DNA, 20 bp, Homo sapiens
gtctctgaggctggatcttc

SEQ ID NO: 15388 - DNA, 22 bp, Homo sapiens
gaatggcgcttcaaccgattgc

SEQ ID NO: 15389 - DNA, 19 bp, Homo sapiens
ctggacgtccagggtcagg

SEQ ID NO: 15390 - DNA, 16 bp, Homo sapiens
tgctggggcggcctca

SEQ ID NO: 15391 - DNA, 21 bp, Homo sapiens
ctgggagaagtccctggccac

SEQ ID NO: 15392 - DNA, 16 bp, Homo sapiens
cctgcaggccgattcc

SEQ ID NO: 15393 - DNA, 20 bp, Homo sapiens
cagcacttctggattcagcc

SEQ ID NO: 15394 - DNA, 16 bp, Homo sapiens
gagaaaaggctgcagc

SEQ ID NO: 15395 - DNA, 23 bp, Homo sapiens
cacggaatggccgtcctctgggt

SEQ ID NO: 15396 - DNA, 18 bp, Homo sapiens
catccccacaggatgagc

SEQ ID NO: 15397 - DNA, 22 bp, Homo sapiens
gcagatgtgcttttgggtcctg

SEQ ID NO: 15398 - DNA, 19 bp, Homo sapiens
atggtgtgtgtgatgctgc

SEQ ID NO: 15399 - DNA, 24 bp, Homo sapiens
cccagctctcagctcgccgcttac

SEQ ID NO: 15400 - DNA, 16 bp, Homo sapiens
atggtcccatccagca

SEQ ID NO: 15401 - DNA, 16 bp, Homo sapiens
gtaggccacccagggc

SEQ ID NO: 15402 - DNA, 17 bp, Homo sapiens
ggagggtggacaggaga

SEQ ID NO: 15403 - DNA, 20 bp, Homo sapiens
gcagcttctccacgtcctcc

SEQ ID NO: 15404 - DNA, 22 bp, Homo sapiens
cactgaagttaagaggttccgg

SEQ ID NO: 15405 - DNA, 16 bp, Homo sapiens
cacgtgctgcactcct

SEQ ID NO: 15406 - DNA, 20 bp, Homo sapiens
gagggagcagggttatgagg

SEQ ID NO: 15407 - DNA, 19 bp, Homo sapiens
gaatggcagtgctgagtgc

SEQ ID NO: 15408 - DNA, 16 bp, Homo sapiens
tttgaagccatgcccc

SEQ ID NO: 15409 - DNA, 16 bp, Homo sapiens
gggccagggagggctt

SEQ ID NO: 15410 - DNA, 19 bp, Homo sapiens
ccctgcaaagggcacaggc

SEQ ID NO: 15411 - DNA, 24 bp, Homo sapiens
tggtgtacttccaggtgcaggtcc

SEQ ID NO: 15412 - DNA, 21 bp, Homo sapiens
tggagggagcattggaatggc

SEQ ID NO: 15413 - DNA, 19 bp, Homo sapiens
ccacctgttgcctggacgc

SEQ ID NO: 15414 - DNA, 23 bp, Homo sapiens
catgacgtgatccctctcgaagg

SEQ ID NO: 15415 - DNA, 17 bp, Homo sapiens
gctctcgtgcccagtgc

SEQ ID NO: 15416 - DNA, 16 bp, Homo sapiens
agccctgacctctgcc

SEQ ID NO: 15417 - DNA, 21 bp, Homo sapiens
acctctgcctttgccctgagt

SEQ ID NO: 15418 - DNA, 17 bp, Homo sapiens
ggcgtcttcttagtcct

SEQ ID NO: 15419 - DNA, 21 bp, Homo sapiens
accttgacagagattacagag

SEQ ID NO: 15420 - DNA, 20 bp, Homo sapiens
gcacctggtttgtacctgcc

SEQ ID NO: 15421 - DNA, 22 bp, Homo sapiens
tggggtgggagatgaaatcttt

SEQ ID NO: 15422 - DNA, 20 bp, Homo sapiens
tgaaaccagagaacaaattc

SEQ ID NO: 15423 - DNA, 19 bp, Homo sapiens
aaacttagggacagaggac

SEQ ID NO: 15424 - DNA, 19 bp, Homo sapiens
gagaaacctcccagaacat

SEQ ID NO: 15425 - DNA, 23 bp, Homo sapiens
gactcataaacttccatgggtgg

SEQ ID NO: 15426 - DNA, 18 bp, Homo sapiens
ttgctgggctgatggtgt

SEQ ID NO: 15427 - DNA, 22 bp, Homo sapiens
tcaatccgggcaatcgttggcc

SEQ ID NO: 15428 - DNA, 20 bp, Homo sapiens
ctgggaaatgcctctttttt

SEQ ID NO: 15429 - DNA, 21 bp, Homo sapiens
cggccttattccagagaggtg

SEQ ID NO: 15430 - DNA, 23 bp, Homo sapiens
caagacccttatttcacaaggtg

SEQ ID NO: 15431 - DNA, 22 bp, Homo sapiens
cgtgtctctgtctcagatgtct

SEQ ID NO: 15432 - DNA, 17 bp, Homo sapiens
caggataggagctggcc

SEQ ID NO: 15433 - DNA, 22 bp, Homo sapiens
gattgacggttgaggtgcaggg

SEQ ID NO: 15434 - DNA, 23 bp, Homo sapiens
gaacttacgagtgggaatgctgc

SEQ ID NO: 15435 - DNA, 20 bp, Homo sapiens
gtacccccctaaattgaaag

SEQ ID NO: 15436 - DNA, 17 bp, Homo sapiens
tcagggagtgtggagac

SEQ ID NO: 15437 - DNA, 17 bp, Homo sapiens
gggtcaatccgctgaag

SEQ ID NO: 15438 - DNA, 22 bp, Homo sapiens
ctgcatcttctcagaagaatta

SEQ ID NO: 15439 - DNA, 23 bp, Homo sapiens
tctgtgatgccatgatcagcatt

SEQ ID NO: 15440 - DNA, 24 bp, Homo sapiens
gttcgggagttgctggtacactgt

SEQ ID NO: 15441 - DNA, 18 bp, Homo sapiens
gggaccctcatggtggag

SEQ ID NO: 15442 - DNA, 18 bp, Homo sapiens
gttccagggcctacgcac

SEQ ID NO: 15443 - DNA, 18 bp, Homo sapiens
caagttctcctgtctccc

SEQ ID NO: 15444 - DNA, 20 bp, Homo sapiens
agcaatttcctgccgaatgc

SEQ ID NO: 15445 - DNA, 24 bp, Homo sapiens
aggataaaatataagaagggatac

SEQ ID NO: 15446 - DNA, 19 bp, Homo sapiens
tgtcctccgactcagtggg

SEQ ID NO: 15447 - DNA, 21 bp, Homo sapiens
gaacagcactgagatgagtcc

SEQ ID NO: 15448 - DNA, 24 bp, Homo sapiens
tttctctattattttggaggttgc

SEQ ID NO: 15449 - DNA, 24 bp, Homo sapiens
ggacacgagacccttcaaaaagtc

SEQ ID NO: 15450 - DNA, 21 bp, Homo sapiens
tcagtttactgtggtgcctgc

SEQ ID NO: 15451 - DNA, 18 bp, Homo sapiens
atcttgggctgaaacaac

SEQ ID NO: 15452 - DNA, 21 bp, Homo sapiens
atgggcggcggcatgaatgtc

SEQ ID NO: 15453 - DNA, 23 bp, Homo sapiens
aaaaagctgatgcacttatttat

SEQ ID NO: 15454 - DNA, 24 bp, Homo sapiens
acatccacagcctcaatatttgca

SEQ ID NO: 15455 - DNA, 22 bp, Homo sapiens
ccaataataaacttacccggtg

SEQ ID NO: 15456 - DNA, 16 bp, Homo sapiens
aggggtgcaagaggca

SEQ ID NO: 15457 - DNA, 21 bp, Homo sapiens
acccgagttatttccaagaac

SEQ ID NO: 15458 - DNA, 22 bp, Homo sapiens
gcgatattaaatgccaactaca

SEQ ID NO: 15459 - DNA, 22 bp, Homo sapiens
ctcttgcccatgtcagaaaagc

SEQ ID NO: 15460 - DNA, 22 bp, Homo sapiens
gctctttttccctttgttgcag

SEQ ID NO: 15461 - DNA, 24 bp, Homo sapiens
aagtaatgatagattaaagttgat

SEQ ID NO: 15462 - DNA, 19 bp, Homo sapiens
ggggtgtcttttggttggt

SEQ ID NO: 15463 - DNA, 22 bp, Homo sapiens
tctaatcgcttggccatgtagt

SEQ ID NO: 15464 - DNA, 24 bp, Homo sapiens
gaattttccactcatctttactcc

SEQ ID NO: 15465 - DNA, 21 bp, Homo sapiens
aagacccttgcctcccatcat

SEQ ID NO: 15466 - DNA, 24 bp, Homo sapiens
cttgcccatttcctgggcttatat

SEQ ID NO: 15467 - DNA, 24 bp, Homo sapiens
ccaggccatcagcaatattctttg

SEQ ID NO: 15468 - DNA, 17 bp, Homo sapiens
gatgcctgtcctgtggg

SEQ ID NO: 15469 - DNA, 22 bp, Homo sapiens
aagaagtctgcagtatccggtc

SEQ ID NO: 15470 - DNA, 22 bp, Homo sapiens
tacaggaagaaacatctcgccc

SEQ ID NO: 15471 - DNA, 19 bp, Homo sapiens
acatactcccaggcctcac

SEQ ID NO: 15472 - DNA, 24 bp, Homo sapiens
cagaaccttcccattagattaaac

SEQ ID NO: 15473 - DNA, 23 bp, Homo sapiens
catggggccgcactgacggttcc

SEQ ID NO: 15474 - DNA, 20 bp, Homo sapiens
cccttccactgtcagagctc

SEQ ID NO: 15475 - DNA, 18 bp, Homo sapiens
gatgattgggcaaaaacg

SEQ ID NO: 15476 - DNA, 16 bp, Homo sapiens
ggtcctggcatggggc

SEQ ID NO: 15477 - DNA, 19 bp, Homo sapiens
cctacaagtgcactacacc

SEQ ID NO: 15478 - DNA, 19 bp, Homo sapiens
ttcgggtctgatgtctcgc

SEQ ID NO: 15479 - DNA, 24 bp, Homo sapiens
gatgagtagtctatttagggccac

SEQ ID NO: 15480 - DNA, 22 bp, Homo sapiens
tccaagctcttgacttttgctt

SEQ ID NO: 15481 - DNA, 24 bp, Homo sapiens
cagcccagaacttacactccgatg

SEQ ID NO: 15482 - DNA, 24 bp, Homo sapiens
ttttcctctgaggggagaaggcag

SEQ ID NO: 15483 - DNA, 24 bp, Homo sapiens
ggtcttgtgaagatttaggtgcga

SEQ ID NO: 15484 - DNA, 19 bp, Homo sapiens
ctgggccagtatagaggac

SEQ ID NO: 15485 - DNA, 21 bp, Homo sapiens
cggggcaaatatgaatgctca

SEQ ID NO: 15486 - DNA, 21 bp, Homo sapiens
gagatcaacaaccaccagtgg

SEQ ID NO: 15487 - DNA, 21 bp, Homo sapiens
gagaacatcagtgacgtgtgt

SEQ ID NO: 15488 - DNA, 24 bp, Homo sapiens
cctctcaagaagtcagaatttttt

SEQ ID NO: 15489 - DNA, 24 bp, Homo sapiens
taagcacaaggagaacctagcagc

SEQ ID NO: 15490 - DNA, 19 bp, Homo sapiens
ggcctcttcagttcccacc

SEQ ID NO: 15491 - DNA, 19 bp, Homo sapiens
agaaacatatcctccctcc

SEQ ID NO: 15492 - DNA, 24 bp, Homo sapiens
cctccatgttgatggatgaggtca

SEQ ID NO: 15493 - DNA, 22 bp, Homo sapiens
ggaaagtaaagactgagacttc

SEQ ID NO: 15494 - DNA, 21 bp, Homo sapiens
tgggtatgtaatcatgatagc

SEQ ID NO: 15495 - DNA, 22 bp, Homo sapiens
aagggagtaatggctgtggttt

SEQ ID NO: 15496 - DNA, 21 bp, Homo sapiens
cgatgcagttcacctcaaggc

SEQ ID NO: 15497 - DNA, 22 bp, Homo sapiens
agactctggtcaaaggaagaac

SEQ ID NO: 15498 - DNA, 16 bp, Homo sapiens
agtgcccacatggcag

SEQ ID NO: 15499 - DNA, 23 bp, Homo sapiens
ataatccatcaagtccctgatcc

SEQ ID NO: 15500 - DNA, 24 bp, Homo sapiens
ctttgcttcctttctattctgtag

SEQ ID NO: 15501 - DNA, 21 bp, Homo sapiens
aggagaagacaagtaccatgg

SEQ ID NO: 15502 - DNA, 22 bp, Homo sapiens
gcatgttgtagtacttttctgt

SEQ ID NO: 15503 - DNA, 23 bp, Homo sapiens
ccacctccacaggctgaatcttc

SEQ ID NO: 15504 - DNA, 21 bp, Homo sapiens
ttttaaagcactagtgttcag

SEQ ID NO: 15505 - DNA, 17 bp, Homo sapiens
tcggaatgaggcaaacc

SEQ ID NO: 15506 - DNA, 23 bp, Homo sapiens
ccgagcctacttaaaccagaaag

SEQ ID NO: 15507 - DNA, 24 bp, Homo sapiens
atttgtttcttgactatatgttcc

SEQ ID NO: 15508 - DNA, 23 bp, Homo sapiens
tcttcttgtctttgcaagcggag

SEQ ID NO: 15509 - DNA, 21 bp, Homo sapiens
ggaccctgagagccaggacct

SEQ ID NO: 15510 - DNA, 22 bp, Homo sapiens
ccagggcccaataaatattgaa

SEQ ID NO: 15511 - DNA, 24 bp, Homo sapiens
gccatactcaccgttctgtgcccc

SEQ ID NO: 15512 - DNA, 17 bp, Homo sapiens
cttctctcagcgtctgg

SEQ ID NO: 15513 - DNA, 18 bp, Homo sapiens
cagcatattctccctggg

SEQ ID NO: 15514 - DNA, 17 bp, Homo sapiens
caggtctgtttccagcc

SEQ ID NO: 15515 - DNA, 22 bp, Homo sapiens
ctctccccagtggagtggaact

SEQ ID NO: 15516 - DNA, 22 bp, Homo sapiens
aaggatatcagcagcttttccg

SEQ ID NO: 15517 - DNA, 24 bp, Homo sapiens
gttgttctaagcctttaagttttg

SEQ ID NO: 15518 - DNA, 20 bp, Homo sapiens
tcagcctatcacatggaaag

SEQ ID NO: 15519 - DNA, 18 bp, Homo sapiens
atgcccttacctgtttgg

SEQ ID NO: 15520 - DNA, 22 bp, Homo sapiens
agttattattgctattgctatt

SEQ ID NO: 15521 - DNA, 20 bp, Homo sapiens
ccttctcaagctctcggaaa

SEQ ID NO: 15522 - DNA, 16 bp, Homo sapiens
cgcttagaacagtgcc

SEQ ID NO: 15523 - DNA, 19 bp, Homo sapiens
aaaggggtggatgtttgca

SEQ ID NO: 15524 - DNA, 23 bp, Homo sapiens
tcccaagattggtgaatagcaag

SEQ ID NO: 15525 - DNA, 25 bp, Homo sapiens
tcactaatgtgatacattttggatg

SEQ ID NO: 15526 - DNA, 22 bp, Homo sapiens
cagtcccagtagatttcactag

SEQ ID NO: 15527 - DNA, 19 bp, Homo sapiens
ggtggccatgctgggagaa

SEQ ID NO: 15528 - DNA, 21 bp, Homo sapiens
tatccacttacagaagtgagc

SEQ ID NO: 15529 - DNA, 18 bp, Homo sapiens
aagctaccccaatcccac

SEQ ID NO: 15530 - DNA, 21 bp, Homo sapiens
gacatttcccttgttcacagc

SEQ ID NO: 15531 - DNA, 22 bp, Homo sapiens
agtccatcaatcaaccctccat

SEQ ID NO: 15532 - DNA, 17 bp, Homo sapiens
tgttcacagctaccact

SEQ ID NO: 15533 - DNA, 24 bp, Homo sapiens
gcatattaggtaggaccaagagac

SEQ ID NO: 15534 - DNA, 16 bp, Homo sapiens
gaggatgtgcatggac

SEQ ID NO: 15535 - DNA, 18 bp, Homo sapiens
accagtggaatcatgctg

SEQ ID NO: 15536 - DNA, 18 bp, Homo sapiens
gacatattgtccgtggcc

SEQ ID NO: 15537 - DNA, 24 bp, Homo sapiens
tcttcatgtaccggacaatgtttg

SEQ ID NO: 15538 - DNA, 21 bp, Homo sapiens
cttttcccaagtcaggaacgg

SEQ ID NO: 15539 - DNA, 24 bp, Homo sapiens
tattccagggtctgtgttcaagag

SEQ ID NO: 15540 - DNA, 20 bp, Homo sapiens
ccagaataaccaggccacag

SEQ ID NO: 15541 - DNA, 18 bp, Homo sapiens
tgtttctccttcaggaac

SEQ ID NO: 15542 - DNA, 21 bp, Homo sapiens
tgattaccaaagcacaaaacg

SEQ ID NO: 15543 - DNA, 17 bp, Homo sapiens
ccacccagaagcctgga

SEQ ID NO: 15544 - DNA, 17 bp, Homo sapiens
gtgaggaacgggctggt

SEQ ID NO: 15545 - DNA, 27 bp, Homo sapiens
attaaataaataaataaataaataaat

SEQ ID NO: 15546 - DNA, 22 bp, Homo sapiens
ctcccatgctttcagcaaccag

SEQ ID NO: 15547 - DNA, 22 bp, Homo sapiens
cgatttgttgtggatctttggt

SEQ ID NO: 15548 - DNA, 21 bp, Homo sapiens
ttttaacaacaagctaccagt

SEQ ID NO: 15549 - DNA, 18 bp, Homo sapiens
gtgtttctgtagcttggt

SEQ ID NO: 15550 - DNA, 21 bp, Homo sapiens
taagctacttttgctaccacc

SEQ ID NO: 15551 - DNA, 18 bp, Homo sapiens
cctctcttgggattcctc

SEQ ID NO: 15552 - DNA, 20 bp, Homo sapiens
tactgcagatgactcacaac

SEQ ID NO: 15553 - DNA, 22 bp, Homo sapiens
cgtggagataattgtaccctga

SEQ ID NO: 15554 - DNA, 23 bp, Homo sapiens
actgtttcatcaagagaaatacc

SEQ ID NO: 15555 - DNA, 23 bp, Homo sapiens
gtgttgcataatgtaaataacac

SEQ ID NO: 15556 - DNA, 17 bp, Homo sapiens
aaggaggtcttgggcag

SEQ ID NO: 15557 - DNA, 27 bp, Homo sapiens
aagttttcctttttattttttaaaaac

SEQ ID NO: 15558 - DNA, 19 bp, Homo sapiens
ggcatcaactccagcatga

SEQ ID NO: 15559 - DNA, 28 bp, Homo sapiens
aaaaactggtaaaaatactgaaaatttg

SEQ ID NO: 15560 - DNA, 23 bp, Homo sapiens
aggagcaggtttctatatgagag

SEQ ID NO: 15561 - DNA, 17 bp, Homo sapiens
atctgccgctgagcggc

SEQ ID NO: 15562 - DNA, 20 bp, Homo sapiens
aggaccaacaagagtctagt

SEQ ID NO: 15563 - DNA, 23 bp, Homo sapiens
tcttcaaggtatcaaagaacagg

SEQ ID NO: 15564 - DNA, 23 bp, Homo sapiens
ttttctacagcatgataataaac

SEQ ID NO: 15565 - DNA, 23 bp, Homo sapiens
acaacaaaataatcatggatgtt

SEQ ID NO: 15566 - DNA, 16 bp, Homo sapiens
atggttcccatgggct

SEQ ID NO: 15567 - DNA, 22 bp, Homo sapiens
ttgcatatagtattggacatgc

SEQ ID NO: 15568 - DNA, 26 bp, Homo sapiens
cacgtgattctttaaatgttcttatc

SEQ ID NO: 15569 - DNA, 22 bp, Homo sapiens
tgcccaaatgttttagacagat

SEQ ID NO: 15570 - DNA, 19 bp, Homo sapiens
agttttgacatcccaagtc

SEQ ID NO: 15571 - DNA, 20 bp, Homo sapiens
accctcctagcaatatgctc

SEQ ID NO: 15572 - DNA, 20 bp, Homo sapiens
attaattgtccccaactatc

SEQ ID NO: 15573 - DNA, 20 bp, Homo sapiens
atattcgccaagagggccta

SEQ ID NO: 15574 - DNA, 16 bp, Homo sapiens
ggctaccagcaacatc

SEQ ID NO: 15575 - DNA, 24 bp, Homo sapiens
taagatcttgccatttctggtgtg

SEQ ID NO: 15576 - DNA, 20 bp, Homo sapiens
ccactgggaaagaagtgtat

SEQ ID NO: 15577 - DNA, 23 bp, Homo sapiens
tgaatgaatgagtagctcatttc

SEQ ID NO: 15578 - DNA, 18 bp, Homo sapiens
tagcatctcccagtgctg

SEQ ID NO: 15579 - DNA, 22 bp, Homo sapiens
atttacctgagctgtacagatg

SEQ ID NO: 15580 - DNA, 20 bp, Homo sapiens
ccaagtgcatttgctgaatt

SEQ ID NO: 15581 - DNA, 20 bp, Homo sapiens
tgaagagcaagacgatacac

SEQ ID NO: 15582 - DNA, 16 bp, Homo sapiens
gaagaatggtgggggt

SEQ ID NO: 15583 - DNA, 23 bp, Homo sapiens
ctgaatctatgttgtacatttcc

SEQ ID NO: 15584 - DNA, 19 bp, Homo sapiens
tatgggggaccccatgcag

SEQ ID NO: 15585 - DNA, 24 bp, Homo sapiens
agaaatcaacatttgtgatcagaa

SEQ ID NO: 15586 - DNA, 18 bp, Homo sapiens
cacctggagaatttgggg

SEQ ID NO: 15587 - DNA, 23 bp, Homo sapiens
catgagcccctttaccttgttac

SEQ ID NO: 15588 - DNA, 18 bp, Homo sapiens
tcctttctagagcctggc

SEQ ID NO: 15589 - DNA, 23 bp, Homo sapiens
gctttctcggacagcaaaaaatg

SEQ ID NO: 15590 - DNA, 18 bp, Homo sapiens
ctactctcccactactct

SEQ ID NO: 15591 - DNA, 18 bp, Homo sapiens
ctgcccagggcgatgtct

SEQ ID NO: 15592 - DNA, 24 bp, Homo sapiens
tgaatgaatgagcaatggagttca

SEQ ID NO: 15593 - DNA, 19 bp, Homo sapiens
aaaaggtcagtagcacagc

SEQ ID NO: 15594 - DNA, 22 bp, Homo sapiens
tggagagagctcatcagagtgg

SEQ ID NO: 15595 - DNA, 19 bp, Homo sapiens
tcaggaaggagagttttac

SEQ ID NO: 15596 - DNA, 19 bp, Homo sapiens
tggagtgttgttccagtac

SEQ ID NO: 15597 - DNA, 22 bp, Homo sapiens
acagagagagagataggtagac

SEQ ID NO: 15598 - DNA, 19 bp, Homo sapiens
tactggagtcctcactgag

SEQ ID NO: 15599 - DNA, 22 bp, Homo sapiens
aagaaaggtatacctaccccac

SEQ ID NO: 15600 - DNA, 22 bp, Homo sapiens
aattaattttcccttataaacc

SEQ ID NO: 15601 - DNA, 21 bp, Homo sapiens
tccaccttcccctccgtgtct

SEQ ID NO: 15602 - DNA, 17 bp, Homo sapiens
gccactgtgggagggca

SEQ ID NO: 15603 - DNA, 24 bp, Homo sapiens
ctgaagtccatttcacagggtaac

SEQ ID NO: 15604 - DNA, 20 bp, Homo sapiens
gttgctgtgatgtagttacc

SEQ ID NO: 15605 - DNA, 18 bp, Homo sapiens
gtccagactcgagccaag

SEQ ID NO: 15606 - DNA, 22 bp, Homo sapiens
caaaactcagcaaccccaattt

SEQ ID NO: 15607 - DNA, 17 bp, Homo sapiens
gacacaacaagaggagg

SEQ ID NO: 15608 - DNA, 23 bp, Homo sapiens
cagtttggaagtgagaaagagaa

SEQ ID NO: 15609 - DNA, 20 bp, Homo sapiens
gcgttcttagaagatagtcc

SEQ ID NO: 15610 - DNA, 23 bp, Homo sapiens
acgaatcaaattaattacttggc

SEQ ID NO: 15611 - DNA, 20 bp, Homo sapiens
ccggcctactcagtattttt

SEQ ID NO: 15612 - DNA, 20 bp, Homo sapiens
tgcagctgtgctacaggtga

SEQ ID NO: 15613 - DNA, 24 bp, Homo sapiens
gaacctgttgagtttttcagtttc

SEQ ID NO: 15614 - DNA, 16 bp, Homo sapiens
caggcctggacatggc

SEQ ID NO: 15615 - DNA, 23 bp, Homo sapiens
ttcacaatatactatagaaagaa

SEQ ID NO: 15616 - DNA, 16 bp, Homo sapiens
gtgtctcaggggaggc

SEQ ID NO: 15617 - DNA, 24 bp, Homo sapiens
attccagcactttgagaggcctct

SEQ ID NO: 15618 - DNA, 19 bp, Homo sapiens
tttggacaagaccttttgt

SEQ ID NO: 15619 - DNA, 18 bp, Homo sapiens
ctcatccagcagggatgc

SEQ ID NO: 15620 - DNA, 24 bp, Homo sapiens
aggcaaattattttcaggtactga

SEQ ID NO: 15621 - DNA, 20 bp, Homo sapiens
ttgagtaaactctccagcct

SEQ ID NO: 15622 - DNA, 24 bp, Homo sapiens
ctaagctttacaaaggccaaaaag

SEQ ID NO: 15623 - DNA, 18 bp, Homo sapiens
attttgcggaacttactg

SEQ ID NO: 15624 - DNA, 19 bp, Homo sapiens
ttggagacagcactaggag

SEQ ID NO: 15625 - DNA, 20 bp, Homo sapiens
aaaaccagatctggagatcg

SEQ ID NO: 15626 - DNA, 23 bp, Homo sapiens
gacagatggaggatggagagaat

SEQ ID NO: 15627 - DNA, 21 bp, Homo sapiens
tctttttcccacaattaggtg

SEQ ID NO: 15628 - DNA, 21 bp, Homo sapiens
cattaccatcctgagttctcc

SEQ ID NO: 15629 - DNA, 24 bp, Homo sapiens
actcaaacaaaatgagggatttaa

SEQ ID NO: 15630 - DNA, 20 bp, Homo sapiens
agcccatgccaatatacgat

SEQ ID NO: 15631 - DNA, 19 bp, Homo sapiens
ggttggatggatgactctt

SEQ ID NO: 15632 - DNA, 23 bp, Homo sapiens
cagagttgcaaggatttcatttt

SEQ ID NO: 15633 - DNA, 16 bp, Homo sapiens
ctccggaggtacccgc

SEQ ID NO: 15634 - DNA, 21 bp, Homo sapiens
gaattgatcgagaagacggtc

SEQ ID NO: 15635 - DNA, 22 bp, Homo sapiens
atccttaccccagagctcgatt

SEQ ID NO: 15636 - DNA, 20 bp, Homo sapiens
gactcttttaactcagaggc

SEQ ID NO: 15637 - DNA, 24 bp, Homo sapiens
aatctaagtccaagggagccctcc

SEQ ID NO: 15638 - DNA, 20 bp, Homo sapiens
aaccctaattaggcgatttc

SEQ ID NO: 15639 - DNA, 20 bp, Homo sapiens
tcaaacggatgttggcaggg

SEQ ID NO: 15640 - DNA, 22 bp, Homo sapiens
acgattttctttcctccaaatc

SEQ ID NO: 15641 - DNA, 22 bp, Homo sapiens
gggacaaagaccagagagagat

SEQ ID NO: 15642 - DNA, 16 bp, Homo sapiens
gcggggaccacgcgga

SEQ ID NO: 15643 - DNA, 16 bp, Homo sapiens
ctggagcgccttctgc

SEQ ID NO: 15644 - DNA, 23 bp, Homo sapiens
ccgcgcaggcagagcccgggcag

SEQ ID NO: 15645 - DNA, 17 bp, Homo sapiens
gagccgggacagcagca

SEQ ID NO: 15646 - DNA, 17 bp, Homo sapiens
cccaaggtctgcagcat

SEQ ID NO: 15647 - DNA, 16 bp, Homo sapiens
gggccgcggggtcggg

SEQ ID NO: 15648 - DNA, 19 bp, Homo sapiens
ccgagcgaagtcgtcgtgt

SEQ ID NO: 15649 - DNA, 16 bp, Homo sapiens
ggggacggtggccgcg

SEQ ID NO: 15650 - DNA, 17 bp, Homo sapiens
gtccccgccgccactgc

SEQ ID NO: 15651 - DNA, 23 bp, Homo sapiens
agccgccacccgggggaccgagg

SEQ ID NO: 15652 - DNA, 16 bp, Homo sapiens
ccccagccaggcggcg

SEQ ID NO: 15653 - DNA, 19 bp, Homo sapiens
gtccatccatctgtccggc

SEQ ID NO: 15654 - DNA, 21 bp, Homo sapiens
cctggcacaggactgcatggc

SEQ ID NO: 15655 - DNA, 17 bp, Homo sapiens
ttgctgaggatcggttc

SEQ ID NO: 15656 - DNA, 18 bp, Homo sapiens
cagtcagtcacgtgctgg

SEQ ID NO: 15657 - DNA, 18 bp, Homo sapiens
gtgcagttaccgtttgcc

SEQ ID NO: 15658 - DNA, 21 bp, Homo sapiens
tggacggagaaagtgaaaggt

SEQ ID NO: 15659 - DNA, 22 bp, Homo sapiens
ggggacgaaagcttcctaagga

SEQ ID NO: 15660 - DNA, 18 bp, Homo sapiens
ggcctcatgtcgcgcagt

SEQ ID NO: 15661 - DNA, 16 bp, Homo sapiens
cctgcagactgtacgc

SEQ ID NO: 15662 - DNA, 16 bp, Homo sapiens
cgcagcagcaaccttc

SEQ ID NO: 15663 - DNA, 24 bp, Homo sapiens
attggcgctgggaaagtccaatcc

SEQ ID NO: 15664 - DNA, 18 bp, Homo sapiens
cttcatgcggtgagctga

SEQ ID NO: 15665 - DNA, 17 bp, Homo sapiens
gctcccgagcttgggcc

SEQ ID NO: 15666 - DNA, 23 bp, Homo sapiens
ggttgagagggtcatggcggggc

SEQ ID NO: 15667 - DNA, 24 bp, Homo sapiens
agctctgaggactgatcttgactg

SEQ ID NO: 15668 - DNA, 24 bp, Homo sapiens
atgcagggctctacaggcttacct

SEQ ID NO: 15669 - DNA, 17 bp, Homo sapiens
tgagtgggtgctggtgt

SEQ ID NO: 15670 - DNA, 17 bp, Homo sapiens
gtgggtggaggacagtt

SEQ ID NO: 15671 - DNA, 19 bp, Homo sapiens
cccagcttctgaagacagt

SEQ ID NO: 15672 - DNA, 17 bp, Homo sapiens
gcccaccctaggggacc

SEQ ID NO: 15673 - DNA, 21 bp, Homo sapiens
ccatccgagccaacggagagg

SEQ ID NO: 15674 - DNA, 23 bp, Homo sapiens
aacaggaaggtgctatcgtactg

SEQ ID NO: 15675 - DNA, 23 bp, Homo sapiens
gggtcatatcccaccaagctttt

SEQ ID NO: 15676 - DNA, 18 bp, Homo sapiens
ggagccaggttacctgga

SEQ ID NO: 15677 - DNA, 19 bp, Homo sapiens
gtccagtctttgaagccca

SEQ ID NO: 15678 - DNA, 16 bp, Homo sapiens
tgcagcagaagtccct

SEQ ID NO: 15679 - DNA, 24 bp, Homo sapiens
gcctatccttgtcggtaggtgaat

SEQ ID NO: 15680 - DNA, 19 bp, Homo sapiens
ctcgagcagactttgcttg

SEQ ID NO: 15681 - DNA, 21 bp, Homo sapiens
ccagctctgcagcctgatgcc

SEQ ID NO: 15682 - DNA, 21 bp, Homo sapiens
ctgagtctccaactctggttt

SEQ ID NO: 15683 - DNA, 18 bp, Homo sapiens
ggctagacctcttgaggg

SEQ ID NO: 15684 - DNA, 20 bp, Homo sapiens
cgggagaaaagataaccgag

SEQ ID NO: 15685 - DNA, 24 bp, Homo sapiens
aggacccagtgatcatcccctttt

SEQ ID NO: 15686 - DNA, 18 bp, Homo sapiens
agtggcagcgttacatcc

SEQ ID NO: 15687 - DNA, 24 bp, Homo sapiens
tttcccctcttacaactttcaaac

SEQ ID NO: 15688 - DNA, 17 bp, Homo sapiens
tcctctgtgactgaggc

SEQ ID NO: 15689 - DNA, 24 bp, Homo sapiens
gtagcacagccaagccctacctct

SEQ ID NO: 15690 - DNA, 16 bp, Homo sapiens
cctgcccatccagggg

SEQ ID NO: 15691 - DNA, 24 bp, Homo sapiens
aaggtcatgtgcttccacccctgg

SEQ ID NO: 15692 - DNA, 17 bp, Homo sapiens
ctgaccacaccctgtgg

SEQ ID NO: 15693 - DNA, 24 bp, Homo sapiens
atccgggctgttgttgatgcatgg

SEQ ID NO: 15694 - DNA, 24 bp, Homo sapiens
tcaaagatctatcagatagggata

SEQ ID NO: 15695 - DNA, 21 bp, Homo sapiens
gtgcaggtttgtgaggtcgcc

SEQ ID NO: 15696 - DNA, 16 bp, Homo sapiens
cttacctggcagtggg

SEQ ID NO: 15697 - DNA, 19 bp, Homo sapiens
ggagtaacatttctgtttc

SEQ ID NO: 15698 - DNA, 20 bp, Homo sapiens
ctgttcccatgtccacagtg

SEQ ID NO: 15699 - DNA, 23 bp, Homo sapiens
gtgtcttttggctaacagagctc

SEQ ID NO: 15700 - DNA, 19 bp, Homo sapiens
aggtcctttacctccaagc

SEQ ID NO: 15701 - DNA, 23 bp, Homo sapiens
ccatgatgggctgttctaacccc

SEQ ID NO: 15702 - DNA, 22 bp, Homo sapiens
atatctggcaggaaactgctgg

SEQ ID NO: 15703 - DNA, 21 bp, Homo sapiens
gtttcttggctgagtctgagc

SEQ ID NO: 15704 - DNA, 16 bp, Homo sapiens
gctctccatgctgact

SEQ ID NO: 15705 - DNA, 22 bp, Homo sapiens
gaggaaatatgccaatgatgtg

SEQ ID NO: 15706 - DNA, 18 bp, Homo sapiens
cagggcttggctctctcc

SEQ ID NO: 15707 - DNA, 24 bp, Homo sapiens
tctgcttttgccccttgacaggta

SEQ ID NO: 15708 - DNA, 20 bp, Homo sapiens
gctttctcctttacacacct

SEQ ID NO: 15709 - DNA, 23 bp, Homo sapiens
cgatctcagcaggcctataagag

SEQ ID NO: 15710 - DNA, 23 bp, Homo sapiens
cctttagattactggattattgc

SEQ ID NO: 15711 - DNA, 20 bp, Homo sapiens
ccaggagctactcaggaagg

SEQ ID NO: 15712 - DNA, 19 bp, Homo sapiens
ctggttaggaccagacgtt

SEQ ID NO: 15713 - DNA, 24 bp, Homo sapiens
gacttagactcgggtggttagtgg

SEQ ID NO: 15714 - DNA, 17 bp, Homo sapiens
agtgtctggtagggcca

SEQ ID NO: 15715 - DNA, 21 bp, Homo sapiens
ctgcttcccttgcctatttgc

SEQ ID NO: 15716 - DNA, 17 bp, Homo sapiens
ctgaccatcacgctcag

SEQ ID NO: 15717 - DNA, 23 bp, Homo sapiens
cttcctatccattctgtcttcct

SEQ ID NO: 15718 - DNA, 17 bp, Homo sapiens
cctactgggagcaacct

SEQ ID NO: 15719 - DNA, 17 bp, Homo sapiens
cttctgggcaacatggc

SEQ ID NO: 15720 - DNA, 21 bp, Homo sapiens
cttcatgatggaggctagatc

SEQ ID NO: 15721 - DNA, 18 bp, Homo sapiens
ggctacctgagctgaccc

SEQ ID NO: 15722 - DNA, 16 bp, Homo sapiens
cagcccatggagtagg

SEQ ID NO: 15723 - DNA, 19 bp, Homo sapiens
gctaggcactggatggagg

SEQ ID NO: 15724 - DNA, 17 bp, Homo sapiens
aggagcccagaaatggt

SEQ ID NO: 15725 - DNA, 24 bp, Homo sapiens
ctgagagtcaggctctgattccag

SEQ ID NO: 15726 - DNA, 19 bp, Homo sapiens
ttcccccagcaactgtttc

SEQ ID NO: 15727 - DNA, 23 bp, Homo sapiens
atgacaacctctttgagacgtcc

SEQ ID NO: 15728 - DNA, 17 bp, Homo sapiens
gccccagcctctgatcc

SEQ ID NO: 15729 - DNA, 19 bp, Homo sapiens
ctcttctcaagcaggggat

SEQ ID NO: 15730 - DNA, 20 bp, Homo sapiens
cagtggcagagcgcaggagc

SEQ ID NO: 15731 - DNA, 23 bp, Homo sapiens
gggtttgggagtaggtgctaacc

SEQ ID NO: 15732 - DNA, 18 bp, Homo sapiens
gtgaggtccctctgagcc

SEQ ID NO: 15733 - DNA, 24 bp, Homo sapiens
tctcttctttctgtcaggggctcc

SEQ ID NO: 15734 - DNA, 18 bp, Homo sapiens
gcacatactgcatgtgag

SEQ ID NO: 15735 - DNA, 24 bp, Homo sapiens
gcagctgcacgctcattactaccc

SEQ ID NO: 15736 - DNA, 19 bp, Homo sapiens
gccagagctgttttctgcc

SEQ ID NO: 15737 - DNA, 24 bp, Homo sapiens
ctacgaaatgcttgctcaggctca

SEQ ID NO: 15738 - DNA, 23 bp, Homo sapiens
tctgaggaccatactctccttcc

SEQ ID NO: 15739 - DNA, 22 bp, Homo sapiens
caggaagtgcccttagtctctc

SEQ ID NO: 15740 - DNA, 24 bp, Homo sapiens
atcatggcatcattgcattccagc

SEQ ID NO: 15741 - DNA, 17 bp, Homo sapiens
ggtcaggcgatggttgc

SEQ ID NO: 15742 - DNA, 22 bp, Homo sapiens
aaaaaaatgaagtccatgccac

SEQ ID NO: 15743 - DNA, 22 bp, Homo sapiens
tttctgcttaattcagcaagac

SEQ ID NO: 15744 - DNA, 21 bp, Homo sapiens
ctccctgtcccttttccaggc

SEQ ID NO: 15745 - DNA, 23 bp, Homo sapiens
gagatgcacagttttattaatgc

SEQ ID NO: 15746 - DNA, 19 bp, Homo sapiens
agaaggacagggagacagc

SEQ ID NO: 15747 - DNA, 18 bp, Homo sapiens
ctgccaaagtcttgtgac

SEQ ID NO: 15748 - DNA, 22 bp, Homo sapiens
cacaggcctaccaccaatctca

SEQ ID NO: 15749 - DNA, 16 bp, Homo sapiens
tgagctggatccgtcc

SEQ ID NO: 15750 - DNA, 17 bp, Homo sapiens
gtgaagcagaaagccct

SEQ ID NO: 15751 - DNA, 18 bp, Homo sapiens
ttcacccttaggcatcat

SEQ ID NO: 15752 - DNA, 24 bp, Homo sapiens
cttcaaaacgtggcagctacaggt

SEQ ID NO: 15753 - DNA, 20 bp, Homo sapiens
acctattgtgggtggtgaac

SEQ ID NO: 15754 - DNA, 18 bp, Homo sapiens
aaggcgtcacgatcagag

SEQ ID NO: 15755 - DNA, 18 bp, Homo sapiens
tggtgaggctcaggcctg

SEQ ID NO: 15756 - DNA, 21 bp, Homo sapiens
agagacctggagagaaagaag

SEQ ID NO: 15757 - DNA, 17 bp, Homo sapiens
ctgcactctggtggagg

SEQ ID NO: 15758 - DNA, 24 bp, Homo sapiens
ggcagccatacccccgctttcagt

SEQ ID NO: 15759 - DNA, 23 bp, Homo sapiens
ctacaggtaatcgagacacttac

SEQ ID NO: 15760 - DNA, 16 bp, Homo sapiens
ctcagccccaagccag

SEQ ID NO: 15761 - DNA, 24 bp, Homo sapiens
taaaacaatgcctaagactatgtc

SEQ ID NO: 15762 - DNA, 24 bp, Homo sapiens
tgaccccttagtttgggcctccag

SEQ ID NO: 15763 - DNA, 20 bp, Homo sapiens
cttccatatgtgagtgtagg

SEQ ID NO: 15764 - DNA, 22 bp, Homo sapiens
cttcagagtctgaagcaggtga

SEQ ID NO: 15765 - DNA, 24 bp, Homo sapiens
ctgcatacacactgtgtatatttg

SEQ ID NO: 15766 - DNA, 21 bp, Homo sapiens
aggataccaaagccttacagg

SEQ ID NO: 15767 - DNA, 23 bp, Homo sapiens
atcacccctcctgtctgagaaca

SEQ ID NO: 15768 - DNA, 16 bp, Homo sapiens
gcttcgggcagccgcc

SEQ ID NO: 15769 - DNA, 22 bp, Homo sapiens
ggcctctctgtccttgcacatc

SEQ ID NO: 15770 - DNA, 17 bp, Homo sapiens
ccccaggggcagctttc

SEQ ID NO: 15771 - DNA, 22 bp, Homo sapiens
atctgcacactgaggaggaagt

SEQ ID NO: 15772 - DNA, 24 bp, Homo sapiens
atagaggaggatttggggttttgg

SEQ ID NO: 15773 - DNA, 22 bp, Homo sapiens
cccattccagtccacgactaat

SEQ ID NO: 15774 - DNA, 21 bp, Homo sapiens
tttaatgtgtcccagcccacc

SEQ ID NO: 15775 - DNA, 19 bp, Homo sapiens
tacatccctgctcacagtt

SEQ ID NO: 15776 - DNA, 23 bp, Homo sapiens
gtgtcttcccagcctcacagtca

SEQ ID NO: 15777 - DNA, 19 bp, Homo sapiens
ttcaggtgcctcgagctgc

SEQ ID NO: 15778 - DNA, 24 bp, Homo sapiens
cacagtccctttctcttaagtctc

SEQ ID NO: 15779 - DNA, 20 bp, Homo sapiens
ccatgttcacctacttaccc

SEQ ID NO: 15780 - DNA, 20 bp, Homo sapiens
cacttccaggaggtaagagg

SEQ ID NO: 15781 - DNA, 21 bp, Homo sapiens
gtcctagagggggtgtggagg

SEQ ID NO: 15782 - DNA, 22 bp, Homo sapiens
cctcaggtgtggcccggaagag

SEQ ID NO: 15783 - DNA, 20 bp, Homo sapiens
ctgggttcaactgggtgccc

SEQ ID NO: 15784 - DNA, 24 bp, Homo sapiens
gaagaggaatcaatttcagaaact

SEQ ID NO: 15785 - DNA, 18 bp, Homo sapiens
aggaactgccatactgcc

SEQ ID NO: 15786 - DNA, 24 bp, Homo sapiens
tcaggtcccaatcagaaaatcatc

SEQ ID NO: 15787 - DNA, 19 bp, Homo sapiens
gcacatcatctctgctacc

SEQ ID NO: 15788 - DNA, 20 bp, Homo sapiens
actaattgccactttttggg

SEQ ID NO: 15789 - DNA, 17 bp, Homo sapiens
cactgatccaggcaggc

SEQ ID NO: 15790 - DNA, 16 bp, Homo sapiens
ggcagagacccagagt

SEQ ID NO: 15791 - DNA, 24 bp, Homo sapiens
ctccagttctccccacccccctcc

SEQ ID NO: 15792 - DNA, 23 bp, Homo sapiens
acagccgggacatcttgggtagc

SEQ ID NO: 15793 - DNA, 22 bp, Homo sapiens
ctggtgaagaggttggggatgg

SEQ ID NO: 15794 - DNA, 23 bp, Homo sapiens
atagagtcaaggcatcttgggct

SEQ ID NO: 15795 - DNA, 23 bp, Homo sapiens
tttttcctctattctgtctgtcc

SEQ ID NO: 15796 - DNA, 18 bp, Homo sapiens
catacagggccctggagg

SEQ ID NO: 15797 - DNA, 21 bp, Homo sapiens
ctggccctgttgctggatagc

SEQ ID NO: 15798 - DNA, 21 bp, Homo sapiens
cagagtcctgggcccccagac

SEQ ID NO: 15799 - DNA, 21 bp, Homo sapiens
gggtgaggcttatgggctttt

SEQ ID NO: 15800 - DNA, 22 bp, Homo sapiens
cagtcttgctgtatttcaaagg

SEQ ID NO: 15801 - DNA, 23 bp, Homo sapiens
tctgttagctaagagagaacatt

SEQ ID NO: 15802 - DNA, 24 bp, Homo sapiens
gaagacacacccacccttggctcc

SEQ ID NO: 15803 - DNA, 17 bp, Homo sapiens
ttggagccctaagacct

SEQ ID NO: 15804 - DNA, 17 bp, Homo sapiens
agcgtctcctgccctga

SEQ ID NO: 15805 - DNA, 24 bp, Homo sapiens
gagccagaccaagcacatactagc

SEQ ID NO: 15806 - DNA, 21 bp, Homo sapiens
gacctatgtcctgccactgcc

SEQ ID NO: 15807 - DNA, 22 bp, Homo sapiens
aggtagaattactactgccacc

SEQ ID NO: 15808 - DNA, 18 bp, Homo sapiens
gggaggcatcagaagtgg

SEQ ID NO: 15809 - DNA, 20 bp, Homo sapiens
tcttttaggccttgaatgtc

SEQ ID NO: 15810 - DNA, 18 bp, Homo sapiens
cccgtctgtaggcacctg

SEQ ID NO: 15811 - DNA, 21 bp, Homo sapiens
gtcaagatccaagtataagga

SEQ ID NO: 15812 - DNA, 22 bp, Homo sapiens
aatgaaggggtgaggctaggtc

SEQ ID NO: 15813 - DNA, 18 bp, Homo sapiens
aactgccaggtgaagatg

SEQ ID NO: 15814 - DNA, 23 bp, Homo sapiens
ggggctttggaactgcatgggac

SEQ ID NO: 15815 - DNA, 18 bp, Homo sapiens
gcaactgggggacacaac

SEQ ID NO: 15816 - DNA, 24 bp, Homo sapiens
atctataatctttgggagccatac

SEQ ID NO: 15817 - DNA, 18 bp, Homo sapiens
cctgaaagagggatcagc

SEQ ID NO: 15818 - DNA, 23 bp, Homo sapiens
atcacaagcacctcaggaatcct

SEQ ID NO: 15819 - DNA, 16 bp, Homo sapiens
ccgtgtcctcctatcc

SEQ ID NO: 15820 - DNA, 24 bp, Homo sapiens
actagcagctccagactctccagc

SEQ ID NO: 15821 - DNA, 20 bp, Homo sapiens
tagggtggattggggaaacc

SEQ ID NO: 15822 - DNA, 20 bp, Homo sapiens
cctccagaagtggaggaccc

SEQ ID NO: 15823 - DNA, 19 bp, Homo sapiens
ttggtccaggtgtacacag

SEQ ID NO: 15824 - DNA, 24 bp, Homo sapiens
gtgctctctgtggatttccctaaa

SEQ ID NO: 15825 - DNA, 18 bp, Homo sapiens
ccagacaaggcactaagc

SEQ ID NO: 15826 - DNA, 24 bp, Homo sapiens
gcaaaaagctatacataatgcttg

SEQ ID NO: 15827 - DNA, 18 bp, Homo sapiens
cctctccaagctcacacc

SEQ ID NO: 15828 - DNA, 24 bp, Homo sapiens
taccatcttacggtgacaggaccc

SEQ ID NO: 15829 - DNA, 24 bp, Homo sapiens
gtcccattcagttccatgggcttc

SEQ ID NO: 15830 - DNA, 16 bp, Homo sapiens
gccgcttcatgaaggc

SEQ ID NO: 15831 - DNA, 21 bp, Homo sapiens
aacctgactcatctcttctac

SEQ ID NO: 15832 - DNA, 21 bp, Homo sapiens
tggagacctgaggacagtcag

SEQ ID NO: 15833 - DNA, 18 bp, Homo sapiens
cagggattgaaggatgtc

SEQ ID NO: 15834 - DNA, 21 bp, Homo sapiens
ggggaacaagggtctaagaag

SEQ ID NO: 15835 - DNA, 19 bp, Homo sapiens
tctgaaaacttggagtccc

SEQ ID NO: 15836 - DNA, 24 bp, Homo sapiens
atgagtctggaggaccacttaaag

SEQ ID NO: 15837 - DNA, 17 bp, Homo sapiens
ggagcttctggttgtcc

SEQ ID NO: 15838 - DNA, 22 bp, Homo sapiens
gcaaatgctgtcaggaggacat

SEQ ID NO: 15839 - DNA, 18 bp, Homo sapiens
ttgagctcaaggtctagc

SEQ ID NO: 15840 - DNA, 20 bp, Homo sapiens
gcatctaattcctcagctgg

SEQ ID NO: 15841 - DNA, 21 bp, Homo sapiens
gcattatgcatagcttcttgc

SEQ ID NO: 15842 - DNA, 23 bp, Homo sapiens
cttgttactagagaccctgaatg

SEQ ID NO: 15843 - DNA, 24 bp, Homo sapiens
agtcccagagagaatccaggtttt

SEQ ID NO: 15844 - DNA, 16 bp, Homo sapiens
ttggcctgcaggctgc

SEQ ID NO: 15845 - DNA, 16 bp, Homo sapiens
cagctggagagaaagg

SEQ ID NO: 15846 - DNA, 23 bp, Homo sapiens
ctgtgggactctgtccttcgtgc

SEQ ID NO: 15847 - DNA, 24 bp, Homo sapiens
tcactttccctattacctggctgc

SEQ ID NO: 15848 - DNA, 24 bp, Homo sapiens
tatactctacagtgctggagacac

SEQ ID NO: 15849 - DNA, 23 bp, Homo sapiens
cagcactcaaccagagggcagcc

SEQ ID NO: 15850 - DNA, 17 bp, Homo sapiens
gatggaggatgaggtgc

SEQ ID NO: 15851 - DNA, 16 bp, Homo sapiens
gaaggcaggaagcacg

SEQ ID NO: 15852 - DNA, 23 bp, Homo sapiens
ggttgaggtattattattgtgac

SEQ ID NO: 15853 - DNA, 16 bp, Homo sapiens
cccctgctgctcctgt

SEQ ID NO: 15854 - DNA, 24 bp, Homo sapiens
tctcctgcaggaccccaaaggtca

SEQ ID NO: 15855 - DNA, 16 bp, Homo sapiens
aggatcaggcccagga

SEQ ID NO: 15856 - DNA, 24 bp, Homo sapiens
gaagggcacctctctccatggagg

SEQ ID NO: 15857 - DNA, 17 bp, Homo sapiens
cccttggagctgactgt

SEQ ID NO: 15858 - DNA, 24 bp, Homo sapiens
acttaaacccagactgaagatggc

SEQ ID NO: 15859 - DNA, 19 bp, Homo sapiens
gcagtctgtaagaccaaca

SEQ ID NO: 15860 - DNA, 19 bp, Homo sapiens
tctaggctccgctggatat

SEQ ID NO: 15861 - DNA, 24 bp, Homo sapiens
tagctgttttggttggagtggggt

SEQ ID NO: 15862 - DNA, 23 bp, Homo sapiens
ttgccctcaggataatgaagttg

SEQ ID NO: 15863 - DNA, 23 bp, Homo sapiens
ggttgggttctttttttaaatcc

SEQ ID NO: 15864 - DNA, 16 bp, Homo sapiens
gaagggctcagagggc

SEQ ID NO: 15865 - DNA, 24 bp, Homo sapiens
tctcctctgtgccttaaacaggac

SEQ ID NO: 15866 - DNA, 20 bp, Homo sapiens
tgtggcaggtggctcagaac

SEQ ID NO: 15867 - DNA, 22 bp, Homo sapiens
agcggatgtttctctggctatg

SEQ ID NO: 15868 - DNA, 18 bp, Homo sapiens
ccttgccactgctgcaag

SEQ ID NO: 15869 - DNA, 24 bp, Homo sapiens
cctaccttgcagactatggaggag

SEQ ID NO: 15870 - DNA, 16 bp, Homo sapiens
gatggggagggactga

SEQ ID NO: 15871 - DNA, 19 bp, Homo sapiens
tcagagtcagaccggagtt

SEQ ID NO: 15872 - DNA, 24 bp, Homo sapiens
tcactgaggatcaatccttttttc

SEQ ID NO: 15873 - DNA, 16 bp, Homo sapiens
ctggacctgtggaggg

SEQ ID NO: 15874 - DNA, 24 bp, Homo sapiens
catttctggctctttggtcaagct

SEQ ID NO: 15875 - DNA, 21 bp, Homo sapiens
ttctggtctccgggcccagcc

SEQ ID NO: 15876 - DNA, 23 bp, Homo sapiens
aacccgctttcagggatcttgag

SEQ ID NO: 15877 - DNA, 16 bp, Homo sapiens
cgctggggttgggagc

SEQ ID NO: 15878 - DNA, 19 bp, Homo sapiens
cgagccggtcattcttttc

SEQ ID NO: 15879 - DNA, 19 bp, Homo sapiens
ggattgggaccccgagaga

SEQ ID NO: 15880 - DNA, 20 bp, Homo sapiens
cagattgtcccaagatgtgt

SEQ ID NO: 15881 - DNA, 24 bp, Homo sapiens
cgtcttggcattgaaagccctaga

SEQ ID NO: 15882 - DNA, 24 bp, Homo sapiens
cttactccacaaatgcgtggccac

SEQ ID NO: 15883 - DNA, 21 bp, Homo sapiens
agataactcacgagatcattg

SEQ ID NO: 15884 - DNA, 16 bp, Homo sapiens
cacccacacggcctgc

SEQ ID NO: 15885 - DNA, 23 bp, Homo sapiens
tctgtctggaaagtgttttaatt

SEQ ID NO: 15886 - DNA, 24 bp, Homo sapiens
taaggagctctcgggccagttttt

SEQ ID NO: 15887 - DNA, 18 bp, Homo sapiens
agggcttctttcagggac

SEQ ID NO: 15888 - DNA, 22 bp, Homo sapiens
tacaaggtctggtcaagaaagc

SEQ ID NO: 15889 - DNA, 20 bp, Homo sapiens
aatcaccttgcaaactagag

SEQ ID NO: 15890 - DNA, 17 bp, Homo sapiens
tgggatgtcatcaccct

SEQ ID NO: 15891 - DNA, 22 bp, Homo sapiens
caacctccttgaccatttatct

SEQ ID NO: 15892 - DNA, 19 bp, Homo sapiens
cagctgatcaggcaccttc

SEQ ID NO: 15893 - DNA, 22 bp, Homo sapiens
ccagaccctcggacaggtaacc

SEQ ID NO: 15894 - DNA, 17 bp, Homo sapiens
gcccaggacctgcagac

SEQ ID NO: 15895 - DNA, 22 bp, Homo sapiens
ctggaccacagggagacttacc

SEQ ID NO: 15896 - DNA, 16 bp, Homo sapiens
tgaaggccgtgctggg

SEQ ID NO: 15897 - DNA, 21 bp, Homo sapiens
cccagagcaggaagttgagga

SEQ ID NO: 15898 - DNA, 22 bp, Homo sapiens
aaatcctagaagtatgtctgtc

SEQ ID NO: 15899 - DNA, 17 bp, Homo sapiens
tgtgccctgtcctgcta

SEQ ID NO: 15900 - DNA, 17 bp, Homo sapiens
caggggccagtgcttac

SEQ ID NO: 15901 - DNA, 18 bp, Homo sapiens
gacattgccaggaggtgg

SEQ ID NO: 15902 - DNA, 19 bp, Homo sapiens
aaacgaagacccttcttcc

SEQ ID NO: 15903 - DNA, 17 bp, Homo sapiens
cgagacagggccctggc

SEQ ID NO: 15904 - DNA, 17 bp, Homo sapiens
gcgttctcctgtcccca

SEQ ID NO: 15905 - DNA, 23 bp, Homo sapiens
agcccgcctctgcagggcacgcc

SEQ ID NO: 15906 - DNA, 19 bp, Homo sapiens
cagatggcatatgtcatgg

SEQ ID NO: 15907 - DNA, 22 bp, Homo sapiens
taacagatcaaatgaccttggg

SEQ ID NO: 15908 - DNA, 24 bp, Homo sapiens
gaggagcttgcagagaggggctct

SEQ ID NO: 15909 - DNA, 17 bp, Homo sapiens
gtctctggccacctcgg

SEQ ID NO: 15910 - DNA, 16 bp, Homo sapiens
atggtgggtagcaggc

SEQ ID NO: 15911 - DNA, 24 bp, Homo sapiens
ctggagatcaccatgcctgcaggt

SEQ ID NO: 15912 - DNA, 16 bp, Homo sapiens
gctgtggctcttggcc

SEQ ID NO: 15913 - DNA, 17 bp, Homo sapiens
caagcccacaacagagc

SEQ ID NO: 15914 - DNA, 19 bp, Homo sapiens
ggaggatgggctgagatgg

SEQ ID NO: 15915 - DNA, 18 bp, Homo sapiens
ccaaacacatgcagtggg

SEQ ID NO: 15916 - DNA, 21 bp, Homo sapiens
cctctgttccaggtcctgcgg

SEQ ID NO: 15917 - DNA, 17 bp, Homo sapiens
gggccgtagtagaaggc

SEQ ID NO: 15918 - DNA, 20 bp, Homo sapiens
gttaaagttgctttaaaaac

SEQ ID NO: 15919 - DNA, 24 bp, Homo sapiens
ggctgccgacatcagtaattgctc

SEQ ID NO: 15920 - DNA, 18 bp, Homo sapiens
tccttgcaggttgcactt

SEQ ID NO: 15921 - DNA, 22 bp, Homo sapiens
ggaaccagctctcaaagggacc

SEQ ID NO: 15922 - DNA, 21 bp, Homo sapiens
ctcagagaagcagttgaagac

SEQ ID NO: 15923 - DNA, 21 bp, Homo sapiens
caccatggtgctcacctgttt

SEQ ID NO: 15924 - DNA, 18 bp, Homo sapiens
gatatccctcggggacac

SEQ ID NO: 15925 - DNA, 20 bp, Homo sapiens
ctcaaagggcagatgaggat

SEQ ID NO: 15926 - DNA, 19 bp, Homo sapiens
tggttcctcatgggcttga

SEQ ID NO: 15927 - DNA, 23 bp, Homo sapiens
tcagtgtttgctcacccatgagt

SEQ ID NO: 15928 - DNA, 20 bp, Homo sapiens
agtattgggttccgtgaacc

SEQ ID NO: 15929 - DNA, 24 bp, Homo sapiens
atatgcttcagtgtctggagccag

SEQ ID NO: 15930 - DNA, 18 bp, Homo sapiens
ctgctgcaagaccctcaa

SEQ ID NO: 15931 - DNA, 21 bp, Homo sapiens
ggggcttaaagggatcttaga

SEQ ID NO: 15932 - DNA, 16 bp, Homo sapiens
tggcagctgcggtttg

SEQ ID NO: 15933 - DNA, 21 bp, Homo sapiens
gcctgatgaggaggtcataat

SEQ ID NO: 15934 - DNA, 19 bp, Homo sapiens
tgtattttcctgaccccgt

SEQ ID NO: 15935 - DNA, 18 bp, Homo sapiens
agtcaaccctaactcacc

SEQ ID NO: 15936 - DNA, 21 bp, Homo sapiens
aagaaagtgttctgaccatgt

SEQ ID NO: 15937 - DNA, 22 bp, Homo sapiens
aaggaaagtaggtcttgagtgc

SEQ ID NO: 15938 - DNA, 17 bp, Homo sapiens
gcaagcaagcaggtttg

SEQ ID NO: 15939 - DNA, 23 bp, Homo sapiens
tggcttaacctttgttggggcac

SEQ ID NO: 15940 - DNA, 21 bp, Homo sapiens
cctggaaatcatagccactat

SEQ ID NO: 15941 - DNA, 24 bp, Homo sapiens
ttattgaaaataaagtgctcttgt

SEQ ID NO: 15942 - DNA, 20 bp, Homo sapiens
gtgttctgatctgactttgc

SEQ ID NO: 15943 - DNA, 24 bp, Homo sapiens
tgggatgaatgagtaatatatgtg

SEQ ID NO: 15944 - DNA, 22 bp, Homo sapiens
aaaaagtgtttctacttttccc

SEQ ID NO: 15945 - DNA, 24 bp, Homo sapiens
tctacaaagcactgcgtaaacacc

SEQ ID NO: 15946 - DNA, 22 bp, Homo sapiens
ttcacacaaggactgaaatctg

SEQ ID NO: 15947 - DNA, 21 bp, Homo sapiens
ccgggttgttgatgagatgtt

SEQ ID NO: 15948 - DNA, 24 bp, Homo sapiens
aagctcagaggaacaggagggaat

SEQ ID NO: 15949 - DNA, 24 bp, Homo sapiens
atatttcacattctcatggtcttc

SEQ ID NO: 15950 - DNA, 22 bp, Homo sapiens
cacaacattttctgattcatgc

SEQ ID NO: 15951 - DNA, 18 bp, Homo sapiens
cccagtaactcctttggc

SEQ ID NO: 15952 - DNA, 22 bp, Homo sapiens
aagaaacagtgtaacgtttacc

SEQ ID NO: 15953 - DNA, 17 bp, Homo sapiens
gcagtggttcgttcttc

SEQ ID NO: 15954 - DNA, 24 bp, Homo sapiens
gctttataaaagattcatcgctgg

SEQ ID NO: 15955 - DNA, 26 bp, Homo sapiens
tgatttcaaaaataaaatgtaaatac

SEQ ID NO: 15956 - DNA, 24 bp, Homo sapiens
gcatctttttgaaaagctaatctc

SEQ ID NO: 15957 - DNA, 24 bp, Homo sapiens
tacatccccccctttcattctctg

SEQ ID NO: 15958 - DNA, 18 bp, Homo sapiens
gctgtagtctgcctctgg

SEQ ID NO: 15959 - DNA, 19 bp, Homo sapiens
tcccttcatcaaaacccag

SEQ ID NO: 15960 - DNA, 23 bp, Homo sapiens
agtgagccatttctgtttaaaat

SEQ ID NO: 15961 - DNA, 21 bp, Homo sapiens
agacaatttctctcactggag

SEQ ID NO: 15962 - DNA, 24 bp, Homo sapiens
agaagtctcacaaattggattagt

SEQ ID NO: 15963 - DNA, 17 bp, Homo sapiens
ctgggaaggtgccgaag

SEQ ID NO: 15964 - DNA, 24 bp, Homo sapiens
acttggtaaatattcactgattct

SEQ ID NO: 15965 - DNA, 21 bp, Homo sapiens
ttctttgaggctgtaaacgag

SEQ ID NO: 15966 - DNA, 22 bp, Homo sapiens
aagagtataaagggtactgaga

SEQ ID NO: 15967 - DNA, 17 bp, Homo sapiens
tggaggctctcctcatc

SEQ ID NO: 15968 - DNA, 20 bp, Homo sapiens
tccaacacaccacagccttc

SEQ ID NO: 15969 - DNA, 16 bp, Homo sapiens
gagtggcgtccctgtc

SEQ ID NO: 15970 - DNA, 20 bp, Homo sapiens
acttacagcaaaatggcctc

SEQ ID NO: 15971 - DNA, 18 bp, Homo sapiens
tgcatggctcttagattt

SEQ ID NO: 15972 - DNA, 19 bp, Homo sapiens
tcacgtccatgacagatga

SEQ ID NO: 15973 - DNA, 21 bp, Homo sapiens
gaggcaaaacaggtgatctgt

SEQ ID NO: 15974 - DNA, 20 bp, Homo sapiens
ataagtgggacacaaactcg

SEQ ID NO: 15975 - DNA, 23 bp, Homo sapiens
aaagaattggataaaagagaagt

SEQ ID NO: 15976 - DNA, 23 bp, Homo sapiens
tcatcttaatggatttaacactc

SEQ ID NO: 15977 - DNA, 21 bp, Homo sapiens
ttccactaaaataatctttct

SEQ ID NO: 15978 - DNA, 22 bp, Homo sapiens
acctgcaactgattttgtttta

SEQ ID NO: 15979 - DNA, 23 bp, Homo sapiens
tgaattgtaaaattttcctctca

SEQ ID NO: 15980 - DNA, 21 bp, Homo sapiens
ggaaatatcactcacaccaag

SEQ ID NO: 15981 - DNA, 23 bp, Homo sapiens
gatgtttagtttaacacctaccg

SEQ ID NO: 15982 - DNA, 21 bp, Homo sapiens
ttccttttcactctgacagag

SEQ ID NO: 15983 - DNA, 21 bp, Homo sapiens
tcagacgctaatgataaaacc

SEQ ID NO: 15984 - DNA, 20 bp, Homo sapiens
catggccataagtctgccca

SEQ ID NO: 15985 - DNA, 22 bp, Homo sapiens
aaagaagttgctcttttcactc

SEQ ID NO: 15986 - DNA, 24 bp, Homo sapiens
tctcttctggaggactgaaatatt

SEQ ID NO: 15987 - DNA, 23 bp, Homo sapiens
tttctgtttatgttttttagggt

SEQ ID NO: 15988 - DNA, 27 bp, Homo sapiens
atttcaaaagtgataaattttaaatac

SEQ ID NO: 15989 - DNA, 24 bp, Homo sapiens
tgtacaaataaattgtaggcattg

SEQ ID NO: 15990 - DNA, 24 bp, Homo sapiens
atctataggtgcatacccaagacc

SEQ ID NO: 15991 - DNA, 20 bp, Homo sapiens
aattgggtactttgacaaac

SEQ ID NO: 15992 - DNA, 26 bp, Homo sapiens
gctgaaagtatatgagataatacacc

SEQ ID NO: 15993 - DNA, 22 bp, Homo sapiens
tggacaatcaaaacttaactcc

SEQ ID NO: 15994 - DNA, 22 bp, Homo sapiens
acagtgaagggtatgtttgaaa

SEQ ID NO: 15995 - DNA, 23 bp, Homo sapiens
tgaaagccaaaaaattctaatat

SEQ ID NO: 15996 - DNA, 22 bp, Homo sapiens
ccccaaaatttttttaagcagc

SEQ ID NO: 15997 - DNA, 24 bp, Homo sapiens
tgtttttatattaatgattttttc

SEQ ID NO: 15998 - DNA, 21 bp, Homo sapiens
tctcttacctgtatccaggag

SEQ ID NO: 15999 - DNA, 23 bp, Homo sapiens
agggatacttgttctgtgaactt

SEQ ID NO: 16000 - DNA, 22 bp, Homo sapiens
ttaattagacaacataagcacc

SEQ ID NO: 16001 - DNA, 20 bp, Homo sapiens
cagcagaaagagaatgtgca

SEQ ID NO: 16002 - DNA, 22 bp, Homo sapiens
gcaaaagcttgttggaatcctt

SEQ ID NO: 16003 - DNA, 23 bp, Homo sapiens
tgaatacatttgataagttgttc

SEQ ID NO: 16004 - DNA, 20 bp, Homo sapiens
tttttctttcacaggattct

SEQ ID NO: 16005 - DNA, 23 bp, Homo sapiens
gtaagcctctgtgaaacaatgca

SEQ ID NO: 16006 - DNA, 23 bp, Homo sapiens
ccctcaatctataatgtcagttc

SEQ ID NO: 16007 - DNA, 23 bp, Homo sapiens
ttcttaccatatgctaaaataaa

SEQ ID NO: 16008 - DNA, 23 bp, Homo sapiens
ctctaatccttttgtgcttactt

SEQ ID NO: 16009 - DNA, 20 bp, Homo sapiens
gtggggaatctttcaatgac

SEQ ID NO: 16010 - DNA, 22 bp, Homo sapiens
tgtatgaagccttgaaagagat

SEQ ID NO: 16011 - DNA, 23 bp, Homo sapiens
ccagctcttgagtaatttgtctt

SEQ ID NO: 16012 - DNA, 20 bp, Homo sapiens
ccagcaagacacctgtcttc

SEQ ID NO: 16013 - DNA, 24 bp, Homo sapiens
attctgggtggcattctgtcttgg

SEQ ID NO: 16014 - DNA, 22 bp, Homo sapiens
gtgattatcagttttggatgca

SEQ ID NO: 16015 - DNA, 20 bp, Homo sapiens
attctggtccactacttacc

SEQ ID NO: 16016 - DNA, 17 bp, Homo sapiens
ggacatcaccttttcgc

SEQ ID NO: 16017 - DNA, 16 bp, Homo sapiens
ctggaactgagccacg

SEQ ID NO: 16018 - DNA, 20 bp, Homo sapiens
tgttccctttcttacagatt

SEQ ID NO: 16019 - DNA, 20 bp, Homo sapiens
tcccatacagaaagcttctg

SEQ ID NO: 16020 - DNA, 19 bp, Homo sapiens
acccatcaatgggtcgtga

SEQ ID NO: 16021 - DNA, 24 bp, Homo sapiens
aaaccacgttcttattgattctac

SEQ ID NO: 16022 - DNA, 24 bp, Homo sapiens
caggtacaaaattaaagaggtttt

SEQ ID NO: 16023 - DNA, 24 bp, Homo sapiens
cttgtagtagtacaactgaaacag

SEQ ID NO: 16024 - DNA, 23 bp, Homo sapiens
tcttcctttccaaatccaaaaag

SEQ ID NO: 16025 - DNA, 21 bp, Homo sapiens
gataagaaaggaggaatgata

SEQ ID NO: 16026 - DNA, 22 bp, Homo sapiens
tgagcagcacagactaatgagt

SEQ ID NO: 16027 - DNA, 23 bp, Homo sapiens
tttgaatacccatgattaatatt

SEQ ID NO: 16028 - DNA, 24 bp, Homo sapiens
ttaacgctgacaagttctgcattt

SEQ ID NO: 16029 - DNA, 22 bp, Homo sapiens
acaagtatatttaactgaattt

SEQ ID NO: 16030 - DNA, 20 bp, Homo sapiens
ttggattttgacaaaccagc

SEQ ID NO: 16031 - DNA, 24 bp, Homo sapiens
gctcatgactatatgaaaaataga

SEQ ID NO: 16032 - DNA, 25 bp, Homo sapiens
tttcttgtttattctacatacccac

SEQ ID NO: 16033 - DNA, 22 bp, Homo sapiens
ttttgaatctcatgcctaactg

SEQ ID NO: 16034 - DNA, 22 bp, Homo sapiens
cattcaacaaatacttacggag

SEQ ID NO: 16035 - DNA, 24 bp, Homo sapiens
ttcttttgttgtcttcctagaatg

SEQ ID NO: 16036 - DNA, 16 bp, Homo sapiens
cctgccactaccaacc

SEQ ID NO: 16037 - DNA, 20 bp, Homo sapiens
tggatttgatagcacacagt

SEQ ID NO: 16038 - DNA, 20 bp, Homo sapiens
aataaattttttaactgcac

SEQ ID NO: 16039 - DNA, 22 bp, Homo sapiens
ttttttagcacaatgataagca

SEQ ID NO: 16040 - DNA, 22 bp, Homo sapiens
aatcaattccagtatcaaagga

SEQ ID NO: 16041 - DNA, 28 bp, Homo sapiens
ttatacaattaatgaattaaaatgttat

SEQ ID NO: 16042 - DNA, 20 bp, Homo sapiens
gcattgtgaagtagagccat

SEQ ID NO: 16043 - DNA, 24 bp, Homo sapiens
acgagaattctttttctctcaaac

SEQ ID NO: 16044 - DNA, 22 bp, Homo sapiens
ttacctcattcttccataggtg

SEQ ID NO: 16045 - DNA, 23 bp, Homo sapiens
tgtaccagtgtttcttattgatc

SEQ ID NO: 16046 - DNA, 27 bp, Homo sapiens
taaacctatactattttgtaaaaagag

SEQ ID NO: 16047 - DNA, 23 bp, Homo sapiens
aagtcaaaaatacttctcatggc

SEQ ID NO: 16048 - DNA, 23 bp, Homo sapiens
cctgatacaatttataaagtgtt

SEQ ID NO: 16049 - DNA, 17 bp, Homo sapiens
tgcatttgcactgcagt

SEQ ID NO: 16050 - DNA, 19 bp, Homo sapiens
cccctatttgccttagtga

SEQ ID NO: 16051 - DNA, 16 bp, Homo sapiens
gctatccgaaaccagc

SEQ ID NO: 16052 - DNA, 21 bp, Homo sapiens
tcttacagagcagattagcac

SEQ ID NO: 16053 - DNA, 17 bp, Homo sapiens
cgtctagccggggatct

SEQ ID NO: 16054 - DNA, 23 bp, Homo sapiens
tagttttgctactagtatttggc

SEQ ID NO: 16055 - DNA, 20 bp, Homo sapiens
catgagtggccagtttgcag

SEQ ID NO: 16056 - DNA, 21 bp, Homo sapiens
gatgcttctttggttctagga

SEQ ID NO: 16057 - DNA, 24 bp, Homo sapiens
tttaagtctcaagtggccgtgcca

SEQ ID NO: 16058 - DNA, 23 bp, Homo sapiens
gtgcctaaagattgagagtaaag

SEQ ID NO: 16059 - DNA, 20 bp, Homo sapiens
gataacgaccaaactgtaac

SEQ ID NO: 16060 - DNA, 21 bp, Homo sapiens
aaatccccctgcactatatct

SEQ ID NO: 16061 - DNA, 21 bp, Homo sapiens
acaacactcatttcacatttc

SEQ ID NO: 16062 - DNA, 20 bp, Homo sapiens
tcatgagaggagtggcaact

SEQ ID NO: 16063 - DNA, 29 bp, Homo sapiens
cttatataaattatatattagatttcaat

SEQ ID NO: 16064 - DNA, 21 bp, Homo sapiens
gacaggaaatttgttcccttc

SEQ ID NO: 16065 - DNA, 19 bp, Homo sapiens
catttgggtggcttctaat

SEQ ID NO: 16066 - DNA, 22 bp, Homo sapiens
ggattaaaaacattcttgaagt

SEQ ID NO: 16067 - DNA, 20 bp, Homo sapiens
acacttctcaagtgtaacag

SEQ ID NO: 16068 - DNA, 25 bp, Homo sapiens
cttttattctccttttgaaatcagc

SEQ ID NO: 16069 - DNA, 30 bp, Homo sapiens
gagaaaacatatatatataatatatatata

SEQ ID NO: 16070 - DNA, 20 bp, Homo sapiens
tctgatgtaaaggtagcagt

SEQ ID NO: 16071 - DNA, 20 bp, Homo sapiens
ccatcaacagtaacttgctg

SEQ ID NO: 16072 - DNA, 19 bp, Homo sapiens
ggtagtttgctgcacctat

SEQ ID NO: 16073 - DNA, 20 bp, Homo sapiens
acctagagtgtggtacttct

SEQ ID NO: 16074 - DNA, 19 bp, Homo sapiens
ttgtcctaatgttctccct

SEQ ID NO: 16075 - DNA, 19 bp, Homo sapiens
tttggttgtctctaacctg

SEQ ID NO: 16076 - DNA, 19 bp, Homo sapiens
tcaggccagagttacagca

SEQ ID NO: 16077 - DNA, 19 bp, Homo sapiens
catcttaccaccctcaaat

SEQ ID NO: 16078 - DNA, 20 bp, Homo sapiens
ggatccaatgcactttgtag

SEQ ID NO: 16079 - DNA, 22 bp, Homo sapiens
aacaatctagaagaaaagagac

SEQ ID NO: 16080 - DNA, 20 bp, Homo sapiens
agctcgagcattctttcagg

SEQ ID NO: 16081 - DNA, 19 bp, Homo sapiens
gcttccacagtgttatcat

SEQ ID NO: 16082 - DNA, 18 bp, Homo sapiens
tggggttacaggcgtgag

SEQ ID NO: 16083 - DNA, 20 bp, Homo sapiens
tttgtttaatgttttcgctg

SEQ ID NO: 16084 - DNA, 24 bp, Homo sapiens
aattcagatgccacagaaaggttc

SEQ ID NO: 16085 - DNA, 22 bp, Homo sapiens
aaatggaaagtcgtaagaattt

SEQ ID NO: 16086 - DNA, 21 bp, Homo sapiens
atctgtagcagtaccttgatg

SEQ ID NO: 16087 - DNA, 18 bp, Homo sapiens
tttgtcatctcaagcagt

SEQ ID NO: 16088 - DNA, 20 bp, Homo sapiens
aattactgcaactagcagcg

SEQ ID NO: 16089 - DNA, 18 bp, Homo sapiens
gctgcatgcactcatgtt

SEQ ID NO: 16090 - DNA, 18 bp, Homo sapiens
tgagcagtggaacttgtc

SEQ ID NO: 16091 - DNA, 18 bp, Homo sapiens
cattgtcgataccatcct

SEQ ID NO: 16092 - DNA, 21 bp, Homo sapiens
gagtttgcgtacagcctgggc

SEQ ID NO: 16093 - DNA, 24 bp, Homo sapiens
atatcagatttgtaatcttgtata

SEQ ID NO: 16094 - DNA, 23 bp, Homo sapiens
ccttgttacaaatataatttgtt

SEQ ID NO: 16095 - DNA, 20 bp, Homo sapiens
ctgaccttcccaaatttgtg

SEQ ID NO: 16096 - DNA, 28 bp, Homo sapiens
gttaaaaaaatttaatcttctttttagg

SEQ ID NO: 16097 - DNA, 22 bp, Homo sapiens
tgcttaatgtaaactttacaag

SEQ ID NO: 16098 - DNA, 20 bp, Homo sapiens
gcaaagatgttgacctagga

SEQ ID NO: 16099 - DNA, 23 bp, Homo sapiens
ctcatcctagtcaatactgagtg

SEQ ID NO: 16100 - DNA, 24 bp, Homo sapiens
atttcaggatgcaggacttccgct

SEQ ID NO: 16101 - DNA, 19 bp, Homo sapiens
ggaaggatagttccaagct

SEQ ID NO: 16102 - DNA, 25 bp, Homo sapiens
aatgtgcatcttagaatgaatactc

SEQ ID NO: 16103 - DNA, 20 bp, Homo sapiens
ccacatgtgatcagtttctt

SEQ ID NO: 16104 - DNA, 24 bp, Homo sapiens
attttttaaaaaaaggtttttaaa

SEQ ID NO: 16105 - DNA, 23 bp, Homo sapiens
aaataagtacttatttgattcat

SEQ ID NO: 16106 - DNA, 20 bp, Homo sapiens
ccccataggtagaagacagc

SEQ ID NO: 16107 - DNA, 22 bp, Homo sapiens
tggttttcttttcagttacttc

SEQ ID NO: 16108 - DNA, 24 bp, Homo sapiens
acttgatgtttttttcttctatga

SEQ ID NO: 16109 - DNA, 21 bp, Homo sapiens
ctatgggtaagctaagaaagt

SEQ ID NO: 16110 - DNA, 24 bp, Homo sapiens
ccaaaacaggaaaaaaattcaagt

SEQ ID NO: 16111 - DNA, 18 bp, Homo sapiens
gcacagtgtaaacttcgg

SEQ ID NO: 16112 - DNA, 20 bp, Homo sapiens
tatccactctcttcccaaag

SEQ ID NO: 16113 - DNA, 19 bp, Homo sapiens
cttcaatgtattcgagggt

SEQ ID NO: 16114 - DNA, 22 bp, Homo sapiens
tgcactagcagctagattcctt

SEQ ID NO: 16115 - DNA, 16 bp, Homo sapiens
gagagcgcttccagtc

SEQ ID NO: 16116 - DNA, 24 bp, Homo sapiens
ctgttttgctgcagatacctgttt

SEQ ID NO: 16117 - DNA, 23 bp, Homo sapiens
caatataactggataacctcatc

SEQ ID NO: 16118 - DNA, 19 bp, Homo sapiens
ccatgtaccctgtgaaacc

SEQ ID NO: 16119 - DNA, 23 bp, Homo sapiens
ttaaacagttatctacctttttt

SEQ ID NO: 16120 - DNA, 20 bp, Homo sapiens
ctgtaaagacgtgggactgg

SEQ ID NO: 16121 - DNA, 23 bp, Homo sapiens
tcaaacttgtcacattttttctt

SEQ ID NO: 16122 - DNA, 20 bp, Homo sapiens
tctggcctatttctgagtgg

SEQ ID NO: 16123 - DNA, 19 bp, Homo sapiens
atcatgcaccctgctgatt

SEQ ID NO: 16124 - DNA, 22 bp, Homo sapiens
tttggagagggaagaaatctgg

SEQ ID NO: 16125 - DNA, 25 bp, Homo sapiens
attagtctgtttcacttatgaactg

SEQ ID NO: 16126 - DNA, 24 bp, Homo sapiens
tgcctgtatcattgttaataaagg

SEQ ID NO: 16127 - DNA, 21 bp, Homo sapiens
ttatacttgcctcctttaagc

SEQ ID NO: 16128 - DNA, 16 bp, Homo sapiens
atctcaactaggcaag

SEQ ID NO: 16129 - DNA, 18 bp, Homo sapiens
tgagcctgctagactgag

SEQ ID NO: 16130 - DNA, 23 bp, Homo sapiens
tctgctgaagttcttggcaatgc

SEQ ID NO: 16131 - DNA, 24 bp, Homo sapiens
ctttcttgcttttagatgctgagc

SEQ ID NO: 16132 - DNA, 19 bp, Homo sapiens
cagccctcaaagagcaagg

SEQ ID NO: 16133 - DNA, 16 bp, Homo sapiens
ctgcctcagcgccctc

SEQ ID NO: 16134 - DNA, 23 bp, Homo sapiens
gtcggatccctcctaactgcagt

SEQ ID NO: 16135 - DNA, 19 bp, Homo sapiens
tctggctctgatggtctta

SEQ ID NO: 16136 - DNA, 24 bp, Homo sapiens
tcttctgttgatctttggtggtat

SEQ ID NO: 16137 - DNA, 17 bp, Homo sapiens
agacttcggttcctgtt

SEQ ID NO: 16138 - DNA, 23 bp, Homo sapiens
aggaagaattgtagtcaattttt

SEQ ID NO: 16139 - DNA, 18 bp, Homo sapiens
cctcaggttctaggtccc

SEQ ID NO: 16140 - DNA, 23 bp, Homo sapiens
ctgctgatcttctcaatacttac

SEQ ID NO: 16141 - DNA, 20 bp, Homo sapiens
gatttggcctttggtattgg

SEQ ID NO: 16142 - DNA, 24 bp, Homo sapiens
agaaaaaatactaaccaagaacag

SEQ ID NO: 16143 - DNA, 19 bp, Homo sapiens
actgtgtttcacaccatac

SEQ ID NO: 16144 - DNA, 18 bp, Homo sapiens
tgcagtagaattgggacc

SEQ ID NO: 16145 - DNA, 21 bp, Homo sapiens
aatcttactgacagcttacac

SEQ ID NO: 16146 - DNA, 21 bp, Homo sapiens
gctgcagttgatggaaaggtc

SEQ ID NO: 16147 - DNA, 22 bp, Homo sapiens
acaggaaaactttttgacttgg

SEQ ID NO: 16148 - DNA, 23 bp, Homo sapiens
ggtactctttctctttgagtttg

SEQ ID NO: 16149 - DNA, 18 bp, Homo sapiens
atgcacaccgtctctgag

SEQ ID NO: 16150 - DNA, 22 bp, Homo sapiens
aacttaccactctttcaaattt

SEQ ID NO: 16151 - DNA, 21 bp, Homo sapiens
gtaagagtccaaatttctgga

SEQ ID NO: 16152 - DNA, 20 bp, Homo sapiens
agaaatttttggctttggat

SEQ ID NO: 16153 - DNA, 24 bp, Homo sapiens
ccttctgtaattcccttccttgtt

SEQ ID NO: 16154 - DNA, 19 bp, Homo sapiens
ttccagcatttgggaagaa

SEQ ID NO: 16155 - DNA, 18 bp, Homo sapiens
ctgagtgaagtggtgcag

SEQ ID NO: 16156 - DNA, 24 bp, Homo sapiens
taaaagttctcatctttcctcaaa

SEQ ID NO: 16157 - DNA, 18 bp, Homo sapiens
ggaagaagcacagcctca

SEQ ID NO: 16158 - DNA, 22 bp, Homo sapiens
ctgtctgtactgcctattcact

SEQ ID NO: 16159 - DNA, 23 bp, Homo sapiens
actcaggaggcttaaaaatatct

SEQ ID NO: 16160 - DNA, 23 bp, Homo sapiens
tatacctttcaggttttcagtgt

SEQ ID NO: 16161 - DNA, 24 bp, Homo sapiens
catcagcaactgcaagaaagtagc

SEQ ID NO: 16162 - DNA, 23 bp, Homo sapiens
ccagcggactgccttctttgagg

SEQ ID NO: 16163 - DNA, 21 bp, Homo sapiens
caaactgaattttgctttagg

SEQ ID NO: 16164 - DNA, 23 bp, Homo sapiens
ggcaaatactcccatagtaactc

SEQ ID NO: 16165 - DNA, 24 bp, Homo sapiens
cttccacacagcgctgaagaatat

SEQ ID NO: 16166 - DNA, 20 bp, Homo sapiens
caagagtcagacctcttctc

SEQ ID NO: 16167 - DNA, 20 bp, Homo sapiens
tctatttgcttccactttcc

SEQ ID NO: 16168 - DNA, 17 bp, Homo sapiens
gcagtgttttcatcggc

SEQ ID NO: 16169 - DNA, 24 bp, Homo sapiens
gatacgtacgctgatatcctggag

SEQ ID NO: 16170 - DNA, 20 bp, Homo sapiens
tgatatgcaccagttgactc

SEQ ID NO: 16171 - DNA, 21 bp, Homo sapiens
actcacgacactgctagtttc

SEQ ID NO: 16172 - DNA, 24 bp, Homo sapiens
actgtatttaatattatctcattc

SEQ ID NO: 16173 - DNA, 16 bp, Homo sapiens
agcaagcccagcaggc

SEQ ID NO: 16174 - DNA, 20 bp, Homo sapiens
gctccacagaagcctcacac

SEQ ID NO: 16175 - DNA, 18 bp, Homo sapiens
ctctcagacagccacatt

SEQ ID NO: 16176 - DNA, 19 bp, Homo sapiens
atctagacaatgtgtggcg

SEQ ID NO: 16177 - DNA, 24 bp, Homo sapiens
ctcatgctcaaactattttccatt

SEQ ID NO: 16178 - DNA, 20 bp, Homo sapiens
acgcagatactcacccagac

SEQ ID NO: 16179 - DNA, 18 bp, Homo sapiens
ttttaaccctccttcact

SEQ ID NO: 16180 - DNA, 21 bp, Homo sapiens
ataaacgtttcttgtggcgac

SEQ ID NO: 16181 - DNA, 23 bp, Homo sapiens
atttgttaatgcttattaaggaa

SEQ ID NO: 16182 - DNA, 20 bp, Homo sapiens
gaaaccaacgtaaagccttc

SEQ ID NO: 16183 - DNA, 22 bp, Homo sapiens
ccaggtggtaattttgattgag

SEQ ID NO: 16184 - DNA, 23 bp, Homo sapiens
ttttccttcctaaaattattgtg

SEQ ID NO: 16185 - DNA, 22 bp, Homo sapiens
gagactctctcatctctctctc

SEQ ID NO: 16186 - DNA, 24 bp, Homo sapiens
gattacctctgaaagtaatccatg

SEQ ID NO: 16187 - DNA, 22 bp, Homo sapiens
aaccctcaccttctaaaatgga

SEQ ID NO: 16188 - DNA, 19 bp, Homo sapiens
tgaattgaatttccttggc

SEQ ID NO: 16189 - DNA, 21 bp, Homo sapiens
tagaaggagctgcctgggaag

SEQ ID NO: 16190 - DNA, 24 bp, Homo sapiens
aagccaggaacctgacctatttct

SEQ ID NO: 16191 - DNA, 20 bp, Homo sapiens
cttgttgtcttcttcctgtt

SEQ ID NO: 16192 - DNA, 22 bp, Homo sapiens
tgacctggaatcccttgcttgc

SEQ ID NO: 16193 - DNA, 19 bp, Homo sapiens
atagaggcaggtctgtggt

SEQ ID NO: 16194 - DNA, 23 bp, Homo sapiens
attcttaccagcctcaaagcttc

SEQ ID NO: 16195 - DNA, 22 bp, Homo sapiens
agtcatgaactctaggataggc

SEQ ID NO: 16196 - DNA, 18 bp, Homo sapiens
gccatggttttggaagag

SEQ ID NO: 16197 - DNA, 24 bp, Homo sapiens
agataagacctctggggcaaacac

SEQ ID NO: 16198 - DNA, 21 bp, Homo sapiens
tcaactgctgcttattgtctc

SEQ ID NO: 16199 - DNA, 26 bp, Homo sapiens
ttcatgatcactaagatacaattgag

SEQ ID NO: 16200 - DNA, 23 bp, Homo sapiens
agtttcatacataataaagacat

SEQ ID NO: 16201 - DNA, 19 bp, Homo sapiens
attgagtttacctgggcac

SEQ ID NO: 16202 - DNA, 20 bp, Homo sapiens
ggactctgtggtgtatatac

SEQ ID NO: 16203 - DNA, 23 bp, Homo sapiens
cctctgctcaaccagctttcctg

SEQ ID NO: 16204 - DNA, 17 bp, Homo sapiens
ctcggcagaactctggc

SEQ ID NO: 16205 - DNA, 23 bp, Homo sapiens
ctaaattaatttttatcagtgag

SEQ ID NO: 16206 - DNA, 17 bp, Homo sapiens
tggaagcaagccctctg

SEQ ID NO: 16207 - DNA, 24 bp, Homo sapiens
tttgcaaaattaccaaacaaaaga

SEQ ID NO: 16208 - DNA, 18 bp, Homo sapiens
gggctcatgtttgcccgt

SEQ ID NO: 16209 - DNA, 24 bp, Homo sapiens
taaatgattgtacttacctgccag

SEQ ID NO: 16210 - DNA, 24 bp, Homo sapiens
cttgtcacaggatatcagcattgc

SEQ ID NO: 16211 - DNA, 18 bp, Homo sapiens
aagttaagctgggctgcc

SEQ ID NO: 16212 - DNA, 22 bp, Homo sapiens
tggagctttagagaaatgattg

SEQ ID NO: 16213 - DNA, 22 bp, Homo sapiens
tgagagagctttctcgtgggca

SEQ ID NO: 16214 - DNA, 21 bp, Homo sapiens
tgtaagattttcccaggtaat

SEQ ID NO: 16215 - DNA, 20 bp, Homo sapiens
gctcctgcatcaggtgctcc

SEQ ID NO: 16216 - DNA, 17 bp, Homo sapiens
gctcacaacagtaccag

SEQ ID NO: 16217 - DNA, 24 bp, Homo sapiens
cagataagaagttcaaattgaggc

SEQ ID NO: 16218 - DNA, 23 bp, Homo sapiens
acttcccagaatgcttaaacttg

SEQ ID NO: 16219 - DNA, 24 bp, Homo sapiens
gtgttatgaacttaggatcctcac

SEQ ID NO: 16220 - DNA, 19 bp, Homo sapiens
cccatgtcttaagcctgtc

SEQ ID NO: 16221 - DNA, 20 bp, Homo sapiens
tcacataccacatacctggt

SEQ ID NO: 16222 - DNA, 26 bp, Homo sapiens
aggtcttaaaaagttcctcatttatt

SEQ ID NO: 16223 - DNA, 21 bp, Homo sapiens
tcgttatacaagtttttatct

SEQ ID NO: 16224 - DNA, 24 bp, Homo sapiens
gcagtggtgctcattaaaaattca

SEQ ID NO: 16225 - DNA, 19 bp, Homo sapiens
aggacaaaataacgtgagc

SEQ ID NO: 16226 - DNA, 21 bp, Homo sapiens
tatcagcggtttactatagac

SEQ ID NO: 16227 - DNA, 21 bp, Homo sapiens
tcagtcactgtctaaactaac

SEQ ID NO: 16228 - DNA, 23 bp, Homo sapiens
tttaggatcccaaagaatatctt

SEQ ID NO: 16229 - DNA, 25 bp, Homo sapiens
agtagagataaacatactaatcccc

SEQ ID NO: 16230 - DNA, 24 bp, Homo sapiens
atgtaaatgctagtttctattcct

SEQ ID NO: 16231 - DNA, 22 bp, Homo sapiens
ttttcatatcgtttcaagtatt

SEQ ID NO: 16232 - DNA, 22 bp, Homo sapiens
tgcagttaatatataatacaca

SEQ ID NO: 16233 - DNA, 27 bp, Homo sapiens
aagtgtattaagaaatggaagatattc

SEQ ID NO: 16234 - DNA, 16 bp, Homo sapiens
tggtcctcatggtagc

SEQ ID NO: 16235 - DNA, 24 bp, Homo sapiens
ctcacagatctgtctccagccctg

SEQ ID NO: 16236 - DNA, 19 bp, Homo sapiens
gctgcatctggtagatgtt

SEQ ID NO: 16237 - DNA, 24 bp, Homo sapiens
taccagaagcagggtttcacacta

SEQ ID NO: 16238 - DNA, 19 bp, Homo sapiens
gaaatgctccctctgatcc

SEQ ID NO: 16239 - DNA, 21 bp, Homo sapiens
tccacataccttctgtgactt

SEQ ID NO: 16240 - DNA, 19 bp, Homo sapiens
aggtctgtggattttttcc

SEQ ID NO: 16241 - DNA, 25 bp, Homo sapiens
tgccaagagaatgatcatataattc

SEQ ID NO: 16242 - DNA, 18 bp, Homo sapiens
tattcttctgatgtccag

SEQ ID NO: 16243 - DNA, 18 bp, Homo sapiens
agcactcacagcatcagg

SEQ ID NO: 16244 - DNA, 23 bp, Homo sapiens
atatgctttagagggcagcactg

SEQ ID NO: 16245 - DNA, 20 bp, Homo sapiens
gaagacaaccccagaactgg

SEQ ID NO: 16246 - DNA, 20 bp, Homo sapiens
tgttaaatctgtggtgtggc

SEQ ID NO: 16247 - DNA, 20 bp, Homo sapiens
tctggtgttcttcacttatt

SEQ ID NO: 16248 - DNA, 24 bp, Homo sapiens
agtagcagtcacggccaccttaag

SEQ ID NO: 16249 - DNA, 18 bp, Homo sapiens
gcatcctttgaaaaaccg

SEQ ID NO: 16250 - DNA, 21 bp, Homo sapiens
actttttgcagtacaatttcc

SEQ ID NO: 16251 - DNA, 20 bp, Homo sapiens
gcgatgctatgagagcagtc

SEQ ID NO: 16252 - DNA, 21 bp, Homo sapiens
tggataggcagtatctgaggt

SEQ ID NO: 16253 - DNA, 18 bp, Homo sapiens
cagcagtgtctacctgtc

SEQ ID NO: 16254 - DNA, 23 bp, Homo sapiens
gctggacaaggacaactacacac

SEQ ID NO: 16255 - DNA, 20 bp, Homo sapiens
ccatacacacctgttcttag

SEQ ID NO: 16256 - DNA, 23 bp, Homo sapiens
acttatgaggatttatgctctcc

SEQ ID NO: 16257 - DNA, 19 bp, Homo sapiens
catgccaggtgtatgttag

SEQ ID NO: 16258 - DNA, 17 bp, Homo sapiens
cccgtcaggatccctgg

SEQ ID NO: 16259 - DNA, 24 bp, Homo sapiens
acatgttttatttctcaatatttt

SEQ ID NO: 16260 - DNA, 22 bp, Homo sapiens
ggtcttcgtgacatcttcttct

SEQ ID NO: 16261 - DNA, 19 bp, Homo sapiens
ccaactggcatctaagagt

SEQ ID NO: 16262 - DNA, 18 bp, Homo sapiens
aaatgtggaaaccttcat

SEQ ID NO: 16263 - DNA, 21 bp, Homo sapiens
ttcttctctagctatttatgc

SEQ ID NO: 16264 - DNA, 22 bp, Homo sapiens
ttgtacttaaactaatatgatc

SEQ ID NO: 16265 - DNA, 22 bp, Homo sapiens
cacatgaattattcaaaatact

SEQ ID NO: 16266 - DNA, 24 bp, Homo sapiens
caatctgatttatgatcataaccc

SEQ ID NO: 16267 - DNA, 22 bp, Homo sapiens
acagaatctatctgtttaatga

SEQ ID NO: 16268 - DNA, 23 bp, Homo sapiens
gtcttctcacagacttatgttta

SEQ ID NO: 16269 - DNA, 21 bp, Homo sapiens
aaggacaaaacatcttcgttc

SEQ ID NO: 16270 - DNA, 17 bp, Homo sapiens
gggcccatggagctcag

SEQ ID NO: 16271 - DNA, 22 bp, Homo sapiens
agcttagaaagttaccttaggg

SEQ ID NO: 16272 - DNA, 17 bp, Homo sapiens
agcttggcattggggct

SEQ ID NO: 16273 - DNA, 20 bp, Homo sapiens
ttctcatgcattcaaatgcc

SEQ ID NO: 16274 - DNA, 20 bp, Homo sapiens
ttagctcagattcggaagtg

SEQ ID NO: 16275 - DNA, 24 bp, Homo sapiens
gcctctaagaatctgattgatgat

SEQ ID NO: 16276 - DNA, 20 bp, Homo sapiens
aatttatttaagatgccaag

SEQ ID NO: 16277 - DNA, 28 bp, Homo sapiens
tgtaataaaatacttattgtcttcacac

SEQ ID NO: 16278 - DNA, 21 bp, Homo sapiens
aggtaaaatggtgtatcctgg

SEQ ID NO: 16279 - DNA, 21 bp, Homo sapiens
tacaatggcacttacttgtcc

SEQ ID NO: 16280 - DNA, 19 bp, Homo sapiens
gattctgctaaaagtgtgc

SEQ ID NO: 16281 - DNA, 18 bp, Homo sapiens
tctaagtttccccttggc

SEQ ID NO: 16282 - DNA, 24 bp, Homo sapiens
ctcctttgaataaagctaacagaa

SEQ ID NO: 16283 - DNA, 17 bp, Homo sapiens
ggaaagtggagaggggt

SEQ ID NO: 16284 - DNA, 21 bp, Homo sapiens
aagaaagcctaaaatacaacc

SEQ ID NO: 16285 - DNA, 20 bp, Homo sapiens
tggtgtgtttagcattacag

SEQ ID NO: 16286 - DNA, 20 bp, Homo sapiens
tctatcttgtctgaaaaacc

SEQ ID NO: 16287 - DNA, 18 bp, Homo sapiens
gtgcggtttcaattgcag

SEQ ID NO: 16288 - DNA, 19 bp, Homo sapiens
tgacaatccgtgaacccct

SEQ ID NO: 16289 - DNA, 18 bp, Homo sapiens
agtgggagagctaaggca

SEQ ID NO: 16290 - DNA, 20 bp, Homo sapiens
attgctgctcaggccggcct

SEQ ID NO: 16291 - DNA, 22 bp, Homo sapiens
tgagggatgcttcatttaaaag

SEQ ID NO: 16292 - DNA, 24 bp, Homo sapiens
ggtctaagtaaaataactctaaag

SEQ ID NO: 16293 - DNA, 22 bp, Homo sapiens
gcagtatatgatgagtttttat

SEQ ID NO: 16294 - DNA, 19 bp, Homo sapiens
aattcaaaaagtcatcaag

SEQ ID NO: 16295 - DNA, 16 bp, Homo sapiens
ccatgcctctctggcc

SEQ ID NO: 16296 - DNA, 24 bp, Homo sapiens
tgttttatacattgaaaacttact

SEQ ID NO: 16297 - DNA, 18 bp, Homo sapiens
cttggtttggtgttggat

SEQ ID NO: 16298 - DNA, 21 bp, Homo sapiens
ggtatgggaatgggttgtcaa

SEQ ID NO: 16299 - DNA, 20 bp, Homo sapiens
gaatgtgtccttggtctgac

SEQ ID NO: 16300 - DNA, 21 bp, Homo sapiens
acgcaacctgcaagagaaggc

SEQ ID NO: 16301 - DNA, 24 bp, Homo sapiens
aaaaggtaggtttaactgatttga

SEQ ID NO: 16302 - DNA, 23 bp, Homo sapiens
tcggagctaacactgtgaaaagg

SEQ ID NO: 16303 - DNA, 20 bp, Homo sapiens
agtcctgattacaggaactt

SEQ ID NO: 16304 - DNA, 23 bp, Homo sapiens
ttgatgaaaaagcgacacctgtc

SEQ ID NO: 16305 - DNA, 17 bp, Homo sapiens
agaccgaattggccatg

SEQ ID NO: 16306 - DNA, 23 bp, Homo sapiens
atcatttcccactattgtctagg

SEQ ID NO: 16307 - DNA, 21 bp, Homo sapiens
tggctattaaaccatggaaga

SEQ ID NO: 16308 - DNA, 21 bp, Homo sapiens
ctacttaatgccatcagtccc

SEQ ID NO: 16309 - DNA, 23 bp, Homo sapiens
ggttttttgcaaagagcgcatca

SEQ ID NO: 16310 - DNA, 21 bp, Homo sapiens
tcacctacctcttctccaatc

SEQ ID NO: 16311 - DNA, 21 bp, Homo sapiens
aaaaagtgattgaaattgcat

SEQ ID NO: 16312 - DNA, 19 bp, Homo sapiens
aacaggaaatccaccagag

SEQ ID NO: 16313 - DNA, 21 bp, Homo sapiens
atgtaccctagaacttaaagt

SEQ ID NO: 16314 - DNA, 20 bp, Homo sapiens
ttaagtacctttggggtgag

SEQ ID NO: 16315 - DNA, 22 bp, Homo sapiens
gccaattccactctaaagctta

SEQ ID NO: 16316 - DNA, 20 bp, Homo sapiens
agtctatgttgcaattccaa

SEQ ID NO: 16317 - DNA, 24 bp, Homo sapiens
attgaactgacaagatacaagtac

SEQ ID NO: 16318 - DNA, 21 bp, Homo sapiens
tctgtttacactcccttctcc

SEQ ID NO: 16319 - DNA, 22 bp, Homo sapiens
ttcctaacaccttgatactcac

SEQ ID NO: 16320 - DNA, 24 bp, Homo sapiens
agcatcaaaaggaaattgttgatt

SEQ ID NO: 16321 - DNA, 24 bp, Homo sapiens
cagctgtaatactactgacttggt

SEQ ID NO: 16322 - DNA, 22 bp, Homo sapiens
agtattgggtgtgtatatatgt

SEQ ID NO: 16323 - DNA, 17 bp, Homo sapiens
gcatggacagctcaatg

SEQ ID NO: 16324 - DNA, 24 bp, Homo sapiens
ccttcttgttaagtgtgtctaaca

SEQ ID NO: 16325 - DNA, 16 bp, Homo sapiens
agtgagttcagccccc

SEQ ID NO: 16326 - DNA, 23 bp, Homo sapiens
aaagttgtatgctcataaaagac

SEQ ID NO: 16327 - DNA, 20 bp, Homo sapiens
gctgaaactaggccttctca

SEQ ID NO: 16328 - DNA, 20 bp, Homo sapiens
gggaaaaactgcaatacctg

SEQ ID NO: 16329 - DNA, 24 bp, Homo sapiens
tcttggatattcttcaatatttac

SEQ ID NO: 16330 - DNA, 20 bp, Homo sapiens
tcaaatggtgaatgacagac

SEQ ID NO: 16331 - DNA, 18 bp, Homo sapiens
agtcttccttcatccagg

SEQ ID NO: 16332 - DNA, 22 bp, Homo sapiens
gacgtcttcttcaatccaagtg

SEQ ID NO: 16333 - DNA, 21 bp, Homo sapiens
ttggtagtatctcaggttttg

SEQ ID NO: 16334 - DNA, 24 bp, Homo sapiens
agaactcctcatttggaaaagaga

SEQ ID NO: 16335 - DNA, 20 bp, Homo sapiens
gaaagtcagggcctgggtgt

SEQ ID NO: 16336 - DNA, 17 bp, Homo sapiens
cctacagtgaaactggg

SEQ ID NO: 16337 - DNA, 18 bp, Homo sapiens
cagatggctgaatttagg

SEQ ID NO: 16338 - DNA, 23 bp, Homo sapiens
aggtgaaatcttataatttacga

SEQ ID NO: 16339 - DNA, 23 bp, Homo sapiens
taattaagaacctacttgtatct

SEQ ID NO: 16340 - DNA, 20 bp, Homo sapiens
gctgtttgccttctagaact

SEQ ID NO: 16341 - DNA, 20 bp, Homo sapiens
aatccacttccacccacagc

SEQ ID NO: 16342 - DNA, 19 bp, Homo sapiens
tgttcttaagaggaaagca

SEQ ID NO: 16343 - DNA, 21 bp, Homo sapiens
ccagtaaccagatttctgttt

SEQ ID NO: 16344 - DNA, 18 bp, Homo sapiens
gatatcaactgcagactt

SEQ ID NO: 16345 - DNA, 20 bp, Homo sapiens
agtcacattcttagcacacc

SEQ ID NO: 16346 - DNA, 24 bp, Homo sapiens
aacaccaaactataatttgctttt

SEQ ID NO: 16347 - DNA, 16 bp, Homo sapiens
gtggttccgcctccca

SEQ ID NO: 16348 - DNA, 24 bp, Homo sapiens
ggcaaaagttttataacataccac

SEQ ID NO: 16349 - DNA, 23 bp, Homo sapiens
ccctaggtctaatcctcttcttt

SEQ ID NO: 16350 - DNA, 21 bp, Homo sapiens
tcattactcttttgagggtgt

SEQ ID NO: 16351 - DNA, 24 bp, Homo sapiens
gtgaattgccattattgtttagat

SEQ ID NO: 16352 - DNA, 17 bp, Homo sapiens
cagcagttggtaggtgc

SEQ ID NO: 16353 - DNA, 21 bp, Homo sapiens
cacactgtttttagacttgtt

SEQ ID NO: 16354 - DNA, 24 bp, Homo sapiens
accccaccttatatcccattcaat

SEQ ID NO: 16355 - DNA, 22 bp, Homo sapiens
gattggcactggacgactgacc

SEQ ID NO: 16356 - DNA, 21 bp, Homo sapiens
tccccactgttccagtcaaac

SEQ ID NO: 16357 - DNA, 16 bp, Homo sapiens
gtgaccccataccggc

SEQ ID NO: 16358 - DNA, 19 bp, Homo sapiens
aggctcatggacacacttc

SEQ ID NO: 16359 - DNA, 22 bp, Homo sapiens
gcaaagtttatccttcagcacc

SEQ ID NO: 16360 - DNA, 22 bp, Homo sapiens
acttgaattatctcccacgctc

SEQ ID NO: 16361 - DNA, 22 bp, Homo sapiens
ttttcattttcccttgcagttc

SEQ ID NO: 16362 - DNA, 16 bp, Homo sapiens
agccctgacagagaac

SEQ ID NO: 16363 - DNA, 17 bp, Homo sapiens
cccttgaacccctctgg

SEQ ID NO: 16364 - DNA, 22 bp, Homo sapiens
gacacaatcttgctcttcccac

SEQ ID NO: 16365 - DNA, 24 bp, Homo sapiens
ggcagttattattgttcttatttt

SEQ ID NO: 16366 - DNA, 21 bp, Homo sapiens
gtttccaacagtccagagctg

SEQ ID NO: 16367 - DNA, 20 bp, Homo sapiens
ctaaccacccccatttccac

SEQ ID NO: 16368 - DNA, 20 bp, Homo sapiens
cagattcctctgtgcttgca

SEQ ID NO: 16369 - DNA, 22 bp, Homo sapiens
agtagaagggatgaaggaaatc

SEQ ID NO: 16370 - DNA, 22 bp, Homo sapiens
tccataactgaaagccaatgac

SEQ ID NO: 16371 - DNA, 18 bp, Homo sapiens
aggctggggtactacagc

SEQ ID NO: 16372 - DNA, 24 bp, Homo sapiens
aggtagtgggattatttgatttga

SEQ ID NO: 16373 - DNA, 23 bp, Homo sapiens
ctctgaaggtcttccagccagac

SEQ ID NO: 16374 - DNA, 20 bp, Homo sapiens
acagatttgtttaatgcctc

SEQ ID NO: 16375 - DNA, 20 bp, Homo sapiens
gttgcagtgaaccgagattg

SEQ ID NO: 16376 - DNA, 24 bp, Homo sapiens
accagcaggatattgtgttttttg

SEQ ID NO: 16377 - DNA, 28 bp, Homo sapiens
actccatctcaaaaaaaaaaaaaaaaaa

SEQ ID NO: 16378 - DNA, 18 bp, Homo sapiens
gctttaagaccctcaggc

SEQ ID NO: 16379 - DNA, 20 bp, Homo sapiens
agggtgaaacaaactcaggc

SEQ ID NO: 16380 - DNA, 20 bp, Homo sapiens
aactcttctggattttatct

SEQ ID NO: 16381 - DNA, 22 bp, Homo sapiens
catgaaggagtccatttttctc

SEQ ID NO: 16382 - DNA, 24 bp, Homo sapiens
aaacttccttggataaagatattc

SEQ ID NO: 16383 - DNA, 23 bp, Homo sapiens
cttgtgtagatgcaatcaaactg

SEQ ID NO: 16384 - DNA, 16 bp, Homo sapiens
tgggaccagccctggc

SEQ ID NO: 16385 - DNA, 22 bp, Homo sapiens
agatacagccttataaccaaat

SEQ ID NO: 16386 - DNA, 20 bp, Homo sapiens
ggaaggtcagagtgtggaac

SEQ ID NO: 16387 - DNA, 24 bp, Homo sapiens
tgtatcatctgtatccatgtgtac

SEQ ID NO: 16388 - DNA, 24 bp, Homo sapiens
gaattgacaacttttatcataatg

SEQ ID NO: 16389 - DNA, 20 bp, Homo sapiens
ttcttctcccactcacttcc

SEQ ID NO: 16390 - DNA, 24 bp, Homo sapiens
ttggctatgtaaaaccatggcagt

SEQ ID NO: 16391 - DNA, 19 bp, Homo sapiens
gcaaagcaaactctcggtt

SEQ ID NO: 16392 - DNA, 23 bp, Homo sapiens
ttctaattcttaactctaacctc

SEQ ID NO: 16393 - DNA, 18 bp, Homo sapiens
aagttacctggcgggggg

SEQ ID NO: 16394 - DNA, 24 bp, Homo sapiens
ataattaataccctactcaaagca

SEQ ID NO: 16395 - DNA, 16 bp, Homo sapiens
ttggtgtttgttcccc

SEQ ID NO: 16396 - DNA, 25 bp, Homo sapiens
aaattttttattgttgtttaactgc

SEQ ID NO: 16397 - DNA, 23 bp, Homo sapiens
aaaaaacatctgtatctagtggt

SEQ ID NO: 16398 - DNA, 19 bp, Homo sapiens
aaaaaactgtccatccccc

SEQ ID NO: 16399 - DNA, 20 bp, Homo sapiens
ccttggatggtttctgattc

SEQ ID NO: 16400 - DNA, 18 bp, Homo sapiens
gcagacaagcagcttttc

SEQ ID NO: 16401 - DNA, 23 bp, Homo sapiens
tctaggcagttttactaaagcag

SEQ ID NO: 16402 - DNA, 22 bp, Homo sapiens
aggcaagtttatcactgttgga

SEQ ID NO: 16403 - DNA, 21 bp, Homo sapiens
accaaagagttcctggtgggt

SEQ ID NO: 16404 - DNA, 23 bp, Homo sapiens
cagtgaaactgtttttgtttcat

SEQ ID NO: 16405 - DNA, 20 bp, Homo sapiens
aaaccaaacttaccatttgc

SEQ ID NO: 16406 - DNA, 16 bp, Homo sapiens
agaggcgttagaggac

SEQ ID NO: 16407 - DNA, 20 bp, Homo sapiens
tgtgtctccttcctacccca

SEQ ID NO: 16408 - DNA, 22 bp, Homo sapiens
atcaggatgattttggtgaaag

SEQ ID NO: 16409 - DNA, 23 bp, Homo sapiens
aaggaactgggctaatagacatt

SEQ ID NO: 16410 - DNA, 21 bp, Homo sapiens
acagaccctgattatgatgac

SEQ ID NO: 16411 - DNA, 20 bp, Homo sapiens
tgacatggctattagtgcac

SEQ ID NO: 16412 - DNA, 22 bp, Homo sapiens
gaatggcaaatttgttacatga

SEQ ID NO: 16413 - DNA, 20 bp, Homo sapiens
ttgcacaaagctatacttac

SEQ ID NO: 16414 - DNA, 20 bp, Homo sapiens
tgtctgctctgttcagacta

SEQ ID NO: 16415 - DNA, 20 bp, Homo sapiens
ttggctcaaaatcttttgtc

SEQ ID NO: 16416 - DNA, 19 bp, Homo sapiens
agctttttggggttttttg

SEQ ID NO: 16417 - DNA, 20 bp, Homo sapiens
accaagagctggtgcttctt

SEQ ID NO: 16418 - DNA, 23 bp, Homo sapiens
tggttcataattggtattatact

SEQ ID NO: 16419 - DNA, 19 bp, Homo sapiens
tcagctggagtgtgttggg

SEQ ID NO: 16420 - DNA, 22 bp, Homo sapiens
gctgatgaagcctgtaagacat

SEQ ID NO: 16421 - DNA, 22 bp, Homo sapiens
tgattgaagttgcagtcagttt

SEQ ID NO: 16422 - DNA, 19 bp, Homo sapiens
gcttacctgtggcaagaag

SEQ ID NO: 16423 - DNA, 20 bp, Homo sapiens
agtgcagatatctcttccat

SEQ ID NO: 16424 - DNA, 24 bp, Homo sapiens
aacagagataccactggctacact

SEQ ID NO: 16425 - DNA, 19 bp, Homo sapiens
cgtcatactctgcagtctc

SEQ ID NO: 16426 - DNA, 22 bp, Homo sapiens
tataatgcaaaaattaattagc

SEQ ID NO: 16427 - DNA, 19 bp, Homo sapiens
gcattgttggtgttcagga

SEQ ID NO: 16428 - DNA, 24 bp, Homo sapiens
aacttccacaaatagcaagtaacc

SEQ ID NO: 16429 - DNA, 24 bp, Homo sapiens
gtgaaaggtgaaaaatgaagtttc

SEQ ID NO: 16430 - DNA, 20 bp, Homo sapiens
ttacctgttgtgtgctgaga

SEQ ID NO: 16431 - DNA, 24 bp, Homo sapiens
tctggaaatgttatcaattattct

SEQ ID NO: 16432 - DNA, 18 bp, Homo sapiens
cacacagactcctgatcc

SEQ ID NO: 16433 - DNA, 24 bp, Homo sapiens
tctagaaaaaatatttttgaaagc

SEQ ID NO: 16434 - DNA, 19 bp, Homo sapiens
gagaaagccttctgccacc

SEQ ID NO: 16435 - DNA, 19 bp, Homo sapiens
gaccctgtctcaagagaag

SEQ ID NO: 16436 - DNA, 22 bp, Homo sapiens
ggcatatatatgaagcaaaaga

SEQ ID NO: 16437 - DNA, 18 bp, Homo sapiens
tctccgaactgaacaggg

SEQ ID NO: 16438 - DNA, 24 bp, Homo sapiens
gaaagaccatgtggggaaagaaat

SEQ ID NO: 16439 - DNA, 20 bp, Homo sapiens
tctgaaattatttcggaccc

SEQ ID NO: 16440 - DNA, 24 bp, Homo sapiens
gcattctacatcagtaacttactt

SEQ ID NO: 16441 - DNA, 22 bp, Homo sapiens
gagattaatgattcatcaaggg

SEQ ID NO: 16442 - DNA, 16 bp, Homo sapiens
tgagcaccgtcccctg

SEQ ID NO: 16443 - DNA, 24 bp, Homo sapiens
catttcatttaaataaatatggtc

SEQ ID NO: 16444 - DNA, 23 bp, Homo sapiens
ctggaccttgaatatccctgaac

SEQ ID NO: 16445 - DNA, 23 bp, Homo sapiens
aggtaagttttttcttttcttgg

SEQ ID NO: 16446 - DNA, 18 bp, Homo sapiens
gatcccgctcccatggca

SEQ ID NO: 16447 - DNA, 16 bp, Homo sapiens
ccctgggcgcggggct

SEQ ID NO: 16448 - DNA, 19 bp, Homo sapiens
cgagttcgtactcaccccc

SEQ ID NO: 16449 - DNA, 16 bp, Homo sapiens
gcggggcggggggctg

SEQ ID NO: 16450 - DNA, 16 bp, Homo sapiens
ccccggccctccccga

SEQ ID NO: 16451 - DNA, 23 bp, Homo sapiens
gctcgggagcatgaagtaggggc

SEQ ID NO: 16452 - DNA, 16 bp, Homo sapiens
cgcgggggcgcaggaa

SEQ ID NO: 16453 - DNA, 21 bp, Homo sapiens
gcacagcggcggcggcggcgg

SEQ ID NO: 16454 - DNA, 19 bp, Homo sapiens
cctagagcctgtacctggc

SEQ ID NO: 16455 - DNA, 24 bp, Homo sapiens
agagaattaccttcaggagctcct

SEQ ID NO: 16456 - DNA, 24 bp, Homo sapiens
ggactggtttccactcccagcttc

SEQ ID NO: 16457 - DNA, 24 bp, Homo sapiens
ctacccctgagttctcaggcccct

SEQ ID NO: 16458 - DNA, 24 bp, Homo sapiens
gcctctgcttgtgtctcctggtct

SEQ ID NO: 16459 - DNA, 22 bp, Homo sapiens
tctactgatgggaaaactgagg

SEQ ID NO: 16460 - DNA, 17 bp, Homo sapiens
cctgtcacctggcctcc

SEQ ID NO: 16461 - DNA, 24 bp, Homo sapiens
cccagccgctggaggatgtccaca

SEQ ID NO: 16462 - DNA, 24 bp, Homo sapiens
gggcggtgtcatttttagatgaat

SEQ ID NO: 16463 - DNA, 16 bp, Homo sapiens
aatgactcccgggggt

SEQ ID NO: 16464 - DNA, 24 bp, Homo sapiens
cattgcctgtgccccttagggggt

SEQ ID NO: 16465 - DNA, 16 bp, Homo sapiens
cggtgcccgtgggagc

SEQ ID NO: 16466 - DNA, 23 bp, Homo sapiens
gtcctctccccttttccctccct

SEQ ID NO: 16467 - DNA, 22 bp, Homo sapiens
gttcacccggtgggagcagagg

SEQ ID NO: 16468 - DNA, 24 bp, Homo sapiens
gacgaaggccgggagccctgcacc

SEQ ID NO: 16469 - DNA, 17 bp, Homo sapiens
ggaactgcaggcccagc

SEQ ID NO: 16470 - DNA, 24 bp, Homo sapiens
ttacgcagcgggcccggctccagg

SEQ ID NO: 16471 - DNA, 23 bp, Homo sapiens
gtgcatgtcgaggtcgaaggcca

SEQ ID NO: 16472 - DNA, 16 bp, Homo sapiens
ggcactggtgctgagc

SEQ ID NO: 16473 - DNA, 17 bp, Homo sapiens
cagagtgactgtgcggc

SEQ ID NO: 16474 - DNA, 17 bp, Homo sapiens
cagccagaaacgcaagc

SEQ ID NO: 16475 - DNA, 19 bp, Homo sapiens
gtgcagggtccctgtggaa

SEQ ID NO: 16476 - DNA, 16 bp, Homo sapiens
tcgggtcccggcgctc

SEQ ID NO: 16477 - DNA, 18 bp, Homo sapiens
tcaaactggactgcatgc

SEQ ID NO: 16478 - DNA, 17 bp, Homo sapiens
cctggccctcgagctcc

SEQ ID NO: 16479 - DNA, 20 bp, Homo sapiens
tacagtaattgtgagcgacc

SEQ ID NO: 16480 - DNA, 17 bp, Homo sapiens
gcctgtcctgctgcctt

SEQ ID NO: 16481 - DNA, 17 bp, Homo sapiens
agaggtcccagtgggga

SEQ ID NO: 16482 - DNA, 24 bp, Homo sapiens
ctccttcctctttgggaagatgaa

SEQ ID NO: 16483 - DNA, 16 bp, Homo sapiens
tccaggcctagcaggg

SEQ ID NO: 16484 - DNA, 24 bp, Homo sapiens
cagtatctaccctgtgacgcaggt

SEQ ID NO: 16485 - DNA, 16 bp, Homo sapiens
tgggtcccctgcctgc

SEQ ID NO: 16486 - DNA, 17 bp, Homo sapiens
tgacacgtaccagtccc

SEQ ID NO: 16487 - DNA, 24 bp, Homo sapiens
tatgctggtgagggtttgtggggc

SEQ ID NO: 16488 - DNA, 21 bp, Homo sapiens
ttttaccttccagtccgacct

SEQ ID NO: 16489 - DNA, 19 bp, Homo sapiens
ttactggctgacagcttgg

SEQ ID NO: 16490 - DNA, 17 bp, Homo sapiens
gccctggggtcactgcc

SEQ ID NO: 16491 - DNA, 16 bp, Homo sapiens
aggcgttctggtagag

SEQ ID NO: 16492 - DNA, 20 bp, Homo sapiens
ccaagccccaaaggactagc

SEQ ID NO: 16493 - DNA, 20 bp, Homo sapiens
tagggaggcttttggggatt

SEQ ID NO: 16494 - DNA, 21 bp, Homo sapiens
agcccaaaccccgctgctacc

SEQ ID NO: 16495 - DNA, 23 bp, Homo sapiens
ctgttttctgggtaggatggggg

SEQ ID NO: 16496 - DNA, 20 bp, Homo sapiens
ctcccagcctctgttggcgg

SEQ ID NO: 16497 - DNA, 16 bp, Homo sapiens
aggtggcacttgcttc

SEQ ID NO: 16498 - DNA, 24 bp, Homo sapiens
acagaagatcacagccaccaaaat

SEQ ID NO: 16499 - DNA, 17 bp, Homo sapiens
tcctctggatgggcttc

SEQ ID NO: 16500 - DNA, 24 bp, Homo sapiens
acttcaattgtgcccatcaaaagc

SEQ ID NO: 16501 - DNA, 24 bp, Homo sapiens
tttagaggagctggtggtaggagg

SEQ ID NO: 16502 - DNA, 22 bp, Homo sapiens
acaaagtcagccctacccactc

SEQ ID NO: 16503 - DNA, 18 bp, Homo sapiens
actggcatggctggttat

SEQ ID NO: 16504 - DNA, 16 bp, Homo sapiens
gtcccgcagagaagcc

SEQ ID NO: 16505 - DNA, 24 bp, Homo sapiens
ggagatgaggataaagcagtaaat

SEQ ID NO: 16506 - DNA, 16 bp, Homo sapiens
cacccggcccctacct

SEQ ID NO: 16507 - DNA, 19 bp, Homo sapiens
gaagttggaggtaccatcg

SEQ ID NO: 16508 - DNA, 24 bp, Homo sapiens
tagctcggactgaggccaagataa

SEQ ID NO: 16509 - DNA, 17 bp, Homo sapiens
tgggagctgagccagga

SEQ ID NO: 16510 - DNA, 24 bp, Homo sapiens
cacccacaaacctcccccatttac

SEQ ID NO: 16511 - DNA, 19 bp, Homo sapiens
gctcttgggtccggctttc

SEQ ID NO: 16512 - DNA, 24 bp, Homo sapiens
gttctaccaggagtactcggccac

SEQ ID NO: 16513 - DNA, 16 bp, Homo sapiens
gctcaaggggacatcc

SEQ ID NO: 16514 - DNA, 16 bp, Homo sapiens
aacagcacctgccgtc

SEQ ID NO: 16515 - DNA, 16 bp, Homo sapiens
cagggccggggtggtc

SEQ ID NO: 16516 - DNA, 23 bp, Homo sapiens
ggatcggaagcctcaaagaaagc

SEQ ID NO: 16517 - DNA, 18 bp, Homo sapiens
tagccactgctcgtgggc

SEQ ID NO: 16518 - DNA, 17 bp, Homo sapiens
agacctgggaaggcagc

SEQ ID NO: 16519 - DNA, 16 bp, Homo sapiens
cttgggtcccggaggc

SEQ ID NO: 16520 - DNA, 23 bp, Homo sapiens
ccagacagccccagcccagtcag

SEQ ID NO: 16521 - DNA, 24 bp, Homo sapiens
gtcccccactggagctccaagcag

SEQ ID NO: 16522 - DNA, 24 bp, Homo sapiens
aattcctgtcctccagcccccggc

SEQ ID NO: 16523 - DNA, 21 bp, Homo sapiens
ctaagctgctccttttcctgt

SEQ ID NO: 16524 - DNA, 19 bp, Homo sapiens
gcctttccctctgctgatg

SEQ ID NO: 16525 - DNA, 21 bp, Homo sapiens
agccagaggagccgggggcct

SEQ ID NO: 16526 - DNA, 20 bp, Homo sapiens
ccagggattccaggtagccc

SEQ ID NO: 16527 - DNA, 22 bp, Homo sapiens
tcctcttagccgcggactatcc

SEQ ID NO: 16528 - DNA, 18 bp, Homo sapiens
aaagagccaccaagagtt

SEQ ID NO: 16529 - DNA, 24 bp, Homo sapiens
gactgcttgagcccattctctgct

SEQ ID NO: 16530 - DNA, 19 bp, Homo sapiens
ggaagaacctgaggacaca

SEQ ID NO: 16531 - DNA, 16 bp, Homo sapiens
gtccccctgggctacc

SEQ ID NO: 16532 - DNA, 19 bp, Homo sapiens
gagagccctaagtccactc

SEQ ID NO: 16533 - DNA, 17 bp, Homo sapiens
ataaggcccaggaggac

SEQ ID NO: 16534 - DNA, 17 bp, Homo sapiens
gacagtgttgctagggc

SEQ ID NO: 16535 - DNA, 16 bp, Homo sapiens
ggccacatctccagca

SEQ ID NO: 16536 - DNA, 22 bp, Homo sapiens
tgccaggcattgctgtcagagg

SEQ ID NO: 16537 - DNA, 16 bp, Homo sapiens
cctcccaccaggcacc

SEQ ID NO: 16538 - DNA, 24 bp, Homo sapiens
ttgttccttgtctctttcagggtc

SEQ ID NO: 16539 - DNA, 16 bp, Homo sapiens
gggcccagagggtgcc

SEQ ID NO: 16540 - DNA, 16 bp, Homo sapiens
tgagagccctgggtcc

SEQ ID NO: 16541 - DNA, 21 bp, Homo sapiens
tgtgtgagtgggaggatggat

SEQ ID NO: 16542 - DNA, 20 bp, Homo sapiens
cccctcttccctgagaactg

SEQ ID NO: 16543 - DNA, 23 bp, Homo sapiens
gcagagtttgtggggaggcagac

SEQ ID NO: 16544 - DNA, 22 bp, Homo sapiens
ctttgccatgcatggcctctgg

SEQ ID NO: 16545 - DNA, 24 bp, Homo sapiens
tttttgtttcagggacagaaaggg

SEQ ID NO: 16546 - DNA, 22 bp, Homo sapiens
caaggaaaaaaccaaaccatac

SEQ ID NO: 16547 - DNA, 16 bp, Homo sapiens
tggattcccggagagc

SEQ ID NO: 16548 - DNA, 24 bp, Homo sapiens
ctctacttctctatgaatctcatt

SEQ ID NO: 16549 - DNA, 20 bp, Homo sapiens
taggaggcccactgcgcaag

SEQ ID NO: 16550 - DNA, 24 bp, Homo sapiens
tttgtagagtgtagcagagtgtct

SEQ ID NO: 16551 - DNA, 16 bp, Homo sapiens
tggggctggggagagg

SEQ ID NO: 16552 - DNA, 17 bp, Homo sapiens
gggtgacatgggcttgc

SEQ ID NO: 16553 - DNA, 18 bp, Homo sapiens
cacaacccttggaaagct

SEQ ID NO: 16554 - DNA, 16 bp, Homo sapiens
ggtccaggatagccct

SEQ ID NO: 16555 - DNA, 23 bp, Homo sapiens
ctttactgagtgcacactccatc

SEQ ID NO: 16556 - DNA, 16 bp, Homo sapiens
gggagagcgaccaggg

SEQ ID NO: 16557 - DNA, 18 bp, Homo sapiens
cccttgcgatctccagga

SEQ ID NO: 16558 - DNA, 20 bp, Homo sapiens
tggggctggctcacagagca

SEQ ID NO: 16559 - DNA, 24 bp, Homo sapiens
tcttccccctccaacagggacaca

SEQ ID NO: 16560 - DNA, 16 bp, Homo sapiens
ggtggactggagtggg

SEQ ID NO: 16561 - DNA, 16 bp, Homo sapiens
ggcttgggggccctcc

SEQ ID NO: 16562 - DNA, 18 bp, Homo sapiens
tatactgcacctgcctgc

SEQ ID NO: 16563 - DNA, 17 bp, Homo sapiens
tgtcagccccagtctcc

SEQ ID NO: 16564 - DNA, 16 bp, Homo sapiens
ctctgcctcggggcac

SEQ ID NO: 16565 - DNA, 24 bp, Homo sapiens
tctttcttttccttatgtttctct

SEQ ID NO: 16566 - DNA, 18 bp, Homo sapiens
cccctccttagggtccac

SEQ ID NO: 16567 - DNA, 18 bp, Homo sapiens
gccaaaggttaccctggc

SEQ ID NO: 16568 - DNA, 19 bp, Homo sapiens
ctgggatcctagggctgtg

SEQ ID NO: 16569 - DNA, 16 bp, Homo sapiens
ccacttaccctgctgc

SEQ ID NO: 16570 - DNA, 22 bp, Homo sapiens
ttctacaaagagagcagcagag

SEQ ID NO: 16571 - DNA, 16 bp, Homo sapiens
ctggagggacaggtga

SEQ ID NO: 16572 - DNA, 20 bp, Homo sapiens
gtagagcgtctccatatgtc

SEQ ID NO: 16573 - DNA, 16 bp, Homo sapiens
ccgggagcactcaagt

SEQ ID NO: 16574 - DNA, 24 bp, Homo sapiens
ggtaggagatcccggccccaaagg

SEQ ID NO: 16575 - DNA, 16 bp, Homo sapiens
gaagagccctgggagc

SEQ ID NO: 16576 - DNA, 18 bp, Homo sapiens
ccactgccaccagggagg

SEQ ID NO: 16577 - DNA, 24 bp, Homo sapiens
gggtggctgtggatggtgaataac

SEQ ID NO: 16578 - DNA, 20 bp, Homo sapiens
ctgcggcaggttgggccagc

SEQ ID NO: 16579 - DNA, 23 bp, Homo sapiens
caggaggaattccttgacttccc

SEQ ID NO: 16580 - DNA, 24 bp, Homo sapiens
ctctttcctagggctacattgggc

SEQ ID NO: 16581 - DNA, 17 bp, Homo sapiens
ctgccttgacttgtccc

SEQ ID NO: 16582 - DNA, 21 bp, Homo sapiens
catcttgcccctcttgccagg

SEQ ID NO: 16583 - DNA, 22 bp, Homo sapiens
cgcaagtggcacacattccagg

SEQ ID NO: 16584 - DNA, 17 bp, Homo sapiens
ttccccgctagagtctg

SEQ ID NO: 16585 - DNA, 17 bp, Homo sapiens
tttggggcaagcctggc

SEQ ID NO: 16586 - DNA, 17 bp, Homo sapiens
ggagaagcagaagatgc

SEQ ID NO: 16587 - DNA, 24 bp, Homo sapiens
gtctctcccctgcagggcctgcct

SEQ ID NO: 16588 - DNA, 16 bp, Homo sapiens
cagcagcaggtcctgt

SEQ ID NO: 16589 - DNA, 22 bp, Homo sapiens
tttccccaaagactccaggaaa

SEQ ID NO: 16590 - DNA, 17 bp, Homo sapiens
gcactgtctgcccatga

SEQ ID NO: 16591 - DNA, 24 bp, Homo sapiens
tcctgttcccaaagacttgaaata

SEQ ID NO: 16592 - DNA, 17 bp, Homo sapiens
gggtctggatcaaagcc

SEQ ID NO: 16593 - DNA, 16 bp, Homo sapiens
accctaaagcgtgggc

SEQ ID NO: 16594 - DNA, 24 bp, Homo sapiens
gtttgttctctctcatgccctcca

SEQ ID NO: 16595 - DNA, 16 bp, Homo sapiens
tttgtccaagggtgcc

SEQ ID NO: 16596 - DNA, 16 bp, Homo sapiens
ggggcctggcaggccc

SEQ ID NO: 16597 - DNA, 20 bp, Homo sapiens
ctgtggtcaggaataaggag

SEQ ID NO: 16598 - DNA, 16 bp, Homo sapiens
aacacccacctgctgc

SEQ ID NO: 16599 - DNA, 23 bp, Homo sapiens
ggaggatgacatggagggagggg

SEQ ID NO: 16600 - DNA, 23 bp, Homo sapiens
cttttcaacctcccctgcagggc

SEQ ID NO: 16601 - DNA, 23 bp, Homo sapiens
gtctctctctatctgcagggaga

SEQ ID NO: 16602 - DNA, 16 bp, Homo sapiens
ggttggtctctcctgg

SEQ ID NO: 16603 - DNA, 18 bp, Homo sapiens
caacactcctaagtcacc

SEQ ID NO: 16604 - DNA, 24 bp, Homo sapiens
aacattccagattccaagatcaat

SEQ ID NO: 16605 - DNA, 18 bp, Homo sapiens
tgaatcgggggaacatcc

SEQ ID NO: 16606 - DNA, 22 bp, Homo sapiens
cttggggattgtccccaccacc

SEQ ID NO: 16607 - DNA, 21 bp, Homo sapiens
atctaaggtcacccttccttc

SEQ ID NO: 16608 - DNA, 20 bp, Homo sapiens
ctctttctctccccacaggg

SEQ ID NO: 16609 - DNA, 17 bp, Homo sapiens
agcttcctcctagcacc

SEQ ID NO: 16610 - DNA, 23 bp, Homo sapiens
ctttcagtccgggctcccccacg

SEQ ID NO: 16611 - DNA, 22 bp, Homo sapiens
ccttttacagatgtgaacactg

SEQ ID NO: 16612 - DNA, 18 bp, Homo sapiens
catgcagagaaaccacag

SEQ ID NO: 16613 - DNA, 17 bp, Homo sapiens
cagggctcctgacttct

SEQ ID NO: 16614 - DNA, 16 bp, Homo sapiens
aggggagtggacctgg

SEQ ID NO: 16615 - DNA, 24 bp, Homo sapiens
ctttgtcttgcagggactgatggg

SEQ ID NO: 16616 - DNA, 24 bp, Homo sapiens
cacccagagtgaccaggaagaagc

SEQ ID NO: 16617 - DNA, 18 bp, Homo sapiens
ctttcctctcacaaggct

SEQ ID NO: 16618 - DNA, 24 bp, Homo sapiens
gggaaaatctcatgcaattacctt

SEQ ID NO: 16619 - DNA, 16 bp, Homo sapiens
gtacctcgccaggggg

SEQ ID NO: 16620 - DNA, 19 bp, Homo sapiens
ggaccctaggaaggaagcc

SEQ ID NO: 16621 - DNA, 23 bp, Homo sapiens
cattgtaaccttctttgctggtg

SEQ ID NO: 16622 - DNA, 23 bp, Homo sapiens
gatggagaagactggattatttc

SEQ ID NO: 16623 - DNA, 21 bp, Homo sapiens
gatcccggattccaaggagac

SEQ ID NO: 16624 - DNA, 16 bp, Homo sapiens
gggaaccctggcaacc

SEQ ID NO: 16625 - DNA, 22 bp, Homo sapiens
aaggaaggagctcatcttcctc

SEQ ID NO: 16626 - DNA, 24 bp, Homo sapiens
ggagagtgtgaggtttgggggtgc

SEQ ID NO: 16627 - DNA, 18 bp, Homo sapiens
gactgggcggctgttcac

SEQ ID NO: 16628 - DNA, 21 bp, Homo sapiens
caggaggaaatgaagtcttgg

SEQ ID NO: 16629 - DNA, 24 bp, Homo sapiens
atctcttccaggggagccaggggt

SEQ ID NO: 16630 - DNA, 24 bp, Homo sapiens
ctgtgaaatgagcacatcccattc

SEQ ID NO: 16631 - DNA, 17 bp, Homo sapiens
ctccgactttgccctgt

SEQ ID NO: 16632 - DNA, 24 bp, Homo sapiens
agtttgaatggtagctccttctag

SEQ ID NO: 16633 - DNA, 22 bp, Homo sapiens
ggagaaatggggcatcacatac

SEQ ID NO: 16634 - DNA, 18 bp, Homo sapiens
ccatccacaaccagcggg

SEQ ID NO: 16635 - DNA, 16 bp, Homo sapiens
ctgggcctcagtttcc

SEQ ID NO: 16636 - DNA, 23 bp, Homo sapiens
tgcctccctgcaacctcttctct

SEQ ID NO: 16637 - DNA, 21 bp, Homo sapiens
taggagtttctcctctcagcc

SEQ ID NO: 16638 - DNA, 17 bp, Homo sapiens
tcccgggccccctggac

SEQ ID NO: 16639 - DNA, 16 bp, Homo sapiens
attgtcgccagggggg

SEQ ID NO: 16640 - DNA, 20 bp, Homo sapiens
gacctgcctggggtcccatc

SEQ ID NO: 16641 - DNA, 16 bp, Homo sapiens
ctgctcctccaactgg

SEQ ID NO: 16642 - DNA, 23 bp, Homo sapiens
agacgcatccccgtagcactccc

SEQ ID NO: 16643 - DNA, 16 bp, Homo sapiens
ggctggcaaggcaacc

SEQ ID NO: 16644 - DNA, 21 bp, Homo sapiens
cctcagggattcccaggagac

SEQ ID NO: 16645 - DNA, 22 bp, Homo sapiens
cttaccctggggagaagggaac

SEQ ID NO: 16646 - DNA, 24 bp, Homo sapiens
aaggtgagtacctgcccagggcag

SEQ ID NO: 16647 - DNA, 16 bp, Homo sapiens
tctcacctcgggcccc

SEQ ID NO: 16648 - DNA, 17 bp, Homo sapiens
ctgcctggcttggaagc

SEQ ID NO: 16649 - DNA, 24 bp, Homo sapiens
ttcagtacccaggacagggcaggc

SEQ ID NO: 16650 - DNA, 23 bp, Homo sapiens
gcctctgagactccctttttgtt

SEQ ID NO: 16651 - DNA, 16 bp, Homo sapiens
gccctgggtggtgtcc

SEQ ID NO: 16652 - DNA, 18 bp, Homo sapiens
gccgggaccccgtgggca

SEQ ID NO: 16653 - DNA, 16 bp, Homo sapiens
ggtccctcatctccct

SEQ ID NO: 16654 - DNA, 16 bp, Homo sapiens
aggcgtgctgtttccc

SEQ ID NO: 16655 - DNA, 24 bp, Homo sapiens
agctcccatgaatgccacctaccc

SEQ ID NO: 16656 - DNA, 24 bp, Homo sapiens
cctttccctccatacaggacaaga

SEQ ID NO: 16657 - DNA, 23 bp, Homo sapiens
atgacttccctctggagcactgg

SEQ ID NO: 16658 - DNA, 24 bp, Homo sapiens
ttcctctctcgtgtctcccaattc

SEQ ID NO: 16659 - DNA, 20 bp, Homo sapiens
ctctctcctttggggtctgt

SEQ ID NO: 16660 - DNA, 16 bp, Homo sapiens
gcctcccaggaaaccc

SEQ ID NO: 16661 - DNA, 18 bp, Homo sapiens
accagggtatgtggctct

SEQ ID NO: 16662 - DNA, 17 bp, Homo sapiens
tctttcctcttgtcccc

SEQ ID NO: 16663 - DNA, 18 bp, Homo sapiens
ggaccccagccatgttgc

SEQ ID NO: 16664 - DNA, 24 bp, Homo sapiens
ttttttctcccttttcacaactgg

SEQ ID NO: 16665 - DNA, 18 bp, Homo sapiens
tcagcctggcaggaaggg

SEQ ID NO: 16666 - DNA, 21 bp, Homo sapiens
gttgtgtccatttttttctcc

SEQ ID NO: 16667 - DNA, 16 bp, Homo sapiens
ggggtctccaaggcca

SEQ ID NO: 16668 - DNA, 22 bp, Homo sapiens
cattcagagaccgttgctaact

SEQ ID NO: 16669 - DNA, 23 bp, Homo sapiens
aatggcagctaaggccagcaggc

SEQ ID NO: 16670 - DNA, 16 bp, Homo sapiens
catggagggtgctggg

SEQ ID NO: 16671 - DNA, 20 bp, Homo sapiens
tccatcctcctctttgtctc

SEQ ID NO: 16672 - DNA, 17 bp, Homo sapiens
ggggtagaggactgaac

SEQ ID NO: 16673 - DNA, 21 bp, Homo sapiens
cccgaccagaccaatgaatcc

SEQ ID NO: 16674 - DNA, 17 bp, Homo sapiens
ccatgctggctgggtga

SEQ ID NO: 16675 - DNA, 24 bp, Homo sapiens
gctctaattgtttatcttttcccc

SEQ ID NO: 16676 - DNA, 16 bp, Homo sapiens
gaaggagcgggagggc

SEQ ID NO: 16677 - DNA, 21 bp, Homo sapiens
attctgaaatccccaggtcaa

SEQ ID NO: 16678 - DNA, 24 bp, Homo sapiens
gaatgtgtctcatagggatttatg

SEQ ID NO: 16679 - DNA, 20 bp, Homo sapiens
aagggaacaatgtctcttgg

SEQ ID NO: 16680 - DNA, 17 bp, Homo sapiens
ccatgaactaggcaggg

SEQ ID NO: 16681 - DNA, 23 bp, Homo sapiens
gatgcagacttactccttaccat

SEQ ID NO: 16682 - DNA, 24 bp, Homo sapiens
ctctttgagcctctggatggccct

SEQ ID NO: 16683 - DNA, 17 bp, Homo sapiens
cggttcatggaggagag

SEQ ID NO: 16684 - DNA, 22 bp, Homo sapiens
cgtgacctgcctgcattgctgt

SEQ ID NO: 16685 - DNA, 16 bp, Homo sapiens
acagcagctaggcccc

SEQ ID NO: 16686 - DNA, 19 bp, Homo sapiens
tggacccaaggggtcgatg

SEQ ID NO: 16687 - DNA, 19 bp, Homo sapiens
accacctggcattccagga

SEQ ID NO: 16688 - DNA, 24 bp, Homo sapiens
agaatgaccagctccctctttgtc

SEQ ID NO: 16689 - DNA, 19 bp, Homo sapiens
agcttagggatcacgaggg

SEQ ID NO: 16690 - DNA, 21 bp, Homo sapiens
ctgagccgaccgaggtgggac

SEQ ID NO: 16691 - DNA, 20 bp, Homo sapiens
gagattacaggtgtgagcca

SEQ ID NO: 16692 - DNA, 24 bp, Homo sapiens
ttctctgtcttggcagggtcatcc

SEQ ID NO: 16693 - DNA, 24 bp, Homo sapiens
ttttggtatgtttgtcaggctggt

SEQ ID NO: 16694 - DNA, 16 bp, Homo sapiens
catgcctggtgggcct

SEQ ID NO: 16695 - DNA, 24 bp, Homo sapiens
ggccccggcagcttctgaacatgc

SEQ ID NO: 16696 - DNA, 16 bp, Homo sapiens
tcccaccagcatcagc

SEQ ID NO: 16697 - DNA, 16 bp, Homo sapiens
ccccccgtgttgctct

SEQ ID NO: 16698 - DNA, 17 bp, Homo sapiens
ggctaggggcaaagccc

SEQ ID NO: 16699 - DNA, 23 bp, Homo sapiens
tcttcccagggtcctccaggatc

SEQ ID NO: 16700 - DNA, 23 bp, Homo sapiens
tagagacaggtccagggtgagcc

SEQ ID NO: 16701 - DNA, 16 bp, Homo sapiens
tggtccgtccggtcct

SEQ ID NO: 16702 - DNA, 17 bp, Homo sapiens
gggaggaggagggggcc

SEQ ID NO: 16703 - DNA, 18 bp, Homo sapiens
gagtgaggaagggcaggt

SEQ ID NO: 16704 - DNA, 19 bp, Homo sapiens
ccccgccctcctggttctc

SEQ ID NO: 16705 - DNA, 17 bp, Homo sapiens
ggcattgttctgaggag

SEQ ID NO: 16706 - DNA, 23 bp, Homo sapiens
cctttttcctattccagggcccc

SEQ ID NO: 16707 - DNA, 17 bp, Homo sapiens
tggaagggctaagctct

SEQ ID NO: 16708 - DNA, 16 bp, Homo sapiens
tcaggccttagttttc

SEQ ID NO: 16709 - DNA, 17 bp, Homo sapiens
cctgacatacctgctgt

SEQ ID NO: 16710 - DNA, 24 bp, Homo sapiens
ctcaaacgggttccttttatctcc

SEQ ID NO: 16711 - DNA, 22 bp, Homo sapiens
attacaggctcagatcacaaag

SEQ ID NO: 16712 - DNA, 19 bp, Homo sapiens
gcaccctctcccaccttca

SEQ ID NO: 16713 - DNA, 16 bp, Homo sapiens
ctcgagcccaagtggc

SEQ ID NO: 16714 - DNA, 16 bp, Homo sapiens
ggccggcctggacagc

SEQ ID NO: 16715 - DNA, 16 bp, Homo sapiens
cccccatcaaaagccc

SEQ ID NO: 16716 - DNA, 21 bp, Homo sapiens
cccctccctgctccgtgcttt

SEQ ID NO: 16717 - DNA, 19 bp, Homo sapiens
ccacagaaggacaggaact

SEQ ID NO: 16718 - DNA, 17 bp, Homo sapiens
gtgtggctggtgagcga

SEQ ID NO: 16719 - DNA, 24 bp, Homo sapiens
gaagagaggatgtgctggaggagc

SEQ ID NO: 16720 - DNA, 17 bp, Homo sapiens
cttggtgcctggggggc

SEQ ID NO: 16721 - DNA, 24 bp, Homo sapiens
catctgtcacccggtgtgggagga

SEQ ID NO: 16722 - DNA, 19 bp, Homo sapiens
ggtgccagcggcaaagaag

SEQ ID NO: 16723 - DNA, 17 bp, Homo sapiens
gacagggcagagaaggc

SEQ ID NO: 16724 - DNA, 19 bp, Homo sapiens
ccaggcatggtccctttcc

SEQ ID NO: 16725 - DNA, 16 bp, Homo sapiens
gggtccctcaggcccc

SEQ ID NO: 16726 - DNA, 17 bp, Homo sapiens
agctcctggcttagtgc

SEQ ID NO: 16727 - DNA, 16 bp, Homo sapiens
aggaccctcggtgtgg

SEQ ID NO: 16728 - DNA, 24 bp, Homo sapiens
ggtctctcacactcaccttgggtc

SEQ ID NO: 16729 - DNA, 17 bp, Homo sapiens
gggtcagctccctcatt

SEQ ID NO: 16730 - DNA, 16 bp, Homo sapiens
ggagggaagggaaggg

SEQ ID NO: 16731 - DNA, 23 bp, Homo sapiens
cctctcccaactgtctgtgtgtc

SEQ ID NO: 16732 - DNA, 21 bp, Homo sapiens
tctgaactacacggtacatga

SEQ ID NO: 16733 - DNA, 19 bp, Homo sapiens
ctccaggagagatgggacc

SEQ ID NO: 16734 - DNA, 16 bp, Homo sapiens
tcccactgcaccaggc

SEQ ID NO: 16735 - DNA, 16 bp, Homo sapiens
agctgctcccacctct

SEQ ID NO: 16736 - DNA, 24 bp, Homo sapiens
agtcatttttctcttctttcatcc

SEQ ID NO: 16737 - DNA, 17 bp, Homo sapiens
tggagcctcagttaccc

SEQ ID NO: 16738 - DNA, 22 bp, Homo sapiens
cccatttctcttccatggagag

SEQ ID NO: 16739 - DNA, 23 bp, Homo sapiens
gaccaatggcgttttctttcagg

SEQ ID NO: 16740 - DNA, 22 bp, Homo sapiens
taaccaggccccactccccagc

SEQ ID NO: 16741 - DNA, 16 bp, Homo sapiens
ctccccaggagtgccc

SEQ ID NO: 16742 - DNA, 19 bp, Homo sapiens
agaaggaccttccccagct

SEQ ID NO: 16743 - DNA, 22 bp, Homo sapiens
ccacacaccctgggggctttca

SEQ ID NO: 16744 - DNA, 17 bp, Homo sapiens
ggtgtcgagagctgggg

SEQ ID NO: 16745 - DNA, 20 bp, Homo sapiens
tgaggaaactgaggcttagg

SEQ ID NO: 16746 - DNA, 20 bp, Homo sapiens
ctagggtgaccttggacccc

SEQ ID NO: 16747 - DNA, 17 bp, Homo sapiens
gcctaccaagagagact

SEQ ID NO: 16748 - DNA, 24 bp, Homo sapiens
atcaggtcccatggggccactgtc

SEQ ID NO: 16749 - DNA, 21 bp, Homo sapiens
gtcccactgcctggagatcca

SEQ ID NO: 16750 - DNA, 16 bp, Homo sapiens
cctgccggggtcccca

SEQ ID NO: 16751 - DNA, 24 bp, Homo sapiens
gagaggaaaagcacaccggggcct

SEQ ID NO: 16752 - DNA, 24 bp, Homo sapiens
catctcagatctctatgggaacac

SEQ ID NO: 16753 - DNA, 16 bp, Homo sapiens
gagccaggccttgagg

SEQ ID NO: 16754 - DNA, 16 bp, Homo sapiens
cactgctgacccttcc

SEQ ID NO: 16755 - DNA, 16 bp, Homo sapiens
tcccctgtccccctgg

SEQ ID NO: 16756 - DNA, 24 bp, Homo sapiens
ctttttggctgcagagggaactat

SEQ ID NO: 16757 - DNA, 17 bp, Homo sapiens
cgtcctcacccatcagc

SEQ ID NO: 16758 - DNA, 23 bp, Homo sapiens
ggagccctgagatttggggcctc

SEQ ID NO: 16759 - DNA, 16 bp, Homo sapiens
gctgcaaggggcctgc

SEQ ID NO: 16760 - DNA, 19 bp, Homo sapiens
ctcttcatgccctgccacc

SEQ ID NO: 16761 - DNA, 18 bp, Homo sapiens
gaccaaaagccctcccgc

SEQ ID NO: 16762 - DNA, 24 bp, Homo sapiens
catggcgagaaaggccaggaaggg

SEQ ID NO: 16763 - DNA, 17 bp, Homo sapiens
gttctctggcaaactgc

SEQ ID NO: 16764 - DNA, 19 bp, Homo sapiens
gcttccctgattttccttc

SEQ ID NO: 16765 - DNA, 18 bp, Homo sapiens
gggtggcagaatcagttt

SEQ ID NO: 16766 - DNA, 23 bp, Homo sapiens
gagggacgcaggcctatcaagtc

SEQ ID NO: 16767 - DNA, 22 bp, Homo sapiens
cgccttgcggatccgcctcagt

SEQ ID NO: 16768 - DNA, 16 bp, Homo sapiens
ggacggagggtccagg

SEQ ID NO: 16769 - DNA, 24 bp, Homo sapiens
tcctctctcttcagggtcctgaag

SEQ ID NO: 16770 - DNA, 18 bp, Homo sapiens
gtccttgatagcccttgg

SEQ ID NO: 16771 - DNA, 19 bp, Homo sapiens
ggagccaaggtaggtgtcc

SEQ ID NO: 16772 - DNA, 17 bp, Homo sapiens
tttagggcctggagtgc

SEQ ID NO: 16773 - DNA, 24 bp, Homo sapiens
cccttccccacatccctcccctcc

SEQ ID NO: 16774 - DNA, 16 bp, Homo sapiens
tctgactcccccaccc

SEQ ID NO: 16775 - DNA, 16 bp, Homo sapiens
tcctgttgcagggtgc

SEQ ID NO: 16776 - DNA, 21 bp, Homo sapiens
ggtgataacagcacagagaag

SEQ ID NO: 16777 - DNA, 18 bp, Homo sapiens
agaccctggaccccctgg

SEQ ID NO: 16778 - DNA, 21 bp, Homo sapiens
ttcatgattcagagaggtggc

SEQ ID NO: 16779 - DNA, 16 bp, Homo sapiens
tccttgggcccccatg

SEQ ID NO: 16780 - DNA, 17 bp, Homo sapiens
tatgggcggcatggatg

SEQ ID NO: 16781 - DNA, 24 bp, Homo sapiens
gcctgcaggacagagtcggggggt

SEQ ID NO: 16782 - DNA, 18 bp, Homo sapiens
gagactgctgtgtccccg

SEQ ID NO: 16783 - DNA, 24 bp, Homo sapiens
tcagccttcagctgggaggtggtg

SEQ ID NO: 16784 - DNA, 18 bp, Homo sapiens
ctcttgtagggtgctccg

SEQ ID NO: 16785 - DNA, 17 bp, Homo sapiens
tctgggcccagcgctcc

SEQ ID NO: 16786 - DNA, 23 bp, Homo sapiens
ccacaatgcctttgtgtccctgc

SEQ ID NO: 16787 - DNA, 19 bp, Homo sapiens
ggcacagacttactcagag

SEQ ID NO: 16788 - DNA, 24 bp, Homo sapiens
ctttccccagagcaaacacccacc

SEQ ID NO: 16789 - DNA, 24 bp, Homo sapiens
gttttgcagcccagtatccccatc

SEQ ID NO: 16790 - DNA, 17 bp, Homo sapiens
gggctttctcctgctgg

SEQ ID NO: 16791 - DNA, 24 bp, Homo sapiens
cttccctccttcttgtttgcctgc

SEQ ID NO: 16792 - DNA, 16 bp, Homo sapiens
tcggctgctgcagggg

SEQ ID NO: 16793 - DNA, 20 bp, Homo sapiens
ggaccaaaaggcgaaaaggt

SEQ ID NO: 16794 - DNA, 23 bp, Homo sapiens
ccgtcctcgccctgctccccctg

SEQ ID NO: 16795 - DNA, 22 bp, Homo sapiens
gacacacctacccttccctctc

SEQ ID NO: 16796 - DNA, 18 bp, Homo sapiens
ggagggagggggcttacc

SEQ ID NO: 16797 - DNA, 24 bp, Homo sapiens
aattcatctctgacgaagcgcttt

SEQ ID NO: 16798 - DNA, 16 bp, Homo sapiens
acccctctccatgcag

SEQ ID NO: 16799 - DNA, 20 bp, Homo sapiens
cctaaagctggttctgtgtc

SEQ ID NO: 16800 - DNA, 16 bp, Homo sapiens
cctgggccctgttggc

SEQ ID NO: 16801 - DNA, 18 bp, Homo sapiens
ccctgggccacctggaga

SEQ ID NO: 16802 - DNA, 24 bp, Homo sapiens
cctaggtggaatctgagcctcccg

SEQ ID NO: 16803 - DNA, 21 bp, Homo sapiens
aggagctctgatacttacagg

SEQ ID NO: 16804 - DNA, 23 bp, Homo sapiens
ccctgagagctccgcagaggtcg

SEQ ID NO: 16805 - DNA, 23 bp, Homo sapiens
tctttctagacatgtgtcatccc

SEQ ID NO: 16806 - DNA, 24 bp, Homo sapiens
gtggcccaaattttgctgttgtct

SEQ ID NO: 16807 - DNA, 16 bp, Homo sapiens
cccatcctgcagaggg

SEQ ID NO: 16808 - DNA, 23 bp, Homo sapiens
gggaaccgggagaccctgggtac

SEQ ID NO: 16809 - DNA, 23 bp, Homo sapiens
ctggctttccacggaggccttgc

SEQ ID NO: 16810 - DNA, 16 bp, Homo sapiens
ggcatgtcagggagag

SEQ ID NO: 16811 - DNA, 17 bp, Homo sapiens
tcagggtgggaggcagg

SEQ ID NO: 16812 - DNA, 20 bp, Homo sapiens
cttctgtgctgcctcccagc

SEQ ID NO: 16813 - DNA, 18 bp, Homo sapiens
ggagggtccctttaagct

SEQ ID NO: 16814 - DNA, 19 bp, Homo sapiens
cagggacaggagggtgtgc

SEQ ID NO: 16815 - DNA, 16 bp, Homo sapiens
atccccagggtcaggg

SEQ ID NO: 16816 - DNA, 17 bp, Homo sapiens
tttctgtttctcctgcc

SEQ ID NO: 16817 - DNA, 18 bp, Homo sapiens
gccctcttacctctgcgc

SEQ ID NO: 16818 - DNA, 24 bp, Homo sapiens
caaacccctccccacccctccccc

SEQ ID NO: 16819 - DNA, 18 bp, Homo sapiens
gtgtgactgtgggtcagg

SEQ ID NO: 16820 - DNA, 18 bp, Homo sapiens
tgccttgcgtcatctcac

SEQ ID NO: 16821 - DNA, 16 bp, Homo sapiens
ctggtgggccgcccct

SEQ ID NO: 16822 - DNA, 20 bp, Homo sapiens
ggacccaaaggatcgaaagg

SEQ ID NO: 16823 - DNA, 17 bp, Homo sapiens
ggcttccaggccagagt

SEQ ID NO: 16824 - DNA, 22 bp, Homo sapiens
cagctgtagtcactcacctgga

SEQ ID NO: 16825 - DNA, 20 bp, Homo sapiens
aatcctctcagtccctcctt

SEQ ID NO: 16826 - DNA, 16 bp, Homo sapiens
gggagtgggaggaggg

SEQ ID NO: 16827 - DNA, 21 bp, Homo sapiens
cctccatcatgtggcccttga

SEQ ID NO: 16828 - DNA, 16 bp, Homo sapiens
ccctggcagcccctgc

SEQ ID NO: 16829 - DNA, 16 bp, Homo sapiens
aggccggaggggggtc

SEQ ID NO: 16830 - DNA, 18 bp, Homo sapiens
caggaagcccatctggtc

SEQ ID NO: 16831 - DNA, 16 bp, Homo sapiens
ccgccccccacacccg

SEQ ID NO: 16832 - DNA, 19 bp, Homo sapiens
ggagccaccatctgttaat

SEQ ID NO: 16833 - DNA, 24 bp, Homo sapiens
ttttatgtaccccccagggcctgc

SEQ ID NO: 16834 - DNA, 24 bp, Homo sapiens
ccatccaagtttccaaacgggctc

SEQ ID NO: 16835 - DNA, 17 bp, Homo sapiens
gagggcatcgctggacc

SEQ ID NO: 16836 - DNA, 17 bp, Homo sapiens
aggggaggagatggttg

SEQ ID NO: 16837 - DNA, 16 bp, Homo sapiens
catggggccagggtcc

SEQ ID NO: 16838 - DNA, 18 bp, Homo sapiens
catcctggagtgtgaccc

SEQ ID NO: 16839 - DNA, 18 bp, Homo sapiens
ctgggggtccctgtgctc

SEQ ID NO: 16840 - DNA, 21 bp, Homo sapiens
atctgcttccttggctgtatc

SEQ ID NO: 16841 - DNA, 16 bp, Homo sapiens
tcaaggcagaaagggc

SEQ ID NO: 16842 - DNA, 24 bp, Homo sapiens
ttaacagggggagcagggagacga

SEQ ID NO: 16843 - DNA, 18 bp, Homo sapiens
ctccattttcacacaggc

SEQ ID NO: 16844 - DNA, 20 bp, Homo sapiens
atccaggtgtggccggctta

SEQ ID NO: 16845 - DNA, 23 bp, Homo sapiens
attctggttcaagcttggggcag

SEQ ID NO: 16846 - DNA, 24 bp, Homo sapiens
cttgccagggggacccagctgtcc

SEQ ID NO: 16847 - DNA, 19 bp, Homo sapiens
ccagcattctgcaatctcg

SEQ ID NO: 16848 - DNA, 18 bp, Homo sapiens
caggctccccctggtttc

SEQ ID NO: 16849 - DNA, 18 bp, Homo sapiens
ctcctcctgccttagaac

SEQ ID NO: 16850 - DNA, 18 bp, Homo sapiens
catgtgtgagtgcgtggg

SEQ ID NO: 16851 - DNA, 23 bp, Homo sapiens
tctttaagggtgagagtgggtta

SEQ ID NO: 16852 - DNA, 21 bp, Homo sapiens
gtgtttgtgtgtgtgtatgag

SEQ ID NO: 16853 - DNA, 17 bp, Homo sapiens
gaacggggctccctgga

SEQ ID NO: 16854 - DNA, 24 bp, Homo sapiens
atggtatctggtacccagatttta

SEQ ID NO: 16855 - DNA, 21 bp, Homo sapiens
gaagcccatctcgccagagtc

SEQ ID NO: 16856 - DNA, 24 bp, Homo sapiens
tggtcgcttcacagaggagtcact

SEQ ID NO: 16857 - DNA, 22 bp, Homo sapiens
ccccacaggaacagtgagccgt

SEQ ID NO: 16858 - DNA, 16 bp, Homo sapiens
gaggtcccaggtggct

SEQ ID NO: 16859 - DNA, 24 bp, Homo sapiens
agtgctccataaatatttgttgaa

SEQ ID NO: 16860 - DNA, 18 bp, Homo sapiens
ctgttcttcctgcagggc

SEQ ID NO: 16861 - DNA, 24 bp, Homo sapiens
ttctggagtactgggggatgaggg

SEQ ID NO: 16862 - DNA, 21 bp, Homo sapiens
tgtaggtgtttcttactcctt

SEQ ID NO: 16863 - DNA, 23 bp, Homo sapiens
gaactcaccatcaagccaggtgg

SEQ ID NO: 16864 - DNA, 19 bp, Homo sapiens
aaggttgacagaccccagg

SEQ ID NO: 16865 - DNA, 16 bp, Homo sapiens
gctggccaaccttggg

SEQ ID NO: 16866 - DNA, 23 bp, Homo sapiens
ccaagtacagacagccctttctc

SEQ ID NO: 16867 - DNA, 16 bp, Homo sapiens
ctgtgggcagaaaggg

SEQ ID NO: 16868 - DNA, 24 bp, Homo sapiens
aaaggcatccagggccctcggggg

SEQ ID NO: 16869 - DNA, 16 bp, Homo sapiens
caggattccgaggggc

SEQ ID NO: 16870 - DNA, 24 bp, Homo sapiens
gcttcagatggtctcccttctact

SEQ ID NO: 16871 - DNA, 18 bp, Homo sapiens
aggaaggcaaggggaccc

SEQ ID NO: 16872 - DNA, 23 bp, Homo sapiens
ccccgtgtctgttccccaggccc

SEQ ID NO: 16873 - DNA, 24 bp, Homo sapiens
ccatttccagatgaggaaactgag

SEQ ID NO: 16874 - DNA, 16 bp, Homo sapiens
ggaaggcatcgtcggg

SEQ ID NO: 16875 - DNA, 18 bp, Homo sapiens
cggaccctgcaacaaacc

SEQ ID NO: 16876 - DNA, 20 bp, Homo sapiens
gggattggacaggaagactc

SEQ ID NO: 16877 - DNA, 16 bp, Homo sapiens
atccctcagccccagc

SEQ ID NO: 16878 - DNA, 17 bp, Homo sapiens
tcagtgccagtctgagc

SEQ ID NO: 16879 - DNA, 23 bp, Homo sapiens
gagagttagggaacctggctgag

SEQ ID NO: 16880 - DNA, 24 bp, Homo sapiens
gccctgtctcactgggccgtggtt

SEQ ID NO: 16881 - DNA, 17 bp, Homo sapiens
cccactcaccctcggac

SEQ ID NO: 16882 - DNA, 24 bp, Homo sapiens
cgtggggactgggtaagtggatgg

SEQ ID NO: 16883 - DNA, 20 bp, Homo sapiens
taccaccgggaggagaatgc

SEQ ID NO: 16884 - DNA, 16 bp, Homo sapiens
gctcccagagttgggc

SEQ ID NO: 16885 - DNA, 17 bp, Homo sapiens
cccagggacaatggttc

SEQ ID NO: 16886 - DNA, 17 bp, Homo sapiens
ccagggattgcaaggtc

SEQ ID NO: 16887 - DNA, 21 bp, Homo sapiens
gggggccgggccgccctctgg

SEQ ID NO: 16888 - DNA, 18 bp, Homo sapiens
cgtcatcccgtctgtgcc

SEQ ID NO: 16889 - DNA, 17 bp, Homo sapiens
tccttcaaaggaacccc

SEQ ID NO: 16890 - DNA, 19 bp, Homo sapiens
ggactgggttggggagaga

SEQ ID NO: 16891 - DNA, 20 bp, Homo sapiens
ctacaagaacccctgtgggg

SEQ ID NO: 16892 - DNA, 23 bp, Homo sapiens
gttcccccagggtcctcccggcc

SEQ ID NO: 16893 - DNA, 21 bp, Homo sapiens
tccagaaaagcatagaccagc

SEQ ID NO: 16894 - DNA, 21 bp, Homo sapiens
gcaaaagagaaggtttccaac

SEQ ID NO: 16895 - DNA, 24 bp, Homo sapiens
ccagcttggcaggtcctgcatgct

SEQ ID NO: 16896 - DNA, 16 bp, Homo sapiens
cagagagggccagcag

SEQ ID NO: 16897 - DNA, 24 bp, Homo sapiens
cagcacactgtccctgtcatttga

SEQ ID NO: 16898 - DNA, 22 bp, Homo sapiens
aagtctccagtatgaagtgaca

SEQ ID NO: 16899 - DNA, 22 bp, Homo sapiens
cccaagatcatcttgttgctgg

SEQ ID NO: 16900 - DNA, 24 bp, Homo sapiens
gtctgcaaagagaggaaggaccga

SEQ ID NO: 16901 - DNA, 20 bp, Homo sapiens
ggagatacctctggcctgag

SEQ ID NO: 16902 - DNA, 16 bp, Homo sapiens
gaatgtggccctgggg

SEQ ID NO: 16903 - DNA, 24 bp, Homo sapiens
acatgtgggccattatctatttgc

SEQ ID NO: 16904 - DNA, 24 bp, Homo sapiens
cacgatacataccctgtcttttcc

SEQ ID NO: 16905 - DNA, 16 bp, Homo sapiens
gccaccaagaccagga

SEQ ID NO: 16906 - DNA, 18 bp, Homo sapiens
ggatggacaccagtggag

SEQ ID NO: 16907 - DNA, 17 bp, Homo sapiens
ccagcaccagccggtct

SEQ ID NO: 16908 - DNA, 21 bp, Homo sapiens
ctctagccatgaccgtggaac

SEQ ID NO: 16909 - DNA, 22 bp, Homo sapiens
cgtcttaatgctctggatgagg

SEQ ID NO: 16910 - DNA, 24 bp, Homo sapiens
ctgtggaggcttgaaccccaggct

SEQ ID NO: 16911 - DNA, 24 bp, Homo sapiens
tcttctgctcacagtccatgaggt

SEQ ID NO: 16912 - DNA, 21 bp, Homo sapiens
gtgacagagttacagctatcc

SEQ ID NO: 16913 - DNA, 17 bp, Homo sapiens
agctccccaccgccagg

SEQ ID NO: 16914 - DNA, 22 bp, Homo sapiens
accttacactacctcagcaacc

SEQ ID NO: 16915 - DNA, 18 bp, Homo sapiens
ttgctgaggacaaaaact

SEQ ID NO: 16916 - DNA, 16 bp, Homo sapiens
gggtctgcagggacct

SEQ ID NO: 16917 - DNA, 24 bp, Homo sapiens
ggatcttggtatattgtgaggctc

SEQ ID NO: 16918 - DNA, 22 bp, Homo sapiens
catctcggttggaggaatccct

SEQ ID NO: 16919 - DNA, 23 bp, Homo sapiens
catgagtgaagttgcaggagacc

SEQ ID NO: 16920 - DNA, 19 bp, Homo sapiens
caggtcacaagatgcaggg

SEQ ID NO: 16921 - DNA, 23 bp, Homo sapiens
cagtgtgggagctgatgggtacc

SEQ ID NO: 16922 - DNA, 24 bp, Homo sapiens
atacatacatcacctccatcccac

SEQ ID NO: 16923 - DNA, 18 bp, Homo sapiens
ctgggttggttgtggccc

SEQ ID NO: 16924 - DNA, 23 bp, Homo sapiens
cttggctgctcctctgacaccat

SEQ ID NO: 16925 - DNA, 19 bp, Homo sapiens
gaaggaggcgataactttc

SEQ ID NO: 16926 - DNA, 18 bp, Homo sapiens
caagcccatcacggcctc

SEQ ID NO: 16927 - DNA, 20 bp, Homo sapiens
gaaattcatctggacccggc

SEQ ID NO: 16928 - DNA, 20 bp, Homo sapiens
gagcatatcaggaaatgctt

SEQ ID NO: 16929 - DNA, 22 bp, Homo sapiens
ggtcatgttaaggcagtggatg

SEQ ID NO: 16930 - DNA, 16 bp, Homo sapiens
ctcggtgtggggggtg

SEQ ID NO: 16931 - DNA, 24 bp, Homo sapiens
cattccaggcccggaagcgtacgg

SEQ ID NO: 16932 - DNA, 23 bp, Homo sapiens
ctataggtcgagtttgccatcag

SEQ ID NO: 16933 - DNA, 24 bp, Homo sapiens
cagccatccatggacacctcgggc

SEQ ID NO: 16934 - DNA, 16 bp, Homo sapiens
tgacccagcacatcac

SEQ ID NO: 16935 - DNA, 20 bp, Homo sapiens
tgtttttccagttgtcccca

SEQ ID NO: 16936 - DNA, 17 bp, Homo sapiens
gcagaccccagccaagc

SEQ ID NO: 16937 - DNA, 29 bp, Homo sapiens
attaatatagtatactattaaaatgttag

SEQ ID NO: 16938 - DNA, 16 bp, Homo sapiens
tgggggtcagttccgg

SEQ ID NO: 16939 - DNA, 24 bp, Homo sapiens
taaaaacgattttagaaaactgtt

SEQ ID NO: 16940 - DNA, 18 bp, Homo sapiens
ccagcggccatcttggac

SEQ ID NO: 16941 - DNA, 24 bp, Homo sapiens
gcaatctaaatgtgccatataggt

SEQ ID NO: 16942 - DNA, 19 bp, Homo sapiens
cacactgatgatgggcagc

SEQ ID NO: 16943 - DNA, 24 bp, Homo sapiens
gaggaaagatggaagggaaaatgc

SEQ ID NO: 16944 - DNA, 18 bp, Homo sapiens
cacgcaggtccaacttcc

SEQ ID NO: 16945 - DNA, 23 bp, Homo sapiens
cacttttccttctgccttcaggt

SEQ ID NO: 16946 - DNA, 23 bp, Homo sapiens
ccttgcctcttcctcttccctcc

SEQ ID NO: 16947 - DNA, 18 bp, Homo sapiens
cccaagacccccaacagc

SEQ ID NO: 16948 - DNA, 16 bp, Homo sapiens
tgggcaggggagctgc

SEQ ID NO: 16949 - DNA, 20 bp, Homo sapiens
catcagggaagcagtaccgc

SEQ ID NO: 16950 - DNA, 16 bp, Homo sapiens
atcccctcctaccccc

SEQ ID NO: 16951 - DNA, 24 bp, Homo sapiens
cagaaccacggagcctttgctgga

SEQ ID NO: 16952 - DNA, 18 bp, Homo sapiens
ccttcagtggcagcttgc

SEQ ID NO: 16953 - DNA, 20 bp, Homo sapiens
tgttccttcagccacacgag

SEQ ID NO: 16954 - DNA, 17 bp, Homo sapiens
tgtctgcaggggctggc

SEQ ID NO: 16955 - DNA, 19 bp, Homo sapiens
acgcaggaagacagacacc

SEQ ID NO: 16956 - DNA, 24 bp, Homo sapiens
ctcgactcccgccagacgctatgt

SEQ ID NO: 16957 - DNA, 17 bp, Homo sapiens
agacaggctgacaaccc

SEQ ID NO: 16958 - DNA, 16 bp, Homo sapiens
gacacctcgtgcatcc

SEQ ID NO: 16959 - DNA, 23 bp, Homo sapiens
ttttcctagttccagttcaagac

SEQ ID NO: 16960 - DNA, 19 bp, Homo sapiens
ccttctggccaatgttggc

SEQ ID NO: 16961 - DNA, 24 bp, Homo sapiens
gtcctttttccttcttactgtgac

SEQ ID NO: 16962 - DNA, 19 bp, Homo sapiens
cgcctggtacctttttggc

SEQ ID NO: 16963 - DNA, 17 bp, Homo sapiens
ctgctgcatgcggatgg

SEQ ID NO: 16964 - DNA, 17 bp, Homo sapiens
gagcatccaccactgcc

SEQ ID NO: 16965 - DNA, 21 bp, Homo sapiens
cgcttctgcttctcaggccaa

SEQ ID NO: 16966 - DNA, 24 bp, Homo sapiens
tgagagcaggatgatctcatactc

SEQ ID NO: 16967 - DNA, 24 bp, Homo sapiens
gaagaaggcactgaagcttggggc

SEQ ID NO: 16968 - DNA, 23 bp, Homo sapiens
tgacatcctcaatgaacacctac

SEQ ID NO: 16969 - DNA, 22 bp, Homo sapiens
ctactacagatgcagaagaaga

SEQ ID NO: 16970 - DNA, 16 bp, Homo sapiens
gcgctggactggatgg

SEQ ID NO: 16971 - DNA, 17 bp, Homo sapiens
cagctagctgaggcccc

SEQ ID NO: 16972 - DNA, 21 bp, Homo sapiens
ccacttgtttgcgggcgatgc

SEQ ID NO: 16973 - DNA, 22 bp, Homo sapiens
cttccttctgggctcctcttcc

SEQ ID NO: 16974 - DNA, 19 bp, Homo sapiens
ctcacctttcctgtggcgc

SEQ ID NO: 16975 - DNA, 23 bp, Homo sapiens
aggagttcatctggccggccatc

SEQ ID NO: 16976 - DNA, 21 bp, Homo sapiens
tgctcatctccttcccacacc

SEQ ID NO: 16977 - DNA, 18 bp, Homo sapiens
gcacctctcttgccaggc

SEQ ID NO: 16978 - DNA, 24 bp, Homo sapiens
ccatgtagctgccttgcaccaagt

SEQ ID NO: 16979 - DNA, 24 bp, Homo sapiens
ggagggggccaagtatgtgtccca

SEQ ID NO: 16980 - DNA, 23 bp, Homo sapiens
cccacacatacacgacctacact

SEQ ID NO: 16981 - DNA, 20 bp, Homo sapiens
agccacatcctacctttatc

SEQ ID NO: 16982 - DNA, 17 bp, Homo sapiens
cgggctgtccttgtcct

SEQ ID NO: 16983 - DNA, 24 bp, Homo sapiens
tcccagaaccctgtgccctcctcc

SEQ ID NO: 16984 - DNA, 17 bp, Homo sapiens
ctgacagccctctgttc

SEQ ID NO: 16985 - DNA, 16 bp, Homo sapiens
cgatgggcacccctgc

SEQ ID NO: 16986 - DNA, 16 bp, Homo sapiens
gctactcactggcccc

SEQ ID NO: 16987 - DNA, 19 bp, Homo sapiens
tgtagaattcaggcatcct

SEQ ID NO: 16988 - DNA, 20 bp, Homo sapiens
catcctctctggggacatgc

SEQ ID NO: 16989 - DNA, 18 bp, Homo sapiens
gactcggccatacctttg

SEQ ID NO: 16990 - DNA, 24 bp, Homo sapiens
gcagcttacaggccaggggaagcc

SEQ ID NO: 16991 - DNA, 16 bp, Homo sapiens
ccccagcagggacgtg

SEQ ID NO: 16992 - DNA, 21 bp, Homo sapiens
ctatgtccaggtcattgctcc

SEQ ID NO: 16993 - DNA, 18 bp, Homo sapiens
gggtggaagttcaatccc

SEQ ID NO: 16994 - DNA, 19 bp, Homo sapiens
aatgacctgatggagtacg

SEQ ID NO: 16995 - DNA, 21 bp, Homo sapiens
gggatgggaatcccgtgttgc

SEQ ID NO: 16996 - DNA, 19 bp, Homo sapiens
accaacactaggaggtagc

SEQ ID NO: 16997 - DNA, 20 bp, Homo sapiens
tttacctgatgtgcatgagg

SEQ ID NO: 16998 - DNA, 21 bp, Homo sapiens
gctctctgaaaaagcagggcc

SEQ ID NO: 16999 - DNA, 16 bp, Homo sapiens
gtggccgtcctttgga

SEQ ID NO: 17000 - DNA, 21 bp, Homo sapiens
tccacctgtgctgtctctttc

SEQ ID NO: 17001 - DNA, 16 bp, Homo sapiens
gcctctcagctccccg

SEQ ID NO: 17002 - DNA, 20 bp, Homo sapiens
tggagcatggatgagaacct

SEQ ID NO: 17003 - DNA, 20 bp, Homo sapiens
ttctccaggattccagcctc

SEQ ID NO: 17004 - DNA, 17 bp, Homo sapiens
ggttggcagcagatgct

SEQ ID NO: 17005 - DNA, 17 bp, Homo sapiens
ctaccaccaaaggtggc

SEQ ID NO: 17006 - DNA, 23 bp, Homo sapiens
aatggggtgtgtgtgttggggga

SEQ ID NO: 17007 - DNA, 19 bp, Homo sapiens
cccccgtgaaatttcaaat

SEQ ID NO: 17008 - DNA, 16 bp, Homo sapiens
cctttcccctccgcag

SEQ ID NO: 17009 - DNA, 16 bp, Homo sapiens
gggccagtgcgggggt

SEQ ID NO: 17010 - DNA, 16 bp, Homo sapiens
ctgagggctggggacc

SEQ ID NO: 17011 - DNA, 20 bp, Homo sapiens
gagaatgtcaggggtgttgg

SEQ ID NO: 17012 - DNA, 23 bp, Homo sapiens
gacagaggagaggggtgcagatc

SEQ ID NO: 17013 - DNA, 16 bp, Homo sapiens
aacccccttcgagtcc

SEQ ID NO: 17014 - DNA, 24 bp, Homo sapiens
gtatgtcatctgcccaccactttc

SEQ ID NO: 17015 - DNA, 16 bp, Homo sapiens
cgggggtaaagagggc

SEQ ID NO: 17016 - DNA, 23 bp, Homo sapiens
aagacccaggacccagccaaagc

SEQ ID NO: 17017 - DNA, 23 bp, Homo sapiens
cagggaggtgggctgtgcgttac

SEQ ID NO: 17018 - DNA, 18 bp, Homo sapiens
accttcacagggacccct

SEQ ID NO: 17019 - DNA, 22 bp, Homo sapiens
gcttttgaaggagtcatttgga

SEQ ID NO: 17020 - DNA, 20 bp, Homo sapiens
tcgttcaggtacatgaagag

SEQ ID NO: 17021 - DNA, 24 bp, Homo sapiens
tcgggaggagggagagggtggggt

SEQ ID NO: 17022 - DNA, 16 bp, Homo sapiens
ccgagacggcggttcc

SEQ ID NO: 17023 - DNA, 17 bp, Homo sapiens
tgccctctcttcccacc

SEQ ID NO: 17024 - DNA, 16 bp, Homo sapiens
cctgtgctccgcaccc

SEQ ID NO: 17025 - DNA, 18 bp, Homo sapiens
ccaccagacctccttgga

SEQ ID NO: 17026 - DNA, 16 bp, Homo sapiens
tgccaaatgggtcccc

SEQ ID NO: 17027 - DNA, 16 bp, Homo sapiens
cacgccatgcttgccc

SEQ ID NO: 17028 - DNA, 18 bp, Homo sapiens
tcagatgtcctcttgagt

SEQ ID NO: 17029 - DNA, 17 bp, Homo sapiens
gactcacctcgggactt

SEQ ID NO: 17030 - DNA, 24 bp, Homo sapiens
agctgtgcccaccctgggacagcc

SEQ ID NO: 17031 - DNA, 16 bp, Homo sapiens
gtctcagggatctctg

SEQ ID NO: 17032 - DNA, 20 bp, Homo sapiens
taatggaccagttcttccca

SEQ ID NO: 17033 - DNA, 17 bp, Homo sapiens
gtgaaaggacgtgccca

SEQ ID NO: 17034 - DNA, 24 bp, Homo sapiens
gaaccgcttcattggaatgaagtc

SEQ ID NO: 17035 - DNA, 24 bp, Homo sapiens
ttttgcagcaagctgggagtgaat

SEQ ID NO: 17036 - DNA, 20 bp, Homo sapiens
catggtgaaggcctcgatgt

SEQ ID NO: 17037 - DNA, 23 bp, Homo sapiens
attatttttttttttgtcatttg

SEQ ID NO: 17038 - DNA, 19 bp, Homo sapiens
acaccagctcagcaaattt

SEQ ID NO: 17039 - DNA, 22 bp, Homo sapiens
tttctccttttccccctgcctg

SEQ ID NO: 17040 - DNA, 23 bp, Homo sapiens
gtactttgggatcccttgtgagg

SEQ ID NO: 17041 - DNA, 23 bp, Homo sapiens
ctttaccatgctcatttagacat

SEQ ID NO: 17042 - DNA, 16 bp, Homo sapiens
gcaggggaggaaggtg

SEQ ID NO: 17043 - DNA, 24 bp, Homo sapiens
aaaatcaaacaaggcctgggcttg

SEQ ID NO: 17044 - DNA, 20 bp, Homo sapiens
gtggcggacaaattcacact

SEQ ID NO: 17045 - DNA, 16 bp, Homo sapiens
gggaggcagtcatggt

SEQ ID NO: 17046 - DNA, 20 bp, Homo sapiens
cttgaggacggacacctgca

SEQ ID NO: 17047 - DNA, 18 bp, Homo sapiens
caggtctccctgtgtcct

SEQ ID NO: 17048 - DNA, 23 bp, Homo sapiens
ctacctcaccagctcctcattgt

SEQ ID NO: 17049 - DNA, 23 bp, Homo sapiens
ctccctgtaggtttctggcacag

SEQ ID NO: 17050 - DNA, 19 bp, Homo sapiens
aaaagataggctctgtgcc

SEQ ID NO: 17051 - DNA, 17 bp, Homo sapiens
cgagtggaagggaaagt

SEQ ID NO: 17052 - DNA, 22 bp, Homo sapiens
catcactctgtgctctgcatgg

SEQ ID NO: 17053 - DNA, 20 bp, Homo sapiens
gggagtccccactgtctctc

SEQ ID NO: 17054 - DNA, 23 bp, Homo sapiens
tggcatcagttggctcataatca

SEQ ID NO: 17055 - DNA, 20 bp, Homo sapiens
ggacccacacaggggaaatg

SEQ ID NO: 17056 - DNA, 16 bp, Homo sapiens
aaggcccgtcagggcc

SEQ ID NO: 17057 - DNA, 18 bp, Homo sapiens
ctcccttcaagcagaggc

SEQ ID NO: 17058 - DNA, 22 bp, Homo sapiens
atcaaagcctaccctttacacc

SEQ ID NO: 17059 - DNA, 24 bp, Homo sapiens
ttgcagcatgaacgtgcagggtga

SEQ ID NO: 17060 - DNA, 21 bp, Homo sapiens
ggacaggaaagtggggtttgt

SEQ ID NO: 17061 - DNA, 20 bp, Homo sapiens
gacgatgatattccttcagc

SEQ ID NO: 17062 - DNA, 22 bp, Homo sapiens
agggaatagaaaaaaaggcaac

SEQ ID NO: 17063 - DNA, 20 bp, Homo sapiens
ttgaggaggccccagctcct

SEQ ID NO: 17064 - DNA, 21 bp, Homo sapiens
cagctctgcctgaattaattg

SEQ ID NO: 17065 - DNA, 21 bp, Homo sapiens
gggagaacaagtcacaattac

SEQ ID NO: 17066 - DNA, 24 bp, Homo sapiens
tctttgttttgaatctggtttaca

SEQ ID NO: 17067 - DNA, 16 bp, Homo sapiens
ggaccagggaacaaag

SEQ ID NO: 17068 - DNA, 17 bp, Homo sapiens
gatgaggtagaccacgc

SEQ ID NO: 17069 - DNA, 16 bp, Homo sapiens
ctccgaaggcaccagc

SEQ ID NO: 17070 - DNA, 18 bp, Homo sapiens
ctatccacggggagcagc

SEQ ID NO: 17071 - DNA, 18 bp, Homo sapiens
cagcagccccgagccgcc

SEQ ID NO: 17072 - DNA, 16 bp, Homo sapiens
ctcgggagcccccggc

SEQ ID NO: 17073 - DNA, 19 bp, Homo sapiens
ggcctgggtcagaactgag

SEQ ID NO: 17074 - DNA, 16 bp, Homo sapiens
cccagcccctcctctc

SEQ ID NO: 17075 - DNA, 18 bp, Homo sapiens
gaagtcggggtaaccccc

SEQ ID NO: 17076 - DNA, 16 bp, Homo sapiens
tgcgtcccggcagccc

SEQ ID NO: 17077 - DNA, 18 bp, Homo sapiens
ccctcatgggtgggggcc

SEQ ID NO: 17078 - DNA, 17 bp, Homo sapiens
agccctgggcaacttct

SEQ ID NO: 17079 - DNA, 18 bp, Homo sapiens
gtctgggtacaccaggct

SEQ ID NO: 17080 - DNA, 19 bp, Homo sapiens
caatggcctctacgggagc

SEQ ID NO: 17081 - DNA, 17 bp, Homo sapiens
ggggatggggggacacc

SEQ ID NO: 17082 - DNA, 16 bp, Homo sapiens
ctgactgagcctctgc

SEQ ID NO: 17083 - DNA, 17 bp, Homo sapiens
gccaggcctccatgctc

SEQ ID NO: 17084 - DNA, 16 bp, Homo sapiens
ccaggggtgcctccgc

SEQ ID NO: 17085 - DNA, 19 bp, Homo sapiens
ggtgggttcccccaagctc

SEQ ID NO: 17086 - DNA, 16 bp, Homo sapiens
caacagtagaaggggc

SEQ ID NO: 17087 - DNA, 23 bp, Homo sapiens
caggttctgtaagtgaaatgctt

SEQ ID NO: 17088 - DNA, 18 bp, Homo sapiens
gctccaagtcggacaagg

SEQ ID NO: 17089 - DNA, 23 bp, Homo sapiens
tgggaaattcagatccgcgggct

SEQ ID NO: 17090 - DNA, 17 bp, Homo sapiens
ggacgccggccggcagc

SEQ ID NO: 17091 - DNA, 16 bp, Homo sapiens
cccgagctccgcgatc

SEQ ID NO: 17092 - DNA, 16 bp, Homo sapiens
accccgccccgccccc

SEQ ID NO: 17093 - DNA, 17 bp, Homo sapiens
cccctcctgaacgctgt

SEQ ID NO: 17094 - DNA, 16 bp, Homo sapiens
ctcgcccctgcttccc

SEQ ID NO: 17095 - DNA, 24 bp, Homo sapiens
gttgcggaaatactgcccccagcg

SEQ ID NO: 17096 - DNA, 16 bp, Homo sapiens
gtgcgcgagcagctct

SEQ ID NO: 17097 - DNA, 17 bp, Homo sapiens
ggttctggaaccaaacc

SEQ ID NO: 17098 - DNA, 17 bp, Homo sapiens
cgccaagcagctggaga

SEQ ID NO: 17099 - DNA, 23 bp, Homo sapiens
gcccccaaggccgcgggcgggag

SEQ ID NO: 17100 - DNA, 16 bp, Homo sapiens
cgctcgcccgccgcgc

SEQ ID NO: 17101 - DNA, 18 bp, Homo sapiens
caggcccgtctcggacga

SEQ ID NO: 17102 - DNA, 24 bp, Homo sapiens
gacgtccccgcgccggccggggtg

SEQ ID NO: 17103 - DNA, 21 bp, Homo sapiens
gttgtaagcgctcttcagcgt

SEQ ID NO: 17104 - DNA, 18 bp, Homo sapiens
ccgcgccttccgagaagc

SEQ ID NO: 17105 - DNA, 22 bp, Homo sapiens
cgcttggccgtggcctcggcct

SEQ ID NO: 17106 - DNA, 21 bp, Homo sapiens
tacgaaaccgccaagcagcga

SEQ ID NO: 17107 - DNA, 19 bp, Homo sapiens
ctacaccgccctagcccag

SEQ ID NO: 17108 - DNA, 16 bp, Homo sapiens
ccacgggcgacgagtt

SEQ ID NO: 17109 - DNA, 22 bp, Homo sapiens
ggacgcccccctgggcgtggcc

SEQ ID NO: 17110 - DNA, 16 bp, Homo sapiens
gcgcccaggacttcgt

SEQ ID NO: 17111 - DNA, 16 bp, Homo sapiens
gtcccctcggctgacc

SEQ ID NO: 17112 - DNA, 16 bp, Homo sapiens
tcgggaccaagtgcgc

SEQ ID NO: 17113 - DNA, 22 bp, Homo sapiens
ctgtcctccatgaggtagaact

SEQ ID NO: 17114 - DNA, 17 bp, Homo sapiens
cggggcgaaatgagcct

SEQ ID NO: 17115 - DNA, 23 bp, Homo sapiens
gcaaagcagtgcaggtggtacac

SEQ ID NO: 17116 - DNA, 16 bp, Homo sapiens
ggacagagccttcctc

SEQ ID NO: 17117 - DNA, 24 bp, Homo sapiens
gggcgggatgcccagctggcacgc

SEQ ID NO: 17118 - DNA, 24 bp, Homo sapiens
tgcaaggacgactttttcaagtga

SEQ ID NO: 17119 - DNA, 19 bp, Homo sapiens
gtgccctgcctgggtgaca

SEQ ID NO: 17120 - DNA, 17 bp, Homo sapiens
cagcgactgccacacgc

SEQ ID NO: 17121 - DNA, 20 bp, Homo sapiens
tggccttggtgattgtgagg

SEQ ID NO: 17122 - DNA, 16 bp, Homo sapiens
cgcttcatcctcaagg

SEQ ID NO: 17123 - DNA, 24 bp, Homo sapiens
cacactgaggtgaggtttcggggc

SEQ ID NO: 17124 - DNA, 19 bp, Homo sapiens
cagaacttcctcgtgccca

SEQ ID NO: 17125 - DNA, 17 bp, Homo sapiens
gctgaagcagcgctcgg

SEQ ID NO: 17126 - DNA, 16 bp, Homo sapiens
ctggctcgcgttgggg

SEQ ID NO: 17127 - DNA, 19 bp, Homo sapiens
gccagtggcggtccagagc

SEQ ID NO: 17128 - DNA, 17 bp, Homo sapiens
gaagagggtgtgtaggg

SEQ ID NO: 17129 - DNA, 20 bp, Homo sapiens
gcactgctggcgcggagggc

SEQ ID NO: 17130 - DNA, 16 bp, Homo sapiens
gttccggggtcctcgc

SEQ ID NO: 17131 - DNA, 16 bp, Homo sapiens
gcggggagctgggccc

SEQ ID NO: 17132 - DNA, 24 bp, Homo sapiens
gcctccgcggccaggcccggaaag

SEQ ID NO: 17133 - DNA, 17 bp, Homo sapiens
gggcccgggaaagttcg

SEQ ID NO: 17134 - DNA, 17 bp, Homo sapiens
cccacctcggcgcaggt

SEQ ID NO: 17135 - DNA, 24 bp, Homo sapiens
gcgggcgcagcgcccagcagcacc

SEQ ID NO: 17136 - DNA, 19 bp, Homo sapiens
gccgactcccgggccgggc

SEQ ID NO: 17137 - DNA, 16 bp, Homo sapiens
cgctccgccctccgct

SEQ ID NO: 17138 - DNA, 19 bp, Homo sapiens
ccgccgccgtctgcacctt

SEQ ID NO: 17139 - DNA, 24 bp, Homo sapiens
gcagtttccatctctgtgtcccgc

SEQ ID NO: 17140 - DNA, 16 bp, Homo sapiens
tggccgcgatgctgct

SEQ ID NO: 17141 - DNA, 22 bp, Homo sapiens
cctgcacgcacccccttcctcg

SEQ ID NO: 17142 - DNA, 23 bp, Homo sapiens
gacttgggagccccgaaccctcc

SEQ ID NO: 17143 - DNA, 18 bp, Homo sapiens
gggcttaccccgagtccc

SEQ ID NO: 17144 - DNA, 18 bp, Homo sapiens
gacagcgccaggcccagt

SEQ ID NO: 17145 - DNA, 16 bp, Homo sapiens
gctcgagccccgtttc

SEQ ID NO: 17146 - DNA, 21 bp, Homo sapiens
acctccatataccaatgacaa

SEQ ID NO: 17147 - DNA, 23 bp, Homo sapiens
ttttaaagcatattgttcaaagt

SEQ ID NO: 17148 - DNA, 18 bp, Homo sapiens
ttcatagtgaccacacac

SEQ ID NO: 17149 - DNA, 21 bp, Homo sapiens
ctcagtgacaataaaaagcac

SEQ ID NO: 17150 - DNA, 18 bp, Homo sapiens
agcacagttgaacaggag

SEQ ID NO: 17151 - DNA, 24 bp, Homo sapiens
aaaatatcttttaaaaaattggtc

SEQ ID NO: 17152 - DNA, 16 bp, Homo sapiens
cttgccctgtggggac

SEQ ID NO: 17153 - DNA, 22 bp, Homo sapiens
cccatccaaagctcttcatcat

SEQ ID NO: 17154 - DNA, 19 bp, Homo sapiens
tcaaaggggccattttcta

SEQ ID NO: 17155 - DNA, 21 bp, Homo sapiens
ttcttactgtcaatcatggac

SEQ ID NO: 17156 - DNA, 23 bp, Homo sapiens
gccctttaagaaactagacaagt

SEQ ID NO: 17157 - DNA, 19 bp, Homo sapiens
accgctgtattgtcagtcc

SEQ ID NO: 17158 - DNA, 16 bp, Homo sapiens
cgccgtgcctgcctca

SEQ ID NO: 17159 - DNA, 23 bp, Homo sapiens
tggtcttgcattcattttttcag

SEQ ID NO: 17160 - DNA, 22 bp, Homo sapiens
tcctagtatccacagtaatatc

SEQ ID NO: 17161 - DNA, 24 bp, Homo sapiens
cattctcctcatgtgtcactgcca

SEQ ID NO: 17162 - DNA, 20 bp, Homo sapiens
cagctcaactggagaagaca

SEQ ID NO: 17163 - DNA, 22 bp, Homo sapiens
ggggaagcaacttttaagttgt

SEQ ID NO: 17164 - DNA, 21 bp, Homo sapiens
tttattttatcagtgggcaag

SEQ ID NO: 17165 - DNA, 24 bp, Homo sapiens
ttctgtgcaatatatatattgccg

SEQ ID NO: 17166 - DNA, 20 bp, Homo sapiens
acaggcaatgtaatcattgc

SEQ ID NO: 17167 - DNA, 21 bp, Homo sapiens
ctgacattcaggagcactgtc

SEQ ID NO: 17168 - DNA, 22 bp, Homo sapiens
cttccttctatctctcttgagt

SEQ ID NO: 17169 - DNA, 25 bp, Homo sapiens
ctaacttgatcattctttttcttgc

SEQ ID NO: 17170 - DNA, 20 bp, Homo sapiens
tctgaaggttacaacacagc

SEQ ID NO: 17171 - DNA, 23 bp, Homo sapiens
gcatgcttctgatcataagtcat

SEQ ID NO: 17172 - DNA, 17 bp, Homo sapiens
aggtaccagcgtatgac

SEQ ID NO: 17173 - DNA, 24 bp, Homo sapiens
cactttggagaacacacagaaggc

SEQ ID NO: 17174 - DNA, 22 bp, Homo sapiens
aggaggaatcagaatcaggtag

SEQ ID NO: 17175 - DNA, 23 bp, Homo sapiens
tactgtgatctctttcaaagtgc

SEQ ID NO: 17176 - DNA, 21 bp, Homo sapiens
atatccctgaagagggcagtg

SEQ ID NO: 17177 - DNA, 22 bp, Homo sapiens
cttttggtttgcattcttgctt

SEQ ID NO: 17178 - DNA, 19 bp, Homo sapiens
aagaagaaagtggaccagc

SEQ ID NO: 17179 - DNA, 19 bp, Homo sapiens
tgactttcgctactactgc

SEQ ID NO: 17180 - DNA, 23 bp, Homo sapiens
taggaaagaggagccacaagaag

SEQ ID NO: 17181 - DNA, 21 bp, Homo sapiens
ctccttccaccgaagctgatt

SEQ ID NO: 17182 - DNA, 22 bp, Homo sapiens
ggaaaaacattgtgcttgcaag

SEQ ID NO: 17183 - DNA, 22 bp, Homo sapiens
gtctgtactttcttccacaggg

SEQ ID NO: 17184 - DNA, 20 bp, Homo sapiens
ttccacccctgaatcagaag

SEQ ID NO: 17185 - DNA, 24 bp, Homo sapiens
cttccatcttaggttctttttgtt

SEQ ID NO: 17186 - DNA, 20 bp, Homo sapiens
tgagtctgagactacagaag

SEQ ID NO: 17187 - DNA, 21 bp, Homo sapiens
cctcaaccatgggccttcttc

SEQ ID NO: 17188 - DNA, 21 bp, Homo sapiens
atcagaggaggaatcctccag

SEQ ID NO: 17189 - DNA, 23 bp, Homo sapiens
ttctgactctgtggattccgatt

SEQ ID NO: 17190 - DNA, 24 bp, Homo sapiens
tgaggaagaagataaagattattt

SEQ ID NO: 17191 - DNA, 22 bp, Homo sapiens
ggtgtctctgactcagattcct

SEQ ID NO: 17192 - DNA, 21 bp, Homo sapiens
gctgataaaagaggaatcgtt

SEQ ID NO: 17193 - DNA, 20 bp, Homo sapiens
attcagtatagtcgctggag

SEQ ID NO: 17194 - DNA, 17 bp, Homo sapiens
acatggaagagagccag

SEQ ID NO: 17195 - DNA, 23 bp, Homo sapiens
gcttcctcttggtccagagtgag

SEQ ID NO: 17196 - DNA, 21 bp, Homo sapiens
agcctagtgaggaggaagaag

SEQ ID NO: 17197 - DNA, 20 bp, Homo sapiens
gccactcttcaccctcaagg

SEQ ID NO: 17198 - DNA, 20 bp, Homo sapiens
cacaattttcaggaagagcc

SEQ ID NO: 17199 - DNA, 22 bp, Homo sapiens
aaatcatggggaatattctggc

SEQ ID NO: 17200 - DNA, 19 bp, Homo sapiens
ctttcgtgggacaaggtca

SEQ ID NO: 17201 - DNA, 22 bp, Homo sapiens
gtggtttttcgatagttacaac

SEQ ID NO: 17202 - DNA, 21 bp, Homo sapiens
tgattattttcttaagccagt

SEQ ID NO: 17203 - DNA, 24 bp, Homo sapiens
tggttttttaattttctttggctc

SEQ ID NO: 17204 - DNA, 19 bp, Homo sapiens
aatatgaggaggaagaggt

SEQ ID NO: 17205 - DNA, 24 bp, Homo sapiens
gtcagcactgtgaaatttctatgg

SEQ ID NO: 17206 - DNA, 19 bp, Homo sapiens
ccgtcgattgttaccacca

SEQ ID NO: 17207 - DNA, 20 bp, Homo sapiens
tgttctacagccgctagtca

SEQ ID NO: 17208 - DNA, 26 bp, Homo sapiens
catgacaaactgtttaaagatgtaag

SEQ ID NO: 17209 - DNA, 22 bp, Homo sapiens
aattacagtaattacctcttcc

SEQ ID NO: 17210 - DNA, 21 bp, Homo sapiens
gcggaagaaaaagaaggaaac

SEQ ID NO: 17211 - DNA, 21 bp, Homo sapiens
ctcaccatattcctcctgtcc

SEQ ID NO: 17212 - DNA, 23 bp, Homo sapiens
agttttgtaactagtttacaagg

SEQ ID NO: 17213 - DNA, 23 bp, Homo sapiens
agctagatatactattcattttc

SEQ ID NO: 17214 - DNA, 23 bp, Homo sapiens
acaataggaattatccatggagt

SEQ ID NO: 17215 - DNA, 25 bp, Homo sapiens
aaaacaaattctagtaataataatc

SEQ ID NO: 17216 - DNA, 18 bp, Homo sapiens
actttgacctgaaacgtg

SEQ ID NO: 17217 - DNA, 27 bp, Homo sapiens
aataagaatctgaattttaaaaatctg

SEQ ID NO: 17218 - DNA, 20 bp, Homo sapiens
aagttattttggcaggaatg

SEQ ID NO: 17219 - DNA, 17 bp, Homo sapiens
ttcctggccaggatcaa

SEQ ID NO: 17220 - DNA, 24 bp, Homo sapiens
aaaacaatctcacagtcaatctac

SEQ ID NO: 17221 - DNA, 21 bp, Homo sapiens
cgagaaaaaaaactgcatttc

SEQ ID NO: 17222 - DNA, 24 bp, Homo sapiens
gaaatcacatctgaacaaaacaag

SEQ ID NO: 17223 - DNA, 24 bp, Homo sapiens
cgttcaaatttgatgttcaacttg

SEQ ID NO: 17224 - DNA, 20 bp, Homo sapiens
tctacgcacaaatgtttcag

SEQ ID NO: 17225 - DNA, 20 bp, Homo sapiens
agcaacattacagtgaagta

SEQ ID NO: 17226 - DNA, 23 bp, Homo sapiens
acacgttaaaaacttagcagaac

SEQ ID NO: 17227 - DNA, 24 bp, Homo sapiens
cgacaatattgttcaaactcccct

SEQ ID NO: 17228 - DNA, 21 bp, Homo sapiens
aacaacgacagtgtgtaaaac

SEQ ID NO: 17229 - DNA, 22 bp, Homo sapiens
gaagggcacatagtttgaagtt

SEQ ID NO: 17230 - DNA, 18 bp, Homo sapiens
gcacgaccaacttgatgc

SEQ ID NO: 17231 - DNA, 22 bp, Homo sapiens
acatgttagctactgatttttc

SEQ ID NO: 17232 - DNA, 17 bp, Homo sapiens
tccacctccttcagctt

SEQ ID NO: 17233 - DNA, 24 bp, Homo sapiens
tgccttttggttctctctgagggt

SEQ ID NO: 17234 - DNA, 24 bp, Homo sapiens
gtcccccaacaccacctcttctac

SEQ ID NO: 17235 - DNA, 24 bp, Homo sapiens
agaggacttaattttctcggcagg

SEQ ID NO: 17236 - DNA, 20 bp, Homo sapiens
cctcttcctcttcctcctcc

SEQ ID NO: 17237 - DNA, 21 bp, Homo sapiens
ctctgtggacagaaatgaagc

SEQ ID NO: 17238 - DNA, 20 bp, Homo sapiens
cctcctcctgacatttctcc

SEQ ID NO: 17239 - DNA, 23 bp, Homo sapiens
aggaagaggagttggaaatggag

SEQ ID NO: 17240 - DNA, 19 bp, Homo sapiens
ccccctcctcctcctattt

SEQ ID NO: 17241 - DNA, 23 bp, Homo sapiens
acggaaagtggaaaaaatgtagg

SEQ ID NO: 17242 - DNA, 23 bp, Homo sapiens
tgaaaccgaaagaaatatttttg

SEQ ID NO: 17243 - DNA, 20 bp, Homo sapiens
ggacaaaaaagagaaaaagg

SEQ ID NO: 17244 - DNA, 22 bp, Homo sapiens
gtgttttacattcttcactctc

SEQ ID NO: 17245 - DNA, 24 bp, Homo sapiens
aggaggaggagaaggaggagaaat

SEQ ID NO: 17246 - DNA, 19 bp, Homo sapiens
aatgtcatcagttctcctg

SEQ ID NO: 17247 - DNA, 23 bp, Homo sapiens
agagatgtttggtggatgggcaa

SEQ ID NO: 17248 - DNA, 19 bp, Homo sapiens
gcctcacttctcattctcc

SEQ ID NO: 17249 - DNA, 20 bp, Homo sapiens
acaaataggtgtctctctcc

SEQ ID NO: 17250 - DNA, 23 bp, Homo sapiens
actgatgatagaaggaacagaac

SEQ ID NO: 17251 - DNA, 22 bp, Homo sapiens
aaagttccaaggaacactcagc

SEQ ID NO: 17252 - DNA, 21 bp, Homo sapiens
tgcttacaactgaagaggcaa

SEQ ID NO: 17253 - DNA, 23 bp, Homo sapiens
cacagttcttgaaacagttggca

SEQ ID NO: 17254 - DNA, 20 bp, Homo sapiens
tgaaaatgaaaacactggaa

SEQ ID NO: 17255 - DNA, 24 bp, Homo sapiens
tgaagagtctgaagagagagattt

SEQ ID NO: 17256 - DNA, 23 bp, Homo sapiens
ggaaagttccaaatagaccagag

SEQ ID NO: 17257 - DNA, 24 bp, Homo sapiens
ttgccttatttcctctttctctgt

SEQ ID NO: 17258 - DNA, 21 bp, Homo sapiens
agagaaaagattcagaggctg

SEQ ID NO: 17259 - DNA, 24 bp, Homo sapiens
acctcttttgtttgtacagattcc

SEQ ID NO: 17260 - DNA, 23 bp, Homo sapiens
acagattttgtagacccattttc

SEQ ID NO: 17261 - DNA, 20 bp, Homo sapiens
actgctgcagatctatgatc

SEQ ID NO: 17262 - DNA, 24 bp, Homo sapiens
cccataatcccctttataaggaaa

SEQ ID NO: 17263 - DNA, 20 bp, Homo sapiens
taagctgactgactgactcc

SEQ ID NO: 17264 - DNA, 21 bp, Homo sapiens
tgaagtctgcaagaaaattca

SEQ ID NO: 17265 - DNA, 21 bp, Homo sapiens
actcttggcttgtattttggg

SEQ ID NO: 17266 - DNA, 22 bp, Homo sapiens
cttccaatactattgaggctca

SEQ ID NO: 17267 - DNA, 23 bp, Homo sapiens
gtctgaatttgttgatacttgac

SEQ ID NO: 17268 - DNA, 24 bp, Homo sapiens
aacaaagcaggggaaataactcag

SEQ ID NO: 17269 - DNA, 22 bp, Homo sapiens
cctcatcagatagaaatgtgaa

SEQ ID NO: 17270 - DNA, 22 bp, Homo sapiens
ccttacatttcattatcttctt

SEQ ID NO: 17271 - DNA, 24 bp, Homo sapiens
gtgatccgtctacatgagctgact

SEQ ID NO: 17272 - DNA, 23 bp, Homo sapiens
gtatttaatagtaatgagagcca

SEQ ID NO: 17273 - DNA, 22 bp, Homo sapiens
gttgatgtttcctgtcttctga

SEQ ID NO: 17274 - DNA, 24 bp, Homo sapiens
attaaaataatgtcttgctttagt

SEQ ID NO: 17275 - DNA, 21 bp, Homo sapiens
aattgggtgtggaagacaaaa

SEQ ID NO: 17276 - DNA, 22 bp, Homo sapiens
aactctagtaaaaacttctttt

SEQ ID NO: 17277 - DNA, 21 bp, Homo sapiens
actgtatttacagtacaacag

SEQ ID NO: 17278 - DNA, 25 bp, Homo sapiens
gtactaagtgtttgtttaaagcaag

SEQ ID NO: 17279 - DNA, 23 bp, Homo sapiens
tctaacgctcttctattagagtg

SEQ ID NO: 17280 - DNA, 19 bp, Homo sapiens
gaacttggagacagctcaa

SEQ ID NO: 17281 - DNA, 24 bp, Homo sapiens
tttcgtcttaacaaattttctctt

SEQ ID NO: 17282 - DNA, 16 bp, Homo sapiens
cagtggcagcgccccc

SEQ ID NO: 17283 - DNA, 24 bp, Homo sapiens
ccacatcagattgaaattaaatac

SEQ ID NO: 17284 - DNA, 17 bp, Homo sapiens
tgcacgaattcaggccg

SEQ ID NO: 17285 - DNA, 22 bp, Homo sapiens
agttcctgaacggtctacttac

SEQ ID NO: 17286 - DNA, 22 bp, Homo sapiens
ttctaaaatgagttttacaagc

SEQ ID NO: 17287 - DNA, 18 bp, Homo sapiens
ggcggaggcggcggcggc

SEQ ID NO: 17288 - DNA, 23 bp, Homo sapiens
ttttagtgggttcccctgataac

SEQ ID NO: 17289 - DNA, 16 bp, Homo sapiens
ccgcgggtaatgcggc

SEQ ID NO: 17290 - DNA, 21 bp, Homo sapiens
ggggatgcttttgtaattaca

SEQ ID NO: 17291 - DNA, 23 bp, Homo sapiens
cccaaacaggtttaaagtgtaag

SEQ ID NO: 17292 - DNA, 28 bp, Homo sapiens
agctcaattctatatatatcaaaccaag

SEQ ID NO: 17293 - DNA, 23 bp, Homo sapiens
aaatgttattaatgcaatagttc

SEQ ID NO: 17294 - DNA, 18 bp, Homo sapiens
tctgagcaggctgacttg

SEQ ID NO: 17295 - DNA, 22 bp, Homo sapiens
tctgtcattatgaatttaacgt

SEQ ID NO: 17296 - DNA, 25 bp, Homo sapiens
ttacatgaaaaggatgtgtaaaatg

SEQ ID NO: 17297 - DNA, 21 bp, Homo sapiens
ggttttggtcagctacagaca

SEQ ID NO: 17298 - DNA, 20 bp, Homo sapiens
tacgagatagacagacagat

SEQ ID NO: 17299 - DNA, 16 bp, Homo sapiens
ccttgttggctctggc

SEQ ID NO: 17300 - DNA, 22 bp, Homo sapiens
acgcaaagccatgttaccagag

SEQ ID NO: 17301 - DNA, 17 bp, Homo sapiens
actccagaggcagtgac

SEQ ID NO: 17302 - DNA, 24 bp, Homo sapiens
ggtttaccatccttgaatacttac

SEQ ID NO: 17303 - DNA, 24 bp, Homo sapiens
tggcaaactacttgatatcaataa

SEQ ID NO: 17304 - DNA, 20 bp, Homo sapiens
agcagaggatgatgatgaag

SEQ ID NO: 17305 - DNA, 20 bp, Homo sapiens
gctctttctctgctagcatc

SEQ ID NO: 17306 - DNA, 22 bp, Homo sapiens
ctctctttttaatgctggtcac

SEQ ID NO: 17307 - DNA, 24 bp, Homo sapiens
gcttgtgtttcaattagagaaaat

SEQ ID NO: 17308 - DNA, 22 bp, Homo sapiens
tccttccccataatacggctga

SEQ ID NO: 17309 - DNA, 23 bp, Homo sapiens
ttgcttatgctttttatatatgc

SEQ ID NO: 17310 - DNA, 21 bp, Homo sapiens
gccatcgatagaaatgagctt

SEQ ID NO: 17311 - DNA, 23 bp, Homo sapiens
tttcaggttctttgcttacactt

SEQ ID NO: 17312 - DNA, 22 bp, Homo sapiens
tccctagaagattacaccaaat

SEQ ID NO: 17313 - DNA, 24 bp, Homo sapiens
gtacttatagcctcaagtcagaat

SEQ ID NO: 17314 - DNA, 18 bp, Homo sapiens
gtgccaaggtcgtagtgg

SEQ ID NO: 17315 - DNA, 24 bp, Homo sapiens
acaaaaagcacttacttaaaaagc

SEQ ID NO: 17316 - DNA, 22 bp, Homo sapiens
tgtcatgtttgtactttgtttg

SEQ ID NO: 17317 - DNA, 24 bp, Homo sapiens
gggtcaattgcatagacagtcaag

SEQ ID NO: 17318 - DNA, 23 bp, Homo sapiens
tcatttactaaatgtcttttcaa

SEQ ID NO: 17319 - DNA, 23 bp, Homo sapiens
atgccggcgagctccaatggact

SEQ ID NO: 17320 - DNA, 23 bp, Homo sapiens
tttttcaagggtttatattcagt

SEQ ID NO: 17321 - DNA, 24 bp, Homo sapiens
tggaaaaaaagatagaagatctta

SEQ ID NO: 17322 - DNA, 20 bp, Homo sapiens
aagcctaaacctcaccaata

SEQ ID NO: 17323 - DNA, 18 bp, Homo sapiens
atcagctggatatgcaag

SEQ ID NO: 17324 - DNA, 29 bp, Homo sapiens
tcccctgaatctaaaataaaatttaaaaa

SEQ ID NO: 17325 - DNA, 18 bp, Homo sapiens
atggaaatttcagtgagt

SEQ ID NO: 17326 - DNA, 21 bp, Homo sapiens
aggagacaaaatcaattactc

SEQ ID NO: 17327 - DNA, 22 bp, Homo sapiens
ttgaaaatcagaaaccactgtg

SEQ ID NO: 17328 - DNA, 20 bp, Homo sapiens
gaggcacattggaaacaatg

SEQ ID NO: 17329 - DNA, 18 bp, Homo sapiens
caaccccttgtgtagatc

SEQ ID NO: 17330 - DNA, 17 bp, Homo sapiens
gggactgagcggcaaag

SEQ ID NO: 17331 - DNA, 24 bp, Homo sapiens
ctaacaatctgagtgaaaataata

SEQ ID NO: 17332 - DNA, 24 bp, Homo sapiens
ttccataatatgaggagatcctac

SEQ ID NO: 17333 - DNA, 23 bp, Homo sapiens
tctataaactgaaaacactgacc

SEQ ID NO: 17334 - DNA, 24 bp, Homo sapiens
attaaagagggaaaagaaggattt

SEQ ID NO: 17335 - DNA, 21 bp, Homo sapiens
gttttatctacttacgagtac

SEQ ID NO: 17336 - DNA, 22 bp, Homo sapiens
actgataaagatactggcaatt

SEQ ID NO: 17337 - DNA, 24 bp, Homo sapiens
ttgcaataacttgaaacttgaagt

SEQ ID NO: 17338 - DNA, 22 bp, Homo sapiens
cataagggttatcttttcctgc

SEQ ID NO: 17339 - DNA, 19 bp, Homo sapiens
aagccctgtatatgtttcc

SEQ ID NO: 17340 - DNA, 25 bp, Homo sapiens
gagggctttattgtgttattattac

SEQ ID NO: 17341 - DNA, 19 bp, Homo sapiens
agtctgtaggccatgacac

SEQ ID NO: 17342 - DNA, 23 bp, Homo sapiens
ttacttctgtactcagagtgaag

SEQ ID NO: 17343 - DNA, 23 bp, Homo sapiens
aaactaatatagctccaagtttc

SEQ ID NO: 17344 - DNA, 18 bp, Homo sapiens
catcccccagtgtttcag

SEQ ID NO: 17345 - DNA, 20 bp, Homo sapiens
tgcaaactacaggcttacag

SEQ ID NO: 17346 - DNA, 18 bp, Homo sapiens
tgtcctccaggcaataca

SEQ ID NO: 17347 - DNA, 19 bp, Homo sapiens
taattccgcataccttcac

SEQ ID NO: 17348 - DNA, 23 bp, Homo sapiens
agtgcagcaaatatttacttcag

SEQ ID NO: 17349 - DNA, 22 bp, Homo sapiens
acctccgatgtagaattttttc

SEQ ID NO: 17350 - DNA, 20 bp, Homo sapiens
catggcatctagaaatggct

SEQ ID NO: 17351 - DNA, 24 bp, Homo sapiens
ctgaatctcaatgtatactttagc

SEQ ID NO: 17352 - DNA, 24 bp, Homo sapiens
agctgtttaaacgaataggcaatc

SEQ ID NO: 17353 - DNA, 21 bp, Homo sapiens
accaggacaagctatgtactt

SEQ ID NO: 17354 - DNA, 23 bp, Homo sapiens
tgatattttagacataggtattt

SEQ ID NO: 17355 - DNA, 24 bp, Homo sapiens
tttggaattaataacatcacaggt

SEQ ID NO: 17356 - DNA, 27 bp, Homo sapiens
gtaaaagctttaagtagtataacttac

SEQ ID NO: 17357 - DNA, 22 bp, Homo sapiens
agaatttctttccttatagcgt

SEQ ID NO: 17358 - DNA, 22 bp, Homo sapiens
ccacttccagggaatcagcttg

SEQ ID NO: 17359 - DNA, 24 bp, Homo sapiens
cactctagttataaataggcattt

SEQ ID NO: 17360 - DNA, 22 bp, Homo sapiens
tccattcacatagataacacct

SEQ ID NO: 17361 - DNA, 19 bp, Homo sapiens
tccattgtttcaggaaatg

SEQ ID NO: 17362 - DNA, 21 bp, Homo sapiens
aacaattacatttaagatggg

SEQ ID NO: 17363 - DNA, 17 bp, Homo sapiens
gggaccatggttggtgt

SEQ ID NO: 17364 - DNA, 22 bp, Homo sapiens
tcaattcaatctgaaattaggc

SEQ ID NO: 17365 - DNA, 22 bp, Homo sapiens
aaaaataaatacatcatcttct

SEQ ID NO: 17366 - DNA, 19 bp, Homo sapiens
aagtctactcaccttcttc

SEQ ID NO: 17367 - DNA, 27 bp, Homo sapiens
atatcagaaatctcttatctttctctc

SEQ ID NO: 17368 - DNA, 24 bp, Homo sapiens
ttgattaatggcagcagcagaaat

SEQ ID NO: 17369 - DNA, 18 bp, Homo sapiens
ggggatttgatcatggag

SEQ ID NO: 17370 - DNA, 17 bp, Homo sapiens
tcccacgcttcacacag

SEQ ID NO: 17371 - DNA, 21 bp, Homo sapiens
aatttagaaacgcctaaacca

SEQ ID NO: 17372 - DNA, 16 bp, Homo sapiens
gcctgtgatgtccagc

SEQ ID NO: 17373 - DNA, 24 bp, Homo sapiens
acatcaattttgagagactccttt

SEQ ID NO: 17374 - DNA, 26 bp, Homo sapiens
tgttcttacttataatctttaacatg

SEQ ID NO: 17375 - DNA, 24 bp, Homo sapiens
atcaatacctatattcctcctgtg

SEQ ID NO: 17376 - DNA, 20 bp, Homo sapiens
aaccaggcaatccaataagt

SEQ ID NO: 17377 - DNA, 20 bp, Homo sapiens
gaatcttcactgtggcactg

SEQ ID NO: 17378 - DNA, 16 bp, Homo sapiens
gtgtctgccacctggt

SEQ ID NO: 17379 - DNA, 21 bp, Homo sapiens
tgtaagtttctaagagaaaaa

SEQ ID NO: 17380 - DNA, 21 bp, Homo sapiens
agtggaagaagattctggaag

SEQ ID NO: 17381 - DNA, 23 bp, Homo sapiens
ttgaaagaaaaaaatgtgctgtc

SEQ ID NO: 17382 - DNA, 20 bp, Homo sapiens
agtcgtgtgaggtatagagt

SEQ ID NO: 17383 - DNA, 26 bp, Homo sapiens
catcaaatagaccacataatgaaaag

SEQ ID NO: 17384 - DNA, 23 bp, Homo sapiens
actgtgttttaacttggtaacag

SEQ ID NO: 17385 - DNA, 22 bp, Homo sapiens
actcgtgttattactcttccag

SEQ ID NO: 17386 - DNA, 21 bp, Homo sapiens
gattttcacttctaaaagacc

SEQ ID NO: 17387 - DNA, 22 bp, Homo sapiens
ggaaactgtacatcatctactc

SEQ ID NO: 17388 - DNA, 22 bp, Homo sapiens
tcatgaagaaataatgatctgg

SEQ ID NO: 17389 - DNA, 21 bp, Homo sapiens
tgaagatgcagaccctcctgt

SEQ ID NO: 17390 - DNA, 22 bp, Homo sapiens
ggatgaaataagtaaaagaaca

SEQ ID NO: 17391 - DNA, 16 bp, Homo sapiens
tggtggctccggatgc

SEQ ID NO: 17392 - DNA, 22 bp, Homo sapiens
ttttgctgtcttgtgattcggt

SEQ ID NO: 17393 - DNA, 25 bp, Homo sapiens
taaactcctaattgtgttttacagg

SEQ ID NO: 17394 - DNA, 22 bp, Homo sapiens
cagaatattaatcaatgccttc

SEQ ID NO: 17395 - DNA, 19 bp, Homo sapiens
tgggagtcaatctagtaac

SEQ ID NO: 17396 - DNA, 20 bp, Homo sapiens
tgataggtgtacccttgact

SEQ ID NO: 17397 - DNA, 21 bp, Homo sapiens
gagtaatggaattgagaggat

SEQ ID NO: 17398 - DNA, 24 bp, Homo sapiens
ctaaagacaggaggataatcattc

SEQ ID NO: 17399 - DNA, 21 bp, Homo sapiens
aaatatttccattggaaaatc

SEQ ID NO: 17400 - DNA, 21 bp, Homo sapiens
ggtagaggcctttgatattta

SEQ ID NO: 17401 - DNA, 24 bp, Homo sapiens
ttgttatcaaaacatattataggt

SEQ ID NO: 17402 - DNA, 21 bp, Homo sapiens
cgcttttaaggagtttagatt

SEQ ID NO: 17403 - DNA, 21 bp, Homo sapiens
aaagcaggcaaccagaagtca

SEQ ID NO: 17404 - DNA, 20 bp, Homo sapiens
ccggataagaagcccagaag

SEQ ID NO: 17405 - DNA, 24 bp, Homo sapiens
gcaataccaggtggcattgttcca

SEQ ID NO: 17406 - DNA, 20 bp, Homo sapiens
actattcttctgcttattac

SEQ ID NO: 17407 - DNA, 20 bp, Homo sapiens
ttggtctggaaatgcctcat

SEQ ID NO: 17408 - DNA, 19 bp, Homo sapiens
gcactaacgcatgacttcc

SEQ ID NO: 17409 - DNA, 21 bp, Homo sapiens
ggatgtagtgcaaaaaagtgc

SEQ ID NO: 17410 - DNA, 24 bp, Homo sapiens
tgtgcttttttaaaaaacaaaaac

SEQ ID NO: 17411 - DNA, 18 bp, Homo sapiens
tcgacatctttggcctgt

SEQ ID NO: 17412 - DNA, 24 bp, Homo sapiens
tggagaaataataaaaatttattc

SEQ ID NO: 17413 - DNA, 22 bp, Homo sapiens
tgtgttcaccaattcaacatac

SEQ ID NO: 17414 - DNA, 21 bp, Homo sapiens
tgttacttgctaattttggca

SEQ ID NO: 17415 - DNA, 21 bp, Homo sapiens
cgtcattcaactctaaccttg

SEQ ID NO: 17416 - DNA, 22 bp, Homo sapiens
tgtaataaatgctttttcccac

SEQ ID NO: 17417 - DNA, 19 bp, Homo sapiens
cagagaagtcagggactac

SEQ ID NO: 17418 - DNA, 23 bp, Homo sapiens
ggcaaattctcttcaacaaggac

SEQ ID NO: 17419 - DNA, 24 bp, Homo sapiens
ggtaactttaataatctttttcgt

SEQ ID NO: 17420 - DNA, 24 bp, Homo sapiens
atcaatgtccaaaaccttgatggc

SEQ ID NO: 17421 - DNA, 21 bp, Homo sapiens
taataggcaacagaccctgat

SEQ ID NO: 17422 - DNA, 19 bp, Homo sapiens
ttgccacaacaacaagttc

SEQ ID NO: 17423 - DNA, 20 bp, Homo sapiens
ccttcatttacagtagcccg

SEQ ID NO: 17424 - DNA, 21 bp, Homo sapiens
gctcccattggatgtgatacg

SEQ ID NO: 17425 - DNA, 21 bp, Homo sapiens
gtcatttcctccttagagggc

SEQ ID NO: 17426 - DNA, 20 bp, Homo sapiens
accatttattccagcatcag

SEQ ID NO: 17427 - DNA, 21 bp, Homo sapiens
cctttgtgggtcaagtaaaag

SEQ ID NO: 17428 - DNA, 23 bp, Homo sapiens
tgattcattttttaaagtcttga

SEQ ID NO: 17429 - DNA, 19 bp, Homo sapiens
tgtttgatccttatctgcc

SEQ ID NO: 17430 - DNA, 21 bp, Homo sapiens
gctgagtttcttttgagaatt

SEQ ID NO: 17431 - DNA, 23 bp, Homo sapiens
tttttctttaagacctcaactgc

SEQ ID NO: 17432 - DNA, 22 bp, Homo sapiens
tctatataaatattccacttac

SEQ ID NO: 17433 - DNA, 23 bp, Homo sapiens
gccagaatgactacttaaatgaa

SEQ ID NO: 17434 - DNA, 23 bp, Homo sapiens
tccaccacagataaatttcttgg

SEQ ID NO: 17435 - DNA, 22 bp, Homo sapiens
tttggaaagctaaggattagaa

SEQ ID NO: 17436 - DNA, 21 bp, Homo sapiens
tcaccactatgtttactgtgg

SEQ ID NO: 17437 - DNA, 16 bp, Homo sapiens
agcttcagatggcagg

SEQ ID NO: 17438 - DNA, 24 bp, Homo sapiens
agcaacacttctagtaattataag

SEQ ID NO: 17439 - DNA, 20 bp, Homo sapiens
cacggggattctaaccttag

SEQ ID NO: 17440 - DNA, 23 bp, Homo sapiens
gtgatacattgtttaagactctc

SEQ ID NO: 17441 - DNA, 23 bp, Homo sapiens
agaagactctccttgtgacataa

SEQ ID NO: 17442 - DNA, 17 bp, Homo sapiens
actcaccccatctggcc

SEQ ID NO: 17443 - DNA, 20 bp, Homo sapiens
ctgtgattactgagagggga

SEQ ID NO: 17444 - DNA, 17 bp, Homo sapiens
ccctgtccagtgctttc

SEQ ID NO: 17445 - DNA, 24 bp, Homo sapiens
gccttaaaagctgttttcaatttt

SEQ ID NO: 17446 - DNA, 21 bp, Homo sapiens
ggagatcctcagagagttttt

SEQ ID NO: 17447 - DNA, 22 bp, Homo sapiens
gcattcatagaaaacagaaagg

SEQ ID NO: 17448 - DNA, 18 bp, Homo sapiens
tctctgaaggcaactgat

SEQ ID NO: 17449 - DNA, 20 bp, Homo sapiens
tgctttcttactaacagtac

SEQ ID NO: 17450 - DNA, 24 bp, Homo sapiens
gtttcaagcttttatattactctg

SEQ ID NO: 17451 - DNA, 20 bp, Homo sapiens
acttacgtttctgaaagatt

SEQ ID NO: 17452 - DNA, 19 bp, Homo sapiens
aggccatgctttaatcttt

SEQ ID NO: 17453 - DNA, 21 bp, Homo sapiens
tgttattgagtctccctctcg

SEQ ID NO: 17454 - DNA, 24 bp, Homo sapiens
cttgctttcctttccagatggaat

SEQ ID NO: 17455 - DNA, 18 bp, Homo sapiens
cacagctgatgtatagcc

SEQ ID NO: 17456 - DNA, 22 bp, Homo sapiens
ccctccatacacaaatataaac

SEQ ID NO: 17457 - DNA, 21 bp, Homo sapiens
ggaactccatctgcactgtgt

SEQ ID NO: 17458 - DNA, 18 bp, Homo sapiens
acacacacacacaccaag

SEQ ID NO: 17459 - DNA, 22 bp, Homo sapiens
atgcagtctaacattaaatgtg

SEQ ID NO: 17460 - DNA, 22 bp, Homo sapiens
tggcttcactaatttcaaggct

SEQ ID NO: 17461 - DNA, 24 bp, Homo sapiens
ttatttttcataaaatttggaaat

SEQ ID NO: 17462 - DNA, 20 bp, Homo sapiens
tttggtggaagcacttcaat

SEQ ID NO: 17463 - DNA, 24 bp, Homo sapiens
cagaatatgcatgcagttcctgag

SEQ ID NO: 17464 - DNA, 17 bp, Homo sapiens
agtcgggcggacttacg

SEQ ID NO: 17465 - DNA, 22 bp, Homo sapiens
taggataaaagaatacttgccg

SEQ ID NO: 17466 - DNA, 21 bp, Homo sapiens
ggctcagggagacttcatcat

SEQ ID NO: 17467 - DNA, 21 bp, Homo sapiens
atgaaaagactgcattggttc

SEQ ID NO: 17468 - DNA, 16 bp, Homo sapiens
gacgcagacgaagggt

SEQ ID NO: 17469 - DNA, 20 bp, Homo sapiens
cgctgcttggaccgtgagtg

SEQ ID NO: 17470 - DNA, 22 bp, Homo sapiens
atggtggtgaaaagttgagacc

SEQ ID NO: 17471 - DNA, 21 bp, Homo sapiens
taagccctgttgttttattga

SEQ ID NO: 17472 - DNA, 21 bp, Homo sapiens
aaactttcctgtgtttttttc

SEQ ID NO: 17473 - DNA, 21 bp, Homo sapiens
gtgatctccccatttgaccct

SEQ ID NO: 17474 - DNA, 18 bp, Homo sapiens
acagacatgagacctggg

SEQ ID NO: 17475 - DNA, 28 bp, Homo sapiens
aaactaattatgctatacaataagtgtg

SEQ ID NO: 17476 - DNA, 20 bp, Homo sapiens
ggatgcaaatgataacacgc

SEQ ID NO: 17477 - DNA, 24 bp, Homo sapiens
catgagcatatcgtataatgcaca

SEQ ID NO: 17478 - DNA, 20 bp, Homo sapiens
ataacagcatttgatggtgt

SEQ ID NO: 17479 - DNA, 21 bp, Homo sapiens
gttacctgtatgacactgtcc

SEQ ID NO: 17480 - DNA, 21 bp, Homo sapiens
agagcaaactctgtactactt

SEQ ID NO: 17481 - DNA, 22 bp, Homo sapiens
tatttcagggaaggttggcgtg

SEQ ID NO: 17482 - DNA, 19 bp, Homo sapiens
tttgcaccctttcaaattg

SEQ ID NO: 17483 - DNA, 21 bp, Homo sapiens
actggctcactttcttgtaca

SEQ ID NO: 17484 - DNA, 23 bp, Homo sapiens
tttttcattgatcttctctctgg

SEQ ID NO: 17485 - DNA, 20 bp, Homo sapiens
tattactcgctacctcacct

SEQ ID NO: 17486 - DNA, 23 bp, Homo sapiens
tcagttttaaccagacatctctt

SEQ ID NO: 17487 - DNA, 20 bp, Homo sapiens
cccagagcttcacctttttc

SEQ ID NO: 17488 - DNA, 29 bp, Homo sapiens
catacatatgtatatttacacaaaagctc

SEQ ID NO: 17489 - DNA, 22 bp, Homo sapiens
tgaactaatagctacattattt

SEQ ID NO: 17490 - DNA, 20 bp, Homo sapiens
tgtccactggttgaagtaag

SEQ ID NO: 17491 - DNA, 21 bp, Homo sapiens
taatactttcacgtggatttt

SEQ ID NO: 17492 - DNA, 21 bp, Homo sapiens
aagactgaggtgtagtcattc

SEQ ID NO: 17493 - DNA, 22 bp, Homo sapiens
tgaatagtttagatcatttgag

SEQ ID NO: 17494 - DNA, 19 bp, Homo sapiens
ccacccagtggagttcctg

SEQ ID NO: 17495 - DNA, 26 bp, Homo sapiens
tttaaatttatataaagtatttgtag

SEQ ID NO: 17496 - DNA, 20 bp, Homo sapiens
gtgcggttgtgatcatttac

SEQ ID NO: 17497 - DNA, 23 bp, Homo sapiens
tacgtgttttagtgaagaaaaaa

SEQ ID NO: 17498 - DNA, 22 bp, Homo sapiens
actctgaaaaaaattgtcagtc

SEQ ID NO: 17499 - DNA, 22 bp, Homo sapiens
cacaagcttaacacctagtacc

SEQ ID NO: 17500 - DNA, 23 bp, Homo sapiens
tgcttcataaatatcgttattcc

SEQ ID NO: 17501 - DNA, 19 bp, Homo sapiens
gctctggacaaggacatag

SEQ ID NO: 17502 - DNA, 21 bp, Homo sapiens
ataacactaaaactcacttac

SEQ ID NO: 17503 - DNA, 17 bp, Homo sapiens
tgggagcaaccatttcg

SEQ ID NO: 17504 - DNA, 23 bp, Homo sapiens
gccatatctttgtcatatttccc

SEQ ID NO: 17505 - DNA, 22 bp, Homo sapiens
ggatgaaaacaatcaaagtcca

SEQ ID NO: 17506 - DNA, 26 bp, Homo sapiens
aagagcaaaatatgtatttaacttac

SEQ ID NO: 17507 - DNA, 19 bp, Homo sapiens
agacaatggtcatcctctt

SEQ ID NO: 17508 - DNA, 21 bp, Homo sapiens
aaattgagactgtccgaaatg

SEQ ID NO: 17509 - DNA, 21 bp, Homo sapiens
aaaagatagcacgacatatac

SEQ ID NO: 17510 - DNA, 19 bp, Homo sapiens
ccttgataactgggcattg

SEQ ID NO: 17511 - DNA, 21 bp, Homo sapiens
ccttatgtgatgatattagtt

SEQ ID NO: 17512 - DNA, 18 bp, Homo sapiens
ggcaaaggcaggaagagg

SEQ ID NO: 17513 - DNA, 23 bp, Homo sapiens
gcctcactggattttcatttcct

SEQ ID NO: 17514 - DNA, 21 bp, Homo sapiens
agactttcaccagaaatttga

SEQ ID NO: 17515 - DNA, 24 bp, Homo sapiens
taacaaaaaattgactgactgctg

SEQ ID NO: 17516 - DNA, 20 bp, Homo sapiens
cccacgatttttccatatgc

SEQ ID NO: 17517 - DNA, 24 bp, Homo sapiens
tacagtagcgtctacagatttatc

SEQ ID NO: 17518 - DNA, 21 bp, Homo sapiens
ttgttctcaattatgtactga

SEQ ID NO: 17519 - DNA, 22 bp, Homo sapiens
gcttaatttaccttaataacca

SEQ ID NO: 17520 - DNA, 22 bp, Homo sapiens
atgaaattgtagctttgttcct

SEQ ID NO: 17521 - DNA, 20 bp, Homo sapiens
caggagactaagttctgctg

SEQ ID NO: 17522 - DNA, 19 bp, Homo sapiens
catttgtgtctgctttccc

SEQ ID NO: 17523 - DNA, 21 bp, Homo sapiens
tctattccatccttgttggtt

SEQ ID NO: 17524 - DNA, 28 bp, Homo sapiens
ttattatttttaaaatgtgtttatacac

SEQ ID NO: 17525 - DNA, 18 bp, Homo sapiens
gccattgatcaggaccgg

SEQ ID NO: 17526 - DNA, 23 bp, Homo sapiens
tgttatttaaaatatttccttgg

SEQ ID NO: 17527 - DNA, 25 bp, Homo sapiens
aatgaaactctcttaattttttttt

SEQ ID NO: 17528 - DNA, 25 bp, Homo sapiens
gatagtgtaaaatgttatcagatac

SEQ ID NO: 17529 - DNA, 21 bp, Homo sapiens
tttccaaactaaagcatctgt

SEQ ID NO: 17530 - DNA, 20 bp, Homo sapiens
tgatggcggttgaatattcc

SEQ ID NO: 17531 - DNA, 22 bp, Homo sapiens
actagtaaaaggtattagatca

SEQ ID NO: 17532 - DNA, 21 bp, Homo sapiens
taatggggttcagttcttcct

SEQ ID NO: 17533 - DNA, 22 bp, Homo sapiens
tcatactccctgaaaatagttt

SEQ ID NO: 17534 - DNA, 18 bp, Homo sapiens
tgtccttgtgccaaacac

SEQ ID NO: 17535 - DNA, 29 bp, Homo sapiens
agttttgctattataaattatatgtctac

SEQ ID NO: 17536 - DNA, 23 bp, Homo sapiens
accaccactctcacagtggatgt

SEQ ID NO: 17537 - DNA, 24 bp, Homo sapiens
acatgcaaataaatggagaaagat

SEQ ID NO: 17538 - DNA, 18 bp, Homo sapiens
ttctccctaacaggaccg

SEQ ID NO: 17539 - DNA, 17 bp, Homo sapiens
tgagtggacggcaatca

SEQ ID NO: 17540 - DNA, 17 bp, Homo sapiens
ggtatgggccactgctc

SEQ ID NO: 17541 - DNA, 18 bp, Homo sapiens
gtatcaaacccctgacct

SEQ ID NO: 17542 - DNA, 19 bp, Homo sapiens
cgctactttgtcataatcc

SEQ ID NO: 17543 - DNA, 20 bp, Homo sapiens
aacaccaagggcaggagtgc

SEQ ID NO: 17544 - DNA, 24 bp, Homo sapiens
cctttgaaattcccctaatgttga

SEQ ID NO: 17545 - DNA, 22 bp, Homo sapiens
tctgatacattttggatgagtt

SEQ ID NO: 17546 - DNA, 20 bp, Homo sapiens
tcaaataatctgaagtctgt

SEQ ID NO: 17547 - DNA, 23 bp, Homo sapiens
attgaatactcacattagcttgg

SEQ ID NO: 17548 - DNA, 21 bp, Homo sapiens
catgtcatctctaacttccaa

SEQ ID NO: 17549 - DNA, 24 bp, Homo sapiens
gcctcttccttaacactatatttc

SEQ ID NO: 17550 - DNA, 23 bp, Homo sapiens
tggaagtatgataacaatattga

SEQ ID NO: 17551 - DNA, 22 bp, Homo sapiens
taattcaattttgagacatttt

SEQ ID NO: 17552 - DNA, 20 bp, Homo sapiens
tggagctacagatatagatg

SEQ ID NO: 17553 - DNA, 24 bp, Homo sapiens
tggaagttactgaataatacaata

SEQ ID NO: 17554 - DNA, 22 bp, Homo sapiens
atcttttttcctttcagctcac

SEQ ID NO: 17555 - DNA, 24 bp, Homo sapiens
attacattgcaaataggtatttac

SEQ ID NO: 17556 - DNA, 20 bp, Homo sapiens
atgctgtaacatttctggtg

SEQ ID NO: 17557 - DNA, 19 bp, Homo sapiens
tctgtccatttggtccatc

SEQ ID NO: 17558 - DNA, 17 bp, Homo sapiens
ttgtggttgtgggctgc

SEQ ID NO: 17559 - DNA, 22 bp, Homo sapiens
gaatattgtggtaccaactgga

SEQ ID NO: 17560 - DNA, 23 bp, Homo sapiens
acatacttcttctgagtactatt

SEQ ID NO: 17561 - DNA, 19 bp, Homo sapiens
tggtgagagacaggaatga

SEQ ID NO: 17562 - DNA, 25 bp, Homo sapiens
aattttaaaggaatcatttataaac

SEQ ID NO: 17563 - DNA, 17 bp, Homo sapiens
aggtccagtgcatcaac

SEQ ID NO: 17564 - DNA, 21 bp, Homo sapiens
aaggacagagagagagtaaat

SEQ ID NO: 17565 - DNA, 20 bp, Homo sapiens
attttaaaagatgcaatttc

SEQ ID NO: 17566 - DNA, 21 bp, Homo sapiens
catgcttgaaagtgggtgagt

SEQ ID NO: 17567 - DNA, 21 bp, Homo sapiens
agaaaaatgtactgaatgaac

SEQ ID NO: 17568 - DNA, 23 bp, Homo sapiens
agataatagtgcccacttttttg

SEQ ID NO: 17569 - DNA, 22 bp, Homo sapiens
ctcttgtccttaaaatgatcat

SEQ ID NO: 17570 - DNA, 24 bp, Homo sapiens
ctcattcttctttaaatgagttaa

SEQ ID NO: 17571 - DNA, 19 bp, Homo sapiens
gggtgttgatggatcctgt

SEQ ID NO: 17572 - DNA, 27 bp, Homo sapiens
ctcaaattatgtaaataattcaatatc

SEQ ID NO: 17573 - DNA, 16 bp, Homo sapiens
gctggaggaccagacc

SEQ ID NO: 17574 - DNA, 24 bp, Homo sapiens
acttatattacaggggcaaagaaa

SEQ ID NO: 17575 - DNA, 24 bp, Homo sapiens
agaatatgttttcaagtacctttc

SEQ ID NO: 17576 - DNA, 20 bp, Homo sapiens
tgttcaggaaaagcatttgc

SEQ ID NO: 17577 - DNA, 16 bp, Homo sapiens
agccgcggtttaagag

SEQ ID NO: 17578 - DNA, 19 bp, Homo sapiens
aaagttctatggtggggtc

SEQ ID NO: 17579 - DNA, 22 bp, Homo sapiens
aagaatattttctgtcttatgc

SEQ ID NO: 17580 - DNA, 20 bp, Homo sapiens
atgaagaaagtcggaatggt

SEQ ID NO: 17581 - DNA, 23 bp, Homo sapiens
taatttaaacccatactggaggg

SEQ ID NO: 17582 - DNA, 20 bp, Homo sapiens
tctctctttagattgcaaac

SEQ ID NO: 17583 - DNA, 21 bp, Homo sapiens
actcatagtagattgagaatt

SEQ ID NO: 17584 - DNA, 21 bp, Homo sapiens
tctcaatgaatttttttctca

SEQ ID NO: 17585 - DNA, 25 bp, Homo sapiens
gacatttgtaaaataaaaaactcac

SEQ ID NO: 17586 - DNA, 19 bp, Homo sapiens
aattgtagtgatgcatatt

SEQ ID NO: 17587 - DNA, 17 bp, Homo sapiens
ggtcctcccctagctag

SEQ ID NO: 17588 - DNA, 23 bp, Homo sapiens
ggataaattgtaattaaagcatc

SEQ ID NO: 17589 - DNA, 23 bp, Homo sapiens
tgcttccattgatgactctatac

SEQ ID NO: 17590 - DNA, 23 bp, Homo sapiens
aaagggtctaattagagagagtg

SEQ ID NO: 17591 - DNA, 30 bp, Homo sapiens
atctctcactaaatatatacatatattctc

SEQ ID NO: 17592 - DNA, 18 bp, Homo sapiens
gacagacaagcaatgctc

SEQ ID NO: 17593 - DNA, 20 bp, Homo sapiens
atttccacaaatcattagat

SEQ ID NO: 17594 - DNA, 18 bp, Homo sapiens
gcttgggccagtatgatg

SEQ ID NO: 17595 - DNA, 24 bp, Homo sapiens
aaggttaattattacacagagata

SEQ ID NO: 17596 - DNA, 21 bp, Homo sapiens
tcgacagttttatctctggac

SEQ ID NO: 17597 - DNA, 23 bp, Homo sapiens
tctctgtggtatattttcaatgt

SEQ ID NO: 17598 - DNA, 24 bp, Homo sapiens
gtcaaatgtttctttctacctttt

SEQ ID NO: 17599 - DNA, 21 bp, Homo sapiens
gctaaaagcaaccttaccatc

SEQ ID NO: 17600 - DNA, 18 bp, Homo sapiens
tttctgtgctgtgacaat

SEQ ID NO: 17601 - DNA, 21 bp, Homo sapiens
atccctgaagctaaacatgtc

SEQ ID NO: 17602 - DNA, 16 bp, Homo sapiens
gctggtggcaacatgg

SEQ ID NO: 17603 - DNA, 17 bp, Homo sapiens
tgattccttctcctccc

SEQ ID NO: 17604 - DNA, 16 bp, Homo sapiens
actggacttaccccag

SEQ ID NO: 17605 - DNA, 17 bp, Homo sapiens
gctgaggagcagaccct

SEQ ID NO: 17606 - DNA, 16 bp, Homo sapiens
cccaacaccctccagc

SEQ ID NO: 17607 - DNA, 24 bp, Homo sapiens
tttctttgtgtccccaggagccat

SEQ ID NO: 17608 - DNA, 24 bp, Homo sapiens
gaagtatgtgcctcagtcacacag

SEQ ID NO: 17609 - DNA, 23 bp, Homo sapiens
ttttggtgctgatctctggatgc

SEQ ID NO: 17610 - DNA, 22 bp, Homo sapiens
agaagtggttggtgaagaaggg

SEQ ID NO: 17611 - DNA, 22 bp, Homo sapiens
gtcctgggaagttgaccatggc

SEQ ID NO: 17612 - DNA, 16 bp, Homo sapiens
cccactcacccacagg

SEQ ID NO: 17613 - DNA, 23 bp, Homo sapiens
tcaccttatagagtgtgtaaagc

SEQ ID NO: 17614 - DNA, 20 bp, Homo sapiens
taagatccccttcacttgtg

SEQ ID NO: 17615 - DNA, 21 bp, Homo sapiens
cttccaggccaggtgaaccgg

SEQ ID NO: 17616 - DNA, 19 bp, Homo sapiens
gggcctttctacacaatgg

SEQ ID NO: 17617 - DNA, 18 bp, Homo sapiens
ctgatcagcgaggacacg

SEQ ID NO: 17618 - DNA, 16 bp, Homo sapiens
gccagggccttgtgat

SEQ ID NO: 17619 - DNA, 21 bp, Homo sapiens
ctccccagacacgccaaacac

SEQ ID NO: 17620 - DNA, 22 bp, Homo sapiens
cactccctgctgagagttcagc

SEQ ID NO: 17621 - DNA, 16 bp, Homo sapiens
ggagccacaccacgcc

SEQ ID NO: 17622 - DNA, 22 bp, Homo sapiens
ttattttccctctgctctctcc

SEQ ID NO: 17623 - DNA, 17 bp, Homo sapiens
ccccaggagagaattgg

SEQ ID NO: 17624 - DNA, 18 bp, Homo sapiens
acatggacaatgaccccc

SEQ ID NO: 17625 - DNA, 22 bp, Homo sapiens
agaatggggtcttagaggaaga

SEQ ID NO: 17626 - DNA, 24 bp, Homo sapiens
cttctttgcagtggagcctgacac

SEQ ID NO: 17627 - DNA, 18 bp, Homo sapiens
agcattggcccttgaaga

SEQ ID NO: 17628 - DNA, 18 bp, Homo sapiens
ggtgaactctgacttggt

SEQ ID NO: 17629 - DNA, 24 bp, Homo sapiens
tgctggtattttagggaagccttt

SEQ ID NO: 17630 - DNA, 17 bp, Homo sapiens
acatgcctccagggccc

SEQ ID NO: 17631 - DNA, 23 bp, Homo sapiens
ccctcccgccccatttagggccc

SEQ ID NO: 17632 - DNA, 16 bp, Homo sapiens
cgccacctgactctgg

SEQ ID NO: 17633 - DNA, 24 bp, Homo sapiens
ccctctctcacttttctttcagac

SEQ ID NO: 17634 - DNA, 17 bp, Homo sapiens
ctggatgttcaccttcc

SEQ ID NO: 17635 - DNA, 24 bp, Homo sapiens
gaccaccagggggtgagtgttccc

SEQ ID NO: 17636 - DNA, 23 bp, Homo sapiens
tcctacctcagggatgcggacgc

SEQ ID NO: 17637 - DNA, 17 bp, Homo sapiens
cctagggtggaagaggc

SEQ ID NO: 17638 - DNA, 17 bp, Homo sapiens
tctggggagcagcaggt

SEQ ID NO: 17639 - DNA, 24 bp, Homo sapiens
ctttctcttgccaggtgatcacac

SEQ ID NO: 17640 - DNA, 24 bp, Homo sapiens
cacctgggctgaggtctgggcaga

SEQ ID NO: 17641 - DNA, 23 bp, Homo sapiens
ccacatttcacaatcagccctac

SEQ ID NO: 17642 - DNA, 24 bp, Homo sapiens
cattttaaattttggggcccctcc

SEQ ID NO: 17643 - DNA, 16 bp, Homo sapiens
ccccctgcccccaagt

SEQ ID NO: 17644 - DNA, 20 bp, Homo sapiens
atgtagagaatgggctttga

SEQ ID NO: 17645 - DNA, 16 bp, Homo sapiens
gcgggcgctgtcaatg

SEQ ID NO: 17646 - DNA, 20 bp, Homo sapiens
cccttgtacttgctttgctc

SEQ ID NO: 17647 - DNA, 16 bp, Homo sapiens
ccgtgagctggtaggc

SEQ ID NO: 17648 - DNA, 19 bp, Homo sapiens
tcgtgaatgccacagaccc

SEQ ID NO: 17649 - DNA, 18 bp, Homo sapiens
ttccagggtgggaagagg

SEQ ID NO: 17650 - DNA, 21 bp, Homo sapiens
ctcccaattcttcgccattga

SEQ ID NO: 17651 - DNA, 23 bp, Homo sapiens
ttatagatcatcgagtgtgtgcc

SEQ ID NO: 17652 - DNA, 20 bp, Homo sapiens
tacgagaccacacaggccta

SEQ ID NO: 17653 - DNA, 18 bp, Homo sapiens
acaaagcctcagtaatgc

SEQ ID NO: 17654 - DNA, 16 bp, Homo sapiens
tggacagaggcctggt

SEQ ID NO: 17655 - DNA, 21 bp, Homo sapiens
gtgtgcgtgtgcatgtgtttg

SEQ ID NO: 17656 - DNA, 21 bp, Homo sapiens
taaggcaggttgatgaagatg

SEQ ID NO: 17657 - DNA, 24 bp, Homo sapiens
gtgtgtacatatgtgtgtgagtgt

SEQ ID NO: 17658 - DNA, 22 bp, Homo sapiens
tgagaaggaagggccaggagtc

SEQ ID NO: 17659 - DNA, 24 bp, Homo sapiens
gctctctaaggatcaagacaagac

SEQ ID NO: 17660 - DNA, 17 bp, Homo sapiens
actaacagggcccatcc

SEQ ID NO: 17661 - DNA, 24 bp, Homo sapiens
tcatcacagatgtccaggacatgg

SEQ ID NO: 17662 - DNA, 19 bp, Homo sapiens
ccagaacactcatcactgc

SEQ ID NO: 17663 - DNA, 17 bp, Homo sapiens
atgcgcaccgtcgtgcc

SEQ ID NO: 17664 - DNA, 18 bp, Homo sapiens
gcctgagcccttggcatc

SEQ ID NO: 17665 - DNA, 18 bp, Homo sapiens
cgatggtgtagccaatgc

SEQ ID NO: 17666 - DNA, 23 bp, Homo sapiens
gaagctgtgggtgccatgatagc

SEQ ID NO: 17667 - DNA, 18 bp, Homo sapiens
tccttgggtggaggacag

SEQ ID NO: 17668 - DNA, 24 bp, Homo sapiens
actcaagtccctcctctcttctgc

SEQ ID NO: 17669 - DNA, 16 bp, Homo sapiens
accctgtcccacatgc

SEQ ID NO: 17670 - DNA, 24 bp, Homo sapiens
ccaggataaaggacgtccccgggg

SEQ ID NO: 17671 - DNA, 24 bp, Homo sapiens
ttctattactcttgaaccagcatt

SEQ ID NO: 17672 - DNA, 19 bp, Homo sapiens
gtccagcaggccattcaag

SEQ ID NO: 17673 - DNA, 17 bp, Homo sapiens
gccccagctccatgccc

SEQ ID NO: 17674 - DNA, 17 bp, Homo sapiens
tgcccacccaggtctca

SEQ ID NO: 17675 - DNA, 24 bp, Homo sapiens
gtcacacctgaatgcttctctctc

SEQ ID NO: 17676 - DNA, 19 bp, Homo sapiens
gacactgctggaggttggc

SEQ ID NO: 17677 - DNA, 18 bp, Homo sapiens
acatcagcggagtgctga

SEQ ID NO: 17678 - DNA, 18 bp, Homo sapiens
gcagggtgagagcacgga

SEQ ID NO: 17679 - DNA, 21 bp, Homo sapiens
gcttcatcctgactgtgaagg

SEQ ID NO: 17680 - DNA, 19 bp, Homo sapiens
ggtcatcgttcagctccgt

SEQ ID NO: 17681 - DNA, 22 bp, Homo sapiens
ggagttgtggtgaggattagat

SEQ ID NO: 17682 - DNA, 23 bp, Homo sapiens
gcattgtcattgatgtcaataac

SEQ ID NO: 17683 - DNA, 24 bp, Homo sapiens
gagaaagtctttggtaagcaagag

SEQ ID NO: 17684 - DNA, 20 bp, Homo sapiens
acctgtgccagctcagtgat

SEQ ID NO: 17685 - DNA, 23 bp, Homo sapiens
tgactgatctctgtccatagggc

SEQ ID NO: 17686 - DNA, 17 bp, Homo sapiens
cagggactcacctcatc

SEQ ID NO: 17687 - DNA, 23 bp, Homo sapiens
cagtcaccacgaccttcaatatc

SEQ ID NO: 17688 - DNA, 16 bp, Homo sapiens
acctgaacagcccagg

SEQ ID NO: 17689 - DNA, 19 bp, Homo sapiens
gtacagcgtggccatcact

SEQ ID NO: 17690 - DNA, 23 bp, Homo sapiens
ccttatttatcctcagaacctac

SEQ ID NO: 17691 - DNA, 17 bp, Homo sapiens
tcatccaggtggtggac

SEQ ID NO: 17692 - DNA, 23 bp, Homo sapiens
atgttttttgcagggtgtagggg

SEQ ID NO: 17693 - DNA, 21 bp, Homo sapiens
ccacccatccagacccaccac

SEQ ID NO: 17694 - DNA, 23 bp, Homo sapiens
tgatgatcatgtatgtaacttct

SEQ ID NO: 17695 - DNA, 16 bp, Homo sapiens
cctgcccttcagaggc

SEQ ID NO: 17696 - DNA, 18 bp, Homo sapiens
tccctcccatgacccagg

SEQ ID NO: 17697 - DNA, 21 bp, Homo sapiens
tgagctgtgcccttttcaaag

SEQ ID NO: 17698 - DNA, 24 bp, Homo sapiens
tctccatacctctccggctccttc

SEQ ID NO: 17699 - DNA, 22 bp, Homo sapiens
ttcccctgaacctttggtccct

SEQ ID NO: 17700 - DNA, 21 bp, Homo sapiens
gtacacctcaaacatgctgtt

SEQ ID NO: 17701 - DNA, 16 bp, Homo sapiens
gcctcatccattgccc

SEQ ID NO: 17702 - DNA, 19 bp, Homo sapiens
ccttcccctggacggaggt

SEQ ID NO: 17703 - DNA, 17 bp, Homo sapiens
ctcctccatttgggtct

SEQ ID NO: 17704 - DNA, 23 bp, Homo sapiens
cttacatcaaagtcgtagcggtc

SEQ ID NO: 17705 - DNA, 24 bp, Homo sapiens
ctcttgacccagggcctgaacagc

SEQ ID NO: 17706 - DNA, 16 bp, Homo sapiens
ccctgaaatccacccc

SEQ ID NO: 17707 - DNA, 18 bp, Homo sapiens
ccacttcatcatctcccc

SEQ ID NO: 17708 - DNA, 17 bp, Homo sapiens
caagggaagatgggcag

SEQ ID NO: 17709 - DNA, 18 bp, Homo sapiens
ctggactacgagaccgtg

SEQ ID NO: 17710 - DNA, 24 bp, Homo sapiens
gcaataacagacgggctcgcagta

SEQ ID NO: 17711 - DNA, 20 bp, Homo sapiens
gagagtgatcttcaccttgg

SEQ ID NO: 17712 - DNA, 23 bp, Homo sapiens
ctctgggctggggccggcaaagg

SEQ ID NO: 17713 - DNA, 22 bp, Homo sapiens
cgtacaggctgatgttgtacag

SEQ ID NO: 17714 - DNA, 18 bp, Homo sapiens
ggagcttacctgggcccc

SEQ ID NO: 17715 - DNA, 17 bp, Homo sapiens
cagtgaagcggggactc

SEQ ID NO: 17716 - DNA, 17 bp, Homo sapiens
accatgtgggctatgcc

SEQ ID NO: 17717 - DNA, 20 bp, Homo sapiens
ggtcccttggacaaaatccc

SEQ ID NO: 17718 - DNA, 19 bp, Homo sapiens
atcttcagccagccactgt

SEQ ID NO: 17719 - DNA, 24 bp, Homo sapiens
ttaatacaccaacaaacacagctc

SEQ ID NO: 17720 - DNA, 24 bp, Homo sapiens
gacctctgtgctgacagtcctggt

SEQ ID NO: 17721 - DNA, 23 bp, Homo sapiens
tccttttccatattgcaacctag

SEQ ID NO: 17722 - DNA, 17 bp, Homo sapiens
gactgtggtgaggcacc

SEQ ID NO: 17723 - DNA, 18 bp, Homo sapiens
ggaaaggcagaaaaccag

SEQ ID NO: 17724 - DNA, 17 bp, Homo sapiens
aggcacccccaaatccc

SEQ ID NO: 17725 - DNA, 16 bp, Homo sapiens
tgacttccccaaaggt

SEQ ID NO: 17726 - DNA, 18 bp, Homo sapiens
ggcctcagaaaattcacc

SEQ ID NO: 17727 - DNA, 16 bp, Homo sapiens
ctgaggggctgtgggc

SEQ ID NO: 17728 - DNA, 24 bp, Homo sapiens
ggtttcctgtggacctgaagcctc

SEQ ID NO: 17729 - DNA, 20 bp, Homo sapiens
ccctgggcactgaaaagttc

SEQ ID NO: 17730 - DNA, 24 bp, Homo sapiens
gttgcaggcaactgacaatgatgc

SEQ ID NO: 17731 - DNA, 18 bp, Homo sapiens
gtgcccatgggttccaac

SEQ ID NO: 17732 - DNA, 22 bp, Homo sapiens
tcagggcaagtgaaagggaagg

SEQ ID NO: 17733 - DNA, 22 bp, Homo sapiens
agcgctggatgagctcatagtc

SEQ ID NO: 17734 - DNA, 23 bp, Homo sapiens
ggcaaggacaggctgggaaatgc

SEQ ID NO: 17735 - DNA, 19 bp, Homo sapiens
ctgacccggcctgtggtct

SEQ ID NO: 17736 - DNA, 22 bp, Homo sapiens
tgttccttctctccatcctctc

SEQ ID NO: 17737 - DNA, 17 bp, Homo sapiens
cacgtaggcatccttct

SEQ ID NO: 17738 - DNA, 24 bp, Homo sapiens
gactcatcatgctgattgccaggc

SEQ ID NO: 17739 - DNA, 17 bp, Homo sapiens
ggcaccttacccggagc

SEQ ID NO: 17740 - DNA, 19 bp, Homo sapiens
gacgggggcggcgaggaga

SEQ ID NO: 17741 - DNA, 24 bp, Homo sapiens
aaaaagaagcaagcaagcaagtac

SEQ ID NO: 17742 - DNA, 21 bp, Homo sapiens
caacgacaacgtgcccacctt

SEQ ID NO: 17743 - DNA, 23 bp, Homo sapiens
attgtaccactgcactccagcct

SEQ ID NO: 17744 - DNA, 24 bp, Homo sapiens
ccttctgtcacacagctggtgcgg

SEQ ID NO: 17745 - DNA, 20 bp, Homo sapiens
gtcctgggccaggacaagac

SEQ ID NO: 17746 - DNA, 22 bp, Homo sapiens
ccaaaggcagatgcactgacaa

SEQ ID NO: 17747 - DNA, 17 bp, Homo sapiens
gccagtcttccccaccc

SEQ ID NO: 17748 - DNA, 17 bp, Homo sapiens
cgagttctgccccacac

SEQ ID NO: 17749 - DNA, 18 bp, Homo sapiens
tcacggcccttgtctgcc

SEQ ID NO: 17750 - DNA, 16 bp, Homo sapiens
ccccacaagggaggtg

SEQ ID NO: 17751 - DNA, 23 bp, Homo sapiens
aaccagatcacctacagcattgt

SEQ ID NO: 17752 - DNA, 16 bp, Homo sapiens
gctccgggcagcttcc

SEQ ID NO: 17753 - DNA, 19 bp, Homo sapiens
gtacgagggctatggaggt

SEQ ID NO: 17754 - DNA, 21 bp, Homo sapiens
agggggcgactgacgctgatc

SEQ ID NO: 17755 - DNA, 19 bp, Homo sapiens
ggtgttcagaaaacaagcc

SEQ ID NO: 17756 - DNA, 19 bp, Homo sapiens
cagcatccatggccatgac

SEQ ID NO: 17757 - DNA, 18 bp, Homo sapiens
ccaaaggggacccctgtc

SEQ ID NO: 17758 - DNA, 19 bp, Homo sapiens
cctgggtacttacaaacac

SEQ ID NO: 17759 - DNA, 22 bp, Homo sapiens
ggcctgttcctgtcattgcagt

SEQ ID NO: 17760 - DNA, 20 bp, Homo sapiens
agtcctacagtactgggttc

SEQ ID NO: 17761 - DNA, 24 bp, Homo sapiens
caatgggctgatttatctgacggt

SEQ ID NO: 17762 - DNA, 16 bp, Homo sapiens
ggctgggtaaactccc

SEQ ID NO: 17763 - DNA, 23 bp, Homo sapiens
cgtccctgtcaccatcgaggtgt

SEQ ID NO: 17764 - DNA, 19 bp, Homo sapiens
ttgctgaaggtgggagggt

SEQ ID NO: 17765 - DNA, 20 bp, Homo sapiens
gagaggccaaagctctttag

SEQ ID NO: 17766 - DNA, 16 bp, Homo sapiens
accccccgacctgagc

SEQ ID NO: 17767 - DNA, 21 bp, Homo sapiens
accttagacatctggccagcc

SEQ ID NO: 17768 - DNA, 16 bp, Homo sapiens
ggtctgcacatcctgg

SEQ ID NO: 17769 - DNA, 24 bp, Homo sapiens
tccttccaggatgagaatgacaac

SEQ ID NO: 17770 - DNA, 22 bp, Homo sapiens
cgatttgtcaaggagcttggcc

SEQ ID NO: 17771 - DNA, 21 bp, Homo sapiens
ggagaacatcatggcaggtac

SEQ ID NO: 17772 - DNA, 22 bp, Homo sapiens
gtctgtggcattcaggaacagc

SEQ ID NO: 17773 - DNA, 16 bp, Homo sapiens
tggtcactgggagggt

SEQ ID NO: 17774 - DNA, 22 bp, Homo sapiens
gtggagccttccaaggagtaga

SEQ ID NO: 17775 - DNA, 16 bp, Homo sapiens
gctggggccttgaagc

SEQ ID NO: 17776 - DNA, 24 bp, Homo sapiens
gtggaggaccagggtacttggggt

SEQ ID NO: 17777 - DNA, 23 bp, Homo sapiens
acctttttccccctgaaggagcc

SEQ ID NO: 17778 - DNA, 16 bp, Homo sapiens
ggcccagaggctggtc

SEQ ID NO: 17779 - DNA, 21 bp, Homo sapiens
cgggagtacggccaggagtcc

SEQ ID NO: 17780 - DNA, 23 bp, Homo sapiens
aatatttcatggattacactggt

SEQ ID NO: 17781 - DNA, 21 bp, Homo sapiens
cagagacgtggtggtgatttc

SEQ ID NO: 17782 - DNA, 20 bp, Homo sapiens
cgccagatcatggtagcttg

SEQ ID NO: 17783 - DNA, 16 bp, Homo sapiens
cccccgtccactgcgc

SEQ ID NO: 17784 - DNA, 21 bp, Homo sapiens
ctcgctctctctcttcttccc

SEQ ID NO: 17785 - DNA, 16 bp, Homo sapiens
agctggggcacgggag

SEQ ID NO: 17786 - DNA, 24 bp, Homo sapiens
cttctctctctggcaggggaaatc

SEQ ID NO: 17787 - DNA, 16 bp, Homo sapiens
ggacacgggggtccag

SEQ ID NO: 17788 - DNA, 22 bp, Homo sapiens
tgaatacatcctcatcgttcgc

SEQ ID NO: 17789 - DNA, 16 bp, Homo sapiens
acctctgctgctgatg

SEQ ID NO: 17790 - DNA, 20 bp, Homo sapiens
gggtggttgtcattgatgtc

SEQ ID NO: 17791 - DNA, 24 bp, Homo sapiens
ttggtggagctggcagaattaatg

SEQ ID NO: 17792 - DNA, 19 bp, Homo sapiens
agtctggaggggtcatctc

SEQ ID NO: 17793 - DNA, 16 bp, Homo sapiens
gcaggccctgccctgg

SEQ ID NO: 17794 - DNA, 16 bp, Homo sapiens
cctgggaagggccgcc

SEQ ID NO: 17795 - DNA, 24 bp, Homo sapiens
cttcacaggtaaacatcaccctcc

SEQ ID NO: 17796 - DNA, 18 bp, Homo sapiens
cacagagtccaccagccc

SEQ ID NO: 17797 - DNA, 23 bp, Homo sapiens
ctactacatcaacctggtggaga

SEQ ID NO: 17798 - DNA, 20 bp, Homo sapiens
ctttcaccatgcaggagaac

SEQ ID NO: 17799 - DNA, 16 bp, Homo sapiens
cccaggtctgggtcaa

SEQ ID NO: 17800 - DNA, 19 bp, Homo sapiens
ccacttcctgggccagagc

SEQ ID NO: 17801 - DNA, 20 bp, Homo sapiens
gcccgtggtgctgttgaggc

SEQ ID NO: 17802 - DNA, 24 bp, Homo sapiens
agatactcccggccagcccagaga

SEQ ID NO: 17803 - DNA, 16 bp, Homo sapiens
catgggggtcggggtt

SEQ ID NO: 17804 - DNA, 20 bp, Homo sapiens
gcaggtggtggctgttgacc

SEQ ID NO: 17805 - DNA, 22 bp, Homo sapiens
gccgtgaggggcgagaggggtc

SEQ ID NO: 17806 - DNA, 17 bp, Homo sapiens
gccacccaacaagttct

SEQ ID NO: 17807 - DNA, 16 bp, Homo sapiens
caggtaccccagaggc

SEQ ID NO: 17808 - DNA, 19 bp, Homo sapiens
catgctggaccgggagaac

SEQ ID NO: 17809 - DNA, 24 bp, Homo sapiens
cacaactggggcgtgggtattact

SEQ ID NO: 17810 - DNA, 24 bp, Homo sapiens
aatcgtcgtctctgttactgactg

SEQ ID NO: 17811 - DNA, 24 bp, Homo sapiens
ggttcacaaacactgtggcactgc

SEQ ID NO: 17812 - DNA, 21 bp, Homo sapiens
cctttgggatggagggctctg

SEQ ID NO: 17813 - DNA, 17 bp, Homo sapiens
gccacaaaaggcaggtt

SEQ ID NO: 17814 - DNA, 24 bp, Homo sapiens
ccgttttctcttgcacccatctta

SEQ ID NO: 17815 - DNA, 21 bp, Homo sapiens
aggaatgagatgatagagact

SEQ ID NO: 17816 - DNA, 16 bp, Homo sapiens
gccccctctgaaagcc

SEQ ID NO: 17817 - DNA, 23 bp, Homo sapiens
aagttttcagcctgggctaggct

SEQ ID NO: 17818 - DNA, 22 bp, Homo sapiens
caatgaccccacctttcagaac

SEQ ID NO: 17819 - DNA, 18 bp, Homo sapiens
catctccagagcctctgt

SEQ ID NO: 17820 - DNA, 19 bp, Homo sapiens
gggtctccatctaccaagt

SEQ ID NO: 17821 - DNA, 18 bp, Homo sapiens
atcgaggtcgatggccac

SEQ ID NO: 17822 - DNA, 19 bp, Homo sapiens
cctaaggcttggaggggag

SEQ ID NO: 17823 - DNA, 16 bp, Homo sapiens
ggaagtccatgcgggg

SEQ ID NO: 17824 - DNA, 18 bp, Homo sapiens
acttcttgggggagaagc

SEQ ID NO: 17825 - DNA, 16 bp, Homo sapiens
gcgctcgcggtccagc

SEQ ID NO: 17826 - DNA, 16 bp, Homo sapiens
gccctcaggtggtggc

SEQ ID NO: 17827 - DNA, 17 bp, Homo sapiens
gtggagctcttggtggg

SEQ ID NO: 17828 - DNA, 16 bp, Homo sapiens
gcatgccggtgggcat

SEQ ID NO: 17829 - DNA, 18 bp, Homo sapiens
cccacacactgagcacac

SEQ ID NO: 17830 - DNA, 23 bp, Homo sapiens
cgtggtggtcaccaccaccgagc

SEQ ID NO: 17831 - DNA, 21 bp, Homo sapiens
ccaatagacagcagtggggga

SEQ ID NO: 17832 - DNA, 18 bp, Homo sapiens
cagtgatgcaggcacgcc

SEQ ID NO: 17833 - DNA, 22 bp, Homo sapiens
tgctgtgttgaatggctccagc

SEQ ID NO: 17834 - DNA, 18 bp, Homo sapiens
cgtctcgtcgttcacatc

SEQ ID NO: 17835 - DNA, 23 bp, Homo sapiens
gttgacacagatgccacttggag

SEQ ID NO: 17836 - DNA, 18 bp, Homo sapiens
gaactcgcgtggcacgtc

SEQ ID NO: 17837 - DNA, 24 bp, Homo sapiens
ggtgctggagacgctgctctggag

SEQ ID NO: 17838 - DNA, 16 bp, Homo sapiens
gctctgcattgaggcc

SEQ ID NO: 17839 - DNA, 16 bp, Homo sapiens
cgttctgccccgcagt

SEQ ID NO: 17840 - DNA, 16 bp, Homo sapiens
cagggccccaggaggc

SEQ ID NO: 17841 - DNA, 22 bp, Homo sapiens
ccgtgtacaatgtgtctgtgtc

SEQ ID NO: 17842 - DNA, 16 bp, Homo sapiens
ttccaccctcacctgc

SEQ ID NO: 17843 - DNA, 16 bp, Homo sapiens
acaacgacgtgggcct

SEQ ID NO: 17844 - DNA, 18 bp, Homo sapiens
gagccaggagcaaatcct

SEQ ID NO: 17845 - DNA, 16 bp, Homo sapiens
cgcccacctgtgcagg

SEQ ID NO: 17846 - DNA, 16 bp, Homo sapiens
gaggtccccagggagc

SEQ ID NO: 17847 - DNA, 21 bp, Homo sapiens
tcagagcacctcaggcagggc

SEQ ID NO: 17848 - DNA, 16 bp, Homo sapiens
caggcccaccacggtt

SEQ ID NO: 17849 - DNA, 23 bp, Homo sapiens
gggtcccagctcaggagcagagt

SEQ ID NO: 17850 - DNA, 16 bp, Homo sapiens
cgggactggtgcatac

SEQ ID NO: 17851 - DNA, 22 bp, Homo sapiens
ccggaagcttcctctccttcac

SEQ ID NO: 17852 - DNA, 24 bp, Homo sapiens
cctttagcaaaaggccagctcctg

SEQ ID NO: 17853 - DNA, 20 bp, Homo sapiens
cgcgatgccgttgtgagaac

SEQ ID NO: 17854 - DNA, 16 bp, Homo sapiens
tgagtgcctggtggcc

SEQ ID NO: 17855 - DNA, 24 bp, Homo sapiens
ctacatgctcatcctggaggccat

SEQ ID NO: 17856 - DNA, 21 bp, Homo sapiens
ctaaaaaggaagtcacccctt

SEQ ID NO: 17857 - DNA, 19 bp, Homo sapiens
gttgtcattcacatccagg

SEQ ID NO: 17858 - DNA, 16 bp, Homo sapiens
ggtgcccgggagtgtg

SEQ ID NO: 17859 - DNA, 18 bp, Homo sapiens
cagggatgtcctcaggga

SEQ ID NO: 17860 - DNA, 23 bp, Homo sapiens
ctaacacctgtcttccttcaact

SEQ ID NO: 17861 - DNA, 16 bp, Homo sapiens
ccagcccaccacctgc

SEQ ID NO: 17862 - DNA, 16 bp, Homo sapiens
gtgttcgtcactgtcc

SEQ ID NO: 17863 - DNA, 18 bp, Homo sapiens
tgcttccgcctctggtgc

SEQ ID NO: 17864 - DNA, 17 bp, Homo sapiens
agctatgaggccagcgt

SEQ ID NO: 17865 - DNA, 18 bp, Homo sapiens
gcctgggtccccctttcc

SEQ ID NO: 17866 - DNA, 22 bp, Homo sapiens
caaactcgccctcatctgcgtc

SEQ ID NO: 17867 - DNA, 18 bp, Homo sapiens
gagggagaccacaggttt

SEQ ID NO: 17868 - DNA, 16 bp, Homo sapiens
catcctagggcagccc

SEQ ID NO: 17869 - DNA, 21 bp, Homo sapiens
ggaactctaaaaacctcttct

SEQ ID NO: 17870 - DNA, 18 bp, Homo sapiens
ctcccagacctttggcag

SEQ ID NO: 17871 - DNA, 24 bp, Homo sapiens
tctcattcttcctcagctgaaagc

SEQ ID NO: 17872 - DNA, 20 bp, Homo sapiens
atgtccctgtttcctccctc

SEQ ID NO: 17873 - DNA, 22 bp, Homo sapiens
catggatccggaagttgttgcc

SEQ ID NO: 17874 - DNA, 17 bp, Homo sapiens
gtgtcccagaagacccg

SEQ ID NO: 17875 - DNA, 17 bp, Homo sapiens
agttccgctcccggtcc

SEQ ID NO: 17876 - DNA, 23 bp, Homo sapiens
ccccaaccatggcaggccagcac

SEQ ID NO: 17877 - DNA, 16 bp, Homo sapiens
gagctccgcatggggc

SEQ ID NO: 17878 - DNA, 16 bp, Homo sapiens
acacaggtaaccatgg

SEQ ID NO: 17879 - DNA, 23 bp, Homo sapiens
ctgttctagctgtgggcttggcc

SEQ ID NO: 17880 - DNA, 24 bp, Homo sapiens
ctcctgatgcgagggccccggccc

SEQ ID NO: 17881 - DNA, 23 bp, Homo sapiens
gtcattcagcacctaaatcagtg

SEQ ID NO: 17882 - DNA, 16 bp, Homo sapiens
caaccacgacctgggc

SEQ ID NO: 17883 - DNA, 18 bp, Homo sapiens
gtgacccaccagacaggc

SEQ ID NO: 17884 - DNA, 17 bp, Homo sapiens
cagacggctgtactgct

SEQ ID NO: 17885 - DNA, 19 bp, Homo sapiens
agtgaccacacaaggcggc

SEQ ID NO: 17886 - DNA, 16 bp, Homo sapiens
gtctgtggcttggacc

SEQ ID NO: 17887 - DNA, 23 bp, Homo sapiens
caccctgaccttgcacccctggc

SEQ ID NO: 17888 - DNA, 18 bp, Homo sapiens
aggtttgctctgagcaat

SEQ ID NO: 17889 - DNA, 16 bp, Homo sapiens
cccgtgttcacacagc

SEQ ID NO: 17890 - DNA, 16 bp, Homo sapiens
aatggggagcctgaag

SEQ ID NO: 17891 - DNA, 19 bp, Homo sapiens
attggaacgtcagtcatcg

SEQ ID NO: 17892 - DNA, 18 bp, Homo sapiens
ccactggtgggaagtgat

SEQ ID NO: 17893 - DNA, 19 bp, Homo sapiens
atgcggtagttcaccaggc

SEQ ID NO: 17894 - DNA, 16 bp, Homo sapiens
gcagaggtggggcagc

SEQ ID NO: 17895 - DNA, 21 bp, Homo sapiens
taattcacggtgatgataagc

SEQ ID NO: 17896 - DNA, 19 bp, Homo sapiens
ttgagaagccacagcgcag

SEQ ID NO: 17897 - DNA, 16 bp, Homo sapiens
gtcagtggccgacaca

SEQ ID NO: 17898 - DNA, 22 bp, Homo sapiens
gtcctcctacaggggatggtgg

SEQ ID NO: 17899 - DNA, 16 bp, Homo sapiens
gtccagctcgttgagc

SEQ ID NO: 17900 - DNA, 23 bp, Homo sapiens
gaagtttgagattgacgagagca

SEQ ID NO: 17901 - DNA, 16 bp, Homo sapiens
cccagtgccagattct

SEQ ID NO: 17902 - DNA, 19 bp, Homo sapiens
agctacatgatgaatgtgt

SEQ ID NO: 17903 - DNA, 22 bp, Homo sapiens
cggtacgtgatttggttgaggt

SEQ ID NO: 17904 - DNA, 19 bp, Homo sapiens
ctgcagcgtctacatcact

SEQ ID NO: 17905 - DNA, 17 bp, Homo sapiens
ccgtgatggcgtctatc

SEQ ID NO: 17906 - DNA, 20 bp, Homo sapiens
ctcatacgaggctgccatcc

SEQ ID NO: 17907 - DNA, 21 bp, Homo sapiens
aaggagctcaaccaatgttgg

SEQ ID NO: 17908 - DNA, 20 bp, Homo sapiens
gcctactccatcgacaacct

SEQ ID NO: 17909 - DNA, 21 bp, Homo sapiens
taacaccacacttggccatct

SEQ ID NO: 17910 - DNA, 24 bp, Homo sapiens
cacccaggccaaagccctcttcaa

SEQ ID NO: 17911 - DNA, 19 bp, Homo sapiens
gctgaagcaatcttcctgc

SEQ ID NO: 17912 - DNA, 24 bp, Homo sapiens
caccatttcttccaatctaaccaa

SEQ ID NO: 17913 - DNA, 18 bp, Homo sapiens
gactgtgatcacaccctg

SEQ ID NO: 17914 - DNA, 24 bp, Homo sapiens
tgtgagagagaagaaggaattcaa

SEQ ID NO: 17915 - DNA, 16 bp, Homo sapiens
catctgccaccactgt

SEQ ID NO: 17916 - DNA, 24 bp, Homo sapiens
aggaagtgacatggaggtggaaaa

SEQ ID NO: 17917 - DNA, 16 bp, Homo sapiens
ggactctcaccctggt

SEQ ID NO: 17918 - DNA, 22 bp, Homo sapiens
tcactcacccatctggcccctt

SEQ ID NO: 17919 - DNA, 16 bp, Homo sapiens
tacattgggtggctgg

SEQ ID NO: 17920 - DNA, 24 bp, Homo sapiens
gagaagggcgacttctataccttg

SEQ ID NO: 17921 - DNA, 16 bp, Homo sapiens
catggctggacatggc

SEQ ID NO: 17922 - DNA, 19 bp, Homo sapiens
cacaggctactcaccttct

SEQ ID NO: 17923 - DNA, 20 bp, Homo sapiens
gggctaggatgagacctcag

SEQ ID NO: 17924 - DNA, 16 bp, Homo sapiens
caggcagagcccggcc

SEQ ID NO: 17925 - DNA, 24 bp, Homo sapiens
gagtggggtctggaagagccacag

SEQ ID NO: 17926 - DNA, 17 bp, Homo sapiens
gggggcctgctgcaggc

SEQ ID NO: 17927 - DNA, 17 bp, Homo sapiens
gctgcctctgcctacag

SEQ ID NO: 17928 - DNA, 21 bp, Homo sapiens
cattctcgtccagcacagtga

SEQ ID NO: 17929 - DNA, 22 bp, Homo sapiens
gctctgagggtttgctgatgtt

SEQ ID NO: 17930 - DNA, 16 bp, Homo sapiens
tcctcgggtatgctga

SEQ ID NO: 17931 - DNA, 17 bp, Homo sapiens
acccaggtgtttggggc

SEQ ID NO: 17932 - DNA, 16 bp, Homo sapiens
tgcccattgctgccag

SEQ ID NO: 17933 - DNA, 19 bp, Homo sapiens
cctcaggtctacatcactg

SEQ ID NO: 17934 - DNA, 19 bp, Homo sapiens
gtgagagctgtgggagccc

SEQ ID NO: 17935 - DNA, 16 bp, Homo sapiens
cctccgactcggcggt

SEQ ID NO: 17936 - DNA, 18 bp, Homo sapiens
gagaccggaagaacctgg

SEQ ID NO: 17937 - DNA, 24 bp, Homo sapiens
tggctactgtcaaggcctgggacc

SEQ ID NO: 17938 - DNA, 19 bp, Homo sapiens
ccgcgatgttgccagaggc

SEQ ID NO: 17939 - DNA, 18 bp, Homo sapiens
actcccaaaagcccttgc

SEQ ID NO: 17940 - DNA, 17 bp, Homo sapiens
tggccacaaacacttcg

SEQ ID NO: 17941 - DNA, 18 bp, Homo sapiens
ttggcttgacctggccac

SEQ ID NO: 17942 - DNA, 17 bp, Homo sapiens
caagggaggccaggccc

SEQ ID NO: 17943 - DNA, 24 bp, Homo sapiens
tctccccacaggtggtcttctccc

SEQ ID NO: 17944 - DNA, 16 bp, Homo sapiens
acaggctctctcctgg

SEQ ID NO: 17945 - DNA, 20 bp, Homo sapiens
accaccaatgactccattgg

SEQ ID NO: 17946 - DNA, 18 bp, Homo sapiens
agctggccccatgttact

SEQ ID NO: 17947 - DNA, 18 bp, Homo sapiens
cttcttccgtggaggggt

SEQ ID NO: 17948 - DNA, 24 bp, Homo sapiens
ggggttctcagtgagtctctttgc

SEQ ID NO: 17949 - DNA, 18 bp, Homo sapiens
cgatgactggagggttgt

SEQ ID NO: 17950 - DNA, 21 bp, Homo sapiens
tccatattcccaatcctgccc

SEQ ID NO: 17951 - DNA, 24 bp, Homo sapiens
atgtccagctatatgggccccggg

SEQ ID NO: 17952 - DNA, 20 bp, Homo sapiens
gttgtggcttctgaccgagg

SEQ ID NO: 17953 - DNA, 22 bp, Homo sapiens
ggcagacatttaaacaggggct

SEQ ID NO: 17954 - DNA, 21 bp, Homo sapiens
gaccatcctggacatcaatga

SEQ ID NO: 17955 - DNA, 24 bp, Homo sapiens
ttagggctatcactacgaatgagc

SEQ ID NO: 17956 - DNA, 24 bp, Homo sapiens
cagcagtacctccacccacgttct

SEQ ID NO: 17957 - DNA, 24 bp, Homo sapiens
tcatccttattatctccatcattg

SEQ ID NO: 17958 - DNA, 19 bp, Homo sapiens
gacagaacactgttgatcc

SEQ ID NO: 17959 - DNA, 24 bp, Homo sapiens
gggggagccttcgggctacaggag

SEQ ID NO: 17960 - DNA, 16 bp, Homo sapiens
gctgatgcggtccatg

SEQ ID NO: 17961 - DNA, 16 bp, Homo sapiens
gctctcctgctctcct

SEQ ID NO: 17962 - DNA, 17 bp, Homo sapiens
ccaggtggtagaagctc

SEQ ID NO: 17963 - DNA, 18 bp, Homo sapiens
agccactgaccgtgacat

SEQ ID NO: 17964 - DNA, 16 bp, Homo sapiens
tccctgtggccacccc

SEQ ID NO: 17965 - DNA, 22 bp, Homo sapiens
gcaacaaggacatggccttccg

SEQ ID NO: 17966 - DNA, 18 bp, Homo sapiens
tctcacccatcttgttcc

SEQ ID NO: 17967 - DNA, 16 bp, Homo sapiens
gcgagcgccagagctt

SEQ ID NO: 17968 - DNA, 20 bp, Homo sapiens
tggactaaaggcagatggac

SEQ ID NO: 17969 - DNA, 17 bp, Homo sapiens
ccaaccctgtcggtgag

SEQ ID NO: 17970 - DNA, 22 bp, Homo sapiens
tcatccacaatggtcacgtaca

SEQ ID NO: 17971 - DNA, 21 bp, Homo sapiens
ccccctgctttcttctccttg

SEQ ID NO: 17972 - DNA, 22 bp, Homo sapiens
ctcatccagcagcacctcatag

SEQ ID NO: 17973 - DNA, 23 bp, Homo sapiens
gagaacagccatctggatccacc

SEQ ID NO: 17974 - DNA, 17 bp, Homo sapiens
tcatccaggtccagtgc

SEQ ID NO: 17975 - DNA, 24 bp, Homo sapiens
actcttttccacaggccaccacgc

SEQ ID NO: 17976 - DNA, 16 bp, Homo sapiens
atgcggaaggtgttga

SEQ ID NO: 17977 - DNA, 16 bp, Homo sapiens
atgttccagcagcccc

SEQ ID NO: 17978 - DNA, 24 bp, Homo sapiens
ccctggataggtttcgccccttgt

SEQ ID NO: 17979 - DNA, 19 bp, Homo sapiens
accagcctcatcaccatcc

SEQ ID NO: 17980 - DNA, 18 bp, Homo sapiens
cccctagactgcatcttt

SEQ ID NO: 17981 - DNA, 16 bp, Homo sapiens
tcgtcgcaggcaacat

SEQ ID NO: 17982 - DNA, 16 bp, Homo sapiens
ccaggctccactccac

SEQ ID NO: 17983 - DNA, 24 bp, Homo sapiens
agtgtgggaggatgaaaagtttgg

SEQ ID NO: 17984 - DNA, 24 bp, Homo sapiens
tgacgatcagggtgtagcggccgt

SEQ ID NO: 17985 - DNA, 24 bp, Homo sapiens
ccatcacagctccaatgtcagggc

SEQ ID NO: 17986 - DNA, 18 bp, Homo sapiens
cgtggtggtagaggtgag

SEQ ID NO: 17987 - DNA, 20 bp, Homo sapiens
acccctagatccatccttgt

SEQ ID NO: 17988 - DNA, 23 bp, Homo sapiens
gagctttctgggtcccatccttc

SEQ ID NO: 17989 - DNA, 17 bp, Homo sapiens
ggactacgagatcagcc

SEQ ID NO: 17990 - DNA, 20 bp, Homo sapiens
tcttggatttaggcatttcc

SEQ ID NO: 17991 - DNA, 20 bp, Homo sapiens
agtgccccatcttatcccac

SEQ ID NO: 17992 - DNA, 22 bp, Homo sapiens
gtcattcacattcacaagcacc

SEQ ID NO: 17993 - DNA, 20 bp, Homo sapiens
atccgacttcccatatgatt

SEQ ID NO: 17994 - DNA, 21 bp, Homo sapiens
cctcagtgacttcaaatggtc

SEQ ID NO: 17995 - DNA, 23 bp, Homo sapiens
catttcacagaggaaggaactga

SEQ ID NO: 17996 - DNA, 17 bp, Homo sapiens
gtcctgagtctcggtca

SEQ ID NO: 17997 - DNA, 22 bp, Homo sapiens
agcttttccaccatctcaggtg

SEQ ID NO: 17998 - DNA, 16 bp, Homo sapiens
cccaagccccactcac

SEQ ID NO: 17999 - DNA, 17 bp, Homo sapiens
ccgggactatgagggac

SEQ ID NO: 18000 - DNA, 19 bp, Homo sapiens
agacctcccttcttatcct

SEQ ID NO: 18001 - DNA, 18 bp, Homo sapiens
gaccttcctggcccatga

SEQ ID NO: 18002 - DNA, 24 bp, Homo sapiens
cattgtcatagatggggaaactga

SEQ ID NO: 18003 - DNA, 18 bp, Homo sapiens
tggagaccctctgggtga

SEQ ID NO: 18004 - DNA, 20 bp, Homo sapiens
aggatctgaagctggggtca

SEQ ID NO: 18005 - DNA, 16 bp, Homo sapiens
tctcccggtccagctc

SEQ ID NO: 18006 - DNA, 24 bp, Homo sapiens
cgagtgaggcttgctagaggaagc

SEQ ID NO: 18007 - DNA, 16 bp, Homo sapiens
tgagtgggggcatccc

SEQ ID NO: 18008 - DNA, 19 bp, Homo sapiens
gactaacttgggcctctcc

SEQ ID NO: 18009 - DNA, 19 bp, Homo sapiens
tctgtggcaagtacagggg

SEQ ID NO: 18010 - DNA, 19 bp, Homo sapiens
tgctaagggtccggaagga

SEQ ID NO: 18011 - DNA, 16 bp, Homo sapiens
cagggcagcctgtggc

SEQ ID NO: 18012 - DNA, 17 bp, Homo sapiens
catctgtgcccgtgacc

SEQ ID NO: 18013 - DNA, 21 bp, Homo sapiens
ccaaagagttgctggatgtgg

SEQ ID NO: 18014 - DNA, 24 bp, Homo sapiens
tctttttcttctttcttcctctcc

SEQ ID NO: 18015 - DNA, 17 bp, Homo sapiens
ggcaggttcagcagcac

SEQ ID NO: 18016 - DNA, 17 bp, Homo sapiens
ctccatgccgcccttgg

SEQ ID NO: 18017 - DNA, 17 bp, Homo sapiens
ccaggacatgggcgaca

SEQ ID NO: 18018 - DNA, 18 bp, Homo sapiens
ctcccctccctcctcctt

SEQ ID NO: 18019 - DNA, 22 bp, Homo sapiens
gcccgctcgcggttgcccgcag

SEQ ID NO: 18020 - DNA, 18 bp, Homo sapiens
acatcaacgacaacgacc

SEQ ID NO: 18021 - DNA, 16 bp, Homo sapiens
ggaagctccctggggt

SEQ ID NO: 18022 - DNA, 24 bp, Homo sapiens
gcgagaacagccctgtctccagct

SEQ ID NO: 18023 - DNA, 16 bp, Homo sapiens
cccagatggtggcagc

SEQ ID NO: 18024 - DNA, 23 bp, Homo sapiens
tgcacgcctcaccttcaacatca

SEQ ID NO: 18025 - DNA, 24 bp, Homo sapiens
ggtgaatccaagattccatgcttc

SEQ ID NO: 18026 - DNA, 17 bp, Homo sapiens
ggcatgagtgggtcact

SEQ ID NO: 18027 - DNA, 17 bp, Homo sapiens
ggatccgctcgcggtcc

SEQ ID NO: 18028 - DNA, 23 bp, Homo sapiens
gccttctagatcatctcttaggc

SEQ ID NO: 18029 - DNA, 22 bp, Homo sapiens
ctcctggctatgcgtggattct

SEQ ID NO: 18030 - DNA, 23 bp, Homo sapiens
caaagtagaaagcagggaaaagg

SEQ ID NO: 18031 - DNA, 19 bp, Homo sapiens
gttctctctccatgcgcct

SEQ ID NO: 18032 - DNA, 19 bp, Homo sapiens
ggatcgtcactgtgaaccg

SEQ ID NO: 18033 - DNA, 19 bp, Homo sapiens
cactccaaagcctgtgcat

SEQ ID NO: 18034 - DNA, 24 bp, Homo sapiens
gaccatttctgtgaaggacaaccc

SEQ ID NO: 18035 - DNA, 24 bp, Homo sapiens
aagatcagaagcaagtcataatcc

SEQ ID NO: 18036 - DNA, 22 bp, Homo sapiens
aaaatgtgagttcatgttggtg

SEQ ID NO: 18037 - DNA, 19 bp, Homo sapiens
cctggtaggtgcttttagt

SEQ ID NO: 18038 - DNA, 17 bp, Homo sapiens
aacctcccaaccctcct

SEQ ID NO: 18039 - DNA, 16 bp, Homo sapiens
aacagcaggagctccc

SEQ ID NO: 18040 - DNA, 17 bp, Homo sapiens
cccattctgccccttgc

SEQ ID NO: 18041 - DNA, 18 bp, Homo sapiens
cagctatgccgttaggca

SEQ ID NO: 18042 - DNA, 21 bp, Homo sapiens
gaatgacaaccaccccctctt

SEQ ID NO: 18043 - DNA, 16 bp, Homo sapiens
caccatctcccggagc

SEQ ID NO: 18044 - DNA, 16 bp, Homo sapiens
accgtgagaggggtgc

SEQ ID NO: 18045 - DNA, 16 bp, Homo sapiens
gcctccccaccctgtc

SEQ ID NO: 18046 - DNA, 16 bp, Homo sapiens
caccacggcgtagatg

SEQ ID NO: 18047 - DNA, 16 bp, Homo sapiens
gctcaccgggacaggg

SEQ ID NO: 18048 - DNA, 16 bp, Homo sapiens
cctcaccggtgctgct

SEQ ID NO: 18049 - DNA, 20 bp, Homo sapiens
gtgacccctctccttctggc

SEQ ID NO: 18050 - DNA, 18 bp, Homo sapiens
caatccagcagtgtggcc

SEQ ID NO: 18051 - DNA, 23 bp, Homo sapiens
cctggatgcagaccaagacatct

SEQ ID NO: 18052 - DNA, 24 bp, Homo sapiens
ggactctgggctgtgaaaaatggg

SEQ ID NO: 18053 - DNA, 24 bp, Homo sapiens
agtggcctctttgacatcaacagc

SEQ ID NO: 18054 - DNA, 23 bp, Homo sapiens
ggagaaagtcattttgttactgc

SEQ ID NO: 18055 - DNA, 18 bp, Homo sapiens
cagctccaggatgggtgg

SEQ ID NO: 18056 - DNA, 24 bp, Homo sapiens
ctttctctgctctctccctgttgg

SEQ ID NO: 18057 - DNA, 22 bp, Homo sapiens
atccaggatggtgatgagcagg

SEQ ID NO: 18058 - DNA, 17 bp, Homo sapiens
gtttccctggctggcgg

SEQ ID NO: 18059 - DNA, 22 bp, Homo sapiens
agttctctagcagatggacagt

SEQ ID NO: 18060 - DNA, 22 bp, Homo sapiens
attgaccgggaggcattctcgc

SEQ ID NO: 18061 - DNA, 16 bp, Homo sapiens
cccctggttgtggggt

SEQ ID NO: 18062 - DNA, 16 bp, Homo sapiens
tgctcaacagcacggc

SEQ ID NO: 18063 - DNA, 23 bp, Homo sapiens
cccatctttctccccactggagg

SEQ ID NO: 18064 - DNA, 16 bp, Homo sapiens
cacctttagccctgcc

SEQ ID NO: 18065 - DNA, 18 bp, Homo sapiens
cccaggtctcctgactcc

SEQ ID NO: 18066 - DNA, 21 bp, Homo sapiens
acttgaaggactgagaatcct

SEQ ID NO: 18067 - DNA, 21 bp, Homo sapiens
aattgcaagtatgaaaaaggt

SEQ ID NO: 18068 - DNA, 19 bp, Homo sapiens
ctattcggtagaccagctc

SEQ ID NO: 18069 - DNA, 24 bp, Homo sapiens
acttgagaagatcaccaacaaatg

SEQ ID NO: 18070 - DNA, 16 bp, Homo sapiens
ccaacacggatgaccc

SEQ ID NO: 18071 - DNA, 20 bp, Homo sapiens
agctactcccttttccctct

SEQ ID NO: 18072 - DNA, 16 bp, Homo sapiens
ggtcggtggccaccac

SEQ ID NO: 18073 - DNA, 17 bp, Homo sapiens
cagtggcctcaatgggg

SEQ ID NO: 18074 - DNA, 18 bp, Homo sapiens
ggagtcattgatgtcatc

SEQ ID NO: 18075 - DNA, 24 bp, Homo sapiens
tcctcattcatctggtcaccgggg

SEQ ID NO: 18076 - DNA, 16 bp, Homo sapiens
ctggctcagccgactc

SEQ ID NO: 18077 - DNA, 19 bp, Homo sapiens
aggagtcctacaggctaac

SEQ ID NO: 18078 - DNA, 20 bp, Homo sapiens
tgtggtactctagctttggg

SEQ ID NO: 18079 - DNA, 23 bp, Homo sapiens
cacagccattgtcaccattctga

SEQ ID NO: 18080 - DNA, 16 bp, Homo sapiens
cctcctggttgggcac

SEQ ID NO: 18081 - DNA, 21 bp, Homo sapiens
aaccccatccagacagtgagc

SEQ ID NO: 18082 - DNA, 16 bp, Homo sapiens
gggaggtgggaggggt

SEQ ID NO: 18083 - DNA, 24 bp, Homo sapiens
aatatcacggccattgaccacgac

SEQ ID NO: 18084 - DNA, 23 bp, Homo sapiens
gaacagcaaagaaagagaaagga

SEQ ID NO: 18085 - DNA, 22 bp, Homo sapiens
gccaaggacgacactgatcgcc

SEQ ID NO: 18086 - DNA, 22 bp, Homo sapiens
gaaaagagaaggacggttctgg

SEQ ID NO: 18087 - DNA, 24 bp, Homo sapiens
gggggacttcaccattacagatcc

SEQ ID NO: 18088 - DNA, 16 bp, Homo sapiens
caccccagccacaagt

SEQ ID NO: 18089 - DNA, 23 bp, Homo sapiens
attgtcaatcactgagagagtga

SEQ ID NO: 18090 - DNA, 21 bp, Homo sapiens
gagggtttggccaggagcacc

SEQ ID NO: 18091 - DNA, 22 bp, Homo sapiens
agatgtctgcagggaaccttac

SEQ ID NO: 18092 - DNA, 18 bp, Homo sapiens
gaacctggcctggtctgg

SEQ ID NO: 18093 - DNA, 17 bp, Homo sapiens
cagtgcctgttccccac

SEQ ID NO: 18094 - DNA, 18 bp, Homo sapiens
ggttgccacctatgaggt

SEQ ID NO: 18095 - DNA, 16 bp, Homo sapiens
ctgactcctggccccc

SEQ ID NO: 18096 - DNA, 20 bp, Homo sapiens
tctgtcagtgtgccaaatgg

SEQ ID NO: 18097 - DNA, 21 bp, Homo sapiens
tattgtcattgacgtccagga

SEQ ID NO: 18098 - DNA, 24 bp, Homo sapiens
aatcctcaggcagcctctgggggg

SEQ ID NO: 18099 - DNA, 17 bp, Homo sapiens
cccctccaggatccgct

SEQ ID NO: 18100 - DNA, 20 bp, Homo sapiens
taaggaaggcctggcccagc

SEQ ID NO: 18101 - DNA, 17 bp, Homo sapiens
aaggcccttgtcagggt

SEQ ID NO: 18102 - DNA, 16 bp, Homo sapiens
cagccaagctgactgt

SEQ ID NO: 18103 - DNA, 18 bp, Homo sapiens
cctccagctggacatacc

SEQ ID NO: 18104 - DNA, 21 bp, Homo sapiens
tttgggatcacctactacatg

SEQ ID NO: 18105 - DNA, 20 bp, Homo sapiens
gcaagcagagatatatgtcc

SEQ ID NO: 18106 - DNA, 16 bp, Homo sapiens
ctgtggcagccgtgga

SEQ ID NO: 18107 - DNA, 20 bp, Homo sapiens
ttggatctggcccagtccac

SEQ ID NO: 18108 - DNA, 16 bp, Homo sapiens
ctggtgcccccagggt

SEQ ID NO: 18109 - DNA, 16 bp, Homo sapiens
gtcccttcccctggtt

SEQ ID NO: 18110 - DNA, 16 bp, Homo sapiens
ctccctgccgtgtgcc

SEQ ID NO: 18111 - DNA, 20 bp, Homo sapiens
taaagttgagccagtgcacc

SEQ ID NO: 18112 - DNA, 24 bp, Homo sapiens
caagtgaccacagctgcccctcgg

SEQ ID NO: 18113 - DNA, 24 bp, Homo sapiens
cacgatttccaggtagacagggat

SEQ ID NO: 18114 - DNA, 20 bp, Homo sapiens
aatgaggagtggccaaaatg

SEQ ID NO: 18115 - DNA, 18 bp, Homo sapiens
cacccacctggtaggagg

SEQ ID NO: 18116 - DNA, 18 bp, Homo sapiens
gtggactacgaggaggtg

SEQ ID NO: 18117 - DNA, 18 bp, Homo sapiens
ggaagatgcccaaagacc

SEQ ID NO: 18118 - DNA, 16 bp, Homo sapiens
gccccgggcagctgag

SEQ ID NO: 18119 - DNA, 20 bp, Homo sapiens
gcatcaagctgctcgtgggc

SEQ ID NO: 18120 - DNA, 24 bp, Homo sapiens
aatgacaacaaccccatctttgac

SEQ ID NO: 18121 - DNA, 24 bp, Homo sapiens
gatgattgtgcccacaggcacatc

SEQ ID NO: 18122 - DNA, 16 bp, Homo sapiens
agccccctgggagtgc

SEQ ID NO: 18123 - DNA, 20 bp, Homo sapiens
aaggctgtactcaatgagtg

SEQ ID NO: 18124 - DNA, 24 bp, Homo sapiens
gttctagggctgtgctcgggctct

SEQ ID NO: 18125 - DNA, 16 bp, Homo sapiens
tccatcactgctcacc

SEQ ID NO: 18126 - DNA, 20 bp, Homo sapiens
ctccaggaggctgtctttga

SEQ ID NO: 18127 - DNA, 20 bp, Homo sapiens
acaatacttttggtggctgc

SEQ ID NO: 18128 - DNA, 22 bp, Homo sapiens
gatgctgactcaggcaactttg

SEQ ID NO: 18129 - DNA, 19 bp, Homo sapiens
ttggctaaagaacctctgg

SEQ ID NO: 18130 - DNA, 24 bp, Homo sapiens
gagcaagtttgccatcaaccccac

SEQ ID NO: 18131 - DNA, 21 bp, Homo sapiens
agaagacagcacatagatgtc

SEQ ID NO: 18132 - DNA, 21 bp, Homo sapiens
tgctgggggcagaggttattg

SEQ ID NO: 18133 - DNA, 17 bp, Homo sapiens
agggttgtctttggcca

SEQ ID NO: 18134 - DNA, 22 bp, Homo sapiens
cagcatctggccatagtaggtg

SEQ ID NO: 18135 - DNA, 18 bp, Homo sapiens
gcccaggttggcacccct

SEQ ID NO: 18136 - DNA, 21 bp, Homo sapiens
ctccccctactagggtgacat

SEQ ID NO: 18137 - DNA, 22 bp, Homo sapiens
cagtctgcagcagtccacttgc

SEQ ID NO: 18138 - DNA, 20 bp, Homo sapiens
tatatcctgactgccttggc

SEQ ID NO: 18139 - DNA, 24 bp, Homo sapiens
ctcttgccttctcctttctgtcac

SEQ ID NO: 18140 - DNA, 18 bp, Homo sapiens
ccagcacttggatcacca

SEQ ID NO: 18141 - DNA, 24 bp, Homo sapiens
agactccaacacattagaagacat

SEQ ID NO: 18142 - DNA, 20 bp, Homo sapiens
attctcatacacgcttgtgc

SEQ ID NO: 18143 - DNA, 24 bp, Homo sapiens
aggcttactcctgcatgaccaggt

SEQ ID NO: 18144 - DNA, 18 bp, Homo sapiens
tgggaccttcatcctggt

SEQ ID NO: 18145 - DNA, 24 bp, Homo sapiens
tttggccttgacctccatccaccc

SEQ ID NO: 18146 - DNA, 19 bp, Homo sapiens
tccaaggaaggccacatac

SEQ ID NO: 18147 - DNA, 18 bp, Homo sapiens
agttctccaagccccagt

SEQ ID NO: 18148 - DNA, 21 bp, Homo sapiens
ccctctactcctggcctgggc

SEQ ID NO: 18149 - DNA, 17 bp, Homo sapiens
catgatggccactgacc

SEQ ID NO: 18150 - DNA, 17 bp, Homo sapiens
gcctctggcagtgggag

SEQ ID NO: 18151 - DNA, 16 bp, Homo sapiens
gagggccctggcgtgg

SEQ ID NO: 18152 - DNA, 24 bp, Homo sapiens
actgaacttctcgtaggactgcag

SEQ ID NO: 18153 - DNA, 16 bp, Homo sapiens
agggggaggcctgcca

SEQ ID NO: 18154 - DNA, 16 bp, Homo sapiens
tggtgccccagagtgg

SEQ ID NO: 18155 - DNA, 23 bp, Homo sapiens
accagagctactctcctgctccc

SEQ ID NO: 18156 - DNA, 17 bp, Homo sapiens
ggtgggcgcacaaagac

SEQ ID NO: 18157 - DNA, 21 bp, Homo sapiens
cttggtgaccacacagcggcc

SEQ ID NO: 18158 - DNA, 16 bp, Homo sapiens
ctggtgggcaggaggc

SEQ ID NO: 18159 - DNA, 21 bp, Homo sapiens
cacagatggtggagagccccc

SEQ ID NO: 18160 - DNA, 21 bp, Homo sapiens
caagtttccccacctttagag

SEQ ID NO: 18161 - DNA, 20 bp, Homo sapiens
aatgacaaccgccctgtctt

SEQ ID NO: 18162 - DNA, 24 bp, Homo sapiens
cccacctttacaaacttttattta

SEQ ID NO: 18163 - DNA, 18 bp, Homo sapiens
gagcgcagcgggatctcc

SEQ ID NO: 18164 - DNA, 16 bp, Homo sapiens
gagcaggcaggcgctc

SEQ ID NO: 18165 - DNA, 16 bp, Homo sapiens
accgccccgttgaggc

SEQ ID NO: 18166 - DNA, 17 bp, Homo sapiens
gagaaagagcaagggct

SEQ ID NO: 18167 - DNA, 22 bp, Homo sapiens
tgattgggtcgatgatgaagaa

SEQ ID NO: 18168 - DNA, 17 bp, Homo sapiens
ccttcctccccatgctc

SEQ ID NO: 18169 - DNA, 20 bp, Homo sapiens
cccttacgctgtacaccgcc

SEQ ID NO: 18170 - DNA, 24 bp, Homo sapiens
ctacgccacggacaaggatgaggg

SEQ ID NO: 18171 - DNA, 16 bp, Homo sapiens
gcccccagaagaaagc

SEQ ID NO: 18172 - DNA, 18 bp, Homo sapiens
caaccgggactgggagtt

SEQ ID NO: 18173 - DNA, 20 bp, Homo sapiens
ggattggcttggggacttcc

SEQ ID NO: 18174 - DNA, 16 bp, Homo sapiens
ctggaccgcgagtcgc

SEQ ID NO: 18175 - DNA, 17 bp, Homo sapiens
gtctggggcggggcttt

SEQ ID NO: 18176 - DNA, 16 bp, Homo sapiens
cagggccacctgcagc

SEQ ID NO: 18177 - DNA, 20 bp, Homo sapiens
aaagtccctaggggaactgg

SEQ ID NO: 18178 - DNA, 16 bp, Homo sapiens
aggaggtgggcaagct

SEQ ID NO: 18179 - DNA, 24 bp, Homo sapiens
tcttttcctctgactgtgctcttc

SEQ ID NO: 18180 - DNA, 23 bp, Homo sapiens
agtgtatataggagagtgtgtgc

SEQ ID NO: 18181 - DNA, 23 bp, Homo sapiens
cagtgccatacgagactatgcag

SEQ ID NO: 18182 - DNA, 22 bp, Homo sapiens
ttgttcttgcatgaagtgcatg

SEQ ID NO: 18183 - DNA, 23 bp, Homo sapiens
acgaaccccttttcgtgaggcct

SEQ ID NO: 18184 - DNA, 18 bp, Homo sapiens
agcagctggtactggggg

SEQ ID NO: 18185 - DNA, 22 bp, Homo sapiens
ggttctactcaccccataaggc

SEQ ID NO: 18186 - DNA, 18 bp, Homo sapiens
actgcgcctgtcacgttg

SEQ ID NO: 18187 - DNA, 19 bp, Homo sapiens
ctgaaacagggactggaag

SEQ ID NO: 18188 - DNA, 16 bp, Homo sapiens
ctctgtctggccccac

SEQ ID NO: 18189 - DNA, 19 bp, Homo sapiens
cctccctctgcagaaaggc

SEQ ID NO: 18190 - DNA, 16 bp, Homo sapiens
agggccaggagcaggg

SEQ ID NO: 18191 - DNA, 16 bp, Homo sapiens
gcaccctcgtgggcaa

SEQ ID NO: 18192 - DNA, 24 bp, Homo sapiens
gcagatggaagttcttctcttcgt

SEQ ID NO: 18193 - DNA, 24 bp, Homo sapiens
aacgcgatcgtgtactacttcatc

SEQ ID NO: 18194 - DNA, 19 bp, Homo sapiens
aagatggcttctcgctccc

SEQ ID NO: 18195 - DNA, 22 bp, Homo sapiens
gggctagagatgacccacatat

SEQ ID NO: 18196 - DNA, 16 bp, Homo sapiens
ggtccacggggaggtg

SEQ ID NO: 18197 - DNA, 18 bp, Homo sapiens
accctcagccggcaacga

SEQ ID NO: 18198 - DNA, 17 bp, Homo sapiens
tgtcctctagcacaacg

SEQ ID NO: 18199 - DNA, 16 bp, Homo sapiens
gctgcgggacctggac

SEQ ID NO: 18200 - DNA, 16 bp, Homo sapiens
ctccagtccctgcacc

SEQ ID NO: 18201 - DNA, 17 bp, Homo sapiens
atcgcagctggacacct

SEQ ID NO: 18202 - DNA, 19 bp, Homo sapiens
ggaagaggcaggtggtgta

SEQ ID NO: 18203 - DNA, 16 bp, Homo sapiens
cacactgcaggaggtg

SEQ ID NO: 18204 - DNA, 17 bp, Homo sapiens
catccagggccagcacc

SEQ ID NO: 18205 - DNA, 20 bp, Homo sapiens
cttcaccaaggctgagtaca

SEQ ID NO: 18206 - DNA, 18 bp, Homo sapiens
cggaagtagtggatggcc

SEQ ID NO: 18207 - DNA, 17 bp, Homo sapiens
gccctgccacttacacc

SEQ ID NO: 18208 - DNA, 16 bp, Homo sapiens
tgctgccaggccctac

SEQ ID NO: 18209 - DNA, 16 bp, Homo sapiens
ggctcagagttgatcc

SEQ ID NO: 18210 - DNA, 20 bp, Homo sapiens
atctccccccagatgacagt

SEQ ID NO: 18211 - DNA, 22 bp, Homo sapiens
agccttgtcttctacagcattc

SEQ ID NO: 18212 - DNA, 17 bp, Homo sapiens
ggattggtgtggctggc

SEQ ID NO: 18213 - DNA, 22 bp, Homo sapiens
agatgtgggccaggtcttcacc

SEQ ID NO: 18214 - DNA, 17 bp, Homo sapiens
gaaggtgcgcagaatgc

SEQ ID NO: 18215 - DNA, 16 bp, Homo sapiens
ctgctgtgccctgtgg

SEQ ID NO: 18216 - DNA, 21 bp, Homo sapiens
ccaggtctcgggccacaatgt

SEQ ID NO: 18217 - DNA, 17 bp, Homo sapiens
gccccttcctggggatt

SEQ ID NO: 18218 - DNA, 18 bp, Homo sapiens
gctggtcgtccctcagga

SEQ ID NO: 18219 - DNA, 19 bp, Homo sapiens
ttgggcttcctgcagggag

SEQ ID NO: 18220 - DNA, 17 bp, Homo sapiens
gtggatgaactcctcct

SEQ ID NO: 18221 - DNA, 19 bp, Homo sapiens
ccggctacttcgtggtgga

SEQ ID NO: 18222 - DNA, 17 bp, Homo sapiens
aggcacctgcacattgt

SEQ ID NO: 18223 - DNA, 20 bp, Homo sapiens
ccatcatcggcatctacatc

SEQ ID NO: 18224 - DNA, 16 bp, Homo sapiens
ttgtggcctggcctcc

SEQ ID NO: 18225 - DNA, 24 bp, Homo sapiens
cgagatccccgaccgtgtgcgcgg

SEQ ID NO: 18226 - DNA, 22 bp, Homo sapiens
taggaaatgactaagtagggac

SEQ ID NO: 18227 - DNA, 19 bp, Homo sapiens
ggggccattgtcaatactg

SEQ ID NO: 18228 - DNA, 16 bp, Homo sapiens
aagttcacccggccct

SEQ ID NO: 18229 - DNA, 23 bp, Homo sapiens
attcaaacattcagtagtgaagg

SEQ ID NO: 18230 - DNA, 16 bp, Homo sapiens
gtccacgtccaggatg

SEQ ID NO: 18231 - DNA, 16 bp, Homo sapiens
ccatccctgtggcccc

SEQ ID NO: 18232 - DNA, 16 bp, Homo sapiens
agggcagggaggcagg

SEQ ID NO: 18233 - DNA, 24 bp, Homo sapiens
ctcatctagttccatgtggacaag

SEQ ID NO: 18234 - DNA, 22 bp, Homo sapiens
cacacagtgggcctgatggtgt

SEQ ID NO: 18235 - DNA, 24 bp, Homo sapiens
tatccacgtggtgaaccgcgatac

SEQ ID NO: 18236 - DNA, 24 bp, Homo sapiens
aaccttgtaaaacacaaagctgtc

SEQ ID NO: 18237 - DNA, 22 bp, Homo sapiens
cgtccaggacgttgtagttccg

SEQ ID NO: 18238 - DNA, 21 bp, Homo sapiens
tgaactttggaggcttgaggc

SEQ ID NO: 18239 - DNA, 16 bp, Homo sapiens
gtacctgcagggcaga

SEQ ID NO: 18240 - DNA, 16 bp, Homo sapiens
tgagacccctgcccct

SEQ ID NO: 18241 - DNA, 16 bp, Homo sapiens
aggaccagggtaagcc

SEQ ID NO: 18242 - DNA, 23 bp, Homo sapiens
aaggagcagctacggaatctttt

SEQ ID NO: 18243 - DNA, 16 bp, Homo sapiens
caaagagcatggcggc

SEQ ID NO: 18244 - DNA, 20 bp, Homo sapiens
ctgccggatgacatgtctgc

SEQ ID NO: 18245 - DNA, 16 bp, Homo sapiens
cctgatggcaggggtg

SEQ ID NO: 18246 - DNA, 24 bp, Homo sapiens
gccctagccgccctccccactgcc

SEQ ID NO: 18247 - DNA, 16 bp, Homo sapiens
ggggccaagctgacgt

SEQ ID NO: 18248 - DNA, 24 bp, Homo sapiens
tcgtcctggctatcctcctgttcc

SEQ ID NO: 18249 - DNA, 18 bp, Homo sapiens
gccacaatggccttgagc

SEQ ID NO: 18250 - DNA, 23 bp, Homo sapiens
tacaggactgtgtgagtgtcccc

SEQ ID NO: 18251 - DNA, 16 bp, Homo sapiens
cagcccactgccttct

SEQ ID NO: 18252 - DNA, 17 bp, Homo sapiens
gcaggcagggcctgaga

SEQ ID NO: 18253 - DNA, 16 bp, Homo sapiens
ctgggcccagtgaagg

SEQ ID NO: 18254 - DNA, 17 bp, Homo sapiens
agacacaagaggaagct

SEQ ID NO: 18255 - DNA, 16 bp, Homo sapiens
gggcatagccaggggt

SEQ ID NO: 18256 - DNA, 18 bp, Homo sapiens
ccatgatgtcgatgaagc

SEQ ID NO: 18257 - DNA, 17 bp, Homo sapiens
acaagcctggctcaggc

SEQ ID NO: 18258 - DNA, 24 bp, Homo sapiens
cccgcaggggaccgggcagggcca

SEQ ID NO: 18259 - DNA, 18 bp, Homo sapiens
tcaccccccaacaccacc

SEQ ID NO: 18260 - DNA, 16 bp, Homo sapiens
ccccagcgctgggaga

SEQ ID NO: 18261 - DNA, 23 bp, Homo sapiens
cttctccctgcagggaatcgtgg

SEQ ID NO: 18262 - DNA, 16 bp, Homo sapiens
gtgaagggagggtggc

SEQ ID NO: 18263 - DNA, 17 bp, Homo sapiens
ctggtgggcgggccacc

SEQ ID NO: 18264 - DNA, 16 bp, Homo sapiens
gcctgtggtgcatgct

SEQ ID NO: 18265 - DNA, 16 bp, Homo sapiens
caggggctctccaccc

SEQ ID NO: 18266 - DNA, 17 bp, Homo sapiens
ctgcccatttccctggc

SEQ ID NO: 18267 - DNA, 17 bp, Homo sapiens
tgggtgcagggtgaagc

SEQ ID NO: 18268 - DNA, 17 bp, Homo sapiens
gggtggggagggaggga

SEQ ID NO: 18269 - DNA, 23 bp, Homo sapiens
ctggttccagcaggatcctatgg

SEQ ID NO: 18270 - DNA, 17 bp, Homo sapiens
ctccaggttccgacaga

SEQ ID NO: 18271 - DNA, 19 bp, Homo sapiens
gtgaaaggcactatatggc

SEQ ID NO: 18272 - DNA, 17 bp, Homo sapiens
ggcgatctcactcaggt

SEQ ID NO: 18273 - DNA, 19 bp, Homo sapiens
gtctactcgagccttccct

SEQ ID NO: 18274 - DNA, 16 bp, Homo sapiens
ctgccccttgtgatgc

SEQ ID NO: 18275 - DNA, 17 bp, Homo sapiens
cctgtgtggctggatcc

SEQ ID NO: 18276 - DNA, 19 bp, Homo sapiens
accccttaaagaacccagc

SEQ ID NO: 18277 - DNA, 24 bp, Homo sapiens
catgaggatgacctaccggagaac

SEQ ID NO: 18278 - DNA, 23 bp, Homo sapiens
ccctggggagaggggatgttagc

SEQ ID NO: 18279 - DNA, 17 bp, Homo sapiens
ccatgtgagccagaggc

SEQ ID NO: 18280 - DNA, 18 bp, Homo sapiens
gcaggtatcggtcatcat

SEQ ID NO: 18281 - DNA, 20 bp, Homo sapiens
tgcaacctctggccaagaag

SEQ ID NO: 18282 - DNA, 17 bp, Homo sapiens
cctcacgaatgatctgg

SEQ ID NO: 18283 - DNA, 23 bp, Homo sapiens
gtgtgtggggtctgcctctgctc

SEQ ID NO: 18284 - DNA, 17 bp, Homo sapiens
tccaacctcagccaagg

SEQ ID NO: 18285 - DNA, 23 bp, Homo sapiens
cgtgagccagcagctgtcaagcc

SEQ ID NO: 18286 - DNA, 16 bp, Homo sapiens
tggagggtgggtctag

SEQ ID NO: 18287 - DNA, 24 bp, Homo sapiens
gtatgacaacattgccaagctggg

SEQ ID NO: 18288 - DNA, 16 bp, Homo sapiens
gcccttaaggccaccg

SEQ ID NO: 18289 - DNA, 18 bp, Homo sapiens
ccaggctggccactgtct

SEQ ID NO: 18290 - DNA, 24 bp, Homo sapiens
tccgctgtgcaaagagctttttga

SEQ ID NO: 18291 - DNA, 22 bp, Homo sapiens
aggatcagatgtccgtgtaccc

SEQ ID NO: 18292 - DNA, 16 bp, Homo sapiens
cacccagccggctacc

SEQ ID NO: 18293 - DNA, 19 bp, Homo sapiens
ggccttggtgggggttaac

SEQ ID NO: 18294 - DNA, 24 bp, Homo sapiens
gaaggacagcaggacagcaagaga

SEQ ID NO: 18295 - DNA, 24 bp, Homo sapiens
gtggtcctggaggattacctgcgg

SEQ ID NO: 18296 - DNA, 17 bp, Homo sapiens
cccccacccattgctgt

SEQ ID NO: 18297 - DNA, 22 bp, Homo sapiens
ctcctcctgccactcctccatc

SEQ ID NO: 18298 - DNA, 22 bp, Homo sapiens
agctcagtctgtatcagctgca

SEQ ID NO: 18299 - DNA, 23 bp, Homo sapiens
gcaggcagtttgagaaacagagt

SEQ ID NO: 18300 - DNA, 17 bp, Homo sapiens
gcttgtggcggaagcgc

SEQ ID NO: 18301 - DNA, 17 bp, Homo sapiens
cagtgggtctctggggc

SEQ ID NO: 18302 - DNA, 16 bp, Homo sapiens
cccgtgctgccgtgca

SEQ ID NO: 18303 - DNA, 17 bp, Homo sapiens
gggtcccggcctcttgc

SEQ ID NO: 18304 - DNA, 18 bp, Homo sapiens
gagcggcccaggcccttc

SEQ ID NO: 18305 - DNA, 17 bp, Homo sapiens
gcccagggcagggtagc

SEQ ID NO: 18306 - DNA, 22 bp, Homo sapiens
atttggcggattctgtgcgggc

SEQ ID NO: 18307 - DNA, 19 bp, Homo sapiens
gatgggatccatgtggtgc

SEQ ID NO: 18308 - DNA, 24 bp, Homo sapiens
acagctctgtgatctccagggggg

SEQ ID NO: 18309 - DNA, 18 bp, Homo sapiens
gcctgcccgaggaagacc

SEQ ID NO: 18310 - DNA, 17 bp, Homo sapiens
acggtggatgggtgctg

SEQ ID NO: 18311 - DNA, 16 bp, Homo sapiens
cactgccttcgagcgc

SEQ ID NO: 18312 - DNA, 19 bp, Homo sapiens
aggcctggccttggagggt

SEQ ID NO: 18313 - DNA, 17 bp, Homo sapiens
cgacgtgatcatggaga

SEQ ID NO: 18314 - DNA, 24 bp, Homo sapiens
gtctggcaaaagtgggatctgagc

SEQ ID NO: 18315 - DNA, 21 bp, Homo sapiens
ctgggcatcttcaaagttatc

SEQ ID NO: 18316 - DNA, 16 bp, Homo sapiens
tggggcctggatgccc

SEQ ID NO: 18317 - DNA, 24 bp, Homo sapiens
gggaaagaaaaacaagtgttttac

SEQ ID NO: 18318 - DNA, 19 bp, Homo sapiens
actcagatcaccaacttgg

SEQ ID NO: 18319 - DNA, 24 bp, Homo sapiens
attgacttggtggtacacagctca

SEQ ID NO: 18320 - DNA, 18 bp, Homo sapiens
gactgcagtctggagcgg

SEQ ID NO: 18321 - DNA, 21 bp, Homo sapiens
attataaagcctccaaggggc

SEQ ID NO: 18322 - DNA, 22 bp, Homo sapiens
tctctggttccttttcattgta

SEQ ID NO: 18323 - DNA, 24 bp, Homo sapiens
attccggaatgctctcatggaaca

SEQ ID NO: 18324 - DNA, 20 bp, Homo sapiens
tggagattgcgcttattgtg

SEQ ID NO: 18325 - DNA, 21 bp, Homo sapiens
gacatctgcaagccagtcgtg

SEQ ID NO: 18326 - DNA, 23 bp, Homo sapiens
tgaaaagatactcaaagagattt

SEQ ID NO: 18327 - DNA, 23 bp, Homo sapiens
cttcacattgtatgtgggaggat

SEQ ID NO: 18328 - DNA, 24 bp, Homo sapiens
ggattgttctgaatggactgatgg

SEQ ID NO: 18329 - DNA, 24 bp, Homo sapiens
aggctgttaaattccaaaagtttc

SEQ ID NO: 18330 - DNA, 18 bp, Homo sapiens
gcctggccagaatcctga

SEQ ID NO: 18331 - DNA, 23 bp, Homo sapiens
atgatgttatctctaactttggt

SEQ ID NO: 18332 - DNA, 24 bp, Homo sapiens
cccctttaatgaaaagactaaaaa

SEQ ID NO: 18333 - DNA, 23 bp, Homo sapiens
tgaagagtaaatctggatattgg

SEQ ID NO: 18334 - DNA, 19 bp, Homo sapiens
tgcttccccagtcaaaggc

SEQ ID NO: 18335 - DNA, 20 bp, Homo sapiens
acttctgtgcaaaacatgtt

SEQ ID NO: 18336 - DNA, 20 bp, Homo sapiens
ctggggaagaaaaccagatc

SEQ ID NO: 18337 - DNA, 22 bp, Homo sapiens
tttcaatgtatttattttgcag

SEQ ID NO: 18338 - DNA, 22 bp, Homo sapiens
gggtttgcatgcccagaccttt

SEQ ID NO: 18339 - DNA, 20 bp, Homo sapiens
tgaagggcaaaatacaatgt

SEQ ID NO: 18340 - DNA, 21 bp, Homo sapiens
aatgcctacctggctccagtg

SEQ ID NO: 18341 - DNA, 24 bp, Homo sapiens
agtcaaataatttttttctacctc

SEQ ID NO: 18342 - DNA, 18 bp, Homo sapiens
acatccactctagactgc

SEQ ID NO: 18343 - DNA, 22 bp, Homo sapiens
attggccaaagttcatgcttgt

SEQ ID NO: 18344 - DNA, 20 bp, Homo sapiens
tcatgtcatactgaaggagc

SEQ ID NO: 18345 - DNA, 24 bp, Homo sapiens
ggtcattcccacctctcccatatc

SEQ ID NO: 18346 - DNA, 22 bp, Homo sapiens
ggagacaaagaatttcttcccc

SEQ ID NO: 18347 - DNA, 21 bp, Homo sapiens
tcttactataaacatgcatac

SEQ ID NO: 18348 - DNA, 18 bp, Homo sapiens
tgcaccagagtgaaatgc

SEQ ID NO: 18349 - DNA, 24 bp, Homo sapiens
agaagaaaacagagatttccacag

SEQ ID NO: 18350 - DNA, 19 bp, Homo sapiens
ttcgtggagacattgggta

SEQ ID NO: 18351 - DNA, 23 bp, Homo sapiens
cccagccacttcaaaaacgcact

SEQ ID NO: 18352 - DNA, 20 bp, Homo sapiens
tggtaaacttgtgcaaaagc

SEQ ID NO: 18353 - DNA, 24 bp, Homo sapiens
gattaccagatcatctcattaagg

SEQ ID NO: 18354 - DNA, 23 bp, Homo sapiens
gggtaaacggaaaaagaaaagcc

SEQ ID NO: 18355 - DNA, 16 bp, Homo sapiens
tgggtcctgtggcttc

SEQ ID NO: 18356 - DNA, 18 bp, Homo sapiens
gattatccctccccttgc

SEQ ID NO: 18357 - DNA, 22 bp, Homo sapiens
acaggttttatagcattttcac

SEQ ID NO: 18358 - DNA, 21 bp, Homo sapiens
gggatgggaggggtccaagta

SEQ ID NO: 18359 - DNA, 22 bp, Homo sapiens
gtgttttctgagaaggaaatcc

SEQ ID NO: 18360 - DNA, 20 bp, Homo sapiens
atagggctagtacagaaggc

SEQ ID NO: 18361 - DNA, 18 bp, Homo sapiens
tattgtttgcgtgggtct

SEQ ID NO: 18362 - DNA, 24 bp, Homo sapiens
aatccttttagccagctcagggat

SEQ ID NO: 18363 - DNA, 19 bp, Homo sapiens
tcaaggcaccactataggt

SEQ ID NO: 18364 - DNA, 25 bp, Homo sapiens
gttaccaacattccttatcttattc

SEQ ID NO: 18365 - DNA, 22 bp, Homo sapiens
ccagcttccattaacttcattc

SEQ ID NO: 18366 - DNA, 26 bp, Homo sapiens
tgaactaacatctttttatatttcac

SEQ ID NO: 18367 - DNA, 21 bp, Homo sapiens
tgaaagagttcctttcttgga

SEQ ID NO: 18368 - DNA, 22 bp, Homo sapiens
cttctgatcttatttacataca

SEQ ID NO: 18369 - DNA, 20 bp, Homo sapiens
actcatcaaactgcatactc

SEQ ID NO: 18370 - DNA, 24 bp, Homo sapiens
acacttgttcttggccagttttat

SEQ ID NO: 18371 - DNA, 18 bp, Homo sapiens
gctggtgttgtttcctgg

SEQ ID NO: 18372 - DNA, 20 bp, Homo sapiens
tcctagcaacatttaaaacc

SEQ ID NO: 18373 - DNA, 18 bp, Homo sapiens
ggaaatacctggtctcgg

SEQ ID NO: 18374 - DNA, 24 bp, Homo sapiens
tcagagttaccacctatctacctc

SEQ ID NO: 18375 - DNA, 16 bp, Homo sapiens
agcctgggcttcattc

SEQ ID NO: 18376 - DNA, 23 bp, Homo sapiens
aggaaatacatccatgccattat

SEQ ID NO: 18377 - DNA, 17 bp, Homo sapiens
tcttcctgcaacatggc

SEQ ID NO: 18378 - DNA, 23 bp, Homo sapiens
agaaactgagagtgtcttatgtt

SEQ ID NO: 18379 - DNA, 20 bp, Homo sapiens
gttttgaagcttggtgctac

SEQ ID NO: 18380 - DNA, 18 bp, Homo sapiens
gtcaaaaccagcatcagc

SEQ ID NO: 18381 - DNA, 23 bp, Homo sapiens
tctagttcattatttgcttatgg

SEQ ID NO: 18382 - DNA, 19 bp, Homo sapiens
tagaatctgccagcaagcc

SEQ ID NO: 18383 - DNA, 24 bp, Homo sapiens
gttttaaaaaaattctttactaac

SEQ ID NO: 18384 - DNA, 19 bp, Homo sapiens
ccgaattcctcatgggagg

SEQ ID NO: 18385 - DNA, 19 bp, Homo sapiens
acacagttagtgctttcgt

SEQ ID NO: 18386 - DNA, 19 bp, Homo sapiens
ttccctagtgaggaatacc

SEQ ID NO: 18387 - DNA, 21 bp, Homo sapiens
tggttactaacacaaaaccca

SEQ ID NO: 18388 - DNA, 18 bp, Homo sapiens
gattctgtccacccaatt

SEQ ID NO: 18389 - DNA, 22 bp, Homo sapiens
cccatacctttgtcagaatggt

SEQ ID NO: 18390 - DNA, 21 bp, Homo sapiens
agcctggagaacatagtttat

SEQ ID NO: 18391 - DNA, 19 bp, Homo sapiens
tcttctgtctcaactaggt

SEQ ID NO: 18392 - DNA, 22 bp, Homo sapiens
tgatgagaagttggctactaga

SEQ ID NO: 18393 - DNA, 23 bp, Homo sapiens
ttcagagaaattgaaaagcaaag

SEQ ID NO: 18394 - DNA, 18 bp, Homo sapiens
ggttggtggtctgtttgg

SEQ ID NO: 18395 - DNA, 19 bp, Homo sapiens
ctcacataactggatcggg

SEQ ID NO: 18396 - DNA, 27 bp, Homo sapiens
tttgtgtagtaaaattcaagcaaataa

SEQ ID NO: 18397 - DNA, 21 bp, Homo sapiens
ccacattcatgtttgtttcag

SEQ ID NO: 18398 - DNA, 20 bp, Homo sapiens
ccctaaatctggttcagaac

SEQ ID NO: 18399 - DNA, 19 bp, Homo sapiens
tgcagggtccagagaacca

SEQ ID NO: 18400 - DNA, 19 bp, Homo sapiens
tctcctttcagatatggct

SEQ ID NO: 18401 - DNA, 22 bp, Homo sapiens
ctcacagaagaccagacttggg

SEQ ID NO: 18402 - DNA, 18 bp, Homo sapiens
tggccacaagtcagggag

SEQ ID NO: 18403 - DNA, 18 bp, Homo sapiens
cctcccctgaggcccaga

SEQ ID NO: 18404 - DNA, 24 bp, Homo sapiens
gggttagaaagagttcaaactaag

SEQ ID NO: 18405 - DNA, 21 bp, Homo sapiens
cctctgcagtggcagtgaagg

SEQ ID NO: 18406 - DNA, 21 bp, Homo sapiens
ctcctgcagagatgctgggtc

SEQ ID NO: 18407 - DNA, 23 bp, Homo sapiens
ttacctcggaaggggaaggtgcc

SEQ ID NO: 18408 - DNA, 22 bp, Homo sapiens
cttgtccaggaatgtgggggtc

SEQ ID NO: 18409 - DNA, 24 bp, Homo sapiens
ttggtctctggctaaagggccact

SEQ ID NO: 18410 - DNA, 22 bp, Homo sapiens
gtatctacccccctgtgaccac

SEQ ID NO: 18411 - DNA, 22 bp, Homo sapiens
aatgacccactgagtaccagac

SEQ ID NO: 18412 - DNA, 24 bp, Homo sapiens
aactggaggagaatctgcacaaac

SEQ ID NO: 18413 - DNA, 16 bp, Homo sapiens
ggagccctggaccacg

SEQ ID NO: 18414 - DNA, 22 bp, Homo sapiens
cagctgtgtgggaaccttctgt

SEQ ID NO: 18415 - DNA, 16 bp, Homo sapiens
ggcgcacacggctcac

SEQ ID NO: 18416 - DNA, 24 bp, Homo sapiens
gtcgtaaggtaggaacaccaatgt

SEQ ID NO: 18417 - DNA, 18 bp, Homo sapiens
gcattctggctcacactc

SEQ ID NO: 18418 - DNA, 22 bp, Homo sapiens
agctgtgtctcttgcaggcttc

SEQ ID NO: 18419 - DNA, 16 bp, Homo sapiens
ggacccaagctagggc

SEQ ID NO: 18420 - DNA, 17 bp, Homo sapiens
gcgcctcgaggtggtga

SEQ ID NO: 18421 - DNA, 16 bp, Homo sapiens
ggacactgggccaagc

SEQ ID NO: 18422 - DNA, 17 bp, Homo sapiens
ctagctggctccggatg

SEQ ID NO: 18423 - DNA, 24 bp, Homo sapiens
gtggatgtgcaggatccaggctcc

SEQ ID NO: 18424 - DNA, 16 bp, Homo sapiens
gggtcaccaccatggc

SEQ ID NO: 18425 - DNA, 18 bp, Homo sapiens
gggacatgctgaggcacc

SEQ ID NO: 18426 - DNA, 24 bp, Homo sapiens
ctcacacacaccttggtgtagtgg

SEQ ID NO: 18427 - DNA, 24 bp, Homo sapiens
gcctgctctcacctctctccttcc

SEQ ID NO: 18428 - DNA, 18 bp, Homo sapiens
gcttcccttatctcctct

SEQ ID NO: 18429 - DNA, 16 bp, Homo sapiens
ccaggtcggggctgac

SEQ ID NO: 18430 - DNA, 17 bp, Homo sapiens
catggtggcagtccacc

SEQ ID NO: 18431 - DNA, 19 bp, Homo sapiens
cagtgcggccctcattcac

SEQ ID NO: 18432 - DNA, 23 bp, Homo sapiens
ggattggagagagatcagcaacc

SEQ ID NO: 18433 - DNA, 22 bp, Homo sapiens
gcacgtagcatgggagggaggc

SEQ ID NO: 18434 - DNA, 16 bp, Homo sapiens
gcatccacaggcaggt

SEQ ID NO: 18435 - DNA, 22 bp, Homo sapiens
ggacctgtgggtgggcaagtct

SEQ ID NO: 18436 - DNA, 16 bp, Homo sapiens
atcaccaccgctgtcc

SEQ ID NO: 18437 - DNA, 17 bp, Homo sapiens
ccccctccccaggttgc

SEQ ID NO: 18438 - DNA, 21 bp, Homo sapiens
aggagcaaaagtgctaggacc

SEQ ID NO: 18439 - DNA, 18 bp, Homo sapiens
gccaacacagggctggac

SEQ ID NO: 18440 - DNA, 18 bp, Homo sapiens
cacgacagagagaatcca

SEQ ID NO: 18441 - DNA, 22 bp, Homo sapiens
atattgtgggcatgaaggacag

SEQ ID NO: 18442 - DNA, 24 bp, Homo sapiens
agatctgtttccaaccttggcttc

SEQ ID NO: 18443 - DNA, 20 bp, Homo sapiens
cacctgaaaatcctgcttcc

SEQ ID NO: 18444 - DNA, 24 bp, Homo sapiens
ttcttgagggcatctctttgagca

SEQ ID NO: 18445 - DNA, 16 bp, Homo sapiens
cagtgggcggcctacc

SEQ ID NO: 18446 - DNA, 19 bp, Homo sapiens
aggatgaggctctgggcac

SEQ ID NO: 18447 - DNA, 17 bp, Homo sapiens
cgatctctcccggaaga

SEQ ID NO: 18448 - DNA, 22 bp, Homo sapiens
ttgggctgattgttcacaagac

SEQ ID NO: 18449 - DNA, 18 bp, Homo sapiens
ttttcagagtgggcaggc

SEQ ID NO: 18450 - DNA, 18 bp, Homo sapiens
tctgatggccagctatgc

SEQ ID NO: 18451 - DNA, 17 bp, Homo sapiens
agacgccccccacagct

SEQ ID NO: 18452 - DNA, 24 bp, Homo sapiens
cacagagcatgcctttgatgtagc

SEQ ID NO: 18453 - DNA, 16 bp, Homo sapiens
gcagcacagtcgctcc

SEQ ID NO: 18454 - DNA, 19 bp, Homo sapiens
ctgaagaggtgctgggacc

SEQ ID NO: 18455 - DNA, 24 bp, Homo sapiens
cactggctcaccgcagcgtttggc

SEQ ID NO: 18456 - DNA, 24 bp, Homo sapiens
gatgttctgcgtcttacttcgtgc

SEQ ID NO: 18457 - DNA, 20 bp, Homo sapiens
gtcctgctccaatgaggaca

SEQ ID NO: 18458 - DNA, 17 bp, Homo sapiens
gctcaggtgtgccagct

SEQ ID NO: 18459 - DNA, 23 bp, Homo sapiens
gggatgttctctcaaaggatttt

SEQ ID NO: 18460 - DNA, 17 bp, Homo sapiens
gcaccgcctcattgagc

SEQ ID NO: 18461 - DNA, 20 bp, Homo sapiens
tttcttcagccctgggatcc

SEQ ID NO: 18462 - DNA, 19 bp, Homo sapiens
gttactttcctgggggaag

SEQ ID NO: 18463 - DNA, 18 bp, Homo sapiens
ggctcagctcctgcaagg

SEQ ID NO: 18464 - DNA, 22 bp, Homo sapiens
atctccgagttccagatatggg

SEQ ID NO: 18465 - DNA, 18 bp, Homo sapiens
cctcagagccagccgttg

SEQ ID NO: 18466 - DNA, 23 bp, Homo sapiens
caggtgacccggcgctttgggat

SEQ ID NO: 18467 - DNA, 17 bp, Homo sapiens
ggctgcaagtgcaaggc

SEQ ID NO: 18468 - DNA, 18 bp, Homo sapiens
ctatggaggcccctgccg

SEQ ID NO: 18469 - DNA, 17 bp, Homo sapiens
aggagcctctatcggct

SEQ ID NO: 18470 - DNA, 20 bp, Homo sapiens
atggatttcaccagcaacgg

SEQ ID NO: 18471 - DNA, 18 bp, Homo sapiens
cccgtatccccctgctct

SEQ ID NO: 18472 - DNA, 24 bp, Homo sapiens
ttagaagccctggggccaccctgg

SEQ ID NO: 18473 - DNA, 20 bp, Homo sapiens
gtctgtcatccccactgacc

SEQ ID NO: 18474 - DNA, 18 bp, Homo sapiens
gtcatggggaacagtggc

SEQ ID NO: 18475 - DNA, 24 bp, Homo sapiens
ctactacagcaagaaccgcccaac

SEQ ID NO: 18476 - DNA, 17 bp, Homo sapiens
gcggccaccttggccta

SEQ ID NO: 18477 - DNA, 17 bp, Homo sapiens
gcctcactcctgaatcc

SEQ ID NO: 18478 - DNA, 24 bp, Homo sapiens
gggccagctggccggcctgctgca

SEQ ID NO: 18479 - DNA, 16 bp, Homo sapiens
ggcatgggcatttgct

SEQ ID NO: 18480 - DNA, 18 bp, Homo sapiens
ctcgtagcacctgacagc

SEQ ID NO: 18481 - DNA, 18 bp, Homo sapiens
taggtcagtgaggaaccg

SEQ ID NO: 18482 - DNA, 17 bp, Homo sapiens
ccagccgggaaggtgtt

SEQ ID NO: 18483 - DNA, 24 bp, Homo sapiens
aaactccagatgatcgaggtgccc

SEQ ID NO: 18484 - DNA, 17 bp, Homo sapiens
gaagcagaagctgctcc

SEQ ID NO: 18485 - DNA, 19 bp, Homo sapiens
ccttgcactacccccacac

SEQ ID NO: 18486 - DNA, 16 bp, Homo sapiens
ccagtggctcccaacg

SEQ ID NO: 18487 - DNA, 18 bp, Homo sapiens
gcacccagcgcacatgac

SEQ ID NO: 18488 - DNA, 17 bp, Homo sapiens
gagtcgtcggagaggac

SEQ ID NO: 18489 - DNA, 22 bp, Homo sapiens
tgttcataaggtgactgttgtc

SEQ ID NO: 18490 - DNA, 21 bp, Homo sapiens
tctactgctcctacttcctgt

SEQ ID NO: 18491 - DNA, 19 bp, Homo sapiens
cttaccagcaacaagaaga

SEQ ID NO: 18492 - DNA, 17 bp, Homo sapiens
cgcagatacctgcagaa

SEQ ID NO: 18493 - DNA, 20 bp, Homo sapiens
atccaagagttacagagcgg

SEQ ID NO: 18494 - DNA, 24 bp, Homo sapiens
gcagaccaaggctgggagagtggt

SEQ ID NO: 18495 - DNA, 24 bp, Homo sapiens
tcacctaccatgtcattctcgaac

SEQ ID NO: 18496 - DNA, 24 bp, Homo sapiens
ctcacggagcttctcggctgtgcc

SEQ ID NO: 18497 - DNA, 19 bp, Homo sapiens
cgtggtgtagcccttctgc

SEQ ID NO: 18498 - DNA, 24 bp, Homo sapiens
gatttattgttgagcctcctgctc

SEQ ID NO: 18499 - DNA, 20 bp, Homo sapiens
ctggctgcctttgtcaaaac

SEQ ID NO: 18500 - DNA, 24 bp, Homo sapiens
atttatgccggcactggccactgc

SEQ ID NO: 18501 - DNA, 16 bp, Homo sapiens
gccttccctcaactgc

SEQ ID NO: 18502 - DNA, 18 bp, Homo sapiens
tggatcacaccaggaagg

SEQ ID NO: 18503 - DNA, 17 bp, Homo sapiens
tagaagacttcccaggc

SEQ ID NO: 18504 - DNA, 20 bp, Homo sapiens
ccctgggtccaaatggttac

SEQ ID NO: 18505 - DNA, 16 bp, Homo sapiens
caggccgtccctagct

SEQ ID NO: 18506 - DNA, 23 bp, Homo sapiens
caactccgacgaggtcttttgac

SEQ ID NO: 18507 - DNA, 16 bp, Homo sapiens
agaggcagtcctggcc

SEQ ID NO: 18508 - DNA, 24 bp, Homo sapiens
gcggtccacatagatgaagtgcac

SEQ ID NO: 18509 - DNA, 19 bp, Homo sapiens
gtagtgggggatctgagga

SEQ ID NO: 18510 - DNA, 18 bp, Homo sapiens
gagcaggaggaacatcac

SEQ ID NO: 18511 - DNA, 24 bp, Homo sapiens
tcagagaggtggtgagcagctgat

SEQ ID NO: 18512 - DNA, 16 bp, Homo sapiens
cccgagcttccctcgg

SEQ ID NO: 18513 - DNA, 16 bp, Homo sapiens
ggagcaggtgtagagg

SEQ ID NO: 18514 - DNA, 16 bp, Homo sapiens
tgcggccccctgggtg

SEQ ID NO: 18515 - DNA, 19 bp, Homo sapiens
ggcgtcaggatatgacacc

SEQ ID NO: 18516 - DNA, 16 bp, Homo sapiens
gaggcccacacctgcc

SEQ ID NO: 18517 - DNA, 22 bp, Homo sapiens
cttccagtccgtcagcttctcc

SEQ ID NO: 18518 - DNA, 16 bp, Homo sapiens
aagctgaagcggcagc

SEQ ID NO: 18519 - DNA, 16 bp, Homo sapiens
cagaccctgccctggc

SEQ ID NO: 18520 - DNA, 21 bp, Homo sapiens
aggtcccttctgctgtaatgc

SEQ ID NO: 18521 - DNA, 16 bp, Homo sapiens
tcctgcaggtgctggg

SEQ ID NO: 18522 - DNA, 19 bp, Homo sapiens
tccccaggtctgtctgtcc

SEQ ID NO: 18523 - DNA, 23 bp, Homo sapiens
cagaaagttcagccggtagatgg

SEQ ID NO: 18524 - DNA, 17 bp, Homo sapiens
tccccaggttggtctgt

SEQ ID NO: 18525 - DNA, 18 bp, Homo sapiens
tttctccaaaagtgagcc

SEQ ID NO: 18526 - DNA, 24 bp, Homo sapiens
gaagaaatctcctttcttgaaatt

SEQ ID NO: 18527 - DNA, 16 bp, Homo sapiens
gatgcaaacctgcccc

SEQ ID NO: 18528 - DNA, 16 bp, Homo sapiens
cctcccagggaacagt

SEQ ID NO: 18529 - DNA, 19 bp, Homo sapiens
ccctctcagagcctgatct

SEQ ID NO: 18530 - DNA, 16 bp, Homo sapiens
caggaggatccgggct

SEQ ID NO: 18531 - DNA, 16 bp, Homo sapiens
gggcctgccagggtag

SEQ ID NO: 18532 - DNA, 18 bp, Homo sapiens
tgtcaagaatcgaggggc

SEQ ID NO: 18533 - DNA, 16 bp, Homo sapiens
gggggaggtggagccc

SEQ ID NO: 18534 - DNA, 16 bp, Homo sapiens
tccctgcgctcccagc

SEQ ID NO: 18535 - DNA, 23 bp, Homo sapiens
gtggaccggatgtaccctgctgc

SEQ ID NO: 18536 - DNA, 19 bp, Homo sapiens
cagctgatggatggcttct

SEQ ID NO: 18537 - DNA, 23 bp, Homo sapiens
gaacttgggtctcacctgaatct

SEQ ID NO: 18538 - DNA, 17 bp, Homo sapiens
cccgcctctcggccctt

SEQ ID NO: 18539 - DNA, 17 bp, Homo sapiens
aggtctcccacgagggg

SEQ ID NO: 18540 - DNA, 19 bp, Homo sapiens
ccctcaccctgccctgatg

SEQ ID NO: 18541 - DNA, 22 bp, Homo sapiens
ttcttctccagcatggagaagc

SEQ ID NO: 18542 - DNA, 17 bp, Homo sapiens
ccatgtactgcctgccc

SEQ ID NO: 18543 - DNA, 18 bp, Homo sapiens
ggctctgagggtaagggc

SEQ ID NO: 18544 - DNA, 24 bp, Homo sapiens
ccggccccagaaggatcttcctgg

SEQ ID NO: 18545 - DNA, 21 bp, Homo sapiens
gtgccaaccctaagcatcatc

SEQ ID NO: 18546 - DNA, 21 bp, Homo sapiens
ctgtagatagcagaggacacc

SEQ ID NO: 18547 - DNA, 24 bp, Homo sapiens
aggagcaccaggttgatgccctgc

SEQ ID NO: 18548 - DNA, 21 bp, Homo sapiens
atagggccgcaatgggtgggt

SEQ ID NO: 18549 - DNA, 17 bp, Homo sapiens
ccttcacgttggcatcc

SEQ ID NO: 18550 - DNA, 23 bp, Homo sapiens
aggaatttaaaaactggagtttc

SEQ ID NO: 18551 - DNA, 17 bp, Homo sapiens
gaaccagtgtttggagg

SEQ ID NO: 18552 - DNA, 17 bp, Homo sapiens
caggcacctgcactgac

SEQ ID NO: 18553 - DNA, 23 bp, Homo sapiens
tattacctgtggcctgcaggtag

SEQ ID NO: 18554 - DNA, 21 bp, Homo sapiens
gagtcaccctggaggcgaaac

SEQ ID NO: 18555 - DNA, 23 bp, Homo sapiens
ctgggccccctaccccatgctgt

SEQ ID NO: 18556 - DNA, 24 bp, Homo sapiens
atcagctggcgcccaggcaggcac

SEQ ID NO: 18557 - DNA, 16 bp, Homo sapiens
acattagcacccctgc

SEQ ID NO: 18558 - DNA, 23 bp, Homo sapiens
ccctccagccagatggtgctacc

SEQ ID NO: 18559 - DNA, 24 bp, Homo sapiens
catgtacagaagttttaaatgaat

SEQ ID NO: 18560 - DNA, 16 bp, Homo sapiens
cgagcgacaggcagcc

SEQ ID NO: 18561 - DNA, 23 bp, Homo sapiens
tggtcttaacaatccttgagttc

SEQ ID NO: 18562 - DNA, 24 bp, Homo sapiens
ctccttcccctggcgatcagagct

SEQ ID NO: 18563 - DNA, 24 bp, Homo sapiens
agcgtcctgtgctctaggaacacg

SEQ ID NO: 18564 - DNA, 24 bp, Homo sapiens
cttctccattccaggagacagaca

SEQ ID NO: 18565 - DNA, 22 bp, Homo sapiens
agcctaagacagatgtcctggg

SEQ ID NO: 18566 - DNA, 16 bp, Homo sapiens
tgggagagcagggaca

SEQ ID NO: 18567 - DNA, 24 bp, Homo sapiens
ctcctgctttcctccggtcctcac

SEQ ID NO: 18568 - DNA, 19 bp, Homo sapiens
acttcgtggagtcaggggc

SEQ ID NO: 18569 - DNA, 16 bp, Homo sapiens
gggagggagaagctgt

SEQ ID NO: 18570 - DNA, 16 bp, Homo sapiens
ccctcactccacgggc

SEQ ID NO: 18571 - DNA, 19 bp, Homo sapiens
ccagctggctcaaccctgt

SEQ ID NO: 18572 - DNA, 16 bp, Homo sapiens
cttccccgcggagggc

SEQ ID NO: 18573 - DNA, 17 bp, Homo sapiens
cctgcagaggccgatcc

SEQ ID NO: 18574 - DNA, 17 bp, Homo sapiens
gaaggggtggagggagc

SEQ ID NO: 18575 - DNA, 16 bp, Homo sapiens
cagagctccccccagt

SEQ ID NO: 18576 - DNA, 18 bp, Homo sapiens
gcacccggaacgggtgga

SEQ ID NO: 18577 - DNA, 19 bp, Homo sapiens
gttctggctgctccgggcc

SEQ ID NO: 18578 - DNA, 17 bp, Homo sapiens
gagagcacagcagagga

SEQ ID NO: 18579 - DNA, 20 bp, Homo sapiens
caaccacacacccagaattg

SEQ ID NO: 18580 - DNA, 16 bp, Homo sapiens
gctccctgcgcccggc

SEQ ID NO: 18581 - DNA, 18 bp, Homo sapiens
caggcaggttttctgaac

SEQ ID NO: 18582 - DNA, 16 bp, Homo sapiens
ccgtctcctgctgggc

SEQ ID NO: 18583 - DNA, 24 bp, Homo sapiens
tgccctgagacctgaatgtcgtcc

SEQ ID NO: 18584 - DNA, 24 bp, Homo sapiens
ccatctccagaagtacattgctcc

SEQ ID NO: 18585 - DNA, 16 bp, Homo sapiens
atgagggcaagcaggt

SEQ ID NO: 18586 - DNA, 24 bp, Homo sapiens
caaccaagttttattttgaaattt

SEQ ID NO: 18587 - DNA, 24 bp, Homo sapiens
tgaaaaaggttggagaatcaaatc

SEQ ID NO: 18588 - DNA, 16 bp, Homo sapiens
gggaggcgaggaggcc

SEQ ID NO: 18589 - DNA, 19 bp, Homo sapiens
tgggcaggtggtgcttttc

SEQ ID NO: 18590 - DNA, 19 bp, Homo sapiens
tgagctgtgcatagaggcg

SEQ ID NO: 18591 - DNA, 24 bp, Homo sapiens
cctttagccaccacatgccagacc

SEQ ID NO: 18592 - DNA, 16 bp, Homo sapiens
tcctctcccttcctgc

SEQ ID NO: 18593 - DNA, 16 bp, Homo sapiens
ggaaggcatgcagggc

SEQ ID NO: 18594 - DNA, 19 bp, Homo sapiens
gtggacagagtgaatgtcc

SEQ ID NO: 18595 - DNA, 19 bp, Homo sapiens
gatgacgtgccgctccagc

SEQ ID NO: 18596 - DNA, 22 bp, Homo sapiens
ctgggacctggtgggtcttagt

SEQ ID NO: 18597 - DNA, 23 bp, Homo sapiens
ctcaggacttgaagctgtcaggt

SEQ ID NO: 18598 - DNA, 24 bp, Homo sapiens
catgggaaagcccatcagggtacc

SEQ ID NO: 18599 - DNA, 16 bp, Homo sapiens
gggagcaggagcagtg

SEQ ID NO: 18600 - DNA, 21 bp, Homo sapiens
ctgaatacacgagtttcaggg

SEQ ID NO: 18601 - DNA, 17 bp, Homo sapiens
acctggcgcagcgtgtc

SEQ ID NO: 18602 - DNA, 18 bp, Homo sapiens
tggacgccccctctgacc

SEQ ID NO: 18603 - DNA, 21 bp, Homo sapiens
accagctttcttgtgatctct

SEQ ID NO: 18604 - DNA, 19 bp, Homo sapiens
tcacctccacggcgaagca

SEQ ID NO: 18605 - DNA, 18 bp, Homo sapiens
ctcaccaagctctgatgc

SEQ ID NO: 18606 - DNA, 24 bp, Homo sapiens
aggctctggaagtgctcccacagc

SEQ ID NO: 18607 - DNA, 24 bp, Homo sapiens
cccactccacagttagagctcggc

SEQ ID NO: 18608 - DNA, 24 bp, Homo sapiens
gtcatcttatccgaaaggagtgag

SEQ ID NO: 18609 - DNA, 23 bp, Homo sapiens
ttcacttgagctgtttctctgac

SEQ ID NO: 18610 - DNA, 19 bp, Homo sapiens
cggaagctgtatgtgctca

SEQ ID NO: 18611 - DNA, 24 bp, Homo sapiens
atggcagcttcacaggggctgggc

SEQ ID NO: 18612 - DNA, 23 bp, Homo sapiens
tttggagaatgcctgttcattgc

SEQ ID NO: 18613 - DNA, 19 bp, Homo sapiens
gggaccagctttgaagact

SEQ ID NO: 18614 - DNA, 16 bp, Homo sapiens
aggtgaagggagtgcc

SEQ ID NO: 18615 - DNA, 24 bp, Homo sapiens
cagcccaaagtgcacttcaaacag

SEQ ID NO: 18616 - DNA, 18 bp, Homo sapiens
gcatcttatcaaacccgc

SEQ ID NO: 18617 - DNA, 19 bp, Homo sapiens
gtgtggtcaccattgatgg

SEQ ID NO: 18618 - DNA, 16 bp, Homo sapiens
gagtccacaggcctct

SEQ ID NO: 18619 - DNA, 16 bp, Homo sapiens
aggggaggctcgggtc

SEQ ID NO: 18620 - DNA, 18 bp, Homo sapiens
ggagaagctctcggacac

SEQ ID NO: 18621 - DNA, 24 bp, Homo sapiens
agtctaaagttccaaataagagag

SEQ ID NO: 18622 - DNA, 17 bp, Homo sapiens
ctggaggaccagctcag

SEQ ID NO: 18623 - DNA, 22 bp, Homo sapiens
atgggccccagagctatagact

SEQ ID NO: 18624 - DNA, 17 bp, Homo sapiens
tcttggtgtctggccca

SEQ ID NO: 18625 - DNA, 20 bp, Homo sapiens
gagaagcaggtgtaggtgtc

SEQ ID NO: 18626 - DNA, 19 bp, Homo sapiens
tcccaggagggtctaacac

SEQ ID NO: 18627 - DNA, 18 bp, Homo sapiens
ggctaggagggtgctgag

SEQ ID NO: 18628 - DNA, 24 bp, Homo sapiens
gctgaagttcgggcagtcagagaa

SEQ ID NO: 18629 - DNA, 19 bp, Homo sapiens
cccagcaccctgctcatgc

SEQ ID NO: 18630 - DNA, 24 bp, Homo sapiens
cactgagggcgcagaggtcctctt

SEQ ID NO: 18631 - DNA, 24 bp, Homo sapiens
cctgctgggagttttgtatggttc

SEQ ID NO: 18632 - DNA, 18 bp, Homo sapiens
ctggaggctgaccttgac

SEQ ID NO: 18633 - DNA, 24 bp, Homo sapiens
gcactcacctcttcttcctcattc

SEQ ID NO: 18634 - DNA, 24 bp, Homo sapiens
actgaatgtttgctgaggttgggg

SEQ ID NO: 18635 - DNA, 24 bp, Homo sapiens
caaactcctgatctgtccagtaga

SEQ ID NO: 18636 - DNA, 24 bp, Homo sapiens
cagttgtgagggtgcaacaaaaat

SEQ ID NO: 18637 - DNA, 20 bp, Homo sapiens
ggcccacaagtatcactaag

SEQ ID NO: 18638 - DNA, 24 bp, Homo sapiens
ttaaatacatcattgcaatgaaaa

SEQ ID NO: 18639 - DNA, 22 bp, Homo sapiens
ttcaccccaccagtgcaggctg

SEQ ID NO: 18640 - DNA, 20 bp, Homo sapiens
aaggcccttcataatatccc

SEQ ID NO: 18641 - DNA, 16 bp, Homo sapiens
ctcctgggcaacgtgc

SEQ ID NO: 18642 - DNA, 23 bp, Homo sapiens
atagaaattggacagcaagaaag

SEQ ID NO: 18643 - DNA, 19 bp, Homo sapiens
ttctgagtccaagctaggc

SEQ ID NO: 18644 - DNA, 20 bp, Homo sapiens
gccaccactttctgataggc

SEQ ID NO: 18645 - DNA, 16 bp, Homo sapiens
gcagctacaatccagc

SEQ ID NO: 18646 - DNA, 21 bp, Homo sapiens
tgatgggccagcacacagacc

SEQ ID NO: 18647 - DNA, 21 bp, Homo sapiens
tctgcatataaatatttctgc

SEQ ID NO: 18648 - DNA, 22 bp, Homo sapiens
tgaacatgattagcaaaagggc

SEQ ID NO: 18649 - DNA, 19 bp, Homo sapiens
gcctctttgcaccattcta

SEQ ID NO: 18650 - DNA, 19 bp, Homo sapiens
aaaagcagaatggtagctg

SEQ ID NO: 18651 - DNA, 22 bp, Homo sapiens
atttctaatactttccctaatc

SEQ ID NO: 18652 - DNA, 24 bp, Homo sapiens
acatcagttacaatttatatgcag

SEQ ID NO: 18653 - DNA, 16 bp, Homo sapiens
agctgcacgtggatcc

SEQ ID NO: 18654 - DNA, 24 bp, Homo sapiens
ttccacactgatgcaatcattcgt

SEQ ID NO: 18655 - DNA, 19 bp, Homo sapiens
tagtgatggcctggctcac

SEQ ID NO: 18656 - DNA, 24 bp, Homo sapiens
cccttcctatgacatgaacttaac

SEQ ID NO: 18657 - DNA, 23 bp, Homo sapiens
gctgttatgggcaaccctaaggt

SEQ ID NO: 18658 - DNA, 24 bp, Homo sapiens
actcaccctgaagttctcaggatc

SEQ ID NO: 18659 - DNA, 19 bp, Homo sapiens
tggtggtctacccttggac

SEQ ID NO: 18660 - DNA, 20 bp, Homo sapiens
aaggtgcccttgaggttgtc

SEQ ID NO: 18661 - DNA, 23 bp, Homo sapiens
tttctgataggcactgactctct

SEQ ID NO: 18662 - DNA, 24 bp, Homo sapiens
gcactttcttgccatgagccttca

SEQ ID NO: 18663 - DNA, 21 bp, Homo sapiens
caagacaggtttaaggagacc

SEQ ID NO: 18664 - DNA, 22 bp, Homo sapiens
atccccaaaggactcaaagaac

SEQ ID NO: 18665 - DNA, 22 bp, Homo sapiens
ggcaaggtgaacgtggatgaag

SEQ ID NO: 18666 - DNA, 23 bp, Homo sapiens
ggaaaatagaccaataggcagag

SEQ ID NO: 18667 - DNA, 21 bp, Homo sapiens
cctcaaacagacaccatggtg

SEQ ID NO: 18668 - DNA, 24 bp, Homo sapiens
tgtctccacatgcccagtttctat

SEQ ID NO: 18669 - DNA, 19 bp, Homo sapiens
ggcagagccatctattgct

SEQ ID NO: 18670 - DNA, 17 bp, Homo sapiens
agggcctcaccaccaac

SEQ ID NO: 18671 - DNA, 21 bp, Homo sapiens
tagggttggccaatctactcc

SEQ ID NO: 18672 - DNA, 24 bp, Homo sapiens
agacttctcctcaggagtcagatg

SEQ ID NO: 18673 - DNA, 23 bp, Homo sapiens
gaagagccaaggacaggtacggc

SEQ ID NO: 18674 - DNA, 23 bp, Homo sapiens
ttgtgtcagaagcaaatgtaagc

SEQ ID NO: 18675 - DNA, 23 bp, Homo sapiens
gagatatatcttagagggagggc

SEQ ID NO: 18676 - DNA, 16 bp, Homo sapiens
cctgccctccctgctc

SEQ ID NO: 18677 - DNA, 16 bp, Homo sapiens
ctgctttgcggccggc

SEQ ID NO: 18678 - DNA, 16 bp, Homo sapiens
gtcttgtccctgctcc

SEQ ID NO: 18679 - DNA, 22 bp, Homo sapiens
gtgtccccggcgccgcccgggg

SEQ ID NO: 18680 - DNA, 16 bp, Homo sapiens
ccagcgccagcgccag

SEQ ID NO: 18681 - DNA, 23 bp, Homo sapiens
ggacagacgaaccagccccgtgt

SEQ ID NO: 18682 - DNA, 18 bp, Homo sapiens
agagggtgagcctctgcc

SEQ ID NO: 18683 - DNA, 16 bp, Homo sapiens
ctgccccaggtccggc

SEQ ID NO: 18684 - DNA, 20 bp, Homo sapiens
aagacatctcggagccgggg

SEQ ID NO: 18685 - DNA, 22 bp, Homo sapiens
ctcctttggatgggcctggtgc

SEQ ID NO: 18686 - DNA, 24 bp, Homo sapiens
tcagcccgaggttgatggcggtga

SEQ ID NO: 18687 - DNA, 22 bp, Homo sapiens
tctgactctcgggttctctggg

SEQ ID NO: 18688 - DNA, 18 bp, Homo sapiens
ccagcactcctttcggcc

SEQ ID NO: 18689 - DNA, 21 bp, Homo sapiens
ccaggttacatcgcatagtgc

SEQ ID NO: 18690 - DNA, 24 bp, Homo sapiens
gtagatgccaccctctccatcagg

SEQ ID NO: 18691 - DNA, 24 bp, Homo sapiens
ctcacctgcccaatctgcaaaggt

SEQ ID NO: 18692 - DNA, 23 bp, Homo sapiens
tggtggcatgtagccatgggtgt

SEQ ID NO: 18693 - DNA, 21 bp, Homo sapiens
aatatctggaaggcaaaggtg

SEQ ID NO: 18694 - DNA, 22 bp, Homo sapiens
ctatcttcagcagattgcacag

SEQ ID NO: 18695 - DNA, 18 bp, Homo sapiens
agtttggaaatggaggcc

SEQ ID NO: 18696 - DNA, 24 bp, Homo sapiens
gcgtctccacacctccaccatgtc

SEQ ID NO: 18697 - DNA, 24 bp, Homo sapiens
ctctgcctctgatttctcaccatg

SEQ ID NO: 18698 - DNA, 18 bp, Homo sapiens
caggtggagcccaggagc

SEQ ID NO: 18699 - DNA, 16 bp, Homo sapiens
ggccatcaagctgtgc

SEQ ID NO: 18700 - DNA, 16 bp, Homo sapiens
gcttcggcacagtagg

SEQ ID NO: 18701 - DNA, 23 bp, Homo sapiens
caatccattgtccacctctttga

SEQ ID NO: 18702 - DNA, 16 bp, Homo sapiens
gaggaagaggatgcgg

SEQ ID NO: 18703 - DNA, 16 bp, Homo sapiens
ggcctgtggcctgctc

SEQ ID NO: 18704 - DNA, 19 bp, Homo sapiens
gcacagtgggtctgcacag

SEQ ID NO: 18705 - DNA, 24 bp, Homo sapiens
tctcatcttggaacatctctttgc

SEQ ID NO: 18706 - DNA, 23 bp, Homo sapiens
ctgtattcgccccagtatccggc

SEQ ID NO: 18707 - DNA, 16 bp, Homo sapiens
aggtgcccctgtcagc

SEQ ID NO: 18708 - DNA, 16 bp, Homo sapiens
cagcccactcaacagg

SEQ ID NO: 18709 - DNA, 16 bp, Homo sapiens
tggagggcacggaccc

SEQ ID NO: 18710 - DNA, 19 bp, Homo sapiens
ggtgccagacatcatgtgc

SEQ ID NO: 18711 - DNA, 24 bp, Homo sapiens
tctggcctgccgcccgcatcccgg

SEQ ID NO: 18712 - DNA, 17 bp, Homo sapiens
cctcacaagtgctgtga

SEQ ID NO: 18713 - DNA, 18 bp, Homo sapiens
ctgaggaccctggagagc

SEQ ID NO: 18714 - DNA, 21 bp, Homo sapiens
gctattgacaggtgtgctttc

SEQ ID NO: 18715 - DNA, 24 bp, Homo sapiens
gatatggtgtactggacaggagac

SEQ ID NO: 18716 - DNA, 18 bp, Homo sapiens
atcgcttcatagagccag

SEQ ID NO: 18717 - DNA, 16 bp, Homo sapiens
gccctgaccaccgtca

SEQ ID NO: 18718 - DNA, 20 bp, Homo sapiens
gataagtacctgagggtgcg

SEQ ID NO: 18719 - DNA, 22 bp, Homo sapiens
agtgtaccctgctgtgggtaac

SEQ ID NO: 18720 - DNA, 22 bp, Homo sapiens
ccaggttcccttctcccttcac

SEQ ID NO: 18721 - DNA, 18 bp, Homo sapiens
attgagggcaaccactcc

SEQ ID NO: 18722 - DNA, 23 bp, Homo sapiens
gattaggggagccaaatgaagag

SEQ ID NO: 18723 - DNA, 18 bp, Homo sapiens
ctgcctgccgaagccctg

SEQ ID NO: 18724 - DNA, 23 bp, Homo sapiens
aaaaaaaaaaaaaaaaaaaaagc

SEQ ID NO: 18725 - DNA, 24 bp, Homo sapiens
aattagaactgtttggtctctggc

SEQ ID NO: 18726 - DNA, 22 bp, Homo sapiens
acgggaacaaaaattcatattg

SEQ ID NO: 18727 - DNA, 23 bp, Homo sapiens
atgtatgcttttaccctccaccc

SEQ ID NO: 18728 - DNA, 16 bp, Homo sapiens
gccactggagctgtcc

SEQ ID NO: 18729 - DNA, 24 bp, Homo sapiens
tgttgacctctcatgtttactttg

SEQ ID NO: 18730 - DNA, 17 bp, Homo sapiens
tgttcccactactggcc

SEQ ID NO: 18731 - DNA, 21 bp, Homo sapiens
ctccgcctcatctctctcaat

SEQ ID NO: 18732 - DNA, 23 bp, Homo sapiens
taaaacttctgtgcccagaggtg

SEQ ID NO: 18733 - DNA, 24 bp, Homo sapiens
atcaactccacggatcccgcagga

SEQ ID NO: 18734 - DNA, 19 bp, Homo sapiens
ttcaacagtgaccatgagc

SEQ ID NO: 18735 - DNA, 18 bp, Homo sapiens
cagtgccctgggggaatg

SEQ ID NO: 18736 - DNA, 21 bp, Homo sapiens
aacaagtgttccctggggatt

SEQ ID NO: 18737 - DNA, 19 bp, Homo sapiens
accctcatctccgtcctac

SEQ ID NO: 18738 - DNA, 21 bp, Homo sapiens
cctttctctagccagggctgc

SEQ ID NO: 18739 - DNA, 20 bp, Homo sapiens
gggatggtgagatgctcaag

SEQ ID NO: 18740 - DNA, 24 bp, Homo sapiens
ctccctactaggtgcatataattg

SEQ ID NO: 18741 - DNA, 22 bp, Homo sapiens
gatgccctctttctccaacctg

SEQ ID NO: 18742 - DNA, 24 bp, Homo sapiens
aattattaccgaattgtagccagg

SEQ ID NO: 18743 - DNA, 24 bp, Homo sapiens
gtgagtgtctgaaggctgaaaatt

SEQ ID NO: 18744 - DNA, 22 bp, Homo sapiens
acctcaaattcatccacatgag

SEQ ID NO: 18745 - DNA, 22 bp, Homo sapiens
ggggaggctcctcactagaaca

SEQ ID NO: 18746 - DNA, 16 bp, Homo sapiens
ccaggaaggctacagc

SEQ ID NO: 18747 - DNA, 24 bp, Homo sapiens
tcttcctacccctccctagaatct

SEQ ID NO: 18748 - DNA, 16 bp, Homo sapiens
ggaggctcccttctgc

SEQ ID NO: 18749 - DNA, 16 bp, Homo sapiens
gctcagttctttggcc

SEQ ID NO: 18750 - DNA, 17 bp, Homo sapiens
gcccatgctttgcaggc

SEQ ID NO: 18751 - DNA, 24 bp, Homo sapiens
aagagactctgagccggccgctgg

SEQ ID NO: 18752 - DNA, 24 bp, Homo sapiens
acctgcaaggatgtggggctgact

SEQ ID NO: 18753 - DNA, 20 bp, Homo sapiens
gccttaatcctggtgagtga

SEQ ID NO: 18754 - DNA, 24 bp, Homo sapiens
ggtccaggaccacgtgagagctcc

SEQ ID NO: 18755 - DNA, 21 bp, Homo sapiens
gaaggaggttggagccagagc

SEQ ID NO: 18756 - DNA, 17 bp, Homo sapiens
tatggctcccggtatgt

SEQ ID NO: 18757 - DNA, 20 bp, Homo sapiens
agttacccttgctccttgcc

SEQ ID NO: 18758 - DNA, 16 bp, Homo sapiens
taggcagtgtgttggg

SEQ ID NO: 18759 - DNA, 23 bp, Homo sapiens
accaaatagatggaaactactcc

SEQ ID NO: 18760 - DNA, 23 bp, Homo sapiens
gaaaccagaaggtctggaaaagt

SEQ ID NO: 18761 - DNA, 24 bp, Homo sapiens
catcctgaatctgacccaggcaaa

SEQ ID NO: 18762 - DNA, 18 bp, Homo sapiens
agtagccagacggcaggg

SEQ ID NO: 18763 - DNA, 16 bp, Homo sapiens
tcgagaaacctatggg

SEQ ID NO: 18764 - DNA, 16 bp, Homo sapiens
ggtggcggcacagagc

SEQ ID NO: 18765 - DNA, 24 bp, Homo sapiens
gtatatcgcatgcggggcgacatg

SEQ ID NO: 18766 - DNA, 19 bp, Homo sapiens
ccctagcaaaacagtggcc

SEQ ID NO: 18767 - DNA, 19 bp, Homo sapiens
accctcggagccctgtggc

SEQ ID NO: 18768 - DNA, 24 bp, Homo sapiens
ccacagcagcatttgggctttttc

SEQ ID NO: 18769 - DNA, 24 bp, Homo sapiens
ctctgcccgtgctgacagccctgc

SEQ ID NO: 18770 - DNA, 18 bp, Homo sapiens
atccttggggcccaggga

SEQ ID NO: 18771 - DNA, 17 bp, Homo sapiens
gagcctgtggccaaggc

SEQ ID NO: 18772 - DNA, 18 bp, Homo sapiens
agcccaagttcagcatct

SEQ ID NO: 18773 - DNA, 17 bp, Homo sapiens
tgagcagcagggggagg

SEQ ID NO: 18774 - DNA, 16 bp, Homo sapiens
cctcgcctcagcccgc

SEQ ID NO: 18775 - DNA, 20 bp, Homo sapiens
gggctacataccacatggtc

SEQ ID NO: 18776 - DNA, 18 bp, Homo sapiens
cacaccactctgcacggc

SEQ ID NO: 18777 - DNA, 18 bp, Homo sapiens
gctcaggacagggaatct

SEQ ID NO: 18778 - DNA, 21 bp, Homo sapiens
ctgaggaggacggacgttact

SEQ ID NO: 18779 - DNA, 16 bp, Homo sapiens
cttgcgcaggggcccg

SEQ ID NO: 18780 - DNA, 17 bp, Homo sapiens
cgcacctcctacctggc

SEQ ID NO: 18781 - DNA, 18 bp, Homo sapiens
ctcatcaagctggcgggc

SEQ ID NO: 18782 - DNA, 17 bp, Homo sapiens
cgagatcatcgtcatcc

SEQ ID NO: 18783 - DNA, 24 bp, Homo sapiens
caaacttggagtagtccacagagt

SEQ ID NO: 18784 - DNA, 18 bp, Homo sapiens
gtcattgatgccaacagc

SEQ ID NO: 18785 - DNA, 17 bp, Homo sapiens
cacaggatctcatcggc

SEQ ID NO: 18786 - DNA, 16 bp, Homo sapiens
agaacggcgtgggtgg

SEQ ID NO: 18787 - DNA, 19 bp, Homo sapiens
tttccaccacgccttccag

SEQ ID NO: 18788 - DNA, 16 bp, Homo sapiens
gcaagaccaccagccc

SEQ ID NO: 18789 - DNA, 20 bp, Homo sapiens
tgccaggtcgtagagtgggc

SEQ ID NO: 18790 - DNA, 16 bp, Homo sapiens
tacgtgtgggtgacct

SEQ ID NO: 18791 - DNA, 24 bp, Homo sapiens
gggccaccaggaagatgctgttgc

SEQ ID NO: 18792 - DNA, 21 bp, Homo sapiens
gaccctcatcttcagcaagca

SEQ ID NO: 18793 - DNA, 20 bp, Homo sapiens
gcaccacctcgccctcgggg

SEQ ID NO: 18794 - DNA, 24 bp, Homo sapiens
atgatcaacgccatcatgcttggc

SEQ ID NO: 18795 - DNA, 24 bp, Homo sapiens
tggcgctgatgatcatgctcttgc

SEQ ID NO: 18796 - DNA, 23 bp, Homo sapiens
tgaggagtgcccactggccatcc

SEQ ID NO: 18797 - DNA, 16 bp, Homo sapiens
gcgatcaccgcatgct

SEQ ID NO: 18798 - DNA, 21 bp, Homo sapiens
ccttccttttctccattgagg

SEQ ID NO: 18799 - DNA, 23 bp, Homo sapiens
cttgggcagtcttcatgaagatg

SEQ ID NO: 18800 - DNA, 16 bp, Homo sapiens
cccagcgagggcactg

SEQ ID NO: 18801 - DNA, 21 bp, Homo sapiens
gttctgcacgatgaggatcag

SEQ ID NO: 18802 - DNA, 17 bp, Homo sapiens
cagctggctgctcttcg

SEQ ID NO: 18803 - DNA, 22 bp, Homo sapiens
caaagccaatagtcacttggac

SEQ ID NO: 18804 - DNA, 16 bp, Homo sapiens
accacgctggtggacc

SEQ ID NO: 18805 - DNA, 16 bp, Homo sapiens
cagggctcagcagtgc

SEQ ID NO: 18806 - DNA, 19 bp, Homo sapiens
aaggcaactgcaacgtggc

SEQ ID NO: 18807 - DNA, 24 bp, Homo sapiens
aggcgatgagccaccaggccatgg

SEQ ID NO: 18808 - DNA, 17 bp, Homo sapiens
tgccaagcccaggtacc

SEQ ID NO: 18809 - DNA, 24 bp, Homo sapiens
gcaatgtgtgtggccacttgaggt

SEQ ID NO: 18810 - DNA, 18 bp, Homo sapiens
catgctgtcccgcaaggg

SEQ ID NO: 18811 - DNA, 20 bp, Homo sapiens
ctcccggatgttcttgtggg

SEQ ID NO: 18812 - DNA, 16 bp, Homo sapiens
ccacgtccgaggggtg

SEQ ID NO: 18813 - DNA, 16 bp, Homo sapiens
gctggcgggcacggta

SEQ ID NO: 18814 - DNA, 17 bp, Homo sapiens
cacaggctgagtgcagc

SEQ ID NO: 18815 - DNA, 23 bp, Homo sapiens
acgtattcctcggggatgatgcc

SEQ ID NO: 18816 - DNA, 18 bp, Homo sapiens
cgcctccttcgtccgtgc

SEQ ID NO: 18817 - DNA, 17 bp, Homo sapiens
caccagacttagggcct

SEQ ID NO: 18818 - DNA, 18 bp, Homo sapiens
ggtgccatccttgagttc

SEQ ID NO: 18819 - DNA, 23 bp, Homo sapiens
gatttacagttagaaaacccagg

SEQ ID NO: 18820 - DNA, 16 bp, Homo sapiens
gcccagcatcgagtgc

SEQ ID NO: 18821 - DNA, 22 bp, Homo sapiens
gggctctggcaggtcacttgtc

SEQ ID NO: 18822 - DNA, 16 bp, Homo sapiens
cctcagctgtggcccc

SEQ ID NO: 18823 - DNA, 24 bp, Homo sapiens
gcagcttctctggcttatcgaact

SEQ ID NO: 18824 - DNA, 18 bp, Homo sapiens
agtgacaggacattctgg

SEQ ID NO: 18825 - DNA, 19 bp, Homo sapiens
actcaggatggtgtgcact

SEQ ID NO: 18826 - DNA, 17 bp, Homo sapiens
cccttgccctgaactgc

SEQ ID NO: 18827 - DNA, 21 bp, Homo sapiens
ttggcaggaaaacatcctcca

SEQ ID NO: 18828 - DNA, 17 bp, Homo sapiens
aagcccaggggctgtgc

SEQ ID NO: 18829 - DNA, 23 bp, Homo sapiens
ctccacatcccccaagccaggcc

SEQ ID NO: 18830 - DNA, 16 bp, Homo sapiens
ccccatcaatgggccc

SEQ ID NO: 18831 - DNA, 16 bp, Homo sapiens
gggtgggactaggatc

SEQ ID NO: 18832 - DNA, 20 bp, Homo sapiens
gctgtcatcaccaccttttg

SEQ ID NO: 18833 - DNA, 21 bp, Homo sapiens
catcttcatcatggacgaggc

SEQ ID NO: 18834 - DNA, 24 bp, Homo sapiens
gcaacacatagcatttgatgttag

SEQ ID NO: 18835 - DNA, 24 bp, Homo sapiens
aatttcagccagggacagaggcag

SEQ ID NO: 18836 - DNA, 19 bp, Homo sapiens
ctagcatcccactaaaccc

SEQ ID NO: 18837 - DNA, 16 bp, Homo sapiens
acttcatctccccggg

SEQ ID NO: 18838 - DNA, 19 bp, Homo sapiens
gtggccatgtcaatggaag

SEQ ID NO: 18839 - DNA, 23 bp, Homo sapiens
attttccaacagccccccaagcc

SEQ ID NO: 18840 - DNA, 17 bp, Homo sapiens
gggccaggcagaacagc

SEQ ID NO: 18841 - DNA, 17 bp, Homo sapiens
cctgcacacgcctgtgc

SEQ ID NO: 18842 - DNA, 19 bp, Homo sapiens
cccccgtatagtgagaagt

SEQ ID NO: 18843 - DNA, 23 bp, Homo sapiens
ctcagatagcacactgtgggagg

SEQ ID NO: 18844 - DNA, 17 bp, Homo sapiens
cctgagacacgggcttc

SEQ ID NO: 18845 - DNA, 20 bp, Homo sapiens
actggggctttctgtgccac

SEQ ID NO: 18846 - DNA, 24 bp, Homo sapiens
cccaaccaacccagctgcatagcc

SEQ ID NO: 18847 - DNA, 22 bp, Homo sapiens
cagtctgctctcgctcactgcc

SEQ ID NO: 18848 - DNA, 20 bp, Homo sapiens
agcttcagctgggcgatttc

SEQ ID NO: 18849 - DNA, 16 bp, Homo sapiens
gtcccccacccactgc

SEQ ID NO: 18850 - DNA, 16 bp, Homo sapiens
gatccccttccagagg

SEQ ID NO: 18851 - DNA, 17 bp, Homo sapiens
cctctccatcatcctgc

SEQ ID NO: 18852 - DNA, 21 bp, Homo sapiens
cacctctgggatcctggtctc

SEQ ID NO: 18853 - DNA, 24 bp, Homo sapiens
ccatgcagggcacatcatcattga

SEQ ID NO: 18854 - DNA, 24 bp, Homo sapiens
gatggaactgagccggcctggggc

SEQ ID NO: 18855 - DNA, 17 bp, Homo sapiens
gacatgacaggaggccc

SEQ ID NO: 18856 - DNA, 24 bp, Homo sapiens
ccgctgaagaggacggggtcctgc

SEQ ID NO: 18857 - DNA, 16 bp, Homo sapiens
ggcaccccacgtgtac

SEQ ID NO: 18858 - DNA, 24 bp, Homo sapiens
gcagtttggcgatgtcaatgccat

SEQ ID NO: 18859 - DNA, 23 bp, Homo sapiens
gcagtgggaagtcctccttctct

SEQ ID NO: 18860 - DNA, 17 bp, Homo sapiens
aaggcggtgactgctgg

SEQ ID NO: 18861 - DNA, 17 bp, Homo sapiens
ggcggtgcctgcttctc

SEQ ID NO: 18862 - DNA, 23 bp, Homo sapiens
ctcatctggtggctgtgggtaca

SEQ ID NO: 18863 - DNA, 19 bp, Homo sapiens
ccacacctgcacacacacc

SEQ ID NO: 18864 - DNA, 22 bp, Homo sapiens
gtgtccaccatgcggaagaagg

SEQ ID NO: 18865 - DNA, 18 bp, Homo sapiens
tggtgtccaaagagaaac

SEQ ID NO: 18866 - DNA, 18 bp, Homo sapiens
gaagcacgtcaatgccct

SEQ ID NO: 18867 - DNA, 18 bp, Homo sapiens
atagtgagaggcctcggc

SEQ ID NO: 18868 - DNA, 24 bp, Homo sapiens
aagggaagatccagatccagaacc

SEQ ID NO: 18869 - DNA, 17 bp, Homo sapiens
catgccccatcccctgc

SEQ ID NO: 18870 - DNA, 17 bp, Homo sapiens
gctgagcccagcccggc

SEQ ID NO: 18871 - DNA, 19 bp, Homo sapiens
ctgaccttctgtccagggg

SEQ ID NO: 18872 - DNA, 17 bp, Homo sapiens
gccacaagggagcctgg

SEQ ID NO: 18873 - DNA, 21 bp, Homo sapiens
tcgtagcgcacgctcaggttc

SEQ ID NO: 18874 - DNA, 19 bp, Homo sapiens
gtgagaggctcagggagag

SEQ ID NO: 18875 - DNA, 20 bp, Homo sapiens
tcagcgatggtgctgggggc

SEQ ID NO: 18876 - DNA, 16 bp, Homo sapiens
gaagcgcatccatggg

SEQ ID NO: 18877 - DNA, 23 bp, Homo sapiens
agctagtatccgaaagtgccacc

SEQ ID NO: 18878 - DNA, 18 bp, Homo sapiens
tccaactacctcaactgg

SEQ ID NO: 18879 - DNA, 20 bp, Homo sapiens
tcctccttggactcttcccc

SEQ ID NO: 18880 - DNA, 24 bp, Homo sapiens
cattctggtggctgaggacagaac

SEQ ID NO: 18881 - DNA, 24 bp, Homo sapiens
gctctctgcctcggttttcaggag

SEQ ID NO: 18882 - DNA, 16 bp, Homo sapiens
caaaaggaatctgggg

SEQ ID NO: 18883 - DNA, 22 bp, Homo sapiens
gtctgccaggttcctcaccatc

SEQ ID NO: 18884 - DNA, 23 bp, Homo sapiens
tctggggcctgggccctggggcc

SEQ ID NO: 18885 - DNA, 16 bp, Homo sapiens
agctctctgctggcct

SEQ ID NO: 18886 - DNA, 23 bp, Homo sapiens
tgcaaatgaaattggggtaaggc

SEQ ID NO: 18887 - DNA, 24 bp, Homo sapiens
gtacatcggtgcatgtgtggtgct

SEQ ID NO: 18888 - DNA, 18 bp, Homo sapiens
gagtgctggtgtctgacc

SEQ ID NO: 18889 - DNA, 17 bp, Homo sapiens
cctgtggctctaacccc

SEQ ID NO: 18890 - DNA, 17 bp, Homo sapiens
gtaggtaaggcccaggc

SEQ ID NO: 18891 - DNA, 16 bp, Homo sapiens
gggctggagtggaggc

SEQ ID NO: 18892 - DNA, 18 bp, Homo sapiens
gtcaccgctgcgatgagc

SEQ ID NO: 18893 - DNA, 24 bp, Homo sapiens
aaaaggagcacaggctagacacta

SEQ ID NO: 18894 - DNA, 23 bp, Homo sapiens
caacattgcttccctcttcctca

SEQ ID NO: 18895 - DNA, 23 bp, Homo sapiens
gtccacacgatctggtatcctat

SEQ ID NO: 18896 - DNA, 17 bp, Homo sapiens
ccctccaggtatgaggc

SEQ ID NO: 18897 - DNA, 18 bp, Homo sapiens
accctcctatcagaggcc

SEQ ID NO: 18898 - DNA, 20 bp, Homo sapiens
gtagggagactcctaggagc

SEQ ID NO: 18899 - DNA, 16 bp, Homo sapiens
tgttggcagctgtgag

SEQ ID NO: 18900 - DNA, 24 bp, Homo sapiens
gatagcttacatgaagtggccacg

SEQ ID NO: 18901 - DNA, 24 bp, Homo sapiens
tattcgagaagcttctgctggaac

SEQ ID NO: 18902 - DNA, 24 bp, Homo sapiens
tggatatcccttgggccttgggac

SEQ ID NO: 18903 - DNA, 24 bp, Homo sapiens
tgacaccacccagcttccacttct

SEQ ID NO: 18904 - DNA, 24 bp, Homo sapiens
aagtggagtcctgagaatcaaatc

SEQ ID NO: 18905 - DNA, 20 bp, Homo sapiens
ctgccctcttaactgttcca

SEQ ID NO: 18906 - DNA, 24 bp, Homo sapiens
tcctaccttgggggaatgtggact

SEQ ID NO: 18907 - DNA, 16 bp, Homo sapiens
acccacacagcggtag

SEQ ID NO: 18908 - DNA, 18 bp, Homo sapiens
gcaaagtgtgagagaagt

SEQ ID NO: 18909 - DNA, 18 bp, Homo sapiens
ggtggcattgtcttcccc

SEQ ID NO: 18910 - DNA, 23 bp, Homo sapiens
atgtggatatttctatttccttc

SEQ ID NO: 18911 - DNA, 19 bp, Homo sapiens
gttcctcgtggccctcttg

SEQ ID NO: 18912 - DNA, 22 bp, Homo sapiens
acgaccctattactctcataac

SEQ ID NO: 18913 - DNA, 18 bp, Homo sapiens
tccaccctgctctgtgtc

SEQ ID NO: 18914 - DNA, 16 bp, Homo sapiens
ctcccacccctcaccc

SEQ ID NO: 18915 - DNA, 16 bp, Homo sapiens
actctctccccctcgt

SEQ ID NO: 18916 - DNA, 20 bp, Homo sapiens
atgaagtagcacacgatggc

SEQ ID NO: 18917 - DNA, 22 bp, Homo sapiens
taaagtgagagcaaaacatggc

SEQ ID NO: 18918 - DNA, 20 bp, Homo sapiens
tgacggccagggctgagaca

SEQ ID NO: 18919 - DNA, 18 bp, Homo sapiens
ctgctgcactcaagtctg

SEQ ID NO: 18920 - DNA, 20 bp, Homo sapiens
ctgtaacaccatcgaccagg

SEQ ID NO: 18921 - DNA, 23 bp, Homo sapiens
cattataatcggatcggggacac

SEQ ID NO: 18922 - DNA, 20 bp, Homo sapiens
ttaggttttttgagaccacg

SEQ ID NO: 18923 - DNA, 20 bp, Homo sapiens
gaacccagcctcagacagga

SEQ ID NO: 18924 - DNA, 22 bp, Homo sapiens
actatctcattcagtaaacagg

SEQ ID NO: 18925 - DNA, 19 bp, Homo sapiens
gatagtgtggcacggtcct

SEQ ID NO: 18926 - DNA, 16 bp, Homo sapiens
ggatgccagacccatg

SEQ ID NO: 18927 - DNA, 24 bp, Homo sapiens
tctgttcaggatgctcccaagggg

SEQ ID NO: 18928 - DNA, 24 bp, Homo sapiens
tgctaaaccggatcatcctagccc

SEQ ID NO: 18929 - DNA, 24 bp, Homo sapiens
tttacacacactgtctccttgagt

SEQ ID NO: 18930 - DNA, 19 bp, Homo sapiens
tctgtcactgtggagtgga

SEQ ID NO: 18931 - DNA, 23 bp, Homo sapiens
cccattttatagatgggaagact

SEQ ID NO: 18932 - DNA, 18 bp, Homo sapiens
ccatggtgttcacggtgc

SEQ ID NO: 18933 - DNA, 24 bp, Homo sapiens
ggccaggggagacgggtacctcat

SEQ ID NO: 18934 - DNA, 19 bp, Homo sapiens
cctggaactccaaatcact

SEQ ID NO: 18935 - DNA, 19 bp, Homo sapiens
ctcttggccaccttcagcc

SEQ ID NO: 18936 - DNA, 23 bp, Homo sapiens
gtgtgactggcggcccatggcag

SEQ ID NO: 18937 - DNA, 17 bp, Homo sapiens
atgcccaggctgcagag

SEQ ID NO: 18938 - DNA, 16 bp, Homo sapiens
ccgacagcgccctgac

SEQ ID NO: 18939 - DNA, 20 bp, Homo sapiens
actccttcacaggcagagag

SEQ ID NO: 18940 - DNA, 18 bp, Homo sapiens
ttctcacagctgctcaag

SEQ ID NO: 18941 - DNA, 18 bp, Homo sapiens
catccccactcccaacct

SEQ ID NO: 18942 - DNA, 17 bp, Homo sapiens
cccatggcgagcctgcg

SEQ ID NO: 18943 - DNA, 24 bp, Homo sapiens
gttcctggctgcaggggtcagggt

SEQ ID NO: 18944 - DNA, 16 bp, Homo sapiens
gcagctgagagcgagg

SEQ ID NO: 18945 - DNA, 17 bp, Homo sapiens
ccaggaccatgtgcttg

SEQ ID NO: 18946 - DNA, 23 bp, Homo sapiens
attcaccctcagagggatggaaa

SEQ ID NO: 18947 - DNA, 22 bp, Homo sapiens
gatgccggcggaggacaggtac

SEQ ID NO: 18948 - DNA, 23 bp, Homo sapiens
gattaaatggcttccctctgtgt

SEQ ID NO: 18949 - DNA, 24 bp, Homo sapiens
agcatggacgacaggttgtcatcc

SEQ ID NO: 18950 - DNA, 19 bp, Homo sapiens
cacagagaggctaaggttt

SEQ ID NO: 18951 - DNA, 19 bp, Homo sapiens
acttactgaggggacaacg

SEQ ID NO: 18952 - DNA, 17 bp, Homo sapiens
accccagggcctatctc

SEQ ID NO: 18953 - DNA, 21 bp, Homo sapiens
tactgcaccacacccagaacc

SEQ ID NO: 18954 - DNA, 21 bp, Homo sapiens
agacattgcccaggccacatc

SEQ ID NO: 18955 - DNA, 24 bp, Homo sapiens
taatttcactcccagtcccattgc

SEQ ID NO: 18956 - DNA, 20 bp, Homo sapiens
tcatcaccagagtagttacc

SEQ ID NO: 18957 - DNA, 20 bp, Homo sapiens
atccctcgaggacatggcac

SEQ ID NO: 18958 - DNA, 21 bp, Homo sapiens
gatgaatgtgtgtctgtctgc

SEQ ID NO: 18959 - DNA, 19 bp, Homo sapiens
tgaaccgacaggaccaaga

SEQ ID NO: 18960 - DNA, 16 bp, Homo sapiens
gctcccacatctgccc

SEQ ID NO: 18961 - DNA, 17 bp, Homo sapiens
ggtaccctcaaggactt

SEQ ID NO: 18962 - DNA, 20 bp, Homo sapiens
gttcaggttctagcagaacc

SEQ ID NO: 18963 - DNA, 17 bp, Homo sapiens
cacgtttgttgctgcct

SEQ ID NO: 18964 - DNA, 24 bp, Homo sapiens
ctggatatacccaccttctccagc

SEQ ID NO: 18965 - DNA, 22 bp, Homo sapiens
cctccatcttagactccacaat

SEQ ID NO: 18966 - DNA, 24 bp, Homo sapiens
ctcaaagagctggcattcagacct

SEQ ID NO: 18967 - DNA, 17 bp, Homo sapiens
ccacttgcagtggatga

SEQ ID NO: 18968 - DNA, 20 bp, Homo sapiens
tccttcatggcaatgatctg

SEQ ID NO: 18969 - DNA, 19 bp, Homo sapiens
cacaagctacagtacctgc

SEQ ID NO: 18970 - DNA, 24 bp, Homo sapiens
gccatccagtgctggtctcttatg

SEQ ID NO: 18971 - DNA, 24 bp, Homo sapiens
taatgcaggccggcatccttgagc

SEQ ID NO: 18972 - DNA, 19 bp, Homo sapiens
ctgccaagatgcctgacag

SEQ ID NO: 18973 - DNA, 17 bp, Homo sapiens
ttctgcccaggatgacc

SEQ ID NO: 18974 - DNA, 16 bp, Homo sapiens
cacccagtctgcatgg

SEQ ID NO: 18975 - DNA, 17 bp, Homo sapiens
ctcattgtcacccctcc

SEQ ID NO: 18976 - DNA, 18 bp, Homo sapiens
cctcttgtcgtcccggag

SEQ ID NO: 18977 - DNA, 19 bp, Homo sapiens
ccacacagctaactagctt

SEQ ID NO: 18978 - DNA, 20 bp, Homo sapiens
gatatccagagctgagaagg

SEQ ID NO: 18979 - DNA, 16 bp, Homo sapiens
ccctctaccagcacgc

SEQ ID NO: 18980 - DNA, 24 bp, Homo sapiens
tatctctggcaggagggatttact

SEQ ID NO: 18981 - DNA, 21 bp, Homo sapiens
tttggtgacagggcatcaacc

SEQ ID NO: 18982 - DNA, 22 bp, Homo sapiens
ggtggaggtgggcagttaggcc

SEQ ID NO: 18983 - DNA, 23 bp, Homo sapiens
catagtccagtagggtacaggac

SEQ ID NO: 18984 - DNA, 23 bp, Homo sapiens
cttgcactcaccaagaagacaac

SEQ ID NO: 18985 - DNA, 16 bp, Homo sapiens
aaggtgagaagcaggc

SEQ ID NO: 18986 - DNA, 16 bp, Homo sapiens
cgttgaccaccagaca

SEQ ID NO: 18987 - DNA, 18 bp, Homo sapiens
agacccagattggggaac

SEQ ID NO: 18988 - DNA, 24 bp, Homo sapiens
tgtttgaccttactgcaggcaact

SEQ ID NO: 18989 - DNA, 21 bp, Homo sapiens
gtacaagatggtcattgaagc

SEQ ID NO: 18990 - DNA, 24 bp, Homo sapiens
tacccattgtcctgagtagtgtct

SEQ ID NO: 18991 - DNA, 16 bp, Homo sapiens
ctcgggccaactctga

SEQ ID NO: 18992 - DNA, 23 bp, Homo sapiens
tcagaggctgctactaacccgtt

SEQ ID NO: 18993 - DNA, 23 bp, Homo sapiens
cctattaaagccattgctcaccc

SEQ ID NO: 18994 - DNA, 24 bp, Homo sapiens
tgtcgatgtctggctgcagagagc

SEQ ID NO: 18995 - DNA, 21 bp, Homo sapiens
gaacatcatctttgagagtcc

SEQ ID NO: 18996 - DNA, 23 bp, Homo sapiens
taagcacctggggagtgagatgg

SEQ ID NO: 18997 - DNA, 20 bp, Homo sapiens
aggaagagaggccccgtggc

SEQ ID NO: 18998 - DNA, 20 bp, Homo sapiens
gcaggctggccagagacagt

SEQ ID NO: 18999 - DNA, 18 bp, Homo sapiens
acaagcccctgagaatgc

SEQ ID NO: 19000 - DNA, 23 bp, Homo sapiens
ttaccgttgtttgttgaagggac

SEQ ID NO: 19001 - DNA, 17 bp, Homo sapiens
tgcacctccccatcccc

SEQ ID NO: 19002 - DNA, 24 bp, Homo sapiens
ttagcagccatggtttctgcgaag

SEQ ID NO: 19003 - DNA, 20 bp, Homo sapiens
ccagagcgggagacagcgac

SEQ ID NO: 19004 - DNA, 18 bp, Homo sapiens
ccctggcctcccccaaca

SEQ ID NO: 19005 - DNA, 16 bp, Homo sapiens
atggttcactcccatg

SEQ ID NO: 19006 - DNA, 17 bp, Homo sapiens
cttgggcctgagagcac

SEQ ID NO: 19007 - DNA, 19 bp, Homo sapiens
gtccaggggattgtaaagg

SEQ ID NO: 19008 - DNA, 22 bp, Homo sapiens
cgcagtacctgatatccaagtc

SEQ ID NO: 19009 - DNA, 23 bp, Homo sapiens
gaatgcaggccttagccccatgt

SEQ ID NO: 19010 - DNA, 20 bp, Homo sapiens
ggaactaactggtgttggtc

SEQ ID NO: 19011 - DNA, 24 bp, Homo sapiens
tactcagcattacccacccacaag

SEQ ID NO: 19012 - DNA, 24 bp, Homo sapiens
gagggttggaggtggggattgctt

SEQ ID NO: 19013 - DNA, 22 bp, Homo sapiens
acttctgacccagtcccaaggc

SEQ ID NO: 19014 - DNA, 23 bp, Homo sapiens
ttgagaagagtgctttctgaccc

SEQ ID NO: 19015 - DNA, 24 bp, Homo sapiens
actagtgatgatgatgagaatatc

SEQ ID NO: 19016 - DNA, 17 bp, Homo sapiens
tcctcgctccttctagc

SEQ ID NO: 19017 - DNA, 22 bp, Homo sapiens
ccctccaataaatgtgtgtgca

SEQ ID NO: 19018 - DNA, 17 bp, Homo sapiens
atctgccaccctccctc

SEQ ID NO: 19019 - DNA, 18 bp, Homo sapiens
actgggccctgaggatac

SEQ ID NO: 19020 - DNA, 24 bp, Homo sapiens
gggtgcatctgtctgtctgtcttt

SEQ ID NO: 19021 - DNA, 17 bp, Homo sapiens
tgcatctcccccagtgc

SEQ ID NO: 19022 - DNA, 17 bp, Homo sapiens
aggacttgctggggatt

SEQ ID NO: 19023 - DNA, 22 bp, Homo sapiens
ccacgatcatagtcagctggcc

SEQ ID NO: 19024 - DNA, 19 bp, Homo sapiens
atcaccattcgtatccccc

SEQ ID NO: 19025 - DNA, 24 bp, Homo sapiens
ctataatatacccagggcatacac

SEQ ID NO: 19026 - DNA, 19 bp, Homo sapiens
aatgaagatcatgggaggc

SEQ ID NO: 19027 - DNA, 24 bp, Homo sapiens
atgcagctttgtctttttatctct

SEQ ID NO: 19028 - DNA, 20 bp, Homo sapiens
agagactattcactgggaac

SEQ ID NO: 19029 - DNA, 18 bp, Homo sapiens
tggactgggccatacctc

SEQ ID NO: 19030 - DNA, 18 bp, Homo sapiens
gctctggaagtgatccag

SEQ ID NO: 19031 - DNA, 17 bp, Homo sapiens
ggtccacgtgaagtagc

SEQ ID NO: 19032 - DNA, 18 bp, Homo sapiens
tgctgacaactgctgtgt

SEQ ID NO: 19033 - DNA, 22 bp, Homo sapiens
gtttctggactcctatggaccg

SEQ ID NO: 19034 - DNA, 16 bp, Homo sapiens
attgtcggggcctcac

SEQ ID NO: 19035 - DNA, 24 bp, Homo sapiens
gcagctttctggctttccaggtgc

SEQ ID NO: 19036 - DNA, 17 bp, Homo sapiens
tcacctccaaaccaccc

SEQ ID NO: 19037 - DNA, 19 bp, Homo sapiens
agcaggactcacctggaca

SEQ ID NO: 19038 - DNA, 22 bp, Homo sapiens
gtcggacttctgccttttttcc

SEQ ID NO: 19039 - DNA, 16 bp, Homo sapiens
cagtgggccggtgagg

SEQ ID NO: 19040 - DNA, 17 bp, Homo sapiens
cccttgctactcccagc

SEQ ID NO: 19041 - DNA, 18 bp, Homo sapiens
acaaccctgaggggctgg

SEQ ID NO: 19042 - DNA, 17 bp, Homo sapiens
ccccatgagcccacacc

SEQ ID NO: 19043 - DNA, 18 bp, Homo sapiens
ggaagggagcccctcttc

SEQ ID NO: 19044 - DNA, 19 bp, Homo sapiens
tgcaaaagctaagcgagtt

SEQ ID NO: 19045 - DNA, 24 bp, Homo sapiens
agttttgggccttagaggaccatg

SEQ ID NO: 19046 - DNA, 17 bp, Homo sapiens
ctcccctcccctctgcc

SEQ ID NO: 19047 - DNA, 17 bp, Homo sapiens
ggtacttgctggctggg

SEQ ID NO: 19048 - DNA, 22 bp, Homo sapiens
gggctttgtgggactatacttc

SEQ ID NO: 19049 - DNA, 23 bp, Homo sapiens
gatctctgcactggacaggaact

SEQ ID NO: 19050 - DNA, 22 bp, Homo sapiens
tggtccgatctaccgtcaaagc

SEQ ID NO: 19051 - DNA, 16 bp, Homo sapiens
caaggcccagcaatgg

SEQ ID NO: 19052 - DNA, 16 bp, Homo sapiens
ctttgcctccctctcc

SEQ ID NO: 19053 - DNA, 19 bp, Homo sapiens
gagcaagccttgaggctga

SEQ ID NO: 19054 - DNA, 18 bp, Homo sapiens
ccacagactttcgtgggc

SEQ ID NO: 19055 - DNA, 23 bp, Homo sapiens
ccctcccctcacctcactagagc

SEQ ID NO: 19056 - DNA, 16 bp, Homo sapiens
agtgtgggagggaccc

SEQ ID NO: 19057 - DNA, 22 bp, Homo sapiens
gtgtgaccaagatatggaagag

SEQ ID NO: 19058 - DNA, 21 bp, Homo sapiens
ctaaaagatcctcttaggagc

SEQ ID NO: 19059 - DNA, 24 bp, Homo sapiens
gtcggcctctttgaagaagctgac

SEQ ID NO: 19060 - DNA, 24 bp, Homo sapiens
cattgcagctgtcctcatagtaag

SEQ ID NO: 19061 - DNA, 24 bp, Homo sapiens
cctctataaactttcgatcctatt

SEQ ID NO: 19062 - DNA, 16 bp, Homo sapiens
ccactaaacgcctccc

SEQ ID NO: 19063 - DNA, 23 bp, Homo sapiens
gcagaaaggccaaatctgggcag

SEQ ID NO: 19064 - DNA, 17 bp, Homo sapiens
cactggactgcgctgcc

SEQ ID NO: 19065 - DNA, 20 bp, Homo sapiens
aagagatggagaaaggatcc

SEQ ID NO: 19066 - DNA, 16 bp, Homo sapiens
agggctagagttctgc

SEQ ID NO: 19067 - DNA, 19 bp, Homo sapiens
gggcctttgccatctatac

SEQ ID NO: 19068 - DNA, 23 bp, Homo sapiens
ctcccctactgagtcggataatc

SEQ ID NO: 19069 - DNA, 19 bp, Homo sapiens
ggagaacatcttccgcacg

SEQ ID NO: 19070 - DNA, 23 bp, Homo sapiens
cttacccgagctctgacaccctc

SEQ ID NO: 19071 - DNA, 21 bp, Homo sapiens
caatgagcggctgaagcagac

SEQ ID NO: 19072 - DNA, 22 bp, Homo sapiens
gtgaactcactggagatggagg

SEQ ID NO: 19073 - DNA, 16 bp, Homo sapiens
cggagcagaagcctct

SEQ ID NO: 19074 - DNA, 16 bp, Homo sapiens
gcgggtcgtctccacc

SEQ ID NO: 19075 - DNA, 17 bp, Homo sapiens
gacaggaggcgggcatg

SEQ ID NO: 19076 - DNA, 20 bp, Homo sapiens
cttgatgccgcggagcatct

SEQ ID NO: 19077 - DNA, 24 bp, Homo sapiens
ctgtccaggcctcagcttctttgt

SEQ ID NO: 19078 - DNA, 19 bp, Homo sapiens
cccattgactccatttccc

SEQ ID NO: 19079 - DNA, 17 bp, Homo sapiens
cagtacttcgtggccac

SEQ ID NO: 19080 - DNA, 24 bp, Homo sapiens
aaagtcaaagtcaaagtcaatgac

SEQ ID NO: 19081 - DNA, 24 bp, Homo sapiens
cctctactacatactcggagtcag

SEQ ID NO: 19082 - DNA, 17 bp, Homo sapiens
aaggaggggaagaggga

SEQ ID NO: 19083 - DNA, 16 bp, Homo sapiens
tcaaagggacctgacc

SEQ ID NO: 19084 - DNA, 19 bp, Homo sapiens
cctgagacagcttggtggc

SEQ ID NO: 19085 - DNA, 24 bp, Homo sapiens
gcttgtcccactctaggggactgg

SEQ ID NO: 19086 - DNA, 21 bp, Homo sapiens
acagctgctccaattaaggca

SEQ ID NO: 19087 - DNA, 17 bp, Homo sapiens
ccttccctgcactccac

SEQ ID NO: 19088 - DNA, 17 bp, Homo sapiens
ctgggctatgccagtac

SEQ ID NO: 19089 - DNA, 21 bp, Homo sapiens
cctgtggtatagccaagtgtg

SEQ ID NO: 19090 - DNA, 24 bp, Homo sapiens
atctgtaatctggttgccatcgac

SEQ ID NO: 19091 - DNA, 23 bp, Homo sapiens
tgctcctagttactggccatgga

SEQ ID NO: 19092 - DNA, 21 bp, Homo sapiens
taaaattatgcacctgtccac

SEQ ID NO: 19093 - DNA, 21 bp, Homo sapiens
ttcccctcagcccatctagta

SEQ ID NO: 19094 - DNA, 22 bp, Homo sapiens
gatgagaatgatgatgaatgtg

SEQ ID NO: 19095 - DNA, 22 bp, Homo sapiens
aaaaaccacatgagctgattgg

SEQ ID NO: 19096 - DNA, 17 bp, Homo sapiens
actgtctgagaagcccc

SEQ ID NO: 19097 - DNA, 23 bp, Homo sapiens
catttctcccatggacaggttgg

SEQ ID NO: 19098 - DNA, 20 bp, Homo sapiens
actagtaagttggaacggtg

SEQ ID NO: 19099 - DNA, 22 bp, Homo sapiens
ggttactgttttaaaacatcgt

SEQ ID NO: 19100 - DNA, 18 bp, Homo sapiens
acatttctgcaagcatcc

SEQ ID NO: 19101 - DNA, 24 bp, Homo sapiens
gaattattcttgagtgtccatgag

SEQ ID NO: 19102 - DNA, 19 bp, Homo sapiens
caagagttccttgccaatg

SEQ ID NO: 19103 - DNA, 21 bp, Homo sapiens
tggcaaagtgaaaaaataatc

SEQ ID NO: 19104 - DNA, 22 bp, Homo sapiens
cctctgaacttctctttccaac

SEQ ID NO: 19105 - DNA, 22 bp, Homo sapiens
tccagtttcaatggccacatag

SEQ ID NO: 19106 - DNA, 19 bp, Homo sapiens
ccattatggcacagtgatg

SEQ ID NO: 19107 - DNA, 21 bp, Homo sapiens
gaacagaagcacagctaagac

SEQ ID NO: 19108 - DNA, 17 bp, Homo sapiens
aaacaattgcacaagcc

SEQ ID NO: 19109 - DNA, 18 bp, Homo sapiens
accccgagaaattgtgtc

SEQ ID NO: 19110 - DNA, 18 bp, Homo sapiens
gaacgacgtcttccagcc

SEQ ID NO: 19111 - DNA, 17 bp, Homo sapiens
ctgctatgggctttgcg

SEQ ID NO: 19112 - DNA, 16 bp, Homo sapiens
ctgggcttcgccgggc

SEQ ID NO: 19113 - DNA, 21 bp, Homo sapiens
acacacattggcctgttgcac

SEQ ID NO: 19114 - DNA, 22 bp, Homo sapiens
actcagccatgccttcgggagg

SEQ ID NO: 19115 - DNA, 16 bp, Homo sapiens
ggctgcctaccttggg

SEQ ID NO: 19116 - DNA, 16 bp, Homo sapiens
ctgggcagcggaagga

SEQ ID NO: 19117 - DNA, 19 bp, Homo sapiens
cccaaagatgcacagtggc

SEQ ID NO: 19118 - DNA, 17 bp, Homo sapiens
tcctgggaggctaggcc

SEQ ID NO: 19119 - DNA, 17 bp, Homo sapiens
ctgctgaggaccaggcg

SEQ ID NO: 19120 - DNA, 21 bp, Homo sapiens
agttcacctatttgcagagga

SEQ ID NO: 19121 - DNA, 23 bp, Homo sapiens
gcaccttgagtgccctgaatgtc

SEQ ID NO: 19122 - DNA, 24 bp, Homo sapiens
acggctctgcgaggcctttgacgc

SEQ ID NO: 19123 - DNA, 22 bp, Homo sapiens
gcaagcttcttcccctcaccag

SEQ ID NO: 19124 - DNA, 17 bp, Homo sapiens
gacttgcgagccatcgg

SEQ ID NO: 19125 - DNA, 24 bp, Homo sapiens
ctaatgccctttgaggtccctctc

SEQ ID NO: 19126 - DNA, 20 bp, Homo sapiens
caaaggcacctactggtgga

SEQ ID NO: 19127 - DNA, 19 bp, Homo sapiens
cccccactgaccacctggg

SEQ ID NO: 19128 - DNA, 16 bp, Homo sapiens
gaggacctgcaagacc

SEQ ID NO: 19129 - DNA, 19 bp, Homo sapiens
cctcatggcgatgggcagc

SEQ ID NO: 19130 - DNA, 16 bp, Homo sapiens
catggcccatgtgccc

SEQ ID NO: 19131 - DNA, 24 bp, Homo sapiens
cagtcttgatgaaggcgttcatcc

SEQ ID NO: 19132 - DNA, 20 bp, Homo sapiens
tatcacaaccccagatcctt

SEQ ID NO: 19133 - DNA, 18 bp, Homo sapiens
aggaagcgtacccccagg

SEQ ID NO: 19134 - DNA, 24 bp, Homo sapiens
cttttcctggtaataattacaggc

SEQ ID NO: 19135 - DNA, 23 bp, Homo sapiens
cttgaagaagatgtatctctgtg

SEQ ID NO: 19136 - DNA, 18 bp, Homo sapiens
ggtcaatgtcatcagggt

SEQ ID NO: 19137 - DNA, 18 bp, Homo sapiens
acgggcgggtaaaacaag

SEQ ID NO: 19138 - DNA, 17 bp, Homo sapiens
gcagctacgcttctgcc

SEQ ID NO: 19139 - DNA, 17 bp, Homo sapiens
ctgaacccagggcagga

SEQ ID NO: 19140 - DNA, 17 bp, Homo sapiens
ccttcatcaccaagacc

SEQ ID NO: 19141 - DNA, 16 bp, Homo sapiens
cctgcttaccctcacc

SEQ ID NO: 19142 - DNA, 19 bp, Homo sapiens
cacacgtctctgcgatctt

SEQ ID NO: 19143 - DNA, 18 bp, Homo sapiens
tagaggatcaccagcagc

SEQ ID NO: 19144 - DNA, 21 bp, Homo sapiens
ttattctgtctccttctctgc

SEQ ID NO: 19145 - DNA, 24 bp, Homo sapiens
ccaagaacttgacaaacttgatgg

SEQ ID NO: 19146 - DNA, 21 bp, Homo sapiens
ctctgatatattcacacgtgc

SEQ ID NO: 19147 - DNA, 18 bp, Homo sapiens
cttccccaagctgctaat

SEQ ID NO: 19148 - DNA, 21 bp, Homo sapiens
tgaaggcagggatttttttct

SEQ ID NO: 19149 - DNA, 16 bp, Homo sapiens
tggcgttcatggctgc

SEQ ID NO: 19150 - DNA, 23 bp, Homo sapiens
acataatgagtcctcagtaaaca

SEQ ID NO: 19151 - DNA, 22 bp, Homo sapiens
cctgtctgtttctctctcccat

SEQ ID NO: 19152 - DNA, 24 bp, Homo sapiens
tcctacacctcacctaccaattag

SEQ ID NO: 19153 - DNA, 21 bp, Homo sapiens
cagcctttgaaattcaaggcc

SEQ ID NO: 19154 - DNA, 21 bp, Homo sapiens
atagtagaccacggaggtgac

SEQ ID NO: 19155 - DNA, 19 bp, Homo sapiens
cattaactaaagggccctg

SEQ ID NO: 19156 - DNA, 24 bp, Homo sapiens
gcagatggtgggattcggtcaccc

SEQ ID NO: 19157 - DNA, 23 bp, Homo sapiens
tgagattgcagagggcatcctgt

SEQ ID NO: 19158 - DNA, 24 bp, Homo sapiens
aagacactgagctgctggatgtag

SEQ ID NO: 19159 - DNA, 16 bp, Homo sapiens
cacaacctgcggtgga

SEQ ID NO: 19160 - DNA, 23 bp, Homo sapiens
ctaggatctccttgggcctttca

SEQ ID NO: 19161 - DNA, 23 bp, Homo sapiens
tgcaggatggggaagtcagagct

SEQ ID NO: 19162 - DNA, 23 bp, Homo sapiens
cctcagacagtcactcacccatc

SEQ ID NO: 19163 - DNA, 20 bp, Homo sapiens
ttcatgcaccctcttcctcc

SEQ ID NO: 19164 - DNA, 21 bp, Homo sapiens
cagcatgaaggtcaggatcca

SEQ ID NO: 19165 - DNA, 24 bp, Homo sapiens
gccttggggatcctcatgtgtagg

SEQ ID NO: 19166 - DNA, 21 bp, Homo sapiens
ggtggatgtgcaccttggagc

SEQ ID NO: 19167 - DNA, 18 bp, Homo sapiens
ccccatcctcttcattgg

SEQ ID NO: 19168 - DNA, 16 bp, Homo sapiens
acagggcaggggaccc

SEQ ID NO: 19169 - DNA, 16 bp, Homo sapiens
ggctgctttgtggacg

SEQ ID NO: 19170 - DNA, 23 bp, Homo sapiens
gacgccgagcggtgcggcgcgca

SEQ ID NO: 19171 - DNA, 16 bp, Homo sapiens
ttctgcggcagcgaga

SEQ ID NO: 19172 - DNA, 24 bp, Homo sapiens
ctccgcggctcgctgcgcgcactc

SEQ ID NO: 19173 - DNA, 16 bp, Homo sapiens
ccagcggagccagctg

SEQ ID NO: 19174 - DNA, 16 bp, Homo sapiens
ccacgttgagcgcgtc

SEQ ID NO: 19175 - DNA, 16 bp, Homo sapiens
ggcctgacggccgggc

SEQ ID NO: 19176 - DNA, 19 bp, Homo sapiens
ggtaggcggccgagtggtt

SEQ ID NO: 19177 - DNA, 16 bp, Homo sapiens
gagcagggcggggtga

SEQ ID NO: 19178 - DNA, 24 bp, Homo sapiens
gttccttatctggccctggttcag

SEQ ID NO: 19179 - DNA, 19 bp, Homo sapiens
gctgtttccacttccctgc

SEQ ID NO: 19180 - DNA, 21 bp, Homo sapiens
aggatgccatctggtgtgtgt

SEQ ID NO: 19181 - DNA, 21 bp, Homo sapiens
ctcccccttgtggggccttgc

SEQ ID NO: 19182 - DNA, 24 bp, Homo sapiens
ctttgtgttcacgaggtggggccg

SEQ ID NO: 19183 - DNA, 20 bp, Homo sapiens
ctgcacccagaggggtctcc

SEQ ID NO: 19184 - DNA, 24 bp, Homo sapiens
cttttggacttcagaagaaggtcc

SEQ ID NO: 19185 - DNA, 16 bp, Homo sapiens
ctcctgcagctggagc

SEQ ID NO: 19186 - DNA, 19 bp, Homo sapiens
ggcagcacttcagggatgg

SEQ ID NO: 19187 - DNA, 18 bp, Homo sapiens
ccccaaccggtccgaaag

SEQ ID NO: 19188 - DNA, 18 bp, Homo sapiens
ctgctgacagcgtgggca

SEQ ID NO: 19189 - DNA, 20 bp, Homo sapiens
tttgtgtttcttgctctgct

SEQ ID NO: 19190 - DNA, 16 bp, Homo sapiens
cccgcctgcctattca

SEQ ID NO: 19191 - DNA, 16 bp, Homo sapiens
agcccagtgaaaggag

SEQ ID NO: 19192 - DNA, 19 bp, Homo sapiens
cggtcttcaaggagctttc

SEQ ID NO: 19193 - DNA, 18 bp, Homo sapiens
ggagaaaccagggtctcg

SEQ ID NO: 19194 - DNA, 23 bp, Homo sapiens
tctgccccccaaaggagtatgac

SEQ ID NO: 19195 - DNA, 16 bp, Homo sapiens
gagaagctgcgtgctt

SEQ ID NO: 19196 - DNA, 18 bp, Homo sapiens
cccagagtcacacggctt

SEQ ID NO: 19197 - DNA, 18 bp, Homo sapiens
gctggagaaaggtggctg

SEQ ID NO: 19198 - DNA, 16 bp, Homo sapiens
tggggcccagaaatgg

SEQ ID NO: 19199 - DNA, 21 bp, Homo sapiens
gcacacacttacagctcatcg

SEQ ID NO: 19200 - DNA, 16 bp, Homo sapiens
gaagtcacagtgggcc

SEQ ID NO: 19201 - DNA, 16 bp, Homo sapiens
gctgccctgcagaagg

SEQ ID NO: 19202 - DNA, 23 bp, Homo sapiens
tgttgcctggactccagatgccc

SEQ ID NO: 19203 - DNA, 17 bp, Homo sapiens
aggggacgagatcatgg

SEQ ID NO: 19204 - DNA, 16 bp, Homo sapiens
aggccagggtttgagg

SEQ ID NO: 19205 - DNA, 17 bp, Homo sapiens
gtcacatacagcccagt

SEQ ID NO: 19206 - DNA, 24 bp, Homo sapiens
ttcttaccccgccctgattccagg

SEQ ID NO: 19207 - DNA, 24 bp, Homo sapiens
agaacccaggctcaggtctcttct

SEQ ID NO: 19208 - DNA, 22 bp, Homo sapiens
tcacaatcttgccgttgattgc

SEQ ID NO: 19209 - DNA, 21 bp, Homo sapiens
taaccaggtggctagtttccc

SEQ ID NO: 19210 - DNA, 16 bp, Homo sapiens
gagctgctgagcggca

SEQ ID NO: 19211 - DNA, 18 bp, Homo sapiens
gtcggatggatggacccg

SEQ ID NO: 19212 - DNA, 16 bp, Homo sapiens
gaaggcggtgtggact

SEQ ID NO: 19213 - DNA, 24 bp, Homo sapiens
ccaagtggtcacctgtttgctttc

SEQ ID NO: 19214 - DNA, 18 bp, Homo sapiens
tgcttggctccctaaggc

SEQ ID NO: 19215 - DNA, 18 bp, Homo sapiens
gtgtggctagtctccact

SEQ ID NO: 19216 - DNA, 20 bp, Homo sapiens
cttccactcttactgtggct

SEQ ID NO: 19217 - DNA, 16 bp, Homo sapiens
ttcccaatgggggagt

SEQ ID NO: 19218 - DNA, 16 bp, Homo sapiens
ccacttggcaccaagg

SEQ ID NO: 19219 - DNA, 16 bp, Homo sapiens
gggcgtctccgtggga

SEQ ID NO: 19220 - DNA, 19 bp, Homo sapiens
ttttctctctagttcaccc

SEQ ID NO: 19221 - DNA, 22 bp, Homo sapiens
gagtgaccttgagagtagaggc

SEQ ID NO: 19222 - DNA, 17 bp, Homo sapiens
cccttccagccctaccc

SEQ ID NO: 19223 - DNA, 17 bp, Homo sapiens
caccggcctccacatgc

SEQ ID NO: 19224 - DNA, 16 bp, Homo sapiens
ctgggcacggtcccct

SEQ ID NO: 19225 - DNA, 24 bp, Homo sapiens
catccttccccatgatctgctctg

SEQ ID NO: 19226 - DNA, 23 bp, Homo sapiens
gaaatatgaggaaggctttgacc

SEQ ID NO: 19227 - DNA, 16 bp, Homo sapiens
gctcctctgtgcccca

SEQ ID NO: 19228 - DNA, 22 bp, Homo sapiens
tctgaccctcaagaccctctgc

SEQ ID NO: 19229 - DNA, 21 bp, Homo sapiens
accctctaacccccacactgc

SEQ ID NO: 19230 - DNA, 18 bp, Homo sapiens
cctcacttctgacccttg

SEQ ID NO: 19231 - DNA, 20 bp, Homo sapiens
ctcttaccatagagtagggg

SEQ ID NO: 19232 - DNA, 16 bp, Homo sapiens
tgctagggctgccggc

SEQ ID NO: 19233 - DNA, 24 bp, Homo sapiens
gatggtggtttatcagacagcatt

SEQ ID NO: 19234 - DNA, 24 bp, Homo sapiens
cagctctggcctgaggcttggtgg

SEQ ID NO: 19235 - DNA, 23 bp, Homo sapiens
catccaatgtggaactttttttt

SEQ ID NO: 19236 - DNA, 24 bp, Homo sapiens
gagagaaagaagtggcacagagtg

SEQ ID NO: 19237 - DNA, 16 bp, Homo sapiens
cccagactggcaggcc

SEQ ID NO: 19238 - DNA, 24 bp, Homo sapiens
gggtatcagtttacttgtctgaat

SEQ ID NO: 19239 - DNA, 24 bp, Homo sapiens
tttgggcattgagcaggcctttaa

SEQ ID NO: 19240 - DNA, 22 bp, Homo sapiens
catctcttggccaataagaagg

SEQ ID NO: 19241 - DNA, 23 bp, Homo sapiens
atctccaaacctgtcatggtcca

SEQ ID NO: 19242 - DNA, 16 bp, Homo sapiens
acttgccctccagaga

SEQ ID NO: 19243 - DNA, 24 bp, Homo sapiens
actaactccttagacattttgccc

SEQ ID NO: 19244 - DNA, 24 bp, Homo sapiens
ctctagagacaacctggaggggac

SEQ ID NO: 19245 - DNA, 17 bp, Homo sapiens
agcatggctggccttgg

SEQ ID NO: 19246 - DNA, 21 bp, Homo sapiens
tgaaattgggctcctggtgga

SEQ ID NO: 19247 - DNA, 22 bp, Homo sapiens
tcgagcagttgaatgaccaggc

SEQ ID NO: 19248 - DNA, 16 bp, Homo sapiens
ggctgtgggcttgggc

SEQ ID NO: 19249 - DNA, 19 bp, Homo sapiens
cagagcttcccacccaccc

SEQ ID NO: 19250 - DNA, 19 bp, Homo sapiens
gcattcctggaaaatgggg

SEQ ID NO: 19251 - DNA, 17 bp, Homo sapiens
cagtggaggactgggag

SEQ ID NO: 19252 - DNA, 18 bp, Homo sapiens
ggaggacatgggaaacag

SEQ ID NO: 19253 - DNA, 16 bp, Homo sapiens
gctggaagaagcactg

SEQ ID NO: 19254 - DNA, 22 bp, Homo sapiens
agaacagggacattacctttgg

SEQ ID NO: 19255 - DNA, 16 bp, Homo sapiens
tccctcccccgccatc

SEQ ID NO: 19256 - DNA, 19 bp, Homo sapiens
tcccactgtggttctttgc

SEQ ID NO: 19257 - DNA, 24 bp, Homo sapiens
cttcccttatctggccatgtgagc

SEQ ID NO: 19258 - DNA, 16 bp, Homo sapiens
gatggttgctcagtgc

SEQ ID NO: 19259 - DNA, 16 bp, Homo sapiens
ccccaccctccaccct

SEQ ID NO: 19260 - DNA, 24 bp, Homo sapiens
gggagtgaggtcttgggtgggaac

SEQ ID NO: 19261 - DNA, 20 bp, Homo sapiens
acgacatccctttggacatg

SEQ ID NO: 19262 - DNA, 24 bp, Homo sapiens
gcgctgcacccatggagaggatga

SEQ ID NO: 19263 - DNA, 18 bp, Homo sapiens
ctggccccacccttgaga

SEQ ID NO: 19264 - DNA, 19 bp, Homo sapiens
cttgtggggtgggttggag

SEQ ID NO: 19265 - DNA, 17 bp, Homo sapiens
acttccttgcaacaccc

SEQ ID NO: 19266 - DNA, 24 bp, Homo sapiens
tcttggggggatagtagaacatgt

SEQ ID NO: 19267 - DNA, 24 bp, Homo sapiens
cagattagaagagcatagtgctcg

SEQ ID NO: 19268 - DNA, 17 bp, Homo sapiens
tccgcctgcgaagcgtc

SEQ ID NO: 19269 - DNA, 17 bp, Homo sapiens
gccccatggttctgatg

SEQ ID NO: 19270 - DNA, 16 bp, Homo sapiens
gggccctgtggtcatc

SEQ ID NO: 19271 - DNA, 23 bp, Homo sapiens
tctgctgataatgagatttcaga

SEQ ID NO: 19272 - DNA, 18 bp, Homo sapiens
ggtaggggtgggcctgga

SEQ ID NO: 19273 - DNA, 22 bp, Homo sapiens
cggaaaagattcaatattgggt

SEQ ID NO: 19274 - DNA, 16 bp, Homo sapiens
tcacctcccgctgtcc

SEQ ID NO: 19275 - DNA, 16 bp, Homo sapiens
cgccgatcctgggtcc

SEQ ID NO: 19276 - DNA, 21 bp, Homo sapiens
ggaaagaagggctctgttacc

SEQ ID NO: 19277 - DNA, 23 bp, Homo sapiens
tctaaaggagtgctttcatgcta

SEQ ID NO: 19278 - DNA, 23 bp, Homo sapiens
gaggcgcgtttgacagagcctct

SEQ ID NO: 19279 - DNA, 18 bp, Homo sapiens
caagcccaggtctctttc

SEQ ID NO: 19280 - DNA, 16 bp, Homo sapiens
gtctcagacacctggg

SEQ ID NO: 19281 - DNA, 18 bp, Homo sapiens
taaagatcaaccggctgg

SEQ ID NO: 19282 - DNA, 18 bp, Homo sapiens
aggaaagggctcactcca

SEQ ID NO: 19283 - DNA, 22 bp, Homo sapiens
ggagtttgagcaaaagctttac

SEQ ID NO: 19284 - DNA, 20 bp, Homo sapiens
ggtcctctgggagcacatgg

SEQ ID NO: 19285 - DNA, 23 bp, Homo sapiens
gaaaagataagaagaaagccaag

SEQ ID NO: 19286 - DNA, 22 bp, Homo sapiens
ctgcaggcaggacacatacctc

SEQ ID NO: 19287 - DNA, 19 bp, Homo sapiens
tgctgtcgacactatttct

SEQ ID NO: 19288 - DNA, 23 bp, Homo sapiens
gcatttcctctttctctttgtaa

SEQ ID NO: 19289 - DNA, 17 bp, Homo sapiens
ggctcaccatgggatgg

SEQ ID NO: 19290 - DNA, 23 bp, Homo sapiens
ttctcaagtcctgcaggctgcca

SEQ ID NO: 19291 - DNA, 16 bp, Homo sapiens
cagtggccttcctgtc

SEQ ID NO: 19292 - DNA, 19 bp, Homo sapiens
gcaaattcccaaccatccg

SEQ ID NO: 19293 - DNA, 21 bp, Homo sapiens
tggagatggagttagccttcc

SEQ ID NO: 19294 - DNA, 22 bp, Homo sapiens
tgaactgtgtctcatcattttg

SEQ ID NO: 19295 - DNA, 23 bp, Homo sapiens
ggacaaggaatgtttgggaaaag

SEQ ID NO: 19296 - DNA, 18 bp, Homo sapiens
attccttgggaacccagc

SEQ ID NO: 19297 - DNA, 19 bp, Homo sapiens
cccaaccctgtcctacctt

SEQ ID NO: 19298 - DNA, 21 bp, Homo sapiens
gttggacagagggtgcagttt

SEQ ID NO: 19299 - DNA, 17 bp, Homo sapiens
ggaggcacggaggagca

SEQ ID NO: 19300 - DNA, 24 bp, Homo sapiens
aggagctttacagactctattggc

SEQ ID NO: 19301 - DNA, 24 bp, Homo sapiens
cctcttttccctgggtagatgatc

SEQ ID NO: 19302 - DNA, 16 bp, Homo sapiens
gcggtcaggaggaggc

SEQ ID NO: 19303 - DNA, 16 bp, Homo sapiens
aaggttctccggcctc

SEQ ID NO: 19304 - DNA, 18 bp, Homo sapiens
gaacctgctctccctgct

SEQ ID NO: 19305 - DNA, 23 bp, Homo sapiens
ctctgtcccctgcccctgacctc

SEQ ID NO: 19306 - DNA, 18 bp, Homo sapiens
gttccactccctgatcat

SEQ ID NO: 19307 - DNA, 17 bp, Homo sapiens
aggtacacccagtaccc

SEQ ID NO: 19308 - DNA, 21 bp, Homo sapiens
cctccatgaaggaaccacagc

SEQ ID NO: 19309 - DNA, 21 bp, Homo sapiens
aagaagcaatgggaagaagac

SEQ ID NO: 19310 - DNA, 21 bp, Homo sapiens
ggggagggagggccagcattt

SEQ ID NO: 19311 - DNA, 18 bp, Homo sapiens
actccagtaacaggcatg

SEQ ID NO: 19312 - DNA, 23 bp, Homo sapiens
tacactttggcttgcgaaggggt

SEQ ID NO: 19313 - DNA, 16 bp, Homo sapiens
tctccccaggctggct

SEQ ID NO: 19314 - DNA, 19 bp, Homo sapiens
tagctgttcctttgagccc

SEQ ID NO: 19315 - DNA, 22 bp, Homo sapiens
caatttagaatacaagctcggg

SEQ ID NO: 19316 - DNA, 19 bp, Homo sapiens
ggcagcagaggaaaatgag

SEQ ID NO: 19317 - DNA, 19 bp, Homo sapiens
gacccaccaggggatgaga

SEQ ID NO: 19318 - DNA, 19 bp, Homo sapiens
ggccaaacatgccaatctg

SEQ ID NO: 19319 - DNA, 19 bp, Homo sapiens
cacactcccctgagcacac

SEQ ID NO: 19320 - DNA, 22 bp, Homo sapiens
aatccaacttttctccaaatca

SEQ ID NO: 19321 - DNA, 24 bp, Homo sapiens
cactgttccatctccttccggtat

SEQ ID NO: 19322 - DNA, 16 bp, Homo sapiens
aacgtcccccaaaacc

SEQ ID NO: 19323 - DNA, 22 bp, Homo sapiens
aacaagatcctccaggagcagc

SEQ ID NO: 19324 - DNA, 17 bp, Homo sapiens
tgaggactggcctccag

SEQ ID NO: 19325 - DNA, 19 bp, Homo sapiens
gagctgcagcggcaggagc

SEQ ID NO: 19326 - DNA, 18 bp, Homo sapiens
aagctaggtggggtcgtg

SEQ ID NO: 19327 - DNA, 24 bp, Homo sapiens
ttttctcccatgagggccgggagc

SEQ ID NO: 19328 - DNA, 18 bp, Homo sapiens
tcactgccgctccatctc

SEQ ID NO: 19329 - DNA, 16 bp, Homo sapiens
ggtgtgtcaggggatc

SEQ ID NO: 19330 - DNA, 20 bp, Homo sapiens
cgcttctgcatgagaagctc

SEQ ID NO: 19331 - DNA, 18 bp, Homo sapiens
gtcagggattgcgggagc

SEQ ID NO: 19332 - DNA, 24 bp, Homo sapiens
cgctcccggtctgtcatgaacagc

SEQ ID NO: 19333 - DNA, 21 bp, Homo sapiens
cctgaccatctccattgtagc

SEQ ID NO: 19334 - DNA, 20 bp, Homo sapiens
gaagtcctctcgctctgctc

SEQ ID NO: 19335 - DNA, 17 bp, Homo sapiens
gcccactgtccttctgt

SEQ ID NO: 19336 - DNA, 20 bp, Homo sapiens
tgtgtggcagagatcaaagg

SEQ ID NO: 19337 - DNA, 18 bp, Homo sapiens
accctggagcctggggcc

SEQ ID NO: 19338 - DNA, 24 bp, Homo sapiens
agctcattctggacttacagctgc

SEQ ID NO: 19339 - DNA, 16 bp, Homo sapiens
tgtgggggtcttcacc

SEQ ID NO: 19340 - DNA, 23 bp, Homo sapiens
ttcagcacatttacagcctgtgg

SEQ ID NO: 19341 - DNA, 18 bp, Homo sapiens
gaccagattgtcgaagtc

SEQ ID NO: 19342 - DNA, 18 bp, Homo sapiens
aggcagagagcacagaag

SEQ ID NO: 19343 - DNA, 24 bp, Homo sapiens
ctgcagatgagcgagtgtacagat

SEQ ID NO: 19344 - DNA, 21 bp, Homo sapiens
gagatgacaagggccaacagg

SEQ ID NO: 19345 - DNA, 17 bp, Homo sapiens
ctgccacttgaagatcc

SEQ ID NO: 19346 - DNA, 19 bp, Homo sapiens
ttagagaagtcgacgccat

SEQ ID NO: 19347 - DNA, 24 bp, Homo sapiens
tttaagccctcccagagctccacc

SEQ ID NO: 19348 - DNA, 17 bp, Homo sapiens
tgctgaggtgggattgg

SEQ ID NO: 19349 - DNA, 20 bp, Homo sapiens
gtgggtagggctcctactcc

SEQ ID NO: 19350 - DNA, 18 bp, Homo sapiens
atttccagcggccccatc

SEQ ID NO: 19351 - DNA, 17 bp, Homo sapiens
ctgtcaccgcgggatca

SEQ ID NO: 19352 - DNA, 21 bp, Homo sapiens
tgagcactggacatgggttac

SEQ ID NO: 19353 - DNA, 16 bp, Homo sapiens
ccagcgtcactcacct

SEQ ID NO: 19354 - DNA, 17 bp, Homo sapiens
ctgaagaggtaggcagt

SEQ ID NO: 19355 - DNA, 24 bp, Homo sapiens
acatggctgataaagatgccaggc

SEQ ID NO: 19356 - DNA, 18 bp, Homo sapiens
gcctggtaggctcccgag

SEQ ID NO: 19357 - DNA, 23 bp, Homo sapiens
atcacccatggacagtcacaccc

SEQ ID NO: 19358 - DNA, 21 bp, Homo sapiens
ttcagggcgtgcgaggcagcc

SEQ ID NO: 19359 - DNA, 22 bp, Homo sapiens
ggggagggcaataggggcctgc

SEQ ID NO: 19360 - DNA, 16 bp, Homo sapiens
agaggccgcttgcacg

SEQ ID NO: 19361 - DNA, 17 bp, Homo sapiens
acctgcagccaaggcct

SEQ ID NO: 19362 - DNA, 21 bp, Homo sapiens
agggacggaatgatgatctgg

SEQ ID NO: 19363 - DNA, 24 bp, Homo sapiens
ccttgttttcccgatttccagggg

SEQ ID NO: 19364 - DNA, 16 bp, Homo sapiens
cctggccgagggctgc

SEQ ID NO: 19365 - DNA, 17 bp, Homo sapiens
atgagcccctcacttgg

SEQ ID NO: 19366 - DNA, 20 bp, Homo sapiens
ctgtgtgaagcccctgaggg

SEQ ID NO: 19367 - DNA, 19 bp, Homo sapiens
caaacgtctctcgctaacc

SEQ ID NO: 19368 - DNA, 23 bp, Homo sapiens
cccctccttgaagatgaccccac

SEQ ID NO: 19369 - DNA, 18 bp, Homo sapiens
cttctgggccagtggagg

SEQ ID NO: 19370 - DNA, 24 bp, Homo sapiens
tccgacacaaactgatccacatac

SEQ ID NO: 19371 - DNA, 24 bp, Homo sapiens
actcttccctgtgggcccaggatc

SEQ ID NO: 19372 - DNA, 21 bp, Homo sapiens
cgcagacatcggcctgatccc

SEQ ID NO: 19373 - DNA, 21 bp, Homo sapiens
gatccaccatgtctagagcct

SEQ ID NO: 19374 - DNA, 18 bp, Homo sapiens
cggtgggagggagggagg

SEQ ID NO: 19375 - DNA, 16 bp, Homo sapiens
ccggaccccagggctg

SEQ ID NO: 19376 - DNA, 21 bp, Homo sapiens
gagcagggcagtactccatga

SEQ ID NO: 19377 - DNA, 21 bp, Homo sapiens
gaggggcctctcaccttttca

SEQ ID NO: 19378 - DNA, 19 bp, Homo sapiens
gttaggacagctcccccgc

SEQ ID NO: 19379 - DNA, 24 bp, Homo sapiens
gtacccatgaggaggtcatcaacc

SEQ ID NO: 19380 - DNA, 18 bp, Homo sapiens
ctccctccctcccaccgt

SEQ ID NO: 19381 - DNA, 18 bp, Homo sapiens
gtggtcaaggtaggggac

SEQ ID NO: 19382 - DNA, 24 bp, Homo sapiens
ctccctcccaccgttatggagtac

SEQ ID NO: 19383 - DNA, 19 bp, Homo sapiens
atctggtggtgagtctgcc

SEQ ID NO: 19384 - DNA, 24 bp, Homo sapiens
cagttttcttggttcgaatgaggt

SEQ ID NO: 19385 - DNA, 16 bp, Homo sapiens
tattccagggggtggc

SEQ ID NO: 19386 - DNA, 24 bp, Homo sapiens
ggaatatccattgatccggacgat

SEQ ID NO: 19387 - DNA, 22 bp, Homo sapiens
cagacagcgtcgggctccaggt

SEQ ID NO: 19388 - DNA, 24 bp, Homo sapiens
atcaggatgcgccagcctcttctt

SEQ ID NO: 19389 - DNA, 21 bp, Homo sapiens
cgtggtggcctggagtttggc

SEQ ID NO: 19390 - DNA, 23 bp, Homo sapiens
cacagcctagtggatgaatgagg

SEQ ID NO: 19391 - DNA, 17 bp, Homo sapiens
ctgaaggaggtgcgtct

SEQ ID NO: 19392 - DNA, 21 bp, Homo sapiens
cccccggactctgtttgctca

SEQ ID NO: 19393 - DNA, 16 bp, Homo sapiens
gcggggcagtgctggc

SEQ ID NO: 19394 - DNA, 17 bp, Homo sapiens
gatgaagagcccacagc

SEQ ID NO: 19395 - DNA, 16 bp, Homo sapiens
cggcgctccaggtgca

SEQ ID NO: 19396 - DNA, 19 bp, Homo sapiens
ggtgcagacggtccagacg

SEQ ID NO: 19397 - DNA, 16 bp, Homo sapiens
tgatgccattcggccg

SEQ ID NO: 19398 - DNA, 18 bp, Homo sapiens
atggtgcagcttggctgc

SEQ ID NO: 19399 - DNA, 16 bp, Homo sapiens
cgtgctcgtgggagac

SEQ ID NO: 19400 - DNA, 24 bp, Homo sapiens
cctgcctccagcctggtggcttcc

SEQ ID NO: 19401 - DNA, 16 bp, Homo sapiens
tcatggccaggggtga

SEQ ID NO: 19402 - DNA, 19 bp, Homo sapiens
ggtgcttcagtgggatcag

SEQ ID NO: 19403 - DNA, 24 bp, Homo sapiens
ctactccattcctaagcctgggcc

SEQ ID NO: 19404 - DNA, 24 bp, Homo sapiens
ttcattgatgaccagcttcaggtc

SEQ ID NO: 19405 - DNA, 24 bp, Homo sapiens
agagaacaaagtcttctcaggcac

SEQ ID NO: 19406 - DNA, 22 bp, Homo sapiens
gactatctctatgatgtgctgc

SEQ ID NO: 19407 - DNA, 18 bp, Homo sapiens
ttgatttccaggagccgt

SEQ ID NO: 19408 - DNA, 23 bp, Homo sapiens
gattctgctattggattttccag

SEQ ID NO: 19409 - DNA, 16 bp, Homo sapiens
cagggctccctgaaga

SEQ ID NO: 19410 - DNA, 23 bp, Homo sapiens
ccttggggatgacctctcctccc

SEQ ID NO: 19411 - DNA, 24 bp, Homo sapiens
cccagcacacttactggtggtaca

SEQ ID NO: 19412 - DNA, 18 bp, Homo sapiens
tggctcctcttctctcct

SEQ ID NO: 19413 - DNA, 23 bp, Homo sapiens
tttcaatcagaaaatccacctgg

SEQ ID NO: 19414 - DNA, 16 bp, Homo sapiens
gacgaccctcgggtgt

SEQ ID NO: 19415 - DNA, 17 bp, Homo sapiens
gcaacgacgcagctgga

SEQ ID NO: 19416 - DNA, 24 bp, Homo sapiens
cggaaaagggaggggcagtgccgg

SEQ ID NO: 19417 - DNA, 16 bp, Homo sapiens
ggtcgcggtcgcggct

SEQ ID NO: 19418 - DNA, 24 bp, Homo sapiens
gagtcccagaagcctggggcgccc

SEQ ID NO: 19419 - DNA, 17 bp, Homo sapiens
ccacagaggcctggccc

SEQ ID NO: 19420 - DNA, 16 bp, Homo sapiens
ctcgcggcgccatctt

SEQ ID NO: 19421 - DNA, 19 bp, Homo sapiens
ctcgtccagctccgggtga

SEQ ID NO: 19422 - DNA, 17 bp, Homo sapiens
aggtgggagggagcgac

SEQ ID NO: 19423 - DNA, 16 bp, Homo sapiens
cgcttcgtccctgttt

SEQ ID NO: 19424 - DNA, 24 bp, Homo sapiens
tttggaccagggaggcgcgacgtc

SEQ ID NO: 19425 - DNA, 17 bp, Homo sapiens
tatgctgccacggggac

SEQ ID NO: 19426 - DNA, 21 bp, Homo sapiens
gatttccagcggggtggagga

SEQ ID NO: 19427 - DNA, 16 bp, Homo sapiens
agtgcccctgagtggc

SEQ ID NO: 19428 - DNA, 22 bp, Homo sapiens
aaatatgaaaagttccagcagg

SEQ ID NO: 19429 - DNA, 23 bp, Homo sapiens
gttagacaccaacccatacgagc

SEQ ID NO: 19430 - DNA, 24 bp, Homo sapiens
ctgagctgaagtggggaagggatg

SEQ ID NO: 19431 - DNA, 22 bp, Homo sapiens
tgctcctttttcaggtaaacgg

SEQ ID NO: 19432 - DNA, 23 bp, Homo sapiens
gacaaagaactgcagggggcaga

SEQ ID NO: 19433 - DNA, 24 bp, Homo sapiens
cgggtggtataatgctacctattt

SEQ ID NO: 19434 - DNA, 20 bp, Homo sapiens
ggctgcctatggaatcatac

SEQ ID NO: 19435 - DNA, 22 bp, Homo sapiens
ccagtactaggttagctgttgg

SEQ ID NO: 19436 - DNA, 21 bp, Homo sapiens
tgcccacatctcactaactag

SEQ ID NO: 19437 - DNA, 21 bp, Homo sapiens
ttaccaaaaaacaggcgaatt

SEQ ID NO: 19438 - DNA, 19 bp, Homo sapiens
tgtgtggcagttcttgtgg

SEQ ID NO: 19439 - DNA, 20 bp, Homo sapiens
atcaagttacagataccagc

SEQ ID NO: 19440 - DNA, 19 bp, Homo sapiens
gtcctgctaccatatccaa

SEQ ID NO: 19441 - DNA, 23 bp, Homo sapiens
gagacggagtaataggatataca

SEQ ID NO: 19442 - DNA, 22 bp, Homo sapiens
tcctttatcttggaattgaagt

SEQ ID NO: 19443 - DNA, 21 bp, Homo sapiens
gcagaggtttccctttgtacc

SEQ ID NO: 19444 - DNA, 23 bp, Homo sapiens
gaccccatttataaatctgcaca

SEQ ID NO: 19445 - DNA, 18 bp, Homo sapiens
gccatcatggcagatggg

SEQ ID NO: 19446 - DNA, 20 bp, Homo sapiens
cacatctcccacgcctttcc

SEQ ID NO: 19447 - DNA, 20 bp, Homo sapiens
gatgccattcatgatggctt

SEQ ID NO: 19448 - DNA, 24 bp, Homo sapiens
catgggctgtgtctgacaggtaca

SEQ ID NO: 19449 - DNA, 19 bp, Homo sapiens
gagaaagcagccaaggtga

SEQ ID NO: 19450 - DNA, 22 bp, Homo sapiens
cagtattagcgtggccttgacc

SEQ ID NO: 19451 - DNA, 18 bp, Homo sapiens
ctgggatgggaacccaac

SEQ ID NO: 19452 - DNA, 21 bp, Homo sapiens
cagacctacgtactccgcctg

SEQ ID NO: 19453 - DNA, 22 bp, Homo sapiens
ccttcctccctctagaaaaaag

SEQ ID NO: 19454 - DNA, 24 bp, Homo sapiens
ggctcagagcttttacttgaggtg

SEQ ID NO: 19455 - DNA, 24 bp, Homo sapiens
ctttcctgtttagggtaggtagat

SEQ ID NO: 19456 - DNA, 23 bp, Homo sapiens
aagtaccagaagcaatatgtgtg

SEQ ID NO: 19457 - DNA, 24 bp, Homo sapiens
tttggggccaggaggcttggaata

SEQ ID NO: 19458 - DNA, 21 bp, Homo sapiens
agaaaagccacacagcctttc

SEQ ID NO: 19459 - DNA, 21 bp, Homo sapiens
cattttctttctttctgccat

SEQ ID NO: 19460 - DNA, 22 bp, Homo sapiens
accaagttcagatacttgagac

SEQ ID NO: 19461 - DNA, 22 bp, Homo sapiens
gttctcagcattgaggcaatgg

SEQ ID NO: 19462 - DNA, 23 bp, Homo sapiens
actacaagatttgtttctgtctc

SEQ ID NO: 19463 - DNA, 17 bp, Homo sapiens
tctttccagcccagcac

SEQ ID NO: 19464 - DNA, 20 bp, Homo sapiens
aatcttagaaatgcagtgtg

SEQ ID NO: 19465 - DNA, 18 bp, Homo sapiens
tgctgagactttccactt

SEQ ID NO: 19466 - DNA, 22 bp, Homo sapiens
gccatggtttgaatttgttatc

SEQ ID NO: 19467 - DNA, 22 bp, Homo sapiens
tggtctcagttctaattccaaa

SEQ ID NO: 19468 - DNA, 22 bp, Homo sapiens
aacacccacattttctggaagg

SEQ ID NO: 19469 - DNA, 16 bp, Homo sapiens
cgctttggaaggcacc

SEQ ID NO: 19470 - DNA, 24 bp, Homo sapiens
ggtcaggattaatgcctatttttc

SEQ ID NO: 19471 - DNA, 18 bp, Homo sapiens
aaatgtggggatggccac

SEQ ID NO: 19472 - DNA, 23 bp, Homo sapiens
tcccagcagctccagtggaatta

SEQ ID NO: 19473 - DNA, 23 bp, Homo sapiens
agagaactggcagaaaggaattt

SEQ ID NO: 19474 - DNA, 23 bp, Homo sapiens
atgtcagtcattgcttctttcag

SEQ ID NO: 19475 - DNA, 22 bp, Homo sapiens
tccacatttcttccaagttctc

SEQ ID NO: 19476 - DNA, 22 bp, Homo sapiens
aattcccgaaatcaagtaaaag

SEQ ID NO: 19477 - DNA, 20 bp, Homo sapiens
ttgctgatgacggctatggt

SEQ ID NO: 19478 - DNA, 22 bp, Homo sapiens
gtttccttaaaaagaataaagc

SEQ ID NO: 19479 - DNA, 19 bp, Homo sapiens
tccctttttcacgttgtct

SEQ ID NO: 19480 - DNA, 23 bp, Homo sapiens
ttcatacataccgtctcagggca

SEQ ID NO: 19481 - DNA, 22 bp, Homo sapiens
ccaaaatgctgggattacaagg

SEQ ID NO: 19482 - DNA, 19 bp, Homo sapiens
acaaggatgtacgacacac

SEQ ID NO: 19483 - DNA, 23 bp, Homo sapiens
cagagtacgtgtccagcggaggg

SEQ ID NO: 19484 - DNA, 24 bp, Homo sapiens
gtaattcctttacggcggtagaac

SEQ ID NO: 19485 - DNA, 24 bp, Homo sapiens
ggagattatcaacaagccagaccc

SEQ ID NO: 19486 - DNA, 18 bp, Homo sapiens
catcacaccccattaccc

SEQ ID NO: 19487 - DNA, 20 bp, Homo sapiens
aggggattaggaaacatttc

SEQ ID NO: 19488 - DNA, 16 bp, Homo sapiens
ctcaccggtccaaagc

SEQ ID NO: 19489 - DNA, 19 bp, Homo sapiens
tcaaaagaccaagccaggc

SEQ ID NO: 19490 - DNA, 22 bp, Homo sapiens
agctccacttgctgctgagggg

SEQ ID NO: 19491 - DNA, 16 bp, Homo sapiens
gatacgctgcccaagc

SEQ ID NO: 19492 - DNA, 22 bp, Homo sapiens
cccctttccttaaggaagtaag

SEQ ID NO: 19493 - DNA, 21 bp, Homo sapiens
tccattttatgacagctacac

SEQ ID NO: 19494 - DNA, 18 bp, Homo sapiens
cgatcgtcacctcttctg

SEQ ID NO: 19495 - DNA, 23 bp, Homo sapiens
taaaatatgttcatgcaaggctg

SEQ ID NO: 19496 - DNA, 20 bp, Homo sapiens
gttgttcaagttggcgtctg

SEQ ID NO: 19497 - DNA, 23 bp, Homo sapiens
actgacggaagaagtggaagaga

SEQ ID NO: 19498 - DNA, 20 bp, Homo sapiens
gacatgcaacatatgtcctt

SEQ ID NO: 19499 - DNA, 20 bp, Homo sapiens
tttagacaccacgtaaaggc

SEQ ID NO: 19500 - DNA, 24 bp, Homo sapiens
taaaaataacaaaaaatattagcc

SEQ ID NO: 19501 - DNA, 24 bp, Homo sapiens
gcgaggcgatacatatgctgatgc

SEQ ID NO: 19502 - DNA, 19 bp, Homo sapiens
tgcctgagctcaggagttc

SEQ ID NO: 19503 - DNA, 21 bp, Homo sapiens
cgacttcgtgcgggccatggt

SEQ ID NO: 19504 - DNA, 24 bp, Homo sapiens
aagctgaattgagcacccctaaag

SEQ ID NO: 19505 - DNA, 18 bp, Homo sapiens
cttccgagaggggaggac

SEQ ID NO: 19506 - DNA, 19 bp, Homo sapiens
cctccagaagccttttagg

SEQ ID NO: 19507 - DNA, 21 bp, Homo sapiens
gtacttctctttccccaggac

SEQ ID NO: 19508 - DNA, 20 bp, Homo sapiens
cattaccgtctgggccgggt

SEQ ID NO: 19509 - DNA, 19 bp, Homo sapiens
ccaatcttacccaatcctt

SEQ ID NO: 19510 - DNA, 16 bp, Homo sapiens
cacggtctccgtcctc

SEQ ID NO: 19511 - DNA, 16 bp, Homo sapiens
cagcaagaccccgtct

SEQ ID NO: 19512 - DNA, 22 bp, Homo sapiens
gaggcaaaacttgcccatgtcc

SEQ ID NO: 19513 - DNA, 16 bp, Homo sapiens
ctggccctccagctgg

SEQ ID NO: 19514 - DNA, 20 bp, Homo sapiens
gtcggggggagctgtgcttc

SEQ ID NO: 19515 - DNA, 17 bp, Homo sapiens
gtagcctttggtaaagg

SEQ ID NO: 19516 - DNA, 23 bp, Homo sapiens
gggtgaacagtcttgggcaggtg

SEQ ID NO: 19517 - DNA, 23 bp, Homo sapiens
ttatagagacctccctgaacacc

SEQ ID NO: 19518 - DNA, 23 bp, Homo sapiens
ggcggtcagttcttaccttgtag

SEQ ID NO: 19519 - DNA, 19 bp, Homo sapiens
acttttctcccctcgttcc

SEQ ID NO: 19520 - DNA, 20 bp, Homo sapiens
tcgtgcgacatttcttgatg

SEQ ID NO: 19521 - DNA, 21 bp, Homo sapiens
gtaccgagtttatagctgcac

SEQ ID NO: 19522 - DNA, 23 bp, Homo sapiens
atccacgtcgtttgccagaagat

SEQ ID NO: 19523 - DNA, 21 bp, Homo sapiens
catgcccctaacttactaggg

SEQ ID NO: 19524 - DNA, 23 bp, Homo sapiens
gaactccctgagcaaacaacttt

SEQ ID NO: 19525 - DNA, 16 bp, Homo sapiens
actgcaaaggcgacat

SEQ ID NO: 19526 - DNA, 23 bp, Homo sapiens
gcaggaactacggttggaaaatt

SEQ ID NO: 19527 - DNA, 23 bp, Homo sapiens
ttgttctatttttgacagtacgt

SEQ ID NO: 19528 - DNA, 24 bp, Homo sapiens
agtaacaatggttggataatccgg

SEQ ID NO: 19529 - DNA, 23 bp, Homo sapiens
aaccctctcttcatgttggaggt

SEQ ID NO: 19530 - DNA, 21 bp, Homo sapiens
gggtacggaatgttcggattg

SEQ ID NO: 19531 - DNA, 19 bp, Homo sapiens
catactggaagccttaaca

SEQ ID NO: 19532 - DNA, 22 bp, Homo sapiens
ggaggctgtcaatggacatgac

SEQ ID NO: 19533 - DNA, 24 bp, Homo sapiens
tggtcttgaactcctgacctcagg

SEQ ID NO: 19534 - DNA, 24 bp, Homo sapiens
gattacaggtgtgcgccactgcgc

SEQ ID NO: 19535 - DNA, 23 bp, Homo sapiens
tttaaacacttaagttccacaca

SEQ ID NO: 19536 - DNA, 22 bp, Homo sapiens
aaaagtgtgaaaactcacctcc

SEQ ID NO: 19537 - DNA, 20 bp, Homo sapiens
ttagtccatccaggatgaag

SEQ ID NO: 19538 - DNA, 23 bp, Homo sapiens
aggagtgttcagcgttgaggccc

SEQ ID NO: 19539 - DNA, 18 bp, Homo sapiens
ccctcactccacagagac

SEQ ID NO: 19540 - DNA, 18 bp, Homo sapiens
tctactacacggccgatg

SEQ ID NO: 19541 - DNA, 24 bp, Homo sapiens
tgaaggttatatttttatgccacc

SEQ ID NO: 19542 - DNA, 23 bp, Homo sapiens
gacgttagatgaaactgaagaag

SEQ ID NO: 19543 - DNA, 24 bp, Homo sapiens
gtgtcaggcacacagggtatttct

SEQ ID NO: 19544 - DNA, 20 bp, Homo sapiens
tgggaaaaataagcagtctc

SEQ ID NO: 19545 - DNA, 24 bp, Homo sapiens
ggtaaggacggtacctgtcgtaac

SEQ ID NO: 19546 - DNA, 21 bp, Homo sapiens
atcgtatttcatcttcactgc

SEQ ID NO: 19547 - DNA, 22 bp, Homo sapiens
tgacgtatccgggtcttcactt

SEQ ID NO: 19548 - DNA, 23 bp, Homo sapiens
caaaggtttgattgtgtcatttc

SEQ ID NO: 19549 - DNA, 20 bp, Homo sapiens
tctccacagcatcaagagac

SEQ ID NO: 19550 - DNA, 20 bp, Homo sapiens
ctcagatggggaacatcatc

SEQ ID NO: 19551 - DNA, 21 bp, Homo sapiens
cgacacctggcccagggaact

SEQ ID NO: 19552 - DNA, 16 bp, Homo sapiens
ctcaccgcaggagaca

SEQ ID NO: 19553 - DNA, 19 bp, Homo sapiens
ccccagagaaaaacagagc

SEQ ID NO: 19554 - DNA, 16 bp, Homo sapiens
cagatgcagaggatcc

SEQ ID NO: 19555 - DNA, 16 bp, Homo sapiens
ggtggggatgggcccc

SEQ ID NO: 19556 - DNA, 23 bp, Homo sapiens
ggacgctacttcaaggtctggct

SEQ ID NO: 19557 - DNA, 17 bp, Homo sapiens
ctaggctgcgcacctgt

SEQ ID NO: 19558 - DNA, 17 bp, Homo sapiens
gctcagacaccatccag

SEQ ID NO: 19559 - DNA, 19 bp, Homo sapiens
gaggctccgaggtattgtc

SEQ ID NO: 19560 - DNA, 17 bp, Homo sapiens
gtcgtctcagcacgtgc

SEQ ID NO: 19561 - DNA, 18 bp, Homo sapiens
gcccatcatggtagagcc

SEQ ID NO: 19562 - DNA, 18 bp, Homo sapiens
tgaggctgcctggagaga

SEQ ID NO: 19563 - DNA, 24 bp, Homo sapiens
cgacgatgtgcttgctgtctctca

SEQ ID NO: 19564 - DNA, 21 bp, Homo sapiens
acttcccggatcccaggagag

SEQ ID NO: 19565 - DNA, 24 bp, Homo sapiens
ttcagcagaaggaatgttcaccag

SEQ ID NO: 19566 - DNA, 18 bp, Homo sapiens
ttgggatccacgattcca

SEQ ID NO: 19567 - DNA, 23 bp, Homo sapiens
ctttgacacttcctaattctgag

SEQ ID NO: 19568 - DNA, 22 bp, Homo sapiens
ctgcttttcttctgtgggattt

SEQ ID NO: 19569 - DNA, 17 bp, Homo sapiens
gcttgactcacctgtct

SEQ ID NO: 19570 - DNA, 19 bp, Homo sapiens
ctcagcctcccaaagtgtt

SEQ ID NO: 19571 - DNA, 22 bp, Homo sapiens
actgagcggagcagagtggaat

SEQ ID NO: 19572 - DNA, 21 bp, Homo sapiens
agacggggtttcactgtgtta

SEQ ID NO: 19573 - DNA, 22 bp, Homo sapiens
cgggaggaaatcaaaccagtag

SEQ ID NO: 19574 - DNA, 21 bp, Homo sapiens
cctcccaaagtgccaagatta

SEQ ID NO: 19575 - DNA, 16 bp, Homo sapiens
aggcagcaagagccgg

SEQ ID NO: 19576 - DNA, 23 bp, Homo sapiens
tgtatattttaaacatgtgcaat

SEQ ID NO: 19577 - DNA, 22 bp, Homo sapiens
gcaaattctctccacctttgtc

SEQ ID NO: 19578 - DNA, 20 bp, Homo sapiens
agcaatttgtttgcctactg

SEQ ID NO: 19579 - DNA, 22 bp, Homo sapiens
atattgtgacagtgtgcaggat

SEQ ID NO: 19580 - DNA, 18 bp, Homo sapiens
agcaggatggcatggatg

SEQ ID NO: 19581 - DNA, 22 bp, Homo sapiens
tttattttgtagcattgcagat

SEQ ID NO: 19582 - DNA, 16 bp, Homo sapiens
cggcctggaagcagga

SEQ ID NO: 19583 - DNA, 19 bp, Homo sapiens
tgggaggagtacatctacc

SEQ ID NO: 19584 - DNA, 20 bp, Homo sapiens
tccacaggcctgtgaagacg

SEQ ID NO: 19585 - DNA, 16 bp, Homo sapiens
ctggcccctgctgagc

SEQ ID NO: 19586 - DNA, 24 bp, Homo sapiens
cgtcctcgtcagacagcagcccgg

SEQ ID NO: 19587 - DNA, 20 bp, Homo sapiens
atgtctgccaaaagcactgc

SEQ ID NO: 19588 - DNA, 17 bp, Homo sapiens
ccctcgtcctcggaggt

SEQ ID NO: 19589 - DNA, 23 bp, Homo sapiens
ggtgtcgcattccatctagttag

SEQ ID NO: 19590 - DNA, 22 bp, Homo sapiens
acagaggtaaaactatagctgg

SEQ ID NO: 19591 - DNA, 20 bp, Homo sapiens
agattttgctgtcggtcttg

SEQ ID NO: 19592 - DNA, 23 bp, Homo sapiens
tgtcatttcagccctgttatccc

SEQ ID NO: 19593 - DNA, 17 bp, Homo sapiens
gtcggtgaggcctctta

SEQ ID NO: 19594 - DNA, 24 bp, Homo sapiens
tcaagaaaaactgtgtatacagac

SEQ ID NO: 19595 - DNA, 24 bp, Homo sapiens
acataggctttgattaatatgttt

SEQ ID NO: 19596 - DNA, 23 bp, Homo sapiens
caaataccactgtaatcttggtc

SEQ ID NO: 19597 - DNA, 18 bp, Homo sapiens
cccagcctaaaacctttt

SEQ ID NO: 19598 - DNA, 23 bp, Homo sapiens
ccgtttgaagtcttcttccttca

SEQ ID NO: 19599 - DNA, 22 bp, Homo sapiens
aaaaaaaaaaaagagttcctat

SEQ ID NO: 19600 - DNA, 23 bp, Homo sapiens
gaaaacccatgttgtacagcttc

SEQ ID NO: 19601 - DNA, 20 bp, Homo sapiens
atggcggtgacctagttcat

SEQ ID NO: 19602 - DNA, 24 bp, Homo sapiens
gcagtagtctgaaaatataattct

SEQ ID NO: 19603 - DNA, 24 bp, Homo sapiens
tggcatttcagtgtgaggcctaag

SEQ ID NO: 19604 - DNA, 23 bp, Homo sapiens
gaccctgcttagcttcacgagat

SEQ ID NO: 19605 - DNA, 18 bp, Homo sapiens
caggcgaggcagcgatgt

SEQ ID NO: 19606 - DNA, 21 bp, Homo sapiens
gatctttaacatagccttgtc

SEQ ID NO: 19607 - DNA, 24 bp, Homo sapiens
gagtcgtgccaccaagatctggat

SEQ ID NO: 19608 - DNA, 19 bp, Homo sapiens
cagccattcaaggttgagg

SEQ ID NO: 19609 - DNA, 17 bp, Homo sapiens
tgaaagtgctgctctcc

SEQ ID NO: 19610 - DNA, 21 bp, Homo sapiens
tgtccttccgcaggggtgtcc

SEQ ID NO: 19611 - DNA, 16 bp, Homo sapiens
cgtgctgtttggcacc

SEQ ID NO: 19612 - DNA, 24 bp, Homo sapiens
cacagccagagggacacgcaatta

SEQ ID NO: 19613 - DNA, 18 bp, Homo sapiens
tcccttgtctgggtctgt

SEQ ID NO: 19614 - DNA, 22 bp, Homo sapiens
ctcagtgaacatccacccgtgg

SEQ ID NO: 19615 - DNA, 16 bp, Homo sapiens
cacgtggtgtctgtgg

SEQ ID NO: 19616 - DNA, 24 bp, Homo sapiens
tgagggccacccacaggccggtgc

SEQ ID NO: 19617 - DNA, 17 bp, Homo sapiens
tgctctccctctgactt

SEQ ID NO: 19618 - DNA, 19 bp, Homo sapiens
gcaaaaatcaatcggactc

SEQ ID NO: 19619 - DNA, 20 bp, Homo sapiens
gtgagaacagcatcaggagc

SEQ ID NO: 19620 - DNA, 17 bp, Homo sapiens
ggtggtgggcgtgatga

SEQ ID NO: 19621 - DNA, 24 bp, Homo sapiens
atttgaagagacataaaaacagca

SEQ ID NO: 19622 - DNA, 19 bp, Homo sapiens
ctgtctttagaacggcatc

SEQ ID NO: 19623 - DNA, 24 bp, Homo sapiens
attacttacgccgtttccagagtc

SEQ ID NO: 19624 - DNA, 18 bp, Homo sapiens
gccatgaagcgtcattgc

SEQ ID NO: 19625 - DNA, 22 bp, Homo sapiens
tcttggcgtacatcgttgtcat

SEQ ID NO: 19626 - DNA, 23 bp, Homo sapiens
tttctcagtgcacgcacgctgtc

SEQ ID NO: 19627 - DNA, 20 bp, Homo sapiens
gtacacgccagtgatgatgc

SEQ ID NO: 19628 - DNA, 22 bp, Homo sapiens
agaagttcatcagattcaaggt

SEQ ID NO: 19629 - DNA, 23 bp, Homo sapiens
cggtgtccccaagccttaagtac

SEQ ID NO: 19630 - DNA, 17 bp, Homo sapiens
ctgagccatgaagctct

SEQ ID NO: 19631 - DNA, 24 bp, Homo sapiens
gaaacacgtagacctcaatagcag

SEQ ID NO: 19632 - DNA, 19 bp, Homo sapiens
agaagctcaccaagctgtg

SEQ ID NO: 19633 - DNA, 23 bp, Homo sapiens
ttcaacaaatctcagaaaacctt

SEQ ID NO: 19634 - DNA, 18 bp, Homo sapiens
gtcacacgttccactgtg

SEQ ID NO: 19635 - DNA, 23 bp, Homo sapiens
gagagatagatttgtctaagagc

SEQ ID NO: 19636 - DNA, 20 bp, Homo sapiens
tggcgaggaagaacttaagt

SEQ ID NO: 19637 - DNA, 19 bp, Homo sapiens
gtgaactgaaaggccacag

SEQ ID NO: 19638 - DNA, 22 bp, Homo sapiens
gattaggtactggacacctgcc

SEQ ID NO: 19639 - DNA, 16 bp, Homo sapiens
tacggccgggactggg

SEQ ID NO: 19640 - DNA, 19 bp, Homo sapiens
cgagttggagctgggatgc

SEQ ID NO: 19641 - DNA, 23 bp, Homo sapiens
catctacatggccatcctgctga

SEQ ID NO: 19642 - DNA, 24 bp, Homo sapiens
ttgacagccccacagggcttctcc

SEQ ID NO: 19643 - DNA, 16 bp, Homo sapiens
cagcctggcctactgc

SEQ ID NO: 19644 - DNA, 24 bp, Homo sapiens
ggtaaggcactgcggcggtgtagc

SEQ ID NO: 19645 - DNA, 16 bp, Homo sapiens
tgctggtgtcgggctt

SEQ ID NO: 19646 - DNA, 16 bp, Homo sapiens
ggcagcggtgggtcag

SEQ ID NO: 19647 - DNA, 17 bp, Homo sapiens
agcccaaggtcatcgag

SEQ ID NO: 19648 - DNA, 16 bp, Homo sapiens
ccgccacaggccaggc

SEQ ID NO: 19649 - DNA, 17 bp, Homo sapiens
gccaaccaccagaagga

SEQ ID NO: 19650 - DNA, 23 bp, Homo sapiens
gtagttgaagtggcgggccacgc

SEQ ID NO: 19651 - DNA, 16 bp, Homo sapiens
cacgccgtgggcgtcc

SEQ ID NO: 19652 - DNA, 18 bp, Homo sapiens
cggatgtgtaggagcact

SEQ ID NO: 19653 - DNA, 16 bp, Homo sapiens
ccttccccctcgcccc

SEQ ID NO: 19654 - DNA, 16 bp, Homo sapiens
ccatccgtgcggcgga

SEQ ID NO: 19655 - DNA, 22 bp, Homo sapiens
ttgaccccaggccgctgggccc

SEQ ID NO: 19656 - DNA, 16 bp, Homo sapiens
cccagcagcaggacgc

SEQ ID NO: 19657 - DNA, 23 bp, Homo sapiens
gcttttattcacagaagagaaca

SEQ ID NO: 19658 - DNA, 22 bp, Homo sapiens
tggtacaccaagtacagaccct

SEQ ID NO: 19659 - DNA, 20 bp, Homo sapiens
tatctttacacgctgcaggt

SEQ ID NO: 19660 - DNA, 23 bp, Homo sapiens
ctgagctggctaatacacgaggc

SEQ ID NO: 19661 - DNA, 21 bp, Homo sapiens
gacatctgccatgaccacttc

SEQ ID NO: 19662 - DNA, 19 bp, Homo sapiens
ccccaaggacagacgcttc

SEQ ID NO: 19663 - DNA, 21 bp, Homo sapiens
caggccatctacgtgattgac

SEQ ID NO: 19664 - DNA, 16 bp, Homo sapiens
gctctgcccacctcct

SEQ ID NO: 19665 - DNA, 23 bp, Homo sapiens
atttccccgaggtccatgggggc

SEQ ID NO: 19666 - DNA, 16 bp, Homo sapiens
cagcccaggtaccacc

SEQ ID NO: 19667 - DNA, 23 bp, Homo sapiens
cagcattgaggaagttgctgagc

SEQ ID NO: 19668 - DNA, 24 bp, Homo sapiens
aggtaccaggtttcgttccagaag

SEQ ID NO: 19669 - DNA, 16 bp, Homo sapiens
aacgtcctgcaggtgc

SEQ ID NO: 19670 - DNA, 19 bp, Homo sapiens
ggctgcttcctggtgacac

SEQ ID NO: 19671 - DNA, 18 bp, Homo sapiens
tgtccttcgcagcgaagc

SEQ ID NO: 19672 - DNA, 24 bp, Homo sapiens
gtagattaaggtcatgggaatacg

SEQ ID NO: 19673 - DNA, 21 bp, Homo sapiens
tttgacttcaagctgttcttc

SEQ ID NO: 19674 - DNA, 24 bp, Homo sapiens
tttcaccctctccagccatgacag

SEQ ID NO: 19675 - DNA, 23 bp, Homo sapiens
ggcaatttcttttacaactacat

SEQ ID NO: 19676 - DNA, 16 bp, Homo sapiens
tggctgtggagctccc

SEQ ID NO: 19677 - DNA, 19 bp, Homo sapiens
gtgagatatgctcatccac

SEQ ID NO: 19678 - DNA, 16 bp, Homo sapiens
cggggcgcccattgaa

SEQ ID NO: 19679 - DNA, 17 bp, Homo sapiens
accctttaggaccctgg

SEQ ID NO: 19680 - DNA, 23 bp, Homo sapiens
ggttaaactcgatgcccatcatg

SEQ ID NO: 19681 - DNA, 16 bp, Homo sapiens
ccagccgtgggggtcc

SEQ ID NO: 19682 - DNA, 24 bp, Homo sapiens
tccccagggtgaagcaagttccat

SEQ ID NO: 19683 - DNA, 24 bp, Homo sapiens
gtgcgccaacatccttggctatgc

SEQ ID NO: 19684 - DNA, 22 bp, Homo sapiens
tttacaaccacctgccccaggc

SEQ ID NO: 19685 - DNA, 21 bp, Homo sapiens
atctcctgtcctggttctcgc

SEQ ID NO: 19686 - DNA, 24 bp, Homo sapiens
tcaggctggacccgctgctaagaa

SEQ ID NO: 19687 - DNA, 24 bp, Homo sapiens
tatcagatcaatggcctgcaagcc

SEQ ID NO: 19688 - DNA, 20 bp, Homo sapiens
cttgaccatggcgaaggtgg

SEQ ID NO: 19689 - DNA, 17 bp, Homo sapiens
ggaaagcgccttcattt

SEQ ID NO: 19690 - DNA, 21 bp, Homo sapiens
agttgtcgaagatgatggtgg

SEQ ID NO: 19691 - DNA, 18 bp, Homo sapiens
cccagaaagtgaccaggg

SEQ ID NO: 19692 - DNA, 22 bp, Homo sapiens
ccagagcaggtgcgtgaggagc

SEQ ID NO: 19693 - DNA, 22 bp, Homo sapiens
aagggtataggggcctcagaga

SEQ ID NO: 19694 - DNA, 16 bp, Homo sapiens
ggaggcatccaggagg

SEQ ID NO: 19695 - DNA, 22 bp, Homo sapiens
aaatccaagcaaaatggatttc

SEQ ID NO: 19696 - DNA, 23 bp, Homo sapiens
gtttcaggtgcttctgtacacgt

SEQ ID NO: 19697 - DNA, 19 bp, Homo sapiens
aggactggcccctgagaga

SEQ ID NO: 19698 - DNA, 16 bp, Homo sapiens
tccccctttgcaggtg

SEQ ID NO: 19699 - DNA, 20 bp, Homo sapiens
aggctacctgcaggagtcac

SEQ ID NO: 19700 - DNA, 22 bp, Homo sapiens
gagcttccaggagccataagtg

SEQ ID NO: 19701 - DNA, 24 bp, Homo sapiens
ttatggcagaagtcagggagagac

SEQ ID NO: 19702 - DNA, 18 bp, Homo sapiens
ccttgtgggtcaccttcc

SEQ ID NO: 19703 - DNA, 17 bp, Homo sapiens
ggaatgccctgctgggt

SEQ ID NO: 19704 - DNA, 17 bp, Homo sapiens
ctctcggacatctgggc

SEQ ID NO: 19705 - DNA, 20 bp, Homo sapiens
gacaaatggaaggactaccc

SEQ ID NO: 19706 - DNA, 16 bp, Homo sapiens
tacagctgcgccctga

SEQ ID NO: 19707 - DNA, 17 bp, Homo sapiens
cccagggcaggggctgc

SEQ ID NO: 19708 - DNA, 19 bp, Homo sapiens
agcgtcatcttcctactgc

SEQ ID NO: 19709 - DNA, 24 bp, Homo sapiens
ggctttcctcgttataggtggagt

SEQ ID NO: 19710 - DNA, 16 bp, Homo sapiens
cagtgtgactgcctgc

SEQ ID NO: 19711 - DNA, 16 bp, Homo sapiens
acagggccagtcaggg

SEQ ID NO: 19712 - DNA, 22 bp, Homo sapiens
tgggtttgagcaacagttctcc

SEQ ID NO: 19713 - DNA, 24 bp, Homo sapiens
gtagtagacgatgaagggggcgaa

SEQ ID NO: 19714 - DNA, 16 bp, Homo sapiens
tggccgcaaggagggc

SEQ ID NO: 19715 - DNA, 17 bp, Homo sapiens
agtggggccgtgcctgg

SEQ ID NO: 19716 - DNA, 24 bp, Homo sapiens
tgtttacctttcattagtcttgac

SEQ ID NO: 19717 - DNA, 16 bp, Homo sapiens
ttcccaaagccaagag

SEQ ID NO: 19718 - DNA, 24 bp, Homo sapiens
ttcctttgggtccatacaattcca

SEQ ID NO: 19719 - DNA, 22 bp, Homo sapiens
gagggataatgtaagcaaggtt

SEQ ID NO: 19720 - DNA, 21 bp, Homo sapiens
tgggagaacaggcaagatcct

SEQ ID NO: 19721 - DNA, 24 bp, Homo sapiens
ggaggccagccctgccaggcccag

SEQ ID NO: 19722 - DNA, 24 bp, Homo sapiens
tgtcattggtgacgccatctagac

SEQ ID NO: 19723 - DNA, 24 bp, Homo sapiens
gatctcttccctgcctggaatctg

SEQ ID NO: 19724 - DNA, 20 bp, Homo sapiens
actgacctgctgaagaatca

SEQ ID NO: 19725 - DNA, 17 bp, Homo sapiens
gaggagcccaggtgacc

SEQ ID NO: 19726 - DNA, 19 bp, Homo sapiens
ggtaagcatatggatgagg

SEQ ID NO: 19727 - DNA, 19 bp, Homo sapiens
gaagcatgacatggtctct

SEQ ID NO: 19728 - DNA, 16 bp, Homo sapiens
ggtttggaagcctagg

SEQ ID NO: 19729 - DNA, 19 bp, Homo sapiens
gacttgggaccatggtgat

SEQ ID NO: 19730 - DNA, 24 bp, Homo sapiens
atctcaggtccatccacacatggt

SEQ ID NO: 19731 - DNA, 23 bp, Homo sapiens
tagtaagtgtgagtccccttctc

SEQ ID NO: 19732 - DNA, 16 bp, Homo sapiens
cagagcttcaccaccg

SEQ ID NO: 19733 - DNA, 24 bp, Homo sapiens
tgtagcagagggatatagggctgc

SEQ ID NO: 19734 - DNA, 21 bp, Homo sapiens
caggaggagggaggggactac

SEQ ID NO: 19735 - DNA, 18 bp, Homo sapiens
agactctctctcgcccat

SEQ ID NO: 19736 - DNA, 24 bp, Homo sapiens
cctttcgatcatctccctgcatca

SEQ ID NO: 19737 - DNA, 24 bp, Homo sapiens
gttcgacgtgcccatcggggcggt

SEQ ID NO: 19738 - DNA, 24 bp, Homo sapiens
ggaaagctcatggaagggggcatc

SEQ ID NO: 19739 - DNA, 22 bp, Homo sapiens
cttgatgtgcgttgcgttctgc

SEQ ID NO: 19740 - DNA, 17 bp, Homo sapiens
aggtcgaggcccttacc

SEQ ID NO: 19741 - DNA, 24 bp, Homo sapiens
cctcgttgaggtcccccaggcgga

SEQ ID NO: 19742 - DNA, 16 bp, Homo sapiens
ccctgaagtgcgcagc

SEQ ID NO: 19743 - DNA, 20 bp, Homo sapiens
tcacgtagatgaggtggtcc

SEQ ID NO: 19744 - DNA, 16 bp, Homo sapiens
acactggatctctccg

SEQ ID NO: 19745 - DNA, 16 bp, Homo sapiens
ggtgggcggggcgggg

SEQ ID NO: 19746 - DNA, 16 bp, Homo sapiens
cgtggaggacatgatc

SEQ ID NO: 19747 - DNA, 18 bp, Homo sapiens
aagtctcaggaggcaggg

SEQ ID NO: 19748 - DNA, 19 bp, Homo sapiens
ctgcttatccgctaccggg

SEQ ID NO: 19749 - DNA, 17 bp, Homo sapiens
agccaccaggatggagc

SEQ ID NO: 19750 - DNA, 18 bp, Homo sapiens
ggtccacccacatgactc

SEQ ID NO: 19751 - DNA, 21 bp, Homo sapiens
gttggtatactggcggatgtg

SEQ ID NO: 19752 - DNA, 24 bp, Homo sapiens
cagagcccaagagctttctagagt

SEQ ID NO: 19753 - DNA, 17 bp, Homo sapiens
aagtagcagttgtcagc

SEQ ID NO: 19754 - DNA, 22 bp, Homo sapiens
ctgcccgcagacgtatacgggc

SEQ ID NO: 19755 - DNA, 16 bp, Homo sapiens
cacacaggtgctgggc

SEQ ID NO: 19756 - DNA, 18 bp, Homo sapiens
tctactcgccagagcaca

SEQ ID NO: 19757 - DNA, 19 bp, Homo sapiens
tcctagaggtatcagcagg

SEQ ID NO: 19758 - DNA, 24 bp, Homo sapiens
cccccacatctttgccattgctga

SEQ ID NO: 19759 - DNA, 22 bp, Homo sapiens
cacagcacagagtacataggtc

SEQ ID NO: 19760 - DNA, 20 bp, Homo sapiens
cagtgctgcatcatcaggtg

SEQ ID NO: 19761 - DNA, 17 bp, Homo sapiens
tgtgctctccgtcttcc

SEQ ID NO: 19762 - DNA, 24 bp, Homo sapiens
ggtccgtattgtcagctgatatta

SEQ ID NO: 19763 - DNA, 19 bp, Homo sapiens
aagacctgctgctcaatcc

SEQ ID NO: 19764 - DNA, 24 bp, Homo sapiens
tgagttccagttggtggggagtcc

SEQ ID NO: 19765 - DNA, 16 bp, Homo sapiens
ctgcctggtcccaccc

SEQ ID NO: 19766 - DNA, 17 bp, Homo sapiens
agtggggaatctggggc

SEQ ID NO: 19767 - DNA, 22 bp, Homo sapiens
tcttggcattcccaaatgctgc

SEQ ID NO: 19768 - DNA, 18 bp, Homo sapiens
gccatcagtgggcagcac

SEQ ID NO: 19769 - DNA, 24 bp, Homo sapiens
ttgttgaagtggatgtcgatgtac

SEQ ID NO: 19770 - DNA, 21 bp, Homo sapiens
tggaaggtaggaccagagttc

SEQ ID NO: 19771 - DNA, 18 bp, Homo sapiens
cgtgacttttccagcagg

SEQ ID NO: 19772 - DNA, 24 bp, Homo sapiens
tttgccagtgacaccctactcact

SEQ ID NO: 19773 - DNA, 16 bp, Homo sapiens
ccaggggcctgggtct

SEQ ID NO: 19774 - DNA, 20 bp, Homo sapiens
ctcaagccgtttcggaaagt

SEQ ID NO: 19775 - DNA, 16 bp, Homo sapiens
ggcaggtgggggagca

SEQ ID NO: 19776 - DNA, 20 bp, Homo sapiens
gcgaagattgagcagtacct

SEQ ID NO: 19777 - DNA, 17 bp, Homo sapiens
agcccatcggtgggttt

SEQ ID NO: 19778 - DNA, 20 bp, Homo sapiens
tagttcctttcatccagggc

SEQ ID NO: 19779 - DNA, 23 bp, Homo sapiens
tctgtgctggaaatcccaccatg

SEQ ID NO: 19780 - DNA, 23 bp, Homo sapiens
aagcccagcttcttcttctgatc

SEQ ID NO: 19781 - DNA, 24 bp, Homo sapiens
aaatagtaaaccatcatcccaggc

SEQ ID NO: 19782 - DNA, 24 bp, Homo sapiens
cccctacccaggggcccacctggg

SEQ ID NO: 19783 - DNA, 23 bp, Homo sapiens
cccagcactgtgcccacattttc

SEQ ID NO: 19784 - DNA, 18 bp, Homo sapiens
caaggctgagtctgcagt

SEQ ID NO: 19785 - DNA, 19 bp, Homo sapiens
ggagggtatgagtgaggat

SEQ ID NO: 19786 - DNA, 17 bp, Homo sapiens
tggtgtccagacaagcc

SEQ ID NO: 19787 - DNA, 18 bp, Homo sapiens
acaactacttggccatgg

SEQ ID NO: 19788 - DNA, 16 bp, Homo sapiens
ggctgtccacccggcc

SEQ ID NO: 19789 - DNA, 24 bp, Homo sapiens
cctggggccccgggctggcctggc

SEQ ID NO: 19790 - DNA, 20 bp, Homo sapiens
gttctcggtgtcagtgaaca

SEQ ID NO: 19791 - DNA, 17 bp, Homo sapiens
ctgcccctctgggggta

SEQ ID NO: 19792 - DNA, 16 bp, Homo sapiens
catactgcaggttgcc

SEQ ID NO: 19793 - DNA, 16 bp, Homo sapiens
gggtaactgcataacc

SEQ ID NO: 19794 - DNA, 16 bp, Homo sapiens
caaggcactgcactgc

SEQ ID NO: 19795 - DNA, 24 bp, Homo sapiens
gctccgccatgaaggtgctcatgt

SEQ ID NO: 19796 - DNA, 18 bp, Homo sapiens
ttccatcccaaagagggc

SEQ ID NO: 19797 - DNA, 17 bp, Homo sapiens
ccatcctgcacctgggc

SEQ ID NO: 19798 - DNA, 22 bp, Homo sapiens
acctggggaagcatttagtcac

SEQ ID NO: 19799 - DNA, 16 bp, Homo sapiens
cagctgtggccagcga

SEQ ID NO: 19800 - DNA, 17 bp, Homo sapiens
agtggcagcctagtcct

SEQ ID NO: 19801 - DNA, 20 bp, Homo sapiens
acccttcagagggacagaag

SEQ ID NO: 19802 - DNA, 17 bp, Homo sapiens
tgctgtgccccttgctg

SEQ ID NO: 19803 - DNA, 20 bp, Homo sapiens
ctctccaaaccagagggtcc

SEQ ID NO: 19804 - DNA, 21 bp, Homo sapiens
tgaggttctcttctccccatc

SEQ ID NO: 19805 - DNA, 16 bp, Homo sapiens
ggacctgtgcctagca

SEQ ID NO: 19806 - DNA, 18 bp, Homo sapiens
ggaggatttggccgtggg

SEQ ID NO: 19807 - DNA, 17 bp, Homo sapiens
gggtggacaccgtctcc

SEQ ID NO: 19808 - DNA, 24 bp, Homo sapiens
gggccaggccagtgccggaaagtg

SEQ ID NO: 19809 - DNA, 18 bp, Homo sapiens
ctccagcccacctttacg

SEQ ID NO: 19810 - DNA, 23 bp, Homo sapiens
aggtgagcacctggggtgttgcc

SEQ ID NO: 19811 - DNA, 17 bp, Homo sapiens
acctgcccatcaagagc

SEQ ID NO: 19812 - DNA, 19 bp, Homo sapiens
tagccgcaccctcatcacc

SEQ ID NO: 19813 - DNA, 16 bp, Homo sapiens
cccggggcaggcaggg

SEQ ID NO: 19814 - DNA, 18 bp, Homo sapiens
actggacgtgcgcgacgc

SEQ ID NO: 19815 - DNA, 16 bp, Homo sapiens
cagccgcccgtagatc

SEQ ID NO: 19816 - DNA, 20 bp, Homo sapiens
acagctcaagtaaagggttg

SEQ ID NO: 19817 - DNA, 24 bp, Homo sapiens
cttcacatcctgggagggaggctt

SEQ ID NO: 19818 - DNA, 18 bp, Homo sapiens
cacgaagggtccaggagc

SEQ ID NO: 19819 - DNA, 24 bp, Homo sapiens
ctgttcacagcaaagttctcaaac

SEQ ID NO: 19820 - DNA, 18 bp, Homo sapiens
tgatcactgcctttcagg

SEQ ID NO: 19821 - DNA, 23 bp, Homo sapiens
tatttcttatttccatattgggg

SEQ ID NO: 19822 - DNA, 24 bp, Homo sapiens
ggacaagatcaacgcagcaattta

SEQ ID NO: 19823 - DNA, 16 bp, Homo sapiens
cctggcagagtgtgcc

SEQ ID NO: 19824 - DNA, 17 bp, Homo sapiens
gcctcctggacatcttt

SEQ ID NO: 19825 - DNA, 16 bp, Homo sapiens
agggacacgaggggat

SEQ ID NO: 19826 - DNA, 24 bp, Homo sapiens
cattggcgaagttgatgcagagct

SEQ ID NO: 19827 - DNA, 23 bp, Homo sapiens
cccctcgcctctgagtttggagt

SEQ ID NO: 19828 - DNA, 18 bp, Homo sapiens
cctgctccagcttgaaca

SEQ ID NO: 19829 - DNA, 21 bp, Homo sapiens
aggtggaggcagagccaggcc

SEQ ID NO: 19830 - DNA, 19 bp, Homo sapiens
gcatcctggttgtcagtga

SEQ ID NO: 19831 - DNA, 17 bp, Homo sapiens
gcccctgcagctttgag

SEQ ID NO: 19832 - DNA, 24 bp, Homo sapiens
ggaacttgctctcctcatcgatga

SEQ ID NO: 19833 - DNA, 19 bp, Homo sapiens
gttctttgtgcggcacgtg

SEQ ID NO: 19834 - DNA, 16 bp, Homo sapiens
aggaagctgtgcgcac

SEQ ID NO: 19835 - DNA, 23 bp, Homo sapiens
cattgactggctgcacatcgagt

SEQ ID NO: 19836 - DNA, 23 bp, Homo sapiens
tgagaggtgggtatcattagtcc

SEQ ID NO: 19837 - DNA, 21 bp, Homo sapiens
atgaacatcatctccctcatc

SEQ ID NO: 19838 - DNA, 20 bp, Homo sapiens
ggaaatggggttccagagag

SEQ ID NO: 19839 - DNA, 21 bp, Homo sapiens
cttgggggggatgtagttggc

SEQ ID NO: 19840 - DNA, 20 bp, Homo sapiens
gaagagacagggggcaaaga

SEQ ID NO: 19841 - DNA, 20 bp, Homo sapiens
gtctcatagtagacgatgcc

SEQ ID NO: 19842 - DNA, 19 bp, Homo sapiens
ctcacagctgcccctccac

SEQ ID NO: 19843 - DNA, 23 bp, Homo sapiens
ctggagcaggggaaggcagggcc

SEQ ID NO: 19844 - DNA, 20 bp, Homo sapiens
ctcccagcacaagctcaacg

SEQ ID NO: 19845 - DNA, 25 bp, Homo sapiens
tgaataatcacaatttttaaaaatc

SEQ ID NO: 19846 - DNA, 18 bp, Homo sapiens
atcaaccattttgcaggc

SEQ ID NO: 19847 - DNA, 18 bp, Homo sapiens
agtgccactgaatccaac

SEQ ID NO: 19848 - DNA, 16 bp, Homo sapiens
tgcagggtgtctcggt

SEQ ID NO: 19849 - DNA, 19 bp, Homo sapiens
agggcccccgtcatgaaat

SEQ ID NO: 19850 - DNA, 22 bp, Homo sapiens
ctggaagatctgcttgatgaac

SEQ ID NO: 19851 - DNA, 24 bp, Homo sapiens
cctggctcagatgttatgggtttg

SEQ ID NO: 19852 - DNA, 16 bp, Homo sapiens
ccgtgggggcccttcc

SEQ ID NO: 19853 - DNA, 24 bp, Homo sapiens
gctgcttgcaggcttcctggagaa

SEQ ID NO: 19854 - DNA, 24 bp, Homo sapiens
cattatgtggccagggggctcagc

SEQ ID NO: 19855 - DNA, 24 bp, Homo sapiens
tggtccactcctccaggaacaagt

SEQ ID NO: 19856 - DNA, 17 bp, Homo sapiens
acacctttgaggcccct

SEQ ID NO: 19857 - DNA, 16 bp, Homo sapiens
ttcctggtctcggcgc

SEQ ID NO: 19858 - DNA, 24 bp, Homo sapiens
gtttgcaggaaaacttcaaatacc

SEQ ID NO: 19859 - DNA, 17 bp, Homo sapiens
cagcgtgcgcatcagca

SEQ ID NO: 19860 - DNA, 24 bp, Homo sapiens
tcccgcttcctactgggcggctcc

SEQ ID NO: 19861 - DNA, 18 bp, Homo sapiens
ccatgggcttcttgaact

SEQ ID NO: 19862 - DNA, 16 bp, Homo sapiens
gtccgtccccccaggg

SEQ ID NO: 19863 - DNA, 21 bp, Homo sapiens
cttattcttgacctagctcct

SEQ ID NO: 19864 - DNA, 20 bp, Homo sapiens
gttcaagcggtcactggagc

SEQ ID NO: 19865 - DNA, 16 bp, Homo sapiens
ggtgccccccattccc

SEQ ID NO: 19866 - DNA, 18 bp, Homo sapiens
gatgcatcaagcccaatg

SEQ ID NO: 19867 - DNA, 23 bp, Homo sapiens
agatcccggtgcctgtcccagct

SEQ ID NO: 19868 - DNA, 18 bp, Homo sapiens
ggcggattcggatggtct

SEQ ID NO: 19869 - DNA, 24 bp, Homo sapiens
ttctgagcctttgtctgggttggt

SEQ ID NO: 19870 - DNA, 16 bp, Homo sapiens
cagcagcacacggtac

SEQ ID NO: 19871 - DNA, 16 bp, Homo sapiens
cccttggctgtgtgcc

SEQ ID NO: 19872 - DNA, 17 bp, Homo sapiens
cctgccctctgtgcact

SEQ ID NO: 19873 - DNA, 22 bp, Homo sapiens
ggtactcaggaatgatggagac

SEQ ID NO: 19874 - DNA, 24 bp, Homo sapiens
gatgtcaagccccgcccatggtcc

SEQ ID NO: 19875 - DNA, 23 bp, Homo sapiens
gctacagcttcgtagagtttgtg

SEQ ID NO: 19876 - DNA, 20 bp, Homo sapiens
gcattccaatacctgaaccc

SEQ ID NO: 19877 - DNA, 19 bp, Homo sapiens
taaggagaaaactggggct

SEQ ID NO: 19878 - DNA, 17 bp, Homo sapiens
tgggtgcccagcacagc

SEQ ID NO: 19879 - DNA, 17 bp, Homo sapiens
agagctcgggaagagcc

SEQ ID NO: 19880 - DNA, 18 bp, Homo sapiens
ggaaggcatctgtgctca

SEQ ID NO: 19881 - DNA, 21 bp, Homo sapiens
cactggagaggctgtccattc

SEQ ID NO: 19882 - DNA, 19 bp, Homo sapiens
cctccctctcccgagcacc

SEQ ID NO: 19883 - DNA, 24 bp, Homo sapiens
acttgccagcgcatggctgaggct

SEQ ID NO: 19884 - DNA, 21 bp, Homo sapiens
gatcccacctgctcctccagc

SEQ ID NO: 19885 - DNA, 24 bp, Homo sapiens
caaaaccaagatctttctgaaggt

SEQ ID NO: 19886 - DNA, 18 bp, Homo sapiens
ccacttccagcagcatgt

SEQ ID NO: 19887 - DNA, 24 bp, Homo sapiens
gagctcatggggcccaactgagtt

SEQ ID NO: 19888 - DNA, 20 bp, Homo sapiens
ctttgaatccccggatgact

SEQ ID NO: 19889 - DNA, 16 bp, Homo sapiens
ggactgagcaggtggt

SEQ ID NO: 19890 - DNA, 20 bp, Homo sapiens
accacacgtacacctgtatg

SEQ ID NO: 19891 - DNA, 22 bp, Homo sapiens
ctcctaggaccaccatgacatg

SEQ ID NO: 19892 - DNA, 21 bp, Homo sapiens
tcataggtgaacacgtttttt

SEQ ID NO: 19893 - DNA, 24 bp, Homo sapiens
acagagtcatcctccttcagaaag

SEQ ID NO: 19894 - DNA, 21 bp, Homo sapiens
tctatgttcctctgtgtttac

SEQ ID NO: 19895 - DNA, 21 bp, Homo sapiens
gtgtggcagcgttcttcagct

SEQ ID NO: 19896 - DNA, 21 bp, Homo sapiens
ccttgcccaaggtcatatagc

SEQ ID NO: 19897 - DNA, 18 bp, Homo sapiens
ctcaccagcccgtagttc

SEQ ID NO: 19898 - DNA, 24 bp, Homo sapiens
ctgatcccaaacccacctgtaccc

SEQ ID NO: 19899 - DNA, 16 bp, Homo sapiens
tgccatggcagcaagg

SEQ ID NO: 19900 - DNA, 23 bp, Homo sapiens
gtttcaggtctaactttctgaag

SEQ ID NO: 19901 - DNA, 16 bp, Homo sapiens
ggcagtggcaggaggc

SEQ ID NO: 19902 - DNA, 20 bp, Homo sapiens
tcacaactgtaggaagaact

SEQ ID NO: 19903 - DNA, 16 bp, Homo sapiens
ctgcagccgcaggaag

SEQ ID NO: 19904 - DNA, 23 bp, Homo sapiens
atctgagaggagactgggccacg

SEQ ID NO: 19905 - DNA, 18 bp, Homo sapiens
gatgatgcgctggcgggc

SEQ ID NO: 19906 - DNA, 16 bp, Homo sapiens
ctcctgcaggcagggt

SEQ ID NO: 19907 - DNA, 17 bp, Homo sapiens
aggcggtggcggaaggc

SEQ ID NO: 19908 - DNA, 18 bp, Homo sapiens
ctgtccttgcagatgcgt

SEQ ID NO: 19909 - DNA, 17 bp, Homo sapiens
gttggtgcagcctgcgg

SEQ ID NO: 19910 - DNA, 18 bp, Homo sapiens
ctgcaccagcagtaccgc

SEQ ID NO: 19911 - DNA, 24 bp, Homo sapiens
cactcctcgcccaggggtcagagc

SEQ ID NO: 19912 - DNA, 18 bp, Homo sapiens
ctatctggtgcgcaaggc

SEQ ID NO: 19913 - DNA, 19 bp, Homo sapiens
aggtcccccctataggtcc

SEQ ID NO: 19914 - DNA, 21 bp, Homo sapiens
cctatgcccggggcatgatcg

SEQ ID NO: 19915 - DNA, 22 bp, Homo sapiens
tgagaggatggaaatgagggtc

SEQ ID NO: 19916 - DNA, 22 bp, Homo sapiens
atcagtggtgcctccagcccgc

SEQ ID NO: 19917 - DNA, 18 bp, Homo sapiens
ttctcttcctccgccagc

SEQ ID NO: 19918 - DNA, 24 bp, Homo sapiens
ctatcaaagtcatgcccagttcca

SEQ ID NO: 19919 - DNA, 16 bp, Homo sapiens
cctgatgcttgcgctc

SEQ ID NO: 19920 - DNA, 24 bp, Homo sapiens
ctgcaacaacagctacacacattt

SEQ ID NO: 19921 - DNA, 16 bp, Homo sapiens
ggaggggacaagccag

SEQ ID NO: 19922 - DNA, 17 bp, Homo sapiens
gaggctgagaaaatgcg

SEQ ID NO: 19923 - DNA, 23 bp, Homo sapiens
tagtgtggccattctgaaggatg

SEQ ID NO: 19924 - DNA, 24 bp, Homo sapiens
cgccaagaaggccaaggaggaggc

SEQ ID NO: 19925 - DNA, 16 bp, Homo sapiens
gccaggcgctcctggg

SEQ ID NO: 19926 - DNA, 19 bp, Homo sapiens
ggaagtcagaggctccatt

SEQ ID NO: 19927 - DNA, 16 bp, Homo sapiens
ttccgccgagcggcct

SEQ ID NO: 19928 - DNA, 17 bp, Homo sapiens
ggctccccagggagagc

SEQ ID NO: 19929 - DNA, 22 bp, Homo sapiens
ccatgtctgagtgattgacagg

SEQ ID NO: 19930 - DNA, 21 bp, Homo sapiens
cttctgtgtcaccccaattgc

SEQ ID NO: 19931 - DNA, 17 bp, Homo sapiens
cctcctggcctggcagg

SEQ ID NO: 19932 - DNA, 20 bp, Homo sapiens
ctgagcgggagctgaaggag

SEQ ID NO: 19933 - DNA, 17 bp, Homo sapiens
gtgtgggcctctggagc

SEQ ID NO: 19934 - DNA, 23 bp, Homo sapiens
cagatggaaagggcccgccatga

SEQ ID NO: 19935 - DNA, 22 bp, Homo sapiens
ttcagagggactgggtgggctt

SEQ ID NO: 19936 - DNA, 18 bp, Homo sapiens
ggacttcaggtggcctgc

SEQ ID NO: 19937 - DNA, 18 bp, Homo sapiens
gagggacaggacctggga

SEQ ID NO: 19938 - DNA, 18 bp, Homo sapiens
ggtcctcctccaccatct

SEQ ID NO: 19939 - DNA, 20 bp, Homo sapiens
gagtgcagtagcgtgatcac

SEQ ID NO: 19940 - DNA, 22 bp, Homo sapiens
gcaaatttatactcagagaggt

SEQ ID NO: 19941 - DNA, 18 bp, Homo sapiens
cctgagcttcctgagtag

SEQ ID NO: 19942 - DNA, 24 bp, Homo sapiens
ttgagtggccgccgggtgtaggag

SEQ ID NO: 19943 - DNA, 23 bp, Homo sapiens
tcaggacctggagcgagggcgga

SEQ ID NO: 19944 - DNA, 17 bp, Homo sapiens
aggcaggccttaccagc

SEQ ID NO: 19945 - DNA, 16 bp, Homo sapiens
aggatgaggaggacct

SEQ ID NO: 19946 - DNA, 19 bp, Homo sapiens
caccaccagcagcagagtc

SEQ ID NO: 19947 - DNA, 24 bp, Homo sapiens
tacttccaggggacaaccacgcac

SEQ ID NO: 19948 - DNA, 24 bp, Homo sapiens
cgcagtgaagactatagtcagacc

SEQ ID NO: 19949 - DNA, 18 bp, Homo sapiens
tgacgacgagggtgacca

SEQ ID NO: 19950 - DNA, 16 bp, Homo sapiens
ctgggggccagggacc

SEQ ID NO: 19951 - DNA, 18 bp, Homo sapiens
ggaggtcccccatgaagc

SEQ ID NO: 19952 - DNA, 17 bp, Homo sapiens
catgcgggagggggtgt

SEQ ID NO: 19953 - DNA, 20 bp, Homo sapiens
ggtcatcacagggatcttct

SEQ ID NO: 19954 - DNA, 24 bp, Homo sapiens
cagctttagcaatgtcctccgctc

SEQ ID NO: 19955 - DNA, 17 bp, Homo sapiens
ctgcagggcctgcagct

SEQ ID NO: 19956 - DNA, 18 bp, Homo sapiens
ggtctggatcaccatcct

SEQ ID NO: 19957 - DNA, 17 bp, Homo sapiens
cctccttgtcggcctgg

SEQ ID NO: 19958 - DNA, 21 bp, Homo sapiens
agccatgagtgatggcagtga

SEQ ID NO: 19959 - DNA, 23 bp, Homo sapiens
aggcagagatgaattataggatc

SEQ ID NO: 19960 - DNA, 17 bp, Homo sapiens
acgtacaagagggagct

SEQ ID NO: 19961 - DNA, 20 bp, Homo sapiens
aagttgcacacatttgttcc

SEQ ID NO: 19962 - DNA, 18 bp, Homo sapiens
taggggtgagcaggtgga

SEQ ID NO: 19963 - DNA, 20 bp, Homo sapiens
ttcagagtcaaatgcaccag

SEQ ID NO: 19964 - DNA, 17 bp, Homo sapiens
gaagcgagacggttccc

SEQ ID NO: 19965 - DNA, 16 bp, Homo sapiens
tgggctgccagacccc

SEQ ID NO: 19966 - DNA, 18 bp, Homo sapiens
gccacttgaccctgatcc

SEQ ID NO: 19967 - DNA, 17 bp, Homo sapiens
ctgcttccgtgggcccc

SEQ ID NO: 19968 - DNA, 24 bp, Homo sapiens
gaagaagagcagtgtgaggcacaa

SEQ ID NO: 19969 - DNA, 20 bp, Homo sapiens
catgttgtcctgtccctggc

SEQ ID NO: 19970 - DNA, 17 bp, Homo sapiens
tgcagcctcttggtcac

SEQ ID NO: 19971 - DNA, 23 bp, Homo sapiens
ggtaatgacagtgatggggagcc

SEQ ID NO: 19972 - DNA, 16 bp, Homo sapiens
ccaggttggaggtggg

SEQ ID NO: 19973 - DNA, 16 bp, Homo sapiens
ctcgggtgctggtgcc

SEQ ID NO: 19974 - DNA, 16 bp, Homo sapiens
ctgaccggagtgctgg

SEQ ID NO: 19975 - DNA, 18 bp, Homo sapiens
tgtcctctccctctggcc

SEQ ID NO: 19976 - DNA, 24 bp, Homo sapiens
ctcttgctaggttgacagaggcac

SEQ ID NO: 19977 - DNA, 18 bp, Homo sapiens
caacagcatgctggagga

SEQ ID NO: 19978 - DNA, 24 bp, Homo sapiens
taactccaccaactagctagcagc

SEQ ID NO: 19979 - DNA, 18 bp, Homo sapiens
gcaatggcatcctgcggc

SEQ ID NO: 19980 - DNA, 22 bp, Homo sapiens
ttccccctttacagacaaggaa

SEQ ID NO: 19981 - DNA, 19 bp, Homo sapiens
agtagatctcgtccctggg

SEQ ID NO: 19982 - DNA, 19 bp, Homo sapiens
ccacccagcctcactctgc

SEQ ID NO: 19983 - DNA, 19 bp, Homo sapiens
gccccgggcatagctgctc

SEQ ID NO: 19984 - DNA, 17 bp, Homo sapiens
ggcgtcccactggctgc

SEQ ID NO: 19985 - DNA, 21 bp, Homo sapiens
ttcctaccttgacaaacttct

SEQ ID NO: 19986 - DNA, 24 bp, Homo sapiens
gtgattccccctcccttgccctgc

SEQ ID NO: 19987 - DNA, 16 bp, Homo sapiens
agtgctgggacagggc

SEQ ID NO: 19988 - DNA, 17 bp, Homo sapiens
cccacaacccctccaag

SEQ ID NO: 19989 - DNA, 24 bp, Homo sapiens
tcagtaaggagtggccgggtgggc

SEQ ID NO: 19990 - DNA, 17 bp, Homo sapiens
ggctgtttcgccccctc

SEQ ID NO: 19991 - DNA, 22 bp, Homo sapiens
cacagacgtggctggaaataga

SEQ ID NO: 19992 - DNA, 17 bp, Homo sapiens
acagtacggggcgtagc

SEQ ID NO: 19993 - DNA, 17 bp, Homo sapiens
tggcctggaggagcggc

SEQ ID NO: 19994 - DNA, 17 bp, Homo sapiens
agctccagccagctggg

SEQ ID NO: 19995 - DNA, 24 bp, Homo sapiens
aatccacatggggagccccagggg

SEQ ID NO: 19996 - DNA, 19 bp, Homo sapiens
atttacacacgtgcgcaca

SEQ ID NO: 19997 - DNA, 24 bp, Homo sapiens
cttcatccacgggggcccgcccgg

SEQ ID NO: 19998 - DNA, 18 bp, Homo sapiens
aatctcaaagcagggaat

SEQ ID NO: 19999 - DNA, 19 bp, Homo sapiens
tcaatgggacacggacaca

SEQ ID NO: 20000 - DNA, 23 bp, Homo sapiens
atgtcacgggcaacatgattggc

SEQ ID NO: 20001 - DNA, 18 bp, Homo sapiens
tactggggcctggggtgc

SEQ ID NO: 20002 - DNA, 18 bp, Homo sapiens
gctccttggccgtggttg

SEQ ID NO: 20003 - DNA, 24 bp, Homo sapiens
caaagtccagaggggcaggcaggt

SEQ ID NO: 20004 - DNA, 21 bp, Homo sapiens
atgtagagggagaacccgaac

SEQ ID NO: 20005 - DNA, 24 bp, Homo sapiens
acttccaggccaccaagtccaaga

SEQ ID NO: 20006 - DNA, 16 bp, Homo sapiens
aggtgcttccgggagg

SEQ ID NO: 20007 - DNA, 18 bp, Homo sapiens
agaccctgctgacggact

SEQ ID NO: 20008 - DNA, 18 bp, Homo sapiens
gtgctcaagggtgaatag

SEQ ID NO: 20009 - DNA, 24 bp, Homo sapiens
ccgacaagatctctctcaaggacc

SEQ ID NO: 20010 - DNA, 21 bp, Homo sapiens
ttctcggcagtcctgaggagt

SEQ ID NO: 20011 - DNA, 24 bp, Homo sapiens
tgccgctgcccagggaggacacct

SEQ ID NO: 20012 - DNA, 22 bp, Homo sapiens
ctggtctgcctcctgggggcct

SEQ ID NO: 20013 - DNA, 16 bp, Homo sapiens
ctccttggcgtactgc

SEQ ID NO: 20014 - DNA, 24 bp, Homo sapiens
gttttctgtctgaactgaccgttg

SEQ ID NO: 20015 - DNA, 21 bp, Homo sapiens
cagggcgtgaagacctctttg

SEQ ID NO: 20016 - DNA, 18 bp, Homo sapiens
ctcccctcccctctgtgc

SEQ ID NO: 20017 - DNA, 20 bp, Homo sapiens
caccacctgctggtagatga

SEQ ID NO: 20018 - DNA, 24 bp, Homo sapiens
acgtcatggacgccatctcccagt

SEQ ID NO: 20019 - DNA, 17 bp, Homo sapiens
ggcggaagattccctcc

SEQ ID NO: 20020 - DNA, 16 bp, Homo sapiens
tggaggctcttcttcc

SEQ ID NO: 20021 - DNA, 18 bp, Homo sapiens
cacagaggagcactcagc

SEQ ID NO: 20022 - DNA, 19 bp, Homo sapiens
acaacgtggccaccaacct

SEQ ID NO: 20023 - DNA, 16 bp, Homo sapiens
gagcctgaagagtgcc

SEQ ID NO: 20024 - DNA, 24 bp, Homo sapiens
ggagtacaggtgtgagaaggtgag

SEQ ID NO: 20025 - DNA, 23 bp, Homo sapiens
tgaatcagtgagaagcctgggtc

SEQ ID NO: 20026 - DNA, 16 bp, Homo sapiens
cgctccaggatcatct

SEQ ID NO: 20027 - DNA, 24 bp, Homo sapiens
aggagaggggcctggagcctttgg

SEQ ID NO: 20028 - DNA, 16 bp, Homo sapiens
ccagcgtcttcagggg

SEQ ID NO: 20029 - DNA, 16 bp, Homo sapiens
gaggcctccccccacc

SEQ ID NO: 20030 - DNA, 22 bp, Homo sapiens
ctaggactcctctcagcccttc

SEQ ID NO: 20031 - DNA, 24 bp, Homo sapiens
tactttgtagactatggctctgag

SEQ ID NO: 20032 - DNA, 17 bp, Homo sapiens
agaggttcagatgaggc

SEQ ID NO: 20033 - DNA, 24 bp, Homo sapiens
tacatccccgaccgcgagatcacg

SEQ ID NO: 20034 - DNA, 19 bp, Homo sapiens
agctgatgtccaatgaagg

SEQ ID NO: 20035 - DNA, 23 bp, Homo sapiens
accttctgggcatcagttctcct

SEQ ID NO: 20036 - DNA, 19 bp, Homo sapiens
cacgatgcacaggaggtgc

SEQ ID NO: 20037 - DNA, 22 bp, Homo sapiens
ataaaacctggagaagagcaag

SEQ ID NO: 20038 - DNA, 23 bp, Homo sapiens
gctgatttttagagcaaactcac

SEQ ID NO: 20039 - DNA, 18 bp, Homo sapiens
aagggactgggagcattg

SEQ ID NO: 20040 - DNA, 20 bp, Homo sapiens
cttccaggggatttatgccc

SEQ ID NO: 20041 - DNA, 24 bp, Homo sapiens
caagggactgggagcattgcaggc

SEQ ID NO: 20042 - DNA, 24 bp, Homo sapiens
gtcagttatgcccgcttcaagtgg

SEQ ID NO: 20043 - DNA, 20 bp, Homo sapiens
attgcaggctgtggggtacc

SEQ ID NO: 20044 - DNA, 17 bp, Homo sapiens
tcttggggagactgggg

SEQ ID NO: 20045 - DNA, 23 bp, Homo sapiens
cgtagcgagtttgtgctctctga

SEQ ID NO: 20046 - DNA, 18 bp, Homo sapiens
tacctgctcctgctcatc

SEQ ID NO: 20047 - DNA, 24 bp, Homo sapiens
cacctgcctggccgttatgagatt

SEQ ID NO: 20048 - DNA, 16 bp, Homo sapiens
ctcacctgctgctgga

SEQ ID NO: 20049 - DNA, 24 bp, Homo sapiens
tgcctctcagtgccttggtctcgt

SEQ ID NO: 20050 - DNA, 16 bp, Homo sapiens
gacccgcagggaagct

SEQ ID NO: 20051 - DNA, 23 bp, Homo sapiens
gtcaactggacgggtgtgtactt

SEQ ID NO: 20052 - DNA, 17 bp, Homo sapiens
acaaactgcccaatcac

SEQ ID NO: 20053 - DNA, 22 bp, Homo sapiens
ttcccagagatcatggccgtgt

SEQ ID NO: 20054 - DNA, 18 bp, Homo sapiens
agagccagacacggcact

SEQ ID NO: 20055 - DNA, 18 bp, Homo sapiens
gggccactgtgggtctcc

SEQ ID NO: 20056 - DNA, 16 bp, Homo sapiens
gtcagtcctgcccagc

SEQ ID NO: 20057 - DNA, 24 bp, Homo sapiens
acttagcctgagatgtgtctgagc

SEQ ID NO: 20058 - DNA, 16 bp, Homo sapiens
ggccgtcgttttcgct

SEQ ID NO: 20059 - DNA, 24 bp, Homo sapiens
gactcaactggccttgatctcctt

SEQ ID NO: 20060 - DNA, 19 bp, Homo sapiens
tcctcagcattgctggagg

SEQ ID NO: 20061 - DNA, 23 bp, Homo sapiens
cttggctgtgctgcgcctcactc

SEQ ID NO: 20062 - DNA, 22 bp, Homo sapiens
gccacaacatacttagatctct

SEQ ID NO: 20063 - DNA, 20 bp, Homo sapiens
gtgttggtcctgcaggggag

SEQ ID NO: 20064 - DNA, 16 bp, Homo sapiens
ccaggcagtccatacc

SEQ ID NO: 20065 - DNA, 22 bp, Homo sapiens
gggggacgaatacaccttcacc

SEQ ID NO: 20066 - DNA, 21 bp, Homo sapiens
cagtgttccattatagcaaca

SEQ ID NO: 20067 - DNA, 17 bp, Homo sapiens
ccttcctagaggggctc

SEQ ID NO: 20068 - DNA, 17 bp, Homo sapiens
gtagtgcctgcagaact

SEQ ID NO: 20069 - DNA, 16 bp, Homo sapiens
gaagcctgactcctcg

SEQ ID NO: 20070 - DNA, 23 bp, Homo sapiens
ctgtatggagagttgtgacaagg

SEQ ID NO: 20071 - DNA, 16 bp, Homo sapiens
atgacctgctcgcccg

SEQ ID NO: 20072 - DNA, 23 bp, Homo sapiens
tcagttcttctgtgggaagatgt

SEQ ID NO: 20073 - DNA, 16 bp, Homo sapiens
gtcggtggggaagtcc

SEQ ID NO: 20074 - DNA, 16 bp, Homo sapiens
tctgctctacagcagg

SEQ ID NO: 20075 - DNA, 18 bp, Homo sapiens
ggccacataccacaatct

SEQ ID NO: 20076 - DNA, 20 bp, Homo sapiens
atcatcctggaccatgacac

SEQ ID NO: 20077 - DNA, 17 bp, Homo sapiens
cagctgtgggaagtgga

SEQ ID NO: 20078 - DNA, 22 bp, Homo sapiens
catcaatgagaggaccaagcag

SEQ ID NO: 20079 - DNA, 18 bp, Homo sapiens
gtgtcccataagatccca

SEQ ID NO: 20080 - DNA, 24 bp, Homo sapiens
gtcaccatgccaccgcgggagatt

SEQ ID NO: 20081 - DNA, 16 bp, Homo sapiens
gcctctgatcgggagt

SEQ ID NO: 20082 - DNA, 19 bp, Homo sapiens
ggcatggggtccatacccc

SEQ ID NO: 20083 - DNA, 17 bp, Homo sapiens
gtgtagggcttggcacg

SEQ ID NO: 20084 - DNA, 20 bp, Homo sapiens
accatgttgatcctggtggc

SEQ ID NO: 20085 - DNA, 16 bp, Homo sapiens
gctcccatccttcccc

SEQ ID NO: 20086 - DNA, 24 bp, Homo sapiens
cttggtccctaggccctggtcacc

SEQ ID NO: 20087 - DNA, 17 bp, Homo sapiens
cacaaagcagccccagc

SEQ ID NO: 20088 - DNA, 24 bp, Homo sapiens
ttgcagctgcgaacggcggagccc

SEQ ID NO: 20089 - DNA, 19 bp, Homo sapiens
cagacagaaacagccctcc

SEQ ID NO: 20090 - DNA, 17 bp, Homo sapiens
cttgggtgggggcctgc

SEQ ID NO: 20091 - DNA, 22 bp, Homo sapiens
gtcacatgcagggcagggaaga

SEQ ID NO: 20092 - DNA, 17 bp, Homo sapiens
ccacagccggtccttgc

SEQ ID NO: 20093 - DNA, 18 bp, Homo sapiens
gggtgggggtctcacaac

SEQ ID NO: 20094 - DNA, 17 bp, Homo sapiens
gagagctcctcactgcc

SEQ ID NO: 20095 - DNA, 18 bp, Homo sapiens
tgctgacggtccctgtgc

SEQ ID NO: 20096 - DNA, 17 bp, Homo sapiens
ctcccctgggcacagcc

SEQ ID NO: 20097 - DNA, 16 bp, Homo sapiens
gtccaaggcccgaggc

SEQ ID NO: 20098 - DNA, 17 bp, Homo sapiens
gcagcaggccctcagga

SEQ ID NO: 20099 - DNA, 17 bp, Homo sapiens
cgctgctcaagaagctc

SEQ ID NO: 20100 - DNA, 19 bp, Homo sapiens
cttgcatatcaaaaggtgc

SEQ ID NO: 20101 - DNA, 21 bp, Homo sapiens
ccatgtacttgagcacagctg

SEQ ID NO: 20102 - DNA, 21 bp, Homo sapiens
agatcatgcccattttgtgag

SEQ ID NO: 20103 - DNA, 22 bp, Homo sapiens
ctcaaagatctggtcggtgagc

SEQ ID NO: 20104 - DNA, 16 bp, Homo sapiens
caggccctgtgggaag

SEQ ID NO: 20105 - DNA, 23 bp, Homo sapiens
ctgcttcaggatctgcacatatg

SEQ ID NO: 20106 - DNA, 23 bp, Homo sapiens
acaagcccttccttgacagtccc

SEQ ID NO: 20107 - DNA, 23 bp, Homo sapiens
caggtgaggtctgcccctcatcc

SEQ ID NO: 20108 - DNA, 23 bp, Homo sapiens
gaggacacgctccgtcaacgagc

SEQ ID NO: 20109 - DNA, 16 bp, Homo sapiens
tgcatccaggcagagc

SEQ ID NO: 20110 - DNA, 16 bp, Homo sapiens
cccctgaaggacgagg

SEQ ID NO: 20111 - DNA, 19 bp, Homo sapiens
gccaagctaggatgtgagg

SEQ ID NO: 20112 - DNA, 16 bp, Homo sapiens
agagcagctcccaacc

SEQ ID NO: 20113 - DNA, 16 bp, Homo sapiens
aggagggacggtgctg

SEQ ID NO: 20114 - DNA, 17 bp, Homo sapiens
aagcgctgcacgtgggg

SEQ ID NO: 20115 - DNA, 19 bp, Homo sapiens
gtgcacaggtcctgtgact

SEQ ID NO: 20116 - DNA, 18 bp, Homo sapiens
ctcagggctttctggagc

SEQ ID NO: 20117 - DNA, 18 bp, Homo sapiens
aggtacagcgaggagcgg

SEQ ID NO: 20118 - DNA, 16 bp, Homo sapiens
ccccgcgtggccagga

SEQ ID NO: 20119 - DNA, 18 bp, Homo sapiens
ccagcaacatcctcctgc

SEQ ID NO: 20120 - DNA, 18 bp, Homo sapiens
ggtaccccaggggtgggc

SEQ ID NO: 20121 - DNA, 19 bp, Homo sapiens
catcgactgcctgcaacgg

SEQ ID NO: 20122 - DNA, 24 bp, Homo sapiens
ttttacagatgaggagctcaaggc

SEQ ID NO: 20123 - DNA, 20 bp, Homo sapiens
gggtggtcttgtgctggatg

SEQ ID NO: 20124 - DNA, 21 bp, Homo sapiens
caggcggggatcagaactggg

SEQ ID NO: 20125 - DNA, 16 bp, Homo sapiens
gtgaccctcacctcgt

SEQ ID NO: 20126 - DNA, 17 bp, Homo sapiens
cacatgccccctgctgc

SEQ ID NO: 20127 - DNA, 17 bp, Homo sapiens
gccacctttggtgtcca

SEQ ID NO: 20128 - DNA, 16 bp, Homo sapiens
gcacctggtggaggtg

SEQ ID NO: 20129 - DNA, 18 bp, Homo sapiens
actacggggcaggaggac

SEQ ID NO: 20130 - DNA, 23 bp, Homo sapiens
tctacttccctgatgacactgac

SEQ ID NO: 20131 - DNA, 23 bp, Homo sapiens
aagtccttggccttggtgctgga

SEQ ID NO: 20132 - DNA, 22 bp, Homo sapiens
gtgcccacaggagggtgtctgg

SEQ ID NO: 20133 - DNA, 19 bp, Homo sapiens
tgacaaagaggctgaatcc

SEQ ID NO: 20134 - DNA, 16 bp, Homo sapiens
cccgggaggaccaggt

SEQ ID NO: 20135 - DNA, 16 bp, Homo sapiens
atctcccaccttggcg

SEQ ID NO: 20136 - DNA, 18 bp, Homo sapiens
ggccttcgaagtggagtc

SEQ ID NO: 20137 - DNA, 17 bp, Homo sapiens
ccctctctcccccagtt

SEQ ID NO: 20138 - DNA, 18 bp, Homo sapiens
caggctgctcctcaagtc

SEQ ID NO: 20139 - DNA, 22 bp, Homo sapiens
gcagccactccatgtaagggga

SEQ ID NO: 20140 - DNA, 19 bp, Homo sapiens
gcagggtggggctgacaca

SEQ ID NO: 20141 - DNA, 22 bp, Homo sapiens
tttctttatccagtctgtcaag

SEQ ID NO: 20142 - DNA, 24 bp, Homo sapiens
gagaaggagcagctgccagacagg

SEQ ID NO: 20143 - DNA, 20 bp, Homo sapiens
gctctgggcctcagatgatc

SEQ ID NO: 20144 - DNA, 24 bp, Homo sapiens
cttaaactgagtgtgcttcgatgg

SEQ ID NO: 20145 - DNA, 23 bp, Homo sapiens
cagaggaggccctcactcaggcc

SEQ ID NO: 20146 - DNA, 23 bp, Homo sapiens
cttctttgactttgttcgacact

SEQ ID NO: 20147 - DNA, 16 bp, Homo sapiens
tcacccagagggtccc

SEQ ID NO: 20148 - DNA, 19 bp, Homo sapiens
aggccgggtcctgggatca

SEQ ID NO: 20149 - DNA, 21 bp, Homo sapiens
tcttcatgaagaacacctggt

SEQ ID NO: 20150 - DNA, 16 bp, Homo sapiens
gtgaggcccacctagg

SEQ ID NO: 20151 - DNA, 17 bp, Homo sapiens
tggaagatggaatcggc

SEQ ID NO: 20152 - DNA, 23 bp, Homo sapiens
gggacgtgagcactcctctgtgc

SEQ ID NO: 20153 - DNA, 19 bp, Homo sapiens
aaagtacagcaacgctagc

SEQ ID NO: 20154 - DNA, 24 bp, Homo sapiens
gaattgtgccctcactcacctacc

SEQ ID NO: 20155 - DNA, 17 bp, Homo sapiens
gaggccaggctggtacg

SEQ ID NO: 20156 - DNA, 16 bp, Homo sapiens
ggaaggatcccatggc

SEQ ID NO: 20157 - DNA, 16 bp, Homo sapiens
ttgggcaactcctgtc

SEQ ID NO: 20158 - DNA, 20 bp, Homo sapiens
cagtgtcagctgaggctgga

SEQ ID NO: 20159 - DNA, 24 bp, Homo sapiens
acttgaccctgtagatcagcgccc

SEQ ID NO: 20160 - DNA, 22 bp, Homo sapiens
ccggcgttgggggtcttggtgt

SEQ ID NO: 20161 - DNA, 20 bp, Homo sapiens
caccagctcccgcagcagct

SEQ ID NO: 20162 - DNA, 19 bp, Homo sapiens
ctgctctgtctctgacagg

SEQ ID NO: 20163 - DNA, 24 bp, Homo sapiens
cccaccccatgctcacccgcttcc

SEQ ID NO: 20164 - DNA, 16 bp, Homo sapiens
cgggaggaggtgctgc

SEQ ID NO: 20165 - DNA, 17 bp, Homo sapiens
cttggcccctggggtgc

SEQ ID NO: 20166 - DNA, 21 bp, Homo sapiens
agtcctacttccccagcatcc

SEQ ID NO: 20167 - DNA, 20 bp, Homo sapiens
gcctcatcaagtacaagaac

SEQ ID NO: 20168 - DNA, 20 bp, Homo sapiens
ggcaggtctcacctgatgac

SEQ ID NO: 20169 - DNA, 20 bp, Homo sapiens
ccaggtctgctgtcctagtc

SEQ ID NO: 20170 - DNA, 17 bp, Homo sapiens
aggaaggccagcttggc

SEQ ID NO: 20171 - DNA, 18 bp, Homo sapiens
gggaggactctgagctct

SEQ ID NO: 20172 - DNA, 19 bp, Homo sapiens
ccatggtgtaccttcacct

SEQ ID NO: 20173 - DNA, 16 bp, Homo sapiens
ccagccctgaccgccc

SEQ ID NO: 20174 - DNA, 24 bp, Homo sapiens
acagtcctagggaggagtctctgt

SEQ ID NO: 20175 - DNA, 18 bp, Homo sapiens
gaagtccaaggaggaggc

SEQ ID NO: 20176 - DNA, 17 bp, Homo sapiens
tgccctccttccctcac

SEQ ID NO: 20177 - DNA, 19 bp, Homo sapiens
ctttggctcagccttcttc

SEQ ID NO: 20178 - DNA, 20 bp, Homo sapiens
aggatctcagggaagtttgg

SEQ ID NO: 20179 - DNA, 19 bp, Homo sapiens
gccgtcagtaccacatagg

SEQ ID NO: 20180 - DNA, 22 bp, Homo sapiens
ctgctcaccttcgttttgggat

SEQ ID NO: 20181 - DNA, 24 bp, Homo sapiens
tcattcctgtccccaaatgctttt

SEQ ID NO: 20182 - DNA, 24 bp, Homo sapiens
ggggttcgttctgggaccgtgtct

SEQ ID NO: 20183 - DNA, 24 bp, Homo sapiens
ctttttttctagcaaactacggag

SEQ ID NO: 20184 - DNA, 18 bp, Homo sapiens
ccacgtgatgggtggatg

SEQ ID NO: 20185 - DNA, 24 bp, Homo sapiens
aacaagtatggggtcagcctcatc

SEQ ID NO: 20186 - DNA, 20 bp, Homo sapiens
ggtgaagggatgagtggtga

SEQ ID NO: 20187 - DNA, 16 bp, Homo sapiens
agagctggcttttccc

SEQ ID NO: 20188 - DNA, 17 bp, Homo sapiens
caccaagttcccaatgg

SEQ ID NO: 20189 - DNA, 18 bp, Homo sapiens
atgtgtgggcaagtgagg

SEQ ID NO: 20190 - DNA, 17 bp, Homo sapiens
ctaggcccagcaggatg

SEQ ID NO: 20191 - DNA, 24 bp, Homo sapiens
cctttctgctcccccaggatatcc

SEQ ID NO: 20192 - DNA, 21 bp, Homo sapiens
actactgtgtttgttccaggc

SEQ ID NO: 20193 - DNA, 21 bp, Homo sapiens
caacacctacttccacatcac

SEQ ID NO: 20194 - DNA, 21 bp, Homo sapiens
caaactgacctgaccttggcc

SEQ ID NO: 20195 - DNA, 17 bp, Homo sapiens
gtaggaagtcaggaggt

SEQ ID NO: 20196 - DNA, 23 bp, Homo sapiens
ctgagtaggagggatttgccttt

SEQ ID NO: 20197 - DNA, 16 bp, Homo sapiens
ctgttcacttgccgct

SEQ ID NO: 20198 - DNA, 17 bp, Homo sapiens
ggtctgagtggctggcc

SEQ ID NO: 20199 - DNA, 16 bp, Homo sapiens
ctgatgggcctgaacc

SEQ ID NO: 20200 - DNA, 24 bp, Homo sapiens
ttccagggctacaagatggatgac

SEQ ID NO: 20201 - DNA, 16 bp, Homo sapiens
ggctggccagcccagc

SEQ ID NO: 20202 - DNA, 17 bp, Homo sapiens
gcaaacagcggggctcc

SEQ ID NO: 20203 - DNA, 17 bp, Homo sapiens
cgttgcgttcggtttcc

SEQ ID NO: 20204 - DNA, 18 bp, Homo sapiens
caggcccacctcatggac

SEQ ID NO: 20205 - DNA, 18 bp, Homo sapiens
tctccgcagggaagcctc

SEQ ID NO: 20206 - DNA, 18 bp, Homo sapiens
ccagacgcgccagattct

SEQ ID NO: 20207 - DNA, 18 bp, Homo sapiens
accgctggccgacgcagc

SEQ ID NO: 20208 - DNA, 16 bp, Homo sapiens
gtccccgccgcctcct

SEQ ID NO: 20209 - DNA, 16 bp, Homo sapiens
tgcgagaagcaggtcc

SEQ ID NO: 20210 - DNA, 18 bp, Homo sapiens
cttaccttcctcgtcgtc

SEQ ID NO: 20211 - DNA, 18 bp, Homo sapiens
cccgctgtccatgtcgca

SEQ ID NO: 20212 - DNA, 16 bp, Homo sapiens
gcccgcgcgggtgctg

SEQ ID NO: 20213 - DNA, 17 bp, Homo sapiens
ctccgaggaggaggagg

SEQ ID NO: 20214 - DNA, 20 bp, Homo sapiens
ttccgctagagggacactca

SEQ ID NO: 20215 - DNA, 17 bp, Homo sapiens
ccgggtccagcgcagac

SEQ ID NO: 20216 - DNA, 22 bp, Homo sapiens
aaagggaaggctgaaattttac

SEQ ID NO: 20217 - DNA, 24 bp, Homo sapiens
ggtagaggagatggcataaataag

SEQ ID NO: 20218 - DNA, 20 bp, Homo sapiens
agaacacacatctctgtcag

SEQ ID NO: 20219 - DNA, 19 bp, Homo sapiens
aaacctaagtgagctgtct

SEQ ID NO: 20220 - DNA, 20 bp, Homo sapiens
gagagacaggatcaagagtc

SEQ ID NO: 20221 - DNA, 24 bp, Homo sapiens
ttttctctctctctttttaggagt

SEQ ID NO: 20222 - DNA, 29 bp, Homo sapiens
taataaataaaattttattattcaattaa

SEQ ID NO: 20223 - DNA, 24 bp, Homo sapiens
ggactcagtgaggaacaatttgag

SEQ ID NO: 20224 - DNA, 22 bp, Homo sapiens
gcaagaaaggaaaatggaacaa

SEQ ID NO: 20225 - DNA, 27 bp, Homo sapiens
ttctcagtattgttagggataaaaaat

SEQ ID NO: 20226 - DNA, 21 bp, Homo sapiens
tgtatggctttgttttagacc

SEQ ID NO: 20227 - DNA, 18 bp, Homo sapiens
caattgcaacgtctgagg

SEQ ID NO: 20228 - DNA, 22 bp, Homo sapiens
ttaaaaacactgttatgtgtac

SEQ ID NO: 20229 - DNA, 21 bp, Homo sapiens
cagtctttctgcccccttcaa

SEQ ID NO: 20230 - DNA, 28 bp, Homo sapiens
ttattattgataaaatgtgtaattttag

SEQ ID NO: 20231 - DNA, 20 bp, Homo sapiens
gcaaaagctcagaattgaag

SEQ ID NO: 20232 - DNA, 24 bp, Homo sapiens
tgtttgggttgtttttgacagaat

SEQ ID NO: 20233 - DNA, 19 bp, Homo sapiens
agctcagatctccgagaat

SEQ ID NO: 20234 - DNA, 21 bp, Homo sapiens
ggagcagcacaaatcttattg

SEQ ID NO: 20235 - DNA, 17 bp, Homo sapiens
cacctggccagaaagta

SEQ ID NO: 20236 - DNA, 22 bp, Homo sapiens
agaaaacaagctacaaagagac

SEQ ID NO: 20237 - DNA, 16 bp, Homo sapiens
tggcctcaagtgatcc

SEQ ID NO: 20238 - DNA, 23 bp, Homo sapiens
ctggaaacttcgaaaagttggag

SEQ ID NO: 20239 - DNA, 20 bp, Homo sapiens
tttttgcatttttggtagag

SEQ ID NO: 20240 - DNA, 22 bp, Homo sapiens
atgatgaggaaagagagatcct

SEQ ID NO: 20241 - DNA, 18 bp, Homo sapiens
tcccccaaaacatatgtt

SEQ ID NO: 20242 - DNA, 21 bp, Homo sapiens
tcaggtatctttttatccaga

SEQ ID NO: 20243 - DNA, 24 bp, Homo sapiens
tgtggatgtgaagtattatatatt

SEQ ID NO: 20244 - DNA, 19 bp, Homo sapiens
tgatatatgcagacccctc

SEQ ID NO: 20245 - DNA, 24 bp, Homo sapiens
atattttcctatttttaatacaac

SEQ ID NO: 20246 - DNA, 23 bp, Homo sapiens
agttaacaaattaacttcaggct

SEQ ID NO: 20247 - DNA, 21 bp, Homo sapiens
agaatacagatctcgatctgg

SEQ ID NO: 20248 - DNA, 21 bp, Homo sapiens
gtcacctatatctggagcctg

SEQ ID NO: 20249 - DNA, 22 bp, Homo sapiens
aaattcctagtgatttagaggg

SEQ ID NO: 20250 - DNA, 19 bp, Homo sapiens
accatacctggtttggatt

SEQ ID NO: 20251 - DNA, 24 bp, Homo sapiens
tcaagtaatttcttacgaatagcc

SEQ ID NO: 20252 - DNA, 30 bp, Homo sapiens
ctacctatatttatcttcagtttattttaa

SEQ ID NO: 20253 - DNA, 23 bp, Homo sapiens
taggtttcaatacaaaaacaggc

SEQ ID NO: 20254 - DNA, 24 bp, Homo sapiens
aaattttagaagtatattttgaat

SEQ ID NO: 20255 - DNA, 18 bp, Homo sapiens
tcaaacgacctttgccca

SEQ ID NO: 20256 - DNA, 24 bp, Homo sapiens
acagtctctatagagactgaatag

SEQ ID NO: 20257 - DNA, 19 bp, Homo sapiens
gagagagctgtgcaaaaat

SEQ ID NO: 20258 - DNA, 19 bp, Homo sapiens
catatgtattcagatcacc

SEQ ID NO: 20259 - DNA, 23 bp, Homo sapiens
gctgagagataatctggtttttc

SEQ ID NO: 20260 - DNA, 24 bp, Homo sapiens
tgatacatatatttcttgtctttc

SEQ ID NO: 20261 - DNA, 23 bp, Homo sapiens
acacaaagtcctgttcataaagt

SEQ ID NO: 20262 - DNA, 21 bp, Homo sapiens
gcacagaatgttctcttatgt

SEQ ID NO: 20263 - DNA, 22 bp, Homo sapiens
gctctcattattctcccaatac

SEQ ID NO: 20264 - DNA, 22 bp, Homo sapiens
aattaaatcacaagtccctcac

SEQ ID NO: 20265 - DNA, 22 bp, Homo sapiens
tccacagtatagtttgtgttac

SEQ ID NO: 20266 - DNA, 22 bp, Homo sapiens
tcttgatatacagatgttaatc

SEQ ID NO: 20267 - DNA, 22 bp, Homo sapiens
ttctcagtagcaaatttttggg

SEQ ID NO: 20268 - DNA, 23 bp, Homo sapiens
tgaaaatgaactatgattatact

SEQ ID NO: 20269 - DNA, 21 bp, Homo sapiens
acctctctaatcagtagatgc

SEQ ID NO: 20270 - DNA, 21 bp, Homo sapiens
acatatgtcctccttcttttt

SEQ ID NO: 20271 - DNA, 17 bp, Homo sapiens
cactgccctggacatac

SEQ ID NO: 20272 - DNA, 24 bp, Homo sapiens
tgccattcctcaaatgataagaaa

SEQ ID NO: 20273 - DNA, 21 bp, Homo sapiens
cagtgaatgttgttgctatgt

SEQ ID NO: 20274 - DNA, 22 bp, Homo sapiens
ccacctttatgtcctagagcat

SEQ ID NO: 20275 - DNA, 20 bp, Homo sapiens
agttgctagcatttttctcc

SEQ ID NO: 20276 - DNA, 16 bp, Homo sapiens
tggccaaaaggtgcac

SEQ ID NO: 20277 - DNA, 24 bp, Homo sapiens
tccattcctttcagtgtttctgtc

SEQ ID NO: 20278 - DNA, 20 bp, Homo sapiens
cccttcactggactgtaatg

SEQ ID NO: 20279 - DNA, 19 bp, Homo sapiens
attggtatttaaaatggct

SEQ ID NO: 20280 - DNA, 24 bp, Homo sapiens
ttcaaccttacctactccttagaa

SEQ ID NO: 20281 - DNA, 18 bp, Homo sapiens
tgcctcatccagcaagtg

SEQ ID NO: 20282 - DNA, 20 bp, Homo sapiens
cagaagaaaacactgcaatt

SEQ ID NO: 20283 - DNA, 22 bp, Homo sapiens
cctcaagcttttgataaaaatg

SEQ ID NO: 20284 - DNA, 21 bp, Homo sapiens
accacctcctctccctaaaat

SEQ ID NO: 20285 - DNA, 23 bp, Homo sapiens
aaaataattaaacaagcaaagca

SEQ ID NO: 20286 - DNA, 24 bp, Homo sapiens
agagctacctctgcctttatttaa

SEQ ID NO: 20287 - DNA, 22 bp, Homo sapiens
attgatatttgaccaatgagcc

SEQ ID NO: 20288 - DNA, 30 bp, Homo sapiens
agttagttttaaaattttcataaaattttc

SEQ ID NO: 20289 - DNA, 22 bp, Homo sapiens
tgcatatttgttcatagccttg

SEQ ID NO: 20290 - DNA, 23 bp, Homo sapiens
acttaaaaagttttttaacttct

SEQ ID NO: 20291 - DNA, 23 bp, Homo sapiens
gcaaacatcaatagcaaattaac

SEQ ID NO: 20292 - DNA, 19 bp, Homo sapiens
ccgaattgaggatcctcag

SEQ ID NO: 20293 - DNA, 18 bp, Homo sapiens
atattatgccaccctagc

SEQ ID NO: 20294 - DNA, 24 bp, Homo sapiens
tctagtgtgaaagttttaatcaca

SEQ ID NO: 20295 - DNA, 22 bp, Homo sapiens
ggtaaaagagtgagactccacc

SEQ ID NO: 20296 - DNA, 19 bp, Homo sapiens
ttcaattgcagttgaatgg

SEQ ID NO: 20297 - DNA, 21 bp, Homo sapiens
ccagcctgggcaacaggcttt

SEQ ID NO: 20298 - DNA, 22 bp, Homo sapiens
taagacagtgtaattactcttc

SEQ ID NO: 20299 - DNA, 22 bp, Homo sapiens
tgttaacgtttattatttatga

SEQ ID NO: 20300 - DNA, 21 bp, Homo sapiens
ggggcttaagacaaaatctgc

SEQ ID NO: 20301 - DNA, 19 bp, Homo sapiens
tgtgtgtctataaaggtcc

SEQ ID NO: 20302 - DNA, 24 bp, Homo sapiens
cacaatttattacattttaactac

SEQ ID NO: 20303 - DNA, 22 bp, Homo sapiens
ttcgagttgtacatagagatgg

SEQ ID NO: 20304 - DNA, 24 bp, Homo sapiens
tgtgcattagaaattaaacagaat

SEQ ID NO: 20305 - DNA, 21 bp, Homo sapiens
ctgaactgcatgtacctggtg

SEQ ID NO: 20306 - DNA, 24 bp, Homo sapiens
caggaggattcctcagacctaaga

SEQ ID NO: 20307 - DNA, 21 bp, Homo sapiens
gtcccacatgattactgaagc

SEQ ID NO: 20308 - DNA, 17 bp, Homo sapiens
tggtcgtgatgttaagt

SEQ ID NO: 20309 - DNA, 19 bp, Homo sapiens
accacttggggaggccacc

SEQ ID NO: 20310 - DNA, 23 bp, Homo sapiens
cctttttcattcacagatgtcac

SEQ ID NO: 20311 - DNA, 17 bp, Homo sapiens
ctcccaatggtcccttc

SEQ ID NO: 20312 - DNA, 17 bp, Homo sapiens
gctggcaagtactgagc

SEQ ID NO: 20313 - DNA, 24 bp, Homo sapiens
taatttattgcagagataaattac

SEQ ID NO: 20314 - DNA, 17 bp, Homo sapiens
tgcatctgccatcacgg

SEQ ID NO: 20315 - DNA, 20 bp, Homo sapiens
ttgctctgcataatagctat

SEQ ID NO: 20316 - DNA, 20 bp, Homo sapiens
caggtccattacgaactgtg

SEQ ID NO: 20317 - DNA, 21 bp, Homo sapiens
gttgaaactgaaaaagcactt

SEQ ID NO: 20318 - DNA, 22 bp, Homo sapiens
actttttggaaggtctttacat

SEQ ID NO: 20319 - DNA, 20 bp, Homo sapiens
agtagaatggagttgtggga

SEQ ID NO: 20320 - DNA, 19 bp, Homo sapiens
acttctttgaatggcccac

SEQ ID NO: 20321 - DNA, 24 bp, Homo sapiens
agagtgtattgatattttggtttt

SEQ ID NO: 20322 - DNA, 17 bp, Homo sapiens
cagacataagcagctcc

SEQ ID NO: 20323 - DNA, 20 bp, Homo sapiens
tggttcagtttcctcgtaac

SEQ ID NO: 20324 - DNA, 22 bp, Homo sapiens
agtcaaagtttctggaaacttc

SEQ ID NO: 20325 - DNA, 21 bp, Homo sapiens
aaatggagtcatcttcgtggg

SEQ ID NO: 20326 - DNA, 22 bp, Homo sapiens
gcactcttttggaagttatctc

SEQ ID NO: 20327 - DNA, 24 bp, Homo sapiens
attttgtttataaaatggagctgc

SEQ ID NO: 20328 - DNA, 22 bp, Homo sapiens
ataaagtgaaaagtttgaaagt

SEQ ID NO: 20329 - DNA, 20 bp, Homo sapiens
aattattgtgcctttgacca

SEQ ID NO: 20330 - DNA, 24 bp, Homo sapiens
agcagatcattaagtactagactc

SEQ ID NO: 20331 - DNA, 24 bp, Homo sapiens
actataaatactgcagtataaaat

SEQ ID NO: 20332 - DNA, 22 bp, Homo sapiens
agtaatttactacctttcgttc

SEQ ID NO: 20333 - DNA, 29 bp, Homo sapiens
ctatatatgcatatatacatatacatata

SEQ ID NO: 20334 - DNA, 20 bp, Homo sapiens
aaaaaggaaataataatggg

SEQ ID NO: 20335 - DNA, 20 bp, Homo sapiens
tgaaattgtgaaccatgagt

SEQ ID NO: 20336 - DNA, 24 bp, Homo sapiens
tctagatgtttaattgtttcagga

SEQ ID NO: 20337 - DNA, 23 bp, Homo sapiens
gtcaactagaacatgatagagct

SEQ ID NO: 20338 - DNA, 17 bp, Homo sapiens
aaacagcatcccaattc

SEQ ID NO: 20339 - DNA, 19 bp, Homo sapiens
taagtgtgattagtaaccc

SEQ ID NO: 20340 - DNA, 27 bp, Homo sapiens
atatcacaacagaaataaatatgaaag

SEQ ID NO: 20341 - DNA, 19 bp, Homo sapiens
tttaagcgcctgattcgag

SEQ ID NO: 20342 - DNA, 24 bp, Homo sapiens
tgcaaggcataatgatatatagga

SEQ ID NO: 20343 - DNA, 25 bp, Homo sapiens
agattccaaacaaggaaaatatttg

SEQ ID NO: 20344 - DNA, 24 bp, Homo sapiens
attctcagacattctgtttctttc

SEQ ID NO: 20345 - DNA, 21 bp, Homo sapiens
agctgatgtagtaatctaagc

SEQ ID NO: 20346 - DNA, 16 bp, Homo sapiens
tctgcctggaggcttg

SEQ ID NO: 20347 - DNA, 23 bp, Homo sapiens
acagcttttgaaattattataat

SEQ ID NO: 20348 - DNA, 20 bp, Homo sapiens
cacttacttctgtttgcaca

SEQ ID NO: 20349 - DNA, 27 bp, Homo sapiens
tcttgaagatttttacagaaatatatt

SEQ ID NO: 20350 - DNA, 19 bp, Homo sapiens
aaaaaaaaaactcacgcga

SEQ ID NO: 20351 - DNA, 21 bp, Homo sapiens
tgtatcagcctcaacacaagc

SEQ ID NO: 20352 - DNA, 24 bp, Homo sapiens
cactcaacttttatcttattctat

SEQ ID NO: 20353 - DNA, 23 bp, Homo sapiens
gtcaaatacttcatcaaatgtgc

SEQ ID NO: 20354 - DNA, 18 bp, Homo sapiens
ttggggccataatttgcc

SEQ ID NO: 20355 - DNA, 20 bp, Homo sapiens
attagatgaatctttcactg

SEQ ID NO: 20356 - DNA, 23 bp, Homo sapiens
atttcccaaatggaattatttaa

SEQ ID NO: 20357 - DNA, 20 bp, Homo sapiens
tttctcacagaaagaatgtc

SEQ ID NO: 20358 - DNA, 24 bp, Homo sapiens
tttttctttatttgtttattttga

SEQ ID NO: 20359 - DNA, 22 bp, Homo sapiens
cacaaacaacaaccttcaaaac

SEQ ID NO: 20360 - DNA, 22 bp, Homo sapiens
aaattatatcatggatacagtg

SEQ ID NO: 20361 - DNA, 24 bp, Homo sapiens
ttgggggatatagacagatacaga

SEQ ID NO: 20362 - DNA, 23 bp, Homo sapiens
tgtagcaacatactactcaaaga

SEQ ID NO: 20363 - DNA, 20 bp, Homo sapiens
gggtcagttcgataaccata

SEQ ID NO: 20364 - DNA, 20 bp, Homo sapiens
agcaacagtggttaggtatg

SEQ ID NO: 20365 - DNA, 22 bp, Homo sapiens
tgaagtacacagagaacaattc

SEQ ID NO: 20366 - DNA, 28 bp, Homo sapiens
tgatggagtacttttactatgttaaaaa

SEQ ID NO: 20367 - DNA, 19 bp, Homo sapiens
tagccactaaaactctatg

SEQ ID NO: 20368 - DNA, 24 bp, Homo sapiens
tgggattatggaatatttaagtta

SEQ ID NO: 20369 - DNA, 28 bp, Homo sapiens
gaaaaaaagtccaaaaatttggaattta

SEQ ID NO: 20370 - DNA, 24 bp, Homo sapiens
tcatgactaataattttttttttt

SEQ ID NO: 20371 - DNA, 22 bp, Homo sapiens
acaaaacaaaagaaaaagagat

SEQ ID NO: 20372 - DNA, 24 bp, Homo sapiens
ccttcacaagatgttcatagagtt

SEQ ID NO: 20373 - DNA, 30 bp, Homo sapiens
tttattttaaggtagaatttttagttactg

SEQ ID NO: 20374 - DNA, 19 bp, Homo sapiens
gctgttctcagactgacgg

SEQ ID NO: 20375 - DNA, 21 bp, Homo sapiens
tggacttggttgtctctttag

SEQ ID NO: 20376 - DNA, 29 bp, Homo sapiens
tttttttaatgaatagttttgaaattaag

SEQ ID NO: 20377 - DNA, 21 bp, Homo sapiens
tgacagccaaagtcttgagga

SEQ ID NO: 20378 - DNA, 21 bp, Homo sapiens
tctttcagcataccacttcat

SEQ ID NO: 20379 - DNA, 21 bp, Homo sapiens
ccaaatataaagcaaagtggg

SEQ ID NO: 20380 - DNA, 21 bp, Homo sapiens
cccagttgagcttgtttgttt

SEQ ID NO: 20381 - DNA, 24 bp, Homo sapiens
atttgcagttgaaataattcaata

SEQ ID NO: 20382 - DNA, 21 bp, Homo sapiens
tcttagcagctcttactatct

SEQ ID NO: 20383 - DNA, 23 bp, Homo sapiens
aacatttcctttatacctttttc

SEQ ID NO: 20384 - DNA, 21 bp, Homo sapiens
ttaggagatgaaattcttccc

SEQ ID NO: 20385 - DNA, 24 bp, Homo sapiens
tcctaaagaacactaattttatac

SEQ ID NO: 20386 - DNA, 21 bp, Homo sapiens
aatgattctttaaaagaagtc

SEQ ID NO: 20387 - DNA, 23 bp, Homo sapiens
aaacattctcatggctaagtaac

SEQ ID NO: 20388 - DNA, 18 bp, Homo sapiens
aaggagccaaaacccaag

SEQ ID NO: 20389 - DNA, 23 bp, Homo sapiens
cattttgttgattcataagcacc

SEQ ID NO: 20390 - DNA, 23 bp, Homo sapiens
cattagtactgaatggaaggttg

SEQ ID NO: 20391 - DNA, 24 bp, Homo sapiens
tcctctacttcctatatgacttat

SEQ ID NO: 20392 - DNA, 22 bp, Homo sapiens
gctgaataattttgtgggagct

SEQ ID NO: 20393 - DNA, 20 bp, Homo sapiens
tcaatcaaattttctttgac

SEQ ID NO: 20394 - DNA, 22 bp, Homo sapiens
aattttttggattacaggtgct

SEQ ID NO: 20395 - DNA, 22 bp, Homo sapiens
ggaaatttctaaatgtgacatg

SEQ ID NO: 20396 - DNA, 19 bp, Homo sapiens
tgatctgctagtgaatgag

SEQ ID NO: 20397 - DNA, 21 bp, Homo sapiens
ggctttttgtgagaacacagg

SEQ ID NO: 20398 - DNA, 22 bp, Homo sapiens
caggatttcgtaatattgccgt

SEQ ID NO: 20399 - DNA, 26 bp, Homo sapiens
agggtaattccaaatatttctgatag

SEQ ID NO: 20400 - DNA, 19 bp, Homo sapiens
agaatcacttgaacctggg

SEQ ID NO: 20401 - DNA, 20 bp, Homo sapiens
agggacactgtaatcactag

SEQ ID NO: 20402 - DNA, 19 bp, Homo sapiens
ccaacctgggcaacaacag

SEQ ID NO: 20403 - DNA, 18 bp, Homo sapiens
acttctgaaggtgatctt

SEQ ID NO: 20404 - DNA, 22 bp, Homo sapiens
tttattttacaggtttttaatg

SEQ ID NO: 20405 - DNA, 23 bp, Homo sapiens
agattaaaatgacactgaatgag

SEQ ID NO: 20406 - DNA, 19 bp, Homo sapiens
acacaaagagaatctagtg

SEQ ID NO: 20407 - DNA, 19 bp, Homo sapiens
tggttgagatgaaaggatt

SEQ ID NO: 20408 - DNA, 19 bp, Homo sapiens
tgggaagtaataaaagatc

SEQ ID NO: 20409 - DNA, 21 bp, Homo sapiens
tcatggcaatcacatatccct

SEQ ID NO: 20410 - DNA, 18 bp, Homo sapiens
tgggttgcaatctgtagc

SEQ ID NO: 20411 - DNA, 22 bp, Homo sapiens
agccagtttatttttagagtac

SEQ ID NO: 20412 - DNA, 21 bp, Homo sapiens
agtatcatcagtaatggagac

SEQ ID NO: 20413 - DNA, 24 bp, Homo sapiens
agagtaccatgtctatatatttcc

SEQ ID NO: 20414 - DNA, 22 bp, Homo sapiens
gtaaggcatcgtaacacatatg

SEQ ID NO: 20415 - DNA, 22 bp, Homo sapiens
tttttttttttttttaggctac

SEQ ID NO: 20416 - DNA, 26 bp, Homo sapiens
ttttaataaatctgacttttgtgagc

SEQ ID NO: 20417 - DNA, 20 bp, Homo sapiens
tttacctaactgtgagctgt

SEQ ID NO: 20418 - DNA, 20 bp, Homo sapiens
tgctcagaacttataccacg

SEQ ID NO: 20419 - DNA, 22 bp, Homo sapiens
cagcgacatggggaacgtacac

SEQ ID NO: 20420 - DNA, 22 bp, Homo sapiens
tctgtcaacctcaactaaacta

SEQ ID NO: 20421 - DNA, 20 bp, Homo sapiens
agacaagaggtcaaacctag

SEQ ID NO: 20422 - DNA, 21 bp, Homo sapiens
catgctgaacttaccatgaag

SEQ ID NO: 20423 - DNA, 20 bp, Homo sapiens
tggtgtattacctttcgtgg

SEQ ID NO: 20424 - DNA, 20 bp, Homo sapiens
gatatgtgagtgtgtgtgtg

SEQ ID NO: 20425 - DNA, 21 bp, Homo sapiens
ggcttacttggagccataatt

SEQ ID NO: 20426 - DNA, 24 bp, Homo sapiens
agaaaagcatctgaaatagaattt

SEQ ID NO: 20427 - DNA, 24 bp, Homo sapiens
gaagttatttactgggtcagcctg

SEQ ID NO: 20428 - DNA, 22 bp, Homo sapiens
tcaagaatcttcccaaatgtaa

SEQ ID NO: 20429 - DNA, 20 bp, Homo sapiens
ttcccatttttaccgttcct

SEQ ID NO: 20430 - DNA, 19 bp, Homo sapiens
aaatgtatgtgccaggcac

SEQ ID NO: 20431 - DNA, 22 bp, Homo sapiens
gagccatttcattattgattcc

SEQ ID NO: 20432 - DNA, 23 bp, Homo sapiens
gcttttcacaattgtcctttgtt

SEQ ID NO: 20433 - DNA, 16 bp, Homo sapiens
tggaggcacttctgtg

SEQ ID NO: 20434 - DNA, 21 bp, Homo sapiens
gaccaccagtatagttccagg

SEQ ID NO: 20435 - DNA, 22 bp, Homo sapiens
gagagcctgataaaacaaacaa

SEQ ID NO: 20436 - DNA, 23 bp, Homo sapiens
aatagaagcttttctttaaagga

SEQ ID NO: 20437 - DNA, 20 bp, Homo sapiens
agatctgggaaattctgcat

SEQ ID NO: 20438 - DNA, 22 bp, Homo sapiens
ggtgacttagaaaatagcacag

SEQ ID NO: 20439 - DNA, 20 bp, Homo sapiens
tcaggcataaagacacagat

SEQ ID NO: 20440 - DNA, 25 bp, Homo sapiens
gatattaagaaatttagtatagatg

SEQ ID NO: 20441 - DNA, 22 bp, Homo sapiens
cattgcagctttacagtttttc

SEQ ID NO: 20442 - DNA, 24 bp, Homo sapiens
agtcaagatttatagctaaacatg

SEQ ID NO: 20443 - DNA, 22 bp, Homo sapiens
agcttaaaatgataaagagcat

SEQ ID NO: 20444 - DNA, 23 bp, Homo sapiens
ggtcttctaagtgaagctttttg

SEQ ID NO: 20445 - DNA, 18 bp, Homo sapiens
aagatgcagctactaccc

SEQ ID NO: 20446 - DNA, 22 bp, Homo sapiens
tcttgtgagtctcactatgaaa

SEQ ID NO: 20447 - DNA, 16 bp, Homo sapiens
aacctcttccctggct

SEQ ID NO: 20448 - DNA, 22 bp, Homo sapiens
ctttatctttttggtggtgttc

SEQ ID NO: 20449 - DNA, 29 bp, Homo sapiens
ataatctattaattatataagtagtcttt

SEQ ID NO: 20450 - DNA, 23 bp, Homo sapiens
atcttgtcaaaagttgtctgaag

SEQ ID NO: 20451 - DNA, 22 bp, Homo sapiens
cctttgtaatatattgctaata

SEQ ID NO: 20452 - DNA, 17 bp, Homo sapiens
ccaatactggactggtg

SEQ ID NO: 20453 - DNA, 19 bp, Homo sapiens
actttcttgaagtgaacac

SEQ ID NO: 20454 - DNA, 21 bp, Homo sapiens
agaagctgttctgataatccc

SEQ ID NO: 20455 - DNA, 24 bp, Homo sapiens
agtagaagaactatttcttcagac

SEQ ID NO: 20456 - DNA, 23 bp, Homo sapiens
tgaatcatatataagcttagttc

SEQ ID NO: 20457 - DNA, 22 bp, Homo sapiens
gaatgtggtatagaaaagcacc

SEQ ID NO: 20458 - DNA, 17 bp, Homo sapiens
cttgctgtttttcctgc

SEQ ID NO: 20459 - DNA, 19 bp, Homo sapiens
gaatcactggatcgctgtc

SEQ ID NO: 20460 - DNA, 22 bp, Homo sapiens
gctaagttgtccaatttagagc

SEQ ID NO: 20461 - DNA, 18 bp, Homo sapiens
caccggacaagagtttct

SEQ ID NO: 20462 - DNA, 24 bp, Homo sapiens
atccaggatatgccacctttaact

SEQ ID NO: 20463 - DNA, 20 bp, Homo sapiens
cctcttcagctattacaccc

SEQ ID NO: 20464 - DNA, 22 bp, Homo sapiens
tcttacaaaagatagagtatac

SEQ ID NO: 20465 - DNA, 27 bp, Homo sapiens
ccgaaactttattagtataaattctcc

SEQ ID NO: 20466 - DNA, 24 bp, Homo sapiens
atttgtggtttactttaagattac

SEQ ID NO: 20467 - DNA, 24 bp, Homo sapiens
tgtcttccaaacaaatgtaataat

SEQ ID NO: 20468 - DNA, 22 bp, Homo sapiens
gggtgtccttggctgctactgt

SEQ ID NO: 20469 - DNA, 23 bp, Homo sapiens
ataatttcttctcacattacata

SEQ ID NO: 20470 - DNA, 18 bp, Homo sapiens
ccagaaagccaaggtagg

SEQ ID NO: 20471 - DNA, 21 bp, Homo sapiens
tgatactttctcctgcacatt

SEQ ID NO: 20472 - DNA, 22 bp, Homo sapiens
attttttctcttaagtgcactt

SEQ ID NO: 20473 - DNA, 21 bp, Homo sapiens
gctgcatcatatttctcaagg

SEQ ID NO: 20474 - DNA, 24 bp, Homo sapiens
aaagtacactgtaaaaagcaatac

SEQ ID NO: 20475 - DNA, 27 bp, Homo sapiens
aaaaaacaaaacaagaagaagaaaatc

SEQ ID NO: 20476 - DNA, 23 bp, Homo sapiens
acaatagtctctaatgcaatgtg

SEQ ID NO: 20477 - DNA, 17 bp, Homo sapiens
tgacaatcccactgcac

SEQ ID NO: 20478 - DNA, 24 bp, Homo sapiens
aatgaggaattcagaattggttcc

SEQ ID NO: 20479 - DNA, 24 bp, Homo sapiens
cttgagcaactgtaccaaggtaag

SEQ ID NO: 20480 - DNA, 22 bp, Homo sapiens
aagccagatgcaatcttatttg

SEQ ID NO: 20481 - DNA, 21 bp, Homo sapiens
aagcagcatatatattggccc

SEQ ID NO: 20482 - DNA, 22 bp, Homo sapiens
ctaaacttttacaaatatctgc

SEQ ID NO: 20483 - DNA, 22 bp, Homo sapiens
gatagagaaaacactgtctgcc

SEQ ID NO: 20484 - DNA, 23 bp, Homo sapiens
tcaacaaaaaaattatgcctatt

SEQ ID NO: 20485 - DNA, 22 bp, Homo sapiens
tgtcttaattgcagaagagtcc

SEQ ID NO: 20486 - DNA, 23 bp, Homo sapiens
acatttgtaaaaatgttaagagc

SEQ ID NO: 20487 - DNA, 21 bp, Homo sapiens
aacatcaaagctaatgaatga

SEQ ID NO: 20488 - DNA, 17 bp, Homo sapiens
ccacggtcaaatggctt

SEQ ID NO: 20489 - DNA, 21 bp, Homo sapiens
ctcccaaattgctgagattac

SEQ ID NO: 20490 - DNA, 17 bp, Homo sapiens
tgactgatcctccacct

SEQ ID NO: 20491 - DNA, 21 bp, Homo sapiens
ttttgactacagcatgctcct

SEQ ID NO: 20492 - DNA, 17 bp, Homo sapiens
aggttcgtttgcatcac

SEQ ID NO: 20493 - DNA, 21 bp, Homo sapiens
ccttgaaggcatccttcatca

SEQ ID NO: 20494 - DNA, 20 bp, Homo sapiens
aaagaagtaaaagaaatccc

SEQ ID NO: 20495 - DNA, 23 bp, Homo sapiens
tactaatggaaatctaatggagg

SEQ ID NO: 20496 - DNA, 21 bp, Homo sapiens
ctaagagaaaatgaaataagc

SEQ ID NO: 20497 - DNA, 23 bp, Homo sapiens
ccctgatagtagtgttagtgatg

SEQ ID NO: 20498 - DNA, 29 bp, Homo sapiens
ataaattcaagtaaaaataaaaaaaaaat

SEQ ID NO: 20499 - DNA, 22 bp, Homo sapiens
gctttgacagatattcttcagc

SEQ ID NO: 20500 - DNA, 21 bp, Homo sapiens
ttcactataattttgcttttc

SEQ ID NO: 20501 - DNA, 22 bp, Homo sapiens
tctgagcagtagttacacacaa

SEQ ID NO: 20502 - DNA, 23 bp, Homo sapiens
gttaatatgactatatatggctg

SEQ ID NO: 20503 - DNA, 25 bp, Homo sapiens
cgtgctagaatcaattaacattaac

SEQ ID NO: 20504 - DNA, 22 bp, Homo sapiens
taggtgccattaatcctttagc

SEQ ID NO: 20505 - DNA, 22 bp, Homo sapiens
tcatttaacgtaactcaccata

SEQ ID NO: 20506 - DNA, 20 bp, Homo sapiens
acatgctcaagttcttgtgt

SEQ ID NO: 20507 - DNA, 21 bp, Homo sapiens
gtgattcttacatgtcaactc

SEQ ID NO: 20508 - DNA, 20 bp, Homo sapiens
tagggcagctgatattcgga

SEQ ID NO: 20509 - DNA, 22 bp, Homo sapiens
tccaactagtctcaggttcatt

SEQ ID NO: 20510 - DNA, 24 bp, Homo sapiens
acctaccaaatccctccacctgca

SEQ ID NO: 20511 - DNA, 21 bp, Homo sapiens
ttctccaggaagctcctttaa

SEQ ID NO: 20512 - DNA, 21 bp, Homo sapiens
ctgcttcagcctcccaaagtg

SEQ ID NO: 20513 - DNA, 24 bp, Homo sapiens
aaggttttaatttcttacgatagt

SEQ ID NO: 20514 - DNA, 28 bp, Homo sapiens
tatgtttatatactttttaaagtaaatg

SEQ ID NO: 20515 - DNA, 19 bp, Homo sapiens
aagcttaacagaacacatc

SEQ ID NO: 20516 - DNA, 21 bp, Homo sapiens
tagtatctaatgcttttaaag

SEQ ID NO: 20517 - DNA, 22 bp, Homo sapiens
tcacgacgatacaaagaacaca

SEQ ID NO: 20518 - DNA, 22 bp, Homo sapiens
atgttcttgaacttctgaaacc

SEQ ID NO: 20519 - DNA, 20 bp, Homo sapiens
acctaggtttttcactacat

SEQ ID NO: 20520 - DNA, 24 bp, Homo sapiens
ttcactttaaagttataaaataac

SEQ ID NO: 20521 - DNA, 23 bp, Homo sapiens
atgctccaattactgtaagaaac

SEQ ID NO: 20522 - DNA, 19 bp, Homo sapiens
ttaccacagcaatgtgtgt

SEQ ID NO: 20523 - DNA, 23 bp, Homo sapiens
cgtatccacagatagcaaaagaa

SEQ ID NO: 20524 - DNA, 24 bp, Homo sapiens
ttttaaaccatgtccttcatgtag

SEQ ID NO: 20525 - DNA, 22 bp, Homo sapiens
agatgtattagctatgtaggaa

SEQ ID NO: 20526 - DNA, 20 bp, Homo sapiens
acaagggatgctcaaggaca

SEQ ID NO: 20527 - DNA, 21 bp, Homo sapiens
gcaatgtagttcttcaagcga

SEQ ID NO: 20528 - DNA, 23 bp, Homo sapiens
cagagaatatatatttcctctcc

SEQ ID NO: 20529 - DNA, 22 bp, Homo sapiens
ttccacataatgacaaataagt

SEQ ID NO: 20530 - DNA, 19 bp, Homo sapiens
gcaaaaactcacctcaagc

SEQ ID NO: 20531 - DNA, 22 bp, Homo sapiens
ctttcagtgagttttctgagtg

SEQ ID NO: 20532 - DNA, 25 bp, Homo sapiens
agagaaaaattactcattaacaaac

SEQ ID NO: 20533 - DNA, 19 bp, Homo sapiens
tcaggcatctaacaaagga

SEQ ID NO: 20534 - DNA, 21 bp, Homo sapiens
ggcccattttgaataaggatc

SEQ ID NO: 20535 - DNA, 22 bp, Homo sapiens
attgccttaaaactttgcttga

SEQ ID NO: 20536 - DNA, 25 bp, Homo sapiens
cagcaagaaattgtgtaaatacttc

SEQ ID NO: 20537 - DNA, 22 bp, Homo sapiens
aaattttaaagcagtctttgtt

SEQ ID NO: 20538 - DNA, 23 bp, Homo sapiens
tttgacccattacctattgattg

SEQ ID NO: 20539 - DNA, 20 bp, Homo sapiens
accacagttcttttcccgta

SEQ ID NO: 20540 - DNA, 23 bp, Homo sapiens
tgtgagctgttactatgtaagac

SEQ ID NO: 20541 - DNA, 23 bp, Homo sapiens
gggaaaagactttcctgtaaatg

SEQ ID NO: 20542 - DNA, 19 bp, Homo sapiens
aggcacaccgtatatactc

SEQ ID NO: 20543 - DNA, 16 bp, Homo sapiens
tgttggctgcagagtc

SEQ ID NO: 20544 - DNA, 22 bp, Homo sapiens
aaactcaggttttgttagtctt

SEQ ID NO: 20545 - DNA, 19 bp, Homo sapiens
gctgaagcttcaaaggaag

SEQ ID NO: 20546 - DNA, 20 bp, Homo sapiens
ttttgttctggaatatgctt

SEQ ID NO: 20547 - DNA, 20 bp, Homo sapiens
aaaattaccatttctctcat

SEQ ID NO: 20548 - DNA, 19 bp, Homo sapiens
tgtttgtttgtttgcttgc

SEQ ID NO: 20549 - DNA, 20 bp, Homo sapiens
ggtgaagtaatttatgggat

SEQ ID NO: 20550 - DNA, 20 bp, Homo sapiens
tccaggttactgaaagcact

SEQ ID NO: 20551 - DNA, 20 bp, Homo sapiens
agttgttttagagcagcttt

SEQ ID NO: 20552 - DNA, 20 bp, Homo sapiens
aagctcaggaaggaatgaga

SEQ ID NO: 20553 - DNA, 20 bp, Homo sapiens
ttcatccaaagtttcagggt

SEQ ID NO: 20554 - DNA, 22 bp, Homo sapiens
agtaggaggtttctgaaatgtg

SEQ ID NO: 20555 - DNA, 20 bp, Homo sapiens
gggctacaggataaaaccac

SEQ ID NO: 20556 - DNA, 24 bp, Homo sapiens
ggattttataattgattgttaaac

SEQ ID NO: 20557 - DNA, 23 bp, Homo sapiens
ggttctaatccattctctttcac

SEQ ID NO: 20558 - DNA, 19 bp, Homo sapiens
cccatagtgctgagaaccc

SEQ ID NO: 20559 - DNA, 20 bp, Homo sapiens
cagtgacctaaggaagcttc

SEQ ID NO: 20560 - DNA, 20 bp, Homo sapiens
ctgacgttgatagctgtggt

SEQ ID NO: 20561 - DNA, 22 bp, Homo sapiens
cctagtcttaaataagtgccac

SEQ ID NO: 20562 - DNA, 21 bp, Homo sapiens
gccctgtgtaaatctgtgaaa

SEQ ID NO: 20563 - DNA, 21 bp, Homo sapiens
taccatttgaatagtttttgt

SEQ ID NO: 20564 - DNA, 21 bp, Homo sapiens
gaaactttctctaaaacctgc

SEQ ID NO: 20565 - DNA, 21 bp, Homo sapiens
ttcccatctcatagatgagga

SEQ ID NO: 20566 - DNA, 25 bp, Homo sapiens
tccaaaaccagataatctaaatgag

SEQ ID NO: 20567 - DNA, 27 bp, Homo sapiens
ctaggtcctactctaaataatattaac

SEQ ID NO: 20568 - DNA, 28 bp, Homo sapiens
taataaaataaaaggaaaagaagataag

SEQ ID NO: 20569 - DNA, 16 bp, Homo sapiens
tttggttcgtgcaggt

SEQ ID NO: 20570 - DNA, 22 bp, Homo sapiens
acaaatttcacatatgtcatgt

SEQ ID NO: 20571 - DNA, 19 bp, Homo sapiens
gaagactttatggcatctc

SEQ ID NO: 20572 - DNA, 16 bp, Homo sapiens
tgttgctggtgagggg

SEQ ID NO: 20573 - DNA, 23 bp, Homo sapiens
gatactgaatacaacttatcttc

SEQ ID NO: 20574 - DNA, 18 bp, Homo sapiens
aagaagctgtcctgcttc

SEQ ID NO: 20575 - DNA, 23 bp, Homo sapiens
aatcaaaaccttataacaagatc

SEQ ID NO: 20576 - DNA, 23 bp, Homo sapiens
ccatttataaaattaaagaatgt

SEQ ID NO: 20577 - DNA, 17 bp, Homo sapiens
agcaatggacttcacct

SEQ ID NO: 20578 - DNA, 23 bp, Homo sapiens
tggtattaaaacagtttttaaga

SEQ ID NO: 20579 - DNA, 28 bp, Homo sapiens
aagaatatttacaagaatctttggaaag

SEQ ID NO: 20580 - DNA, 24 bp, Homo sapiens
aacctgtattttaaatttttctat

SEQ ID NO: 20581 - DNA, 19 bp, Homo sapiens
tctctctttgctgtgccat

SEQ ID NO: 20582 - DNA, 24 bp, Homo sapiens
attagaagtcattttgatgaggtg

SEQ ID NO: 20583 - DNA, 18 bp, Homo sapiens
agccatacctgttttccc

SEQ ID NO: 20584 - DNA, 21 bp, Homo sapiens
agtcttctaacagactgcttt

SEQ ID NO: 20585 - DNA, 23 bp, Homo sapiens
taaatagccttaaaacttaaagg

SEQ ID NO: 20586 - DNA, 18 bp, Homo sapiens
gggtaccagagacagtgg

SEQ ID NO: 20587 - DNA, 23 bp, Homo sapiens
gctagataatgattaccacaagc

SEQ ID NO: 20588 - DNA, 26 bp, Homo sapiens
tctatgatatgcttaaaagtgaaaac

SEQ ID NO: 20589 - DNA, 27 bp, Homo sapiens
atctctggtaaattactaatgaataag

SEQ ID NO: 20590 - DNA, 22 bp, Homo sapiens
tggactttgagtcatctatttt

SEQ ID NO: 20591 - DNA, 20 bp, Homo sapiens
tgctctgactggcactagaa

SEQ ID NO: 20592 - DNA, 22 bp, Homo sapiens
atatgccttttgagctgtcttg

SEQ ID NO: 20593 - DNA, 23 bp, Homo sapiens
gaagttagagctagttctctaag

SEQ ID NO: 20594 - DNA, 19 bp, Homo sapiens
gcccttgcagattgatcac

SEQ ID NO: 20595 - DNA, 23 bp, Homo sapiens
gatgtctataaattgaaatagac

SEQ ID NO: 20596 - DNA, 17 bp, Homo sapiens
acgttacatgagccagc

SEQ ID NO: 20597 - DNA, 16 bp, Homo sapiens
ctcaattcaaaggtgg

SEQ ID NO: 20598 - DNA, 22 bp, Homo sapiens
gatggaaaatgaggtggattag

SEQ ID NO: 20599 - DNA, 24 bp, Homo sapiens
tcagtagaaaaatggtttttgaat

SEQ ID NO: 20600 - DNA, 25 bp, Homo sapiens
atgctttttaacttggttttatgac

SEQ ID NO: 20601 - DNA, 22 bp, Homo sapiens
actggtctatgaacaaaacttt

SEQ ID NO: 20602 - DNA, 23 bp, Homo sapiens
tgttctattattaaactcatcat

SEQ ID NO: 20603 - DNA, 19 bp, Homo sapiens
gggatttggatcctgctcc

SEQ ID NO: 20604 - DNA, 24 bp, Homo sapiens
tttgtttacttttcctctttaaga

SEQ ID NO: 20605 - DNA, 22 bp, Homo sapiens
tttgcctatatcagcaattgtc

SEQ ID NO: 20606 - DNA, 21 bp, Homo sapiens
ccatttaaacttgtaaatgaa

SEQ ID NO: 20607 - DNA, 26 bp, Homo sapiens
gaagaattttctgataggaatcctag

SEQ ID NO: 20608 - DNA, 22 bp, Homo sapiens
caaacccaaatctaaattctgt

SEQ ID NO: 20609 - DNA, 21 bp, Homo sapiens
aattctgtgcttcttataaac

SEQ ID NO: 20610 - DNA, 30 bp, Homo sapiens
tattcaaatatttgaagaaaaaatataaag

SEQ ID NO: 20611 - DNA, 22 bp, Homo sapiens
aagccactttttatatctttca

SEQ ID NO: 20612 - DNA, 23 bp, Homo sapiens
aacaagtttttactaaatctgtt

SEQ ID NO: 20613 - DNA, 21 bp, Homo sapiens
tggttgatatagtgaatcaaa

SEQ ID NO: 20614 - DNA, 18 bp, Homo sapiens
tgagcaagcagctgaaac

SEQ ID NO: 20615 - DNA, 22 bp, Homo sapiens
ggaagaacaggatagaaagact

SEQ ID NO: 20616 - DNA, 21 bp, Homo sapiens
tcacctgtttgttagtttatt

SEQ ID NO: 20617 - DNA, 16 bp, Homo sapiens
gcggacagagtgagtc

SEQ ID NO: 20618 - DNA, 22 bp, Homo sapiens
cctttgttcttcgagacgttat

SEQ ID NO: 20619 - DNA, 19 bp, Homo sapiens
ccatgatacaagaaggcct

SEQ ID NO: 20620 - DNA, 22 bp, Homo sapiens
tttggcttataagccattaaaa

SEQ ID NO: 20621 - DNA, 19 bp, Homo sapiens
ggctgtctggcaaacctga

SEQ ID NO: 20622 - DNA, 24 bp, Homo sapiens
gaacaaaaggacttctgaatgaat

SEQ ID NO: 20623 - DNA, 26 bp, Homo sapiens
ggtataagtgtaccaacaataacatg

SEQ ID NO: 20624 - DNA, 24 bp, Homo sapiens
tttttttttctccctatattaggc

SEQ ID NO: 20625 - DNA, 23 bp, Homo sapiens
accattttgaagatgagtcagaa

SEQ ID NO: 20626 - DNA, 24 bp, Homo sapiens
tttgttgtgacttattaagtcagg

SEQ ID NO: 20627 - DNA, 22 bp, Homo sapiens
accaaataaacataaaacactc

SEQ ID NO: 20628 - DNA, 22 bp, Homo sapiens
gatgctctagaaaaccatcttc

SEQ ID NO: 20629 - DNA, 22 bp, Homo sapiens
tcattaagaatatttttccaat

SEQ ID NO: 20630 - DNA, 19 bp, Homo sapiens
tggaggttcagaaacaggt

SEQ ID NO: 20631 - DNA, 22 bp, Homo sapiens
agttattgaattatttgaaaac

SEQ ID NO: 20632 - DNA, 24 bp, Homo sapiens
ggttttcattatccttgttatcta

SEQ ID NO: 20633 - DNA, 25 bp, Homo sapiens
attagaacatttaatctgatctagg

SEQ ID NO: 20634 - DNA, 22 bp, Homo sapiens
tccttaaaaacaacatggtcag

SEQ ID NO: 20635 - DNA, 27 bp, Homo sapiens
ttggcttactttaaaattatttctctc

SEQ ID NO: 20636 - DNA, 19 bp, Homo sapiens
cctccaagagtgaaaaggg

SEQ ID NO: 20637 - DNA, 24 bp, Homo sapiens
ttggacttgttgaaatacttagtg

SEQ ID NO: 20638 - DNA, 21 bp, Homo sapiens
cagatttttgaaaagtactac

SEQ ID NO: 20639 - DNA, 22 bp, Homo sapiens
gcttttagatccttttcctgac

SEQ ID NO: 20640 - DNA, 26 bp, Homo sapiens
tggcctacgtatatatttttaatcac

SEQ ID NO: 20641 - DNA, 24 bp, Homo sapiens
tcagcaaaaaatcaaatacagtag

SEQ ID NO: 20642 - DNA, 23 bp, Homo sapiens
gagaaaatggttaatttcctaaa

SEQ ID NO: 20643 - DNA, 26 bp, Homo sapiens
cagtggaagaaatcatttatttcttc

SEQ ID NO: 20644 - DNA, 22 bp, Homo sapiens
cgaagatcctttagtccttcaa

SEQ ID NO: 20645 - DNA, 22 bp, Homo sapiens
aatggcacttaactaatttttt

SEQ ID NO: 20646 - DNA, 21 bp, Homo sapiens
accctgagaagctctcataat

SEQ ID NO: 20647 - DNA, 25 bp, Homo sapiens
tgttaaaagcaagttacattttctc

SEQ ID NO: 20648 - DNA, 22 bp, Homo sapiens
ctttgcaaaatattctttcaaa

SEQ ID NO: 20649 - DNA, 19 bp, Homo sapiens
tgcacttccattgacaaga

SEQ ID NO: 20650 - DNA, 22 bp, Homo sapiens
gggtctgaactaaatgatgaga

SEQ ID NO: 20651 - DNA, 18 bp, Homo sapiens
aaagatcagatggtggac

SEQ ID NO: 20652 - DNA, 21 bp, Homo sapiens
aactagtttcaccataatccc

SEQ ID NO: 20653 - DNA, 23 bp, Homo sapiens
gctactcatgacttaaaaccttt

SEQ ID NO: 20654 - DNA, 22 bp, Homo sapiens
aacttctttttcaccagtgtgg

SEQ ID NO: 20655 - DNA, 23 bp, Homo sapiens
tatgcaattataaacaaaagtgt

SEQ ID NO: 20656 - DNA, 17 bp, Homo sapiens
tgtgatccgcagttgac

SEQ ID NO: 20657 - DNA, 20 bp, Homo sapiens
tctagataatccgcaagatg

SEQ ID NO: 20658 - DNA, 19 bp, Homo sapiens
actgaatactacaggcaac

SEQ ID NO: 20659 - DNA, 22 bp, Homo sapiens
tatccaagatggcaataaacca

SEQ ID NO: 20660 - DNA, 21 bp, Homo sapiens
ccaagcagcttccaacagcct

SEQ ID NO: 20661 - DNA, 18 bp, Homo sapiens
gtgagccaccgcactcgg

SEQ ID NO: 20662 - DNA, 21 bp, Homo sapiens
tggtataagatgcatctttac

SEQ ID NO: 20663 - DNA, 30 bp, Homo sapiens
agcattatagttttgaaattagaaaatttc

SEQ ID NO: 20664 - DNA, 19 bp, Homo sapiens
aggtcagcattatgaaggt

SEQ ID NO: 20665 - DNA, 22 bp, Homo sapiens
agaatttctatatgtagaggct

SEQ ID NO: 20666 - DNA, 24 bp, Homo sapiens
attgagattacatataaggtatca

SEQ ID NO: 20667 - DNA, 24 bp, Homo sapiens
atttctctaccatagctatacaac

SEQ ID NO: 20668 - DNA, 21 bp, Homo sapiens
gctttagttactgagaatatc

SEQ ID NO: 20669 - DNA, 24 bp, Homo sapiens
tttgaagataaagaacttcagtgg

SEQ ID NO: 20670 - DNA, 24 bp, Homo sapiens
atgtgaattaataaaaatataaga

SEQ ID NO: 20671 - DNA, 21 bp, Homo sapiens
ttttcaaacaggtaacagctg

SEQ ID NO: 20672 - DNA, 22 bp, Homo sapiens
ttttgtaaatgtaaagtttcct

SEQ ID NO: 20673 - DNA, 25 bp, Homo sapiens
cattggatctgttgtcatcttataa

SEQ ID NO: 20674 - DNA, 24 bp, Homo sapiens
cagtggaggttaacattcatcaag

SEQ ID NO: 20675 - DNA, 21 bp, Homo sapiens
ttacttaagagaccttttttc

SEQ ID NO: 20676 - DNA, 20 bp, Homo sapiens
tgtcaaagttcgatcagcag

SEQ ID NO: 20677 - DNA, 21 bp, Homo sapiens
agtcatgacccacagcaaaca

SEQ ID NO: 20678 - DNA, 21 bp, Homo sapiens
aagactggacatagtttctgg

SEQ ID NO: 20679 - DNA, 24 bp, Homo sapiens
tgaaatatggcttaaattacttat

SEQ ID NO: 20680 - DNA, 22 bp, Homo sapiens
acagccttttagaacatcaaga

SEQ ID NO: 20681 - DNA, 20 bp, Homo sapiens
tctttgtcaaatctgggtac

SEQ ID NO: 20682 - DNA, 23 bp, Homo sapiens
aggtaaacattgcctccagattt

SEQ ID NO: 20683 - DNA, 24 bp, Homo sapiens
aatgtcatgattttcacttagagg

SEQ ID NO: 20684 - DNA, 23 bp, Homo sapiens
tactcattttgtgtaggaaaggt

SEQ ID NO: 20685 - DNA, 19 bp, Homo sapiens
tcacattttgtgcctccac

SEQ ID NO: 20686 - DNA, 24 bp, Homo sapiens
cctttctttctagtttttagaagt

SEQ ID NO: 20687 - DNA, 20 bp, Homo sapiens
acaaggaattatatcagact

SEQ ID NO: 20688 - DNA, 22 bp, Homo sapiens
aggcctggatgatataaatctg

SEQ ID NO: 20689 - DNA, 24 bp, Homo sapiens
gggtgatattatgtgaagatgatg

SEQ ID NO: 20690 - DNA, 20 bp, Homo sapiens
tgacttgtgcttttttggac

SEQ ID NO: 20691 - DNA, 25 bp, Homo sapiens
taaagttatgactaaatacggatgc

SEQ ID NO: 20692 - DNA, 20 bp, Homo sapiens
acagtctgacaaaagtcagt

SEQ ID NO: 20693 - DNA, 22 bp, Homo sapiens
cagtatgttgagtttatggcag

SEQ ID NO: 20694 - DNA, 23 bp, Homo sapiens
cagatttctccatgattcatttg

SEQ ID NO: 20695 - DNA, 23 bp, Homo sapiens
ggggcatgaaaattttaagtaaa

SEQ ID NO: 20696 - DNA, 18 bp, Homo sapiens
cgtttgcgagaagtgtcg

SEQ ID NO: 20697 - DNA, 24 bp, Homo sapiens
ggtggatttgtttgtatattctag

SEQ ID NO: 20698 - DNA, 28 bp, Homo sapiens
tacagtattaatgttaaaaatttaatag

SEQ ID NO: 20699 - DNA, 23 bp, Homo sapiens
tgattcatgatattttactccaa

SEQ ID NO: 20700 - DNA, 21 bp, Homo sapiens
tgcttttagtgggattccatc

SEQ ID NO: 20701 - DNA, 19 bp, Homo sapiens
ggatttttcaccagctgtc

SEQ ID NO: 20702 - DNA, 22 bp, Homo sapiens
tttatctccattccatagatga

SEQ ID NO: 20703 - DNA, 24 bp, Homo sapiens
acccctgcaaacttggattcaggt

SEQ ID NO: 20704 - DNA, 20 bp, Homo sapiens
cggaaaaagtgctctgactc

SEQ ID NO: 20705 - DNA, 22 bp, Homo sapiens
ttccttcagaaccaattttgtg

SEQ ID NO: 20706 - DNA, 20 bp, Homo sapiens
cttctcatgtagtccacaac

SEQ ID NO: 20707 - DNA, 23 bp, Homo sapiens
gggagacagacacataaacaaga

SEQ ID NO: 20708 - DNA, 21 bp, Homo sapiens
aacaagttacactctagatcc

SEQ ID NO: 20709 - DNA, 23 bp, Homo sapiens
gaggggagatatttttgtttgtc

SEQ ID NO: 20710 - DNA, 22 bp, Homo sapiens
aaatataacactttgcaacacc

SEQ ID NO: 20711 - DNA, 19 bp, Homo sapiens
agaacaatgcttgctgttg

SEQ ID NO: 20712 - DNA, 20 bp, Homo sapiens
aaccaaactgctatcctgaa

SEQ ID NO: 20713 - DNA, 21 bp, Homo sapiens
cagccagaaagcatcattaaa

SEQ ID NO: 20714 - DNA, 21 bp, Homo sapiens
tgtggtttttgggaatttgta

SEQ ID NO: 20715 - DNA, 16 bp, Homo sapiens
gtgagcagcacaagac

SEQ ID NO: 20716 - DNA, 23 bp, Homo sapiens
acatgcttttattttgatattga

SEQ ID NO: 20717 - DNA, 20 bp, Homo sapiens
accttttctcttgatcatcc

SEQ ID NO: 20718 - DNA, 22 bp, Homo sapiens
tctttagaccttcttcaggaac

SEQ ID NO: 20719 - DNA, 19 bp, Homo sapiens
cccttattgagacaatgcc

SEQ ID NO: 20720 - DNA, 21 bp, Homo sapiens
agaagttgccaaggtagctca

SEQ ID NO: 20721 - DNA, 23 bp, Homo sapiens
aaaacaaaatttctatctaaaat

SEQ ID NO: 20722 - DNA, 26 bp, Homo sapiens
aaatctatgcagataagaaaagtatg

SEQ ID NO: 20723 - DNA, 22 bp, Homo sapiens
ccttcttcaaatgcaagacttc

SEQ ID NO: 20724 - DNA, 27 bp, Homo sapiens
atggtattatgttttaaagtataagtg

SEQ ID NO: 20725 - DNA, 21 bp, Homo sapiens
ttccagtttcttctttacttt

SEQ ID NO: 20726 - DNA, 21 bp, Homo sapiens
ttttctgtcaaagtctatagt

SEQ ID NO: 20727 - DNA, 25 bp, Homo sapiens
cccaaagtatgagataaatactgtc

SEQ ID NO: 20728 - DNA, 20 bp, Homo sapiens
aggtgttcttgtgacaaaca

SEQ ID NO: 20729 - DNA, 24 bp, Homo sapiens
gtccagtaagtaaattcagtttaa

SEQ ID NO: 20730 - DNA, 22 bp, Homo sapiens
acaactatttctagcttgagtg

SEQ ID NO: 20731 - DNA, 20 bp, Homo sapiens
agtctgtctactctaaggct

SEQ ID NO: 20732 - DNA, 25 bp, Homo sapiens
tctgtagatttctaagagaagatcc

SEQ ID NO: 20733 - DNA, 24 bp, Homo sapiens
actgtatttcagaatcattacatt

SEQ ID NO: 20734 - DNA, 21 bp, Homo sapiens
ggttgtaacatcttccctcca

SEQ ID NO: 20735 - DNA, 30 bp, Homo sapiens
ttacatattggtaatgatacaatttaaaat

SEQ ID NO: 20736 - DNA, 22 bp, Homo sapiens
actccttcataaacagaattac

SEQ ID NO: 20737 - DNA, 21 bp, Homo sapiens
tttttgttgtttccatgtttt

SEQ ID NO: 20738 - DNA, 25 bp, Homo sapiens
atatgttcgtagtctataagaaaag

SEQ ID NO: 20739 - DNA, 22 bp, Homo sapiens
gagccagatagtttgtatggct

SEQ ID NO: 20740 - DNA, 18 bp, Homo sapiens
attgctgtttcgaggtca

SEQ ID NO: 20741 - DNA, 17 bp, Homo sapiens
ctaaacaacggtatagt

SEQ ID NO: 20742 - DNA, 21 bp, Homo sapiens
tggctttaccaaatctgggaa

SEQ ID NO: 20743 - DNA, 23 bp, Homo sapiens
aaacccaaagctattttcacaat

SEQ ID NO: 20744 - DNA, 20 bp, Homo sapiens
tggctgtgtaaatatccacc

SEQ ID NO: 20745 - DNA, 20 bp, Homo sapiens
tggggcaaagccctagtaac

SEQ ID NO: 20746 - DNA, 20 bp, Homo sapiens
ccctgaatgtttagcctaat

SEQ ID NO: 20747 - DNA, 24 bp, Homo sapiens
ccaggcaggaatcattcaggtaca

SEQ ID NO: 20748 - DNA, 19 bp, Homo sapiens
ccaaattctgcaaggccta

SEQ ID NO: 20749 - DNA, 20 bp, Homo sapiens
acccagctgatattttggga

SEQ ID NO: 20750 - DNA, 21 bp, Homo sapiens
aggacaccagtctttattttc

SEQ ID NO: 20751 - DNA, 21 bp, Homo sapiens
ttgtatctttgctgttttttt

SEQ ID NO: 20752 - DNA, 17 bp, Homo sapiens
gcaatggtcccactgca

SEQ ID NO: 20753 - DNA, 23 bp, Homo sapiens
aacaaaataactcctgtttaggc

SEQ ID NO: 20754 - DNA, 24 bp, Homo sapiens
gtttagaatgaggagagaggcaaa

SEQ ID NO: 20755 - DNA, 23 bp, Homo sapiens
ttccgtctatttaaaaggattgg

SEQ ID NO: 20756 - DNA, 19 bp, Homo sapiens
agcagcatggaggaatatg

SEQ ID NO: 20757 - DNA, 24 bp, Homo sapiens
tggtatgtatatatatatagtgtg

SEQ ID NO: 20758 - DNA, 22 bp, Homo sapiens
actggttccttctacttctttg

SEQ ID NO: 20759 - DNA, 21 bp, Homo sapiens
accaaaaattctagaaatgca

SEQ ID NO: 20760 - DNA, 20 bp, Homo sapiens
tgtagagaattctctgtctc

SEQ ID NO: 20761 - DNA, 20 bp, Homo sapiens
tgtcctttggtgaagctatt

SEQ ID NO: 20762 - DNA, 23 bp, Homo sapiens
tgttaaaatacagtaactttgtc

SEQ ID NO: 20763 - DNA, 21 bp, Homo sapiens
ttctttgacttatctcacagc

SEQ ID NO: 20764 - DNA, 22 bp, Homo sapiens
caatgcaaatccttacattaaa

SEQ ID NO: 20765 - DNA, 22 bp, Homo sapiens
atgctctacaatctctaagaga

SEQ ID NO: 20766 - DNA, 19 bp, Homo sapiens
agggcagagaattacaagg

SEQ ID NO: 20767 - DNA, 20 bp, Homo sapiens
ctcttccacttcttttactc

SEQ ID NO: 20768 - DNA, 24 bp, Homo sapiens
ccactgctattttgtattcactgt

SEQ ID NO: 20769 - DNA, 20 bp, Homo sapiens
caacctgctaagtgtgggat

SEQ ID NO: 20770 - DNA, 24 bp, Homo sapiens
tgagaactctttaacaacaaattt

SEQ ID NO: 20771 - DNA, 20 bp, Homo sapiens
tacgaattacataccttgag

SEQ ID NO: 20772 - DNA, 23 bp, Homo sapiens
tcagagtgtcttttcttttttgc

SEQ ID NO: 20773 - DNA, 22 bp, Homo sapiens
agtttttattttttaaagtcac

SEQ ID NO: 20774 - DNA, 24 bp, Homo sapiens
cagccttgagtctgtgtattcgct

SEQ ID NO: 20775 - DNA, 18 bp, Homo sapiens
ttcagccttctaaagtgc

SEQ ID NO: 20776 - DNA, 27 bp, Homo sapiens
tgatccatatgtaggattatttacaag

SEQ ID NO: 20777 - DNA, 19 bp, Homo sapiens
gtccttgagaagctgggag

SEQ ID NO: 20778 - DNA, 20 bp, Homo sapiens
tatatcgtaagttccagaac

SEQ ID NO: 20779 - DNA, 20 bp, Homo sapiens
gatctccaaaatgactgtgc

SEQ ID NO: 20780 - DNA, 22 bp, Homo sapiens
cttacatgaactctatgtcgtg

SEQ ID NO: 20781 - DNA, 20 bp, Homo sapiens
tgtttggtgagaatgtcctt

SEQ ID NO: 20782 - DNA, 17 bp, Homo sapiens
ttaagtggcagaaacac

SEQ ID NO: 20783 - DNA, 21 bp, Homo sapiens
aattgtatttacctgagtgtt

SEQ ID NO: 20784 - DNA, 22 bp, Homo sapiens
tcaggagcctatcatggctcta

SEQ ID NO: 20785 - DNA, 20 bp, Homo sapiens
cctcaggctttctgtttttt

SEQ ID NO: 20786 - DNA, 21 bp, Homo sapiens
ggacaactcacaaagagaatg

SEQ ID NO: 20787 - DNA, 24 bp, Homo sapiens
ctcttaaacaattatttttactat

SEQ ID NO: 20788 - DNA, 18 bp, Homo sapiens
tggccagaactttcaaga

SEQ ID NO: 20789 - DNA, 23 bp, Homo sapiens
aactgaattgtactgtttaattt

SEQ ID NO: 20790 - DNA, 24 bp, Homo sapiens
aagatagtccctgacaagtagtta

SEQ ID NO: 20791 - DNA, 17 bp, Homo sapiens
gcccagaatacttgtgc

SEQ ID NO: 20792 - DNA, 21 bp, Homo sapiens
tcatggtagtagtatcagtag

SEQ ID NO: 20793 - DNA, 18 bp, Homo sapiens
acagctggcatccaactt

SEQ ID NO: 20794 - DNA, 21 bp, Homo sapiens
tccctgaaagggcaatatttc

SEQ ID NO: 20795 - DNA, 24 bp, Homo sapiens
tacatttgtgtttttttaaataac

SEQ ID NO: 20796 - DNA, 16 bp, Homo sapiens
ggcagctggaagaagc

SEQ ID NO: 20797 - DNA, 21 bp, Homo sapiens
aaattactaatttcaaggctc

SEQ ID NO: 20798 - DNA, 22 bp, Homo sapiens
cctgagtattctcaagcaaatg

SEQ ID NO: 20799 - DNA, 21 bp, Homo sapiens
aagtttctaaacttcatttac

SEQ ID NO: 20800 - DNA, 20 bp, Homo sapiens
tatggcaaaagcagatgagg

SEQ ID NO: 20801 - DNA, 19 bp, Homo sapiens
gtttctgctaaccagttgc

SEQ ID NO: 20802 - DNA, 22 bp, Homo sapiens
atttttaacctgcttttttccc

SEQ ID NO: 20803 - DNA, 23 bp, Homo sapiens
gctccaaaaatcttaccttttct

SEQ ID NO: 20804 - DNA, 19 bp, Homo sapiens
ttttaagattttgcctttc

SEQ ID NO: 20805 - DNA, 23 bp, Homo sapiens
ttggaaatatattgatcttgatg

SEQ ID NO: 20806 - DNA, 18 bp, Homo sapiens
gtctgagggtttgtggca

SEQ ID NO: 20807 - DNA, 19 bp, Homo sapiens
acagagctacaacagtaat

SEQ ID NO: 20808 - DNA, 24 bp, Homo sapiens
tgcggtcatcatgcagacctatct

SEQ ID NO: 20809 - DNA, 20 bp, Homo sapiens
tctccatcataatttccagc

SEQ ID NO: 20810 - DNA, 22 bp, Homo sapiens
agttcatataatttagctagct

SEQ ID NO: 20811 - DNA, 19 bp, Homo sapiens
tgaaaaccgggctaatgag

SEQ ID NO: 20812 - DNA, 22 bp, Homo sapiens
atttgagtgattctttagatgt

SEQ ID NO: 20813 - DNA, 19 bp, Homo sapiens
ggagagcttgcttgttttc

SEQ ID NO: 20814 - DNA, 22 bp, Homo sapiens
ttcttgaaggcagtagaagttg

SEQ ID NO: 20815 - DNA, 23 bp, Homo sapiens
acctgtttgtctgaattttatgt

SEQ ID NO: 20816 - DNA, 22 bp, Homo sapiens
tggaaaaatgaaggcatttctc

SEQ ID NO: 20817 - DNA, 18 bp, Homo sapiens
tcactcagttaactggtg

SEQ ID NO: 20818 - DNA, 23 bp, Homo sapiens
tgaaaactacatgaaatcatcgg

SEQ ID NO: 20819 - DNA, 22 bp, Homo sapiens
gacctttagagctcaaaactat

SEQ ID NO: 20820 - DNA, 19 bp, Homo sapiens
agtaggtctccttagggaa

SEQ ID NO: 20821 - DNA, 22 bp, Homo sapiens
acaaaaaacaaaaaccgaaaag

SEQ ID NO: 20822 - DNA, 17 bp, Homo sapiens
cagctctcgctgaacct

SEQ ID NO: 20823 - DNA, 22 bp, Homo sapiens
taatccttagaagtttgctttt

SEQ ID NO: 20824 - DNA, 23 bp, Homo sapiens
tgctttacataagaagcgtttac

SEQ ID NO: 20825 - DNA, 20 bp, Homo sapiens
catgtgtgattttgtagttc

SEQ ID NO: 20826 - DNA, 20 bp, Homo sapiens
gtcggaatacccacatatca

SEQ ID NO: 20827 - DNA, 20 bp, Homo sapiens
ttctatgcaagatacacagt

SEQ ID NO: 20828 - DNA, 20 bp, Homo sapiens
tcatcatgccattgacttca

SEQ ID NO: 20829 - DNA, 23 bp, Homo sapiens
ccctgcgtgcactgaaagaggat

SEQ ID NO: 20830 - DNA, 21 bp, Homo sapiens
tcaaggggcttatgtctaagt

SEQ ID NO: 20831 - DNA, 24 bp, Homo sapiens
actgcttattaagtggagaagaac

SEQ ID NO: 20832 - DNA, 17 bp, Homo sapiens
gagcactggaccaagtg

SEQ ID NO: 20833 - DNA, 22 bp, Homo sapiens
ggcttgaaaattctggagtttc

SEQ ID NO: 20834 - DNA, 22 bp, Homo sapiens
gaggcaaaaatttatatgttgg

SEQ ID NO: 20835 - DNA, 23 bp, Homo sapiens
gttagtgaagttttgttaaccac

SEQ ID NO: 20836 - DNA, 17 bp, Homo sapiens
ctaggcctcccatcatc

SEQ ID NO: 20837 - DNA, 20 bp, Homo sapiens
tgcttagatgtgagaatatt

SEQ ID NO: 20838 - DNA, 29 bp, Homo sapiens
aatagaataaaaataattattgtggtttg

SEQ ID NO: 20839 - DNA, 21 bp, Homo sapiens
agagagacggaatgaagattc

SEQ ID NO: 20840 - DNA, 25 bp, Homo sapiens
ttttgtatttccatttcttagaggg

SEQ ID NO: 20841 - DNA, 20 bp, Homo sapiens
tagaatggggaccaagatga

SEQ ID NO: 20842 - DNA, 21 bp, Homo sapiens
aggaattagagagagaaaatg

SEQ ID NO: 20843 - DNA, 24 bp, Homo sapiens
gggtgatccattgaaattctagag

SEQ ID NO: 20844 - DNA, 19 bp, Homo sapiens
acacatgcaggcatacacg

SEQ ID NO: 20845 - DNA, 19 bp, Homo sapiens
atctctgtttgcatttgct

SEQ ID NO: 20846 - DNA, 24 bp, Homo sapiens
acattttaatgttaagcaaaatga

SEQ ID NO: 20847 - DNA, 19 bp, Homo sapiens
agagctttgtttaggcaca

SEQ ID NO: 20848 - DNA, 18 bp, Homo sapiens
agttcttttcttacagct

SEQ ID NO: 20849 - DNA, 24 bp, Homo sapiens
actgaatatcacacttctaaaagg

SEQ ID NO: 20850 - DNA, 21 bp, Homo sapiens
gtttattatactggccttagc

SEQ ID NO: 20851 - DNA, 19 bp, Homo sapiens
accgattttagatggcatc

SEQ ID NO: 20852 - DNA, 24 bp, Homo sapiens
ggtagccagaagaagcagaataac

SEQ ID NO: 20853 - DNA, 19 bp, Homo sapiens
gcagcctctgttcgatcct

SEQ ID NO: 20854 - DNA, 22 bp, Homo sapiens
actgttttgtttgtatctgagg

SEQ ID NO: 20855 - DNA, 18 bp, Homo sapiens
cctcaacacttctgacca

SEQ ID NO: 20856 - DNA, 18 bp, Homo sapiens
tctgtttttctctttgtt

SEQ ID NO: 20857 - DNA, 16 bp, Homo sapiens
ttccactgagtggcat

SEQ ID NO: 20858 - DNA, 27 bp, Homo sapiens
cttatgtaatgttttttgttttttatt

SEQ ID NO: 20859 - DNA, 19 bp, Homo sapiens
acagagagtaacacagcaa

SEQ ID NO: 20860 - DNA, 21 bp, Homo sapiens
tcagaagtaggagacctcaga

SEQ ID NO: 20861 - DNA, 22 bp, Homo sapiens
cttttggattacgtttgtgatt

SEQ ID NO: 20862 - DNA, 20 bp, Homo sapiens
attagcaaacttagatgcca

SEQ ID NO: 20863 - DNA, 23 bp, Homo sapiens
aagagatattaagtgaaaaagta

SEQ ID NO: 20864 - DNA, 17 bp, Homo sapiens
attggctggtctgctgg

SEQ ID NO: 20865 - DNA, 18 bp, Homo sapiens
tcagagcctgaaccacag

SEQ ID NO: 20866 - DNA, 22 bp, Homo sapiens
agagttaattgcaaattacctt

SEQ ID NO: 20867 - DNA, 19 bp, Homo sapiens
tgcttgaccttcaatgctg

SEQ ID NO: 20868 - DNA, 20 bp, Homo sapiens
actatttcaaatggttcaat

SEQ ID NO: 20869 - DNA, 20 bp, Homo sapiens
aaggcataaatattccagca

SEQ ID NO: 20870 - DNA, 25 bp, Homo sapiens
atactgagaaattataggttgaaac

SEQ ID NO: 20871 - DNA, 20 bp, Homo sapiens
tgttgttgtccctactatgg

SEQ ID NO: 20872 - DNA, 20 bp, Homo sapiens
atttccatattctcctgtgt

SEQ ID NO: 20873 - DNA, 22 bp, Homo sapiens
tcttaaccactatcacatcgtc

SEQ ID NO: 20874 - DNA, 23 bp, Homo sapiens
ttttggtaaatttacacctcctg

SEQ ID NO: 20875 - DNA, 21 bp, Homo sapiens
aatgtatttttctttaagtgc

SEQ ID NO: 20876 - DNA, 20 bp, Homo sapiens
ggctcaccttaacaagctgt

SEQ ID NO: 20877 - DNA, 23 bp, Homo sapiens
tatacttttattaggtggaccac

SEQ ID NO: 20878 - DNA, 28 bp, Homo sapiens
aagcagaaagaaaatatgaactaaaaat

SEQ ID NO: 20879 - DNA, 21 bp, Homo sapiens
agcagaatttcgcttagcagg

SEQ ID NO: 20880 - DNA, 25 bp, Homo sapiens
ctactctacaaatcttcctcatttg

SEQ ID NO: 20881 - DNA, 19 bp, Homo sapiens
tccgatggcaaggagagga

SEQ ID NO: 20882 - DNA, 20 bp, Homo sapiens
agcatcttgtctcaggtcat

SEQ ID NO: 20883 - DNA, 23 bp, Homo sapiens
aggtatttaattatttgggagac

SEQ ID NO: 20884 - DNA, 19 bp, Homo sapiens
tccgtgtttctctgcagta

SEQ ID NO: 20885 - DNA, 22 bp, Homo sapiens
ctttgctattctcagatgactc

SEQ ID NO: 20886 - DNA, 20 bp, Homo sapiens
tggtgaactaacagaagtac

SEQ ID NO: 20887 - DNA, 20 bp, Homo sapiens
taattattctgaagggccgt

SEQ ID NO: 20888 - DNA, 16 bp, Homo sapiens
tatgggcatgagccac

SEQ ID NO: 20889 - DNA, 24 bp, Homo sapiens
aggtcttccagatgtgtaatacat

SEQ ID NO: 20890 - DNA, 24 bp, Homo sapiens
aactatctgtacttataaggtaac

SEQ ID NO: 20891 - DNA, 17 bp, Homo sapiens
tcaagaacaccacttcg

SEQ ID NO: 20892 - DNA, 24 bp, Homo sapiens
gtcttctatggacagagaaatatt

SEQ ID NO: 20893 - DNA, 20 bp, Homo sapiens
atgagcaccatcttcattgt

SEQ ID NO: 20894 - DNA, 22 bp, Homo sapiens
agctgaatgatcatcaaatgct

SEQ ID NO: 20895 - DNA, 21 bp, Homo sapiens
gtgtcactcaccatcattttc

SEQ ID NO: 20896 - DNA, 17 bp, Homo sapiens
tccaggtggttcccctc

SEQ ID NO: 20897 - DNA, 20 bp, Homo sapiens
tgtcagctttaataagccat

SEQ ID NO: 20898 - DNA, 23 bp, Homo sapiens
ccattggtgaatttcttgttaac

SEQ ID NO: 20899 - DNA, 22 bp, Homo sapiens
agtatctttgacaattacctga

SEQ ID NO: 20900 - DNA, 20 bp, Homo sapiens
tttcagtgcctttcagtgcc

SEQ ID NO: 20901 - DNA, 24 bp, Homo sapiens
cttcatatttctcttcaaaagact

SEQ ID NO: 20902 - DNA, 24 bp, Homo sapiens
gcttcttgtaggtaatgtatcctg

SEQ ID NO: 20903 - DNA, 18 bp, Homo sapiens
tccatgcagaagtaacgg

SEQ ID NO: 20904 - DNA, 23 bp, Homo sapiens
aaatgtgtatattagtttaattg

SEQ ID NO: 20905 - DNA, 19 bp, Homo sapiens
aagaagtagctacactgcg

SEQ ID NO: 20906 - DNA, 20 bp, Homo sapiens
aggaggtgcaaaaaaagtct

SEQ ID NO: 20907 - DNA, 19 bp, Homo sapiens
cctgccaaacaacaaagtg

SEQ ID NO: 20908 - DNA, 23 bp, Homo sapiens
tgccaaaattttcaaccagtttt

SEQ ID NO: 20909 - DNA, 16 bp, Homo sapiens
tcatccccctgcaact

SEQ ID NO: 20910 - DNA, 22 bp, Homo sapiens
tttggtttgagaagcgattggc

SEQ ID NO: 20911 - DNA, 21 bp, Homo sapiens
aatcaggatgaacaagaaaca

SEQ ID NO: 20912 - DNA, 19 bp, Homo sapiens
tcaccaagtccaagtatgt

SEQ ID NO: 20913 - DNA, 26 bp, Homo sapiens
acatcatttaagtaggctaaaaatcc

SEQ ID NO: 20914 - DNA, 22 bp, Homo sapiens
acttacctagatctatatgtac

SEQ ID NO: 20915 - DNA, 27 bp, Homo sapiens
tggtcttaattgaaattatggctatat

SEQ ID NO: 20916 - DNA, 19 bp, Homo sapiens
acaacattccatgatgacc

SEQ ID NO: 20917 - DNA, 23 bp, Homo sapiens
ttcttttttctccagttggttac

SEQ ID NO: 20918 - DNA, 19 bp, Homo sapiens
acccaatatttactgcttc

SEQ ID NO: 20919 - DNA, 19 bp, Homo sapiens
aaatgagcagtcagcagaa

SEQ ID NO: 20920 - DNA, 18 bp, Homo sapiens
ccctgttcaaaagcaaca

SEQ ID NO: 20921 - DNA, 24 bp, Homo sapiens
gcagaagtaaactactgtacatac

SEQ ID NO: 20922 - DNA, 22 bp, Homo sapiens
tgcccatgccatccacaatatc

SEQ ID NO: 20923 - DNA, 24 bp, Homo sapiens
cctttgtaaagttcacattctaac

SEQ ID NO: 20924 - DNA, 23 bp, Homo sapiens
aaattatttccctcctttacttc

SEQ ID NO: 20925 - DNA, 20 bp, Homo sapiens
ttctttactttaggtgttgc

SEQ ID NO: 20926 - DNA, 18 bp, Homo sapiens
tgggattacaggtgcaaa

SEQ ID NO: 20927 - DNA, 24 bp, Homo sapiens
tgagacagttccttttagactcac

SEQ ID NO: 20928 - DNA, 17 bp, Homo sapiens
ggctggactcaaactcc

SEQ ID NO: 20929 - DNA, 18 bp, Homo sapiens
ccatggttttctcacagc

SEQ ID NO: 20930 - DNA, 23 bp, Homo sapiens
agtattatgctattttgagatac

SEQ ID NO: 20931 - DNA, 24 bp, Homo sapiens
agtcttccttataaaatactttac

SEQ ID NO: 20932 - DNA, 22 bp, Homo sapiens
tgagagtatacagataaagata

SEQ ID NO: 20933 - DNA, 19 bp, Homo sapiens
tcacatcagtgacttcctg

SEQ ID NO: 20934 - DNA, 22 bp, Homo sapiens
gtgtttgactctagatgctgtg

SEQ ID NO: 20935 - DNA, 16 bp, Homo sapiens
cctcctttctgctgcc

SEQ ID NO: 20936 - DNA, 24 bp, Homo sapiens
aggaaactctgttaaccattgtag

SEQ ID NO: 20937 - DNA, 23 bp, Homo sapiens
tcctcaaggaaacatgaagtgtg

SEQ ID NO: 20938 - DNA, 20 bp, Homo sapiens
ctctgctgtaaatacaaagc

SEQ ID NO: 20939 - DNA, 24 bp, Homo sapiens
actggcttatttgtatgatactgg

SEQ ID NO: 20940 - DNA, 20 bp, Homo sapiens
tttcgtttgcattcttggtc

SEQ ID NO: 20941 - DNA, 21 bp, Homo sapiens
ttttaatacatatgttctctc

SEQ ID NO: 20942 - DNA, 21 bp, Homo sapiens
ggccttgggaataagaaaatc

SEQ ID NO: 20943 - DNA, 22 bp, Homo sapiens
ggaccatgaatcctttgaaagc

SEQ ID NO: 20944 - DNA, 23 bp, Homo sapiens
tcaatatcactaaggacaaaaac

SEQ ID NO: 20945 - DNA, 22 bp, Homo sapiens
gcttcaccctactctgaatgca

SEQ ID NO: 20946 - DNA, 23 bp, Homo sapiens
ccactcctttcagtttctcttgt

SEQ ID NO: 20947 - DNA, 24 bp, Homo sapiens
gtattttaagaaggtcctgttgtc

SEQ ID NO: 20948 - DNA, 21 bp, Homo sapiens
tgctgtatgagcaaattcact

SEQ ID NO: 20949 - DNA, 23 bp, Homo sapiens
tgttcacctcactgaaacctttg

SEQ ID NO: 20950 - DNA, 19 bp, Homo sapiens
tcacacccaagctttccat

SEQ ID NO: 20951 - DNA, 22 bp, Homo sapiens
agctgaacgtgtcttaatgaga

SEQ ID NO: 20952 - DNA, 23 bp, Homo sapiens
gcaggttaaaaataaaggctaaa

SEQ ID NO: 20953 - DNA, 20 bp, Homo sapiens
gtgctcagtgttggtggaca

SEQ ID NO: 20954 - DNA, 21 bp, Homo sapiens
aaaaaacccacaatagttcac

SEQ ID NO: 20955 - DNA, 19 bp, Homo sapiens
cgacttttcccaggatgga

SEQ ID NO: 20956 - DNA, 24 bp, Homo sapiens
cgaagattttccaaacatcttctg

SEQ ID NO: 20957 - DNA, 23 bp, Homo sapiens
gggttgctttttcaaacaggact

SEQ ID NO: 20958 - DNA, 18 bp, Homo sapiens
gatacaggtttgaccccc

SEQ ID NO: 20959 - DNA, 22 bp, Homo sapiens
actagctacagacacctactac

SEQ ID NO: 20960 - DNA, 24 bp, Homo sapiens
ccactgaataatattctgagtgag

SEQ ID NO: 20961 - DNA, 18 bp, Homo sapiens
agaggctgtgtgaggtcg

SEQ ID NO: 20962 - DNA, 20 bp, Homo sapiens
actagagtcccttctggtga

SEQ ID NO: 20963 - DNA, 22 bp, Homo sapiens
tgccgcgattgctgaacatgag

SEQ ID NO: 20964 - DNA, 20 bp, Homo sapiens
ggtttttgaccccgggtaag

SEQ ID NO: 20965 - DNA, 21 bp, Homo sapiens
gctgatgcaattagaacacag

SEQ ID NO: 20966 - DNA, 21 bp, Homo sapiens
aggaaagatgaactatcggtt

SEQ ID NO: 20967 - DNA, 23 bp, Homo sapiens
cacagcaaaaagggctccctttg

SEQ ID NO: 20968 - DNA, 19 bp, Homo sapiens
gcagacccagaccagatca

SEQ ID NO: 20969 - DNA, 20 bp, Homo sapiens
gaagagaaaggaaacttacc

SEQ ID NO: 20970 - DNA, 21 bp, Homo sapiens
gctcttttctttcctccattc

SEQ ID NO: 20971 - DNA, 21 bp, Homo sapiens
gcccagaacaggactgtaaca

SEQ ID NO: 20972 - DNA, 18 bp, Homo sapiens
tcctcccttcccctttag

SEQ ID NO: 20973 - DNA, 23 bp, Homo sapiens
tggttttagcaatgttagtgatc

SEQ ID NO: 20974 - DNA, 21 bp, Homo sapiens
ggatcttgaaaacagattgag

SEQ ID NO: 20975 - DNA, 19 bp, Homo sapiens
gagtttgatgaccaggagg

SEQ ID NO: 20976 - DNA, 23 bp, Homo sapiens
aggaaacctaaagtgaagcacag

SEQ ID NO: 20977 - DNA, 21 bp, Homo sapiens
gcttataacaatacctatgcc

SEQ ID NO: 20978 - DNA, 23 bp, Homo sapiens
gaattgctcttatgccaccaagt

SEQ ID NO: 20979 - DNA, 23 bp, Homo sapiens
gaactgtcttcatttaacttttg

SEQ ID NO: 20980 - DNA, 18 bp, Homo sapiens
aggcagaagtccctctta

SEQ ID NO: 20981 - DNA, 16 bp, Homo sapiens
ccaagccgattgccct

SEQ ID NO: 20982 - DNA, 20 bp, Homo sapiens
tgctgacattgtcctcacac

SEQ ID NO: 20983 - DNA, 19 bp, Homo sapiens
ttgagttactggcttcccc

SEQ ID NO: 20984 - DNA, 17 bp, Homo sapiens
tccctgagtcctggcgt

SEQ ID NO: 20985 - DNA, 18 bp, Homo sapiens
ctactaaccactcacagt

SEQ ID NO: 20986 - DNA, 18 bp, Homo sapiens
tcagatgtcctggtggaa

SEQ ID NO: 20987 - DNA, 24 bp, Homo sapiens
caatatttgacacatggcaaccag

SEQ ID NO: 20988 - DNA, 18 bp, Homo sapiens
gcatcacagaaattccac

SEQ ID NO: 20989 - DNA, 21 bp, Homo sapiens
gctattactcacagatacgcc

SEQ ID NO: 20990 - DNA, 18 bp, Homo sapiens
tttgactcccaggtcccc

SEQ ID NO: 20991 - DNA, 19 bp, Homo sapiens
ggccttctccttggtattc

SEQ ID NO: 20992 - DNA, 21 bp, Homo sapiens
agctttcatatgtacctgttt

SEQ ID NO: 20993 - DNA, 18 bp, Homo sapiens
tgggatgtccttattgcc

SEQ ID NO: 20994 - DNA, 22 bp, Homo sapiens
aaaactccttcccatcacaaga

SEQ ID NO: 20995 - DNA, 20 bp, Homo sapiens
aacattgacttgggtcctac

SEQ ID NO: 20996 - DNA, 21 bp, Homo sapiens
gcttaagtctttacacaaccc

SEQ ID NO: 20997 - DNA, 17 bp, Homo sapiens
atgagaccagctgtgtt

SEQ ID NO: 20998 - DNA, 21 bp, Homo sapiens
ggcgctatacttaccaaaatg

SEQ ID NO: 20999 - DNA, 19 bp, Homo sapiens
agtgctgttgtctcatggg

SEQ ID NO: 21000 - DNA, 21 bp, Homo sapiens
tcgtagccagcaatgtccaaa

SEQ ID NO: 21001 - DNA, 24 bp, Homo sapiens
tgaagttattatagttatatttgg

SEQ ID NO: 21002 - DNA, 24 bp, Homo sapiens
aaaaaaagcaatcattgtttccac

SEQ ID NO: 21003 - DNA, 24 bp, Homo sapiens
gctgtatgagtttgatatcaaagt

SEQ ID NO: 21004 - DNA, 22 bp, Homo sapiens
aggaacctaaccaatcttatct

SEQ ID NO: 21005 - DNA, 23 bp, Homo sapiens
gctccatctttacattgtgtgtt

SEQ ID NO: 21006 - DNA, 24 bp, Homo sapiens
tacctgtccacagcaccagcttgt

SEQ ID NO: 21007 - DNA, 21 bp, Homo sapiens
tttggctgtggattaaatgag

SEQ ID NO: 21008 - DNA, 20 bp, Homo sapiens
ggtcctcgaaccaacagtgg

SEQ ID NO: 21009 - DNA, 19 bp, Homo sapiens
caggcaaatttcagctttc

SEQ ID NO: 21010 - DNA, 24 bp, Homo sapiens
tcagacaatggctatcacacaggt

SEQ ID NO: 21011 - DNA, 17 bp, Homo sapiens
tggaggggtcctgaggg

SEQ ID NO: 21012 - DNA, 18 bp, Homo sapiens
ggtcaagaggctggagtt

SEQ ID NO: 21013 - DNA, 23 bp, Homo sapiens
gactagaactccctcccagggct

SEQ ID NO: 21014 - DNA, 21 bp, Homo sapiens
ccttctgttcacatccaggtg

SEQ ID NO: 21015 - DNA, 18 bp, Homo sapiens
cctactcctgcctctgac

SEQ ID NO: 21016 - DNA, 24 bp, Homo sapiens
ggttttttttttttttggcaagat

SEQ ID NO: 21017 - DNA, 22 bp, Homo sapiens
agtgttgttgagctccccagtg

SEQ ID NO: 21018 - DNA, 24 bp, Homo sapiens
ttttttttaaacgggggttgtttt

SEQ ID NO: 21019 - DNA, 24 bp, Homo sapiens
caactgagaggagagtttgccacc

SEQ ID NO: 21020 - DNA, 27 bp, Homo sapiens
tttttagataatgcatttaggaaaagg

SEQ ID NO: 21021 - DNA, 19 bp, Homo sapiens
catcgaagcctctctccca

SEQ ID NO: 21022 - DNA, 19 bp, Homo sapiens
actggttaattaggcaagc

SEQ ID NO: 21023 - DNA, 19 bp, Homo sapiens
gtgtggtctcctcttcatg

SEQ ID NO: 21024 - DNA, 17 bp, Homo sapiens
tgtttgactgtggtgac

SEQ ID NO: 21025 - DNA, 18 bp, Homo sapiens
gtagcagcagctcttacc

SEQ ID NO: 21026 - DNA, 21 bp, Homo sapiens
agttccttcttgctgaagtat

SEQ ID NO: 21027 - DNA, 17 bp, Homo sapiens
ttggagtcttggcttgc

SEQ ID NO: 21028 - DNA, 20 bp, Homo sapiens
ttttaggaacacaggaaggg

SEQ ID NO: 21029 - DNA, 21 bp, Homo sapiens
caagaacttcaacatccatgg

SEQ ID NO: 21030 - DNA, 23 bp, Homo sapiens
tactagggacagatgcaattacc

SEQ ID NO: 21031 - DNA, 17 bp, Homo sapiens
tggacagctgcacctca

SEQ ID NO: 21032 - DNA, 24 bp, Homo sapiens
tcaaaggcttcctgacaagtatac

SEQ ID NO: 21033 - DNA, 23 bp, Homo sapiens
actttctggactacaagtccaac

SEQ ID NO: 21034 - DNA, 19 bp, Homo sapiens
gggaagctaccgttccatg

SEQ ID NO: 21035 - DNA, 19 bp, Homo sapiens
gggtaaggtaggagatgac

SEQ ID NO: 21036 - DNA, 18 bp, Homo sapiens
agccttctggtactgagg

SEQ ID NO: 21037 - DNA, 18 bp, Homo sapiens
aagaccctgtactgtctg

SEQ ID NO: 21038 - DNA, 22 bp, Homo sapiens
ggcgatcatcatgaagaagggc

SEQ ID NO: 21039 - DNA, 18 bp, Homo sapiens
aatatgcttgcaaatggc

SEQ ID NO: 21040 - DNA, 21 bp, Homo sapiens
gctggaaatactcttgggcag

SEQ ID NO: 21041 - DNA, 20 bp, Homo sapiens
acaccctgtctatcaatggg

SEQ ID NO: 21042 - DNA, 25 bp, Homo sapiens
ataagattataggttttctaggcag

SEQ ID NO: 21043 - DNA, 21 bp, Homo sapiens
tgacctcataacaaatttgac

SEQ ID NO: 21044 - DNA, 23 bp, Homo sapiens
taaggacagagctacaaagcttc

SEQ ID NO: 21045 - DNA, 20 bp, Homo sapiens
tatcactgctcagagtagag

SEQ ID NO: 21046 - DNA, 17 bp, Homo sapiens
caccatgcttccgtgcc

SEQ ID NO: 21047 - DNA, 23 bp, Homo sapiens
accctagtcaaaaaatccaattc

SEQ ID NO: 21048 - DNA, 17 bp, Homo sapiens
tggtatgccttggtgag

SEQ ID NO: 21049 - DNA, 24 bp, Homo sapiens
acacctggccacaagtcaataaat

SEQ ID NO: 21050 - DNA, 19 bp, Homo sapiens
ttgcttttcagtacggagc

SEQ ID NO: 21051 - DNA, 23 bp, Homo sapiens
taaagttatgtcaatatcagagc

SEQ ID NO: 21052 - DNA, 19 bp, Homo sapiens
ttcctgtttctttctggtc

SEQ ID NO: 21053 - DNA, 24 bp, Homo sapiens
tgtcacagacttcaataatcactc

SEQ ID NO: 21054 - DNA, 23 bp, Homo sapiens
tgtctatttggggaaattaggta

SEQ ID NO: 21055 - DNA, 20 bp, Homo sapiens
tagtccacctgcatctgggg

SEQ ID NO: 21056 - DNA, 19 bp, Homo sapiens
accttttttgcagggaaat

SEQ ID NO: 21057 - DNA, 21 bp, Homo sapiens
gtttaatgggcagattcacag

SEQ ID NO: 21058 - DNA, 19 bp, Homo sapiens
tggcagaagatccaagaac

SEQ ID NO: 21059 - DNA, 30 bp, Homo sapiens
aataataaaattaacatgaattatattcac

SEQ ID NO: 21060 - DNA, 21 bp, Homo sapiens
ccacataatcatcacgttgtg

SEQ ID NO: 21061 - DNA, 23 bp, Homo sapiens
tcattcaacatacctcatttaaa

SEQ ID NO: 21062 - DNA, 16 bp, Homo sapiens
gccaagtgctctctgc

SEQ ID NO: 21063 - DNA, 22 bp, Homo sapiens
gatctgagaattgctgggaaag

SEQ ID NO: 21064 - DNA, 20 bp, Homo sapiens
tgatgagaagtccatctttc

SEQ ID NO: 21065 - DNA, 19 bp, Homo sapiens
cccctccagagtgttgttc

SEQ ID NO: 21066 - DNA, 22 bp, Homo sapiens
tccatgagaaactacatatttg

SEQ ID NO: 21067 - DNA, 20 bp, Homo sapiens
actggctctgctggggcagc

SEQ ID NO: 21068 - DNA, 18 bp, Homo sapiens
tcatcggagagatgggga

SEQ ID NO: 21069 - DNA, 23 bp, Homo sapiens
ccttccttcagatcaggcattta

SEQ ID NO: 21070 - DNA, 22 bp, Homo sapiens
attggaagaaattgtttaatgg

SEQ ID NO: 21071 - DNA, 24 bp, Homo sapiens
agagagtatcttcttagaatacaa

SEQ ID NO: 21072 - DNA, 24 bp, Homo sapiens
ataaaagattgagtaagatgtaac

SEQ ID NO: 21073 - DNA, 23 bp, Homo sapiens
caaacttacagcactggaaaaag

SEQ ID NO: 21074 - DNA, 24 bp, Homo sapiens
ccaaacttgtctctagaatcatac

SEQ ID NO: 21075 - DNA, 24 bp, Homo sapiens
cttacaccggcataaagggcctca

SEQ ID NO: 21076 - DNA, 16 bp, Homo sapiens
cccggaggcccaacgt

SEQ ID NO: 21077 - DNA, 16 bp, Homo sapiens
ggagggtggtggggac

SEQ ID NO: 21078 - DNA, 17 bp, Homo sapiens
cccagcgctgctactgc

SEQ ID NO: 21079 - DNA, 24 bp, Homo sapiens
caagagatagaggggcggggcaga

SEQ ID NO: 21080 - DNA, 16 bp, Homo sapiens
tcctgcctctagcccc

SEQ ID NO: 21081 - DNA, 19 bp, Homo sapiens
gtccgtgaggagcagcacc

SEQ ID NO: 21082 - DNA, 19 bp, Homo sapiens
gctacctgtgcgtccctcc

SEQ ID NO: 21083 - DNA, 18 bp, Homo sapiens
ccgcccagcaccagcagt

SEQ ID NO: 21084 - DNA, 17 bp, Homo sapiens
caccggccttcaaggca

SEQ ID NO: 21085 - DNA, 19 bp, Homo sapiens
ctgccccgccggagccgac

SEQ ID NO: 21086 - DNA, 21 bp, Homo sapiens
gaaagtcctgttaatttcccc

SEQ ID NO: 21087 - DNA, 22 bp, Homo sapiens
tccaatctaagtataaaggtac

SEQ ID NO: 21088 - DNA, 21 bp, Homo sapiens
agaacaattgggagttgaatt

SEQ ID NO: 21089 - DNA, 21 bp, Homo sapiens
actgcttatttccaagtatat

SEQ ID NO: 21090 - DNA, 20 bp, Homo sapiens
acaaggaagaagtgaagaag

SEQ ID NO: 21091 - DNA, 21 bp, Homo sapiens
aggtgacctttagtaaatggg

SEQ ID NO: 21092 - DNA, 23 bp, Homo sapiens
aaaagaactggaaaattttgatc

SEQ ID NO: 21093 - DNA, 19 bp, Homo sapiens
ttcagaagcagcaacaggg

SEQ ID NO: 21094 - DNA, 20 bp, Homo sapiens
atatttcctatatgcaactt

SEQ ID NO: 21095 - DNA, 23 bp, Homo sapiens
ttctcttctaagagaatattctt

SEQ ID NO: 21096 - DNA, 22 bp, Homo sapiens
attcaggaatactttggctttc

SEQ ID NO: 21097 - DNA, 22 bp, Homo sapiens
ttcttcaaaaaatgaaggatca

SEQ ID NO: 21098 - DNA, 22 bp, Homo sapiens
acaatggaacaaagaaaaatct

SEQ ID NO: 21099 - DNA, 22 bp, Homo sapiens
tctagaaaagcagcatttgaag

SEQ ID NO: 21100 - DNA, 23 bp, Homo sapiens
cagatgaacataattaactttgc

SEQ ID NO: 21101 - DNA, 22 bp, Homo sapiens
aacagatgctgatcaactaaag

SEQ ID NO: 21102 - DNA, 23 bp, Homo sapiens
ttaggatacgtagttaaagatgg

SEQ ID NO: 21103 - DNA, 20 bp, Homo sapiens
tgaactcattcgtagtggga

SEQ ID NO: 21104 - DNA, 30 bp, Homo sapiens
gatactaaaatataattaaatattaccttc

SEQ ID NO: 21105 - DNA, 21 bp, Homo sapiens
tgttttccaggttctaggttt

SEQ ID NO: 21106 - DNA, 25 bp, Homo sapiens
gctgtgtctctagatcttttatttt

SEQ ID NO: 21107 - DNA, 18 bp, Homo sapiens
gagggaggcagcattaag

SEQ ID NO: 21108 - DNA, 19 bp, Homo sapiens
aaggaccaaagtggagctg

SEQ ID NO: 21109 - DNA, 21 bp, Homo sapiens
ccaaagcttatcaggaattcg

SEQ ID NO: 21110 - DNA, 19 bp, Homo sapiens
agctaatcatcagctggat

SEQ ID NO: 21111 - DNA, 23 bp, Homo sapiens
aaaaaaaaaaaaaaggcaaaccc

SEQ ID NO: 21112 - DNA, 22 bp, Homo sapiens
gcccatatattttatgaagcaa

SEQ ID NO: 21113 - DNA, 20 bp, Homo sapiens
ttaccaggtatggtgctttc

SEQ ID NO: 21114 - DNA, 20 bp, Homo sapiens
cgataaaggctagcttgttc

SEQ ID NO: 21115 - DNA, 21 bp, Homo sapiens
ggattaattctgctttctctt

SEQ ID NO: 21116 - DNA, 19 bp, Homo sapiens
acgggagcttcaagttctt

SEQ ID NO: 21117 - DNA, 24 bp, Homo sapiens
ggaagaaataaggacctaataagc

SEQ ID NO: 21118 - DNA, 22 bp, Homo sapiens
tgtcctcaaagattaagattct

SEQ ID NO: 21119 - DNA, 22 bp, Homo sapiens
gcaattcggagtatataaaaac

SEQ ID NO: 21120 - DNA, 25 bp, Homo sapiens
aaaatgtgtatctttataaatcctc

SEQ ID NO: 21121 - DNA, 21 bp, Homo sapiens
agtcatatgaatacatgatgt

SEQ ID NO: 21122 - DNA, 16 bp, Homo sapiens
gcctatgcgtgctttt

SEQ ID NO: 21123 - DNA, 21 bp, Homo sapiens
agcaccttcaggaacatgttt

SEQ ID NO: 21124 - DNA, 21 bp, Homo sapiens
aacaaatacaatgaagacctt

SEQ ID NO: 21125 - DNA, 24 bp, Homo sapiens
tgggtgaatggggtgcccttcagt

SEQ ID NO: 21126 - DNA, 24 bp, Homo sapiens
aaaaaaatcaaagcattactgacc

SEQ ID NO: 21127 - DNA, 18 bp, Homo sapiens
gcaaggaacatcttgcga

SEQ ID NO: 21128 - DNA, 26 bp, Homo sapiens
atacttttagaatgtatgaaaccaag

SEQ ID NO: 21129 - DNA, 20 bp, Homo sapiens
acgttacttacctgttgttc

SEQ ID NO: 21130 - DNA, 24 bp, Homo sapiens
tgaactgacttttaaatcagtgac

SEQ ID NO: 21131 - DNA, 21 bp, Homo sapiens
tctgttgcttcttttacaagc

SEQ ID NO: 21132 - DNA, 21 bp, Homo sapiens
aaaactttgactagaagaaac

SEQ ID NO: 21133 - DNA, 21 bp, Homo sapiens
caattcttttaacttggtttc

SEQ ID NO: 21134 - DNA, 20 bp, Homo sapiens
gctggaaatccattgtggtt

SEQ ID NO: 21135 - DNA, 20 bp, Homo sapiens
tgttaaaacaacaaccaaac

SEQ ID NO: 21136 - DNA, 18 bp, Homo sapiens
agagattgcagtttgcag

SEQ ID NO: 21137 - DNA, 23 bp, Homo sapiens
agtgttgtcttttaaaacaatgc

SEQ ID NO: 21138 - DNA, 20 bp, Homo sapiens
acggatagcaaagaataatt

SEQ ID NO: 21139 - DNA, 24 bp, Homo sapiens
gtttaaaactctgttcctaccttg

SEQ ID NO: 21140 - DNA, 23 bp, Homo sapiens
ttctcataaaatactaattagca

SEQ ID NO: 21141 - DNA, 19 bp, Homo sapiens
agctgtggacctctgcttt

SEQ ID NO: 21142 - DNA, 24 bp, Homo sapiens
atttttgttttccaatttgtaatg

SEQ ID NO: 21143 - DNA, 22 bp, Homo sapiens
actgtcatcttctcatttaata

SEQ ID NO: 21144 - DNA, 20 bp, Homo sapiens
aggagagatgttgaatttgt

SEQ ID NO: 21145 - DNA, 22 bp, Homo sapiens
tggaatgtgatgacagcaggca

SEQ ID NO: 21146 - DNA, 18 bp, Homo sapiens
tccaagaccaaaggcaca

SEQ ID NO: 21147 - DNA, 24 bp, Homo sapiens
ttacagacactctcatcaaggatc

SEQ ID NO: 21148 - DNA, 21 bp, Homo sapiens
tttactaggctgaattagaaa

SEQ ID NO: 21149 - DNA, 27 bp, Homo sapiens
caaaagttataatcagtcataaaagtc

SEQ ID NO: 21150 - DNA, 24 bp, Homo sapiens
tgagtttataagattatcttttat

SEQ ID NO: 21151 - DNA, 20 bp, Homo sapiens
gcaataattttttctgtgcc

SEQ ID NO: 21152 - DNA, 23 bp, Homo sapiens
atgaagactttaattctaatcat

SEQ ID NO: 21153 - DNA, 20 bp, Homo sapiens
gcccaagatgagctttaagt

SEQ ID NO: 21154 - DNA, 23 bp, Homo sapiens
ttgagcaggaaaatgaaaaattg

SEQ ID NO: 21155 - DNA, 29 bp, Homo sapiens
cctctcataagtttttttctatatttata

SEQ ID NO: 21156 - DNA, 21 bp, Homo sapiens
tgaacagttgaaaaaagcatc

SEQ ID NO: 21157 - DNA, 21 bp, Homo sapiens
agtaatgagcatatttgaaat

SEQ ID NO: 21158 - DNA, 20 bp, Homo sapiens
cccagaactggaaaaaacca

SEQ ID NO: 21159 - DNA, 24 bp, Homo sapiens
aatgatcacattaaaaaaaattac

SEQ ID NO: 21160 - DNA, 25 bp, Homo sapiens
taaaatatttgattaaagatttaac

SEQ ID NO: 21161 - DNA, 23 bp, Homo sapiens
tcactagtcaatattcctgatgc

SEQ ID NO: 21162 - DNA, 28 bp, Homo sapiens
ttaggaattattgagtataataagcctg

SEQ ID NO: 21163 - DNA, 26 bp, Homo sapiens
ttttcaactacttttttcattaaacc

SEQ ID NO: 21164 - DNA, 22 bp, Homo sapiens
atctcatagaattgttttaagg

SEQ ID NO: 21165 - DNA, 19 bp, Homo sapiens
gccatgttagaggggtatg

SEQ ID NO: 21166 - DNA, 23 bp, Homo sapiens
tgcttactgttttatattacaga

SEQ ID NO: 21167 - DNA, 21 bp, Homo sapiens
tgaaggaaatgtgtgaatttc

SEQ ID NO: 21168 - DNA, 24 bp, Homo sapiens
gaggcatatcagtacttttacaac

SEQ ID NO: 21169 - DNA, 23 bp, Homo sapiens
tggctgtagctatgttaaattat

SEQ ID NO: 21170 - DNA, 23 bp, Homo sapiens
tgaaaccaaaacaaatgtatggt

SEQ ID NO: 21171 - DNA, 20 bp, Homo sapiens
acagttgaagagattgatgg

SEQ ID NO: 21172 - DNA, 22 bp, Homo sapiens
ctgaacttctgctttttctttc

SEQ ID NO: 21173 - DNA, 19 bp, Homo sapiens
acgtcttagttcaaaatct

SEQ ID NO: 21174 - DNA, 23 bp, Homo sapiens
agatttgccaagattaaaggtga

SEQ ID NO: 21175 - DNA, 24 bp, Homo sapiens
tgctaaagagcaaatgtataaagt

SEQ ID NO: 21176 - DNA, 21 bp, Homo sapiens
aaaacttgaagttgtcatctg

SEQ ID NO: 21177 - DNA, 23 bp, Homo sapiens
tgacttcttaataagctaataaa

SEQ ID NO: 21178 - DNA, 23 bp, Homo sapiens
tgaagatttcaggaatagagtca

SEQ ID NO: 21179 - DNA, 24 bp, Homo sapiens
gcattagatttcctaataaaaaac

SEQ ID NO: 21180 - DNA, 22 bp, Homo sapiens
gtatgtcttttatggcttttat

SEQ ID NO: 21181 - DNA, 20 bp, Homo sapiens
tcaagctgaaatttcagttc

SEQ ID NO: 21182 - DNA, 22 bp, Homo sapiens
tttctcatattcctttgaggaa

SEQ ID NO: 21183 - DNA, 24 bp, Homo sapiens
aagctcctgttctctctgacaatg

SEQ ID NO: 21184 - DNA, 24 bp, Homo sapiens
cagttttcaaaggatacatattct

SEQ ID NO: 21185 - DNA, 21 bp, Homo sapiens
agttgaatttactgtattact

SEQ ID NO: 21186 - DNA, 24 bp, Homo sapiens
ctgttgtagaagatttacatttac

SEQ ID NO: 21187 - DNA, 24 bp, Homo sapiens
aagaagttgatttcactttcatgc

SEQ ID NO: 21188 - DNA, 20 bp, Homo sapiens
agagtctgtgattgttgttc

SEQ ID NO: 21189 - DNA, 20 bp, Homo sapiens
acacttactgaaggcttaga

SEQ ID NO: 21190 - DNA, 23 bp, Homo sapiens
tgaacttttctttttttatcttg

SEQ ID NO: 21191 - DNA, 23 bp, Homo sapiens
atgaagtttttcttggaggtatc

SEQ ID NO: 21192 - DNA, 21 bp, Homo sapiens
ttgttataaagtttagaaggt

SEQ ID NO: 21193 - DNA, 17 bp, Homo sapiens
agcttggtgggccctat

SEQ ID NO: 21194 - DNA, 21 bp, Homo sapiens
tgtggcatatgaagaaccagg

SEQ ID NO: 21195 - DNA, 22 bp, Homo sapiens
tggagtcagaaaaagaattgga

SEQ ID NO: 21196 - DNA, 23 bp, Homo sapiens
ccaagcttaagacaacacacatt

SEQ ID NO: 21197 - DNA, 21 bp, Homo sapiens
gaggaaactaaaaacaactgg

SEQ ID NO: 21198 - DNA, 23 bp, Homo sapiens
tacaatgggtggcacatttccac

SEQ ID NO: 21199 - DNA, 26 bp, Homo sapiens
acactgaatggtatatttcatgattc

SEQ ID NO: 21200 - DNA, 24 bp, Homo sapiens
gtcaagatttctcttttttaattc

SEQ ID NO: 21201 - DNA, 24 bp, Homo sapiens
gggtgttacaattattgtaatttg

SEQ ID NO: 21202 - DNA, 20 bp, Homo sapiens
tgatcaacagtcatgccagt

SEQ ID NO: 21203 - DNA, 24 bp, Homo sapiens
acaattatagatggattttcctgt

SEQ ID NO: 21204 - DNA, 27 bp, Homo sapiens
aaaacagattttaaagaaaataaaaag

SEQ ID NO: 21205 - DNA, 17 bp, Homo sapiens
aaagagggggaagtctt

SEQ ID NO: 21206 - DNA, 23 bp, Homo sapiens
agaccatttctcatattatcaac

SEQ ID NO: 21207 - DNA, 20 bp, Homo sapiens
gggaagaaggtaaaaagtgg

SEQ ID NO: 21208 - DNA, 25 bp, Homo sapiens
tttacacataattagttttataatg

SEQ ID NO: 21209 - DNA, 22 bp, Homo sapiens
actggtaattttcctacctcct

SEQ ID NO: 21210 - DNA, 23 bp, Homo sapiens
agtattcaactgctttgttaaag

SEQ ID NO: 21211 - DNA, 20 bp, Homo sapiens
agtttacaatttttctaggc

SEQ ID NO: 21212 - DNA, 16 bp, Homo sapiens
ttttggcttgccactt

SEQ ID NO: 21213 - DNA, 20 bp, Homo sapiens
cgtaagggatactcaacctg

SEQ ID NO: 21214 - DNA, 21 bp, Homo sapiens
ggaggaagtagacctaaaacc

SEQ ID NO: 21215 - DNA, 23 bp, Homo sapiens
gtcctcaaaattaatacagaatt

SEQ ID NO: 21216 - DNA, 21 bp, Homo sapiens
attgaagaactccaaaggaaa

SEQ ID NO: 21217 - DNA, 22 bp, Homo sapiens
tcagctatgtatttaacttact

SEQ ID NO: 21218 - DNA, 25 bp, Homo sapiens
tttatttgtaaaaatataaagttac

SEQ ID NO: 21219 - DNA, 25 bp, Homo sapiens
tcttcacataccttttctttcatag

SEQ ID NO: 21220 - DNA, 24 bp, Homo sapiens
agcttcagaaagttgctattatat

SEQ ID NO: 21221 - DNA, 22 bp, Homo sapiens
tggttctctagttttttaactt

SEQ ID NO: 21222 - DNA, 23 bp, Homo sapiens
agcagctaccagattatcttatg

SEQ ID NO: 21223 - DNA, 22 bp, Homo sapiens
tgaaaaggcaaattaaaagact

SEQ ID NO: 21224 - DNA, 21 bp, Homo sapiens
acattaatcaaagtgatttga

SEQ ID NO: 21225 - DNA, 26 bp, Homo sapiens
gaaacaaaaagcctataataaaatac

SEQ ID NO: 21226 - DNA, 21 bp, Homo sapiens
agtagaaataaactactacct

SEQ ID NO: 21227 - DNA, 24 bp, Homo sapiens
aaaacagagaaaactcactaactg

SEQ ID NO: 21228 - DNA, 20 bp, Homo sapiens
ttacctgtaatccactggtt

SEQ ID NO: 21229 - DNA, 23 bp, Homo sapiens
agttgaagatttaaatgaaaatc

SEQ ID NO: 21230 - DNA, 24 bp, Homo sapiens
cttgatcaatttcctctttctctc

SEQ ID NO: 21231 - DNA, 26 bp, Homo sapiens
ttatcattgatacttcttgaagagtc

SEQ ID NO: 21232 - DNA, 24 bp, Homo sapiens
tatttaagtcattcaaattatcag

SEQ ID NO: 21233 - DNA, 21 bp, Homo sapiens
tgtacttaaaaattcagactg

SEQ ID NO: 21234 - DNA, 26 bp, Homo sapiens
ttaagtgcttctttcaattttaaaag

SEQ ID NO: 21235 - DNA, 21 bp, Homo sapiens
agacttgacatgaatatggaa

SEQ ID NO: 21236 - DNA, 20 bp, Homo sapiens
caaatcgttgatcgacatac

SEQ ID NO: 21237 - DNA, 24 bp, Homo sapiens
gtgtgtgtctatgtctagccacca

SEQ ID NO: 21238 - DNA, 22 bp, Homo sapiens
gctgctgaagaacgtattattt

SEQ ID NO: 21239 - DNA, 23 bp, Homo sapiens
tatcatagtgaattctcttccaa

SEQ ID NO: 21240 - DNA, 25 bp, Homo sapiens
ttttggttaatttttaggcacttag

SEQ ID NO: 21241 - DNA, 22 bp, Homo sapiens
atgttcacctttagctctctag

SEQ ID NO: 21242 - DNA, 30 bp, Homo sapiens
tttattttttatatcatatattcatataaa

SEQ ID NO: 21243 - DNA, 21 bp, Homo sapiens
ggcctctttttgagaagttgc

SEQ ID NO: 21244 - DNA, 24 bp, Homo sapiens
aatatgttccattaaactcataat

SEQ ID NO: 21245 - DNA, 20 bp, Homo sapiens
cccggagttctaaaagtgcc

SEQ ID NO: 21246 - DNA, 19 bp, Homo sapiens
agccaattagccttgaagg

SEQ ID NO: 21247 - DNA, 20 bp, Homo sapiens
agataaagctcatacttttt

SEQ ID NO: 21248 - DNA, 18 bp, Homo sapiens
agcaaattcaagagctcc

SEQ ID NO: 21249 - DNA, 19 bp, Homo sapiens
tcttctctaaaagcaatct

SEQ ID NO: 21250 - DNA, 19 bp, Homo sapiens
tctggaccagtcacaaaag

SEQ ID NO: 21251 - DNA, 24 bp, Homo sapiens
ctgttgttacttactttctgttgt

SEQ ID NO: 21252 - DNA, 22 bp, Homo sapiens
gcttcaagaaaaccatgaagat

SEQ ID NO: 21253 - DNA, 20 bp, Homo sapiens
ctcattgtagttgttggagc

SEQ ID NO: 21254 - DNA, 23 bp, Homo sapiens
tgggtctcaaaaaaattaaaaat

SEQ ID NO: 21255 - DNA, 16 bp, Homo sapiens
agtcagccgagattgc

SEQ ID NO: 21256 - DNA, 22 bp, Homo sapiens
cttccgcttttacttttttcac

SEQ ID NO: 21257 - DNA, 20 bp, Homo sapiens
acatatgtaaccagcagtcc

SEQ ID NO: 21258 - DNA, 22 bp, Homo sapiens
cacaagatttggagagacaaag

SEQ ID NO: 21259 - DNA, 21 bp, Homo sapiens
cttagaacagtgcctggcata

SEQ ID NO: 21260 - DNA, 21 bp, Homo sapiens
agtagcagaacaagatgactc

SEQ ID NO: 21261 - DNA, 24 bp, Homo sapiens
tttgcctatttttacaatacattt

SEQ ID NO: 21262 - DNA, 17 bp, Homo sapiens
tctcccactccagttcc

SEQ ID NO: 21263 - DNA, 25 bp, Homo sapiens
tttacttttaattcagtgatttctc

SEQ ID NO: 21264 - DNA, 20 bp, Homo sapiens
ggcattgaattatacatgcc

SEQ ID NO: 21265 - DNA, 21 bp, Homo sapiens
agagtgaggaaagagagtcat

SEQ ID NO: 21266 - DNA, 30 bp, Homo sapiens
aatcattacattttagattagatattatat

SEQ ID NO: 21267 - DNA, 20 bp, Homo sapiens
aaatgcttgttggtaggaac

SEQ ID NO: 21268 - DNA, 17 bp, Homo sapiens
aaagtctgcatttcctg

SEQ ID NO: 21269 - DNA, 19 bp, Homo sapiens
taaattcaaacaaacggct

SEQ ID NO: 21270 - DNA, 21 bp, Homo sapiens
tcagagctatgttttcagaag

SEQ ID NO: 21271 - DNA, 19 bp, Homo sapiens
acatgaggaagaccttcat

SEQ ID NO: 21272 - DNA, 22 bp, Homo sapiens
aaaagaagagagctgaatttta

SEQ ID NO: 21273 - DNA, 24 bp, Homo sapiens
atcacaatttaagatatagtttcg

SEQ ID NO: 21274 - DNA, 21 bp, Homo sapiens
cttagaatcttacccaagccg

SEQ ID NO: 21275 - DNA, 26 bp, Homo sapiens
ctcaaaggaattttagaagattgaag

SEQ ID NO: 21276 - DNA, 23 bp, Homo sapiens
tgtagttctaatctgtgatgaag

SEQ ID NO: 21277 - DNA, 22 bp, Homo sapiens
catgcataccagtctagataca

SEQ ID NO: 21278 - DNA, 21 bp, Homo sapiens
agaagtatcaacgtcttctag

SEQ ID NO: 21279 - DNA, 27 bp, Homo sapiens
gtaacaattcttaaatagaatcatttg

SEQ ID NO: 21280 - DNA, 19 bp, Homo sapiens
tgctcatcaaaccattgca

SEQ ID NO: 21281 - DNA, 23 bp, Homo sapiens
aaaataatatttagcatttgctt

SEQ ID NO: 21282 - DNA, 18 bp, Homo sapiens
tcatagctgagctaggca

SEQ ID NO: 21283 - DNA, 24 bp, Homo sapiens
aataaaatacctctctggcttttt

SEQ ID NO: 21284 - DNA, 24 bp, Homo sapiens
tgtcaagagacaaagtaatcaatg

SEQ ID NO: 21285 - DNA, 19 bp, Homo sapiens
ttaaccttgcttgcatgtt

SEQ ID NO: 21286 - DNA, 22 bp, Homo sapiens
atcattgcagaaactaaaagag

SEQ ID NO: 21287 - DNA, 17 bp, Homo sapiens
tccatctcttttctgcc

SEQ ID NO: 21288 - DNA, 21 bp, Homo sapiens
tctaaaattcagatgaagcat

SEQ ID NO: 21289 - DNA, 20 bp, Homo sapiens
gcaatcgaagcctcagttca

SEQ ID NO: 21290 - DNA, 22 bp, Homo sapiens
tggctattgtacatatgatgtg

SEQ ID NO: 21291 - DNA, 23 bp, Homo sapiens
aaccttaaagcagattctttctc

SEQ ID NO: 21292 - DNA, 24 bp, Homo sapiens
ggctattagaaacattataggaga

SEQ ID NO: 21293 - DNA, 23 bp, Homo sapiens
gatcgctctaaggaaaattaagg

SEQ ID NO: 21294 - DNA, 21 bp, Homo sapiens
tctatgcattgccctcataaa

SEQ ID NO: 21295 - DNA, 19 bp, Homo sapiens
agctacaggatcaatccct

SEQ ID NO: 21296 - DNA, 25 bp, Homo sapiens
aatacactaatcaaaatgcaaattc

SEQ ID NO: 21297 - DNA, 20 bp, Homo sapiens
gttactctcaatgctgcaac

SEQ ID NO: 21298 - DNA, 22 bp, Homo sapiens
cccgtgtttctagaattattcg

SEQ ID NO: 21299 - DNA, 24 bp, Homo sapiens
ttgtatatttaaaatataagaggg

SEQ ID NO: 21300 - DNA, 18 bp, Homo sapiens
gcaaactagggtcaggga

SEQ ID NO: 21301 - DNA, 20 bp, Homo sapiens
agagtgttaactcacagaaa

SEQ ID NO: 21302 - DNA, 16 bp, Homo sapiens
gcggcacaaaaggtat

SEQ ID NO: 21303 - DNA, 22 bp, Homo sapiens
taaaacatagattaaacccctc

SEQ ID NO: 21304 - DNA, 21 bp, Homo sapiens
atcaaagagaagttgacctgg

SEQ ID NO: 21305 - DNA, 23 bp, Homo sapiens
attaaaattacatctgatacagg

SEQ ID NO: 21306 - DNA, 21 bp, Homo sapiens
atgtgtctgacacaaattgtc

SEQ ID NO: 21307 - DNA, 24 bp, Homo sapiens
caaacaagattaatcattcatacc

SEQ ID NO: 21308 - DNA, 24 bp, Homo sapiens
aatgtgttgtgaggattagataag

SEQ ID NO: 21309 - DNA, 21 bp, Homo sapiens
cggtcaaaaatgtctagttgg

SEQ ID NO: 21310 - DNA, 23 bp, Homo sapiens
acctctctgagtttgtatttttt

SEQ ID NO: 21311 - DNA, 21 bp, Homo sapiens
gcagtcttgaagaagaaattg

SEQ ID NO: 21312 - DNA, 18 bp, Homo sapiens
gtgagccgagatcacgcc

SEQ ID NO: 21313 - DNA, 24 bp, Homo sapiens
actggcatatgaaaatagaagaac

SEQ ID NO: 21314 - DNA, 20 bp, Homo sapiens
aaaaccttgttctgttgcac

SEQ ID NO: 21315 - DNA, 23 bp, Homo sapiens
ggaatgttatttgttaatatagc

SEQ ID NO: 21316 - DNA, 26 bp, Homo sapiens
tattcagaaattatgttattcaaata

SEQ ID NO: 21317 - DNA, 24 bp, Homo sapiens
tgtcttattttattttagaatggc

SEQ ID NO: 21318 - DNA, 19 bp, Homo sapiens
tcttgaagacgaagttctt

SEQ ID NO: 21319 - DNA, 21 bp, Homo sapiens
aaaagtctatggaaatcctaa

SEQ ID NO: 21320 - DNA, 24 bp, Homo sapiens
gttaataagcactttaaaggatac

SEQ ID NO: 21321 - DNA, 23 bp, Homo sapiens
tcaggaggctgaggctagagagt

SEQ ID NO: 21322 - DNA, 23 bp, Homo sapiens
catagaaatatggagaacaaaac

SEQ ID NO: 21323 - DNA, 18 bp, Homo sapiens
cagcctgggaaacagatc

SEQ ID NO: 21324 - DNA, 19 bp, Homo sapiens
actacaaaatgacaaactt

SEQ ID NO: 21325 - DNA, 21 bp, Homo sapiens
tgtttaccttttgggctcctt

SEQ ID NO: 21326 - DNA, 19 bp, Homo sapiens
cgacagtttagtggagctt

SEQ ID NO: 21327 - DNA, 23 bp, Homo sapiens
ttttaattccatctccaatgttt

SEQ ID NO: 21328 - DNA, 17 bp, Homo sapiens
gctcgtttggagggaag

SEQ ID NO: 21329 - DNA, 22 bp, Homo sapiens
ttttcatttcttgcattatctt

SEQ ID NO: 21330 - DNA, 19 bp, Homo sapiens
atggaggcctacaacttgc

SEQ ID NO: 21331 - DNA, 21 bp, Homo sapiens
cctgttgtgccaagggtaaag

SEQ ID NO: 21332 - DNA, 17 bp, Homo sapiens
gagtgaggctactgctc

SEQ ID NO: 21333 - DNA, 22 bp, Homo sapiens
gtttggcgcagatgttttgctc

SEQ ID NO: 21334 - DNA, 21 bp, Homo sapiens
cacagtctgatgaaaagtcgc

SEQ ID NO: 21335 - DNA, 20 bp, Homo sapiens
ttttcatcaagtttctgctc

SEQ ID NO: 21336 - DNA, 22 bp, Homo sapiens
gtgataactttcactggaaaaa

SEQ ID NO: 21337 - DNA, 23 bp, Homo sapiens
gatgtaattgactccaacttacc

SEQ ID NO: 21338 - DNA, 19 bp, Homo sapiens
atctcatgtgccactgtgt

SEQ ID NO: 21339 - DNA, 17 bp, Homo sapiens
cttggcaatgagcgact

SEQ ID NO: 21340 - DNA, 18 bp, Homo sapiens
agaatgcaactgctagac

SEQ ID NO: 21341 - DNA, 21 bp, Homo sapiens
cactccaccctgggcaacaga

SEQ ID NO: 21342 - DNA, 22 bp, Homo sapiens
gccagaagacaagttgaaattt

SEQ ID NO: 21343 - DNA, 20 bp, Homo sapiens
cccactcccaacatctaatg

SEQ ID NO: 21344 - DNA, 22 bp, Homo sapiens
aagtgtacttaattgttcctga

SEQ ID NO: 21345 - DNA, 19 bp, Homo sapiens
actgcacatacctgatagt

SEQ ID NO: 21346 - DNA, 19 bp, Homo sapiens
tggctttttgaaaaagggt

SEQ ID NO: 21347 - DNA, 19 bp, Homo sapiens
ccctagattgttgttgtgc

SEQ ID NO: 21348 - DNA, 22 bp, Homo sapiens
gaaacagtttaggaaatcctgt

SEQ ID NO: 21349 - DNA, 23 bp, Homo sapiens
atggaactaaaagttgaagtgtc

SEQ ID NO: 21350 - DNA, 24 bp, Homo sapiens
aatattacttaatcctgttcttat

SEQ ID NO: 21351 - DNA, 18 bp, Homo sapiens
aggcagtaagtgatgctg

SEQ ID NO: 21352 - DNA, 25 bp, Homo sapiens
aattgtatacctgtaattgggtttc

SEQ ID NO: 21353 - DNA, 19 bp, Homo sapiens
tggatgcacagaaggtgga

SEQ ID NO: 21354 - DNA, 23 bp, Homo sapiens
tggctaaaatgcttatatgcact

SEQ ID NO: 21355 - DNA, 23 bp, Homo sapiens
gaaaacctcaccaaaaattgatg

SEQ ID NO: 21356 - DNA, 19 bp, Homo sapiens
ctagaatccgttgcctatc

SEQ ID NO: 21357 - DNA, 20 bp, Homo sapiens
aactaaggccaagtaaagag

SEQ ID NO: 21358 - DNA, 20 bp, Homo sapiens
ctcttaacatctgttccacc

SEQ ID NO: 21359 - DNA, 20 bp, Homo sapiens
ctttcatattttttaccctc

SEQ ID NO: 21360 - DNA, 23 bp, Homo sapiens
tggaggaacgtaattttgaattg

SEQ ID NO: 21361 - DNA, 23 bp, Homo sapiens
acacaaaacataggcactatatt

SEQ ID NO: 21362 - DNA, 20 bp, Homo sapiens
ggctgaacattgtcaaaaaa

SEQ ID NO: 21363 - DNA, 23 bp, Homo sapiens
acaatgtctaccaaaactaattc

SEQ ID NO: 21364 - DNA, 21 bp, Homo sapiens
cagtgacattgtttccatttc

SEQ ID NO: 21365 - DNA, 20 bp, Homo sapiens
cctcagcaaatttggtttcc

SEQ ID NO: 21366 - DNA, 24 bp, Homo sapiens
attattgcatgtaggtaatgaatc

SEQ ID NO: 21367 - DNA, 21 bp, Homo sapiens
gaagtccgtaagtgttcatac

SEQ ID NO: 21368 - DNA, 21 bp, Homo sapiens
agcatctaaaatatctgaggt

SEQ ID NO: 21369 - DNA, 21 bp, Homo sapiens
tccttcatttccagcatagtt

SEQ ID NO: 21370 - DNA, 21 bp, Homo sapiens
tctgatggaattcagaaagct

SEQ ID NO: 21371 - DNA, 20 bp, Homo sapiens
tttgccttatccatgctaga

SEQ ID NO: 21372 - DNA, 23 bp, Homo sapiens
ctgggaacaggaaactaaattag

SEQ ID NO: 21373 - DNA, 24 bp, Homo sapiens
tgcctaagttaaattattaggcag

SEQ ID NO: 21374 - DNA, 25 bp, Homo sapiens
gtggagtctataaataaagaactgg

SEQ ID NO: 21375 - DNA, 21 bp, Homo sapiens
tctagcataaaaaaggaactt

SEQ ID NO: 21376 - DNA, 23 bp, Homo sapiens
tagtttcttagtgatatttttcc

SEQ ID NO: 21377 - DNA, 20 bp, Homo sapiens
tcagagtcataaaacttacc

SEQ ID NO: 21378 - DNA, 24 bp, Homo sapiens
ggagatgttatataaagttaagac

SEQ ID NO: 21379 - DNA, 22 bp, Homo sapiens
gtgtgaagtttttccttggtaa

SEQ ID NO: 21380 - DNA, 24 bp, Homo sapiens
gcatacatgtattatatatggagg

SEQ ID NO: 21381 - DNA, 20 bp, Homo sapiens
aaggagatgttttcacactg

SEQ ID NO: 21382 - DNA, 23 bp, Homo sapiens
gagtcacagggtaggattcatgt

SEQ ID NO: 21383 - DNA, 18 bp, Homo sapiens
cctcctaaagtgctggga

SEQ ID NO: 21384 - DNA, 23 bp, Homo sapiens
gatgtaagactggagatagagac

SEQ ID NO: 21385 - DNA, 19 bp, Homo sapiens
gggtttcaccttgttagcc

SEQ ID NO: 21386 - DNA, 21 bp, Homo sapiens
gaacaagtaacttggaacacc

SEQ ID NO: 21387 - DNA, 29 bp, Homo sapiens
aatatggataattatatctctgttaaatt

SEQ ID NO: 21388 - DNA, 23 bp, Homo sapiens
acaatgaactgactgctaagtac

SEQ ID NO: 21389 - DNA, 22 bp, Homo sapiens
tctgccaaatccccccaaacac

SEQ ID NO: 21390 - DNA, 22 bp, Homo sapiens
agctctccaaaaagttgtagat

SEQ ID NO: 21391 - DNA, 20 bp, Homo sapiens
tcacacaaacttacctccag

SEQ ID NO: 21392 - DNA, 20 bp, Homo sapiens
accagcataactcagtgtat

SEQ ID NO: 21393 - DNA, 22 bp, Homo sapiens
atctttttgcaagatgtccctg

SEQ ID NO: 21394 - DNA, 22 bp, Homo sapiens
actttaagttgtattatctttc

SEQ ID NO: 21395 - DNA, 23 bp, Homo sapiens
ttctagttcagacaaagaaacac

SEQ ID NO: 21396 - DNA, 20 bp, Homo sapiens
gcatgtttttcttacatggg

SEQ ID NO: 21397 - DNA, 22 bp, Homo sapiens
ccacaaaaatcagaagaagcaa

SEQ ID NO: 21398 - DNA, 25 bp, Homo sapiens
aaatgagaagcaaaagaatgaattg

SEQ ID NO: 21399 - DNA, 24 bp, Homo sapiens
tcaggtgatgagcattattgatac

SEQ ID NO: 21400 - DNA, 24 bp, Homo sapiens
tgaatgaaaaatcacttataaggc

SEQ ID NO: 21401 - DNA, 24 bp, Homo sapiens
tcagaaaaagcaaaataagaatca

SEQ ID NO: 21402 - DNA, 24 bp, Homo sapiens
tgaaatgaaaaaaatacttgcaga

SEQ ID NO: 21403 - DNA, 20 bp, Homo sapiens
aacttcagcctccattgaca

SEQ ID NO: 21404 - DNA, 19 bp, Homo sapiens
tatggatgtgtctttgtgc

SEQ ID NO: 21405 - DNA, 20 bp, Homo sapiens
tcgctccaattctactaagg

SEQ ID NO: 21406 - DNA, 28 bp, Homo sapiens
aatgtaagtaaaacatttttaacattag

SEQ ID NO: 21407 - DNA, 26 bp, Homo sapiens
acagtaattttcctactattttctgc

SEQ ID NO: 21408 - DNA, 23 bp, Homo sapiens
ggaaaagagaaaacttgaggatc

SEQ ID NO: 21409 - DNA, 21 bp, Homo sapiens
aagagcattgagcaaattctg

SEQ ID NO: 21410 - DNA, 20 bp, Homo sapiens
tgtttttagtgaaaaggaga

SEQ ID NO: 21411 - DNA, 25 bp, Homo sapiens
tcctactttgtacaatattgcatac

SEQ ID NO: 21412 - DNA, 26 bp, Homo sapiens
tttgcataatctgaagttatcttttc

SEQ ID NO: 21413 - DNA, 18 bp, Homo sapiens
tagcatcttgttggactt

SEQ ID NO: 21414 - DNA, 24 bp, Homo sapiens
ttgtgttttcagatactgaatagc

SEQ ID NO: 21415 - DNA, 19 bp, Homo sapiens
tctgttttccaggtctcct

SEQ ID NO: 21416 - DNA, 21 bp, Homo sapiens
agtttgttgtataaagaatac

SEQ ID NO: 21417 - DNA, 23 bp, Homo sapiens
gtagttaccagagtaaaaaaaaa

SEQ ID NO: 21418 - DNA, 22 bp, Homo sapiens
tttagaagattctcttgaagat

SEQ ID NO: 21419 - DNA, 18 bp, Homo sapiens
ttcttacgttactttcac

SEQ ID NO: 21420 - DNA, 25 bp, Homo sapiens
ttttgcattcttatttctaaaccac

SEQ ID NO: 21421 - DNA, 25 bp, Homo sapiens
gttttgctaatacctataccttagg

SEQ ID NO: 21422 - DNA, 20 bp, Homo sapiens
atgttgtcagaatatgaatt

SEQ ID NO: 21423 - DNA, 23 bp, Homo sapiens
gcaaattttctgttgtaatcttc

SEQ ID NO: 21424 - DNA, 23 bp, Homo sapiens
atatcatggaaaaatgatctgtg

SEQ ID NO: 21425 - DNA, 20 bp, Homo sapiens
gaaaagtactatctgcatgc

SEQ ID NO: 21426 - DNA, 18 bp, Homo sapiens
cctgatgggatagcacca

SEQ ID NO: 21427 - DNA, 28 bp, Homo sapiens
taaaataaaaataaaaacataaagaaac

SEQ ID NO: 21428 - DNA, 25 bp, Homo sapiens
gaaaaagaaactagtcttttacgac

SEQ ID NO: 21429 - DNA, 21 bp, Homo sapiens
acctgtaacaaaattttcaat

SEQ ID NO: 21430 - DNA, 21 bp, Homo sapiens
tgggtgtaagagttgtgattc

SEQ ID NO: 21431 - DNA, 20 bp, Homo sapiens
tgatactggcactagatggt

SEQ ID NO: 21432 - DNA, 20 bp, Homo sapiens
tatggttgaggtaaaattcc

SEQ ID NO: 21433 - DNA, 18 bp, Homo sapiens
gatccttctgattgtcgt

SEQ ID NO: 21434 - DNA, 27 bp, Homo sapiens
ataagattgaaaagaatacaaaaattc

SEQ ID NO: 21435 - DNA, 24 bp, Homo sapiens
tccacttataattttataagagaa

SEQ ID NO: 21436 - DNA, 19 bp, Homo sapiens
ctcagggaatctcggaaag

SEQ ID NO: 21437 - DNA, 22 bp, Homo sapiens
ggcattttctcataaagcattc

SEQ ID NO: 21438 - DNA, 19 bp, Homo sapiens
gagtctgcatttgaaagcc

SEQ ID NO: 21439 - DNA, 27 bp, Homo sapiens
acattcttatgtttagcattttctttt

SEQ ID NO: 21440 - DNA, 22 bp, Homo sapiens
atataatataaatttgctaggc

SEQ ID NO: 21441 - DNA, 23 bp, Homo sapiens
actgctgtgaataatttatagcc

SEQ ID NO: 21442 - DNA, 23 bp, Homo sapiens
tttatttaaagacagactgtttt

SEQ ID NO: 21443 - DNA, 18 bp, Homo sapiens
ccggtaagctgatcaact

SEQ ID NO: 21444 - DNA, 22 bp, Homo sapiens
ttggcatactttattatcatgc

SEQ ID NO: 21445 - DNA, 19 bp, Homo sapiens
cttctgcattctttgattc

SEQ ID NO: 21446 - DNA, 20 bp, Homo sapiens
tccctagccttgaaagacta

SEQ ID NO: 21447 - DNA, 22 bp, Homo sapiens
actacactttacatacagggaa

SEQ ID NO: 21448 - DNA, 20 bp, Homo sapiens
gcaagcaattaaggaaatgc

SEQ ID NO: 21449 - DNA, 19 bp, Homo sapiens
tggagatctgtacacagca

SEQ ID NO: 21450 - DNA, 22 bp, Homo sapiens
aaaagaattagttgaagaaaat

SEQ ID NO: 21451 - DNA, 21 bp, Homo sapiens
aacatgaaaaaaataacttac

SEQ ID NO: 21452 - DNA, 23 bp, Homo sapiens
agcatagtgtaaattgtgaaaaa

SEQ ID NO: 21453 - DNA, 21 bp, Homo sapiens
ttctcctcctttaacatcagg

SEQ ID NO: 21454 - DNA, 23 bp, Homo sapiens
tttacatttggatttttccaatg

SEQ ID NO: 21455 - DNA, 22 bp, Homo sapiens
tttcataccttcttcaagttgc

SEQ ID NO: 21456 - DNA, 23 bp, Homo sapiens
aaatcaactggatagtgacagac

SEQ ID NO: 21457 - DNA, 22 bp, Homo sapiens
gagaactaattgaaaaagaaag

SEQ ID NO: 21458 - DNA, 24 bp, Homo sapiens
aagcagattagaaaacagagaatg

SEQ ID NO: 21459 - DNA, 22 bp, Homo sapiens
tttgttgaaaaaaatcaatttt

SEQ ID NO: 21460 - DNA, 21 bp, Homo sapiens
ataagaacagaaaagtaaaag

SEQ ID NO: 21461 - DNA, 27 bp, Homo sapiens
gttttgttttgttatacttaattgatc

SEQ ID NO: 21462 - DNA, 22 bp, Homo sapiens
tgtcctactcctttctaaatct

SEQ ID NO: 21463 - DNA, 30 bp, Homo sapiens
ttactgtttagattttagtttatttttatg

SEQ ID NO: 21464 - DNA, 18 bp, Homo sapiens
atggcatgaacccgggag

SEQ ID NO: 21465 - DNA, 23 bp, Homo sapiens
tttctcaaggagatagaataagt

SEQ ID NO: 21466 - DNA, 22 bp, Homo sapiens
actccagcctgggagacagagc

SEQ ID NO: 21467 - DNA, 25 bp, Homo sapiens
taattctcttatatataggattaac

SEQ ID NO: 21468 - DNA, 24 bp, Homo sapiens
tttcctttactctctttgcaatac

SEQ ID NO: 21469 - DNA, 23 bp, Homo sapiens
aggttttaagaattaaagtgttg

SEQ ID NO: 21470 - DNA, 23 bp, Homo sapiens
ttgaggctcaataaatccaattt

SEQ ID NO: 21471 - DNA, 22 bp, Homo sapiens
gctatgtagaattttggaggga

SEQ ID NO: 21472 - DNA, 20 bp, Homo sapiens
aggttcaggtcctcagtggt

SEQ ID NO: 21473 - DNA, 23 bp, Homo sapiens
ctcacttatctccttcaggttat

SEQ ID NO: 21474 - DNA, 21 bp, Homo sapiens
ggaagaacgacttgatctgaa

SEQ ID NO: 21475 - DNA, 22 bp, Homo sapiens
acagcaaaaacagctaagacac

SEQ ID NO: 21476 - DNA, 22 bp, Homo sapiens
tcttggctgaactatagagaaa

SEQ ID NO: 21477 - DNA, 23 bp, Homo sapiens
tttaaaggtttagaataactgag

SEQ ID NO: 21478 - DNA, 22 bp, Homo sapiens
gcagtacagagctgaaaaccag

SEQ ID NO: 21479 - DNA, 22 bp, Homo sapiens
cttgagccatttgacgaatttt

SEQ ID NO: 21480 - DNA, 21 bp, Homo sapiens
accaaagacaatgattgattt

SEQ ID NO: 21481 - DNA, 22 bp, Homo sapiens
tctgcaaagtataaattattag

SEQ ID NO: 21482 - DNA, 20 bp, Homo sapiens
tgcagcttatttgaatgttt

SEQ ID NO: 21483 - DNA, 22 bp, Homo sapiens
acacttgcctctttcaaaagaa

SEQ ID NO: 21484 - DNA, 19 bp, Homo sapiens
agtgatactggctaagtga

SEQ ID NO: 21485 - DNA, 22 bp, Homo sapiens
agtgtttgctatttctaaattc

SEQ ID NO: 21486 - DNA, 22 bp, Homo sapiens
aattttaacttgggttacagtt

SEQ ID NO: 21487 - DNA, 19 bp, Homo sapiens
aatgaggcacttagagagc

SEQ ID NO: 21488 - DNA, 30 bp, Homo sapiens
cacttttatttgtattaaatgttttataaa

SEQ ID NO: 21489 - DNA, 21 bp, Homo sapiens
gaaatattaacaaaggaaatc

SEQ ID NO: 21490 - DNA, 24 bp, Homo sapiens
aataataaacaaaatttaaattaa

SEQ ID NO: 21491 - DNA, 21 bp, Homo sapiens
tgctgtcgttgaaataaagaa

SEQ ID NO: 21492 - DNA, 20 bp, Homo sapiens
aaacatggcttacccacacg

SEQ ID NO: 21493 - DNA, 22 bp, Homo sapiens
caagtaaaccatgttatatttt

SEQ ID NO: 21494 - DNA, 24 bp, Homo sapiens
gaaatcactgatcttcaattcaag

SEQ ID NO: 21495 - DNA, 26 bp, Homo sapiens
ataggcatatgtacattttcctttag

SEQ ID NO: 21496 - DNA, 25 bp, Homo sapiens
taatttggtttttacaattctttat

SEQ ID NO: 21497 - DNA, 23 bp, Homo sapiens
tggatttggtttataaaagcaca

SEQ ID NO: 21498 - DNA, 18 bp, Homo sapiens
tgaggctctgaagaggtt

SEQ ID NO: 21499 - DNA, 24 bp, Homo sapiens
tgaggataatctttatcaaaagat

SEQ ID NO: 21500 - DNA, 19 bp, Homo sapiens
gaggctgagagaacagctg

SEQ ID NO: 21501 - DNA, 21 bp, Homo sapiens
gcacagaatagtctgtgaatg

SEQ ID NO: 21502 - DNA, 23 bp, Homo sapiens
ccctttctcaacagactcatatg

SEQ ID NO: 21503 - DNA, 23 bp, Homo sapiens
aaaatacataccgattcataatc

SEQ ID NO: 21504 - DNA, 26 bp, Homo sapiens
ggaataagtagtcaattcaattcatg

SEQ ID NO: 21505 - DNA, 22 bp, Homo sapiens
tttccctagcatcagcctcagc

SEQ ID NO: 21506 - DNA, 22 bp, Homo sapiens
tttttttttaatggcataccac

SEQ ID NO: 21507 - DNA, 18 bp, Homo sapiens
tgtctaacgttgactgaa

SEQ ID NO: 21508 - DNA, 22 bp, Homo sapiens
ttgtattagtaaaaccaaaaca

SEQ ID NO: 21509 - DNA, 19 bp, Homo sapiens
gctccaaagaaacaaaggt

SEQ ID NO: 21510 - DNA, 26 bp, Homo sapiens
taataaatatcttgtacaattttttg

SEQ ID NO: 21511 - DNA, 25 bp, Homo sapiens
gaacaagtagaacaatatacaaaag

SEQ ID NO: 21512 - DNA, 26 bp, Homo sapiens
atattgacttgacattttattttaat

SEQ ID NO: 21513 - DNA, 27 bp, Homo sapiens
tttaaaatattttatagggtatacagg

SEQ ID NO: 21514 - DNA, 28 bp, Homo sapiens
ataactatatatttataaaaataccttt

SEQ ID NO: 21515 - DNA, 21 bp, Homo sapiens
agacgtacttttttccttacc

SEQ ID NO: 21516 - DNA, 21 bp, Homo sapiens
ataatacaagtattcttttcc

SEQ ID NO: 21517 - DNA, 23 bp, Homo sapiens
acaaaatggtaaaaggcatactt

SEQ ID NO: 21518 - DNA, 19 bp, Homo sapiens
ttgactgtctcgttcctgt

SEQ ID NO: 21519 - DNA, 23 bp, Homo sapiens
ggtagaagaaatttcaaaagaca

SEQ ID NO: 21520 - DNA, 21 bp, Homo sapiens
cataacctaagggagaaactt

SEQ ID NO: 21521 - DNA, 26 bp, Homo sapiens
tacactaggcactgatgatataataa

SEQ ID NO: 21522 - DNA, 21 bp, Homo sapiens
tttctagctaattttgtcttc

SEQ ID NO: 21523 - DNA, 26 bp, Homo sapiens
tggttgataaacaaaattctgttaag

SEQ ID NO: 21524 - DNA, 26 bp, Homo sapiens
tttatgataatgaagaatgttttatt

SEQ ID NO: 21525 - DNA, 20 bp, Homo sapiens
cagcatcaagctgagcattc

SEQ ID NO: 21526 - DNA, 24 bp, Homo sapiens
ttgctcatactttctcatttcaaa

SEQ ID NO: 21527 - DNA, 20 bp, Homo sapiens
tttcatcatctttagaagac

SEQ ID NO: 21528 - DNA, 21 bp, Homo sapiens
tgcaaaagtagaagaatggaa

SEQ ID NO: 21529 - DNA, 28 bp, Homo sapiens
tctaaccaataaataaaataaacttatg

SEQ ID NO: 21530 - DNA, 22 bp, Homo sapiens
aggagcttacagatcttctgaa

SEQ ID NO: 21531 - DNA, 28 bp, Homo sapiens
gtataagacatttaaagaaaaataagac

SEQ ID NO: 21532 - DNA, 22 bp, Homo sapiens
atatgttacatcagtttgcaac

SEQ ID NO: 21533 - DNA, 27 bp, Homo sapiens
ttatgtcaattgaaaaaaaataccttc

SEQ ID NO: 21534 - DNA, 22 bp, Homo sapiens
acgtatgtgtgtgtatgtagat

SEQ ID NO: 21535 - DNA, 26 bp, Homo sapiens
aattggatcatcttcttcattttttg

SEQ ID NO: 21536 - DNA, 23 bp, Homo sapiens
tgataaatacacatatgtaatgt

SEQ ID NO: 21537 - DNA, 21 bp, Homo sapiens
cgatcattatcaacttcaagt

SEQ ID NO: 21538 - DNA, 23 bp, Homo sapiens
atggacaaatataccaacatgac

SEQ ID NO: 21539 - DNA, 19 bp, Homo sapiens
agaatgaaagctattgtgc

SEQ ID NO: 21540 - DNA, 21 bp, Homo sapiens
agaaaaagtactttctagtgt

SEQ ID NO: 21541 - DNA, 27 bp, Homo sapiens
aaatgagaaaaaatttagaagagtctg

SEQ ID NO: 21542 - DNA, 27 bp, Homo sapiens
ataagttattctaaaagtaattcttac

SEQ ID NO: 21543 - DNA, 21 bp, Homo sapiens
aacttttttagactttaacag

SEQ ID NO: 21544 - DNA, 26 bp, Homo sapiens
tgatctattacattatctgtctgatg

SEQ ID NO: 21545 - DNA, 22 bp, Homo sapiens
gctgcgtttaattttaatttgg

SEQ ID NO: 21546 - DNA, 20 bp, Homo sapiens
tctccatttcctgtacagac

SEQ ID NO: 21547 - DNA, 21 bp, Homo sapiens
aatgccaattagtaaaggtct

SEQ ID NO: 21548 - DNA, 24 bp, Homo sapiens
cttcaattttctcattagcttctg

SEQ ID NO: 21549 - DNA, 19 bp, Homo sapiens
aaaaactatgagcttatcc

SEQ ID NO: 21550 - DNA, 22 bp, Homo sapiens
catagtgacagatttataccag

SEQ ID NO: 21551 - DNA, 25 bp, Homo sapiens
cacagaaagaaacacttttatcaag

SEQ ID NO: 21552 - DNA, 23 bp, Homo sapiens
acattgtaatgaaattaaagttt

SEQ ID NO: 21553 - DNA, 22 bp, Homo sapiens
tggttaccttcagaatgaacaa

SEQ ID NO: 21554 - DNA, 24 bp, Homo sapiens
acctgaatttcatcaagatattgg

SEQ ID NO: 21555 - DNA, 22 bp, Homo sapiens
agcactatttagaggatatgat

SEQ ID NO: 21556 - DNA, 18 bp, Homo sapiens
tcactgtcttcccctctt

SEQ ID NO: 21557 - DNA, 19 bp, Homo sapiens
ggtgaggctttaagtgtgg

SEQ ID NO: 21558 - DNA, 23 bp, Homo sapiens
tctggtagtcaataatatcctga

SEQ ID NO: 21559 - DNA, 23 bp, Homo sapiens
acctttctcatttctaattaccg

SEQ ID NO: 21560 - DNA, 23 bp, Homo sapiens
attacaaaactattcagaataac

SEQ ID NO: 21561 - DNA, 22 bp, Homo sapiens
tgcatcattttcccaaaatttt

SEQ ID NO: 21562 - DNA, 18 bp, Homo sapiens
cccaagatttcaccacac

SEQ ID NO: 21563 - DNA, 21 bp, Homo sapiens
aatattatttgttttggtaga

SEQ ID NO: 21564 - DNA, 19 bp, Homo sapiens
ggcagaaaatgaaaacagc

SEQ ID NO: 21565 - DNA, 22 bp, Homo sapiens
taaaatcagtctgaaaacatca

SEQ ID NO: 21566 - DNA, 26 bp, Homo sapiens
tgctgaattttatcttcttcttattt

SEQ ID NO: 21567 - DNA, 28 bp, Homo sapiens
tgtaaacttaggtacttattttaataag

SEQ ID NO: 21568 - DNA, 20 bp, Homo sapiens
tgtactccagcctaggcgac

SEQ ID NO: 21569 - DNA, 24 bp, Homo sapiens
ctgaggtgggagaattgcttgaac

SEQ ID NO: 21570 - DNA, 20 bp, Homo sapiens
ggagttggagaaagagaaga

SEQ ID NO: 21571 - DNA, 22 bp, Homo sapiens
accttagagataagtgtacatc

SEQ ID NO: 21572 - DNA, 23 bp, Homo sapiens
tgaaatttgccaacttgaaaaac

SEQ ID NO: 21573 - DNA, 23 bp, Homo sapiens
accaataataataaaaagccagg

SEQ ID NO: 21574 - DNA, 21 bp, Homo sapiens
actttaagatggctcagcagt

SEQ ID NO: 21575 - DNA, 22 bp, Homo sapiens
agtgctttacttgctcattaac

SEQ ID NO: 21576 - DNA, 21 bp, Homo sapiens
tgttgttgactcatttgaacc

SEQ ID NO: 21577 - DNA, 21 bp, Homo sapiens
ctctatctttttgttctaatt

SEQ ID NO: 21578 - DNA, 20 bp, Homo sapiens
tgattttaaatatctgcact

SEQ ID NO: 21579 - DNA, 15 bp, Homo sapiens
ccacctgcagactgc

SEQ ID NO: 21580 - DNA, 20 bp, Homo sapiens
tggaaaatgaactggaggta

SEQ ID NO: 21581 - DNA, 23 bp, Homo sapiens
ataggcatgtagaacatatacag

SEQ ID NO: 21582 - DNA, 22 bp, Homo sapiens
taaaacgtttttcttttttttt

SEQ ID NO: 21583 - DNA, 21 bp, Homo sapiens
ttttccagccaacaataattt

SEQ ID NO: 21584 - DNA, 29 bp, Homo sapiens
aagaattaattttgttattgaaatttatt

SEQ ID NO: 21585 - DNA, 21 bp, Homo sapiens
cctagggaatacaaaaagaca

SEQ ID NO: 21586 - DNA, 21 bp, Homo sapiens
tggatctgccatataatactt

SEQ ID NO: 21587 - DNA, 18 bp, Homo sapiens
gctggagaagaacaagca

SEQ ID NO: 21588 - DNA, 29 bp, Homo sapiens
atatttattattaaatgttatatattaaa

SEQ ID NO: 21589 - DNA, 23 bp, Homo sapiens
ttttaatgtttagatgaaagctc

SEQ ID NO: 21590 - DNA, 23 bp, Homo sapiens
tttaattttctacagtttaatga

SEQ ID NO: 21591 - DNA, 25 bp, Homo sapiens
aaaacagaatttttattttcagtgc

SEQ ID NO: 21592 - DNA, 22 bp, Homo sapiens
aactttttccaaggtgcttacc

SEQ ID NO: 21593 - DNA, 20 bp, Homo sapiens
atttactgaacgtctccatg

SEQ ID NO: 21594 - DNA, 18 bp, Homo sapiens
gctccacttcttgagctt

SEQ ID NO: 21595 - DNA, 19 bp, Homo sapiens
acaccttttcagaattact

SEQ ID NO: 21596 - DNA, 20 bp, Homo sapiens
tgcattttttagtggtgatg

SEQ ID NO: 21597 - DNA, 22 bp, Homo sapiens
gcttttctgtttacttaggtgg

SEQ ID NO: 21598 - DNA, 26 bp, Homo sapiens
ataagaacagatttttatagttccac

SEQ ID NO: 21599 - DNA, 19 bp, Homo sapiens
tgtcacaatctggaagtgt

SEQ ID NO: 21600 - DNA, 22 bp, Homo sapiens
caaaccttcattagtgactgag

SEQ ID NO: 21601 - DNA, 27 bp, Homo sapiens
tatacattaacttatgattaatttatt

SEQ ID NO: 21602 - DNA, 19 bp, Homo sapiens
agctcatttacttccacct

SEQ ID NO: 21603 - DNA, 27 bp, Homo sapiens
ggcagataatttattgatttccttatc

SEQ ID NO: 21604 - DNA, 23 bp, Homo sapiens
taaccttcaagcaaaatataaga

SEQ ID NO: 21605 - DNA, 26 bp, Homo sapiens
aaactggaaagaaataatgaaagttg

SEQ ID NO: 21606 - DNA, 29 bp, Homo sapiens
tgaaaaaaataaattcatattttattaat

SEQ ID NO: 21607 - DNA, 20 bp, Homo sapiens
cacctgttttgttacagagg

SEQ ID NO: 21608 - DNA, 22 bp, Homo sapiens
ttgaccaattaagcaccttgga

SEQ ID NO: 21609 - DNA, 21 bp, Homo sapiens
tctgcaaaaaatgtaaggtgc

SEQ ID NO: 21610 - DNA, 21 bp, Homo sapiens
aggtcatctgggtcaactttc

SEQ ID NO: 21611 - DNA, 20 bp, Homo sapiens
cttgtctattttgtggccca

SEQ ID NO: 21612 - DNA, 21 bp, Homo sapiens
agctagtcccaatcgaatcag

SEQ ID NO: 21613 - DNA, 24 bp, Homo sapiens
caaaacagcatggtactggatatt

SEQ ID NO: 21614 - DNA, 22 bp, Homo sapiens
tcatcatttagttaattgcact

SEQ ID NO: 21615 - DNA, 19 bp, Homo sapiens
tctctgtgaagctgagttt

SEQ ID NO: 21616 - DNA, 24 bp, Homo sapiens
gctcttagaaagtttgatgcactt

SEQ ID NO: 21617 - DNA, 22 bp, Homo sapiens
gaagatcttctatactctgatt

SEQ ID NO: 21618 - DNA, 26 bp, Homo sapiens
gagatttgtttgttgtctttttaatg

SEQ ID NO: 21619 - DNA, 21 bp, Homo sapiens
ctgggaaatatcttccgctta

SEQ ID NO: 21620 - DNA, 24 bp, Homo sapiens
attgattatgtttactatattctc

SEQ ID NO: 21621 - DNA, 22 bp, Homo sapiens
tgagctataagacaataagaga

SEQ ID NO: 21622 - DNA, 19 bp, Homo sapiens
gcacaggagggcttatcga

SEQ ID NO: 21623 - DNA, 23 bp, Homo sapiens
aacattcagatgctagtatacca

SEQ ID NO: 21624 - DNA, 22 bp, Homo sapiens
gcttaactaatggtagtgaaac

SEQ ID NO: 21625 - DNA, 21 bp, Homo sapiens
ttacctgctcagcaaaaaatg

SEQ ID NO: 21626 - DNA, 22 bp, Homo sapiens
gaattgcaagacaatgtttttg

SEQ ID NO: 21627 - DNA, 18 bp, Homo sapiens
tgggtccaaaacttcaat

SEQ ID NO: 21628 - DNA, 24 bp, Homo sapiens
tcatatgcatgagctgcaggaatg

SEQ ID NO: 21629 - DNA, 24 bp, Homo sapiens
agcttgggcaacaagaacaaaact

SEQ ID NO: 21630 - DNA, 18 bp, Homo sapiens
tgttccccataccttccc

SEQ ID NO: 21631 - DNA, 22 bp, Homo sapiens
aaaaacatttcatcactaacat

SEQ ID NO: 21632 - DNA, 21 bp, Homo sapiens
accacaatcataaagatgctc

SEQ ID NO: 21633 - DNA, 21 bp, Homo sapiens
tataaaacatgagaatttacc

SEQ ID NO: 21634 - DNA, 17 bp, Homo sapiens
aaccctggctctctgtt

SEQ ID NO: 21635 - DNA, 20 bp, Homo sapiens
tcgatactctcttggcagtt

SEQ ID NO: 21636 - DNA, 24 bp, Homo sapiens
ccatttaaaatatatttggaatcc

SEQ ID NO: 21637 - DNA, 17 bp, Homo sapiens
gaacagccttcactgtc

SEQ ID NO: 21638 - DNA, 20 bp, Homo sapiens
agaatatcattcccccagag

SEQ ID NO: 21639 - DNA, 22 bp, Homo sapiens
tggatgacataagaaaaaaccc

SEQ ID NO: 21640 - DNA, 24 bp, Homo sapiens
ctcactcaaccaccagctccaaca

SEQ ID NO: 21641 - DNA, 20 bp, Homo sapiens
gagaagaagaaatcgctttt

SEQ ID NO: 21642 - DNA, 19 bp, Homo sapiens
gctactcccttctttccag

SEQ ID NO: 21643 - DNA, 25 bp, Homo sapiens
tttatatccatgtaattatttaaac

SEQ ID NO: 21644 - DNA, 20 bp, Homo sapiens
ataaaaatcagtacctaggg

SEQ ID NO: 21645 - DNA, 17 bp, Homo sapiens
ttgagtccactacggtt

SEQ ID NO: 21646 - DNA, 20 bp, Homo sapiens
gagaaacgttggtacgaatc

SEQ ID NO: 21647 - DNA, 28 bp, Homo sapiens
ttaagcactgttctaaaatttatatgag

SEQ ID NO: 21648 - DNA, 24 bp, Homo sapiens
cacaaagcatataaggacaaaaac

SEQ ID NO: 21649 - DNA, 20 bp, Homo sapiens
actactacagcaaacaatct

SEQ ID NO: 21650 - DNA, 19 bp, Homo sapiens
gccaccggtcactaaaagt

SEQ ID NO: 21651 - DNA, 25 bp, Homo sapiens
tgtagaattataaaaaagccagacc

SEQ ID NO: 21652 - DNA, 18 bp, Homo sapiens
ttgccctagtttcagctc

SEQ ID NO: 21653 - DNA, 21 bp, Homo sapiens
agtatgcgtgtactacttacc

SEQ ID NO: 21654 - DNA, 19 bp, Homo sapiens
tttcttacctccagagagc

SEQ ID NO: 21655 - DNA, 24 bp, Homo sapiens
agttactggtttacagtttgttac

SEQ ID NO: 21656 - DNA, 19 bp, Homo sapiens
ggattacctgtgctactgt

SEQ ID NO: 21657 - DNA, 24 bp, Homo sapiens
gctcaaaaatgcttcctgctgata

SEQ ID NO: 21658 - DNA, 22 bp, Homo sapiens
ctgaagtgctatacagaaatgc

SEQ ID NO: 21659 - DNA, 21 bp, Homo sapiens
atcatctttttctttgttagg

SEQ ID NO: 21660 - DNA, 21 bp, Homo sapiens
cataaaagtaacccattccac

SEQ ID NO: 21661 - DNA, 27 bp, Homo sapiens
tggaagctttcacttaatttttatttt

SEQ ID NO: 21662 - DNA, 23 bp, Homo sapiens
ttggtggaatattatttagctgc

SEQ ID NO: 21663 - DNA, 23 bp, Homo sapiens
tcttaagaatcatatagtcagac

SEQ ID NO: 21664 - DNA, 20 bp, Homo sapiens
atgtgttccagacctgtcaa

SEQ ID NO: 21665 - DNA, 18 bp, Homo sapiens
accagaattcacgaactg

SEQ ID NO: 21666 - DNA, 22 bp, Homo sapiens
gaactcctgagctcagctgcct

SEQ ID NO: 21667 - DNA, 23 bp, Homo sapiens
ctgcgcctgaccagaattaaatt

SEQ ID NO: 21668 - DNA, 20 bp, Homo sapiens
tgcagtttgccttctcttat

SEQ ID NO: 21669 - DNA, 19 bp, Homo sapiens
acacctgcaaacttaacgg

SEQ ID NO: 21670 - DNA, 21 bp, Homo sapiens
cctgaagaatttgacaagacg

SEQ ID NO: 21671 - DNA, 19 bp, Homo sapiens
agacaccagattgatctgt

SEQ ID NO: 21672 - DNA, 26 bp, Homo sapiens
aaatgttagatacggtacatactttg

SEQ ID NO: 21673 - DNA, 20 bp, Homo sapiens
gctgcactgcactcatgaga

SEQ ID NO: 21674 - DNA, 24 bp, Homo sapiens
tttgatgactaatatgttaaaggt

SEQ ID NO: 21675 - DNA, 19 bp, Homo sapiens
cgcactttgtgaaatgacg

SEQ ID NO: 21676 - DNA, 21 bp, Homo sapiens
actaaggctacttgaaatgtg

SEQ ID NO: 21677 - DNA, 21 bp, Homo sapiens
tgcaagaactgcaagatatgt

SEQ ID NO: 21678 - DNA, 22 bp, Homo sapiens
tctttctcacttagataatacc

SEQ ID NO: 21679 - DNA, 21 bp, Homo sapiens
gcaagtttggattcacatcgc

SEQ ID NO: 21680 - DNA, 21 bp, Homo sapiens
tttagcatggtaaatatgcac

SEQ ID NO: 21681 - DNA, 23 bp, Homo sapiens
gggaggcaactaaaagatacatt

SEQ ID NO: 21682 - DNA, 20 bp, Homo sapiens
cacgagcaagacttacatat

SEQ ID NO: 21683 - DNA, 21 bp, Homo sapiens
ggaagaagagtcattgaagac

SEQ ID NO: 21684 - DNA, 20 bp, Homo sapiens
gtgaggcatgtgagcaggga

SEQ ID NO: 21685 - DNA, 20 bp, Homo sapiens
acaaagtacacttgtgcact

SEQ ID NO: 21686 - DNA, 22 bp, Homo sapiens
ttacatatctgagggaatctgc

SEQ ID NO: 21687 - DNA, 21 bp, Homo sapiens
catttgctcctaatgaagagt

SEQ ID NO: 21688 - DNA, 22 bp, Homo sapiens
atcagtgaagtatgccaattgt

SEQ ID NO: 21689 - DNA, 24 bp, Homo sapiens
aaaagtatttccaagatcttctcg

SEQ ID NO: 21690 - DNA, 22 bp, Homo sapiens
aatgaaaccatgtaagaaaagc

SEQ ID NO: 21691 - DNA, 18 bp, Homo sapiens
aagctgcagcattacaca

SEQ ID NO: 21692 - DNA, 23 bp, Homo sapiens
atggtagctataatgatattatc

SEQ ID NO: 21693 - DNA, 23 bp, Homo sapiens
agagaacagtagaatggaggaaa

SEQ ID NO: 21694 - DNA, 21 bp, Homo sapiens
gaggctggatgttacttacgt

SEQ ID NO: 21695 - DNA, 18 bp, Homo sapiens
gttccactggaaagccag

SEQ ID NO: 21696 - DNA, 23 bp, Homo sapiens
ggcaaaaagcccaagtaactatc

SEQ ID NO: 21697 - DNA, 18 bp, Homo sapiens
actcacacccaaaaaacc

SEQ ID NO: 21698 - DNA, 21 bp, Homo sapiens
tatgtgattttcagcattttc

SEQ ID NO: 21699 - DNA, 20 bp, Homo sapiens
tggtcatgaccagggtcaga

SEQ ID NO: 21700 - DNA, 21 bp, Homo sapiens
tcttttcttttgtcatctggc

SEQ ID NO: 21701 - DNA, 24 bp, Homo sapiens
acagcttaggagtgtctgaaagat

SEQ ID NO: 21702 - DNA, 20 bp, Homo sapiens
tcacatttccgcctatggtt

SEQ ID NO: 21703 - DNA, 18 bp, Homo sapiens
gacagtttggtggctcca

SEQ ID NO: 21704 - DNA, 18 bp, Homo sapiens
ctccaagtccaggggtgg

SEQ ID NO: 21705 - DNA, 19 bp, Homo sapiens
tctgatgaactcacagcat

SEQ ID NO: 21706 - DNA, 24 bp, Homo sapiens
cactgcaggaaaagtcaacctctg

SEQ ID NO: 21707 - DNA, 19 bp, Homo sapiens
acatggagacatcactttg

SEQ ID NO: 21708 - DNA, 19 bp, Homo sapiens
tgaacctgtttttcctgtg

SEQ ID NO: 21709 - DNA, 22 bp, Homo sapiens
tggtaaatatttcactccttcc

SEQ ID NO: 21710 - DNA, 24 bp, Homo sapiens
ttgattttttattttagcatgctg

SEQ ID NO: 21711 - DNA, 24 bp, Homo sapiens
ccgaagtttaagagacatgatgtt

SEQ ID NO: 21712 - DNA, 23 bp, Homo sapiens
acttggacaaattgtatcctttc

SEQ ID NO: 21713 - DNA, 17 bp, Homo sapiens
cagaggcggaaatcctt

SEQ ID NO: 21714 - DNA, 21 bp, Homo sapiens
attgagactcaactgggcgtc

SEQ ID NO: 21715 - DNA, 23 bp, Homo sapiens
ggagggaccaaaactgaattcta

SEQ ID NO: 21716 - DNA, 21 bp, Homo sapiens
ctcttcctgggctctccttgt

SEQ ID NO: 21717 - DNA, 24 bp, Homo sapiens
acgtttcaaaatacaaacgatgaa

SEQ ID NO: 21718 - DNA, 22 bp, Homo sapiens
tgggaatatcctcaaaaaggat

SEQ ID NO: 21719 - DNA, 18 bp, Homo sapiens
cctcataatgcacagtgg

SEQ ID NO: 21720 - DNA, 20 bp, Homo sapiens
aattttcgtaacccttctgg

SEQ ID NO: 21721 - DNA, 19 bp, Homo sapiens
gtgcctatagtgacaatcc

SEQ ID NO: 21722 - DNA, 23 bp, Homo sapiens
cctccactgttatctgcattttg

SEQ ID NO: 21723 - DNA, 18 bp, Homo sapiens
ggtgaatgcctgccttat

SEQ ID NO: 21724 - DNA, 21 bp, Homo sapiens
atgtattgtggtggcattcat

SEQ ID NO: 21725 - DNA, 24 bp, Homo sapiens
ctctagatcattttcatgaattgt

SEQ ID NO: 21726 - DNA, 19 bp, Homo sapiens
tggcaatagaagcatgtcg

SEQ ID NO: 21727 - DNA, 22 bp, Homo sapiens
ggaaaacagaggaaaaatgccc

SEQ ID NO: 21728 - DNA, 22 bp, Homo sapiens
tggctacttctgcaaagctgaa

SEQ ID NO: 21729 - DNA, 21 bp, Homo sapiens
tgatgcattccctattatttt

SEQ ID NO: 21730 - DNA, 24 bp, Homo sapiens
agtctggtttgggagaaggatcac

SEQ ID NO: 21731 - DNA, 17 bp, Homo sapiens
gtttgatgctggcgact

SEQ ID NO: 21732 - DNA, 24 bp, Homo sapiens
actagtttgaatgcaaggctggta

SEQ ID NO: 21733 - DNA, 18 bp, Homo sapiens
gtgcgaattcctggctcg

SEQ ID NO: 21734 - DNA, 23 bp, Homo sapiens
agccattcaaaactctctctacc

SEQ ID NO: 21735 - DNA, 16 bp, Homo sapiens
agttggacagccctgg

SEQ ID NO: 21736 - DNA, 22 bp, Homo sapiens
gcagtaaacataccttgcccac

SEQ ID NO: 21737 - DNA, 19 bp, Homo sapiens
tacaggaaacagtggaggg

SEQ ID NO: 21738 - DNA, 22 bp, Homo sapiens
gcttggtcacagaacttatcag

SEQ ID NO: 21739 - DNA, 19 bp, Homo sapiens
ccagtccagaactgtcttt

SEQ ID NO: 21740 - DNA, 23 bp, Homo sapiens
acactgtttattcctccaccaaa

SEQ ID NO: 21741 - DNA, 20 bp, Homo sapiens
ctcaggtgatccagcctcct

SEQ ID NO: 21742 - DNA, 24 bp, Homo sapiens
aagcactggattataagcatgagc

SEQ ID NO: 21743 - DNA, 19 bp, Homo sapiens
ggatggctattgtgacaag

SEQ ID NO: 21744 - DNA, 24 bp, Homo sapiens
taaagaatgtttggttaagtctat

SEQ ID NO: 21745 - DNA, 21 bp, Homo sapiens
gtaggtttatttgacatggcc

SEQ ID NO: 21746 - DNA, 24 bp, Homo sapiens
gaacgaattacagtttaacacatc

SEQ ID NO: 21747 - DNA, 24 bp, Homo sapiens
ggaatcttaactcaagaataaaat

SEQ ID NO: 21748 - DNA, 21 bp, Homo sapiens
caggctgaattattacaagcc

SEQ ID NO: 21749 - DNA, 21 bp, Homo sapiens
gctgagccctttgaaaatttt

SEQ ID NO: 21750 - DNA, 23 bp, Homo sapiens
cagccctcggcacagtttggcac

SEQ ID NO: 21751 - DNA, 24 bp, Homo sapiens
atttttacagtcactccaaaggcc

SEQ ID NO: 21752 - DNA, 24 bp, Homo sapiens
cgcctcccaaagtactgggattac

SEQ ID NO: 21753 - DNA, 23 bp, Homo sapiens
gctgtcccagaagtttatttacc

SEQ ID NO: 21754 - DNA, 22 bp, Homo sapiens
agtagtatgtgcactcattttc

SEQ ID NO: 21755 - DNA, 20 bp, Homo sapiens
gcctacctttagttcacctg

SEQ ID NO: 21756 - DNA, 20 bp, Homo sapiens
ttaggcactcaccttctggc

SEQ ID NO: 21757 - DNA, 24 bp, Homo sapiens
acagctctcattcactctcttttt

SEQ ID NO: 21758 - DNA, 23 bp, Homo sapiens
tccttcccaaacatgacatcatc

SEQ ID NO: 21759 - DNA, 19 bp, Homo sapiens
ctcttcattgccttccctt

SEQ ID NO: 21760 - DNA, 24 bp, Homo sapiens
gaatgtgactttcaatagcaggtg

SEQ ID NO: 21761 - DNA, 22 bp, Homo sapiens
gtacagggatttccataatttc

SEQ ID NO: 21762 - DNA, 22 bp, Homo sapiens
tagtttttgaaaggaaggaagg

SEQ ID NO: 21763 - DNA, 16 bp, Homo sapiens
cagattccatcctggc

SEQ ID NO: 21764 - DNA, 21 bp, Homo sapiens
aagggtaaagggaatgaaatt

SEQ ID NO: 21765 - DNA, 22 bp, Homo sapiens
actcattgcgatctatcgagag

SEQ ID NO: 21766 - DNA, 21 bp, Homo sapiens
agaaatcacagtcttgtaatt

SEQ ID NO: 21767 - DNA, 21 bp, Homo sapiens
gtctaagcaggatgaagacat

SEQ ID NO: 21768 - DNA, 20 bp, Homo sapiens
cgaggattgtcaaggttcag

SEQ ID NO: 21769 - DNA, 20 bp, Homo sapiens
gaggaggaggtatgacttaa

SEQ ID NO: 21770 - DNA, 24 bp, Homo sapiens
atattccgaacccatggtgcatgc

SEQ ID NO: 21771 - DNA, 21 bp, Homo sapiens
ctccatctttaaaagtctgcc

SEQ ID NO: 21772 - DNA, 19 bp, Homo sapiens
aaacgactggcagagatgt

SEQ ID NO: 21773 - DNA, 18 bp, Homo sapiens
aaccaatggcagtgactg

SEQ ID NO: 21774 - DNA, 22 bp, Homo sapiens
aacatgaccattgatggaaaag

SEQ ID NO: 21775 - DNA, 21 bp, Homo sapiens
tccccttccctcttctaatat

SEQ ID NO: 21776 - DNA, 22 bp, Homo sapiens
agcgcttctaaaactgaataac

SEQ ID NO: 21777 - DNA, 23 bp, Homo sapiens
tttgggctgtaaaagcttctgtg

SEQ ID NO: 21778 - DNA, 21 bp, Homo sapiens
tcatgtgtaatcctcttgtta

SEQ ID NO: 21779 - DNA, 22 bp, Homo sapiens
aatatgcaggacttatggtcag

SEQ ID NO: 21780 - DNA, 21 bp, Homo sapiens
ggaaagattaaagagcagagt

SEQ ID NO: 21781 - DNA, 22 bp, Homo sapiens
tcaattcttgaaaatccttggg

SEQ ID NO: 21782 - DNA, 18 bp, Homo sapiens
gccactgcgctccagcct

SEQ ID NO: 21783 - DNA, 20 bp, Homo sapiens
tgccagaaaatctttcctct

SEQ ID NO: 21784 - DNA, 20 bp, Homo sapiens
acagaatccctctttgcttc

SEQ ID NO: 21785 - DNA, 18 bp, Homo sapiens
tcctgagtggatttccac

SEQ ID NO: 21786 - DNA, 21 bp, Homo sapiens
tggaccacaagaaaagaatca

SEQ ID NO: 21787 - DNA, 23 bp, Homo sapiens
tttttccccttattttagacaac

SEQ ID NO: 21788 - DNA, 22 bp, Homo sapiens
gttcttaccagtttgactttag

SEQ ID NO: 21789 - DNA, 20 bp, Homo sapiens
ccagttttctcagctgtagg

SEQ ID NO: 21790 - DNA, 22 bp, Homo sapiens
atttgtttccttgaatgttggt

SEQ ID NO: 21791 - DNA, 23 bp, Homo sapiens
tgactgttgattcaagtaatcct

SEQ ID NO: 21792 - DNA, 22 bp, Homo sapiens
ccagggacttctttatctgttg

SEQ ID NO: 21793 - DNA, 22 bp, Homo sapiens
ctgcttaaaggaaatagcagac

SEQ ID NO: 21794 - DNA, 23 bp, Homo sapiens
agtaagctacccttagataaaaa

SEQ ID NO: 21795 - DNA, 20 bp, Homo sapiens
tcattaaaaatgtgcttgtt

SEQ ID NO: 21796 - DNA, 24 bp, Homo sapiens
tcatatttttattctagtctattg

SEQ ID NO: 21797 - DNA, 21 bp, Homo sapiens
tgctgctttaatagctctcag

SEQ ID NO: 21798 - DNA, 22 bp, Homo sapiens
gtagcccctccatactgtctgt

SEQ ID NO: 21799 - DNA, 19 bp, Homo sapiens
cttttgttgaatgggctaa

SEQ ID NO: 21800 - DNA, 20 bp, Homo sapiens
tacaatagcagctgttttgc

SEQ ID NO: 21801 - DNA, 19 bp, Homo sapiens
tgttgcaaaaccaaaaaac

SEQ ID NO: 21802 - DNA, 24 bp, Homo sapiens
agacatttaagaatgaatcatttc

SEQ ID NO: 21803 - DNA, 17 bp, Homo sapiens
ccctgaaggacctgcca

SEQ ID NO: 21804 - DNA, 24 bp, Homo sapiens
ataacatgattttaaaatatccat

SEQ ID NO: 21805 - DNA, 20 bp, Homo sapiens
agtgtttgctaacacactgc

SEQ ID NO: 21806 - DNA, 24 bp, Homo sapiens
aacaactgagacattggtagaagg

SEQ ID NO: 21807 - DNA, 22 bp, Homo sapiens
tttcaagaatgtaattgtaagc

SEQ ID NO: 21808 - DNA, 22 bp, Homo sapiens
aaaagaaggataaagagatggc

SEQ ID NO: 21809 - DNA, 24 bp, Homo sapiens
attttttatgggctataaaaaaat

SEQ ID NO: 21810 - DNA, 17 bp, Homo sapiens
aggacaagcattggcac

SEQ ID NO: 21811 - DNA, 22 bp, Homo sapiens
tgctaacttaatttttgtatcc

SEQ ID NO: 21812 - DNA, 18 bp, Homo sapiens
tgggaaaaacacaacgga

SEQ ID NO: 21813 - DNA, 21 bp, Homo sapiens
tggggtcaaaaactatatgga

SEQ ID NO: 21814 - DNA, 22 bp, Homo sapiens
gggaggtatagtagcccatatg

SEQ ID NO: 21815 - DNA, 23 bp, Homo sapiens
atgataatctgaaatttcacttc

SEQ ID NO: 21816 - DNA, 25 bp, Homo sapiens
cctggtaccatgttttactaataaa

SEQ ID NO: 21817 - DNA, 22 bp, Homo sapiens
atgcttacctcttcttagtagg

SEQ ID NO: 21818 - DNA, 22 bp, Homo sapiens
cattttctctttgttagaggtt

SEQ ID NO: 21819 - DNA, 19 bp, Homo sapiens
ggagcagaaagcaatgagg

SEQ ID NO: 21820 - DNA, 22 bp, Homo sapiens
taaaaatcagttttaccagatc

SEQ ID NO: 21821 - DNA, 19 bp, Homo sapiens
aatggcacagatcttgaac

SEQ ID NO: 21822 - DNA, 22 bp, Homo sapiens
catgctcatatgtgagatgtgc

SEQ ID NO: 21823 - DNA, 19 bp, Homo sapiens
ttggtttgccctaggcttt

SEQ ID NO: 21824 - DNA, 27 bp, Homo sapiens
tgatgtgaaaaaaaaaatcagttttac

SEQ ID NO: 21825 - DNA, 23 bp, Homo sapiens
ggtttaaaccctgtgatattctt

SEQ ID NO: 21826 - DNA, 20 bp, Homo sapiens
tgacctgctgtagttccttc

SEQ ID NO: 21827 - DNA, 21 bp, Homo sapiens
gtgataatatgtcatggttgg

SEQ ID NO: 21828 - DNA, 21 bp, Homo sapiens
cgtcaatcggcatgggcagac

SEQ ID NO: 21829 - DNA, 20 bp, Homo sapiens
aatattgctggaaagtcctt

SEQ ID NO: 21830 - DNA, 20 bp, Homo sapiens
gggcatactcctgagtaaat

SEQ ID NO: 21831 - DNA, 17 bp, Homo sapiens
tggttctggaatggagc

SEQ ID NO: 21832 - DNA, 21 bp, Homo sapiens
tacaggatggctatttcatga

SEQ ID NO: 21833 - DNA, 28 bp, Homo sapiens
aaatgaaatgaaagttatatactcttag

SEQ ID NO: 21834 - DNA, 19 bp, Homo sapiens
tcttaccgattctgaaagg

SEQ ID NO: 21835 - DNA, 20 bp, Homo sapiens
gtgaatacatgaattttgat

SEQ ID NO: 21836 - DNA, 21 bp, Homo sapiens
acaaaacatggtattgatctc

SEQ ID NO: 21837 - DNA, 16 bp, Homo sapiens
ctccgccttccagttc

SEQ ID NO: 21838 - DNA, 17 bp, Homo sapiens
agcctgggcaacatggc

SEQ ID NO: 21839 - DNA, 16 bp, Homo sapiens
tgcctgtcccacaggt

SEQ ID NO: 21840 - DNA, 22 bp, Homo sapiens
gggcatcgcggggcacggcgag

SEQ ID NO: 21841 - DNA, 16 bp, Homo sapiens
gggcgtggcgtggcgg

SEQ ID NO: 21842 - DNA, 17 bp, Homo sapiens
tactcacctctccgaac

SEQ ID NO: 21843 - DNA, 16 bp, Homo sapiens
ggcccctgaatggcgg

SEQ ID NO: 21844 - DNA, 16 bp, Homo sapiens
acgtagagcccatacc

SEQ ID NO: 21845 - DNA, 16 bp, Homo sapiens
cggagctgcaatgagc

SEQ ID NO: 21846 - DNA, 24 bp, Homo sapiens
cagattattttgacttatttgttg

SEQ ID NO: 21847 - DNA, 21 bp, Homo sapiens
gcccattttgatggtgttttt

SEQ ID NO: 21848 - DNA, 21 bp, Homo sapiens
gtttgcttttcggactttttc

SEQ ID NO: 21849 - DNA, 19 bp, Homo sapiens
cctagtgctttgcactgag

SEQ ID NO: 21850 - DNA, 23 bp, Homo sapiens
agattcacagctgacagaccaca

SEQ ID NO: 21851 - DNA, 19 bp, Homo sapiens
gctgtaagctccttgaaag

SEQ ID NO: 21852 - DNA, 21 bp, Homo sapiens
tgcaaaggattccaatttcac

SEQ ID NO: 21853 - DNA, 21 bp, Homo sapiens
gcagcttaagattttggctga

SEQ ID NO: 21854 - DNA, 24 bp, Homo sapiens
atggcttacatggaggtgcttttc

SEQ ID NO: 21855 - DNA, 18 bp, Homo sapiens
ttctcagttcgctacgac

SEQ ID NO: 21856 - DNA, 18 bp, Homo sapiens
gatggtagggaaagacag

SEQ ID NO: 21857 - DNA, 18 bp, Homo sapiens
cactcaagcctgtggttt

SEQ ID NO: 21858 - DNA, 24 bp, Homo sapiens
taaggtgtaaattacttactgtta

SEQ ID NO: 21859 - DNA, 24 bp, Homo sapiens
ttcctaaaaaagaagtaaaatgcc

SEQ ID NO: 21860 - DNA, 20 bp, Homo sapiens
ctcaatcctttgggtgtatg

SEQ ID NO: 21861 - DNA, 17 bp, Homo sapiens
attccccccgcctcagc

SEQ ID NO: 21862 - DNA, 23 bp, Homo sapiens
atgatgccaaggagaaagtaagg

SEQ ID NO: 21863 - DNA, 21 bp, Homo sapiens
agggtggagaacatgggagag

SEQ ID NO: 21864 - DNA, 17 bp, Homo sapiens
acactgtcacggagttc

SEQ ID NO: 21865 - DNA, 24 bp, Homo sapiens
agtccactctcctggccaaccacc

SEQ ID NO: 21866 - DNA, 24 bp, Homo sapiens
tacagtactgcttatcagagaagc

SEQ ID NO: 21867 - DNA, 19 bp, Homo sapiens
gctcacctttgtcaccacc

SEQ ID NO: 21868 - DNA, 20 bp, Homo sapiens
gcagcagggaatactgatcc

SEQ ID NO: 21869 - DNA, 23 bp, Homo sapiens
ccacgtaatagaggggctggaac

SEQ ID NO: 21870 - DNA, 21 bp, Homo sapiens
ctgtgatgtagaaggaatcgg

SEQ ID NO: 21871 - DNA, 21 bp, Homo sapiens
cagctccagggggagaagctt

SEQ ID NO: 21872 - DNA, 24 bp, Homo sapiens
ttttagatgagctatgaagggtag

SEQ ID NO: 21873 - DNA, 16 bp, Homo sapiens
tatggtgctgggctcc

SEQ ID NO: 21874 - DNA, 24 bp, Homo sapiens
gagttcccaggttgcatatcaaaa

SEQ ID NO: 21875 - DNA, 21 bp, Homo sapiens
ccattccagatttactggttt

SEQ ID NO: 21876 - DNA, 22 bp, Homo sapiens
taatggttttctgtacccacca

SEQ ID NO: 21877 - DNA, 21 bp, Homo sapiens
ttcatccagtcaaggtgacac

SEQ ID NO: 21878 - DNA, 18 bp, Homo sapiens
caaaggatgacaggagcc

SEQ ID NO: 21879 - DNA, 21 bp, Homo sapiens
aacaccctcatagacatagac

SEQ ID NO: 21880 - DNA, 18 bp, Homo sapiens
caaactccacagtaaacc

SEQ ID NO: 21881 - DNA, 23 bp, Homo sapiens
acctgatgaatacattgaaaagc

SEQ ID NO: 21882 - DNA, 23 bp, Homo sapiens
gtgcaaatgtaacccaccacatt

SEQ ID NO: 21883 - DNA, 22 bp, Homo sapiens
cagaacaggttctattttcccc

SEQ ID NO: 21884 - DNA, 24 bp, Homo sapiens
gagtaggaaagtttcaaagacctg

SEQ ID NO: 21885 - DNA, 24 bp, Homo sapiens
ccacccatcacctttttatggcca

SEQ ID NO: 21886 - DNA, 19 bp, Homo sapiens
gagagaagggacttactgt

SEQ ID NO: 21887 - DNA, 21 bp, Homo sapiens
gcaggaaagacttgataacac

SEQ ID NO: 21888 - DNA, 22 bp, Homo sapiens
gttttcagatcgcagctttgcc

SEQ ID NO: 21889 - DNA, 24 bp, Homo sapiens
ttcaggtgggatcatagaactgta

SEQ ID NO: 21890 - DNA, 21 bp, Homo sapiens
tctctgtgctttctgtctttc

SEQ ID NO: 21891 - DNA, 24 bp, Homo sapiens
cctgggctcaactcatttgagaaa

SEQ ID NO: 21892 - DNA, 22 bp, Homo sapiens
tgcccattcctcatgtagaaag

SEQ ID NO: 21893 - DNA, 21 bp, Homo sapiens
ccttacctgggaaaactgggc

SEQ ID NO: 21894 - DNA, 20 bp, Homo sapiens
tcacttattcctgggagagg

SEQ ID NO: 21895 - DNA, 21 bp, Homo sapiens
caacagctcatggcagatgtc

SEQ ID NO: 21896 - DNA, 18 bp, Homo sapiens
ccatgtatacccccgaac

SEQ ID NO: 21897 - DNA, 23 bp, Homo sapiens
tgtttttagtactaccagcaaac

SEQ ID NO: 21898 - DNA, 24 bp, Homo sapiens
atttcttgggtggcctggccttcc

SEQ ID NO: 21899 - DNA, 24 bp, Homo sapiens
caatgaacccaaacctcattcttg

SEQ ID NO: 21900 - DNA, 18 bp, Homo sapiens
agcttgcactggtttccg

SEQ ID NO: 21901 - DNA, 20 bp, Homo sapiens
ggaggacagtactcacggtt

SEQ ID NO: 21902 - DNA, 24 bp, Homo sapiens
aaaggtctcctagtgcctctgact

SEQ ID NO: 21903 - DNA, 22 bp, Homo sapiens
gtactgtgtgcagtggaagact

SEQ ID NO: 21904 - DNA, 18 bp, Homo sapiens
tctgcctagcgtcaaagc

SEQ ID NO: 21905 - DNA, 17 bp, Homo sapiens
caggtcggaggcggaaa

SEQ ID NO: 21906 - DNA, 20 bp, Homo sapiens
ccagctggaagacgtttctc

SEQ ID NO: 21907 - DNA, 21 bp, Homo sapiens
gaatcaacctgcatgcattcc

SEQ ID NO: 21908 - DNA, 23 bp, Homo sapiens
gtacaatcacatttttccacttc

SEQ ID NO: 21909 - DNA, 23 bp, Homo sapiens
gtcttccccttccctctcctctg

SEQ ID NO: 21910 - DNA, 18 bp, Homo sapiens
ggcacagtgttcaagact

SEQ ID NO: 21911 - DNA, 21 bp, Homo sapiens
tgatgtggacttactctgcag

SEQ ID NO: 21912 - DNA, 18 bp, Homo sapiens
tattctagtgggcagccc

SEQ ID NO: 21913 - DNA, 24 bp, Homo sapiens
ttcatggaagccacagtacttttc

SEQ ID NO: 21914 - DNA, 20 bp, Homo sapiens
cctctgctaacctaacctgc

SEQ ID NO: 21915 - DNA, 24 bp, Homo sapiens
atgggttttatacaaggacttcag

SEQ ID NO: 21916 - DNA, 21 bp, Homo sapiens
atgtatgaaattcactgtagc

SEQ ID NO: 21917 - DNA, 19 bp, Homo sapiens
ccactcgagggatgggctg

SEQ ID NO: 21918 - DNA, 24 bp, Homo sapiens
ttgcctacaactaccgccagtaag

SEQ ID NO: 21919 - DNA, 19 bp, Homo sapiens
atgcacatgaacacatgca

SEQ ID NO: 21920 - DNA, 23 bp, Homo sapiens
ttctcctagggttttaaagatcc

SEQ ID NO: 21921 - DNA, 22 bp, Homo sapiens
ccatcctcaactggatgagggc

SEQ ID NO: 21922 - DNA, 22 bp, Homo sapiens
agcattcataaaggtaccagac

SEQ ID NO: 21923 - DNA, 24 bp, Homo sapiens
cctcaacaagcaaggcagacttac

SEQ ID NO: 21924 - DNA, 19 bp, Homo sapiens
agggtataaccaagggaag

SEQ ID NO: 21925 - DNA, 23 bp, Homo sapiens
gtcttgcacggtacacaggatct

SEQ ID NO: 21926 - DNA, 22 bp, Homo sapiens
cagccctcgtgtaaataggaac

SEQ ID NO: 21927 - DNA, 20 bp, Homo sapiens
gaaccattcaagagctggac

SEQ ID NO: 21928 - DNA, 22 bp, Homo sapiens
tgctccaagtagagaaggtaag

SEQ ID NO: 21929 - DNA, 24 bp, Homo sapiens
ctttggccatgttctgccaatctg

SEQ ID NO: 21930 - DNA, 24 bp, Homo sapiens
ctcatcctacgggccatggactca

SEQ ID NO: 21931 - DNA, 16 bp, Homo sapiens
cccacttgccatcacc

SEQ ID NO: 21932 - DNA, 23 bp, Homo sapiens
aatctgattggcaaatctgtcca

SEQ ID NO: 21933 - DNA, 22 bp, Homo sapiens
gtttctaaggaaaatggagttt

SEQ ID NO: 21934 - DNA, 18 bp, Homo sapiens
tccatgagctttcacgag

SEQ ID NO: 21935 - DNA, 22 bp, Homo sapiens
ccgcaaaataacagcaatatat

SEQ ID NO: 21936 - DNA, 16 bp, Homo sapiens
gcctgcctgctctgac

SEQ ID NO: 21937 - DNA, 20 bp, Homo sapiens
tgctgttattttatgaagac

SEQ ID NO: 21938 - DNA, 23 bp, Homo sapiens
ccacattgaatctagaccttctc

SEQ ID NO: 21939 - DNA, 20 bp, Homo sapiens
cttacctgtgtctttcttct

SEQ ID NO: 21940 - DNA, 16 bp, Homo sapiens
cctcaccctccccatt

SEQ ID NO: 21941 - DNA, 24 bp, Homo sapiens
catgcctcaagatcttgatgatgt

SEQ ID NO: 21942 - DNA, 17 bp, Homo sapiens
gcgttaggttttcctgt

SEQ ID NO: 21943 - DNA, 23 bp, Homo sapiens
tgaaaaattcatactcatctttc

SEQ ID NO: 21944 - DNA, 24 bp, Homo sapiens
caacttttgcaaatttaaggactt

SEQ ID NO: 21945 - DNA, 18 bp, Homo sapiens
ggccaaagtattgcgctt

SEQ ID NO: 21946 - DNA, 23 bp, Homo sapiens
ggttaatgtaaaaacttgagctc

SEQ ID NO: 21947 - DNA, 18 bp, Homo sapiens
ctgcaatcaaaatggtgc

SEQ ID NO: 21948 - DNA, 22 bp, Homo sapiens
ttgcatctaactagaaaagaac

SEQ ID NO: 21949 - DNA, 21 bp, Homo sapiens
actgtggaaaatgttttaaac

SEQ ID NO: 21950 - DNA, 22 bp, Homo sapiens
gtagcactgacctcaaataagc

SEQ ID NO: 21951 - DNA, 20 bp, Homo sapiens
agaagaaagagttcatgctt

SEQ ID NO: 21952 - DNA, 23 bp, Homo sapiens
tgagtgagaagatcagtgatatg

SEQ ID NO: 21953 - DNA, 22 bp, Homo sapiens
tccaccacactacatatttctg

SEQ ID NO: 21954 - DNA, 24 bp, Homo sapiens
acatttgtctgttgacttcctgga

SEQ ID NO: 21955 - DNA, 16 bp, Homo sapiens
gagccagcatgtccac

SEQ ID NO: 21956 - DNA, 24 bp, Homo sapiens
tgagcttatgaaaccaggaagcac

SEQ ID NO: 21957 - DNA, 19 bp, Homo sapiens
gtgctgtttgcaaacctgc

SEQ ID NO: 21958 - DNA, 23 bp, Homo sapiens
ctaactgagcagctcaggctgcc

SEQ ID NO: 21959 - DNA, 22 bp, Homo sapiens
cgcaagagacaccctttgtaac

SEQ ID NO: 21960 - DNA, 21 bp, Homo sapiens
caagcctgggttttccaggac

SEQ ID NO: 21961 - DNA, 22 bp, Homo sapiens
aaaatgacccatcggccgagtc

SEQ ID NO: 21962 - DNA, 18 bp, Homo sapiens
gctgggacaaaaggctgc

SEQ ID NO: 21963 - DNA, 19 bp, Homo sapiens
ctagccagatatgcagcca

SEQ ID NO: 21964 - DNA, 24 bp, Homo sapiens
gaccccagaagggcaagctcctct

SEQ ID NO: 21965 - DNA, 20 bp, Homo sapiens
tcaaaccattctgtttgctt

SEQ ID NO: 21966 - DNA, 23 bp, Homo sapiens
ccactttctgtgatttcagagtc

SEQ ID NO: 21967 - DNA, 22 bp, Homo sapiens
atttatatctcctccttgtagg

SEQ ID NO: 21968 - DNA, 24 bp, Homo sapiens
attttctcttgattcccctccttc

SEQ ID NO: 21969 - DNA, 17 bp, Homo sapiens
aagtgcaagatggctgg

SEQ ID NO: 21970 - DNA, 21 bp, Homo sapiens
ccaagttcttaaacaggtact

SEQ ID NO: 21971 - DNA, 24 bp, Homo sapiens
gagcagatgttcataaacactaag

SEQ ID NO: 21972 - DNA, 19 bp, Homo sapiens
gtctcctccctttctagtg

SEQ ID NO: 21973 - DNA, 18 bp, Homo sapiens
cttcccggaccgctgcac

SEQ ID NO: 21974 - DNA, 18 bp, Homo sapiens
ctgctcaaggtttaggcc

SEQ ID NO: 21975 - DNA, 18 bp, Homo sapiens
caggttccacgcgagtac

SEQ ID NO: 21976 - DNA, 16 bp, Homo sapiens
cactgccggccgagcc

SEQ ID NO: 21977 - DNA, 19 bp, Homo sapiens
ccatctggacaagaggcac

SEQ ID NO: 21978 - DNA, 16 bp, Homo sapiens
tgtgccgccgggccga

SEQ ID NO: 21979 - DNA, 16 bp, Homo sapiens
ctcctgcccgctgtgc

SEQ ID NO: 21980 - DNA, 21 bp, Homo sapiens
caatgtccctttctcctttca

SEQ ID NO: 21981 - DNA, 24 bp, Homo sapiens
cctctccctctccctcccccctcc

SEQ ID NO: 21982 - DNA, 16 bp, Homo sapiens
ggacttcagaggagct

SEQ ID NO: 21983 - DNA, 19 bp, Homo sapiens
cctcttaccgtctctcggc

SEQ ID NO: 21984 - DNA, 16 bp, Homo sapiens
tgggtgtgccgtggca

SEQ ID NO: 21985 - DNA, 19 bp, Homo sapiens
gctgatcttgcctcccgac

SEQ ID NO: 21986 - DNA, 18 bp, Homo sapiens
ggagggaccggtgaggac

SEQ ID NO: 21987 - DNA, 17 bp, Homo sapiens
gagctggagcagtggat

SEQ ID NO: 21988 - DNA, 23 bp, Homo sapiens
actgtgaaaagagggatttattc

SEQ ID NO: 21989 - DNA, 16 bp, Homo sapiens
tccctctgctccttgg

SEQ ID NO: 21990 - DNA, 16 bp, Homo sapiens
cccggttaagcctgcc

SEQ ID NO: 21991 - DNA, 16 bp, Homo sapiens
aggtggaagggcggcg

SEQ ID NO: 21992 - DNA, 24 bp, Homo sapiens
agctggctggtgtacttgtcgatc

SEQ ID NO: 21993 - DNA, 16 bp, Homo sapiens
gtagctcctgggaggg

SEQ ID NO: 21994 - DNA, 19 bp, Homo sapiens
ctcagaaggtaccttccct

SEQ ID NO: 21995 - DNA, 22 bp, Homo sapiens
gtgcacattgcaggacgtcggc

SEQ ID NO: 21996 - DNA, 16 bp, Homo sapiens
tgggggcctgggatcc

SEQ ID NO: 21997 - DNA, 23 bp, Homo sapiens
ttgtctctgtccagcccatctca

SEQ ID NO: 21998 - DNA, 19 bp, Homo sapiens
gaacacccacaggagtttg

SEQ ID NO: 21999 - DNA, 18 bp, Homo sapiens
cttcatgagctagctggc

SEQ ID NO: 22000 - DNA, 23 bp, Homo sapiens
gcatggtgtcgccagggccgagc

SEQ ID NO: 22001 - DNA, 23 bp, Homo sapiens
tggggatcacaatttaacatgag

SEQ ID NO: 22002 - DNA, 19 bp, Homo sapiens
tcacagaaaagggccatac

SEQ ID NO: 22003 - DNA, 24 bp, Homo sapiens
aaatggagctcacagagggagagt

SEQ ID NO: 22004 - DNA, 23 bp, Homo sapiens
gggacattacattacaggcaaat

SEQ ID NO: 22005 - DNA, 18 bp, Homo sapiens
gctgagtcccgtgatggc

SEQ ID NO: 22006 - DNA, 17 bp, Homo sapiens
ctaaatggcctgccacc

SEQ ID NO: 22007 - DNA, 20 bp, Homo sapiens
tttctgaagctcttcggcaa

SEQ ID NO: 22008 - DNA, 23 bp, Homo sapiens
cccaaatggaaggctataatgtt

SEQ ID NO: 22009 - DNA, 21 bp, Homo sapiens
tacagatgaattaagttcagc

SEQ ID NO: 22010 - DNA, 22 bp, Homo sapiens
gtgcttcagggctgaggaaagt

SEQ ID NO: 22011 - DNA, 22 bp, Homo sapiens
taccttcacaggagaaaggaga

SEQ ID NO: 22012 - DNA, 22 bp, Homo sapiens
catgcgtgagagcttcacattc

SEQ ID NO: 22013 - DNA, 21 bp, Homo sapiens
gcatatcaggaaaacagaatc

SEQ ID NO: 22014 - DNA, 18 bp, Homo sapiens
caatcctgtcccccttac

SEQ ID NO: 22015 - DNA, 24 bp, Homo sapiens
agtgactgttcaaaaaagagaaag

SEQ ID NO: 22016 - DNA, 24 bp, Homo sapiens
cttcaaacacttggtcatctttgg

SEQ ID NO: 22017 - DNA, 18 bp, Homo sapiens
gggaggctgcagtgagcc

SEQ ID NO: 22018 - DNA, 21 bp, Homo sapiens
caagatttacaccaaaacggg

SEQ ID NO: 22019 - DNA, 18 bp, Homo sapiens
cgggattacaggcatgag

SEQ ID NO: 22020 - DNA, 20 bp, Homo sapiens
gatactgatgtttatttctc

SEQ ID NO: 22021 - DNA, 24 bp, Homo sapiens
tgcaaagaatttggaagaacttta

SEQ ID NO: 22022 - DNA, 18 bp, Homo sapiens
agcagcaagctgggaccc

SEQ ID NO: 22023 - DNA, 24 bp, Homo sapiens
cacctgtccccaccctacctttgt

SEQ ID NO: 22024 - DNA, 21 bp, Homo sapiens
ggaaagaaatcaacaagagat

SEQ ID NO: 22025 - DNA, 19 bp, Homo sapiens
gaggaaggctgtggcctaa

SEQ ID NO: 22026 - DNA, 16 bp, Homo sapiens
gcgtggaagacgggga

SEQ ID NO: 22027 - DNA, 23 bp, Homo sapiens
ttgccatggtgacgtcagaacag

SEQ ID NO: 22028 - DNA, 16 bp, Homo sapiens
gggtgcttcggcgccg

SEQ ID NO: 22029 - DNA, 18 bp, Homo sapiens
ggtgtgacgtacccatgg

SEQ ID NO: 22030 - DNA, 18 bp, Homo sapiens
tggctcatggctgtgtgc

SEQ ID NO: 22031 - DNA, 18 bp, Homo sapiens
cagccactcacctgtccc

SEQ ID NO: 22032 - DNA, 18 bp, Homo sapiens
ctgtgggtggagtcaccc

SEQ ID NO: 22033 - DNA, 19 bp, Homo sapiens
ggatacaggagcctggcgg

SEQ ID NO: 22034 - DNA, 24 bp, Homo sapiens
tgtcccgccctggggtgagaactg

SEQ ID NO: 22035 - DNA, 17 bp, Homo sapiens
aagacggctccccaggc

SEQ ID NO: 22036 - DNA, 20 bp, Homo sapiens
ggaagtcaaaaaagccagtt

SEQ ID NO: 22037 - DNA, 19 bp, Homo sapiens
aggggtttcaaatggttgc

SEQ ID NO: 22038 - DNA, 21 bp, Homo sapiens
tctggaatttgcatcctgctg

SEQ ID NO: 22039 - DNA, 20 bp, Homo sapiens
ctgagccttgacagctgagc

SEQ ID NO: 22040 - DNA, 16 bp, Homo sapiens
gctttgtgtcccggcc

SEQ ID NO: 22041 - DNA, 20 bp, Homo sapiens
aactgggcaatgcgttaaac

SEQ ID NO: 22042 - DNA, 19 bp, Homo sapiens
ttctccatgcagcggctgg

SEQ ID NO: 22043 - DNA, 23 bp, Homo sapiens
agcaaataacacaattcagtgac

SEQ ID NO: 22044 - DNA, 21 bp, Homo sapiens
catcttcttccgggtcatctt

SEQ ID NO: 22045 - DNA, 24 bp, Homo sapiens
atgaacactgtgaagacagtcttc

SEQ ID NO: 22046 - DNA, 21 bp, Homo sapiens
gagatcaaaacccagaaggtc

SEQ ID NO: 22047 - DNA, 19 bp, Homo sapiens
aggccaggcgttgcacttc

SEQ ID NO: 22048 - DNA, 24 bp, Homo sapiens
acatgagaagaagaggaagttcat

SEQ ID NO: 22049 - DNA, 16 bp, Homo sapiens
gtacatgaaggcggct

SEQ ID NO: 22050 - DNA, 18 bp, Homo sapiens
gcagctgatcttcgtgtc

SEQ ID NO: 22051 - DNA, 20 bp, Homo sapiens
accacagggagccttcgatg

SEQ ID NO: 22052 - DNA, 18 bp, Homo sapiens
gaacgtgtgctacgatca

SEQ ID NO: 22053 - DNA, 24 bp, Homo sapiens
ctctttatctcccccttgatgaac

SEQ ID NO: 22054 - DNA, 19 bp, Homo sapiens
aaaggaggtgtggggagat

SEQ ID NO: 22055 - DNA, 16 bp, Homo sapiens
ccactaggagcgctgg

SEQ ID NO: 22056 - DNA, 20 bp, Homo sapiens
ttggaaagatctggctcacc

SEQ ID NO: 22057 - DNA, 24 bp, Homo sapiens
tgtgggagatggggaagtagtgat

SEQ ID NO: 22058 - DNA, 16 bp, Homo sapiens
gattggggcacgctgc

SEQ ID NO: 22059 - DNA, 22 bp, Homo sapiens
agacaaagtcggcctgctcatc

SEQ ID NO: 22060 - DNA, 21 bp, Homo sapiens
gctagtgattcctgtgttgtg

SEQ ID NO: 22061 - DNA, 23 bp, Homo sapiens
tcataatgcgaaaaatgaagagg

SEQ ID NO: 22062 - DNA, 19 bp, Homo sapiens
ggaagagatttaagcatgc

SEQ ID NO: 22063 - DNA, 23 bp, Homo sapiens
tgttcacaccccccaggatcgtc

SEQ ID NO: 22064 - DNA, 24 bp, Homo sapiens
gatagcaggattggatttcatgtt

SEQ ID NO: 22065 - DNA, 19 bp, Homo sapiens
tttggctgcaggcctagag

SEQ ID NO: 22066 - DNA, 24 bp, Homo sapiens
aaacatggtgatgaggcacatgac

SEQ ID NO: 22067 - DNA, 17 bp, Homo sapiens
ctccccccagggatatg

SEQ ID NO: 22068 - DNA, 23 bp, Homo sapiens
atggtagtataatctcatgggac

SEQ ID NO: 22069 - DNA, 20 bp, Homo sapiens
cagcagaagagtgggcaaac

SEQ ID NO: 22070 - DNA, 23 bp, Homo sapiens
caactataacacagtggtattta

SEQ ID NO: 22071 - DNA, 19 bp, Homo sapiens
ccggtcagtacacatgctg

SEQ ID NO: 22072 - DNA, 22 bp, Homo sapiens
aggttttggaggaaaagaggtt

SEQ ID NO: 22073 - DNA, 22 bp, Homo sapiens
tcggtgaggccccggtacaggt

SEQ ID NO: 22074 - DNA, 18 bp, Homo sapiens
ctgcctgtgccttccttc

SEQ ID NO: 22075 - DNA, 18 bp, Homo sapiens
acccttgtagaagccacg

SEQ ID NO: 22076 - DNA, 21 bp, Homo sapiens
tcctgattgcaggaggtacag

SEQ ID NO: 22077 - DNA, 16 bp, Homo sapiens
agaagccgtagcacat

SEQ ID NO: 22078 - DNA, 24 bp, Homo sapiens
tgaaagtgaagatgcagacgttcc

SEQ ID NO: 22079 - DNA, 18 bp, Homo sapiens
tcacctcagctttgcctg

SEQ ID NO: 22080 - DNA, 18 bp, Homo sapiens
caggtgggcttccgtggc

SEQ ID NO: 22081 - DNA, 22 bp, Homo sapiens
ccaccatgtcttgccagttttg

SEQ ID NO: 22082 - DNA, 24 bp, Homo sapiens
aactctcagcctcaagccattttc

SEQ ID NO: 22083 - DNA, 23 bp, Homo sapiens
ggaaagtggctggattggacaag

SEQ ID NO: 22084 - DNA, 21 bp, Homo sapiens
ctgcattctgcagatcactga

SEQ ID NO: 22085 - DNA, 23 bp, Homo sapiens
cacctcagtctcctaagtagctg

SEQ ID NO: 22086 - DNA, 18 bp, Homo sapiens
ttcacgagctccgtgggg

SEQ ID NO: 22087 - DNA, 23 bp, Homo sapiens
ctgctttatcaccaaagtgctgt

SEQ ID NO: 22088 - DNA, 18 bp, Homo sapiens
gctcttggctatcttccc

SEQ ID NO: 22089 - DNA, 24 bp, Homo sapiens
ggtaactgtctgcttgtgtgcttt

SEQ ID NO: 22090 - DNA, 22 bp, Homo sapiens
aaaaatcatccaatacactagg

SEQ ID NO: 22091 - DNA, 20 bp, Homo sapiens
ctgcctttgctgcactggtg

SEQ ID NO: 22092 - DNA, 24 bp, Homo sapiens
agaaacaatattttggagtagata

SEQ ID NO: 22093 - DNA, 18 bp, Homo sapiens
gagatggagacatcaggg

SEQ ID NO: 22094 - DNA, 20 bp, Homo sapiens
agtcttaattcctggctctt

SEQ ID NO: 22095 - DNA, 20 bp, Homo sapiens
tgagagtccatggtagaacc

SEQ ID NO: 22096 - DNA, 24 bp, Homo sapiens
ttgatcagatctgttaattggttg

SEQ ID NO: 22097 - DNA, 18 bp, Homo sapiens
ggctcagttcatagccac

SEQ ID NO: 22098 - DNA, 22 bp, Homo sapiens
taaccgtgctatctctctgtgt

SEQ ID NO: 22099 - DNA, 21 bp, Homo sapiens
tgtcaatgcaaacacatttac

SEQ ID NO: 22100 - DNA, 24 bp, Homo sapiens
tcttaggaaagatggccccttggg

SEQ ID NO: 22101 - DNA, 21 bp, Homo sapiens
agggcagagaatccacagaaa

SEQ ID NO: 22102 - DNA, 21 bp, Homo sapiens
accaggctatttcttcttctt

SEQ ID NO: 22103 - DNA, 18 bp, Homo sapiens
ggcatccagaagcttccc

SEQ ID NO: 22104 - DNA, 24 bp, Homo sapiens
cagggagatcaaaagatgaattag

SEQ ID NO: 22105 - DNA, 24 bp, Homo sapiens
actccaccacttaacatcaaaggt

SEQ ID NO: 22106 - DNA, 24 bp, Homo sapiens
cctcaaagaattgtattctgtagc

SEQ ID NO: 22107 - DNA, 24 bp, Homo sapiens
gaacttgaattctggatttgatac

SEQ ID NO: 22108 - DNA, 23 bp, Homo sapiens
tacattgacctctggaaatgtca

SEQ ID NO: 22109 - DNA, 26 bp, Homo sapiens
ttttcacaacatttataaaggttctg

SEQ ID NO: 22110 - DNA, 19 bp, Homo sapiens
tttctctaggccctgtacc

SEQ ID NO: 22111 - DNA, 23 bp, Homo sapiens
cccgtatctcagattttaagatg

SEQ ID NO: 22112 - DNA, 19 bp, Homo sapiens
cggtatacccagtggattg

SEQ ID NO: 22113 - DNA, 24 bp, Homo sapiens
gtctggaaaacaggcaggatttat

SEQ ID NO: 22114 - DNA, 22 bp, Homo sapiens
tttcagtccagaatataaggcc

SEQ ID NO: 22115 - DNA, 23 bp, Homo sapiens
tgcatccttctatgacttgttgg

SEQ ID NO: 22116 - DNA, 23 bp, Homo sapiens
tgctatattcgtaggccaaaaag

SEQ ID NO: 22117 - DNA, 21 bp, Homo sapiens
ctatgcagctgcgtgggtatc

SEQ ID NO: 22118 - DNA, 18 bp, Homo sapiens
tcaggcccaccaagacac

SEQ ID NO: 22119 - DNA, 24 bp, Homo sapiens
cgcccttttatttgctaggaataa

SEQ ID NO: 22120 - DNA, 21 bp, Homo sapiens
acactggtcttgtactccaag

SEQ ID NO: 22121 - DNA, 19 bp, Homo sapiens
ttccctgccaatggagcac

SEQ ID NO: 22122 - DNA, 22 bp, Homo sapiens
taagatgtagggtagaagggaa

SEQ ID NO: 22123 - DNA, 21 bp, Homo sapiens
ccagttggaagcatactgaag

SEQ ID NO: 22124 - DNA, 16 bp, Homo sapiens
ctgcagggcaggatga

SEQ ID NO: 22125 - DNA, 16 bp, Homo sapiens
cagcagacgatgatgg

SEQ ID NO: 22126 - DNA, 24 bp, Homo sapiens
ggaggctagctcagcccatcctgc

SEQ ID NO: 22127 - DNA, 17 bp, Homo sapiens
ctatgtcagccaggtgt

SEQ ID NO: 22128 - DNA, 21 bp, Homo sapiens
aagtccctgccccggcccgcc

SEQ ID NO: 22129 - DNA, 17 bp, Homo sapiens
gcatggatgacaggtgg

SEQ ID NO: 22130 - DNA, 19 bp, Homo sapiens
gagcagagaccacttgtcc

SEQ ID NO: 22131 - DNA, 16 bp, Homo sapiens
ggcacaggcgcatggc

SEQ ID NO: 22132 - DNA, 16 bp, Homo sapiens
tcagggaggacagcga

SEQ ID NO: 22133 - DNA, 21 bp, Homo sapiens
ttctagaatggctcagatgct

SEQ ID NO: 22134 - DNA, 17 bp, Homo sapiens
gggggagtcccgccacc

SEQ ID NO: 22135 - DNA, 24 bp, Homo sapiens
gttattaaaagatggatgagaggc

SEQ ID NO: 22136 - DNA, 21 bp, Homo sapiens
ccgtcaggggcttcatgtggc

SEQ ID NO: 22137 - DNA, 21 bp, Homo sapiens
accatagggagtttaatgtcc

SEQ ID NO: 22138 - DNA, 17 bp, Homo sapiens
accaggctccatgtggg

SEQ ID NO: 22139 - DNA, 16 bp, Homo sapiens
ccctggatgggctcag

SEQ ID NO: 22140 - DNA, 24 bp, Homo sapiens
atgagaggcaagttccactgtgct

SEQ ID NO: 22141 - DNA, 22 bp, Homo sapiens
aggtgtgagtgcgagttctttc

SEQ ID NO: 22142 - DNA, 18 bp, Homo sapiens
atgctccacctgagggga

SEQ ID NO: 22143 - DNA, 17 bp, Homo sapiens
ctgagggtggggcagcc

SEQ ID NO: 22144 - DNA, 18 bp, Homo sapiens
agaggaggctgccatggc

SEQ ID NO: 22145 - DNA, 19 bp, Homo sapiens
tgtgggcaagatccattgg

SEQ ID NO: 22146 - DNA, 19 bp, Homo sapiens
tggttgggatacccattgc

SEQ ID NO: 22147 - DNA, 21 bp, Homo sapiens
aaaaaaaaaaaaacagccttt

SEQ ID NO: 22148 - DNA, 19 bp, Homo sapiens
cctttccaagaggactgtc

SEQ ID NO: 22149 - DNA, 19 bp, Homo sapiens
actaaccccagcaggaacc

SEQ ID NO: 22150 - DNA, 19 bp, Homo sapiens
tcactgtgtgctcctctcc

SEQ ID NO: 22151 - DNA, 16 bp, Homo sapiens
taagagctgcctacct

SEQ ID NO: 22152 - DNA, 21 bp, Homo sapiens
tatcagagtgagcgtggctgc

SEQ ID NO: 22153 - DNA, 24 bp, Homo sapiens
caggaccaggttgatgcgtatcct

SEQ ID NO: 22154 - DNA, 24 bp, Homo sapiens
gacatgggtgtggccattggcacc

SEQ ID NO: 22155 - DNA, 22 bp, Homo sapiens
ccagcaaatcattctgatggag

SEQ ID NO: 22156 - DNA, 19 bp, Homo sapiens
aagaaagtcgccatggtgg

SEQ ID NO: 22157 - DNA, 19 bp, Homo sapiens
cctcccagcacccacagcc

SEQ ID NO: 22158 - DNA, 23 bp, Homo sapiens
ttgcagaggtgctgccttcgcac

SEQ ID NO: 22159 - DNA, 17 bp, Homo sapiens
gatggccacatccgtgc

SEQ ID NO: 22160 - DNA, 22 bp, Homo sapiens
ataccttttgccaacactaggc

SEQ ID NO: 22161 - DNA, 19 bp, Homo sapiens
gccggggagtcattgaccc

SEQ ID NO: 22162 - DNA, 16 bp, Homo sapiens
cccagaggccgagggc

SEQ ID NO: 22163 - DNA, 22 bp, Homo sapiens
ctcctggaccttggccaccttg

SEQ ID NO: 22164 - DNA, 19 bp, Homo sapiens
ggataaactggccctgtga

SEQ ID NO: 22165 - DNA, 24 bp, Homo sapiens
cactacatggccacagaatgaaac

SEQ ID NO: 22166 - DNA, 16 bp, Homo sapiens
ggtgtggacgtggttc

SEQ ID NO: 22167 - DNA, 17 bp, Homo sapiens
ctcagtgctgggccaac

SEQ ID NO: 22168 - DNA, 19 bp, Homo sapiens
ggatgatcgcaatcgcaga

SEQ ID NO: 22169 - DNA, 24 bp, Homo sapiens
ttacacagtttgcaacattaaagg

SEQ ID NO: 22170 - DNA, 16 bp, Homo sapiens
ccccaacttgtgtagc

SEQ ID NO: 22171 - DNA, 21 bp, Homo sapiens
gttgtcccccgtgatcagaac

SEQ ID NO: 22172 - DNA, 24 bp, Homo sapiens
gttttgttttttgcacataatatt

SEQ ID NO: 22173 - DNA, 18 bp, Homo sapiens
gggcagcctcctgcttga

SEQ ID NO: 22174 - DNA, 21 bp, Homo sapiens
catccgtaaatgcatgtactt

SEQ ID NO: 22175 - DNA, 17 bp, Homo sapiens
acagacagccatcctgg

SEQ ID NO: 22176 - DNA, 24 bp, Homo sapiens
aacaggcctgaaattaagagagga

SEQ ID NO: 22177 - DNA, 17 bp, Homo sapiens
ggcgcaacggtttaacc

SEQ ID NO: 22178 - DNA, 23 bp, Homo sapiens
actcttttgcctgatatctgcag

SEQ ID NO: 22179 - DNA, 20 bp, Homo sapiens
cctcttttgaatagatgcag

SEQ ID NO: 22180 - DNA, 20 bp, Homo sapiens
aagataccgtcaatagccac

SEQ ID NO: 22181 - DNA, 21 bp, Homo sapiens
ggattgcatggtttttagttc

SEQ ID NO: 22182 - DNA, 20 bp, Homo sapiens
cactgacatcgctagaaatg

SEQ ID NO: 22183 - DNA, 22 bp, Homo sapiens
caagaggtgcttacaaggttac

SEQ ID NO: 22184 - DNA, 22 bp, Homo sapiens
aatcagcacagagaaggtctgg

SEQ ID NO: 22185 - DNA, 24 bp, Homo sapiens
aactttcctgggtgtggggaggca

SEQ ID NO: 22186 - DNA, 16 bp, Homo sapiens
tggcccacagtgagcg

SEQ ID NO: 22187 - DNA, 20 bp, Homo sapiens
atcactgctgggcgtggtgc

SEQ ID NO: 22188 - DNA, 18 bp, Homo sapiens
cggacttccaggcagtgc

SEQ ID NO: 22189 - DNA, 24 bp, Homo sapiens
tgcagagacaaaagccagcaatac

SEQ ID NO: 22190 - DNA, 24 bp, Homo sapiens
cagtttcctcttcctctctttcca

SEQ ID NO: 22191 - DNA, 18 bp, Homo sapiens
gccggtgcactcaaaggg

SEQ ID NO: 22192 - DNA, 23 bp, Homo sapiens
accttcaccctgtgtccctgtcc

SEQ ID NO: 22193 - DNA, 22 bp, Homo sapiens
ctgactttgcacccaattccac

SEQ ID NO: 22194 - DNA, 18 bp, Homo sapiens
ctccctcccctcctttct

SEQ ID NO: 22195 - DNA, 23 bp, Homo sapiens
accaaatactgtaaagaggtacg

SEQ ID NO: 22196 - DNA, 24 bp, Homo sapiens
tatctccgcctgctgcagaagggc

SEQ ID NO: 22197 - DNA, 19 bp, Homo sapiens
gttctggctgtggtgggga

SEQ ID NO: 22198 - DNA, 18 bp, Homo sapiens
ctcgagggcagctaggag

SEQ ID NO: 22199 - DNA, 21 bp, Homo sapiens
ccagggtcatgcgggtgctcc

SEQ ID NO: 22200 - DNA, 16 bp, Homo sapiens
gggccacgcccaagtc

SEQ ID NO: 22201 - DNA, 24 bp, Homo sapiens
tggttgtttttggcagataaagac

SEQ ID NO: 22202 - DNA, 22 bp, Homo sapiens
aaggggtgttcactgctggcct

SEQ ID NO: 22203 - DNA, 24 bp, Homo sapiens
gaagttctgcctcaggagtgtgac

SEQ ID NO: 22204 - DNA, 20 bp, Homo sapiens
gccacatcccccagcaggag

SEQ ID NO: 22205 - DNA, 21 bp, Homo sapiens
gaggatcacgttaggaagctg

SEQ ID NO: 22206 - DNA, 22 bp, Homo sapiens
gtgccagtcttgtcaaacatca

SEQ ID NO: 22207 - DNA, 19 bp, Homo sapiens
atcaagggaggcaagcccc

SEQ ID NO: 22208 - DNA, 23 bp, Homo sapiens
ttgacttcctattctatgtaatt

SEQ ID NO: 22209 - DNA, 16 bp, Homo sapiens
cccacggctgtcatgg

SEQ ID NO: 22210 - DNA, 24 bp, Homo sapiens
aatgtgaaatagtaaacagatact

SEQ ID NO: 22211 - DNA, 19 bp, Homo sapiens
gctttccagacgtccatca

SEQ ID NO: 22212 - DNA, 19 bp, Homo sapiens
tgaccttgtgcgccatctc

SEQ ID NO: 22213 - DNA, 24 bp, Homo sapiens
tgactctgtcctgttttcagaacc

SEQ ID NO: 22214 - DNA, 17 bp, Homo sapiens
cccggtgcccaccatga

SEQ ID NO: 22215 - DNA, 24 bp, Homo sapiens
cctgaaatgtccttatgtgattag

SEQ ID NO: 22216 - DNA, 17 bp, Homo sapiens
caatgcacagcaccgtg

SEQ ID NO: 22217 - DNA, 20 bp, Homo sapiens
ggaataccatctgtttccgg

SEQ ID NO: 22218 - DNA, 22 bp, Homo sapiens
gggagatgtgcttgttggggtt

SEQ ID NO: 22219 - DNA, 20 bp, Homo sapiens
cgattttggtgttgttcaga

SEQ ID NO: 22220 - DNA, 22 bp, Homo sapiens
gagaagcaagcaaataaaatgt

SEQ ID NO: 22221 - DNA, 24 bp, Homo sapiens
tttgtcccatttatcatcatcatg

SEQ ID NO: 22222 - DNA, 24 bp, Homo sapiens
atgaaagaacaggatcaatgtcag

SEQ ID NO: 22223 - DNA, 21 bp, Homo sapiens
tggtgttttattttcataggc

SEQ ID NO: 22224 - DNA, 24 bp, Homo sapiens
ggcattcaacttacaggaaagtat

SEQ ID NO: 22225 - DNA, 19 bp, Homo sapiens
tttatccatgcttgtggtg

SEQ ID NO: 22226 - DNA, 21 bp, Homo sapiens
cataccaccaacgtcaaagtt

SEQ ID NO: 22227 - DNA, 22 bp, Homo sapiens
aatcagacagttttattgagta

SEQ ID NO: 22228 - DNA, 19 bp, Homo sapiens
tcagccagctgctgaatgg

SEQ ID NO: 22229 - DNA, 22 bp, Homo sapiens
acctatgaagaaataaaacacc

SEQ ID NO: 22230 - DNA, 20 bp, Homo sapiens
accactttggctcagattgt

SEQ ID NO: 22231 - DNA, 24 bp, Homo sapiens
tttaaccacatttactaatcaatc

SEQ ID NO: 22232 - DNA, 22 bp, Homo sapiens
gggtctataaatgcacatggct

SEQ ID NO: 22233 - DNA, 24 bp, Homo sapiens
tcttcacataatttctaaaacgag

SEQ ID NO: 22234 - DNA, 19 bp, Homo sapiens
tcctacgtctaggagaagc

SEQ ID NO: 22235 - DNA, 24 bp, Homo sapiens
gacatctgagcctcttccaccagt

SEQ ID NO: 22236 - DNA, 24 bp, Homo sapiens
aggatatcatagcagctgtcaggt

SEQ ID NO: 22237 - DNA, 23 bp, Homo sapiens
cgtgggtagctttaatgagcaca

SEQ ID NO: 22238 - DNA, 22 bp, Homo sapiens
gctgatgagtccctcatcacag

SEQ ID NO: 22239 - DNA, 24 bp, Homo sapiens
cttccgggtttcttagtgactggc

SEQ ID NO: 22240 - DNA, 20 bp, Homo sapiens
ggtggtccctgggggaaagt

SEQ ID NO: 22241 - DNA, 24 bp, Homo sapiens
acttgctcagccccatccagcact

SEQ ID NO: 22242 - DNA, 19 bp, Homo sapiens
taagtggcgtttgttgcag

SEQ ID NO: 22243 - DNA, 24 bp, Homo sapiens
acatgaaacaagccatctcacctg

SEQ ID NO: 22244 - DNA, 23 bp, Homo sapiens
attgtaacagctggcctagaacc

SEQ ID NO: 22245 - DNA, 20 bp, Homo sapiens
ctttcccatccactggaaac

SEQ ID NO: 22246 - DNA, 23 bp, Homo sapiens
atctgtaaatgaacagatcaaat

SEQ ID NO: 22247 - DNA, 18 bp, Homo sapiens
cagctccatggggacttg

SEQ ID NO: 22248 - DNA, 22 bp, Homo sapiens
ccttggtgaggacaatttaatc

SEQ ID NO: 22249 - DNA, 23 bp, Homo sapiens
attgagagtggtgatcttactgt

SEQ ID NO: 22250 - DNA, 16 bp, Homo sapiens
gaagccctggctaaac

SEQ ID NO: 22251 - DNA, 20 bp, Homo sapiens
acaacatgggcatctgatgc

SEQ ID NO: 22252 - DNA, 17 bp, Homo sapiens
tggacaggtctgctttc

SEQ ID NO: 22253 - DNA, 23 bp, Homo sapiens
tttgataaccataactcacctga

SEQ ID NO: 22254 - DNA, 17 bp, Homo sapiens
gctgtttctctcgcacc

SEQ ID NO: 22255 - DNA, 22 bp, Homo sapiens
gcttggagagacatgagtttag

SEQ ID NO: 22256 - DNA, 18 bp, Homo sapiens
tcattgccctgggccggt

SEQ ID NO: 22257 - DNA, 23 bp, Homo sapiens
gtttcctatttctttaagtctgt

SEQ ID NO: 22258 - DNA, 17 bp, Homo sapiens
gctgagaaggcggagag

SEQ ID NO: 22259 - DNA, 24 bp, Homo sapiens
tcagaggaagtgagatttgtttac

SEQ ID NO: 22260 - DNA, 21 bp, Homo sapiens
tcgtcctggccacaagcattg

SEQ ID NO: 22261 - DNA, 18 bp, Homo sapiens
tttgccaagtgttccagc

SEQ ID NO: 22262 - DNA, 20 bp, Homo sapiens
ctacgttcaggcctacaaat

SEQ ID NO: 22263 - DNA, 20 bp, Homo sapiens
tgtcgaagaatgtcacaggg

SEQ ID NO: 22264 - DNA, 22 bp, Homo sapiens
ctcctccctacttgctggcagc

SEQ ID NO: 22265 - DNA, 24 bp, Homo sapiens
ggatgaccagagaataaacataag

SEQ ID NO: 22266 - DNA, 20 bp, Homo sapiens
aaagctagaggctttgccat

SEQ ID NO: 22267 - DNA, 24 bp, Homo sapiens
ttggctgacctgtgtctcagagat

SEQ ID NO: 22268 - DNA, 23 bp, Homo sapiens
cctctgaatgggaaagtatattt

SEQ ID NO: 22269 - DNA, 24 bp, Homo sapiens
cattctaaatctcatcttctttat

SEQ ID NO: 22270 - DNA, 21 bp, Homo sapiens
caggaaagctgcaataaagtg

SEQ ID NO: 22271 - DNA, 16 bp, Homo sapiens
cccaccagtccatggt

SEQ ID NO: 22272 - DNA, 19 bp, Homo sapiens
agaatatctgagggccaca

SEQ ID NO: 22273 - DNA, 17 bp, Homo sapiens
cctggtgtttggcatcc

SEQ ID NO: 22274 - DNA, 22 bp, Homo sapiens
atatacctggacaaaggtacac

SEQ ID NO: 22275 - DNA, 23 bp, Homo sapiens
cagcatctgatatatctgtgttg

SEQ ID NO: 22276 - DNA, 21 bp, Homo sapiens
aatgatgttgtggtccaggac

SEQ ID NO: 22277 - DNA, 19 bp, Homo sapiens
acaaaggcaggtcttaaac

SEQ ID NO: 22278 - DNA, 24 bp, Homo sapiens
tatagatcattaaggccatgacag

SEQ ID NO: 22279 - DNA, 20 bp, Homo sapiens
cagagagagagagttcttac

SEQ ID NO: 22280 - DNA, 18 bp, Homo sapiens
gcactgtttcagagggtt

SEQ ID NO: 22281 - DNA, 16 bp, Homo sapiens
catgcttccctggccc

SEQ ID NO: 22282 - DNA, 20 bp, Homo sapiens
catgggaagacaagaccagc

SEQ ID NO: 22283 - DNA, 20 bp, Homo sapiens
accaagtaccttcctccttt

SEQ ID NO: 22284 - DNA, 23 bp, Homo sapiens
agctggagtttatcttttgtgtt

SEQ ID NO: 22285 - DNA, 24 bp, Homo sapiens
actgaggcacttttagattcactt

SEQ ID NO: 22286 - DNA, 22 bp, Homo sapiens
aagtgatgagcgttggggtttc

SEQ ID NO: 22287 - DNA, 21 bp, Homo sapiens
gtttgtagggctattgggtaa

SEQ ID NO: 22288 - DNA, 24 bp, Homo sapiens
gtttattttaaaatgactgagctt

SEQ ID NO: 22289 - DNA, 19 bp, Homo sapiens
ccagcaaagcccttgttaa

SEQ ID NO: 22290 - DNA, 22 bp, Homo sapiens
tttttcttagctatattttctc

SEQ ID NO: 22291 - DNA, 21 bp, Homo sapiens
tccacaacatagagtccaaac

SEQ ID NO: 22292 - DNA, 24 bp, Homo sapiens
ttaaaaaggtgactacaatttttt

SEQ ID NO: 22293 - DNA, 18 bp, Homo sapiens
gggattcttgccatcctg

SEQ ID NO: 22294 - DNA, 24 bp, Homo sapiens
ggaccgataatttccgggtcaaac

SEQ ID NO: 22295 - DNA, 19 bp, Homo sapiens
ctgcctgttacctagactc

SEQ ID NO: 22296 - DNA, 24 bp, Homo sapiens
gaggcataagtgatgccatttgtc

SEQ ID NO: 22297 - DNA, 21 bp, Homo sapiens
tgcggggtttggaggtggagt

SEQ ID NO: 22298 - DNA, 19 bp, Homo sapiens
gatggcaacattgagctga

SEQ ID NO: 22299 - DNA, 23 bp, Homo sapiens
aaagtgaaacaaacaaaataccc

SEQ ID NO: 22300 - DNA, 22 bp, Homo sapiens
atagctcagttcatccaggacc

SEQ ID NO: 22301 - DNA, 23 bp, Homo sapiens
tttactaatcacaaagatggatg

SEQ ID NO: 22302 - DNA, 17 bp, Homo sapiens
cttgatggcaggaaagg

SEQ ID NO: 22303 - DNA, 16 bp, Homo sapiens
gtacttactgtcagct

SEQ ID NO: 22304 - DNA, 18 bp, Homo sapiens
cacccagagtgttacagc

SEQ ID NO: 22305 - DNA, 18 bp, Homo sapiens
gcctcaaaacccaggtcc

SEQ ID NO: 22306 - DNA, 23 bp, Homo sapiens
ggattctgggaagatgtgtttct

SEQ ID NO: 22307 - DNA, 22 bp, Homo sapiens
acctctgggtcatacttgatct

SEQ ID NO: 22308 - DNA, 18 bp, Homo sapiens
gcaagcctcatgtgcagc

SEQ ID NO: 22309 - DNA, 20 bp, Homo sapiens
acaaggacattagacaaaca

SEQ ID NO: 22310 - DNA, 18 bp, Homo sapiens
cagatcaaaggcatgacc

SEQ ID NO: 22311 - DNA, 23 bp, Homo sapiens
gggctactgataaacacagttgc

SEQ ID NO: 22312 - DNA, 17 bp, Homo sapiens
atcttggcaaagtcccc

SEQ ID NO: 22313 - DNA, 24 bp, Homo sapiens
agcattcctaagttcaacatgggc

SEQ ID NO: 22314 - DNA, 23 bp, Homo sapiens
acacctacatctgtgcaggaagt

SEQ ID NO: 22315 - DNA, 23 bp, Homo sapiens
tctatgttagacacacaggatgc

SEQ ID NO: 22316 - DNA, 20 bp, Homo sapiens
ctaaccctcttggaaaccac

SEQ ID NO: 22317 - DNA, 21 bp, Homo sapiens
tgccactgctctggttgattg

SEQ ID NO: 22318 - DNA, 24 bp, Homo sapiens
gaaaaacatattatttgctcttct

SEQ ID NO: 22319 - DNA, 24 bp, Homo sapiens
gagcctcccagtgtggggagccac

SEQ ID NO: 22320 - DNA, 17 bp, Homo sapiens
ctcggtgggagccggga

SEQ ID NO: 22321 - DNA, 23 bp, Homo sapiens
catggaattcccagcactgtggt

SEQ ID NO: 22322 - DNA, 16 bp, Homo sapiens
tgtcctccaggatggc

SEQ ID NO: 22323 - DNA, 20 bp, Homo sapiens
aacatgcaaggaaagtttgc

SEQ ID NO: 22324 - DNA, 21 bp, Homo sapiens
ctgtaattagcccagaagaac

SEQ ID NO: 22325 - DNA, 21 bp, Homo sapiens
ggagcagggctcacctatacc

SEQ ID NO: 22326 - DNA, 19 bp, Homo sapiens
gtgcagcaaatatcggtgt

SEQ ID NO: 22327 - DNA, 22 bp, Homo sapiens
ctcaggacatgcctcaaacaca

SEQ ID NO: 22328 - DNA, 16 bp, Homo sapiens
gcatgacctgtgcatc

SEQ ID NO: 22329 - DNA, 24 bp, Homo sapiens
ccatgtcttctatagcagctctga

SEQ ID NO: 22330 - DNA, 17 bp, Homo sapiens
ctccccaccgagaaacc

SEQ ID NO: 22331 - DNA, 16 bp, Homo sapiens
cttcggccaaagacac

SEQ ID NO: 22332 - DNA, 20 bp, Homo sapiens
agtttctcttcctgatggag

SEQ ID NO: 22333 - DNA, 24 bp, Homo sapiens
atgccttcaatggaatggacacag

SEQ ID NO: 22334 - DNA, 24 bp, Homo sapiens
cttcttgtaccagcccagtggctc

SEQ ID NO: 22335 - DNA, 21 bp, Homo sapiens
catgtgccctggacctggttt

SEQ ID NO: 22336 - DNA, 23 bp, Homo sapiens
ttcaaagtattcaagtgtccttg

SEQ ID NO: 22337 - DNA, 22 bp, Homo sapiens
gacctgtgatctgtcccactcc

SEQ ID NO: 22338 - DNA, 20 bp, Homo sapiens
tgcattgtaagtcttgcgtc

SEQ ID NO: 22339 - DNA, 17 bp, Homo sapiens
aagtgcctcgatagccc

SEQ ID NO: 22340 - DNA, 20 bp, Homo sapiens
taattctgagaccttggggc

SEQ ID NO: 22341 - DNA, 23 bp, Homo sapiens
ttacttgggcagttttgttctcc

SEQ ID NO: 22342 - DNA, 19 bp, Homo sapiens
ggttacaaagcactaaccc

SEQ ID NO: 22343 - DNA, 23 bp, Homo sapiens
attttcttcaatattcaagacgc

SEQ ID NO: 22344 - DNA, 21 bp, Homo sapiens
tttgaagctgccatcaagagc

SEQ ID NO: 22345 - DNA, 23 bp, Homo sapiens
tggagggtgaccacatggcttcc

SEQ ID NO: 22346 - DNA, 23 bp, Homo sapiens
cacttatcagccttatctcattc

SEQ ID NO: 22347 - DNA, 23 bp, Homo sapiens
tagcagaagataaaggtctcttt

SEQ ID NO: 22348 - DNA, 19 bp, Homo sapiens
cggaaactgcaaggagtag

SEQ ID NO: 22349 - DNA, 24 bp, Homo sapiens
caggcttaagggagccactttgct

SEQ ID NO: 22350 - DNA, 16 bp, Homo sapiens
aagctccgggtggagg

SEQ ID NO: 22351 - DNA, 18 bp, Homo sapiens
cctgaggtcttcgggctg

SEQ ID NO: 22352 - DNA, 20 bp, Homo sapiens
ttgcagaaggaaaggcagcc

SEQ ID NO: 22353 - DNA, 19 bp, Homo sapiens
agtgagactttgactctca

SEQ ID NO: 22354 - DNA, 16 bp, Homo sapiens
gtgtgcctgcaacagg

SEQ ID NO: 22355 - DNA, 18 bp, Homo sapiens
gacacaggactggcaggt

SEQ ID NO: 22356 - DNA, 24 bp, Homo sapiens
aggcatcatcagcatgaaggtttc

SEQ ID NO: 22357 - DNA, 19 bp, Homo sapiens
caaggaccttgagggccag

SEQ ID NO: 22358 - DNA, 16 bp, Homo sapiens
ggcatgacttgccagt

SEQ ID NO: 22359 - DNA, 19 bp, Homo sapiens
ccaatttgatggcaaacct

SEQ ID NO: 22360 - DNA, 24 bp, Homo sapiens
ctatgaaggtggtctggatggcct

SEQ ID NO: 22361 - DNA, 20 bp, Homo sapiens
cactgccttgttccagggaa

SEQ ID NO: 22362 - DNA, 17 bp, Homo sapiens
tacccgtgcctgggaac

SEQ ID NO: 22363 - DNA, 19 bp, Homo sapiens
cctgtcctcaatggacttc

SEQ ID NO: 22364 - DNA, 23 bp, Homo sapiens
tggtttcaaggttaaaaaatgtt

SEQ ID NO: 22365 - DNA, 22 bp, Homo sapiens
ctggtggccacctgagaagaag

SEQ ID NO: 22366 - DNA, 20 bp, Homo sapiens
gcattgttttccattttctc

SEQ ID NO: 22367 - DNA, 22 bp, Homo sapiens
aagcaaaactcttcttcattgc

SEQ ID NO: 22368 - DNA, 19 bp, Homo sapiens
tagcttgctttctgtgtat

SEQ ID NO: 22369 - DNA, 19 bp, Homo sapiens
ttttctcccacgccaagac

SEQ ID NO: 22370 - DNA, 18 bp, Homo sapiens
ttcggtgtccgtgcggga

SEQ ID NO: 22371 - DNA, 17 bp, Homo sapiens
tgggggcgagtaagcgc

SEQ ID NO: 22372 - DNA, 17 bp, Homo sapiens
gctctcctccaccgacc

SEQ ID NO: 22373 - DNA, 24 bp, Homo sapiens
tgagcacgctgcgcggacgcgggg

SEQ ID NO: 22374 - DNA, 17 bp, Homo sapiens
ttagagccgagccgcgc

SEQ ID NO: 22375 - DNA, 18 bp, Homo sapiens
tctctcctgctcaggcat

SEQ ID NO: 22376 - DNA, 16 bp, Homo sapiens
ttccggcgcatgacac

SEQ ID NO: 22377 - DNA, 19 bp, Homo sapiens
tttggtggtggcttttggg

SEQ ID NO: 22378 - DNA, 21 bp, Homo sapiens
ccagtccgggacgcggggcgc

SEQ ID NO: 22379 - DNA, 23 bp, Homo sapiens
ctggatcgaattctcctgggagc

SEQ ID NO: 22380 - DNA, 17 bp, Homo sapiens
gtacttccggagcctct

SEQ ID NO: 22381 - DNA, 18 bp, Homo sapiens
ccgcgggccgggcgcggg

SEQ ID NO: 22382 - DNA, 22 bp, Homo sapiens
ccccgccgcatctcggcgccct

SEQ ID NO: 22383 - DNA, 18 bp, Homo sapiens
ctgacgcgcaggggcaag

SEQ ID NO: 22384 - DNA, 24 bp, Homo sapiens
gaaccaccgcgagccaaagcagcg

SEQ ID NO: 22385 - DNA, 16 bp, Homo sapiens
cggcgtcgcaggcctc

SEQ ID NO: 22386 - DNA, 16 bp, Homo sapiens
caccggccagtggcgc

SEQ ID NO: 22387 - DNA, 23 bp, Homo sapiens
caggaggtagacacggcacaggg

SEQ ID NO: 22388 - DNA, 17 bp, Homo sapiens
catcgtcaacgccgacc

SEQ ID NO: 22389 - DNA, 18 bp, Homo sapiens
gcgcttcctggtgctggg

SEQ ID NO: 22390 - DNA, 16 bp, Homo sapiens
ccatctcgtgacccga

SEQ ID NO: 22391 - DNA, 17 bp, Homo sapiens
ggtctcgggcatcccct

SEQ ID NO: 22392 - DNA, 19 bp, Homo sapiens
ccccagtcctcaactttgc

SEQ ID NO: 22393 - DNA, 24 bp, Homo sapiens
ggaagtttgttcacaagataacaa

SEQ ID NO: 22394 - DNA, 20 bp, Homo sapiens
tgagccagttggacagaaag

SEQ ID NO: 22395 - DNA, 23 bp, Homo sapiens
tgaatggtcccctaaaaatgtta

SEQ ID NO: 22396 - DNA, 20 bp, Homo sapiens
ggggcttgtaatcgaaaaac

SEQ ID NO: 22397 - DNA, 23 bp, Homo sapiens
tctaagtagatggtttctttttc

SEQ ID NO: 22398 - DNA, 20 bp, Homo sapiens
agaccaagatgcatccttac

SEQ ID NO: 22399 - DNA, 23 bp, Homo sapiens
ctgatccttattgtcaagctaag

SEQ ID NO: 22400 - DNA, 24 bp, Homo sapiens
ccatctaaatagtgattactcctt

SEQ ID NO: 22401 - DNA, 20 bp, Homo sapiens
agggtgatgatgacattgaa

SEQ ID NO: 22402 - DNA, 24 bp, Homo sapiens
tttgactactcattttaaatgtac

SEQ ID NO: 22403 - DNA, 17 bp, Homo sapiens
cctcctgggacacttgg

SEQ ID NO: 22404 - DNA, 18 bp, Homo sapiens
ttctgaatccaatggcat

SEQ ID NO: 22405 - DNA, 22 bp, Homo sapiens
catggaagaacagctgaacagt

SEQ ID NO: 22406 - DNA, 24 bp, Homo sapiens
ggaaatgtacagttgccaagttgg

SEQ ID NO: 22407 - DNA, 23 bp, Homo sapiens
tctcctatcaggttacctggacc

SEQ ID NO: 22408 - DNA, 17 bp, Homo sapiens
agcgccttgattacacc

SEQ ID NO: 22409 - DNA, 22 bp, Homo sapiens
acagaaaattatgcatgatgcc

SEQ ID NO: 22410 - DNA, 21 bp, Homo sapiens
tgctacttgaactaatgtccc

SEQ ID NO: 22411 - DNA, 23 bp, Homo sapiens
ctacacaatggaatggtatgaac

SEQ ID NO: 22412 - DNA, 21 bp, Homo sapiens
ttggtttttgatgcaatgatc

SEQ ID NO: 22413 - DNA, 16 bp, Homo sapiens
tgcccctttctggtgt

SEQ ID NO: 22414 - DNA, 22 bp, Homo sapiens
acaaatgacctctaagtaaaac

SEQ ID NO: 22415 - DNA, 20 bp, Homo sapiens
tcactggaaggaaaatggga

SEQ ID NO: 22416 - DNA, 24 bp, Homo sapiens
aataaaaaatacaaataagagatg

SEQ ID NO: 22417 - DNA, 19 bp, Homo sapiens
ggttgaacatgtttcctag

SEQ ID NO: 22418 - DNA, 24 bp, Homo sapiens
aagcccaggaggtcaaggctgcag

SEQ ID NO: 22419 - DNA, 24 bp, Homo sapiens
attccatgtctcataataaattcc

SEQ ID NO: 22420 - DNA, 24 bp, Homo sapiens
gggagacctgtcttaaaaaaaaaa

SEQ ID NO: 22421 - DNA, 21 bp, Homo sapiens
caaatttggaacagtcgtagg

SEQ ID NO: 22422 - DNA, 23 bp, Homo sapiens
aggtgactttgttttgttttttt

SEQ ID NO: 22423 - DNA, 19 bp, Homo sapiens
tgttcttgaactctgctcc

SEQ ID NO: 22424 - DNA, 21 bp, Homo sapiens
gaaacaggacaatgaaacagg

SEQ ID NO: 22425 - DNA, 22 bp, Homo sapiens
cagatgtttcatttcccagata

SEQ ID NO: 22426 - DNA, 23 bp, Homo sapiens
cagaaaagggggcagagacatgg

SEQ ID NO: 22427 - DNA, 26 bp, Homo sapiens
gaaggggtaataaaatctttttatgg

SEQ ID NO: 22428 - DNA, 22 bp, Homo sapiens
ttaacaagttggctgaatttgg

SEQ ID NO: 22429 - DNA, 23 bp, Homo sapiens
catcaaaaatttgcaagagactc

SEQ ID NO: 22430 - DNA, 20 bp, Homo sapiens
tttctttacagtggagaacc

SEQ ID NO: 22431 - DNA, 22 bp, Homo sapiens
tcataggtaaaaaccaatattc

SEQ ID NO: 22432 - DNA, 21 bp, Homo sapiens
caacaggaaacaagactcttg

SEQ ID NO: 22433 - DNA, 23 bp, Homo sapiens
agtgttttgtttctgataggtaa

SEQ ID NO: 22434 - DNA, 24 bp, Homo sapiens
catttgccaactaaagaatttctg

SEQ ID NO: 22435 - DNA, 21 bp, Homo sapiens
tggtgattggagaaaaaagag

SEQ ID NO: 22436 - DNA, 23 bp, Homo sapiens
acagttctatttgttttataatt

SEQ ID NO: 22437 - DNA, 18 bp, Homo sapiens
gcaccaaggaagaaaggc

SEQ ID NO: 22438 - DNA, 21 bp, Homo sapiens
aataacatatgaagaaatccc

SEQ ID NO: 22439 - DNA, 20 bp, Homo sapiens
agagaagagtcctgagatgt

SEQ ID NO: 22440 - DNA, 16 bp, Homo sapiens
tggccgaccactcacc

SEQ ID NO: 22441 - DNA, 16 bp, Homo sapiens
ggccaccgcccacgcc

SEQ ID NO: 22442 - DNA, 19 bp, Homo sapiens
tcgtgatttgccggagctc

SEQ ID NO: 22443 - DNA, 16 bp, Homo sapiens
aggccccgttgctcct

SEQ ID NO: 22444 - DNA, 24 bp, Homo sapiens
gtgagaggtcagcagaggggcggt

SEQ ID NO: 22445 - DNA, 16 bp, Homo sapiens
ctctcccggcgccagc

SEQ ID NO: 22446 - DNA, 17 bp, Homo sapiens
tcgctgccggacggcgt

SEQ ID NO: 22447 - DNA, 18 bp, Homo sapiens
ggaaagcaagcggtgtag

SEQ ID NO: 22448 - DNA, 19 bp, Homo sapiens
gacaccattaagcactgtc

SEQ ID NO: 22449 - DNA, 23 bp, Homo sapiens
gcctagaactacatttattgatc

SEQ ID NO: 22450 - DNA, 23 bp, Homo sapiens
gttgagaatatcttttaaatact

SEQ ID NO: 22451 - DNA, 23 bp, Homo sapiens
tcctgaaaaaatgttctaaagcc

SEQ ID NO: 22452 - DNA, 18 bp, Homo sapiens
acacagtgtggagacgag

SEQ ID NO: 22453 - DNA, 22 bp, Homo sapiens
gcatgttctgtactattcaaga

SEQ ID NO: 22454 - DNA, 20 bp, Homo sapiens
tagaaacacacaatgctaga

SEQ ID NO: 22455 - DNA, 24 bp, Homo sapiens
tcagtgggatatgatcctaatgaa

SEQ ID NO: 22456 - DNA, 26 bp, Homo sapiens
attagcaacaagaattttatcaaaag

SEQ ID NO: 22457 - DNA, 23 bp, Homo sapiens
gtatttaatgttactctaggaag

SEQ ID NO: 22458 - DNA, 25 bp, Homo sapiens
tcagagtaaaatggaaaataagacg

SEQ ID NO: 22459 - DNA, 18 bp, Homo sapiens
acttggtgttttttggtc

SEQ ID NO: 22460 - DNA, 26 bp, Homo sapiens
aaatatattaatgtctattaatagtg

SEQ ID NO: 22461 - DNA, 20 bp, Homo sapiens
tgttttttctctcttcagac

SEQ ID NO: 22462 - DNA, 17 bp, Homo sapiens
gtggatggcaactgtct

SEQ ID NO: 22463 - DNA, 21 bp, Homo sapiens
ttgcatgtcgggtgagtagaa

SEQ ID NO: 22464 - DNA, 26 bp, Homo sapiens
aaattaagtcctgatttaaacaaagc

SEQ ID NO: 22465 - DNA, 19 bp, Homo sapiens
acccctttaagtgtgaatc

SEQ ID NO: 22466 - DNA, 18 bp, Homo sapiens
atgtatcttgtgcaggcc

SEQ ID NO: 22467 - DNA, 20 bp, Homo sapiens
aacttgcaagaagatgggca

SEQ ID NO: 22468 - DNA, 20 bp, Homo sapiens
gtgatactgtcgttttgctt

SEQ ID NO: 22469 - DNA, 19 bp, Homo sapiens
catccgccattttcacatg

SEQ ID NO: 22470 - DNA, 24 bp, Homo sapiens
ctttttagtgcatactcaaaaaga

SEQ ID NO: 22471 - DNA, 20 bp, Homo sapiens
ccatgatggcatccatgttg

SEQ ID NO: 22472 - DNA, 24 bp, Homo sapiens
ttgcaattttgtgtgtatttgcag

SEQ ID NO: 22473 - DNA, 22 bp, Homo sapiens
gctgcagtagatagattcattc

SEQ ID NO: 22474 - DNA, 23 bp, Homo sapiens
gcagaaatttgtctcctcaggtt

SEQ ID NO: 22475 - DNA, 21 bp, Homo sapiens
ttcctatttttttttttaaat

SEQ ID NO: 22476 - DNA, 22 bp, Homo sapiens
ccaccagtaaaagctacctcaa

SEQ ID NO: 22477 - DNA, 21 bp, Homo sapiens
gaattcgaccacatttaactc

SEQ ID NO: 22478 - DNA, 20 bp, Homo sapiens
aggaatccataacctggatg

SEQ ID NO: 22479 - DNA, 23 bp, Homo sapiens
aactgatcagtgtataagagaag

SEQ ID NO: 22480 - DNA, 21 bp, Homo sapiens
agtttctggttcattaccaac

SEQ ID NO: 22481 - DNA, 25 bp, Homo sapiens
atattaatacataaatgcactgtac

SEQ ID NO: 22482 - DNA, 21 bp, Homo sapiens
ccatcactacccacatttaca

SEQ ID NO: 22483 - DNA, 21 bp, Homo sapiens
ttgctttcatttctaaggtac

SEQ ID NO: 22484 - DNA, 18 bp, Homo sapiens
aaccacttcacttgtcac

SEQ ID NO: 22485 - DNA, 22 bp, Homo sapiens
agtattttaatgtgttggctca

SEQ ID NO: 22486 - DNA, 16 bp, Homo sapiens
cttgtcgcccatggct

SEQ ID NO: 22487 - DNA, 21 bp, Homo sapiens
acacatatgggcttttctttt

SEQ ID NO: 22488 - DNA, 16 bp, Homo sapiens
tccatcaaagccaggg

SEQ ID NO: 22489 - DNA, 26 bp, Homo sapiens
atgttcttgttataaattttgacttg

SEQ ID NO: 22490 - DNA, 22 bp, Homo sapiens
ttttgacaaaatgtttaacttg

SEQ ID NO: 22491 - DNA, 18 bp, Homo sapiens
acacatgctattcaagcc

SEQ ID NO: 22492 - DNA, 20 bp, Homo sapiens
catatgtgtgtgtgtgtgtg

SEQ ID NO: 22493 - DNA, 21 bp, Homo sapiens
agcagaggttaatacaatccc

SEQ ID NO: 22494 - DNA, 27 bp, Homo sapiens
aataaataaataaatgtaaaaacactg

SEQ ID NO: 22495 - DNA, 21 bp, Homo sapiens
acagcttcttctgcatcctgt

SEQ ID NO: 22496 - DNA, 22 bp, Homo sapiens
ttctctgaatgaaaagggttag

SEQ ID NO: 22497 - DNA, 20 bp, Homo sapiens
gctgaaagacacagaaatcc

SEQ ID NO: 22498 - DNA, 22 bp, Homo sapiens
agacagtagtgcaatatatgac

SEQ ID NO: 22499 - DNA, 22 bp, Homo sapiens
aaagtattatttgctctatggg

SEQ ID NO: 22500 - DNA, 20 bp, Homo sapiens
tcatttcctgcttttacagg

SEQ ID NO: 22501 - DNA, 21 bp, Homo sapiens
tttggcaattcaactgataca

SEQ ID NO: 22502 - DNA, 18 bp, Homo sapiens
gctgaggccttgatcatg

SEQ ID NO: 22503 - DNA, 24 bp, Homo sapiens
tcctgactctaaagaaaggaactt

SEQ ID NO: 22504 - DNA, 20 bp, Homo sapiens
agcctctcacctggtctctt

SEQ ID NO: 22505 - DNA, 23 bp, Homo sapiens
tcaattgtcatgttcatacatcc

SEQ ID NO: 22506 - DNA, 21 bp, Homo sapiens
ctgtttacctgtcagtttaat

SEQ ID NO: 22507 - DNA, 18 bp, Homo sapiens
gctgttaggctaccctgt

SEQ ID NO: 22508 - DNA, 24 bp, Homo sapiens
cccattcaaaagtgtaaaaattag

SEQ ID NO: 22509 - DNA, 19 bp, Homo sapiens
tgcttgggatgatgaagag

SEQ ID NO: 22510 - DNA, 22 bp, Homo sapiens
agatgacaatctaaaaccatcc

SEQ ID NO: 22511 - DNA, 24 bp, Homo sapiens
agccaaaataaatatttaatcgat

SEQ ID NO: 22512 - DNA, 27 bp, Homo sapiens
atgacgaggattatcaataaatttttc

SEQ ID NO: 22513 - DNA, 21 bp, Homo sapiens
tgactcttcttctccttcttc

SEQ ID NO: 22514 - DNA, 24 bp, Homo sapiens
attttaaaataataatgaaaaagc

SEQ ID NO: 22515 - DNA, 21 bp, Homo sapiens
ttctttttttcacagggatgg

SEQ ID NO: 22516 - DNA, 22 bp, Homo sapiens
gcacaactcacaatcattctaa

SEQ ID NO: 22517 - DNA, 20 bp, Homo sapiens
tttggcgatgatagactact

SEQ ID NO: 22518 - DNA, 20 bp, Homo sapiens
cccaatcccaaccaacatcc

SEQ ID NO: 22519 - DNA, 20 bp, Homo sapiens
gcattcccatgtttatcacc

SEQ ID NO: 22520 - DNA, 21 bp, Homo sapiens
aatgttttgagaggtatgtat

SEQ ID NO: 22521 - DNA, 18 bp, Homo sapiens
ggtgcttcctccaccacc

SEQ ID NO: 22522 - DNA, 22 bp, Homo sapiens
gttgcatgcggaaaatattaac

SEQ ID NO: 22523 - DNA, 22 bp, Homo sapiens
tgaatgaaatgcataaaagcag

SEQ ID NO: 22524 - DNA, 20 bp, Homo sapiens
ttgctctttcaggttctagg

SEQ ID NO: 22525 - DNA, 17 bp, Homo sapiens
gagtgagaccctgtctc

SEQ ID NO: 22526 - DNA, 24 bp, Homo sapiens
gagtgctcaattcagagaagaaat

SEQ ID NO: 22527 - DNA, 19 bp, Homo sapiens
gatcacttgagcctgggag

SEQ ID NO: 22528 - DNA, 20 bp, Homo sapiens
tctccgcatccaaaaaaatg

SEQ ID NO: 22529 - DNA, 22 bp, Homo sapiens
taaagcacaatattttgaattc

SEQ ID NO: 22530 - DNA, 22 bp, Homo sapiens
cagcagaggaatattttactgc

SEQ ID NO: 22531 - DNA, 23 bp, Homo sapiens
aagaaaatgtttatgtaatgcac

SEQ ID NO: 22532 - DNA, 22 bp, Homo sapiens
tcttgtattcatttccaagaaa

SEQ ID NO: 22533 - DNA, 23 bp, Homo sapiens
gacaaacatttttttgtatatgt

SEQ ID NO: 22534 - DNA, 19 bp, Homo sapiens
gtaaagtacagaggcatgg

SEQ ID NO: 22535 - DNA, 19 bp, Homo sapiens
acaagctgtagctcttgcc

SEQ ID NO: 22536 - DNA, 24 bp, Homo sapiens
tctttatttaacactttatggagt

SEQ ID NO: 22537 - DNA, 23 bp, Homo sapiens
ccttgtggactctaagaagaatt

SEQ ID NO: 22538 - DNA, 20 bp, Homo sapiens
agagggatactatccgtcat

SEQ ID NO: 22539 - DNA, 23 bp, Homo sapiens
attcccctagctcaagagttttt

SEQ ID NO: 22540 - DNA, 20 bp, Homo sapiens
gcccttagcaacacggatca

SEQ ID NO: 22541 - DNA, 23 bp, Homo sapiens
cattttacccaaaaacttttgtg

SEQ ID NO: 22542 - DNA, 19 bp, Homo sapiens
cgacattcaactgcccagc

SEQ ID NO: 22543 - DNA, 20 bp, Homo sapiens
ctactgactggcagaccttg

SEQ ID NO: 22544 - DNA, 20 bp, Homo sapiens
ctctggacataaccaccatc

SEQ ID NO: 22545 - DNA, 24 bp, Homo sapiens
cctggacctagtccaggaaatgat

SEQ ID NO: 22546 - DNA, 21 bp, Homo sapiens
agttggcaacattataaaacc

SEQ ID NO: 22547 - DNA, 19 bp, Homo sapiens
gctgatattcgcatcaacg

SEQ ID NO: 22548 - DNA, 22 bp, Homo sapiens
actatctggaattaggtcaaaa

SEQ ID NO: 22549 - DNA, 20 bp, Homo sapiens
caaaagacttgtaggggtcc

SEQ ID NO: 22550 - DNA, 20 bp, Homo sapiens
ttctgaaatctgtgatttgg

SEQ ID NO: 22551 - DNA, 21 bp, Homo sapiens
ttacaccaggtagatgtaacg

SEQ ID NO: 22552 - DNA, 24 bp, Homo sapiens
tcttcattgtgtaaatatttaacc

SEQ ID NO: 22553 - DNA, 28 bp, Homo sapiens
ttaacataaaagtatgacataaatcacg

SEQ ID NO: 22554 - DNA, 24 bp, Homo sapiens
gtgcttcctttcctttgaactttc

SEQ ID NO: 22555 - DNA, 20 bp, Homo sapiens
tgattcccatgaatttcact

SEQ ID NO: 22556 - DNA, 19 bp, Homo sapiens
tgtctcagtaccaagaacc

SEQ ID NO: 22557 - DNA, 22 bp, Homo sapiens
tcaagattttagattgttttcc

SEQ ID NO: 22558 - DNA, 26 bp, Homo sapiens
aaactaacttttgaaatcataggatc

SEQ ID NO: 22559 - DNA, 22 bp, Homo sapiens
atccattttctccatggaaatg

SEQ ID NO: 22560 - DNA, 23 bp, Homo sapiens
ttcagactctttaaatatcattg

SEQ ID NO: 22561 - DNA, 23 bp, Homo sapiens
atgaattacttttctttttttct

SEQ ID NO: 22562 - DNA, 23 bp, Homo sapiens
tcagtgcataattagttgtttaa

SEQ ID NO: 22563 - DNA, 23 bp, Homo sapiens
accaggaagtgatattagcattt

SEQ ID NO: 22564 - DNA, 19 bp, Homo sapiens
gcctcagttctatcagagc

SEQ ID NO: 22565 - DNA, 24 bp, Homo sapiens
ctgaactatcataaaatttcgaga

SEQ ID NO: 22566 - DNA, 23 bp, Homo sapiens
gtgcaaatctttgtttttacctc

SEQ ID NO: 22567 - DNA, 23 bp, Homo sapiens
tttactaaaatgaatcatttaac

SEQ ID NO: 22568 - DNA, 18 bp, Homo sapiens
taaacccccaggctgttc

SEQ ID NO: 22569 - DNA, 22 bp, Homo sapiens
tgcttgtttttagctaatcaca

SEQ ID NO: 22570 - DNA, 24 bp, Homo sapiens
ggatttgagtttttcttatttctc

SEQ ID NO: 22571 - DNA, 23 bp, Homo sapiens
gcagatgcactggataactatgt

SEQ ID NO: 22572 - DNA, 21 bp, Homo sapiens
tgcaatattatgtgtaacacc

SEQ ID NO: 22573 - DNA, 22 bp, Homo sapiens
ttgttgttaatagaattcaagg

SEQ ID NO: 22574 - DNA, 19 bp, Homo sapiens
agtgctgatgtctcctttt

SEQ ID NO: 22575 - DNA, 21 bp, Homo sapiens
acagtgatgataaatttctcc

SEQ ID NO: 22576 - DNA, 27 bp, Homo sapiens
aaaacactaaaatattttaatgcatac

SEQ ID NO: 22577 - DNA, 25 bp, Homo sapiens
gttcttcaatttgatatcattttac

SEQ ID NO: 22578 - DNA, 24 bp, Homo sapiens
aggccttaatttcaaaatagagtg

SEQ ID NO: 22579 - DNA, 21 bp, Homo sapiens
tgataatcaactcacgctttg

SEQ ID NO: 22580 - DNA, 20 bp, Homo sapiens
tgaatgtaaacagtcttgca

SEQ ID NO: 22581 - DNA, 23 bp, Homo sapiens
tccgcacaccccagtgcctagta

SEQ ID NO: 22582 - DNA, 18 bp, Homo sapiens
actggaatgccacaaaca

SEQ ID NO: 22583 - DNA, 28 bp, Homo sapiens
gtttgaatgactagtaattctataggag

SEQ ID NO: 22584 - DNA, 20 bp, Homo sapiens
tgttctgctcatttattctg

SEQ ID NO: 22585 - DNA, 21 bp, Homo sapiens
tggttgattgatttccctcag

SEQ ID NO: 22586 - DNA, 19 bp, Homo sapiens
gagatcagccacatctttt

SEQ ID NO: 22587 - DNA, 22 bp, Homo sapiens
tggcaatagcatcatcattgtt

SEQ ID NO: 22588 - DNA, 22 bp, Homo sapiens
catatttatacagtgtgacttt

SEQ ID NO: 22589 - DNA, 19 bp, Homo sapiens
ctggtttaataacaggcat

SEQ ID NO: 22590 - DNA, 23 bp, Homo sapiens
ttcttagagtaggtgtttaaaat

SEQ ID NO: 22591 - DNA, 24 bp, Homo sapiens
ccattgtttgatgctactacggta

SEQ ID NO: 22592 - DNA, 24 bp, Homo sapiens
gcattttatatcaaagggaaatta

SEQ ID NO: 22593 - DNA, 20 bp, Homo sapiens
ataacatcaagattaccaag

SEQ ID NO: 22594 - DNA, 22 bp, Homo sapiens
ttcattctacttcagaatgcct

SEQ ID NO: 22595 - DNA, 19 bp, Homo sapiens
aattcaaaagacgagagtc

SEQ ID NO: 22596 - DNA, 21 bp, Homo sapiens
aaattgcatgataaagttcat

SEQ ID NO: 22597 - DNA, 22 bp, Homo sapiens
agaacaaaaatttccatttcca

SEQ ID NO: 22598 - DNA, 22 bp, Homo sapiens
tggaccctgtctttcttggctg

SEQ ID NO: 22599 - DNA, 23 bp, Homo sapiens
atcaacgctgacagacaataagg

SEQ ID NO: 22600 - DNA, 23 bp, Homo sapiens
gtttaaaatggctgctgctttgt

SEQ ID NO: 22601 - DNA, 18 bp, Homo sapiens
ggccctctaaggaaatcc

SEQ ID NO: 22602 - DNA, 22 bp, Homo sapiens
tggtaatggtcttatttggtgt

SEQ ID NO: 22603 - DNA, 22 bp, Homo sapiens
agcttttccctcctatagctct

SEQ ID NO: 22604 - DNA, 16 bp, Homo sapiens
gcacgtggaacctggc

SEQ ID NO: 22605 - DNA, 24 bp, Homo sapiens
cctctaaaataagaaaagaaaaag

SEQ ID NO: 22606 - DNA, 19 bp, Homo sapiens
gctcatgtttccacctgct

SEQ ID NO: 22607 - DNA, 24 bp, Homo sapiens
tgtatggctatactatattttgtt

SEQ ID NO: 22608 - DNA, 22 bp, Homo sapiens
tttctctgtaaattaagagaat

SEQ ID NO: 22609 - DNA, 21 bp, Homo sapiens
tcgtgaacattacatacaagc

SEQ ID NO: 22610 - DNA, 18 bp, Homo sapiens
atctagcagtaatgaagc

SEQ ID NO: 22611 - DNA, 20 bp, Homo sapiens
tgtctttctcgagaagcagg

SEQ ID NO: 22612 - DNA, 23 bp, Homo sapiens
gtgaaatatatgaagttgttccc

SEQ ID NO: 22613 - DNA, 24 bp, Homo sapiens
tatattttgatgtgtgcagcaatt

SEQ ID NO: 22614 - DNA, 21 bp, Homo sapiens
cctcagtcactttttccagca

SEQ ID NO: 22615 - DNA, 23 bp, Homo sapiens
aaagctaaaaattgatttagaat

SEQ ID NO: 22616 - DNA, 16 bp, Homo sapiens
gacagagacggccacc

SEQ ID NO: 22617 - DNA, 24 bp, Homo sapiens
aactcatttatggtttggttttgt

SEQ ID NO: 22618 - DNA, 18 bp, Homo sapiens
gggaagttggagaccagc

SEQ ID NO: 22619 - DNA, 24 bp, Homo sapiens
gccgcagaattgaacaaatttatg

SEQ ID NO: 22620 - DNA, 24 bp, Homo sapiens
cggttaagtaagaactgcaaagag

SEQ ID NO: 22621 - DNA, 18 bp, Homo sapiens
ccccgatgcccggagtgg

SEQ ID NO: 22622 - DNA, 19 bp, Homo sapiens
caaacgtgaaacaggtcga

SEQ ID NO: 22623 - DNA, 21 bp, Homo sapiens
tcacacaaatttcttgacctt

SEQ ID NO: 22624 - DNA, 19 bp, Homo sapiens
ttgttgctgctgttcatag

SEQ ID NO: 22625 - DNA, 17 bp, Homo sapiens
actcaccgtgccagttt

SEQ ID NO: 22626 - DNA, 24 bp, Homo sapiens
ttcttaatggcttcattcctaagt

SEQ ID NO: 22627 - DNA, 19 bp, Homo sapiens
accacccacgattcaaagg

SEQ ID NO: 22628 - DNA, 24 bp, Homo sapiens
ccatttttgttttccaggtagcag

SEQ ID NO: 22629 - DNA, 19 bp, Homo sapiens
cgtcctcctctgtagaagc

SEQ ID NO: 22630 - DNA, 23 bp, Homo sapiens
aatagtatgacagctgggaaaac

SEQ ID NO: 22631 - DNA, 22 bp, Homo sapiens
cagcttgacagtgcacagattt

SEQ ID NO: 22632 - DNA, 16 bp, Homo sapiens
gggtggcttgtccctg

SEQ ID NO: 22633 - DNA, 24 bp, Homo sapiens
tgaaaggttataaatccttcattc

SEQ ID NO: 22634 - DNA, 21 bp, Homo sapiens
ggattaggagcctgccgcctc

SEQ ID NO: 22635 - DNA, 21 bp, Homo sapiens
taatgcttgaatcaattgtgt

SEQ ID NO: 22636 - DNA, 24 bp, Homo sapiens
ctgcatttttcaaaattcaaggtg

SEQ ID NO: 22637 - DNA, 20 bp, Homo sapiens
actctgtggaataaatgacg

SEQ ID NO: 22638 - DNA, 19 bp, Homo sapiens
ggatctgctcgtggagctg

SEQ ID NO: 22639 - DNA, 20 bp, Homo sapiens
gtttctcatctctaagtgcc

SEQ ID NO: 22640 - DNA, 24 bp, Homo sapiens
ctcagtttctgctacagagcacct

SEQ ID NO: 22641 - DNA, 17 bp, Homo sapiens
tgacagtggaggaaagg

SEQ ID NO: 22642 - DNA, 23 bp, Homo sapiens
tcactgttgttgaagcagcagag

SEQ ID NO: 22643 - DNA, 18 bp, Homo sapiens
gccagacaggacctgaag

SEQ ID NO: 22644 - DNA, 17 bp, Homo sapiens
caccgaactcaatgagg

SEQ ID NO: 22645 - DNA, 24 bp, Homo sapiens
ctcaggaaatagggtctcagatgc

SEQ ID NO: 22646 - DNA, 16 bp, Homo sapiens
gtggtggagtggcaac

SEQ ID NO: 22647 - DNA, 24 bp, Homo sapiens
aattccttttatcttatggcactg

SEQ ID NO: 22648 - DNA, 24 bp, Homo sapiens
tggatagaagtcaggtcctatttt

SEQ ID NO: 22649 - DNA, 17 bp, Homo sapiens
ccatgccctctcacccc

SEQ ID NO: 22650 - DNA, 19 bp, Homo sapiens
aggagttaggaagtttgct

SEQ ID NO: 22651 - DNA, 22 bp, Homo sapiens
gactttggtttttgtcatcctg

SEQ ID NO: 22652 - DNA, 16 bp, Homo sapiens
gctgtaagctgtgccc

SEQ ID NO: 22653 - DNA, 24 bp, Homo sapiens
atagctacctgaataaactaccag

SEQ ID NO: 22654 - DNA, 23 bp, Homo sapiens
tccctcgggcttcttcttcatca

SEQ ID NO: 22655 - DNA, 21 bp, Homo sapiens
gagcctgatggttgtaagagt

SEQ ID NO: 22656 - DNA, 18 bp, Homo sapiens
gccctcagaactctaatc

SEQ ID NO: 22657 - DNA, 16 bp, Homo sapiens
aggccgtggtgcatgg

SEQ ID NO: 22658 - DNA, 22 bp, Homo sapiens
atcacttacagagggatattcg

SEQ ID NO: 22659 - DNA, 24 bp, Homo sapiens
tgaaaataggttattttctttgcc

SEQ ID NO: 22660 - DNA, 21 bp, Homo sapiens
atagggcagttaattccactc

SEQ ID NO: 22661 - DNA, 18 bp, Homo sapiens
ccctaggaatgctgttgc

SEQ ID NO: 22662 - DNA, 23 bp, Homo sapiens
gaactgggacgcccatcaggatg

SEQ ID NO: 22663 - DNA, 18 bp, Homo sapiens
tgtgtttggagtgaatgc

SEQ ID NO: 22664 - DNA, 23 bp, Homo sapiens
acagtgaaccctagctttgcatg

SEQ ID NO: 22665 - DNA, 16 bp, Homo sapiens
catgccccacccaacc

SEQ ID NO: 22666 - DNA, 20 bp, Homo sapiens
cctcccctccattcccatgc

SEQ ID NO: 22667 - DNA, 21 bp, Homo sapiens
cctattccaattcatttttct

SEQ ID NO: 22668 - DNA, 23 bp, Homo sapiens
tgagttaagagccacttttacgc

SEQ ID NO: 22669 - DNA, 20 bp, Homo sapiens
agcaccttcccattaggtgg

SEQ ID NO: 22670 - DNA, 21 bp, Homo sapiens
ctgtcctttgctcagctggca

SEQ ID NO: 22671 - DNA, 23 bp, Homo sapiens
cttaaagattccatcctgggaaa

SEQ ID NO: 22672 - DNA, 21 bp, Homo sapiens
aactccatccacagaacctgc

SEQ ID NO: 22673 - DNA, 19 bp, Homo sapiens
ccggtgcagttcaaggact

SEQ ID NO: 22674 - DNA, 22 bp, Homo sapiens
cagttaggtagggtccaaggct

SEQ ID NO: 22675 - DNA, 23 bp, Homo sapiens
gttatccgcgatgcgtttcctgg

SEQ ID NO: 22676 - DNA, 17 bp, Homo sapiens
aggggtctcagcgcggg

SEQ ID NO: 22677 - DNA, 21 bp, Homo sapiens
gacaggtttgtcttgtgaccg

SEQ ID NO: 22678 - DNA, 16 bp, Homo sapiens
cctggggctcaccgca

SEQ ID NO: 22679 - DNA, 20 bp, Homo sapiens
ctgtggttactggtgacagg

SEQ ID NO: 22680 - DNA, 18 bp, Homo sapiens
caggagcaggaatgtagc

SEQ ID NO: 22681 - DNA, 22 bp, Homo sapiens
ttaaaaataaatttctctcccc

SEQ ID NO: 22682 - DNA, 19 bp, Homo sapiens
gggctgcaattggaactca

SEQ ID NO: 22683 - DNA, 22 bp, Homo sapiens
atactgttccaatgaaacaaga

SEQ ID NO: 22684 - DNA, 19 bp, Homo sapiens
gcatgctgaatgacaagtc

SEQ ID NO: 22685 - DNA, 21 bp, Homo sapiens
ccagagtattctatgatgccc

SEQ ID NO: 22686 - DNA, 23 bp, Homo sapiens
cattttcatatggtttcaaggaa

SEQ ID NO: 22687 - DNA, 23 bp, Homo sapiens
agttgtcaaactgtgcaaattca

SEQ ID NO: 22688 - DNA, 20 bp, Homo sapiens
catttgctccactaagtagt

SEQ ID NO: 22689 - DNA, 22 bp, Homo sapiens
aaaattcacagggatgtctgtc

SEQ ID NO: 22690 - DNA, 19 bp, Homo sapiens
acttttgctcaaacttgtg

SEQ ID NO: 22691 - DNA, 20 bp, Homo sapiens
tagggatgagtggcttcccg

SEQ ID NO: 22692 - DNA, 25 bp, Homo sapiens
gatggattatatatgctttaggacg

SEQ ID NO: 22693 - DNA, 18 bp, Homo sapiens
cacactttccccctccta

SEQ ID NO: 22694 - DNA, 21 bp, Homo sapiens
tgattctgtgattgagatctc

SEQ ID NO: 22695 - DNA, 24 bp, Homo sapiens
cattttacctccagactccaatca

SEQ ID NO: 22696 - DNA, 21 bp, Homo sapiens
tctgttgaggctgactttact

SEQ ID NO: 22697 - DNA, 23 bp, Homo sapiens
tttttttgctgtaacttcaacac

SEQ ID NO: 22698 - DNA, 21 bp, Homo sapiens
acagggttacaggtgatttag

SEQ ID NO: 22699 - DNA, 21 bp, Homo sapiens
tggtatttgcttacatccctt

SEQ ID NO: 22700 - DNA, 24 bp, Homo sapiens
ggtggtattttgattagaagtgcc

SEQ ID NO: 22701 - DNA, 22 bp, Homo sapiens
actcccacaaataacaagtagg

SEQ ID NO: 22702 - DNA, 19 bp, Homo sapiens
acatagagacccctgacac

SEQ ID NO: 22703 - DNA, 22 bp, Homo sapiens
aaaaaaaaaaaagtcagttacc

SEQ ID NO: 22704 - DNA, 26 bp, Homo sapiens
agggcatattttaaagagtactaatc

SEQ ID NO: 22705 - DNA, 20 bp, Homo sapiens
agaagaaaattcctctggca

SEQ ID NO: 22706 - DNA, 19 bp, Homo sapiens
gtttggaagcatgtgctgt

SEQ ID NO: 22707 - DNA, 21 bp, Homo sapiens
cctgcaatgaacacacctcct

SEQ ID NO: 22708 - DNA, 17 bp, Homo sapiens
aagcccatctctgctac

SEQ ID NO: 22709 - DNA, 19 bp, Homo sapiens
aggagactacaactggtaa

SEQ ID NO: 22710 - DNA, 23 bp, Homo sapiens
tcaacaacccttaatattacata

SEQ ID NO: 22711 - DNA, 18 bp, Homo sapiens
gttctcaaccagagaccc

SEQ ID NO: 22712 - DNA, 23 bp, Homo sapiens
accattgaaaactcttcacttca

SEQ ID NO: 22713 - DNA, 23 bp, Homo sapiens
atcaaactggtgtatttgaatat

SEQ ID NO: 22714 - DNA, 22 bp, Homo sapiens
tccacattgagaacatcaatct

SEQ ID NO: 22715 - DNA, 27 bp, Homo sapiens
gaatttcttacattctgaacagattac

SEQ ID NO: 22716 - DNA, 20 bp, Homo sapiens
cggcagcccatgtaatgggt

SEQ ID NO: 22717 - DNA, 24 bp, Homo sapiens
tcagacatactataaaatatcagc

SEQ ID NO: 22718 - DNA, 21 bp, Homo sapiens
cgccagggtcttcaatatttg

SEQ ID NO: 22719 - DNA, 18 bp, Homo sapiens
ggccctaaactttggttt

SEQ ID NO: 22720 - DNA, 22 bp, Homo sapiens
ttggagcttcactaaaaaatgg

SEQ ID NO: 22721 - DNA, 22 bp, Homo sapiens
ggatgatttcaatgttggtgag

SEQ ID NO: 22722 - DNA, 22 bp, Homo sapiens
aaaattagccctccttttaccg

SEQ ID NO: 22723 - DNA, 16 bp, Homo sapiens
gctacccgcttcctcc

SEQ ID NO: 22724 - DNA, 22 bp, Homo sapiens
actccatcatgcacccagtttg

SEQ ID NO: 22725 - DNA, 20 bp, Homo sapiens
cacactgagcctgcatgaag

SEQ ID NO: 22726 - DNA, 23 bp, Homo sapiens
agaccaagttaagttttagtgaa

SEQ ID NO: 22727 - DNA, 22 bp, Homo sapiens
agtacctggtcctgaatacagt

SEQ ID NO: 22728 - DNA, 22 bp, Homo sapiens
cttgggaagggctgggattttg

SEQ ID NO: 22729 - DNA, 21 bp, Homo sapiens
gatttggacttttctttaagc

SEQ ID NO: 22730 - DNA, 22 bp, Homo sapiens
gtggtgagtgtgaacagctcat

SEQ ID NO: 22731 - DNA, 18 bp, Homo sapiens
ggccttgatattggtgag

SEQ ID NO: 22732 - DNA, 24 bp, Homo sapiens
gatttctttttaagcagctggatt

SEQ ID NO: 22733 - DNA, 20 bp, Homo sapiens
tgtctaagagctaaacacat

SEQ ID NO: 22734 - DNA, 22 bp, Homo sapiens
aaataccagagctacaggtatg

SEQ ID NO: 22735 - DNA, 19 bp, Homo sapiens
aatgacatttctgtgccct

SEQ ID NO: 22736 - DNA, 21 bp, Homo sapiens
tcctcaaagaggatgtgatga

SEQ ID NO: 22737 - DNA, 24 bp, Homo sapiens
aagaatttactttaaaattaccca

SEQ ID NO: 22738 - DNA, 24 bp, Homo sapiens
tcttgataaatagagataatattg

SEQ ID NO: 22739 - DNA, 20 bp, Homo sapiens
ttttccaagtttggtatacc

SEQ ID NO: 22740 - DNA, 20 bp, Homo sapiens
tgttcttaagggatcttttg

SEQ ID NO: 22741 - DNA, 22 bp, Homo sapiens
agaagacaccagggcctctgtc

SEQ ID NO: 22742 - DNA, 18 bp, Homo sapiens
ctaagtgcatacggccat

SEQ ID NO: 22743 - DNA, 16 bp, Homo sapiens
actactggcctgtgac

SEQ ID NO: 22744 - DNA, 22 bp, Homo sapiens
cccctaaggtagcttatacatc

SEQ ID NO: 22745 - DNA, 27 bp, Homo sapiens
aaaataaagttaaacatatttacttac

SEQ ID NO: 22746 - DNA, 24 bp, Homo sapiens
gttatctagtatatgtaaatttct

SEQ ID NO: 22747 - DNA, 22 bp, Homo sapiens
ttgaaataaggaagaaatggcc

SEQ ID NO: 22748 - DNA, 27 bp, Homo sapiens
aatacacattcagtaaatattatattg

SEQ ID NO: 22749 - DNA, 18 bp, Homo sapiens
gggaacctcaccatcatc

SEQ ID NO: 22750 - DNA, 24 bp, Homo sapiens
gaaagccataagatcttggcatct

SEQ ID NO: 22751 - DNA, 17 bp, Homo sapiens
tgaagacagttggccat

SEQ ID NO: 22752 - DNA, 23 bp, Homo sapiens
tcagttttatattttatttttcc

SEQ ID NO: 22753 - DNA, 22 bp, Homo sapiens
tgtcttatttggaactttctgt

SEQ ID NO: 22754 - DNA, 23 bp, Homo sapiens
caacaaaagtttaccatggtttc

SEQ ID NO: 22755 - DNA, 24 bp, Homo sapiens
agactcaaattgatatacagcttt

SEQ ID NO: 22756 - DNA, 23 bp, Homo sapiens
acgtagcttcctcctttctctaa

SEQ ID NO: 22757 - DNA, 22 bp, Homo sapiens
aaacatgaggttgacggatata

SEQ ID NO: 22758 - DNA, 20 bp, Homo sapiens
atctcctgtctgggtatcag

SEQ ID NO: 22759 - DNA, 22 bp, Homo sapiens
acactggcaaatcttgcttaaa

SEQ ID NO: 22760 - DNA, 16 bp, Homo sapiens
gggagatgcgggttga

SEQ ID NO: 22761 - DNA, 22 bp, Homo sapiens
taatcttctctaagtttttttc

SEQ ID NO: 22762 - DNA, 20 bp, Homo sapiens
tttatcaaatcttttagcac

SEQ ID NO: 22763 - DNA, 23 bp, Homo sapiens
tgagagatggaactgaaccatac

SEQ ID NO: 22764 - DNA, 21 bp, Homo sapiens
ttttactccaggtttttagac

SEQ ID NO: 22765 - DNA, 16 bp, Homo sapiens
tgggccgtcatcaacc

SEQ ID NO: 22766 - DNA, 21 bp, Homo sapiens
tcttattttgggtgatccttt

SEQ ID NO: 22767 - DNA, 19 bp, Homo sapiens
gccactaaattccatgcga

SEQ ID NO: 22768 - DNA, 27 bp, Homo sapiens
ggtcgcattttaaatcagaattatatc

SEQ ID NO: 22769 - DNA, 21 bp, Homo sapiens
aaggcaaaatgtttacaatca

SEQ ID NO: 22770 - DNA, 21 bp, Homo sapiens
ggtcttctgaagactttagca

SEQ ID NO: 22771 - DNA, 23 bp, Homo sapiens
ttttttctaactcttatgttttt

SEQ ID NO: 22772 - DNA, 20 bp, Homo sapiens
ggctcattatcctggaaccc

SEQ ID NO: 22773 - DNA, 24 bp, Homo sapiens
acttacgaagtcatatagccattg

SEQ ID NO: 22774 - DNA, 19 bp, Homo sapiens
gtatataagtgccacgtcg

SEQ ID NO: 22775 - DNA, 22 bp, Homo sapiens
cccatgtcactatttaaagtgc

SEQ ID NO: 22776 - DNA, 24 bp, Homo sapiens
gctacccaactgttttaaaataga

SEQ ID NO: 22777 - DNA, 19 bp, Homo sapiens
gcatcttttgctgaatggg

SEQ ID NO: 22778 - DNA, 20 bp, Homo sapiens
actcttcaaggtggttgatg

SEQ ID NO: 22779 - DNA, 18 bp, Homo sapiens
tgcatgcttcaggtaagt

SEQ ID NO: 22780 - DNA, 21 bp, Homo sapiens
agcaagtgataatctctggga

SEQ ID NO: 22781 - DNA, 23 bp, Homo sapiens
gggagaaggcaagaaaaagatag

SEQ ID NO: 22782 - DNA, 23 bp, Homo sapiens
ttcttactccaaaagatattaag

SEQ ID NO: 22783 - DNA, 21 bp, Homo sapiens
ccaagtaaaacatgccttacc

SEQ ID NO: 22784 - DNA, 21 bp, Homo sapiens
cttggtcataaattcaacagc

SEQ ID NO: 22785 - DNA, 22 bp, Homo sapiens
atggatgcagagatggactccc

SEQ ID NO: 22786 - DNA, 21 bp, Homo sapiens
aaacaaacaaacaaaagaagc

SEQ ID NO: 22787 - DNA, 23 bp, Homo sapiens
ggagaccttgataattcagcatt

SEQ ID NO: 22788 - DNA, 22 bp, Homo sapiens
gaatgagaggtcatataatgcc

SEQ ID NO: 22789 - DNA, 23 bp, Homo sapiens
cacaaccagcaaaataaataact

SEQ ID NO: 22790 - DNA, 26 bp, Homo sapiens
ttctgacattttgtaactttcaattc

SEQ ID NO: 22791 - DNA, 22 bp, Homo sapiens
tttctgtgttaggaaccataag

SEQ ID NO: 22792 - DNA, 24 bp, Homo sapiens
tatcagataatatgaaagatgatg

SEQ ID NO: 22793 - DNA, 19 bp, Homo sapiens
aagttgtacacaccttaat

SEQ ID NO: 22794 - DNA, 22 bp, Homo sapiens
ttgtgctatcttataactatct

SEQ ID NO: 22795 - DNA, 18 bp, Homo sapiens
gttaccatgatttggaca

SEQ ID NO: 22796 - DNA, 24 bp, Homo sapiens
cagacaccattagaacaaattagc

SEQ ID NO: 22797 - DNA, 21 bp, Homo sapiens
cgactggccttatgtcaatct

SEQ ID NO: 22798 - DNA, 24 bp, Homo sapiens
caaattattttctaaattacaaac

SEQ ID NO: 22799 - DNA, 17 bp, Homo sapiens
tctctctgcagggttgc

SEQ ID NO: 22800 - DNA, 23 bp, Homo sapiens
taactccaatataatcaatgtcc

SEQ ID NO: 22801 - DNA, 24 bp, Homo sapiens
ttcttaaaaaaaatttgttttatt

SEQ ID NO: 22802 - DNA, 22 bp, Homo sapiens
tcacgacataataggcagtcag

SEQ ID NO: 22803 - DNA, 24 bp, Homo sapiens
tggtatataaactttcctttagtc

SEQ ID NO: 22804 - DNA, 19 bp, Homo sapiens
gggaatgaccatggcaacc

SEQ ID NO: 22805 - DNA, 24 bp, Homo sapiens
cccaatattacactcattggtaag

SEQ ID NO: 22806 - DNA, 22 bp, Homo sapiens
acccctggcacatgctttgctg

SEQ ID NO: 22807 - DNA, 16 bp, Homo sapiens
ccgaggatacgagtgg

SEQ ID NO: 22808 - DNA, 22 bp, Homo sapiens
ccgtattaatagagattccacc

SEQ ID NO: 22809 - DNA, 22 bp, Homo sapiens
gtttttgctctcctctattcag

SEQ ID NO: 22810 - DNA, 22 bp, Homo sapiens
ctgaagaaacattgcaaacttc

SEQ ID NO: 22811 - DNA, 18 bp, Homo sapiens
ggtggggagtgagatggt

SEQ ID NO: 22812 - DNA, 21 bp, Homo sapiens
ttagcttctttcatcaaccac

SEQ ID NO: 22813 - DNA, 22 bp, Homo sapiens
tgatttccccaacttcaggatt

SEQ ID NO: 22814 - DNA, 19 bp, Homo sapiens
catgtgggagggctcagtg

SEQ ID NO: 22815 - DNA, 17 bp, Homo sapiens
ggtgatgggcagacaac

SEQ ID NO: 22816 - DNA, 20 bp, Homo sapiens
tgaggaaaactctaataagc

SEQ ID NO: 22817 - DNA, 20 bp, Homo sapiens
acttcttttcacagccgaat

SEQ ID NO: 22818 - DNA, 25 bp, Homo sapiens
ttacacatattctgaaatcacagtc

SEQ ID NO: 22819 - DNA, 25 bp, Homo sapiens
ctgtaaaacctaaggcagtaattag

SEQ ID NO: 22820 - DNA, 18 bp, Homo sapiens
tctcccaaattctcctac

SEQ ID NO: 22821 - DNA, 22 bp, Homo sapiens
cattacttttggaataaattgc

SEQ ID NO: 22822 - DNA, 20 bp, Homo sapiens
caaagaggcaccaaaattcg

SEQ ID NO: 22823 - DNA, 20 bp, Homo sapiens
agcaaaacttcaaatagcaa

SEQ ID NO: 22824 - DNA, 21 bp, Homo sapiens
aacctcccgacttctagtaaa

SEQ ID NO: 22825 - DNA, 26 bp, Homo sapiens
aaaaactagaattgtgaggctaataa

SEQ ID NO: 22826 - DNA, 21 bp, Homo sapiens
actgtagacagatattcatga

SEQ ID NO: 22827 - DNA, 23 bp, Homo sapiens
acaggtaccatgaaataattatg

SEQ ID NO: 22828 - DNA, 16 bp, Homo sapiens
tgaccttgcctgaggc

SEQ ID NO: 22829 - DNA, 24 bp, Homo sapiens
tgagaacgatagggctctgggtaa

SEQ ID NO: 22830 - DNA, 24 bp, Homo sapiens
cggcatcggcgcggtcagcggcgg

SEQ ID NO: 22831 - DNA, 20 bp, Homo sapiens
tgctgactggcaccctaggg

SEQ ID NO: 22832 - DNA, 17 bp, Homo sapiens
cccggcggcgcgtacgt

SEQ ID NO: 22833 - DNA, 16 bp, Homo sapiens
cgcgggggcttgtggg

SEQ ID NO: 22834 - DNA, 19 bp, Homo sapiens
ccgcgggttcggcgggccg

SEQ ID NO: 22835 - DNA, 24 bp, Homo sapiens
tatccccgcagcttgccgctcacc

SEQ ID NO: 22836 - DNA, 18 bp, Homo sapiens
acacaatggctgagtggc

SEQ ID NO: 22837 - DNA, 18 bp, Homo sapiens
cccgtcggagtcgtcgag

SEQ ID NO: 22838 - DNA, 17 bp, Homo sapiens
cccgtatctatcgtggc

SEQ ID NO: 22839 - DNA, 24 bp, Homo sapiens
cacagcagcaagggcaccgcggcg

SEQ ID NO: 22840 - DNA, 24 bp, Homo sapiens
gctgcgtcagaggcccttgacccg

SEQ ID NO: 22841 - DNA, 23 bp, Homo sapiens
gttgccaggaagccgagagtagc

SEQ ID NO: 22842 - DNA, 19 bp, Homo sapiens
gtgacgccggaagagaagc

SEQ ID NO: 22843 - DNA, 18 bp, Homo sapiens
gccgccgccattttgagt

SEQ ID NO: 22844 - DNA, 18 bp, Homo sapiens
ctcatggccctcttcctt

SEQ ID NO: 22845 - DNA, 20 bp, Homo sapiens
aagaagcagcgagctttttc

SEQ ID NO: 22846 - DNA, 17 bp, Homo sapiens
tcgcacgaggtagatac

SEQ ID NO: 22847 - DNA, 24 bp, Homo sapiens
gatttcacatgtacttactgctgg

SEQ ID NO: 22848 - DNA, 23 bp, Homo sapiens
caggctccaaaagcaaagtgatt

SEQ ID NO: 22849 - DNA, 21 bp, Homo sapiens
agggaaggtggattccaaggt

SEQ ID NO: 22850 - DNA, 22 bp, Homo sapiens
cttttctctcagtccctcactc

SEQ ID NO: 22851 - DNA, 16 bp, Homo sapiens
atctctgccatgcacg

SEQ ID NO: 22852 - DNA, 17 bp, Homo sapiens
gtccaagggcagcaacg

SEQ ID NO: 22853 - DNA, 16 bp, Homo sapiens
gcggcggccgcagcct

SEQ ID NO: 22854 - DNA, 16 bp, Homo sapiens
agccggtttggtgggc

SEQ ID NO: 22855 - DNA, 19 bp, Homo sapiens
agcccattgattgcatcgt

SEQ ID NO: 22856 - DNA, 16 bp, Homo sapiens
cgctggctcttcgtgc

SEQ ID NO: 22857 - DNA, 16 bp, Homo sapiens
aaggaggccttggggc

SEQ ID NO: 22858 - DNA, 18 bp, Homo sapiens
tgtggcgagctggaggct

SEQ ID NO: 22859 - DNA, 17 bp, Homo sapiens
gggtgggcgctgggccg

SEQ ID NO: 22860 - DNA, 20 bp, Homo sapiens
cactcgcttttgcccgtgga

SEQ ID NO: 22861 - DNA, 16 bp, Homo sapiens
gaggccccgcgtcccg

SEQ ID NO: 22862 - DNA, 20 bp, Homo sapiens
catggtctgacgaagctaat

SEQ ID NO: 22863 - DNA, 24 bp, Homo sapiens
gatcatctctgaggaggcataaac

SEQ ID NO: 22864 - DNA, 24 bp, Homo sapiens
cttgaactcattgctgcgatcgat

SEQ ID NO: 22865 - DNA, 24 bp, Homo sapiens
gggaagttacttgtggccttttct

SEQ ID NO: 22866 - DNA, 16 bp, Homo sapiens
actccctgactgcccc

SEQ ID NO: 22867 - DNA, 24 bp, Homo sapiens
catctgtttacctctctcctatta

SEQ ID NO: 22868 - DNA, 24 bp, Homo sapiens
ttcttagagaggcttcatttacca

SEQ ID NO: 22869 - DNA, 16 bp, Homo sapiens
ccaaggcccaggagat

SEQ ID NO: 22870 - DNA, 18 bp, Homo sapiens
cagccagtcacatgtggc

SEQ ID NO: 22871 - DNA, 18 bp, Homo sapiens
tgcttccaaaattcctgc

SEQ ID NO: 22872 - DNA, 21 bp, Homo sapiens
ctggaagagctcacacagttc

SEQ ID NO: 22873 - DNA, 24 bp, Homo sapiens
tttttagggaaagacactatactc

SEQ ID NO: 22874 - DNA, 23 bp, Homo sapiens
tctgaagtgtttgggtctcattg

SEQ ID NO: 22875 - DNA, 24 bp, Homo sapiens
caatctttcccttcccttcctgct

SEQ ID NO: 22876 - DNA, 21 bp, Homo sapiens
attccactctgctccattctg

SEQ ID NO: 22877 - DNA, 23 bp, Homo sapiens
tcaatgggtgctttcacaggtcc

SEQ ID NO: 22878 - DNA, 16 bp, Homo sapiens
gcatcacagcccctgg

SEQ ID NO: 22879 - DNA, 17 bp, Homo sapiens
gagccgccatactgaac

SEQ ID NO: 22880 - DNA, 24 bp, Homo sapiens
gtggcatcagcttattcttgttgc

SEQ ID NO: 22881 - DNA, 18 bp, Homo sapiens
ccggaagctcgggatatc

SEQ ID NO: 22882 - DNA, 24 bp, Homo sapiens
ccttctgccgtcaaatgtaagatt

SEQ ID NO: 22883 - DNA, 23 bp, Homo sapiens
attcccattgcgtacaagctggt

SEQ ID NO: 22884 - DNA, 17 bp, Homo sapiens
ctcccttgtaccacacc

SEQ ID NO: 22885 - DNA, 23 bp, Homo sapiens
gagattagcgtgtattacatttc

SEQ ID NO: 22886 - DNA, 23 bp, Homo sapiens
gtgctggtgatggaggagatatc

SEQ ID NO: 22887 - DNA, 16 bp, Homo sapiens
gactggcccccaaggg

SEQ ID NO: 22888 - DNA, 18 bp, Homo sapiens
ccactccaacctctgcat

SEQ ID NO: 22889 - DNA, 16 bp, Homo sapiens
aatccatggccccttc

SEQ ID NO: 22890 - DNA, 17 bp, Homo sapiens
cactcatggccagggct

SEQ ID NO: 22891 - DNA, 20 bp, Homo sapiens
tctgagagcgaagtttgaag

SEQ ID NO: 22892 - DNA, 19 bp, Homo sapiens
ggcctcacctttcttttcc

SEQ ID NO: 22893 - DNA, 20 bp, Homo sapiens
ctctagggtactctgaggtt

SEQ ID NO: 22894 - DNA, 20 bp, Homo sapiens
caattgttgctccattatcc

SEQ ID NO: 22895 - DNA, 19 bp, Homo sapiens
gtgagtacatcggagccct

SEQ ID NO: 22896 - DNA, 22 bp, Homo sapiens
ttctgctgagcaagaagctgtc

SEQ ID NO: 22897 - DNA, 24 bp, Homo sapiens
tgttgtctctatgaagctcaaagc

SEQ ID NO: 22898 - DNA, 22 bp, Homo sapiens
gcagaggtacagacattatcag

SEQ ID NO: 22899 - DNA, 24 bp, Homo sapiens
tcagggccattagtgatccagaac

SEQ ID NO: 22900 - DNA, 21 bp, Homo sapiens
tccagaactttctcaaaggtg

SEQ ID NO: 22901 - DNA, 17 bp, Homo sapiens
cgagaagctggcacagc

SEQ ID NO: 22902 - DNA, 20 bp, Homo sapiens
gagacaggccaagatggctt

SEQ ID NO: 22903 - DNA, 16 bp, Homo sapiens
ctcctggccctgcacc

SEQ ID NO: 22904 - DNA, 23 bp, Homo sapiens
atcctgaatggcaacaagttctg

SEQ ID NO: 22905 - DNA, 20 bp, Homo sapiens
actgattccatttgagatca

SEQ ID NO: 22906 - DNA, 19 bp, Homo sapiens
tctatgccaagacagatct

SEQ ID NO: 22907 - DNA, 17 bp, Homo sapiens
cctccttgcagtctgct

SEQ ID NO: 22908 - DNA, 21 bp, Homo sapiens
cagcttcttagaggtgctaaa

SEQ ID NO: 22909 - DNA, 19 bp, Homo sapiens
catgctgtgcaggtacagg

SEQ ID NO: 22910 - DNA, 22 bp, Homo sapiens
gaatcttgcagtcttcaaagat

SEQ ID NO: 22911 - DNA, 21 bp, Homo sapiens
ctttcctttaccaggccccct

SEQ ID NO: 22912 - DNA, 24 bp, Homo sapiens
aacagccagatcagcctggaaggg

SEQ ID NO: 22913 - DNA, 24 bp, Homo sapiens
tcctgtaaagggtatgcctggctt

SEQ ID NO: 22914 - DNA, 24 bp, Homo sapiens
atgtcactgaagcgctaacaatgc

SEQ ID NO: 22915 - DNA, 23 bp, Homo sapiens
ctaacacctgtgagctaatcttt

SEQ ID NO: 22916 - DNA, 19 bp, Homo sapiens
tggcccaggatgttggcag

SEQ ID NO: 22917 - DNA, 24 bp, Homo sapiens
tcacctggaaccttagttgaataa

SEQ ID NO: 22918 - DNA, 16 bp, Homo sapiens
cagcaccagccgctcc

SEQ ID NO: 22919 - DNA, 23 bp, Homo sapiens
catgtttccaaatctagtacctt

SEQ ID NO: 22920 - DNA, 16 bp, Homo sapiens
aggaggccgacagagc

SEQ ID NO: 22921 - DNA, 16 bp, Homo sapiens
ttatcctggcagctgc

SEQ ID NO: 22922 - DNA, 16 bp, Homo sapiens
agctccctttggcccc

SEQ ID NO: 22923 - DNA, 19 bp, Homo sapiens
ctgatgagtgggctggacc

SEQ ID NO: 22924 - DNA, 20 bp, Homo sapiens
gggaagaaattcaacatggg

SEQ ID NO: 22925 - DNA, 17 bp, Homo sapiens
ggctgtcacgcccctgc

SEQ ID NO: 22926 - DNA, 18 bp, Homo sapiens
ccctcacgtgcaggtagg

SEQ ID NO: 22927 - DNA, 21 bp, Homo sapiens
ctgaagttgcttttctcctcc

SEQ ID NO: 22928 - DNA, 21 bp, Homo sapiens
gtacatgtcagcaaaagcact

SEQ ID NO: 22929 - DNA, 17 bp, Homo sapiens
gtgggatgaggaggtgc

SEQ ID NO: 22930 - DNA, 23 bp, Homo sapiens
atccacggtgcccacctcacttc

SEQ ID NO: 22931 - DNA, 18 bp, Homo sapiens
agcggtcctggaccacac

SEQ ID NO: 22932 - DNA, 20 bp, Homo sapiens
tgctgaggaagactgcattc

SEQ ID NO: 22933 - DNA, 18 bp, Homo sapiens
cttcccctgcatcaactg

SEQ ID NO: 22934 - DNA, 24 bp, Homo sapiens
ccatctccatcatcctgagtaaat

SEQ ID NO: 22935 - DNA, 21 bp, Homo sapiens
ccttggcgacattgtagacat

SEQ ID NO: 22936 - DNA, 24 bp, Homo sapiens
gctgtcttgttgccattgctgacc

SEQ ID NO: 22937 - DNA, 16 bp, Homo sapiens
ctctccccgactgagg

SEQ ID NO: 22938 - DNA, 19 bp, Homo sapiens
gtgacatccctttgtgccc

SEQ ID NO: 22939 - DNA, 16 bp, Homo sapiens
gggtcagcagggccct

SEQ ID NO: 22940 - DNA, 21 bp, Homo sapiens
atggcgtgtcggcagtatgtc

SEQ ID NO: 22941 - DNA, 22 bp, Homo sapiens
ctacctgtgtggcacactcagc

SEQ ID NO: 22942 - DNA, 23 bp, Homo sapiens
cactgctaaggtgagggccagcc

SEQ ID NO: 22943 - DNA, 16 bp, Homo sapiens
gggactgggaagtggg

SEQ ID NO: 22944 - DNA, 16 bp, Homo sapiens
cttgctgtctgcgtgc

SEQ ID NO: 22945 - DNA, 16 bp, Homo sapiens
accacgcccgccctga

SEQ ID NO: 22946 - DNA, 20 bp, Homo sapiens
cctgacctcaggtgatctgc

SEQ ID NO: 22947 - DNA, 21 bp, Homo sapiens
gtcattgatgtagccattgcc

SEQ ID NO: 22948 - DNA, 24 bp, Homo sapiens
acccctccctcttgctaccttttg

SEQ ID NO: 22949 - DNA, 16 bp, Homo sapiens
gtcccagcccctatct

SEQ ID NO: 22950 - DNA, 24 bp, Homo sapiens
ctatatacttggcattctgtttgc

SEQ ID NO: 22951 - DNA, 23 bp, Homo sapiens
agggtctcaggactagtgaaagt

SEQ ID NO: 22952 - DNA, 20 bp, Homo sapiens
caaaccctggttgcaggtgg

SEQ ID NO: 22953 - DNA, 20 bp, Homo sapiens
gccgccacatctctacttcc

SEQ ID NO: 22954 - DNA, 19 bp, Homo sapiens
ttcgagatgccaagctgta

SEQ ID NO: 22955 - DNA, 16 bp, Homo sapiens
gaggccagagggctga

SEQ ID NO: 22956 - DNA, 22 bp, Homo sapiens
tcatcggcagagccttcaatgc

SEQ ID NO: 22957 - DNA, 19 bp, Homo sapiens
ctcatcagagctgttggtc

SEQ ID NO: 22958 - DNA, 22 bp, Homo sapiens
ctcctgagttcagacagagttc

SEQ ID NO: 22959 - DNA, 24 bp, Homo sapiens
ccccatctgcctggagactccttc

SEQ ID NO: 22960 - DNA, 17 bp, Homo sapiens
gaggcaaaggctgggcc

SEQ ID NO: 22961 - DNA, 18 bp, Homo sapiens
cagacccaaccctacctc

SEQ ID NO: 22962 - DNA, 20 bp, Homo sapiens
taacccatggagaccagacc

SEQ ID NO: 22963 - DNA, 19 bp, Homo sapiens
tggctccttccatggtccc

SEQ ID NO: 22964 - DNA, 16 bp, Homo sapiens
ctgcagctggggctgc

SEQ ID NO: 22965 - DNA, 16 bp, Homo sapiens
tacccacaggctaccc

SEQ ID NO: 22966 - DNA, 16 bp, Homo sapiens
ccgcacacgcggcact

SEQ ID NO: 22967 - DNA, 20 bp, Homo sapiens
tcgttcaaatgcgggtgagc

SEQ ID NO: 22968 - DNA, 16 bp, Homo sapiens
aagaagccgctgcagc

SEQ ID NO: 22969 - DNA, 18 bp, Homo sapiens
gagcgtgcagccctgccc

SEQ ID NO: 22970 - DNA, 24 bp, Homo sapiens
caggggcagacgcccagcagggcc

SEQ ID NO: 22971 - DNA, 23 bp, Homo sapiens
ccctcaggcgtgagcccctcgct

SEQ ID NO: 22972 - DNA, 24 bp, Homo sapiens
ggacatttttgcccaagcccctct

SEQ ID NO: 22973 - DNA, 22 bp, Homo sapiens
gcactatggcatctatgcctgc

SEQ ID NO: 22974 - DNA, 23 bp, Homo sapiens
caggtgaagaggagaccccaggg

SEQ ID NO: 22975 - DNA, 21 bp, Homo sapiens
ggctcatctacaggtgagtgc

SEQ ID NO: 22976 - DNA, 17 bp, Homo sapiens
actggttgcggtgggcc

SEQ ID NO: 22977 - DNA, 20 bp, Homo sapiens
gtgagggggtgctcagggga

SEQ ID NO: 22978 - DNA, 18 bp, Homo sapiens
ctcaccgtcctggttcat

SEQ ID NO: 22979 - DNA, 17 bp, Homo sapiens
gggagggacactgaccc

SEQ ID NO: 22980 - DNA, 19 bp, Homo sapiens
caggacgacacgccagtcc

SEQ ID NO: 22981 - DNA, 24 bp, Homo sapiens
ggggcagggatgtgccccgtggac

SEQ ID NO: 22982 - DNA, 16 bp, Homo sapiens
ctgggctgtgcttcgc

SEQ ID NO: 22983 - DNA, 24 bp, Homo sapiens
ctgaagaagtgcctgcaggcgggg

SEQ ID NO: 22984 - DNA, 16 bp, Homo sapiens
ggggagccaccaggga

SEQ ID NO: 22985 - DNA, 20 bp, Homo sapiens
acaagaaatgggcagcggga

SEQ ID NO: 22986 - DNA, 16 bp, Homo sapiens
agggctctggctgcag

SEQ ID NO: 22987 - DNA, 16 bp, Homo sapiens
cagaacgagcgccagc

SEQ ID NO: 22988 - DNA, 24 bp, Homo sapiens
caccatcctctggctccagcttag

SEQ ID NO: 22989 - DNA, 16 bp, Homo sapiens
gtcccggccggagtcc

SEQ ID NO: 22990 - DNA, 19 bp, Homo sapiens
ccctgctgtgacccgggaa

SEQ ID NO: 22991 - DNA, 16 bp, Homo sapiens
ccacacccatgtctgc

SEQ ID NO: 22992 - DNA, 24 bp, Homo sapiens
ttctcgggaggtggcagggagtac

SEQ ID NO: 22993 - DNA, 23 bp, Homo sapiens
cttataacagctgaaacctgtgc

SEQ ID NO: 22994 - DNA, 24 bp, Homo sapiens
tggtgacatcaatattctcatcag

SEQ ID NO: 22995 - DNA, 20 bp, Homo sapiens
cacagcagggcttggcttcc

SEQ ID NO: 22996 - DNA, 16 bp, Homo sapiens
ccgcagggggaggaag

SEQ ID NO: 22997 - DNA, 19 bp, Homo sapiens
cccccggggctccaagtac

SEQ ID NO: 22998 - DNA, 16 bp, Homo sapiens
aggttcttggcccact

SEQ ID NO: 22999 - DNA, 23 bp, Homo sapiens
atcacaacctcctcctccaacag

SEQ ID NO: 23000 - DNA, 16 bp, Homo sapiens
tccccagcaggcaggc

SEQ ID NO: 23001 - DNA, 22 bp, Homo sapiens
cctcctctccatactcctcttc

SEQ ID NO: 23002 - DNA, 17 bp, Homo sapiens
atgtgtgtgccctgtct

SEQ ID NO: 23003 - DNA, 19 bp, Homo sapiens
gcctactcttcatggccgt

SEQ ID NO: 23004 - DNA, 22 bp, Homo sapiens
tgaatcagaggtatgtgtgtcc

SEQ ID NO: 23005 - DNA, 21 bp, Homo sapiens
ctctgagcctctggctgatgt

SEQ ID NO: 23006 - DNA, 16 bp, Homo sapiens
ccagaggcagagacca

SEQ ID NO: 23007 - DNA, 24 bp, Homo sapiens
ttccttgggtgcctgagatggtgg

SEQ ID NO: 23008 - DNA, 16 bp, Homo sapiens
ccctgggcaccaccgg

SEQ ID NO: 23009 - DNA, 24 bp, Homo sapiens
gtctgccataacaggcacccctgt

SEQ ID NO: 23010 - DNA, 18 bp, Homo sapiens
caatgcccggaaccgaga

SEQ ID NO: 23011 - DNA, 17 bp, Homo sapiens
ttctcctcggggccatc

SEQ ID NO: 23012 - DNA, 22 bp, Homo sapiens
agttacctggcttgaagaggac

SEQ ID NO: 23013 - DNA, 16 bp, Homo sapiens
ccgaggcctctgctgc

SEQ ID NO: 23014 - DNA, 22 bp, Homo sapiens
agtgagaggcagatggaagtca

SEQ ID NO: 23015 - DNA, 17 bp, Homo sapiens
cgtgtcctgcaggaaac

SEQ ID NO: 23016 - DNA, 17 bp, Homo sapiens
accccccaggatagagg

SEQ ID NO: 23017 - DNA, 24 bp, Homo sapiens
gtttgcctgcatgaaggccttggt

SEQ ID NO: 23018 - DNA, 16 bp, Homo sapiens
ccctgagccccagccg

SEQ ID NO: 23019 - DNA, 19 bp, Homo sapiens
ggtcctgcaaggcctctac

SEQ ID NO: 23020 - DNA, 16 bp, Homo sapiens
ggccccaggtccatgt

SEQ ID NO: 23021 - DNA, 16 bp, Homo sapiens
ggctggctggggtggt

SEQ ID NO: 23022 - DNA, 20 bp, Homo sapiens
cttataacagccgtaaacct

SEQ ID NO: 23023 - DNA, 24 bp, Homo sapiens
gagaggcagagaaaggttagaggt

SEQ ID NO: 23024 - DNA, 18 bp, Homo sapiens
ggcctgaaggatcctgag

SEQ ID NO: 23025 - DNA, 19 bp, Homo sapiens
atgctgttgaactgagacc

SEQ ID NO: 23026 - DNA, 23 bp, Homo sapiens
gctgagccagcacagcaaggccc

SEQ ID NO: 23027 - DNA, 20 bp, Homo sapiens
caggagcaatttcccaaacc

SEQ ID NO: 23028 - DNA, 24 bp, Homo sapiens
atgtggcttttcctcgaaattcct

SEQ ID NO: 23029 - DNA, 19 bp, Homo sapiens
ttgcggaaaaagaggagct

SEQ ID NO: 23030 - DNA, 20 bp, Homo sapiens
ccctccctttcctgggaggg

SEQ ID NO: 23031 - DNA, 23 bp, Homo sapiens
cccccactagtttttgaacatat

SEQ ID NO: 23032 - DNA, 23 bp, Homo sapiens
tgatggcgtcctctctcctgttc

SEQ ID NO: 23033 - DNA, 23 bp, Homo sapiens
gcaaatgtttcgtttcagtagat

SEQ ID NO: 23034 - DNA, 24 bp, Homo sapiens
ctttgaggtttatcactgcggaac

SEQ ID NO: 23035 - DNA, 18 bp, Homo sapiens
gggcatttctgctgggta

SEQ ID NO: 23036 - DNA, 21 bp, Homo sapiens
caatggagaagctcctttgtg

SEQ ID NO: 23037 - DNA, 20 bp, Homo sapiens
tttgaacagacctgagcccc

SEQ ID NO: 23038 - DNA, 19 bp, Homo sapiens
agcaccggcccctttctct

SEQ ID NO: 23039 - DNA, 24 bp, Homo sapiens
ttcatgtcctcttgcaggcgaggt

SEQ ID NO: 23040 - DNA, 16 bp, Homo sapiens
ggctccgtcccctggc

SEQ ID NO: 23041 - DNA, 21 bp, Homo sapiens
tgactggtgtgaaaagtgttg

SEQ ID NO: 23042 - DNA, 24 bp, Homo sapiens
tacagccagcaccctcctcggtgc

SEQ ID NO: 23043 - DNA, 23 bp, Homo sapiens
gcatttggtgtacagtgacagtt

SEQ ID NO: 23044 - DNA, 20 bp, Homo sapiens
ctacattgaggggttgggcc

SEQ ID NO: 23045 - DNA, 16 bp, Homo sapiens
tgtcacacttccgctg

SEQ ID NO: 23046 - DNA, 22 bp, Homo sapiens
gtggatgagggctgactataag

SEQ ID NO: 23047 - DNA, 17 bp, Homo sapiens
ccgaaaggctgtggagc

SEQ ID NO: 23048 - DNA, 22 bp, Homo sapiens
ttcctctctctaaggggttccc

SEQ ID NO: 23049 - DNA, 18 bp, Homo sapiens
ggaatacagggcccaatc

SEQ ID NO: 23050 - DNA, 24 bp, Homo sapiens
ccccacagcttgcttacctcagca

SEQ ID NO: 23051 - DNA, 20 bp, Homo sapiens
cctgagtgagtccagggtgc

SEQ ID NO: 23052 - DNA, 20 bp, Homo sapiens
agatgtcaacttgttgctcc

SEQ ID NO: 23053 - DNA, 17 bp, Homo sapiens
tctgggagccatccaac

SEQ ID NO: 23054 - DNA, 16 bp, Homo sapiens
acacaaacctggtccc

SEQ ID NO: 23055 - DNA, 24 bp, Homo sapiens
ctcgttgcacggcctgctctctct

SEQ ID NO: 23056 - DNA, 18 bp, Homo sapiens
cctgagcagaaggctctg

SEQ ID NO: 23057 - DNA, 23 bp, Homo sapiens
ctagatgggattgggtctctaag

SEQ ID NO: 23058 - DNA, 16 bp, Homo sapiens
ctggagttaccccacc

SEQ ID NO: 23059 - DNA, 24 bp, Homo sapiens
ccccccgaaaacccttaccagagc

SEQ ID NO: 23060 - DNA, 24 bp, Homo sapiens
tttccagttagtaaatgaaacaac

SEQ ID NO: 23061 - DNA, 24 bp, Homo sapiens
catacaagcctctccaccaatcac

SEQ ID NO: 23062 - DNA, 24 bp, Homo sapiens
aggatttctacatagtggaacccc

SEQ ID NO: 23063 - DNA, 20 bp, Homo sapiens
ccctcaccccagctaagttg

SEQ ID NO: 23064 - DNA, 17 bp, Homo sapiens
cccttctctctgccccc

SEQ ID NO: 23065 - DNA, 16 bp, Homo sapiens
ctcccatcctgtgccc

SEQ ID NO: 23066 - DNA, 19 bp, Homo sapiens
gcgagaggatattccagtg

SEQ ID NO: 23067 - DNA, 21 bp, Homo sapiens
ctttcaccttcaaatgccagg

SEQ ID NO: 23068 - DNA, 20 bp, Homo sapiens
gtccttactgccatttgacc

SEQ ID NO: 23069 - DNA, 24 bp, Homo sapiens
cataggatatacggttcaggtacc

SEQ ID NO: 23070 - DNA, 17 bp, Homo sapiens
tgttgtcccatgttgcc

SEQ ID NO: 23071 - DNA, 24 bp, Homo sapiens
accagttccagctccttcatatag

SEQ ID NO: 23072 - DNA, 17 bp, Homo sapiens
gctcaatggtcaggagt

SEQ ID NO: 23073 - DNA, 23 bp, Homo sapiens
cctttctagagagaaaaggagag

SEQ ID NO: 23074 - DNA, 17 bp, Homo sapiens
ctgctggacatcgtctc

SEQ ID NO: 23075 - DNA, 20 bp, Homo sapiens
ctctgtagaggcagggagga

SEQ ID NO: 23076 - DNA, 22 bp, Homo sapiens
ctggcacaaacagtctagaacc

SEQ ID NO: 23077 - DNA, 22 bp, Homo sapiens
tcttctcttctctgccccggct

SEQ ID NO: 23078 - DNA, 23 bp, Homo sapiens
ggggaaagacactgcttaatgag

SEQ ID NO: 23079 - DNA, 23 bp, Homo sapiens
cacatagcccttgccataagaag

SEQ ID NO: 23080 - DNA, 19 bp, Homo sapiens
tccttctacatccagacgt

SEQ ID NO: 23081 - DNA, 24 bp, Homo sapiens
aaccactccaaatctgaaaggatg

SEQ ID NO: 23082 - DNA, 21 bp, Homo sapiens
gagatccaggactttatgagg

SEQ ID NO: 23083 - DNA, 21 bp, Homo sapiens
ccaagcagggcctgactcggt

SEQ ID NO: 23084 - DNA, 24 bp, Homo sapiens
cattaggctttcaggatgttgaaa

SEQ ID NO: 23085 - DNA, 18 bp, Homo sapiens
ccaccctccttccttcct

SEQ ID NO: 23086 - DNA, 24 bp, Homo sapiens
ttatttgatttttcaggtgaaaag

SEQ ID NO: 23087 - DNA, 24 bp, Homo sapiens
gaagtcctcaccgaagcctttctt

SEQ ID NO: 23088 - DNA, 17 bp, Homo sapiens
actttgcttggccacac

SEQ ID NO: 23089 - DNA, 23 bp, Homo sapiens
acgtagatgggcagaggaaggcc

SEQ ID NO: 23090 - DNA, 21 bp, Homo sapiens
tagaagtcagctctgtcttcc

SEQ ID NO: 23091 - DNA, 18 bp, Homo sapiens
agcagctgagctaagcag

SEQ ID NO: 23092 - DNA, 18 bp, Homo sapiens
ggaccagtgaatcccagt

SEQ ID NO: 23093 - DNA, 24 bp, Homo sapiens
ggccacagtgggaagatcaaaggg

SEQ ID NO: 23094 - DNA, 17 bp, Homo sapiens
ggcttaggtatccctgg

SEQ ID NO: 23095 - DNA, 23 bp, Homo sapiens
cctccaagatgaagataaaaatc

SEQ ID NO: 23096 - DNA, 18 bp, Homo sapiens
ttacgtgtaggactgtgc

SEQ ID NO: 23097 - DNA, 23 bp, Homo sapiens
tcataggtattattgagactggg

SEQ ID NO: 23098 - DNA, 24 bp, Homo sapiens
gtgcctacctaaatgtgtgtgatg

SEQ ID NO: 23099 - DNA, 23 bp, Homo sapiens
gacccagagtagcaaggagtcag

SEQ ID NO: 23100 - DNA, 16 bp, Homo sapiens
tggccacactttgtcc

SEQ ID NO: 23101 - DNA, 21 bp, Homo sapiens
tggaagaagtcgatggaaaac

SEQ ID NO: 23102 - DNA, 19 bp, Homo sapiens
aggtcattgaatacgcacg

SEQ ID NO: 23103 - DNA, 24 bp, Homo sapiens
ttccatgagccagtgccctgaagc

SEQ ID NO: 23104 - DNA, 17 bp, Homo sapiens
ttgtgcctttcaggggt

SEQ ID NO: 23105 - DNA, 24 bp, Homo sapiens
tcccagacatcattcttacctggt

SEQ ID NO: 23106 - DNA, 24 bp, Homo sapiens
ttgtgggcattttgagtatcttct

SEQ ID NO: 23107 - DNA, 22 bp, Homo sapiens
aagcacacggataccccggagc

SEQ ID NO: 23108 - DNA, 21 bp, Homo sapiens
ttgaagatagtccctgacacc

SEQ ID NO: 23109 - DNA, 19 bp, Homo sapiens
gatgtgggtgacagggttg

SEQ ID NO: 23110 - DNA, 21 bp, Homo sapiens
tcaagtctcctgactccaaat

SEQ ID NO: 23111 - DNA, 20 bp, Homo sapiens
ccactggcatctggtagatg

SEQ ID NO: 23112 - DNA, 22 bp, Homo sapiens
ttaggatgagagaccctgttct

SEQ ID NO: 23113 - DNA, 16 bp, Homo sapiens
ggttcacagtgtgcac

SEQ ID NO: 23114 - DNA, 19 bp, Homo sapiens
aacttggtctgagtgaaac

SEQ ID NO: 23115 - DNA, 17 bp, Homo sapiens
ggagcggcctgagagct

SEQ ID NO: 23116 - DNA, 24 bp, Homo sapiens
ctctcatatgggaaggaaggatca

SEQ ID NO: 23117 - DNA, 24 bp, Homo sapiens
aggtttgatagaccccataaatac

SEQ ID NO: 23118 - DNA, 16 bp, Homo sapiens
tcctggacactctggt

SEQ ID NO: 23119 - DNA, 22 bp, Homo sapiens
gtgttgggattacaggcatgag

SEQ ID NO: 23120 - DNA, 16 bp, Homo sapiens
tccccgctttcctcac

SEQ ID NO: 23121 - DNA, 20 bp, Homo sapiens
aatttggaacttggtctgtc

SEQ ID NO: 23122 - DNA, 24 bp, Homo sapiens
aactgacatgttcaatgtttgttc

SEQ ID NO: 23123 - DNA, 18 bp, Homo sapiens
taaggcctggttaccaga

SEQ ID NO: 23124 - DNA, 18 bp, Homo sapiens
aatcctgggagagttgtc

SEQ ID NO: 23125 - DNA, 22 bp, Homo sapiens
cgagatgtatccaacagcaagc

SEQ ID NO: 23126 - DNA, 17 bp, Homo sapiens
gtggggagcatttaggg

SEQ ID NO: 23127 - DNA, 19 bp, Homo sapiens
tctaccaaaccagttttcc

SEQ ID NO: 23128 - DNA, 20 bp, Homo sapiens
atcttcctaggtctggagac

SEQ ID NO: 23129 - DNA, 23 bp, Homo sapiens
ccaccaggatcctaaggcaaaac

SEQ ID NO: 23130 - DNA, 23 bp, Homo sapiens
cattgagaaccttccaaatagag

SEQ ID NO: 23131 - DNA, 22 bp, Homo sapiens
aaccccagagatgaaaaaggag

SEQ ID NO: 23132 - DNA, 23 bp, Homo sapiens
tcaagcctacactacatccattt

SEQ ID NO: 23133 - DNA, 22 bp, Homo sapiens
tccaaacaagctggctaaaagt

SEQ ID NO: 23134 - DNA, 20 bp, Homo sapiens
agagggaagattgcttgagc

SEQ ID NO: 23135 - DNA, 22 bp, Homo sapiens
actaaatgagttcatttctgtc

SEQ ID NO: 23136 - DNA, 21 bp, Homo sapiens
tgcactccaccaacaccaacc

SEQ ID NO: 23137 - DNA, 21 bp, Homo sapiens
ttagtccagtgatttatatag

SEQ ID NO: 23138 - DNA, 16 bp, Homo sapiens
acctcggagagctccc

SEQ ID NO: 23139 - DNA, 20 bp, Homo sapiens
ggggacatctcctcattgaa

SEQ ID NO: 23140 - DNA, 23 bp, Homo sapiens
tcatttatggtcagggtatctga

SEQ ID NO: 23141 - DNA, 20 bp, Homo sapiens
ttggagtcagtggagaattg

SEQ ID NO: 23142 - DNA, 19 bp, Homo sapiens
tctcagcacttggtgaccc

SEQ ID NO: 23143 - DNA, 22 bp, Homo sapiens
agaagaatgtgttggttgtctc

SEQ ID NO: 23144 - DNA, 24 bp, Homo sapiens
cgagcatcagcagtttaggccagg

SEQ ID NO: 23145 - DNA, 16 bp, Homo sapiens
aatggcaggttggccg

SEQ ID NO: 23146 - DNA, 24 bp, Homo sapiens
cttctaagacagggaacaggatgg

SEQ ID NO: 23147 - DNA, 16 bp, Homo sapiens
ccacaggcgtgtgagc

SEQ ID NO: 23148 - DNA, 23 bp, Homo sapiens
gttacatccaggtgtgactacag

SEQ ID NO: 23149 - DNA, 20 bp, Homo sapiens
cagctgaacagatgatcagg

SEQ ID NO: 23150 - DNA, 24 bp, Homo sapiens
ttccctaggaagacagggtaagct

SEQ ID NO: 23151 - DNA, 18 bp, Homo sapiens
ccgggtcttggccccgtc

SEQ ID NO: 23152 - DNA, 18 bp, Homo sapiens
gtggagtgcctgtgatca

SEQ ID NO: 23153 - DNA, 16 bp, Homo sapiens
gcccggctgctcagtc

SEQ ID NO: 23154 - DNA, 16 bp, Homo sapiens
ctgggggaactgtccc

SEQ ID NO: 23155 - DNA, 20 bp, Homo sapiens
ccagcgctacgtcctttacc

SEQ ID NO: 23156 - DNA, 24 bp, Homo sapiens
caagtccgactcacctgtgaggta

SEQ ID NO: 23157 - DNA, 16 bp, Homo sapiens
cgttcgcaggacgggc

SEQ ID NO: 23158 - DNA, 21 bp, Homo sapiens
gatagcgctggaaggcctcgt

SEQ ID NO: 23159 - DNA, 16 bp, Homo sapiens
gaccagcgggccatga

SEQ ID NO: 23160 - DNA, 24 bp, Homo sapiens
atcgtactggaattgaaagttgtt

SEQ ID NO: 23161 - DNA, 16 bp, Homo sapiens
taagtcacgggggcgc

SEQ ID NO: 23162 - DNA, 19 bp, Homo sapiens
tgaggccagggccagaggg

SEQ ID NO: 23163 - DNA, 16 bp, Homo sapiens
cagggtgtgggtcctc

SEQ ID NO: 23164 - DNA, 24 bp, Homo sapiens
gaaaaccaaagcctggagcttgtc

SEQ ID NO: 23165 - DNA, 17 bp, Homo sapiens
tcggaatcctcggccac

SEQ ID NO: 23166 - DNA, 16 bp, Homo sapiens
cacccggacaggccgt

SEQ ID NO: 23167 - DNA, 18 bp, Homo sapiens
ccccactgctcacgtcgc

SEQ ID NO: 23168 - DNA, 24 bp, Homo sapiens
agcggccgagttcagtcctgctct

SEQ ID NO: 23169 - DNA, 19 bp, Homo sapiens
cactccactccactccact

SEQ ID NO: 23170 - DNA, 22 bp, Homo sapiens
gcatgtccttcatcccggtggc

SEQ ID NO: 23171 - DNA, 24 bp, Homo sapiens
cggaacgaatcttaagagaaaaat

SEQ ID NO: 23172 - DNA, 22 bp, Homo sapiens
cgtcttctcgaccagaggcgac

SEQ ID NO: 23173 - DNA, 20 bp, Homo sapiens
tgagaacatggttcttcagt

SEQ ID NO: 23174 - DNA, 20 bp, Homo sapiens
aaagaggtgcttgatgatgc

SEQ ID NO: 23175 - DNA, 24 bp, Homo sapiens
tggactcttcaatagataggcttt

SEQ ID NO: 23176 - DNA, 19 bp, Homo sapiens
cgtttcacaatgtcctacc

SEQ ID NO: 23177 - DNA, 24 bp, Homo sapiens
tttttctggtgctgacggtgtcgt

SEQ ID NO: 23178 - DNA, 22 bp, Homo sapiens
gaacgcaaggagcattctcttg

SEQ ID NO: 23179 - DNA, 21 bp, Homo sapiens
cgaccagatcctggacctcag

SEQ ID NO: 23180 - DNA, 21 bp, Homo sapiens
ccagccttatccaagtataac

SEQ ID NO: 23181 - DNA, 21 bp, Homo sapiens
aacaccaggatgtcttcaatc

SEQ ID NO: 23182 - DNA, 18 bp, Homo sapiens
ggcccatgaagctgttga

SEQ ID NO: 23183 - DNA, 24 bp, Homo sapiens
agaggtcctgagagtttgagttag

SEQ ID NO: 23184 - DNA, 17 bp, Homo sapiens
gctcacagacagcaagt

SEQ ID NO: 23185 - DNA, 24 bp, Homo sapiens
cttccattggaaggagggatactc

SEQ ID NO: 23186 - DNA, 19 bp, Homo sapiens
cccctatgaccacgtgctt

SEQ ID NO: 23187 - DNA, 22 bp, Homo sapiens
ctgttttggtcttagcctacac

SEQ ID NO: 23188 - DNA, 23 bp, Homo sapiens
caagccgtgactcagaatggcac

SEQ ID NO: 23189 - DNA, 21 bp, Homo sapiens
cgagagtgttcttgcagaact

SEQ ID NO: 23190 - DNA, 17 bp, Homo sapiens
gcagctcaggcaggggc

SEQ ID NO: 23191 - DNA, 23 bp, Homo sapiens
gaaggtgcatcgtggcagaagcc

SEQ ID NO: 23192 - DNA, 19 bp, Homo sapiens
ccagccagaaggtgcccac

SEQ ID NO: 23193 - DNA, 22 bp, Homo sapiens
cacgaagctgctccgttcttat

SEQ ID NO: 23194 - DNA, 21 bp, Homo sapiens
ccgtgggtgggaccgcgcttt

SEQ ID NO: 23195 - DNA, 17 bp, Homo sapiens
caccagcagggaccctc

SEQ ID NO: 23196 - DNA, 24 bp, Homo sapiens
ctgtgtttcagtgcattcatctcc

SEQ ID NO: 23197 - DNA, 22 bp, Homo sapiens
ggatgctgggaaaggtcagtga

SEQ ID NO: 23198 - DNA, 19 bp, Homo sapiens
gccgagaggaatagaagtc

SEQ ID NO: 23199 - DNA, 18 bp, Homo sapiens
ctggctgcaggctgagct

SEQ ID NO: 23200 - DNA, 20 bp, Homo sapiens
atcaacgcattctccttgtc

SEQ ID NO: 23201 - DNA, 24 bp, Homo sapiens
gtggctccagtgcttggaacagtc

SEQ ID NO: 23202 - DNA, 24 bp, Homo sapiens
gctggaaatgaaaagaaagacttt

SEQ ID NO: 23203 - DNA, 23 bp, Homo sapiens
gtctttcctctgcaggagactac

SEQ ID NO: 23204 - DNA, 20 bp, Homo sapiens
ttttcctccccagtttactt

SEQ ID NO: 23205 - DNA, 23 bp, Homo sapiens
caacgtcggaatcatgttcaggg

SEQ ID NO: 23206 - DNA, 16 bp, Homo sapiens
gcaggagaccagaagc

SEQ ID NO: 23207 - DNA, 17 bp, Homo sapiens
ggtaagtgcagcctgag

SEQ ID NO: 23208 - DNA, 24 bp, Homo sapiens
atctgtggatggaaacttgtaagc

SEQ ID NO: 23209 - DNA, 16 bp, Homo sapiens
ttcggattggggtgcc

SEQ ID NO: 23210 - DNA, 23 bp, Homo sapiens
tctttgtttctagtttttgaagt

SEQ ID NO: 23211 - DNA, 16 bp, Homo sapiens
cagcaaggcctggacg

SEQ ID NO: 23212 - DNA, 24 bp, Homo sapiens
gccctgcattctcttgccttcctt

SEQ ID NO: 23213 - DNA, 24 bp, Homo sapiens
ccagaaaaaaaaaaaaaacggtgc

SEQ ID NO: 23214 - DNA, 16 bp, Homo sapiens
cgtggtgtctggcacc

SEQ ID NO: 23215 - DNA, 18 bp, Homo sapiens
gtccaagagcttgcaggc

SEQ ID NO: 23216 - DNA, 22 bp, Homo sapiens
tgatgactgtgagtgaccgcag

SEQ ID NO: 23217 - DNA, 24 bp, Homo sapiens
ggctctcctgccgggtgtctatag

SEQ ID NO: 23218 - DNA, 16 bp, Homo sapiens
gttctgtggcctcact

SEQ ID NO: 23219 - DNA, 19 bp, Homo sapiens
gctgaagaggaggggagtg

SEQ ID NO: 23220 - DNA, 24 bp, Homo sapiens
taagcctcccgtatatggtgcctg

SEQ ID NO: 23221 - DNA, 24 bp, Homo sapiens
gcaagtaataaggatcaactgtcc

SEQ ID NO: 23222 - DNA, 21 bp, Homo sapiens
caatctgtttccagggcctac

SEQ ID NO: 23223 - DNA, 24 bp, Homo sapiens
tggattcatgccaggcccctgtgg

SEQ ID NO: 23224 - DNA, 22 bp, Homo sapiens
cagtcgttcataaggaccattc

SEQ ID NO: 23225 - DNA, 21 bp, Homo sapiens
ttgctctctaggtgacaagtg

SEQ ID NO: 23226 - DNA, 16 bp, Homo sapiens
ccagcctcctccccgt

SEQ ID NO: 23227 - DNA, 21 bp, Homo sapiens
ccccatgtaaggctttttttg

SEQ ID NO: 23228 - DNA, 18 bp, Homo sapiens
cacctgccacttttgacc

SEQ ID NO: 23229 - DNA, 22 bp, Homo sapiens
aaggcccatgagcacatttttg

SEQ ID NO: 23230 - DNA, 19 bp, Homo sapiens
gcccgagttcttagagctg

SEQ ID NO: 23231 - DNA, 22 bp, Homo sapiens
acatactcccacttctgaatgt

SEQ ID NO: 23232 - DNA, 21 bp, Homo sapiens
cctgactggggctgatctttg

SEQ ID NO: 23233 - DNA, 18 bp, Homo sapiens
accacccacggagagaca

SEQ ID NO: 23234 - DNA, 24 bp, Homo sapiens
cttggtcaagggcaggagggggtc

SEQ ID NO: 23235 - DNA, 21 bp, Homo sapiens
gagaatgtgcttacctgcttc

SEQ ID NO: 23236 - DNA, 17 bp, Homo sapiens
cttctgcagcacgagac

SEQ ID NO: 23237 - DNA, 18 bp, Homo sapiens
catgtccactcagtgggc

SEQ ID NO: 23238 - DNA, 24 bp, Homo sapiens
attccttgggaagagttttgggac

SEQ ID NO: 23239 - DNA, 16 bp, Homo sapiens
tctgctgtgggcatgc

SEQ ID NO: 23240 - DNA, 20 bp, Homo sapiens
tttgctgtgcccaacccgaa

SEQ ID NO: 23241 - DNA, 16 bp, Homo sapiens
gcaggggcctggggtc

SEQ ID NO: 23242 - DNA, 18 bp, Homo sapiens
ggaatgctcctgctgtct

SEQ ID NO: 23243 - DNA, 24 bp, Homo sapiens
tacaacatacctttcaggttaaca

SEQ ID NO: 23244 - DNA, 17 bp, Homo sapiens
ctggctggtatgggggc

SEQ ID NO: 23245 - DNA, 16 bp, Homo sapiens
ggacaaggcacacagg

SEQ ID NO: 23246 - DNA, 20 bp, Homo sapiens
ctttgccctctcaggacccc

SEQ ID NO: 23247 - DNA, 24 bp, Homo sapiens
acgagccacacacatctccagggc

SEQ ID NO: 23248 - DNA, 24 bp, Homo sapiens
ccctacacatttgacatcaacctc

SEQ ID NO: 23249 - DNA, 23 bp, Homo sapiens
tctgatgtcctaggagctaattg

SEQ ID NO: 23250 - DNA, 18 bp, Homo sapiens
tctgatcagcgtcaaagc

SEQ ID NO: 23251 - DNA, 23 bp, Homo sapiens
gaagcttcagccacagaacaatt

SEQ ID NO: 23252 - DNA, 17 bp, Homo sapiens
ctctcctcctgttcctg

SEQ ID NO: 23253 - DNA, 24 bp, Homo sapiens
ttcatcaatattgcttttctttcc

SEQ ID NO: 23254 - DNA, 21 bp, Homo sapiens
tcctaaaagagacaggccatg

SEQ ID NO: 23255 - DNA, 24 bp, Homo sapiens
atgcaagtccaattttaaggtaag

SEQ ID NO: 23256 - DNA, 18 bp, Homo sapiens
gcatcgtccagtacatgt

SEQ ID NO: 23257 - DNA, 16 bp, Homo sapiens
ctgggggagctgggga

SEQ ID NO: 23258 - DNA, 16 bp, Homo sapiens
caggaggtcccccggc

SEQ ID NO: 23259 - DNA, 24 bp, Homo sapiens
caggctgtgcccagctgcctccgg

SEQ ID NO: 23260 - DNA, 16 bp, Homo sapiens
gctctgcgtgggcagc

SEQ ID NO: 23261 - DNA, 24 bp, Homo sapiens
cctcgcgtccattgcctgcagtac

SEQ ID NO: 23262 - DNA, 20 bp, Homo sapiens
ctgaaatctcttctcgaggc

SEQ ID NO: 23263 - DNA, 17 bp, Homo sapiens
caacggctgcaacctgc

SEQ ID NO: 23264 - DNA, 19 bp, Homo sapiens
tgcacccagagagaaaggc

SEQ ID NO: 23265 - DNA, 23 bp, Homo sapiens
tccaacatggagccgaagttttc

SEQ ID NO: 23266 - DNA, 17 bp, Homo sapiens
gcagggtctctgagggg

SEQ ID NO: 23267 - DNA, 23 bp, Homo sapiens
agaaacttcctggtctgaccatt

SEQ ID NO: 23268 - DNA, 17 bp, Homo sapiens
ctgagcatggtccatgc

SEQ ID NO: 23269 - DNA, 18 bp, Homo sapiens
gctgctgggtttggcagc

SEQ ID NO: 23270 - DNA, 24 bp, Homo sapiens
ttccctttcctgtgatgaaggagc

SEQ ID NO: 23271 - DNA, 24 bp, Homo sapiens
gatggcttcatggccaggtaggag

SEQ ID NO: 23272 - DNA, 24 bp, Homo sapiens
agggaacgaagcccatagacctgg

SEQ ID NO: 23273 - DNA, 17 bp, Homo sapiens
gaacaagcaggcagaga

SEQ ID NO: 23274 - DNA, 21 bp, Homo sapiens
gtaaccatccccctggcagta

SEQ ID NO: 23275 - DNA, 24 bp, Homo sapiens
tgtttaagatatgtgtgtgtgatt

SEQ ID NO: 23276 - DNA, 16 bp, Homo sapiens
atggcaggagagcagg

SEQ ID NO: 23277 - DNA, 16 bp, Homo sapiens
cactgccgctgcctag

SEQ ID NO: 23278 - DNA, 17 bp, Homo sapiens
cagggttgaaaggggtg

SEQ ID NO: 23279 - DNA, 22 bp, Homo sapiens
tgatccttgtcctcctctgttc

SEQ ID NO: 23280 - DNA, 24 bp, Homo sapiens
gagcacaatggctttatttgtcac

SEQ ID NO: 23281 - DNA, 18 bp, Homo sapiens
gtgtgctggaaaagtgct

SEQ ID NO: 23282 - DNA, 18 bp, Homo sapiens
aggaggctctgcggagga

SEQ ID NO: 23283 - DNA, 21 bp, Homo sapiens
cctgggctctgtgggttttga

SEQ ID NO: 23284 - DNA, 17 bp, Homo sapiens
cgtggagtcccagtggc

SEQ ID NO: 23285 - DNA, 23 bp, Homo sapiens
acctttggtcaacataaaagctc

SEQ ID NO: 23286 - DNA, 19 bp, Homo sapiens
gagtccgcgggcgccgtcg

SEQ ID NO: 23287 - DNA, 16 bp, Homo sapiens
gccatggcccagtcgc

SEQ ID NO: 23288 - DNA, 16 bp, Homo sapiens
gggcgtcgtcgcggct

SEQ ID NO: 23289 - DNA, 24 bp, Homo sapiens
tcttcgcccagggctggggctggg

SEQ ID NO: 23290 - DNA, 18 bp, Homo sapiens
gtttctcccgctcgctgg

SEQ ID NO: 23291 - DNA, 21 bp, Homo sapiens
ttcgtcgggttcgtgcccctg

SEQ ID NO: 23292 - DNA, 17 bp, Homo sapiens
caaggagggaggcagaa

SEQ ID NO: 23293 - DNA, 17 bp, Homo sapiens
ctcccgagccgcagagg

SEQ ID NO: 23294 - DNA, 18 bp, Homo sapiens
gtagcggatggccaggcg

SEQ ID NO: 23295 - DNA, 19 bp, Homo sapiens
cggacagcggcagagcgcc

SEQ ID NO: 23296 - DNA, 17 bp, Homo sapiens
tgcgccggcactgcaga

SEQ ID NO: 23297 - DNA, 17 bp, Homo sapiens
cctgcacgagttgcgcc

SEQ ID NO: 23298 - DNA, 17 bp, Homo sapiens
tctgcggggccacggtc

SEQ ID NO: 23299 - DNA, 17 bp, Homo sapiens
gaccaagatcgagacgc

SEQ ID NO: 23300 - DNA, 16 bp, Homo sapiens
gcccttgcccctgccc

SEQ ID NO: 23301 - DNA, 19 bp, Homo sapiens
gggtctcagcgaggagagt

SEQ ID NO: 23302 - DNA, 22 bp, Homo sapiens
gagaccaggcccggcctgcgcc

SEQ ID NO: 23303 - DNA, 23 bp, Homo sapiens
ccttggggctgcccgctgtgccc

SEQ ID NO: 23304 - DNA, 17 bp, Homo sapiens
ttgggctccggggcagg

SEQ ID NO: 23305 - DNA, 24 bp, Homo sapiens
cggaggggcaggggcaagggcagg

SEQ ID NO: 23306 - DNA, 17 bp, Homo sapiens
gtaagggggtgttgccc

SEQ ID NO: 23307 - DNA, 18 bp, Homo sapiens
acaggggcaagggcaggg

SEQ ID NO: 23308 - DNA, 18 bp, Homo sapiens
agagacgcgtcggaggtt

SEQ ID NO: 23309 - DNA, 16 bp, Homo sapiens
ggatccccgtccgcct

SEQ ID NO: 23310 - DNA, 16 bp, Homo sapiens
ggtgggttccggggct

SEQ ID NO: 23311 - DNA, 16 bp, Homo sapiens
gacacggatccctggg

SEQ ID NO: 23312 - DNA, 24 bp, Homo sapiens
gcctccacacatacctggtacact

SEQ ID NO: 23313 - DNA, 16 bp, Homo sapiens
tcccaagggacaacct

SEQ ID NO: 23314 - DNA, 24 bp, Homo sapiens
agataagctgggatcgaaaaagta

SEQ ID NO: 23315 - DNA, 21 bp, Homo sapiens
gtccctggacgcagtcgtccc

SEQ ID NO: 23316 - DNA, 17 bp, Homo sapiens
gagccgggggttccttc

SEQ ID NO: 23317 - DNA, 20 bp, Homo sapiens
caactttggagctggccgca

SEQ ID NO: 23318 - DNA, 19 bp, Homo sapiens
acagacagggctctggaga

SEQ ID NO: 23319 - DNA, 23 bp, Homo sapiens
cttggctttgctgcattcatggc

SEQ ID NO: 23320 - DNA, 16 bp, Homo sapiens
tctgaggctgcagtct

SEQ ID NO: 23321 - DNA, 24 bp, Homo sapiens
tggcaaccagccagattcaagatc

SEQ ID NO: 23322 - DNA, 17 bp, Homo sapiens
tggtcctctgagttggg

SEQ ID NO: 23323 - DNA, 24 bp, Homo sapiens
catctctcttgcagggtctctctg

SEQ ID NO: 23324 - DNA, 17 bp, Homo sapiens
cgcaggcctgagctctg

SEQ ID NO: 23325 - DNA, 20 bp, Homo sapiens
tcctgccccacccatcatgc

SEQ ID NO: 23326 - DNA, 19 bp, Homo sapiens
ttagtagaagatgcccagg

SEQ ID NO: 23327 - DNA, 17 bp, Homo sapiens
cagaggtggtgcccaac

SEQ ID NO: 23328 - DNA, 21 bp, Homo sapiens
ataaggaggcacccaagctac

SEQ ID NO: 23329 - DNA, 21 bp, Homo sapiens
ctcagtgaagcaagccctccc

SEQ ID NO: 23330 - DNA, 23 bp, Homo sapiens
gacatcacttggaaaaagggagc

SEQ ID NO: 23331 - DNA, 24 bp, Homo sapiens
ctttggcaagaagatctggagggg

SEQ ID NO: 23332 - DNA, 18 bp, Homo sapiens
tttgaggaacagcagcca

SEQ ID NO: 23333 - DNA, 23 bp, Homo sapiens
aaaaaaagtcctattactctggg

SEQ ID NO: 23334 - DNA, 23 bp, Homo sapiens
tggttttgaaagacttaatttat

SEQ ID NO: 23335 - DNA, 22 bp, Homo sapiens
ctcccctcaaaaaacattgtga

SEQ ID NO: 23336 - DNA, 19 bp, Homo sapiens
aagttagtgcctatgtgac

SEQ ID NO: 23337 - DNA, 23 bp, Homo sapiens
ctcactttttaggattatggctg

SEQ ID NO: 23338 - DNA, 21 bp, Homo sapiens
cagcttcatttcctcatctgt

SEQ ID NO: 23339 - DNA, 20 bp, Homo sapiens
acgtcactcagccagaacac

SEQ ID NO: 23340 - DNA, 20 bp, Homo sapiens
ggtgctgctaaaacatactc

SEQ ID NO: 23341 - DNA, 28 bp, Homo sapiens
gaagatgttttctttttaaaagtgaaac

SEQ ID NO: 23342 - DNA, 21 bp, Homo sapiens
cgagagagatggattctttgc

SEQ ID NO: 23343 - DNA, 21 bp, Homo sapiens
tcttaatacaggtgtttttgc

SEQ ID NO: 23344 - DNA, 21 bp, Homo sapiens
aattagttttgtagagttggg

SEQ ID NO: 23345 - DNA, 19 bp, Homo sapiens
tgtggtgttgggtagaggt

SEQ ID NO: 23346 - DNA, 24 bp, Homo sapiens
gtttttccattatttttcagaggt

SEQ ID NO: 23347 - DNA, 19 bp, Homo sapiens
tctgtgtttcctgtcctgc

SEQ ID NO: 23348 - DNA, 21 bp, Homo sapiens
actaatgtgtcagtagcaaaa

SEQ ID NO: 23349 - DNA, 20 bp, Homo sapiens
tgggtagtgcatacaacttc

SEQ ID NO: 23350 - DNA, 20 bp, Homo sapiens
agacttttccttcagtgaac

SEQ ID NO: 23351 - DNA, 18 bp, Homo sapiens
ctaatttcttgagagcag

SEQ ID NO: 23352 - DNA, 17 bp, Homo sapiens
aaaatgctccagcagga

SEQ ID NO: 23353 - DNA, 21 bp, Homo sapiens
atcaaagtcatccatatcatc

SEQ ID NO: 23354 - DNA, 19 bp, Homo sapiens
tttcttgcagactccgaag

SEQ ID NO: 23355 - DNA, 23 bp, Homo sapiens
agtgcttactcttacaaagtgac

SEQ ID NO: 23356 - DNA, 21 bp, Homo sapiens
aagaaatcccgggatactgct

SEQ ID NO: 23357 - DNA, 24 bp, Homo sapiens
tactgtgtttgttgtataaagctg

SEQ ID NO: 23358 - DNA, 22 bp, Homo sapiens
taagtaccatcaatgattggga

SEQ ID NO: 23359 - DNA, 22 bp, Homo sapiens
ctcagtcaaatctatttgctcg

SEQ ID NO: 23360 - DNA, 22 bp, Homo sapiens
catttgttacaccaccccaaag

SEQ ID NO: 23361 - DNA, 20 bp, Homo sapiens
ccatcatcgatgcaaatcac

SEQ ID NO: 23362 - DNA, 25 bp, Homo sapiens
ggtaagagaaacttttttaaagcac

SEQ ID NO: 23363 - DNA, 22 bp, Homo sapiens
ccaaatgagttttcagagagtc

SEQ ID NO: 23364 - DNA, 18 bp, Homo sapiens
ccaccctcctctgaaagc

SEQ ID NO: 23365 - DNA, 23 bp, Homo sapiens
gaataaaaaagtacaatgaacat

SEQ ID NO: 23366 - DNA, 24 bp, Homo sapiens
gactcagaatggttaagcagcgat

SEQ ID NO: 23367 - DNA, 20 bp, Homo sapiens
ccttaaggacaaaagctcta

SEQ ID NO: 23368 - DNA, 19 bp, Homo sapiens
agatgctcaggaaagtgac

SEQ ID NO: 23369 - DNA, 17 bp, Homo sapiens
tgcctcaaaaatgtggc

SEQ ID NO: 23370 - DNA, 22 bp, Homo sapiens
tccaaattcttcttcttttcgc

SEQ ID NO: 23371 - DNA, 19 bp, Homo sapiens
tgtaaagggagaggatcca

SEQ ID NO: 23372 - DNA, 23 bp, Homo sapiens
atcatcatcatcaaattcaatac

SEQ ID NO: 23373 - DNA, 22 bp, Homo sapiens
ttcttaatcgctcatgccctgt

SEQ ID NO: 23374 - DNA, 19 bp, Homo sapiens
aggaagaagaagcagaaat

SEQ ID NO: 23375 - DNA, 20 bp, Homo sapiens
tcaactgttttactgtagat

SEQ ID NO: 23376 - DNA, 22 bp, Homo sapiens
tcccagaaacaaataataatgc

SEQ ID NO: 23377 - DNA, 24 bp, Homo sapiens
attacattcaactgagaaagttcc

SEQ ID NO: 23378 - DNA, 20 bp, Homo sapiens
aaagcacaaaatacttttat

SEQ ID NO: 23379 - DNA, 19 bp, Homo sapiens
tccaccttctccagaagaa

SEQ ID NO: 23380 - DNA, 24 bp, Homo sapiens
gcaaccaattaaatgtataaacag

SEQ ID NO: 23381 - DNA, 17 bp, Homo sapiens
tcagaggtgtcaaggtc

SEQ ID NO: 23382 - DNA, 23 bp, Homo sapiens
aaaactacttctcttttctgtta

SEQ ID NO: 23383 - DNA, 21 bp, Homo sapiens
tgcatactcattttctcaggt

SEQ ID NO: 23384 - DNA, 23 bp, Homo sapiens
aagggtttcaaaattatacattt

SEQ ID NO: 23385 - DNA, 23 bp, Homo sapiens
acatggtatgtctaaaatattgc

SEQ ID NO: 23386 - DNA, 20 bp, Homo sapiens
gcagtacgttaaaggacctt

SEQ ID NO: 23387 - DNA, 21 bp, Homo sapiens
gccacaggttcaaaacacaat

SEQ ID NO: 23388 - DNA, 25 bp, Homo sapiens
acatcaaaagatcttttgtcaaaac

SEQ ID NO: 23389 - DNA, 24 bp, Homo sapiens
agtaaacaaggttatgacattaga

SEQ ID NO: 23390 - DNA, 21 bp, Homo sapiens
cagcacagactgtgacggtac

SEQ ID NO: 23391 - DNA, 24 bp, Homo sapiens
tgttgcccaggctggtcttgaact

SEQ ID NO: 23392 - DNA, 24 bp, Homo sapiens
catcaggaatagtatcaattaatt

SEQ ID NO: 23393 - DNA, 20 bp, Homo sapiens
gggattacagtcatgagcca

SEQ ID NO: 23394 - DNA, 16 bp, Homo sapiens
cgctgctgaagcagtt

SEQ ID NO: 23395 - DNA, 24 bp, Homo sapiens
aagaaaaatattaacaacataatt

SEQ ID NO: 23396 - DNA, 23 bp, Homo sapiens
atttttcacttagagtggtagaa

SEQ ID NO: 23397 - DNA, 18 bp, Homo sapiens
gtgatggagcacatctgt

SEQ ID NO: 23398 - DNA, 21 bp, Homo sapiens
gatcatccttatgccatttcc

SEQ ID NO: 23399 - DNA, 16 bp, Homo sapiens
tgtgggaacgaactgc

SEQ ID NO: 23400 - DNA, 19 bp, Homo sapiens
acgaatgttaaaggagtgg

SEQ ID NO: 23401 - DNA, 21 bp, Homo sapiens
tgtttacttttcaaaccactc

SEQ ID NO: 23402 - DNA, 25 bp, Homo sapiens
gactggcatcacttttattaaaatc

SEQ ID NO: 23403 - DNA, 24 bp, Homo sapiens
tgggaaaaaagcgaatatattttg

SEQ ID NO: 23404 - DNA, 19 bp, Homo sapiens
ccctccatagggccatcaa

SEQ ID NO: 23405 - DNA, 23 bp, Homo sapiens
ttttgtggcctaccagagtaaac

SEQ ID NO: 23406 - DNA, 21 bp, Homo sapiens
cagaatttgagggaaggtgtg

SEQ ID NO: 23407 - DNA, 24 bp, Homo sapiens
cagaaggaaacttctaacggaagt

SEQ ID NO: 23408 - DNA, 21 bp, Homo sapiens
gcagagaatcctgtctttcct

SEQ ID NO: 23409 - DNA, 22 bp, Homo sapiens
ggagatacaggcctgattcact

SEQ ID NO: 23410 - DNA, 21 bp, Homo sapiens
acaaaggacttctgtaaatgg

SEQ ID NO: 23411 - DNA, 24 bp, Homo sapiens
agggaattctatgaaggagttaaa

SEQ ID NO: 23412 - DNA, 20 bp, Homo sapiens
tcctgggaaataagagcttt

SEQ ID NO: 23413 - DNA, 24 bp, Homo sapiens
ggactgtttactgactaccaccct

SEQ ID NO: 23414 - DNA, 24 bp, Homo sapiens
gtcatttattgaagcagtatgttt

SEQ ID NO: 23415 - DNA, 23 bp, Homo sapiens
tgaaaggcctttattcaataccc

SEQ ID NO: 23416 - DNA, 23 bp, Homo sapiens
catcatcaaagtcatctatgtca

SEQ ID NO: 23417 - DNA, 22 bp, Homo sapiens
aaacaccaagactaggaaaaaa

SEQ ID NO: 23418 - DNA, 16 bp, Homo sapiens
agatttgctggctgct

SEQ ID NO: 23419 - DNA, 20 bp, Homo sapiens
actgctgtgaaagatcagaa

SEQ ID NO: 23420 - DNA, 22 bp, Homo sapiens
ctgaggaaagtctttctgatac

SEQ ID NO: 23421 - DNA, 22 bp, Homo sapiens
cccaaccttcctatgatattga

SEQ ID NO: 23422 - DNA, 27 bp, Homo sapiens
tgaattgactctgagaagtttatattt

SEQ ID NO: 23423 - DNA, 23 bp, Homo sapiens
ataatgcataatttagcagccag

SEQ ID NO: 23424 - DNA, 24 bp, Homo sapiens
ggacagttttgttttcatataagc

SEQ ID NO: 23425 - DNA, 18 bp, Homo sapiens
aggtcggccaattaaatc

SEQ ID NO: 23426 - DNA, 21 bp, Homo sapiens
tgttttcaggcaatgatgatt

SEQ ID NO: 23427 - DNA, 21 bp, Homo sapiens
tcttccagtgtcatctactgc

SEQ ID NO: 23428 - DNA, 22 bp, Homo sapiens
gcaacttgcttttgaaattgtg

SEQ ID NO: 23429 - DNA, 21 bp, Homo sapiens
agacttgtagggaaggaaagc

SEQ ID NO: 23430 - DNA, 24 bp, Homo sapiens
tgtatgaggaaaactaagactttg

SEQ ID NO: 23431 - DNA, 18 bp, Homo sapiens
tgccagtgattctgcagg

SEQ ID NO: 23432 - DNA, 21 bp, Homo sapiens
gttctaaaattatgcaggcca

SEQ ID NO: 23433 - DNA, 22 bp, Homo sapiens
tgtactgatttttcttaacgtt

SEQ ID NO: 23434 - DNA, 22 bp, Homo sapiens
cggcatcaggataaaacagtct

SEQ ID NO: 23435 - DNA, 20 bp, Homo sapiens
tctgaaacatgagcgtttcc

SEQ ID NO: 23436 - DNA, 23 bp, Homo sapiens
agagctttcatttaacatctgcc

SEQ ID NO: 23437 - DNA, 21 bp, Homo sapiens
ttttcataaaaaatttggcct

SEQ ID NO: 23438 - DNA, 23 bp, Homo sapiens
ggaggtttaagaggtccctaaat

SEQ ID NO: 23439 - DNA, 23 bp, Homo sapiens
caatgctgcactgcttggtgaag

SEQ ID NO: 23440 - DNA, 19 bp, Homo sapiens
aacaaccagaacaaaggat

SEQ ID NO: 23441 - DNA, 19 bp, Homo sapiens
gagctggtaacacaaactc

SEQ ID NO: 23442 - DNA, 23 bp, Homo sapiens
tcatttgagtatggcaaattgtt

SEQ ID NO: 23443 - DNA, 22 bp, Homo sapiens
cgataagtgatctcaagggaga

SEQ ID NO: 23444 - DNA, 22 bp, Homo sapiens
tgatttcttttgtaacttttac

SEQ ID NO: 23445 - DNA, 24 bp, Homo sapiens
ggcgtgtttttattagtattttta

SEQ ID NO: 23446 - DNA, 19 bp, Homo sapiens
gttctctttcaggaggtgg

SEQ ID NO: 23447 - DNA, 24 bp, Homo sapiens
acaaatcacgaactatttaataaa

SEQ ID NO: 23448 - DNA, 22 bp, Homo sapiens
ctcctggggtcactgttgtcat

SEQ ID NO: 23449 - DNA, 24 bp, Homo sapiens
atctgtatcaaattttcagacttc

SEQ ID NO: 23450 - DNA, 23 bp, Homo sapiens
agtcttatcacctgtcagatatg

SEQ ID NO: 23451 - DNA, 23 bp, Homo sapiens
catacttgttatgttgagatatg

SEQ ID NO: 23452 - DNA, 20 bp, Homo sapiens
atgattgggtctttttttga

SEQ ID NO: 23453 - DNA, 22 bp, Homo sapiens
taaaacctaaggacaaatgtaa

SEQ ID NO: 23454 - DNA, 28 bp, Homo sapiens
gtggtctttaatatattttaaaataatg

SEQ ID NO: 23455 - DNA, 20 bp, Homo sapiens
tatacttagattccagctac

SEQ ID NO: 23456 - DNA, 21 bp, Homo sapiens
tctttgcactacgtatacaaa

SEQ ID NO: 23457 - DNA, 21 bp, Homo sapiens
tatttacctccagttatcaaa

SEQ ID NO: 23458 - DNA, 26 bp, Homo sapiens
caaagcaattatagtaaaatgttacc

SEQ ID NO: 23459 - DNA, 23 bp, Homo sapiens
gagtagaaatgagtctgttactt

SEQ ID NO: 23460 - DNA, 22 bp, Homo sapiens
ttacaggcgtgagccaccgcac

SEQ ID NO: 23461 - DNA, 20 bp, Homo sapiens
ctgacacaatgtgcttcatc

SEQ ID NO: 23462 - DNA, 22 bp, Homo sapiens
ggaatttgaagaccacagaatc

SEQ ID NO: 23463 - DNA, 25 bp, Homo sapiens
attgttggtagtatgtatttatcgg

SEQ ID NO: 23464 - DNA, 18 bp, Homo sapiens
ctggcctagatctgtgca

SEQ ID NO: 23465 - DNA, 22 bp, Homo sapiens
cagtaaaataggagactcgttc

SEQ ID NO: 23466 - DNA, 19 bp, Homo sapiens
aggaagctcttggcacgtt

SEQ ID NO: 23467 - DNA, 21 bp, Homo sapiens
cttggagcttccttctataaa

SEQ ID NO: 23468 - DNA, 20 bp, Homo sapiens
cttgacgaaaatcatgtccc

SEQ ID NO: 23469 - DNA, 22 bp, Homo sapiens
ataaaaacccacactgagtgaa

SEQ ID NO: 23470 - DNA, 18 bp, Homo sapiens
gccgtaagagccatcacc

SEQ ID NO: 23471 - DNA, 24 bp, Homo sapiens
cttaatacattgagcagtgttggc

SEQ ID NO: 23472 - DNA, 19 bp, Homo sapiens
ggtctgagaatcttcagct

SEQ ID NO: 23473 - DNA, 24 bp, Homo sapiens
atttttttttccaactagtgggga

SEQ ID NO: 23474 - DNA, 16 bp, Homo sapiens
tggcagtcactgcccc

SEQ ID NO: 23475 - DNA, 20 bp, Homo sapiens
cttcgccagaagtttccttc

SEQ ID NO: 23476 - DNA, 16 bp, Homo sapiens
ggggtgggggtggggt

SEQ ID NO: 23477 - DNA, 24 bp, Homo sapiens
ggtacagaaggacatcctgactca

SEQ ID NO: 23478 - DNA, 24 bp, Homo sapiens
aaatactggctctcagccccaaac

SEQ ID NO: 23479 - DNA, 23 bp, Homo sapiens
cagattatgtctgttaaagctca

SEQ ID NO: 23480 - DNA, 22 bp, Homo sapiens
cggaggctccaactcctaatac

SEQ ID NO: 23481 - DNA, 20 bp, Homo sapiens
gatccattctaggcaatcaa

SEQ ID NO: 23482 - DNA, 23 bp, Homo sapiens
acatgtagtctataacaatacct

SEQ ID NO: 23483 - DNA, 23 bp, Homo sapiens
gacatttgttacttctagacagc

SEQ ID NO: 23484 - DNA, 22 bp, Homo sapiens
ttgggacttttttaggtttagc

SEQ ID NO: 23485 - DNA, 23 bp, Homo sapiens
ctgtcataatgcaaaaaggaatg

SEQ ID NO: 23486 - DNA, 20 bp, Homo sapiens
aaaaagcctaaaaaggtggc

SEQ ID NO: 23487 - DNA, 20 bp, Homo sapiens
tttccagaattgagagagtt

SEQ ID NO: 23488 - DNA, 24 bp, Homo sapiens
cttgcttgaattattcacgtgtgt

SEQ ID NO: 23489 - DNA, 16 bp, Homo sapiens
ctgtaacgtgtcagcc

SEQ ID NO: 23490 - DNA, 23 bp, Homo sapiens
ggttcatatatttctgaaaatgt

SEQ ID NO: 23491 - DNA, 19 bp, Homo sapiens
gctgcacttcatctctggc

SEQ ID NO: 23492 - DNA, 22 bp, Homo sapiens
tgtttctcagtactcttggttt

SEQ ID NO: 23493 - DNA, 25 bp, Homo sapiens
agattatttctattatttgtttatc

SEQ ID NO: 23494 - DNA, 21 bp, Homo sapiens
agaatgtgacaccatggctga

SEQ ID NO: 23495 - DNA, 22 bp, Homo sapiens
ggtaaaaacagtttgcattcta

SEQ ID NO: 23496 - DNA, 18 bp, Homo sapiens
ccatgctggcctcagtga

SEQ ID NO: 23497 - DNA, 23 bp, Homo sapiens
gaagtctcaaagaaaatctgttt

SEQ ID NO: 23498 - DNA, 18 bp, Homo sapiens
ggatggctgtcaggtaac

SEQ ID NO: 23499 - DNA, 21 bp, Homo sapiens
caatccccattccaaatgcaa

SEQ ID NO: 23500 - DNA, 22 bp, Homo sapiens
attaggttgttatgtagtgtgc

SEQ ID NO: 23501 - DNA, 19 bp, Homo sapiens
ccctccacagatttaggga

SEQ ID NO: 23502 - DNA, 24 bp, Homo sapiens
gcatctattatgaaaatgttcctt

SEQ ID NO: 23503 - DNA, 19 bp, Homo sapiens
gaaaagcaggcagtgagat

SEQ ID NO: 23504 - DNA, 23 bp, Homo sapiens
ttatatcaggttatctgtgctac

SEQ ID NO: 23505 - DNA, 19 bp, Homo sapiens
gagcccagcttactcatta

SEQ ID NO: 23506 - DNA, 22 bp, Homo sapiens
gcgatttgtgattcatgcatct

SEQ ID NO: 23507 - DNA, 19 bp, Homo sapiens
cacaatagcaggagtagac

SEQ ID NO: 23508 - DNA, 20 bp, Homo sapiens
cagagctggaagagatgggg

SEQ ID NO: 23509 - DNA, 21 bp, Homo sapiens
gccaatctgtataaactcctc

SEQ ID NO: 23510 - DNA, 20 bp, Homo sapiens
tgtgaccagactgaaaagac

SEQ ID NO: 23511 - DNA, 24 bp, Homo sapiens
attgaagtgagtttctcttgtatg

SEQ ID NO: 23512 - DNA, 23 bp, Homo sapiens
caatgctgttaacagtaattttc

SEQ ID NO: 23513 - DNA, 20 bp, Homo sapiens
agctgtattctcctgcattc

SEQ ID NO: 23514 - DNA, 23 bp, Homo sapiens
tctatgatatgctctatttttcc

SEQ ID NO: 23515 - DNA, 23 bp, Homo sapiens
tctgggtgtttcttacaaaaatc

SEQ ID NO: 23516 - DNA, 20 bp, Homo sapiens
agtggaaaaagatggaaacc

SEQ ID NO: 23517 - DNA, 22 bp, Homo sapiens
aagaattttaaaacttcttttt

SEQ ID NO: 23518 - DNA, 22 bp, Homo sapiens
gcatggtacattactgtgaaaa

SEQ ID NO: 23519 - DNA, 20 bp, Homo sapiens
ccaccttttgcaatctaatt

SEQ ID NO: 23520 - DNA, 21 bp, Homo sapiens
tggtgaaaatggatttaatcc

SEQ ID NO: 23521 - DNA, 24 bp, Homo sapiens
tgtttccattccaaattactactg

SEQ ID NO: 23522 - DNA, 27 bp, Homo sapiens
tcacatctcttgttttataatcctatg

SEQ ID NO: 23523 - DNA, 24 bp, Homo sapiens
aagaatgaacatttgaaatttccg

SEQ ID NO: 23524 - DNA, 23 bp, Homo sapiens
cattccttgtgatgaactatgtt

SEQ ID NO: 23525 - DNA, 21 bp, Homo sapiens
actatagttaatattaaaccc

SEQ ID NO: 23526 - DNA, 22 bp, Homo sapiens
tcgaccagcatattcatagtaa

SEQ ID NO: 23527 - DNA, 24 bp, Homo sapiens
agcagaaagtattctctttttatt

SEQ ID NO: 23528 - DNA, 24 bp, Homo sapiens
ctttagatgttcaatttcaattga

SEQ ID NO: 23529 - DNA, 20 bp, Homo sapiens
tgtaagatttgttcaagaac

SEQ ID NO: 23530 - DNA, 27 bp, Homo sapiens
aaactcaagttttataagaaaatagac

SEQ ID NO: 23531 - DNA, 21 bp, Homo sapiens
aggtccttctggaagatttac

SEQ ID NO: 23532 - DNA, 23 bp, Homo sapiens
atataaaacagtataataattga

SEQ ID NO: 23533 - DNA, 18 bp, Homo sapiens
tgcactcttactccctga

SEQ ID NO: 23534 - DNA, 20 bp, Homo sapiens
aacagaaatgagtgtctgtg

SEQ ID NO: 23535 - DNA, 17 bp, Homo sapiens
ttcggcattgtgtcgtg

SEQ ID NO: 23536 - DNA, 23 bp, Homo sapiens
tgtccataaatgactttttagcc

SEQ ID NO: 23537 - DNA, 22 bp, Homo sapiens
cattggcattgatatataagtc

SEQ ID NO: 23538 - DNA, 21 bp, Homo sapiens
catcttacttcctgtatcttc

SEQ ID NO: 23539 - DNA, 20 bp, Homo sapiens
aaattgccatttagtacagt

SEQ ID NO: 23540 - DNA, 23 bp, Homo sapiens
tttggaaaaggatctgcttattc

SEQ ID NO: 23541 - DNA, 18 bp, Homo sapiens
tttggttcactcattgtg

SEQ ID NO: 23542 - DNA, 22 bp, Homo sapiens
acaagattttggatgaagactt

SEQ ID NO: 23543 - DNA, 23 bp, Homo sapiens
agaacagtatatataaattcagt

SEQ ID NO: 23544 - DNA, 23 bp, Homo sapiens
ttatgtgatgctcggaaataaag

SEQ ID NO: 23545 - DNA, 23 bp, Homo sapiens
acttgggttgaattttaagatct

SEQ ID NO: 23546 - DNA, 24 bp, Homo sapiens
actgctggaattttctgtttccat

SEQ ID NO: 23547 - DNA, 21 bp, Homo sapiens
gttcccagtgggctcactatc

SEQ ID NO: 23548 - DNA, 24 bp, Homo sapiens
acattttttaaccatctcttccct

SEQ ID NO: 23549 - DNA, 21 bp, Homo sapiens
taaataaagcccctgtatggg

SEQ ID NO: 23550 - DNA, 19 bp, Homo sapiens
caccaaaaactttccccag

SEQ ID NO: 23551 - DNA, 21 bp, Homo sapiens
ctcataaaggtagactttatg

SEQ ID NO: 23552 - DNA, 17 bp, Homo sapiens
gtgtacccacctgcaag

SEQ ID NO: 23553 - DNA, 20 bp, Homo sapiens
agcgttagtagcaaaagtgt

SEQ ID NO: 23554 - DNA, 20 bp, Homo sapiens
cacttaaggagttccctagc

SEQ ID NO: 23555 - DNA, 22 bp, Homo sapiens
cagaagtctgcaaatctctggg

SEQ ID NO: 23556 - DNA, 18 bp, Homo sapiens
ccccgtctcaaaacaaac

SEQ ID NO: 23557 - DNA, 24 bp, Homo sapiens
tttaataccgtcactctcaagaag

SEQ ID NO: 23558 - DNA, 24 bp, Homo sapiens
caggatcagaagataaagattctg

SEQ ID NO: 23559 - DNA, 22 bp, Homo sapiens
gccttttacaaaattggcctgt

SEQ ID NO: 23560 - DNA, 19 bp, Homo sapiens
gcaccatatttttccagtt

SEQ ID NO: 23561 - DNA, 19 bp, Homo sapiens
gctgaatgcgtgaatgagc

SEQ ID NO: 23562 - DNA, 18 bp, Homo sapiens
ctgtgtactaacctggcg

SEQ ID NO: 23563 - DNA, 20 bp, Homo sapiens
tttatgcctttgcacagaat

SEQ ID NO: 23564 - DNA, 20 bp, Homo sapiens
tgcatccttctaattcagtg

SEQ ID NO: 23565 - DNA, 22 bp, Homo sapiens
attgatggtgttactgaagaca

SEQ ID NO: 23566 - DNA, 16 bp, Homo sapiens
ctgggggctgacttgg

SEQ ID NO: 23567 - DNA, 22 bp, Homo sapiens
aaatactctgaatggacatcgc

SEQ ID NO: 23568 - DNA, 19 bp, Homo sapiens
gggaactgtcttcagctac

SEQ ID NO: 23569 - DNA, 24 bp, Homo sapiens
tttggttcttgctgaattgttgaa

SEQ ID NO: 23570 - DNA, 16 bp, Homo sapiens
gctcctcagcggcact

SEQ ID NO: 23571 - DNA, 23 bp, Homo sapiens
ccctgcagcgtgtctcttcatat

SEQ ID NO: 23572 - DNA, 22 bp, Homo sapiens
cctcttcctttcatttctggtt

SEQ ID NO: 23573 - DNA, 24 bp, Homo sapiens
cacctgtaaacatctgcattttcc

SEQ ID NO: 23574 - DNA, 22 bp, Homo sapiens
tttgccttggaaccactggaag

SEQ ID NO: 23575 - DNA, 18 bp, Homo sapiens
cagaggccccggaagaag

SEQ ID NO: 23576 - DNA, 18 bp, Homo sapiens
cctttcttcccttgttcc

SEQ ID NO: 23577 - DNA, 24 bp, Homo sapiens
cttcccactactttgcaagtaaaa

SEQ ID NO: 23578 - DNA, 24 bp, Homo sapiens
ccattagcaatatttaataatggc

SEQ ID NO: 23579 - DNA, 21 bp, Homo sapiens
gtctaagaggagaaaaactgc

SEQ ID NO: 23580 - DNA, 21 bp, Homo sapiens
atttttgttttggatcaaacc

SEQ ID NO: 23581 - DNA, 24 bp, Homo sapiens
gatttcgttttggaagatatcttt

SEQ ID NO: 23582 - DNA, 23 bp, Homo sapiens
taggcagaaaatgcacaaggaca

SEQ ID NO: 23583 - DNA, 20 bp, Homo sapiens
cctgatgtcgcttgagaagt

SEQ ID NO: 23584 - DNA, 22 bp, Homo sapiens
aggaaggtcattcatttttggt

SEQ ID NO: 23585 - DNA, 20 bp, Homo sapiens
tgaaggcttaagaaacggtc

SEQ ID NO: 23586 - DNA, 21 bp, Homo sapiens
atttcagggggtctgccacat

SEQ ID NO: 23587 - DNA, 22 bp, Homo sapiens
acaaacaagaaagagggtctat

SEQ ID NO: 23588 - DNA, 23 bp, Homo sapiens
cattggatccagttcagcctcac

SEQ ID NO: 23589 - DNA, 21 bp, Homo sapiens
acttcaaatggtataacaaga

SEQ ID NO: 23590 - DNA, 17 bp, Homo sapiens
ttatggctccaccgaag

SEQ ID NO: 23591 - DNA, 21 bp, Homo sapiens
ttaaaaagaagaactatcacc

SEQ ID NO: 23592 - DNA, 20 bp, Homo sapiens
gcgtgcacccccaggggagg

SEQ ID NO: 23593 - DNA, 20 bp, Homo sapiens
acagcaccatggtgggttct

SEQ ID NO: 23594 - DNA, 16 bp, Homo sapiens
cccctgcggtccaggc

SEQ ID NO: 23595 - DNA, 24 bp, Homo sapiens
caccatactcgccagcgtgcgcgc

SEQ ID NO: 23596 - DNA, 17 bp, Homo sapiens
gcgtgcccccgcgcccc

SEQ ID NO: 23597 - DNA, 16 bp, Homo sapiens
gcccgggtcggagcag

SEQ ID NO: 23598 - DNA, 24 bp, Homo sapiens
gtccccacagactcagagagaacc

SEQ ID NO: 23599 - DNA, 16 bp, Homo sapiens
gggtggggtttgggtc

SEQ ID NO: 23600 - DNA, 17 bp, Homo sapiens
gcctggggtaaggtcgg

SEQ ID NO: 23601 - DNA, 19 bp, Homo sapiens
gggaagtaggtcttggtgg

SEQ ID NO: 23602 - DNA, 16 bp, Homo sapiens
ggtgaggctccctccc

SEQ ID NO: 23603 - DNA, 17 bp, Homo sapiens
gtcggccaccttcttgc

SEQ ID NO: 23604 - DNA, 17 bp, Homo sapiens
ctcaaccgtcctggccc

SEQ ID NO: 23605 - DNA, 16 bp, Homo sapiens
gggcggacagcgcgtt

SEQ ID NO: 23606 - DNA, 16 bp, Homo sapiens
gttcctgtccttcccc

SEQ ID NO: 23607 - DNA, 16 bp, Homo sapiens
gccgctcaccttgaag

SEQ ID NO: 23608 - DNA, 18 bp, Homo sapiens
ccaggttaagggccacgg

SEQ ID NO: 23609 - DNA, 16 bp, Homo sapiens
cgcgtgatcctctgcc

SEQ ID NO: 23610 - DNA, 17 bp, Homo sapiens
cacgtggacgacatgcc

SEQ ID NO: 23611 - DNA, 20 bp, Homo sapiens
tgcagagaagagggtcagtg

SEQ ID NO: 23612 - DNA, 20 bp, Homo sapiens
gggtggacccggtcaacttc

SEQ ID NO: 23613 - DNA, 16 bp, Homo sapiens
aactcggcggggaggt

SEQ ID NO: 23614 - DNA, 16 bp, Homo sapiens
gagatggcgccttcct

SEQ ID NO: 23615 - DNA, 19 bp, Homo sapiens
gaggtcagcacggtgctca

SEQ ID NO: 23616 - DNA, 22 bp, Homo sapiens
cgcaggcggcggctgcgggcct

SEQ ID NO: 23617 - DNA, 16 bp, Homo sapiens
gcccagcgggcaggag

SEQ ID NO: 23618 - DNA, 17 bp, Homo sapiens
ctgctggtgaccctggc

SEQ ID NO: 23619 - DNA, 20 bp, Homo sapiens
ctgcccactcagactttatt

SEQ ID NO: 23620 - DNA, 19 bp, Homo sapiens
cctggacaagttcctggct

SEQ ID NO: 23621 - DNA, 22 bp, Homo sapiens
aggtaaacacctccattgttgg

SEQ ID NO: 23622 - DNA, 23 bp, Homo sapiens
ctggagcctcggtagccgttcct

SEQ ID NO: 23623 - DNA, 24 bp, Homo sapiens
tactccctgcagttctccctcccc

SEQ ID NO: 23624 - DNA, 16 bp, Homo sapiens
ccggcccttcctggtc

SEQ ID NO: 23625 - DNA, 17 bp, Homo sapiens
ggaccagaagagtgccg

SEQ ID NO: 23626 - DNA, 16 bp, Homo sapiens
ccgcccggccccgcgc

SEQ ID NO: 23627 - DNA, 18 bp, Homo sapiens
ccttgacgttggtcttgt

SEQ ID NO: 23628 - DNA, 18 bp, Homo sapiens
cgggctccgcgccagcca

SEQ ID NO: 23629 - DNA, 22 bp, Homo sapiens
ctctccagggcctccgcaccat

SEQ ID NO: 23630 - DNA, 24 bp, Homo sapiens
caagcataaaccctggcgcgctcg

SEQ ID NO: 23631 - DNA, 16 bp, Homo sapiens
gcctgtgggtccgggc

SEQ ID NO: 23632 - DNA, 18 bp, Homo sapiens
catggtgctgtctcctgc

SEQ ID NO: 23633 - DNA, 18 bp, Homo sapiens
catcctgcggggagaagc

SEQ ID NO: 23634 - DNA, 16 bp, Homo sapiens
cacgctggcgagtatg

SEQ ID NO: 23635 - DNA, 16 bp, Homo sapiens
gagccgtggctcaggt

SEQ ID NO: 23636 - DNA, 17 bp, Homo sapiens
cgacccgggctcctcgc

SEQ ID NO: 23637 - DNA, 16 bp, Homo sapiens
acggcgttggtcagcg

SEQ ID NO: 23638 - DNA, 17 bp, Homo sapiens
aaaccccacccctcact

SEQ ID NO: 23639 - DNA, 16 bp, Homo sapiens
ttgtgcgcgtgcaggt

SEQ ID NO: 23640 - DNA, 24 bp, Homo sapiens
caccaagacctacttcccgcactt

SEQ ID NO: 23641 - DNA, 16 bp, Homo sapiens
cctcgacccagatcgc

SEQ ID NO: 23642 - DNA, 17 bp, Homo sapiens
caagaaggtggccgacg

SEQ ID NO: 23643 - DNA, 16 bp, Homo sapiens
cctgcgctacacctcc

SEQ ID NO: 23644 - DNA, 16 bp, Homo sapiens
ccgccctgagcgacct

SEQ ID NO: 23645 - DNA, 24 bp, Homo sapiens
gcagtggcttaggagctgtgcaga

SEQ ID NO: 23646 - DNA, 24 bp, Homo sapiens
acttcaaggtgagcggcgggccgg

SEQ ID NO: 23647 - DNA, 16 bp, Homo sapiens
accgcaggggtgaact

SEQ ID NO: 23648 - DNA, 18 bp, Homo sapiens
agaggatcacgcgggttg

SEQ ID NO: 23649 - DNA, 16 bp, Homo sapiens
gtatttggaggtcagc

SEQ ID NO: 23650 - DNA, 18 bp, Homo sapiens
gccccactgaccctcttc

SEQ ID NO: 23651 - DNA, 16 bp, Homo sapiens
gaggggctggggggag

SEQ ID NO: 23652 - DNA, 16 bp, Homo sapiens
cacctccccgccgagt

SEQ ID NO: 23653 - DNA, 18 bp, Homo sapiens
acacaggctgccgcccac

SEQ ID NO: 23654 - DNA, 23 bp, Homo sapiens
ttcctggcttctgtgagcaccgt

SEQ ID NO: 23655 - DNA, 16 bp, Homo sapiens
ccggggactccccacc

SEQ ID NO: 23656 - DNA, 17 bp, Homo sapiens
acggccgggccactcac

SEQ ID NO: 23657 - DNA, 16 bp, Homo sapiens
ctgccagcgcttgcgc

SEQ ID NO: 23658 - DNA, 17 bp, Homo sapiens
cgagaccgtgagcgggg

SEQ ID NO: 23659 - DNA, 24 bp, Homo sapiens
tcacttcacgtgaccgcgcggcgg

SEQ ID NO: 23660 - DNA, 18 bp, Homo sapiens
gttgggctcctccaccac

SEQ ID NO: 23661 - DNA, 24 bp, Homo sapiens
cctgttgctcctcgggctctcggc

SEQ ID NO: 23662 - DNA, 21 bp, Homo sapiens
agcggggaacgggcccgggcc

SEQ ID NO: 23663 - DNA, 18 bp, Homo sapiens
ctctgcaccccggcctcc

SEQ ID NO: 23664 - DNA, 16 bp, Homo sapiens
cgactggcctgaggca

SEQ ID NO: 23665 - DNA, 22 bp, Homo sapiens
caggtgcagcgaagatgaaggt

SEQ ID NO: 23666 - DNA, 16 bp, Homo sapiens
ggccaacagcgctcct

SEQ ID NO: 23667 - DNA, 16 bp, Homo sapiens
cggctcgagcggggga

SEQ ID NO: 23668 - DNA, 17 bp, Homo sapiens
taactctcagggtcact

SEQ ID NO: 23669 - DNA, 23 bp, Homo sapiens
ttcccgtagggtgaacaacccgt

SEQ ID NO: 23670 - DNA, 22 bp, Homo sapiens
ggtatattctctcgtacttcca

SEQ ID NO: 23671 - DNA, 16 bp, Homo sapiens
acttgcccgagagtcg

SEQ ID NO: 23672 - DNA, 24 bp, Homo sapiens
cagcctgggtgacagagtgagact

SEQ ID NO: 23673 - DNA, 16 bp, Homo sapiens
ccccagcccaccctcg

SEQ ID NO: 23674 - DNA, 23 bp, Homo sapiens
tctgccagtctttgcagacaggt

SEQ ID NO: 23675 - DNA, 24 bp, Homo sapiens
ttgtggaacgggcagaactcatac

SEQ ID NO: 23676 - DNA, 24 bp, Homo sapiens
tctcttccaggacccgtgcatctc

SEQ ID NO: 23677 - DNA, 17 bp, Homo sapiens
gaggatcccactgtagg

SEQ ID NO: 23678 - DNA, 16 bp, Homo sapiens
cagggtgggtgcgagg

SEQ ID NO: 23679 - DNA, 16 bp, Homo sapiens
tgaggccgggtgggga

SEQ ID NO: 23680 - DNA, 20 bp, Homo sapiens
ctgtgtccccaggtacaagt

SEQ ID NO: 23681 - DNA, 19 bp, Homo sapiens
gaaggtgttgttggcgatc

SEQ ID NO: 23682 - DNA, 21 bp, Homo sapiens
gcagaccttccgctggaacgc

SEQ ID NO: 23683 - DNA, 16 bp, Homo sapiens
ccccaccttgctctgc

SEQ ID NO: 23684 - DNA, 17 bp, Homo sapiens
aaagcagcagcgcagct

SEQ ID NO: 23685 - DNA, 18 bp, Homo sapiens
gaacgtgggtaggtgggt

SEQ ID NO: 23686 - DNA, 16 bp, Homo sapiens
acgagtgggagatcgc

SEQ ID NO: 23687 - DNA, 17 bp, Homo sapiens
ggctcggacacatgggc

SEQ ID NO: 23688 - DNA, 17 bp, Homo sapiens
cctgccgttcccggagc

SEQ ID NO: 23689 - DNA, 16 bp, Homo sapiens
aggcgtgggggtggca

SEQ ID NO: 23690 - DNA, 17 bp, Homo sapiens
gaggggccccagtctcc

SEQ ID NO: 23691 - DNA, 16 bp, Homo sapiens
gctgcgtgcgcggctg

SEQ ID NO: 23692 - DNA, 19 bp, Homo sapiens
tgtggaaaaagcaaccggc

SEQ ID NO: 23693 - DNA, 16 bp, Homo sapiens
caggctcagctgcacc

SEQ ID NO: 23694 - DNA, 17 bp, Homo sapiens
ttcgagacccccctcgt

SEQ ID NO: 23695 - DNA, 23 bp, Homo sapiens
gctctacctggtcccactgccgc

SEQ ID NO: 23696 - DNA, 17 bp, Homo sapiens
gttgagcccagtggggt

SEQ ID NO: 23697 - DNA, 17 bp, Homo sapiens
ccccgagcgcacgctta

SEQ ID NO: 23698 - DNA, 16 bp, Homo sapiens
ttgggacatggggtgc

SEQ ID NO: 23699 - DNA, 24 bp, Homo sapiens
aacttctcatggccctgaaggtgg

SEQ ID NO: 23700 - DNA, 22 bp, Homo sapiens
tacccaaccctgccagaggccc

SEQ ID NO: 23701 - DNA, 23 bp, Homo sapiens
tcattttcttctggggtctttaa

SEQ ID NO: 23702 - DNA, 24 bp, Homo sapiens
cgatgagctgatcaccccccaggt

SEQ ID NO: 23703 - DNA, 18 bp, Homo sapiens
tgcagttttccagggtct

SEQ ID NO: 23704 - DNA, 23 bp, Homo sapiens
agctgggtgctgcccctgcatcc

SEQ ID NO: 23705 - DNA, 16 bp, Homo sapiens
agcccaggtgctggag

SEQ ID NO: 23706 - DNA, 23 bp, Homo sapiens
cactttttgaggatgctggctac

SEQ ID NO: 23707 - DNA, 23 bp, Homo sapiens
tcagccttttgatctcctttgag

SEQ ID NO: 23708 - DNA, 24 bp, Homo sapiens
agggaggtcctgacagcttggggt

SEQ ID NO: 23709 - DNA, 19 bp, Homo sapiens
tgactcacctgtgggcctc

SEQ ID NO: 23710 - DNA, 16 bp, Homo sapiens
ggcacgcagtagccct

SEQ ID NO: 23711 - DNA, 18 bp, Homo sapiens
ccagtcctcacctggacc

SEQ ID NO: 23712 - DNA, 23 bp, Homo sapiens
tgtggttggtaggctcataaaga

SEQ ID NO: 23713 - DNA, 16 bp, Homo sapiens
tgggcgtctcgtggcc

SEQ ID NO: 23714 - DNA, 18 bp, Homo sapiens
catcccctacacgaggcc

SEQ ID NO: 23715 - DNA, 17 bp, Homo sapiens
gtcacaaactcccacgc

SEQ ID NO: 23716 - DNA, 18 bp, Homo sapiens
catcacactcgccacctg

SEQ ID NO: 23717 - DNA, 20 bp, Homo sapiens
gtcctaccagccagcttctc

SEQ ID NO: 23718 - DNA, 19 bp, Homo sapiens
ccaacttggagcacttggg

SEQ ID NO: 23719 - DNA, 24 bp, Homo sapiens
aaaaccttgaatctttgttttgtc

SEQ ID NO: 23720 - DNA, 19 bp, Homo sapiens
cggggtgacccaggactgc

SEQ ID NO: 23721 - DNA, 24 bp, Homo sapiens
acctctgctataatcgggtaggct

SEQ ID NO: 23722 - DNA, 18 bp, Homo sapiens
cgtgatggagggaagaac

SEQ ID NO: 23723 - DNA, 22 bp, Homo sapiens
ccatagcagctagcacctagtc

SEQ ID NO: 23724 - DNA, 16 bp, Homo sapiens
cattcgccagctgctc

SEQ ID NO: 23725 - DNA, 22 bp, Homo sapiens
gccagaagcaggaagagagatg

SEQ ID NO: 23726 - DNA, 18 bp, Homo sapiens
cttcgtggactacagagt

SEQ ID NO: 23727 - DNA, 24 bp, Homo sapiens
gacagatagtcagaggagctgtgt

SEQ ID NO: 23728 - DNA, 16 bp, Homo sapiens
ggcgtccagcgttccc

SEQ ID NO: 23729 - DNA, 18 bp, Homo sapiens
gaaggggcccagagaaag

SEQ ID NO: 23730 - DNA, 18 bp, Homo sapiens
tctgtcgccagagaatgg

SEQ ID NO: 23731 - DNA, 20 bp, Homo sapiens
ttgtaaaaggagatgcttcc

SEQ ID NO: 23732 - DNA, 18 bp, Homo sapiens
caagacagcatggatcct

SEQ ID NO: 23733 - DNA, 19 bp, Homo sapiens
tcctttattagcaggcggg

SEQ ID NO: 23734 - DNA, 23 bp, Homo sapiens
tgtatcattgttctgggctctcc

SEQ ID NO: 23735 - DNA, 24 bp, Homo sapiens
ttcatcattatcaccacccagtag

SEQ ID NO: 23736 - DNA, 24 bp, Homo sapiens
agagtgttagacttggaaacaagt

SEQ ID NO: 23737 - DNA, 19 bp, Homo sapiens
ggatgtcttgcaggctccc

SEQ ID NO: 23738 - DNA, 16 bp, Homo sapiens
ctggatgcagaaaccg

SEQ ID NO: 23739 - DNA, 16 bp, Homo sapiens
cggccagagaggaaac

SEQ ID NO: 23740 - DNA, 19 bp, Homo sapiens
tagggatgttgcccatgga

SEQ ID NO: 23741 - DNA, 17 bp, Homo sapiens
atcaggcagcctctccc

SEQ ID NO: 23742 - DNA, 19 bp, Homo sapiens
ccctaccacgttccagaag

SEQ ID NO: 23743 - DNA, 24 bp, Homo sapiens
agagaagatgaggttggggtaagc

SEQ ID NO: 23744 - DNA, 18 bp, Homo sapiens
acatgctggtaagtgccc

SEQ ID NO: 23745 - DNA, 24 bp, Homo sapiens
aatttgaatacctaggtaggggtc

SEQ ID NO: 23746 - DNA, 24 bp, Homo sapiens
gctcaggatttttttccctatctg

SEQ ID NO: 23747 - DNA, 21 bp, Homo sapiens
gaaacagggacagggtagttc

SEQ ID NO: 23748 - DNA, 23 bp, Homo sapiens
gggttccttgtctttccttgttg

SEQ ID NO: 23749 - DNA, 18 bp, Homo sapiens
gccacttgccttgatctg

SEQ ID NO: 23750 - DNA, 17 bp, Homo sapiens
gggttcctgggaggaac

SEQ ID NO: 23751 - DNA, 21 bp, Homo sapiens
ggaactacggagaaaaatcag

SEQ ID NO: 23752 - DNA, 22 bp, Homo sapiens
cccccaggctctgtgcgtgact

SEQ ID NO: 23753 - DNA, 21 bp, Homo sapiens
ggctaaattacactgtcctga

SEQ ID NO: 23754 - DNA, 24 bp, Homo sapiens
aagacaaaaaaaaaaaccaaacac

SEQ ID NO: 23755 - DNA, 23 bp, Homo sapiens
gcatgctatgttgggtataatcc

SEQ ID NO: 23756 - DNA, 23 bp, Homo sapiens
tgtgtgctggcctggggttgttg

SEQ ID NO: 23757 - DNA, 22 bp, Homo sapiens
cattttagaaaccctgcgttca

SEQ ID NO: 23758 - DNA, 24 bp, Homo sapiens
cctttctcctacctttgctccagg

SEQ ID NO: 23759 - DNA, 17 bp, Homo sapiens
tctgtccctggctgagg

SEQ ID NO: 23760 - DNA, 24 bp, Homo sapiens
tcaagtcaacagcacaagggaaca

SEQ ID NO: 23761 - DNA, 16 bp, Homo sapiens
agagcccctcacttcc

SEQ ID NO: 23762 - DNA, 22 bp, Homo sapiens
caccattgaacatttccatttc

SEQ ID NO: 23763 - DNA, 23 bp, Homo sapiens
gcagagagaagctggagttaggt

SEQ ID NO: 23764 - DNA, 21 bp, Homo sapiens
atccaactcctccaccagaag

SEQ ID NO: 23765 - DNA, 19 bp, Homo sapiens
tcagcaagaccaggggaag

SEQ ID NO: 23766 - DNA, 24 bp, Homo sapiens
ctagggctaagacagtgcctgtcc

SEQ ID NO: 23767 - DNA, 23 bp, Homo sapiens
tagggaggaagtgagcatgcacc

SEQ ID NO: 23768 - DNA, 17 bp, Homo sapiens
acgggtacttgggccac

SEQ ID NO: 23769 - DNA, 23 bp, Homo sapiens
tgctcttctccacaaactctgac

SEQ ID NO: 23770 - DNA, 17 bp, Homo sapiens
tgtagctcaggctgggc

SEQ ID NO: 23771 - DNA, 24 bp, Homo sapiens
cttgaggagtggtccacttttcag

SEQ ID NO: 23772 - DNA, 24 bp, Homo sapiens
cttcttttttctcctaggacattg

SEQ ID NO: 23773 - DNA, 24 bp, Homo sapiens
aaaaaaggaggagtctggaatcac

SEQ ID NO: 23774 - DNA, 21 bp, Homo sapiens
gaagtagaggccaggagtcag

SEQ ID NO: 23775 - DNA, 24 bp, Homo sapiens
tctgggactgtctcccccatatgc

SEQ ID NO: 23776 - DNA, 17 bp, Homo sapiens
accctagggcagggagc

SEQ ID NO: 23777 - DNA, 23 bp, Homo sapiens
tcgctgtacctgtgcaagatgtc

SEQ ID NO: 23778 - DNA, 20 bp, Homo sapiens
agtcagaatgggaacttctg

SEQ ID NO: 23779 - DNA, 22 bp, Homo sapiens
gtcaccaagaccaagtcctatc

SEQ ID NO: 23780 - DNA, 18 bp, Homo sapiens
gtatcccaggacatcgcc

SEQ ID NO: 23781 - DNA, 22 bp, Homo sapiens
ggctgatggcagagctgggagc

SEQ ID NO: 23782 - DNA, 16 bp, Homo sapiens
actggaggacgtgggc

SEQ ID NO: 23783 - DNA, 17 bp, Homo sapiens
acacccacctgcagaag

SEQ ID NO: 23784 - DNA, 18 bp, Homo sapiens
cgggtgcagaggaagctg

SEQ ID NO: 23785 - DNA, 24 bp, Homo sapiens
cagttccccaatcagcgcatcgag

SEQ ID NO: 23786 - DNA, 23 bp, Homo sapiens
cacagacccccatacctccctgt

SEQ ID NO: 23787 - DNA, 23 bp, Homo sapiens
cctgatctgcccaaccatctggc

SEQ ID NO: 23788 - DNA, 23 bp, Homo sapiens
tatccacctccaggaggtgggct

SEQ ID NO: 23789 - DNA, 19 bp, Homo sapiens
caggaagtagtacacctgc

SEQ ID NO: 23790 - DNA, 17 bp, Homo sapiens
caatatcgcctcctgct

SEQ ID NO: 23791 - DNA, 22 bp, Homo sapiens
gaggagaaggcagtgagctttc

SEQ ID NO: 23792 - DNA, 21 bp, Homo sapiens
gctgctggttaccctctgtcc

SEQ ID NO: 23793 - DNA, 21 bp, Homo sapiens
agctggagcatctgaagaagc

SEQ ID NO: 23794 - DNA, 20 bp, Homo sapiens
cagcagaatctcggggaccc

SEQ ID NO: 23795 - DNA, 24 bp, Homo sapiens
taaagatggcaggagccaaattca

SEQ ID NO: 23796 - DNA, 22 bp, Homo sapiens
ccatcagccacctctgacctta

SEQ ID NO: 23797 - DNA, 19 bp, Homo sapiens
tcagccttgctaccagaag

SEQ ID NO: 23798 - DNA, 20 bp, Homo sapiens
tcccctgattttctcagctt

SEQ ID NO: 23799 - DNA, 18 bp, Homo sapiens
agccattcctccctcctc

SEQ ID NO: 23800 - DNA, 17 bp, Homo sapiens
cgccccattgaggaggt

SEQ ID NO: 23801 - DNA, 24 bp, Homo sapiens
tgccatttccagcccaagaatgct

SEQ ID NO: 23802 - DNA, 24 bp, Homo sapiens
cttctgtgaggatcacgatgagcc

SEQ ID NO: 23803 - DNA, 19 bp, Homo sapiens
gaagtaaggcccagtgtgt

SEQ ID NO: 23804 - DNA, 16 bp, Homo sapiens
cagcccctgccacagt

SEQ ID NO: 23805 - DNA, 22 bp, Homo sapiens
cttgtgttccagggcgacctcc

SEQ ID NO: 23806 - DNA, 17 bp, Homo sapiens
gctcacctggctgcccc

SEQ ID NO: 23807 - DNA, 18 bp, Homo sapiens
ctcagactgcagatgagg

SEQ ID NO: 23808 - DNA, 16 bp, Homo sapiens
attcctgcagcttccc

SEQ ID NO: 23809 - DNA, 21 bp, Homo sapiens
ctgcttcaggtggcgcttaca

SEQ ID NO: 23810 - DNA, 24 bp, Homo sapiens
gccaccagacacggctgcgagtcc

SEQ ID NO: 23811 - DNA, 21 bp, Homo sapiens
ttcctttcatgggagtcctgg

SEQ ID NO: 23812 - DNA, 24 bp, Homo sapiens
gtaagcaacttgggtttgccattc

SEQ ID NO: 23813 - DNA, 20 bp, Homo sapiens
ccagaaactgcctcggggaa

SEQ ID NO: 23814 - DNA, 24 bp, Homo sapiens
tctaactgagaactcgcacatctc

SEQ ID NO: 23815 - DNA, 21 bp, Homo sapiens
ggtctccttcctgggcgtggc

SEQ ID NO: 23816 - DNA, 18 bp, Homo sapiens
tcctcactggatggaagt

SEQ ID NO: 23817 - DNA, 22 bp, Homo sapiens
tcactacattcaccaggctggt

SEQ ID NO: 23818 - DNA, 18 bp, Homo sapiens
tccggatggaggggcatc

SEQ ID NO: 23819 - DNA, 18 bp, Homo sapiens
cgctgggattacaggcat

SEQ ID NO: 23820 - DNA, 24 bp, Homo sapiens
attctcctgactctagaggaaaag

SEQ ID NO: 23821 - DNA, 24 bp, Homo sapiens
tctgcagccgatataaagtaggaa

SEQ ID NO: 23822 - DNA, 23 bp, Homo sapiens
agaagccttgaggtcaccatttc

SEQ ID NO: 23823 - DNA, 21 bp, Homo sapiens
cttccttcaggtccgcagatg

SEQ ID NO: 23824 - DNA, 16 bp, Homo sapiens
cagaaggagtgcaggc

SEQ ID NO: 23825 - DNA, 24 bp, Homo sapiens
tgccgagtccagattcgcagctgt

SEQ ID NO: 23826 - DNA, 17 bp, Homo sapiens
tgcgcagaaacgccagc

SEQ ID NO: 23827 - DNA, 20 bp, Homo sapiens
ggcgccttctcccctgtaga

SEQ ID NO: 23828 - DNA, 16 bp, Homo sapiens
cgggcgggagaagccc

SEQ ID NO: 23829 - DNA, 22 bp, Homo sapiens
gggcaggtacacttcgaagggc

SEQ ID NO: 23830 - DNA, 17 bp, Homo sapiens
agaaggcctcggagggc

SEQ ID NO: 23831 - DNA, 17 bp, Homo sapiens
cagcctccccgcggagc

SEQ ID NO: 23832 - DNA, 24 bp, Homo sapiens
gctgccagcctgcggtgcagccag

SEQ ID NO: 23833 - DNA, 16 bp, Homo sapiens
cctgcaggggccgggg

SEQ ID NO: 23834 - DNA, 19 bp, Homo sapiens
agaccaccccgaggggaac

SEQ ID NO: 23835 - DNA, 24 bp, Homo sapiens
gaggcttgccctgcgcgtccaggc

SEQ ID NO: 23836 - DNA, 18 bp, Homo sapiens
cagatgattccgcagcgt

SEQ ID NO: 23837 - DNA, 19 bp, Homo sapiens
tcgacagccccctcccggc

SEQ ID NO: 23838 - DNA, 20 bp, Homo sapiens
gcttcatcattttgcatctg

SEQ ID NO: 23839 - DNA, 16 bp, Homo sapiens
cgagggccgttcccct

SEQ ID NO: 23840 - DNA, 23 bp, Homo sapiens
tctaaactttaatatccaagggg

SEQ ID NO: 23841 - DNA, 24 bp, Homo sapiens
ctgggcttgttctcccccagggag

SEQ ID NO: 23842 - DNA, 24 bp, Homo sapiens
tcccagagtgccgggaatacaggc

SEQ ID NO: 23843 - DNA, 24 bp, Homo sapiens
ggacgttcctgaactaaagtcatc

SEQ ID NO: 23844 - DNA, 16 bp, Homo sapiens
agctcaccctgcaggt

SEQ ID NO: 23845 - DNA, 23 bp, Homo sapiens
cagagtgagctgctctgagctcc

SEQ ID NO: 23846 - DNA, 16 bp, Homo sapiens
aggccggtgaagatgg

SEQ ID NO: 23847 - DNA, 16 bp, Homo sapiens
ggaggaggcctgggcc

SEQ ID NO: 23848 - DNA, 16 bp, Homo sapiens
cagaacaccagtgtgc

SEQ ID NO: 23849 - DNA, 19 bp, Homo sapiens
caggcgctggttgatggcc

SEQ ID NO: 23850 - DNA, 17 bp, Homo sapiens
gctgtccaccctggagg

SEQ ID NO: 23851 - DNA, 23 bp, Homo sapiens
atagtaggtgaccagcagagtgg

SEQ ID NO: 23852 - DNA, 17 bp, Homo sapiens
agacagctggctcgagc

SEQ ID NO: 23853 - DNA, 22 bp, Homo sapiens
ggggatcctggagtgctccttc

SEQ ID NO: 23854 - DNA, 21 bp, Homo sapiens
ctatttcacaacctgcctttt

SEQ ID NO: 23855 - DNA, 17 bp, Homo sapiens
gtcatagggcaccagct

SEQ ID NO: 23856 - DNA, 20 bp, Homo sapiens
acccttacccttagtctcag

SEQ ID NO: 23857 - DNA, 17 bp, Homo sapiens
gtggctgccgctactcc

SEQ ID NO: 23858 - DNA, 17 bp, Homo sapiens
ctgccgcggggcggtga

SEQ ID NO: 23859 - DNA, 24 bp, Homo sapiens
cccgacgtgccctgcgactcagcg

SEQ ID NO: 23860 - DNA, 18 bp, Homo sapiens
ccccaactgggaacagca

SEQ ID NO: 23861 - DNA, 18 bp, Homo sapiens
gtcttgtaaggtgcggct

SEQ ID NO: 23862 - DNA, 17 bp, Homo sapiens
tgaggacgtaggcggtc

SEQ ID NO: 23863 - DNA, 23 bp, Homo sapiens
ctcttcgacgtggatgggaccct

SEQ ID NO: 23864 - DNA, 21 bp, Homo sapiens
caagtgagaccctatctcaaa

SEQ ID NO: 23865 - DNA, 17 bp, Homo sapiens
gatccgcctaccactcc

SEQ ID NO: 23866 - DNA, 23 bp, Homo sapiens
aagacttatgtacttgtgttacc

SEQ ID NO: 23867 - DNA, 22 bp, Homo sapiens
gatgtaattagcaacccatcat

SEQ ID NO: 23868 - DNA, 24 bp, Homo sapiens
atgactgttgtattttctttcttg

SEQ ID NO: 23869 - DNA, 20 bp, Homo sapiens
gggcagcctatgatacttgg

SEQ ID NO: 23870 - DNA, 20 bp, Homo sapiens
aaattgaggcagaagatcaa

SEQ ID NO: 23871 - DNA, 21 bp, Homo sapiens
ccaagaaaatgtttcccaaaa

SEQ ID NO: 23872 - DNA, 21 bp, Homo sapiens
aggagcaactgggaaatgatg

SEQ ID NO: 23873 - DNA, 21 bp, Homo sapiens
ggaaacacataatcgtatttt

SEQ ID NO: 23874 - DNA, 21 bp, Homo sapiens
agtctgtaagatgagatagtc

SEQ ID NO: 23875 - DNA, 19 bp, Homo sapiens
acctacctgtctacacaag

SEQ ID NO: 23876 - DNA, 22 bp, Homo sapiens
gtggtcattgttaatcaaggag

SEQ ID NO: 23877 - DNA, 22 bp, Homo sapiens
gcattcattgtgaaatgccctt

SEQ ID NO: 23878 - DNA, 23 bp, Homo sapiens
tttttggttttgattgtagtggt

SEQ ID NO: 23879 - DNA, 21 bp, Homo sapiens
tgcaaaacaaaaaatacagag

SEQ ID NO: 23880 - DNA, 23 bp, Homo sapiens
tggtagcatacaaagatgggaaa

SEQ ID NO: 23881 - DNA, 18 bp, Homo sapiens
ggcctcacccagatgact

SEQ ID NO: 23882 - DNA, 19 bp, Homo sapiens
catgtcaccatcactgcta

SEQ ID NO: 23883 - DNA, 24 bp, Homo sapiens
cctcttcttcgggagtttaatttt

SEQ ID NO: 23884 - DNA, 23 bp, Homo sapiens
tgaagaccctgggtttgctatga

SEQ ID NO: 23885 - DNA, 19 bp, Homo sapiens
tgacactacgctatgttcc

SEQ ID NO: 23886 - DNA, 24 bp, Homo sapiens
tcaagtattttcttcatctagaat

SEQ ID NO: 23887 - DNA, 23 bp, Homo sapiens
gtttttaaaactctttaggtgat

SEQ ID NO: 23888 - DNA, 23 bp, Homo sapiens
taatcaactactgtctgagctac

SEQ ID NO: 23889 - DNA, 18 bp, Homo sapiens
tctcaggctttctgaacc

SEQ ID NO: 23890 - DNA, 23 bp, Homo sapiens
cccatttcggaattcaatgaaag

SEQ ID NO: 23891 - DNA, 24 bp, Homo sapiens
attacatagcacagagctgagaaa

SEQ ID NO: 23892 - DNA, 20 bp, Homo sapiens
tcgtagaactcaatgcgttc

SEQ ID NO: 23893 - DNA, 23 bp, Homo sapiens
tttaggctgtttatctatgttgc

SEQ ID NO: 23894 - DNA, 20 bp, Homo sapiens
ccataaacccagccattcac

SEQ ID NO: 23895 - DNA, 23 bp, Homo sapiens
cctttcattcccaggggtacttt

SEQ ID NO: 23896 - DNA, 21 bp, Homo sapiens
tgccttggcctcccaaagtgt

SEQ ID NO: 23897 - DNA, 19 bp, Homo sapiens
gaggtctcactatgttgcc

SEQ ID NO: 23898 - DNA, 20 bp, Homo sapiens
cgctccagcctgggcaacag

SEQ ID NO: 23899 - DNA, 16 bp, Homo sapiens
ggccttttccagcaaa

SEQ ID NO: 23900 - DNA, 20 bp, Homo sapiens
agataatcctacctttgtgg

SEQ ID NO: 23901 - DNA, 21 bp, Homo sapiens
aacaaactctgggaaatgggt

SEQ ID NO: 23902 - DNA, 23 bp, Homo sapiens
aatacaagaaacaattggtatct

SEQ ID NO: 23903 - DNA, 19 bp, Homo sapiens
cctgcccacctaaaactgc

SEQ ID NO: 23904 - DNA, 21 bp, Homo sapiens
gtagcagatctacggaaagag

SEQ ID NO: 23905 - DNA, 22 bp, Homo sapiens
tggctaattatgcagaaaagag

SEQ ID NO: 23906 - DNA, 16 bp, Homo sapiens
tgatctggcctcctgc

SEQ ID NO: 23907 - DNA, 22 bp, Homo sapiens
tgaagtagtctaagtagcaaac

SEQ ID NO: 23908 - DNA, 21 bp, Homo sapiens
gtcattttccacatgtcgcag

SEQ ID NO: 23909 - DNA, 27 bp, Homo sapiens
gacaaaagagtaaattgtttttttcag

SEQ ID NO: 23910 - DNA, 24 bp, Homo sapiens
cacaaacacttctctacttactgg

SEQ ID NO: 23911 - DNA, 24 bp, Homo sapiens
gcctttgtgtgccccgtccccacc

SEQ ID NO: 23912 - DNA, 16 bp, Homo sapiens
ggaaaaacagcccagt

SEQ ID NO: 23913 - DNA, 24 bp, Homo sapiens
gatggatgggacaagagatactgt

SEQ ID NO: 23914 - DNA, 16 bp, Homo sapiens
ggacagaagccactgc

SEQ ID NO: 23915 - DNA, 22 bp, Homo sapiens
tttggagacaaaactatgccag

SEQ ID NO: 23916 - DNA, 21 bp, Homo sapiens
agatctcatggtcattgccac

SEQ ID NO: 23917 - DNA, 24 bp, Homo sapiens
taagaggaaggtagctgaagaaac

SEQ ID NO: 23918 - DNA, 17 bp, Homo sapiens
gatcctgcgcgtgtcct

SEQ ID NO: 23919 - DNA, 24 bp, Homo sapiens
tacttttggactccagggtcacat

SEQ ID NO: 23920 - DNA, 24 bp, Homo sapiens
tatgctggcttgtcagccgggacc

SEQ ID NO: 23921 - DNA, 21 bp, Homo sapiens
tgtacttcgtgtctttccagg

SEQ ID NO: 23922 - DNA, 16 bp, Homo sapiens
gggtgggtgagcacgt

SEQ ID NO: 23923 - DNA, 16 bp, Homo sapiens
tactccgtgacagcgc

SEQ ID NO: 23924 - DNA, 23 bp, Homo sapiens
tttctggcactggaggtggaagt

SEQ ID NO: 23925 - DNA, 21 bp, Homo sapiens
ttgcctctgcatgacttcctc

SEQ ID NO: 23926 - DNA, 18 bp, Homo sapiens
ccctactcccagacctgc

SEQ ID NO: 23927 - DNA, 17 bp, Homo sapiens
tggcggccacctgcatc

SEQ ID NO: 23928 - DNA, 20 bp, Homo sapiens
gcctgggtgtctgacctgtc

SEQ ID NO: 23929 - DNA, 16 bp, Homo sapiens
gaagcctcacccctgc

SEQ ID NO: 23930 - DNA, 18 bp, Homo sapiens
gagtatcaggagagctgg

SEQ ID NO: 23931 - DNA, 16 bp, Homo sapiens
caagggctgggggtgg

SEQ ID NO: 23932 - DNA, 17 bp, Homo sapiens
ggagatccccagtgtgt

SEQ ID NO: 23933 - DNA, 16 bp, Homo sapiens
gggaggcgcagcctac

SEQ ID NO: 23934 - DNA, 22 bp, Homo sapiens
ctcatcactggtctgggagggc

SEQ ID NO: 23935 - DNA, 18 bp, Homo sapiens
tgtggttcggctttctgc

SEQ ID NO: 23936 - DNA, 19 bp, Homo sapiens
ctgggtgtccctggacagg

SEQ ID NO: 23937 - DNA, 18 bp, Homo sapiens
caggcttagcctctcccc

SEQ ID NO: 23938 - DNA, 24 bp, Homo sapiens
agggcgatgttgtggaaggtgttc

SEQ ID NO: 23939 - DNA, 24 bp, Homo sapiens
cagtaactcctaaaaccagggacc

SEQ ID NO: 23940 - DNA, 24 bp, Homo sapiens
atgatcaggaagacgaggtagatg

SEQ ID NO: 23941 - DNA, 16 bp, Homo sapiens
gggctggtgttgagat

SEQ ID NO: 23942 - DNA, 20 bp, Homo sapiens
cgtttcacctgggccctggc

SEQ ID NO: 23943 - DNA, 24 bp, Homo sapiens
gagcgagactctgtctcaaaaaaa

SEQ ID NO: 23944 - DNA, 18 bp, Homo sapiens
accagatgctgtaccagg

SEQ ID NO: 23945 - DNA, 18 bp, Homo sapiens
tttggggaagctgggagc

SEQ ID NO: 23946 - DNA, 16 bp, Homo sapiens
gggagcgggatggtcc

SEQ ID NO: 23947 - DNA, 21 bp, Homo sapiens
ggtttggtacctgcagcaggg

SEQ ID NO: 23948 - DNA, 16 bp, Homo sapiens
gcagtgggctgggagg

SEQ ID NO: 23949 - DNA, 16 bp, Homo sapiens
gcgggaggcaaagacg

SEQ ID NO: 23950 - DNA, 24 bp, Homo sapiens
tgaactcctctttttctggaacac

SEQ ID NO: 23951 - DNA, 24 bp, Homo sapiens
gttggggggaggagaggaggctcc

SEQ ID NO: 23952 - DNA, 16 bp, Homo sapiens
ctgggacccacacagc

SEQ ID NO: 23953 - DNA, 16 bp, Homo sapiens
gcatcaccacggcgcc

SEQ ID NO: 23954 - DNA, 22 bp, Homo sapiens
gagtatttcattaaccagggac

SEQ ID NO: 23955 - DNA, 24 bp, Homo sapiens
cggtattgctgagcgtgactcagg

SEQ ID NO: 23956 - DNA, 19 bp, Homo sapiens
tttccagggtctgctgtgg

SEQ ID NO: 23957 - DNA, 24 bp, Homo sapiens
aaataccagacaggggagatggac

SEQ ID NO: 23958 - DNA, 21 bp, Homo sapiens
atgatggctggggtatgtccc

SEQ ID NO: 23959 - DNA, 19 bp, Homo sapiens
cctagcacccctcacttac

SEQ ID NO: 23960 - DNA, 17 bp, Homo sapiens
ctccagctccagcctct

SEQ ID NO: 23961 - DNA, 24 bp, Homo sapiens
actacgaccaagggaacaatgtac

SEQ ID NO: 23962 - DNA, 21 bp, Homo sapiens
cctctttgccgagtcttcagt

SEQ ID NO: 23963 - DNA, 17 bp, Homo sapiens
gtgagcaagccccacag

SEQ ID NO: 23964 - DNA, 20 bp, Homo sapiens
agtggcatggaagtgagttc

SEQ ID NO: 23965 - DNA, 19 bp, Homo sapiens
ctgtccacctttcccgaag

SEQ ID NO: 23966 - DNA, 21 bp, Homo sapiens
cctcataagaaccgaggcccc

SEQ ID NO: 23967 - DNA, 24 bp, Homo sapiens
atagacaaaggcttttcccataac

SEQ ID NO: 23968 - DNA, 20 bp, Homo sapiens
catctcctgaggcccaggac

SEQ ID NO: 23969 - DNA, 22 bp, Homo sapiens
ctattgcagagaggaaaaggcc

SEQ ID NO: 23970 - DNA, 19 bp, Homo sapiens
tagggttttctgaccctgc

SEQ ID NO: 23971 - DNA, 21 bp, Homo sapiens
gtgtctcctacctggcttcga

SEQ ID NO: 23972 - DNA, 18 bp, Homo sapiens
caaaggtagaggtgttcc

SEQ ID NO: 23973 - DNA, 21 bp, Homo sapiens
gctctctgcttcttcttcccc

SEQ ID NO: 23974 - DNA, 24 bp, Homo sapiens
acaattggagctctcccgcacagc

SEQ ID NO: 23975 - DNA, 22 bp, Homo sapiens
ctggtttcctgaccttaggcga

SEQ ID NO: 23976 - DNA, 16 bp, Homo sapiens
agccaccacacccagc

SEQ ID NO: 23977 - DNA, 17 bp, Homo sapiens
cgtgatctcctggtggt

SEQ ID NO: 23978 - DNA, 17 bp, Homo sapiens
cagctcacctggccagc

SEQ ID NO: 23979 - DNA, 16 bp, Homo sapiens
gaggctgtcccatggt

SEQ ID NO: 23980 - DNA, 16 bp, Homo sapiens
tgaggggagaggccgg

SEQ ID NO: 23981 - DNA, 17 bp, Homo sapiens
gtcaccttcctctccct

SEQ ID NO: 23982 - DNA, 16 bp, Homo sapiens
cccagtccctgaggac

SEQ ID NO: 23983 - DNA, 16 bp, Homo sapiens
agtgcttgtcctcccc

SEQ ID NO: 23984 - DNA, 21 bp, Homo sapiens
gaacattcaggaggacctagg

SEQ ID NO: 23985 - DNA, 16 bp, Homo sapiens
tggccagacacattag

SEQ ID NO: 23986 - DNA, 17 bp, Homo sapiens
ttacctggggtagaagg

SEQ ID NO: 23987 - DNA, 18 bp, Homo sapiens
cctggaacctggcctatg

SEQ ID NO: 23988 - DNA, 17 bp, Homo sapiens
ctagcgaagaccacacc

SEQ ID NO: 23989 - DNA, 19 bp, Homo sapiens
agtctcccatcgcctactg

SEQ ID NO: 23990 - DNA, 23 bp, Homo sapiens
agtgggatttgtgctgctggaag

SEQ ID NO: 23991 - DNA, 19 bp, Homo sapiens
ctttcctctgggaggctgg

SEQ ID NO: 23992 - DNA, 23 bp, Homo sapiens
agtagagaccgaccttccccctc

SEQ ID NO: 23993 - DNA, 19 bp, Homo sapiens
ctccccatctgacacagaa

SEQ ID NO: 23994 - DNA, 16 bp, Homo sapiens
cagggtgggcaggagc

SEQ ID NO: 23995 - DNA, 24 bp, Homo sapiens
tgagaaaaggcaaccaggacgaag

SEQ ID NO: 23996 - DNA, 21 bp, Homo sapiens
caaattgttggctcctcttgg

SEQ ID NO: 23997 - DNA, 18 bp, Homo sapiens
gggggtgagaagggaagg

SEQ ID NO: 23998 - DNA, 23 bp, Homo sapiens
ctgcggtctcactctattctcct

SEQ ID NO: 23999 - DNA, 17 bp, Homo sapiens
cctcccctttctcagct

SEQ ID NO: 24000 - DNA, 18 bp, Homo sapiens
ctcctgcctctccttggc

SEQ ID NO: 24001 - DNA, 23 bp, Homo sapiens
cctgtagggcagcaggtgaaggc

SEQ ID NO: 24002 - DNA, 17 bp, Homo sapiens
tgagacttgaacccagg

SEQ ID NO: 24003 - DNA, 17 bp, Homo sapiens
caggagcacagcctggg

SEQ ID NO: 24004 - DNA, 21 bp, Homo sapiens
tcatcacgatttgactgcaac

SEQ ID NO: 24005 - DNA, 18 bp, Homo sapiens
cccaggtctcaactgttt

SEQ ID NO: 24006 - DNA, 20 bp, Homo sapiens
aagacatgcttttctcccat

SEQ ID NO: 24007 - DNA, 20 bp, Homo sapiens
gggagtggggtctatagacc

SEQ ID NO: 24008 - DNA, 24 bp, Homo sapiens
cttcaagtgaaggcagagctggga

SEQ ID NO: 24009 - DNA, 20 bp, Homo sapiens
cagccgtagagacagagttg

SEQ ID NO: 24010 - DNA, 23 bp, Homo sapiens
ttgtgcatgcagagacgctgagg

SEQ ID NO: 24011 - DNA, 19 bp, Homo sapiens
ttagccacaagaggacatc

SEQ ID NO: 24012 - DNA, 18 bp, Homo sapiens
ggcctttgcaacaacttc

SEQ ID NO: 24013 - DNA, 24 bp, Homo sapiens
ccttgtcccaccccctcatcttcc

SEQ ID NO: 24014 - DNA, 22 bp, Homo sapiens
gcacaaaggctacagatggctg

SEQ ID NO: 24015 - DNA, 24 bp, Homo sapiens
agagtcacttacatggctctggtt

SEQ ID NO: 24016 - DNA, 20 bp, Homo sapiens
gagggaaaaaaaagaggggg

SEQ ID NO: 24017 - DNA, 24 bp, Homo sapiens
ggcactcagcatcaccacataaga

SEQ ID NO: 24018 - DNA, 20 bp, Homo sapiens
ccaagcaccaaagcctgtat

SEQ ID NO: 24019 - DNA, 18 bp, Homo sapiens
aagaacgcggtgggcttc

SEQ ID NO: 24020 - DNA, 20 bp, Homo sapiens
ctggggcaaaccagtggatt

SEQ ID NO: 24021 - DNA, 16 bp, Homo sapiens
ggggaggagaccgtcc

SEQ ID NO: 24022 - DNA, 21 bp, Homo sapiens
actctttcttccccctttcct

SEQ ID NO: 24023 - DNA, 17 bp, Homo sapiens
caaggagcggtcgtgca

SEQ ID NO: 24024 - DNA, 23 bp, Homo sapiens
gctgaagtctcaggccactcacc

SEQ ID NO: 24025 - DNA, 16 bp, Homo sapiens
cctctggctcgcagcc

SEQ ID NO: 24026 - DNA, 16 bp, Homo sapiens
agagggagccggggct

SEQ ID NO: 24027 - DNA, 16 bp, Homo sapiens
cggcggcgcttttcgg

SEQ ID NO: 24028 - DNA, 22 bp, Homo sapiens
ccccacctactctcaggtgcac

SEQ ID NO: 24029 - DNA, 16 bp, Homo sapiens
tctatgaccctggacc

SEQ ID NO: 24030 - DNA, 18 bp, Homo sapiens
tcattcccctcaggtggg

SEQ ID NO: 24031 - DNA, 24 bp, Homo sapiens
caatcgggcgttgatccttgtcac

SEQ ID NO: 24032 - DNA, 20 bp, Homo sapiens
gaatactcaccctcggaatc

SEQ ID NO: 24033 - DNA, 20 bp, Homo sapiens
ccagcttccttgatggatcg

SEQ ID NO: 24034 - DNA, 21 bp, Homo sapiens
aatacagagatgacttggagg

SEQ ID NO: 24035 - DNA, 17 bp, Homo sapiens
ccaggtctccccgctcc

SEQ ID NO: 24036 - DNA, 18 bp, Homo sapiens
aggtattggcaagctcag

SEQ ID NO: 24037 - DNA, 24 bp, Homo sapiens
gtaattacaaaaatctcatgtagg

SEQ ID NO: 24038 - DNA, 23 bp, Homo sapiens
tgatattaacactttcctgctct

SEQ ID NO: 24039 - DNA, 22 bp, Homo sapiens
tctggagcatttgctttcaagc

SEQ ID NO: 24040 - DNA, 22 bp, Homo sapiens
ttttcatcttttcaactactgt

SEQ ID NO: 24041 - DNA, 22 bp, Homo sapiens
agggcatggagagcttcgactg

SEQ ID NO: 24042 - DNA, 22 bp, Homo sapiens
cacgtgacaaggtttattcttt

SEQ ID NO: 24043 - DNA, 17 bp, Homo sapiens
aagggagggacctcatt

SEQ ID NO: 24044 - DNA, 24 bp, Homo sapiens
tgagttgtaaaggattcaagtaac

SEQ ID NO: 24045 - DNA, 16 bp, Homo sapiens
agcaggacctggagtg

SEQ ID NO: 24046 - DNA, 24 bp, Homo sapiens
aggttttaataaagagtttggagt

SEQ ID NO: 24047 - DNA, 19 bp, Homo sapiens
ctgatctctgccttaccag

SEQ ID NO: 24048 - DNA, 22 bp, Homo sapiens
accatcgatattttgctcaatg

SEQ ID NO: 24049 - DNA, 23 bp, Homo sapiens
gtgataacaccccatttgggagt

SEQ ID NO: 24050 - DNA, 17 bp, Homo sapiens
gagccacgccaatgtcc

SEQ ID NO: 24051 - DNA, 21 bp, Homo sapiens
gcctagtgtacctttcttttt

SEQ ID NO: 24052 - DNA, 17 bp, Homo sapiens
cggtgaagcgaaggctg

SEQ ID NO: 24053 - DNA, 21 bp, Homo sapiens
caagagatgcctaatagaagg

SEQ ID NO: 24054 - DNA, 20 bp, Homo sapiens
actcattcgagggtacagag

SEQ ID NO: 24055 - DNA, 20 bp, Homo sapiens
acgtggataaagaaaacaac

SEQ ID NO: 24056 - DNA, 23 bp, Homo sapiens
gtgccttttattttaaccatgtc

SEQ ID NO: 24057 - DNA, 18 bp, Homo sapiens
agcctattcctgagtgac

SEQ ID NO: 24058 - DNA, 20 bp, Homo sapiens
gactgccaaaacataccttc

SEQ ID NO: 24059 - DNA, 17 bp, Homo sapiens
gtggcatgacttgtgtc

SEQ ID NO: 24060 - DNA, 20 bp, Homo sapiens
tgtctctctttgctttgttg

SEQ ID NO: 24061 - DNA, 21 bp, Homo sapiens
gggcagtgggtctactataac

SEQ ID NO: 24062 - DNA, 23 bp, Homo sapiens
aatcaattctgacaagacttcca

SEQ ID NO: 24063 - DNA, 21 bp, Homo sapiens
ttgagtgtcgattctacagtc

SEQ ID NO: 24064 - DNA, 24 bp, Homo sapiens
tctctgttctttccacttctttca

SEQ ID NO: 24065 - DNA, 20 bp, Homo sapiens
agccttaatgattctcaagt

SEQ ID NO: 24066 - DNA, 26 bp, Homo sapiens
atgaatcatacataccattgctatag

SEQ ID NO: 24067 - DNA, 21 bp, Homo sapiens
ttgttttttgtttttgctctt

SEQ ID NO: 24068 - DNA, 17 bp, Homo sapiens
gacacgggtgtctcttc

SEQ ID NO: 24069 - DNA, 21 bp, Homo sapiens
ttaaaattgatagtggaaagt

SEQ ID NO: 24070 - DNA, 23 bp, Homo sapiens
gttggatagtgtcatccatggtt

SEQ ID NO: 24071 - DNA, 21 bp, Homo sapiens
gtgtaacatacagtagtgtac

SEQ ID NO: 24072 - DNA, 21 bp, Homo sapiens
ccaagtagatgggattacagg

SEQ ID NO: 24073 - DNA, 22 bp, Homo sapiens
gatctcagctcactgcaacttc

SEQ ID NO: 24074 - DNA, 18 bp, Homo sapiens
gtttgagaccagcatggc

SEQ ID NO: 24075 - DNA, 16 bp, Homo sapiens
tgtggtggcaggcacc

SEQ ID NO: 24076 - DNA, 20 bp, Homo sapiens
catgctgagatgaagttgtc

SEQ ID NO: 24077 - DNA, 24 bp, Homo sapiens
aggaaaatcgctggaacccgggag

SEQ ID NO: 24078 - DNA, 23 bp, Homo sapiens
agataggaaataacacagtatga

SEQ ID NO: 24079 - DNA, 23 bp, Homo sapiens
cccagcccgggagacaatgcgag

SEQ ID NO: 24080 - DNA, 22 bp, Homo sapiens
ccaagaatatcaaacaggtcag

SEQ ID NO: 24081 - DNA, 22 bp, Homo sapiens
agatgactacttggttaagatt

SEQ ID NO: 24082 - DNA, 20 bp, Homo sapiens
ttgaagaggacatgtcagct

SEQ ID NO: 24083 - DNA, 25 bp, Homo sapiens
taagatttttatatatgaagactac

SEQ ID NO: 24084 - DNA, 22 bp, Homo sapiens
cagggtataagtagaattggtt

SEQ ID NO: 24085 - DNA, 21 bp, Homo sapiens
acatttctagttggcatcaag

SEQ ID NO: 24086 - DNA, 24 bp, Homo sapiens
agatctaggtataattaccatgtt

SEQ ID NO: 24087 - DNA, 19 bp, Homo sapiens
agtcatcactgtcagaagc

SEQ ID NO: 24088 - DNA, 19 bp, Homo sapiens
acttggaaccagaaggtga

SEQ ID NO: 24089 - DNA, 20 bp, Homo sapiens
ttctatcatttctgtcaaga

SEQ ID NO: 24090 - DNA, 16 bp, Homo sapiens
ggtcagcttgcagaac

SEQ ID NO: 24091 - DNA, 20 bp, Homo sapiens
tgttctatgatgcatactct

SEQ ID NO: 24092 - DNA, 23 bp, Homo sapiens
agatgaggtaaaagagaatactg

SEQ ID NO: 24093 - DNA, 23 bp, Homo sapiens
tagtttaaataagaaagtcacct

SEQ ID NO: 24094 - DNA, 23 bp, Homo sapiens
agcaattataaatataccagtgt

SEQ ID NO: 24095 - DNA, 19 bp, Homo sapiens
agatgccaagctttgttct

SEQ ID NO: 24096 - DNA, 21 bp, Homo sapiens
agtctcaaatttacatgcttt

SEQ ID NO: 24097 - DNA, 19 bp, Homo sapiens
ccttgctgcattttctcag

SEQ ID NO: 24098 - DNA, 22 bp, Homo sapiens
acaaattgaagtggttgttttc

SEQ ID NO: 24099 - DNA, 23 bp, Homo sapiens
atggctgttacccttgtcatatt

SEQ ID NO: 24100 - DNA, 21 bp, Homo sapiens
ccagaggtagagcatatacca

SEQ ID NO: 24101 - DNA, 22 bp, Homo sapiens
ggggaaatgctatgacttcctg

SEQ ID NO: 24102 - DNA, 21 bp, Homo sapiens
acatgcgtgttttcacattaa

SEQ ID NO: 24103 - DNA, 25 bp, Homo sapiens
aaaccttccaaaataattttaacac

SEQ ID NO: 24104 - DNA, 24 bp, Homo sapiens
agtagttcaatatgtatatgatag

SEQ ID NO: 24105 - DNA, 23 bp, Homo sapiens
gcatattaatttctatttctggt

SEQ ID NO: 24106 - DNA, 21 bp, Homo sapiens
actaagtaaattcagtgtcat

SEQ ID NO: 24107 - DNA, 18 bp, Homo sapiens
ggaggaggagaagtctcc

SEQ ID NO: 24108 - DNA, 20 bp, Homo sapiens
tctttcgtggatatcatgcc

SEQ ID NO: 24109 - DNA, 22 bp, Homo sapiens
actttaatgggaaaagacatac

SEQ ID NO: 24110 - DNA, 19 bp, Homo sapiens
aggcaccaagacctaaacc

SEQ ID NO: 24111 - DNA, 23 bp, Homo sapiens
gggaataatatgcctatataatt

SEQ ID NO: 24112 - DNA, 24 bp, Homo sapiens
atagctaaagtcttatctgaaatc

SEQ ID NO: 24113 - DNA, 22 bp, Homo sapiens
actacttacatcactctgatgt

SEQ ID NO: 24114 - DNA, 24 bp, Homo sapiens
ttttgaatataaagcttaagaact

SEQ ID NO: 24115 - DNA, 21 bp, Homo sapiens
ctacaggtgttaaacgttgtc

SEQ ID NO: 24116 - DNA, 20 bp, Homo sapiens
agcacactagttttagtgag

SEQ ID NO: 24117 - DNA, 24 bp, Homo sapiens
gtgtcagactgagtatgatgacca

SEQ ID NO: 24118 - DNA, 20 bp, Homo sapiens
aaatttcattcgcagcgaag

SEQ ID NO: 24119 - DNA, 21 bp, Homo sapiens
tttttggtgggggtggcagct

SEQ ID NO: 24120 - DNA, 25 bp, Homo sapiens
atattgaaatggaaatttgcttacc

SEQ ID NO: 24121 - DNA, 21 bp, Homo sapiens
ttaaaagtcactgatactcac

SEQ ID NO: 24122 - DNA, 23 bp, Homo sapiens
aatttgacaggaatatttgagtt

SEQ ID NO: 24123 - DNA, 18 bp, Homo sapiens
acaacttctggctcttcg

SEQ ID NO: 24124 - DNA, 28 bp, Homo sapiens
gtagttctttgttctttaattcttacag

SEQ ID NO: 24125 - DNA, 21 bp, Homo sapiens
attgatccacttggtggaagg

SEQ ID NO: 24126 - DNA, 18 bp, Homo sapiens
ccacctggctagttcaca

SEQ ID NO: 24127 - DNA, 19 bp, Homo sapiens
caggatgcttttgatggtc

SEQ ID NO: 24128 - DNA, 19 bp, Homo sapiens
gacaggtgtatctcaggta

SEQ ID NO: 24129 - DNA, 24 bp, Homo sapiens
tttaaaatatagtaatataggcct

SEQ ID NO: 24130 - DNA, 21 bp, Homo sapiens
gatagtgatacccaggagaat

SEQ ID NO: 24131 - DNA, 20 bp, Homo sapiens
acgaatcatatccataacac

SEQ ID NO: 24132 - DNA, 18 bp, Homo sapiens
tggacttggatcgatacc

SEQ ID NO: 24133 - DNA, 23 bp, Homo sapiens
attcaaaaacataggcttacctg

SEQ ID NO: 24134 - DNA, 18 bp, Homo sapiens
ttcccagtagcaatgatc

SEQ ID NO: 24135 - DNA, 22 bp, Homo sapiens
ggcacattgacttttcctatgt

SEQ ID NO: 24136 - DNA, 17 bp, Homo sapiens
gccacacccatatgttg

SEQ ID NO: 24137 - DNA, 24 bp, Homo sapiens
aaactcagagactctgacttaagg

SEQ ID NO: 24138 - DNA, 23 bp, Homo sapiens
ggcaacttaaatgaacttcacat

SEQ ID NO: 24139 - DNA, 20 bp, Homo sapiens
tgatcatcaaactgtggatc

SEQ ID NO: 24140 - DNA, 17 bp, Homo sapiens
taagtcagcaagcaccc

SEQ ID NO: 24141 - DNA, 24 bp, Homo sapiens
aaaatcaaaaaacttgtacacaac

SEQ ID NO: 24142 - DNA, 20 bp, Homo sapiens
ctgctgttcatcttttaact

SEQ ID NO: 24143 - DNA, 17 bp, Homo sapiens
caggtggttgcaacatc

SEQ ID NO: 24144 - DNA, 19 bp, Homo sapiens
tgaagtgaaaatatgcagc

SEQ ID NO: 24145 - DNA, 19 bp, Homo sapiens
ctgagttgagcagttttgg

SEQ ID NO: 24146 - DNA, 20 bp, Homo sapiens
caaattttaaggggccagag

SEQ ID NO: 24147 - DNA, 24 bp, Homo sapiens
tcaaaataaaagttaaaaaaagac

SEQ ID NO: 24148 - DNA, 20 bp, Homo sapiens
aagagttcccatggatcaag

SEQ ID NO: 24149 - DNA, 23 bp, Homo sapiens
aagcacgacacataaataaatat

SEQ ID NO: 24150 - DNA, 19 bp, Homo sapiens
tgtaggaacaaaaggagac

SEQ ID NO: 24151 - DNA, 21 bp, Homo sapiens
tgagcttaccgactgcatatg

SEQ ID NO: 24152 - DNA, 29 bp, Homo sapiens
gatgtatttttactgctatctattttaat

SEQ ID NO: 24153 - DNA, 22 bp, Homo sapiens
cctttgccctttctcgataaag

SEQ ID NO: 24154 - DNA, 24 bp, Homo sapiens
gcaagtcatattattttactcagc

SEQ ID NO: 24155 - DNA, 20 bp, Homo sapiens
tccactgtgccaaaatttgg

SEQ ID NO: 24156 - DNA, 19 bp, Homo sapiens
tgtacagcaagtttgattg

SEQ ID NO: 24157 - DNA, 21 bp, Homo sapiens
actgtgggtaaagaatgttgt

SEQ ID NO: 24158 - DNA, 19 bp, Homo sapiens
acaattgcagcatgtcaat

SEQ ID NO: 24159 - DNA, 24 bp, Homo sapiens
atagtaatgtagagtaccataacg

SEQ ID NO: 24160 - DNA, 25 bp, Homo sapiens
ttttgcaatatattcagaagaatac

SEQ ID NO: 24161 - DNA, 21 bp, Homo sapiens
ggcttatacattgtacttacc

SEQ ID NO: 24162 - DNA, 22 bp, Homo sapiens
gccttcatcccgaatataactt

SEQ ID NO: 24163 - DNA, 24 bp, Homo sapiens
agaatttcgtgaaattttaattga

SEQ ID NO: 24164 - DNA, 21 bp, Homo sapiens
tgtcactttctgtacctatgc

SEQ ID NO: 24165 - DNA, 24 bp, Homo sapiens
ctggtggacctcaagggtgatagt

SEQ ID NO: 24166 - DNA, 24 bp, Homo sapiens
gaaatccatatcaacaaagtaacc

SEQ ID NO: 24167 - DNA, 23 bp, Homo sapiens
aacaagatattgagaagtgaagt

SEQ ID NO: 24168 - DNA, 21 bp, Homo sapiens
ttgatgaatttgatgaaacca

SEQ ID NO: 24169 - DNA, 23 bp, Homo sapiens
agttgtctgtagttcaaaatcat

SEQ ID NO: 24170 - DNA, 16 bp, Homo sapiens
gcctatggcaccaagc

SEQ ID NO: 24171 - DNA, 23 bp, Homo sapiens
tccagatgcctgtaaaacttcag

SEQ ID NO: 24172 - DNA, 21 bp, Homo sapiens
ttctcatgtcaatattttgaa

SEQ ID NO: 24173 - DNA, 24 bp, Homo sapiens
gattttcgcctcgttctaagtgga

SEQ ID NO: 24174 - DNA, 21 bp, Homo sapiens
aaatagagactgttcaccaga

SEQ ID NO: 24175 - DNA, 22 bp, Homo sapiens
ttctggtttaaatttgtactgc

SEQ ID NO: 24176 - DNA, 24 bp, Homo sapiens
aacagaaatgataaatttttgtac

SEQ ID NO: 24177 - DNA, 22 bp, Homo sapiens
cacgtatccataaactagaagg

SEQ ID NO: 24178 - DNA, 19 bp, Homo sapiens
gctgcattcatgagctagc

SEQ ID NO: 24179 - DNA, 23 bp, Homo sapiens
gcaagattatgaactcaaagtgg

SEQ ID NO: 24180 - DNA, 23 bp, Homo sapiens
actgtaagtgcagatttggatga

SEQ ID NO: 24181 - DNA, 21 bp, Homo sapiens
acttattttcccttattttgt

SEQ ID NO: 24182 - DNA, 23 bp, Homo sapiens
tgtggaccaaaaaatcgtatatg

SEQ ID NO: 24183 - DNA, 21 bp, Homo sapiens
gcttgaatcatagttgctttg

SEQ ID NO: 24184 - DNA, 22 bp, Homo sapiens
agaagatgaacatactgttcca

SEQ ID NO: 24185 - DNA, 18 bp, Homo sapiens
cttgaggtcaggaaacca

SEQ ID NO: 24186 - DNA, 22 bp, Homo sapiens
tacgggtcactgcctcaacctc

SEQ ID NO: 24187 - DNA, 22 bp, Homo sapiens
acctagttataaggctacattc

SEQ ID NO: 24188 - DNA, 17 bp, Homo sapiens
ggtgcaagagctggaaa

SEQ ID NO: 24189 - DNA, 24 bp, Homo sapiens
atagataacaggtgataacataca

SEQ ID NO: 24190 - DNA, 28 bp, Homo sapiens
gatagtgaaattaataaagatctagaac

SEQ ID NO: 24191 - DNA, 20 bp, Homo sapiens
cttactttccccatttagtg

SEQ ID NO: 24192 - DNA, 22 bp, Homo sapiens
ttattttaggctcaaaaagaac

SEQ ID NO: 24193 - DNA, 24 bp, Homo sapiens
gttgcataattagcatgtttcttg

SEQ ID NO: 24194 - DNA, 24 bp, Homo sapiens
acatctatattaattcataaaatc

SEQ ID NO: 24195 - DNA, 19 bp, Homo sapiens
gctctctcatagagcgttc

SEQ ID NO: 24196 - DNA, 22 bp, Homo sapiens
cctttgtctgttttcaattaat

SEQ ID NO: 24197 - DNA, 18 bp, Homo sapiens
aggtctccatttttttgt

SEQ ID NO: 24198 - DNA, 20 bp, Homo sapiens
tgaattgagtgaagctctcc

SEQ ID NO: 24199 - DNA, 21 bp, Homo sapiens
actaagtttcagaagatgcaa

SEQ ID NO: 24200 - DNA, 24 bp, Homo sapiens
tttccattcataactcattgtgag

SEQ ID NO: 24201 - DNA, 20 bp, Homo sapiens
aagggtcatcattatgctga

SEQ ID NO: 24202 - DNA, 21 bp, Homo sapiens
ggcatcagtcagtttatgttt

SEQ ID NO: 24203 - DNA, 23 bp, Homo sapiens
ccttacctttataagtaggagag

SEQ ID NO: 24204 - DNA, 20 bp, Homo sapiens
ccatagggacattttgaagc

SEQ ID NO: 24205 - DNA, 22 bp, Homo sapiens
acttgatgaacttaaaaaacgc

SEQ ID NO: 24206 - DNA, 22 bp, Homo sapiens
gcatgagttaataaactgagta

SEQ ID NO: 24207 - DNA, 23 bp, Homo sapiens
aaaaactcgttcaagagaataga

SEQ ID NO: 24208 - DNA, 24 bp, Homo sapiens
tttctctatgcataaaatattgag

SEQ ID NO: 24209 - DNA, 24 bp, Homo sapiens
aacctgatttttacttacctttcc

SEQ ID NO: 24210 - DNA, 19 bp, Homo sapiens
cacctggttgtacaatttt

SEQ ID NO: 24211 - DNA, 23 bp, Homo sapiens
accagaacaatactagatcaaga

SEQ ID NO: 24212 - DNA, 21 bp, Homo sapiens
ccagatactgtaactgtagtt

SEQ ID NO: 24213 - DNA, 16 bp, Homo sapiens
tcattcccctgctgtc

SEQ ID NO: 24214 - DNA, 24 bp, Homo sapiens
tgaaatccttgacagattaaaaac

SEQ ID NO: 24215 - DNA, 21 bp, Homo sapiens
gtggatgactgtgtctgtccc

SEQ ID NO: 24216 - DNA, 19 bp, Homo sapiens
gtgcagattgctcagctcg

SEQ ID NO: 24217 - DNA, 18 bp, Homo sapiens
tgactgattcaatgaaga

SEQ ID NO: 24218 - DNA, 16 bp, Homo sapiens
agtgccttcagtgctg

SEQ ID NO: 24219 - DNA, 24 bp, Homo sapiens
tggttatttcaaatgtacctcttt

SEQ ID NO: 24220 - DNA, 26 bp, Homo sapiens
aaagcttttctctttattattttcgg

SEQ ID NO: 24221 - DNA, 24 bp, Homo sapiens
cagacttcaaggcagtctcgagct

SEQ ID NO: 24222 - DNA, 24 bp, Homo sapiens
gcagaccagcatatgtttacttaa

SEQ ID NO: 24223 - DNA, 24 bp, Homo sapiens
ttaacttccattgctcttcatggg

SEQ ID NO: 24224 - DNA, 26 bp, Homo sapiens
aaaactatgataaactttatgacagg

SEQ ID NO: 24225 - DNA, 23 bp, Homo sapiens
cctttatacagtttgcatatttc

SEQ ID NO: 24226 - DNA, 20 bp, Homo sapiens
tcattttagctgcaggatag

SEQ ID NO: 24227 - DNA, 21 bp, Homo sapiens
tattctgacaacagcaaatgc

SEQ ID NO: 24228 - DNA, 21 bp, Homo sapiens
tgtttttttttacccccaagt

SEQ ID NO: 24229 - DNA, 20 bp, Homo sapiens
aacacatggaatcacgattt

SEQ ID NO: 24230 - DNA, 20 bp, Homo sapiens
gcagctaccatttagcaatc

SEQ ID NO: 24231 - DNA, 21 bp, Homo sapiens
tcccgttccttttctaaatca

SEQ ID NO: 24232 - DNA, 27 bp, Homo sapiens
aacaattacattctatgaagttttctg

SEQ ID NO: 24233 - DNA, 24 bp, Homo sapiens
tgctcaaaacaccatgtacataac

SEQ ID NO: 24234 - DNA, 22 bp, Homo sapiens
ggggatgaattaaacatgcaac

SEQ ID NO: 24235 - DNA, 22 bp, Homo sapiens
actttttcaaaacagttaccaa

SEQ ID NO: 24236 - DNA, 22 bp, Homo sapiens
tcttttagaagcaaagaactct

SEQ ID NO: 24237 - DNA, 21 bp, Homo sapiens
gggagcttacctcttctattc

SEQ ID NO: 24238 - DNA, 21 bp, Homo sapiens
agtcaaatcatttagtcaaat

SEQ ID NO: 24239 - DNA, 19 bp, Homo sapiens
agcattttaaacgctgctc

SEQ ID NO: 24240 - DNA, 20 bp, Homo sapiens
tctgtataaggtgaacttcg

SEQ ID NO: 24241 - DNA, 20 bp, Homo sapiens
catcgtggctgattctgaga

SEQ ID NO: 24242 - DNA, 23 bp, Homo sapiens
agggaaatgatacacatttgtga

SEQ ID NO: 24243 - DNA, 23 bp, Homo sapiens
agcttcataaacagctagtagag

SEQ ID NO: 24244 - DNA, 23 bp, Homo sapiens
tgataattccatgttaaaaaaac

SEQ ID NO: 24245 - DNA, 24 bp, Homo sapiens
tctgtctctctttttcttaaacac

SEQ ID NO: 24246 - DNA, 23 bp, Homo sapiens
ctgtaacattgtaataaaataaa

SEQ ID NO: 24247 - DNA, 21 bp, Homo sapiens
aaaattgtgattccaccatag

SEQ ID NO: 24248 - DNA, 19 bp, Homo sapiens
attgctgaaagagcattgc

SEQ ID NO: 24249 - DNA, 20 bp, Homo sapiens
tccaaaaacctcattgactg

SEQ ID NO: 24250 - DNA, 20 bp, Homo sapiens
tgtcccgaatatttgacctt

SEQ ID NO: 24251 - DNA, 17 bp, Homo sapiens
agcttcgagaacagcaa

SEQ ID NO: 24252 - DNA, 20 bp, Homo sapiens
aatgttaagtaaaaacatga

SEQ ID NO: 24253 - DNA, 17 bp, Homo sapiens
ctgagatcctgaaaact

SEQ ID NO: 24254 - DNA, 21 bp, Homo sapiens
tggcacatgataaagtatttt

SEQ ID NO: 24255 - DNA, 23 bp, Homo sapiens
aggctctttatttcagagaaaac

SEQ ID NO: 24256 - DNA, 21 bp, Homo sapiens
tacctttgatctgtagcttgc

SEQ ID NO: 24257 - DNA, 21 bp, Homo sapiens
ttctttgcactgatcttaact

SEQ ID NO: 24258 - DNA, 23 bp, Homo sapiens
tcttttctcctcaactgagtttt

SEQ ID NO: 24259 - DNA, 24 bp, Homo sapiens
cactgtgtgcagaggcacttaagc

SEQ ID NO: 24260 - DNA, 19 bp, Homo sapiens
ggcctctttgtgactgaat

SEQ ID NO: 24261 - DNA, 24 bp, Homo sapiens
gccagaggagaaataagaaatttg

SEQ ID NO: 24262 - DNA, 20 bp, Homo sapiens
ctgttgttaccctacagaac

SEQ ID NO: 24263 - DNA, 17 bp, Homo sapiens
gcagaaactccacatcc

SEQ ID NO: 24264 - DNA, 24 bp, Homo sapiens
aggaaagggaaggataaaaaaaaa

SEQ ID NO: 24265 - DNA, 21 bp, Homo sapiens
ctaacttcaattctgtaatca

SEQ ID NO: 24266 - DNA, 21 bp, Homo sapiens
accacaaaaaagaacacatac

SEQ ID NO: 24267 - DNA, 29 bp, Homo sapiens
aatacttaagagattttattataaatatc

SEQ ID NO: 24268 - DNA, 21 bp, Homo sapiens
ccatattttgtaaacatggga

SEQ ID NO: 24269 - DNA, 17 bp, Homo sapiens
ccctttggcagtgtatt

SEQ ID NO: 24270 - DNA, 22 bp, Homo sapiens
cactgacaatattattttatca

SEQ ID NO: 24271 - DNA, 20 bp, Homo sapiens
atctcgtattaacactgggc

SEQ ID NO: 24272 - DNA, 21 bp, Homo sapiens
tgcgtaatacagaagtaaaac

SEQ ID NO: 24273 - DNA, 18 bp, Homo sapiens
tcagccaaacagcaactt

SEQ ID NO: 24274 - DNA, 22 bp, Homo sapiens
cagtttagatttaacgtaagct

SEQ ID NO: 24275 - DNA, 19 bp, Homo sapiens
gcaagagaaagttcatgag

SEQ ID NO: 24276 - DNA, 21 bp, Homo sapiens
tttcatttgcttttctacgcc

SEQ ID NO: 24277 - DNA, 16 bp, Homo sapiens
ggtggcggccccaagc

SEQ ID NO: 24278 - DNA, 21 bp, Homo sapiens
tgcctgtaaccctgggtttga

SEQ ID NO: 24279 - DNA, 18 bp, Homo sapiens
cccagaatggccaccaag

SEQ ID NO: 24280 - DNA, 23 bp, Homo sapiens
agggtttcattttgtttttcaag

SEQ ID NO: 24281 - DNA, 20 bp, Homo sapiens
ttcctttcaacagaatggat

SEQ ID NO: 24282 - DNA, 23 bp, Homo sapiens
tccatttccacatctcgtcccag

SEQ ID NO: 24283 - DNA, 22 bp, Homo sapiens
agttacatcaaaacctgaaatt

SEQ ID NO: 24284 - DNA, 22 bp, Homo sapiens
tgtcattaactagccgtattaa

SEQ ID NO: 24285 - DNA, 16 bp, Homo sapiens
gcatgctatgtgcagg

SEQ ID NO: 24286 - DNA, 22 bp, Homo sapiens
ttaggtggtcatagcagactac

SEQ ID NO: 24287 - DNA, 18 bp, Homo sapiens
aatccatcctaaggaggt

SEQ ID NO: 24288 - DNA, 19 bp, Homo sapiens
ggaatcaggcaagtgagtc

SEQ ID NO: 24289 - DNA, 23 bp, Homo sapiens
tgttctaggttcaaagaaaaggt

SEQ ID NO: 24290 - DNA, 23 bp, Homo sapiens
aacccaactcaaagtaaaaggcc

SEQ ID NO: 24291 - DNA, 22 bp, Homo sapiens
gcattaaaaacaaagtgtgttc

SEQ ID NO: 24292 - DNA, 23 bp, Homo sapiens
agagtagaaactgaactggaacc

SEQ ID NO: 24293 - DNA, 21 bp, Homo sapiens
aagagtagatactctttcatt

SEQ ID NO: 24294 - DNA, 20 bp, Homo sapiens
tcaatggttgtctcaccttt

SEQ ID NO: 24295 - DNA, 24 bp, Homo sapiens
aagcaggaggataaaattaaaagg

SEQ ID NO: 24296 - DNA, 24 bp, Homo sapiens
aagattttccatttttaaaaattg

SEQ ID NO: 24297 - DNA, 19 bp, Homo sapiens
atttttgcgtttgcatgat

SEQ ID NO: 24298 - DNA, 24 bp, Homo sapiens
caaggtggggtattcaattaagtt

SEQ ID NO: 24299 - DNA, 18 bp, Homo sapiens
cggacaatgaagtctcgc

SEQ ID NO: 24300 - DNA, 23 bp, Homo sapiens
aaaaaagctaaaagctttttatc

SEQ ID NO: 24301 - DNA, 24 bp, Homo sapiens
gagtttctagagactattttaagt

SEQ ID NO: 24302 - DNA, 25 bp, Homo sapiens
tttaagtaaaatgttctcatcatgc

SEQ ID NO: 24303 - DNA, 22 bp, Homo sapiens
tgtaggtcacaaaggaaaaaat

SEQ ID NO: 24304 - DNA, 18 bp, Homo sapiens
gacacgtgacactgcctg

SEQ ID NO: 24305 - DNA, 23 bp, Homo sapiens
caccttaaataattgatgtaaac

SEQ ID NO: 24306 - DNA, 18 bp, Homo sapiens
tctttggaatgggagggt

SEQ ID NO: 24307 - DNA, 22 bp, Homo sapiens
tctccatctttttgtttagtcc

SEQ ID NO: 24308 - DNA, 20 bp, Homo sapiens
catgtctggtccaactgatg

SEQ ID NO: 24309 - DNA, 23 bp, Homo sapiens
tgtatgagtataagaaatacttt

SEQ ID NO: 24310 - DNA, 29 bp, Homo sapiens
gcatagttaatgtaataatttggaaagag

SEQ ID NO: 24311 - DNA, 17 bp, Homo sapiens
taacagctggccatacc

SEQ ID NO: 24312 - DNA, 19 bp, Homo sapiens
aagatgcccattaaagttc

SEQ ID NO: 24313 - DNA, 24 bp, Homo sapiens
tatctttcacaggcaagtctcctg

SEQ ID NO: 24314 - DNA, 21 bp, Homo sapiens
tcacatgtagttctttgtctt

SEQ ID NO: 24315 - DNA, 21 bp, Homo sapiens
tgcaattcgaagcaataacat

SEQ ID NO: 24316 - DNA, 21 bp, Homo sapiens
ccggggttcaccagggtgtga

SEQ ID NO: 24317 - DNA, 20 bp, Homo sapiens
cctgatgtttcttcttatgc

SEQ ID NO: 24318 - DNA, 19 bp, Homo sapiens
tgccaggaacttcatgacc

SEQ ID NO: 24319 - DNA, 24 bp, Homo sapiens
cctggttttatgttgttttaaaac

SEQ ID NO: 24320 - DNA, 22 bp, Homo sapiens
catgattttgaacagtgtgttg

SEQ ID NO: 24321 - DNA, 23 bp, Homo sapiens
agttattttttttagggaatggt

SEQ ID NO: 24322 - DNA, 21 bp, Homo sapiens
acctggttctttggttttcca

SEQ ID NO: 24323 - DNA, 19 bp, Homo sapiens
caattcaaagagcaggtcg

SEQ ID NO: 24324 - DNA, 20 bp, Homo sapiens
gtgccagctctggagtgtga

SEQ ID NO: 24325 - DNA, 23 bp, Homo sapiens
atggatataaaattcgctgtaac

SEQ ID NO: 24326 - DNA, 22 bp, Homo sapiens
taccaccatcttcaatgagttc

SEQ ID NO: 24327 - DNA, 22 bp, Homo sapiens
acaggaaaacaatgaagagtcg

SEQ ID NO: 24328 - DNA, 18 bp, Homo sapiens
agagacttaccccgcaga

SEQ ID NO: 24329 - DNA, 22 bp, Homo sapiens
gcaagtttttcttaagcttgcc

SEQ ID NO: 24330 - DNA, 17 bp, Homo sapiens
cccaacagctctgtgtg

SEQ ID NO: 24331 - DNA, 27 bp, Homo sapiens
gttactcgattttaatgaaaatatagc

SEQ ID NO: 24332 - DNA, 21 bp, Homo sapiens
attaaggtcatagagttccat

SEQ ID NO: 24333 - DNA, 16 bp, Homo sapiens
gctgaggatgctcgtc

SEQ ID NO: 24334 - DNA, 22 bp, Homo sapiens
tgccaagttattttccaaagtc

SEQ ID NO: 24335 - DNA, 19 bp, Homo sapiens
tgcatcagaagctcagtgc

SEQ ID NO: 24336 - DNA, 24 bp, Homo sapiens
ctgagagttgctattccatactgc

SEQ ID NO: 24337 - DNA, 18 bp, Homo sapiens
tgaggcctttttcattcc

SEQ ID NO: 24338 - DNA, 20 bp, Homo sapiens
actcacatgtccctcatcag

SEQ ID NO: 24339 - DNA, 22 bp, Homo sapiens
gaaagaagggggtctctgtatc

SEQ ID NO: 24340 - DNA, 19 bp, Homo sapiens
tgatcagccatatcagcac

SEQ ID NO: 24341 - DNA, 22 bp, Homo sapiens
acttgttgagacagagatgaaa

SEQ ID NO: 24342 - DNA, 22 bp, Homo sapiens
tcctgtctattttgaggaatta

SEQ ID NO: 24343 - DNA, 22 bp, Homo sapiens
tttacttcaagaattgcaaaaa

SEQ ID NO: 24344 - DNA, 19 bp, Homo sapiens
tccagtcaatggcatcatt

SEQ ID NO: 24345 - DNA, 24 bp, Homo sapiens
tgtagtaccattaatctcctcaaa

SEQ ID NO: 24346 - DNA, 20 bp, Homo sapiens
ttttctctgggtagatcact

SEQ ID NO: 24347 - DNA, 21 bp, Homo sapiens
ttccctcaccttaactagcac

SEQ ID NO: 24348 - DNA, 24 bp, Homo sapiens
agtatggggaaattcaggtactat

SEQ ID NO: 24349 - DNA, 24 bp, Homo sapiens
cttctacttgaaggtcttcaatag

SEQ ID NO: 24350 - DNA, 18 bp, Homo sapiens
tcctttttcaacactgca

SEQ ID NO: 24351 - DNA, 27 bp, Homo sapiens
aaatcaatatcatcagtatttatagtg

SEQ ID NO: 24352 - DNA, 21 bp, Homo sapiens
aaacgtggttttatgaccttg

SEQ ID NO: 24353 - DNA, 21 bp, Homo sapiens
gtgtgtttcacatctttacgg

SEQ ID NO: 24354 - DNA, 21 bp, Homo sapiens
accacatgagaaatctatgcc

SEQ ID NO: 24355 - DNA, 23 bp, Homo sapiens
gctcggtcagaactttctgttac

SEQ ID NO: 24356 - DNA, 22 bp, Homo sapiens
tcaaaaaagaaatctatgcccc

SEQ ID NO: 24357 - DNA, 24 bp, Homo sapiens
aaaaagaacgtctgtaccttaaaa

SEQ ID NO: 24358 - DNA, 19 bp, Homo sapiens
tttatatgcaggtggccgc

SEQ ID NO: 24359 - DNA, 21 bp, Homo sapiens
gaaggagaactcttccctcaa

SEQ ID NO: 24360 - DNA, 21 bp, Homo sapiens
tgtgagtgtcttctggtaaca

SEQ ID NO: 24361 - DNA, 24 bp, Homo sapiens
ggtgtgggatgaagtataattctt

SEQ ID NO: 24362 - DNA, 17 bp, Homo sapiens
agaacgggcacagaggg

SEQ ID NO: 24363 - DNA, 20 bp, Homo sapiens
acccccaagttagagaattc

SEQ ID NO: 24364 - DNA, 16 bp, Homo sapiens
gcgctgaccagcctgg

SEQ ID NO: 24365 - DNA, 24 bp, Homo sapiens
atgtaattttccctttctatgaaa

SEQ ID NO: 24366 - DNA, 19 bp, Homo sapiens
ggccatagcacccagtttc

SEQ ID NO: 24367 - DNA, 20 bp, Homo sapiens
agaaaagcgagatactcacc

SEQ ID NO: 24368 - DNA, 20 bp, Homo sapiens
ctttattttctgggccttgc

SEQ ID NO: 24369 - DNA, 24 bp, Homo sapiens
aactgattggctcactggcagggt

SEQ ID NO: 24370 - DNA, 21 bp, Homo sapiens
gggttccttcttaagtgaaac

SEQ ID NO: 24371 - DNA, 21 bp, Homo sapiens
tcttgtcgattcaaatacatg

SEQ ID NO: 24372 - DNA, 20 bp, Homo sapiens
gggttacagaagcaggtgac

SEQ ID NO: 24373 - DNA, 24 bp, Homo sapiens
tgaggaaataaaaggtcatgagaa

SEQ ID NO: 24374 - DNA, 17 bp, Homo sapiens
atccctattgtgcctcc

SEQ ID NO: 24375 - DNA, 20 bp, Homo sapiens
aagaatccactgggcatatg

SEQ ID NO: 24376 - DNA, 21 bp, Homo sapiens
tttacaggtgaaagccacgtg

SEQ ID NO: 24377 - DNA, 21 bp, Homo sapiens
tgaactgtgacttgcaaaggg

SEQ ID NO: 24378 - DNA, 19 bp, Homo sapiens
tttactcttccctgcagac

SEQ ID NO: 24379 - DNA, 23 bp, Homo sapiens
aagtgcagatccacagggacatc

SEQ ID NO: 24380 - DNA, 16 bp, Homo sapiens
tgacctcgtgatctgc

SEQ ID NO: 24381 - DNA, 24 bp, Homo sapiens
gaggttgtgaatgctgggatgtac

SEQ ID NO: 24382 - DNA, 21 bp, Homo sapiens
cgcccagctaattttttgtat

SEQ ID NO: 24383 - DNA, 24 bp, Homo sapiens
atcaatactgctcggatgatggtg

SEQ ID NO: 24384 - DNA, 24 bp, Homo sapiens
cgcctgtagtcccagctacttggg

SEQ ID NO: 24385 - DNA, 17 bp, Homo sapiens
atgagacccaaactgct

SEQ ID NO: 24386 - DNA, 24 bp, Homo sapiens
cagagcttgcagtgagccaagaca

SEQ ID NO: 24387 - DNA, 24 bp, Homo sapiens
caagatggcacaggtgcctctaaa

SEQ ID NO: 24388 - DNA, 18 bp, Homo sapiens
agtaggaaatgggtgggg

SEQ ID NO: 24389 - DNA, 22 bp, Homo sapiens
aaatgcgtaattctgtatgagc

SEQ ID NO: 24390 - DNA, 20 bp, Homo sapiens
gtcttttgaagctgaatagc

SEQ ID NO: 24391 - DNA, 17 bp, Homo sapiens
gagcctggtattggctg

SEQ ID NO: 24392 - DNA, 23 bp, Homo sapiens
agttctctgaattctaaagaatc

SEQ ID NO: 24393 - DNA, 22 bp, Homo sapiens
gctggaactccgtaactatgag

SEQ ID NO: 24394 - DNA, 23 bp, Homo sapiens
caattctgacaatggcaaaaagg

SEQ ID NO: 24395 - DNA, 19 bp, Homo sapiens
acaccagtgcagagcagga

SEQ ID NO: 24396 - DNA, 24 bp, Homo sapiens
atatttgctgatcctcccggtcag

SEQ ID NO: 24397 - DNA, 21 bp, Homo sapiens
ttttccttctgttcagtccgg

SEQ ID NO: 24398 - DNA, 22 bp, Homo sapiens
gacctacacctaccttggcatt

SEQ ID NO: 24399 - DNA, 24 bp, Homo sapiens
ttgtttttaagagcaggtaattga

SEQ ID NO: 24400 - DNA, 24 bp, Homo sapiens
cttcttctgactcagctctcggat

SEQ ID NO: 24401 - DNA, 20 bp, Homo sapiens
gtaccgagatcctgtagttc

SEQ ID NO: 24402 - DNA, 20 bp, Homo sapiens
atctcagccgtgccaggcag

SEQ ID NO: 24403 - DNA, 21 bp, Homo sapiens
ggccacatacagttaatctgc

SEQ ID NO: 24404 - DNA, 23 bp, Homo sapiens
tccccaactttggtgaatttatt

SEQ ID NO: 24405 - DNA, 24 bp, Homo sapiens
ctttaaggacaatttttcttctgc

SEQ ID NO: 24406 - DNA, 24 bp, Homo sapiens
aatttcctgatattttgacccaat

SEQ ID NO: 24407 - DNA, 28 bp, Homo sapiens
tttaaatttgtgttttatttgtaggttg

SEQ ID NO: 24408 - DNA, 20 bp, Homo sapiens
actttccccatccactgagc

SEQ ID NO: 24409 - DNA, 24 bp, Homo sapiens
gacctttaaagctgatttttattt

SEQ ID NO: 24410 - DNA, 20 bp, Homo sapiens
tctccctctaccacaccggc

SEQ ID NO: 24411 - DNA, 19 bp, Homo sapiens
cctgagaagttgtagggct

SEQ ID NO: 24412 - DNA, 22 bp, Homo sapiens
cagttcggtcacttcgagcatc

SEQ ID NO: 24413 - DNA, 19 bp, Homo sapiens
actgataactggttggtcc

SEQ ID NO: 24414 - DNA, 21 bp, Homo sapiens
gtaaaaacattgccaaggaac

SEQ ID NO: 24415 - DNA, 19 bp, Homo sapiens
gtcgaaaaatcatgccatg

SEQ ID NO: 24416 - DNA, 20 bp, Homo sapiens
agtcctacagccaatacacc

SEQ ID NO: 24417 - DNA, 20 bp, Homo sapiens
ctttgatattcaggcgcttg

SEQ ID NO: 24418 - DNA, 20 bp, Homo sapiens
acttaccttcccattggacc

SEQ ID NO: 24419 - DNA, 23 bp, Homo sapiens
ggcacagttggagtttatgacaa

SEQ ID NO: 24420 - DNA, 23 bp, Homo sapiens
ttaaggtcaaaagcatgaatgct

SEQ ID NO: 24421 - DNA, 21 bp, Homo sapiens
gtcacctctctttgtcccatg

SEQ ID NO: 24422 - DNA, 22 bp, Homo sapiens
gcacagaagtctcacaataact

SEQ ID NO: 24423 - DNA, 19 bp, Homo sapiens
agtaaactgagtcttaatg

SEQ ID NO: 24424 - DNA, 21 bp, Homo sapiens
aattctccagtatcgggatgt

SEQ ID NO: 24425 - DNA, 24 bp, Homo sapiens
agcgcttttaaatctaattttaac

SEQ ID NO: 24426 - DNA, 22 bp, Homo sapiens
ataaccaaatcgactgccatac

SEQ ID NO: 24427 - DNA, 23 bp, Homo sapiens
agtagatgacatgtatcgtagag

SEQ ID NO: 24428 - DNA, 20 bp, Homo sapiens
ggaagatgagattgtggcag

SEQ ID NO: 24429 - DNA, 21 bp, Homo sapiens
agcttttatcctaaaaccacc

SEQ ID NO: 24430 - DNA, 19 bp, Homo sapiens
gatatttccccttcagctt

SEQ ID NO: 24431 - DNA, 22 bp, Homo sapiens
tgtttcatctgacagtactgat

SEQ ID NO: 24432 - DNA, 21 bp, Homo sapiens
ctgtgcaattttttgttttgt

SEQ ID NO: 24433 - DNA, 24 bp, Homo sapiens
cttcttacctctgtttctgtcatt

SEQ ID NO: 24434 - DNA, 23 bp, Homo sapiens
tttctgagcatcaaacgattatg

SEQ ID NO: 24435 - DNA, 24 bp, Homo sapiens
atcaaaatcctcagatccaacaag

SEQ ID NO: 24436 - DNA, 22 bp, Homo sapiens
tgactttgatggtgatggaaag

SEQ ID NO: 24437 - DNA, 21 bp, Homo sapiens
ggccaactggctgagcattta

SEQ ID NO: 24438 - DNA, 20 bp, Homo sapiens
ttggggttttattttcaggt

SEQ ID NO: 24439 - DNA, 24 bp, Homo sapiens
cacttctgtcaacactaatgtcac

SEQ ID NO: 24440 - DNA, 20 bp, Homo sapiens
aatcctctccttcatgtagc

SEQ ID NO: 24441 - DNA, 20 bp, Homo sapiens
tatctcctcccccacatacc

SEQ ID NO: 24442 - DNA, 21 bp, Homo sapiens
ttctgtgcattaaaaaaggat

SEQ ID NO: 24443 - DNA, 22 bp, Homo sapiens
taacattgtctccagtaacctg

SEQ ID NO: 24444 - DNA, 20 bp, Homo sapiens
ggaagtgatctcttttggac

SEQ ID NO: 24445 - DNA, 23 bp, Homo sapiens
gctattcgaattattcatatcct

SEQ ID NO: 24446 - DNA, 18 bp, Homo sapiens
atttcttcccctcttgcg

SEQ ID NO: 24447 - DNA, 22 bp, Homo sapiens
cagtagagttggtggttaaaaa

SEQ ID NO: 24448 - DNA, 22 bp, Homo sapiens
tgtgtccttttacttttcttag

SEQ ID NO: 24449 - DNA, 20 bp, Homo sapiens
ttttcttcttcataccgtcc

SEQ ID NO: 24450 - DNA, 19 bp, Homo sapiens
actcaaaatttggcccaat

SEQ ID NO: 24451 - DNA, 22 bp, Homo sapiens
cagagcacaattgccaccaata

SEQ ID NO: 24452 - DNA, 20 bp, Homo sapiens
tgtgaggcccacccacatta

SEQ ID NO: 24453 - DNA, 16 bp, Homo sapiens
tgccccatctgctacc

SEQ ID NO: 24454 - DNA, 21 bp, Homo sapiens
cggatttgttctacagagagg

SEQ ID NO: 24455 - DNA, 20 bp, Homo sapiens
aacagcaaaatctccatgtt

SEQ ID NO: 24456 - DNA, 19 bp, Homo sapiens
tgcccttttagtggggaca

SEQ ID NO: 24457 - DNA, 22 bp, Homo sapiens
aaatgatctgatctcttctaag

SEQ ID NO: 24458 - DNA, 19 bp, Homo sapiens
tcagcattaaccaggcagt

SEQ ID NO: 24459 - DNA, 24 bp, Homo sapiens
atggttataaaggttatacttgcc

SEQ ID NO: 24460 - DNA, 20 bp, Homo sapiens
catgtcagtgcatccagggt

SEQ ID NO: 24461 - DNA, 20 bp, Homo sapiens
gccaaaagattagtctgtgt

SEQ ID NO: 24462 - DNA, 22 bp, Homo sapiens
ttttaagggaatgtaattagtt

SEQ ID NO: 24463 - DNA, 16 bp, Homo sapiens
acgcctgcagtcagac

SEQ ID NO: 24464 - DNA, 22 bp, Homo sapiens
tgtggatgtgttaataacctgg

SEQ ID NO: 24465 - DNA, 22 bp, Homo sapiens
agattccagggggctctggaag

SEQ ID NO: 24466 - DNA, 22 bp, Homo sapiens
aactatgtacgagtgttttaag

SEQ ID NO: 24467 - DNA, 18 bp, Homo sapiens
gatggagccacaaggtgc

SEQ ID NO: 24468 - DNA, 17 bp, Homo sapiens
atggtggccatagggcg

SEQ ID NO: 24469 - DNA, 16 bp, Homo sapiens
agaggggacgggatcc

SEQ ID NO: 24470 - DNA, 16 bp, Homo sapiens
gccatcatgctgctgc

SEQ ID NO: 24471 - DNA, 23 bp, Homo sapiens
cctggggcccgggctccctgcgg

SEQ ID NO: 24472 - DNA, 16 bp, Homo sapiens
gcgtgaggccagctcc

SEQ ID NO: 24473 - DNA, 24 bp, Homo sapiens
ccaggcacgggtgagtcccgtcgt

SEQ ID NO: 24474 - DNA, 16 bp, Homo sapiens
cgcgtccggcctgagg

SEQ ID NO: 24475 - DNA, 21 bp, Homo sapiens
cagtttcagggtgaacacagg

SEQ ID NO: 24476 - DNA, 24 bp, Homo sapiens
ccagaatccattcccaagaagtgc

SEQ ID NO: 24477 - DNA, 23 bp, Homo sapiens
ctgcaggtgctgtctgtctggct

SEQ ID NO: 24478 - DNA, 21 bp, Homo sapiens
attttcatttcccagaactgg

SEQ ID NO: 24479 - DNA, 18 bp, Homo sapiens
ctccaggcacttgcaggg

SEQ ID NO: 24480 - DNA, 17 bp, Homo sapiens
cccgctgctgctgggtc

SEQ ID NO: 24481 - DNA, 21 bp, Homo sapiens
tgctagtgggaccagaggcac

SEQ ID NO: 24482 - DNA, 17 bp, Homo sapiens
cgccactgaactccagc

SEQ ID NO: 24483 - DNA, 17 bp, Homo sapiens
gctctgaggcacgaggg

SEQ ID NO: 24484 - DNA, 17 bp, Homo sapiens
gtccagcagcaccagga

SEQ ID NO: 24485 - DNA, 17 bp, Homo sapiens
ctgtgctggccacggtt

SEQ ID NO: 24486 - DNA, 20 bp, Homo sapiens
ctctctgtccccagctttgc

SEQ ID NO: 24487 - DNA, 24 bp, Homo sapiens
gcaaagagacggccgcccacacac

SEQ ID NO: 24488 - DNA, 17 bp, Homo sapiens
ccaggccagcccctctc

SEQ ID NO: 24489 - DNA, 24 bp, Homo sapiens
ctggggctgcgcggggaccaaggc

SEQ ID NO: 24490 - DNA, 18 bp, Homo sapiens
gtcccagtgactgctcac

SEQ ID NO: 24491 - DNA, 24 bp, Homo sapiens
ctgctgagggcctcctggtactcg

SEQ ID NO: 24492 - DNA, 16 bp, Homo sapiens
ccaggggagaggttcc

SEQ ID NO: 24493 - DNA, 17 bp, Homo sapiens
atagcaacagcagatgc

SEQ ID NO: 24494 - DNA, 16 bp, Homo sapiens
gtcacaactcacaatc

SEQ ID NO: 24495 - DNA, 19 bp, Homo sapiens
ctgtggagcctgcatttgg

SEQ ID NO: 24496 - DNA, 23 bp, Homo sapiens
caggacacaccttccctcttctc

SEQ ID NO: 24497 - DNA, 18 bp, Homo sapiens
actcacctgagggggaac

SEQ ID NO: 24498 - DNA, 16 bp, Homo sapiens
caggggctccaggaca

SEQ ID NO: 24499 - DNA, 20 bp, Homo sapiens
gcagcttcgtgtggtcttcc

SEQ ID NO: 24500 - DNA, 24 bp, Homo sapiens
gagacccccccacggcccccagtt

SEQ ID NO: 24501 - DNA, 16 bp, Homo sapiens
ggccacacagagaagg

SEQ ID NO: 24502 - DNA, 16 bp, Homo sapiens
gccaccctcgggcagc

SEQ ID NO: 24503 - DNA, 17 bp, Homo sapiens
tgtgcctcccccaggac

SEQ ID NO: 24504 - DNA, 24 bp, Homo sapiens
tgtcattacatggtcctcccctcc

SEQ ID NO: 24505 - DNA, 24 bp, Homo sapiens
cgcctgcgcccacgtcccgagccc

SEQ ID NO: 24506 - DNA, 16 bp, Homo sapiens
gatgacagacgcagcc

SEQ ID NO: 24507 - DNA, 18 bp, Homo sapiens
tccagaagtgagccttgt

SEQ ID NO: 24508 - DNA, 23 bp, Homo sapiens
tgcgggcctttttacttttcaat

SEQ ID NO: 24509 - DNA, 16 bp, Homo sapiens
caccctcctgcagggc

SEQ ID NO: 24510 - DNA, 24 bp, Homo sapiens
cctgccctgggcacgagcacgcct

SEQ ID NO: 24511 - DNA, 16 bp, Homo sapiens
gcctggcccttgcggg

SEQ ID NO: 24512 - DNA, 21 bp, Homo sapiens
cctgattagcagctctgggct

SEQ ID NO: 24513 - DNA, 19 bp, Homo sapiens
gctgccatgtgtttcaggt

SEQ ID NO: 24514 - DNA, 24 bp, Homo sapiens
tctagcaccaacctgtccatcagc

SEQ ID NO: 24515 - DNA, 16 bp, Homo sapiens
cccccccagggattgg

SEQ ID NO: 24516 - DNA, 17 bp, Homo sapiens
ctgtcgctgggcggcgt

SEQ ID NO: 24517 - DNA, 16 bp, Homo sapiens
ctgtgggcgtgtgagc

SEQ ID NO: 24518 - DNA, 22 bp, Homo sapiens
catgatgctgcccagctggtgg

SEQ ID NO: 24519 - DNA, 22 bp, Homo sapiens
cgcatggtggccagggcacgtc

SEQ ID NO: 24520 - DNA, 17 bp, Homo sapiens
gtggggaggagagcggt

SEQ ID NO: 24521 - DNA, 19 bp, Homo sapiens
tttctgtgtgggaagcaga

SEQ ID NO: 24522 - DNA, 17 bp, Homo sapiens
acacaccctgggatggc

SEQ ID NO: 24523 - DNA, 17 bp, Homo sapiens
catctggtcccagtggc

SEQ ID NO: 24524 - DNA, 17 bp, Homo sapiens
cacctggcctgcagtga

SEQ ID NO: 24525 - DNA, 19 bp, Homo sapiens
ggccctttgtccctatgac

SEQ ID NO: 24526 - DNA, 21 bp, Homo sapiens
cctccttcaaacgtggtctgc

SEQ ID NO: 24527 - DNA, 16 bp, Homo sapiens
cccctggagagccacc

SEQ ID NO: 24528 - DNA, 17 bp, Homo sapiens
aggctcggtgacatctg

SEQ ID NO: 24529 - DNA, 18 bp, Homo sapiens
cgcggacaacaccttcgt

SEQ ID NO: 24530 - DNA, 17 bp, Homo sapiens
cacagaccccgtgggca

SEQ ID NO: 24531 - DNA, 20 bp, Homo sapiens
gtccgggagattgatgacag

SEQ ID NO: 24532 - DNA, 17 bp, Homo sapiens
tgagaagtgacagcgag

SEQ ID NO: 24533 - DNA, 20 bp, Homo sapiens
atttgtcaccatcctccagg

SEQ ID NO: 24534 - DNA, 21 bp, Homo sapiens
gttgtccgacgtgaagaagac

SEQ ID NO: 24535 - DNA, 23 bp, Homo sapiens
ggtctgtgaagttatgatttaat

SEQ ID NO: 24536 - DNA, 22 bp, Homo sapiens
gagctccagtatcttcccaatg

SEQ ID NO: 24537 - DNA, 19 bp, Homo sapiens
catgaacttgaactgaggc

SEQ ID NO: 24538 - DNA, 21 bp, Homo sapiens
ctccaaacccttcttgggcac

SEQ ID NO: 24539 - DNA, 17 bp, Homo sapiens
gttgctctggcctttcc

SEQ ID NO: 24540 - DNA, 21 bp, Homo sapiens
cacggcaccacccctttttcc

SEQ ID NO: 24541 - DNA, 22 bp, Homo sapiens
catctctggagtcaagcacagc

SEQ ID NO: 24542 - DNA, 17 bp, Homo sapiens
tggaggacgacggtgtg

SEQ ID NO: 24543 - DNA, 16 bp, Homo sapiens
ctcgctgactggtgcc

SEQ ID NO: 24544 - DNA, 16 bp, Homo sapiens
gccccgtgggacgtgt

SEQ ID NO: 24545 - DNA, 19 bp, Homo sapiens
gtcgacagcccagtagagg

SEQ ID NO: 24546 - DNA, 16 bp, Homo sapiens
gggacggggaccgcac

SEQ ID NO: 24547 - DNA, 23 bp, Homo sapiens
attaatctgaagacgggggaagc

SEQ ID NO: 24548 - DNA, 17 bp, Homo sapiens
cccacggggtgaggttg

SEQ ID NO: 24549 - DNA, 19 bp, Homo sapiens
aattctgaagtctgtctgg

SEQ ID NO: 24550 - DNA, 19 bp, Homo sapiens
gttggtgcggtccccgtcc

SEQ ID NO: 24551 - DNA, 24 bp, Homo sapiens
tttaaatgaagcccatggctttgc

SEQ ID NO: 24552 - DNA, 18 bp, Homo sapiens
aggtagatctgggtgagg

SEQ ID NO: 24553 - DNA, 17 bp, Homo sapiens
tcagcctcccaaaatgc

SEQ ID NO: 24554 - DNA, 23 bp, Homo sapiens
ccctgtgtacagggactgggaga

SEQ ID NO: 24555 - DNA, 24 bp, Homo sapiens
gccctcggtgcccggggacccagg

SEQ ID NO: 24556 - DNA, 24 bp, Homo sapiens
tttggatcccccaactgccacttt

SEQ ID NO: 24557 - DNA, 22 bp, Homo sapiens
agtgctagaggcggggggcagg

SEQ ID NO: 24558 - DNA, 20 bp, Homo sapiens
tttccaggcatctgggtcac

SEQ ID NO: 24559 - DNA, 19 bp, Homo sapiens
tccattacctgccaaccat

SEQ ID NO: 24560 - DNA, 24 bp, Homo sapiens
tgttgctgctcagaacttccgagt

SEQ ID NO: 24561 - DNA, 24 bp, Homo sapiens
cctggccttgttgtcataaggtcc

SEQ ID NO: 24562 - DNA, 23 bp, Homo sapiens
catactcagtgctggagggtgct

SEQ ID NO: 24563 - DNA, 22 bp, Homo sapiens
cttcagggggtggaactggggc

SEQ ID NO: 24564 - DNA, 18 bp, Homo sapiens
aagattgtcggcaagtgg

SEQ ID NO: 24565 - DNA, 24 bp, Homo sapiens
cacctgaacacacccagaatcagc

SEQ ID NO: 24566 - DNA, 17 bp, Homo sapiens
gcatcccagactcggag

SEQ ID NO: 24567 - DNA, 18 bp, Homo sapiens
gtggccatgtcccttgga

SEQ ID NO: 24568 - DNA, 16 bp, Homo sapiens
tcctcggggctcaccc

SEQ ID NO: 24569 - DNA, 17 bp, Homo sapiens
gtggccaggagacttac

SEQ ID NO: 24570 - DNA, 16 bp, Homo sapiens
atgtgtggacgcagcc

SEQ ID NO: 24571 - DNA, 24 bp, Homo sapiens
cttcttcagaagctccggcaggag

SEQ ID NO: 24572 - DNA, 16 bp, Homo sapiens
cctgtggacgcgcagc

SEQ ID NO: 24573 - DNA, 17 bp, Homo sapiens
aacgcccatgccagaaa

SEQ ID NO: 24574 - DNA, 23 bp, Homo sapiens
cacctaagtcccagagacccagg

SEQ ID NO: 24575 - DNA, 19 bp, Homo sapiens
ctccacatagcgagggcgg

SEQ ID NO: 24576 - DNA, 17 bp, Homo sapiens
cgggcaccacccgtagc

SEQ ID NO: 24577 - DNA, 17 bp, Homo sapiens
ttgacgcccggggtctg

SEQ ID NO: 24578 - DNA, 17 bp, Homo sapiens
ggcggtgggcagcctac

SEQ ID NO: 24579 - DNA, 17 bp, Homo sapiens
agccccttgtaaacctg

SEQ ID NO: 24580 - DNA, 16 bp, Homo sapiens
gtagccgtcctgtgag

SEQ ID NO: 24581 - DNA, 22 bp, Homo sapiens
attctgccaaccctctgtgctc

SEQ ID NO: 24582 - DNA, 16 bp, Homo sapiens
cctgccaccctccctg

SEQ ID NO: 24583 - DNA, 19 bp, Homo sapiens
gaccccgaatttggaccgg

SEQ ID NO: 24584 - DNA, 17 bp, Homo sapiens
cagggctggaaggaccc

SEQ ID NO: 24585 - DNA, 16 bp, Homo sapiens
ccgtgctcttccctgc

SEQ ID NO: 24586 - DNA, 17 bp, Homo sapiens
ggccccgctgacttaca

SEQ ID NO: 24587 - DNA, 21 bp, Homo sapiens
cttggcaccatgggcagctcc

SEQ ID NO: 24588 - DNA, 16 bp, Homo sapiens
ctgcagccatccggtc

SEQ ID NO: 24589 - DNA, 16 bp, Homo sapiens
ctgccgctggctggga

SEQ ID NO: 24590 - DNA, 18 bp, Homo sapiens
cccgaggtcaccccatcc

SEQ ID NO: 24591 - DNA, 24 bp, Homo sapiens
ccttctgcaggtgcttctggcctg

SEQ ID NO: 24592 - DNA, 16 bp, Homo sapiens
gacagcgtgggctgac

SEQ ID NO: 24593 - DNA, 23 bp, Homo sapiens
gaagccagcaccaccctgtgtcc

SEQ ID NO: 24594 - DNA, 18 bp, Homo sapiens
aggctgggaggaggcaga

SEQ ID NO: 24595 - DNA, 16 bp, Homo sapiens
gcgtgcacgatggggc

SEQ ID NO: 24596 - DNA, 21 bp, Homo sapiens
gaaaatagatgcacgtgttta

SEQ ID NO: 24597 - DNA, 16 bp, Homo sapiens
gcacgatggggccgct

SEQ ID NO: 24598 - DNA, 22 bp, Homo sapiens
ttaccagttgactttgaaatct

SEQ ID NO: 24599 - DNA, 22 bp, Homo sapiens
cttggtcttcaggtggggaatg

SEQ ID NO: 24600 - DNA, 16 bp, Homo sapiens
gagtggagttgcagcg

SEQ ID NO: 24601 - DNA, 18 bp, Homo sapiens
gccccccaacatcctgct

SEQ ID NO: 24602 - DNA, 24 bp, Homo sapiens
cttccccaaggggcctcccctcac

SEQ ID NO: 24603 - DNA, 19 bp, Homo sapiens
ggtggcagctgttgctggt

SEQ ID NO: 24604 - DNA, 24 bp, Homo sapiens
ctcctccctccatccgcccctccc

SEQ ID NO: 24605 - DNA, 22 bp, Homo sapiens
ctcgctggccggggctccgcgg

SEQ ID NO: 24606 - DNA, 19 bp, Homo sapiens
actcacgtcgtccatgagc

SEQ ID NO: 24607 - DNA, 17 bp, Homo sapiens
ccaggccccgccccgca

SEQ ID NO: 24608 - DNA, 21 bp, Homo sapiens
cccgcggcgctgagcaccagc

SEQ ID NO: 24609 - DNA, 17 bp, Homo sapiens
gtccaggccccgcctcc

SEQ ID NO: 24610 - DNA, 18 bp, Homo sapiens
gtcccaggagcctcatct

SEQ ID NO: 24611 - DNA, 24 bp, Homo sapiens
tcataaataattgattcctttccc

SEQ ID NO: 24612 - DNA, 16 bp, Homo sapiens
cagaggtgagcgccgc

SEQ ID NO: 24613 - DNA, 24 bp, Homo sapiens
gcaacaagagctccatgttatgct

SEQ ID NO: 24614 - DNA, 16 bp, Homo sapiens
atgggctgaggacctg

SEQ ID NO: 24615 - DNA, 24 bp, Homo sapiens
tggtgtgcagtggcaggtcccgtc

SEQ ID NO: 24616 - DNA, 21 bp, Homo sapiens
ctggcaatacaactcgactat

SEQ ID NO: 24617 - DNA, 17 bp, Homo sapiens
ctgtctgctctggaggg

SEQ ID NO: 24618 - DNA, 17 bp, Homo sapiens
caccttgggccatgtgg

SEQ ID NO: 24619 - DNA, 17 bp, Homo sapiens
tgagagaggagcaggtc

SEQ ID NO: 24620 - DNA, 18 bp, Homo sapiens
ttaatacctcggtgcccg

SEQ ID NO: 24621 - DNA, 24 bp, Homo sapiens
gggaggggctctggcagaaatagt

SEQ ID NO: 24622 - DNA, 24 bp, Homo sapiens
cctgttttctctctagggcaaccc

SEQ ID NO: 24623 - DNA, 23 bp, Homo sapiens
ccaggcagctgtcaattctcatg

SEQ ID NO: 24624 - DNA, 22 bp, Homo sapiens
gactatgggggacacaccagcc

SEQ ID NO: 24625 - DNA, 22 bp, Homo sapiens
cctctgccacgtgtgagaagct

SEQ ID NO: 24626 - DNA, 16 bp, Homo sapiens
gggagctccccccagc

SEQ ID NO: 24627 - DNA, 23 bp, Homo sapiens
gagcttttgttatcagttccacg

SEQ ID NO: 24628 - DNA, 18 bp, Homo sapiens
ctggcaggagcctggagc

SEQ ID NO: 24629 - DNA, 23 bp, Homo sapiens
ttagaagacatacagaaacaggg

SEQ ID NO: 24630 - DNA, 22 bp, Homo sapiens
tggacatgtacttgaagctggt

SEQ ID NO: 24631 - DNA, 21 bp, Homo sapiens
acattctttggcagaaggagc

SEQ ID NO: 24632 - DNA, 21 bp, Homo sapiens
ctctcctacttccatgaagac

SEQ ID NO: 24633 - DNA, 19 bp, Homo sapiens
cacctgcctgacccttgag

SEQ ID NO: 24634 - DNA, 18 bp, Homo sapiens
gctacctttccagcagtc

SEQ ID NO: 24635 - DNA, 24 bp, Homo sapiens
ttgtatccccagccacgaagagct

SEQ ID NO: 24636 - DNA, 18 bp, Homo sapiens
gccagatgggaagggttg

SEQ ID NO: 24637 - DNA, 18 bp, Homo sapiens
cctcttccctgatggccg

SEQ ID NO: 24638 - DNA, 23 bp, Homo sapiens
acatagtgacaaatggctacaga

SEQ ID NO: 24639 - DNA, 16 bp, Homo sapiens
ggccccggatcagcac

SEQ ID NO: 24640 - DNA, 21 bp, Homo sapiens
ctcatctgtggagcagaggca

SEQ ID NO: 24641 - DNA, 17 bp, Homo sapiens
ttgcctgagccacttct

SEQ ID NO: 24642 - DNA, 22 bp, Homo sapiens
gagatgggggtctgggaaacac

SEQ ID NO: 24643 - DNA, 17 bp, Homo sapiens
gtacacgtcccgacccc

SEQ ID NO: 24644 - DNA, 24 bp, Homo sapiens
aaaaagcgaaaggcagcagcctgg

SEQ ID NO: 24645 - DNA, 24 bp, Homo sapiens
gacaggtacctgggtatcctcagc

SEQ ID NO: 24646 - DNA, 24 bp, Homo sapiens
tttaaacaagtttgtgcttaatct

SEQ ID NO: 24647 - DNA, 19 bp, Homo sapiens
gcagcaatcctcgagtgtt

SEQ ID NO: 24648 - DNA, 23 bp, Homo sapiens
gaacctcaaggagggctcgttct

SEQ ID NO: 24649 - DNA, 21 bp, Homo sapiens
ttctcagggttggtctcctgc

SEQ ID NO: 24650 - DNA, 16 bp, Homo sapiens
cctcagcagcgtgttt

SEQ ID NO: 24651 - DNA, 21 bp, Homo sapiens
cctcttctgtgctgagggctg

SEQ ID NO: 24652 - DNA, 22 bp, Homo sapiens
gccaggatatcttcctcttctc

SEQ ID NO: 24653 - DNA, 22 bp, Homo sapiens
accttctataggtaaaactgtc

SEQ ID NO: 24654 - DNA, 20 bp, Homo sapiens
cctgctgtcgtcacatctga

SEQ ID NO: 24655 - DNA, 20 bp, Homo sapiens
actcacacttccgcaaacac

SEQ ID NO: 24656 - DNA, 21 bp, Homo sapiens
aataagtgcacgtttttattt

SEQ ID NO: 24657 - DNA, 17 bp, Homo sapiens
gctggctgcctggtgcc

SEQ ID NO: 24658 - DNA, 21 bp, Homo sapiens
aattaaagaggaatgtgtcag

SEQ ID NO: 24659 - DNA, 21 bp, Homo sapiens
aggtctgacttacatttgagg

SEQ ID NO: 24660 - DNA, 24 bp, Homo sapiens
gaagtgattggaaagttttctaag

SEQ ID NO: 24661 - DNA, 22 bp, Homo sapiens
gaaaaggaaaaccaatagctgt

SEQ ID NO: 24662 - DNA, 28 bp, Homo sapiens
taaaaatacaaaaaaaaaaaaaaaaaaa

SEQ ID NO: 24663 - DNA, 19 bp, Homo sapiens
gcgattcaacaagtcaggg

SEQ ID NO: 24664 - DNA, 24 bp, Homo sapiens
agaaaaacagttcatcagacaagc

SEQ ID NO: 24665 - DNA, 16 bp, Homo sapiens
ctgaggctgcctcccc

SEQ ID NO: 24666 - DNA, 24 bp, Homo sapiens
gaaaataaatcagtaaaagaattt

SEQ ID NO: 24667 - DNA, 21 bp, Homo sapiens
cgtggttgtatggttgtaagg

SEQ ID NO: 24668 - DNA, 23 bp, Homo sapiens
tagctgcttcctgatgttttctt

SEQ ID NO: 24669 - DNA, 17 bp, Homo sapiens
ctgatggaaaggcaggc

SEQ ID NO: 24670 - DNA, 16 bp, Homo sapiens
cagtccgggttgggtg

SEQ ID NO: 24671 - DNA, 24 bp, Homo sapiens
accaccacgagaactcggttcttt

SEQ ID NO: 24672 - DNA, 17 bp, Homo sapiens
gagacactgccagagcc

SEQ ID NO: 24673 - DNA, 23 bp, Homo sapiens
aagcaagccagggtgtttaggag

SEQ ID NO: 24674 - DNA, 19 bp, Homo sapiens
ctggtgctctctccatagg

SEQ ID NO: 24675 - DNA, 20 bp, Homo sapiens
gcacaccccatctcaccacc

SEQ ID NO: 24676 - DNA, 17 bp, Homo sapiens
gcttgtcatggctgggg

SEQ ID NO: 24677 - DNA, 16 bp, Homo sapiens
cagttcccggggcagc

SEQ ID NO: 24678 - DNA, 17 bp, Homo sapiens
tttggagttccagagcg

SEQ ID NO: 24679 - DNA, 23 bp, Homo sapiens
ccaggctcggccaccacacctat

SEQ ID NO: 24680 - DNA, 16 bp, Homo sapiens
tggcttccatgtctcc

SEQ ID NO: 24681 - DNA, 17 bp, Homo sapiens
tccctgatggtcgactt

SEQ ID NO: 24682 - DNA, 16 bp, Homo sapiens
gtgctgcagagatgcc

SEQ ID NO: 24683 - DNA, 23 bp, Homo sapiens
gctgacctcctgctgcgttctct

SEQ ID NO: 24684 - DNA, 24 bp, Homo sapiens
aaacaccaaacaagacagctgacc

SEQ ID NO: 24685 - DNA, 19 bp, Homo sapiens
tcctgtcagcttcctgtga

SEQ ID NO: 24686 - DNA, 18 bp, Homo sapiens
acttggccagtatgaagt

SEQ ID NO: 24687 - DNA, 21 bp, Homo sapiens
cttcttcagggtgagatgctc

SEQ ID NO: 24688 - DNA, 17 bp, Homo sapiens
ggaggccctgcaggaga

SEQ ID NO: 24689 - DNA, 18 bp, Homo sapiens
tgcagagaaacttctgct

SEQ ID NO: 24690 - DNA, 21 bp, Homo sapiens
ctagtagagtgaaggaactca

SEQ ID NO: 24691 - DNA, 16 bp, Homo sapiens
gcatgttggtctcgcc

SEQ ID NO: 24692 - DNA, 21 bp, Homo sapiens
aggccacgagaggggctgagg

SEQ ID NO: 24693 - DNA, 20 bp, Homo sapiens
accatccatggtggccacgc

SEQ ID NO: 24694 - DNA, 24 bp, Homo sapiens
gtcctgtgtcagggcacctccgtg

SEQ ID NO: 24695 - DNA, 20 bp, Homo sapiens
cacttggtcaactctgagat

SEQ ID NO: 24696 - DNA, 19 bp, Homo sapiens
cattccagacactgttccc

SEQ ID NO: 24697 - DNA, 16 bp, Homo sapiens
ggcagcagcttccagg

SEQ ID NO: 24698 - DNA, 16 bp, Homo sapiens
atggaggctgcaagag

SEQ ID NO: 24699 - DNA, 17 bp, Homo sapiens
caccaatacagcccctt

SEQ ID NO: 24700 - DNA, 18 bp, Homo sapiens
gcacacggggcacctacc

SEQ ID NO: 24701 - DNA, 20 bp, Homo sapiens
gtggttgctgctctgagagt

SEQ ID NO: 24702 - DNA, 24 bp, Homo sapiens
cgcatctggcagtgatgggctgtt

SEQ ID NO: 24703 - DNA, 18 bp, Homo sapiens
gacagagggacacaggcc

SEQ ID NO: 24704 - DNA, 19 bp, Homo sapiens
tgccacagaaatggacagg

SEQ ID NO: 24705 - DNA, 17 bp, Homo sapiens
ctgacaagcgggtggag

SEQ ID NO: 24706 - DNA, 24 bp, Homo sapiens
acgggaaacaaactcactacaaag

SEQ ID NO: 24707 - DNA, 20 bp, Homo sapiens
ctctcggccacaccccttcc

SEQ ID NO: 24708 - DNA, 18 bp, Homo sapiens
ccctgcccaggtggtagt

SEQ ID NO: 24709 - DNA, 24 bp, Homo sapiens
ccagcatactgctctttttcagga

SEQ ID NO: 24710 - DNA, 24 bp, Homo sapiens
tctgtctctgaaggctggcagcca

SEQ ID NO: 24711 - DNA, 16 bp, Homo sapiens
ctgacgtctgggtccc

SEQ ID NO: 24712 - DNA, 23 bp, Homo sapiens
gaaaatctcaaagaggaagtgct

SEQ ID NO: 24713 - DNA, 24 bp, Homo sapiens
ttgaaatagcttgccccacttgtt

SEQ ID NO: 24714 - DNA, 22 bp, Homo sapiens
gctgcagctccaggtcagctac

SEQ ID NO: 24715 - DNA, 21 bp, Homo sapiens
catggtctcgatctcctgact

SEQ ID NO: 24716 - DNA, 23 bp, Homo sapiens
accactcagaaaattctgatttg

SEQ ID NO: 24717 - DNA, 24 bp, Homo sapiens
tcagcactattaggcgatactgag

SEQ ID NO: 24718 - DNA, 24 bp, Homo sapiens
gaagtgaatgcactgagttgtggc

SEQ ID NO: 24719 - DNA, 16 bp, Homo sapiens
agcacagccatcactc

SEQ ID NO: 24720 - DNA, 24 bp, Homo sapiens
catttcctgtgcggccaccaaaga

SEQ ID NO: 24721 - DNA, 21 bp, Homo sapiens
gttggtagtattttgtggcag

SEQ ID NO: 24722 - DNA, 17 bp, Homo sapiens
tggatttccaccaaagg

SEQ ID NO: 24723 - DNA, 24 bp, Homo sapiens
agactgacatttgggtataggctg

SEQ ID NO: 24724 - DNA, 17 bp, Homo sapiens
gcttcagggggctgtga

SEQ ID NO: 24725 - DNA, 24 bp, Homo sapiens
catggccagaaactcccctttata

SEQ ID NO: 24726 - DNA, 21 bp, Homo sapiens
ttgctgttctaggcaggactt

SEQ ID NO: 24727 - DNA, 20 bp, Homo sapiens
tacagtgtgtgctgctaacc

SEQ ID NO: 24728 - DNA, 17 bp, Homo sapiens
ctggttatggggaaccg

SEQ ID NO: 24729 - DNA, 19 bp, Homo sapiens
cacgcagcctgcaggtctc

SEQ ID NO: 24730 - DNA, 16 bp, Homo sapiens
cccgagccgccagtct

SEQ ID NO: 24731 - DNA, 23 bp, Homo sapiens
atggatcgcccactggtggaagt

SEQ ID NO: 24732 - DNA, 20 bp, Homo sapiens
tgaagctgatgctctttcag

SEQ ID NO: 24733 - DNA, 20 bp, Homo sapiens
atggagtttccccatgttgc

SEQ ID NO: 24734 - DNA, 19 bp, Homo sapiens
tctcagttaacttaccaag

SEQ ID NO: 24735 - DNA, 21 bp, Homo sapiens
caaactggtttataaacctgt

SEQ ID NO: 24736 - DNA, 23 bp, Homo sapiens
agctcttttcaacacttaccgtt

SEQ ID NO: 24737 - DNA, 22 bp, Homo sapiens
agctgcaatttcattataacac

SEQ ID NO: 24738 - DNA, 22 bp, Homo sapiens
gctccaggtgtaaccagtcttg

SEQ ID NO: 24739 - DNA, 23 bp, Homo sapiens
gagacagtcggcacacacacacc

SEQ ID NO: 24740 - DNA, 16 bp, Homo sapiens
gagagctgccctctct

SEQ ID NO: 24741 - DNA, 17 bp, Homo sapiens
acctacgtgctgctgtt

SEQ ID NO: 24742 - DNA, 23 bp, Homo sapiens
gcctctttctgaggaggacgtag

SEQ ID NO: 24743 - DNA, 16 bp, Homo sapiens
caggagaaggaacggt

SEQ ID NO: 24744 - DNA, 22 bp, Homo sapiens
ggtcactctctgtttcagtttc

SEQ ID NO: 24745 - DNA, 24 bp, Homo sapiens
ctctcggaaggttctgtgtgtcca

SEQ ID NO: 24746 - DNA, 18 bp, Homo sapiens
cctgagcatttgctcagc

SEQ ID NO: 24747 - DNA, 19 bp, Homo sapiens
ggtctccaggaaaggctgg

SEQ ID NO: 24748 - DNA, 20 bp, Homo sapiens
gactgaggtcctctgaatgt

SEQ ID NO: 24749 - DNA, 20 bp, Homo sapiens
caatctgaacatgaggaact

SEQ ID NO: 24750 - DNA, 19 bp, Homo sapiens
tttgtgcagctgcttatct

SEQ ID NO: 24751 - DNA, 21 bp, Homo sapiens
ccagcctgacccaggagctgc

SEQ ID NO: 24752 - DNA, 22 bp, Homo sapiens
tttgtacagcagcaatttctta

SEQ ID NO: 24753 - DNA, 18 bp, Homo sapiens
tccgaaagctgcgtaaac

SEQ ID NO: 24754 - DNA, 20 bp, Homo sapiens
tccttcatcccttattttgt

SEQ ID NO: 24755 - DNA, 22 bp, Homo sapiens
cctacctttttaataaggcctg

SEQ ID NO: 24756 - DNA, 16 bp, Homo sapiens
gccatccagttcggaa

SEQ ID NO: 24757 - DNA, 21 bp, Homo sapiens
aacttgcagagagagtaagaa

SEQ ID NO: 24758 - DNA, 24 bp, Homo sapiens
taaaattctggaaggatatatacc

SEQ ID NO: 24759 - DNA, 17 bp, Homo sapiens
cctgtccctgcgctctt

SEQ ID NO: 24760 - DNA, 23 bp, Homo sapiens
gcatgtctgtctcttctaatttt

SEQ ID NO: 24761 - DNA, 18 bp, Homo sapiens
tgggtgagtccaggtctg

SEQ ID NO: 24762 - DNA, 19 bp, Homo sapiens
gacgcgactgtggaagaag

SEQ ID NO: 24763 - DNA, 16 bp, Homo sapiens
cccgagcctgagtgcc

SEQ ID NO: 24764 - DNA, 20 bp, Homo sapiens
cctacaggtcaggaggctgt

SEQ ID NO: 24765 - DNA, 20 bp, Homo sapiens
tgccctggaaaattccagct

SEQ ID NO: 24766 - DNA, 24 bp, Homo sapiens
gacccacatccacctctgggagcg

SEQ ID NO: 24767 - DNA, 16 bp, Homo sapiens
gggccacccttggggg

SEQ ID NO: 24768 - DNA, 18 bp, Homo sapiens
ccagcacatgtggggcac

SEQ ID NO: 24769 - DNA, 16 bp, Homo sapiens
cagtgctcacccggct

SEQ ID NO: 24770 - DNA, 21 bp, Homo sapiens
gcagagcagactgccctcttc

SEQ ID NO: 24771 - DNA, 17 bp, Homo sapiens
caggcagggtccctggg

SEQ ID NO: 24772 - DNA, 23 bp, Homo sapiens
gaagtagcagcctggccctcaga

SEQ ID NO: 24773 - DNA, 24 bp, Homo sapiens
tggattagctgttggagggatgtg

SEQ ID NO: 24774 - DNA, 22 bp, Homo sapiens
acctggtgacggagcagctggc

SEQ ID NO: 24775 - DNA, 20 bp, Homo sapiens
ccagaaagaccactgttttg

SEQ ID NO: 24776 - DNA, 20 bp, Homo sapiens
gtcctcacgaagagggcagc

SEQ ID NO: 24777 - DNA, 21 bp, Homo sapiens
cttcccaacttctgctgcgtc

SEQ ID NO: 24778 - DNA, 17 bp, Homo sapiens
cctgctgacgtctttct

SEQ ID NO: 24779 - DNA, 18 bp, Homo sapiens
gagacgagctcatgagtc

SEQ ID NO: 24780 - DNA, 16 bp, Homo sapiens
ctgctgctcccgtccc

SEQ ID NO: 24781 - DNA, 21 bp, Homo sapiens
ccccaccactcagggagctgc

SEQ ID NO: 24782 - DNA, 22 bp, Homo sapiens
ttttggaggtctttttgcaaag

SEQ ID NO: 24783 - DNA, 21 bp, Homo sapiens
gccatcaggttctgacagaaa

SEQ ID NO: 24784 - DNA, 22 bp, Homo sapiens
catcaacacgccgagactggag

SEQ ID NO: 24785 - DNA, 22 bp, Homo sapiens
tctgatacgacactaactgagc

SEQ ID NO: 24786 - DNA, 23 bp, Homo sapiens
gggctgtcctgggccacaatgag

SEQ ID NO: 24787 - DNA, 23 bp, Homo sapiens
cgtctaatgcctctgcctaatgg

SEQ ID NO: 24788 - DNA, 22 bp, Homo sapiens
ccctaactagtttcttccttcg

SEQ ID NO: 24789 - DNA, 16 bp, Homo sapiens
atgtgttcccgtggct

SEQ ID NO: 24790 - DNA, 16 bp, Homo sapiens
cggagctctctaggcc

SEQ ID NO: 24791 - DNA, 24 bp, Homo sapiens
gatatctcaacgctgctgtcatcc

SEQ ID NO: 24792 - DNA, 16 bp, Homo sapiens
gttcagcacctggctg

SEQ ID NO: 24793 - DNA, 24 bp, Homo sapiens
actgccacctgtgccgatataact

SEQ ID NO: 24794 - DNA, 20 bp, Homo sapiens
cccagccagcgtgatggtga

SEQ ID NO: 24795 - DNA, 24 bp, Homo sapiens
cagcccggggtcaatctttaaact

SEQ ID NO: 24796 - DNA, 17 bp, Homo sapiens
agcccctgggacagctc

SEQ ID NO: 24797 - DNA, 17 bp, Homo sapiens
ggaaaatggcccagcca

SEQ ID NO: 24798 - DNA, 21 bp, Homo sapiens
atctggtttcttccttcttct

SEQ ID NO: 24799 - DNA, 23 bp, Homo sapiens
catgagctcccatccatcctcac

SEQ ID NO: 24800 - DNA, 21 bp, Homo sapiens
atttgactgtgtgaagtttct

SEQ ID NO: 24801 - DNA, 23 bp, Homo sapiens
cagctctcccagtgcagctgtga

SEQ ID NO: 24802 - DNA, 20 bp, Homo sapiens
ctcctcagagactcccagtc

SEQ ID NO: 24803 - DNA, 24 bp, Homo sapiens
tgccctcactcccagggctgcatc

SEQ ID NO: 24804 - DNA, 18 bp, Homo sapiens
tgaagagaagccagaagg

SEQ ID NO: 24805 - DNA, 19 bp, Homo sapiens
cggaccctgtacccaaagc

SEQ ID NO: 24806 - DNA, 23 bp, Homo sapiens
ctgtgatccagagcagataaaat

SEQ ID NO: 24807 - DNA, 20 bp, Homo sapiens
tggtgtagcacaacagacac

SEQ ID NO: 24808 - DNA, 24 bp, Homo sapiens
tagatttggggattgtaatcttga

SEQ ID NO: 24809 - DNA, 18 bp, Homo sapiens
gcccaggaacttaccttc

SEQ ID NO: 24810 - DNA, 23 bp, Homo sapiens
ctcatactgtacacagtatttat

SEQ ID NO: 24811 - DNA, 21 bp, Homo sapiens
agtaggtggagtacagagatg

SEQ ID NO: 24812 - DNA, 21 bp, Homo sapiens
actcccgtgtggcgtttatag

SEQ ID NO: 24813 - DNA, 24 bp, Homo sapiens
caattttggagccaatattttacc

SEQ ID NO: 24814 - DNA, 20 bp, Homo sapiens
aaggactttccttgtcagtc

SEQ ID NO: 24815 - DNA, 23 bp, Homo sapiens
agatccacaattcttcgcattgt

SEQ ID NO: 24816 - DNA, 19 bp, Homo sapiens
acctcgagtggtcagtatg

SEQ ID NO: 24817 - DNA, 19 bp, Homo sapiens
gcatacctcttcagagact

SEQ ID NO: 24818 - DNA, 18 bp, Homo sapiens
tgcagcatattcaggagg

SEQ ID NO: 24819 - DNA, 24 bp, Homo sapiens
ggagctgtgggaagagaagagacc

SEQ ID NO: 24820 - DNA, 20 bp, Homo sapiens
tcaccgtctgtgggaattgc

SEQ ID NO: 24821 - DNA, 19 bp, Homo sapiens
tcacaaactcatggagacg

SEQ ID NO: 24822 - DNA, 21 bp, Homo sapiens
gacttcataatgcatcgtggc

SEQ ID NO: 24823 - DNA, 24 bp, Homo sapiens
gaggaagtgggacacgtagtaagg

SEQ ID NO: 24824 - DNA, 19 bp, Homo sapiens
catcccagtcaccgtcatg

SEQ ID NO: 24825 - DNA, 16 bp, Homo sapiens
ggcaggcatcagagcg

SEQ ID NO: 24826 - DNA, 16 bp, Homo sapiens
agccaagctcttcagg

SEQ ID NO: 24827 - DNA, 23 bp, Homo sapiens
cacatactgcaggcatcagagcg

SEQ ID NO: 24828 - DNA, 22 bp, Homo sapiens
ctcagtcttttctttaaagtcc

SEQ ID NO: 24829 - DNA, 17 bp, Homo sapiens
ccagcctacctggcctc

SEQ ID NO: 24830 - DNA, 21 bp, Homo sapiens
acctttaatgtgtacagagcc

SEQ ID NO: 24831 - DNA, 23 bp, Homo sapiens
acaccatgatggccttttcaaca

SEQ ID NO: 24832 - DNA, 23 bp, Homo sapiens
tttgtcatcagctggggacatta

SEQ ID NO: 24833 - DNA, 16 bp, Homo sapiens
ccagctgcgcccgagg

SEQ ID NO: 24834 - DNA, 20 bp, Homo sapiens
ctcattctgtgtcttccctg

SEQ ID NO: 24835 - DNA, 22 bp, Homo sapiens
actcaagagtcaaaagaaactg

SEQ ID NO: 24836 - DNA, 18 bp, Homo sapiens
gtccctccatgcccactc

SEQ ID NO: 24837 - DNA, 22 bp, Homo sapiens
ggctcaagcaacattacctcag

SEQ ID NO: 24838 - DNA, 18 bp, Homo sapiens
gctccctcctcacagact

SEQ ID NO: 24839 - DNA, 24 bp, Homo sapiens
catgttttctatagaaaccttcag

SEQ ID NO: 24840 - DNA, 21 bp, Homo sapiens
gctgcgctctgctatctatcc

SEQ ID NO: 24841 - DNA, 24 bp, Homo sapiens
agtttctgctgggacaggtgtgag

SEQ ID NO: 24842 - DNA, 24 bp, Homo sapiens
atgttggaagtgaattgtggcctc

SEQ ID NO: 24843 - DNA, 21 bp, Homo sapiens
gtcttggccaatgagatgtag

SEQ ID NO: 24844 - DNA, 22 bp, Homo sapiens
gctttgcatactcataagtctg

SEQ ID NO: 24845 - DNA, 18 bp, Homo sapiens
ggtgggtggagaatgtgc

SEQ ID NO: 24846 - DNA, 19 bp, Homo sapiens
gtgccttttgagtctcccc

SEQ ID NO: 24847 - DNA, 19 bp, Homo sapiens
aggggaagggcctggctga

SEQ ID NO: 24848 - DNA, 16 bp, Homo sapiens
ctaccatggctgcagc

SEQ ID NO: 24849 - DNA, 18 bp, Homo sapiens
gcagtcctcagatgcagc

SEQ ID NO: 24850 - DNA, 20 bp, Homo sapiens
cctggctgtcctgggcttca

SEQ ID NO: 24851 - DNA, 20 bp, Homo sapiens
agcttctcacctgcaggtac

SEQ ID NO: 24852 - DNA, 17 bp, Homo sapiens
tgtcctgggcttcacgc

SEQ ID NO: 24853 - DNA, 24 bp, Homo sapiens
caggaagaccagggccttcttgct

SEQ ID NO: 24854 - DNA, 19 bp, Homo sapiens
ctaggtgggcttcacactc

SEQ ID NO: 24855 - DNA, 23 bp, Homo sapiens
gttcctgtcatatgcagactggt

SEQ ID NO: 24856 - DNA, 16 bp, Homo sapiens
cactcggcaaagctga

SEQ ID NO: 24857 - DNA, 22 bp, Homo sapiens
gacagcatggtcactgcgttcc

SEQ ID NO: 24858 - DNA, 16 bp, Homo sapiens
gggacagcatggtccc

SEQ ID NO: 24859 - DNA, 23 bp, Homo sapiens
tggttcttaactagactgggtgg

SEQ ID NO: 24860 - DNA, 20 bp, Homo sapiens
caggtcacttaccttgaacc

SEQ ID NO: 24861 - DNA, 22 bp, Homo sapiens
agcataactcacgtcatgttcc

SEQ ID NO: 24862 - DNA, 16 bp, Homo sapiens
tgcctggcgcacaacc

SEQ ID NO: 24863 - DNA, 23 bp, Homo sapiens
gtgtagtcttttaaaacttggtg

SEQ ID NO: 24864 - DNA, 19 bp, Homo sapiens
aatgcctgggccatcaaac

SEQ ID NO: 24865 - DNA, 22 bp, Homo sapiens
ctggttgtctgctttccagaag

SEQ ID NO: 24866 - DNA, 17 bp, Homo sapiens
gttccgggcaggtaggg

SEQ ID NO: 24867 - DNA, 22 bp, Homo sapiens
catttgcaagaagttctggaaa

SEQ ID NO: 24868 - DNA, 18 bp, Homo sapiens
cacccccctacacacact

SEQ ID NO: 24869 - DNA, 20 bp, Homo sapiens
gcggatgcttttatttcagc

SEQ ID NO: 24870 - DNA, 21 bp, Homo sapiens
cttcaagcagctgctgcgctt

SEQ ID NO: 24871 - DNA, 16 bp, Homo sapiens
aggaaggtgaggggtc

SEQ ID NO: 24872 - DNA, 24 bp, Homo sapiens
agagcactctctgccagtgaacct

SEQ ID NO: 24873 - DNA, 22 bp, Homo sapiens
ctgtcacagctccatgtgttac

SEQ ID NO: 24874 - DNA, 24 bp, Homo sapiens
ctctgcactcagcatcacaaagag

SEQ ID NO: 24875 - DNA, 16 bp, Homo sapiens
caccctctgctcacct

SEQ ID NO: 24876 - DNA, 18 bp, Homo sapiens
accagacatccctgaacc

SEQ ID NO: 24877 - DNA, 23 bp, Homo sapiens
tttttgtctgtttctccccctgc

SEQ ID NO: 24878 - DNA, 20 bp, Homo sapiens
taggcagatcttaatccccc

SEQ ID NO: 24879 - DNA, 16 bp, Homo sapiens
tgtggggctggtcctt

SEQ ID NO: 24880 - DNA, 17 bp, Homo sapiens
cctgcggtacagtgagg

SEQ ID NO: 24881 - DNA, 23 bp, Homo sapiens
tctttgtcttgtatctttctttc

SEQ ID NO: 24882 - DNA, 23 bp, Homo sapiens
ctgcatctgaacagcatcagatg

SEQ ID NO: 24883 - DNA, 20 bp, Homo sapiens
tcacagccctgtgctgaaag

SEQ ID NO: 24884 - DNA, 24 bp, Homo sapiens
gcatctgaggacccagtctctggt

SEQ ID NO: 24885 - DNA, 22 bp, Homo sapiens
gcagtgtaatttccacagatcc

SEQ ID NO: 24886 - DNA, 20 bp, Homo sapiens
ccagtcagcgttaccaaggc

SEQ ID NO: 24887 - DNA, 19 bp, Homo sapiens
ctgacccctctttctgctg

SEQ ID NO: 24888 - DNA, 16 bp, Homo sapiens
ccacactgggcctacc

SEQ ID NO: 24889 - DNA, 17 bp, Homo sapiens
agccacagtttgtgctg

SEQ ID NO: 24890 - DNA, 22 bp, Homo sapiens
cagggtatgactgaagaacctc

SEQ ID NO: 24891 - DNA, 20 bp, Homo sapiens
tctgtggttatagtggcctg

SEQ ID NO: 24892 - DNA, 23 bp, Homo sapiens
tccactgaacactccgaacctgc

SEQ ID NO: 24893 - DNA, 19 bp, Homo sapiens
caggatactgcagtgggcg

SEQ ID NO: 24894 - DNA, 17 bp, Homo sapiens
cctgagtgtgcagcagg

SEQ ID NO: 24895 - DNA, 22 bp, Homo sapiens
cagagcgttccccgggctttcc

SEQ ID NO: 24896 - DNA, 21 bp, Homo sapiens
tggagtacaggaggagtcctc

SEQ ID NO: 24897 - DNA, 21 bp, Homo sapiens
cagaggaagtgtgctcaggag

SEQ ID NO: 24898 - DNA, 21 bp, Homo sapiens
acatctgttttctgttcctgg

SEQ ID NO: 24899 - DNA, 24 bp, Homo sapiens
gctctttaatttggcagacacctc

SEQ ID NO: 24900 - DNA, 19 bp, Homo sapiens
tgaagtggatctgttgtct

SEQ ID NO: 24901 - DNA, 21 bp, Homo sapiens
agcacctcacgatcttgtgag

SEQ ID NO: 24902 - DNA, 23 bp, Homo sapiens
tgtgttttgattaaggcctacag

SEQ ID NO: 24903 - DNA, 18 bp, Homo sapiens
tgcagagaatgctgattt

SEQ ID NO: 24904 - DNA, 20 bp, Homo sapiens
agggcattccagtaccagga

SEQ ID NO: 24905 - DNA, 24 bp, Homo sapiens
tcacacaaattacagaagattacc

SEQ ID NO: 24906 - DNA, 24 bp, Homo sapiens
caaatggaaaggcagaaaactgat

SEQ ID NO: 24907 - DNA, 21 bp, Homo sapiens
gaagtgccgtttctttacttt

SEQ ID NO: 24908 - DNA, 22 bp, Homo sapiens
cagtgcaattaacttacaaatc

SEQ ID NO: 24909 - DNA, 18 bp, Homo sapiens
ggagcctgaaaaaatgcc

SEQ ID NO: 24910 - DNA, 20 bp, Homo sapiens
acaagtatcacatgtacccc

SEQ ID NO: 24911 - DNA, 23 bp, Homo sapiens
tttcagattttgttcaaatgttt

SEQ ID NO: 24912 - DNA, 24 bp, Homo sapiens
cacgtaaatacatttcaacacttg

SEQ ID NO: 24913 - DNA, 17 bp, Homo sapiens
ttcacagttgcttggag

SEQ ID NO: 24914 - DNA, 24 bp, Homo sapiens
cacttgacttttcctcctacctgc

SEQ ID NO: 24915 - DNA, 16 bp, Homo sapiens
tcctggtgggcccaag

SEQ ID NO: 24916 - DNA, 24 bp, Homo sapiens
agtttttctgaaatcccctcaaaa

SEQ ID NO: 24917 - DNA, 18 bp, Homo sapiens
ggccatgctttctggtgc

SEQ ID NO: 24918 - DNA, 19 bp, Homo sapiens
gactgggagtctgtcatgc

SEQ ID NO: 24919 - DNA, 21 bp, Homo sapiens
gctcttcaggaatctgtgctg

SEQ ID NO: 24920 - DNA, 20 bp, Homo sapiens
ctcgcagagctcttgagagc

SEQ ID NO: 24921 - DNA, 21 bp, Homo sapiens
cgtctgcctctgtgtgtgtct

SEQ ID NO: 24922 - DNA, 22 bp, Homo sapiens
ccgcatcttgtcatgaacgcac

SEQ ID NO: 24923 - DNA, 16 bp, Homo sapiens
ttgggacatatggctc

SEQ ID NO: 24924 - DNA, 22 bp, Homo sapiens
gcaggatgcttccatctgttca

SEQ ID NO: 24925 - DNA, 16 bp, Homo sapiens
gactgattgcgccact

SEQ ID NO: 24926 - DNA, 21 bp, Homo sapiens
ttgtgagcctgcaagagctgc

SEQ ID NO: 24927 - DNA, 24 bp, Homo sapiens
tatgcaatgcaatctagtctagta

SEQ ID NO: 24928 - DNA, 22 bp, Homo sapiens
tttgttttgtttttcagagttc

SEQ ID NO: 24929 - DNA, 27 bp, Homo sapiens
tgggctttgaaatataatttatactag

SEQ ID NO: 24930 - DNA, 23 bp, Homo sapiens
aatgcattcataaaggactcaga

SEQ ID NO: 24931 - DNA, 21 bp, Homo sapiens
ttagcacgctacctttccagc

SEQ ID NO: 24932 - DNA, 22 bp, Homo sapiens
tttttgcttgaggttaattttc

SEQ ID NO: 24933 - DNA, 23 bp, Homo sapiens
atgccacaccgcttcaagcaaca

SEQ ID NO: 24934 - DNA, 24 bp, Homo sapiens
tctgtcaagaattatggaaaatac

SEQ ID NO: 24935 - DNA, 22 bp, Homo sapiens
aaaccctttttcatccactctc

SEQ ID NO: 24936 - DNA, 22 bp, Homo sapiens
cctgttagagtttgctcagtat

SEQ ID NO: 24937 - DNA, 18 bp, Homo sapiens
actctgttgcctccatcc

SEQ ID NO: 24938 - DNA, 24 bp, Homo sapiens
agtattgtttcaggtaatttgttt

SEQ ID NO: 24939 - DNA, 22 bp, Homo sapiens
tgcaatctcaaatttacctgta

SEQ ID NO: 24940 - DNA, 16 bp, Homo sapiens
acctgcccgttgttac

SEQ ID NO: 24941 - DNA, 24 bp, Homo sapiens
ggagaacatactgtgtgccaataa

SEQ ID NO: 24942 - DNA, 19 bp, Homo sapiens
gaccagtcaccctgtgctg

SEQ ID NO: 24943 - DNA, 24 bp, Homo sapiens
ctgaaaagagagattacatttttt

SEQ ID NO: 24944 - DNA, 19 bp, Homo sapiens
gggtattctctcagccggg

SEQ ID NO: 24945 - DNA, 24 bp, Homo sapiens
tttcccaaccagcttaaaagtaac

SEQ ID NO: 24946 - DNA, 22 bp, Homo sapiens
ggttttgttttgtgtttaaggc

SEQ ID NO: 24947 - DNA, 20 bp, Homo sapiens
actctctgctccacagtcag

SEQ ID NO: 24948 - DNA, 23 bp, Homo sapiens
taaggcattttaaacagcaagtc

SEQ ID NO: 24949 - DNA, 23 bp, Homo sapiens
tgtcccacgctagaggcaaccat

SEQ ID NO: 24950 - DNA, 18 bp, Homo sapiens
tttgcatctattctcccc

SEQ ID NO: 24951 - DNA, 17 bp, Homo sapiens
tcctgcaaagcagagcc

SEQ ID NO: 24952 - DNA, 23 bp, Homo sapiens
atcattctagttcatttataggt

SEQ ID NO: 24953 - DNA, 24 bp, Homo sapiens
caaacatcccatagaatttgcgac

SEQ ID NO: 24954 - DNA, 24 bp, Homo sapiens
ccactgtgtaaaaaattgtctctc

SEQ ID NO: 24955 - DNA, 20 bp, Homo sapiens
tctacttaatttagcaaact

SEQ ID NO: 24956 - DNA, 23 bp, Homo sapiens
ggcctggagcttgaattttttaa

SEQ ID NO: 24957 - DNA, 24 bp, Homo sapiens
agagaaaatgaagctataacttac

SEQ ID NO: 24958 - DNA, 18 bp, Homo sapiens
atctcggcctcccaaagt

SEQ ID NO: 24959 - DNA, 23 bp, Homo sapiens
aactgtcacagtcaatcactttg

SEQ ID NO: 24960 - DNA, 22 bp, Homo sapiens
ttagtagagacagggtttcact

SEQ ID NO: 24961 - DNA, 24 bp, Homo sapiens
atcaggacctgaatgcccttttgc

SEQ ID NO: 24962 - DNA, 16 bp, Homo sapiens
gcgaccctcccctctg

SEQ ID NO: 24963 - DNA, 21 bp, Homo sapiens
tcctgaaagggcacagaaatt

SEQ ID NO: 24964 - DNA, 24 bp, Homo sapiens
gttttcttaggaaagctgtgcggt

SEQ ID NO: 24965 - DNA, 21 bp, Homo sapiens
tgatggtttcgaaccgacttc

SEQ ID NO: 24966 - DNA, 24 bp, Homo sapiens
agacggacaccagcttcctcttac

SEQ ID NO: 24967 - DNA, 18 bp, Homo sapiens
tttctccgcggcgtccac

SEQ ID NO: 24968 - DNA, 21 bp, Homo sapiens
cgcacagctgattcctttaat

SEQ ID NO: 24969 - DNA, 21 bp, Homo sapiens
ttagtttcccgagacctgcgc

SEQ ID NO: 24970 - DNA, 17 bp, Homo sapiens
ctgggccgagctgctgg

SEQ ID NO: 24971 - DNA, 16 bp, Homo sapiens
cccaccccgcacagcc

SEQ ID NO: 24972 - DNA, 18 bp, Homo sapiens
ccatgtccgactcgtggg

SEQ ID NO: 24973 - DNA, 18 bp, Homo sapiens
gggaagggatcggggaac

SEQ ID NO: 24974 - DNA, 16 bp, Homo sapiens
aggcagcgcgggctcg

SEQ ID NO: 24975 - DNA, 24 bp, Homo sapiens
cccgcggcctgccgcgcccaccta

SEQ ID NO: 24976 - DNA, 18 bp, Homo sapiens
gaggggcgtggcctggcc

SEQ ID NO: 24977 - DNA, 16 bp, Homo sapiens
gcccgaggcggagttc

SEQ ID NO: 24978 - DNA, 19 bp, Homo sapiens
tcagcaatgtgacaagaag

SEQ ID NO: 24979 - DNA, 20 bp, Homo sapiens
actccactcaagggaattct

SEQ ID NO: 24980 - DNA, 17 bp, Homo sapiens
tccggttagctcattcc

SEQ ID NO: 24981 - DNA, 24 bp, Homo sapiens
ctttcttaagaaaatcgaatttcc

SEQ ID NO: 24982 - DNA, 16 bp, Homo sapiens
ctccagccctgttctc

SEQ ID NO: 24983 - DNA, 22 bp, Homo sapiens
aaaaactacttggtgaaatgac

SEQ ID NO: 24984 - DNA, 22 bp, Homo sapiens
caggtcacagtcaatatatctg

SEQ ID NO: 24985 - DNA, 19 bp, Homo sapiens
tctttggaggaacccatgg

SEQ ID NO: 24986 - DNA, 22 bp, Homo sapiens
catacatatacaatacaaagca

SEQ ID NO: 24987 - DNA, 22 bp, Homo sapiens
ctagagaatggcgctgagattc

SEQ ID NO: 24988 - DNA, 22 bp, Homo sapiens
catctgcatatacatatatgtg

SEQ ID NO: 24989 - DNA, 24 bp, Homo sapiens
ccccagagcagtgaagaagtgtac

SEQ ID NO: 24990 - DNA, 24 bp, Homo sapiens
gtataattaaaagtgaaagtgatc

SEQ ID NO: 24991 - DNA, 24 bp, Homo sapiens
aaatcttctgacatttttttgctg

SEQ ID NO: 24992 - DNA, 22 bp, Homo sapiens
acatttcaggtaagtttttact

SEQ ID NO: 24993 - DNA, 20 bp, Homo sapiens
tcactgtcttttggaccaaa

SEQ ID NO: 24994 - DNA, 22 bp, Homo sapiens
tggttctttttacactgtgttc

SEQ ID NO: 24995 - DNA, 19 bp, Homo sapiens
ccccatgttagaggtggtg

SEQ ID NO: 24996 - DNA, 24 bp, Homo sapiens
tgttcatctttttctttctgctta

SEQ ID NO: 24997 - DNA, 23 bp, Homo sapiens
accttaatgtaatgaaacatctg

SEQ ID NO: 24998 - DNA, 22 bp, Homo sapiens
agaagggctcaagaaataaatc

SEQ ID NO: 24999 - DNA, 27 bp, Homo sapiens
catccataattgacttaaaagtacaag

SEQ ID NO: 25000 - DNA, 20 bp, Homo sapiens
ttttgaccttcacaacacca

SEQ ID NO: 25001 - DNA, 18 bp, Homo sapiens
aaaccccatttctcttgc

SEQ ID NO: 25002 - DNA, 24 bp, Homo sapiens
ggattccaggaataactttttaat

SEQ ID NO: 25003 - DNA, 24 bp, Homo sapiens
gctataataccattgggttttaaa

SEQ ID NO: 25004 - DNA, 19 bp, Homo sapiens
ggtcgcatatttgagggaa

SEQ ID NO: 25005 - DNA, 23 bp, Homo sapiens
aagtaaaacgtattgaaggtatt

SEQ ID NO: 25006 - DNA, 19 bp, Homo sapiens
attgagttatgacagtggg

SEQ ID NO: 25007 - DNA, 24 bp, Homo sapiens
ttttacctaagaaagacgtttttg

SEQ ID NO: 25008 - DNA, 23 bp, Homo sapiens
caagactctgtctcaaaaataaa

SEQ ID NO: 25009 - DNA, 24 bp, Homo sapiens
tgtctcaaatattttccatgatgc

SEQ ID NO: 25010 - DNA, 26 bp, Homo sapiens
gtttaatcatttttctcatttgatcc

SEQ ID NO: 25011 - DNA, 26 bp, Homo sapiens
cataattctaaatcttgatacattaa

SEQ ID NO: 25012 - DNA, 22 bp, Homo sapiens
ataacgttaccttcattattac

SEQ ID NO: 25013 - DNA, 22 bp, Homo sapiens
taaatgtgactatctctccttc

SEQ ID NO: 25014 - DNA, 16 bp, Homo sapiens
gcaaatctgacccagg

SEQ ID NO: 25015 - DNA, 21 bp, Homo sapiens
ttctgagagctgatatcttgg

SEQ ID NO: 25016 - DNA, 17 bp, Homo sapiens
ggccattggggaatagc

SEQ ID NO: 25017 - DNA, 20 bp, Homo sapiens
gcatgagccaccacacccgg

SEQ ID NO: 25018 - DNA, 23 bp, Homo sapiens
ggtacagcattattattttcaac

SEQ ID NO: 25019 - DNA, 20 bp, Homo sapiens
aggaaaagaatttcctccct

SEQ ID NO: 25020 - DNA, 16 bp, Homo sapiens
atgggcgaatgtacgc

SEQ ID NO: 25021 - DNA, 17 bp, Homo sapiens
ccccgggatgaaaatgg

SEQ ID NO: 25022 - DNA, 18 bp, Homo sapiens
tttattgagcgacagtcc

SEQ ID NO: 25023 - DNA, 18 bp, Homo sapiens
gtggtttccagtcttgat

SEQ ID NO: 25024 - DNA, 21 bp, Homo sapiens
gcctgcatctcaatgcctcgc

SEQ ID NO: 25025 - DNA, 16 bp, Homo sapiens
ccgcccagtgggatcg

SEQ ID NO: 25026 - DNA, 24 bp, Homo sapiens
ttgttagttgtctagagtctgaca

SEQ ID NO: 25027 - DNA, 19 bp, Homo sapiens
aaagcttctttcttttcgt

SEQ ID NO: 25028 - DNA, 22 bp, Homo sapiens
ttgattgtttcctgagaggatc

SEQ ID NO: 25029 - DNA, 19 bp, Homo sapiens
ttctaatgtaaacagcagc

SEQ ID NO: 25030 - DNA, 23 bp, Homo sapiens
tttaactcttgatgggaagacga

SEQ ID NO: 25031 - DNA, 20 bp, Homo sapiens
taaggagcttacagactagc

SEQ ID NO: 25032 - DNA, 21 bp, Homo sapiens
ttgtgaatgaggccgcatatt

SEQ ID NO: 25033 - DNA, 19 bp, Homo sapiens
gaataaggcactgtgctag

SEQ ID NO: 25034 - DNA, 21 bp, Homo sapiens
cgctcaatgcaaaaagtattc

SEQ ID NO: 25035 - DNA, 20 bp, Homo sapiens
aaaaatagtcagccaattcc

SEQ ID NO: 25036 - DNA, 23 bp, Homo sapiens
ctgtcaggtggcagtcctttatg

SEQ ID NO: 25037 - DNA, 20 bp, Homo sapiens
aaagttgacgtgtcatttct

SEQ ID NO: 25038 - DNA, 23 bp, Homo sapiens
ggagctgagctgattcaacattc

SEQ ID NO: 25039 - DNA, 18 bp, Homo sapiens
ccttggcaacaaacagat

SEQ ID NO: 25040 - DNA, 20 bp, Homo sapiens
tcgagaaacatgataaggaa

SEQ ID NO: 25041 - DNA, 18 bp, Homo sapiens
caccccagtggccacatg

SEQ ID NO: 25042 - DNA, 22 bp, Homo sapiens
aacagtgaggctgacgcttgac

SEQ ID NO: 25043 - DNA, 24 bp, Homo sapiens
tgtgtttgcagtcccatcacagaa

SEQ ID NO: 25044 - DNA, 17 bp, Homo sapiens
ttaccgcagggtgaggc

SEQ ID NO: 25045 - DNA, 16 bp, Homo sapiens
ttcggcccagttttct

SEQ ID NO: 25046 - DNA, 16 bp, Homo sapiens
tcagccctgacccagc

SEQ ID NO: 25047 - DNA, 21 bp, Homo sapiens
tgatttgggtccttccagagt

SEQ ID NO: 25048 - DNA, 22 bp, Homo sapiens
ggcttgtcttacaggtaagagg

SEQ ID NO: 25049 - DNA, 24 bp, Homo sapiens
ctggagaacggcagctcgaccaac

SEQ ID NO: 25050 - DNA, 20 bp, Homo sapiens
agggttgcatttaatggtgg

SEQ ID NO: 25051 - DNA, 20 bp, Homo sapiens
ggctacccatcagggtggag

SEQ ID NO: 25052 - DNA, 23 bp, Homo sapiens
tacttcatcggggagctcaagga

SEQ ID NO: 25053 - DNA, 22 bp, Homo sapiens
ggccagatgtgaaatccagagg

SEQ ID NO: 25054 - DNA, 20 bp, Homo sapiens
aatgtgttctgttacctagc

SEQ ID NO: 25055 - DNA, 23 bp, Homo sapiens
aattagactcttgtcctccacag

SEQ ID NO: 25056 - DNA, 20 bp, Homo sapiens
tttctaggttgatggaacag

SEQ ID NO: 25057 - DNA, 23 bp, Homo sapiens
atcacatttcgttccaaaaatat

SEQ ID NO: 25058 - DNA, 19 bp, Homo sapiens
agtttgtcactccaggagg

SEQ ID NO: 25059 - DNA, 21 bp, Homo sapiens
taagctcttggaaggtgaggc

SEQ ID NO: 25060 - DNA, 22 bp, Homo sapiens
gatttccatgtagataaacagt

SEQ ID NO: 25061 - DNA, 24 bp, Homo sapiens
gtgttgcatagagctagatgccag

SEQ ID NO: 25062 - DNA, 16 bp, Homo sapiens
cttgtcacgtgaggcc

SEQ ID NO: 25063 - DNA, 24 bp, Homo sapiens
agtcttcctaacaggttgtggtgc

SEQ ID NO: 25064 - DNA, 17 bp, Homo sapiens
ccgggatgagctgaggc

SEQ ID NO: 25065 - DNA, 24 bp, Homo sapiens
atctcaaaatgttggacaacttac

SEQ ID NO: 25066 - DNA, 23 bp, Homo sapiens
ttatgatgctaatggcgctgctg

SEQ ID NO: 25067 - DNA, 16 bp, Homo sapiens
ctggcctcagggtgtg

SEQ ID NO: 25068 - DNA, 19 bp, Homo sapiens
agggtagaaggagatggac

SEQ ID NO: 25069 - DNA, 22 bp, Homo sapiens
gtgggagtctccttcagaagcc

SEQ ID NO: 25070 - DNA, 17 bp, Homo sapiens
gagcctgcacatacggc

SEQ ID NO: 25071 - DNA, 24 bp, Homo sapiens
gcccgaggatacgctttcttgtga

SEQ ID NO: 25072 - DNA, 22 bp, Homo sapiens
gaggggacgttggaggctgcgc

SEQ ID NO: 25073 - DNA, 24 bp, Homo sapiens
attggctggatctactttgtggcc

SEQ ID NO: 25074 - DNA, 23 bp, Homo sapiens
ccaggctctccgagccttcgcac

SEQ ID NO: 25075 - DNA, 19 bp, Homo sapiens
gagccacgaagtcgaagct

SEQ ID NO: 25076 - DNA, 17 bp, Homo sapiens
cccccgccagtcctcac

SEQ ID NO: 25077 - DNA, 24 bp, Homo sapiens
tgatgtagggcacccagaggaggc

SEQ ID NO: 25078 - DNA, 17 bp, Homo sapiens
gccctgtccctccaccc

SEQ ID NO: 25079 - DNA, 16 bp, Homo sapiens
gccaccacgccatgtg

SEQ ID NO: 25080 - DNA, 23 bp, Homo sapiens
caccccctgcagtgtcattggtc

SEQ ID NO: 25081 - DNA, 21 bp, Homo sapiens
ggtatttgaggagaaactgct

SEQ ID NO: 25082 - DNA, 24 bp, Homo sapiens
gcctacagtgtattcaacatcggc

SEQ ID NO: 25083 - DNA, 24 bp, Homo sapiens
agcgtgaggacaaccgcgtgcagg

SEQ ID NO: 25084 - DNA, 23 bp, Homo sapiens
cttgcctgccctacatctctgcc

SEQ ID NO: 25085 - DNA, 17 bp, Homo sapiens
ggccagggctggtctca

SEQ ID NO: 25086 - DNA, 17 bp, Homo sapiens
caccaaacaggagcagt

SEQ ID NO: 25087 - DNA, 20 bp, Homo sapiens
gctctgccgtgtcttctgtc

SEQ ID NO: 25088 - DNA, 24 bp, Homo sapiens
gaacagcaacgacgtcttcttcag

SEQ ID NO: 25089 - DNA, 17 bp, Homo sapiens
tgtcttctatgcccagc

SEQ ID NO: 25090 - DNA, 17 bp, Homo sapiens
ccccaccttgcaggggc

SEQ ID NO: 25091 - DNA, 19 bp, Homo sapiens
tgacaaatgcgaagagcca

SEQ ID NO: 25092 - DNA, 24 bp, Homo sapiens
ccctctctaagcccgccctatccg

SEQ ID NO: 25093 - DNA, 18 bp, Homo sapiens
gagaagcagaagagaaac

SEQ ID NO: 25094 - DNA, 20 bp, Homo sapiens
catctctgccctcctctcgc

SEQ ID NO: 25095 - DNA, 24 bp, Homo sapiens
tgtgaacagggccctggaggtacc

SEQ ID NO: 25096 - DNA, 16 bp, Homo sapiens
cttcctggtgctcgcg

SEQ ID NO: 25097 - DNA, 20 bp, Homo sapiens
ctgccccaccggagcagggc

SEQ ID NO: 25098 - DNA, 17 bp, Homo sapiens
acgtggctgcagtttct

SEQ ID NO: 25099 - DNA, 16 bp, Homo sapiens
tgggctcccgggctcc

SEQ ID NO: 25100 - DNA, 24 bp, Homo sapiens
cgctggtcaagtattttccacagg

SEQ ID NO: 25101 - DNA, 20 bp, Homo sapiens
tgtcatagcccaaaggtcac

SEQ ID NO: 25102 - DNA, 18 bp, Homo sapiens
gtgaagtccaggagcacg

SEQ ID NO: 25103 - DNA, 19 bp, Homo sapiens
gcttttgtttggaggggca

SEQ ID NO: 25104 - DNA, 20 bp, Homo sapiens
ctggctgactcaccgttgtt

SEQ ID NO: 25105 - DNA, 17 bp, Homo sapiens
cgtctgtctgtccgtct

SEQ ID NO: 25106 - DNA, 18 bp, Homo sapiens
gtcccgggaaggctggcc

SEQ ID NO: 25107 - DNA, 20 bp, Homo sapiens
tgagggctggagcattggca

SEQ ID NO: 25108 - DNA, 16 bp, Homo sapiens
ggtctctccttggggg

SEQ ID NO: 25109 - DNA, 21 bp, Homo sapiens
agatgttcctccagtcctaca

SEQ ID NO: 25110 - DNA, 19 bp, Homo sapiens
ggatccaagccaatccagc

SEQ ID NO: 25111 - DNA, 19 bp, Homo sapiens
gaagaccccgagtccaaac

SEQ ID NO: 25112 - DNA, 22 bp, Homo sapiens
ctggaggctttgtggttttctg

SEQ ID NO: 25113 - DNA, 23 bp, Homo sapiens
ccccggtctctttctgtacaaac

SEQ ID NO: 25114 - DNA, 23 bp, Homo sapiens
ctcaggagctgccaacctaacac

SEQ ID NO: 25115 - DNA, 16 bp, Homo sapiens
gccagaggctgggtac

SEQ ID NO: 25116 - DNA, 20 bp, Homo sapiens
ctgatcttcggagacccaac

SEQ ID NO: 25117 - DNA, 16 bp, Homo sapiens
gtgccagggcccaacc

SEQ ID NO: 25118 - DNA, 24 bp, Homo sapiens
gtcttcttcatccagcacttctgt

SEQ ID NO: 25119 - DNA, 16 bp, Homo sapiens
gaatggcctctggccc

SEQ ID NO: 25120 - DNA, 16 bp, Homo sapiens
gctgccagagcctgtg

SEQ ID NO: 25121 - DNA, 20 bp, Homo sapiens
cagaggagaccactctgctc

SEQ ID NO: 25122 - DNA, 18 bp, Homo sapiens
ggtagtttggggcaaggc

SEQ ID NO: 25123 - DNA, 16 bp, Homo sapiens
cctgggcctccccggc

SEQ ID NO: 25124 - DNA, 20 bp, Homo sapiens
caaagtgcccttggctcacc

SEQ ID NO: 25125 - DNA, 23 bp, Homo sapiens
ctcttttctttaaggcttcaggc

SEQ ID NO: 25126 - DNA, 18 bp, Homo sapiens
acctctgagttcactggc

SEQ ID NO: 25127 - DNA, 17 bp, Homo sapiens
agcttgcagccgaaggc

SEQ ID NO: 25128 - DNA, 20 bp, Homo sapiens
gtggccttcagagaaagagc

SEQ ID NO: 25129 - DNA, 16 bp, Homo sapiens
ccgcggccaggccccc

SEQ ID NO: 25130 - DNA, 24 bp, Homo sapiens
atcttacttctgatgctgccactc

SEQ ID NO: 25131 - DNA, 18 bp, Homo sapiens
gtgagaacccacggaggg

SEQ ID NO: 25132 - DNA, 18 bp, Homo sapiens
caaactcataccctcccc

SEQ ID NO: 25133 - DNA, 22 bp, Homo sapiens
ttcccctctcacccctcccccc

SEQ ID NO: 25134 - DNA, 24 bp, Homo sapiens
tcactatacagagacagtccatgt

SEQ ID NO: 25135 - DNA, 17 bp, Homo sapiens
ggggtgggggggttgga

SEQ ID NO: 25136 - DNA, 19 bp, Homo sapiens
tcaggggcctctgtgcttc

SEQ ID NO: 25137 - DNA, 19 bp, Homo sapiens
gaaggggagagaggaggag

SEQ ID NO: 25138 - DNA, 21 bp, Homo sapiens
aaatgaaatccagcctcatcg

SEQ ID NO: 25139 - DNA, 21 bp, Homo sapiens
agaatggggggggtgccttgg

SEQ ID NO: 25140 - DNA, 20 bp, Homo sapiens
tattcaaataaccgtgggtg

SEQ ID NO: 25141 - DNA, 20 bp, Homo sapiens
aaggagatagaagcagaagc

SEQ ID NO: 25142 - DNA, 22 bp, Homo sapiens
ttgcctccttcagctcctccct

SEQ ID NO: 25143 - DNA, 18 bp, Homo sapiens
cagcgatgacagcaaaga

SEQ ID NO: 25144 - DNA, 17 bp, Homo sapiens
gagccgcctgcatctcc

SEQ ID NO: 25145 - DNA, 24 bp, Homo sapiens
actacagctcccagcatgccccgg

SEQ ID NO: 25146 - DNA, 24 bp, Homo sapiens
ctcttgtcacacacagaccttccg

SEQ ID NO: 25147 - DNA, 19 bp, Homo sapiens
gtcagggttaggggcgcca

SEQ ID NO: 25148 - DNA, 18 bp, Homo sapiens
ggagtgggggttcagtgc

SEQ ID NO: 25149 - DNA, 18 bp, Homo sapiens
cggcgcccggagagattc

SEQ ID NO: 25150 - DNA, 16 bp, Homo sapiens
gccgggcagggccggg

SEQ ID NO: 25151 - DNA, 18 bp, Homo sapiens
cagctgctgaggctcggg

SEQ ID NO: 25152 - DNA, 18 bp, Homo sapiens
gctcccacacccccttgc

SEQ ID NO: 25153 - DNA, 16 bp, Homo sapiens
ccctgggcaccgggcc

SEQ ID NO: 25154 - DNA, 16 bp, Homo sapiens
ggtacctggcaccaag

SEQ ID NO: 25155 - DNA, 24 bp, Homo sapiens
acggcgctcctggggcagccccgg

SEQ ID NO: 25156 - DNA, 17 bp, Homo sapiens
tttcgccctagggcacc

SEQ ID NO: 25157 - DNA, 17 bp, Homo sapiens
cttgtccagagccagct

SEQ ID NO: 25158 - DNA, 20 bp, Homo sapiens
gaaagggcaagccagggtgc

SEQ ID NO: 25159 - DNA, 16 bp, Homo sapiens
tacctaccgccttggc

SEQ ID NO: 25160 - DNA, 17 bp, Homo sapiens
cctccccgcgcggctct

SEQ ID NO: 25161 - DNA, 24 bp, Homo sapiens
ggcagagagaggcaaatttcaggg

SEQ ID NO: 25162 - DNA, 24 bp, Homo sapiens
gaacttgctaaccgtctcttttcc

SEQ ID NO: 25163 - DNA, 21 bp, Homo sapiens
acctgatctgtggtgagctgg

SEQ ID NO: 25164 - DNA, 24 bp, Homo sapiens
ctgacgctctgaccaggaaaaaac

SEQ ID NO: 25165 - DNA, 18 bp, Homo sapiens
aaccaccctggccccacc

SEQ ID NO: 25166 - DNA, 16 bp, Homo sapiens
cagacccaaccagagc

SEQ ID NO: 25167 - DNA, 19 bp, Homo sapiens
gctcttcgttgagcactgc

SEQ ID NO: 25168 - DNA, 23 bp, Homo sapiens
ttgctgtgggaatgttcaaaggc

SEQ ID NO: 25169 - DNA, 22 bp, Homo sapiens
cattccttacctcgaagaaacg

SEQ ID NO: 25170 - DNA, 24 bp, Homo sapiens
ggtaagggaagggataatcagagc

SEQ ID NO: 25171 - DNA, 24 bp, Homo sapiens
tccaggctccttttgagcttaaca

SEQ ID NO: 25172 - DNA, 23 bp, Homo sapiens
ggcctgaccagcctgtcccccac

SEQ ID NO: 25173 - DNA, 21 bp, Homo sapiens
tctccagagcgtcattcttgg

SEQ ID NO: 25174 - DNA, 24 bp, Homo sapiens
ttaaagagctggtggagcctgtgt

SEQ ID NO: 25175 - DNA, 18 bp, Homo sapiens
acttgcagaccaaaggcc

SEQ ID NO: 25176 - DNA, 19 bp, Homo sapiens
ctggtgaggtgtttggaga

SEQ ID NO: 25177 - DNA, 19 bp, Homo sapiens
gcgatagggcgccctcacc

SEQ ID NO: 25178 - DNA, 21 bp, Homo sapiens
tccccaggaagtgaacgatcc

SEQ ID NO: 25179 - DNA, 24 bp, Homo sapiens
tagtctctaggtctatggcaaaag

SEQ ID NO: 25180 - DNA, 23 bp, Homo sapiens
cacttggcagggcctcaaggagc

SEQ ID NO: 25181 - DNA, 20 bp, Homo sapiens
gttaacatccatcccacagg

SEQ ID NO: 25182 - DNA, 20 bp, Homo sapiens
gtgtgggcctttgcaacacc

SEQ ID NO: 25183 - DNA, 20 bp, Homo sapiens
cacgatctccaccaaacggg

SEQ ID NO: 25184 - DNA, 17 bp, Homo sapiens
gatggcccaggtcaggc

SEQ ID NO: 25185 - DNA, 17 bp, Homo sapiens
ccgatgctctgatgggc

SEQ ID NO: 25186 - DNA, 23 bp, Homo sapiens
aactgccctgttgcccacactct

SEQ ID NO: 25187 - DNA, 20 bp, Homo sapiens
cagcttggggaggtattttt

SEQ ID NO: 25188 - DNA, 23 bp, Homo sapiens
gattcctgcttcccctccagtac

SEQ ID NO: 25189 - DNA, 23 bp, Homo sapiens
cctaatctgtgccaagcccagtg

SEQ ID NO: 25190 - DNA, 18 bp, Homo sapiens
gtgggcattaccctgggg

SEQ ID NO: 25191 - DNA, 23 bp, Homo sapiens
caaaaccttcccccaactgaaat

SEQ ID NO: 25192 - DNA, 22 bp, Homo sapiens
tttggcacaaaggcccagaaag

SEQ ID NO: 25193 - DNA, 19 bp, Homo sapiens
cacctgggagtatccagtt

SEQ ID NO: 25194 - DNA, 23 bp, Homo sapiens
ttagacagaaagcggccacagtc

SEQ ID NO: 25195 - DNA, 24 bp, Homo sapiens
gctggttgggacatgcaaaagaac

SEQ ID NO: 25196 - DNA, 17 bp, Homo sapiens
tgggcacagcagaggtt

SEQ ID NO: 25197 - DNA, 20 bp, Homo sapiens
gagggatggggaagtgggcc

SEQ ID NO: 25198 - DNA, 19 bp, Homo sapiens
gaaatgggaggcaggttgc

SEQ ID NO: 25199 - DNA, 16 bp, Homo sapiens
caacaggggagactgt

SEQ ID NO: 25200 - DNA, 22 bp, Homo sapiens
atattcagggcgtggaggacgg

SEQ ID NO: 25201 - DNA, 22 bp, Homo sapiens
tcagatgcagcctccatccgaa

SEQ ID NO: 25202 - DNA, 24 bp, Homo sapiens
gtgtcttggcaaagaccgtgaaga

SEQ ID NO: 25203 - DNA, 24 bp, Homo sapiens
taccctcaatggaagcaagctttg

SEQ ID NO: 25204 - DNA, 20 bp, Homo sapiens
accacaaaagctgtgatctt

SEQ ID NO: 25205 - DNA, 18 bp, Homo sapiens
caattccaggccccactg

SEQ ID NO: 25206 - DNA, 16 bp, Homo sapiens
ctaagctcccccaacc

SEQ ID NO: 25207 - DNA, 16 bp, Homo sapiens
ggggcctagcagacat

SEQ ID NO: 25208 - DNA, 18 bp, Homo sapiens
tttgcacacgtccccagg

SEQ ID NO: 25209 - DNA, 21 bp, Homo sapiens
aggagccgtgaaggagaagat

SEQ ID NO: 25210 - DNA, 24 bp, Homo sapiens
actttagctcagttgcatacatat

SEQ ID NO: 25211 - DNA, 18 bp, Homo sapiens
tgatgcccatcttcttct

SEQ ID NO: 25212 - DNA, 24 bp, Homo sapiens
agtggtggctgtagcctctaatag

SEQ ID NO: 25213 - DNA, 16 bp, Homo sapiens
gttctccgatggcacc

SEQ ID NO: 25214 - DNA, 21 bp, Homo sapiens
cgaaggagcagtttttccccc

SEQ ID NO: 25215 - DNA, 21 bp, Homo sapiens
ccaaaccttccattgttgagg

SEQ ID NO: 25216 - DNA, 17 bp, Homo sapiens
cagtgggccccctgaga

SEQ ID NO: 25217 - DNA, 18 bp, Homo sapiens
gggtactcaccgccttag

SEQ ID NO: 25218 - DNA, 22 bp, Homo sapiens
gtgttctttgatggagtacggg

SEQ ID NO: 25219 - DNA, 19 bp, Homo sapiens
gatcagggacacatggcaa

SEQ ID NO: 25220 - DNA, 23 bp, Homo sapiens
ggcttcaaggttgccatgcacat

SEQ ID NO: 25221 - DNA, 18 bp, Homo sapiens
caagtcgggctgctggta

SEQ ID NO: 25222 - DNA, 22 bp, Homo sapiens
caggtaccatgagaggcatcat

SEQ ID NO: 25223 - DNA, 22 bp, Homo sapiens
gtgaattttctccccaaactgg

SEQ ID NO: 25224 - DNA, 23 bp, Homo sapiens
gtagactgaactctggttgtatg

SEQ ID NO: 25225 - DNA, 22 bp, Homo sapiens
cacctcagttacatactgcagc

SEQ ID NO: 25226 - DNA, 24 bp, Homo sapiens
tcctagggagactgcagaaccaca

SEQ ID NO: 25227 - DNA, 20 bp, Homo sapiens
gacccgactgggaagaaagc

SEQ ID NO: 25228 - DNA, 24 bp, Homo sapiens
ggtagatcatgccactaatcgtac

SEQ ID NO: 25229 - DNA, 16 bp, Homo sapiens
ggcattggtgtaaagc

SEQ ID NO: 25230 - DNA, 23 bp, Homo sapiens
gaagctggcacggatggttatgc

SEQ ID NO: 25231 - DNA, 23 bp, Homo sapiens
ctggaagcacctgatgaactgac

SEQ ID NO: 25232 - DNA, 21 bp, Homo sapiens
attttgctgatggcggcctct

SEQ ID NO: 25233 - DNA, 24 bp, Homo sapiens
cttatcttggagatctgggtgatg

SEQ ID NO: 25234 - DNA, 19 bp, Homo sapiens
gagcacccaaactggactc

SEQ ID NO: 25235 - DNA, 21 bp, Homo sapiens
cccatgtcccaactatgcaac

SEQ ID NO: 25236 - DNA, 17 bp, Homo sapiens
tctgtcaccttccaggc

SEQ ID NO: 25237 - DNA, 17 bp, Homo sapiens
gggagccacggacttcc

SEQ ID NO: 25238 - DNA, 19 bp, Homo sapiens
gcagaagaccgtcctgtac

SEQ ID NO: 25239 - DNA, 16 bp, Homo sapiens
caggcatgctgggagg

SEQ ID NO: 25240 - DNA, 22 bp, Homo sapiens
gccacacaaattatatgcccgt

SEQ ID NO: 25241 - DNA, 24 bp, Homo sapiens
catctgttctttgtccctaggagg

SEQ ID NO: 25242 - DNA, 20 bp, Homo sapiens
agatccggaagatgcgaaga

SEQ ID NO: 25243 - DNA, 23 bp, Homo sapiens
gtatgggcttcatgaaggtacag

SEQ ID NO: 25244 - DNA, 22 bp, Homo sapiens
ctgtcttaccatacagccctgc

SEQ ID NO: 25245 - DNA, 18 bp, Homo sapiens
gtaggcacatctcagcac

SEQ ID NO: 25246 - DNA, 16 bp, Homo sapiens
gggtccagcagtcagg

SEQ ID NO: 25247 - DNA, 24 bp, Homo sapiens
gtagagcgtgtgctccgagatctt

SEQ ID NO: 25248 - DNA, 24 bp, Homo sapiens
tcccaaagggattctttagagcac

SEQ ID NO: 25249 - DNA, 24 bp, Homo sapiens
acattcttcggctgtttgtggctc

SEQ ID NO: 25250 - DNA, 16 bp, Homo sapiens
aagcctaccgcctcag

SEQ ID NO: 25251 - DNA, 24 bp, Homo sapiens
gtagaggtggggaggacagtgagt

SEQ ID NO: 25252 - DNA, 24 bp, Homo sapiens
cctgagaggaagagggagaatgac

SEQ ID NO: 25253 - DNA, 16 bp, Homo sapiens
gctctctgggcttggc

SEQ ID NO: 25254 - DNA, 16 bp, Homo sapiens
ctccgggtggacaagt

SEQ ID NO: 25255 - DNA, 23 bp, Homo sapiens
gagaggcaggcaaacagctgagg

SEQ ID NO: 25256 - DNA, 16 bp, Homo sapiens
agtccctgatgcaggc

SEQ ID NO: 25257 - DNA, 24 bp, Homo sapiens
ggtggtgtatggcaactaaccagt

SEQ ID NO: 25258 - DNA, 18 bp, Homo sapiens
ctccagagcccgtactgc

SEQ ID NO: 25259 - DNA, 16 bp, Homo sapiens
gagtctcagcggactt

SEQ ID NO: 25260 - DNA, 20 bp, Homo sapiens
cacttactgacaatcccctt

SEQ ID NO: 25261 - DNA, 20 bp, Homo sapiens
ggccaggggtccaggagagc

SEQ ID NO: 25262 - DNA, 16 bp, Homo sapiens
gggtgggggcattagt

SEQ ID NO: 25263 - DNA, 24 bp, Homo sapiens
ccgcactgtccccatctcttaagg

SEQ ID NO: 25264 - DNA, 16 bp, Homo sapiens
ccgtctgccagccgct

SEQ ID NO: 25265 - DNA, 24 bp, Homo sapiens
gtggaggccaagctgataaaacac

SEQ ID NO: 25266 - DNA, 17 bp, Homo sapiens
ttccctgcctgcctcct

SEQ ID NO: 25267 - DNA, 21 bp, Homo sapiens
tccctttcctctccttgagac

SEQ ID NO: 25268 - DNA, 22 bp, Homo sapiens
aagcaggagatgaaaataaatc

SEQ ID NO: 25269 - DNA, 24 bp, Homo sapiens
acagatgaacagtttctgctgcag

SEQ ID NO: 25270 - DNA, 22 bp, Homo sapiens
gagcattttctcatgctgggcc

SEQ ID NO: 25271 - DNA, 22 bp, Homo sapiens
atggtggtggttctctcgaggt

SEQ ID NO: 25272 - DNA, 16 bp, Homo sapiens
cctgagcttggcagcc

SEQ ID NO: 25273 - DNA, 16 bp, Homo sapiens
ctggatcccagccggc

SEQ ID NO: 25274 - DNA, 16 bp, Homo sapiens
ggatccgagctgcagc

SEQ ID NO: 25275 - DNA, 17 bp, Homo sapiens
cctgagtgagggccacc

SEQ ID NO: 25276 - DNA, 19 bp, Homo sapiens
gcttttgaagttgcggtag

SEQ ID NO: 25277 - DNA, 22 bp, Homo sapiens
tgtatcgaggtgagactcgggg

SEQ ID NO: 25278 - DNA, 23 bp, Homo sapiens
tattcagaagccaagtgggttgc

SEQ ID NO: 25279 - DNA, 17 bp, Homo sapiens
cttccctctccccaggc

SEQ ID NO: 25280 - DNA, 16 bp, Homo sapiens
gggcttcggctttggc

SEQ ID NO: 25281 - DNA, 21 bp, Homo sapiens
ctgacccctggcagcaagagc

SEQ ID NO: 25282 - DNA, 18 bp, Homo sapiens
ggcacagtgctgggaaca

SEQ ID NO: 25283 - DNA, 18 bp, Homo sapiens
tggtgtggtcaccagcaa

SEQ ID NO: 25284 - DNA, 16 bp, Homo sapiens
cggccaccgccaccgc

SEQ ID NO: 25285 - DNA, 23 bp, Homo sapiens
tcctggtacccggaagccgcgac

SEQ ID NO: 25286 - DNA, 16 bp, Homo sapiens
gcctcccgggcctcgt

SEQ ID NO: 25287 - DNA, 20 bp, Homo sapiens
ccggaggccggcagctgatt

SEQ ID NO: 25288 - DNA, 16 bp, Homo sapiens
cggagaagtcggccgc

SEQ ID NO: 25289 - DNA, 21 bp, Homo sapiens
gcaggactgagaccatggagg

SEQ ID NO: 25290 - DNA, 19 bp, Homo sapiens
cgcccaggctgtaggtgtc

SEQ ID NO: 25291 - DNA, 17 bp, Homo sapiens
gggccgggggcgcggca

SEQ ID NO: 25292 - DNA, 24 bp, Homo sapiens
gtagcggtgcagccccgcggcggc

SEQ ID NO: 25293 - DNA, 16 bp, Homo sapiens
gctgctggggccaggc

SEQ ID NO: 25294 - DNA, 16 bp, Homo sapiens
agctgagagccggacc

SEQ ID NO: 25295 - DNA, 17 bp, Homo sapiens
agccgggcttggacacc

SEQ ID NO: 25296 - DNA, 17 bp, Homo sapiens
cctgttgggcgtggcct

SEQ ID NO: 25297 - DNA, 16 bp, Homo sapiens
ctccacgggcgtggcg

SEQ ID NO: 25298 - DNA, 16 bp, Homo sapiens
ggcagcggctccggga

SEQ ID NO: 25299 - DNA, 16 bp, Homo sapiens
tgccacgtggcctggt

SEQ ID NO: 25300 - DNA, 16 bp, Homo sapiens
tgctggaggcggcgca

SEQ ID NO: 25301 - DNA, 19 bp, Homo sapiens
cgggggagctgaccgaggc

SEQ ID NO: 25302 - DNA, 18 bp, Homo sapiens
gctttgcgtgcacacatt

SEQ ID NO: 25303 - DNA, 16 bp, Homo sapiens
tgtgcagcagaagggc

SEQ ID NO: 25304 - DNA, 19 bp, Homo sapiens
agcgccatccagtctatct

SEQ ID NO: 25305 - DNA, 19 bp, Homo sapiens
gggatttgttccagggccg

SEQ ID NO: 25306 - DNA, 17 bp, Homo sapiens
cacccgctgccagatgg

SEQ ID NO: 25307 - DNA, 23 bp, Homo sapiens
ccgcaggtaccgctattaccaga

SEQ ID NO: 25308 - DNA, 18 bp, Homo sapiens
ggcgggtgaaaacaccta

SEQ ID NO: 25309 - DNA, 18 bp, Homo sapiens
cccgctgggagcgagaga

SEQ ID NO: 25310 - DNA, 17 bp, Homo sapiens
aagccactgtgcacgct

SEQ ID NO: 25311 - DNA, 24 bp, Homo sapiens
cactggcctggagcggccaggagg

SEQ ID NO: 25312 - DNA, 20 bp, Homo sapiens
caaggccaggtacacctgag

SEQ ID NO: 25313 - DNA, 19 bp, Homo sapiens
gtgggctccttgatggcag

SEQ ID NO: 25314 - DNA, 17 bp, Homo sapiens
caggaaggcaggaccag

SEQ ID NO: 25315 - DNA, 21 bp, Homo sapiens
aaagaagcaatgagtgaatgg

SEQ ID NO: 25316 - DNA, 19 bp, Homo sapiens
tgatgtgccaggagggggg

SEQ ID NO: 25317 - DNA, 23 bp, Homo sapiens
atatttctatgtgtgggcccttc

SEQ ID NO: 25318 - DNA, 20 bp, Homo sapiens
accatctatcaccgattctg

SEQ ID NO: 25319 - DNA, 23 bp, Homo sapiens
agatcaatgagttctttactggt

SEQ ID NO: 25320 - DNA, 20 bp, Homo sapiens
ccccgcctcagttaagagcc

SEQ ID NO: 25321 - DNA, 17 bp, Homo sapiens
cacctgggatggccccc

SEQ ID NO: 25322 - DNA, 16 bp, Homo sapiens
gagcatggccactgct

SEQ ID NO: 25323 - DNA, 16 bp, Homo sapiens
catgccgaaggagcgc

SEQ ID NO: 25324 - DNA, 24 bp, Homo sapiens
ggtggtattaggccggccccaggg

SEQ ID NO: 25325 - DNA, 17 bp, Homo sapiens
gaacctcacctggtgac

SEQ ID NO: 25326 - DNA, 19 bp, Homo sapiens
ggccttctcataggacagc

SEQ ID NO: 25327 - DNA, 24 bp, Homo sapiens
gagcttaagtttttaagtcatgtt

SEQ ID NO: 25328 - DNA, 16 bp, Homo sapiens
tcctggaccagatgcg

SEQ ID NO: 25329 - DNA, 19 bp, Homo sapiens
aactcggcctcccaaagtg

SEQ ID NO: 25330 - DNA, 24 bp, Homo sapiens
gaagaaaggactgtaggcagagag

SEQ ID NO: 25331 - DNA, 20 bp, Homo sapiens
gaaggagcaggagtaggaac

SEQ ID NO: 25332 - DNA, 24 bp, Homo sapiens
ggagctgtagagaagttggcaagg

SEQ ID NO: 25333 - DNA, 21 bp, Homo sapiens
cagctctcgcaggaagaggct

SEQ ID NO: 25334 - DNA, 24 bp, Homo sapiens
catgaaatatctgagcttttgctc

SEQ ID NO: 25335 - DNA, 22 bp, Homo sapiens
gaaggtggctgcatctcattga

SEQ ID NO: 25336 - DNA, 24 bp, Homo sapiens
agttggggccactttaactgttcc

SEQ ID NO: 25337 - DNA, 18 bp, Homo sapiens
agtcatggcctcatagac

SEQ ID NO: 25338 - DNA, 22 bp, Homo sapiens
atattccccatcatcgggagcc

SEQ ID NO: 25339 - DNA, 23 bp, Homo sapiens
tgctactcccttctttttgaggg

SEQ ID NO: 25340 - DNA, 24 bp, Homo sapiens
ccacatctatggggccgacacttt

SEQ ID NO: 25341 - DNA, 17 bp, Homo sapiens
gtactgtgtgttatggc

SEQ ID NO: 25342 - DNA, 23 bp, Homo sapiens
cctaccttgccgcagccaccact

SEQ ID NO: 25343 - DNA, 16 bp, Homo sapiens
gtgccacagagcgtcc

SEQ ID NO: 25344 - DNA, 16 bp, Homo sapiens
gggcccccagaactgc

SEQ ID NO: 25345 - DNA, 24 bp, Homo sapiens
gatagacagtcgtctgtagagtgg

SEQ ID NO: 25346 - DNA, 19 bp, Homo sapiens
agcaaacaggtccagaacc

SEQ ID NO: 25347 - DNA, 19 bp, Homo sapiens
ttccccctacctcctgtcc

SEQ ID NO: 25348 - DNA, 16 bp, Homo sapiens
agatgaagggctggcc

SEQ ID NO: 25349 - DNA, 16 bp, Homo sapiens
cttccagcaccagccg

SEQ ID NO: 25350 - DNA, 19 bp, Homo sapiens
ccgttcacagcctctaggg

SEQ ID NO: 25351 - DNA, 18 bp, Homo sapiens
tgccccgtggccgcctcc

SEQ ID NO: 25352 - DNA, 17 bp, Homo sapiens
ccatgcccgtgcctacc

SEQ ID NO: 25353 - DNA, 17 bp, Homo sapiens
ctgcctccttccagggc

SEQ ID NO: 25354 - DNA, 17 bp, Homo sapiens
ctttcgccagcccagct

SEQ ID NO: 25355 - DNA, 24 bp, Homo sapiens
gggaaaccatggtctttttggagc

SEQ ID NO: 25356 - DNA, 16 bp, Homo sapiens
accccataccgccggg

SEQ ID NO: 25357 - DNA, 18 bp, Homo sapiens
caactccaccatggtagg

SEQ ID NO: 25358 - DNA, 20 bp, Homo sapiens
cggagcagttgtacacactc

SEQ ID NO: 25359 - DNA, 20 bp, Homo sapiens
gtggtctattccctcatggc

SEQ ID NO: 25360 - DNA, 23 bp, Homo sapiens
tattcatctgtagggacggccgc

SEQ ID NO: 25361 - DNA, 21 bp, Homo sapiens
agcctgggtgaccagctttgc

SEQ ID NO: 25362 - DNA, 16 bp, Homo sapiens
tgtgagcagcagccgc

SEQ ID NO: 25363 - DNA, 17 bp, Homo sapiens
gtggaggctactgctcc

SEQ ID NO: 25364 - DNA, 17 bp, Homo sapiens
agtgaggtccagcaggt

SEQ ID NO: 25365 - DNA, 16 bp, Homo sapiens
atcgtagcccgctggt

SEQ ID NO: 25366 - DNA, 16 bp, Homo sapiens
ggtaggcgcttcttgc

SEQ ID NO: 25367 - DNA, 23 bp, Homo sapiens
accgatctgatgtgtttgaggcc

SEQ ID NO: 25368 - DNA, 16 bp, Homo sapiens
gcagcagctcataggc

SEQ ID NO: 25369 - DNA, 16 bp, Homo sapiens
cgccttccgctacgac

SEQ ID NO: 25370 - DNA, 16 bp, Homo sapiens
gcctgctctagccagc

SEQ ID NO: 25371 - DNA, 21 bp, Homo sapiens
tcagcttgtactatgaggagg

SEQ ID NO: 25372 - DNA, 16 bp, Homo sapiens
tagcggctgttctgct

SEQ ID NO: 25373 - DNA, 16 bp, Homo sapiens
ggaggcgtcctggcct

SEQ ID NO: 25374 - DNA, 16 bp, Homo sapiens
ccagctgcttgttggc

SEQ ID NO: 25375 - DNA, 16 bp, Homo sapiens
acagccgcttcttgct

SEQ ID NO: 25376 - DNA, 16 bp, Homo sapiens
ctgtcaaccagcgcct

SEQ ID NO: 25377 - DNA, 19 bp, Homo sapiens
aggccgatttctacgagca

SEQ ID NO: 25378 - DNA, 24 bp, Homo sapiens
tgctccagttggaagacatttttg

SEQ ID NO: 25379 - DNA, 22 bp, Homo sapiens
cagaaggcaacatcctggacta

SEQ ID NO: 25380 - DNA, 17 bp, Homo sapiens
ggtccacagtgtctcct

SEQ ID NO: 25381 - DNA, 18 bp, Homo sapiens
ccctcgctggcggctttt

SEQ ID NO: 25382 - DNA, 19 bp, Homo sapiens
atctatcaccaagagccgg

SEQ ID NO: 25383 - DNA, 24 bp, Homo sapiens
ccctttccaacagcaccagtttga

SEQ ID NO: 25384 - DNA, 16 bp, Homo sapiens
gggccctggaatctgc

SEQ ID NO: 25385 - DNA, 24 bp, Homo sapiens
gcaagcagaggtaccccagccagc

SEQ ID NO: 25386 - DNA, 17 bp, Homo sapiens
accagcaggccgtgggg

SEQ ID NO: 25387 - DNA, 21 bp, Homo sapiens
atattacccccgctgggtggc

SEQ ID NO: 25388 - DNA, 23 bp, Homo sapiens
gagtccaaagatcagggctgggt

SEQ ID NO: 25389 - DNA, 21 bp, Homo sapiens
gtcttggtaattcacctggag

SEQ ID NO: 25390 - DNA, 23 bp, Homo sapiens
caaggcacagactcatagcagag

SEQ ID NO: 25391 - DNA, 17 bp, Homo sapiens
gcattcctgaggtctgc

SEQ ID NO: 25392 - DNA, 23 bp, Homo sapiens
gctgacatcttcctgaggtgcca

SEQ ID NO: 25393 - DNA, 20 bp, Homo sapiens
caaaggagtttaatgcccac

SEQ ID NO: 25394 - DNA, 24 bp, Homo sapiens
catgactttgggatccagtcaaca

SEQ ID NO: 25395 - DNA, 23 bp, Homo sapiens
tgatctcctctctatatggttct

SEQ ID NO: 25396 - DNA, 24 bp, Homo sapiens
ggttcatcttggtgtccgtgatcg

SEQ ID NO: 25397 - DNA, 21 bp, Homo sapiens
gggaaagcaacttctgatgga

SEQ ID NO: 25398 - DNA, 23 bp, Homo sapiens
tctggttccatcttcaggaagct

SEQ ID NO: 25399 - DNA, 19 bp, Homo sapiens
gtcagagagaggggttgga

SEQ ID NO: 25400 - DNA, 23 bp, Homo sapiens
actggctcaacctcgtctttaag

SEQ ID NO: 25401 - DNA, 20 bp, Homo sapiens
ggacgctgtccaaagagaat

SEQ ID NO: 25402 - DNA, 20 bp, Homo sapiens
acttctccccagccacccag

SEQ ID NO: 25403 - DNA, 19 bp, Homo sapiens
aactgctttatcaggggca

SEQ ID NO: 25404 - DNA, 24 bp, Homo sapiens
aggctacactcttcttgaaggtgt

SEQ ID NO: 25405 - DNA, 16 bp, Homo sapiens
ttctgtctgcaggggc

SEQ ID NO: 25406 - DNA, 23 bp, Homo sapiens
tgttctgtttttccataggattc

SEQ ID NO: 25407 - DNA, 17 bp, Homo sapiens
aatggctctcctcatgt

SEQ ID NO: 25408 - DNA, 22 bp, Homo sapiens
ctactacagcaacacttccgtg

SEQ ID NO: 25409 - DNA, 22 bp, Homo sapiens
ggaaagtattgcagaagtgaat

SEQ ID NO: 25410 - DNA, 16 bp, Homo sapiens
tggccagaggggctcc

SEQ ID NO: 25411 - DNA, 22 bp, Homo sapiens
ggatggatggggggtgaatgga

SEQ ID NO: 25412 - DNA, 20 bp, Homo sapiens
tccctgaaagatggaaagag

SEQ ID NO: 25413 - DNA, 23 bp, Homo sapiens
tgggtggctgggtagatgatgca

SEQ ID NO: 25414 - DNA, 18 bp, Homo sapiens
ccctccaccacctacacc

SEQ ID NO: 25415 - DNA, 24 bp, Homo sapiens
tccattctctttcctgccctttag

SEQ ID NO: 25416 - DNA, 18 bp, Homo sapiens
tagggggatgtgaggaag

SEQ ID NO: 25417 - DNA, 22 bp, Homo sapiens
atactacgtgatggtcacatct

SEQ ID NO: 25418 - DNA, 17 bp, Homo sapiens
ccctatccaaagtgcca

SEQ ID NO: 25419 - DNA, 23 bp, Homo sapiens
caacaggcatctttggacttttg

SEQ ID NO: 25420 - DNA, 20 bp, Homo sapiens
aaggtagattcgtgacagac

SEQ ID NO: 25421 - DNA, 21 bp, Homo sapiens
ctaagtttgccaggctccaac

SEQ ID NO: 25422 - DNA, 22 bp, Homo sapiens
gtcagatcagcccatacctgac

SEQ ID NO: 25423 - DNA, 24 bp, Homo sapiens
gcacctgtgttctgttatggttgc

SEQ ID NO: 25424 - DNA, 21 bp, Homo sapiens
tgggattttgtcctgattagg

SEQ ID NO: 25425 - DNA, 19 bp, Homo sapiens
attctgggctgtgcagctg

SEQ ID NO: 25426 - DNA, 23 bp, Homo sapiens
tttcaacccacagaaatgctaac

SEQ ID NO: 25427 - DNA, 23 bp, Homo sapiens
tcctcatcaagttgttgctggag

SEQ ID NO: 25428 - DNA, 24 bp, Homo sapiens
acatgggaataagccaggcgaccc

SEQ ID NO: 25429 - DNA, 21 bp, Homo sapiens
aaaatatttcttgaggctggc

SEQ ID NO: 25430 - DNA, 24 bp, Homo sapiens
agaacggatggcatgtcacccact

SEQ ID NO: 25431 - DNA, 19 bp, Homo sapiens
ccagtcccttgagcagcag

SEQ ID NO: 25432 - DNA, 24 bp, Homo sapiens
tcctatctctcacagtcatgcttt

SEQ ID NO: 25433 - DNA, 18 bp, Homo sapiens
gacccattctggctgctc

SEQ ID NO: 25434 - DNA, 24 bp, Homo sapiens
gccacatccacagcatctataatg

SEQ ID NO: 25435 - DNA, 16 bp, Homo sapiens
ggccaaagagcgtgcc

SEQ ID NO: 25436 - DNA, 24 bp, Homo sapiens
ttcagcttcgccatcggattttat

SEQ ID NO: 25437 - DNA, 20 bp, Homo sapiens
gagccacttgctgagtttcc

SEQ ID NO: 25438 - DNA, 23 bp, Homo sapiens
ctggagaaagcccagaggtggtg

SEQ ID NO: 25439 - DNA, 16 bp, Homo sapiens
aagacgtgcaggagga

SEQ ID NO: 25440 - DNA, 24 bp, Homo sapiens
cctttgccagcctcctcaagaacc

SEQ ID NO: 25441 - DNA, 17 bp, Homo sapiens
cgcactcttgcagaagg

SEQ ID NO: 25442 - DNA, 23 bp, Homo sapiens
catgtacagggagagctgcaagg

SEQ ID NO: 25443 - DNA, 16 bp, Homo sapiens
ccaggacctgggcgag

SEQ ID NO: 25444 - DNA, 24 bp, Homo sapiens
tcagctctattgtagcctccctcg

SEQ ID NO: 25445 - DNA, 23 bp, Homo sapiens
gcatggttgttgactttaaacac

SEQ ID NO: 25446 - DNA, 22 bp, Homo sapiens
aagtcgagctggtcttctacgt

SEQ ID NO: 25447 - DNA, 20 bp, Homo sapiens
acttgctccaaataccagtg

SEQ ID NO: 25448 - DNA, 21 bp, Homo sapiens
gtcagtgtcatcccctactgc

SEQ ID NO: 25449 - DNA, 16 bp, Homo sapiens
cgaccctccaatctgc

SEQ ID NO: 25450 - DNA, 22 bp, Homo sapiens
ctctcctgcctcttcgtctttc

SEQ ID NO: 25451 - DNA, 23 bp, Homo sapiens
tataaagggggggccacagggtc

SEQ ID NO: 25452 - DNA, 16 bp, Homo sapiens
ctcacagcagccctgg

SEQ ID NO: 25453 - DNA, 17 bp, Homo sapiens
aggctaggcagaggggc

SEQ ID NO: 25454 - DNA, 16 bp, Homo sapiens
gcccgggaaagcctcc

SEQ ID NO: 25455 - DNA, 21 bp, Homo sapiens
cgtggtctctaatcagaaaga

SEQ ID NO: 25456 - DNA, 23 bp, Homo sapiens
cagccaaatagcatatctccttt

SEQ ID NO: 25457 - DNA, 21 bp, Homo sapiens
ccccatcttgtcctcttgcac

SEQ ID NO: 25458 - DNA, 16 bp, Homo sapiens
aggtcagcatgggcct

SEQ ID NO: 25459 - DNA, 20 bp, Homo sapiens
agaggggctcactaggtcct

SEQ ID NO: 25460 - DNA, 19 bp, Homo sapiens
tcagccagcagagttccat

SEQ ID NO: 25461 - DNA, 20 bp, Homo sapiens
gaaggcctctgtaaggaaag

SEQ ID NO: 25462 - DNA, 19 bp, Homo sapiens
ccttcatggaatcgagctc

SEQ ID NO: 25463 - DNA, 18 bp, Homo sapiens
actgcagagagaaacagg

SEQ ID NO: 25464 - DNA, 16 bp, Homo sapiens
cttagccctgaggggt

SEQ ID NO: 25465 - DNA, 21 bp, Homo sapiens
cctagcacattgtgaatggaa

SEQ ID NO: 25466 - DNA, 17 bp, Homo sapiens
ccttccgcttgcactgt

SEQ ID NO: 25467 - DNA, 23 bp, Homo sapiens
acacactccgcatccttttctga

SEQ ID NO: 25468 - DNA, 16 bp, Homo sapiens
gccacagggggaacgc

SEQ ID NO: 25469 - DNA, 18 bp, Homo sapiens
ttacggctgtctccaccc

SEQ ID NO: 25470 - DNA, 16 bp, Homo sapiens
ccagcatggtgcgggg

SEQ ID NO: 25471 - DNA, 18 bp, Homo sapiens
gtcactcacctggactgc

SEQ ID NO: 25472 - DNA, 20 bp, Homo sapiens
gtgatggaataaggtttccc

SEQ ID NO: 25473 - DNA, 22 bp, Homo sapiens
gcggagtccaaagcggctcagg

SEQ ID NO: 25474 - DNA, 19 bp, Homo sapiens
ccaggatccttcaaggtga

SEQ ID NO: 25475 - DNA, 23 bp, Homo sapiens
gtggtcatgacttccagcttaag

SEQ ID NO: 25476 - DNA, 18 bp, Homo sapiens
gaggtttttcattggcgg

SEQ ID NO: 25477 - DNA, 24 bp, Homo sapiens
caactaaggggtcttgacccagat

SEQ ID NO: 25478 - DNA, 18 bp, Homo sapiens
acacaccctgacagtctc

SEQ ID NO: 25479 - DNA, 24 bp, Homo sapiens
tgaagtcactccaaagacaaaagt

SEQ ID NO: 25480 - DNA, 17 bp, Homo sapiens
gtgaggggccacatgcc

SEQ ID NO: 25481 - DNA, 24 bp, Homo sapiens
agaggtcctccagttccagagaac

SEQ ID NO: 25482 - DNA, 17 bp, Homo sapiens
gtcatcaccagaccagg

SEQ ID NO: 25483 - DNA, 22 bp, Homo sapiens
cacaggtctccacgtggagact

SEQ ID NO: 25484 - DNA, 16 bp, Homo sapiens
ggtgctgcctgccact

SEQ ID NO: 25485 - DNA, 24 bp, Homo sapiens
gtcctcagaggaacaggaactctt

SEQ ID NO: 25486 - DNA, 22 bp, Homo sapiens
tgctctactgtgaggtcctctc

SEQ ID NO: 25487 - DNA, 24 bp, Homo sapiens
ccagaagcattcgagtgttagtct

SEQ ID NO: 25488 - DNA, 16 bp, Homo sapiens
gacctggccgcttctc

SEQ ID NO: 25489 - DNA, 16 bp, Homo sapiens
gagcggttacctggag

SEQ ID NO: 25490 - DNA, 20 bp, Homo sapiens
ctcagcagttgatcctgggc

SEQ ID NO: 25491 - DNA, 23 bp, Homo sapiens
cacacggtacctctgccagaagt

SEQ ID NO: 25492 - DNA, 18 bp, Homo sapiens
cccattcacgtttgaagc

SEQ ID NO: 25493 - DNA, 18 bp, Homo sapiens
gcatctgggagcaaggag

SEQ ID NO: 25494 - DNA, 20 bp, Homo sapiens
attccaagggaggccttgcc

SEQ ID NO: 25495 - DNA, 18 bp, Homo sapiens
cactgcttgaggggaacc

SEQ ID NO: 25496 - DNA, 24 bp, Homo sapiens
ggtgataatttttctttttccctt

SEQ ID NO: 25497 - DNA, 22 bp, Homo sapiens
ttcatcctcatggaggaagaag

SEQ ID NO: 25498 - DNA, 18 bp, Homo sapiens
gcagcttgtatttgggtg

SEQ ID NO: 25499 - DNA, 16 bp, Homo sapiens
ctccggaccaggtggc

SEQ ID NO: 25500 - DNA, 18 bp, Homo sapiens
cagcattccagcagctct

SEQ ID NO: 25501 - DNA, 16 bp, Homo sapiens
gcgcacagcacttggc

SEQ ID NO: 25502 - DNA, 17 bp, Homo sapiens
cttgctttcctcccagg

SEQ ID NO: 25503 - DNA, 19 bp, Homo sapiens
ttcccttccagatacccgc

SEQ ID NO: 25504 - DNA, 24 bp, Homo sapiens
cacccaagaatgatcaataaatac

SEQ ID NO: 25505 - DNA, 20 bp, Homo sapiens
gtctgtgttactcctgagag

SEQ ID NO: 25506 - DNA, 24 bp, Homo sapiens
tgaccttctctccactattatcct

SEQ ID NO: 25507 - DNA, 23 bp, Homo sapiens
aagtctccactgggtttggtaaa

SEQ ID NO: 25508 - DNA, 18 bp, Homo sapiens
gtttcagcccaaggctat

SEQ ID NO: 25509 - DNA, 21 bp, Homo sapiens
tcagcagaggagtgggaaagg

SEQ ID NO: 25510 - DNA, 17 bp, Homo sapiens
gggttgggtgctaaggg

SEQ ID NO: 25511 - DNA, 22 bp, Homo sapiens
aaaggagagacttaagaatatt

SEQ ID NO: 25512 - DNA, 16 bp, Homo sapiens
cagagggttcctggcc

SEQ ID NO: 25513 - DNA, 23 bp, Homo sapiens
tggacgtagagattgtcatactc

SEQ ID NO: 25514 - DNA, 23 bp, Homo sapiens
accctgagagcaagtcttttgag

SEQ ID NO: 25515 - DNA, 20 bp, Homo sapiens
cttagactgtcccaggtgcc

SEQ ID NO: 25516 - DNA, 22 bp, Homo sapiens
tttcccaagtacagcagacaag

SEQ ID NO: 25517 - DNA, 16 bp, Homo sapiens
gctggaggagaagtgc

SEQ ID NO: 25518 - DNA, 18 bp, Homo sapiens
ctaggcacgtgcctaagc

SEQ ID NO: 25519 - DNA, 17 bp, Homo sapiens
gtagtgacacccagggc

SEQ ID NO: 25520 - DNA, 24 bp, Homo sapiens
ctccatttacaaagagccggaggg

SEQ ID NO: 25521 - DNA, 16 bp, Homo sapiens
cctcgtaggcaccgac

SEQ ID NO: 25522 - DNA, 24 bp, Homo sapiens
gtgctattctttgacttccttttc

SEQ ID NO: 25523 - DNA, 23 bp, Homo sapiens
gggttgcatcttgagttttggtt

SEQ ID NO: 25524 - DNA, 22 bp, Homo sapiens
aactcatccacagtcagaatgc

SEQ ID NO: 25525 - DNA, 21 bp, Homo sapiens
cttcccactattgcttttctt

SEQ ID NO: 25526 - DNA, 23 bp, Homo sapiens
caagctactcaccatctcaaagt

SEQ ID NO: 25527 - DNA, 18 bp, Homo sapiens
tgcttcacggtaaaatgg

SEQ ID NO: 25528 - DNA, 17 bp, Homo sapiens
gggaacggcgagtgttc

SEQ ID NO: 25529 - DNA, 17 bp, Homo sapiens
ctaagtcagaaggggcc

SEQ ID NO: 25530 - DNA, 21 bp, Homo sapiens
caggagctgtggaaatatacg

SEQ ID NO: 25531 - DNA, 22 bp, Homo sapiens
agttcagaaatggtctcagctc

SEQ ID NO: 25532 - DNA, 23 bp, Homo sapiens
tcattattagagttgctcctttc

SEQ ID NO: 25533 - DNA, 19 bp, Homo sapiens
gcgcttacatccttgaaca

SEQ ID NO: 25534 - DNA, 17 bp, Homo sapiens
tatggcccctgatcgct

SEQ ID NO: 25535 - DNA, 21 bp, Homo sapiens
gggaaacattgtcgatcgtat

SEQ ID NO: 25536 - DNA, 24 bp, Homo sapiens
tttacccttttgtttctctctcct

SEQ ID NO: 25537 - DNA, 17 bp, Homo sapiens
gcctcaaaggaccctac

SEQ ID NO: 25538 - DNA, 23 bp, Homo sapiens
tggaacagaatacgaaccattgc

SEQ ID NO: 25539 - DNA, 23 bp, Homo sapiens
tgaacatgtcctgtgtactctga

SEQ ID NO: 25540 - DNA, 22 bp, Homo sapiens
ctgacagtctagttgactaggg

SEQ ID NO: 25541 - DNA, 24 bp, Homo sapiens
aaggaccattgacctcaaccttgg

SEQ ID NO: 25542 - DNA, 22 bp, Homo sapiens
ctacccctttcttcctctcctc

SEQ ID NO: 25543 - DNA, 18 bp, Homo sapiens
cctctgttctctcccctg

SEQ ID NO: 25544 - DNA, 19 bp, Homo sapiens
tcacaccattgctatccac

SEQ ID NO: 25545 - DNA, 24 bp, Homo sapiens
gggactttttcttccttttttttc

SEQ ID NO: 25546 - DNA, 24 bp, Homo sapiens
atctgagttggcagtgagaagctt

SEQ ID NO: 25547 - DNA, 21 bp, Homo sapiens
aggaacaaccacgtcattaac

SEQ ID NO: 25548 - DNA, 23 bp, Homo sapiens
cctcccctataacctaggatgat

SEQ ID NO: 25549 - DNA, 19 bp, Homo sapiens
gagggcggcatcctcaagt

SEQ ID NO: 25550 - DNA, 19 bp, Homo sapiens
ctaagctggcagtgagaag

SEQ ID NO: 25551 - DNA, 16 bp, Homo sapiens
gggtgctccattgggg

SEQ ID NO: 25552 - DNA, 20 bp, Homo sapiens
atgtgcattgtctgaagagg

SEQ ID NO: 25553 - DNA, 24 bp, Homo sapiens
ggctcttaaaaaacaaaacaaaac

SEQ ID NO: 25554 - DNA, 20 bp, Homo sapiens
ctcccaggtgacgatgcgtg

SEQ ID NO: 25555 - DNA, 24 bp, Homo sapiens
atgaagagtgaggaagatatttta

SEQ ID NO: 25556 - DNA, 18 bp, Homo sapiens
aggtgccttcattcttgg

SEQ ID NO: 25557 - DNA, 24 bp, Homo sapiens
tacttgaatactatatataaccac

SEQ ID NO: 25558 - DNA, 19 bp, Homo sapiens
cacagggctgcttgctttt

SEQ ID NO: 25559 - DNA, 24 bp, Homo sapiens
aaaagtaaaagcttgtcccccatc

SEQ ID NO: 25560 - DNA, 22 bp, Homo sapiens
gaggtttcaggaggaagacttc

SEQ ID NO: 25561 - DNA, 20 bp, Homo sapiens
ctgacatttgccattcgctc

SEQ ID NO: 25562 - DNA, 23 bp, Homo sapiens
ctccctccgttagcatgtataat

SEQ ID NO: 25563 - DNA, 23 bp, Homo sapiens
ctctgatagatacaccaatttgg

SEQ ID NO: 25564 - DNA, 18 bp, Homo sapiens
cagcagctcacagcagtt

SEQ ID NO: 25565 - DNA, 18 bp, Homo sapiens
gctggagaattcgggtgg

SEQ ID NO: 25566 - DNA, 21 bp, Homo sapiens
aacacacagaactcagtgagg

SEQ ID NO: 25567 - DNA, 23 bp, Homo sapiens
ctgtaccaaaatgaaacagcctg

SEQ ID NO: 25568 - DNA, 23 bp, Homo sapiens
gagaccctagaaagaacaatacc

SEQ ID NO: 25569 - DNA, 29 bp, Homo sapiens
caaaagtttgatgtattataatgatgtac

SEQ ID NO: 25570 - DNA, 21 bp, Homo sapiens
agattcgtcggtttttcttgc

SEQ ID NO: 25571 - DNA, 21 bp, Homo sapiens
cagatagcatcagttctgtag

SEQ ID NO: 25572 - DNA, 21 bp, Homo sapiens
atccaaaggactctgacaggc

SEQ ID NO: 25573 - DNA, 19 bp, Homo sapiens
ctaatgttcttggttcccc

SEQ ID NO: 25574 - DNA, 19 bp, Homo sapiens
ggaggagattgtgattggg

SEQ ID NO: 25575 - DNA, 23 bp, Homo sapiens
caggggaaagtataaactgttac

SEQ ID NO: 25576 - DNA, 21 bp, Homo sapiens
tcaagcatttgattcactctg

SEQ ID NO: 25577 - DNA, 20 bp, Homo sapiens
atgtggaggtagaccagatg

SEQ ID NO: 25578 - DNA, 22 bp, Homo sapiens
ggcaaatataagaatagggact

SEQ ID NO: 25579 - DNA, 16 bp, Homo sapiens
ttctcctgccacccaa

SEQ ID NO: 25580 - DNA, 19 bp, Homo sapiens
atttctctaggttgagtgc

SEQ ID NO: 25581 - DNA, 19 bp, Homo sapiens
agacttggccacttttagg

SEQ ID NO: 25582 - DNA, 24 bp, Homo sapiens
atagaatgtaggttgccgggcaac

SEQ ID NO: 25583 - DNA, 23 bp, Homo sapiens
aagaatcacatcaagcaactttc

SEQ ID NO: 25584 - DNA, 24 bp, Homo sapiens
actacatttggccacaattctgat

SEQ ID NO: 25585 - DNA, 17 bp, Homo sapiens
gcgtgtctggtaacgaa

SEQ ID NO: 25586 - DNA, 18 bp, Homo sapiens
actggcagttggctgagg

SEQ ID NO: 25587 - DNA, 17 bp, Homo sapiens
ggcaaccctacctcctc

SEQ ID NO: 25588 - DNA, 24 bp, Homo sapiens
cggcagcaggctgataatgaagaa

SEQ ID NO: 25589 - DNA, 22 bp, Homo sapiens
ccttcattcttccccataggac

SEQ ID NO: 25590 - DNA, 23 bp, Homo sapiens
gaggcagtgtatcgctcccggga

SEQ ID NO: 25591 - DNA, 19 bp, Homo sapiens
gagaagtggtcgggattgt

SEQ ID NO: 25592 - DNA, 16 bp, Homo sapiens
ggcgcgtcgcagctgt

SEQ ID NO: 25593 - DNA, 24 bp, Homo sapiens
ggttggaatgatctaaggacacaa

SEQ ID NO: 25594 - DNA, 17 bp, Homo sapiens
ctcccgatccagcgtct

SEQ ID NO: 25595 - DNA, 16 bp, Homo sapiens
gttgcgcacggggtcc

SEQ ID NO: 25596 - DNA, 16 bp, Homo sapiens
caactgcgaccgtggc

SEQ ID NO: 25597 - DNA, 24 bp, Homo sapiens
gtgctccagacggtctccgccatg

SEQ ID NO: 25598 - DNA, 18 bp, Homo sapiens
tttgcacagcgcacgagg

SEQ ID NO: 25599 - DNA, 16 bp, Homo sapiens
gttcccgtcacggcgc

SEQ ID NO: 25600 - DNA, 21 bp, Homo sapiens
cgtcatcatttctgcatctat

SEQ ID NO: 25601 - DNA, 16 bp, Homo sapiens
cccaagagggctccgg

SEQ ID NO: 25602 - DNA, 17 bp, Homo sapiens
ggaaggcagtgtggcat

SEQ ID NO: 25603 - DNA, 17 bp, Homo sapiens
ctcaccgaaagcgggac

SEQ ID NO: 25604 - DNA, 20 bp, Homo sapiens
ggtgcatttcttacagtcac

SEQ ID NO: 25605 - DNA, 23 bp, Homo sapiens
ctgcgcttcttgacgtacacgta

SEQ ID NO: 25606 - DNA, 17 bp, Homo sapiens
ccccttgcttcctgccc

SEQ ID NO: 25607 - DNA, 17 bp, Homo sapiens
tcgatgttcagctcggc

SEQ ID NO: 25608 - DNA, 17 bp, Homo sapiens
gagatagggaaggggcc

SEQ ID NO: 25609 - DNA, 24 bp, Homo sapiens
tggatgcccgtgtccactgggttc

SEQ ID NO: 25610 - DNA, 19 bp, Homo sapiens
agccggcaccatggagatt

SEQ ID NO: 25611 - DNA, 16 bp, Homo sapiens
ggcccttggggcaggg

SEQ ID NO: 25612 - DNA, 24 bp, Homo sapiens
aagcagtgcaatttctcggaccgc

SEQ ID NO: 25613 - DNA, 21 bp, Homo sapiens
aggacccacagaaccactcac

SEQ ID NO: 25614 - DNA, 21 bp, Homo sapiens
gagcagttcgtggagcggaac

SEQ ID NO: 25615 - DNA, 18 bp, Homo sapiens
gagcctctgccctcactt

SEQ ID NO: 25616 - DNA, 19 bp, Homo sapiens
gggtctccatctcaaaccg

SEQ ID NO: 25617 - DNA, 24 bp, Homo sapiens
tttgaaaatactgtggctccggcc

SEQ ID NO: 25618 - DNA, 17 bp, Homo sapiens
tccagggggttcacgtc

SEQ ID NO: 25619 - DNA, 22 bp, Homo sapiens
cttgcagaagtggccgagggtt

SEQ ID NO: 25620 - DNA, 19 bp, Homo sapiens
atggcgttaacgtagttct

SEQ ID NO: 25621 - DNA, 24 bp, Homo sapiens
ctctctgtttaggccaactcagag

SEQ ID NO: 25622 - DNA, 24 bp, Homo sapiens
gagctgcagtgatggatggggctc

SEQ ID NO: 25623 - DNA, 17 bp, Homo sapiens
gggggctggcccaagga

SEQ ID NO: 25624 - DNA, 19 bp, Homo sapiens
attcacacgagcctcacag

SEQ ID NO: 25625 - DNA, 24 bp, Homo sapiens
aagaaagtggagaaagatgagaac

SEQ ID NO: 25626 - DNA, 16 bp, Homo sapiens
gctcccagacagaagg

SEQ ID NO: 25627 - DNA, 19 bp, Homo sapiens
gatgcagtgctccatgatc

SEQ ID NO: 25628 - DNA, 21 bp, Homo sapiens
cctccattgaaagcacatggt

SEQ ID NO: 25629 - DNA, 18 bp, Homo sapiens
cttccatggcctcctcgt

SEQ ID NO: 25630 - DNA, 24 bp, Homo sapiens
tccctcccagactccattgcaggc

SEQ ID NO: 25631 - DNA, 16 bp, Homo sapiens
tggctatggcgctacc

SEQ ID NO: 25632 - DNA, 24 bp, Homo sapiens
acttccaatgtgtcccccctagat

SEQ ID NO: 25633 - DNA, 17 bp, Homo sapiens
ggagttgcctttggagg

SEQ ID NO: 25634 - DNA, 24 bp, Homo sapiens
gacatctatgaagagtatttcaat

SEQ ID NO: 25635 - DNA, 24 bp, Homo sapiens
atcaccacgtcacttatcaagctc

SEQ ID NO: 25636 - DNA, 24 bp, Homo sapiens
ttcagctaaaaccatcaatgtgtt

SEQ ID NO: 25637 - DNA, 23 bp, Homo sapiens
ccaggaggcagaggttgcagtga

SEQ ID NO: 25638 - DNA, 19 bp, Homo sapiens
tatgccactgccaacttcc

SEQ ID NO: 25639 - DNA, 24 bp, Homo sapiens
agactccatctgacaaaaaaaaaa

SEQ ID NO: 25640 - DNA, 18 bp, Homo sapiens
cccagatgtatgaatcgc

SEQ ID NO: 25641 - DNA, 24 bp, Homo sapiens
ttctgctctcttccctctcccctg

SEQ ID NO: 25642 - DNA, 18 bp, Homo sapiens
ttgtgctggtcccagccc

SEQ ID NO: 25643 - DNA, 19 bp, Homo sapiens
caccccgatggcaacagga

SEQ ID NO: 25644 - DNA, 23 bp, Homo sapiens
cttgaggcaccaaccgcgtgagt

SEQ ID NO: 25645 - DNA, 18 bp, Homo sapiens
acctgtgggcatgagcag

SEQ ID NO: 25646 - DNA, 23 bp, Homo sapiens
ctgaaaccagacaagagaggaag

SEQ ID NO: 25647 - DNA, 22 bp, Homo sapiens
cagagcaagttcaggcttgttg

SEQ ID NO: 25648 - DNA, 24 bp, Homo sapiens
gaaagactggaggggcttccaggc

SEQ ID NO: 25649 - DNA, 20 bp, Homo sapiens
ggagtacgtgggaatctttg

SEQ ID NO: 25650 - DNA, 20 bp, Homo sapiens
aaggggtgaaactggttgat

SEQ ID NO: 25651 - DNA, 24 bp, Homo sapiens
aataaaaataaaaataaaaaagcc

SEQ ID NO: 25652 - DNA, 21 bp, Homo sapiens
tgctttatagaaaaccccaac

SEQ ID NO: 25653 - DNA, 18 bp, Homo sapiens
caccactacactccagcc

SEQ ID NO: 25654 - DNA, 18 bp, Homo sapiens
ccaccaggctgccctttc

SEQ ID NO: 25655 - DNA, 24 bp, Homo sapiens
ccctgattctagaaaaccacatac

SEQ ID NO: 25656 - DNA, 16 bp, Homo sapiens
tgcagccagatggtgc

SEQ ID NO: 25657 - DNA, 24 bp, Homo sapiens
tccctgccctaaggaaggaagcct

SEQ ID NO: 25658 - DNA, 24 bp, Homo sapiens
ctccagtgtctggctggtgggtac

SEQ ID NO: 25659 - DNA, 16 bp, Homo sapiens
agcctgctgggacacc

SEQ ID NO: 25660 - DNA, 18 bp, Homo sapiens
ggggttctgatggggaac

SEQ ID NO: 25661 - DNA, 18 bp, Homo sapiens
cgagaccctgtgtatggc

SEQ ID NO: 25662 - DNA, 23 bp, Homo sapiens
cctgggcaacaagagtgaaactc

SEQ ID NO: 25663 - DNA, 21 bp, Homo sapiens
tctcagcttccacggatgggc

SEQ ID NO: 25664 - DNA, 20 bp, Homo sapiens
tgtcccaccacatgacctgg

SEQ ID NO: 25665 - DNA, 24 bp, Homo sapiens
atcctcaaagtgtatttgctccca

SEQ ID NO: 25666 - DNA, 24 bp, Homo sapiens
ccaactgttccttcttggtgatgt

SEQ ID NO: 25667 - DNA, 17 bp, Homo sapiens
gacggtggggtgagggc

SEQ ID NO: 25668 - DNA, 22 bp, Homo sapiens
ggacactcaccaaagtagattc

SEQ ID NO: 25669 - DNA, 21 bp, Homo sapiens
gaagtctcactgtcgcccctc

SEQ ID NO: 25670 - DNA, 19 bp, Homo sapiens
aatggcctgtctttagccc

SEQ ID NO: 25671 - DNA, 20 bp, Homo sapiens
gagcccactgaagttgtgat

SEQ ID NO: 25672 - DNA, 18 bp, Homo sapiens
cagtgagggtggcctccc

SEQ ID NO: 25673 - DNA, 24 bp, Homo sapiens
gggccatctccctggagttcgaat

SEQ ID NO: 25674 - DNA, 19 bp, Homo sapiens
ccaccatgaacttggtggg

SEQ ID NO: 25675 - DNA, 16 bp, Homo sapiens
gggccacagcccttgc

SEQ ID NO: 25676 - DNA, 23 bp, Homo sapiens
acacaatcttttcagctgacgtc

SEQ ID NO: 25677 - DNA, 17 bp, Homo sapiens
caagctcctgtccatgc

SEQ ID NO: 25678 - DNA, 24 bp, Homo sapiens
ggtagaaggggtttctctggaggg

SEQ ID NO: 25679 - DNA, 17 bp, Homo sapiens
gtcactccttccacagc

SEQ ID NO: 25680 - DNA, 18 bp, Homo sapiens
tgtcttcagaccaaatgc

SEQ ID NO: 25681 - DNA, 24 bp, Homo sapiens
tcgtcatctcctgcaaccgcaagg

SEQ ID NO: 25682 - DNA, 24 bp, Homo sapiens
tgtctcctgcatcccctcctgtcc

SEQ ID NO: 25683 - DNA, 18 bp, Homo sapiens
atcatggccccatctacg

SEQ ID NO: 25684 - DNA, 16 bp, Homo sapiens
ggaggctcgggactct

SEQ ID NO: 25685 - DNA, 16 bp, Homo sapiens
ttggcgactggacagc

SEQ ID NO: 25686 - DNA, 19 bp, Homo sapiens
ggagcaagtcacttgctaa

SEQ ID NO: 25687 - DNA, 18 bp, Homo sapiens
atcagtgaggtaagccat

SEQ ID NO: 25688 - DNA, 23 bp, Homo sapiens
agtcagacacaaggaagaacttc

SEQ ID NO: 25689 - DNA, 17 bp, Homo sapiens
cagggttccgtccatcc

SEQ ID NO: 25690 - DNA, 24 bp, Homo sapiens
agaagggaccaagtgagccaagct

SEQ ID NO: 25691 - DNA, 16 bp, Homo sapiens
cgtgaccttcaagctg

SEQ ID NO: 25692 - DNA, 21 bp, Homo sapiens
gtctacctcccacaggtacca

SEQ ID NO: 25693 - DNA, 17 bp, Homo sapiens
cacactcacacccacgc

SEQ ID NO: 25694 - DNA, 21 bp, Homo sapiens
ccgaccgttttctttaccacc

SEQ ID NO: 25695 - DNA, 24 bp, Homo sapiens
tgcacacggctcccccacagaggc

SEQ ID NO: 25696 - DNA, 22 bp, Homo sapiens
cgagcagtgcgatcccaccctc

SEQ ID NO: 25697 - DNA, 19 bp, Homo sapiens
gtcctgcacccggaggcag

SEQ ID NO: 25698 - DNA, 18 bp, Homo sapiens
cgtcctgaggatgtttga

SEQ ID NO: 25699 - DNA, 17 bp, Homo sapiens
tccagcagggtggttgt

SEQ ID NO: 25700 - DNA, 21 bp, Homo sapiens
atcagacacacataactttgc

SEQ ID NO: 25701 - DNA, 17 bp, Homo sapiens
ggtgcttacggaagagg

SEQ ID NO: 25702 - DNA, 24 bp, Homo sapiens
cttcaataggtgtgtgacgaggcc

SEQ ID NO: 25703 - DNA, 16 bp, Homo sapiens
tgctctgctgtggggc

SEQ ID NO: 25704 - DNA, 17 bp, Homo sapiens
ggctcccagctggggac

SEQ ID NO: 25705 - DNA, 17 bp, Homo sapiens
tcccccaaaatgtgcac

SEQ ID NO: 25706 - DNA, 23 bp, Homo sapiens
ccctccagaggaatgagaagaac

SEQ ID NO: 25707 - DNA, 24 bp, Homo sapiens
gatcttctctcgccgggtctcacg

SEQ ID NO: 25708 - DNA, 22 bp, Homo sapiens
tacagacctctacagtacaggg

SEQ ID NO: 25709 - DNA, 18 bp, Homo sapiens
ctccgccttacccttctc

SEQ ID NO: 25710 - DNA, 24 bp, Homo sapiens
cccacctggccccagcactggagt

SEQ ID NO: 25711 - DNA, 16 bp, Homo sapiens
gaccagcgcctccagg

SEQ ID NO: 25712 - DNA, 22 bp, Homo sapiens
cctgggtgcccagatgtttgag

SEQ ID NO: 25713 - DNA, 23 bp, Homo sapiens
ttatggcgtctgcctccttcttc

SEQ ID NO: 25714 - DNA, 23 bp, Homo sapiens
caggcaccgggagatgcggctga

SEQ ID NO: 25715 - DNA, 16 bp, Homo sapiens
cccaacccacccaacc

SEQ ID NO: 25716 - DNA, 18 bp, Homo sapiens
aggagctggccgtagacc

SEQ ID NO: 25717 - DNA, 22 bp, Homo sapiens
tgctcaaggtcacccaggaagt

SEQ ID NO: 25718 - DNA, 21 bp, Homo sapiens
tcgacatcatcttcgcagagc

SEQ ID NO: 25719 - DNA, 21 bp, Homo sapiens
ggaataattcttcccacttgc

SEQ ID NO: 25720 - DNA, 22 bp, Homo sapiens
ttctggacttggttgctgctgc

SEQ ID NO: 25721 - DNA, 16 bp, Homo sapiens
gagctggcacccgggt

SEQ ID NO: 25722 - DNA, 17 bp, Homo sapiens
ttcatccccttcttccc

SEQ ID NO: 25723 - DNA, 23 bp, Homo sapiens
tttggtcctcgtggggttcacat

SEQ ID NO: 25724 - DNA, 16 bp, Homo sapiens
cacagggatagcgccg

SEQ ID NO: 25725 - DNA, 24 bp, Homo sapiens
aacaccaacacttctgtgctgtct

SEQ ID NO: 25726 - DNA, 20 bp, Homo sapiens
tttaaggcggagctcagcct

SEQ ID NO: 25727 - DNA, 24 bp, Homo sapiens
ggtggtggaggagggagaggaagc

SEQ ID NO: 25728 - DNA, 21 bp, Homo sapiens
gatttgtaggggctggggagt

SEQ ID NO: 25729 - DNA, 18 bp, Homo sapiens
ccaagcatacacccacct

SEQ ID NO: 25730 - DNA, 16 bp, Homo sapiens
actacggcgggactgc

SEQ ID NO: 25731 - DNA, 17 bp, Homo sapiens
ccggatatggaagatgg

SEQ ID NO: 25732 - DNA, 16 bp, Homo sapiens
gcaggagcggcagctt

SEQ ID NO: 25733 - DNA, 16 bp, Homo sapiens
cctcaccgtgtgctgt

SEQ ID NO: 25734 - DNA, 19 bp, Homo sapiens
cctccgctgctccccacgc

SEQ ID NO: 25735 - DNA, 19 bp, Homo sapiens
gcttgagagaggtagaagg

SEQ ID NO: 25736 - DNA, 18 bp, Homo sapiens
tttatggcagccgcatga

SEQ ID NO: 25737 - DNA, 16 bp, Homo sapiens
gggtgagtggcagggc

SEQ ID NO: 25738 - DNA, 18 bp, Homo sapiens
gtgagctgcccagagctg

SEQ ID NO: 25739 - DNA, 18 bp, Homo sapiens
cccacctggatgtgccgc

SEQ ID NO: 25740 - DNA, 16 bp, Homo sapiens
ggcacaggccggccca

SEQ ID NO: 25741 - DNA, 24 bp, Homo sapiens
cgtgcagccaccgaagccaccgcc

SEQ ID NO: 25742 - DNA, 23 bp, Homo sapiens
ttggccgcctcatggtggagagc

SEQ ID NO: 25743 - DNA, 22 bp, Homo sapiens
cgcagcctccaccagctggtcc

SEQ ID NO: 25744 - DNA, 16 bp, Homo sapiens
gattcggcgcacggcc

SEQ ID NO: 25745 - DNA, 20 bp, Homo sapiens
ggatattgaaggggtgggcc

SEQ ID NO: 25746 - DNA, 18 bp, Homo sapiens
ctgccagggacctggtga

SEQ ID NO: 25747 - DNA, 19 bp, Homo sapiens
tcacctgagtgagcggtgg

SEQ ID NO: 25748 - DNA, 17 bp, Homo sapiens
ctcacaggcgtcggggc

SEQ ID NO: 25749 - DNA, 16 bp, Homo sapiens
ctcagggcggccgctg

SEQ ID NO: 25750 - DNA, 16 bp, Homo sapiens
cgcggccttccaccct

SEQ ID NO: 25751 - DNA, 24 bp, Homo sapiens
gggcccgccggaagccctctttgc

SEQ ID NO: 25752 - DNA, 24 bp, Homo sapiens
tccgggaggtacaactggaagagc

SEQ ID NO: 25753 - DNA, 19 bp, Homo sapiens
gtttgaagggactggggag

SEQ ID NO: 25754 - DNA, 16 bp, Homo sapiens
taccctgtgcggcggc

SEQ ID NO: 25755 - DNA, 17 bp, Homo sapiens
aaggccacactgaggcg

SEQ ID NO: 25756 - DNA, 16 bp, Homo sapiens
ctggccgtgctcatca

SEQ ID NO: 25757 - DNA, 18 bp, Homo sapiens
cagttctcaccctctagc

SEQ ID NO: 25758 - DNA, 17 bp, Homo sapiens
cccattgtaactccacc

SEQ ID NO: 25759 - DNA, 18 bp, Homo sapiens
ccacttcttcacattggc

SEQ ID NO: 25760 - DNA, 16 bp, Homo sapiens
tgggtgggagtgtgcc

SEQ ID NO: 25761 - DNA, 16 bp, Homo sapiens
cggacattagagttgg

SEQ ID NO: 25762 - DNA, 17 bp, Homo sapiens
cgctgctcattgactgc

SEQ ID NO: 25763 - DNA, 17 bp, Homo sapiens
tctccaaggacctgggg

SEQ ID NO: 25764 - DNA, 18 bp, Homo sapiens
ggatgccctgtggcatca

SEQ ID NO: 25765 - DNA, 24 bp, Homo sapiens
cttgctgcgccaggcagtgggcac

SEQ ID NO: 25766 - DNA, 18 bp, Homo sapiens
ctcgggcacaatagctgc

SEQ ID NO: 25767 - DNA, 20 bp, Homo sapiens
ggacgaggggagcgagccca

SEQ ID NO: 25768 - DNA, 19 bp, Homo sapiens
cattgaagccactgctgct

SEQ ID NO: 25769 - DNA, 21 bp, Homo sapiens
gtgagatgaactggtccatga

SEQ ID NO: 25770 - DNA, 16 bp, Homo sapiens
ggtcccagcttctact

SEQ ID NO: 25771 - DNA, 24 bp, Homo sapiens
ggcctgctgacacacctgggcgcg

SEQ ID NO: 25772 - DNA, 20 bp, Homo sapiens
cagcagctctgtccaggtac

SEQ ID NO: 25773 - DNA, 16 bp, Homo sapiens
ctagggctggtggaag

SEQ ID NO: 25774 - DNA, 16 bp, Homo sapiens
gtggcctgtccagctc

SEQ ID NO: 25775 - DNA, 21 bp, Homo sapiens
caccccctccataaggcatag

SEQ ID NO: 25776 - DNA, 22 bp, Homo sapiens
ctgttctttcccctgcagctgc

SEQ ID NO: 25777 - DNA, 16 bp, Homo sapiens
agggctggggcctagc

SEQ ID NO: 25778 - DNA, 18 bp, Homo sapiens
ccaggacacctgcccttc

SEQ ID NO: 25779 - DNA, 22 bp, Homo sapiens
gccacttccaaggatgctgagc

SEQ ID NO: 25780 - DNA, 23 bp, Homo sapiens
cttctgacaattgagacacacac

SEQ ID NO: 25781 - DNA, 18 bp, Homo sapiens
actgcactgaagccaggg

SEQ ID NO: 25782 - DNA, 19 bp, Homo sapiens
ctatgtcaagggagtgatt

SEQ ID NO: 25783 - DNA, 24 bp, Homo sapiens
catctgtacaatgggatgctccac

SEQ ID NO: 25784 - DNA, 17 bp, Homo sapiens
gctgcagtttccactgc

SEQ ID NO: 25785 - DNA, 17 bp, Homo sapiens
tgtggctgtgaggtggc

SEQ ID NO: 25786 - DNA, 16 bp, Homo sapiens
ggatgggctggtgtct

SEQ ID NO: 25787 - DNA, 24 bp, Homo sapiens
ccatacctgggtagtactgaatca

SEQ ID NO: 25788 - DNA, 18 bp, Homo sapiens
cgtactgcttgtctctcc

SEQ ID NO: 25789 - DNA, 17 bp, Homo sapiens
gcgagcgctgggctgtg

SEQ ID NO: 25790 - DNA, 16 bp, Homo sapiens
gaacctcggctggagg

SEQ ID NO: 25791 - DNA, 24 bp, Homo sapiens
ctcagaggtggtgaggagagacac

SEQ ID NO: 25792 - DNA, 19 bp, Homo sapiens
ctcaggatcttccctgcga

SEQ ID NO: 25793 - DNA, 19 bp, Homo sapiens
catgagctccagagcctgg

SEQ ID NO: 25794 - DNA, 21 bp, Homo sapiens
gactcttccgtgcaccggtgc

SEQ ID NO: 25795 - DNA, 17 bp, Homo sapiens
tcagcgccgggccgcgt

SEQ ID NO: 25796 - DNA, 23 bp, Homo sapiens
ggaagaactcgcccccagcgtcc

SEQ ID NO: 25797 - DNA, 19 bp, Homo sapiens
ctggccgaggcccggcgag

SEQ ID NO: 25798 - DNA, 22 bp, Homo sapiens
ggctaggggctccccgtgcagc

SEQ ID NO: 25799 - DNA, 16 bp, Homo sapiens
agctgtgcagagctgc

SEQ ID NO: 25800 - DNA, 19 bp, Homo sapiens
ttccccgatgaggttgacg

SEQ ID NO: 25801 - DNA, 17 bp, Homo sapiens
cacccccgcgcggggcc

SEQ ID NO: 25802 - DNA, 20 bp, Homo sapiens
cgaactcctcccggaaggct

SEQ ID NO: 25803 - DNA, 17 bp, Homo sapiens
ccggctgaggtctgggg

SEQ ID NO: 25804 - DNA, 22 bp, Homo sapiens
tgtctcaaagcagccatgacgc

SEQ ID NO: 25805 - DNA, 16 bp, Homo sapiens
cttctggccctctccc

SEQ ID NO: 25806 - DNA, 16 bp, Homo sapiens
tcactcccatggttgg

SEQ ID NO: 25807 - DNA, 17 bp, Homo sapiens
ctgcctgggtgctgcag

SEQ ID NO: 25808 - DNA, 20 bp, Homo sapiens
tgcagcggttgccaaggaca

SEQ ID NO: 25809 - DNA, 16 bp, Homo sapiens
tgagtgccgcccctcc

SEQ ID NO: 25810 - DNA, 19 bp, Homo sapiens
cactcagctctcggggaac

SEQ ID NO: 25811 - DNA, 18 bp, Homo sapiens
gctgtccaggccatctcc

SEQ ID NO: 25812 - DNA, 16 bp, Homo sapiens
tggtctgctggctccc

SEQ ID NO: 25813 - DNA, 18 bp, Homo sapiens
ctcctggccgtctgcgcc

SEQ ID NO: 25814 - DNA, 16 bp, Homo sapiens
cgtcgcactgtgtggg

SEQ ID NO: 25815 - DNA, 18 bp, Homo sapiens
gatttcctgctggttccc

SEQ ID NO: 25816 - DNA, 19 bp, Homo sapiens
tcgcactgttcctgggtga

SEQ ID NO: 25817 - DNA, 24 bp, Homo sapiens
gagactcacccagctcaccagcag

SEQ ID NO: 25818 - DNA, 16 bp, Homo sapiens
cccatctgggctccct

SEQ ID NO: 25819 - DNA, 17 bp, Homo sapiens
gtcccagagcagtgccc

SEQ ID NO: 25820 - DNA, 23 bp, Homo sapiens
tttcagaggagctcaggttctcc

SEQ ID NO: 25821 - DNA, 18 bp, Homo sapiens
cctgacaaggccatcacc

SEQ ID NO: 25822 - DNA, 18 bp, Homo sapiens
tgtccttggggaagaagg

SEQ ID NO: 25823 - DNA, 24 bp, Homo sapiens
tacatccctgcaaagcaggggctg

SEQ ID NO: 25824 - DNA, 16 bp, Homo sapiens
caccgtgaagtggagg

SEQ ID NO: 25825 - DNA, 16 bp, Homo sapiens
ctaccccagctacaag

SEQ ID NO: 25826 - DNA, 17 bp, Homo sapiens
cgtgggtgtcgatgtcc

SEQ ID NO: 25827 - DNA, 16 bp, Homo sapiens
ccgtaccacccccacc

SEQ ID NO: 25828 - DNA, 16 bp, Homo sapiens
gctcccagcaagggcc

SEQ ID NO: 25829 - DNA, 22 bp, Homo sapiens
cgtgatgatggagactgagaac

SEQ ID NO: 25830 - DNA, 20 bp, Homo sapiens
gcctgttagctggatctttg

SEQ ID NO: 25831 - DNA, 24 bp, Homo sapiens
gctcagagaggctgaatgtgctgc

SEQ ID NO: 25832 - DNA, 17 bp, Homo sapiens
tagagtggggacggtgc

SEQ ID NO: 25833 - DNA, 22 bp, Homo sapiens
tccttggcgtgcgggttgttct

SEQ ID NO: 25834 - DNA, 24 bp, Homo sapiens
actcacagcacgcggccgtccagc

SEQ ID NO: 25835 - DNA, 24 bp, Homo sapiens
aataaacccccatctcttctagat

SEQ ID NO: 25836 - DNA, 16 bp, Homo sapiens
cgtgtgagaaatgcgc

SEQ ID NO: 25837 - DNA, 16 bp, Homo sapiens
gtccacagccgggcac

SEQ ID NO: 25838 - DNA, 24 bp, Homo sapiens
gagaaacaaacatgtgtcgccctg

SEQ ID NO: 25839 - DNA, 24 bp, Homo sapiens
ggagcccttcggggtgatcgtgcg

SEQ ID NO: 25840 - DNA, 16 bp, Homo sapiens
cgcctgtcccagggtc

SEQ ID NO: 25841 - DNA, 16 bp, Homo sapiens
cagcgaggtggacagc

SEQ ID NO: 25842 - DNA, 22 bp, Homo sapiens
gggcaccagggcccgggggtgc

SEQ ID NO: 25843 - DNA, 18 bp, Homo sapiens
agctggtgctgagcatca

SEQ ID NO: 25844 - DNA, 20 bp, Homo sapiens
tgtgagcaagcctggctggc

SEQ ID NO: 25845 - DNA, 16 bp, Homo sapiens
gcccgccgcccgccgc

SEQ ID NO: 25846 - DNA, 24 bp, Homo sapiens
ctgttctttgcggaccagttcctt

SEQ ID NO: 25847 - DNA, 23 bp, Homo sapiens
gttcgcaccgggctgggacatgc

SEQ ID NO: 25848 - DNA, 16 bp, Homo sapiens
gagcacctcagtcccc

SEQ ID NO: 25849 - DNA, 16 bp, Homo sapiens
cgacccgccgtcctcc

SEQ ID NO: 25850 - DNA, 16 bp, Homo sapiens
accttgcgcccacggt

SEQ ID NO: 25851 - DNA, 20 bp, Homo sapiens
ccggcccgggcgctgggcgg

SEQ ID NO: 25852 - DNA, 16 bp, Homo sapiens
gctgaagcgccgtctc

SEQ ID NO: 25853 - DNA, 17 bp, Homo sapiens
ggcccctcatgcggacc

SEQ ID NO: 25854 - DNA, 23 bp, Homo sapiens
gtctcaccctttctacctggcgc

SEQ ID NO: 25855 - DNA, 19 bp, Homo sapiens
gttgggagaggcatcagcc

SEQ ID NO: 25856 - DNA, 18 bp, Homo sapiens
gttcctcctgagtcaggc

SEQ ID NO: 25857 - DNA, 16 bp, Homo sapiens
atcccacctgtcgacc

SEQ ID NO: 25858 - DNA, 17 bp, Homo sapiens
gggagagagcctcaact

SEQ ID NO: 25859 - DNA, 16 bp, Homo sapiens
ccaggtactgctgcac

SEQ ID NO: 25860 - DNA, 23 bp, Homo sapiens
ctccaagtgaagaatctgtcccc

SEQ ID NO: 25861 - DNA, 16 bp, Homo sapiens
ggagggaggagggagc

SEQ ID NO: 25862 - DNA, 18 bp, Homo sapiens
ctgcccttagctggaggt

SEQ ID NO: 25863 - DNA, 16 bp, Homo sapiens
ggccccagtatggcgg

SEQ ID NO: 25864 - DNA, 24 bp, Homo sapiens
gcccagagcccaagagcgtggtgc

SEQ ID NO: 25865 - DNA, 19 bp, Homo sapiens
catgttctccaccacctgg

SEQ ID NO: 25866 - DNA, 18 bp, Homo sapiens
cggcccccgccccaaggc

SEQ ID NO: 25867 - DNA, 17 bp, Homo sapiens
ccagccccttgcctccc

SEQ ID NO: 25868 - DNA, 19 bp, Homo sapiens
gcaggatacccgttcatgc

SEQ ID NO: 25869 - DNA, 17 bp, Homo sapiens
gtcctgcagccacaaca

SEQ ID NO: 25870 - DNA, 23 bp, Homo sapiens
ggctactcctccaccgctatcac

SEQ ID NO: 25871 - DNA, 20 bp, Homo sapiens
gccatccttgttgaacgtga

SEQ ID NO: 25872 - DNA, 16 bp, Homo sapiens
gagttggggtggtggc

SEQ ID NO: 25873 - DNA, 18 bp, Homo sapiens
tcatcatgtagcgccggc

SEQ ID NO: 25874 - DNA, 16 bp, Homo sapiens
ccagcagacggtcccg

SEQ ID NO: 25875 - DNA, 16 bp, Homo sapiens
gccactgggcaccggg

SEQ ID NO: 25876 - DNA, 24 bp, Homo sapiens
actacatggactcccggagggact

SEQ ID NO: 25877 - DNA, 19 bp, Homo sapiens
gaccctcagaaaacatcct

SEQ ID NO: 25878 - DNA, 18 bp, Homo sapiens
caggagctgcaccagggc

SEQ ID NO: 25879 - DNA, 17 bp, Homo sapiens
ctgctgatggcaggatc

SEQ ID NO: 25880 - DNA, 24 bp, Homo sapiens
ggcatgtgcaggtacacaggcagg

SEQ ID NO: 25881 - DNA, 20 bp, Homo sapiens
tcgttggtgatgaaaacccc

SEQ ID NO: 25882 - DNA, 24 bp, Homo sapiens
catcctctcactgtctcagttttc

SEQ ID NO: 25883 - DNA, 22 bp, Homo sapiens
tctaacccccgtcccctggacc

SEQ ID NO: 25884 - DNA, 20 bp, Homo sapiens
ttccctcttcccaggatcct

SEQ ID NO: 25885 - DNA, 20 bp, Homo sapiens
cctcaaatcccaccgtcttc

SEQ ID NO: 25886 - DNA, 17 bp, Homo sapiens
gacgagggtctgcggag

SEQ ID NO: 25887 - DNA, 16 bp, Homo sapiens
atcgtcacgggccact

SEQ ID NO: 25888 - DNA, 16 bp, Homo sapiens
gcagtggacccgggcc

SEQ ID NO: 25889 - DNA, 24 bp, Homo sapiens
cagggtgcaggtctctcagatttg

SEQ ID NO: 25890 - DNA, 22 bp, Homo sapiens
atggaactcagccaccatgtcc

SEQ ID NO: 25891 - DNA, 17 bp, Homo sapiens
ggctcagtggggcttcc

SEQ ID NO: 25892 - DNA, 17 bp, Homo sapiens
ggatgctcaggaggggg

SEQ ID NO: 25893 - DNA, 18 bp, Homo sapiens
ctcgttgtccaggtatgg

SEQ ID NO: 25894 - DNA, 16 bp, Homo sapiens
ctggtaggtgactctg

SEQ ID NO: 25895 - DNA, 17 bp, Homo sapiens
ctggcctggtgggagga

SEQ ID NO: 25896 - DNA, 16 bp, Homo sapiens
cagccgtcctcagagc

SEQ ID NO: 25897 - DNA, 21 bp, Homo sapiens
catgtggattgtaagtgtggc

SEQ ID NO: 25898 - DNA, 17 bp, Homo sapiens
ggtaggtggggggcgag

SEQ ID NO: 25899 - DNA, 17 bp, Homo sapiens
cctcctcactctgggca

SEQ ID NO: 25900 - DNA, 24 bp, Homo sapiens
ttctcagagatgagggtgctaagt

SEQ ID NO: 25901 - DNA, 17 bp, Homo sapiens
agccttccaacttcatc

SEQ ID NO: 25902 - DNA, 23 bp, Homo sapiens
ctgagcctttctcctggggatcc

SEQ ID NO: 25903 - DNA, 16 bp, Homo sapiens
gccgcctggagggtcc

SEQ ID NO: 25904 - DNA, 16 bp, Homo sapiens
cctccagggccagcct

SEQ ID NO: 25905 - DNA, 17 bp, Homo sapiens
gtagaggttgtgcaggt

SEQ ID NO: 25906 - DNA, 17 bp, Homo sapiens
gagggcaccttggagcc

SEQ ID NO: 25907 - DNA, 16 bp, Homo sapiens
gcagagcccagtgggg

SEQ ID NO: 25908 - DNA, 19 bp, Homo sapiens
aggggtggttggggggacc

SEQ ID NO: 25909 - DNA, 18 bp, Homo sapiens
tccgcttttcctcctccc

SEQ ID NO: 25910 - DNA, 24 bp, Homo sapiens
agtttctctccacacactacaacc

SEQ ID NO: 25911 - DNA, 24 bp, Homo sapiens
ggctggggtgcaggcagcgggtgg

SEQ ID NO: 25912 - DNA, 17 bp, Homo sapiens
acaaatgggcgtgtccc

SEQ ID NO: 25913 - DNA, 16 bp, Homo sapiens
cctccccagcctctgc

SEQ ID NO: 25914 - DNA, 16 bp, Homo sapiens
gtcccccgtccagtgg

SEQ ID NO: 25915 - DNA, 20 bp, Homo sapiens
gacagggttcccgagtgacc

SEQ ID NO: 25916 - DNA, 17 bp, Homo sapiens
ccctcctggtaggagct

SEQ ID NO: 25917 - DNA, 17 bp, Homo sapiens
ggtgaaggctcggggga

SEQ ID NO: 25918 - DNA, 17 bp, Homo sapiens
taagtgggtggggggcc

SEQ ID NO: 25919 - DNA, 16 bp, Homo sapiens
acggccgatacgccgg

SEQ ID NO: 25920 - DNA, 16 bp, Homo sapiens
ctggtcctcaggctgc

SEQ ID NO: 25921 - DNA, 16 bp, Homo sapiens
gtgccaggtgagctcc

SEQ ID NO: 25922 - DNA, 23 bp, Homo sapiens
gtcggccccgaccagaggcaccc

SEQ ID NO: 25923 - DNA, 19 bp, Homo sapiens
ggcctctatgggaggcttg

SEQ ID NO: 25924 - DNA, 18 bp, Homo sapiens
gtccagcgcacacacagc

SEQ ID NO: 25925 - DNA, 24 bp, Homo sapiens
tcacttggcctgagctggctctgc

SEQ ID NO: 25926 - DNA, 21 bp, Homo sapiens
caccctaccagactgagcagg

SEQ ID NO: 25927 - DNA, 24 bp, Homo sapiens
agaaatcctgcagtttaacctgct

SEQ ID NO: 25928 - DNA, 17 bp, Homo sapiens
ttcccaggggagagtct

SEQ ID NO: 25929 - DNA, 16 bp, Homo sapiens
aacacctcagaggagc

SEQ ID NO: 25930 - DNA, 17 bp, Homo sapiens
gcctcgggagagctgca

SEQ ID NO: 25931 - DNA, 22 bp, Homo sapiens
cttcatgcggaaccacaacagc

SEQ ID NO: 25932 - DNA, 24 bp, Homo sapiens
caggtgggcgatcccacccaccca

SEQ ID NO: 25933 - DNA, 16 bp, Homo sapiens
gggccttcctcatggc

SEQ ID NO: 25934 - DNA, 18 bp, Homo sapiens
catgctgggtggctgaga

SEQ ID NO: 25935 - DNA, 24 bp, Homo sapiens
cggtctcccccgcgacgtgggcct

SEQ ID NO: 25936 - DNA, 23 bp, Homo sapiens
cagcacccaagtgcttcctttgc

SEQ ID NO: 25937 - DNA, 16 bp, Homo sapiens
gccaccgcccctgcct

SEQ ID NO: 25938 - DNA, 17 bp, Homo sapiens
agccggcccagcaggcc

SEQ ID NO: 25939 - DNA, 17 bp, Homo sapiens
cccacagcaggacaggg

SEQ ID NO: 25940 - DNA, 24 bp, Homo sapiens
cccacctctacacactgttccacc

SEQ ID NO: 25941 - DNA, 17 bp, Homo sapiens
cccccttaagccaggcc

SEQ ID NO: 25942 - DNA, 19 bp, Homo sapiens
gcccgtctgacctgagtcc

SEQ ID NO: 25943 - DNA, 16 bp, Homo sapiens
gggtgatgagcagggc

SEQ ID NO: 25944 - DNA, 17 bp, Homo sapiens
cctcttcctgtgcctcc

SEQ ID NO: 25945 - DNA, 18 bp, Homo sapiens
taccatgtgcccaagggg

SEQ ID NO: 25946 - DNA, 20 bp, Homo sapiens
cgtatgcctgtgtgcccatc

SEQ ID NO: 25947 - DNA, 18 bp, Homo sapiens
gctctggtctcccgtctc

SEQ ID NO: 25948 - DNA, 17 bp, Homo sapiens
cagctcctgtgggggga

SEQ ID NO: 25949 - DNA, 22 bp, Homo sapiens
cacatacgttcctctttccgcc

SEQ ID NO: 25950 - DNA, 22 bp, Homo sapiens
gccgaagtgactggctacttcc

SEQ ID NO: 25951 - DNA, 16 bp, Homo sapiens
gctgatgggtgcggag

SEQ ID NO: 25952 - DNA, 17 bp, Homo sapiens
caggtgggggtgggagg

SEQ ID NO: 25953 - DNA, 24 bp, Homo sapiens
ccgtctgtgccaggcctcctaggc

SEQ ID NO: 25954 - DNA, 24 bp, Homo sapiens
gtccaggggggccggcagcgtcac

SEQ ID NO: 25955 - DNA, 24 bp, Homo sapiens
ggttcctgaggacagcatgggggc

SEQ ID NO: 25956 - DNA, 17 bp, Homo sapiens
ggtacctgcagggggat

SEQ ID NO: 25957 - DNA, 16 bp, Homo sapiens
tagaggcccttggcag

SEQ ID NO: 25958 - DNA, 16 bp, Homo sapiens
tgtgcctcccccagct

SEQ ID NO: 25959 - DNA, 17 bp, Homo sapiens
ccacagcgaggggcagt

SEQ ID NO: 25960 - DNA, 24 bp, Homo sapiens
cttgataacctacactgcgggggg

SEQ ID NO: 25961 - DNA, 18 bp, Homo sapiens
gggctgggtacatcatcc

SEQ ID NO: 25962 - DNA, 17 bp, Homo sapiens
ggaaggtcttgggtcat

SEQ ID NO: 25963 - DNA, 16 bp, Homo sapiens
ggccatgggctgctgg

SEQ ID NO: 25964 - DNA, 24 bp, Homo sapiens
ttcctgcagatcctagttactggc

SEQ ID NO: 25965 - DNA, 16 bp, Homo sapiens
tcgtcccagaacagct

SEQ ID NO: 25966 - DNA, 24 bp, Homo sapiens
tggaggcctccacctccaccaggg

SEQ ID NO: 25967 - DNA, 22 bp, Homo sapiens
cattcctggccaggaagatgac

SEQ ID NO: 25968 - DNA, 19 bp, Homo sapiens
cctcacaaccacagagtcc

SEQ ID NO: 25969 - DNA, 18 bp, Homo sapiens
ctcaccccttctcaaccc

SEQ ID NO: 25970 - DNA, 16 bp, Homo sapiens
gaggcccgaggggagc

SEQ ID NO: 25971 - DNA, 21 bp, Homo sapiens
ccacctgctagagtgtcctag

SEQ ID NO: 25972 - DNA, 17 bp, Homo sapiens
aggggcctacacacagg

SEQ ID NO: 25973 - DNA, 17 bp, Homo sapiens
agtggggccgtgcactc

SEQ ID NO: 25974 - DNA, 18 bp, Homo sapiens
cttctgcagctgcaggcc

SEQ ID NO: 25975 - DNA, 20 bp, Homo sapiens
atgagtccctgttctcatgg

SEQ ID NO: 25976 - DNA, 22 bp, Homo sapiens
aagttggagacagggacaccgt

SEQ ID NO: 25977 - DNA, 24 bp, Homo sapiens
cacattctctgccttttcatctct

SEQ ID NO: 25978 - DNA, 17 bp, Homo sapiens
cgatccctgtgccactc

SEQ ID NO: 25979 - DNA, 20 bp, Homo sapiens
gtgaccagtgagggagctgg

SEQ ID NO: 25980 - DNA, 16 bp, Homo sapiens
tcctggcatcggtcac

SEQ ID NO: 25981 - DNA, 16 bp, Homo sapiens
ccccagcaggtcctct

SEQ ID NO: 25982 - DNA, 16 bp, Homo sapiens
gtggcctgacccttcc

SEQ ID NO: 25983 - DNA, 17 bp, Homo sapiens
cggggaggaaccgggtg

SEQ ID NO: 25984 - DNA, 20 bp, Homo sapiens
tgacgagaaactgctctccc

SEQ ID NO: 25985 - DNA, 19 bp, Homo sapiens
cctcgctgctgctgggatc

SEQ ID NO: 25986 - DNA, 16 bp, Homo sapiens
ggaaccagcctccctc

SEQ ID NO: 25987 - DNA, 19 bp, Homo sapiens
tctcactgctgctgggatc

SEQ ID NO: 25988 - DNA, 18 bp, Homo sapiens
caggtgacacatgcaacc

SEQ ID NO: 25989 - DNA, 24 bp, Homo sapiens
gacatctgtgtctcgctgttgatg

SEQ ID NO: 25990 - DNA, 16 bp, Homo sapiens
cccaggaggtggaaac

SEQ ID NO: 25991 - DNA, 24 bp, Homo sapiens
agagcgcgaacggcttctaaattt

SEQ ID NO: 25992 - DNA, 24 bp, Homo sapiens
ctacgttcaaagctgctgccaaac

SEQ ID NO: 25993 - DNA, 20 bp, Homo sapiens
agggccatcagtaaataaag

SEQ ID NO: 25994 - DNA, 18 bp, Homo sapiens
gatgcagcacccgtccag

SEQ ID NO: 25995 - DNA, 17 bp, Homo sapiens
atgcccagccaactagc

SEQ ID NO: 25996 - DNA, 21 bp, Homo sapiens
ctgcgagagggctagaaattt

SEQ ID NO: 25997 - DNA, 22 bp, Homo sapiens
ctggtctcaagcaattctcctg

SEQ ID NO: 25998 - DNA, 24 bp, Homo sapiens
gctcttcagtggcacaacttttgg

SEQ ID NO: 25999 - DNA, 24 bp, Homo sapiens
gtcttactcagttacataggtaag

SEQ ID NO: 26000 - DNA, 24 bp, Homo sapiens
gaaatttttttactcagtatcatt

SEQ ID NO: 26001 - DNA, 22 bp, Homo sapiens
ctacttcaggatgtatttggcc

SEQ ID NO: 26002 - DNA, 20 bp, Homo sapiens
ttgaaaagaatgcctcagga

SEQ ID NO: 26003 - DNA, 22 bp, Homo sapiens
atttggagggattgtggtgttg

SEQ ID NO: 26004 - DNA, 22 bp, Homo sapiens
ccacccttttaagatgagaact

SEQ ID NO: 26005 - DNA, 20 bp, Homo sapiens
aaagtggtttctaacacagt

SEQ ID NO: 26006 - DNA, 20 bp, Homo sapiens
tgagtggctcccagtaagac

SEQ ID NO: 26007 - DNA, 19 bp, Homo sapiens
aatcacttgaacctgggag

SEQ ID NO: 26008 - DNA, 24 bp, Homo sapiens
gaaaatttgagatttggcaaaagc

SEQ ID NO: 26009 - DNA, 16 bp, Homo sapiens
gcatggtggcgtgcac

SEQ ID NO: 26010 - DNA, 23 bp, Homo sapiens
gtccacgatgtggcagctaattc

SEQ ID NO: 26011 - DNA, 19 bp, Homo sapiens
gcgttcacggtgagcatga

SEQ ID NO: 26012 - DNA, 24 bp, Homo sapiens
gctttgtaagtacaggatccagac

SEQ ID NO: 26013 - DNA, 21 bp, Homo sapiens
ggaagtgctttatttcagagc

SEQ ID NO: 26014 - DNA, 20 bp, Homo sapiens
cgtggccctgctcagggtac

SEQ ID NO: 26015 - DNA, 23 bp, Homo sapiens
aattagcacccatcctcagaacg

SEQ ID NO: 26016 - DNA, 18 bp, Homo sapiens
cgcgctccacgcggctgc

SEQ ID NO: 26017 - DNA, 24 bp, Homo sapiens
ccttgtaagtccaatgggatgctt

SEQ ID NO: 26018 - DNA, 23 bp, Homo sapiens
aactccacggagatgccacagct

SEQ ID NO: 26019 - DNA, 24 bp, Homo sapiens
tgaacgctgtatccttggtcaacc

SEQ ID NO: 26020 - DNA, 24 bp, Homo sapiens
tctccatgtgtgccaagagcaagc

SEQ ID NO: 26021 - DNA, 19 bp, Homo sapiens
ccatcgccatggtcttggt

SEQ ID NO: 26022 - DNA, 24 bp, Homo sapiens
acatggaatctaagacagccaatt

SEQ ID NO: 26023 - DNA, 17 bp, Homo sapiens
tgaccatggtcctcctg

SEQ ID NO: 26024 - DNA, 24 bp, Homo sapiens
gactgtatgaggactcaccatcac

SEQ ID NO: 26025 - DNA, 22 bp, Homo sapiens
agtacctgaccatcattgacga

SEQ ID NO: 26026 - DNA, 22 bp, Homo sapiens
agccacataactccaaacatgt

SEQ ID NO: 26027 - DNA, 22 bp, Homo sapiens
agtgagagcgagctttaatgag

SEQ ID NO: 26028 - DNA, 17 bp, Homo sapiens
cagagctcacagcccag

SEQ ID NO: 26029 - DNA, 21 bp, Homo sapiens
aaaggagtctgaccacttggc

SEQ ID NO: 26030 - DNA, 24 bp, Homo sapiens
gacacaccgaggttgaagatagtg

SEQ ID NO: 26031 - DNA, 18 bp, Homo sapiens
agttgctttcggtgagtc

SEQ ID NO: 26032 - DNA, 20 bp, Homo sapiens
taccgagtatttccttacag

SEQ ID NO: 26033 - DNA, 23 bp, Homo sapiens
tgatatactgccctgtgctcaga

SEQ ID NO: 26034 - DNA, 23 bp, Homo sapiens
tctgaagaaagcccgacttatag

SEQ ID NO: 26035 - DNA, 21 bp, Homo sapiens
atcttgccaagggaaccctcc

SEQ ID NO: 26036 - DNA, 21 bp, Homo sapiens
gtacttcatgacctaccacac

SEQ ID NO: 26037 - DNA, 24 bp, Homo sapiens
cattgaaaaagggcaggctttacc

SEQ ID NO: 26038 - DNA, 19 bp, Homo sapiens
gctgcctatagttctgcag

SEQ ID NO: 26039 - DNA, 24 bp, Homo sapiens
ccatggtttcggtgacattactgg

SEQ ID NO: 26040 - DNA, 20 bp, Homo sapiens
gctgatattttgcaagacct

SEQ ID NO: 26041 - DNA, 21 bp, Homo sapiens
cagaggtctgcagcacggtgt

SEQ ID NO: 26042 - DNA, 18 bp, Homo sapiens
ggtctgacctctgagtcc

SEQ ID NO: 26043 - DNA, 23 bp, Homo sapiens
ccatggccaaggaggatgttaac

SEQ ID NO: 26044 - DNA, 22 bp, Homo sapiens
gtgttttcggttttcctgcttc

SEQ ID NO: 26045 - DNA, 19 bp, Homo sapiens
ggagacttcatgagattcc

SEQ ID NO: 26046 - DNA, 22 bp, Homo sapiens
gttcccatgcaactgtcttagc

SEQ ID NO: 26047 - DNA, 16 bp, Homo sapiens
gaccctgcctgcgttc

SEQ ID NO: 26048 - DNA, 19 bp, Homo sapiens
cttatctgcaatggcagca

SEQ ID NO: 26049 - DNA, 22 bp, Homo sapiens
ttttacaaaaaatctggagacc

SEQ ID NO: 26050 - DNA, 23 bp, Homo sapiens
cgaaaggaacatgggcaggaatc

SEQ ID NO: 26051 - DNA, 24 bp, Homo sapiens
tcactagtaaggaaagtaatcgat

SEQ ID NO: 26052 - DNA, 20 bp, Homo sapiens
cggagtcagaggcctgcagc

SEQ ID NO: 26053 - DNA, 21 bp, Homo sapiens
cgagtggacaatatcactgac

SEQ ID NO: 26054 - DNA, 24 bp, Homo sapiens
gatgacacagggagacccagcttt

SEQ ID NO: 26055 - DNA, 18 bp, Homo sapiens
cgtcctggatcgacgatt

SEQ ID NO: 26056 - DNA, 26 bp, Homo sapiens
gcaaatgatttttaaatgataatttg

SEQ ID NO: 26057 - DNA, 22 bp, Homo sapiens
acttcctccctgtggagcaggt

SEQ ID NO: 26058 - DNA, 19 bp, Homo sapiens
acctgaagcattgcagaac

SEQ ID NO: 26059 - DNA, 24 bp, Homo sapiens
gcagtataaaacgtagaaaaggaa

SEQ ID NO: 26060 - DNA, 20 bp, Homo sapiens
tcacccagtcgaaataatcg

SEQ ID NO: 26061 - DNA, 23 bp, Homo sapiens
ctaatactttgaaggcttttttc

SEQ ID NO: 26062 - DNA, 24 bp, Homo sapiens
cctttcaaaggttttttaaggtaa

SEQ ID NO: 26063 - DNA, 20 bp, Homo sapiens
gcatgggctgcaacaatgat

SEQ ID NO: 26064 - DNA, 23 bp, Homo sapiens
agaaagtctattttcagtgagac

SEQ ID NO: 26065 - DNA, 16 bp, Homo sapiens
tcctggaggaagggca

SEQ ID NO: 26066 - DNA, 17 bp, Homo sapiens
tccgctgcttctgaagt

SEQ ID NO: 26067 - DNA, 22 bp, Homo sapiens
tggtggattatttcaaatccat

SEQ ID NO: 26068 - DNA, 20 bp, Homo sapiens
cgttaaatatctgctgcacc

SEQ ID NO: 26069 - DNA, 24 bp, Homo sapiens
tagttactatcagagtgttcacac

SEQ ID NO: 26070 - DNA, 20 bp, Homo sapiens
gccccttggaagaagtgtag

SEQ ID NO: 26071 - DNA, 17 bp, Homo sapiens
tctcagccaggaacctc

SEQ ID NO: 26072 - DNA, 18 bp, Homo sapiens
gcaggtactgactgatgg

SEQ ID NO: 26073 - DNA, 16 bp, Homo sapiens
cctggggccctggggg

SEQ ID NO: 26074 - DNA, 19 bp, Homo sapiens
gatcagtctctttcgatgc

SEQ ID NO: 26075 - DNA, 23 bp, Homo sapiens
cctaaccctggaaaccctgtcac

SEQ ID NO: 26076 - DNA, 20 bp, Homo sapiens
atttgtgggtgttctgtcat

SEQ ID NO: 26077 - DNA, 22 bp, Homo sapiens
tacgtgcatgttttgaaaaatg

SEQ ID NO: 26078 - DNA, 23 bp, Homo sapiens
ggtcgtaagcttatttactaagc

SEQ ID NO: 26079 - DNA, 20 bp, Homo sapiens
gaagtcatcttacatctggc

SEQ ID NO: 26080 - DNA, 22 bp, Homo sapiens
ttaagcttttccattttaaaaa

SEQ ID NO: 26081 - DNA, 24 bp, Homo sapiens
tgttcaggactgcgatgctgaatg

SEQ ID NO: 26082 - DNA, 17 bp, Homo sapiens
gactcctggtgctgtgg

SEQ ID NO: 26083 - DNA, 23 bp, Homo sapiens
aaacattttatctactgttccac

SEQ ID NO: 26084 - DNA, 22 bp, Homo sapiens
tttgtttcgcttcttcaaaaac

SEQ ID NO: 26085 - DNA, 24 bp, Homo sapiens
acagctttaagaatctccttccca

SEQ ID NO: 26086 - DNA, 16 bp, Homo sapiens
gctgtgtcagaggtgc

SEQ ID NO: 26087 - DNA, 23 bp, Homo sapiens
gtgagaggaaagagaaaaaccac

SEQ ID NO: 26088 - DNA, 23 bp, Homo sapiens
aagcagctagcgggtataacctt

SEQ ID NO: 26089 - DNA, 18 bp, Homo sapiens
gcagaagtggagaatagg

SEQ ID NO: 26090 - DNA, 19 bp, Homo sapiens
gaggtaagttggtgccagg

SEQ ID NO: 26091 - DNA, 22 bp, Homo sapiens
cctggacgcttgttccatcttc

SEQ ID NO: 26092 - DNA, 23 bp, Homo sapiens
tcttcattgactttcttctgcag

SEQ ID NO: 26093 - DNA, 24 bp, Homo sapiens
tgaggggacagagggaaacaaagg

SEQ ID NO: 26094 - DNA, 16 bp, Homo sapiens
gcattgtccgtgatgc

SEQ ID NO: 26095 - DNA, 24 bp, Homo sapiens
aattaaatagactataatcctggc

SEQ ID NO: 26096 - DNA, 16 bp, Homo sapiens
ctgcagagagcccccg

SEQ ID NO: 26097 - DNA, 22 bp, Homo sapiens
gagactcacgaaacaggtaatc

SEQ ID NO: 26098 - DNA, 17 bp, Homo sapiens
atgcgtttggcctgtgc

SEQ ID NO: 26099 - DNA, 24 bp, Homo sapiens
caaagagagagaaggtgtgcacgg

SEQ ID NO: 26100 - DNA, 23 bp, Homo sapiens
ggcagagtgagactccgtctcag

SEQ ID NO: 26101 - DNA, 17 bp, Homo sapiens
gctgggcagggtcctag

SEQ ID NO: 26102 - DNA, 24 bp, Homo sapiens
acacaaagggacatgttcaggtag

SEQ ID NO: 26103 - DNA, 24 bp, Homo sapiens
tgtcgcataatttttttttttttt

SEQ ID NO: 26104 - DNA, 24 bp, Homo sapiens
tggtaggattgaaagcataattac

SEQ ID NO: 26105 - DNA, 20 bp, Homo sapiens
ttgagttaacacaaggcagc

SEQ ID NO: 26106 - DNA, 21 bp, Homo sapiens
acatactgggagccacttctc

SEQ ID NO: 26107 - DNA, 19 bp, Homo sapiens
cccaccgaagtttatatgc

SEQ ID NO: 26108 - DNA, 20 bp, Homo sapiens
cccttgaagacgttcatctc

SEQ ID NO: 26109 - DNA, 21 bp, Homo sapiens
gagtggacaacatcttcattc

SEQ ID NO: 26110 - DNA, 22 bp, Homo sapiens
cacacagggaaaggaaacaaaa

SEQ ID NO: 26111 - DNA, 16 bp, Homo sapiens
tgggttgcccttgacc

SEQ ID NO: 26112 - DNA, 22 bp, Homo sapiens
gccattcacagtccctgaaact

SEQ ID NO: 26113 - DNA, 17 bp, Homo sapiens
ggcatcttgatcgtgct

SEQ ID NO: 26114 - DNA, 16 bp, Homo sapiens
cctggtaggcctgcac

SEQ ID NO: 26115 - DNA, 24 bp, Homo sapiens
cctgtaactaattggtgattgtgt

SEQ ID NO: 26116 - DNA, 24 bp, Homo sapiens
caggaacgggatgacttcaatcac

SEQ ID NO: 26117 - DNA, 21 bp, Homo sapiens
cagccctgtaaagtaaaaagg

SEQ ID NO: 26118 - DNA, 20 bp, Homo sapiens
aaggagcaagccaccgagct

SEQ ID NO: 26119 - DNA, 21 bp, Homo sapiens
agaaatgtttacaagtcctct

SEQ ID NO: 26120 - DNA, 19 bp, Homo sapiens
aaaagctgtcgcaggcttc

SEQ ID NO: 26121 - DNA, 24 bp, Homo sapiens
acagaaacgttacatacaattaaa

SEQ ID NO: 26122 - DNA, 23 bp, Homo sapiens
tcaccgttgtaattagctatgcc

SEQ ID NO: 26123 - DNA, 22 bp, Homo sapiens
taaagaggcaaaaatatgacgt

SEQ ID NO: 26124 - DNA, 22 bp, Homo sapiens
tttccttcactgctgaacgaag

SEQ ID NO: 26125 - DNA, 17 bp, Homo sapiens
ccccccggcttaccaga

SEQ ID NO: 26126 - DNA, 24 bp, Homo sapiens
cattttgcttaccttttaggttta

SEQ ID NO: 26127 - DNA, 19 bp, Homo sapiens
tatagaaacatgatggcat

SEQ ID NO: 26128 - DNA, 21 bp, Homo sapiens
gaaagttagggagaagtttct

SEQ ID NO: 26129 - DNA, 24 bp, Homo sapiens
actttcacgatttagttcatcttc

SEQ ID NO: 26130 - DNA, 20 bp, Homo sapiens
agagcgagaatcagtctcaa

SEQ ID NO: 26131 - DNA, 24 bp, Homo sapiens
gggattcttgtagtttttcacaaa

SEQ ID NO: 26132 - DNA, 24 bp, Homo sapiens
acagtttcttcttagcatcattag

SEQ ID NO: 26133 - DNA, 22 bp, Homo sapiens
tgtgattaccttccctgtcaat

SEQ ID NO: 26134 - DNA, 24 bp, Homo sapiens
ttggttaatttagaaaatgaagtt

SEQ ID NO: 26135 - DNA, 23 bp, Homo sapiens
gctttttgatgtcacatttttcc

SEQ ID NO: 26136 - DNA, 22 bp, Homo sapiens
aaggacagtctgctcacaccca

SEQ ID NO: 26137 - DNA, 18 bp, Homo sapiens
gtgttgtgatttttcccc

SEQ ID NO: 26138 - DNA, 24 bp, Homo sapiens
tggagcttctctgtatcattatag

SEQ ID NO: 26139 - DNA, 24 bp, Homo sapiens
agactatttcagcaaactcttgtt

SEQ ID NO: 26140 - DNA, 24 bp, Homo sapiens
cccaaagccaaaggagatactatt

SEQ ID NO: 26141 - DNA, 17 bp, Homo sapiens
tgctccatgacccttgt

SEQ ID NO: 26142 - DNA, 23 bp, Homo sapiens
tgaaatcttcataattaccactt

SEQ ID NO: 26143 - DNA, 22 bp, Homo sapiens
aactgggaggtgttttctaaac

SEQ ID NO: 26144 - DNA, 21 bp, Homo sapiens
aaaaggaaaagtcaaagcttc

SEQ ID NO: 26145 - DNA, 22 bp, Homo sapiens
cagcctcatcaaatgttcactg

SEQ ID NO: 26146 - DNA, 20 bp, Homo sapiens
cactggtccaccaaacgtac

SEQ ID NO: 26147 - DNA, 22 bp, Homo sapiens
gctgagctgtattactcaactg

SEQ ID NO: 26148 - DNA, 21 bp, Homo sapiens
ccacacgcactttctgtactg

SEQ ID NO: 26149 - DNA, 22 bp, Homo sapiens
gatgatgtaaacttcacagggc

SEQ ID NO: 26150 - DNA, 18 bp, Homo sapiens
cagccattccgtgctgga

SEQ ID NO: 26151 - DNA, 20 bp, Homo sapiens
acaagcttttgcccatgtac

SEQ ID NO: 26152 - DNA, 17 bp, Homo sapiens
ttggcccctctttcacc

SEQ ID NO: 26153 - DNA, 20 bp, Homo sapiens
ctcttgccacttaccgtacg

SEQ ID NO: 26154 - DNA, 18 bp, Homo sapiens
cgaaaacattactgcctc

SEQ ID NO: 26155 - DNA, 17 bp, Homo sapiens
tcccctttcttgtggtc

SEQ ID NO: 26156 - DNA, 19 bp, Homo sapiens
tgtttctgggtttgcttat

SEQ ID NO: 26157 - DNA, 19 bp, Homo sapiens
ggtgcagttcgtgttatac

SEQ ID NO: 26158 - DNA, 18 bp, Homo sapiens
ctttgtcttctgaccctc

SEQ ID NO: 26159 - DNA, 21 bp, Homo sapiens
gtctcattgtcataagaggca

SEQ ID NO: 26160 - DNA, 21 bp, Homo sapiens
ccagttttcttactgtattgc

SEQ ID NO: 26161 - DNA, 23 bp, Homo sapiens
cctaacttaaaggcagctttgcc

SEQ ID NO: 26162 - DNA, 18 bp, Homo sapiens
ccagccatacccttcggg

SEQ ID NO: 26163 - DNA, 18 bp, Homo sapiens
ccaaatccccatctagca

SEQ ID NO: 26164 - DNA, 18 bp, Homo sapiens
cctttcttccggacggag

SEQ ID NO: 26165 - DNA, 22 bp, Homo sapiens
gtgacttatttcttcaaacagc

SEQ ID NO: 26166 - DNA, 16 bp, Homo sapiens
gtcagcccccagcagc

SEQ ID NO: 26167 - DNA, 21 bp, Homo sapiens
gtccaaagggtacatcagctc

SEQ ID NO: 26168 - DNA, 19 bp, Homo sapiens
gctggtcttcattactgcg

SEQ ID NO: 26169 - DNA, 17 bp, Homo sapiens
ccggatgatgagctgct

SEQ ID NO: 26170 - DNA, 19 bp, Homo sapiens
tcacacgctgggggtcttt

SEQ ID NO: 26171 - DNA, 24 bp, Homo sapiens
actctttttccaggcgagcctggc

SEQ ID NO: 26172 - DNA, 19 bp, Homo sapiens
gaggcgtcctgctgtgacc

SEQ ID NO: 26173 - DNA, 17 bp, Homo sapiens
aaacaccaggcctgacg

SEQ ID NO: 26174 - DNA, 19 bp, Homo sapiens
ctttcaggaacggcttggc

SEQ ID NO: 26175 - DNA, 24 bp, Homo sapiens
aatgacacagccagggtttcggac

SEQ ID NO: 26176 - DNA, 23 bp, Homo sapiens
tcatatgtgtccccaggtgggct

SEQ ID NO: 26177 - DNA, 23 bp, Homo sapiens
ctcaaatgctgcgctgacagggt

SEQ ID NO: 26178 - DNA, 24 bp, Homo sapiens
cgatagcaatatagctttttctgt

SEQ ID NO: 26179 - DNA, 17 bp, Homo sapiens
gtgtcctcggcactggc

SEQ ID NO: 26180 - DNA, 20 bp, Homo sapiens
tcttcacttctgtttttcag

SEQ ID NO: 26181 - DNA, 23 bp, Homo sapiens
gaggaaacgaatgctctcatgac

SEQ ID NO: 26182 - DNA, 21 bp, Homo sapiens
gcatttcatgggattacagga

SEQ ID NO: 26183 - DNA, 24 bp, Homo sapiens
atatgcctacctttgtcacttgca

SEQ ID NO: 26184 - DNA, 19 bp, Homo sapiens
cttaggggaaagaaggcag

SEQ ID NO: 26185 - DNA, 24 bp, Homo sapiens
tactcggagacaaaataccgtttt

SEQ ID NO: 26186 - DNA, 22 bp, Homo sapiens
tagctgtaggacacaataatcc

SEQ ID NO: 26187 - DNA, 21 bp, Homo sapiens
tatgtcatcatgtggatcacc

SEQ ID NO: 26188 - DNA, 24 bp, Homo sapiens
cctaagtaaccaagctctgacaaa

SEQ ID NO: 26189 - DNA, 16 bp, Homo sapiens
ccagcccccacctcct

SEQ ID NO: 26190 - DNA, 21 bp, Homo sapiens
cctggatgacaaacaaaactg

SEQ ID NO: 26191 - DNA, 20 bp, Homo sapiens
tgtggatgaggtcacagcac

SEQ ID NO: 26192 - DNA, 18 bp, Homo sapiens
caagcaaaaacgccatgt

SEQ ID NO: 26193 - DNA, 22 bp, Homo sapiens
ctttctgtagattttccagtcc

SEQ ID NO: 26194 - DNA, 18 bp, Homo sapiens
atcgtccagggagcagga

SEQ ID NO: 26195 - DNA, 24 bp, Homo sapiens
aagtataatacaaaattttggatg

SEQ ID NO: 26196 - DNA, 24 bp, Homo sapiens
tagagcagtcttggcagctacatg

SEQ ID NO: 26197 - DNA, 24 bp, Homo sapiens
tccaattctttttcttctttcagt

SEQ ID NO: 26198 - DNA, 17 bp, Homo sapiens
tcatgggctccatccca

SEQ ID NO: 26199 - DNA, 20 bp, Homo sapiens
ctcctgtgttttcaggtagg

SEQ ID NO: 26200 - DNA, 19 bp, Homo sapiens
ccaggctggtctggaactc

SEQ ID NO: 26201 - DNA, 20 bp, Homo sapiens
ccaccaactggattgaatac

SEQ ID NO: 26202 - DNA, 19 bp, Homo sapiens
cactggtgagccactgtgc

SEQ ID NO: 26203 - DNA, 19 bp, Homo sapiens
aagtaatgacaaggccctg

SEQ ID NO: 26204 - DNA, 24 bp, Homo sapiens
acaccaaacttggaatctttatac

SEQ ID NO: 26205 - DNA, 21 bp, Homo sapiens
ttttcctttgggtttcctctt

SEQ ID NO: 26206 - DNA, 23 bp, Homo sapiens
cctgtccattgtccttattgaac

SEQ ID NO: 26207 - DNA, 20 bp, Homo sapiens
cttcaagaggccttttgtaa

SEQ ID NO: 26208 - DNA, 21 bp, Homo sapiens
gtccttcccacacaggagtcc

SEQ ID NO: 26209 - DNA, 19 bp, Homo sapiens
gcccttagttagtgtttgc

SEQ ID NO: 26210 - DNA, 21 bp, Homo sapiens
gcaggcattgtacattgctag

SEQ ID NO: 26211 - DNA, 21 bp, Homo sapiens
cagagttttgccaatggtaag

SEQ ID NO: 26212 - DNA, 24 bp, Homo sapiens
tcaagtcctaggatacaagcaaag

SEQ ID NO: 26213 - DNA, 21 bp, Homo sapiens
gttacaaaccagacgaaaaca

SEQ ID NO: 26214 - DNA, 20 bp, Homo sapiens
ttttccagagttgacaggac

SEQ ID NO: 26215 - DNA, 16 bp, Homo sapiens
ccctcgacagagtcag

SEQ ID NO: 26216 - DNA, 24 bp, Homo sapiens
gccagctgtaaaagaggaataatt

SEQ ID NO: 26217 - DNA, 23 bp, Homo sapiens
acttttcctttagatgtccatcc

SEQ ID NO: 26218 - DNA, 23 bp, Homo sapiens
tattgtaactctttcacatttgt

SEQ ID NO: 26219 - DNA, 25 bp, Homo sapiens
tttgtctatttaaaatcgttcttgc

SEQ ID NO: 26220 - DNA, 24 bp, Homo sapiens
tgtaacattcaaaaactgactctg

SEQ ID NO: 26221 - DNA, 23 bp, Homo sapiens
tggtttttaatatgttctcttgg

SEQ ID NO: 26222 - DNA, 24 bp, Homo sapiens
ggttcagtaggttataaaaacagg

SEQ ID NO: 26223 - DNA, 24 bp, Homo sapiens
ctttacatgtatacatatatgtat

SEQ ID NO: 26224 - DNA, 17 bp, Homo sapiens
tgatgttcggcagcttc

SEQ ID NO: 26225 - DNA, 28 bp, Homo sapiens
taaaaatatgtaaacaaagaataaatgg

SEQ ID NO: 26226 - DNA, 20 bp, Homo sapiens
tgtgctctttcacctgaaag

SEQ ID NO: 26227 - DNA, 19 bp, Homo sapiens
cccagttgttctgtttccc

SEQ ID NO: 26228 - DNA, 21 bp, Homo sapiens
aatgaatgtgtcttagttcac

SEQ ID NO: 26229 - DNA, 22 bp, Homo sapiens
tgtcttttagtgtctgaagctg

SEQ ID NO: 26230 - DNA, 20 bp, Homo sapiens
aactttgcaaatacaggatg

SEQ ID NO: 26231 - DNA, 20 bp, Homo sapiens
tcctggacagagttcctttc

SEQ ID NO: 26232 - DNA, 24 bp, Homo sapiens
atgccacaggttagagtttgagag

SEQ ID NO: 26233 - DNA, 20 bp, Homo sapiens
ggacaagaggtacaattgcg

SEQ ID NO: 26234 - DNA, 23 bp, Homo sapiens
cctccaccctgcaataacattta

SEQ ID NO: 26235 - DNA, 21 bp, Homo sapiens
gactttctgtaggtgttttca

SEQ ID NO: 26236 - DNA, 23 bp, Homo sapiens
tgttcccagtgcctaagataatg

SEQ ID NO: 26237 - DNA, 20 bp, Homo sapiens
gtgggcacttcttgttgaaa

SEQ ID NO: 26238 - DNA, 21 bp, Homo sapiens
gttttggtgggccagaatatt

SEQ ID NO: 26239 - DNA, 19 bp, Homo sapiens
aagtgcctgttgctgttac

SEQ ID NO: 26240 - DNA, 18 bp, Homo sapiens
accaaacacaggactgtg

SEQ ID NO: 26241 - DNA, 16 bp, Homo sapiens
ctactgtgtccagcgc

SEQ ID NO: 26242 - DNA, 16 bp, Homo sapiens
gaacctccgagctctc

SEQ ID NO: 26243 - DNA, 16 bp, Homo sapiens
cagccttgcgcggcca

SEQ ID NO: 26244 - DNA, 16 bp, Homo sapiens
gggcccgtcgccttcc

SEQ ID NO: 26245 - DNA, 17 bp, Homo sapiens
aaacagcccggggaagt

SEQ ID NO: 26246 - DNA, 24 bp, Homo sapiens
cgtcccggtggccggcgaccgctc

SEQ ID NO: 26247 - DNA, 16 bp, Homo sapiens
tgctgccgcggtcagc

SEQ ID NO: 26248 - DNA, 17 bp, Homo sapiens
ccgcgagcggtcatgct

SEQ ID NO: 26249 - DNA, 19 bp, Homo sapiens
gcagagtgtggatgagaaa

SEQ ID NO: 26250 - DNA, 24 bp, Homo sapiens
gatgctaagatgagttctttatag

SEQ ID NO: 26251 - DNA, 26 bp, Homo sapiens
gcccaaaaataattttttgtatttcc

SEQ ID NO: 26252 - DNA, 23 bp, Homo sapiens
tggggaaaagtgttaattagttt

SEQ ID NO: 26253 - DNA, 22 bp, Homo sapiens
ccagtttattgaacctacagtg

SEQ ID NO: 26254 - DNA, 22 bp, Homo sapiens
ttctatcccctgggtgaagact

SEQ ID NO: 26255 - DNA, 16 bp, Homo sapiens
gggctagcagtccact

SEQ ID NO: 26256 - DNA, 18 bp, Homo sapiens
agacctcttcccttctgt

SEQ ID NO: 26257 - DNA, 19 bp, Homo sapiens
gaccccatgaagttctcag

SEQ ID NO: 26258 - DNA, 18 bp, Homo sapiens
caccatcttcaactgtgg

SEQ ID NO: 26259 - DNA, 16 bp, Homo sapiens
tgctgaccgccaaggt

SEQ ID NO: 26260 - DNA, 17 bp, Homo sapiens
gctactgctcaggctgg

SEQ ID NO: 26261 - DNA, 18 bp, Homo sapiens
gggccctagcccctcaga

SEQ ID NO: 26262 - DNA, 16 bp, Homo sapiens
ctggagacgctggagc

SEQ ID NO: 26263 - DNA, 17 bp, Homo sapiens
cttcttgtccagccacc

SEQ ID NO: 26264 - DNA, 17 bp, Homo sapiens
aagcgggagctgaagca

SEQ ID NO: 26265 - DNA, 16 bp, Homo sapiens
acctccaccttctcca

SEQ ID NO: 26266 - DNA, 16 bp, Homo sapiens
gggcaggcactgatgc

SEQ ID NO: 26267 - DNA, 18 bp, Homo sapiens
cttgcgcagctcacccag

SEQ ID NO: 26268 - DNA, 16 bp, Homo sapiens
tccagagcctggtgcc

SEQ ID NO: 26269 - DNA, 24 bp, Homo sapiens
cgctcgaagaggttgcgcattttc

SEQ ID NO: 26270 - DNA, 23 bp, Homo sapiens
gaggaagaggaagtacttcaagg

SEQ ID NO: 26271 - DNA, 18 bp, Homo sapiens
caaagatggtcacgaaga

SEQ ID NO: 26272 - DNA, 16 bp, Homo sapiens
ctcccacctctctgcc

SEQ ID NO: 26273 - DNA, 17 bp, Homo sapiens
acttcgtacttgacggg

SEQ ID NO: 26274 - DNA, 21 bp, Homo sapiens
agatgagcaaggggatctggg

SEQ ID NO: 26275 - DNA, 23 bp, Homo sapiens
tgtcgtcttggtaacctcgaata

SEQ ID NO: 26276 - DNA, 23 bp, Homo sapiens
cacatttaaaccaacatttccag

SEQ ID NO: 26277 - DNA, 22 bp, Homo sapiens
tcacagttaaagaagtacctgg

SEQ ID NO: 26278 - DNA, 20 bp, Homo sapiens
ttcccttcctgccttctagg

SEQ ID NO: 26279 - DNA, 22 bp, Homo sapiens
cggtttatccccaagagagaac

SEQ ID NO: 26280 - DNA, 24 bp, Homo sapiens
agacctcatcataccctgctctct

SEQ ID NO: 26281 - DNA, 24 bp, Homo sapiens
cagcatctacttgggggacattgc

SEQ ID NO: 26282 - DNA, 18 bp, Homo sapiens
cacttccttggggagagg

SEQ ID NO: 26283 - DNA, 18 bp, Homo sapiens
gctcatggaccacacttt

SEQ ID NO: 26284 - DNA, 24 bp, Homo sapiens
atggtgatggtcttgacatgccag

SEQ ID NO: 26285 - DNA, 17 bp, Homo sapiens
cttggaatgcagcaggc

SEQ ID NO: 26286 - DNA, 16 bp, Homo sapiens
cccacacagagggagg

SEQ ID NO: 26287 - DNA, 20 bp, Homo sapiens
cccctcaaagcctccaggac

SEQ ID NO: 26288 - DNA, 23 bp, Homo sapiens
gaaaattcttctaggcagcgggc

SEQ ID NO: 26289 - DNA, 21 bp, Homo sapiens
acacagtaggtgctcagtaag

SEQ ID NO: 26290 - DNA, 22 bp, Homo sapiens
cagggagaacgtctggctcatc

SEQ ID NO: 26291 - DNA, 23 bp, Homo sapiens
caagagggagattctcggggtcc

SEQ ID NO: 26292 - DNA, 18 bp, Homo sapiens
cctccattacagcctacg

SEQ ID NO: 26293 - DNA, 22 bp, Homo sapiens
cctccccttcctacttcctaaa

SEQ ID NO: 26294 - DNA, 17 bp, Homo sapiens
ccctcttgctcccgccc

SEQ ID NO: 26295 - DNA, 22 bp, Homo sapiens
ggatcggttcttcctgccctcc

SEQ ID NO: 26296 - DNA, 17 bp, Homo sapiens
ttaacctgcctccccca

SEQ ID NO: 26297 - DNA, 24 bp, Homo sapiens
cgttgcccgtttctatgacgatct

SEQ ID NO: 26298 - DNA, 21 bp, Homo sapiens
ctgtgccaacaacaagatctg

SEQ ID NO: 26299 - DNA, 22 bp, Homo sapiens
atgcatatctccatattattcc

SEQ ID NO: 26300 - DNA, 17 bp, Homo sapiens
gtgtgactgctggctct

SEQ ID NO: 26301 - DNA, 24 bp, Homo sapiens
gtgtcttcttattccagcaccatt

SEQ ID NO: 26302 - DNA, 24 bp, Homo sapiens
tcctggctggcatctgagctatgt

SEQ ID NO: 26303 - DNA, 21 bp, Homo sapiens
acatactggtctcttccagct

SEQ ID NO: 26304 - DNA, 18 bp, Homo sapiens
aggcacatccagcttcca

SEQ ID NO: 26305 - DNA, 24 bp, Homo sapiens
ccgtctgcccgtcaccctcactct

SEQ ID NO: 26306 - DNA, 22 bp, Homo sapiens
cagataacttgtccagggccac

SEQ ID NO: 26307 - DNA, 23 bp, Homo sapiens
gcgggagttgtccttcacatcga

SEQ ID NO: 26308 - DNA, 17 bp, Homo sapiens
ccacctaacccaacccc

SEQ ID NO: 26309 - DNA, 18 bp, Homo sapiens
tgcaagctgagggtctgg

SEQ ID NO: 26310 - DNA, 24 bp, Homo sapiens
catcaactgtgttcagttttctgc

SEQ ID NO: 26311 - DNA, 21 bp, Homo sapiens
aagtttgagcggaacaacacg

SEQ ID NO: 26312 - DNA, 24 bp, Homo sapiens
gggagggaataatggctcaggaag

SEQ ID NO: 26313 - DNA, 19 bp, Homo sapiens
atcatcttcggggagaacg

SEQ ID NO: 26314 - DNA, 23 bp, Homo sapiens
gggagctacctttgttgtcgtgc

SEQ ID NO: 26315 - DNA, 18 bp, Homo sapiens
accctaagcctcaccttg

SEQ ID NO: 26316 - DNA, 23 bp, Homo sapiens
atgtcagggaagttgaatgtgtc

SEQ ID NO: 26317 - DNA, 21 bp, Homo sapiens
cctctgaggagtccgggatca

SEQ ID NO: 26318 - DNA, 24 bp, Homo sapiens
cttcagggccagtgtcccactatc

SEQ ID NO: 26319 - DNA, 20 bp, Homo sapiens
tttccaacctcacccctggc

SEQ ID NO: 26320 - DNA, 21 bp, Homo sapiens
cagttaagaccagcgacatcc

SEQ ID NO: 26321 - DNA, 23 bp, Homo sapiens
actgtggagaaaacttggattga

SEQ ID NO: 26322 - DNA, 22 bp, Homo sapiens
gtgtgaaatgtgtgccgttatc

SEQ ID NO: 26323 - DNA, 21 bp, Homo sapiens
ccagaaacaagggcctgagcc

SEQ ID NO: 26324 - DNA, 21 bp, Homo sapiens
accatgttctactatggagac

SEQ ID NO: 26325 - DNA, 19 bp, Homo sapiens
acccccgacccacccagga

SEQ ID NO: 26326 - DNA, 16 bp, Homo sapiens
attcccacggtggctc

SEQ ID NO: 26327 - DNA, 23 bp, Homo sapiens
ccactccatcatttcttcctcat

SEQ ID NO: 26328 - DNA, 16 bp, Homo sapiens
ggattcggggaggggc

SEQ ID NO: 26329 - DNA, 23 bp, Homo sapiens
cttccgctgggacagccagtctc

SEQ ID NO: 26330 - DNA, 16 bp, Homo sapiens
ccccgtgggtctcagt

SEQ ID NO: 26331 - DNA, 17 bp, Homo sapiens
tcggccggagtggttcc

SEQ ID NO: 26332 - DNA, 24 bp, Homo sapiens
atatgggctgggttcatgtaatga

SEQ ID NO: 26333 - DNA, 23 bp, Homo sapiens
catggagatcctagacattgctc

SEQ ID NO: 26334 - DNA, 18 bp, Homo sapiens
ttgacaagccagaggaac

SEQ ID NO: 26335 - DNA, 18 bp, Homo sapiens
cttcatgcccctcctctc

SEQ ID NO: 26336 - DNA, 24 bp, Homo sapiens
agggtctagacattttaccctctc

SEQ ID NO: 26337 - DNA, 24 bp, Homo sapiens
ttctccctcaccccaaacctggcc

SEQ ID NO: 26338 - DNA, 24 bp, Homo sapiens
ggatccgcatcttggtgaatggag

SEQ ID NO: 26339 - DNA, 24 bp, Homo sapiens
agagatgggctggtggagagttgc

SEQ ID NO: 26340 - DNA, 24 bp, Homo sapiens
gagaaaggtactgagacagaatag

SEQ ID NO: 26341 - DNA, 24 bp, Homo sapiens
ccaacatcttcatgaccctctacg

SEQ ID NO: 26342 - DNA, 16 bp, Homo sapiens
gagaatcagcctggct

SEQ ID NO: 26343 - DNA, 21 bp, Homo sapiens
ggcaggttctctatgaaatga

SEQ ID NO: 26344 - DNA, 19 bp, Homo sapiens
aggggtgaggggcaggggc

SEQ ID NO: 26345 - DNA, 17 bp, Homo sapiens
gtcaggtggggttggag

SEQ ID NO: 26346 - DNA, 19 bp, Homo sapiens
tctgtgctcccgttgatgc

SEQ ID NO: 26347 - DNA, 18 bp, Homo sapiens
ctctttccagagctgtgg

SEQ ID NO: 26348 - DNA, 18 bp, Homo sapiens
ccacatcccctgtccaca

SEQ ID NO: 26349 - DNA, 24 bp, Homo sapiens
aagtacatctggctagcacaccag

SEQ ID NO: 26350 - DNA, 24 bp, Homo sapiens
ccaaggacagaggcgacggcatca

SEQ ID NO: 26351 - DNA, 23 bp, Homo sapiens
tacttcttccacttctgtctccc

SEQ ID NO: 26352 - DNA, 17 bp, Homo sapiens
gtttggcagtgcccacc

SEQ ID NO: 26353 - DNA, 16 bp, Homo sapiens
cacactcacagtgccc

SEQ ID NO: 26354 - DNA, 20 bp, Homo sapiens
tgtctcctcctagctgggcc

SEQ ID NO: 26355 - DNA, 20 bp, Homo sapiens
gaagacacgggaggtgatgc

SEQ ID NO: 26356 - DNA, 16 bp, Homo sapiens
ggctgggcagggagca

SEQ ID NO: 26357 - DNA, 24 bp, Homo sapiens
tacagttcaacatgtacttggtgc

SEQ ID NO: 26358 - DNA, 16 bp, Homo sapiens
atgggagggacctggg

SEQ ID NO: 26359 - DNA, 15 bp, Homo sapiens
tcaggggaggccccg

SEQ ID NO: 26360 - DNA, 22 bp, Homo sapiens
cttggatgtgggcatcatcaag

SEQ ID NO: 26361 - DNA, 24 bp, Homo sapiens
tctgctacctgctctaaggggtgc

SEQ ID NO: 26362 - DNA, 16 bp, Homo sapiens
cccgagggaagagggg

SEQ ID NO: 26363 - DNA, 18 bp, Homo sapiens
ccaggaactggtcagctc

SEQ ID NO: 26364 - DNA, 23 bp, Homo sapiens
cgagccttcatctttctcatcgg

SEQ ID NO: 26365 - DNA, 24 bp, Homo sapiens
cgagaagccagcacctctattttc

SEQ ID NO: 26366 - DNA, 24 bp, Homo sapiens
ttgcagttattccctactatgtgt

SEQ ID NO: 26367 - DNA, 18 bp, Homo sapiens
cagagccacggctgaagc

SEQ ID NO: 26368 - DNA, 23 bp, Homo sapiens
ctatgaggcagtgccttgtctat

SEQ ID NO: 26369 - DNA, 21 bp, Homo sapiens
ttactacgttcatcatcctcc

SEQ ID NO: 26370 - DNA, 17 bp, Homo sapiens
gagcaaggagctgagat

SEQ ID NO: 26371 - DNA, 17 bp, Homo sapiens
ttcccagtggtgactga

SEQ ID NO: 26372 - DNA, 19 bp, Homo sapiens
atggctgactacgttcaag

SEQ ID NO: 26373 - DNA, 23 bp, Homo sapiens
aaactatgtaaatgactaagtgt

SEQ ID NO: 26374 - DNA, 23 bp, Homo sapiens
gacttctgggagatcgccctgag

SEQ ID NO: 26375 - DNA, 24 bp, Homo sapiens
ctcatccaagaattgctttaaaac

SEQ ID NO: 26376 - DNA, 16 bp, Homo sapiens
ccacacaggagtacac

SEQ ID NO: 26377 - DNA, 17 bp, Homo sapiens
gttggcttacttgggcc

SEQ ID NO: 26378 - DNA, 16 bp, Homo sapiens
tgcctaggggaggtcc

SEQ ID NO: 26379 - DNA, 22 bp, Homo sapiens
cgacatcggccatcttggagct

SEQ ID NO: 26380 - DNA, 21 bp, Homo sapiens
gactcgagaggctcttttacg

SEQ ID NO: 26381 - DNA, 17 bp, Homo sapiens
ttgctgctgcggtcccc

SEQ ID NO: 26382 - DNA, 24 bp, Homo sapiens
ccaacgaggacgagttcctgttcc

SEQ ID NO: 26383 - DNA, 23 bp, Homo sapiens
cagctccagcacctccacctcga

SEQ ID NO: 26384 - DNA, 17 bp, Homo sapiens
caactccaagtggtgcg

SEQ ID NO: 26385 - DNA, 21 bp, Homo sapiens
ataccccttggctcaccttct

SEQ ID NO: 26386 - DNA, 19 bp, Homo sapiens
acaccttcatcatcgaggc

SEQ ID NO: 26387 - DNA, 24 bp, Homo sapiens
ggagagccagcgcccgcataggaa

SEQ ID NO: 26388 - DNA, 17 bp, Homo sapiens
gggttgagtgggtggca

SEQ ID NO: 26389 - DNA, 24 bp, Homo sapiens
caccttctccacgtaccagtctgc

SEQ ID NO: 26390 - DNA, 18 bp, Homo sapiens
aggtctgttcagtgcagc

SEQ ID NO: 26391 - DNA, 23 bp, Homo sapiens
cttgtagatgacgcctaggtcag

SEQ ID NO: 26392 - DNA, 23 bp, Homo sapiens
gtcagagaaccggaccaacaagt

SEQ ID NO: 26393 - DNA, 19 bp, Homo sapiens
agaggcccaaatgagtgtg

SEQ ID NO: 26394 - DNA, 21 bp, Homo sapiens
aggtgtacatcaccatctatg

SEQ ID NO: 26395 - DNA, 19 bp, Homo sapiens
gaagagctggcacctagat

SEQ ID NO: 26396 - DNA, 19 bp, Homo sapiens
gtactcggtgcagatcttc

SEQ ID NO: 26397 - DNA, 20 bp, Homo sapiens
ccctcataccgttcctctct

SEQ ID NO: 26398 - DNA, 21 bp, Homo sapiens
taaagcgctgtcacccttttc

SEQ ID NO: 26399 - DNA, 18 bp, Homo sapiens
ctccccagtgtccccgag

SEQ ID NO: 26400 - DNA, 17 bp, Homo sapiens
gaggcctaggccagaag

SEQ ID NO: 26401 - DNA, 18 bp, Homo sapiens
ccccaggaatgttccctg

SEQ ID NO: 26402 - DNA, 21 bp, Homo sapiens
atccacatggatttgaagctg

SEQ ID NO: 26403 - DNA, 24 bp, Homo sapiens
caagtctacaaggaagtagaagag

SEQ ID NO: 26404 - DNA, 23 bp, Homo sapiens
tctctagagagtggaggtaacaa

SEQ ID NO: 26405 - DNA, 19 bp, Homo sapiens
ctggttccatatgacatct

SEQ ID NO: 26406 - DNA, 23 bp, Homo sapiens
cacagggcatgtgctcaggagga

SEQ ID NO: 26407 - DNA, 17 bp, Homo sapiens
tttcccatgcgatcggt

SEQ ID NO: 26408 - DNA, 20 bp, Homo sapiens
ccacacttactgtccagagg

SEQ ID NO: 26409 - DNA, 22 bp, Homo sapiens
agctttcacattaagggctaat

SEQ ID NO: 26410 - DNA, 24 bp, Homo sapiens
cccatctttcatgtatttctcagt

SEQ ID NO: 26411 - DNA, 19 bp, Homo sapiens
atgatccttgtccttggtc

SEQ ID NO: 26412 - DNA, 17 bp, Homo sapiens
tcatcctcagaggtggc

SEQ ID NO: 26413 - DNA, 20 bp, Homo sapiens
ctgatctactgaaattgggg

SEQ ID NO: 26414 - DNA, 24 bp, Homo sapiens
actctgagtgaactgggtgaattt

SEQ ID NO: 26415 - DNA, 20 bp, Homo sapiens
tggccataataacacgggca

SEQ ID NO: 26416 - DNA, 19 bp, Homo sapiens
aggtcctcacagggaattt

SEQ ID NO: 26417 - DNA, 24 bp, Homo sapiens
gtgccttatctcctttccaaagtt

SEQ ID NO: 26418 - DNA, 21 bp, Homo sapiens
cagcaggacagaccagtcaac

SEQ ID NO: 26419 - DNA, 17 bp, Homo sapiens
ggaagcaggatgttgcc

SEQ ID NO: 26420 - DNA, 24 bp, Homo sapiens
gtgagagcagtgccacccaggatt

SEQ ID NO: 26421 - DNA, 19 bp, Homo sapiens
ctggctggatagtggagac

SEQ ID NO: 26422 - DNA, 22 bp, Homo sapiens
tcaatgatttctcccacatctt

SEQ ID NO: 26423 - DNA, 16 bp, Homo sapiens
cctcccgcttcatcgt

SEQ ID NO: 26424 - DNA, 24 bp, Homo sapiens
gtaggatgagctgctcaccttcct

SEQ ID NO: 26425 - DNA, 18 bp, Homo sapiens
cacccagcagaagtatct

SEQ ID NO: 26426 - DNA, 22 bp, Homo sapiens
ctgccctgaaggtagggcttct

SEQ ID NO: 26427 - DNA, 20 bp, Homo sapiens
tttgctgctgggacagatgc

SEQ ID NO: 26428 - DNA, 20 bp, Homo sapiens
ctgagcccaagtacctctac

SEQ ID NO: 26429 - DNA, 16 bp, Homo sapiens
gccctctgaccaccac

SEQ ID NO: 26430 - DNA, 21 bp, Homo sapiens
ttccctcttgttggtacacag

SEQ ID NO: 26431 - DNA, 17 bp, Homo sapiens
ctggtgaagaactggct

SEQ ID NO: 26432 - DNA, 24 bp, Homo sapiens
agatgatgatgaagatgttggcat

SEQ ID NO: 26433 - DNA, 19 bp, Homo sapiens
ggtccctgagcagcagttc

SEQ ID NO: 26434 - DNA, 18 bp, Homo sapiens
tccatgcagagcttcaga

SEQ ID NO: 26435 - DNA, 24 bp, Homo sapiens
gatgaaagaccaaaatcttcaagg

SEQ ID NO: 26436 - DNA, 16 bp, Homo sapiens
tttccctgtggccgct

SEQ ID NO: 26437 - DNA, 20 bp, Homo sapiens
gagttggggtagctggtgat

SEQ ID NO: 26438 - DNA, 19 bp, Homo sapiens
ggctggtttgtagactggg

SEQ ID NO: 26439 - DNA, 24 bp, Homo sapiens
gttcctacatggtgtgtacagcct

SEQ ID NO: 26440 - DNA, 22 bp, Homo sapiens
gaaatcatctctgctcaggtcc

SEQ ID NO: 26441 - DNA, 18 bp, Homo sapiens
tcttcgtttttggccagc

SEQ ID NO: 26442 - DNA, 16 bp, Homo sapiens
tatcagccagccacct

SEQ ID NO: 26443 - DNA, 22 bp, Homo sapiens
ggggcatccacctctacccagt

SEQ ID NO: 26444 - DNA, 19 bp, Homo sapiens
gtgcacattttaatgggag

SEQ ID NO: 26445 - DNA, 19 bp, Homo sapiens
ctctactgggctaaaggga

SEQ ID NO: 26446 - DNA, 16 bp, Homo sapiens
cacggtggagacgctg

SEQ ID NO: 26447 - DNA, 22 bp, Homo sapiens
tcaaatttccagaatctttccc

SEQ ID NO: 26448 - DNA, 23 bp, Homo sapiens
ccacaggaatgaccctcctgaag

SEQ ID NO: 26449 - DNA, 20 bp, Homo sapiens
tcttagcaaggaacagaggg

SEQ ID NO: 26450 - DNA, 24 bp, Homo sapiens
ggtctgactaggcttgaaaggcct

SEQ ID NO: 26451 - DNA, 18 bp, Homo sapiens
caggtctcccagatccag

SEQ ID NO: 26452 - DNA, 22 bp, Homo sapiens
cacagtctaaatttggtggaag

SEQ ID NO: 26453 - DNA, 24 bp, Homo sapiens
acttatcgctgtttgtcttggagg

SEQ ID NO: 26454 - DNA, 18 bp, Homo sapiens
cacacaggatgacactgg

SEQ ID NO: 26455 - DNA, 21 bp, Homo sapiens
ggaactgcctttctcgatggg

SEQ ID NO: 26456 - DNA, 24 bp, Homo sapiens
accataaagactggggttaagaag

SEQ ID NO: 26457 - DNA, 19 bp, Homo sapiens
tccccttggaaatttctgc

SEQ ID NO: 26458 - DNA, 24 bp, Homo sapiens
aattcattgctctatactattctc

SEQ ID NO: 26459 - DNA, 22 bp, Homo sapiens
tgaatcttggccctgcactgct

SEQ ID NO: 26460 - DNA, 17 bp, Homo sapiens
ttctagaggaggtggct

SEQ ID NO: 26461 - DNA, 24 bp, Homo sapiens
gatgaagacattagcatctgtgcc

SEQ ID NO: 26462 - DNA, 19 bp, Homo sapiens
aggattgaaggggcaagag

SEQ ID NO: 26463 - DNA, 18 bp, Homo sapiens
acagaggaatgagagggc

SEQ ID NO: 26464 - DNA, 16 bp, Homo sapiens
cacagagcgaggaggg

SEQ ID NO: 26465 - DNA, 20 bp, Homo sapiens
ggagggaaggaagatggaga

SEQ ID NO: 26466 - DNA, 18 bp, Homo sapiens
gaggaagatgatggccag

SEQ ID NO: 26467 - DNA, 24 bp, Homo sapiens
ggagaaagaaatcagctctagttt

SEQ ID NO: 26468 - DNA, 24 bp, Homo sapiens
gacattccaatctttccctatcca

SEQ ID NO: 26469 - DNA, 18 bp, Homo sapiens
ggttgttgtcaccgcctc

SEQ ID NO: 26470 - DNA, 21 bp, Homo sapiens
tagagggcctctcattctcag

SEQ ID NO: 26471 - DNA, 24 bp, Homo sapiens
actggcaacagctccctggacagc

SEQ ID NO: 26472 - DNA, 19 bp, Homo sapiens
tagaatagcagggcaatgc

SEQ ID NO: 26473 - DNA, 23 bp, Homo sapiens
ggacagaatagacattactgaca

SEQ ID NO: 26474 - DNA, 24 bp, Homo sapiens
gtcacccagcccaccctcaccctc

SEQ ID NO: 26475 - DNA, 24 bp, Homo sapiens
ggccctgaccaagattcggattcg

SEQ ID NO: 26476 - DNA, 23 bp, Homo sapiens
gactacctctgtggcagacatgg

SEQ ID NO: 26477 - DNA, 16 bp, Homo sapiens
ttccctggcccttccc

SEQ ID NO: 26478 - DNA, 24 bp, Homo sapiens
cccacactcacgtgatctcgttgt

SEQ ID NO: 26479 - DNA, 19 bp, Homo sapiens
ttcttgggaggatggggct

SEQ ID NO: 26480 - DNA, 19 bp, Homo sapiens
tctgttgcctgtgttgtcg

SEQ ID NO: 26481 - DNA, 22 bp, Homo sapiens
catcatccccactcctggttgc

SEQ ID NO: 26482 - DNA, 22 bp, Homo sapiens
atggcatagatggtgaaggtgt

SEQ ID NO: 26483 - DNA, 21 bp, Homo sapiens
acaagtccaacaaatttgagc

SEQ ID NO: 26484 - DNA, 24 bp, Homo sapiens
tactgccatgaaacctggtgggat

SEQ ID NO: 26485 - DNA, 16 bp, Homo sapiens
atctacggcgaggagt

SEQ ID NO: 26486 - DNA, 17 bp, Homo sapiens
ggctgccatgggaatct

SEQ ID NO: 26487 - DNA, 18 bp, Homo sapiens
ctatgaggttcaggtggt

SEQ ID NO: 26488 - DNA, 16 bp, Homo sapiens
ctcaccctacctgccc

SEQ ID NO: 26489 - DNA, 16 bp, Homo sapiens
ccccatggccatgagg

SEQ ID NO: 26490 - DNA, 24 bp, Homo sapiens
gtcgttcgcccgtgtctccatact

SEQ ID NO: 26491 - DNA, 22 bp, Homo sapiens
catctgaagatccctctgttct

SEQ ID NO: 26492 - DNA, 16 bp, Homo sapiens
gccttgggcacattcc

SEQ ID NO: 26493 - DNA, 24 bp, Homo sapiens
gcttcatggtaaaggagtcttggg

SEQ ID NO: 26494 - DNA, 19 bp, Homo sapiens
gtggcatttcacacacagg

SEQ ID NO: 26495 - DNA, 17 bp, Homo sapiens
ggacaacgaacttgtcg

SEQ ID NO: 26496 - DNA, 21 bp, Homo sapiens
ctatttggcctccacgtgagg

SEQ ID NO: 26497 - DNA, 18 bp, Homo sapiens
tgcaggaggtgattgagc

SEQ ID NO: 26498 - DNA, 23 bp, Homo sapiens
ggaactgtctggccactccctcc

SEQ ID NO: 26499 - DNA, 18 bp, Homo sapiens
cagaggaggaggagatgg

SEQ ID NO: 26500 - DNA, 20 bp, Homo sapiens
gcttgccagctggcaccaac

SEQ ID NO: 26501 - DNA, 16 bp, Homo sapiens
gggcagcgacgaagag

SEQ ID NO: 26502 - DNA, 24 bp, Homo sapiens
ccagccagcggtgggcttcgaact

SEQ ID NO: 26503 - DNA, 18 bp, Homo sapiens
cagctgctcaagaaggag

SEQ ID NO: 26504 - DNA, 22 bp, Homo sapiens
tcctcctcttcctcctcttctt

SEQ ID NO: 26505 - DNA, 16 bp, Homo sapiens
gaggtggacctcacgc

SEQ ID NO: 26506 - DNA, 18 bp, Homo sapiens
cttcctccccctcgtcct

SEQ ID NO: 26507 - DNA, 16 bp, Homo sapiens
ggcgagggctttgggc

SEQ ID NO: 26508 - DNA, 16 bp, Homo sapiens
tggccttcagccgctc

SEQ ID NO: 26509 - DNA, 16 bp, Homo sapiens
aacagcttgaggcggc

SEQ ID NO: 26510 - DNA, 19 bp, Homo sapiens
tcttccgggcctcctcctc

SEQ ID NO: 26511 - DNA, 16 bp, Homo sapiens
ggggtgttgggggcgt

SEQ ID NO: 26512 - DNA, 18 bp, Homo sapiens
cggtgtccacgaaccagc

SEQ ID NO: 26513 - DNA, 16 bp, Homo sapiens
cccagccctctccatc

SEQ ID NO: 26514 - DNA, 20 bp, Homo sapiens
cttatagacctcgcccacgt

SEQ ID NO: 26515 - DNA, 18 bp, Homo sapiens
ggcgtccaaggacacatt

SEQ ID NO: 26516 - DNA, 23 bp, Homo sapiens
aggaagcattttccacccaactg

SEQ ID NO: 26517 - DNA, 23 bp, Homo sapiens
atctatggagagaaaggcaagac

SEQ ID NO: 26518 - DNA, 24 bp, Homo sapiens
ggaaattagtacacccagggaagc

SEQ ID NO: 26519 - DNA, 20 bp, Homo sapiens
ttgagatttggacaggagat

SEQ ID NO: 26520 - DNA, 19 bp, Homo sapiens
accccacatacctggaatg

SEQ ID NO: 26521 - DNA, 29 bp, Homo sapiens
ttgttattgttattattactaaatgttcc

SEQ ID NO: 26522 - DNA, 20 bp, Homo sapiens
ggaagagcacttctgtcttg

SEQ ID NO: 26523 - DNA, 16 bp, Homo sapiens
aggcacctggaacagg

SEQ ID NO: 26524 - DNA, 16 bp, Homo sapiens
ggtgcctgcgccaccc

SEQ ID NO: 26525 - DNA, 20 bp, Homo sapiens
tgggaatgattgtgcttact

SEQ ID NO: 26526 - DNA, 23 bp, Homo sapiens
gcagtgaaagcccccattttctc

SEQ ID NO: 26527 - DNA, 17 bp, Homo sapiens
agaaccaggctgacggg

SEQ ID NO: 26528 - DNA, 22 bp, Homo sapiens
gacctgctttgccccatggtcc

SEQ ID NO: 26529 - DNA, 17 bp, Homo sapiens
cgttcagatccgtgtgc

SEQ ID NO: 26530 - DNA, 16 bp, Homo sapiens
cccaccacagcctcct

SEQ ID NO: 26531 - DNA, 19 bp, Homo sapiens
aaccggctggtgattgggc

SEQ ID NO: 26532 - DNA, 23 bp, Homo sapiens
gatacagctccacctccaggcgc

SEQ ID NO: 26533 - DNA, 23 bp, Homo sapiens
gggatgggatcatggaggtttct

SEQ ID NO: 26534 - DNA, 19 bp, Homo sapiens
tgtactgcttgccttgacg

SEQ ID NO: 26535 - DNA, 18 bp, Homo sapiens
tctcctggggactggaga

SEQ ID NO: 26536 - DNA, 24 bp, Homo sapiens
gcatgcatgccagtgctgtcatgc

SEQ ID NO: 26537 - DNA, 16 bp, Homo sapiens
ttcaccctcgagaccc

SEQ ID NO: 26538 - DNA, 24 bp, Homo sapiens
aaaatgtgtttacccttatgtaca

SEQ ID NO: 26539 - DNA, 21 bp, Homo sapiens
caagttcttcttgtctctgac

SEQ ID NO: 26540 - DNA, 22 bp, Homo sapiens
tgtgtggacacgtgtgaatgtg

SEQ ID NO: 26541 - DNA, 22 bp, Homo sapiens
cagcacggattctagagtctac

SEQ ID NO: 26542 - DNA, 23 bp, Homo sapiens
agacttacatttccaatgttcag

SEQ ID NO: 26543 - DNA, 17 bp, Homo sapiens
ggctgttcagactttcg

SEQ ID NO: 26544 - DNA, 24 bp, Homo sapiens
acgttcaaagtagtctttgaggtt

SEQ ID NO: 26545 - DNA, 16 bp, Homo sapiens
acacgcaccctgcttc

SEQ ID NO: 26546 - DNA, 24 bp, Homo sapiens
tttatccccatagagcttgatgta

SEQ ID NO: 26547 - DNA, 23 bp, Homo sapiens
gagcctggattttcaattcccag

SEQ ID NO: 26548 - DNA, 22 bp, Homo sapiens
agtcttcaagctgatgtgatag

SEQ ID NO: 26549 - DNA, 21 bp, Homo sapiens
gagttgctacccagtgacagc

SEQ ID NO: 26550 - DNA, 17 bp, Homo sapiens
ctccccactgccacctc

SEQ ID NO: 26551 - DNA, 21 bp, Homo sapiens
aacattcccccatttgcccac

SEQ ID NO: 26552 - DNA, 16 bp, Homo sapiens
gggaaggcccctgtct

SEQ ID NO: 26553 - DNA, 18 bp, Homo sapiens
tgactctgcatgaatggg

SEQ ID NO: 26554 - DNA, 19 bp, Homo sapiens
actcttcagtgtcgcgctg

SEQ ID NO: 26555 - DNA, 22 bp, Homo sapiens
ctagatgctcccatagaatcat

SEQ ID NO: 26556 - DNA, 24 bp, Homo sapiens
ccatcatccttatccttgtccaac

SEQ ID NO: 26557 - DNA, 16 bp, Homo sapiens
accagcgaggtcacct

SEQ ID NO: 26558 - DNA, 23 bp, Homo sapiens
ctggtacctggacagagtgctgg

SEQ ID NO: 26559 - DNA, 24 bp, Homo sapiens
ttttgcttgctggtcatggtagta

SEQ ID NO: 26560 - DNA, 22 bp, Homo sapiens
ccatgcggaatgtgaggcgggt

SEQ ID NO: 26561 - DNA, 24 bp, Homo sapiens
taagctggagaaaacaccagcagg

SEQ ID NO: 26562 - DNA, 23 bp, Homo sapiens
ctaactggccttgtggtttcccc

SEQ ID NO: 26563 - DNA, 16 bp, Homo sapiens
gctgcccctcctctct

SEQ ID NO: 26564 - DNA, 24 bp, Homo sapiens
ttttctgatatctgagcttatgtc

SEQ ID NO: 26565 - DNA, 22 bp, Homo sapiens
cctttgccatcgtgtctgatcc

SEQ ID NO: 26566 - DNA, 23 bp, Homo sapiens
ttataggtagctcctgtcccatg

SEQ ID NO: 26567 - DNA, 24 bp, Homo sapiens
gaataacacagacctgtttgaaaa

SEQ ID NO: 26568 - DNA, 24 bp, Homo sapiens
ttacccagagtgaggctcctgatg

SEQ ID NO: 26569 - DNA, 24 bp, Homo sapiens
tctatctctgcctttttggtgatg

SEQ ID NO: 26570 - DNA, 21 bp, Homo sapiens
agggaagacgagggaacatgg

SEQ ID NO: 26571 - DNA, 17 bp, Homo sapiens
ccatgtgactgtgtgca

SEQ ID NO: 26572 - DNA, 24 bp, Homo sapiens
acattgctgtaacttacattgccc

SEQ ID NO: 26573 - DNA, 16 bp, Homo sapiens
gggatgggaagcaggg

SEQ ID NO: 26574 - DNA, 18 bp, Homo sapiens
gttcccccgtgtccccca

SEQ ID NO: 26575 - DNA, 22 bp, Homo sapiens
cagcccagatgagaactagaag

SEQ ID NO: 26576 - DNA, 22 bp, Homo sapiens
cccagcaccttcaagttcacct

SEQ ID NO: 26577 - DNA, 16 bp, Homo sapiens
caacagtgcgcaggat

SEQ ID NO: 26578 - DNA, 21 bp, Homo sapiens
tccaaatccactctggcactc

SEQ ID NO: 26579 - DNA, 16 bp, Homo sapiens
ccgctggctggatgcc

SEQ ID NO: 26580 - DNA, 17 bp, Homo sapiens
tcaggcccatcgggaca

SEQ ID NO: 26581 - DNA, 19 bp, Homo sapiens
cttcattccagatgaccct

SEQ ID NO: 26582 - DNA, 24 bp, Homo sapiens
ctgtcagtacttactgcccatgat

SEQ ID NO: 26583 - DNA, 17 bp, Homo sapiens
aatggggactgcagggc

SEQ ID NO: 26584 - DNA, 24 bp, Homo sapiens
tccctcactatctcattgtcatcc

SEQ ID NO: 26585 - DNA, 19 bp, Homo sapiens
gcctgccataaggattatc

SEQ ID NO: 26586 - DNA, 21 bp, Homo sapiens
ttgttcagagtgttcatcagg

SEQ ID NO: 26587 - DNA, 23 bp, Homo sapiens
tccctgtggcctgtatccaaatt

SEQ ID NO: 26588 - DNA, 24 bp, Homo sapiens
tggcaggttttataagattcgagt

SEQ ID NO: 26589 - DNA, 24 bp, Homo sapiens
tcacaataaatacagaggcaaatt

SEQ ID NO: 26590 - DNA, 20 bp, Homo sapiens
atgcccactcaaatgttttt

SEQ ID NO: 26591 - DNA, 18 bp, Homo sapiens
cccaacaacctcccaaac

SEQ ID NO: 26592 - DNA, 16 bp, Homo sapiens
aaagcaggtaccctcc

SEQ ID NO: 26593 - DNA, 24 bp, Homo sapiens
ccagaaccagaactccttttatca

SEQ ID NO: 26594 - DNA, 18 bp, Homo sapiens
aaaatatgtgagggtggc

SEQ ID NO: 26595 - DNA, 24 bp, Homo sapiens
aaatttgtctccctttgcagggac

SEQ ID NO: 26596 - DNA, 21 bp, Homo sapiens
aggggcggacagatgagattc

SEQ ID NO: 26597 - DNA, 21 bp, Homo sapiens
cctggcttagagaaccagaat

SEQ ID NO: 26598 - DNA, 20 bp, Homo sapiens
gacctaaagaaagctggtac

SEQ ID NO: 26599 - DNA, 24 bp, Homo sapiens
ctccctcccatccatcacaatcct

SEQ ID NO: 26600 - DNA, 23 bp, Homo sapiens
tgaagtttatggtgcaacttgat

SEQ ID NO: 26601 - DNA, 20 bp, Homo sapiens
acttgttgttgggattcagg

SEQ ID NO: 26602 - DNA, 22 bp, Homo sapiens
atcattttggatttttccttct

SEQ ID NO: 26603 - DNA, 24 bp, Homo sapiens
atctggatgaagatgggagagttg

SEQ ID NO: 26604 - DNA, 20 bp, Homo sapiens
gctataatgggtttctgaga

SEQ ID NO: 26605 - DNA, 22 bp, Homo sapiens
gaagaagcggctgaaaagtaag

SEQ ID NO: 26606 - DNA, 23 bp, Homo sapiens
gggttgggggagctttttccttc

SEQ ID NO: 26607 - DNA, 24 bp, Homo sapiens
gctggatgagaagaaagcggatgg

SEQ ID NO: 26608 - DNA, 24 bp, Homo sapiens
ccctcatagcttttgcctagtggt

SEQ ID NO: 26609 - DNA, 17 bp, Homo sapiens
ggtggtgattctgtgcc

SEQ ID NO: 26610 - DNA, 22 bp, Homo sapiens
gttctgggtctctctcacttac

SEQ ID NO: 26611 - DNA, 23 bp, Homo sapiens
aacatcacgaagaggaccctact

SEQ ID NO: 26612 - DNA, 24 bp, Homo sapiens
gagctgcctctcaatcaacccatc

SEQ ID NO: 26613 - DNA, 18 bp, Homo sapiens
tgccattccttgagagtc

SEQ ID NO: 26614 - DNA, 18 bp, Homo sapiens
gtctgctggataccagtg

SEQ ID NO: 26615 - DNA, 23 bp, Homo sapiens
ggacacgtaaccacccaaaatgc

SEQ ID NO: 26616 - DNA, 16 bp, Homo sapiens
cccctgagtcgggtct

SEQ ID NO: 26617 - DNA, 23 bp, Homo sapiens
agaagtagcattcaggttaaagt

SEQ ID NO: 26618 - DNA, 17 bp, Homo sapiens
gcgtgtttgaccgaggc

SEQ ID NO: 26619 - DNA, 21 bp, Homo sapiens
agggaaggctgtctctggggg

SEQ ID NO: 26620 - DNA, 24 bp, Homo sapiens
tccaaaatctacttggtcatgtat

SEQ ID NO: 26621 - DNA, 16 bp, Homo sapiens
acattgccatgcccga

SEQ ID NO: 26622 - DNA, 23 bp, Homo sapiens
ccagctattacgtatattgtcac

SEQ ID NO: 26623 - DNA, 21 bp, Homo sapiens
cgatgtggaagatgtccgtgc

SEQ ID NO: 26624 - DNA, 20 bp, Homo sapiens
gtgggatattatgatgcagc

SEQ ID NO: 26625 - DNA, 24 bp, Homo sapiens
tcccactgttcttattccctctgg

SEQ ID NO: 26626 - DNA, 18 bp, Homo sapiens
ggatgtgtggaggaggag

SEQ ID NO: 26627 - DNA, 20 bp, Homo sapiens
cggacatccccagtgaagac

SEQ ID NO: 26628 - DNA, 24 bp, Homo sapiens
atatcttagtgggcggagctgaga

SEQ ID NO: 26629 - DNA, 22 bp, Homo sapiens
gtttcaggagcaggaggaatgc

SEQ ID NO: 26630 - DNA, 16 bp, Homo sapiens
cttaaccgctggctgg

SEQ ID NO: 26631 - DNA, 19 bp, Homo sapiens
cagccccacagatgccaac

SEQ ID NO: 26632 - DNA, 18 bp, Homo sapiens
ccctcttctccttcccag

SEQ ID NO: 26633 - DNA, 24 bp, Homo sapiens
cctttcttcaaatctacctgtggt

SEQ ID NO: 26634 - DNA, 23 bp, Homo sapiens
tgattggaagattggattagatc

SEQ ID NO: 26635 - DNA, 17 bp, Homo sapiens
tcgtcttcgtccaaggc

SEQ ID NO: 26636 - DNA, 16 bp, Homo sapiens
ctttccttgggccacg

SEQ ID NO: 26637 - DNA, 24 bp, Homo sapiens
tttgttcccaatatcttcaatgac

SEQ ID NO: 26638 - DNA, 16 bp, Homo sapiens
ataaggggggctctgc

SEQ ID NO: 26639 - DNA, 21 bp, Homo sapiens
aggtagaagagtggatgcaga

SEQ ID NO: 26640 - DNA, 16 bp, Homo sapiens
ggttcatcctggatgc

SEQ ID NO: 26641 - DNA, 22 bp, Homo sapiens
cctctgaagaacaagaaggccc

SEQ ID NO: 26642 - DNA, 16 bp, Homo sapiens
tacaggggagcgtagg

SEQ ID NO: 26643 - DNA, 18 bp, Homo sapiens
acctgggacaggaaccaa

SEQ ID NO: 26644 - DNA, 20 bp, Homo sapiens
ccatgaaggcttggaaattc

SEQ ID NO: 26645 - DNA, 22 bp, Homo sapiens
tcttcatcagctgccccaaatc

SEQ ID NO: 26646 - DNA, 19 bp, Homo sapiens
gatctcaggaggaagttgc

SEQ ID NO: 26647 - DNA, 24 bp, Homo sapiens
aagttgtccttttcattttctagc

SEQ ID NO: 26648 - DNA, 23 bp, Homo sapiens
tgtcttcatcaatatttttggag

SEQ ID NO: 26649 - DNA, 24 bp, Homo sapiens
gaagtgagatgctcaatagaggag

SEQ ID NO: 26650 - DNA, 22 bp, Homo sapiens
ggtaataagtatgaagtcaagg

SEQ ID NO: 26651 - DNA, 22 bp, Homo sapiens
tgtgggaaccccatctacaaaa

SEQ ID NO: 26652 - DNA, 20 bp, Homo sapiens
ggggcctctattctcttttc

SEQ ID NO: 26653 - DNA, 24 bp, Homo sapiens
aacccattacctgtgtctccatac

SEQ ID NO: 26654 - DNA, 22 bp, Homo sapiens
ggtgacaatttatgcattgctg

SEQ ID NO: 26655 - DNA, 21 bp, Homo sapiens
gcaccaattacatcaccagtg

SEQ ID NO: 26656 - DNA, 17 bp, Homo sapiens
gctggccagcttcaacc

SEQ ID NO: 26657 - DNA, 23 bp, Homo sapiens
gaaggccctggaggcatgccaag

SEQ ID NO: 26658 - DNA, 23 bp, Homo sapiens
ctacttcaactgcaacaactggc

SEQ ID NO: 26659 - DNA, 20 bp, Homo sapiens
gattctttcctgggtgagcc

SEQ ID NO: 26660 - DNA, 18 bp, Homo sapiens
tggtacctggaccatgtg

SEQ ID NO: 26661 - DNA, 20 bp, Homo sapiens
acctctgggcatgtccatgg

SEQ ID NO: 26662 - DNA, 16 bp, Homo sapiens
tgtgggccttggcttc

SEQ ID NO: 26663 - DNA, 20 bp, Homo sapiens
cggtcaccttccaccttgct

SEQ ID NO: 26664 - DNA, 23 bp, Homo sapiens
ggacctctctttggagtaaacat

SEQ ID NO: 26665 - DNA, 19 bp, Homo sapiens
tcatgtcggtcacaatcac

SEQ ID NO: 26666 - DNA, 22 bp, Homo sapiens
tttatagatgaggaaaccgagg

SEQ ID NO: 26667 - DNA, 22 bp, Homo sapiens
tgagaaccaacaatgtgggcct

SEQ ID NO: 26668 - DNA, 24 bp, Homo sapiens
agatttgggcctttggtagcccct

SEQ ID NO: 26669 - DNA, 21 bp, Homo sapiens
aactgcacgtgttcattgcag

SEQ ID NO: 26670 - DNA, 23 bp, Homo sapiens
gtcaatattgaagtcaatccctc

SEQ ID NO: 26671 - DNA, 16 bp, Homo sapiens
atgccagcccttggct

SEQ ID NO: 26672 - DNA, 24 bp, Homo sapiens
ctcacctgactttatagatgaggc

SEQ ID NO: 26673 - DNA, 24 bp, Homo sapiens
atcttggaatgggatcttgttgct

SEQ ID NO: 26674 - DNA, 23 bp, Homo sapiens
ttgcccttctcaaaggcagactt

SEQ ID NO: 26675 - DNA, 24 bp, Homo sapiens
tttggagagaatgggctctctccc

SEQ ID NO: 26676 - DNA, 23 bp, Homo sapiens
ataccacttaataacctgtggtc

SEQ ID NO: 26677 - DNA, 21 bp, Homo sapiens
cacgggggatgttcgcggtgc

SEQ ID NO: 26678 - DNA, 23 bp, Homo sapiens
tgggtcccagaacctaatcaaca

SEQ ID NO: 26679 - DNA, 23 bp, Homo sapiens
tttttttctgagcctgcaatctg

SEQ ID NO: 26680 - DNA, 23 bp, Homo sapiens
cacttgctggtgagctggagctt

SEQ ID NO: 26681 - DNA, 22 bp, Homo sapiens
agtcctttgtgcttgggcctcc

SEQ ID NO: 26682 - DNA, 21 bp, Homo sapiens
cattggcatccgtccctgcac

SEQ ID NO: 26683 - DNA, 22 bp, Homo sapiens
aggacatatcgtgggtctcacc

SEQ ID NO: 26684 - DNA, 17 bp, Homo sapiens
ggagctggaacacgagt

SEQ ID NO: 26685 - DNA, 24 bp, Homo sapiens
acatgggataatcagtgaggaagg

SEQ ID NO: 26686 - DNA, 19 bp, Homo sapiens
catcgacttcctggccctg

SEQ ID NO: 26687 - DNA, 24 bp, Homo sapiens
atagacaggaacagacccctgccc

SEQ ID NO: 26688 - DNA, 16 bp, Homo sapiens
gggagaaggcagccga

SEQ ID NO: 26689 - DNA, 20 bp, Homo sapiens
cgcacctctggccttgtagt

SEQ ID NO: 26690 - DNA, 17 bp, Homo sapiens
gctcagggaggaggtct

SEQ ID NO: 26691 - DNA, 24 bp, Homo sapiens
cgtagttcagcagctccgcttcgt

SEQ ID NO: 26692 - DNA, 16 bp, Homo sapiens
acggggcactctggcc

SEQ ID NO: 26693 - DNA, 22 bp, Homo sapiens
cttttcttctggggcatcattc

SEQ ID NO: 26694 - DNA, 16 bp, Homo sapiens
gaccaaaggctgagcc

SEQ ID NO: 26695 - DNA, 21 bp, Homo sapiens
tggtgggacccctcacagaga

SEQ ID NO: 26696 - DNA, 16 bp, Homo sapiens
cgctggtcccaccggc

SEQ ID NO: 26697 - DNA, 17 bp, Homo sapiens
ccagggctggtgcgaca

SEQ ID NO: 26698 - DNA, 22 bp, Homo sapiens
gagacgcaggtgcccgcgctgc

SEQ ID NO: 26699 - DNA, 23 bp, Homo sapiens
gggtgtggccgggccggggtggg

SEQ ID NO: 26700 - DNA, 16 bp, Homo sapiens
gggtgcacgtgacccc

SEQ ID NO: 26701 - DNA, 19 bp, Homo sapiens
cgtagtagcggcagtcggc

SEQ ID NO: 26702 - DNA, 16 bp, Homo sapiens
ccgcccacccgggcct

SEQ ID NO: 26703 - DNA, 24 bp, Homo sapiens
atgttctccctccggaagccggcc

SEQ ID NO: 26704 - DNA, 20 bp, Homo sapiens
ctggagattcccgttcacac

SEQ ID NO: 26705 - DNA, 17 bp, Homo sapiens
cagtggctgccaggagc

SEQ ID NO: 26706 - DNA, 21 bp, Homo sapiens
gcccagctagttttttgtatt

SEQ ID NO: 26707 - DNA, 18 bp, Homo sapiens
ttcctgaccccctgggtg

SEQ ID NO: 26708 - DNA, 24 bp, Homo sapiens
ccaggctggtcttgaactcctagg

SEQ ID NO: 26709 - DNA, 18 bp, Homo sapiens
ttggatgggggtgggaag

SEQ ID NO: 26710 - DNA, 23 bp, Homo sapiens
attatagacctgagccactgctc

SEQ ID NO: 26711 - DNA, 24 bp, Homo sapiens
gtactcagacatcaccatcatgtt

SEQ ID NO: 26712 - DNA, 22 bp, Homo sapiens
ttctaaatgaaccagcacagtc

SEQ ID NO: 26713 - DNA, 19 bp, Homo sapiens
tcctcacctactgcaacct

SEQ ID NO: 26714 - DNA, 16 bp, Homo sapiens
gctccagcagcccctt

SEQ ID NO: 26715 - DNA, 17 bp, Homo sapiens
gaccactggccactccc

SEQ ID NO: 26716 - DNA, 16 bp, Homo sapiens
cttcaggtgggcgcac

SEQ ID NO: 26717 - DNA, 16 bp, Homo sapiens
ctgggatgcgggaggc

SEQ ID NO: 26718 - DNA, 18 bp, Homo sapiens
ccccaggaggtgaggttg

SEQ ID NO: 26719 - DNA, 18 bp, Homo sapiens
ccactctcggaggagacc

SEQ ID NO: 26720 - DNA, 19 bp, Homo sapiens
aaaggcgtggttctgtgga

SEQ ID NO: 26721 - DNA, 16 bp, Homo sapiens
gccctgaccgcgtggg

SEQ ID NO: 26722 - DNA, 16 bp, Homo sapiens
cttccccgagggcctc

SEQ ID NO: 26723 - DNA, 18 bp, Homo sapiens
gtctcactgcacctccac

SEQ ID NO: 26724 - DNA, 24 bp, Homo sapiens
atgaagttgaactggtgtgtgtgc

SEQ ID NO: 26725 - DNA, 17 bp, Homo sapiens
gaggcgatctcggggtt

SEQ ID NO: 26726 - DNA, 22 bp, Homo sapiens
catccccggtgctccgccatcc

SEQ ID NO: 26727 - DNA, 18 bp, Homo sapiens
cctctgcaaggtcatccc

SEQ ID NO: 26728 - DNA, 23 bp, Homo sapiens
ccagtgcacatcagagggacccc

SEQ ID NO: 26729 - DNA, 24 bp, Homo sapiens
ccctttctgcaggtggggagatcc

SEQ ID NO: 26730 - DNA, 23 bp, Homo sapiens
caccctgtgatacgtcccctcac

SEQ ID NO: 26731 - DNA, 17 bp, Homo sapiens
ctgtcagaggtggagga

SEQ ID NO: 26732 - DNA, 24 bp, Homo sapiens
tgccacatcctcccacaggccttt

SEQ ID NO: 26733 - DNA, 16 bp, Homo sapiens
cagcggctccgggact

SEQ ID NO: 26734 - DNA, 17 bp, Homo sapiens
gagagagaagaccacct

SEQ ID NO: 26735 - DNA, 16 bp, Homo sapiens
ggtgcaggaggcgccc

SEQ ID NO: 26736 - DNA, 18 bp, Homo sapiens
agtgccctcaccccaagg

SEQ ID NO: 26737 - DNA, 16 bp, Homo sapiens
gtgtctgcccaggggg

SEQ ID NO: 26738 - DNA, 18 bp, Homo sapiens
tgtgtctgccgtggggcc

SEQ ID NO: 26739 - DNA, 16 bp, Homo sapiens
cctgtgcccctcctcc

SEQ ID NO: 26740 - DNA, 23 bp, Homo sapiens
tgatccaatgctcatcaatgggc

SEQ ID NO: 26741 - DNA, 20 bp, Homo sapiens
ctccaggcagacccccagcc

SEQ ID NO: 26742 - DNA, 24 bp, Homo sapiens
gccaaagcccacctccaggacccg

SEQ ID NO: 26743 - DNA, 16 bp, Homo sapiens
ctggccgccgccgcct

SEQ ID NO: 26744 - DNA, 20 bp, Homo sapiens
cacttcccaggcgaggagac

SEQ ID NO: 26745 - DNA, 17 bp, Homo sapiens
acgcacctgcgcatcct

SEQ ID NO: 26746 - DNA, 16 bp, Homo sapiens
gggtcggggcagcccc

SEQ ID NO: 26747 - DNA, 17 bp, Homo sapiens
ggcgagaactgcagccc

SEQ ID NO: 26748 - DNA, 19 bp, Homo sapiens
ggctacctttggaggaggc

SEQ ID NO: 26749 - DNA, 16 bp, Homo sapiens
cgggtcgccgtccagc

SEQ ID NO: 26750 - DNA, 18 bp, Homo sapiens
gctccatcaccggcttgc

SEQ ID NO: 26751 - DNA, 18 bp, Homo sapiens
gttggacccgcccccggc

SEQ ID NO: 26752 - DNA, 19 bp, Homo sapiens
ccgccccccacgcggggct

SEQ ID NO: 26753 - DNA, 16 bp, Homo sapiens
aggccgctcccggagc

SEQ ID NO: 26754 - DNA, 16 bp, Homo sapiens
acctgagccgcgcgga

SEQ ID NO: 26755 - DNA, 18 bp, Homo sapiens
cagctgatgccggagggt

SEQ ID NO: 26756 - DNA, 17 bp, Homo sapiens
tgggagacacagcccgc

SEQ ID NO: 26757 - DNA, 16 bp, Homo sapiens
gcgatcggacccaggc

SEQ ID NO: 26758 - DNA, 22 bp, Homo sapiens
ttctccaccgtgaaaagtcagc

SEQ ID NO: 26759 - DNA, 17 bp, Homo sapiens
cagcatgacagccccgg

SEQ ID NO: 26760 - DNA, 17 bp, Homo sapiens
ccatacccggggttggg

SEQ ID NO: 26761 - DNA, 24 bp, Homo sapiens
tcagagctcttccttggcaggagc

SEQ ID NO: 26762 - DNA, 20 bp, Homo sapiens
gaaggtcttcctcttctggg

SEQ ID NO: 26763 - DNA, 19 bp, Homo sapiens
ttggagaaaggggaaaagg

SEQ ID NO: 26764 - DNA, 16 bp, Homo sapiens
ttgcggcccttggctc

SEQ ID NO: 26765 - DNA, 18 bp, Homo sapiens
gaccgagcggcttctgac

SEQ ID NO: 26766 - DNA, 17 bp, Homo sapiens
ctcacctgcaccgtgac

SEQ ID NO: 26767 - DNA, 16 bp, Homo sapiens
gcccctccgacacccc

SEQ ID NO: 26768 - DNA, 22 bp, Homo sapiens
ttaagactctcttcaaggagca

SEQ ID NO: 26769 - DNA, 24 bp, Homo sapiens
tttcatgagtccctgcgacaagtt

SEQ ID NO: 26770 - DNA, 18 bp, Homo sapiens
gtcttgaactcccagcct

SEQ ID NO: 26771 - DNA, 17 bp, Homo sapiens
cccaaacaggatgagct

SEQ ID NO: 26772 - DNA, 18 bp, Homo sapiens
aagttagcagggccctgc

SEQ ID NO: 26773 - DNA, 19 bp, Homo sapiens
gaagaggtgtcggaaggcg

SEQ ID NO: 26774 - DNA, 17 bp, Homo sapiens
cttccagggcctgtgcc

SEQ ID NO: 26775 - DNA, 16 bp, Homo sapiens
tgctcccgcgtgtagg

SEQ ID NO: 26776 - DNA, 22 bp, Homo sapiens
cctctactaccctctccccagc

SEQ ID NO: 26777 - DNA, 16 bp, Homo sapiens
cccaccagcacctgcc

SEQ ID NO: 26778 - DNA, 24 bp, Homo sapiens
gacattccgggaagagaacaccat

SEQ ID NO: 26779 - DNA, 16 bp, Homo sapiens
ctgcccgcccaccagc

SEQ ID NO: 26780 - DNA, 24 bp, Homo sapiens
acggagcggatgacaccttcgcag

SEQ ID NO: 26781 - DNA, 17 bp, Homo sapiens
gcagagaaggggagggc

SEQ ID NO: 26782 - DNA, 24 bp, Homo sapiens
tgctgtggaccaggtgctggtggg

SEQ ID NO: 26783 - DNA, 17 bp, Homo sapiens
cccaccacggacatacg

SEQ ID NO: 26784 - DNA, 16 bp, Homo sapiens
tgcagttgggcgggca

SEQ ID NO: 26785 - DNA, 16 bp, Homo sapiens
gcctcggtggtagtac

SEQ ID NO: 26786 - DNA, 16 bp, Homo sapiens
ggccggactcacaggc

SEQ ID NO: 26787 - DNA, 19 bp, Homo sapiens
cccactcaccagtaaccac

SEQ ID NO: 26788 - DNA, 17 bp, Homo sapiens
tgtcactgggccggtat

SEQ ID NO: 26789 - DNA, 19 bp, Homo sapiens
agccacagctgttgatttt

SEQ ID NO: 26790 - DNA, 17 bp, Homo sapiens
cttgctctctgccagcg

SEQ ID NO: 26791 - DNA, 18 bp, Homo sapiens
caagcaatccttcctcct

SEQ ID NO: 26792 - DNA, 16 bp, Homo sapiens
ctcggggggatccacc

SEQ ID NO: 26793 - DNA, 21 bp, Homo sapiens
gtgccaggcctgtaggaatga

SEQ ID NO: 26794 - DNA, 20 bp, Homo sapiens
tgaggttcttgtaactggag

SEQ ID NO: 26795 - DNA, 19 bp, Homo sapiens
ggactctggggagaccagc

SEQ ID NO: 26796 - DNA, 16 bp, Homo sapiens
ccccaccctgggcccc

SEQ ID NO: 26797 - DNA, 24 bp, Homo sapiens
gtccttagactgcatccaggtgga

SEQ ID NO: 26798 - DNA, 20 bp, Homo sapiens
ggggggccctgtccccacct

SEQ ID NO: 26799 - DNA, 24 bp, Homo sapiens
gacgatctcaccctcttggaaagc

SEQ ID NO: 26800 - DNA, 19 bp, Homo sapiens
cacgtgctgactctgcagc

SEQ ID NO: 26801 - DNA, 24 bp, Homo sapiens
ctcaccccagcaactacttcccta

SEQ ID NO: 26802 - DNA, 19 bp, Homo sapiens
gaggttaatggtcttcagc

SEQ ID NO: 26803 - DNA, 18 bp, Homo sapiens
gtgagcacttcccctgcc

SEQ ID NO: 26804 - DNA, 21 bp, Homo sapiens
cggggggcctcaccaggacgc

SEQ ID NO: 26805 - DNA, 17 bp, Homo sapiens
gaagggacccgaagacg

SEQ ID NO: 26806 - DNA, 16 bp, Homo sapiens
aagacactccctgacc

SEQ ID NO: 26807 - DNA, 24 bp, Homo sapiens
tggtcaatgtcaccatccacttcc

SEQ ID NO: 26808 - DNA, 16 bp, Homo sapiens
cctgacagaccccggg

SEQ ID NO: 26809 - DNA, 19 bp, Homo sapiens
gactgctataccttcagcg

SEQ ID NO: 26810 - DNA, 23 bp, Homo sapiens
gagttccagggcagggacctggt

SEQ ID NO: 26811 - DNA, 19 bp, Homo sapiens
ctccaggctgatggggatc

SEQ ID NO: 26812 - DNA, 16 bp, Homo sapiens
atgagggagggagccc

SEQ ID NO: 26813 - DNA, 16 bp, Homo sapiens
tcaggggctcaccgtg

SEQ ID NO: 26814 - DNA, 18 bp, Homo sapiens
gggctgccaaggtttact

SEQ ID NO: 26815 - DNA, 20 bp, Homo sapiens
atctggggcttggggaatcc

SEQ ID NO: 26816 - DNA, 16 bp, Homo sapiens
cacagtgggcggatcc

SEQ ID NO: 26817 - DNA, 17 bp, Homo sapiens
tgtgctgatctgaggct

SEQ ID NO: 26818 - DNA, 24 bp, Homo sapiens
gtaagcaccccagtgtcttccagc

SEQ ID NO: 26819 - DNA, 23 bp, Homo sapiens
tgaccaccacgtcaaacaggagc

SEQ ID NO: 26820 - DNA, 23 bp, Homo sapiens
tgagcccactgaccaaccaaaac

SEQ ID NO: 26821 - DNA, 20 bp, Homo sapiens
ggaagcctcgaaggagtgag

SEQ ID NO: 26822 - DNA, 20 bp, Homo sapiens
aatgctagcctcccaaggct

SEQ ID NO: 26823 - DNA, 16 bp, Homo sapiens
caggcggggaggacac

SEQ ID NO: 26824 - DNA, 23 bp, Homo sapiens
gcaggagacaacagcttccggct

SEQ ID NO: 26825 - DNA, 16 bp, Homo sapiens
ggggtgagggcctgac

SEQ ID NO: 26826 - DNA, 22 bp, Homo sapiens
ccctgtccttcctcctctgcgc

SEQ ID NO: 26827 - DNA, 24 bp, Homo sapiens
gctcccacaggctgatgacccgtc

SEQ ID NO: 26828 - DNA, 20 bp, Homo sapiens
cgtcatgtgtgctggtgtcc

SEQ ID NO: 26829 - DNA, 16 bp, Homo sapiens
agcacatcgctggtga

SEQ ID NO: 26830 - DNA, 16 bp, Homo sapiens
cctgtgcctggtcagg

SEQ ID NO: 26831 - DNA, 16 bp, Homo sapiens
gtgttggcaggacgca

SEQ ID NO: 26832 - DNA, 24 bp, Homo sapiens
ggttcatgtggcggcagcggggac

SEQ ID NO: 26833 - DNA, 17 bp, Homo sapiens
cctgggggaggatatgg

SEQ ID NO: 26834 - DNA, 18 bp, Homo sapiens
ctggtacatcctgctcgt

SEQ ID NO: 26835 - DNA, 16 bp, Homo sapiens
aagttctgcgggtggg

SEQ ID NO: 26836 - DNA, 24 bp, Homo sapiens
catgaagatcggcatcgaggccaa

SEQ ID NO: 26837 - DNA, 16 bp, Homo sapiens
cccacccacaccagca

SEQ ID NO: 26838 - DNA, 23 bp, Homo sapiens
tgtcagtgcctatccggggccat

SEQ ID NO: 26839 - DNA, 17 bp, Homo sapiens
ggcccagctgcatgtgc

SEQ ID NO: 26840 - DNA, 22 bp, Homo sapiens
ggccagataggttgacgcagct

SEQ ID NO: 26841 - DNA, 16 bp, Homo sapiens
cggggctggtgagggc

SEQ ID NO: 26842 - DNA, 17 bp, Homo sapiens
gcacctcgacgctgctg

SEQ ID NO: 26843 - DNA, 23 bp, Homo sapiens
caggtgcagtgacagatatatct

SEQ ID NO: 26844 - DNA, 18 bp, Homo sapiens
gacgtggccacgccccct

SEQ ID NO: 26845 - DNA, 19 bp, Homo sapiens
acgcagcagcagaagcgca

SEQ ID NO: 26846 - DNA, 16 bp, Homo sapiens
aaggccccgcccctcc

SEQ ID NO: 26847 - DNA, 17 bp, Homo sapiens
ttcacatgatagggccc

SEQ ID NO: 26848 - DNA, 16 bp, Homo sapiens
cacaccctcaacgagg

SEQ ID NO: 26849 - DNA, 19 bp, Homo sapiens
acagtgtcaatgacaaggt

SEQ ID NO: 26850 - DNA, 16 bp, Homo sapiens
ccctgcccagcgtcat

SEQ ID NO: 26851 - DNA, 17 bp, Homo sapiens
accacaggggacagtgg

SEQ ID NO: 26852 - DNA, 23 bp, Homo sapiens
cttctgtggctggatcgtgctgg

SEQ ID NO: 26853 - DNA, 16 bp, Homo sapiens
acaggcactcagacac

SEQ ID NO: 26854 - DNA, 19 bp, Homo sapiens
ccggccattcatgtggggc

SEQ ID NO: 26855 - DNA, 16 bp, Homo sapiens
ctgctgcgcctgcatg

SEQ ID NO: 26856 - DNA, 16 bp, Homo sapiens
gcccccggttcctggc

SEQ ID NO: 26857 - DNA, 21 bp, Homo sapiens
aagaggctgatgaaggagtaa

SEQ ID NO: 26858 - DNA, 19 bp, Homo sapiens
ggcagttccgctcactctc

SEQ ID NO: 26859 - DNA, 24 bp, Homo sapiens
ctgaccttgatggtgtcgtaggcg

SEQ ID NO: 26860 - DNA, 17 bp, Homo sapiens
atgtttgtgacgttcgc

SEQ ID NO: 26861 - DNA, 17 bp, Homo sapiens
ggcagactccagggcac

SEQ ID NO: 26862 - DNA, 24 bp, Homo sapiens
ctcttctcccagctctacctttac

SEQ ID NO: 26863 - DNA, 20 bp, Homo sapiens
tagagtctcccatattctct

SEQ ID NO: 26864 - DNA, 18 bp, Homo sapiens
cttcatcgcgctcatcac

SEQ ID NO: 26865 - DNA, 16 bp, Homo sapiens
tcctctgcgcctgcgc

SEQ ID NO: 26866 - DNA, 18 bp, Homo sapiens
ggcccagcaagtgcaaag

SEQ ID NO: 26867 - DNA, 16 bp, Homo sapiens
cttgccggaggtgggg

SEQ ID NO: 26868 - DNA, 16 bp, Homo sapiens
ggcggacttcaagggc

SEQ ID NO: 26869 - DNA, 16 bp, Homo sapiens
cgggactcgaaccttc

SEQ ID NO: 26870 - DNA, 21 bp, Homo sapiens
cggcttctctccccagcatcc

SEQ ID NO: 26871 - DNA, 21 bp, Homo sapiens
cgtcagttttctctggctcgc

SEQ ID NO: 26872 - DNA, 24 bp, Homo sapiens
tacatcgcacagtgccaggacagc

SEQ ID NO: 26873 - DNA, 18 bp, Homo sapiens
caccagcagcgaatgctc

SEQ ID NO: 26874 - DNA, 23 bp, Homo sapiens
gcctgcagccttctctgctgctg

SEQ ID NO: 26875 - DNA, 17 bp, Homo sapiens
ggcgggggtctctgcag

SEQ ID NO: 26876 - DNA, 20 bp, Homo sapiens
ggaatggggaaaggggagcg

SEQ ID NO: 26877 - DNA, 19 bp, Homo sapiens
ctcgggcgcgacagggagc

SEQ ID NO: 26878 - DNA, 21 bp, Homo sapiens
tccttcctccagggacccctc

SEQ ID NO: 26879 - DNA, 23 bp, Homo sapiens
tcaacaccctccccacccagtct

SEQ ID NO: 26880 - DNA, 19 bp, Homo sapiens
caatggaaggaggtggatg

SEQ ID NO: 26881 - DNA, 21 bp, Homo sapiens
caaaaaaaacccacactcagt

SEQ ID NO: 26882 - DNA, 16 bp, Homo sapiens
gacccggccaacatca

SEQ ID NO: 26883 - DNA, 21 bp, Homo sapiens
cagcagccccaagaggagagt

SEQ ID NO: 26884 - DNA, 17 bp, Homo sapiens
ctcctccttccccctgc

SEQ ID NO: 26885 - DNA, 18 bp, Homo sapiens
catcccagcagacctaac

SEQ ID NO: 26886 - DNA, 18 bp, Homo sapiens
ctgtgtctagacccaggg

SEQ ID NO: 26887 - DNA, 24 bp, Homo sapiens
gaaagtgcggatttccatgggttc

SEQ ID NO: 26888 - DNA, 19 bp, Homo sapiens
gaagcaggttaagagtctg

SEQ ID NO: 26889 - DNA, 24 bp, Homo sapiens
tttcagatcctttaagcccctaac

SEQ ID NO: 26890 - DNA, 17 bp, Homo sapiens
gagaccacgctggtggc

SEQ ID NO: 26891 - DNA, 23 bp, Homo sapiens
gggtcctggccaacatcccatgc

SEQ ID NO: 26892 - DNA, 22 bp, Homo sapiens
actcatctgggcccatcccctt

SEQ ID NO: 26893 - DNA, 21 bp, Homo sapiens
caccccttccctacccctgac

SEQ ID NO: 26894 - DNA, 24 bp, Homo sapiens
ttgagaaggagatcggagagaggc

SEQ ID NO: 26895 - DNA, 19 bp, Homo sapiens
cctcgcggagctggttggc

SEQ ID NO: 26896 - DNA, 16 bp, Homo sapiens
gacgtaacctgagcgc

SEQ ID NO: 26897 - DNA, 24 bp, Homo sapiens
gtgaaggtggagaacaggtcctgc

SEQ ID NO: 26898 - DNA, 16 bp, Homo sapiens
gggccccgaaatggtg

SEQ ID NO: 26899 - DNA, 23 bp, Homo sapiens
ccaggtttctcttctctccctct

SEQ ID NO: 26900 - DNA, 22 bp, Homo sapiens
tcccgcagttctcagggctgcg

SEQ ID NO: 26901 - DNA, 22 bp, Homo sapiens
caccctcaagttcaaggtaacg

SEQ ID NO: 26902 - DNA, 19 bp, Homo sapiens
cgcccttctccatccaggc

SEQ ID NO: 26903 - DNA, 18 bp, Homo sapiens
tggtgctccaagcgcagc

SEQ ID NO: 26904 - DNA, 16 bp, Homo sapiens
ctctccggcgaaaccc

SEQ ID NO: 26905 - DNA, 16 bp, Homo sapiens
agggcggcaggtccct

SEQ ID NO: 26906 - DNA, 24 bp, Homo sapiens
ctacaatctcggggctcctccgcg

SEQ ID NO: 26907 - DNA, 24 bp, Homo sapiens
cccaggggatggggttggcccgag

SEQ ID NO: 26908 - DNA, 16 bp, Homo sapiens
gcaggaggtcctggcc

SEQ ID NO: 26909 - DNA, 22 bp, Homo sapiens
taggaaactccgcacccaaacc

SEQ ID NO: 26910 - DNA, 18 bp, Homo sapiens
ccacctggtgctgctgga

SEQ ID NO: 26911 - DNA, 16 bp, Homo sapiens
ccgctgcccctcacct

SEQ ID NO: 26912 - DNA, 18 bp, Homo sapiens
gacgcggagtatcggagc

SEQ ID NO: 26913 - DNA, 18 bp, Homo sapiens
ccagcaccacctgagggg

SEQ ID NO: 26914 - DNA, 16 bp, Homo sapiens
tctcaccccctcctgg

SEQ ID NO: 26915 - DNA, 16 bp, Homo sapiens
cagcctgggctgtgtc

SEQ ID NO: 26916 - DNA, 22 bp, Homo sapiens
tttcttttgacattcccacacg

SEQ ID NO: 26917 - DNA, 20 bp, Homo sapiens
ccgttctccattagtggctc

SEQ ID NO: 26918 - DNA, 16 bp, Homo sapiens
gttgccctaccagacc

SEQ ID NO: 26919 - DNA, 18 bp, Homo sapiens
gcagcctgagagatggct

SEQ ID NO: 26920 - DNA, 24 bp, Homo sapiens
aagaaaagaaagaaacggagtcct

SEQ ID NO: 26921 - DNA, 24 bp, Homo sapiens
ccttcaactcccaggatggaaaca

SEQ ID NO: 26922 - DNA, 17 bp, Homo sapiens
aaggtccagcaggggtc

SEQ ID NO: 26923 - DNA, 22 bp, Homo sapiens
cttatctgcagcatctcaaagc

SEQ ID NO: 26924 - DNA, 24 bp, Homo sapiens
ctgacccactcaccatgagctcca

SEQ ID NO: 26925 - DNA, 17 bp, Homo sapiens
atcacggtagctctccc

SEQ ID NO: 26926 - DNA, 22 bp, Homo sapiens
tcagcacagtcagctgcatgtt

SEQ ID NO: 26927 - DNA, 21 bp, Homo sapiens
gaaactgaaccagacggagcc

SEQ ID NO: 26928 - DNA, 17 bp, Homo sapiens
aaccccaaccccaggca

SEQ ID NO: 26929 - DNA, 23 bp, Homo sapiens
agccagatcccaagcctgatcag

SEQ ID NO: 26930 - DNA, 19 bp, Homo sapiens
tatcgaggtggggaggtgc

SEQ ID NO: 26931 - DNA, 23 bp, Homo sapiens
gcctgggtgacagagcgagactc

SEQ ID NO: 26932 - DNA, 24 bp, Homo sapiens
gactggatagtagtttcctgccac

SEQ ID NO: 26933 - DNA, 20 bp, Homo sapiens
atggcgtgaagccgggaggc

SEQ ID NO: 26934 - DNA, 16 bp, Homo sapiens
agcaatggccgggaga

SEQ ID NO: 26935 - DNA, 21 bp, Homo sapiens
cgcccttcactctcccttcgt

SEQ ID NO: 26936 - DNA, 20 bp, Homo sapiens
cctgggggaaggaggtcatc

SEQ ID NO: 26937 - DNA, 16 bp, Homo sapiens
caccacccctgggccc

SEQ ID NO: 26938 - DNA, 17 bp, Homo sapiens
gggcagaggggtttatc

SEQ ID NO: 26939 - DNA, 19 bp, Homo sapiens
ctcctctccaggatctccc

SEQ ID NO: 26940 - DNA, 18 bp, Homo sapiens
gtggggccgatacctgtg

SEQ ID NO: 26941 - DNA, 17 bp, Homo sapiens
gcggtgtgtcaaaacgg

SEQ ID NO: 26942 - DNA, 17 bp, Homo sapiens
ggtgttcccaggtggtt

SEQ ID NO: 26943 - DNA, 20 bp, Homo sapiens
gggatggcaaggttgtgagc

SEQ ID NO: 26944 - DNA, 16 bp, Homo sapiens
ctcacccgtgtgcccg

SEQ ID NO: 26945 - DNA, 18 bp, Homo sapiens
agcctgtgccactcaccc

SEQ ID NO: 26946 - DNA, 16 bp, Homo sapiens
ggccagggttggggga

SEQ ID NO: 26947 - DNA, 17 bp, Homo sapiens
tgggtacaggcgaacca

SEQ ID NO: 26948 - DNA, 21 bp, Homo sapiens
aaaaaaaaagaattatgtggc

SEQ ID NO: 26949 - DNA, 18 bp, Homo sapiens
ctgcaccaagggtgtctg

SEQ ID NO: 26950 - DNA, 24 bp, Homo sapiens
cctcaaatatttcccccgctgatc

SEQ ID NO: 26951 - DNA, 20 bp, Homo sapiens
catcttcagacccaaccaac

SEQ ID NO: 26952 - DNA, 22 bp, Homo sapiens
ctaccctcactctacacatggc

SEQ ID NO: 26953 - DNA, 18 bp, Homo sapiens
caactccaggtacaacgc

SEQ ID NO: 26954 - DNA, 21 bp, Homo sapiens
caactgcccactcatcattcc

SEQ ID NO: 26955 - DNA, 16 bp, Homo sapiens
gtggggtggtggtgct

SEQ ID NO: 26956 - DNA, 24 bp, Homo sapiens
ctcacaggcagcggtttctgttgg

SEQ ID NO: 26957 - DNA, 19 bp, Homo sapiens
gcaactcctgctgcctgtt

SEQ ID NO: 26958 - DNA, 23 bp, Homo sapiens
actttcgttgtcacctatactgg

SEQ ID NO: 26959 - DNA, 21 bp, Homo sapiens
acatccgggcaacgtttgatc

SEQ ID NO: 26960 - DNA, 16 bp, Homo sapiens
ggccctagctccatgc

SEQ ID NO: 26961 - DNA, 23 bp, Homo sapiens
ttaaaaaaagaaaacacacacac

SEQ ID NO: 26962 - DNA, 17 bp, Homo sapiens
cagaagaaggtctggcg

SEQ ID NO: 26963 - DNA, 21 bp, Homo sapiens
agcctgggctacagagtgaga

SEQ ID NO: 26964 - DNA, 24 bp, Homo sapiens
ccatcaacagccctgtgtcaggat

SEQ ID NO: 26965 - DNA, 23 bp, Homo sapiens
gctttaaccatcgaaaatgaggt

SEQ ID NO: 26966 - DNA, 20 bp, Homo sapiens
ctcaaggacacacaatgagg

SEQ ID NO: 26967 - DNA, 16 bp, Homo sapiens
ctggaagccccaggcc

SEQ ID NO: 26968 - DNA, 21 bp, Homo sapiens
tgacccagagtccacacagct

SEQ ID NO: 26969 - DNA, 17 bp, Homo sapiens
ttctcagcctcactgcc

SEQ ID NO: 26970 - DNA, 21 bp, Homo sapiens
gattgaaatggggtctcacct

SEQ ID NO: 26971 - DNA, 21 bp, Homo sapiens
cctcctcctttatccgaggtg

SEQ ID NO: 26972 - DNA, 16 bp, Homo sapiens
gatgggctgtggtgcg

SEQ ID NO: 26973 - DNA, 23 bp, Homo sapiens
ccttgagttttttgtctccatgc

SEQ ID NO: 26974 - DNA, 19 bp, Homo sapiens
taggtgctgaagcccaggg

SEQ ID NO: 26975 - DNA, 16 bp, Homo sapiens
ccaccacacacacctc

SEQ ID NO: 26976 - DNA, 23 bp, Homo sapiens
gctgtctgagctgggaaatatta

SEQ ID NO: 26977 - DNA, 17 bp, Homo sapiens
gaaggaccccaatggca

SEQ ID NO: 26978 - DNA, 19 bp, Homo sapiens
gggggaagagatatgcatg

SEQ ID NO: 26979 - DNA, 23 bp, Homo sapiens
tttataatcccctggggcggaag

SEQ ID NO: 26980 - DNA, 22 bp, Homo sapiens
ggggcgatgaggaaatgcccac

SEQ ID NO: 26981 - DNA, 22 bp, Homo sapiens
gaaggcctgctgtgacccatgc

SEQ ID NO: 26982 - DNA, 23 bp, Homo sapiens
cacatcgctgggcactgtcctgc

SEQ ID NO: 26983 - DNA, 20 bp, Homo sapiens
tgaccacactaggaccagcc

SEQ ID NO: 26984 - DNA, 20 bp, Homo sapiens
agccgtaccatccaattcac

SEQ ID NO: 26985 - DNA, 23 bp, Homo sapiens
ggctgcgaagctgggtcagcaga

SEQ ID NO: 26986 - DNA, 16 bp, Homo sapiens
gacggcggcgcgcgtg

SEQ ID NO: 26987 - DNA, 21 bp, Homo sapiens
ccccctcgagatgcgttgttc

SEQ ID NO: 26988 - DNA, 21 bp, Homo sapiens
cagaggcttcaaagatcactt

SEQ ID NO: 26989 - DNA, 24 bp, Homo sapiens
tcctgtatagtcctccaaaaacat

SEQ ID NO: 26990 - DNA, 17 bp, Homo sapiens
accggtccctttgcgct

SEQ ID NO: 26991 - DNA, 18 bp, Homo sapiens
ctcccgtcccggctcacg

SEQ ID NO: 26992 - DNA, 16 bp, Homo sapiens
agagaccggaacgggg

SEQ ID NO: 26993 - DNA, 23 bp, Homo sapiens
gtttagctgttggcaaaaggtga

SEQ ID NO: 26994 - DNA, 16 bp, Homo sapiens
agggcagcagggtggg

SEQ ID NO: 26995 - DNA, 22 bp, Homo sapiens
tttccccgcctcctacaagccc

SEQ ID NO: 26996 - DNA, 18 bp, Homo sapiens
gccagcacgtggccaacg

SEQ ID NO: 26997 - DNA, 22 bp, Homo sapiens
ctcggctacgcctcacacctgt

SEQ ID NO: 26998 - DNA, 23 bp, Homo sapiens
tcattgtctatgagcagatgagg

SEQ ID NO: 26999 - DNA, 18 bp, Homo sapiens
cccccgtgtctcccaagt

SEQ ID NO: 27000 - DNA, 17 bp, Homo sapiens
cggacctttcgcttccc

SEQ ID NO: 27001 - DNA, 17 bp, Homo sapiens
agctggcgcgcgtagtc

SEQ ID NO: 27002 - DNA, 17 bp, Homo sapiens
cccagccgtcctcgagt

SEQ ID NO: 27003 - DNA, 17 bp, Homo sapiens
ctggagcacagccatcg

SEQ ID NO: 27004 - DNA, 24 bp, Homo sapiens
gtggagcttgcagtgagccgagat

SEQ ID NO: 27005 - DNA, 18 bp, Homo sapiens
caacgtgggaccctatgg

SEQ ID NO: 27006 - DNA, 18 bp, Homo sapiens
ccaacatacccctctgcc

SEQ ID NO: 27007 - DNA, 19 bp, Homo sapiens
gtggtttccaacttcagcc

SEQ ID NO: 27008 - DNA, 16 bp, Homo sapiens
gcaggtgggtaggagc

SEQ ID NO: 27009 - DNA, 19 bp, Homo sapiens
gtgcactgtctccggagcc

SEQ ID NO: 27010 - DNA, 20 bp, Homo sapiens
ggaccggttacttttccagt

SEQ ID NO: 27011 - DNA, 16 bp, Homo sapiens
tgcacacctggaggca

SEQ ID NO: 27012 - DNA, 21 bp, Homo sapiens
aggtcagtgaaacatgacgac

SEQ ID NO: 27013 - DNA, 16 bp, Homo sapiens
catgccccctctagcc

SEQ ID NO: 27014 - DNA, 19 bp, Homo sapiens
ttgggggggttggcatgcc

SEQ ID NO: 27015 - DNA, 22 bp, Homo sapiens
ggcgctcgtagcgtttgagggc

SEQ ID NO: 27016 - DNA, 20 bp, Homo sapiens
tgttacctctgggagctgaa

SEQ ID NO: 27017 - DNA, 22 bp, Homo sapiens
catccgcgtaagggaagaagtc

SEQ ID NO: 27018 - DNA, 16 bp, Homo sapiens
tcccccagcagcaggc

SEQ ID NO: 27019 - DNA, 16 bp, Homo sapiens
agggtcatgacccacg

SEQ ID NO: 27020 - DNA, 24 bp, Homo sapiens
gaatgtgcacacatgtgtggaagt

SEQ ID NO: 27021 - DNA, 23 bp, Homo sapiens
taccaggtgaggttggccttgtt

SEQ ID NO: 27022 - DNA, 16 bp, Homo sapiens
ccattggcttgcacgc

SEQ ID NO: 27023 - DNA, 22 bp, Homo sapiens
ggacactgcttccttttgcctg

SEQ ID NO: 27024 - DNA, 17 bp, Homo sapiens
ccttgacaagctcatcc

SEQ ID NO: 27025 - DNA, 24 bp, Homo sapiens
ggtcatttgttatagaatgaccac

SEQ ID NO: 27026 - DNA, 17 bp, Homo sapiens
gtgatgaccatgggctc

SEQ ID NO: 27027 - DNA, 24 bp, Homo sapiens
acataacccaaggcccccggatgc

SEQ ID NO: 27028 - DNA, 19 bp, Homo sapiens
atcctctggcttcaggact

SEQ ID NO: 27029 - DNA, 20 bp, Homo sapiens
cgcactgacctgcgcattta

SEQ ID NO: 27030 - DNA, 17 bp, Homo sapiens
ccaacatccttgacccc

SEQ ID NO: 27031 - DNA, 23 bp, Homo sapiens
gttggcattctcatattggaagt

SEQ ID NO: 27032 - DNA, 22 bp, Homo sapiens
ggtggctacttttatctgtgtc

SEQ ID NO: 27033 - DNA, 20 bp, Homo sapiens
tacttcctaaatgtggccac

SEQ ID NO: 27034 - DNA, 24 bp, Homo sapiens
tccagcctgggtgacagagtaaga

SEQ ID NO: 27035 - DNA, 17 bp, Homo sapiens
atcagccgctggtggag

SEQ ID NO: 27036 - DNA, 24 bp, Homo sapiens
ggatgcctgtaccatggaaagagc

SEQ ID NO: 27037 - DNA, 22 bp, Homo sapiens
caggtgtgcttcccaatggtta

SEQ ID NO: 27038 - DNA, 18 bp, Homo sapiens
gggttacctgggcagtgg

SEQ ID NO: 27039 - DNA, 20 bp, Homo sapiens
gctttgaaaccagggaaggt

SEQ ID NO: 27040 - DNA, 16 bp, Homo sapiens
ggctgcgagggtcctc

SEQ ID NO: 27041 - DNA, 23 bp, Homo sapiens
gccctgcatttccttttgcattg

SEQ ID NO: 27042 - DNA, 22 bp, Homo sapiens
gcacagattccttggcgggttg

SEQ ID NO: 27043 - DNA, 24 bp, Homo sapiens
ggcttcagaatttgtgtcccaatg

SEQ ID NO: 27044 - DNA, 16 bp, Homo sapiens
agcaggtgtggcgggc

SEQ ID NO: 27045 - DNA, 22 bp, Homo sapiens
gaattccaggacagtgacaaca

SEQ ID NO: 27046 - DNA, 18 bp, Homo sapiens
ggcttcttctttgggcgc

SEQ ID NO: 27047 - DNA, 19 bp, Homo sapiens
gcaccatggctggccctgc

SEQ ID NO: 27048 - DNA, 24 bp, Homo sapiens
tggtgagagggctgggcactaatt

SEQ ID NO: 27049 - DNA, 17 bp, Homo sapiens
ttcaggctggtgctggc

SEQ ID NO: 27050 - DNA, 21 bp, Homo sapiens
agcactgctttttaacctgtg

SEQ ID NO: 27051 - DNA, 22 bp, Homo sapiens
cttatcttgataatcaaggcgc

SEQ ID NO: 27052 - DNA, 18 bp, Homo sapiens
atcctcctgttttggcct

SEQ ID NO: 27053 - DNA, 16 bp, Homo sapiens
tcgggagcaggcctcg

SEQ ID NO: 27054 - DNA, 24 bp, Homo sapiens
tcaaggggcagggcttcaacaggc

SEQ ID NO: 27055 - DNA, 20 bp, Homo sapiens
acacatttggcaatgatggg

SEQ ID NO: 27056 - DNA, 18 bp, Homo sapiens
gtttgactgggcgaggga

SEQ ID NO: 27057 - DNA, 17 bp, Homo sapiens
ccacccactacggtgcc

SEQ ID NO: 27058 - DNA, 17 bp, Homo sapiens
ggtcgcacctgcgcaaa

SEQ ID NO: 27059 - DNA, 19 bp, Homo sapiens
ctgtcctggcacagggcgc

SEQ ID NO: 27060 - DNA, 16 bp, Homo sapiens
gccacacggggtcgcc

SEQ ID NO: 27061 - DNA, 19 bp, Homo sapiens
attcccagtatcacccacc

SEQ ID NO: 27062 - DNA, 24 bp, Homo sapiens
aagtgtcatctggtccacgatggc

SEQ ID NO: 27063 - DNA, 21 bp, Homo sapiens
ctatggcctgggagcgacccc

SEQ ID NO: 27064 - DNA, 17 bp, Homo sapiens
caccattggcgaactcc

SEQ ID NO: 27065 - DNA, 23 bp, Homo sapiens
gatgtataggaggtctccaaatg

SEQ ID NO: 27066 - DNA, 22 bp, Homo sapiens
ttcttctcccgttggtggcacc

SEQ ID NO: 27067 - DNA, 24 bp, Homo sapiens
gcttgcacgtggcatgacaaatct

SEQ ID NO: 27068 - DNA, 18 bp, Homo sapiens
catctctgccttgctggc

SEQ ID NO: 27069 - DNA, 21 bp, Homo sapiens
cttcctcttttcacttccttg

SEQ ID NO: 27070 - DNA, 20 bp, Homo sapiens
ttatccctgttatccacagt

SEQ ID NO: 27071 - DNA, 24 bp, Homo sapiens
cttcctgtgtggcatttgtctgct

SEQ ID NO: 27072 - DNA, 20 bp, Homo sapiens
ggtttgggctcctctgtcta

SEQ ID NO: 27073 - DNA, 17 bp, Homo sapiens
cgacgggtgggatctgc

SEQ ID NO: 27074 - DNA, 19 bp, Homo sapiens
ccctgtaatccctctgggt

SEQ ID NO: 27075 - DNA, 18 bp, Homo sapiens
ggcgtgctggatgtcatt

SEQ ID NO: 27076 - DNA, 24 bp, Homo sapiens
ggaccagtacttttatggaagtga

SEQ ID NO: 27077 - DNA, 17 bp, Homo sapiens
gagccaagggggttatt

SEQ ID NO: 27078 - DNA, 22 bp, Homo sapiens
gaacatgctgaacgtgcacctg

SEQ ID NO: 27079 - DNA, 17 bp, Homo sapiens
ggccccaccctaatgtc

SEQ ID NO: 27080 - DNA, 22 bp, Homo sapiens
ttattgacaaggtatgtgtgtt

SEQ ID NO: 27081 - DNA, 24 bp, Homo sapiens
agggaccagtccccatcctctact

SEQ ID NO: 27082 - DNA, 18 bp, Homo sapiens
tctgagtcactcacctct

SEQ ID NO: 27083 - DNA, 20 bp, Homo sapiens
ccacgtcatcatgtgtgtga

SEQ ID NO: 27084 - DNA, 20 bp, Homo sapiens
atgtatgtgtgtgtcctgcc

SEQ ID NO: 27085 - DNA, 18 bp, Homo sapiens
caatgacacaaagcacgc

SEQ ID NO: 27086 - DNA, 18 bp, Homo sapiens
tcccgcctctctgctttt

SEQ ID NO: 27087 - DNA, 24 bp, Homo sapiens
tcactagacacccacaggacagac

SEQ ID NO: 27088 - DNA, 16 bp, Homo sapiens
cgcggctgcctggact

SEQ ID NO: 27089 - DNA, 19 bp, Homo sapiens
gtacgtttcagctcggagg

SEQ ID NO: 27090 - DNA, 16 bp, Homo sapiens
accccaggaggaagct

SEQ ID NO: 27091 - DNA, 18 bp, Homo sapiens
agcaacaaaaggaaaaag

SEQ ID NO: 27092 - DNA, 17 bp, Homo sapiens
accccgattggcccggc

SEQ ID NO: 27093 - DNA, 21 bp, Homo sapiens
gacatggtccaggggcctgct

SEQ ID NO: 27094 - DNA, 19 bp, Homo sapiens
attgcccagggctacagcc

SEQ ID NO: 27095 - DNA, 19 bp, Homo sapiens
gtcagttgcactgtagcct

SEQ ID NO: 27096 - DNA, 16 bp, Homo sapiens
cgtgcgaaggacgtgc

SEQ ID NO: 27097 - DNA, 16 bp, Homo sapiens
ccccagccgtgggtga

SEQ ID NO: 27098 - DNA, 22 bp, Homo sapiens
ccagttcctccctccttccctc

SEQ ID NO: 27099 - DNA, 16 bp, Homo sapiens
cgttgctccgctcgct

SEQ ID NO: 27100 - DNA, 18 bp, Homo sapiens
ttctctgcaagcacagaa

SEQ ID NO: 27101 - DNA, 16 bp, Homo sapiens
agccgcggacccggcc

SEQ ID NO: 27102 - DNA, 16 bp, Homo sapiens
agacacacggtgcgac

SEQ ID NO: 27103 - DNA, 24 bp, Homo sapiens
cggtcagtgtggggtcgggagtgt

SEQ ID NO: 27104 - DNA, 16 bp, Homo sapiens
gcagctctcggattct

SEQ ID NO: 27105 - DNA, 24 bp, Homo sapiens
ctttccggggtgactttcccgttc

SEQ ID NO: 27106 - DNA, 16 bp, Homo sapiens
cagcgcactcactgcc

SEQ ID NO: 27107 - DNA, 17 bp, Homo sapiens
cagtcaaactcgggacg

SEQ ID NO: 27108 - DNA, 18 bp, Homo sapiens
cacctgatcagtctcgct

SEQ ID NO: 27109 - DNA, 18 bp, Homo sapiens
tgtccctgatgaggatct

SEQ ID NO: 27110 - DNA, 19 bp, Homo sapiens
ggtagggctgatgagggtc

SEQ ID NO: 27111 - DNA, 20 bp, Homo sapiens
caccttcgttgcgattggcc

SEQ ID NO: 27112 - DNA, 18 bp, Homo sapiens
gaattccccttcccagcc

SEQ ID NO: 27113 - DNA, 19 bp, Homo sapiens
gggtggctatggctccagg

SEQ ID NO: 27114 - DNA, 19 bp, Homo sapiens
agctgaccacagatgagat

SEQ ID NO: 27115 - DNA, 16 bp, Homo sapiens
aggcccaggcctaggc

SEQ ID NO: 27116 - DNA, 23 bp, Homo sapiens
agagactcatgcctcgcatcctg

SEQ ID NO: 27117 - DNA, 16 bp, Homo sapiens
aactcccccatctccg

SEQ ID NO: 27118 - DNA, 22 bp, Homo sapiens
tgccctgagactgctcctccgc

SEQ ID NO: 27119 - DNA, 24 bp, Homo sapiens
aatacagagggttctgcagtgtgt

SEQ ID NO: 27120 - DNA, 16 bp, Homo sapiens
gctggggcttcctgtg

SEQ ID NO: 27121 - DNA, 24 bp, Homo sapiens
agaaaagaaagagaaggaaggaag

SEQ ID NO: 27122 - DNA, 18 bp, Homo sapiens
gcagtttttcatcgggag

SEQ ID NO: 27123 - DNA, 16 bp, Homo sapiens
caacagagccagactc

SEQ ID NO: 27124 - DNA, 24 bp, Homo sapiens
tgaaagtggctgtggagatgaaat

SEQ ID NO: 27125 - DNA, 16 bp, Homo sapiens
gtccacccgctccagc

SEQ ID NO: 27126 - DNA, 24 bp, Homo sapiens
gtgtgtccttattcagccctgtct

SEQ ID NO: 27127 - DNA, 22 bp, Homo sapiens
gctgccataggcatagataggg

SEQ ID NO: 27128 - DNA, 24 bp, Homo sapiens
tattgtcctgctttcccctcctac

SEQ ID NO: 27129 - DNA, 17 bp, Homo sapiens
atgggcagccactcacc

SEQ ID NO: 27130 - DNA, 23 bp, Homo sapiens
ctatgggctcctggcccgagagc

SEQ ID NO: 27131 - DNA, 16 bp, Homo sapiens
gctcaggggacagccc

SEQ ID NO: 27132 - DNA, 18 bp, Homo sapiens
tccagtcctccctcgtca

SEQ ID NO: 27133 - DNA, 17 bp, Homo sapiens
agggtctggcgggggtc

SEQ ID NO: 27134 - DNA, 24 bp, Homo sapiens
gcagaagtacctgccccagctggg

SEQ ID NO: 27135 - DNA, 16 bp, Homo sapiens
gtgagcccgaagcagc

SEQ ID NO: 27136 - DNA, 16 bp, Homo sapiens
ctcctaaagtgctggg

SEQ ID NO: 27137 - DNA, 17 bp, Homo sapiens
agttgtagtgggctctg

SEQ ID NO: 27138 - DNA, 23 bp, Homo sapiens
aggataatttttgagtaagggga

SEQ ID NO: 27139 - DNA, 16 bp, Homo sapiens
cccaccacccagaacc

SEQ ID NO: 27140 - DNA, 19 bp, Homo sapiens
ctgcagccaagggggagct

SEQ ID NO: 27141 - DNA, 24 bp, Homo sapiens
tcgtgatcctggggatggaacagt

SEQ ID NO: 27142 - DNA, 19 bp, Homo sapiens
agcagcatggagaccagag

SEQ ID NO: 27143 - DNA, 24 bp, Homo sapiens
gaatgcagccatcttcacaccgag

SEQ ID NO: 27144 - DNA, 24 bp, Homo sapiens
ctcaatgggaccaagacctggtaa

SEQ ID NO: 27145 - DNA, 20 bp, Homo sapiens
ttgccctggatcctgggggc

SEQ ID NO: 27146 - DNA, 17 bp, Homo sapiens
tcagacccctcaccgac

SEQ ID NO: 27147 - DNA, 24 bp, Homo sapiens
attctcctctggcacctccacacc

SEQ ID NO: 27148 - DNA, 22 bp, Homo sapiens
ccgatctgtttgtagtgtgggc

SEQ ID NO: 27149 - DNA, 19 bp, Homo sapiens
ttcccaaagtggctgccac

SEQ ID NO: 27150 - DNA, 23 bp, Homo sapiens
gaaggggatgcggggtctctcgg

SEQ ID NO: 27151 - DNA, 16 bp, Homo sapiens
gtccccagcacggagc

SEQ ID NO: 27152 - DNA, 19 bp, Homo sapiens
acaggcatgatcatcatgg

SEQ ID NO: 27153 - DNA, 24 bp, Homo sapiens
agttttcagcacgtcagcgagtcc

SEQ ID NO: 27154 - DNA, 16 bp, Homo sapiens
ccgaagggaccctgta

SEQ ID NO: 27155 - DNA, 17 bp, Homo sapiens
ctgtgatgtgaaccaca

SEQ ID NO: 27156 - DNA, 17 bp, Homo sapiens
agcagaactccgaagct

SEQ ID NO: 27157 - DNA, 21 bp, Homo sapiens
ttccctgcttcagagttggtt

SEQ ID NO: 27158 - DNA, 19 bp, Homo sapiens
ccagagaatctcactgcag

SEQ ID NO: 27159 - DNA, 20 bp, Homo sapiens
ggcgccatctcaaccctaca

SEQ ID NO: 27160 - DNA, 16 bp, Homo sapiens
ggtgggtgggggctgg

SEQ ID NO: 27161 - DNA, 21 bp, Homo sapiens
cgcgtggggcgtgcttggagc

SEQ ID NO: 27162 - DNA, 16 bp, Homo sapiens
tcagcccacagctgct

SEQ ID NO: 27163 - DNA, 16 bp, Homo sapiens
tcagctggttcctggc

SEQ ID NO: 27164 - DNA, 22 bp, Homo sapiens
agcttgggggcactgaggcagc

SEQ ID NO: 27165 - DNA, 16 bp, Homo sapiens
tgcaggcaggcgtgaa

SEQ ID NO: 27166 - DNA, 16 bp, Homo sapiens
gtgggagagtgggcct

SEQ ID NO: 27167 - DNA, 16 bp, Homo sapiens
ctgccatccccccgcc

SEQ ID NO: 27168 - DNA, 19 bp, Homo sapiens
cagtttggtgtcccactgg

SEQ ID NO: 27169 - DNA, 16 bp, Homo sapiens
ccaccaggcaggaagg

SEQ ID NO: 27170 - DNA, 17 bp, Homo sapiens
gattaccctgggccttc

SEQ ID NO: 27171 - DNA, 16 bp, Homo sapiens
ggggctgtcctcagcc

SEQ ID NO: 27172 - DNA, 22 bp, Homo sapiens
gtccctcttgtccttgatgggc

SEQ ID NO: 27173 - DNA, 19 bp, Homo sapiens
gcgatgtccagggctttcc

SEQ ID NO: 27174 - DNA, 24 bp, Homo sapiens
gagcttggctgcatcagggaatcc

SEQ ID NO: 27175 - DNA, 20 bp, Homo sapiens
gtgccggatcacgtgatact

SEQ ID NO: 27176 - DNA, 18 bp, Homo sapiens
tccccagtccttgttacc

SEQ ID NO: 27177 - DNA, 18 bp, Homo sapiens
ccctctgaggtccagctc

SEQ ID NO: 27178 - DNA, 24 bp, Homo sapiens
ttctctgctgaagaggaataactg

SEQ ID NO: 27179 - DNA, 17 bp, Homo sapiens
cagacctgtccccgtcc

SEQ ID NO: 27180 - DNA, 16 bp, Homo sapiens
aatgggatttctgacg

SEQ ID NO: 27181 - DNA, 23 bp, Homo sapiens
gatgagggacagaggggtaaggc

SEQ ID NO: 27182 - DNA, 20 bp, Homo sapiens
gcgtgaatgtcatgtgtacc

SEQ ID NO: 27183 - DNA, 20 bp, Homo sapiens
ccggcagctgtcagcattca

SEQ ID NO: 27184 - DNA, 16 bp, Homo sapiens
cggctcacttgctggc

SEQ ID NO: 27185 - DNA, 23 bp, Homo sapiens
ggggatacatgaaaattgatttt

SEQ ID NO: 27186 - DNA, 20 bp, Homo sapiens
tacggtccagccaggcatct

SEQ ID NO: 27187 - DNA, 23 bp, Homo sapiens
ccgactctgtattaatcttgtcc

SEQ ID NO: 27188 - DNA, 22 bp, Homo sapiens
aaaatcagtgtctctcacttcc

SEQ ID NO: 27189 - DNA, 17 bp, Homo sapiens
acgggaatccaggcgtt

SEQ ID NO: 27190 - DNA, 24 bp, Homo sapiens
catcttctttttaaggaacacatc

SEQ ID NO: 27191 - DNA, 24 bp, Homo sapiens
aaactctcaagcccctttctggag

SEQ ID NO: 27192 - DNA, 21 bp, Homo sapiens
aatggagtctgctctcatcca

SEQ ID NO: 27193 - DNA, 23 bp, Homo sapiens
cttagaaagggaggtggcggatg

SEQ ID NO: 27194 - DNA, 17 bp, Homo sapiens
gcagacggagttgcttc

SEQ ID NO: 27195 - DNA, 24 bp, Homo sapiens
aaaatttcccttctgaagtcgttc

SEQ ID NO: 27196 - DNA, 18 bp, Homo sapiens
tacccccagatgggaggg

SEQ ID NO: 27197 - DNA, 16 bp, Homo sapiens
tcagccccctccatgt

SEQ ID NO: 27198 - DNA, 16 bp, Homo sapiens
cggagacttggacact

SEQ ID NO: 27199 - DNA, 18 bp, Homo sapiens
ctcacctaaccagctcgg

SEQ ID NO: 27200 - DNA, 21 bp, Homo sapiens
agggaccctgggacctccact

SEQ ID NO: 27201 - DNA, 23 bp, Homo sapiens
caggtgcaggacaatggggttga

SEQ ID NO: 27202 - DNA, 24 bp, Homo sapiens
agatcttcaatgaagacctacagg

SEQ ID NO: 27203 - DNA, 24 bp, Homo sapiens
ggcagagaatcgggttccagagtg

SEQ ID NO: 27204 - DNA, 24 bp, Homo sapiens
tagtaaaagctaaaacactttttt

SEQ ID NO: 27205 - DNA, 21 bp, Homo sapiens
cctgatatgtgtcttcaggcc

SEQ ID NO: 27206 - DNA, 23 bp, Homo sapiens
cctctacgatgaagtgcagatgg

SEQ ID NO: 27207 - DNA, 24 bp, Homo sapiens
atgcccagccgactgtctttaagc

SEQ ID NO: 27208 - DNA, 24 bp, Homo sapiens
ggccttccctgggcacttgtatga

SEQ ID NO: 27209 - DNA, 22 bp, Homo sapiens
gctggccctaactaatacaagc

SEQ ID NO: 27210 - DNA, 24 bp, Homo sapiens
cttgatcgtgtctcccttccactc

SEQ ID NO: 27211 - DNA, 24 bp, Homo sapiens
atggttgctgatgcaaagcttctc

SEQ ID NO: 27212 - DNA, 18 bp, Homo sapiens
catgtcaggattccctca

SEQ ID NO: 27213 - DNA, 19 bp, Homo sapiens
gggggtacgttctttctac

SEQ ID NO: 27214 - DNA, 16 bp, Homo sapiens
agcccccagctgcccc

SEQ ID NO: 27215 - DNA, 24 bp, Homo sapiens
tcacctgtgaaacctggagttgga

SEQ ID NO: 27216 - DNA, 24 bp, Homo sapiens
ttttgcgtgtggggaacaggtcag

SEQ ID NO: 27217 - DNA, 18 bp, Homo sapiens
gggtacctctgagtgagg

SEQ ID NO: 27218 - DNA, 23 bp, Homo sapiens
catcaggttgatcattgcccttc

SEQ ID NO: 27219 - DNA, 23 bp, Homo sapiens
aataagacacctcctcctgcgtc

SEQ ID NO: 27220 - DNA, 16 bp, Homo sapiens
ctggtgaccccacaat

SEQ ID NO: 27221 - DNA, 24 bp, Homo sapiens
aatacggctctgcctctgttgtgc

SEQ ID NO: 27222 - DNA, 22 bp, Homo sapiens
atatgaggagagccagtggaca

SEQ ID NO: 27223 - DNA, 24 bp, Homo sapiens
tttccatcctctgaccccactgtg

SEQ ID NO: 27224 - DNA, 17 bp, Homo sapiens
cttccccccacaccttc

SEQ ID NO: 27225 - DNA, 16 bp, Homo sapiens
gtcggtgccctgattg

SEQ ID NO: 27226 - DNA, 24 bp, Homo sapiens
ggatatttttctgtaaagaaggct

SEQ ID NO: 27227 - DNA, 24 bp, Homo sapiens
agctctgagtgtcccgctctcctg

SEQ ID NO: 27228 - DNA, 24 bp, Homo sapiens
tcactgagccctttattcctgttt

SEQ ID NO: 27229 - DNA, 24 bp, Homo sapiens
ctcttccgaccttccaggatgaag

SEQ ID NO: 27230 - DNA, 23 bp, Homo sapiens
gttgctgcatactgaaggtcttc

SEQ ID NO: 27231 - DNA, 19 bp, Homo sapiens
ccccaaacctccctcagag

SEQ ID NO: 27232 - DNA, 18 bp, Homo sapiens
tgaggagagacccttccc

SEQ ID NO: 27233 - DNA, 22 bp, Homo sapiens
cctctgtcttctctgagatgcc

SEQ ID NO: 27234 - DNA, 16 bp, Homo sapiens
gcctcctgtgtcgggg

SEQ ID NO: 27235 - DNA, 16 bp, Homo sapiens
ccaccccggccccagg

SEQ ID NO: 27236 - DNA, 16 bp, Homo sapiens
ggaccctcggggctgc

SEQ ID NO: 27237 - DNA, 18 bp, Homo sapiens
gtctccaccctggcaggg

SEQ ID NO: 27238 - DNA, 17 bp, Homo sapiens
cacccctggcctacagc

SEQ ID NO: 27239 - DNA, 17 bp, Homo sapiens
ctgccagaggacccccc

SEQ ID NO: 27240 - DNA, 24 bp, Homo sapiens
cctctgcccatctgtttctctgac

SEQ ID NO: 27241 - DNA, 16 bp, Homo sapiens
cgaacagcacaggcag

SEQ ID NO: 27242 - DNA, 16 bp, Homo sapiens
cccacagagccacctt

SEQ ID NO: 27243 - DNA, 18 bp, Homo sapiens
gattacaggcgtgagcga

SEQ ID NO: 27244 - DNA, 21 bp, Homo sapiens
caatctgtatatccacccccc

SEQ ID NO: 27245 - DNA, 19 bp, Homo sapiens
gaggaggtagggtcagaga

SEQ ID NO: 27246 - DNA, 20 bp, Homo sapiens
ggcttaagaagaggctgaga

SEQ ID NO: 27247 - DNA, 16 bp, Homo sapiens
gggactgaggacttgc

SEQ ID NO: 27248 - DNA, 22 bp, Homo sapiens
aatttctagctctctttgaaat

SEQ ID NO: 27249 - DNA, 19 bp, Homo sapiens
cttcccatcactaccccag

SEQ ID NO: 27250 - DNA, 24 bp, Homo sapiens
tactagttgtgtgaccttggacaa

SEQ ID NO: 27251 - DNA, 18 bp, Homo sapiens
gatacagggtctggctgc

SEQ ID NO: 27252 - DNA, 24 bp, Homo sapiens
aaaggggaatagtattgacttcac

SEQ ID NO: 27253 - DNA, 16 bp, Homo sapiens
taccaccccaggccac

SEQ ID NO: 27254 - DNA, 17 bp, Homo sapiens
caagcctcccttcccac

SEQ ID NO: 27255 - DNA, 23 bp, Homo sapiens
aatttactatccccctgtcctgc

SEQ ID NO: 27256 - DNA, 20 bp, Homo sapiens
actgtcccccaaggcattac

SEQ ID NO: 27257 - DNA, 19 bp, Homo sapiens
tgcatcaggtgggtccttg

SEQ ID NO: 27258 - DNA, 20 bp, Homo sapiens
tagaccagtcagcgtgaagg

SEQ ID NO: 27259 - DNA, 24 bp, Homo sapiens
ccccacactccgtggggctggagt

SEQ ID NO: 27260 - DNA, 22 bp, Homo sapiens
gtccccagggcctcatacctgc

SEQ ID NO: 27261 - DNA, 20 bp, Homo sapiens
tttctccccataggccgccc

SEQ ID NO: 27262 - DNA, 16 bp, Homo sapiens
cccttccctcctgcct

SEQ ID NO: 27263 - DNA, 22 bp, Homo sapiens
ggaaaacctggacagaatcttc

SEQ ID NO: 27264 - DNA, 19 bp, Homo sapiens
ccatcaaagccaggcttcc

SEQ ID NO: 27265 - DNA, 23 bp, Homo sapiens
ttacagaacatgagtatgctatg

SEQ ID NO: 27266 - DNA, 24 bp, Homo sapiens
cacaacctttaatcctgatggagg

SEQ ID NO: 27267 - DNA, 21 bp, Homo sapiens
accaaaccaacattcaacttg

SEQ ID NO: 27268 - DNA, 24 bp, Homo sapiens
caaaaactccatcctcacacatac

SEQ ID NO: 27269 - DNA, 16 bp, Homo sapiens
ccgcccaggattacgc

SEQ ID NO: 27270 - DNA, 18 bp, Homo sapiens
gccaatcagggatgtggg

SEQ ID NO: 27271 - DNA, 16 bp, Homo sapiens
gagcacacataccacc

SEQ ID NO: 27272 - DNA, 19 bp, Homo sapiens
catactgatgctgacaagt

SEQ ID NO: 27273 - DNA, 18 bp, Homo sapiens
aagcataagtggttgggt

SEQ ID NO: 27274 - DNA, 21 bp, Homo sapiens
gtggctgtacatgtgaagagg

SEQ ID NO: 27275 - DNA, 24 bp, Homo sapiens
agataaatggatgaatggatagat

SEQ ID NO: 27276 - DNA, 19 bp, Homo sapiens
gctgctgtggacaccaccc

SEQ ID NO: 27277 - DNA, 18 bp, Homo sapiens
ggacaaaaaacggggtcc

SEQ ID NO: 27278 - DNA, 24 bp, Homo sapiens
caaccattcactcactcattcctc

SEQ ID NO: 27279 - DNA, 24 bp, Homo sapiens
ggagacagcaccagttctgccacc

SEQ ID NO: 27280 - DNA, 22 bp, Homo sapiens
gaagtggggctggaggtccaga

SEQ ID NO: 27281 - DNA, 16 bp, Homo sapiens
ccagttgccccccagg

SEQ ID NO: 27282 - DNA, 23 bp, Homo sapiens
gggatcttggagatccagaggga

SEQ ID NO: 27283 - DNA, 19 bp, Homo sapiens
ccactgaacccacagccct

SEQ ID NO: 27284 - DNA, 23 bp, Homo sapiens
ggggacacctcgggcacggcagt

SEQ ID NO: 27285 - DNA, 19 bp, Homo sapiens
ggctgctccgtcttgttgt

SEQ ID NO: 27286 - DNA, 21 bp, Homo sapiens
ttagttaggggagtggggtgc

SEQ ID NO: 27287 - DNA, 17 bp, Homo sapiens
cccaggctggcgcttac

SEQ ID NO: 27288 - DNA, 18 bp, Homo sapiens
atgtgggagacatgaggg

SEQ ID NO: 27289 - DNA, 23 bp, Homo sapiens
ctggatgacatggagaagatatc

SEQ ID NO: 27290 - DNA, 23 bp, Homo sapiens
gtttgggtaatacccacatctga

SEQ ID NO: 27291 - DNA, 17 bp, Homo sapiens
gaggccaattctggact

SEQ ID NO: 27292 - DNA, 24 bp, Homo sapiens
attgtccacaatgcactggtaagc

SEQ ID NO: 27293 - DNA, 24 bp, Homo sapiens
tgattgtggctaggagaatgaggc

SEQ ID NO: 27294 - DNA, 19 bp, Homo sapiens
ccgttggtcccctggatat

SEQ ID NO: 27295 - DNA, 23 bp, Homo sapiens
taaatggatagatggatgacagg

SEQ ID NO: 27296 - DNA, 24 bp, Homo sapiens
tttgccaccaacagttattcattc

SEQ ID NO: 27297 - DNA, 21 bp, Homo sapiens
tgtggacatagtctgcactgt

SEQ ID NO: 27298 - DNA, 24 bp, Homo sapiens
atacagatgtatgtggtccccact

SEQ ID NO: 27299 - DNA, 19 bp, Homo sapiens
ttccaccagatgctcccac

SEQ ID NO: 27300 - DNA, 22 bp, Homo sapiens
accccacctctattcaccaaag

SEQ ID NO: 27301 - DNA, 18 bp, Homo sapiens
gccctctcacacccagac

SEQ ID NO: 27302 - DNA, 20 bp, Homo sapiens
gaggatgggattggcatcga

SEQ ID NO: 27303 - DNA, 21 bp, Homo sapiens
tattaagggcagattgtgtcc

SEQ ID NO: 27304 - DNA, 17 bp, Homo sapiens
tggggtcctggagggca

SEQ ID NO: 27305 - DNA, 16 bp, Homo sapiens
gcggaagcgcggctgc

SEQ ID NO: 27306 - DNA, 24 bp, Homo sapiens
cttccagaacgggagggttccagg

SEQ ID NO: 27307 - DNA, 17 bp, Homo sapiens
gtggaatgtgacccgcg

SEQ ID NO: 27308 - DNA, 24 bp, Homo sapiens
caatgaggagactccacaatgggc

SEQ ID NO: 27309 - DNA, 21 bp, Homo sapiens
cttattctggccttccccagc

SEQ ID NO: 27310 - DNA, 16 bp, Homo sapiens
cacgtccagccgcagc

SEQ ID NO: 27311 - DNA, 17 bp, Homo sapiens
aggtgagggaagtggtc

SEQ ID NO: 27312 - DNA, 16 bp, Homo sapiens
gatagaggccgtcgtc

SEQ ID NO: 27313 - DNA, 16 bp, Homo sapiens
tccgctaaccccgccc

SEQ ID NO: 27314 - DNA, 24 bp, Homo sapiens
tggacaggatgcgatgccgggggc

SEQ ID NO: 27315 - DNA, 16 bp, Homo sapiens
gtgctggtggtgaccg

SEQ ID NO: 27316 - DNA, 17 bp, Homo sapiens
ccatccccgggacccct

SEQ ID NO: 27317 - DNA, 24 bp, Homo sapiens
accttaacaacaatcttgactccc

SEQ ID NO: 27318 - DNA, 20 bp, Homo sapiens
gcggaaggtccagttgaagg

SEQ ID NO: 27319 - DNA, 18 bp, Homo sapiens
cgtgaccccaactttaac

SEQ ID NO: 27320 - DNA, 18 bp, Homo sapiens
cctcgccctgctccaccg

SEQ ID NO: 27321 - DNA, 24 bp, Homo sapiens
gaaccttacccctgagcttagctc

SEQ ID NO: 27322 - DNA, 24 bp, Homo sapiens
tatgattgcgtcactgcattgcag

SEQ ID NO: 27323 - DNA, 16 bp, Homo sapiens
gtgacctgccgcgccc

SEQ ID NO: 27324 - DNA, 24 bp, Homo sapiens
gaagagaaaaagaaggaaaaaaag

SEQ ID NO: 27325 - DNA, 22 bp, Homo sapiens
cattcaaaggctccgccgccgc

SEQ ID NO: 27326 - DNA, 16 bp, Homo sapiens
ctttcaggccggggca

SEQ ID NO: 27327 - DNA, 19 bp, Homo sapiens
ctggcttgaccccggttcc

SEQ ID NO: 27328 - DNA, 16 bp, Homo sapiens
cggagctcggcgctgt

SEQ ID NO: 27329 - DNA, 16 bp, Homo sapiens
cacgcatgtcccgccc

SEQ ID NO: 27330 - DNA, 20 bp, Homo sapiens
gacacttgcagaaggacgct

SEQ ID NO: 27331 - DNA, 17 bp, Homo sapiens
aggggagaggtgggagt

SEQ ID NO: 27332 - DNA, 17 bp, Homo sapiens
cacgccctccagcctgt

SEQ ID NO: 27333 - DNA, 21 bp, Homo sapiens
cgccttaaacttgacatgcgt

SEQ ID NO: 27334 - DNA, 16 bp, Homo sapiens
tggagaggcactaggc

SEQ ID NO: 27335 - DNA, 20 bp, Homo sapiens
gttcccccaactaacgtgac

SEQ ID NO: 27336 - DNA, 17 bp, Homo sapiens
gagggatccctcgcact

SEQ ID NO: 27337 - DNA, 16 bp, Homo sapiens
gtggacgcagaccagg

SEQ ID NO: 27338 - DNA, 19 bp, Homo sapiens
ggattgctgctgacgctga

SEQ ID NO: 27339 - DNA, 16 bp, Homo sapiens
cgggcggaggcggggt

SEQ ID NO: 27340 - DNA, 20 bp, Homo sapiens
cggatgcgttggccaggatc

SEQ ID NO: 27341 - DNA, 16 bp, Homo sapiens
ctcagcgcgtccacgc

SEQ ID NO: 27342 - DNA, 16 bp, Homo sapiens
cagtctcgggtccccc

SEQ ID NO: 27343 - DNA, 24 bp, Homo sapiens
tctcccgagagctggtgctggtca

SEQ ID NO: 27344 - DNA, 18 bp, Homo sapiens
gtccctgccccacctggc

SEQ ID NO: 27345 - DNA, 22 bp, Homo sapiens
caggagtcgcggcgcgtgcatc

SEQ ID NO: 27346 - DNA, 16 bp, Homo sapiens
cactgcaccgccagct

SEQ ID NO: 27347 - DNA, 17 bp, Homo sapiens
cgaaccccagtcactcc

SEQ ID NO: 27348 - DNA, 17 bp, Homo sapiens
ctggttgtccgacggcc

SEQ ID NO: 27349 - DNA, 18 bp, Homo sapiens
aacccagtgggcagggta

SEQ ID NO: 27350 - DNA, 21 bp, Homo sapiens
gatttctccacgctgccgaga

SEQ ID NO: 27351 - DNA, 19 bp, Homo sapiens
aggggggtggtgctgatga

SEQ ID NO: 27352 - DNA, 20 bp, Homo sapiens
ctccctcatgtggtacaagg

SEQ ID NO: 27353 - DNA, 24 bp, Homo sapiens
gattccctgccaaacctcagaatc

SEQ ID NO: 27354 - DNA, 17 bp, Homo sapiens
agctccgggctgggacc

SEQ ID NO: 27355 - DNA, 19 bp, Homo sapiens
gattctgaaggagagaagg

SEQ ID NO: 27356 - DNA, 21 bp, Homo sapiens
cttcctctccccgccagatcc

SEQ ID NO: 27357 - DNA, 24 bp, Homo sapiens
catagccctggcgtggcaccaacc

SEQ ID NO: 27358 - DNA, 16 bp, Homo sapiens
ctggcccagcaatgcc

SEQ ID NO: 27359 - DNA, 19 bp, Homo sapiens
cgatagccaaacacaccag

SEQ ID NO: 27360 - DNA, 24 bp, Homo sapiens
tgaagccttcaccaaggagacctt

SEQ ID NO: 27361 - DNA, 22 bp, Homo sapiens
gaccctcaatccacagtttctg

SEQ ID NO: 27362 - DNA, 23 bp, Homo sapiens
cattcctggcgcggcgggaggac

SEQ ID NO: 27363 - DNA, 23 bp, Homo sapiens
tttctctgtgctgggtcctgagg

SEQ ID NO: 27364 - DNA, 19 bp, Homo sapiens
gtctgaagctcactccctg

SEQ ID NO: 27365 - DNA, 24 bp, Homo sapiens
tttacgttcaggatgagcgacttc

SEQ ID NO: 27366 - DNA, 16 bp, Homo sapiens
gggactgggatggact

SEQ ID NO: 27367 - DNA, 23 bp, Homo sapiens
catgtgagggtcagaccgttgtc

SEQ ID NO: 27368 - DNA, 24 bp, Homo sapiens
gctttctccttgaggaccatgggt

SEQ ID NO: 27369 - DNA, 16 bp, Homo sapiens
gaccgccatgcagtcc

SEQ ID NO: 27370 - DNA, 17 bp, Homo sapiens
ggaggagacagtcatgg

SEQ ID NO: 27371 - DNA, 17 bp, Homo sapiens
tccccctctgttggacc

SEQ ID NO: 27372 - DNA, 16 bp, Homo sapiens
aagtccagtcgcccgc

SEQ ID NO: 27373 - DNA, 23 bp, Homo sapiens
ccaccccttccctatccacgagt

SEQ ID NO: 27374 - DNA, 22 bp, Homo sapiens
ccattattatcttgggatctgc

SEQ ID NO: 27375 - DNA, 16 bp, Homo sapiens
cccccgcctcacatcc

SEQ ID NO: 27376 - DNA, 20 bp, Homo sapiens
agaaatccagcccagcttag

SEQ ID NO: 27377 - DNA, 20 bp, Homo sapiens
gccaccatcgtagcagaacc

SEQ ID NO: 27378 - DNA, 17 bp, Homo sapiens
ctggatgccaaagatct

SEQ ID NO: 27379 - DNA, 23 bp, Homo sapiens
ttcttgttctcagtctgggatgc

SEQ ID NO: 27380 - DNA, 17 bp, Homo sapiens
agctgcccccctgtcgg

SEQ ID NO: 27381 - DNA, 19 bp, Homo sapiens
tctgcagggacccaggagc

SEQ ID NO: 27382 - DNA, 19 bp, Homo sapiens
actggagacagatgctgag

SEQ ID NO: 27383 - DNA, 18 bp, Homo sapiens
accgtgaggccagaagac

SEQ ID NO: 27384 - DNA, 22 bp, Homo sapiens
acacacagatggttctctgagg

SEQ ID NO: 27385 - DNA, 17 bp, Homo sapiens
gtgtccacagcgtgggg

SEQ ID NO: 27386 - DNA, 19 bp, Homo sapiens
tgacctgcagtgtgatgcc

SEQ ID NO: 27387 - DNA, 16 bp, Homo sapiens
gtctgggagccagtcc

SEQ ID NO: 27388 - DNA, 24 bp, Homo sapiens
cagctgagctgcgctccatggtct

SEQ ID NO: 27389 - DNA, 16 bp, Homo sapiens
agccacactgcagtgg

SEQ ID NO: 27390 - DNA, 24 bp, Homo sapiens
ggccaccgcctgggtgtgctctgt

SEQ ID NO: 27391 - DNA, 17 bp, Homo sapiens
cgtgcgggcaggacaga

SEQ ID NO: 27392 - DNA, 23 bp, Homo sapiens
gacaggcctgggccagctcagga

SEQ ID NO: 27393 - DNA, 18 bp, Homo sapiens
gatatcccccagtccctc

SEQ ID NO: 27394 - DNA, 21 bp, Homo sapiens
gcgtttgccctcaccttcagc

SEQ ID NO: 27395 - DNA, 16 bp, Homo sapiens
aggcaggttgtggggc

SEQ ID NO: 27396 - DNA, 17 bp, Homo sapiens
cagctccaagctctgtc

SEQ ID NO: 27397 - DNA, 16 bp, Homo sapiens
gggtgtggggggatca

SEQ ID NO: 27398 - DNA, 17 bp, Homo sapiens
gatgacagggggtcctg

SEQ ID NO: 27399 - DNA, 24 bp, Homo sapiens
gagtagcccatccactctttccag

SEQ ID NO: 27400 - DNA, 16 bp, Homo sapiens
tgtgaggcgtctagcc

SEQ ID NO: 27401 - DNA, 22 bp, Homo sapiens
gtgcctgaatttccataatccc

SEQ ID NO: 27402 - DNA, 24 bp, Homo sapiens
actctgactctataaccctgactt

SEQ ID NO: 27403 - DNA, 18 bp, Homo sapiens
cctagttggcccagttct

SEQ ID NO: 27404 - DNA, 17 bp, Homo sapiens
ggtgacatccccacctc

SEQ ID NO: 27405 - DNA, 16 bp, Homo sapiens
ggcctccagtgctggg

SEQ ID NO: 27406 - DNA, 24 bp, Homo sapiens
aatctctcccatggaaccctggat

SEQ ID NO: 27407 - DNA, 16 bp, Homo sapiens
ggggtgtcaccctggg

SEQ ID NO: 27408 - DNA, 17 bp, Homo sapiens
gaggccacagccaggtg

SEQ ID NO: 27409 - DNA, 23 bp, Homo sapiens
catgaagaagctttgagagtcag

SEQ ID NO: 27410 - DNA, 22 bp, Homo sapiens
agacaatatctgacatctctgc

SEQ ID NO: 27411 - DNA, 22 bp, Homo sapiens
ttcatgcttgcatccctggggt

SEQ ID NO: 27412 - DNA, 18 bp, Homo sapiens
atctatcttgcggggagc

SEQ ID NO: 27413 - DNA, 24 bp, Homo sapiens
aggttggggggttgtttcagtttc

SEQ ID NO: 27414 - DNA, 23 bp, Homo sapiens
ttttcctctagaacgaggaggga

SEQ ID NO: 27415 - DNA, 18 bp, Homo sapiens
gccctcgttcacgtttgc

SEQ ID NO: 27416 - DNA, 20 bp, Homo sapiens
acctgacatcaccattctcc

SEQ ID NO: 27417 - DNA, 17 bp, Homo sapiens
cacaccttctcctgggt

SEQ ID NO: 27418 - DNA, 17 bp, Homo sapiens
agctgggcaggagtacg

SEQ ID NO: 27419 - DNA, 21 bp, Homo sapiens
gtactggtcaggaacacacac

SEQ ID NO: 27420 - DNA, 20 bp, Homo sapiens
ttctctcaccagttcctccc

SEQ ID NO: 27421 - DNA, 24 bp, Homo sapiens
ccacccagttcacccacactcact

SEQ ID NO: 27422 - DNA, 20 bp, Homo sapiens
ggtaccgaactccaatcttc

SEQ ID NO: 27423 - DNA, 23 bp, Homo sapiens
cagacacacagttgaccacgtac

SEQ ID NO: 27424 - DNA, 16 bp, Homo sapiens
ccctcccctaccccgc

SEQ ID NO: 27425 - DNA, 24 bp, Homo sapiens
ctgcctctggggtcagcaggagca

SEQ ID NO: 27426 - DNA, 24 bp, Homo sapiens
tcccagagtgatcctctccatcct

SEQ ID NO: 27427 - DNA, 24 bp, Homo sapiens
cttccagcactgagaaggacttga

SEQ ID NO: 27428 - DNA, 24 bp, Homo sapiens
atgacgcggagtatgagtgccagg

SEQ ID NO: 27429 - DNA, 24 bp, Homo sapiens
agaggctgggggcttggacttccg

SEQ ID NO: 27430 - DNA, 19 bp, Homo sapiens
ctccccctgcaggtgaatt

SEQ ID NO: 27431 - DNA, 16 bp, Homo sapiens
tctctcacccataccc

SEQ ID NO: 27432 - DNA, 17 bp, Homo sapiens
ggtaagggatcagagcc

SEQ ID NO: 27433 - DNA, 16 bp, Homo sapiens
cccatctcagagcggc

SEQ ID NO: 27434 - DNA, 16 bp, Homo sapiens
cccgaccccaggatcc

SEQ ID NO: 27435 - DNA, 16 bp, Homo sapiens
atgtgcaggtggaatt

SEQ ID NO: 27436 - DNA, 16 bp, Homo sapiens
tgtggggtcagcaccc

SEQ ID NO: 27437 - DNA, 16 bp, Homo sapiens
gctgagggtctcaggc

SEQ ID NO: 27438 - DNA, 19 bp, Homo sapiens
ttccccggggcttctgggc

SEQ ID NO: 27439 - DNA, 23 bp, Homo sapiens
ggtacctcgggaagcctgggatc

SEQ ID NO: 27440 - DNA, 24 bp, Homo sapiens
ctctgccctttccttgcaccgcgc

SEQ ID NO: 27441 - DNA, 20 bp, Homo sapiens
cattgcaccgcactgccagg

SEQ ID NO: 27442 - DNA, 24 bp, Homo sapiens
cttgtacccagcgccaagtggccc

SEQ ID NO: 27443 - DNA, 24 bp, Homo sapiens
ctccaccaccgtcaggttttcagg

SEQ ID NO: 27444 - DNA, 24 bp, Homo sapiens
ggacgacgctcagggcttctctcc

SEQ ID NO: 27445 - DNA, 17 bp, Homo sapiens
tgcgccaggcctgagga

SEQ ID NO: 27446 - DNA, 24 bp, Homo sapiens
caggtggctggcagcgggcgctgt

SEQ ID NO: 27447 - DNA, 24 bp, Homo sapiens
ctagggaaggtaagtgggaaatgg

SEQ ID NO: 27448 - DNA, 17 bp, Homo sapiens
caggtggcagagacaca

SEQ ID NO: 27449 - DNA, 23 bp, Homo sapiens
caccttcagtcagcagccccagg

SEQ ID NO: 27450 - DNA, 17 bp, Homo sapiens
gaggggaagaggaaaac

SEQ ID NO: 27451 - DNA, 18 bp, Homo sapiens
accctcgctgcagcgatc

SEQ ID NO: 27452 - DNA, 24 bp, Homo sapiens
tgcattctatctaccacagaacgg

SEQ ID NO: 27453 - DNA, 16 bp, Homo sapiens
ccaggctgccgcagca

SEQ ID NO: 27454 - DNA, 23 bp, Homo sapiens
tcaggcacataaagaggcagccc

SEQ ID NO: 27455 - DNA, 24 bp, Homo sapiens
tacatccctaatcccctttgggaa

SEQ ID NO: 27456 - DNA, 24 bp, Homo sapiens
tgttagccaagatggcggtagcga

SEQ ID NO: 27457 - DNA, 20 bp, Homo sapiens
tgacagcccttccttcatat

SEQ ID NO: 27458 - DNA, 24 bp, Homo sapiens
gtttgagccaggctgccctcctgc

SEQ ID NO: 27459 - DNA, 24 bp, Homo sapiens
taaggaagtggcagatcttccctt

SEQ ID NO: 27460 - DNA, 16 bp, Homo sapiens
gctgcctgggggggtg

SEQ ID NO: 27461 - DNA, 22 bp, Homo sapiens
tggggctcagaccctgtgagtc

SEQ ID NO: 27462 - DNA, 16 bp, Homo sapiens
taaactccgccgaggc

SEQ ID NO: 27463 - DNA, 16 bp, Homo sapiens
ctgcctgccgccgggg

SEQ ID NO: 27464 - DNA, 19 bp, Homo sapiens
cgcggtagatggggattcc

SEQ ID NO: 27465 - DNA, 24 bp, Homo sapiens
ggtctcctctgctctcttccccag

SEQ ID NO: 27466 - DNA, 24 bp, Homo sapiens
ggggaggccgcctctcacgtgggg

SEQ ID NO: 27467 - DNA, 24 bp, Homo sapiens
tctctggatgacaagccccagttc

SEQ ID NO: 27468 - DNA, 17 bp, Homo sapiens
agttgggaccagagagg

SEQ ID NO: 27469 - DNA, 24 bp, Homo sapiens
ttcatccagcccaacgtcatctct

SEQ ID NO: 27470 - DNA, 17 bp, Homo sapiens
agcttcagcaccttctc

SEQ ID NO: 27471 - DNA, 24 bp, Homo sapiens
cagatcatcaaccccagcgaggac

SEQ ID NO: 27472 - DNA, 17 bp, Homo sapiens
gccgctgagactcatag

SEQ ID NO: 27473 - DNA, 16 bp, Homo sapiens
ggccccttgcctgtct

SEQ ID NO: 27474 - DNA, 18 bp, Homo sapiens
aacacaggtaggggacct

SEQ ID NO: 27475 - DNA, 21 bp, Homo sapiens
acccgcagctgccgaaggaga

SEQ ID NO: 27476 - DNA, 18 bp, Homo sapiens
aactctatggaacccccc

SEQ ID NO: 27477 - DNA, 24 bp, Homo sapiens
gcttaacaccatggaccgcatcct

SEQ ID NO: 27478 - DNA, 19 bp, Homo sapiens
cctcctcaccatagttggt

SEQ ID NO: 27479 - DNA, 17 bp, Homo sapiens
ggccttcaggaggactg

SEQ ID NO: 27480 - DNA, 16 bp, Homo sapiens
ggccaaacaccaggtc

SEQ ID NO: 27481 - DNA, 17 bp, Homo sapiens
gctctctgtcattgccc

SEQ ID NO: 27482 - DNA, 19 bp, Homo sapiens
gtacacttcaatggggacc

SEQ ID NO: 27483 - DNA, 18 bp, Homo sapiens
cagggccggatctccttc

SEQ ID NO: 27484 - DNA, 20 bp, Homo sapiens
cagctccttagaccttcctg

SEQ ID NO: 27485 - DNA, 18 bp, Homo sapiens
cgccgccctggacaacac

SEQ ID NO: 27486 - DNA, 16 bp, Homo sapiens
tgccccctccagagtc

SEQ ID NO: 27487 - DNA, 22 bp, Homo sapiens
agagtcagtcagtctgaacatc

SEQ ID NO: 27488 - DNA, 21 bp, Homo sapiens
aagtcactgatgttgccatag

SEQ ID NO: 27489 - DNA, 18 bp, Homo sapiens
gccagcatgctgcaggtc

SEQ ID NO: 27490 - DNA, 22 bp, Homo sapiens
gaggagatagtgacgaagtggc

SEQ ID NO: 27491 - DNA, 24 bp, Homo sapiens
cccactcggctaaccattgcctcc

SEQ ID NO: 27492 - DNA, 23 bp, Homo sapiens
cacatgtgcaaggtacagggcat

SEQ ID NO: 27493 - DNA, 24 bp, Homo sapiens
actattcatggcccagtgctatgg

SEQ ID NO: 27494 - DNA, 22 bp, Homo sapiens
gaattccacccagaaggcaggc

SEQ ID NO: 27495 - DNA, 24 bp, Homo sapiens
tgtccactacggctgcaaggaacg

SEQ ID NO: 27496 - DNA, 21 bp, Homo sapiens
aagaagaagaagtctggagca

SEQ ID NO: 27497 - DNA, 16 bp, Homo sapiens
cattggcccgcttggc

SEQ ID NO: 27498 - DNA, 24 bp, Homo sapiens
tttcctttccccttgaagcctggt

SEQ ID NO: 27499 - DNA, 16 bp, Homo sapiens
gcatgggcgtccccct

SEQ ID NO: 27500 - DNA, 20 bp, Homo sapiens
gtgtgaatgagtgtgagtgc

SEQ ID NO: 27501 - DNA, 22 bp, Homo sapiens
cgtagccattgttccggcagaa

SEQ ID NO: 27502 - DNA, 16 bp, Homo sapiens
gtgggggcggcgtacg

SEQ ID NO: 27503 - DNA, 24 bp, Homo sapiens
cagcagagcccataccaatgccat

SEQ ID NO: 27504 - DNA, 24 bp, Homo sapiens
tctgttacttcggcgagggggcag

SEQ ID NO: 27505 - DNA, 18 bp, Homo sapiens
aaggtggcaggattgggg

SEQ ID NO: 27506 - DNA, 21 bp, Homo sapiens
acacttgagtgccccatcatc

SEQ ID NO: 27507 - DNA, 19 bp, Homo sapiens
accaagtgccagacgccac

SEQ ID NO: 27508 - DNA, 23 bp, Homo sapiens
cccacctctgagcagtatcgcgg

SEQ ID NO: 27509 - DNA, 18 bp, Homo sapiens
ctggttctcgtcctgtgt

SEQ ID NO: 27510 - DNA, 21 bp, Homo sapiens
acacatcattaccatccacgc

SEQ ID NO: 27511 - DNA, 24 bp, Homo sapiens
gtcctgagcactcagccttgctct

SEQ ID NO: 27512 - DNA, 18 bp, Homo sapiens
ttctctgccacagcccgc

SEQ ID NO: 27513 - DNA, 21 bp, Homo sapiens
atgttccttatctcagccctg

SEQ ID NO: 27514 - DNA, 16 bp, Homo sapiens
tgctgacggggggagc

SEQ ID NO: 27515 - DNA, 24 bp, Homo sapiens
ccgggtatggcatcatgtcaatcc

SEQ ID NO: 27516 - DNA, 21 bp, Homo sapiens
ccatgttttggagacagtgat

SEQ ID NO: 27517 - DNA, 17 bp, Homo sapiens
acaaaggaggcccgacg

SEQ ID NO: 27518 - DNA, 23 bp, Homo sapiens
aactagggaaggaggagtggaaa

SEQ ID NO: 27519 - DNA, 23 bp, Homo sapiens
tagcatcttcctcatatcgatca

SEQ ID NO: 27520 - DNA, 17 bp, Homo sapiens
gcggtacgctgaactgt

SEQ ID NO: 27521 - DNA, 23 bp, Homo sapiens
gcatctcccccttgcctttattc

SEQ ID NO: 27522 - DNA, 16 bp, Homo sapiens
cagccgggagatgggg

SEQ ID NO: 27523 - DNA, 17 bp, Homo sapiens
cccccactccagggagc

SEQ ID NO: 27524 - DNA, 17 bp, Homo sapiens
actgcttcctccaggcc

SEQ ID NO: 27525 - DNA, 16 bp, Homo sapiens
accacagcaccagtga

SEQ ID NO: 27526 - DNA, 24 bp, Homo sapiens
agctctgcaggccgcagcagcccc

SEQ ID NO: 27527 - DNA, 24 bp, Homo sapiens
caattactgggataaacaggacca

SEQ ID NO: 27528 - DNA, 23 bp, Homo sapiens
atctgagacatcactggggttat

SEQ ID NO: 27529 - DNA, 16 bp, Homo sapiens
aggagcaggagaaggc

SEQ ID NO: 27530 - DNA, 18 bp, Homo sapiens
aggacacagagccaggac

SEQ ID NO: 27531 - DNA, 17 bp, Homo sapiens
gcctgctcaaaggcctc

SEQ ID NO: 27532 - DNA, 24 bp, Homo sapiens
gctaggataatcatttccattgtc

SEQ ID NO: 27533 - DNA, 19 bp, Homo sapiens
gcgggcatctcctgataca

SEQ ID NO: 27534 - DNA, 16 bp, Homo sapiens
caggaggaagcagggt

SEQ ID NO: 27535 - DNA, 17 bp, Homo sapiens
tagtgctccccgtaggt

SEQ ID NO: 27536 - DNA, 23 bp, Homo sapiens
catgtccccacaggtgatggagg

SEQ ID NO: 27537 - DNA, 16 bp, Homo sapiens
ggtagctgaggatggg

SEQ ID NO: 27538 - DNA, 24 bp, Homo sapiens
aaccccaacctactcttctcagac

SEQ ID NO: 27539 - DNA, 17 bp, Homo sapiens
agacagtggtgtgctgt

SEQ ID NO: 27540 - DNA, 18 bp, Homo sapiens
gagtctctggcccgccac

SEQ ID NO: 27541 - DNA, 17 bp, Homo sapiens
gggtgaagagtggcagc

SEQ ID NO: 27542 - DNA, 23 bp, Homo sapiens
ccagaaaataggtagaagtcaga

SEQ ID NO: 27543 - DNA, 21 bp, Homo sapiens
accttgatttcttcctttcag

SEQ ID NO: 27544 - DNA, 18 bp, Homo sapiens
cggtgggaaaggagaggt

SEQ ID NO: 27545 - DNA, 19 bp, Homo sapiens
tcctaggatttctgggtct

SEQ ID NO: 27546 - DNA, 21 bp, Homo sapiens
aatagtggatgggagcatctg

SEQ ID NO: 27547 - DNA, 16 bp, Homo sapiens
agggaaggagtgggct

SEQ ID NO: 27548 - DNA, 19 bp, Homo sapiens
ttggctggaacagcaaagt

SEQ ID NO: 27549 - DNA, 20 bp, Homo sapiens
cctcagacccaggagtccag

SEQ ID NO: 27550 - DNA, 16 bp, Homo sapiens
tcggctcaccctcagc

SEQ ID NO: 27551 - DNA, 17 bp, Homo sapiens
gcccctcctctctcaga

SEQ ID NO: 27552 - DNA, 17 bp, Homo sapiens
cttggcccctagggttc

SEQ ID NO: 27553 - DNA, 21 bp, Homo sapiens
cagaagtccaggtccccagct

SEQ ID NO: 27554 - DNA, 23 bp, Homo sapiens
aggcctcctggggaatgtagttc

SEQ ID NO: 27555 - DNA, 23 bp, Homo sapiens
gcccatgattttgacaaactcct

SEQ ID NO: 27556 - DNA, 21 bp, Homo sapiens
gaggagggaaagcaattttag

SEQ ID NO: 27557 - DNA, 22 bp, Homo sapiens
tccacggtggacactgtgaacc

SEQ ID NO: 27558 - DNA, 23 bp, Homo sapiens
actgtctgatctaccctgctcac

SEQ ID NO: 27559 - DNA, 21 bp, Homo sapiens
acacttaattttttttggcca

SEQ ID NO: 27560 - DNA, 18 bp, Homo sapiens
tgtgccaagaccttgtac

SEQ ID NO: 27561 - DNA, 24 bp, Homo sapiens
aaggattacagagatttacactcc

SEQ ID NO: 27562 - DNA, 21 bp, Homo sapiens
ggaaggggttagagtcttctg

SEQ ID NO: 27563 - DNA, 21 bp, Homo sapiens
ggaagccctcaccatggtaat

SEQ ID NO: 27564 - DNA, 23 bp, Homo sapiens
ttggcaggacacgaaggagaggg

SEQ ID NO: 27565 - DNA, 21 bp, Homo sapiens
atcttttcatggaccgagtgg

SEQ ID NO: 27566 - DNA, 17 bp, Homo sapiens
acttccagcaaggtgac

SEQ ID NO: 27567 - DNA, 24 bp, Homo sapiens
ccactgttctagcaggtaaactcc

SEQ ID NO: 27568 - DNA, 17 bp, Homo sapiens
aatgaccacagcatggc

SEQ ID NO: 27569 - DNA, 24 bp, Homo sapiens
ccatccattcattcttgtaacaga

SEQ ID NO: 27570 - DNA, 16 bp, Homo sapiens
ccaggcgttggagacc

SEQ ID NO: 27571 - DNA, 21 bp, Homo sapiens
gctggataaaggagctggtca

SEQ ID NO: 27572 - DNA, 17 bp, Homo sapiens
ttgggggccagtttcat

SEQ ID NO: 27573 - DNA, 19 bp, Homo sapiens
acagggcatctccagtgaa

SEQ ID NO: 27574 - DNA, 21 bp, Homo sapiens
gcctgggaatctacatttttt

SEQ ID NO: 27575 - DNA, 16 bp, Homo sapiens
gtgtggccagggctgg

SEQ ID NO: 27576 - DNA, 20 bp, Homo sapiens
ccctcccagaaatatgagct

SEQ ID NO: 27577 - DNA, 16 bp, Homo sapiens
ttagtggggcccaggc

SEQ ID NO: 27578 - DNA, 20 bp, Homo sapiens
caaggactcaggatcccagg

SEQ ID NO: 27579 - DNA, 19 bp, Homo sapiens
ccacattacaggctcgggg

SEQ ID NO: 27580 - DNA, 18 bp, Homo sapiens
tcttggggacccagcacc

SEQ ID NO: 27581 - DNA, 19 bp, Homo sapiens
ctttctgtaccctccggac

SEQ ID NO: 27582 - DNA, 20 bp, Homo sapiens
tcaatgtgtaagtcagcctg

SEQ ID NO: 27583 - DNA, 23 bp, Homo sapiens
gctggggcccagaactcctgagt

SEQ ID NO: 27584 - DNA, 16 bp, Homo sapiens
gaggagggaacggagc

SEQ ID NO: 27585 - DNA, 18 bp, Homo sapiens
ggaccaaactcatggatc

SEQ ID NO: 27586 - DNA, 24 bp, Homo sapiens
tattcactgggagagagaggaggg

SEQ ID NO: 27587 - DNA, 16 bp, Homo sapiens
cctcgggatgcccagc

SEQ ID NO: 27588 - DNA, 24 bp, Homo sapiens
cccagatccttctccctcagactc

SEQ ID NO: 27589 - DNA, 20 bp, Homo sapiens
ctgctgggtgacagagagtc

SEQ ID NO: 27590 - DNA, 24 bp, Homo sapiens
ctgcagcccagccccgctgggatc

SEQ ID NO: 27591 - DNA, 16 bp, Homo sapiens
ccctcacctgggtccc

SEQ ID NO: 27592 - DNA, 18 bp, Homo sapiens
cccagctccttgatcagc

SEQ ID NO: 27593 - DNA, 22 bp, Homo sapiens
ttaggaagaggatagggtcagt

SEQ ID NO: 27594 - DNA, 17 bp, Homo sapiens
aacggcctcccgggact

SEQ ID NO: 27595 - DNA, 16 bp, Homo sapiens
ccggactcccgactcc

SEQ ID NO: 27596 - DNA, 22 bp, Homo sapiens
cccatcctcctgcggcaggtgc

SEQ ID NO: 27597 - DNA, 18 bp, Homo sapiens
aagagtccagccctaaac

SEQ ID NO: 27598 - DNA, 16 bp, Homo sapiens
tgtactgagggtcgcc

SEQ ID NO: 27599 - DNA, 24 bp, Homo sapiens
cggatctctccctattaagagacc

SEQ ID NO: 27600 - DNA, 18 bp, Homo sapiens
ctcctgcaggcgctcggc

SEQ ID NO: 27601 - DNA, 24 bp, Homo sapiens
cagtcccctcctaggtccagccac

SEQ ID NO: 27602 - DNA, 18 bp, Homo sapiens
ttaaggcgtgctccgccc

SEQ ID NO: 27603 - DNA, 24 bp, Homo sapiens
acccgccgcgctggctcagctgcc

SEQ ID NO: 27604 - DNA, 17 bp, Homo sapiens
cctcgccccagtcccgc

SEQ ID NO: 27605 - DNA, 16 bp, Homo sapiens
agggcagcctggcagc

SEQ ID NO: 27606 - DNA, 24 bp, Homo sapiens
gagaaagagctgtagaaaggggca

SEQ ID NO: 27607 - DNA, 17 bp, Homo sapiens
ctggtgctgcagccacg

SEQ ID NO: 27608 - DNA, 18 bp, Homo sapiens
ctgccttccctttcgtcc

SEQ ID NO: 27609 - DNA, 22 bp, Homo sapiens
ccaggacggtgacacgggggcc

SEQ ID NO: 27610 - DNA, 24 bp, Homo sapiens
agacttcggccccatgcggctcac

SEQ ID NO: 27611 - DNA, 18 bp, Homo sapiens
ggaaggagtctaccagct

SEQ ID NO: 27612 - DNA, 24 bp, Homo sapiens
caaccttctggtcctcttctatgt

SEQ ID NO: 27613 - DNA, 16 bp, Homo sapiens
gggtaggggagcgtgt

SEQ ID NO: 27614 - DNA, 16 bp, Homo sapiens
gtcgtgcctctgctgc

SEQ ID NO: 27615 - DNA, 16 bp, Homo sapiens
ccagggcgggctggag

SEQ ID NO: 27616 - DNA, 19 bp, Homo sapiens
catttgacaacgcggtgcc

SEQ ID NO: 27617 - DNA, 19 bp, Homo sapiens
ggtactagggccacaaact

SEQ ID NO: 27618 - DNA, 16 bp, Homo sapiens
cgtggtggtggcagcc

SEQ ID NO: 27619 - DNA, 17 bp, Homo sapiens
cggagcgcctccaccat

SEQ ID NO: 27620 - DNA, 17 bp, Homo sapiens
tgcgtctggcgctgctc

SEQ ID NO: 27621 - DNA, 16 bp, Homo sapiens
gggccaggcacctggc

SEQ ID NO: 27622 - DNA, 24 bp, Homo sapiens
cggagacctacgtggccaccgagt

SEQ ID NO: 27623 - DNA, 16 bp, Homo sapiens
gcgcggcgggggctgc

SEQ ID NO: 27624 - DNA, 16 bp, Homo sapiens
tggcctgctggagcgc

SEQ ID NO: 27625 - DNA, 20 bp, Homo sapiens
ccgagaggttgaagaggtcg

SEQ ID NO: 27626 - DNA, 16 bp, Homo sapiens
gttgccacggccaacc

SEQ ID NO: 27627 - DNA, 16 bp, Homo sapiens
gcgaagggcggtctgc

SEQ ID NO: 27628 - DNA, 24 bp, Homo sapiens
gtggaccgcccgctatggcgcagc

SEQ ID NO: 27629 - DNA, 16 bp, Homo sapiens
gtggccagcgggggct

SEQ ID NO: 27630 - DNA, 16 bp, Homo sapiens
tgtggtgctcctgcgc

SEQ ID NO: 27631 - DNA, 16 bp, Homo sapiens
gcagcgccgcccgccg

SEQ ID NO: 27632 - DNA, 21 bp, Homo sapiens
tgggcaccagcctctttctgc

SEQ ID NO: 27633 - DNA, 19 bp, Homo sapiens
tgttgcagccgaaccactc

SEQ ID NO: 27634 - DNA, 16 bp, Homo sapiens
gaccttcgccgcggcg

SEQ ID NO: 27635 - DNA, 18 bp, Homo sapiens
ctcctcgtagaggtaggc

SEQ ID NO: 27636 - DNA, 16 bp, Homo sapiens
gagggacgcgctcggc

SEQ ID NO: 27637 - DNA, 16 bp, Homo sapiens
ccacatagcgggcggt

SEQ ID NO: 27638 - DNA, 24 bp, Homo sapiens
ctagtgagctgggaaggcgggcgg

SEQ ID NO: 27639 - DNA, 18 bp, Homo sapiens
ccccagcagtgagccgcc

SEQ ID NO: 27640 - DNA, 17 bp, Homo sapiens
cgtggtgggcgacacgc

SEQ ID NO: 27641 - DNA, 17 bp, Homo sapiens
aagtagatgcccaggtc

SEQ ID NO: 27642 - DNA, 24 bp, Homo sapiens
ccctgctgcctgcgcgcgctgcgc

SEQ ID NO: 27643 - DNA, 16 bp, Homo sapiens
tcatccaccaccgagc

SEQ ID NO: 27644 - DNA, 16 bp, Homo sapiens
ctggctcgagggcggc

SEQ ID NO: 27645 - DNA, 20 bp, Homo sapiens
gttgctttcgctgtactgca

SEQ ID NO: 27646 - DNA, 20 bp, Homo sapiens
ccatgggactacgacgtgga

SEQ ID NO: 27647 - DNA, 20 bp, Homo sapiens
gtccttggtcatgacgccat

SEQ ID NO: 27648 - DNA, 16 bp, Homo sapiens
gggcagaggccggctc

SEQ ID NO: 27649 - DNA, 16 bp, Homo sapiens
accagcggctgcagga

SEQ ID NO: 27650 - DNA, 24 bp, Homo sapiens
aaggcggtcgagggcgactttttc

SEQ ID NO: 27651 - DNA, 16 bp, Homo sapiens
aggaagcggcggtagt

SEQ ID NO: 27652 - DNA, 18 bp, Homo sapiens
cttctacccccgcaatgg

SEQ ID NO: 27653 - DNA, 17 bp, Homo sapiens
cagcagtgccgggttgg

SEQ ID NO: 27654 - DNA, 24 bp, Homo sapiens
gatgtggagtttcccgagcacttc

SEQ ID NO: 27655 - DNA, 19 bp, Homo sapiens
agacagacccccgaaaaac

SEQ ID NO: 27656 - DNA, 18 bp, Homo sapiens
caggcgcctaacaactac

SEQ ID NO: 27657 - DNA, 19 bp, Homo sapiens
ttcccccttcccctctccg

SEQ ID NO: 27658 - DNA, 17 bp, Homo sapiens
tcatcgagaacccccag

SEQ ID NO: 27659 - DNA, 20 bp, Homo sapiens
cctgccaatgccagccttct

SEQ ID NO: 27660 - DNA, 17 bp, Homo sapiens
aatcctccgcgtgacgc

SEQ ID NO: 27661 - DNA, 23 bp, Homo sapiens
caagattctccgctgggaccctc

SEQ ID NO: 27662 - DNA, 24 bp, Homo sapiens
acttgcacgttccctcgagaagat

SEQ ID NO: 27663 - DNA, 18 bp, Homo sapiens
ttctgggcgaggtgctac

SEQ ID NO: 27664 - DNA, 19 bp, Homo sapiens
aaaaagcgccggcaattgg

SEQ ID NO: 27665 - DNA, 16 bp, Homo sapiens
cgggctgcccagttct

SEQ ID NO: 27666 - DNA, 21 bp, Homo sapiens
cttatgtcggcgaccttgggc

SEQ ID NO: 27667 - DNA, 16 bp, Homo sapiens
ccgccgccccgcgggc

SEQ ID NO: 27668 - DNA, 19 bp, Homo sapiens
acctctggtgtctctcccc

SEQ ID NO: 27669 - DNA, 18 bp, Homo sapiens
gtgagctcggggcctagc

SEQ ID NO: 27670 - DNA, 23 bp, Homo sapiens
ccgggatttgaaaaggaaacaga

SEQ ID NO: 27671 - DNA, 19 bp, Homo sapiens
gtgattacagtagaggccg

SEQ ID NO: 27672 - DNA, 20 bp, Homo sapiens
tacctgaaggaggaggtgag

SEQ ID NO: 27673 - DNA, 18 bp, Homo sapiens
gcgatccgacttccaacc

SEQ ID NO: 27674 - DNA, 23 bp, Homo sapiens
gtttgagaagaaagttcctgtgg

SEQ ID NO: 27675 - DNA, 22 bp, Homo sapiens
atttccactcaaaagttgatgg

SEQ ID NO: 27676 - DNA, 21 bp, Homo sapiens
acataagtaacttgtggattg

SEQ ID NO: 27677 - DNA, 18 bp, Homo sapiens
ttccaggttctgccattt

SEQ ID NO: 27678 - DNA, 19 bp, Homo sapiens
gtgtaatccttcaggttgg

SEQ ID NO: 27679 - DNA, 22 bp, Homo sapiens
tctccagacaagaaaaaggaga

SEQ ID NO: 27680 - DNA, 19 bp, Homo sapiens
caagatccaaagcaagggg

SEQ ID NO: 27681 - DNA, 19 bp, Homo sapiens
gaggctgaaaaggcagatg

SEQ ID NO: 27682 - DNA, 22 bp, Homo sapiens
caaagtaaattaggtcattgaa

SEQ ID NO: 27683 - DNA, 25 bp, Homo sapiens
gattttacctaagaaaaaataattc

SEQ ID NO: 27684 - DNA, 21 bp, Homo sapiens
atgttgcaagctaaactgatt

SEQ ID NO: 27685 - DNA, 22 bp, Homo sapiens
tttttagaaatttcccccttgc

SEQ ID NO: 27686 - DNA, 23 bp, Homo sapiens
tgattctaccacttaaaaaaaaa

SEQ ID NO: 27687 - DNA, 22 bp, Homo sapiens
tgcacaatatttgaataaggta

SEQ ID NO: 27688 - DNA, 21 bp, Homo sapiens
cctgcaatggaataactgaag

SEQ ID NO: 27689 - DNA, 23 bp, Homo sapiens
tgtgttattaaaagtatttgtgt

SEQ ID NO: 27690 - DNA, 21 bp, Homo sapiens
aagctacctaccaaagcattt

SEQ ID NO: 27691 - DNA, 22 bp, Homo sapiens
acaaagctgaaaattaaaatgt

SEQ ID NO: 27692 - DNA, 30 bp, Homo sapiens
aaggaaataaaaataaagaaataaaatatg

SEQ ID NO: 27693 - DNA, 21 bp, Homo sapiens
ggatttgtttgtttcagcttc

SEQ ID NO: 27694 - DNA, 23 bp, Homo sapiens
tgatatttcctgtatgagttcct

SEQ ID NO: 27695 - DNA, 21 bp, Homo sapiens
tttccaagctgacattgcaga

SEQ ID NO: 27696 - DNA, 22 bp, Homo sapiens
ttctgtttctgaggaatttttc

SEQ ID NO: 27697 - DNA, 21 bp, Homo sapiens
tgccttctctgtgccaccttt

SEQ ID NO: 27698 - DNA, 22 bp, Homo sapiens
atgtattttctttgaagggaag

SEQ ID NO: 27699 - DNA, 23 bp, Homo sapiens
caatttaacaaacagtgattgtg

SEQ ID NO: 27700 - DNA, 28 bp, Homo sapiens
gatctgtttataacatatggtttttaaa

SEQ ID NO: 27701 - DNA, 24 bp, Homo sapiens
tctttcgttttcttaacattagaa

SEQ ID NO: 27702 - DNA, 21 bp, Homo sapiens
ctggtttcaaactcctgacct

SEQ ID NO: 27703 - DNA, 20 bp, Homo sapiens
ctctaggaaggtcattcacc

SEQ ID NO: 27704 - DNA, 20 bp, Homo sapiens
aaacgatcagtggatttgga

SEQ ID NO: 27705 - DNA, 21 bp, Homo sapiens
aagaaaataacacaagatagt

SEQ ID NO: 27706 - DNA, 21 bp, Homo sapiens
tgggttatcattaacctggtg

SEQ ID NO: 27707 - DNA, 21 bp, Homo sapiens
caactgtcagacctacaagta

SEQ ID NO: 27708 - DNA, 26 bp, Homo sapiens
atctgtattctcatattttagtttgc

SEQ ID NO: 27709 - DNA, 23 bp, Homo sapiens
gcccaatgtactactaatatgcc

SEQ ID NO: 27710 - DNA, 22 bp, Homo sapiens
taaacactccatctggttttaa

SEQ ID NO: 27711 - DNA, 22 bp, Homo sapiens
ttatgtgattattaatttggca

SEQ ID NO: 27712 - DNA, 20 bp, Homo sapiens
actgtaaggaacaccgaagt

SEQ ID NO: 27713 - DNA, 24 bp, Homo sapiens
ttagacactatatatttatttttt

SEQ ID NO: 27714 - DNA, 20 bp, Homo sapiens
gtcattgacagcagtgaaag

SEQ ID NO: 27715 - DNA, 23 bp, Homo sapiens
tcttgtatttattacagattcat

SEQ ID NO: 27716 - DNA, 22 bp, Homo sapiens
gaacttgatagttaccacagtc

SEQ ID NO: 27717 - DNA, 21 bp, Homo sapiens
tttggaggcgacacactctat

SEQ ID NO: 27718 - DNA, 22 bp, Homo sapiens
tatctttaaaatgataagaagt

SEQ ID NO: 27719 - DNA, 21 bp, Homo sapiens
aggaggattttctccacacat

SEQ ID NO: 27720 - DNA, 24 bp, Homo sapiens
cccttaaaaagagaaaaaaaaagg

SEQ ID NO: 27721 - DNA, 21 bp, Homo sapiens
tgggagagctggctttaatac

SEQ ID NO: 27722 - DNA, 21 bp, Homo sapiens
caaacataagccagatgacat

SEQ ID NO: 27723 - DNA, 22 bp, Homo sapiens
gtgccttaccttgtaaatcttc

SEQ ID NO: 27724 - DNA, 21 bp, Homo sapiens
gattggtctgggtagtctctg

SEQ ID NO: 27725 - DNA, 21 bp, Homo sapiens
tggagtctaaaaattcttttt

SEQ ID NO: 27726 - DNA, 23 bp, Homo sapiens
aaatgaatatttctttttctttt

SEQ ID NO: 27727 - DNA, 16 bp, Homo sapiens
tgctttgcccagtgcc

SEQ ID NO: 27728 - DNA, 24 bp, Homo sapiens
tcctggaatgtttgaattgatgga

SEQ ID NO: 27729 - DNA, 20 bp, Homo sapiens
gcacagttactctcacccat

SEQ ID NO: 27730 - DNA, 23 bp, Homo sapiens
agtgaaatgagatttaggtttac

SEQ ID NO: 27731 - DNA, 16 bp, Homo sapiens
acactgccgcagctgc

SEQ ID NO: 27732 - DNA, 24 bp, Homo sapiens
gatgagacgggattaagtctgtgg

SEQ ID NO: 27733 - DNA, 22 bp, Homo sapiens
tcaacatgatacagcacaagtg

SEQ ID NO: 27734 - DNA, 24 bp, Homo sapiens
aactacctgtagtgtatttgtagg

SEQ ID NO: 27735 - DNA, 17 bp, Homo sapiens
agaagtctgagggagcc

SEQ ID NO: 27736 - DNA, 22 bp, Homo sapiens
catcgagacacaatgctggcag

SEQ ID NO: 27737 - DNA, 20 bp, Homo sapiens
gcaggtactgaaccatcttc

SEQ ID NO: 27738 - DNA, 25 bp, Homo sapiens
tttcatgtaagatgttctcagaatc

SEQ ID NO: 27739 - DNA, 21 bp, Homo sapiens
acgttacctgtgactcatgat

SEQ ID NO: 27740 - DNA, 20 bp, Homo sapiens
atgacctttattgagcagaa

SEQ ID NO: 27741 - DNA, 22 bp, Homo sapiens
ccttcccccaagttagtaaaca

SEQ ID NO: 27742 - DNA, 27 bp, Homo sapiens
ttgtctttttagaaatgtacagaaatg

SEQ ID NO: 27743 - DNA, 20 bp, Homo sapiens
gatagataatacacagcccc

SEQ ID NO: 27744 - DNA, 25 bp, Homo sapiens
catgataggatggaaatatcatgag

SEQ ID NO: 27745 - DNA, 18 bp, Homo sapiens
ggaacctctttcagctgg

SEQ ID NO: 27746 - DNA, 23 bp, Homo sapiens
ttttcttagtgggttcgtgttca

SEQ ID NO: 27747 - DNA, 18 bp, Homo sapiens
ttttttccccggtggcat

SEQ ID NO: 27748 - DNA, 21 bp, Homo sapiens
cattaagggctttaattgggg

SEQ ID NO: 27749 - DNA, 24 bp, Homo sapiens
agatgttaaagctatccatttctg

SEQ ID NO: 27750 - DNA, 17 bp, Homo sapiens
tttcaggcaagaccagc

SEQ ID NO: 27751 - DNA, 24 bp, Homo sapiens
gaaaagcctattagtaaatagctt

SEQ ID NO: 27752 - DNA, 24 bp, Homo sapiens
gaaaaataaacaaccttatgccac

SEQ ID NO: 27753 - DNA, 23 bp, Homo sapiens
tgaaccaacgagcagggcagaac

SEQ ID NO: 27754 - DNA, 22 bp, Homo sapiens
gacacatagggttcaggagcat

SEQ ID NO: 27755 - DNA, 23 bp, Homo sapiens
tctggtgttctatgatttttaca

SEQ ID NO: 27756 - DNA, 22 bp, Homo sapiens
atgtaaaaatgttgctcagccc

SEQ ID NO: 27757 - DNA, 24 bp, Homo sapiens
tcctatgtggtcttggcaaggcat

SEQ ID NO: 27758 - DNA, 18 bp, Homo sapiens
tggcgtcttcagaggttc

SEQ ID NO: 27759 - DNA, 24 bp, Homo sapiens
tcgacctgctctataaagcctatg

SEQ ID NO: 27760 - DNA, 22 bp, Homo sapiens
ggagtcatcacacattcatggc

SEQ ID NO: 27761 - DNA, 24 bp, Homo sapiens
gaacatcaatgcggccaaatctag

SEQ ID NO: 27762 - DNA, 18 bp, Homo sapiens
agaaagccacactggggc

SEQ ID NO: 27763 - DNA, 20 bp, Homo sapiens
agagctgccttctttgttct

SEQ ID NO: 27764 - DNA, 19 bp, Homo sapiens
ctgcagaggctgaaggtgg

SEQ ID NO: 27765 - DNA, 18 bp, Homo sapiens
ccctctaagcgtatctgc

SEQ ID NO: 27766 - DNA, 24 bp, Homo sapiens
ctcttttcatcttctgggaggaaa

SEQ ID NO: 27767 - DNA, 23 bp, Homo sapiens
atgtcttctctgtggaaagtgtc

SEQ ID NO: 27768 - DNA, 19 bp, Homo sapiens
caccctggacactgattac

SEQ ID NO: 27769 - DNA, 21 bp, Homo sapiens
ctctctccaaagattccaggc

SEQ ID NO: 27770 - DNA, 19 bp, Homo sapiens
ggctcaaaaatgaccaggc

SEQ ID NO: 27771 - DNA, 24 bp, Homo sapiens
gagtcaaggccagtatggctcaca

SEQ ID NO: 27772 - DNA, 23 bp, Homo sapiens
caatgtgttctgactatttatgt

SEQ ID NO: 27773 - DNA, 24 bp, Homo sapiens
aaagcccatgtcccgtttggtcat

SEQ ID NO: 27774 - DNA, 21 bp, Homo sapiens
gatctttcagatctgtttgag

SEQ ID NO: 27775 - DNA, 21 bp, Homo sapiens
tcatctgtgttgagcgagtag

SEQ ID NO: 27776 - DNA, 16 bp, Homo sapiens
gaagccggacacggag

SEQ ID NO: 27777 - DNA, 22 bp, Homo sapiens
tcccagggtgtcgaagagattt

SEQ ID NO: 27778 - DNA, 18 bp, Homo sapiens
tgccagccacacacctgc

SEQ ID NO: 27779 - DNA, 24 bp, Homo sapiens
cctaaagtttcttccctctttggc

SEQ ID NO: 27780 - DNA, 17 bp, Homo sapiens
gaggggtggccccaggc

SEQ ID NO: 27781 - DNA, 21 bp, Homo sapiens
cagagctcaccgaatgactgc

SEQ ID NO: 27782 - DNA, 16 bp, Homo sapiens
ccggctgtcccaactt

SEQ ID NO: 27783 - DNA, 22 bp, Homo sapiens
tttataacaggctgcggcagga

SEQ ID NO: 27784 - DNA, 16 bp, Homo sapiens
ccccccatgtctgggc

SEQ ID NO: 27785 - DNA, 21 bp, Homo sapiens
gacatactcaagacagagcgg

SEQ ID NO: 27786 - DNA, 24 bp, Homo sapiens
cctgctttctgcctctctatacag

SEQ ID NO: 27787 - DNA, 23 bp, Homo sapiens
ggtccctcctcactgcctcctcc

SEQ ID NO: 27788 - DNA, 21 bp, Homo sapiens
cttacctcgaagtgcatgttt

SEQ ID NO: 27789 - DNA, 16 bp, Homo sapiens
ggaggtgggctcggcc

SEQ ID NO: 27790 - DNA, 16 bp, Homo sapiens
ggtgtggtagccgtgt

SEQ ID NO: 27791 - DNA, 16 bp, Homo sapiens
tggctctcccccttcc

SEQ ID NO: 27792 - DNA, 24 bp, Homo sapiens
agagaagcagaatagagccaagta

SEQ ID NO: 27793 - DNA, 18 bp, Homo sapiens
caatctccacagcatggt

SEQ ID NO: 27794 - DNA, 24 bp, Homo sapiens
cctcacctcttttactacttcggc

SEQ ID NO: 27795 - DNA, 20 bp, Homo sapiens
gagggtaaaagaccaggttt

SEQ ID NO: 27796 - DNA, 24 bp, Homo sapiens
gtgaatgccgctcttcacagcctc

SEQ ID NO: 27797 - DNA, 18 bp, Homo sapiens
gacatgtccaggcctacc

SEQ ID NO: 27798 - DNA, 21 bp, Homo sapiens
ccttaagacccaacaaagaca

SEQ ID NO: 27799 - DNA, 18 bp, Homo sapiens
ccgtggtagccattgacc

SEQ ID NO: 27800 - DNA, 21 bp, Homo sapiens
gttcttgtgatttctcccaac

SEQ ID NO: 27801 - DNA, 16 bp, Homo sapiens
gcccacagactggtcc

SEQ ID NO: 27802 - DNA, 16 bp, Homo sapiens
cacaggacccacctgg

SEQ ID NO: 27803 - DNA, 16 bp, Homo sapiens
aggcaggtaggctggg

SEQ ID NO: 27804 - DNA, 19 bp, Homo sapiens
ggatggtctcatctccagc

SEQ ID NO: 27805 - DNA, 24 bp, Homo sapiens
catagcagttaggatttgaagaca

SEQ ID NO: 27806 - DNA, 24 bp, Homo sapiens
cttacacagctccaccaccttggg

SEQ ID NO: 27807 - DNA, 16 bp, Homo sapiens
cctgtgctgcatgcgc

SEQ ID NO: 27808 - DNA, 16 bp, Homo sapiens
tgggctcaaggggaca

SEQ ID NO: 27809 - DNA, 16 bp, Homo sapiens
ccctagtgggccaggg

SEQ ID NO: 27810 - DNA, 18 bp, Homo sapiens
actgctaggccaggaggt

SEQ ID NO: 27811 - DNA, 18 bp, Homo sapiens
ctcaggcccatccctact

SEQ ID NO: 27812 - DNA, 17 bp, Homo sapiens
actcactgggctggtgg

SEQ ID NO: 27813 - DNA, 18 bp, Homo sapiens
aagcctcctcttcctcct

SEQ ID NO: 27814 - DNA, 16 bp, Homo sapiens
ctcgctccccctcctg

SEQ ID NO: 27815 - DNA, 18 bp, Homo sapiens
tctctgccagtctttcct

SEQ ID NO: 27816 - DNA, 24 bp, Homo sapiens
gagttaaacccatctttctgaggc

SEQ ID NO: 27817 - DNA, 16 bp, Homo sapiens
gtgcggtacagtccgc

SEQ ID NO: 27818 - DNA, 17 bp, Homo sapiens
attcccagcagttcgcc

SEQ ID NO: 27819 - DNA, 20 bp, Homo sapiens
ggctatcaaaaggatcgcct

SEQ ID NO: 27820 - DNA, 17 bp, Homo sapiens
catggccccttccaggc

SEQ ID NO: 27821 - DNA, 19 bp, Homo sapiens
ggacttggggaaggttgtt

SEQ ID NO: 27822 - DNA, 19 bp, Homo sapiens
tggagttggccagcaggtg

SEQ ID NO: 27823 - DNA, 24 bp, Homo sapiens
tgggggatgaagtgggtttaatct

SEQ ID NO: 27824 - DNA, 24 bp, Homo sapiens
gccttcatctctacaaactcatag

SEQ ID NO: 27825 - DNA, 24 bp, Homo sapiens
gagctgataggacttgcccagtgt

SEQ ID NO: 27826 - DNA, 24 bp, Homo sapiens
ctggagagactcactaagtgtaca

SEQ ID NO: 27827 - DNA, 22 bp, Homo sapiens
aacgtcattggcatggacaagc

SEQ ID NO: 27828 - DNA, 17 bp, Homo sapiens
ccccacaggctgaggga

SEQ ID NO: 27829 - DNA, 21 bp, Homo sapiens
actgttttgtttccaggagga

SEQ ID NO: 27830 - DNA, 17 bp, Homo sapiens
acctgtgggttgggggc

SEQ ID NO: 27831 - DNA, 17 bp, Homo sapiens
tctgctccatcctggcc

SEQ ID NO: 27832 - DNA, 24 bp, Homo sapiens
gccaggaagtctggaagggtgagc

SEQ ID NO: 27833 - DNA, 19 bp, Homo sapiens
gagagacgcccatgtctcc

SEQ ID NO: 27834 - DNA, 22 bp, Homo sapiens
gtgttagctgggagggcgatcc

SEQ ID NO: 27835 - DNA, 23 bp, Homo sapiens
cctgaaaccatcttatactatgg

SEQ ID NO: 27836 - DNA, 16 bp, Homo sapiens
acttctggcctggagc

SEQ ID NO: 27837 - DNA, 16 bp, Homo sapiens
ctgcccccttgcaggt

SEQ ID NO: 27838 - DNA, 17 bp, Homo sapiens
gaattccccaggggcct

SEQ ID NO: 27839 - DNA, 18 bp, Homo sapiens
gaaaggtccttcgtgaac

SEQ ID NO: 27840 - DNA, 21 bp, Homo sapiens
ggctcttctgtatggacttac

SEQ ID NO: 27841 - DNA, 21 bp, Homo sapiens
gcagccagccagtaaaatggt

SEQ ID NO: 27842 - DNA, 22 bp, Homo sapiens
tccgtctaggtggacatgcagt

SEQ ID NO: 27843 - DNA, 22 bp, Homo sapiens
gcaccatggcccagacgcccgc

SEQ ID NO: 27844 - DNA, 18 bp, Homo sapiens
gaactcgcctgcaggagc

SEQ ID NO: 27845 - DNA, 17 bp, Homo sapiens
cagagacccaccgagcg

SEQ ID NO: 27846 - DNA, 16 bp, Homo sapiens
gctaagcccctcgggc

SEQ ID NO: 27847 - DNA, 21 bp, Homo sapiens
gttaagaagagcgtggccggc

SEQ ID NO: 27848 - DNA, 20 bp, Homo sapiens
cgcgctcactttgggcttgt

SEQ ID NO: 27849 - DNA, 24 bp, Homo sapiens
acaccattcaggactatcttgggc

SEQ ID NO: 27850 - DNA, 24 bp, Homo sapiens
agagaacagcgttgtgtcccagtg

SEQ ID NO: 27851 - DNA, 21 bp, Homo sapiens
gtcatgtactcctgttggcat

SEQ ID NO: 27852 - DNA, 24 bp, Homo sapiens
ccctaagatgttcggagtggtttt

SEQ ID NO: 27853 - DNA, 16 bp, Homo sapiens
cccgcagtcctttcct

SEQ ID NO: 27854 - DNA, 16 bp, Homo sapiens
ccttctgagaacaggc

SEQ ID NO: 27855 - DNA, 18 bp, Homo sapiens
gcctggctggaatgggcc

SEQ ID NO: 27856 - DNA, 20 bp, Homo sapiens
cctttccagccctacaaatg

SEQ ID NO: 27857 - DNA, 16 bp, Homo sapiens
gaccccacctggaaca

SEQ ID NO: 27858 - DNA, 20 bp, Homo sapiens
gatgccattcaccttctgaa

SEQ ID NO: 27859 - DNA, 16 bp, Homo sapiens
cccacagggctctcgc

SEQ ID NO: 27860 - DNA, 16 bp, Homo sapiens
ccagcgtggtgcacag

SEQ ID NO: 27861 - DNA, 19 bp, Homo sapiens
ctggctgccgaagcttgtc

SEQ ID NO: 27862 - DNA, 16 bp, Homo sapiens
ccttgcgccctctcgg

SEQ ID NO: 27863 - DNA, 19 bp, Homo sapiens
taacccttgctccgaactc

SEQ ID NO: 27864 - DNA, 16 bp, Homo sapiens
cagcagcagcagcagc

SEQ ID NO: 27865 - DNA, 24 bp, Homo sapiens
gtacagggaagacgctgtgcctgc

SEQ ID NO: 27866 - DNA, 19 bp, Homo sapiens
catcccttgccaaccatcc

SEQ ID NO: 27867 - DNA, 20 bp, Homo sapiens
atctctgcccgcaagattgc

SEQ ID NO: 27868 - DNA, 24 bp, Homo sapiens
ccttgagttctgcttgagagacgg

SEQ ID NO: 27869 - DNA, 20 bp, Homo sapiens
cttgtcatcctggggcaacg

SEQ ID NO: 27870 - DNA, 24 bp, Homo sapiens
aagcccaaccctaggtttacaccc

SEQ ID NO: 27871 - DNA, 20 bp, Homo sapiens
acggcagatgcccacttcac

SEQ ID NO: 27872 - DNA, 19 bp, Homo sapiens
gtgagttgcgagtgggtcc

SEQ ID NO: 27873 - DNA, 16 bp, Homo sapiens
cagggccgagttagcc

SEQ ID NO: 27874 - DNA, 21 bp, Homo sapiens
ccgagacaggtgtaaactcgt

SEQ ID NO: 27875 - DNA, 24 bp, Homo sapiens
gtctgagaaccgtgacttctgtgc

SEQ ID NO: 27876 - DNA, 20 bp, Homo sapiens
accacagcacagcatggggc

SEQ ID NO: 27877 - DNA, 23 bp, Homo sapiens
caaagattatttacgcctccagg

SEQ ID NO: 27878 - DNA, 16 bp, Homo sapiens
ccagcgctctgcacac

SEQ ID NO: 27879 - DNA, 17 bp, Homo sapiens
ctccaacacccacagcg

SEQ ID NO: 27880 - DNA, 20 bp, Homo sapiens
tcgaatctcctccctctgtc

SEQ ID NO: 27881 - DNA, 24 bp, Homo sapiens
ctcccgggagcccagcacacacac

SEQ ID NO: 27882 - DNA, 20 bp, Homo sapiens
ccacgtttcagttatgctca

SEQ ID NO: 27883 - DNA, 22 bp, Homo sapiens
ctacctgtagatggttactctc

SEQ ID NO: 27884 - DNA, 16 bp, Homo sapiens
cacgctgcagggccac

SEQ ID NO: 27885 - DNA, 16 bp, Homo sapiens
gacacccagcagcact

SEQ ID NO: 27886 - DNA, 16 bp, Homo sapiens
ctctcccaccaggcct

SEQ ID NO: 27887 - DNA, 16 bp, Homo sapiens
tcccctgcagtccccc

SEQ ID NO: 27888 - DNA, 22 bp, Homo sapiens
tccatcctgaggtgaagaaaca

SEQ ID NO: 27889 - DNA, 24 bp, Homo sapiens
gtagaaatgacaggagcgacttgc

SEQ ID NO: 27890 - DNA, 23 bp, Homo sapiens
tgggctagggtttgaagttcact

SEQ ID NO: 27891 - DNA, 18 bp, Homo sapiens
cacacactccaacccgac

SEQ ID NO: 27892 - DNA, 22 bp, Homo sapiens
ctggcttcggtcctttcttggc

SEQ ID NO: 27893 - DNA, 24 bp, Homo sapiens
ggccgccccaccgggcaagcacaa

SEQ ID NO: 27894 - DNA, 20 bp, Homo sapiens
ccacttgtgccgtaagaagg

SEQ ID NO: 27895 - DNA, 16 bp, Homo sapiens
ctaacatgggtggccc

SEQ ID NO: 27896 - DNA, 21 bp, Homo sapiens
ctgctccaggcttttttctgc

SEQ ID NO: 27897 - DNA, 17 bp, Homo sapiens
gtgggtgctttgtggcg

SEQ ID NO: 27898 - DNA, 19 bp, Homo sapiens
cttgcttccgctcttgacc

SEQ ID NO: 27899 - DNA, 16 bp, Homo sapiens
ttctgtcctgggcatc

SEQ ID NO: 27900 - DNA, 22 bp, Homo sapiens
cacaggagagctgggccatgga

SEQ ID NO: 27901 - DNA, 23 bp, Homo sapiens
ggtgtgtgtttacccctgcctca

SEQ ID NO: 27902 - DNA, 24 bp, Homo sapiens
ggttagtttcataatttaaaaagg

SEQ ID NO: 27903 - DNA, 21 bp, Homo sapiens
cctggacattgaggacttggt

SEQ ID NO: 27904 - DNA, 17 bp, Homo sapiens
ggtagtaagggcacacc

SEQ ID NO: 27905 - DNA, 16 bp, Homo sapiens
tcccatccatcccagg

SEQ ID NO: 27906 - DNA, 24 bp, Homo sapiens
ttggcatccaacaagtaattgtac

SEQ ID NO: 27907 - DNA, 16 bp, Homo sapiens
gggtcagaagacatgg

SEQ ID NO: 27908 - DNA, 17 bp, Homo sapiens
cacccctggacatcagg

SEQ ID NO: 27909 - DNA, 22 bp, Homo sapiens
gatcttctcctctctccttccc

SEQ ID NO: 27910 - DNA, 16 bp, Homo sapiens
ccaggcctgctgatct

SEQ ID NO: 27911 - DNA, 24 bp, Homo sapiens
gaagcagcaagccgacatcatatt

SEQ ID NO: 27912 - DNA, 18 bp, Homo sapiens
caagtgtgtctggccagg

SEQ ID NO: 27913 - DNA, 16 bp, Homo sapiens
gttgtgtgctctgcgg

SEQ ID NO: 27914 - DNA, 19 bp, Homo sapiens
cctctgctctcgacatcgc

SEQ ID NO: 27915 - DNA, 23 bp, Homo sapiens
gaggccagcggagactcaccacg

SEQ ID NO: 27916 - DNA, 24 bp, Homo sapiens
cgatgcctgctgcacatgtcttgg

SEQ ID NO: 27917 - DNA, 23 bp, Homo sapiens
ctccagaaaggtttgcgtggctc

SEQ ID NO: 27918 - DNA, 24 bp, Homo sapiens
ccttctcttcctcctgtagagccg

SEQ ID NO: 27919 - DNA, 16 bp, Homo sapiens
gtgctcagtccccagt

SEQ ID NO: 27920 - DNA, 20 bp, Homo sapiens
gtgatctttgacgaagctca

SEQ ID NO: 27921 - DNA, 24 bp, Homo sapiens
gacctacttgtggccttttacaga

SEQ ID NO: 27922 - DNA, 16 bp, Homo sapiens
gtccagtcctgaagcc

SEQ ID NO: 27923 - DNA, 22 bp, Homo sapiens
cctgtgccttctgcacccccac

SEQ ID NO: 27924 - DNA, 17 bp, Homo sapiens
gaactccgggtggggct

SEQ ID NO: 27925 - DNA, 24 bp, Homo sapiens
gtggtgattcgggtgtgcttgggc

SEQ ID NO: 27926 - DNA, 16 bp, Homo sapiens
ctcaggaccaagcagt

SEQ ID NO: 27927 - DNA, 18 bp, Homo sapiens
ctccccatgacctggctt

SEQ ID NO: 27928 - DNA, 16 bp, Homo sapiens
ctgggctgggggagtc

SEQ ID NO: 27929 - DNA, 24 bp, Homo sapiens
aggagcagaccaaggcagcgcagc

SEQ ID NO: 27930 - DNA, 16 bp, Homo sapiens
acagggcaggctgccc

SEQ ID NO: 27931 - DNA, 17 bp, Homo sapiens
tccatgttcagccctgg

SEQ ID NO: 27932 - DNA, 24 bp, Homo sapiens
gttggtggatttggcctgcatgga

SEQ ID NO: 27933 - DNA, 17 bp, Homo sapiens
acccagctgcaaggagg

SEQ ID NO: 27934 - DNA, 24 bp, Homo sapiens
cttttttccatgccaggaatcctg

SEQ ID NO: 27935 - DNA, 17 bp, Homo sapiens
gcaggatcactgtgggt

SEQ ID NO: 27936 - DNA, 18 bp, Homo sapiens
gctgcctttctcttgccc

SEQ ID NO: 27937 - DNA, 21 bp, Homo sapiens
cttggtgacaccgctgtcgtc

SEQ ID NO: 27938 - DNA, 19 bp, Homo sapiens
gaagagtaagtgttgccct

SEQ ID NO: 27939 - DNA, 18 bp, Homo sapiens
tctagctctaggctgggc

SEQ ID NO: 27940 - DNA, 17 bp, Homo sapiens
ggtgggtgacacctcct

SEQ ID NO: 27941 - DNA, 17 bp, Homo sapiens
cctgaaaacaggcctca

SEQ ID NO: 27942 - DNA, 24 bp, Homo sapiens
catcgatgctgttgagctgcctgg

SEQ ID NO: 27943 - DNA, 23 bp, Homo sapiens
tctcaacatctcagcaaccagat

SEQ ID NO: 27944 - DNA, 20 bp, Homo sapiens
cagctcaaagatgtagctgc

SEQ ID NO: 27945 - DNA, 23 bp, Homo sapiens
cctccaggctcgagcctgttttc

SEQ ID NO: 27946 - DNA, 16 bp, Homo sapiens
gagtccaggatgcagc

SEQ ID NO: 27947 - DNA, 17 bp, Homo sapiens
cgagcctgccttcttct

SEQ ID NO: 27948 - DNA, 16 bp, Homo sapiens
cccgcaccaaagaccc

SEQ ID NO: 27949 - DNA, 18 bp, Homo sapiens
tcgagcctgccttcttct

SEQ ID NO: 27950 - DNA, 16 bp, Homo sapiens
tgacggccaggggagc

SEQ ID NO: 27951 - DNA, 19 bp, Homo sapiens
tcacgtttcagaccaaggg

SEQ ID NO: 27952 - DNA, 23 bp, Homo sapiens
actaacgcctccacgccccgatc

SEQ ID NO: 27953 - DNA, 17 bp, Homo sapiens
agtccggccgtgttggt

SEQ ID NO: 27954 - DNA, 18 bp, Homo sapiens
gccccccattgggcagga

SEQ ID NO: 27955 - DNA, 19 bp, Homo sapiens
atcagggaaggagatgcca

SEQ ID NO: 27956 - DNA, 16 bp, Homo sapiens
ctggggtcggggcctc

SEQ ID NO: 27957 - DNA, 23 bp, Homo sapiens
ctttctcccatccccaagtctag

SEQ ID NO: 27958 - DNA, 22 bp, Homo sapiens
ctccaggtgctggagtgttcac

SEQ ID NO: 27959 - DNA, 20 bp, Homo sapiens
ttagggcactggaaaggagc

SEQ ID NO: 27960 - DNA, 17 bp, Homo sapiens
cctgtccattggcctgg

SEQ ID NO: 27961 - DNA, 16 bp, Homo sapiens
tgtaaggcccccagcc

SEQ ID NO: 27962 - DNA, 23 bp, Homo sapiens
tgtcctgtgaccttctgtgtatg

SEQ ID NO: 27963 - DNA, 16 bp, Homo sapiens
ggggaacaagggctgc

SEQ ID NO: 27964 - DNA, 22 bp, Homo sapiens
tcctgacggggctgcacttcct

SEQ ID NO: 27965 - DNA, 16 bp, Homo sapiens
ccagccccacctgcct

SEQ ID NO: 27966 - DNA, 17 bp, Homo sapiens
tggttccccagcagggc

SEQ ID NO: 27967 - DNA, 16 bp, Homo sapiens
tcctccggtgaccagc

SEQ ID NO: 27968 - DNA, 19 bp, Homo sapiens
tataaggtgggggccacct

SEQ ID NO: 27969 - DNA, 17 bp, Homo sapiens
cccaggtctgtacctcg

SEQ ID NO: 27970 - DNA, 23 bp, Homo sapiens
aaaggtaaggggctgcccccagg

SEQ ID NO: 27971 - DNA, 19 bp, Homo sapiens
gcatgtgcctagcctgtgg

SEQ ID NO: 27972 - DNA, 20 bp, Homo sapiens
cacatccatcctgatgctgg

SEQ ID NO: 27973 - DNA, 16 bp, Homo sapiens
attggcctggatatgg

SEQ ID NO: 27974 - DNA, 17 bp, Homo sapiens
ccactgcagccagaaag

SEQ ID NO: 27975 - DNA, 24 bp, Homo sapiens
cctttgttctgacttctgcacagt

SEQ ID NO: 27976 - DNA, 18 bp, Homo sapiens
ccctggcggaccagctcg

SEQ ID NO: 27977 - DNA, 19 bp, Homo sapiens
ggtggagagggtgatgggc

SEQ ID NO: 27978 - DNA, 21 bp, Homo sapiens
gcatctccagagcaaaggagg

SEQ ID NO: 27979 - DNA, 23 bp, Homo sapiens
tcacactctgtgccctctgccgc

SEQ ID NO: 27980 - DNA, 20 bp, Homo sapiens
cgctgatgtcagaggtgtca

SEQ ID NO: 27981 - DNA, 24 bp, Homo sapiens
cttcagtcccggccacagcatgca

SEQ ID NO: 27982 - DNA, 16 bp, Homo sapiens
ctcgaggcccgagacc

SEQ ID NO: 27983 - DNA, 16 bp, Homo sapiens
ctggccccggtgtcct

SEQ ID NO: 27984 - DNA, 22 bp, Homo sapiens
gggaaagggctgagcgtggcca

SEQ ID NO: 27985 - DNA, 17 bp, Homo sapiens
ggcctgagcaccggtga

SEQ ID NO: 27986 - DNA, 16 bp, Homo sapiens
gacccccacccagatc

SEQ ID NO: 27987 - DNA, 24 bp, Homo sapiens
gggtccccatgagccgggtgctgg

SEQ ID NO: 27988 - DNA, 16 bp, Homo sapiens
gacaggccctcaccgt

SEQ ID NO: 27989 - DNA, 16 bp, Homo sapiens
tgtctgctccctctgg

SEQ ID NO: 27990 - DNA, 18 bp, Homo sapiens
actgctcaggacctcagg

SEQ ID NO: 27991 - DNA, 18 bp, Homo sapiens
acatcatcgacaagcacc

SEQ ID NO: 27992 - DNA, 18 bp, Homo sapiens
ctcacccagagccttccc

SEQ ID NO: 27993 - DNA, 19 bp, Homo sapiens
agttgagctccgcgtttga

SEQ ID NO: 27994 - DNA, 18 bp, Homo sapiens
gctcttgggagcaggggt

SEQ ID NO: 27995 - DNA, 24 bp, Homo sapiens
ggaggtgggggagcactgaggcct

SEQ ID NO: 27996 - DNA, 16 bp, Homo sapiens
ctggaagtgcaggggc

SEQ ID NO: 27997 - DNA, 24 bp, Homo sapiens
ttttccgaggagtgcttatcctcc

SEQ ID NO: 27998 - DNA, 22 bp, Homo sapiens
ctccatgacaggataggaaggg

SEQ ID NO: 27999 - DNA, 19 bp, Homo sapiens
catcctggatcctggaccc

SEQ ID NO: 28000 - DNA, 17 bp, Homo sapiens
ccctcacccaccccgcc

SEQ ID NO: 28001 - DNA, 16 bp, Homo sapiens
tgccttgaccccggcc

SEQ ID NO: 28002 - DNA, 18 bp, Homo sapiens
gatccgatgagggcaagc

SEQ ID NO: 28003 - DNA, 22 bp, Homo sapiens
ggctcctgatcttcttcccttc

SEQ ID NO: 28004 - DNA, 16 bp, Homo sapiens
tggccaagtcgcgggc

SEQ ID NO: 28005 - DNA, 19 bp, Homo sapiens
gtctcccctgtgttctggg

SEQ ID NO: 28006 - DNA, 18 bp, Homo sapiens
gagaagctgcctttgctc

SEQ ID NO: 28007 - DNA, 17 bp, Homo sapiens
agtggtcacagctcctg

SEQ ID NO: 28008 - DNA, 16 bp, Homo sapiens
agaggcaggggaggca

SEQ ID NO: 28009 - DNA, 19 bp, Homo sapiens
gcctcttcctcccacaggc

SEQ ID NO: 28010 - DNA, 17 bp, Homo sapiens
gaagaggcagcgggagc

SEQ ID NO: 28011 - DNA, 21 bp, Homo sapiens
ctgtttgtggagcccaggagc

SEQ ID NO: 28012 - DNA, 21 bp, Homo sapiens
cggcaacccttgcatagtaag

SEQ ID NO: 28013 - DNA, 16 bp, Homo sapiens
gaacccgattggcctt

SEQ ID NO: 28014 - DNA, 17 bp, Homo sapiens
agagctcaccttgcccc

SEQ ID NO: 28015 - DNA, 20 bp, Homo sapiens
gtctccctcatgggggagga

SEQ ID NO: 28016 - DNA, 23 bp, Homo sapiens
cagagtctgctggggagccataa

SEQ ID NO: 28017 - DNA, 24 bp, Homo sapiens
actttccttccagaccatcagtgc

SEQ ID NO: 28018 - DNA, 17 bp, Homo sapiens
ccagcagtcgctctcgt

SEQ ID NO: 28019 - DNA, 18 bp, Homo sapiens
accttcctggcggtctgc

SEQ ID NO: 28020 - DNA, 17 bp, Homo sapiens
tggaccccaagtggggt

SEQ ID NO: 28021 - DNA, 17 bp, Homo sapiens
gggaggcccgtgacaat

SEQ ID NO: 28022 - DNA, 16 bp, Homo sapiens
ggagcctcggggaagg

SEQ ID NO: 28023 - DNA, 21 bp, Homo sapiens
cttcatctcatccaggaactg

SEQ ID NO: 28024 - DNA, 16 bp, Homo sapiens
ggccccaggcagctcc

SEQ ID NO: 28025 - DNA, 19 bp, Homo sapiens
cagaccgccttaccccagc

SEQ ID NO: 28026 - DNA, 17 bp, Homo sapiens
acacgaatggccgtggt

SEQ ID NO: 28027 - DNA, 16 bp, Homo sapiens
aggcggctcggtcacg

SEQ ID NO: 28028 - DNA, 19 bp, Homo sapiens
cgggttgtcctcaagatgc

SEQ ID NO: 28029 - DNA, 17 bp, Homo sapiens
ggcctggttcacagccc

SEQ ID NO: 28030 - DNA, 24 bp, Homo sapiens
caggtgagttacagcagggtgggg

SEQ ID NO: 28031 - DNA, 19 bp, Homo sapiens
ctgtggtcacagaggaaga

SEQ ID NO: 28032 - DNA, 24 bp, Homo sapiens
ccgccccgtggccaagggagcccc

SEQ ID NO: 28033 - DNA, 16 bp, Homo sapiens
agtggggtgtgggcgt

SEQ ID NO: 28034 - DNA, 22 bp, Homo sapiens
caggagtggtaccggcagcagg

SEQ ID NO: 28035 - DNA, 17 bp, Homo sapiens
cgagtagccggagaggc

SEQ ID NO: 28036 - DNA, 16 bp, Homo sapiens
aggactacggagctgt

SEQ ID NO: 28037 - DNA, 17 bp, Homo sapiens
tcggcaaaggcgaacct

SEQ ID NO: 28038 - DNA, 17 bp, Homo sapiens
cccgtctcctccagagc

SEQ ID NO: 28039 - DNA, 22 bp, Homo sapiens
atggccaaagttgtcatacacc

SEQ ID NO: 28040 - DNA, 20 bp, Homo sapiens
atgagggtcttcacttcggt

SEQ ID NO: 28041 - DNA, 17 bp, Homo sapiens
caggaactcacagttcg

SEQ ID NO: 28042 - DNA, 16 bp, Homo sapiens
ggctatggccaccccc

SEQ ID NO: 28043 - DNA, 16 bp, Homo sapiens
tgggggtgggtggacc

SEQ ID NO: 28044 - DNA, 18 bp, Homo sapiens
gtccccacgtcagggtgt

SEQ ID NO: 28045 - DNA, 18 bp, Homo sapiens
cttctccacgcacactgg

SEQ ID NO: 28046 - DNA, 17 bp, Homo sapiens
cgtgttgccgagcgaac

SEQ ID NO: 28047 - DNA, 18 bp, Homo sapiens
tccagactcttagctttc

SEQ ID NO: 28048 - DNA, 19 bp, Homo sapiens
agaggagccagaaatgggt

SEQ ID NO: 28049 - DNA, 16 bp, Homo sapiens
cagcgctgcccgtccg

SEQ ID NO: 28050 - DNA, 22 bp, Homo sapiens
ccggccccccgggctacagcac

SEQ ID NO: 28051 - DNA, 18 bp, Homo sapiens
gccctgggcgcctggtgc

SEQ ID NO: 28052 - DNA, 24 bp, Homo sapiens
aagtcgcctggccccttcttctcc

SEQ ID NO: 28053 - DNA, 20 bp, Homo sapiens
gagggagaggcagcctttgg

SEQ ID NO: 28054 - DNA, 18 bp, Homo sapiens
gcagaggtcctcaggtgc

SEQ ID NO: 28055 - DNA, 16 bp, Homo sapiens
gtccccggcagctggt

SEQ ID NO: 28056 - DNA, 20 bp, Homo sapiens
cccccaatagcagggaggac

SEQ ID NO: 28057 - DNA, 17 bp, Homo sapiens
ctctgccgggcaggaac

SEQ ID NO: 28058 - DNA, 18 bp, Homo sapiens
caagaggggctttgccac

SEQ ID NO: 28059 - DNA, 16 bp, Homo sapiens
gctcctcgccagggct

SEQ ID NO: 28060 - DNA, 17 bp, Homo sapiens
gggtgcccctgcagggt

SEQ ID NO: 28061 - DNA, 20 bp, Homo sapiens
gggttggcctcaggagacag

SEQ ID NO: 28062 - DNA, 22 bp, Homo sapiens
gagtatgagcaggagccagttc

SEQ ID NO: 28063 - DNA, 19 bp, Homo sapiens
tgccaggcaggggatttac

SEQ ID NO: 28064 - DNA, 24 bp, Homo sapiens
ccctggagcacagcgaacagcggg

SEQ ID NO: 28065 - DNA, 16 bp, Homo sapiens
gtggagcagctgtggg

SEQ ID NO: 28066 - DNA, 17 bp, Homo sapiens
tgctgtgcccccctccc

SEQ ID NO: 28067 - DNA, 18 bp, Homo sapiens
ggatcttcttcctccctc

SEQ ID NO: 28068 - DNA, 18 bp, Homo sapiens
cgtccaggtgctttggga

SEQ ID NO: 28069 - DNA, 17 bp, Homo sapiens
tgtctatggtggtcggc

SEQ ID NO: 28070 - DNA, 16 bp, Homo sapiens
gtgtcctcctcaggcc

SEQ ID NO: 28071 - DNA, 16 bp, Homo sapiens
gtggattccctggtcc

SEQ ID NO: 28072 - DNA, 17 bp, Homo sapiens
gcagaagaaccgcgagg

SEQ ID NO: 28073 - DNA, 16 bp, Homo sapiens
cacttgagcccctggc

SEQ ID NO: 28074 - DNA, 18 bp, Homo sapiens
catccagccagccagttt

SEQ ID NO: 28075 - DNA, 16 bp, Homo sapiens
actcctgcttcacggc

SEQ ID NO: 28076 - DNA, 20 bp, Homo sapiens
gaacgctcaatgttccaagg

SEQ ID NO: 28077 - DNA, 21 bp, Homo sapiens
gtcatcggaacccttgtagtc

SEQ ID NO: 28078 - DNA, 16 bp, Homo sapiens
tgatggagcctcgggc

SEQ ID NO: 28079 - DNA, 17 bp, Homo sapiens
gttgtgcttcttggggt

SEQ ID NO: 28080 - DNA, 16 bp, Homo sapiens
aagctcttcatggtgg

SEQ ID NO: 28081 - DNA, 17 bp, Homo sapiens
cggcagcactgccctca

SEQ ID NO: 28082 - DNA, 18 bp, Homo sapiens
ccaggccctgcaggacta

SEQ ID NO: 28083 - DNA, 20 bp, Homo sapiens
cccctttttctctagagaac

SEQ ID NO: 28084 - DNA, 18 bp, Homo sapiens
tctcggccccctctttgc

SEQ ID NO: 28085 - DNA, 22 bp, Homo sapiens
cttatggtggggccgcacaaac

SEQ ID NO: 28086 - DNA, 19 bp, Homo sapiens
cttgcagaggccacccacc

SEQ ID NO: 28087 - DNA, 24 bp, Homo sapiens
tgctgtgctcaggccgatagccac

SEQ ID NO: 28088 - DNA, 19 bp, Homo sapiens
ccaaggtggtctctgttct

SEQ ID NO: 28089 - DNA, 19 bp, Homo sapiens
catttaccagtggggtcca

SEQ ID NO: 28090 - DNA, 23 bp, Homo sapiens
cccttcctctacaggcttctacc

SEQ ID NO: 28091 - DNA, 16 bp, Homo sapiens
cagcccaggactctgg

SEQ ID NO: 28092 - DNA, 22 bp, Homo sapiens
gtctgtatccagctgacaggac

SEQ ID NO: 28093 - DNA, 23 bp, Homo sapiens
ccccatcactcccataggggaac

SEQ ID NO: 28094 - DNA, 17 bp, Homo sapiens
cacagccggtcctggac

SEQ ID NO: 28095 - DNA, 19 bp, Homo sapiens
ccagcacccaggcgtgtac

SEQ ID NO: 28096 - DNA, 23 bp, Homo sapiens
ggttcaggtgctcttgggggtcc

SEQ ID NO: 28097 - DNA, 16 bp, Homo sapiens
ggcctccctagccagc

SEQ ID NO: 28098 - DNA, 24 bp, Homo sapiens
gttcaggagtcagctacctgttgg

SEQ ID NO: 28099 - DNA, 23 bp, Homo sapiens
accagctttgtggctctacatct

SEQ ID NO: 28100 - DNA, 17 bp, Homo sapiens
agttagcctcgtgaagc

SEQ ID NO: 28101 - DNA, 16 bp, Homo sapiens
ctgcagcccagcagct

SEQ ID NO: 28102 - DNA, 16 bp, Homo sapiens
gaaccgggagcagtcc

SEQ ID NO: 28103 - DNA, 17 bp, Homo sapiens
ctgtcgcccaggccacc

SEQ ID NO: 28104 - DNA, 16 bp, Homo sapiens
agccatctcatggtgg

SEQ ID NO: 28105 - DNA, 17 bp, Homo sapiens
ggccctgcttccctgct

SEQ ID NO: 28106 - DNA, 20 bp, Homo sapiens
agcagctctccaggagttcc

SEQ ID NO: 28107 - DNA, 16 bp, Homo sapiens
ctacagcccgcggacc

SEQ ID NO: 28108 - DNA, 16 bp, Homo sapiens
cagcgccactctgagc

SEQ ID NO: 28109 - DNA, 17 bp, Homo sapiens
cagcaccttgtcgaggt

SEQ ID NO: 28110 - DNA, 18 bp, Homo sapiens
gtctggagtgcccagagc

SEQ ID NO: 28111 - DNA, 17 bp, Homo sapiens
ttgctgtgcagcagggg

SEQ ID NO: 28112 - DNA, 24 bp, Homo sapiens
ctacctggctgatgcccgcagggc

SEQ ID NO: 28113 - DNA, 18 bp, Homo sapiens
acagcccccattttgtcc

SEQ ID NO: 28114 - DNA, 24 bp, Homo sapiens
gctgacagcctataagcaagacga

SEQ ID NO: 28115 - DNA, 17 bp, Homo sapiens
cttgtggtgtggacgca

SEQ ID NO: 28116 - DNA, 22 bp, Homo sapiens
cactgcaaagccagaggacttc

SEQ ID NO: 28117 - DNA, 16 bp, Homo sapiens
ccggtggctccatgcc

SEQ ID NO: 28118 - DNA, 16 bp, Homo sapiens
tggggtggggggcagg

SEQ ID NO: 28119 - DNA, 18 bp, Homo sapiens
tacctggttggggagccc

SEQ ID NO: 28120 - DNA, 22 bp, Homo sapiens
gggttcagcatgtttgtgcgtc

SEQ ID NO: 28121 - DNA, 16 bp, Homo sapiens
ctcccagggctgcgtg

SEQ ID NO: 28122 - DNA, 16 bp, Homo sapiens
gaccggccggccctac

SEQ ID NO: 28123 - DNA, 16 bp, Homo sapiens
gtgaggggcctggaga

SEQ ID NO: 28124 - DNA, 20 bp, Homo sapiens
gccgtgcctcctgtgcttac

SEQ ID NO: 28125 - DNA, 17 bp, Homo sapiens
cctgctggcctctgtct

SEQ ID NO: 28126 - DNA, 17 bp, Homo sapiens
ggcagcgccccaaccgc

SEQ ID NO: 28127 - DNA, 16 bp, Homo sapiens
ggggaggtcctgagga

SEQ ID NO: 28128 - DNA, 21 bp, Homo sapiens
ctcagactcaagtctctgtct

SEQ ID NO: 28129 - DNA, 17 bp, Homo sapiens
cgtggcctgctgcccag

SEQ ID NO: 28130 - DNA, 22 bp, Homo sapiens
caagatctcgtccttccttaga

SEQ ID NO: 28131 - DNA, 16 bp, Homo sapiens
ctctgccccacagccc

SEQ ID NO: 28132 - DNA, 16 bp, Homo sapiens
gcaggtcccagccagt

SEQ ID NO: 28133 - DNA, 16 bp, Homo sapiens
cgttgccagcaggctt

SEQ ID NO: 28134 - DNA, 22 bp, Homo sapiens
agcctcatgggagagacatcgc

SEQ ID NO: 28135 - DNA, 16 bp, Homo sapiens
cacctggggctacacc

SEQ ID NO: 28136 - DNA, 16 bp, Homo sapiens
agcaggctgtgtgtgc

SEQ ID NO: 28137 - DNA, 16 bp, Homo sapiens
cactgcacacgtctgc

SEQ ID NO: 28138 - DNA, 20 bp, Homo sapiens
ctgcctgtgacttccagcgc

SEQ ID NO: 28139 - DNA, 17 bp, Homo sapiens
ctgcttcctggaggcgg

SEQ ID NO: 28140 - DNA, 20 bp, Homo sapiens
ccactacagttcctgctggg

SEQ ID NO: 28141 - DNA, 23 bp, Homo sapiens
ttgggtgtgctgggggcctccgt

SEQ ID NO: 28142 - DNA, 16 bp, Homo sapiens
gtcctggtggcaacgc

SEQ ID NO: 28143 - DNA, 18 bp, Homo sapiens
gttgggtgggttcttggc

SEQ ID NO: 28144 - DNA, 23 bp, Homo sapiens
cctctaggatgtgcccagcctgc

SEQ ID NO: 28145 - DNA, 16 bp, Homo sapiens
ggccccgcctgcctga

SEQ ID NO: 28146 - DNA, 16 bp, Homo sapiens
gagccccagtgagtgc

SEQ ID NO: 28147 - DNA, 18 bp, Homo sapiens
gctgagaaacctcatcct

SEQ ID NO: 28148 - DNA, 24 bp, Homo sapiens
gaaacacagaaaaagaacaaagac

SEQ ID NO: 28149 - DNA, 16 bp, Homo sapiens
tcaccaggagggcggc

SEQ ID NO: 28150 - DNA, 24 bp, Homo sapiens
aactctaaattagatttccagatg

SEQ ID NO: 28151 - DNA, 21 bp, Homo sapiens
atctgggcagcgcagagggac

SEQ ID NO: 28152 - DNA, 23 bp, Homo sapiens
cattaccgccgtttggggaggat

SEQ ID NO: 28153 - DNA, 19 bp, Homo sapiens
tgtgacacctcccagtgac

SEQ ID NO: 28154 - DNA, 19 bp, Homo sapiens
tgcacagtcacaacctcgc

SEQ ID NO: 28155 - DNA, 19 bp, Homo sapiens
ctccccagcacgcccagct

SEQ ID NO: 28156 - DNA, 19 bp, Homo sapiens
acgatggacacctttggtc

SEQ ID NO: 28157 - DNA, 19 bp, Homo sapiens
ggtggaagaaagtcagagc

SEQ ID NO: 28158 - DNA, 24 bp, Homo sapiens
gtccttcccctttattaccgatac

SEQ ID NO: 28159 - DNA, 18 bp, Homo sapiens
tgtgctggagaaactgat

SEQ ID NO: 28160 - DNA, 22 bp, Homo sapiens
aaaaaaaaaaagatacagaact

SEQ ID NO: 28161 - DNA, 19 bp, Homo sapiens
acaataaacaacacaaggc

SEQ ID NO: 28162 - DNA, 17 bp, Homo sapiens
cagcactgacctgtgga

SEQ ID NO: 28163 - DNA, 23 bp, Homo sapiens
gtggatttaatgtgactaacagt

SEQ ID NO: 28164 - DNA, 22 bp, Homo sapiens
gtcctgaaactctttgatcagt

SEQ ID NO: 28165 - DNA, 19 bp, Homo sapiens
aatgtgtgatgccatcaac

SEQ ID NO: 28166 - DNA, 22 bp, Homo sapiens
tcggctcttaagggcttcagtt

SEQ ID NO: 28167 - DNA, 18 bp, Homo sapiens
tgaggacaaggaaggagg

SEQ ID NO: 28168 - DNA, 23 bp, Homo sapiens
ggtcgttgatgcagatggtaggg

SEQ ID NO: 28169 - DNA, 22 bp, Homo sapiens
cactcatgggagaaacatttta

SEQ ID NO: 28170 - DNA, 20 bp, Homo sapiens
ctccaaaactacaagactca

SEQ ID NO: 28171 - DNA, 23 bp, Homo sapiens
gcccaacgatatttattacagtg

SEQ ID NO: 28172 - DNA, 21 bp, Homo sapiens
gcatgcataaaccgtctttat

SEQ ID NO: 28173 - DNA, 21 bp, Homo sapiens
cctgtgacggcttaattaatg

SEQ ID NO: 28174 - DNA, 24 bp, Homo sapiens
ggtttttgaaacttaccaataagt

SEQ ID NO: 28175 - DNA, 19 bp, Homo sapiens
accttggtttctgcttatc

SEQ ID NO: 28176 - DNA, 23 bp, Homo sapiens
tccgccgatcttcatgaggtcac

SEQ ID NO: 28177 - DNA, 21 bp, Homo sapiens
cggattgtcccaaagaagtga

SEQ ID NO: 28178 - DNA, 22 bp, Homo sapiens
tctgaaaactccgagagcactt

SEQ ID NO: 28179 - DNA, 17 bp, Homo sapiens
ccgtttgtccagcatct

SEQ ID NO: 28180 - DNA, 23 bp, Homo sapiens
gccaccaattatgcaagcacatg

SEQ ID NO: 28181 - DNA, 22 bp, Homo sapiens
gtgggatgtgctctttctactc

SEQ ID NO: 28182 - DNA, 24 bp, Homo sapiens
cagggacatagaaggagactgaac

SEQ ID NO: 28183 - DNA, 17 bp, Homo sapiens
catgtttcccactgtgg

SEQ ID NO: 28184 - DNA, 20 bp, Homo sapiens
cagccacggacatcagatgc

SEQ ID NO: 28185 - DNA, 22 bp, Homo sapiens
cagatttatttgagtgtgtggc

SEQ ID NO: 28186 - DNA, 19 bp, Homo sapiens
gtggaatggagatgagcag

SEQ ID NO: 28187 - DNA, 24 bp, Homo sapiens
gcttttcttttattaagcccagaa

SEQ ID NO: 28188 - DNA, 23 bp, Homo sapiens
cctcttcctccattccaggcggt

SEQ ID NO: 28189 - DNA, 23 bp, Homo sapiens
cggcaggctgatgtttcagacac

SEQ ID NO: 28190 - DNA, 24 bp, Homo sapiens
gatcagcacacacattcaatgggc

SEQ ID NO: 28191 - DNA, 16 bp, Homo sapiens
tgagccattggtgccg

SEQ ID NO: 28192 - DNA, 24 bp, Homo sapiens
acagcaatgatcacaaaagatgac

SEQ ID NO: 28193 - DNA, 18 bp, Homo sapiens
aagttggcccttccatgg

SEQ ID NO: 28194 - DNA, 24 bp, Homo sapiens
atcactattaagcccatttcctgc

SEQ ID NO: 28195 - DNA, 16 bp, Homo sapiens
cacaacgatgcgtctc

SEQ ID NO: 28196 - DNA, 20 bp, Homo sapiens
ttccaccttgctaataggtc

SEQ ID NO: 28197 - DNA, 18 bp, Homo sapiens
tcgccaaaatctgcagac

SEQ ID NO: 28198 - DNA, 20 bp, Homo sapiens
cccgtctattggtaagagag

SEQ ID NO: 28199 - DNA, 20 bp, Homo sapiens
tgtatacctgtggtgaccaa

SEQ ID NO: 28200 - DNA, 21 bp, Homo sapiens
cctgctcacaccttacccatc

SEQ ID NO: 28201 - DNA, 16 bp, Homo sapiens
gccagctctctcttag

SEQ ID NO: 28202 - DNA, 24 bp, Homo sapiens
caaaattactttccccaactgctt

SEQ ID NO: 28203 - DNA, 20 bp, Homo sapiens
gggatcctcttatgcagtgg

SEQ ID NO: 28204 - DNA, 19 bp, Homo sapiens
agaaggcctccatgttggt

SEQ ID NO: 28205 - DNA, 23 bp, Homo sapiens
gctaccatgatctaatgtaatgc

SEQ ID NO: 28206 - DNA, 20 bp, Homo sapiens
tcagacacgtaggatgaaac

SEQ ID NO: 28207 - DNA, 20 bp, Homo sapiens
ttggtcatgaattaggaagt

SEQ ID NO: 28208 - DNA, 18 bp, Homo sapiens
catgtttcccaagccact

SEQ ID NO: 28209 - DNA, 23 bp, Homo sapiens
agtatatgattatcatattgtct

SEQ ID NO: 28210 - DNA, 21 bp, Homo sapiens
tcctctttacttgctgtcagc

SEQ ID NO: 28211 - DNA, 22 bp, Homo sapiens
tttccaaacccgaagtcaaaac

SEQ ID NO: 28212 - DNA, 23 bp, Homo sapiens
ccttagagagattctgacaaccc

SEQ ID NO: 28213 - DNA, 16 bp, Homo sapiens
taaagcaacgggtcgc

SEQ ID NO: 28214 - DNA, 23 bp, Homo sapiens
gtgcaaactccagaagattttaa

SEQ ID NO: 28215 - DNA, 16 bp, Homo sapiens
tcacctccgcagctga

SEQ ID NO: 28216 - DNA, 18 bp, Homo sapiens
agtgctatctttcccctt

SEQ ID NO: 28217 - DNA, 24 bp, Homo sapiens
tttcatgtcacagctgaggccaag

SEQ ID NO: 28218 - DNA, 25 bp, Homo sapiens
aatttaaaaaaaaaaagaaaaagaa

SEQ ID NO: 28219 - DNA, 21 bp, Homo sapiens
aaaattgcttgacttgagcaa

SEQ ID NO: 28220 - DNA, 18 bp, Homo sapiens
gcccaggagttcaagacc

SEQ ID NO: 28221 - DNA, 19 bp, Homo sapiens
gctgttctttgccaggtac

SEQ ID NO: 28222 - DNA, 24 bp, Homo sapiens
cagcaaaagctcccagccaatagt

SEQ ID NO: 28223 - DNA, 22 bp, Homo sapiens
acctggagaatgaggacaagga

SEQ ID NO: 28224 - DNA, 24 bp, Homo sapiens
ttaagcgtgtacctttaaaagaca

SEQ ID NO: 28225 - DNA, 18 bp, Homo sapiens
ctgcaggtaccaggaagg

SEQ ID NO: 28226 - DNA, 24 bp, Homo sapiens
aaagatcaccaaatccatgctgcc

SEQ ID NO: 28227 - DNA, 21 bp, Homo sapiens
gaacttggttttctccaaggc

SEQ ID NO: 28228 - DNA, 24 bp, Homo sapiens
caaaaggcacatgcacaatcatcc

SEQ ID NO: 28229 - DNA, 18 bp, Homo sapiens
atccttcacctttggtgg

SEQ ID NO: 28230 - DNA, 17 bp, Homo sapiens
ctgagccggacggggcc

SEQ ID NO: 28231 - DNA, 19 bp, Homo sapiens
ctgtaccagaagttcatgg

SEQ ID NO: 28232 - DNA, 20 bp, Homo sapiens
cttcacctcgctctggtcag

SEQ ID NO: 28233 - DNA, 22 bp, Homo sapiens
agacccgtggacggacaactgt

SEQ ID NO: 28234 - DNA, 21 bp, Homo sapiens
ccttgcttgtcacctgaaagc

SEQ ID NO: 28235 - DNA, 20 bp, Homo sapiens
gactgtgtggacattgacag

SEQ ID NO: 28236 - DNA, 24 bp, Homo sapiens
cttccctccctgagaaagataggc

SEQ ID NO: 28237 - DNA, 17 bp, Homo sapiens
ctccgactcccaggaag

SEQ ID NO: 28238 - DNA, 20 bp, Homo sapiens
agcaatgaccaacagcagac

SEQ ID NO: 28239 - DNA, 19 bp, Homo sapiens
aaagagaagggaggagagt

SEQ ID NO: 28240 - DNA, 23 bp, Homo sapiens
cagcaggtggtagagaatataac

SEQ ID NO: 28241 - DNA, 21 bp, Homo sapiens
cattccagaccttccctacga

SEQ ID NO: 28242 - DNA, 16 bp, Homo sapiens
ccggccgagggcttcc

SEQ ID NO: 28243 - DNA, 20 bp, Homo sapiens
tgtctggaacttgagaacag

SEQ ID NO: 28244 - DNA, 22 bp, Homo sapiens
ctttcccgtgaggttgactctc

SEQ ID NO: 28245 - DNA, 16 bp, Homo sapiens
gtgacaggggaggggg

SEQ ID NO: 28246 - DNA, 24 bp, Homo sapiens
actctccaaactgctgctataatc

SEQ ID NO: 28247 - DNA, 17 bp, Homo sapiens
gctcttggtgaagaacc

SEQ ID NO: 28248 - DNA, 22 bp, Homo sapiens
aaacttgactgactcaatggtg

SEQ ID NO: 28249 - DNA, 23 bp, Homo sapiens
cttctcttgagattaagcctgag

SEQ ID NO: 28250 - DNA, 23 bp, Homo sapiens
ggaggtgataatgctcaacgggg

SEQ ID NO: 28251 - DNA, 21 bp, Homo sapiens
gaaggaagttaaggatcaggt

SEQ ID NO: 28252 - DNA, 20 bp, Homo sapiens
cactgcctctcctttgtttg

SEQ ID NO: 28253 - DNA, 20 bp, Homo sapiens
aattttctgtctctctctcc

SEQ ID NO: 28254 - DNA, 21 bp, Homo sapiens
ccaacatgctccataccgtcc

SEQ ID NO: 28255 - DNA, 20 bp, Homo sapiens
agagagggtgatgagattct

SEQ ID NO: 28256 - DNA, 21 bp, Homo sapiens
tctaggatctgggcttgcttg

SEQ ID NO: 28257 - DNA, 16 bp, Homo sapiens
gggatgcaggtgggag

SEQ ID NO: 28258 - DNA, 21 bp, Homo sapiens
tggataatggactggtacccc

SEQ ID NO: 28259 - DNA, 22 bp, Homo sapiens
ggtctatgctgctcaggctggt

SEQ ID NO: 28260 - DNA, 19 bp, Homo sapiens
caagtgtggacaacttcag

SEQ ID NO: 28261 - DNA, 22 bp, Homo sapiens
ccttccaaagtgctgggattac

SEQ ID NO: 28262 - DNA, 18 bp, Homo sapiens
ctgttgtttgccattagc

SEQ ID NO: 28263 - DNA, 20 bp, Homo sapiens
acttacacacaatcttttgg

SEQ ID NO: 28264 - DNA, 17 bp, Homo sapiens
acctgtcttttcccacc

SEQ ID NO: 28265 - DNA, 18 bp, Homo sapiens
gagacggatgctctgtgc

SEQ ID NO: 28266 - DNA, 24 bp, Homo sapiens
cagatggtgttcggggtggtcacc

SEQ ID NO: 28267 - DNA, 24 bp, Homo sapiens
gttaccaatcacgcgtgtgtttag

SEQ ID NO: 28268 - DNA, 16 bp, Homo sapiens
actgcctcgttctccc

SEQ ID NO: 28269 - DNA, 23 bp, Homo sapiens
cgggcccgctccgcaccgcccag

SEQ ID NO: 28270 - DNA, 17 bp, Homo sapiens
aggccctcaggagcctc

SEQ ID NO: 28271 - DNA, 24 bp, Homo sapiens
ccacgaagttcagcaagtcaatgg

SEQ ID NO: 28272 - DNA, 24 bp, Homo sapiens
aaaaaaaaggaacacagccttcgc

SEQ ID NO: 28273 - DNA, 24 bp, Homo sapiens
gacttcccggtgctgtggtctgag

SEQ ID NO: 28274 - DNA, 17 bp, Homo sapiens
ggtgcacgagcagatcc

SEQ ID NO: 28275 - DNA, 19 bp, Homo sapiens
gggtgtcactgaaggtcgg

SEQ ID NO: 28276 - DNA, 17 bp, Homo sapiens
ctcacggacacgctggg

SEQ ID NO: 28277 - DNA, 20 bp, Homo sapiens
ctgctgcccatggcagaggc

SEQ ID NO: 28278 - DNA, 16 bp, Homo sapiens
agaaaactcgtggggc

SEQ ID NO: 28279 - DNA, 17 bp, Homo sapiens
cagggccccactcacac

SEQ ID NO: 28280 - DNA, 16 bp, Homo sapiens
gctgccactgcctccc

SEQ ID NO: 28281 - DNA, 19 bp, Homo sapiens
aggatgtgcgagagcctgc

SEQ ID NO: 28282 - DNA, 24 bp, Homo sapiens
tgtttgagctgcctgtaggtgacc

SEQ ID NO: 28283 - DNA, 17 bp, Homo sapiens
gcttgccgggaaggtgc

SEQ ID NO: 28284 - DNA, 21 bp, Homo sapiens
cctgtttgagctgcgtgtagg

SEQ ID NO: 28285 - DNA, 23 bp, Homo sapiens
catctgtttgagctgcctgtagg

SEQ ID NO: 28286 - DNA, 16 bp, Homo sapiens
cagctgagcgtgtgcc

SEQ ID NO: 28287 - DNA, 16 bp, Homo sapiens
ggtctgacggctgcac

SEQ ID NO: 28288 - DNA, 16 bp, Homo sapiens
cgtgtaggctcgtggc

SEQ ID NO: 28289 - DNA, 20 bp, Homo sapiens
tcaccattcccaggattacc

SEQ ID NO: 28290 - DNA, 16 bp, Homo sapiens
gtggatgaggcggggt

SEQ ID NO: 28291 - DNA, 19 bp, Homo sapiens
gaacgtctgtatgaggcgg

SEQ ID NO: 28292 - DNA, 17 bp, Homo sapiens
cgaccatcacctgtggg

SEQ ID NO: 28293 - DNA, 17 bp, Homo sapiens
ctgtccagtgacactga

SEQ ID NO: 28294 - DNA, 17 bp, Homo sapiens
ctcaggtggtggcacct

SEQ ID NO: 28295 - DNA, 19 bp, Homo sapiens
gagcaggggctgagactga

SEQ ID NO: 28296 - DNA, 16 bp, Homo sapiens
gggggtgcgagagcgt

SEQ ID NO: 28297 - DNA, 19 bp, Homo sapiens
gaggatctcgatggtgtgc

SEQ ID NO: 28298 - DNA, 16 bp, Homo sapiens
gccctgcccagtgtga

SEQ ID NO: 28299 - DNA, 23 bp, Homo sapiens
ggctgacaggcccagctcctgaa

SEQ ID NO: 28300 - DNA, 20 bp, Homo sapiens
cacagggaccgctctcctgc

SEQ ID NO: 28301 - DNA, 21 bp, Homo sapiens
agaagggctttctgaaggagg

SEQ ID NO: 28302 - DNA, 17 bp, Homo sapiens
ctgcctgtcacactggg

SEQ ID NO: 28303 - DNA, 17 bp, Homo sapiens
gggactcggtgactccc

SEQ ID NO: 28304 - DNA, 17 bp, Homo sapiens
tgggcagggccagcaca

SEQ ID NO: 28305 - DNA, 16 bp, Homo sapiens
gggctgggcaggcagt

SEQ ID NO: 28306 - DNA, 21 bp, Homo sapiens
ttcttctccgtgaggtcctcc

SEQ ID NO: 28307 - DNA, 17 bp, Homo sapiens
cccctggggcttccagc

SEQ ID NO: 28308 - DNA, 16 bp, Homo sapiens
ccgactcagtgcggaa

SEQ ID NO: 28309 - DNA, 17 bp, Homo sapiens
gtgctcacagggccccg

SEQ ID NO: 28310 - DNA, 16 bp, Homo sapiens
cggtggccgtgaaggc

SEQ ID NO: 28311 - DNA, 17 bp, Homo sapiens
gaggcgtgagaggcatc

SEQ ID NO: 28312 - DNA, 16 bp, Homo sapiens
accctggcgcgtctga

SEQ ID NO: 28313 - DNA, 22 bp, Homo sapiens
aagccgtgtcttacatgtagtt

SEQ ID NO: 28314 - DNA, 19 bp, Homo sapiens
gacatgctcccatgcgtgc

SEQ ID NO: 28315 - DNA, 17 bp, Homo sapiens
ccctcctgcagctcctg

SEQ ID NO: 28316 - DNA, 16 bp, Homo sapiens
cctcccagcccctctc

SEQ ID NO: 28317 - DNA, 16 bp, Homo sapiens
ctgatcgcgcaagagg

SEQ ID NO: 28318 - DNA, 20 bp, Homo sapiens
acactcctcagaactgctgt

SEQ ID NO: 28319 - DNA, 19 bp, Homo sapiens
cctgctcaggtggtggaca

SEQ ID NO: 28320 - DNA, 16 bp, Homo sapiens
atccccagtgccccct

SEQ ID NO: 28321 - DNA, 16 bp, Homo sapiens
tcaccctcttggtcac

SEQ ID NO: 28322 - DNA, 20 bp, Homo sapiens
ccactcaccgcacagcagcc

SEQ ID NO: 28323 - DNA, 16 bp, Homo sapiens
gaggctggggtgagac

SEQ ID NO: 28324 - DNA, 19 bp, Homo sapiens
ttgctcttgaaccacttgt

SEQ ID NO: 28325 - DNA, 24 bp, Homo sapiens
cccccagtctactttgtctcgacc

SEQ ID NO: 28326 - DNA, 17 bp, Homo sapiens
gaggtggaagggatcgg

SEQ ID NO: 28327 - DNA, 24 bp, Homo sapiens
cccttctgtttcagtggagaagct

SEQ ID NO: 28328 - DNA, 16 bp, Homo sapiens
tcccgaagggtccatc

SEQ ID NO: 28329 - DNA, 16 bp, Homo sapiens
ttacaggctgcaccgg

SEQ ID NO: 28330 - DNA, 16 bp, Homo sapiens
cggggcttttgctggc

SEQ ID NO: 28331 - DNA, 18 bp, Homo sapiens
gtggggatgaagtcgtag

SEQ ID NO: 28332 - DNA, 23 bp, Homo sapiens
tcattaacaggcagttgttaacg

SEQ ID NO: 28333 - DNA, 17 bp, Homo sapiens
ttcagctcctccggctc

SEQ ID NO: 28334 - DNA, 24 bp, Homo sapiens
gttcttgggtttctcatcctgcct

SEQ ID NO: 28335 - DNA, 24 bp, Homo sapiens
aaggagaagtgtcctggatgcagg

SEQ ID NO: 28336 - DNA, 24 bp, Homo sapiens
acccttgtcttcccaaacacctcc

SEQ ID NO: 28337 - DNA, 23 bp, Homo sapiens
tggtggcttcagtgggcacgggc

SEQ ID NO: 28338 - DNA, 20 bp, Homo sapiens
gaccgtgaggaatgacagct

SEQ ID NO: 28339 - DNA, 16 bp, Homo sapiens
gctggccaggcaggga

SEQ ID NO: 28340 - DNA, 18 bp, Homo sapiens
gcccggccacaccactca

SEQ ID NO: 28341 - DNA, 24 bp, Homo sapiens
gaactttttggttacccaccgtgg

SEQ ID NO: 28342 - DNA, 19 bp, Homo sapiens
caatgcccgtgatggtgcc

SEQ ID NO: 28343 - DNA, 22 bp, Homo sapiens
gctttcacagaccaagggcagc

SEQ ID NO: 28344 - DNA, 20 bp, Homo sapiens
tgatgagatcctgcagcagt

SEQ ID NO: 28345 - DNA, 23 bp, Homo sapiens
aaaagcatttcacagagggaaca

SEQ ID NO: 28346 - DNA, 21 bp, Homo sapiens
gctctctttctatgcagtacc

SEQ ID NO: 28347 - DNA, 22 bp, Homo sapiens
gagagggcaagagatgtgtaca

SEQ ID NO: 28348 - DNA, 22 bp, Homo sapiens
cctaggagggtctcggtcaggg

SEQ ID NO: 28349 - DNA, 16 bp, Homo sapiens
gcaccatcacactgct

SEQ ID NO: 28350 - DNA, 19 bp, Homo sapiens
aattctcacatcctagacc

SEQ ID NO: 28351 - DNA, 21 bp, Homo sapiens
ccagggggttgctggcgttgc

SEQ ID NO: 28352 - DNA, 18 bp, Homo sapiens
atgccaggttcgactccc

SEQ ID NO: 28353 - DNA, 24 bp, Homo sapiens
ctgacacctcagtcacccccacat

SEQ ID NO: 28354 - DNA, 24 bp, Homo sapiens
tttccctcctgcaggtggacgtgc

SEQ ID NO: 28355 - DNA, 16 bp, Homo sapiens
aggtgcctcacctggt

SEQ ID NO: 28356 - DNA, 22 bp, Homo sapiens
gtcatagggcaggggatgaggg

SEQ ID NO: 28357 - DNA, 16 bp, Homo sapiens
acccccacgtgtgact

SEQ ID NO: 28358 - DNA, 22 bp, Homo sapiens
catcatcgtgatgccagagaag

SEQ ID NO: 28359 - DNA, 17 bp, Homo sapiens
ctcagcccccagtgccc

SEQ ID NO: 28360 - DNA, 16 bp, Homo sapiens
gtgtgccctcagggat

SEQ ID NO: 28361 - DNA, 24 bp, Homo sapiens
cttccgcctggcccaggcaccctc

SEQ ID NO: 28362 - DNA, 16 bp, Homo sapiens
tgtcccaggcaggggc

SEQ ID NO: 28363 - DNA, 19 bp, Homo sapiens
ccttctcggagctcatctt

SEQ ID NO: 28364 - DNA, 24 bp, Homo sapiens
gcaattttggaatcccacagaacc

SEQ ID NO: 28365 - DNA, 17 bp, Homo sapiens
ccagggccagcccgatc

SEQ ID NO: 28366 - DNA, 17 bp, Homo sapiens
gcagcgggtgcaagatg

SEQ ID NO: 28367 - DNA, 20 bp, Homo sapiens
ttgaggatgctgagcgcgac

SEQ ID NO: 28368 - DNA, 17 bp, Homo sapiens
tgcagctcagccatccc

SEQ ID NO: 28369 - DNA, 18 bp, Homo sapiens
gtgtgagttcttcaacgc

SEQ ID NO: 28370 - DNA, 16 bp, Homo sapiens
ggccaccccctctggg

SEQ ID NO: 28371 - DNA, 16 bp, Homo sapiens
ggggggtggtcagggg

SEQ ID NO: 28372 - DNA, 24 bp, Homo sapiens
gataatcgtgtccccgggcttcag

SEQ ID NO: 28373 - DNA, 18 bp, Homo sapiens
agacccccaagcccgtcc

SEQ ID NO: 28374 - DNA, 23 bp, Homo sapiens
ctgatgcggtccttcacgctccc

SEQ ID NO: 28375 - DNA, 22 bp, Homo sapiens
ttcgtatttcagatgaccaagg

SEQ ID NO: 28376 - DNA, 21 bp, Homo sapiens
gacattagagcatctcaggat

SEQ ID NO: 28377 - DNA, 16 bp, Homo sapiens
gagaaagctgtgggtg

SEQ ID NO: 28378 - DNA, 17 bp, Homo sapiens
ctcgaactccaccccct

SEQ ID NO: 28379 - DNA, 19 bp, Homo sapiens
tggagggaattcctaaggg

SEQ ID NO: 28380 - DNA, 24 bp, Homo sapiens
ccttcctgcctccctccgaactca

SEQ ID NO: 28381 - DNA, 21 bp, Homo sapiens
agattgggaagaagttcggcc

SEQ ID NO: 28382 - DNA, 23 bp, Homo sapiens
attaaccagcgagttttctgatc

SEQ ID NO: 28383 - DNA, 23 bp, Homo sapiens
tccaaaaatcttgccagatattc

SEQ ID NO: 28384 - DNA, 16 bp, Homo sapiens
gaccccccaggcccac

SEQ ID NO: 28385 - DNA, 24 bp, Homo sapiens
tggtactattttttttttttttcc

SEQ ID NO: 28386 - DNA, 24 bp, Homo sapiens
agccagggcactcacagagctcac

SEQ ID NO: 28387 - DNA, 16 bp, Homo sapiens
ccagttcttcgagtgt

SEQ ID NO: 28388 - DNA, 22 bp, Homo sapiens
ccataggggtgtccccgatttt

SEQ ID NO: 28389 - DNA, 21 bp, Homo sapiens
tgtacagatttgtgtaaccac

SEQ ID NO: 28390 - DNA, 16 bp, Homo sapiens
gagtccccacatcacc

SEQ ID NO: 28391 - DNA, 23 bp, Homo sapiens
ccagctcctcaatccagagtgac

SEQ ID NO: 28392 - DNA, 18 bp, Homo sapiens
agcccctgtggatccggc

SEQ ID NO: 28393 - DNA, 24 bp, Homo sapiens
tgtggtgtccaggtaacaaactcc

SEQ ID NO: 28394 - DNA, 16 bp, Homo sapiens
gggccacactcggcga

SEQ ID NO: 28395 - DNA, 17 bp, Homo sapiens
ttacggggcagtgtggt

SEQ ID NO: 28396 - DNA, 18 bp, Homo sapiens
agcatgccttctgagacc

SEQ ID NO: 28397 - DNA, 23 bp, Homo sapiens
ccaggtgcacctgctcggagcat

SEQ ID NO: 28398 - DNA, 18 bp, Homo sapiens
ctggaaccccacagcatc

SEQ ID NO: 28399 - DNA, 17 bp, Homo sapiens
gaccccttctccaggct

SEQ ID NO: 28400 - DNA, 19 bp, Homo sapiens
gggcttctctgagggagca

SEQ ID NO: 28401 - DNA, 16 bp, Homo sapiens
ccccacttctgcctgg

SEQ ID NO: 28402 - DNA, 19 bp, Homo sapiens
ctggagagccgtcgtggtg

SEQ ID NO: 28403 - DNA, 24 bp, Homo sapiens
cctgcagcctggtttgccctcaca

SEQ ID NO: 28404 - DNA, 20 bp, Homo sapiens
cacctttcctgtctcggttg

SEQ ID NO: 28405 - DNA, 24 bp, Homo sapiens
gattaggggttgtgcgtttccatg

SEQ ID NO: 28406 - DNA, 18 bp, Homo sapiens
gtggccgagtggcgtgtc

SEQ ID NO: 28407 - DNA, 17 bp, Homo sapiens
gtcactgggccatttgc

SEQ ID NO: 28408 - DNA, 23 bp, Homo sapiens
gcccaggggttagtttccccact

SEQ ID NO: 28409 - DNA, 16 bp, Homo sapiens
gggctcctggccacct

SEQ ID NO: 28410 - DNA, 18 bp, Homo sapiens
ctgcaggccactcacctc

SEQ ID NO: 28411 - DNA, 16 bp, Homo sapiens
gcaaggctgcagggtg

SEQ ID NO: 28412 - DNA, 19 bp, Homo sapiens
caccccacaggcttctcac

SEQ ID NO: 28413 - DNA, 17 bp, Homo sapiens
agtgctcctgctgcagg

SEQ ID NO: 28414 - DNA, 24 bp, Homo sapiens
ccagtgccccctccccctgcaggc

SEQ ID NO: 28415 - DNA, 24 bp, Homo sapiens
gccactctgctcacacctccttcc

SEQ ID NO: 28416 - DNA, 17 bp, Homo sapiens
gtgtcccaggatgcacc

SEQ ID NO: 28417 - DNA, 24 bp, Homo sapiens
tttgtgaaggccgtgggcacgagg

SEQ ID NO: 28418 - DNA, 17 bp, Homo sapiens
ggtgcccgtgttgaggc

SEQ ID NO: 28419 - DNA, 16 bp, Homo sapiens
caatgcgtttgggtta

SEQ ID NO: 28420 - DNA, 20 bp, Homo sapiens
cacatcgtaggatggctgca

SEQ ID NO: 28421 - DNA, 18 bp, Homo sapiens
taaggattacccgccagc

SEQ ID NO: 28422 - DNA, 16 bp, Homo sapiens
gaggtgcctcctggag

SEQ ID NO: 28423 - DNA, 16 bp, Homo sapiens
ctgctgttcacagcct

SEQ ID NO: 28424 - DNA, 23 bp, Homo sapiens
ggcaaagccagcaagggccaggc

SEQ ID NO: 28425 - DNA, 18 bp, Homo sapiens
caacccgcgctttttttc

SEQ ID NO: 28426 - DNA, 24 bp, Homo sapiens
taaaatacaactcacttttatggc

SEQ ID NO: 28427 - DNA, 16 bp, Homo sapiens
ccccccagccctggcc

SEQ ID NO: 28428 - DNA, 24 bp, Homo sapiens
catgatgctgaatgacagatatcc

SEQ ID NO: 28429 - DNA, 21 bp, Homo sapiens
gaggtttcagcaggagtcatg

SEQ ID NO: 28430 - DNA, 18 bp, Homo sapiens
ggcaatcaggacctccac

SEQ ID NO: 28431 - DNA, 19 bp, Homo sapiens
agagtgtcccagcaagtgt

SEQ ID NO: 28432 - DNA, 19 bp, Homo sapiens
ctcattgtgcaggccctgc

SEQ ID NO: 28433 - DNA, 23 bp, Homo sapiens
atctttcctttttcttttctctt

SEQ ID NO: 28434 - DNA, 19 bp, Homo sapiens
caccaagggagggctaggc

SEQ ID NO: 28435 - DNA, 18 bp, Homo sapiens
ggtcactggtgggagggc

SEQ ID NO: 28436 - DNA, 19 bp, Homo sapiens
gggctgaggggttcaccca

SEQ ID NO: 28437 - DNA, 23 bp, Homo sapiens
cctttgggcactgcaccatcccc

SEQ ID NO: 28438 - DNA, 23 bp, Homo sapiens
caatggcacttggaaagcactaa

SEQ ID NO: 28439 - DNA, 22 bp, Homo sapiens
cacacctctcagtgacgttctt

SEQ ID NO: 28440 - DNA, 18 bp, Homo sapiens
ggaccctctgtggtgact

SEQ ID NO: 28441 - DNA, 19 bp, Homo sapiens
atctctgccgtcctcgggg

SEQ ID NO: 28442 - DNA, 24 bp, Homo sapiens
ggcccagccacgcaggatctgagc

SEQ ID NO: 28443 - DNA, 22 bp, Homo sapiens
ggtgtctccacttccttatgag

SEQ ID NO: 28444 - DNA, 24 bp, Homo sapiens
ctcacggccactaggatccaaaag

SEQ ID NO: 28445 - DNA, 17 bp, Homo sapiens
ccctgctcctgggggtc

SEQ ID NO: 28446 - DNA, 24 bp, Homo sapiens
tcatccacgttcagggcaatgatc

SEQ ID NO: 28447 - DNA, 17 bp, Homo sapiens
gaggctgggggtccatc

SEQ ID NO: 28448 - DNA, 20 bp, Homo sapiens
gctcgggtcctgaaatctta

SEQ ID NO: 28449 - DNA, 19 bp, Homo sapiens
cacagatgaggcgcacgcc

SEQ ID NO: 28450 - DNA, 21 bp, Homo sapiens
tttcttcgtagggctccatgt

SEQ ID NO: 28451 - DNA, 24 bp, Homo sapiens
cggaatcgaaacgtgacgtttaat

SEQ ID NO: 28452 - DNA, 17 bp, Homo sapiens
gatgccagcggcagtgc

SEQ ID NO: 28453 - DNA, 24 bp, Homo sapiens
gagaaagaagggaagttttcttac

SEQ ID NO: 28454 - DNA, 16 bp, Homo sapiens
gcctccaaggcggtct

SEQ ID NO: 28455 - DNA, 21 bp, Homo sapiens
cagaatgttggcgctgtcaga

SEQ ID NO: 28456 - DNA, 16 bp, Homo sapiens
ggggtttctgagaccc

SEQ ID NO: 28457 - DNA, 16 bp, Homo sapiens
cggccacggtgatcat

SEQ ID NO: 28458 - DNA, 21 bp, Homo sapiens
cccagatcggccctccgaggg

SEQ ID NO: 28459 - DNA, 22 bp, Homo sapiens
ctgaagcgtgtgtgccccttgg

SEQ ID NO: 28460 - DNA, 24 bp, Homo sapiens
ctgcaccccctgccctgcggggtc

SEQ ID NO: 28461 - DNA, 21 bp, Homo sapiens
gtgaggtggtccggtggacgc

SEQ ID NO: 28462 - DNA, 24 bp, Homo sapiens
gtcctcctcgctggaccgtgcagc

SEQ ID NO: 28463 - DNA, 24 bp, Homo sapiens
cctcacagctggccctggatggga

SEQ ID NO: 28464 - DNA, 24 bp, Homo sapiens
caggatgaggttgaagttgatctg

SEQ ID NO: 28465 - DNA, 19 bp, Homo sapiens
tcctgaacccatcagcaat

SEQ ID NO: 28466 - DNA, 24 bp, Homo sapiens
tgcataaatctctcaactttagtc

SEQ ID NO: 28467 - DNA, 22 bp, Homo sapiens
tgtttgtttccacgtttgctgt

SEQ ID NO: 28468 - DNA, 21 bp, Homo sapiens
agctcaacaaacatttgctga

SEQ ID NO: 28469 - DNA, 19 bp, Homo sapiens
ttcaaagaaggaaaacccc

SEQ ID NO: 28470 - DNA, 19 bp, Homo sapiens
gaagctcgtgtgaactcac

SEQ ID NO: 28471 - DNA, 24 bp, Homo sapiens
tcaggataatttttagtgaatggc

SEQ ID NO: 28472 - DNA, 23 bp, Homo sapiens
aaaccaaattaaacacgtagtgg

SEQ ID NO: 28473 - DNA, 17 bp, Homo sapiens
cgcacagaggggagagc

SEQ ID NO: 28474 - DNA, 24 bp, Homo sapiens
gctttactgtctggggggcaacct

SEQ ID NO: 28475 - DNA, 23 bp, Homo sapiens
ctcatgggattccggtttcattc

SEQ ID NO: 28476 - DNA, 17 bp, Homo sapiens
cacaagcacacatgggc

SEQ ID NO: 28477 - DNA, 23 bp, Homo sapiens
ccttctggaagcgcaaatgttag

SEQ ID NO: 28478 - DNA, 20 bp, Homo sapiens
ggctgcctgcaagctagact

SEQ ID NO: 28479 - DNA, 17 bp, Homo sapiens
ccactgtgttgcatgga

SEQ ID NO: 28480 - DNA, 17 bp, Homo sapiens
caattgccgaggggatg

SEQ ID NO: 28481 - DNA, 24 bp, Homo sapiens
atggattacttgcgctgtgctgca

SEQ ID NO: 28482 - DNA, 21 bp, Homo sapiens
ccatgagccactgtgcccggc

SEQ ID NO: 28483 - DNA, 16 bp, Homo sapiens
gtgacctcggggtttt

SEQ ID NO: 28484 - DNA, 23 bp, Homo sapiens
tgcacatctcagaacaaagaaac

SEQ ID NO: 28485 - DNA, 16 bp, Homo sapiens
cctggggacggggcgc

SEQ ID NO: 28486 - DNA, 22 bp, Homo sapiens
gtggaggaagctgcttacagag

SEQ ID NO: 28487 - DNA, 18 bp, Homo sapiens
gggacgtgggtgagtcac

SEQ ID NO: 28488 - DNA, 20 bp, Homo sapiens
aacacgttccccaggtacag

SEQ ID NO: 28489 - DNA, 18 bp, Homo sapiens
tgtcctacaggaggagtc

SEQ ID NO: 28490 - DNA, 21 bp, Homo sapiens
ccacaagacgtgggtcttctc

SEQ ID NO: 28491 - DNA, 24 bp, Homo sapiens
gagttctgcagcagcagggttagt

SEQ ID NO: 28492 - DNA, 24 bp, Homo sapiens
tgccccagacgcgaagccgagcga

SEQ ID NO: 28493 - DNA, 20 bp, Homo sapiens
cagtccgtcaccagagggac

SEQ ID NO: 28494 - DNA, 17 bp, Homo sapiens
gcctatgaccggatgcc

SEQ ID NO: 28495 - DNA, 18 bp, Homo sapiens
ctactcacccccatcagc

SEQ ID NO: 28496 - DNA, 20 bp, Homo sapiens
gtacattcagcacagctgtg

SEQ ID NO: 28497 - DNA, 22 bp, Homo sapiens
cagtctcttcgacagctgcagg

SEQ ID NO: 28498 - DNA, 17 bp, Homo sapiens
ctcagagtggccaaagc

SEQ ID NO: 28499 - DNA, 16 bp, Homo sapiens
cgctccagcgtgggca

SEQ ID NO: 28500 - DNA, 24 bp, Homo sapiens
gcacttcagtatgaacaatatttc

SEQ ID NO: 28501 - DNA, 17 bp, Homo sapiens
cagcttgctgccattgc

SEQ ID NO: 28502 - DNA, 23 bp, Homo sapiens
attgtcacatctgcaagtctcca

SEQ ID NO: 28503 - DNA, 22 bp, Homo sapiens
aggtggcccggggcgaggaccc

SEQ ID NO: 28504 - DNA, 17 bp, Homo sapiens
tgagcctcccccacagg

SEQ ID NO: 28505 - DNA, 16 bp, Homo sapiens
tcagctgctcaaggcc

SEQ ID NO: 28506 - DNA, 17 bp, Homo sapiens
gccctcaggcatgggga

SEQ ID NO: 28507 - DNA, 18 bp, Homo sapiens
actacaacctgctggggg

SEQ ID NO: 28508 - DNA, 22 bp, Homo sapiens
ggatgacagcagatctgcaggg

SEQ ID NO: 28509 - DNA, 19 bp, Homo sapiens
ctctctgactgctcatgag

SEQ ID NO: 28510 - DNA, 18 bp, Homo sapiens
agctgcgtctaactgggc

SEQ ID NO: 28511 - DNA, 16 bp, Homo sapiens
cctccccaggctctgc

SEQ ID NO: 28512 - DNA, 24 bp, Homo sapiens
cacctctggggtggccccggccac

SEQ ID NO: 28513 - DNA, 19 bp, Homo sapiens
tccccggagccctagatcc

SEQ ID NO: 28514 - DNA, 24 bp, Homo sapiens
ggacaggtcatagagcagcggggg

SEQ ID NO: 28515 - DNA, 19 bp, Homo sapiens
ctcacttcttcacccaggg

SEQ ID NO: 28516 - DNA, 19 bp, Homo sapiens
gtggtatcactgtgggcag

SEQ ID NO: 28517 - DNA, 21 bp, Homo sapiens
cttctacccgtcctacccaga

SEQ ID NO: 28518 - DNA, 24 bp, Homo sapiens
ggcaagggcgagaggaggggccag

SEQ ID NO: 28519 - DNA, 16 bp, Homo sapiens
cccgccccgtgacccc

SEQ ID NO: 28520 - DNA, 19 bp, Homo sapiens
atccacggggaggggttac

SEQ ID NO: 28521 - DNA, 16 bp, Homo sapiens
gtgcacgtccagggcc

SEQ ID NO: 28522 - DNA, 18 bp, Homo sapiens
caaaaaccccacggacct

SEQ ID NO: 28523 - DNA, 24 bp, Homo sapiens
gtgcctcctgcactgagtggcatc

SEQ ID NO: 28524 - DNA, 16 bp, Homo sapiens
ctgctgggcacaggca

SEQ ID NO: 28525 - DNA, 24 bp, Homo sapiens
aggaacctgagaggtggcgccact

SEQ ID NO: 28526 - DNA, 16 bp, Homo sapiens
gccctggctggggccc

SEQ ID NO: 28527 - DNA, 17 bp, Homo sapiens
cactgcccacactcacc

SEQ ID NO: 28528 - DNA, 16 bp, Homo sapiens
ctgcccccaggcgtga

SEQ ID NO: 28529 - DNA, 18 bp, Homo sapiens
tcaccggccctaccttgc

SEQ ID NO: 28530 - DNA, 18 bp, Homo sapiens
ctctccttggaaccctgg

SEQ ID NO: 28531 - DNA, 19 bp, Homo sapiens
gtgacattgggcagtgggg

SEQ ID NO: 28532 - DNA, 17 bp, Homo sapiens
gagcctgccttggcctt

SEQ ID NO: 28533 - DNA, 19 bp, Homo sapiens
ctggccagctcgtgggtca

SEQ ID NO: 28534 - DNA, 16 bp, Homo sapiens
ccgaggcggctgctcc

SEQ ID NO: 28535 - DNA, 17 bp, Homo sapiens
ggttggggtggtggggc

SEQ ID NO: 28536 - DNA, 16 bp, Homo sapiens
ctgtggctccatggct

SEQ ID NO: 28537 - DNA, 19 bp, Homo sapiens
atatgacctggccagaagg

SEQ ID NO: 28538 - DNA, 19 bp, Homo sapiens
ctccgggcaagctttgtga

SEQ ID NO: 28539 - DNA, 24 bp, Homo sapiens
ttccctttccacaccgcaagagac

SEQ ID NO: 28540 - DNA, 17 bp, Homo sapiens
gtgcacagagagctggt

SEQ ID NO: 28541 - DNA, 23 bp, Homo sapiens
gagacgctggtcatcttcactgc

SEQ ID NO: 28542 - DNA, 16 bp, Homo sapiens
aacgtggccagcatct

SEQ ID NO: 28543 - DNA, 24 bp, Homo sapiens
gagctggatgcagctgtggggacc

SEQ ID NO: 28544 - DNA, 18 bp, Homo sapiens
agctgaactgcaaggcct

SEQ ID NO: 28545 - DNA, 16 bp, Homo sapiens
gcagagctttgcagag

SEQ ID NO: 28546 - DNA, 24 bp, Homo sapiens
ctgccctgctggcatacccattgt

SEQ ID NO: 28547 - DNA, 20 bp, Homo sapiens
cccctacccagtgctaactc

SEQ ID NO: 28548 - DNA, 20 bp, Homo sapiens
cctatggctgtcatcagggt

SEQ ID NO: 28549 - DNA, 19 bp, Homo sapiens
cttcctgtactatgcctct

SEQ ID NO: 28550 - DNA, 24 bp, Homo sapiens
aaatggcccgcggcctgaacgctc

SEQ ID NO: 28551 - DNA, 23 bp, Homo sapiens
ctagaggcccgctacatggcttt

SEQ ID NO: 28552 - DNA, 24 bp, Homo sapiens
tgggtgtgctgggggcaaagactg

SEQ ID NO: 28553 - DNA, 18 bp, Homo sapiens
atcccactgttggccaac

SEQ ID NO: 28554 - DNA, 22 bp, Homo sapiens
ccaagatcacttacgtgagagg

SEQ ID NO: 28555 - DNA, 16 bp, Homo sapiens
cctgcttcccgccggc

SEQ ID NO: 28556 - DNA, 18 bp, Homo sapiens
ggccatgaggtcatgggc

SEQ ID NO: 28557 - DNA, 16 bp, Homo sapiens
cacctgccagcccagc

SEQ ID NO: 28558 - DNA, 23 bp, Homo sapiens
caggggggctgcgcctccacgga

SEQ ID NO: 28559 - DNA, 16 bp, Homo sapiens
cacccgggccctcagc

SEQ ID NO: 28560 - DNA, 17 bp, Homo sapiens
tcgcaaggagtggccgg

SEQ ID NO: 28561 - DNA, 19 bp, Homo sapiens
cccatcagggcttccatcg

SEQ ID NO: 28562 - DNA, 24 bp, Homo sapiens
ctgaggcgggcagctgccgtgagg

SEQ ID NO: 28563 - DNA, 18 bp, Homo sapiens
ctacctcacaggaatggc

SEQ ID NO: 28564 - DNA, 22 bp, Homo sapiens
actttgggaggtgggagggtgg

SEQ ID NO: 28565 - DNA, 16 bp, Homo sapiens
ggggcctgcccctgga

SEQ ID NO: 28566 - DNA, 21 bp, Homo sapiens
gagtacgggatgcctagaaat

SEQ ID NO: 28567 - DNA, 16 bp, Homo sapiens
tgaccggccggctccc

SEQ ID NO: 28568 - DNA, 18 bp, Homo sapiens
ccccaaggtgccacttgc

SEQ ID NO: 28569 - DNA, 17 bp, Homo sapiens
gaaggccacatttctgt

SEQ ID NO: 28570 - DNA, 24 bp, Homo sapiens
ggacttcggccacggtcacctcct

SEQ ID NO: 28571 - DNA, 21 bp, Homo sapiens
gaccctccatccctttcctcc

SEQ ID NO: 28572 - DNA, 16 bp, Homo sapiens
acatgcccatccgaac

SEQ ID NO: 28573 - DNA, 18 bp, Homo sapiens
tgtgtctctgtgcacacc

SEQ ID NO: 28574 - DNA, 24 bp, Homo sapiens
gacaagtcacagagtccctgagac

SEQ ID NO: 28575 - DNA, 17 bp, Homo sapiens
caacctggaccagctgg

SEQ ID NO: 28576 - DNA, 24 bp, Homo sapiens
cgtttttcccgcccccctgcaatc

SEQ ID NO: 28577 - DNA, 17 bp, Homo sapiens
gatctttgccgacgacc

SEQ ID NO: 28578 - DNA, 17 bp, Homo sapiens
cggccccctctttacct

SEQ ID NO: 28579 - DNA, 16 bp, Homo sapiens
tccctcctcctggccc

SEQ ID NO: 28580 - DNA, 24 bp, Homo sapiens
tgtgaaccgcagccctcccgccgc

SEQ ID NO: 28581 - DNA, 20 bp, Homo sapiens
gtagccctccctctcttggg

SEQ ID NO: 28582 - DNA, 18 bp, Homo sapiens
agcccaggtccccatagc

SEQ ID NO: 28583 - DNA, 16 bp, Homo sapiens
tctcagggaagggcgg

SEQ ID NO: 28584 - DNA, 16 bp, Homo sapiens
caacggccaggccagc

SEQ ID NO: 28585 - DNA, 16 bp, Homo sapiens
ccggccctctggagct

SEQ ID NO: 28586 - DNA, 23 bp, Homo sapiens
gagtccttagtatcagtcatgac

SEQ ID NO: 28587 - DNA, 24 bp, Homo sapiens
atctacagtataataccactaccc

SEQ ID NO: 28588 - DNA, 20 bp, Homo sapiens
aggacacaatgtaggaagtc

SEQ ID NO: 28589 - DNA, 22 bp, Homo sapiens
actgtctaatcctctttgttgt

SEQ ID NO: 28590 - DNA, 19 bp, Homo sapiens
gatgctatctatctgcacc

SEQ ID NO: 28591 - DNA, 20 bp, Homo sapiens
tattctgctccttcttcatc

SEQ ID NO: 28592 - DNA, 19 bp, Homo sapiens
ttctgtgttgtcttcaccc

SEQ ID NO: 28593 - DNA, 20 bp, Homo sapiens
cccaaatcatctgccatgtg

SEQ ID NO: 28594 - DNA, 23 bp, Homo sapiens
gctgcaagtggagaggtgactac

SEQ ID NO: 28595 - DNA, 21 bp, Homo sapiens
ccctttctgatatctctgcct

SEQ ID NO: 28596 - DNA, 20 bp, Homo sapiens
tgcacacacacaattcttac

SEQ ID NO: 28597 - DNA, 22 bp, Homo sapiens
acatttgtttggtaaaagaagc

SEQ ID NO: 28598 - DNA, 22 bp, Homo sapiens
agccatggccgtgagcctgaat

SEQ ID NO: 28599 - DNA, 24 bp, Homo sapiens
ggttttttgtttctgttttttttt

SEQ ID NO: 28600 - DNA, 22 bp, Homo sapiens
aaatcaaatcttttcaccatgg

SEQ ID NO: 28601 - DNA, 18 bp, Homo sapiens
cccaggacacaagcacag

SEQ ID NO: 28602 - DNA, 24 bp, Homo sapiens
ggcttccatatggaaaatacacac

SEQ ID NO: 28603 - DNA, 24 bp, Homo sapiens
ttttctataaatgtaattttccat

SEQ ID NO: 28604 - DNA, 21 bp, Homo sapiens
gtcccttctaggtattggagc

SEQ ID NO: 28605 - DNA, 24 bp, Homo sapiens
agtgaaatgaatttataatggtgt

SEQ ID NO: 28606 - DNA, 19 bp, Homo sapiens
ccatcacctcctctaaccc

SEQ ID NO: 28607 - DNA, 23 bp, Homo sapiens
ccctttaaagaattacttcctca

SEQ ID NO: 28608 - DNA, 19 bp, Homo sapiens
tcaaacttcggactccatg

SEQ ID NO: 28609 - DNA, 24 bp, Homo sapiens
tttagacttttttcgcctggtata

SEQ ID NO: 28610 - DNA, 19 bp, Homo sapiens
tacctctctacagaggtcc

SEQ ID NO: 28611 - DNA, 24 bp, Homo sapiens
aacacttacggccaaatattcatg

SEQ ID NO: 28612 - DNA, 22 bp, Homo sapiens
ttttggatgacttagccccagg

SEQ ID NO: 28613 - DNA, 21 bp, Homo sapiens
gagagtagctaggacacttac

SEQ ID NO: 28614 - DNA, 24 bp, Homo sapiens
cctgagtgtgtatcatattttgaa

SEQ ID NO: 28615 - DNA, 18 bp, Homo sapiens
gcagcataggctgactgc

SEQ ID NO: 28616 - DNA, 16 bp, Homo sapiens
atctttgggagggctt

SEQ ID NO: 28617 - DNA, 18 bp, Homo sapiens
cactttggcctctgcctg

SEQ ID NO: 28618 - DNA, 18 bp, Homo sapiens
acaggctaaggcagctgc

SEQ ID NO: 28619 - DNA, 20 bp, Homo sapiens
actatcactttgcaggcaca

SEQ ID NO: 28620 - DNA, 18 bp, Homo sapiens
cctggaagccaggatgca

SEQ ID NO: 28621 - DNA, 24 bp, Homo sapiens
taaaaagtgctctctgaggtttag

SEQ ID NO: 28622 - DNA, 16 bp, Homo sapiens
gtccccgggatgctga

SEQ ID NO: 28623 - DNA, 21 bp, Homo sapiens
tctctcctcacttgctccagc

SEQ ID NO: 28624 - DNA, 19 bp, Homo sapiens
cagcacgaacataaaggcc

SEQ ID NO: 28625 - DNA, 23 bp, Homo sapiens
ttgtggtcttccaggatttgcat

SEQ ID NO: 28626 - DNA, 24 bp, Homo sapiens
tcttttttacttttttgatgccaa

SEQ ID NO: 28627 - DNA, 18 bp, Homo sapiens
cctcagcaatgagctcag

SEQ ID NO: 28628 - DNA, 23 bp, Homo sapiens
aaaatttggtgatgatattcaaa

SEQ ID NO: 28629 - DNA, 19 bp, Homo sapiens
caggaggggacggcagtgg

SEQ ID NO: 28630 - DNA, 18 bp, Homo sapiens
ttttgcttgctgttcttc

SEQ ID NO: 28631 - DNA, 22 bp, Homo sapiens
tagagagaatcctagcagatct

SEQ ID NO: 28632 - DNA, 23 bp, Homo sapiens
aaatggagctaaacagattattt

SEQ ID NO: 28633 - DNA, 17 bp, Homo sapiens
tcgtagtcctgcccaga

SEQ ID NO: 28634 - DNA, 24 bp, Homo sapiens
ctggcacttttctatgtgtgcaag

SEQ ID NO: 28635 - DNA, 20 bp, Homo sapiens
tgaacatttgttaatccagc

SEQ ID NO: 28636 - DNA, 20 bp, Homo sapiens
actcacctgttttcttcctc

SEQ ID NO: 28637 - DNA, 18 bp, Homo sapiens
aagcaaaataaggggggg

SEQ ID NO: 28638 - DNA, 22 bp, Homo sapiens
ttcctcactctctaaggaaatc

SEQ ID NO: 28639 - DNA, 24 bp, Homo sapiens
tctaattaattgttaagagcaaat

SEQ ID NO: 28640 - DNA, 20 bp, Homo sapiens
cctggttcaaactttggcag

SEQ ID NO: 28641 - DNA, 20 bp, Homo sapiens
tggtagatcacaacctcagc

SEQ ID NO: 28642 - DNA, 19 bp, Homo sapiens
tctctcctaatgagagcat

SEQ ID NO: 28643 - DNA, 20 bp, Homo sapiens
aaagtaaatgaatggctcct

SEQ ID NO: 28644 - DNA, 20 bp, Homo sapiens
acgttttttatcaggctagc

SEQ ID NO: 28645 - DNA, 21 bp, Homo sapiens
tcctgtgctatcctacctcta

SEQ ID NO: 28646 - DNA, 21 bp, Homo sapiens
ggaatgttcgattaggtcttg

SEQ ID NO: 28647 - DNA, 21 bp, Homo sapiens
agatgggatacttacatgctc

SEQ ID NO: 28648 - DNA, 21 bp, Homo sapiens
acatcctttaatttgaaggat

SEQ ID NO: 28649 - DNA, 23 bp, Homo sapiens
ccattgctgttttccatttctgc

SEQ ID NO: 28650 - DNA, 22 bp, Homo sapiens
gaacggcatgcacgttagaggg

SEQ ID NO: 28651 - DNA, 16 bp, Homo sapiens
aggcctgcctcgtccc

SEQ ID NO: 28652 - DNA, 30 bp, Homo sapiens
gaaaaaaagaaaagatttgtttaaaatatc

SEQ ID NO: 28653 - DNA, 19 bp, Homo sapiens
tgtggtgggttttttctcc

SEQ ID NO: 28654 - DNA, 22 bp, Homo sapiens
tatttgcctggcatacaactag

SEQ ID NO: 28655 - DNA, 24 bp, Homo sapiens
agcaactaaatgtatacattatcc

SEQ ID NO: 28656 - DNA, 17 bp, Homo sapiens
gtgtgaaagctgagggg

SEQ ID NO: 28657 - DNA, 21 bp, Homo sapiens
ggccagtagattctgcgtgag

SEQ ID NO: 28658 - DNA, 24 bp, Homo sapiens
aaaaaaactgaaatgaaggaaggg

SEQ ID NO: 28659 - DNA, 20 bp, Homo sapiens
tgtgtctccttcaccacctc

SEQ ID NO: 28660 - DNA, 24 bp, Homo sapiens
caaaagaaaacaaacaaataaaca

SEQ ID NO: 28661 - DNA, 23 bp, Homo sapiens
acttaattggctggattttattt

SEQ ID NO: 28662 - DNA, 23 bp, Homo sapiens
gcacccttcagcaaaaaaagtac

SEQ ID NO: 28663 - DNA, 23 bp, Homo sapiens
tgtgtgtttttcttttaattcac

SEQ ID NO: 28664 - DNA, 16 bp, Homo sapiens
gagggggacaacatgg

SEQ ID NO: 28665 - DNA, 24 bp, Homo sapiens
tctcttttcagctaatgtaaataa

SEQ ID NO: 28666 - DNA, 21 bp, Homo sapiens
tcgaaccaaaaggtattttgc

SEQ ID NO: 28667 - DNA, 23 bp, Homo sapiens
ggagtgaaggagggtgttcagct

SEQ ID NO: 28668 - DNA, 24 bp, Homo sapiens
atgatctcccttttagactacatc

SEQ ID NO: 28669 - DNA, 20 bp, Homo sapiens
tttgctactactcacgtttc

SEQ ID NO: 28670 - DNA, 22 bp, Homo sapiens
actggagtggtcattagttttg

SEQ ID NO: 28671 - DNA, 22 bp, Homo sapiens
gtagcccattcggggatgcttc

SEQ ID NO: 28672 - DNA, 19 bp, Homo sapiens
tttgctcacaaccacaaca

SEQ ID NO: 28673 - DNA, 24 bp, Homo sapiens
ttggcaaagtctcgaacatcttct

SEQ ID NO: 28674 - DNA, 23 bp, Homo sapiens
gggtaaatcctgaagcctacagt

SEQ ID NO: 28675 - DNA, 18 bp, Homo sapiens
tttttctggtcgagttgc

SEQ ID NO: 28676 - DNA, 22 bp, Homo sapiens
cagcattatacatgatctgcag

SEQ ID NO: 28677 - DNA, 20 bp, Homo sapiens
tgtttttgctctttatcagg

SEQ ID NO: 28678 - DNA, 18 bp, Homo sapiens
ctctcacgtcaggctggc

SEQ ID NO: 28679 - DNA, 23 bp, Homo sapiens
agaaggtttattaaagagtgttc

SEQ ID NO: 28680 - DNA, 22 bp, Homo sapiens
gcattttatggccttttgcaac

SEQ ID NO: 28681 - DNA, 19 bp, Homo sapiens
acttaccttgtgggactaa

SEQ ID NO: 28682 - DNA, 21 bp, Homo sapiens
attaaagtgctttagactcct

SEQ ID NO: 28683 - DNA, 22 bp, Homo sapiens
catctgcaaagagtgtccaatc

SEQ ID NO: 28684 - DNA, 24 bp, Homo sapiens
tccagcccaatcaccttctctccc

SEQ ID NO: 28685 - DNA, 22 bp, Homo sapiens
cccgtcctgcacagagtggctg

SEQ ID NO: 28686 - DNA, 23 bp, Homo sapiens
aaaagatcaagtcataaaaaggt

SEQ ID NO: 28687 - DNA, 19 bp, Homo sapiens
cgaagcggccctcttccta

SEQ ID NO: 28688 - DNA, 22 bp, Homo sapiens
ttggttcctaatacctgaatcc

SEQ ID NO: 28689 - DNA, 18 bp, Homo sapiens
ccttttgccctccttctc

SEQ ID NO: 28690 - DNA, 16 bp, Homo sapiens
gcagtttctgcagcag

SEQ ID NO: 28691 - DNA, 24 bp, Homo sapiens
ttctgtttaacttattaatcgaac

SEQ ID NO: 28692 - DNA, 22 bp, Homo sapiens
tggggttccagtctcatccagt

SEQ ID NO: 28693 - DNA, 20 bp, Homo sapiens
cagaaacaagctgtgaaaag

SEQ ID NO: 28694 - DNA, 16 bp, Homo sapiens
tgagccaagtgtccgg

SEQ ID NO: 28695 - DNA, 20 bp, Homo sapiens
tatcccaaatcccataccta

SEQ ID NO: 28696 - DNA, 24 bp, Homo sapiens
gcctccttctgcatgattctatcc

SEQ ID NO: 28697 - DNA, 24 bp, Homo sapiens
ctgtgggttttttaattaatttct

SEQ ID NO: 28698 - DNA, 20 bp, Homo sapiens
gaccttttcaagcaagtggc

SEQ ID NO: 28699 - DNA, 21 bp, Homo sapiens
tacaaattggaagcagctccg

SEQ ID NO: 28700 - DNA, 16 bp, Homo sapiens
tggcatccatgggtgc

SEQ ID NO: 28701 - DNA, 22 bp, Homo sapiens
gcaacttcacccaactgtcttg

SEQ ID NO: 28702 - DNA, 19 bp, Homo sapiens
gtggaaatactggctactc

SEQ ID NO: 28703 - DNA, 22 bp, Homo sapiens
cgctggtcacaaaatcctgttg

SEQ ID NO: 28704 - DNA, 21 bp, Homo sapiens
acatttggaagacaagtacag

SEQ ID NO: 28705 - DNA, 22 bp, Homo sapiens
tttatgacactctaaaagcagt

SEQ ID NO: 28706 - DNA, 16 bp, Homo sapiens
cagggaggatccgtgt

SEQ ID NO: 28707 - DNA, 21 bp, Homo sapiens
agtctgtcatttcccatctag

SEQ ID NO: 28708 - DNA, 21 bp, Homo sapiens
agtgtttaccctctaggaaag

SEQ ID NO: 28709 - DNA, 20 bp, Homo sapiens
tacacgacttacatctgtac

SEQ ID NO: 28710 - DNA, 19 bp, Homo sapiens
acacatcattgagcacttt

SEQ ID NO: 28711 - DNA, 21 bp, Homo sapiens
gccagttttaaaagacaggac

SEQ ID NO: 28712 - DNA, 18 bp, Homo sapiens
tgtgtctgaactggctgc

SEQ ID NO: 28713 - DNA, 24 bp, Homo sapiens
atttatcacaggaagagcattagg

SEQ ID NO: 28714 - DNA, 18 bp, Homo sapiens
atttatgaccgcctggag

SEQ ID NO: 28715 - DNA, 17 bp, Homo sapiens
tctgtacgctaagcctc

SEQ ID NO: 28716 - DNA, 18 bp, Homo sapiens
ctcaagcaaaatgaccag

SEQ ID NO: 28717 - DNA, 23 bp, Homo sapiens
acgtacgtatcataaacattcag

SEQ ID NO: 28718 - DNA, 20 bp, Homo sapiens
tgttttttgcagtggatctc

SEQ ID NO: 28719 - DNA, 21 bp, Homo sapiens
accaaattgttgtgctcttgc

SEQ ID NO: 28720 - DNA, 20 bp, Homo sapiens
tctcagaggaaaaaggacac

SEQ ID NO: 28721 - DNA, 23 bp, Homo sapiens
taatctgcaggatatccatgggc

SEQ ID NO: 28722 - DNA, 18 bp, Homo sapiens
aaagagagtgtggttcac

SEQ ID NO: 28723 - DNA, 20 bp, Homo sapiens
atgcagctgacaggctcaag

SEQ ID NO: 28724 - DNA, 20 bp, Homo sapiens
gaaactccgaagactgcaga

SEQ ID NO: 28725 - DNA, 23 bp, Homo sapiens
gaattatacattgcaacaggaat

SEQ ID NO: 28726 - DNA, 18 bp, Homo sapiens
tttccctcttttcagctg

SEQ ID NO: 28727 - DNA, 25 bp, Homo sapiens
aatgtacccaacctactttttattc

SEQ ID NO: 28728 - DNA, 17 bp, Homo sapiens
tcactgggcgtcggggg

SEQ ID NO: 28729 - DNA, 24 bp, Homo sapiens
gccaatacttacagcaaagggcct

SEQ ID NO: 28730 - DNA, 23 bp, Homo sapiens
tccgaaagcttggcgtatacaca

SEQ ID NO: 28731 - DNA, 21 bp, Homo sapiens
tctgacattattcaggtcagc

SEQ ID NO: 28732 - DNA, 22 bp, Homo sapiens
atgacagagctctaccagtctt

SEQ ID NO: 28733 - DNA, 24 bp, Homo sapiens
caattttggataggaaggtgccac

SEQ ID NO: 28734 - DNA, 20 bp, Homo sapiens
atgttttgtgttttagccac

SEQ ID NO: 28735 - DNA, 21 bp, Homo sapiens
agtaactttcacactgcaaac

SEQ ID NO: 28736 - DNA, 24 bp, Homo sapiens
tgttattgttgttttcttttttcc

SEQ ID NO: 28737 - DNA, 18 bp, Homo sapiens
atggccatgtccttacct

SEQ ID NO: 28738 - DNA, 22 bp, Homo sapiens
tggaagcgctttgaaataaaga

SEQ ID NO: 28739 - DNA, 19 bp, Homo sapiens
gttgtttgagtctcgtggc

SEQ ID NO: 28740 - DNA, 23 bp, Homo sapiens
ggagaggttcctagacgcccagc

SEQ ID NO: 28741 - DNA, 20 bp, Homo sapiens
ctctgggaagctcactcctc

SEQ ID NO: 28742 - DNA, 24 bp, Homo sapiens
caagttttgaccgcctcagcttgc

SEQ ID NO: 28743 - DNA, 17 bp, Homo sapiens
tcagctgtgagcttggg

SEQ ID NO: 28744 - DNA, 24 bp, Homo sapiens
tcagacggggccggggccgcgatc

SEQ ID NO: 28745 - DNA, 16 bp, Homo sapiens
tgcccgcagcgccccc

SEQ ID NO: 28746 - DNA, 24 bp, Homo sapiens
aataagttttttatccaagcttcc

SEQ ID NO: 28747 - DNA, 22 bp, Homo sapiens
ccttcttttcagcgtctgtcca

SEQ ID NO: 28748 - DNA, 23 bp, Homo sapiens
ggctaatgtcgcattttaaaaat

SEQ ID NO: 28749 - DNA, 24 bp, Homo sapiens
ttctggagattaatgttgtctttc

SEQ ID NO: 28750 - DNA, 25 bp, Homo sapiens
gctcttttaaaaatgtgatacttcc

SEQ ID NO: 28751 - DNA, 21 bp, Homo sapiens
tgtcttcatgggcagctgagc

SEQ ID NO: 28752 - DNA, 20 bp, Homo sapiens
ctctcccagggaccctggac

SEQ ID NO: 28753 - DNA, 17 bp, Homo sapiens
gtccagcatctcagcac

SEQ ID NO: 28754 - DNA, 24 bp, Homo sapiens
ggatgatttatgcttctactgcat

SEQ ID NO: 28755 - DNA, 16 bp, Homo sapiens
ctcccaggtggccgtc

SEQ ID NO: 28756 - DNA, 23 bp, Homo sapiens
ttttgttttttcaactgttattc

SEQ ID NO: 28757 - DNA, 27 bp, Homo sapiens
ttatcagaaaggatacattgttttaat

SEQ ID NO: 28758 - DNA, 22 bp, Homo sapiens
tgacttactggaaagaaagtgc

SEQ ID NO: 28759 - DNA, 22 bp, Homo sapiens
ctagagttatgaaatgttgctt

SEQ ID NO: 28760 - DNA, 20 bp, Homo sapiens
agctgcctgactcggtcctc

SEQ ID NO: 28761 - DNA, 19 bp, Homo sapiens
tgaacaccagatggaagct

SEQ ID NO: 28762 - DNA, 22 bp, Homo sapiens
ataaaatatcctatcctcacaa

SEQ ID NO: 28763 - DNA, 18 bp, Homo sapiens
agcttaccactttgggca

SEQ ID NO: 28764 - DNA, 24 bp, Homo sapiens
tcattgttctttacaaattttatc

SEQ ID NO: 28765 - DNA, 21 bp, Homo sapiens
aggcacttcgaggagaaattg

SEQ ID NO: 28766 - DNA, 21 bp, Homo sapiens
aatgtgcttacctgcagaagc

SEQ ID NO: 28767 - DNA, 23 bp, Homo sapiens
ccaggtatcagttcttcttgttt

SEQ ID NO: 28768 - DNA, 23 bp, Homo sapiens
gttatacggtgagagctgaatgc

SEQ ID NO: 28769 - DNA, 18 bp, Homo sapiens
ccgtagcatagagcaaac

SEQ ID NO: 28770 - DNA, 23 bp, Homo sapiens
gtggctcacgttctctttcagag

SEQ ID NO: 28771 - DNA, 20 bp, Homo sapiens
actctctccaagatcacctc

SEQ ID NO: 28772 - DNA, 23 bp, Homo sapiens
gaagactgaatttgtgaaagacg

SEQ ID NO: 28773 - DNA, 17 bp, Homo sapiens
cgccaagctgaggtgat

SEQ ID NO: 28774 - DNA, 24 bp, Homo sapiens
ctgcactcaagttcagattagaag

SEQ ID NO: 28775 - DNA, 19 bp, Homo sapiens
tgagacccttgaaagactc

SEQ ID NO: 28776 - DNA, 24 bp, Homo sapiens
agaagtagacggtaccttgacttt

SEQ ID NO: 28777 - DNA, 23 bp, Homo sapiens
tgaggaggtcaatactgagtggg

SEQ ID NO: 28778 - DNA, 20 bp, Homo sapiens
ggctgccaggatcccttgat

SEQ ID NO: 28779 - DNA, 21 bp, Homo sapiens
aatttagagctgcctcctgag

SEQ ID NO: 28780 - DNA, 21 bp, Homo sapiens
gtggcctcttgaagttcccgg

SEQ ID NO: 28781 - DNA, 21 bp, Homo sapiens
atgacctttttgacaatgttt

SEQ ID NO: 28782 - DNA, 19 bp, Homo sapiens
gcaggttcaatttttccca

SEQ ID NO: 28783 - DNA, 24 bp, Homo sapiens
ataaaaaagccgttaatcagtagg

SEQ ID NO: 28784 - DNA, 18 bp, Homo sapiens
ccgagtgacattctgggc

SEQ ID NO: 28785 - DNA, 17 bp, Homo sapiens
ctctaccaggagcccag

SEQ ID NO: 28786 - DNA, 24 bp, Homo sapiens
gcatctatgtttaatttgaattga

SEQ ID NO: 28787 - DNA, 21 bp, Homo sapiens
tgagtactcttgagactgtac

SEQ ID NO: 28788 - DNA, 19 bp, Homo sapiens
ggcagcaagaatggatggg

SEQ ID NO: 28789 - DNA, 21 bp, Homo sapiens
cttttcatctcatttcacagg

SEQ ID NO: 28790 - DNA, 21 bp, Homo sapiens
agttccacattcaattacctc

SEQ ID NO: 28791 - DNA, 17 bp, Homo sapiens
agttctgagcacccagg

SEQ ID NO: 28792 - DNA, 23 bp, Homo sapiens
aggctgctctgtcagaaatattc

SEQ ID NO: 28793 - DNA, 21 bp, Homo sapiens
tcattttataaccatcagtgt

SEQ ID NO: 28794 - DNA, 21 bp, Homo sapiens
ttcaattccctcttgaaggcc

SEQ ID NO: 28795 - DNA, 18 bp, Homo sapiens
ttccagcagttcagaagc

SEQ ID NO: 28796 - DNA, 24 bp, Homo sapiens
taattgacccttgggtgagaagag

SEQ ID NO: 28797 - DNA, 21 bp, Homo sapiens
tggtgtggctacagctgaaag

SEQ ID NO: 28798 - DNA, 21 bp, Homo sapiens
ttaaaatagtcactggattac

SEQ ID NO: 28799 - DNA, 16 bp, Homo sapiens
ggaagccagttctgac

SEQ ID NO: 28800 - DNA, 23 bp, Homo sapiens
aaatgtcctaccctatgtacatc

SEQ ID NO: 28801 - DNA, 24 bp, Homo sapiens
tgttagaatcatcaattacacttc

SEQ ID NO: 28802 - DNA, 20 bp, Homo sapiens
gtgcctgccggcttaattca

SEQ ID NO: 28803 - DNA, 19 bp, Homo sapiens
caagactgctttgtagttc

SEQ ID NO: 28804 - DNA, 23 bp, Homo sapiens
gagaaaggtgcagacgcttccac

SEQ ID NO: 28805 - DNA, 18 bp, Homo sapiens
tgccatcaaactatcctc

SEQ ID NO: 28806 - DNA, 22 bp, Homo sapiens
aagtctctcaacattaggtagg

SEQ ID NO: 28807 - DNA, 24 bp, Homo sapiens
tgattcatttattcaaaatacagt

SEQ ID NO: 28808 - DNA, 21 bp, Homo sapiens
gtcctgttacaaagacgtttg

SEQ ID NO: 28809 - DNA, 24 bp, Homo sapiens
gacatgtgagataccagttacttg

SEQ ID NO: 28810 - DNA, 18 bp, Homo sapiens
acctggatgaaaacagcc

SEQ ID NO: 28811 - DNA, 23 bp, Homo sapiens
atttgtggcctttttgctccaca

SEQ ID NO: 28812 - DNA, 17 bp, Homo sapiens
tgctgtcctgtaggacc

SEQ ID NO: 28813 - DNA, 21 bp, Homo sapiens
cactccacttgaagttcatgt

SEQ ID NO: 28814 - DNA, 24 bp, Homo sapiens
tttgcaattctccaaattcacatt

SEQ ID NO: 28815 - DNA, 21 bp, Homo sapiens
gatctcaggattttttggctg

SEQ ID NO: 28816 - DNA, 21 bp, Homo sapiens
tcttcttgttagtttagcctg

SEQ ID NO: 28817 - DNA, 21 bp, Homo sapiens
gagcttcaatttcaccttgga

SEQ ID NO: 28818 - DNA, 22 bp, Homo sapiens
tcaagctgaaaatgttacacag

SEQ ID NO: 28819 - DNA, 19 bp, Homo sapiens
atttttaggcttgacaggt

SEQ ID NO: 28820 - DNA, 18 bp, Homo sapiens
gggttttctcaggattgc

SEQ ID NO: 28821 - DNA, 21 bp, Homo sapiens
gaggttatgcattcaacttca

SEQ ID NO: 28822 - DNA, 19 bp, Homo sapiens
cattctgtcaacagaatgt

SEQ ID NO: 28823 - DNA, 24 bp, Homo sapiens
gaagaatctgacctttacatggta

SEQ ID NO: 28824 - DNA, 19 bp, Homo sapiens
agagctgatgaaacaatgg

SEQ ID NO: 28825 - DNA, 23 bp, Homo sapiens
cttgtccaaataccgaaatacat

SEQ ID NO: 28826 - DNA, 20 bp, Homo sapiens
aactgccaatgtcctacagg

SEQ ID NO: 28827 - DNA, 24 bp, Homo sapiens
ggcttgtcagttacaagtacaaat

SEQ ID NO: 28828 - DNA, 16 bp, Homo sapiens
gttccccctggacctg

SEQ ID NO: 28829 - DNA, 22 bp, Homo sapiens
gcggaaatgcctgacttacttg

SEQ ID NO: 28830 - DNA, 17 bp, Homo sapiens
gtcctttgcagggtgag

SEQ ID NO: 28831 - DNA, 18 bp, Homo sapiens
gcctttccttacgggtag

SEQ ID NO: 28832 - DNA, 23 bp, Homo sapiens
tctttctctttttatggagttca

SEQ ID NO: 28833 - DNA, 19 bp, Homo sapiens
gccaggcaagaaacttttc

SEQ ID NO: 28834 - DNA, 18 bp, Homo sapiens
gctgtagcaacaactcac

SEQ ID NO: 28835 - DNA, 19 bp, Homo sapiens
caaagcagcctctcgctca

SEQ ID NO: 28836 - DNA, 21 bp, Homo sapiens
gaagcattcataaaaggtatg

SEQ ID NO: 28837 - DNA, 20 bp, Homo sapiens
aagtccgtgagtttagttgg

SEQ ID NO: 28838 - DNA, 20 bp, Homo sapiens
agatgataccagaaaagtcc

SEQ ID NO: 28839 - DNA, 24 bp, Homo sapiens
tagctggattggaaaaacaaatcc

SEQ ID NO: 28840 - DNA, 20 bp, Homo sapiens
gcagacaaatgtagatgtgg

SEQ ID NO: 28841 - DNA, 24 bp, Homo sapiens
gccaacagtagttttagaaataat

SEQ ID NO: 28842 - DNA, 22 bp, Homo sapiens
aaaaaaactgacattcattctc

SEQ ID NO: 28843 - DNA, 21 bp, Homo sapiens
ttctctgttatcatgtggact

SEQ ID NO: 28844 - DNA, 22 bp, Homo sapiens
tgaggattcagaagctgtttac

SEQ ID NO: 28845 - DNA, 19 bp, Homo sapiens
ccaagtcatttgccacatc

SEQ ID NO: 28846 - DNA, 23 bp, Homo sapiens
catgattgactaaatcatatggt

SEQ ID NO: 28847 - DNA, 18 bp, Homo sapiens
acaaagtctactgttcat

SEQ ID NO: 28848 - DNA, 19 bp, Homo sapiens
caagcttgagtcatggaag

SEQ ID NO: 28849 - DNA, 24 bp, Homo sapiens
tacattaaacatcattaaattaca

SEQ ID NO: 28850 - DNA, 19 bp, Homo sapiens
ggattcaacacaatggctg

SEQ ID NO: 28851 - DNA, 24 bp, Homo sapiens
ttttaaaaaggtatctttgatact

SEQ ID NO: 28852 - DNA, 20 bp, Homo sapiens
tcagtgggatgaagtacaag

SEQ ID NO: 28853 - DNA, 20 bp, Homo sapiens
tgtatagggaccctccttcc

SEQ ID NO: 28854 - DNA, 24 bp, Homo sapiens
ccagactagcatttactactatat

SEQ ID NO: 28855 - DNA, 19 bp, Homo sapiens
gctcagcttcttccttagc

SEQ ID NO: 28856 - DNA, 20 bp, Homo sapiens
aagcaacataaatgtgagat

SEQ ID NO: 28857 - DNA, 19 bp, Homo sapiens
gttgcctccggttctgaag

SEQ ID NO: 28858 - DNA, 20 bp, Homo sapiens
aaagcaaagaatcctgttgt

SEQ ID NO: 28859 - DNA, 21 bp, Homo sapiens
agaggctagaacaatcattac

SEQ ID NO: 28860 - DNA, 22 bp, Homo sapiens
aaatctcagcacaattgttatc

SEQ ID NO: 28861 - DNA, 18 bp, Homo sapiens
gtccccagttggaagaac

SEQ ID NO: 28862 - DNA, 24 bp, Homo sapiens
gggggatatatgaacttaagtttt

SEQ ID NO: 28863 - DNA, 24 bp, Homo sapiens
agaaccctgatactaagggatatt

SEQ ID NO: 28864 - DNA, 23 bp, Homo sapiens
tgcttgttaaaaaacttacttcg

SEQ ID NO: 28865 - DNA, 23 bp, Homo sapiens
gctggtctcacaattgtacttta

SEQ ID NO: 28866 - DNA, 22 bp, Homo sapiens
ttgtttttcaaattttgggcag

SEQ ID NO: 28867 - DNA, 24 bp, Homo sapiens
tgttaaattgttttctataaaccc

SEQ ID NO: 28868 - DNA, 20 bp, Homo sapiens
caacgagatgatcatcaagc

SEQ ID NO: 28869 - DNA, 24 bp, Homo sapiens
gaatagtgagagtaatgtgtttgc

SEQ ID NO: 28870 - DNA, 21 bp, Homo sapiens
ttctctgcttgatcaagttat

SEQ ID NO: 28871 - DNA, 24 bp, Homo sapiens
tggtctaggagagtaaagtgattg

SEQ ID NO: 28872 - DNA, 17 bp, Homo sapiens
ggaggtacctgctctgg

SEQ ID NO: 28873 - DNA, 23 bp, Homo sapiens
tcattttttctcataccttctgc

SEQ ID NO: 28874 - DNA, 22 bp, Homo sapiens
acacaacctgtggttactaagg

SEQ ID NO: 28875 - DNA, 19 bp, Homo sapiens
caccatcaccctctgtgat

SEQ ID NO: 28876 - DNA, 21 bp, Homo sapiens
ttttcctttttgcaaaaaccc

SEQ ID NO: 28877 - DNA, 19 bp, Homo sapiens
aagcccggttgaaatctgc

SEQ ID NO: 28878 - DNA, 24 bp, Homo sapiens
tgacttattgttattgaaattggc

SEQ ID NO: 28879 - DNA, 19 bp, Homo sapiens
agtttggagatggcagttt

SEQ ID NO: 28880 - DNA, 23 bp, Homo sapiens
agatatataatgtcatgaataag

SEQ ID NO: 28881 - DNA, 24 bp, Homo sapiens
tactctaagactttttgcacagtc

SEQ ID NO: 28882 - DNA, 18 bp, Homo sapiens
aggcggtaaaccgtttac

SEQ ID NO: 28883 - DNA, 19 bp, Homo sapiens
ttttctctctcacccagtc

SEQ ID NO: 28884 - DNA, 23 bp, Homo sapiens
agtaatgtgtatgcttttctgtt

SEQ ID NO: 28885 - DNA, 20 bp, Homo sapiens
ccaaagagaatgggatccag

SEQ ID NO: 28886 - DNA, 24 bp, Homo sapiens
tccaataatatattcaccaaatgg

SEQ ID NO: 28887 - DNA, 15 bp, Homo sapiens
ggctgctttgccctc

SEQ ID NO: 28888 - DNA, 24 bp, Homo sapiens
tcctttaaaagaaattctacccac

SEQ ID NO: 28889 - DNA, 16 bp, Homo sapiens
agccactcagccagtg

SEQ ID NO: 28890 - DNA, 24 bp, Homo sapiens
gcctctgctattacagtatggcca

SEQ ID NO: 28891 - DNA, 20 bp, Homo sapiens
agctaaacaaccggatgtgg

SEQ ID NO: 28892 - DNA, 23 bp, Homo sapiens
ccacgtcaatggcaaatgtacaa

SEQ ID NO: 28893 - DNA, 22 bp, Homo sapiens
gctaactgtgaagttaatctgc

SEQ ID NO: 28894 - DNA, 21 bp, Homo sapiens
gttgcttcattaccttcactg

SEQ ID NO: 28895 - DNA, 23 bp, Homo sapiens
cagaaattgatctgcaatacatg

SEQ ID NO: 28896 - DNA, 24 bp, Homo sapiens
gctgccctttagacaaaatctctt

SEQ ID NO: 28897 - DNA, 19 bp, Homo sapiens
gtttcttttctctgcacca

SEQ ID NO: 28898 - DNA, 18 bp, Homo sapiens
agaaggaccatttgacgt

SEQ ID NO: 28899 - DNA, 21 bp, Homo sapiens
gtggttatcctgaataaagtc

SEQ ID NO: 28900 - DNA, 18 bp, Homo sapiens
gctgctgtggttatctcc

SEQ ID NO: 28901 - DNA, 23 bp, Homo sapiens
atgataccaaatgagaaaattca

SEQ ID NO: 28902 - DNA, 16 bp, Homo sapiens
agaccttgggcagctt

SEQ ID NO: 28903 - DNA, 19 bp, Homo sapiens
aagcaaaaagttccctacc

SEQ ID NO: 28904 - DNA, 22 bp, Homo sapiens
tgtattttcctttcaggtttcc

SEQ ID NO: 28905 - DNA, 25 bp, Homo sapiens
aaatttccaactgattcctaatagg

SEQ ID NO: 28906 - DNA, 29 bp, Homo sapiens
cttttgaaaatatatttttaaacattttg

SEQ ID NO: 28907 - DNA, 22 bp, Homo sapiens
gtcttcaagctttttttcaagc

SEQ ID NO: 28908 - DNA, 19 bp, Homo sapiens
atgctgctaaaataacaca

SEQ ID NO: 28909 - DNA, 19 bp, Homo sapiens
tctcaggtaaagctctgga

SEQ ID NO: 28910 - DNA, 22 bp, Homo sapiens
gccaaagcaaacggtcaggtta

SEQ ID NO: 28911 - DNA, 18 bp, Homo sapiens
ccataagcccagaagagc

SEQ ID NO: 28912 - DNA, 17 bp, Homo sapiens
gaccaatgaagcaccca

SEQ ID NO: 28913 - DNA, 17 bp, Homo sapiens
gcgccagggaattctca

SEQ ID NO: 28914 - DNA, 22 bp, Homo sapiens
tgacggaagagatggttaatgt

SEQ ID NO: 28915 - DNA, 24 bp, Homo sapiens
tgtgctgtaattcattttaaacgt

SEQ ID NO: 28916 - DNA, 24 bp, Homo sapiens
agcttattttcaagtttatcttgc

SEQ ID NO: 28917 - DNA, 19 bp, Homo sapiens
caagtcgcttcattttgat

SEQ ID NO: 28918 - DNA, 24 bp, Homo sapiens
gtcctccagtttcatttaattgtt

SEQ ID NO: 28919 - DNA, 24 bp, Homo sapiens
tttcagtcaatcagctctgtgctc

SEQ ID NO: 28920 - DNA, 22 bp, Homo sapiens
taagaagaaataaagttgtgag

SEQ ID NO: 28921 - DNA, 19 bp, Homo sapiens
aacattgctagtatcccac

SEQ ID NO: 28922 - DNA, 20 bp, Homo sapiens
gggcagaaaaccaatgattg

SEQ ID NO: 28923 - DNA, 27 bp, Homo sapiens
aacaaaagaatatcttgtcagaatttc

SEQ ID NO: 28924 - DNA, 22 bp, Homo sapiens
gccctgggggatttgagaaaat

SEQ ID NO: 28925 - DNA, 23 bp, Homo sapiens
agaactatgttggaaaaaaaaat

SEQ ID NO: 28926 - DNA, 23 bp, Homo sapiens
ctcttttccaggttcaagtggga

SEQ ID NO: 28927 - DNA, 23 bp, Homo sapiens
aaattgcttatttttaaattgcc

SEQ ID NO: 28928 - DNA, 27 bp, Homo sapiens
taaaacaaattcatttaaatctctttg

SEQ ID NO: 28929 - DNA, 25 bp, Homo sapiens
gaaattactttgttcaaagtgaatg

SEQ ID NO: 28930 - DNA, 22 bp, Homo sapiens
aatttctttactgctgttgatt

SEQ ID NO: 28931 - DNA, 20 bp, Homo sapiens
acaggaaaaattgggaagcc

SEQ ID NO: 28932 - DNA, 23 bp, Homo sapiens
accctgcttataatctctcatga

SEQ ID NO: 28933 - DNA, 20 bp, Homo sapiens
acattgaatgcaactgggga

SEQ ID NO: 28934 - DNA, 19 bp, Homo sapiens
attcctattagatctgtcg

SEQ ID NO: 28935 - DNA, 23 bp, Homo sapiens
gcctttttggtatcttacaggaa

SEQ ID NO: 28936 - DNA, 23 bp, Homo sapiens
cagacctcctgccaccgcagatt

SEQ ID NO: 28937 - DNA, 24 bp, Homo sapiens
tgtggtagcacactgtttaatctt

SEQ ID NO: 28938 - DNA, 24 bp, Homo sapiens
ctgtttttgaggattgctgaatta

SEQ ID NO: 28939 - DNA, 20 bp, Homo sapiens
gggaaattttcacatggagc

SEQ ID NO: 28940 - DNA, 18 bp, Homo sapiens
gcccaatgccatcctgga

SEQ ID NO: 28941 - DNA, 22 bp, Homo sapiens
tgataattttctttctagtaat

SEQ ID NO: 28942 - DNA, 21 bp, Homo sapiens
acagaagctgaacagtttctc

SEQ ID NO: 28943 - DNA, 19 bp, Homo sapiens
cacccttcagaacctgatc

SEQ ID NO: 28944 - DNA, 16 bp, Homo sapiens
tgttgagaaatggcgg

SEQ ID NO: 28945 - DNA, 23 bp, Homo sapiens
tttcgaaaaaacaaatcaaagac

SEQ ID NO: 28946 - DNA, 22 bp, Homo sapiens
aatctgttttacataatccatc

SEQ ID NO: 28947 - DNA, 21 bp, Homo sapiens
cccaattctcaggaatttgtg

SEQ ID NO: 28948 - DNA, 21 bp, Homo sapiens
tcagagtgatatctttgtcag

SEQ ID NO: 28949 - DNA, 26 bp, Homo sapiens
aaatatctttatatcataatgaaaac

SEQ ID NO: 28950 - DNA, 22 bp, Homo sapiens
tgctaggtgtgtatattaattt

SEQ ID NO: 28951 - DNA, 16 bp, Homo sapiens
gaccgacaagggtagg

SEQ ID NO: 28952 - DNA, 21 bp, Homo sapiens
tgttctcattttacttaccat

SEQ ID NO: 28953 - DNA, 19 bp, Homo sapiens
gctacaggaagctctctcc

SEQ ID NO: 28954 - DNA, 24 bp, Homo sapiens
tttttccatggagggtactgaaat

SEQ ID NO: 28955 - DNA, 23 bp, Homo sapiens
ggtcggattgacattattcatag

SEQ ID NO: 28956 - DNA, 22 bp, Homo sapiens
caagaaaaatatatgtgttacc

SEQ ID NO: 28957 - DNA, 29 bp, Homo sapiens
tttttactgttttaaaatttttatattac

SEQ ID NO: 28958 - DNA, 20 bp, Homo sapiens
tggaaatcaagctgggagag

SEQ ID NO: 28959 - DNA, 24 bp, Homo sapiens
acctttgggatttgtatatatata

SEQ ID NO: 28960 - DNA, 24 bp, Homo sapiens
cgttgcactttgcaatgctgctgt

SEQ ID NO: 28961 - DNA, 21 bp, Homo sapiens
tggttattaactttaaaaagt

SEQ ID NO: 28962 - DNA, 23 bp, Homo sapiens
gttgtagactatcttttatattc

SEQ ID NO: 28963 - DNA, 20 bp, Homo sapiens
agccaaccacactatcaagt

SEQ ID NO: 28964 - DNA, 18 bp, Homo sapiens
ctcaatgctcctgacctc

SEQ ID NO: 28965 - DNA, 23 bp, Homo sapiens
tcatgatgcatacaatttaagtc

SEQ ID NO: 28966 - DNA, 22 bp, Homo sapiens
gtgccttctacttatttgactg

SEQ ID NO: 28967 - DNA, 19 bp, Homo sapiens
tacgaatgaaagtgctttg

SEQ ID NO: 28968 - DNA, 19 bp, Homo sapiens
cgtgaagaaacgatgatgg

SEQ ID NO: 28969 - DNA, 20 bp, Homo sapiens
tcaaagtccttagcacagag

SEQ ID NO: 28970 - DNA, 21 bp, Homo sapiens
ggtttcactgttaggaagcta

SEQ ID NO: 28971 - DNA, 22 bp, Homo sapiens
cttgtgagacatgagtgatttc

SEQ ID NO: 28972 - DNA, 21 bp, Homo sapiens
ttcagcccagtttgtagattc

SEQ ID NO: 28973 - DNA, 22 bp, Homo sapiens
aggcatgtcttcagtcatcacc

SEQ ID NO: 28974 - DNA, 23 bp, Homo sapiens
gtatataattaataaatcaccgt

SEQ ID NO: 28975 - DNA, 21 bp, Homo sapiens
cagtttcgaagactcaacttt

SEQ ID NO: 28976 - DNA, 23 bp, Homo sapiens
ctttcagaatgtacattagaagt

SEQ ID NO: 28977 - DNA, 18 bp, Homo sapiens
gagccaactcagatccag

SEQ ID NO: 28978 - DNA, 24 bp, Homo sapiens
tttttttattagtaggcctctgtt

SEQ ID NO: 28979 - DNA, 20 bp, Homo sapiens
aagaggagctgaatgcagtg

SEQ ID NO: 28980 - DNA, 24 bp, Homo sapiens
ccagtaacaactcacaatttgtgc

SEQ ID NO: 28981 - DNA, 19 bp, Homo sapiens
gccctgtattggttttgct

SEQ ID NO: 28982 - DNA, 17 bp, Homo sapiens
cagcgcttgctgagctg

SEQ ID NO: 28983 - DNA, 22 bp, Homo sapiens
cctttgaaattttgagagaagt

SEQ ID NO: 28984 - DNA, 21 bp, Homo sapiens
ctcagacaagccctcagcttg

SEQ ID NO: 28985 - DNA, 21 bp, Homo sapiens
acagtcatgcctttcatattt

SEQ ID NO: 28986 - DNA, 19 bp, Homo sapiens
gcctacctgagcccagaga

SEQ ID NO: 28987 - DNA, 21 bp, Homo sapiens
aggaaatgcatcaaatcaaag

SEQ ID NO: 28988 - DNA, 18 bp, Homo sapiens
gcaggctgatgatctcct

SEQ ID NO: 28989 - DNA, 25 bp, Homo sapiens
acattttaaatatgatcttcacagg

SEQ ID NO: 28990 - DNA, 21 bp, Homo sapiens
acaggatttgaggtctcaaag

SEQ ID NO: 28991 - DNA, 21 bp, Homo sapiens
acaacattacctttattttcc

SEQ ID NO: 28992 - DNA, 20 bp, Homo sapiens
ccagaagtgcactatacata

SEQ ID NO: 28993 - DNA, 20 bp, Homo sapiens
tgtcatccaagcatttcagg

SEQ ID NO: 28994 - DNA, 23 bp, Homo sapiens
tgattttaacctaagttgtacaa

SEQ ID NO: 28995 - DNA, 21 bp, Homo sapiens
gagaaatttctagagcctttt

SEQ ID NO: 28996 - DNA, 18 bp, Homo sapiens
acagcagctgttacagac

SEQ ID NO: 28997 - DNA, 23 bp, Homo sapiens
tgaacagaaaaagtgagtttctg

SEQ ID NO: 28998 - DNA, 22 bp, Homo sapiens
gaggagacaacttacaacaaag

SEQ ID NO: 28999 - DNA, 29 bp, Homo sapiens
tgcacattatattttaccctatatattaa

SEQ ID NO: 29000 - DNA, 24 bp, Homo sapiens
agactgtacttgttgtttttgatc

SEQ ID NO: 29001 - DNA, 20 bp, Homo sapiens
accttgagagcattatgttt

SEQ ID NO: 29002 - DNA, 23 bp, Homo sapiens
catgtcttattatctctgttaac

SEQ ID NO: 29003 - DNA, 21 bp, Homo sapiens
tctcgctttctctcatctgtg

SEQ ID NO: 29004 - DNA, 24 bp, Homo sapiens
gcacagtatcttataatagcattc

SEQ ID NO: 29005 - DNA, 20 bp, Homo sapiens
acagtaccctcattgtcttc

SEQ ID NO: 29006 - DNA, 21 bp, Homo sapiens
gaggaagacttcaataaagat

SEQ ID NO: 29007 - DNA, 24 bp, Homo sapiens
gaatattctgcatttataaaattc

SEQ ID NO: 29008 - DNA, 25 bp, Homo sapiens
cagatatacaaaaattgcttgaacc

SEQ ID NO: 29009 - DNA, 22 bp, Homo sapiens
agttggagacttatctaagttc

SEQ ID NO: 29010 - DNA, 22 bp, Homo sapiens
gcactatctttttttttaggcc

SEQ ID NO: 29011 - DNA, 24 bp, Homo sapiens
ttatcacaaccaatttaccatatc

SEQ ID NO: 29012 - DNA, 23 bp, Homo sapiens
aggaggttgaataaatgtatttc

SEQ ID NO: 29013 - DNA, 20 bp, Homo sapiens
tgctgaatttcagcctccag

SEQ ID NO: 29014 - DNA, 24 bp, Homo sapiens
gtatttcaaaacccttcataaaac

SEQ ID NO: 29015 - DNA, 22 bp, Homo sapiens
attccttcaaaggaatggaggc

SEQ ID NO: 29016 - DNA, 23 bp, Homo sapiens
cagaattaagactggaaaggtag

SEQ ID NO: 29017 - DNA, 23 bp, Homo sapiens
gtggtaaaatttccttaaataca

SEQ ID NO: 29018 - DNA, 20 bp, Homo sapiens
caggaaattagtagagcccc

SEQ ID NO: 29019 - DNA, 24 bp, Homo sapiens
tacttgcccctttcagagtactgc

SEQ ID NO: 29020 - DNA, 17 bp, Homo sapiens
ggactctacacgtgacc

SEQ ID NO: 29021 - DNA, 23 bp, Homo sapiens
tttccaccttggagtagatcttc

SEQ ID NO: 29022 - DNA, 21 bp, Homo sapiens
ttcaagtcctatctcttgctc

SEQ ID NO: 29023 - DNA, 19 bp, Homo sapiens
ttgagctctgagatttggg

SEQ ID NO: 29024 - DNA, 17 bp, Homo sapiens
tcgctctgtttggctct

SEQ ID NO: 29025 - DNA, 21 bp, Homo sapiens
gccatcaagtttgctgcttgg

SEQ ID NO: 29026 - DNA, 20 bp, Homo sapiens
gcttgctctcattttcttac

SEQ ID NO: 29027 - DNA, 19 bp, Homo sapiens
gcaaaaagaagacgtgctt

SEQ ID NO: 29028 - DNA, 21 bp, Homo sapiens
gaaggaaggaaaaagggaaag

SEQ ID NO: 29029 - DNA, 18 bp, Homo sapiens
tggatcattcaggctgac

SEQ ID NO: 29030 - DNA, 23 bp, Homo sapiens
agacgtccttagtatcttttagg

SEQ ID NO: 29031 - DNA, 23 bp, Homo sapiens
tctctgtacaattaaggaatacc

SEQ ID NO: 29032 - DNA, 22 bp, Homo sapiens
tttcatattttatttgctacct

SEQ ID NO: 29033 - DNA, 24 bp, Homo sapiens
acattttagaacataggaaaaatt

SEQ ID NO: 29034 - DNA, 19 bp, Homo sapiens
catccaaaagtgtgtcagc

SEQ ID NO: 29035 - DNA, 21 bp, Homo sapiens
tatgaaaataccacttaaaac

SEQ ID NO: 29036 - DNA, 21 bp, Homo sapiens
ttctggtcaaaagtttccatg

SEQ ID NO: 29037 - DNA, 30 bp, Homo sapiens
taaatataaagaaaaatatattaaaatatt

SEQ ID NO: 29038 - DNA, 22 bp, Homo sapiens
agtcttctgaatagtaactgga

SEQ ID NO: 29039 - DNA, 23 bp, Homo sapiens
gaattgagaaattttcaaacaca

SEQ ID NO: 29040 - DNA, 21 bp, Homo sapiens
ggagaggccttgaaaacagtt

SEQ ID NO: 29041 - DNA, 23 bp, Homo sapiens
cgtgacagagaagggtgtaaaag

SEQ ID NO: 29042 - DNA, 22 bp, Homo sapiens
ggctactcaaaaagagattgag

SEQ ID NO: 29043 - DNA, 24 bp, Homo sapiens
actcttctgctcgggaggtgacag

SEQ ID NO: 29044 - DNA, 23 bp, Homo sapiens
tcataagcattaaatcttaagac

SEQ ID NO: 29045 - DNA, 20 bp, Homo sapiens
accaacgtctccttcttgcc

SEQ ID NO: 29046 - DNA, 24 bp, Homo sapiens
aatacatagttataggtttaaaac

SEQ ID NO: 29047 - DNA, 19 bp, Homo sapiens
tcaggtgcaccttctgttt

SEQ ID NO: 29048 - DNA, 18 bp, Homo sapiens
ttggattctgaagttgcc

SEQ ID NO: 29049 - DNA, 24 bp, Homo sapiens
atttttaagaaagggaatatgaaa

SEQ ID NO: 29050 - DNA, 18 bp, Homo sapiens
atggctggcagctacaga

SEQ ID NO: 29051 - DNA, 20 bp, Homo sapiens
acttccttacaaaatcatat

SEQ ID NO: 29052 - DNA, 20 bp, Homo sapiens
aacagttggagaaatgcttg

SEQ ID NO: 29053 - DNA, 21 bp, Homo sapiens
taggttttacctttccccagg

SEQ ID NO: 29054 - DNA, 26 bp, Homo sapiens
ttgaattaaagagtaaactaaattac

SEQ ID NO: 29055 - DNA, 19 bp, Homo sapiens
tctttgtcaattccatatc

SEQ ID NO: 29056 - DNA, 28 bp, Homo sapiens
aatagttattttaaataacagaaatata

SEQ ID NO: 29057 - DNA, 19 bp, Homo sapiens
cctttcgcatcttacggga

SEQ ID NO: 29058 - DNA, 24 bp, Homo sapiens
cactcttaatattcagaatatatg

SEQ ID NO: 29059 - DNA, 22 bp, Homo sapiens
aattgcattataatgagctggg

SEQ ID NO: 29060 - DNA, 21 bp, Homo sapiens
tacgtatacatatacatagag

SEQ ID NO: 29061 - DNA, 21 bp, Homo sapiens
tgtacagaaaaagcagacgga

SEQ ID NO: 29062 - DNA, 19 bp, Homo sapiens
ttattgcccgttgctttac

SEQ ID NO: 29063 - DNA, 21 bp, Homo sapiens
aaagtctgagtgaagtgaagt

SEQ ID NO: 29064 - DNA, 18 bp, Homo sapiens
tgcacacacctttgctcc

SEQ ID NO: 29065 - DNA, 25 bp, Homo sapiens
atattatgaaataatttaactctac

SEQ ID NO: 29066 - DNA, 19 bp, Homo sapiens
agttctttgggattttccg

SEQ ID NO: 29067 - DNA, 21 bp, Homo sapiens
aatttcaaacatggaatagca

SEQ ID NO: 29068 - DNA, 24 bp, Homo sapiens
tctttatcaccatttccacttcag

SEQ ID NO: 29069 - DNA, 19 bp, Homo sapiens
caacagaaaatgcaaaagc

SEQ ID NO: 29070 - DNA, 21 bp, Homo sapiens
agtagtacagtcacagctaaa

SEQ ID NO: 29071 - DNA, 22 bp, Homo sapiens
ttgttctcaatcttaaaattac

SEQ ID NO: 29072 - DNA, 23 bp, Homo sapiens
ttttagatgaagtgaagatgcac

SEQ ID NO: 29073 - DNA, 22 bp, Homo sapiens
tataaaagagcagttacttctt

SEQ ID NO: 29074 - DNA, 21 bp, Homo sapiens
agtttcgattattccagaaac

SEQ ID NO: 29075 - DNA, 19 bp, Homo sapiens
acataccacacaatgattt

SEQ ID NO: 29076 - DNA, 20 bp, Homo sapiens
ggcaaaattaaatcagtgcc

SEQ ID NO: 29077 - DNA, 20 bp, Homo sapiens
tttccaatgcaggcaagtgc

SEQ ID NO: 29078 - DNA, 19 bp, Homo sapiens
tcagaaataaaggcagatc

SEQ ID NO: 29079 - DNA, 20 bp, Homo sapiens
tgctcaaaattggctggttt

SEQ ID NO: 29080 - DNA, 19 bp, Homo sapiens
tcctgtgttggatgaatgg

SEQ ID NO: 29081 - DNA, 20 bp, Homo sapiens
aatgtagagagcaaaacact

SEQ ID NO: 29082 - DNA, 21 bp, Homo sapiens
aaacataatcaggggaaggag

SEQ ID NO: 29083 - DNA, 19 bp, Homo sapiens
cctcaaatccaatcttgcc

SEQ ID NO: 29084 - DNA, 21 bp, Homo sapiens
tcctcccaacagaaaatccaa

SEQ ID NO: 29085 - DNA, 20 bp, Homo sapiens
cccaacgaaaacacgttcct

SEQ ID NO: 29086 - DNA, 22 bp, Homo sapiens
tctgaatttcgtcttcttggaa

SEQ ID NO: 29087 - DNA, 23 bp, Homo sapiens
ctgagacaggactctttgggcag

SEQ ID NO: 29088 - DNA, 23 bp, Homo sapiens
gccaatttacggtcattttaaag

SEQ ID NO: 29089 - DNA, 24 bp, Homo sapiens
aactgatctcatgacttgtcaaat

SEQ ID NO: 29090 - DNA, 23 bp, Homo sapiens
tcaaatgcctcaggaagcccagg

SEQ ID NO: 29091 - DNA, 23 bp, Homo sapiens
tcttcctacctacctccaaatag

SEQ ID NO: 29092 - DNA, 18 bp, Homo sapiens
tcattgacaagcagttgg

SEQ ID NO: 29093 - DNA, 28 bp, Homo sapiens
agttgaataaatttaaagttagaaacac

SEQ ID NO: 29094 - DNA, 18 bp, Homo sapiens
gcatccagtctgcccagg

SEQ ID NO: 29095 - DNA, 23 bp, Homo sapiens
gaatggaagctgattcccagatg

SEQ ID NO: 29096 - DNA, 24 bp, Homo sapiens
agtaaacatttaactgatacactc

SEQ ID NO: 29097 - DNA, 20 bp, Homo sapiens
ctgcaatataagctgccaac

SEQ ID NO: 29098 - DNA, 24 bp, Homo sapiens
tgtggaagagtctagaatcttcat

SEQ ID NO: 29099 - DNA, 20 bp, Homo sapiens
ggatttttcagtctcctggg

SEQ ID NO: 29100 - DNA, 16 bp, Homo sapiens
ctgaatgagtgccagg

SEQ ID NO: 29101 - DNA, 22 bp, Homo sapiens
ctccttacagcctaaaaagaag

SEQ ID NO: 29102 - DNA, 24 bp, Homo sapiens
gagatccctgatcctatagttttg

SEQ ID NO: 29103 - DNA, 20 bp, Homo sapiens
gcttttctgtaatcctgctg

SEQ ID NO: 29104 - DNA, 23 bp, Homo sapiens
tgctaattttttttccagcctat

SEQ ID NO: 29105 - DNA, 19 bp, Homo sapiens
agacagatttcgcagcttc

SEQ ID NO: 29106 - DNA, 19 bp, Homo sapiens
ggaggaacattcgacctga

SEQ ID NO: 29107 - DNA, 22 bp, Homo sapiens
ggagaaaaataaatagcaaaca

SEQ ID NO: 29108 - DNA, 16 bp, Homo sapiens
tgatgacgatgaccct

SEQ ID NO: 29109 - DNA, 23 bp, Homo sapiens
acaatatcacgtacattaaggaa

SEQ ID NO: 29110 - DNA, 21 bp, Homo sapiens
gagctgattctgaacagattg

SEQ ID NO: 29111 - DNA, 19 bp, Homo sapiens
agggaactacatgaagagg

SEQ ID NO: 29112 - DNA, 21 bp, Homo sapiens
tacccagtgtctggcattgga

SEQ ID NO: 29113 - DNA, 17 bp, Homo sapiens
ggcggagtcatggatga

SEQ ID NO: 29114 - DNA, 21 bp, Homo sapiens
tgctcattttatctgagaggc

SEQ ID NO: 29115 - DNA, 19 bp, Homo sapiens
tgatgcgacattcagagga

SEQ ID NO: 29116 - DNA, 20 bp, Homo sapiens
tcacttatcttcatacctct

SEQ ID NO: 29117 - DNA, 23 bp, Homo sapiens
atgtatttagaaaaaaaaggaga

SEQ ID NO: 29118 - DNA, 23 bp, Homo sapiens
tctcaagttcctcattgattagc

SEQ ID NO: 29119 - DNA, 24 bp, Homo sapiens
tgctttaaattgattatgacttaa

SEQ ID NO: 29120 - DNA, 20 bp, Homo sapiens
tctgatttgggttatcctct

SEQ ID NO: 29121 - DNA, 19 bp, Homo sapiens
ttttttgaagcaaaaatgc

SEQ ID NO: 29122 - DNA, 19 bp, Homo sapiens
aaatctctgaggtgctaga

SEQ ID NO: 29123 - DNA, 23 bp, Homo sapiens
ttatccaaagtaccagtgctgag

SEQ ID NO: 29124 - DNA, 22 bp, Homo sapiens
aaacaagtggctaaatgaagta

SEQ ID NO: 29125 - DNA, 24 bp, Homo sapiens
tctttggatttgtcttctatttgg

SEQ ID NO: 29126 - DNA, 23 bp, Homo sapiens
atttctttcttaggaagtttggg

SEQ ID NO: 29127 - DNA, 26 bp, Homo sapiens
atttggcttaatttacaacttacatc

SEQ ID NO: 29128 - DNA, 22 bp, Homo sapiens
gaaatggcaaaatttcacattt

SEQ ID NO: 29129 - DNA, 27 bp, Homo sapiens
gttttcagtggttttaagtttaaattc

SEQ ID NO: 29130 - DNA, 22 bp, Homo sapiens
cctgctacaaagtaaaggtgaa

SEQ ID NO: 29131 - DNA, 22 bp, Homo sapiens
atgacaataactcatgccaaca

SEQ ID NO: 29132 - DNA, 23 bp, Homo sapiens
ttaagcaaatggcccaaagtcat

SEQ ID NO: 29133 - DNA, 19 bp, Homo sapiens
tgaaactctaaccaccaac

SEQ ID NO: 29134 - DNA, 24 bp, Homo sapiens
ttttgcactggtatccatgttctt

SEQ ID NO: 29135 - DNA, 24 bp, Homo sapiens
agtctgtaaatagtgtcatagctc

SEQ ID NO: 29136 - DNA, 24 bp, Homo sapiens
acatatcattgacaaagaccaaga

SEQ ID NO: 29137 - DNA, 20 bp, Homo sapiens
cagagagctaaagaagaggc

SEQ ID NO: 29138 - DNA, 21 bp, Homo sapiens
ctagtgcagagccactggtag

SEQ ID NO: 29139 - DNA, 22 bp, Homo sapiens
catagaaatgcattttggatgt

SEQ ID NO: 29140 - DNA, 18 bp, Homo sapiens
tgtgctacaggtggagct

SEQ ID NO: 29141 - DNA, 26 bp, Homo sapiens
atattagatttatttttgtaattctc

SEQ ID NO: 29142 - DNA, 24 bp, Homo sapiens
ttcactttcgcttctttttgttgg

SEQ ID NO: 29143 - DNA, 23 bp, Homo sapiens
agatgaattacagaaagcagttg

SEQ ID NO: 29144 - DNA, 26 bp, Homo sapiens
taaaaatcaacctcttctcttagaac

SEQ ID NO: 29145 - DNA, 21 bp, Homo sapiens
cgaatggatgacacaagctga

SEQ ID NO: 29146 - DNA, 21 bp, Homo sapiens
tgttgcatttctttctttttc

SEQ ID NO: 29147 - DNA, 18 bp, Homo sapiens
ggaggccttgaagggagg

SEQ ID NO: 29148 - DNA, 21 bp, Homo sapiens
taccttcatctcttcaactgc

SEQ ID NO: 29149 - DNA, 23 bp, Homo sapiens
tttcatcactgtcaataatcgtg

SEQ ID NO: 29150 - DNA, 22 bp, Homo sapiens
tctcaagatactcttcttcagc

SEQ ID NO: 29151 - DNA, 21 bp, Homo sapiens
atcattactatctaagctttc

SEQ ID NO: 29152 - DNA, 20 bp, Homo sapiens
ggaggcttacagttttctcc

SEQ ID NO: 29153 - DNA, 18 bp, Homo sapiens
agtgtatctgatccccat

SEQ ID NO: 29154 - DNA, 17 bp, Homo sapiens
tcacatgtgccaacagg

SEQ ID NO: 29155 - DNA, 29 bp, Homo sapiens
gaaaaaagattaatttgtcagaattaatt

SEQ ID NO: 29156 - DNA, 19 bp, Homo sapiens
cagagccagagtttgcttc

SEQ ID NO: 29157 - DNA, 24 bp, Homo sapiens
cttaaccaaaagtaacggtgaagg

SEQ ID NO: 29158 - DNA, 20 bp, Homo sapiens
attcagcccagtctaaacag

SEQ ID NO: 29159 - DNA, 21 bp, Homo sapiens
agccacagtgaaagagattgt

SEQ ID NO: 29160 - DNA, 21 bp, Homo sapiens
aatttttttcagctggcttaa

SEQ ID NO: 29161 - DNA, 20 bp, Homo sapiens
tgagttctgtctcaagtctc

SEQ ID NO: 29162 - DNA, 17 bp, Homo sapiens
gccatcagtcccaattt

SEQ ID NO: 29163 - DNA, 19 bp, Homo sapiens
cccaccttcattgacactg

SEQ ID NO: 29164 - DNA, 22 bp, Homo sapiens
actgttaggcagtcatctatat

SEQ ID NO: 29165 - DNA, 21 bp, Homo sapiens
ttctaaaaaagcagctgaaac

SEQ ID NO: 29166 - DNA, 24 bp, Homo sapiens
caatcaaaaacgtctagaaacatt

SEQ ID NO: 29167 - DNA, 21 bp, Homo sapiens
gctgaagttgatgtttttctg

SEQ ID NO: 29168 - DNA, 23 bp, Homo sapiens
cagctgtaaaacactgatctaac

SEQ ID NO: 29169 - DNA, 21 bp, Homo sapiens
agtaatgccttataacgggtc

SEQ ID NO: 29170 - DNA, 19 bp, Homo sapiens
aaaatcttactctgcactg

SEQ ID NO: 29171 - DNA, 18 bp, Homo sapiens
ttgggcctgtgtttagac

SEQ ID NO: 29172 - DNA, 20 bp, Homo sapiens
agggcaggccattcctcctt

SEQ ID NO: 29173 - DNA, 24 bp, Homo sapiens
tcttagtaaaaatattctttgcct

SEQ ID NO: 29174 - DNA, 20 bp, Homo sapiens
agctagaggagcaaatgaat

SEQ ID NO: 29175 - DNA, 23 bp, Homo sapiens
ttcatcttctcactaactttgaa

SEQ ID NO: 29176 - DNA, 19 bp, Homo sapiens
agaaattgagggacgctgg

SEQ ID NO: 29177 - DNA, 21 bp, Homo sapiens
acagtgtatcgttagggaaaa

SEQ ID NO: 29178 - DNA, 21 bp, Homo sapiens
ccactgtgaaagagatgtcga

SEQ ID NO: 29179 - DNA, 22 bp, Homo sapiens
cctgaatttttcggagtttatt

SEQ ID NO: 29180 - DNA, 20 bp, Homo sapiens
aggctttacaaagttctctg

SEQ ID NO: 29181 - DNA, 19 bp, Homo sapiens
aggagagcttcttccagcg

SEQ ID NO: 29182 - DNA, 21 bp, Homo sapiens
tttcactaaaactcatcaatt

SEQ ID NO: 29183 - DNA, 18 bp, Homo sapiens
ccggctaatttcagaggg

SEQ ID NO: 29184 - DNA, 24 bp, Homo sapiens
actgatagaagatcatctactttg

SEQ ID NO: 29185 - DNA, 20 bp, Homo sapiens
ggccactttgttgctcttgc

SEQ ID NO: 29186 - DNA, 16 bp, Homo sapiens
ggagcagagactcggg

SEQ ID NO: 29187 - DNA, 18 bp, Homo sapiens
tttgctcaatgggcaaac

SEQ ID NO: 29188 - DNA, 20 bp, Homo sapiens
atgggtccagcagtcagaaa

SEQ ID NO: 29189 - DNA, 23 bp, Homo sapiens
tatttaaaggttatatcaatgtg

SEQ ID NO: 29190 - DNA, 20 bp, Homo sapiens
gtttttgacactttgccacc

SEQ ID NO: 29191 - DNA, 19 bp, Homo sapiens
cacagacctgcaattcccc

SEQ ID NO: 29192 - DNA, 23 bp, Homo sapiens
atttaggaaaacatggcaaagtg

SEQ ID NO: 29193 - DNA, 22 bp, Homo sapiens
cactaagttgaggtatggagag

SEQ ID NO: 29194 - DNA, 23 bp, Homo sapiens
ttttcagattttctaattttgtt

SEQ ID NO: 29195 - DNA, 17 bp, Homo sapiens
tgatagcgcattggtgg

SEQ ID NO: 29196 - DNA, 19 bp, Homo sapiens
gccagagagaaagagctac

SEQ ID NO: 29197 - DNA, 22 bp, Homo sapiens
tgttaatacaggttgtagggag

SEQ ID NO: 29198 - DNA, 18 bp, Homo sapiens
tggatgcagactttgtgg

SEQ ID NO: 29199 - DNA, 21 bp, Homo sapiens
tagtaccttctggatttcccc

SEQ ID NO: 29200 - DNA, 23 bp, Homo sapiens
caacctcaaattgaacgattaaa

SEQ ID NO: 29201 - DNA, 24 bp, Homo sapiens
ggctttttacttacttgtctgtag

SEQ ID NO: 29202 - DNA, 22 bp, Homo sapiens
cgtgttacttactttccatact

SEQ ID NO: 29203 - DNA, 24 bp, Homo sapiens
cttaaaatgatttgtaaaggccac

SEQ ID NO: 29204 - DNA, 22 bp, Homo sapiens
gccttactgctttttaatacct

SEQ ID NO: 29205 - DNA, 20 bp, Homo sapiens
tcagggctatgctttgaatt

SEQ ID NO: 29206 - DNA, 23 bp, Homo sapiens
gcttgtctatactgtcatggatg

SEQ ID NO: 29207 - DNA, 23 bp, Homo sapiens
tagccggttgacttcatcctgtg

SEQ ID NO: 29208 - DNA, 21 bp, Homo sapiens
tctgttgcttacattttgaac

SEQ ID NO: 29209 - DNA, 18 bp, Homo sapiens
gaaaatccaacccaccac

SEQ ID NO: 29210 - DNA, 23 bp, Homo sapiens
acgtttcattactaaataatttg

SEQ ID NO: 29211 - DNA, 21 bp, Homo sapiens
tcatcgctttctataatcagc

SEQ ID NO: 29212 - DNA, 23 bp, Homo sapiens
tgattatgctccaaatggaagga

SEQ ID NO: 29213 - DNA, 18 bp, Homo sapiens
ggatcgaattctgccagt

SEQ ID NO: 29214 - DNA, 22 bp, Homo sapiens
attgctgttggctctgatgggg

SEQ ID NO: 29215 - DNA, 21 bp, Homo sapiens
ctttctagagggtgttaatgc

SEQ ID NO: 29216 - DNA, 21 bp, Homo sapiens
tgctccaattgttgtagctga

SEQ ID NO: 29217 - DNA, 22 bp, Homo sapiens
tggctttcagatcatttctttc

SEQ ID NO: 29218 - DNA, 18 bp, Homo sapiens
agtctctcacttagcaac

SEQ ID NO: 29219 - DNA, 23 bp, Homo sapiens
agaaaataattgatctggtttga

SEQ ID NO: 29220 - DNA, 20 bp, Homo sapiens
ggcttgtttgatgctatctg

SEQ ID NO: 29221 - DNA, 16 bp, Homo sapiens
aggccctggtggaaca

SEQ ID NO: 29222 - DNA, 21 bp, Homo sapiens
acatacaaacaccttttaatt

SEQ ID NO: 29223 - DNA, 18 bp, Homo sapiens
ggccatagagcgagaaaa

SEQ ID NO: 29224 - DNA, 22 bp, Homo sapiens
agctgataaatatgaacctatg

SEQ ID NO: 29225 - DNA, 28 bp, Homo sapiens
aagttataattattgtgtagattcacag

SEQ ID NO: 29226 - DNA, 24 bp, Homo sapiens
ctcgtgtaattaccattcaccatc

SEQ ID NO: 29227 - DNA, 19 bp, Homo sapiens
agattcacgtgataagctg

SEQ ID NO: 29228 - DNA, 22 bp, Homo sapiens
tttctgaacttctcagcttttt

SEQ ID NO: 29229 - DNA, 21 bp, Homo sapiens
ggaaggcaacttctcagactt

SEQ ID NO: 29230 - DNA, 22 bp, Homo sapiens
acatattaaacagcattttatc

SEQ ID NO: 29231 - DNA, 19 bp, Homo sapiens
cacagctggattactcgct

SEQ ID NO: 29232 - DNA, 19 bp, Homo sapiens
agcacggagtttacaagca

SEQ ID NO: 29233 - DNA, 28 bp, Homo sapiens
tcaagaaataatgacttttattttttgc

SEQ ID NO: 29234 - DNA, 21 bp, Homo sapiens
ataacctacattgactttttc

SEQ ID NO: 29235 - DNA, 24 bp, Homo sapiens
tgagaaaagaatgataaatgtgga

SEQ ID NO: 29236 - DNA, 24 bp, Homo sapiens
caaattcaggactctgcaacacag

SEQ ID NO: 29237 - DNA, 17 bp, Homo sapiens
gggaaaatagtgctgct

SEQ ID NO: 29238 - DNA, 20 bp, Homo sapiens
agaagaggcagattactgtg

SEQ ID NO: 29239 - DNA, 24 bp, Homo sapiens
ctacattaactgacattacaggta

SEQ ID NO: 29240 - DNA, 20 bp, Homo sapiens
ggaacagatcctggtaaagc

SEQ ID NO: 29241 - DNA, 24 bp, Homo sapiens
ccaccaacaaaactgctgtaaatg

SEQ ID NO: 29242 - DNA, 20 bp, Homo sapiens
cactcagccatcactaacac

SEQ ID NO: 29243 - DNA, 22 bp, Homo sapiens
gctctcaccttttcctaatttc

SEQ ID NO: 29244 - DNA, 17 bp, Homo sapiens
agcaatgtctgacctct

SEQ ID NO: 29245 - DNA, 23 bp, Homo sapiens
ggtggtggaagttcctcttgagc

SEQ ID NO: 29246 - DNA, 20 bp, Homo sapiens
agcaagaacagtttctcatt

SEQ ID NO: 29247 - DNA, 23 bp, Homo sapiens
ttactgtttccattacagttgtc

SEQ ID NO: 29248 - DNA, 24 bp, Homo sapiens
tcagataaaacaattttatttggc

SEQ ID NO: 29249 - DNA, 24 bp, Homo sapiens
gggataatttagtccaaaaacttg

SEQ ID NO: 29250 - DNA, 22 bp, Homo sapiens
tttatttaactaaacacagggc

SEQ ID NO: 29251 - DNA, 19 bp, Homo sapiens
aagtcagtgacccagaaga

SEQ ID NO: 29252 - DNA, 21 bp, Homo sapiens
gtcactctcttaatgcaggtt

SEQ ID NO: 29253 - DNA, 17 bp, Homo sapiens
caatccatgggcaaact

SEQ ID NO: 29254 - DNA, 22 bp, Homo sapiens
atcactaacctgtgctgtactc

SEQ ID NO: 29255 - DNA, 19 bp, Homo sapiens
cccaggcttattctgtgat

SEQ ID NO: 29256 - DNA, 19 bp, Homo sapiens
agttatccagccatgcttc

SEQ ID NO: 29257 - DNA, 20 bp, Homo sapiens
gcaaatgagcaaatacacgc

SEQ ID NO: 29258 - DNA, 24 bp, Homo sapiens
atcttgtttgagtgaatacagttt

SEQ ID NO: 29259 - DNA, 20 bp, Homo sapiens
acctctatttttctgaactt

SEQ ID NO: 29260 - DNA, 27 bp, Homo sapiens
atcaaaatgaaatgttatcaagtcttc

SEQ ID NO: 29261 - DNA, 20 bp, Homo sapiens
ctatgatccaagcaaaaata

SEQ ID NO: 29262 - DNA, 20 bp, Homo sapiens
tgcatggctttcagaaaaag

SEQ ID NO: 29263 - DNA, 24 bp, Homo sapiens
gactaaataatagtgataatatac

SEQ ID NO: 29264 - DNA, 24 bp, Homo sapiens
tggaaaagtaaagatttatgttta

SEQ ID NO: 29265 - DNA, 23 bp, Homo sapiens
gtacatacggccagtttttgaag

SEQ ID NO: 29266 - DNA, 20 bp, Homo sapiens
acaggtgtgtcatgtgtgag

SEQ ID NO: 29267 - DNA, 24 bp, Homo sapiens
ttgtgtgaatcttgttcactgcat

SEQ ID NO: 29268 - DNA, 19 bp, Homo sapiens
ccgctgggttcttttacaa

SEQ ID NO: 29269 - DNA, 22 bp, Homo sapiens
acattaaagaattccaaggaat

SEQ ID NO: 29270 - DNA, 20 bp, Homo sapiens
ttgattgtctcttctccagg

SEQ ID NO: 29271 - DNA, 23 bp, Homo sapiens
atccccccgtgtcttttacagct

SEQ ID NO: 29272 - DNA, 22 bp, Homo sapiens
ggcaaattattcatgccatttt

SEQ ID NO: 29273 - DNA, 22 bp, Homo sapiens
gttgccatttgagaaggatgtc

SEQ ID NO: 29274 - DNA, 18 bp, Homo sapiens
atcagaaagagtgtccct

SEQ ID NO: 29275 - DNA, 22 bp, Homo sapiens
tgtttgcccatcgatctcccaa

SEQ ID NO: 29276 - DNA, 16 bp, Homo sapiens
cgcaactgctgctttg

SEQ ID NO: 29277 - DNA, 23 bp, Homo sapiens
ttgtacacatattgtattctaag

SEQ ID NO: 29278 - DNA, 19 bp, Homo sapiens
acaagaacaagtcagggtc

SEQ ID NO: 29279 - DNA, 21 bp, Homo sapiens
tacttttcaagttatagttct

SEQ ID NO: 29280 - DNA, 23 bp, Homo sapiens
gtaagaatatcattttaatttcc

SEQ ID NO: 29281 - DNA, 25 bp, Homo sapiens
ataatctgaccttaagttgttcttc

SEQ ID NO: 29282 - DNA, 23 bp, Homo sapiens
gatgtagcagaaataaatttcac

SEQ ID NO: 29283 - DNA, 20 bp, Homo sapiens
ccaccaccatgtgagtgaga

SEQ ID NO: 29284 - DNA, 20 bp, Homo sapiens
cgtcatagcagaaaattggc

SEQ ID NO: 29285 - DNA, 21 bp, Homo sapiens
cgccaagtacaacaacataag

SEQ ID NO: 29286 - DNA, 23 bp, Homo sapiens
aaacaattaggtaaaaataattt

SEQ ID NO: 29287 - DNA, 21 bp, Homo sapiens
gaacaaggaaaatggaggaag

SEQ ID NO: 29288 - DNA, 22 bp, Homo sapiens
accatgtcatctgtgttactgt

SEQ ID NO: 29289 - DNA, 23 bp, Homo sapiens
ttttaatggatctccagaatcag

SEQ ID NO: 29290 - DNA, 21 bp, Homo sapiens
aaagcacgcaacataagatac

SEQ ID NO: 29291 - DNA, 19 bp, Homo sapiens
ttgctttcaaagaggtcat

SEQ ID NO: 29292 - DNA, 18 bp, Homo sapiens
tcaggtccaagaggctct

SEQ ID NO: 29293 - DNA, 19 bp, Homo sapiens
cccaaatgcgaacattcca

SEQ ID NO: 29294 - DNA, 23 bp, Homo sapiens
cagtcattcaactctttcagttt

SEQ ID NO: 29295 - DNA, 17 bp, Homo sapiens
ggtgactgatagtgggc

SEQ ID NO: 29296 - DNA, 18 bp, Homo sapiens
agcatggaaaaacaaagc

SEQ ID NO: 29297 - DNA, 22 bp, Homo sapiens
atccaaccagtctcccttgaaa

SEQ ID NO: 29298 - DNA, 19 bp, Homo sapiens
ctgaagtacaagagcagat

SEQ ID NO: 29299 - DNA, 19 bp, Homo sapiens
aaccatcaaaccacatcaa

SEQ ID NO: 29300 - DNA, 25 bp, Homo sapiens
ttggtaatattctacaattgggaag

SEQ ID NO: 29301 - DNA, 22 bp, Homo sapiens
acaaataaggacttacttgctt

SEQ ID NO: 29302 - DNA, 18 bp, Homo sapiens
cttccttctttgtcaggg

SEQ ID NO: 29303 - DNA, 22 bp, Homo sapiens
tgaatttaggagattcatctgc

SEQ ID NO: 29304 - DNA, 21 bp, Homo sapiens
aactgcaaacaaataaaactc

SEQ ID NO: 29305 - DNA, 22 bp, Homo sapiens
ttttcctgttccaatcagctta

SEQ ID NO: 29306 - DNA, 24 bp, Homo sapiens
gggattctgcaaatacaaattaaa

SEQ ID NO: 29307 - DNA, 21 bp, Homo sapiens
gctgtcaaatccatcatgtac

SEQ ID NO: 29308 - DNA, 20 bp, Homo sapiens
agaccagtttcatactcatg

SEQ ID NO: 29309 - DNA, 18 bp, Homo sapiens
ctgttggaatcccaagca

SEQ ID NO: 29310 - DNA, 20 bp, Homo sapiens
gcttctttctgctgaggaca

SEQ ID NO: 29311 - DNA, 20 bp, Homo sapiens
ttgaggaaaaaggatgactt

SEQ ID NO: 29312 - DNA, 21 bp, Homo sapiens
tggagagtgaagtaaacctgg

SEQ ID NO: 29313 - DNA, 21 bp, Homo sapiens
aacgttttagtttacctcatg

SEQ ID NO: 29314 - DNA, 20 bp, Homo sapiens
ttttattgtgcagcatttgg

SEQ ID NO: 29315 - DNA, 20 bp, Homo sapiens
tctctccttgtgcttgcaat

SEQ ID NO: 29316 - DNA, 23 bp, Homo sapiens
cgattcatcatttaatgtactgg

SEQ ID NO: 29317 - DNA, 22 bp, Homo sapiens
taaagctgtttgataacggtcc

SEQ ID NO: 29318 - DNA, 17 bp, Homo sapiens
tgctgttcctgtgtttg

SEQ ID NO: 29319 - DNA, 19 bp, Homo sapiens
gtcttcaggagcttccaaa

SEQ ID NO: 29320 - DNA, 18 bp, Homo sapiens
cccatttccttcacaggt

SEQ ID NO: 29321 - DNA, 24 bp, Homo sapiens
gagggaatcaataaaacttggaaa

SEQ ID NO: 29322 - DNA, 19 bp, Homo sapiens
tcgattcaagagctatgcc

SEQ ID NO: 29323 - DNA, 20 bp, Homo sapiens
tcaagcaagtaaaagcagtg

SEQ ID NO: 29324 - DNA, 18 bp, Homo sapiens
cccttctctgcagatcac

SEQ ID NO: 29325 - DNA, 23 bp, Homo sapiens
acagagagtaaatgttgacagac

SEQ ID NO: 29326 - DNA, 18 bp, Homo sapiens
gtagtcctttcgggttac

SEQ ID NO: 29327 - DNA, 18 bp, Homo sapiens
aagcagcctgtgtgtagg

SEQ ID NO: 29328 - DNA, 24 bp, Homo sapiens
gtttagtattaaacattgaatctc

SEQ ID NO: 29329 - DNA, 18 bp, Homo sapiens
tccctgtgctagactgac

SEQ ID NO: 29330 - DNA, 20 bp, Homo sapiens
gttacatcatcaaatgcact

SEQ ID NO: 29331 - DNA, 25 bp, Homo sapiens
gtacatatacatacattaggctttg

SEQ ID NO: 29332 - DNA, 19 bp, Homo sapiens
ggaagtggaaatgttgcca

SEQ ID NO: 29333 - DNA, 24 bp, Homo sapiens
atgtgcacgtaatacctaaaaatg

SEQ ID NO: 29334 - DNA, 20 bp, Homo sapiens
aatgtacatcacatcactct

SEQ ID NO: 29335 - DNA, 21 bp, Homo sapiens
acacactttacctgttgagaa

SEQ ID NO: 29336 - DNA, 22 bp, Homo sapiens
ttgatgtgtagtgttaatgtgc

SEQ ID NO: 29337 - DNA, 17 bp, Homo sapiens
ctttaggtggccttggc

SEQ ID NO: 29338 - DNA, 23 bp, Homo sapiens
cgtcttcctttaactttgatttg

SEQ ID NO: 29339 - DNA, 20 bp, Homo sapiens
gaggcaaaacttggaagagt

SEQ ID NO: 29340 - DNA, 22 bp, Homo sapiens
ttctaattagtctctggaggac

SEQ ID NO: 29341 - DNA, 19 bp, Homo sapiens
aggtggtatcaacatctgt

SEQ ID NO: 29342 - DNA, 20 bp, Homo sapiens
ctactcgatcctgaaggttg

SEQ ID NO: 29343 - DNA, 19 bp, Homo sapiens
gaaggctgaacattttaaa

SEQ ID NO: 29344 - DNA, 19 bp, Homo sapiens
cacaacgactggaacatgc

SEQ ID NO: 29345 - DNA, 24 bp, Homo sapiens
tgtagttttgtattttgtgtagaa

SEQ ID NO: 29346 - DNA, 18 bp, Homo sapiens
tgtgttttaggccagacc

SEQ ID NO: 29347 - DNA, 21 bp, Homo sapiens
actaaaagcagtggtagtcca

SEQ ID NO: 29348 - DNA, 22 bp, Homo sapiens
ggaagtaaatctcatggaacat

SEQ ID NO: 29349 - DNA, 18 bp, Homo sapiens
tatctggcgatgttgaat

SEQ ID NO: 29350 - DNA, 19 bp, Homo sapiens
cactcaagacttaaggact

SEQ ID NO: 29351 - DNA, 19 bp, Homo sapiens
gcaaaccacactattccag

SEQ ID NO: 29352 - DNA, 20 bp, Homo sapiens
cctggctttgaatgctctca

SEQ ID NO: 29353 - DNA, 22 bp, Homo sapiens
tcaatgtggtcaatgtacataa

SEQ ID NO: 29354 - DNA, 22 bp, Homo sapiens
acaatcaactcgtaattatcca

SEQ ID NO: 29355 - DNA, 24 bp, Homo sapiens
ggggaaaaatatgtcatcagagtc

SEQ ID NO: 29356 - DNA, 18 bp, Homo sapiens
tcatggctggattgcaac

SEQ ID NO: 29357 - DNA, 24 bp, Homo sapiens
tcttacctatgactatggatgaga

SEQ ID NO: 29358 - DNA, 23 bp, Homo sapiens
caaggaatgcattttcttatgaa

SEQ ID NO: 29359 - DNA, 23 bp, Homo sapiens
tggtgaagttgattacattaacc

SEQ ID NO: 29360 - DNA, 24 bp, Homo sapiens
gccctaaaatttctatttatcact

SEQ ID NO: 29361 - DNA, 18 bp, Homo sapiens
tcactgttggtttgttgc

SEQ ID NO: 29362 - DNA, 21 bp, Homo sapiens
tgagaatagacttaacttctg

SEQ ID NO: 29363 - DNA, 21 bp, Homo sapiens
tggaatataatcctccactgg

SEQ ID NO: 29364 - DNA, 18 bp, Homo sapiens
tttaaaaagcagcactat

SEQ ID NO: 29365 - DNA, 21 bp, Homo sapiens
gtgaatattggaagtactgac

SEQ ID NO: 29366 - DNA, 21 bp, Homo sapiens
ttgtttcacacgtcaagggta

SEQ ID NO: 29367 - DNA, 19 bp, Homo sapiens
gcaactaggcatttggtct

SEQ ID NO: 29368 - DNA, 20 bp, Homo sapiens
caggattcttacctgccagt

SEQ ID NO: 29369 - DNA, 21 bp, Homo sapiens
tgctaagtctctgaaaatagc

SEQ ID NO: 29370 - DNA, 22 bp, Homo sapiens
tgatttccatctacgatgtcag

SEQ ID NO: 29371 - DNA, 22 bp, Homo sapiens
tggaaagtgattttacacatgc

SEQ ID NO: 29372 - DNA, 21 bp, Homo sapiens
gggttttgcagaacaataatg

SEQ ID NO: 29373 - DNA, 22 bp, Homo sapiens
ttacaacatgtgctctcagtaa

SEQ ID NO: 29374 - DNA, 20 bp, Homo sapiens
gccaaaagaaaaaggatcca

SEQ ID NO: 29375 - DNA, 22 bp, Homo sapiens
tctgcatttggggccaaagccc

SEQ ID NO: 29376 - DNA, 21 bp, Homo sapiens
catttctagtagattgtcggt

SEQ ID NO: 29377 - DNA, 21 bp, Homo sapiens
cttgtccagggtactacttac

SEQ ID NO: 29378 - DNA, 16 bp, Homo sapiens
cacaggctctgttcgt

SEQ ID NO: 29379 - DNA, 20 bp, Homo sapiens
ttcagggcatgaactcttgt

SEQ ID NO: 29380 - DNA, 16 bp, Homo sapiens
cctcctcgaaggcctg

SEQ ID NO: 29381 - DNA, 24 bp, Homo sapiens
aaggaataggtattgctgtttcaa

SEQ ID NO: 29382 - DNA, 20 bp, Homo sapiens
agtttgggaagcagcatatt

SEQ ID NO: 29383 - DNA, 21 bp, Homo sapiens
gtttctggtctgaaattctac

SEQ ID NO: 29384 - DNA, 23 bp, Homo sapiens
tcgtgaaaatgtatcattggaag

SEQ ID NO: 29385 - DNA, 20 bp, Homo sapiens
agtttttgccctgtcaggcc

SEQ ID NO: 29386 - DNA, 22 bp, Homo sapiens
ttcggcagattaattatgcaca

SEQ ID NO: 29387 - DNA, 20 bp, Homo sapiens
ggtcactgaagaggttctca

SEQ ID NO: 29388 - DNA, 24 bp, Homo sapiens
aaaagaaaacattcacaaaatggg

SEQ ID NO: 29389 - DNA, 23 bp, Homo sapiens
gcacagctaaaataaaatgacac

SEQ ID NO: 29390 - DNA, 21 bp, Homo sapiens
agttgcttcctaacttttatt

SEQ ID NO: 29391 - DNA, 24 bp, Homo sapiens
agtccattttgaaaatttcacaac

SEQ ID NO: 29392 - DNA, 24 bp, Homo sapiens
acactaacacatcataatggaaag

SEQ ID NO: 29393 - DNA, 26 bp, Homo sapiens
cttaccttagaaaattgtgcatttac

SEQ ID NO: 29394 - DNA, 19 bp, Homo sapiens
accagcatcactcatgttt

SEQ ID NO: 29395 - DNA, 21 bp, Homo sapiens
gcctccgcagaatttgaaatg

SEQ ID NO: 29396 - DNA, 22 bp, Homo sapiens
tccaaatatatcccaggggttg

SEQ ID NO: 29397 - DNA, 22 bp, Homo sapiens
tgtgtaagagaaaagtaccaac

SEQ ID NO: 29398 - DNA, 22 bp, Homo sapiens
tctgaatgcttgtggaatttat

SEQ ID NO: 29399 - DNA, 22 bp, Homo sapiens
gctttatctgtgcttggctatg

SEQ ID NO: 29400 - DNA, 24 bp, Homo sapiens
tttactcaccagatgagacctcag

SEQ ID NO: 29401 - DNA, 18 bp, Homo sapiens
tgctttggtgggaagaag

SEQ ID NO: 29402 - DNA, 24 bp, Homo sapiens
tgcagtatatataacatttatgct

SEQ ID NO: 29403 - DNA, 23 bp, Homo sapiens
aagtttgaagaacttttaccagg

SEQ ID NO: 29404 - DNA, 24 bp, Homo sapiens
caatctacctaattagtgagcttg

SEQ ID NO: 29405 - DNA, 20 bp, Homo sapiens
aaagctgctgaagtttgttg

SEQ ID NO: 29406 - DNA, 21 bp, Homo sapiens
actttgtacttacaacagtcc

SEQ ID NO: 29407 - DNA, 17 bp, Homo sapiens
gggaggcaattaccttc

SEQ ID NO: 29408 - DNA, 18 bp, Homo sapiens
acaggaaaaacagctggc

SEQ ID NO: 29409 - DNA, 22 bp, Homo sapiens
agcaacactgtttgcagagttt

SEQ ID NO: 29410 - DNA, 20 bp, Homo sapiens
aagatgctgttttgcactat

SEQ ID NO: 29411 - DNA, 21 bp, Homo sapiens
aacatatgctttgtcatggcc

SEQ ID NO: 29412 - DNA, 16 bp, Homo sapiens
gttcccagcagtcggc

SEQ ID NO: 29413 - DNA, 23 bp, Homo sapiens
tttaataatcctaccttccatgc

SEQ ID NO: 29414 - DNA, 18 bp, Homo sapiens
ctgtccagttcatcctgc

SEQ ID NO: 29415 - DNA, 24 bp, Homo sapiens
aaagacatgaccatccttcctttc

SEQ ID NO: 29416 - DNA, 23 bp, Homo sapiens
gagccatactcggccaatggcag

SEQ ID NO: 29417 - DNA, 20 bp, Homo sapiens
caggcagtgctatggcgccc

SEQ ID NO: 29418 - DNA, 20 bp, Homo sapiens
atcaccccacacactctctg

SEQ ID NO: 29419 - DNA, 21 bp, Homo sapiens
gttttgcaggtgtgaatgagg

SEQ ID NO: 29420 - DNA, 17 bp, Homo sapiens
aacgctgttgcagccag

SEQ ID NO: 29421 - DNA, 20 bp, Homo sapiens
cgtgaaccggcattctactg

SEQ ID NO: 29422 - DNA, 20 bp, Homo sapiens
gtggaaactaggatgagctg

SEQ ID NO: 29423 - DNA, 17 bp, Homo sapiens
aatcatggtgctggtgg

SEQ ID NO: 29424 - DNA, 22 bp, Homo sapiens
cattttcttctctatgtgttgc

SEQ ID NO: 29425 - DNA, 24 bp, Homo sapiens
ccttcatctgcaacacactccagc

SEQ ID NO: 29426 - DNA, 19 bp, Homo sapiens
ccttgtgcctcttcacctc

SEQ ID NO: 29427 - DNA, 17 bp, Homo sapiens
ccatgtgcggctgtggt

SEQ ID NO: 29428 - DNA, 16 bp, Homo sapiens
caacagccggaacacc

SEQ ID NO: 29429 - DNA, 18 bp, Homo sapiens
ccatgcacgtggctcacc

SEQ ID NO: 29430 - DNA, 17 bp, Homo sapiens
cgcaccatggcatagcc

SEQ ID NO: 29431 - DNA, 17 bp, Homo sapiens
cctacacctggaggagg

SEQ ID NO: 29432 - DNA, 16 bp, Homo sapiens
cgggacacgaagcagt

SEQ ID NO: 29433 - DNA, 24 bp, Homo sapiens
cactgtggtggacctatgtcatca

SEQ ID NO: 29434 - DNA, 21 bp, Homo sapiens
cattgaggatgatgcagatgc

SEQ ID NO: 29435 - DNA, 22 bp, Homo sapiens
tcttttatctgctctaccctgg

SEQ ID NO: 29436 - DNA, 16 bp, Homo sapiens
cgctgggctcggcggg

SEQ ID NO: 29437 - DNA, 17 bp, Homo sapiens
ccccaacacagtggact

SEQ ID NO: 29438 - DNA, 21 bp, Homo sapiens
tgcttgtattcaggtgagagg

SEQ ID NO: 29439 - DNA, 19 bp, Homo sapiens
tcttcatgctagctgcctc

SEQ ID NO: 29440 - DNA, 19 bp, Homo sapiens
cgcagtatgtctttcaggg

SEQ ID NO: 29441 - DNA, 24 bp, Homo sapiens
gtacctcatcatccgggcctgtgc

SEQ ID NO: 29442 - DNA, 23 bp, Homo sapiens
tatgtggcatcagcaggccgagc

SEQ ID NO: 29443 - DNA, 24 bp, Homo sapiens
aagggctcgggcttcggccaccgc

SEQ ID NO: 29444 - DNA, 16 bp, Homo sapiens
gaaggaggggctcgcc

SEQ ID NO: 29445 - DNA, 19 bp, Homo sapiens
gagtgagcaggatggctcc

SEQ ID NO: 29446 - DNA, 16 bp, Homo sapiens
aaggttttgatcgagt

SEQ ID NO: 29447 - DNA, 17 bp, Homo sapiens
tgaaaagagcgaccgct

SEQ ID NO: 29448 - DNA, 17 bp, Homo sapiens
acttccaccaccagctc

SEQ ID NO: 29449 - DNA, 20 bp, Homo sapiens
cagcgcggcggcggcggcgg

SEQ ID NO: 29450 - DNA, 24 bp, Homo sapiens
aggaagggcgaagatggggcctgc

SEQ ID NO: 29451 - DNA, 16 bp, Homo sapiens
ggcctcgagcgcccgc

SEQ ID NO: 29452 - DNA, 16 bp, Homo sapiens
ctcgggaagagggccc

SEQ ID NO: 29453 - DNA, 21 bp, Homo sapiens
agggctgaagagaagatggag

SEQ ID NO: 29454 - DNA, 17 bp, Homo sapiens
gtccagtccttccctcc

SEQ ID NO: 29455 - DNA, 24 bp, Homo sapiens
tgaatcttcatgaacatcctttac

SEQ ID NO: 29456 - DNA, 20 bp, Homo sapiens
atcttcaaaaactgaccttc

SEQ ID NO: 29457 - DNA, 29 bp, Homo sapiens
taaagaacctcatcattaaaattatataa

SEQ ID NO: 29458 - DNA, 24 bp, Homo sapiens
tttggtatcactgtaaaatttaac

SEQ ID NO: 29459 - DNA, 22 bp, Homo sapiens
ctcaaactggacttgaattttt

SEQ ID NO: 29460 - DNA, 21 bp, Homo sapiens
aacgttttttcttacacaggc

SEQ ID NO: 29461 - DNA, 22 bp, Homo sapiens
ctgagttgttcagaaacttctc

SEQ ID NO: 29462 - DNA, 21 bp, Homo sapiens
tgaaatggaatctgcctatca

SEQ ID NO: 29463 - DNA, 22 bp, Homo sapiens
attttaaagcttttgcttcttg

SEQ ID NO: 29464 - DNA, 21 bp, Homo sapiens
tcaacttcatcactttcattt

SEQ ID NO: 29465 - DNA, 20 bp, Homo sapiens
tggcagagtggtcattattt

SEQ ID NO: 29466 - DNA, 23 bp, Homo sapiens
aaacacagataaattaaccccac

SEQ ID NO: 29467 - DNA, 20 bp, Homo sapiens
tacagctggcagcctgatag

SEQ ID NO: 29468 - DNA, 22 bp, Homo sapiens
cattccagctgtaattctcaaa

SEQ ID NO: 29469 - DNA, 24 bp, Homo sapiens
acctcctgtaggttataataaaga

SEQ ID NO: 29470 - DNA, 22 bp, Homo sapiens
catagacagggttacaatttgg

SEQ ID NO: 29471 - DNA, 21 bp, Homo sapiens
acctcaccctttatcatcctc

SEQ ID NO: 29472 - DNA, 23 bp, Homo sapiens
ggcattttaagaaaatttcctcg

SEQ ID NO: 29473 - DNA, 22 bp, Homo sapiens
cctgggtttaaaaaaaggaaac

SEQ ID NO: 29474 - DNA, 23 bp, Homo sapiens
aatcatgaaatattctgtgttgt

SEQ ID NO: 29475 - DNA, 29 bp, Homo sapiens
tttaattaaattactcaaaattagatatt

SEQ ID NO: 29476 - DNA, 22 bp, Homo sapiens
agccttgctgttggtggttagc

SEQ ID NO: 29477 - DNA, 22 bp, Homo sapiens
tctatgtgaaaaaatttatgac

SEQ ID NO: 29478 - DNA, 17 bp, Homo sapiens
gttgcatcacatgctgc

SEQ ID NO: 29479 - DNA, 21 bp, Homo sapiens
tcagtatgtttctgttggtca

SEQ ID NO: 29480 - DNA, 17 bp, Homo sapiens
tgtggcaggtttgttgg

SEQ ID NO: 29481 - DNA, 21 bp, Homo sapiens
tagggagaacttcttattctt

SEQ ID NO: 29482 - DNA, 22 bp, Homo sapiens
cttacatttgccgtaagtcttc

SEQ ID NO: 29483 - DNA, 23 bp, Homo sapiens
ttctcagttttatgtgatagaat

SEQ ID NO: 29484 - DNA, 21 bp, Homo sapiens
attcttctaaactaattgcat

SEQ ID NO: 29485 - DNA, 21 bp, Homo sapiens
caattgaacgtctaagatctg

SEQ ID NO: 29486 - DNA, 23 bp, Homo sapiens
gccaaagtccaccaaatttaaaa

SEQ ID NO: 29487 - DNA, 18 bp, Homo sapiens
agatcaagctggatgtgc

SEQ ID NO: 29488 - DNA, 24 bp, Homo sapiens
tgcctttttaaaatccttatgtgc

SEQ ID NO: 29489 - DNA, 24 bp, Homo sapiens
atggatatagcatattttgcataa

SEQ ID NO: 29490 - DNA, 22 bp, Homo sapiens
gctcaccaaaatgacaagctga

SEQ ID NO: 29491 - DNA, 22 bp, Homo sapiens
tgcctgcatttatttatgtcag

SEQ ID NO: 29492 - DNA, 18 bp, Homo sapiens
caaggcaattgccccaga

SEQ ID NO: 29493 - DNA, 19 bp, Homo sapiens
ttctaggtgtgccaaagag

SEQ ID NO: 29494 - DNA, 17 bp, Homo sapiens
gctcgctttgaggtgac

SEQ ID NO: 29495 - DNA, 23 bp, Homo sapiens
tgtaacttatgatccagaaaatt

SEQ ID NO: 29496 - DNA, 23 bp, Homo sapiens
tcatttctcattatcagagacaa

SEQ ID NO: 29497 - DNA, 22 bp, Homo sapiens
tttttagtttaattcatctggg

SEQ ID NO: 29498 - DNA, 18 bp, Homo sapiens
acccttacaagcagtgct

SEQ ID NO: 29499 - DNA, 20 bp, Homo sapiens
agtccatcaatgaagtcacc

SEQ ID NO: 29500 - DNA, 19 bp, Homo sapiens
aataaatgacaagctcccc

SEQ ID NO: 29501 - DNA, 21 bp, Homo sapiens
tttcggagtctgcgcactaag

SEQ ID NO: 29502 - DNA, 21 bp, Homo sapiens
agtatgattatgctttgtaca

SEQ ID NO: 29503 - DNA, 26 bp, Homo sapiens
gagaggtattttctaaaacctgttag

SEQ ID NO: 29504 - DNA, 21 bp, Homo sapiens
accaatagctagacccatcag

SEQ ID NO: 29505 - DNA, 22 bp, Homo sapiens
agggtcaagataatttacatgg

SEQ ID NO: 29506 - DNA, 16 bp, Homo sapiens
cagtgaccccaggtac

SEQ ID NO: 29507 - DNA, 20 bp, Homo sapiens
agtgtattcatcagacgtcc

SEQ ID NO: 29508 - DNA, 24 bp, Homo sapiens
aactatgcagtaaaatatttacct

SEQ ID NO: 29509 - DNA, 20 bp, Homo sapiens
acagtttatcgtaagagaag

SEQ ID NO: 29510 - DNA, 22 bp, Homo sapiens
aaaaggggaaacattttaagac

SEQ ID NO: 29511 - DNA, 22 bp, Homo sapiens
ttcagcaagctagaaaagtacc

SEQ ID NO: 29512 - DNA, 22 bp, Homo sapiens
tcttcagcaaattcgagaaagc

SEQ ID NO: 29513 - DNA, 24 bp, Homo sapiens
acctgcacatttcatatttatgga

SEQ ID NO: 29514 - DNA, 27 bp, Homo sapiens
gttgtactatatgtcaacagatacttc

SEQ ID NO: 29515 - DNA, 22 bp, Homo sapiens
acaagtatttcagctggctaat

SEQ ID NO: 29516 - DNA, 21 bp, Homo sapiens
tccagtaagaaaaaatggaat

SEQ ID NO: 29517 - DNA, 20 bp, Homo sapiens
gaaaaaagctagaagctttc

SEQ ID NO: 29518 - DNA, 21 bp, Homo sapiens
aataaaaaaaaagaacagatc

SEQ ID NO: 29519 - DNA, 21 bp, Homo sapiens
cctgaatcagctttccatttt

SEQ ID NO: 29520 - DNA, 22 bp, Homo sapiens
acaattcaatacatacacatac

SEQ ID NO: 29521 - DNA, 23 bp, Homo sapiens
gaacatttttctcattttcagcc

SEQ ID NO: 29522 - DNA, 21 bp, Homo sapiens
ttacagtagggctgtgcttac

SEQ ID NO: 29523 - DNA, 20 bp, Homo sapiens
acttttattatatgtgccac

SEQ ID NO: 29524 - DNA, 22 bp, Homo sapiens
ttcttaggcaaagtaataggaa

SEQ ID NO: 29525 - DNA, 19 bp, Homo sapiens
ttgcattcactttatgcac

SEQ ID NO: 29526 - DNA, 23 bp, Homo sapiens
caagtcaggagttgtgagggtga

SEQ ID NO: 29527 - DNA, 21 bp, Homo sapiens
agagaagggccattatctaca

SEQ ID NO: 29528 - DNA, 22 bp, Homo sapiens
ctgcgtacaatttgtattcggt

SEQ ID NO: 29529 - DNA, 18 bp, Homo sapiens
tcttctggggcattaggt

SEQ ID NO: 29530 - DNA, 22 bp, Homo sapiens
aaaatatgatgattgataacac

SEQ ID NO: 29531 - DNA, 22 bp, Homo sapiens
tctggacttttgtactgttagg

SEQ ID NO: 29532 - DNA, 21 bp, Homo sapiens
ttctcttttgtgttttctgtt

SEQ ID NO: 29533 - DNA, 24 bp, Homo sapiens
caattgtgacatctgagacaaatt

SEQ ID NO: 29534 - DNA, 19 bp, Homo sapiens
aattcaagggttggaccta

SEQ ID NO: 29535 - DNA, 21 bp, Homo sapiens
aatagaacataagtagcctac

SEQ ID NO: 29536 - DNA, 20 bp, Homo sapiens
aaacagcacccatttttctc

SEQ ID NO: 29537 - DNA, 18 bp, Homo sapiens
ggattcccctgctacaac

SEQ ID NO: 29538 - DNA, 23 bp, Homo sapiens
ttctctgtttgaactaatctgtt

SEQ ID NO: 29539 - DNA, 23 bp, Homo sapiens
aactgaaagtgtatttctcaagg

SEQ ID NO: 29540 - DNA, 20 bp, Homo sapiens
ggcttctgtgtatcgtttgt

SEQ ID NO: 29541 - DNA, 20 bp, Homo sapiens
tcctgaggatcatttgtaat

SEQ ID NO: 29542 - DNA, 24 bp, Homo sapiens
tactgctttaggtgttagtggctt

SEQ ID NO: 29543 - DNA, 18 bp, Homo sapiens
tttaactccagggcaatg

SEQ ID NO: 29544 - DNA, 21 bp, Homo sapiens
ttgttcccacaaaaacaaatg

SEQ ID NO: 29545 - DNA, 22 bp, Homo sapiens
ttgatttatatttacagcaaac

SEQ ID NO: 29546 - DNA, 22 bp, Homo sapiens
cacctttaaatagttcaggtga

SEQ ID NO: 29547 - DNA, 23 bp, Homo sapiens
ctagggaattagtcgttatttgc

SEQ ID NO: 29548 - DNA, 29 bp, Homo sapiens
agatctactataaagtttgtatattttag

SEQ ID NO: 29549 - DNA, 21 bp, Homo sapiens
tgcaatttctttttcagggta

SEQ ID NO: 29550 - DNA, 20 bp, Homo sapiens
ctttgacaagtcatacagtg

SEQ ID NO: 29551 - DNA, 19 bp, Homo sapiens
atgccactgttcttttgga

SEQ ID NO: 29552 - DNA, 19 bp, Homo sapiens
acgcaactggtctacttcc

SEQ ID NO: 29553 - DNA, 21 bp, Homo sapiens
ttctgtgtaacagtgtttact

SEQ ID NO: 29554 - DNA, 20 bp, Homo sapiens
ggtggtctagaactagctcc

SEQ ID NO: 29555 - DNA, 19 bp, Homo sapiens
atctgatgaaaaggagaaa

SEQ ID NO: 29556 - DNA, 18 bp, Homo sapiens
ctcgacccattccttgac

SEQ ID NO: 29557 - DNA, 24 bp, Homo sapiens
gttatcttgtatattttaaatagg

SEQ ID NO: 29558 - DNA, 19 bp, Homo sapiens
tgaagtatatccaggaccg

SEQ ID NO: 29559 - DNA, 20 bp, Homo sapiens
cagttgcgacagattggagc

SEQ ID NO: 29560 - DNA, 21 bp, Homo sapiens
agagattagcagctataagtc

SEQ ID NO: 29561 - DNA, 20 bp, Homo sapiens
agctatgtgactgatgatgg

SEQ ID NO: 29562 - DNA, 19 bp, Homo sapiens
ctgtgaattggaaaccatg

SEQ ID NO: 29563 - DNA, 19 bp, Homo sapiens
atagggggcacggcagacg

SEQ ID NO: 29564 - DNA, 21 bp, Homo sapiens
tgaaatggaaagtgataatac

SEQ ID NO: 29565 - DNA, 21 bp, Homo sapiens
tgaccaatcactgagttcgtc

SEQ ID NO: 29566 - DNA, 19 bp, Homo sapiens
cctgaaacgtctctggaag

SEQ ID NO: 29567 - DNA, 17 bp, Homo sapiens
acgccgccgtccgtctc

SEQ ID NO: 29568 - DNA, 24 bp, Homo sapiens
agacaatggtatataacttttaac

SEQ ID NO: 29569 - DNA, 20 bp, Homo sapiens
ccatacctttgaagcctcct

SEQ ID NO: 29570 - DNA, 20 bp, Homo sapiens
aacagaatctgaccacagag

SEQ ID NO: 29571 - DNA, 21 bp, Homo sapiens
aggatttctcatggaacttca

SEQ ID NO: 29572 - DNA, 22 bp, Homo sapiens
aagagagggagagcttcctgcg

SEQ ID NO: 29573 - DNA, 23 bp, Homo sapiens
tcctttcctatggtatcagcaca

SEQ ID NO: 29574 - DNA, 24 bp, Homo sapiens
aggacaaggaggaagaggacgtgg

SEQ ID NO: 29575 - DNA, 23 bp, Homo sapiens
gcaggctagattattagccattg

SEQ ID NO: 29576 - DNA, 20 bp, Homo sapiens
tgttcttcctttagcctctc

SEQ ID NO: 29577 - DNA, 24 bp, Homo sapiens
gattctgtggttggtttaaataga

SEQ ID NO: 29578 - DNA, 23 bp, Homo sapiens
accatattcaaacaattaagatg

SEQ ID NO: 29579 - DNA, 20 bp, Homo sapiens
agtaactgttgaaccttttg

SEQ ID NO: 29580 - DNA, 23 bp, Homo sapiens
actggatttgtaatctttgaaca

SEQ ID NO: 29581 - DNA, 18 bp, Homo sapiens
tcgtccacgtaatccaag

SEQ ID NO: 29582 - DNA, 22 bp, Homo sapiens
tgtcacaaagaactaagattga

SEQ ID NO: 29583 - DNA, 18 bp, Homo sapiens
ttgcagtcaactctgatc

SEQ ID NO: 29584 - DNA, 19 bp, Homo sapiens
tcttgcacttcttctgttc

SEQ ID NO: 29585 - DNA, 17 bp, Homo sapiens
ccgactaccttcactgg

SEQ ID NO: 29586 - DNA, 24 bp, Homo sapiens
acacttcaggtttaaatttcttgt

SEQ ID NO: 29587 - DNA, 16 bp, Homo sapiens
atccacgctgtctggc

SEQ ID NO: 29588 - DNA, 24 bp, Homo sapiens
tgtgtatataacaactataacttg

SEQ ID NO: 29589 - DNA, 22 bp, Homo sapiens
ggtataggaaatataacttcag

SEQ ID NO: 29590 - DNA, 23 bp, Homo sapiens
aaaacattacagaatacctccag

SEQ ID NO: 29591 - DNA, 20 bp, Homo sapiens
ctactatttgtctttggcct

SEQ ID NO: 29592 - DNA, 22 bp, Homo sapiens
tcgtaaccagaagaaagagaag

SEQ ID NO: 29593 - DNA, 23 bp, Homo sapiens
tggccaataccaaaaaataaaaa

SEQ ID NO: 29594 - DNA, 22 bp, Homo sapiens
gttcccccgccagggccggggc

SEQ ID NO: 29595 - DNA, 18 bp, Homo sapiens
gtttccagttgcctagac

SEQ ID NO: 29596 - DNA, 21 bp, Homo sapiens
gactttgtgggctccataggc

SEQ ID NO: 29597 - DNA, 18 bp, Homo sapiens
ctcaactgctgccccagg

SEQ ID NO: 29598 - DNA, 16 bp, Homo sapiens
cccggcgggcgcctga

SEQ ID NO: 29599 - DNA, 23 bp, Homo sapiens
caggtgacatgccggtgctctcc

SEQ ID NO: 29600 - DNA, 19 bp, Homo sapiens
aggaatacccggttcatgc

SEQ ID NO: 29601 - DNA, 16 bp, Homo sapiens
ctggccctcgcggcct

SEQ ID NO: 29602 - DNA, 17 bp, Homo sapiens
gtctcccggcacaggac

SEQ ID NO: 29603 - DNA, 16 bp, Homo sapiens
ccccggccaggggtct

SEQ ID NO: 29604 - DNA, 19 bp, Homo sapiens
gccacatacaccgacagga

SEQ ID NO: 29605 - DNA, 24 bp, Homo sapiens
tccggggtcgcggcggccaaagct

SEQ ID NO: 29606 - DNA, 16 bp, Homo sapiens
caaaagcccgcgggtc

SEQ ID NO: 29607 - DNA, 17 bp, Homo sapiens
ctgctgttcccccgggt

SEQ ID NO: 29608 - DNA, 18 bp, Homo sapiens
aacggatggcactgttga

SEQ ID NO: 29609 - DNA, 18 bp, Homo sapiens
tggtgagccgcaccttcc

SEQ ID NO: 29610 - DNA, 16 bp, Homo sapiens
ggtaggcgtgggccac

SEQ ID NO: 29611 - DNA, 20 bp, Homo sapiens
ctgcatcgtccgcaaggacc

SEQ ID NO: 29612 - DNA, 17 bp, Homo sapiens
ttgcgaagccgcccgtc

SEQ ID NO: 29613 - DNA, 16 bp, Homo sapiens
tccctgctaccttcgt

SEQ ID NO: 29614 - DNA, 16 bp, Homo sapiens
ggtgggccacagaggc

SEQ ID NO: 29615 - DNA, 16 bp, Homo sapiens
tcgttccgcagccgtc

SEQ ID NO: 29616 - DNA, 19 bp, Homo sapiens
cccgaagcagggtgtagga

SEQ ID NO: 29617 - DNA, 24 bp, Homo sapiens
cagacctactaccgggtcagcaac

SEQ ID NO: 29618 - DNA, 16 bp, Homo sapiens
ggaacaccacgaggcc

SEQ ID NO: 29619 - DNA, 17 bp, Homo sapiens
gtggtggcctttgcggc

SEQ ID NO: 29620 - DNA, 16 bp, Homo sapiens
tcctctgccaccagct

SEQ ID NO: 29621 - DNA, 16 bp, Homo sapiens
acgtggctgtgacttc

SEQ ID NO: 29622 - DNA, 18 bp, Homo sapiens
atctcctccgagttggcc

SEQ ID NO: 29623 - DNA, 24 bp, Homo sapiens
gccggcacagcctggccctcggcc

SEQ ID NO: 29624 - DNA, 16 bp, Homo sapiens
cgcttccctccgtgcc

SEQ ID NO: 29625 - DNA, 24 bp, Homo sapiens
ctgcgggccttctcgcccaagttc

SEQ ID NO: 29626 - DNA, 17 bp, Homo sapiens
ccgccccagactgtccc

SEQ ID NO: 29627 - DNA, 24 bp, Homo sapiens
gagctgcgctacatgcactcgcgt

SEQ ID NO: 29628 - DNA, 16 bp, Homo sapiens
cctgcccaccccagcc

SEQ ID NO: 29629 - DNA, 16 bp, Homo sapiens
tgtagcagggccagct

SEQ ID NO: 29630 - DNA, 19 bp, Homo sapiens
cctctggctctcggccttc

SEQ ID NO: 29631 - DNA, 22 bp, Homo sapiens
cataacataccacaggcgttcc

SEQ ID NO: 29632 - DNA, 19 bp, Homo sapiens
ccctgaccatcgcccccac

SEQ ID NO: 29633 - DNA, 17 bp, Homo sapiens
cagccaccatgagcagg

SEQ ID NO: 29634 - DNA, 16 bp, Homo sapiens
cccccgcaggtggagc

SEQ ID NO: 29635 - DNA, 16 bp, Homo sapiens
tcttggagccctgggt

SEQ ID NO: 29636 - DNA, 20 bp, Homo sapiens
gatcaacctcatccttctgg

SEQ ID NO: 29637 - DNA, 17 bp, Homo sapiens
gttgggccctcgtgagc

SEQ ID NO: 29638 - DNA, 16 bp, Homo sapiens
tatgtgtggagcgcct

SEQ ID NO: 29639 - DNA, 16 bp, Homo sapiens
gctggcagcagggcct

SEQ ID NO: 29640 - DNA, 21 bp, Homo sapiens
tttccaaggctgccttcttca

SEQ ID NO: 29641 - DNA, 24 bp, Homo sapiens
gagagagagagctggttgccccgg

SEQ ID NO: 29642 - DNA, 20 bp, Homo sapiens
gttgcgggcaatagtgaagg

SEQ ID NO: 29643 - DNA, 22 bp, Homo sapiens
tcatttttgactttccgctgtc

SEQ ID NO: 29644 - DNA, 22 bp, Homo sapiens
caggggtacctccttgtacgac

SEQ ID NO: 29645 - DNA, 19 bp, Homo sapiens
ggctttgcagatgcagagg

SEQ ID NO: 29646 - DNA, 24 bp, Homo sapiens
cctggctcagcccctgccagttgc

SEQ ID NO: 29647 - DNA, 16 bp, Homo sapiens
gcgagcgcacagaagc

SEQ ID NO: 29648 - DNA, 16 bp, Homo sapiens
acccgggctgtgtagc

SEQ ID NO: 29649 - DNA, 19 bp, Homo sapiens
gccattgagcggatcatgt

SEQ ID NO: 29650 - DNA, 16 bp, Homo sapiens
ctagctccctgggcct

SEQ ID NO: 29651 - DNA, 21 bp, Homo sapiens
ccatccttgccatgcttctct

SEQ ID NO: 29652 - DNA, 16 bp, Homo sapiens
ccctccacacggacac

SEQ ID NO: 29653 - DNA, 19 bp, Homo sapiens
gacggagctggctggctac

SEQ ID NO: 29654 - DNA, 16 bp, Homo sapiens
cagcagcagcaggggc

SEQ ID NO: 29655 - DNA, 20 bp, Homo sapiens
tgttcagcgctgtcacttca

SEQ ID NO: 29656 - DNA, 24 bp, Homo sapiens
cacatggaggtccctgagtgaggg

SEQ ID NO: 29657 - DNA, 17 bp, Homo sapiens
ataggccggtctggtgt

SEQ ID NO: 29658 - DNA, 23 bp, Homo sapiens
ccgaagtcctcaaagaccctgcc

SEQ ID NO: 29659 - DNA, 19 bp, Homo sapiens
cagatgatcccctgttcca

SEQ ID NO: 29660 - DNA, 16 bp, Homo sapiens
cagctggcatgctgcc

SEQ ID NO: 29661 - DNA, 16 bp, Homo sapiens
tgttgaggctggccac

SEQ ID NO: 29662 - DNA, 24 bp, Homo sapiens
agactccccagaatgcagaggggt

SEQ ID NO: 29663 - DNA, 16 bp, Homo sapiens
gccaagggctgaggct

SEQ ID NO: 29664 - DNA, 19 bp, Homo sapiens
gccaggtggtggatgtgga

SEQ ID NO: 29665 - DNA, 17 bp, Homo sapiens
gaccttggcccacctgc

SEQ ID NO: 29666 - DNA, 18 bp, Homo sapiens
aggagaggtggtggtggc

SEQ ID NO: 29667 - DNA, 21 bp, Homo sapiens
cagatgcatgccttcctccac

SEQ ID NO: 29668 - DNA, 20 bp, Homo sapiens
gctgtcccttatcaagagat

SEQ ID NO: 29669 - DNA, 16 bp, Homo sapiens
cacccaggatccggaa

SEQ ID NO: 29670 - DNA, 17 bp, Homo sapiens
caaggctggtcaggagg

SEQ ID NO: 29671 - DNA, 16 bp, Homo sapiens
ggatgtagaacatgcg

SEQ ID NO: 29672 - DNA, 16 bp, Homo sapiens
cggctgttgcccctgc

SEQ ID NO: 29673 - DNA, 16 bp, Homo sapiens
gagcgcacaggcagga

SEQ ID NO: 29674 - DNA, 16 bp, Homo sapiens
ctgcggcaagagctcc

SEQ ID NO: 29675 - DNA, 17 bp, Homo sapiens
tcctctcctgaggtgct

SEQ ID NO: 29676 - DNA, 17 bp, Homo sapiens
gctctacaagcccccac

SEQ ID NO: 29677 - DNA, 16 bp, Homo sapiens
cgggtttggagggagc

SEQ ID NO: 29678 - DNA, 24 bp, Homo sapiens
cagggagcccacagacatgtaggg

SEQ ID NO: 29679 - DNA, 17 bp, Homo sapiens
tgtgtggggtgtgtgca

SEQ ID NO: 29680 - DNA, 24 bp, Homo sapiens
gagtagcccttcctttgcatgtcc

SEQ ID NO: 29681 - DNA, 17 bp, Homo sapiens
ggacactgcctgggagg

SEQ ID NO: 29682 - DNA, 17 bp, Homo sapiens
aggatgtggtgcaggtg

SEQ ID NO: 29683 - DNA, 23 bp, Homo sapiens
cctccgtggacacccagctttcc

SEQ ID NO: 29684 - DNA, 16 bp, Homo sapiens
gagaggccagggtggg

SEQ ID NO: 29685 - DNA, 19 bp, Homo sapiens
ctacccggactcagtggag

SEQ ID NO: 29686 - DNA, 16 bp, Homo sapiens
cacctggcactttaga

SEQ ID NO: 29687 - DNA, 16 bp, Homo sapiens
cctggacgtcgtgcac

SEQ ID NO: 29688 - DNA, 23 bp, Homo sapiens
ttccctagagcacctggggccat

SEQ ID NO: 29689 - DNA, 22 bp, Homo sapiens
gtccttccagtcacacatagcc

SEQ ID NO: 29690 - DNA, 16 bp, Homo sapiens
cagacagacaaggacg

SEQ ID NO: 29691 - DNA, 21 bp, Homo sapiens
cctgtggtagaacatgcgggc

SEQ ID NO: 29692 - DNA, 17 bp, Homo sapiens
agctcccccagctcccc

SEQ ID NO: 29693 - DNA, 16 bp, Homo sapiens
gctgctacttcccctt

SEQ ID NO: 29694 - DNA, 17 bp, Homo sapiens
ccccgcctaggttggga

SEQ ID NO: 29695 - DNA, 16 bp, Homo sapiens
tccagggcccaacacc

SEQ ID NO: 29696 - DNA, 19 bp, Homo sapiens
gcgagaagcagagaatcgg

SEQ ID NO: 29697 - DNA, 19 bp, Homo sapiens
tgcattcatccaggagggc

SEQ ID NO: 29698 - DNA, 16 bp, Homo sapiens
ggctccctggggtccc

SEQ ID NO: 29699 - DNA, 16 bp, Homo sapiens
ccgcgtccttggccgc

SEQ ID NO: 29700 - DNA, 24 bp, Homo sapiens
ctcagtggagcctgagccgggctg

SEQ ID NO: 29701 - DNA, 19 bp, Homo sapiens
cagggagacagggcaccta

SEQ ID NO: 29702 - DNA, 18 bp, Homo sapiens
cccccaggcccaagtacg

SEQ ID NO: 29703 - DNA, 19 bp, Homo sapiens
ctgctgctgccgggcccgc

SEQ ID NO: 29704 - DNA, 22 bp, Homo sapiens
gacgtggaaggcaagatcttcc

SEQ ID NO: 29705 - DNA, 21 bp, Homo sapiens
tatttcctggccaggagaggg

SEQ ID NO: 29706 - DNA, 24 bp, Homo sapiens
atcacccaccggccctccctgtgg

SEQ ID NO: 29707 - DNA, 16 bp, Homo sapiens
ttctcgaacttccagc

SEQ ID NO: 29708 - DNA, 18 bp, Homo sapiens
ctgaggggaggaggtggc

SEQ ID NO: 29709 - DNA, 16 bp, Homo sapiens
cagctgctgctccagc

SEQ ID NO: 29710 - DNA, 16 bp, Homo sapiens
gtgcccctgaccctgt

SEQ ID NO: 29711 - DNA, 16 bp, Homo sapiens
ctcgcccaggatctgg

SEQ ID NO: 29712 - DNA, 16 bp, Homo sapiens
gatggggagggcggct

SEQ ID NO: 29713 - DNA, 17 bp, Homo sapiens
tggaggcaccctggagg

SEQ ID NO: 29714 - DNA, 24 bp, Homo sapiens
cctgacggaggagaagcagcggct

SEQ ID NO: 29715 - DNA, 24 bp, Homo sapiens
tgctgctgtctccttcatgtgatc

SEQ ID NO: 29716 - DNA, 16 bp, Homo sapiens
cctccaggagctctgc

SEQ ID NO: 29717 - DNA, 19 bp, Homo sapiens
gttttctaggaggaggggc

SEQ ID NO: 29718 - DNA, 17 bp, Homo sapiens
ccgcaaggccctggtgg

SEQ ID NO: 29719 - DNA, 17 bp, Homo sapiens
cgagggttacgcagggc

SEQ ID NO: 29720 - DNA, 16 bp, Homo sapiens
ggtgccaatggccagt

SEQ ID NO: 29721 - DNA, 23 bp, Homo sapiens
ttttaatttctaggattggaaca

SEQ ID NO: 29722 - DNA, 17 bp, Homo sapiens
cacctttttatgcctcc

SEQ ID NO: 29723 - DNA, 17 bp, Homo sapiens
cacccacgtcgattgca

SEQ ID NO: 29724 - DNA, 20 bp, Homo sapiens
cttaaatactttggatggtt

SEQ ID NO: 29725 - DNA, 18 bp, Homo sapiens
gatttcaccattcttagt

SEQ ID NO: 29726 - DNA, 16 bp, Homo sapiens
catgcaagtagcaggg

SEQ ID NO: 29727 - DNA, 20 bp, Homo sapiens
ctggatggcacatatttata

SEQ ID NO: 29728 - DNA, 17 bp, Homo sapiens
ttgcgcttggtctcgcc

SEQ ID NO: 29729 - DNA, 20 bp, Homo sapiens
ctccaagttcaggcattcca

SEQ ID NO: 29730 - DNA, 18 bp, Homo sapiens
tgatgacattcttagcca

SEQ ID NO: 29731 - DNA, 23 bp, Homo sapiens
cgtctggagataggaggctatcc

SEQ ID NO: 29732 - DNA, 16 bp, Homo sapiens
taggtgtcctgttcca

SEQ ID NO: 29733 - DNA, 21 bp, Homo sapiens
agaaagaccccaagtactggc

SEQ ID NO: 29734 - DNA, 20 bp, Homo sapiens
ctccagagccctagcccctt

SEQ ID NO: 29735 - DNA, 17 bp, Homo sapiens
tcagaagctcaacacca

SEQ ID NO: 29736 - DNA, 18 bp, Homo sapiens
gcagagcaggcctcttga

SEQ ID NO: 29737 - DNA, 24 bp, Homo sapiens
tctgggggtgaagggagagagggg

SEQ ID NO: 29738 - DNA, 18 bp, Homo sapiens
ggagctgacccttgagga

SEQ ID NO: 29739 - DNA, 24 bp, Homo sapiens
ccaactgcccgagcctgccttggt

SEQ ID NO: 29740 - DNA, 16 bp, Homo sapiens
agggccacgaagggga

SEQ ID NO: 29741 - DNA, 16 bp, Homo sapiens
gagcacgagagactga

SEQ ID NO: 29742 - DNA, 24 bp, Homo sapiens
tcagatgctcgacctggatactgg

SEQ ID NO: 29743 - DNA, 24 bp, Homo sapiens
tctccacagtgacggctgcccgca

SEQ ID NO: 29744 - DNA, 24 bp, Homo sapiens
gtggggagtgggcttgggcatgga

SEQ ID NO: 29745 - DNA, 17 bp, Homo sapiens
tggagatggacaagttc

SEQ ID NO: 29746 - DNA, 19 bp, Homo sapiens
ctaggtagtcctgtggctc

SEQ ID NO: 29747 - DNA, 22 bp, Homo sapiens
aggtaggcggtggcggtgccgg

SEQ ID NO: 29748 - DNA, 24 bp, Homo sapiens
tggggtcctctctggtccctcacg

SEQ ID NO: 29749 - DNA, 16 bp, Homo sapiens
gtggctgcgcttaccc

SEQ ID NO: 29750 - DNA, 22 bp, Homo sapiens
gtgccactggggcgaaggcctg

SEQ ID NO: 29751 - DNA, 16 bp, Homo sapiens
ttggcccagcgcagga

SEQ ID NO: 29752 - DNA, 24 bp, Homo sapiens
acaacaccaatgcccaggtccctg

SEQ ID NO: 29753 - DNA, 23 bp, Homo sapiens
aaagactgaggcctggacaggcc

SEQ ID NO: 29754 - DNA, 16 bp, Homo sapiens
gggcaccgtgggggta

SEQ ID NO: 29755 - DNA, 23 bp, Homo sapiens
agctgggagccccacagagaagc

SEQ ID NO: 29756 - DNA, 17 bp, Homo sapiens
ggaacgaggtcacctcc

SEQ ID NO: 29757 - DNA, 17 bp, Homo sapiens
ctgctgtggatggggag

SEQ ID NO: 29758 - DNA, 19 bp, Homo sapiens
gagtgggcgtaggcggcgc

SEQ ID NO: 29759 - DNA, 20 bp, Homo sapiens
gtctttagcggggaggggga

SEQ ID NO: 29760 - DNA, 24 bp, Homo sapiens
tacagccctggctcaaggcctcag

SEQ ID NO: 29761 - DNA, 16 bp, Homo sapiens
caaacccgcccctcct

SEQ ID NO: 29762 - DNA, 16 bp, Homo sapiens
cgagcactcacgtcaa

SEQ ID NO: 29763 - DNA, 23 bp, Homo sapiens
cacgagagtgaaccatgccaccc

SEQ ID NO: 29764 - DNA, 16 bp, Homo sapiens
aggcctcctgcccacc

SEQ ID NO: 29765 - DNA, 23 bp, Homo sapiens
actcagacaacgagatgccccct

SEQ ID NO: 29766 - DNA, 19 bp, Homo sapiens
tgggagcctcccaggtgtg

SEQ ID NO: 29767 - DNA, 24 bp, Homo sapiens
cctaccagctcatgcataacatca

SEQ ID NO: 29768 - DNA, 20 bp, Homo sapiens
tggacaagtaaggcccagag

SEQ ID NO: 29769 - DNA, 23 bp, Homo sapiens
ctcatactccacatcagttttat

SEQ ID NO: 29770 - DNA, 24 bp, Homo sapiens
tccacaccatctccagggactcca

SEQ ID NO: 29771 - DNA, 22 bp, Homo sapiens
gtgtcaacgaggtccaggccgt

SEQ ID NO: 29772 - DNA, 22 bp, Homo sapiens
ctgggcatcttggaaccctgca

SEQ ID NO: 29773 - DNA, 19 bp, Homo sapiens
ctgcagccacatggcccca

SEQ ID NO: 29774 - DNA, 24 bp, Homo sapiens
ggccggaaatacatgtaccccaag

SEQ ID NO: 29775 - DNA, 16 bp, Homo sapiens
tacagaggacaacaga

SEQ ID NO: 29776 - DNA, 19 bp, Homo sapiens
caggggcacgaggctggac

SEQ ID NO: 29777 - DNA, 20 bp, Homo sapiens
ctactgcttgtatatctctt

SEQ ID NO: 29778 - DNA, 18 bp, Homo sapiens
gggctattgattcatcat

SEQ ID NO: 29779 - DNA, 16 bp, Homo sapiens
gggtcaggagttccgt

SEQ ID NO: 29780 - DNA, 18 bp, Homo sapiens
aagtgagggaaggaaaca

SEQ ID NO: 29781 - DNA, 20 bp, Homo sapiens
ctccgagccatgcatcctcc

SEQ ID NO: 29782 - DNA, 24 bp, Homo sapiens
ggtcagtccttccgactctcccta

SEQ ID NO: 29783 - DNA, 18 bp, Homo sapiens
caggctagggccttgtcc

SEQ ID NO: 29784 - DNA, 24 bp, Homo sapiens
cactcccacttcatctggaaccgc

SEQ ID NO: 29785 - DNA, 16 bp, Homo sapiens
gaacccccttccttgc

SEQ ID NO: 29786 - DNA, 23 bp, Homo sapiens
gggggcctaattctgggcccaca

SEQ ID NO: 29787 - DNA, 17 bp, Homo sapiens
ttcctgttcagctcgta

SEQ ID NO: 29788 - DNA, 24 bp, Homo sapiens
ctctaccccaagctggctgtgggg

SEQ ID NO: 29789 - DNA, 17 bp, Homo sapiens
ttccgcaggatctggat

SEQ ID NO: 29790 - DNA, 16 bp, Homo sapiens
ggtcacagcctctcag

SEQ ID NO: 29791 - DNA, 24 bp, Homo sapiens
cagcagccccctctcagcagaccc

SEQ ID NO: 29792 - DNA, 16 bp, Homo sapiens
gggacatgcagtacga

SEQ ID NO: 29793 - DNA, 17 bp, Homo sapiens
gtcagttccctttaaga

SEQ ID NO: 29794 - DNA, 21 bp, Homo sapiens
gatggtggtggtggccatcca

SEQ ID NO: 29795 - DNA, 18 bp, Homo sapiens
cacccgtctccttccaca

SEQ ID NO: 29796 - DNA, 23 bp, Homo sapiens
tgaatggctgcgtaaaatgccta

SEQ ID NO: 29797 - DNA, 16 bp, Homo sapiens
ctgcttggcttttcct

SEQ ID NO: 29798 - DNA, 22 bp, Homo sapiens
cctgtccttccctagctaacaa

SEQ ID NO: 29799 - DNA, 23 bp, Homo sapiens
tgtcttccgaggaggtcaagctg

SEQ ID NO: 29800 - DNA, 22 bp, Homo sapiens
ggagcagatcttcctcccctcc

SEQ ID NO: 29801 - DNA, 22 bp, Homo sapiens
tgtatccaccaaatgtgaagac

SEQ ID NO: 29802 - DNA, 19 bp, Homo sapiens
attgaccacgggcaccatg

SEQ ID NO: 29803 - DNA, 23 bp, Homo sapiens
gaccccaggagtgtccaccccaa

SEQ ID NO: 29804 - DNA, 22 bp, Homo sapiens
gatggaccgggccatcgggcag

SEQ ID NO: 29805 - DNA, 16 bp, Homo sapiens
ctgggcttgctggctc

SEQ ID NO: 29806 - DNA, 23 bp, Homo sapiens
ctgcggaccattcccacgtcttc

SEQ ID NO: 29807 - DNA, 18 bp, Homo sapiens
tttctccccatccccagt

SEQ ID NO: 29808 - DNA, 16 bp, Homo sapiens
gcttcttgtctgtgtc

SEQ ID NO: 29809 - DNA, 22 bp, Homo sapiens
gcattgcagggcccttcaaaga

SEQ ID NO: 29810 - DNA, 20 bp, Homo sapiens
ttctctcgttcaccgcccac

SEQ ID NO: 29811 - DNA, 23 bp, Homo sapiens
gggggctggggactgtactcctg

SEQ ID NO: 29812 - DNA, 20 bp, Homo sapiens
ctgtcccctcccagccctgg

SEQ ID NO: 29813 - DNA, 23 bp, Homo sapiens
gtgcaggtctggcccccatgctg

SEQ ID NO: 29814 - DNA, 16 bp, Homo sapiens
cctgaccttgaccaca

SEQ ID NO: 29815 - DNA, 16 bp, Homo sapiens
gcctggctacaaggtg

SEQ ID NO: 29816 - DNA, 22 bp, Homo sapiens
tgtttgaatcaaacaacctggg

SEQ ID NO: 29817 - DNA, 19 bp, Homo sapiens
gtggcgcaggggcacagca

SEQ ID NO: 29818 - DNA, 24 bp, Homo sapiens
tccttttcctcttctgtgaaatgg

SEQ ID NO: 29819 - DNA, 21 bp, Homo sapiens
tgcagcaggtgcgccatgggg

SEQ ID NO: 29820 - DNA, 21 bp, Homo sapiens
agctgcgtgcgcagcgccagg

SEQ ID NO: 29821 - DNA, 23 bp, Homo sapiens
cgatgcaggctgcatacgccatc

SEQ ID NO: 29822 - DNA, 22 bp, Homo sapiens
cacaacaactaccaggcgcagt

SEQ ID NO: 29823 - DNA, 24 bp, Homo sapiens
cagggggcctgcagcaaggctgcc

SEQ ID NO: 29824 - DNA, 23 bp, Homo sapiens
ggggaggacgtggccgtcttctc

SEQ ID NO: 29825 - DNA, 24 bp, Homo sapiens
ggtgcccgggccctgggccctcag

SEQ ID NO: 29826 - DNA, 22 bp, Homo sapiens
agaactacgtcccccacgtgat

SEQ ID NO: 29827 - DNA, 22 bp, Homo sapiens
cctgccccttgaggggggggct

SEQ ID NO: 29828 - DNA, 20 bp, Homo sapiens
ctcctgccagctcggcaggc

SEQ ID NO: 29829 - DNA, 24 bp, Homo sapiens
actttggtttcttgggtccccttt

SEQ ID NO: 29830 - DNA, 24 bp, Homo sapiens
ggccctctaccccctgagcgtcct

SEQ ID NO: 29831 - DNA, 18 bp, Homo sapiens
aaaactagctccaaagtg

SEQ ID NO: 29832 - DNA, 17 bp, Homo sapiens
gctggctatgaggtacc

SEQ ID NO: 29833 - DNA, 18 bp, Homo sapiens
tgtgaatctccagaagct

SEQ ID NO: 29834 - DNA, 21 bp, Homo sapiens
aatcatctgtgtgtgccccta

SEQ ID NO: 29835 - DNA, 24 bp, Homo sapiens
atgttttccctggtgttgagggca

SEQ ID NO: 29836 - DNA, 17 bp, Homo sapiens
ttacaggtagcctgagc

SEQ ID NO: 29837 - DNA, 18 bp, Homo sapiens
agcctgtttatcttcacc

SEQ ID NO: 29838 - DNA, 23 bp, Homo sapiens
gataaagtttccagcttccagaa

SEQ ID NO: 29839 - DNA, 16 bp, Homo sapiens
tgctgagattacaggc

SEQ ID NO: 29840 - DNA, 19 bp, Homo sapiens
aggaaacttggccacagaa

SEQ ID NO: 29841 - DNA, 18 bp, Homo sapiens
accttaacaaccccaaat

SEQ ID NO: 29842 - DNA, 16 bp, Homo sapiens
cgtggactcttctgtg

SEQ ID NO: 29843 - DNA, 20 bp, Homo sapiens
gttcggggctgtcgccacca

SEQ ID NO: 29844 - DNA, 18 bp, Homo sapiens
tgtggcctcttgtcccca

SEQ ID NO: 29845 - DNA, 16 bp, Homo sapiens
tagcatgtagaccagg

SEQ ID NO: 29846 - DNA, 21 bp, Homo sapiens
aagcaaagaatgactctagaa

SEQ ID NO: 29847 - DNA, 18 bp, Homo sapiens
agcctccaagtcctgcca

SEQ ID NO: 29848 - DNA, 22 bp, Homo sapiens
aaggagaagcactgtctctttc

SEQ ID NO: 29849 - DNA, 18 bp, Homo sapiens
tgtacacttcacatctgg

SEQ ID NO: 29850 - DNA, 16 bp, Homo sapiens
actgccatgacaccta

SEQ ID NO: 29851 - DNA, 21 bp, Homo sapiens
ctggcatactggcatcagtaa

SEQ ID NO: 29852 - DNA, 19 bp, Homo sapiens
ggatcatgaaagacatgct

SEQ ID NO: 29853 - DNA, 16 bp, Homo sapiens
gtgacctttgggagaa

SEQ ID NO: 29854 - DNA, 17 bp, Homo sapiens
ctcaatgggctgctacg

SEQ ID NO: 29855 - DNA, 22 bp, Homo sapiens
ggtgttggccagggcttgacca

SEQ ID NO: 29856 - DNA, 17 bp, Homo sapiens
ctggtggattctgtatc

SEQ ID NO: 29857 - DNA, 23 bp, Homo sapiens
aggcacttcctgcatgacagcag

SEQ ID NO: 29858 - DNA, 16 bp, Homo sapiens
tacccagaagtgttct

SEQ ID NO: 29859 - DNA, 16 bp, Homo sapiens
agggagatctcgtagc

SEQ ID NO: 29860 - DNA, 18 bp, Homo sapiens
ttgaggatcatcattccc

SEQ ID NO: 29861 - DNA, 16 bp, Homo sapiens
cccttatgaagggaag

SEQ ID NO: 29862 - DNA, 19 bp, Homo sapiens
tgaatgaatgaagtcagga

SEQ ID NO: 29863 - DNA, 23 bp, Homo sapiens
aaaagctcaggacactgacctca

SEQ ID NO: 29864 - DNA, 22 bp, Homo sapiens
ctcaggggcagacaaggtggcc

SEQ ID NO: 29865 - DNA, 23 bp, Homo sapiens
tgttgattgcacactgatcagaa

SEQ ID NO: 29866 - DNA, 23 bp, Homo sapiens
tcagctactttagctggggagat

SEQ ID NO: 29867 - DNA, 16 bp, Homo sapiens
ctggcactgaattgta

SEQ ID NO: 29868 - DNA, 18 bp, Homo sapiens
gatttcttctgaccacac

SEQ ID NO: 29869 - DNA, 16 bp, Homo sapiens
ttgacgcaatcctgaa

SEQ ID NO: 29870 - DNA, 17 bp, Homo sapiens
ccccacccaggataaga

SEQ ID NO: 29871 - DNA, 16 bp, Homo sapiens
tgcctcagagctcttc

SEQ ID NO: 29872 - DNA, 19 bp, Homo sapiens
ttccagaacggtacagagg

SEQ ID NO: 29873 - DNA, 21 bp, Homo sapiens
aaggagttcacctggatgttg

SEQ ID NO: 29874 - DNA, 16 bp, Homo sapiens
ctgactgcgctgcctt

SEQ ID NO: 29875 - DNA, 16 bp, Homo sapiens
gcctgggcaacaaagc

SEQ ID NO: 29876 - DNA, 17 bp, Homo sapiens
ctgaccccaaatttgaa

SEQ ID NO: 29877 - DNA, 20 bp, Homo sapiens
ctggctgacagacaagctat

SEQ ID NO: 29878 - DNA, 21 bp, Homo sapiens
ctagatgggtgaccacactga

SEQ ID NO: 29879 - DNA, 23 bp, Homo sapiens
caaggcagggaccaatgccatca

SEQ ID NO: 29880 - DNA, 17 bp, Homo sapiens
taactgaactctctgtc

SEQ ID NO: 29881 - DNA, 18 bp, Homo sapiens
cgctgcctcgaagccttt

SEQ ID NO: 29882 - DNA, 19 bp, Homo sapiens
gaaggaattactcgctaag

SEQ ID NO: 29883 - DNA, 17 bp, Homo sapiens
tctgaatgcccttcaag

SEQ ID NO: 29884 - DNA, 20 bp, Homo sapiens
ctgggtcatgttcttttgct

SEQ ID NO: 29885 - DNA, 20 bp, Homo sapiens
gcaggactctctgttataga

SEQ ID NO: 29886 - DNA, 18 bp, Homo sapiens
ggcttggaaacctatgtt

SEQ ID NO: 29887 - DNA, 22 bp, Homo sapiens
tctctccactatagaatatcgt

SEQ ID NO: 29888 - DNA, 16 bp, Homo sapiens
gagaaaggcctttcat

SEQ ID NO: 29889 - DNA, 20 bp, Homo sapiens
taacaggtactgcattttga

SEQ ID NO: 29890 - DNA, 17 bp, Homo sapiens
aagctggtggtttctat

SEQ ID NO: 29891 - DNA, 19 bp, Homo sapiens
ctccttttcaggtgagaag

SEQ ID NO: 29892 - DNA, 19 bp, Homo sapiens
tgattttcactggagtaga

SEQ ID NO: 29893 - DNA, 16 bp, Homo sapiens
aactgtcacaggtgtc

SEQ ID NO: 29894 - DNA, 18 bp, Homo sapiens
aaaattgtggaagttggt

SEQ ID NO: 29895 - DNA, 19 bp, Homo sapiens
gcagaggaatcacatcttg

SEQ ID NO: 29896 - DNA, 19 bp, Homo sapiens
ttgtttcctcttttaaacc

SEQ ID NO: 29897 - DNA, 20 bp, Homo sapiens
actcaaagcagatgcttgaa

SEQ ID NO: 29898 - DNA, 19 bp, Homo sapiens
agatagatccattctttca

SEQ ID NO: 29899 - DNA, 16 bp, Homo sapiens
gtccatctcggggacc

SEQ ID NO: 29900 - DNA, 22 bp, Homo sapiens
ttctaaaatagaccaaatgtga

SEQ ID NO: 29901 - DNA, 16 bp, Homo sapiens
atgaggtgctgacctt

SEQ ID NO: 29902 - DNA, 24 bp, Homo sapiens
tgaggggaaaagggagggtccagg

SEQ ID NO: 29903 - DNA, 19 bp, Homo sapiens
ccaagatggcagcaatgag

SEQ ID NO: 29904 - DNA, 24 bp, Homo sapiens
cggcctcgcctctaagagagcagt

SEQ ID NO: 29905 - DNA, 16 bp, Homo sapiens
gacgagccatcggtca

SEQ ID NO: 29906 - DNA, 24 bp, Homo sapiens
agtgcctgcagggccgccgcctcg

SEQ ID NO: 29907 - DNA, 20 bp, Homo sapiens
ggctgggggtggagccagct

SEQ ID NO: 29908 - DNA, 22 bp, Homo sapiens
ccagtcgccgcggaagcgcctt

SEQ ID NO: 29909 - DNA, 19 bp, Homo sapiens
accagtgtctttggattct

SEQ ID NO: 29910 - DNA, 18 bp, Homo sapiens
accgctcccaaagtgaca

SEQ ID NO: 29911 - DNA, 20 bp, Homo sapiens
tcagttatagctcttcgcaa

SEQ ID NO: 29912 - DNA, 16 bp, Homo sapiens
agaaggccaaccggtg

SEQ ID NO: 29913 - DNA, 16 bp, Homo sapiens
tggctggtgtttgctt

SEQ ID NO: 29914 - DNA, 19 bp, Homo sapiens
tgaattgcacttaacatca

SEQ ID NO: 29915 - DNA, 20 bp, Homo sapiens
tgtcatggatcaaggaagga

SEQ ID NO: 29916 - DNA, 17 bp, Homo sapiens
gtagacctggaagttac

SEQ ID NO: 29917 - DNA, 23 bp, Homo sapiens
aagtaactaagtaagtaaacttt

SEQ ID NO: 29918 - DNA, 17 bp, Homo sapiens
cggttcccgtccattat

SEQ ID NO: 29919 - DNA, 22 bp, Homo sapiens
cttcgtcagggttttcatcaca

SEQ ID NO: 29920 - DNA, 17 bp, Homo sapiens
tgttgaagccctgtgag

SEQ ID NO: 29921 - DNA, 23 bp, Homo sapiens
ttcctttatccctgaagaatatg

SEQ ID NO: 29922 - DNA, 21 bp, Homo sapiens
gctataatctacctctccaca

SEQ ID NO: 29923 - DNA, 20 bp, Homo sapiens
ccaatgccgaaacacattgc

SEQ ID NO: 29924 - DNA, 20 bp, Homo sapiens
agagacagatacaaaaaaca

SEQ ID NO: 29925 - DNA, 18 bp, Homo sapiens
gtggagcggcaggaaggc

SEQ ID NO: 29926 - DNA, 18 bp, Homo sapiens
cacgtctggccaatgtca

SEQ ID NO: 29927 - DNA, 21 bp, Homo sapiens
cataaacactgatgttatcct

SEQ ID NO: 29928 - DNA, 18 bp, Homo sapiens
gttctcaatgctgaatgc

SEQ ID NO: 29929 - DNA, 20 bp, Homo sapiens
tccaactctgagtcaggacc

SEQ ID NO: 29930 - DNA, 16 bp, Homo sapiens
acttctgccgggccag

SEQ ID NO: 29931 - DNA, 16 bp, Homo sapiens
cctagctccttgcctt

SEQ ID NO: 29932 - DNA, 18 bp, Homo sapiens
ctgggggtggtggaagaa

SEQ ID NO: 29933 - DNA, 19 bp, Homo sapiens
catcctagaggtgacagtc

SEQ ID NO: 29934 - DNA, 17 bp, Homo sapiens
gcaagtcccttaagtaa

SEQ ID NO: 29935 - DNA, 17 bp, Homo sapiens
tagacgggcttatggat

SEQ ID NO: 29936 - DNA, 22 bp, Homo sapiens
aagaatgaaagactatcttgta

SEQ ID NO: 29937 - DNA, 22 bp, Homo sapiens
aagtaagtttctttcagagttg

SEQ ID NO: 29938 - DNA, 17 bp, Homo sapiens
gtgcagatcgcccagga

SEQ ID NO: 29939 - DNA, 23 bp, Homo sapiens
gacacacaggaaagcactcaaaa

SEQ ID NO: 29940 - DNA, 19 bp, Homo sapiens
agttcttcgtggcctgtac

SEQ ID NO: 29941 - DNA, 18 bp, Homo sapiens
agctcagcaggggcccta

SEQ ID NO: 29942 - DNA, 20 bp, Homo sapiens
gcagggaatcaaagattgaa

SEQ ID NO: 29943 - DNA, 24 bp, Homo sapiens
aactgcagaagcatggggtgtgta

SEQ ID NO: 29944 - DNA, 24 bp, Homo sapiens
actctctcattgccccttgcacca

SEQ ID NO: 29945 - DNA, 20 bp, Homo sapiens
caggagctgattgcacaagc

SEQ ID NO: 29946 - DNA, 19 bp, Homo sapiens
cagaatcatgtctggtgtg

SEQ ID NO: 29947 - DNA, 20 bp, Homo sapiens
aacttggaaaccacaaaaaa

SEQ ID NO: 29948 - DNA, 16 bp, Homo sapiens
ctcatgacgggatgtg

SEQ ID NO: 29949 - DNA, 24 bp, Homo sapiens
tttgatgtgtatttgtttttctag

SEQ ID NO: 29950 - DNA, 17 bp, Homo sapiens
gatacctgggatccaac

SEQ ID NO: 29951 - DNA, 16 bp, Homo sapiens
gtccctgtcccccttt

SEQ ID NO: 29952 - DNA, 16 bp, Homo sapiens
ctgccatgctggccca

SEQ ID NO: 29953 - DNA, 22 bp, Homo sapiens
gaatgtctgttttgcatacaca

SEQ ID NO: 29954 - DNA, 16 bp, Homo sapiens
ctcctggcctgcctca

SEQ ID NO: 29955 - DNA, 23 bp, Homo sapiens
tggggggtggagcaaggcctgtt

SEQ ID NO: 29956 - DNA, 21 bp, Homo sapiens
gcaaacattttttgagggcct

SEQ ID NO: 29957 - DNA, 16 bp, Homo sapiens
ggatgaggagagcggt

SEQ ID NO: 29958 - DNA, 21 bp, Homo sapiens
aaactgagaagcctatatatg

SEQ ID NO: 29959 - DNA, 16 bp, Homo sapiens
acctgccatagcaaga

SEQ ID NO: 29960 - DNA, 17 bp, Homo sapiens
gtgtgcctctctttgtc

SEQ ID NO: 29961 - DNA, 19 bp, Homo sapiens
ctctgatccattctgtgga

SEQ ID NO: 29962 - DNA, 22 bp, Homo sapiens
cttgataagtgcctctatacca

SEQ ID NO: 29963 - DNA, 16 bp, Homo sapiens
agctttccccagaagt

SEQ ID NO: 29964 - DNA, 19 bp, Homo sapiens
gaagtgcggctgagtgact

SEQ ID NO: 29965 - DNA, 23 bp, Homo sapiens
aatcagggccagcagcagctgca

SEQ ID NO: 29966 - DNA, 20 bp, Homo sapiens
caaaatgtatactctggcca

SEQ ID NO: 29967 - DNA, 23 bp, Homo sapiens
ggcttctgggtcctgcttagcct

SEQ ID NO: 29968 - DNA, 19 bp, Homo sapiens
ctctttcttacctgaagca

SEQ ID NO: 29969 - DNA, 24 bp, Homo sapiens
ccagcaacatgttactaaatcata

SEQ ID NO: 29970 - DNA, 18 bp, Homo sapiens
tggttgtcaatcaatgct

SEQ ID NO: 29971 - DNA, 23 bp, Homo sapiens
ctggtgttccaacccgttctgtg

SEQ ID NO: 29972 - DNA, 18 bp, Homo sapiens
ggtggtagctactatcat

SEQ ID NO: 29973 - DNA, 22 bp, Homo sapiens
tgcagttccagatgaaccatag

SEQ ID NO: 29974 - DNA, 21 bp, Homo sapiens
atgagcaccacccactgcata

SEQ ID NO: 29975 - DNA, 17 bp, Homo sapiens
agctgctgcctcttccg

SEQ ID NO: 29976 - DNA, 18 bp, Homo sapiens
cactgttccacttcactt

SEQ ID NO: 29977 - DNA, 22 bp, Homo sapiens
gtccccactggcttggagcccc

SEQ ID NO: 29978 - DNA, 21 bp, Homo sapiens
agtttcacccactcctaaaaa

SEQ ID NO: 29979 - DNA, 23 bp, Homo sapiens
ggactcgctcttcccgtctggcc

SEQ ID NO: 29980 - DNA, 17 bp, Homo sapiens
gacatgtatgcagagga

SEQ ID NO: 29981 - DNA, 23 bp, Homo sapiens
ctgatgcagtgcccagacgggcc

SEQ ID NO: 29982 - DNA, 24 bp, Homo sapiens
tacagtgacagagcagctgctgcg

SEQ ID NO: 29983 - DNA, 23 bp, Homo sapiens
gtggagccctggaggcagagggc

SEQ ID NO: 29984 - DNA, 19 bp, Homo sapiens
cgcttgcacaaactctcgg

SEQ ID NO: 29985 - DNA, 19 bp, Homo sapiens
acaccattcattatcagga

SEQ ID NO: 29986 - DNA, 23 bp, Homo sapiens
gaactcaagcgagctgactggct

SEQ ID NO: 29987 - DNA, 18 bp, Homo sapiens
ccaaaggtatctatggcc

SEQ ID NO: 29988 - DNA, 21 bp, Homo sapiens
tggccccagtgtggtctggat

SEQ ID NO: 29989 - DNA, 23 bp, Homo sapiens
ccaggttttgaggggccaggagg

SEQ ID NO: 29990 - DNA, 21 bp, Homo sapiens
gctgtatctgacaggaacctg

SEQ ID NO: 29991 - DNA, 24 bp, Homo sapiens
ctcttcctgggcataggtgatctc

SEQ ID NO: 29992 - DNA, 24 bp, Homo sapiens
tgaagggaggatgggctaaggcag

SEQ ID NO: 29993 - DNA, 20 bp, Homo sapiens
cagcaggagagcctcttact

SEQ ID NO: 29994 - DNA, 23 bp, Homo sapiens
ctcttcatggtcacctcctgcct

SEQ ID NO: 29995 - DNA, 22 bp, Homo sapiens
gctggtgagttggccctgggtc

SEQ ID NO: 29996 - DNA, 23 bp, Homo sapiens
aaggtgaggtgcacagagggtgg

SEQ ID NO: 29997 - DNA, 24 bp, Homo sapiens
tgttcgggagaaacacttcagggg

SEQ ID NO: 29998 - DNA, 21 bp, Homo sapiens
gatgcagggccccgggagggg

SEQ ID NO: 29999 - DNA, 22 bp, Homo sapiens
ctggtatgtcccactgggcgct

SEQ ID NO: 30000 - DNA, 23 bp, Homo sapiens
cataaacatgcctgggaggaccc

SEQ ID NO: 30001 - DNA, 16 bp, Homo sapiens
agatacatggggagtg

SEQ ID NO: 30002 - DNA, 21 bp, Homo sapiens
cttgctggcatcagactcaga

SEQ ID NO: 30003 - DNA, 17 bp, Homo sapiens
agagtggtcctcggaca

SEQ ID NO: 30004 - DNA, 17 bp, Homo sapiens
gatgaggaagaggcagc

SEQ ID NO: 30005 - DNA, 18 bp, Homo sapiens
gggcccacatacatccaa

SEQ ID NO: 30006 - DNA, 24 bp, Homo sapiens
ctgggaactcagggggcaagcacg

SEQ ID NO: 30007 - DNA, 23 bp, Homo sapiens
aacccctaatcccacctatccca

SEQ ID NO: 30008 - DNA, 16 bp, Homo sapiens
tcctggtctggaaact

SEQ ID NO: 30009 - DNA, 17 bp, Homo sapiens
atgggcccaggtctggg

SEQ ID NO: 30010 - DNA, 20 bp, Homo sapiens
gtccgagtctggtttaggaa

SEQ ID NO: 30011 - DNA, 17 bp, Homo sapiens
ctatgccaacagggaga

SEQ ID NO: 30012 - DNA, 23 bp, Homo sapiens
gagggggcagggtgacaggagga

SEQ ID NO: 30013 - DNA, 24 bp, Homo sapiens
ttggaacccgatacgtgtgccagt

SEQ ID NO: 30014 - DNA, 16 bp, Homo sapiens
tggaagggcacaggca

SEQ ID NO: 30015 - DNA, 18 bp, Homo sapiens
tgcacctctgggtgaaga

SEQ ID NO: 30016 - DNA, 16 bp, Homo sapiens
caagggagtcttgggg

SEQ ID NO: 30017 - DNA, 16 bp, Homo sapiens
ggagccggcaggcctg

SEQ ID NO: 30018 - DNA, 22 bp, Homo sapiens
ctgccctccaggagaatgacag

SEQ ID NO: 30019 - DNA, 17 bp, Homo sapiens
tcccagctgatctgaag

SEQ ID NO: 30020 - DNA, 17 bp, Homo sapiens
ccagcacccctctctgc

SEQ ID NO: 30021 - DNA, 16 bp, Homo sapiens
gatctctggggccata

SEQ ID NO: 30022 - DNA, 24 bp, Homo sapiens
tgatgtgccctgtcttgccctcag

SEQ ID NO: 30023 - DNA, 22 bp, Homo sapiens
gagcagggcagcaggtttctgt

SEQ ID NO: 30024 - DNA, 23 bp, Homo sapiens
tgggtgggagccagccaggggaa

SEQ ID NO: 30025 - DNA, 21 bp, Homo sapiens
cagggcattgtgggctgagca

SEQ ID NO: 30026 - DNA, 24 bp, Homo sapiens
tttcctgaggtacgaactccgcta

SEQ ID NO: 30027 - DNA, 17 bp, Homo sapiens
gaagaaggtcagcatac

SEQ ID NO: 30028 - DNA, 17 bp, Homo sapiens
catacagctgattgcca

SEQ ID NO: 30029 - DNA, 22 bp, Homo sapiens
ccccaaagtatggtctgtcctt

SEQ ID NO: 30030 - DNA, 19 bp, Homo sapiens
tctggaccagtctccatgt

SEQ ID NO: 30031 - DNA, 23 bp, Homo sapiens
aagtaggcgtggctcatatctga

SEQ ID NO: 30032 - DNA, 22 bp, Homo sapiens
aaagcagacctccccaagtaga

SEQ ID NO: 30033 - DNA, 23 bp, Homo sapiens
acaaaaccctgaacaccacctga

SEQ ID NO: 30034 - DNA, 23 bp, Homo sapiens
agtcctgagatgaggcagcttcc

SEQ ID NO: 30035 - DNA, 24 bp, Homo sapiens
catatctatccagcaaggagctga

SEQ ID NO: 30036 - DNA, 16 bp, Homo sapiens
gagggagatcccatca

SEQ ID NO: 30037 - DNA, 24 bp, Homo sapiens
gaggctctctcagctgacaggcag

SEQ ID NO: 30038 - DNA, 18 bp, Homo sapiens
gcatctccaggcaggtcc

SEQ ID NO: 30039 - DNA, 21 bp, Homo sapiens
gctctgacagcagagggtgga

SEQ ID NO: 30040 - DNA, 19 bp, Homo sapiens
gcttccctagagatattct

SEQ ID NO: 30041 - DNA, 23 bp, Homo sapiens
ctggctgcagctgcgcagcgaac

SEQ ID NO: 30042 - DNA, 23 bp, Homo sapiens
gtccagtggcaagttcgagatca

SEQ ID NO: 30043 - DNA, 19 bp, Homo sapiens
tccctccctgtgactgtgg

SEQ ID NO: 30044 - DNA, 16 bp, Homo sapiens
tcaggtccaaggtaaa

SEQ ID NO: 30045 - DNA, 24 bp, Homo sapiens
ggaaagaagagagaataggagtca

SEQ ID NO: 30046 - DNA, 17 bp, Homo sapiens
tggtagaagaagccttg

SEQ ID NO: 30047 - DNA, 16 bp, Homo sapiens
tatacagtaggggcac

SEQ ID NO: 30048 - DNA, 17 bp, Homo sapiens
accaacctcaatcagca

SEQ ID NO: 30049 - DNA, 19 bp, Homo sapiens
ggcacttggactgcaatgc

SEQ ID NO: 30050 - DNA, 17 bp, Homo sapiens
gaagaggaccaagaaca

SEQ ID NO: 30051 - DNA, 16 bp, Homo sapiens
gaccatgctagctccc

SEQ ID NO: 30052 - DNA, 20 bp, Homo sapiens
ggatgacagaatagataaga

SEQ ID NO: 30053 - DNA, 16 bp, Homo sapiens
ttctcttcctcttcgc

SEQ ID NO: 30054 - DNA, 18 bp, Homo sapiens
ccctggaaggaaggagtt

SEQ ID NO: 30055 - DNA, 18 bp, Homo sapiens
catttcgtgacttgaagt

SEQ ID NO: 30056 - DNA, 18 bp, Homo sapiens
agccttgggattagtctc

SEQ ID NO: 30057 - DNA, 17 bp, Homo sapiens
ggtagctgtgaacagta

SEQ ID NO: 30058 - DNA, 21 bp, Homo sapiens
ggtaccccatctgggagaact

SEQ ID NO: 30059 - DNA, 17 bp, Homo sapiens
gtgggaagaatgaggaa

SEQ ID NO: 30060 - DNA, 23 bp, Homo sapiens
gaccccacagttctctcgctgcc

SEQ ID NO: 30061 - DNA, 17 bp, Homo sapiens
agaagggtcagagttgg

SEQ ID NO: 30062 - DNA, 22 bp, Homo sapiens
aggtgaccacagccccgggtac

SEQ ID NO: 30063 - DNA, 17 bp, Homo sapiens
cagcagggagcagctta

SEQ ID NO: 30064 - DNA, 19 bp, Homo sapiens
ggctggtaagaactttctt

SEQ ID NO: 30065 - DNA, 19 bp, Homo sapiens
tgcccactggagatctccc

SEQ ID NO: 30066 - DNA, 24 bp, Homo sapiens
aatctgaccctgtgcccaggatcc

SEQ ID NO: 30067 - DNA, 21 bp, Homo sapiens
ggagttgataacaggtctctt

SEQ ID NO: 30068 - DNA, 20 bp, Homo sapiens
cttgtgcacagaaggactta

SEQ ID NO: 30069 - DNA, 21 bp, Homo sapiens
gtctgtgggcatttgttgctt

SEQ ID NO: 30070 - DNA, 24 bp, Homo sapiens
accccaaacttgcactggagggag

SEQ ID NO: 30071 - DNA, 20 bp, Homo sapiens
acatagacactttcactcct

SEQ ID NO: 30072 - DNA, 16 bp, Homo sapiens
tcgtcctgggcagccc

SEQ ID NO: 30073 - DNA, 20 bp, Homo sapiens
gagagactaagataccagtt

SEQ ID NO: 30074 - DNA, 24 bp, Homo sapiens
gctctatcctgttgctgggaagcg

SEQ ID NO: 30075 - DNA, 21 bp, Homo sapiens
gtaaacggtagcgagatcgcg

SEQ ID NO: 30076 - DNA, 24 bp, Homo sapiens
atctccgaccgcctggggattcgg

SEQ ID NO: 30077 - DNA, 17 bp, Homo sapiens
cacgagctccagggacc

SEQ ID NO: 30078 - DNA, 20 bp, Homo sapiens
gccccgacgccgggccaccg

SEQ ID NO: 30079 - DNA, 24 bp, Homo sapiens
gcggctttggtgcggccggggctt

SEQ ID NO: 30080 - DNA, 24 bp, Homo sapiens
gggcccgaggagggaccctggagc

SEQ ID NO: 30081 - DNA, 23 bp, Homo sapiens
tctccgagccccgccccactcgc

SEQ ID NO: 30082 - DNA, 24 bp, Homo sapiens
tcaacggccccacctaccaaggtc

SEQ ID NO: 30083 - DNA, 19 bp, Homo sapiens
cagccgtcggcccgcaagg

SEQ ID NO: 30084 - DNA, 24 bp, Homo sapiens
tggagaccgccaccgagaccggtg

SEQ ID NO: 30085 - DNA, 21 bp, Homo sapiens
gagaggggcggggccctgacc

SEQ ID NO: 30086 - DNA, 16 bp, Homo sapiens
gcccaggacggcgctg

SEQ ID NO: 30087 - DNA, 20 bp, Homo sapiens
gggcggcgaggggcggggcc

SEQ ID NO: 30088 - DNA, 24 bp, Homo sapiens
gtccaccgccagtctcctgcctgg

SEQ ID NO: 30089 - DNA, 19 bp, Homo sapiens
gtgggccgaagtctgaccc

SEQ ID NO: 30090 - DNA, 16 bp, Homo sapiens
acagagcgaaccaaga

SEQ ID NO: 30091 - DNA, 24 bp, Homo sapiens
cgctctgcatctagtgctgggcct

SEQ ID NO: 30092 - DNA, 22 bp, Homo sapiens
cccagaggtgacgtgcaggaag

SEQ ID NO: 30093 - DNA, 24 bp, Homo sapiens
gttttcttcttactctactcccct

SEQ ID NO: 30094 - DNA, 16 bp, Homo sapiens
cctaggacccggtgca

SEQ ID NO: 30095 - DNA, 23 bp, Homo sapiens
ctccaagccttactccccggcct

SEQ ID NO: 30096 - DNA, 17 bp, Homo sapiens
acaggggagggaagcac

SEQ ID NO: 30097 - DNA, 23 bp, Homo sapiens
caatccactgccatggctcagtc

SEQ ID NO: 30098 - DNA, 19 bp, Homo sapiens
ggaccttgaacaagttgta

SEQ ID NO: 30099 - DNA, 24 bp, Homo sapiens
catgccctgtggccctcacttcca

SEQ ID NO: 30100 - DNA, 16 bp, Homo sapiens
gaaggagaagggctgg

SEQ ID NO: 30101 - DNA, 17 bp, Homo sapiens
cttgccccaacaataca

SEQ ID NO: 30102 - DNA, 17 bp, Homo sapiens
aaggaggctgggttcca

SEQ ID NO: 30103 - DNA, 18 bp, Homo sapiens
caggcactaccccagcac

SEQ ID NO: 30104 - DNA, 16 bp, Homo sapiens
ggcctgggaggaacac

SEQ ID NO: 30105 - DNA, 16 bp, Homo sapiens
cacaggatctgcttta

SEQ ID NO: 30106 - DNA, 23 bp, Homo sapiens
tgggtgggcacacagacaggggc

SEQ ID NO: 30107 - DNA, 22 bp, Homo sapiens
acagtctcagatacctgtgaag

SEQ ID NO: 30108 - DNA, 17 bp, Homo sapiens
taggtaggaatggttgg

SEQ ID NO: 30109 - DNA, 24 bp, Homo sapiens
ctcagagaggactcctttgcccct

SEQ ID NO: 30110 - DNA, 19 bp, Homo sapiens
tttagctctgtccagggaa

SEQ ID NO: 30111 - DNA, 16 bp, Homo sapiens
tcttgcctggggacca

SEQ ID NO: 30112 - DNA, 20 bp, Homo sapiens
gtctggggtgcttgtgttgt

SEQ ID NO: 30113 - DNA, 23 bp, Homo sapiens
gtcctgctgtaccacccacattg

SEQ ID NO: 30114 - DNA, 19 bp, Homo sapiens
agtaagatcagtgcaatga

SEQ ID NO: 30115 - DNA, 20 bp, Homo sapiens
gaaacgaactacgcatccca

SEQ ID NO: 30116 - DNA, 18 bp, Homo sapiens
ccaaaaggacatagcgtg

SEQ ID NO: 30117 - DNA, 16 bp, Homo sapiens
atttcctacctgggaa

SEQ ID NO: 30118 - DNA, 18 bp, Homo sapiens
ttcgccctagaacagcag

SEQ ID NO: 30119 - DNA, 24 bp, Homo sapiens
ttgtccttgagacttcattcccca

SEQ ID NO: 30120 - DNA, 23 bp, Homo sapiens
aggaacccaggaggatcagaggc

SEQ ID NO: 30121 - DNA, 20 bp, Homo sapiens
agagctgaagcagaagatcg

SEQ ID NO: 30122 - DNA, 19 bp, Homo sapiens
taacccaagcccccactga

SEQ ID NO: 30123 - DNA, 20 bp, Homo sapiens
tcagttgagttgcttataaa

SEQ ID NO: 30124 - DNA, 20 bp, Homo sapiens
tcctggcagcggtaggtgga

SEQ ID NO: 30125 - DNA, 22 bp, Homo sapiens
gagtgagatggaggctggggca

SEQ ID NO: 30126 - DNA, 21 bp, Homo sapiens
agaagggcttgagggcccggt

SEQ ID NO: 30127 - DNA, 23 bp, Homo sapiens
tgaggcctagactggccctctcc

SEQ ID NO: 30128 - DNA, 21 bp, Homo sapiens
ggtaggccacacactggtcca

SEQ ID NO: 30129 - DNA, 16 bp, Homo sapiens
ctcttgcctccagcct

SEQ ID NO: 30130 - DNA, 17 bp, Homo sapiens
ctgtaggtttgggagct

SEQ ID NO: 30131 - DNA, 18 bp, Homo sapiens
cagcacgcctgccatgtt

SEQ ID NO: 30132 - DNA, 18 bp, Homo sapiens
aagtggctcctagcccta

SEQ ID NO: 30133 - DNA, 16 bp, Homo sapiens
ctgactgacccagtgg

SEQ ID NO: 30134 - DNA, 19 bp, Homo sapiens
cagaatgaggaaagatcac

SEQ ID NO: 30135 - DNA, 16 bp, Homo sapiens
actatgtccacactgg

SEQ ID NO: 30136 - DNA, 16 bp, Homo sapiens
ggcgtcggttggggtg

SEQ ID NO: 30137 - DNA, 18 bp, Homo sapiens
gttcacacacacaaaaca

SEQ ID NO: 30138 - DNA, 17 bp, Homo sapiens
ttggtagtagtaagcag

SEQ ID NO: 30139 - DNA, 22 bp, Homo sapiens
cctcatgctgacagtaccctct

SEQ ID NO: 30140 - DNA, 21 bp, Homo sapiens
agcctctatttacattttccc

SEQ ID NO: 30141 - DNA, 24 bp, Homo sapiens
agatagaaatcattgctgactacg

SEQ ID NO: 30142 - DNA, 24 bp, Homo sapiens
catccatccagggaaggctgagga

SEQ ID NO: 30143 - DNA, 18 bp, Homo sapiens
ccatgtagctggggctgc

SEQ ID NO: 30144 - DNA, 17 bp, Homo sapiens
gacaggactgcctccca

SEQ ID NO: 30145 - DNA, 19 bp, Homo sapiens
atgcacacacctgatatgc

SEQ ID NO: 30146 - DNA, 24 bp, Homo sapiens
tatgaaagggtttgccaagaaaag

SEQ ID NO: 30147 - DNA, 16 bp, Homo sapiens
cctggcagcagcacta

SEQ ID NO: 30148 - DNA, 16 bp, Homo sapiens
ggcctagcttgcaatg

SEQ ID NO: 30149 - DNA, 17 bp, Homo sapiens
gtcagctcttgtaggta

SEQ ID NO: 30150 - DNA, 20 bp, Homo sapiens
ttttcttcaccctctcccca

SEQ ID NO: 30151 - DNA, 17 bp, Homo sapiens
catcccggtaagtccaa

SEQ ID NO: 30152 - DNA, 22 bp, Homo sapiens
ctggtttgccatccgaggggta

SEQ ID NO: 30153 - DNA, 19 bp, Homo sapiens
gttgggcaggtggagtgga

SEQ ID NO: 30154 - DNA, 16 bp, Homo sapiens
gaaaacctcatgactg

SEQ ID NO: 30155 - DNA, 16 bp, Homo sapiens
ggggagggagaactag

SEQ ID NO: 30156 - DNA, 23 bp, Homo sapiens
caatttccactggcgtgattgga

SEQ ID NO: 30157 - DNA, 23 bp, Homo sapiens
gagccagctccgggctctgctgg

SEQ ID NO: 30158 - DNA, 24 bp, Homo sapiens
ctcagaagagcagaaggcctactt

SEQ ID NO: 30159 - DNA, 18 bp, Homo sapiens
cacatgggagaaaatcaa

SEQ ID NO: 30160 - DNA, 17 bp, Homo sapiens
gccctcagagaagccta

SEQ ID NO: 30161 - DNA, 20 bp, Homo sapiens
actcaaaaccttttgctttg

SEQ ID NO: 30162 - DNA, 16 bp, Homo sapiens
agcctgggaatcccag

SEQ ID NO: 30163 - DNA, 23 bp, Homo sapiens
cttgagccttgttatcttcatgg

SEQ ID NO: 30164 - DNA, 17 bp, Homo sapiens
tcccctggcccttgatt

SEQ ID NO: 30165 - DNA, 24 bp, Homo sapiens
gatggccttacaggggccggaagt

SEQ ID NO: 30166 - DNA, 20 bp, Homo sapiens
ccgactgggggctcccggac

SEQ ID NO: 30167 - DNA, 24 bp, Homo sapiens
tgacgcagtgtcttgggcgctaac

SEQ ID NO: 30168 - DNA, 17 bp, Homo sapiens
ggtgggcacgatgctgc

SEQ ID NO: 30169 - DNA, 24 bp, Homo sapiens
cttgccgcgttctcgccgccgcag

SEQ ID NO: 30170 - DNA, 16 bp, Homo sapiens
ggcggcggggacccgg

SEQ ID NO: 30171 - DNA, 24 bp, Homo sapiens
ctggccccggggccccgcggttgg

SEQ ID NO: 30172 - DNA, 24 bp, Homo sapiens
gcggaaacgggttcactagaggag

SEQ ID NO: 30173 - DNA, 22 bp, Homo sapiens
ctccgggcccggccagtacctg

SEQ ID NO: 30174 - DNA, 18 bp, Homo sapiens
caagacttccagattagg

SEQ ID NO: 30175 - DNA, 22 bp, Homo sapiens
gttaccattgatatacttggca

SEQ ID NO: 30176 - DNA, 18 bp, Homo sapiens
gcactgaggtatctccta

SEQ ID NO: 30177 - DNA, 22 bp, Homo sapiens
gattattggttttgggggagga

SEQ ID NO: 30178 - DNA, 17 bp, Homo sapiens
gctcacccaaggttctc

SEQ ID NO: 30179 - DNA, 23 bp, Homo sapiens
agctaattaacctcttccatata

SEQ ID NO: 30180 - DNA, 19 bp, Homo sapiens
ttccctgaagcttggtcca

SEQ ID NO: 30181 - DNA, 23 bp, Homo sapiens
tgcctattcccaaacttgaagac

SEQ ID NO: 30182 - DNA, 20 bp, Homo sapiens
ctgaacttgcagatgtacaa

SEQ ID NO: 30183 - DNA, 18 bp, Homo sapiens
gatggccagttcaggtaa

SEQ ID NO: 30184 - DNA, 20 bp, Homo sapiens
ccattttcaaaactcttgca

SEQ ID NO: 30185 - DNA, 23 bp, Homo sapiens
atctcattccaggttttagggct

SEQ ID NO: 30186 - DNA, 23 bp, Homo sapiens
gcttgtatgtttattctgtttgt

SEQ ID NO: 30187 - DNA, 24 bp, Homo sapiens
tcgccatgaacctaaaaatcatgt

SEQ ID NO: 30188 - DNA, 16 bp, Homo sapiens
tggagggctctgggag

SEQ ID NO: 30189 - DNA, 18 bp, Homo sapiens
aaacagaacaattttgca

SEQ ID NO: 30190 - DNA, 16 bp, Homo sapiens
tgctggtctcaccaaa

SEQ ID NO: 30191 - DNA, 23 bp, Homo sapiens
cagctggttgctctggacaaaca

SEQ ID NO: 30192 - DNA, 16 bp, Homo sapiens
aggaacacactcagcc

SEQ ID NO: 30193 - DNA, 17 bp, Homo sapiens
cggagtctcgagcagat

SEQ ID NO: 30194 - DNA, 19 bp, Homo sapiens
tctctggaggttgatgcca

SEQ ID NO: 30195 - DNA, 22 bp, Homo sapiens
ttatactcagattttgggtcag

SEQ ID NO: 30196 - DNA, 24 bp, Homo sapiens
tcttcaaattttatttttagggac

SEQ ID NO: 30197 - DNA, 16 bp, Homo sapiens
gtcttcagaaaccgga

SEQ ID NO: 30198 - DNA, 21 bp, Homo sapiens
accctggtttgatatgtacct

SEQ ID NO: 30199 - DNA, 18 bp, Homo sapiens
gatagtgtcactttttgc

SEQ ID NO: 30200 - DNA, 21 bp, Homo sapiens
catttatggctttcaatcctg

SEQ ID NO: 30201 - DNA, 16 bp, Homo sapiens
taggccccataccagg

SEQ ID NO: 30202 - DNA, 17 bp, Homo sapiens
catgactgtttctgcca

SEQ ID NO: 30203 - DNA, 18 bp, Homo sapiens
aacgagttgagttgaaaa

SEQ ID NO: 30204 - DNA, 21 bp, Homo sapiens
cagaagtgttccacttgaacc

SEQ ID NO: 30205 - DNA, 16 bp, Homo sapiens
ggaccaggaggtgtct

SEQ ID NO: 30206 - DNA, 17 bp, Homo sapiens
ttcctctctgtcctggt

SEQ ID NO: 30207 - DNA, 19 bp, Homo sapiens
gaggggctcacaatgttcc

SEQ ID NO: 30208 - DNA, 19 bp, Homo sapiens
atgtcccagtattttcggc

SEQ ID NO: 30209 - DNA, 16 bp, Homo sapiens
actcgggggcggggct

SEQ ID NO: 30210 - DNA, 20 bp, Homo sapiens
cactgatgacaaggccagac

SEQ ID NO: 30211 - DNA, 17 bp, Homo sapiens
cagcttctgcctgagct

SEQ ID NO: 30212 - DNA, 23 bp, Homo sapiens
tatctttgatgtcctggatcaag

SEQ ID NO: 30213 - DNA, 17 bp, Homo sapiens
cagagacagaacactgc

SEQ ID NO: 30214 - DNA, 20 bp, Homo sapiens
gaagtacattctctcagaca

SEQ ID NO: 30215 - DNA, 24 bp, Homo sapiens
tgccatccccatgcagcatattgt

SEQ ID NO: 30216 - DNA, 17 bp, Homo sapiens
aaccgagacatctgggc

SEQ ID NO: 30217 - DNA, 21 bp, Homo sapiens
cagtagagccatccttggcga

SEQ ID NO: 30218 - DNA, 21 bp, Homo sapiens
ctgaggaaagtggactcggca

SEQ ID NO: 30219 - DNA, 25 bp, Homo sapiens
aaatacttcattaaaaaatctgagc

SEQ ID NO: 30220 - DNA, 24 bp, Homo sapiens
ttaaggaccttgtccacttgtccc

SEQ ID NO: 30221 - DNA, 22 bp, Homo sapiens
gtagagtcagtggtagctggct

SEQ ID NO: 30222 - DNA, 20 bp, Homo sapiens
tcctttaacctcattatcgc

SEQ ID NO: 30223 - DNA, 17 bp, Homo sapiens
atgccagtctttaaggc

SEQ ID NO: 30224 - DNA, 16 bp, Homo sapiens
ggtgatggtgtggcag

SEQ ID NO: 30225 - DNA, 16 bp, Homo sapiens
tggacgcagtcaatag

SEQ ID NO: 30226 - DNA, 18 bp, Homo sapiens
cctgccgtcactccacag

SEQ ID NO: 30227 - DNA, 16 bp, Homo sapiens
aactgcgtcagggctc

SEQ ID NO: 30228 - DNA, 22 bp, Homo sapiens
cagaaactcaacttcgagctga

SEQ ID NO: 30229 - DNA, 16 bp, Homo sapiens
ggtggccactgtctgc

SEQ ID NO: 30230 - DNA, 22 bp, Homo sapiens
aagtttgatgccaccatgaaaa

SEQ ID NO: 30231 - DNA, 16 bp, Homo sapiens
gccgggcggatggtct

SEQ ID NO: 30232 - DNA, 21 bp, Homo sapiens
agaattcctgaagaagcaaaa

SEQ ID NO: 30233 - DNA, 24 bp, Homo sapiens
gaagctcaccagcactgtgcctgg

SEQ ID NO: 30234 - DNA, 23 bp, Homo sapiens
ccttcctgcggcagtacgggcag

SEQ ID NO: 30235 - DNA, 20 bp, Homo sapiens
cattgctgcttctttggtca

SEQ ID NO: 30236 - DNA, 23 bp, Homo sapiens
attcaagcacggccgcactgaga

SEQ ID NO: 30237 - DNA, 19 bp, Homo sapiens
ttgcttacccaagcactga

SEQ ID NO: 30238 - DNA, 17 bp, Homo sapiens
ctttgtcagggagccct

SEQ ID NO: 30239 - DNA, 19 bp, Homo sapiens
gatggattaaacctagtga

SEQ ID NO: 30240 - DNA, 16 bp, Homo sapiens
caagtaccatggccag

SEQ ID NO: 30241 - DNA, 24 bp, Homo sapiens
tagcttgagctgctctgaaggtta

SEQ ID NO: 30242 - DNA, 17 bp, Homo sapiens
ctttggctgctgccaga

SEQ ID NO: 30243 - DNA, 20 bp, Homo sapiens
cactctcaaggatgctgtga

SEQ ID NO: 30244 - DNA, 19 bp, Homo sapiens
caggacattgtggtttatc

SEQ ID NO: 30245 - DNA, 24 bp, Homo sapiens
ctgaggtccttttccatcctgaga

SEQ ID NO: 30246 - DNA, 17 bp, Homo sapiens
acaggggcaaagccccc

SEQ ID NO: 30247 - DNA, 16 bp, Homo sapiens
gacacttgtttgctct

SEQ ID NO: 30248 - DNA, 18 bp, Homo sapiens
aagagacattgcagccta

SEQ ID NO: 30249 - DNA, 23 bp, Homo sapiens
tacctggaccctgcatacgggca

SEQ ID NO: 30250 - DNA, 16 bp, Homo sapiens
taaggccttctccaca

SEQ ID NO: 30251 - DNA, 16 bp, Homo sapiens
cccagcagtgaacctt

SEQ ID NO: 30252 - DNA, 20 bp, Homo sapiens
tagcttttcatctgcccaga

SEQ ID NO: 30253 - DNA, 20 bp, Homo sapiens
tatgctgttcatgacaactg

SEQ ID NO: 30254 - DNA, 21 bp, Homo sapiens
gggagtttctccaatgtgtgg

SEQ ID NO: 30255 - DNA, 19 bp, Homo sapiens
caaatccatcaaaagttaa

SEQ ID NO: 30256 - DNA, 24 bp, Homo sapiens
accgctgggctccctctcaccctg

SEQ ID NO: 30257 - DNA, 21 bp, Homo sapiens
ccccatcccgcccacgggctc

SEQ ID NO: 30258 - DNA, 24 bp, Homo sapiens
ttggcccagggccccctgctccga

SEQ ID NO: 30259 - DNA, 23 bp, Homo sapiens
gtatgtcaaggccgtgacccgtg

SEQ ID NO: 30260 - DNA, 23 bp, Homo sapiens
tgggggcccctaggctggctcct

SEQ ID NO: 30261 - DNA, 21 bp, Homo sapiens
atggcagcggggttcgggcga

SEQ ID NO: 30262 - DNA, 19 bp, Homo sapiens
aactgataattggcttatt

SEQ ID NO: 30263 - DNA, 18 bp, Homo sapiens
tgtatgctgtgatctcca

SEQ ID NO: 30264 - DNA, 22 bp, Homo sapiens
aaactatgagtatggtcaaacc

SEQ ID NO: 30265 - DNA, 17 bp, Homo sapiens
gaaccgaacatatacca

SEQ ID NO: 30266 - DNA, 23 bp, Homo sapiens
tatctgattaatgtttaacttat

SEQ ID NO: 30267 - DNA, 24 bp, Homo sapiens
ttatttacaaacatattccaaaca

SEQ ID NO: 30268 - DNA, 18 bp, Homo sapiens
atttctcgttttcattgg

SEQ ID NO: 30269 - DNA, 16 bp, Homo sapiens
tatctgtggacagtgg

SEQ ID NO: 30270 - DNA, 22 bp, Homo sapiens
tgaaccaggattaggatttagt

SEQ ID NO: 30271 - DNA, 18 bp, Homo sapiens
tgtgtagtgaactcttga

SEQ ID NO: 30272 - DNA, 20 bp, Homo sapiens
ctctctggcaaatttacgag

SEQ ID NO: 30273 - DNA, 22 bp, Homo sapiens
tcaaggatttaagtccccacaa

SEQ ID NO: 30274 - DNA, 24 bp, Homo sapiens
tccctctttaaaatgtatatacct

SEQ ID NO: 30275 - DNA, 23 bp, Homo sapiens
ccttgttatccagttttaacttt

SEQ ID NO: 30276 - DNA, 24 bp, Homo sapiens
tatattttgaaatccagatagttt

SEQ ID NO: 30277 - DNA, 16 bp, Homo sapiens
tcaagctactgctcgt

SEQ ID NO: 30278 - DNA, 19 bp, Homo sapiens
gctcttctaattaggggga

SEQ ID NO: 30279 - DNA, 20 bp, Homo sapiens
tgataaaactggtgaagtag

SEQ ID NO: 30280 - DNA, 25 bp, Homo sapiens
taaaaatataaagaaagcttaccac

SEQ ID NO: 30281 - DNA, 27 bp, Homo sapiens
ttacattttttacaagattatgtaatc

SEQ ID NO: 30282 - DNA, 22 bp, Homo sapiens
aaaaaaatgactgagtagagtt

SEQ ID NO: 30283 - DNA, 18 bp, Homo sapiens
tcttctagtatccagtcc

SEQ ID NO: 30284 - DNA, 17 bp, Homo sapiens
tgtagtctgagcaggaa

SEQ ID NO: 30285 - DNA, 19 bp, Homo sapiens
cacacattccagagaactg

SEQ ID NO: 30286 - DNA, 16 bp, Homo sapiens
accagttagaagaagg

SEQ ID NO: 30287 - DNA, 21 bp, Homo sapiens
agtaagaaaaattgtggaact

SEQ ID NO: 30288 - DNA, 19 bp, Homo sapiens
acaacaaattgaccaactc

SEQ ID NO: 30289 - DNA, 16 bp, Homo sapiens
tacctttgtcttcctg

SEQ ID NO: 30290 - DNA, 19 bp, Homo sapiens
catggttcacaaaaaagac

SEQ ID NO: 30291 - DNA, 20 bp, Homo sapiens
tgcactctatacctagatgc

SEQ ID NO: 30292 - DNA, 21 bp, Homo sapiens
ttcctgttctaacttgatttt

SEQ ID NO: 30293 - DNA, 16 bp, Homo sapiens
gtccaagacctcctac

SEQ ID NO: 30294 - DNA, 18 bp, Homo sapiens
agccagaacacatgtaga

SEQ ID NO: 30295 - DNA, 17 bp, Homo sapiens
aacccctgtacatccat

SEQ ID NO: 30296 - DNA, 25 bp, Homo sapiens
tattgaaagcaattaaaatagttta

SEQ ID NO: 30297 - DNA, 22 bp, Homo sapiens
agttaggtagttaattttctaa

SEQ ID NO: 30298 - DNA, 22 bp, Homo sapiens
tgttgaaacattttgatactgt

SEQ ID NO: 30299 - DNA, 20 bp, Homo sapiens
ctttcctttttttttcttct

SEQ ID NO: 30300 - DNA, 17 bp, Homo sapiens
tagtgaagaattggctt

SEQ ID NO: 30301 - DNA, 19 bp, Homo sapiens
gtgttcctctttaaagaaa

SEQ ID NO: 30302 - DNA, 21 bp, Homo sapiens
tcctcattctaacttagaggc

SEQ ID NO: 30303 - DNA, 19 bp, Homo sapiens
gtcattctccccaaatact

SEQ ID NO: 30304 - DNA, 25 bp, Homo sapiens
aatagttattttttcattttgaatt

SEQ ID NO: 30305 - DNA, 16 bp, Homo sapiens
cccttcttaagtgtga

SEQ ID NO: 30306 - DNA, 26 bp, Homo sapiens
aaaaatgacttgattttttaatgtca

SEQ ID NO: 30307 - DNA, 24 bp, Homo sapiens
tttcaatgctaaatatcccaatat

SEQ ID NO: 30308 - DNA, 19 bp, Homo sapiens
atgatcaacaaaagaagaa

SEQ ID NO: 30309 - DNA, 19 bp, Homo sapiens
ttatgatactttcttggca

SEQ ID NO: 30310 - DNA, 25 bp, Homo sapiens
aaaacagaaaagtttttacatttga

SEQ ID NO: 30311 - DNA, 16 bp, Homo sapiens
acatcagagcctgctc

SEQ ID NO: 30312 - DNA, 27 bp, Homo sapiens
taattttagatatttaaaaatatttaa

SEQ ID NO: 30313 - DNA, 18 bp, Homo sapiens
tccacatcttctgaccat

SEQ ID NO: 30314 - DNA, 20 bp, Homo sapiens
cagtcaaaatttaatcacta

SEQ ID NO: 30315 - DNA, 28 bp, Homo sapiens
caattaagaaaaaatatacaaagatgtt

SEQ ID NO: 30316 - DNA, 16 bp, Homo sapiens
acagaacctggagcag

SEQ ID NO: 30317 - DNA, 20 bp, Homo sapiens
ccttaactgtagtggtttaa

SEQ ID NO: 30318 - DNA, 23 bp, Homo sapiens
aaaagaaaggagatgagtatatt

SEQ ID NO: 30319 - DNA, 22 bp, Homo sapiens
agtttttgaaaatcactgaact

SEQ ID NO: 30320 - DNA, 19 bp, Homo sapiens
tccatatactaggtacgtg

SEQ ID NO: 30321 - DNA, 20 bp, Homo sapiens
ggagctttaggatctggatc

SEQ ID NO: 30322 - DNA, 19 bp, Homo sapiens
tcatttgtaaaatgtaggt

SEQ ID NO: 30323 - DNA, 16 bp, Homo sapiens
tctgaattcctggggt

SEQ ID NO: 30324 - DNA, 18 bp, Homo sapiens
catgtgttatttgccgat

SEQ ID NO: 30325 - DNA, 28 bp, Homo sapiens
agtaattttgcaatttataattaaaata

SEQ ID NO: 30326 - DNA, 16 bp, Homo sapiens
tggcacgttctgatcc

SEQ ID NO: 30327 - DNA, 21 bp, Homo sapiens
gctttatttttactccaactt

SEQ ID NO: 30328 - DNA, 17 bp, Homo sapiens
ttgtggaagcagatacc

SEQ ID NO: 30329 - DNA, 22 bp, Homo sapiens
caaataggcgtgactgtattcc

SEQ ID NO: 30330 - DNA, 19 bp, Homo sapiens
cgaagacaattcctctagt

SEQ ID NO: 30331 - DNA, 16 bp, Homo sapiens
tgatccctgttttagg

SEQ ID NO: 30332 - DNA, 16 bp, Homo sapiens
ttgaaaccagctccgt

SEQ ID NO: 30333 - DNA, 18 bp, Homo sapiens
tgatgctggctcaaaaaa

SEQ ID NO: 30334 - DNA, 22 bp, Homo sapiens
tataaagattatgaacccatat

SEQ ID NO: 30335 - DNA, 18 bp, Homo sapiens
ccagcgatgttcagatac

SEQ ID NO: 30336 - DNA, 21 bp, Homo sapiens
agaaacacactgaacatacaa

SEQ ID NO: 30337 - DNA, 19 bp, Homo sapiens
gttttaattggtgacggag

SEQ ID NO: 30338 - DNA, 22 bp, Homo sapiens
agaaaagtaacagtatttttcc

SEQ ID NO: 30339 - DNA, 20 bp, Homo sapiens
aaagctctttgtgctaatcc

SEQ ID NO: 30340 - DNA, 23 bp, Homo sapiens
cagtttcttgttgctgtacatca

SEQ ID NO: 30341 - DNA, 17 bp, Homo sapiens
tacaagtagctttccga

SEQ ID NO: 30342 - DNA, 21 bp, Homo sapiens
aggcagatattgtgtgtttta

SEQ ID NO: 30343 - DNA, 23 bp, Homo sapiens
aaatattaaatgaaaatgagtgt

SEQ ID NO: 30344 - DNA, 17 bp, Homo sapiens
agctgctggtgctgttg

SEQ ID NO: 30345 - DNA, 20 bp, Homo sapiens
aaccacattatcttcttgct

SEQ ID NO: 30346 - DNA, 19 bp, Homo sapiens
gccctggaaaggaaaactt

SEQ ID NO: 30347 - DNA, 17 bp, Homo sapiens
gcactttgagaggccta

SEQ ID NO: 30348 - DNA, 19 bp, Homo sapiens
ctagttcaactttcattgc

SEQ ID NO: 30349 - DNA, 22 bp, Homo sapiens
caacatagcaagaccccgtcac

SEQ ID NO: 30350 - DNA, 21 bp, Homo sapiens
agaagcataataggtatttcg

SEQ ID NO: 30351 - DNA, 26 bp, Homo sapiens
tttaagttttctcaataaatatcctt

SEQ ID NO: 30352 - DNA, 17 bp, Homo sapiens
gcacagcatcagtagct

SEQ ID NO: 30353 - DNA, 19 bp, Homo sapiens
ttatgctggctgaaatggc

SEQ ID NO: 30354 - DNA, 18 bp, Homo sapiens
ggcatccctcattagttt

SEQ ID NO: 30355 - DNA, 20 bp, Homo sapiens
gcttgggaggttgattctgg

SEQ ID NO: 30356 - DNA, 18 bp, Homo sapiens
atattctctctccttgca

SEQ ID NO: 30357 - DNA, 18 bp, Homo sapiens
gctggagatattgcaaat

SEQ ID NO: 30358 - DNA, 17 bp, Homo sapiens
tattgctactagggaca

SEQ ID NO: 30359 - DNA, 22 bp, Homo sapiens
gatttaatacagaatatcctgt

SEQ ID NO: 30360 - DNA, 22 bp, Homo sapiens
taacattcttctttctattaat

SEQ ID NO: 30361 - DNA, 19 bp, Homo sapiens
tcacaaaatcaggttttgg

SEQ ID NO: 30362 - DNA, 16 bp, Homo sapiens
tcacgggctacaataa

SEQ ID NO: 30363 - DNA, 24 bp, Homo sapiens
gattcggttttatattacaacaca

SEQ ID NO: 30364 - DNA, 21 bp, Homo sapiens
ttgtgttctagttattcaata

SEQ ID NO: 30365 - DNA, 25 bp, Homo sapiens
agtatttatgtactaaagatattta

SEQ ID NO: 30366 - DNA, 18 bp, Homo sapiens
ttgttttcactggaaaaa

SEQ ID NO: 30367 - DNA, 20 bp, Homo sapiens
acttcacaaattcaaagact

SEQ ID NO: 30368 - DNA, 18 bp, Homo sapiens
agagttaagcaaaagtat

SEQ ID NO: 30369 - DNA, 17 bp, Homo sapiens
gaacatgtaagtgccgc

SEQ ID NO: 30370 - DNA, 19 bp, Homo sapiens
gagggtcttttccagtttc

SEQ ID NO: 30371 - DNA, 19 bp, Homo sapiens
aactcctttttgtttcata

SEQ ID NO: 30372 - DNA, 16 bp, Homo sapiens
aagacgcaaatgagca

SEQ ID NO: 30373 - DNA, 20 bp, Homo sapiens
atgaaagatttcaaatcctc

SEQ ID NO: 30374 - DNA, 25 bp, Homo sapiens
gacccttggaaataatatttatctt

SEQ ID NO: 30375 - DNA, 18 bp, Homo sapiens
acttctgaacgaaatgga

SEQ ID NO: 30376 - DNA, 24 bp, Homo sapiens
taattagtgatatatggagaacac

SEQ ID NO: 30377 - DNA, 20 bp, Homo sapiens
aagtagctgggactgcaggc

SEQ ID NO: 30378 - DNA, 19 bp, Homo sapiens
ccactttcatctcaccaat

SEQ ID NO: 30379 - DNA, 17 bp, Homo sapiens
agaaactgggtctcact

SEQ ID NO: 30380 - DNA, 25 bp, Homo sapiens
tcatgtattattaattttgagtctc

SEQ ID NO: 30381 - DNA, 17 bp, Homo sapiens
ccctctttggcctctga

SEQ ID NO: 30382 - DNA, 21 bp, Homo sapiens
gggaatacatggagtgattca

SEQ ID NO: 30383 - DNA, 24 bp, Homo sapiens
catggccccaattctgagcattaa

SEQ ID NO: 30384 - DNA, 20 bp, Homo sapiens
ttcagctaaattggaataca

SEQ ID NO: 30385 - DNA, 17 bp, Homo sapiens
tgcttttccctgtaaag

SEQ ID NO: 30386 - DNA, 23 bp, Homo sapiens
cataattgaaaaatcaaggtttt

SEQ ID NO: 30387 - DNA, 19 bp, Homo sapiens
gagaacggaatttttctct

SEQ ID NO: 30388 - DNA, 19 bp, Homo sapiens
tgtggtaatttaagtccta

SEQ ID NO: 30389 - DNA, 25 bp, Homo sapiens
tgcagattaagtttacagtatttat

SEQ ID NO: 30390 - DNA, 18 bp, Homo sapiens
acagttccgattaggccc

SEQ ID NO: 30391 - DNA, 16 bp, Homo sapiens
cacctgacttaccctt

SEQ ID NO: 30392 - DNA, 19 bp, Homo sapiens
ccatttcctggagaaacat

SEQ ID NO: 30393 - DNA, 21 bp, Homo sapiens
cagtaacatttacaagttagg

SEQ ID NO: 30394 - DNA, 24 bp, Homo sapiens
atccaacagaaagagaagatgatt

SEQ ID NO: 30395 - DNA, 23 bp, Homo sapiens
atattctatttgcatctcaagga

SEQ ID NO: 30396 - DNA, 18 bp, Homo sapiens
attatttccttcaagggt

SEQ ID NO: 30397 - DNA, 22 bp, Homo sapiens
tgttgcaacttttaaaatgatt

SEQ ID NO: 30398 - DNA, 18 bp, Homo sapiens
agggtagcacatgattat

SEQ ID NO: 30399 - DNA, 19 bp, Homo sapiens
accttttagttagagtcag

SEQ ID NO: 30400 - DNA, 18 bp, Homo sapiens
cccattcatcaaaaggtc

SEQ ID NO: 30401 - DNA, 19 bp, Homo sapiens
ttgttttgttttttccctt

SEQ ID NO: 30402 - DNA, 16 bp, Homo sapiens
aaagaaagcaagctga

SEQ ID NO: 30403 - DNA, 20 bp, Homo sapiens
cccattttacgtgttggtgc

SEQ ID NO: 30404 - DNA, 20 bp, Homo sapiens
ggactaatacacaaaacttt

SEQ ID NO: 30405 - DNA, 19 bp, Homo sapiens
tttttagctaagtgtttgg

SEQ ID NO: 30406 - DNA, 26 bp, Homo sapiens
caaacctcttttctttataaattacc

SEQ ID NO: 30407 - DNA, 16 bp, Homo sapiens
agagtctgcaatgggg

SEQ ID NO: 30408 - DNA, 17 bp, Homo sapiens
catgcttgccttgctat

SEQ ID NO: 30409 - DNA, 21 bp, Homo sapiens
attaggtcttgaaaagtcagg

SEQ ID NO: 30410 - DNA, 18 bp, Homo sapiens
ctggttttgtttgtttgt

SEQ ID NO: 30411 - DNA, 23 bp, Homo sapiens
cattccttttttaatttttccac

SEQ ID NO: 30412 - DNA, 20 bp, Homo sapiens
acatgattcattttacccca

SEQ ID NO: 30413 - DNA, 18 bp, Homo sapiens
gcagtcaatgaagctcat

SEQ ID NO: 30414 - DNA, 24 bp, Homo sapiens
ccaatcagttagaattaaatcctg

SEQ ID NO: 30415 - DNA, 22 bp, Homo sapiens
ctttctcttatttgtgtgtata

SEQ ID NO: 30416 - DNA, 22 bp, Homo sapiens
tgatgttggacagctagtggaa

SEQ ID NO: 30417 - DNA, 20 bp, Homo sapiens
acctaatcatcatttgtgtt

SEQ ID NO: 30418 - DNA, 21 bp, Homo sapiens
gttgtctacaatcatactggt

SEQ ID NO: 30419 - DNA, 21 bp, Homo sapiens
aaaaacttttcctgtaacagt

SEQ ID NO: 30420 - DNA, 18 bp, Homo sapiens
agtgtggagaattcacaa

SEQ ID NO: 30421 - DNA, 22 bp, Homo sapiens
gagtggtagatctttatatttt

SEQ ID NO: 30422 - DNA, 18 bp, Homo sapiens
tctgcaacatcacaggag

SEQ ID NO: 30423 - DNA, 20 bp, Homo sapiens
agatactcctttgtgtctcc

SEQ ID NO: 30424 - DNA, 22 bp, Homo sapiens
tgacattcatatggtgatcatt

SEQ ID NO: 30425 - DNA, 20 bp, Homo sapiens
ggaacatccagaatgtgcct

SEQ ID NO: 30426 - DNA, 23 bp, Homo sapiens
atatatttaatgtgtgctttaga

SEQ ID NO: 30427 - DNA, 17 bp, Homo sapiens
acagagcactttggcgt

SEQ ID NO: 30428 - DNA, 20 bp, Homo sapiens
cagttaagcaaatactgttt

SEQ ID NO: 30429 - DNA, 22 bp, Homo sapiens
aatacctgctttgattgaaaat

SEQ ID NO: 30430 - DNA, 20 bp, Homo sapiens
cacactaaaacagaaaaaat

SEQ ID NO: 30431 - DNA, 17 bp, Homo sapiens
acttggaaaaattccca

SEQ ID NO: 30432 - DNA, 23 bp, Homo sapiens
acttagaacctgtattttaatat

SEQ ID NO: 30433 - DNA, 16 bp, Homo sapiens
tcctttaccttgtgta

SEQ ID NO: 30434 - DNA, 25 bp, Homo sapiens
gtatatatgtattttttaactattg

SEQ ID NO: 30435 - DNA, 19 bp, Homo sapiens
ccaaaagagagttttccct

SEQ ID NO: 30436 - DNA, 23 bp, Homo sapiens
gatatttttccaaagcttaaact

SEQ ID NO: 30437 - DNA, 25 bp, Homo sapiens
tcacagttttataatatcaacaata

SEQ ID NO: 30438 - DNA, 20 bp, Homo sapiens
gagcaatttagaagacttct

SEQ ID NO: 30439 - DNA, 17 bp, Homo sapiens
ttggtttggatcagact

SEQ ID NO: 30440 - DNA, 22 bp, Homo sapiens
ataaatatttgttttattttca

SEQ ID NO: 30441 - DNA, 20 bp, Homo sapiens
tcatatctacagtacagcca

SEQ ID NO: 30442 - DNA, 20 bp, Homo sapiens
tagtgacagttataatctct

SEQ ID NO: 30443 - DNA, 27 bp, Homo sapiens
atattattatttcacagaaaaaaacac

SEQ ID NO: 30444 - DNA, 16 bp, Homo sapiens
aggcgagtaaccaagt

SEQ ID NO: 30445 - DNA, 25 bp, Homo sapiens
ttttctattaagcgtttttaataag

SEQ ID NO: 30446 - DNA, 16 bp, Homo sapiens
cagacggtttggctgt

SEQ ID NO: 30447 - DNA, 19 bp, Homo sapiens
tgggaaaatgtcatgtgct

SEQ ID NO: 30448 - DNA, 19 bp, Homo sapiens
tatgtgtatataaacattt

SEQ ID NO: 30449 - DNA, 21 bp, Homo sapiens
ctccattcttttatgaaacca

SEQ ID NO: 30450 - DNA, 23 bp, Homo sapiens
ttgaaatcccgatgaatatattt

SEQ ID NO: 30451 - DNA, 16 bp, Homo sapiens
aacctgttcctgatga

SEQ ID NO: 30452 - DNA, 21 bp, Homo sapiens
agaatctgtaaagccattaaa

SEQ ID NO: 30453 - DNA, 19 bp, Homo sapiens
ccatcctcaagacaacaaa

SEQ ID NO: 30454 - DNA, 21 bp, Homo sapiens
gcaattgaagaatgctgtaat

SEQ ID NO: 30455 - DNA, 16 bp, Homo sapiens
tcccaaaaggcaatta

SEQ ID NO: 30456 - DNA, 19 bp, Homo sapiens
actcattaactatcatcag

SEQ ID NO: 30457 - DNA, 16 bp, Homo sapiens
ctttctagtgacaggt

SEQ ID NO: 30458 - DNA, 18 bp, Homo sapiens
tccttgcatcttactact

SEQ ID NO: 30459 - DNA, 18 bp, Homo sapiens
ttcagttttcaaccatca

SEQ ID NO: 30460 - DNA, 17 bp, Homo sapiens
aatgtttttcaggcagt

SEQ ID NO: 30461 - DNA, 18 bp, Homo sapiens
gaaatgtactgaactcac

SEQ ID NO: 30462 - DNA, 18 bp, Homo sapiens
tccaaaactaggacctgt

SEQ ID NO: 30463 - DNA, 19 bp, Homo sapiens
ttgcctaacaaaattagtt

SEQ ID NO: 30464 - DNA, 19 bp, Homo sapiens
gcctaatgaagatttttga

SEQ ID NO: 30465 - DNA, 21 bp, Homo sapiens
tcatagattcttccatggaga

SEQ ID NO: 30466 - DNA, 23 bp, Homo sapiens
cttattttattctattcattaga

SEQ ID NO: 30467 - DNA, 16 bp, Homo sapiens
cccattacccatccat

SEQ ID NO: 30468 - DNA, 21 bp, Homo sapiens
tctctccaaggagtttctttg

SEQ ID NO: 30469 - DNA, 17 bp, Homo sapiens
cccatccacagagaagt

SEQ ID NO: 30470 - DNA, 21 bp, Homo sapiens
tttcccatttgaagagataga

SEQ ID NO: 30471 - DNA, 18 bp, Homo sapiens
taatggggaagaaaatca

SEQ ID NO: 30472 - DNA, 19 bp, Homo sapiens
agcttgttttctgatggca

SEQ ID NO: 30473 - DNA, 21 bp, Homo sapiens
ttctttctcaaattgtatgta

SEQ ID NO: 30474 - DNA, 23 bp, Homo sapiens
aataattattaattttttaaaac

SEQ ID NO: 30475 - DNA, 16 bp, Homo sapiens
tccccagcaaataagt

SEQ ID NO: 30476 - DNA, 19 bp, Homo sapiens
tcatttatggcagaaatga

SEQ ID NO: 30477 - DNA, 16 bp, Homo sapiens
catgtgtgcccagaga

SEQ ID NO: 30478 - DNA, 24 bp, Homo sapiens
tgttttcattttatttcttgaacc

SEQ ID NO: 30479 - DNA, 18 bp, Homo sapiens
gttgagtggcagttatca

SEQ ID NO: 30480 - DNA, 21 bp, Homo sapiens
gaagtttacctaaggagagaa

SEQ ID NO: 30481 - DNA, 25 bp, Homo sapiens
aatttcttttcttaatgtagataaa

SEQ ID NO: 30482 - DNA, 17 bp, Homo sapiens
aaccagaggactgtcct

SEQ ID NO: 30483 - DNA, 18 bp, Homo sapiens
caaaaggaaacatttacc

SEQ ID NO: 30484 - DNA, 20 bp, Homo sapiens
gcaacttatttccagggagt

SEQ ID NO: 30485 - DNA, 21 bp, Homo sapiens
agaattatgctaattatgcaa

SEQ ID NO: 30486 - DNA, 18 bp, Homo sapiens
aaattgggttgcaaattc

SEQ ID NO: 30487 - DNA, 22 bp, Homo sapiens
tgatatcttgctgcatattttt

SEQ ID NO: 30488 - DNA, 20 bp, Homo sapiens
ctagtaacaaagacattgtc

SEQ ID NO: 30489 - DNA, 18 bp, Homo sapiens
tgcttttctctttctgtt

SEQ ID NO: 30490 - DNA, 24 bp, Homo sapiens
ctaaagttttagagggaaatacac

SEQ ID NO: 30491 - DNA, 16 bp, Homo sapiens
ttggatgctgctagga

SEQ ID NO: 30492 - DNA, 22 bp, Homo sapiens
aaattattaagcattgcatatg

SEQ ID NO: 30493 - DNA, 18 bp, Homo sapiens
ggaagtgaagatctggac

SEQ ID NO: 30494 - DNA, 21 bp, Homo sapiens
aatagactgagttatattaga

SEQ ID NO: 30495 - DNA, 24 bp, Homo sapiens
atggggaaaacttttttgtcactt

SEQ ID NO: 30496 - DNA, 18 bp, Homo sapiens
tcggtaaactaatctgcc

SEQ ID NO: 30497 - DNA, 24 bp, Homo sapiens
tataatattgatgtggtctttatt

SEQ ID NO: 30498 - DNA, 18 bp, Homo sapiens
gctggcattaaaggcctc

SEQ ID NO: 30499 - DNA, 23 bp, Homo sapiens
ttcctggacataaataatgaaga

SEQ ID NO: 30500 - DNA, 19 bp, Homo sapiens
tgcttaccacaataggaca

SEQ ID NO: 30501 - DNA, 23 bp, Homo sapiens
tgagtgcatataatagtcatgaa

SEQ ID NO: 30502 - DNA, 19 bp, Homo sapiens
agtgtcagagagttaaata

SEQ ID NO: 30503 - DNA, 18 bp, Homo sapiens
ggatcctttgttcagccc

SEQ ID NO: 30504 - DNA, 28 bp, Homo sapiens
ctatgtattataaatcagttataaatct

SEQ ID NO: 30505 - DNA, 17 bp, Homo sapiens
tggatattacgcatgat

SEQ ID NO: 30506 - DNA, 16 bp, Homo sapiens
aagagcatcatacgct

SEQ ID NO: 30507 - DNA, 19 bp, Homo sapiens
acttgtttaaaagcaaatt

SEQ ID NO: 30508 - DNA, 16 bp, Homo sapiens
agcctcttgtacttcc

SEQ ID NO: 30509 - DNA, 24 bp, Homo sapiens
tccttttacttcattatgctatag

SEQ ID NO: 30510 - DNA, 18 bp, Homo sapiens
gttggccatgtaggtttt

SEQ ID NO: 30511 - DNA, 20 bp, Homo sapiens
ttgttgttgtcttctagcat

SEQ ID NO: 30512 - DNA, 18 bp, Homo sapiens
tttagcatggatacatct

SEQ ID NO: 30513 - DNA, 21 bp, Homo sapiens
ttctatggcatgttgtgctag

SEQ ID NO: 30514 - DNA, 18 bp, Homo sapiens
tcaggattccacttagtg

SEQ ID NO: 30515 - DNA, 21 bp, Homo sapiens
atatgttgtttcttaaaacct

SEQ ID NO: 30516 - DNA, 16 bp, Homo sapiens
ggctgcaataatgccg

SEQ ID NO: 30517 - DNA, 26 bp, Homo sapiens
aaaattcattgtaattaagatgtatc

SEQ ID NO: 30518 - DNA, 22 bp, Homo sapiens
ttatttcttgcctgaataaaac

SEQ ID NO: 30519 - DNA, 18 bp, Homo sapiens
tttctgaagaacggtttt

SEQ ID NO: 30520 - DNA, 16 bp, Homo sapiens
agctctcaaactggaa

SEQ ID NO: 30521 - DNA, 22 bp, Homo sapiens
tgaagttaatttccaaagcggc

SEQ ID NO: 30522 - DNA, 22 bp, Homo sapiens
tactgccactatgtcttcatca

SEQ ID NO: 30523 - DNA, 21 bp, Homo sapiens
tcaggagcttggagccaaggg

SEQ ID NO: 30524 - DNA, 20 bp, Homo sapiens
aaagcagttctagatacagc

SEQ ID NO: 30525 - DNA, 20 bp, Homo sapiens
tcagagtaagtctttccagt

SEQ ID NO: 30526 - DNA, 16 bp, Homo sapiens
ttaccagggatgcaca

SEQ ID NO: 30527 - DNA, 20 bp, Homo sapiens
gtggatcaagttgatgaaga

SEQ ID NO: 30528 - DNA, 25 bp, Homo sapiens
taaccataacattacagtataattt

SEQ ID NO: 30529 - DNA, 17 bp, Homo sapiens
catcagtctgttgtggc

SEQ ID NO: 30530 - DNA, 16 bp, Homo sapiens
gtccacagtagcactg

SEQ ID NO: 30531 - DNA, 20 bp, Homo sapiens
aaggaagtgcctcaaatgtg

SEQ ID NO: 30532 - DNA, 22 bp, Homo sapiens
acaaatgtgaaaatacaccttg

SEQ ID NO: 30533 - DNA, 18 bp, Homo sapiens
tcgtgtttctctcaatag

SEQ ID NO: 30534 - DNA, 25 bp, Homo sapiens
aactgataatttgttttcaacttta

SEQ ID NO: 30535 - DNA, 24 bp, Homo sapiens
tctaatttctactgtgatatctgg

SEQ ID NO: 30536 - DNA, 19 bp, Homo sapiens
tggatgattccatatgaaa

SEQ ID NO: 30537 - DNA, 19 bp, Homo sapiens
gttcttaaaatgctaaaca

SEQ ID NO: 30538 - DNA, 17 bp, Homo sapiens
agttcttgaagctagaa

SEQ ID NO: 30539 - DNA, 23 bp, Homo sapiens
tactttcattaagcttgaaaaaa

SEQ ID NO: 30540 - DNA, 24 bp, Homo sapiens
tgagaattcaatcaatggaacacc

SEQ ID NO: 30541 - DNA, 20 bp, Homo sapiens
tcttgaatatattcattggg

SEQ ID NO: 30542 - DNA, 20 bp, Homo sapiens
tttgggactctcatcttact

SEQ ID NO: 30543 - DNA, 19 bp, Homo sapiens
agctcaattaacatacctg

SEQ ID NO: 30544 - DNA, 23 bp, Homo sapiens
atttttttaatgtactttttttc

SEQ ID NO: 30545 - DNA, 22 bp, Homo sapiens
ttattcaaatttaacaggatat

SEQ ID NO: 30546 - DNA, 16 bp, Homo sapiens
tgccacaaaagggccc

SEQ ID NO: 30547 - DNA, 18 bp, Homo sapiens
tgcatgtggatcaagact

SEQ ID NO: 30548 - DNA, 22 bp, Homo sapiens
gtctccaggaagtgttattata

SEQ ID NO: 30549 - DNA, 22 bp, Homo sapiens
cagatttaaagtgaggactgaa

SEQ ID NO: 30550 - DNA, 26 bp, Homo sapiens
atatttaaaatagtttgcatatcctg

SEQ ID NO: 30551 - DNA, 17 bp, Homo sapiens
acttacgaagcaaaagg

SEQ ID NO: 30552 - DNA, 22 bp, Homo sapiens
tttttaattaacattttcagag

SEQ ID NO: 30553 - DNA, 18 bp, Homo sapiens
tcagtctagtggtaactt

SEQ ID NO: 30554 - DNA, 20 bp, Homo sapiens
cttcgaaatcatctgacaca

SEQ ID NO: 30555 - DNA, 16 bp, Homo sapiens
ggtccttggaccgtac

SEQ ID NO: 30556 - DNA, 22 bp, Homo sapiens
caatgcagatcctatattaaaa

SEQ ID NO: 30557 - DNA, 23 bp, Homo sapiens
taattacttaaaatgtatgagta

SEQ ID NO: 30558 - DNA, 22 bp, Homo sapiens
ctgattcacatcggtaaaggat

SEQ ID NO: 30559 - DNA, 18 bp, Homo sapiens
acactgctaagacatttt

SEQ ID NO: 30560 - DNA, 17 bp, Homo sapiens
aagggctgaccagtttg

SEQ ID NO: 30561 - DNA, 21 bp, Homo sapiens
caacaagcgaaacttcaatat

SEQ ID NO: 30562 - DNA, 20 bp, Homo sapiens
accctaaaagaaaaacacaa

SEQ ID NO: 30563 - DNA, 19 bp, Homo sapiens
ttaactttggctgagctaa

SEQ ID NO: 30564 - DNA, 16 bp, Homo sapiens
acccaagtaggcatac

SEQ ID NO: 30565 - DNA, 24 bp, Homo sapiens
agatggtggagggtgctatgacat

SEQ ID NO: 30566 - DNA, 19 bp, Homo sapiens
gaggttatattacttgcca

SEQ ID NO: 30567 - DNA, 18 bp, Homo sapiens
tctccaactgtattaagc

SEQ ID NO: 30568 - DNA, 19 bp, Homo sapiens
caagtcattctttggtctt

SEQ ID NO: 30569 - DNA, 16 bp, Homo sapiens
ttcaccccaaatcact

SEQ ID NO: 30570 - DNA, 20 bp, Homo sapiens
cggttactgacatagtcaat

SEQ ID NO: 30571 - DNA, 20 bp, Homo sapiens
aggaacaaattgatgctacc

SEQ ID NO: 30572 - DNA, 22 bp, Homo sapiens
tttttgggacgataatatagct

SEQ ID NO: 30573 - DNA, 16 bp, Homo sapiens
tctgtattggcagaaa

SEQ ID NO: 30574 - DNA, 22 bp, Homo sapiens
tcaggttagaaaacaatgtaaa

SEQ ID NO: 30575 - DNA, 17 bp, Homo sapiens
tggagattggatgattg

SEQ ID NO: 30576 - DNA, 19 bp, Homo sapiens
taaacccgatttccattta

SEQ ID NO: 30577 - DNA, 18 bp, Homo sapiens
gcaaccatttaccaacct

SEQ ID NO: 30578 - DNA, 21 bp, Homo sapiens
cttccttcatcatctttcagt

SEQ ID NO: 30579 - DNA, 17 bp, Homo sapiens
gcatcaaagtaacatgg

SEQ ID NO: 30580 - DNA, 20 bp, Homo sapiens
tgcacatttagatttacctc

SEQ ID NO: 30581 - DNA, 17 bp, Homo sapiens
ccttgacatctgcttcc

SEQ ID NO: 30582 - DNA, 26 bp, Homo sapiens
aaatttattttaattacaggttggta

SEQ ID NO: 30583 - DNA, 21 bp, Homo sapiens
tgaagtgactctgtatatagt

SEQ ID NO: 30584 - DNA, 18 bp, Homo sapiens
ccacgttaccttatccca

SEQ ID NO: 30585 - DNA, 18 bp, Homo sapiens
cacctacaagccttttca

SEQ ID NO: 30586 - DNA, 20 bp, Homo sapiens
tctggatacagcatggaagc

SEQ ID NO: 30587 - DNA, 18 bp, Homo sapiens
aaaggtgtttcacaaagg

SEQ ID NO: 30588 - DNA, 24 bp, Homo sapiens
ttactattgttatagatttgtata

SEQ ID NO: 30589 - DNA, 20 bp, Homo sapiens
agggcaggtgaaagaattgg

SEQ ID NO: 30590 - DNA, 23 bp, Homo sapiens
aactgctaaaaattgtatttcta

SEQ ID NO: 30591 - DNA, 16 bp, Homo sapiens
acacaacattgctcct

SEQ ID NO: 30592 - DNA, 19 bp, Homo sapiens
tgttcagaatggttcaacc

SEQ ID NO: 30593 - DNA, 21 bp, Homo sapiens
tccgcgaatactatcgattta

SEQ ID NO: 30594 - DNA, 16 bp, Homo sapiens
aaattcccttccctgc

SEQ ID NO: 30595 - DNA, 18 bp, Homo sapiens
tgagtagcattacaagct

SEQ ID NO: 30596 - DNA, 19 bp, Homo sapiens
aggttaaatgagatcacaa

SEQ ID NO: 30597 - DNA, 21 bp, Homo sapiens
acagtaagcatggttattatt

SEQ ID NO: 30598 - DNA, 24 bp, Homo sapiens
gaagttaacataagtatagacata

SEQ ID NO: 30599 - DNA, 17 bp, Homo sapiens
ccccagcagcggaaaat

SEQ ID NO: 30600 - DNA, 19 bp, Homo sapiens
tgcaggtgcctgccttgta

SEQ ID NO: 30601 - DNA, 16 bp, Homo sapiens
ctggcttctacatagc

SEQ ID NO: 30602 - DNA, 24 bp, Homo sapiens
tcataggtttgtgtgtattattat

SEQ ID NO: 30603 - DNA, 19 bp, Homo sapiens
gaagagcatgtaaaagaca

SEQ ID NO: 30604 - DNA, 19 bp, Homo sapiens
acctcatttttcttctggt

SEQ ID NO: 30605 - DNA, 22 bp, Homo sapiens
tacctaaagaaaatacagctcc

SEQ ID NO: 30606 - DNA, 21 bp, Homo sapiens
agaggtatactgctgattact

SEQ ID NO: 30607 - DNA, 22 bp, Homo sapiens
taattcagtacttactctatca

SEQ ID NO: 30608 - DNA, 16 bp, Homo sapiens
gaccatgcctcagggt

SEQ ID NO: 30609 - DNA, 20 bp, Homo sapiens
aatagggcaagagagaaaac

SEQ ID NO: 30610 - DNA, 16 bp, Homo sapiens
cacagcatcccgacaa

SEQ ID NO: 30611 - DNA, 21 bp, Homo sapiens
tttttaagtgtttgttttcat

SEQ ID NO: 30612 - DNA, 19 bp, Homo sapiens
cttgagaatgtctagacca

SEQ ID NO: 30613 - DNA, 16 bp, Homo sapiens
tttagcatttgcgggt

SEQ ID NO: 30614 - DNA, 16 bp, Homo sapiens
cagcaggcaaaggagc

SEQ ID NO: 30615 - DNA, 22 bp, Homo sapiens
aggaatttatgccagatacaat

SEQ ID NO: 30616 - DNA, 22 bp, Homo sapiens
aagtcatttttcagaaaaaaaa

SEQ ID NO: 30617 - DNA, 22 bp, Homo sapiens
attactgtaaaatggttccaaa

SEQ ID NO: 30618 - DNA, 22 bp, Homo sapiens
actgacatttgaataattcgta

SEQ ID NO: 30619 - DNA, 22 bp, Homo sapiens
atgtatcctacagatgattctg

SEQ ID NO: 30620 - DNA, 18 bp, Homo sapiens
ttgcattgcttcctgtat

SEQ ID NO: 30621 - DNA, 20 bp, Homo sapiens
cctatttctcacttcaaagg

SEQ ID NO: 30622 - DNA, 21 bp, Homo sapiens
tccttcatgtttcgatctatc

SEQ ID NO: 30623 - DNA, 20 bp, Homo sapiens
ggggaaaataagaaaaatgt

SEQ ID NO: 30624 - DNA, 21 bp, Homo sapiens
gtttaatttcatcaccttgat

SEQ ID NO: 30625 - DNA, 21 bp, Homo sapiens
ttgtttgaagtcatacaggaa

SEQ ID NO: 30626 - DNA, 21 bp, Homo sapiens
tttaatcattatatcgtgagg

SEQ ID NO: 30627 - DNA, 21 bp, Homo sapiens
tccgagaaaggaatgctggtc

SEQ ID NO: 30628 - DNA, 26 bp, Homo sapiens
taaaattttatttttctgctagaaac

SEQ ID NO: 30629 - DNA, 21 bp, Homo sapiens
tccataaacaaatcctgtttc

SEQ ID NO: 30630 - DNA, 21 bp, Homo sapiens
agagtggttgtcctagtttat

SEQ ID NO: 30631 - DNA, 21 bp, Homo sapiens
tgtcactttctcccattttat

SEQ ID NO: 30632 - DNA, 29 bp, Homo sapiens
atttgtatatactatatataatacttata

SEQ ID NO: 30633 - DNA, 22 bp, Homo sapiens
attacacagcattataacattt

SEQ ID NO: 30634 - DNA, 19 bp, Homo sapiens
taactgcaggagttgatga

SEQ ID NO: 30635 - DNA, 23 bp, Homo sapiens
agagttcatagttaacagaataa

SEQ ID NO: 30636 - DNA, 18 bp, Homo sapiens
tgtggcacatggatggat

SEQ ID NO: 30637 - DNA, 21 bp, Homo sapiens
tgtataatggggagatgaagg

SEQ ID NO: 30638 - DNA, 22 bp, Homo sapiens
atctttacatgatatagtacac

SEQ ID NO: 30639 - DNA, 16 bp, Homo sapiens
gcaaccagcgaacagc

SEQ ID NO: 30640 - DNA, 24 bp, Homo sapiens
tatgttatatgattcattacaatt

SEQ ID NO: 30641 - DNA, 18 bp, Homo sapiens
cagcttaccatgtctttt

SEQ ID NO: 30642 - DNA, 20 bp, Homo sapiens
gacgccaacttaaagaataa

SEQ ID NO: 30643 - DNA, 21 bp, Homo sapiens
atgatgattacataggttgag

SEQ ID NO: 30644 - DNA, 18 bp, Homo sapiens
gggcctgagtaaatctgc

SEQ ID NO: 30645 - DNA, 25 bp, Homo sapiens
gaattttctttcttcttaattttaa

SEQ ID NO: 30646 - DNA, 21 bp, Homo sapiens
cccttatcatgaagtcacagt

SEQ ID NO: 30647 - DNA, 18 bp, Homo sapiens
acacatctcaattcagac

SEQ ID NO: 30648 - DNA, 22 bp, Homo sapiens
tcaaagttgtcttgtatttttc

SEQ ID NO: 30649 - DNA, 23 bp, Homo sapiens
ccttgtagtagataaaaataaac

SEQ ID NO: 30650 - DNA, 20 bp, Homo sapiens
tgtgaaccagatttggatgc

SEQ ID NO: 30651 - DNA, 23 bp, Homo sapiens
tgattaaaactaccatgtcttat

SEQ ID NO: 30652 - DNA, 18 bp, Homo sapiens
gatagtcacaccaaggac

SEQ ID NO: 30653 - DNA, 21 bp, Homo sapiens
atgagtggaacagaaaaatac

SEQ ID NO: 30654 - DNA, 23 bp, Homo sapiens
gaaatgtttttacaaacgaatca

SEQ ID NO: 30655 - DNA, 20 bp, Homo sapiens
gacccttcagatttaaatga

SEQ ID NO: 30656 - DNA, 21 bp, Homo sapiens
tgaagtgaatttgaaaacaaa

SEQ ID NO: 30657 - DNA, 17 bp, Homo sapiens
tggagcttcaagtcctt

SEQ ID NO: 30658 - DNA, 22 bp, Homo sapiens
acttgattaattaggaaagact

SEQ ID NO: 30659 - DNA, 24 bp, Homo sapiens
aaaacagtccttctaagtcagcct

SEQ ID NO: 30660 - DNA, 18 bp, Homo sapiens
tccaaagctttccatgct

SEQ ID NO: 30661 - DNA, 20 bp, Homo sapiens
gaccctcatggtattttaag

SEQ ID NO: 30662 - DNA, 17 bp, Homo sapiens
ttccaacttactctgga

SEQ ID NO: 30663 - DNA, 23 bp, Homo sapiens
attcttctgtgatcttaaaaatt

SEQ ID NO: 30664 - DNA, 21 bp, Homo sapiens
aaaaaaaattatggttgatgt

SEQ ID NO: 30665 - DNA, 20 bp, Homo sapiens
gagctctttactacagaaaa

SEQ ID NO: 30666 - DNA, 23 bp, Homo sapiens
tttaacttttatttttgtagaga

SEQ ID NO: 30667 - DNA, 17 bp, Homo sapiens
ccccttggcatgaaaac

SEQ ID NO: 30668 - DNA, 21 bp, Homo sapiens
ttagatggatgatgtactaat

SEQ ID NO: 30669 - DNA, 18 bp, Homo sapiens
gcaagattgtagttgtca

SEQ ID NO: 30670 - DNA, 21 bp, Homo sapiens
attatttctcttacctttgtt

SEQ ID NO: 30671 - DNA, 18 bp, Homo sapiens
aaactgaaactcagaaga

SEQ ID NO: 30672 - DNA, 25 bp, Homo sapiens
gatcatcttttatttaacttaaatt

SEQ ID NO: 30673 - DNA, 25 bp, Homo sapiens
aaaaagattatttaaaagacaaaaa

SEQ ID NO: 30674 - DNA, 24 bp, Homo sapiens
aatttatgacaatgcattagacaa

SEQ ID NO: 30675 - DNA, 25 bp, Homo sapiens
aatctggaaaaatataattttgcac

SEQ ID NO: 30676 - DNA, 21 bp, Homo sapiens
aggacctgtaagaatttcatt

SEQ ID NO: 30677 - DNA, 16 bp, Homo sapiens
tgtcgggaaagaacat

SEQ ID NO: 30678 - DNA, 24 bp, Homo sapiens
gtatttatggttttttttgtcttt

SEQ ID NO: 30679 - DNA, 20 bp, Homo sapiens
ctgactaaacactagttatg

SEQ ID NO: 30680 - DNA, 19 bp, Homo sapiens
tgggtattttcttcgtgca

SEQ ID NO: 30681 - DNA, 18 bp, Homo sapiens
agggcatacagaaatcaa

SEQ ID NO: 30682 - DNA, 23 bp, Homo sapiens
caaagactatagttttggttaaa

SEQ ID NO: 30683 - DNA, 23 bp, Homo sapiens
attatataacagaatttgtcatg

SEQ ID NO: 30684 - DNA, 20 bp, Homo sapiens
tttcagtctaaattcatttg

SEQ ID NO: 30685 - DNA, 18 bp, Homo sapiens
ctgggcattctcattggt

SEQ ID NO: 30686 - DNA, 27 bp, Homo sapiens
aatgactacatatgattattttctaca

SEQ ID NO: 30687 - DNA, 19 bp, Homo sapiens
tcataaagtgtctcaagaa

SEQ ID NO: 30688 - DNA, 23 bp, Homo sapiens
tatgaattaaattatgtctttgt

SEQ ID NO: 30689 - DNA, 19 bp, Homo sapiens
tgatgaccttgcatcctat

SEQ ID NO: 30690 - DNA, 20 bp, Homo sapiens
ggaaaggacttccagaactg

SEQ ID NO: 30691 - DNA, 25 bp, Homo sapiens
tattataataaatgagatttttaaa

SEQ ID NO: 30692 - DNA, 20 bp, Homo sapiens
cacaagcctggtcaattgct

SEQ ID NO: 30693 - DNA, 25 bp, Homo sapiens
tctacctctgtacattaaaaaaaat

SEQ ID NO: 30694 - DNA, 17 bp, Homo sapiens
gtgcctaccacagggct

SEQ ID NO: 30695 - DNA, 24 bp, Homo sapiens
cgaggagaggggtgtgtcaagcga

SEQ ID NO: 30696 - DNA, 24 bp, Homo sapiens
aagggcagcctttccatttcttta

SEQ ID NO: 30697 - DNA, 20 bp, Homo sapiens
agctagtgacgggtgggccc

SEQ ID NO: 30698 - DNA, 18 bp, Homo sapiens
gttctgatgagaatctca

SEQ ID NO: 30699 - DNA, 20 bp, Homo sapiens
gagctctcgctcggtgttga

SEQ ID NO: 30700 - DNA, 24 bp, Homo sapiens
atactgcatttaagagaacataat

SEQ ID NO: 30701 - DNA, 16 bp, Homo sapiens
agaagccgcaggaact

SEQ ID NO: 30702 - DNA, 18 bp, Homo sapiens
actactaaagtcgaatgt

SEQ ID NO: 30703 - DNA, 18 bp, Homo sapiens
tgagtctcttggtttctg

SEQ ID NO: 30704 - DNA, 18 bp, Homo sapiens
ccaaaattcccagggaaa

SEQ ID NO: 30705 - DNA, 20 bp, Homo sapiens
gacctgcaggccctctccct

SEQ ID NO: 30706 - DNA, 22 bp, Homo sapiens
aggtccttcttcttttaaagtt

SEQ ID NO: 30707 - DNA, 20 bp, Homo sapiens
aatcttatttatttgccctg

SEQ ID NO: 30708 - DNA, 18 bp, Homo sapiens
gcaggccattatcttcaa

SEQ ID NO: 30709 - DNA, 21 bp, Homo sapiens
aatgttcgccaacctaaaata

SEQ ID NO: 30710 - DNA, 23 bp, Homo sapiens
gcattgattaaaaacaaaaaacc

SEQ ID NO: 30711 - DNA, 17 bp, Homo sapiens
aacaatgcgttattcca

SEQ ID NO: 30712 - DNA, 20 bp, Homo sapiens
gccattcgacaatgcaagag

SEQ ID NO: 30713 - DNA, 17 bp, Homo sapiens
cagtggttgttgctgaa

SEQ ID NO: 30714 - DNA, 21 bp, Homo sapiens
actagacttaaaatgtcttaa

SEQ ID NO: 30715 - DNA, 20 bp, Homo sapiens
aaatcagcatcataaagata

SEQ ID NO: 30716 - DNA, 19 bp, Homo sapiens
taagtgtttccataggttt

SEQ ID NO: 30717 - DNA, 21 bp, Homo sapiens
ttgtttttctataggttagaa

SEQ ID NO: 30718 - DNA, 18 bp, Homo sapiens
agtgccacatacagtaaa

SEQ ID NO: 30719 - DNA, 21 bp, Homo sapiens
cttaattactgatttttctca

SEQ ID NO: 30720 - DNA, 24 bp, Homo sapiens
gtttttttaaaaaagaaagaaatg

SEQ ID NO: 30721 - DNA, 22 bp, Homo sapiens
actacatgatgaaattcttaat

SEQ ID NO: 30722 - DNA, 16 bp, Homo sapiens
taccacatgtacccca

SEQ ID NO: 30723 - DNA, 19 bp, Homo sapiens
agggatctatactcttcag

SEQ ID NO: 30724 - DNA, 19 bp, Homo sapiens
ttgtggagatgaatatcct

SEQ ID NO: 30725 - DNA, 23 bp, Homo sapiens
gtacatagtacagattcctgaga

SEQ ID NO: 30726 - DNA, 18 bp, Homo sapiens
agacacagaaaataatgc

SEQ ID NO: 30727 - DNA, 19 bp, Homo sapiens
tgcaaccaccaggcatgct

SEQ ID NO: 30728 - DNA, 18 bp, Homo sapiens
aactcctgtcatcaaaat

SEQ ID NO: 30729 - DNA, 17 bp, Homo sapiens
aacaaacaaacaaacga

SEQ ID NO: 30730 - DNA, 20 bp, Homo sapiens
ttttgaaaccacaataaaga

SEQ ID NO: 30731 - DNA, 21 bp, Homo sapiens
aaaattcttacaacagcatta

SEQ ID NO: 30732 - DNA, 19 bp, Homo sapiens
ttgttggtttcaacaatca

SEQ ID NO: 30733 - DNA, 16 bp, Homo sapiens
ataccagtggctgtcc

SEQ ID NO: 30734 - DNA, 21 bp, Homo sapiens
cccaatgtagtatgtcacata

SEQ ID NO: 30735 - DNA, 21 bp, Homo sapiens
ggaaaaaaatcaaatgattgt

SEQ ID NO: 30736 - DNA, 19 bp, Homo sapiens
aattgagaaccagctgaaa

SEQ ID NO: 30737 - DNA, 21 bp, Homo sapiens
gatattggttgcatttttaag

SEQ ID NO: 30738 - DNA, 17 bp, Homo sapiens
gtaaaccccagcaaagc

SEQ ID NO: 30739 - DNA, 22 bp, Homo sapiens
ttatggaaattaaacttcaatt

SEQ ID NO: 30740 - DNA, 17 bp, Homo sapiens
aaacttaccaagctgaa

SEQ ID NO: 30741 - DNA, 21 bp, Homo sapiens
gattctaaggaactttcagct

SEQ ID NO: 30742 - DNA, 23 bp, Homo sapiens
tatatagaaatctttaaatataa

SEQ ID NO: 30743 - DNA, 18 bp, Homo sapiens
gtttttcaagtggctttg

SEQ ID NO: 30744 - DNA, 19 bp, Homo sapiens
gagcattgccagatatttg

SEQ ID NO: 30745 - DNA, 23 bp, Homo sapiens
caatcagtgtggataagaaatat

SEQ ID NO: 30746 - DNA, 17 bp, Homo sapiens
gcaagactccgtctcaa

SEQ ID NO: 30747 - DNA, 16 bp, Homo sapiens
accagttctccatcat

SEQ ID NO: 30748 - DNA, 24 bp, Homo sapiens
aaagaaaaagttaagtgtaaaatt

SEQ ID NO: 30749 - DNA, 17 bp, Homo sapiens
aacaactactatccagg

SEQ ID NO: 30750 - DNA, 25 bp, Homo sapiens
caaactaaacgatatatcatgtaga

SEQ ID NO: 30751 - DNA, 26 bp, Homo sapiens
tactttgattctttatattaaaatac

SEQ ID NO: 30752 - DNA, 22 bp, Homo sapiens
tatttggattaatgggtgtata

SEQ ID NO: 30753 - DNA, 20 bp, Homo sapiens
gagagcactaacaggaggga

SEQ ID NO: 30754 - DNA, 17 bp, Homo sapiens
taaccgactgacctgga

SEQ ID NO: 30755 - DNA, 22 bp, Homo sapiens
ttgaacaaaacctgtaagtcta

SEQ ID NO: 30756 - DNA, 24 bp, Homo sapiens
taaaatattatctgcatacttaat

SEQ ID NO: 30757 - DNA, 21 bp, Homo sapiens
tgggattgaatttatgggaca

SEQ ID NO: 30758 - DNA, 21 bp, Homo sapiens
aagccaaaaataggagatcaa

SEQ ID NO: 30759 - DNA, 19 bp, Homo sapiens
atgcagttttacatgtgtg

SEQ ID NO: 30760 - DNA, 18 bp, Homo sapiens
acttctggggatttaaaa

SEQ ID NO: 30761 - DNA, 17 bp, Homo sapiens
agctgctgttattaagt

SEQ ID NO: 30762 - DNA, 16 bp, Homo sapiens
ttcagtgcttcttcaa

SEQ ID NO: 30763 - DNA, 23 bp, Homo sapiens
ttatcgataatattatcaacatt

SEQ ID NO: 30764 - DNA, 26 bp, Homo sapiens
agactttctttcatgaatttaatttg

SEQ ID NO: 30765 - DNA, 22 bp, Homo sapiens
taaagcacttagccagatacct

SEQ ID NO: 30766 - DNA, 20 bp, Homo sapiens
accatacaaaaaagtagctg

SEQ ID NO: 30767 - DNA, 22 bp, Homo sapiens
actggaacatttttccccacat

SEQ ID NO: 30768 - DNA, 19 bp, Homo sapiens
aaaccagttaaagatagta

SEQ ID NO: 30769 - DNA, 22 bp, Homo sapiens
tgcttttaatctgattttctct

SEQ ID NO: 30770 - DNA, 18 bp, Homo sapiens
tctgtagaagtcctctgt

SEQ ID NO: 30771 - DNA, 18 bp, Homo sapiens
tggagccatccttgtaat

SEQ ID NO: 30772 - DNA, 22 bp, Homo sapiens
tcttatccttaaacttttaaaa

SEQ ID NO: 30773 - DNA, 19 bp, Homo sapiens
cccactaaagcatagttgt

SEQ ID NO: 30774 - DNA, 21 bp, Homo sapiens
gtccaatcaaaaggagactgt

SEQ ID NO: 30775 - DNA, 18 bp, Homo sapiens
caagggtccaggctgtca

SEQ ID NO: 30776 - DNA, 20 bp, Homo sapiens
gagaatactgcccagttact

SEQ ID NO: 30777 - DNA, 24 bp, Homo sapiens
cagctcctctttgctaaggttctg

SEQ ID NO: 30778 - DNA, 24 bp, Homo sapiens
cttaggtacttctactcacagcgg

SEQ ID NO: 30779 - DNA, 17 bp, Homo sapiens
ttgccctagagacctca

SEQ ID NO: 30780 - DNA, 23 bp, Homo sapiens
aatctgcggaaagtgctcatcag

SEQ ID NO: 30781 - DNA, 23 bp, Homo sapiens
taattgatacggggtgcatgcga

SEQ ID NO: 30782 - DNA, 16 bp, Homo sapiens
aggtggtggaaaagca

SEQ ID NO: 30783 - DNA, 16 bp, Homo sapiens
ctcccgcccccgttct

SEQ ID NO: 30784 - DNA, 22 bp, Homo sapiens
ccctagtgagtataccaaagat

SEQ ID NO: 30785 - DNA, 16 bp, Homo sapiens
ttgatgacatcagcgg

SEQ ID NO: 30786 - DNA, 24 bp, Homo sapiens
aaatgcatctcttactcaggagta

SEQ ID NO: 30787 - DNA, 23 bp, Homo sapiens
gttgcggcctccagatccacatt

SEQ ID NO: 30788 - DNA, 18 bp, Homo sapiens
aatgactttctggaccca

SEQ ID NO: 30789 - DNA, 19 bp, Homo sapiens
aaaccgcccgcagcctcca

SEQ ID NO: 30790 - DNA, 23 bp, Homo sapiens
tgttcgctctgccaccaaggtga

SEQ ID NO: 30791 - DNA, 18 bp, Homo sapiens
ctctcaagtgagtttttt

SEQ ID NO: 30792 - DNA, 23 bp, Homo sapiens
cagggctggcacaggtgtggaca

SEQ ID NO: 30793 - DNA, 23 bp, Homo sapiens
gtgttgaccatgcaggccctaga

SEQ ID NO: 30794 - DNA, 22 bp, Homo sapiens
cttggcttagggcgagagtaca

SEQ ID NO: 30795 - DNA, 21 bp, Homo sapiens
caggcacatgatcattccaca

SEQ ID NO: 30796 - DNA, 16 bp, Homo sapiens
tgagagaacacagcct

SEQ ID NO: 30797 - DNA, 21 bp, Homo sapiens
agtggtaataattggcatatc

SEQ ID NO: 30798 - DNA, 18 bp, Homo sapiens
tctgtgcccattgatgtc

SEQ ID NO: 30799 - DNA, 18 bp, Homo sapiens
gtctgcaagtcgctgaga

SEQ ID NO: 30800 - DNA, 16 bp, Homo sapiens
gcagaactcacttgtg

SEQ ID NO: 30801 - DNA, 18 bp, Homo sapiens
aatagaggacctgatggc

SEQ ID NO: 30802 - DNA, 21 bp, Homo sapiens
ctttatcccccatcagtgttc

SEQ ID NO: 30803 - DNA, 20 bp, Homo sapiens
ctcaccttcttccgctccca

SEQ ID NO: 30804 - DNA, 24 bp, Homo sapiens
gtggctgtcatgggcagtgactgt

SEQ ID NO: 30805 - DNA, 16 bp, Homo sapiens
tcagcaacatgagtgg

SEQ ID NO: 30806 - DNA, 16 bp, Homo sapiens
gaatggaccctctgaa

SEQ ID NO: 30807 - DNA, 16 bp, Homo sapiens
ttcagctctgttccca

SEQ ID NO: 30808 - DNA, 18 bp, Homo sapiens
cttcgatgaaggacggca

SEQ ID NO: 30809 - DNA, 16 bp, Homo sapiens
gactgcatccgggtag

SEQ ID NO: 30810 - DNA, 20 bp, Homo sapiens
cacctgggctcagggcccgg

SEQ ID NO: 30811 - DNA, 17 bp, Homo sapiens
ctgcagaaagtcccaca

SEQ ID NO: 30812 - DNA, 24 bp, Homo sapiens
ttttgcctgtttggttgcagttca

SEQ ID NO: 30813 - DNA, 18 bp, Homo sapiens
cagaccctcctagaacaa

SEQ ID NO: 30814 - DNA, 20 bp, Homo sapiens
ctgggcaggattgggagaga

SEQ ID NO: 30815 - DNA, 17 bp, Homo sapiens
caggccagtgttctctc

SEQ ID NO: 30816 - DNA, 16 bp, Homo sapiens
cgagacctctggggaa

SEQ ID NO: 30817 - DNA, 24 bp, Homo sapiens
gaattaattaagctgagcatggta

SEQ ID NO: 30818 - DNA, 19 bp, Homo sapiens
tgaaatcacagagaggcca

SEQ ID NO: 30819 - DNA, 26 bp, Homo sapiens
taataataacaatactaataattaag

SEQ ID NO: 30820 - DNA, 18 bp, Homo sapiens
tccacaatgtaaggacac

SEQ ID NO: 30821 - DNA, 20 bp, Homo sapiens
gactatagggtatgacccca

SEQ ID NO: 30822 - DNA, 17 bp, Homo sapiens
gtctggggaaggcccag

SEQ ID NO: 30823 - DNA, 24 bp, Homo sapiens
agcagctgcccctggaggagatct

SEQ ID NO: 30824 - DNA, 17 bp, Homo sapiens
acaaaacaccagcctct

SEQ ID NO: 30825 - DNA, 24 bp, Homo sapiens
ctcctgccctccacgacaggtagg

SEQ ID NO: 30826 - DNA, 16 bp, Homo sapiens
cttcttgcactgggca

SEQ ID NO: 30827 - DNA, 19 bp, Homo sapiens
aggagagaggctctgggaa

SEQ ID NO: 30828 - DNA, 21 bp, Homo sapiens
ggcccggagcagggcgccttc

SEQ ID NO: 30829 - DNA, 24 bp, Homo sapiens
ggaagccagggatgagcgtgggga

SEQ ID NO: 30830 - DNA, 16 bp, Homo sapiens
acttacttccgtaaac

SEQ ID NO: 30831 - DNA, 16 bp, Homo sapiens
ttgctgaatgacaaca

SEQ ID NO: 30832 - DNA, 16 bp, Homo sapiens
gccatgggcctctctg

SEQ ID NO: 30833 - DNA, 17 bp, Homo sapiens
gagggatcgtggacgaa

SEQ ID NO: 30834 - DNA, 24 bp, Homo sapiens
tttctccttttaccatggatgaaa

SEQ ID NO: 30835 - DNA, 19 bp, Homo sapiens
ggggctgcactggacgtgt

SEQ ID NO: 30836 - DNA, 24 bp, Homo sapiens
gagatggaacattcatgtggaagc

SEQ ID NO: 30837 - DNA, 17 bp, Homo sapiens
tctcatggtccaccaag

SEQ ID NO: 30838 - DNA, 24 bp, Homo sapiens
aatagaagtggaaggcaccagaac

SEQ ID NO: 30839 - DNA, 16 bp, Homo sapiens
ctccccacagcggctc

SEQ ID NO: 30840 - DNA, 19 bp, Homo sapiens
caagagggtgtggccagtc

SEQ ID NO: 30841 - DNA, 16 bp, Homo sapiens
acttacaacccccgtg

SEQ ID NO: 30842 - DNA, 22 bp, Homo sapiens
cgccacgggaccgggccttggt

SEQ ID NO: 30843 - DNA, 18 bp, Homo sapiens
cctacaagatgccttcct

SEQ ID NO: 30844 - DNA, 21 bp, Homo sapiens
tgccagcaccaaggaggctca

SEQ ID NO: 30845 - DNA, 18 bp, Homo sapiens
agcagatttcccttatct

SEQ ID NO: 30846 - DNA, 24 bp, Homo sapiens
gacatggtgaaggggaaatctctc

SEQ ID NO: 30847 - DNA, 24 bp, Homo sapiens
gaacaagtccttgtcctgttgtta

SEQ ID NO: 30848 - DNA, 22 bp, Homo sapiens
caaggcttggtgtgtggagaga

SEQ ID NO: 30849 - DNA, 22 bp, Homo sapiens
aggcaggagtgaccctatactg

SEQ ID NO: 30850 - DNA, 23 bp, Homo sapiens
gtccctttgggggacccagccca

SEQ ID NO: 30851 - DNA, 20 bp, Homo sapiens
atctgccatgcctcttcctg

SEQ ID NO: 30852 - DNA, 21 bp, Homo sapiens
ctcctccccctccctctgcaa

SEQ ID NO: 30853 - DNA, 24 bp, Homo sapiens
gaatgcccaggcccttaccagtgc

SEQ ID NO: 30854 - DNA, 18 bp, Homo sapiens
aaccctgtgtcctgcagc

SEQ ID NO: 30855 - DNA, 24 bp, Homo sapiens
ctctggggacactgatgcgagcct

SEQ ID NO: 30856 - DNA, 16 bp, Homo sapiens
agtagtaagggagcta

SEQ ID NO: 30857 - DNA, 21 bp, Homo sapiens
agcccactgaagggcgagtgg

SEQ ID NO: 30858 - DNA, 21 bp, Homo sapiens
tttcaggaggccgacaatgac

SEQ ID NO: 30859 - DNA, 17 bp, Homo sapiens
catagtccagagctagg

SEQ ID NO: 30860 - DNA, 23 bp, Homo sapiens
cagcctctttcaccagcagctta

SEQ ID NO: 30861 - DNA, 24 bp, Homo sapiens
ctcaacaaacagtgacctcatggt

SEQ ID NO: 30862 - DNA, 16 bp, Homo sapiens
aagactagtgctgaca

SEQ ID NO: 30863 - DNA, 23 bp, Homo sapiens
ctgggaactgcctaagccccgca

SEQ ID NO: 30864 - DNA, 23 bp, Homo sapiens
ccgatgcaaggctgggacctagg

SEQ ID NO: 30865 - DNA, 20 bp, Homo sapiens
gaacttggtgaacgctaagc

SEQ ID NO: 30866 - DNA, 17 bp, Homo sapiens
aggcagtatcttcattt

SEQ ID NO: 30867 - DNA, 24 bp, Homo sapiens
agcttggcccatttgccctctccc

SEQ ID NO: 30868 - DNA, 16 bp, Homo sapiens
gccaggaggcattccc

SEQ ID NO: 30869 - DNA, 23 bp, Homo sapiens
gagccctacatcctaccaatggg

SEQ ID NO: 30870 - DNA, 16 bp, Homo sapiens
gtagtgccttggacca

SEQ ID NO: 30871 - DNA, 18 bp, Homo sapiens
ccaggaggtgtaacagtc

SEQ ID NO: 30872 - DNA, 17 bp, Homo sapiens
gtccctgcggagaggca

SEQ ID NO: 30873 - DNA, 22 bp, Homo sapiens
ctgcaccaggggagcaaggctt

SEQ ID NO: 30874 - DNA, 17 bp, Homo sapiens
aatcatggtaggcagca

SEQ ID NO: 30875 - DNA, 24 bp, Homo sapiens
cttaccaggctgtgggcttggtcc

SEQ ID NO: 30876 - DNA, 23 bp, Homo sapiens
agttcaattccagggcagacccc

SEQ ID NO: 30877 - DNA, 22 bp, Homo sapiens
ctgtcttcaggccagaagtgcc

SEQ ID NO: 30878 - DNA, 21 bp, Homo sapiens
gtatggtgcagatccagagac

SEQ ID NO: 30879 - DNA, 16 bp, Homo sapiens
acctctgaccctgcaa

SEQ ID NO: 30880 - DNA, 16 bp, Homo sapiens
taggacagcagccgca

SEQ ID NO: 30881 - DNA, 23 bp, Homo sapiens
gagaccatcatccgctcattgca

SEQ ID NO: 30882 - DNA, 16 bp, Homo sapiens
tgggcagcaaggagga

SEQ ID NO: 30883 - DNA, 16 bp, Homo sapiens
tcctttttcccctatc

SEQ ID NO: 30884 - DNA, 17 bp, Homo sapiens
aggttagaagtggaact

SEQ ID NO: 30885 - DNA, 16 bp, Homo sapiens
ctggcagaggcaggcg

SEQ ID NO: 30886 - DNA, 19 bp, Homo sapiens
ctattgatcacagtgggtg

SEQ ID NO: 30887 - DNA, 22 bp, Homo sapiens
gagacctggcacgtcatgggca

SEQ ID NO: 30888 - DNA, 24 bp, Homo sapiens
cagggtcagagtgcagtgtaagca

SEQ ID NO: 30889 - DNA, 22 bp, Homo sapiens
agcatgtgactgaagccttcca

SEQ ID NO: 30890 - DNA, 23 bp, Homo sapiens
gtcccgcctccatttcacgtccg

SEQ ID NO: 30891 - DNA, 16 bp, Homo sapiens
aggaaagccgaaaaag

SEQ ID NO: 30892 - DNA, 24 bp, Homo sapiens
cttgctttccggtagcgtgggctg

SEQ ID NO: 30893 - DNA, 19 bp, Homo sapiens
aagctcccctcagacgacc

SEQ ID NO: 30894 - DNA, 16 bp, Homo sapiens
cgaatggaccactgga

SEQ ID NO: 30895 - DNA, 17 bp, Homo sapiens
ctgcaggagttgaagga

SEQ ID NO: 30896 - DNA, 20 bp, Homo sapiens
cctctttgatctcttccggg

SEQ ID NO: 30897 - DNA, 23 bp, Homo sapiens
tcttaatgaccgccttggttact

SEQ ID NO: 30898 - DNA, 16 bp, Homo sapiens
cgagtcatccctccaa

SEQ ID NO: 30899 - DNA, 16 bp, Homo sapiens
cagtcctccgaccctc

SEQ ID NO: 30900 - DNA, 22 bp, Homo sapiens
gggttcccacggccccatgagc

SEQ ID NO: 30901 - DNA, 21 bp, Homo sapiens
atgagttgatttaatggctta

SEQ ID NO: 30902 - DNA, 16 bp, Homo sapiens
ctgaagctgaagccga

SEQ ID NO: 30903 - DNA, 17 bp, Homo sapiens
tctcagccacagagatc

SEQ ID NO: 30904 - DNA, 16 bp, Homo sapiens
atctcgtactaggtca

SEQ ID NO: 30905 - DNA, 24 bp, Homo sapiens
ggaagaagaagaagaagggggctc

SEQ ID NO: 30906 - DNA, 19 bp, Homo sapiens
aagccacacaccaggagga

SEQ ID NO: 30907 - DNA, 16 bp, Homo sapiens
ctgaggaatttggctt

SEQ ID NO: 30908 - DNA, 17 bp, Homo sapiens
gcaggctctttatttca

SEQ ID NO: 30909 - DNA, 21 bp, Homo sapiens
ccacgataacttcggctttga

SEQ ID NO: 30910 - DNA, 18 bp, Homo sapiens
ggctctattaatctctct

SEQ ID NO: 30911 - DNA, 22 bp, Homo sapiens
gggcctggaccttgccttccca

SEQ ID NO: 30912 - DNA, 20 bp, Homo sapiens
caggacctggaagttctgca

SEQ ID NO: 30913 - DNA, 23 bp, Homo sapiens
cctgtggtttctggtgggttggt

SEQ ID NO: 30914 - DNA, 24 bp, Homo sapiens
gatacttaagcattgagtcccgaa

SEQ ID NO: 30915 - DNA, 23 bp, Homo sapiens
tgggaagtgtgagaagactgatg

SEQ ID NO: 30916 - DNA, 18 bp, Homo sapiens
ttcttgcatcactctcca

SEQ ID NO: 30917 - DNA, 21 bp, Homo sapiens
ccagcaaacacctgccacctt

SEQ ID NO: 30918 - DNA, 19 bp, Homo sapiens
gggatactcaccctatgaa

SEQ ID NO: 30919 - DNA, 16 bp, Homo sapiens
tacgggagggacagac

SEQ ID NO: 30920 - DNA, 22 bp, Homo sapiens
cagtctttgcactttattagtg

SEQ ID NO: 30921 - DNA, 16 bp, Homo sapiens
gcccacctcggcctcc

SEQ ID NO: 30922 - DNA, 24 bp, Homo sapiens
agcaccagactggggctcccagag

SEQ ID NO: 30923 - DNA, 20 bp, Homo sapiens
ggatacataaaacagccagg

SEQ ID NO: 30924 - DNA, 18 bp, Homo sapiens
gacttaccattgtcctct

SEQ ID NO: 30925 - DNA, 16 bp, Homo sapiens
tgtggaagggggtttt

SEQ ID NO: 30926 - DNA, 17 bp, Homo sapiens
acacacagaacttcaga

SEQ ID NO: 30927 - DNA, 18 bp, Homo sapiens
gaaggagtcttttcactt

SEQ ID NO: 30928 - DNA, 19 bp, Homo sapiens
gagagaaagagtccaaagg

SEQ ID NO: 30929 - DNA, 21 bp, Homo sapiens
cctatggacccccatcctaga

SEQ ID NO: 30930 - DNA, 17 bp, Homo sapiens
aagaccctcctgggaaa

SEQ ID NO: 30931 - DNA, 20 bp, Homo sapiens
ttaccagccttttgttattc

SEQ ID NO: 30932 - DNA, 17 bp, Homo sapiens
gtgatcttggtcacaga

SEQ ID NO: 30933 - DNA, 20 bp, Homo sapiens
ctgtacacttgtctcctttt

SEQ ID NO: 30934 - DNA, 18 bp, Homo sapiens
ttccctggccatactttc

SEQ ID NO: 30935 - DNA, 19 bp, Homo sapiens
ccagatcttgattcccagg

SEQ ID NO: 30936 - DNA, 20 bp, Homo sapiens
cgaatgttactaaaggttat

SEQ ID NO: 30937 - DNA, 21 bp, Homo sapiens
cagcccaaatcctatttcaag

SEQ ID NO: 30938 - DNA, 17 bp, Homo sapiens
cactgtccaccacagtc

SEQ ID NO: 30939 - DNA, 20 bp, Homo sapiens
aagaaagaggtaaaggaaag

SEQ ID NO: 30940 - DNA, 22 bp, Homo sapiens
taacttaccacccctaggactg

SEQ ID NO: 30941 - DNA, 21 bp, Homo sapiens
ctgtgtaaagaaactgctgag

SEQ ID NO: 30942 - DNA, 21 bp, Homo sapiens
gggtagaagagtaagatttcc

SEQ ID NO: 30943 - DNA, 19 bp, Homo sapiens
gatagtggaggagcgccgg

SEQ ID NO: 30944 - DNA, 21 bp, Homo sapiens
aaagtcatacacgtaaatagg

SEQ ID NO: 30945 - DNA, 22 bp, Homo sapiens
tacagtaacccgacacgaagca

SEQ ID NO: 30946 - DNA, 17 bp, Homo sapiens
ggatggaaaaggcatca

SEQ ID NO: 30947 - DNA, 24 bp, Homo sapiens
ttcatctcaagattccttggggaa

SEQ ID NO: 30948 - DNA, 17 bp, Homo sapiens
gcctctgagggttaaca

SEQ ID NO: 30949 - DNA, 23 bp, Homo sapiens
ttctgcctagtctctttcattta

SEQ ID NO: 30950 - DNA, 16 bp, Homo sapiens
ggtggcaagagaagct

SEQ ID NO: 30951 - DNA, 19 bp, Homo sapiens
caagacctccagccctgga

SEQ ID NO: 30952 - DNA, 17 bp, Homo sapiens
ggtgagtgacaaactga

SEQ ID NO: 30953 - DNA, 16 bp, Homo sapiens
cggtcccggtagcctt

SEQ ID NO: 30954 - DNA, 21 bp, Homo sapiens
tgtgactaaagagggcacagc

SEQ ID NO: 30955 - DNA, 23 bp, Homo sapiens
tcttgtgtttgtacggacagtga

SEQ ID NO: 30956 - DNA, 23 bp, Homo sapiens
gggctcagcctgggcattaaagg

SEQ ID NO: 30957 - DNA, 22 bp, Homo sapiens
gtttccaaagcaagcagcacac

SEQ ID NO: 30958 - DNA, 18 bp, Homo sapiens
tacctgtggcgtcgccag

SEQ ID NO: 30959 - DNA, 18 bp, Homo sapiens
ggacactggggcttactg

SEQ ID NO: 30960 - DNA, 17 bp, Homo sapiens
gctgtgggcttcctgga

SEQ ID NO: 30961 - DNA, 20 bp, Homo sapiens
cctagaggggaaagtgagtc

SEQ ID NO: 30962 - DNA, 24 bp, Homo sapiens
ttctcctccctgctccctagctcc

SEQ ID NO: 30963 - DNA, 22 bp, Homo sapiens
gctgtaagctcacactggccct

SEQ ID NO: 30964 - DNA, 18 bp, Homo sapiens
tgggctgaagacagcgtt

SEQ ID NO: 30965 - DNA, 23 bp, Homo sapiens
tgtgagctgactctgtcccttta

SEQ ID NO: 30966 - DNA, 16 bp, Homo sapiens
ttgtggtcgtgctaaa

SEQ ID NO: 30967 - DNA, 24 bp, Homo sapiens
gcctccttgagtatctgctccatc

SEQ ID NO: 30968 - DNA, 19 bp, Homo sapiens
gtcagaagaacgacctgga

SEQ ID NO: 30969 - DNA, 24 bp, Homo sapiens
tagccaggtgagattgtctccagg

SEQ ID NO: 30970 - DNA, 19 bp, Homo sapiens
cacattcagcaagttcatt

SEQ ID NO: 30971 - DNA, 20 bp, Homo sapiens
gtaagaggcacatccttaga

SEQ ID NO: 30972 - DNA, 19 bp, Homo sapiens
gagggtttcatgggaggta

SEQ ID NO: 30973 - DNA, 22 bp, Homo sapiens
gagtgtgatcctgccaaggccc

SEQ ID NO: 30974 - DNA, 16 bp, Homo sapiens
tctgcaggagttatgg

SEQ ID NO: 30975 - DNA, 22 bp, Homo sapiens
caccattgccctcaccggttta

SEQ ID NO: 30976 - DNA, 21 bp, Homo sapiens
agaaaagcagggtcagtgccc

SEQ ID NO: 30977 - DNA, 20 bp, Homo sapiens
gatgcatcagtgccactgcg

SEQ ID NO: 30978 - DNA, 17 bp, Homo sapiens
taggtagcaacagaaaa

SEQ ID NO: 30979 - DNA, 20 bp, Homo sapiens
ctctctgggagccctcagga

SEQ ID NO: 30980 - DNA, 16 bp, Homo sapiens
aagaggcacacccatc

SEQ ID NO: 30981 - DNA, 24 bp, Homo sapiens
cagatggtcagagtccctcggggt

SEQ ID NO: 30982 - DNA, 16 bp, Homo sapiens
atcactctacaccacg

SEQ ID NO: 30983 - DNA, 16 bp, Homo sapiens
acggacccaccccata

SEQ ID NO: 30984 - DNA, 16 bp, Homo sapiens
acccccattccatacc

SEQ ID NO: 30985 - DNA, 20 bp, Homo sapiens
tctaggcctggagccatgct

SEQ ID NO: 30986 - DNA, 18 bp, Homo sapiens
tttacaaacagcccatgt

SEQ ID NO: 30987 - DNA, 17 bp, Homo sapiens
cagtccagcctcaggca

SEQ ID NO: 30988 - DNA, 17 bp, Homo sapiens
actttgtcgacagtccc

SEQ ID NO: 30989 - DNA, 21 bp, Homo sapiens
tcctgcctccatggtgcaaaa

SEQ ID NO: 30990 - DNA, 19 bp, Homo sapiens
ctggaccgactggaacctt

SEQ ID NO: 30991 - DNA, 18 bp, Homo sapiens
gaacaccttcctgctccc

SEQ ID NO: 30992 - DNA, 16 bp, Homo sapiens
cctttgtccttaccct

SEQ ID NO: 30993 - DNA, 24 bp, Homo sapiens
atgtaggagatgataggcctggta

SEQ ID NO: 30994 - DNA, 24 bp, Homo sapiens
ctcccacatgtgacccttacctac

SEQ ID NO: 30995 - DNA, 21 bp, Homo sapiens
tgaagtggccaaggtggtaga

SEQ ID NO: 30996 - DNA, 21 bp, Homo sapiens
actaaggaatgtgcccctcac

SEQ ID NO: 30997 - DNA, 22 bp, Homo sapiens
tggtgatgtctacaatgatggg

SEQ ID NO: 30998 - DNA, 21 bp, Homo sapiens
agctccccttgagatgcctgg

SEQ ID NO: 30999 - DNA, 23 bp, Homo sapiens
aattgggtcctccttcggggttc

SEQ ID NO: 31000 - DNA, 22 bp, Homo sapiens
attgccccttttgcaactactg

SEQ ID NO: 31001 - DNA, 19 bp, Homo sapiens
acatggtacaggaggttct

SEQ ID NO: 31002 - DNA, 17 bp, Homo sapiens
ggaaccatgattcccta

SEQ ID NO: 31003 - DNA, 22 bp, Homo sapiens
gcgcaacactgggggtccccag

SEQ ID NO: 31004 - DNA, 17 bp, Homo sapiens
ttcctgtccagctttcc

SEQ ID NO: 31005 - DNA, 17 bp, Homo sapiens
cagctgtgggtaggtca

SEQ ID NO: 31006 - DNA, 16 bp, Homo sapiens
aagcagacctcagacc

SEQ ID NO: 31007 - DNA, 23 bp, Homo sapiens
gctaaggagttgggggtgtgaag

SEQ ID NO: 31008 - DNA, 16 bp, Homo sapiens
cagtacagccacagca

SEQ ID NO: 31009 - DNA, 24 bp, Homo sapiens
gaggcagctgcaagtgcctcagta

SEQ ID NO: 31010 - DNA, 16 bp, Homo sapiens
aagttctgggagcaga

SEQ ID NO: 31011 - DNA, 20 bp, Homo sapiens
gacctgtgaaggaaagggaa

SEQ ID NO: 31012 - DNA, 16 bp, Homo sapiens
ctgttccccaacacca

SEQ ID NO: 31013 - DNA, 24 bp, Homo sapiens
tcaaaagggcaggctagctgggga

SEQ ID NO: 31014 - DNA, 16 bp, Homo sapiens
ggtacctggactttct

SEQ ID NO: 31015 - DNA, 22 bp, Homo sapiens
tcagtctttggtgaaactagta

SEQ ID NO: 31016 - DNA, 17 bp, Homo sapiens
tactgacagacccagaa

SEQ ID NO: 31017 - DNA, 16 bp, Homo sapiens
tggcttaccgtgatga

SEQ ID NO: 31018 - DNA, 21 bp, Homo sapiens
agttccagaagcctgtgtgca

SEQ ID NO: 31019 - DNA, 16 bp, Homo sapiens
caggagcctagccgca

SEQ ID NO: 31020 - DNA, 22 bp, Homo sapiens
gttgcattcttcccgtcaccca

SEQ ID NO: 31021 - DNA, 18 bp, Homo sapiens
ctctgaggcaaagagcat

SEQ ID NO: 31022 - DNA, 18 bp, Homo sapiens
catcctgtctcaaaaaca

SEQ ID NO: 31023 - DNA, 20 bp, Homo sapiens
ctagggtggctttggctgga

SEQ ID NO: 31024 - DNA, 20 bp, Homo sapiens
aaggctgcagtgagtcgtga

SEQ ID NO: 31025 - DNA, 18 bp, Homo sapiens
tgaacatatttagctgct

SEQ ID NO: 31026 - DNA, 16 bp, Homo sapiens
tcaggaggctaatgtg

SEQ ID NO: 31027 - DNA, 24 bp, Homo sapiens
caaaggaagagcaactgatcctgg

SEQ ID NO: 31028 - DNA, 19 bp, Homo sapiens
acacatacacacacaaatt

SEQ ID NO: 31029 - DNA, 17 bp, Homo sapiens
tgttgtaggaatcctgg

SEQ ID NO: 31030 - DNA, 19 bp, Homo sapiens
atttctctacccaactatg

SEQ ID NO: 31031 - DNA, 18 bp, Homo sapiens
gcccagataatttttttt

SEQ ID NO: 31032 - DNA, 16 bp, Homo sapiens
tgaccttcaaatccag

SEQ ID NO: 31033 - DNA, 16 bp, Homo sapiens
ggccagggtggtctta

SEQ ID NO: 31034 - DNA, 22 bp, Homo sapiens
gctgccccactgggcaaaggtg

SEQ ID NO: 31035 - DNA, 18 bp, Homo sapiens
ccaaagtgctgggtttgc

SEQ ID NO: 31036 - DNA, 20 bp, Homo sapiens
actcaccacaatgtccgcct

SEQ ID NO: 31037 - DNA, 22 bp, Homo sapiens
agaaaggtttcaagcgacaact

SEQ ID NO: 31038 - DNA, 21 bp, Homo sapiens
cctgaacatcagcgagacttc

SEQ ID NO: 31039 - DNA, 23 bp, Homo sapiens
tccaggggaatggtgctctagga

SEQ ID NO: 31040 - DNA, 16 bp, Homo sapiens
ggctgttgagtggata

SEQ ID NO: 31041 - DNA, 22 bp, Homo sapiens
taagtttgggagccagtcattt

SEQ ID NO: 31042 - DNA, 16 bp, Homo sapiens
ctgagcacaagttaca

SEQ ID NO: 31043 - DNA, 16 bp, Homo sapiens
ggtccaggccttacca

SEQ ID NO: 31044 - DNA, 23 bp, Homo sapiens
tttcttggccggatcattcatga

SEQ ID NO: 31045 - DNA, 21 bp, Homo sapiens
cgttggtcatccagcatgagt

SEQ ID NO: 31046 - DNA, 16 bp, Homo sapiens
ggattacaggtgtgag

SEQ ID NO: 31047 - DNA, 23 bp, Homo sapiens
ggtaggacctaggtcacgggcaa

SEQ ID NO: 31048 - DNA, 16 bp, Homo sapiens
ctcctgaactcaagtg

SEQ ID NO: 31049 - DNA, 17 bp, Homo sapiens
gcactggaaggggtatc

SEQ ID NO: 31050 - DNA, 21 bp, Homo sapiens
gctgatttttctatttttagt

SEQ ID NO: 31051 - DNA, 22 bp, Homo sapiens
ttttcagctgtcactgcccaga

SEQ ID NO: 31052 - DNA, 16 bp, Homo sapiens
ctcagccttccaagta

SEQ ID NO: 31053 - DNA, 22 bp, Homo sapiens
tccaggaacctggcaagagaaa

SEQ ID NO: 31054 - DNA, 18 bp, Homo sapiens
ccatcttcactcactgta

SEQ ID NO: 31055 - DNA, 23 bp, Homo sapiens
gaccagaccagctgggtgtggtg

SEQ ID NO: 31056 - DNA, 18 bp, Homo sapiens
tttttgagaaggagtctc

SEQ ID NO: 31057 - DNA, 16 bp, Homo sapiens
gaggcaggtggatcac

SEQ ID NO: 31058 - DNA, 16 bp, Homo sapiens
ctgttctctcggtctg

SEQ ID NO: 31059 - DNA, 20 bp, Homo sapiens
aaaccccgtctctactaaaa

SEQ ID NO: 31060 - DNA, 16 bp, Homo sapiens
gcctttcagccttggg

SEQ ID NO: 31061 - DNA, 19 bp, Homo sapiens
ataatcccagctacttgga

SEQ ID NO: 31062 - DNA, 16 bp, Homo sapiens
tagttccacttccaga

SEQ ID NO: 31063 - DNA, 21 bp, Homo sapiens
ttgaactcaggaggcagaggt

SEQ ID NO: 31064 - DNA, 16 bp, Homo sapiens
aggactggcctcccat

SEQ ID NO: 31065 - DNA, 17 bp, Homo sapiens
gtgacagagagagagac

SEQ ID NO: 31066 - DNA, 17 bp, Homo sapiens
acctgggccagatactt

SEQ ID NO: 31067 - DNA, 23 bp, Homo sapiens
gaagaaaaataaaaagaaagtgg

SEQ ID NO: 31068 - DNA, 17 bp, Homo sapiens
gtgaatgggaaggggtc

SEQ ID NO: 31069 - DNA, 17 bp, Homo sapiens
caagattgacaggccca

SEQ ID NO: 31070 - DNA, 18 bp, Homo sapiens
tttcactccttgccagcc

SEQ ID NO: 31071 - DNA, 24 bp, Homo sapiens
aaaggtgagctgaggacaggcaga

SEQ ID NO: 31072 - DNA, 18 bp, Homo sapiens
ctagatacccctgattca

SEQ ID NO: 31073 - DNA, 18 bp, Homo sapiens
cacagatcagcatggcta

SEQ ID NO: 31074 - DNA, 21 bp, Homo sapiens
ttgggctagtatgtgttccaa

SEQ ID NO: 31075 - DNA, 20 bp, Homo sapiens
gatcccttacttcacaaagt

SEQ ID NO: 31076 - DNA, 22 bp, Homo sapiens
ttttgtcctgggggtgggaggg

SEQ ID NO: 31077 - DNA, 17 bp, Homo sapiens
gggctgtcccttgagtg

SEQ ID NO: 31078 - DNA, 16 bp, Homo sapiens
ctgtagggtaggtctg

SEQ ID NO: 31079 - DNA, 16 bp, Homo sapiens
agtgggtgatgtccag

SEQ ID NO: 31080 - DNA, 22 bp, Homo sapiens
taggcattctagctttttcagg

SEQ ID NO: 31081 - DNA, 20 bp, Homo sapiens
ccaactgcagggctcggtga

SEQ ID NO: 31082 - DNA, 16 bp, Homo sapiens
gttgcacaacttcagc

SEQ ID NO: 31083 - DNA, 21 bp, Homo sapiens
gtgaagagagaagcacccaga

SEQ ID NO: 31084 - DNA, 17 bp, Homo sapiens
ttctccatccgcaccta

SEQ ID NO: 31085 - DNA, 16 bp, Homo sapiens
ttcagccattagcctc

SEQ ID NO: 31086 - DNA, 19 bp, Homo sapiens
ccttttctgtaggaatcgg

SEQ ID NO: 31087 - DNA, 17 bp, Homo sapiens
ggggacaaaatgtctgt

SEQ ID NO: 31088 - DNA, 17 bp, Homo sapiens
agtcccatactctccta

SEQ ID NO: 31089 - DNA, 17 bp, Homo sapiens
cagacatcagggccctc

SEQ ID NO: 31090 - DNA, 17 bp, Homo sapiens
ttccctttggccctgac

SEQ ID NO: 31091 - DNA, 22 bp, Homo sapiens
ttgagcttggtatcttcctctg

SEQ ID NO: 31092 - DNA, 16 bp, Homo sapiens
ctgcgcttcacccagg

SEQ ID NO: 31093 - DNA, 17 bp, Homo sapiens
tctgcataggtgtaggt

SEQ ID NO: 31094 - DNA, 16 bp, Homo sapiens
ccgcctatcatctgct

SEQ ID NO: 31095 - DNA, 17 bp, Homo sapiens
ggtacccggatgatgtt

SEQ ID NO: 31096 - DNA, 16 bp, Homo sapiens
gcccatccctgacatt

SEQ ID NO: 31097 - DNA, 21 bp, Homo sapiens
aagatatggtagtccgagtca

SEQ ID NO: 31098 - DNA, 20 bp, Homo sapiens
ttacatgcgtgagccactga

SEQ ID NO: 31099 - DNA, 23 bp, Homo sapiens
ccagtcctaatagtgtctgagtc

SEQ ID NO: 31100 - DNA, 20 bp, Homo sapiens
ggcaggtatatcatttgagg

SEQ ID NO: 31101 - DNA, 19 bp, Homo sapiens
gccattgaaacttttcgtt

SEQ ID NO: 31102 - DNA, 19 bp, Homo sapiens
catgatgaaaccctgtctc

SEQ ID NO: 31103 - DNA, 20 bp, Homo sapiens
taaatcgtacttctctgaag

SEQ ID NO: 31104 - DNA, 20 bp, Homo sapiens
gtggcgcacgcctataattc

SEQ ID NO: 31105 - DNA, 16 bp, Homo sapiens
ctctcaacatccttgc

SEQ ID NO: 31106 - DNA, 17 bp, Homo sapiens
tatagcctgggaggcag

SEQ ID NO: 31107 - DNA, 16 bp, Homo sapiens
ccagaaagtgaaggga

SEQ ID NO: 31108 - DNA, 22 bp, Homo sapiens
cactcctgtctcgccgacagaa

SEQ ID NO: 31109 - DNA, 16 bp, Homo sapiens
ctgtggatgtcctcag

SEQ ID NO: 31110 - DNA, 24 bp, Homo sapiens
aattttaaaaaaagaaaagaaaaa

SEQ ID NO: 31111 - DNA, 20 bp, Homo sapiens
ggtaaatggtgtcagtgatc

SEQ ID NO: 31112 - DNA, 24 bp, Homo sapiens
atcttgtccccttcctcctcacct

SEQ ID NO: 31113 - DNA, 17 bp, Homo sapiens
aaccattacacccctca

SEQ ID NO: 31114 - DNA, 23 bp, Homo sapiens
tagcaaattttgggcagggggtg

SEQ ID NO: 31115 - DNA, 16 bp, Homo sapiens
cggatggagctgagta

SEQ ID NO: 31116 - DNA, 22 bp, Homo sapiens
catctgtcatggcccctccaaa

SEQ ID NO: 31117 - DNA, 16 bp, Homo sapiens
tgcccttggtaccttc

SEQ ID NO: 31118 - DNA, 24 bp, Homo sapiens
gctgcagggtcagtagcaggcctg

SEQ ID NO: 31119 - DNA, 19 bp, Homo sapiens
gtgtgtctgcaatgccaca

SEQ ID NO: 31120 - DNA, 19 bp, Homo sapiens
agcgggaaactccatggtg

SEQ ID NO: 31121 - DNA, 18 bp, Homo sapiens
caggtgcccgcccctgca

SEQ ID NO: 31122 - DNA, 20 bp, Homo sapiens
gaggacccagcctggcccag

SEQ ID NO: 31123 - DNA, 17 bp, Homo sapiens
cattctccatgtcttca

SEQ ID NO: 31124 - DNA, 18 bp, Homo sapiens
gattagcctggatgggcc

SEQ ID NO: 31125 - DNA, 21 bp, Homo sapiens
ccaaggggtgaggaattttga

SEQ ID NO: 31126 - DNA, 22 bp, Homo sapiens
gtgtactctcatagcggctgaa

SEQ ID NO: 31127 - DNA, 16 bp, Homo sapiens
ggcctcctaaagtgct

SEQ ID NO: 31128 - DNA, 20 bp, Homo sapiens
gtcaaaggagtcacagtatg

SEQ ID NO: 31129 - DNA, 22 bp, Homo sapiens
gtttcaccatgctggcaaggca

SEQ ID NO: 31130 - DNA, 17 bp, Homo sapiens
gccgaagcttttaggga

SEQ ID NO: 31131 - DNA, 17 bp, Homo sapiens
actacgcccagctaatt

SEQ ID NO: 31132 - DNA, 22 bp, Homo sapiens
agtacaagcagagtgaggtctg

SEQ ID NO: 31133 - DNA, 17 bp, Homo sapiens
gcgattctcttgcttca

SEQ ID NO: 31134 - DNA, 22 bp, Homo sapiens
aggagagactgaacacggtttc

SEQ ID NO: 31135 - DNA, 18 bp, Homo sapiens
gtgcagtggtgcaatttt

SEQ ID NO: 31136 - DNA, 21 bp, Homo sapiens
ggctcacacctgtaatcctag

SEQ ID NO: 31137 - DNA, 22 bp, Homo sapiens
ggattttgttttttttcttttg

SEQ ID NO: 31138 - DNA, 20 bp, Homo sapiens
ctgaggtgaggagtttgaga

SEQ ID NO: 31139 - DNA, 19 bp, Homo sapiens
ggtgctcaataaatccttt

SEQ ID NO: 31140 - DNA, 26 bp, Homo sapiens
cgtctctactaaaaatacaaaaatta

SEQ ID NO: 31141 - DNA, 23 bp, Homo sapiens
cttctgcctcatagtcctttggt

SEQ ID NO: 31142 - DNA, 17 bp, Homo sapiens
ctacctgggaagctgaa

SEQ ID NO: 31143 - DNA, 16 bp, Homo sapiens
tgagtgagtcaaggca

SEQ ID NO: 31144 - DNA, 16 bp, Homo sapiens
gttggaatgagccaaa

SEQ ID NO: 31145 - DNA, 16 bp, Homo sapiens
ggcagcctcacaggat

SEQ ID NO: 31146 - DNA, 21 bp, Homo sapiens
caacagagtaagactctgttt

SEQ ID NO: 31147 - DNA, 18 bp, Homo sapiens
cctcattctgtcctcagg

SEQ ID NO: 31148 - DNA, 19 bp, Homo sapiens
agttggtctcagtcactca

SEQ ID NO: 31149 - DNA, 17 bp, Homo sapiens
gcccaggagagtagttg

SEQ ID NO: 31150 - DNA, 24 bp, Homo sapiens
agtctaccaccagcttactggaag

SEQ ID NO: 31151 - DNA, 18 bp, Homo sapiens
tcctaatgaatgtgggag

SEQ ID NO: 31152 - DNA, 22 bp, Homo sapiens
ctctgtgctacctccccactgc

SEQ ID NO: 31153 - DNA, 19 bp, Homo sapiens
tcagaagggttgcagggag

SEQ ID NO: 31154 - DNA, 18 bp, Homo sapiens
tgcctgaagtagaagcaa

SEQ ID NO: 31155 - DNA, 21 bp, Homo sapiens
tgggtgggaagagtggtgggg

SEQ ID NO: 31156 - DNA, 20 bp, Homo sapiens
cctactcaaaggcttgggac

SEQ ID NO: 31157 - DNA, 16 bp, Homo sapiens
ttgagcaaggcacaga

SEQ ID NO: 31158 - DNA, 17 bp, Homo sapiens
aagcccctctccacccc

SEQ ID NO: 31159 - DNA, 21 bp, Homo sapiens
cactggaatttaatgaatgac

SEQ ID NO: 31160 - DNA, 17 bp, Homo sapiens
cctttgggtgcccatgg

SEQ ID NO: 31161 - DNA, 18 bp, Homo sapiens
agagagagctcccaatca

SEQ ID NO: 31162 - DNA, 16 bp, Homo sapiens
acctgggtgcagctct

SEQ ID NO: 31163 - DNA, 16 bp, Homo sapiens
taatgaccctgagggg

SEQ ID NO: 31164 - DNA, 16 bp, Homo sapiens
ccaaatcaggatgctc

SEQ ID NO: 31165 - DNA, 18 bp, Homo sapiens
ttagtggatcctctatcc

SEQ ID NO: 31166 - DNA, 20 bp, Homo sapiens
aacttcgacccctccctcca

SEQ ID NO: 31167 - DNA, 17 bp, Homo sapiens
acctagtgcctatagct

SEQ ID NO: 31168 - DNA, 23 bp, Homo sapiens
ctggattcaaagagagtctgtca

SEQ ID NO: 31169 - DNA, 19 bp, Homo sapiens
cctagtcatcacatgaccc

SEQ ID NO: 31170 - DNA, 21 bp, Homo sapiens
agaagcactgtgacaatgctg

SEQ ID NO: 31171 - DNA, 20 bp, Homo sapiens
ccctttagaaatatggctgt

SEQ ID NO: 31172 - DNA, 17 bp, Homo sapiens
tgaaaactccatcccct

SEQ ID NO: 31173 - DNA, 19 bp, Homo sapiens
ccagagttttatagggcat

SEQ ID NO: 31174 - DNA, 24 bp, Homo sapiens
accacaggggttccagagtctctg

SEQ ID NO: 31175 - DNA, 16 bp, Homo sapiens
tgttctaggctcttcc

SEQ ID NO: 31176 - DNA, 22 bp, Homo sapiens
ggcaggagagaaggactgagac

SEQ ID NO: 31177 - DNA, 17 bp, Homo sapiens
ggcacagagagagagaa

SEQ ID NO: 31178 - DNA, 24 bp, Homo sapiens
cagagtgcagatgcctgcttctgg

SEQ ID NO: 31179 - DNA, 23 bp, Homo sapiens
gacttgcagatggacaaaggcca

SEQ ID NO: 31180 - DNA, 24 bp, Homo sapiens
cctgagcttccagagggcctagga

SEQ ID NO: 31181 - DNA, 23 bp, Homo sapiens
aacctggggcggcagcgtggtgc

SEQ ID NO: 31182 - DNA, 16 bp, Homo sapiens
ctcaatggacctcaga

SEQ ID NO: 31183 - DNA, 16 bp, Homo sapiens
ggacttcaccgtcaag

SEQ ID NO: 31184 - DNA, 23 bp, Homo sapiens
gactaagatacagggtgggggtg

SEQ ID NO: 31185 - DNA, 18 bp, Homo sapiens
ctaccttgctgccaacaa

SEQ ID NO: 31186 - DNA, 16 bp, Homo sapiens
ctgatgcctagcttaa

SEQ ID NO: 31187 - DNA, 16 bp, Homo sapiens
cagcattgggggaaat

SEQ ID NO: 31188 - DNA, 18 bp, Homo sapiens
ctggcaccctctgtaccc

SEQ ID NO: 31189 - DNA, 17 bp, Homo sapiens
ctgggttccttcctcac

SEQ ID NO: 31190 - DNA, 24 bp, Homo sapiens
gctgctagatctcggtgcacaaac

SEQ ID NO: 31191 - DNA, 24 bp, Homo sapiens
gagtaggaagcgggtggagaagag

SEQ ID NO: 31192 - DNA, 24 bp, Homo sapiens
cagcccagctgtgccagccaagct

SEQ ID NO: 31193 - DNA, 24 bp, Homo sapiens
ctttcctggcggctgggtctttaa

SEQ ID NO: 31194 - DNA, 21 bp, Homo sapiens
cagggtgcggcgcccgcagat

SEQ ID NO: 31195 - DNA, 24 bp, Homo sapiens
cagctgcagctgggagcgcacaga

SEQ ID NO: 31196 - DNA, 23 bp, Homo sapiens
gccccatcccgggtgcatcgcag

SEQ ID NO: 31197 - DNA, 24 bp, Homo sapiens
gatgctgcgaggcggacggcgcgg

SEQ ID NO: 31198 - DNA, 24 bp, Homo sapiens
gccggacactcacagctcagtcag

SEQ ID NO: 31199 - DNA, 17 bp, Homo sapiens
ggcttggctgatactgg

SEQ ID NO: 31200 - DNA, 24 bp, Homo sapiens
aagcagcgagtccgcgccctcggg

SEQ ID NO: 31201 - DNA, 21 bp, Homo sapiens
cacggctcctcgggactgcga

SEQ ID NO: 31202 - DNA, 22 bp, Homo sapiens
ccgaaggctgcgtggtgccagc

SEQ ID NO: 31203 - DNA, 24 bp, Homo sapiens
cacctgcccggcgcagagaacctg

SEQ ID NO: 31204 - DNA, 21 bp, Homo sapiens
catttgtgtgtgcacgcctgt

SEQ ID NO: 31205 - DNA, 20 bp, Homo sapiens
caggcccctcagatcacgga

SEQ ID NO: 31206 - DNA, 19 bp, Homo sapiens
gtgtgcatgtggcatgtgc

SEQ ID NO: 31207 - DNA, 16 bp, Homo sapiens
ctgagctccacaccca

SEQ ID NO: 31208 - DNA, 21 bp, Homo sapiens
caagtgtgggcctgagccctg

SEQ ID NO: 31209 - DNA, 16 bp, Homo sapiens
caggtcctcccaggcc

SEQ ID NO: 31210 - DNA, 17 bp, Homo sapiens
cagcatctgcagcatct

SEQ ID NO: 31211 - DNA, 16 bp, Homo sapiens
ctagacccctcaaagc

SEQ ID NO: 31212 - DNA, 16 bp, Homo sapiens
catctggcgccacgaa

SEQ ID NO: 31213 - DNA, 22 bp, Homo sapiens
gaggggcctgaggaggggtagg

SEQ ID NO: 31214 - DNA, 19 bp, Homo sapiens
aactcccactgcccagcac

SEQ ID NO: 31215 - DNA, 20 bp, Homo sapiens
caggggcccagagtagctga

SEQ ID NO: 31216 - DNA, 24 bp, Homo sapiens
ctcgcaatcattccccggggacag

SEQ ID NO: 31217 - DNA, 24 bp, Homo sapiens
cccagcaccatcgtgaagagtggt

SEQ ID NO: 31218 - DNA, 16 bp, Homo sapiens
gaggaagccccaggag

SEQ ID NO: 31219 - DNA, 19 bp, Homo sapiens
cccaccccaccatctacac

SEQ ID NO: 31220 - DNA, 18 bp, Homo sapiens
cacagttttccaggagag

SEQ ID NO: 31221 - DNA, 23 bp, Homo sapiens
gggggagccagatgtcaacttct

SEQ ID NO: 31222 - DNA, 17 bp, Homo sapiens
cacacacttggtgctct

SEQ ID NO: 31223 - DNA, 22 bp, Homo sapiens
gagtgaggtcgggtcactcaag

SEQ ID NO: 31224 - DNA, 16 bp, Homo sapiens
cacagacacagtgacc

SEQ ID NO: 31225 - DNA, 19 bp, Homo sapiens
ttcaacgctctggagtctc

SEQ ID NO: 31226 - DNA, 20 bp, Homo sapiens
gcccctgctttgatgggggt

SEQ ID NO: 31227 - DNA, 24 bp, Homo sapiens
tcccaatggcctatttctttgaat

SEQ ID NO: 31228 - DNA, 16 bp, Homo sapiens
agggcacaagaacagt

SEQ ID NO: 31229 - DNA, 23 bp, Homo sapiens
tgtgtcctccctttcacctgtag

SEQ ID NO: 31230 - DNA, 21 bp, Homo sapiens
atgacactgcagcttctgttc

SEQ ID NO: 31231 - DNA, 16 bp, Homo sapiens
ccctcaggccctttcc

SEQ ID NO: 31232 - DNA, 23 bp, Homo sapiens
ctccctcacccggcacctaccac

SEQ ID NO: 31233 - DNA, 24 bp, Homo sapiens
tcctgtcggggaaccctctgcact

SEQ ID NO: 31234 - DNA, 17 bp, Homo sapiens
ctcagtgccctctccct

SEQ ID NO: 31235 - DNA, 21 bp, Homo sapiens
gactgggcggagtgcctgaac

SEQ ID NO: 31236 - DNA, 20 bp, Homo sapiens
atgtcaccccaggcagtttc

SEQ ID NO: 31237 - DNA, 20 bp, Homo sapiens
ccacatgcccaatgccagct

SEQ ID NO: 31238 - DNA, 22 bp, Homo sapiens
gggcactggcaaaggctggggg

SEQ ID NO: 31239 - DNA, 16 bp, Homo sapiens
acgtcgtcccccacat

SEQ ID NO: 31240 - DNA, 24 bp, Homo sapiens
gtcattgaggagggtgggggaagg

SEQ ID NO: 31241 - DNA, 21 bp, Homo sapiens
gctccagctctgtgaggatcc

SEQ ID NO: 31242 - DNA, 20 bp, Homo sapiens
caccccttggccctcgggcg

SEQ ID NO: 31243 - DNA, 24 bp, Homo sapiens
ctgtgctctgcctggacctcttgg

SEQ ID NO: 31244 - DNA, 21 bp, Homo sapiens
aggtgcccaatgcctcggtgg

SEQ ID NO: 31245 - DNA, 24 bp, Homo sapiens
ttattcgttgtctctttcctccac

SEQ ID NO: 31246 - DNA, 19 bp, Homo sapiens
ctggagcaggccggctgga

SEQ ID NO: 31247 - DNA, 19 bp, Homo sapiens
ctgagccctgtgggtctaa

SEQ ID NO: 31248 - DNA, 21 bp, Homo sapiens
acattggccagggtcagcccc

SEQ ID NO: 31249 - DNA, 22 bp, Homo sapiens
ttccctcccagccctcctctcc

SEQ ID NO: 31250 - DNA, 22 bp, Homo sapiens
gacctctgcccggcccacatcg

SEQ ID NO: 31251 - DNA, 18 bp, Homo sapiens
caagctggctaaagctcc

SEQ ID NO: 31252 - DNA, 22 bp, Homo sapiens
gtagggggtgggtgccggagct

SEQ ID NO: 31253 - DNA, 19 bp, Homo sapiens
gtctgccatccctggggct

SEQ ID NO: 31254 - DNA, 21 bp, Homo sapiens
cccaccctttcttccagcccc

SEQ ID NO: 31255 - DNA, 24 bp, Homo sapiens
caggaagaacgtgacgtgctgggc

SEQ ID NO: 31256 - DNA, 23 bp, Homo sapiens
aaaggatcaggttttcatgggaa

SEQ ID NO: 31257 - DNA, 18 bp, Homo sapiens
ctctccttggtgaatttc

SEQ ID NO: 31258 - DNA, 21 bp, Homo sapiens
agaaggggatgcaccagtggt

SEQ ID NO: 31259 - DNA, 24 bp, Homo sapiens
tttgatttcgggttctactcgctt

SEQ ID NO: 31260 - DNA, 22 bp, Homo sapiens
gtctcattgagcacggagccat

SEQ ID NO: 31261 - DNA, 17 bp, Homo sapiens
ctgcgccctgacctcct

SEQ ID NO: 31262 - DNA, 17 bp, Homo sapiens
cacggtctcattggctg

SEQ ID NO: 31263 - DNA, 24 bp, Homo sapiens
agctgcacacggcggtggagatgc

SEQ ID NO: 31264 - DNA, 24 bp, Homo sapiens
gttggcagccagcagcgtgtagtt

SEQ ID NO: 31265 - DNA, 24 bp, Homo sapiens
caccgtctctgcgctggctcttca

SEQ ID NO: 31266 - DNA, 21 bp, Homo sapiens
aaagggttgtccatgaaggca

SEQ ID NO: 31267 - DNA, 24 bp, Homo sapiens
ctgagttcctggagccggcagcca

SEQ ID NO: 31268 - DNA, 16 bp, Homo sapiens
gcagggttcaggatgg

SEQ ID NO: 31269 - DNA, 20 bp, Homo sapiens
cacccacgtcaacaacggca

SEQ ID NO: 31270 - DNA, 24 bp, Homo sapiens
caggcactccaatttctggggtca

SEQ ID NO: 31271 - DNA, 18 bp, Homo sapiens
cctccatcatggctgcct

SEQ ID NO: 31272 - DNA, 16 bp, Homo sapiens
gccagaacagcgggac

SEQ ID NO: 31273 - DNA, 16 bp, Homo sapiens
tcacccaccggcgaga

SEQ ID NO: 31274 - DNA, 24 bp, Homo sapiens
gcagcccacctccatcccccctcg

SEQ ID NO: 31275 - DNA, 17 bp, Homo sapiens
gtaccctctgccccagc

SEQ ID NO: 31276 - DNA, 24 bp, Homo sapiens
actgctttcctcctccctctgact

SEQ ID NO: 31277 - DNA, 16 bp, Homo sapiens
actgtagcctccagta

SEQ ID NO: 31278 - DNA, 24 bp, Homo sapiens
ctccctcctgctgcagtctccttc

SEQ ID NO: 31279 - DNA, 22 bp, Homo sapiens
ggtctccagatgtgctgttagt

SEQ ID NO: 31280 - DNA, 17 bp, Homo sapiens
ctggtctctggagctga

SEQ ID NO: 31281 - DNA, 21 bp, Homo sapiens
cacaagcttctacttcctatc

SEQ ID NO: 31282 - DNA, 24 bp, Homo sapiens
cagctggggccagggttggggggt

SEQ ID NO: 31283 - DNA, 18 bp, Homo sapiens
tctgaccagaaatgacat

SEQ ID NO: 31284 - DNA, 18 bp, Homo sapiens
ctgtgtccctacagacac

SEQ ID NO: 31285 - DNA, 19 bp, Homo sapiens
ctgcagtggctgtgcgggt

SEQ ID NO: 31286 - DNA, 23 bp, Homo sapiens
ggacgaaacaccttttggggtga

SEQ ID NO: 31287 - DNA, 22 bp, Homo sapiens
cctgagctctgacggccacccg

SEQ ID NO: 31288 - DNA, 24 bp, Homo sapiens
gtagaaaggaagaggcaggcaaag

SEQ ID NO: 31289 - DNA, 18 bp, Homo sapiens
tctggagacctggctccg

SEQ ID NO: 31290 - DNA, 17 bp, Homo sapiens
cacggttgatcccaaac

SEQ ID NO: 31291 - DNA, 16 bp, Homo sapiens
ctctgagagtacagga

SEQ ID NO: 31292 - DNA, 17 bp, Homo sapiens
taggaaacaaagccagg

SEQ ID NO: 31293 - DNA, 23 bp, Homo sapiens
gtctcggtggctgtgggcctggc

SEQ ID NO: 31294 - DNA, 17 bp, Homo sapiens
acacactcacacgccct

SEQ ID NO: 31295 - DNA, 23 bp, Homo sapiens
ctcaacaaatgtggacggagaaa

SEQ ID NO: 31296 - DNA, 23 bp, Homo sapiens
cagcccatcctctggagccagca

SEQ ID NO: 31297 - DNA, 20 bp, Homo sapiens
tctcgctccctagcttctca

SEQ ID NO: 31298 - DNA, 22 bp, Homo sapiens
tttgccctcggtgggggacagg

SEQ ID NO: 31299 - DNA, 23 bp, Homo sapiens
gcatcctgcaggcaagggtgggc

SEQ ID NO: 31300 - DNA, 19 bp, Homo sapiens
cacaggcatcactgaagta

SEQ ID NO: 31301 - DNA, 23 bp, Homo sapiens
tcctctctaggcccggctgtgct

SEQ ID NO: 31302 - DNA, 22 bp, Homo sapiens
atgacattgggtggcagctccc

SEQ ID NO: 31303 - DNA, 24 bp, Homo sapiens
atagggctggggaggggtgggaga

SEQ ID NO: 31304 - DNA, 19 bp, Homo sapiens
tcatcgagaacccacaata

SEQ ID NO: 31305 - DNA, 24 bp, Homo sapiens
gcttgctgaaggggtgcaggttga

SEQ ID NO: 31306 - DNA, 19 bp, Homo sapiens
gaccttcccaaaggcgccc

SEQ ID NO: 31307 - DNA, 24 bp, Homo sapiens
ttgtgcagcacacagccctgccaa

SEQ ID NO: 31308 - DNA, 22 bp, Homo sapiens
cttgacagccaccagcatcttg

SEQ ID NO: 31309 - DNA, 24 bp, Homo sapiens
gggctaccgtctgaccctgcaagc

SEQ ID NO: 31310 - DNA, 16 bp, Homo sapiens
gagctcctgggggtgg

SEQ ID NO: 31311 - DNA, 24 bp, Homo sapiens
tcgtgctcaagtgggagctggggg

SEQ ID NO: 31312 - DNA, 17 bp, Homo sapiens
caccccggtatccagcc

SEQ ID NO: 31313 - DNA, 22 bp, Homo sapiens
caacctcctgcctgagcaggac

SEQ ID NO: 31314 - DNA, 24 bp, Homo sapiens
ggggggtactgctggcctgggtcc

SEQ ID NO: 31315 - DNA, 23 bp, Homo sapiens
cagcctcacgctggaagtcctgc

SEQ ID NO: 31316 - DNA, 24 bp, Homo sapiens
gatgcagagggctgacatggctgg

SEQ ID NO: 31317 - DNA, 24 bp, Homo sapiens
gggcggccctcggtgcagacgccg

SEQ ID NO: 31318 - DNA, 19 bp, Homo sapiens
gagggctcggcccccaact

SEQ ID NO: 31319 - DNA, 16 bp, Homo sapiens
aagcggttgaggtccc

SEQ ID NO: 31320 - DNA, 24 bp, Homo sapiens
aggaggcgtccgagagtgctcggc

SEQ ID NO: 31321 - DNA, 22 bp, Homo sapiens
gaagggaagacggggcccagag

SEQ ID NO: 31322 - DNA, 21 bp, Homo sapiens
agcaccagcacatcgtgcgct

SEQ ID NO: 31323 - DNA, 19 bp, Homo sapiens
gatctttcttggtgtctcc

SEQ ID NO: 31324 - DNA, 23 bp, Homo sapiens
ctttgagtatatgcggcacgggg

SEQ ID NO: 31325 - DNA, 21 bp, Homo sapiens
acatcctccccaccagccagc

SEQ ID NO: 31326 - DNA, 24 bp, Homo sapiens
ctccacttccaggtccccagtctc

SEQ ID NO: 31327 - DNA, 16 bp, Homo sapiens
cgacctggctagccac

SEQ ID NO: 31328 - DNA, 20 bp, Homo sapiens
ctcaggctcctgggagttct

SEQ ID NO: 31329 - DNA, 16 bp, Homo sapiens
cagttgcgtgtggcca

SEQ ID NO: 31330 - DNA, 18 bp, Homo sapiens
acctgatgccaagctgct

SEQ ID NO: 31331 - DNA, 22 bp, Homo sapiens
gtagatatccctgctcatgcca

SEQ ID NO: 31332 - DNA, 19 bp, Homo sapiens
gtctggggcagctgctggc

SEQ ID NO: 31333 - DNA, 23 bp, Homo sapiens
tctacagtttggatgcaggggaa

SEQ ID NO: 31334 - DNA, 19 bp, Homo sapiens
cattttgtgcaccgggacc

SEQ ID NO: 31335 - DNA, 20 bp, Homo sapiens
catgcagccatcctagcaag

SEQ ID NO: 31336 - DNA, 21 bp, Homo sapiens
gtcaagattggtgattttggc

SEQ ID NO: 31337 - DNA, 16 bp, Homo sapiens
ctccaccaggagccga

SEQ ID NO: 31338 - DNA, 17 bp, Homo sapiens
atccagcgaatgggcag

SEQ ID NO: 31339 - DNA, 20 bp, Homo sapiens
ttacaggcgtgaaccaccga

SEQ ID NO: 31340 - DNA, 18 bp, Homo sapiens
caccacgccgaagctcca

SEQ ID NO: 31341 - DNA, 20 bp, Homo sapiens
gctgtgccttgacgggctgt

SEQ ID NO: 31342 - DNA, 16 bp, Homo sapiens
tgttggagagctggta

SEQ ID NO: 31343 - DNA, 16 bp, Homo sapiens
ggccgcaccatgctgc

SEQ ID NO: 31344 - DNA, 24 bp, Homo sapiens
tgaaaaaggaacctgaaggggcat

SEQ ID NO: 31345 - DNA, 21 bp, Homo sapiens
cgtaagttcaccaccgagagc

SEQ ID NO: 31346 - DNA, 16 bp, Homo sapiens
aagggccccccaacag

SEQ ID NO: 31347 - DNA, 22 bp, Homo sapiens
acctacggcaagcagccctggt

SEQ ID NO: 31348 - DNA, 23 bp, Homo sapiens
gaatcctggggttgactgtgtcc

SEQ ID NO: 31349 - DNA, 20 bp, Homo sapiens
tctggtgggcaggcacgtgg

SEQ ID NO: 31350 - DNA, 24 bp, Homo sapiens
gtagtgtgagctgccttgggagcc

SEQ ID NO: 31351 - DNA, 20 bp, Homo sapiens
acatccttgatgctgtggcg

SEQ ID NO: 31352 - DNA, 24 bp, Homo sapiens
agcctagtgggctttctcctctgt

SEQ ID NO: 31353 - DNA, 23 bp, Homo sapiens
tagcccaggacatccaggtagac

SEQ ID NO: 31354 - DNA, 24 bp, Homo sapiens
gggacgtgagttggagcggccacg

SEQ ID NO: 31355 - DNA, 20 bp, Homo sapiens
tgagggcaggccccagtatt

SEQ ID NO: 31356 - DNA, 22 bp, Homo sapiens
gggctgctggcagcgggagccc

SEQ ID NO: 31357 - DNA, 20 bp, Homo sapiens
gctgagggtgaattagatac

SEQ ID NO: 31358 - DNA, 24 bp, Homo sapiens
aagccctggcccaggcacctcctg

SEQ ID NO: 31359 - DNA, 19 bp, Homo sapiens
tgtcattacatcatttcac

SEQ ID NO: 31360 - DNA, 20 bp, Homo sapiens
tgagccactaaatcctaaaa

SEQ ID NO: 31361 - DNA, 20 bp, Homo sapiens
cattccatatggcaaccaaa

SEQ ID NO: 31362 - DNA, 17 bp, Homo sapiens
ctgtcttctcccagcaa

SEQ ID NO: 31363 - DNA, 18 bp, Homo sapiens
tgtgacttttctatggca

SEQ ID NO: 31364 - DNA, 17 bp, Homo sapiens
cacagagaagccttcca

SEQ ID NO: 31365 - DNA, 21 bp, Homo sapiens
ataacatgggagagtctttct

SEQ ID NO: 31366 - DNA, 16 bp, Homo sapiens
gagattctgtcaggca

SEQ ID NO: 31367 - DNA, 18 bp, Homo sapiens
ggcttccctgagttctgt

SEQ ID NO: 31368 - DNA, 18 bp, Homo sapiens
tagatgattgctgcagaa

SEQ ID NO: 31369 - DNA, 20 bp, Homo sapiens
tggcaaaggtaaaaccacag

SEQ ID NO: 31370 - DNA, 18 bp, Homo sapiens
atagtggtgaagccttca

SEQ ID NO: 31371 - DNA, 23 bp, Homo sapiens
aggtatcgaagctgaacggcagc

SEQ ID NO: 31372 - DNA, 17 bp, Homo sapiens
atgcttaaccgtgcttg

SEQ ID NO: 31373 - DNA, 20 bp, Homo sapiens
cagaagcagccttttccgct

SEQ ID NO: 31374 - DNA, 21 bp, Homo sapiens
gtcaggggactattaacacac

SEQ ID NO: 31375 - DNA, 16 bp, Homo sapiens
cactggctgtggaggc

SEQ ID NO: 31376 - DNA, 17 bp, Homo sapiens
tctgcccagtgcctaat

SEQ ID NO: 31377 - DNA, 17 bp, Homo sapiens
cacctacatacctgcat

SEQ ID NO: 31378 - DNA, 20 bp, Homo sapiens
cacgagcaggccttcctaaa

SEQ ID NO: 31379 - DNA, 16 bp, Homo sapiens
tagagaggcttgcaag

SEQ ID NO: 31380 - DNA, 18 bp, Homo sapiens
ttggcttgtctttgcgct

SEQ ID NO: 31381 - DNA, 16 bp, Homo sapiens
acctcagaagtctagg

SEQ ID NO: 31382 - DNA, 19 bp, Homo sapiens
gtgattgtgttatggctgt

SEQ ID NO: 31383 - DNA, 17 bp, Homo sapiens
ttcagtgacctgtattt

SEQ ID NO: 31384 - DNA, 18 bp, Homo sapiens
ggctatagtactcagtga

SEQ ID NO: 31385 - DNA, 16 bp, Homo sapiens
tgctctcctcccacct

SEQ ID NO: 31386 - DNA, 24 bp, Homo sapiens
gaaaccagaatattttcctttatc

SEQ ID NO: 31387 - DNA, 18 bp, Homo sapiens
tcctttcaaagggaatgt

SEQ ID NO: 31388 - DNA, 17 bp, Homo sapiens
ccactttgattccccaa

SEQ ID NO: 31389 - DNA, 19 bp, Homo sapiens
tgcaagttaaacaactctt

SEQ ID NO: 31390 - DNA, 20 bp, Homo sapiens
tgaaattcttctagagagga

SEQ ID NO: 31391 - DNA, 16 bp, Homo sapiens
tggcccctaagggatg

SEQ ID NO: 31392 - DNA, 16 bp, Homo sapiens
gtgcaattccttgtgc

SEQ ID NO: 31393 - DNA, 26 bp, Homo sapiens
aatgaacaaatgaataaaagataaat

SEQ ID NO: 31394 - DNA, 16 bp, Homo sapiens
tactaccgaatggaaa

SEQ ID NO: 31395 - DNA, 16 bp, Homo sapiens
tcttgggcgatgctct

SEQ ID NO: 31396 - DNA, 19 bp, Homo sapiens
aacttttttctgcctagat

SEQ ID NO: 31397 - DNA, 22 bp, Homo sapiens
ctaggagacgcttcatagtggt

SEQ ID NO: 31398 - DNA, 18 bp, Homo sapiens
tgaacacatttagttcct

SEQ ID NO: 31399 - DNA, 20 bp, Homo sapiens
ctgcttaggagaagagaggc

SEQ ID NO: 31400 - DNA, 23 bp, Homo sapiens
tattttaaataaagggtaggcca

SEQ ID NO: 31401 - DNA, 18 bp, Homo sapiens
aacatgtctttggtcacg

SEQ ID NO: 31402 - DNA, 20 bp, Homo sapiens
ttaattgtgtcctttgatgc

SEQ ID NO: 31403 - DNA, 17 bp, Homo sapiens
cctggatacctaccaca

SEQ ID NO: 31404 - DNA, 24 bp, Homo sapiens
ttttctttcctatttttgagtata

SEQ ID NO: 31405 - DNA, 20 bp, Homo sapiens
catgctagctatttatctgt

SEQ ID NO: 31406 - DNA, 21 bp, Homo sapiens
tgtatagagaaagcaaaagcc

SEQ ID NO: 31407 - DNA, 19 bp, Homo sapiens
aggctaagaaaagtaatgt

SEQ ID NO: 31408 - DNA, 24 bp, Homo sapiens
agtttggagacgaaggtcaacctt

SEQ ID NO: 31409 - DNA, 18 bp, Homo sapiens
aatagtgctctcctttta

SEQ ID NO: 31410 - DNA, 21 bp, Homo sapiens
gtagtaatagtctctgaagaa

SEQ ID NO: 31411 - DNA, 18 bp, Homo sapiens
ttccgactgggacatctg

SEQ ID NO: 31412 - DNA, 19 bp, Homo sapiens
catgaatcaagttacttca

SEQ ID NO: 31413 - DNA, 19 bp, Homo sapiens
ggagtgatttgaaaggatt

SEQ ID NO: 31414 - DNA, 17 bp, Homo sapiens
gaaattggcaagtcagg

SEQ ID NO: 31415 - DNA, 24 bp, Homo sapiens
aatttctgatatctaggatcattc

SEQ ID NO: 31416 - DNA, 19 bp, Homo sapiens
ggcctttggctcttccagg

SEQ ID NO: 31417 - DNA, 23 bp, Homo sapiens
atagattttggaaacttaagtat

SEQ ID NO: 31418 - DNA, 20 bp, Homo sapiens
ctgttcacatttgagcaagg

SEQ ID NO: 31419 - DNA, 20 bp, Homo sapiens
gctcttcatcatcatgacct

SEQ ID NO: 31420 - DNA, 23 bp, Homo sapiens
tgagggcattccacatggagcaa

SEQ ID NO: 31421 - DNA, 20 bp, Homo sapiens
ttttaaggtaccaaatcctc

SEQ ID NO: 31422 - DNA, 16 bp, Homo sapiens
ccagtgagaggcctca

SEQ ID NO: 31423 - DNA, 19 bp, Homo sapiens
cagatgctagtcagtgaat

SEQ ID NO: 31424 - DNA, 18 bp, Homo sapiens
aaccagatggaaaaaggg

SEQ ID NO: 31425 - DNA, 16 bp, Homo sapiens
ttccagcaaagtctcc

SEQ ID NO: 31426 - DNA, 20 bp, Homo sapiens
aagccactcacaggccccta

SEQ ID NO: 31427 - DNA, 22 bp, Homo sapiens
aggttgctgggttcctaactta

SEQ ID NO: 31428 - DNA, 21 bp, Homo sapiens
ctccggcgaggagggcaccga

SEQ ID NO: 31429 - DNA, 24 bp, Homo sapiens
aatctgctctggcttcagtgggtc

SEQ ID NO: 31430 - DNA, 20 bp, Homo sapiens
gggaccccgggggagccccg

SEQ ID NO: 31431 - DNA, 24 bp, Homo sapiens
ttaccacctggaaaagtagcagat

SEQ ID NO: 31432 - DNA, 16 bp, Homo sapiens
ggccgcgggcgccagg

SEQ ID NO: 31433 - DNA, 22 bp, Homo sapiens
gctctccaacagcgccaccacc

SEQ ID NO: 31434 - DNA, 22 bp, Homo sapiens
agtcccgcgggcgaggcggcag

SEQ ID NO: 31435 - DNA, 24 bp, Homo sapiens
cacgtccaccaccgtggcggcggg

SEQ ID NO: 31436 - DNA, 18 bp, Homo sapiens
gccgcccggcagctctga

SEQ ID NO: 31437 - DNA, 23 bp, Homo sapiens
cccgacggctcgggcccagcctc

SEQ ID NO: 31438 - DNA, 24 bp, Homo sapiens
acgcggacccgcagcgactccaca

SEQ ID NO: 31439 - DNA, 23 bp, Homo sapiens
ccctcttgttctccttgtgcgga

SEQ ID NO: 31440 - DNA, 19 bp, Homo sapiens
ccgcccctcgccctcagcc

SEQ ID NO: 31441 - DNA, 24 bp, Homo sapiens
agctccgcgccctcctctccatcc

SEQ ID NO: 31442 - DNA, 18 bp, Homo sapiens
ggtagaagatgagaaggt

SEQ ID NO: 31443 - DNA, 17 bp, Homo sapiens
agagatggcacctgggg

SEQ ID NO: 31444 - DNA, 20 bp, Homo sapiens
aaaaatgcccaaagtgggaa

SEQ ID NO: 31445 - DNA, 16 bp, Homo sapiens
agccggactgggacca

SEQ ID NO: 31446 - DNA, 19 bp, Homo sapiens
gaacatgcaacattatcca

SEQ ID NO: 31447 - DNA, 19 bp, Homo sapiens
accatggcacttaagaaca

SEQ ID NO: 31448 - DNA, 19 bp, Homo sapiens
ctttaacacaggacactta

SEQ ID NO: 31449 - DNA, 22 bp, Homo sapiens
tgtgctaggtatagtaatgtag

SEQ ID NO: 31450 - DNA, 18 bp, Homo sapiens
gaattgttttggcaagaa

SEQ ID NO: 31451 - DNA, 16 bp, Homo sapiens
tgagtttggttgaggc

SEQ ID NO: 31452 - DNA, 16 bp, Homo sapiens
ggctgtgtctgaacaa

SEQ ID NO: 31453 - DNA, 23 bp, Homo sapiens
atttataaatttaatcttgttac

SEQ ID NO: 31454 - DNA, 19 bp, Homo sapiens
ggcacttccttgacaggga

SEQ ID NO: 31455 - DNA, 20 bp, Homo sapiens
aaaaacaacaccaggtgcct

SEQ ID NO: 31456 - DNA, 18 bp, Homo sapiens
ccaggaggacatttgcac

SEQ ID NO: 31457 - DNA, 19 bp, Homo sapiens
acaatgattgttcttgttc

SEQ ID NO: 31458 - DNA, 16 bp, Homo sapiens
gttggcaggagttctt

SEQ ID NO: 31459 - DNA, 19 bp, Homo sapiens
aagacccttgcttctccaa

SEQ ID NO: 31460 - DNA, 17 bp, Homo sapiens
agcatatccagcagggc

SEQ ID NO: 31461 - DNA, 20 bp, Homo sapiens
caggagaaaggagctttctg

SEQ ID NO: 31462 - DNA, 21 bp, Homo sapiens
cacacggccccattttggcaa

SEQ ID NO: 31463 - DNA, 20 bp, Homo sapiens
taccattggttcctgtggca

SEQ ID NO: 31464 - DNA, 16 bp, Homo sapiens
gccttgatatcctggg

SEQ ID NO: 31465 - DNA, 20 bp, Homo sapiens
cctatttatcctgtctgcat

SEQ ID NO: 31466 - DNA, 17 bp, Homo sapiens
atgtagcctcgttcttg

SEQ ID NO: 31467 - DNA, 17 bp, Homo sapiens
atgagtgtgcttccagc

SEQ ID NO: 31468 - DNA, 23 bp, Homo sapiens
tatgatcacacttaccagaataa

SEQ ID NO: 31469 - DNA, 21 bp, Homo sapiens
ttactcctgcttctgtgtccc

SEQ ID NO: 31470 - DNA, 16 bp, Homo sapiens
aatgtcacctctgctt

SEQ ID NO: 31471 - DNA, 18 bp, Homo sapiens
tgtgcttcagatccctgc

SEQ ID NO: 31472 - DNA, 19 bp, Homo sapiens
agtgattgattcctgtcaa

SEQ ID NO: 31473 - DNA, 20 bp, Homo sapiens
acttgtatctgtccccacaa

SEQ ID NO: 31474 - DNA, 18 bp, Homo sapiens
agcacaccaaaagttaat

SEQ ID NO: 31475 - DNA, 16 bp, Homo sapiens
aacaaggctgggacca

SEQ ID NO: 31476 - DNA, 22 bp, Homo sapiens
aacagaacatttgacaagtgct

SEQ ID NO: 31477 - DNA, 16 bp, Homo sapiens
aggaatccaggggcac

SEQ ID NO: 31478 - DNA, 22 bp, Homo sapiens
gctaaaactttttctgtttttt

SEQ ID NO: 31479 - DNA, 17 bp, Homo sapiens
tccatggagacaaggtt

SEQ ID NO: 31480 - DNA, 17 bp, Homo sapiens
ttgacgaatgttggtcc

SEQ ID NO: 31481 - DNA, 16 bp, Homo sapiens
ctaagccaatcaccca

SEQ ID NO: 31482 - DNA, 19 bp, Homo sapiens
tgggggcctatttctgcga

SEQ ID NO: 31483 - DNA, 21 bp, Homo sapiens
ttaagccgagaacgtgagagc

SEQ ID NO: 31484 - DNA, 16 bp, Homo sapiens
tgatgagtgtgccagt

SEQ ID NO: 31485 - DNA, 23 bp, Homo sapiens
cctttttagtgaaatctgaatgt

SEQ ID NO: 31486 - DNA, 18 bp, Homo sapiens
atggaaataaatcatgca

SEQ ID NO: 31487 - DNA, 17 bp, Homo sapiens
tgtgtccctgtgaatcc

SEQ ID NO: 31488 - DNA, 23 bp, Homo sapiens
tttgaggtagtaagatgatgcca

SEQ ID NO: 31489 - DNA, 18 bp, Homo sapiens
gtcctcacatgtagcatt

SEQ ID NO: 31490 - DNA, 21 bp, Homo sapiens
gatatctgatctcaatatgac

SEQ ID NO: 31491 - DNA, 17 bp, Homo sapiens
ggtggaaggtattttgt

SEQ ID NO: 31492 - DNA, 17 bp, Homo sapiens
aactgcacgggtagtgg

SEQ ID NO: 31493 - DNA, 26 bp, Homo sapiens
acaataatttttcatttcatttgcta

SEQ ID NO: 31494 - DNA, 17 bp, Homo sapiens
gtcaaaaccttgtcaca

SEQ ID NO: 31495 - DNA, 22 bp, Homo sapiens
gcactgaagaataaaactaaac

SEQ ID NO: 31496 - DNA, 24 bp, Homo sapiens
tttccactaagcctcctcttacca

SEQ ID NO: 31497 - DNA, 19 bp, Homo sapiens
gggttactattgcattcat

SEQ ID NO: 31498 - DNA, 22 bp, Homo sapiens
catcaacttgctaaatcaatgc

SEQ ID NO: 31499 - DNA, 19 bp, Homo sapiens
gtgatgcgtccatattgtt

SEQ ID NO: 31500 - DNA, 20 bp, Homo sapiens
caacacctttgacttagcag

SEQ ID NO: 31501 - DNA, 19 bp, Homo sapiens
tccaggctgacagatacag

SEQ ID NO: 31502 - DNA, 24 bp, Homo sapiens
gtgcccagtgtgagatcgacctca

SEQ ID NO: 31503 - DNA, 21 bp, Homo sapiens
gtctgccataaaataccagaa

SEQ ID NO: 31504 - DNA, 20 bp, Homo sapiens
tggagctgtcctcagagaaa

SEQ ID NO: 31505 - DNA, 16 bp, Homo sapiens
gcagagtttacacagt

SEQ ID NO: 31506 - DNA, 24 bp, Homo sapiens
cagctaccatgaagcctcaggtta

SEQ ID NO: 31507 - DNA, 22 bp, Homo sapiens
ggaattctgaaatgtgaaacaa

SEQ ID NO: 31508 - DNA, 25 bp, Homo sapiens
ttacttttccttattaagtgtttac

SEQ ID NO: 31509 - DNA, 17 bp, Homo sapiens
ccaccattttggcaagg

SEQ ID NO: 31510 - DNA, 19 bp, Homo sapiens
attcatgcacttctgcaag

SEQ ID NO: 31511 - DNA, 19 bp, Homo sapiens
aaaaagttctagaaaggtt

SEQ ID NO: 31512 - DNA, 22 bp, Homo sapiens
tatataattttagccctttttt

SEQ ID NO: 31513 - DNA, 18 bp, Homo sapiens
gacattgctgatgggtac

SEQ ID NO: 31514 - DNA, 21 bp, Homo sapiens
gtcaatgaatgttcttcaaac

SEQ ID NO: 31515 - DNA, 16 bp, Homo sapiens
ggcagctgaatccatg

SEQ ID NO: 31516 - DNA, 23 bp, Homo sapiens
tatacttgccattgcccatttga

SEQ ID NO: 31517 - DNA, 17 bp, Homo sapiens
ccatcgccctcaaatga

SEQ ID NO: 31518 - DNA, 20 bp, Homo sapiens
ttctgatattctcctgggct

SEQ ID NO: 31519 - DNA, 18 bp, Homo sapiens
ggctatgttacaaactga

SEQ ID NO: 31520 - DNA, 19 bp, Homo sapiens
acttccaagatggccagca

SEQ ID NO: 31521 - DNA, 24 bp, Homo sapiens
tcacaaacacatccctgttgcttc

SEQ ID NO: 31522 - DNA, 21 bp, Homo sapiens
cctgtgtgaaatcgcaaccac

SEQ ID NO: 31523 - DNA, 21 bp, Homo sapiens
ctgattattgacctgaattga

SEQ ID NO: 31524 - DNA, 18 bp, Homo sapiens
ggctcagtgacaaccaag

SEQ ID NO: 31525 - DNA, 16 bp, Homo sapiens
cgaaatgccactctcc

SEQ ID NO: 31526 - DNA, 22 bp, Homo sapiens
cagccaatggctcttctacttt

SEQ ID NO: 31527 - DNA, 16 bp, Homo sapiens
tctccttacaggagtc

SEQ ID NO: 31528 - DNA, 19 bp, Homo sapiens
aagtggctacattcactta

SEQ ID NO: 31529 - DNA, 21 bp, Homo sapiens
caaaaaggagttctgaaaagc

SEQ ID NO: 31530 - DNA, 21 bp, Homo sapiens
atttcccacaacaccagcgat

SEQ ID NO: 31531 - DNA, 17 bp, Homo sapiens
aagttaagcagagcaac

SEQ ID NO: 31532 - DNA, 22 bp, Homo sapiens
tgacccttaccttaatcgacga

SEQ ID NO: 31533 - DNA, 24 bp, Homo sapiens
gtaatgtgattccaatcaatttta

SEQ ID NO: 31534 - DNA, 21 bp, Homo sapiens
ccacttgaaagtgatcaatca

SEQ ID NO: 31535 - DNA, 16 bp, Homo sapiens
agcctgccttgacatt

SEQ ID NO: 31536 - DNA, 22 bp, Homo sapiens
tgggaatgaccagcaatggtgt

SEQ ID NO: 31537 - DNA, 18 bp, Homo sapiens
agccacaagttgatgcag

SEQ ID NO: 31538 - DNA, 24 bp, Homo sapiens
ccttcgtttgtaggctgtctccaa

SEQ ID NO: 31539 - DNA, 19 bp, Homo sapiens
tcacctctcagacagttgg

SEQ ID NO: 31540 - DNA, 22 bp, Homo sapiens
atctcgtctggctcatcattaa

SEQ ID NO: 31541 - DNA, 16 bp, Homo sapiens
ttgctgtttctgctct

SEQ ID NO: 31542 - DNA, 21 bp, Homo sapiens
ccaaccttgtcaaagcagagg

SEQ ID NO: 31543 - DNA, 16 bp, Homo sapiens
gcagaagtcttgtggg

SEQ ID NO: 31544 - DNA, 17 bp, Homo sapiens
gccctatgaaggcccca

SEQ ID NO: 31545 - DNA, 16 bp, Homo sapiens
gagtcatcctggccaa

SEQ ID NO: 31546 - DNA, 19 bp, Homo sapiens
tgcttgtgtgcatgtgtgt

SEQ ID NO: 31547 - DNA, 18 bp, Homo sapiens
gacaaacatggagaggct

SEQ ID NO: 31548 - DNA, 18 bp, Homo sapiens
tttgagccttaagatgtt

SEQ ID NO: 31549 - DNA, 20 bp, Homo sapiens
cggatatattgataagtgct

SEQ ID NO: 31550 - DNA, 24 bp, Homo sapiens
tgaagagtatgtggcaggcagatt

SEQ ID NO: 31551 - DNA, 16 bp, Homo sapiens
tgggagagtttggagt

SEQ ID NO: 31552 - DNA, 18 bp, Homo sapiens
agagctatggagacacca

SEQ ID NO: 31553 - DNA, 20 bp, Homo sapiens
tggcttgattttcaaagata

SEQ ID NO: 31554 - DNA, 20 bp, Homo sapiens
caggcttacttctagctttg

SEQ ID NO: 31555 - DNA, 17 bp, Homo sapiens
ccacgtagaagcagaaa

SEQ ID NO: 31556 - DNA, 20 bp, Homo sapiens
gcggcagactagcaatgctg

SEQ ID NO: 31557 - DNA, 16 bp, Homo sapiens
tctcttgcttgtcagg

SEQ ID NO: 31558 - DNA, 19 bp, Homo sapiens
tgatggaaatgtccacttg

SEQ ID NO: 31559 - DNA, 17 bp, Homo sapiens
tccagattttggttgtt

SEQ ID NO: 31560 - DNA, 19 bp, Homo sapiens
gtcttcacaaaacctagga

SEQ ID NO: 31561 - DNA, 19 bp, Homo sapiens
tgggttacattgacaagaa

SEQ ID NO: 31562 - DNA, 24 bp, Homo sapiens
gatgtcatctacattggtggccta

SEQ ID NO: 31563 - DNA, 17 bp, Homo sapiens
acctagtttgtatgagt

SEQ ID NO: 31564 - DNA, 18 bp, Homo sapiens
aggctgtatccaagatgt

SEQ ID NO: 31565 - DNA, 22 bp, Homo sapiens
atatacaaagaatggttttaat

SEQ ID NO: 31566 - DNA, 22 bp, Homo sapiens
aacaaacaatgcatctctcaat

SEQ ID NO: 31567 - DNA, 22 bp, Homo sapiens
tcttgttggaacaatatagatg

SEQ ID NO: 31568 - DNA, 17 bp, Homo sapiens
ctcagtgagtgcccttc

SEQ ID NO: 31569 - DNA, 19 bp, Homo sapiens
agtagacccaggacaaaca

SEQ ID NO: 31570 - DNA, 17 bp, Homo sapiens
ccaagatcctacacaga

SEQ ID NO: 31571 - DNA, 16 bp, Homo sapiens
ttttgtgagcaacctt

SEQ ID NO: 31572 - DNA, 20 bp, Homo sapiens
catttgaggaagggattctt

SEQ ID NO: 31573 - DNA, 23 bp, Homo sapiens
gattcagaggcagaccaatgtgg

SEQ ID NO: 31574 - DNA, 17 bp, Homo sapiens
gcagtgtcctctgtaat

SEQ ID NO: 31575 - DNA, 23 bp, Homo sapiens
gtaccaagtttcactgtttcgct

SEQ ID NO: 31576 - DNA, 17 bp, Homo sapiens
ggcagagagagagaaaa

SEQ ID NO: 31577 - DNA, 17 bp, Homo sapiens
ccgggaatggcaaacac

SEQ ID NO: 31578 - DNA, 19 bp, Homo sapiens
aaatgtaaagatgcaggga

SEQ ID NO: 31579 - DNA, 16 bp, Homo sapiens
aacctcctcacaggct

SEQ ID NO: 31580 - DNA, 24 bp, Homo sapiens
caacatttttctatttagttgcca

SEQ ID NO: 31581 - DNA, 16 bp, Homo sapiens
cttgaagcaccggctg

SEQ ID NO: 31582 - DNA, 17 bp, Homo sapiens
ccctgtcacaatggagg

SEQ ID NO: 31583 - DNA, 16 bp, Homo sapiens
caactcaaatgtcgca

SEQ ID NO: 31584 - DNA, 17 bp, Homo sapiens
ctgccctcacaagtggg

SEQ ID NO: 31585 - DNA, 23 bp, Homo sapiens
gggaaacaaccatagattaattt

SEQ ID NO: 31586 - DNA, 20 bp, Homo sapiens
tcacggagcccagtgccagc

SEQ ID NO: 31587 - DNA, 17 bp, Homo sapiens
agggcaggatgaggcaa

SEQ ID NO: 31588 - DNA, 23 bp, Homo sapiens
tattagaaataatataaaagcaa

SEQ ID NO: 31589 - DNA, 23 bp, Homo sapiens
cccattgcttctgaataatattt

SEQ ID NO: 31590 - DNA, 19 bp, Homo sapiens
atgcaatgttattaacaca

SEQ ID NO: 31591 - DNA, 18 bp, Homo sapiens
acatttgcatcccttgtt

SEQ ID NO: 31592 - DNA, 26 bp, Homo sapiens
tatagatttaataaagttattgatta

SEQ ID NO: 31593 - DNA, 18 bp, Homo sapiens
tctggaatcttgaatgct

SEQ ID NO: 31594 - DNA, 21 bp, Homo sapiens
gtttttaatggacaaagcggt

SEQ ID NO: 31595 - DNA, 18 bp, Homo sapiens
ctgcaaacttgtcagact

SEQ ID NO: 31596 - DNA, 23 bp, Homo sapiens
aactcaccaatatcacatttggt

SEQ ID NO: 31597 - DNA, 16 bp, Homo sapiens
ggacagtgggtctgtc

SEQ ID NO: 31598 - DNA, 21 bp, Homo sapiens
gaaaaagagcctgaatttctt

SEQ ID NO: 31599 - DNA, 17 bp, Homo sapiens
gtgctggtcacaaaagg

SEQ ID NO: 31600 - DNA, 20 bp, Homo sapiens
aagtggcaacagcttttata

SEQ ID NO: 31601 - DNA, 19 bp, Homo sapiens
ctctgtctcccacataaat

SEQ ID NO: 31602 - DNA, 24 bp, Homo sapiens
tggcacgaagtgaccctttccatg

SEQ ID NO: 31603 - DNA, 21 bp, Homo sapiens
ataaatgcctccgatttctat

SEQ ID NO: 31604 - DNA, 19 bp, Homo sapiens
agtggacaacgaaacacct

SEQ ID NO: 31605 - DNA, 17 bp, Homo sapiens
aattgctcttcctgagg

SEQ ID NO: 31606 - DNA, 20 bp, Homo sapiens
ttttgaaggataatacagat

SEQ ID NO: 31607 - DNA, 19 bp, Homo sapiens
tggagttgcagacatttaa

SEQ ID NO: 31608 - DNA, 22 bp, Homo sapiens
cctgcaagggtgtctaagtaca

SEQ ID NO: 31609 - DNA, 17 bp, Homo sapiens
agggacaggagcaatga

SEQ ID NO: 31610 - DNA, 21 bp, Homo sapiens
catggtttcattaataaacct

SEQ ID NO: 31611 - DNA, 17 bp, Homo sapiens
acaggggtttgaaaagc

SEQ ID NO: 31612 - DNA, 20 bp, Homo sapiens
gtcactggctgtttgcagtt

SEQ ID NO: 31613 - DNA, 20 bp, Homo sapiens
tatccaggctcacatgtgca

SEQ ID NO: 31614 - DNA, 23 bp, Homo sapiens
tgaagacatctatagctcttatc

SEQ ID NO: 31615 - DNA, 16 bp, Homo sapiens
tttgcacactggtgac

SEQ ID NO: 31616 - DNA, 16 bp, Homo sapiens
caacatcgatgaatgc

SEQ ID NO: 31617 - DNA, 21 bp, Homo sapiens
tcctgtaaaatttccaaaaca

SEQ ID NO: 31618 - DNA, 19 bp, Homo sapiens
cagagttgcagcctaccac

SEQ ID NO: 31619 - DNA, 19 bp, Homo sapiens
cagagtatagcttcaaaga

SEQ ID NO: 31620 - DNA, 18 bp, Homo sapiens
tatagacaactgccagag

SEQ ID NO: 31621 - DNA, 21 bp, Homo sapiens
ttcagcacagtatatatgtat

SEQ ID NO: 31622 - DNA, 22 bp, Homo sapiens
tactaatggctattcttgcctc

SEQ ID NO: 31623 - DNA, 19 bp, Homo sapiens
tggtaagtgagatcccatc

SEQ ID NO: 31624 - DNA, 22 bp, Homo sapiens
tactggagaaagtgattcttgc

SEQ ID NO: 31625 - DNA, 20 bp, Homo sapiens
agcaagtgagatttgtcttc

SEQ ID NO: 31626 - DNA, 24 bp, Homo sapiens
gcctgagtacttaattagcttggc

SEQ ID NO: 31627 - DNA, 16 bp, Homo sapiens
tggccggcacatacat

SEQ ID NO: 31628 - DNA, 19 bp, Homo sapiens
atgaacaagatgaacagct

SEQ ID NO: 31629 - DNA, 19 bp, Homo sapiens
gctcagaattctcttccag

SEQ ID NO: 31630 - DNA, 18 bp, Homo sapiens
aacagtctgtgggaatga

SEQ ID NO: 31631 - DNA, 19 bp, Homo sapiens
ttcctatgggaactgagat

SEQ ID NO: 31632 - DNA, 19 bp, Homo sapiens
acagagttccagactgaat

SEQ ID NO: 31633 - DNA, 24 bp, Homo sapiens
gtagtttttcttcttttttattgt

SEQ ID NO: 31634 - DNA, 25 bp, Homo sapiens
aaatgtgttaaagaaattttaagaa

SEQ ID NO: 31635 - DNA, 17 bp, Homo sapiens
cggatcagaggcacact

SEQ ID NO: 31636 - DNA, 24 bp, Homo sapiens
agtatgtgtggatgggtagataag

SEQ ID NO: 31637 - DNA, 16 bp, Homo sapiens
atcacagaggcactgg

SEQ ID NO: 31638 - DNA, 24 bp, Homo sapiens
catttcacaaccaatgtattcaac

SEQ ID NO: 31639 - DNA, 19 bp, Homo sapiens
gagagagacataaaaggag

SEQ ID NO: 31640 - DNA, 16 bp, Homo sapiens
aggacattgatgagtg

SEQ ID NO: 31641 - DNA, 16 bp, Homo sapiens
ctcgtcattcatacgc

SEQ ID NO: 31642 - DNA, 22 bp, Homo sapiens
gccaggacttactcaacaaatt

SEQ ID NO: 31643 - DNA, 19 bp, Homo sapiens
tcatttgggaatgttcaaa

SEQ ID NO: 31644 - DNA, 25 bp, Homo sapiens
agaaaatctgactttcttttaatac

SEQ ID NO: 31645 - DNA, 16 bp, Homo sapiens
acaaggcgacagtcac

SEQ ID NO: 31646 - DNA, 18 bp, Homo sapiens
gttggtcttcattcctga

SEQ ID NO: 31647 - DNA, 16 bp, Homo sapiens
ttccctgagttgccct

SEQ ID NO: 31648 - DNA, 23 bp, Homo sapiens
ctatagaattcgcatcccaatga

SEQ ID NO: 31649 - DNA, 18 bp, Homo sapiens
caagttccacatttccac

SEQ ID NO: 31650 - DNA, 18 bp, Homo sapiens
ttcaccactattggctca

SEQ ID NO: 31651 - DNA, 16 bp, Homo sapiens
cccatctcgaagggac

SEQ ID NO: 31652 - DNA, 20 bp, Homo sapiens
ttctgttgtcacctccaaca

SEQ ID NO: 31653 - DNA, 18 bp, Homo sapiens
aacattgtcaggtatgtc

SEQ ID NO: 31654 - DNA, 20 bp, Homo sapiens
aggagaaggagggctcccga

SEQ ID NO: 31655 - DNA, 24 bp, Homo sapiens
gtgaaagtttttaaggtggtcaaa

SEQ ID NO: 31656 - DNA, 21 bp, Homo sapiens
cagctcagggtaatcttacta

SEQ ID NO: 31657 - DNA, 16 bp, Homo sapiens
gtgtggagcagatccg

SEQ ID NO: 31658 - DNA, 23 bp, Homo sapiens
catgaaagtctcctggagatgga

SEQ ID NO: 31659 - DNA, 23 bp, Homo sapiens
ctgctgcggggcagccaggccat

SEQ ID NO: 31660 - DNA, 18 bp, Homo sapiens
cggcagatgagtggggca

SEQ ID NO: 31661 - DNA, 18 bp, Homo sapiens
caccatcaactcctcctc

SEQ ID NO: 31662 - DNA, 22 bp, Homo sapiens
cacgcgcccattgatgtggtca

SEQ ID NO: 31663 - DNA, 17 bp, Homo sapiens
cacatgctacctccagt

SEQ ID NO: 31664 - DNA, 18 bp, Homo sapiens
gagcgcagcatgatggcc

SEQ ID NO: 31665 - DNA, 21 bp, Homo sapiens
ctggagaggcatgaagctgga

SEQ ID NO: 31666 - DNA, 22 bp, Homo sapiens
catacatgctagatgcccagaa

SEQ ID NO: 31667 - DNA, 18 bp, Homo sapiens
gtgtgaagacagaggcag

SEQ ID NO: 31668 - DNA, 22 bp, Homo sapiens
tccaataagaacgggcttcaga

SEQ ID NO: 31669 - DNA, 20 bp, Homo sapiens
gctgagttgaaggaccggtt

SEQ ID NO: 31670 - DNA, 17 bp, Homo sapiens
tccatgcccctaaacca

SEQ ID NO: 31671 - DNA, 18 bp, Homo sapiens
gacaatgacactgagact

SEQ ID NO: 31672 - DNA, 20 bp, Homo sapiens
tctccccaaacagctcctct

SEQ ID NO: 31673 - DNA, 21 bp, Homo sapiens
gtattgatttgggtgatatca

SEQ ID NO: 31674 - DNA, 22 bp, Homo sapiens
cagcatggaactctgacccaac

SEQ ID NO: 31675 - DNA, 19 bp, Homo sapiens
aggggtttcaataggcaaa

SEQ ID NO: 31676 - DNA, 16 bp, Homo sapiens
cttgcggaaggtgcca

SEQ ID NO: 31677 - DNA, 24 bp, Homo sapiens
ctggttctgttattctaagcactt

SEQ ID NO: 31678 - DNA, 16 bp, Homo sapiens
ggatggaggagctccg

SEQ ID NO: 31679 - DNA, 16 bp, Homo sapiens
cccctcactggccgta

SEQ ID NO: 31680 - DNA, 16 bp, Homo sapiens
gccagcagaaaagctg

SEQ ID NO: 31681 - DNA, 20 bp, Homo sapiens
tgggcactcaatgcctgctc

SEQ ID NO: 31682 - DNA, 17 bp, Homo sapiens
atgagacccaccacaaa

SEQ ID NO: 31683 - DNA, 19 bp, Homo sapiens
ctgctgccgggcttggtgg

SEQ ID NO: 31684 - DNA, 16 bp, Homo sapiens
ctggttggagagggtt

SEQ ID NO: 31685 - DNA, 20 bp, Homo sapiens
ctgcttggtcatgcttgtca

SEQ ID NO: 31686 - DNA, 24 bp, Homo sapiens
attttctggtcttgtggctgggat

SEQ ID NO: 31687 - DNA, 16 bp, Homo sapiens
ttatccaggacagggt

SEQ ID NO: 31688 - DNA, 24 bp, Homo sapiens
ccaaagcttgtcactctcctctag

SEQ ID NO: 31689 - DNA, 16 bp, Homo sapiens
gggacagtggcactgc

SEQ ID NO: 31690 - DNA, 21 bp, Homo sapiens
attttctatgcctggtgccca

SEQ ID NO: 31691 - DNA, 16 bp, Homo sapiens
gagccgagcccatgca

SEQ ID NO: 31692 - DNA, 19 bp, Homo sapiens
taatgcctcacctcagcaa

SEQ ID NO: 31693 - DNA, 20 bp, Homo sapiens
gaaccacacattgattcact

SEQ ID NO: 31694 - DNA, 20 bp, Homo sapiens
catggtgtcctgagcttcct

SEQ ID NO: 31695 - DNA, 22 bp, Homo sapiens
agttaatactttccttgctctt

SEQ ID NO: 31696 - DNA, 22 bp, Homo sapiens
cttccacctggccctccactgc

SEQ ID NO: 31697 - DNA, 16 bp, Homo sapiens
ctgaggctgaggaagc

SEQ ID NO: 31698 - DNA, 24 bp, Homo sapiens
ggactctgtgtaccactctccacc

SEQ ID NO: 31699 - DNA, 17 bp, Homo sapiens
aacgtggacttggtgct

SEQ ID NO: 31700 - DNA, 21 bp, Homo sapiens
ctctcccagcaacggggttga

SEQ ID NO: 31701 - DNA, 16 bp, Homo sapiens
tcagctactgttctgc

SEQ ID NO: 31702 - DNA, 24 bp, Homo sapiens
tcagggcccaaggccatacctggc

SEQ ID NO: 31703 - DNA, 16 bp, Homo sapiens
gacactgatgcagcca

SEQ ID NO: 31704 - DNA, 19 bp, Homo sapiens
tcctgcttggtctgggaca

SEQ ID NO: 31705 - DNA, 16 bp, Homo sapiens
ctctggggaggttagt

SEQ ID NO: 31706 - DNA, 22 bp, Homo sapiens
gatctcattcatcttctgcaga

SEQ ID NO: 31707 - DNA, 22 bp, Homo sapiens
accacggtagaggggccactgt

SEQ ID NO: 31708 - DNA, 16 bp, Homo sapiens
ctcgctgacctcctgg

SEQ ID NO: 31709 - DNA, 19 bp, Homo sapiens
ggcagacgggagaacgaga

SEQ ID NO: 31710 - DNA, 21 bp, Homo sapiens
tgtcagacgcacacggctcct

SEQ ID NO: 31711 - DNA, 24 bp, Homo sapiens
ggcctggatgttgcaggcctggga

SEQ ID NO: 31712 - DNA, 21 bp, Homo sapiens
atccagtgcccagcgcttgga

SEQ ID NO: 31713 - DNA, 16 bp, Homo sapiens
caggactggaacagca

SEQ ID NO: 31714 - DNA, 23 bp, Homo sapiens
cttctgacctagagtgtatgtca

SEQ ID NO: 31715 - DNA, 23 bp, Homo sapiens
aggaagtcccggacctgctggat

SEQ ID NO: 31716 - DNA, 21 bp, Homo sapiens
gcatagaggatgatccgcaga

SEQ ID NO: 31717 - DNA, 20 bp, Homo sapiens
ctggcgctcacctgggtctc

SEQ ID NO: 31718 - DNA, 19 bp, Homo sapiens
tactgaacatccacatgta

SEQ ID NO: 31719 - DNA, 19 bp, Homo sapiens
tcctcggctgccctaatct

SEQ ID NO: 31720 - DNA, 16 bp, Homo sapiens
cagcggaccaggcaga

SEQ ID NO: 31721 - DNA, 24 bp, Homo sapiens
atcttgcacttgctgtggcacctt

SEQ ID NO: 31722 - DNA, 17 bp, Homo sapiens
cggtggggccttcttga

SEQ ID NO: 31723 - DNA, 24 bp, Homo sapiens
taaaatgggaactctgacttgccc

SEQ ID NO: 31724 - DNA, 16 bp, Homo sapiens
ccaagacaatggcaca

SEQ ID NO: 31725 - DNA, 23 bp, Homo sapiens
cccgcctcggctgcacttaccat

SEQ ID NO: 31726 - DNA, 22 bp, Homo sapiens
tgtccacagctctgtggcaact

SEQ ID NO: 31727 - DNA, 23 bp, Homo sapiens
cagctgctcagccacctgccccg

SEQ ID NO: 31728 - DNA, 22 bp, Homo sapiens
caggtgtggggtgggattggtt

SEQ ID NO: 31729 - DNA, 22 bp, Homo sapiens
ctgcagcgggagccacaggctg

SEQ ID NO: 31730 - DNA, 24 bp, Homo sapiens
ggagatgtctggctgtttctggtg

SEQ ID NO: 31731 - DNA, 20 bp, Homo sapiens
gtgcaagccatctgcctgga

SEQ ID NO: 31732 - DNA, 17 bp, Homo sapiens
atgtcttcgttgcctga

SEQ ID NO: 31733 - DNA, 24 bp, Homo sapiens
tggctgggggagtggggttctcac

SEQ ID NO: 31734 - DNA, 18 bp, Homo sapiens
caggcgggaggaggagga

SEQ ID NO: 31735 - DNA, 21 bp, Homo sapiens
gcagttggtgtgtgacaagct

SEQ ID NO: 31736 - DNA, 17 bp, Homo sapiens
cagctcgcgccttttgg

SEQ ID NO: 31737 - DNA, 16 bp, Homo sapiens
gaaggtgggtgtcagg

SEQ ID NO: 31738 - DNA, 24 bp, Homo sapiens
aggagccttccggatgctgagcac

SEQ ID NO: 31739 - DNA, 23 bp, Homo sapiens
cacaagcttggggctgccggtgc

SEQ ID NO: 31740 - DNA, 16 bp, Homo sapiens
cctctccctcctgctc

SEQ ID NO: 31741 - DNA, 24 bp, Homo sapiens
ctccggctgtccctgagctggtcc

SEQ ID NO: 31742 - DNA, 23 bp, Homo sapiens
tgatccttcaggtgaggagaggg

SEQ ID NO: 31743 - DNA, 16 bp, Homo sapiens
ctgctcgtaggctgtg

SEQ ID NO: 31744 - DNA, 24 bp, Homo sapiens
gtctccttactatgtatcagagga

SEQ ID NO: 31745 - DNA, 16 bp, Homo sapiens
gagatggaggaggagc

SEQ ID NO: 31746 - DNA, 16 bp, Homo sapiens
gaggaggagacgttgt

SEQ ID NO: 31747 - DNA, 23 bp, Homo sapiens
catgcccggggttatccgggtgc

SEQ ID NO: 31748 - DNA, 20 bp, Homo sapiens
taagctcctctcccttctca

SEQ ID NO: 31749 - DNA, 24 bp, Homo sapiens
attttttcaaactgctccctcttc

SEQ ID NO: 31750 - DNA, 16 bp, Homo sapiens
tagcagttgctctgag

SEQ ID NO: 31751 - DNA, 18 bp, Homo sapiens
actctccaggtctctcgg

SEQ ID NO: 31752 - DNA, 18 bp, Homo sapiens
tagcctgtggattctctg

SEQ ID NO: 31753 - DNA, 24 bp, Homo sapiens
caaaaccacaccagcctcacagga

SEQ ID NO: 31754 - DNA, 16 bp, Homo sapiens
cacagagcaggaggtg

SEQ ID NO: 31755 - DNA, 19 bp, Homo sapiens
tgcctttaaactgtaatgc

SEQ ID NO: 31756 - DNA, 19 bp, Homo sapiens
gatcctagatgcaaagagt

SEQ ID NO: 31757 - DNA, 24 bp, Homo sapiens
acccctggagcataattcttgcaa

SEQ ID NO: 31758 - DNA, 17 bp, Homo sapiens
caatgccaccgccagcc

SEQ ID NO: 31759 - DNA, 24 bp, Homo sapiens
ggagaggatggcactggccacctg

SEQ ID NO: 31760 - DNA, 16 bp, Homo sapiens
cttgcttccagaccta

SEQ ID NO: 31761 - DNA, 24 bp, Homo sapiens
tgctcggatctgctcaatcttact

SEQ ID NO: 31762 - DNA, 16 bp, Homo sapiens
gtgaccagtgccagcg

SEQ ID NO: 31763 - DNA, 24 bp, Homo sapiens
tcctccagcccaggccctgaccac

SEQ ID NO: 31764 - DNA, 20 bp, Homo sapiens
agagggcccgggctgcgaca

SEQ ID NO: 31765 - DNA, 18 bp, Homo sapiens
ctcccggaggtccgcatc

SEQ ID NO: 31766 - DNA, 22 bp, Homo sapiens
ctgtctctgactgtcatttttc

SEQ ID NO: 31767 - DNA, 24 bp, Homo sapiens
cgggtagcgattacagtagcctcg

SEQ ID NO: 31768 - DNA, 24 bp, Homo sapiens
gaaagagcctcaggtcagacctcc

SEQ ID NO: 31769 - DNA, 17 bp, Homo sapiens
gaggcagcggcctgatg

SEQ ID NO: 31770 - DNA, 24 bp, Homo sapiens
agctgttaccatggcttttattct

SEQ ID NO: 31771 - DNA, 23 bp, Homo sapiens
cggagtgtgtgcactcacagggc

SEQ ID NO: 31772 - DNA, 21 bp, Homo sapiens
cagcgctgcagccatccgcca

SEQ ID NO: 31773 - DNA, 24 bp, Homo sapiens
aggacatcctgccctgctgcagac

SEQ ID NO: 31774 - DNA, 20 bp, Homo sapiens
tccccacgcagttcacaggg

SEQ ID NO: 31775 - DNA, 23 bp, Homo sapiens
agagcctcagcgtcccccaggct

SEQ ID NO: 31776 - DNA, 24 bp, Homo sapiens
tctaggacacagtccctgacacca

SEQ ID NO: 31777 - DNA, 20 bp, Homo sapiens
ataggtccggtctggacact

SEQ ID NO: 31778 - DNA, 24 bp, Homo sapiens
tttgtgggcacagcagctctggag

SEQ ID NO: 31779 - DNA, 22 bp, Homo sapiens
tcccgacaggggcactgccctg

SEQ ID NO: 31780 - DNA, 16 bp, Homo sapiens
acaactccctcagccc

SEQ ID NO: 31781 - DNA, 24 bp, Homo sapiens
tgagaacggggacagaagacgccc

SEQ ID NO: 31782 - DNA, 22 bp, Homo sapiens
gtgtgctccctaccactggaag

SEQ ID NO: 31783 - DNA, 23 bp, Homo sapiens
ggaggggcagcagagaggctggt

SEQ ID NO: 31784 - DNA, 24 bp, Homo sapiens
tgacgaggagagtgggcgctgcct

SEQ ID NO: 31785 - DNA, 24 bp, Homo sapiens
ccaccctcacttcgtacctggttg

SEQ ID NO: 31786 - DNA, 24 bp, Homo sapiens
ctctcctcctgcaggctgtgactg

SEQ ID NO: 31787 - DNA, 18 bp, Homo sapiens
ccctggccactggccagc

SEQ ID NO: 31788 - DNA, 17 bp, Homo sapiens
gatgtgtgtcctctggg

SEQ ID NO: 31789 - DNA, 18 bp, Homo sapiens
accacgttgggcagacaa

SEQ ID NO: 31790 - DNA, 21 bp, Homo sapiens
agccatgtcatctgcagggaa

SEQ ID NO: 31791 - DNA, 16 bp, Homo sapiens
ccccaggatgttgcag

SEQ ID NO: 31792 - DNA, 24 bp, Homo sapiens
gcttcactggactcacctacgcca

SEQ ID NO: 31793 - DNA, 22 bp, Homo sapiens
cataccccctctgtctaccctg

SEQ ID NO: 31794 - DNA, 16 bp, Homo sapiens
gtgtgcaaggagcatg

SEQ ID NO: 31795 - DNA, 24 bp, Homo sapiens
aagccgtgggtctggtggccccat

SEQ ID NO: 31796 - DNA, 21 bp, Homo sapiens
tctcagcctgcgagtgtgatc

SEQ ID NO: 31797 - DNA, 22 bp, Homo sapiens
cacggtggcagccctgcgggtt

SEQ ID NO: 31798 - DNA, 16 bp, Homo sapiens
tgctctgaactctact

SEQ ID NO: 31799 - DNA, 16 bp, Homo sapiens
ctctccctgcacatgc

SEQ ID NO: 31800 - DNA, 22 bp, Homo sapiens
ggctgtgaatttgaaatccagt

SEQ ID NO: 31801 - DNA, 18 bp, Homo sapiens
gagcccctggcactgccc

SEQ ID NO: 31802 - DNA, 23 bp, Homo sapiens
ctaaattaaaataatctcccaca

SEQ ID NO: 31803 - DNA, 21 bp, Homo sapiens
tgagcggtgtcagctgcacta

SEQ ID NO: 31804 - DNA, 24 bp, Homo sapiens
gggccttggtgtgcccaggaacat

SEQ ID NO: 31805 - DNA, 16 bp, Homo sapiens
atggaggtgtgtgtga

SEQ ID NO: 31806 - DNA, 24 bp, Homo sapiens
cagacaaatgacactctgggactc

SEQ ID NO: 31807 - DNA, 16 bp, Homo sapiens
aatgggcactcagaga

SEQ ID NO: 31808 - DNA, 22 bp, Homo sapiens
aagctcccgggcgccggttccg

SEQ ID NO: 31809 - DNA, 19 bp, Homo sapiens
gtagatagcaaaggtgtgg

SEQ ID NO: 31810 - DNA, 17 bp, Homo sapiens
gtcccggcaattgtcac

SEQ ID NO: 31811 - DNA, 22 bp, Homo sapiens
cctgccttgatcatcttgcaga

SEQ ID NO: 31812 - DNA, 21 bp, Homo sapiens
acagcggggtcaaagtgacat

SEQ ID NO: 31813 - DNA, 19 bp, Homo sapiens
tggtcatgtaaccttaaat

SEQ ID NO: 31814 - DNA, 24 bp, Homo sapiens
tctctccatcctcacagagccagg

SEQ ID NO: 31815 - DNA, 16 bp, Homo sapiens
acaaccggccctggag

SEQ ID NO: 31816 - DNA, 21 bp, Homo sapiens
acataagaaagactggatccc

SEQ ID NO: 31817 - DNA, 24 bp, Homo sapiens
acgatgtctgtgtctgccagcaca

SEQ ID NO: 31818 - DNA, 24 bp, Homo sapiens
cactcgacccagaccctacagggg

SEQ ID NO: 31819 - DNA, 20 bp, Homo sapiens
ctggtgcccttctttgttga

SEQ ID NO: 31820 - DNA, 24 bp, Homo sapiens
atgggcgtcctggccctccgccgg

SEQ ID NO: 31821 - DNA, 16 bp, Homo sapiens
taagccagatcctgag

SEQ ID NO: 31822 - DNA, 20 bp, Homo sapiens
cacaatttgggccggcagtg

SEQ ID NO: 31823 - DNA, 21 bp, Homo sapiens
agtttcacaggagctgggtga

SEQ ID NO: 31824 - DNA, 18 bp, Homo sapiens
aagcctggggcctctgca

SEQ ID NO: 31825 - DNA, 23 bp, Homo sapiens
gtattaaatacccaagtcttaga

SEQ ID NO: 31826 - DNA, 18 bp, Homo sapiens
tgtcccagctccgtctgc

SEQ ID NO: 31827 - DNA, 24 bp, Homo sapiens
aatgtctgtagtctgccctggtcc

SEQ ID NO: 31828 - DNA, 22 bp, Homo sapiens
agtcaatttcaccaggctggcc

SEQ ID NO: 31829 - DNA, 22 bp, Homo sapiens
acagcggtggaggggcctgcag

SEQ ID NO: 31830 - DNA, 20 bp, Homo sapiens
aactcttccctccttgctgt

SEQ ID NO: 31831 - DNA, 16 bp, Homo sapiens
gaagcagctcccctgc

SEQ ID NO: 31832 - DNA, 19 bp, Homo sapiens
acatatgaaggagactcta

SEQ ID NO: 31833 - DNA, 19 bp, Homo sapiens
ggtagcccctttggggcac

SEQ ID NO: 31834 - DNA, 16 bp, Homo sapiens
gtctgtgggatgctat

SEQ ID NO: 31835 - DNA, 18 bp, Homo sapiens
ggattccagcaactcaaa

SEQ ID NO: 31836 - DNA, 18 bp, Homo sapiens
caaatccccaaccacgtt

SEQ ID NO: 31837 - DNA, 18 bp, Homo sapiens
ttcagcgcttctctttcc

SEQ ID NO: 31838 - DNA, 21 bp, Homo sapiens
gctccaactctgtttcctttc

SEQ ID NO: 31839 - DNA, 19 bp, Homo sapiens
agtgtgaggcatataatgg

SEQ ID NO: 31840 - DNA, 21 bp, Homo sapiens
cactgaccttgaattttttga

SEQ ID NO: 31841 - DNA, 16 bp, Homo sapiens
acaagcctcatagcca

SEQ ID NO: 31842 - DNA, 18 bp, Homo sapiens
caaatgttttgagggtgg

SEQ ID NO: 31843 - DNA, 16 bp, Homo sapiens
gccagtccctgcctca

SEQ ID NO: 31844 - DNA, 24 bp, Homo sapiens
aaggggagctggcgagggtgtttc

SEQ ID NO: 31845 - DNA, 16 bp, Homo sapiens
ccaccttccctcgggt

SEQ ID NO: 31846 - DNA, 21 bp, Homo sapiens
agtgggacatcagggatttct

SEQ ID NO: 31847 - DNA, 16 bp, Homo sapiens
cgctcctcagacttcg

SEQ ID NO: 31848 - DNA, 23 bp, Homo sapiens
catttaggcgtgcattaggcctc

SEQ ID NO: 31849 - DNA, 23 bp, Homo sapiens
cagtgcctcccctctgcacactg

SEQ ID NO: 31850 - DNA, 22 bp, Homo sapiens
ctctgaggccgaccctggcgga

SEQ ID NO: 31851 - DNA, 24 bp, Homo sapiens
tttctcccgagttcactggaggag

SEQ ID NO: 31852 - DNA, 22 bp, Homo sapiens
acactcgccaggtcttaccgaa

SEQ ID NO: 31853 - DNA, 23 bp, Homo sapiens
gtggtatgccaggaggtttggac

SEQ ID NO: 31854 - DNA, 20 bp, Homo sapiens
ggtgccacttttagcccagg

SEQ ID NO: 31855 - DNA, 16 bp, Homo sapiens
tggacctggacaggag

SEQ ID NO: 31856 - DNA, 16 bp, Homo sapiens
cccaacccagagagac

SEQ ID NO: 31857 - DNA, 17 bp, Homo sapiens
tctggatgacagtttct

SEQ ID NO: 31858 - DNA, 24 bp, Homo sapiens
catggcccaggagcccctctccta

SEQ ID NO: 31859 - DNA, 24 bp, Homo sapiens
gagagtttctgagttcctagagct

SEQ ID NO: 31860 - DNA, 20 bp, Homo sapiens
atgacttcttgaagctggaa

SEQ ID NO: 31861 - DNA, 20 bp, Homo sapiens
aagcagaaacataccactcc

SEQ ID NO: 31862 - DNA, 17 bp, Homo sapiens
atgcgctggtggcagtc

SEQ ID NO: 31863 - DNA, 21 bp, Homo sapiens
cttatcaatcacccatgtcac

SEQ ID NO: 31864 - DNA, 16 bp, Homo sapiens
ggcagcctcacaacta

SEQ ID NO: 31865 - DNA, 20 bp, Homo sapiens
tagggcaccttccatccgtc

SEQ ID NO: 31866 - DNA, 17 bp, Homo sapiens
tctgagtgtctgctatc

SEQ ID NO: 31867 - DNA, 20 bp, Homo sapiens
atggcaaatgctcaccattc

SEQ ID NO: 31868 - DNA, 21 bp, Homo sapiens
ggatttccacagaggagatat

SEQ ID NO: 31869 - DNA, 16 bp, Homo sapiens
ctcggtgactgtagta

SEQ ID NO: 31870 - DNA, 19 bp, Homo sapiens
aagagattaacccttcaaa

SEQ ID NO: 31871 - DNA, 16 bp, Homo sapiens
tagaggcaaggatctg

SEQ ID NO: 31872 - DNA, 16 bp, Homo sapiens
ctacctgtggactgac

SEQ ID NO: 31873 - DNA, 20 bp, Homo sapiens
cttggcctacaccaagtaca

SEQ ID NO: 31874 - DNA, 16 bp, Homo sapiens
gggcctgctatccacc

SEQ ID NO: 31875 - DNA, 23 bp, Homo sapiens
cacacccctcccatcccgccttc

SEQ ID NO: 31876 - DNA, 16 bp, Homo sapiens
cacacatccctgtgat

SEQ ID NO: 31877 - DNA, 20 bp, Homo sapiens
tgcagtaggtctcaggcttg

SEQ ID NO: 31878 - DNA, 18 bp, Homo sapiens
agcttccctgaaagatac

SEQ ID NO: 31879 - DNA, 17 bp, Homo sapiens
caacaagcaggtcccca

SEQ ID NO: 31880 - DNA, 23 bp, Homo sapiens
tgcaattattactgccagcagcg

SEQ ID NO: 31881 - DNA, 16 bp, Homo sapiens
ggccaggcagggctga

SEQ ID NO: 31882 - DNA, 17 bp, Homo sapiens
gaatggggaaatctcac

SEQ ID NO: 31883 - DNA, 20 bp, Homo sapiens
ggggatcaccccattggctg

SEQ ID NO: 31884 - DNA, 19 bp, Homo sapiens
gactacaggtgacaggtga

SEQ ID NO: 31885 - DNA, 17 bp, Homo sapiens
ggtttgcactgttgtac

SEQ ID NO: 31886 - DNA, 19 bp, Homo sapiens
gcctccctgccatataaca

SEQ ID NO: 31887 - DNA, 21 bp, Homo sapiens
aggtaaagacttctgaaaaat

SEQ ID NO: 31888 - DNA, 19 bp, Homo sapiens
gaggaagaatggtctcatc

SEQ ID NO: 31889 - DNA, 22 bp, Homo sapiens
ctattaggaaggaacactttca

SEQ ID NO: 31890 - DNA, 17 bp, Homo sapiens
catcaaggatttcagct

SEQ ID NO: 31891 - DNA, 24 bp, Homo sapiens
ataaacaatggcttttcagcattt

SEQ ID NO: 31892 - DNA, 19 bp, Homo sapiens
gtagccaatgatgattggc

SEQ ID NO: 31893 - DNA, 16 bp, Homo sapiens
ccagggttacgtcttc

SEQ ID NO: 31894 - DNA, 21 bp, Homo sapiens
ttactttttacacttaattga

SEQ ID NO: 31895 - DNA, 18 bp, Homo sapiens
tggtgcgttccttagtca

SEQ ID NO: 31896 - DNA, 18 bp, Homo sapiens
caaggtctgttttagacc

SEQ ID NO: 31897 - DNA, 22 bp, Homo sapiens
cttatcaaacaactgaagtaac

SEQ ID NO: 31898 - DNA, 17 bp, Homo sapiens
cttgatggacaactcac

SEQ ID NO: 31899 - DNA, 23 bp, Homo sapiens
tcagaggcgagtgccatggggca

SEQ ID NO: 31900 - DNA, 16 bp, Homo sapiens
ctcccagggttctctt

SEQ ID NO: 31901 - DNA, 22 bp, Homo sapiens
tttttctgggatatttagcaaa

SEQ ID NO: 31902 - DNA, 16 bp, Homo sapiens
gcaaccggagtgcatg

SEQ ID NO: 31903 - DNA, 17 bp, Homo sapiens
catgatggcttcccaca

SEQ ID NO: 31904 - DNA, 19 bp, Homo sapiens
ttccttctcaggggttagc

SEQ ID NO: 31905 - DNA, 16 bp, Homo sapiens
ctgacgctgcggtgaa

SEQ ID NO: 31906 - DNA, 19 bp, Homo sapiens
gacacaattctctgtcata

SEQ ID NO: 31907 - DNA, 17 bp, Homo sapiens
tgcgcaggacacatgca

SEQ ID NO: 31908 - DNA, 19 bp, Homo sapiens
ttcattgacaatgtgacaa

SEQ ID NO: 31909 - DNA, 21 bp, Homo sapiens
cggggaattttggtatcggct

SEQ ID NO: 31910 - DNA, 22 bp, Homo sapiens
aagctgttctagggttagcctc

SEQ ID NO: 31911 - DNA, 18 bp, Homo sapiens
ctcttcagaagaggatgt

SEQ ID NO: 31912 - DNA, 16 bp, Homo sapiens
tccttgttaccatggc

SEQ ID NO: 31913 - DNA, 18 bp, Homo sapiens
tccctgatactacaaaga

SEQ ID NO: 31914 - DNA, 17 bp, Homo sapiens
cagtgatagggaaatgg

SEQ ID NO: 31915 - DNA, 17 bp, Homo sapiens
cgagctgtggttcatag

SEQ ID NO: 31916 - DNA, 19 bp, Homo sapiens
gtaaacattcaatggagac

SEQ ID NO: 31917 - DNA, 18 bp, Homo sapiens
gtcctaacaactcctggg

SEQ ID NO: 31918 - DNA, 17 bp, Homo sapiens
atatggctctttgtgga

SEQ ID NO: 31919 - DNA, 20 bp, Homo sapiens
agatgacaaaaatgctttct

SEQ ID NO: 31920 - DNA, 16 bp, Homo sapiens
aagcccagcatcgcca

SEQ ID NO: 31921 - DNA, 19 bp, Homo sapiens
aaactgctttctgctttca

SEQ ID NO: 31922 - DNA, 22 bp, Homo sapiens
cttttgctccgcgatcccttct

SEQ ID NO: 31923 - DNA, 16 bp, Homo sapiens
aacctgctgaaccatt

SEQ ID NO: 31924 - DNA, 22 bp, Homo sapiens
aaaaacaacaacaaaaaaaaaa

SEQ ID NO: 31925 - DNA, 17 bp, Homo sapiens
aagacgccgttgatcca

SEQ ID NO: 31926 - DNA, 22 bp, Homo sapiens
atttcttctgtatagtctatgc

SEQ ID NO: 31927 - DNA, 18 bp, Homo sapiens
gttcttccttttgtctag

SEQ ID NO: 31928 - DNA, 20 bp, Homo sapiens
atgtgtgtttcttgaggaag

SEQ ID NO: 31929 - DNA, 19 bp, Homo sapiens
gctcttttaaaagcatgtg

SEQ ID NO: 31930 - DNA, 16 bp, Homo sapiens
tccagtagaggtatca

SEQ ID NO: 31931 - DNA, 25 bp, Homo sapiens
ttttgaatattatataaaacgtcat

SEQ ID NO: 31932 - DNA, 17 bp, Homo sapiens
cctggaaaaagaaggct

SEQ ID NO: 31933 - DNA, 17 bp, Homo sapiens
gacaccaccctctacat

SEQ ID NO: 31934 - DNA, 20 bp, Homo sapiens
cacttaaaccaagacatttt

SEQ ID NO: 31935 - DNA, 16 bp, Homo sapiens
ctgaacggccaactga

SEQ ID NO: 31936 - DNA, 16 bp, Homo sapiens
taaagctggggaacag

SEQ ID NO: 31937 - DNA, 16 bp, Homo sapiens
tttcggtggacagcaa

SEQ ID NO: 31938 - DNA, 23 bp, Homo sapiens
cttttgtccgccgttctcggtat

SEQ ID NO: 31939 - DNA, 21 bp, Homo sapiens
ttcaaagaggttacccttttt

SEQ ID NO: 31940 - DNA, 18 bp, Homo sapiens
ccgtcggttaacacgtac

SEQ ID NO: 31941 - DNA, 17 bp, Homo sapiens
tggttcggtttgatttt

SEQ ID NO: 31942 - DNA, 16 bp, Homo sapiens
cacagacaaattgctg

SEQ ID NO: 31943 - DNA, 19 bp, Homo sapiens
ggaaaaagtgaaggattct

SEQ ID NO: 31944 - DNA, 21 bp, Homo sapiens
catttttcctcagtagtcatc

SEQ ID NO: 31945 - DNA, 17 bp, Homo sapiens
gaggtgggcagtacggc

SEQ ID NO: 31946 - DNA, 22 bp, Homo sapiens
aatctgtttttaaaagtggctt

SEQ ID NO: 31947 - DNA, 16 bp, Homo sapiens
aagccagccttggggg

SEQ ID NO: 31948 - DNA, 17 bp, Homo sapiens
tccaatctctctggctt

SEQ ID NO: 31949 - DNA, 16 bp, Homo sapiens
ctgactcagccctccc

SEQ ID NO: 31950 - DNA, 16 bp, Homo sapiens
actgatccactcggaa

SEQ ID NO: 31951 - DNA, 20 bp, Homo sapiens
gactctacgtatccattctc

SEQ ID NO: 31952 - DNA, 17 bp, Homo sapiens
tggtgtagggctggaga

SEQ ID NO: 31953 - DNA, 19 bp, Homo sapiens
ctcacaaaatagaactggt

SEQ ID NO: 31954 - DNA, 21 bp, Homo sapiens
tttgtttctatttggctggga

SEQ ID NO: 31955 - DNA, 20 bp, Homo sapiens
gagagcagtttcctgcaaat

SEQ ID NO: 31956 - DNA, 20 bp, Homo sapiens
actttgctatagatatctgt

SEQ ID NO: 31957 - DNA, 20 bp, Homo sapiens
ctcaaggacggcctccttcc

SEQ ID NO: 31958 - DNA, 20 bp, Homo sapiens
tacaggtttgtagcctaggt

SEQ ID NO: 31959 - DNA, 16 bp, Homo sapiens
tgagaacccatcctgc

SEQ ID NO: 31960 - DNA, 21 bp, Homo sapiens
catgccttgttagtttcttca

SEQ ID NO: 31961 - DNA, 21 bp, Homo sapiens
actactctattggagtagagg

SEQ ID NO: 31962 - DNA, 19 bp, Homo sapiens
gaacatggggggactccac

SEQ ID NO: 31963 - DNA, 23 bp, Homo sapiens
cagctatccgaaggcatggccac

SEQ ID NO: 31964 - DNA, 19 bp, Homo sapiens
agaggacagtcctgagggt

SEQ ID NO: 31965 - DNA, 20 bp, Homo sapiens
acattcatcaaacaccttta

SEQ ID NO: 31966 - DNA, 23 bp, Homo sapiens
ctgcaacagttgaagcaggtgca

SEQ ID NO: 31967 - DNA, 16 bp, Homo sapiens
ttgtgtctcccagagt

SEQ ID NO: 31968 - DNA, 19 bp, Homo sapiens
catggagagtctgctgggt

SEQ ID NO: 31969 - DNA, 18 bp, Homo sapiens
tctctgagggatatttgt

SEQ ID NO: 31970 - DNA, 16 bp, Homo sapiens
cgtcagtctctacagg

SEQ ID NO: 31971 - DNA, 24 bp, Homo sapiens
aggataagaaagatggagggaaaa

SEQ ID NO: 31972 - DNA, 19 bp, Homo sapiens
atgtgatctcttctaccca

SEQ ID NO: 31973 - DNA, 18 bp, Homo sapiens
ttaaaagtcaaccagtcc

SEQ ID NO: 31974 - DNA, 16 bp, Homo sapiens
ctggacatggtgcaga

SEQ ID NO: 31975 - DNA, 17 bp, Homo sapiens
ctggagaacagcctgta

SEQ ID NO: 31976 - DNA, 21 bp, Homo sapiens
acagtcttgttgatttctctt

SEQ ID NO: 31977 - DNA, 21 bp, Homo sapiens
actgatgttgaccactgcttg

SEQ ID NO: 31978 - DNA, 18 bp, Homo sapiens
cgttttttttcctttctt

SEQ ID NO: 31979 - DNA, 21 bp, Homo sapiens
ggtggggctggcccggttctg

SEQ ID NO: 31980 - DNA, 18 bp, Homo sapiens
ggttgcaagatcaaagtt

SEQ ID NO: 31981 - DNA, 19 bp, Homo sapiens
tgaacatggtttttcctca

SEQ ID NO: 31982 - DNA, 20 bp, Homo sapiens
atagattccgaactattgcc

SEQ ID NO: 31983 - DNA, 19 bp, Homo sapiens
ctccttaagtcctacattt

SEQ ID NO: 31984 - DNA, 18 bp, Homo sapiens
gcaactcagcctagaaaa

SEQ ID NO: 31985 - DNA, 18 bp, Homo sapiens
acgggtgcaaacaatcag

SEQ ID NO: 31986 - DNA, 16 bp, Homo sapiens
gtggacaggaccgctg

SEQ ID NO: 31987 - DNA, 22 bp, Homo sapiens
gatactcatactctgtgaaagg

SEQ ID NO: 31988 - DNA, 17 bp, Homo sapiens
cccctccacatctggag

SEQ ID NO: 31989 - DNA, 21 bp, Homo sapiens
atagattaggactggattgga

SEQ ID NO: 31990 - DNA, 17 bp, Homo sapiens
gcatcaagtgactggac

SEQ ID NO: 31991 - DNA, 19 bp, Homo sapiens
acaaaacttttccatttgg

SEQ ID NO: 31992 - DNA, 18 bp, Homo sapiens
ctaatttctgccttatgt

SEQ ID NO: 31993 - DNA, 17 bp, Homo sapiens
aatcctcctggagccat

SEQ ID NO: 31994 - DNA, 16 bp, Homo sapiens
aggcctggtgttttaa

SEQ ID NO: 31995 - DNA, 19 bp, Homo sapiens
gggtctgtatgaatgtcca

SEQ ID NO: 31996 - DNA, 23 bp, Homo sapiens
ttctcaactttgttattcttaag

SEQ ID NO: 31997 - DNA, 22 bp, Homo sapiens
caggctttgcttgggtgaggat

SEQ ID NO: 31998 - DNA, 18 bp, Homo sapiens
ttcttttggtatgcagtc

SEQ ID NO: 31999 - DNA, 16 bp, Homo sapiens
caccttgcatcccatt

SEQ ID NO: 32000 - DNA, 24 bp, Homo sapiens
tataccctcttcatccgtgaacta

SEQ ID NO: 32001 - DNA, 17 bp, Homo sapiens
aaggtcagcagtggctt

SEQ ID NO: 32002 - DNA, 17 bp, Homo sapiens
tagtgaactgggaccct

SEQ ID NO: 32003 - DNA, 24 bp, Homo sapiens
aatggcttcagctggtttactata

SEQ ID NO: 32004 - DNA, 16 bp, Homo sapiens
ctcagcaccctcaggg

SEQ ID NO: 32005 - DNA, 25 bp, Homo sapiens
tatgattttagtttctctttcaaat

SEQ ID NO: 32006 - DNA, 16 bp, Homo sapiens
taactgccagcaacag

SEQ ID NO: 32007 - DNA, 18 bp, Homo sapiens
ttgttctcactggagggt

SEQ ID NO: 32008 - DNA, 16 bp, Homo sapiens
gcttggaaacacgcta

SEQ ID NO: 32009 - DNA, 19 bp, Homo sapiens
ttttggaggttccatccct

SEQ ID NO: 32010 - DNA, 21 bp, Homo sapiens
ctccaagaaacccaaatggcc

SEQ ID NO: 32011 - DNA, 17 bp, Homo sapiens
aaaatacccccttggct

SEQ ID NO: 32012 - DNA, 17 bp, Homo sapiens
ctccaacattgcaagtc

SEQ ID NO: 32013 - DNA, 24 bp, Homo sapiens
ctggggtgagagtaaaatcacgat

SEQ ID NO: 32014 - DNA, 16 bp, Homo sapiens
tgcacagctagtgtgt

SEQ ID NO: 32015 - DNA, 22 bp, Homo sapiens
ccctcctaagttcataacttct

SEQ ID NO: 32016 - DNA, 18 bp, Homo sapiens
ttcccacctgcagcctta

SEQ ID NO: 32017 - DNA, 24 bp, Homo sapiens
tttctattgattctgagcctgtga

SEQ ID NO: 32018 - DNA, 26 bp, Homo sapiens
attactaaatatttagttagatatga

SEQ ID NO: 32019 - DNA, 24 bp, Homo sapiens
gcctccattgtccaggcagatttt

SEQ ID NO: 32020 - DNA, 20 bp, Homo sapiens
gtgccactcaaatgaatgta

SEQ ID NO: 32021 - DNA, 22 bp, Homo sapiens
caagggagaagttatactgaga

SEQ ID NO: 32022 - DNA, 16 bp, Homo sapiens
agcatcacaactctgg

SEQ ID NO: 32023 - DNA, 23 bp, Homo sapiens
tggccagcaagggactctttatt

SEQ ID NO: 32024 - DNA, 16 bp, Homo sapiens
cctatagctatgcact

SEQ ID NO: 32025 - DNA, 21 bp, Homo sapiens
cactgtgggcggtgaccaaca

SEQ ID NO: 32026 - DNA, 21 bp, Homo sapiens
ctctatccttttagctttgat

SEQ ID NO: 32027 - DNA, 18 bp, Homo sapiens
ctgacttctgatggagca

SEQ ID NO: 32028 - DNA, 20 bp, Homo sapiens
cagaacagtctaatggtatt

SEQ ID NO: 32029 - DNA, 21 bp, Homo sapiens
gcatcctccactcgtgcaggc

SEQ ID NO: 32030 - DNA, 20 bp, Homo sapiens
tctctccacctgtgatatcc

SEQ ID NO: 32031 - DNA, 24 bp, Homo sapiens
cttcatcagtgtaattgaaagtca

SEQ ID NO: 32032 - DNA, 16 bp, Homo sapiens
acctgtagctcttgga

SEQ ID NO: 32033 - DNA, 22 bp, Homo sapiens
tataggactggataataccatt

SEQ ID NO: 32034 - DNA, 16 bp, Homo sapiens
cacaggtttgcaacca

SEQ ID NO: 32035 - DNA, 20 bp, Homo sapiens
tttggggattcatagaaaca

SEQ ID NO: 32036 - DNA, 20 bp, Homo sapiens
acgagaaaattgttttcaca

SEQ ID NO: 32037 - DNA, 23 bp, Homo sapiens
gtgcttgcaatgtcctcaccaca

SEQ ID NO: 32038 - DNA, 17 bp, Homo sapiens
tgaagtgattcgcagat

SEQ ID NO: 32039 - DNA, 22 bp, Homo sapiens
gattttatattcacactgcgtc

SEQ ID NO: 32040 - DNA, 16 bp, Homo sapiens
cagtgttgagctgagc

SEQ ID NO: 32041 - DNA, 22 bp, Homo sapiens
tcctttcagtgttatattctgt

SEQ ID NO: 32042 - DNA, 16 bp, Homo sapiens
gacagatgaagcccct

SEQ ID NO: 32043 - DNA, 24 bp, Homo sapiens
atttccccaagcttttccctcgaa

SEQ ID NO: 32044 - DNA, 17 bp, Homo sapiens
tacacactgaccctgga

SEQ ID NO: 32045 - DNA, 16 bp, Homo sapiens
taacaggctcagacca

SEQ ID NO: 32046 - DNA, 20 bp, Homo sapiens
ctggagtactctggtttgaa

SEQ ID NO: 32047 - DNA, 18 bp, Homo sapiens
ctgagagtctggaggggc

SEQ ID NO: 32048 - DNA, 24 bp, Homo sapiens
tatgctgcaagttatcccttttgc

SEQ ID NO: 32049 - DNA, 16 bp, Homo sapiens
aacctgctctggtgca

SEQ ID NO: 32050 - DNA, 16 bp, Homo sapiens
aagggggtgaaggtta

SEQ ID NO: 32051 - DNA, 18 bp, Homo sapiens
cggaagagaaactgacga

SEQ ID NO: 32052 - DNA, 22 bp, Homo sapiens
aaaatcacatatccccaattaa

SEQ ID NO: 32053 - DNA, 18 bp, Homo sapiens
gtcagaacctatgagaac

SEQ ID NO: 32054 - DNA, 22 bp, Homo sapiens
ctatcaaggagaattaaacagg

SEQ ID NO: 32055 - DNA, 19 bp, Homo sapiens
gtggactgagaaactttat

SEQ ID NO: 32056 - DNA, 21 bp, Homo sapiens
gggctcatctatttatctgga

SEQ ID NO: 32057 - DNA, 19 bp, Homo sapiens
tgcaaaccatgcaggagaa

SEQ ID NO: 32058 - DNA, 21 bp, Homo sapiens
ttaccttaatcacaccattgg

SEQ ID NO: 32059 - DNA, 16 bp, Homo sapiens
cccacctgtacgggtt

SEQ ID NO: 32060 - DNA, 23 bp, Homo sapiens
cattctctttctgttctactata

SEQ ID NO: 32061 - DNA, 24 bp, Homo sapiens
tattgtcagtttcaaaaaaaaaaa

SEQ ID NO: 32062 - DNA, 18 bp, Homo sapiens
atcagagtccaagggctt

SEQ ID NO: 32063 - DNA, 16 bp, Homo sapiens
ctgttgcctacaagct

SEQ ID NO: 32064 - DNA, 18 bp, Homo sapiens
tgttgtgaatggttctaa

SEQ ID NO: 32065 - DNA, 21 bp, Homo sapiens
gaataagaaaaaatgcgttgt

SEQ ID NO: 32066 - DNA, 16 bp, Homo sapiens
acagccctaccgtgca

SEQ ID NO: 32067 - DNA, 22 bp, Homo sapiens
cacaagtgaaagattttcatat

SEQ ID NO: 32068 - DNA, 16 bp, Homo sapiens
atggcattatctccca

SEQ ID NO: 32069 - DNA, 16 bp, Homo sapiens
ttcaacgtattcacca

SEQ ID NO: 32070 - DNA, 16 bp, Homo sapiens
gggctcaagccacgag

SEQ ID NO: 32071 - DNA, 20 bp, Homo sapiens
ttaccttcactgtgaaagca

SEQ ID NO: 32072 - DNA, 18 bp, Homo sapiens
ggagagtctgtggtcatt

SEQ ID NO: 32073 - DNA, 22 bp, Homo sapiens
ctcctggtagaccacacggtaa

SEQ ID NO: 32074 - DNA, 16 bp, Homo sapiens
tgaggcctttcacact

SEQ ID NO: 32075 - DNA, 19 bp, Homo sapiens
gaactgaatgagcactcgt

SEQ ID NO: 32076 - DNA, 21 bp, Homo sapiens
aagaggagtctgttttatttg

SEQ ID NO: 32077 - DNA, 23 bp, Homo sapiens
gtggagcttccagagtttgtgtt

SEQ ID NO: 32078 - DNA, 18 bp, Homo sapiens
gtgcagctgtcactggtt

SEQ ID NO: 32079 - DNA, 18 bp, Homo sapiens
tgacccgatattcgtaga

SEQ ID NO: 32080 - DNA, 25 bp, Homo sapiens
gttaagttgataacaaattctaaaa

SEQ ID NO: 32081 - DNA, 21 bp, Homo sapiens
caagggctccttctgaccaga

SEQ ID NO: 32082 - DNA, 23 bp, Homo sapiens
taggccactggagtacttctcca

SEQ ID NO: 32083 - DNA, 22 bp, Homo sapiens
aaaaccaaatggaatcatcatc

SEQ ID NO: 32084 - DNA, 18 bp, Homo sapiens
acacaacatgaattccca

SEQ ID NO: 32085 - DNA, 17 bp, Homo sapiens
tcctgttcttaaggcac

SEQ ID NO: 32086 - DNA, 23 bp, Homo sapiens
ctgtgttggagcagtacgcattc

SEQ ID NO: 32087 - DNA, 18 bp, Homo sapiens
gttgtggagttagcagta

SEQ ID NO: 32088 - DNA, 25 bp, Homo sapiens
cttacctgtaaataaagtagttgat

SEQ ID NO: 32089 - DNA, 18 bp, Homo sapiens
gttcttttccttgcttga

SEQ ID NO: 32090 - DNA, 16 bp, Homo sapiens
tatgcaagctgacccc

SEQ ID NO: 32091 - DNA, 17 bp, Homo sapiens
tgcaaaaggacaggtta

SEQ ID NO: 32092 - DNA, 17 bp, Homo sapiens
tcaggtgttttgacaaa

SEQ ID NO: 32093 - DNA, 28 bp, Homo sapiens
aaataattttctatttaaatgttcaaat

SEQ ID NO: 32094 - DNA, 18 bp, Homo sapiens
tgccagactgtgattttt

SEQ ID NO: 32095 - DNA, 18 bp, Homo sapiens
acccttctggaaaatttg

SEQ ID NO: 32096 - DNA, 21 bp, Homo sapiens
tttatatttggactgagaatg

SEQ ID NO: 32097 - DNA, 22 bp, Homo sapiens
ttactcaatgatggaagtgtaa

SEQ ID NO: 32098 - DNA, 22 bp, Homo sapiens
tttttcataaaagcccaggcca

SEQ ID NO: 32099 - DNA, 19 bp, Homo sapiens
tctctctctctctctcttt

SEQ ID NO: 32100 - DNA, 22 bp, Homo sapiens
ccttatctcatactgtgtgaat

SEQ ID NO: 32101 - DNA, 17 bp, Homo sapiens
gaaggccagaggtgtta

SEQ ID NO: 32102 - DNA, 25 bp, Homo sapiens
ttatttatatatatatgtgtgtcta

SEQ ID NO: 32103 - DNA, 22 bp, Homo sapiens
gaatttcggggatgaggatccc

SEQ ID NO: 32104 - DNA, 19 bp, Homo sapiens
cagtaattgggccttattc

SEQ ID NO: 32105 - DNA, 17 bp, Homo sapiens
aggagaccgactatgtc

SEQ ID NO: 32106 - DNA, 17 bp, Homo sapiens
tgttcaaacacctatgt

SEQ ID NO: 32107 - DNA, 23 bp, Homo sapiens
tctaattaattcctttaaaatgt

SEQ ID NO: 32108 - DNA, 23 bp, Homo sapiens
agatacacttacaagttagaagt

SEQ ID NO: 32109 - DNA, 19 bp, Homo sapiens
tggtatccaagctacaaat

SEQ ID NO: 32110 - DNA, 20 bp, Homo sapiens
taatcattgttcaagtctct

SEQ ID NO: 32111 - DNA, 17 bp, Homo sapiens
tcttctggtgttgacat

SEQ ID NO: 32112 - DNA, 17 bp, Homo sapiens
gggggcaaagagtttgc

SEQ ID NO: 32113 - DNA, 19 bp, Homo sapiens
tccagttttgacttctaac

SEQ ID NO: 32114 - DNA, 19 bp, Homo sapiens
agactgaatgatttagcac

SEQ ID NO: 32115 - DNA, 16 bp, Homo sapiens
tggcagtgaggagcag

SEQ ID NO: 32116 - DNA, 23 bp, Homo sapiens
aaacaatttaacaactttcagtg

SEQ ID NO: 32117 - DNA, 16 bp, Homo sapiens
gcccaatggcctcgtt

SEQ ID NO: 32118 - DNA, 16 bp, Homo sapiens
ctgctgtatgattggt

SEQ ID NO: 32119 - DNA, 16 bp, Homo sapiens
gtgacacctcgacaca

SEQ ID NO: 32120 - DNA, 23 bp, Homo sapiens
aggtttttatcagtgaaattctg

SEQ ID NO: 32121 - DNA, 22 bp, Homo sapiens
atacactgtttattttctccta

SEQ ID NO: 32122 - DNA, 24 bp, Homo sapiens
attacgactcaattgatattgaga

SEQ ID NO: 32123 - DNA, 21 bp, Homo sapiens
ttttttaaaatcaacagaaaa

SEQ ID NO: 32124 - DNA, 22 bp, Homo sapiens
tgttgtagaattgatgataatg

SEQ ID NO: 32125 - DNA, 28 bp, Homo sapiens
aataaaataatcaaagtaataaaaatat

SEQ ID NO: 32126 - DNA, 23 bp, Homo sapiens
gaagctacacctacatgaatcaa

SEQ ID NO: 32127 - DNA, 16 bp, Homo sapiens
caagcgagccttttct

SEQ ID NO: 32128 - DNA, 19 bp, Homo sapiens
actttattgcctcttcctt

SEQ ID NO: 32129 - DNA, 17 bp, Homo sapiens
aggtctccagccataca

SEQ ID NO: 32130 - DNA, 17 bp, Homo sapiens
gtgaaaatttcttccct

SEQ ID NO: 32131 - DNA, 25 bp, Homo sapiens
ttctggtacttaattgataataaat

SEQ ID NO: 32132 - DNA, 17 bp, Homo sapiens
cagtgtctgacctagaa

SEQ ID NO: 32133 - DNA, 19 bp, Homo sapiens
agagagtactcttaaatgt

SEQ ID NO: 32134 - DNA, 21 bp, Homo sapiens
ctgtaagagtgaagctgtagt

SEQ ID NO: 32135 - DNA, 21 bp, Homo sapiens
gtgtgggctcttctattagca

SEQ ID NO: 32136 - DNA, 16 bp, Homo sapiens
catccacactgacacc

SEQ ID NO: 32137 - DNA, 18 bp, Homo sapiens
gtcctttcgaagtgacct

SEQ ID NO: 32138 - DNA, 16 bp, Homo sapiens
ctgagaaatcaaacgg

SEQ ID NO: 32139 - DNA, 22 bp, Homo sapiens
ctaaccacaatgacagactcct

SEQ ID NO: 32140 - DNA, 16 bp, Homo sapiens
agcatcctgccaccaa

SEQ ID NO: 32141 - DNA, 20 bp, Homo sapiens
tgctgtctcctgtcagtggt

SEQ ID NO: 32142 - DNA, 19 bp, Homo sapiens
aaattgctgcttaattcct

SEQ ID NO: 32143 - DNA, 22 bp, Homo sapiens
atctggtactctttaatgacgc

SEQ ID NO: 32144 - DNA, 22 bp, Homo sapiens
ccagacaacattttaaaacaaa

SEQ ID NO: 32145 - DNA, 22 bp, Homo sapiens
gccactgcacttagggctgtga

SEQ ID NO: 32146 - DNA, 21 bp, Homo sapiens
ggaaaaaaatgaaaaaaaagg

SEQ ID NO: 32147 - DNA, 16 bp, Homo sapiens
tgcacggttgctggct

SEQ ID NO: 32148 - DNA, 17 bp, Homo sapiens
aacaccactttgaggag

SEQ ID NO: 32149 - DNA, 17 bp, Homo sapiens
tcactgagcttctctga

SEQ ID NO: 32150 - DNA, 22 bp, Homo sapiens
ctggatgttcagataatcttca

SEQ ID NO: 32151 - DNA, 20 bp, Homo sapiens
aggtcctattatttactaca

SEQ ID NO: 32152 - DNA, 20 bp, Homo sapiens
ttaccttgctactggtggca

SEQ ID NO: 32153 - DNA, 21 bp, Homo sapiens
ttgtttgcaaatagttaaaat

SEQ ID NO: 32154 - DNA, 22 bp, Homo sapiens
ctgaaatggttgaattccctct

SEQ ID NO: 32155 - DNA, 28 bp, Homo sapiens
aataggaaattaaaattaaataaagcta

SEQ ID NO: 32156 - DNA, 23 bp, Homo sapiens
gttcaattccatttcgaagaagg

SEQ ID NO: 32157 - DNA, 20 bp, Homo sapiens
tgagtgattagttgtcacat

SEQ ID NO: 32158 - DNA, 21 bp, Homo sapiens
ccaaaatagacaatcttgaag

SEQ ID NO: 32159 - DNA, 24 bp, Homo sapiens
agtggttagatgcatagggcaatt

SEQ ID NO: 32160 - DNA, 16 bp, Homo sapiens
gctgtgagagccagaa

SEQ ID NO: 32161 - DNA, 23 bp, Homo sapiens
tttatgggattttgttatttgta

SEQ ID NO: 32162 - DNA, 22 bp, Homo sapiens
catgacatatgagtacaggatt

SEQ ID NO: 32163 - DNA, 20 bp, Homo sapiens
ctccagtttaagacaattgt

SEQ ID NO: 32164 - DNA, 24 bp, Homo sapiens
ttaaaaaatgaaaataagagaaac

SEQ ID NO: 32165 - DNA, 17 bp, Homo sapiens
ccttgaggcacatcttc

SEQ ID NO: 32166 - DNA, 27 bp, Homo sapiens
gcattaaacatttatttttaaatgtct

SEQ ID NO: 32167 - DNA, 16 bp, Homo sapiens
tccaggcagaaatcct

SEQ ID NO: 32168 - DNA, 29 bp, Homo sapiens
aaatgttacttatatttagaaaataaaga

SEQ ID NO: 32169 - DNA, 18 bp, Homo sapiens
atacatccagattatgcc

SEQ ID NO: 32170 - DNA, 18 bp, Homo sapiens
ccattcatacagggagtg

SEQ ID NO: 32171 - DNA, 22 bp, Homo sapiens
tggaatgtactgatatcagttt

SEQ ID NO: 32172 - DNA, 16 bp, Homo sapiens
ctcacaattccacagg

SEQ ID NO: 32173 - DNA, 24 bp, Homo sapiens
tgcattttcagcagcttctcacta

SEQ ID NO: 32174 - DNA, 17 bp, Homo sapiens
cacagaacattgtggca

SEQ ID NO: 32175 - DNA, 22 bp, Homo sapiens
acctgtgtaagagtacgtgttt

SEQ ID NO: 32176 - DNA, 17 bp, Homo sapiens
ccacttgactcaggaaa

SEQ ID NO: 32177 - DNA, 17 bp, Homo sapiens
ttcaattgatgccttcc

SEQ ID NO: 32178 - DNA, 17 bp, Homo sapiens
aaagcctaccctatgta

SEQ ID NO: 32179 - DNA, 18 bp, Homo sapiens
aagttgaagtcacacctg

SEQ ID NO: 32180 - DNA, 26 bp, Homo sapiens
tttctttttataaattttgaaatatt

SEQ ID NO: 32181 - DNA, 19 bp, Homo sapiens
gaggatcctgcactctttg

SEQ ID NO: 32182 - DNA, 18 bp, Homo sapiens
tcaatcatagcgaactca

SEQ ID NO: 32183 - DNA, 21 bp, Homo sapiens
tcctttgaaatatgtttgctc

SEQ ID NO: 32184 - DNA, 20 bp, Homo sapiens
aatgcacacaggagttttta

SEQ ID NO: 32185 - DNA, 17 bp, Homo sapiens
aaatgctgtgagactga

SEQ ID NO: 32186 - DNA, 16 bp, Homo sapiens
ccattgtcaaatcagc

SEQ ID NO: 32187 - DNA, 16 bp, Homo sapiens
gctcagcttccagtgg

SEQ ID NO: 32188 - DNA, 18 bp, Homo sapiens
aaatcttgtcagagcaaa

SEQ ID NO: 32189 - DNA, 17 bp, Homo sapiens
ttgttgcaggtatgttc

SEQ ID NO: 32190 - DNA, 17 bp, Homo sapiens
ggctctttggaataagt

SEQ ID NO: 32191 - DNA, 16 bp, Homo sapiens
tagcagcctcagtttt

SEQ ID NO: 32192 - DNA, 24 bp, Homo sapiens
tttttaatatgtgctttagactct

SEQ ID NO: 32193 - DNA, 16 bp, Homo sapiens
ccttaggtattgcacc

SEQ ID NO: 32194 - DNA, 19 bp, Homo sapiens
ttcacataatcctgcccac

SEQ ID NO: 32195 - DNA, 20 bp, Homo sapiens
gttgtggtggagaagaagga

SEQ ID NO: 32196 - DNA, 23 bp, Homo sapiens
attagatataaccaatgtgagct

SEQ ID NO: 32197 - DNA, 16 bp, Homo sapiens
atggccatggccagaa

SEQ ID NO: 32198 - DNA, 22 bp, Homo sapiens
tttctcactctctctgcttctc

SEQ ID NO: 32199 - DNA, 16 bp, Homo sapiens
cagaatgccgtactcc

SEQ ID NO: 32200 - DNA, 21 bp, Homo sapiens
ttacctggaaggcgattgtac

SEQ ID NO: 32201 - DNA, 18 bp, Homo sapiens
gtatgctgtccagatgaa

SEQ ID NO: 32202 - DNA, 16 bp, Homo sapiens
ctgtctgccacagcac

SEQ ID NO: 32203 - DNA, 21 bp, Homo sapiens
ttgttagtcatagcatatttt

SEQ ID NO: 32204 - DNA, 19 bp, Homo sapiens
ctggtttcctgaggtggag

SEQ ID NO: 32205 - DNA, 21 bp, Homo sapiens
tctctttagtaattctgtcaa

SEQ ID NO: 32206 - DNA, 17 bp, Homo sapiens
gaaacccgattgtgctg

SEQ ID NO: 32207 - DNA, 17 bp, Homo sapiens
acaaagcagaaggaaga

SEQ ID NO: 32208 - DNA, 18 bp, Homo sapiens
ccaaatcatcagtgctgc

SEQ ID NO: 32209 - DNA, 22 bp, Homo sapiens
tatggttcaatttttgttgaga

SEQ ID NO: 32210 - DNA, 20 bp, Homo sapiens
aaaagtatatcccgtttgtt

SEQ ID NO: 32211 - DNA, 21 bp, Homo sapiens
tttatgttttcaggttcccat

SEQ ID NO: 32212 - DNA, 16 bp, Homo sapiens
ttgtaacggagtgctc

SEQ ID NO: 32213 - DNA, 17 bp, Homo sapiens
gtaatacccagagcagc

SEQ ID NO: 32214 - DNA, 20 bp, Homo sapiens
agtggtataacactcttaac

SEQ ID NO: 32215 - DNA, 21 bp, Homo sapiens
aacaaactccagtagaattca

SEQ ID NO: 32216 - DNA, 18 bp, Homo sapiens
gagtaatatggtctcaga

SEQ ID NO: 32217 - DNA, 17 bp, Homo sapiens
ccaggcttggggttata

SEQ ID NO: 32218 - DNA, 21 bp, Homo sapiens
cctgaatctatctgtggacac

SEQ ID NO: 32219 - DNA, 23 bp, Homo sapiens
gagtcttcttcatagagtagtgg

SEQ ID NO: 32220 - DNA, 20 bp, Homo sapiens
ctcaaaagttagtgcaggat

SEQ ID NO: 32221 - DNA, 22 bp, Homo sapiens
ataatttcacttggagtcttga

SEQ ID NO: 32222 - DNA, 16 bp, Homo sapiens
tggcatcattcttgga

SEQ ID NO: 32223 - DNA, 24 bp, Homo sapiens
acttaccttagcttcagaagaata

SEQ ID NO: 32224 - DNA, 16 bp, Homo sapiens
ttctctctgttgcaga

SEQ ID NO: 32225 - DNA, 17 bp, Homo sapiens
tgcagagctcatcactc

SEQ ID NO: 32226 - DNA, 18 bp, Homo sapiens
gctgccactttttactta

SEQ ID NO: 32227 - DNA, 20 bp, Homo sapiens
ccatgttttccataggagat

SEQ ID NO: 32228 - DNA, 24 bp, Homo sapiens
tgatttgaaaatatatgatttcat

SEQ ID NO: 32229 - DNA, 18 bp, Homo sapiens
caatttgaagagatctgc

SEQ ID NO: 32230 - DNA, 23 bp, Homo sapiens
gtgaagattaatatctgtgaaat

SEQ ID NO: 32231 - DNA, 18 bp, Homo sapiens
actgtggaagacactcca

SEQ ID NO: 32232 - DNA, 17 bp, Homo sapiens
agattgtcatggctgag

SEQ ID NO: 32233 - DNA, 17 bp, Homo sapiens
gcaggttgaagtctgca

SEQ ID NO: 32234 - DNA, 19 bp, Homo sapiens
ttccttagatttaactgac

SEQ ID NO: 32235 - DNA, 20 bp, Homo sapiens
tgggattcagactattgtta

SEQ ID NO: 32236 - DNA, 17 bp, Homo sapiens
tggtatatcacttggag

SEQ ID NO: 32237 - DNA, 17 bp, Homo sapiens
acctcaagaggctatag

SEQ ID NO: 32238 - DNA, 18 bp, Homo sapiens
cgcaggcatatattgtgc

SEQ ID NO: 32239 - DNA, 18 bp, Homo sapiens
tgcctacagcacacagat

SEQ ID NO: 32240 - DNA, 20 bp, Homo sapiens
tttattctgagagacctgtc

SEQ ID NO: 32241 - DNA, 22 bp, Homo sapiens
caaagaaataatctgtaaccaa

SEQ ID NO: 32242 - DNA, 21 bp, Homo sapiens
gttgtcactgagtattctatc

SEQ ID NO: 32243 - DNA, 25 bp, Homo sapiens
ttttatttaacatatccataagcct

SEQ ID NO: 32244 - DNA, 16 bp, Homo sapiens
tcaacagtacagctgt

SEQ ID NO: 32245 - DNA, 24 bp, Homo sapiens
tgtcatagatagtgaagggagaca

SEQ ID NO: 32246 - DNA, 22 bp, Homo sapiens
tggagtttattcagtttcttcc

SEQ ID NO: 32247 - DNA, 25 bp, Homo sapiens
agtcttgtagagcttattatttaca

SEQ ID NO: 32248 - DNA, 20 bp, Homo sapiens
ttgctaaacctaaatactaa

SEQ ID NO: 32249 - DNA, 21 bp, Homo sapiens
gaaggagatgtccagatgaca

SEQ ID NO: 32250 - DNA, 18 bp, Homo sapiens
aggactacagactgtgat

SEQ ID NO: 32251 - DNA, 24 bp, Homo sapiens
ttgatctgctactgatgacagtga

SEQ ID NO: 32252 - DNA, 17 bp, Homo sapiens
gagtccacagcatcaac

SEQ ID NO: 32253 - DNA, 23 bp, Homo sapiens
ggaaattttataatggagggatg

SEQ ID NO: 32254 - DNA, 16 bp, Homo sapiens
atgtcattggccacct

SEQ ID NO: 32255 - DNA, 19 bp, Homo sapiens
cattcgcatctctgaggca

SEQ ID NO: 32256 - DNA, 18 bp, Homo sapiens
cttttttggagttctgct

SEQ ID NO: 32257 - DNA, 22 bp, Homo sapiens
ggttgcatgaagtcctgcactg

SEQ ID NO: 32258 - DNA, 19 bp, Homo sapiens
tgtcctgcatttattgttg

SEQ ID NO: 32259 - DNA, 24 bp, Homo sapiens
atccaatactctgtgtttggcttt

SEQ ID NO: 32260 - DNA, 18 bp, Homo sapiens
ctcattctagaaagctaa

SEQ ID NO: 32261 - DNA, 19 bp, Homo sapiens
gagagtcgtttgaggtagc

SEQ ID NO: 32262 - DNA, 18 bp, Homo sapiens
ggagatctcataagcttt

SEQ ID NO: 32263 - DNA, 18 bp, Homo sapiens
gtccttaaccacacagcc

SEQ ID NO: 32264 - DNA, 21 bp, Homo sapiens
ttaccagtaacacttcactat

SEQ ID NO: 32265 - DNA, 16 bp, Homo sapiens
gtgactgtgacaacgt

SEQ ID NO: 32266 - DNA, 20 bp, Homo sapiens
atgcttttaaaaatacacaa

SEQ ID NO: 32267 - DNA, 22 bp, Homo sapiens
tttaggtttacaacctatgaat

SEQ ID NO: 32268 - DNA, 16 bp, Homo sapiens
gcccacctcacgtcga

SEQ ID NO: 32269 - DNA, 23 bp, Homo sapiens
ttatttgttagattttctgtaaa

SEQ ID NO: 32270 - DNA, 18 bp, Homo sapiens
gaagaccagctaacgttg

SEQ ID NO: 32271 - DNA, 17 bp, Homo sapiens
gtattttgtagaggggt

SEQ ID NO: 32272 - DNA, 18 bp, Homo sapiens
tgttgtgtacgaagagca

SEQ ID NO: 32273 - DNA, 16 bp, Homo sapiens
ttcaggaactcagtgg

SEQ ID NO: 32274 - DNA, 18 bp, Homo sapiens
tgcataactgataacacg

SEQ ID NO: 32275 - DNA, 18 bp, Homo sapiens
atccagcagccacttgca

SEQ ID NO: 32276 - DNA, 17 bp, Homo sapiens
caacatgcccagaacta

SEQ ID NO: 32277 - DNA, 21 bp, Homo sapiens
tgagttgagataatcctgatg

SEQ ID NO: 32278 - DNA, 20 bp, Homo sapiens
gctaagacccttatcttcat

SEQ ID NO: 32279 - DNA, 18 bp, Homo sapiens
ccacgcatatatcacacg

SEQ ID NO: 32280 - DNA, 18 bp, Homo sapiens
ctgggggatttgatgcaa

SEQ ID NO: 32281 - DNA, 19 bp, Homo sapiens
gttcatctgaaacaaaacc

SEQ ID NO: 32282 - DNA, 23 bp, Homo sapiens
ccataataagttgaagtgtacag

SEQ ID NO: 32283 - DNA, 16 bp, Homo sapiens
tttcttggcaaccacc

SEQ ID NO: 32284 - DNA, 19 bp, Homo sapiens
attcaatgccaaattagtt

SEQ ID NO: 32285 - DNA, 20 bp, Homo sapiens
caccgtacctcagaatgttg

SEQ ID NO: 32286 - DNA, 17 bp, Homo sapiens
tctcagagagataagga

SEQ ID NO: 32287 - DNA, 16 bp, Homo sapiens
tgggtaccttggaggg

SEQ ID NO: 32288 - DNA, 19 bp, Homo sapiens
attaggtccatttggcttg

SEQ ID NO: 32289 - DNA, 19 bp, Homo sapiens
agttactcatctgattcct

SEQ ID NO: 32290 - DNA, 18 bp, Homo sapiens
gtggaatcacagacaatg

SEQ ID NO: 32291 - DNA, 22 bp, Homo sapiens
attcacatgcctgaccctcaca

SEQ ID NO: 32292 - DNA, 20 bp, Homo sapiens
gtaggtaaactctctgtgca

SEQ ID NO: 32293 - DNA, 18 bp, Homo sapiens
ttcaggtcacttggaaac

SEQ ID NO: 32294 - DNA, 20 bp, Homo sapiens
cagaataattagtgaaagga

SEQ ID NO: 32295 - DNA, 16 bp, Homo sapiens
ggcctcgtgaacttca

SEQ ID NO: 32296 - DNA, 18 bp, Homo sapiens
cacattggttaaagtgat

SEQ ID NO: 32297 - DNA, 16 bp, Homo sapiens
ctcaggagaatgtagc

SEQ ID NO: 32298 - DNA, 20 bp, Homo sapiens
ccgttctggatgagtggggg

SEQ ID NO: 32299 - DNA, 23 bp, Homo sapiens
tgacatcgaatttaagatagttt

SEQ ID NO: 32300 - DNA, 21 bp, Homo sapiens
acctgctggggtgcagccacc

SEQ ID NO: 32301 - DNA, 18 bp, Homo sapiens
acaacaaatgcgtttgtt

SEQ ID NO: 32302 - DNA, 16 bp, Homo sapiens
ttcatggaggcacaaa

SEQ ID NO: 32303 - DNA, 17 bp, Homo sapiens
cattcctaagtctgcaa

SEQ ID NO: 32304 - DNA, 20 bp, Homo sapiens
ggtttattgacaagacttct

SEQ ID NO: 32305 - DNA, 22 bp, Homo sapiens
gggttccagcactgtcaccaca

SEQ ID NO: 32306 - DNA, 18 bp, Homo sapiens
ggaaaggaagaagttact

SEQ ID NO: 32307 - DNA, 19 bp, Homo sapiens
cttctacccaagcactgct

SEQ ID NO: 32308 - DNA, 23 bp, Homo sapiens
atatcttggcaaccccctaccca

SEQ ID NO: 32309 - DNA, 19 bp, Homo sapiens
catattttgtccatgggct

SEQ ID NO: 32310 - DNA, 17 bp, Homo sapiens
caccggaagggatccca

SEQ ID NO: 32311 - DNA, 20 bp, Homo sapiens
gggagagtcaccagggtagt

SEQ ID NO: 32312 - DNA, 17 bp, Homo sapiens
tcaaaaggatgttccct

SEQ ID NO: 32313 - DNA, 20 bp, Homo sapiens
aattctccaccaagccattg

SEQ ID NO: 32314 - DNA, 19 bp, Homo sapiens
ttgcacagtgatgcattta

SEQ ID NO: 32315 - DNA, 17 bp, Homo sapiens
atcagagaacagctctg

SEQ ID NO: 32316 - DNA, 24 bp, Homo sapiens
tattacccattataacatttatct

SEQ ID NO: 32317 - DNA, 20 bp, Homo sapiens
cagtctgggactctggtgaa

SEQ ID NO: 32318 - DNA, 22 bp, Homo sapiens
ggatgtgaagtcaagaatgatg

SEQ ID NO: 32319 - DNA, 22 bp, Homo sapiens
acttataggcagtgtatgggtg

SEQ ID NO: 32320 - DNA, 19 bp, Homo sapiens
tgactttctggatttattt

SEQ ID NO: 32321 - DNA, 23 bp, Homo sapiens
gttctcaagtatagacggccatg

SEQ ID NO: 32322 - DNA, 19 bp, Homo sapiens
tgtagcagagctatcactc

SEQ ID NO: 32323 - DNA, 19 bp, Homo sapiens
aggatgctgccaggtgacc

SEQ ID NO: 32324 - DNA, 21 bp, Homo sapiens
ttgtctttatggcacttattt

SEQ ID NO: 32325 - DNA, 21 bp, Homo sapiens
aactacaggtccaggttctgt

SEQ ID NO: 32326 - DNA, 20 bp, Homo sapiens
gagagactgaccacctttgc

SEQ ID NO: 32327 - DNA, 17 bp, Homo sapiens
gatttggcagtgcacat

SEQ ID NO: 32328 - DNA, 19 bp, Homo sapiens
aagtaaataagggaggctc

SEQ ID NO: 32329 - DNA, 16 bp, Homo sapiens
gctatgaagtgagtga

SEQ ID NO: 32330 - DNA, 18 bp, Homo sapiens
tgtagaagacatttggct

SEQ ID NO: 32331 - DNA, 20 bp, Homo sapiens
cgaaaacttcctaattgaca

SEQ ID NO: 32332 - DNA, 18 bp, Homo sapiens
aatccaagaactatgtgc

SEQ ID NO: 32333 - DNA, 21 bp, Homo sapiens
gttgacatcctctaaaatttt

SEQ ID NO: 32334 - DNA, 17 bp, Homo sapiens
gtgtacggttggagatc

SEQ ID NO: 32335 - DNA, 21 bp, Homo sapiens
ggctacttattttaaaagaga

SEQ ID NO: 32336 - DNA, 16 bp, Homo sapiens
gtctggcgactccacc

SEQ ID NO: 32337 - DNA, 22 bp, Homo sapiens
ttggggtttttttgtactttta

SEQ ID NO: 32338 - DNA, 19 bp, Homo sapiens
tcaggttgtctggtctaca

SEQ ID NO: 32339 - DNA, 22 bp, Homo sapiens
actcttcaaaaatgttatgtct

SEQ ID NO: 32340 - DNA, 18 bp, Homo sapiens
gacagctccagatggcgt

SEQ ID NO: 32341 - DNA, 17 bp, Homo sapiens
agaaatccatgggtgga

SEQ ID NO: 32342 - DNA, 21 bp, Homo sapiens
catttcgattccatccagcat

SEQ ID NO: 32343 - DNA, 18 bp, Homo sapiens
gccaggagcgttattacg

SEQ ID NO: 32344 - DNA, 20 bp, Homo sapiens
gaccatgtttaacattgttg

SEQ ID NO: 32345 - DNA, 19 bp, Homo sapiens
gatgaaagcctgggaggca

SEQ ID NO: 32346 - DNA, 20 bp, Homo sapiens
acaaagcaaaacaacaacta

SEQ ID NO: 32347 - DNA, 17 bp, Homo sapiens
ttcaaatagccaaggca

SEQ ID NO: 32348 - DNA, 25 bp, Homo sapiens
taaaatacctctaaaaataaacaag

SEQ ID NO: 32349 - DNA, 17 bp, Homo sapiens
acaaacctttgggtgct

SEQ ID NO: 32350 - DNA, 20 bp, Homo sapiens
ttagatagccaacatttgca

SEQ ID NO: 32351 - DNA, 18 bp, Homo sapiens
taggtaataactacaccc

SEQ ID NO: 32352 - DNA, 21 bp, Homo sapiens
ataggatcagttatcaagctg

SEQ ID NO: 32353 - DNA, 19 bp, Homo sapiens
actcaaataatagcaggaa

SEQ ID NO: 32354 - DNA, 16 bp, Homo sapiens
aggaaccagcccatcg

SEQ ID NO: 32355 - DNA, 18 bp, Homo sapiens
gtggtaaagttacagacc

SEQ ID NO: 32356 - DNA, 20 bp, Homo sapiens
ttttgtgacattcagaaggg

SEQ ID NO: 32357 - DNA, 20 bp, Homo sapiens
gaaccacattctgagaaccg

SEQ ID NO: 32358 - DNA, 19 bp, Homo sapiens
acacactcagtccttttca

SEQ ID NO: 32359 - DNA, 23 bp, Homo sapiens
gaaaataaagaaaccaacatctg

SEQ ID NO: 32360 - DNA, 16 bp, Homo sapiens
gggatcccggaaagcc

SEQ ID NO: 32361 - DNA, 19 bp, Homo sapiens
tgagttgttttctaatgtt

SEQ ID NO: 32362 - DNA, 16 bp, Homo sapiens
gtggaaaatcgaactc

SEQ ID NO: 32363 - DNA, 18 bp, Homo sapiens
catagaatatcccagtga

SEQ ID NO: 32364 - DNA, 16 bp, Homo sapiens
agcgaagcatgtactt

SEQ ID NO: 32365 - DNA, 19 bp, Homo sapiens
gtgcttcccacctcacgtg

SEQ ID NO: 32366 - DNA, 20 bp, Homo sapiens
acaagatgctactgtcaaaa

SEQ ID NO: 32367 - DNA, 22 bp, Homo sapiens
ctgttccttcaggaggagcttc

SEQ ID NO: 32368 - DNA, 23 bp, Homo sapiens
tcttagtaactcttaaatgaact

SEQ ID NO: 32369 - DNA, 21 bp, Homo sapiens
ggagtttacattccttcagag

SEQ ID NO: 32370 - DNA, 23 bp, Homo sapiens
aaaggctagctgtgcagagggtg

SEQ ID NO: 32371 - DNA, 22 bp, Homo sapiens
atattaatccacaattcctcag

SEQ ID NO: 32372 - DNA, 21 bp, Homo sapiens
acatttaacacattcctagaa

SEQ ID NO: 32373 - DNA, 21 bp, Homo sapiens
catactgaaaggcaattatta

SEQ ID NO: 32374 - DNA, 21 bp, Homo sapiens
aacctttggccgtgcatgctt

SEQ ID NO: 32375 - DNA, 19 bp, Homo sapiens
aaatcacatcaagagtgct

SEQ ID NO: 32376 - DNA, 19 bp, Homo sapiens
atagctgagttctgaggaa

SEQ ID NO: 32377 - DNA, 21 bp, Homo sapiens
cagagtttagacaaggagaaa

SEQ ID NO: 32378 - DNA, 18 bp, Homo sapiens
ctcgtgataacacctggg

SEQ ID NO: 32379 - DNA, 24 bp, Homo sapiens
aaaaccacaatctccccaactaga

SEQ ID NO: 32380 - DNA, 17 bp, Homo sapiens
gcccactcatattcacc

SEQ ID NO: 32381 - DNA, 24 bp, Homo sapiens
atgatcattaaaaattaagcacca

SEQ ID NO: 32382 - DNA, 16 bp, Homo sapiens
gaggccagtgaggccc

SEQ ID NO: 32383 - DNA, 21 bp, Homo sapiens
tcatctttttaacttgaggct

SEQ ID NO: 32384 - DNA, 20 bp, Homo sapiens
ggaccaagagtgaaatgagc

SEQ ID NO: 32385 - DNA, 20 bp, Homo sapiens
aggagacattaaaggagtca

SEQ ID NO: 32386 - DNA, 23 bp, Homo sapiens
acaaaatctgaaactcttattat

SEQ ID NO: 32387 - DNA, 22 bp, Homo sapiens
tcgggtatgtcctcgtcagtta

SEQ ID NO: 32388 - DNA, 21 bp, Homo sapiens
tgttaaatcttaacactgaaa

SEQ ID NO: 32389 - DNA, 19 bp, Homo sapiens
caccagaattcacatttag

SEQ ID NO: 32390 - DNA, 22 bp, Homo sapiens
atatgctacaatacgttttacc

SEQ ID NO: 32391 - DNA, 22 bp, Homo sapiens
acttttttttttttaagtgaga

SEQ ID NO: 32392 - DNA, 23 bp, Homo sapiens
gtcaaaccatacacatgatttta

SEQ ID NO: 32393 - DNA, 16 bp, Homo sapiens
aagtggaaggaatggg

SEQ ID NO: 32394 - DNA, 17 bp, Homo sapiens
aggtggaaacaaccaag

SEQ ID NO: 32395 - DNA, 24 bp, Homo sapiens
atatttattaccaggtaaaacgta

SEQ ID NO: 32396 - DNA, 24 bp, Homo sapiens
gaaaatcctgtatattttagtttt

SEQ ID NO: 32397 - DNA, 18 bp, Homo sapiens
gatgacactccaaattgt

SEQ ID NO: 32398 - DNA, 24 bp, Homo sapiens
tttgagatttatgttttttaaaaa

SEQ ID NO: 32399 - DNA, 18 bp, Homo sapiens
cgttccagaatcccactt

SEQ ID NO: 32400 - DNA, 16 bp, Homo sapiens
ttctgactgtcctgga

SEQ ID NO: 32401 - DNA, 24 bp, Homo sapiens
taatcacttctatgcatttaatca

SEQ ID NO: 32402 - DNA, 17 bp, Homo sapiens
acaaacagttcctgggt

SEQ ID NO: 32403 - DNA, 18 bp, Homo sapiens
ctgagattcttgcatgaa

SEQ ID NO: 32404 - DNA, 20 bp, Homo sapiens
tttagcagtatttacacccc

SEQ ID NO: 32405 - DNA, 20 bp, Homo sapiens
gtgtatagttctagaatcca

SEQ ID NO: 32406 - DNA, 21 bp, Homo sapiens
gtgaaatctcctcaataagaa

SEQ ID NO: 32407 - DNA, 17 bp, Homo sapiens
gctgtgctgtgtacagt

SEQ ID NO: 32408 - DNA, 26 bp, Homo sapiens
ctatttattcatattttaagccttat

SEQ ID NO: 32409 - DNA, 17 bp, Homo sapiens
agaaactggtggggtgt

SEQ ID NO: 32410 - DNA, 27 bp, Homo sapiens
tatattatttttaattgttctgttgtt

SEQ ID NO: 32411 - DNA, 18 bp, Homo sapiens
acatggatgggaggctga

SEQ ID NO: 32412 - DNA, 16 bp, Homo sapiens
gcagatatggaacccc

SEQ ID NO: 32413 - DNA, 16 bp, Homo sapiens
gctctcctggaaccca

SEQ ID NO: 32414 - DNA, 19 bp, Homo sapiens
atagactataacaattcgc

SEQ ID NO: 32415 - DNA, 16 bp, Homo sapiens
ttccacagccccacaa

SEQ ID NO: 32416 - DNA, 18 bp, Homo sapiens
ctcctcactgcctgaata

SEQ ID NO: 32417 - DNA, 16 bp, Homo sapiens
tggtttgggtctgaaa

SEQ ID NO: 32418 - DNA, 18 bp, Homo sapiens
accatttgcctttttggg

SEQ ID NO: 32419 - DNA, 16 bp, Homo sapiens
cccacgaatcgggaat

SEQ ID NO: 32420 - DNA, 19 bp, Homo sapiens
ctactggtggctgaacctc

SEQ ID NO: 32421 - DNA, 16 bp, Homo sapiens
ccccaaaaaatggagc

SEQ ID NO: 32422 - DNA, 20 bp, Homo sapiens
tgcactttggctggctgtac

SEQ ID NO: 32423 - DNA, 18 bp, Homo sapiens
gggtttgccagcaaatgg

SEQ ID NO: 32424 - DNA, 16 bp, Homo sapiens
taggcatattgacagg

SEQ ID NO: 32425 - DNA, 23 bp, Homo sapiens
gactgaaatgtggaagtcaagac

SEQ ID NO: 32426 - DNA, 22 bp, Homo sapiens
gatatacacacaatgctcttta

SEQ ID NO: 32427 - DNA, 17 bp, Homo sapiens
atgcatgtgagctctca

SEQ ID NO: 32428 - DNA, 18 bp, Homo sapiens
ttctgtctctggtctctt

SEQ ID NO: 32429 - DNA, 20 bp, Homo sapiens
gtttttgaagggtagcaagc

SEQ ID NO: 32430 - DNA, 20 bp, Homo sapiens
ttatcctaggtagatgcagg

SEQ ID NO: 32431 - DNA, 17 bp, Homo sapiens
tgccagtgctgaatttg

SEQ ID NO: 32432 - DNA, 23 bp, Homo sapiens
atcaggtaaaatacatgtatatt

SEQ ID NO: 32433 - DNA, 19 bp, Homo sapiens
ggtgtaattgagaagtaca

SEQ ID NO: 32434 - DNA, 22 bp, Homo sapiens
tttaaaatgcaaacaaaaagga

SEQ ID NO: 32435 - DNA, 17 bp, Homo sapiens
ccgcagcttaaatggat

SEQ ID NO: 32436 - DNA, 23 bp, Homo sapiens
acctgtgaggttgcttgtattga

SEQ ID NO: 32437 - DNA, 24 bp, Homo sapiens
attttccctattttctcttttatt

SEQ ID NO: 32438 - DNA, 18 bp, Homo sapiens
gtcctcactataggcttt

SEQ ID NO: 32439 - DNA, 16 bp, Homo sapiens
tactgcggccattaaa

SEQ ID NO: 32440 - DNA, 16 bp, Homo sapiens
tcacctcaatgctgta

SEQ ID NO: 32441 - DNA, 22 bp, Homo sapiens
ttaaatcaatgctgaaaagtta

SEQ ID NO: 32442 - DNA, 19 bp, Homo sapiens
aggttcagtatatagtgat

SEQ ID NO: 32443 - DNA, 23 bp, Homo sapiens
gctctgtcagaagactacaaaaa

SEQ ID NO: 32444 - DNA, 18 bp, Homo sapiens
tgctgcatcttatttcca

SEQ ID NO: 32445 - DNA, 16 bp, Homo sapiens
acatgcatgtgtgtgt

SEQ ID NO: 32446 - DNA, 16 bp, Homo sapiens
cccctttccctccctg

SEQ ID NO: 32447 - DNA, 17 bp, Homo sapiens
gtacgtcctcgactcca

SEQ ID NO: 32448 - DNA, 17 bp, Homo sapiens
tccagccttttacaggt

SEQ ID NO: 32449 - DNA, 22 bp, Homo sapiens
actcgatacaggtattcttaaa

SEQ ID NO: 32450 - DNA, 18 bp, Homo sapiens
gcaggggaaatgactcca

SEQ ID NO: 32451 - DNA, 22 bp, Homo sapiens
atagattaatgaggggctggca

SEQ ID NO: 32452 - DNA, 16 bp, Homo sapiens
gtgctgtcagagtcaa

SEQ ID NO: 32453 - DNA, 20 bp, Homo sapiens
ttaatttagaggacctccac

SEQ ID NO: 32454 - DNA, 19 bp, Homo sapiens
ttgcatgaaggatgttaaa

SEQ ID NO: 32455 - DNA, 16 bp, Homo sapiens
ttccctggtaaaccag

SEQ ID NO: 32456 - DNA, 20 bp, Homo sapiens
ggtaattaatgactcaagcc

SEQ ID NO: 32457 - DNA, 23 bp, Homo sapiens
ttgataggcatccatccagattg

SEQ ID NO: 32458 - DNA, 24 bp, Homo sapiens
tagcaattgtatctaaccaccccc

SEQ ID NO: 32459 - DNA, 20 bp, Homo sapiens
gcaccccgtgtaaatttaac

SEQ ID NO: 32460 - DNA, 19 bp, Homo sapiens
gcttgttaaaaagtaggag

SEQ ID NO: 32461 - DNA, 23 bp, Homo sapiens
ttttaaggtttaaatttctccag

SEQ ID NO: 32462 - DNA, 19 bp, Homo sapiens
agtttatgtgggaggaatc

SEQ ID NO: 32463 - DNA, 23 bp, Homo sapiens
gagtctattgctatctcttgaaa

SEQ ID NO: 32464 - DNA, 18 bp, Homo sapiens
tgaatggactgatgaagc

SEQ ID NO: 32465 - DNA, 18 bp, Homo sapiens
atggatttgtgaattcct

SEQ ID NO: 32466 - DNA, 17 bp, Homo sapiens
ttgtaatggaaagtgga

SEQ ID NO: 32467 - DNA, 22 bp, Homo sapiens
agagttcagcagttcctgtggg

SEQ ID NO: 32468 - DNA, 18 bp, Homo sapiens
tccggttaaataccagtc

SEQ ID NO: 32469 - DNA, 22 bp, Homo sapiens
ctggtctccggactccgatgca

SEQ ID NO: 32470 - DNA, 25 bp, Homo sapiens
tatacctactttcttttttaatata

SEQ ID NO: 32471 - DNA, 24 bp, Homo sapiens
aagagccttcctttttaataatga

SEQ ID NO: 32472 - DNA, 19 bp, Homo sapiens
tgcttttcttcaagaaatt

SEQ ID NO: 32473 - DNA, 21 bp, Homo sapiens
agatccacttgtgtaaaggca

SEQ ID NO: 32474 - DNA, 18 bp, Homo sapiens
aagcagaaacttagggta

SEQ ID NO: 32475 - DNA, 24 bp, Homo sapiens
aataaaatacaaaatgtttcacag

SEQ ID NO: 32476 - DNA, 19 bp, Homo sapiens
tgcttcttttcgtttataa

SEQ ID NO: 32477 - DNA, 24 bp, Homo sapiens
acaaatgtgaatttgtaaagaaac

SEQ ID NO: 32478 - DNA, 23 bp, Homo sapiens
tatgtttcatggtggaatgaact

SEQ ID NO: 32479 - DNA, 20 bp, Homo sapiens
ttattttaaagttgggtcct

SEQ ID NO: 32480 - DNA, 24 bp, Homo sapiens
acacatgctaatatgtacatattt

SEQ ID NO: 32481 - DNA, 21 bp, Homo sapiens
cagcaagaaaatcaggtccat

SEQ ID NO: 32482 - DNA, 19 bp, Homo sapiens
cagactgtgtcctagagtt

SEQ ID NO: 32483 - DNA, 23 bp, Homo sapiens
tgaacttaaaggaaatctcaaag

SEQ ID NO: 32484 - DNA, 22 bp, Homo sapiens
tgtgcaattacaaaaggaattt

SEQ ID NO: 32485 - DNA, 19 bp, Homo sapiens
tgtcccgcttcattaaatg

SEQ ID NO: 32486 - DNA, 21 bp, Homo sapiens
actaagtatttctgtgatact

SEQ ID NO: 32487 - DNA, 18 bp, Homo sapiens
ctggattggcagagttct

SEQ ID NO: 32488 - DNA, 24 bp, Homo sapiens
attatacaaaggatagaacataga

SEQ ID NO: 32489 - DNA, 16 bp, Homo sapiens
tgtctcaaggatgtac

SEQ ID NO: 32490 - DNA, 17 bp, Homo sapiens
taggaactgagctccct

SEQ ID NO: 32491 - DNA, 29 bp, Homo sapiens
taatctttcaaaatatatatttcttgata

SEQ ID NO: 32492 - DNA, 18 bp, Homo sapiens
acgttgatttgttcttca

SEQ ID NO: 32493 - DNA, 19 bp, Homo sapiens
tagtgcctatttctttgac

SEQ ID NO: 32494 - DNA, 21 bp, Homo sapiens
aattcttcataaaatgtacat

SEQ ID NO: 32495 - DNA, 22 bp, Homo sapiens
tactatagctgatggtgtggtg

SEQ ID NO: 32496 - DNA, 20 bp, Homo sapiens
cctttaaaaaaaagagacct

SEQ ID NO: 32497 - DNA, 17 bp, Homo sapiens
ggagtctttctgggagg

SEQ ID NO: 32498 - DNA, 21 bp, Homo sapiens
catgaggtagaacataatact

SEQ ID NO: 32499 - DNA, 21 bp, Homo sapiens
ttctcatctcctcttctctag

SEQ ID NO: 32500 - DNA, 19 bp, Homo sapiens
aagtttggatgacaacata

SEQ ID NO: 32501 - DNA, 21 bp, Homo sapiens
ctggtgaaggattttattatt

SEQ ID NO: 32502 - DNA, 21 bp, Homo sapiens
tataacttcgcgggagccctc

SEQ ID NO: 32503 - DNA, 16 bp, Homo sapiens
gaacaggcaatgagga

SEQ ID NO: 32504 - DNA, 22 bp, Homo sapiens
actaccattcaggatggcagag

SEQ ID NO: 32505 - DNA, 19 bp, Homo sapiens
ggttgccagacttcatcct

SEQ ID NO: 32506 - DNA, 17 bp, Homo sapiens
atcaggcttttggccaa

SEQ ID NO: 32507 - DNA, 21 bp, Homo sapiens
gaattgagtagaaattatggt

SEQ ID NO: 32508 - DNA, 20 bp, Homo sapiens
acaactaatgatcatggcaa

SEQ ID NO: 32509 - DNA, 22 bp, Homo sapiens
agtatggcaacaccaacatatc

SEQ ID NO: 32510 - DNA, 23 bp, Homo sapiens
gatatgcatgtataaacatttat

SEQ ID NO: 32511 - DNA, 16 bp, Homo sapiens
ccagagtgatttggcc

SEQ ID NO: 32512 - DNA, 25 bp, Homo sapiens
cataatcttgaaacttgtaaattgg

SEQ ID NO: 32513 - DNA, 19 bp, Homo sapiens
ccatcactatattgtttgc

SEQ ID NO: 32514 - DNA, 19 bp, Homo sapiens
gatgctagacatcagcttt

SEQ ID NO: 32515 - DNA, 20 bp, Homo sapiens
tgtaagtttcattttcttga

SEQ ID NO: 32516 - DNA, 17 bp, Homo sapiens
ggaagagtattttgcac

SEQ ID NO: 32517 - DNA, 23 bp, Homo sapiens
tacaaggtttgaatgaagattca

SEQ ID NO: 32518 - DNA, 16 bp, Homo sapiens
cgaacaaaagtgcctg

SEQ ID NO: 32519 - DNA, 23 bp, Homo sapiens
taaattcttaaaaatattaaagt

SEQ ID NO: 32520 - DNA, 17 bp, Homo sapiens
acaaaaccccagcactg

SEQ ID NO: 32521 - DNA, 19 bp, Homo sapiens
gtcccttcttcaactgaag

SEQ ID NO: 32522 - DNA, 19 bp, Homo sapiens
cctgactgtactcactaca

SEQ ID NO: 32523 - DNA, 22 bp, Homo sapiens
gctgcaaagacaatcaaacctt

SEQ ID NO: 32524 - DNA, 20 bp, Homo sapiens
tgggatatatttaaaaccaa

SEQ ID NO: 32525 - DNA, 20 bp, Homo sapiens
tccccagaattctaaaaaga

SEQ ID NO: 32526 - DNA, 21 bp, Homo sapiens
tgtaaatttcccagctccact

SEQ ID NO: 32527 - DNA, 20 bp, Homo sapiens
gggctgaattagtatttctc

SEQ ID NO: 32528 - DNA, 16 bp, Homo sapiens
ccagctctgatgacca

SEQ ID NO: 32529 - DNA, 18 bp, Homo sapiens
aaacattttggagcttcg

SEQ ID NO: 32530 - DNA, 19 bp, Homo sapiens
ccacctgaagaactgaatg

SEQ ID NO: 32531 - DNA, 20 bp, Homo sapiens
ccagtgaagtctgtattgac

SEQ ID NO: 32532 - DNA, 16 bp, Homo sapiens
gccacctctggttaaa

SEQ ID NO: 32533 - DNA, 17 bp, Homo sapiens
aacggattcctttcatc

SEQ ID NO: 32534 - DNA, 19 bp, Homo sapiens
tctagagacagaaaccaaa

SEQ ID NO: 32535 - DNA, 16 bp, Homo sapiens
atataggagagggtcc

SEQ ID NO: 32536 - DNA, 21 bp, Homo sapiens
tttgatttgaagtgtgatata

SEQ ID NO: 32537 - DNA, 20 bp, Homo sapiens
ctgttgattcctttaaccag

SEQ ID NO: 32538 - DNA, 22 bp, Homo sapiens
taaactctatattgtgttttca

SEQ ID NO: 32539 - DNA, 20 bp, Homo sapiens
cgttttggttgttgttgttt

SEQ ID NO: 32540 - DNA, 18 bp, Homo sapiens
aattcagttggttgtgtg

SEQ ID NO: 32541 - DNA, 20 bp, Homo sapiens
agacaaatataaagtctcaa

SEQ ID NO: 32542 - DNA, 17 bp, Homo sapiens
cttacactgtagaagga

SEQ ID NO: 32543 - DNA, 23 bp, Homo sapiens
ttgataggcaacagatttttcat

SEQ ID NO: 32544 - DNA, 20 bp, Homo sapiens
atctttctttctttctttct

SEQ ID NO: 32545 - DNA, 16 bp, Homo sapiens
ctcccgaagcactggt

SEQ ID NO: 32546 - DNA, 21 bp, Homo sapiens
gaattcatggaactttgactg

SEQ ID NO: 32547 - DNA, 21 bp, Homo sapiens
atcctataaggtttcagtcct

SEQ ID NO: 32548 - DNA, 19 bp, Homo sapiens
agactcttcagaaaaaaaa

SEQ ID NO: 32549 - DNA, 18 bp, Homo sapiens
acaagtgacatacaaaga

SEQ ID NO: 32550 - DNA, 16 bp, Homo sapiens
tcacctcaacagtcta

SEQ ID NO: 32551 - DNA, 20 bp, Homo sapiens
atgccctgtttaatcaatat

SEQ ID NO: 32552 - DNA, 19 bp, Homo sapiens
agaagccagcagataatgt

SEQ ID NO: 32553 - DNA, 18 bp, Homo sapiens
caaatgaagccctaagcc

SEQ ID NO: 32554 - DNA, 17 bp, Homo sapiens
atgatccctccttcagt

SEQ ID NO: 32555 - DNA, 18 bp, Homo sapiens
gtgaaaacgccatgggaa

SEQ ID NO: 32556 - DNA, 19 bp, Homo sapiens
agggacgacattcattgtt

SEQ ID NO: 32557 - DNA, 20 bp, Homo sapiens
cacaacttttcctcttgtaa

SEQ ID NO: 32558 - DNA, 22 bp, Homo sapiens
ttttaaaaggtaaaggtatttc

SEQ ID NO: 32559 - DNA, 17 bp, Homo sapiens
acgaagagaggggaaag

SEQ ID NO: 32560 - DNA, 18 bp, Homo sapiens
aagtgaataccttttaca

SEQ ID NO: 32561 - DNA, 21 bp, Homo sapiens
gttgtttatgtaacaaatcca

SEQ ID NO: 32562 - DNA, 20 bp, Homo sapiens
gctgtgaatatggctggaag

SEQ ID NO: 32563 - DNA, 19 bp, Homo sapiens
gcttttcaaaatgtacttt

SEQ ID NO: 32564 - DNA, 17 bp, Homo sapiens
tgacaaccatcactggc

SEQ ID NO: 32565 - DNA, 22 bp, Homo sapiens
agaggttttaaaagtagaattt

SEQ ID NO: 32566 - DNA, 16 bp, Homo sapiens
tggctcagtcctcatt

SEQ ID NO: 32567 - DNA, 21 bp, Homo sapiens
ttctgagacccaggcagaaga

SEQ ID NO: 32568 - DNA, 22 bp, Homo sapiens
agaagactgagatctactaaag

SEQ ID NO: 32569 - DNA, 17 bp, Homo sapiens
ggtgtatggctccaagc

SEQ ID NO: 32570 - DNA, 18 bp, Homo sapiens
tacgtaggttcactattt

SEQ ID NO: 32571 - DNA, 19 bp, Homo sapiens
tttcattggccgattctac

SEQ ID NO: 32572 - DNA, 24 bp, Homo sapiens
cagcactctttaactgacctgtcc

SEQ ID NO: 32573 - DNA, 17 bp, Homo sapiens
cctcagatgtggtttct

SEQ ID NO: 32574 - DNA, 22 bp, Homo sapiens
tcactacattttgaatgctaaa

SEQ ID NO: 32575 - DNA, 19 bp, Homo sapiens
tacagaacttcatgtagaa

SEQ ID NO: 32576 - DNA, 25 bp, Homo sapiens
tcaattattatattgtgcagttata

SEQ ID NO: 32577 - DNA, 19 bp, Homo sapiens
agcccaggcccctccccaa

SEQ ID NO: 32578 - DNA, 19 bp, Homo sapiens
agattctcattcatgtctt

SEQ ID NO: 32579 - DNA, 16 bp, Homo sapiens
tttttctgtacaggcg

SEQ ID NO: 32580 - DNA, 21 bp, Homo sapiens
ccatttagttccgctggtgga

SEQ ID NO: 32581 - DNA, 17 bp, Homo sapiens
acgaaggtcatgaaacc

SEQ ID NO: 32582 - DNA, 16 bp, Homo sapiens
gacttagtctttgggg

SEQ ID NO: 32583 - DNA, 20 bp, Homo sapiens
tggtcccatagagaaatata

SEQ ID NO: 32584 - DNA, 19 bp, Homo sapiens
tgtgtaaacagcccccgct

SEQ ID NO: 32585 - DNA, 17 bp, Homo sapiens
ttcctattggctcagac

SEQ ID NO: 32586 - DNA, 20 bp, Homo sapiens
ccagattccagatggtagct

SEQ ID NO: 32587 - DNA, 19 bp, Homo sapiens
tgtcacttacaagacaaaa

SEQ ID NO: 32588 - DNA, 22 bp, Homo sapiens
caccagccaaaggggcacagga

SEQ ID NO: 32589 - DNA, 26 bp, Homo sapiens
ccatataccaaatattcctattacat

SEQ ID NO: 32590 - DNA, 18 bp, Homo sapiens
tgtccaggtaagtgtcac

SEQ ID NO: 32591 - DNA, 22 bp, Homo sapiens
ttttttttttcttttcatttca

SEQ ID NO: 32592 - DNA, 19 bp, Homo sapiens
ctgggacccctggttttgt

SEQ ID NO: 32593 - DNA, 22 bp, Homo sapiens
aatatgataggaaagcagttag

SEQ ID NO: 32594 - DNA, 16 bp, Homo sapiens
ttggtggtctcaatgt

SEQ ID NO: 32595 - DNA, 26 bp, Homo sapiens
caattttaaaaatatgaaatgtatcc

SEQ ID NO: 32596 - DNA, 25 bp, Homo sapiens
gtatttctttgattactagtgaaat

SEQ ID NO: 32597 - DNA, 20 bp, Homo sapiens
acttacagtttactcaggga

SEQ ID NO: 32598 - DNA, 23 bp, Homo sapiens
gtgccagacagaggaaaccacaa

SEQ ID NO: 32599 - DNA, 18 bp, Homo sapiens
tctgctatcaatctctcc

SEQ ID NO: 32600 - DNA, 23 bp, Homo sapiens
caattctcagaatatttatttct

SEQ ID NO: 32601 - DNA, 23 bp, Homo sapiens
ctctcttcattgtaatttagctc

SEQ ID NO: 32602 - DNA, 19 bp, Homo sapiens
ctgttgtgtagatttcaaa

SEQ ID NO: 32603 - DNA, 19 bp, Homo sapiens
ctttgctggatatcttact

SEQ ID NO: 32604 - DNA, 18 bp, Homo sapiens
gaatcaggtggactccag

SEQ ID NO: 32605 - DNA, 18 bp, Homo sapiens
tgtcttggtaaaccacat

SEQ ID NO: 32606 - DNA, 21 bp, Homo sapiens
ctgggcggaggttgctggaat

SEQ ID NO: 32607 - DNA, 17 bp, Homo sapiens
gcaagccacttggatgt

SEQ ID NO: 32608 - DNA, 21 bp, Homo sapiens
cttcacattgtactaagcctt

SEQ ID NO: 32609 - DNA, 17 bp, Homo sapiens
ggccagtgtttctgtaa

SEQ ID NO: 32610 - DNA, 19 bp, Homo sapiens
atgcagtcccctgtatgat

SEQ ID NO: 32611 - DNA, 17 bp, Homo sapiens
cagccttgtaattgtca

SEQ ID NO: 32612 - DNA, 17 bp, Homo sapiens
gctgcaacccaatagat

SEQ ID NO: 32613 - DNA, 28 bp, Homo sapiens
ttatactatgaattattaatcaaaacac

SEQ ID NO: 32614 - DNA, 21 bp, Homo sapiens
cacactttgagccagtgacaa

SEQ ID NO: 32615 - DNA, 19 bp, Homo sapiens
tatattggctaaaacaagc

SEQ ID NO: 32616 - DNA, 21 bp, Homo sapiens
tttcattcaaggctcctgaga

SEQ ID NO: 32617 - DNA, 20 bp, Homo sapiens
ctcggacctcgtgatccgcc

SEQ ID NO: 32618 - DNA, 19 bp, Homo sapiens
ccaatgcaaagaccattac

SEQ ID NO: 32619 - DNA, 24 bp, Homo sapiens
tgagccaccaagccgggcaaaaaa

SEQ ID NO: 32620 - DNA, 16 bp, Homo sapiens
tagcctgactggtcag

SEQ ID NO: 32621 - DNA, 20 bp, Homo sapiens
aagttaactgttgctaaaga

SEQ ID NO: 32622 - DNA, 16 bp, Homo sapiens
ggcaatgccactggct

SEQ ID NO: 32623 - DNA, 20 bp, Homo sapiens
ctgaggatcaaatccaaagt

SEQ ID NO: 32624 - DNA, 22 bp, Homo sapiens
aagagtggataaaaagtatata

SEQ ID NO: 32625 - DNA, 16 bp, Homo sapiens
tggcaaacacactgac

SEQ ID NO: 32626 - DNA, 18 bp, Homo sapiens
gccttggtagagtattct

SEQ ID NO: 32627 - DNA, 17 bp, Homo sapiens
atggcatgagcatggca

SEQ ID NO: 32628 - DNA, 18 bp, Homo sapiens
ggtcataattgacacact

SEQ ID NO: 32629 - DNA, 18 bp, Homo sapiens
gtgtgcctaatcgtcaag

SEQ ID NO: 32630 - DNA, 22 bp, Homo sapiens
acagtaatgattttggaaataa

SEQ ID NO: 32631 - DNA, 22 bp, Homo sapiens
gtgattccttggggacattacc

SEQ ID NO: 32632 - DNA, 22 bp, Homo sapiens
taacaaaaggaatgtcattgtg

SEQ ID NO: 32633 - DNA, 16 bp, Homo sapiens
gagcctcacaggtaca

SEQ ID NO: 32634 - DNA, 22 bp, Homo sapiens
ttgacactgattacaccttctt

SEQ ID NO: 32635 - DNA, 16 bp, Homo sapiens
acaggacaatgtcctt

SEQ ID NO: 32636 - DNA, 21 bp, Homo sapiens
tgattgggtcacaaatggtcc

SEQ ID NO: 32637 - DNA, 17 bp, Homo sapiens
gtctgccttgcaactgt

SEQ ID NO: 32638 - DNA, 19 bp, Homo sapiens
aaaattgtcaatggtcaaa

SEQ ID NO: 32639 - DNA, 19 bp, Homo sapiens
agacagtgcaataaatgtt

SEQ ID NO: 32640 - DNA, 24 bp, Homo sapiens
agacctgttacccctaatttgcaa

SEQ ID NO: 32641 - DNA, 16 bp, Homo sapiens
ctgggactgtctgtaa

SEQ ID NO: 32642 - DNA, 22 bp, Homo sapiens
tttattgtcccagtcttatcac

SEQ ID NO: 32643 - DNA, 21 bp, Homo sapiens
ttttatgggttagatgtcacc

SEQ ID NO: 32644 - DNA, 22 bp, Homo sapiens
gtaggtagaagtttccctccaa

SEQ ID NO: 32645 - DNA, 17 bp, Homo sapiens
gcagtgtgagtgcaaaa

SEQ ID NO: 32646 - DNA, 19 bp, Homo sapiens
ctgccctgtcttagcatta

SEQ ID NO: 32647 - DNA, 16 bp, Homo sapiens
gagccctgccagtgta

SEQ ID NO: 32648 - DNA, 19 bp, Homo sapiens
aggccttacaattggtgac

SEQ ID NO: 32649 - DNA, 16 bp, Homo sapiens
gggcttaggtgtgatc

SEQ ID NO: 32650 - DNA, 18 bp, Homo sapiens
ctttggcttcttttttgc

SEQ ID NO: 32651 - DNA, 21 bp, Homo sapiens
cgtctatcttgaatgaaatca

SEQ ID NO: 32652 - DNA, 21 bp, Homo sapiens
tgttcactgagccatggaggt

SEQ ID NO: 32653 - DNA, 18 bp, Homo sapiens
tgcttgtgagaaaacact

SEQ ID NO: 32654 - DNA, 24 bp, Homo sapiens
cggagaaatttaaatccaaaattg

SEQ ID NO: 32655 - DNA, 24 bp, Homo sapiens
attattaatttaatcattttaaac

SEQ ID NO: 32656 - DNA, 18 bp, Homo sapiens
ttacctgtcaccaaaatt

SEQ ID NO: 32657 - DNA, 24 bp, Homo sapiens
ttccagcctgtcttgagcaaagaa

SEQ ID NO: 32658 - DNA, 16 bp, Homo sapiens
tgatggctgcagtccc

SEQ ID NO: 32659 - DNA, 21 bp, Homo sapiens
ccagatggtaatagagatgtg

SEQ ID NO: 32660 - DNA, 16 bp, Homo sapiens
gtgtctggcaggcagt

SEQ ID NO: 32661 - DNA, 17 bp, Homo sapiens
gctttgcacttgcactg

SEQ ID NO: 32662 - DNA, 19 bp, Homo sapiens
acgttcatcattctacaaa

SEQ ID NO: 32663 - DNA, 16 bp, Homo sapiens
tgcagttacagggact

SEQ ID NO: 32664 - DNA, 17 bp, Homo sapiens
ttcttctccctccctcc

SEQ ID NO: 32665 - DNA, 18 bp, Homo sapiens
ttctggcactgattgcac

SEQ ID NO: 32666 - DNA, 17 bp, Homo sapiens
ttgtgtgtcaagaggaa

SEQ ID NO: 32667 - DNA, 17 bp, Homo sapiens
actcaaagttgcacacg

SEQ ID NO: 32668 - DNA, 17 bp, Homo sapiens
caaaccctgtgactgtg

SEQ ID NO: 32669 - DNA, 23 bp, Homo sapiens
gaggatttcctggcaaatgcagt

SEQ ID NO: 32670 - DNA, 17 bp, Homo sapiens
gctgtgcaaggattact

SEQ ID NO: 32671 - DNA, 23 bp, Homo sapiens
ctggcagacagagtaatccttta

SEQ ID NO: 32672 - DNA, 24 bp, Homo sapiens
gattttaatgaattagaagtcata

SEQ ID NO: 32673 - DNA, 16 bp, Homo sapiens
ttctagtgccaactgt

SEQ ID NO: 32674 - DNA, 21 bp, Homo sapiens
ccgaaaattatagaattccct

SEQ ID NO: 32675 - DNA, 18 bp, Homo sapiens
gatctgcaccaacttgtc

SEQ ID NO: 32676 - DNA, 18 bp, Homo sapiens
tgctctggatcactaaat

SEQ ID NO: 32677 - DNA, 19 bp, Homo sapiens
ttggaaataggaagatttg

SEQ ID NO: 32678 - DNA, 16 bp, Homo sapiens
cagagggggaggagga

SEQ ID NO: 32679 - DNA, 23 bp, Homo sapiens
acatccttaaataagatagcaat

SEQ ID NO: 32680 - DNA, 17 bp, Homo sapiens
cagccattccaaaagct

SEQ ID NO: 32681 - DNA, 16 bp, Homo sapiens
gcacacaggcctccaa

SEQ ID NO: 32682 - DNA, 16 bp, Homo sapiens
caagcctttccgccaa

SEQ ID NO: 32683 - DNA, 21 bp, Homo sapiens
atgctcacaatcatcacaaac

SEQ ID NO: 32684 - DNA, 19 bp, Homo sapiens
attttctttactgttctga

SEQ ID NO: 32685 - DNA, 16 bp, Homo sapiens
tgtaatggcagctttt

SEQ ID NO: 32686 - DNA, 17 bp, Homo sapiens
gctttacttctggtgaa

SEQ ID NO: 32687 - DNA, 17 bp, Homo sapiens
acttgatcaccttggcg

SEQ ID NO: 32688 - DNA, 19 bp, Homo sapiens
tgctatttctgacttacga

SEQ ID NO: 32689 - DNA, 16 bp, Homo sapiens
gatgcctctgctccca

SEQ ID NO: 32690 - DNA, 25 bp, Homo sapiens
atatcagtttttaaatttattttca

SEQ ID NO: 32691 - DNA, 16 bp, Homo sapiens
ttgcagatgtcagtgc

SEQ ID NO: 32692 - DNA, 19 bp, Homo sapiens
gtcaccatctctactattt

SEQ ID NO: 32693 - DNA, 17 bp, Homo sapiens
tagtcctaggaccttaa

SEQ ID NO: 32694 - DNA, 16 bp, Homo sapiens
gtgaagctctcctggg

SEQ ID NO: 32695 - DNA, 23 bp, Homo sapiens
ggagaaactgattttgtatcaat

SEQ ID NO: 32696 - DNA, 18 bp, Homo sapiens
gttatcggcatgaccatg

SEQ ID NO: 32697 - DNA, 25 bp, Homo sapiens
caatgttatatagagaaaagactca

SEQ ID NO: 32698 - DNA, 20 bp, Homo sapiens
agacacagatattatgcagt

SEQ ID NO: 32699 - DNA, 20 bp, Homo sapiens
tcatttcaaaatgtaaagct

SEQ ID NO: 32700 - DNA, 19 bp, Homo sapiens
cacgcaaataaggtttcat

SEQ ID NO: 32701 - DNA, 22 bp, Homo sapiens
tgttaagacagtaagtatgaca

SEQ ID NO: 32702 - DNA, 18 bp, Homo sapiens
ccaaattatcgtcctgga

SEQ ID NO: 32703 - DNA, 21 bp, Homo sapiens
ctaatggtgatttcgtccact

SEQ ID NO: 32704 - DNA, 23 bp, Homo sapiens
ctttcattaacagttttactcca

SEQ ID NO: 32705 - DNA, 16 bp, Homo sapiens
actgcccatgaaaatg

SEQ ID NO: 32706 - DNA, 19 bp, Homo sapiens
tgatttctgttttgccaaa

SEQ ID NO: 32707 - DNA, 25 bp, Homo sapiens
ggggtattatagaagttattgtatc

SEQ ID NO: 32708 - DNA, 23 bp, Homo sapiens
tggaatatgcttttcctagaatg

SEQ ID NO: 32709 - DNA, 16 bp, Homo sapiens
gtgacattgccacggg

SEQ ID NO: 32710 - DNA, 20 bp, Homo sapiens
agcccaatttagggataaga

SEQ ID NO: 32711 - DNA, 19 bp, Homo sapiens
ggtgcttttggaatgaaaa

SEQ ID NO: 32712 - DNA, 21 bp, Homo sapiens
aagtctccaccagcctagaga

SEQ ID NO: 32713 - DNA, 18 bp, Homo sapiens
ggattcaaaggaagaagg

SEQ ID NO: 32714 - DNA, 22 bp, Homo sapiens
aaattaattgtttaaaaatatt

SEQ ID NO: 32715 - DNA, 19 bp, Homo sapiens
tccattttcaggtgtttta

SEQ ID NO: 32716 - DNA, 22 bp, Homo sapiens
aaatctccattgtttttcattc

SEQ ID NO: 32717 - DNA, 22 bp, Homo sapiens
tccatggtttgatatatactga

SEQ ID NO: 32718 - DNA, 18 bp, Homo sapiens
agtcctcccaatctaaac

SEQ ID NO: 32719 - DNA, 24 bp, Homo sapiens
ctaatacatatttgataactataa

SEQ ID NO: 32720 - DNA, 20 bp, Homo sapiens
tggactaaagaactgaatga

SEQ ID NO: 32721 - DNA, 20 bp, Homo sapiens
tctggaatctttaagggaat

SEQ ID NO: 32722 - DNA, 17 bp, Homo sapiens
agcttaatcaaggagtg

SEQ ID NO: 32723 - DNA, 20 bp, Homo sapiens
aactgttagggaatatattt

SEQ ID NO: 32724 - DNA, 22 bp, Homo sapiens
tctcttttgtcaatgataatga

SEQ ID NO: 32725 - DNA, 22 bp, Homo sapiens
tgcaataaccacaggaaattaa

SEQ ID NO: 32726 - DNA, 17 bp, Homo sapiens
gcaggagacacagctga

SEQ ID NO: 32727 - DNA, 24 bp, Homo sapiens
attttccaaatcaactgaaatagt

SEQ ID NO: 32728 - DNA, 16 bp, Homo sapiens
ttgccctggcagccac

SEQ ID NO: 32729 - DNA, 21 bp, Homo sapiens
ttgaaacccatgaagtaccaa

SEQ ID NO: 32730 - DNA, 18 bp, Homo sapiens
agagagattctggaagtc

SEQ ID NO: 32731 - DNA, 18 bp, Homo sapiens
caaccgtgacactctatt

SEQ ID NO: 32732 - DNA, 20 bp, Homo sapiens
ctcctagaagttctattact

SEQ ID NO: 32733 - DNA, 18 bp, Homo sapiens
gtgccaaagggtggaccc

SEQ ID NO: 32734 - DNA, 23 bp, Homo sapiens
ttattaaaactaaatggatactc

SEQ ID NO: 32735 - DNA, 16 bp, Homo sapiens
agatctccagagaaga

SEQ ID NO: 32736 - DNA, 21 bp, Homo sapiens
accatagactaagccaaagca

SEQ ID NO: 32737 - DNA, 17 bp, Homo sapiens
gagcagtttgtcggaag

SEQ ID NO: 32738 - DNA, 27 bp, Homo sapiens
tataaagataaaaaatggtataatcta

SEQ ID NO: 32739 - DNA, 19 bp, Homo sapiens
gtcaggtattgcttggtaa

SEQ ID NO: 32740 - DNA, 19 bp, Homo sapiens
tcggttcttgaggtttaca

SEQ ID NO: 32741 - DNA, 21 bp, Homo sapiens
agggcagtgacataaatatct

SEQ ID NO: 32742 - DNA, 18 bp, Homo sapiens
cgaaaatcttgcattctt

SEQ ID NO: 32743 - DNA, 25 bp, Homo sapiens
tttttgttattaatgtggaattagc

SEQ ID NO: 32744 - DNA, 20 bp, Homo sapiens
ttttactttcattaatctgc

SEQ ID NO: 32745 - DNA, 19 bp, Homo sapiens
ctaagtggttcaattacag

SEQ ID NO: 32746 - DNA, 19 bp, Homo sapiens
gatgaatacacgtagatat

SEQ ID NO: 32747 - DNA, 20 bp, Homo sapiens
tcagcttctttatcaatggc

SEQ ID NO: 32748 - DNA, 23 bp, Homo sapiens
aattggatgaaataaataacatt

SEQ ID NO: 32749 - DNA, 19 bp, Homo sapiens
agtttatgcacttaaacta

SEQ ID NO: 32750 - DNA, 20 bp, Homo sapiens
tttgcacagtaccagatgca

SEQ ID NO: 32751 - DNA, 21 bp, Homo sapiens
gaacaaagtaaagaagaaaga

SEQ ID NO: 32752 - DNA, 20 bp, Homo sapiens
aggtgtatgatccttctcca

SEQ ID NO: 32753 - DNA, 20 bp, Homo sapiens
aaacacatggagatatcact

SEQ ID NO: 32754 - DNA, 21 bp, Homo sapiens
aagagatacatcattaggtca

SEQ ID NO: 32755 - DNA, 19 bp, Homo sapiens
cactggggagaattcttgt

SEQ ID NO: 32756 - DNA, 22 bp, Homo sapiens
ctgaaatctaaaagatactgct

SEQ ID NO: 32757 - DNA, 21 bp, Homo sapiens
ccatgttttattatcgcacag

SEQ ID NO: 32758 - DNA, 17 bp, Homo sapiens
gacaaatccttgtgttt

SEQ ID NO: 32759 - DNA, 22 bp, Homo sapiens
taaggtgtgttatagaaaagac

SEQ ID NO: 32760 - DNA, 23 bp, Homo sapiens
cctgcacactaagatgaatccat

SEQ ID NO: 32761 - DNA, 19 bp, Homo sapiens
gcatgtctttttggttgga

SEQ ID NO: 32762 - DNA, 18 bp, Homo sapiens
caaaccatttactgtgcg

SEQ ID NO: 32763 - DNA, 19 bp, Homo sapiens
agtacaccattttgagcaa

SEQ ID NO: 32764 - DNA, 22 bp, Homo sapiens
agtttgaacacaatctgcccat

SEQ ID NO: 32765 - DNA, 22 bp, Homo sapiens
agagaaaaaaattttaattggg

SEQ ID NO: 32766 - DNA, 19 bp, Homo sapiens
tgatggcatcatttacctt

SEQ ID NO: 32767 - DNA, 21 bp, Homo sapiens
aattctatatagccttcactt

SEQ ID NO: 32768 - DNA, 23 bp, Homo sapiens
ctgcaagttttatttttggaaat

SEQ ID NO: 32769 - DNA, 24 bp, Homo sapiens
ctactggttttggggacctatgaa

SEQ ID NO: 32770 - DNA, 17 bp, Homo sapiens
gcctcagtagctgcatc

SEQ ID NO: 32771 - DNA, 24 bp, Homo sapiens
gctcaggtttcagccatacagcta

SEQ ID NO: 32772 - DNA, 17 bp, Homo sapiens
ttcaggattgcccatac

SEQ ID NO: 32773 - DNA, 16 bp, Homo sapiens
agcagctcttgtgatt

SEQ ID NO: 32774 - DNA, 24 bp, Homo sapiens
cagaccgaagcactttttgtcaca

SEQ ID NO: 32775 - DNA, 21 bp, Homo sapiens
atgcagatcattcttgtctgg

SEQ ID NO: 32776 - DNA, 17 bp, Homo sapiens
gggagctttcaagaaag

SEQ ID NO: 32777 - DNA, 21 bp, Homo sapiens
gtaggtagggtgtgaagatct

SEQ ID NO: 32778 - DNA, 19 bp, Homo sapiens
gcctattttgcttcaatat

SEQ ID NO: 32779 - DNA, 17 bp, Homo sapiens
atactttcagcagcagc

SEQ ID NO: 32780 - DNA, 17 bp, Homo sapiens
ttctttcattgggctct

SEQ ID NO: 32781 - DNA, 19 bp, Homo sapiens
ctgcttgggttggcacgat

SEQ ID NO: 32782 - DNA, 22 bp, Homo sapiens
ggcctgattatttatttagaaa

SEQ ID NO: 32783 - DNA, 21 bp, Homo sapiens
gaaaagacctcgtgactcagt

SEQ ID NO: 32784 - DNA, 19 bp, Homo sapiens
tcgcaacatcacttaaagt

SEQ ID NO: 32785 - DNA, 22 bp, Homo sapiens
caatgacctgaaacaagaagcc

SEQ ID NO: 32786 - DNA, 18 bp, Homo sapiens
gaacgtcgttggtattac

SEQ ID NO: 32787 - DNA, 24 bp, Homo sapiens
aactttcctcttaggatcatgtga

SEQ ID NO: 32788 - DNA, 21 bp, Homo sapiens
acagccaatgttctattcctt

SEQ ID NO: 32789 - DNA, 23 bp, Homo sapiens
attatttggatggtttgtccagt

SEQ ID NO: 32790 - DNA, 16 bp, Homo sapiens
gcaaacagtgatggga

SEQ ID NO: 32791 - DNA, 18 bp, Homo sapiens
caacaaatctagtttgga

SEQ ID NO: 32792 - DNA, 24 bp, Homo sapiens
gtacaaatgggaattttttttttt

SEQ ID NO: 32793 - DNA, 18 bp, Homo sapiens
ggctgcatagctgctaag

SEQ ID NO: 32794 - DNA, 18 bp, Homo sapiens
acactaacctcagtatga

SEQ ID NO: 32795 - DNA, 16 bp, Homo sapiens
caggcaatcacggtcc

SEQ ID NO: 32796 - DNA, 18 bp, Homo sapiens
tgagttgtaggcagtcat

SEQ ID NO: 32797 - DNA, 17 bp, Homo sapiens
agaaaatgtaaggctgt

SEQ ID NO: 32798 - DNA, 20 bp, Homo sapiens
gagtgtggtctctcttgctg

SEQ ID NO: 32799 - DNA, 20 bp, Homo sapiens
cctgtgagagaaattacatt

SEQ ID NO: 32800 - DNA, 20 bp, Homo sapiens
tcatgatgacttcaattgca

SEQ ID NO: 32801 - DNA, 20 bp, Homo sapiens
tagtttgcataattagatga

SEQ ID NO: 32802 - DNA, 21 bp, Homo sapiens
gaaaaatacaatcacaaattg

SEQ ID NO: 32803 - DNA, 20 bp, Homo sapiens
tttccttccacatgattttt

SEQ ID NO: 32804 - DNA, 18 bp, Homo sapiens
gggcttatttgatttggg

SEQ ID NO: 32805 - DNA, 16 bp, Homo sapiens
tctaccccctgcaaac

SEQ ID NO: 32806 - DNA, 27 bp, Homo sapiens
aaagctatctttattatttagaaataa

SEQ ID NO: 32807 - DNA, 19 bp, Homo sapiens
tctatcaatgtaatcgctg

SEQ ID NO: 32808 - DNA, 23 bp, Homo sapiens
ggtgagtttaaatctctaaatac

SEQ ID NO: 32809 - DNA, 16 bp, Homo sapiens
ggacatgtccactgca

SEQ ID NO: 32810 - DNA, 24 bp, Homo sapiens
aaactcctgtgtccttatgaatga

SEQ ID NO: 32811 - DNA, 16 bp, Homo sapiens
tttagctggcggaggc

SEQ ID NO: 32812 - DNA, 21 bp, Homo sapiens
cattttctaatcccccagcga

SEQ ID NO: 32813 - DNA, 19 bp, Homo sapiens
cttctggggccaaatgtgg

SEQ ID NO: 32814 - DNA, 18 bp, Homo sapiens
cggaacagatgatctccc

SEQ ID NO: 32815 - DNA, 17 bp, Homo sapiens
tgggttgtctacaaact

SEQ ID NO: 32816 - DNA, 17 bp, Homo sapiens
gtctgaggtcactgcct

SEQ ID NO: 32817 - DNA, 16 bp, Homo sapiens
tgccagtgaaacctca

SEQ ID NO: 32818 - DNA, 20 bp, Homo sapiens
caaagtatttagatctggca

SEQ ID NO: 32819 - DNA, 19 bp, Homo sapiens
tctttcaggttatgctatg

SEQ ID NO: 32820 - DNA, 17 bp, Homo sapiens
gttagagcaccagccag

SEQ ID NO: 32821 - DNA, 22 bp, Homo sapiens
agaagaattacaaaataagaga

SEQ ID NO: 32822 - DNA, 18 bp, Homo sapiens
cacacacagtagcaatat

SEQ ID NO: 32823 - DNA, 22 bp, Homo sapiens
caatcagataggaaaacatgta

SEQ ID NO: 32824 - DNA, 16 bp, Homo sapiens
cgccagactttgtaca

SEQ ID NO: 32825 - DNA, 18 bp, Homo sapiens
tgggatttaaacaggtac

SEQ ID NO: 32826 - DNA, 22 bp, Homo sapiens
aataggtaatcttactaccttt

SEQ ID NO: 32827 - DNA, 18 bp, Homo sapiens
tgtttgcaaaccatacag

SEQ ID NO: 32828 - DNA, 25 bp, Homo sapiens
aaagacattattttggtttatctat

SEQ ID NO: 32829 - DNA, 22 bp, Homo sapiens
ccatcagaaatagaaatggaga

SEQ ID NO: 32830 - DNA, 17 bp, Homo sapiens
gagaccttcttctgtac

SEQ ID NO: 32831 - DNA, 20 bp, Homo sapiens
tactatactagagtactttt

SEQ ID NO: 32832 - DNA, 20 bp, Homo sapiens
cacttatcagtatactgtat

SEQ ID NO: 32833 - DNA, 20 bp, Homo sapiens
aatgatatgtttgagaagac

SEQ ID NO: 32834 - DNA, 20 bp, Homo sapiens
tgaccatagagatgtatttg

SEQ ID NO: 32835 - DNA, 23 bp, Homo sapiens
ttatgaggaattaaaaatttttt

SEQ ID NO: 32836 - DNA, 20 bp, Homo sapiens
aaccctaaagcattttaaga

SEQ ID NO: 32837 - DNA, 18 bp, Homo sapiens
ccagctgtttactggaag

SEQ ID NO: 32838 - DNA, 24 bp, Homo sapiens
ttaagttaatcttatgcaaagtga

SEQ ID NO: 32839 - DNA, 21 bp, Homo sapiens
tgataatctttgattggtcct

SEQ ID NO: 32840 - DNA, 16 bp, Homo sapiens
tacccacacagaagcc

SEQ ID NO: 32841 - DNA, 28 bp, Homo sapiens
agaagtatttttcattcttttattttat

SEQ ID NO: 32842 - DNA, 16 bp, Homo sapiens
atgacaccgcatttgc

SEQ ID NO: 32843 - DNA, 20 bp, Homo sapiens
caagaaatgtttacctaaca

SEQ ID NO: 32844 - DNA, 19 bp, Homo sapiens
gcacaactagtcacctttg

SEQ ID NO: 32845 - DNA, 19 bp, Homo sapiens
ggagcttgcagtgagccaa

SEQ ID NO: 32846 - DNA, 23 bp, Homo sapiens
aacagtacggacattcagtggtc

SEQ ID NO: 32847 - DNA, 26 bp, Homo sapiens
gactccgtcttaaaaataaataaata

SEQ ID NO: 32848 - DNA, 21 bp, Homo sapiens
gagcagtgacaatctgatact

SEQ ID NO: 32849 - DNA, 22 bp, Homo sapiens
ttgaataaagtttactggaggc

SEQ ID NO: 32850 - DNA, 18 bp, Homo sapiens
ctgctatgtaaacttcac

SEQ ID NO: 32851 - DNA, 19 bp, Homo sapiens
cccagctcaggatggctga

SEQ ID NO: 32852 - DNA, 24 bp, Homo sapiens
ataaaactaaaaaattgttccatt

SEQ ID NO: 32853 - DNA, 22 bp, Homo sapiens
tttcatgtagcatgttttcatt

SEQ ID NO: 32854 - DNA, 16 bp, Homo sapiens
ctgtggtttgtcacgg

SEQ ID NO: 32855 - DNA, 23 bp, Homo sapiens
ctgagtttttccaccaaggactc

SEQ ID NO: 32856 - DNA, 20 bp, Homo sapiens
gtctgcttcagccagcccca

SEQ ID NO: 32857 - DNA, 22 bp, Homo sapiens
gaaagatatatccagaatgatc

SEQ ID NO: 32858 - DNA, 21 bp, Homo sapiens
ttgtcatggataaaaggcttg

SEQ ID NO: 32859 - DNA, 20 bp, Homo sapiens
atcagaagacagaaattccg

SEQ ID NO: 32860 - DNA, 21 bp, Homo sapiens
acttaccaccttttaaaaagc

SEQ ID NO: 32861 - DNA, 16 bp, Homo sapiens
aatctttctccgtggg

SEQ ID NO: 32862 - DNA, 23 bp, Homo sapiens
ttacagagcttataatccatatt

SEQ ID NO: 32863 - DNA, 18 bp, Homo sapiens
ggaacccacgtattcccc

SEQ ID NO: 32864 - DNA, 16 bp, Homo sapiens
gctaagcatggggaag

SEQ ID NO: 32865 - DNA, 16 bp, Homo sapiens
ctttcagggagacccg

SEQ ID NO: 32866 - DNA, 22 bp, Homo sapiens
gcactgactggcacacagcttt

SEQ ID NO: 32867 - DNA, 19 bp, Homo sapiens
gccaagctcaatattgaag

SEQ ID NO: 32868 - DNA, 18 bp, Homo sapiens
acaagagtctaatcaggt

SEQ ID NO: 32869 - DNA, 16 bp, Homo sapiens
aaaacctacgggcaga

SEQ ID NO: 32870 - DNA, 20 bp, Homo sapiens
tgatttctttgacctgttct

SEQ ID NO: 32871 - DNA, 17 bp, Homo sapiens
gaatggatgtctctgca

SEQ ID NO: 32872 - DNA, 17 bp, Homo sapiens
gcagctggaagctctcc

SEQ ID NO: 32873 - DNA, 21 bp, Homo sapiens
aagtctttctttttactacat

SEQ ID NO: 32874 - DNA, 20 bp, Homo sapiens
catgtggaacagctgacggg

SEQ ID NO: 32875 - DNA, 18 bp, Homo sapiens
agcattttttccataacc

SEQ ID NO: 32876 - DNA, 21 bp, Homo sapiens
gaactggatcttcaactgcag

SEQ ID NO: 32877 - DNA, 22 bp, Homo sapiens
gaaacattgatacttctgatct

SEQ ID NO: 32878 - DNA, 18 bp, Homo sapiens
gggaaggcttctgttcaa

SEQ ID NO: 32879 - DNA, 23 bp, Homo sapiens
tgctactaccaattctctttgat

SEQ ID NO: 32880 - DNA, 16 bp, Homo sapiens
gtgtcgcagaacatct

SEQ ID NO: 32881 - DNA, 24 bp, Homo sapiens
ctaaccttaaaatattcaggttct

SEQ ID NO: 32882 - DNA, 17 bp, Homo sapiens
cccttgggcgcgtaatg

SEQ ID NO: 32883 - DNA, 18 bp, Homo sapiens
tgaaaaacattgatcgct

SEQ ID NO: 32884 - DNA, 18 bp, Homo sapiens
gttttgattttggtgtgc

SEQ ID NO: 32885 - DNA, 16 bp, Homo sapiens
atccactgacagatgt

SEQ ID NO: 32886 - DNA, 18 bp, Homo sapiens
ctgtagctgaatgaaact

SEQ ID NO: 32887 - DNA, 21 bp, Homo sapiens
ggataaaaagacgaggatcat

SEQ ID NO: 32888 - DNA, 17 bp, Homo sapiens
ttcccttttttggttgt

SEQ ID NO: 32889 - DNA, 18 bp, Homo sapiens
cgttcaccattctgacgc

SEQ ID NO: 32890 - DNA, 23 bp, Homo sapiens
tgaaaatagaattatatacttaa

SEQ ID NO: 32891 - DNA, 20 bp, Homo sapiens
tctatgactgatgtgaaaga

SEQ ID NO: 32892 - DNA, 22 bp, Homo sapiens
ttaggacttaaaaaagctattt

SEQ ID NO: 32893 - DNA, 18 bp, Homo sapiens
ttccagacagaacttttc

SEQ ID NO: 32894 - DNA, 26 bp, Homo sapiens
ctcagaaatataaattaaaaataatt

SEQ ID NO: 32895 - DNA, 20 bp, Homo sapiens
agaattaggtctttgtgtct

SEQ ID NO: 32896 - DNA, 22 bp, Homo sapiens
aaaaactctgggataagttctt

SEQ ID NO: 32897 - DNA, 25 bp, Homo sapiens
attagcattattttaatctttttga

SEQ ID NO: 32898 - DNA, 20 bp, Homo sapiens
tcgccaagttgtatttgtag

SEQ ID NO: 32899 - DNA, 26 bp, Homo sapiens
tagaaatatttattttcaagaacatg

SEQ ID NO: 32900 - DNA, 17 bp, Homo sapiens
ttgaggagcactttggg

SEQ ID NO: 32901 - DNA, 18 bp, Homo sapiens
cggcactgtgcttcactt

SEQ ID NO: 32902 - DNA, 20 bp, Homo sapiens
tagttcttaaaatgtcagtc

SEQ ID NO: 32903 - DNA, 16 bp, Homo sapiens
accccatgcctcccgt

SEQ ID NO: 32904 - DNA, 20 bp, Homo sapiens
caacatgactttttaggcag

SEQ ID NO: 32905 - DNA, 16 bp, Homo sapiens
ttctctggattcaccg

SEQ ID NO: 32906 - DNA, 24 bp, Homo sapiens
tagtgaaaggaggcatcctgacca

SEQ ID NO: 32907 - DNA, 21 bp, Homo sapiens
ggagagaaaaaaaaacatcca

SEQ ID NO: 32908 - DNA, 17 bp, Homo sapiens
atagtgatagggctgca

SEQ ID NO: 32909 - DNA, 16 bp, Homo sapiens
tgggtaagagtgggag

SEQ ID NO: 32910 - DNA, 17 bp, Homo sapiens
cttcctccaagtactga

SEQ ID NO: 32911 - DNA, 21 bp, Homo sapiens
gaaaatcaggatagaaaatga

SEQ ID NO: 32912 - DNA, 23 bp, Homo sapiens
gctgttcagtataaagaaaaaga

SEQ ID NO: 32913 - DNA, 20 bp, Homo sapiens
atcctagtacaagaaggtaa

SEQ ID NO: 32914 - DNA, 23 bp, Homo sapiens
tatcaaaatatttaatttttaaa

SEQ ID NO: 32915 - DNA, 20 bp, Homo sapiens
aaacaaaacacaatttttca

SEQ ID NO: 32916 - DNA, 19 bp, Homo sapiens
ttgttgaccacttacctac

SEQ ID NO: 32917 - DNA, 22 bp, Homo sapiens
cttgtatgtgtccacataacga

SEQ ID NO: 32918 - DNA, 20 bp, Homo sapiens
tgaatggtgactgttagtta

SEQ ID NO: 32919 - DNA, 19 bp, Homo sapiens
attcacaattgttgaacca

SEQ ID NO: 32920 - DNA, 16 bp, Homo sapiens
atacttgctgactacg

SEQ ID NO: 32921 - DNA, 19 bp, Homo sapiens
ttgtgcatgtttgaaattt

SEQ ID NO: 32922 - DNA, 18 bp, Homo sapiens
tgactcacttaaacaaac

SEQ ID NO: 32923 - DNA, 19 bp, Homo sapiens
tgaaccctaaaggtgatga

SEQ ID NO: 32924 - DNA, 17 bp, Homo sapiens
acatcaccgctctgaca

SEQ ID NO: 32925 - DNA, 22 bp, Homo sapiens
ttgaggtcaagtgtctcactaa

SEQ ID NO: 32926 - DNA, 21 bp, Homo sapiens
ggttcgtgatgatgtatacca

SEQ ID NO: 32927 - DNA, 19 bp, Homo sapiens
agatcattgaaggatcggc

SEQ ID NO: 32928 - DNA, 18 bp, Homo sapiens
gtgccaataagactaaaa

SEQ ID NO: 32929 - DNA, 19 bp, Homo sapiens
tttgcccagtataccataa

SEQ ID NO: 32930 - DNA, 19 bp, Homo sapiens
ttttttggaggacatgaga

SEQ ID NO: 32931 - DNA, 19 bp, Homo sapiens
gggaggttatttgtgagta

SEQ ID NO: 32932 - DNA, 21 bp, Homo sapiens
ggaggtcaaagacaatcctca

SEQ ID NO: 32933 - DNA, 21 bp, Homo sapiens
atctttctaacaaatggcaga

SEQ ID NO: 32934 - DNA, 22 bp, Homo sapiens
ggcaattttattcgatttcagt

SEQ ID NO: 32935 - DNA, 21 bp, Homo sapiens
ctggacatatgaagaaattaa

SEQ ID NO: 32936 - DNA, 22 bp, Homo sapiens
gcccatgagcacttaaacaata

SEQ ID NO: 32937 - DNA, 20 bp, Homo sapiens
ttttgcctatttctttgtct

SEQ ID NO: 32938 - DNA, 17 bp, Homo sapiens
acaggagtgttctgcca

SEQ ID NO: 32939 - DNA, 20 bp, Homo sapiens
tttgatgctttttaaaatct

SEQ ID NO: 32940 - DNA, 20 bp, Homo sapiens
tgccaccaacgcttgtgaac

SEQ ID NO: 32941 - DNA, 17 bp, Homo sapiens
tgggagagttttcaggt

SEQ ID NO: 32942 - DNA, 19 bp, Homo sapiens
ccaactctccctgaaggct

SEQ ID NO: 32943 - DNA, 20 bp, Homo sapiens
acagtcttctttttaaaatt

SEQ ID NO: 32944 - DNA, 21 bp, Homo sapiens
tgtggaatgtattttgtggaa

SEQ ID NO: 32945 - DNA, 20 bp, Homo sapiens
tagagtgacaaagaatgaac

SEQ ID NO: 32946 - DNA, 18 bp, Homo sapiens
tggtagtgtgcacataca

SEQ ID NO: 32947 - DNA, 22 bp, Homo sapiens
tttttggaatctgtctagattt

SEQ ID NO: 32948 - DNA, 19 bp, Homo sapiens
cgaggtagtgagattcaaa

SEQ ID NO: 32949 - DNA, 22 bp, Homo sapiens
actttcaactgtatcagaagca

SEQ ID NO: 32950 - DNA, 18 bp, Homo sapiens
acttgcccaagacttcat

SEQ ID NO: 32951 - DNA, 20 bp, Homo sapiens
cacattcatgactcatatgc

SEQ ID NO: 32952 - DNA, 17 bp, Homo sapiens
gcatcagtgttgcacca

SEQ ID NO: 32953 - DNA, 24 bp, Homo sapiens
ctacagaaagtttatccaatttaa

SEQ ID NO: 32954 - DNA, 17 bp, Homo sapiens
tggtcagaacatttagt

SEQ ID NO: 32955 - DNA, 17 bp, Homo sapiens
aaggcagggtgaatatg

SEQ ID NO: 32956 - DNA, 19 bp, Homo sapiens
tctatctagtctgctttgc

SEQ ID NO: 32957 - DNA, 23 bp, Homo sapiens
acaattcaccagctgtctctcta

SEQ ID NO: 32958 - DNA, 20 bp, Homo sapiens
agaatgctaaaaaggagcta

SEQ ID NO: 32959 - DNA, 21 bp, Homo sapiens
catttccttttggattttggc

SEQ ID NO: 32960 - DNA, 20 bp, Homo sapiens
actcattcttctttctcttc

SEQ ID NO: 32961 - DNA, 20 bp, Homo sapiens
tttttctgaaaatgatggca

SEQ ID NO: 32962 - DNA, 18 bp, Homo sapiens
ttacttttctcctcaaca

SEQ ID NO: 32963 - DNA, 21 bp, Homo sapiens
tattcatgaaagagtgaaggt

SEQ ID NO: 32964 - DNA, 18 bp, Homo sapiens
gtggcttcttgactcaac

SEQ ID NO: 32965 - DNA, 20 bp, Homo sapiens
agctttgtctttgacagtag

SEQ ID NO: 32966 - DNA, 24 bp, Homo sapiens
agatgttatttaactattccaaat

SEQ ID NO: 32967 - DNA, 22 bp, Homo sapiens
agagagtggtggtttgacaaca

SEQ ID NO: 32968 - DNA, 16 bp, Homo sapiens
ggcagttggatccaac

SEQ ID NO: 32969 - DNA, 21 bp, Homo sapiens
accatagttctctgctatatt

SEQ ID NO: 32970 - DNA, 19 bp, Homo sapiens
aacaccctttaatcttttt

SEQ ID NO: 32971 - DNA, 21 bp, Homo sapiens
ctgtctatccctaaggagata

SEQ ID NO: 32972 - DNA, 23 bp, Homo sapiens
gacttacttactcaatctctata

SEQ ID NO: 32973 - DNA, 16 bp, Homo sapiens
ttggcccttctgttgg

SEQ ID NO: 32974 - DNA, 18 bp, Homo sapiens
tgcattccctgatcaaat

SEQ ID NO: 32975 - DNA, 16 bp, Homo sapiens
accatactgctctgca

SEQ ID NO: 32976 - DNA, 22 bp, Homo sapiens
aaaactcatatgattattcttt

SEQ ID NO: 32977 - DNA, 16 bp, Homo sapiens
tgagtgccagcagaca

SEQ ID NO: 32978 - DNA, 23 bp, Homo sapiens
gaaatgattttatgagtctgaat

SEQ ID NO: 32979 - DNA, 19 bp, Homo sapiens
ctcccaaggaaatgagaga

SEQ ID NO: 32980 - DNA, 22 bp, Homo sapiens
atcttaaatcttcatggaagac

SEQ ID NO: 32981 - DNA, 21 bp, Homo sapiens
tggattcaaaatcaaaggata

SEQ ID NO: 32982 - DNA, 16 bp, Homo sapiens
taagttcctgccaatg

SEQ ID NO: 32983 - DNA, 18 bp, Homo sapiens
cgttccatgtatgcttaa

SEQ ID NO: 32984 - DNA, 16 bp, Homo sapiens
tgctggatcacctttt

SEQ ID NO: 32985 - DNA, 21 bp, Homo sapiens
aggaatccattagatttcaca

SEQ ID NO: 32986 - DNA, 17 bp, Homo sapiens
tctgcagctattttaga

SEQ ID NO: 32987 - DNA, 20 bp, Homo sapiens
ggcagaaaacagttaacaat

SEQ ID NO: 32988 - DNA, 25 bp, Homo sapiens
aataataagattgtccatagttaag

SEQ ID NO: 32989 - DNA, 19 bp, Homo sapiens
ctaaatcttctaggaacaa

SEQ ID NO: 32990 - DNA, 23 bp, Homo sapiens
aaaactaaaagtatatgtgaaat

SEQ ID NO: 32991 - DNA, 17 bp, Homo sapiens
gggctctgtgacaatgt

SEQ ID NO: 32992 - DNA, 21 bp, Homo sapiens
aaaatcttacctttgttgatt

SEQ ID NO: 32993 - DNA, 18 bp, Homo sapiens
ggtctcctagggacaatt

SEQ ID NO: 32994 - DNA, 18 bp, Homo sapiens
ccttcttcagtttcatat

SEQ ID NO: 32995 - DNA, 22 bp, Homo sapiens
attttttctcacatagacaaaa

SEQ ID NO: 32996 - DNA, 16 bp, Homo sapiens
cccagtgcatcaacaa

SEQ ID NO: 32997 - DNA, 23 bp, Homo sapiens
aatcatttcaagttcatcatcaa

SEQ ID NO: 32998 - DNA, 16 bp, Homo sapiens
ctaggcacagcagaac

SEQ ID NO: 32999 - DNA, 18 bp, Homo sapiens
tgatggaatctcctaaga

SEQ ID NO: 33000 - DNA, 18 bp, Homo sapiens
gagccaagttagttttgt

SEQ ID NO: 33001 - DNA, 16 bp, Homo sapiens
aaggtctgcttttgtt

SEQ ID NO: 33002 - DNA, 28 bp, Homo sapiens
atttaaatgtaagaattaaaattctaaa

SEQ ID NO: 33003 - DNA, 17 bp, Homo sapiens
caaagcattcataagca

SEQ ID NO: 33004 - DNA, 19 bp, Homo sapiens
taaatcagatgcaaccaaa

SEQ ID NO: 33005 - DNA, 18 bp, Homo sapiens
tatgtatcaactctgaca

SEQ ID NO: 33006 - DNA, 21 bp, Homo sapiens
tactcagtgcataatcagatt

SEQ ID NO: 33007 - DNA, 23 bp, Homo sapiens
aattgagcctgtgtgaaagcacc

SEQ ID NO: 33008 - DNA, 18 bp, Homo sapiens
aaccaaatcatcaggaaa

SEQ ID NO: 33009 - DNA, 23 bp, Homo sapiens
tataaattaggcatgaacattca

SEQ ID NO: 33010 - DNA, 16 bp, Homo sapiens
tttgtcgccagcccac

SEQ ID NO: 33011 - DNA, 21 bp, Homo sapiens
tttgtatttcaccaaacgttt

SEQ ID NO: 33012 - DNA, 22 bp, Homo sapiens
taaaattctgtggtcttgtaag

SEQ ID NO: 33013 - DNA, 22 bp, Homo sapiens
atgggctgagacagtctcgtag

SEQ ID NO: 33014 - DNA, 23 bp, Homo sapiens
attcctatcttgattgattttag

SEQ ID NO: 33015 - DNA, 21 bp, Homo sapiens
gctttctctcttgtgcagcgt

SEQ ID NO: 33016 - DNA, 16 bp, Homo sapiens
ctttagggctgtgttg

SEQ ID NO: 33017 - DNA, 20 bp, Homo sapiens
tgcattcggaaggtctcctt

SEQ ID NO: 33018 - DNA, 21 bp, Homo sapiens
tggatatgtatatctctttct

SEQ ID NO: 33019 - DNA, 27 bp, Homo sapiens
tagcaatatatattattctataattaa

SEQ ID NO: 33020 - DNA, 20 bp, Homo sapiens
ttcaatccatttcagaaaga

SEQ ID NO: 33021 - DNA, 23 bp, Homo sapiens
agagcacaaagaaatatgatttt

SEQ ID NO: 33022 - DNA, 19 bp, Homo sapiens
acctcagttttccagaccg

SEQ ID NO: 33023 - DNA, 21 bp, Homo sapiens
gtgtgaatgaacatttcccat

SEQ ID NO: 33024 - DNA, 23 bp, Homo sapiens
aaagaatttaattcagacattat

SEQ ID NO: 33025 - DNA, 24 bp, Homo sapiens
ccttctaccagatatgtaaaaatt

SEQ ID NO: 33026 - DNA, 17 bp, Homo sapiens
aatggcaagatagcagt

SEQ ID NO: 33027 - DNA, 25 bp, Homo sapiens
atgatgaatattttcctcagaaatt

SEQ ID NO: 33028 - DNA, 22 bp, Homo sapiens
cacatttaaattgtgataactg

SEQ ID NO: 33029 - DNA, 20 bp, Homo sapiens
tctggagttctcaaaatgtc

SEQ ID NO: 33030 - DNA, 21 bp, Homo sapiens
tggacttttattcaagactta

SEQ ID NO: 33031 - DNA, 17 bp, Homo sapiens
acagaggctcactgttt

SEQ ID NO: 33032 - DNA, 22 bp, Homo sapiens
aagaactgaaaaataatgctgc

SEQ ID NO: 33033 - DNA, 19 bp, Homo sapiens
cggagaatgagccaagaga

SEQ ID NO: 33034 - DNA, 26 bp, Homo sapiens
ttacttctctttcattttaaaatctg

SEQ ID NO: 33035 - DNA, 17 bp, Homo sapiens
aactgaatcgcttctga

SEQ ID NO: 33036 - DNA, 18 bp, Homo sapiens
tcctgttgactgctaaaa

SEQ ID NO: 33037 - DNA, 20 bp, Homo sapiens
cactgggatttgatgtttta

SEQ ID NO: 33038 - DNA, 16 bp, Homo sapiens
ttgcttggctagggtt

SEQ ID NO: 33039 - DNA, 21 bp, Homo sapiens
tcatggtctggtaatcaaaaa

SEQ ID NO: 33040 - DNA, 19 bp, Homo sapiens
gccactgaacgcattttca

SEQ ID NO: 33041 - DNA, 23 bp, Homo sapiens
gcatcattttctcttaatcactc

SEQ ID NO: 33042 - DNA, 19 bp, Homo sapiens
agcactaaaagtaaggagc

SEQ ID NO: 33043 - DNA, 16 bp, Homo sapiens
tcaccttctgctcccc

SEQ ID NO: 33044 - DNA, 23 bp, Homo sapiens
tgtaaaacaagaaatattttaaa

SEQ ID NO: 33045 - DNA, 18 bp, Homo sapiens
aggctgctatggaattta

SEQ ID NO: 33046 - DNA, 19 bp, Homo sapiens
gcctcaatttatggttatt

SEQ ID NO: 33047 - DNA, 21 bp, Homo sapiens
aaacattctagtatcttctgt

SEQ ID NO: 33048 - DNA, 16 bp, Homo sapiens
actgcatgatggggag

SEQ ID NO: 33049 - DNA, 26 bp, Homo sapiens
aaaacattattgtcatgatacataaa

SEQ ID NO: 33050 - DNA, 16 bp, Homo sapiens
tttgcggtggtcctta

SEQ ID NO: 33051 - DNA, 20 bp, Homo sapiens
aaaaatgtctactaccatca

SEQ ID NO: 33052 - DNA, 19 bp, Homo sapiens
agtgcaacagccatatcta

SEQ ID NO: 33053 - DNA, 18 bp, Homo sapiens
gcctttttaggcttcttt

SEQ ID NO: 33054 - DNA, 22 bp, Homo sapiens
tgaagaccttattgtaatgctt

SEQ ID NO: 33055 - DNA, 22 bp, Homo sapiens
agtaaaagagtttctaagaaga

SEQ ID NO: 33056 - DNA, 19 bp, Homo sapiens
gcaacttttcatagcagtt

SEQ ID NO: 33057 - DNA, 16 bp, Homo sapiens
ctccctccccaaattc

SEQ ID NO: 33058 - DNA, 19 bp, Homo sapiens
tttgttgttatctttagca

SEQ ID NO: 33059 - DNA, 17 bp, Homo sapiens
ttgaagatatccaagca

SEQ ID NO: 33060 - DNA, 18 bp, Homo sapiens
gttagctgtgtcttaaat

SEQ ID NO: 33061 - DNA, 20 bp, Homo sapiens
cctgaggaactgcaagcatg

SEQ ID NO: 33062 - DNA, 19 bp, Homo sapiens
atgactgcatgaatgagtg

SEQ ID NO: 33063 - DNA, 21 bp, Homo sapiens
tatattcactcatgggaatgc

SEQ ID NO: 33064 - DNA, 29 bp, Homo sapiens
ctttctgttattattatttttttactttt

SEQ ID NO: 33065 - DNA, 20 bp, Homo sapiens
gctggataatggtctactct

SEQ ID NO: 33066 - DNA, 21 bp, Homo sapiens
cataggtaaactcatgtagta

SEQ ID NO: 33067 - DNA, 19 bp, Homo sapiens
tgctcttttacttcttctc

SEQ ID NO: 33068 - DNA, 27 bp, Homo sapiens
ttatcagatgtaattttaaataataat

SEQ ID NO: 33069 - DNA, 19 bp, Homo sapiens
tgtcattcctattctggga

SEQ ID NO: 33070 - DNA, 21 bp, Homo sapiens
gctactgtattacataacaca

SEQ ID NO: 33071 - DNA, 26 bp, Homo sapiens
ttaactgtattatttattatagattt

SEQ ID NO: 33072 - DNA, 26 bp, Homo sapiens
tagaacaagaatttaaaatttggaga

SEQ ID NO: 33073 - DNA, 19 bp, Homo sapiens
tgacccatagttgctatca

SEQ ID NO: 33074 - DNA, 18 bp, Homo sapiens
aggtctctattagtccca

SEQ ID NO: 33075 - DNA, 17 bp, Homo sapiens
agaatccttactccccc

SEQ ID NO: 33076 - DNA, 23 bp, Homo sapiens
ccatgtttctcacatcttccaga

SEQ ID NO: 33077 - DNA, 17 bp, Homo sapiens
tgttctttggtcgacat

SEQ ID NO: 33078 - DNA, 18 bp, Homo sapiens
ccagcctgggcaacaggg

SEQ ID NO: 33079 - DNA, 16 bp, Homo sapiens
gccaaccagttgtatc

SEQ ID NO: 33080 - DNA, 21 bp, Homo sapiens
gaaaagaaaagaaaagaaaaa

SEQ ID NO: 33081 - DNA, 17 bp, Homo sapiens
tgctagagcatctaagg

SEQ ID NO: 33082 - DNA, 17 bp, Homo sapiens
cttcatcaaggccaata

SEQ ID NO: 33083 - DNA, 23 bp, Homo sapiens
tttaattttaatgcattatctaa

SEQ ID NO: 33084 - DNA, 19 bp, Homo sapiens
tcttgagttcctcgatgaa

SEQ ID NO: 33085 - DNA, 22 bp, Homo sapiens
tgttcttctgtacatatgaact

SEQ ID NO: 33086 - DNA, 20 bp, Homo sapiens
tttatctttttgttccttag

SEQ ID NO: 33087 - DNA, 22 bp, Homo sapiens
agacaaattcatttctgctttg

SEQ ID NO: 33088 - DNA, 27 bp, Homo sapiens
aaaagtttaaaaatatatgagtattaa

SEQ ID NO: 33089 - DNA, 16 bp, Homo sapiens
cttttggtcctcgtta

SEQ ID NO: 33090 - DNA, 21 bp, Homo sapiens
aagagagatttaggtctactt

SEQ ID NO: 33091 - DNA, 19 bp, Homo sapiens
ttcttcttatcctgcctga

SEQ ID NO: 33092 - DNA, 25 bp, Homo sapiens
tatttttctgaattaaaataacata

SEQ ID NO: 33093 - DNA, 19 bp, Homo sapiens
agtgtaactgaagactgtt

SEQ ID NO: 33094 - DNA, 16 bp, Homo sapiens
tagctggtgatgggtg

SEQ ID NO: 33095 - DNA, 24 bp, Homo sapiens
gtaatcatcaagtacttttcttgt

SEQ ID NO: 33096 - DNA, 20 bp, Homo sapiens
tccatcacatcttcaagcaa

SEQ ID NO: 33097 - DNA, 21 bp, Homo sapiens
agcattatgaacatttgtttc

SEQ ID NO: 33098 - DNA, 16 bp, Homo sapiens
tccacagcatataggt

SEQ ID NO: 33099 - DNA, 24 bp, Homo sapiens
tatatctttctgtttgttattatt

SEQ ID NO: 33100 - DNA, 18 bp, Homo sapiens
tgggaaaactttgcctat

SEQ ID NO: 33101 - DNA, 19 bp, Homo sapiens
agtggcataatgaagacgt

SEQ ID NO: 33102 - DNA, 17 bp, Homo sapiens
acggatctgcagctgtt

SEQ ID NO: 33103 - DNA, 20 bp, Homo sapiens
aaataaaggtgggaggagtg

SEQ ID NO: 33104 - DNA, 16 bp, Homo sapiens
cttccagcgaagccac

SEQ ID NO: 33105 - DNA, 24 bp, Homo sapiens
ggttgtaatttggctcataaccaa

SEQ ID NO: 33106 - DNA, 16 bp, Homo sapiens
tgacagtcctggggat

SEQ ID NO: 33107 - DNA, 20 bp, Homo sapiens
aagacttggccaacggccaa

SEQ ID NO: 33108 - DNA, 16 bp, Homo sapiens
agtgctgggatttcca

SEQ ID NO: 33109 - DNA, 20 bp, Homo sapiens
caaggcttgcaatagtgctg

SEQ ID NO: 33110 - DNA, 19 bp, Homo sapiens
ttgtgaaatggaagctgtc

SEQ ID NO: 33111 - DNA, 20 bp, Homo sapiens
gtcggcgtgggcaggactca

SEQ ID NO: 33112 - DNA, 18 bp, Homo sapiens
acactgaaaaaaggcaaa

SEQ ID NO: 33113 - DNA, 16 bp, Homo sapiens
gatctgctttgaccac

SEQ ID NO: 33114 - DNA, 22 bp, Homo sapiens
aaaatattgcagatacttatgt

SEQ ID NO: 33115 - DNA, 21 bp, Homo sapiens
gacagagacctgggctgagag

SEQ ID NO: 33116 - DNA, 18 bp, Homo sapiens
actactaacgcaatcaca

SEQ ID NO: 33117 - DNA, 23 bp, Homo sapiens
agctactgatgaatgcgtcctct

SEQ ID NO: 33118 - DNA, 16 bp, Homo sapiens
gatggccgcccatatg

SEQ ID NO: 33119 - DNA, 20 bp, Homo sapiens
gtttctttgattgggtggca

SEQ ID NO: 33120 - DNA, 26 bp, Homo sapiens
agatttttaagtagtatttttgtatc

SEQ ID NO: 33121 - DNA, 24 bp, Homo sapiens
actacaacccaaacttccagtcag

SEQ ID NO: 33122 - DNA, 16 bp, Homo sapiens
ttttgctgtggttgtg

SEQ ID NO: 33123 - DNA, 18 bp, Homo sapiens
aggcttctagaacgcagc

SEQ ID NO: 33124 - DNA, 24 bp, Homo sapiens
aattttaagcattagttacttgta

SEQ ID NO: 33125 - DNA, 21 bp, Homo sapiens
atagcatgagcctcatccatt

SEQ ID NO: 33126 - DNA, 18 bp, Homo sapiens
tttatggtaataagccca

SEQ ID NO: 33127 - DNA, 24 bp, Homo sapiens
tgttagattgaatgaggttgtact

SEQ ID NO: 33128 - DNA, 16 bp, Homo sapiens
cggtcaatcatgtacc

SEQ ID NO: 33129 - DNA, 19 bp, Homo sapiens
cagaactaaaatgagaagg

SEQ ID NO: 33130 - DNA, 19 bp, Homo sapiens
taaaaattttgctgtttca

SEQ ID NO: 33131 - DNA, 17 bp, Homo sapiens
gtaaaaccagatgggct

SEQ ID NO: 33132 - DNA, 22 bp, Homo sapiens
catctttttgtcaaaatttgaa

SEQ ID NO: 33133 - DNA, 16 bp, Homo sapiens
actgctggaatgcctc

SEQ ID NO: 33134 - DNA, 18 bp, Homo sapiens
acatatcgtgtgccttaa

SEQ ID NO: 33135 - DNA, 19 bp, Homo sapiens
ggccatgtctagttcattc

SEQ ID NO: 33136 - DNA, 20 bp, Homo sapiens
ctactaatacttacgtttgt

SEQ ID NO: 33137 - DNA, 20 bp, Homo sapiens
gcagcacagaggccattcaa

SEQ ID NO: 33138 - DNA, 20 bp, Homo sapiens
gatctcctccagatttggaa

SEQ ID NO: 33139 - DNA, 17 bp, Homo sapiens
gtggaaatagccatgat

SEQ ID NO: 33140 - DNA, 16 bp, Homo sapiens
ccatgccccgagaggt

SEQ ID NO: 33141 - DNA, 19 bp, Homo sapiens
agaagttcgtgggattgtg

SEQ ID NO: 33142 - DNA, 25 bp, Homo sapiens
gttgacaattctttaaatctaaaga

SEQ ID NO: 33143 - DNA, 24 bp, Homo sapiens
aaattgaagataattgtcaataat

SEQ ID NO: 33144 - DNA, 20 bp, Homo sapiens
aaccaacagaattctatctt

SEQ ID NO: 33145 - DNA, 21 bp, Homo sapiens
aaatgatctacaaacctctcg

SEQ ID NO: 33146 - DNA, 22 bp, Homo sapiens
taactcaatttaatgagttgtt

SEQ ID NO: 33147 - DNA, 19 bp, Homo sapiens
aactcctgtactatttttt

SEQ ID NO: 33148 - DNA, 18 bp, Homo sapiens
gcagttattgaaagctca

SEQ ID NO: 33149 - DNA, 22 bp, Homo sapiens
aaagtcccattgaaagtgccac

SEQ ID NO: 33150 - DNA, 17 bp, Homo sapiens
actttgctagcagctct

SEQ ID NO: 33151 - DNA, 22 bp, Homo sapiens
atatttccaaaagtaaagttac

SEQ ID NO: 33152 - DNA, 19 bp, Homo sapiens
ttttcagtaagtatgtgct

SEQ ID NO: 33153 - DNA, 20 bp, Homo sapiens
gtagaaagtgatgaaccact

SEQ ID NO: 33154 - DNA, 25 bp, Homo sapiens
ctgaatatatacacaatgttaaatt

SEQ ID NO: 33155 - DNA, 17 bp, Homo sapiens
atctgctctgatgagga

SEQ ID NO: 33156 - DNA, 23 bp, Homo sapiens
aaataatagggaataaattttaa

SEQ ID NO: 33157 - DNA, 21 bp, Homo sapiens
tttggttttacaaaacaaaaa

SEQ ID NO: 33158 - DNA, 19 bp, Homo sapiens
gaactattgcttgactgga

SEQ ID NO: 33159 - DNA, 17 bp, Homo sapiens
aaatgcacttaatgcca

SEQ ID NO: 33160 - DNA, 20 bp, Homo sapiens
tggagagtttaagttggatg

SEQ ID NO: 33161 - DNA, 19 bp, Homo sapiens
gtgttatatgcattttacc

SEQ ID NO: 33162 - DNA, 19 bp, Homo sapiens
ttttctatagacccttctt

SEQ ID NO: 33163 - DNA, 21 bp, Homo sapiens
gctttactccatatcttccag

SEQ ID NO: 33164 - DNA, 20 bp, Homo sapiens
agcttaatgtttctgttgaa

SEQ ID NO: 33165 - DNA, 18 bp, Homo sapiens
agcattagagtctacatc

SEQ ID NO: 33166 - DNA, 21 bp, Homo sapiens
tgaagtgttaaattatttact

SEQ ID NO: 33167 - DNA, 18 bp, Homo sapiens
accacagcatccttcaag

SEQ ID NO: 33168 - DNA, 22 bp, Homo sapiens
gatcaaacaaaaatgcattgtt

SEQ ID NO: 33169 - DNA, 18 bp, Homo sapiens
agtttcctccattttctt

SEQ ID NO: 33170 - DNA, 20 bp, Homo sapiens
tacaaccaacaaagagtaca

SEQ ID NO: 33171 - DNA, 20 bp, Homo sapiens
gacgagatgagtatcactgc

SEQ ID NO: 33172 - DNA, 20 bp, Homo sapiens
tagctgtgaagaaactcaag

SEQ ID NO: 33173 - DNA, 17 bp, Homo sapiens
aaatgtaaaacccaaca

SEQ ID NO: 33174 - DNA, 16 bp, Homo sapiens
tctcagcaaattggga

SEQ ID NO: 33175 - DNA, 25 bp, Homo sapiens
gtccattacaattttctaattcatg

SEQ ID NO: 33176 - DNA, 19 bp, Homo sapiens
gtagaaactaatggattga

SEQ ID NO: 33177 - DNA, 17 bp, Homo sapiens
cgcagtgctaatgcttg

SEQ ID NO: 33178 - DNA, 20 bp, Homo sapiens
ctctcagttttgtttattca

SEQ ID NO: 33179 - DNA, 22 bp, Homo sapiens
aaccttaatcatctatggcaga

SEQ ID NO: 33180 - DNA, 17 bp, Homo sapiens
tctgcacgaaattggtg

SEQ ID NO: 33181 - DNA, 16 bp, Homo sapiens
atagtcgagtgtagct

SEQ ID NO: 33182 - DNA, 19 bp, Homo sapiens
tagaacctcatcatctaaa

SEQ ID NO: 33183 - DNA, 19 bp, Homo sapiens
aagtaagtcatttctcttt

SEQ ID NO: 33184 - DNA, 21 bp, Homo sapiens
aaggtcaaatgaaaacccaac

SEQ ID NO: 33185 - DNA, 21 bp, Homo sapiens
gaaaaacaaatatgccagttc

SEQ ID NO: 33186 - DNA, 16 bp, Homo sapiens
aacttactgtcctgct

SEQ ID NO: 33187 - DNA, 18 bp, Homo sapiens
attcagtaggttggagat

SEQ ID NO: 33188 - DNA, 20 bp, Homo sapiens
aaacttgttgtcattactga

SEQ ID NO: 33189 - DNA, 19 bp, Homo sapiens
tttgagctgaagggtcttt

SEQ ID NO: 33190 - DNA, 18 bp, Homo sapiens
cagttgagtgtgttttca

SEQ ID NO: 33191 - DNA, 18 bp, Homo sapiens
agatggtatactgagcag

SEQ ID NO: 33192 - DNA, 18 bp, Homo sapiens
cagccttgcttctaatgt

SEQ ID NO: 33193 - DNA, 20 bp, Homo sapiens
atcaaagtgtttcaattttt

SEQ ID NO: 33194 - DNA, 21 bp, Homo sapiens
atgtgaacaaatcagagaact

SEQ ID NO: 33195 - DNA, 24 bp, Homo sapiens
aaccacattaaaatctttagaaat

SEQ ID NO: 33196 - DNA, 17 bp, Homo sapiens
tggcaagccagtcaatg

SEQ ID NO: 33197 - DNA, 27 bp, Homo sapiens
aatacatttactataaaattaaaattt

SEQ ID NO: 33198 - DNA, 16 bp, Homo sapiens
tcacaagaggcctttt

SEQ ID NO: 33199 - DNA, 20 bp, Homo sapiens
atccacatctttcttggtca

SEQ ID NO: 33200 - DNA, 21 bp, Homo sapiens
tagggtgttttaaataactaa

SEQ ID NO: 33201 - DNA, 21 bp, Homo sapiens
tatatttggagtagtcattga

SEQ ID NO: 33202 - DNA, 18 bp, Homo sapiens
gaaagaatctggctacaa

SEQ ID NO: 33203 - DNA, 16 bp, Homo sapiens
tgggtccacaagcata

SEQ ID NO: 33204 - DNA, 16 bp, Homo sapiens
cgttacaccaatttcg

SEQ ID NO: 33205 - DNA, 20 bp, Homo sapiens
taaacacaagtaaaggaaca

SEQ ID NO: 33206 - DNA, 16 bp, Homo sapiens
ttttgcagttggctgg

SEQ ID NO: 33207 - DNA, 24 bp, Homo sapiens
aatatttgttaactgagaaaaaaa

SEQ ID NO: 33208 - DNA, 19 bp, Homo sapiens
aagtttgtcatctgatagc

SEQ ID NO: 33209 - DNA, 16 bp, Homo sapiens
cccaggctgaagtgca

SEQ ID NO: 33210 - DNA, 20 bp, Homo sapiens
tgtttttaatgtaggaagcc

SEQ ID NO: 33211 - DNA, 19 bp, Homo sapiens
atttcccaggtcccatttt

SEQ ID NO: 33212 - DNA, 25 bp, Homo sapiens
atattcatactttaaaaatacttag

SEQ ID NO: 33213 - DNA, 18 bp, Homo sapiens
ccaatcatgcaaaatgtt

SEQ ID NO: 33214 - DNA, 16 bp, Homo sapiens
gcaacagagcgagact

SEQ ID NO: 33215 - DNA, 20 bp, Homo sapiens
aaatccaaagtaacatcagg

SEQ ID NO: 33216 - DNA, 20 bp, Homo sapiens
accctagaacttaaagtaca

SEQ ID NO: 33217 - DNA, 16 bp, Homo sapiens
aggaggattcatggga

SEQ ID NO: 33218 - DNA, 28 bp, Homo sapiens
agtaaattttattatagtaaaaacctag

SEQ ID NO: 33219 - DNA, 16 bp, Homo sapiens
cccaagcaaatggcaa

SEQ ID NO: 33220 - DNA, 22 bp, Homo sapiens
tgaaacataacattgtaactga

SEQ ID NO: 33221 - DNA, 21 bp, Homo sapiens
tggattcaaatgatgacatga

SEQ ID NO: 33222 - DNA, 18 bp, Homo sapiens
tccagagacccatatgga

SEQ ID NO: 33223 - DNA, 21 bp, Homo sapiens
tgaggtcagaattttcatgtt

SEQ ID NO: 33224 - DNA, 20 bp, Homo sapiens
aggtgagtactaaatgttgc

SEQ ID NO: 33225 - DNA, 24 bp, Homo sapiens
aatagaactgatttttaatcttac

SEQ ID NO: 33226 - DNA, 20 bp, Homo sapiens
cctgtgctagtaaaacagct

SEQ ID NO: 33227 - DNA, 23 bp, Homo sapiens
actaagtaacttatggtataaaa

SEQ ID NO: 33228 - DNA, 25 bp, Homo sapiens
aatacactattataaaagtggtatt

SEQ ID NO: 33229 - DNA, 18 bp, Homo sapiens
gatgatccaagtgtgggc

SEQ ID NO: 33230 - DNA, 19 bp, Homo sapiens
gactttttgttttgctata

SEQ ID NO: 33231 - DNA, 17 bp, Homo sapiens
cctggtgaaagactcat

SEQ ID NO: 33232 - DNA, 28 bp, Homo sapiens
cacaaattatttaaatacattatctatt

SEQ ID NO: 33233 - DNA, 24 bp, Homo sapiens
tgatcattctaacatctttttctt

SEQ ID NO: 33234 - DNA, 21 bp, Homo sapiens
ataagagtggcattgtgggga

SEQ ID NO: 33235 - DNA, 23 bp, Homo sapiens
aacaaatttgctttgtattcttc

SEQ ID NO: 33236 - DNA, 18 bp, Homo sapiens
tgaatacatccttcttct

SEQ ID NO: 33237 - DNA, 16 bp, Homo sapiens
gaacaggtcaggctca

SEQ ID NO: 33238 - DNA, 17 bp, Homo sapiens
ctggtctgtcgctctct

SEQ ID NO: 33239 - DNA, 23 bp, Homo sapiens
aacaaatcattaattttaccaga

SEQ ID NO: 33240 - DNA, 17 bp, Homo sapiens
aaggtgaagaacatgtt

SEQ ID NO: 33241 - DNA, 19 bp, Homo sapiens
tgtggagtgtatccatgaa

SEQ ID NO: 33242 - DNA, 20 bp, Homo sapiens
aggaaaattatagtctgaaa

SEQ ID NO: 33243 - DNA, 17 bp, Homo sapiens
caaaactgctggccaca

SEQ ID NO: 33244 - DNA, 24 bp, Homo sapiens
tgtaccatcaaaactgctatctgg

SEQ ID NO: 33245 - DNA, 17 bp, Homo sapiens
agagttttccccatcgg

SEQ ID NO: 33246 - DNA, 20 bp, Homo sapiens
ttcctttttctgtagtactc

SEQ ID NO: 33247 - DNA, 18 bp, Homo sapiens
aaggccatgggtttattg

SEQ ID NO: 33248 - DNA, 20 bp, Homo sapiens
aaaccttctgataggtgtgg

SEQ ID NO: 33249 - DNA, 23 bp, Homo sapiens
acgctccaaatttaagcaacggt

SEQ ID NO: 33250 - DNA, 21 bp, Homo sapiens
ggggctatgtgccaagatgaa

SEQ ID NO: 33251 - DNA, 22 bp, Homo sapiens
tattgaaagtgatactactatg

SEQ ID NO: 33252 - DNA, 20 bp, Homo sapiens
ttgctccgtgaaactcgtgc

SEQ ID NO: 33253 - DNA, 22 bp, Homo sapiens
ttagaaagtttcatttgttttt

SEQ ID NO: 33254 - DNA, 16 bp, Homo sapiens
gtgatgaaacaccgtt

SEQ ID NO: 33255 - DNA, 22 bp, Homo sapiens
gggtatgtttgtattttcattt

SEQ ID NO: 33256 - DNA, 18 bp, Homo sapiens
actgtgaagggctcatag

SEQ ID NO: 33257 - DNA, 17 bp, Homo sapiens
agttttaaagatgtggg

SEQ ID NO: 33258 - DNA, 24 bp, Homo sapiens
taattgagtatttcacacataata

SEQ ID NO: 33259 - DNA, 18 bp, Homo sapiens
gttcagaagagctaaccc

SEQ ID NO: 33260 - DNA, 23 bp, Homo sapiens
aagagcttagtaacatttctaaa

SEQ ID NO: 33261 - DNA, 19 bp, Homo sapiens
aatttagcatgccagagag

SEQ ID NO: 33262 - DNA, 25 bp, Homo sapiens
agaatttatcagtgaaaaatgtaaa

SEQ ID NO: 33263 - DNA, 17 bp, Homo sapiens
tggtgaaattgctcatt

SEQ ID NO: 33264 - DNA, 17 bp, Homo sapiens
ttctcaaaagaagggtt

SEQ ID NO: 33265 - DNA, 21 bp, Homo sapiens
tgtgattcctatactagattt

SEQ ID NO: 33266 - DNA, 17 bp, Homo sapiens
aaagatccaccaatact

SEQ ID NO: 33267 - DNA, 16 bp, Homo sapiens
tgaactcccaggctca

SEQ ID NO: 33268 - DNA, 19 bp, Homo sapiens
aaaaatcttttaggagggt

SEQ ID NO: 33269 - DNA, 16 bp, Homo sapiens
cacaggcatgagccac

SEQ ID NO: 33270 - DNA, 17 bp, Homo sapiens
gcttctgtgaggtaagt

SEQ ID NO: 33271 - DNA, 22 bp, Homo sapiens
aatttcagagctattgtttaaa

SEQ ID NO: 33272 - DNA, 26 bp, Homo sapiens
aaatacatatatacatatatagtaga

SEQ ID NO: 33273 - DNA, 18 bp, Homo sapiens
aaaatactcaagaaccct

SEQ ID NO: 33274 - DNA, 23 bp, Homo sapiens
actatggaattagaagattttgg

SEQ ID NO: 33275 - DNA, 23 bp, Homo sapiens
gttttttgaaaattattaggcag

SEQ ID NO: 33276 - DNA, 26 bp, Homo sapiens
aaagataagtaatcatctcaaataat

SEQ ID NO: 33277 - DNA, 19 bp, Homo sapiens
tgctttctgctagtaaagc

SEQ ID NO: 33278 - DNA, 20 bp, Homo sapiens
tgggtgatgagtctgataaa

SEQ ID NO: 33279 - DNA, 16 bp, Homo sapiens
actcgaaaacctcact

SEQ ID NO: 33280 - DNA, 22 bp, Homo sapiens
catgagcagaaaaacattcttt

SEQ ID NO: 33281 - DNA, 16 bp, Homo sapiens
aggggtagacttaaag

SEQ ID NO: 33282 - DNA, 18 bp, Homo sapiens
aagcacatcaagtttggc

SEQ ID NO: 33283 - DNA, 22 bp, Homo sapiens
aatgaagtttgaaatatttagt

SEQ ID NO: 33284 - DNA, 21 bp, Homo sapiens
tctcaggataaattatttccc

SEQ ID NO: 33285 - DNA, 20 bp, Homo sapiens
tggaaaaggttttgtaagca

SEQ ID NO: 33286 - DNA, 17 bp, Homo sapiens
gcactgaaaccttctgt

SEQ ID NO: 33287 - DNA, 23 bp, Homo sapiens
tgttgcatatatgaatgccagac

SEQ ID NO: 33288 - DNA, 16 bp, Homo sapiens
agcagatagtgaaagc

SEQ ID NO: 33289 - DNA, 16 bp, Homo sapiens
actgtaaggcaataca

SEQ ID NO: 33290 - DNA, 16 bp, Homo sapiens
cagaagaagctgagga

SEQ ID NO: 33291 - DNA, 24 bp, Homo sapiens
ctatttaatgatctggcttgcaga

SEQ ID NO: 33292 - DNA, 23 bp, Homo sapiens
acactgatttatagagtcatcaa

SEQ ID NO: 33293 - DNA, 21 bp, Homo sapiens
tgggtttcgccatcttcagga

SEQ ID NO: 33294 - DNA, 19 bp, Homo sapiens
tgacttttgagtaataagt

SEQ ID NO: 33295 - DNA, 19 bp, Homo sapiens
agtttaaaactacaacact

SEQ ID NO: 33296 - DNA, 23 bp, Homo sapiens
ataatgattcatattgtttacta

SEQ ID NO: 33297 - DNA, 18 bp, Homo sapiens
tcttctgcagattgatga

SEQ ID NO: 33298 - DNA, 16 bp, Homo sapiens
tccatcacgaggagat

SEQ ID NO: 33299 - DNA, 16 bp, Homo sapiens
gagttgccctcgggaa

SEQ ID NO: 33300 - DNA, 18 bp, Homo sapiens
ctaatgacattcatcagc

SEQ ID NO: 33301 - DNA, 18 bp, Homo sapiens
tttcccagtcaaaggtga

SEQ ID NO: 33302 - DNA, 16 bp, Homo sapiens
cccaaagaacacaact

SEQ ID NO: 33303 - DNA, 24 bp, Homo sapiens
ttagtctcttttattttaccttag

SEQ ID NO: 33304 - DNA, 18 bp, Homo sapiens
aatctgctgaataattcc

SEQ ID NO: 33305 - DNA, 30 bp, Homo sapiens
taagtaaatatttattatttattttttcat

SEQ ID NO: 33306 - DNA, 18 bp, Homo sapiens
agttgtgtttcaatcacc

SEQ ID NO: 33307 - DNA, 20 bp, Homo sapiens
tatagtcattttgctttcat

SEQ ID NO: 33308 - DNA, 19 bp, Homo sapiens
atactttccacagacaagt

SEQ ID NO: 33309 - DNA, 27 bp, Homo sapiens
aatatatacacatatataaaagtaata

SEQ ID NO: 33310 - DNA, 17 bp, Homo sapiens
cttcatggtgccagaac

SEQ ID NO: 33311 - DNA, 28 bp, Homo sapiens
atattacatatattatgtaatacatatt

SEQ ID NO: 33312 - DNA, 17 bp, Homo sapiens
gtcaagaaagtgagacc

SEQ ID NO: 33313 - DNA, 24 bp, Homo sapiens
atatatattacataagagttggac

SEQ ID NO: 33314 - DNA, 22 bp, Homo sapiens
cataaatgtggaagaagtttca

SEQ ID NO: 33315 - DNA, 18 bp, Homo sapiens
ccatcttctgttgactag

SEQ ID NO: 33316 - DNA, 20 bp, Homo sapiens
aactaggtagtctaaaaaag

SEQ ID NO: 33317 - DNA, 20 bp, Homo sapiens
cgtatactttgaagtgaggt

SEQ ID NO: 33318 - DNA, 19 bp, Homo sapiens
gagaactatgaaggaagat

SEQ ID NO: 33319 - DNA, 17 bp, Homo sapiens
gagcggcttcagtagct

SEQ ID NO: 33320 - DNA, 18 bp, Homo sapiens
ggagggagatacaagtgt

SEQ ID NO: 33321 - DNA, 18 bp, Homo sapiens
ttacctaaactgtcagca

SEQ ID NO: 33322 - DNA, 27 bp, Homo sapiens
atgccataagttaatatttatgataat

SEQ ID NO: 33323 - DNA, 23 bp, Homo sapiens
ggtcactttttatagccaaagat

SEQ ID NO: 33324 - DNA, 17 bp, Homo sapiens
tgagttcagtgttccag

SEQ ID NO: 33325 - DNA, 19 bp, Homo sapiens
atcctggttttcatttaca

SEQ ID NO: 33326 - DNA, 20 bp, Homo sapiens
cttctcctgaacatatgcac

SEQ ID NO: 33327 - DNA, 21 bp, Homo sapiens
tgtgacttctgaacagtttct

SEQ ID NO: 33328 - DNA, 16 bp, Homo sapiens
cagccagcgagccttt

SEQ ID NO: 33329 - DNA, 20 bp, Homo sapiens
ccaagcctataaaactgttt

SEQ ID NO: 33330 - DNA, 16 bp, Homo sapiens
agtctgacagggagtc

SEQ ID NO: 33331 - DNA, 20 bp, Homo sapiens
tagaccaaatgtctgctgct

SEQ ID NO: 33332 - DNA, 21 bp, Homo sapiens
caagatgttcatatcaacaca

SEQ ID NO: 33333 - DNA, 21 bp, Homo sapiens
gatatacatggcagcatatga

SEQ ID NO: 33334 - DNA, 20 bp, Homo sapiens
caaattttatgctggcctca

SEQ ID NO: 33335 - DNA, 20 bp, Homo sapiens
atcttctgagtcattggccg

SEQ ID NO: 33336 - DNA, 18 bp, Homo sapiens
acatgtgggtacttcttt

SEQ ID NO: 33337 - DNA, 21 bp, Homo sapiens
aaagccacacagaggaatagg

SEQ ID NO: 33338 - DNA, 19 bp, Homo sapiens
agaaagatgcctcagttcc

SEQ ID NO: 33339 - DNA, 20 bp, Homo sapiens
tctctttggataagcttctt

SEQ ID NO: 33340 - DNA, 20 bp, Homo sapiens
ggtattcgaagtcattctct

SEQ ID NO: 33341 - DNA, 16 bp, Homo sapiens
aagcttgctgatgatg

SEQ ID NO: 33342 - DNA, 21 bp, Homo sapiens
tttgtttttgagttgtaatgg

SEQ ID NO: 33343 - DNA, 18 bp, Homo sapiens
tcaatgtctatcccatca

SEQ ID NO: 33344 - DNA, 26 bp, Homo sapiens
aatgatgtttctttatttaaaccttt

SEQ ID NO: 33345 - DNA, 23 bp, Homo sapiens
tatcagagtttcaaatgctttta

SEQ ID NO: 33346 - DNA, 19 bp, Homo sapiens
gtatatcccacatgcaata

SEQ ID NO: 33347 - DNA, 23 bp, Homo sapiens
attatttgacttactccattaca

SEQ ID NO: 33348 - DNA, 20 bp, Homo sapiens
ttgaggtcctaattatatct

SEQ ID NO: 33349 - DNA, 22 bp, Homo sapiens
cagatttatgtaaaaactctgc

SEQ ID NO: 33350 - DNA, 22 bp, Homo sapiens
cagtgttagaagtttaaatgca

SEQ ID NO: 33351 - DNA, 21 bp, Homo sapiens
gcgttacttcagctcaaagtc

SEQ ID NO: 33352 - DNA, 21 bp, Homo sapiens
tgaaaaagatctagacatgct

SEQ ID NO: 33353 - DNA, 24 bp, Homo sapiens
tacatatttaatcctgtgctccaa

SEQ ID NO: 33354 - DNA, 16 bp, Homo sapiens
agcaggataggcagag

SEQ ID NO: 33355 - DNA, 22 bp, Homo sapiens
aatcacatttgcaatttaatcc

SEQ ID NO: 33356 - DNA, 17 bp, Homo sapiens
atgatggctacatacat

SEQ ID NO: 33357 - DNA, 21 bp, Homo sapiens
ggcttatcagaactttgtttt

SEQ ID NO: 33358 - DNA, 19 bp, Homo sapiens
atgtgctaattcaactcct

SEQ ID NO: 33359 - DNA, 16 bp, Homo sapiens
atcctgcccagcagtg

SEQ ID NO: 33360 - DNA, 21 bp, Homo sapiens
tgaacaactatattgcctttc

SEQ ID NO: 33361 - DNA, 19 bp, Homo sapiens
tgcagggaaacttatgtga

SEQ ID NO: 33362 - DNA, 18 bp, Homo sapiens
atctgtcttcttcaaaaa

SEQ ID NO: 33363 - DNA, 22 bp, Homo sapiens
aaaagcagcttgtaatatttgt

SEQ ID NO: 33364 - DNA, 21 bp, Homo sapiens
aacaaatcttcagatccactg

SEQ ID NO: 33365 - DNA, 23 bp, Homo sapiens
cttaacaaacttattttggatca

SEQ ID NO: 33366 - DNA, 19 bp, Homo sapiens
aacttgaggagagttcagc

SEQ ID NO: 33367 - DNA, 20 bp, Homo sapiens
gctccatgcttttaaattgc

SEQ ID NO: 33368 - DNA, 21 bp, Homo sapiens
gctagttggtcagagtcaaca

SEQ ID NO: 33369 - DNA, 19 bp, Homo sapiens
cgggtgttcataacattgg

SEQ ID NO: 33370 - DNA, 23 bp, Homo sapiens
tgatatctctgctcctcctaact

SEQ ID NO: 33371 - DNA, 16 bp, Homo sapiens
agtgcttgcgcttact

SEQ ID NO: 33372 - DNA, 23 bp, Homo sapiens
gctgaaaatttttcagtgctggc

SEQ ID NO: 33373 - DNA, 18 bp, Homo sapiens
actgcagatggagatgtt

SEQ ID NO: 33374 - DNA, 22 bp, Homo sapiens
ttgggatccatacaacagcata

SEQ ID NO: 33375 - DNA, 18 bp, Homo sapiens
gagatctctcaggtcttc

SEQ ID NO: 33376 - DNA, 16 bp, Homo sapiens
ctcaaggaagcctgct

SEQ ID NO: 33377 - DNA, 18 bp, Homo sapiens
tgtacaagaaaaaggcac

SEQ ID NO: 33378 - DNA, 20 bp, Homo sapiens
acagcaccgctcaggataat

SEQ ID NO: 33379 - DNA, 21 bp, Homo sapiens
agtgtgatgaaaataatgagc

SEQ ID NO: 33380 - DNA, 23 bp, Homo sapiens
ggaaacctggtttttaaaagccg

SEQ ID NO: 33381 - DNA, 19 bp, Homo sapiens
gctggttttaagagatgga

SEQ ID NO: 33382 - DNA, 18 bp, Homo sapiens
attcacatcgtctgtgcc

SEQ ID NO: 33383 - DNA, 18 bp, Homo sapiens
ttcattcagcatcatgga

SEQ ID NO: 33384 - DNA, 23 bp, Homo sapiens
tgatttcacttttttgacagtgc

SEQ ID NO: 33385 - DNA, 17 bp, Homo sapiens
tgtcttcaaagtgcagc

SEQ ID NO: 33386 - DNA, 21 bp, Homo sapiens
atgctctgaggcctcgggagg

SEQ ID NO: 33387 - DNA, 19 bp, Homo sapiens
cgtcatagagcccttcttt

SEQ ID NO: 33388 - DNA, 23 bp, Homo sapiens
tttcaaataaattaaatccatga

SEQ ID NO: 33389 - DNA, 18 bp, Homo sapiens
tgcaccaagacaaaagaa

SEQ ID NO: 33390 - DNA, 21 bp, Homo sapiens
cttgactgaagtagaagggat

SEQ ID NO: 33391 - DNA, 19 bp, Homo sapiens
ctgaattgcttagagcagc

SEQ ID NO: 33392 - DNA, 18 bp, Homo sapiens
tccttccaaaagctcagg

SEQ ID NO: 33393 - DNA, 19 bp, Homo sapiens
tcagtagatgttagtactg

SEQ ID NO: 33394 - DNA, 22 bp, Homo sapiens
aaatcttcctgaacctcctgca

SEQ ID NO: 33395 - DNA, 16 bp, Homo sapiens
gaagaaccggtggctt

SEQ ID NO: 33396 - DNA, 22 bp, Homo sapiens
tctaggcatattctaattttta

SEQ ID NO: 33397 - DNA, 16 bp, Homo sapiens
ggggactgctgcagtc

SEQ ID NO: 33398 - DNA, 23 bp, Homo sapiens
tttctggcatcatctctgcagta

SEQ ID NO: 33399 - DNA, 24 bp, Homo sapiens
ccttgaatcataattctcctttag

SEQ ID NO: 33400 - DNA, 17 bp, Homo sapiens
gagcatcctttgaatca

SEQ ID NO: 33401 - DNA, 20 bp, Homo sapiens
tgacttatgtcatgttttgt

SEQ ID NO: 33402 - DNA, 17 bp, Homo sapiens
ctccaagttgtcgctca

SEQ ID NO: 33403 - DNA, 19 bp, Homo sapiens
actgacattttaagtgagc

SEQ ID NO: 33404 - DNA, 20 bp, Homo sapiens
tgtgggcactacactggctg

SEQ ID NO: 33405 - DNA, 18 bp, Homo sapiens
cctccagatgctatggct

SEQ ID NO: 33406 - DNA, 23 bp, Homo sapiens
aactttttctaataaagataaca

SEQ ID NO: 33407 - DNA, 16 bp, Homo sapiens
aaacaagaccacccca

SEQ ID NO: 33408 - DNA, 21 bp, Homo sapiens
ctgataacagacaaggcagct

SEQ ID NO: 33409 - DNA, 19 bp, Homo sapiens
gaaaaaggcatagcaatga

SEQ ID NO: 33410 - DNA, 21 bp, Homo sapiens
aatctctctggaattttccaa

SEQ ID NO: 33411 - DNA, 20 bp, Homo sapiens
aagagatgcaagaaagacac

SEQ ID NO: 33412 - DNA, 19 bp, Homo sapiens
aagcggtcaagtttagctt

SEQ ID NO: 33413 - DNA, 19 bp, Homo sapiens
aaagtaaatgtttttcgaa

SEQ ID NO: 33414 - DNA, 21 bp, Homo sapiens
gcagcagatggggccttctat

SEQ ID NO: 33415 - DNA, 19 bp, Homo sapiens
tcacaaagatccactcagg

SEQ ID NO: 33416 - DNA, 20 bp, Homo sapiens
tgaatctgaggtggagagct

SEQ ID NO: 33417 - DNA, 16 bp, Homo sapiens
aacctaccgctctcag

SEQ ID NO: 33418 - DNA, 16 bp, Homo sapiens
cgctgtcgtctgcttt

SEQ ID NO: 33419 - DNA, 20 bp, Homo sapiens
tcaccttaaaattgagtttt

SEQ ID NO: 33420 - DNA, 19 bp, Homo sapiens
gcacttccttctaaatgta

SEQ ID NO: 33421 - DNA, 18 bp, Homo sapiens
agcaaaatacattgagga

SEQ ID NO: 33422 - DNA, 19 bp, Homo sapiens
tggtcaggattatatctgc

SEQ ID NO: 33423 - DNA, 18 bp, Homo sapiens
tatggaagatacctgtcc

SEQ ID NO: 33424 - DNA, 26 bp, Homo sapiens
gtatgaataaatcacaataacatata

SEQ ID NO: 33425 - DNA, 18 bp, Homo sapiens
tactgacataggcattga

SEQ ID NO: 33426 - DNA, 26 bp, Homo sapiens
cagaagtaacttttctatgaaatttt

SEQ ID NO: 33427 - DNA, 18 bp, Homo sapiens
caagacattaggaactga

SEQ ID NO: 33428 - DNA, 19 bp, Homo sapiens
tgttgccttttcttcttgg

SEQ ID NO: 33429 - DNA, 20 bp, Homo sapiens
tttgattcttagcttttcaa

SEQ ID NO: 33430 - DNA, 18 bp, Homo sapiens
agtcaggagttcttctct

SEQ ID NO: 33431 - DNA, 23 bp, Homo sapiens
attcaaataaacaatatggttat

SEQ ID NO: 33432 - DNA, 19 bp, Homo sapiens
tttctattacttaccaagc

SEQ ID NO: 33433 - DNA, 22 bp, Homo sapiens
aatgtgaaagactggactttat

SEQ ID NO: 33434 - DNA, 18 bp, Homo sapiens
aggaagaagaggaggaga

SEQ ID NO: 33435 - DNA, 24 bp, Homo sapiens
atgtagctacagttaactatcata

SEQ ID NO: 33436 - DNA, 19 bp, Homo sapiens
gtgaatttctgaccgatgt

SEQ ID NO: 33437 - DNA, 20 bp, Homo sapiens
attatagaatttagcttggt

SEQ ID NO: 33438 - DNA, 27 bp, Homo sapiens
ctaatcttttttttttgtaatacttat

SEQ ID NO: 33439 - DNA, 16 bp, Homo sapiens
agggttgccatgtgcg

SEQ ID NO: 33440 - DNA, 19 bp, Homo sapiens
acaaacaacaaaaacacat

SEQ ID NO: 33441 - DNA, 19 bp, Homo sapiens
actgcattgcaaagccggt

SEQ ID NO: 33442 - DNA, 22 bp, Homo sapiens
tgcctgaaaatattatagggtt

SEQ ID NO: 33443 - DNA, 24 bp, Homo sapiens
ccatcttagacctagcacatccta

SEQ ID NO: 33444 - DNA, 18 bp, Homo sapiens
gcagagcagtttgacgaa

SEQ ID NO: 33445 - DNA, 20 bp, Homo sapiens
aagttcaatagcagtttcct

SEQ ID NO: 33446 - DNA, 20 bp, Homo sapiens
aagacagcacacaaaaatgg

SEQ ID NO: 33447 - DNA, 28 bp, Homo sapiens
gtttttttaaattttatacatgtttatt

SEQ ID NO: 33448 - DNA, 18 bp, Homo sapiens
tgctaacccatatgtcgt

SEQ ID NO: 33449 - DNA, 20 bp, Homo sapiens
ccttaggttttacccattcg

SEQ ID NO: 33450 - DNA, 21 bp, Homo sapiens
gcatcaatatcaagtaaacaa

SEQ ID NO: 33451 - DNA, 19 bp, Homo sapiens
cagtttcctttaaggttga

SEQ ID NO: 33452 - DNA, 24 bp, Homo sapiens
ttattgagataatcactgttaact

SEQ ID NO: 33453 - DNA, 22 bp, Homo sapiens
tatagtacctttccacacaatt

SEQ ID NO: 33454 - DNA, 16 bp, Homo sapiens
aggatcaacaagctga

SEQ ID NO: 33455 - DNA, 24 bp, Homo sapiens
aagaaatttgctgttctcaaacac

SEQ ID NO: 33456 - DNA, 18 bp, Homo sapiens
ggggatgcttcagtttcc

SEQ ID NO: 33457 - DNA, 21 bp, Homo sapiens
tttgcattcaaaatgatatta

SEQ ID NO: 33458 - DNA, 21 bp, Homo sapiens
ccaacattagagactcattca

SEQ ID NO: 33459 - DNA, 27 bp, Homo sapiens
cagaaaataatatgttattggacaaaa

SEQ ID NO: 33460 - DNA, 19 bp, Homo sapiens
cagttttctgtaaaggaaa

SEQ ID NO: 33461 - DNA, 24 bp, Homo sapiens
ccttaaaatttgtagaagatctat

SEQ ID NO: 33462 - DNA, 20 bp, Homo sapiens
agcaatggacattttgagtt

SEQ ID NO: 33463 - DNA, 22 bp, Homo sapiens
cttccaactgctacttatgtca

SEQ ID NO: 33464 - DNA, 16 bp, Homo sapiens
catggttgcagcccaa

SEQ ID NO: 33465 - DNA, 22 bp, Homo sapiens
acaaaaccaagataataagcct

SEQ ID NO: 33466 - DNA, 16 bp, Homo sapiens
actctgtcattggtgg

SEQ ID NO: 33467 - DNA, 17 bp, Homo sapiens
tcattggcttgaaaaca

SEQ ID NO: 33468 - DNA, 24 bp, Homo sapiens
ttgtatatcttactctatttagtg

SEQ ID NO: 33469 - DNA, 24 bp, Homo sapiens
cagcaacatggttccccatgactt

SEQ ID NO: 33470 - DNA, 17 bp, Homo sapiens
ttggttggtttgtttca

SEQ ID NO: 33471 - DNA, 17 bp, Homo sapiens
ccagcagtcctgaccag

SEQ ID NO: 33472 - DNA, 22 bp, Homo sapiens
ctcggtcaggtctgggagaatt

SEQ ID NO: 33473 - DNA, 20 bp, Homo sapiens
cgggataactttaaacaaag

SEQ ID NO: 33474 - DNA, 16 bp, Homo sapiens
gcctgcagtctgatga

SEQ ID NO: 33475 - DNA, 24 bp, Homo sapiens
gacctagtcaagttttagctccaa

SEQ ID NO: 33476 - DNA, 16 bp, Homo sapiens
ttgaagctctggctgc

SEQ ID NO: 33477 - DNA, 23 bp, Homo sapiens
ttcctggttcattttcaggcaag

SEQ ID NO: 33478 - DNA, 20 bp, Homo sapiens
gttcacccatctaggatatt

SEQ ID NO: 33479 - DNA, 23 bp, Homo sapiens
aatatcatttgctatcttcatca

SEQ ID NO: 33480 - DNA, 20 bp, Homo sapiens
ttcgtatattggaactttct

SEQ ID NO: 33481 - DNA, 16 bp, Homo sapiens
gagcgtcatgagcagc

SEQ ID NO: 33482 - DNA, 18 bp, Homo sapiens
tgtagacaaaatttgagt

SEQ ID NO: 33483 - DNA, 22 bp, Homo sapiens
aattaacattataacttcagaa

SEQ ID NO: 33484 - DNA, 18 bp, Homo sapiens
actagaattggctttgca

SEQ ID NO: 33485 - DNA, 23 bp, Homo sapiens
tcatttctaactttaaattcaca

SEQ ID NO: 33486 - DNA, 18 bp, Homo sapiens
tgccatgccaagaatcta

SEQ ID NO: 33487 - DNA, 19 bp, Homo sapiens
atgagaaatgaaaatgaga

SEQ ID NO: 33488 - DNA, 20 bp, Homo sapiens
cttttcaggaatttagtggt

SEQ ID NO: 33489 - DNA, 18 bp, Homo sapiens
tgcagcaaccttttctgc

SEQ ID NO: 33490 - DNA, 17 bp, Homo sapiens
tgcagttagagtaactt

SEQ ID NO: 33491 - DNA, 16 bp, Homo sapiens
gcctccagctgcgagc

SEQ ID NO: 33492 - DNA, 21 bp, Homo sapiens
aaacttgattagcttgtaatt

SEQ ID NO: 33493 - DNA, 19 bp, Homo sapiens
tacttgttgaacataacca

SEQ ID NO: 33494 - DNA, 17 bp, Homo sapiens
actcatactcaggatgc

SEQ ID NO: 33495 - DNA, 21 bp, Homo sapiens
ctctgtcactgaagtttccgg

SEQ ID NO: 33496 - DNA, 20 bp, Homo sapiens
ttacatgatgctcttgatgc

SEQ ID NO: 33497 - DNA, 18 bp, Homo sapiens
gacacattggccatttgt

SEQ ID NO: 33498 - DNA, 18 bp, Homo sapiens
cacagcaatgcacattgc

SEQ ID NO: 33499 - DNA, 20 bp, Homo sapiens
cctgcccaagagtaagtgga

SEQ ID NO: 33500 - DNA, 25 bp, Homo sapiens
tttaacattttatatttcttttgaa

SEQ ID NO: 33501 - DNA, 17 bp, Homo sapiens
ctttggattttgcatca

SEQ ID NO: 33502 - DNA, 20 bp, Homo sapiens
agttagttggagagtttttt

SEQ ID NO: 33503 - DNA, 21 bp, Homo sapiens
tacttcatgaacttctattgc

SEQ ID NO: 33504 - DNA, 19 bp, Homo sapiens
taataactcacctatgaca

SEQ ID NO: 33505 - DNA, 22 bp, Homo sapiens
taaggattgaaacataaaacca

SEQ ID NO: 33506 - DNA, 19 bp, Homo sapiens
gcaagatacctgtgcatcc

SEQ ID NO: 33507 - DNA, 24 bp, Homo sapiens
ccttatccattaaataatgaacac

SEQ ID NO: 33508 - DNA, 20 bp, Homo sapiens
tgaatgtaaatgaagtcatt

SEQ ID NO: 33509 - DNA, 22 bp, Homo sapiens
caatctcaggtatgcttttcaa

SEQ ID NO: 33510 - DNA, 26 bp, Homo sapiens
ctgaaggtaaattaaatgatcatttt

SEQ ID NO: 33511 - DNA, 23 bp, Homo sapiens
ggcttttattaacatgatcgttg

SEQ ID NO: 33512 - DNA, 22 bp, Homo sapiens
tcagcattattatttccttttt

SEQ ID NO: 33513 - DNA, 19 bp, Homo sapiens
ttgctctattgctaatgac

SEQ ID NO: 33514 - DNA, 17 bp, Homo sapiens
agtgatgcttcagaagc

SEQ ID NO: 33515 - DNA, 18 bp, Homo sapiens
agtctgccataccacgag

SEQ ID NO: 33516 - DNA, 22 bp, Homo sapiens
agtgaattgtcataccattcac

SEQ ID NO: 33517 - DNA, 21 bp, Homo sapiens
aagcaccatattaatatcacc

SEQ ID NO: 33518 - DNA, 18 bp, Homo sapiens
accaggattatggtcttg

SEQ ID NO: 33519 - DNA, 22 bp, Homo sapiens
tcaagaattcacagttcccctt

SEQ ID NO: 33520 - DNA, 20 bp, Homo sapiens
ttttagaccccagttattaa

SEQ ID NO: 33521 - DNA, 21 bp, Homo sapiens
gaggttattaagcaaacacac

SEQ ID NO: 33522 - DNA, 21 bp, Homo sapiens
tgccaaaataataaacttcca

SEQ ID NO: 33523 - DNA, 18 bp, Homo sapiens
tgcattagcaatctttgg

SEQ ID NO: 33524 - DNA, 23 bp, Homo sapiens
aacattttagagctatagtgtta

SEQ ID NO: 33525 - DNA, 17 bp, Homo sapiens
caagatgccaaaagctt

SEQ ID NO: 33526 - DNA, 23 bp, Homo sapiens
aaacttcaaaaagttctttaaca

SEQ ID NO: 33527 - DNA, 20 bp, Homo sapiens
accgtgagatctacgatgaa

SEQ ID NO: 33528 - DNA, 22 bp, Homo sapiens
ttttctaataactttacatttt

SEQ ID NO: 33529 - DNA, 22 bp, Homo sapiens
atatgatacctttggtgaacta

SEQ ID NO: 33530 - DNA, 22 bp, Homo sapiens
tgaatacagcctacttcatcca

SEQ ID NO: 33531 - DNA, 21 bp, Homo sapiens
ttcttttcaacttgtaatagt

SEQ ID NO: 33532 - DNA, 20 bp, Homo sapiens
gttctgtcacacctccaatc

SEQ ID NO: 33533 - DNA, 20 bp, Homo sapiens
aggtttctttctctttaaca

SEQ ID NO: 33534 - DNA, 16 bp, Homo sapiens
tggcacctttagttca

SEQ ID NO: 33535 - DNA, 19 bp, Homo sapiens
gacctgaaagtgaggaaga

SEQ ID NO: 33536 - DNA, 22 bp, Homo sapiens
gaggcccgccacgccggcacgg

SEQ ID NO: 33537 - DNA, 24 bp, Homo sapiens
agcttcggctcccggcttgggtgg

SEQ ID NO: 33538 - DNA, 24 bp, Homo sapiens
cggggaatctctcccgccaagtcg

SEQ ID NO: 33539 - DNA, 24 bp, Homo sapiens
taccgagcacttcggctcctcgcg

SEQ ID NO: 33540 - DNA, 16 bp, Homo sapiens
ggggaggccgggggat

SEQ ID NO: 33541 - DNA, 24 bp, Homo sapiens
gtggaggcgtggccacagccgccc

SEQ ID NO: 33542 - DNA, 23 bp, Homo sapiens
caaaacgagggcacggccgcgcc

SEQ ID NO: 33543 - DNA, 22 bp, Homo sapiens
tgaggctgttgattggataaga

SEQ ID NO: 33544 - DNA, 16 bp, Homo sapiens
cacgaggggacgcgag

SEQ ID NO: 33545 - DNA, 20 bp, Homo sapiens
aacccgccccctcattcttt

SEQ ID NO: 33546 - DNA, 16 bp, Homo sapiens
ccatgctaacagccct

SEQ ID NO: 33547 - DNA, 18 bp, Homo sapiens
cagtgccggagtttgtct

SEQ ID NO: 33548 - DNA, 18 bp, Homo sapiens
gtggaccggctcaagaaa

SEQ ID NO: 33549 - DNA, 16 bp, Homo sapiens
cagcactgccggcagc

SEQ ID NO: 33550 - DNA, 21 bp, Homo sapiens
gaagtcctctttctctattca

SEQ ID NO: 33551 - DNA, 23 bp, Homo sapiens
ctcactggtagaacttcttgtta

SEQ ID NO: 33552 - DNA, 17 bp, Homo sapiens
ttgggaaggaagctcac

SEQ ID NO: 33553 - DNA, 23 bp, Homo sapiens
tgaactgttttccataggcagct

SEQ ID NO: 33554 - DNA, 16 bp, Homo sapiens
catcggagccgtcttt

SEQ ID NO: 33555 - DNA, 21 bp, Homo sapiens
atacagatccacaaagcggaa

SEQ ID NO: 33556 - DNA, 17 bp, Homo sapiens
tttgtgaatgaggcagt

SEQ ID NO: 33557 - DNA, 16 bp, Homo sapiens
gggctccaggctaaag

SEQ ID NO: 33558 - DNA, 22 bp, Homo sapiens
acctaaacatctctttctgttg

SEQ ID NO: 33559 - DNA, 21 bp, Homo sapiens
aggcgggaagccaagcccaaa

SEQ ID NO: 33560 - DNA, 16 bp, Homo sapiens
tcccgacttccattct

SEQ ID NO: 33561 - DNA, 16 bp, Homo sapiens
tcttgcaggcacatga

SEQ ID NO: 33562 - DNA, 17 bp, Homo sapiens
cagcatcttctctgagg

SEQ ID NO: 33563 - DNA, 18 bp, Homo sapiens
gtcttcgtctgatgagct

SEQ ID NO: 33564 - DNA, 24 bp, Homo sapiens
gaagacagcaccatggcacgtgta

SEQ ID NO: 33565 - DNA, 20 bp, Homo sapiens
gaggaaggatttgaattctg

SEQ ID NO: 33566 - DNA, 25 bp, Homo sapiens
attaaaaaaaaaaaaaaatggaaga

SEQ ID NO: 33567 - DNA, 20 bp, Homo sapiens
ctgttttaggtcgtaaatct

SEQ ID NO: 33568 - DNA, 16 bp, Homo sapiens
tttccaggcattagcc

SEQ ID NO: 33569 - DNA, 20 bp, Homo sapiens
ggttctgagaacaaatagta

SEQ ID NO: 33570 - DNA, 24 bp, Homo sapiens
actcgctaaaatactatccatgtc

SEQ ID NO: 33571 - DNA, 19 bp, Homo sapiens
gatgtaaaagcccttccca

SEQ ID NO: 33572 - DNA, 24 bp, Homo sapiens
agtggttgctaccgcacctgactc

SEQ ID NO: 33573 - DNA, 16 bp, Homo sapiens
ggtggaaacccagaac

SEQ ID NO: 33574 - DNA, 21 bp, Homo sapiens
ttagaaaactttcttccacga

SEQ ID NO: 33575 - DNA, 16 bp, Homo sapiens
gtggatgtagcgaaac

SEQ ID NO: 33576 - DNA, 20 bp, Homo sapiens
gtaactaatggtgctagtta

SEQ ID NO: 33577 - DNA, 16 bp, Homo sapiens
tggattccctgaccac

SEQ ID NO: 33578 - DNA, 21 bp, Homo sapiens
tggacaccatctgtgtcagca

SEQ ID NO: 33579 - DNA, 23 bp, Homo sapiens
gctgcccttcccctgaggtccct

SEQ ID NO: 33580 - DNA, 20 bp, Homo sapiens
cagatcttccgccacatgtt

SEQ ID NO: 33581 - DNA, 16 bp, Homo sapiens
tacacaaggcagtgtt

SEQ ID NO: 33582 - DNA, 16 bp, Homo sapiens
cacaggaaagccaaag

SEQ ID NO: 33583 - DNA, 19 bp, Homo sapiens
tgcttccctgaatgaaata

SEQ ID NO: 33584 - DNA, 21 bp, Homo sapiens
taagcccaacttccgactgct

SEQ ID NO: 33585 - DNA, 22 bp, Homo sapiens
cttctatactaccaggtgtctt

SEQ ID NO: 33586 - DNA, 24 bp, Homo sapiens
agagcaggagttggtgtatcagaa

SEQ ID NO: 33587 - DNA, 19 bp, Homo sapiens
agtcccagcagcagggcca

SEQ ID NO: 33588 - DNA, 16 bp, Homo sapiens
aaggagtggaagatgc

SEQ ID NO: 33589 - DNA, 19 bp, Homo sapiens
cagtgactttcaaatgact

SEQ ID NO: 33590 - DNA, 17 bp, Homo sapiens
ttcagacatcatgggcg

SEQ ID NO: 33591 - DNA, 17 bp, Homo sapiens
tcccctgcaatttcatt

SEQ ID NO: 33592 - DNA, 24 bp, Homo sapiens
cagtcaataccaccgtccatcctg

SEQ ID NO: 33593 - DNA, 16 bp, Homo sapiens
agacaccagtgcttca

SEQ ID NO: 33594 - DNA, 21 bp, Homo sapiens
tgccccagaatatttataaac

SEQ ID NO: 33595 - DNA, 16 bp, Homo sapiens
cttctctcccgtggac

SEQ ID NO: 33596 - DNA, 16 bp, Homo sapiens
ctgcagctctgttata

SEQ ID NO: 33597 - DNA, 16 bp, Homo sapiens
acccgcattctccgat

SEQ ID NO: 33598 - DNA, 19 bp, Homo sapiens
tgagaccaactgctacagc

SEQ ID NO: 33599 - DNA, 17 bp, Homo sapiens
atcacagccacctttct

SEQ ID NO: 33600 - DNA, 21 bp, Homo sapiens
ctccagcagctgcatcttgtc

SEQ ID NO: 33601 - DNA, 22 bp, Homo sapiens
ctaaacttttatcaaagaccca

SEQ ID NO: 33602 - DNA, 23 bp, Homo sapiens
acactagtcatggtattagcatt

SEQ ID NO: 33603 - DNA, 17 bp, Homo sapiens
aacacatctgctctccc

SEQ ID NO: 33604 - DNA, 20 bp, Homo sapiens
ctccgtaatccactgtctct

SEQ ID NO: 33605 - DNA, 16 bp, Homo sapiens
acctgacacattgtta

SEQ ID NO: 33606 - DNA, 22 bp, Homo sapiens
agcaataaaacatctcagggtt

SEQ ID NO: 33607 - DNA, 16 bp, Homo sapiens
gggcccaggtgtcact

SEQ ID NO: 33608 - DNA, 17 bp, Homo sapiens
cagcgatttcactgatt

SEQ ID NO: 33609 - DNA, 16 bp, Homo sapiens
gtgatccgtcaatgtc

SEQ ID NO: 33610 - DNA, 17 bp, Homo sapiens
ccaaactactgggatta

SEQ ID NO: 33611 - DNA, 19 bp, Homo sapiens
aagctgtgtttgaggacct

SEQ ID NO: 33612 - DNA, 19 bp, Homo sapiens
ataaaagcaatcatgagtt

SEQ ID NO: 33613 - DNA, 17 bp, Homo sapiens
cagcaacttgactgggc

SEQ ID NO: 33614 - DNA, 17 bp, Homo sapiens
gttcactacactaggat

SEQ ID NO: 33615 - DNA, 23 bp, Homo sapiens
gttttttctagattgaatgacaa

SEQ ID NO: 33616 - DNA, 18 bp, Homo sapiens
agcactctgtgcttaaga

SEQ ID NO: 33617 - DNA, 20 bp, Homo sapiens
gcccatggacattcaataaa

SEQ ID NO: 33618 - DNA, 20 bp, Homo sapiens
tttcaaaaccttggtaatca

SEQ ID NO: 33619 - DNA, 25 bp, Homo sapiens
aaaatgggagtaatagaataactac

SEQ ID NO: 33620 - DNA, 18 bp, Homo sapiens
gatgttagagctttcttc

SEQ ID NO: 33621 - DNA, 16 bp, Homo sapiens
ctgcgctagaccgagg

SEQ ID NO: 33622 - DNA, 16 bp, Homo sapiens
atccgtgatggcaaga

SEQ ID NO: 33623 - DNA, 16 bp, Homo sapiens
gcatcgcccaagtctc

SEQ ID NO: 33624 - DNA, 22 bp, Homo sapiens
caactaaccaagaaacaaagga

SEQ ID NO: 33625 - DNA, 19 bp, Homo sapiens
ccgaaagtcatttcatcct

SEQ ID NO: 33626 - DNA, 16 bp, Homo sapiens
ttgttgctgtcctcgg

SEQ ID NO: 33627 - DNA, 21 bp, Homo sapiens
gtttattgaataacttaggca

SEQ ID NO: 33628 - DNA, 22 bp, Homo sapiens
tctttagccccttatccacgga

SEQ ID NO: 33629 - DNA, 23 bp, Homo sapiens
attaaagctgtgtttttaataaa

SEQ ID NO: 33630 - DNA, 20 bp, Homo sapiens
tcctgtgcaagaagaataaa

SEQ ID NO: 33631 - DNA, 22 bp, Homo sapiens
agaagttgagggcaagactgaa

SEQ ID NO: 33632 - DNA, 19 bp, Homo sapiens
ggagagcttgtaatgacca

SEQ ID NO: 33633 - DNA, 18 bp, Homo sapiens
tgcacacagtaaaattca

SEQ ID NO: 33634 - DNA, 16 bp, Homo sapiens
taacctagactgtgaa

SEQ ID NO: 33635 - DNA, 16 bp, Homo sapiens
tggagctccaaattta

SEQ ID NO: 33636 - DNA, 16 bp, Homo sapiens
ctcaggcttcacatgc

SEQ ID NO: 33637 - DNA, 22 bp, Homo sapiens
catcaaggcctttgattctttg

SEQ ID NO: 33638 - DNA, 19 bp, Homo sapiens
cacatcagtgagagacaga

SEQ ID NO: 33639 - DNA, 19 bp, Homo sapiens
ttagcatccacttgctcac

SEQ ID NO: 33640 - DNA, 19 bp, Homo sapiens
gtaaagactggaattgagc

SEQ ID NO: 33641 - DNA, 18 bp, Homo sapiens
actaggctttggatattt

SEQ ID NO: 33642 - DNA, 17 bp, Homo sapiens
ttgtacatctcgccaat

SEQ ID NO: 33643 - DNA, 25 bp, Homo sapiens
gttttcctttaactgataataaaac

SEQ ID NO: 33644 - DNA, 20 bp, Homo sapiens
cagtctagacttttgactta

SEQ ID NO: 33645 - DNA, 20 bp, Homo sapiens
cagagataaccggcatcact

SEQ ID NO: 33646 - DNA, 19 bp, Homo sapiens
agtccttacagcttgctat

SEQ ID NO: 33647 - DNA, 17 bp, Homo sapiens
aaaagtgcgaaagcaga

SEQ ID NO: 33648 - DNA, 22 bp, Homo sapiens
tttagtactcaacatacatggt

SEQ ID NO: 33649 - DNA, 20 bp, Homo sapiens
cagcgtatgccatgactatt

SEQ ID NO: 33650 - DNA, 22 bp, Homo sapiens
aaaggaaggaaatatgagaaaa

SEQ ID NO: 33651 - DNA, 18 bp, Homo sapiens
acaagggaatctaggctc

SEQ ID NO: 33652 - DNA, 16 bp, Homo sapiens
tgcaggataaaggcct

SEQ ID NO: 33653 - DNA, 17 bp, Homo sapiens
cagttcttgcagatagc

SEQ ID NO: 33654 - DNA, 17 bp, Homo sapiens
gttgcctgacaaatgga

SEQ ID NO: 33655 - DNA, 20 bp, Homo sapiens
cacttagcatgtttaaggta

SEQ ID NO: 33656 - DNA, 20 bp, Homo sapiens
gctgataagaagatctctcc

SEQ ID NO: 33657 - DNA, 22 bp, Homo sapiens
tttatgctttgagtaaataatg

SEQ ID NO: 33658 - DNA, 17 bp, Homo sapiens
ccagaggaacggacaat

SEQ ID NO: 33659 - DNA, 16 bp, Homo sapiens
ttctcaggaaagaagc

SEQ ID NO: 33660 - DNA, 17 bp, Homo sapiens
agcctgatttgcattcc

SEQ ID NO: 33661 - DNA, 20 bp, Homo sapiens
ccaccaatcccttgtctctc

SEQ ID NO: 33662 - DNA, 16 bp, Homo sapiens
gtgctagggcctttgg

SEQ ID NO: 33663 - DNA, 19 bp, Homo sapiens
aattgcaacttcttctagg

SEQ ID NO: 33664 - DNA, 18 bp, Homo sapiens
cttctttgacttcttggt

SEQ ID NO: 33665 - DNA, 23 bp, Homo sapiens
caaggctggtctcaaactcctga

SEQ ID NO: 33666 - DNA, 16 bp, Homo sapiens
tgcagacagggcaaag

SEQ ID NO: 33667 - DNA, 16 bp, Homo sapiens
tgcttgcctgttaggt

SEQ ID NO: 33668 - DNA, 19 bp, Homo sapiens
ctttataaggtctgactct

SEQ ID NO: 33669 - DNA, 21 bp, Homo sapiens
tcatttgatgatttgtaaact

SEQ ID NO: 33670 - DNA, 21 bp, Homo sapiens
aaccagtcccattttctttgc

SEQ ID NO: 33671 - DNA, 20 bp, Homo sapiens
gctgttgacaaatagcataa

SEQ ID NO: 33672 - DNA, 16 bp, Homo sapiens
gcagcaggcacaccca

SEQ ID NO: 33673 - DNA, 16 bp, Homo sapiens
accaggagcaggaggc

SEQ ID NO: 33674 - DNA, 25 bp, Homo sapiens
gtacactcatattttatttggtttt

SEQ ID NO: 33675 - DNA, 18 bp, Homo sapiens
agaatagcaacaaaagac

SEQ ID NO: 33676 - DNA, 21 bp, Homo sapiens
acaagaaaacagatctaaaga

SEQ ID NO: 33677 - DNA, 21 bp, Homo sapiens
actaagttacattttctaaca

SEQ ID NO: 33678 - DNA, 17 bp, Homo sapiens
ttgggcagcctttgtgt

SEQ ID NO: 33679 - DNA, 16 bp, Homo sapiens
agcacattcctgcttt

SEQ ID NO: 33680 - DNA, 21 bp, Homo sapiens
acctaatactgtttttctgtc

SEQ ID NO: 33681 - DNA, 23 bp, Homo sapiens
aaaaggctaaaaaggtaaattct

SEQ ID NO: 33682 - DNA, 20 bp, Homo sapiens
gagacaagagcaaaattccg

SEQ ID NO: 33683 - DNA, 19 bp, Homo sapiens
tgaaaagtccacaaagcct

SEQ ID NO: 33684 - DNA, 19 bp, Homo sapiens
aactttttccaggcaaagc

SEQ ID NO: 33685 - DNA, 19 bp, Homo sapiens
acccttcaagaagtaacac

SEQ ID NO: 33686 - DNA, 20 bp, Homo sapiens
gagttggacagtgtctcaat

SEQ ID NO: 33687 - DNA, 20 bp, Homo sapiens
gttttatctttttctctgtt

SEQ ID NO: 33688 - DNA, 18 bp, Homo sapiens
atccattgatggcagcca

SEQ ID NO: 33689 - DNA, 24 bp, Homo sapiens
aaatattgatgcatgataggataa

SEQ ID NO: 33690 - DNA, 19 bp, Homo sapiens
tgcttcttgtgatagctgt

SEQ ID NO: 33691 - DNA, 19 bp, Homo sapiens
ctattgtgctatttgaagc

SEQ ID NO: 33692 - DNA, 20 bp, Homo sapiens
gctgggattacaggcaagaa

SEQ ID NO: 33693 - DNA, 16 bp, Homo sapiens
catcaaagccaggctg

SEQ ID NO: 33694 - DNA, 20 bp, Homo sapiens
aggcctgtgtcactgtgccc

SEQ ID NO: 33695 - DNA, 18 bp, Homo sapiens
agttctcagaagttatga

SEQ ID NO: 33696 - DNA, 19 bp, Homo sapiens
acacactattaaccaagat

SEQ ID NO: 33697 - DNA, 22 bp, Homo sapiens
ttaaacccttacctgtatatat

SEQ ID NO: 33698 - DNA, 23 bp, Homo sapiens
tgatatcagcacctgcaataaag

SEQ ID NO: 33699 - DNA, 26 bp, Homo sapiens
atatttcttataatcaaaatagcatt

SEQ ID NO: 33700 - DNA, 18 bp, Homo sapiens
actagcccagatttcatt

SEQ ID NO: 33701 - DNA, 19 bp, Homo sapiens
tgacttgctgggagaatga

SEQ ID NO: 33702 - DNA, 17 bp, Homo sapiens
tgtggcagttgttcgaa

SEQ ID NO: 33703 - DNA, 21 bp, Homo sapiens
tcatgtaagattactgccaga

SEQ ID NO: 33704 - DNA, 24 bp, Homo sapiens
tacaaataaatctttcttttcttt

SEQ ID NO: 33705 - DNA, 22 bp, Homo sapiens
ccattcaggactagattcataa

SEQ ID NO: 33706 - DNA, 22 bp, Homo sapiens
ttctttttaatgtgtatgctta

SEQ ID NO: 33707 - DNA, 23 bp, Homo sapiens
atacctttgaattgggagagtta

SEQ ID NO: 33708 - DNA, 20 bp, Homo sapiens
tcttacaggttatatatgcc

SEQ ID NO: 33709 - DNA, 17 bp, Homo sapiens
tgggttctggctaaaaa

SEQ ID NO: 33710 - DNA, 26 bp, Homo sapiens
aattacagctttgttatatataaaag

SEQ ID NO: 33711 - DNA, 19 bp, Homo sapiens
aaaagcaatgtaagcatac

SEQ ID NO: 33712 - DNA, 17 bp, Homo sapiens
tggcctagaatacattg

SEQ ID NO: 33713 - DNA, 18 bp, Homo sapiens
gaccctgtaaaattgcgg

SEQ ID NO: 33714 - DNA, 20 bp, Homo sapiens
gggaaaccgggtcccagggc

SEQ ID NO: 33715 - DNA, 23 bp, Homo sapiens
gatggtggcctgccgggcgattg

SEQ ID NO: 33716 - DNA, 22 bp, Homo sapiens
ggcaggcggcagcgaaagggag

SEQ ID NO: 33717 - DNA, 24 bp, Homo sapiens
ggagaaaagtcctccgctcggccg

SEQ ID NO: 33718 - DNA, 24 bp, Homo sapiens
tctgcccggaggtctgggatgccc

SEQ ID NO: 33719 - DNA, 18 bp, Homo sapiens
ggcatctgggttttagtc

SEQ ID NO: 33720 - DNA, 24 bp, Homo sapiens
agaaaagcggctgaggatgccaat

SEQ ID NO: 33721 - DNA, 22 bp, Homo sapiens
gcagtcagtgtacattttagag

SEQ ID NO: 33722 - DNA, 18 bp, Homo sapiens
tgttatctggaactccta

SEQ ID NO: 33723 - DNA, 22 bp, Homo sapiens
ctgaccggcaacccaaccccgt

SEQ ID NO: 33724 - DNA, 19 bp, Homo sapiens
ttagccttcctcctcttca

SEQ ID NO: 33725 - DNA, 23 bp, Homo sapiens
agggtcaagctgcatcactgcaa

SEQ ID NO: 33726 - DNA, 21 bp, Homo sapiens
ctttgtcatgatccctccttt

SEQ ID NO: 33727 - DNA, 19 bp, Homo sapiens
atgtgccttccaggacagg

SEQ ID NO: 33728 - DNA, 18 bp, Homo sapiens
gaggagactccatctcaa

SEQ ID NO: 33729 - DNA, 16 bp, Homo sapiens
gccaacttctacctgg

SEQ ID NO: 33730 - DNA, 22 bp, Homo sapiens
tctgatcacggctcagtgttcc

SEQ ID NO: 33731 - DNA, 16 bp, Homo sapiens
aggtggtggggcagcc

SEQ ID NO: 33732 - DNA, 23 bp, Homo sapiens
attttgtctccaactgttggtaa

SEQ ID NO: 33733 - DNA, 19 bp, Homo sapiens
cacctttttcttgtgtgca

SEQ ID NO: 33734 - DNA, 20 bp, Homo sapiens
tgtaatgaagggggaccagg

SEQ ID NO: 33735 - DNA, 20 bp, Homo sapiens
gggattactctttcattccc

SEQ ID NO: 33736 - DNA, 17 bp, Homo sapiens
gcccttatcaccaacta

SEQ ID NO: 33737 - DNA, 17 bp, Homo sapiens
ggtgcccatcctgggaa

SEQ ID NO: 33738 - DNA, 16 bp, Homo sapiens
gcttggaggcgcaagt

SEQ ID NO: 33739 - DNA, 20 bp, Homo sapiens
caggaggaccccccaatccc

SEQ ID NO: 33740 - DNA, 17 bp, Homo sapiens
gcaggaatgtgctcttt

SEQ ID NO: 33741 - DNA, 23 bp, Homo sapiens
cagttgaggtgtcagctcttaca

SEQ ID NO: 33742 - DNA, 16 bp, Homo sapiens
aagggggtaagtgcag

SEQ ID NO: 33743 - DNA, 21 bp, Homo sapiens
cacacacagacttgggttcaa

SEQ ID NO: 33744 - DNA, 20 bp, Homo sapiens
acttaatggactgtcagccc

SEQ ID NO: 33745 - DNA, 18 bp, Homo sapiens
gcctggggccctacctgc

SEQ ID NO: 33746 - DNA, 16 bp, Homo sapiens
cctaggggggctttgc

SEQ ID NO: 33747 - DNA, 19 bp, Homo sapiens
ccctggctgtcagcccgcc

SEQ ID NO: 33748 - DNA, 17 bp, Homo sapiens
tgagctgtgttgggggt

SEQ ID NO: 33749 - DNA, 17 bp, Homo sapiens
gtagtttggcccagttg

SEQ ID NO: 33750 - DNA, 16 bp, Homo sapiens
tggatgcactgaagaa

SEQ ID NO: 33751 - DNA, 21 bp, Homo sapiens
agaaagcagcctagaaaacac

SEQ ID NO: 33752 - DNA, 16 bp, Homo sapiens
cagggccctgtggtag

SEQ ID NO: 33753 - DNA, 21 bp, Homo sapiens
gtgctgaaatccccacctacc

SEQ ID NO: 33754 - DNA, 16 bp, Homo sapiens
agtgaggtagaggcct

SEQ ID NO: 33755 - DNA, 16 bp, Homo sapiens
tgatccaacaacatct

SEQ ID NO: 33756 - DNA, 21 bp, Homo sapiens
ctgccgccctcttttttctta

SEQ ID NO: 33757 - DNA, 18 bp, Homo sapiens
tccaaaaccttgtaccag

SEQ ID NO: 33758 - DNA, 16 bp, Homo sapiens
ctgggctgtggctttg

SEQ ID NO: 33759 - DNA, 18 bp, Homo sapiens
ataggggaagtggacact

SEQ ID NO: 33760 - DNA, 22 bp, Homo sapiens
atctcacagcagctggtggaga

SEQ ID NO: 33761 - DNA, 22 bp, Homo sapiens
aagggaagccaaaggatggcaa

SEQ ID NO: 33762 - DNA, 16 bp, Homo sapiens
ctgacaacacctgtgt

SEQ ID NO: 33763 - DNA, 21 bp, Homo sapiens
tgaggggagaacttaccacaa

SEQ ID NO: 33764 - DNA, 21 bp, Homo sapiens
gagcctcagtggaggtcagca

SEQ ID NO: 33765 - DNA, 18 bp, Homo sapiens
ctggtgttcctgcagacc

SEQ ID NO: 33766 - DNA, 17 bp, Homo sapiens
ggaagggactagtcatt

SEQ ID NO: 33767 - DNA, 21 bp, Homo sapiens
cttggggaccaccctccaaaa

SEQ ID NO: 33768 - DNA, 22 bp, Homo sapiens
cataccagcgggccctggccgc

SEQ ID NO: 33769 - DNA, 20 bp, Homo sapiens
ttcaagagagccgaatagaa

SEQ ID NO: 33770 - DNA, 24 bp, Homo sapiens
gagggacggtgggggtgaccccct

SEQ ID NO: 33771 - DNA, 22 bp, Homo sapiens
tccaaatcagtctgccctggtc

SEQ ID NO: 33772 - DNA, 18 bp, Homo sapiens
ggaagggagtgggcacaa

SEQ ID NO: 33773 - DNA, 20 bp, Homo sapiens
acctgtactttccacgggtg

SEQ ID NO: 33774 - DNA, 24 bp, Homo sapiens
aggaagctgtctgggaagcatcct

SEQ ID NO: 33775 - DNA, 24 bp, Homo sapiens
aagaaccgctgggtatggagcaca

SEQ ID NO: 33776 - DNA, 18 bp, Homo sapiens
gctccttgatagtgctgt

SEQ ID NO: 33777 - DNA, 19 bp, Homo sapiens
gctaattgagaagcagcac

SEQ ID NO: 33778 - DNA, 22 bp, Homo sapiens
cagttatggtctaaccattaaa

SEQ ID NO: 33779 - DNA, 21 bp, Homo sapiens
tccgaagatgtgaatatttct

SEQ ID NO: 33780 - DNA, 16 bp, Homo sapiens
ctcaccagtgcgattt

SEQ ID NO: 33781 - DNA, 19 bp, Homo sapiens
tggcttgtaaattttggac

SEQ ID NO: 33782 - DNA, 16 bp, Homo sapiens
aggcggtgcattggcg

SEQ ID NO: 33783 - DNA, 20 bp, Homo sapiens
actttaaatgacttgggttt

SEQ ID NO: 33784 - DNA, 17 bp, Homo sapiens
aaggatggcctcatcaa

SEQ ID NO: 33785 - DNA, 21 bp, Homo sapiens
gctcatttgggttggccctga

SEQ ID NO: 33786 - DNA, 17 bp, Homo sapiens
ctgtgaatcatgaccca

SEQ ID NO: 33787 - DNA, 16 bp, Homo sapiens
agaaagttcttcgcca

SEQ ID NO: 33788 - DNA, 18 bp, Homo sapiens
aacacctctgtcttgggc

SEQ ID NO: 33789 - DNA, 21 bp, Homo sapiens
actctgctggtcaggtccttg

SEQ ID NO: 33790 - DNA, 22 bp, Homo sapiens
atgaagccatgcgcttctccag

SEQ ID NO: 33791 - DNA, 24 bp, Homo sapiens
agttctccgggttaggccacttca

SEQ ID NO: 33792 - DNA, 16 bp, Homo sapiens
cgtctgccttgtatgg

SEQ ID NO: 33793 - DNA, 16 bp, Homo sapiens
agtgtccttgggaatg

SEQ ID NO: 33794 - DNA, 17 bp, Homo sapiens
caggtatcctgatgtgc

SEQ ID NO: 33795 - DNA, 18 bp, Homo sapiens
agtgacaggcacaaagct

SEQ ID NO: 33796 - DNA, 18 bp, Homo sapiens
tgtgctttctagatgaaa

SEQ ID NO: 33797 - DNA, 16 bp, Homo sapiens
ttgggctggtcaccca

SEQ ID NO: 33798 - DNA, 18 bp, Homo sapiens
ttagtcactgagctagat

SEQ ID NO: 33799 - DNA, 18 bp, Homo sapiens
tctgcctgcactcgagtc

SEQ ID NO: 33800 - DNA, 21 bp, Homo sapiens
gtcgcagccctcactgtgagt

SEQ ID NO: 33801 - DNA, 20 bp, Homo sapiens
cagccaggacaccctgtcca

SEQ ID NO: 33802 - DNA, 20 bp, Homo sapiens
tggagcgaaaccccaaaccc

SEQ ID NO: 33803 - DNA, 17 bp, Homo sapiens
gcggctggatttggaga

SEQ ID NO: 33804 - DNA, 19 bp, Homo sapiens
gcctttttcagaggagaaa

SEQ ID NO: 33805 - DNA, 19 bp, Homo sapiens
gacatgatggacgccttta

SEQ ID NO: 33806 - DNA, 16 bp, Homo sapiens
cagccactgcagcgcg

SEQ ID NO: 33807 - DNA, 23 bp, Homo sapiens
catcctggacaagttcttgaggc

SEQ ID NO: 33808 - DNA, 17 bp, Homo sapiens
tagtggccggtacgttc

SEQ ID NO: 33809 - DNA, 24 bp, Homo sapiens
acttccccaacccggtgcgcaccg

SEQ ID NO: 33810 - DNA, 24 bp, Homo sapiens
ccccggccgccttcttttccgcag

SEQ ID NO: 33811 - DNA, 20 bp, Homo sapiens
cgggcgcacggtgggcgcgg

SEQ ID NO: 33812 - DNA, 20 bp, Homo sapiens
gaaggctttcgcagtgcctc

SEQ ID NO: 33813 - DNA, 16 bp, Homo sapiens
tacagccacgacgacc

SEQ ID NO: 33814 - DNA, 23 bp, Homo sapiens
tgagctgctcgaattcgcggaaa

SEQ ID NO: 33815 - DNA, 24 bp, Homo sapiens
cttcctcgacccgaggccgctgac

SEQ ID NO: 33816 - DNA, 16 bp, Homo sapiens
acgtccaccaggctgc

SEQ ID NO: 33817 - DNA, 24 bp, Homo sapiens
tgagcgaggcgcgcgagctggtgg

SEQ ID NO: 33818 - DNA, 23 bp, Homo sapiens
gctgagcagctcacggaactcgg

SEQ ID NO: 33819 - DNA, 23 bp, Homo sapiens
atgatgcgcaacttcttcacgcg

SEQ ID NO: 33820 - DNA, 21 bp, Homo sapiens
atgacgttggccacggccacg

SEQ ID NO: 33821 - DNA, 22 bp, Homo sapiens
atggctttcggccactactcgg

SEQ ID NO: 33822 - DNA, 23 bp, Homo sapiens
tgccgcgcaccagcagcgccacc

SEQ ID NO: 33823 - DNA, 16 bp, Homo sapiens
cttcgccgaccggccg

SEQ ID NO: 33824 - DNA, 23 bp, Homo sapiens
ggacttggcggctgcgcggctgg

SEQ ID NO: 33825 - DNA, 16 bp, Homo sapiens
ccccatagtggtgctg

SEQ ID NO: 33826 - DNA, 19 bp, Homo sapiens
gcaccttccagtgctccga

SEQ ID NO: 33827 - DNA, 24 bp, Homo sapiens
cacctctcgttcgctcgcctggcg

SEQ ID NO: 33828 - DNA, 16 bp, Homo sapiens
cggaaggaggcgaagg

SEQ ID NO: 33829 - DNA, 16 bp, Homo sapiens
ccgtttgcgtggccac

SEQ ID NO: 33830 - DNA, 24 bp, Homo sapiens
ctggtggatggcgcgctcgccatt

SEQ ID NO: 33831 - DNA, 19 bp, Homo sapiens
gtgcatgtgggccagcggc

SEQ ID NO: 33832 - DNA, 21 bp, Homo sapiens
aaacgtcgccgtagcgccgcg

SEQ ID NO: 33833 - DNA, 17 bp, Homo sapiens
taaacccgctgtccatc

SEQ ID NO: 33834 - DNA, 17 bp, Homo sapiens
gtttccgatcagtggcc

SEQ ID NO: 33835 - DNA, 18 bp, Homo sapiens
gccttctcctctctgtcc

SEQ ID NO: 33836 - DNA, 23 bp, Homo sapiens
ctgccgcctccgttgcctcagca

SEQ ID NO: 33837 - DNA, 22 bp, Homo sapiens
gtccccagaggctggggtaggg

SEQ ID NO: 33838 - DNA, 23 bp, Homo sapiens
caggagcgtggtctgctggatgg

SEQ ID NO: 33839 - DNA, 22 bp, Homo sapiens
gggcgtcttcggccatttctcc

SEQ ID NO: 33840 - DNA, 18 bp, Homo sapiens
aaccaagtgcacagagtt

SEQ ID NO: 33841 - DNA, 20 bp, Homo sapiens
acaggaaagctttgaatttt

SEQ ID NO: 33842 - DNA, 21 bp, Homo sapiens
agtacataaagaaaattttca

SEQ ID NO: 33843 - DNA, 16 bp, Homo sapiens
taccatcacctcttgc

SEQ ID NO: 33844 - DNA, 25 bp, Homo sapiens
agaatcacaaatatatacaaaacaa

SEQ ID NO: 33845 - DNA, 16 bp, Homo sapiens
tccatgggcctggcag

SEQ ID NO: 33846 - DNA, 19 bp, Homo sapiens
caattttcttagctgctgt

SEQ ID NO: 33847 - DNA, 17 bp, Homo sapiens
aagtatgctggagagcc

SEQ ID NO: 33848 - DNA, 18 bp, Homo sapiens
acagagatctaatcctca

SEQ ID NO: 33849 - DNA, 17 bp, Homo sapiens
aacatttgactgcaaag

SEQ ID NO: 33850 - DNA, 19 bp, Homo sapiens
atgaagtgcacataaatct

SEQ ID NO: 33851 - DNA, 24 bp, Homo sapiens
atatttttttctttatgtcagtct

SEQ ID NO: 33852 - DNA, 16 bp, Homo sapiens
tgaaagggacaggctc

SEQ ID NO: 33853 - DNA, 16 bp, Homo sapiens
agtggctgttttggtg

SEQ ID NO: 33854 - DNA, 23 bp, Homo sapiens
ttagaaacagatcatccaatttt

SEQ ID NO: 33855 - DNA, 19 bp, Homo sapiens
gtggcttcttactgaaagt

SEQ ID NO: 33856 - DNA, 21 bp, Homo sapiens
gatgtgacatctttctctgag

SEQ ID NO: 33857 - DNA, 25 bp, Homo sapiens
agttatttatatcataattatctga

SEQ ID NO: 33858 - DNA, 22 bp, Homo sapiens
ctgtgttagaattgattcctga

SEQ ID NO: 33859 - DNA, 22 bp, Homo sapiens
actatactacaagtcatttaca

SEQ ID NO: 33860 - DNA, 19 bp, Homo sapiens
gttaatttgcggttttcat

SEQ ID NO: 33861 - DNA, 24 bp, Homo sapiens
ataaataatatagtcaaattaaac

SEQ ID NO: 33862 - DNA, 25 bp, Homo sapiens
ctgttataattattgtgaaaatttt

SEQ ID NO: 33863 - DNA, 19 bp, Homo sapiens
gcttcttccttttcattta

SEQ ID NO: 33864 - DNA, 21 bp, Homo sapiens
tatcaaatgctaatatacaag

SEQ ID NO: 33865 - DNA, 19 bp, Homo sapiens
aactgactctaagtagaga

SEQ ID NO: 33866 - DNA, 16 bp, Homo sapiens
gctgaacaaaccccga

SEQ ID NO: 33867 - DNA, 16 bp, Homo sapiens
tcctgaaacaacaggc

SEQ ID NO: 33868 - DNA, 22 bp, Homo sapiens
tttgatccacttgtttatcaga

SEQ ID NO: 33869 - DNA, 20 bp, Homo sapiens
gtatcattgatttgtaagca

SEQ ID NO: 33870 - DNA, 25 bp, Homo sapiens
tggtaataatacactactgtattat

SEQ ID NO: 33871 - DNA, 16 bp, Homo sapiens
aacaacaaaatcgggg

SEQ ID NO: 33872 - DNA, 21 bp, Homo sapiens
tgcacttgttttcttttttct

SEQ ID NO: 33873 - DNA, 24 bp, Homo sapiens
ctaccatccagtccttgtcctgca

SEQ ID NO: 33874 - DNA, 16 bp, Homo sapiens
cttgtggatgcaggca

SEQ ID NO: 33875 - DNA, 17 bp, Homo sapiens
caccacactgaatttct

SEQ ID NO: 33876 - DNA, 17 bp, Homo sapiens
ggcggagagattggcca

SEQ ID NO: 33877 - DNA, 16 bp, Homo sapiens
ttgcaagcctcgagcc

SEQ ID NO: 33878 - DNA, 20 bp, Homo sapiens
tgagttataccactgttcta

SEQ ID NO: 33879 - DNA, 20 bp, Homo sapiens
agctctggcatcatccacct

SEQ ID NO: 33880 - DNA, 18 bp, Homo sapiens
aaagaacacacaagcaca

SEQ ID NO: 33881 - DNA, 22 bp, Homo sapiens
taaattgcaaactgattggcca

SEQ ID NO: 33882 - DNA, 19 bp, Homo sapiens
aaaagtaatagaggagcag

SEQ ID NO: 33883 - DNA, 22 bp, Homo sapiens
acaggtaagaaaaatctttcat

SEQ ID NO: 33884 - DNA, 19 bp, Homo sapiens
gcttacttcagagaataaa

SEQ ID NO: 33885 - DNA, 21 bp, Homo sapiens
ctcactagagagaaaatgtgc

SEQ ID NO: 33886 - DNA, 24 bp, Homo sapiens
agtaatttattttgcttttaacag

SEQ ID NO: 33887 - DNA, 16 bp, Homo sapiens
tgctggttccaactgc

SEQ ID NO: 33888 - DNA, 25 bp, Homo sapiens
gagtggatataaaagtaagttctta

SEQ ID NO: 33889 - DNA, 16 bp, Homo sapiens
attggggttcaatgac

SEQ ID NO: 33890 - DNA, 23 bp, Homo sapiens
tgtttatttggttaagtgtaaat

SEQ ID NO: 33891 - DNA, 21 bp, Homo sapiens
tgcggcatctatgttattact

SEQ ID NO: 33892 - DNA, 28 bp, Homo sapiens
aaacatatttttcaacatataattattc

SEQ ID NO: 33893 - DNA, 19 bp, Homo sapiens
ccattggactttcaaaaat

SEQ ID NO: 33894 - DNA, 16 bp, Homo sapiens
aggtttccacatgtct

SEQ ID NO: 33895 - DNA, 19 bp, Homo sapiens
tgaagggtgatgttgaaaa

SEQ ID NO: 33896 - DNA, 23 bp, Homo sapiens
atgcccattctagtgaccaatga

SEQ ID NO: 33897 - DNA, 17 bp, Homo sapiens
cagcagaccccttctag

SEQ ID NO: 33898 - DNA, 22 bp, Homo sapiens
aagcaatgttattgatgaaaac

SEQ ID NO: 33899 - DNA, 17 bp, Homo sapiens
gccatctcctgctcttg

SEQ ID NO: 33900 - DNA, 18 bp, Homo sapiens
aacatcttctgaactact

SEQ ID NO: 33901 - DNA, 20 bp, Homo sapiens
gtgctcatatttaaaagctg

SEQ ID NO: 33902 - DNA, 17 bp, Homo sapiens
cgggtcactgctaacct

SEQ ID NO: 33903 - DNA, 23 bp, Homo sapiens
tattaataattttctgtaatcta

SEQ ID NO: 33904 - DNA, 19 bp, Homo sapiens
cgcctcatcataacgcaag

SEQ ID NO: 33905 - DNA, 24 bp, Homo sapiens
accacaaaaggctcttgataagca

SEQ ID NO: 33906 - DNA, 16 bp, Homo sapiens
tagcgcggagacccac

SEQ ID NO: 33907 - DNA, 22 bp, Homo sapiens
gttacaagaaaaatctgcagag

SEQ ID NO: 33908 - DNA, 21 bp, Homo sapiens
ggtgctcaaccatttattatc

SEQ ID NO: 33909 - DNA, 18 bp, Homo sapiens
ttcaaataatcccgccta

SEQ ID NO: 33910 - DNA, 22 bp, Homo sapiens
gtcgatattttgcagcaatatt

SEQ ID NO: 33911 - DNA, 21 bp, Homo sapiens
gttcagtgtgaagcccttgat

SEQ ID NO: 33912 - DNA, 21 bp, Homo sapiens
aaaaacctgataaagttagtt

SEQ ID NO: 33913 - DNA, 24 bp, Homo sapiens
ctacagcaatctcattaaattact

SEQ ID NO: 33914 - DNA, 18 bp, Homo sapiens
tttactacacagcacatt

SEQ ID NO: 33915 - DNA, 23 bp, Homo sapiens
ggcatatgatattttcctgaatg

SEQ ID NO: 33916 - DNA, 24 bp, Homo sapiens
tcttttttaaacaagaggtttaat

SEQ ID NO: 33917 - DNA, 19 bp, Homo sapiens
ccttttggcatttcagaat

SEQ ID NO: 33918 - DNA, 24 bp, Homo sapiens
gtaaaataatcttctgacatcagt

SEQ ID NO: 33919 - DNA, 21 bp, Homo sapiens
gggttggtattaaaaagcaaa

SEQ ID NO: 33920 - DNA, 16 bp, Homo sapiens
cacaatgttttgctct

SEQ ID NO: 33921 - DNA, 23 bp, Homo sapiens
tttaaaatatttgaagaattatg

SEQ ID NO: 33922 - DNA, 21 bp, Homo sapiens
ccccaaaatgttttcgttaaa

SEQ ID NO: 33923 - DNA, 22 bp, Homo sapiens
aacctgatttccagaaagatat

SEQ ID NO: 33924 - DNA, 19 bp, Homo sapiens
tatctctatcctagagcac

SEQ ID NO: 33925 - DNA, 19 bp, Homo sapiens
ttgtggtatgaagatgaaa

SEQ ID NO: 33926 - DNA, 16 bp, Homo sapiens
gaagaccaccccccca

SEQ ID NO: 33927 - DNA, 22 bp, Homo sapiens
ttagcctacttttatattgaaa

SEQ ID NO: 33928 - DNA, 16 bp, Homo sapiens
aatcggcaggcaatca

SEQ ID NO: 33929 - DNA, 20 bp, Homo sapiens
tgaggtaattgtttttggca

SEQ ID NO: 33930 - DNA, 23 bp, Homo sapiens
tgacgaagaattcagggaatgtt

SEQ ID NO: 33931 - DNA, 20 bp, Homo sapiens
aagattattagcagaaatcc

SEQ ID NO: 33932 - DNA, 23 bp, Homo sapiens
taaaaactggtaatcttttcaat

SEQ ID NO: 33933 - DNA, 19 bp, Homo sapiens
agctgatgcagtctggaat

SEQ ID NO: 33934 - DNA, 19 bp, Homo sapiens
tgacaacaaaatctgttac

SEQ ID NO: 33935 - DNA, 22 bp, Homo sapiens
ttattgattaatttctgcttaa

SEQ ID NO: 33936 - DNA, 16 bp, Homo sapiens
cctggttaccctctct

SEQ ID NO: 33937 - DNA, 18 bp, Homo sapiens
aatgctttcttcaacatc

SEQ ID NO: 33938 - DNA, 21 bp, Homo sapiens
aacattttcttcttggatttt

SEQ ID NO: 33939 - DNA, 17 bp, Homo sapiens
gacttcgggtcacggtc

SEQ ID NO: 33940 - DNA, 20 bp, Homo sapiens
tacgatataacattctgtga

SEQ ID NO: 33941 - DNA, 21 bp, Homo sapiens
gctatttgaatgtgatagaga

SEQ ID NO: 33942 - DNA, 18 bp, Homo sapiens
aaaactgccttctgacaa

SEQ ID NO: 33943 - DNA, 22 bp, Homo sapiens
cttaatcttacttttaaggttg

SEQ ID NO: 33944 - DNA, 22 bp, Homo sapiens
ccactgccttcaacagaataaa

SEQ ID NO: 33945 - DNA, 16 bp, Homo sapiens
ttccactgctatttgt

SEQ ID NO: 33946 - DNA, 21 bp, Homo sapiens
ttagcagattgtagtacatct

SEQ ID NO: 33947 - DNA, 17 bp, Homo sapiens
tgctcagcccattaact

SEQ ID NO: 33948 - DNA, 19 bp, Homo sapiens
tttccagagtttcaacctt

SEQ ID NO: 33949 - DNA, 17 bp, Homo sapiens
ggcttcagtggttttgt

SEQ ID NO: 33950 - DNA, 22 bp, Homo sapiens
taaacactgcttccacaatgcc

SEQ ID NO: 33951 - DNA, 17 bp, Homo sapiens
ttgggtgctatgtgatt

SEQ ID NO: 33952 - DNA, 16 bp, Homo sapiens
ttgccttctactcaca

SEQ ID NO: 33953 - DNA, 18 bp, Homo sapiens
ggcagcaaattcataaga

SEQ ID NO: 33954 - DNA, 18 bp, Homo sapiens
tttgcaacacatctgtca

SEQ ID NO: 33955 - DNA, 23 bp, Homo sapiens
tagtatatagattgtatactagt

SEQ ID NO: 33956 - DNA, 22 bp, Homo sapiens
atacaataaagaagctggccga

SEQ ID NO: 33957 - DNA, 17 bp, Homo sapiens
tctcttctttgccttcc

SEQ ID NO: 33958 - DNA, 20 bp, Homo sapiens
acatgaatcagaacaagtgt

SEQ ID NO: 33959 - DNA, 16 bp, Homo sapiens
acctagcaatggactt

SEQ ID NO: 33960 - DNA, 18 bp, Homo sapiens
gctctacaattagaacac

SEQ ID NO: 33961 - DNA, 21 bp, Homo sapiens
gtctggaacttcatatgatac

SEQ ID NO: 33962 - DNA, 22 bp, Homo sapiens
ctctttgtaatttcctgtttgt

SEQ ID NO: 33963 - DNA, 22 bp, Homo sapiens
tattctttaagttattcttaat

SEQ ID NO: 33964 - DNA, 17 bp, Homo sapiens
cttggctcacaaagtcc

SEQ ID NO: 33965 - DNA, 17 bp, Homo sapiens
agagaaaggcgagactg

SEQ ID NO: 33966 - DNA, 20 bp, Homo sapiens
cacaagtataaagaaagttt

SEQ ID NO: 33967 - DNA, 18 bp, Homo sapiens
tgactgctatgaaaagta

SEQ ID NO: 33968 - DNA, 20 bp, Homo sapiens
acactaagattaaatcagca

SEQ ID NO: 33969 - DNA, 23 bp, Homo sapiens
attcattgctaatttttttgttt

SEQ ID NO: 33970 - DNA, 19 bp, Homo sapiens
actcacctttctgaattag

SEQ ID NO: 33971 - DNA, 19 bp, Homo sapiens
ggtcattaaacatctctct

SEQ ID NO: 33972 - DNA, 24 bp, Homo sapiens
tgaatccttggtaatactttatac

SEQ ID NO: 33973 - DNA, 19 bp, Homo sapiens
ccccattttagctttgtgg

SEQ ID NO: 33974 - DNA, 21 bp, Homo sapiens
ttttaaaggtcacctagttca

SEQ ID NO: 33975 - DNA, 19 bp, Homo sapiens
tctagggttagcagaacca

SEQ ID NO: 33976 - DNA, 18 bp, Homo sapiens
cccatcatgagggtattt

SEQ ID NO: 33977 - DNA, 17 bp, Homo sapiens
aatggcgcagctttaag

SEQ ID NO: 33978 - DNA, 20 bp, Homo sapiens
tgccaacatttaaaattcaa

SEQ ID NO: 33979 - DNA, 20 bp, Homo sapiens
aggagatgaaagagaaggat

SEQ ID NO: 33980 - DNA, 17 bp, Homo sapiens
atgttggtggatggttc

SEQ ID NO: 33981 - DNA, 17 bp, Homo sapiens
tacctaagggtcttttg

SEQ ID NO: 33982 - DNA, 18 bp, Homo sapiens
actgtttcaatttcacct

SEQ ID NO: 33983 - DNA, 16 bp, Homo sapiens
acattcctgctgggct

SEQ ID NO: 33984 - DNA, 21 bp, Homo sapiens
caaggctgttgtatctttgat

SEQ ID NO: 33985 - DNA, 18 bp, Homo sapiens
gtagtctcgtttagaaat

SEQ ID NO: 33986 - DNA, 20 bp, Homo sapiens
ctacactgtccatgtagctc

SEQ ID NO: 33987 - DNA, 16 bp, Homo sapiens
acaccggcaagtatgt

SEQ ID NO: 33988 - DNA, 20 bp, Homo sapiens
agcactttgcaggacatgat

SEQ ID NO: 33989 - DNA, 27 bp, Homo sapiens
gttaattgacttttaaaacaatataaa

SEQ ID NO: 33990 - DNA, 19 bp, Homo sapiens
cttgcatcacatatttcct

SEQ ID NO: 33991 - DNA, 18 bp, Homo sapiens
cttctgatgagcttttga

SEQ ID NO: 33992 - DNA, 22 bp, Homo sapiens
tgccaatactcttacaaggcct

SEQ ID NO: 33993 - DNA, 21 bp, Homo sapiens
tgtatatggcttcaaaaagaa

SEQ ID NO: 33994 - DNA, 18 bp, Homo sapiens
aagtagaagatgccttga

SEQ ID NO: 33995 - DNA, 24 bp, Homo sapiens
actgacaacaaaagaatttttaaa

SEQ ID NO: 33996 - DNA, 16 bp, Homo sapiens
tccgacatggttactg

SEQ ID NO: 33997 - DNA, 18 bp, Homo sapiens
atcaaggtctgtagagca

SEQ ID NO: 33998 - DNA, 20 bp, Homo sapiens
tctttttcacatctatgctg

SEQ ID NO: 33999 - DNA, 18 bp, Homo sapiens
tcttctttcaagttcaag

SEQ ID NO: 34000 - DNA, 21 bp, Homo sapiens
ttttctaaactctgaacagta

SEQ ID NO: 34001 - DNA, 16 bp, Homo sapiens
agctgcatagccacca

SEQ ID NO: 34002 - DNA, 17 bp, Homo sapiens
ggcagagtcaggttgtt

SEQ ID NO: 34003 - DNA, 20 bp, Homo sapiens
ggctttttgcatattctaaa

SEQ ID NO: 34004 - DNA, 18 bp, Homo sapiens
ggtgtagctgaaattagt

SEQ ID NO: 34005 - DNA, 21 bp, Homo sapiens
agctgaaaatcaacctataag

SEQ ID NO: 34006 - DNA, 21 bp, Homo sapiens
aacgatcaattgtaaaaatca

SEQ ID NO: 34007 - DNA, 18 bp, Homo sapiens
tctgtagactgtgcaact

SEQ ID NO: 34008 - DNA, 25 bp, Homo sapiens
attttttgccttaataatatttaaa

SEQ ID NO: 34009 - DNA, 18 bp, Homo sapiens
agtgacaaaaggcatact

SEQ ID NO: 34010 - DNA, 19 bp, Homo sapiens
gagttgctttaggacatct

SEQ ID NO: 34011 - DNA, 19 bp, Homo sapiens
tccctgatagcatttatga

SEQ ID NO: 34012 - DNA, 23 bp, Homo sapiens
caagtgtggactccaattcagat

SEQ ID NO: 34013 - DNA, 17 bp, Homo sapiens
tttttctgaggtgggga

SEQ ID NO: 34014 - DNA, 25 bp, Homo sapiens
aatttaaatttcaattttaggatgc

SEQ ID NO: 34015 - DNA, 18 bp, Homo sapiens
tgaggaatcactggtttt

SEQ ID NO: 34016 - DNA, 21 bp, Homo sapiens
aaatttgcttttgatgtttgc

SEQ ID NO: 34017 - DNA, 19 bp, Homo sapiens
gcatgtagaatctagtcaa

SEQ ID NO: 34018 - DNA, 24 bp, Homo sapiens
gtatgaagagaatgtctaaaattt

SEQ ID NO: 34019 - DNA, 18 bp, Homo sapiens
tcaaccaacaagtgagca

SEQ ID NO: 34020 - DNA, 17 bp, Homo sapiens
tggaaagctaccatgtt

SEQ ID NO: 34021 - DNA, 17 bp, Homo sapiens
ttaatggctgtcattga

SEQ ID NO: 34022 - DNA, 18 bp, Homo sapiens
cccttcccttctcacaga

SEQ ID NO: 34023 - DNA, 22 bp, Homo sapiens
ttaacatgctgttatatgtaag

SEQ ID NO: 34024 - DNA, 25 bp, Homo sapiens
tgagataatttctgttagacaaatt

SEQ ID NO: 34025 - DNA, 21 bp, Homo sapiens
accttaatcaattcaggaaca

SEQ ID NO: 34026 - DNA, 17 bp, Homo sapiens
aaccagaccacttctca

SEQ ID NO: 34027 - DNA, 23 bp, Homo sapiens
tattttcaggaatttttacattc

SEQ ID NO: 34028 - DNA, 18 bp, Homo sapiens
ggaggagcatttgagaca

SEQ ID NO: 34029 - DNA, 20 bp, Homo sapiens
ctccaactcttgcatgtcat

SEQ ID NO: 34030 - DNA, 18 bp, Homo sapiens
gctgttggctattttctt

SEQ ID NO: 34031 - DNA, 19 bp, Homo sapiens
tagatacatgtcaggcagg

SEQ ID NO: 34032 - DNA, 16 bp, Homo sapiens
tgacagtctcggtaat

SEQ ID NO: 34033 - DNA, 19 bp, Homo sapiens
cagctgatggaagtattgt

SEQ ID NO: 34034 - DNA, 16 bp, Homo sapiens
agcctctcatcagggt

SEQ ID NO: 34035 - DNA, 18 bp, Homo sapiens
ctcatgctgtcaatcaag

SEQ ID NO: 34036 - DNA, 18 bp, Homo sapiens
agatatgtgctcccaaac

SEQ ID NO: 34037 - DNA, 21 bp, Homo sapiens
gatctcaaaatgttgtaatca

SEQ ID NO: 34038 - DNA, 19 bp, Homo sapiens
tcttaccagataacagaat

SEQ ID NO: 34039 - DNA, 24 bp, Homo sapiens
aaataaagtatttactgctgtaat

SEQ ID NO: 34040 - DNA, 17 bp, Homo sapiens
cagattgtgtttgttct

SEQ ID NO: 34041 - DNA, 23 bp, Homo sapiens
ataagttacaatcatcgaaattg

SEQ ID NO: 34042 - DNA, 22 bp, Homo sapiens
aattactgtgaaatagaatagt

SEQ ID NO: 34043 - DNA, 22 bp, Homo sapiens
caataacgtccatccttgtaca

SEQ ID NO: 34044 - DNA, 22 bp, Homo sapiens
acataactattatttttcaaca

SEQ ID NO: 34045 - DNA, 18 bp, Homo sapiens
acctgggtttattttcga

SEQ ID NO: 34046 - DNA, 25 bp, Homo sapiens
ataggtttcatgataaaaattatta

SEQ ID NO: 34047 - DNA, 24 bp, Homo sapiens
tttacttattaattttaatacttt

SEQ ID NO: 34048 - DNA, 20 bp, Homo sapiens
agcaccttatgatttgcaat

SEQ ID NO: 34049 - DNA, 21 bp, Homo sapiens
tcagcctttctaaattacctt

SEQ ID NO: 34050 - DNA, 26 bp, Homo sapiens
ctaaatttaattcaatgacttaaaag

SEQ ID NO: 34051 - DNA, 16 bp, Homo sapiens
tctcgctgcagtctat

SEQ ID NO: 34052 - DNA, 21 bp, Homo sapiens
aactgaatgtacactgaaaga

SEQ ID NO: 34053 - DNA, 19 bp, Homo sapiens
ttgtttggtctgagattta

SEQ ID NO: 34054 - DNA, 17 bp, Homo sapiens
caggagaaatcagtcca

SEQ ID NO: 34055 - DNA, 21 bp, Homo sapiens
gaaaactaaaaggtattggta

SEQ ID NO: 34056 - DNA, 17 bp, Homo sapiens
tgaagcctagcagtagg

SEQ ID NO: 34057 - DNA, 21 bp, Homo sapiens
tgcattgtctaattttgtatg

SEQ ID NO: 34058 - DNA, 22 bp, Homo sapiens
tacttccaaattatccacaagt

SEQ ID NO: 34059 - DNA, 16 bp, Homo sapiens
tgagaagtgaagcagc

SEQ ID NO: 34060 - DNA, 22 bp, Homo sapiens
aaaacatataaaccttccttgc

SEQ ID NO: 34061 - DNA, 19 bp, Homo sapiens
gctttatctccaggaaaat

SEQ ID NO: 34062 - DNA, 20 bp, Homo sapiens
agtaactgaaataaacatct

SEQ ID NO: 34063 - DNA, 19 bp, Homo sapiens
ggaaaacaggatctttggc

SEQ ID NO: 34064 - DNA, 17 bp, Homo sapiens
acaaagtctaagttccc

SEQ ID NO: 34065 - DNA, 21 bp, Homo sapiens
ttactgagcttatctattttt

SEQ ID NO: 34066 - DNA, 19 bp, Homo sapiens
tcagacagacatccatttt

SEQ ID NO: 34067 - DNA, 23 bp, Homo sapiens
ctcctgcctgggcaatgagagag

SEQ ID NO: 34068 - DNA, 17 bp, Homo sapiens
tccatgctttgatagtg

SEQ ID NO: 34069 - DNA, 20 bp, Homo sapiens
tttgaccattttgagtcctc

SEQ ID NO: 34070 - DNA, 18 bp, Homo sapiens
cctcaaaggaatgcaaga

SEQ ID NO: 34071 - DNA, 23 bp, Homo sapiens
ggaaagatatcctcttcaattat

SEQ ID NO: 34072 - DNA, 22 bp, Homo sapiens
ttcttactttattctaagttct

SEQ ID NO: 34073 - DNA, 21 bp, Homo sapiens
aaaatggctcgtgctgagttt

SEQ ID NO: 34074 - DNA, 24 bp, Homo sapiens
taattttcttatactgtgattcag

SEQ ID NO: 34075 - DNA, 22 bp, Homo sapiens
tcctgatcaggatgtactccca

SEQ ID NO: 34076 - DNA, 23 bp, Homo sapiens
ttttatcattgtatctcacagtg

SEQ ID NO: 34077 - DNA, 23 bp, Homo sapiens
tttaaaatgcttacacataatac

SEQ ID NO: 34078 - DNA, 16 bp, Homo sapiens
atttctggccattgct

SEQ ID NO: 34079 - DNA, 19 bp, Homo sapiens
actcaggaataagtatgct

SEQ ID NO: 34080 - DNA, 18 bp, Homo sapiens
cagatttggcaaaagcct

SEQ ID NO: 34081 - DNA, 18 bp, Homo sapiens
tactggctctgggaacca

SEQ ID NO: 34082 - DNA, 17 bp, Homo sapiens
aagccaagtaaggaagt

SEQ ID NO: 34083 - DNA, 18 bp, Homo sapiens
ttttccttccgacgtcca

SEQ ID NO: 34084 - DNA, 16 bp, Homo sapiens
gttcaccctccattgt

SEQ ID NO: 34085 - DNA, 23 bp, Homo sapiens
aaccttcctccttcacagccttc

SEQ ID NO: 34086 - DNA, 18 bp, Homo sapiens
tggagaagctaacagact

SEQ ID NO: 34087 - DNA, 19 bp, Homo sapiens
tcacaaagctacctcagca

SEQ ID NO: 34088 - DNA, 16 bp, Homo sapiens
aacggtggggtgtttg

SEQ ID NO: 34089 - DNA, 20 bp, Homo sapiens
ttattggcgagtaaagcaca

SEQ ID NO: 34090 - DNA, 16 bp, Homo sapiens
gaaagaggatgcgggg

SEQ ID NO: 34091 - DNA, 22 bp, Homo sapiens
acttcctttaacttcttacagt

SEQ ID NO: 34092 - DNA, 21 bp, Homo sapiens
ttataagattagaccagttgt

SEQ ID NO: 34093 - DNA, 20 bp, Homo sapiens
ctgagatgagcattttaaac

SEQ ID NO: 34094 - DNA, 18 bp, Homo sapiens
agtgtctttggcagtttc

SEQ ID NO: 34095 - DNA, 21 bp, Homo sapiens
aacattgttatgatgtttaca

SEQ ID NO: 34096 - DNA, 17 bp, Homo sapiens
tggaagatgtagcgttg

SEQ ID NO: 34097 - DNA, 16 bp, Homo sapiens
ttcactgccaattaca

SEQ ID NO: 34098 - DNA, 22 bp, Homo sapiens
aaagatgtctttgttttcttcc

SEQ ID NO: 34099 - DNA, 18 bp, Homo sapiens
cacagtgttgtaaaaaga

SEQ ID NO: 34100 - DNA, 21 bp, Homo sapiens
gtcttcagtattggaacattg

SEQ ID NO: 34101 - DNA, 20 bp, Homo sapiens
tacggggcatgctagtaaaa

SEQ ID NO: 34102 - DNA, 17 bp, Homo sapiens
tgcaggtgttttattgt

SEQ ID NO: 34103 - DNA, 20 bp, Homo sapiens
aaatgaggttcattgcatct

SEQ ID NO: 34104 - DNA, 16 bp, Homo sapiens
actcatgtttttgggc

SEQ ID NO: 34105 - DNA, 19 bp, Homo sapiens
gctgggtatcctcagtatg

SEQ ID NO: 34106 - DNA, 18 bp, Homo sapiens
acaatgcccattgttaga

SEQ ID NO: 34107 - DNA, 19 bp, Homo sapiens
ccgagcttcaccttatgga

SEQ ID NO: 34108 - DNA, 22 bp, Homo sapiens
aaatcatgtaaatagatttttt

SEQ ID NO: 34109 - DNA, 17 bp, Homo sapiens
cactctaactttgtctt

SEQ ID NO: 34110 - DNA, 23 bp, Homo sapiens
tttttccaaaatttctgagacat

SEQ ID NO: 34111 - DNA, 21 bp, Homo sapiens
gtggtatttttccctagtttt

SEQ ID NO: 34112 - DNA, 17 bp, Homo sapiens
cagtaaatcacggtcca

SEQ ID NO: 34113 - DNA, 19 bp, Homo sapiens
actgttgaagtagagtatt

SEQ ID NO: 34114 - DNA, 24 bp, Homo sapiens
accgagatactaaactataataat

SEQ ID NO: 34115 - DNA, 17 bp, Homo sapiens
agacacatacctcgcat

SEQ ID NO: 34116 - DNA, 22 bp, Homo sapiens
caggtataaacttcactttcct

SEQ ID NO: 34117 - DNA, 17 bp, Homo sapiens
tggagaatgcagaaaac

SEQ ID NO: 34118 - DNA, 25 bp, Homo sapiens
ttaaagtatgtttatttagacataa

SEQ ID NO: 34119 - DNA, 23 bp, Homo sapiens
aataactatattaaatttggcaa

SEQ ID NO: 34120 - DNA, 21 bp, Homo sapiens
agcatatgcattcaataatgc

SEQ ID NO: 34121 - DNA, 22 bp, Homo sapiens
gacatcataattccaaatggta

SEQ ID NO: 34122 - DNA, 19 bp, Homo sapiens
ctctcatcactgtgagaat

SEQ ID NO: 34123 - DNA, 24 bp, Homo sapiens
ctacagatttttttttgaagggat

SEQ ID NO: 34124 - DNA, 17 bp, Homo sapiens
cccagttacagaggcag

SEQ ID NO: 34125 - DNA, 18 bp, Homo sapiens
aaaccccacttaacaaac

SEQ ID NO: 34126 - DNA, 22 bp, Homo sapiens
ctttcaatgagtatcttcgttt

SEQ ID NO: 34127 - DNA, 23 bp, Homo sapiens
catctatcacttaagaaccaaaa

SEQ ID NO: 34128 - DNA, 16 bp, Homo sapiens
aagtaactcaaggcct

SEQ ID NO: 34129 - DNA, 16 bp, Homo sapiens
gcactgaatactgcct

SEQ ID NO: 34130 - DNA, 21 bp, Homo sapiens
agggattagttctttctttgt

SEQ ID NO: 34131 - DNA, 19 bp, Homo sapiens
ttgattgcttcttattgta

SEQ ID NO: 34132 - DNA, 21 bp, Homo sapiens
agttctgaaacaatttcctcc

SEQ ID NO: 34133 - DNA, 27 bp, Homo sapiens
tactcagaaaaaaaagtatatttaaaa

SEQ ID NO: 34134 - DNA, 21 bp, Homo sapiens
agatttacaaaatgtacaaat

SEQ ID NO: 34135 - DNA, 21 bp, Homo sapiens
cgagtaagtagttgctattgt

SEQ ID NO: 34136 - DNA, 22 bp, Homo sapiens
ctggcaccttcaatatctccta

SEQ ID NO: 34137 - DNA, 20 bp, Homo sapiens
attctcaccaactgatttcc

SEQ ID NO: 34138 - DNA, 17 bp, Homo sapiens
atgaaatgggccagtta

SEQ ID NO: 34139 - DNA, 18 bp, Homo sapiens
gtgctgtgtatgatgtga

SEQ ID NO: 34140 - DNA, 24 bp, Homo sapiens
gatgtgaaaatatattcacaatag

SEQ ID NO: 34141 - DNA, 21 bp, Homo sapiens
aggtccactttaaagcatagg

SEQ ID NO: 34142 - DNA, 18 bp, Homo sapiens
ccatttttgccaggaaat

SEQ ID NO: 34143 - DNA, 16 bp, Homo sapiens
tggatgggtgaaatgc

SEQ ID NO: 34144 - DNA, 21 bp, Homo sapiens
aaagcattatagtgactcaca

SEQ ID NO: 34145 - DNA, 17 bp, Homo sapiens
ctcataggatatgggac

SEQ ID NO: 34146 - DNA, 22 bp, Homo sapiens
ttatgaatcaagtagcccttcc

SEQ ID NO: 34147 - DNA, 18 bp, Homo sapiens
tctactacgtagttgtgg

SEQ ID NO: 34148 - DNA, 23 bp, Homo sapiens
acacttttttgcaaaaagaaaaa

SEQ ID NO: 34149 - DNA, 20 bp, Homo sapiens
tgctatgttaaatgttatcc

SEQ ID NO: 34150 - DNA, 16 bp, Homo sapiens
tttctgaagtgtgtcc

SEQ ID NO: 34151 - DNA, 26 bp, Homo sapiens
agatttttgaatgcttatagatttct

SEQ ID NO: 34152 - DNA, 21 bp, Homo sapiens
ctttagttcaggcaagagaga

SEQ ID NO: 34153 - DNA, 20 bp, Homo sapiens
cactgtacattaggatagga

SEQ ID NO: 34154 - DNA, 22 bp, Homo sapiens
ccaaagaagcttctacaaaaag

SEQ ID NO: 34155 - DNA, 17 bp, Homo sapiens
ctggtctcgaacacttg

SEQ ID NO: 34156 - DNA, 17 bp, Homo sapiens
ttgggctctaatgagac

SEQ ID NO: 34157 - DNA, 16 bp, Homo sapiens
gccactgtgaccagcc

SEQ ID NO: 34158 - DNA, 19 bp, Homo sapiens
gccaaagaaaaagatattc

SEQ ID NO: 34159 - DNA, 21 bp, Homo sapiens
gagcggcaggtatcattaaaa

SEQ ID NO: 34160 - DNA, 27 bp, Homo sapiens
tgattattattaattatgtttcatttt

SEQ ID NO: 34161 - DNA, 22 bp, Homo sapiens
gaacagaaagatctagtctcat

SEQ ID NO: 34162 - DNA, 25 bp, Homo sapiens
attttaaaatttgtttaagttttgt

SEQ ID NO: 34163 - DNA, 16 bp, Homo sapiens
agtggactcctcttga

SEQ ID NO: 34164 - DNA, 22 bp, Homo sapiens
cccattagttcatacctctatt

SEQ ID NO: 34165 - DNA, 19 bp, Homo sapiens
gctgggctcagtagtcctc

SEQ ID NO: 34166 - DNA, 16 bp, Homo sapiens
cctggtagggagcgtg

SEQ ID NO: 34167 - DNA, 21 bp, Homo sapiens
gcccgggccggctgcatgccg

SEQ ID NO: 34168 - DNA, 23 bp, Homo sapiens
gaagggtggcgagcacaggcagg

SEQ ID NO: 34169 - DNA, 24 bp, Homo sapiens
gttggttgctgcgtgccggggcgg

SEQ ID NO: 34170 - DNA, 18 bp, Homo sapiens
agcttgcctggagaaagg

SEQ ID NO: 34171 - DNA, 23 bp, Homo sapiens
ggagcgtgcttcccgctgcgggg

SEQ ID NO: 34172 - DNA, 21 bp, Homo sapiens
cgggcagataggaggcggcat

SEQ ID NO: 34173 - DNA, 17 bp, Homo sapiens
gtctctgccgcgccagg

SEQ ID NO: 34174 - DNA, 22 bp, Homo sapiens
agggagagcgggaggcgcgggg

SEQ ID NO: 34175 - DNA, 17 bp, Homo sapiens
cggttttccatcttcca

SEQ ID NO: 34176 - DNA, 16 bp, Homo sapiens
gaatgctcccagccaa

SEQ ID NO: 34177 - DNA, 24 bp, Homo sapiens
ataaatcacattgacacagaaaaa

SEQ ID NO: 34178 - DNA, 18 bp, Homo sapiens
aaatgttcaagcaattga

SEQ ID NO: 34179 - DNA, 20 bp, Homo sapiens
ccgaaacattgactgcagga

SEQ ID NO: 34180 - DNA, 18 bp, Homo sapiens
gtatgactatatggctgc

SEQ ID NO: 34181 - DNA, 19 bp, Homo sapiens
tagcttcaacgtagttggc

SEQ ID NO: 34182 - DNA, 23 bp, Homo sapiens
aactgttgcaaatccaacatata

SEQ ID NO: 34183 - DNA, 18 bp, Homo sapiens
gccatacatccagccttc

SEQ ID NO: 34184 - DNA, 16 bp, Homo sapiens
aagtttgtggagtcag

SEQ ID NO: 34185 - DNA, 23 bp, Homo sapiens
ttgaaggacacctcatctgcatc

SEQ ID NO: 34186 - DNA, 22 bp, Homo sapiens
aagtatttcctattttgtgggt

SEQ ID NO: 34187 - DNA, 22 bp, Homo sapiens
gaaagttttctgatatcattaa

SEQ ID NO: 34188 - DNA, 16 bp, Homo sapiens
tacccaacagacaacg

SEQ ID NO: 34189 - DNA, 20 bp, Homo sapiens
agaaggtttggttaaaaaaa

SEQ ID NO: 34190 - DNA, 20 bp, Homo sapiens
cccctttttttcagcttaca

SEQ ID NO: 34191 - DNA, 25 bp, Homo sapiens
attaagaataatttatttaagtgag

SEQ ID NO: 34192 - DNA, 21 bp, Homo sapiens
cagctgctaaacacagattaa

SEQ ID NO: 34193 - DNA, 16 bp, Homo sapiens
tgggatggaagatacc

SEQ ID NO: 34194 - DNA, 23 bp, Homo sapiens
ttttctttgatttctctttttgg

SEQ ID NO: 34195 - DNA, 16 bp, Homo sapiens
gtggtttttgcatgtt

SEQ ID NO: 34196 - DNA, 17 bp, Homo sapiens
tttgcagtctcaacagg

SEQ ID NO: 34197 - DNA, 21 bp, Homo sapiens
ctccacaattctagtcttttc

SEQ ID NO: 34198 - DNA, 16 bp, Homo sapiens
tgagcattcagaagca

SEQ ID NO: 34199 - DNA, 23 bp, Homo sapiens
gtactcaaagcatctcttatagt

SEQ ID NO: 34200 - DNA, 24 bp, Homo sapiens
cagcgccggagccgggagcagtca

SEQ ID NO: 34201 - DNA, 22 bp, Homo sapiens
ccaaaatcagcgccaggcactt

SEQ ID NO: 34202 - DNA, 21 bp, Homo sapiens
catagaaatttcatgtttgct

SEQ ID NO: 34203 - DNA, 18 bp, Homo sapiens
cgaaaggtggtggtctgg

SEQ ID NO: 34204 - DNA, 17 bp, Homo sapiens
ccatgcttggcaaagat

SEQ ID NO: 34205 - DNA, 22 bp, Homo sapiens
gcttagtgcactggcagatcgt

SEQ ID NO: 34206 - DNA, 21 bp, Homo sapiens
aaataagaaagacaaacctac

SEQ ID NO: 34207 - DNA, 20 bp, Homo sapiens
aagtaagttttgctcactag

SEQ ID NO: 34208 - DNA, 20 bp, Homo sapiens
tgactatgatccagcagaag

SEQ ID NO: 34209 - DNA, 22 bp, Homo sapiens
aatggaaaactctggagggaag

SEQ ID NO: 34210 - DNA, 19 bp, Homo sapiens
tgatcactggtttcccttt

SEQ ID NO: 34211 - DNA, 19 bp, Homo sapiens
tggtgatgtttatgttgta

SEQ ID NO: 34212 - DNA, 19 bp, Homo sapiens
tggtggttgttaaaattca

SEQ ID NO: 34213 - DNA, 19 bp, Homo sapiens
gcttcgggactggatgttg

SEQ ID NO: 34214 - DNA, 20 bp, Homo sapiens
cctctgaggaaaagacatga

SEQ ID NO: 34215 - DNA, 18 bp, Homo sapiens
cgccagacacgtaaacct

SEQ ID NO: 34216 - DNA, 20 bp, Homo sapiens
atcagctttgtaaactatga

SEQ ID NO: 34217 - DNA, 19 bp, Homo sapiens
gaggaaagtggtagaaatg

SEQ ID NO: 34218 - DNA, 19 bp, Homo sapiens
gtcctttatgttttgactt

SEQ ID NO: 34219 - DNA, 18 bp, Homo sapiens
cctatcactgaacgagta

SEQ ID NO: 34220 - DNA, 23 bp, Homo sapiens
ttaaagttaatcccctcccccaa

SEQ ID NO: 34221 - DNA, 22 bp, Homo sapiens
atatcatgaagactttgagaaa

SEQ ID NO: 34222 - DNA, 19 bp, Homo sapiens
gtcattccgtttttgttcc

SEQ ID NO: 34223 - DNA, 18 bp, Homo sapiens
aagggatatagtcacacc

SEQ ID NO: 34224 - DNA, 24 bp, Homo sapiens
cactgaagtcctgcatgttcttct

SEQ ID NO: 34225 - DNA, 16 bp, Homo sapiens
ctcaacggtgagtcag

SEQ ID NO: 34226 - DNA, 22 bp, Homo sapiens
gaagcaacccttgtgtttctca

SEQ ID NO: 34227 - DNA, 17 bp, Homo sapiens
aaggcaaagctgcctat

SEQ ID NO: 34228 - DNA, 23 bp, Homo sapiens
ttatgaaaatatgatggtgtgac

SEQ ID NO: 34229 - DNA, 20 bp, Homo sapiens
ccactcattcacggtctctc

SEQ ID NO: 34230 - DNA, 20 bp, Homo sapiens
cagccaatcctaaagaattc

SEQ ID NO: 34231 - DNA, 19 bp, Homo sapiens
ctatccatctctatctgct

SEQ ID NO: 34232 - DNA, 22 bp, Homo sapiens
tctcatctcgggggtatccaat

SEQ ID NO: 34233 - DNA, 19 bp, Homo sapiens
aaaattggtcatgtgtctc

SEQ ID NO: 34234 - DNA, 21 bp, Homo sapiens
ctatcagaataaagaacctga

SEQ ID NO: 34235 - DNA, 23 bp, Homo sapiens
gttgaataagtgcaaatttttat

SEQ ID NO: 34236 - DNA, 16 bp, Homo sapiens
ggagagagctaagcgc

SEQ ID NO: 34237 - DNA, 23 bp, Homo sapiens
tgcatttttctcttttaaaattt

SEQ ID NO: 34238 - DNA, 21 bp, Homo sapiens
cttccctaggtattgtacaaa

SEQ ID NO: 34239 - DNA, 24 bp, Homo sapiens
tgttaaaatgttattttccaagtt

SEQ ID NO: 34240 - DNA, 19 bp, Homo sapiens
ctaagtgatgattttcaga

SEQ ID NO: 34241 - DNA, 21 bp, Homo sapiens
cgagctaatgttttcttggtt

SEQ ID NO: 34242 - DNA, 24 bp, Homo sapiens
cattttaatagctttaccttcagt

SEQ ID NO: 34243 - DNA, 18 bp, Homo sapiens
tgcttttctcatgttctc

SEQ ID NO: 34244 - DNA, 18 bp, Homo sapiens
agaagtaaaatcactgtg

SEQ ID NO: 34245 - DNA, 16 bp, Homo sapiens
aaagagtgaaacgcaa

SEQ ID NO: 34246 - DNA, 23 bp, Homo sapiens
ggacaaggaagaatttttaaaga

SEQ ID NO: 34247 - DNA, 18 bp, Homo sapiens
acaggtgttatacaaaga

SEQ ID NO: 34248 - DNA, 22 bp, Homo sapiens
ggtacaaccatgtttgccaggg

SEQ ID NO: 34249 - DNA, 23 bp, Homo sapiens
ccccaacttgcaatataattaat

SEQ ID NO: 34250 - DNA, 16 bp, Homo sapiens
gttttcttgattgcgt

SEQ ID NO: 34251 - DNA, 18 bp, Homo sapiens
gctttcttcttgagaggt

SEQ ID NO: 34252 - DNA, 18 bp, Homo sapiens
ttgctttccccaggttct

SEQ ID NO: 34253 - DNA, 18 bp, Homo sapiens
acagtaaatgtagtgtga

SEQ ID NO: 34254 - DNA, 16 bp, Homo sapiens
ggggaaagccaccgca

SEQ ID NO: 34255 - DNA, 19 bp, Homo sapiens
ttaacctgggacagggtta

SEQ ID NO: 34256 - DNA, 22 bp, Homo sapiens
tctttttctttttggctttttg

SEQ ID NO: 34257 - DNA, 18 bp, Homo sapiens
cttttgtttctcaagaca

SEQ ID NO: 34258 - DNA, 17 bp, Homo sapiens
ttggggccctaaagata

SEQ ID NO: 34259 - DNA, 21 bp, Homo sapiens
tctgcatctcaggagtgacag

SEQ ID NO: 34260 - DNA, 20 bp, Homo sapiens
cacttaacttccttaggaaa

SEQ ID NO: 34261 - DNA, 17 bp, Homo sapiens
aggctagaagtagccca

SEQ ID NO: 34262 - DNA, 18 bp, Homo sapiens
ctttagctgtcactcccg

SEQ ID NO: 34263 - DNA, 23 bp, Homo sapiens
tttaagttgtctttaaaaagtag

SEQ ID NO: 34264 - DNA, 20 bp, Homo sapiens
tttttctggatgctttctca

SEQ ID NO: 34265 - DNA, 20 bp, Homo sapiens
atcagtaagtagtttttttc

SEQ ID NO: 34266 - DNA, 17 bp, Homo sapiens
acaaggaagttgacctt

SEQ ID NO: 34267 - DNA, 24 bp, Homo sapiens
ttgtgtttgactcgctccatctcg

SEQ ID NO: 34268 - DNA, 22 bp, Homo sapiens
aaagtagctggtggcattttgt

SEQ ID NO: 34269 - DNA, 17 bp, Homo sapiens
tggaaatggtgttaggc

SEQ ID NO: 34270 - DNA, 19 bp, Homo sapiens
ctgagatggagagagtcaa

SEQ ID NO: 34271 - DNA, 24 bp, Homo sapiens
gctaaagaaagaagttcacaaaat

SEQ ID NO: 34272 - DNA, 16 bp, Homo sapiens
tcgcacaggtgttata

SEQ ID NO: 34273 - DNA, 27 bp, Homo sapiens
atcatgaaatagtttttaaaatcagta

SEQ ID NO: 34274 - DNA, 19 bp, Homo sapiens
gaccttacccttaaaacct

SEQ ID NO: 34275 - DNA, 19 bp, Homo sapiens
ttcttgattgtgtttgact

SEQ ID NO: 34276 - DNA, 21 bp, Homo sapiens
ttgtcagcatataacttctgg

SEQ ID NO: 34277 - DNA, 18 bp, Homo sapiens
ttgcccatgttttctttg

SEQ ID NO: 34278 - DNA, 16 bp, Homo sapiens
aggctagaagtagccc

SEQ ID NO: 34279 - DNA, 16 bp, Homo sapiens
tcactcccgagatgga

SEQ ID NO: 34280 - DNA, 23 bp, Homo sapiens
ttcacaaaatttaagttgtcttt

SEQ ID NO: 34281 - DNA, 17 bp, Homo sapiens
ggatgctttcttatcgc

SEQ ID NO: 34282 - DNA, 26 bp, Homo sapiens
aagttttcaaaatcattaaataagta

SEQ ID NO: 34283 - DNA, 21 bp, Homo sapiens
gtgttttttcctcatccttaa

SEQ ID NO: 34284 - DNA, 18 bp, Homo sapiens
ttgtgtttgactctttcc

SEQ ID NO: 34285 - DNA, 16 bp, Homo sapiens
aagtagtcggtggcat

SEQ ID NO: 34286 - DNA, 21 bp, Homo sapiens
tgttttctttgtataacacct

SEQ ID NO: 34287 - DNA, 17 bp, Homo sapiens
aaaaccttagctcggta

SEQ ID NO: 34288 - DNA, 21 bp, Homo sapiens
tgggaaagtatatccttttgt

SEQ ID NO: 34289 - DNA, 17 bp, Homo sapiens
aacctggggacaggaat

SEQ ID NO: 34290 - DNA, 23 bp, Homo sapiens
gggcttcaaacaaaaataaataa

SEQ ID NO: 34291 - DNA, 22 bp, Homo sapiens
atgactgattgattgctttttt

SEQ ID NO: 34292 - DNA, 23 bp, Homo sapiens
tttttcccctttctttccaaaat

SEQ ID NO: 34293 - DNA, 17 bp, Homo sapiens
ctaacttactctcttcc

SEQ ID NO: 34294 - DNA, 19 bp, Homo sapiens
gagtgatggggattggaat

SEQ ID NO: 34295 - DNA, 19 bp, Homo sapiens
agatgtctttaggctcaaa

SEQ ID NO: 34296 - DNA, 18 bp, Homo sapiens
tggggaaaactgattcat

SEQ ID NO: 34297 - DNA, 17 bp, Homo sapiens
aatccccatcactccag

SEQ ID NO: 34298 - DNA, 17 bp, Homo sapiens
attgggatgagttgatt

SEQ ID NO: 34299 - DNA, 18 bp, Homo sapiens
ctggatgctttcttgtgt

SEQ ID NO: 34300 - DNA, 28 bp, Homo sapiens
acatttttttaaataattaaagggattt

SEQ ID NO: 34301 - DNA, 18 bp, Homo sapiens
gttttataccaggttccc

SEQ ID NO: 34302 - DNA, 18 bp, Homo sapiens
tgtgtttgactctctcca

SEQ ID NO: 34303 - DNA, 16 bp, Homo sapiens
tgcctgaacagagagg

SEQ ID NO: 34304 - DNA, 16 bp, Homo sapiens
agcgagtcaaactcaa

SEQ ID NO: 34305 - DNA, 22 bp, Homo sapiens
agttgatgtgattaaaaaaaga

SEQ ID NO: 34306 - DNA, 21 bp, Homo sapiens
gcacacagatattgtacaaag

SEQ ID NO: 34307 - DNA, 24 bp, Homo sapiens
gatgttctgttttgtagaaattat

SEQ ID NO: 34308 - DNA, 19 bp, Homo sapiens
tttttaggttaagtctacc

SEQ ID NO: 34309 - DNA, 22 bp, Homo sapiens
gctaaagttttcttgattgagt

SEQ ID NO: 34310 - DNA, 19 bp, Homo sapiens
gttactgaggtacttcatc

SEQ ID NO: 34311 - DNA, 19 bp, Homo sapiens
gagtccccttgctcaagtt

SEQ ID NO: 34312 - DNA, 17 bp, Homo sapiens
aatttcacaccagaact

SEQ ID NO: 34313 - DNA, 19 bp, Homo sapiens
cctatcactccagagatgg

SEQ ID NO: 34314 - DNA, 25 bp, Homo sapiens
atttggtatcattattttcattata

SEQ ID NO: 34315 - DNA, 19 bp, Homo sapiens
gtactttcttgtatctcac

SEQ ID NO: 34316 - DNA, 24 bp, Homo sapiens
ataaaattaagggatttttttttt

SEQ ID NO: 34317 - DNA, 16 bp, Homo sapiens
tcccccatttccttcc

SEQ ID NO: 34318 - DNA, 19 bp, Homo sapiens
tcttgattgcgtttgactc

SEQ ID NO: 34319 - DNA, 25 bp, Homo sapiens
aaaaaagtaaaaacattatccttac

SEQ ID NO: 34320 - DNA, 19 bp, Homo sapiens
ttctttgtacaaaacctgt

SEQ ID NO: 34321 - DNA, 16 bp, Homo sapiens
tgagagagtcaaacgc

SEQ ID NO: 34322 - DNA, 21 bp, Homo sapiens
ataatacacaacacacacaga

SEQ ID NO: 34323 - DNA, 18 bp, Homo sapiens
acaggttatgtacaaaga

SEQ ID NO: 34324 - DNA, 22 bp, Homo sapiens
gttattgtggtaaattttttat

SEQ ID NO: 34325 - DNA, 21 bp, Homo sapiens
tgctatctaaaggatttacgg

SEQ ID NO: 34326 - DNA, 18 bp, Homo sapiens
cgagctaaagttctcttg

SEQ ID NO: 34327 - DNA, 23 bp, Homo sapiens
gaatgttatatttgagagctaga

SEQ ID NO: 34328 - DNA, 18 bp, Homo sapiens
tggaatgcctgttcccaa

SEQ ID NO: 34329 - DNA, 19 bp, Homo sapiens
ttatctacttttgcaacct

SEQ ID NO: 34330 - DNA, 16 bp, Homo sapiens
gaagtgaaacgtgtga

SEQ ID NO: 34331 - DNA, 21 bp, Homo sapiens
atccccaaggcatggaagctc

SEQ ID NO: 34332 - DNA, 18 bp, Homo sapiens
tttaaatctgcaggtgaa

SEQ ID NO: 34333 - DNA, 16 bp, Homo sapiens
ttgagagatggccagt

SEQ ID NO: 34334 - DNA, 18 bp, Homo sapiens
atgtacatgttgggaaga

SEQ ID NO: 34335 - DNA, 16 bp, Homo sapiens
tgcttctgcgtctcct

SEQ ID NO: 34336 - DNA, 16 bp, Homo sapiens
gtataaagcctgcgtt

SEQ ID NO: 34337 - DNA, 22 bp, Homo sapiens
ttgtcctattgcttccttatac

SEQ ID NO: 34338 - DNA, 20 bp, Homo sapiens
atgactctagccactgtgtg

SEQ ID NO: 34339 - DNA, 16 bp, Homo sapiens
aggaacggctatcgga

SEQ ID NO: 34340 - DNA, 18 bp, Homo sapiens
gtgacagaggctttgagt

SEQ ID NO: 34341 - DNA, 16 bp, Homo sapiens
ctgtgttaacactgtc

SEQ ID NO: 34342 - DNA, 22 bp, Homo sapiens
gcagaaaatattgcaagtgcat

SEQ ID NO: 34343 - DNA, 17 bp, Homo sapiens
cacaaaagccatgtgtc

SEQ ID NO: 34344 - DNA, 23 bp, Homo sapiens
gtttcactctcatcatctcaggt

SEQ ID NO: 34345 - DNA, 16 bp, Homo sapiens
tggaaatgtcaggtgc

SEQ ID NO: 34346 - DNA, 19 bp, Homo sapiens
tgcgtgtaaaagaaaatca

SEQ ID NO: 34347 - DNA, 21 bp, Homo sapiens
cactgctagtattactgagga

SEQ ID NO: 34348 - DNA, 18 bp, Homo sapiens
taccagtgtgaccttaaa

SEQ ID NO: 34349 - DNA, 18 bp, Homo sapiens
aaagaggagagtgaaatg

SEQ ID NO: 34350 - DNA, 22 bp, Homo sapiens
aaaacaaagcaatgttgaaatc

SEQ ID NO: 34351 - DNA, 16 bp, Homo sapiens
cgagctgaaattcttc

SEQ ID NO: 34352 - DNA, 22 bp, Homo sapiens
tgcatagacttttttttaaaga

SEQ ID NO: 34353 - DNA, 23 bp, Homo sapiens
taatttttcctttactgttttta

SEQ ID NO: 34354 - DNA, 20 bp, Homo sapiens
tctccacaaaattcttatca

SEQ ID NO: 34355 - DNA, 22 bp, Homo sapiens
cccagagatgaattgggcacac

SEQ ID NO: 34356 - DNA, 21 bp, Homo sapiens
cgtattatgagactgttttgg

SEQ ID NO: 34357 - DNA, 16 bp, Homo sapiens
ccccactgcaagcctg

SEQ ID NO: 34358 - DNA, 18 bp, Homo sapiens
ttggaatctattcccaga

SEQ ID NO: 34359 - DNA, 21 bp, Homo sapiens
gcctgtgggctgtgccttaca

SEQ ID NO: 34360 - DNA, 20 bp, Homo sapiens
aagggctaaaatagcctatt

SEQ ID NO: 34361 - DNA, 22 bp, Homo sapiens
tcccggactctctgtatctctg

SEQ ID NO: 34362 - DNA, 19 bp, Homo sapiens
ccctaacatccttggacag

SEQ ID NO: 34363 - DNA, 21 bp, Homo sapiens
gcatcttccttgtactttttc

SEQ ID NO: 34364 - DNA, 19 bp, Homo sapiens
ccaaagtgctgggaataca

SEQ ID NO: 34365 - DNA, 18 bp, Homo sapiens
gtggttgatactccagag

SEQ ID NO: 34366 - DNA, 21 bp, Homo sapiens
ggaaaaactgatctgaagaat

SEQ ID NO: 34367 - DNA, 19 bp, Homo sapiens
ttcggtgttgttttacaga

SEQ ID NO: 34368 - DNA, 19 bp, Homo sapiens
tgattggggtttatgagtg

SEQ ID NO: 34369 - DNA, 21 bp, Homo sapiens
cacctcttaatcaaatcaagc

SEQ ID NO: 34370 - DNA, 19 bp, Homo sapiens
acttgttgggcatgaatga

SEQ ID NO: 34371 - DNA, 19 bp, Homo sapiens
aggaagaaatatctgttga

SEQ ID NO: 34372 - DNA, 16 bp, Homo sapiens
tctgctgattgcttat

SEQ ID NO: 34373 - DNA, 16 bp, Homo sapiens
agggccaggaatgcta

SEQ ID NO: 34374 - DNA, 22 bp, Homo sapiens
gatgttcaagaatgccattgta

SEQ ID NO: 34375 - DNA, 17 bp, Homo sapiens
cctggaactggaagtca

SEQ ID NO: 34376 - DNA, 20 bp, Homo sapiens
actttatgtccttaaagtta

SEQ ID NO: 34377 - DNA, 18 bp, Homo sapiens
agcatttaggtacctttt

SEQ ID NO: 34378 - DNA, 18 bp, Homo sapiens
ctggcaatatcagtagca

SEQ ID NO: 34379 - DNA, 16 bp, Homo sapiens
actggggtggcgtgtt

SEQ ID NO: 34380 - DNA, 22 bp, Homo sapiens
atggcattcaggcctcttcctt

SEQ ID NO: 34381 - DNA, 17 bp, Homo sapiens
acttcatcctaccacac

SEQ ID NO: 34382 - DNA, 23 bp, Homo sapiens
tattttatgtaatggttaacaat

SEQ ID NO: 34383 - DNA, 19 bp, Homo sapiens
tgaaatggaagatacacct

SEQ ID NO: 34384 - DNA, 24 bp, Homo sapiens
tctgtttttctctgttctctgttt

SEQ ID NO: 34385 - DNA, 17 bp, Homo sapiens
agaaagagtacaggaaa

SEQ ID NO: 34386 - DNA, 17 bp, Homo sapiens
atgaattacgtgcaggc

SEQ ID NO: 34387 - DNA, 18 bp, Homo sapiens
ctttgcctgagagaatca

SEQ ID NO: 34388 - DNA, 17 bp, Homo sapiens
ctttgctcttagcatgt

SEQ ID NO: 34389 - DNA, 22 bp, Homo sapiens
gcctgtattcatatttttactt

SEQ ID NO: 34390 - DNA, 21 bp, Homo sapiens
acggatgctttcctctagatc

SEQ ID NO: 34391 - DNA, 22 bp, Homo sapiens
gttacatgtcaaatatgcaact

SEQ ID NO: 34392 - DNA, 23 bp, Homo sapiens
cacatgagaacccaatttgaaac

SEQ ID NO: 34393 - DNA, 20 bp, Homo sapiens
aggaaagattatgaagagtc

SEQ ID NO: 34394 - DNA, 17 bp, Homo sapiens
tgagtgtcactagtgca

SEQ ID NO: 34395 - DNA, 25 bp, Homo sapiens
atattgtaataaagattttttttta

SEQ ID NO: 34396 - DNA, 18 bp, Homo sapiens
acctcgcttgctatttta

SEQ ID NO: 34397 - DNA, 18 bp, Homo sapiens
gagcccatacatagaaaa

SEQ ID NO: 34398 - DNA, 22 bp, Homo sapiens
caggccagtcaggtttctgcct

SEQ ID NO: 34399 - DNA, 24 bp, Homo sapiens
agacaaagtatttcaagtacaatc

SEQ ID NO: 34400 - DNA, 22 bp, Homo sapiens
aaaaaataactgaaccatagga

SEQ ID NO: 34401 - DNA, 16 bp, Homo sapiens
acgtacatcactgcca

SEQ ID NO: 34402 - DNA, 20 bp, Homo sapiens
gtttcatcagctaccacttt

SEQ ID NO: 34403 - DNA, 21 bp, Homo sapiens
gtgaaatacaaagaaaagtat

SEQ ID NO: 34404 - DNA, 17 bp, Homo sapiens
gttcagtagtgtgatgg

SEQ ID NO: 34405 - DNA, 19 bp, Homo sapiens
aactgctgtctaggaattg

SEQ ID NO: 34406 - DNA, 18 bp, Homo sapiens
ctgctgagactctttggc

SEQ ID NO: 34407 - DNA, 17 bp, Homo sapiens
gtggcaatgagatgcca

SEQ ID NO: 34408 - DNA, 17 bp, Homo sapiens
ttcctcgttccttttca

SEQ ID NO: 34409 - DNA, 24 bp, Homo sapiens
ataacataagaatttgtttcaaaa

SEQ ID NO: 34410 - DNA, 17 bp, Homo sapiens
tacccgataatctggag

SEQ ID NO: 34411 - DNA, 18 bp, Homo sapiens
tctcaaacaatggaggga

SEQ ID NO: 34412 - DNA, 16 bp, Homo sapiens
ccgccttcccctcagt

SEQ ID NO: 34413 - DNA, 16 bp, Homo sapiens
ccagaggaaaaatcgg

SEQ ID NO: 34414 - DNA, 23 bp, Homo sapiens
acgtctaatctaaagaggaaaaa

SEQ ID NO: 34415 - DNA, 20 bp, Homo sapiens
ctcttttaggtgaagctgct

SEQ ID NO: 34416 - DNA, 17 bp, Homo sapiens
tcctgtttagtgtttgc

SEQ ID NO: 34417 - DNA, 19 bp, Homo sapiens
acttcttcttgtactggta

SEQ ID NO: 34418 - DNA, 18 bp, Homo sapiens
ttggaagaatacactcaa

SEQ ID NO: 34419 - DNA, 16 bp, Homo sapiens
aacccgtgactgacat

SEQ ID NO: 34420 - DNA, 19 bp, Homo sapiens
gagaagaagatgcatctgg

SEQ ID NO: 34421 - DNA, 20 bp, Homo sapiens
acgtgatttcctttcttccc

SEQ ID NO: 34422 - DNA, 22 bp, Homo sapiens
gctgtttctggagcaaatgact

SEQ ID NO: 34423 - DNA, 17 bp, Homo sapiens
gacgatgggctatctca

SEQ ID NO: 34424 - DNA, 19 bp, Homo sapiens
attcatgatcagagactcc

SEQ ID NO: 34425 - DNA, 17 bp, Homo sapiens
gccttctggctactatg

SEQ ID NO: 34426 - DNA, 19 bp, Homo sapiens
gtttttgcttaatggttat

SEQ ID NO: 34427 - DNA, 18 bp, Homo sapiens
cagccagctctacaaagt

SEQ ID NO: 34428 - DNA, 21 bp, Homo sapiens
gttggataatattgtgagtgt

SEQ ID NO: 34429 - DNA, 18 bp, Homo sapiens
taggttaaataccgagaa

SEQ ID NO: 34430 - DNA, 18 bp, Homo sapiens
tggcaaataccatgttat

SEQ ID NO: 34431 - DNA, 17 bp, Homo sapiens
tccccaattcccaaatt

SEQ ID NO: 34432 - DNA, 18 bp, Homo sapiens
agcatctttcatgacttt

SEQ ID NO: 34433 - DNA, 25 bp, Homo sapiens
taatagattatatgatcactctatg

SEQ ID NO: 34434 - DNA, 18 bp, Homo sapiens
tgcccttttctttatcga

SEQ ID NO: 34435 - DNA, 24 bp, Homo sapiens
agagggaaacgagaaaaggccctc

SEQ ID NO: 34436 - DNA, 17 bp, Homo sapiens
ggtcgcccagacataga

SEQ ID NO: 34437 - DNA, 22 bp, Homo sapiens
gtactattacagacccagcatc

SEQ ID NO: 34438 - DNA, 17 bp, Homo sapiens
caggtggagtacagagc

SEQ ID NO: 34439 - DNA, 21 bp, Homo sapiens
ggtcttttataatctcctcac

SEQ ID NO: 34440 - DNA, 20 bp, Homo sapiens
aacagccattgccaaggcat

SEQ ID NO: 34441 - DNA, 17 bp, Homo sapiens
ggctgccttcttggcca

SEQ ID NO: 34442 - DNA, 16 bp, Homo sapiens
cagccaaacaggccag

SEQ ID NO: 34443 - DNA, 16 bp, Homo sapiens
cttccttgcggtgctt

SEQ ID NO: 34444 - DNA, 16 bp, Homo sapiens
ccaaagagaacctgca

SEQ ID NO: 34445 - DNA, 16 bp, Homo sapiens
caggtgatggttgcct

SEQ ID NO: 34446 - DNA, 18 bp, Homo sapiens
aagcctctctcttgagta

SEQ ID NO: 34447 - DNA, 18 bp, Homo sapiens
cacccttacctcactggc

SEQ ID NO: 34448 - DNA, 17 bp, Homo sapiens
agccactgtggtgtaat

SEQ ID NO: 34449 - DNA, 19 bp, Homo sapiens
aggcagaagaatcacttga

SEQ ID NO: 34450 - DNA, 17 bp, Homo sapiens
acatgctatggaagtgg

SEQ ID NO: 34451 - DNA, 21 bp, Homo sapiens
ccactaactttttgaaactac

SEQ ID NO: 34452 - DNA, 18 bp, Homo sapiens
gaagtttgtcaaggagaa

SEQ ID NO: 34453 - DNA, 18 bp, Homo sapiens
ccaatctgggttccactg

SEQ ID NO: 34454 - DNA, 21 bp, Homo sapiens
ctctgttcccagcttcctcta

SEQ ID NO: 34455 - DNA, 19 bp, Homo sapiens
catcactttgcttcttggc

SEQ ID NO: 34456 - DNA, 16 bp, Homo sapiens
atggggagcatggatt

SEQ ID NO: 34457 - DNA, 19 bp, Homo sapiens
gatggagtagttggatttt

SEQ ID NO: 34458 - DNA, 17 bp, Homo sapiens
tgcaggacacaaatgac

SEQ ID NO: 34459 - DNA, 21 bp, Homo sapiens
aaagccaataaatactgggtc

SEQ ID NO: 34460 - DNA, 18 bp, Homo sapiens
acccgggacactgttcac

SEQ ID NO: 34461 - DNA, 21 bp, Homo sapiens
ttgatggtaagagtgaagcta

SEQ ID NO: 34462 - DNA, 19 bp, Homo sapiens
aacaagtacaaggaccatg

SEQ ID NO: 34463 - DNA, 21 bp, Homo sapiens
attctacagtcaagtggcatt

SEQ ID NO: 34464 - DNA, 21 bp, Homo sapiens
cttccctcttgggagaacgcc

SEQ ID NO: 34465 - DNA, 16 bp, Homo sapiens
tgcttggtcacttcct

SEQ ID NO: 34466 - DNA, 21 bp, Homo sapiens
ctggcgaagactgtcagcaac

SEQ ID NO: 34467 - DNA, 19 bp, Homo sapiens
gagccctgtgccaagtgct

SEQ ID NO: 34468 - DNA, 16 bp, Homo sapiens
tgtcaaggaaagagga

SEQ ID NO: 34469 - DNA, 20 bp, Homo sapiens
agagctcattaaggcatctg

SEQ ID NO: 34470 - DNA, 17 bp, Homo sapiens
ccagcagagctaaagaa

SEQ ID NO: 34471 - DNA, 18 bp, Homo sapiens
ctgggggttacctcagac

SEQ ID NO: 34472 - DNA, 17 bp, Homo sapiens
tagtattgtcaacgctg

SEQ ID NO: 34473 - DNA, 16 bp, Homo sapiens
caggtacggcatggca

SEQ ID NO: 34474 - DNA, 18 bp, Homo sapiens
aggaaaaaacccttttga

SEQ ID NO: 34475 - DNA, 16 bp, Homo sapiens
gcttgactgctggcgc

SEQ ID NO: 34476 - DNA, 23 bp, Homo sapiens
tctgtcactgatgacaaaaacac

SEQ ID NO: 34477 - DNA, 18 bp, Homo sapiens
tgatggaagcagctcttc

SEQ ID NO: 34478 - DNA, 22 bp, Homo sapiens
tcttctatcacagtttgaatat

SEQ ID NO: 34479 - DNA, 22 bp, Homo sapiens
gaagatggccctgagtgaggtt

SEQ ID NO: 34480 - DNA, 16 bp, Homo sapiens
aatgcccagcttcctc

SEQ ID NO: 34481 - DNA, 20 bp, Homo sapiens
ttaaagtattcctgagggcg

SEQ ID NO: 34482 - DNA, 17 bp, Homo sapiens
tcctcattctggtagca

SEQ ID NO: 34483 - DNA, 22 bp, Homo sapiens
cttgaggaactcccggtccagc

SEQ ID NO: 34484 - DNA, 17 bp, Homo sapiens
tgccaagtcatccctgc

SEQ ID NO: 34485 - DNA, 24 bp, Homo sapiens
tcctcctctccttctcggatctca

SEQ ID NO: 34486 - DNA, 17 bp, Homo sapiens
cgaagccaacaaagccc

SEQ ID NO: 34487 - DNA, 22 bp, Homo sapiens
aattattcattgtatttctcag

SEQ ID NO: 34488 - DNA, 18 bp, Homo sapiens
gcctactgaatcaagtga

SEQ ID NO: 34489 - DNA, 20 bp, Homo sapiens
ctcctgtcttacatcgcttt

SEQ ID NO: 34490 - DNA, 22 bp, Homo sapiens
aatcatgatttgagatgttttg

SEQ ID NO: 34491 - DNA, 17 bp, Homo sapiens
aggagtccacttccagt

SEQ ID NO: 34492 - DNA, 18 bp, Homo sapiens
actagctgcataaattgt

SEQ ID NO: 34493 - DNA, 16 bp, Homo sapiens
atcaaagcagccaagg

SEQ ID NO: 34494 - DNA, 22 bp, Homo sapiens
ctcttgctttggaatcaatcac

SEQ ID NO: 34495 - DNA, 22 bp, Homo sapiens
acagctgaaatacaaagaagta

SEQ ID NO: 34496 - DNA, 22 bp, Homo sapiens
tgtgtcctacagaagctggtaa

SEQ ID NO: 34497 - DNA, 18 bp, Homo sapiens
atgctcagtatgctgcta

SEQ ID NO: 34498 - DNA, 17 bp, Homo sapiens
tttgtaggcgtccttgg

SEQ ID NO: 34499 - DNA, 17 bp, Homo sapiens
ccgtcttaaggagcatt

SEQ ID NO: 34500 - DNA, 22 bp, Homo sapiens
gtgcagttggatttatttcttt

SEQ ID NO: 34501 - DNA, 16 bp, Homo sapiens
ttgctgcatgtccgca

SEQ ID NO: 34502 - DNA, 21 bp, Homo sapiens
tttaagccactaagttttagg

SEQ ID NO: 34503 - DNA, 23 bp, Homo sapiens
gatcctttataaattggaataca

SEQ ID NO: 34504 - DNA, 19 bp, Homo sapiens
tcattagaaggaggccaag

SEQ ID NO: 34505 - DNA, 19 bp, Homo sapiens
ttatacattgagaagcatg

SEQ ID NO: 34506 - DNA, 19 bp, Homo sapiens
tgacttcatctttaacctt

SEQ ID NO: 34507 - DNA, 21 bp, Homo sapiens
ttcatagaattctctttcctt

SEQ ID NO: 34508 - DNA, 23 bp, Homo sapiens
tgtggtgtagcctctgggtttgg

SEQ ID NO: 34509 - DNA, 18 bp, Homo sapiens
gagaatcctgtgcataac

SEQ ID NO: 34510 - DNA, 23 bp, Homo sapiens
ttacctcaattgtggatactcca

SEQ ID NO: 34511 - DNA, 16 bp, Homo sapiens
tagtctcccagacttt

SEQ ID NO: 34512 - DNA, 20 bp, Homo sapiens
cttctcttccacaatttaga

SEQ ID NO: 34513 - DNA, 22 bp, Homo sapiens
gagtttgagaaggtattcagtg

SEQ ID NO: 34514 - DNA, 18 bp, Homo sapiens
tggtgtttcaagaggaca

SEQ ID NO: 34515 - DNA, 18 bp, Homo sapiens
tgtagtacgcaggtgttc

SEQ ID NO: 34516 - DNA, 23 bp, Homo sapiens
tatagtaaacatttccagttagg

SEQ ID NO: 34517 - DNA, 24 bp, Homo sapiens
atcacctttggccacattcagaga

SEQ ID NO: 34518 - DNA, 18 bp, Homo sapiens
gaaattctgcgtccagat

SEQ ID NO: 34519 - DNA, 21 bp, Homo sapiens
tgaagccagcatgggcaggga

SEQ ID NO: 34520 - DNA, 18 bp, Homo sapiens
tgcatggacagagaaaat

SEQ ID NO: 34521 - DNA, 21 bp, Homo sapiens
tccaagacttcttctaaacct

SEQ ID NO: 34522 - DNA, 16 bp, Homo sapiens
agagccgtgttctttt

SEQ ID NO: 34523 - DNA, 19 bp, Homo sapiens
gcgaattgtagagagcagt

SEQ ID NO: 34524 - DNA, 19 bp, Homo sapiens
ccgcacatatgtgagtaca

SEQ ID NO: 34525 - DNA, 16 bp, Homo sapiens
catcttggcactagat

SEQ ID NO: 34526 - DNA, 16 bp, Homo sapiens
tctgctggctaagacc

SEQ ID NO: 34527 - DNA, 18 bp, Homo sapiens
gaacaacccaatatcata

SEQ ID NO: 34528 - DNA, 17 bp, Homo sapiens
gctgattatgagcagcg

SEQ ID NO: 34529 - DNA, 20 bp, Homo sapiens
acatctcatgagaaactggg

SEQ ID NO: 34530 - DNA, 24 bp, Homo sapiens
gacatttttgtgtagccttgaagt

SEQ ID NO: 34531 - DNA, 19 bp, Homo sapiens
tacctgactgatctggtcg

SEQ ID NO: 34532 - DNA, 16 bp, Homo sapiens
gccactagagatgaca

SEQ ID NO: 34533 - DNA, 20 bp, Homo sapiens
ggtatttatctttccgctgc

SEQ ID NO: 34534 - DNA, 17 bp, Homo sapiens
ggcatttcaagtatgca

SEQ ID NO: 34535 - DNA, 18 bp, Homo sapiens
tgaaaacttaggatggct

SEQ ID NO: 34536 - DNA, 20 bp, Homo sapiens
aaagaagtatttgaaaggac

SEQ ID NO: 34537 - DNA, 20 bp, Homo sapiens
tctgagacttctttagggaa

SEQ ID NO: 34538 - DNA, 22 bp, Homo sapiens
cttaagataatcatagcctgct

SEQ ID NO: 34539 - DNA, 18 bp, Homo sapiens
acctcattcatcaattga

SEQ ID NO: 34540 - DNA, 20 bp, Homo sapiens
gaatatgtgttagttctatg

SEQ ID NO: 34541 - DNA, 20 bp, Homo sapiens
ttgaaatctgactttgtcct

SEQ ID NO: 34542 - DNA, 19 bp, Homo sapiens
ttaaaacccaagagtttcc

SEQ ID NO: 34543 - DNA, 16 bp, Homo sapiens
ctgatttcactctggc

SEQ ID NO: 34544 - DNA, 21 bp, Homo sapiens
ctagaagccatgatagggatg

SEQ ID NO: 34545 - DNA, 21 bp, Homo sapiens
cttctcccaggtaaaatataa

SEQ ID NO: 34546 - DNA, 19 bp, Homo sapiens
caggtatatgtcgaatgga

SEQ ID NO: 34547 - DNA, 22 bp, Homo sapiens
tactaacttattgctgtttgga

SEQ ID NO: 34548 - DNA, 22 bp, Homo sapiens
agagtcttgttcttttcagcca

SEQ ID NO: 34549 - DNA, 27 bp, Homo sapiens
attgttttaatactttattattttata

SEQ ID NO: 34550 - DNA, 17 bp, Homo sapiens
gccaagtcaagtcttct

SEQ ID NO: 34551 - DNA, 23 bp, Homo sapiens
gttgaaattcactcacttagcaa

SEQ ID NO: 34552 - DNA, 20 bp, Homo sapiens
tggaggtccattcctgatcg

SEQ ID NO: 34553 - DNA, 22 bp, Homo sapiens
aaatctagccaagagtttcttc

SEQ ID NO: 34554 - DNA, 24 bp, Homo sapiens
tgtgttttttataacagataaaat

SEQ ID NO: 34555 - DNA, 28 bp, Homo sapiens
gggaatatgaatttatatgtgaaaatag

SEQ ID NO: 34556 - DNA, 16 bp, Homo sapiens
tctccagaaagaagcc

SEQ ID NO: 34557 - DNA, 18 bp, Homo sapiens
gctcggtggtggaaatgc

SEQ ID NO: 34558 - DNA, 17 bp, Homo sapiens
gctctacaactcaccat

SEQ ID NO: 34559 - DNA, 24 bp, Homo sapiens
tgtagttctccttgtattttatct

SEQ ID NO: 34560 - DNA, 20 bp, Homo sapiens
tgtctatcatcgcaaagtca

SEQ ID NO: 34561 - DNA, 20 bp, Homo sapiens
taatgtaaatatggcttctt

SEQ ID NO: 34562 - DNA, 18 bp, Homo sapiens
gaaacatttcaaaagacc

SEQ ID NO: 34563 - DNA, 24 bp, Homo sapiens
tatatgtatatgtatatggtgagt

SEQ ID NO: 34564 - DNA, 20 bp, Homo sapiens
ttaacttggtagtttttttg

SEQ ID NO: 34565 - DNA, 21 bp, Homo sapiens
ctttactgatgtcatctgtga

SEQ ID NO: 34566 - DNA, 20 bp, Homo sapiens
tgtattcatgggaaaaccag

SEQ ID NO: 34567 - DNA, 17 bp, Homo sapiens
cgtgtggtatttccctt

SEQ ID NO: 34568 - DNA, 19 bp, Homo sapiens
agttttccctagtgttctt

SEQ ID NO: 34569 - DNA, 21 bp, Homo sapiens
tgtttgggcatttttttttct

SEQ ID NO: 34570 - DNA, 16 bp, Homo sapiens
ccggttccagatacgc

SEQ ID NO: 34571 - DNA, 18 bp, Homo sapiens
actatggatatggctgaa

SEQ ID NO: 34572 - DNA, 21 bp, Homo sapiens
tctctcttctgcatttatttc

SEQ ID NO: 34573 - DNA, 21 bp, Homo sapiens
cccatcacaacagaagaaaaa

SEQ ID NO: 34574 - DNA, 16 bp, Homo sapiens
caagacctgtaggtgg

SEQ ID NO: 34575 - DNA, 17 bp, Homo sapiens
ctgatgaggattggcgt

SEQ ID NO: 34576 - DNA, 20 bp, Homo sapiens
gcatcatcaaaacacaaaag

SEQ ID NO: 34577 - DNA, 19 bp, Homo sapiens
atcttgtactttttctgag

SEQ ID NO: 34578 - DNA, 17 bp, Homo sapiens
atggtcagtgaggtaag

SEQ ID NO: 34579 - DNA, 20 bp, Homo sapiens
ctttaagagaatagctctgc

SEQ ID NO: 34580 - DNA, 16 bp, Homo sapiens
tcatcacgctggaaac

SEQ ID NO: 34581 - DNA, 20 bp, Homo sapiens
tgagctctctgatcagaggt

SEQ ID NO: 34582 - DNA, 17 bp, Homo sapiens
cacctcactttcttcta

SEQ ID NO: 34583 - DNA, 16 bp, Homo sapiens
tcagtgctgaattccc

SEQ ID NO: 34584 - DNA, 21 bp, Homo sapiens
tgaatggttagaaatgaatga

SEQ ID NO: 34585 - DNA, 21 bp, Homo sapiens
atgcttcaaggctgtggtctg

SEQ ID NO: 34586 - DNA, 22 bp, Homo sapiens
aaacgcatataacaaaaaaaca

SEQ ID NO: 34587 - DNA, 16 bp, Homo sapiens
tttaagagccaagcga

SEQ ID NO: 34588 - DNA, 16 bp, Homo sapiens
gttgcagccaggacaa

SEQ ID NO: 34589 - DNA, 23 bp, Homo sapiens
ggtctacagagctgcaggcaaga

SEQ ID NO: 34590 - DNA, 19 bp, Homo sapiens
caggcacatataatcaccc

SEQ ID NO: 34591 - DNA, 18 bp, Homo sapiens
taacatgcccatgaaaca

SEQ ID NO: 34592 - DNA, 22 bp, Homo sapiens
cttacctgactctgaagcttct

SEQ ID NO: 34593 - DNA, 18 bp, Homo sapiens
ttgcagtgggagggctcc

SEQ ID NO: 34594 - DNA, 19 bp, Homo sapiens
aagtaaagattgacttctg

SEQ ID NO: 34595 - DNA, 19 bp, Homo sapiens
agaaaaggagggtgcagga

SEQ ID NO: 34596 - DNA, 19 bp, Homo sapiens
ccagaatacagaaaagtgc

SEQ ID NO: 34597 - DNA, 20 bp, Homo sapiens
tattttacctgccgcagttg

SEQ ID NO: 34598 - DNA, 19 bp, Homo sapiens
cctatacactgataaggca

SEQ ID NO: 34599 - DNA, 21 bp, Homo sapiens
attcagtttgtactggtcaat

SEQ ID NO: 34600 - DNA, 20 bp, Homo sapiens
tgaatcccttaaatgattaa

SEQ ID NO: 34601 - DNA, 20 bp, Homo sapiens
cagatgtgtcttcagttctt

SEQ ID NO: 34602 - DNA, 16 bp, Homo sapiens
aaagccctgctcagct

SEQ ID NO: 34603 - DNA, 18 bp, Homo sapiens
gtatttgtctcgcatctt

SEQ ID NO: 34604 - DNA, 17 bp, Homo sapiens
tgctgagcttagttaaa

SEQ ID NO: 34605 - DNA, 17 bp, Homo sapiens
gtgataatctgctcaag

SEQ ID NO: 34606 - DNA, 16 bp, Homo sapiens
ttggctgcttcctgta

SEQ ID NO: 34607 - DNA, 16 bp, Homo sapiens
aagatcccttctgcct

SEQ ID NO: 34608 - DNA, 20 bp, Homo sapiens
gctatatttctgtgtttgcc

SEQ ID NO: 34609 - DNA, 19 bp, Homo sapiens
gggggtaattatgcattgt

SEQ ID NO: 34610 - DNA, 18 bp, Homo sapiens
ttaagaagtgttgctact

SEQ ID NO: 34611 - DNA, 16 bp, Homo sapiens
ccatgtcaggagtgtc

SEQ ID NO: 34612 - DNA, 20 bp, Homo sapiens
gaaactctgtctcaaaaaaa

SEQ ID NO: 34613 - DNA, 22 bp, Homo sapiens
attgtggcatccttctcccaca

SEQ ID NO: 34614 - DNA, 16 bp, Homo sapiens
cacaccccaagtgatc

SEQ ID NO: 34615 - DNA, 24 bp, Homo sapiens
tgcttatcagaaaaggctgttcaa

SEQ ID NO: 34616 - DNA, 24 bp, Homo sapiens
ttttttttctttagttgatctaca

SEQ ID NO: 34617 - DNA, 18 bp, Homo sapiens
gcgtcttggtaagactac

SEQ ID NO: 34618 - DNA, 18 bp, Homo sapiens
gtagagactagggatgaa

SEQ ID NO: 34619 - DNA, 18 bp, Homo sapiens
tcccacatagcggcaatg

SEQ ID NO: 34620 - DNA, 16 bp, Homo sapiens
aagacacaagaggctg

SEQ ID NO: 34621 - DNA, 22 bp, Homo sapiens
atcttgaagaagtctgatttgt

SEQ ID NO: 34622 - DNA, 17 bp, Homo sapiens
tgtaccacaaactgaaa

SEQ ID NO: 34623 - DNA, 20 bp, Homo sapiens
atgtattagagaccgaatga

SEQ ID NO: 34624 - DNA, 16 bp, Homo sapiens
cccctactaaatgcct

SEQ ID NO: 34625 - DNA, 16 bp, Homo sapiens
acccacctcactgaca

SEQ ID NO: 34626 - DNA, 19 bp, Homo sapiens
ttcctcccctcttccttat

SEQ ID NO: 34627 - DNA, 18 bp, Homo sapiens
gggagttgtatggatctt

SEQ ID NO: 34628 - DNA, 24 bp, Homo sapiens
cctaaatgaaataactctcatttt

SEQ ID NO: 34629 - DNA, 20 bp, Homo sapiens
accaagaaatatcagtatca

SEQ ID NO: 34630 - DNA, 17 bp, Homo sapiens
gccccaaagatgttcca

SEQ ID NO: 34631 - DNA, 23 bp, Homo sapiens
tggtatgtaagtttacaactgaa

SEQ ID NO: 34632 - DNA, 18 bp, Homo sapiens
tgcttttgcagttcaagt

SEQ ID NO: 34633 - DNA, 21 bp, Homo sapiens
actcaatatgtctcttggaga

SEQ ID NO: 34634 - DNA, 22 bp, Homo sapiens
tcttttctatttggagaaatgt

SEQ ID NO: 34635 - DNA, 17 bp, Homo sapiens
actctccggacgtggac

SEQ ID NO: 34636 - DNA, 22 bp, Homo sapiens
gacttttctacatacttaatcc

SEQ ID NO: 34637 - DNA, 18 bp, Homo sapiens
gttcataggcttctttgt

SEQ ID NO: 34638 - DNA, 19 bp, Homo sapiens
ctcacttcaaacacatcaa

SEQ ID NO: 34639 - DNA, 20 bp, Homo sapiens
tctatcaggttgaaccttga

SEQ ID NO: 34640 - DNA, 16 bp, Homo sapiens
tacaaaaccagcctgc

SEQ ID NO: 34641 - DNA, 18 bp, Homo sapiens
tctcctgccaccccacct

SEQ ID NO: 34642 - DNA, 21 bp, Homo sapiens
agctcagatcagttacttgat

SEQ ID NO: 34643 - DNA, 18 bp, Homo sapiens
tgctcatgtaacgggtgt

SEQ ID NO: 34644 - DNA, 21 bp, Homo sapiens
gtgagcataagtgtattaagt

SEQ ID NO: 34645 - DNA, 16 bp, Homo sapiens
tccagtgggcagggtg

SEQ ID NO: 34646 - DNA, 21 bp, Homo sapiens
gaggaaagatagattatgctc

SEQ ID NO: 34647 - DNA, 18 bp, Homo sapiens
caactaccaaaaccgtgg

SEQ ID NO: 34648 - DNA, 20 bp, Homo sapiens
ttatacaaggtcaggtcaag

SEQ ID NO: 34649 - DNA, 21 bp, Homo sapiens
ttctttctgcaccaggctgtc

SEQ ID NO: 34650 - DNA, 20 bp, Homo sapiens
gatttctgctgggcactctc

SEQ ID NO: 34651 - DNA, 20 bp, Homo sapiens
taccgttattttttttaaag

SEQ ID NO: 34652 - DNA, 17 bp, Homo sapiens
ccggtccagatccacgg

SEQ ID NO: 34653 - DNA, 16 bp, Homo sapiens
ttggacaagccacagt

SEQ ID NO: 34654 - DNA, 21 bp, Homo sapiens
gtgcacatagtcatagtggta

SEQ ID NO: 34655 - DNA, 17 bp, Homo sapiens
cgtgcaggctgtcaaaa

SEQ ID NO: 34656 - DNA, 19 bp, Homo sapiens
tctggtttcccagttagaa

SEQ ID NO: 34657 - DNA, 19 bp, Homo sapiens
tataaagctcacatgttga

SEQ ID NO: 34658 - DNA, 22 bp, Homo sapiens
tgcttgagtggtggccctgctt

SEQ ID NO: 34659 - DNA, 20 bp, Homo sapiens
cagtttcaagcataaggaat

SEQ ID NO: 34660 - DNA, 22 bp, Homo sapiens
gtcacttagctgtttcccactt

SEQ ID NO: 34661 - DNA, 18 bp, Homo sapiens
tgagtagtgctgatgaat

SEQ ID NO: 34662 - DNA, 18 bp, Homo sapiens
cattccttgttttcaaca

SEQ ID NO: 34663 - DNA, 19 bp, Homo sapiens
gccccatataagtgttggt

SEQ ID NO: 34664 - DNA, 19 bp, Homo sapiens
cgccttcctgagagatggt

SEQ ID NO: 34665 - DNA, 17 bp, Homo sapiens
ggacactcctgaaatcc

SEQ ID NO: 34666 - DNA, 16 bp, Homo sapiens
ctggcctgtgacaatg

SEQ ID NO: 34667 - DNA, 19 bp, Homo sapiens
caaaaccctctagattgta

SEQ ID NO: 34668 - DNA, 20 bp, Homo sapiens
tggagaaatggaaatatact

SEQ ID NO: 34669 - DNA, 18 bp, Homo sapiens
tacctctgtttttagtgt

SEQ ID NO: 34670 - DNA, 19 bp, Homo sapiens
aagcatgcttggcatggag

SEQ ID NO: 34671 - DNA, 18 bp, Homo sapiens
ctctttgcataatgcctt

SEQ ID NO: 34672 - DNA, 20 bp, Homo sapiens
cagccagttgaggtcatcct

SEQ ID NO: 34673 - DNA, 19 bp, Homo sapiens
gtgtacacagagccctgct

SEQ ID NO: 34674 - DNA, 18 bp, Homo sapiens
cttgcaagtcaatgatca

SEQ ID NO: 34675 - DNA, 21 bp, Homo sapiens
tatagggaagagatagtggaa

SEQ ID NO: 34676 - DNA, 20 bp, Homo sapiens
agaagaaagtcagtgagatt

SEQ ID NO: 34677 - DNA, 19 bp, Homo sapiens
ggccgtggggcggggccgt

SEQ ID NO: 34678 - DNA, 20 bp, Homo sapiens
gatgaaaatccacatcgtgc

SEQ ID NO: 34679 - DNA, 20 bp, Homo sapiens
ctgatctgtgactttcctga

SEQ ID NO: 34680 - DNA, 20 bp, Homo sapiens
aactggcatgtgattttaac

SEQ ID NO: 34681 - DNA, 23 bp, Homo sapiens
cattcgtggaggcgcaggcggta

SEQ ID NO: 34682 - DNA, 16 bp, Homo sapiens
gagttggttagcctga

SEQ ID NO: 34683 - DNA, 24 bp, Homo sapiens
gtaaccatctctaccatgtcgggc

SEQ ID NO: 34684 - DNA, 23 bp, Homo sapiens
ttggtgttaatctatagaaaatg

SEQ ID NO: 34685 - DNA, 16 bp, Homo sapiens
agcacggtgcctccga

SEQ ID NO: 34686 - DNA, 20 bp, Homo sapiens
gctatcccatctaggtatgt

SEQ ID NO: 34687 - DNA, 22 bp, Homo sapiens
atgaaaagttcaaagctcttta

SEQ ID NO: 34688 - DNA, 17 bp, Homo sapiens
gcggcacatttctcaga

SEQ ID NO: 34689 - DNA, 20 bp, Homo sapiens
actctctaaaactgtttctt

SEQ ID NO: 34690 - DNA, 16 bp, Homo sapiens
gttaagcttgccaact

SEQ ID NO: 34691 - DNA, 16 bp, Homo sapiens
ctcagagtcgggtttt

SEQ ID NO: 34692 - DNA, 22 bp, Homo sapiens
aacacttcttggtaacgtataa

SEQ ID NO: 34693 - DNA, 17 bp, Homo sapiens
tctctctgtacaggtgg

SEQ ID NO: 34694 - DNA, 23 bp, Homo sapiens
tgagcacatagactctaatgact

SEQ ID NO: 34695 - DNA, 17 bp, Homo sapiens
accttgtccctgacaca

SEQ ID NO: 34696 - DNA, 20 bp, Homo sapiens
gctaggggtacttctggaca

SEQ ID NO: 34697 - DNA, 16 bp, Homo sapiens
cagaacctgtacaagg

SEQ ID NO: 34698 - DNA, 16 bp, Homo sapiens
gagggagggtgggaaa

SEQ ID NO: 34699 - DNA, 17 bp, Homo sapiens
cctgctactcagaagct

SEQ ID NO: 34700 - DNA, 19 bp, Homo sapiens
cttctggttcttggcgtgt

SEQ ID NO: 34701 - DNA, 19 bp, Homo sapiens
aaagaggagtcctgggagt

SEQ ID NO: 34702 - DNA, 19 bp, Homo sapiens
ggctttcactctatcccag

SEQ ID NO: 34703 - DNA, 20 bp, Homo sapiens
ctactagaattttatgaggt

SEQ ID NO: 34704 - DNA, 19 bp, Homo sapiens
cacaacagttctagaaaca

SEQ ID NO: 34705 - DNA, 16 bp, Homo sapiens
gcctttagggaaagag

SEQ ID NO: 34706 - DNA, 17 bp, Homo sapiens
tgttgcttgtctacagg

SEQ ID NO: 34707 - DNA, 18 bp, Homo sapiens
ggctcatatataaggggg

SEQ ID NO: 34708 - DNA, 20 bp, Homo sapiens
cttccagggacaaactattt

SEQ ID NO: 34709 - DNA, 24 bp, Homo sapiens
cttcaggtttctggttctgtcata

SEQ ID NO: 34710 - DNA, 17 bp, Homo sapiens
ctgctgttcagagtggc

SEQ ID NO: 34711 - DNA, 28 bp, Homo sapiens
taatctgatgataattttctttatattt

SEQ ID NO: 34712 - DNA, 17 bp, Homo sapiens
acagcagcaggtaaaga

SEQ ID NO: 34713 - DNA, 21 bp, Homo sapiens
tgttagaaaatacataaagac

SEQ ID NO: 34714 - DNA, 18 bp, Homo sapiens
acagacctgtatgttacc

SEQ ID NO: 34715 - DNA, 21 bp, Homo sapiens
acgcacctcactggcattaat

SEQ ID NO: 34716 - DNA, 19 bp, Homo sapiens
ttaaagcagaaatccagaa

SEQ ID NO: 34717 - DNA, 21 bp, Homo sapiens
accagattatagttttgtaga

SEQ ID NO: 34718 - DNA, 17 bp, Homo sapiens
cattctggcagccatac

SEQ ID NO: 34719 - DNA, 21 bp, Homo sapiens
agccccagagcaggacactag

SEQ ID NO: 34720 - DNA, 16 bp, Homo sapiens
ggatacaccccaaatc

SEQ ID NO: 34721 - DNA, 20 bp, Homo sapiens
gagcctacactgttacagca

SEQ ID NO: 34722 - DNA, 21 bp, Homo sapiens
tcttgcagaatgtgtataaag

SEQ ID NO: 34723 - DNA, 17 bp, Homo sapiens
tctgatgacccatggag

SEQ ID NO: 34724 - DNA, 22 bp, Homo sapiens
aggaaattatcaaatgctcaat

SEQ ID NO: 34725 - DNA, 22 bp, Homo sapiens
ggtcgtatgatttcttggcatg

SEQ ID NO: 34726 - DNA, 21 bp, Homo sapiens
agctggtgagaggcctaccct

SEQ ID NO: 34727 - DNA, 19 bp, Homo sapiens
caaccaattcaggtcatct

SEQ ID NO: 34728 - DNA, 17 bp, Homo sapiens
tccgaaacgcccaggag

SEQ ID NO: 34729 - DNA, 22 bp, Homo sapiens
actttgttttgagaagcagcaa

SEQ ID NO: 34730 - DNA, 20 bp, Homo sapiens
ggagtatcgacactatttcc

SEQ ID NO: 34731 - DNA, 18 bp, Homo sapiens
ttggggggtagccaagac

SEQ ID NO: 34732 - DNA, 20 bp, Homo sapiens
ccccaatgacatgatgaatc

SEQ ID NO: 34733 - DNA, 19 bp, Homo sapiens
tcatacatcactcaagatc

SEQ ID NO: 34734 - DNA, 26 bp, Homo sapiens
ttgtctttaaaacatattagttgaac

SEQ ID NO: 34735 - DNA, 17 bp, Homo sapiens
gagacgtccactggtgg

SEQ ID NO: 34736 - DNA, 19 bp, Homo sapiens
ctaaaagacattgatctga

SEQ ID NO: 34737 - DNA, 17 bp, Homo sapiens
ttagccagcacgtgatt

SEQ ID NO: 34738 - DNA, 25 bp, Homo sapiens
taaagaatataataaagtatatatt

SEQ ID NO: 34739 - DNA, 22 bp, Homo sapiens
taatgttttctgtagttcaact

SEQ ID NO: 34740 - DNA, 20 bp, Homo sapiens
gctaccaagagtccacaggc

SEQ ID NO: 34741 - DNA, 19 bp, Homo sapiens
gtgaattccctggtgtggt

SEQ ID NO: 34742 - DNA, 21 bp, Homo sapiens
tacgctactccatttcccagc

SEQ ID NO: 34743 - DNA, 22 bp, Homo sapiens
aaatacaaagagacatatgaga

SEQ ID NO: 34744 - DNA, 20 bp, Homo sapiens
ggcagcacacttatggggca

SEQ ID NO: 34745 - DNA, 17 bp, Homo sapiens
ggggctggttaggaaac

SEQ ID NO: 34746 - DNA, 19 bp, Homo sapiens
tcttttggaaatccagaca

SEQ ID NO: 34747 - DNA, 17 bp, Homo sapiens
acagtgaggtcagtatg

SEQ ID NO: 34748 - DNA, 22 bp, Homo sapiens
caggtagtgacctttctgcttc

SEQ ID NO: 34749 - DNA, 17 bp, Homo sapiens
cctatggctacaccctg

SEQ ID NO: 34750 - DNA, 16 bp, Homo sapiens
aatcgctggagtttcc

SEQ ID NO: 34751 - DNA, 19 bp, Homo sapiens
gttgccatgtatttctttg

SEQ ID NO: 34752 - DNA, 16 bp, Homo sapiens
aggagaggaaaaggtc

SEQ ID NO: 34753 - DNA, 18 bp, Homo sapiens
ttcaccttaattagacca

SEQ ID NO: 34754 - DNA, 20 bp, Homo sapiens
ccaacaatgggaatgtagcg

SEQ ID NO: 34755 - DNA, 16 bp, Homo sapiens
agatgcactaatggct

SEQ ID NO: 34756 - DNA, 21 bp, Homo sapiens
cgcccctttatacagtatcta

SEQ ID NO: 34757 - DNA, 20 bp, Homo sapiens
gccttgaataacatggtact

SEQ ID NO: 34758 - DNA, 17 bp, Homo sapiens
tcaccagatacaccaca

SEQ ID NO: 34759 - DNA, 19 bp, Homo sapiens
tggcttataagttcagcag

SEQ ID NO: 34760 - DNA, 20 bp, Homo sapiens
gttttctctccttaggtaaa

SEQ ID NO: 34761 - DNA, 22 bp, Homo sapiens
attagaaattgagtggttatta

SEQ ID NO: 34762 - DNA, 20 bp, Homo sapiens
tatgtttctaggtaatctta

SEQ ID NO: 34763 - DNA, 16 bp, Homo sapiens
tgtctttggagtggga

SEQ ID NO: 34764 - DNA, 18 bp, Homo sapiens
tagctaaaatgggctaaa

SEQ ID NO: 34765 - DNA, 26 bp, Homo sapiens
tttgctttattaaatgtttctttata

SEQ ID NO: 34766 - DNA, 21 bp, Homo sapiens
ttctgtcaatcaaagtgatgt

SEQ ID NO: 34767 - DNA, 20 bp, Homo sapiens
gacataccccccaaagatga

SEQ ID NO: 34768 - DNA, 19 bp, Homo sapiens
ttgaaaactatcctaactt

SEQ ID NO: 34769 - DNA, 16 bp, Homo sapiens
aagctaatccacccaa

SEQ ID NO: 34770 - DNA, 20 bp, Homo sapiens
tggtagacctgtcttaattg

SEQ ID NO: 34771 - DNA, 21 bp, Homo sapiens
cagcatgcacaaagcaaactt

SEQ ID NO: 34772 - DNA, 20 bp, Homo sapiens
tctccttctaacctatgcct

SEQ ID NO: 34773 - DNA, 23 bp, Homo sapiens
caatctctggaggatccaccaca

SEQ ID NO: 34774 - DNA, 19 bp, Homo sapiens
tctgtggaccatgtaaggg

SEQ ID NO: 34775 - DNA, 22 bp, Homo sapiens
atatttgatctgtaaagaaacg

SEQ ID NO: 34776 - DNA, 16 bp, Homo sapiens
tacagagctgacctgg

SEQ ID NO: 34777 - DNA, 18 bp, Homo sapiens
catggcaggtaggaggac

SEQ ID NO: 34778 - DNA, 16 bp, Homo sapiens
aagcctgtgtctcagt

SEQ ID NO: 34779 - DNA, 17 bp, Homo sapiens
catcatttcctggttct

SEQ ID NO: 34780 - DNA, 24 bp, Homo sapiens
tgaatgaatgagaaaactactaga

SEQ ID NO: 34781 - DNA, 21 bp, Homo sapiens
agccaatgcctcggagccact

SEQ ID NO: 34782 - DNA, 20 bp, Homo sapiens
actgctcctgatctttcttc

SEQ ID NO: 34783 - DNA, 18 bp, Homo sapiens
tgtgtcatcctgaccaga

SEQ ID NO: 34784 - DNA, 18 bp, Homo sapiens
tggcctcaaatttcaagc

SEQ ID NO: 34785 - DNA, 16 bp, Homo sapiens
ggggcagacccttgtc

SEQ ID NO: 34786 - DNA, 20 bp, Homo sapiens
accatgcgtttctagataat

SEQ ID NO: 34787 - DNA, 20 bp, Homo sapiens
aggactatcacaaaacaaag

SEQ ID NO: 34788 - DNA, 19 bp, Homo sapiens
tcttgcctgaataacatcg

SEQ ID NO: 34789 - DNA, 17 bp, Homo sapiens
tggtttggtttgagcat

SEQ ID NO: 34790 - DNA, 19 bp, Homo sapiens
aatcaatatcactgacaag

SEQ ID NO: 34791 - DNA, 23 bp, Homo sapiens
aaagctgaacatgtgaagcaaaa

SEQ ID NO: 34792 - DNA, 22 bp, Homo sapiens
ccatatcagcaggtatattgat

SEQ ID NO: 34793 - DNA, 18 bp, Homo sapiens
gccttgtgtgcttgtcaa

SEQ ID NO: 34794 - DNA, 20 bp, Homo sapiens
tcattctgaatctggcctgc

SEQ ID NO: 34795 - DNA, 16 bp, Homo sapiens
gctggggggctgaatt

SEQ ID NO: 34796 - DNA, 18 bp, Homo sapiens
gacaccaacataatgacc

SEQ ID NO: 34797 - DNA, 24 bp, Homo sapiens
tttcttcatatggatttatttcaa

SEQ ID NO: 34798 - DNA, 19 bp, Homo sapiens
ggaagaaagaccgaaaagt

SEQ ID NO: 34799 - DNA, 22 bp, Homo sapiens
atgctgtgccatttgttcatgc

SEQ ID NO: 34800 - DNA, 21 bp, Homo sapiens
ctgccacactgaaactgaaca

SEQ ID NO: 34801 - DNA, 16 bp, Homo sapiens
tctctacaaggaaggc

SEQ ID NO: 34802 - DNA, 19 bp, Homo sapiens
ctgggagcaaggtcccact

SEQ ID NO: 34803 - DNA, 16 bp, Homo sapiens
acttacccctcccttc

SEQ ID NO: 34804 - DNA, 19 bp, Homo sapiens
cgtcattgcagtgatgggc

SEQ ID NO: 34805 - DNA, 21 bp, Homo sapiens
atgcctggtgtttgtgtacga

SEQ ID NO: 34806 - DNA, 21 bp, Homo sapiens
ctgtggctttttgtctctccc

SEQ ID NO: 34807 - DNA, 16 bp, Homo sapiens
ctgcacactgcccagg

SEQ ID NO: 34808 - DNA, 19 bp, Homo sapiens
agggttaaaatgaggagtc

SEQ ID NO: 34809 - DNA, 23 bp, Homo sapiens
tttagattaaataccggaaagac

SEQ ID NO: 34810 - DNA, 20 bp, Homo sapiens
gttccattaaggccctccac

SEQ ID NO: 34811 - DNA, 19 bp, Homo sapiens
acaacatgatgctttctta

SEQ ID NO: 34812 - DNA, 17 bp, Homo sapiens
cagtatcctagcagcct

SEQ ID NO: 34813 - DNA, 21 bp, Homo sapiens
cagaatgcaatcatctgaaat

SEQ ID NO: 34814 - DNA, 19 bp, Homo sapiens
tttgatttggtggcattcc

SEQ ID NO: 34815 - DNA, 17 bp, Homo sapiens
tgtgacagcgaaacaaa

SEQ ID NO: 34816 - DNA, 22 bp, Homo sapiens
tccatcatttcaatgattaaaa

SEQ ID NO: 34817 - DNA, 23 bp, Homo sapiens
agaaaaaatatcgcacaaaaata

SEQ ID NO: 34818 - DNA, 20 bp, Homo sapiens
ctttggaagtgatatctgca

SEQ ID NO: 34819 - DNA, 18 bp, Homo sapiens
tctcagttcacacatgtc

SEQ ID NO: 34820 - DNA, 19 bp, Homo sapiens
gaggatctcgccactttgt

SEQ ID NO: 34821 - DNA, 19 bp, Homo sapiens
agaagacgctattcaaata

SEQ ID NO: 34822 - DNA, 23 bp, Homo sapiens
cgtaaagttgagagtttctattt

SEQ ID NO: 34823 - DNA, 23 bp, Homo sapiens
gtggtcccataatgtgatagcga

SEQ ID NO: 34824 - DNA, 16 bp, Homo sapiens
ctccgtgtccgtcaat

SEQ ID NO: 34825 - DNA, 24 bp, Homo sapiens
tcacagcaattgaaatggttaaga

SEQ ID NO: 34826 - DNA, 19 bp, Homo sapiens
ttttcacagaatgtttaca

SEQ ID NO: 34827 - DNA, 20 bp, Homo sapiens
gtcactttcttgggaaatgt

SEQ ID NO: 34828 - DNA, 18 bp, Homo sapiens
tggataggctaactagga

SEQ ID NO: 34829 - DNA, 17 bp, Homo sapiens
tccgcggcatgtttggc

SEQ ID NO: 34830 - DNA, 17 bp, Homo sapiens
ttgagtatgtcctcctt

SEQ ID NO: 34831 - DNA, 18 bp, Homo sapiens
aaccattccaagtcagcc

SEQ ID NO: 34832 - DNA, 17 bp, Homo sapiens
gatgtgattcaggccaa

SEQ ID NO: 34833 - DNA, 21 bp, Homo sapiens
ttaaattcttggtgatatgaa

SEQ ID NO: 34834 - DNA, 16 bp, Homo sapiens
acatggattaccgcaa

SEQ ID NO: 34835 - DNA, 18 bp, Homo sapiens
tctggaagtcatggcaaa

SEQ ID NO: 34836 - DNA, 17 bp, Homo sapiens
cagagccctgtggacat

SEQ ID NO: 34837 - DNA, 21 bp, Homo sapiens
ctctgcagttcgtaggccttc

SEQ ID NO: 34838 - DNA, 17 bp, Homo sapiens
gacaagctccagaatga

SEQ ID NO: 34839 - DNA, 18 bp, Homo sapiens
gtccactggtgcaggtaa

SEQ ID NO: 34840 - DNA, 22 bp, Homo sapiens
cagaagggacactacgtgggca

SEQ ID NO: 34841 - DNA, 16 bp, Homo sapiens
aggatggaaagcatgt

SEQ ID NO: 34842 - DNA, 21 bp, Homo sapiens
cccatctgctttatttttgca

SEQ ID NO: 34843 - DNA, 22 bp, Homo sapiens
gtccagccggtactctcgttca

SEQ ID NO: 34844 - DNA, 22 bp, Homo sapiens
tttttaacttctcagttttttt

SEQ ID NO: 34845 - DNA, 24 bp, Homo sapiens
ttgtcatccctggctgtgagggtg

SEQ ID NO: 34846 - DNA, 16 bp, Homo sapiens
catccaggctgccaag

SEQ ID NO: 34847 - DNA, 24 bp, Homo sapiens
tcaagcttatatttatactggaga

SEQ ID NO: 34848 - DNA, 16 bp, Homo sapiens
ctttaccgtgagggct

SEQ ID NO: 34849 - DNA, 16 bp, Homo sapiens
cctagggcatcggctg

SEQ ID NO: 34850 - DNA, 18 bp, Homo sapiens
ccattgaaggtattggca

SEQ ID NO: 34851 - DNA, 16 bp, Homo sapiens
gcaatctccctggagg

SEQ ID NO: 34852 - DNA, 23 bp, Homo sapiens
tttaactgctctcaagtccttgg

SEQ ID NO: 34853 - DNA, 17 bp, Homo sapiens
cttcatttcatcccagc

SEQ ID NO: 34854 - DNA, 16 bp, Homo sapiens
cagggatctcctcctt

SEQ ID NO: 34855 - DNA, 20 bp, Homo sapiens
ccagatactccagaaattaa

SEQ ID NO: 34856 - DNA, 17 bp, Homo sapiens
ttgcgggaagtcaggga

SEQ ID NO: 34857 - DNA, 16 bp, Homo sapiens
ccaaagtacagagagg

SEQ ID NO: 34858 - DNA, 17 bp, Homo sapiens
gactgggtaactttcca

SEQ ID NO: 34859 - DNA, 16 bp, Homo sapiens
agtgggactagcaaca

SEQ ID NO: 34860 - DNA, 17 bp, Homo sapiens
gagcatttgctctagcg

SEQ ID NO: 34861 - DNA, 18 bp, Homo sapiens
ccagaaatctttgcccta

SEQ ID NO: 34862 - DNA, 16 bp, Homo sapiens
atccttgtcccaaacc

SEQ ID NO: 34863 - DNA, 22 bp, Homo sapiens
ataagcaaaccaagacaatact

SEQ ID NO: 34864 - DNA, 21 bp, Homo sapiens
ttaagtacacaagcattgttg

SEQ ID NO: 34865 - DNA, 26 bp, Homo sapiens
tttattattctaaaataaatgaccag

SEQ ID NO: 34866 - DNA, 19 bp, Homo sapiens
tgagagtcaaaaacgccca

SEQ ID NO: 34867 - DNA, 23 bp, Homo sapiens
tttaatagagaaaaactaactca

SEQ ID NO: 34868 - DNA, 17 bp, Homo sapiens
gctgacttggagtggtt

SEQ ID NO: 34869 - DNA, 22 bp, Homo sapiens
aggaccacttcaggtgtgtcaa

SEQ ID NO: 34870 - DNA, 19 bp, Homo sapiens
catacacaacaaaacacaa

SEQ ID NO: 34871 - DNA, 19 bp, Homo sapiens
acaaaagatattctgggcg

SEQ ID NO: 34872 - DNA, 27 bp, Homo sapiens
atattttatgttgtatatataatatat

SEQ ID NO: 34873 - DNA, 17 bp, Homo sapiens
caatgccacgcaaccac

SEQ ID NO: 34874 - DNA, 28 bp, Homo sapiens
aaaaaaaaaaaaaaaaatatatatatat

SEQ ID NO: 34875 - DNA, 21 bp, Homo sapiens
acctttaacaatgaaaacttt

SEQ ID NO: 34876 - DNA, 18 bp, Homo sapiens
ccagaatgatgtgatcca

SEQ ID NO: 34877 - DNA, 24 bp, Homo sapiens
taaaataataataaagtggagtgc

SEQ ID NO: 34878 - DNA, 18 bp, Homo sapiens
actggcaagtgatgtgga

SEQ ID NO: 34879 - DNA, 21 bp, Homo sapiens
aaggagccatcaggcaaagca

SEQ ID NO: 34880 - DNA, 23 bp, Homo sapiens
acaaagccaagatctccatccct

SEQ ID NO: 34881 - DNA, 21 bp, Homo sapiens
taggtcgtaggctttcctggc

SEQ ID NO: 34882 - DNA, 18 bp, Homo sapiens
cagcaaatgtgttgaaga

SEQ ID NO: 34883 - DNA, 23 bp, Homo sapiens
cagcggtgcaggtaatggcgata

SEQ ID NO: 34884 - DNA, 18 bp, Homo sapiens
cagaaaggccattacatt

SEQ ID NO: 34885 - DNA, 18 bp, Homo sapiens
atggacaccatgtccaca

SEQ ID NO: 34886 - DNA, 20 bp, Homo sapiens
ttggaaaaattactcttcta

SEQ ID NO: 34887 - DNA, 18 bp, Homo sapiens
tacagcctgtcattctgc

SEQ ID NO: 34888 - DNA, 19 bp, Homo sapiens
gtaaactaagggagatgga

SEQ ID NO: 34889 - DNA, 16 bp, Homo sapiens
tgcgacagccaatgta

SEQ ID NO: 34890 - DNA, 17 bp, Homo sapiens
tcaaaacttatggcttg

SEQ ID NO: 34891 - DNA, 16 bp, Homo sapiens
cagcatgccaaggctt

SEQ ID NO: 34892 - DNA, 18 bp, Homo sapiens
actaataacaatgaccca

SEQ ID NO: 34893 - DNA, 16 bp, Homo sapiens
cagcaagcttgggaag

SEQ ID NO: 34894 - DNA, 19 bp, Homo sapiens
aactccctctatttctact

SEQ ID NO: 34895 - DNA, 19 bp, Homo sapiens
gactcagtagctccctctt

SEQ ID NO: 34896 - DNA, 17 bp, Homo sapiens
ctggcaatatccctgga

SEQ ID NO: 34897 - DNA, 21 bp, Homo sapiens
ggagacattaatgttcagtgt

SEQ ID NO: 34898 - DNA, 19 bp, Homo sapiens
ccagtcatcttgacatctt

SEQ ID NO: 34899 - DNA, 22 bp, Homo sapiens
tgtcattaaaaatctactggaa

SEQ ID NO: 34900 - DNA, 18 bp, Homo sapiens
acagacacacgcagaccc

SEQ ID NO: 34901 - DNA, 16 bp, Homo sapiens
cactcccctgatgctg

SEQ ID NO: 34902 - DNA, 19 bp, Homo sapiens
gaatgggaagaaaatgcct

SEQ ID NO: 34903 - DNA, 16 bp, Homo sapiens
tttttcccagccattg

SEQ ID NO: 34904 - DNA, 17 bp, Homo sapiens
aggcagagagcactgtg

SEQ ID NO: 34905 - DNA, 27 bp, Homo sapiens
tatgactttataattttatttatgtgg

SEQ ID NO: 34906 - DNA, 16 bp, Homo sapiens
ttttggattgcagcat

SEQ ID NO: 34907 - DNA, 29 bp, Homo sapiens
taatttattataaaattcacttaaaattt

SEQ ID NO: 34908 - DNA, 17 bp, Homo sapiens
ccaggcatcgcgataca

SEQ ID NO: 34909 - DNA, 19 bp, Homo sapiens
ggaagtaatccaggcaaag

SEQ ID NO: 34910 - DNA, 19 bp, Homo sapiens
tacatgcaaacgtgtttca

SEQ ID NO: 34911 - DNA, 18 bp, Homo sapiens
ggctgtatcgtataaagc

SEQ ID NO: 34912 - DNA, 20 bp, Homo sapiens
tcttctggattcagatttct

SEQ ID NO: 34913 - DNA, 16 bp, Homo sapiens
ccagagggttctgtgg

SEQ ID NO: 34914 - DNA, 21 bp, Homo sapiens
ctcactgatctgtacagcatt

SEQ ID NO: 34915 - DNA, 18 bp, Homo sapiens
tctccttcatgtagaact

SEQ ID NO: 34916 - DNA, 21 bp, Homo sapiens
tggtgaatttgagggcctcag

SEQ ID NO: 34917 - DNA, 16 bp, Homo sapiens
gtggtttgcaagcatc

SEQ ID NO: 34918 - DNA, 20 bp, Homo sapiens
cactctcatcacttccacag

SEQ ID NO: 34919 - DNA, 21 bp, Homo sapiens
acatttaatgttgatccttga

SEQ ID NO: 34920 - DNA, 22 bp, Homo sapiens
cattccaggtctgacttgtaca

SEQ ID NO: 34921 - DNA, 24 bp, Homo sapiens
aaggagtcctctataagatagaaa

SEQ ID NO: 34922 - DNA, 20 bp, Homo sapiens
gccagatcagaacgatgtga

SEQ ID NO: 34923 - DNA, 25 bp, Homo sapiens
atatgttaggttctattaagattac

SEQ ID NO: 34924 - DNA, 16 bp, Homo sapiens
ggtcctggttagcgac

SEQ ID NO: 34925 - DNA, 20 bp, Homo sapiens
acacaaatacacatctcccc

SEQ ID NO: 34926 - DNA, 19 bp, Homo sapiens
aagtctaaaggaattcaca

SEQ ID NO: 34927 - DNA, 18 bp, Homo sapiens
ggctttcttggcctggat

SEQ ID NO: 34928 - DNA, 16 bp, Homo sapiens
ggctatacatgctgcc

SEQ ID NO: 34929 - DNA, 22 bp, Homo sapiens
gcagataattgcgataatcaat

SEQ ID NO: 34930 - DNA, 21 bp, Homo sapiens
aaggttaccgtaagcaactgg

SEQ ID NO: 34931 - DNA, 16 bp, Homo sapiens
gtccaacggtgtgttg

SEQ ID NO: 34932 - DNA, 27 bp, Homo sapiens
aatacattattttcatatgtcttttta

SEQ ID NO: 34933 - DNA, 18 bp, Homo sapiens
tgtcactctggatcttgg

SEQ ID NO: 34934 - DNA, 17 bp, Homo sapiens
ccaaggctaagaaaaca

SEQ ID NO: 34935 - DNA, 21 bp, Homo sapiens
tagggtgcggaaacccatgtg

SEQ ID NO: 34936 - DNA, 26 bp, Homo sapiens
gtattatctaacttctttaaagtgaa

SEQ ID NO: 34937 - DNA, 20 bp, Homo sapiens
aatgttttccattccatttt

SEQ ID NO: 34938 - DNA, 17 bp, Homo sapiens
ggcagatgccattgaaa

SEQ ID NO: 34939 - DNA, 19 bp, Homo sapiens
atgcaattctatgcacaga

SEQ ID NO: 34940 - DNA, 22 bp, Homo sapiens
ctatagaaactctaccaaaaag

SEQ ID NO: 34941 - DNA, 20 bp, Homo sapiens
ttttgtagaaaagaaaaacc

SEQ ID NO: 34942 - DNA, 20 bp, Homo sapiens
acaaatttgagtaaatttgc

SEQ ID NO: 34943 - DNA, 17 bp, Homo sapiens
ggccttggcgtgcttga

SEQ ID NO: 34944 - DNA, 21 bp, Homo sapiens
acccagaaatgaatgcttttt

SEQ ID NO: 34945 - DNA, 20 bp, Homo sapiens
ctgcttggtgtcattccagt

SEQ ID NO: 34946 - DNA, 16 bp, Homo sapiens
gctgcaggcccacatc

SEQ ID NO: 34947 - DNA, 20 bp, Homo sapiens
atgtctagcaccaaaagcca

SEQ ID NO: 34948 - DNA, 16 bp, Homo sapiens
tcaggaagcctggaat

SEQ ID NO: 34949 - DNA, 21 bp, Homo sapiens
ccatgagcagacagatattgc

SEQ ID NO: 34950 - DNA, 19 bp, Homo sapiens
aacattagctaaggcttaa

SEQ ID NO: 34951 - DNA, 17 bp, Homo sapiens
tgcaaggcattgatgtg

SEQ ID NO: 34952 - DNA, 20 bp, Homo sapiens
aaacgtttttccagattgag

SEQ ID NO: 34953 - DNA, 19 bp, Homo sapiens
tgcttttatctttattcca

SEQ ID NO: 34954 - DNA, 16 bp, Homo sapiens
agaagaaaggcatgtt

SEQ ID NO: 34955 - DNA, 17 bp, Homo sapiens
ccagaagttgtcttggc

SEQ ID NO: 34956 - DNA, 19 bp, Homo sapiens
gtgaagacatttttagagt

SEQ ID NO: 34957 - DNA, 18 bp, Homo sapiens
tcgtgaatgaaagactct

SEQ ID NO: 34958 - DNA, 23 bp, Homo sapiens
agtctacgggctcagtttgggtg

SEQ ID NO: 34959 - DNA, 16 bp, Homo sapiens
tggatgccagaaggct

SEQ ID NO: 34960 - DNA, 23 bp, Homo sapiens
acttatttgcagagaattggctt

SEQ ID NO: 34961 - DNA, 20 bp, Homo sapiens
tttttgtctgacatcttctt

SEQ ID NO: 34962 - DNA, 24 bp, Homo sapiens
cttcactctgttcatttccactga

SEQ ID NO: 34963 - DNA, 24 bp, Homo sapiens
ccaggtctgccttatacacactct

SEQ ID NO: 34964 - DNA, 16 bp, Homo sapiens
gatccaagccaggaaa

SEQ ID NO: 34965 - DNA, 23 bp, Homo sapiens
ctgataaaataataataaagtgg

SEQ ID NO: 34966 - DNA, 16 bp, Homo sapiens
gcaagtgatgtggact

SEQ ID NO: 34967 - DNA, 22 bp, Homo sapiens
cattggaaggagccatcaggca

SEQ ID NO: 34968 - DNA, 18 bp, Homo sapiens
gatctccatccctgtgga

SEQ ID NO: 34969 - DNA, 18 bp, Homo sapiens
gctctgtaggtcgtaggc

SEQ ID NO: 34970 - DNA, 17 bp, Homo sapiens
tgtgttgaagatgcaga

SEQ ID NO: 34971 - DNA, 20 bp, Homo sapiens
gaccagtggtgcaggtaatg

SEQ ID NO: 34972 - DNA, 18 bp, Homo sapiens
aaggccattacattggct

SEQ ID NO: 34973 - DNA, 19 bp, Homo sapiens
gctgatggacaccatgtcc

SEQ ID NO: 34974 - DNA, 20 bp, Homo sapiens
tactcttctattttctgttc

SEQ ID NO: 34975 - DNA, 18 bp, Homo sapiens
tttttgtacagcctgtca

SEQ ID NO: 34976 - DNA, 17 bp, Homo sapiens
agggagatggagttagt

SEQ ID NO: 34977 - DNA, 23 bp, Homo sapiens
gtcttccttggcgctgcgacagc

SEQ ID NO: 34978 - DNA, 18 bp, Homo sapiens
tcaaaacttatggcttga

SEQ ID NO: 34979 - DNA, 16 bp, Homo sapiens
cagcatgccaaggctt

SEQ ID NO: 34980 - DNA, 18 bp, Homo sapiens
actaataacaatgaccca

SEQ ID NO: 34981 - DNA, 16 bp, Homo sapiens
cagcaagcttgggaag

SEQ ID NO: 34982 - DNA, 19 bp, Homo sapiens
aactccctctatttctact

SEQ ID NO: 34983 - DNA, 19 bp, Homo sapiens
gactcagtagctccctctt

SEQ ID NO: 34984 - DNA, 17 bp, Homo sapiens
ctggcaatatccctgga

SEQ ID NO: 34985 - DNA, 21 bp, Homo sapiens
ggagacattaatgttcagtgt

SEQ ID NO: 34986 - DNA, 19 bp, Homo sapiens
ccagtcatcttgacatctt

SEQ ID NO: 34987 - DNA, 22 bp, Homo sapiens
tgtcattaaaaatctactggaa

SEQ ID NO: 34988 - DNA, 22 bp, Homo sapiens
attacacagacacacgcagacc

SEQ ID NO: 34989 - DNA, 16 bp, Homo sapiens
cactcccctgatgctg

SEQ ID NO: 34990 - DNA, 18 bp, Homo sapiens
aatgggaagaaaatgcct

SEQ ID NO: 34991 - DNA, 16 bp, Homo sapiens
ccagccattgtatcgc

SEQ ID NO: 34992 - DNA, 17 bp, Homo sapiens
aggcagagagcactgtg

SEQ ID NO: 34993 - DNA, 23 bp, Homo sapiens
ctttataattttatttatgtggt

SEQ ID NO: 34994 - DNA, 16 bp, Homo sapiens
ttttggattgcagcat

SEQ ID NO: 34995 - DNA, 29 bp, Homo sapiens
ttattataaaattcacttaaaattttatt

SEQ ID NO: 34996 - DNA, 17 bp, Homo sapiens
ccaggcattgcgataca

SEQ ID NO: 34997 - DNA, 19 bp, Homo sapiens
ggaagtaatccaggcaaag

SEQ ID NO: 34998 - DNA, 19 bp, Homo sapiens
tacatgcaaacgtgtttca

SEQ ID NO: 34999 - DNA, 18 bp, Homo sapiens
ggctgtatcgtataaagc

SEQ ID NO: 35000 - DNA, 20 bp, Homo sapiens
tcttctggattcagatttct

SEQ ID NO: 35001 - DNA, 16 bp, Homo sapiens
ccagagggttctgtgg

SEQ ID NO: 35002 - DNA, 21 bp, Homo sapiens
ctcactgatctgtacagcatt

SEQ ID NO: 35003 - DNA, 18 bp, Homo sapiens
tctccttcatgtagaact

SEQ ID NO: 35004 - DNA, 21 bp, Homo sapiens
tggtgaatttgagggcctcag

SEQ ID NO: 35005 - DNA, 16 bp, Homo sapiens
gtggtttgcaagcatc

SEQ ID NO: 35006 - DNA, 20 bp, Homo sapiens
cactctcatcacttccacag

SEQ ID NO: 35007 - DNA, 21 bp, Homo sapiens
acatttaatgttgatccttga

SEQ ID NO: 35008 - DNA, 22 bp, Homo sapiens
cattccaggtctgacttgtaca

SEQ ID NO: 35009 - DNA, 24 bp, Homo sapiens
aaggagtcctctataagatagaaa

SEQ ID NO: 35010 - DNA, 20 bp, Homo sapiens
gccagatcagaacgatgtga

SEQ ID NO: 35011 - DNA, 25 bp, Homo sapiens
atatgttaggttctattaagattac

SEQ ID NO: 35012 - DNA, 16 bp, Homo sapiens
ggtcctggttagcgac

SEQ ID NO: 35013 - DNA, 20 bp, Homo sapiens
acacaaatacacatctcccc

SEQ ID NO: 35014 - DNA, 19 bp, Homo sapiens
aagtctaaaggaattcaca

SEQ ID NO: 35015 - DNA, 18 bp, Homo sapiens
ggctttcttggcctggat

SEQ ID NO: 35016 - DNA, 16 bp, Homo sapiens
ggctatacatgctgcc

SEQ ID NO: 35017 - DNA, 22 bp, Homo sapiens
gcagataattgcgataatcaat

SEQ ID NO: 35018 - DNA, 21 bp, Homo sapiens
aaggttaccgtaagcaactgg

SEQ ID NO: 35019 - DNA, 16 bp, Homo sapiens
gtccaacggtgtgttg

SEQ ID NO: 35020 - DNA, 27 bp, Homo sapiens
aatacattattttcatatgtcttttta

SEQ ID NO: 35021 - DNA, 18 bp, Homo sapiens
gtcactctggatcttggc

SEQ ID NO: 35022 - DNA, 17 bp, Homo sapiens
ccaaggctaagaaaaca

SEQ ID NO: 35023 - DNA, 21 bp, Homo sapiens
tagggtgcggaaacccatgtg

SEQ ID NO: 35024 - DNA, 25 bp, Homo sapiens
tattatctaattcctttaaagtgaa

SEQ ID NO: 35025 - DNA, 20 bp, Homo sapiens
aatgttttccattccatttt

SEQ ID NO: 35026 - DNA, 17 bp, Homo sapiens
ggcagatgccattgaaa

SEQ ID NO: 35027 - DNA, 19 bp, Homo sapiens
atgcaattctatgcacaga

SEQ ID NO: 35028 - DNA, 22 bp, Homo sapiens
ctatagaaactctaccaaaaag

SEQ ID NO: 35029 - DNA, 20 bp, Homo sapiens
ttttgtagaaaagaaaaacc

SEQ ID NO: 35030 - DNA, 20 bp, Homo sapiens
acaaatttgagtaaatttgc

SEQ ID NO: 35031 - DNA, 17 bp, Homo sapiens
ggccttggcgtgcttga

SEQ ID NO: 35032 - DNA, 21 bp, Homo sapiens
acccagaaatgaatgcttttt

SEQ ID NO: 35033 - DNA, 20 bp, Homo sapiens
ctgcttggtgtcattccagt

SEQ ID NO: 35034 - DNA, 16 bp, Homo sapiens
gctgcaggcccacatc

SEQ ID NO: 35035 - DNA, 20 bp, Homo sapiens
atgtctagcaccaaaagcca

SEQ ID NO: 35036 - DNA, 16 bp, Homo sapiens
tcaggaagcctggaat

SEQ ID NO: 35037 - DNA, 21 bp, Homo sapiens
ccatgagcagacagatattgc

SEQ ID NO: 35038 - DNA, 19 bp, Homo sapiens
aacattagctaaggcttaa

SEQ ID NO: 35039 - DNA, 17 bp, Homo sapiens
tgcaaggcattgatgtg

SEQ ID NO: 35040 - DNA, 20 bp, Homo sapiens
aaacgtttttccagattgag

SEQ ID NO: 35041 - DNA, 19 bp, Homo sapiens
tgcttttatctttattcca

SEQ ID NO: 35042 - DNA, 16 bp, Homo sapiens
agaagaaaggcatgtt

SEQ ID NO: 35043 - DNA, 17 bp, Homo sapiens
ccagaagttgtcttggc

SEQ ID NO: 35044 - DNA, 19 bp, Homo sapiens
gtgaagacatttttagagt

SEQ ID NO: 35045 - DNA, 18 bp, Homo sapiens
tcgtgaatgaaagactct

SEQ ID NO: 35046 - DNA, 23 bp, Homo sapiens
agtctacgggctcagtttgggtg

SEQ ID NO: 35047 - DNA, 16 bp, Homo sapiens
tggatgccagaaggct

SEQ ID NO: 35048 - DNA, 23 bp, Homo sapiens
acttatttgcagagaattggctt

SEQ ID NO: 35049 - DNA, 20 bp, Homo sapiens
tttttgtctgacatcttctt

SEQ ID NO: 35050 - DNA, 24 bp, Homo sapiens
cttcactctgttcatttccactga

SEQ ID NO: 35051 - DNA, 24 bp, Homo sapiens
ccaggtctgccttatacacactct

SEQ ID NO: 35052 - DNA, 16 bp, Homo sapiens
gatccaagccaggaaa

SEQ ID NO: 35053 - DNA, 23 bp, Homo sapiens
ctgataaaataataataaagtgg

SEQ ID NO: 35054 - DNA, 16 bp, Homo sapiens
gcaagtgatgtggact

SEQ ID NO: 35055 - DNA, 22 bp, Homo sapiens
cattggaaggagccatcaggca

SEQ ID NO: 35056 - DNA, 18 bp, Homo sapiens
gatctccatccctgtgga

SEQ ID NO: 35057 - DNA, 18 bp, Homo sapiens
gctctgtaggtcgtaggc

SEQ ID NO: 35058 - DNA, 17 bp, Homo sapiens
tgtgttgaagatgcaga

SEQ ID NO: 35059 - DNA, 20 bp, Homo sapiens
gaccagtggtgcaggtaatg

SEQ ID NO: 35060 - DNA, 18 bp, Homo sapiens
aaggccattacattggct

SEQ ID NO: 35061 - DNA, 19 bp, Homo sapiens
gctgatggacaccatgtcc

SEQ ID NO: 35062 - DNA, 20 bp, Homo sapiens
tactcttctattttctgttc

SEQ ID NO: 35063 - DNA, 18 bp, Homo sapiens
tttttgtacagcctgtca

SEQ ID NO: 35064 - DNA, 17 bp, Homo sapiens
agggagatggagttagt

SEQ ID NO: 35065 - DNA, 23 bp, Homo sapiens
gtcttccttggcgctgcgacagc

SEQ ID NO: 35066 - DNA, 18 bp, Homo sapiens
tcaaaacttatggcttga

SEQ ID NO: 35067 - DNA, 19 bp, Homo sapiens
catagatgcaaaaggatcc

SEQ ID NO: 35068 - DNA, 16 bp, Homo sapiens
cagcatgccaaggctt

SEQ ID NO: 35069 - DNA, 18 bp, Homo sapiens
actaataacaatgaccca

SEQ ID NO: 35070 - DNA, 16 bp, Homo sapiens
cagcaagcttgggaag

SEQ ID NO: 35071 - DNA, 19 bp, Homo sapiens
aactccctctatttctact

SEQ ID NO: 35072 - DNA, 19 bp, Homo sapiens
gactcagtagctccctctt

SEQ ID NO: 35073 - DNA, 17 bp, Homo sapiens
ctggcaatatccctgga

SEQ ID NO: 35074 - DNA, 21 bp, Homo sapiens
ggagacattaatgttcagtgt

SEQ ID NO: 35075 - DNA, 19 bp, Homo sapiens
ccagtcatcttgacatctt

SEQ ID NO: 35076 - DNA, 22 bp, Homo sapiens
tgtcattaaaaatctactggaa

SEQ ID NO: 35077 - DNA, 21 bp, Homo sapiens
atgtacattatacagacacac

SEQ ID NO: 35078 - DNA, 16 bp, Homo sapiens
ctcccctgatgctgca

SEQ ID NO: 35079 - DNA, 22 bp, Homo sapiens
agaaataaaaggaatgggaaga

SEQ ID NO: 35080 - DNA, 16 bp, Homo sapiens
ttgtatcgcgatgcct

SEQ ID NO: 35081 - DNA, 20 bp, Homo sapiens
aggtttggttaggcagagag

SEQ ID NO: 35082 - DNA, 19 bp, Homo sapiens
tttatgtggtaattgactt

SEQ ID NO: 35083 - DNA, 19 bp, Homo sapiens
gcattgattttggattgca

SEQ ID NO: 35084 - DNA, 23 bp, Homo sapiens
aaattcacttaaaattttattca

SEQ ID NO: 35085 - DNA, 16 bp, Homo sapiens
tctttctcccaggcat

SEQ ID NO: 35086 - DNA, 19 bp, Homo sapiens
ggaagtaatccaggcaaag

SEQ ID NO: 35087 - DNA, 19 bp, Homo sapiens
tacatgcaaacgtgtttca

SEQ ID NO: 35088 - DNA, 18 bp, Homo sapiens
ggctgtatcgtataaagc

SEQ ID NO: 35089 - DNA, 20 bp, Homo sapiens
tcttctggattcagatttct

SEQ ID NO: 35090 - DNA, 16 bp, Homo sapiens
ccagagggttctgtgg

SEQ ID NO: 35091 - DNA, 21 bp, Homo sapiens
ctcactgatctgtacagcatt

SEQ ID NO: 35092 - DNA, 18 bp, Homo sapiens
tctccttcatgtagaact

SEQ ID NO: 35093 - DNA, 21 bp, Homo sapiens
tggtgaatttgagggcctcag

SEQ ID NO: 35094 - DNA, 16 bp, Homo sapiens
gtggtttgcaagcatc

SEQ ID NO: 35095 - DNA, 20 bp, Homo sapiens
cactctcatcacttccacag

SEQ ID NO: 35096 - DNA, 21 bp, Homo sapiens
acatttaatgttgatccttga

SEQ ID NO: 35097 - DNA, 22 bp, Homo sapiens
cattccaggtctgacttgtaca

SEQ ID NO: 35098 - DNA, 24 bp, Homo sapiens
gaaggagtcctctataagatagaa

SEQ ID NO: 35099 - DNA, 20 bp, Homo sapiens
gccagatcagaacgatgtga

SEQ ID NO: 35100 - DNA, 25 bp, Homo sapiens
atatgttaggttctattaagattac

SEQ ID NO: 35101 - DNA, 16 bp, Homo sapiens
gtcctggttagcgaca

SEQ ID NO: 35102 - DNA, 20 bp, Homo sapiens
acacaaatacacatctcccc

SEQ ID NO: 35103 - DNA, 19 bp, Homo sapiens
aagtctaaaggaattcaca

SEQ ID NO: 35104 - DNA, 18 bp, Homo sapiens
ggctttcttggcctggat

SEQ ID NO: 35105 - DNA, 16 bp, Homo sapiens
ggctatacatgctgcc

SEQ ID NO: 35106 - DNA, 22 bp, Homo sapiens
tgcagataattgcgataatcaa

SEQ ID NO: 35107 - DNA, 17 bp, Homo sapiens
taagcaactgggccacc

SEQ ID NO: 35108 - DNA, 16 bp, Homo sapiens
gtccaacggtgtgttg

SEQ ID NO: 35109 - DNA, 27 bp, Homo sapiens
aatacattattttcatatgtcttttta

SEQ ID NO: 35110 - DNA, 18 bp, Homo sapiens
tgtcactctggatcttgg

SEQ ID NO: 35111 - DNA, 17 bp, Homo sapiens
ccaaggctaagaaaaca

SEQ ID NO: 35112 - DNA, 21 bp, Homo sapiens
tagggtgcggaaacccatgtg

SEQ ID NO: 35113 - DNA, 25 bp, Homo sapiens
ttatctaatttctttaaagtgaact

SEQ ID NO: 35114 - DNA, 24 bp, Homo sapiens
tctatgctaactttaatgttttcc

SEQ ID NO: 35115 - DNA, 18 bp, Homo sapiens
tgccattgaaatcaagca

SEQ ID NO: 35116 - DNA, 20 bp, Homo sapiens
tgagatgaattctatgcaca

SEQ ID NO: 35117 - DNA, 17 bp, Homo sapiens
ctaccaaaaagactgga

SEQ ID NO: 35118 - DNA, 18 bp, Homo sapiens
ccctgctcgttttgtaga

SEQ ID NO: 35119 - DNA, 25 bp, Homo sapiens
caaatttgagtaaatttgcttattt

SEQ ID NO: 35120 - DNA, 16 bp, Homo sapiens
tctggaggccttggcg

SEQ ID NO: 35121 - DNA, 24 bp, Homo sapiens
tgcttttttcttatattgactaca

SEQ ID NO: 35122 - DNA, 22 bp, Homo sapiens
atagcctttctgcttggcgtca

SEQ ID NO: 35123 - DNA, 19 bp, Homo sapiens
aaaagagagaaactccatt

SEQ ID NO: 35124 - DNA, 20 bp, Homo sapiens
ctccggagatgctgcaggcc

SEQ ID NO: 35125 - DNA, 23 bp, Homo sapiens
tgtctagcaccaaaagccacaaa

SEQ ID NO: 35126 - DNA, 17 bp, Homo sapiens
actgtatcaggaagcct

SEQ ID NO: 35127 - DNA, 21 bp, Homo sapiens
tgagcagacagatattgccca

SEQ ID NO: 35128 - DNA, 19 bp, Homo sapiens
aacattagctaaggcttaa

SEQ ID NO: 35129 - DNA, 17 bp, Homo sapiens
tgcaaggcattgatgtg

SEQ ID NO: 35130 - DNA, 19 bp, Homo sapiens
tgtaaaaacgtttttccag

SEQ ID NO: 35131 - DNA, 18 bp, Homo sapiens
ttatctttattccaggct

SEQ ID NO: 35132 - DNA, 16 bp, Homo sapiens
gaaaggcatgttggtg

SEQ ID NO: 35133 - DNA, 16 bp, Homo sapiens
acactccagaagttgt

SEQ ID NO: 35134 - DNA, 19 bp, Homo sapiens
agacatttttagagttgct

SEQ ID NO: 35135 - DNA, 18 bp, Homo sapiens
ctcgtgaatgaaagactc

SEQ ID NO: 35136 - DNA, 20 bp, Homo sapiens
ggctcagtttgggtggtatc

SEQ ID NO: 35137 - DNA, 16 bp, Homo sapiens
cggctggatgccagaa

SEQ ID NO: 35138 - DNA, 22 bp, Homo sapiens
tttgcagagaattggcttttgc

SEQ ID NO: 35139 - DNA, 18 bp, Homo sapiens
ttttgtctgacatcttct

SEQ ID NO: 35140 - DNA, 22 bp, Homo sapiens
acaaagcttctggacgtgtcct

SEQ ID NO: 35141 - DNA, 25 bp, Homo sapiens
agttactactaaagatggattttat

SEQ ID NO: 35142 - DNA, 20 bp, Homo sapiens
ggatcaaaacgacattatcc

SEQ ID NO: 35143 - DNA, 18 bp, Homo sapiens
aggtttgtgcagtgcaca

SEQ ID NO: 35144 - DNA, 17 bp, Homo sapiens
tttggtcactgacattg

SEQ ID NO: 35145 - DNA, 21 bp, Homo sapiens
acaaatctacatcttcccctt

SEQ ID NO: 35146 - DNA, 19 bp, Homo sapiens
gaaaaccaagttctctagc

SEQ ID NO: 35147 - DNA, 20 bp, Homo sapiens
caggtcataggccttttttg

SEQ ID NO: 35148 - DNA, 18 bp, Homo sapiens
ccatacatgcaggaaaaa

SEQ ID NO: 35149 - DNA, 20 bp, Homo sapiens
tgcaggtaattgcgataatc

SEQ ID NO: 35150 - DNA, 16 bp, Homo sapiens
cagaaaggccaccaca

SEQ ID NO: 35151 - DNA, 16 bp, Homo sapiens
aacatgtccactgggc

SEQ ID NO: 35152 - DNA, 17 bp, Homo sapiens
ctggatgtctccacctg

SEQ ID NO: 35153 - DNA, 16 bp, Homo sapiens
tccctttcactttgaa

SEQ ID NO: 35154 - DNA, 19 bp, Homo sapiens
taaaatcttgtccatttca

SEQ ID NO: 35155 - DNA, 17 bp, Homo sapiens
atgctctgggctccaat

SEQ ID NO: 35156 - DNA, 23 bp, Homo sapiens
ttaaaacagtataaaacattgct

SEQ ID NO: 35157 - DNA, 24 bp, Homo sapiens
gtatttttattctctgtaacaaca

SEQ ID NO: 35158 - DNA, 18 bp, Homo sapiens
ctgagagcagatgctatt

SEQ ID NO: 35159 - DNA, 19 bp, Homo sapiens
ggaaatcactatagagtgt

SEQ ID NO: 35160 - DNA, 18 bp, Homo sapiens
attatcccttccctagaa

SEQ ID NO: 35161 - DNA, 19 bp, Homo sapiens
cacagagagttagatggaa

SEQ ID NO: 35162 - DNA, 19 bp, Homo sapiens
atttcctttctggaattgg

SEQ ID NO: 35163 - DNA, 17 bp, Homo sapiens
ttggcacttttgatgga

SEQ ID NO: 35164 - DNA, 19 bp, Homo sapiens
agatttcctgattgttgct

SEQ ID NO: 35165 - DNA, 17 bp, Homo sapiens
tcccatcccttggtgta

SEQ ID NO: 35166 - DNA, 17 bp, Homo sapiens
ccagacaccccagatat

SEQ ID NO: 35167 - DNA, 21 bp, Homo sapiens
agtgtttgaggaaggtaatag

SEQ ID NO: 35168 - DNA, 17 bp, Homo sapiens
gccctgtagcatttata

SEQ ID NO: 35169 - DNA, 23 bp, Homo sapiens
taatcttaggtttaagcaacaat

SEQ ID NO: 35170 - DNA, 18 bp, Homo sapiens
gttattggctttaacaga

SEQ ID NO: 35171 - DNA, 16 bp, Homo sapiens
actcttggccagcagg

SEQ ID NO: 35172 - DNA, 18 bp, Homo sapiens
gcattagaaggagctatt

SEQ ID NO: 35173 - DNA, 20 bp, Homo sapiens
tcagcatcccaagcttctgt

SEQ ID NO: 35174 - DNA, 17 bp, Homo sapiens
ttcaagcagatgctctg

SEQ ID NO: 35175 - DNA, 22 bp, Homo sapiens
aattcacatgcattaccgacac

SEQ ID NO: 35176 - DNA, 24 bp, Homo sapiens
acacctcctttctcagggaatcct

SEQ ID NO: 35177 - DNA, 18 bp, Homo sapiens
tgaagagagctggagaaa

SEQ ID NO: 35178 - DNA, 22 bp, Homo sapiens
gtatgattctggcaacagaaaa

SEQ ID NO: 35179 - DNA, 17 bp, Homo sapiens
gagtggctgagaggcat

SEQ ID NO: 35180 - DNA, 17 bp, Homo sapiens
acaatttccggagtgtc

SEQ ID NO: 35181 - DNA, 18 bp, Homo sapiens
cgtctaggtgacatctat

SEQ ID NO: 35182 - DNA, 20 bp, Homo sapiens
ggcgatacttcctgtcactc

SEQ ID NO: 35183 - DNA, 19 bp, Homo sapiens
taagattcagactaacaca

SEQ ID NO: 35184 - DNA, 23 bp, Homo sapiens
ccaatgggaacccatcctatgcc

SEQ ID NO: 35185 - DNA, 18 bp, Homo sapiens
actagccattctaaacca

SEQ ID NO: 35186 - DNA, 16 bp, Homo sapiens
ttcaggctcggaaggc

SEQ ID NO: 35187 - DNA, 23 bp, Homo sapiens
catttcagaacattatcctaaag

SEQ ID NO: 35188 - DNA, 18 bp, Homo sapiens
cgacatagactacaagca

SEQ ID NO: 35189 - DNA, 23 bp, Homo sapiens
catggcacaaaagagttagaatg

SEQ ID NO: 35190 - DNA, 18 bp, Homo sapiens
agttcagcagcccagtgg

SEQ ID NO: 35191 - DNA, 18 bp, Homo sapiens
actctgcaggtcataggc

SEQ ID NO: 35192 - DNA, 16 bp, Homo sapiens
gccaagatccagagtg

SEQ ID NO: 35193 - DNA, 16 bp, Homo sapiens
cattcatgcaggggat

SEQ ID NO: 35194 - DNA, 16 bp, Homo sapiens
accatattggggcccg

SEQ ID NO: 35195 - DNA, 16 bp, Homo sapiens
cacccccagcatgtcc

SEQ ID NO: 35196 - DNA, 26 bp, Homo sapiens
cttgtcattatactcatatctctatt

SEQ ID NO: 35197 - DNA, 16 bp, Homo sapiens
gtactccctgtcactc

SEQ ID NO: 35198 - DNA, 21 bp, Homo sapiens
aaagaaaaagaaacaatgtga

SEQ ID NO: 35199 - DNA, 19 bp, Homo sapiens
catccttaatgttccgggc

SEQ ID NO: 35200 - DNA, 21 bp, Homo sapiens
tgacttttaaaaatagggttg

SEQ ID NO: 35201 - DNA, 20 bp, Homo sapiens
tgcttttctttttttccatt

SEQ ID NO: 35202 - DNA, 18 bp, Homo sapiens
cgtctggatgccattcca

SEQ ID NO: 35203 - DNA, 21 bp, Homo sapiens
ttataggggtaactaaatttc

SEQ ID NO: 35204 - DNA, 19 bp, Homo sapiens
ctacagaaactctataaac

SEQ ID NO: 35205 - DNA, 22 bp, Homo sapiens
ctttgaataagaaatggctttt

SEQ ID NO: 35206 - DNA, 23 bp, Homo sapiens
aaactaataatgaacagcttcac

SEQ ID NO: 35207 - DNA, 16 bp, Homo sapiens
gccttggctgcttgga

SEQ ID NO: 35208 - DNA, 17 bp, Homo sapiens
aacccaccctaatgatt

SEQ ID NO: 35209 - DNA, 23 bp, Homo sapiens
ccttcttggactcttccaaagca

SEQ ID NO: 35210 - DNA, 20 bp, Homo sapiens
ggacccaccacaaagctcaa

SEQ ID NO: 35211 - DNA, 17 bp, Homo sapiens
tgcctgatacaccagaa

SEQ ID NO: 35212 - DNA, 20 bp, Homo sapiens
ttgtagtatgtgtagtaaat

SEQ ID NO: 35213 - DNA, 19 bp, Homo sapiens
tttttttgtagcgcttata

SEQ ID NO: 35214 - DNA, 18 bp, Homo sapiens
tttgcctttctgttcatt

SEQ ID NO: 35215 - DNA, 25 bp, Homo sapiens
atcaaaacaataatatctgtgaaca

SEQ ID NO: 35216 - DNA, 22 bp, Homo sapiens
tattcggttgagtttggctaac

SEQ ID NO: 35217 - DNA, 24 bp, Homo sapiens
tgcagctttaataattttatttct

SEQ ID NO: 35218 - DNA, 16 bp, Homo sapiens
tgtcccaggcttcagt

SEQ ID NO: 35219 - DNA, 20 bp, Homo sapiens
tgaagtatcactaagtaact

SEQ ID NO: 35220 - DNA, 16 bp, Homo sapiens
acggacactccggagc

SEQ ID NO: 35221 - DNA, 28 bp, Homo sapiens
cataatgcttattattatctttaaaatg

SEQ ID NO: 35222 - DNA, 22 bp, Homo sapiens
ggagaattacttagtgatacta

SEQ ID NO: 35223 - DNA, 21 bp, Homo sapiens
tgtggtaactttcggtatcta

SEQ ID NO: 35224 - DNA, 16 bp, Homo sapiens
aaaggcattggctggg

SEQ ID NO: 35225 - DNA, 18 bp, Homo sapiens
tgttttttgccagcacct

SEQ ID NO: 35226 - DNA, 24 bp, Homo sapiens
attaataaatctgtttcttatctg

SEQ ID NO: 35227 - DNA, 18 bp, Homo sapiens
acgctgacggtagatagt

SEQ ID NO: 35228 - DNA, 21 bp, Homo sapiens
catcggtatttttgtgtttct

SEQ ID NO: 35229 - DNA, 20 bp, Homo sapiens
ttccaaggaatcaatcggaa

SEQ ID NO: 35230 - DNA, 19 bp, Homo sapiens
taggattcaataatgtgcg

SEQ ID NO: 35231 - DNA, 22 bp, Homo sapiens
ggagaagaaaacaaattgtagt

SEQ ID NO: 35232 - DNA, 20 bp, Homo sapiens
cgaccagaatgacatcattc

SEQ ID NO: 35233 - DNA, 21 bp, Homo sapiens
ttgtttgaaatatacaaacaa

SEQ ID NO: 35234 - DNA, 16 bp, Homo sapiens
accttggtcagcgatg

SEQ ID NO: 35235 - DNA, 21 bp, Homo sapiens
cgtttcagatccgcttttaac

SEQ ID NO: 35236 - DNA, 16 bp, Homo sapiens
aagacaaggtacagca

SEQ ID NO: 35237 - DNA, 20 bp, Homo sapiens
ataggctttccgtgcatgaa

SEQ ID NO: 35238 - DNA, 17 bp, Homo sapiens
gtccctccacattgcca

SEQ ID NO: 35239 - DNA, 23 bp, Homo sapiens
atgcagaggatgtttatagtcca

SEQ ID NO: 35240 - DNA, 16 bp, Homo sapiens
taaacagttgggtcac

SEQ ID NO: 35241 - DNA, 17 bp, Homo sapiens
agcatgtccactgggct

SEQ ID NO: 35242 - DNA, 18 bp, Homo sapiens
agccctttgtgcttcctt

SEQ ID NO: 35243 - DNA, 20 bp, Homo sapiens
gtcactctgcactttggcaa

SEQ ID NO: 35244 - DNA, 19 bp, Homo sapiens
ctctgttgccttaaagatt

SEQ ID NO: 35245 - DNA, 21 bp, Homo sapiens
gtactgctcgggcgccaatgt

SEQ ID NO: 35246 - DNA, 18 bp, Homo sapiens
gccaatgagcacaacagt

SEQ ID NO: 35247 - DNA, 23 bp, Homo sapiens
ctatgcctctgtgatgcttgtga

SEQ ID NO: 35248 - DNA, 17 bp, Homo sapiens
ccattcccattgtggct

SEQ ID NO: 35249 - DNA, 20 bp, Homo sapiens
ttgcctatgcactgaaggga

SEQ ID NO: 35250 - DNA, 16 bp, Homo sapiens
ctctatcgtcaggcca

SEQ ID NO: 35251 - DNA, 16 bp, Homo sapiens
tggctggcatgatggt

SEQ ID NO: 35252 - DNA, 22 bp, Homo sapiens
aaaatatacttttcgagtgaat

SEQ ID NO: 35253 - DNA, 22 bp, Homo sapiens
caatatcccgagaggccttggc

SEQ ID NO: 35254 - DNA, 20 bp, Homo sapiens
tgatttaaggctgaacatac

SEQ ID NO: 35255 - DNA, 16 bp, Homo sapiens
ggcttcttccatggcc

SEQ ID NO: 35256 - DNA, 16 bp, Homo sapiens
tcatgttggcaagaca

SEQ ID NO: 35257 - DNA, 18 bp, Homo sapiens
tggcataaaaagccaact

SEQ ID NO: 35258 - DNA, 17 bp, Homo sapiens
gaagcctgggacaaaga

SEQ ID NO: 35259 - DNA, 16 bp, Homo sapiens
ttcctacatcggcaac

SEQ ID NO: 35260 - DNA, 19 bp, Homo sapiens
tgtttacaacaaactgttt

SEQ ID NO: 35261 - DNA, 22 bp, Homo sapiens
actataatttattttattttgt

SEQ ID NO: 35262 - DNA, 18 bp, Homo sapiens
gaacagacagcaagaaag

SEQ ID NO: 35263 - DNA, 18 bp, Homo sapiens
tggacttgggtcttgtct

SEQ ID NO: 35264 - DNA, 27 bp, Homo sapiens
ttatattttgttacaataaatgtcttg

SEQ ID NO: 35265 - DNA, 23 bp, Homo sapiens
cccatatattgttatctaacaga

SEQ ID NO: 35266 - DNA, 17 bp, Homo sapiens
taccagtgtgactgact

SEQ ID NO: 35267 - DNA, 24 bp, Homo sapiens
aatttaattggatttaaaaaagag

SEQ ID NO: 35268 - DNA, 17 bp, Homo sapiens
agctgctgaaatactga

SEQ ID NO: 35269 - DNA, 21 bp, Homo sapiens
atagccctgtcttattttcct

SEQ ID NO: 35270 - DNA, 16 bp, Homo sapiens
cagtggctgagaggca

SEQ ID NO: 35271 - DNA, 18 bp, Homo sapiens
tcttggccagcacctgct

SEQ ID NO: 35272 - DNA, 18 bp, Homo sapiens
cttcagtaatactcgctt

SEQ ID NO: 35273 - DNA, 18 bp, Homo sapiens
tggcggtagatgttatca

SEQ ID NO: 35274 - DNA, 20 bp, Homo sapiens
gaaatttgactatccaagct

SEQ ID NO: 35275 - DNA, 19 bp, Homo sapiens
atagacccaatggggaccc

SEQ ID NO: 35276 - DNA, 18 bp, Homo sapiens
agtaatacctgagactgt

SEQ ID NO: 35277 - DNA, 16 bp, Homo sapiens
tgacctccagagcgat

SEQ ID NO: 35278 - DNA, 20 bp, Homo sapiens
aggggaagagttgcctaaaa

SEQ ID NO: 35279 - DNA, 21 bp, Homo sapiens
tacaagaactacctgcacgag

SEQ ID NO: 35280 - DNA, 21 bp, Homo sapiens
ctacctaatgctagaccactg

SEQ ID NO: 35281 - DNA, 16 bp, Homo sapiens
tgctgggagtggtgtt

SEQ ID NO: 35282 - DNA, 23 bp, Homo sapiens
taccatggatcttaattactcac

SEQ ID NO: 35283 - DNA, 18 bp, Homo sapiens
gtgacagggagtataaga

SEQ ID NO: 35284 - DNA, 24 bp, Homo sapiens
atcattctggtcgggcaggcacgt

SEQ ID NO: 35285 - DNA, 17 bp, Homo sapiens
acattgaagatgacccc

SEQ ID NO: 35286 - DNA, 24 bp, Homo sapiens
gactaaggtctggcacttcttggc

SEQ ID NO: 35287 - DNA, 23 bp, Homo sapiens
cctttatttcagtacaaatacaa

SEQ ID NO: 35288 - DNA, 16 bp, Homo sapiens
cacttctcaaagtcct

SEQ ID NO: 35289 - DNA, 22 bp, Homo sapiens
gttttaaattaatgaggcttct

SEQ ID NO: 35290 - DNA, 19 bp, Homo sapiens
tggaccacatcatcttggg

SEQ ID NO: 35291 - DNA, 23 bp, Homo sapiens
gataaactgatatgcagattctt

SEQ ID NO: 35292 - DNA, 17 bp, Homo sapiens
gcggtaaccatctttgt

SEQ ID NO: 35293 - DNA, 16 bp, Homo sapiens
gtggctgccaaggcct

SEQ ID NO: 35294 - DNA, 21 bp, Homo sapiens
ttgatttagaaaaacaagcca

SEQ ID NO: 35295 - DNA, 18 bp, Homo sapiens
aaacttgccaatgaagaa

SEQ ID NO: 35296 - DNA, 18 bp, Homo sapiens
atcctgcctccccacttc

SEQ ID NO: 35297 - DNA, 18 bp, Homo sapiens
ctctgaattgttgatgtc

SEQ ID NO: 35298 - DNA, 18 bp, Homo sapiens
actgataacgtccctgga

SEQ ID NO: 35299 - DNA, 21 bp, Homo sapiens
gaattgtctccagttcctatc

SEQ ID NO: 35300 - DNA, 21 bp, Homo sapiens
agtcgtagcctttcttttttg

SEQ ID NO: 35301 - DNA, 23 bp, Homo sapiens
gctatatagtatttttggtagaa

SEQ ID NO: 35302 - DNA, 20 bp, Homo sapiens
gtttgccagtggaatcccat

SEQ ID NO: 35303 - DNA, 19 bp, Homo sapiens
atacaccagagattatgtt

SEQ ID NO: 35304 - DNA, 16 bp, Homo sapiens
aaatgaaagagccaca

SEQ ID NO: 35305 - DNA, 17 bp, Homo sapiens
agcgtttatacacagag

SEQ ID NO: 35306 - DNA, 16 bp, Homo sapiens
tagacaccaccaccac

SEQ ID NO: 35307 - DNA, 19 bp, Homo sapiens
tgaactttttgtcatttct

SEQ ID NO: 35308 - DNA, 16 bp, Homo sapiens
tttgttctgccttgcc

SEQ ID NO: 35309 - DNA, 23 bp, Homo sapiens
gaatactttatattcaagtctgg

SEQ ID NO: 35310 - DNA, 17 bp, Homo sapiens
tgtctttgtcccaggcc

SEQ ID NO: 35311 - DNA, 17 bp, Homo sapiens
gcaggtgctggccaaga

SEQ ID NO: 35312 - DNA, 21 bp, Homo sapiens
ttaaaaggtaaaaatgcgacc

SEQ ID NO: 35313 - DNA, 16 bp, Homo sapiens
atctaccgccagcctc

SEQ ID NO: 35314 - DNA, 22 bp, Homo sapiens
aaagtataataacatcttctgg

SEQ ID NO: 35315 - DNA, 18 bp, Homo sapiens
ccattgggtctatggatg

SEQ ID NO: 35316 - DNA, 22 bp, Homo sapiens
caccttattcatgttgagagca

SEQ ID NO: 35317 - DNA, 18 bp, Homo sapiens
ttttcctctgctcagaat

SEQ ID NO: 35318 - DNA, 16 bp, Homo sapiens
ttcagcttgtccggag

SEQ ID NO: 35319 - DNA, 23 bp, Homo sapiens
actgattctatttgcatatttac

SEQ ID NO: 35320 - DNA, 19 bp, Homo sapiens
gctctcttgcacttgacca

SEQ ID NO: 35321 - DNA, 20 bp, Homo sapiens
tagtttgccttatacaacgc

SEQ ID NO: 35322 - DNA, 22 bp, Homo sapiens
agccactggagatctgacttgt

SEQ ID NO: 35323 - DNA, 22 bp, Homo sapiens
ctttcttatgaagtctattagt

SEQ ID NO: 35324 - DNA, 16 bp, Homo sapiens
tcatccatgctcggca

SEQ ID NO: 35325 - DNA, 24 bp, Homo sapiens
atttaaatcttattcatggaccaa

SEQ ID NO: 35326 - DNA, 17 bp, Homo sapiens
gacgtggactataagaa

SEQ ID NO: 35327 - DNA, 23 bp, Homo sapiens
ggataattttcacatagtttaaa

SEQ ID NO: 35328 - DNA, 17 bp, Homo sapiens
tcagcagcccagtggac

SEQ ID NO: 35329 - DNA, 17 bp, Homo sapiens
ctctggaggtcataggc

SEQ ID NO: 35330 - DNA, 16 bp, Homo sapiens
gccaagatccagagtg

SEQ ID NO: 35331 - DNA, 17 bp, Homo sapiens
cactcgtgcaggtagtt

SEQ ID NO: 35332 - DNA, 20 bp, Homo sapiens
aacttggccaccatattgga

SEQ ID NO: 35333 - DNA, 16 bp, Homo sapiens
ccacccccagcatgtc

SEQ ID NO: 35334 - DNA, 18 bp, Homo sapiens
cctgatttgtgcattttc

SEQ ID NO: 35335 - DNA, 23 bp, Homo sapiens
caaagtcctttttgtactccctg

SEQ ID NO: 35336 - DNA, 20 bp, Homo sapiens
agtatgatgtaagcaagttg

SEQ ID NO: 35337 - DNA, 20 bp, Homo sapiens
catcttcaatgttccgggct

SEQ ID NO: 35338 - DNA, 16 bp, Homo sapiens
aggatgaaagccagga

SEQ ID NO: 35339 - DNA, 21 bp, Homo sapiens
ccctcttataaacatcaagat

SEQ ID NO: 35340 - DNA, 17 bp, Homo sapiens
atccccatcgtggcggc

SEQ ID NO: 35341 - DNA, 20 bp, Homo sapiens
acacaaatatatcaggatat

SEQ ID NO: 35342 - DNA, 19 bp, Homo sapiens
acaaacttgctaatgaaga

SEQ ID NO: 35343 - DNA, 19 bp, Homo sapiens
tgaaaatgccacattagat

SEQ ID NO: 35344 - DNA, 21 bp, Homo sapiens
gtcctctgtcagtttttagat

SEQ ID NO: 35345 - DNA, 20 bp, Homo sapiens
cactgatgatgtccctggag

SEQ ID NO: 35346 - DNA, 23 bp, Homo sapiens
aactctcaaaagaaagattatta

SEQ ID NO: 35347 - DNA, 22 bp, Homo sapiens
gtcatagcctttcttctttgct

SEQ ID NO: 35348 - DNA, 18 bp, Homo sapiens
gtttgacatttatgatgg

SEQ ID NO: 35349 - DNA, 16 bp, Homo sapiens
gccagacacaccagaa

SEQ ID NO: 35350 - DNA, 19 bp, Homo sapiens
aaaagattctttctaaagc

SEQ ID NO: 35351 - DNA, 18 bp, Homo sapiens
tgatagcgtttatacaca

SEQ ID NO: 35352 - DNA, 16 bp, Homo sapiens
aagcagcagtgtgcaa

SEQ ID NO: 35353 - DNA, 20 bp, Homo sapiens
tggccctaaaattcctatta

SEQ ID NO: 35354 - DNA, 18 bp, Homo sapiens
tcattcttgccaacataa

SEQ ID NO: 35355 - DNA, 21 bp, Homo sapiens
tgcataaaacacataatgtgt

SEQ ID NO: 35356 - DNA, 17 bp, Homo sapiens
gtcccaggcttctgtgt

SEQ ID NO: 35357 - DNA, 20 bp, Homo sapiens
aatgccatcactatgaacaa

SEQ ID NO: 35358 - DNA, 22 bp, Homo sapiens
aatagatagatgagaagccaat

SEQ ID NO: 35359 - DNA, 20 bp, Homo sapiens
cagattcaaatttaccagtg

SEQ ID NO: 35360 - DNA, 20 bp, Homo sapiens
tgttctttctttcctcatta

SEQ ID NO: 35361 - DNA, 19 bp, Homo sapiens
tggaaaaatgcaaaagggc

SEQ ID NO: 35362 - DNA, 24 bp, Homo sapiens
acttcgattcttaattttgaagtc

SEQ ID NO: 35363 - DNA, 19 bp, Homo sapiens
tgtacaagtctgatctcca

SEQ ID NO: 35364 - DNA, 19 bp, Homo sapiens
tgttccagagagtcagtca

SEQ ID NO: 35365 - DNA, 20 bp, Homo sapiens
gaaaatgcattgctgataca

SEQ ID NO: 35366 - DNA, 18 bp, Homo sapiens
tcaaaatttcagttgccc

SEQ ID NO: 35367 - DNA, 18 bp, Homo sapiens
ccgtccaccaaactaaat

SEQ ID NO: 35368 - DNA, 20 bp, Homo sapiens
cacccagccaatgcctctca

SEQ ID NO: 35369 - DNA, 23 bp, Homo sapiens
tcctctttggtctgaagggttaa

SEQ ID NO: 35370 - DNA, 17 bp, Homo sapiens
ctgcccgaccagagcga

SEQ ID NO: 35371 - DNA, 19 bp, Homo sapiens
caggggctggtgagcttgt

SEQ ID NO: 35372 - DNA, 18 bp, Homo sapiens
agtgccagaccttagtca

SEQ ID NO: 35373 - DNA, 23 bp, Homo sapiens
tttcccacctctgcacgttatta

SEQ ID NO: 35374 - DNA, 16 bp, Homo sapiens
gagaagtggaagacca

SEQ ID NO: 35375 - DNA, 18 bp, Homo sapiens
ctgccgagcatggatgac

SEQ ID NO: 35376 - DNA, 20 bp, Homo sapiens
cccaagatgatgtggtccat

SEQ ID NO: 35377 - DNA, 22 bp, Homo sapiens
ttcttgtagtccacatcgctga

SEQ ID NO: 35378 - DNA, 22 bp, Homo sapiens
acaaagaaggctatcgtaagca

SEQ ID NO: 35379 - DNA, 17 bp, Homo sapiens
tccactgggctgctgaa

SEQ ID NO: 35380 - DNA, 25 bp, Homo sapiens
tttactaaaagttaaaacagatgac

SEQ ID NO: 35381 - DNA, 19 bp, Homo sapiens
cactctggatcttggccac

SEQ ID NO: 35382 - DNA, 20 bp, Homo sapiens
ttacatattcagggaaaatt

SEQ ID NO: 35383 - DNA, 17 bp, Homo sapiens
gcaccaatgtggtggcc

SEQ ID NO: 35384 - DNA, 21 bp, Homo sapiens
tcatatgtgatgatatgtgct

SEQ ID NO: 35385 - DNA, 19 bp, Homo sapiens
tggcctttctgttgataac

SEQ ID NO: 35386 - DNA, 16 bp, Homo sapiens
cctatcaaggcagcca

SEQ ID NO: 35387 - DNA, 20 bp, Homo sapiens
aaactgttagcaacagcttt

SEQ ID NO: 35388 - DNA, 16 bp, Homo sapiens
aagcttggcctagaag

SEQ ID NO: 35389 - DNA, 20 bp, Homo sapiens
agaaataaatctttgagcca

SEQ ID NO: 35390 - DNA, 18 bp, Homo sapiens
ttttccttacaatgcact

SEQ ID NO: 35391 - DNA, 17 bp, Homo sapiens
aatatctctggaggcct

SEQ ID NO: 35392 - DNA, 18 bp, Homo sapiens
agctaaacaaaacaaagt

SEQ ID NO: 35393 - DNA, 22 bp, Homo sapiens
cataacctttcctcttggcttc

SEQ ID NO: 35394 - DNA, 19 bp, Homo sapiens
acagaagcttgggataaag

SEQ ID NO: 35395 - DNA, 24 bp, Homo sapiens
aatagtaagttggatttataaagt

SEQ ID NO: 35396 - DNA, 20 bp, Homo sapiens
gtctatttattactggccta

SEQ ID NO: 35397 - DNA, 18 bp, Homo sapiens
acttacctcactgtaatt

SEQ ID NO: 35398 - DNA, 19 bp, Homo sapiens
acaaataccgattcactga

SEQ ID NO: 35399 - DNA, 17 bp, Homo sapiens
aatgtggacagtggttt

SEQ ID NO: 35400 - DNA, 20 bp, Homo sapiens
gtggttttaaagtattgtgc

SEQ ID NO: 35401 - DNA, 20 bp, Homo sapiens
cttgtgtcaataagaagcac

SEQ ID NO: 35402 - DNA, 20 bp, Homo sapiens
tttaagttttccagccttat

SEQ ID NO: 35403 - DNA, 22 bp, Homo sapiens
aacaagttttcttttatacaaa

SEQ ID NO: 35404 - DNA, 16 bp, Homo sapiens
acgagccacccagatt

SEQ ID NO: 35405 - DNA, 18 bp, Homo sapiens
aacctcctcaaacaaaca

SEQ ID NO: 35406 - DNA, 16 bp, Homo sapiens
tcagtggctaaaaggc

SEQ ID NO: 35407 - DNA, 20 bp, Homo sapiens
aaaccattggtatggaatcc

SEQ ID NO: 35408 - DNA, 25 bp, Homo sapiens
aaattgtgataaatgatttaattat

SEQ ID NO: 35409 - DNA, 16 bp, Homo sapiens
tggtcactcaaaatct

SEQ ID NO: 35410 - DNA, 22 bp, Homo sapiens
aatatgaacttttatttagggg

SEQ ID NO: 35411 - DNA, 16 bp, Homo sapiens
tcatccagccaatgcc

SEQ ID NO: 35412 - DNA, 27 bp, Homo sapiens
tgttgatttataattcataccaaaaat

SEQ ID NO: 35413 - DNA, 24 bp, Homo sapiens
tctttctttgtggaataatggtgc

SEQ ID NO: 35414 - DNA, 23 bp, Homo sapiens
ggacatgcctgcccgaccagagc

SEQ ID NO: 35415 - DNA, 20 bp, Homo sapiens
agggtaattgtgtaaactca

SEQ ID NO: 35416 - DNA, 18 bp, Homo sapiens
aagtgccagaccttagtc

SEQ ID NO: 35417 - DNA, 22 bp, Homo sapiens
gacataatgttttgttggccaa

SEQ ID NO: 35418 - DNA, 16 bp, Homo sapiens
gagaagtggaagacca

SEQ ID NO: 35419 - DNA, 16 bp, Homo sapiens
ccgagcatggatgaca

SEQ ID NO: 35420 - DNA, 20 bp, Homo sapiens
cccaagatgatgtggtccat

SEQ ID NO: 35421 - DNA, 24 bp, Homo sapiens
cttgtagtccacgtcgctgactaa

SEQ ID NO: 35422 - DNA, 24 bp, Homo sapiens
agtacaaggaaggctttcgcaagc

SEQ ID NO: 35423 - DNA, 17 bp, Homo sapiens
tccactgggctgctgaa

SEQ ID NO: 35424 - DNA, 18 bp, Homo sapiens
tggcaacagaagtaaatt

SEQ ID NO: 35425 - DNA, 22 bp, Homo sapiens
gtcactctggatcttggccaca

SEQ ID NO: 35426 - DNA, 18 bp, Homo sapiens
gctctctaggcttagtaa

SEQ ID NO: 35427 - DNA, 16 bp, Homo sapiens
atgtggtggccgagct

SEQ ID NO: 35428 - DNA, 21 bp, Homo sapiens
tgtatggaatttcatagctga

SEQ ID NO: 35429 - DNA, 23 bp, Homo sapiens
ccttgatcttatcctcatcccac

SEQ ID NO: 35430 - DNA, 16 bp, Homo sapiens
acgatcttcctgttga

SEQ ID NO: 35431 - DNA, 26 bp, Homo sapiens
cccttagattttgttcaatttaaaat

SEQ ID NO: 35432 - DNA, 22 bp, Homo sapiens
cccaaaatgatcttcatttctt

SEQ ID NO: 35433 - DNA, 22 bp, Homo sapiens
caatatcaacagaggataaaat

SEQ ID NO: 35434 - DNA, 22 bp, Homo sapiens
actcaaaatatttagcacattt

SEQ ID NO: 35435 - DNA, 22 bp, Homo sapiens
tgctgctttgattggtatggca

SEQ ID NO: 35436 - DNA, 21 bp, Homo sapiens
tcaatgggcataatttctaat

SEQ ID NO: 35437 - DNA, 19 bp, Homo sapiens
acccattcggtagagtttc

SEQ ID NO: 35438 - DNA, 19 bp, Homo sapiens
acattgttctggctaaagc

SEQ ID NO: 35439 - DNA, 27 bp, Homo sapiens
aatctaagtcatatgtagttaattaat

SEQ ID NO: 35440 - DNA, 18 bp, Homo sapiens
agagaagcttgggacaaa

SEQ ID NO: 35441 - DNA, 23 bp, Homo sapiens
gatttagaaacaattaaaatgag

SEQ ID NO: 35442 - DNA, 23 bp, Homo sapiens
atcattcactaatctaacaacac

SEQ ID NO: 35443 - DNA, 18 bp, Homo sapiens
acatcacttgtgttgatt

SEQ ID NO: 35444 - DNA, 27 bp, Homo sapiens
ttatatcaattctgtataatgtttaat

SEQ ID NO: 35445 - DNA, 18 bp, Homo sapiens
tgtggatctgagtcttgt

SEQ ID NO: 35446 - DNA, 18 bp, Homo sapiens
cccagataagtcaagaaa

SEQ ID NO: 35447 - DNA, 16 bp, Homo sapiens
agttctggcaaagaca

SEQ ID NO: 35448 - DNA, 22 bp, Homo sapiens
ttttatgtggtgatgtatgagg

SEQ ID NO: 35449 - DNA, 17 bp, Homo sapiens
aatatcgtcagcctcca

SEQ ID NO: 35450 - DNA, 24 bp, Homo sapiens
aagtgctattgagcaaacactagg

SEQ ID NO: 35451 - DNA, 18 bp, Homo sapiens
tggagtcccttgggttct

SEQ ID NO: 35452 - DNA, 22 bp, Homo sapiens
tcacatcactcctatttttggc

SEQ ID NO: 35453 - DNA, 18 bp, Homo sapiens
tgctctgtcttttcacag

SEQ ID NO: 35454 - DNA, 20 bp, Homo sapiens
ctggtgaacttgtttctgtc

SEQ ID NO: 35455 - DNA, 22 bp, Homo sapiens
tgtaatgcatagaatcacttga

SEQ ID NO: 35456 - DNA, 17 bp, Homo sapiens
ttcttttctgcctctaa

SEQ ID NO: 35457 - DNA, 17 bp, Homo sapiens
agtcaaagagaagcaga

SEQ ID NO: 35458 - DNA, 22 bp, Homo sapiens
aaggtcagatttatatagattc

SEQ ID NO: 35459 - DNA, 16 bp, Homo sapiens
cacctggacccttgat

SEQ ID NO: 35460 - DNA, 17 bp, Homo sapiens
tctgcctgatcagaacg

SEQ ID NO: 35461 - DNA, 25 bp, Homo sapiens
aataataattcctaatttctgcttc

SEQ ID NO: 35462 - DNA, 17 bp, Homo sapiens
aagtgtcaggagttggt

SEQ ID NO: 35463 - DNA, 27 bp, Homo sapiens
aattaatatataaactattggatttaa

SEQ ID NO: 35464 - DNA, 19 bp, Homo sapiens
gactttgagaagtggaaaa

SEQ ID NO: 35465 - DNA, 18 bp, Homo sapiens
tagcttgcacaacatcgt

SEQ ID NO: 35466 - DNA, 17 bp, Homo sapiens
cttgtgttgtccatgaa

SEQ ID NO: 35467 - DNA, 24 bp, Homo sapiens
agttcttgtagtccacgtcactaa

SEQ ID NO: 35468 - DNA, 16 bp, Homo sapiens
ggctaccgaaagcaac

SEQ ID NO: 35469 - DNA, 19 bp, Homo sapiens
tccactgggctggagaact

SEQ ID NO: 35470 - DNA, 16 bp, Homo sapiens
ttggcctttgtgtact

SEQ ID NO: 35471 - DNA, 18 bp, Homo sapiens
ctctgcattttggctaca

SEQ ID NO: 35472 - DNA, 16 bp, Homo sapiens
tagacccctgtctcaa

SEQ ID NO: 35473 - DNA, 23 bp, Homo sapiens
tccggaatccaacatggtggcca

SEQ ID NO: 35474 - DNA, 16 bp, Homo sapiens
ctactagggaggctga

SEQ ID NO: 35475 - DNA, 21 bp, Homo sapiens
aaagagaagagtgaactccgg

SEQ ID NO: 35476 - DNA, 18 bp, Homo sapiens
ctcccagttgatgcaatt

SEQ ID NO: 35477 - DNA, 21 bp, Homo sapiens
ttgaaaggtaaagactatcca

SEQ ID NO: 35478 - DNA, 25 bp, Homo sapiens
atatctttaattttcagaaactcta

SEQ ID NO: 35479 - DNA, 23 bp, Homo sapiens
tatagccttatagaactcaaact

SEQ ID NO: 35480 - DNA, 18 bp, Homo sapiens
aggtaaacttttccctaa

SEQ ID NO: 35481 - DNA, 17 bp, Homo sapiens
agctgtacagaaattgc

SEQ ID NO: 35482 - DNA, 26 bp, Homo sapiens
atttttatccatatctttaaagatag

SEQ ID NO: 35483 - DNA, 22 bp, Homo sapiens
cttcttcccatccaagtttata

SEQ ID NO: 35484 - DNA, 22 bp, Homo sapiens
gcctttgctcttaagcactcta

SEQ ID NO: 35485 - DNA, 17 bp, Homo sapiens
gcctgatacaccagata

SEQ ID NO: 35486 - DNA, 19 bp, Homo sapiens
tccattgcttcaacattta

SEQ ID NO: 35487 - DNA, 16 bp, Homo sapiens
tttcccacttcctagc

SEQ ID NO: 35488 - DNA, 19 bp, Homo sapiens
ttcaatacaaaacttaaaa

SEQ ID NO: 35489 - DNA, 27 bp, Homo sapiens
aagtactaatatataaatacatatttt

SEQ ID NO: 35490 - DNA, 18 bp, Homo sapiens
tctgcttggcttgtaaaa

SEQ ID NO: 35491 - DNA, 20 bp, Homo sapiens
ttctgaattatatgctactt

SEQ ID NO: 35492 - DNA, 20 bp, Homo sapiens
tttattccaatcaatggtgt

SEQ ID NO: 35493 - DNA, 18 bp, Homo sapiens
aaataagagatgggcaga

SEQ ID NO: 35494 - DNA, 20 bp, Homo sapiens
gattccatggacatggtgct

SEQ ID NO: 35495 - DNA, 19 bp, Homo sapiens
cacagcctaggaatgatgg

SEQ ID NO: 35496 - DNA, 19 bp, Homo sapiens
ctgaatatgccagtgatca

SEQ ID NO: 35497 - DNA, 21 bp, Homo sapiens
ctttcctcacgtgggagctgt

SEQ ID NO: 35498 - DNA, 20 bp, Homo sapiens
aaagggcttggctggagtcc

SEQ ID NO: 35499 - DNA, 17 bp, Homo sapiens
ttctgcttggcaagcac

SEQ ID NO: 35500 - DNA, 20 bp, Homo sapiens
agaatttgcttatcttcttt

SEQ ID NO: 35501 - DNA, 20 bp, Homo sapiens
ttgctcgggtgctggcggta

SEQ ID NO: 35502 - DNA, 17 bp, Homo sapiens
gggagatcacagtctgt

SEQ ID NO: 35503 - DNA, 22 bp, Homo sapiens
cttctccacttccagagaacct

SEQ ID NO: 35504 - DNA, 18 bp, Homo sapiens
gcatacagagtgatgtaa

SEQ ID NO: 35505 - DNA, 23 bp, Homo sapiens
cttgcttatattcattctataaa

SEQ ID NO: 35506 - DNA, 17 bp, Homo sapiens
cacaagtacatcctcct

SEQ ID NO: 35507 - DNA, 17 bp, Homo sapiens
caaaccatggcatgtaa

SEQ ID NO: 35508 - DNA, 20 bp, Homo sapiens
ctcagtgtcacggctgcaaa

SEQ ID NO: 35509 - DNA, 23 bp, Homo sapiens
tcacccaagtagaagaaagcctt

SEQ ID NO: 35510 - DNA, 20 bp, Homo sapiens
gatcgggagtacaagaaaaa

SEQ ID NO: 35511 - DNA, 22 bp, Homo sapiens
tcaatgttcattgcatctggaa

SEQ ID NO: 35512 - DNA, 17 bp, Homo sapiens
ctcgaggatgatcccaa

SEQ ID NO: 35513 - DNA, 21 bp, Homo sapiens
ttggtgatgttggcttgggca

SEQ ID NO: 35514 - DNA, 21 bp, Homo sapiens
ttcttcacagtataaatacaa

SEQ ID NO: 35515 - DNA, 18 bp, Homo sapiens
gctggtctttgtgttctc

SEQ ID NO: 35516 - DNA, 21 bp, Homo sapiens
gcatattgacactagatcgat

SEQ ID NO: 35517 - DNA, 20 bp, Homo sapiens
atggaatggactaatttggg

SEQ ID NO: 35518 - DNA, 24 bp, Homo sapiens
actatagagctctatacaaatata

SEQ ID NO: 35519 - DNA, 23 bp, Homo sapiens
ccttccctttttcataattgtac

SEQ ID NO: 35520 - DNA, 22 bp, Homo sapiens
atatcagagaaaacacaaaagc

SEQ ID NO: 35521 - DNA, 17 bp, Homo sapiens
tctcagacctgatgcaa

SEQ ID NO: 35522 - DNA, 20 bp, Homo sapiens
attgtgtccactcagtgttt

SEQ ID NO: 35523 - DNA, 19 bp, Homo sapiens
ctttgcctctctttacaga

SEQ ID NO: 35524 - DNA, 16 bp, Homo sapiens
cccagccaggtgaccg

SEQ ID NO: 35525 - DNA, 18 bp, Homo sapiens
acagtggtagtttactct

SEQ ID NO: 35526 - DNA, 18 bp, Homo sapiens
ctttgataggaattgcat

SEQ ID NO: 35527 - DNA, 17 bp, Homo sapiens
cagccactgaagcacca

SEQ ID NO: 35528 - DNA, 19 bp, Homo sapiens
aggaaagtttgtagagttt

SEQ ID NO: 35529 - DNA, 17 bp, Homo sapiens
cctactccaactccgca

SEQ ID NO: 35530 - DNA, 21 bp, Homo sapiens
atatcccccagattattttgg

SEQ ID NO: 35531 - DNA, 25 bp, Homo sapiens
attatttttaaaacattcactctca

SEQ ID NO: 35532 - DNA, 17 bp, Homo sapiens
tctctacaaacaagcat

SEQ ID NO: 35533 - DNA, 17 bp, Homo sapiens
ttcaaatctgctggaga

SEQ ID NO: 35534 - DNA, 18 bp, Homo sapiens
tgtactaagtgagcttct

SEQ ID NO: 35535 - DNA, 19 bp, Homo sapiens
taattgcatttgcctttgc

SEQ ID NO: 35536 - DNA, 22 bp, Homo sapiens
aattaatttaaacctagctaat

SEQ ID NO: 35537 - DNA, 16 bp, Homo sapiens
tgtcagcctcccatgc

SEQ ID NO: 35538 - DNA, 16 bp, Homo sapiens
tggttttggcccagaa

SEQ ID NO: 35539 - DNA, 22 bp, Homo sapiens
tttctaggtaaaataacctcaa

SEQ ID NO: 35540 - DNA, 17 bp, Homo sapiens
taccgccagcacccaga

SEQ ID NO: 35541 - DNA, 22 bp, Homo sapiens
aattatacctggattctctctg

SEQ ID NO: 35542 - DNA, 17 bp, Homo sapiens
ctctgggctccctggaa

SEQ ID NO: 35543 - DNA, 18 bp, Homo sapiens
ttcgttcataatttttgc

SEQ ID NO: 35544 - DNA, 18 bp, Homo sapiens
ctcttttgcagaatcagt

SEQ ID NO: 35545 - DNA, 18 bp, Homo sapiens
tacttcaaagtgtctggg

SEQ ID NO: 35546 - DNA, 17 bp, Homo sapiens
aacacacacttaggatt

SEQ ID NO: 35547 - DNA, 19 bp, Homo sapiens
ggctttcttgtttttctct

SEQ ID NO: 35548 - DNA, 19 bp, Homo sapiens
agcaaatattgaagtggaa

SEQ ID NO: 35549 - DNA, 17 bp, Homo sapiens
agtcagcatagtcagcc

SEQ ID NO: 35550 - DNA, 20 bp, Homo sapiens
gatctccttttgttaaagga

SEQ ID NO: 35551 - DNA, 17 bp, Homo sapiens
agctttgaattggccaa

SEQ ID NO: 35552 - DNA, 20 bp, Homo sapiens
atgttgggaaattgcagatg

SEQ ID NO: 35553 - DNA, 17 bp, Homo sapiens
gccaccaatgccaacta

SEQ ID NO: 35554 - DNA, 23 bp, Homo sapiens
gtcactcatggttgcttattatc

SEQ ID NO: 35555 - DNA, 20 bp, Homo sapiens
gacctccttccacaccccgg

SEQ ID NO: 35556 - DNA, 22 bp, Homo sapiens
tgaatctgcatcatatttttgg

SEQ ID NO: 35557 - DNA, 16 bp, Homo sapiens
gcaagtggccaagatg

SEQ ID NO: 35558 - DNA, 21 bp, Homo sapiens
aggtatggatcacgttcctgt

SEQ ID NO: 35559 - DNA, 17 bp, Homo sapiens
gccaaagggaaacacat

SEQ ID NO: 35560 - DNA, 17 bp, Homo sapiens
accacactgagcatgtc

SEQ ID NO: 35561 - DNA, 24 bp, Homo sapiens
attttcatcaccataatttcttct

SEQ ID NO: 35562 - DNA, 18 bp, Homo sapiens
ttgtattcccggtctgac

SEQ ID NO: 35563 - DNA, 20 bp, Homo sapiens
ccttcatctaagacaaagct

SEQ ID NO: 35564 - DNA, 19 bp, Homo sapiens
catcttccaggctccggaa

SEQ ID NO: 35565 - DNA, 18 bp, Homo sapiens
gagtttgctccctccctc

SEQ ID NO: 35566 - DNA, 20 bp, Homo sapiens
ttagagggtacttggatggg

SEQ ID NO: 35567 - DNA, 19 bp, Homo sapiens
cctgaggcctgatgccatt

SEQ ID NO: 35568 - DNA, 16 bp, Homo sapiens
aaccctgaatggagct

SEQ ID NO: 35569 - DNA, 20 bp, Homo sapiens
ttttattgtttagaaactgt

SEQ ID NO: 35570 - DNA, 19 bp, Homo sapiens
cttacttgctcaaccccaa

SEQ ID NO: 35571 - DNA, 16 bp, Homo sapiens
tgtagtcaggacctct

SEQ ID NO: 35572 - DNA, 18 bp, Homo sapiens
gaggctcttgcagccttt

SEQ ID NO: 35573 - DNA, 16 bp, Homo sapiens
ctggggagaaggttaa

SEQ ID NO: 35574 - DNA, 16 bp, Homo sapiens
tcttcccagccagctt

SEQ ID NO: 35575 - DNA, 20 bp, Homo sapiens
ttactctccagagtaaacca

SEQ ID NO: 35576 - DNA, 20 bp, Homo sapiens
tgttattggggttagaatag

SEQ ID NO: 35577 - DNA, 20 bp, Homo sapiens
gctctacactgaaaaatgga

SEQ ID NO: 35578 - DNA, 19 bp, Homo sapiens
cataagtatcagttccctt

SEQ ID NO: 35579 - DNA, 16 bp, Homo sapiens
ggtcaaacttgtcctg

SEQ ID NO: 35580 - DNA, 18 bp, Homo sapiens
cactcatggtgatttggt

SEQ ID NO: 35581 - DNA, 24 bp, Homo sapiens
tttcatccattttctaatatccat

SEQ ID NO: 35582 - DNA, 20 bp, Homo sapiens
catgaatggtggtcttgtcc

SEQ ID NO: 35583 - DNA, 22 bp, Homo sapiens
aacaatttttttcttattgtgt

SEQ ID NO: 35584 - DNA, 19 bp, Homo sapiens
ctaaacataatggaagcaa

SEQ ID NO: 35585 - DNA, 19 bp, Homo sapiens
gaagttcacttacgccatg

SEQ ID NO: 35586 - DNA, 23 bp, Homo sapiens
gaaagaaacactgtaggagacga

SEQ ID NO: 35587 - DNA, 17 bp, Homo sapiens
aaagaaagcaggagaga

SEQ ID NO: 35588 - DNA, 22 bp, Homo sapiens
ggttccctgggcgaggctggca

SEQ ID NO: 35589 - DNA, 17 bp, Homo sapiens
caattggatgaaaggga

SEQ ID NO: 35590 - DNA, 16 bp, Homo sapiens
gcctgttccattgtgt

SEQ ID NO: 35591 - DNA, 19 bp, Homo sapiens
ccctgactctttctgaaat

SEQ ID NO: 35592 - DNA, 19 bp, Homo sapiens
ggcgatacttcttctcact

SEQ ID NO: 35593 - DNA, 20 bp, Homo sapiens
ttctctttttctttttgatt

SEQ ID NO: 35594 - DNA, 18 bp, Homo sapiens
ctctatgggcacccagcc

SEQ ID NO: 35595 - DNA, 23 bp, Homo sapiens
tataattaatttcttctgaaaga

SEQ ID NO: 35596 - DNA, 16 bp, Homo sapiens
aggaatgccatgcaga

SEQ ID NO: 35597 - DNA, 21 bp, Homo sapiens
atcctaaaactctgagttctg

SEQ ID NO: 35598 - DNA, 17 bp, Homo sapiens
cagacagtcataccacc

SEQ ID NO: 35599 - DNA, 19 bp, Homo sapiens
tggagtaagtggctcctgt

SEQ ID NO: 35600 - DNA, 17 bp, Homo sapiens
tggatatggtcagtgtg

SEQ ID NO: 35601 - DNA, 20 bp, Homo sapiens
gtacatacatcactctgaat

SEQ ID NO: 35602 - DNA, 22 bp, Homo sapiens
atccagtctgatcgtgagtaca

SEQ ID NO: 35603 - DNA, 21 bp, Homo sapiens
atcgggcaggagagtgtagtg

SEQ ID NO: 35604 - DNA, 18 bp, Homo sapiens
gatttctcagtcttcagg

SEQ ID NO: 35605 - DNA, 17 bp, Homo sapiens
ctttgcagctgtcacac

SEQ ID NO: 35606 - DNA, 18 bp, Homo sapiens
tgccctttgttttcaaat

SEQ ID NO: 35607 - DNA, 20 bp, Homo sapiens
gctggcttcatagccctttt

SEQ ID NO: 35608 - DNA, 21 bp, Homo sapiens
ttgcttaatttgttgtataaa

SEQ ID NO: 35609 - DNA, 19 bp, Homo sapiens
ccagtttaggatcatcctg

SEQ ID NO: 35610 - DNA, 27 bp, Homo sapiens
aattgtttattttaaaatacaaaaaaa

SEQ ID NO: 35611 - DNA, 18 bp, Homo sapiens
gtaggcctccttatattt

SEQ ID NO: 35612 - DNA, 21 bp, Homo sapiens
tcaaatagttggaactacagg

SEQ ID NO: 35613 - DNA, 16 bp, Homo sapiens
tttgagaccagatgcc

SEQ ID NO: 35614 - DNA, 21 bp, Homo sapiens
tatttctgtagagacagggtc

SEQ ID NO: 35615 - DNA, 19 bp, Homo sapiens
acttttttgaaggctcatt

SEQ ID NO: 35616 - DNA, 23 bp, Homo sapiens
gatagaaagtttcctacttttaa

SEQ ID NO: 35617 - DNA, 17 bp, Homo sapiens
cattttggcattctgtt

SEQ ID NO: 35618 - DNA, 19 bp, Homo sapiens
tttttgcagcaacaattgg

SEQ ID NO: 35619 - DNA, 23 bp, Homo sapiens
acaaactaatagtcctaacttca

SEQ ID NO: 35620 - DNA, 21 bp, Homo sapiens
caatctgctttataatgagcc

SEQ ID NO: 35621 - DNA, 21 bp, Homo sapiens
aagcaaaattttattgccgcc

SEQ ID NO: 35622 - DNA, 19 bp, Homo sapiens
cctgaattgcctcagttta

SEQ ID NO: 35623 - DNA, 19 bp, Homo sapiens
cagggtccacactgaattg

SEQ ID NO: 35624 - DNA, 22 bp, Homo sapiens
tgtttttagttgaactacaagg

SEQ ID NO: 35625 - DNA, 22 bp, Homo sapiens
accagaaaggagaggcccgcat

SEQ ID NO: 35626 - DNA, 20 bp, Homo sapiens
gagtctctgcttgatgaaat

SEQ ID NO: 35627 - DNA, 22 bp, Homo sapiens
atgttgagggcgttgactttgg

SEQ ID NO: 35628 - DNA, 19 bp, Homo sapiens
cagagtaggtatttgtctc

SEQ ID NO: 35629 - DNA, 24 bp, Homo sapiens
cttgtgcttcagtttctctccctc

SEQ ID NO: 35630 - DNA, 23 bp, Homo sapiens
aagatcccagttgcctcaaaagg

SEQ ID NO: 35631 - DNA, 17 bp, Homo sapiens
gcctgattccatgggca

SEQ ID NO: 35632 - DNA, 22 bp, Homo sapiens
catagatgcatcctcacacatt

SEQ ID NO: 35633 - DNA, 24 bp, Homo sapiens
caagaaagcaggcgatgcattaaa

SEQ ID NO: 35634 - DNA, 23 bp, Homo sapiens
tgtggttatttacgggcaaatca

SEQ ID NO: 35635 - DNA, 16 bp, Homo sapiens
gaagggcatcggatgg

SEQ ID NO: 35636 - DNA, 17 bp, Homo sapiens
atgctgagccaacacca

SEQ ID NO: 35637 - DNA, 21 bp, Homo sapiens
agggtatcttctcatattagc

SEQ ID NO: 35638 - DNA, 17 bp, Homo sapiens
gtgctgtcgatacttcc

SEQ ID NO: 35639 - DNA, 19 bp, Homo sapiens
ttcatttcccttggataga

SEQ ID NO: 35640 - DNA, 23 bp, Homo sapiens
cacctccagggaaccaataggga

SEQ ID NO: 35641 - DNA, 17 bp, Homo sapiens
ccacactccagataagc

SEQ ID NO: 35642 - DNA, 17 bp, Homo sapiens
tgagcatacgaggaatg

SEQ ID NO: 35643 - DNA, 23 bp, Homo sapiens
ttattctaaagtgcatttgtcaa

SEQ ID NO: 35644 - DNA, 19 bp, Homo sapiens
gctaccaatgtcaactaca

SEQ ID NO: 35645 - DNA, 24 bp, Homo sapiens
aaaagcgagaagtgatcatccttt

SEQ ID NO: 35646 - DNA, 17 bp, Homo sapiens
accatacccctggggac

SEQ ID NO: 35647 - DNA, 18 bp, Homo sapiens
cactctgaatttgattga

SEQ ID NO: 35648 - DNA, 24 bp, Homo sapiens
ctatatgaatgtggcaaagctgca

SEQ ID NO: 35649 - DNA, 23 bp, Homo sapiens
tatgtgtaatgatgcaatggctg

SEQ ID NO: 35650 - DNA, 17 bp, Homo sapiens
aaagcatgtgggtttca

SEQ ID NO: 35651 - DNA, 17 bp, Homo sapiens
tgatgctaaccatgtcc

SEQ ID NO: 35652 - DNA, 16 bp, Homo sapiens
gctaacccaattctgc

SEQ ID NO: 35653 - DNA, 20 bp, Homo sapiens
tcttgtattcacgatcagac

SEQ ID NO: 35654 - DNA, 19 bp, Homo sapiens
caaagctctgagtgtcttt

SEQ ID NO: 35655 - DNA, 18 bp, Homo sapiens
gatcatcctggaggcttc

SEQ ID NO: 35656 - DNA, 16 bp, Homo sapiens
actttttggagggggt

SEQ ID NO: 35657 - DNA, 21 bp, Homo sapiens
aagaaccacaaaaatgtttct

SEQ ID NO: 35658 - DNA, 16 bp, Homo sapiens
cccatcactgcagcca

SEQ ID NO: 35659 - DNA, 23 bp, Homo sapiens
atttaaatgccattaatttaaca

SEQ ID NO: 35660 - DNA, 17 bp, Homo sapiens
ggtctgttataaacggg

SEQ ID NO: 35661 - DNA, 18 bp, Homo sapiens
cttttcaaaaaggcaaac

SEQ ID NO: 35662 - DNA, 16 bp, Homo sapiens
cccagcagttgaggaa

SEQ ID NO: 35663 - DNA, 18 bp, Homo sapiens
caatgtttctcgatgcct

SEQ ID NO: 35664 - DNA, 19 bp, Homo sapiens
ctaaagcagtatgtgctat

SEQ ID NO: 35665 - DNA, 20 bp, Homo sapiens
gcccttggctattaagtcat

SEQ ID NO: 35666 - DNA, 16 bp, Homo sapiens
ccaggccaagtgcaat

SEQ ID NO: 35667 - DNA, 22 bp, Homo sapiens
atgttccagtaggggatttgtg

SEQ ID NO: 35668 - DNA, 23 bp, Homo sapiens
agatcttatacaaggctaaagga

SEQ ID NO: 35669 - DNA, 21 bp, Homo sapiens
agtctataattttattgtcag

SEQ ID NO: 35670 - DNA, 21 bp, Homo sapiens
taaagcaaacaattaatagat

SEQ ID NO: 35671 - DNA, 20 bp, Homo sapiens
cttatattgtaagcattgca

SEQ ID NO: 35672 - DNA, 20 bp, Homo sapiens
gcctttgatgatttttaaca

SEQ ID NO: 35673 - DNA, 22 bp, Homo sapiens
atttatgtttcacatcttctcc

SEQ ID NO: 35674 - DNA, 21 bp, Homo sapiens
agacttgttggtattaaagat

SEQ ID NO: 35675 - DNA, 16 bp, Homo sapiens
aggcaaaacagaacac

SEQ ID NO: 35676 - DNA, 30 bp, Homo sapiens
aaaaattaaataaacaaaataatttaaaat

SEQ ID NO: 35677 - DNA, 18 bp, Homo sapiens
gtacaggcaacatccaga

SEQ ID NO: 35678 - DNA, 24 bp, Homo sapiens
ggctgctgtttacttttctaaaaa

SEQ ID NO: 35679 - DNA, 16 bp, Homo sapiens
ttggcagtctcgacgt

SEQ ID NO: 35680 - DNA, 21 bp, Homo sapiens
cacatcactgacttgcttcgt

SEQ ID NO: 35681 - DNA, 17 bp, Homo sapiens
ctgtagaacgtctacaa

SEQ ID NO: 35682 - DNA, 22 bp, Homo sapiens
aatgctggtaaatttgagggtg

SEQ ID NO: 35683 - DNA, 16 bp, Homo sapiens
ttcagagcctgccatg

SEQ ID NO: 35684 - DNA, 19 bp, Homo sapiens
gcctttttaactttttcga

SEQ ID NO: 35685 - DNA, 21 bp, Homo sapiens
gtctaagaacatgatgcagat

SEQ ID NO: 35686 - DNA, 24 bp, Homo sapiens
tccagttgttgtagtcttccttgt

SEQ ID NO: 35687 - DNA, 21 bp, Homo sapiens
ataagcattctctccatcatt

SEQ ID NO: 35688 - DNA, 24 bp, Homo sapiens
gggcctaggacagggttcttttca

SEQ ID NO: 35689 - DNA, 17 bp, Homo sapiens
tatgttcaatgtcgtgg

SEQ ID NO: 35690 - DNA, 18 bp, Homo sapiens
acacttacatcactctgt

SEQ ID NO: 35691 - DNA, 17 bp, Homo sapiens
acaatcagatcgggagt

SEQ ID NO: 35692 - DNA, 20 bp, Homo sapiens
ggcgtcaggcaagtaggtgt

SEQ ID NO: 35693 - DNA, 19 bp, Homo sapiens
ttggcttccaaagtcttca

SEQ ID NO: 35694 - DNA, 20 bp, Homo sapiens
tcctgggctttcttagccgc

SEQ ID NO: 35695 - DNA, 20 bp, Homo sapiens
ttgtttacaataggttcagt

SEQ ID NO: 35696 - DNA, 25 bp, Homo sapiens
tgtcttctcatagtcttttttatac

SEQ ID NO: 35697 - DNA, 19 bp, Homo sapiens
cttcaaatcatggcctcat

SEQ ID NO: 35698 - DNA, 18 bp, Homo sapiens
atgaaccagtttagggtc

SEQ ID NO: 35699 - DNA, 21 bp, Homo sapiens
tgcaagtgaattgttaattgt

SEQ ID NO: 35700 - DNA, 20 bp, Homo sapiens
cttttcatagtcttttttgt

SEQ ID NO: 35701 - DNA, 16 bp, Homo sapiens
ttcccatcagagctgc

SEQ ID NO: 35702 - DNA, 19 bp, Homo sapiens
gatttgcttccaattgggg

SEQ ID NO: 35703 - DNA, 18 bp, Homo sapiens
tacaaagcagacttgaaa

SEQ ID NO: 35704 - DNA, 16 bp, Homo sapiens
gcccacccacccacat

SEQ ID NO: 35705 - DNA, 19 bp, Homo sapiens
cagactttactaacacagt

SEQ ID NO: 35706 - DNA, 24 bp, Homo sapiens
tcactcgccgcctgcctggcagct

SEQ ID NO: 35707 - DNA, 19 bp, Homo sapiens
gctaaagttaatgcctaca

SEQ ID NO: 35708 - DNA, 24 bp, Homo sapiens
gtcatatcccttcttgctcaagtc

SEQ ID NO: 35709 - DNA, 19 bp, Homo sapiens
ggagaggaaattattcaca

SEQ ID NO: 35710 - DNA, 21 bp, Homo sapiens
aagtacaacttagagactgtg

SEQ ID NO: 35711 - DNA, 21 bp, Homo sapiens
ttttctttctactttatttgt

SEQ ID NO: 35712 - DNA, 16 bp, Homo sapiens
gcacctcactgatatt

SEQ ID NO: 35713 - DNA, 18 bp, Homo sapiens
taaaaccacctctgtgaa

SEQ ID NO: 35714 - DNA, 22 bp, Homo sapiens
gcaggtctggtggcaggttgta

SEQ ID NO: 35715 - DNA, 21 bp, Homo sapiens
ccttgaatgcctacagatatt

SEQ ID NO: 35716 - DNA, 24 bp, Homo sapiens
tccaattacagtacagtctaaaat

SEQ ID NO: 35717 - DNA, 21 bp, Homo sapiens
acagatgcttgtgtaattggg

SEQ ID NO: 35718 - DNA, 16 bp, Homo sapiens
atcgccaacatccaga

SEQ ID NO: 35719 - DNA, 24 bp, Homo sapiens
aatacaaatgtatttgtattagtt

SEQ ID NO: 35720 - DNA, 18 bp, Homo sapiens
cgtattaatcttcagtgg

SEQ ID NO: 35721 - DNA, 16 bp, Homo sapiens
atcactcctctgggcc

SEQ ID NO: 35722 - DNA, 24 bp, Homo sapiens
tttgcattttaaaatcatgaaaaa

SEQ ID NO: 35723 - DNA, 19 bp, Homo sapiens
cgaggtaaacttgagggtg

SEQ ID NO: 35724 - DNA, 23 bp, Homo sapiens
aaaggtttgtgctggtctccctg

SEQ ID NO: 35725 - DNA, 17 bp, Homo sapiens
ccttttgggtccttaga

SEQ ID NO: 35726 - DNA, 19 bp, Homo sapiens
gagaatgaagcaatgaagg

SEQ ID NO: 35727 - DNA, 18 bp, Homo sapiens
tggtgttttaggttgaat

SEQ ID NO: 35728 - DNA, 16 bp, Homo sapiens
caccactctccctctg

SEQ ID NO: 35729 - DNA, 18 bp, Homo sapiens
tgggtaaaactttgatga

SEQ ID NO: 35730 - DNA, 19 bp, Homo sapiens
tcgctttgccttttccatt

SEQ ID NO: 35731 - DNA, 29 bp, Homo sapiens
aagaaatatataaaataaccttaatgtct

SEQ ID NO: 35732 - DNA, 16 bp, Homo sapiens
ttgtagtcagctttgt

SEQ ID NO: 35733 - DNA, 18 bp, Homo sapiens
tgaagggcatgctcttat

SEQ ID NO: 35734 - DNA, 17 bp, Homo sapiens
ccccctgatagcatcaa

SEQ ID NO: 35735 - DNA, 18 bp, Homo sapiens
cctctaagaagtgcaaaa

SEQ ID NO: 35736 - DNA, 18 bp, Homo sapiens
aagaaatctcaggcaatt

SEQ ID NO: 35737 - DNA, 20 bp, Homo sapiens
tttttaaaagaggggctaca

SEQ ID NO: 35738 - DNA, 23 bp, Homo sapiens
gaaaagattatgaaaagtcaaaa

SEQ ID NO: 35739 - DNA, 21 bp, Homo sapiens
gccttcttggcaaggtccaca

SEQ ID NO: 35740 - DNA, 21 bp, Homo sapiens
catcgaggatttgtgataata

SEQ ID NO: 35741 - DNA, 17 bp, Homo sapiens
taatcaacgtcgctggc

SEQ ID NO: 35742 - DNA, 19 bp, Homo sapiens
tgtttgactctttctctaa

SEQ ID NO: 35743 - DNA, 18 bp, Homo sapiens
tcaagaggtgccgtgtag

SEQ ID NO: 35744 - DNA, 21 bp, Homo sapiens
tttcaatggtatgtaacatat

SEQ ID NO: 35745 - DNA, 19 bp, Homo sapiens
cacaataatccagggcatc

SEQ ID NO: 35746 - DNA, 20 bp, Homo sapiens
cagcattaatgacgatccaa

SEQ ID NO: 35747 - DNA, 19 bp, Homo sapiens
gtgaaagagcccatgctca

SEQ ID NO: 35748 - DNA, 19 bp, Homo sapiens
gtgatgtacaagaaagact

SEQ ID NO: 35749 - DNA, 23 bp, Homo sapiens
acagggagtccatcttgaaaaca

SEQ ID NO: 35750 - DNA, 16 bp, Homo sapiens
gtggccttggggacat

SEQ ID NO: 35751 - DNA, 20 bp, Homo sapiens
ctgtcttcaaggagtgcagc

SEQ ID NO: 35752 - DNA, 17 bp, Homo sapiens
agccaacaccaagaaca

SEQ ID NO: 35753 - DNA, 18 bp, Homo sapiens
tttgctcttttcatagtc

SEQ ID NO: 35754 - DNA, 17 bp, Homo sapiens
gagaagagcaaagccaa

SEQ ID NO: 35755 - DNA, 16 bp, Homo sapiens
tcaccaggaaatgtcc

SEQ ID NO: 35756 - DNA, 22 bp, Homo sapiens
ctgttgttcttatcattccttt

SEQ ID NO: 35757 - DNA, 17 bp, Homo sapiens
ctcacatcgctggtgtt

SEQ ID NO: 35758 - DNA, 23 bp, Homo sapiens
ggagaaataagtctatacataca

SEQ ID NO: 35759 - DNA, 17 bp, Homo sapiens
aatgtcaaacttcttgg

SEQ ID NO: 35760 - DNA, 22 bp, Homo sapiens
aactggatgatagataaatcaa

SEQ ID NO: 35761 - DNA, 21 bp, Homo sapiens
cagagtcaatgcctataatct

SEQ ID NO: 35762 - DNA, 22 bp, Homo sapiens
ttggccttaaaagctccactta

SEQ ID NO: 35763 - DNA, 17 bp, Homo sapiens
gtgagaagttcaagtgc

SEQ ID NO: 35764 - DNA, 26 bp, Homo sapiens
cttgtcttttaaaatttaaaacattt

SEQ ID NO: 35765 - DNA, 17 bp, Homo sapiens
cccctgaaccgttcaaa

SEQ ID NO: 35766 - DNA, 17 bp, Homo sapiens
ggtacttacatcactca

SEQ ID NO: 35767 - DNA, 20 bp, Homo sapiens
atttttctaaaaacagcact

SEQ ID NO: 35768 - DNA, 19 bp, Homo sapiens
atctgctggtatatggcac

SEQ ID NO: 35769 - DNA, 21 bp, Homo sapiens
aggggatgaaagtttgaatcc

SEQ ID NO: 35770 - DNA, 21 bp, Homo sapiens
ctcaggctgcaattcaatcta

SEQ ID NO: 35771 - DNA, 16 bp, Homo sapiens
ctgtactgttgcaagc

SEQ ID NO: 35772 - DNA, 18 bp, Homo sapiens
ttgggatggtagatgagc

SEQ ID NO: 35773 - DNA, 17 bp, Homo sapiens
tcttttctagcatacct

SEQ ID NO: 35774 - DNA, 17 bp, Homo sapiens
aagcactctgggtcacc

SEQ ID NO: 35775 - DNA, 17 bp, Homo sapiens
ttatgttagcgcatgta

SEQ ID NO: 35776 - DNA, 16 bp, Homo sapiens
ttcgtgttgagctggg

SEQ ID NO: 35777 - DNA, 20 bp, Homo sapiens
gagaatataaacgcatcaac

SEQ ID NO: 35778 - DNA, 21 bp, Homo sapiens
ggtcttatctggatgaacttt

SEQ ID NO: 35779 - DNA, 21 bp, Homo sapiens
gccttcctcaacataattgtt

SEQ ID NO: 35780 - DNA, 19 bp, Homo sapiens
taacacaagaatatgaagc

SEQ ID NO: 35781 - DNA, 23 bp, Homo sapiens
atctccttctaatcactagatat

SEQ ID NO: 35782 - DNA, 19 bp, Homo sapiens
agaaaagttacaaagcaga

SEQ ID NO: 35783 - DNA, 18 bp, Homo sapiens
tcacaggaatcccaagct

SEQ ID NO: 35784 - DNA, 21 bp, Homo sapiens
ctcacagtgacattgtttgag

SEQ ID NO: 35785 - DNA, 19 bp, Homo sapiens
ggtccagcttcttgattgc

SEQ ID NO: 35786 - DNA, 17 bp, Homo sapiens
tgcatgaaagttgcagc

SEQ ID NO: 35787 - DNA, 24 bp, Homo sapiens
cattttcctttatcttcttcatat

SEQ ID NO: 35788 - DNA, 23 bp, Homo sapiens
aaagacttatatgtaaaggatgt

SEQ ID NO: 35789 - DNA, 18 bp, Homo sapiens
catgattgttatggctct

SEQ ID NO: 35790 - DNA, 20 bp, Homo sapiens
actgtttgacaaatgattgt

SEQ ID NO: 35791 - DNA, 24 bp, Homo sapiens
ttcaaacttacatcactgttttga

SEQ ID NO: 35792 - DNA, 19 bp, Homo sapiens
cttcagtgaggttcgaaaa

SEQ ID NO: 35793 - DNA, 18 bp, Homo sapiens
tgcctacataatgtccca

SEQ ID NO: 35794 - DNA, 20 bp, Homo sapiens
agacaaaggcaaagagtatg

SEQ ID NO: 35795 - DNA, 24 bp, Homo sapiens
ataaaacaaatgtaattcaagtta

SEQ ID NO: 35796 - DNA, 26 bp, Homo sapiens
ttctttctttttggtttaatttattt

SEQ ID NO: 35797 - DNA, 16 bp, Homo sapiens
gtaaccgtggcttttc

SEQ ID NO: 35798 - DNA, 16 bp, Homo sapiens
aaagtgcagcaaagac

SEQ ID NO: 35799 - DNA, 17 bp, Homo sapiens
ggggtctcacagtaatt

SEQ ID NO: 35800 - DNA, 18 bp, Homo sapiens
ttctgcttttctgctttg

SEQ ID NO: 35801 - DNA, 22 bp, Homo sapiens
tcaacaagaataaggaagttca

SEQ ID NO: 35802 - DNA, 16 bp, Homo sapiens
caagatgctgcactcc

SEQ ID NO: 35803 - DNA, 18 bp, Homo sapiens
gtcatcttgaatccaaga

SEQ ID NO: 35804 - DNA, 19 bp, Homo sapiens
acaagaaagactatgaaaa

SEQ ID NO: 35805 - DNA, 20 bp, Homo sapiens
cagcaactttgtggccacgt

SEQ ID NO: 35806 - DNA, 16 bp, Homo sapiens
cggggacatttcctct

SEQ ID NO: 35807 - DNA, 24 bp, Homo sapiens
ctggtttttggccaccttcaagga

SEQ ID NO: 35808 - DNA, 16 bp, Homo sapiens
agccaacaccaagaac

SEQ ID NO: 35809 - DNA, 19 bp, Homo sapiens
aatcattttccctttgttt

SEQ ID NO: 35810 - DNA, 17 bp, Homo sapiens
agaagagcaaagccaaa

SEQ ID NO: 35811 - DNA, 17 bp, Homo sapiens
cacatgccagattccac

SEQ ID NO: 35812 - DNA, 21 bp, Homo sapiens
catgcatatcacttttgccaa

SEQ ID NO: 35813 - DNA, 17 bp, Homo sapiens
cacactcacatcgctgg

SEQ ID NO: 35814 - DNA, 26 bp, Homo sapiens
gggcccatttattttatattaagata

SEQ ID NO: 35815 - DNA, 21 bp, Homo sapiens
ctttaatgtcaaactttttgg

SEQ ID NO: 35816 - DNA, 23 bp, Homo sapiens
ccagcttgagaagaaatatttaa

SEQ ID NO: 35817 - DNA, 18 bp, Homo sapiens
tgtaaggtgaattcagtt

SEQ ID NO: 35818 - DNA, 18 bp, Homo sapiens
ctcctgcttttatccagc

SEQ ID NO: 35819 - DNA, 25 bp, Homo sapiens
agttcttctcatttttaacattaat

SEQ ID NO: 35820 - DNA, 20 bp, Homo sapiens
agttaaattacaaagcaaaa

SEQ ID NO: 35821 - DNA, 18 bp, Homo sapiens
aaagcacaggttgtcagt

SEQ ID NO: 35822 - DNA, 19 bp, Homo sapiens
accacacaagaatttttgt

SEQ ID NO: 35823 - DNA, 18 bp, Homo sapiens
aggcattgactttgtgct

SEQ ID NO: 35824 - DNA, 20 bp, Homo sapiens
aagctctagatgtctcttct

SEQ ID NO: 35825 - DNA, 21 bp, Homo sapiens
cttttcactttcatgttttgc

SEQ ID NO: 35826 - DNA, 27 bp, Homo sapiens
aagaaaatgcagaaatatatttttata

SEQ ID NO: 35827 - DNA, 16 bp, Homo sapiens
acagactctcctgttc

SEQ ID NO: 35828 - DNA, 20 bp, Homo sapiens
agccttttgaataaacttga

SEQ ID NO: 35829 - DNA, 16 bp, Homo sapiens
ttgcttccccacagca

SEQ ID NO: 35830 - DNA, 17 bp, Homo sapiens
tcataattgggtgtcct

SEQ ID NO: 35831 - DNA, 16 bp, Homo sapiens
ctatttgcttggcctg

SEQ ID NO: 35832 - DNA, 19 bp, Homo sapiens
attgacttgggcttgtagc

SEQ ID NO: 35833 - DNA, 23 bp, Homo sapiens
ctacagtctagttagaaaaaaat

SEQ ID NO: 35834 - DNA, 19 bp, Homo sapiens
tggatggactttgtaggtg

SEQ ID NO: 35835 - DNA, 20 bp, Homo sapiens
ttaagaaactagatcagtgt

SEQ ID NO: 35836 - DNA, 20 bp, Homo sapiens
aaatagacttcatttcttgc

SEQ ID NO: 35837 - DNA, 19 bp, Homo sapiens
cgaagaagacagaggcaaa

SEQ ID NO: 35838 - DNA, 16 bp, Homo sapiens
acatatcctgaccact

SEQ ID NO: 35839 - DNA, 18 bp, Homo sapiens
acaatggctgcatcttat

SEQ ID NO: 35840 - DNA, 16 bp, Homo sapiens
acagacttacgtcttt

SEQ ID NO: 35841 - DNA, 18 bp, Homo sapiens
acagtgatgtaagttcta

SEQ ID NO: 35842 - DNA, 22 bp, Homo sapiens
ttatggtctgagggaagaagcc

SEQ ID NO: 35843 - DNA, 16 bp, Homo sapiens
aggcagcttcgaggat

SEQ ID NO: 35844 - DNA, 18 bp, Homo sapiens
gaggagaagaaattaggc

SEQ ID NO: 35845 - DNA, 18 bp, Homo sapiens
tgttttgtcttgcagaaa

SEQ ID NO: 35846 - DNA, 20 bp, Homo sapiens
ggaaagtcaaacaattgtct

SEQ ID NO: 35847 - DNA, 19 bp, Homo sapiens
caatcctactgtcactctt

SEQ ID NO: 35848 - DNA, 20 bp, Homo sapiens
catgcagtgtgaatggtatg

SEQ ID NO: 35849 - DNA, 17 bp, Homo sapiens
gcgagacccccaaattc

SEQ ID NO: 35850 - DNA, 27 bp, Homo sapiens
ttaagtaggaatctttatattttttct

SEQ ID NO: 35851 - DNA, 18 bp, Homo sapiens
acagaaactatacaagga

SEQ ID NO: 35852 - DNA, 19 bp, Homo sapiens
tgggttctttttttaacag

SEQ ID NO: 35853 - DNA, 19 bp, Homo sapiens
aagtgttataatcagcgtg

SEQ ID NO: 35854 - DNA, 16 bp, Homo sapiens
gaacagtatcgagctt

SEQ ID NO: 35855 - DNA, 18 bp, Homo sapiens
tttaagacagttgacagg

SEQ ID NO: 35856 - DNA, 24 bp, Homo sapiens
ctttgcttttgtcttttcatagtt

SEQ ID NO: 35857 - DNA, 16 bp, Homo sapiens
agctgaaggcagcagg

SEQ ID NO: 35858 - DNA, 21 bp, Homo sapiens
tgaacctaccactccataacc

SEQ ID NO: 35859 - DNA, 23 bp, Homo sapiens
gaaaagaataaaggaaaagcaga

SEQ ID NO: 35860 - DNA, 18 bp, Homo sapiens
attttcatctcttttgca

SEQ ID NO: 35861 - DNA, 20 bp, Homo sapiens
cccatagagttactttatca

SEQ ID NO: 35862 - DNA, 18 bp, Homo sapiens
cgtcacttagggcatctc

SEQ ID NO: 35863 - DNA, 20 bp, Homo sapiens
aagagaaaattgatttgtgg

SEQ ID NO: 35864 - DNA, 19 bp, Homo sapiens
aggaagcacattataatct

SEQ ID NO: 35865 - DNA, 18 bp, Homo sapiens
tgctgcttttaagagtta

SEQ ID NO: 35866 - DNA, 21 bp, Homo sapiens
acaccagagtataaaatgaat

SEQ ID NO: 35867 - DNA, 20 bp, Homo sapiens
ctggtagttcccccaagaac

SEQ ID NO: 35868 - DNA, 21 bp, Homo sapiens
gaggaaataccaggaagattt

SEQ ID NO: 35869 - DNA, 18 bp, Homo sapiens
aaatttacccacactcaa

SEQ ID NO: 35870 - DNA, 17 bp, Homo sapiens
tgcatagttcatttcca

SEQ ID NO: 35871 - DNA, 21 bp, Homo sapiens
cttgctagctgccacaccagc

SEQ ID NO: 35872 - DNA, 17 bp, Homo sapiens
caaggacagggtggcat

SEQ ID NO: 35873 - DNA, 19 bp, Homo sapiens
tctggtctttcatgttttc

SEQ ID NO: 35874 - DNA, 22 bp, Homo sapiens
gagtttgggaaatttctttctt

SEQ ID NO: 35875 - DNA, 19 bp, Homo sapiens
ttgctttgaagttgcaaat

SEQ ID NO: 35876 - DNA, 18 bp, Homo sapiens
ggcctcaagtgttctggc

SEQ ID NO: 35877 - DNA, 23 bp, Homo sapiens
ttctagcaaaaatacaaagaaga

SEQ ID NO: 35878 - DNA, 17 bp, Homo sapiens
ggtctccctcccaggat

SEQ ID NO: 35879 - DNA, 20 bp, Homo sapiens
aatttgctgtcttatttgtc

SEQ ID NO: 35880 - DNA, 16 bp, Homo sapiens
tcattctggcatttgc

SEQ ID NO: 35881 - DNA, 22 bp, Homo sapiens
gcatttattaaggacctaagaa

SEQ ID NO: 35882 - DNA, 26 bp, Homo sapiens
tgattttattttcatagtcttctttg

SEQ ID NO: 35883 - DNA, 18 bp, Homo sapiens
atgtattgcttttgctgt

SEQ ID NO: 35884 - DNA, 21 bp, Homo sapiens
gatcctccagatatagaattt

SEQ ID NO: 35885 - DNA, 24 bp, Homo sapiens
tgtttgtgttttatcttcagtctc

SEQ ID NO: 35886 - DNA, 16 bp, Homo sapiens
tcaggttgcctacaaa

SEQ ID NO: 35887 - DNA, 18 bp, Homo sapiens
agcagagtcttcaaggga

SEQ ID NO: 35888 - DNA, 22 bp, Homo sapiens
tttaagacttcaaataaagatg

SEQ ID NO: 35889 - DNA, 20 bp, Homo sapiens
ttggttactttcttggcaaa

SEQ ID NO: 35890 - DNA, 24 bp, Homo sapiens
aatcactagcagtactgagagcaa

SEQ ID NO: 35891 - DNA, 17 bp, Homo sapiens
tgttcagcgagaccttt

SEQ ID NO: 35892 - DNA, 26 bp, Homo sapiens
tatctaatttaaatgagacatcataa

SEQ ID NO: 35893 - DNA, 16 bp, Homo sapiens
gcccggaactgaggag

SEQ ID NO: 35894 - DNA, 22 bp, Homo sapiens
atttagtctcttatacagaaga

SEQ ID NO: 35895 - DNA, 19 bp, Homo sapiens
aaactgtacactgaagact

SEQ ID NO: 35896 - DNA, 20 bp, Homo sapiens
caagttcccctgactctgca

SEQ ID NO: 35897 - DNA, 21 bp, Homo sapiens
ctatgtattttgtgtaaacgt

SEQ ID NO: 35898 - DNA, 16 bp, Homo sapiens
gctttctgggcctggg

SEQ ID NO: 35899 - DNA, 17 bp, Homo sapiens
tacctttgctctcacct

SEQ ID NO: 35900 - DNA, 20 bp, Homo sapiens
caaacttttgtctgcttccc

SEQ ID NO: 35901 - DNA, 16 bp, Homo sapiens
acttgtccaggccgtt

SEQ ID NO: 35902 - DNA, 19 bp, Homo sapiens
aaaaagattggggaattgt

SEQ ID NO: 35903 - DNA, 16 bp, Homo sapiens
acaagcagaactggga

SEQ ID NO: 35904 - DNA, 21 bp, Homo sapiens
aaatatatgatgggatgacat

SEQ ID NO: 35905 - DNA, 22 bp, Homo sapiens
aaatcctcatgcctttgggtga

SEQ ID NO: 35906 - DNA, 22 bp, Homo sapiens
ttgctgaacatggcggtgttct

SEQ ID NO: 35907 - DNA, 16 bp, Homo sapiens
tagtaacccattggca

SEQ ID NO: 35908 - DNA, 21 bp, Homo sapiens
ggtacttatccttggtgtctt

SEQ ID NO: 35909 - DNA, 21 bp, Homo sapiens
ggttctacaggccactcagtc

SEQ ID NO: 35910 - DNA, 19 bp, Homo sapiens
aggatattgaacatgcaaa

SEQ ID NO: 35911 - DNA, 18 bp, Homo sapiens
ccatgaggctggtgggca

SEQ ID NO: 35912 - DNA, 21 bp, Homo sapiens
gttaagtatcgaatggatggt

SEQ ID NO: 35913 - DNA, 19 bp, Homo sapiens
cagaggtgatgcacatgct

SEQ ID NO: 35914 - DNA, 19 bp, Homo sapiens
ccttaatatactcacatgt

SEQ ID NO: 35915 - DNA, 23 bp, Homo sapiens
actgacttgctgcgacactttct

SEQ ID NO: 35916 - DNA, 16 bp, Homo sapiens
tgctttgtgatgcaga

SEQ ID NO: 35917 - DNA, 19 bp, Homo sapiens
agtcttagcaacatcacca

SEQ ID NO: 35918 - DNA, 21 bp, Homo sapiens
ttgggttcacatttacagcaa

SEQ ID NO: 35919 - DNA, 16 bp, Homo sapiens
tactccagaacttcgc

SEQ ID NO: 35920 - DNA, 21 bp, Homo sapiens
ctcatagtaattcaactgctc

SEQ ID NO: 35921 - DNA, 23 bp, Homo sapiens
gaataaatacaaggagaagtttg

SEQ ID NO: 35922 - DNA, 21 bp, Homo sapiens
tattttgaaatgtccctctcc

SEQ ID NO: 35923 - DNA, 21 bp, Homo sapiens
gagtatgttgcctgaaatttt

SEQ ID NO: 35924 - DNA, 18 bp, Homo sapiens
gtacttttttgattctgc

SEQ ID NO: 35925 - DNA, 26 bp, Homo sapiens
caaaaagaaagctattataattgata

SEQ ID NO: 35926 - DNA, 22 bp, Homo sapiens
ccttttgttttctcaaacttct

SEQ ID NO: 35927 - DNA, 18 bp, Homo sapiens
tgcacacagtcagaaaat

SEQ ID NO: 35928 - DNA, 19 bp, Homo sapiens
gtttttgtttcatacaggt

SEQ ID NO: 35929 - DNA, 16 bp, Homo sapiens
gtggagaggaggaagg

SEQ ID NO: 35930 - DNA, 19 bp, Homo sapiens
agtaatttcttaataatca

SEQ ID NO: 35931 - DNA, 16 bp, Homo sapiens
aaacttccaaaccagc

SEQ ID NO: 35932 - DNA, 18 bp, Homo sapiens
gggctaaaaagatcctgc

SEQ ID NO: 35933 - DNA, 20 bp, Homo sapiens
ttttcagacaataacaaaaa

SEQ ID NO: 35934 - DNA, 17 bp, Homo sapiens
gatccactttcttccgg

SEQ ID NO: 35935 - DNA, 17 bp, Homo sapiens
aagatcacagtagcaca

SEQ ID NO: 35936 - DNA, 16 bp, Homo sapiens
tgctggctgtgccaga

SEQ ID NO: 35937 - DNA, 19 bp, Homo sapiens
tagatatggagaagtaaca

SEQ ID NO: 35938 - DNA, 24 bp, Homo sapiens
gatgtccttgttgtcgtagtctca

SEQ ID NO: 35939 - DNA, 23 bp, Homo sapiens
caggtaatgtttgtgctttcaca

SEQ ID NO: 35940 - DNA, 21 bp, Homo sapiens
gtgctctatttacagtactac

SEQ ID NO: 35941 - DNA, 22 bp, Homo sapiens
gataatcccttttgccatcttt

SEQ ID NO: 35942 - DNA, 16 bp, Homo sapiens
ttcagctgaggcagag

SEQ ID NO: 35943 - DNA, 19 bp, Homo sapiens
ctgctttaatgagaatgca

SEQ ID NO: 35944 - DNA, 24 bp, Homo sapiens
tccctcacctacccctttcccaca

SEQ ID NO: 35945 - DNA, 18 bp, Homo sapiens
aaaccacttcttctgtgt

SEQ ID NO: 35946 - DNA, 16 bp, Homo sapiens
ggcagatgacgaagac

SEQ ID NO: 35947 - DNA, 19 bp, Homo sapiens
tgatgactctttgtgaagt

SEQ ID NO: 35948 - DNA, 23 bp, Homo sapiens
atatgttttcatttgtatggaat

SEQ ID NO: 35949 - DNA, 18 bp, Homo sapiens
acagctttgattgtcact

SEQ ID NO: 35950 - DNA, 26 bp, Homo sapiens
tttagcttcaaattctatttttataa

SEQ ID NO: 35951 - DNA, 17 bp, Homo sapiens
cctccaccacctcctca

SEQ ID NO: 35952 - DNA, 16 bp, Homo sapiens
gaggaagcatggaaga

SEQ ID NO: 35953 - DNA, 19 bp, Homo sapiens
gaaaaattgtcttccatga

SEQ ID NO: 35954 - DNA, 24 bp, Homo sapiens
acaacaaaataagttgatgaaata

SEQ ID NO: 35955 - DNA, 17 bp, Homo sapiens
tggccacatttctttat

SEQ ID NO: 35956 - DNA, 16 bp, Homo sapiens
tgtatttggcattggc

SEQ ID NO: 35957 - DNA, 21 bp, Homo sapiens
acatgttactttggaatcatt

SEQ ID NO: 35958 - DNA, 17 bp, Homo sapiens
tcagaccttctcagttt

SEQ ID NO: 35959 - DNA, 18 bp, Homo sapiens
gtgcatgtctctttatgc

SEQ ID NO: 35960 - DNA, 17 bp, Homo sapiens
aattgtttcccttggaa

SEQ ID NO: 35961 - DNA, 24 bp, Homo sapiens
caactgcctgctttgatagttcag

SEQ ID NO: 35962 - DNA, 20 bp, Homo sapiens
ccaaggaataatactggtgg

SEQ ID NO: 35963 - DNA, 21 bp, Homo sapiens
ctggttgacaataagcggtga

SEQ ID NO: 35964 - DNA, 25 bp, Homo sapiens
tatttgtatttatttttagttcaat

SEQ ID NO: 35965 - DNA, 18 bp, Homo sapiens
gtcaccatctacattcca

SEQ ID NO: 35966 - DNA, 17 bp, Homo sapiens
agtgaactttgattcgc

SEQ ID NO: 35967 - DNA, 19 bp, Homo sapiens
ctggattatatccaccagt

SEQ ID NO: 35968 - DNA, 19 bp, Homo sapiens
tgttcatagtctcaaagct

SEQ ID NO: 35969 - DNA, 22 bp, Homo sapiens
tctcaacaaatggaaaattgaa

SEQ ID NO: 35970 - DNA, 21 bp, Homo sapiens
ctggcggatgcttttcaaaat

SEQ ID NO: 35971 - DNA, 21 bp, Homo sapiens
cggccagaatttataaaacac

SEQ ID NO: 35972 - DNA, 20 bp, Homo sapiens
gaagaaaataaaaccttctt

SEQ ID NO: 35973 - DNA, 26 bp, Homo sapiens
agaaatatttaatttcagattaaata

SEQ ID NO: 35974 - DNA, 19 bp, Homo sapiens
catgattaatagctttgca

SEQ ID NO: 35975 - DNA, 22 bp, Homo sapiens
aggaacagtatgtcataatttt

SEQ ID NO: 35976 - DNA, 19 bp, Homo sapiens
gcatatcttttcaggtgtt

SEQ ID NO: 35977 - DNA, 24 bp, Homo sapiens
cgtaacatggtgatttatctatct

SEQ ID NO: 35978 - DNA, 19 bp, Homo sapiens
agccatacttccattattt

SEQ ID NO: 35979 - DNA, 23 bp, Homo sapiens
cagttcaacagttgttctcaacc

SEQ ID NO: 35980 - DNA, 16 bp, Homo sapiens
tccttgcctgtgttca

SEQ ID NO: 35981 - DNA, 24 bp, Homo sapiens
gataaactacctgttaagtttcta

SEQ ID NO: 35982 - DNA, 19 bp, Homo sapiens
gactgtaatgatcaatggc

SEQ ID NO: 35983 - DNA, 24 bp, Homo sapiens
tctataagaaatgtatcaacaatt

SEQ ID NO: 35984 - DNA, 17 bp, Homo sapiens
gccaggttctgttgaca

SEQ ID NO: 35985 - DNA, 20 bp, Homo sapiens
tgccaagcctctaggtgcca

SEQ ID NO: 35986 - DNA, 16 bp, Homo sapiens
ggcacagggatctccc

SEQ ID NO: 35987 - DNA, 17 bp, Homo sapiens
accctggatcatttgcc

SEQ ID NO: 35988 - DNA, 17 bp, Homo sapiens
tgtgtctgtgtgtctgt

SEQ ID NO: 35989 - DNA, 17 bp, Homo sapiens
ccctcaccagaacaaaa

SEQ ID NO: 35990 - DNA, 22 bp, Homo sapiens
tgaagaaagtatttaacatata

SEQ ID NO: 35991 - DNA, 17 bp, Homo sapiens
tcaccagatttgggaga

SEQ ID NO: 35992 - DNA, 21 bp, Homo sapiens
aaaaggctgagtgagtagttg

SEQ ID NO: 35993 - DNA, 25 bp, Homo sapiens
ctgtgaaatatcatttttaccattt

SEQ ID NO: 35994 - DNA, 21 bp, Homo sapiens
tctttactactatgttagaaa

SEQ ID NO: 35995 - DNA, 17 bp, Homo sapiens
cccaggttcaatgactg

SEQ ID NO: 35996 - DNA, 23 bp, Homo sapiens
gaatgttttatgctttaaagata

SEQ ID NO: 35997 - DNA, 17 bp, Homo sapiens
gctgttgttaaggcact

SEQ ID NO: 35998 - DNA, 22 bp, Homo sapiens
tcttgcacatcatcagagctgt

SEQ ID NO: 35999 - DNA, 18 bp, Homo sapiens
tggaagaactttggctct

SEQ ID NO: 36000 - DNA, 21 bp, Homo sapiens
atgaaatttgttattaacagt

SEQ ID NO: 36001 - DNA, 16 bp, Homo sapiens
agcaccgctggcaagc

SEQ ID NO: 36002 - DNA, 22 bp, Homo sapiens
aaagacttacttaagttttgcc

SEQ ID NO: 36003 - DNA, 19 bp, Homo sapiens
ctgtactcactgattaata

SEQ ID NO: 36004 - DNA, 20 bp, Homo sapiens
ccatcgatatttttctgcca

SEQ ID NO: 36005 - DNA, 19 bp, Homo sapiens
ttctcctataagccaataa

SEQ ID NO: 36006 - DNA, 21 bp, Homo sapiens
tgagaacccaaagcgaagaag

SEQ ID NO: 36007 - DNA, 17 bp, Homo sapiens
aaagggaactgaagaga

SEQ ID NO: 36008 - DNA, 19 bp, Homo sapiens
agtaaagcattgccttttg

SEQ ID NO: 36009 - DNA, 18 bp, Homo sapiens
tgtattggcacattctct

SEQ ID NO: 36010 - DNA, 23 bp, Homo sapiens
aagaacctgccttttcttaaagt

SEQ ID NO: 36011 - DNA, 17 bp, Homo sapiens
tgaacacattctaccct

SEQ ID NO: 36012 - DNA, 23 bp, Homo sapiens
ataaaatatgaactgctttggaa

SEQ ID NO: 36013 - DNA, 21 bp, Homo sapiens
ctcgtttatttttcatctgaa

SEQ ID NO: 36014 - DNA, 17 bp, Homo sapiens
cacatgaggaactccat

SEQ ID NO: 36015 - DNA, 20 bp, Homo sapiens
ctgtgaataagaacttaaac

SEQ ID NO: 36016 - DNA, 23 bp, Homo sapiens
taaatgacttgtcaaaagtctca

SEQ ID NO: 36017 - DNA, 16 bp, Homo sapiens
ccgaatcctgactcct

SEQ ID NO: 36018 - DNA, 20 bp, Homo sapiens
ctgttcattaattctgtgtt

SEQ ID NO: 36019 - DNA, 16 bp, Homo sapiens
tagcgaagtagcccat

SEQ ID NO: 36020 - DNA, 18 bp, Homo sapiens
ggagaagggtcagtttaa

SEQ ID NO: 36021 - DNA, 20 bp, Homo sapiens
aagttttgccttctttgctt

SEQ ID NO: 36022 - DNA, 16 bp, Homo sapiens
gctgtgctctgacagg

SEQ ID NO: 36023 - DNA, 20 bp, Homo sapiens
gactacaaattagtaaacta

SEQ ID NO: 36024 - DNA, 20 bp, Homo sapiens
tgagctctcagaagcaaagc

SEQ ID NO: 36025 - DNA, 19 bp, Homo sapiens
tcttacccattgacacata

SEQ ID NO: 36026 - DNA, 20 bp, Homo sapiens
aataattcacacacttgtca

SEQ ID NO: 36027 - DNA, 21 bp, Homo sapiens
gcaatacattggagtgtacag

SEQ ID NO: 36028 - DNA, 22 bp, Homo sapiens
tccctaaaggaatataatatgt

SEQ ID NO: 36029 - DNA, 23 bp, Homo sapiens
ctcataatgtagtgactacaatt

SEQ ID NO: 36030 - DNA, 22 bp, Homo sapiens
ctaattttaaaaaatggcaatg

SEQ ID NO: 36031 - DNA, 29 bp, Homo sapiens
atattttataaatacaagtaaataaatac

SEQ ID NO: 36032 - DNA, 20 bp, Homo sapiens
ttgcatgccagtgaacaatc

SEQ ID NO: 36033 - DNA, 18 bp, Homo sapiens
ttaatagctacccattgg

SEQ ID NO: 36034 - DNA, 18 bp, Homo sapiens
atgtgaactccagggatt

SEQ ID NO: 36035 - DNA, 24 bp, Homo sapiens
atatgaacaagatagagccaaagt

SEQ ID NO: 36036 - DNA, 19 bp, Homo sapiens
ttgtgtatgtgtgtgtgtt

SEQ ID NO: 36037 - DNA, 17 bp, Homo sapiens
aactagtgaaggcattt

SEQ ID NO: 36038 - DNA, 22 bp, Homo sapiens
tcatattattttgccagaacaa

SEQ ID NO: 36039 - DNA, 17 bp, Homo sapiens
taacctacccatcaaat

SEQ ID NO: 36040 - DNA, 20 bp, Homo sapiens
ttgcccatgattaaaatata

SEQ ID NO: 36041 - DNA, 23 bp, Homo sapiens
gcccttcatattccattactatt

SEQ ID NO: 36042 - DNA, 27 bp, Homo sapiens
ataaaaataacaaaaataattaaatta

SEQ ID NO: 36043 - DNA, 16 bp, Homo sapiens
aacctctgttgaagct

SEQ ID NO: 36044 - DNA, 26 bp, Homo sapiens
aaaatgctatagatattacaagtagt

SEQ ID NO: 36045 - DNA, 16 bp, Homo sapiens
ctccttaacccccaaa

SEQ ID NO: 36046 - DNA, 21 bp, Homo sapiens
attttgcttttgtatgttttt

SEQ ID NO: 36047 - DNA, 23 bp, Homo sapiens
tttacaactttgtctttaaaatt

SEQ ID NO: 36048 - DNA, 16 bp, Homo sapiens
tttattcctgcaagct

SEQ ID NO: 36049 - DNA, 18 bp, Homo sapiens
cattctaacagacttgtg

SEQ ID NO: 36050 - DNA, 18 bp, Homo sapiens
tcttttttgtgactttgg

SEQ ID NO: 36051 - DNA, 22 bp, Homo sapiens
gttatattcagaatactcttgc

SEQ ID NO: 36052 - DNA, 20 bp, Homo sapiens
tgtagaaaaagtatttagca

SEQ ID NO: 36053 - DNA, 18 bp, Homo sapiens
gaccactgtgacatatgg

SEQ ID NO: 36054 - DNA, 22 bp, Homo sapiens
aaactatctcaacatcactaaa

SEQ ID NO: 36055 - DNA, 19 bp, Homo sapiens
tctgcttgaaaaaggaaca

SEQ ID NO: 36056 - DNA, 16 bp, Homo sapiens
aggaaactgggctgat

SEQ ID NO: 36057 - DNA, 23 bp, Homo sapiens
aacggcgttgttctgttaaacag

SEQ ID NO: 36058 - DNA, 20 bp, Homo sapiens
ttgaactgtctaaaccatat

SEQ ID NO: 36059 - DNA, 19 bp, Homo sapiens
cttgctatgtaaagaagaa

SEQ ID NO: 36060 - DNA, 20 bp, Homo sapiens
agtgtagaattctttagttt

SEQ ID NO: 36061 - DNA, 19 bp, Homo sapiens
ctctatgaaacacaatggt

SEQ ID NO: 36062 - DNA, 24 bp, Homo sapiens
taataaagtaccacttctctgctg

SEQ ID NO: 36063 - DNA, 16 bp, Homo sapiens
tctccctttgctcact

SEQ ID NO: 36064 - DNA, 25 bp, Homo sapiens
tctttgagttcaataaattcttctt

SEQ ID NO: 36065 - DNA, 22 bp, Homo sapiens
tgtacagattatttcatcaccc

SEQ ID NO: 36066 - DNA, 24 bp, Homo sapiens
ggaaggaggaggcggcgacttggg

SEQ ID NO: 36067 - DNA, 22 bp, Homo sapiens
tgagcgagcgagcactgcggtg

SEQ ID NO: 36068 - DNA, 24 bp, Homo sapiens
ggaggcgagaaaaggggagggtgg

SEQ ID NO: 36069 - DNA, 16 bp, Homo sapiens
gagcggattctgctcc

SEQ ID NO: 36070 - DNA, 21 bp, Homo sapiens
gggaggaagcgcggagggagg

SEQ ID NO: 36071 - DNA, 24 bp, Homo sapiens
ccggaggctgccgctgtgcctccg

SEQ ID NO: 36072 - DNA, 24 bp, Homo sapiens
gggcgctcgggctgaatgggccgc

SEQ ID NO: 36073 - DNA, 23 bp, Homo sapiens
ctggaggaggcgcaggaaccggg

SEQ ID NO: 36074 - DNA, 24 bp, Homo sapiens
actgtccctcccgatctcgaagat

SEQ ID NO: 36075 - DNA, 16 bp, Homo sapiens
tctccaaaggcctccc

SEQ ID NO: 36076 - DNA, 24 bp, Homo sapiens
ctgcggggacgttaacagcgccgg

SEQ ID NO: 36077 - DNA, 24 bp, Homo sapiens
gcgcgccgttgctgtggcagcgct

SEQ ID NO: 36078 - DNA, 24 bp, Homo sapiens
cggccgccctccagggcactcacc

SEQ ID NO: 36079 - DNA, 24 bp, Homo sapiens
caggccagggtgctggactgggtc

SEQ ID NO: 36080 - DNA, 24 bp, Homo sapiens
ccgcgtcgctgggaggagcgaggg

SEQ ID NO: 36081 - DNA, 23 bp, Homo sapiens
cagaggccacggccggcccctcg

SEQ ID NO: 36082 - DNA, 24 bp, Homo sapiens
ctccccagcgcccggctttgaacc

SEQ ID NO: 36083 - DNA, 22 bp, Homo sapiens
cggtggccttgtccgaggggag

SEQ ID NO: 36084 - DNA, 24 bp, Homo sapiens
tcagcactcgacccaaaggtgcag

SEQ ID NO: 36085 - DNA, 19 bp, Homo sapiens
atctcctctaagctccgtt

SEQ ID NO: 36086 - DNA, 22 bp, Homo sapiens
cgaggctgaggtgggcgctgcg

SEQ ID NO: 36087 - DNA, 24 bp, Homo sapiens
ggtgcagttgcagggcatagcctt

SEQ ID NO: 36088 - DNA, 23 bp, Homo sapiens
gagccaaggccgcgatccctgcc

SEQ ID NO: 36089 - DNA, 24 bp, Homo sapiens
ttccggtgcccactcccatcccca

SEQ ID NO: 36090 - DNA, 19 bp, Homo sapiens
ggtgtccggcggcggcaac

SEQ ID NO: 36091 - DNA, 18 bp, Homo sapiens
gagttcctgcagccttca

SEQ ID NO: 36092 - DNA, 17 bp, Homo sapiens
ttctttcagctgttcgt

SEQ ID NO: 36093 - DNA, 23 bp, Homo sapiens
ctgcactttgcccattctcccta

SEQ ID NO: 36094 - DNA, 17 bp, Homo sapiens
aggacatccacattgga

SEQ ID NO: 36095 - DNA, 23 bp, Homo sapiens
tttttttttgcccagctcatttg

SEQ ID NO: 36096 - DNA, 17 bp, Homo sapiens
catcacttgctccaaga

SEQ ID NO: 36097 - DNA, 22 bp, Homo sapiens
ctgtcctgggagcacctgccca

SEQ ID NO: 36098 - DNA, 16 bp, Homo sapiens
tcccggtgctccttcc

SEQ ID NO: 36099 - DNA, 23 bp, Homo sapiens
aggtgctttacaaggccaagtac

SEQ ID NO: 36100 - DNA, 16 bp, Homo sapiens
tccagtcccttcaggc

SEQ ID NO: 36101 - DNA, 24 bp, Homo sapiens
aacctggccagtgccccgctcttg

SEQ ID NO: 36102 - DNA, 22 bp, Homo sapiens
tactattctgccggttatccac

SEQ ID NO: 36103 - DNA, 16 bp, Homo sapiens
acatggagctatggaa

SEQ ID NO: 36104 - DNA, 22 bp, Homo sapiens
gcttcagcacctcccaacaact

SEQ ID NO: 36105 - DNA, 24 bp, Homo sapiens
cacttgagattttggtgattctat

SEQ ID NO: 36106 - DNA, 16 bp, Homo sapiens
gctggcttcagcaacc

SEQ ID NO: 36107 - DNA, 17 bp, Homo sapiens
agggggtggtggacttc

SEQ ID NO: 36108 - DNA, 18 bp, Homo sapiens
ggtccagtcgagtcataa

SEQ ID NO: 36109 - DNA, 17 bp, Homo sapiens
ttatctttgtgctgttc

SEQ ID NO: 36110 - DNA, 23 bp, Homo sapiens
aaagtagtagaagagttgagcca

SEQ ID NO: 36111 - DNA, 23 bp, Homo sapiens
cagctgcgccaggctctgaacca

SEQ ID NO: 36112 - DNA, 22 bp, Homo sapiens
ctctccctgacccattcccttc

SEQ ID NO: 36113 - DNA, 23 bp, Homo sapiens
tgctttcaatgaggtgattgatg

SEQ ID NO: 36114 - DNA, 16 bp, Homo sapiens
gaaccaggacatatgg

SEQ ID NO: 36115 - DNA, 19 bp, Homo sapiens
tcggggaaccaggtgtcgg

SEQ ID NO: 36116 - DNA, 17 bp, Homo sapiens
cgtttctcgaacaggat

SEQ ID NO: 36117 - DNA, 17 bp, Homo sapiens
ttgctgggagaggggct

SEQ ID NO: 36118 - DNA, 19 bp, Homo sapiens
aacccgatggatctgacga

SEQ ID NO: 36119 - DNA, 16 bp, Homo sapiens
caagggctcctggatt

SEQ ID NO: 36120 - DNA, 23 bp, Homo sapiens
aaaggcagcacggggcgagtcca

SEQ ID NO: 36121 - DNA, 18 bp, Homo sapiens
tactcagctatttgctac

SEQ ID NO: 36122 - DNA, 21 bp, Homo sapiens
ctgggagtcctcaccaaagga

SEQ ID NO: 36123 - DNA, 19 bp, Homo sapiens
cgaggacaccgtgaccttc

SEQ ID NO: 36124 - DNA, 16 bp, Homo sapiens
tgggagagaccgctga

SEQ ID NO: 36125 - DNA, 20 bp, Homo sapiens
atgccaccttcctccccaag

SEQ ID NO: 36126 - DNA, 22 bp, Homo sapiens
aagtcatgatctccaaggacca

SEQ ID NO: 36127 - DNA, 18 bp, Homo sapiens
gttggaatgccatctttt

SEQ ID NO: 36128 - DNA, 23 bp, Homo sapiens
ttctcatcaatcagcttcttccc

SEQ ID NO: 36129 - DNA, 23 bp, Homo sapiens
gagatgggggtgactccaggtct

SEQ ID NO: 36130 - DNA, 19 bp, Homo sapiens
agacacctggatgccatct

SEQ ID NO: 36131 - DNA, 20 bp, Homo sapiens
cagttgtcggagtggctctt

SEQ ID NO: 36132 - DNA, 16 bp, Homo sapiens
ccatggcctcccgagg

SEQ ID NO: 36133 - DNA, 23 bp, Homo sapiens
tcttctctgttgctttcacaggg

SEQ ID NO: 36134 - DNA, 16 bp, Homo sapiens
gtctcaccctccccct

SEQ ID NO: 36135 - DNA, 22 bp, Homo sapiens
caactgcaggcagcagggccag

SEQ ID NO: 36136 - DNA, 17 bp, Homo sapiens
aaggtcgggatcaggtg

SEQ ID NO: 36137 - DNA, 17 bp, Homo sapiens
agtggacagctcagtcc

SEQ ID NO: 36138 - DNA, 20 bp, Homo sapiens
tctattttccttctagggct

SEQ ID NO: 36139 - DNA, 20 bp, Homo sapiens
gtttagcatggagactgcca

SEQ ID NO: 36140 - DNA, 16 bp, Homo sapiens
ggatctcagggtcctt

SEQ ID NO: 36141 - DNA, 22 bp, Homo sapiens
ttcatttctcccacattttgca

SEQ ID NO: 36142 - DNA, 23 bp, Homo sapiens
gggcaaagtccttgtgctggggc

SEQ ID NO: 36143 - DNA, 20 bp, Homo sapiens
gaaatcgccctcacctgatc

SEQ ID NO: 36144 - DNA, 16 bp, Homo sapiens
tctgtcctaccgcaga

SEQ ID NO: 36145 - DNA, 20 bp, Homo sapiens
cctgtaccacctctcaaagg

SEQ ID NO: 36146 - DNA, 17 bp, Homo sapiens
acttcagatttcctcct

SEQ ID NO: 36147 - DNA, 22 bp, Homo sapiens
ggtgtggtgccagccgggcaag

SEQ ID NO: 36148 - DNA, 18 bp, Homo sapiens
ctccttctcccctacctc

SEQ ID NO: 36149 - DNA, 20 bp, Homo sapiens
caaagctgtgcttaaggaga

SEQ ID NO: 36150 - DNA, 23 bp, Homo sapiens
ggatctctttgtggggagggaat

SEQ ID NO: 36151 - DNA, 19 bp, Homo sapiens
gaagccatcaacttcaatt

SEQ ID NO: 36152 - DNA, 24 bp, Homo sapiens
agtgacaaggatgagatgggagag

SEQ ID NO: 36153 - DNA, 16 bp, Homo sapiens
catagggcactcctgg

SEQ ID NO: 36154 - DNA, 23 bp, Homo sapiens
ccatgaatccagagcagactcca

SEQ ID NO: 36155 - DNA, 18 bp, Homo sapiens
acacaaactgggtctata

SEQ ID NO: 36156 - DNA, 20 bp, Homo sapiens
ccggatcatagaaaaggaaa

SEQ ID NO: 36157 - DNA, 16 bp, Homo sapiens
tggaagctttcaggct

SEQ ID NO: 36158 - DNA, 24 bp, Homo sapiens
acgtgagtggggctagagagcccg

SEQ ID NO: 36159 - DNA, 21 bp, Homo sapiens
agggcacagagccaaatgggt

SEQ ID NO: 36160 - DNA, 24 bp, Homo sapiens
cattcatgctgcccaatcttcctt

SEQ ID NO: 36161 - DNA, 16 bp, Homo sapiens
catctccagctctgca

SEQ ID NO: 36162 - DNA, 18 bp, Homo sapiens
ctgccttctctgagcctg

SEQ ID NO: 36163 - DNA, 17 bp, Homo sapiens
cacccctccctgcccac

SEQ ID NO: 36164 - DNA, 23 bp, Homo sapiens
ccagcctgctacccccaggatcc

SEQ ID NO: 36165 - DNA, 24 bp, Homo sapiens
atccactccccgctctgcacactc

SEQ ID NO: 36166 - DNA, 16 bp, Homo sapiens
ctgcctgggccgcagg

SEQ ID NO: 36167 - DNA, 16 bp, Homo sapiens
gatcagctggggggta

SEQ ID NO: 36168 - DNA, 21 bp, Homo sapiens
agctgggagaggctagtaggg

SEQ ID NO: 36169 - DNA, 21 bp, Homo sapiens
ggacaatgcgggccacactct

SEQ ID NO: 36170 - DNA, 22 bp, Homo sapiens
agaggaagggaggcacagggta

SEQ ID NO: 36171 - DNA, 21 bp, Homo sapiens
gcggagactcagctcagcact

SEQ ID NO: 36172 - DNA, 23 bp, Homo sapiens
ccacccaaccacatgtgctcttt

SEQ ID NO: 36173 - DNA, 16 bp, Homo sapiens
gcagcagccaggaacc

SEQ ID NO: 36174 - DNA, 19 bp, Homo sapiens
ccggagacgggggagttga

SEQ ID NO: 36175 - DNA, 19 bp, Homo sapiens
aaggagttcctcccacctc

SEQ ID NO: 36176 - DNA, 19 bp, Homo sapiens
cagttcctgcagagacagt

SEQ ID NO: 36177 - DNA, 19 bp, Homo sapiens
aaaatcagccggtgccagg

SEQ ID NO: 36178 - DNA, 20 bp, Homo sapiens
aaacagaaggaaccactgaa

SEQ ID NO: 36179 - DNA, 16 bp, Homo sapiens
ttttcctctgctccag

SEQ ID NO: 36180 - DNA, 21 bp, Homo sapiens
ggaagtcttagccccctagga

SEQ ID NO: 36181 - DNA, 16 bp, Homo sapiens
gaacttgccacttttt

SEQ ID NO: 36182 - DNA, 20 bp, Homo sapiens
ctagctatacttcacgcaga

SEQ ID NO: 36183 - DNA, 21 bp, Homo sapiens
tcacctggcagctgcctggaa

SEQ ID NO: 36184 - DNA, 24 bp, Homo sapiens
tttcttttaaggtgtctggtgctg

SEQ ID NO: 36185 - DNA, 16 bp, Homo sapiens
ttctgggtagcacaca

SEQ ID NO: 36186 - DNA, 24 bp, Homo sapiens
tgagccagaagctatacttatttg

SEQ ID NO: 36187 - DNA, 24 bp, Homo sapiens
acctgggtgtgtccctgattgggt

SEQ ID NO: 36188 - DNA, 16 bp, Homo sapiens
aatggtgctgctctga

SEQ ID NO: 36189 - DNA, 21 bp, Homo sapiens
agcgcttgtattttgttcttt

SEQ ID NO: 36190 - DNA, 21 bp, Homo sapiens
tccttggtccccagctcctgt

SEQ ID NO: 36191 - DNA, 21 bp, Homo sapiens
catcccaacaggctatggttt

SEQ ID NO: 36192 - DNA, 18 bp, Homo sapiens
gtccatccccccatgtcc

SEQ ID NO: 36193 - DNA, 24 bp, Homo sapiens
cagagtgctcagaattactgtcca

SEQ ID NO: 36194 - DNA, 18 bp, Homo sapiens
tgtcagccgctgtgcggt

SEQ ID NO: 36195 - DNA, 21 bp, Homo sapiens
ggtgaatgagccagggttttc

SEQ ID NO: 36196 - DNA, 17 bp, Homo sapiens
ctggctggccagcgctg

SEQ ID NO: 36197 - DNA, 20 bp, Homo sapiens
ctcctccaggtctgcggaca

SEQ ID NO: 36198 - DNA, 23 bp, Homo sapiens
ctttgcctactgcaacatccacc

SEQ ID NO: 36199 - DNA, 18 bp, Homo sapiens
ctgggccggggcctcgca

SEQ ID NO: 36200 - DNA, 20 bp, Homo sapiens
gtctcttcttcccttcccaa

SEQ ID NO: 36201 - DNA, 19 bp, Homo sapiens
agagagtggcatcatgggg

SEQ ID NO: 36202 - DNA, 21 bp, Homo sapiens
aaggccagatggaggaaggaa

SEQ ID NO: 36203 - DNA, 17 bp, Homo sapiens
gggcatagtggcacacc

SEQ ID NO: 36204 - DNA, 16 bp, Homo sapiens
cagaagcaggctttgg

SEQ ID NO: 36205 - DNA, 23 bp, Homo sapiens
gaaggcaagaccctgccagacct

SEQ ID NO: 36206 - DNA, 16 bp, Homo sapiens
agggcaagagaaagct

SEQ ID NO: 36207 - DNA, 23 bp, Homo sapiens
ttttaaaagtaagaataatccca

SEQ ID NO: 36208 - DNA, 17 bp, Homo sapiens
gagcccacctgccccct

SEQ ID NO: 36209 - DNA, 21 bp, Homo sapiens
atcagtaaaattaaccccaaa

SEQ ID NO: 36210 - DNA, 21 bp, Homo sapiens
ccaaagggtttggccctggat

SEQ ID NO: 36211 - DNA, 23 bp, Homo sapiens
tccataccaaggtcttgattgtg

SEQ ID NO: 36212 - DNA, 23 bp, Homo sapiens
ccttcaatttttttcctttgttc

SEQ ID NO: 36213 - DNA, 17 bp, Homo sapiens
agagcctgggcatgccc

SEQ ID NO: 36214 - DNA, 23 bp, Homo sapiens
gagtgcttagcacagtgccagaa

SEQ ID NO: 36215 - DNA, 22 bp, Homo sapiens
accaggaggaagccaccgaggt

SEQ ID NO: 36216 - DNA, 16 bp, Homo sapiens
gtgtacgttccagaag

SEQ ID NO: 36217 - DNA, 17 bp, Homo sapiens
tgacacaggagaagacg

SEQ ID NO: 36218 - DNA, 24 bp, Homo sapiens
agtcagcatctaaggcaaatgatc

SEQ ID NO: 36219 - DNA, 16 bp, Homo sapiens
gggctggatggcagga

SEQ ID NO: 36220 - DNA, 24 bp, Homo sapiens
tttgtatacaactctaaggtttac

SEQ ID NO: 36221 - DNA, 16 bp, Homo sapiens
atggttgctttcacca

SEQ ID NO: 36222 - DNA, 18 bp, Homo sapiens
tggtcctccagggtagcc

SEQ ID NO: 36223 - DNA, 24 bp, Homo sapiens
tgggaaggaagcctggggctggca

SEQ ID NO: 36224 - DNA, 18 bp, Homo sapiens
cagggacgccatccacac

SEQ ID NO: 36225 - DNA, 22 bp, Homo sapiens
atcccaacttcatgtcattgca

SEQ ID NO: 36226 - DNA, 24 bp, Homo sapiens
gattgatgtactttggatcaaggt

SEQ ID NO: 36227 - DNA, 16 bp, Homo sapiens
gagaggaccagaagga

SEQ ID NO: 36228 - DNA, 23 bp, Homo sapiens
agtagtttaggctccatataaaa

SEQ ID NO: 36229 - DNA, 16 bp, Homo sapiens
ggggccacctgcagat

SEQ ID NO: 36230 - DNA, 23 bp, Homo sapiens
tatcatgaaaataatgaacaatc

SEQ ID NO: 36231 - DNA, 19 bp, Homo sapiens
agaaggagcttgttcataa

SEQ ID NO: 36232 - DNA, 16 bp, Homo sapiens
cagggagccccatggc

SEQ ID NO: 36233 - DNA, 23 bp, Homo sapiens
tttatactgaatttgtactaaat

SEQ ID NO: 36234 - DNA, 16 bp, Homo sapiens
cggggacagtcatcca

SEQ ID NO: 36235 - DNA, 21 bp, Homo sapiens
ttcatggaacttacattggat

SEQ ID NO: 36236 - DNA, 21 bp, Homo sapiens
gttactatatctgtaacgagg

SEQ ID NO: 36237 - DNA, 16 bp, Homo sapiens
ctggcctcgtttgttg

SEQ ID NO: 36238 - DNA, 24 bp, Homo sapiens
ccccatctataaaaatgtaacaaa

SEQ ID NO: 36239 - DNA, 22 bp, Homo sapiens
tctatttcatttttgtcctaat

SEQ ID NO: 36240 - DNA, 19 bp, Homo sapiens
tagaaaccagagtgagggg

SEQ ID NO: 36241 - DNA, 17 bp, Homo sapiens
aggtgctgccattctgc

SEQ ID NO: 36242 - DNA, 24 bp, Homo sapiens
aaacatgagactttgtagtgcggc

SEQ ID NO: 36243 - DNA, 17 bp, Homo sapiens
ccacctggagagaaggg

SEQ ID NO: 36244 - DNA, 23 bp, Homo sapiens
taataagaatgtgctagtaattc

SEQ ID NO: 36245 - DNA, 20 bp, Homo sapiens
ttgtttttttttaaggacca

SEQ ID NO: 36246 - DNA, 20 bp, Homo sapiens
tttaaacaaaatgctgtatg

SEQ ID NO: 36247 - DNA, 20 bp, Homo sapiens
ctatcaaactgtcattgttt

SEQ ID NO: 36248 - DNA, 18 bp, Homo sapiens
tttctccctggaggtcca

SEQ ID NO: 36249 - DNA, 16 bp, Homo sapiens
ttgactctcaggctag

SEQ ID NO: 36250 - DNA, 22 bp, Homo sapiens
tggtccctgcggtcccgggaat

SEQ ID NO: 36251 - DNA, 22 bp, Homo sapiens
ttttacttgtccaactttgacc

SEQ ID NO: 36252 - DNA, 16 bp, Homo sapiens
caaaggctttccagga

SEQ ID NO: 36253 - DNA, 24 bp, Homo sapiens
tggaaggtagtcactttgtttgca

SEQ ID NO: 36254 - DNA, 16 bp, Homo sapiens
aggtgactgtggtcta

SEQ ID NO: 36255 - DNA, 22 bp, Homo sapiens
ctcaagggtaagataaccaagt

SEQ ID NO: 36256 - DNA, 16 bp, Homo sapiens
tctgtggtcaggagca

SEQ ID NO: 36257 - DNA, 16 bp, Homo sapiens
ttccatcacatcctgg

SEQ ID NO: 36258 - DNA, 17 bp, Homo sapiens
tcaagcagccagtatac

SEQ ID NO: 36259 - DNA, 18 bp, Homo sapiens
gggacctggtggccctgg

SEQ ID NO: 36260 - DNA, 22 bp, Homo sapiens
cttattcttctaattctcttta

SEQ ID NO: 36261 - DNA, 16 bp, Homo sapiens
gaggcctggaggccca

SEQ ID NO: 36262 - DNA, 21 bp, Homo sapiens
caccctaactgtgtcccactt

SEQ ID NO: 36263 - DNA, 17 bp, Homo sapiens
taaggacattcctgacc

SEQ ID NO: 36264 - DNA, 24 bp, Homo sapiens
cttctattctgccactctctggtc

SEQ ID NO: 36265 - DNA, 18 bp, Homo sapiens
tctcttcttagggagttc

SEQ ID NO: 36266 - DNA, 19 bp, Homo sapiens
ctgccatcctttgtcatga

SEQ ID NO: 36267 - DNA, 20 bp, Homo sapiens
gcccttctttcaataactaa

SEQ ID NO: 36268 - DNA, 24 bp, Homo sapiens
ggaggtccctgatctccaggtgga

SEQ ID NO: 36269 - DNA, 17 bp, Homo sapiens
ccaggtcctcgtggaaa

SEQ ID NO: 36270 - DNA, 24 bp, Homo sapiens
cacctgcaggaccaggtggtcctg

SEQ ID NO: 36271 - DNA, 19 bp, Homo sapiens
gtgggaatacctgggctaa

SEQ ID NO: 36272 - DNA, 19 bp, Homo sapiens
atttggaaggttttggttt

SEQ ID NO: 36273 - DNA, 28 bp, Homo sapiens
gagaagatatagtattaattctgttttc

SEQ ID NO: 36274 - DNA, 16 bp, Homo sapiens
gtcctgggggaccttt

SEQ ID NO: 36275 - DNA, 16 bp, Homo sapiens
cgctattgggaagtgg

SEQ ID NO: 36276 - DNA, 22 bp, Homo sapiens
gggtctcctctctcccctttta

SEQ ID NO: 36277 - DNA, 17 bp, Homo sapiens
cagacatttggatcacc

SEQ ID NO: 36278 - DNA, 21 bp, Homo sapiens
gcatggattgaaaggtcagaa

SEQ ID NO: 36279 - DNA, 17 bp, Homo sapiens
ttcagttttgcctccaa

SEQ ID NO: 36280 - DNA, 23 bp, Homo sapiens
cctttgggtcacaggcctgtggt

SEQ ID NO: 36281 - DNA, 21 bp, Homo sapiens
actttctctcatgaaccatgg

SEQ ID NO: 36282 - DNA, 16 bp, Homo sapiens
cctctgctgggcagtg

SEQ ID NO: 36283 - DNA, 21 bp, Homo sapiens
gaagcacctttagttcctttc

SEQ ID NO: 36284 - DNA, 16 bp, Homo sapiens
accctgatgatgaagt

SEQ ID NO: 36285 - DNA, 18 bp, Homo sapiens
aggaagagtaggaagatg

SEQ ID NO: 36286 - DNA, 21 bp, Homo sapiens
atgggagaccctgggccaaga

SEQ ID NO: 36287 - DNA, 24 bp, Homo sapiens
ccaagagcagggtcactcactggt

SEQ ID NO: 36288 - DNA, 17 bp, Homo sapiens
cctgtcatcctcaggtg

SEQ ID NO: 36289 - DNA, 17 bp, Homo sapiens
tcttgtgggatgggctt

SEQ ID NO: 36290 - DNA, 18 bp, Homo sapiens
acatagatgacttttgca

SEQ ID NO: 36291 - DNA, 18 bp, Homo sapiens
tccccctggaggcctctt

SEQ ID NO: 36292 - DNA, 22 bp, Homo sapiens
cctagagttaagatgtatagga

SEQ ID NO: 36293 - DNA, 17 bp, Homo sapiens
gcccaggcatcccgtga

SEQ ID NO: 36294 - DNA, 21 bp, Homo sapiens
cttataggtgaggcataggtg

SEQ ID NO: 36295 - DNA, 18 bp, Homo sapiens
ggatcacctggaaggcca

SEQ ID NO: 36296 - DNA, 23 bp, Homo sapiens
tggcagagccatatctgaattta

SEQ ID NO: 36297 - DNA, 20 bp, Homo sapiens
ccttctttagggcattttgg

SEQ ID NO: 36298 - DNA, 20 bp, Homo sapiens
gagacacaagagtgctcagg

SEQ ID NO: 36299 - DNA, 20 bp, Homo sapiens
gaacttggtgattttaaaga

SEQ ID NO: 36300 - DNA, 16 bp, Homo sapiens
ccagaggagccaggtg

SEQ ID NO: 36301 - DNA, 23 bp, Homo sapiens
cctttccaatagaaactatttaa

SEQ ID NO: 36302 - DNA, 18 bp, Homo sapiens
gcaagccctgctctccgg

SEQ ID NO: 36303 - DNA, 16 bp, Homo sapiens
cctggtccaaagggtg

SEQ ID NO: 36304 - DNA, 22 bp, Homo sapiens
atgcacaaaggggtaagaaaat

SEQ ID NO: 36305 - DNA, 20 bp, Homo sapiens
gtaatgtcacatgcatttta

SEQ ID NO: 36306 - DNA, 23 bp, Homo sapiens
ttttcaaactaaactactttttt

SEQ ID NO: 36307 - DNA, 23 bp, Homo sapiens
gataagctatacaaataccataa

SEQ ID NO: 36308 - DNA, 16 bp, Homo sapiens
ccagggctacctggct

SEQ ID NO: 36309 - DNA, 22 bp, Homo sapiens
tctatttgttcttatttagaat

SEQ ID NO: 36310 - DNA, 19 bp, Homo sapiens
cctggattttcaggaattg

SEQ ID NO: 36311 - DNA, 19 bp, Homo sapiens
ccttgggtgttgcagtttc

SEQ ID NO: 36312 - DNA, 18 bp, Homo sapiens
tctgattaaggccttttg

SEQ ID NO: 36313 - DNA, 21 bp, Homo sapiens
acaatgttataaacattcggg

SEQ ID NO: 36314 - DNA, 21 bp, Homo sapiens
accaaattagttacagaaaat

SEQ ID NO: 36315 - DNA, 21 bp, Homo sapiens
catacctttaggtcctcttgc

SEQ ID NO: 36316 - DNA, 16 bp, Homo sapiens
tgggaggcttgcatgc

SEQ ID NO: 36317 - DNA, 19 bp, Homo sapiens
agaaggctctattttctcc

SEQ ID NO: 36318 - DNA, 16 bp, Homo sapiens
cctccaggctcaactg

SEQ ID NO: 36319 - DNA, 18 bp, Homo sapiens
tatatacgctggcaaatt

SEQ ID NO: 36320 - DNA, 16 bp, Homo sapiens
ggatttcacagagggg

SEQ ID NO: 36321 - DNA, 18 bp, Homo sapiens
cttcccccacaaagcagt

SEQ ID NO: 36322 - DNA, 18 bp, Homo sapiens
caggtgataaaggaactc

SEQ ID NO: 36323 - DNA, 21 bp, Homo sapiens
accaatgaaccctcttagacc

SEQ ID NO: 36324 - DNA, 24 bp, Homo sapiens
ggtccctcagcttaactattacct

SEQ ID NO: 36325 - DNA, 17 bp, Homo sapiens
ctcaccaggttcccctc

SEQ ID NO: 36326 - DNA, 20 bp, Homo sapiens
cagcaatcagaatcctcaat

SEQ ID NO: 36327 - DNA, 21 bp, Homo sapiens
ctcctcttctcccttgcatcc

SEQ ID NO: 36328 - DNA, 18 bp, Homo sapiens
aagggaacacctggggaa

SEQ ID NO: 36329 - DNA, 20 bp, Homo sapiens
cttttctaatctcagtgtta

SEQ ID NO: 36330 - DNA, 16 bp, Homo sapiens
ccataggagccatagg

SEQ ID NO: 36331 - DNA, 22 bp, Homo sapiens
tcaacttatttgatatggttaa

SEQ ID NO: 36332 - DNA, 20 bp, Homo sapiens
agtgaaatgtagtaatggat

SEQ ID NO: 36333 - DNA, 20 bp, Homo sapiens
catcatctccaggaggtcca

SEQ ID NO: 36334 - DNA, 23 bp, Homo sapiens
acattttgtgatctacataaata

SEQ ID NO: 36335 - DNA, 21 bp, Homo sapiens
tccttcatctccgggaggtcc

SEQ ID NO: 36336 - DNA, 24 bp, Homo sapiens
gaattttgtttaaaattctaaaac

SEQ ID NO: 36337 - DNA, 17 bp, Homo sapiens
cctggagagaagggcat

SEQ ID NO: 36338 - DNA, 21 bp, Homo sapiens
ttcagacaagtcctattttat

SEQ ID NO: 36339 - DNA, 16 bp, Homo sapiens
caggttttcccggaga

SEQ ID NO: 36340 - DNA, 24 bp, Homo sapiens
aaataccagaaacaaatgcatgtt

SEQ ID NO: 36341 - DNA, 27 bp, Homo sapiens
aaataaaatattttcctaaaactttat

SEQ ID NO: 36342 - DNA, 16 bp, Homo sapiens
tctccaggaaggccag

SEQ ID NO: 36343 - DNA, 16 bp, Homo sapiens
gacagagtgagactct

SEQ ID NO: 36344 - DNA, 21 bp, Homo sapiens
ctctgcaccaggctttcctct

SEQ ID NO: 36345 - DNA, 16 bp, Homo sapiens
ttgaacttgggaggca

SEQ ID NO: 36346 - DNA, 16 bp, Homo sapiens
gagatgatgggctacc

SEQ ID NO: 36347 - DNA, 23 bp, Homo sapiens
cattaagggaaggacaaagccag

SEQ ID NO: 36348 - DNA, 16 bp, Homo sapiens
actcccaggacggcct

SEQ ID NO: 36349 - DNA, 22 bp, Homo sapiens
tcttcacttggcagtggatttc

SEQ ID NO: 36350 - DNA, 16 bp, Homo sapiens
aaaggacagccgggag

SEQ ID NO: 36351 - DNA, 16 bp, Homo sapiens
cctttggacctggagg

SEQ ID NO: 36352 - DNA, 16 bp, Homo sapiens
gttcagccttcacaca

SEQ ID NO: 36353 - DNA, 16 bp, Homo sapiens
gcctgggggaccatgt

SEQ ID NO: 36354 - DNA, 19 bp, Homo sapiens
attgctttactgttgttta

SEQ ID NO: 36355 - DNA, 16 bp, Homo sapiens
cccgggaggccccaca

SEQ ID NO: 36356 - DNA, 24 bp, Homo sapiens
tggcatctagaaaaatatattctt

SEQ ID NO: 36357 - DNA, 24 bp, Homo sapiens
ggggaagtgatgcaaaccaacatg

SEQ ID NO: 36358 - DNA, 17 bp, Homo sapiens
agaggtgctccagggat

SEQ ID NO: 36359 - DNA, 20 bp, Homo sapiens
tgcttctggcagcatccata

SEQ ID NO: 36360 - DNA, 17 bp, Homo sapiens
cccaaaggcagagaggg

SEQ ID NO: 36361 - DNA, 19 bp, Homo sapiens
ggtaagccccagacccttc

SEQ ID NO: 36362 - DNA, 20 bp, Homo sapiens
tcatggatgtattgtatcat

SEQ ID NO: 36363 - DNA, 17 bp, Homo sapiens
tcccggttgccctggta

SEQ ID NO: 36364 - DNA, 19 bp, Homo sapiens
gatatgcgtgaacaattca

SEQ ID NO: 36365 - DNA, 20 bp, Homo sapiens
ctgggacacctggaaaccca

SEQ ID NO: 36366 - DNA, 18 bp, Homo sapiens
tcaaagacttaacccatt

SEQ ID NO: 36367 - DNA, 18 bp, Homo sapiens
aatgccagctggccctga

SEQ ID NO: 36368 - DNA, 24 bp, Homo sapiens
atttgaaatgtaaccagcacccca

SEQ ID NO: 36369 - DNA, 16 bp, Homo sapiens
ctttcaggagtgccag

SEQ ID NO: 36370 - DNA, 24 bp, Homo sapiens
ttctacatgcctaaagcaaaataa

SEQ ID NO: 36371 - DNA, 20 bp, Homo sapiens
tgaatggtcagaaaggaatc

SEQ ID NO: 36372 - DNA, 16 bp, Homo sapiens
accaaaaggacagcaa

SEQ ID NO: 36373 - DNA, 19 bp, Homo sapiens
ggtgaaaaggggtcctccc

SEQ ID NO: 36374 - DNA, 17 bp, Homo sapiens
tctgggtccttttatcc

SEQ ID NO: 36375 - DNA, 23 bp, Homo sapiens
catgttatcattaaaaatttttt

SEQ ID NO: 36376 - DNA, 16 bp, Homo sapiens
caaatgcagggtctcc

SEQ ID NO: 36377 - DNA, 27 bp, Homo sapiens
ttttaagaaaagtatttttatcaaagt

SEQ ID NO: 36378 - DNA, 16 bp, Homo sapiens
ctgggggcccaacagg

SEQ ID NO: 36379 - DNA, 22 bp, Homo sapiens
gcaaaacaacattactgttaaa

SEQ ID NO: 36380 - DNA, 20 bp, Homo sapiens
cacaatatagctaagggtct

SEQ ID NO: 36381 - DNA, 16 bp, Homo sapiens
tgggcataaaggcaga

SEQ ID NO: 36382 - DNA, 24 bp, Homo sapiens
ccctggaccatttcctcaatgaaa

SEQ ID NO: 36383 - DNA, 19 bp, Homo sapiens
tttaggtccgaagggattt

SEQ ID NO: 36384 - DNA, 21 bp, Homo sapiens
tcccaaagcagaaaaaaaaaa

SEQ ID NO: 36385 - DNA, 22 bp, Homo sapiens
aagaaaatcatctcattttgtt

SEQ ID NO: 36386 - DNA, 17 bp, Homo sapiens
tccgctgttcctggtgt

SEQ ID NO: 36387 - DNA, 19 bp, Homo sapiens
gcaacatccttacttccat

SEQ ID NO: 36388 - DNA, 16 bp, Homo sapiens
ccttggggacctggaa

SEQ ID NO: 36389 - DNA, 16 bp, Homo sapiens
ctgggaggcatggccc

SEQ ID NO: 36390 - DNA, 19 bp, Homo sapiens
aaaacttcagaaatgtcct

SEQ ID NO: 36391 - DNA, 20 bp, Homo sapiens
gtgaatgccgcttttctttt

SEQ ID NO: 36392 - DNA, 24 bp, Homo sapiens
gtttttttttttttactctgggaa

SEQ ID NO: 36393 - DNA, 19 bp, Homo sapiens
cagaaaaatatcttgagga

SEQ ID NO: 36394 - DNA, 18 bp, Homo sapiens
aggtccatcaaaacctgg

SEQ ID NO: 36395 - DNA, 20 bp, Homo sapiens
gtgatctaatgatacttggg

SEQ ID NO: 36396 - DNA, 23 bp, Homo sapiens
gtctagggatacaaaaatctaca

SEQ ID NO: 36397 - DNA, 16 bp, Homo sapiens
ccaggagttccaggcc

SEQ ID NO: 36398 - DNA, 23 bp, Homo sapiens
tcagaattcaccactatataatt

SEQ ID NO: 36399 - DNA, 16 bp, Homo sapiens
aagcaggacctgtggg

SEQ ID NO: 36400 - DNA, 20 bp, Homo sapiens
ccaaagctattgaaataaat

SEQ ID NO: 36401 - DNA, 16 bp, Homo sapiens
gggatcatgaagatgc

SEQ ID NO: 36402 - DNA, 16 bp, Homo sapiens
ccctcacacctgggtg

SEQ ID NO: 36403 - DNA, 23 bp, Homo sapiens
ctgctttgagttcatggacattc

SEQ ID NO: 36404 - DNA, 22 bp, Homo sapiens
caggaaatcccagtcctggggg

SEQ ID NO: 36405 - DNA, 23 bp, Homo sapiens
ttaagagtaactgtctcctgaaa

SEQ ID NO: 36406 - DNA, 19 bp, Homo sapiens
ggaaatcctttaccacctg

SEQ ID NO: 36407 - DNA, 23 bp, Homo sapiens
ctcttaaaacaatcatctttcca

SEQ ID NO: 36408 - DNA, 17 bp, Homo sapiens
atcacatggtcgggatg

SEQ ID NO: 36409 - DNA, 24 bp, Homo sapiens
gttgatattttactgaatttcagc

SEQ ID NO: 36410 - DNA, 16 bp, Homo sapiens
tttccagggcacaaag

SEQ ID NO: 36411 - DNA, 23 bp, Homo sapiens
gaaagtgaaattctatagcaaga

SEQ ID NO: 36412 - DNA, 17 bp, Homo sapiens
tttgtcctctctatcct

SEQ ID NO: 36413 - DNA, 17 bp, Homo sapiens
tccagcatgtccatccc

SEQ ID NO: 36414 - DNA, 23 bp, Homo sapiens
gacttgagcaattgagatacaca

SEQ ID NO: 36415 - DNA, 22 bp, Homo sapiens
ccatcaggacctctttctcctt

SEQ ID NO: 36416 - DNA, 16 bp, Homo sapiens
aaaggggcgaagggtg

SEQ ID NO: 36417 - DNA, 21 bp, Homo sapiens
ctcaaccatcctaaattgtat

SEQ ID NO: 36418 - DNA, 24 bp, Homo sapiens
caattaacctaatttgtttctctt

SEQ ID NO: 36419 - DNA, 19 bp, Homo sapiens
gggtccatacatcattcat

SEQ ID NO: 36420 - DNA, 17 bp, Homo sapiens
ggagggaagaagagaga

SEQ ID NO: 36421 - DNA, 21 bp, Homo sapiens
cttgatacaaccatgtcaccc

SEQ ID NO: 36422 - DNA, 16 bp, Homo sapiens
ggcagggaagtggaag

SEQ ID NO: 36423 - DNA, 21 bp, Homo sapiens
cttctgccatgattgtaagtt

SEQ ID NO: 36424 - DNA, 22 bp, Homo sapiens
aaaggtgacccaggacctcctg

SEQ ID NO: 36425 - DNA, 24 bp, Homo sapiens
ttaaacctctttccttaataaatt

SEQ ID NO: 36426 - DNA, 16 bp, Homo sapiens
cctgggaggcagggga

SEQ ID NO: 36427 - DNA, 24 bp, Homo sapiens
aaaacagactaataccatgtctct

SEQ ID NO: 36428 - DNA, 20 bp, Homo sapiens
taggaaatgaaggactctgt

SEQ ID NO: 36429 - DNA, 17 bp, Homo sapiens
ggtccttcagcaccagg

SEQ ID NO: 36430 - DNA, 19 bp, Homo sapiens
agtaaagcccttattgggg

SEQ ID NO: 36431 - DNA, 16 bp, Homo sapiens
ccccaagtctccctta

SEQ ID NO: 36432 - DNA, 23 bp, Homo sapiens
gtctgcaagaagtgcatatcgga

SEQ ID NO: 36433 - DNA, 24 bp, Homo sapiens
catgggtccaggctcacaggcaca

SEQ ID NO: 36434 - DNA, 24 bp, Homo sapiens
agtgacttgtaatcacatagcact

SEQ ID NO: 36435 - DNA, 18 bp, Homo sapiens
cggaccacaaggaataaa

SEQ ID NO: 36436 - DNA, 17 bp, Homo sapiens
tgaaatgccacattaca

SEQ ID NO: 36437 - DNA, 22 bp, Homo sapiens
attatgtgattctctctgccca

SEQ ID NO: 36438 - DNA, 19 bp, Homo sapiens
aaattctacctttggtgcc

SEQ ID NO: 36439 - DNA, 17 bp, Homo sapiens
ggaggatgtgagtgcaa

SEQ ID NO: 36440 - DNA, 16 bp, Homo sapiens
gaccaactttgccttt

SEQ ID NO: 36441 - DNA, 20 bp, Homo sapiens
gacagaaagaatcctaggaa

SEQ ID NO: 36442 - DNA, 23 bp, Homo sapiens
gaaagtccaacttcagtttattt

SEQ ID NO: 36443 - DNA, 20 bp, Homo sapiens
accagggaagccaggatcac

SEQ ID NO: 36444 - DNA, 29 bp, Homo sapiens
ataacttttaaaatattttaaaaactatg

SEQ ID NO: 36445 - DNA, 16 bp, Homo sapiens
gcttccaggagaagct

SEQ ID NO: 36446 - DNA, 24 bp, Homo sapiens
gcagcataaatgctaatggatatg

SEQ ID NO: 36447 - DNA, 19 bp, Homo sapiens
ttgatttatcttgcaggca

SEQ ID NO: 36448 - DNA, 18 bp, Homo sapiens
tggtgctccaggcaagcc

SEQ ID NO: 36449 - DNA, 23 bp, Homo sapiens
tgtgtaccaatcttgatttcttc

SEQ ID NO: 36450 - DNA, 17 bp, Homo sapiens
tcccaggaataccagct

SEQ ID NO: 36451 - DNA, 17 bp, Homo sapiens
tagcataatgacctcca

SEQ ID NO: 36452 - DNA, 21 bp, Homo sapiens
gtggcccagggggtcctatca

SEQ ID NO: 36453 - DNA, 24 bp, Homo sapiens
tctcccaagagtctaacattcttg

SEQ ID NO: 36454 - DNA, 16 bp, Homo sapiens
ggatgttggaccacct

SEQ ID NO: 36455 - DNA, 22 bp, Homo sapiens
atcctaaggtgattccaatatc

SEQ ID NO: 36456 - DNA, 16 bp, Homo sapiens
attatctttggcaggc

SEQ ID NO: 36457 - DNA, 17 bp, Homo sapiens
cctgtaaaagccagggc

SEQ ID NO: 36458 - DNA, 22 bp, Homo sapiens
acaaaaagtaattgttgtctta

SEQ ID NO: 36459 - DNA, 16 bp, Homo sapiens
ccaagagacctggggg

SEQ ID NO: 36460 - DNA, 21 bp, Homo sapiens
tcgttttaaatgtaatgagaa

SEQ ID NO: 36461 - DNA, 21 bp, Homo sapiens
gccagggaaccctgggtcccc

SEQ ID NO: 36462 - DNA, 23 bp, Homo sapiens
aaaaaaacctcatgcacatgtat

SEQ ID NO: 36463 - DNA, 21 bp, Homo sapiens
cctggaaatcgagggcaccca

SEQ ID NO: 36464 - DNA, 16 bp, Homo sapiens
gtgcaagctatggaaa

SEQ ID NO: 36465 - DNA, 22 bp, Homo sapiens
ggcaacatgagtaaaattaata

SEQ ID NO: 36466 - DNA, 22 bp, Homo sapiens
ataatttatggaggaactgaat

SEQ ID NO: 36467 - DNA, 20 bp, Homo sapiens
tctgcttcttatatgaatgt

SEQ ID NO: 36468 - DNA, 20 bp, Homo sapiens
caccaaaacacctggtggtc

SEQ ID NO: 36469 - DNA, 16 bp, Homo sapiens
catctttgctgctcct

SEQ ID NO: 36470 - DNA, 20 bp, Homo sapiens
tatcagcaacatgaaaaaca

SEQ ID NO: 36471 - DNA, 16 bp, Homo sapiens
aggactggttggagat

SEQ ID NO: 36472 - DNA, 25 bp, Homo sapiens
aaaaattacattcttgaatgattcc

SEQ ID NO: 36473 - DNA, 16 bp, Homo sapiens
ttgtcacccagtcact

SEQ ID NO: 36474 - DNA, 22 bp, Homo sapiens
atataaacttttatcaggatat

SEQ ID NO: 36475 - DNA, 16 bp, Homo sapiens
taagactttgcatggt

SEQ ID NO: 36476 - DNA, 18 bp, Homo sapiens
taatccaaatagcccagg

SEQ ID NO: 36477 - DNA, 16 bp, Homo sapiens
tagctgtgggtgcaaa

SEQ ID NO: 36478 - DNA, 21 bp, Homo sapiens
tcttgtgcttcaatttttgca

SEQ ID NO: 36479 - DNA, 17 bp, Homo sapiens
ggggatcctggttccta

SEQ ID NO: 36480 - DNA, 20 bp, Homo sapiens
gtgtctgccttcctaattac

SEQ ID NO: 36481 - DNA, 17 bp, Homo sapiens
gagctggttaatgcatt

SEQ ID NO: 36482 - DNA, 23 bp, Homo sapiens
attgcatttactaatgaaatgta

SEQ ID NO: 36483 - DNA, 17 bp, Homo sapiens
gctagctttgcaaacag

SEQ ID NO: 36484 - DNA, 16 bp, Homo sapiens
gaaaacctggagatcc

SEQ ID NO: 36485 - DNA, 20 bp, Homo sapiens
aatggaaggatgctctggga

SEQ ID NO: 36486 - DNA, 17 bp, Homo sapiens
tggggcaaaaggagaaa

SEQ ID NO: 36487 - DNA, 18 bp, Homo sapiens
catgagctattcttcact

SEQ ID NO: 36488 - DNA, 19 bp, Homo sapiens
aaatattgttgcttgaacc

SEQ ID NO: 36489 - DNA, 24 bp, Homo sapiens
gaaagagaaatatctccaaattca

SEQ ID NO: 36490 - DNA, 25 bp, Homo sapiens
ctgacaataatttttgtttctcatt

SEQ ID NO: 36491 - DNA, 20 bp, Homo sapiens
cctggaaatccaggaatacc

SEQ ID NO: 36492 - DNA, 24 bp, Homo sapiens
tatcataatactatagagcttcta

SEQ ID NO: 36493 - DNA, 23 bp, Homo sapiens
gaaaacaactactttagaataga

SEQ ID NO: 36494 - DNA, 23 bp, Homo sapiens
ttagggtataaaaggaattcctg

SEQ ID NO: 36495 - DNA, 23 bp, Homo sapiens
tatattagcacttaaagcaatga

SEQ ID NO: 36496 - DNA, 19 bp, Homo sapiens
tggaattcagtatgttaaa

SEQ ID NO: 36497 - DNA, 17 bp, Homo sapiens
gtacatcacacaaatga

SEQ ID NO: 36498 - DNA, 25 bp, Homo sapiens
cttaagatttttttttttaaggtga

SEQ ID NO: 36499 - DNA, 20 bp, Homo sapiens
gtggtcctggcagtccaacc

SEQ ID NO: 36500 - DNA, 19 bp, Homo sapiens
cgcacgatggggccaacag

SEQ ID NO: 36501 - DNA, 16 bp, Homo sapiens
cctggacccaccctgt

SEQ ID NO: 36502 - DNA, 23 bp, Homo sapiens
atagaaagacctctatactttgc

SEQ ID NO: 36503 - DNA, 22 bp, Homo sapiens
ttaatatgaaattttcattatc

SEQ ID NO: 36504 - DNA, 23 bp, Homo sapiens
tactgctactttccaaggtgaca

SEQ ID NO: 36505 - DNA, 19 bp, Homo sapiens
gacacataggattggaagc

SEQ ID NO: 36506 - DNA, 18 bp, Homo sapiens
gtggctctaccaacaggg

SEQ ID NO: 36507 - DNA, 25 bp, Homo sapiens
ataagaaaataaatatccttttata

SEQ ID NO: 36508 - DNA, 18 bp, Homo sapiens
agggtaatggtgccataa

SEQ ID NO: 36509 - DNA, 18 bp, Homo sapiens
ttctttctcagggaaatc

SEQ ID NO: 36510 - DNA, 23 bp, Homo sapiens
tgactagataatgagtacaagtt

SEQ ID NO: 36511 - DNA, 22 bp, Homo sapiens
aagtcttaattgcttttaatta

SEQ ID NO: 36512 - DNA, 16 bp, Homo sapiens
cgtcaccatctgctcc

SEQ ID NO: 36513 - DNA, 19 bp, Homo sapiens
gctttcctcttatcagact

SEQ ID NO: 36514 - DNA, 18 bp, Homo sapiens
ccctttactcccacaccg

SEQ ID NO: 36515 - DNA, 26 bp, Homo sapiens
gaattttaaaaaagtaattaaaagca

SEQ ID NO: 36516 - DNA, 16 bp, Homo sapiens
tagggacctccgggcc

SEQ ID NO: 36517 - DNA, 19 bp, Homo sapiens
tcatggaatactttgggaa

SEQ ID NO: 36518 - DNA, 18 bp, Homo sapiens
aaagaaggcacattctga

SEQ ID NO: 36519 - DNA, 20 bp, Homo sapiens
caaccatttcattgttcagg

SEQ ID NO: 36520 - DNA, 18 bp, Homo sapiens
actccatcactgcatgtt

SEQ ID NO: 36521 - DNA, 22 bp, Homo sapiens
ttcaaacctggacgccctggtt

SEQ ID NO: 36522 - DNA, 21 bp, Homo sapiens
tcccactgataatggtgggtt

SEQ ID NO: 36523 - DNA, 18 bp, Homo sapiens
tctcatgtttagggatct

SEQ ID NO: 36524 - DNA, 21 bp, Homo sapiens
tgtgtctgacccaaaatggca

SEQ ID NO: 36525 - DNA, 17 bp, Homo sapiens
cacgcaactctttctgt

SEQ ID NO: 36526 - DNA, 16 bp, Homo sapiens
acatcagcagtgctgt

SEQ ID NO: 36527 - DNA, 16 bp, Homo sapiens
gcagggcagatgtgct

SEQ ID NO: 36528 - DNA, 16 bp, Homo sapiens
gtcctcctgcacccca

SEQ ID NO: 36529 - DNA, 16 bp, Homo sapiens
agggagacagagggga

SEQ ID NO: 36530 - DNA, 21 bp, Homo sapiens
tttcattttgcactaggtgag

SEQ ID NO: 36531 - DNA, 22 bp, Homo sapiens
tctatttttacataatctctgt

SEQ ID NO: 36532 - DNA, 17 bp, Homo sapiens
ggctatttgaggaggaa

SEQ ID NO: 36533 - DNA, 21 bp, Homo sapiens
caccaaaaaaattgaacaaac

SEQ ID NO: 36534 - DNA, 22 bp, Homo sapiens
tggtaagccaggcagtcctggg

SEQ ID NO: 36535 - DNA, 20 bp, Homo sapiens
aggaaattcagtgttcattt

SEQ ID NO: 36536 - DNA, 22 bp, Homo sapiens
taaaaattggtgtattcaggga

SEQ ID NO: 36537 - DNA, 18 bp, Homo sapiens
tcctgttaagtacataca

SEQ ID NO: 36538 - DNA, 17 bp, Homo sapiens
tgggcttacctatttgg

SEQ ID NO: 36539 - DNA, 25 bp, Homo sapiens
tttaactgatgagttatattttata

SEQ ID NO: 36540 - DNA, 19 bp, Homo sapiens
cctgaatacctttaacggc

SEQ ID NO: 36541 - DNA, 19 bp, Homo sapiens
atatggaagaggatacaga

SEQ ID NO: 36542 - DNA, 23 bp, Homo sapiens
cagggtttccaggaggaagagga

SEQ ID NO: 36543 - DNA, 24 bp, Homo sapiens
ctcccatttgttgacaatgctcca

SEQ ID NO: 36544 - DNA, 16 bp, Homo sapiens
tggacccagaggcaaa

SEQ ID NO: 36545 - DNA, 16 bp, Homo sapiens
acagggcctgttcact

SEQ ID NO: 36546 - DNA, 19 bp, Homo sapiens
tgatattttcgcaaaaatg

SEQ ID NO: 36547 - DNA, 17 bp, Homo sapiens
ggggcctcctgggccaa

SEQ ID NO: 36548 - DNA, 18 bp, Homo sapiens
gtgaatcacaattgccat

SEQ ID NO: 36549 - DNA, 19 bp, Homo sapiens
gccattgtggccactcata

SEQ ID NO: 36550 - DNA, 21 bp, Homo sapiens
ttttacatgctacgtagcctt

SEQ ID NO: 36551 - DNA, 16 bp, Homo sapiens
actggtgttcctggat

SEQ ID NO: 36552 - DNA, 24 bp, Homo sapiens
aatatatatattgtggtttctata

SEQ ID NO: 36553 - DNA, 23 bp, Homo sapiens
gtaaatcagcttattaatttaat

SEQ ID NO: 36554 - DNA, 18 bp, Homo sapiens
tgatgagtacttctgcct

SEQ ID NO: 36555 - DNA, 19 bp, Homo sapiens
gtgacaatgactgctcagc

SEQ ID NO: 36556 - DNA, 20 bp, Homo sapiens
ggtatgccatctaaacctgg

SEQ ID NO: 36557 - DNA, 17 bp, Homo sapiens
agcacaagaattggttc

SEQ ID NO: 36558 - DNA, 23 bp, Homo sapiens
gggaggctcgcttgaacctggga

SEQ ID NO: 36559 - DNA, 16 bp, Homo sapiens
gaatgagaggggaccg

SEQ ID NO: 36560 - DNA, 23 bp, Homo sapiens
ttctagcctgagtgacagagtaa

SEQ ID NO: 36561 - DNA, 17 bp, Homo sapiens
cacagggtccaattgga

SEQ ID NO: 36562 - DNA, 17 bp, Homo sapiens
tgagtctttcatgtgaa

SEQ ID NO: 36563 - DNA, 17 bp, Homo sapiens
agaattgcacccccatt

SEQ ID NO: 36564 - DNA, 16 bp, Homo sapiens
ccctgctgctccagga

SEQ ID NO: 36565 - DNA, 16 bp, Homo sapiens
tccaagtcttctgtag

SEQ ID NO: 36566 - DNA, 16 bp, Homo sapiens
ggtcctggggctccca

SEQ ID NO: 36567 - DNA, 24 bp, Homo sapiens
gggattacaggtgtgagccaccat

SEQ ID NO: 36568 - DNA, 19 bp, Homo sapiens
agttgagattgctattaga

SEQ ID NO: 36569 - DNA, 18 bp, Homo sapiens
gtggaggaagagattgct

SEQ ID NO: 36570 - DNA, 19 bp, Homo sapiens
cgaggactaaaatttgcca

SEQ ID NO: 36571 - DNA, 22 bp, Homo sapiens
gtactggtatactaaataagat

SEQ ID NO: 36572 - DNA, 20 bp, Homo sapiens
tcaaaattcaggaatgctgc

SEQ ID NO: 36573 - DNA, 16 bp, Homo sapiens
ggtaaaccaagagtgc

SEQ ID NO: 36574 - DNA, 18 bp, Homo sapiens
ggaacacagtggcaaaca

SEQ ID NO: 36575 - DNA, 20 bp, Homo sapiens
ctactgtgtaagttcttcat

SEQ ID NO: 36576 - DNA, 23 bp, Homo sapiens
atactcattctcttttctgtaca

SEQ ID NO: 36577 - DNA, 20 bp, Homo sapiens
attctccattttacaggtaa

SEQ ID NO: 36578 - DNA, 20 bp, Homo sapiens
gtttcacatgaaaagaaact

SEQ ID NO: 36579 - DNA, 23 bp, Homo sapiens
ttatgcattctataaagtgaatt

SEQ ID NO: 36580 - DNA, 22 bp, Homo sapiens
agcagcctcatagaaataaaaa

SEQ ID NO: 36581 - DNA, 22 bp, Homo sapiens
acttaccccatatacatattgt

SEQ ID NO: 36582 - DNA, 18 bp, Homo sapiens
gcagccagagagaggaaa

SEQ ID NO: 36583 - DNA, 19 bp, Homo sapiens
aaaatgagtcatgaaatgg

SEQ ID NO: 36584 - DNA, 20 bp, Homo sapiens
ctctgcacatagtactaatg

SEQ ID NO: 36585 - DNA, 21 bp, Homo sapiens
ttttgacatattaagcattca

SEQ ID NO: 36586 - DNA, 17 bp, Homo sapiens
tggaagagaagactggc

SEQ ID NO: 36587 - DNA, 22 bp, Homo sapiens
attactaaataaaagcaggcaa

SEQ ID NO: 36588 - DNA, 18 bp, Homo sapiens
ctaacaggaacagacttt

SEQ ID NO: 36589 - DNA, 21 bp, Homo sapiens
cttggtcaatctgaaggagca

SEQ ID NO: 36590 - DNA, 28 bp, Homo sapiens
gataaaaaatgaaagtaattattttcaa

SEQ ID NO: 36591 - DNA, 24 bp, Homo sapiens
aaaaagcctgggtggggagggacg

SEQ ID NO: 36592 - DNA, 17 bp, Homo sapiens
cggcagcaggagcacct

SEQ ID NO: 36593 - DNA, 24 bp, Homo sapiens
gccgagtggcgaggcgagctttcc

SEQ ID NO: 36594 - DNA, 24 bp, Homo sapiens
gtgggggtcgcgcagcccccactc

SEQ ID NO: 36595 - DNA, 20 bp, Homo sapiens
cctgagagcctgagggtccc

SEQ ID NO: 36596 - DNA, 19 bp, Homo sapiens
gggtggggccagcgcgtcc

SEQ ID NO: 36597 - DNA, 16 bp, Homo sapiens
gaccgcccccaggccg

SEQ ID NO: 36598 - DNA, 24 bp, Homo sapiens
tcccgggacctgcgtgaagccctc

SEQ ID NO: 36599 - DNA, 17 bp, Homo sapiens
gcagccagcaaggtgag

SEQ ID NO: 36600 - DNA, 26 bp, Homo sapiens
tattgctattcatatattgatatatt

SEQ ID NO: 36601 - DNA, 16 bp, Homo sapiens
gtcacagaagcactgg

SEQ ID NO: 36602 - DNA, 22 bp, Homo sapiens
ctaacagatagtgtccaatact

SEQ ID NO: 36603 - DNA, 19 bp, Homo sapiens
accttctagagctttacag

SEQ ID NO: 36604 - DNA, 19 bp, Homo sapiens
ttgggatttattcagctgt

SEQ ID NO: 36605 - DNA, 17 bp, Homo sapiens
acaacatactgcggatc

SEQ ID NO: 36606 - DNA, 18 bp, Homo sapiens
gtctgtaaagacaaaggc

SEQ ID NO: 36607 - DNA, 24 bp, Homo sapiens
cttttttctttttttttttttagg

SEQ ID NO: 36608 - DNA, 24 bp, Homo sapiens
gtcactcctgagtgctaattatga

SEQ ID NO: 36609 - DNA, 17 bp, Homo sapiens
ccttcaggacctgtgaa

SEQ ID NO: 36610 - DNA, 21 bp, Homo sapiens
catgaagtcataaacaagaga

SEQ ID NO: 36611 - DNA, 17 bp, Homo sapiens
ggttggggattttccaa

SEQ ID NO: 36612 - DNA, 24 bp, Homo sapiens
tgctgctctgtgtgtttctcacct

SEQ ID NO: 36613 - DNA, 17 bp, Homo sapiens
ggaattctctccaggtt

SEQ ID NO: 36614 - DNA, 21 bp, Homo sapiens
gttctcctggccagaaaggat

SEQ ID NO: 36615 - DNA, 16 bp, Homo sapiens
tatgtggcccactaat

SEQ ID NO: 36616 - DNA, 24 bp, Homo sapiens
gataaacaattatcaagttccaat

SEQ ID NO: 36617 - DNA, 17 bp, Homo sapiens
ctttggaacccgtgagt

SEQ ID NO: 36618 - DNA, 22 bp, Homo sapiens
caatgaaataatcagaagggca

SEQ ID NO: 36619 - DNA, 18 bp, Homo sapiens
ctgtgaaaagctgatctt

SEQ ID NO: 36620 - DNA, 23 bp, Homo sapiens
tcttagtgccaaataattttcag

SEQ ID NO: 36621 - DNA, 18 bp, Homo sapiens
gttcttgaacttcatcta

SEQ ID NO: 36622 - DNA, 18 bp, Homo sapiens
ttccaggacttccaggac

SEQ ID NO: 36623 - DNA, 16 bp, Homo sapiens
ccctaatgtggtaacc

SEQ ID NO: 36624 - DNA, 18 bp, Homo sapiens
acaaaagtttgttaaacc

SEQ ID NO: 36625 - DNA, 17 bp, Homo sapiens
aagtccaggagaaccag

SEQ ID NO: 36626 - DNA, 19 bp, Homo sapiens
cccagttatagtggaggaa

SEQ ID NO: 36627 - DNA, 24 bp, Homo sapiens
tctttattaaaatgagcttacttt

SEQ ID NO: 36628 - DNA, 25 bp, Homo sapiens
acatttttaaagttttttttttttg

SEQ ID NO: 36629 - DNA, 20 bp, Homo sapiens
gctattttcttcatgtaaca

SEQ ID NO: 36630 - DNA, 16 bp, Homo sapiens
gtggattgccaggatt

SEQ ID NO: 36631 - DNA, 24 bp, Homo sapiens
actgaaattatatgtaaaaccaca

SEQ ID NO: 36632 - DNA, 17 bp, Homo sapiens
accttagaaccactgca

SEQ ID NO: 36633 - DNA, 23 bp, Homo sapiens
ttcaagagctatttaaatcagtg

SEQ ID NO: 36634 - DNA, 22 bp, Homo sapiens
tcaccttgatttaatcattcag

SEQ ID NO: 36635 - DNA, 19 bp, Homo sapiens
ctcattgagacttgttctt

SEQ ID NO: 36636 - DNA, 16 bp, Homo sapiens
tggttctggcctaaag

SEQ ID NO: 36637 - DNA, 24 bp, Homo sapiens
ccttacggacttgtcggtgtacca

SEQ ID NO: 36638 - DNA, 22 bp, Homo sapiens
gttttttggtcttcagcctcat

SEQ ID NO: 36639 - DNA, 16 bp, Homo sapiens
taccgggatccctggg

SEQ ID NO: 36640 - DNA, 19 bp, Homo sapiens
ttaccattgcaaggttgga

SEQ ID NO: 36641 - DNA, 18 bp, Homo sapiens
gccatatggagtagacca

SEQ ID NO: 36642 - DNA, 22 bp, Homo sapiens
taagaataataagaaactttgt

SEQ ID NO: 36643 - DNA, 16 bp, Homo sapiens
tctactatggctaccc

SEQ ID NO: 36644 - DNA, 20 bp, Homo sapiens
ccagggacactgggctaccc

SEQ ID NO: 36645 - DNA, 22 bp, Homo sapiens
taaaagattaagggaagacttt

SEQ ID NO: 36646 - DNA, 19 bp, Homo sapiens
agagattttcagtgacagc

SEQ ID NO: 36647 - DNA, 17 bp, Homo sapiens
acaatagcagagagggc

SEQ ID NO: 36648 - DNA, 22 bp, Homo sapiens
tgaaatcttatttgtaatgact

SEQ ID NO: 36649 - DNA, 19 bp, Homo sapiens
cctctagttgttcataggt

SEQ ID NO: 36650 - DNA, 21 bp, Homo sapiens
taggaataaatatcatgtccc

SEQ ID NO: 36651 - DNA, 24 bp, Homo sapiens
tatgaaaatgctttgaattcttca

SEQ ID NO: 36652 - DNA, 17 bp, Homo sapiens
gggtcgccttttgcatc

SEQ ID NO: 36653 - DNA, 23 bp, Homo sapiens
agtacataacttgaaaagcattt

SEQ ID NO: 36654 - DNA, 16 bp, Homo sapiens
tagggaccttctctga

SEQ ID NO: 36655 - DNA, 24 bp, Homo sapiens
gttttgaaaatataacattgatga

SEQ ID NO: 36656 - DNA, 17 bp, Homo sapiens
ggggaaaagagagacga

SEQ ID NO: 36657 - DNA, 22 bp, Homo sapiens
agaagaagatatagaacttgat

SEQ ID NO: 36658 - DNA, 24 bp, Homo sapiens
acatgtaaatagaataaataggaa

SEQ ID NO: 36659 - DNA, 16 bp, Homo sapiens
caacaggcccaggaaa

SEQ ID NO: 36660 - DNA, 22 bp, Homo sapiens
actgaaaggggaggtgttatgc

SEQ ID NO: 36661 - DNA, 18 bp, Homo sapiens
cagagtctgtagcaagga

SEQ ID NO: 36662 - DNA, 22 bp, Homo sapiens
ggacattgttattaagtgagaa

SEQ ID NO: 36663 - DNA, 20 bp, Homo sapiens
gcatccaaccagaaaaattc

SEQ ID NO: 36664 - DNA, 17 bp, Homo sapiens
gtttgccaggccctcca

SEQ ID NO: 36665 - DNA, 22 bp, Homo sapiens
taggtcccatggctcctggaaa

SEQ ID NO: 36666 - DNA, 19 bp, Homo sapiens
tgtgagtatcaagtcatcc

SEQ ID NO: 36667 - DNA, 16 bp, Homo sapiens
agggtgtgctagctgt

SEQ ID NO: 36668 - DNA, 22 bp, Homo sapiens
ttaaaaagttattaaaagaatt

SEQ ID NO: 36669 - DNA, 16 bp, Homo sapiens
agaggtgcctaacagt

SEQ ID NO: 36670 - DNA, 22 bp, Homo sapiens
ttcatttgtggatttttctagg

SEQ ID NO: 36671 - DNA, 17 bp, Homo sapiens
ggagaaaagaggtgaga

SEQ ID NO: 36672 - DNA, 19 bp, Homo sapiens
cccgctctcctttatgtcc

SEQ ID NO: 36673 - DNA, 24 bp, Homo sapiens
ttctaaaatgaaagttaaaatata

SEQ ID NO: 36674 - DNA, 18 bp, Homo sapiens
tatgctctgggacataaa

SEQ ID NO: 36675 - DNA, 29 bp, Homo sapiens
gtttagactatttattcatatttattttt

SEQ ID NO: 36676 - DNA, 20 bp, Homo sapiens
cgggaagatagaacaaatga

SEQ ID NO: 36677 - DNA, 22 bp, Homo sapiens
agggtcacatgggtgaaagagt

SEQ ID NO: 36678 - DNA, 17 bp, Homo sapiens
ccctttcacaccctaaa

SEQ ID NO: 36679 - DNA, 19 bp, Homo sapiens
gccaagctgaaattgatgg

SEQ ID NO: 36680 - DNA, 16 bp, Homo sapiens
tgttatctgggccagt

SEQ ID NO: 36681 - DNA, 17 bp, Homo sapiens
gtagacctttcaaacgt

SEQ ID NO: 36682 - DNA, 19 bp, Homo sapiens
aggacttcatcctagacac

SEQ ID NO: 36683 - DNA, 19 bp, Homo sapiens
actcctgagtgtttttgtc

SEQ ID NO: 36684 - DNA, 17 bp, Homo sapiens
gagctgggctgagctgg

SEQ ID NO: 36685 - DNA, 20 bp, Homo sapiens
ggaacagttattgtgaccct

SEQ ID NO: 36686 - DNA, 22 bp, Homo sapiens
atgtgagaaatggaaggtgtat

SEQ ID NO: 36687 - DNA, 17 bp, Homo sapiens
gagggtccaggaggtcc

SEQ ID NO: 36688 - DNA, 21 bp, Homo sapiens
ccagtttattgaacagataga

SEQ ID NO: 36689 - DNA, 19 bp, Homo sapiens
taaatactaaggctctact

SEQ ID NO: 36690 - DNA, 19 bp, Homo sapiens
catttgtaacaatgttgaa

SEQ ID NO: 36691 - DNA, 23 bp, Homo sapiens
gagtagccattcttttattcctt

SEQ ID NO: 36692 - DNA, 23 bp, Homo sapiens
caagggagcaatgggcgagcctg

SEQ ID NO: 36693 - DNA, 23 bp, Homo sapiens
attactattcatcaataagattt

SEQ ID NO: 36694 - DNA, 17 bp, Homo sapiens
acctgcaggccagggtc

SEQ ID NO: 36695 - DNA, 21 bp, Homo sapiens
ttttaaatggcagaataacca

SEQ ID NO: 36696 - DNA, 16 bp, Homo sapiens
gagtcccaagtcctga

SEQ ID NO: 36697 - DNA, 20 bp, Homo sapiens
ttcataaaatttgacatggc

SEQ ID NO: 36698 - DNA, 22 bp, Homo sapiens
cccaaatcttaaagaacagaaa

SEQ ID NO: 36699 - DNA, 19 bp, Homo sapiens
ggatctgaaaagggtgctc

SEQ ID NO: 36700 - DNA, 23 bp, Homo sapiens
ggccattgtgtattctgtggtta

SEQ ID NO: 36701 - DNA, 16 bp, Homo sapiens
cacttccagggaagcc

SEQ ID NO: 36702 - DNA, 23 bp, Homo sapiens
aggcttttcatgcctgaggtcaa

SEQ ID NO: 36703 - DNA, 16 bp, Homo sapiens
tccttcttcagctagt

SEQ ID NO: 36704 - DNA, 23 bp, Homo sapiens
aaagttagccatatttattacat

SEQ ID NO: 36705 - DNA, 19 bp, Homo sapiens
aaatgcagtttttaaaagc

SEQ ID NO: 36706 - DNA, 19 bp, Homo sapiens
cggaaaagatggtgttcct

SEQ ID NO: 36707 - DNA, 16 bp, Homo sapiens
gggaaacccctgttgc

SEQ ID NO: 36708 - DNA, 19 bp, Homo sapiens
cccactgtgaagagagatc

SEQ ID NO: 36709 - DNA, 20 bp, Homo sapiens
acctattaaaataggctatt

SEQ ID NO: 36710 - DNA, 20 bp, Homo sapiens
cacctgctcccccagaagaa

SEQ ID NO: 36711 - DNA, 18 bp, Homo sapiens
tgtaatcccttgtactta

SEQ ID NO: 36712 - DNA, 18 bp, Homo sapiens
ctttagggagtcaagggc

SEQ ID NO: 36713 - DNA, 18 bp, Homo sapiens
gccacatctctcttttct

SEQ ID NO: 36714 - DNA, 24 bp, Homo sapiens
ccagatacgcgctctccaggaaaa

SEQ ID NO: 36715 - DNA, 18 bp, Homo sapiens
ttactggaccacgaaatc

SEQ ID NO: 36716 - DNA, 19 bp, Homo sapiens
acatgacatctacatatca

SEQ ID NO: 36717 - DNA, 17 bp, Homo sapiens
tttccttgctactttaa

SEQ ID NO: 36718 - DNA, 18 bp, Homo sapiens
aaatactttgggtgacca

SEQ ID NO: 36719 - DNA, 19 bp, Homo sapiens
tggtttgacaacaaggtaa

SEQ ID NO: 36720 - DNA, 20 bp, Homo sapiens
aggggacattggccctccag

SEQ ID NO: 36721 - DNA, 20 bp, Homo sapiens
tccacctacatttacatgac

SEQ ID NO: 36722 - DNA, 18 bp, Homo sapiens
agtgccttcatctccctt

SEQ ID NO: 36723 - DNA, 24 bp, Homo sapiens
gaattcaggaaaataaggaagcca

SEQ ID NO: 36724 - DNA, 22 bp, Homo sapiens
aagaaatttattcttaccttgt

SEQ ID NO: 36725 - DNA, 20 bp, Homo sapiens
gtgagctgtccataaatagc

SEQ ID NO: 36726 - DNA, 22 bp, Homo sapiens
cataagcacatgctatttatta

SEQ ID NO: 36727 - DNA, 22 bp, Homo sapiens
gaatattatgacacataccagg

SEQ ID NO: 36728 - DNA, 22 bp, Homo sapiens
aataacacctttatgaaaatga

SEQ ID NO: 36729 - DNA, 17 bp, Homo sapiens
ggagctcgtggcccaca

SEQ ID NO: 36730 - DNA, 24 bp, Homo sapiens
tctaaataagtgaaaatttctgat

SEQ ID NO: 36731 - DNA, 18 bp, Homo sapiens
accccaagaaacatggac

SEQ ID NO: 36732 - DNA, 23 bp, Homo sapiens
attaactatcagtatattgtcac

SEQ ID NO: 36733 - DNA, 22 bp, Homo sapiens
tgtcttatgtaaataatgtaaa

SEQ ID NO: 36734 - DNA, 23 bp, Homo sapiens
atatctttctaagcaattaatta

SEQ ID NO: 36735 - DNA, 16 bp, Homo sapiens
ccattgaacccagcct

SEQ ID NO: 36736 - DNA, 22 bp, Homo sapiens
gagttcctggaagtcctggtat

SEQ ID NO: 36737 - DNA, 24 bp, Homo sapiens
cagatgaaaaaagcaaggatattc

SEQ ID NO: 36738 - DNA, 20 bp, Homo sapiens
ttcccctttacttcctttca

SEQ ID NO: 36739 - DNA, 27 bp, Homo sapiens
aatttttataaataaaattaaatcact

SEQ ID NO: 36740 - DNA, 16 bp, Homo sapiens
acaacctggggaccca

SEQ ID NO: 36741 - DNA, 23 bp, Homo sapiens
aggaaaaaatgtaaaatacaaga

SEQ ID NO: 36742 - DNA, 16 bp, Homo sapiens
tccacatctttacctg

SEQ ID NO: 36743 - DNA, 16 bp, Homo sapiens
ccctggatggccaggc

SEQ ID NO: 36744 - DNA, 17 bp, Homo sapiens
tgttgcccgtggtttgc

SEQ ID NO: 36745 - DNA, 17 bp, Homo sapiens
catggggactcctgggt

SEQ ID NO: 36746 - DNA, 18 bp, Homo sapiens
gaccattggaaaggtaac

SEQ ID NO: 36747 - DNA, 17 bp, Homo sapiens
gacctccaggaccgcca

SEQ ID NO: 36748 - DNA, 16 bp, Homo sapiens
ctccaggtggaccctt

SEQ ID NO: 36749 - DNA, 22 bp, Homo sapiens
ttctaaagactaggcttccaat

SEQ ID NO: 36750 - DNA, 16 bp, Homo sapiens
cctttgggcccatcaa

SEQ ID NO: 36751 - DNA, 24 bp, Homo sapiens
aatacttgctaattgaaaaaaaca

SEQ ID NO: 36752 - DNA, 21 bp, Homo sapiens
ggggaaaaatcagtgataata

SEQ ID NO: 36753 - DNA, 19 bp, Homo sapiens
gacatcgtttttcgcaagg

SEQ ID NO: 36754 - DNA, 24 bp, Homo sapiens
ttttagctaatggaaaataagtca

SEQ ID NO: 36755 - DNA, 18 bp, Homo sapiens
tctccaggaatcccagga

SEQ ID NO: 36756 - DNA, 28 bp, Homo sapiens
tataataaatgaatttttaaattaatat

SEQ ID NO: 36757 - DNA, 16 bp, Homo sapiens
ctgggagaccgggagg

SEQ ID NO: 36758 - DNA, 26 bp, Homo sapiens
ttaaatgtaataaatgatagtgtggt

SEQ ID NO: 36759 - DNA, 22 bp, Homo sapiens
ttgcaaaaacacttgcatgcaa

SEQ ID NO: 36760 - DNA, 18 bp, Homo sapiens
agctttttaagtaatgct

SEQ ID NO: 36761 - DNA, 17 bp, Homo sapiens
caccaatccaatgcctt

SEQ ID NO: 36762 - DNA, 20 bp, Homo sapiens
cacagtgcccttatatccca

SEQ ID NO: 36763 - DNA, 29 bp, Homo sapiens
actttatgttaatagaatatatgtttttg

SEQ ID NO: 36764 - DNA, 19 bp, Homo sapiens
aaaaggaatcccaggtaca

SEQ ID NO: 36765 - DNA, 24 bp, Homo sapiens
tacatgatctcttgttctgttatt

SEQ ID NO: 36766 - DNA, 16 bp, Homo sapiens
tggggaccctgggctt

SEQ ID NO: 36767 - DNA, 20 bp, Homo sapiens
gttgtctttctttccccaca

SEQ ID NO: 36768 - DNA, 23 bp, Homo sapiens
tgtcaaattgaagctaaagattt

SEQ ID NO: 36769 - DNA, 18 bp, Homo sapiens
acttagagttggcgttca

SEQ ID NO: 36770 - DNA, 16 bp, Homo sapiens
tgcaaggcaccaaact

SEQ ID NO: 36771 - DNA, 17 bp, Homo sapiens
gcgcagctggcttgaaa

SEQ ID NO: 36772 - DNA, 21 bp, Homo sapiens
tcacttaatcagtcacagatt

SEQ ID NO: 36773 - DNA, 24 bp, Homo sapiens
tttggaagttaacaacaaagcaaa

SEQ ID NO: 36774 - DNA, 21 bp, Homo sapiens
cctttttctcctttaagtcct

SEQ ID NO: 36775 - DNA, 22 bp, Homo sapiens
agtgtgttgaaaaaattcatgt

SEQ ID NO: 36776 - DNA, 16 bp, Homo sapiens
ctctgagccccgggtc

SEQ ID NO: 36777 - DNA, 22 bp, Homo sapiens
tgacagaagaagaattctaaca

SEQ ID NO: 36778 - DNA, 17 bp, Homo sapiens
ggtaatcctttcactcc

SEQ ID NO: 36779 - DNA, 20 bp, Homo sapiens
caggtgcccagggtgaccca

SEQ ID NO: 36780 - DNA, 21 bp, Homo sapiens
acttcagagtacttcatttat

SEQ ID NO: 36781 - DNA, 17 bp, Homo sapiens
gcaagtgggtgtcccag

SEQ ID NO: 36782 - DNA, 22 bp, Homo sapiens
gatgaactgtgctgagcggcca

SEQ ID NO: 36783 - DNA, 19 bp, Homo sapiens
gatggaattcctggaactc

SEQ ID NO: 36784 - DNA, 18 bp, Homo sapiens
aactatttgcttgggtta

SEQ ID NO: 36785 - DNA, 24 bp, Homo sapiens
caaaacggaagaaacctgcagtgc

SEQ ID NO: 36786 - DNA, 17 bp, Homo sapiens
aggatcccctggaggac

SEQ ID NO: 36787 - DNA, 24 bp, Homo sapiens
tgcttttaattcaagatctcaatg

SEQ ID NO: 36788 - DNA, 17 bp, Homo sapiens
cttggggtccgtagcca

SEQ ID NO: 36789 - DNA, 21 bp, Homo sapiens
tgttgtaagaatatactggaa

SEQ ID NO: 36790 - DNA, 19 bp, Homo sapiens
tctccgggtggtccggggg

SEQ ID NO: 36791 - DNA, 18 bp, Homo sapiens
tggtgagaaaggggacca

SEQ ID NO: 36792 - DNA, 19 bp, Homo sapiens
ctctagaaaccatcaaccc

SEQ ID NO: 36793 - DNA, 18 bp, Homo sapiens
tgcaggaccagctggacc

SEQ ID NO: 36794 - DNA, 19 bp, Homo sapiens
ttctattcgttagaagcaa

SEQ ID NO: 36795 - DNA, 17 bp, Homo sapiens
caaggagttcctggagc

SEQ ID NO: 36796 - DNA, 19 bp, Homo sapiens
tcgtccttaagctagtttt

SEQ ID NO: 36797 - DNA, 16 bp, Homo sapiens
gggccctggaggtcct

SEQ ID NO: 36798 - DNA, 24 bp, Homo sapiens
ggggatatgtttataaacccttta

SEQ ID NO: 36799 - DNA, 17 bp, Homo sapiens
gccatgtaccagatttg

SEQ ID NO: 36800 - DNA, 17 bp, Homo sapiens
cccaatcttatgaccac

SEQ ID NO: 36801 - DNA, 17 bp, Homo sapiens
tccttataatggggaca

SEQ ID NO: 36802 - DNA, 23 bp, Homo sapiens
acaccagttccaggcccaccagg

SEQ ID NO: 36803 - DNA, 24 bp, Homo sapiens
cagcctgcttgcttatcaggtaag

SEQ ID NO: 36804 - DNA, 17 bp, Homo sapiens
accaggatctccacatt

SEQ ID NO: 36805 - DNA, 20 bp, Homo sapiens
aaaaaaaaacaatgtgcaaa

SEQ ID NO: 36806 - DNA, 18 bp, Homo sapiens
ttaggtccaggaggccca

SEQ ID NO: 36807 - DNA, 17 bp, Homo sapiens
agatgaaggaaagttgc

SEQ ID NO: 36808 - DNA, 22 bp, Homo sapiens
catcttctaaatatccacaaca

SEQ ID NO: 36809 - DNA, 16 bp, Homo sapiens
tggatccctggggaaa

SEQ ID NO: 36810 - DNA, 28 bp, Homo sapiens
tactcattttatatcttatatcctattt

SEQ ID NO: 36811 - DNA, 18 bp, Homo sapiens
tccaggaattggatttcc

SEQ ID NO: 36812 - DNA, 16 bp, Homo sapiens
cctggccagaaaacat

SEQ ID NO: 36813 - DNA, 22 bp, Homo sapiens
ccaatgtaatttgatttggaac

SEQ ID NO: 36814 - DNA, 17 bp, Homo sapiens
ccaggacaacccagtga

SEQ ID NO: 36815 - DNA, 21 bp, Homo sapiens
aattttcataaaagcatctct

SEQ ID NO: 36816 - DNA, 17 bp, Homo sapiens
tttgcataccttggctc

SEQ ID NO: 36817 - DNA, 21 bp, Homo sapiens
ttcaataagactaatcctaca

SEQ ID NO: 36818 - DNA, 16 bp, Homo sapiens
agtgcatacaaactgg

SEQ ID NO: 36819 - DNA, 20 bp, Homo sapiens
aaggttttccaggtacaaaa

SEQ ID NO: 36820 - DNA, 29 bp, Homo sapiens
atttaaaaaatttaatatcttcatcatct

SEQ ID NO: 36821 - DNA, 19 bp, Homo sapiens
tggaaagccaggcctccca

SEQ ID NO: 36822 - DNA, 23 bp, Homo sapiens
aacataatcttacagaaaagtca

SEQ ID NO: 36823 - DNA, 17 bp, Homo sapiens
tgcctctttctcctgga

SEQ ID NO: 36824 - DNA, 21 bp, Homo sapiens
tggctgtgcaacagggactta

SEQ ID NO: 36825 - DNA, 21 bp, Homo sapiens
tggagttccagggagacctgg

SEQ ID NO: 36826 - DNA, 23 bp, Homo sapiens
tggaagcactatatagtaataac

SEQ ID NO: 36827 - DNA, 21 bp, Homo sapiens
agtggagaaaagtaatgacac

SEQ ID NO: 36828 - DNA, 20 bp, Homo sapiens
tggaggaccaggaacaccag

SEQ ID NO: 36829 - DNA, 20 bp, Homo sapiens
gagaattcttcatgcctaga

SEQ ID NO: 36830 - DNA, 22 bp, Homo sapiens
aattggactccctggacttcca

SEQ ID NO: 36831 - DNA, 18 bp, Homo sapiens
aaagaaggaaggaagaag

SEQ ID NO: 36832 - DNA, 16 bp, Homo sapiens
ggtggtccaggctgcc

SEQ ID NO: 36833 - DNA, 23 bp, Homo sapiens
gaaaaggcatattaatggcagta

SEQ ID NO: 36834 - DNA, 18 bp, Homo sapiens
ctggaagtccttgggctc

SEQ ID NO: 36835 - DNA, 18 bp, Homo sapiens
tggtacagcaataccaag

SEQ ID NO: 36836 - DNA, 16 bp, Homo sapiens
ctggtggccagttttg

SEQ ID NO: 36837 - DNA, 23 bp, Homo sapiens
tcttttgcaggagatccagggca

SEQ ID NO: 36838 - DNA, 19 bp, Homo sapiens
ggctggacagttcccatgt

SEQ ID NO: 36839 - DNA, 16 bp, Homo sapiens
ggtcccaggggagccc

SEQ ID NO: 36840 - DNA, 19 bp, Homo sapiens
ccataacagcaaggtttac

SEQ ID NO: 36841 - DNA, 22 bp, Homo sapiens
agggaggcggagggtacagtga

SEQ ID NO: 36842 - DNA, 18 bp, Homo sapiens
ctatccaagcctggaatt

SEQ ID NO: 36843 - DNA, 22 bp, Homo sapiens
gagggagattccatcttaaaaa

SEQ ID NO: 36844 - DNA, 19 bp, Homo sapiens
catttcaccttgatgacct

SEQ ID NO: 36845 - DNA, 21 bp, Homo sapiens
ggggaaagcatttgtgggtta

SEQ ID NO: 36846 - DNA, 16 bp, Homo sapiens
cctggtggccctaaaa

SEQ ID NO: 36847 - DNA, 16 bp, Homo sapiens
ggggccaaagggagac

SEQ ID NO: 36848 - DNA, 16 bp, Homo sapiens
cagagccaccttaaga

SEQ ID NO: 36849 - DNA, 18 bp, Homo sapiens
actggatcaccaggaatt

SEQ ID NO: 36850 - DNA, 23 bp, Homo sapiens
aaataatttagaaggaaaacctt

SEQ ID NO: 36851 - DNA, 24 bp, Homo sapiens
agaggatatccaggaaatccggga

SEQ ID NO: 36852 - DNA, 23 bp, Homo sapiens
gacccatctcctagactaataca

SEQ ID NO: 36853 - DNA, 16 bp, Homo sapiens
ggccctggagggccaa

SEQ ID NO: 36854 - DNA, 22 bp, Homo sapiens
tctctgcttctaagtataattt

SEQ ID NO: 36855 - DNA, 18 bp, Homo sapiens
gcttcctgctatttagaa

SEQ ID NO: 36856 - DNA, 18 bp, Homo sapiens
caacacgtgctgctttgt

SEQ ID NO: 36857 - DNA, 17 bp, Homo sapiens
ttccctccaatgaaaca

SEQ ID NO: 36858 - DNA, 17 bp, Homo sapiens
ctttcctggagccattg

SEQ ID NO: 36859 - DNA, 24 bp, Homo sapiens
cattcaaatggagaaaaggaacat

SEQ ID NO: 36860 - DNA, 17 bp, Homo sapiens
ttcctctctggcccttt

SEQ ID NO: 36861 - DNA, 18 bp, Homo sapiens
cagcactgttagcctttt

SEQ ID NO: 36862 - DNA, 16 bp, Homo sapiens
atctctgaaggcccgg

SEQ ID NO: 36863 - DNA, 20 bp, Homo sapiens
aatccctatgaactacctga

SEQ ID NO: 36864 - DNA, 19 bp, Homo sapiens
cctgattccaaacaagcaa

SEQ ID NO: 36865 - DNA, 22 bp, Homo sapiens
agggagccctggaattccagga

SEQ ID NO: 36866 - DNA, 23 bp, Homo sapiens
tttgtcaaccaaacggatttgcc

SEQ ID NO: 36867 - DNA, 24 bp, Homo sapiens
ggaacaaggagataaaggaaatcc

SEQ ID NO: 36868 - DNA, 16 bp, Homo sapiens
ccaaccggctgtgtga

SEQ ID NO: 36869 - DNA, 19 bp, Homo sapiens
gaaccaggtctcaaaggta

SEQ ID NO: 36870 - DNA, 21 bp, Homo sapiens
tgtcgcccacgctggagtgca

SEQ ID NO: 36871 - DNA, 23 bp, Homo sapiens
ttaaacctggcatccctggaacg

SEQ ID NO: 36872 - DNA, 22 bp, Homo sapiens
ctcccaggttcaagtgattttc

SEQ ID NO: 36873 - DNA, 16 bp, Homo sapiens
cacctggctaattttc

SEQ ID NO: 36874 - DNA, 21 bp, Homo sapiens
agcctagaaacaacttttatt

SEQ ID NO: 36875 - DNA, 16 bp, Homo sapiens
aggtgagaaaggaaac

SEQ ID NO: 36876 - DNA, 18 bp, Homo sapiens
caaatttctgctggaaca

SEQ ID NO: 36877 - DNA, 18 bp, Homo sapiens
actacccggaccagcagg

SEQ ID NO: 36878 - DNA, 23 bp, Homo sapiens
tagttccctcttatttgaaggaa

SEQ ID NO: 36879 - DNA, 18 bp, Homo sapiens
tataccacgcagtcctgg

SEQ ID NO: 36880 - DNA, 24 bp, Homo sapiens
tggctgttctgcattcattcatgc

SEQ ID NO: 36881 - DNA, 16 bp, Homo sapiens
ggctcataacaggacc

SEQ ID NO: 36882 - DNA, 21 bp, Homo sapiens
ggaactgtgcagggcaataac

SEQ ID NO: 36883 - DNA, 23 bp, Homo sapiens
tctaccaagtggaaaaccaaaac

SEQ ID NO: 36884 - DNA, 17 bp, Homo sapiens
aatcctggagaaccagg

SEQ ID NO: 36885 - DNA, 25 bp, Homo sapiens
attgatattatataataatcatcta

SEQ ID NO: 36886 - DNA, 16 bp, Homo sapiens
cctggtcttcctgctc

SEQ ID NO: 36887 - DNA, 22 bp, Homo sapiens
gaaaaagccattcttgggagaa

SEQ ID NO: 36888 - DNA, 17 bp, Homo sapiens
gccttgtaccttctgaa

SEQ ID NO: 36889 - DNA, 23 bp, Homo sapiens
ttatctattttactctatgtttt

SEQ ID NO: 36890 - DNA, 22 bp, Homo sapiens
tccaccactaaaatgtaaatat

SEQ ID NO: 36891 - DNA, 18 bp, Homo sapiens
tttgggattcccaggtcg

SEQ ID NO: 36892 - DNA, 21 bp, Homo sapiens
tttcaattttctctgcccaca

SEQ ID NO: 36893 - DNA, 16 bp, Homo sapiens
taagggagagccaggt

SEQ ID NO: 36894 - DNA, 18 bp, Homo sapiens
tgttgtggagataggatt

SEQ ID NO: 36895 - DNA, 18 bp, Homo sapiens
ccgtcttattcccagcac

SEQ ID NO: 36896 - DNA, 16 bp, Homo sapiens
gccaggttgccccatt

SEQ ID NO: 36897 - DNA, 24 bp, Homo sapiens
aattgatgaatgaatgaaaaaatt

SEQ ID NO: 36898 - DNA, 16 bp, Homo sapiens
gaggccaggacttcca

SEQ ID NO: 36899 - DNA, 24 bp, Homo sapiens
atgagaattttaaaggtatttgac

SEQ ID NO: 36900 - DNA, 20 bp, Homo sapiens
gggctatactctgagtaatg

SEQ ID NO: 36901 - DNA, 17 bp, Homo sapiens
atgggaaagaaaggaga

SEQ ID NO: 36902 - DNA, 18 bp, Homo sapiens
aagcaactgcagcataaa

SEQ ID NO: 36903 - DNA, 18 bp, Homo sapiens
acctgagggagcccctgg

SEQ ID NO: 36904 - DNA, 18 bp, Homo sapiens
attgggctctcttaatga

SEQ ID NO: 36905 - DNA, 23 bp, Homo sapiens
tctccaggaaaattgcagcctgg

SEQ ID NO: 36906 - DNA, 18 bp, Homo sapiens
gaggcctttgattccttt

SEQ ID NO: 36907 - DNA, 16 bp, Homo sapiens
cagcgtgagcatggtt

SEQ ID NO: 36908 - DNA, 18 bp, Homo sapiens
aaaggaaaaagagaaagt

SEQ ID NO: 36909 - DNA, 19 bp, Homo sapiens
ttttggtgatcttttttct

SEQ ID NO: 36910 - DNA, 20 bp, Homo sapiens
accttctatagagtagtagg

SEQ ID NO: 36911 - DNA, 21 bp, Homo sapiens
catggtgatttgggttttaaa

SEQ ID NO: 36912 - DNA, 22 bp, Homo sapiens
gatagaaatatctaaccccatt

SEQ ID NO: 36913 - DNA, 19 bp, Homo sapiens
cctgggaacatagcttcac

SEQ ID NO: 36914 - DNA, 16 bp, Homo sapiens
gtccttggtcacctct

SEQ ID NO: 36915 - DNA, 17 bp, Homo sapiens
acacatctccctggtat

SEQ ID NO: 36916 - DNA, 17 bp, Homo sapiens
aatgagcaagttgtacc

SEQ ID NO: 36917 - DNA, 16 bp, Homo sapiens
gtttggggtttttggg

SEQ ID NO: 36918 - DNA, 18 bp, Homo sapiens
agcagcaaaggattacac

SEQ ID NO: 36919 - DNA, 16 bp, Homo sapiens
ctcctggaccaatggg

SEQ ID NO: 36920 - DNA, 16 bp, Homo sapiens
agtacacaccgaaaac

SEQ ID NO: 36921 - DNA, 16 bp, Homo sapiens
agggagaaacgggtac

SEQ ID NO: 36922 - DNA, 24 bp, Homo sapiens
tttggatagaatcattagtaacag

SEQ ID NO: 36923 - DNA, 16 bp, Homo sapiens
cttgagcaccagggtt

SEQ ID NO: 36924 - DNA, 21 bp, Homo sapiens
gaactgattatctttaacatg

SEQ ID NO: 36925 - DNA, 16 bp, Homo sapiens
ttcaactgctttctct

SEQ ID NO: 36926 - DNA, 24 bp, Homo sapiens
atgtaatgaaattgaccaattatt

SEQ ID NO: 36927 - DNA, 23 bp, Homo sapiens
tcctgtattactattggaacatc

SEQ ID NO: 36928 - DNA, 18 bp, Homo sapiens
cctccaggcccaagaggg

SEQ ID NO: 36929 - DNA, 16 bp, Homo sapiens
aaaacctggggctccc

SEQ ID NO: 36930 - DNA, 24 bp, Homo sapiens
tagaaacatatattctgaatctga

SEQ ID NO: 36931 - DNA, 16 bp, Homo sapiens
gcctgtgggtcctcga

SEQ ID NO: 36932 - DNA, 24 bp, Homo sapiens
atagtcaagaactctaacccaagc

SEQ ID NO: 36933 - DNA, 16 bp, Homo sapiens
tcctgtctggccaggg

SEQ ID NO: 36934 - DNA, 16 bp, Homo sapiens
agccaaaggagacagg

SEQ ID NO: 36935 - DNA, 22 bp, Homo sapiens
tattttatgctgtttaaaagta

SEQ ID NO: 36936 - DNA, 17 bp, Homo sapiens
atgggagatgctggacc

SEQ ID NO: 36937 - DNA, 17 bp, Homo sapiens
acaaggtaacatgagga

SEQ ID NO: 36938 - DNA, 19 bp, Homo sapiens
ccggtgcaattatccctgg

SEQ ID NO: 36939 - DNA, 17 bp, Homo sapiens
ctgggtatgggaaccac

SEQ ID NO: 36940 - DNA, 24 bp, Homo sapiens
tcatcttctcctgtctttaccaca

SEQ ID NO: 36941 - DNA, 21 bp, Homo sapiens
tctccttttatgcctattaca

SEQ ID NO: 36942 - DNA, 23 bp, Homo sapiens
gcaatgctaagtgaagggtttat

SEQ ID NO: 36943 - DNA, 17 bp, Homo sapiens
tggtcccatgtctcctg

SEQ ID NO: 36944 - DNA, 16 bp, Homo sapiens
ggctggcaatactgac

SEQ ID NO: 36945 - DNA, 30 bp, Homo sapiens
aataattataagttgatattgaattaataa

SEQ ID NO: 36946 - DNA, 18 bp, Homo sapiens
ctccagggagtcatgtaa

SEQ ID NO: 36947 - DNA, 24 bp, Homo sapiens
catgagaatggactaatacagtta

SEQ ID NO: 36948 - DNA, 18 bp, Homo sapiens
cccaaaaggtccacctgg

SEQ ID NO: 36949 - DNA, 23 bp, Homo sapiens
gtcaattaaacctcttttataaa

SEQ ID NO: 36950 - DNA, 21 bp, Homo sapiens
aagtggccagaggagttatag

SEQ ID NO: 36951 - DNA, 17 bp, Homo sapiens
caggatcacctctgggt

SEQ ID NO: 36952 - DNA, 20 bp, Homo sapiens
ttattctcacccaacataat

SEQ ID NO: 36953 - DNA, 24 bp, Homo sapiens
ttatggtatttgcatataaagagc

SEQ ID NO: 36954 - DNA, 23 bp, Homo sapiens
ttttaaaaatttgttttggttct

SEQ ID NO: 36955 - DNA, 16 bp, Homo sapiens
accccagctgtctgta

SEQ ID NO: 36956 - DNA, 19 bp, Homo sapiens
gtactccaggtcttccagg

SEQ ID NO: 36957 - DNA, 19 bp, Homo sapiens
ttgaaatagtgtagtggag

SEQ ID NO: 36958 - DNA, 16 bp, Homo sapiens
atgccaaaacctatgt

SEQ ID NO: 36959 - DNA, 19 bp, Homo sapiens
aggtccaatggatcctaga

SEQ ID NO: 36960 - DNA, 23 bp, Homo sapiens
aacccataggacagagcctccag

SEQ ID NO: 36961 - DNA, 17 bp, Homo sapiens
acagcaatagtaaggac

SEQ ID NO: 36962 - DNA, 21 bp, Homo sapiens
ctgaagaactaggaaacccat

SEQ ID NO: 36963 - DNA, 19 bp, Homo sapiens
acacctgttgacataaaca

SEQ ID NO: 36964 - DNA, 18 bp, Homo sapiens
agggtaatcctggatttc

SEQ ID NO: 36965 - DNA, 23 bp, Homo sapiens
aggtggccctgggcttcctggaa

SEQ ID NO: 36966 - DNA, 22 bp, Homo sapiens
caaaaggaccacctggtaaata

SEQ ID NO: 36967 - DNA, 17 bp, Homo sapiens
ttccaggtggccctggt

SEQ ID NO: 36968 - DNA, 16 bp, Homo sapiens
gccatcatcttcttct

SEQ ID NO: 36969 - DNA, 17 bp, Homo sapiens
ttttggttcaaccactt

SEQ ID NO: 36970 - DNA, 18 bp, Homo sapiens
agattatctcccttccag

SEQ ID NO: 36971 - DNA, 23 bp, Homo sapiens
gaaaaccactatcatgttcaaca

SEQ ID NO: 36972 - DNA, 20 bp, Homo sapiens
agggatgcagggagaacctg

SEQ ID NO: 36973 - DNA, 19 bp, Homo sapiens
gtcttttatttgctggtca

SEQ ID NO: 36974 - DNA, 16 bp, Homo sapiens
atccttgcctggctta

SEQ ID NO: 36975 - DNA, 16 bp, Homo sapiens
tcccaggatgcaggac

SEQ ID NO: 36976 - DNA, 17 bp, Homo sapiens
gctctcctttagaacct

SEQ ID NO: 36977 - DNA, 22 bp, Homo sapiens
gttggccaccttacttttcatc

SEQ ID NO: 36978 - DNA, 19 bp, Homo sapiens
caagacttctctgtatgtc

SEQ ID NO: 36979 - DNA, 19 bp, Homo sapiens
aggaccctgtgggccaaga

SEQ ID NO: 36980 - DNA, 20 bp, Homo sapiens
ggtctgatctgaacaacata

SEQ ID NO: 36981 - DNA, 18 bp, Homo sapiens
ctggagaaaaaggcaaca

SEQ ID NO: 36982 - DNA, 22 bp, Homo sapiens
atttaataatactgtttggcca

SEQ ID NO: 36983 - DNA, 17 bp, Homo sapiens
cactgtctccacgtttt

SEQ ID NO: 36984 - DNA, 20 bp, Homo sapiens
tttatgggctcaacatatat

SEQ ID NO: 36985 - DNA, 17 bp, Homo sapiens
tgctgtggtttgactgt

SEQ ID NO: 36986 - DNA, 22 bp, Homo sapiens
tttttgtgtatgttgcaacatt

SEQ ID NO: 36987 - DNA, 21 bp, Homo sapiens
tttccttgtacaaaaagaaaa

SEQ ID NO: 36988 - DNA, 24 bp, Homo sapiens
gatggattgccaggtttgaaagga

SEQ ID NO: 36989 - DNA, 16 bp, Homo sapiens
ggcaactgggactggg

SEQ ID NO: 36990 - DNA, 17 bp, Homo sapiens
ttgtcttcacccgacac

SEQ ID NO: 36991 - DNA, 16 bp, Homo sapiens
acttcagagggaagca

SEQ ID NO: 36992 - DNA, 21 bp, Homo sapiens
gacagtgccactctacagtgg

SEQ ID NO: 36993 - DNA, 18 bp, Homo sapiens
acaggccagtgttttatt

SEQ ID NO: 36994 - DNA, 19 bp, Homo sapiens
gcattgtggtaaatcgctg

SEQ ID NO: 36995 - DNA, 19 bp, Homo sapiens
tgtgttgtctttgtccagc

SEQ ID NO: 36996 - DNA, 17 bp, Homo sapiens
aatcatttcgagatgca

SEQ ID NO: 36997 - DNA, 23 bp, Homo sapiens
ctctagtaacgatgctgaaaata

SEQ ID NO: 36998 - DNA, 16 bp, Homo sapiens
gccagtaatgggagcc

SEQ ID NO: 36999 - DNA, 17 bp, Homo sapiens
aactcttggcagctgcc

SEQ ID NO: 37000 - DNA, 18 bp, Homo sapiens
tcacttggtcccattgta

SEQ ID NO: 37001 - DNA, 19 bp, Homo sapiens
gatgtatgtaattttgcat

SEQ ID NO: 37002 - DNA, 16 bp, Homo sapiens
gccactttctgcactg

SEQ ID NO: 37003 - DNA, 18 bp, Homo sapiens
ctgatgccaatgaacatg

SEQ ID NO: 37004 - DNA, 24 bp, Homo sapiens
ctatggcgatcgcaggaccttcac

SEQ ID NO: 37005 - DNA, 21 bp, Homo sapiens
caggtaaaaatccaatcccct

SEQ ID NO: 37006 - DNA, 16 bp, Homo sapiens
gaaatccagccgtgag

SEQ ID NO: 37007 - DNA, 18 bp, Homo sapiens
atgaaaggcagcacatga

SEQ ID NO: 37008 - DNA, 16 bp, Homo sapiens
ttaccctaaacctcct

SEQ ID NO: 37009 - DNA, 20 bp, Homo sapiens
atgttacagatgcactgttt

SEQ ID NO: 37010 - DNA, 24 bp, Homo sapiens
cagcaggcagcatcgaccctggga

SEQ ID NO: 37011 - DNA, 18 bp, Homo sapiens
ctgacattcctccatgtc

SEQ ID NO: 37012 - DNA, 22 bp, Homo sapiens
aaaagtctgtttgtagattttc

SEQ ID NO: 37013 - DNA, 24 bp, Homo sapiens
ctggccacataggtggttatttct

SEQ ID NO: 37014 - DNA, 16 bp, Homo sapiens
ggcaggagccagggga

SEQ ID NO: 37015 - DNA, 19 bp, Homo sapiens
ctcacagttgcccattcat

SEQ ID NO: 37016 - DNA, 20 bp, Homo sapiens
tttgaatagtagttgcacgt

SEQ ID NO: 37017 - DNA, 19 bp, Homo sapiens
acagagtgtttattcagat

SEQ ID NO: 37018 - DNA, 19 bp, Homo sapiens
gtgaatagttacctgaaca

SEQ ID NO: 37019 - DNA, 17 bp, Homo sapiens
caagcactggcctcccc

SEQ ID NO: 37020 - DNA, 17 bp, Homo sapiens
gaacacaggcaaccttt

SEQ ID NO: 37021 - DNA, 17 bp, Homo sapiens
tgtcatggaagaggaac

SEQ ID NO: 37022 - DNA, 22 bp, Homo sapiens
aaacccatattttgtctttatt

SEQ ID NO: 37023 - DNA, 20 bp, Homo sapiens
gcttcattaaacccagaaag

SEQ ID NO: 37024 - DNA, 18 bp, Homo sapiens
tatcctcccacctcagcc

SEQ ID NO: 37025 - DNA, 23 bp, Homo sapiens
cccgaccctgtaataaatttcaa

SEQ ID NO: 37026 - DNA, 16 bp, Homo sapiens
agcagttctgctgtct

SEQ ID NO: 37027 - DNA, 23 bp, Homo sapiens
attcccttttatgcataaataaa

SEQ ID NO: 37028 - DNA, 25 bp, Homo sapiens
gttaaagaaaaatacctaaataaca

SEQ ID NO: 37029 - DNA, 19 bp, Homo sapiens
tccatcaactgtgaaagct

SEQ ID NO: 37030 - DNA, 20 bp, Homo sapiens
tgttttgtggggaaacaaat

SEQ ID NO: 37031 - DNA, 18 bp, Homo sapiens
agaaaagacactgaagct

SEQ ID NO: 37032 - DNA, 21 bp, Homo sapiens
cagcacaagcacagataagcc

SEQ ID NO: 37033 - DNA, 18 bp, Homo sapiens
gaggggcttgagcagggc

SEQ ID NO: 37034 - DNA, 24 bp, Homo sapiens
caccaatcctcacctctcacctct

SEQ ID NO: 37035 - DNA, 17 bp, Homo sapiens
cgaggaggcaggttgga

SEQ ID NO: 37036 - DNA, 18 bp, Homo sapiens
cagtgcagccccaggttc

SEQ ID NO: 37037 - DNA, 22 bp, Homo sapiens
ccccactcctacctggtacata

SEQ ID NO: 37038 - DNA, 24 bp, Homo sapiens
ctcacaagctgctggtgacccccc

SEQ ID NO: 37039 - DNA, 24 bp, Homo sapiens
tccctcgtccacgatctgtgggtg

SEQ ID NO: 37040 - DNA, 22 bp, Homo sapiens
ctgctggggcctggtccttcca

SEQ ID NO: 37041 - DNA, 22 bp, Homo sapiens
tggtatagggtgagacccaggc

SEQ ID NO: 37042 - DNA, 17 bp, Homo sapiens
gatcgggtccatgagca

SEQ ID NO: 37043 - DNA, 22 bp, Homo sapiens
cctggtctggaacacgtactgg

SEQ ID NO: 37044 - DNA, 24 bp, Homo sapiens
tgggtctcacccatgttcccaccc

SEQ ID NO: 37045 - DNA, 23 bp, Homo sapiens
gcacattgaccagggcggcctcc

SEQ ID NO: 37046 - DNA, 24 bp, Homo sapiens
ctcctcacttggggaggcggggag

SEQ ID NO: 37047 - DNA, 19 bp, Homo sapiens
ctgcccccaaatgccattg

SEQ ID NO: 37048 - DNA, 22 bp, Homo sapiens
agatcaaggaaggcatccagta

SEQ ID NO: 37049 - DNA, 21 bp, Homo sapiens
atccagggccatccccacctg

SEQ ID NO: 37050 - DNA, 24 bp, Homo sapiens
atctctggctcgggacactgtgcc

SEQ ID NO: 37051 - DNA, 22 bp, Homo sapiens
cacccaggaacgggggctgcca

SEQ ID NO: 37052 - DNA, 24 bp, Homo sapiens
ggggactccttcctggttggggcc

SEQ ID NO: 37053 - DNA, 16 bp, Homo sapiens
cagtgggctggcagga

SEQ ID NO: 37054 - DNA, 16 bp, Homo sapiens
ttgggcagagtccacc

SEQ ID NO: 37055 - DNA, 24 bp, Homo sapiens
cacctcctgcagtgtgtagtggcc

SEQ ID NO: 37056 - DNA, 23 bp, Homo sapiens
ggtgggtggggtccagccctcac

SEQ ID NO: 37057 - DNA, 24 bp, Homo sapiens
cagcatgcccactcccacctcctc

SEQ ID NO: 37058 - DNA, 23 bp, Homo sapiens
tctacagtgtgtgcgggacactc

SEQ ID NO: 37059 - DNA, 20 bp, Homo sapiens
ccggccatgatcccaccctg

SEQ ID NO: 37060 - DNA, 24 bp, Homo sapiens
agtgcacccgatgaccaaggaccc

SEQ ID NO: 37061 - DNA, 23 bp, Homo sapiens
ggtaatggaaccctcccctgtgg

SEQ ID NO: 37062 - DNA, 21 bp, Homo sapiens
ccgtgggttaagaacagcagc

SEQ ID NO: 37063 - DNA, 23 bp, Homo sapiens
gtagaggcaggcccagcccctgc

SEQ ID NO: 37064 - DNA, 24 bp, Homo sapiens
ccaggctcacctgtggcagagttc

SEQ ID NO: 37065 - DNA, 23 bp, Homo sapiens
gtgttctggcccctgcccctctg

SEQ ID NO: 37066 - DNA, 24 bp, Homo sapiens
cagtgcccacccctccccatagcc

SEQ ID NO: 37067 - DNA, 24 bp, Homo sapiens
agggcctggcccagcacaagccag

SEQ ID NO: 37068 - DNA, 16 bp, Homo sapiens
gtgacagaggctgggg

SEQ ID NO: 37069 - DNA, 24 bp, Homo sapiens
gtgctgcagccccttgatggcttc

SEQ ID NO: 37070 - DNA, 16 bp, Homo sapiens
gccaccgaatccacca

SEQ ID NO: 37071 - DNA, 23 bp, Homo sapiens
gaggtgggaggtgccctgccttc

SEQ ID NO: 37072 - DNA, 21 bp, Homo sapiens
gctgggtagggctctcagagc

SEQ ID NO: 37073 - DNA, 16 bp, Homo sapiens
ctccagtggccccctg

SEQ ID NO: 37074 - DNA, 23 bp, Homo sapiens
cggctgctggacgcacgcttcca

SEQ ID NO: 37075 - DNA, 23 bp, Homo sapiens
aggtacaagtgcctgctcctggt

SEQ ID NO: 37076 - DNA, 24 bp, Homo sapiens
ccgcagtaaggagtgagtgtttcc

SEQ ID NO: 37077 - DNA, 24 bp, Homo sapiens
gaacccaggactcccttccacatc

SEQ ID NO: 37078 - DNA, 19 bp, Homo sapiens
ggagatgagcgaggtccct

SEQ ID NO: 37079 - DNA, 24 bp, Homo sapiens
ggtcgtagcctaccagcccattag

SEQ ID NO: 37080 - DNA, 18 bp, Homo sapiens
cagccctgcacagaggtg

SEQ ID NO: 37081 - DNA, 24 bp, Homo sapiens
gtgggactcacccgtcccgagcaa

SEQ ID NO: 37082 - DNA, 22 bp, Homo sapiens
catggggagcccttcctgcctg

SEQ ID NO: 37083 - DNA, 24 bp, Homo sapiens
ggctcccagaaggccctgaacgcc

SEQ ID NO: 37084 - DNA, 22 bp, Homo sapiens
gaacgcagtgcctttggcctcc

SEQ ID NO: 37085 - DNA, 19 bp, Homo sapiens
ccacgacccacccggtccc

SEQ ID NO: 37086 - DNA, 20 bp, Homo sapiens
caggtagaaggagaagggct

SEQ ID NO: 37087 - DNA, 24 bp, Homo sapiens
ctcctgggggccccaccccgtctc

SEQ ID NO: 37088 - DNA, 21 bp, Homo sapiens
ccaggcctcacatcctgggct

SEQ ID NO: 37089 - DNA, 24 bp, Homo sapiens
ccctggccttcagcccaaactgag

SEQ ID NO: 37090 - DNA, 16 bp, Homo sapiens
aggccagcgccccacc

SEQ ID NO: 37091 - DNA, 24 bp, Homo sapiens
agaagatgtactcccgcaagacga

SEQ ID NO: 37092 - DNA, 19 bp, Homo sapiens
ctctagttggggttcttga

SEQ ID NO: 37093 - DNA, 24 bp, Homo sapiens
ccaacttctggggctgtgacgacc

SEQ ID NO: 37094 - DNA, 22 bp, Homo sapiens
acgaagctgccttcccggtcca

SEQ ID NO: 37095 - DNA, 23 bp, Homo sapiens
caggctctctctcaggctgtaca

SEQ ID NO: 37096 - DNA, 16 bp, Homo sapiens
gtcagagagcctgtgc

SEQ ID NO: 37097 - DNA, 23 bp, Homo sapiens
tccagccagtggccctgtctcct

SEQ ID NO: 37098 - DNA, 16 bp, Homo sapiens
accctgcccatggtgc

SEQ ID NO: 37099 - DNA, 23 bp, Homo sapiens
ccttttctctgtgcaccagggat

SEQ ID NO: 37100 - DNA, 23 bp, Homo sapiens
cacaatccccgtcatcagcctgt

SEQ ID NO: 37101 - DNA, 16 bp, Homo sapiens
ggccctgtcctctctc

SEQ ID NO: 37102 - DNA, 24 bp, Homo sapiens
cttctgccctggggtagtcccagg

SEQ ID NO: 37103 - DNA, 21 bp, Homo sapiens
ccatgcagatacgccgcggcc

SEQ ID NO: 37104 - DNA, 21 bp, Homo sapiens
ctcccctgcaccaaggcctgc

SEQ ID NO: 37105 - DNA, 23 bp, Homo sapiens
atgccaggggcctccttaccggg

SEQ ID NO: 37106 - DNA, 16 bp, Homo sapiens
caccccacccatgtca

SEQ ID NO: 37107 - DNA, 24 bp, Homo sapiens
tccctcttgagggggctgggcaag

SEQ ID NO: 37108 - DNA, 22 bp, Homo sapiens
aacagctggcgccagcaccgcg

SEQ ID NO: 37109 - DNA, 23 bp, Homo sapiens
ggcaccgaggccacaccaccggg

SEQ ID NO: 37110 - DNA, 23 bp, Homo sapiens
gcactggggctgcagctcttcgt

SEQ ID NO: 37111 - DNA, 20 bp, Homo sapiens
tagccagcgggtacagccac

SEQ ID NO: 37112 - DNA, 21 bp, Homo sapiens
ttctcccccggctcctctgga

SEQ ID NO: 37113 - DNA, 23 bp, Homo sapiens
ccacccatgatctcaatgtcgaa

SEQ ID NO: 37114 - DNA, 24 bp, Homo sapiens
ctgtcacaaaggcccgtacagggc

SEQ ID NO: 37115 - DNA, 24 bp, Homo sapiens
ttggtttctgcaaaaggccctcga

SEQ ID NO: 37116 - DNA, 23 bp, Homo sapiens
ctccggcttcccacagtcaccac

SEQ ID NO: 37117 - DNA, 21 bp, Homo sapiens
accccggcctcccctgcacct

SEQ ID NO: 37118 - DNA, 22 bp, Homo sapiens
atcgtcagctacgtcatagacc

SEQ ID NO: 37119 - DNA, 22 bp, Homo sapiens
ctttactggataccccttggag

SEQ ID NO: 37120 - DNA, 24 bp, Homo sapiens
ctgggtgctcaagggccccctctg

SEQ ID NO: 37121 - DNA, 22 bp, Homo sapiens
ccacattctcgcgggtggcatt

SEQ ID NO: 37122 - DNA, 20 bp, Homo sapiens
ctgggtgggtggtcctcact

SEQ ID NO: 37123 - DNA, 16 bp, Homo sapiens
cagcttcttcttgggg

SEQ ID NO: 37124 - DNA, 23 bp, Homo sapiens
agggtcaggcaggtcccaggcgg

SEQ ID NO: 37125 - DNA, 24 bp, Homo sapiens
gctcctgatccctcagggtgggca

SEQ ID NO: 37126 - DNA, 24 bp, Homo sapiens
gatcggcctgctgggctgcaatgc

SEQ ID NO: 37127 - DNA, 22 bp, Homo sapiens
ctgggtcagtggctttcctgtc

SEQ ID NO: 37128 - DNA, 22 bp, Homo sapiens
ctgagggcggccctgcagcact

SEQ ID NO: 37129 - DNA, 22 bp, Homo sapiens
cacgccacctctggtactgcac

SEQ ID NO: 37130 - DNA, 21 bp, Homo sapiens
cataggcagcaatctcctgct

SEQ ID NO: 37131 - DNA, 23 bp, Homo sapiens
aacgggaaggaagaggcggtcta

SEQ ID NO: 37132 - DNA, 16 bp, Homo sapiens
cgactcggagacaatg

SEQ ID NO: 37133 - DNA, 17 bp, Homo sapiens
ttctccaatcagaactg

SEQ ID NO: 37134 - DNA, 18 bp, Homo sapiens
cttccgccctgaatatgc

SEQ ID NO: 37135 - DNA, 23 bp, Homo sapiens
cagaatgccagagggaggcggga

SEQ ID NO: 37136 - DNA, 16 bp, Homo sapiens
ccttaccacaccccct

SEQ ID NO: 37137 - DNA, 24 bp, Homo sapiens
aagccgaactctgaggcctctcgc

SEQ ID NO: 37138 - DNA, 24 bp, Homo sapiens
ctcccggcagcctttgcgcagccc

SEQ ID NO: 37139 - DNA, 21 bp, Homo sapiens
gtaaagggagaatggcgcatg

SEQ ID NO: 37140 - DNA, 22 bp, Homo sapiens
gcacagcagcaacgcacaaaca

SEQ ID NO: 37141 - DNA, 23 bp, Homo sapiens
taatcataggattgctattctcc

SEQ ID NO: 37142 - DNA, 25 bp, Homo sapiens
ccttgctaaatgattcatcttaata

SEQ ID NO: 37143 - DNA, 26 bp, Homo sapiens
aaaagatgttttatttatcttttaaa

SEQ ID NO: 37144 - DNA, 20 bp, Homo sapiens
tttggtaatatgtcaatcac

SEQ ID NO: 37145 - DNA, 19 bp, Homo sapiens
tgccttaataataatccct

SEQ ID NO: 37146 - DNA, 21 bp, Homo sapiens
ggaaggttctttccatctaat

SEQ ID NO: 37147 - DNA, 24 bp, Homo sapiens
tggctaggaaggaaacacagctaa

SEQ ID NO: 37148 - DNA, 19 bp, Homo sapiens
aagctctgcttctgatttc

SEQ ID NO: 37149 - DNA, 21 bp, Homo sapiens
acacatactcttttattagga

SEQ ID NO: 37150 - DNA, 16 bp, Homo sapiens
gcagaggaaaagagca

SEQ ID NO: 37151 - DNA, 24 bp, Homo sapiens
gagtttaattgctgggattaataa

SEQ ID NO: 37152 - DNA, 20 bp, Homo sapiens
tcagcctcgtgatggtcagc

SEQ ID NO: 37153 - DNA, 21 bp, Homo sapiens
ttattcagctgttttcccctt

SEQ ID NO: 37154 - DNA, 16 bp, Homo sapiens
agggttcagactcagg

SEQ ID NO: 37155 - DNA, 17 bp, Homo sapiens
agaagtaagcttgctct

SEQ ID NO: 37156 - DNA, 22 bp, Homo sapiens
acttgctgttcatagatgtcaa

SEQ ID NO: 37157 - DNA, 24 bp, Homo sapiens
ggagcccacaccggggaggagagc

SEQ ID NO: 37158 - DNA, 18 bp, Homo sapiens
tgtatgagagaaactcag

SEQ ID NO: 37159 - DNA, 19 bp, Homo sapiens
gagcatccatccatcctga

SEQ ID NO: 37160 - DNA, 17 bp, Homo sapiens
gtaggaagcctgggatt

SEQ ID NO: 37161 - DNA, 18 bp, Homo sapiens
cttggagctcatgaacca

SEQ ID NO: 37162 - DNA, 18 bp, Homo sapiens
aaggctcctaattcaact

SEQ ID NO: 37163 - DNA, 20 bp, Homo sapiens
tctctgaggagagtaaagac

SEQ ID NO: 37164 - DNA, 20 bp, Homo sapiens
gatgttcttgtaaagttgaa

SEQ ID NO: 37165 - DNA, 21 bp, Homo sapiens
ttcctgatggttgccaaaaga

SEQ ID NO: 37166 - DNA, 17 bp, Homo sapiens
atgggttccacctgacc

SEQ ID NO: 37167 - DNA, 20 bp, Homo sapiens
atctgataacagactattct

SEQ ID NO: 37168 - DNA, 16 bp, Homo sapiens
cctcagcctactgagg

SEQ ID NO: 37169 - DNA, 22 bp, Homo sapiens
ttccagaagatggcattcatgg

SEQ ID NO: 37170 - DNA, 23 bp, Homo sapiens
ctatcaatcttagttaacatgtc

SEQ ID NO: 37171 - DNA, 21 bp, Homo sapiens
ttcatgccgtctccccaggtg

SEQ ID NO: 37172 - DNA, 16 bp, Homo sapiens
gtggcacatggatctt

SEQ ID NO: 37173 - DNA, 19 bp, Homo sapiens
cagaggtgattcctgcctt

SEQ ID NO: 37174 - DNA, 20 bp, Homo sapiens
tggaaagatccatagatgaa

SEQ ID NO: 37175 - DNA, 19 bp, Homo sapiens
gtcagggaccagaagctgt

SEQ ID NO: 37176 - DNA, 16 bp, Homo sapiens
aagattggccaccaag

SEQ ID NO: 37177 - DNA, 20 bp, Homo sapiens
gtctcaatctcctgacctca

SEQ ID NO: 37178 - DNA, 22 bp, Homo sapiens
tgaactggtatctcccatcttt

SEQ ID NO: 37179 - DNA, 19 bp, Homo sapiens
acctcatttatttacacct

SEQ ID NO: 37180 - DNA, 16 bp, Homo sapiens
tttacggtagcggtca

SEQ ID NO: 37181 - DNA, 18 bp, Homo sapiens
ccatcaggggagatatgt

SEQ ID NO: 37182 - DNA, 20 bp, Homo sapiens
tatcaaaggtgatgagatcc

SEQ ID NO: 37183 - DNA, 22 bp, Homo sapiens
gtgacccaaggtgcccaaaaga

SEQ ID NO: 37184 - DNA, 17 bp, Homo sapiens
gcagggtcaaagaacaa

SEQ ID NO: 37185 - DNA, 16 bp, Homo sapiens
gaacccttgttgaccg

SEQ ID NO: 37186 - DNA, 16 bp, Homo sapiens
ccaggcagttgggtac

SEQ ID NO: 37187 - DNA, 20 bp, Homo sapiens
gatgttcctcttaaagtgga

SEQ ID NO: 37188 - DNA, 16 bp, Homo sapiens
aaaggcaacagcaaaa

SEQ ID NO: 37189 - DNA, 23 bp, Homo sapiens
tttggcatcttcacatgctttga

SEQ ID NO: 37190 - DNA, 17 bp, Homo sapiens
tatgccacttcctgtca

SEQ ID NO: 37191 - DNA, 20 bp, Homo sapiens
acaaggtgaagcatgttgtg

SEQ ID NO: 37192 - DNA, 20 bp, Homo sapiens
ttataaggtgacttttggga

SEQ ID NO: 37193 - DNA, 21 bp, Homo sapiens
agcaattgagattcagaaagc

SEQ ID NO: 37194 - DNA, 24 bp, Homo sapiens
gatgggtccgtttcacctgttgca

SEQ ID NO: 37195 - DNA, 17 bp, Homo sapiens
cccagttctggggatga

SEQ ID NO: 37196 - DNA, 18 bp, Homo sapiens
atccttctcacagtacgg

SEQ ID NO: 37197 - DNA, 22 bp, Homo sapiens
ttggtaccatgacatggaaaat

SEQ ID NO: 37198 - DNA, 17 bp, Homo sapiens
gtgggaggagcattcac

SEQ ID NO: 37199 - DNA, 18 bp, Homo sapiens
agtgggtctcattggtgc

SEQ ID NO: 37200 - DNA, 21 bp, Homo sapiens
tagccttcctttccccagaca

SEQ ID NO: 37201 - DNA, 21 bp, Homo sapiens
ttttaaaaattttgtcaggcg

SEQ ID NO: 37202 - DNA, 16 bp, Homo sapiens
ataaggtgggcctctc

SEQ ID NO: 37203 - DNA, 24 bp, Homo sapiens
ctgtgatgaggccaccaagtggaa

SEQ ID NO: 37204 - DNA, 17 bp, Homo sapiens
tgtagtaagtgccatgt

SEQ ID NO: 37205 - DNA, 22 bp, Homo sapiens
gacaatttcaccctggtccctg

SEQ ID NO: 37206 - DNA, 17 bp, Homo sapiens
ctgtccacaggtgtcga

SEQ ID NO: 37207 - DNA, 20 bp, Homo sapiens
gcctctgctgttatttactt

SEQ ID NO: 37208 - DNA, 23 bp, Homo sapiens
agatataggaagtactgaagttg

SEQ ID NO: 37209 - DNA, 16 bp, Homo sapiens
atgggcttcacacagt

SEQ ID NO: 37210 - DNA, 16 bp, Homo sapiens
ccagccaagctggtca

SEQ ID NO: 37211 - DNA, 20 bp, Homo sapiens
gtcaggtgtgggggtcttgg

SEQ ID NO: 37212 - DNA, 22 bp, Homo sapiens
gagagccgccgtcaccagccca

SEQ ID NO: 37213 - DNA, 20 bp, Homo sapiens
atatttgagtttcacctgtg

SEQ ID NO: 37214 - DNA, 16 bp, Homo sapiens
ccgccccacagaccac

SEQ ID NO: 37215 - DNA, 23 bp, Homo sapiens
ctcagggatgaccctagaagtcc

SEQ ID NO: 37216 - DNA, 16 bp, Homo sapiens
cagaaagatggtccca

SEQ ID NO: 37217 - DNA, 24 bp, Homo sapiens
tgaggaaaagtaggctgtcctctg

SEQ ID NO: 37218 - DNA, 23 bp, Homo sapiens
tcctactttttccacagttccca

SEQ ID NO: 37219 - DNA, 23 bp, Homo sapiens
gaaggtggggctttggcactgca

SEQ ID NO: 37220 - DNA, 22 bp, Homo sapiens
aagactcatgcccccacccccg

SEQ ID NO: 37221 - DNA, 20 bp, Homo sapiens
aaattccttttccatttcca

SEQ ID NO: 37222 - DNA, 20 bp, Homo sapiens
cagttattggctcatctgtg

SEQ ID NO: 37223 - DNA, 21 bp, Homo sapiens
tctgtgaggtatgttcagggt

SEQ ID NO: 37224 - DNA, 16 bp, Homo sapiens
gagtgggcaccctgca

SEQ ID NO: 37225 - DNA, 20 bp, Homo sapiens
agccatgaatctttgttttt

SEQ ID NO: 37226 - DNA, 18 bp, Homo sapiens
tgtttgtgccccagcaca

SEQ ID NO: 37227 - DNA, 22 bp, Homo sapiens
gagggatgatcgtaggtcacag

SEQ ID NO: 37228 - DNA, 17 bp, Homo sapiens
tctggattaatggcttt

SEQ ID NO: 37229 - DNA, 17 bp, Homo sapiens
agttctggatcatcact

SEQ ID NO: 37230 - DNA, 24 bp, Homo sapiens
ctcagggctttcggtgcatctggg

SEQ ID NO: 37231 - DNA, 24 bp, Homo sapiens
gatggtgtttggggccgaggtcat

SEQ ID NO: 37232 - DNA, 22 bp, Homo sapiens
ctgggggcatttctttcctcca

SEQ ID NO: 37233 - DNA, 24 bp, Homo sapiens
cccgggctggccaatagcggccaa

SEQ ID NO: 37234 - DNA, 17 bp, Homo sapiens
agcaagaagctaaaacc

SEQ ID NO: 37235 - DNA, 17 bp, Homo sapiens
gaatccctgaagatctg

SEQ ID NO: 37236 - DNA, 22 bp, Homo sapiens
atcccagacttgccccaggaca

SEQ ID NO: 37237 - DNA, 22 bp, Homo sapiens
cacactcaaaaccatcacacga

SEQ ID NO: 37238 - DNA, 16 bp, Homo sapiens
ccaactacacgctccc

SEQ ID NO: 37239 - DNA, 19 bp, Homo sapiens
taacaaccaaaagtttagg

SEQ ID NO: 37240 - DNA, 16 bp, Homo sapiens
ctggggggctggggac

SEQ ID NO: 37241 - DNA, 19 bp, Homo sapiens
ccaggaaactggataaagg

SEQ ID NO: 37242 - DNA, 17 bp, Homo sapiens
ttccaatatcctcacgg

SEQ ID NO: 37243 - DNA, 16 bp, Homo sapiens
ccatataaaaggccgg

SEQ ID NO: 37244 - DNA, 16 bp, Homo sapiens
tcactgtgctctgttt

SEQ ID NO: 37245 - DNA, 20 bp, Homo sapiens
atcatggtggccactgtcac

SEQ ID NO: 37246 - DNA, 24 bp, Homo sapiens
ttgtatcccggtttgcttttccca

SEQ ID NO: 37247 - DNA, 21 bp, Homo sapiens
gtgtccagtggaaagatcgtc

SEQ ID NO: 37248 - DNA, 17 bp, Homo sapiens
gttacttcgatgtacac

SEQ ID NO: 37249 - DNA, 16 bp, Homo sapiens
acgtgtgaactatggt

SEQ ID NO: 37250 - DNA, 24 bp, Homo sapiens
tgatcctcctgccttggcttccca

SEQ ID NO: 37251 - DNA, 20 bp, Homo sapiens
tgatcactctgaacataaca

SEQ ID NO: 37252 - DNA, 24 bp, Homo sapiens
tcaacttctaagttgtcacccctt

SEQ ID NO: 37253 - DNA, 20 bp, Homo sapiens
caattcaattgtcatttggt

SEQ ID NO: 37254 - DNA, 20 bp, Homo sapiens
aaaatcgttgatatatgcac

SEQ ID NO: 37255 - DNA, 18 bp, Homo sapiens
tgagtgctaaattaactg

SEQ ID NO: 37256 - DNA, 22 bp, Homo sapiens
cagagtggctccagctttccct

SEQ ID NO: 37257 - DNA, 18 bp, Homo sapiens
tgggctaagatgctatca

SEQ ID NO: 37258 - DNA, 17 bp, Homo sapiens
ctctcttcacccctcaa

SEQ ID NO: 37259 - DNA, 22 bp, Homo sapiens
gcctgaggctgaaaaggtgagc

SEQ ID NO: 37260 - DNA, 18 bp, Homo sapiens
atgggtttgtgctgtacc

SEQ ID NO: 37261 - DNA, 16 bp, Homo sapiens
accctcactgggacaa

SEQ ID NO: 37262 - DNA, 22 bp, Homo sapiens
ggtaaccaagttctctaaatga

SEQ ID NO: 37263 - DNA, 21 bp, Homo sapiens
caacatatgctcgatcgtgga

SEQ ID NO: 37264 - DNA, 20 bp, Homo sapiens
gaggaagattttcattcctt

SEQ ID NO: 37265 - DNA, 16 bp, Homo sapiens
agtgttgtccggtaca

SEQ ID NO: 37266 - DNA, 17 bp, Homo sapiens
agcctttatcccttgac

SEQ ID NO: 37267 - DNA, 19 bp, Homo sapiens
ggatctgatgcatttgctt

SEQ ID NO: 37268 - DNA, 20 bp, Homo sapiens
tcttttcagttaaagacagt

SEQ ID NO: 37269 - DNA, 21 bp, Homo sapiens
cagtgcagaaagcacactttt

SEQ ID NO: 37270 - DNA, 18 bp, Homo sapiens
aatgactctgtaacctga

SEQ ID NO: 37271 - DNA, 19 bp, Homo sapiens
ctgtttcacctggataaat

SEQ ID NO: 37272 - DNA, 21 bp, Homo sapiens
tggaatttgaatgatttaggt

SEQ ID NO: 37273 - DNA, 21 bp, Homo sapiens
gaatgtccagagctgctccca

SEQ ID NO: 37274 - DNA, 22 bp, Homo sapiens
gaaacatcatttaccccattag

SEQ ID NO: 37275 - DNA, 19 bp, Homo sapiens
agtaccagaaggtcctatc

SEQ ID NO: 37276 - DNA, 18 bp, Homo sapiens
cagcacagcactttcact

SEQ ID NO: 37277 - DNA, 21 bp, Homo sapiens
tctgaaggtttaccaactttt

SEQ ID NO: 37278 - DNA, 22 bp, Homo sapiens
ttcaaagtttctgttatttttt

SEQ ID NO: 37279 - DNA, 18 bp, Homo sapiens
gcactgttgagtctttga

SEQ ID NO: 37280 - DNA, 16 bp, Homo sapiens
actttggtgtagatgg

SEQ ID NO: 37281 - DNA, 16 bp, Homo sapiens
ccagatcctgctttgg

SEQ ID NO: 37282 - DNA, 18 bp, Homo sapiens
gacctcactgagaagtat

SEQ ID NO: 37283 - DNA, 20 bp, Homo sapiens
ttcatccatccttttaaaca

SEQ ID NO: 37284 - DNA, 19 bp, Homo sapiens
aactcaccctatgcagcac

SEQ ID NO: 37285 - DNA, 21 bp, Homo sapiens
ttcaaaagaggctctgtccaa

SEQ ID NO: 37286 - DNA, 19 bp, Homo sapiens
cttgtcccagagctgcacc

SEQ ID NO: 37287 - DNA, 21 bp, Homo sapiens
ggatgatgtttcgcagagcaa

SEQ ID NO: 37288 - DNA, 21 bp, Homo sapiens
ttttaatgtgtcttctagttt

SEQ ID NO: 37289 - DNA, 23 bp, Homo sapiens
catcatagtcgtagctggtgggc

SEQ ID NO: 37290 - DNA, 17 bp, Homo sapiens
tccttcctctaaacgtt

SEQ ID NO: 37291 - DNA, 18 bp, Homo sapiens
gtgagactgtctacaaaa

SEQ ID NO: 37292 - DNA, 17 bp, Homo sapiens
ccttgtaggtacatgtt

SEQ ID NO: 37293 - DNA, 21 bp, Homo sapiens
aggagaggataaacaaaaaaa

SEQ ID NO: 37294 - DNA, 16 bp, Homo sapiens
agggtgccctcagtag

SEQ ID NO: 37295 - DNA, 20 bp, Homo sapiens
atcaacagaaacattctagc

SEQ ID NO: 37296 - DNA, 22 bp, Homo sapiens
cttcctccctctatgatatact

SEQ ID NO: 37297 - DNA, 20 bp, Homo sapiens
caaaattggtcccacctata

SEQ ID NO: 37298 - DNA, 16 bp, Homo sapiens
ggctggctagatcact

SEQ ID NO: 37299 - DNA, 16 bp, Homo sapiens
tgtgagcccatggcta

SEQ ID NO: 37300 - DNA, 18 bp, Homo sapiens
aagtctatcctaagggct

SEQ ID NO: 37301 - DNA, 24 bp, Homo sapiens
gttcacactcgccccacgggcaag

SEQ ID NO: 37302 - DNA, 17 bp, Homo sapiens
ccctttacacctgtcat

SEQ ID NO: 37303 - DNA, 18 bp, Homo sapiens
attgtggagtgaggttgg

SEQ ID NO: 37304 - DNA, 16 bp, Homo sapiens
ttggaagtgctcactg

SEQ ID NO: 37305 - DNA, 16 bp, Homo sapiens
agccagaggaagtgtg

SEQ ID NO: 37306 - DNA, 18 bp, Homo sapiens
cacaatcccattagctgc

SEQ ID NO: 37307 - DNA, 19 bp, Homo sapiens
ccacgactgacctaccttc

SEQ ID NO: 37308 - DNA, 18 bp, Homo sapiens
cagcagcatgtaactttt

SEQ ID NO: 37309 - DNA, 17 bp, Homo sapiens
tagcagggcttcaggcc

SEQ ID NO: 37310 - DNA, 19 bp, Homo sapiens
taccaagggtcctttgggc

SEQ ID NO: 37311 - DNA, 18 bp, Homo sapiens
tcatcttgggtgttaagt

SEQ ID NO: 37312 - DNA, 24 bp, Homo sapiens
ttactgaggggtgcaagtattcta

SEQ ID NO: 37313 - DNA, 17 bp, Homo sapiens
acattcctgaaatgtgg

SEQ ID NO: 37314 - DNA, 19 bp, Homo sapiens
aatctgcccatgacactta

SEQ ID NO: 37315 - DNA, 22 bp, Homo sapiens
tgcagaagcgctttcgccacca

SEQ ID NO: 37316 - DNA, 19 bp, Homo sapiens
ttaagctgcaatttctgtt

SEQ ID NO: 37317 - DNA, 21 bp, Homo sapiens
caggttgaaaatgaatatggc

SEQ ID NO: 37318 - DNA, 18 bp, Homo sapiens
ccctgcagggccccacat

SEQ ID NO: 37319 - DNA, 19 bp, Homo sapiens
gcattagggtggctacatt

SEQ ID NO: 37320 - DNA, 20 bp, Homo sapiens
agaaccacatcatcccccag

SEQ ID NO: 37321 - DNA, 17 bp, Homo sapiens
cagtcattaagccttgt

SEQ ID NO: 37322 - DNA, 19 bp, Homo sapiens
aaatcacaggcaaagtagc

SEQ ID NO: 37323 - DNA, 21 bp, Homo sapiens
caaaaatggcaatgccttccc

SEQ ID NO: 37324 - DNA, 16 bp, Homo sapiens
atgaagcctctcctct

SEQ ID NO: 37325 - DNA, 21 bp, Homo sapiens
tcttaaagaaacagacctatg

SEQ ID NO: 37326 - DNA, 17 bp, Homo sapiens
tgttttccagattacct

SEQ ID NO: 37327 - DNA, 24 bp, Homo sapiens
atgtagatggatgggaacccctcc

SEQ ID NO: 37328 - DNA, 16 bp, Homo sapiens
catcctgggctgcatg

SEQ ID NO: 37329 - DNA, 18 bp, Homo sapiens
ataactggccctccattc

SEQ ID NO: 37330 - DNA, 18 bp, Homo sapiens
gccagaaaactcagaatg

SEQ ID NO: 37331 - DNA, 17 bp, Homo sapiens
ggttttgccattttggc

SEQ ID NO: 37332 - DNA, 22 bp, Homo sapiens
aactagggaggattacctgctt

SEQ ID NO: 37333 - DNA, 19 bp, Homo sapiens
acccgcctcagcctcccaa

SEQ ID NO: 37334 - DNA, 22 bp, Homo sapiens
atttctatctcctctgagcacc

SEQ ID NO: 37335 - DNA, 22 bp, Homo sapiens
tataaatcttctcaagacatct

SEQ ID NO: 37336 - DNA, 23 bp, Homo sapiens
tcaaataccccttgtcccttgaa

SEQ ID NO: 37337 - DNA, 19 bp, Homo sapiens
agactctttctctagcagc

SEQ ID NO: 37338 - DNA, 20 bp, Homo sapiens
accttgtcaaggtaaaagac

SEQ ID NO: 37339 - DNA, 24 bp, Homo sapiens
ttttcttcggctggctcatgagct

SEQ ID NO: 37340 - DNA, 18 bp, Homo sapiens
caggtctgctttaattcc

SEQ ID NO: 37341 - DNA, 24 bp, Homo sapiens
ctttcatgagccctggccaggaca

SEQ ID NO: 37342 - DNA, 20 bp, Homo sapiens
gtagagcccagtctagccac

SEQ ID NO: 37343 - DNA, 16 bp, Homo sapiens
aagtatccaggaaggg

SEQ ID NO: 37344 - DNA, 20 bp, Homo sapiens
cgggcctcaggataaccagc

SEQ ID NO: 37345 - DNA, 19 bp, Homo sapiens
cttatccatgtgttagcaa

SEQ ID NO: 37346 - DNA, 20 bp, Homo sapiens
catggtcctcagaaaactgg

SEQ ID NO: 37347 - DNA, 22 bp, Homo sapiens
ttagaggcctgagccactgtgc

SEQ ID NO: 37348 - DNA, 23 bp, Homo sapiens
taattatttgaaaaagggccagt

SEQ ID NO: 37349 - DNA, 23 bp, Homo sapiens
ctggaaggaccggctgctgaaga

SEQ ID NO: 37350 - DNA, 23 bp, Homo sapiens
accatttcccatttctgagcaat

SEQ ID NO: 37351 - DNA, 16 bp, Homo sapiens
cagccatttcgctaca

SEQ ID NO: 37352 - DNA, 16 bp, Homo sapiens
tgggtgttcaggccta

SEQ ID NO: 37353 - DNA, 22 bp, Homo sapiens
ctgtagaatgccacccagagga

SEQ ID NO: 37354 - DNA, 21 bp, Homo sapiens
agcccagccatcttcatcttc

SEQ ID NO: 37355 - DNA, 18 bp, Homo sapiens
atcggcttctgaaatgca

SEQ ID NO: 37356 - DNA, 23 bp, Homo sapiens
cgggagtagtgaatgcttcctga

SEQ ID NO: 37357 - DNA, 20 bp, Homo sapiens
attaagtccatcagcacatt

SEQ ID NO: 37358 - DNA, 20 bp, Homo sapiens
ccggctatagtcaatttcaa

SEQ ID NO: 37359 - DNA, 24 bp, Homo sapiens
taattaaatacagaagggcccgga

SEQ ID NO: 37360 - DNA, 16 bp, Homo sapiens
atgagcacgcaagcag

SEQ ID NO: 37361 - DNA, 17 bp, Homo sapiens
caggagaattgctagag

SEQ ID NO: 37362 - DNA, 16 bp, Homo sapiens
ggcaagcgcctaagtc

SEQ ID NO: 37363 - DNA, 23 bp, Homo sapiens
gagaccctgtctctataaaaaaa

SEQ ID NO: 37364 - DNA, 21 bp, Homo sapiens
gccaccttcaaattaatatga

SEQ ID NO: 37365 - DNA, 18 bp, Homo sapiens
ttcttctcccactcctgt

SEQ ID NO: 37366 - DNA, 22 bp, Homo sapiens
tttactaagtggtgtatgcctc

SEQ ID NO: 37367 - DNA, 22 bp, Homo sapiens
ctcttttgtgaagcggcagctg

SEQ ID NO: 37368 - DNA, 20 bp, Homo sapiens
aattggaatctgatctgtct

SEQ ID NO: 37369 - DNA, 24 bp, Homo sapiens
gacgggaaggccggtccactgcct

SEQ ID NO: 37370 - DNA, 24 bp, Homo sapiens
atcctccctctgttgctggttctg

SEQ ID NO: 37371 - DNA, 22 bp, Homo sapiens
ggggctcaggctccccgccctg

SEQ ID NO: 37372 - DNA, 16 bp, Homo sapiens
ctgggcgccgactgca

SEQ ID NO: 37373 - DNA, 20 bp, Homo sapiens
cctgtcccctagcaatgcct

SEQ ID NO: 37374 - DNA, 22 bp, Homo sapiens
tgggccgacgaggggcggtgcc

SEQ ID NO: 37375 - DNA, 24 bp, Homo sapiens
gcgcgtagggcccagaagcagcag

SEQ ID NO: 37376 - DNA, 21 bp, Homo sapiens
cacccgcccggctcggccaca

SEQ ID NO: 37377 - DNA, 23 bp, Homo sapiens
ggggggaaggctagacccacggg

SEQ ID NO: 37378 - DNA, 18 bp, Homo sapiens
atggctgacgaccgtttc

SEQ ID NO: 37379 - DNA, 23 bp, Homo sapiens
cacgctcacgtgcacacaagcct

SEQ ID NO: 37380 - DNA, 24 bp, Homo sapiens
cttcctgttgtagcctccgctccc

SEQ ID NO: 37381 - DNA, 24 bp, Homo sapiens
agaccccgactcctccaggggatg

SEQ ID NO: 37382 - DNA, 17 bp, Homo sapiens
tgttccctcctttaaag

SEQ ID NO: 37383 - DNA, 18 bp, Homo sapiens
ctgcccaccccgggtggt

SEQ ID NO: 37384 - DNA, 21 bp, Homo sapiens
ctactgcgagggagcgtctcc

SEQ ID NO: 37385 - DNA, 16 bp, Homo sapiens
ttgtctatggtggctg

SEQ ID NO: 37386 - DNA, 20 bp, Homo sapiens
cagaacccgatccaggcagg

SEQ ID NO: 37387 - DNA, 24 bp, Homo sapiens
ctgcctacaccctgcgctggtacc

SEQ ID NO: 37388 - DNA, 23 bp, Homo sapiens
ccatacctgtcccctggctctgg

SEQ ID NO: 37389 - DNA, 16 bp, Homo sapiens
accccattggcccaga

SEQ ID NO: 37390 - DNA, 18 bp, Homo sapiens
acggttggcattccctcc

SEQ ID NO: 37391 - DNA, 20 bp, Homo sapiens
gggctgagccctgctgacct

SEQ ID NO: 37392 - DNA, 24 bp, Homo sapiens
ctgtgctgcctgtcacagcccgat

SEQ ID NO: 37393 - DNA, 22 bp, Homo sapiens
ccttgggatagtgatggtgaga

SEQ ID NO: 37394 - DNA, 23 bp, Homo sapiens
ccagtggcagggaacaggggtct

SEQ ID NO: 37395 - DNA, 22 bp, Homo sapiens
atgatgagtactctgaatactc

SEQ ID NO: 37396 - DNA, 17 bp, Homo sapiens
gagggttgaaaggtcag

SEQ ID NO: 37397 - DNA, 17 bp, Homo sapiens
cagccactgctcccagc

SEQ ID NO: 37398 - DNA, 21 bp, Homo sapiens
cagaccccgctggcagccccc

SEQ ID NO: 37399 - DNA, 16 bp, Homo sapiens
catgggcactgtgtgc

SEQ ID NO: 37400 - DNA, 22 bp, Homo sapiens
ggtactcctccacagaatactc

SEQ ID NO: 37401 - DNA, 16 bp, Homo sapiens
gggtgtccatgaatgc

SEQ ID NO: 37402 - DNA, 22 bp, Homo sapiens
cactgatttccactgtgtgcac

SEQ ID NO: 37403 - DNA, 24 bp, Homo sapiens
tagttatgctgcagacactgccgg

SEQ ID NO: 37404 - DNA, 24 bp, Homo sapiens
ctacgtgcttggcgtgtgccctgc

SEQ ID NO: 37405 - DNA, 17 bp, Homo sapiens
atggtgacttcagggcc

SEQ ID NO: 37406 - DNA, 24 bp, Homo sapiens
atagctgccccacgggttcagctg

SEQ ID NO: 37407 - DNA, 16 bp, Homo sapiens
aggccctgccctgcct

SEQ ID NO: 37408 - DNA, 16 bp, Homo sapiens
acagcatggagctggg

SEQ ID NO: 37409 - DNA, 16 bp, Homo sapiens
agttcatcgcatctgg

SEQ ID NO: 37410 - DNA, 16 bp, Homo sapiens
caggggcctcagggcc

SEQ ID NO: 37411 - DNA, 22 bp, Homo sapiens
cttcccatccttctctctgtca

SEQ ID NO: 37412 - DNA, 18 bp, Homo sapiens
cctgagaggaccccagtt

SEQ ID NO: 37413 - DNA, 18 bp, Homo sapiens
ctgctatctctttgtgta

SEQ ID NO: 37414 - DNA, 20 bp, Homo sapiens
aaaactactcacgtgatcca

SEQ ID NO: 37415 - DNA, 22 bp, Homo sapiens
catgtcatgtgtcagtcctgca

SEQ ID NO: 37416 - DNA, 16 bp, Homo sapiens
tcttctgctcccagga

SEQ ID NO: 37417 - DNA, 19 bp, Homo sapiens
gactgcttgccctgtaagt

SEQ ID NO: 37418 - DNA, 21 bp, Homo sapiens
caccatagtccctgtattatg

SEQ ID NO: 37419 - DNA, 24 bp, Homo sapiens
gggtggagtgggagactgcgggct

SEQ ID NO: 37420 - DNA, 16 bp, Homo sapiens
ctacctccctcaccca

SEQ ID NO: 37421 - DNA, 24 bp, Homo sapiens
caaagccccggatgtcatcctcct

SEQ ID NO: 37422 - DNA, 22 bp, Homo sapiens
ccatggcccacaggaaggacat

SEQ ID NO: 37423 - DNA, 23 bp, Homo sapiens
atctgttgcacataggggcggcc

SEQ ID NO: 37424 - DNA, 23 bp, Homo sapiens
agggcccaggggtcagggtgctg

SEQ ID NO: 37425 - DNA, 23 bp, Homo sapiens
ggtcagagatcggggtgacttct

SEQ ID NO: 37426 - DNA, 20 bp, Homo sapiens
aggccctcccaggcccatcc

SEQ ID NO: 37427 - DNA, 19 bp, Homo sapiens
tggggtccctggagctcct

SEQ ID NO: 37428 - DNA, 22 bp, Homo sapiens
gcctcgaggaccggcaggccct

SEQ ID NO: 37429 - DNA, 19 bp, Homo sapiens
ctgtgtctgacagggtgag

SEQ ID NO: 37430 - DNA, 24 bp, Homo sapiens
gacctctgacctcagggacaacag

SEQ ID NO: 37431 - DNA, 24 bp, Homo sapiens
ctgaagctgtggcccccaacctgc

SEQ ID NO: 37432 - DNA, 21 bp, Homo sapiens
ctcacctgctcccctctctcg

SEQ ID NO: 37433 - DNA, 23 bp, Homo sapiens
gaaccttccctacccttccaacc

SEQ ID NO: 37434 - DNA, 24 bp, Homo sapiens
ctctctctccggggggacctcgct

SEQ ID NO: 37435 - DNA, 23 bp, Homo sapiens
agaggccccgaaggacttcaggg

SEQ ID NO: 37436 - DNA, 16 bp, Homo sapiens
gtggggatcagagtca

SEQ ID NO: 37437 - DNA, 24 bp, Homo sapiens
cccaggccccagtggaaatgatgg

SEQ ID NO: 37438 - DNA, 17 bp, Homo sapiens
tggaagatggttatgag

SEQ ID NO: 37439 - DNA, 19 bp, Homo sapiens
ttactgactctgtcctata

SEQ ID NO: 37440 - DNA, 20 bp, Homo sapiens
ggggccccttaccttctggc

SEQ ID NO: 37441 - DNA, 17 bp, Homo sapiens
atggtgaattgagggga

SEQ ID NO: 37442 - DNA, 23 bp, Homo sapiens
aggtggccctgggggaccagcag

SEQ ID NO: 37443 - DNA, 22 bp, Homo sapiens
tttgacgggcagccaggcccca

SEQ ID NO: 37444 - DNA, 16 bp, Homo sapiens
gttccctggggagata

SEQ ID NO: 37445 - DNA, 19 bp, Homo sapiens
gagggaggtcagggcagaa

SEQ ID NO: 37446 - DNA, 21 bp, Homo sapiens
cctctcccaaagtgcacgctc

SEQ ID NO: 37447 - DNA, 16 bp, Homo sapiens
agaaggtttgggcatt

SEQ ID NO: 37448 - DNA, 16 bp, Homo sapiens
ctcgccctggtcaccc

SEQ ID NO: 37449 - DNA, 19 bp, Homo sapiens
atagtggagttggagtcat

SEQ ID NO: 37450 - DNA, 17 bp, Homo sapiens
ctgatcggtcccaaggt

SEQ ID NO: 37451 - DNA, 24 bp, Homo sapiens
ttgacacctcgagaccagccccac

SEQ ID NO: 37452 - DNA, 24 bp, Homo sapiens
tcatgtctttttttctccaggggg

SEQ ID NO: 37453 - DNA, 24 bp, Homo sapiens
ctacacccccatgacccgaccatg

SEQ ID NO: 37454 - DNA, 22 bp, Homo sapiens
ggagagatggtgagtgtgggca

SEQ ID NO: 37455 - DNA, 23 bp, Homo sapiens
gtccactgtccacagaccctgta

SEQ ID NO: 37456 - DNA, 23 bp, Homo sapiens
tgcctgatgcctgcagggagaag

SEQ ID NO: 37457 - DNA, 22 bp, Homo sapiens
gactggcccggcacaccaggct

SEQ ID NO: 37458 - DNA, 22 bp, Homo sapiens
tacagaggggatgggggctggg

SEQ ID NO: 37459 - DNA, 18 bp, Homo sapiens
ccgtggccccctcattct

SEQ ID NO: 37460 - DNA, 16 bp, Homo sapiens
gtgaacggggagtgaa

SEQ ID NO: 37461 - DNA, 22 bp, Homo sapiens
cagcccggggcggcctggggga

SEQ ID NO: 37462 - DNA, 23 bp, Homo sapiens
ttcagggtgaagggggtcacaga

SEQ ID NO: 37463 - DNA, 23 bp, Homo sapiens
cttaggccccaggccacgtagcc

SEQ ID NO: 37464 - DNA, 17 bp, Homo sapiens
tagggcactgggtcaga

SEQ ID NO: 37465 - DNA, 20 bp, Homo sapiens
atcaaggccacaggctccct

SEQ ID NO: 37466 - DNA, 24 bp, Homo sapiens
aagaagtgattcccagacacctca

SEQ ID NO: 37467 - DNA, 16 bp, Homo sapiens
aaggagatgttggctt

SEQ ID NO: 37468 - DNA, 22 bp, Homo sapiens
caaacaggcctcagctactcca

SEQ ID NO: 37469 - DNA, 19 bp, Homo sapiens
atggaccctctccctgcta

SEQ ID NO: 37470 - DNA, 20 bp, Homo sapiens
cttcaacattaggccttcct

SEQ ID NO: 37471 - DNA, 18 bp, Homo sapiens
ggtgttccctacccacta

SEQ ID NO: 37472 - DNA, 17 bp, Homo sapiens
ggggacccatgaagcca

SEQ ID NO: 37473 - DNA, 16 bp, Homo sapiens
ccttgtccccatggca

SEQ ID NO: 37474 - DNA, 22 bp, Homo sapiens
gacaccatcataggcggctact

SEQ ID NO: 37475 - DNA, 17 bp, Homo sapiens
ccatctgtgtttctcac

SEQ ID NO: 37476 - DNA, 24 bp, Homo sapiens
gcactgggtcactataaggtcaaa

SEQ ID NO: 37477 - DNA, 22 bp, Homo sapiens
gagtggccacacatgcagcgga

SEQ ID NO: 37478 - DNA, 17 bp, Homo sapiens
ctggggacagggggccc

SEQ ID NO: 37479 - DNA, 22 bp, Homo sapiens
ctgccggccccatgtgtgttca

SEQ ID NO: 37480 - DNA, 24 bp, Homo sapiens
agggatccctgctgcaccaggttg

SEQ ID NO: 37481 - DNA, 24 bp, Homo sapiens
cccaggccacacacagatcccggg

SEQ ID NO: 37482 - DNA, 24 bp, Homo sapiens
ccacagggcagcaagggagagcct

SEQ ID NO: 37483 - DNA, 22 bp, Homo sapiens
cccagcacttaagaggaccccc

SEQ ID NO: 37484 - DNA, 23 bp, Homo sapiens
ttctaagcccccagcctgatctg

SEQ ID NO: 37485 - DNA, 24 bp, Homo sapiens
ggcctgggcctgggcctggggcag

SEQ ID NO: 37486 - DNA, 23 bp, Homo sapiens
gacgtgctgctagggccgttcgg

SEQ ID NO: 37487 - DNA, 24 bp, Homo sapiens
tggcaacccggctgagcccttgtc

SEQ ID NO: 37488 - DNA, 23 bp, Homo sapiens
agacaatggggaccctggtgaca

SEQ ID NO: 37489 - DNA, 16 bp, Homo sapiens
catagtcagccacaga

SEQ ID NO: 37490 - DNA, 23 bp, Homo sapiens
aaaccaacccagggtgaacgagg

SEQ ID NO: 37491 - DNA, 22 bp, Homo sapiens
ctcccctcctgccctcacagat

SEQ ID NO: 37492 - DNA, 19 bp, Homo sapiens
caaactcccagagggtgag

SEQ ID NO: 37493 - DNA, 23 bp, Homo sapiens
gagtacaccaccctcttccctgt

SEQ ID NO: 37494 - DNA, 21 bp, Homo sapiens
gactgggtctcccctgggtgc

SEQ ID NO: 37495 - DNA, 24 bp, Homo sapiens
tcctttgtcaccatccaagccccg

SEQ ID NO: 37496 - DNA, 23 bp, Homo sapiens
gatcctggggcctccaggcccac

SEQ ID NO: 37497 - DNA, 24 bp, Homo sapiens
gtcacggtaaggggctgaaggtcc

SEQ ID NO: 37498 - DNA, 19 bp, Homo sapiens
gccagggtgctcccgactc

SEQ ID NO: 37499 - DNA, 24 bp, Homo sapiens
ggccagccccacggggtccctctc

SEQ ID NO: 37500 - DNA, 24 bp, Homo sapiens
atgttgggagtgcaggactaaagg

SEQ ID NO: 37501 - DNA, 22 bp, Homo sapiens
tgtcccccttggcaccccgtgg

SEQ ID NO: 37502 - DNA, 16 bp, Homo sapiens
cggggcctccccagtt

SEQ ID NO: 37503 - DNA, 18 bp, Homo sapiens
ggggcaggcaggaatcag

SEQ ID NO: 37504 - DNA, 24 bp, Homo sapiens
aggtaggaacgtggggaaggtcct

SEQ ID NO: 37505 - DNA, 24 bp, Homo sapiens
atgcccacactcaccttgtcaccc

SEQ ID NO: 37506 - DNA, 16 bp, Homo sapiens
caccttctctcacaca

SEQ ID NO: 37507 - DNA, 24 bp, Homo sapiens
caaaagagtgtgagtcccgcccaa

SEQ ID NO: 37508 - DNA, 17 bp, Homo sapiens
ttccctcctccccctga

SEQ ID NO: 37509 - DNA, 21 bp, Homo sapiens
tccactcacccccccactcat

SEQ ID NO: 37510 - DNA, 17 bp, Homo sapiens
ctccctagccctctggc

SEQ ID NO: 37511 - DNA, 24 bp, Homo sapiens
ctcccctgctgccagggggcccct

SEQ ID NO: 37512 - DNA, 22 bp, Homo sapiens
gaagatggccgccccggccagg

SEQ ID NO: 37513 - DNA, 19 bp, Homo sapiens
gggacaggggtagacgagg

SEQ ID NO: 37514 - DNA, 22 bp, Homo sapiens
ccagctcttgcctctgatttcc

SEQ ID NO: 37515 - DNA, 23 bp, Homo sapiens
acaaagggcacaggcaggggact

SEQ ID NO: 37516 - DNA, 16 bp, Homo sapiens
gccaggcatccgggta

SEQ ID NO: 37517 - DNA, 22 bp, Homo sapiens
gtgagtcctcggggtccctcct

SEQ ID NO: 37518 - DNA, 23 bp, Homo sapiens
cggtgtcctgttggtctccaggg

SEQ ID NO: 37519 - DNA, 23 bp, Homo sapiens
aggttcattgactcagaggttgg

SEQ ID NO: 37520 - DNA, 19 bp, Homo sapiens
cctccactgacctcccatg

SEQ ID NO: 37521 - DNA, 19 bp, Homo sapiens
tgtggagtaagacatacgt

SEQ ID NO: 37522 - DNA, 24 bp, Homo sapiens
aaaggagacaaggtaggtgggaca

SEQ ID NO: 37523 - DNA, 17 bp, Homo sapiens
tactccagggtctccct

SEQ ID NO: 37524 - DNA, 20 bp, Homo sapiens
cacaggaccctcacctcact

SEQ ID NO: 37525 - DNA, 24 bp, Homo sapiens
gaatcagtgggggacgcagggtca

SEQ ID NO: 37526 - DNA, 16 bp, Homo sapiens
gaggacttaggatggg

SEQ ID NO: 37527 - DNA, 17 bp, Homo sapiens
gagagagtcagcagcac

SEQ ID NO: 37528 - DNA, 16 bp, Homo sapiens
gggtcagtggtgagta

SEQ ID NO: 37529 - DNA, 24 bp, Homo sapiens
gtggtccctgtaggtcagagtgag

SEQ ID NO: 37530 - DNA, 19 bp, Homo sapiens
tagggtctggcaggccccc

SEQ ID NO: 37531 - DNA, 19 bp, Homo sapiens
cacagtgtggcccgcccca

SEQ ID NO: 37532 - DNA, 16 bp, Homo sapiens
gcagagggtaggaggg

SEQ ID NO: 37533 - DNA, 23 bp, Homo sapiens
acgtggggctttagggcacctct

SEQ ID NO: 37534 - DNA, 24 bp, Homo sapiens
taggggcatggtgaatccatggtg

SEQ ID NO: 37535 - DNA, 24 bp, Homo sapiens
ggggtcctgggattccttctctcc

SEQ ID NO: 37536 - DNA, 17 bp, Homo sapiens
agagatgggtcagccag

SEQ ID NO: 37537 - DNA, 24 bp, Homo sapiens
aagagaggcagagagtgacttggg

SEQ ID NO: 37538 - DNA, 16 bp, Homo sapiens
ctgcccggtgctcctg

SEQ ID NO: 37539 - DNA, 16 bp, Homo sapiens
gcagggccccctcctc

SEQ ID NO: 37540 - DNA, 16 bp, Homo sapiens
ggtcctgcattgacca

SEQ ID NO: 37541 - DNA, 19 bp, Homo sapiens
ctcacccgctctccactag

SEQ ID NO: 37542 - DNA, 16 bp, Homo sapiens
ggcagcaggccgggcc

SEQ ID NO: 37543 - DNA, 16 bp, Homo sapiens
ggaacccaacaacacc

SEQ ID NO: 37544 - DNA, 22 bp, Homo sapiens
ccgggctcccctgggcctcctg

SEQ ID NO: 37545 - DNA, 24 bp, Homo sapiens
ctgaaataaaaacagcaaagggag

SEQ ID NO: 37546 - DNA, 24 bp, Homo sapiens
agactccctgagcttgatccgatg

SEQ ID NO: 37547 - DNA, 24 bp, Homo sapiens
agaactccctcttcctcctgtggg

SEQ ID NO: 37548 - DNA, 20 bp, Homo sapiens
aaaggtttcaaggtatgtgt

SEQ ID NO: 37549 - DNA, 17 bp, Homo sapiens
ttaccttcacacctgga

SEQ ID NO: 37550 - DNA, 24 bp, Homo sapiens
gttcctaccctctcaaatgctgtt

SEQ ID NO: 37551 - DNA, 22 bp, Homo sapiens
ctgggtcaccctttgaggaaaa

SEQ ID NO: 37552 - DNA, 20 bp, Homo sapiens
acatcagaactcccctggga

SEQ ID NO: 37553 - DNA, 24 bp, Homo sapiens
ccagcagggacccttctgggtaca

SEQ ID NO: 37554 - DNA, 16 bp, Homo sapiens
agctcctgtgagccaa

SEQ ID NO: 37555 - DNA, 22 bp, Homo sapiens
gtgaagctggccgtgcagggga

SEQ ID NO: 37556 - DNA, 24 bp, Homo sapiens
tgggacatgcagcccgactcaggg

SEQ ID NO: 37557 - DNA, 17 bp, Homo sapiens
gactactgagcagagaa

SEQ ID NO: 37558 - DNA, 23 bp, Homo sapiens
cccttatgcccgccatcacactc

SEQ ID NO: 37559 - DNA, 23 bp, Homo sapiens
gccaaaggtgaccgaggactgcc

SEQ ID NO: 37560 - DNA, 19 bp, Homo sapiens
cagggtctccgggctcccc

SEQ ID NO: 37561 - DNA, 22 bp, Homo sapiens
gagtctcatctttctgtgactg

SEQ ID NO: 37562 - DNA, 22 bp, Homo sapiens
gaggggtgtctggactgagcct

SEQ ID NO: 37563 - DNA, 18 bp, Homo sapiens
ctcagctttcatagtaga

SEQ ID NO: 37564 - DNA, 21 bp, Homo sapiens
ctcaccttctcgcctcgcggc

SEQ ID NO: 37565 - DNA, 24 bp, Homo sapiens
gggtcctgtctctccagtggccta

SEQ ID NO: 37566 - DNA, 17 bp, Homo sapiens
gagacctggtgggtgag

SEQ ID NO: 37567 - DNA, 21 bp, Homo sapiens
agagcttaaatatgcggtcta

SEQ ID NO: 37568 - DNA, 16 bp, Homo sapiens
ggccaaggaatcccac

SEQ ID NO: 37569 - DNA, 24 bp, Homo sapiens
aactatgggtcgaaggtcagaagt

SEQ ID NO: 37570 - DNA, 16 bp, Homo sapiens
ggagcaaagggagaga

SEQ ID NO: 37571 - DNA, 24 bp, Homo sapiens
agaagttccctacttaccggctca

SEQ ID NO: 37572 - DNA, 23 bp, Homo sapiens
ggtgggggcgggggaggaggagg

SEQ ID NO: 37573 - DNA, 21 bp, Homo sapiens
aagggggagaggtcagtggga

SEQ ID NO: 37574 - DNA, 24 bp, Homo sapiens
tccaccccctgcagcaactcctct

SEQ ID NO: 37575 - DNA, 17 bp, Homo sapiens
cacacacactcaccttc

SEQ ID NO: 37576 - DNA, 24 bp, Homo sapiens
aaaggagaacctggccccacgggg

SEQ ID NO: 37577 - DNA, 24 bp, Homo sapiens
tgtggggaatgctagtgagtttcc

SEQ ID NO: 37578 - DNA, 23 bp, Homo sapiens
gagttcctcacgctgctctgcca

SEQ ID NO: 37579 - DNA, 24 bp, Homo sapiens
catttggaaacaggcttgtgggtg

SEQ ID NO: 37580 - DNA, 16 bp, Homo sapiens
ctgtgggcctgaaata

SEQ ID NO: 37581 - DNA, 24 bp, Homo sapiens
ggtcaaagatcacctgtccagggg

SEQ ID NO: 37582 - DNA, 20 bp, Homo sapiens
gagggagccctggtgtgcca

SEQ ID NO: 37583 - DNA, 22 bp, Homo sapiens
gcagacctggtgacccctatgg

SEQ ID NO: 37584 - DNA, 24 bp, Homo sapiens
tcagggggagacagggaagccggg

SEQ ID NO: 37585 - DNA, 23 bp, Homo sapiens
caccacccctgctgccccactcc

SEQ ID NO: 37586 - DNA, 23 bp, Homo sapiens
aagggttgggctccaggggtcaa

SEQ ID NO: 37587 - DNA, 16 bp, Homo sapiens
ccagaacacatactgg

SEQ ID NO: 37588 - DNA, 16 bp, Homo sapiens
cgtcagggtccacagg

SEQ ID NO: 37589 - DNA, 21 bp, Homo sapiens
accatctcgacctggggctcc

SEQ ID NO: 37590 - DNA, 22 bp, Homo sapiens
tccttggggcccatgttctctc

SEQ ID NO: 37591 - DNA, 20 bp, Homo sapiens
cagggctgcctgtcgaccct

SEQ ID NO: 37592 - DNA, 22 bp, Homo sapiens
cccttcaggccttgtggtgagt

SEQ ID NO: 37593 - DNA, 24 bp, Homo sapiens
ccacttgtccaggcaaacctggag

SEQ ID NO: 37594 - DNA, 21 bp, Homo sapiens
cctccagggcctgactggacc

SEQ ID NO: 37595 - DNA, 18 bp, Homo sapiens
gtgacaatggacacagga

SEQ ID NO: 37596 - DNA, 16 bp, Homo sapiens
aggttagggtcatagg

SEQ ID NO: 37597 - DNA, 24 bp, Homo sapiens
gtgtccctacaggggccacaggga

SEQ ID NO: 37598 - DNA, 24 bp, Homo sapiens
ctctgggttgtttgcagggggagc

SEQ ID NO: 37599 - DNA, 23 bp, Homo sapiens
ccaggaagtcccacagctccagt

SEQ ID NO: 37600 - DNA, 19 bp, Homo sapiens
tctcctgcaatgaggatga

SEQ ID NO: 37601 - DNA, 23 bp, Homo sapiens
gccaaccccacccatctccctat

SEQ ID NO: 37602 - DNA, 16 bp, Homo sapiens
ccttcaagctgtgtcc

SEQ ID NO: 37603 - DNA, 24 bp, Homo sapiens
ctggaggtcctgtctctccaggct

SEQ ID NO: 37604 - DNA, 16 bp, Homo sapiens
caggaccccaaggacc

SEQ ID NO: 37605 - DNA, 19 bp, Homo sapiens
acgtggccagggctcctgg

SEQ ID NO: 37606 - DNA, 17 bp, Homo sapiens
taatccctgagccctgt

SEQ ID NO: 37607 - DNA, 20 bp, Homo sapiens
acactaccccaggcatggac

SEQ ID NO: 37608 - DNA, 17 bp, Homo sapiens
gtctggaagggctggga

SEQ ID NO: 37609 - DNA, 21 bp, Homo sapiens
acctagactcaccttcaggcc

SEQ ID NO: 37610 - DNA, 23 bp, Homo sapiens
aacagggtggtcatggagaccct

SEQ ID NO: 37611 - DNA, 20 bp, Homo sapiens
agaaaagggtcaagggcagg

SEQ ID NO: 37612 - DNA, 21 bp, Homo sapiens
agtttccttggtggggtgcgg

SEQ ID NO: 37613 - DNA, 21 bp, Homo sapiens
ctgtggccaatgcctatccca

SEQ ID NO: 37614 - DNA, 17 bp, Homo sapiens
agaaccttcacctgtct

SEQ ID NO: 37615 - DNA, 24 bp, Homo sapiens
tggtcactcaccggggcaccaggt

SEQ ID NO: 37616 - DNA, 16 bp, Homo sapiens
tctctatgtagggtct

SEQ ID NO: 37617 - DNA, 17 bp, Homo sapiens
ctgatgagggggagtta

SEQ ID NO: 37618 - DNA, 20 bp, Homo sapiens
aaaagcccccagaggttggg

SEQ ID NO: 37619 - DNA, 16 bp, Homo sapiens
gcagggcacaggatgg

SEQ ID NO: 37620 - DNA, 21 bp, Homo sapiens
gggtaggtattatctgtgact

SEQ ID NO: 37621 - DNA, 24 bp, Homo sapiens
aggggggcctcttggaccctgcag

SEQ ID NO: 37622 - DNA, 24 bp, Homo sapiens
aggcacacacagacacaggcacac

SEQ ID NO: 37623 - DNA, 19 bp, Homo sapiens
cttaaacctattctctgca

SEQ ID NO: 37624 - DNA, 20 bp, Homo sapiens
tacacacaaacacacacaca

SEQ ID NO: 37625 - DNA, 17 bp, Homo sapiens
actctgtctagggggat

SEQ ID NO: 37626 - DNA, 22 bp, Homo sapiens
gggtccggagcctggggccagg

SEQ ID NO: 37627 - DNA, 21 bp, Homo sapiens
ggctctcacatgtattgtcct

SEQ ID NO: 37628 - DNA, 20 bp, Homo sapiens
cataccacgctctcctggta

SEQ ID NO: 37629 - DNA, 16 bp, Homo sapiens
gacggcaacccggtaa

SEQ ID NO: 37630 - DNA, 23 bp, Homo sapiens
cagttccaacttcccctccaccc

SEQ ID NO: 37631 - DNA, 19 bp, Homo sapiens
ctgccttcagggtgtgcca

SEQ ID NO: 37632 - DNA, 23 bp, Homo sapiens
aggcagtacagaccccagccctg

SEQ ID NO: 37633 - DNA, 16 bp, Homo sapiens
ggtggtgtgcatatgc

SEQ ID NO: 37634 - DNA, 20 bp, Homo sapiens
tggctgttgggcaaggactt

SEQ ID NO: 37635 - DNA, 24 bp, Homo sapiens
aggagacagggtgaggcctctctc

SEQ ID NO: 37636 - DNA, 23 bp, Homo sapiens
cggtctcctttgatgcctggcac

SEQ ID NO: 37637 - DNA, 23 bp, Homo sapiens
gacttgacatctcatccccacag

SEQ ID NO: 37638 - DNA, 24 bp, Homo sapiens
cagtccctgccacgtgcccaggtg

SEQ ID NO: 37639 - DNA, 19 bp, Homo sapiens
gctaaggtcagtgtgtgga

SEQ ID NO: 37640 - DNA, 17 bp, Homo sapiens
tctatggaagggtggag

SEQ ID NO: 37641 - DNA, 20 bp, Homo sapiens
ctgtggatgagccaggtcct

SEQ ID NO: 37642 - DNA, 23 bp, Homo sapiens
accattgctgcccggctccccct

SEQ ID NO: 37643 - DNA, 16 bp, Homo sapiens
actcccccatgcctct

SEQ ID NO: 37644 - DNA, 22 bp, Homo sapiens
gggtggccccgagctgattcca

SEQ ID NO: 37645 - DNA, 16 bp, Homo sapiens
ccataaccctggaatt

SEQ ID NO: 37646 - DNA, 22 bp, Homo sapiens
ctgttctccagagagtccagga

SEQ ID NO: 37647 - DNA, 20 bp, Homo sapiens
gactccctggaacccctggg

SEQ ID NO: 37648 - DNA, 24 bp, Homo sapiens
tcacagagggttatagggtcagaa

SEQ ID NO: 37649 - DNA, 16 bp, Homo sapiens
ctggggctgccacccc

SEQ ID NO: 37650 - DNA, 19 bp, Homo sapiens
taagggtggcttcctggtc

SEQ ID NO: 37651 - DNA, 24 bp, Homo sapiens
agagaaaggagaacgtggagaaca

SEQ ID NO: 37652 - DNA, 20 bp, Homo sapiens
ttggggccagggggtccggg

SEQ ID NO: 37653 - DNA, 21 bp, Homo sapiens
cccccatgggcttggccctca

SEQ ID NO: 37654 - DNA, 16 bp, Homo sapiens
ctgcaggaaacaagaa

SEQ ID NO: 37655 - DNA, 22 bp, Homo sapiens
caggagagagggtgaggctggg

SEQ ID NO: 37656 - DNA, 24 bp, Homo sapiens
cctgccccacgaagcccatcgcag

SEQ ID NO: 37657 - DNA, 20 bp, Homo sapiens
cctggtattcccgggctccc

SEQ ID NO: 37658 - DNA, 24 bp, Homo sapiens
ctccctgaaatgcaaatagcgggt

SEQ ID NO: 37659 - DNA, 23 bp, Homo sapiens
ctggcccttggggagaggggccc

SEQ ID NO: 37660 - DNA, 22 bp, Homo sapiens
ctcttccctcactctcctggcc

SEQ ID NO: 37661 - DNA, 23 bp, Homo sapiens
gctttcctggagaacgcgggctg

SEQ ID NO: 37662 - DNA, 23 bp, Homo sapiens
ctcccacacccccagccctgcct

SEQ ID NO: 37663 - DNA, 20 bp, Homo sapiens
ggtgtagctgtacagccacc

SEQ ID NO: 37664 - DNA, 23 bp, Homo sapiens
caaggccggaaggcccggggggg

SEQ ID NO: 37665 - DNA, 24 bp, Homo sapiens
aacagggccccccaggcaaggagg

SEQ ID NO: 37666 - DNA, 24 bp, Homo sapiens
gccagggtctccacggtcgccctt

SEQ ID NO: 37667 - DNA, 17 bp, Homo sapiens
tggtagcttcctgcctg

SEQ ID NO: 37668 - DNA, 21 bp, Homo sapiens
caggagtggaagagagaatgc

SEQ ID NO: 37669 - DNA, 18 bp, Homo sapiens
ctgtccctcaggcatctg

SEQ ID NO: 37670 - DNA, 24 bp, Homo sapiens
cacaacccactgagccacttctgc

SEQ ID NO: 37671 - DNA, 23 bp, Homo sapiens
gggcccttggggctagtggtgcc

SEQ ID NO: 37672 - DNA, 22 bp, Homo sapiens
cccttggggcctcgacgccgtt

SEQ ID NO: 37673 - DNA, 18 bp, Homo sapiens
ggaaactgctggcatcaa

SEQ ID NO: 37674 - DNA, 18 bp, Homo sapiens
cacgatctcccgcagggc

SEQ ID NO: 37675 - DNA, 19 bp, Homo sapiens
ttctctgtcatgggcagcc

SEQ ID NO: 37676 - DNA, 24 bp, Homo sapiens
gggtgcgtcgccgcagcccctatg

SEQ ID NO: 37677 - DNA, 17 bp, Homo sapiens
tagggaaaagggtgtga

SEQ ID NO: 37678 - DNA, 19 bp, Homo sapiens
cagcccctaaacaacccac

SEQ ID NO: 37679 - DNA, 22 bp, Homo sapiens
aaggggctcccaggagtctcca

SEQ ID NO: 37680 - DNA, 20 bp, Homo sapiens
cactgcccaagttcccttga

SEQ ID NO: 37681 - DNA, 23 bp, Homo sapiens
atctctccagggcctccctggag

SEQ ID NO: 37682 - DNA, 21 bp, Homo sapiens
gcacagaacctatggagcctc

SEQ ID NO: 37683 - DNA, 22 bp, Homo sapiens
tagccacagcacccacatgtgc

SEQ ID NO: 37684 - DNA, 22 bp, Homo sapiens
aatgggcatgcaaaacagagtc

SEQ ID NO: 37685 - DNA, 22 bp, Homo sapiens
gagactggatccaaaggggagc

SEQ ID NO: 37686 - DNA, 16 bp, Homo sapiens
ctcgcaggccacgctc

SEQ ID NO: 37687 - DNA, 20 bp, Homo sapiens
gaccaggctgggggccattt

SEQ ID NO: 37688 - DNA, 24 bp, Homo sapiens
ggaaccagcctatgggtgtgcatg

SEQ ID NO: 37689 - DNA, 23 bp, Homo sapiens
gtgtcccaggaggcacgggcccc

SEQ ID NO: 37690 - DNA, 20 bp, Homo sapiens
aaaaggtgggggcctcacct

SEQ ID NO: 37691 - DNA, 22 bp, Homo sapiens
ctgggaagccatgggcctttgt

SEQ ID NO: 37692 - DNA, 19 bp, Homo sapiens
aagaatgaccaggtgggga

SEQ ID NO: 37693 - DNA, 23 bp, Homo sapiens
gggtcattctgggacttcagagc

SEQ ID NO: 37694 - DNA, 24 bp, Homo sapiens
ctacccaacatccgcactcacctt

SEQ ID NO: 37695 - DNA, 23 bp, Homo sapiens
ccttggaccccaggggcctccag

SEQ ID NO: 37696 - DNA, 24 bp, Homo sapiens
gatacggcagaacacaaaggggtc

SEQ ID NO: 37697 - DNA, 22 bp, Homo sapiens
tggctgcatccttcacagggtc

SEQ ID NO: 37698 - DNA, 16 bp, Homo sapiens
ggcttctaatgctctg

SEQ ID NO: 37699 - DNA, 16 bp, Homo sapiens
cctgggggaatatgac

SEQ ID NO: 37700 - DNA, 20 bp, Homo sapiens
gagggcccactggccctggg

SEQ ID NO: 37701 - DNA, 24 bp, Homo sapiens
agattcaggcgcctctgggagaga

SEQ ID NO: 37702 - DNA, 20 bp, Homo sapiens
cacgctcacccttggggcca

SEQ ID NO: 37703 - DNA, 23 bp, Homo sapiens
tctctggtctctgcttggagcca

SEQ ID NO: 37704 - DNA, 23 bp, Homo sapiens
agacctcagaaaagagtggagtc

SEQ ID NO: 37705 - DNA, 24 bp, Homo sapiens
gggagaacctggggaccctggaga

SEQ ID NO: 37706 - DNA, 24 bp, Homo sapiens
ggttgcagaaaactccaatactca

SEQ ID NO: 37707 - DNA, 21 bp, Homo sapiens
agtgtcttgcagccagacacc

SEQ ID NO: 37708 - DNA, 19 bp, Homo sapiens
aggaagacaaggatgcttc

SEQ ID NO: 37709 - DNA, 18 bp, Homo sapiens
atggagctacaggcacag

SEQ ID NO: 37710 - DNA, 24 bp, Homo sapiens
ggggactttaccttcctcccgtct

SEQ ID NO: 37711 - DNA, 16 bp, Homo sapiens
caggcgaggatggcaa

SEQ ID NO: 37712 - DNA, 23 bp, Homo sapiens
ctgtatgtctgggccaggatgca

SEQ ID NO: 37713 - DNA, 17 bp, Homo sapiens
ttactaccctcacccga

SEQ ID NO: 37714 - DNA, 17 bp, Homo sapiens
tgtgtaggtgtgctggc

SEQ ID NO: 37715 - DNA, 23 bp, Homo sapiens
ggcccctctggtccccctggatt

SEQ ID NO: 37716 - DNA, 19 bp, Homo sapiens
cacgttttttccattcagg

SEQ ID NO: 37717 - DNA, 20 bp, Homo sapiens
cttaacaaagactttttcca

SEQ ID NO: 37718 - DNA, 21 bp, Homo sapiens
agatcactggttggatgtcgg

SEQ ID NO: 37719 - DNA, 21 bp, Homo sapiens
ttttggggtcctcttagtcca

SEQ ID NO: 37720 - DNA, 21 bp, Homo sapiens
gtctggtctcaccggtaatcc

SEQ ID NO: 37721 - DNA, 23 bp, Homo sapiens
tgtgcctgagggatctcaatggg

SEQ ID NO: 37722 - DNA, 17 bp, Homo sapiens
cagggtgctgcaggcaa

SEQ ID NO: 37723 - DNA, 18 bp, Homo sapiens
tcccaaaggcaaggctga

SEQ ID NO: 37724 - DNA, 16 bp, Homo sapiens
ctcacagggactagag

SEQ ID NO: 37725 - DNA, 23 bp, Homo sapiens
tctggttggagcttacgcagccc

SEQ ID NO: 37726 - DNA, 23 bp, Homo sapiens
gttgtctgtgtcttctcccagag

SEQ ID NO: 37727 - DNA, 22 bp, Homo sapiens
gtctctccctgggtccccagct

SEQ ID NO: 37728 - DNA, 23 bp, Homo sapiens
caagaacatgccccacccaggca

SEQ ID NO: 37729 - DNA, 19 bp, Homo sapiens
tggatggccggagcggact

SEQ ID NO: 37730 - DNA, 16 bp, Homo sapiens
gtcaaggccaagacca

SEQ ID NO: 37731 - DNA, 20 bp, Homo sapiens
ctcagccttggtggcctctt

SEQ ID NO: 37732 - DNA, 23 bp, Homo sapiens
taggggaaggggacaaccaggca

SEQ ID NO: 37733 - DNA, 16 bp, Homo sapiens
aggagaaaaggtgaga

SEQ ID NO: 37734 - DNA, 23 bp, Homo sapiens
cggctcctggtttcccatccagt

SEQ ID NO: 37735 - DNA, 24 bp, Homo sapiens
tcttaccctcacctcttatctgac

SEQ ID NO: 37736 - DNA, 20 bp, Homo sapiens
cctgtggaaaatagagtggt

SEQ ID NO: 37737 - DNA, 16 bp, Homo sapiens
gacccccaggcccaca

SEQ ID NO: 37738 - DNA, 19 bp, Homo sapiens
ctgagaaacccccacaccc

SEQ ID NO: 37739 - DNA, 16 bp, Homo sapiens
gagggcctgctctgat

SEQ ID NO: 37740 - DNA, 16 bp, Homo sapiens
tggagggaacagggtc

SEQ ID NO: 37741 - DNA, 18 bp, Homo sapiens
gatcctggcctccctgga

SEQ ID NO: 37742 - DNA, 24 bp, Homo sapiens
cagacggggcaaagtgcatcactc

SEQ ID NO: 37743 - DNA, 23 bp, Homo sapiens
tatctctgccacagggagagcct

SEQ ID NO: 37744 - DNA, 23 bp, Homo sapiens
aggataggggaggaagaaatcag

SEQ ID NO: 37745 - DNA, 24 bp, Homo sapiens
ctcccagcaggttctaccttgggc

SEQ ID NO: 37746 - DNA, 21 bp, Homo sapiens
tcacactcaccctttccccag

SEQ ID NO: 37747 - DNA, 23 bp, Homo sapiens
ctggagccagagagaaggtatta

SEQ ID NO: 37748 - DNA, 23 bp, Homo sapiens
gaggaccctcttgtccgcggtcc

SEQ ID NO: 37749 - DNA, 16 bp, Homo sapiens
ccttgttgagccattc

SEQ ID NO: 37750 - DNA, 22 bp, Homo sapiens
ccttgaagccaagccatgccca

SEQ ID NO: 37751 - DNA, 24 bp, Homo sapiens
ctgaaacctccgcggatccctgga

SEQ ID NO: 37752 - DNA, 22 bp, Homo sapiens
taccctccacccacagacccta

SEQ ID NO: 37753 - DNA, 17 bp, Homo sapiens
ctccacatcatgtcccc

SEQ ID NO: 37754 - DNA, 16 bp, Homo sapiens
tctgtgaggggctcca

SEQ ID NO: 37755 - DNA, 16 bp, Homo sapiens
tgagggctcctattga

SEQ ID NO: 37756 - DNA, 19 bp, Homo sapiens
gagttagtggaaggaatga

SEQ ID NO: 37757 - DNA, 18 bp, Homo sapiens
ttcggggaacttgggggc

SEQ ID NO: 37758 - DNA, 24 bp, Homo sapiens
gaacaatgacagaggaccagaccc

SEQ ID NO: 37759 - DNA, 19 bp, Homo sapiens
gaggtccaggtgggaagca

SEQ ID NO: 37760 - DNA, 23 bp, Homo sapiens
ccctggatcatctggacccaagg

SEQ ID NO: 37761 - DNA, 23 bp, Homo sapiens
cagcaggcatgggtggccatcca

SEQ ID NO: 37762 - DNA, 17 bp, Homo sapiens
ctcccaaactgctgcct

SEQ ID NO: 37763 - DNA, 20 bp, Homo sapiens
ctggcagcagcgccagggga

SEQ ID NO: 37764 - DNA, 17 bp, Homo sapiens
cacacacgcatctgaag

SEQ ID NO: 37765 - DNA, 20 bp, Homo sapiens
caccggctccccacggtcac

SEQ ID NO: 37766 - DNA, 17 bp, Homo sapiens
gatcctaccccccaacc

SEQ ID NO: 37767 - DNA, 22 bp, Homo sapiens
gactcatgggaatgttggtagc

SEQ ID NO: 37768 - DNA, 23 bp, Homo sapiens
gagttcgggggcctgtgggtgaa

SEQ ID NO: 37769 - DNA, 23 bp, Homo sapiens
agattgggagggtttagcattac

SEQ ID NO: 37770 - DNA, 18 bp, Homo sapiens
cctgcaaaatattgggag

SEQ ID NO: 37771 - DNA, 18 bp, Homo sapiens
gttaaggttggggtgagg

SEQ ID NO: 37772 - DNA, 20 bp, Homo sapiens
gatgtggattttggagtaat

SEQ ID NO: 37773 - DNA, 21 bp, Homo sapiens
ggatctccctggtctcccttt

SEQ ID NO: 37774 - DNA, 16 bp, Homo sapiens
aggggggtaaggggtg

SEQ ID NO: 37775 - DNA, 24 bp, Homo sapiens
tacactgccccaggttccccatta

SEQ ID NO: 37776 - DNA, 17 bp, Homo sapiens
tatcaccagggtgaccc

SEQ ID NO: 37777 - DNA, 24 bp, Homo sapiens
ctccctgcagggactcccatcacc

SEQ ID NO: 37778 - DNA, 16 bp, Homo sapiens
tcccctctccctgagt

SEQ ID NO: 37779 - DNA, 24 bp, Homo sapiens
catgcccacctcccatcacccctg

SEQ ID NO: 37780 - DNA, 22 bp, Homo sapiens
ctggtgctccaccagttcatcc

SEQ ID NO: 37781 - DNA, 17 bp, Homo sapiens
cttttccaggcaaaccc

SEQ ID NO: 37782 - DNA, 19 bp, Homo sapiens
ggcagtcaggatctaactc

SEQ ID NO: 37783 - DNA, 24 bp, Homo sapiens
ccagggctgactctcatgtttcac

SEQ ID NO: 37784 - DNA, 21 bp, Homo sapiens
gacaggaggcagggagtggat

SEQ ID NO: 37785 - DNA, 16 bp, Homo sapiens
ggcgggtaagggagta

SEQ ID NO: 37786 - DNA, 19 bp, Homo sapiens
gggtaaaggatcagaaacc

SEQ ID NO: 37787 - DNA, 18 bp, Homo sapiens
ctggccccccaggacctg

SEQ ID NO: 37788 - DNA, 22 bp, Homo sapiens
tcacctttctctccaacttcac

SEQ ID NO: 37789 - DNA, 20 bp, Homo sapiens
cttgcctcctccacagggtg

SEQ ID NO: 37790 - DNA, 23 bp, Homo sapiens
cccatgatgctggcaacagccct

SEQ ID NO: 37791 - DNA, 24 bp, Homo sapiens
caacctcaaggcttctggggtccc

SEQ ID NO: 37792 - DNA, 24 bp, Homo sapiens
ctcttacatctcgtcctcgggggc

SEQ ID NO: 37793 - DNA, 17 bp, Homo sapiens
gccttactggcagagca

SEQ ID NO: 37794 - DNA, 23 bp, Homo sapiens
tccaggaggccctgagtcaccct

SEQ ID NO: 37795 - DNA, 24 bp, Homo sapiens
cagagggagatgaggtggtgggac

SEQ ID NO: 37796 - DNA, 16 bp, Homo sapiens
agcaagcagttctcaa

SEQ ID NO: 37797 - DNA, 22 bp, Homo sapiens
ggccccaagggagaccctggag

SEQ ID NO: 37798 - DNA, 23 bp, Homo sapiens
ggtactcactgggggtcctgctc

SEQ ID NO: 37799 - DNA, 19 bp, Homo sapiens
tgacttcttatccttccat

SEQ ID NO: 37800 - DNA, 17 bp, Homo sapiens
aggacttagtcagggtc

SEQ ID NO: 37801 - DNA, 18 bp, Homo sapiens
aggggaacgggtaagtga

SEQ ID NO: 37802 - DNA, 24 bp, Homo sapiens
cattcccacattgattcacccggt

SEQ ID NO: 37803 - DNA, 23 bp, Homo sapiens
gatggtctttgtcacctccaggg

SEQ ID NO: 37804 - DNA, 22 bp, Homo sapiens
aaccaagccgggtgggccctgt

SEQ ID NO: 37805 - DNA, 16 bp, Homo sapiens
gggtcacaggacttgc

SEQ ID NO: 37806 - DNA, 19 bp, Homo sapiens
cctaaacacttcgcttcac

SEQ ID NO: 37807 - DNA, 16 bp, Homo sapiens
gcaaggggaggtttct

SEQ ID NO: 37808 - DNA, 21 bp, Homo sapiens
gcccagcgggccccacatctc

SEQ ID NO: 37809 - DNA, 18 bp, Homo sapiens
cctgtttgttttcaggga

SEQ ID NO: 37810 - DNA, 21 bp, Homo sapiens
ttaaccccctgacccagcaag

SEQ ID NO: 37811 - DNA, 18 bp, Homo sapiens
gacctccattccaatgaa

SEQ ID NO: 37812 - DNA, 18 bp, Homo sapiens
gacctagacctcaaccct

SEQ ID NO: 37813 - DNA, 16 bp, Homo sapiens
cggtgactctgtgact

SEQ ID NO: 37814 - DNA, 19 bp, Homo sapiens
ctttgggtccagcaacagc

SEQ ID NO: 37815 - DNA, 24 bp, Homo sapiens
atagccaagagtctgggggcaggt

SEQ ID NO: 37816 - DNA, 22 bp, Homo sapiens
ctgctcctatcctctctccaca

SEQ ID NO: 37817 - DNA, 16 bp, Homo sapiens
ccagcactgtggaatc

SEQ ID NO: 37818 - DNA, 16 bp, Homo sapiens
tggcagatgggacact

SEQ ID NO: 37819 - DNA, 23 bp, Homo sapiens
ctgctcaagggctgtgctgtgct

SEQ ID NO: 37820 - DNA, 21 bp, Homo sapiens
cactggccgccaaggagagaa

SEQ ID NO: 37821 - DNA, 20 bp, Homo sapiens
cagggcgaccaggctccccc

SEQ ID NO: 37822 - DNA, 16 bp, Homo sapiens
ctttcccttcccctcc

SEQ ID NO: 37823 - DNA, 22 bp, Homo sapiens
cacctaggagcccaaaatccca

SEQ ID NO: 37824 - DNA, 17 bp, Homo sapiens
cctgaagtgagtctgtg

SEQ ID NO: 37825 - DNA, 22 bp, Homo sapiens
cccagccgaggacccaccttct

SEQ ID NO: 37826 - DNA, 18 bp, Homo sapiens
cacagctcttcccttcct

SEQ ID NO: 37827 - DNA, 23 bp, Homo sapiens
tgtagagaaagtgtgagcccagg

SEQ ID NO: 37828 - DNA, 16 bp, Homo sapiens
ccaccccagcctctag

SEQ ID NO: 37829 - DNA, 18 bp, Homo sapiens
tggtcccaccacagtcac

SEQ ID NO: 37830 - DNA, 20 bp, Homo sapiens
ttctcctgccaagtcttacc

SEQ ID NO: 37831 - DNA, 16 bp, Homo sapiens
ccctggcagcccctgg

SEQ ID NO: 37832 - DNA, 24 bp, Homo sapiens
aacgtggacccccaggcccagcgg

SEQ ID NO: 37833 - DNA, 20 bp, Homo sapiens
agcctgtatcagcagggata

SEQ ID NO: 37834 - DNA, 23 bp, Homo sapiens
agggccctggaggatctgggccc

SEQ ID NO: 37835 - DNA, 17 bp, Homo sapiens
caagaagtcagaaccag

SEQ ID NO: 37836 - DNA, 19 bp, Homo sapiens
tttccagggcccctgggtg

SEQ ID NO: 37837 - DNA, 19 bp, Homo sapiens
cagtgggtttacccgggat

SEQ ID NO: 37838 - DNA, 21 bp, Homo sapiens
ccaccaaccctctctctctct

SEQ ID NO: 37839 - DNA, 24 bp, Homo sapiens
tggaaaagaagaggtcagagctga

SEQ ID NO: 37840 - DNA, 23 bp, Homo sapiens
gttttggagggggtggttggagt

SEQ ID NO: 37841 - DNA, 20 bp, Homo sapiens
acttaccttctctccagcct

SEQ ID NO: 37842 - DNA, 23 bp, Homo sapiens
ccatggtgttaggggaggctgga

SEQ ID NO: 37843 - DNA, 24 bp, Homo sapiens
caaaccccagacaaggggtcccaa

SEQ ID NO: 37844 - DNA, 21 bp, Homo sapiens
atctctgaacccccaaattca

SEQ ID NO: 37845 - DNA, 21 bp, Homo sapiens
cttatctccttatcttccagc

SEQ ID NO: 37846 - DNA, 17 bp, Homo sapiens
ctccagcccctacctca

SEQ ID NO: 37847 - DNA, 21 bp, Homo sapiens
ctcacacctgaatcccccaac

SEQ ID NO: 37848 - DNA, 22 bp, Homo sapiens
gacaacctgggtctccgggtga

SEQ ID NO: 37849 - DNA, 21 bp, Homo sapiens
cgtgggccctggaagggatga

SEQ ID NO: 37850 - DNA, 16 bp, Homo sapiens
gtgtgtttctccttca

SEQ ID NO: 37851 - DNA, 24 bp, Homo sapiens
ggatggagcagtggttgatgattg

SEQ ID NO: 37852 - DNA, 21 bp, Homo sapiens
gatgatgtcccagttctgggg

SEQ ID NO: 37853 - DNA, 17 bp, Homo sapiens
ctccactcacctgctca

SEQ ID NO: 37854 - DNA, 16 bp, Homo sapiens
aaggccccgttggccc

SEQ ID NO: 37855 - DNA, 16 bp, Homo sapiens
agagtcaccctgaagg

SEQ ID NO: 37856 - DNA, 22 bp, Homo sapiens
cttcatagttcttggctcatat

SEQ ID NO: 37857 - DNA, 16 bp, Homo sapiens
cagcacgcagcctccc

SEQ ID NO: 37858 - DNA, 20 bp, Homo sapiens
tctgctgggggccctgctca

SEQ ID NO: 37859 - DNA, 24 bp, Homo sapiens
cctactttttctcctttctttcca

SEQ ID NO: 37860 - DNA, 19 bp, Homo sapiens
caggtgaaggtggcattgc

SEQ ID NO: 37861 - DNA, 20 bp, Homo sapiens
accctaggaagaagtgagta

SEQ ID NO: 37862 - DNA, 18 bp, Homo sapiens
agtctgattcccctgttc

SEQ ID NO: 37863 - DNA, 19 bp, Homo sapiens
caggagagacccacacccc

SEQ ID NO: 37864 - DNA, 24 bp, Homo sapiens
tctagggtgacaaaggcgatcgtg

SEQ ID NO: 37865 - DNA, 22 bp, Homo sapiens
caccggcagcccaggctcccca

SEQ ID NO: 37866 - DNA, 16 bp, Homo sapiens
ggtatctttgggagtg

SEQ ID NO: 37867 - DNA, 24 bp, Homo sapiens
tgggagagaacagcaggtcaggga

SEQ ID NO: 37868 - DNA, 16 bp, Homo sapiens
cctcagttctcccaaa

SEQ ID NO: 37869 - DNA, 22 bp, Homo sapiens
acaacctgtccctcacttaccc

SEQ ID NO: 37870 - DNA, 23 bp, Homo sapiens
tggggtccaattggatttcaagg

SEQ ID NO: 37871 - DNA, 20 bp, Homo sapiens
ggaccactgggggacccagg

SEQ ID NO: 37872 - DNA, 16 bp, Homo sapiens
agggtcacaagggcca

SEQ ID NO: 37873 - DNA, 22 bp, Homo sapiens
gaggtctgtggggttgcacctt

SEQ ID NO: 37874 - DNA, 23 bp, Homo sapiens
accaggtctctgcatcacatggc

SEQ ID NO: 37875 - DNA, 18 bp, Homo sapiens
ggtatgtggaggcaagtg

SEQ ID NO: 37876 - DNA, 24 bp, Homo sapiens
aagccctggggggccacggggtcc

SEQ ID NO: 37877 - DNA, 16 bp, Homo sapiens
atcggaggtgaaggac

SEQ ID NO: 37878 - DNA, 20 bp, Homo sapiens
ggaggagacaaagtataagg

SEQ ID NO: 37879 - DNA, 21 bp, Homo sapiens
cccatagcctgaatcctgccc

SEQ ID NO: 37880 - DNA, 18 bp, Homo sapiens
ccccccactacacatcac

SEQ ID NO: 37881 - DNA, 16 bp, Homo sapiens
taaggcgcgaatagga

SEQ ID NO: 37882 - DNA, 24 bp, Homo sapiens
cagggtcccctttccgcccaggaa

SEQ ID NO: 37883 - DNA, 20 bp, Homo sapiens
ggaggcggccgggatgtccc

SEQ ID NO: 37884 - DNA, 23 bp, Homo sapiens
tgtaaggacagagagcagtgggc

SEQ ID NO: 37885 - DNA, 16 bp, Homo sapiens
tcagggagagcgagga

SEQ ID NO: 37886 - DNA, 22 bp, Homo sapiens
ctagacatgtccagctattcct

SEQ ID NO: 37887 - DNA, 22 bp, Homo sapiens
gtggtggtgcagtgcccacgtt

SEQ ID NO: 37888 - DNA, 21 bp, Homo sapiens
gtcctgctcctccctgggaca

SEQ ID NO: 37889 - DNA, 18 bp, Homo sapiens
tcccttctttgctctcta

SEQ ID NO: 37890 - DNA, 17 bp, Homo sapiens
ttgggcctcgaggtcct

SEQ ID NO: 37891 - DNA, 16 bp, Homo sapiens
atttgcagggctctcc

SEQ ID NO: 37892 - DNA, 24 bp, Homo sapiens
gtggtgcttgggctcaggcgaatg

SEQ ID NO: 37893 - DNA, 23 bp, Homo sapiens
tcctgcaggtcagggtgggcgct

SEQ ID NO: 37894 - DNA, 22 bp, Homo sapiens
ctgtggaagaaccctgggaaga

SEQ ID NO: 37895 - DNA, 16 bp, Homo sapiens
gccgggaatcctggga

SEQ ID NO: 37896 - DNA, 24 bp, Homo sapiens
cacgagggccaggcaaccctggag

SEQ ID NO: 37897 - DNA, 19 bp, Homo sapiens
gacctcttcacctcctcag

SEQ ID NO: 37898 - DNA, 24 bp, Homo sapiens
gtcggagccaccccacccactcag

SEQ ID NO: 37899 - DNA, 21 bp, Homo sapiens
gttgatggggtgaggcccctc

SEQ ID NO: 37900 - DNA, 19 bp, Homo sapiens
caggggctccaggggtccc

SEQ ID NO: 37901 - DNA, 24 bp, Homo sapiens
gccatttctctgcctcactgttcc

SEQ ID NO: 37902 - DNA, 24 bp, Homo sapiens
catctgctccagggaagccctgag

SEQ ID NO: 37903 - DNA, 24 bp, Homo sapiens
ttcagagtgtcccccaaagtctct

SEQ ID NO: 37904 - DNA, 17 bp, Homo sapiens
gaccggtgctcccggcc

SEQ ID NO: 37905 - DNA, 20 bp, Homo sapiens
cgatgattctaactctgctt

SEQ ID NO: 37906 - DNA, 16 bp, Homo sapiens
cacatctgtccctgca

SEQ ID NO: 37907 - DNA, 24 bp, Homo sapiens
ggagtgcctcagagaaacctcgat

SEQ ID NO: 37908 - DNA, 21 bp, Homo sapiens
ttcctagggcctgagaggaca

SEQ ID NO: 37909 - DNA, 22 bp, Homo sapiens
cttccagggggcccctgggggc

SEQ ID NO: 37910 - DNA, 16 bp, Homo sapiens
tgggttgagtgtcagt

SEQ ID NO: 37911 - DNA, 24 bp, Homo sapiens
aggtggggataagccagtcagggt

SEQ ID NO: 37912 - DNA, 17 bp, Homo sapiens
cagaagggggaacctgg

SEQ ID NO: 37913 - DNA, 19 bp, Homo sapiens
cagggtcgccaggaggccc

SEQ ID NO: 37914 - DNA, 16 bp, Homo sapiens
gtgaacagaggctgca

SEQ ID NO: 37915 - DNA, 19 bp, Homo sapiens
tgtgctgccaacctctcct

SEQ ID NO: 37916 - DNA, 18 bp, Homo sapiens
agccccggccagagccct

SEQ ID NO: 37917 - DNA, 18 bp, Homo sapiens
ggcactcaccatctctcc

SEQ ID NO: 37918 - DNA, 16 bp, Homo sapiens
atataaggggtctggg

SEQ ID NO: 37919 - DNA, 16 bp, Homo sapiens
cagagtggctagcccc

SEQ ID NO: 37920 - DNA, 18 bp, Homo sapiens
tgtcaggcatccttcact

SEQ ID NO: 37921 - DNA, 24 bp, Homo sapiens
tcttacctttggacaatacactgg

SEQ ID NO: 37922 - DNA, 22 bp, Homo sapiens
gaccttcttcgccgtggatgat

SEQ ID NO: 37923 - DNA, 21 bp, Homo sapiens
tgaggttgaacatttctacca

SEQ ID NO: 37924 - DNA, 16 bp, Homo sapiens
gagcggacccagagca

SEQ ID NO: 37925 - DNA, 16 bp, Homo sapiens
gcctcttccaaacctg

SEQ ID NO: 37926 - DNA, 23 bp, Homo sapiens
aaaggctatcatgcagccactgg

SEQ ID NO: 37927 - DNA, 23 bp, Homo sapiens
ccactgactgcctggtccaggct

SEQ ID NO: 37928 - DNA, 19 bp, Homo sapiens
caggcttctggtaaggagt

SEQ ID NO: 37929 - DNA, 22 bp, Homo sapiens
atacccggcgccaagcgacgca

SEQ ID NO: 37930 - DNA, 16 bp, Homo sapiens
gttctgctagtggatg

SEQ ID NO: 37931 - DNA, 24 bp, Homo sapiens
ccacattaagccctaaggtggggt

SEQ ID NO: 37932 - DNA, 16 bp, Homo sapiens
atacatgttggcacca

SEQ ID NO: 37933 - DNA, 21 bp, Homo sapiens
cagaccccttccccatcagcc

SEQ ID NO: 37934 - DNA, 20 bp, Homo sapiens
cttggtgccccagggttctg

SEQ ID NO: 37935 - DNA, 19 bp, Homo sapiens
ctgaatatgtcacctctca

SEQ ID NO: 37936 - DNA, 16 bp, Homo sapiens
aacaacctgggtgagg

SEQ ID NO: 37937 - DNA, 17 bp, Homo sapiens
cccaggagcatctggtg

SEQ ID NO: 37938 - DNA, 18 bp, Homo sapiens
cccatgaccttggcatta

SEQ ID NO: 37939 - DNA, 16 bp, Homo sapiens
aggaaggacatgtcag

SEQ ID NO: 37940 - DNA, 20 bp, Homo sapiens
cttccaccccaggttggcct

SEQ ID NO: 37941 - DNA, 23 bp, Homo sapiens
agtccatgcctgctgcagtcctc

SEQ ID NO: 37942 - DNA, 22 bp, Homo sapiens
ctccaggctctgtgcaccccca

SEQ ID NO: 37943 - DNA, 22 bp, Homo sapiens
atgtcacggatcctttgcaaga

SEQ ID NO: 37944 - DNA, 23 bp, Homo sapiens
ctgccatcactgctgactcccta

SEQ ID NO: 37945 - DNA, 23 bp, Homo sapiens
gggccgatgactgtaagacagca

SEQ ID NO: 37946 - DNA, 21 bp, Homo sapiens
ttgggcctcttgggccacagg

SEQ ID NO: 37947 - DNA, 24 bp, Homo sapiens
gtaggtgaggtctggagcctgtga

SEQ ID NO: 37948 - DNA, 20 bp, Homo sapiens
agacaatgctcaccgtgcgg

SEQ ID NO: 37949 - DNA, 21 bp, Homo sapiens
aggagatggtaactggtatgg

SEQ ID NO: 37950 - DNA, 17 bp, Homo sapiens
cttcctacagtgtgccc

SEQ ID NO: 37951 - DNA, 24 bp, Homo sapiens
gctgccccagggccaaacctgaac

SEQ ID NO: 37952 - DNA, 16 bp, Homo sapiens
agtgggaagggcagaa

SEQ ID NO: 37953 - DNA, 22 bp, Homo sapiens
caggaccctcctcgtagcctcc

SEQ ID NO: 37954 - DNA, 19 bp, Homo sapiens
ctggatggtgtgcggggtc

SEQ ID NO: 37955 - DNA, 21 bp, Homo sapiens
acaccacatccgccaggccac

SEQ ID NO: 37956 - DNA, 16 bp, Homo sapiens
ctcccagcgggtgaca

SEQ ID NO: 37957 - DNA, 23 bp, Homo sapiens
cgggcagcccacccagacacacc

SEQ ID NO: 37958 - DNA, 16 bp, Homo sapiens
tcaagttctgtctcct

SEQ ID NO: 37959 - DNA, 23 bp, Homo sapiens
gtctgtgtgacagatgcctcagg

SEQ ID NO: 37960 - DNA, 19 bp, Homo sapiens
gtgagggggaggccaggat

SEQ ID NO: 37961 - DNA, 24 bp, Homo sapiens
atgtaagagacgccaggctctagc

SEQ ID NO: 37962 - DNA, 17 bp, Homo sapiens
ccagggcatccagctac

SEQ ID NO: 37963 - DNA, 21 bp, Homo sapiens
ctgcggggacccaggcacttc

SEQ ID NO: 37964 - DNA, 16 bp, Homo sapiens
aagcattgaactacgt

SEQ ID NO: 37965 - DNA, 21 bp, Homo sapiens
cccaactgccagcccacccaa

SEQ ID NO: 37966 - DNA, 24 bp, Homo sapiens
tgggttctcaggactcagcctctg

SEQ ID NO: 37967 - DNA, 21 bp, Homo sapiens
tggccgccaggataggatgta

SEQ ID NO: 37968 - DNA, 21 bp, Homo sapiens
catgatgcttcaataagacaa

SEQ ID NO: 37969 - DNA, 22 bp, Homo sapiens
agtcgatcgaggtgtccaccac

SEQ ID NO: 37970 - DNA, 17 bp, Homo sapiens
ctcctcctgtaccccta

SEQ ID NO: 37971 - DNA, 16 bp, Homo sapiens
gctggagaagggccct

SEQ ID NO: 37972 - DNA, 17 bp, Homo sapiens
gtcagagggtgaggggt

SEQ ID NO: 37973 - DNA, 22 bp, Homo sapiens
agctatcacctggacgggctgg

SEQ ID NO: 37974 - DNA, 24 bp, Homo sapiens
aggaagtcagggtgggtcatcagc

SEQ ID NO: 37975 - DNA, 16 bp, Homo sapiens
cacgcctgccccaggt

SEQ ID NO: 37976 - DNA, 19 bp, Homo sapiens
cgcgcagtcacctctgcag

SEQ ID NO: 37977 - DNA, 22 bp, Homo sapiens
gccagtgaagtgggcaggccct

SEQ ID NO: 37978 - DNA, 23 bp, Homo sapiens
cacgcggtactgtgtcgctggct

SEQ ID NO: 37979 - DNA, 23 bp, Homo sapiens
ggcagggtcagtgaggatgagga

SEQ ID NO: 37980 - DNA, 22 bp, Homo sapiens
gacccgggactgttcctggcca

SEQ ID NO: 37981 - DNA, 16 bp, Homo sapiens
cgcagggcttccttct

SEQ ID NO: 37982 - DNA, 24 bp, Homo sapiens
tactgtcacggatcccgcagaccc

SEQ ID NO: 37983 - DNA, 23 bp, Homo sapiens
cctggggacgcttcacgtggtgc

SEQ ID NO: 37984 - DNA, 18 bp, Homo sapiens
gtctgccacagccctgcc

SEQ ID NO: 37985 - DNA, 20 bp, Homo sapiens
cagagcctccctgattcctg

SEQ ID NO: 37986 - DNA, 24 bp, Homo sapiens
acctctcaccctcaggttgccagt

SEQ ID NO: 37987 - DNA, 24 bp, Homo sapiens
gtctgagaggctgggcggggtgcg

SEQ ID NO: 37988 - DNA, 22 bp, Homo sapiens
cgcagcctcagcgagtgctccc

SEQ ID NO: 37989 - DNA, 24 bp, Homo sapiens
gagaaaggaccaggattggtagtg

SEQ ID NO: 37990 - DNA, 22 bp, Homo sapiens
gaccgcgagggcacacctgtct

SEQ ID NO: 37991 - DNA, 24 bp, Homo sapiens
ctcagaccctgcccccaaaggctc

SEQ ID NO: 37992 - DNA, 16 bp, Homo sapiens
ggggtctcgaaggtgg

SEQ ID NO: 37993 - DNA, 20 bp, Homo sapiens
aagcccggatccccaaacca

SEQ ID NO: 37994 - DNA, 23 bp, Homo sapiens
tatgcccacctggccaggcggcc

SEQ ID NO: 37995 - DNA, 16 bp, Homo sapiens
gcgtagtgacaacaat

SEQ ID NO: 37996 - DNA, 16 bp, Homo sapiens
cacccctgtccttcct

SEQ ID NO: 37997 - DNA, 24 bp, Homo sapiens
gtcactcgcactgagtagctgact

SEQ ID NO: 37998 - DNA, 24 bp, Homo sapiens
gggtaggggtcactggagccacag

SEQ ID NO: 37999 - DNA, 20 bp, Homo sapiens
tcctgggagtatctggtgcc

SEQ ID NO: 38000 - DNA, 19 bp, Homo sapiens
gtgtgtcgaggctgcagat

SEQ ID NO: 38001 - DNA, 23 bp, Homo sapiens
gttaggggtgagcagtcccagcc

SEQ ID NO: 38002 - DNA, 17 bp, Homo sapiens
tctctgttctctaccag

SEQ ID NO: 38003 - DNA, 16 bp, Homo sapiens
ccaggccagtctgtaa

SEQ ID NO: 38004 - DNA, 21 bp, Homo sapiens
ctgtccacactaacctcacac

SEQ ID NO: 38005 - DNA, 24 bp, Homo sapiens
gtagaacgtcgctggaagcattga

SEQ ID NO: 38006 - DNA, 21 bp, Homo sapiens
cacactgcccaccccaaggca

SEQ ID NO: 38007 - DNA, 22 bp, Homo sapiens
gtgggtggacacttaatcagtg

SEQ ID NO: 38008 - DNA, 24 bp, Homo sapiens
ctgagtatacggtgcatgtgaggg

SEQ ID NO: 38009 - DNA, 24 bp, Homo sapiens
gcaggggggtggaggcagctgggc

SEQ ID NO: 38010 - DNA, 22 bp, Homo sapiens
aaatcccagttggtttctgggg

SEQ ID NO: 38011 - DNA, 24 bp, Homo sapiens
ggtgtggctagtagctggccaggg

SEQ ID NO: 38012 - DNA, 18 bp, Homo sapiens
cacagagtttgctagccc

SEQ ID NO: 38013 - DNA, 21 bp, Homo sapiens
acgccagccacatgggccctc

SEQ ID NO: 38014 - DNA, 21 bp, Homo sapiens
ggagggggcaggtcagggtgg

SEQ ID NO: 38015 - DNA, 24 bp, Homo sapiens
agtccatccagctcagccaccgtg

SEQ ID NO: 38016 - DNA, 17 bp, Homo sapiens
cacaggatacagggttt

SEQ ID NO: 38017 - DNA, 20 bp, Homo sapiens
cagggatggaggcagctcca

SEQ ID NO: 38018 - DNA, 16 bp, Homo sapiens
catgtgactcaggcca

SEQ ID NO: 38019 - DNA, 24 bp, Homo sapiens
gacccccaataaacccccagcccc

SEQ ID NO: 38020 - DNA, 22 bp, Homo sapiens
ctgcctgttccagcagactccc

SEQ ID NO: 38021 - DNA, 21 bp, Homo sapiens
ccgtgggctgagtgccaggaa

SEQ ID NO: 38022 - DNA, 22 bp, Homo sapiens
tatcaaattcccgtctcctgtt

SEQ ID NO: 38023 - DNA, 20 bp, Homo sapiens
aatggtgacagatgagctgc

SEQ ID NO: 38024 - DNA, 24 bp, Homo sapiens
tcactgcttcctaaaacctccacc

SEQ ID NO: 38025 - DNA, 22 bp, Homo sapiens
gccctgctgcagtcatcgtggc

SEQ ID NO: 38026 - DNA, 24 bp, Homo sapiens
ctgagggaggagggagtgggattc

SEQ ID NO: 38027 - DNA, 19 bp, Homo sapiens
ctgcagcctggaaccacct

SEQ ID NO: 38028 - DNA, 21 bp, Homo sapiens
tctgcaagggaaggcatgggg

SEQ ID NO: 38029 - DNA, 23 bp, Homo sapiens
ctcaggtccggagtccagccaga

SEQ ID NO: 38030 - DNA, 22 bp, Homo sapiens
ggggcagggcctgacccgttcg

SEQ ID NO: 38031 - DNA, 24 bp, Homo sapiens
gaccaatgagggtatgggtgccag

SEQ ID NO: 38032 - DNA, 22 bp, Homo sapiens
cagtaccgacacagccacctgg

SEQ ID NO: 38033 - DNA, 23 bp, Homo sapiens
tcggattagctggagcacaggca

SEQ ID NO: 38034 - DNA, 24 bp, Homo sapiens
ggcagtagagtctgggggcagtgt

SEQ ID NO: 38035 - DNA, 21 bp, Homo sapiens
cagatgcaacgcgagtgaggg

SEQ ID NO: 38036 - DNA, 24 bp, Homo sapiens
atgctggcatggctcctgcctgtc

SEQ ID NO: 38037 - DNA, 17 bp, Homo sapiens
tctgtaactcctagagc

SEQ ID NO: 38038 - DNA, 20 bp, Homo sapiens
cacacaccccacactgacca

SEQ ID NO: 38039 - DNA, 20 bp, Homo sapiens
caggaggcttgtggaggaca

SEQ ID NO: 38040 - DNA, 24 bp, Homo sapiens
ggctccagggacgggtccccaggc

SEQ ID NO: 38041 - DNA, 19 bp, Homo sapiens
gtgggtccccgtgagggca

SEQ ID NO: 38042 - DNA, 23 bp, Homo sapiens
agccctggaacagcaagtggagt

SEQ ID NO: 38043 - DNA, 16 bp, Homo sapiens
cattcgacttggatga

SEQ ID NO: 38044 - DNA, 24 bp, Homo sapiens
caggaccagagtgaggcaggcagc

SEQ ID NO: 38045 - DNA, 19 bp, Homo sapiens
accctgacttctctcttag

SEQ ID NO: 38046 - DNA, 17 bp, Homo sapiens
gacagtgaggacactgg

SEQ ID NO: 38047 - DNA, 21 bp, Homo sapiens
ctctgcgtccctgtccatcac

SEQ ID NO: 38048 - DNA, 23 bp, Homo sapiens
gtgtagctaagcccagcctgaac

SEQ ID NO: 38049 - DNA, 17 bp, Homo sapiens
atcccagctctctggtc

SEQ ID NO: 38050 - DNA, 20 bp, Homo sapiens
cagggtccgctcaaccccta

SEQ ID NO: 38051 - DNA, 17 bp, Homo sapiens
ctgttgacagttcaggg

SEQ ID NO: 38052 - DNA, 17 bp, Homo sapiens
gtccctggtgccaccca

SEQ ID NO: 38053 - DNA, 23 bp, Homo sapiens
gacagggaggagactatagggac

SEQ ID NO: 38054 - DNA, 19 bp, Homo sapiens
tgtaacagacctgcaagcc

SEQ ID NO: 38055 - DNA, 22 bp, Homo sapiens
cctcaggctggaacttcagtgt

SEQ ID NO: 38056 - DNA, 24 bp, Homo sapiens
gaggtgtcggagccccaggctgcc

SEQ ID NO: 38057 - DNA, 23 bp, Homo sapiens
ggtgctgcgcacaatgatgcggt

SEQ ID NO: 38058 - DNA, 23 bp, Homo sapiens
cctgcaaccgtggttcccactgg

SEQ ID NO: 38059 - DNA, 22 bp, Homo sapiens
cacccgctgcccgggcagctcg

SEQ ID NO: 38060 - DNA, 21 bp, Homo sapiens
gggcactgagtaccgcctcac

SEQ ID NO: 38061 - DNA, 23 bp, Homo sapiens
ctggtcctgttggagagcacagc

SEQ ID NO: 38062 - DNA, 22 bp, Homo sapiens
gagccaccgcagaaggtggtac

SEQ ID NO: 38063 - DNA, 22 bp, Homo sapiens
ccagcccacagagccctcacca

SEQ ID NO: 38064 - DNA, 24 bp, Homo sapiens
aggcaagggtcagggcatggcctc

SEQ ID NO: 38065 - DNA, 22 bp, Homo sapiens
ctccagcagagtgtagagtgtg

SEQ ID NO: 38066 - DNA, 16 bp, Homo sapiens
ggctaccggttggaat

SEQ ID NO: 38067 - DNA, 18 bp, Homo sapiens
ggtagcgggtcacatcag

SEQ ID NO: 38068 - DNA, 16 bp, Homo sapiens
ccggtcatcctgggcc

SEQ ID NO: 38069 - DNA, 22 bp, Homo sapiens
gataacagggtcagaccagcag

SEQ ID NO: 38070 - DNA, 16 bp, Homo sapiens
ggaggccactgacatc

SEQ ID NO: 38071 - DNA, 19 bp, Homo sapiens
gaccagtctcacgccgcca

SEQ ID NO: 38072 - DNA, 16 bp, Homo sapiens
cactggtgagaaggct

SEQ ID NO: 38073 - DNA, 19 bp, Homo sapiens
caggaaaggaggatggatg

SEQ ID NO: 38074 - DNA, 24 bp, Homo sapiens
actatgaggtgaccgtgagcaccc

SEQ ID NO: 38075 - DNA, 24 bp, Homo sapiens
aagcgtctgcccagggcacatggg

SEQ ID NO: 38076 - DNA, 24 bp, Homo sapiens
cacagcagcaggagctgggccctg

SEQ ID NO: 38077 - DNA, 24 bp, Homo sapiens
tcccagcctgaagaaagtgcccag

SEQ ID NO: 38078 - DNA, 22 bp, Homo sapiens
gagtcctgagtctgcaaggccc

SEQ ID NO: 38079 - DNA, 24 bp, Homo sapiens
ggccccacactgcggccaaatagg

SEQ ID NO: 38080 - DNA, 22 bp, Homo sapiens
ggtgagtgagagatgtgggctg

SEQ ID NO: 38081 - DNA, 23 bp, Homo sapiens
tcacgcagcaacactgaaccctg

SEQ ID NO: 38082 - DNA, 24 bp, Homo sapiens
cctcctggtggcctggcggagtgt

SEQ ID NO: 38083 - DNA, 22 bp, Homo sapiens
gcatgggggacaccaaggggcc

SEQ ID NO: 38084 - DNA, 16 bp, Homo sapiens
cagctgccctagaagg

SEQ ID NO: 38085 - DNA, 19 bp, Homo sapiens
cggggactcccctcagccc

SEQ ID NO: 38086 - DNA, 16 bp, Homo sapiens
gaccccagtaccccct

SEQ ID NO: 38087 - DNA, 19 bp, Homo sapiens
acggtagccagtggcacct

SEQ ID NO: 38088 - DNA, 18 bp, Homo sapiens
gcgggacagctcggacca

SEQ ID NO: 38089 - DNA, 24 bp, Homo sapiens
ggtattctggatggtcagttccgg

SEQ ID NO: 38090 - DNA, 17 bp, Homo sapiens
gaccgagtaccaagtga

SEQ ID NO: 38091 - DNA, 19 bp, Homo sapiens
gagtcagaagtgggagggg

SEQ ID NO: 38092 - DNA, 23 bp, Homo sapiens
gacctcttgccctgggcaggtga

SEQ ID NO: 38093 - DNA, 23 bp, Homo sapiens
cagaggctggcagaattgctcac

SEQ ID NO: 38094 - DNA, 24 bp, Homo sapiens
ggaggtaggatgtcaggagtgata

SEQ ID NO: 38095 - DNA, 24 bp, Homo sapiens
gttggcgtagagggcaatcacagt

SEQ ID NO: 38096 - DNA, 23 bp, Homo sapiens
aggtccagtacactcctctgacg

SEQ ID NO: 38097 - DNA, 24 bp, Homo sapiens
cgcacactggtctcaccagctggg

SEQ ID NO: 38098 - DNA, 19 bp, Homo sapiens
ccaagcagccaatccttga

SEQ ID NO: 38099 - DNA, 24 bp, Homo sapiens
cagccaagtccccagccaccacct

SEQ ID NO: 38100 - DNA, 16 bp, Homo sapiens
attcccagcggatgac

SEQ ID NO: 38101 - DNA, 22 bp, Homo sapiens
ctcggcagtggctgtcccagcc

SEQ ID NO: 38102 - DNA, 16 bp, Homo sapiens
ccccaactctgcatca

SEQ ID NO: 38103 - DNA, 18 bp, Homo sapiens
cactggccgctgtccact

SEQ ID NO: 38104 - DNA, 19 bp, Homo sapiens
ctagaccccggaccccaat

SEQ ID NO: 38105 - DNA, 22 bp, Homo sapiens
gtctcgtggagcagaggtcgag

SEQ ID NO: 38106 - DNA, 17 bp, Homo sapiens
ctggtggcgtgcctgtg

SEQ ID NO: 38107 - DNA, 17 bp, Homo sapiens
gtgggcatgtatgatgc

SEQ ID NO: 38108 - DNA, 16 bp, Homo sapiens
gacttcagcatcttga

SEQ ID NO: 38109 - DNA, 23 bp, Homo sapiens
gaatcagcactgccaagtgggga

SEQ ID NO: 38110 - DNA, 24 bp, Homo sapiens
agaatgctgaccctgaggagctga

SEQ ID NO: 38111 - DNA, 23 bp, Homo sapiens
caggaactcacgaggtcgggtca

SEQ ID NO: 38112 - DNA, 19 bp, Homo sapiens
agtcagagagcatgtgggt

SEQ ID NO: 38113 - DNA, 22 bp, Homo sapiens
gaggggcagtagtgtcctcaag

SEQ ID NO: 38114 - DNA, 16 bp, Homo sapiens
tttgctgtgggtaagg

SEQ ID NO: 38115 - DNA, 24 bp, Homo sapiens
cactggtgggctgtgaggcaactc

SEQ ID NO: 38116 - DNA, 22 bp, Homo sapiens
tcacagacgggaagtcccagga

SEQ ID NO: 38117 - DNA, 24 bp, Homo sapiens
aagtgacgacccatcaggactcag

SEQ ID NO: 38118 - DNA, 21 bp, Homo sapiens
gtgtccaggggaaccgtgatt

SEQ ID NO: 38119 - DNA, 24 bp, Homo sapiens
ctgacctgtcactcctgctcggtc

SEQ ID NO: 38120 - DNA, 21 bp, Homo sapiens
acctggtgtccccaaggtgat

SEQ ID NO: 38121 - DNA, 22 bp, Homo sapiens
ctttgggcagctgtgtccacca

SEQ ID NO: 38122 - DNA, 18 bp, Homo sapiens
cacaggggctgcaattct

SEQ ID NO: 38123 - DNA, 19 bp, Homo sapiens
gacaggtgcaggggtcaaa

SEQ ID NO: 38124 - DNA, 16 bp, Homo sapiens
tctgggggtgatgtga

SEQ ID NO: 38125 - DNA, 16 bp, Homo sapiens
atggtaggggtaggga

SEQ ID NO: 38126 - DNA, 24 bp, Homo sapiens
atcctgagtcctagcctgttgcca

SEQ ID NO: 38127 - DNA, 23 bp, Homo sapiens
gacatggtcagccacatggagaa

SEQ ID NO: 38128 - DNA, 23 bp, Homo sapiens
agagcctgatacccgtaaccctc

SEQ ID NO: 38129 - DNA, 24 bp, Homo sapiens
gtagctaagctcacggatggcgcg

SEQ ID NO: 38130 - DNA, 19 bp, Homo sapiens
ctgggggttccagaggcaa

SEQ ID NO: 38131 - DNA, 23 bp, Homo sapiens
tctgtctccaaaggaggtcctgg

SEQ ID NO: 38132 - DNA, 21 bp, Homo sapiens
tctctggagcagccagtgcac

SEQ ID NO: 38133 - DNA, 24 bp, Homo sapiens
tttctgcaaagacctggcctgggg

SEQ ID NO: 38134 - DNA, 17 bp, Homo sapiens
ttggccgcagcaatttc

SEQ ID NO: 38135 - DNA, 21 bp, Homo sapiens
gggatctcgtggtccccagcc

SEQ ID NO: 38136 - DNA, 16 bp, Homo sapiens
tgcacgcgcctttacg

SEQ ID NO: 38137 - DNA, 22 bp, Homo sapiens
tgtggcaaagcgcacaccctgt

SEQ ID NO: 38138 - DNA, 18 bp, Homo sapiens
tgcgggtaggcgggtggt

SEQ ID NO: 38139 - DNA, 23 bp, Homo sapiens
cgagaaagctgcggacctcgcgg

SEQ ID NO: 38140 - DNA, 19 bp, Homo sapiens
tggtttgcataagatgagg

SEQ ID NO: 38141 - DNA, 24 bp, Homo sapiens
cagtaagaacacaatgtcagcggc

SEQ ID NO: 38142 - DNA, 16 bp, Homo sapiens
cagggagagaggtggg

SEQ ID NO: 38143 - DNA, 23 bp, Homo sapiens
ggggagtcccagaattaggagga

SEQ ID NO: 38144 - DNA, 16 bp, Homo sapiens
tggtggccgcgctctg

SEQ ID NO: 38145 - DNA, 22 bp, Homo sapiens
ggggtgttggggatgaaggccg

SEQ ID NO: 38146 - DNA, 23 bp, Homo sapiens
cacgggggagcaagggacagagg

SEQ ID NO: 38147 - DNA, 23 bp, Homo sapiens
ccgggccgggtcctcccttgcgg

SEQ ID NO: 38148 - DNA, 16 bp, Homo sapiens
caagaccaggactcgg

SEQ ID NO: 38149 - DNA, 24 bp, Homo sapiens
ggcgcctctgccaggatcccggcg

SEQ ID NO: 38150 - DNA, 16 bp, Homo sapiens
gacttttctctgctct

SEQ ID NO: 38151 - DNA, 20 bp, Homo sapiens
aggtaggttgggcaggtttt

SEQ ID NO: 38152 - DNA, 19 bp, Homo sapiens
cctaactcatgccattcca

SEQ ID NO: 38153 - DNA, 23 bp, Homo sapiens
agccagcacctggcagagtggga

SEQ ID NO: 38154 - DNA, 17 bp, Homo sapiens
ggtggaggctgattcta

SEQ ID NO: 38155 - DNA, 22 bp, Homo sapiens
caagagtaggtcagtgggatca

SEQ ID NO: 38156 - DNA, 16 bp, Homo sapiens
cctacaaggggttagt

SEQ ID NO: 38157 - DNA, 21 bp, Homo sapiens
tcagaagcagggtcctgaagg

SEQ ID NO: 38158 - DNA, 19 bp, Homo sapiens
caaactactataccctcaa

SEQ ID NO: 38159 - DNA, 16 bp, Homo sapiens
ccctcaaccagacaat

SEQ ID NO: 38160 - DNA, 17 bp, Homo sapiens
ggtagaggtgcggcgga

SEQ ID NO: 38161 - DNA, 22 bp, Homo sapiens
gagttctgcctcagcttcttga

SEQ ID NO: 38162 - DNA, 21 bp, Homo sapiens
ctctgaagaagaatgtggcga

SEQ ID NO: 38163 - DNA, 18 bp, Homo sapiens
tgagccagcttcacttga

SEQ ID NO: 38164 - DNA, 17 bp, Homo sapiens
gtggcttatgcttgctt

SEQ ID NO: 38165 - DNA, 24 bp, Homo sapiens
gctgactacagccatctgctgctt

SEQ ID NO: 38166 - DNA, 18 bp, Homo sapiens
agctgggaaacccttgtc

SEQ ID NO: 38167 - DNA, 16 bp, Homo sapiens
cagggcacataaccca

SEQ ID NO: 38168 - DNA, 20 bp, Homo sapiens
catgcgggcacacagtccca

SEQ ID NO: 38169 - DNA, 23 bp, Homo sapiens
actagtcacagtacctgtcaagc

SEQ ID NO: 38170 - DNA, 23 bp, Homo sapiens
tcattgttccccagctgaagggc

SEQ ID NO: 38171 - DNA, 17 bp, Homo sapiens
cctcctgggaagagaca

SEQ ID NO: 38172 - DNA, 21 bp, Homo sapiens
tgtgtcattctccagggaagc

SEQ ID NO: 38173 - DNA, 16 bp, Homo sapiens
taccctccatgttcag

SEQ ID NO: 38174 - DNA, 23 bp, Homo sapiens
ttgaggacctcataaggacctcc

SEQ ID NO: 38175 - DNA, 20 bp, Homo sapiens
cacacgcctccgctgcaccc

SEQ ID NO: 38176 - DNA, 18 bp, Homo sapiens
ggaatagagcctggagta

SEQ ID NO: 38177 - DNA, 24 bp, Homo sapiens
ggaagtccatagcagctcggcggc

SEQ ID NO: 38178 - DNA, 21 bp, Homo sapiens
tttctaatgggcaaaggcaca

SEQ ID NO: 38179 - DNA, 18 bp, Homo sapiens
tgtatgggaatgacattg

SEQ ID NO: 38180 - DNA, 23 bp, Homo sapiens
caggctacataacctttggatga

SEQ ID NO: 38181 - DNA, 16 bp, Homo sapiens
agaggtgaagctggca

SEQ ID NO: 38182 - DNA, 19 bp, Homo sapiens
aggaccctatcctttagtg

SEQ ID NO: 38183 - DNA, 21 bp, Homo sapiens
atacagatctcggtgccggta

SEQ ID NO: 38184 - DNA, 24 bp, Homo sapiens
tccacaggtgtagtgtgttcatca

SEQ ID NO: 38185 - DNA, 16 bp, Homo sapiens
tgaggggttgggggta

SEQ ID NO: 38186 - DNA, 16 bp, Homo sapiens
ctgtccctggctgcca

SEQ ID NO: 38187 - DNA, 16 bp, Homo sapiens
gaggatggtgtggagg

SEQ ID NO: 38188 - DNA, 24 bp, Homo sapiens
gttgccaggtgaactgcccccgct

SEQ ID NO: 38189 - DNA, 18 bp, Homo sapiens
ctgtgatggaggtgtttg

SEQ ID NO: 38190 - DNA, 20 bp, Homo sapiens
gaagctccctgtaccacata

SEQ ID NO: 38191 - DNA, 16 bp, Homo sapiens
ccaggtactacaggcc

SEQ ID NO: 38192 - DNA, 21 bp, Homo sapiens
cccacaccacttcttgacaca

SEQ ID NO: 38193 - DNA, 22 bp, Homo sapiens
tccagctttgagggatgctggg

SEQ ID NO: 38194 - DNA, 17 bp, Homo sapiens
ggcagccagacacgcca

SEQ ID NO: 38195 - DNA, 16 bp, Homo sapiens
acttgcagagtaagac

SEQ ID NO: 38196 - DNA, 24 bp, Homo sapiens
gtttcctcaggtcatctgccacgc

SEQ ID NO: 38197 - DNA, 16 bp, Homo sapiens
ctcctcctacctacca

SEQ ID NO: 38198 - DNA, 23 bp, Homo sapiens
gtccctagcccatggagccttgt

SEQ ID NO: 38199 - DNA, 16 bp, Homo sapiens
gagatgtgggcctgga

SEQ ID NO: 38200 - DNA, 18 bp, Homo sapiens
caaatatcacaccttcca

SEQ ID NO: 38201 - DNA, 18 bp, Homo sapiens
atgctcttgtgtttctgt

SEQ ID NO: 38202 - DNA, 22 bp, Homo sapiens
gtcaatgaagccaggaaggcaa

SEQ ID NO: 38203 - DNA, 24 bp, Homo sapiens
ctccactgtcctactactgtccag

SEQ ID NO: 38204 - DNA, 19 bp, Homo sapiens
agctagcagggcattatcc

SEQ ID NO: 38205 - DNA, 18 bp, Homo sapiens
taagatgggaaccagcct

SEQ ID NO: 38206 - DNA, 24 bp, Homo sapiens
ctggctgctgggagaaagatttgg

SEQ ID NO: 38207 - DNA, 21 bp, Homo sapiens
ttgagtctcatagctgttcat

SEQ ID NO: 38208 - DNA, 20 bp, Homo sapiens
gatgacttgattgtaaccaa

SEQ ID NO: 38209 - DNA, 20 bp, Homo sapiens
cctgtcttggacaacaagga

SEQ ID NO: 38210 - DNA, 17 bp, Homo sapiens
ttggtcctaggggacac

SEQ ID NO: 38211 - DNA, 23 bp, Homo sapiens
acacagagggggtatacctgcat

SEQ ID NO: 38212 - DNA, 16 bp, Homo sapiens
gttgtgtctggctcac

SEQ ID NO: 38213 - DNA, 18 bp, Homo sapiens
atacaggtggccctcaga

SEQ ID NO: 38214 - DNA, 17 bp, Homo sapiens
cttgcacaccctgagtc

SEQ ID NO: 38215 - DNA, 19 bp, Homo sapiens
cgttggtaaacagcgacag

SEQ ID NO: 38216 - DNA, 21 bp, Homo sapiens
ctacaaatgtctgtgtctctg

SEQ ID NO: 38217 - DNA, 16 bp, Homo sapiens
ggagagtctagtggtt

SEQ ID NO: 38218 - DNA, 20 bp, Homo sapiens
tgagaagctgtgtttgactc

SEQ ID NO: 38219 - DNA, 22 bp, Homo sapiens
ttgcaatggcctgaggctttca

SEQ ID NO: 38220 - DNA, 20 bp, Homo sapiens
ttgctggctcatgactaaga

SEQ ID NO: 38221 - DNA, 16 bp, Homo sapiens
gatggcagggaggatg

SEQ ID NO: 38222 - DNA, 23 bp, Homo sapiens
ggtcttagctctgcaatgtctcc

SEQ ID NO: 38223 - DNA, 17 bp, Homo sapiens
ttgccacgtgtagaacc

SEQ ID NO: 38224 - DNA, 18 bp, Homo sapiens
cactgctcgctctttgac

SEQ ID NO: 38225 - DNA, 22 bp, Homo sapiens
ctctagctcttctgagaaggct

SEQ ID NO: 38226 - DNA, 17 bp, Homo sapiens
ttggagtctgccagtgc

SEQ ID NO: 38227 - DNA, 24 bp, Homo sapiens
ggagtggaccactgtaaacaggga

SEQ ID NO: 38228 - DNA, 18 bp, Homo sapiens
ggacaccgctctatgact

SEQ ID NO: 38229 - DNA, 24 bp, Homo sapiens
cctgcagcatatgagacacgtcaa

SEQ ID NO: 38230 - DNA, 24 bp, Homo sapiens
gagggaagcggctgggggctaggg

SEQ ID NO: 38231 - DNA, 18 bp, Homo sapiens
tgactgtcccggtactgc

SEQ ID NO: 38232 - DNA, 19 bp, Homo sapiens
gtccacttagttgcgcaca

SEQ ID NO: 38233 - DNA, 24 bp, Homo sapiens
ttcccgccgtgggccaggtggaag

SEQ ID NO: 38234 - DNA, 24 bp, Homo sapiens
gagggctgtaagtgtggtggcccg

SEQ ID NO: 38235 - DNA, 24 bp, Homo sapiens
ctgggcttagtgccaccagggccc

SEQ ID NO: 38236 - DNA, 24 bp, Homo sapiens
gcgtgcctggcagtgtggtggcct

SEQ ID NO: 38237 - DNA, 19 bp, Homo sapiens
cagcaccctctatcccacc

SEQ ID NO: 38238 - DNA, 16 bp, Homo sapiens
ttgctccggagagaga

SEQ ID NO: 38239 - DNA, 24 bp, Homo sapiens
gaatgcctgcaggcgaaagcccag

SEQ ID NO: 38240 - DNA, 19 bp, Homo sapiens
cctgcattctctgctctaa

SEQ ID NO: 38241 - DNA, 22 bp, Homo sapiens
atctacttaaataaaagtttgc

SEQ ID NO: 38242 - DNA, 16 bp, Homo sapiens
gcagagtggccctcat

SEQ ID NO: 38243 - DNA, 18 bp, Homo sapiens
tggcttggctagacaact

SEQ ID NO: 38244 - DNA, 17 bp, Homo sapiens
gccgtttggtactttct

SEQ ID NO: 38245 - DNA, 23 bp, Homo sapiens
taacaagaaaacaaaacacaaat

SEQ ID NO: 38246 - DNA, 19 bp, Homo sapiens
gtaactttaggcagatgtg

SEQ ID NO: 38247 - DNA, 19 bp, Homo sapiens
agatccacattctgaagga

SEQ ID NO: 38248 - DNA, 17 bp, Homo sapiens
ctgttggaactgtgaaa

SEQ ID NO: 38249 - DNA, 23 bp, Homo sapiens
cacattacatctggccaagcgta

SEQ ID NO: 38250 - DNA, 17 bp, Homo sapiens
acagcactgactttttt

SEQ ID NO: 38251 - DNA, 24 bp, Homo sapiens
ccatgttgcttatttgaagagttg

SEQ ID NO: 38252 - DNA, 18 bp, Homo sapiens
acattcaaaattgtgcta

SEQ ID NO: 38253 - DNA, 20 bp, Homo sapiens
aatagcaggaaatatgttga

SEQ ID NO: 38254 - DNA, 19 bp, Homo sapiens
ctctcagcacgtattttac

SEQ ID NO: 38255 - DNA, 18 bp, Homo sapiens
ttcaaaagcctcagaaaa

SEQ ID NO: 38256 - DNA, 21 bp, Homo sapiens
tgagttcttagcacaaattat

SEQ ID NO: 38257 - DNA, 19 bp, Homo sapiens
cgctgcatctgaatctagc

SEQ ID NO: 38258 - DNA, 24 bp, Homo sapiens
agatttatccatcaactattttaa

SEQ ID NO: 38259 - DNA, 16 bp, Homo sapiens
cttccatccaagcaag

SEQ ID NO: 38260 - DNA, 21 bp, Homo sapiens
tcatcaagatcaaccttagtc

SEQ ID NO: 38261 - DNA, 18 bp, Homo sapiens
tgaaaaacatgaaggcaa

SEQ ID NO: 38262 - DNA, 20 bp, Homo sapiens
tgtggacagtcatattcact

SEQ ID NO: 38263 - DNA, 19 bp, Homo sapiens
gtagcagcatctaggtatt

SEQ ID NO: 38264 - DNA, 17 bp, Homo sapiens
gtcagtgtagctcttgc

SEQ ID NO: 38265 - DNA, 22 bp, Homo sapiens
ctgaaatactcatttttggttt

SEQ ID NO: 38266 - DNA, 17 bp, Homo sapiens
gcaatgatcttattgcc

SEQ ID NO: 38267 - DNA, 16 bp, Homo sapiens
gctcacagttaggtac

SEQ ID NO: 38268 - DNA, 23 bp, Homo sapiens
tatcaattgaagagacttcagtg

SEQ ID NO: 38269 - DNA, 21 bp, Homo sapiens
acagggatatgaatagattgg

SEQ ID NO: 38270 - DNA, 23 bp, Homo sapiens
ataataaattgctgtttaaaaga

SEQ ID NO: 38271 - DNA, 20 bp, Homo sapiens
gcggcagtttcatttaactg

SEQ ID NO: 38272 - DNA, 16 bp, Homo sapiens
gtacctcattggtgac

SEQ ID NO: 38273 - DNA, 17 bp, Homo sapiens
atggttagacttcccaa

SEQ ID NO: 38274 - DNA, 18 bp, Homo sapiens
tgcaagccaaccatatct

SEQ ID NO: 38275 - DNA, 20 bp, Homo sapiens
ttctaatattaataggctga

SEQ ID NO: 38276 - DNA, 18 bp, Homo sapiens
cttgtagcgaagaaggtc

SEQ ID NO: 38277 - DNA, 24 bp, Homo sapiens
gcctaaactaaatttaaaaaacat

SEQ ID NO: 38278 - DNA, 21 bp, Homo sapiens
tcattatttccttttcttggg

SEQ ID NO: 38279 - DNA, 16 bp, Homo sapiens
ttgagctacacctgta

SEQ ID NO: 38280 - DNA, 21 bp, Homo sapiens
aattttattcttgcaatttac

SEQ ID NO: 38281 - DNA, 19 bp, Homo sapiens
gattcgactcattacgcat

SEQ ID NO: 38282 - DNA, 19 bp, Homo sapiens
tctaaatctgaaaagccaa

SEQ ID NO: 38283 - DNA, 17 bp, Homo sapiens
acaaacatgagtgtcct

SEQ ID NO: 38284 - DNA, 19 bp, Homo sapiens
aaacacaaattgcatatgt

SEQ ID NO: 38285 - DNA, 16 bp, Homo sapiens
ggcattggttggggat

SEQ ID NO: 38286 - DNA, 16 bp, Homo sapiens
caccaagcccatgcgt

SEQ ID NO: 38287 - DNA, 18 bp, Homo sapiens
ttgtaaatcacaactact

SEQ ID NO: 38288 - DNA, 16 bp, Homo sapiens
actggagtaaaaggag

SEQ ID NO: 38289 - DNA, 24 bp, Homo sapiens
attaatattaatctacacacctct

SEQ ID NO: 38290 - DNA, 21 bp, Homo sapiens
aaatgccagcgacttatcccc

SEQ ID NO: 38291 - DNA, 29 bp, Homo sapiens
tagttttcctgtaaagatatatattaata

SEQ ID NO: 38292 - DNA, 16 bp, Homo sapiens
caaacaggcgctacct

SEQ ID NO: 38293 - DNA, 27 bp, Homo sapiens
aggtttatatttcgatatgtttatatt

SEQ ID NO: 38294 - DNA, 20 bp, Homo sapiens
tcttgtgtctagctacttaa

SEQ ID NO: 38295 - DNA, 20 bp, Homo sapiens
agagagagaaataaatgaat

SEQ ID NO: 38296 - DNA, 25 bp, Homo sapiens
aacttcagattgtgatttaaaaata

SEQ ID NO: 38297 - DNA, 20 bp, Homo sapiens
cataagcaatgcacttttca

SEQ ID NO: 38298 - DNA, 18 bp, Homo sapiens
tgggtggactaatatgtg

SEQ ID NO: 38299 - DNA, 22 bp, Homo sapiens
gttccagtcttcatctttaaac

SEQ ID NO: 38300 - DNA, 18 bp, Homo sapiens
atattttgagaagcacct

SEQ ID NO: 38301 - DNA, 17 bp, Homo sapiens
tgactatcgactagcca

SEQ ID NO: 38302 - DNA, 28 bp, Homo sapiens
atgaaagaatttaatacttcaattataa

SEQ ID NO: 38303 - DNA, 16 bp, Homo sapiens
tgtatcaggaatgcca

SEQ ID NO: 38304 - DNA, 17 bp, Homo sapiens
aaatgaagcaacacagt

SEQ ID NO: 38305 - DNA, 17 bp, Homo sapiens
gggctttacagtcagaa

SEQ ID NO: 38306 - DNA, 19 bp, Homo sapiens
cacttatctggaattgcca

SEQ ID NO: 38307 - DNA, 18 bp, Homo sapiens
gttaccaaagcagcccaa

SEQ ID NO: 38308 - DNA, 17 bp, Homo sapiens
ggagagcacagagctgg

SEQ ID NO: 38309 - DNA, 20 bp, Homo sapiens
aataatgtgccacccataca

SEQ ID NO: 38310 - DNA, 19 bp, Homo sapiens
acttacctcatgttggcaa

SEQ ID NO: 38311 - DNA, 23 bp, Homo sapiens
attattgacaacatgagattgat

SEQ ID NO: 38312 - DNA, 17 bp, Homo sapiens
aggtttctcaggtgatt

SEQ ID NO: 38313 - DNA, 18 bp, Homo sapiens
agggggtcagaaggtaag

SEQ ID NO: 38314 - DNA, 20 bp, Homo sapiens
gttaagacttgcttgttaac

SEQ ID NO: 38315 - DNA, 19 bp, Homo sapiens
gacacagcgtgtgaaccaa

SEQ ID NO: 38316 - DNA, 21 bp, Homo sapiens
ttaaactgctacaataacaaa

SEQ ID NO: 38317 - DNA, 19 bp, Homo sapiens
acttgtagtccgaaatatt

SEQ ID NO: 38318 - DNA, 20 bp, Homo sapiens
tctgaatgttgacatgtagt

SEQ ID NO: 38319 - DNA, 21 bp, Homo sapiens
aaatgtacttataatctacct

SEQ ID NO: 38320 - DNA, 17 bp, Homo sapiens
cgctttgatggatttcg

SEQ ID NO: 38321 - DNA, 18 bp, Homo sapiens
gcatatgtaatggaacta

SEQ ID NO: 38322 - DNA, 20 bp, Homo sapiens
tcttatattttagctgggaa

SEQ ID NO: 38323 - DNA, 16 bp, Homo sapiens
aaccccaaacctgatt

SEQ ID NO: 38324 - DNA, 24 bp, Homo sapiens
gcaaacatttataacagttaagga

SEQ ID NO: 38325 - DNA, 16 bp, Homo sapiens
aacaccatcaaaacga

SEQ ID NO: 38326 - DNA, 20 bp, Homo sapiens
tatgttatgtttcttgaaca

SEQ ID NO: 38327 - DNA, 19 bp, Homo sapiens
tgtttgacagaaggaatct

SEQ ID NO: 38328 - DNA, 19 bp, Homo sapiens
aaacaaggtaaaatcccct

SEQ ID NO: 38329 - DNA, 16 bp, Homo sapiens
ttctggacctagaggg

SEQ ID NO: 38330 - DNA, 21 bp, Homo sapiens
agtaccagtgagagagtacac

SEQ ID NO: 38331 - DNA, 20 bp, Homo sapiens
gcttcaaaaaattcagcaga

SEQ ID NO: 38332 - DNA, 18 bp, Homo sapiens
agcaacaatagaaaacat

SEQ ID NO: 38333 - DNA, 17 bp, Homo sapiens
ggtagacacagctcatt

SEQ ID NO: 38334 - DNA, 19 bp, Homo sapiens
gctatcccaaagatcatga

SEQ ID NO: 38335 - DNA, 18 bp, Homo sapiens
ttctttttgctgtgttct

SEQ ID NO: 38336 - DNA, 23 bp, Homo sapiens
tcaaacatattcaatccatctgc

SEQ ID NO: 38337 - DNA, 16 bp, Homo sapiens
tgcgatggtgaaacaa

SEQ ID NO: 38338 - DNA, 19 bp, Homo sapiens
ggactatgatacccatgga

SEQ ID NO: 38339 - DNA, 20 bp, Homo sapiens
aagcaaatttgagttgtatc

SEQ ID NO: 38340 - DNA, 18 bp, Homo sapiens
ggttaccaaatcacaagc

SEQ ID NO: 38341 - DNA, 23 bp, Homo sapiens
cttctattaactctgttaaccct

SEQ ID NO: 38342 - DNA, 21 bp, Homo sapiens
ataggatacaactgcattcag

SEQ ID NO: 38343 - DNA, 22 bp, Homo sapiens
cattttgtttctttaaattatt

SEQ ID NO: 38344 - DNA, 19 bp, Homo sapiens
gctttttttccccattact

SEQ ID NO: 38345 - DNA, 16 bp, Homo sapiens
ctggaagctgcaaaga

SEQ ID NO: 38346 - DNA, 16 bp, Homo sapiens
cgaccaaagcttctag

SEQ ID NO: 38347 - DNA, 17 bp, Homo sapiens
tgccatcaactgaatgc

SEQ ID NO: 38348 - DNA, 18 bp, Homo sapiens
tcactattacagggcaat

SEQ ID NO: 38349 - DNA, 19 bp, Homo sapiens
agtagcttcttataaacat

SEQ ID NO: 38350 - DNA, 20 bp, Homo sapiens
tttaatctcctaacacaaaa

SEQ ID NO: 38351 - DNA, 16 bp, Homo sapiens
ccacggagtctaagaa

SEQ ID NO: 38352 - DNA, 26 bp, Homo sapiens
acagactcattaaaattttatctgaa

SEQ ID NO: 38353 - DNA, 17 bp, Homo sapiens
ttcctggcttaactcta

SEQ ID NO: 38354 - DNA, 21 bp, Homo sapiens
tcttggtagtacattgcatgt

SEQ ID NO: 38355 - DNA, 21 bp, Homo sapiens
ccaagtgtttgagtatattca

SEQ ID NO: 38356 - DNA, 18 bp, Homo sapiens
tcccacatgagattcata

SEQ ID NO: 38357 - DNA, 20 bp, Homo sapiens
cctgagagaaaatttagtga

SEQ ID NO: 38358 - DNA, 24 bp, Homo sapiens
agactatgatactcatacagtata

SEQ ID NO: 38359 - DNA, 17 bp, Homo sapiens
ggttcgtgaaggtgata

SEQ ID NO: 38360 - DNA, 22 bp, Homo sapiens
aagataagcattgaacattact

SEQ ID NO: 38361 - DNA, 24 bp, Homo sapiens
tagttattactagtaaaagcggag

SEQ ID NO: 38362 - DNA, 27 bp, Homo sapiens
tattggaacaataatttatttaaagat

SEQ ID NO: 38363 - DNA, 22 bp, Homo sapiens
tattatcagagttctggatgta

SEQ ID NO: 38364 - DNA, 23 bp, Homo sapiens
cccagtgtatccaatcataattc

SEQ ID NO: 38365 - DNA, 20 bp, Homo sapiens
ggtggtctagattcttaaga

SEQ ID NO: 38366 - DNA, 19 bp, Homo sapiens
cgatacaagatctctccgc

SEQ ID NO: 38367 - DNA, 22 bp, Homo sapiens
agttcaactcaagacttcctcc

SEQ ID NO: 38368 - DNA, 16 bp, Homo sapiens
tcccaccaaagcagaa

SEQ ID NO: 38369 - DNA, 21 bp, Homo sapiens
cacaattatcatgcatcagtt

SEQ ID NO: 38370 - DNA, 18 bp, Homo sapiens
tggttggaatccattttc

SEQ ID NO: 38371 - DNA, 25 bp, Homo sapiens
agaaaatgataagttcaagaaaaaa

SEQ ID NO: 38372 - DNA, 25 bp, Homo sapiens
aaattcattaactattagtcctatc

SEQ ID NO: 38373 - DNA, 18 bp, Homo sapiens
tgaggcacgagtacagat

SEQ ID NO: 38374 - DNA, 24 bp, Homo sapiens
caattattttagacaatttgattt

SEQ ID NO: 38375 - DNA, 19 bp, Homo sapiens
tccagttttttgtatgggt

SEQ ID NO: 38376 - DNA, 16 bp, Homo sapiens
cgggagcagaaggagt

SEQ ID NO: 38377 - DNA, 27 bp, Homo sapiens
aagtctgatatttatttgtaatcatta

SEQ ID NO: 38378 - DNA, 17 bp, Homo sapiens
tgaatcatttggcgtcc

SEQ ID NO: 38379 - DNA, 25 bp, Homo sapiens
atatgtattaaatagttaataagat

SEQ ID NO: 38380 - DNA, 20 bp, Homo sapiens
aagcagtttagccaaatttt

SEQ ID NO: 38381 - DNA, 18 bp, Homo sapiens
ctccagtaagaaaaactc

SEQ ID NO: 38382 - DNA, 22 bp, Homo sapiens
tctagaagactatttaattttc

SEQ ID NO: 38383 - DNA, 16 bp, Homo sapiens
acatctgtggacgcca

SEQ ID NO: 38384 - DNA, 21 bp, Homo sapiens
taataatgtctttttttccct

SEQ ID NO: 38385 - DNA, 22 bp, Homo sapiens
attttctccaatgttcttcaaa

SEQ ID NO: 38386 - DNA, 19 bp, Homo sapiens
tgattttatcctaccaggt

SEQ ID NO: 38387 - DNA, 24 bp, Homo sapiens
tcgacccgtacttgaagccctacg

SEQ ID NO: 38388 - DNA, 23 bp, Homo sapiens
caggttcctccccgcctggggcg

SEQ ID NO: 38389 - DNA, 23 bp, Homo sapiens
gactacgaggcggcgctcaatgc

SEQ ID NO: 38390 - DNA, 23 bp, Homo sapiens
gagacggctcctgggaggcgggc

SEQ ID NO: 38391 - DNA, 21 bp, Homo sapiens
tggactgcggcggaatatggc

SEQ ID NO: 38392 - DNA, 24 bp, Homo sapiens
ggtacctgcgctggaagtccacgg

SEQ ID NO: 38393 - DNA, 16 bp, Homo sapiens
gtcccagctagagctc

SEQ ID NO: 38394 - DNA, 24 bp, Homo sapiens
ctggccagttcgggcacgtcagcc

SEQ ID NO: 38395 - DNA, 24 bp, Homo sapiens
accgccgcggctcgcctcggcttg

SEQ ID NO: 38396 - DNA, 17 bp, Homo sapiens
gtcatcggagccgccat

SEQ ID NO: 38397 - DNA, 24 bp, Homo sapiens
tcccgcccttctggcctctccatc

SEQ ID NO: 38398 - DNA, 16 bp, Homo sapiens
accaccagaccccggc

SEQ ID NO: 38399 - DNA, 24 bp, Homo sapiens
gttgtcgcgggccagtaacgtcat

SEQ ID NO: 38400 - DNA, 24 bp, Homo sapiens
aagctctttggcgaaagctcgtac

SEQ ID NO: 38401 - DNA, 19 bp, Homo sapiens
actgaggctgaggctgggg

SEQ ID NO: 38402 - DNA, 24 bp, Homo sapiens
aaagcgggagccagacagcaaggg

SEQ ID NO: 38403 - DNA, 22 bp, Homo sapiens
caccacggctgcggctcgtgcc

SEQ ID NO: 38404 - DNA, 19 bp, Homo sapiens
caggtttggggaatctcac

SEQ ID NO: 38405 - DNA, 24 bp, Homo sapiens
cggctactgcgcaccagcccgcct

SEQ ID NO: 38406 - DNA, 16 bp, Homo sapiens
ggaactcaggaatccg

SEQ ID NO: 38407 - DNA, 20 bp, Homo sapiens
tgtatctcaggaaccttgtg

SEQ ID NO: 38408 - DNA, 17 bp, Homo sapiens
ttaagttcatcttggct

SEQ ID NO: 38409 - DNA, 22 bp, Homo sapiens
gtcccgctggccagggtggagt

SEQ ID NO: 38410 - DNA, 18 bp, Homo sapiens
accatacataccctcttc

SEQ ID NO: 38411 - DNA, 21 bp, Homo sapiens
gtgatgggagtgtgctaaaaa

SEQ ID NO: 38412 - DNA, 25 bp, Homo sapiens
gtcacttctaatataaatatcaacc

SEQ ID NO: 38413 - DNA, 21 bp, Homo sapiens
gttttcccatttccagaagtt

SEQ ID NO: 38414 - DNA, 21 bp, Homo sapiens
gaaacctaaagcaaaatatta

SEQ ID NO: 38415 - DNA, 20 bp, Homo sapiens
aaattcttcactgaagaggg

SEQ ID NO: 38416 - DNA, 20 bp, Homo sapiens
acataaaattgaacacaggc

SEQ ID NO: 38417 - DNA, 17 bp, Homo sapiens
ccaaagtttcatctggg

SEQ ID NO: 38418 - DNA, 23 bp, Homo sapiens
aagtttctactctgggattatat

SEQ ID NO: 38419 - DNA, 19 bp, Homo sapiens
ttgcttgacttaccatatt

SEQ ID NO: 38420 - DNA, 23 bp, Homo sapiens
aaacatagcttatatttgtttaa

SEQ ID NO: 38421 - DNA, 20 bp, Homo sapiens
gacctgttatggacaaatac

SEQ ID NO: 38422 - DNA, 20 bp, Homo sapiens
aattgaccaggaagggaaaa

SEQ ID NO: 38423 - DNA, 16 bp, Homo sapiens
cagtccacccctacca

SEQ ID NO: 38424 - DNA, 23 bp, Homo sapiens
ctttttgggctgcaagtcccaga

SEQ ID NO: 38425 - DNA, 23 bp, Homo sapiens
aaagtactgggattacaggtgtg

SEQ ID NO: 38426 - DNA, 16 bp, Homo sapiens
gatgatctcccctagt

SEQ ID NO: 38427 - DNA, 22 bp, Homo sapiens
aatatggtgatctggcattact

SEQ ID NO: 38428 - DNA, 21 bp, Homo sapiens
tacctgaccttgaggccaata

SEQ ID NO: 38429 - DNA, 16 bp, Homo sapiens
ggaatctagggctggg

SEQ ID NO: 38430 - DNA, 21 bp, Homo sapiens
ctatgcctccatgtgactcca

SEQ ID NO: 38431 - DNA, 21 bp, Homo sapiens
ttctccaacaccatgtactca

SEQ ID NO: 38432 - DNA, 16 bp, Homo sapiens
agggcagggctgaagg

SEQ ID NO: 38433 - DNA, 24 bp, Homo sapiens
tgaccctggcagcgcaccaggcta

SEQ ID NO: 38434 - DNA, 22 bp, Homo sapiens
atttggctttctgctcctcagt

SEQ ID NO: 38435 - DNA, 20 bp, Homo sapiens
ctgagttcttgctgtcttct

SEQ ID NO: 38436 - DNA, 16 bp, Homo sapiens
gctccgtgaggcagaa

SEQ ID NO: 38437 - DNA, 17 bp, Homo sapiens
ctcatgctctcctttct

SEQ ID NO: 38438 - DNA, 16 bp, Homo sapiens
tcttgggcaacatcac

SEQ ID NO: 38439 - DNA, 22 bp, Homo sapiens
taggggatcatcttggctggca

SEQ ID NO: 38440 - DNA, 19 bp, Homo sapiens
gattttggaaagaaggaaa

SEQ ID NO: 38441 - DNA, 19 bp, Homo sapiens
gagcacattgcagccttct

SEQ ID NO: 38442 - DNA, 21 bp, Homo sapiens
cagagaaataaggtcaagata

SEQ ID NO: 38443 - DNA, 19 bp, Homo sapiens
ttagtgtggctctgctccg

SEQ ID NO: 38444 - DNA, 21 bp, Homo sapiens
attttaaaagtttgctgacct

SEQ ID NO: 38445 - DNA, 16 bp, Homo sapiens
ggaaggaaccctacct

SEQ ID NO: 38446 - DNA, 22 bp, Homo sapiens
gccctcaaaagcattcatattt

SEQ ID NO: 38447 - DNA, 16 bp, Homo sapiens
gtggagagtgctcact

SEQ ID NO: 38448 - DNA, 24 bp, Homo sapiens
ctgcagtgggagcgatgcagcctc

SEQ ID NO: 38449 - DNA, 17 bp, Homo sapiens
aacacataaaagcagct

SEQ ID NO: 38450 - DNA, 17 bp, Homo sapiens
caatggctccaaggtag

SEQ ID NO: 38451 - DNA, 18 bp, Homo sapiens
gctgagccctgtcctcta

SEQ ID NO: 38452 - DNA, 20 bp, Homo sapiens
tgcaaacacagtaaaaatat

SEQ ID NO: 38453 - DNA, 21 bp, Homo sapiens
cctgcatgtctggcctgaggt

SEQ ID NO: 38454 - DNA, 20 bp, Homo sapiens
ttctactatgaatgctgtga

SEQ ID NO: 38455 - DNA, 22 bp, Homo sapiens
tgaggtgggtcacataggggtt

SEQ ID NO: 38456 - DNA, 18 bp, Homo sapiens
ccccgaatgcctaattta

SEQ ID NO: 38457 - DNA, 21 bp, Homo sapiens
gattactaatggaggactggc

SEQ ID NO: 38458 - DNA, 16 bp, Homo sapiens
tcccccttacacacac

SEQ ID NO: 38459 - DNA, 16 bp, Homo sapiens
ccccttacacacacac

SEQ ID NO: 38460 - DNA, 18 bp, Homo sapiens
cactaatgggaaacccga

SEQ ID NO: 38461 - DNA, 21 bp, Homo sapiens
caaaaactgaaagtgtttaaa

SEQ ID NO: 38462 - DNA, 16 bp, Homo sapiens
tgagcctccacaaaga

SEQ ID NO: 38463 - DNA, 18 bp, Homo sapiens
gacctctccaaggatgtt

SEQ ID NO: 38464 - DNA, 24 bp, Homo sapiens
gatggatggatggatggatggatg

SEQ ID NO: 38465 - DNA, 16 bp, Homo sapiens
catgacactacctggt

SEQ ID NO: 38466 - DNA, 22 bp, Homo sapiens
gtttgcattgtcagatgatatc

SEQ ID NO: 38467 - DNA, 16 bp, Homo sapiens
tgcacaggctactctg

SEQ ID NO: 38468 - DNA, 20 bp, Homo sapiens
acaccaagatacctgtggaa

SEQ ID NO: 38469 - DNA, 17 bp, Homo sapiens
cagccaattttccagtg

SEQ ID NO: 38470 - DNA, 21 bp, Homo sapiens
ggggatgttggtagagctgca

SEQ ID NO: 38471 - DNA, 24 bp, Homo sapiens
ccacgacgctgcccatgctgaacc

SEQ ID NO: 38472 - DNA, 17 bp, Homo sapiens
gctttctcccagcttga

SEQ ID NO: 38473 - DNA, 16 bp, Homo sapiens
caaagggccttgtccc

SEQ ID NO: 38474 - DNA, 24 bp, Homo sapiens
gttgcggcctcctccctctgcctc

SEQ ID NO: 38475 - DNA, 24 bp, Homo sapiens
tggaaggggccgggggaatggcag

SEQ ID NO: 38476 - DNA, 20 bp, Homo sapiens
ccatgaacatcctcaacagc

SEQ ID NO: 38477 - DNA, 17 bp, Homo sapiens
cacaaaagcccagggac

SEQ ID NO: 38478 - DNA, 21 bp, Homo sapiens
caagtgggggtgccagcttct

SEQ ID NO: 38479 - DNA, 17 bp, Homo sapiens
caaattcactgagcctc

SEQ ID NO: 38480 - DNA, 22 bp, Homo sapiens
gtgcccacctgtgggaagggta

SEQ ID NO: 38481 - DNA, 19 bp, Homo sapiens
acaccgttcatgtcacaca

SEQ ID NO: 38482 - DNA, 25 bp, Homo sapiens
atattccagttcattctaataactc

SEQ ID NO: 38483 - DNA, 20 bp, Homo sapiens
ccttaactagtcttcttccc

SEQ ID NO: 38484 - DNA, 23 bp, Homo sapiens
cacaaggaaacagtttaacaaga

SEQ ID NO: 38485 - DNA, 16 bp, Homo sapiens
gaagcctcaatgccca

SEQ ID NO: 38486 - DNA, 16 bp, Homo sapiens
tccatgacgtaagcct

SEQ ID NO: 38487 - DNA, 21 bp, Homo sapiens
ggtcactgggcttgcttctct

SEQ ID NO: 38488 - DNA, 16 bp, Homo sapiens
cagtcgggaaagccag

SEQ ID NO: 38489 - DNA, 22 bp, Homo sapiens
cacagatttggctctcagcaca

SEQ ID NO: 38490 - DNA, 16 bp, Homo sapiens
gcctccctccagcgcc

SEQ ID NO: 38491 - DNA, 21 bp, Homo sapiens
gaaatttgcactgatggctca

SEQ ID NO: 38492 - DNA, 16 bp, Homo sapiens
aagatgacaggcaaca

SEQ ID NO: 38493 - DNA, 18 bp, Homo sapiens
cagggatgctggaccaac

SEQ ID NO: 38494 - DNA, 21 bp, Homo sapiens
cctgcctatccctggagtgct

SEQ ID NO: 38495 - DNA, 16 bp, Homo sapiens
ctcactcacacactgc

SEQ ID NO: 38496 - DNA, 24 bp, Homo sapiens
cacccctcaagttcctccctggcc

SEQ ID NO: 38497 - DNA, 24 bp, Homo sapiens
gtgtcacgcagtatgcgctcgtac

SEQ ID NO: 38498 - DNA, 19 bp, Homo sapiens
acccagctccctgcagcgt

SEQ ID NO: 38499 - DNA, 16 bp, Homo sapiens
acagcttagctggtgg

SEQ ID NO: 38500 - DNA, 20 bp, Homo sapiens
gtgttcagctccgaggccgc

SEQ ID NO: 38501 - DNA, 24 bp, Homo sapiens
tgggctgcgggggcctctgcgagg

SEQ ID NO: 38502 - DNA, 22 bp, Homo sapiens
cttgggctacacaagggactat

SEQ ID NO: 38503 - DNA, 16 bp, Homo sapiens
gagacgtgccagggct

SEQ ID NO: 38504 - DNA, 17 bp, Homo sapiens
tccctgtgcactccctg

SEQ ID NO: 38505 - DNA, 23 bp, Homo sapiens
gcagacccgtcagggcgatgtac

SEQ ID NO: 38506 - DNA, 24 bp, Homo sapiens
aggagcagtggcttttgtggcaat

SEQ ID NO: 38507 - DNA, 23 bp, Homo sapiens
cacacggtgacaatggcacctac

SEQ ID NO: 38508 - DNA, 24 bp, Homo sapiens
cgtggcactaccatggctgcctgg

SEQ ID NO: 38509 - DNA, 18 bp, Homo sapiens
ctttcctcccactgccct

SEQ ID NO: 38510 - DNA, 24 bp, Homo sapiens
ggaaccaatgagattctccggatg

SEQ ID NO: 38511 - DNA, 17 bp, Homo sapiens
gtcccctccacaaggct

SEQ ID NO: 38512 - DNA, 19 bp, Homo sapiens
tgactaccaggatccagta

SEQ ID NO: 38513 - DNA, 23 bp, Homo sapiens
ccggccaacggtatccatgactg

SEQ ID NO: 38514 - DNA, 24 bp, Homo sapiens
caggggcccagcatacccaggcca

SEQ ID NO: 38515 - DNA, 19 bp, Homo sapiens
catggttgcctgtcagccc

SEQ ID NO: 38516 - DNA, 24 bp, Homo sapiens
gttgctggacagtgagcgccagca

SEQ ID NO: 38517 - DNA, 22 bp, Homo sapiens
ggcattgaaatagggggtatgc

SEQ ID NO: 38518 - DNA, 19 bp, Homo sapiens
cttaaacaggccaaagtga

SEQ ID NO: 38519 - DNA, 23 bp, Homo sapiens
ggagaagcccagaccccccacag

SEQ ID NO: 38520 - DNA, 17 bp, Homo sapiens
ccgaactgtggacctgg

SEQ ID NO: 38521 - DNA, 22 bp, Homo sapiens
ccccatctgggggaagcaatcc

SEQ ID NO: 38522 - DNA, 17 bp, Homo sapiens
taggtgttctcctcaaa

SEQ ID NO: 38523 - DNA, 24 bp, Homo sapiens
accagctagtccatgacaccctgg

SEQ ID NO: 38524 - DNA, 17 bp, Homo sapiens
cctggttaccttgccaa

SEQ ID NO: 38525 - DNA, 23 bp, Homo sapiens
gtacccgggctgtgagacaggac

SEQ ID NO: 38526 - DNA, 20 bp, Homo sapiens
ttgacaaaaagtagtctcat

SEQ ID NO: 38527 - DNA, 20 bp, Homo sapiens
tggttaataggacagtgcca

SEQ ID NO: 38528 - DNA, 16 bp, Homo sapiens
ccctccagggtgatca

SEQ ID NO: 38529 - DNA, 23 bp, Homo sapiens
ggagacactgctgctccgctttg

SEQ ID NO: 38530 - DNA, 21 bp, Homo sapiens
gctgggagccgttctcccaca

SEQ ID NO: 38531 - DNA, 18 bp, Homo sapiens
caggttgatgaggatgtt

SEQ ID NO: 38532 - DNA, 24 bp, Homo sapiens
aaggaacacaggagactaagacag

SEQ ID NO: 38533 - DNA, 23 bp, Homo sapiens
tcgtggtcgtggttgcggagccc

SEQ ID NO: 38534 - DNA, 24 bp, Homo sapiens
ctggtctaggtagtgagtccccac

SEQ ID NO: 38535 - DNA, 16 bp, Homo sapiens
gacagatggcagcagc

SEQ ID NO: 38536 - DNA, 17 bp, Homo sapiens
actgaagcgggtggcca

SEQ ID NO: 38537 - DNA, 23 bp, Homo sapiens
aacctgcacagcctcccccacac

SEQ ID NO: 38538 - DNA, 23 bp, Homo sapiens
gcgggccagccgctccatccgca

SEQ ID NO: 38539 - DNA, 22 bp, Homo sapiens
cagggctggaattagaacccaa

SEQ ID NO: 38540 - DNA, 23 bp, Homo sapiens
ttgtccagctgagagaggctgaa

SEQ ID NO: 38541 - DNA, 23 bp, Homo sapiens
ccatgctacccagtttggctgat

SEQ ID NO: 38542 - DNA, 16 bp, Homo sapiens
ctagaagtgggccctt

SEQ ID NO: 38543 - DNA, 22 bp, Homo sapiens
aggaatttgggcatatcttttc

SEQ ID NO: 38544 - DNA, 19 bp, Homo sapiens
ggtctgtgagtagctagca

SEQ ID NO: 38545 - DNA, 24 bp, Homo sapiens
gcgtggaagcttacttgcagaatc

SEQ ID NO: 38546 - DNA, 22 bp, Homo sapiens
ctggtgggcactgctgcagcta

SEQ ID NO: 38547 - DNA, 17 bp, Homo sapiens
tctccctgcagccctga

SEQ ID NO: 38548 - DNA, 17 bp, Homo sapiens
ctgggacactttcttaa

SEQ ID NO: 38549 - DNA, 21 bp, Homo sapiens
tagggctgcttcatggtgggt

SEQ ID NO: 38550 - DNA, 16 bp, Homo sapiens
tcagcatgtcctgtcc

SEQ ID NO: 38551 - DNA, 24 bp, Homo sapiens
catgtttgtcttatcacggtgcag

SEQ ID NO: 38552 - DNA, 17 bp, Homo sapiens
acagtcatccagcaacg

SEQ ID NO: 38553 - DNA, 19 bp, Homo sapiens
aacctagatgagcagatta

SEQ ID NO: 38554 - DNA, 16 bp, Homo sapiens
gtgcagacggggaaca

SEQ ID NO: 38555 - DNA, 23 bp, Homo sapiens
ctatatctgtgcccaccctctgg

SEQ ID NO: 38556 - DNA, 24 bp, Homo sapiens
cagaacgctgagccttgccccgac

SEQ ID NO: 38557 - DNA, 24 bp, Homo sapiens
aggttctgtagtccagcccccgcg

SEQ ID NO: 38558 - DNA, 24 bp, Homo sapiens
ttaacagaggtggcctggctgcaa

SEQ ID NO: 38559 - DNA, 18 bp, Homo sapiens
gctttagcacatgcgtac

SEQ ID NO: 38560 - DNA, 20 bp, Homo sapiens
gtcaatacggcgttggcccc

SEQ ID NO: 38561 - DNA, 24 bp, Homo sapiens
atggcggcggcattacgggtggcg

SEQ ID NO: 38562 - DNA, 21 bp, Homo sapiens
gacgccaggggcgggactcac

SEQ ID NO: 38563 - DNA, 23 bp, Homo sapiens
cgccgcggtccgcagcctttgca

SEQ ID NO: 38564 - DNA, 23 bp, Homo sapiens
accgtgcggattggcagggaggc

SEQ ID NO: 38565 - DNA, 24 bp, Homo sapiens
aaaacaagcgccggaccgcgctgc

SEQ ID NO: 38566 - DNA, 21 bp, Homo sapiens
ccacgagaaacgctacaggtt

SEQ ID NO: 38567 - DNA, 23 bp, Homo sapiens
ataacacctatctgccttgggca

SEQ ID NO: 38568 - DNA, 19 bp, Homo sapiens
gctctcaacaaagctgcca

SEQ ID NO: 38569 - DNA, 16 bp, Homo sapiens
ccttcaagccctccca

SEQ ID NO: 38570 - DNA, 19 bp, Homo sapiens
taccttattcttatcagca

SEQ ID NO: 38571 - DNA, 18 bp, Homo sapiens
atgacatcactgagtgat

SEQ ID NO: 38572 - DNA, 23 bp, Homo sapiens
ttattattctagtgggtaggcca

SEQ ID NO: 38573 - DNA, 21 bp, Homo sapiens
tctcttgctggaccctggcag

SEQ ID NO: 38574 - DNA, 16 bp, Homo sapiens
tgtctgcagtgcctct

SEQ ID NO: 38575 - DNA, 16 bp, Homo sapiens
ttggaatggctgctga

SEQ ID NO: 38576 - DNA, 24 bp, Homo sapiens
ctgttgtagagctgggaaagtggg

SEQ ID NO: 38577 - DNA, 19 bp, Homo sapiens
agacataaaccaatcttcc

SEQ ID NO: 38578 - DNA, 17 bp, Homo sapiens
ttgggttttgtttttgt

SEQ ID NO: 38579 - DNA, 21 bp, Homo sapiens
ctcttggctctgccctccaag

SEQ ID NO: 38580 - DNA, 26 bp, Homo sapiens
atttggattttttaacctttattttt

SEQ ID NO: 38581 - DNA, 17 bp, Homo sapiens
ccccaaactacaagcaa

SEQ ID NO: 38582 - DNA, 21 bp, Homo sapiens
tggtcactggacgaggccgaa

SEQ ID NO: 38583 - DNA, 24 bp, Homo sapiens
cctaagtaaaaaacacacaatatt

SEQ ID NO: 38584 - DNA, 20 bp, Homo sapiens
tgattctgttcttaattcct

SEQ ID NO: 38585 - DNA, 16 bp, Homo sapiens
tcccaaagtgctgaga

SEQ ID NO: 38586 - DNA, 22 bp, Homo sapiens
tatgcccacaataagcccttta

SEQ ID NO: 38587 - DNA, 17 bp, Homo sapiens
ttgccatgttggctagg

SEQ ID NO: 38588 - DNA, 18 bp, Homo sapiens
gctctgattcttgttttt

SEQ ID NO: 38589 - DNA, 23 bp, Homo sapiens
ccttggcctcccaaagtgttggg

SEQ ID NO: 38590 - DNA, 21 bp, Homo sapiens
taaacacttactttgcagatc

SEQ ID NO: 38591 - DNA, 25 bp, Homo sapiens
tttatctgtgaattttctatttctt

SEQ ID NO: 38592 - DNA, 20 bp, Homo sapiens
accccaaagatactcaataa

SEQ ID NO: 38593 - DNA, 20 bp, Homo sapiens
tatttgacttgctgatttgt

SEQ ID NO: 38594 - DNA, 17 bp, Homo sapiens
tggtagcacatcttgca

SEQ ID NO: 38595 - DNA, 21 bp, Homo sapiens
ctgtcaggagcacatgcccaa

SEQ ID NO: 38596 - DNA, 18 bp, Homo sapiens
aatcactggagcccccac

SEQ ID NO: 38597 - DNA, 20 bp, Homo sapiens
tgcctcctgttttgaaaagt

SEQ ID NO: 38598 - DNA, 17 bp, Homo sapiens
cagccaaagactccact

SEQ ID NO: 38599 - DNA, 19 bp, Homo sapiens
tgtgaatgtcgttttttat

SEQ ID NO: 38600 - DNA, 22 bp, Homo sapiens
gaacttaagccctgtatttttt

SEQ ID NO: 38601 - DNA, 24 bp, Homo sapiens
agatcatggaccaggccataacgg

SEQ ID NO: 38602 - DNA, 16 bp, Homo sapiens
tgcggcagagaacaat

SEQ ID NO: 38603 - DNA, 22 bp, Homo sapiens
gagcacggatccaagaaggagt

SEQ ID NO: 38604 - DNA, 20 bp, Homo sapiens
ttgcttttcatctacccttc

SEQ ID NO: 38605 - DNA, 20 bp, Homo sapiens
cagagaaatctgagggatga

SEQ ID NO: 38606 - DNA, 24 bp, Homo sapiens
ctgtatagaatttctgtgggaaaa

SEQ ID NO: 38607 - DNA, 16 bp, Homo sapiens
tgaagtctgttagggc

SEQ ID NO: 38608 - DNA, 21 bp, Homo sapiens
ccacagataatgcctcaaaca

SEQ ID NO: 38609 - DNA, 18 bp, Homo sapiens
gtaaggaactgcacaaat

SEQ ID NO: 38610 - DNA, 18 bp, Homo sapiens
atgttacggcatccggag

SEQ ID NO: 38611 - DNA, 19 bp, Homo sapiens
ccaatgagaatgcaggtaa

SEQ ID NO: 38612 - DNA, 18 bp, Homo sapiens
ggggccgtctactcccca

SEQ ID NO: 38613 - DNA, 18 bp, Homo sapiens
aagctacagatttcatgc

SEQ ID NO: 38614 - DNA, 21 bp, Homo sapiens
aacttgggtctttagtttgga

SEQ ID NO: 38615 - DNA, 19 bp, Homo sapiens
tcctcattggtgacagact

SEQ ID NO: 38616 - DNA, 24 bp, Homo sapiens
acgtcactatcttctctgcatttg

SEQ ID NO: 38617 - DNA, 16 bp, Homo sapiens
acctgacatggtggtg

SEQ ID NO: 38618 - DNA, 19 bp, Homo sapiens
ctctggtgctctgaggttg

SEQ ID NO: 38619 - DNA, 17 bp, Homo sapiens
gctctttggcaatgccc

SEQ ID NO: 38620 - DNA, 16 bp, Homo sapiens
ggccctgatgttgtga

SEQ ID NO: 38621 - DNA, 18 bp, Homo sapiens
ccacagtcttcccaaata

SEQ ID NO: 38622 - DNA, 17 bp, Homo sapiens
cggtggtgccaagaccc

SEQ ID NO: 38623 - DNA, 17 bp, Homo sapiens
gtggcattacatcctca

SEQ ID NO: 38624 - DNA, 17 bp, Homo sapiens
aatcccggagattacac

SEQ ID NO: 38625 - DNA, 23 bp, Homo sapiens
tctgctactgacatgccctagaa

SEQ ID NO: 38626 - DNA, 16 bp, Homo sapiens
tgggatcgtggcactc

SEQ ID NO: 38627 - DNA, 24 bp, Homo sapiens
ctggtaccctgactcaatcatata

SEQ ID NO: 38628 - DNA, 17 bp, Homo sapiens
gagaaaggcaagctaca

SEQ ID NO: 38629 - DNA, 24 bp, Homo sapiens
ttttgaaaatgatgttgatgcctt

SEQ ID NO: 38630 - DNA, 17 bp, Homo sapiens
ccactctaccacactct

SEQ ID NO: 38631 - DNA, 21 bp, Homo sapiens
gtcaggacccggctcccgtcc

SEQ ID NO: 38632 - DNA, 21 bp, Homo sapiens
aatatggtggttaaaaaggaa

SEQ ID NO: 38633 - DNA, 18 bp, Homo sapiens
ttccaaagggacaattgt

SEQ ID NO: 38634 - DNA, 19 bp, Homo sapiens
gacagaactggcccagtcc

SEQ ID NO: 38635 - DNA, 17 bp, Homo sapiens
aacagatgtggcactta

SEQ ID NO: 38636 - DNA, 19 bp, Homo sapiens
caaaaggtaactggctctt

SEQ ID NO: 38637 - DNA, 16 bp, Homo sapiens
ttcctcactaagccga

SEQ ID NO: 38638 - DNA, 22 bp, Homo sapiens
ctggttcctgagcttgacacaa

SEQ ID NO: 38639 - DNA, 21 bp, Homo sapiens
actggtcctgtgcccacccta

SEQ ID NO: 38640 - DNA, 20 bp, Homo sapiens
gtggacatcatacactctgt

SEQ ID NO: 38641 - DNA, 20 bp, Homo sapiens
cctctgcctgttgtcctgct

SEQ ID NO: 38642 - DNA, 19 bp, Homo sapiens
acaatgatgttcttggcat

SEQ ID NO: 38643 - DNA, 21 bp, Homo sapiens
ctacctctgtaattctgtaat

SEQ ID NO: 38644 - DNA, 18 bp, Homo sapiens
ccaccttaggttggttgc

SEQ ID NO: 38645 - DNA, 20 bp, Homo sapiens
tttaccattttgagctcaga

SEQ ID NO: 38646 - DNA, 16 bp, Homo sapiens
gcttccctggcctcca

SEQ ID NO: 38647 - DNA, 20 bp, Homo sapiens
tttgagatcatgcccaatta

SEQ ID NO: 38648 - DNA, 17 bp, Homo sapiens
ctctggtcatggaaggc

SEQ ID NO: 38649 - DNA, 16 bp, Homo sapiens
tggaattgttggcaac

SEQ ID NO: 38650 - DNA, 16 bp, Homo sapiens
tccctgtttcctggag

SEQ ID NO: 38651 - DNA, 17 bp, Homo sapiens
atctgacaaaacgagcc

SEQ ID NO: 38652 - DNA, 17 bp, Homo sapiens
gcctccacagaaaccag

SEQ ID NO: 38653 - DNA, 21 bp, Homo sapiens
taccaggtagaaagccaggga

SEQ ID NO: 38654 - DNA, 23 bp, Homo sapiens
atagaactgggaattgcctggat

SEQ ID NO: 38655 - DNA, 17 bp, Homo sapiens
aaagtgggcaccttact

SEQ ID NO: 38656 - DNA, 21 bp, Homo sapiens
tattaattcatctgtgaaagg

SEQ ID NO: 38657 - DNA, 19 bp, Homo sapiens
acacccagaatacatggag

SEQ ID NO: 38658 - DNA, 22 bp, Homo sapiens
ccactcatcacttttgttgatg

SEQ ID NO: 38659 - DNA, 20 bp, Homo sapiens
ctccccgaggacttgtgact

SEQ ID NO: 38660 - DNA, 17 bp, Homo sapiens
gcgtagagaagcttggc

SEQ ID NO: 38661 - DNA, 20 bp, Homo sapiens
ggccctctccagaggtggga

SEQ ID NO: 38662 - DNA, 16 bp, Homo sapiens
aacatgaggtcctcac

SEQ ID NO: 38663 - DNA, 22 bp, Homo sapiens
tgtgaggacttgtgggtatcta

SEQ ID NO: 38664 - DNA, 21 bp, Homo sapiens
aaactctgccagacctcccac

SEQ ID NO: 38665 - DNA, 22 bp, Homo sapiens
gcatcatccggcatggtgccaa

SEQ ID NO: 38666 - DNA, 19 bp, Homo sapiens
acaacatcctcaagagatc

SEQ ID NO: 38667 - DNA, 19 bp, Homo sapiens
gtcacagtcatcaccagga

SEQ ID NO: 38668 - DNA, 20 bp, Homo sapiens
tgagcattaactttgaaagg

SEQ ID NO: 38669 - DNA, 24 bp, Homo sapiens
caggcatagttggtatcaccacaa

SEQ ID NO: 38670 - DNA, 18 bp, Homo sapiens
cttgttctttgtcccaat

SEQ ID NO: 38671 - DNA, 16 bp, Homo sapiens
aaagcaagaggccctc

SEQ ID NO: 38672 - DNA, 20 bp, Homo sapiens
ctgtctcaggctctaacact

SEQ ID NO: 38673 - DNA, 16 bp, Homo sapiens
tcccagctatgccttg

SEQ ID NO: 38674 - DNA, 23 bp, Homo sapiens
tcatgagctctaagcacctttgt

SEQ ID NO: 38675 - DNA, 18 bp, Homo sapiens
aaggtctaggtcccattc

SEQ ID NO: 38676 - DNA, 20 bp, Homo sapiens
cagtcatgggagcaaaggtg

SEQ ID NO: 38677 - DNA, 20 bp, Homo sapiens
gcagttcctccctctatgct

SEQ ID NO: 38678 - DNA, 18 bp, Homo sapiens
atgtactctgcctgagca

SEQ ID NO: 38679 - DNA, 24 bp, Homo sapiens
gatttaccaagaaatttgcaccca

SEQ ID NO: 38680 - DNA, 17 bp, Homo sapiens
cctcttcaccacagtcc

SEQ ID NO: 38681 - DNA, 20 bp, Homo sapiens
aagatgttcatgaactcctc

SEQ ID NO: 38682 - DNA, 20 bp, Homo sapiens
aaggcagttatgtgacaatt

SEQ ID NO: 38683 - DNA, 18 bp, Homo sapiens
atgagaatgtggaagctg

SEQ ID NO: 38684 - DNA, 16 bp, Homo sapiens
ccagggacagtcccaa

SEQ ID NO: 38685 - DNA, 22 bp, Homo sapiens
ttccctgcagcagtgcgaggta

SEQ ID NO: 38686 - DNA, 20 bp, Homo sapiens
agggggaattcacagggcct

SEQ ID NO: 38687 - DNA, 16 bp, Homo sapiens
aagacatccaggtcac

SEQ ID NO: 38688 - DNA, 16 bp, Homo sapiens
ccagggatggtgccca

SEQ ID NO: 38689 - DNA, 21 bp, Homo sapiens
ttgtttacaatggaatatttg

SEQ ID NO: 38690 - DNA, 18 bp, Homo sapiens
tgatccactcccttttct

SEQ ID NO: 38691 - DNA, 18 bp, Homo sapiens
ggaatgggatgtgaatgg

SEQ ID NO: 38692 - DNA, 21 bp, Homo sapiens
cttcttccacacgtgcccgaa

SEQ ID NO: 38693 - DNA, 22 bp, Homo sapiens
taaacttagttattctaagtta

SEQ ID NO: 38694 - DNA, 20 bp, Homo sapiens
cgtccttggagaaaacatgc

SEQ ID NO: 38695 - DNA, 23 bp, Homo sapiens
cccgcggcggcctctttaagtag

SEQ ID NO: 38696 - DNA, 24 bp, Homo sapiens
cagcttgcagggcaccacctgctg

SEQ ID NO: 38697 - DNA, 24 bp, Homo sapiens
ccggcgtcattggctcgctcgcgg

SEQ ID NO: 38698 - DNA, 24 bp, Homo sapiens
ccttgcagcccgccgccacgaaaa

SEQ ID NO: 38699 - DNA, 24 bp, Homo sapiens
ctccgggcgccctgcagggcgggc

SEQ ID NO: 38700 - DNA, 23 bp, Homo sapiens
agaaggcgcaccgcggctggcac

SEQ ID NO: 38701 - DNA, 24 bp, Homo sapiens
ctgtacaacctgcacccgttcggg

SEQ ID NO: 38702 - DNA, 23 bp, Homo sapiens
tggctctctagattactcaccag

SEQ ID NO: 38703 - DNA, 24 bp, Homo sapiens
ggttctgtggcggggggcgtgacg

SEQ ID NO: 38704 - DNA, 16 bp, Homo sapiens
gacgttcggtccgcta

SEQ ID NO: 38705 - DNA, 16 bp, Homo sapiens
tggccggccaggagct

SEQ ID NO: 38706 - DNA, 16 bp, Homo sapiens
agaccatccggcaaat

SEQ ID NO: 38707 - DNA, 21 bp, Homo sapiens
gttgcgcctggcctacagcga

SEQ ID NO: 38708 - DNA, 23 bp, Homo sapiens
aaaaatacacctaagattttgtt

SEQ ID NO: 38709 - DNA, 18 bp, Homo sapiens
tcacataagcacgtagaa

SEQ ID NO: 38710 - DNA, 22 bp, Homo sapiens
accatttgtgttagaattcatt

SEQ ID NO: 38711 - DNA, 17 bp, Homo sapiens
tatgcccaatcattcgg

SEQ ID NO: 38712 - DNA, 20 bp, Homo sapiens
acaaattctcagtataatct

SEQ ID NO: 38713 - DNA, 16 bp, Homo sapiens
cgaaagcggcatttca

SEQ ID NO: 38714 - DNA, 20 bp, Homo sapiens
gaagagaaaaacaaagctac

SEQ ID NO: 38715 - DNA, 18 bp, Homo sapiens
cagccaacgagaaggtct

SEQ ID NO: 38716 - DNA, 17 bp, Homo sapiens
cgtgtgtgtatccgaat

SEQ ID NO: 38717 - DNA, 20 bp, Homo sapiens
agtccaatagtgagaattcc

SEQ ID NO: 38718 - DNA, 17 bp, Homo sapiens
tcagagaccagatgtac

SEQ ID NO: 38719 - DNA, 17 bp, Homo sapiens
aaacctcaacaggagtg

SEQ ID NO: 38720 - DNA, 21 bp, Homo sapiens
ttcctgttgccctgtgaaagg

SEQ ID NO: 38721 - DNA, 18 bp, Homo sapiens
ctgactccagttttacga

SEQ ID NO: 38722 - DNA, 22 bp, Homo sapiens
tgaagtaccagatcattaatga

SEQ ID NO: 38723 - DNA, 20 bp, Homo sapiens
ccgtcttattcgattgttgg

SEQ ID NO: 38724 - DNA, 24 bp, Homo sapiens
tatacacatagataatatcactcc

SEQ ID NO: 38725 - DNA, 25 bp, Homo sapiens
ggttttctatattcctaaaacaaga

SEQ ID NO: 38726 - DNA, 22 bp, Homo sapiens
tcatgtcagacttagaagtctt

SEQ ID NO: 38727 - DNA, 17 bp, Homo sapiens
aaataacatggccgggc

SEQ ID NO: 38728 - DNA, 16 bp, Homo sapiens
tcaccaccatccacat

SEQ ID NO: 38729 - DNA, 18 bp, Homo sapiens
gctatggacagccagatc

SEQ ID NO: 38730 - DNA, 22 bp, Homo sapiens
aaatgagcaagtgctaagtctt

SEQ ID NO: 38731 - DNA, 16 bp, Homo sapiens
tccaggggcttctggc

SEQ ID NO: 38732 - DNA, 23 bp, Homo sapiens
aaatgaaattactatatgtctaa

SEQ ID NO: 38733 - DNA, 16 bp, Homo sapiens
atcccgtagactccag

SEQ ID NO: 38734 - DNA, 18 bp, Homo sapiens
agcaggactgttacattt

SEQ ID NO: 38735 - DNA, 22 bp, Homo sapiens
aaaaaagcactataatacctat

SEQ ID NO: 38736 - DNA, 17 bp, Homo sapiens
tgattttgtcatctgcc

SEQ ID NO: 38737 - DNA, 24 bp, Homo sapiens
aaaatataacttccatgtacttta

SEQ ID NO: 38738 - DNA, 20 bp, Homo sapiens
tggattatctgttacactgg

SEQ ID NO: 38739 - DNA, 18 bp, Homo sapiens
taggacgaaatatcagga

SEQ ID NO: 38740 - DNA, 20 bp, Homo sapiens
ccactttcagcacctgctct

SEQ ID NO: 38741 - DNA, 17 bp, Homo sapiens
gcttaccggtctggtaa

SEQ ID NO: 38742 - DNA, 23 bp, Homo sapiens
ttttatgtatatatgcctgctta

SEQ ID NO: 38743 - DNA, 16 bp, Homo sapiens
cagcccagacagagca

SEQ ID NO: 38744 - DNA, 19 bp, Homo sapiens
aaacccacagacgttttgc

SEQ ID NO: 38745 - DNA, 16 bp, Homo sapiens
aggagactccagtgga

SEQ ID NO: 38746 - DNA, 17 bp, Homo sapiens
tacattccctccagctg

SEQ ID NO: 38747 - DNA, 23 bp, Homo sapiens
tatttcttaccaacattcttcta

SEQ ID NO: 38748 - DNA, 18 bp, Homo sapiens
caaaagagactcagcaat

SEQ ID NO: 38749 - DNA, 21 bp, Homo sapiens
cactgatacagtttgcatagc

SEQ ID NO: 38750 - DNA, 20 bp, Homo sapiens
actgacatcaattcaacaga

SEQ ID NO: 38751 - DNA, 20 bp, Homo sapiens
atggtgttttatttctttca

SEQ ID NO: 38752 - DNA, 17 bp, Homo sapiens
gcaaaaattgtggcgtg

SEQ ID NO: 38753 - DNA, 21 bp, Homo sapiens
tgtctcaggaaaaagaattgc

SEQ ID NO: 38754 - DNA, 22 bp, Homo sapiens
cctcaaaaatttacaaataagt

SEQ ID NO: 38755 - DNA, 17 bp, Homo sapiens
tctctacatggttgtca

SEQ ID NO: 38756 - DNA, 23 bp, Homo sapiens
aactcatgcatttatagtactct

SEQ ID NO: 38757 - DNA, 18 bp, Homo sapiens
gtctcagcaggcagtact

SEQ ID NO: 38758 - DNA, 19 bp, Homo sapiens
gacattgaaaaggcaggta

SEQ ID NO: 38759 - DNA, 23 bp, Homo sapiens
ctgaggcattcctcttattgaga

SEQ ID NO: 38760 - DNA, 16 bp, Homo sapiens
tcctcctcacgagctg

SEQ ID NO: 38761 - DNA, 16 bp, Homo sapiens
cattgccctgtttgcc

SEQ ID NO: 38762 - DNA, 20 bp, Homo sapiens
gtgatcttaaggtttcacta

SEQ ID NO: 38763 - DNA, 20 bp, Homo sapiens
ttggcctcactttgctcagc

SEQ ID NO: 38764 - DNA, 16 bp, Homo sapiens
tcttgcctagcttagg

SEQ ID NO: 38765 - DNA, 16 bp, Homo sapiens
tgcggtgcagtgcggc

SEQ ID NO: 38766 - DNA, 22 bp, Homo sapiens
aatcctcactattttacatcca

SEQ ID NO: 38767 - DNA, 16 bp, Homo sapiens
tgggttggtcttttgt

SEQ ID NO: 38768 - DNA, 17 bp, Homo sapiens
agcctatgaaaagctgt

SEQ ID NO: 38769 - DNA, 19 bp, Homo sapiens
gcagcagaagagatttgat

SEQ ID NO: 38770 - DNA, 16 bp, Homo sapiens
tggcttcaggttctgc

SEQ ID NO: 38771 - DNA, 21 bp, Homo sapiens
atttcttgcttaaatatgtga

SEQ ID NO: 38772 - DNA, 16 bp, Homo sapiens
ctggggcaaggggatg

SEQ ID NO: 38773 - DNA, 18 bp, Homo sapiens
gtgctttaagaatacagc

SEQ ID NO: 38774 - DNA, 24 bp, Homo sapiens
gttatgatttgaaaaaagataaac

SEQ ID NO: 38775 - DNA, 19 bp, Homo sapiens
cacatcatacttttgacta

SEQ ID NO: 38776 - DNA, 20 bp, Homo sapiens
accttcttttctttctctgg

SEQ ID NO: 38777 - DNA, 18 bp, Homo sapiens
tccatagaaatagagtgt

SEQ ID NO: 38778 - DNA, 16 bp, Homo sapiens
ttccacccagcctcag

SEQ ID NO: 38779 - DNA, 29 bp, Homo sapiens
tgattttatagttattttatatccaatat

SEQ ID NO: 38780 - DNA, 20 bp, Homo sapiens
gtttgaaaagagtaccatct

SEQ ID NO: 38781 - DNA, 24 bp, Homo sapiens
tcattttaaaattcttgtcctttg

SEQ ID NO: 38782 - DNA, 22 bp, Homo sapiens
aattagaatcaatttctgatca

SEQ ID NO: 38783 - DNA, 24 bp, Homo sapiens
ttaaaatcaaaatacctcctgtag

SEQ ID NO: 38784 - DNA, 17 bp, Homo sapiens
ttccactgtcagacaga

SEQ ID NO: 38785 - DNA, 19 bp, Homo sapiens
ctgtacaaagagatggtac

SEQ ID NO: 38786 - DNA, 16 bp, Homo sapiens
gctaagcccttgtcag

SEQ ID NO: 38787 - DNA, 17 bp, Homo sapiens
gaaggtgaatgcagctc

SEQ ID NO: 38788 - DNA, 22 bp, Homo sapiens
ccaaatgttaactttactaaca

SEQ ID NO: 38789 - DNA, 17 bp, Homo sapiens
tccaggttccagctgac

SEQ ID NO: 38790 - DNA, 18 bp, Homo sapiens
agtctctcttcagcaaca

SEQ ID NO: 38791 - DNA, 16 bp, Homo sapiens
tccccaaggtgcccac

SEQ ID NO: 38792 - DNA, 21 bp, Homo sapiens
tacctataagactgtcaaaac

SEQ ID NO: 38793 - DNA, 19 bp, Homo sapiens
cccaaagttcaagatgact

SEQ ID NO: 38794 - DNA, 16 bp, Homo sapiens
cgagctgccctgatgg

SEQ ID NO: 38795 - DNA, 20 bp, Homo sapiens
ataaatgaaccaccttccca

SEQ ID NO: 38796 - DNA, 21 bp, Homo sapiens
ggaagcatttaaggaaagctg

SEQ ID NO: 38797 - DNA, 20 bp, Homo sapiens
taagcctagcacagtgccta

SEQ ID NO: 38798 - DNA, 20 bp, Homo sapiens
catggtggcttacacctgga

SEQ ID NO: 38799 - DNA, 18 bp, Homo sapiens
agccatagacaaaccaga

SEQ ID NO: 38800 - DNA, 20 bp, Homo sapiens
ggtcaggagtttgaaatcag

SEQ ID NO: 38801 - DNA, 17 bp, Homo sapiens
ctctctcgtatttctgt

SEQ ID NO: 38802 - DNA, 21 bp, Homo sapiens
ttgaggtttttcatttccttc

SEQ ID NO: 38803 - DNA, 27 bp, Homo sapiens
ctataatcacttcatttaattcttcat

SEQ ID NO: 38804 - DNA, 21 bp, Homo sapiens
ccttgccatactataagatgt

SEQ ID NO: 38805 - DNA, 23 bp, Homo sapiens
agtactacataaaataaaccatt

SEQ ID NO: 38806 - DNA, 20 bp, Homo sapiens
tggacagtagaggatggatt

SEQ ID NO: 38807 - DNA, 23 bp, Homo sapiens
ttttagaaaaagagtatcaaaga

SEQ ID NO: 38808 - DNA, 18 bp, Homo sapiens
actttatgaaaacctgga

SEQ ID NO: 38809 - DNA, 18 bp, Homo sapiens
gctcagccacataaaaca

SEQ ID NO: 38810 - DNA, 23 bp, Homo sapiens
ttatcttacttggaatgtttgtg

SEQ ID NO: 38811 - DNA, 19 bp, Homo sapiens
catggcagttaaaggatta

SEQ ID NO: 38812 - DNA, 20 bp, Homo sapiens
gctttcttctggctgactga

SEQ ID NO: 38813 - DNA, 21 bp, Homo sapiens
tggtcaatgtcactaagatcg

SEQ ID NO: 38814 - DNA, 23 bp, Homo sapiens
aattagcagcaaaagtggttcag

SEQ ID NO: 38815 - DNA, 21 bp, Homo sapiens
ggcttttcatttcatttctgt

SEQ ID NO: 38816 - DNA, 24 bp, Homo sapiens
attctctgtagtccttctatgaag

SEQ ID NO: 38817 - DNA, 17 bp, Homo sapiens
ccaggtcctatttcagc

SEQ ID NO: 38818 - DNA, 22 bp, Homo sapiens
gatacttctgggttttcatcga

SEQ ID NO: 38819 - DNA, 20 bp, Homo sapiens
ttccattacaaccaagaata

SEQ ID NO: 38820 - DNA, 17 bp, Homo sapiens
atcttgacatgcacaga

SEQ ID NO: 38821 - DNA, 17 bp, Homo sapiens
tcatttgccagatccga

SEQ ID NO: 38822 - DNA, 16 bp, Homo sapiens
gccgaggttccagaat

SEQ ID NO: 38823 - DNA, 26 bp, Homo sapiens
ttaaattattaatagcttaaccatgc

SEQ ID NO: 38824 - DNA, 17 bp, Homo sapiens
tccttcaagtgaagtgc

SEQ ID NO: 38825 - DNA, 20 bp, Homo sapiens
caatctaaatacaatgtacc

SEQ ID NO: 38826 - DNA, 21 bp, Homo sapiens
tccaattttgttgttcttctg

SEQ ID NO: 38827 - DNA, 17 bp, Homo sapiens
gttggtatgtggcttca

SEQ ID NO: 38828 - DNA, 19 bp, Homo sapiens
gccatccagaaaaatcaca

SEQ ID NO: 38829 - DNA, 23 bp, Homo sapiens
gacagattgttccaaccgagctt

SEQ ID NO: 38830 - DNA, 20 bp, Homo sapiens
taaacaaacaaatgaaaaac

SEQ ID NO: 38831 - DNA, 17 bp, Homo sapiens
tgggcttgcagaagaac

SEQ ID NO: 38832 - DNA, 24 bp, Homo sapiens
agatatagtcttttaattagtact

SEQ ID NO: 38833 - DNA, 20 bp, Homo sapiens
caagagctgaggaattgtat

SEQ ID NO: 38834 - DNA, 21 bp, Homo sapiens
atgctaatggtaaattattga

SEQ ID NO: 38835 - DNA, 18 bp, Homo sapiens
ttcctgaagtaccacatc

SEQ ID NO: 38836 - DNA, 18 bp, Homo sapiens
tcgctttatcagtgctat

SEQ ID NO: 38837 - DNA, 16 bp, Homo sapiens
ggaggctgcctcttag

SEQ ID NO: 38838 - DNA, 24 bp, Homo sapiens
taaggtgctttgtgctaaggatga

SEQ ID NO: 38839 - DNA, 25 bp, Homo sapiens
gcatgagttaaatttaaggtattat

SEQ ID NO: 38840 - DNA, 19 bp, Homo sapiens
cagctagtggcatgtctcc

SEQ ID NO: 38841 - DNA, 27 bp, Homo sapiens
actaggttagattttataataagttat

SEQ ID NO: 38842 - DNA, 17 bp, Homo sapiens
tctggagattgtctaag

SEQ ID NO: 38843 - DNA, 22 bp, Homo sapiens
aagacaaattttaagtgtattt

SEQ ID NO: 38844 - DNA, 20 bp, Homo sapiens
ttttccaggggaaaaattct

SEQ ID NO: 38845 - DNA, 19 bp, Homo sapiens
tgaacccatggataaatta

SEQ ID NO: 38846 - DNA, 16 bp, Homo sapiens
tatgacatggcagaga

SEQ ID NO: 38847 - DNA, 22 bp, Homo sapiens
cttacctgtaattttgaaagat

SEQ ID NO: 38848 - DNA, 21 bp, Homo sapiens
caagcttttgttgttatattt

SEQ ID NO: 38849 - DNA, 25 bp, Homo sapiens
atttaatcttacactatattgtaat

SEQ ID NO: 38850 - DNA, 24 bp, Homo sapiens
atgcctgtagtcattatggcttaa

SEQ ID NO: 38851 - DNA, 21 bp, Homo sapiens
tatggattttgtccctcaaaa

SEQ ID NO: 38852 - DNA, 25 bp, Homo sapiens
ttagctgataaaaattatacagaag

SEQ ID NO: 38853 - DNA, 26 bp, Homo sapiens
tacttagatttattaaataaggacca

SEQ ID NO: 38854 - DNA, 19 bp, Homo sapiens
ccaagaacggaataatgga

SEQ ID NO: 38855 - DNA, 23 bp, Homo sapiens
tattttatttttggcaagtgagg

SEQ ID NO: 38856 - DNA, 16 bp, Homo sapiens
caagcgtgtacgacac

SEQ ID NO: 38857 - DNA, 18 bp, Homo sapiens
ttttgaggtgcctcattt

SEQ ID NO: 38858 - DNA, 17 bp, Homo sapiens
tgactgcctccgggcat

SEQ ID NO: 38859 - DNA, 20 bp, Homo sapiens
ttcatttgacatagcttcca

SEQ ID NO: 38860 - DNA, 21 bp, Homo sapiens
caagcctaaaaacataatctg

SEQ ID NO: 38861 - DNA, 17 bp, Homo sapiens
gccggcctcagtgtcca

SEQ ID NO: 38862 - DNA, 18 bp, Homo sapiens
gtccccattttgcaggaa

SEQ ID NO: 38863 - DNA, 20 bp, Homo sapiens
catactgttagagagatgcc

SEQ ID NO: 38864 - DNA, 23 bp, Homo sapiens
atattaaacatatatgctcaatg

SEQ ID NO: 38865 - DNA, 17 bp, Homo sapiens
aagttcaggcaacagtt

SEQ ID NO: 38866 - DNA, 18 bp, Homo sapiens
gctgccttagacaaaatg

SEQ ID NO: 38867 - DNA, 20 bp, Homo sapiens
tttaccttttaatgatgaca

SEQ ID NO: 38868 - DNA, 23 bp, Homo sapiens
tctcctttgaaatctgagaataa

SEQ ID NO: 38869 - DNA, 16 bp, Homo sapiens
agaaggcttcaccaaa

SEQ ID NO: 38870 - DNA, 18 bp, Homo sapiens
tctgtggtggaaaaaact

SEQ ID NO: 38871 - DNA, 18 bp, Homo sapiens
aagctccccagatggttc

SEQ ID NO: 38872 - DNA, 22 bp, Homo sapiens
gagagaagtatcaactctacct

SEQ ID NO: 38873 - DNA, 20 bp, Homo sapiens
cttgaactcctgacctcgtg

SEQ ID NO: 38874 - DNA, 20 bp, Homo sapiens
tgagccaccacgcctggcct

SEQ ID NO: 38875 - DNA, 18 bp, Homo sapiens
tcgactgcaatagagaag

SEQ ID NO: 38876 - DNA, 18 bp, Homo sapiens
tgaaagacagactttcaa

SEQ ID NO: 38877 - DNA, 16 bp, Homo sapiens
tcagtctcaaatgcca

SEQ ID NO: 38878 - DNA, 18 bp, Homo sapiens
aattgttgctgtggaact

SEQ ID NO: 38879 - DNA, 24 bp, Homo sapiens
gtgtgtgtgtgatatataaaataa

SEQ ID NO: 38880 - DNA, 18 bp, Homo sapiens
cagcctgaaagcatttgt

SEQ ID NO: 38881 - DNA, 21 bp, Homo sapiens
cagtgttttattttaaggagt

SEQ ID NO: 38882 - DNA, 18 bp, Homo sapiens
ccctgaattacccatcaa

SEQ ID NO: 38883 - DNA, 18 bp, Homo sapiens
gtggtcagaggcctagtg

SEQ ID NO: 38884 - DNA, 21 bp, Homo sapiens
ctgtatcatcttggtcttgtt

SEQ ID NO: 38885 - DNA, 16 bp, Homo sapiens
aggacagcaggttgag

SEQ ID NO: 38886 - DNA, 21 bp, Homo sapiens
tcgagtactaatatgcaatta

SEQ ID NO: 38887 - DNA, 17 bp, Homo sapiens
tctgcttcccttacttt

SEQ ID NO: 38888 - DNA, 16 bp, Homo sapiens
aagacgcagaaacaac

SEQ ID NO: 38889 - DNA, 21 bp, Homo sapiens
tcacgaagggtcctgatgctt

SEQ ID NO: 38890 - DNA, 17 bp, Homo sapiens
tctgaatgggctcctaa

SEQ ID NO: 38891 - DNA, 20 bp, Homo sapiens
tctaaaagtgaccaaagcaa

SEQ ID NO: 38892 - DNA, 18 bp, Homo sapiens
acaaaacgcaaagtgaaa

SEQ ID NO: 38893 - DNA, 16 bp, Homo sapiens
tagatctgcagctaca

SEQ ID NO: 38894 - DNA, 17 bp, Homo sapiens
aaatccatcacctctca

SEQ ID NO: 38895 - DNA, 17 bp, Homo sapiens
atccagcaagtcgtatt

SEQ ID NO: 38896 - DNA, 16 bp, Homo sapiens
ttcttctgttgcaggc

SEQ ID NO: 38897 - DNA, 17 bp, Homo sapiens
acccagaatgaggtggt

SEQ ID NO: 38898 - DNA, 19 bp, Homo sapiens
ccttggtttacacattgac

SEQ ID NO: 38899 - DNA, 21 bp, Homo sapiens
tttgcaattttttctgagagg

SEQ ID NO: 38900 - DNA, 22 bp, Homo sapiens
atatgcaataattttttgtgtg

SEQ ID NO: 38901 - DNA, 22 bp, Homo sapiens
atcatgacaagacagccacagg

SEQ ID NO: 38902 - DNA, 24 bp, Homo sapiens
gaccctaagcagtgtgcacaagta

SEQ ID NO: 38903 - DNA, 21 bp, Homo sapiens
gactgtttctttttctcctga

SEQ ID NO: 38904 - DNA, 18 bp, Homo sapiens
actacaggcctttgtttt

SEQ ID NO: 38905 - DNA, 18 bp, Homo sapiens
gagggatacagaacgata

SEQ ID NO: 38906 - DNA, 18 bp, Homo sapiens
gagagaagggagtagtgt

SEQ ID NO: 38907 - DNA, 23 bp, Homo sapiens
ttgcaaaaagatccaacactttg

SEQ ID NO: 38908 - DNA, 21 bp, Homo sapiens
gtagctggcagccaaagggca

SEQ ID NO: 38909 - DNA, 19 bp, Homo sapiens
ttccctactgttgagcaag

SEQ ID NO: 38910 - DNA, 16 bp, Homo sapiens
actctgcatggtcccc

SEQ ID NO: 38911 - DNA, 18 bp, Homo sapiens
gtgtgcatccatgtatat

SEQ ID NO: 38912 - DNA, 19 bp, Homo sapiens
tccttattgtgttaaccat

SEQ ID NO: 38913 - DNA, 18 bp, Homo sapiens
ttgaaaagcacatttgtc

SEQ ID NO: 38914 - DNA, 17 bp, Homo sapiens
tgctcaaagcaatccca

SEQ ID NO: 38915 - DNA, 18 bp, Homo sapiens
aggtacagccctagggga

SEQ ID NO: 38916 - DNA, 22 bp, Homo sapiens
actactgctaatgaaacttctt

SEQ ID NO: 38917 - DNA, 16 bp, Homo sapiens
gaaggctgtccccacc

SEQ ID NO: 38918 - DNA, 20 bp, Homo sapiens
aaggattttagtgatgtttg

SEQ ID NO: 38919 - DNA, 16 bp, Homo sapiens
cgtggatgctcactgg

SEQ ID NO: 38920 - DNA, 24 bp, Homo sapiens
ctatctttaaacctttttgtaaac

SEQ ID NO: 38921 - DNA, 22 bp, Homo sapiens
tgggtacccaaaaagactgtca

SEQ ID NO: 38922 - DNA, 23 bp, Homo sapiens
agtgctgtgaggagtaaactcca

SEQ ID NO: 38923 - DNA, 18 bp, Homo sapiens
gatgaagcaaagggccca

SEQ ID NO: 38924 - DNA, 19 bp, Homo sapiens
ctcttgcaggagggagcac

SEQ ID NO: 38925 - DNA, 19 bp, Homo sapiens
gctacgagagcattgtaac

SEQ ID NO: 38926 - DNA, 23 bp, Homo sapiens
ttttcttgaccccttcatgggac

SEQ ID NO: 38927 - DNA, 16 bp, Homo sapiens
tgcagggcctgcatgg

SEQ ID NO: 38928 - DNA, 22 bp, Homo sapiens
cctattttatttctccatcata

SEQ ID NO: 38929 - DNA, 19 bp, Homo sapiens
cactcgttcactcgtgtgc

SEQ ID NO: 38930 - DNA, 16 bp, Homo sapiens
ttcactttcctgacca

SEQ ID NO: 38931 - DNA, 19 bp, Homo sapiens
tggggtacccctgttggga

SEQ ID NO: 38932 - DNA, 19 bp, Homo sapiens
aagttctttctgtagatct

SEQ ID NO: 38933 - DNA, 23 bp, Homo sapiens
aaaaactaggaagaagaaattgc

SEQ ID NO: 38934 - DNA, 16 bp, Homo sapiens
ggagagggtgtgaggc

SEQ ID NO: 38935 - DNA, 19 bp, Homo sapiens
agtcctgcagtaaacacgg

SEQ ID NO: 38936 - DNA, 16 bp, Homo sapiens
aatgcctcagggcagg

SEQ ID NO: 38937 - DNA, 20 bp, Homo sapiens
ctaaagcattaaataactca

SEQ ID NO: 38938 - DNA, 16 bp, Homo sapiens
ccttggggacaccgtt

SEQ ID NO: 38939 - DNA, 19 bp, Homo sapiens
tcccaacccacactgcctc

SEQ ID NO: 38940 - DNA, 21 bp, Homo sapiens
gaagaaaatcattttttgcat

SEQ ID NO: 38941 - DNA, 19 bp, Homo sapiens
cataaacttgtccagctcc

SEQ ID NO: 38942 - DNA, 18 bp, Homo sapiens
cttgtttttgaacctcgc

SEQ ID NO: 38943 - DNA, 24 bp, Homo sapiens
gcagaggacagtggctttgatcca

SEQ ID NO: 38944 - DNA, 22 bp, Homo sapiens
gtccgttcagcttccgtaataa

SEQ ID NO: 38945 - DNA, 19 bp, Homo sapiens
gcaaaactgaacactccgg

SEQ ID NO: 38946 - DNA, 18 bp, Homo sapiens
gacatttaacctggcgag

SEQ ID NO: 38947 - DNA, 20 bp, Homo sapiens
ttagtgacccaaatgcatga

SEQ ID NO: 38948 - DNA, 17 bp, Homo sapiens
tagtcgagtttgaggag

SEQ ID NO: 38949 - DNA, 21 bp, Homo sapiens
caatcatttagtaaaactgct

SEQ ID NO: 38950 - DNA, 21 bp, Homo sapiens
aaggatggcacagtaaagaaa

SEQ ID NO: 38951 - DNA, 23 bp, Homo sapiens
tttggtggagagagaagacacta

SEQ ID NO: 38952 - DNA, 20 bp, Homo sapiens
tagtattgcagctatcattt

SEQ ID NO: 38953 - DNA, 20 bp, Homo sapiens
tttgtctgattcttcctcct

SEQ ID NO: 38954 - DNA, 20 bp, Homo sapiens
ttggctacagttttcatttt

SEQ ID NO: 38955 - DNA, 22 bp, Homo sapiens
caccttctctgtagaacacttt

SEQ ID NO: 38956 - DNA, 17 bp, Homo sapiens
aaacaacaacaacaaca

SEQ ID NO: 38957 - DNA, 19 bp, Homo sapiens
acaagaaggatagtttggt

SEQ ID NO: 38958 - DNA, 16 bp, Homo sapiens
aaagtgaaagcgggag

SEQ ID NO: 38959 - DNA, 19 bp, Homo sapiens
ttttcatatttaaggtggt

SEQ ID NO: 38960 - DNA, 19 bp, Homo sapiens
aggacctctgtgttttcaa

SEQ ID NO: 38961 - DNA, 19 bp, Homo sapiens
cccaaagtcctcatagcaa

SEQ ID NO: 38962 - DNA, 22 bp, Homo sapiens
gttatgagtatatatagacagt

SEQ ID NO: 38963 - DNA, 19 bp, Homo sapiens
atcataaccatgagggaat

SEQ ID NO: 38964 - DNA, 21 bp, Homo sapiens
tctgtgttgttttttttcttt

SEQ ID NO: 38965 - DNA, 25 bp, Homo sapiens
aataaacaatttgaatctgtaatag

SEQ ID NO: 38966 - DNA, 18 bp, Homo sapiens
agctcacaagaaactcag

SEQ ID NO: 38967 - DNA, 18 bp, Homo sapiens
ggtttagaaagggaaaag

SEQ ID NO: 38968 - DNA, 20 bp, Homo sapiens
tgttttctgtttctaggaag

SEQ ID NO: 38969 - DNA, 19 bp, Homo sapiens
ttactgaacatcattctac

SEQ ID NO: 38970 - DNA, 22 bp, Homo sapiens
ttattacctcaggtatattagt

SEQ ID NO: 38971 - DNA, 19 bp, Homo sapiens
taggagctaaggggccgcc

SEQ ID NO: 38972 - DNA, 18 bp, Homo sapiens
gagccactgggcctggcc

SEQ ID NO: 38973 - DNA, 19 bp, Homo sapiens
tggcaaagaaacacagaat

SEQ ID NO: 38974 - DNA, 16 bp, Homo sapiens
ttgctagtaaagcgaa

SEQ ID NO: 38975 - DNA, 22 bp, Homo sapiens
gtcacaggaagctggatctttc

SEQ ID NO: 38976 - DNA, 20 bp, Homo sapiens
ccaagtccttggtaatcttt

SEQ ID NO: 38977 - DNA, 16 bp, Homo sapiens
atgccccaggagggat

SEQ ID NO: 38978 - DNA, 25 bp, Homo sapiens
gtagtgttgttcatttattttaaaa

SEQ ID NO: 38979 - DNA, 17 bp, Homo sapiens
aggataatcagcttcgc

SEQ ID NO: 38980 - DNA, 26 bp, Homo sapiens
acattttatgttttaaaactaccaat

SEQ ID NO: 38981 - DNA, 17 bp, Homo sapiens
cagtctccctcgctgta

SEQ ID NO: 38982 - DNA, 18 bp, Homo sapiens
aggggaaaagttccatga

SEQ ID NO: 38983 - DNA, 22 bp, Homo sapiens
tgtatagggggtaatttcccca

SEQ ID NO: 38984 - DNA, 21 bp, Homo sapiens
catagctgtaacgtataacca

SEQ ID NO: 38985 - DNA, 23 bp, Homo sapiens
actacagtcataatagtcaaagg

SEQ ID NO: 38986 - DNA, 24 bp, Homo sapiens
tattaaataaatgaatgtcttcta

SEQ ID NO: 38987 - DNA, 20 bp, Homo sapiens
taaaagcggtcagattcagc

SEQ ID NO: 38988 - DNA, 21 bp, Homo sapiens
gattttcctttgaatagttgg

SEQ ID NO: 38989 - DNA, 20 bp, Homo sapiens
gctataagacccatcatggt

SEQ ID NO: 38990 - DNA, 20 bp, Homo sapiens
agcttgacagatgcttttct

SEQ ID NO: 38991 - DNA, 19 bp, Homo sapiens
agccaatcaattctattat

SEQ ID NO: 38992 - DNA, 22 bp, Homo sapiens
ggaagaagactgaatatctcgt

SEQ ID NO: 38993 - DNA, 19 bp, Homo sapiens
aaaaatgtaactgactgat

SEQ ID NO: 38994 - DNA, 25 bp, Homo sapiens
gtttgttactgaattttaaattttt

SEQ ID NO: 38995 - DNA, 23 bp, Homo sapiens
atttctatgactcacatttctct

SEQ ID NO: 38996 - DNA, 25 bp, Homo sapiens
cttgcattttatgttttcttttgta

SEQ ID NO: 38997 - DNA, 23 bp, Homo sapiens
catctttaagagtcatgtttctg

SEQ ID NO: 38998 - DNA, 16 bp, Homo sapiens
agccatgaccgacact

SEQ ID NO: 38999 - DNA, 24 bp, Homo sapiens
gaaaagaatggtgtcagtcactga

SEQ ID NO: 39000 - DNA, 16 bp, Homo sapiens
gaaggctgcagccaaa

SEQ ID NO: 39001 - DNA, 19 bp, Homo sapiens
tgttcaatgatgatttgca

SEQ ID NO: 39002 - DNA, 16 bp, Homo sapiens
aagctgggaacgtgca

SEQ ID NO: 39003 - DNA, 20 bp, Homo sapiens
ccatgtgcctgaagagtgaa

SEQ ID NO: 39004 - DNA, 17 bp, Homo sapiens
ctagattgttggactgc

SEQ ID NO: 39005 - DNA, 17 bp, Homo sapiens
cataaagactctttggc

SEQ ID NO: 39006 - DNA, 23 bp, Homo sapiens
cagatggttttctgaacatattg

SEQ ID NO: 39007 - DNA, 16 bp, Homo sapiens
tgaaatcagtgtgcac

SEQ ID NO: 39008 - DNA, 22 bp, Homo sapiens
tagtaggttttttatttttcct

SEQ ID NO: 39009 - DNA, 20 bp, Homo sapiens
ttgagtaagaagtcaatgtt

SEQ ID NO: 39010 - DNA, 23 bp, Homo sapiens
gttctggcccacgcaaaattctc

SEQ ID NO: 39011 - DNA, 18 bp, Homo sapiens
cagcagatcgccaggcgg

SEQ ID NO: 39012 - DNA, 21 bp, Homo sapiens
aatagaaaatatgctgacgag

SEQ ID NO: 39013 - DNA, 18 bp, Homo sapiens
ttcaggagacgaagtttc

SEQ ID NO: 39014 - DNA, 18 bp, Homo sapiens
ccaaacacatcaaggtca

SEQ ID NO: 39015 - DNA, 17 bp, Homo sapiens
tgtcttgctcgttgtat

SEQ ID NO: 39016 - DNA, 20 bp, Homo sapiens
acctcagttttgtcaatgcc

SEQ ID NO: 39017 - DNA, 24 bp, Homo sapiens
atttgtgttgttatttatcatgca

SEQ ID NO: 39018 - DNA, 24 bp, Homo sapiens
atcatggggtcataatgcacggaa

SEQ ID NO: 39019 - DNA, 24 bp, Homo sapiens
tttaaaaataacaattccagaggc

SEQ ID NO: 39020 - DNA, 16 bp, Homo sapiens
gcagacccttccacca

SEQ ID NO: 39021 - DNA, 22 bp, Homo sapiens
attttaaaatatgctagacagt

SEQ ID NO: 39022 - DNA, 17 bp, Homo sapiens
gcagaagatcctagcaa

SEQ ID NO: 39023 - DNA, 23 bp, Homo sapiens
acaataatgtactaaaaacttaa

SEQ ID NO: 39024 - DNA, 17 bp, Homo sapiens
cctttgagccaggaaga

SEQ ID NO: 39025 - DNA, 22 bp, Homo sapiens
ccgtactccagtttcaatcctg

SEQ ID NO: 39026 - DNA, 19 bp, Homo sapiens
tacggtagatttcataaga

SEQ ID NO: 39027 - DNA, 18 bp, Homo sapiens
ggcctgccacaggcatga

SEQ ID NO: 39028 - DNA, 24 bp, Homo sapiens
aaatgtacattttacctagaaaaa

SEQ ID NO: 39029 - DNA, 20 bp, Homo sapiens
aggcatggccctgcagagtt

SEQ ID NO: 39030 - DNA, 19 bp, Homo sapiens
gcccaatactcaaatgagt

SEQ ID NO: 39031 - DNA, 20 bp, Homo sapiens
ttggtagagacagggtttca

SEQ ID NO: 39032 - DNA, 18 bp, Homo sapiens
acctgccttggcctgcca

SEQ ID NO: 39033 - DNA, 19 bp, Homo sapiens
gtggagtttattatggact

SEQ ID NO: 39034 - DNA, 21 bp, Homo sapiens
agccaaggctgatttttaata

SEQ ID NO: 39035 - DNA, 20 bp, Homo sapiens
ttggtttgctactgattata

SEQ ID NO: 39036 - DNA, 18 bp, Homo sapiens
tcctgtgatcatctcagt

SEQ ID NO: 39037 - DNA, 21 bp, Homo sapiens
caaagtgttaccattgaatga

SEQ ID NO: 39038 - DNA, 21 bp, Homo sapiens
aacagaaattatgttttgagt

SEQ ID NO: 39039 - DNA, 25 bp, Homo sapiens
ataaacatttatgtgtacatactaa

SEQ ID NO: 39040 - DNA, 18 bp, Homo sapiens
gctgggagaagctgcagt

SEQ ID NO: 39041 - DNA, 18 bp, Homo sapiens
aaaacagcttgaaagcaa

SEQ ID NO: 39042 - DNA, 26 bp, Homo sapiens
taatggagatttatttacatattttt

SEQ ID NO: 39043 - DNA, 18 bp, Homo sapiens
ttaaacactgttacgtct

SEQ ID NO: 39044 - DNA, 16 bp, Homo sapiens
gtggcacctgactgaa

SEQ ID NO: 39045 - DNA, 17 bp, Homo sapiens
tacagctttagcagctc

SEQ ID NO: 39046 - DNA, 23 bp, Homo sapiens
cattataatcttatgggacaact

SEQ ID NO: 39047 - DNA, 20 bp, Homo sapiens
cccaataccacaggaggtct

SEQ ID NO: 39048 - DNA, 16 bp, Homo sapiens
gagactgtagtgtgca

SEQ ID NO: 39049 - DNA, 23 bp, Homo sapiens
gagtttgaggggtgagagacacc

SEQ ID NO: 39050 - DNA, 16 bp, Homo sapiens
aggcatgtagaagtcc

SEQ ID NO: 39051 - DNA, 16 bp, Homo sapiens
acggagaagcttacaa

SEQ ID NO: 39052 - DNA, 21 bp, Homo sapiens
gcttaacgaatgtgatattta

SEQ ID NO: 39053 - DNA, 24 bp, Homo sapiens
caatgatcttctgatgtcgcctct

SEQ ID NO: 39054 - DNA, 23 bp, Homo sapiens
atcagatcttacttaaaggaagt

SEQ ID NO: 39055 - DNA, 18 bp, Homo sapiens
tggtgatcaccaaacacc

SEQ ID NO: 39056 - DNA, 22 bp, Homo sapiens
ataccatcctacaatcagtggt

SEQ ID NO: 39057 - DNA, 21 bp, Homo sapiens
agaagctaagaagtctttcaa

SEQ ID NO: 39058 - DNA, 22 bp, Homo sapiens
tatatactactacagttttata

SEQ ID NO: 39059 - DNA, 20 bp, Homo sapiens
agggaatgaggattgttaga

SEQ ID NO: 39060 - DNA, 19 bp, Homo sapiens
tttaaactctgagtcagaa

SEQ ID NO: 39061 - DNA, 18 bp, Homo sapiens
aggcttgtcttctttgtt

SEQ ID NO: 39062 - DNA, 20 bp, Homo sapiens
cgatcagcatagcatcatca

SEQ ID NO: 39063 - DNA, 16 bp, Homo sapiens
aagccgtccggggtgg

SEQ ID NO: 39064 - DNA, 24 bp, Homo sapiens
actgttcttgaaattcttgttctg

SEQ ID NO: 39065 - DNA, 17 bp, Homo sapiens
gaccaatcagaccagtg

SEQ ID NO: 39066 - DNA, 25 bp, Homo sapiens
attatgactacaacataaataaaac

SEQ ID NO: 39067 - DNA, 19 bp, Homo sapiens
agcacatccaaatccataa

SEQ ID NO: 39068 - DNA, 22 bp, Homo sapiens
caatcttacttttcctcctcca

SEQ ID NO: 39069 - DNA, 23 bp, Homo sapiens
ttatgtttgtcttgaatgaaata

SEQ ID NO: 39070 - DNA, 21 bp, Homo sapiens
ctcctggcgtgttccttcagg

SEQ ID NO: 39071 - DNA, 19 bp, Homo sapiens
tcagactcgatgttttctt

SEQ ID NO: 39072 - DNA, 17 bp, Homo sapiens
ccagcagcagccattat

SEQ ID NO: 39073 - DNA, 18 bp, Homo sapiens
tgagagacaaggtctcac

SEQ ID NO: 39074 - DNA, 16 bp, Homo sapiens
ctcctccatctgcaat

SEQ ID NO: 39075 - DNA, 17 bp, Homo sapiens
gctatcctcctgcctca

SEQ ID NO: 39076 - DNA, 19 bp, Homo sapiens
tcagaaaacatggaatttg

SEQ ID NO: 39077 - DNA, 21 bp, Homo sapiens
ctggcccaaactatttcaact

SEQ ID NO: 39078 - DNA, 22 bp, Homo sapiens
agcactgatgagtaaatttttt

SEQ ID NO: 39079 - DNA, 22 bp, Homo sapiens
tacctctttatacccatgtctc

SEQ ID NO: 39080 - DNA, 16 bp, Homo sapiens
gaggcctcccagagga

SEQ ID NO: 39081 - DNA, 16 bp, Homo sapiens
agttcagcaaattcca

SEQ ID NO: 39082 - DNA, 28 bp, Homo sapiens
ctttcatatgaatatttcagatatttct

SEQ ID NO: 39083 - DNA, 20 bp, Homo sapiens
gagaaaatcattcaagtggc

SEQ ID NO: 39084 - DNA, 23 bp, Homo sapiens
aatccaataatcaaatgtaaaga

SEQ ID NO: 39085 - DNA, 19 bp, Homo sapiens
caggcagatgaagcatatt

SEQ ID NO: 39086 - DNA, 18 bp, Homo sapiens
atcagttgcacaaaacgt

SEQ ID NO: 39087 - DNA, 19 bp, Homo sapiens
agttctgtatagtgtatga

SEQ ID NO: 39088 - DNA, 18 bp, Homo sapiens
gtgcagcagaggtcttgg

SEQ ID NO: 39089 - DNA, 17 bp, Homo sapiens
tgcactgttcttgaggg

SEQ ID NO: 39090 - DNA, 17 bp, Homo sapiens
agggagcggggccgatg

SEQ ID NO: 39091 - DNA, 19 bp, Homo sapiens
atctgaaaaatgttcccaa

SEQ ID NO: 39092 - DNA, 17 bp, Homo sapiens
actgtggcggtttatag

SEQ ID NO: 39093 - DNA, 24 bp, Homo sapiens
accctgataacactagcaaatatc

SEQ ID NO: 39094 - DNA, 16 bp, Homo sapiens
ttgcaaacagaggaga

SEQ ID NO: 39095 - DNA, 16 bp, Homo sapiens
aaacgtaagacgtggc

SEQ ID NO: 39096 - DNA, 18 bp, Homo sapiens
cagtaacatttctgtgtg

SEQ ID NO: 39097 - DNA, 16 bp, Homo sapiens
ttctgtcagcctcact

SEQ ID NO: 39098 - DNA, 17 bp, Homo sapiens
agtcgagtccttatcag

SEQ ID NO: 39099 - DNA, 19 bp, Homo sapiens
gcgcatcaccctgcaggca

SEQ ID NO: 39100 - DNA, 20 bp, Homo sapiens
tagttaaagtggtcattttg

SEQ ID NO: 39101 - DNA, 22 bp, Homo sapiens
caaaagaggtgaaaaccatgac

SEQ ID NO: 39102 - DNA, 16 bp, Homo sapiens
aggacatgggtgtgga

SEQ ID NO: 39103 - DNA, 23 bp, Homo sapiens
actaattctattatgcatatatt

SEQ ID NO: 39104 - DNA, 22 bp, Homo sapiens
tcttttgaaagaacaattgtgt

SEQ ID NO: 39105 - DNA, 19 bp, Homo sapiens
gtctgaagcaaaatcaaat

SEQ ID NO: 39106 - DNA, 20 bp, Homo sapiens
aagaaagtcttactaaagca

SEQ ID NO: 39107 - DNA, 18 bp, Homo sapiens
catggttctttgcctcca

SEQ ID NO: 39108 - DNA, 18 bp, Homo sapiens
ggcatcgtctcccgagcc

SEQ ID NO: 39109 - DNA, 24 bp, Homo sapiens
tggggttttcctaccgtcctcccc

SEQ ID NO: 39110 - DNA, 16 bp, Homo sapiens
agggacatggcggcgg

SEQ ID NO: 39111 - DNA, 23 bp, Homo sapiens
cgctcacgcgggtccgtgcaccc

SEQ ID NO: 39112 - DNA, 24 bp, Homo sapiens
ggaggaacgggtttggcgtgtggg

SEQ ID NO: 39113 - DNA, 23 bp, Homo sapiens
acccacctcggcggcaggagcag

SEQ ID NO: 39114 - DNA, 24 bp, Homo sapiens
ccaaaggtaggctcaggctccgac

SEQ ID NO: 39115 - DNA, 20 bp, Homo sapiens
cagcagcaccgacaccgcag

SEQ ID NO: 39116 - DNA, 24 bp, Homo sapiens
gaggctccccgaggccacccaacc

SEQ ID NO: 39117 - DNA, 16 bp, Homo sapiens
ccaggagcgaggccag

SEQ ID NO: 39118 - DNA, 24 bp, Homo sapiens
cccgcggcggcggtcacatggggt

SEQ ID NO: 39119 - DNA, 20 bp, Homo sapiens
agcgcgcgggccgcgtccac

SEQ ID NO: 39120 - DNA, 22 bp, Homo sapiens
gcagtgcagcccgaagccccgc

SEQ ID NO: 39121 - DNA, 18 bp, Homo sapiens
gaggccgcggagcgctca

SEQ ID NO: 39122 - DNA, 16 bp, Homo sapiens
gcgctgctggcgctcc

SEQ ID NO: 39123 - DNA, 24 bp, Homo sapiens
gtctctgaagctctcacagtgcgc

SEQ ID NO: 39124 - DNA, 22 bp, Homo sapiens
ccgaggccccgcacctggtgca

SEQ ID NO: 39125 - DNA, 24 bp, Homo sapiens
acccacaaacacggcggggggcgg

SEQ ID NO: 39126 - DNA, 24 bp, Homo sapiens
cttctggaggagcacaggcttctg

SEQ ID NO: 39127 - DNA, 24 bp, Homo sapiens
atgaagatgggacctccccacatt

SEQ ID NO: 39128 - DNA, 16 bp, Homo sapiens
ccagctgaggacgtac

SEQ ID NO: 39129 - DNA, 24 bp, Homo sapiens
cacgggcagcgcctggatcctgcg

SEQ ID NO: 39130 - DNA, 21 bp, Homo sapiens
cagtgggtccggacctgcttg

SEQ ID NO: 39131 - DNA, 23 bp, Homo sapiens
tgccagccatgctgaggctcggg

SEQ ID NO: 39132 - DNA, 22 bp, Homo sapiens
gctctgggacgcccagaccctg

SEQ ID NO: 39133 - DNA, 22 bp, Homo sapiens
cacagccaggctgaccagtacg

SEQ ID NO: 39134 - DNA, 22 bp, Homo sapiens
gggaacaaggggtcttccgagc

SEQ ID NO: 39135 - DNA, 16 bp, Homo sapiens
ccgtccctcaccgcgg

SEQ ID NO: 39136 - DNA, 24 bp, Homo sapiens
cccagcacagccagcaaggacacg

SEQ ID NO: 39137 - DNA, 24 bp, Homo sapiens
gggttattttccaaggggaagggc

SEQ ID NO: 39138 - DNA, 23 bp, Homo sapiens
gaaggtccaggtacccgtccagg

SEQ ID NO: 39139 - DNA, 24 bp, Homo sapiens
cttgcaggctcccacatgctccgt

SEQ ID NO: 39140 - DNA, 24 bp, Homo sapiens
ggtgcaggcgggctgggagggcag

SEQ ID NO: 39141 - DNA, 24 bp, Homo sapiens
tgggcaccctgcttcctgacgctg

SEQ ID NO: 39142 - DNA, 18 bp, Homo sapiens
acatccaaggactcagag

SEQ ID NO: 39143 - DNA, 24 bp, Homo sapiens
tgagctacaacttcacccacctgg

SEQ ID NO: 39144 - DNA, 19 bp, Homo sapiens
cccaccacacaccacaccc

SEQ ID NO: 39145 - DNA, 24 bp, Homo sapiens
gtgaagtggcccgaggcgctgccc

SEQ ID NO: 39146 - DNA, 22 bp, Homo sapiens
caccctctccctcacccagccc

SEQ ID NO: 39147 - DNA, 16 bp, Homo sapiens
ctggagaccaagtcct

SEQ ID NO: 39148 - DNA, 23 bp, Homo sapiens
gtgccggagcacaggcctggcag

SEQ ID NO: 39149 - DNA, 16 bp, Homo sapiens
cgccccggccagggcc

SEQ ID NO: 39150 - DNA, 17 bp, Homo sapiens
ttccagggtttgagctg

SEQ ID NO: 39151 - DNA, 24 bp, Homo sapiens
tgcccaccaatgtatctcctgacc

SEQ ID NO: 39152 - DNA, 24 bp, Homo sapiens
acaagcagcaggtgtttgagtgga

SEQ ID NO: 39153 - DNA, 18 bp, Homo sapiens
gaccaccaacctatccct

SEQ ID NO: 39154 - DNA, 22 bp, Homo sapiens
ccaggtcttggacccccttgag

SEQ ID NO: 39155 - DNA, 24 bp, Homo sapiens
ccacgtctcgaagttccacttgga

SEQ ID NO: 39156 - DNA, 22 bp, Homo sapiens
atggagatggggttcatcttga

SEQ ID NO: 39157 - DNA, 16 bp, Homo sapiens
ggtgcacaccttgcat

SEQ ID NO: 39158 - DNA, 22 bp, Homo sapiens
gtgggagtcactgaggcgagat

SEQ ID NO: 39159 - DNA, 16 bp, Homo sapiens
cctctgctcctgcctt

SEQ ID NO: 39160 - DNA, 24 bp, Homo sapiens
gtacggactggcgcatgtttccaa

SEQ ID NO: 39161 - DNA, 20 bp, Homo sapiens
cgtagtagttcaggaagcct

SEQ ID NO: 39162 - DNA, 24 bp, Homo sapiens
cacgactttgacaacgtctccatg

SEQ ID NO: 39163 - DNA, 23 bp, Homo sapiens
agtcgccggggcctcccagccgc

SEQ ID NO: 39164 - DNA, 24 bp, Homo sapiens
tgcccggctgaaagggggcagagg

SEQ ID NO: 39165 - DNA, 23 bp, Homo sapiens
gtggcagtggcgcaggaggcccc

SEQ ID NO: 39166 - DNA, 18 bp, Homo sapiens
gtagacgcagtgctcccc

SEQ ID NO: 39167 - DNA, 18 bp, Homo sapiens
ggagggagatgtagtcca

SEQ ID NO: 39168 - DNA, 20 bp, Homo sapiens
ggtctgcgcgccgccagccc

SEQ ID NO: 39169 - DNA, 16 bp, Homo sapiens
gctgagggcgcagaac

SEQ ID NO: 39170 - DNA, 22 bp, Homo sapiens
cgcgatccccgctgagctgggg

SEQ ID NO: 39171 - DNA, 16 bp, Homo sapiens
gcaccctgcgggcggg

SEQ ID NO: 39172 - DNA, 20 bp, Homo sapiens
actggggaggcgggcgtgcg

SEQ ID NO: 39173 - DNA, 16 bp, Homo sapiens
gaagagctgccggatc

SEQ ID NO: 39174 - DNA, 22 bp, Homo sapiens
ctgcccctccgtccgccccggt

SEQ ID NO: 39175 - DNA, 16 bp, Homo sapiens
cagcccaccagcgggt

SEQ ID NO: 39176 - DNA, 24 bp, Homo sapiens
tgaccctggtggtgctgaggcggc

SEQ ID NO: 39177 - DNA, 24 bp, Homo sapiens
ttgggccggcccaccttcaccacc

SEQ ID NO: 39178 - DNA, 24 bp, Homo sapiens
tggagcaggagaaggtcgtcgcgc

SEQ ID NO: 39179 - DNA, 24 bp, Homo sapiens
gcggccaccgctcgcctgtcccgt

SEQ ID NO: 39180 - DNA, 16 bp, Homo sapiens
gacgaggcggacccgc

SEQ ID NO: 39181 - DNA, 22 bp, Homo sapiens
caggttctgatgctgcgcgatg

SEQ ID NO: 39182 - DNA, 23 bp, Homo sapiens
gacgtgacctacgcggccatggt

SEQ ID NO: 39183 - DNA, 24 bp, Homo sapiens
ctcaggaaggcattgtcgttgctc

SEQ ID NO: 39184 - DNA, 24 bp, Homo sapiens
ccccccggccaccttcctcccgag

SEQ ID NO: 39185 - DNA, 24 bp, Homo sapiens
ttgttgacctggaagcgcgcggtg

SEQ ID NO: 39186 - DNA, 24 bp, Homo sapiens
cagctgccctggacacccgcaggt

SEQ ID NO: 39187 - DNA, 20 bp, Homo sapiens
gccccatggccgtgagcacc

SEQ ID NO: 39188 - DNA, 24 bp, Homo sapiens
cacctccgccttcccctacgcgct

SEQ ID NO: 39189 - DNA, 16 bp, Homo sapiens
cagcctggagggccct

SEQ ID NO: 39190 - DNA, 16 bp, Homo sapiens
cgcagcgcacgctcac

SEQ ID NO: 39191 - DNA, 22 bp, Homo sapiens
gggaagcgcgcggctggaggaa

SEQ ID NO: 39192 - DNA, 24 bp, Homo sapiens
gcacgtgcagctgttgcgcaagcc

SEQ ID NO: 39193 - DNA, 23 bp, Homo sapiens
ctcgctccccctccccttggtga

SEQ ID NO: 39194 - DNA, 16 bp, Homo sapiens
ggcctgcgacacttcg

SEQ ID NO: 39195 - DNA, 24 bp, Homo sapiens
gcggggcctggggactccttcacc

SEQ ID NO: 39196 - DNA, 24 bp, Homo sapiens
gtcggccgggccctgggggcggtg

SEQ ID NO: 39197 - DNA, 23 bp, Homo sapiens
gggtcggggggcggctgggcaac

SEQ ID NO: 39198 - DNA, 22 bp, Homo sapiens
gttggggtgggcgcgggtgtcg

SEQ ID NO: 39199 - DNA, 24 bp, Homo sapiens
cagatgaggagcagctctgggccg

SEQ ID NO: 39200 - DNA, 22 bp, Homo sapiens
aaccccggcttacccgggccgg

SEQ ID NO: 39201 - DNA, 24 bp, Homo sapiens
cacacggtgggcgtcctggccagc

SEQ ID NO: 39202 - DNA, 18 bp, Homo sapiens
ctcggctccccgggccgc

SEQ ID NO: 39203 - DNA, 24 bp, Homo sapiens
gcggtgctgatctacgcgagcgac

SEQ ID NO: 39204 - DNA, 16 bp, Homo sapiens
ttgtccaggtagcgcg

SEQ ID NO: 39205 - DNA, 23 bp, Homo sapiens
gtgaccctgcggctgcgcggggt

SEQ ID NO: 39206 - DNA, 19 bp, Homo sapiens
tctgccgtggggaagacgg

SEQ ID NO: 39207 - DNA, 16 bp, Homo sapiens
ggggctctggaggggg

SEQ ID NO: 39208 - DNA, 16 bp, Homo sapiens
ggcccctcgcccctcc

SEQ ID NO: 39209 - DNA, 24 bp, Homo sapiens
ccccgcaggcctggtctacgtcac

SEQ ID NO: 39210 - DNA, 24 bp, Homo sapiens
acctcccacccacaccgcctcgga

SEQ ID NO: 39211 - DNA, 16 bp, Homo sapiens
ctgggccggcccgtct

SEQ ID NO: 39212 - DNA, 16 bp, Homo sapiens
gctggggacgctcggc

SEQ ID NO: 39213 - DNA, 20 bp, Homo sapiens
ggtaaggggcggggcgccgc

SEQ ID NO: 39214 - DNA, 24 bp, Homo sapiens
gtggggtccggggcgggggctccg

SEQ ID NO: 39215 - DNA, 22 bp, Homo sapiens
gtgcaccagcaaaagcgacggc

SEQ ID NO: 39216 - DNA, 24 bp, Homo sapiens
cgggggcgttcgccctgaggtcgg

SEQ ID NO: 39217 - DNA, 24 bp, Homo sapiens
cgcggcgcgggttaggggactgcc

SEQ ID NO: 39218 - DNA, 23 bp, Homo sapiens
ccggccactgcgcccaggacccg

SEQ ID NO: 39219 - DNA, 24 bp, Homo sapiens
cgcgtgacctgggggagggaaggg

SEQ ID NO: 39220 - DNA, 24 bp, Homo sapiens
ctgaccctgcgccccgcgctgcgg

SEQ ID NO: 39221 - DNA, 16 bp, Homo sapiens
ttcatccgaccagacc

SEQ ID NO: 39222 - DNA, 21 bp, Homo sapiens
cccgagaagccgcccgggcag

SEQ ID NO: 39223 - DNA, 17 bp, Homo sapiens
ctgcctaggaccaggca

SEQ ID NO: 39224 - DNA, 24 bp, Homo sapiens
actccccttccccgacgccatcac

SEQ ID NO: 39225 - DNA, 24 bp, Homo sapiens
gagccgatgggccacggcaagtgg

SEQ ID NO: 39226 - DNA, 24 bp, Homo sapiens
ctgcccctgacccaagggcagctg

SEQ ID NO: 39227 - DNA, 21 bp, Homo sapiens
ggcgcgtggcccacagtgtgt

SEQ ID NO: 39228 - DNA, 23 bp, Homo sapiens
ctggatctcgtatgtccacaggc

SEQ ID NO: 39229 - DNA, 23 bp, Homo sapiens
gaagagtgcccaggggctgggga

SEQ ID NO: 39230 - DNA, 22 bp, Homo sapiens
gaggttgaaggtcgatggcttc

SEQ ID NO: 39231 - DNA, 21 bp, Homo sapiens
gtccacgcggccgtgccctgc

SEQ ID NO: 39232 - DNA, 18 bp, Homo sapiens
atggggtggccgagtcca

SEQ ID NO: 39233 - DNA, 24 bp, Homo sapiens
cttggcctgacctccccaggtgcc

SEQ ID NO: 39234 - DNA, 19 bp, Homo sapiens
aagccccctgaccccaggc

SEQ ID NO: 39235 - DNA, 24 bp, Homo sapiens
cggtaaggcgtacaccccggtcag

SEQ ID NO: 39236 - DNA, 17 bp, Homo sapiens
acagcacctgtgtctgg

SEQ ID NO: 39237 - DNA, 16 bp, Homo sapiens
cccaccacccgctgcc

SEQ ID NO: 39238 - DNA, 24 bp, Homo sapiens
ggtccgagaaggggcctggtcggg

SEQ ID NO: 39239 - DNA, 23 bp, Homo sapiens
agtactgggtgggggcctcgaga

SEQ ID NO: 39240 - DNA, 18 bp, Homo sapiens
atggattgcccggggatg

SEQ ID NO: 39241 - DNA, 23 bp, Homo sapiens
ttggcacacatgtccccttgtct

SEQ ID NO: 39242 - DNA, 24 bp, Homo sapiens
agtgcagccccagctcgctgactg

SEQ ID NO: 39243 - DNA, 20 bp, Homo sapiens
gccctggactactgggcccg

SEQ ID NO: 39244 - DNA, 26 bp, Homo sapiens
aaaagaaaataataaaatataaaaat

SEQ ID NO: 39245 - DNA, 22 bp, Homo sapiens
cctgtgccaagagggcccccat

SEQ ID NO: 39246 - DNA, 17 bp, Homo sapiens
agaccccgccccgcata

SEQ ID NO: 39247 - DNA, 18 bp, Homo sapiens
ctcacgcttccttccaca

SEQ ID NO: 39248 - DNA, 18 bp, Homo sapiens
ttcttgaacgggaaaaaa

SEQ ID NO: 39249 - DNA, 19 bp, Homo sapiens
gtggaggctacggcggttg

SEQ ID NO: 39250 - DNA, 21 bp, Homo sapiens
ttccttcatccaatactcaca

SEQ ID NO: 39251 - DNA, 18 bp, Homo sapiens
gaagaaaggggaggggtt

SEQ ID NO: 39252 - DNA, 20 bp, Homo sapiens
cagaaaaattaggagccttt

SEQ ID NO: 39253 - DNA, 19 bp, Homo sapiens
ggtagttacagtgatgtct

SEQ ID NO: 39254 - DNA, 25 bp, Homo sapiens
gatatggtaattttctgtataaatt

SEQ ID NO: 39255 - DNA, 20 bp, Homo sapiens
tcattcatatattcttgtga

SEQ ID NO: 39256 - DNA, 19 bp, Homo sapiens
gaaatgaagcagagaaaaa

SEQ ID NO: 39257 - DNA, 17 bp, Homo sapiens
tgattgttgcaggttct

SEQ ID NO: 39258 - DNA, 21 bp, Homo sapiens
gatggaaattaaagtttagca

SEQ ID NO: 39259 - DNA, 24 bp, Homo sapiens
aagagtccacttctcagtgactcc

SEQ ID NO: 39260 - DNA, 20 bp, Homo sapiens
ctctttcactattcactcac

SEQ ID NO: 39261 - DNA, 17 bp, Homo sapiens
tcttcttgctgtgcttt

SEQ ID NO: 39262 - DNA, 18 bp, Homo sapiens
agccatgctttcacaaac

SEQ ID NO: 39263 - DNA, 20 bp, Homo sapiens
tatctatgtttttcaagtca

SEQ ID NO: 39264 - DNA, 16 bp, Homo sapiens
gtacagccggtcatta

SEQ ID NO: 39265 - DNA, 21 bp, Homo sapiens
atcagcgaatatttaccaagc

SEQ ID NO: 39266 - DNA, 18 bp, Homo sapiens
cacgctgtcttgcagttt

SEQ ID NO: 39267 - DNA, 23 bp, Homo sapiens
gagacagcatgttcccttacaat

SEQ ID NO: 39268 - DNA, 16 bp, Homo sapiens
caccatcaggattcct

SEQ ID NO: 39269 - DNA, 21 bp, Homo sapiens
cacaactggtctctcattaaa

SEQ ID NO: 39270 - DNA, 25 bp, Homo sapiens
atatctaatctttgcatttatctgg

SEQ ID NO: 39271 - DNA, 16 bp, Homo sapiens
ggggcaaaggaaaact

SEQ ID NO: 39272 - DNA, 16 bp, Homo sapiens
ataaacgggaacccaa

SEQ ID NO: 39273 - DNA, 17 bp, Homo sapiens
ggccttactatggagga

SEQ ID NO: 39274 - DNA, 21 bp, Homo sapiens
cagcaaaacctttaaatacat

SEQ ID NO: 39275 - DNA, 19 bp, Homo sapiens
aagtgagtggcaaggtcct

SEQ ID NO: 39276 - DNA, 20 bp, Homo sapiens
tttcctttgaagatgctctt

SEQ ID NO: 39277 - DNA, 24 bp, Homo sapiens
tttctgtttctttatcattttatt

SEQ ID NO: 39278 - DNA, 17 bp, Homo sapiens
gcgtaggtctttgcaga

SEQ ID NO: 39279 - DNA, 22 bp, Homo sapiens
gttttttttaacagctttcttt

SEQ ID NO: 39280 - DNA, 17 bp, Homo sapiens
tggagaaaaagttgtgg

SEQ ID NO: 39281 - DNA, 17 bp, Homo sapiens
tcagcagagaggagaga

SEQ ID NO: 39282 - DNA, 19 bp, Homo sapiens
aaaagtagttacaatgtga

SEQ ID NO: 39283 - DNA, 16 bp, Homo sapiens
aacttggaagctctgc

SEQ ID NO: 39284 - DNA, 20 bp, Homo sapiens
ttggaaacatttaatttaca

SEQ ID NO: 39285 - DNA, 19 bp, Homo sapiens
ttcacaaaaaggaaattcc

SEQ ID NO: 39286 - DNA, 20 bp, Homo sapiens
cctctcttgatattttctat

SEQ ID NO: 39287 - DNA, 19 bp, Homo sapiens
acaggtaagaatctgacct

SEQ ID NO: 39288 - DNA, 19 bp, Homo sapiens
aatattggtaagtacctca

SEQ ID NO: 39289 - DNA, 16 bp, Homo sapiens
ttgtgttctgttcccc

SEQ ID NO: 39290 - DNA, 21 bp, Homo sapiens
ctactgaaattgtataagtag

SEQ ID NO: 39291 - DNA, 20 bp, Homo sapiens
aaatgaggcagtggccatag

SEQ ID NO: 39292 - DNA, 22 bp, Homo sapiens
ttcataggcaaatgcgacttca

SEQ ID NO: 39293 - DNA, 20 bp, Homo sapiens
agttaagctctggaaccacc

SEQ ID NO: 39294 - DNA, 17 bp, Homo sapiens
gcctggtaggtcacttt

SEQ ID NO: 39295 - DNA, 20 bp, Homo sapiens
gggggagaaaaaaagtcccc

SEQ ID NO: 39296 - DNA, 16 bp, Homo sapiens
acctcgctattttgca

SEQ ID NO: 39297 - DNA, 19 bp, Homo sapiens
ctcactagaattcaaatgg

SEQ ID NO: 39298 - DNA, 21 bp, Homo sapiens
tgtaattattttaatgcctca

SEQ ID NO: 39299 - DNA, 18 bp, Homo sapiens
aggtagatatctctggaa

SEQ ID NO: 39300 - DNA, 26 bp, Homo sapiens
tgtttcaaaattctatttctacttta

SEQ ID NO: 39301 - DNA, 19 bp, Homo sapiens
taaggccttggattcatgc

SEQ ID NO: 39302 - DNA, 21 bp, Homo sapiens
gaaatgggtctattcattaca

SEQ ID NO: 39303 - DNA, 21 bp, Homo sapiens
acaaattcacacatatgtaat

SEQ ID NO: 39304 - DNA, 19 bp, Homo sapiens
ggtggtgacagatgtagct

SEQ ID NO: 39305 - DNA, 20 bp, Homo sapiens
aatgagggatgggtgtaatg

SEQ ID NO: 39306 - DNA, 19 bp, Homo sapiens
tcagtccaaaattgtgtgt

SEQ ID NO: 39307 - DNA, 22 bp, Homo sapiens
cttgattcaataatttaaacga

SEQ ID NO: 39308 - DNA, 24 bp, Homo sapiens
aaaaattttagcattatcttactt

SEQ ID NO: 39309 - DNA, 18 bp, Homo sapiens
cttgggtgtcagttcaaa

SEQ ID NO: 39310 - DNA, 23 bp, Homo sapiens
cacacaaacacagatctatttac

SEQ ID NO: 39311 - DNA, 24 bp, Homo sapiens
ctttgttatagctgtgcttgctga

SEQ ID NO: 39312 - DNA, 18 bp, Homo sapiens
gaacttattcccattgtt

SEQ ID NO: 39313 - DNA, 20 bp, Homo sapiens
ggggaaaatagtatcgaagt

SEQ ID NO: 39314 - DNA, 23 bp, Homo sapiens
cataatgagctttcagttacctc

SEQ ID NO: 39315 - DNA, 18 bp, Homo sapiens
ctgctttccagacatcaa

SEQ ID NO: 39316 - DNA, 18 bp, Homo sapiens
ttactatcttgtttgcca

SEQ ID NO: 39317 - DNA, 16 bp, Homo sapiens
tgccccacaatgggaa

SEQ ID NO: 39318 - DNA, 22 bp, Homo sapiens
tataatatagcatttccctttg

SEQ ID NO: 39319 - DNA, 21 bp, Homo sapiens
tgtcatgattattcccatatt

SEQ ID NO: 39320 - DNA, 16 bp, Homo sapiens
gaagcaggcccaagat

SEQ ID NO: 39321 - DNA, 20 bp, Homo sapiens
tgtcttcattgaatgagttg

SEQ ID NO: 39322 - DNA, 23 bp, Homo sapiens
agttgattcaaagtacacggcca

SEQ ID NO: 39323 - DNA, 16 bp, Homo sapiens
attgtgagactgctgt

SEQ ID NO: 39324 - DNA, 17 bp, Homo sapiens
caggggtatgatatggg

SEQ ID NO: 39325 - DNA, 16 bp, Homo sapiens
gtcaggctgcaggtat

SEQ ID NO: 39326 - DNA, 20 bp, Homo sapiens
tgctttcgcttcagacacaa

SEQ ID NO: 39327 - DNA, 16 bp, Homo sapiens
gtcctgaggtgctgaa

SEQ ID NO: 39328 - DNA, 20 bp, Homo sapiens
atgttcacagttatgagtgg

SEQ ID NO: 39329 - DNA, 18 bp, Homo sapiens
ggggaacttacaatactt

SEQ ID NO: 39330 - DNA, 21 bp, Homo sapiens
tctggcggtccaccaggaaat

SEQ ID NO: 39331 - DNA, 19 bp, Homo sapiens
tacttcaaaaaaccaacaa

SEQ ID NO: 39332 - DNA, 24 bp, Homo sapiens
cagaaacttcctggccttcattca

SEQ ID NO: 39333 - DNA, 25 bp, Homo sapiens
aaatgtagtacaagaaaataattgt

SEQ ID NO: 39334 - DNA, 22 bp, Homo sapiens
tcaaatactaaagatggaaaat

SEQ ID NO: 39335 - DNA, 16 bp, Homo sapiens
agtctgaggtctgagc

SEQ ID NO: 39336 - DNA, 22 bp, Homo sapiens
aaatcacttcttgagaaaactc

SEQ ID NO: 39337 - DNA, 18 bp, Homo sapiens
ctcctggaggataatgct

SEQ ID NO: 39338 - DNA, 21 bp, Homo sapiens
tttaagtattccttcccctaa

SEQ ID NO: 39339 - DNA, 17 bp, Homo sapiens
agggctctcaggagttc

SEQ ID NO: 39340 - DNA, 17 bp, Homo sapiens
gctggtggatgctgtca

SEQ ID NO: 39341 - DNA, 23 bp, Homo sapiens
atattcttaagaagttttatagg

SEQ ID NO: 39342 - DNA, 19 bp, Homo sapiens
tttttggatttcaaaagtg

SEQ ID NO: 39343 - DNA, 19 bp, Homo sapiens
ctcagaagtctctagttga

SEQ ID NO: 39344 - DNA, 19 bp, Homo sapiens
ttgcttctcatcccaatga

SEQ ID NO: 39345 - DNA, 25 bp, Homo sapiens
tgaaataatttattatacagttaat

SEQ ID NO: 39346 - DNA, 18 bp, Homo sapiens
gctagatagcaaatgtgt

SEQ ID NO: 39347 - DNA, 17 bp, Homo sapiens
aacagtttctctgatgt

SEQ ID NO: 39348 - DNA, 25 bp, Homo sapiens
ctagaaacataaaaatactttacca

SEQ ID NO: 39349 - DNA, 19 bp, Homo sapiens
gcacttactttgagtttgc

SEQ ID NO: 39350 - DNA, 22 bp, Homo sapiens
ttaaatgtcttggtaacctatt

SEQ ID NO: 39351 - DNA, 20 bp, Homo sapiens
tggtgagtatcaaatggaca

SEQ ID NO: 39352 - DNA, 21 bp, Homo sapiens
gttctattggtagcagtgaca

SEQ ID NO: 39353 - DNA, 22 bp, Homo sapiens
aattgctatgcaaataaggtaa

SEQ ID NO: 39354 - DNA, 16 bp, Homo sapiens
tgtcagaatgaaggct

SEQ ID NO: 39355 - DNA, 18 bp, Homo sapiens
tcctcccaggattaactt

SEQ ID NO: 39356 - DNA, 21 bp, Homo sapiens
gcaaccaatgcaaaactttgt

SEQ ID NO: 39357 - DNA, 17 bp, Homo sapiens
gcattcttcaaagccag

SEQ ID NO: 39358 - DNA, 22 bp, Homo sapiens
cagtctcacccaagtcttcttc

SEQ ID NO: 39359 - DNA, 16 bp, Homo sapiens
ggctgatgggcccttc

SEQ ID NO: 39360 - DNA, 18 bp, Homo sapiens
cagtagtggaagctaaga

SEQ ID NO: 39361 - DNA, 20 bp, Homo sapiens
tttacctcatcagttatgaa

SEQ ID NO: 39362 - DNA, 17 bp, Homo sapiens
ggatgtatctgctggct

SEQ ID NO: 39363 - DNA, 18 bp, Homo sapiens
gactcatgttcagcatgc

SEQ ID NO: 39364 - DNA, 17 bp, Homo sapiens
aagtatgcagaagcagg

SEQ ID NO: 39365 - DNA, 17 bp, Homo sapiens
gcaggagagaagactat

SEQ ID NO: 39366 - DNA, 21 bp, Homo sapiens
ctccagagatatgatctccct

SEQ ID NO: 39367 - DNA, 19 bp, Homo sapiens
ggcgtattagccagaacta

SEQ ID NO: 39368 - DNA, 20 bp, Homo sapiens
ttcatgaactttacggtttt

SEQ ID NO: 39369 - DNA, 24 bp, Homo sapiens
gaaatgtagtaacacatgtatatt

SEQ ID NO: 39370 - DNA, 19 bp, Homo sapiens
cgtccatgtaggatggatt

SEQ ID NO: 39371 - DNA, 18 bp, Homo sapiens
aaaaatctagatgtgcac

SEQ ID NO: 39372 - DNA, 18 bp, Homo sapiens
ggcgagcatgtatttatt

SEQ ID NO: 39373 - DNA, 19 bp, Homo sapiens
acagaatataccaccaaaa

SEQ ID NO: 39374 - DNA, 21 bp, Homo sapiens
agagacatgtgcaatgtatta

SEQ ID NO: 39375 - DNA, 21 bp, Homo sapiens
gcagctgctatcattttaaat

SEQ ID NO: 39376 - DNA, 19 bp, Homo sapiens
attattagctacatcggta

SEQ ID NO: 39377 - DNA, 22 bp, Homo sapiens
gtctattggggagcttccccaa

SEQ ID NO: 39378 - DNA, 18 bp, Homo sapiens
gggaaatctggcactctt

SEQ ID NO: 39379 - DNA, 22 bp, Homo sapiens
cctacgttttgaaatgcctgca

SEQ ID NO: 39380 - DNA, 18 bp, Homo sapiens
gatgctaccacgccagct

SEQ ID NO: 39381 - DNA, 19 bp, Homo sapiens
ctggagaaacggtcataat

SEQ ID NO: 39382 - DNA, 18 bp, Homo sapiens
ttcctcttttttccactg

SEQ ID NO: 39383 - DNA, 18 bp, Homo sapiens
gaacctctttttggtgta

SEQ ID NO: 39384 - DNA, 19 bp, Homo sapiens
tacaatgaatgtgcagctt

SEQ ID NO: 39385 - DNA, 21 bp, Homo sapiens
tgacacacaataactgtaatt

SEQ ID NO: 39386 - DNA, 20 bp, Homo sapiens
ctgaaggaaatggtcgctca

SEQ ID NO: 39387 - DNA, 18 bp, Homo sapiens
ccgagtagagaatgtcta

SEQ ID NO: 39388 - DNA, 19 bp, Homo sapiens
cactggctacatagaacgt

SEQ ID NO: 39389 - DNA, 16 bp, Homo sapiens
cagccttcccaatgta

SEQ ID NO: 39390 - DNA, 20 bp, Homo sapiens
acttagcattgctggaactg

SEQ ID NO: 39391 - DNA, 21 bp, Homo sapiens
tcagcctgatttcttgcatac

SEQ ID NO: 39392 - DNA, 20 bp, Homo sapiens
gcatctacttacagcctaga

SEQ ID NO: 39393 - DNA, 20 bp, Homo sapiens
gccaccattaacttatacat

SEQ ID NO: 39394 - DNA, 21 bp, Homo sapiens
cctgaacatctttcagtacat

SEQ ID NO: 39395 - DNA, 18 bp, Homo sapiens
taaaccatacagcctctt

SEQ ID NO: 39396 - DNA, 18 bp, Homo sapiens
agaggtttttgtctgttt

SEQ ID NO: 39397 - DNA, 16 bp, Homo sapiens
cgtcaggggtggctgc

SEQ ID NO: 39398 - DNA, 18 bp, Homo sapiens
tttggccccttgagaagt

SEQ ID NO: 39399 - DNA, 19 bp, Homo sapiens
ctgagctgaacatcaaaga

SEQ ID NO: 39400 - DNA, 20 bp, Homo sapiens
gggagcttgcgtcatgaaca

SEQ ID NO: 39401 - DNA, 17 bp, Homo sapiens
gccagatgctgacagca

SEQ ID NO: 39402 - DNA, 19 bp, Homo sapiens
ggactggaagccttaatcg

SEQ ID NO: 39403 - DNA, 20 bp, Homo sapiens
tgaattacctgagaatgatc

SEQ ID NO: 39404 - DNA, 16 bp, Homo sapiens
tgtcagccatcctctt

SEQ ID NO: 39405 - DNA, 18 bp, Homo sapiens
gcatatttaaaacgtgcc

SEQ ID NO: 39406 - DNA, 20 bp, Homo sapiens
gtgatttgatgtccaaaatg

SEQ ID NO: 39407 - DNA, 18 bp, Homo sapiens
gtgcttggaatatgagct

SEQ ID NO: 39408 - DNA, 22 bp, Homo sapiens
aaggacttattctgctaataga

SEQ ID NO: 39409 - DNA, 19 bp, Homo sapiens
ccggtgcttaaaattagga

SEQ ID NO: 39410 - DNA, 18 bp, Homo sapiens
cctggacctctatattgg

SEQ ID NO: 39411 - DNA, 22 bp, Homo sapiens
actcaaatggaattatctacag

SEQ ID NO: 39412 - DNA, 17 bp, Homo sapiens
ggttttagactcacgat

SEQ ID NO: 39413 - DNA, 25 bp, Homo sapiens
taactaaattgtacttattattttt

SEQ ID NO: 39414 - DNA, 26 bp, Homo sapiens
tatatagtcttatatgtaattcataa

SEQ ID NO: 39415 - DNA, 19 bp, Homo sapiens
acaatctggactaaaagcc

SEQ ID NO: 39416 - DNA, 19 bp, Homo sapiens
gattttgaaaagtcagaag

SEQ ID NO: 39417 - DNA, 17 bp, Homo sapiens
tggagtttagcttgtgg

SEQ ID NO: 39418 - DNA, 24 bp, Homo sapiens
gacagaataatttcctatgatcac

SEQ ID NO: 39419 - DNA, 20 bp, Homo sapiens
taccagcagaactctaagca

SEQ ID NO: 39420 - DNA, 18 bp, Homo sapiens
gctttcacaaaagaggag

SEQ ID NO: 39421 - DNA, 19 bp, Homo sapiens
gtcactggcatcatacgtt

SEQ ID NO: 39422 - DNA, 17 bp, Homo sapiens
actgcactgtggagata

SEQ ID NO: 39423 - DNA, 24 bp, Homo sapiens
aatatgaacaagttttttcttttt

SEQ ID NO: 39424 - DNA, 18 bp, Homo sapiens
gcatcttacctgaatgga

SEQ ID NO: 39425 - DNA, 23 bp, Homo sapiens
ataaccactgacatcacagtgga

SEQ ID NO: 39426 - DNA, 16 bp, Homo sapiens
aatgcaagttcctggt

SEQ ID NO: 39427 - DNA, 16 bp, Homo sapiens
agcaggcttggagttt

SEQ ID NO: 39428 - DNA, 16 bp, Homo sapiens
tcatctttccctgggt

SEQ ID NO: 39429 - DNA, 16 bp, Homo sapiens
tgcagatggacaagga

SEQ ID NO: 39430 - DNA, 21 bp, Homo sapiens
aatgagaagaaaatcacccat

SEQ ID NO: 39431 - DNA, 16 bp, Homo sapiens
taacctctgcctgtgg

SEQ ID NO: 39432 - DNA, 18 bp, Homo sapiens
cagattgctttggaacag

SEQ ID NO: 39433 - DNA, 16 bp, Homo sapiens
tcttgatggagcggga

SEQ ID NO: 39434 - DNA, 23 bp, Homo sapiens
atagggtgacttaactgtgtgtg

SEQ ID NO: 39435 - DNA, 16 bp, Homo sapiens
ccatccgctggaagta

SEQ ID NO: 39436 - DNA, 16 bp, Homo sapiens
cgaaaggctgtccaca

SEQ ID NO: 39437 - DNA, 17 bp, Homo sapiens
ccacattgtgtcccttt

SEQ ID NO: 39438 - DNA, 17 bp, Homo sapiens
attagcaggatgtgaat

SEQ ID NO: 39439 - DNA, 24 bp, Homo sapiens
caaaaatcttaaatacaggtaaat

SEQ ID NO: 39440 - DNA, 20 bp, Homo sapiens
gtttgcccctcagccggata

SEQ ID NO: 39441 - DNA, 22 bp, Homo sapiens
actattcacaatgacatgtaga

SEQ ID NO: 39442 - DNA, 19 bp, Homo sapiens
actcattgctctttctgta

SEQ ID NO: 39443 - DNA, 24 bp, Homo sapiens
tcttcaaaatctgcaatatctgta

SEQ ID NO: 39444 - DNA, 19 bp, Homo sapiens
ggtgtgtggaataatagtg

SEQ ID NO: 39445 - DNA, 24 bp, Homo sapiens
gtctagcagagctttagaccagga

SEQ ID NO: 39446 - DNA, 17 bp, Homo sapiens
gggcctatgttcatcag

SEQ ID NO: 39447 - DNA, 21 bp, Homo sapiens
gtttattcctgaatcctccca

SEQ ID NO: 39448 - DNA, 17 bp, Homo sapiens
cccaacagggtgtatac

SEQ ID NO: 39449 - DNA, 19 bp, Homo sapiens
caggagggtgatggtgagc

SEQ ID NO: 39450 - DNA, 23 bp, Homo sapiens
gtaataccatttctttgctttta

SEQ ID NO: 39451 - DNA, 17 bp, Homo sapiens
agcatacacttggctga

SEQ ID NO: 39452 - DNA, 24 bp, Homo sapiens
gcattttatgtttaatttaaaagt

SEQ ID NO: 39453 - DNA, 17 bp, Homo sapiens
gatgctgttaaccagcc

SEQ ID NO: 39454 - DNA, 23 bp, Homo sapiens
tatgtcctatactctatattcaa

SEQ ID NO: 39455 - DNA, 20 bp, Homo sapiens
ataaaaatccctcaaatcag

SEQ ID NO: 39456 - DNA, 17 bp, Homo sapiens
ggcccagttccttacat

SEQ ID NO: 39457 - DNA, 24 bp, Homo sapiens
aaaatgttgagtgcttacaagtat

SEQ ID NO: 39458 - DNA, 16 bp, Homo sapiens
caactggttgctcgat

SEQ ID NO: 39459 - DNA, 21 bp, Homo sapiens
gaggttttggtcctagaattt

SEQ ID NO: 39460 - DNA, 21 bp, Homo sapiens
cctaataccacatttggggaa

SEQ ID NO: 39461 - DNA, 20 bp, Homo sapiens
agcctaatcctattagcaca

SEQ ID NO: 39462 - DNA, 17 bp, Homo sapiens
gtaatgcactgcaatgg

SEQ ID NO: 39463 - DNA, 18 bp, Homo sapiens
aggcaccaggcttgttca

SEQ ID NO: 39464 - DNA, 17 bp, Homo sapiens
gtgggaaggtatagcca

SEQ ID NO: 39465 - DNA, 22 bp, Homo sapiens
tggagacttccaaagaccaata

SEQ ID NO: 39466 - DNA, 18 bp, Homo sapiens
gtatgggttggcttcttt

SEQ ID NO: 39467 - DNA, 21 bp, Homo sapiens
tgcaaatctgtaaaaacaaaa

SEQ ID NO: 39468 - DNA, 18 bp, Homo sapiens
agagtttctgttctttaa

SEQ ID NO: 39469 - DNA, 25 bp, Homo sapiens
aggttaacattatagaattatgtat

SEQ ID NO: 39470 - DNA, 22 bp, Homo sapiens
ttatttttagtttttaaaatta

SEQ ID NO: 39471 - DNA, 19 bp, Homo sapiens
tccccaaggtaacaagata

SEQ ID NO: 39472 - DNA, 23 bp, Homo sapiens
tttagtggaaaattatatttagc

SEQ ID NO: 39473 - DNA, 24 bp, Homo sapiens
tagaatagcacgctcgccaatcct

SEQ ID NO: 39474 - DNA, 24 bp, Homo sapiens
aaatgctgtaatgtatagaaatat

SEQ ID NO: 39475 - DNA, 17 bp, Homo sapiens
tgctgctcttggggttg

SEQ ID NO: 39476 - DNA, 24 bp, Homo sapiens
aaaagctttaaattattttcctgg

SEQ ID NO: 39477 - DNA, 18 bp, Homo sapiens
tggatatgtatgcctgga

SEQ ID NO: 39478 - DNA, 23 bp, Homo sapiens
ttaaaaacagacataaaaccaaa

SEQ ID NO: 39479 - DNA, 22 bp, Homo sapiens
agttactgtgatttaaataaaa

SEQ ID NO: 39480 - DNA, 20 bp, Homo sapiens
gaaaataacaacggcttcaa

SEQ ID NO: 39481 - DNA, 19 bp, Homo sapiens
tgcacattcttgaatgtgt

SEQ ID NO: 39482 - DNA, 20 bp, Homo sapiens
taacacagcttgttcttgag

SEQ ID NO: 39483 - DNA, 18 bp, Homo sapiens
acgcttaaaatgtgttca

SEQ ID NO: 39484 - DNA, 21 bp, Homo sapiens
aactacattcaagttacaagc

SEQ ID NO: 39485 - DNA, 18 bp, Homo sapiens
ggccatcaatgttctgtt

SEQ ID NO: 39486 - DNA, 19 bp, Homo sapiens
gccttacataagattttca

SEQ ID NO: 39487 - DNA, 18 bp, Homo sapiens
gcaagtacagatgaagct

SEQ ID NO: 39488 - DNA, 20 bp, Homo sapiens
aaaggttaaaacataatctg

SEQ ID NO: 39489 - DNA, 25 bp, Homo sapiens
acattactttaatgtcataagaaaa

SEQ ID NO: 39490 - DNA, 19 bp, Homo sapiens
ggcaaagataaatagagtc

SEQ ID NO: 39491 - DNA, 23 bp, Homo sapiens
ctttgaagcctaaaaattttttt

SEQ ID NO: 39492 - DNA, 17 bp, Homo sapiens
tttccttggggaacctg

SEQ ID NO: 39493 - DNA, 24 bp, Homo sapiens
aataaataaataaataaatttagg

SEQ ID NO: 39494 - DNA, 17 bp, Homo sapiens
cgtgtggatgactcagg

SEQ ID NO: 39495 - DNA, 18 bp, Homo sapiens
tgtgttgtcctcagaagc

SEQ ID NO: 39496 - DNA, 18 bp, Homo sapiens
acaacttctctattaagc

SEQ ID NO: 39497 - DNA, 26 bp, Homo sapiens
agaaacactttgataatgttatatta

SEQ ID NO: 39498 - DNA, 23 bp, Homo sapiens
aaaccaataaaagaaactatatt

SEQ ID NO: 39499 - DNA, 18 bp, Homo sapiens
tttacactgtcttcctga

SEQ ID NO: 39500 - DNA, 23 bp, Homo sapiens
tggttgccagtattacatgcttt

SEQ ID NO: 39501 - DNA, 16 bp, Homo sapiens
ttagcgccttcctggg

SEQ ID NO: 39502 - DNA, 18 bp, Homo sapiens
acgtacacttcataagga

SEQ ID NO: 39503 - DNA, 19 bp, Homo sapiens
ttggagaaaaaggtgtgac

SEQ ID NO: 39504 - DNA, 21 bp, Homo sapiens
ttcacaatctacaaaaatagt

SEQ ID NO: 39505 - DNA, 22 bp, Homo sapiens
taataattcatctgtgaaaatt

SEQ ID NO: 39506 - DNA, 23 bp, Homo sapiens
taatatttaaaattcccaggaag

SEQ ID NO: 39507 - DNA, 19 bp, Homo sapiens
gttcccaattctgttgtaa

SEQ ID NO: 39508 - DNA, 19 bp, Homo sapiens
tgcagtttaatcacatccc

SEQ ID NO: 39509 - DNA, 19 bp, Homo sapiens
ccatcaagaaccaattcca

SEQ ID NO: 39510 - DNA, 17 bp, Homo sapiens
cataagcatgtgtcaag

SEQ ID NO: 39511 - DNA, 21 bp, Homo sapiens
ttagctttcctccctttccct

SEQ ID NO: 39512 - DNA, 22 bp, Homo sapiens
atgtagcagttgttagatcata

SEQ ID NO: 39513 - DNA, 22 bp, Homo sapiens
aaaagttttcccaattcaaatt

SEQ ID NO: 39514 - DNA, 18 bp, Homo sapiens
agctgaatgatactttct

SEQ ID NO: 39515 - DNA, 22 bp, Homo sapiens
aataaaacctaatgcttgacac

SEQ ID NO: 39516 - DNA, 17 bp, Homo sapiens
tgtactgttgaccaaga

SEQ ID NO: 39517 - DNA, 19 bp, Homo sapiens
ctgaagggaagtagcacca

SEQ ID NO: 39518 - DNA, 24 bp, Homo sapiens
taattgatgcatttgcttaataaa

SEQ ID NO: 39519 - DNA, 23 bp, Homo sapiens
gaacatcatgagcaaaggcaaaa

SEQ ID NO: 39520 - DNA, 25 bp, Homo sapiens
cttctcataataaatactacatgct

SEQ ID NO: 39521 - DNA, 22 bp, Homo sapiens
tgttgaactgtgaaatatgagt

SEQ ID NO: 39522 - DNA, 16 bp, Homo sapiens
cttgatttccgtggca

SEQ ID NO: 39523 - DNA, 22 bp, Homo sapiens
tgtcagaatgaatgtgaatatg

SEQ ID NO: 39524 - DNA, 20 bp, Homo sapiens
ggtagcttcacctatatttg

SEQ ID NO: 39525 - DNA, 21 bp, Homo sapiens
tcccaacaatccacgagcaac

SEQ ID NO: 39526 - DNA, 18 bp, Homo sapiens
cgacagctgatacaagtt

SEQ ID NO: 39527 - DNA, 20 bp, Homo sapiens
atatgcatagaggcagttgg

SEQ ID NO: 39528 - DNA, 23 bp, Homo sapiens
gttttaaacttttcttggataac

SEQ ID NO: 39529 - DNA, 19 bp, Homo sapiens
cttggtctataattagacc

SEQ ID NO: 39530 - DNA, 21 bp, Homo sapiens
acgttagaattgtttttattt

SEQ ID NO: 39531 - DNA, 16 bp, Homo sapiens
ataacccagcccaaaa

SEQ ID NO: 39532 - DNA, 20 bp, Homo sapiens
tgtattgtcagaagtttgaa

SEQ ID NO: 39533 - DNA, 19 bp, Homo sapiens
tctgtagtgatgatgtcca

SEQ ID NO: 39534 - DNA, 27 bp, Homo sapiens
ctattatctcattattcttgtaaagat

SEQ ID NO: 39535 - DNA, 27 bp, Homo sapiens
gtatctgtaataatgattaaattatta

SEQ ID NO: 39536 - DNA, 23 bp, Homo sapiens
atgcttaactacgtaagagttac

SEQ ID NO: 39537 - DNA, 19 bp, Homo sapiens
tgcatagattttaggttca

SEQ ID NO: 39538 - DNA, 18 bp, Homo sapiens
accttttggagatatggc

SEQ ID NO: 39539 - DNA, 21 bp, Homo sapiens
tagtctttatttttcttctga

SEQ ID NO: 39540 - DNA, 21 bp, Homo sapiens
tgtggatatacttaaggctat

SEQ ID NO: 39541 - DNA, 21 bp, Homo sapiens
gccgatggagatctattagga

SEQ ID NO: 39542 - DNA, 25 bp, Homo sapiens
tttagcacaataaagataatttcag

SEQ ID NO: 39543 - DNA, 18 bp, Homo sapiens
tctttacacctagagaat

SEQ ID NO: 39544 - DNA, 17 bp, Homo sapiens
atgacatctgatctgaa

SEQ ID NO: 39545 - DNA, 20 bp, Homo sapiens
ctagagaataaaactgttga

SEQ ID NO: 39546 - DNA, 21 bp, Homo sapiens
tgctgagaaacatagtaagat

SEQ ID NO: 39547 - DNA, 22 bp, Homo sapiens
aattagtgtagcagaatcaata

SEQ ID NO: 39548 - DNA, 18 bp, Homo sapiens
ctaaaatgtcccattctc

SEQ ID NO: 39549 - DNA, 19 bp, Homo sapiens
ctacgttgggagcgaatct

SEQ ID NO: 39550 - DNA, 16 bp, Homo sapiens
cggaacgaaagtgaac

SEQ ID NO: 39551 - DNA, 20 bp, Homo sapiens
cgctggaacccctctggcag

SEQ ID NO: 39552 - DNA, 24 bp, Homo sapiens
agaaagcaggtgtcgcgagagttg

SEQ ID NO: 39553 - DNA, 24 bp, Homo sapiens
cagtcccaacagcgcaggagactg

SEQ ID NO: 39554 - DNA, 23 bp, Homo sapiens
aggtgcgcacgcgcacttacagg

SEQ ID NO: 39555 - DNA, 24 bp, Homo sapiens
ttccaggtgtgtcgcctaagagcg

SEQ ID NO: 39556 - DNA, 16 bp, Homo sapiens
tccgcgtgaccccgcc

SEQ ID NO: 39557 - DNA, 16 bp, Homo sapiens
atgctggtgaggatgt

SEQ ID NO: 39558 - DNA, 26 bp, Homo sapiens
acttcagtattttagttatatatcga

SEQ ID NO: 39559 - DNA, 16 bp, Homo sapiens
tgagtacttgagtgaa

SEQ ID NO: 39560 - DNA, 17 bp, Homo sapiens
atcacattgagccaaaa

SEQ ID NO: 39561 - DNA, 18 bp, Homo sapiens
tgtacaatggagtccaag

SEQ ID NO: 39562 - DNA, 20 bp, Homo sapiens
aatatgcccatgctgctacc

SEQ ID NO: 39563 - DNA, 19 bp, Homo sapiens
ctttaaggttgtttgtaca

SEQ ID NO: 39564 - DNA, 17 bp, Homo sapiens
tccgatgttaccacttc

SEQ ID NO: 39565 - DNA, 20 bp, Homo sapiens
ggattaaaccagtataaagt

SEQ ID NO: 39566 - DNA, 23 bp, Homo sapiens
ccatgtgctcagccgtttaattc

SEQ ID NO: 39567 - DNA, 20 bp, Homo sapiens
gctgtgagttgattctacaa

SEQ ID NO: 39568 - DNA, 23 bp, Homo sapiens
gatggcttaaagagaaaattatg

SEQ ID NO: 39569 - DNA, 19 bp, Homo sapiens
gttctctgtggtaaagtaa

SEQ ID NO: 39570 - DNA, 19 bp, Homo sapiens
agagcaaagatttgtggat

SEQ ID NO: 39571 - DNA, 20 bp, Homo sapiens
aacacacaaaaaagactgac

SEQ ID NO: 39572 - DNA, 17 bp, Homo sapiens
agcagaggccataactc

SEQ ID NO: 39573 - DNA, 23 bp, Homo sapiens
aaactatttagacttttttttaa

SEQ ID NO: 39574 - DNA, 22 bp, Homo sapiens
ccaggtgcttcttcagaaagta

SEQ ID NO: 39575 - DNA, 24 bp, Homo sapiens
gaaaactcatttaaaattcatcca

SEQ ID NO: 39576 - DNA, 17 bp, Homo sapiens
gcatttcgagtaggtca

SEQ ID NO: 39577 - DNA, 23 bp, Homo sapiens
tcaggaattaaagaaacagattt

SEQ ID NO: 39578 - DNA, 23 bp, Homo sapiens
atattctataaatgttgattttc

SEQ ID NO: 39579 - DNA, 23 bp, Homo sapiens
aatacattaggggaaatagaagg

SEQ ID NO: 39580 - DNA, 16 bp, Homo sapiens
gggtccacagctagca

SEQ ID NO: 39581 - DNA, 20 bp, Homo sapiens
gtagttctgatttcatttgt

SEQ ID NO: 39582 - DNA, 16 bp, Homo sapiens
cccagacctctgcaat

SEQ ID NO: 39583 - DNA, 19 bp, Homo sapiens
gggccccctggtgctggaa

SEQ ID NO: 39584 - DNA, 20 bp, Homo sapiens
ccaaacttagctagcagtta

SEQ ID NO: 39585 - DNA, 22 bp, Homo sapiens
agagagggcacaaattatctgt

SEQ ID NO: 39586 - DNA, 17 bp, Homo sapiens
tcccaaactacttctct

SEQ ID NO: 39587 - DNA, 24 bp, Homo sapiens
agattaatctgacatcattgtata

SEQ ID NO: 39588 - DNA, 23 bp, Homo sapiens
gcattcatatctcttgataactc

SEQ ID NO: 39589 - DNA, 22 bp, Homo sapiens
tgcagtttgagatttagggaga

SEQ ID NO: 39590 - DNA, 24 bp, Homo sapiens
tagcttcatttgtggtccttgtca

SEQ ID NO: 39591 - DNA, 21 bp, Homo sapiens
attgacccgtaaaactgttcc

SEQ ID NO: 39592 - DNA, 19 bp, Homo sapiens
tcaccaacggtttcaataa

SEQ ID NO: 39593 - DNA, 16 bp, Homo sapiens
aaacccgaatgactga

SEQ ID NO: 39594 - DNA, 22 bp, Homo sapiens
ttgtcactcatctttatatagc

SEQ ID NO: 39595 - DNA, 18 bp, Homo sapiens
gaggaactttaggaggcg

SEQ ID NO: 39596 - DNA, 24 bp, Homo sapiens
atatcttgtatttaattatacatt

SEQ ID NO: 39597 - DNA, 19 bp, Homo sapiens
gaaggagcgggatatgaca

SEQ ID NO: 39598 - DNA, 21 bp, Homo sapiens
aatacattcttcagaagtgag

SEQ ID NO: 39599 - DNA, 18 bp, Homo sapiens
tggcagtagtaaaacaaa

SEQ ID NO: 39600 - DNA, 23 bp, Homo sapiens
tgagtatgagtaaatgaagtaga

SEQ ID NO: 39601 - DNA, 24 bp, Homo sapiens
cattttatatttttgggggaaaaa

SEQ ID NO: 39602 - DNA, 23 bp, Homo sapiens
tttaggatatagttgtgatttac

SEQ ID NO: 39603 - DNA, 23 bp, Homo sapiens
aaaccattatcaacttagtttac

SEQ ID NO: 39604 - DNA, 19 bp, Homo sapiens
ttgctgacatggttgacat

SEQ ID NO: 39605 - DNA, 19 bp, Homo sapiens
gagaatctgcctttgattc

SEQ ID NO: 39606 - DNA, 21 bp, Homo sapiens
gcttttgagtaatttctgtca

SEQ ID NO: 39607 - DNA, 20 bp, Homo sapiens
gtctccatcagatttagtta

SEQ ID NO: 39608 - DNA, 21 bp, Homo sapiens
ggatgaaaagttaatgaaatg

SEQ ID NO: 39609 - DNA, 20 bp, Homo sapiens
ttgcggagtaatttcagtgc

SEQ ID NO: 39610 - DNA, 20 bp, Homo sapiens
gttggttgtcattaaatgtt

SEQ ID NO: 39611 - DNA, 21 bp, Homo sapiens
ttcagagtgaaagatacagaa

SEQ ID NO: 39612 - DNA, 20 bp, Homo sapiens
agatggcagatctggtagct

SEQ ID NO: 39613 - DNA, 21 bp, Homo sapiens
gcaagattgattatatgtcta

SEQ ID NO: 39614 - DNA, 16 bp, Homo sapiens
caagcggaatatgtga

SEQ ID NO: 39615 - DNA, 16 bp, Homo sapiens
cacactccgtctttgt

SEQ ID NO: 39616 - DNA, 22 bp, Homo sapiens
ttggtatatttactttgacaca

SEQ ID NO: 39617 - DNA, 21 bp, Homo sapiens
ggaaatctttcattttatccc

SEQ ID NO: 39618 - DNA, 23 bp, Homo sapiens
tttgtagaccgtaagaattaact

SEQ ID NO: 39619 - DNA, 16 bp, Homo sapiens
tgttgcttccgtcgtt

SEQ ID NO: 39620 - DNA, 16 bp, Homo sapiens
atggtctggttcttcc

SEQ ID NO: 39621 - DNA, 16 bp, Homo sapiens
ggggtgggtcctgaaa

SEQ ID NO: 39622 - DNA, 20 bp, Homo sapiens
ggagaggggatctctgaaat

SEQ ID NO: 39623 - DNA, 16 bp, Homo sapiens
ggggacagggccccaa

SEQ ID NO: 39624 - DNA, 16 bp, Homo sapiens
agctgactgccaaacg

SEQ ID NO: 39625 - DNA, 27 bp, Homo sapiens
aaattattatacaggatgaattttatt

SEQ ID NO: 39626 - DNA, 17 bp, Homo sapiens
gaaagtgtgttagagca

SEQ ID NO: 39627 - DNA, 21 bp, Homo sapiens
ataagcatacaagtgattttt

SEQ ID NO: 39628 - DNA, 21 bp, Homo sapiens
ggaacaaaaggttctcattgg

SEQ ID NO: 39629 - DNA, 16 bp, Homo sapiens
tcaagcatgggtcaca

SEQ ID NO: 39630 - DNA, 18 bp, Homo sapiens
agcttttaaaagcagaga

SEQ ID NO: 39631 - DNA, 23 bp, Homo sapiens
gtgaagcaagagcggtcggcaga

SEQ ID NO: 39632 - DNA, 17 bp, Homo sapiens
cacttatccccaccgcc

SEQ ID NO: 39633 - DNA, 24 bp, Homo sapiens
caggtgatggcgccccccgcggcc

SEQ ID NO: 39634 - DNA, 23 bp, Homo sapiens
gagagaaggggcgagaggtgcct

SEQ ID NO: 39635 - DNA, 19 bp, Homo sapiens
ttgtgtccgaccgagagtc

SEQ ID NO: 39636 - DNA, 16 bp, Homo sapiens
caggctgacagcgcgt

SEQ ID NO: 39637 - DNA, 19 bp, Homo sapiens
agatttgaaaacattgctt

SEQ ID NO: 39638 - DNA, 20 bp, Homo sapiens
agaggtagataatttttctt

SEQ ID NO: 39639 - DNA, 25 bp, Homo sapiens
tatagtatatttcactatactcatt

SEQ ID NO: 39640 - DNA, 17 bp, Homo sapiens
aatgggtagtaattcga

SEQ ID NO: 39641 - DNA, 22 bp, Homo sapiens
gtctactgaggaaaactaattt

SEQ ID NO: 39642 - DNA, 21 bp, Homo sapiens
tctcaggaattgtacacaaat

SEQ ID NO: 39643 - DNA, 20 bp, Homo sapiens
cagtgctttcatgccttaaa

SEQ ID NO: 39644 - DNA, 28 bp, Homo sapiens
aattatgaaaaatattaatactctcctc

SEQ ID NO: 39645 - DNA, 17 bp, Homo sapiens
tctactgtgcctcgaat

SEQ ID NO: 39646 - DNA, 19 bp, Homo sapiens
gaagggtcattatgcagca

SEQ ID NO: 39647 - DNA, 16 bp, Homo sapiens
tctgcttcttctgcaa

SEQ ID NO: 39648 - DNA, 24 bp, Homo sapiens
tgtgcaaaacacagggagaatttc

SEQ ID NO: 39649 - DNA, 18 bp, Homo sapiens
gccaactgttttagacga

SEQ ID NO: 39650 - DNA, 22 bp, Homo sapiens
ctgtcatgtgatttatcatgtg

SEQ ID NO: 39651 - DNA, 16 bp, Homo sapiens
cctatctgggcagctt

SEQ ID NO: 39652 - DNA, 23 bp, Homo sapiens
caggagtgaacatggaaaggttt

SEQ ID NO: 39653 - DNA, 16 bp, Homo sapiens
ccagtctgggaagagt

SEQ ID NO: 39654 - DNA, 17 bp, Homo sapiens
agggctctctgcagctg

SEQ ID NO: 39655 - DNA, 21 bp, Homo sapiens
tactgaaatacaattacaaaa

SEQ ID NO: 39656 - DNA, 20 bp, Homo sapiens
ccgtgtgtgtctagtggaga

SEQ ID NO: 39657 - DNA, 20 bp, Homo sapiens
aaaaaaaagatagagttaca

SEQ ID NO: 39658 - DNA, 20 bp, Homo sapiens
caggtgcttttaaagaactc

SEQ ID NO: 39659 - DNA, 21 bp, Homo sapiens
acatctcagacagagaaagga

SEQ ID NO: 39660 - DNA, 23 bp, Homo sapiens
ctgttaaaattccaaatctgtct

SEQ ID NO: 39661 - DNA, 22 bp, Homo sapiens
gaaaattaggggggagttcttt

SEQ ID NO: 39662 - DNA, 19 bp, Homo sapiens
tgcatattcactatacctt

SEQ ID NO: 39663 - DNA, 22 bp, Homo sapiens
tttacacttgcaaatataaact

SEQ ID NO: 39664 - DNA, 18 bp, Homo sapiens
ggaggaaatttcgtcaga

SEQ ID NO: 39665 - DNA, 19 bp, Homo sapiens
acactcctgtaacagaaga

SEQ ID NO: 39666 - DNA, 16 bp, Homo sapiens
agctagctgtatagct

SEQ ID NO: 39667 - DNA, 22 bp, Homo sapiens
tcctgtgccaattcttccaggt

SEQ ID NO: 39668 - DNA, 16 bp, Homo sapiens
ttcattggaagcccta

SEQ ID NO: 39669 - DNA, 23 bp, Homo sapiens
attgtagaaaataagttgaaagt

SEQ ID NO: 39670 - DNA, 17 bp, Homo sapiens
cttgttcgcccatccag

SEQ ID NO: 39671 - DNA, 20 bp, Homo sapiens
ttgattcgaaattttaaagt

SEQ ID NO: 39672 - DNA, 20 bp, Homo sapiens
aacaaaacaaaactatacaa

SEQ ID NO: 39673 - DNA, 24 bp, Homo sapiens
ttataaattaagcatatatttata

SEQ ID NO: 39674 - DNA, 22 bp, Homo sapiens
aactttataaaattctccactt

SEQ ID NO: 39675 - DNA, 18 bp, Homo sapiens
tgggacatttagtgagct

SEQ ID NO: 39676 - DNA, 21 bp, Homo sapiens
ctttaaagattccttctaatc

SEQ ID NO: 39677 - DNA, 18 bp, Homo sapiens
cctggttatgcagctgct

SEQ ID NO: 39678 - DNA, 20 bp, Homo sapiens
ggcaattccttttacactac

SEQ ID NO: 39679 - DNA, 26 bp, Homo sapiens
gtatttctataatctagagaagatgt

SEQ ID NO: 39680 - DNA, 20 bp, Homo sapiens
cgtaactattaaaaaggttt

SEQ ID NO: 39681 - DNA, 24 bp, Homo sapiens
ttttttcaagattattatgaattc

SEQ ID NO: 39682 - DNA, 17 bp, Homo sapiens
gggtttcactttgatgc

SEQ ID NO: 39683 - DNA, 18 bp, Homo sapiens
ttttcatgatgatggtag

SEQ ID NO: 39684 - DNA, 19 bp, Homo sapiens
ctaggactacaggtgtata

SEQ ID NO: 39685 - DNA, 24 bp, Homo sapiens
atacaaaaggatggtgcaccaaag

SEQ ID NO: 39686 - DNA, 20 bp, Homo sapiens
tgactttagcatgtagttcc

SEQ ID NO: 39687 - DNA, 22 bp, Homo sapiens
tattatacatttgcactgtctc

SEQ ID NO: 39688 - DNA, 23 bp, Homo sapiens
caaacttcttatatagttgcttg

SEQ ID NO: 39689 - DNA, 20 bp, Homo sapiens
accagaatgtgaatgtattt

SEQ ID NO: 39690 - DNA, 18 bp, Homo sapiens
acaaaccaggatacctcc

SEQ ID NO: 39691 - DNA, 20 bp, Homo sapiens
acatttgagagaggactgga

SEQ ID NO: 39692 - DNA, 24 bp, Homo sapiens
ataaactacctgataatacaaata

SEQ ID NO: 39693 - DNA, 16 bp, Homo sapiens
atctagccaagcaact

SEQ ID NO: 39694 - DNA, 21 bp, Homo sapiens
gtcataatgaacatttcaaga

SEQ ID NO: 39695 - DNA, 20 bp, Homo sapiens
cctcaaacctacgggattgg

SEQ ID NO: 39696 - DNA, 17 bp, Homo sapiens
ctcccaggtttccagtt

SEQ ID NO: 39697 - DNA, 25 bp, Homo sapiens
agtttttcacttgtaattttcataa

SEQ ID NO: 39698 - DNA, 20 bp, Homo sapiens
aatgatagaggaaagatcct

SEQ ID NO: 39699 - DNA, 20 bp, Homo sapiens
ggtgacataaaaacattttt

SEQ ID NO: 39700 - DNA, 19 bp, Homo sapiens
gggaatataacttaccaca

SEQ ID NO: 39701 - DNA, 22 bp, Homo sapiens
gttatgggttattgatgaaaag

SEQ ID NO: 39702 - DNA, 20 bp, Homo sapiens
cagattcaaaacccttattt

SEQ ID NO: 39703 - DNA, 16 bp, Homo sapiens
ttggacagacatacct

SEQ ID NO: 39704 - DNA, 24 bp, Homo sapiens
ataagcactttacatattgataaa

SEQ ID NO: 39705 - DNA, 20 bp, Homo sapiens
ccctagtagctcttggtctt

SEQ ID NO: 39706 - DNA, 21 bp, Homo sapiens
ctctaaatggactcaggtatg

SEQ ID NO: 39707 - DNA, 22 bp, Homo sapiens
gtgctccaaatacttttgagta

SEQ ID NO: 39708 - DNA, 17 bp, Homo sapiens
accttccaaggttggcc

SEQ ID NO: 39709 - DNA, 24 bp, Homo sapiens
acattttagcttgatttaatttga

SEQ ID NO: 39710 - DNA, 17 bp, Homo sapiens
tggaagagttacctgaa

SEQ ID NO: 39711 - DNA, 19 bp, Homo sapiens
aggttggtctagactatca

SEQ ID NO: 39712 - DNA, 22 bp, Homo sapiens
aaatttgttacattatatgttc

SEQ ID NO: 39713 - DNA, 16 bp, Homo sapiens
tcctagcattcggcca

SEQ ID NO: 39714 - DNA, 21 bp, Homo sapiens
gacacagttttataaactcta

SEQ ID NO: 39715 - DNA, 19 bp, Homo sapiens
agagctctcaatgaaggtg

SEQ ID NO: 39716 - DNA, 18 bp, Homo sapiens
accaattagtaaaccacc

SEQ ID NO: 39717 - DNA, 18 bp, Homo sapiens
ttttcagcctttccctac

SEQ ID NO: 39718 - DNA, 17 bp, Homo sapiens
ccacttttcattgctgt

SEQ ID NO: 39719 - DNA, 20 bp, Homo sapiens
tgttgttcttgtttaatatg

SEQ ID NO: 39720 - DNA, 23 bp, Homo sapiens
tattgtctttgattggagatttt

SEQ ID NO: 39721 - DNA, 18 bp, Homo sapiens
actcacctttcctggtgg

SEQ ID NO: 39722 - DNA, 17 bp, Homo sapiens
tacacataacccagcaa

SEQ ID NO: 39723 - DNA, 19 bp, Homo sapiens
agatcaaaggtactcacac

SEQ ID NO: 39724 - DNA, 20 bp, Homo sapiens
tagcatgcttattaatactt

SEQ ID NO: 39725 - DNA, 20 bp, Homo sapiens
ttaatcaactaactagtgaa

SEQ ID NO: 39726 - DNA, 22 bp, Homo sapiens
gtaaaaaatcactgactgtaat

SEQ ID NO: 39727 - DNA, 19 bp, Homo sapiens
accactgtactccaacctg

SEQ ID NO: 39728 - DNA, 17 bp, Homo sapiens
tagctctttccataccc

SEQ ID NO: 39729 - DNA, 24 bp, Homo sapiens
aaaaacttcactcatcagctatca

SEQ ID NO: 39730 - DNA, 17 bp, Homo sapiens
catccctccatatacac

SEQ ID NO: 39731 - DNA, 19 bp, Homo sapiens
cgcacttaacatttcatgt

SEQ ID NO: 39732 - DNA, 16 bp, Homo sapiens
atgtttcagagtccac

SEQ ID NO: 39733 - DNA, 18 bp, Homo sapiens
tttgaagaactcatgggt

SEQ ID NO: 39734 - DNA, 21 bp, Homo sapiens
acagatcccattcatgaattt

SEQ ID NO: 39735 - DNA, 17 bp, Homo sapiens
tgccacggagtactggg

SEQ ID NO: 39736 - DNA, 24 bp, Homo sapiens
cttagacactaaatttataatttc

SEQ ID NO: 39737 - DNA, 18 bp, Homo sapiens
attgagaggaatggagcc

SEQ ID NO: 39738 - DNA, 19 bp, Homo sapiens
tgttttcaacttggagaaa

SEQ ID NO: 39739 - DNA, 17 bp, Homo sapiens
tgcaatccttggctggc

SEQ ID NO: 39740 - DNA, 20 bp, Homo sapiens
tgagggctagtcatatttct

SEQ ID NO: 39741 - DNA, 17 bp, Homo sapiens
cagagccacagatgaca

SEQ ID NO: 39742 - DNA, 21 bp, Homo sapiens
gaaaaagtacttcaaaatcat

SEQ ID NO: 39743 - DNA, 17 bp, Homo sapiens
gtatactgtcatccctt

SEQ ID NO: 39744 - DNA, 17 bp, Homo sapiens
ctttgaacggctcaagc

SEQ ID NO: 39745 - DNA, 16 bp, Homo sapiens
aggacagaatcgctgc

SEQ ID NO: 39746 - DNA, 16 bp, Homo sapiens
tcagttttgacctctt

SEQ ID NO: 39747 - DNA, 21 bp, Homo sapiens
gaacaaaatcacattcctaaa

SEQ ID NO: 39748 - DNA, 18 bp, Homo sapiens
tgaccagccggcacactt

SEQ ID NO: 39749 - DNA, 23 bp, Homo sapiens
gatgaagtcatttacaatttcta

SEQ ID NO: 39750 - DNA, 16 bp, Homo sapiens
tatgatgggcccgagc

SEQ ID NO: 39751 - DNA, 20 bp, Homo sapiens
tcacatcaatagcaatgcac

SEQ ID NO: 39752 - DNA, 20 bp, Homo sapiens
tgagcatttatctgtaaccg

SEQ ID NO: 39753 - DNA, 19 bp, Homo sapiens
acctttaaggtttctgtgg

SEQ ID NO: 39754 - DNA, 22 bp, Homo sapiens
ccagttaatattctgacttgga

SEQ ID NO: 39755 - DNA, 22 bp, Homo sapiens
tttttaaagttaggcacttcaa

SEQ ID NO: 39756 - DNA, 18 bp, Homo sapiens
aactggctagctgcagtt

SEQ ID NO: 39757 - DNA, 23 bp, Homo sapiens
tacctgtggaacaaggtgatgga

SEQ ID NO: 39758 - DNA, 21 bp, Homo sapiens
aagacattctgaaatctgtta

SEQ ID NO: 39759 - DNA, 23 bp, Homo sapiens
tgtgatattaaagatccaagtca

SEQ ID NO: 39760 - DNA, 24 bp, Homo sapiens
ataaaatttttatttgataatcat

SEQ ID NO: 39761 - DNA, 18 bp, Homo sapiens
ctgcttacaatggaatgt

SEQ ID NO: 39762 - DNA, 17 bp, Homo sapiens
gctccaggattgggaaa

SEQ ID NO: 39763 - DNA, 22 bp, Homo sapiens
taccaccagaaactgaagtaaa

SEQ ID NO: 39764 - DNA, 18 bp, Homo sapiens
aactactcccctctctcc

SEQ ID NO: 39765 - DNA, 17 bp, Homo sapiens
tgcagtgtgatttccct

SEQ ID NO: 39766 - DNA, 29 bp, Homo sapiens
aattataaatttacattttatgttctaaa

SEQ ID NO: 39767 - DNA, 24 bp, Homo sapiens
aataaaaacattttatttccttcc

SEQ ID NO: 39768 - DNA, 23 bp, Homo sapiens
tcttatatcaagtggtacatttc

SEQ ID NO: 39769 - DNA, 22 bp, Homo sapiens
ggctgttcattcaataaactca

SEQ ID NO: 39770 - DNA, 16 bp, Homo sapiens
tgtcccctccttcaaa

SEQ ID NO: 39771 - DNA, 22 bp, Homo sapiens
gtatttcctggtaagtagagct

SEQ ID NO: 39772 - DNA, 16 bp, Homo sapiens
ttgggtggtaagtgca

SEQ ID NO: 39773 - DNA, 22 bp, Homo sapiens
gtatgcccagtaaaatccaaca

SEQ ID NO: 39774 - DNA, 16 bp, Homo sapiens
agcatttaccatcggg

SEQ ID NO: 39775 - DNA, 16 bp, Homo sapiens
gttgaaggacacctgc

SEQ ID NO: 39776 - DNA, 19 bp, Homo sapiens
aaatgtgttaagaatagca

SEQ ID NO: 39777 - DNA, 18 bp, Homo sapiens
tgccaggtagtctgcact

SEQ ID NO: 39778 - DNA, 19 bp, Homo sapiens
ttcaactgaaagacaattt

SEQ ID NO: 39779 - DNA, 21 bp, Homo sapiens
gcggaatcaccatctgaggat

SEQ ID NO: 39780 - DNA, 19 bp, Homo sapiens
cagtgtttctgtaacactg

SEQ ID NO: 39781 - DNA, 22 bp, Homo sapiens
tttgttttggcatgagataaag

SEQ ID NO: 39782 - DNA, 18 bp, Homo sapiens
tgagcattgcttgaaaga

SEQ ID NO: 39783 - DNA, 26 bp, Homo sapiens
taagatccattattttaaaaacataa

SEQ ID NO: 39784 - DNA, 16 bp, Homo sapiens
tgtgtacatcacagct

SEQ ID NO: 39785 - DNA, 22 bp, Homo sapiens
aaacaggtttacttgtgtcctg

SEQ ID NO: 39786 - DNA, 24 bp, Homo sapiens
aagggggtttatttccacatagca

SEQ ID NO: 39787 - DNA, 20 bp, Homo sapiens
cagcagcgatttctgggtat

SEQ ID NO: 39788 - DNA, 17 bp, Homo sapiens
ggcaggcatgtatgtat

SEQ ID NO: 39789 - DNA, 17 bp, Homo sapiens
catgtctaggtccacat

SEQ ID NO: 39790 - DNA, 17 bp, Homo sapiens
gaaagacctctgaggaa

SEQ ID NO: 39791 - DNA, 18 bp, Homo sapiens
cgtgcatctttcttggca

SEQ ID NO: 39792 - DNA, 22 bp, Homo sapiens
gacagttgcttaggtcattgcc

SEQ ID NO: 39793 - DNA, 16 bp, Homo sapiens
ccaggctgggaaactg

SEQ ID NO: 39794 - DNA, 21 bp, Homo sapiens
ccagcttgcaacaaagacatt

SEQ ID NO: 39795 - DNA, 23 bp, Homo sapiens
ttagtaaatcacgattctgtttt

SEQ ID NO: 39796 - DNA, 22 bp, Homo sapiens
ctcagttgccaagagtgctcaa

SEQ ID NO: 39797 - DNA, 18 bp, Homo sapiens
aatgtcttttaggggttc

SEQ ID NO: 39798 - DNA, 16 bp, Homo sapiens
acgtacgccacaaggc

SEQ ID NO: 39799 - DNA, 23 bp, Homo sapiens
ctggttggtgtccctgtttgggt

SEQ ID NO: 39800 - DNA, 18 bp, Homo sapiens
ccagatggatgcttcggg

SEQ ID NO: 39801 - DNA, 23 bp, Homo sapiens
agaaagtgcacaggatttcagtg

SEQ ID NO: 39802 - DNA, 19 bp, Homo sapiens
catgttttttcctccttgc

SEQ ID NO: 39803 - DNA, 20 bp, Homo sapiens
tcatcagcatatttaatggt

SEQ ID NO: 39804 - DNA, 21 bp, Homo sapiens
taacatttgtctactgaagca

SEQ ID NO: 39805 - DNA, 16 bp, Homo sapiens
tttgggtccgtttcat

SEQ ID NO: 39806 - DNA, 18 bp, Homo sapiens
gtggtgtctggattttca

SEQ ID NO: 39807 - DNA, 19 bp, Homo sapiens
aaatagaggatctaactgt

SEQ ID NO: 39808 - DNA, 22 bp, Homo sapiens
catgccattttcttctaaataa

SEQ ID NO: 39809 - DNA, 19 bp, Homo sapiens
aagcatcgggagccatgac

SEQ ID NO: 39810 - DNA, 19 bp, Homo sapiens
atggaatttacacatactg

SEQ ID NO: 39811 - DNA, 22 bp, Homo sapiens
gaaaagaaggtaaaaaacaagc

SEQ ID NO: 39812 - DNA, 21 bp, Homo sapiens
gtccctgacatagttcttccg

SEQ ID NO: 39813 - DNA, 23 bp, Homo sapiens
taacaaattatccttacttgtta

SEQ ID NO: 39814 - DNA, 18 bp, Homo sapiens
tgcagacagcaacatcga

SEQ ID NO: 39815 - DNA, 26 bp, Homo sapiens
tttagagtaaatttttagttacttgg

SEQ ID NO: 39816 - DNA, 19 bp, Homo sapiens
catcatcccggttgcttgt

SEQ ID NO: 39817 - DNA, 16 bp, Homo sapiens
gaaagggagaggggct

SEQ ID NO: 39818 - DNA, 19 bp, Homo sapiens
tggtttatgggtgtaactc

SEQ ID NO: 39819 - DNA, 16 bp, Homo sapiens
ctgggcaatccactct

SEQ ID NO: 39820 - DNA, 21 bp, Homo sapiens
aaaatcttcacaactaagtgc

SEQ ID NO: 39821 - DNA, 16 bp, Homo sapiens
ctgtgcctgcagcttt

SEQ ID NO: 39822 - DNA, 22 bp, Homo sapiens
tgtttttatgtgtttgatatga

SEQ ID NO: 39823 - DNA, 16 bp, Homo sapiens
agcctcctcggggctg

SEQ ID NO: 39824 - DNA, 22 bp, Homo sapiens
ctttgtctccttaaaacatctg

SEQ ID NO: 39825 - DNA, 24 bp, Homo sapiens
tggtaaaatgaagaatggcagaac

SEQ ID NO: 39826 - DNA, 20 bp, Homo sapiens
ctttctggtttcagtctaca

SEQ ID NO: 39827 - DNA, 18 bp, Homo sapiens
ctttttgcagcaacaata

SEQ ID NO: 39828 - DNA, 22 bp, Homo sapiens
ctgcattctggctgagagtgac

SEQ ID NO: 39829 - DNA, 18 bp, Homo sapiens
ctggggtataggtaaaaa

SEQ ID NO: 39830 - DNA, 20 bp, Homo sapiens
catgtggtctgctgtctagt

SEQ ID NO: 39831 - DNA, 16 bp, Homo sapiens
agggtgtctgcataac

SEQ ID NO: 39832 - DNA, 21 bp, Homo sapiens
tttcttgggagaagaactgga

SEQ ID NO: 39833 - DNA, 22 bp, Homo sapiens
ttgcccctgcagttggaaacaa

SEQ ID NO: 39834 - DNA, 20 bp, Homo sapiens
accaatgccgtccgctgcca

SEQ ID NO: 39835 - DNA, 17 bp, Homo sapiens
tctcccgtgaagtattt

SEQ ID NO: 39836 - DNA, 20 bp, Homo sapiens
gaagggaagtaagccatatg

SEQ ID NO: 39837 - DNA, 20 bp, Homo sapiens
aagtgacattatactcacca

SEQ ID NO: 39838 - DNA, 18 bp, Homo sapiens
tgtttataccgttttgtt

SEQ ID NO: 39839 - DNA, 19 bp, Homo sapiens
tgacagtcttgattgtgat

SEQ ID NO: 39840 - DNA, 21 bp, Homo sapiens
cttcaaacggatctccaacta

SEQ ID NO: 39841 - DNA, 26 bp, Homo sapiens
agtgaaaataatagaaaattgcaaaa

SEQ ID NO: 39842 - DNA, 20 bp, Homo sapiens
aaggttgtgtaaaatggata

SEQ ID NO: 39843 - DNA, 23 bp, Homo sapiens
atgtgcatgttttgctttggcag

SEQ ID NO: 39844 - DNA, 16 bp, Homo sapiens
ccacgaacagacgcag

SEQ ID NO: 39845 - DNA, 23 bp, Homo sapiens
actattgacttgaggaaaggttt

SEQ ID NO: 39846 - DNA, 16 bp, Homo sapiens
ccacacaggtgtctct

SEQ ID NO: 39847 - DNA, 18 bp, Homo sapiens
agatgtaggaagctgctc

SEQ ID NO: 39848 - DNA, 18 bp, Homo sapiens
gtactgacccatagaaac

SEQ ID NO: 39849 - DNA, 18 bp, Homo sapiens
caggatcgttggaggaac

SEQ ID NO: 39850 - DNA, 22 bp, Homo sapiens
tatttcctaacatgctagtaat

SEQ ID NO: 39851 - DNA, 16 bp, Homo sapiens
tcacccactcagagac

SEQ ID NO: 39852 - DNA, 21 bp, Homo sapiens
accactgaagcaattaattaa

SEQ ID NO: 39853 - DNA, 23 bp, Homo sapiens
gtggatattaacagccgctcact

SEQ ID NO: 39854 - DNA, 22 bp, Homo sapiens
aaatcttaggataaaatcactt

SEQ ID NO: 39855 - DNA, 19 bp, Homo sapiens
tgtgtcctcttttatttca

SEQ ID NO: 39856 - DNA, 23 bp, Homo sapiens
ttagtaataattaaacagccaca

SEQ ID NO: 39857 - DNA, 18 bp, Homo sapiens
ccgctttctgccatttta

SEQ ID NO: 39858 - DNA, 21 bp, Homo sapiens
aggaaatttctttccctctgt

SEQ ID NO: 39859 - DNA, 17 bp, Homo sapiens
tccgtacctgtgtaatt

SEQ ID NO: 39860 - DNA, 19 bp, Homo sapiens
acagtggcattttaaatca

SEQ ID NO: 39861 - DNA, 21 bp, Homo sapiens
gccgtaagtctagtagtgtta

SEQ ID NO: 39862 - DNA, 23 bp, Homo sapiens
agaaataataatccatgatcagt

SEQ ID NO: 39863 - DNA, 18 bp, Homo sapiens
ttccaggccctctccctt

SEQ ID NO: 39864 - DNA, 21 bp, Homo sapiens
gttgaaactggaaaccacagt

SEQ ID NO: 39865 - DNA, 24 bp, Homo sapiens
cgtgctgaacctgagggaggaaaa

SEQ ID NO: 39866 - DNA, 16 bp, Homo sapiens
cccagcaatcagtgta

SEQ ID NO: 39867 - DNA, 23 bp, Homo sapiens
gaaaacacagataatgtacagtg

SEQ ID NO: 39868 - DNA, 20 bp, Homo sapiens
tggagcacatataacaacat

SEQ ID NO: 39869 - DNA, 19 bp, Homo sapiens
tctcatatttaaaccacga

SEQ ID NO: 39870 - DNA, 19 bp, Homo sapiens
tgtgcttcagctacatgac

SEQ ID NO: 39871 - DNA, 18 bp, Homo sapiens
tccaaaggagatagaaat

SEQ ID NO: 39872 - DNA, 18 bp, Homo sapiens
gtgatttttgcctctcca

SEQ ID NO: 39873 - DNA, 16 bp, Homo sapiens
ggaggtagcagtgagc

SEQ ID NO: 39874 - DNA, 22 bp, Homo sapiens
agaaagagactccgtctcaatt

SEQ ID NO: 39875 - DNA, 19 bp, Homo sapiens
ggcacagatcatcttatgg

SEQ ID NO: 39876 - DNA, 24 bp, Homo sapiens
atatgtttatgtgtattgtgtatg

SEQ ID NO: 39877 - DNA, 18 bp, Homo sapiens
tccattggctaagaacac

SEQ ID NO: 39878 - DNA, 20 bp, Homo sapiens
aaaatactctccagaaagcc

SEQ ID NO: 39879 - DNA, 21 bp, Homo sapiens
acaaacaaaaaaaacaaaaca

SEQ ID NO: 39880 - DNA, 20 bp, Homo sapiens
acagaggacataaaataacc

SEQ ID NO: 39881 - DNA, 23 bp, Homo sapiens
aaagcaaggagattgactggatg

SEQ ID NO: 39882 - DNA, 16 bp, Homo sapiens
gcctaccagatgccag

SEQ ID NO: 39883 - DNA, 24 bp, Homo sapiens
ggccaagacaacattttaggcaaa

SEQ ID NO: 39884 - DNA, 20 bp, Homo sapiens
gaccacgttggtgtaaacac

SEQ ID NO: 39885 - DNA, 18 bp, Homo sapiens
gttgatctgtgcaccttt

SEQ ID NO: 39886 - DNA, 21 bp, Homo sapiens
tggcccctgggaacccattca

SEQ ID NO: 39887 - DNA, 20 bp, Homo sapiens
tgcaaacacaatgaggtctg

SEQ ID NO: 39888 - DNA, 16 bp, Homo sapiens
cacagtgaactcaaca

SEQ ID NO: 39889 - DNA, 22 bp, Homo sapiens
ctgtgctcaaagggagcggcca

SEQ ID NO: 39890 - DNA, 22 bp, Homo sapiens
ttttcttctagcattttcttac

SEQ ID NO: 39891 - DNA, 16 bp, Homo sapiens
actcaagcagtgtgaa

SEQ ID NO: 39892 - DNA, 16 bp, Homo sapiens
gttcagcagccggcag

SEQ ID NO: 39893 - DNA, 17 bp, Homo sapiens
cgctccccgcccccagg

SEQ ID NO: 39894 - DNA, 16 bp, Homo sapiens
acccgcaccccgaaac

SEQ ID NO: 39895 - DNA, 17 bp, Homo sapiens
catgcgttagcgctaag

SEQ ID NO: 39896 - DNA, 16 bp, Homo sapiens
atcctgtacccagcgg

SEQ ID NO: 39897 - DNA, 23 bp, Homo sapiens
caaaatggcggcggcgatgacct

SEQ ID NO: 39898 - DNA, 24 bp, Homo sapiens
aaccagggccgcggatgcccggcg

SEQ ID NO: 39899 - DNA, 22 bp, Homo sapiens
ctgcccctgggcgccaggtgtt

SEQ ID NO: 39900 - DNA, 16 bp, Homo sapiens
cggcgcgtgagcgaca

SEQ ID NO: 39901 - DNA, 17 bp, Homo sapiens
accgaattctcctgtag

SEQ ID NO: 39902 - DNA, 18 bp, Homo sapiens
acttttcatcaatggcct

SEQ ID NO: 39903 - DNA, 17 bp, Homo sapiens
ttaggaaagcttacctc

SEQ ID NO: 39904 - DNA, 18 bp, Homo sapiens
atgaagtgactttcagaa

SEQ ID NO: 39905 - DNA, 23 bp, Homo sapiens
caatatggggaaaatttatttaa

SEQ ID NO: 39906 - DNA, 22 bp, Homo sapiens
ggtttatgatgataaagactac

SEQ ID NO: 39907 - DNA, 25 bp, Homo sapiens
aaatagacacaattaagattttaag

SEQ ID NO: 39908 - DNA, 20 bp, Homo sapiens
atgtgtgtgtaggccctgaa

SEQ ID NO: 39909 - DNA, 16 bp, Homo sapiens
gctcacgggctgctct

SEQ ID NO: 39910 - DNA, 23 bp, Homo sapiens
atgcaccatagattcgtgctgat

SEQ ID NO: 39911 - DNA, 16 bp, Homo sapiens
ttttgggtggccaaga

SEQ ID NO: 39912 - DNA, 24 bp, Homo sapiens
tagttagcaagtttgtgtatttgt

SEQ ID NO: 39913 - DNA, 16 bp, Homo sapiens
acgagcaggctgccct

SEQ ID NO: 39914 - DNA, 21 bp, Homo sapiens
cattgatttgatagcagagca

SEQ ID NO: 39915 - DNA, 18 bp, Homo sapiens
ctcgggagcaggtagaga

SEQ ID NO: 39916 - DNA, 22 bp, Homo sapiens
gtgcgatggcggcgggggagct

SEQ ID NO: 39917 - DNA, 18 bp, Homo sapiens
gtaggccctgtagtgtgg

SEQ ID NO: 39918 - DNA, 21 bp, Homo sapiens
aactggagcccacagtaaccg

SEQ ID NO: 39919 - DNA, 24 bp, Homo sapiens
gtagtaactgcgtatttttgtttc

SEQ ID NO: 39920 - DNA, 16 bp, Homo sapiens
tcacaggatgctgcgg

SEQ ID NO: 39921 - DNA, 21 bp, Homo sapiens
agatttgaagtagaatatgga

SEQ ID NO: 39922 - DNA, 16 bp, Homo sapiens
atacccttcgcacaga

SEQ ID NO: 39923 - DNA, 18 bp, Homo sapiens
aagaaacaaaaaccggca

SEQ ID NO: 39924 - DNA, 20 bp, Homo sapiens
tgaaagaaacaaacttacaa

SEQ ID NO: 39925 - DNA, 23 bp, Homo sapiens
tttagactacattaaaagcacat

SEQ ID NO: 39926 - DNA, 16 bp, Homo sapiens
aggagggtggtccttt

SEQ ID NO: 39927 - DNA, 18 bp, Homo sapiens
ctaacaatacttcacagg

SEQ ID NO: 39928 - DNA, 21 bp, Homo sapiens
attaattcccgacaatttttg

SEQ ID NO: 39929 - DNA, 17 bp, Homo sapiens
agcagtaagagcttatt

SEQ ID NO: 39930 - DNA, 19 bp, Homo sapiens
ctctcctagatccatagac

SEQ ID NO: 39931 - DNA, 22 bp, Homo sapiens
tgttctgaaaaaagtttgtaaa

SEQ ID NO: 39932 - DNA, 16 bp, Homo sapiens
aactgcgggttacaga

SEQ ID NO: 39933 - DNA, 19 bp, Homo sapiens
catctttaggaggaatcaa

SEQ ID NO: 39934 - DNA, 16 bp, Homo sapiens
gatgcacctccccatt

SEQ ID NO: 39935 - DNA, 21 bp, Homo sapiens
gacaatctcactgttgctgtc

SEQ ID NO: 39936 - DNA, 18 bp, Homo sapiens
caagcaaaaccagaagaa

SEQ ID NO: 39937 - DNA, 16 bp, Homo sapiens
acattggcctgaggtc

SEQ ID NO: 39938 - DNA, 16 bp, Homo sapiens
tgaagctggagggact

SEQ ID NO: 39939 - DNA, 17 bp, Homo sapiens
tcttccacagtagaatt

SEQ ID NO: 39940 - DNA, 16 bp, Homo sapiens
tgtggttgtgtcctat

SEQ ID NO: 39941 - DNA, 19 bp, Homo sapiens
agggtcattttcttgttct

SEQ ID NO: 39942 - DNA, 20 bp, Homo sapiens
tacagaaataatttccccag

SEQ ID NO: 39943 - DNA, 20 bp, Homo sapiens
tgtaaataacctgtgcagtc

SEQ ID NO: 39944 - DNA, 18 bp, Homo sapiens
tgtaccccaaataatgtt

SEQ ID NO: 39945 - DNA, 19 bp, Homo sapiens
cctcaatgatgggtggaca

SEQ ID NO: 39946 - DNA, 21 bp, Homo sapiens
ttaatcactgtgtttaaattt

SEQ ID NO: 39947 - DNA, 22 bp, Homo sapiens
agcgatcttcaggacgctcagc

SEQ ID NO: 39948 - DNA, 16 bp, Homo sapiens
ggaaaaatgtgtccct

SEQ ID NO: 39949 - DNA, 21 bp, Homo sapiens
tgctgatcgagtttccagaac

SEQ ID NO: 39950 - DNA, 18 bp, Homo sapiens
ctgtgctgttgtgtgaaa

SEQ ID NO: 39951 - DNA, 18 bp, Homo sapiens
agagcactgcttccctag

SEQ ID NO: 39952 - DNA, 16 bp, Homo sapiens
agagtgtctgtgaggt

SEQ ID NO: 39953 - DNA, 20 bp, Homo sapiens
ttttagaaactgagatgttt

SEQ ID NO: 39954 - DNA, 18 bp, Homo sapiens
agaaaccttctaccctga

SEQ ID NO: 39955 - DNA, 22 bp, Homo sapiens
catttgcatgttaaaaactttt

SEQ ID NO: 39956 - DNA, 27 bp, Homo sapiens
tattaatttattatctaataatcttaa

SEQ ID NO: 39957 - DNA, 26 bp, Homo sapiens
gataaatataagaaaataaaagatta

SEQ ID NO: 39958 - DNA, 19 bp, Homo sapiens
tcagatgtgcattaaagga

SEQ ID NO: 39959 - DNA, 19 bp, Homo sapiens
cagttttctggatttggaa

SEQ ID NO: 39960 - DNA, 19 bp, Homo sapiens
agtgcattgtatagacagc

SEQ ID NO: 39961 - DNA, 24 bp, Homo sapiens
cttaatattaaatccaacattaat

SEQ ID NO: 39962 - DNA, 17 bp, Homo sapiens
gtggcagtggctgtcat

SEQ ID NO: 39963 - DNA, 23 bp, Homo sapiens
caaaaaagatacacttatttaat

SEQ ID NO: 39964 - DNA, 16 bp, Homo sapiens
tttgcaatactctcgt

SEQ ID NO: 39965 - DNA, 17 bp, Homo sapiens
agaaaacagcaagagta

SEQ ID NO: 39966 - DNA, 18 bp, Homo sapiens
taccaacctaaatacctt

SEQ ID NO: 39967 - DNA, 16 bp, Homo sapiens
tgtcaccactccaaca

SEQ ID NO: 39968 - DNA, 21 bp, Homo sapiens
ttttaatagtttttcagtgtc

SEQ ID NO: 39969 - DNA, 23 bp, Homo sapiens
aataaacatgaagtaatcttaca

SEQ ID NO: 39970 - DNA, 18 bp, Homo sapiens
gcccggagaagagtatgt

SEQ ID NO: 39971 - DNA, 19 bp, Homo sapiens
gcaacaaaatgtgaatgtt

SEQ ID NO: 39972 - DNA, 23 bp, Homo sapiens
ctgatcttcaaggtaaaacaagt

SEQ ID NO: 39973 - DNA, 20 bp, Homo sapiens
atcactagaacactacgcat

SEQ ID NO: 39974 - DNA, 20 bp, Homo sapiens
taggtcgttctgacataaaa

SEQ ID NO: 39975 - DNA, 19 bp, Homo sapiens
attttcctttgtcaccaca

SEQ ID NO: 39976 - DNA, 16 bp, Homo sapiens
tgcatttgaaacgggt

SEQ ID NO: 39977 - DNA, 23 bp, Homo sapiens
taggctcgcaagaccaggtggta

SEQ ID NO: 39978 - DNA, 16 bp, Homo sapiens
gggatggcctcagcta

SEQ ID NO: 39979 - DNA, 22 bp, Homo sapiens
tctgggatatgtcagtaatatt

SEQ ID NO: 39980 - DNA, 23 bp, Homo sapiens
gcacactaaaatcttaaaactct

SEQ ID NO: 39981 - DNA, 21 bp, Homo sapiens
actttggaaaaggagaaagag

SEQ ID NO: 39982 - DNA, 18 bp, Homo sapiens
gttttgaaaaccagtact

SEQ ID NO: 39983 - DNA, 17 bp, Homo sapiens
agacattcctgtggaag

SEQ ID NO: 39984 - DNA, 24 bp, Homo sapiens
ttaatgagaaacttctaagaaaca

SEQ ID NO: 39985 - DNA, 17 bp, Homo sapiens
cccattgttgcaccaaa

SEQ ID NO: 39986 - DNA, 20 bp, Homo sapiens
aaccctcatcttagatgtgt

SEQ ID NO: 39987 - DNA, 20 bp, Homo sapiens
actgtattactctgtattca

SEQ ID NO: 39988 - DNA, 21 bp, Homo sapiens
ctcttaaaaagcctctaagtt

SEQ ID NO: 39989 - DNA, 24 bp, Homo sapiens
aaataaagttttaattccaagttg

SEQ ID NO: 39990 - DNA, 19 bp, Homo sapiens
cagaagtatcctcaacagt

SEQ ID NO: 39991 - DNA, 18 bp, Homo sapiens
aagaggaggaggagaaaa

SEQ ID NO: 39992 - DNA, 22 bp, Homo sapiens
atatcaattattacgctccatg

SEQ ID NO: 39993 - DNA, 20 bp, Homo sapiens
tttaccttccttcaattata

SEQ ID NO: 39994 - DNA, 21 bp, Homo sapiens
catcctatagatgagtttcga

SEQ ID NO: 39995 - DNA, 16 bp, Homo sapiens
tcatgttgccttgagc

SEQ ID NO: 39996 - DNA, 26 bp, Homo sapiens
aacttgatgtttctaaaatagatatt

SEQ ID NO: 39997 - DNA, 16 bp, Homo sapiens
atccaatcatggagcg

SEQ ID NO: 39998 - DNA, 24 bp, Homo sapiens
ttttttaataagaaaacatcttta

SEQ ID NO: 39999 - DNA, 23 bp, Homo sapiens
aaaattatatcttatacctggtc

SEQ ID NO: 40000 - DNA, 17 bp, Homo sapiens
agggtttggatccttcc

SEQ ID NO: 40001 - DNA, 19 bp, Homo sapiens
gactggagaaaagttccct

SEQ ID NO: 40002 - DNA, 24 bp, Homo sapiens
acctatttatacccatccagcagt

SEQ ID NO: 40003 - DNA, 16 bp, Homo sapiens
gacttgcgactacgtc

SEQ ID NO: 40004 - DNA, 27 bp, Homo sapiens
cttttaaaaatattttgtagaacttaa

SEQ ID NO: 40005 - DNA, 17 bp, Homo sapiens
agaacaagttgttggga

SEQ ID NO: 40006 - DNA, 21 bp, Homo sapiens
tattacagtttcagtgctgtt

SEQ ID NO: 40007 - DNA, 26 bp, Homo sapiens
agatttgccttatattattgttttta

SEQ ID NO: 40008 - DNA, 17 bp, Homo sapiens
acaccacttaatgacgt

SEQ ID NO: 40009 - DNA, 24 bp, Homo sapiens
gcactattttataatttcttcaca

SEQ ID NO: 40010 - DNA, 18 bp, Homo sapiens
ggagaatcccctttccca

SEQ ID NO: 40011 - DNA, 16 bp, Homo sapiens
taacagagcaacactt

SEQ ID NO: 40012 - DNA, 17 bp, Homo sapiens
tctcaatgaactgtaga

SEQ ID NO: 40013 - DNA, 16 bp, Homo sapiens
gggctcatcaccacct

SEQ ID NO: 40014 - DNA, 20 bp, Homo sapiens
aggtatacgagaagaaggct

SEQ ID NO: 40015 - DNA, 21 bp, Homo sapiens
cctcagcacaaagcagagata

SEQ ID NO: 40016 - DNA, 20 bp, Homo sapiens
ctcactttagtttcccgttc

SEQ ID NO: 40017 - DNA, 19 bp, Homo sapiens
ctacaatgtatcgtgttca

SEQ ID NO: 40018 - DNA, 18 bp, Homo sapiens
cgctattttggaaggtgg

SEQ ID NO: 40019 - DNA, 19 bp, Homo sapiens
tgtctgtttttcatagcct

SEQ ID NO: 40020 - DNA, 23 bp, Homo sapiens
tgatgatgtagtcattcttatca

SEQ ID NO: 40021 - DNA, 20 bp, Homo sapiens
cagtttaaacccaattacct

SEQ ID NO: 40022 - DNA, 21 bp, Homo sapiens
gaaagggactgtgtttcctca

SEQ ID NO: 40023 - DNA, 19 bp, Homo sapiens
tggaattataagcgtgagt

SEQ ID NO: 40024 - DNA, 23 bp, Homo sapiens
cattagcttcattaatgggtaaa

SEQ ID NO: 40025 - DNA, 16 bp, Homo sapiens
ggaatttggggggttt

SEQ ID NO: 40026 - DNA, 16 bp, Homo sapiens
ttggagagagtggagt

SEQ ID NO: 40027 - DNA, 19 bp, Homo sapiens
aagccagtctgggaagttt

SEQ ID NO: 40028 - DNA, 21 bp, Homo sapiens
catatagtatgtgtcttcaga

SEQ ID NO: 40029 - DNA, 22 bp, Homo sapiens
gcagtttagcaaagtaatgtaa

SEQ ID NO: 40030 - DNA, 20 bp, Homo sapiens
tgcttcacgttttattgaga

SEQ ID NO: 40031 - DNA, 16 bp, Homo sapiens
ttccatcagaactcca

SEQ ID NO: 40032 - DNA, 19 bp, Homo sapiens
gttgttgagagcttagatt

SEQ ID NO: 40033 - DNA, 19 bp, Homo sapiens
aatggagcaaatggagcaa

SEQ ID NO: 40034 - DNA, 21 bp, Homo sapiens
tgggattacaggtgtgaccca

SEQ ID NO: 40035 - DNA, 19 bp, Homo sapiens
agttaaatccatacactct

SEQ ID NO: 40036 - DNA, 19 bp, Homo sapiens
acttcagaatacacagtaa

SEQ ID NO: 40037 - DNA, 19 bp, Homo sapiens
tttccaatagcggaatgtc

SEQ ID NO: 40038 - DNA, 22 bp, Homo sapiens
atgttgttttttattgctccat

SEQ ID NO: 40039 - DNA, 25 bp, Homo sapiens
gtatgtatatatatatgtattcata

SEQ ID NO: 40040 - DNA, 20 bp, Homo sapiens
tccgaaaagtatatagagtg

SEQ ID NO: 40041 - DNA, 18 bp, Homo sapiens
cgttggtttgtgttacaa

SEQ ID NO: 40042 - DNA, 19 bp, Homo sapiens
ttctactcctttgattgtg

SEQ ID NO: 40043 - DNA, 17 bp, Homo sapiens
atgctgttattacatgg

SEQ ID NO: 40044 - DNA, 23 bp, Homo sapiens
gcaactttgcaaagattaatttt

SEQ ID NO: 40045 - DNA, 18 bp, Homo sapiens
atctgagagcttaagcat

SEQ ID NO: 40046 - DNA, 24 bp, Homo sapiens
cattcaaagtgaaggatattaatt

SEQ ID NO: 40047 - DNA, 20 bp, Homo sapiens
tccaaaataatcacaaagga

SEQ ID NO: 40048 - DNA, 23 bp, Homo sapiens
taaataagtgtttaatctttaaa

SEQ ID NO: 40049 - DNA, 25 bp, Homo sapiens
atttcttaatttcaatttcacataa

SEQ ID NO: 40050 - DNA, 17 bp, Homo sapiens
tgcctcgttgtttttta

SEQ ID NO: 40051 - DNA, 22 bp, Homo sapiens
ccaagaaagtttaacagctgtt

SEQ ID NO: 40052 - DNA, 17 bp, Homo sapiens
ttaggtttgtcaattcc

SEQ ID NO: 40053 - DNA, 23 bp, Homo sapiens
atcacaatcaacaattttagtta

SEQ ID NO: 40054 - DNA, 26 bp, Homo sapiens
tgaaattaatattaagtaactataaa

SEQ ID NO: 40055 - DNA, 18 bp, Homo sapiens
tcaaatgcttccaaatca

SEQ ID NO: 40056 - DNA, 18 bp, Homo sapiens
aaagcatttcaccacttt

SEQ ID NO: 40057 - DNA, 26 bp, Homo sapiens
ttcaggaaaatatgttagacttaaaa

SEQ ID NO: 40058 - DNA, 25 bp, Homo sapiens
cttacctttttcagttatattaact

SEQ ID NO: 40059 - DNA, 22 bp, Homo sapiens
gcaatatttatctcttgccatt

SEQ ID NO: 40060 - DNA, 22 bp, Homo sapiens
agcattcaaagtaaaattatat

SEQ ID NO: 40061 - DNA, 26 bp, Homo sapiens
taattagaaatttaaactttttatac

SEQ ID NO: 40062 - DNA, 16 bp, Homo sapiens
aggtgcttcagctctt

SEQ ID NO: 40063 - DNA, 24 bp, Homo sapiens
taatttcttctattttctgtatca

SEQ ID NO: 40064 - DNA, 16 bp, Homo sapiens
ttgagtgtacatgtgg

SEQ ID NO: 40065 - DNA, 16 bp, Homo sapiens
ggcccacgtgctacaa

SEQ ID NO: 40066 - DNA, 21 bp, Homo sapiens
cagcatatttggttttatatc

SEQ ID NO: 40067 - DNA, 18 bp, Homo sapiens
ttgtgagacacatgattt

SEQ ID NO: 40068 - DNA, 20 bp, Homo sapiens
tttaacatgcacttccaacg

SEQ ID NO: 40069 - DNA, 18 bp, Homo sapiens
taagtacctgcatttttt

SEQ ID NO: 40070 - DNA, 22 bp, Homo sapiens
ttcaactaaagtgtagcttgta

SEQ ID NO: 40071 - DNA, 19 bp, Homo sapiens
aattgtggaaaacattgac

SEQ ID NO: 40072 - DNA, 23 bp, Homo sapiens
ttccaactacatataatttcttt

SEQ ID NO: 40073 - DNA, 20 bp, Homo sapiens
cagagagaataattcctgca

SEQ ID NO: 40074 - DNA, 17 bp, Homo sapiens
agtgcctttgtatagcc

SEQ ID NO: 40075 - DNA, 18 bp, Homo sapiens
agtggaacaaatgtagtt

SEQ ID NO: 40076 - DNA, 16 bp, Homo sapiens
tcactcctcccacccc

SEQ ID NO: 40077 - DNA, 19 bp, Homo sapiens
gatccatcttgatggggaa

SEQ ID NO: 40078 - DNA, 21 bp, Homo sapiens
acaggttaataggaattctct

SEQ ID NO: 40079 - DNA, 18 bp, Homo sapiens
tgttgtgtgagtcaagaa

SEQ ID NO: 40080 - DNA, 17 bp, Homo sapiens
atgttatcttcggttgt

SEQ ID NO: 40081 - DNA, 21 bp, Homo sapiens
ctcagactaaggtttttcctc

SEQ ID NO: 40082 - DNA, 18 bp, Homo sapiens
acgaatcttgattgcaac

SEQ ID NO: 40083 - DNA, 27 bp, Homo sapiens
ttatgtaaaatacttctatataaaatg

SEQ ID NO: 40084 - DNA, 19 bp, Homo sapiens
ggccaatcagtgctgataa

SEQ ID NO: 40085 - DNA, 20 bp, Homo sapiens
gggctattttaaaagtcatc

SEQ ID NO: 40086 - DNA, 21 bp, Homo sapiens
gcctacaagtatcactttatc

SEQ ID NO: 40087 - DNA, 18 bp, Homo sapiens
caccttatctttggacca

SEQ ID NO: 40088 - DNA, 16 bp, Homo sapiens
agtggagtgactggag

SEQ ID NO: 40089 - DNA, 18 bp, Homo sapiens
ggtaatcctcatgcagct

SEQ ID NO: 40090 - DNA, 19 bp, Homo sapiens
tgtgccattcattttgtgg

SEQ ID NO: 40091 - DNA, 23 bp, Homo sapiens
aatcttactcttaagtgagacta

SEQ ID NO: 40092 - DNA, 18 bp, Homo sapiens
ctgaatggcaaagataca

SEQ ID NO: 40093 - DNA, 18 bp, Homo sapiens
aatgttcttcacagggct

SEQ ID NO: 40094 - DNA, 19 bp, Homo sapiens
gctacttggaaatacagtt

SEQ ID NO: 40095 - DNA, 17 bp, Homo sapiens
tgtcaatgtagcatcta

SEQ ID NO: 40096 - DNA, 20 bp, Homo sapiens
taaacttagctgatgattgt

SEQ ID NO: 40097 - DNA, 18 bp, Homo sapiens
gcccaactccagtgatga

SEQ ID NO: 40098 - DNA, 20 bp, Homo sapiens
tgttactctgctattatacc

SEQ ID NO: 40099 - DNA, 27 bp, Homo sapiens
tttaataattaacaagtgatttttaaa

SEQ ID NO: 40100 - DNA, 21 bp, Homo sapiens
tgggaaattaaagttctacgt

SEQ ID NO: 40101 - DNA, 24 bp, Homo sapiens
ggtatctgatttacttcctaaata

SEQ ID NO: 40102 - DNA, 19 bp, Homo sapiens
acctaaagtggaacgacag

SEQ ID NO: 40103 - DNA, 24 bp, Homo sapiens
aaaaaattattcagtttctttaat

SEQ ID NO: 40104 - DNA, 16 bp, Homo sapiens
ttccagatactccaga

SEQ ID NO: 40105 - DNA, 17 bp, Homo sapiens
cgagctccatactctct

SEQ ID NO: 40106 - DNA, 19 bp, Homo sapiens
tgaaaaatcattacttatt

SEQ ID NO: 40107 - DNA, 16 bp, Homo sapiens
aactgaacccctgtcg

SEQ ID NO: 40108 - DNA, 25 bp, Homo sapiens
aatcttgattattgattttttgatc

SEQ ID NO: 40109 - DNA, 20 bp, Homo sapiens
gcagacaaattcaagatctc

SEQ ID NO: 40110 - DNA, 18 bp, Homo sapiens
tttgcttccttctgatct

SEQ ID NO: 40111 - DNA, 20 bp, Homo sapiens
atgattttggaagttctaca

SEQ ID NO: 40112 - DNA, 24 bp, Homo sapiens
aaaagtaatagcataacacatgaa

SEQ ID NO: 40113 - DNA, 20 bp, Homo sapiens
accagtattaaaattccagc

SEQ ID NO: 40114 - DNA, 21 bp, Homo sapiens
acaagtgacacttgacttact

SEQ ID NO: 40115 - DNA, 24 bp, Homo sapiens
ttatttgctaattaaaattcaatt

SEQ ID NO: 40116 - DNA, 24 bp, Homo sapiens
tttagtgtgaatttacttgtagaa

SEQ ID NO: 40117 - DNA, 18 bp, Homo sapiens
ttccattgtattttgtgt

SEQ ID NO: 40118 - DNA, 18 bp, Homo sapiens
atcaccatgtgaaagagc

SEQ ID NO: 40119 - DNA, 22 bp, Homo sapiens
tgttttttcagtcttaaaatgc

SEQ ID NO: 40120 - DNA, 18 bp, Homo sapiens
aggccgtggtactgatta

SEQ ID NO: 40121 - DNA, 22 bp, Homo sapiens
tgctggacacagaacacaagca

SEQ ID NO: 40122 - DNA, 20 bp, Homo sapiens
tgatttgaagtgtgtaacta

SEQ ID NO: 40123 - DNA, 23 bp, Homo sapiens
gaactgagggtcgtttctgcaat

SEQ ID NO: 40124 - DNA, 16 bp, Homo sapiens
gtgtctgtgtgtgtgt

SEQ ID NO: 40125 - DNA, 19 bp, Homo sapiens
tcaatgcaaacttcataat

SEQ ID NO: 40126 - DNA, 19 bp, Homo sapiens
actgaaaatggttgacttt

SEQ ID NO: 40127 - DNA, 23 bp, Homo sapiens
caagaacagttccacacttgcaa

SEQ ID NO: 40128 - DNA, 20 bp, Homo sapiens
gcaggatcatctctttgaaa

SEQ ID NO: 40129 - DNA, 23 bp, Homo sapiens
tattcttctatatctaatgaatc

SEQ ID NO: 40130 - DNA, 20 bp, Homo sapiens
aaatgaattttaaccaacaa

SEQ ID NO: 40131 - DNA, 22 bp, Homo sapiens
ggtggacaataaaagaatgagg

SEQ ID NO: 40132 - DNA, 20 bp, Homo sapiens
tcgtcatcaaaatggaaata

SEQ ID NO: 40133 - DNA, 17 bp, Homo sapiens
ctgcattgcacagatga

SEQ ID NO: 40134 - DNA, 20 bp, Homo sapiens
accctttttctggctattta

SEQ ID NO: 40135 - DNA, 16 bp, Homo sapiens
aggtgagccttcagaa

SEQ ID NO: 40136 - DNA, 19 bp, Homo sapiens
ggaaatttgaagcagtcct

SEQ ID NO: 40137 - DNA, 21 bp, Homo sapiens
aagtctctaaatgtacagtgt

SEQ ID NO: 40138 - DNA, 22 bp, Homo sapiens
catacgtaaatatccatcatct

SEQ ID NO: 40139 - DNA, 19 bp, Homo sapiens
ctgctccgggacgccgcca

SEQ ID NO: 40140 - DNA, 24 bp, Homo sapiens
gttactacaagcggtcctcccggc

SEQ ID NO: 40141 - DNA, 23 bp, Homo sapiens
gagactgcactggctgcgacctc

SEQ ID NO: 40142 - DNA, 21 bp, Homo sapiens
agtcgtcactcttaagaaggg

SEQ ID NO: 40143 - DNA, 24 bp, Homo sapiens
ttgatgctgtcccgaggctgcgga

SEQ ID NO: 40144 - DNA, 18 bp, Homo sapiens
gatgagcagcggcggcag

SEQ ID NO: 40145 - DNA, 19 bp, Homo sapiens
ggaaaagacgtagaaaaac

SEQ ID NO: 40146 - DNA, 20 bp, Homo sapiens
taaccaggtaagtttcctgt

SEQ ID NO: 40147 - DNA, 16 bp, Homo sapiens
agccacagctttatca

SEQ ID NO: 40148 - DNA, 19 bp, Homo sapiens
tgtgtggattaagatgact

SEQ ID NO: 40149 - DNA, 23 bp, Homo sapiens
ttccaaatgaataacgagaaaat

SEQ ID NO: 40150 - DNA, 19 bp, Homo sapiens
ctgaacatgagttgttttt

SEQ ID NO: 40151 - DNA, 20 bp, Homo sapiens
tcttcaaaatgaaaactgaa

SEQ ID NO: 40152 - DNA, 18 bp, Homo sapiens
acagcactgataaaagca

SEQ ID NO: 40153 - DNA, 21 bp, Homo sapiens
ggctatcaacttctaaaggag

SEQ ID NO: 40154 - DNA, 20 bp, Homo sapiens
gtttttatagtgcagggggt

SEQ ID NO: 40155 - DNA, 20 bp, Homo sapiens
ggttttcttttaggtgtggt

SEQ ID NO: 40156 - DNA, 20 bp, Homo sapiens
tgagactagcttatagtagt

SEQ ID NO: 40157 - DNA, 16 bp, Homo sapiens
cctgttgtaaggaagc

SEQ ID NO: 40158 - DNA, 25 bp, Homo sapiens
taacatgtacatttttattcctatt

SEQ ID NO: 40159 - DNA, 26 bp, Homo sapiens
aaagacattttacactattaaataag

SEQ ID NO: 40160 - DNA, 20 bp, Homo sapiens
cttcgggtaaaccaaaaacc

SEQ ID NO: 40161 - DNA, 22 bp, Homo sapiens
aagttgtataagtatatgtcaa

SEQ ID NO: 40162 - DNA, 17 bp, Homo sapiens
agaatactgcagcttcc

SEQ ID NO: 40163 - DNA, 22 bp, Homo sapiens
ttcagatttatgtatttagacc

SEQ ID NO: 40164 - DNA, 19 bp, Homo sapiens
gctgggtaaatgcaaccgt

SEQ ID NO: 40165 - DNA, 17 bp, Homo sapiens
tatccttcacctcccca

SEQ ID NO: 40166 - DNA, 20 bp, Homo sapiens
tttccatatccagtgtaaac

SEQ ID NO: 40167 - DNA, 23 bp, Homo sapiens
tcaaaagaaatgtgtgcatgtat

SEQ ID NO: 40168 - DNA, 21 bp, Homo sapiens
tctatattattagctacttca

SEQ ID NO: 40169 - DNA, 21 bp, Homo sapiens
tctgccatttggtcagaagac

SEQ ID NO: 40170 - DNA, 22 bp, Homo sapiens
ctgcttccagaaattgaatttt

SEQ ID NO: 40171 - DNA, 16 bp, Homo sapiens
aaacctgtgttgtggt

SEQ ID NO: 40172 - DNA, 16 bp, Homo sapiens
cctcggtggatcaaac

SEQ ID NO: 40173 - DNA, 17 bp, Homo sapiens
ccgatctactttcccca

SEQ ID NO: 40174 - DNA, 22 bp, Homo sapiens
taaaaagaaaaaatatgcaggt

SEQ ID NO: 40175 - DNA, 20 bp, Homo sapiens
aggtaaggatacaaaaaaaa

SEQ ID NO: 40176 - DNA, 16 bp, Homo sapiens
aggagacctggagttc

SEQ ID NO: 40177 - DNA, 22 bp, Homo sapiens
taaacagtatacacagttgtca

SEQ ID NO: 40178 - DNA, 17 bp, Homo sapiens
gtggagggagaaaagag

SEQ ID NO: 40179 - DNA, 24 bp, Homo sapiens
tcacacccttataacaaaaacctg

SEQ ID NO: 40180 - DNA, 22 bp, Homo sapiens
tttctggaaaactttcatagaa

SEQ ID NO: 40181 - DNA, 21 bp, Homo sapiens
ttcaacagatgaaagtgagaa

SEQ ID NO: 40182 - DNA, 17 bp, Homo sapiens
tgggagagctacaaatt

SEQ ID NO: 40183 - DNA, 16 bp, Homo sapiens
tctgctccatggaact

SEQ ID NO: 40184 - DNA, 24 bp, Homo sapiens
taactattttgcatcattatctta

SEQ ID NO: 40185 - DNA, 18 bp, Homo sapiens
tgagtctgtttgacttca

SEQ ID NO: 40186 - DNA, 16 bp, Homo sapiens
gtggcggtggcggtgg

SEQ ID NO: 40187 - DNA, 24 bp, Homo sapiens
atgtataaaacaaatattctgggt

SEQ ID NO: 40188 - DNA, 21 bp, Homo sapiens
ctcttttttacttactggtgg

SEQ ID NO: 40189 - DNA, 26 bp, Homo sapiens
ttattcctatcatattgaaattggta

SEQ ID NO: 40190 - DNA, 18 bp, Homo sapiens
acaatcctctattctgct

SEQ ID NO: 40191 - DNA, 19 bp, Homo sapiens
ctaaaattcaatggcccac

SEQ ID NO: 40192 - DNA, 21 bp, Homo sapiens
tagttcaaatttctacccatt

SEQ ID NO: 40193 - DNA, 18 bp, Homo sapiens
tggctgcctccatttcct

SEQ ID NO: 40194 - DNA, 18 bp, Homo sapiens
caagagaatctggacata

SEQ ID NO: 40195 - DNA, 22 bp, Homo sapiens
agtaggagattatataagcaaa

SEQ ID NO: 40196 - DNA, 20 bp, Homo sapiens
tagccagtatgatagccact

SEQ ID NO: 40197 - DNA, 19 bp, Homo sapiens
tctccagactttacttttt

SEQ ID NO: 40198 - DNA, 20 bp, Homo sapiens
caaagtcacataactacaaa

SEQ ID NO: 40199 - DNA, 16 bp, Homo sapiens
tcccccaccacctccc

SEQ ID NO: 40200 - DNA, 26 bp, Homo sapiens
ttatttttattttttagtaatataaa

SEQ ID NO: 40201 - DNA, 18 bp, Homo sapiens
atttcatggtacatgagt

SEQ ID NO: 40202 - DNA, 16 bp, Homo sapiens
acttagggacaatgca

SEQ ID NO: 40203 - DNA, 23 bp, Homo sapiens
tatatggatgttaaaaagcattt

SEQ ID NO: 40204 - DNA, 18 bp, Homo sapiens
aggcatgagccactgcaa

SEQ ID NO: 40205 - DNA, 25 bp, Homo sapiens
aaaggaagttaaaaaaaatagctat

SEQ ID NO: 40206 - DNA, 24 bp, Homo sapiens
tttaaagtacattaaaagactatc

SEQ ID NO: 40207 - DNA, 16 bp, Homo sapiens
ggaatgtgagcacctt

SEQ ID NO: 40208 - DNA, 22 bp, Homo sapiens
aaaataagtaaaatgtcttgtg

SEQ ID NO: 40209 - DNA, 22 bp, Homo sapiens
ataaagttttacaaaagtaaga

SEQ ID NO: 40210 - DNA, 25 bp, Homo sapiens
atatatagctatctatgtctatata

SEQ ID NO: 40211 - DNA, 19 bp, Homo sapiens
acctttcaactttttaaca

SEQ ID NO: 40212 - DNA, 22 bp, Homo sapiens
tcagacaaaatcaaaaagaagg

SEQ ID NO: 40213 - DNA, 23 bp, Homo sapiens
cttttatctaatagttttggcat

SEQ ID NO: 40214 - DNA, 20 bp, Homo sapiens
gccagcattatgaaagtgaa

SEQ ID NO: 40215 - DNA, 19 bp, Homo sapiens
tgtttcttccacataacca

SEQ ID NO: 40216 - DNA, 20 bp, Homo sapiens
tgaacatttaaaaagttcag

SEQ ID NO: 40217 - DNA, 18 bp, Homo sapiens
tgctggtctgcctactag

SEQ ID NO: 40218 - DNA, 21 bp, Homo sapiens
aagaattttgatgccaaaact

SEQ ID NO: 40219 - DNA, 17 bp, Homo sapiens
gtcagagtgtacagtgc

SEQ ID NO: 40220 - DNA, 20 bp, Homo sapiens
tcatacttaactggttggtt

SEQ ID NO: 40221 - DNA, 17 bp, Homo sapiens
cagttaaaccatgtcct

SEQ ID NO: 40222 - DNA, 22 bp, Homo sapiens
atatgatgccattttatatcac

SEQ ID NO: 40223 - DNA, 16 bp, Homo sapiens
gctgctctatgccagc

SEQ ID NO: 40224 - DNA, 19 bp, Homo sapiens
gggataacctaggcatact

SEQ ID NO: 40225 - DNA, 20 bp, Homo sapiens
cagttatcttctataacgct

SEQ ID NO: 40226 - DNA, 16 bp, Homo sapiens
aactggtgtccacaga

SEQ ID NO: 40227 - DNA, 19 bp, Homo sapiens
cccattccacttccttttt

SEQ ID NO: 40228 - DNA, 17 bp, Homo sapiens
tttgcaggaaatgctgg

SEQ ID NO: 40229 - DNA, 20 bp, Homo sapiens
gagtccagtaaaatatttca

SEQ ID NO: 40230 - DNA, 19 bp, Homo sapiens
tcagacagatctggaatgt

SEQ ID NO: 40231 - DNA, 16 bp, Homo sapiens
accgtgctggcctccc

SEQ ID NO: 40232 - DNA, 17 bp, Homo sapiens
tcaagtgttgggaaaga

SEQ ID NO: 40233 - DNA, 24 bp, Homo sapiens
ttaccaataattatccaatatcat

SEQ ID NO: 40234 - DNA, 21 bp, Homo sapiens
tatgtaataaccaaatgcaat

SEQ ID NO: 40235 - DNA, 23 bp, Homo sapiens
cttaagtatgcaaattaagacag

SEQ ID NO: 40236 - DNA, 24 bp, Homo sapiens
tcgcgggcggcgcgcttaggcacg

SEQ ID NO: 40237 - DNA, 17 bp, Homo sapiens
cccggcgggagaggcgc

SEQ ID NO: 40238 - DNA, 24 bp, Homo sapiens
ctgcaaggacctgagctcagcttc

SEQ ID NO: 40239 - DNA, 23 bp, Homo sapiens
cagagcccaagtccggctgggtg

SEQ ID NO: 40240 - DNA, 23 bp, Homo sapiens
ctccaggccagcgtgggccgctc

SEQ ID NO: 40241 - DNA, 24 bp, Homo sapiens
tccacttgcttcctagcctggcac

SEQ ID NO: 40242 - DNA, 22 bp, Homo sapiens
tagccctgcggccgtgtgcccg

SEQ ID NO: 40243 - DNA, 24 bp, Homo sapiens
tcacagaatcaactggggctccgg

SEQ ID NO: 40244 - DNA, 16 bp, Homo sapiens
gcctcgctgggcaccc

SEQ ID NO: 40245 - DNA, 20 bp, Homo sapiens
actaaactttcttgtatctg

SEQ ID NO: 40246 - DNA, 16 bp, Homo sapiens
tacgatccagtggccc

SEQ ID NO: 40247 - DNA, 20 bp, Homo sapiens
ttcatggagctgatttacta

SEQ ID NO: 40248 - DNA, 16 bp, Homo sapiens
gagttggcacagacca

SEQ ID NO: 40249 - DNA, 16 bp, Homo sapiens
aggcataagctgtgga

SEQ ID NO: 40250 - DNA, 24 bp, Homo sapiens
aaaaggaattgctttctaatattt

SEQ ID NO: 40251 - DNA, 18 bp, Homo sapiens
tcaaaagcttaattccag

SEQ ID NO: 40252 - DNA, 18 bp, Homo sapiens
tacaagcagatgaaagca

SEQ ID NO: 40253 - DNA, 24 bp, Homo sapiens
aaaattggcaacttgtaagttgag

SEQ ID NO: 40254 - DNA, 19 bp, Homo sapiens
tctttctctgggcaatagt

SEQ ID NO: 40255 - DNA, 19 bp, Homo sapiens
aaaaagtgctatattttgg

SEQ ID NO: 40256 - DNA, 18 bp, Homo sapiens
agaacactctgagtcagt

SEQ ID NO: 40257 - DNA, 24 bp, Homo sapiens
tcgtgtcaatctaatctaatctaa

SEQ ID NO: 40258 - DNA, 20 bp, Homo sapiens
cgatgagaactagaattcaa

SEQ ID NO: 40259 - DNA, 18 bp, Homo sapiens
cacatatcaagaggaaaa

SEQ ID NO: 40260 - DNA, 19 bp, Homo sapiens
catagtgcttgacacatag

SEQ ID NO: 40261 - DNA, 18 bp, Homo sapiens
aactggtaacctgcaaac

SEQ ID NO: 40262 - DNA, 24 bp, Homo sapiens
aacatgtgtatttgaaatattgtc

SEQ ID NO: 40263 - DNA, 18 bp, Homo sapiens
caccctgatactcttcca

SEQ ID NO: 40264 - DNA, 19 bp, Homo sapiens
tgtgtagtttttaatgaca

SEQ ID NO: 40265 - DNA, 18 bp, Homo sapiens
ctgtgcctcatcaaagtc

SEQ ID NO: 40266 - DNA, 19 bp, Homo sapiens
catttctggaattatccca

SEQ ID NO: 40267 - DNA, 19 bp, Homo sapiens
gccagtcctacataatata

SEQ ID NO: 40268 - DNA, 16 bp, Homo sapiens
gacggtggcatcattg

SEQ ID NO: 40269 - DNA, 22 bp, Homo sapiens
tggatgttaatagtgatacgta

SEQ ID NO: 40270 - DNA, 16 bp, Homo sapiens
ggcaatttcttgggcc

SEQ ID NO: 40271 - DNA, 24 bp, Homo sapiens
ttagttttgaagaaatctcttaaa

SEQ ID NO: 40272 - DNA, 27 bp, Homo sapiens
taccagctaataatagtttattttacc

SEQ ID NO: 40273 - DNA, 20 bp, Homo sapiens
gaatgcatgattattgccaa

SEQ ID NO: 40274 - DNA, 19 bp, Homo sapiens
atacccatcccaaatgtaa

SEQ ID NO: 40275 - DNA, 16 bp, Homo sapiens
aacaattacgggccca

SEQ ID NO: 40276 - DNA, 16 bp, Homo sapiens
tcagcaaagaacctgt

SEQ ID NO: 40277 - DNA, 16 bp, Homo sapiens
cttgtcgaggtaagta

SEQ ID NO: 40278 - DNA, 19 bp, Homo sapiens
gcaagttttttgtgaatgt

SEQ ID NO: 40279 - DNA, 20 bp, Homo sapiens
ttagaagacataattgcctg

SEQ ID NO: 40280 - DNA, 20 bp, Homo sapiens
tttccctctgcgtagcacat

SEQ ID NO: 40281 - DNA, 18 bp, Homo sapiens
agagtaaaaagcaccact

SEQ ID NO: 40282 - DNA, 20 bp, Homo sapiens
ttgattcgggaggagcatac

SEQ ID NO: 40283 - DNA, 24 bp, Homo sapiens
attttgtgttaaattctgttttac

SEQ ID NO: 40284 - DNA, 21 bp, Homo sapiens
ttggccgtacattctataatc

SEQ ID NO: 40285 - DNA, 19 bp, Homo sapiens
cctgcacaatgtgcacatg

SEQ ID NO: 40286 - DNA, 16 bp, Homo sapiens
taggctcctcctgcgg

SEQ ID NO: 40287 - DNA, 19 bp, Homo sapiens
ccagtaatatcccctggtc

SEQ ID NO: 40288 - DNA, 17 bp, Homo sapiens
tgccaagaaaatggtac

SEQ ID NO: 40289 - DNA, 16 bp, Homo sapiens
aagtcactgcatgagc

SEQ ID NO: 40290 - DNA, 21 bp, Homo sapiens
gtgtattttatgttctgcata

SEQ ID NO: 40291 - DNA, 16 bp, Homo sapiens
tgggctcctgcaccgc

SEQ ID NO: 40292 - DNA, 22 bp, Homo sapiens
atgttatgcatattttatcaca

SEQ ID NO: 40293 - DNA, 17 bp, Homo sapiens
cattgtacgcaagcagg

SEQ ID NO: 40294 - DNA, 18 bp, Homo sapiens
gaacatactaaacgtcac

SEQ ID NO: 40295 - DNA, 21 bp, Homo sapiens
ctccaggtttcctaggtgcat

SEQ ID NO: 40296 - DNA, 16 bp, Homo sapiens
gaagatcagcacctcc

SEQ ID NO: 40297 - DNA, 17 bp, Homo sapiens
tatagtcaggtgaggag

SEQ ID NO: 40298 - DNA, 20 bp, Homo sapiens
aacaaacaaacaaaatgaca

SEQ ID NO: 40299 - DNA, 21 bp, Homo sapiens
ccgatttcactgatgattttt

SEQ ID NO: 40300 - DNA, 19 bp, Homo sapiens
aaactgtggtgtggtctgg

SEQ ID NO: 40301 - DNA, 18 bp, Homo sapiens
tctgctgaggatcttgga

SEQ ID NO: 40302 - DNA, 16 bp, Homo sapiens
tgatcatccaaagccc

SEQ ID NO: 40303 - DNA, 20 bp, Homo sapiens
tttagaagtaaaagtgctgt

SEQ ID NO: 40304 - DNA, 20 bp, Homo sapiens
cgtactcacatccaatttct

SEQ ID NO: 40305 - DNA, 22 bp, Homo sapiens
attattttccttttccctgttc

SEQ ID NO: 40306 - DNA, 17 bp, Homo sapiens
caaggtgcagtgagtca

SEQ ID NO: 40307 - DNA, 17 bp, Homo sapiens
tggagtaagtgaccact

SEQ ID NO: 40308 - DNA, 16 bp, Homo sapiens
tcaatggtgacctgca

SEQ ID NO: 40309 - DNA, 20 bp, Homo sapiens
ggttgtgaggaatctaaatt

SEQ ID NO: 40310 - DNA, 18 bp, Homo sapiens
ctcttaaggttagcacca

SEQ ID NO: 40311 - DNA, 19 bp, Homo sapiens
attttcctgaaatgcattt

SEQ ID NO: 40312 - DNA, 17 bp, Homo sapiens
gctggtcataaagctca

SEQ ID NO: 40313 - DNA, 20 bp, Homo sapiens
acatgatctatatttctgca

SEQ ID NO: 40314 - DNA, 22 bp, Homo sapiens
ctaggcatgaacatatcttaac

SEQ ID NO: 40315 - DNA, 21 bp, Homo sapiens
tgctgatgaattgtatggaat

SEQ ID NO: 40316 - DNA, 20 bp, Homo sapiens
tccacagtatggaaaggtat

SEQ ID NO: 40317 - DNA, 18 bp, Homo sapiens
ctcagtgaatctgcttcc

SEQ ID NO: 40318 - DNA, 19 bp, Homo sapiens
tgtgaaattttgtgaaagt

SEQ ID NO: 40319 - DNA, 22 bp, Homo sapiens
ttcgtattttcaattcttcacc

SEQ ID NO: 40320 - DNA, 22 bp, Homo sapiens
tttaatacaaaaattcttttgc

SEQ ID NO: 40321 - DNA, 20 bp, Homo sapiens
cccatgtcaagtgtatcaaa

SEQ ID NO: 40322 - DNA, 20 bp, Homo sapiens
attgctagaatcgtggatgg

SEQ ID NO: 40323 - DNA, 22 bp, Homo sapiens
ttataaagcagttccttttaaa

SEQ ID NO: 40324 - DNA, 22 bp, Homo sapiens
agaagattgtgacatgagctgt

SEQ ID NO: 40325 - DNA, 18 bp, Homo sapiens
cagaaaagagaactccgt

SEQ ID NO: 40326 - DNA, 20 bp, Homo sapiens
tctgatattaaagaatgtgt

SEQ ID NO: 40327 - DNA, 21 bp, Homo sapiens
acgttatgttaaattaaaaca

SEQ ID NO: 40328 - DNA, 19 bp, Homo sapiens
cacaagacataaatcttct

SEQ ID NO: 40329 - DNA, 19 bp, Homo sapiens
tgaggcatctagttaagca

SEQ ID NO: 40330 - DNA, 24 bp, Homo sapiens
tacccagtaggtatcgttggaaac

SEQ ID NO: 40331 - DNA, 19 bp, Homo sapiens
gagtgagaccatgtttctt

SEQ ID NO: 40332 - DNA, 17 bp, Homo sapiens
aacagcagaggaatatt

SEQ ID NO: 40333 - DNA, 16 bp, Homo sapiens
tttcttgtctttggct

SEQ ID NO: 40334 - DNA, 19 bp, Homo sapiens
cagctctggaatcaataca

SEQ ID NO: 40335 - DNA, 20 bp, Homo sapiens
gagttaattcccttttaaaa

SEQ ID NO: 40336 - DNA, 20 bp, Homo sapiens
gaacttcctgctctgatgaa

SEQ ID NO: 40337 - DNA, 23 bp, Homo sapiens
ttgtccagttatgctgccaaaga

SEQ ID NO: 40338 - DNA, 20 bp, Homo sapiens
atgcatgaagaaaagtgcta

SEQ ID NO: 40339 - DNA, 18 bp, Homo sapiens
atccttttaaagcaaact

SEQ ID NO: 40340 - DNA, 18 bp, Homo sapiens
cttggcaattccttcagc

SEQ ID NO: 40341 - DNA, 24 bp, Homo sapiens
cgagaggcatttagtaagatgagt

SEQ ID NO: 40342 - DNA, 18 bp, Homo sapiens
cccaatgatgagggttat

SEQ ID NO: 40343 - DNA, 21 bp, Homo sapiens
ttccgcatattaatcccatca

SEQ ID NO: 40344 - DNA, 18 bp, Homo sapiens
tcatgacacctacctata

SEQ ID NO: 40345 - DNA, 18 bp, Homo sapiens
tggtagagagtatgaagc

SEQ ID NO: 40346 - DNA, 20 bp, Homo sapiens
aaataaactgaccatgtatt

SEQ ID NO: 40347 - DNA, 19 bp, Homo sapiens
tggcctgtgcccaagtgcc

SEQ ID NO: 40348 - DNA, 24 bp, Homo sapiens
ccaaatgatacaaattacggtata

SEQ ID NO: 40349 - DNA, 17 bp, Homo sapiens
actatgggatgtgtggc

SEQ ID NO: 40350 - DNA, 17 bp, Homo sapiens
acgagcatttggccaaa

SEQ ID NO: 40351 - DNA, 24 bp, Homo sapiens
agctctacagatgattgtaatgtg

SEQ ID NO: 40352 - DNA, 17 bp, Homo sapiens
ggctctttggtcctttg

SEQ ID NO: 40353 - DNA, 22 bp, Homo sapiens
tgggcctctgaaaatctatgtt

SEQ ID NO: 40354 - DNA, 18 bp, Homo sapiens
tggtgagaggcaaaacca

SEQ ID NO: 40355 - DNA, 20 bp, Homo sapiens
caagatttctctacatttgg

SEQ ID NO: 40356 - DNA, 16 bp, Homo sapiens
catgaacaccaagggc

SEQ ID NO: 40357 - DNA, 19 bp, Homo sapiens
cagccaatgtgttggccac

SEQ ID NO: 40358 - DNA, 23 bp, Homo sapiens
gtgatttgctggaacaacttcca

SEQ ID NO: 40359 - DNA, 22 bp, Homo sapiens
cttaatgatgggctcttttaaa

SEQ ID NO: 40360 - DNA, 19 bp, Homo sapiens
agatgtaacattattattc

SEQ ID NO: 40361 - DNA, 16 bp, Homo sapiens
gttctggcccccacct

SEQ ID NO: 40362 - DNA, 24 bp, Homo sapiens
gatctaaacagggccagttgttca

SEQ ID NO: 40363 - DNA, 16 bp, Homo sapiens
agagctctgtaaagct

SEQ ID NO: 40364 - DNA, 20 bp, Homo sapiens
ctccagtgctgatgaagcgg

SEQ ID NO: 40365 - DNA, 22 bp, Homo sapiens
aaaattaagtgtgtccaaatgt

SEQ ID NO: 40366 - DNA, 20 bp, Homo sapiens
ttactattccagcgcaaggt

SEQ ID NO: 40367 - DNA, 20 bp, Homo sapiens
cttgaacgtagtttctgttg

SEQ ID NO: 40368 - DNA, 16 bp, Homo sapiens
actgagacccaagacc

SEQ ID NO: 40369 - DNA, 19 bp, Homo sapiens
acctgaaggaaaacttcct

SEQ ID NO: 40370 - DNA, 21 bp, Homo sapiens
ttattccagttacatcctgaa

SEQ ID NO: 40371 - DNA, 20 bp, Homo sapiens
tggtggtaaattcataactc

SEQ ID NO: 40372 - DNA, 18 bp, Homo sapiens
aaggctactacatgtgtt

SEQ ID NO: 40373 - DNA, 22 bp, Homo sapiens
ttgatccagcagacaccagact

SEQ ID NO: 40374 - DNA, 18 bp, Homo sapiens
caatgcacagtgttaaaa

SEQ ID NO: 40375 - DNA, 18 bp, Homo sapiens
agagaagactgacttcgg

SEQ ID NO: 40376 - DNA, 24 bp, Homo sapiens
acatttcccaggattccaagggag

SEQ ID NO: 40377 - DNA, 18 bp, Homo sapiens
ctgcccccgcgccggtga

SEQ ID NO: 40378 - DNA, 24 bp, Homo sapiens
aagtcactgaccctcgtcccgccc

SEQ ID NO: 40379 - DNA, 23 bp, Homo sapiens
aaaagagcagccagctgcgcctc

SEQ ID NO: 40380 - DNA, 24 bp, Homo sapiens
gcgtccagcggctctgcttgttcg

SEQ ID NO: 40381 - DNA, 19 bp, Homo sapiens
ctccccaccacctcagcgg

SEQ ID NO: 40382 - DNA, 23 bp, Homo sapiens
gttcgacgggcgggtggtactgg

SEQ ID NO: 40383 - DNA, 23 bp, Homo sapiens
tgagagaccaggtgtttccggct

SEQ ID NO: 40384 - DNA, 23 bp, Homo sapiens
gttggaggccgcgccccttgctg

SEQ ID NO: 40385 - DNA, 21 bp, Homo sapiens
caggaccttgggaagcccaca

SEQ ID NO: 40386 - DNA, 16 bp, Homo sapiens
ctgaggtcaccccgct

SEQ ID NO: 40387 - DNA, 19 bp, Homo sapiens
tcagggagaactttcaccc

SEQ ID NO: 40388 - DNA, 22 bp, Homo sapiens
ccgcatctcttgaggaggaaag

SEQ ID NO: 40389 - DNA, 21 bp, Homo sapiens
gcaaagatctaagagagttaa

SEQ ID NO: 40390 - DNA, 23 bp, Homo sapiens
gtggataggttgagaatgtcagt

SEQ ID NO: 40391 - DNA, 17 bp, Homo sapiens
accaacttaccaacaac

SEQ ID NO: 40392 - DNA, 20 bp, Homo sapiens
tttctttaaatggggattga

SEQ ID NO: 40393 - DNA, 19 bp, Homo sapiens
aaagacaaagatagcttgt

SEQ ID NO: 40394 - DNA, 21 bp, Homo sapiens
ttcaactttctgattattttg

SEQ ID NO: 40395 - DNA, 20 bp, Homo sapiens
ttctggcaaaagtaaaaatt

SEQ ID NO: 40396 - DNA, 24 bp, Homo sapiens
tggcttttgcagaaagaggagcgt

SEQ ID NO: 40397 - DNA, 19 bp, Homo sapiens
atccaattccactttcaac

SEQ ID NO: 40398 - DNA, 19 bp, Homo sapiens
aatctgcattgtgaaatga

SEQ ID NO: 40399 - DNA, 24 bp, Homo sapiens
aaaaaaatcttgtttaaaaaaaat

SEQ ID NO: 40400 - DNA, 24 bp, Homo sapiens
gatacatagataaatgccaaataa

SEQ ID NO: 40401 - DNA, 26 bp, Homo sapiens
tataccattatgctatttattaatta

SEQ ID NO: 40402 - DNA, 23 bp, Homo sapiens
atttacacaataatttatgaaaa

SEQ ID NO: 40403 - DNA, 17 bp, Homo sapiens
ccctatggagaagatca

SEQ ID NO: 40404 - DNA, 23 bp, Homo sapiens
ttttagcataaagtgtatatcca

SEQ ID NO: 40405 - DNA, 17 bp, Homo sapiens
atgttttgaaaatggct

SEQ ID NO: 40406 - DNA, 18 bp, Homo sapiens
gcctttaccaactccttt

SEQ ID NO: 40407 - DNA, 16 bp, Homo sapiens
tgggcagatgactgaa

SEQ ID NO: 40408 - DNA, 16 bp, Homo sapiens
ctgcttttccacctct

SEQ ID NO: 40409 - DNA, 19 bp, Homo sapiens
cacacattttgaaagtcta

SEQ ID NO: 40410 - DNA, 21 bp, Homo sapiens
gtgacaaatagcattagttga

SEQ ID NO: 40411 - DNA, 18 bp, Homo sapiens
gatttgggaggggacttc

SEQ ID NO: 40412 - DNA, 23 bp, Homo sapiens
ggcagacttagaaaatcataatt

SEQ ID NO: 40413 - DNA, 19 bp, Homo sapiens
tgttgaagaaataagaagg

SEQ ID NO: 40414 - DNA, 22 bp, Homo sapiens
catcaaaagttttaacaattct

SEQ ID NO: 40415 - DNA, 17 bp, Homo sapiens
cacaaccttctctcctt

SEQ ID NO: 40416 - DNA, 20 bp, Homo sapiens
attgtagatatggatatgtt

SEQ ID NO: 40417 - DNA, 18 bp, Homo sapiens
cacaagagccataacaca

SEQ ID NO: 40418 - DNA, 17 bp, Homo sapiens
acccacagaatttagaa

SEQ ID NO: 40419 - DNA, 21 bp, Homo sapiens
ctgtttagtaaatgaaagtca

SEQ ID NO: 40420 - DNA, 16 bp, Homo sapiens
ccctcagattcagtgg

SEQ ID NO: 40421 - DNA, 23 bp, Homo sapiens
gaaataagtacaataattaactt

SEQ ID NO: 40422 - DNA, 22 bp, Homo sapiens
ttttgatataggtatagacttt

SEQ ID NO: 40423 - DNA, 18 bp, Homo sapiens
tacacacatcactaaaaa

SEQ ID NO: 40424 - DNA, 18 bp, Homo sapiens
aaaacgccagttttgaga

SEQ ID NO: 40425 - DNA, 26 bp, Homo sapiens
gaattctaaaaaatcaatgttgtata

SEQ ID NO: 40426 - DNA, 22 bp, Homo sapiens
ttttagatgtaacttgtatctt

SEQ ID NO: 40427 - DNA, 21 bp, Homo sapiens
aaatactaaaaacaacttacc

SEQ ID NO: 40428 - DNA, 21 bp, Homo sapiens
tgggtgagtatttctttttca

SEQ ID NO: 40429 - DNA, 24 bp, Homo sapiens
cttaaatgtataaatttatcaaat

SEQ ID NO: 40430 - DNA, 19 bp, Homo sapiens
tcctccttttaccctatac

SEQ ID NO: 40431 - DNA, 24 bp, Homo sapiens
tatacagtttactcatcatttata

SEQ ID NO: 40432 - DNA, 18 bp, Homo sapiens
aagtgatgaagactgggg

SEQ ID NO: 40433 - DNA, 19 bp, Homo sapiens
taactggaataaaggcaaa

SEQ ID NO: 40434 - DNA, 16 bp, Homo sapiens
atgctgcccgtgtcac

SEQ ID NO: 40435 - DNA, 23 bp, Homo sapiens
aaatgaacatctttgtataaata

SEQ ID NO: 40436 - DNA, 17 bp, Homo sapiens
cccccttgacaaccaca

SEQ ID NO: 40437 - DNA, 28 bp, Homo sapiens
taagtttttacaaaatatttaataaaaa

SEQ ID NO: 40438 - DNA, 18 bp, Homo sapiens
tcatttcacaacacttca

SEQ ID NO: 40439 - DNA, 21 bp, Homo sapiens
gttcatttgcggggttcattc

SEQ ID NO: 40440 - DNA, 22 bp, Homo sapiens
aatgagggtatgtgccaaaacc

SEQ ID NO: 40441 - DNA, 26 bp, Homo sapiens
tttgagagattacttatatattaata

SEQ ID NO: 40442 - DNA, 17 bp, Homo sapiens
ctggccaaagttgccat

SEQ ID NO: 40443 - DNA, 21 bp, Homo sapiens
aatgacagtacacatagttgc

SEQ ID NO: 40444 - DNA, 17 bp, Homo sapiens
ttgcaagagaatttgca

SEQ ID NO: 40445 - DNA, 24 bp, Homo sapiens
aatgttatcaaattatggaaaaga

SEQ ID NO: 40446 - DNA, 16 bp, Homo sapiens
tcatccgtgatcccgc

SEQ ID NO: 40447 - DNA, 18 bp, Homo sapiens
tgacttcatcagcttcag

SEQ ID NO: 40448 - DNA, 18 bp, Homo sapiens
gtaacagcactgaaaaat

SEQ ID NO: 40449 - DNA, 20 bp, Homo sapiens
aaagttgggtcttctgggcc

SEQ ID NO: 40450 - DNA, 24 bp, Homo sapiens
aaataataatttttaagtattcag

SEQ ID NO: 40451 - DNA, 18 bp, Homo sapiens
attgtaacaccattgctc

SEQ ID NO: 40452 - DNA, 21 bp, Homo sapiens
tttctaaattttccacaatga

SEQ ID NO: 40453 - DNA, 22 bp, Homo sapiens
ttacaaaaagttcttcgcaaag

SEQ ID NO: 40454 - DNA, 18 bp, Homo sapiens
cgtgacaaagccaaagga

SEQ ID NO: 40455 - DNA, 21 bp, Homo sapiens
tcctattttaaaggtctctga

SEQ ID NO: 40456 - DNA, 23 bp, Homo sapiens
ctaataagagaaaacaggaaggt

SEQ ID NO: 40457 - DNA, 24 bp, Homo sapiens
aaatgattgataagatatgtgtat

SEQ ID NO: 40458 - DNA, 21 bp, Homo sapiens
ttaaaaatatacaagtgatgt

SEQ ID NO: 40459 - DNA, 16 bp, Homo sapiens
ggcacctcttgtcctt

SEQ ID NO: 40460 - DNA, 19 bp, Homo sapiens
ttactttccaaaaaatgga

SEQ ID NO: 40461 - DNA, 20 bp, Homo sapiens
gagagacttacattttccaa

SEQ ID NO: 40462 - DNA, 16 bp, Homo sapiens
ctcctgttgccttgaa

SEQ ID NO: 40463 - DNA, 19 bp, Homo sapiens
tctcaactggatatgtagg

SEQ ID NO: 40464 - DNA, 25 bp, Homo sapiens
taaaacaattgtattagtgatttca

SEQ ID NO: 40465 - DNA, 19 bp, Homo sapiens
tgtttaagtttgaatatgc

SEQ ID NO: 40466 - DNA, 18 bp, Homo sapiens
aggttggagcaggatgga

SEQ ID NO: 40467 - DNA, 22 bp, Homo sapiens
tcttttgtcttacaatagctcc

SEQ ID NO: 40468 - DNA, 22 bp, Homo sapiens
gagttagaatccctttttttct

SEQ ID NO: 40469 - DNA, 17 bp, Homo sapiens
tctcaaagtcacagatc

SEQ ID NO: 40470 - DNA, 21 bp, Homo sapiens
catcttactttctgtctctca

SEQ ID NO: 40471 - DNA, 16 bp, Homo sapiens
agggctaagtgacggg

SEQ ID NO: 40472 - DNA, 24 bp, Homo sapiens
cagtacgctgggagcggactcttg

SEQ ID NO: 40473 - DNA, 19 bp, Homo sapiens
acactacagttaacataga

SEQ ID NO: 40474 - DNA, 20 bp, Homo sapiens
ggcagtcaaggctaactgga

SEQ ID NO: 40475 - DNA, 19 bp, Homo sapiens
tctaatacctactagagca

SEQ ID NO: 40476 - DNA, 18 bp, Homo sapiens
ccttcaatagcctgacat

SEQ ID NO: 40477 - DNA, 18 bp, Homo sapiens
ctcctccttctgaatcta

SEQ ID NO: 40478 - DNA, 21 bp, Homo sapiens
caggtttgctgaatgttatag

SEQ ID NO: 40479 - DNA, 18 bp, Homo sapiens
tcccacttacaaatcctg

SEQ ID NO: 40480 - DNA, 22 bp, Homo sapiens
tctttaacaaagctttattttt

SEQ ID NO: 40481 - DNA, 19 bp, Homo sapiens
ggaagaaagcagggaggga

SEQ ID NO: 40482 - DNA, 24 bp, Homo sapiens
taattgaagttctgagtaaaatag

SEQ ID NO: 40483 - DNA, 17 bp, Homo sapiens
agagactgaaagaaagt

SEQ ID NO: 40484 - DNA, 23 bp, Homo sapiens
gtcgtgcaacgtctacagcaaca

SEQ ID NO: 40485 - DNA, 24 bp, Homo sapiens
acattacctaattagtttctatta

SEQ ID NO: 40486 - DNA, 19 bp, Homo sapiens
tccagttccgtataagcat

SEQ ID NO: 40487 - DNA, 22 bp, Homo sapiens
cactaacattctagtcacatct

SEQ ID NO: 40488 - DNA, 22 bp, Homo sapiens
aaatcttttggatccttgattg

SEQ ID NO: 40489 - DNA, 25 bp, Homo sapiens
ttttgaaaagttatcaatgaaataa

SEQ ID NO: 40490 - DNA, 19 bp, Homo sapiens
tgacctatgataactccga

SEQ ID NO: 40491 - DNA, 21 bp, Homo sapiens
ggccagaaactccctccattt

SEQ ID NO: 40492 - DNA, 20 bp, Homo sapiens
ttgcaaagttgattgaaagt

SEQ ID NO: 40493 - DNA, 16 bp, Homo sapiens
ggagtgggagcgtcaa

SEQ ID NO: 40494 - DNA, 23 bp, Homo sapiens
taatgaataatatttacagaaat

SEQ ID NO: 40495 - DNA, 17 bp, Homo sapiens
ctcctgtttgcccacct

SEQ ID NO: 40496 - DNA, 28 bp, Homo sapiens
ctataaataattatataaatatatatac

SEQ ID NO: 40497 - DNA, 17 bp, Homo sapiens
agcagaaattcctggac

SEQ ID NO: 40498 - DNA, 25 bp, Homo sapiens
ggattgattatttttcaatcacatg

SEQ ID NO: 40499 - DNA, 18 bp, Homo sapiens
gctctgggaagtggttta

SEQ ID NO: 40500 - DNA, 16 bp, Homo sapiens
tgagcctgtggatggt

SEQ ID NO: 40501 - DNA, 21 bp, Homo sapiens
ttaaaaggttaatctggaaat

SEQ ID NO: 40502 - DNA, 20 bp, Homo sapiens
agaacctgtggagcaagaaa

SEQ ID NO: 40503 - DNA, 25 bp, Homo sapiens
ataacaatttgtgatatgtttcatt

SEQ ID NO: 40504 - DNA, 21 bp, Homo sapiens
tcatggagagcagtacttaga

SEQ ID NO: 40505 - DNA, 19 bp, Homo sapiens
accaaaacagatactagtt

SEQ ID NO: 40506 - DNA, 19 bp, Homo sapiens
ttctccacatcctctgcag

SEQ ID NO: 40507 - DNA, 18 bp, Homo sapiens
acaccggatcctttatct

SEQ ID NO: 40508 - DNA, 16 bp, Homo sapiens
tgctgagcttacagtg

SEQ ID NO: 40509 - DNA, 24 bp, Homo sapiens
caaagcctatcaatctaacaatat

SEQ ID NO: 40510 - DNA, 19 bp, Homo sapiens
ttggtttttaagacactgt

SEQ ID NO: 40511 - DNA, 18 bp, Homo sapiens
ggaagacaaatactaact

SEQ ID NO: 40512 - DNA, 19 bp, Homo sapiens
gcagttgttgctgatgtcc

SEQ ID NO: 40513 - DNA, 19 bp, Homo sapiens
cccctccttctttattttt

SEQ ID NO: 40514 - DNA, 19 bp, Homo sapiens
tgtaatccaaacttggaca

SEQ ID NO: 40515 - DNA, 18 bp, Homo sapiens
gccaacaagaaagagaga

SEQ ID NO: 40516 - DNA, 23 bp, Homo sapiens
attttgtttttgaaaccttgaca

SEQ ID NO: 40517 - DNA, 18 bp, Homo sapiens
gtcatggcttaccttgac

SEQ ID NO: 40518 - DNA, 24 bp, Homo sapiens
gtaacttcttttattttttctttt

SEQ ID NO: 40519 - DNA, 18 bp, Homo sapiens
catgctgttcaagtctca

SEQ ID NO: 40520 - DNA, 23 bp, Homo sapiens
gaaggaacttatatgccacaatc

SEQ ID NO: 40521 - DNA, 16 bp, Homo sapiens
gggtggcagatgtata

SEQ ID NO: 40522 - DNA, 17 bp, Homo sapiens
catcagacaaagtcaag

SEQ ID NO: 40523 - DNA, 27 bp, Homo sapiens
ggagttatgaaattttaaatatcatta

SEQ ID NO: 40524 - DNA, 17 bp, Homo sapiens
tctgtaagtacagcatc

SEQ ID NO: 40525 - DNA, 19 bp, Homo sapiens
gcagagtttattgtattga

SEQ ID NO: 40526 - DNA, 17 bp, Homo sapiens
gtcatcaaccaggtgga

SEQ ID NO: 40527 - DNA, 25 bp, Homo sapiens
taatgataatttgtatttaagattt

SEQ ID NO: 40528 - DNA, 23 bp, Homo sapiens
tattcattatgcattagatgcat

SEQ ID NO: 40529 - DNA, 16 bp, Homo sapiens
atagacctcctgatgc

SEQ ID NO: 40530 - DNA, 16 bp, Homo sapiens
cgtgcaatcacaggaa

SEQ ID NO: 40531 - DNA, 23 bp, Homo sapiens
aaacatttcattataggtaatct

SEQ ID NO: 40532 - DNA, 20 bp, Homo sapiens
atcaatgtgtaagggattcc

SEQ ID NO: 40533 - DNA, 20 bp, Homo sapiens
tcaggtacattatgatacaa

SEQ ID NO: 40534 - DNA, 25 bp, Homo sapiens
taatatttttcattgatacatatta

SEQ ID NO: 40535 - DNA, 23 bp, Homo sapiens
gtattctaacaaaacactgagtt

SEQ ID NO: 40536 - DNA, 20 bp, Homo sapiens
ctactcaaactaccagtcat

SEQ ID NO: 40537 - DNA, 17 bp, Homo sapiens
gtaccgcctcagtggag

SEQ ID NO: 40538 - DNA, 19 bp, Homo sapiens
tcctacctttccatatcct

SEQ ID NO: 40539 - DNA, 22 bp, Homo sapiens
tccaaatgtacataatccatgt

SEQ ID NO: 40540 - DNA, 23 bp, Homo sapiens
aaaatagatggtataattcctgc

SEQ ID NO: 40541 - DNA, 18 bp, Homo sapiens
gccttgaatcttgacaca

SEQ ID NO: 40542 - DNA, 24 bp, Homo sapiens
tacacttgatttttaaactttaaa

SEQ ID NO: 40543 - DNA, 22 bp, Homo sapiens
aaagatagaaaaaggaagtaat

SEQ ID NO: 40544 - DNA, 18 bp, Homo sapiens
ttttgacaagcccatatt

SEQ ID NO: 40545 - DNA, 21 bp, Homo sapiens
taaaaatgtacattgctgtag

SEQ ID NO: 40546 - DNA, 21 bp, Homo sapiens
gttacagcagtttgcagataa

SEQ ID NO: 40547 - DNA, 25 bp, Homo sapiens
taattttatcatattatacttaggt

SEQ ID NO: 40548 - DNA, 19 bp, Homo sapiens
cttccacatctcagtttgt

SEQ ID NO: 40549 - DNA, 19 bp, Homo sapiens
tttttcttttgtgctctct

SEQ ID NO: 40550 - DNA, 17 bp, Homo sapiens
gaagggtgaaaaagcaa

SEQ ID NO: 40551 - DNA, 22 bp, Homo sapiens
aagagtttccttttaaaacatt

SEQ ID NO: 40552 - DNA, 22 bp, Homo sapiens
ctatccatagtactaaccaaaa

SEQ ID NO: 40553 - DNA, 19 bp, Homo sapiens
atccaggacaaactctaca

SEQ ID NO: 40554 - DNA, 16 bp, Homo sapiens
caccagacaagctgta

SEQ ID NO: 40555 - DNA, 19 bp, Homo sapiens
atgtttgttcatcttgaca

SEQ ID NO: 40556 - DNA, 18 bp, Homo sapiens
gatccacatatgcatttg

SEQ ID NO: 40557 - DNA, 18 bp, Homo sapiens
tctttttcatatgaggca

SEQ ID NO: 40558 - DNA, 25 bp, Homo sapiens
atactaatttttataacctacctca

SEQ ID NO: 40559 - DNA, 21 bp, Homo sapiens
gtgaaattacacttccattgt

SEQ ID NO: 40560 - DNA, 19 bp, Homo sapiens
agcctaaccactcttaaag

SEQ ID NO: 40561 - DNA, 17 bp, Homo sapiens
gaaactggagacattgt

SEQ ID NO: 40562 - DNA, 22 bp, Homo sapiens
tgaattaatgtttttcacttca

SEQ ID NO: 40563 - DNA, 19 bp, Homo sapiens
acttcagctaagacaccct

SEQ ID NO: 40564 - DNA, 24 bp, Homo sapiens
tgaggttctgagtgatgtatacaa

SEQ ID NO: 40565 - DNA, 18 bp, Homo sapiens
taggcggcgtcctatttc

SEQ ID NO: 40566 - DNA, 24 bp, Homo sapiens
ctgacttatgtacagagttttaaa

SEQ ID NO: 40567 - DNA, 17 bp, Homo sapiens
tggttatatgccactca

SEQ ID NO: 40568 - DNA, 22 bp, Homo sapiens
tgagttatttttacagaacttt

SEQ ID NO: 40569 - DNA, 29 bp, Homo sapiens
aagaattaccttagaatattataaaatca

SEQ ID NO: 40570 - DNA, 17 bp, Homo sapiens
acctttgtatttgagga

SEQ ID NO: 40571 - DNA, 17 bp, Homo sapiens
tacctaccttcaaaggt

SEQ ID NO: 40572 - DNA, 23 bp, Homo sapiens
aagaaagtaaatgctgtatttga

SEQ ID NO: 40573 - DNA, 23 bp, Homo sapiens
ttggacattcccaaacctattca

SEQ ID NO: 40574 - DNA, 24 bp, Homo sapiens
attttgctttttttctaaatgaca

SEQ ID NO: 40575 - DNA, 16 bp, Homo sapiens
ggtacacttttccaga

SEQ ID NO: 40576 - DNA, 24 bp, Homo sapiens
tgtgtagaataagtgccacattaa

SEQ ID NO: 40577 - DNA, 17 bp, Homo sapiens
accacctccatgaaatc

SEQ ID NO: 40578 - DNA, 22 bp, Homo sapiens
tttaccctcattttgttggaga

SEQ ID NO: 40579 - DNA, 25 bp, Homo sapiens
taaaacaatgaataaatgaacattt

SEQ ID NO: 40580 - DNA, 18 bp, Homo sapiens
attgacctgaaaagtggt

SEQ ID NO: 40581 - DNA, 20 bp, Homo sapiens
tataaatcagaatttgggca

SEQ ID NO: 40582 - DNA, 21 bp, Homo sapiens
aatcatactttcagatgaaga

SEQ ID NO: 40583 - DNA, 17 bp, Homo sapiens
tcaaccagagtatcagt

SEQ ID NO: 40584 - DNA, 21 bp, Homo sapiens
aaaaatgtgctatctgtagtt

SEQ ID NO: 40585 - DNA, 18 bp, Homo sapiens
gctcagcatgatgttccc

SEQ ID NO: 40586 - DNA, 24 bp, Homo sapiens
attattagctcaattgtattcagt

SEQ ID NO: 40587 - DNA, 16 bp, Homo sapiens
agtgtagtgtgccctt

SEQ ID NO: 40588 - DNA, 17 bp, Homo sapiens
catggtaacagttggca

SEQ ID NO: 40589 - DNA, 21 bp, Homo sapiens
cacttttgcagaataatcaag

SEQ ID NO: 40590 - DNA, 21 bp, Homo sapiens
tagtggcaggctgaaggccag

SEQ ID NO: 40591 - DNA, 20 bp, Homo sapiens
tctgcagttatctgatatct

SEQ ID NO: 40592 - DNA, 17 bp, Homo sapiens
gccaagctctgaagggc

SEQ ID NO: 40593 - DNA, 20 bp, Homo sapiens
caggaccaaggcggcggtgt

SEQ ID NO: 40594 - DNA, 23 bp, Homo sapiens
ggcgctggaagggcccccactcg

SEQ ID NO: 40595 - DNA, 18 bp, Homo sapiens
cctgctgcctggcttgcc

SEQ ID NO: 40596 - DNA, 22 bp, Homo sapiens
cggaggacaggccggtgaagcc

SEQ ID NO: 40597 - DNA, 22 bp, Homo sapiens
cgccgcgttccccgaccccagg

SEQ ID NO: 40598 - DNA, 16 bp, Homo sapiens
cgcggcgtccggcacc

SEQ ID NO: 40599 - DNA, 24 bp, Homo sapiens
cgacgaggtgaccgccttcctggg

SEQ ID NO: 40600 - DNA, 24 bp, Homo sapiens
cagctgtggggcacctcgcggccg

SEQ ID NO: 40601 - DNA, 24 bp, Homo sapiens
cctgctcagcgccagcatcatccc

SEQ ID NO: 40602 - DNA, 23 bp, Homo sapiens
cggctccagcccaagcgccgaga

SEQ ID NO: 40603 - DNA, 23 bp, Homo sapiens
gaccccggagcaccgctgccggg

SEQ ID NO: 40604 - DNA, 24 bp, Homo sapiens
aactcccagccatccagacagctc

SEQ ID NO: 40605 - DNA, 23 bp, Homo sapiens
accacactgtcccactgcggctg

SEQ ID NO: 40606 - DNA, 16 bp, Homo sapiens
ggggccggcacccacc

SEQ ID NO: 40607 - DNA, 16 bp, Homo sapiens
ccatcgccaacttctc

SEQ ID NO: 40608 - DNA, 23 bp, Homo sapiens
ctgggagagaggagctcgggttc

SEQ ID NO: 40609 - DNA, 24 bp, Homo sapiens
cctggggcagctggagcaggagag

SEQ ID NO: 40610 - DNA, 21 bp, Homo sapiens
gagggtctccatcgctagggt

SEQ ID NO: 40611 - DNA, 21 bp, Homo sapiens
gtccaccattgtgaccgaggt

SEQ ID NO: 40612 - DNA, 19 bp, Homo sapiens
atggcctgaaccccactga

SEQ ID NO: 40613 - DNA, 21 bp, Homo sapiens
cagagagcaggcttctttccc

SEQ ID NO: 40614 - DNA, 19 bp, Homo sapiens
tcagatttttaggagcaag

SEQ ID NO: 40615 - DNA, 20 bp, Homo sapiens
cccacacgctctgagtgtga

SEQ ID NO: 40616 - DNA, 17 bp, Homo sapiens
cacttactctctgcctg

SEQ ID NO: 40617 - DNA, 20 bp, Homo sapiens
cacttctttttaaaaggttt

SEQ ID NO: 40618 - DNA, 22 bp, Homo sapiens
acaatgctatgaaaaacaggat

SEQ ID NO: 40619 - DNA, 20 bp, Homo sapiens
gtcgtcctcacacaccaggt

SEQ ID NO: 40620 - DNA, 18 bp, Homo sapiens
gactaagtgagttcacac

SEQ ID NO: 40621 - DNA, 16 bp, Homo sapiens
aaatgaaggagcccaa

SEQ ID NO: 40622 - DNA, 20 bp, Homo sapiens
ttccaggatgcctttgcttt

SEQ ID NO: 40623 - DNA, 16 bp, Homo sapiens
gaggtcccctggtgct

SEQ ID NO: 40624 - DNA, 16 bp, Homo sapiens
tcatcttgcagtggaa

SEQ ID NO: 40625 - DNA, 17 bp, Homo sapiens
gcgctgaaagaatacta

SEQ ID NO: 40626 - DNA, 17 bp, Homo sapiens
tcttcgtgggtgtgctg

SEQ ID NO: 40627 - DNA, 16 bp, Homo sapiens
actaggcatggagtct

SEQ ID NO: 40628 - DNA, 18 bp, Homo sapiens
catggtcacgaacagcac

SEQ ID NO: 40629 - DNA, 19 bp, Homo sapiens
agtattctggcaacactgt

SEQ ID NO: 40630 - DNA, 18 bp, Homo sapiens
gcacgacaaacatctcaa

SEQ ID NO: 40631 - DNA, 23 bp, Homo sapiens
gtggagcccattcctgctgccct

SEQ ID NO: 40632 - DNA, 16 bp, Homo sapiens
ggacaaatgctgccac

SEQ ID NO: 40633 - DNA, 19 bp, Homo sapiens
caggtttggccggaagaat

SEQ ID NO: 40634 - DNA, 20 bp, Homo sapiens
aaaggtaggtgatgggatga

SEQ ID NO: 40635 - DNA, 22 bp, Homo sapiens
gcagatcttctcgaagaatttt

SEQ ID NO: 40636 - DNA, 20 bp, Homo sapiens
gctagttttgttagaaaccc

SEQ ID NO: 40637 - DNA, 18 bp, Homo sapiens
ggccagatctccaactat

SEQ ID NO: 40638 - DNA, 21 bp, Homo sapiens
acagtcagacaggaggggttc

SEQ ID NO: 40639 - DNA, 21 bp, Homo sapiens
cacactcctaacgtagagaat

SEQ ID NO: 40640 - DNA, 22 bp, Homo sapiens
gagttctcgctgttttcttgtc

SEQ ID NO: 40641 - DNA, 18 bp, Homo sapiens
tctcggatgaagtaagca

SEQ ID NO: 40642 - DNA, 24 bp, Homo sapiens
gaaggaacccaaattaaactgcta

SEQ ID NO: 40643 - DNA, 16 bp, Homo sapiens
caccaccagagtgcca

SEQ ID NO: 40644 - DNA, 23 bp, Homo sapiens
aagtcagttcgtataatattctc

SEQ ID NO: 40645 - DNA, 16 bp, Homo sapiens
gtgaaggccagacaga

SEQ ID NO: 40646 - DNA, 16 bp, Homo sapiens
ggtgctgccactgttt

SEQ ID NO: 40647 - DNA, 23 bp, Homo sapiens
aatttataatctatgcttcctgt

SEQ ID NO: 40648 - DNA, 16 bp, Homo sapiens
cgatgccgggggtgct

SEQ ID NO: 40649 - DNA, 23 bp, Homo sapiens
atccaccccaggttattgctgcg

SEQ ID NO: 40650 - DNA, 16 bp, Homo sapiens
tcgtccctgagagatg

SEQ ID NO: 40651 - DNA, 22 bp, Homo sapiens
acattccacaagctctggttct

SEQ ID NO: 40652 - DNA, 18 bp, Homo sapiens
tagtggaaggcacaacaa

SEQ ID NO: 40653 - DNA, 24 bp, Homo sapiens
ctgtgggtctgctgttggcaggga

SEQ ID NO: 40654 - DNA, 16 bp, Homo sapiens
cagtctgtccctctca

SEQ ID NO: 40655 - DNA, 24 bp, Homo sapiens
tcatccctgagtccccccgatggc

SEQ ID NO: 40656 - DNA, 22 bp, Homo sapiens
gagagggctgggctgctgtgag

SEQ ID NO: 40657 - DNA, 21 bp, Homo sapiens
aaggctgccaaagccaatggg

SEQ ID NO: 40658 - DNA, 16 bp, Homo sapiens
gggggtggggagtggg

SEQ ID NO: 40659 - DNA, 16 bp, Homo sapiens
gggactgctgcttctt

SEQ ID NO: 40660 - DNA, 21 bp, Homo sapiens
gtaacactccccgacgctgag

SEQ ID NO: 40661 - DNA, 19 bp, Homo sapiens
gcattatggacatgatggt

SEQ ID NO: 40662 - DNA, 24 bp, Homo sapiens
ttattgtgtgctctgagtctctga

SEQ ID NO: 40663 - DNA, 17 bp, Homo sapiens
cccaatggccacttcaa

SEQ ID NO: 40664 - DNA, 20 bp, Homo sapiens
gttacaagacctaagttcca

SEQ ID NO: 40665 - DNA, 18 bp, Homo sapiens
tttcactctctgatgaca

SEQ ID NO: 40666 - DNA, 19 bp, Homo sapiens
aatatccggatggtcacca

SEQ ID NO: 40667 - DNA, 26 bp, Homo sapiens
gaaaattatcttttgatctatgaagt

SEQ ID NO: 40668 - DNA, 22 bp, Homo sapiens
taggagtatcaagcgaaagccc

SEQ ID NO: 40669 - DNA, 21 bp, Homo sapiens
tagtctctgcttaaagatggt

SEQ ID NO: 40670 - DNA, 16 bp, Homo sapiens
gctgggacttcaacca

SEQ ID NO: 40671 - DNA, 24 bp, Homo sapiens
tacaggttgggaaagatgtggata

SEQ ID NO: 40672 - DNA, 16 bp, Homo sapiens
agtggccatggaatag

SEQ ID NO: 40673 - DNA, 23 bp, Homo sapiens
tgaccatatcagtgggctatttt

SEQ ID NO: 40674 - DNA, 17 bp, Homo sapiens
gtccctacctgggggta

SEQ ID NO: 40675 - DNA, 19 bp, Homo sapiens
tgtgaactgcttcctttca

SEQ ID NO: 40676 - DNA, 17 bp, Homo sapiens
gagacagcctggtagac

SEQ ID NO: 40677 - DNA, 20 bp, Homo sapiens
gctgctgcaatatttgcccc

SEQ ID NO: 40678 - DNA, 21 bp, Homo sapiens
ggccaagaatgtatataagca

SEQ ID NO: 40679 - DNA, 21 bp, Homo sapiens
tccttctcttcatgcagctgg

SEQ ID NO: 40680 - DNA, 16 bp, Homo sapiens
cagcaatcaatttgga

SEQ ID NO: 40681 - DNA, 18 bp, Homo sapiens
ttgcccaccatcaccagg

SEQ ID NO: 40682 - DNA, 23 bp, Homo sapiens
aggaagtgatagaaactgactcc

SEQ ID NO: 40683 - DNA, 16 bp, Homo sapiens
gggatacagctcggct

SEQ ID NO: 40684 - DNA, 24 bp, Homo sapiens
aatagctgcatgccatgggttggt

SEQ ID NO: 40685 - DNA, 17 bp, Homo sapiens
agacaggatgctgccca

SEQ ID NO: 40686 - DNA, 19 bp, Homo sapiens
tgtattatttggctacagt

SEQ ID NO: 40687 - DNA, 21 bp, Homo sapiens
acttccatcccgttgctctag

SEQ ID NO: 40688 - DNA, 22 bp, Homo sapiens
ttccatggtctacgtgtacaca

SEQ ID NO: 40689 - DNA, 19 bp, Homo sapiens
tatgaacttgttttcctgt

SEQ ID NO: 40690 - DNA, 24 bp, Homo sapiens
tgggagtcagctccacagcatccc

SEQ ID NO: 40691 - DNA, 16 bp, Homo sapiens
actgggacaagaaccc

SEQ ID NO: 40692 - DNA, 23 bp, Homo sapiens
ctctgggttctgaaacctgtcta

SEQ ID NO: 40693 - DNA, 16 bp, Homo sapiens
cagacttcccatgaga

SEQ ID NO: 40694 - DNA, 20 bp, Homo sapiens
tgagaccaagaaggaaagtg

SEQ ID NO: 40695 - DNA, 22 bp, Homo sapiens
gtgtctgggagtggggtaccga

SEQ ID NO: 40696 - DNA, 17 bp, Homo sapiens
gaccaagtctaactgca

SEQ ID NO: 40697 - DNA, 19 bp, Homo sapiens
tcaacactgacagaggagg

SEQ ID NO: 40698 - DNA, 23 bp, Homo sapiens
ctacgaccgcttcctgccctaca

SEQ ID NO: 40699 - DNA, 16 bp, Homo sapiens
ttgcgagtagctctat

SEQ ID NO: 40700 - DNA, 16 bp, Homo sapiens
tttctcccagagagct

SEQ ID NO: 40701 - DNA, 20 bp, Homo sapiens
agcaccttgccatttacaac

SEQ ID NO: 40702 - DNA, 21 bp, Homo sapiens
gagtttttctgtgtttcattc

SEQ ID NO: 40703 - DNA, 17 bp, Homo sapiens
actcagaggctagaaga

SEQ ID NO: 40704 - DNA, 18 bp, Homo sapiens
tgcttttaaggattgtgg

SEQ ID NO: 40705 - DNA, 20 bp, Homo sapiens
gatatcctcagttcttgttt

SEQ ID NO: 40706 - DNA, 18 bp, Homo sapiens
gcaagacagtctttcctc

SEQ ID NO: 40707 - DNA, 24 bp, Homo sapiens
actgacatatttttgcttgttttt

SEQ ID NO: 40708 - DNA, 16 bp, Homo sapiens
aaacagcaaaggcctt

SEQ ID NO: 40709 - DNA, 22 bp, Homo sapiens
tgttaaaagatggtcaagaaag

SEQ ID NO: 40710 - DNA, 19 bp, Homo sapiens
gccatatgtagcctctgag

SEQ ID NO: 40711 - DNA, 18 bp, Homo sapiens
cacatgctcatgcctatc

SEQ ID NO: 40712 - DNA, 20 bp, Homo sapiens
ccaagagctcattgatgaga

SEQ ID NO: 40713 - DNA, 21 bp, Homo sapiens
ttggaatcaggaattttgact

SEQ ID NO: 40714 - DNA, 16 bp, Homo sapiens
ccaacctaatccctcg

SEQ ID NO: 40715 - DNA, 18 bp, Homo sapiens
aagcaagaaaaaaatgct

SEQ ID NO: 40716 - DNA, 16 bp, Homo sapiens
acccagaaaccaatgc

SEQ ID NO: 40717 - DNA, 22 bp, Homo sapiens
catctctttcttccgcatctca

SEQ ID NO: 40718 - DNA, 18 bp, Homo sapiens
aagcacccccctggaggt

SEQ ID NO: 40719 - DNA, 24 bp, Homo sapiens
tcttttcataggggctcggtcgtc

SEQ ID NO: 40720 - DNA, 22 bp, Homo sapiens
caacgacattgacgtgttcatg

SEQ ID NO: 40721 - DNA, 23 bp, Homo sapiens
atggattttgtagggttcatcta

SEQ ID NO: 40722 - DNA, 17 bp, Homo sapiens
tgtacaacaacctcacc

SEQ ID NO: 40723 - DNA, 17 bp, Homo sapiens
ggaggcattgagaggga

SEQ ID NO: 40724 - DNA, 23 bp, Homo sapiens
aagtcttgtcccgctattgctcc

SEQ ID NO: 40725 - DNA, 21 bp, Homo sapiens
gtgggcactgggagggtaggc

SEQ ID NO: 40726 - DNA, 19 bp, Homo sapiens
tttctttttcagagggcca

SEQ ID NO: 40727 - DNA, 21 bp, Homo sapiens
tggctctatcctgccctccac

SEQ ID NO: 40728 - DNA, 21 bp, Homo sapiens
aagctgcaccctgtgggggaa

SEQ ID NO: 40729 - DNA, 18 bp, Homo sapiens
gcttgttgtagcctggga

SEQ ID NO: 40730 - DNA, 21 bp, Homo sapiens
ctttctgcctgggctcacttg

SEQ ID NO: 40731 - DNA, 22 bp, Homo sapiens
tattgacttgtcgccttggcag

SEQ ID NO: 40732 - DNA, 16 bp, Homo sapiens
ccggagcggacgccga

SEQ ID NO: 40733 - DNA, 24 bp, Homo sapiens
ggctgtcccgcccggaccccgact

SEQ ID NO: 40734 - DNA, 16 bp, Homo sapiens
ccgcagagtcagggga

SEQ ID NO: 40735 - DNA, 18 bp, Homo sapiens
cctctaggaaacatctca

SEQ ID NO: 40736 - DNA, 22 bp, Homo sapiens
agctccacagggcgcagggcat

SEQ ID NO: 40737 - DNA, 20 bp, Homo sapiens
gagcctctctgcctggggtg

SEQ ID NO: 40738 - DNA, 24 bp, Homo sapiens
acttgacgagatcttccggatggg

SEQ ID NO: 40739 - DNA, 24 bp, Homo sapiens
accctttgtccgcccggggaggcg

SEQ ID NO: 40740 - DNA, 23 bp, Homo sapiens
ctcttcttggagggatctgagat

SEQ ID NO: 40741 - DNA, 24 bp, Homo sapiens
gagcgtcctgagacagcgaggacc

SEQ ID NO: 40742 - DNA, 24 bp, Homo sapiens
tcacagatgttgagtccagctact

SEQ ID NO: 40743 - DNA, 19 bp, Homo sapiens
ccaggagcggccagtgctc

SEQ ID NO: 40744 - DNA, 24 bp, Homo sapiens
tgacacccccgccctgggctgctg

SEQ ID NO: 40745 - DNA, 16 bp, Homo sapiens
ggtgaaccctgcctgg

SEQ ID NO: 40746 - DNA, 21 bp, Homo sapiens
gacaggggccaagcctgcagg

SEQ ID NO: 40747 - DNA, 23 bp, Homo sapiens
gcgcatgggtcatgtgcctgggg

SEQ ID NO: 40748 - DNA, 23 bp, Homo sapiens
aagctgtcgtccgcggtgcggca

SEQ ID NO: 40749 - DNA, 24 bp, Homo sapiens
gagggtggggcaaggcaacctgaa

SEQ ID NO: 40750 - DNA, 24 bp, Homo sapiens
ctcgctgctgcaggcccggcggct

SEQ ID NO: 40751 - DNA, 24 bp, Homo sapiens
gggcctgcagccgcgagctctgcc

SEQ ID NO: 40752 - DNA, 24 bp, Homo sapiens
acggagcgggtggtggtgttgtgt

SEQ ID NO: 40753 - DNA, 16 bp, Homo sapiens
cccgctccgtgcacgc

SEQ ID NO: 40754 - DNA, 23 bp, Homo sapiens
ccaccctcagttttggagctgag

SEQ ID NO: 40755 - DNA, 21 bp, Homo sapiens
cagacctgtgggcggacaggc

SEQ ID NO: 40756 - DNA, 23 bp, Homo sapiens
cccggctcgccaacgaccagggc

SEQ ID NO: 40757 - DNA, 16 bp, Homo sapiens
ccccgctctgccctgg

SEQ ID NO: 40758 - DNA, 20 bp, Homo sapiens
gtcattgcagtgcttggcgt

SEQ ID NO: 40759 - DNA, 21 bp, Homo sapiens
ggctgcagggagcggcgctgg

SEQ ID NO: 40760 - DNA, 24 bp, Homo sapiens
tgaatgcagcgcacggagcgcacc

SEQ ID NO: 40761 - DNA, 23 bp, Homo sapiens
gaataagagaaggtgcaccgggg

SEQ ID NO: 40762 - DNA, 24 bp, Homo sapiens
gggtgcgccttctgccctgcagca

SEQ ID NO: 40763 - DNA, 16 bp, Homo sapiens
aaagccatccgcagag

SEQ ID NO: 40764 - DNA, 16 bp, Homo sapiens
ggatgatgccaggccc

SEQ ID NO: 40765 - DNA, 24 bp, Homo sapiens
agtatggctgccgccggaggctgg

SEQ ID NO: 40766 - DNA, 16 bp, Homo sapiens
ctgtctcctctagtgg

SEQ ID NO: 40767 - DNA, 21 bp, Homo sapiens
atgctgccccaccgacccccg

SEQ ID NO: 40768 - DNA, 16 bp, Homo sapiens
gggttgcacgctctgc

SEQ ID NO: 40769 - DNA, 21 bp, Homo sapiens
ggaaaacgaggccagcactgc

SEQ ID NO: 40770 - DNA, 19 bp, Homo sapiens
acggtgtaccatcttgtgg

SEQ ID NO: 40771 - DNA, 16 bp, Homo sapiens
gccagccgcaggctcg

SEQ ID NO: 40772 - DNA, 20 bp, Homo sapiens
cctgaagaagtggtctccgt

SEQ ID NO: 40773 - DNA, 19 bp, Homo sapiens
caaaggtccctgctgtggc

SEQ ID NO: 40774 - DNA, 24 bp, Homo sapiens
gactcactgaatgtcgacgacaac

SEQ ID NO: 40775 - DNA, 17 bp, Homo sapiens
ctaccttctcgtggtca

SEQ ID NO: 40776 - DNA, 17 bp, Homo sapiens
gtcatcccggtgggaga

SEQ ID NO: 40777 - DNA, 22 bp, Homo sapiens
cacctccgccacagggcttgga

SEQ ID NO: 40778 - DNA, 24 bp, Homo sapiens
ctggctggggaggaagcatggagg

SEQ ID NO: 40779 - DNA, 24 bp, Homo sapiens
cagagtcctcttccaggacgttgt

SEQ ID NO: 40780 - DNA, 17 bp, Homo sapiens
tgtaactgccatgaatg

SEQ ID NO: 40781 - DNA, 16 bp, Homo sapiens
gtacgtcagtgagacc

SEQ ID NO: 40782 - DNA, 16 bp, Homo sapiens
ctgcagaccatgggcc

SEQ ID NO: 40783 - DNA, 24 bp, Homo sapiens
aggccaaaggggccacgcagagtg

SEQ ID NO: 40784 - DNA, 21 bp, Homo sapiens
aaaaccttcattgccatgggc

SEQ ID NO: 40785 - DNA, 17 bp, Homo sapiens
cccagtggccacccgca

SEQ ID NO: 40786 - DNA, 24 bp, Homo sapiens
tcagccgtcaagaacctggagaca

SEQ ID NO: 40787 - DNA, 18 bp, Homo sapiens
gtgatggtgccgtggagg

SEQ ID NO: 40788 - DNA, 22 bp, Homo sapiens
agtgggcctgggtcctgctctt

SEQ ID NO: 40789 - DNA, 24 bp, Homo sapiens
tctctgtactcccactccacgccc

SEQ ID NO: 40790 - DNA, 16 bp, Homo sapiens
agagagacaaggggtc

SEQ ID NO: 40791 - DNA, 23 bp, Homo sapiens
tcattctcttcatttaagatgaa

SEQ ID NO: 40792 - DNA, 18 bp, Homo sapiens
gacacctgctcattcagg

SEQ ID NO: 40793 - DNA, 19 bp, Homo sapiens
gctcaggtcatggctgcac

SEQ ID NO: 40794 - DNA, 24 bp, Homo sapiens
tctgtgtctttccacatcaaaaaa

SEQ ID NO: 40795 - DNA, 21 bp, Homo sapiens
tcccagaggagccaggtcctg

SEQ ID NO: 40796 - DNA, 22 bp, Homo sapiens
caagagcgaggcccctccttgc

SEQ ID NO: 40797 - DNA, 23 bp, Homo sapiens
cagatggtggctggtggcgtcta

SEQ ID NO: 40798 - DNA, 18 bp, Homo sapiens
cctcaaagccagagaaat

SEQ ID NO: 40799 - DNA, 23 bp, Homo sapiens
atctcaaacatcttgatgtaacc

SEQ ID NO: 40800 - DNA, 23 bp, Homo sapiens
agtggtcaagggcacgttcacac

SEQ ID NO: 40801 - DNA, 23 bp, Homo sapiens
ctctccccctccccagaacagtc

SEQ ID NO: 40802 - DNA, 22 bp, Homo sapiens
tccagcaagcaggaagacaagt

SEQ ID NO: 40803 - DNA, 24 bp, Homo sapiens
tcagctgtccgggcatgagcctgc

SEQ ID NO: 40804 - DNA, 23 bp, Homo sapiens
gcaggacgtctcaagtgctcact

SEQ ID NO: 40805 - DNA, 17 bp, Homo sapiens
ccatgcttcttgggtga

SEQ ID NO: 40806 - DNA, 17 bp, Homo sapiens
ttgaggccaggtgttcg

SEQ ID NO: 40807 - DNA, 20 bp, Homo sapiens
ctccgcacacgccacacttg

SEQ ID NO: 40808 - DNA, 16 bp, Homo sapiens
gtggttcacgcctgta

SEQ ID NO: 40809 - DNA, 23 bp, Homo sapiens
gacatttgccaagagcctgccct

SEQ ID NO: 40810 - DNA, 16 bp, Homo sapiens
gacgcgctgctcctac

SEQ ID NO: 40811 - DNA, 21 bp, Homo sapiens
cacctcatgcatcttgccaat

SEQ ID NO: 40812 - DNA, 21 bp, Homo sapiens
agatgccacctgtactgcgag

SEQ ID NO: 40813 - DNA, 24 bp, Homo sapiens
cttgacacggtagccccccgtgcc

SEQ ID NO: 40814 - DNA, 21 bp, Homo sapiens
gggaagccatcagggctcctt

SEQ ID NO: 40815 - DNA, 21 bp, Homo sapiens
gaggctgaaggcgtccttgta

SEQ ID NO: 40816 - DNA, 24 bp, Homo sapiens
gagggtgggccacgtggggaccct

SEQ ID NO: 40817 - DNA, 22 bp, Homo sapiens
acaccacctccccggtctccct

SEQ ID NO: 40818 - DNA, 23 bp, Homo sapiens
acacagagacaggaagggggctg

SEQ ID NO: 40819 - DNA, 24 bp, Homo sapiens
tgggccagggcagccacaccagcc

SEQ ID NO: 40820 - DNA, 24 bp, Homo sapiens
agtgccgccagtgggacctgtact

SEQ ID NO: 40821 - DNA, 23 bp, Homo sapiens
agccttgccccatgcaggatcag

SEQ ID NO: 40822 - DNA, 24 bp, Homo sapiens
tccagctctgcagccgccaggact

SEQ ID NO: 40823 - DNA, 24 bp, Homo sapiens
tgagcccccactgatgcctcccag

SEQ ID NO: 40824 - DNA, 24 bp, Homo sapiens
cctttgctttctcctccagcccgg

SEQ ID NO: 40825 - DNA, 19 bp, Homo sapiens
ctgggcgtcgccgtgctcg

SEQ ID NO: 40826 - DNA, 24 bp, Homo sapiens
aaaaagatctcacaagggcacccg

SEQ ID NO: 40827 - DNA, 23 bp, Homo sapiens
ggaagtcagccagggagtcgggg

SEQ ID NO: 40828 - DNA, 17 bp, Homo sapiens
ttgctcagcagagctgc

SEQ ID NO: 40829 - DNA, 17 bp, Homo sapiens
cgagcaggtgcggcccc

SEQ ID NO: 40830 - DNA, 23 bp, Homo sapiens
ctcccaggtagggtgaggcaggc

SEQ ID NO: 40831 - DNA, 23 bp, Homo sapiens
ctcctgctcacgtacctgtggca

SEQ ID NO: 40832 - DNA, 22 bp, Homo sapiens
gtgtgcagccacagggccctcc

(The sequence listing continues in the following parts.)

What is claimed is:

1. A computer-implemented method for generating a report data structure for a genetic testing request that is received from an integrated client device, the computer-implemented method comprising:
contacting a sample from a subject with an oligonucleotide or primer set, said set comprising at least one oligonucleotide probe or primer pair, wherein the at least one oligonucleotide probe or primer pair is labelled and configured to bind to at least one nucleic acid sequence in the sample;
amplifying the at least one nucleic acid sequence in the sample so as to generate at least one amplification product;
sequencing the at least one amplification product using one or more next generation sequencing operations to generate library preparation product sequencing data;
transmitting the library preparation product sequencing data from the integrated client device to a genetic testing server;
identifying, based on the library preparation product sequencing data, a sequence data structure and a client identifier for the integrated client device;
storing the sequence data structure on an encrypted storage framework and in association with the client identifier;
extracting, from the sequence data structure, a) a raw sequence data object, and b) a sample data object;
generating a sample data structure comprising the raw sequence data object and the sample data object;
generating the report data structure based on the sample data structure; and
transmitting the report data structure from the genetic testing server to the integrated client device.

2. The computer-implemented method of claim 1, wherein the nucleic acid sequence comprises an exon, a splice-site, or a promoter.

3. The computer-implemented method of claim 1, wherein the raw sequence data object is a carrier testing raw sequence data object or a cancer testing raw sequence data object.

4. The computer-implemented method of claim 1, wherein the set comprises a padlock probe.

5. The computer-implemented method of claim 1, wherein the set comprises at least one oligonucleotide probe pair.

6. The computer-implemented method of claim 5, wherein the at least one oligonucleotide probe pair comprises at least one oligonucleotide probe pair selected from Table 1 or Table 2.

7. The computer-implemented method of claim 5, wherein the at least one oligonucleotide probe pair comprises at least 25% of all oligonucleotide pairs in Table 1 or Table 2.

8. The computer-implemented method of claim 5, wherein the at least one oligonucleotide probe pair comprises at least 50% of all oligonucleotide pairs in Table 1 or Table 2.

9. The computer-implemented method of claim 5, wherein the at least one oligonucleotide probe pair comprises at least 90% of all oligonucleotide pairs in Table 1 or Table 2.

10. The computer-implemented method of claim 1, further comprising, prior to generating a sample data structure, transmitting the raw sequence data object and the sample data object to a bioinformatics module of a genetic testing server.

11. A kit, comprising
i) an oligonucleotide or primer set, said set comprising at least one oligonucleotide probe or primer pair, wherein each oligonucleotide probe or primer pair is labelled and configured to amplify in an amplification reaction at least one nucleic acid sequence in a sample; and
ii) an apparatus configured to programmatically enable the analysis of library preparation product sequencing data, the apparatus comprising at least a processor, and a memory associated with the processor having computer coded instructions therein, with the computer coded instructions configured to, when executed by the processor, cause the apparatus to
a receive, from an integrated client device, am library preparation product sequencing data;
b identify, based on the library preparation product sequencing data, a sequence data structure and a client identifier for the integrated client device;
c store the sequence data structure on an encrypted storage framework and in association with the client identifier;
d extract, from the sequence data structure, a) a raw sequence data object, and b) a sample data object;
e generate a sample data structure comprising the raw sequence data object and the sample data object;
f generate a report data structure based on the sample data structure; and
g transmit the report data structure to the integrated client device.

12. The kit of claim 11, further comprising instructions for use.

13. The kit of claim 11, wherein the nucleic acid sequence comprises an exon, a splice-site, or a promoter.

14. The kit of claim 11, wherein the raw sequence data object is a carrier testing raw sequence data object or a cancer testing raw sequence data object.

15. The kit of claim 11, wherein the set comprises a padlock probe.

16. The kit of claim 11, wherein the set comprises at least one oligonucleotide probe pair.

17. The kit of claim 16, wherein the at least one oligonucleotide probe pair comprises at least one oligonucleotide probe pair selected from Table 1 or Table 2.

18. The kit of claim 16, wherein the at least one oligonucleotide probe pair comprises at least 25% of all oligonucleotide pairs in Table 1 or Table 2.

19. The kit of claim 16, wherein the at least one oligonucleotide probe pair comprises at least 50% of all oligonucleotide pairs in Table 1 or Table 2.

20. The kit of claim 16, wherein the at least one oligonucleotide probe pair comprises at least 90% of all oligonucleotide pairs in Table 1 or Table 2.
